(19) United States
(12) Patent Application Publication
(10) Pub. No.: US 2023/0227576 A1
(43) Pub. Date: Jul. 20, 2023

(54) RECEPTORS PROVIDING TARGETED COSTIMULATION FOR ADOPTIVE CELL THERAPY

(71) Applicants: Instil Bio (UK) Limited, Manchester (GB); Instil Bio, Inc., Dallas, TX (US)

(72) Inventors: John Bridgeman, Manchester (GB); Robert Hawkins, Manchester (GB); Ruben Rodriguez, Dallas, TX (US); Gray Kueberuwa, Manchester (GB); Milena Kalaitsidou, Manchester (GB); Michael Gavin King, West Yorkshire (GB)

(21) Appl. No.: 18/157,027

(22) Filed: Jan. 19, 2023

Related U.S. Application Data
(63) Continuation-in-part of application No. 17/807,109, filed on Jun. 15, 2022.
(60) Provisional application No. 63/301,340, filed on Jan. 20, 2022.

(51) Int. Cl. C07K 16/30; C07K 7/06; C07K 14/715; C07K 14/725; A61K 35/17; C12N 5/0783

(52) U.S. Cl. CPC C07K 16/3007; C07K 7/06; C07K 14/715; C07K 14/7051; C07K 16/30; A61K 35/17; C12N 5/0636; A61K 39/00

(57) ABSTRACT

The present invention relates to a chimeric costimulatory antigen receptor (CoStAR) useful in adoptive cell therapy (ACT), and cells comprising the CoStAR. The CoStAR can act as a modulator of cellular activity enhancing responses to defined antigens. The present invention also provides CoStAR proteins, nucleic acids encoding the CoStAR and therapeutic uses thereof.

### RELATED APPLICATIONS AND INCORPORATION BY REFERENCE

[0001] This application is a continuation in part to U.S. application Ser. No. 17/807,109 filed Jun. 15, 2022, entitled “RECEPTORS PROVIDING TARGETED COSTIMULATION FOR ADOPTIVE CELL THERAPY,” and both this and Ser. No. 17/807,109 claims priority to U.S. Prov. App. No. 63/301,340 filed Jan. 20, 2022, entitled “RECEPTORS PROVIDING TARGETED COSTIMULATION FOR ADOPTIVE CELL THERAPY,” each of which is incorporated by reference in its entirety.

[0002] Reference is made to U.S. provisional patent applications 63/211,042 and 63/211,046, filed Jun. 16, 2021.

[0003] Reference is made to GB patent application Serial No. 1900858.0, filed 22 Jan. 2019, U.S. patent application Ser. No. 62/951,770, filed 20 Dec. 2019, International application PCT/GB2020/050120, filed 20 Jan. 2020, and U.S. provisional patent applications 63/053,494 and 63/053,498, filed Jul. 17, 2020.

[0004] The foregoing applications, and all documents cited therein or during their prosecution (“appln cited documents”) and all documents cited or referenced in the appln cited documents, and all documents cited or referenced herein (“herein cited documents”), and all documents cited or referenced in herein cited documents, together with any manufacturer's instructions, descriptions, product specifications, and product sheets for any products mentioned herein or in any document incorporated by reference herein, are hereby incorporated herein by reference, and may be employed in the practice of the invention. More specifically, all referenced documents are incorporated by reference to the same extent as if each individual document was specifically and individually indicated to be incorporated by reference.

### REFERENCE TO SEQUENCE LISTING

[0005] The present application is being filed along with a Sequence Listing in electronic format. The Sequence Listing is provided as a file entitled INSTB.008A.xml created on Jan. 18, 2023 which is 37,111,282 bytes in size. The information in the electronic format of the Sequence Listing is incorporated herein by reference in its entirety.

### FIELD OF THE INVENTION

[0006] The present invention relates to variants of a TRAF domain.

### BACKGROUND OF THE INVENTION

[0007] Adoptive cell therapy (ACT) using autologous T-cells to mediate cancer regression has shown much promise in early clinical trials. Several general approaches have been taken such as the use of naturally occurring tumor reactive or tumor infiltrating lymphocytes (TILs) expanded ex vivo. Additionally, T-cells may be genetically modified to retarget them towards defined tumor antigens. This can be done via the gene transfer of peptide (p)-major histocompatibility complex (MHC) specific T-cell Receptors (TCRs) or synthetic fusions between tumor specific single chain antibody fragment (scFv) and T-cell signaling domains (e.g. CD3ζ), the latter being termed chimeric antigen receptors (CARs).

[0008] TIL and TCR transfer has proven particularly good when targeting melanoma (Rosenberg et al. 2011; Morgan 2006), whereas CAR therapy has shown much promise in the treatment of certain B-cell malignancies (Grupp et al. 2013).

[0009] Costimulatory signals are useful to achieve robust CAR T cell expansion, function, persistence and antitumor activity. The success of CAR therapy in leukemia has been partly attributed to the incorporation of costimulatory domains (e.g. CD28 or CD137) into the CAR construct, signals from which synergize with the signal provided by CD3ζ to enhance anti-tumor activity. The basis of this observation relates to the classical signal 1/signal 2 paradigm of T-cell activation. Here signal 1, provided by the TCR complex, synergizes with signal 2 provided by costimulatory receptors such as CD28, CD137 or CD134 to permit the cells to undergo clonal expansion, IL2 production and long term survival without the activation induced cell death (AICD) associated with signal 1 alone. Furthermore the involvement of signal 2 enhances the signal generated through signal 1 allowing the cells to respond better to low avidity interactions such as those encountered during anti-tumor responses.

[0010] Targeted costimulation will have beneficial effects for non-CAR-based T-cell therapies. For example, incorporating costimulatory domains into a chimeric TCR has been shown to enhance responses of T-cells towards pMHC (Govers 2014). Further, there has been a move towards generating chimeric costimulatory receptors which separate the signal 2 generating costimulatory domain onto a separate receptor from the signal 1 generating CD3ζ (or other) moiety which can also reduce the chances of tonic signalling (Fisher et al 2019).

[0011] While tumor infiltrating lymphocytes (TILs) utilize their endogenous TCRs to mediate tumor recognition, it has not been possible to engineer the endogenous TCR. Thus TIL are subject to substantial limitations as tumor cells express very few costimulatory ligands. The ability to induce targeted costimulation of TIL, or indeed any other adoptive T-cell therapy product, would be beneficial.

[0012] Citation or identification of any document in this application is not an admission that such document is available as prior art to the present invention.

### SUMMARY OF THE INVENTION

[0013] The invention provides novel chimeric costimulatory antigen receptors (CoStARs) that bind to carcinoembryonic antigen (CEA) and cells comprising or expressing the CoStARs which are beneficial for CAR and non-CAR based T-cell therapies alike. The present invention uses cells that express a novel chimeric costimulatory receptor to provide a costimulatory signal to T-cells upon engagement with a defined disease-associated, for example tumor-associated, antigen.

[0014] There have been several reports in which split signal 1 and signal 2 have been used to drive antigen specific responses in engineered T-cells (Alvarez-Vallina & Hawkins 1996). However, none have utilized the full length CD28 molecule. There are specific advantages to using full length receptors, such as CD28 as opposed to truncated forms. A full length receptors may be capable of dimerization, enabling the receptor to function in its native form, indeed chimeric antigen receptors fail to function optimally when expressed as a monomer (Bridgeman et al. 2010).

[0015] In some embodiments, a CoStAR of the invention induces signal 2 upon engagement with a defined antigen such as a disease associated or tumor associated antigen. The full length CD28 molecule contains motifs critical to its native function in binding members of the B7 family of receptors; although this is potentially dangerous from the perspective of CARs carrying CD28 and CD3ζ receptors in tandem, wherein ligation of CAR by B7 could trigger T-cell activation, there are beneficial qualities for receptors harbouring signal 2 receptors alone. In an aspect, the invention provides a targeted chimeric costimulatory receptor (CoStAR) which comprises an extracellular binding domain operatively linked to a transmembrane domain, a first signaling domain, and a CD40 signaling domain or a signaling fragment thereof. The inventors have discovered that costimulatory receptors comprising a CD40 signaling domain display novel and improved activity profiles. The inventors have further discovered that variants of TRAF2, TRAF2/3, and TRAF6 binding domains within CD40 modulate signaling.

[0016] In certain embodiments of the invention, the CD40 signaling domain comprises SEQ ID NO:32, SEQ ID NO:33, or SEQ ID NO:34. In some embodiments, the CD40 signaling fragment comprises an SH3 motif (KPTNKAPH, SEQ ID NO:35), TRAF2 motif (PKQE, SEQ ID NO:36, PVQE, SEQ ID NO:37, SVQE, SEQ ID NO:38), TRAF6 motif (QEPQEINFP, SEQ ID NO:39), PKA motif (KKPTNKA, SEQ ID NO:40, SRISVQE, SEQ ID NO:41), or a combination thereof, or is a full length CD40 intracellular domain. In some embodiments, one or more of the SH3, TRAF2, TRAF6, or PKA motifs of the CD40 signaling domain is mutated.

[0017] In some embodiments, the first signaling domain of the CoStAR comprises a signaling domain or signaling fragment of a receptor, such as, for example a tumor necrosis factor receptor superfamily (TNFRSF) receptor, including but not limited to CD2, CD9, CD26, CD27, CD28, CD29, CD38, CD40, CD43, CD46, CD49d, CD55, CD73, CD81, CD82, CD99, CD100, CD134 (OX40), CD137 (41BB), CD150 (SLAM), CD270 (HVEM), CD278 (ICOS), DAP10, NTKR, CD357 (GITR), or EphB6. In some embodiments, the CoStAR comprises CD2, CD9, CD26, CD27, CD28, CD29, CD38, CD40, CD43, CD46, CD49d, CD55, CD73, CD81, CD82, CD99, CD100, CD134 (OX40), CD137 (41BB), CD150 (SLAM), CD270 (HVEM), CD278 (ICOS), DAP10, NTKR, CD357 (GITR), or EphB6. In embodiments, wherein the first signaling domain comprises a CD40 signaling domain thus the CoStAR comprises elements of two CD40 signaling domains.

[0018] In some embodiments, the CoStAR comprises a second signaling domain or signaling fragment of a receptor, such as, for example a tumor necrosis factor receptor superfamily (TNFRSF) receptor, including but not limited to CD2, CD9, CD26, CD27, CD28, CD29, CD38, CD40, CD43, CD46, CD49d, CD55, CD73, CD81, CD82, CD99, CD100, CD134 (OX40), CD137 (41BB), CD150 (SLAM), CD270 (HVEM), CD278 (ICOS), CD357 (GITR), or EphB6. The first signaling domain or signaling fragment, the CD40 signaling domain or signaling fragment, and the second signaling domain or signaling fragment can be in any order. Exemplary embodiments include, without limitation, CoStAR which comprise CD28, CD137, and CD40 signaling domains, CD28, CD134, and CD40 signaling domains, CD28, CD2, and CD40 signaling domains, CD28, GITR, and CD40 signaling domains, CD28, CD29, and CD40 signaling domains, or CD28, CD150, and CD40 signaling domains.

[0019] In some embodiments, the extracellular antigen-binding domain (e.g., without limitation CEA-binding domain, MSLN-binding domain) of a CoStAR of the invention is operatively linked to the transmembrane domain by a linker and/or a spacer. In some embodiments, the linker comprises from about 5 to about 20 amino acids. In some embodiments, the linker comprises AAAGSGGSG (SEQ ID NO:18).

[0020] In some embodiments, a CoStAR of the invention comprises a spacer which operatively links the extracellular binding domain to the transmembrane domain and comprises from about 10 to about 250 amino acids. In some embodiments, the spacer comprises an extracellular sequence of CD8 or CD28 or a fragment thereof. In some embodiments, the CoStAR comprises a second extracellular binding domain. In some embodiments, the second binding domain comprises an extracellular ligand binding domain from CD8 or CD28. In some embodiments, the spacer comprises one or more immunoglobulin domains or an immunoglobulin constant region. In some embodiments, the spacer comprises one or more immunoglobulin domains or an immunoglobulin constant region such as, without limitation, SEQ ID NO:24.

[0021] In some embodiments the transmembrane domain of a CoStAR of the invention comprises a transmembrane domain of a TNFRSF protein. In some embodiments, a transmembrane domain of a CoStAR of the invention comprises a transmembrane domain of CD28 or CD8. In some embodiments, a transmembrane domain of a CoStAR of the invention comprises a transmembrane sequence of CD28 or CD8.

[0022] The CoStARs of the invention are useful to stimulate an immune response against a selected target that expresses a tumor associated antigen (TAA), e.g. without limitation, carcinoembryonic antigen (CEA), mesothelin (MSLN), or other. In some embodiments, the CoStAR comprises an antigen binding fragment of the scFv of SEQ ID NO:9, SEQ ID NO:10, SEQ ID NO:11, SEQ ID NO:12, SEQ ID NO:13, or SEQ ID NO:14, e.g., a fragment comprising one, two, three, four, five, or all six complementary determining regions (CDRs). In some embodiments, the CoStAR comprises the scFv of SEQ ID NO:9, SEQ ID NO:10, SEQ ID NO:11, SEQ ID NO:12, SEQ ID NO:13, or SEQ ID NO:14. In some embodiments, the CoStAR comprises an antigen binding fragment of the scFv of SEQ ID NO:186, SEQ ID NO:187, SEQ ID NO:188, SEQ ID NO:189, SEQ ID NO:190, or SEQ ID NO:1191, e.g., a fragment comprising one, two, three, four, five, or all six CDRs. In some embodiments, the CoStAR comprises the scFv of SEQ ID NO:186, SEQ ID NO:187, SEQ ID NO:188, SEQ ID NO:189, SEQ ID NO:190, or SEQ ID NO:191.

[0023] According to the invention, an extracellular binding domain can comprise, without limit, an scFv, a peptide, an antigen binding portion of an antibody, an antibody heavy-chain variable domain, an antibody light chain variable domain, a single domain antibody, a CEA ligand, or an MSLN ligand.

[0024] In some embodiments, a CoStAR of the invention comprises a CD3ζ signaling domain, for example located at the C-terminus.

[0025] In some embodiments, a CoStAR of the invention comprises an N-terminal signal peptide. Non-limiting examples of N-terminal signal peptides are signal peptides of oncostatin M (OSM), CD8a, CD2, interleukin-2 (IL-2), granulocyte-macrophage colony stimulating factor (GM-CSF), and human IgGκ.

[0026] In an aspect of the invention, there is provided a nucleic acid which encodes a CoStAR of the invention. The nucleic acid may be optimized, for example be codon optimized for expression in a host cell. In a non-limiting embodiment, the nucleic acid is codon optimized for expression in a human cell.

[0027] In some embodiments, there is provided vector which encodes and is capable of expressing a CoStAR of any embodiment of the present disclosure.

[0028] In some embodiments, there is provided a cell which expresses a CoStAR of any embodiment of the present disclosure. In some embodiments, the cell expresses two or more CoStARs, for example the cell expresses a CoStAR that binds to CEA or MSLN and a CoStAR that binds to FOLR1 or a CoStAR that binds to CA125, such as but not limited to anti-CEA.CD28.CD40 and anti-CA125.41BB.CD40 or anti-MSLN.CD28.CD40 and anti-CA125.41BB.CD40. In some embodiments, the cell expresses a CoStAR which binds to CEA and a CoStAR which binds to PDL1, such as but not limited to anti-CEA.CD28.CD40 and PD1.CD28.CD40 or expresses a CoStAR which binds to MSLN and a CoStAR which binds to PDL1, such as but not limited to anti-MSLN.CD28.CD40 and PD1.CD28.CD40.

[0029] In some embodiments, a cell engineered to express a CoStAR of any embodiment of the present disclosure comprises an alpha-beta T cell, gamma-delta T cell, T regulatory cell, TIL, NKT cell or NK cell. In some embodiments, a cell engineered to express a CoStAR of any embodiment of the present disclosure coexpresses a chimeric antigen receptor (CAR) or a T cell receptor (TCR).

[0030] Some embodiments provide a method of making the cell which expresses a CoStAR which comprises transducing or transfecting a cell with a vector which encodes and is capable of expressing a CoStAR of any embodiment of the present disclosure.

[0031] Some embodiments provide a method for preparing a population of cells that express a CoStAR of any embodiment of the present disclosure by transducing or transfecting cells, detecting expression of the CoStAR and enriching, expanding, and/or selecting cells that express the CoStAR. In some embodiments, any of the CD40, TRAF2, TRAF2/3, or TRAF6 variants provided herein, including those in FIGS. 28, 67, 77A-77C, 83-89D, and 92 (excluding those in FIGS. 78 and 79), and including those in Tables 2, 4-5, and 7-14, and including SEQ ID NOS: 42, 475-479, 494-498, 505, 510-519, and 840-40839, and Consensus sequences A-C, can be used in the present method and/or construct and/or protein.

[0032] Some embodiments provide a method of treating a disease in a subject by administering a population of cells which express a CoStAR of any embodiment of the present disclosure. In some embodiments, the protein will comprise a variant CD40 and/or TRAF 2, 2/3, 6 domain as disclosed herein. In some embodiments, any of the CD40, TRAF2, TRAF2/3, or TRAF6 variants provided herein, including those in FIGS. 28, 67, 77A-77C, 83-89D, and 92 (excluding those in FIGS. 78 and 79), and including those in Tables 2, 4-5, and 7-14, and including SEQ ID NOS: 42, 475-479, 494-498, 505, 510-519, and 840-40839, and Consensus sequences A-C, can be used in the present method and/or construct and/or protein.

[0033] In some embodiments is a protein comprising an amino acid sequence comprising a sequence of Consensus A, or X₁X₂X₃X₄X₅X₆X₇X₈X₉X₁₀X₁₁, wherein: X₁ is any amino acid, X₂ is any amino acid, X₃ is P, X₄ is any amino acid, X₅ is Q, X₆ is C, E, or A, X₇ is any amino acid, X₈ is any amino acid, X₉ is any amino acid, X₁₀ is any amino acid, and X₁₁ is any amino acid. In some embodiments, the protein is part of a TRAF domain. In some embodiments, the protein is part of a TRAF2 domain. In some embodiments, the protein is part of a TRAF2/3 domain. In some embodiments, the sequence comprises: X₁ is S or P, X₂ is V, H, or Y, X₄ is I, Q, V, X₇ is T or S, X₈ is D, X₉ is K, D, or G, X₁₀ is T, S, G, or A, and X₁₁ is D, S, N, or D; or the sequence is at least 60% identical to a). In some embodiments, the protein is of the sequence GSNTX₁X₂X₃X₄X₅X₆X₇X₈X₉X₁₀X₁₁, SEQ ID NO: 42299. In some embodiments, the protein is of the sequence X₁X₂X₃X₄X₅X₆X₇X₈X₉X₁₀X₁₀QPVT, SEQ ID NO: 42377. In some embodiments, the protein is of the sequence GSNTX₁X₂X₃X₄X₅X₆X₇X₈X₉X₁₀X₁₁QPVT, SEQ ID NO: 42378.

[0034] In some embodiments is a protein comprising an amino acid sequence comprising a sequence of Consensus B, or X₁X₂X₃X₄X₅X₆X₇X₈X₉X₁₀X₁₁, wherein: X₁ is any amino acid, X₂ is any amino acid, X₃ is P, S, A, or T, X₄ is any amino acid, X₅ is Q or E, X₆ is E, X₇ is any amino acid, X₈ is any amino acid, X₉ is any amino acid, X₁₀ is any amino acid, and X₁₁ is any amino acid. In some embodiments, the protein is part of a TRAF domain. In some embodiments, the protein is part of a TRAF2 domain. In some embodiments, the protein is part of a TRAF2/3 domain. In some embodiments, the sequence comprises: X₁ is P, A, M, T, S, R, V, H, X₂ is F, A, L, I, T, V, G, C, A, F, P, X₄ is K, V, I, H, A, Q, T, E, S, X₇ is C, T, E, D, S, A, X₈ is A, L, G, Y, I, Q, D, E, X₉ is F, H, K, R, P, A, G, Y, E, N, X₁₀ is R, G, E, K, A, S, D, C, C, P, V, and X₁₁ is S, C, D, P, W, T, A, G, E; or the sequence is at least 60% identical to a). In some embodiments, the sequence is part of a Traf 2/3 sequence. In some embodiments, the protein is of the sequence GSNTX₁X₂X₃X₄X₅X₆X₇X₈X₉X₁₀X₁₁, SEQ ID NO: 42300. In some embodiments, the protein is of the sequence X₁X₂X₃X₄X₅X₆X₇X₈X₉X₁₀X₁₁QPVT, SEQ ID NO: 42379. In some embodiments, the protein is of the sequence GSNTX₁X₂X₃X₄X₅X₆X₇X₈X₉X₁₀X₁₁QPVT, SEQ ID NO: 42380.

[0035] In some embodiments is a protein comprising an amino acid sequence comprising a sequence of Consensus C, or X₁X₂X₃X₄X₅X₆, wherein: X₁ is P, X₂ is any amino acid, X₃ is E, X₄ is any amino acid, X₅ is any amino acid, and X₆ is Ac/Ar. In some embodiments, the protein is part of a TRAF domain. In some embodiments, the protein is part of a TRAF6 domain. In some embodiments, the sequence comprises: X₂ is Q, P, E, V, T, or S, X₄ is I, L M, N, S, T, N, D, X₅ is N, D, R, S, G, or Y; or the sequence is at least 60% identical to a). In some embodiments, the protein is of the sequence PKQEX₁X₂X₃X₄X₅X₆, SEQ ID NO: 42301. In some embodiments, the protein is of the sequence X₁X₂X₃X₄X₅X₆PDDL, SEQ ID NO: 42381. In some embodiments, the protein is of the sequence PKQEX₁X₂X₃X₄X₅X₆PDDL, SEQ ID NO: 42382.

[0036] In some embodiments is an amino acid sequence comprising: (a) one or more of SEQ ID NOs: 475, 476, 477, 478, 479, 494, 495, 496, 498, 505, 510, 511, 512, 513, 514, 515, 516, 517, 518, or 519; (b) a sequence that is at least 70% identical to a sequence in a); or (c) a sequence that is at least 80% similar to a).

[0037] In some embodiments is a TRAF domain in a CD40 protein, wherein the TRAF domain comprises one or more of: (a) SEQ ID NOs: 475, 476, 477, 478, 479, 494, 495, 496, 498, 505, 510, 511, 512, 513, 514, 515, 516, 517, 518, or 519; (b) a sequence that is at least 70% identical to a sequence in a); or (c) a sequence that is at least 80% similar to a).

[0038] In some embodiments is a TRAF6 domain sequence comprising: PQEINF, PEEMSW, PPENYE, or PQENSY.

[0039] In some embodiments is a TRAF2/3 domain sequence comprising: PVQET, TQEET, SKEET, AVEET, or PVQET.

[0040] In some embodiments is a TRAF2 domain sequence comprising: SVQE, AVEE or PEEE.

[0041] In some embodiments is a TRAF 6 or TRAF2/3 domain that comprises: (a) the amino acid sequence of one of SEQ ID NOs: 475, 476, 477, 478, 479, 494, 495, 496, 498, 505, 510, 511, 512, 513, 514, 515, 516, 517, 518, or 519; (b) the amino acid sequence that is at least 70% identical to a) or (c) the amino acid sequence that is at least 80% similar to a).

[0042] In some embodiments, the sequence is within a CD40 protein sequence for the protein, amino acid sequence, or TRAF domain of any one of the embodiments of the present discosure. In some embodiments, the sequence is within a CD40 protein and is located at a corresponding TRAF 2, TRAF2/3, and/or TRAF6 domain within the CD40 protein.

[0043] In some embodiments is a TRAF2/TRAF3 domain that comprises an amino acid sequence of Consensus A, or X₁X₂X₃X₄X₅X₆X₇X₈X₉X₁₀X₁₁, wherein X₁ is any amino acid, X₂ is any amino acid, X₃ is P, X₄ is any amino acid, X₅ is Q, X₆ is C, E, or A, X₇ is any amino acid, X₈ is any amino acid, X₉ is any amino acid, X₁₀ is any amino acid, and X₁₁ is any amino acid. In some embodiments, the protein is of the sequence GSNTX₁X₂X₃X₄X₅X₆X₇X₈X₉X₁₀X₁₁, SEQ ID NO: 42299. In some embodiments, the protein is of the sequence X₁X₂X₃X₄X₅X₆X₇X₈X₉X₁₀X₁₁QPVT, SEQ ID NO: 42377. In some embodiments, the protein is of the sequence GSNTX₁X₂X₃X₄X₅X₆X₇X₈X₉X₁₀X₁₁QPVT, SEQ ID NO: 42378.

[0044] In some embodiments is a TRAF2/TRAF3 domain that comprises an amino acid sequence of Consensus B, or X₁X₂X₃X₄X₅X₆X₇X₈X₉X₁₀X₁₁, wherein X₁ is any amino acid, X₂ is any amino acid, X₃ is P, S, A, or T, X₄ is any amino acid, X₅ is Q or E, X₆ is E, X₇ is any amino acid, X₈ is any amino acid, X₉ is any amino acid, X₁₀ is any amino acid, and X₁₁ is any amino acid. In some embodiments, the protein is of the sequence GSNTX₁X₂X₃X₄X₅X₆X₇X₈X₉X₁₀X₁₁, SEQ ID NO: 42300. In some embodiments, the protein is of the sequence X₁X₂X₃X₄X₅X₆X₇X₈X₉X₁₀X₁₁QPVT, SEQ ID NO: 42379. In some embodiments, the protein is of the sequence GSNTX₁X₂X₃X₄X₅X₆X₇X₈X₉X₁₀X₁₁QPVT, SEQ ID NO: 42380.

[0045] In some embodiments is a TRAF6 domain that comprises an amino acid sequence of Consensus C, or X₁X₂X₃X₄X₅X₆, wherein X₁ is P, X₂ is any amino acid, X₃ is E, X₄ is any amino acid, X₅ is any amino acid, and X₆ is Ac/Ar. In some embodiments, the protein is of the sequence PKQEX₁X₂X₃X₄X₅X₆, SEQ ID NO: 42301. In some embodiments, the protein is of the sequence X₁X₂X₃X₄X₅X₆PDDL, SEQ ID NO: 42381. In some embodiments, the protein is of the sequence PKQEX₁X₂X₃X₄X₅X₆PDDL, SEQ ID NO: 42382.

[0046] In some embodiments is a CD40 domain that comprises an amino acid sequence of one or more of the following: (a) TRAF2/TRAF3 domain that comprises an amino acid sequence of Consensus A, or X₁X₂X₃X₄X₅X₆X₇X₈X₉X₁₀X₁₁, wherein X₁ is any amino acid, X₂ is any amino acid, X₃ is P, X₄ is any amino acid, X₅ is Q, X₆ is C, E, or A, X₇ is any amino acid, X₈ is any amino acid, X₉ is any amino acid, X₁₀ is any amino acid, and X₁₁ is any amino acid. (b) a TRAF2/TRAF3 domain that comprises an amino acid sequence of Consensus B, or X₁X₂X₃X₄X₅X₆X₇X₈X₉X₁₀X₁₁, wherein X₁ is any amino acid, X₂ is any amino acid, X₃ is P, S, A, or T, X₄ is any amino acid, X₅ is Q or E, X₆ is E, X₇ is any amino acid, X₈ is any amino acid, X₉ is any amino acid, X₁₀ is any amino acid, and X₁₁ is any amino acid. (c) a TRAF6 domain that comprises an amino acid sequence of Consensus C, or X₁X₂X₃X₄X₅X₆, wherein X₁ is P, X₂ is any amino acid, X₃ is E, X₄ is any amino acid, X₅ is any amino acid, and X₆ is Ac/Ar.

[0047] In some embodiments is a chimeric costimulatory antigen receptor (CoStAR) which comprises: an extracellular binding domain that binds to carcinoembryonic antigen (CEA), or an extracellular binding domain that binds to mesothelin (MSLN); a transmembrane domain that is linked to the extracellular binding domain, a first signaling domain; and a second signaling domain, wherein the second signaling domain comprises a variant CD40 signaling domain or a signaling fragment thereof, wherein the variant CD40 comprises a sequence of a variant TRAF2/TRAF3 sequence, or a variant TRAF6 sequence, or a variant TRAF2 sequence, wherein the variant CD40 does not comprise SEQ ID NO: 42. In some embodiments, the first signaling domain comprises a signaling domain or signaling fragment of CD28 or CD278 (ICOS). In some embodiments, the construct is as shown in FIG. 88A. In some embodiments, the construct is as shown in FIG. 88B. In some embodiments, the construct is as shown in FIG. 88C. In some embodiments, the first signaling domain comprises a full-length costimulatory domain. In some embodiments, the extracellular binding domain is operatively linked to the transmembrane domain by a linker and/or a spacer. In some embodiments, the linker comprises from about 5 to about 20 amino acids. In some embodiments, the linker comprises from about 10 to about 250 amino acids. In some embodiments, the transmembrane domain comprises a transmembrane domain from CD28, CD8, ICOS, DAP10, or NTRK. In some embodiments, the transmembrane domain comprises the transmembrane domain sequence of SEQ ID NO:20, SEQ ID NO:21, or SEQ ID NO:22. In some embodiments, the extracellular binding domain comprises an scFv, a peptide, an antibody heavy-chain variable domain, an antibody light-chain variable domain, or a CEA ligand.

[0048] In some embodiments is a nucleic acid which encodes the CoStAR of any one of the embodiments of the present disclosure.

[0049] In some embodiments is a vector comprising the nucleic acid of any one of the embodiments of the present disclosure.

[0050] In some embodiments is a cell which expresses the CoStAR of any one of the embodiments of the present disclosure. In some embodiments, the cell comprises an alpha-beta T cell, gamma-delta T cell, T regulatory cell, TIL, NKT cell or NK cell. In some embodiments, the cell coexpresses a CAR or a TCR.

[0051] In some embodiments is a method of making the cell of any one of the embodiments of the present disclosure, which comprises the step of transducing or transfecting a cell with a vector of any one of the embodiments of the present disclosure

[0052] In some embodiments is a method for preparing a population of cells that express a CoStAR of any one the embodiments of the present disclosure, which comprises: detecting expression of the CoStAR on the surface of cells transfected or transduced with a vector of alternative 62; and selecting cells which are identified as expressing the CoStAR.

[0053] In some embodiments is a cell population which is enriched for cell expression a CoStAR of any one of the embodiments of the present disclosure.

[0054] In some embodiments is a method for treating a disease in a subject, which comprises the step of administering a cell according to any one of the embodiments of the present disclosure, or a cell population according to any one of the embodiments of the present disclosure, to the subject.

[0055] In some embodiments is a protein comprising the amino acid sequence of one of SEQ ID NOs: 510-519. In some embodiments, the protein comprises the sequence of SEQ ID NO: 510. In some embodiments, the protein comprises the sequence of SEQ ID NO: 511. In some embodiments, the protein comprises the sequence of SEQ ID NO: 512. In some embodiments, the protein comprises the sequence of SEQ ID NO: 513. In some embodiments, the protein comprises the sequence of SEQ ID NO: 514. In some embodiments, the protein comprises the sequence of SEQ ID NO: 515. In some embodiments, the protein comprises the sequence of SEQ ID NO: 516. In some embodiments, the protein comprises the sequence of SEQ ID NO: 517. In some embodiments, the protein comprises the sequence of SEQ ID NO: 518. In some embodiments, the protein comprises the sequence of SEQ ID NO: 519. In some embodiments, the protein comprises any of the constructs as shown in FIG. 92 (CTP188-CTP202).

[0056] Accordingly, it is an object of the present disclosure not to encompass within the present disclosure any previously known product, process of making the product, or method of using the product such that Applicants reserve the right and hereby disclose a disclaimer of any previously known product, process, or method. It is further noted that the present disclosure does not intend to encompass within the scope of the disclosure any product, process, or making of the product or method of using the product, which does not meet the written description and enablement requirements of the USPTO (35 U.S.C. § 112, first paragraph) or the EPO (Article 83 of the EPC), such that Applicants reserve the right and hereby disclose a disclaimer of any previously described product, process of making the product, or method of using the product. It may be advantageous in the practice of the present disclosure to be in compliance with Art. 53(c) EPC and Rule 28(b) and (c) EPC. All rights to explicitly disclaim any embodiments that are the subject of any granted patent(s) of applicant in the lineage of this application or in any other lineage or in any prior filed application of any third party is explicitly reserved. Nothing herein is to be construed as a promise.

[0057] It is noted that in this disclosure and particularly in the claims and/or paragraphs, terms such as “comprises”, “comprised”, “comprising” and the like can have the meaning attributed to it in U.S. patent law; e.g., they can mean “includes”, “included”, “including”, and the like; and that terms such as “consisting essentially of” and “consists essentially of” have the meaning ascribed to them in U.S. patent law, e.g., they allow for elements not explicitly recited, but exclude elements that are found in the prior art or that affect a basic or novel characteristic of any of the embodiments of the present disclosure.

[0058] These and other embodiments are disclosed or are obvious from and encompassed by, the following Detailed Description.

### BRIEF DESCRIPTION OF THE DRAWINGS

[0059] The following detailed description, given by way of example, but not intended to limit any embodiment of the present invention solely to the specific embodiments described, may best be understood in conjunction with the accompanying drawings.

[0060] FIG. 1—Structural organisation of single costimulatory and fusion costimulatory domain receptors. A schematic representation of CoStAR receptors set out in the claims is shown. First a CoStAR based on a single costimulatory receptor, and secondly a fusion CoStAR consisting of a full length costimulatory receptor signalling domain fused to a second costimulatory domain.

[0061] FIGS. 2Ai-2E—Genomic organisation of potential CoStAR configurations—The CoStAR consists of an antigen binding domain, an optional spacer domain and a costimulatory domain as shown in figure and described in claims. The CoStAR may be expressed: (FIGS. 2Ai-2Aii) alone from a promoter with the CoStAR consisting of a single (FIG. 2Ai) or fusion (FIG. 2Aii) costimulatory receptor; (FIG. 2B) may be expressed with an epitope tag (e.g. His tag, DYKDDDDK (SEQ ID NO:449) etc) at the N or C-terminus to enable direct staining of the CoStAR; (FIG. 2C) along with a marker gene separated using a 2A cleavage sequence or internal ribosomal entry site (IRES); ((FIG. 2D) along with a marker gene which is expressed from a second promoter; (FIG. 2E) along with a protein of interest such as a chimeric antigen receptor or T-cell receptor separated using a 2A cleavage sequence or internal ribosomal entry site (IRES); (FIG. 2F) along with a protein of interest such as a chimeric antigen receptor or T-cell receptor which is expressed from a second promoter. It would be clear to an individual with sufficient knowledge that the CoStAR and marker gene/chimeric antigen receptor/T-cell receptor/other protein of interest could be expressed in either orientation or 3′ (3-prime) or 5′ (5-prime) to one another.

[0062] FIGS. 3A-3E—Functional activity of CoStAR in T-cells in response to LS174T and LoVo tumour presented antigen. Normal donor T-cell populations from donor 1 (FIGS. 3A & 3D), donor 2 (FIG. 3B) and donor 3 (FIGS. 3C & 3E) were lentivirally engineered to express a CoStAR which targets carcinoembryonic antigen and magnetically sorted to enrich for the transgene using CD34 magnetic selection. T-cells were mixed with wild-type un-engineered CEA+ tumour cells (Non-activating tumour) or CEA+ tumour cells engineered to express a cell surface anchored anti-CD3 single chain antibody fragment (Activating tumour) at the indicated effector to target ratios and IL-2 measured in the supernatant by ELISA. Data obtained using LS174T cells (FIGS. 3A, 3B & 3C) and LoVo (3D & 3E).

[0063] FIGS. 4A-4D—Effect of CoStAR on T-cell proliferation. 5×10⁵ transduced and non transduced T-cells were mixed with 6.25×10⁴ wild-type LoVo or LoVo-OKT3 cells in the presence (FIG. 4A) or absence (FIG. 4B) of IL-2 and cell counts made after three days. In another assay under the same cell ratios T-cells from two donors (FIGS. 4C and 4D) were loaded with proliferation dye and the number of proliferation cycles the cells had gone through determined by dye dilution after six days using flow cytometry.

[0064] FIG. 5—IL-2 activity of CoStAR fusion receptors in primary human T-cells. Normal donor CD8+ T-cells from seven donors (except control CoStAR is three donors) were lentivirally transduced with the indicated CEA-targeting CoStARs and IL-2 production assessed after an overnight stimulation in the presence of LoVo-OKT3 cells. The proportion of IL-2 positive cells was determined using intracellular flow staining in both the CD34 negative (CoStAR non-transduced) and CD34+(CoStAR transduced) populations. Asterisks show significant differences between the transduced and non-transduced populations using paired Wilcoxon signed rank test with * p<0.05

[0065] FIGS. 6A-6D—Multi parameter analysis of CoStAR activity in primary human T-cells. Normal donor CD8+ T-cells were lentivirally transduced with the indicated CEA-targeting CoStARs and IL-2 production assessed after an overnight stimulation in the presence of LoVo-OKT3 cells. The proportion of IL-2 (seven donors) (FIG. 6A), IFNγ (seven donors) (FIG. 6B), BCL-xL (five donors) (FIG. 6C) and CD107a (six donors) (FIG. 6D) positive cells was determined using intracellular flow staining in both the CD34 negative (CoStAR non-transduced) and CD34+(CoStAR transduced) populations. Control is a non-specific CA125 targeting CoStAR and is from three donors in all instances. Heat maps are averages of all donors with the intensity of colour related to the percentage of cells positive for a particular read out under the defined conditions.

[0066] FIG. 7—CD40 enhances IL-2 production from CD28-based CoStARs. Primary human T-cells from three healthy donors were left non-transduced or transduced with either extracellular domain truncated CD28 (Tr CD28), full length CD28 (FL CD28), or CD28.CD40-based CoStARs harbouring a CEA specific scFv (MFE23). Transduced cells were selected using a CD34 marker gene and expanded prior to analysis. T-cells were mixed at an 8:1 effector to target ratio with OKT3 expressing CEA+ LoVo cells for 20 hours before analysis of IL-2 production by ELISA.

[0067] FIG. 8—Effect of signalling domain and target antigen on CoStAR-mediated T-cell expansion. T-cells were transduced with either DYKDDDDK (SEQ ID NO:449) epitope-tagged CD28 or CD28.CD40 based CoStARs harbouring CA125, FolR or CEA specific scFv, or FolR specific binding peptide (C7). T-cells were mixed with OKT3 expressing, CA125+/FolR+/CEA-cell line OVCAR3. The number of transduced cells were counted every 7 days up to 21 days, with fresh OVCAR3 cells added following each count.

[0068] FIG. 9—Effect of signalling domain and target antigen on CoStAR− mediated T-cell expansion. T-cells were transduced with either DYKDDDDK (SEQ ID NO:449) epitope-tagged CD28 or CD28.CD40 based CoStARs harbouring CA125, FolR or CEA specific scFv, or FolR specific binding peptide (C7). T-cells were mixed with OKT3 expressing CA125+/FolR+/CEA-cell line OVCAR3. The number of transduced cells were counted every 7 days up to 21 days, with fresh OVCAR3 cells added following each count.

[0069] FIGS. 10A-10B—(FIGS. 10A and 10B) CD40 based CoStARs enhance costimulation of T-cells in a model of TCR-transfer. Primary human T-cells from three healthy donors were transduced with a CEA specific TCR plus either a DYKDDDK-tagged CD28 or CD28.CD40 based CoStAR harbouring either an MFE (open or closed circles) or CA125 (open squares) specific scFv. T-cells were mixed at a 1:1 effector:target ratio with CEA+/CA125−H508 cells and intracellular cytokine staining performed to determine the number of responding CD4+ or CD8+ T-cells in the TCR+/CoStAR+, TCR+/CoStAR−, TCR−/CoStAR+ and TCR−/CoStAR− populations. A 2-way ANOVA (Tukeys test) was performed to determine significant differences in activity: *p>0.05, ** p>0.01, *** p>0.001, **** p>0.0001.

[0070] FIG. 11 depicts enrichment and expansion of primary human T-cells transduced to express costimulatory molecules of the invention. MFE23 is a single chain Fv antibody that has a high affinity for carcinoembryonic antigen (CEA). Primary human T-cells were mock transduced or transduced with MFE23.CD28 or MFE23.CD28.CD40 CoStAR, each harboring a CD34 marker gene separated by a 2A cleavage peptide. Following in vitro culture cells were enriched for CD34 using MACS™ paramagnetic selection reagents (Miltenyi Biotech) and then the cells expanded in number using irradiated feeder cells. Exemplary plots from one of three donors are shown.

[0071] FIGS. 12A-12D depict expansion of T-cells transduced with costimulatory molecules of the invention in response to stimulation and exogenous IL-2. Cells were mock transduced or transduced with MFE23.CD28 or MFE23.CD28.CD40 CoStAR and cocultured with LoVo-OKT3 cells at an 8:1 effector:target ratio in the presence (200 IU/ml) or absence of exogenous IL-2. At days 1, 4, 7, 11 and 18 cells were taken and the number of viable T-cells enumerated by using anti-CD2 reagents on a MACSQuant flow cytometer. (FIG. 12A) In the absence of stimulation by tumor and IL-2 cells declined in number as would be expected. (FIG. 12B) In the absence of stimulation but presence of IL-2 there was a more apparent survival of the cells, but no specific growth. (FIG. 12C) In the presence of tumor, but absence of IL-2 mock cells did not show specific survival. MFE23.CD28 CoStAR mediated an apparent doubling in expansion over the first four days followed by decline. MFE23.CD28.CD40 mediated a greater expansion up to day 7 followed by a steady decline. (FIG. 12D) Under the same conditions but in the presence of IL-2 both mock and MFE23.CD28 transduced cells demonstrated a 20-fold expansion over 18 days, whereas MFE23.CD28.CD40 cells expanded by over 60-fold. Thus CD28.CD40 based receptors demonstrate superior expansion and survival under conditions of stimulation both in the presence and absence of exogenous IL-2.

[0072] FIGS. 13A-13M depict cytokine production by mock, MFE23.CD28 or MFE23.CD28.CD40 engineered T-cells. Bead array analysis was performed on supernatants obtained from T-cell/tumour cocultures. Engineered T-cells were incubated at a 1:1 effector:target ratio with LoVo-OKT3 cells for 24 hours and supernatant collected. Conditioned supernatant was also collected from an equal number of T-cells alone, or LoVo-OKT3 cells alone. Cytokine production was analysed using a Legendplex™ Human TH1/TH2 cytokine panel (Biolegend). (FIG. 13A) IL-2; (FIG. 13B) IFN-7; (FIG. 13C) TNFα; (FIG. 13D) IL-4; (FIG. 13E) IL-5; (FIG. 13F) IL-13; (FIG. 13G) IL-17A; (FIG. 13H) IL-17F; (FIG. 13I) IL-22; (FIG. 13J) IL-6; (FIG. 13K) IL-10; (FIG. 13L) IL-9; (FIG. 13M) IL-21. Cytokines were either very low or undetectable in media from T-cells or tumour alone. When cocultured with tumor, cytokine production was enhanced. MFE23.CD28 enhanced production of IL-2, IL-5, IL-17A/17F, IL-10, IL-9 and IL-21 compared to mock. MFE23.CD28.CD40 also enhanced production of TNFα, IL-13 and IL-22. MFE23.CD28.CD40 and further enhanced the production of a number of cytokines greater than that provided by MFE23.CD28 (IL-2, IL-9 and IL-17F), as well as reducing the production of some cytokines below the levels seen with MFE23.CD28 (IL-5 and IL-10). Together this data demonstrates that addition of CD40 to CD28-based costimulatory receptors enhances and/or modulates their specific activity with respect to chemokine production.

[0073] FIGS. 14A-14M depict an analysis of chemokines using a Legendplex™ Human Pro inflammatory chemokine panel. (FIG. 14A) IL-8 (CXCL8); (FIG. 14B) IP-10 (CSCL10); (FIG. 14C) Eotaxin (CCL11); (FIG. 14D) TARC (CCL17); (FIG. 14E) MCP-1 (CCL2); (FIG. 14F) RANTES (CCL5); (FIG. 14G) MIP-1a (CCL3) (FIG. 14H) MIG (CXCL9) (FIG. 14I) ENA-78 (CXCL5) (FIG. 14J) MIP-3a (CCL20) (FIG. 14K) GROα (CXCL1) (FIG. 14L) I-TAC (CXCL11) (FIG. 14M) MEP-13 (CCL4). Chemokines were either very low or undetectable in media from T-cells alone. When cocultured with tumor, chemokine production was enhanced. MFE23.CD28 enhanced production of CXCL5, CXCL10, CXCL11, CCL17 and CCL20 compared to mock. MFE23.CD28.CD40 also enhanced production of CCL2, CXCL1 and CXCL9. MFE23.CD28.CD40 further enhanced the production of a number of cytokines greater than that provided by MFE23.CD28 (CXCL1, CXCL9, CXCL10, CXCL11, CCL17, CCL2, CXCL9, CCL5 and CCL20), as well as reducing the production of some cytokines below the levels seen with MFE23.CD28 (CCL4). Together this data demonstrates that addition of CD40 to CD28-based costimulatory receptors enhances and/or modulates their specific activity with respect to chemokine production.

[0074] FIGS. 15A-15H depict functional activity of ovarian CoStAR engineered cells using a CoStAR harbouring a FolR or CA125 reactive scFv (MOV19 & 196-14 respectively). Human folate receptor alpha (FolR) represents a suitable target for a number of tumours including ovarian, head and neck, renal and lung and CA125 represents an alternative target for ovarian cancer. Primary human T-cells from six healthy donors were engineered with either 196-14.CD28, 196-14.CD28.CD40, MOV19.CD28 or MOV19.CD28.CD40 receptors, all harbouring a DYKDDDDK epitope tag for detection. Transduced cells were mixed with FolR+/CA125+ OVCAR-OKT3 cells before analysis of effector activity using intracellular staining in the epitope tag positive and negative populations. Specific enhancement of effector activity determined by production of IL-2 (FIGS. 15A and 15B), TNFα (FIGS. 15C and 15D), CD137 (FIGS. 15E and 15F), and BCL-xL (FIGS. 15G and 15H) was observed in in CD28 and CD28.CD40 engineered cells in response to both CA125 and FolR, except for specific BCL-xL induction by MOV19.CD28 which was not observed compared to MOV19.CD28.CD40.

[0075] FIGS. 16A-16F depict three TIL populations mock transduced or engineered with MOV19.CD28.CD40 CoStAR and then mixed with patient matched tumor digest. The donor tumors displayed varying levels of FolR on the digest, ranging from negative (FIG. 16A), low expression (FIG. 16B) to high expression (FIG. 16C). Mock and CoStAR negative TIL in the CoStAR engineered populations of TIL matched for the FolR negative digest demonstrated similar levels of CD137 upregulation following tumor coculture which was not enhanced by the presence of CoStAR (FIG. 16D). In the TIL exposed to FolR low expressing digest there was an enhancement in activity in the CoStAR+ cells compared to CoStAR−, with CD137 expression increasing from <10% to >20% (FIG. 16E). In the TIL exposed to FolR high tumor digest there was an increase in activity from around 20% in the CoStAR− population, up to approximately 50% in the CoStAR+ population (FIG. 16F).

[0076] FIGS. 17A-17C depict enhancement of effector functions. A FolR targeting CoStAR enhanced CD137 expression from ˜20% to ˜50% (FIG. 17A), TNFα production from 10% to 15% (FIG. 17B) and IL-2 production from 2% to 5%. (FIG. 17C) in response to FolR+ tumor digest.

[0077] FIGS. 18A-18F depict soluble ligand does not inhibit effector functions. T-cells from three healthy donors were engineered with MOV19.CD28 or MOV19.CD28.CD40 CoStAR and activated with either immobilised OKT3, providing stimulation in the absence of FolR, or with OvCAR-OKT3, to provide TCR and CoStAR activity. BCL-xL activity was increased from between 10 and 20% across the three donors following OKT3 stimulation (FIG. 18A) whereas IL-2 was increased between 0 and 12% (FIG. 18B) and TNFα increased between 0 and 20% (FIG. 18C). The presence of exogenous soluble FolR did not enhance any of these particular effector functions. In the presence of OvCAR-OKT3 BCL-XL induction was enhanced by ˜20% in CD28 CoStAR but by ˜35% in CD28.CD40 CoStAR (FIG. 18D), IL-2 induction was enhanced by ˜20% in CD28 CoStAR but 30-50% in CD28.CD40 CoStAR (FIG. 18E) and TNFα production was enhanced by 20-30% in CD28 CoStAR and 25-50% in CD28.CD40 CoStAR (FIG. 18F). Exogenous soluble FolR did not have an inhibitory effect on any of these effector functions.

[0078] FIG. 19 depicts surface expression of anti-MSLN CoStAR expression on the surface of HD T cells. Transduced and non-transduced (MOCK) cells underwent a rapid expansion protocol (REP) and were assessed for transduction efficiency either via surface detection of the marker gene tCD34 (truncated CD34) or CoStAR molecule using an anti-CD34-APC (black) or anti-MSLN-PE (red) antibody, respectively. The results represent 3 biological replicates.

[0079] FIGS. 20A-20C depict cytokine expression in healthy donor (HD) T cells transduced with anti-MSLN CoStARs and cocultured with OVCAR-3 cell lines. CoStARs comprising combinations of six different anti-MSLN scFvs (SS1, M5, HN1, M912, huYP218, P4) and three different spacer/transmembrane domains (CD28, N-terminal truncated CD28, CD8) were compared. Structural details are provided in Table 8, Table 9, and Table 10. Cytokine concentrations for (FIG. 20A) IL-2 (FIG. 20B) IFNγ and (FIG. 20C) TNFα following cocultures with OVCAR-3 or OVCAR3-OKT3 cell lines are shown. Non-treated T cells were used as a control. The results represent 1-3 biological replicates with 3 technical replicates each.

[0080] FIGS. 21A-21C depict cytokine expression in healthy donor (HD) T cells transduced with anti-MSLN CoStARs and cocultured with K562 cell lines. CoStARs comprising combinations of six different anti-MSLN scFvs (SS1, M5, HN1, M912, huYP218, P4) and three different spacer/transmembrane domains (CD28, N-terminal truncated CD28, CD8) were compared. Structural details are provided in Table 8, Table 9, and Table 10. Cytokine concentrations for (FIG. 21A) IL-2 (FIG. 21B) IFNγ and (FIG. 21C) TNFα following cocultures with K562-MSNL or K562-MSNL-OKT3 cell lines are shown. Non-treated T cells were used as a control. The results represent 1-3 biological replicates with 3 technical replicates each.

[0081] FIG. 22 depicts surface expression of MFE23 scFV anti-CEA CoStARs expressed with six different secretion signal peptides (OSM1, CD8, CD2, IL2, GMCSF, hIgGκ). Structural details are provided in Table 11. Following expansion, cells were assessed for transduction efficiency either via surface detection of the marker gene truncated CD34 (tCD34) or CoStAR molecule using an anti-CD34-APC (black bars) or using a primary rhCEACAM5-Fc antibody with a secondary anti-IgG-Fc-PE (grey bars) antibody, respectively.

[0082] FIG. 23 depicts surface expression of CoStARs comprising six different anti-CEA scFvs (MFE23, MFE23(Q>K), hMFE23, CEA6, BW431/26, hT84.66). Structural details are provided in Table 12. Following expansion, cells were assessed for transduction efficiency either via surface detection of the marker gene truncated CD34 (tCD34) or CoStAR molecule using an anti-CD34-APC (black bars) or using a primary rhCEACAM5-Fc antibody with a secondary anti-IgG-Fc-PE (grey bars) antibody, respectively.

[0083] FIGS. 24A-24C depict cytokine production by healthy donor (HD) T cells transduced with anti-CEA CoStARs (MFE23, MFE23(Q>K), hMFE23, CEA6, BW431/26, hT84.66) and cocultured with LoVo cell lines. Structural details are provided in Table 12. Cytokine concentrations are shown for (FIG. 24A) IL-2 (FIG. 24B) IFNγ and (FIG. 24C) TNFα following cocultures with Lovo or Lovo-OKT3 cell lines. Non-treated T cells were used as a negative control.

[0084] FIGS. 25A-25C depict cytokine production in healthy donor (HD) T cells transduced with anti-CEA CoStARs (MFE23, MFE23(Q>K), hMFE23, CEA6, BW431/26, hT84.66) and cocultured with K562 cell lines. Cytokine concentrations are shown for (FIG. 25A) IL-2 (FIG. 25B) IFNγ and (FIG. 25C) TNFα following cocultures with K562.CEACAM5 (signal 2) or K562.CEACAM5.OKT3 (signal 1+2) cell lines. Non-treated T cells were used as a negative control.

[0085] FIG. 26 depicts surface expression of hMFE23 scFV anti-CEA CoStARs expressed with three different spacer/transmembrane domains. Structural details are provided in Table 13. Following expansion, cells were assessed for transduction efficiency via surface detection of the marker gene truncated CD34 (tCD34) using an anti-CD34-APC (black bars) or the CoStAR molecule using a primary rhCEACAM5-Fc antibody with a secondary anti-IgG-Fc-PE antibody (grey bars).

[0086] FIGS. 27A-27C depict cytokine production by the MFE23 scFV anti-CEA spacer variants. Cytokine concentrations for (FIG. 27A) IL-2 (FIG. 27B) IFNγ and (FIG. 27C) TNFα following cocultures with Lovo or Lovo.OKT3 cell lines are shown. Non-treated T cells were used as a control.

[0087] FIG. 28 depicts anti-CEA CoStARs comprising an hMFE23 CEA-binding domain with intracellular signalling domains comprising CD40, CD134, CD137, CD2, ICOS, DAP10 and NTRK1 signaling elements.

[0088] FIG. 29 depicts surface expression of hMFE23 scFV anti-CEA CoStARs comprising domain combinations depicted in FIG. 28 and detail in Table 14. Following expansion, cells were assessed for transduction efficiency via surface detection of the marker gene truncated CD34 (tCD34) using an anti-CD34-APC (black circles) or the CoStAR molecule using a primary rhCEACAM5-Fc antibody with a secondary anti-IgG-Fc-PE antibody (red circles). The results represent three biological replicates.

[0089] FIG. 30 depicts T cell phenotypes of CoStAR transfected HD T cells in three separate donors. Cells were sorted using CD34 microbeads and underwent a rapid expansion protocol (REP) for 14 days. Following outgrowth and REP, 1×10⁵ cells were assessed for the differentiation subtype using flow cytometry. Tcm, central memory T cell; Tem, effector memory T cell; Tn, naïve T cell; Tscm; stem cell memory T cell; Tte, terminal effector T cell. See Table 15 for T cell subtype definitions.

[0090] FIGS. 31A-31C depict cytokine production by hMFE23 scFV anti-CEA CoStAR transduced HD T cells cocultured with K562 cell lines. Cytokine concentrations for (FIG. 31A) IL-2, (FIG. 31B) IFNγ, and (FIG. 31C) TNFα are shown following cocultures with K562.CEACAM5 (signal 2) or K562.CEACAM5.OKT3 (signal 1+2) cell lines. Non-treated T cells were used as a control.

[0091] FIGS. 32A-32C depict cytokine expression in HD T cells transduced with hMFE23 scFV anti-MSLN CoStARs and cocultured with K562 cell lines. Frequency of (FIG. 32A) IL-2, (FIG. 32B) IFNγ, and (FIG. 32C) TNFα expressing cells is shown following cocultures with K562.CEACAM5 (signal 2) or K562.CEACAM5.OKT3 (signal 1+2) cell lines. Non-treated T cells were used as a control.

[0092] FIG. 33 depicts proliferation of HD T cells from transduced with hMFE23 scFV anti-MSLN CoStARs cocultured with K562.CEACAM5.OKT3 (signal 1+2) cell lines. HD T cells were procured from two donors. The figures represent fold expansion of input cells.

[0093] FIG. 34 depicts proliferation of HD T cells from transduced with hMFE23 scFV anti-MSLN CoStARs cocultured with K562.CEACAM5.OKT3 (signal 1+2) cell lines. HD T cells were procured from two donors. The figures represent fold expansion of input cells on Day 6 post stimulation.

[0094] FIGS. 35A-35B depict TRAF and TRAF-like binding sites and motifs and signalling pathways. FIG. 35A depicts a CoStAR CD40 intracellular domain showing TRAF binding sites and signalling. FIG. 35B depicts a CoStAR comprising an IProx domain.

[0095] FIGS. 36A-36B depict the effect of mutations in CoStAR CD40 intracellular signaling domain on cytokine secretion and long-term survival and proliferation of CD28.CD40 CoStAR transduced T cells cocultured with LoVo.OKT3. Cells of three donors were activated with Dynabeads and transduced with WT CD28.CD40 (CTP194), CD28.CD40 containing TRAF2 binding site mutation SVQE>AVQA (CTP195), TRAF2/TRAF3 binding site mutation PVQET>AVAEA (CTP196), TRAF6 binding site mutation PQEINF>AQAINF (CTP197), Q263A (CTP199), or mock transduced. (FIG. 36A) IL-2 was measured in supernatants collected 24 hours after coculture in absence of IL-2 with LoVo or LoVo.OKT3.GFP tumor cells. (FIG. 36B) Viability and absolute count were assessed after 6-8 days and live T cells were rechallenged for an additional week with fresh LoVo.OKT3.GFP tumor cells. At the end of the long-term coculture, the viability and absolute count were measured, and the fold expansion was calculated. Data shown as mean+/−SEM of n≤3 donors analysed in triplicates.

[0096] FIGS. 37A-37B depict percentage of TIL (FIG. 37A) and total TIL counts (FIG. 37B) based on CD2+ stain in thawed OC samples at day 1.

[0097] FIG. 38 depicts growth of non-Td and Td TILs. Cells were counted using CD2 and DRAQ7 staining and acquisition on the Novocyte 3005. Cell counts at the end of REP on day 25 are graphically represented. Shapes corresponding to the each of the 5 ovarian cancer samples are depicted. Filled shapes are Non-Td and open shapes are Td TILs. Statistical analysis was performed using a paired t-test.

[0098] FIGS. 39A-39D depict transduction efficiency and viral integrations per cell of CoStAR modified TILs. Nontransduced (Non-Td) and anti-FOLR1 CoStAR transduced (Td) TILs were assessed for the transduction efficiency on day 25 post REP in the CD3+(FIG. 39A), CD4+(FIG. 39B) and CD8+(FIG. 39C) cell populations. The viral copy number (VCN) was assesed to determine viral integrations (FIG. 39D). Shapes corresponding to the each of the 5 ovarian cancer samples are depicted. Filled shapes are non-Td and clear shapes are Td TILs.

[0099] FIG. 40 depicts CD4 and CD8 populations in post-REP TILs. Nontransduced (Non-Td) and anti-FOLR1 CoStAR− transduced (Td) and anti-FOLR1 CoStAR+Td TILs were assessed for the CD4 and CD8 composition on D25 post-REP using flow cytometry. Statistical analysis was performed using a two-way ANOVA with matched Tukey's multiple comparisons post-test.

[0100] FIGS. 41A-41C depict the effect of CoStAR modification on the differentiation status of TILs. Nontransduced (Non-Td), anti-FOLR1 CoStAR− transduced (Td) TILs and anti-FOLR1 CoStAR+Td TILs were assessed for their differentiation status on D25 post-REP from total T cell (FIG. 41A), CD4+(FIG. 41B) and CD8+(FIG. 41C) cell populations. Statistical analysis was performed using a two-way ANOVA with matched Tukey's multiple comparisons test. Statistical significance was observed for the Tscm population between the anti-FORL1 CoStAR− Td TILs and anti-FOLR1 CoStAR+Td TILs for CD3+(FIG. 41A) and CD4+(FIG. 41B) populations. *p<0.05.

[0101] FIGS. 42A-42B depict effects of CoStAR modification of TILs on co-inhibitory or co-stimulatory marker expression. Nontransduced (Non-Td), anti-FOLR1 CoStAR-transduced (Td) TILs and anti-FOLR1 CoStAR+Td TILs were assessed for the expression of co-inhibitory and co-stumulatory markers in CD4+(FIG. 42A) and CD8+(FIG. 42B) cell populations. Shapes corresponding to the each of the 5 ovarian cancer samples are depicted regardless of the filling. Black, dark grey and light grey bars represent Non-Td TILs, anti-FOLR1 CoStAR− Td and anti-FOLR1 CoStAR+Td TILs, respectively. Statistical analysis was performed using a Two-way ANOVA with a matched Tukey's multiple comparisons post-test. *p<0.05

[0102] FIGS. 43A-43B depicts effects of CoStAR modification on TCRαβ, TCRγδ and Treg frequency in TILs. Nontransduced (Non-Td), anti-FOLR1 CoStAR− transduced (Td) TILs and anti-FOLR1 CoStAR+Td TILs were assessed for the frequency of TCRαβ (CD3+TCRαβ+), and TCRγδ (CD3+TCRγ6+) in CD3+ cell populations (FIG. 43A). The frequency of Tregs in the CD4+ subpopulation was also assessed (FIG. 43B). Shapes corresponding to the each of the 5 ovarian cancer samples are depicted regardless of the filling. Black, dark grey and light grey bars represent Non-Td TILs, anti-FOLR1 CoStAR− Td TILs and anti-FOLR1 CoStAR+Td TILs, respectively. Statistical analysis was performed using a two-way ANOVA with matched Tukey's multiple comparisons post-test (FIG. 43A) and a one-way ANOVA with a Friedman's post-test (FIG. 43B).

[0103] FIGS. 44A-44C depict effects of CoStAR modification of TIL on cytokine production upon mitogenic activation. Nontransduced (Non-Td), anti-FOLR1 CoStAR-transduced (Td) TILs and anti-FOLR1 CoStAR+Td TILs were assessed for the producrtion of cytokines upon 4 hour stimulation with PMA (50 ng/mL)/Ionomycin (1 μg/mL) in CD3+(FIG. 44A), CD4+(FIG. 44B) and CD8+(FIG. 44C) cell populations. Shapes corresponding to the each of the 5 OC samples are depicted regardless of the filling. Black, dark grey and light grey bars represent Non-Td TILs, anti-FOLR1 CoStAR− Td TILs and anti-FOLR1 CoStAR+Td TILs, respectively. Statistical analysis was performed using a two-way ANOVA with matched Tukey's multiple comparisons post-test. * p<0.05, *** p<0.001.

[0104] FIG. 45 depicts Expression of FOLR1 on OC digest cells. Cryopreserved autologous tumor digest was thawed and analyzed by flow cytometry to determine the surface expression of FOLR1 of each donor. All 5 donors used in the study are shown. Abbreviations: OC, ovarian cancer, FOLR1, folate receptor alpha; FOLR1 PE, anti-FOLR1 antibody conjugated to PE; PE, phycoerythrin.

[0105] FIGS. 46A-46D depict effect of CoStAR modification on cytokine producing cells upon coculture with autologous tumors. Non-Td and anti-FOLR1 CoStAR Td TILs were cocultured with autologous tumor digests for 16 hours and intracellular flow cytometry was performed to evaluate the proportion of cells producing cytokines. The frequency of IL-2 positive (FIG. 46A) CD4 and (FIG. 46B) CD8 TILs as well as the frequency of TNFα positive (FIG. 46C) CD4 and (FIG. 46D) CD8 TILs were assessed. Results represent 5 biological replicates with 3 technical replicates each. Statistical analysis was performed using a two-way ANOVA with Tukey's multiple comparisons test. *P<0.05.

[0106] FIGS. 47A-47E depict the effect of CoStAR modification on cytokine secretion upon coculture with autologous tumor digests expressing FOLR1. Non-Td and anti-FOLR1 CoStAR transduced (Td) TILs were cocultured with autologous tumor digest for 24 hours, following which supernatants were collected and analyzed for cytokine secretion using an MSD immunoassay. The graphs represent measured concentrations of (FIG. 47A) IL-2, (FIG. 47B) TNFα, (FIG. 47C) IL-13 and (FIG. 47D) IFNγ in coculture supernatants. (FIG. 47E) Correlation between IFNγ concentration and FOLR1 expression by autologous digest as determined in FIG. 1. Results represent 5 biological replicates with 3 technical replicates each. Statistical analysis was performed using a two-way ANOVA with Sidak's multiple comparisons test. Correlation analysis was performed using a simple linear regression. *P<0.05, **P<0.01, ***P<0.001.

[0107] FIG. 48 depicts assessment of MHC-dependent CoStAR functionality in cocultures with autologous tumor digests. Non-Td and anti-FOLR1 CoStAR transduced (Td) TILs were cocultured with autologous tumor digests in the presence of MHC blocking reagents or isotype controls for 24 hours. The supernatants were then analyzed for IFNγ cytokine production using the MSD immunoassay. Results represent 3 biological replicates with 3 technical replicates each. Statistical analysis was performed using a two-way ANOVA with Tukey's multiple comparisons test.

[0108] FIGS. 49A-49B depicts the effect of CoStAR modification in cytokine producing cell frequencies upon coculture with engineered cell lines. Non-Td and anti-FORL1 CoStAR transduced (Td) TILs were cocultured with engineered target cell lines for 16 hours and cytokine producing cells were measured using intracellular flow cytometry. Frequency of IL-2 positive (FIG. 49A) in CD4+(top) and CD8+(bottom) TILs following coculture with K-562 (left) and OVCAR-3 (right) derived lines. Frequency of TNFα positive (FIG. 49B) in CD4+(top) and CD8+(bottom) TILs following coculture with K-562 (left) and OVCAR-3 (right) derived lines. Results represent 5 biological replicates with 3 technical replicates each. Statistical analysis was performed using a two-way ANOVA with Tukey's multiple comparisons test. *P<0.05, **P<0.01, ***P<0.001, ****P<0.0001.

[0109] FIGS. 50A-50D depict the effect of CoStAR modification in cytokine secretion upon coculture with engineered cell lines. Non-Td and anti-FOLR1 CoStAR transduced (Td) TILs were cocultured with engineered target cell lines for 24 hours and MSD immunoassay was performed to evaluate the concentration of cytokines secreted. Cytokine concentrations for (FIG. 50A) IL-2, (FIG. 50B) TNFα, (FIG. 50C) IL-13 and (FIG. 50D) IFNγ following cocultures with (left) K-562, and (right) BA/F3 derived cell lines are shown. The results represent 5 biological replicates with 3 technical replicates each. Statistical analysis was performed using a two-way ANOVA with Tukey's multiple comparisons test. *P<0.05, **P<0.01, ***P<0.001, ****P<0.0001.

[0110] FIGS. 51A-51C depict assessment of the impact of CoStAR modification on the cytotoxic capacity of TILs against OKT3 bearing targets. Non-Td and anti-FOLR1 CoStAR transduced (Td) TILs were cocultured with BA/F3 or OVCAR-3 engineered cell lines and the cytotoxicity was assessed using a flow cytometry based (FIG. 51A) and an xCELLigence-based assay (FIGS. 51B and 51C), respectively. (FIG. 51B) E:T ratio of 1:5 and (FIG. 51C) E:T ratio of 1:30. Results represent 5 biological replicates with 3 technical replicates each. Statistical analysis was performed using a two-way ANOVA with Tukey's multiple comparisons test for flow cytometry data and 1-way ANOVA with Tukey's multiple comparisons test for xCELLigence data. *P<0.05, **P<0.01.

[0111] FIGS. 52A-52D depict expansion of NSCLC TILs with >80% viability (FIG. 52A) and 100-200 million cells (FIG. 52B), 40-55% CoStar transduction in CD3+ T cells (FIG. 52C) and >90% CD3+ T cell purity (FIG. 52D).

[0112] FIG. 53 depicts expansion of NSCLC TILs with >80% viability. There was no difference in CoStAR transduced and nontransduced populations in terms of viability and cell expansion.

[0113] FIG. 54 depicts expansion of NSCLC TILs with 50-500 million cells at harvest. There was no differnce in CoStAR transduced and nontransduced populations in terms of viability and cell expansion.

[0114] FIG. 55 depicts T cell populations of seven patient samples.

[0115] FIG. 56 depicts CD3 vs CD56 which marks CD3+ as T cells and CD3-CD56+ as NK cells.

[0116] FIG. 57 depicts quantification of non-transduced and CoStAR transduced T cells.

[0117] FIG. 58 depicts CoStAR staining on T cell subsets.

[0118] FIGS. 59A-59D depict significant increase in viability of ovarian cancer TILs during REP and >90% viability at the end of the manufacturing process, with 100-300 million cells at harvest. FIG. 59A depicts the cell count and FIG. 59B depicts the viability of ovarian cancer TILs over 10 days. FIG. 59C depicts the cell count and FIG. 59D depicts the viability following the manufacturing process.

[0119] FIGS. 60A-60D depicts renal cancer TILs demonstrated consistently >50% viability during outgrowth and >90% viability at the end of the manufacturing process, with 100-350 million cells at harvest. FIG. 60A depicts the cell count and FIG. 60B depicts the viability of renal cancer TILs over 10 days. FIG. 60C depicts the cell count and FIG. 60D depicts the viability following the manufacturing process.

[0120] FIG. 61 depicts an experimental setup as outlined in Example 16, wherein CD40 signaling motif mutant constructs were incorporated into a cell to screen for changes to transcription.

[0121] FIG. 62A depicts the 23 day experimental approach for manufacturing TRAF variant CoSTARs in T cells, as outlined in Example 17.

[0122] FIG. 62B depicts the 26 day experimental approach for monitoring the effect of TRAF variant CoSTARs on proliferation in T cells, as outlined in Example 17.

[0123] FIG. 63A-63C depicts the change in total number of CD2+ T cells expressing TRAF variant CoSTARs with IL-2 treatment. Graphs are given for change in cell numbers from cells collected from donor HD 702C (FIG. 63A), HD 1004 (FIG. 63B), and HD 2000 (FIG. 63C).

[0124] FIG. 64A-64C depicts the fold-change in number of CD2+ T cells expressing TRAF variant CoSTARs with IL-2 treatment. Graphs are given for the fold change in cell numbers from cells collected from donor HD 702C (FIG. 64A), HD 1004 (FIG. 64B), and HD 2000 (FIG. 64C).

[0125] FIG. 65A-65C depicts the change in total number of CD2+ T cells expressing TRAF variant CoSTARs, wherein the T cells did not receive any IL-2 treatment. Graphs are given for change in cell numbers from cells collected from donor HD 702C (FIG. 65A), HD 1004 (FIG. 65B), and HD 2000 (FIG. 65C).

[0126] FIG. 66A-66C depicts the fold-change in number of CD2+ T cells expressing TRAF variant CoSTARs, wherein the T cells did not receive any IL-2 treatment. Graphs are given for the fold change in cell numbers from cells collected from donor HD 702C (FIG. 66A), HD 1004 (FIG. 66B), and HD 2000 (FIG. 66C).

[0127] FIG. 67 depicts some embodiments of CD40 TRAF variants of SEQ ID NOS: 510-519. In this figure, the underlined region is CD40, sequences highlighted in grey is the TRAF6 binding domain region, sequences highlighted in light grey is the TRAF2/3 binding domain, and sequences highlighted in grey and surrounded with double brackets is the TRAF2 binding domain.

[0128] FIG. 68 depicts the transduction levels of constructs into primary T cells collected from donor HD 702C, HD 1004, and HD 2000.

[0129] FIGS. 69A-69F depict the fold change in cell proliferation compared to baseline in primary human donors 702C (FIGS. 69A and 69D) 1004 (FIGS. 69B and 69E), and 2000 (FIGS. 69C and 69F) primary T cells expressing CoStAr constructs with TRAF6 variants, and with either IL-2 treatment (FIGS. 69A-69C) or without IL-2 treatment (FIGS. 69D-69F), as outlined in Example 18.

[0130] FIGS. 70A-70F depict the fold change in cell proliferation compared to baseline in primary human donors 702C (FIGS. 70A and 70D) 1004 (FIGS. 70B and 70E), and 2000 (FIGS. 70C and 70F) primary T cells expressing CoStAr constructs with TRAF2/3 variants, and with either IL-2 treatment (FIGS. 70A-70C) or without IL-2 treatment (FIGS. 70D-70F), as outlined in Example 18.

[0131] FIGS. 71A-71F depict the fold change in cell proliferation compared to baseline in primary human donors 702C (FIGS. 71A and 71D) 1004 (FIGS. 71B and 71E), and 2000 (FIGS. 71C and 71F) primary T cells expressing CoStAr constructs with TRAF2 variants, and with either IL-2 treatment (FIGS. 71A-71C) or without IL-2 treatment (FIGS. 71D-71F), as outlined in Example 18.

[0132] FIGS. 72A-72F depict the fold change in cell proliferation compared to baseline in primary human donors 702C (FIGS. 72A and 72D) 1004 (FIGS. 72B and 72E), and 2000 (FIGS. 72C and 72F) primary T cells expressing CoStAr constructs with various TRAF variants, and with either IL-2 treatment (FIGS. 72A-72C) or without IL-2 treatment (FIGS. 72D-72F), as outlined in Example 18.

[0133] FIGS. 73A-73D depict the combined data of FIGS. 69A-69C, 70A-70C, 71A-71C, and 72A-72C, in which the fold change in cell proliferation compared to baseline in primary T cells across three donors is graphed over time. The graphs show cells treated with IL-2, and represent the combined data for cells expressing a TRAF6 (FIG. 73A), TRAF2/3 (FIG. 73B), TRAF2 (FIG. 73C), or other TRAF (FIG. 73D) variant.

[0134] FIGS. 74A-74D depict the combined data of FIGS. 69A-69C, 70A-70C, 71A-71C, and 72A-72C, in which the fold change in cell proliferation compared to baseline in primary T cells across three donors is graphed over time. The graphs show cells that were not given IL-2 treatment, and represent the combined data for cells expressing a TRAF6 (FIG. 74A), TRAF2/3 (FIG. 74B), TRAF2 (FIG. 74C), or other TRAF (FIG. 74D) variant.

[0135] FIGS. 75A-75B depict the combined fold changes in cell proliferation compared to baseline in primary human T cells from 3 donors at Day 21 for cells with IL-2 treatment (FIG. 75A) and without IL-2 treatment (FIG. 75B).

[0136] FIGS. 76A-76C depict non-limiting examples of schematic models for universal costimulatory proteins with TRAF variants. (FIG. 76A) TCR incorporated antigen agnostic receptor (TIAAR) comprises modifying components of the TCR complex and associated signaling adaptors. (FIG. 76B) A constitutive costimulatory receptor comprising transmembrane domains (TMDs) and features that enable inducible or constitutive activation. (FIG. 76C) An inducible costimulatory receptor capable of induction and activation by extracellular ligand binding. In this non-limiting example, the TRAF variant is part of the CD40 domain (shown as “CD40*”).

[0137] FIGS. 77A-77C depict a non-limiting example protein construct of some embodiments herein. FIG. 77A is a general schematic of the protein comprising a universal CoStAR sequence, further comprising an optional section, a binding domain, a CD28 domain, and a CD40 domain with a TRAF variant. FIG. 77B is a schematic of some embodiments provided herein. FIG. 77C outlines a set of sequences of some embodiments provided herein.

[0138] FIG. 78 depicts set of sequences of some embodiments provided herein (SEQ ID NOS: 40839-41074). In some embodiments, these sequences are excluded from the consensus sequences or other TRAF variant constructs provided herein (including excluded from those in FIGS. 84 and 85).

[0139] FIG. 79 depicts set of sequences of some embodiments provided herein (SEQ ID NOS: 41075-43474). In some embodiments, these sequences are excluded from the consensus sequences or other TRAF variant constructs provided herein (including excluded from those in FIGS. 84 and 85).

[0140] FIG. 80 depicts a non-limiting example of mutation analysis of CD40 using constructs CTP195, CTP196, and CTP197 to assess the function of signaling motifs, as described in Example 13.

[0141] FIG. 81 depicts a non-limiting example of mutation analysis of CD40 using constructs CTP195, CTP196, CTP197, CTP198, and CTP199 to assess the function of signaling motifs, as described in Example 13.

[0142] FIG. 82A depicts the minor consensus sequence generated from the alignments of variants in the TRAF2 domain as shown in Table 1, wherein the highlighted amino acids are conserved across variants.

[0143] FIG. 82B depicts the major consensus sequence generated from the alignments of variants in the TRAF2 domain as shown in Table 1, wherein the highlighted amino acids are conserved across variants.

[0144] FIG. 82C depicts the consensus sequence generated from the alignments of variants in the TRAF6 domain as shown in Table 3, wherein the highlighted amino acids are conserved across variants.

[0145] FIG. 83 depicts non-limiting example sequences of variants in the TRAF2 domain (SEQ ID NOS: 520-679).

[0146] FIG. 84 depicts non-limiting example sequences of variants in the TRAF2/3 domain (SEQ ID NOS: 680-839).

[0147] FIG. 85 depicts non-limiting example sequences of variants in the TRAF6 domain (SEQ ID NOS: 840-40839).

[0148] FIGS. 86A-86D illustrate a schematic showing some embodiments of a FOLR1αCoStAR and/or a fusion protein with a CD40 variant. Some general embodiments are depicted in FIG. 86A. FIG. 86B depicts some embodiments of a FOLR1a CoStAR or a fusion protein. FIG. 86C depicts some embodiments of a CoStAR or a fusion protein. FIG. 86D depicts some embodiments of a CoStAR or a fusion protein. In some embodiments, the sequences described the structure in its entirety and no further functional aspects are required to describe the CoStAR or fusion protein. In some embodiments, any of the CD40, TRAF2, TRAF2/3, or TRAF6 variants provided herein, including those in FIGS. 28, 67, 77A-77C, 83-89D, and 92 (excluding those in FIGS. 78 and 79), and including those in Tables 2, 4-5, and 7-14, and including SEQ ID NOS: 42, 475-479, 494-498, 505, 510-519, and 840-40839, and Consensus sequences A-C, can be used in the present method and/or construct and/or protein.

[0149] FIGS. 87A-87D illustrate a schematic showing some embodiments of an anti-pembrolizumab CoStAR and/or a fusion protein with a CD40 variant. Some general embodiments are depicted in FIG. 87A. FIG. 87B depicts some embodiments of an anti-pembrolizumab CoStAR or a fusion protein. FIG. 87C depicts some embodiments of a CoStAR or a fusion protein. FIG. 87D depicts some embodiments of a CoStAR or a fusion protein. In some embodiments, the sequences describe the structure in its entirety and no further functional aspects are required to describe the CoStAR or fusion protein. In some embodiments, any of the CD40, TRAF2, TRAF2/3, or TRAF6 variants provided herein, including those in FIGS. 28, 67, 77A-77C, 83-89D, and 92 (excluding those in FIGS. 78 and 79), and including those in Tables 2, 4-5, and 7-14, and including SEQ ID NOS: 42, 475-479, 494-498, 505, 510-519, and 840-40839, and Consensus sequences A-C, can be used in the present method and/or construct and/or protein.

[0150] FIGS. 88A-88D illustrate a schematic showing some embodiments of a CEA CoStAR and/or a fusion protein with a CD40 variant. Some general embodiments are depicted in FIG. 88A. FIG. 88B depicts some embodiments of a CEA CoStAR or a fusion protein. FIG. 88C depicts some embodiments of a CoStAR or a fusion protein. FIG. 88D depicts some embodiments of a CoStAR or a fusion protein. In some embodiments, the sequences describe the structure in its entirety and no further functional aspects are required to describe the CoStAR or fusion protein. In some embodiments, any of the CD40, TRAF2, TRAF2/3, or TRAF6 variants provided herein, including those in FIGS. 28, 67, 77A-77C, 83-89D, and 92 (excluding those in FIGS. 78 and 79), and including those in Tables 2, 4-5, and 7-14, and including SEQ ID NOS: 42, 475-479, 494-498, 505, 510-519, and 840-40839, and Consensus sequences A-C, can be used in the present method and/or construct and/or protein.

[0151] FIGS. 89A-89D illustrate a schematic showing some embodiments of a CEA CoStAR and/or a fusion protein with a CD40 variant. Some general embodiments are depicted in FIG. 89A. FIG. 89B depicts some embodiments of a MSLN CoStAR or a fusion protein. FIG. 89C depicts some embodiments of a CoStAR or a fusion protein. FIG. 89D depicts some embodiments of a CoStAR or a fusion protein. In some embodiments, the sequences describe the structure in its entirety and no further functional aspects are required to describe the CoStAR or fusion protein. In some embodiments, any of the CD40, TRAF2, TRAF2/3, or TRAF6 variants provided herein, including those in FIGS. 28, 67, 77A-77C, 83-89D, and 92 (excluding those in FIGS. 78 and 79), and including those in Tables 2, 4-5, and 7-14, and including SEQ ID NOS: 42, 475-479, 494-498, 505, 510-519, and 840-40839, and Consensus sequences A-C, can be used in the present method and/or construct and/or protein.

[0152] FIGS. 90A-90C depict the quantity of cytokines TNF-alpha (FIG. 90A), IFN-gamma (FIG. 90B), and IL-2 (FIG. 90C) present after expression of T cells with CD40 variants, as outlined in Example 19.

[0153] FIGS. 91A-91B depict the IL-2 production (FIG. 91A) and fold expansion (FIG. 91B) in cells expressing one of constructs CTP194-CTP200, as outlined in Example 20.

[0154] FIG. 92 depicts schematics of the protein constructs CTP188-CTP202, as described herein.

### DETAILED DESCRIPTION OF THE INVENTION

[0155] The disclosure herein relates to sequences that encode variants of TRAF binding domains. In some embodiments, these variants can be for TRAF2, TRAF2/3, or TRAF6 domains. In some embodiments, the TRAF2 variant will include one or more of the variants or point mutations provided herein. In some embodiments, the TRAF2/3 variant will include one or more of the variants or point mutations provided herein. In some embodiments, the TRAF6 variant will include one or more of the variants or point mutations provided herein. In some embodiments, the TRAF2, TRAF2/3, or TRAF6 variant will be any one or more of those provided herein, including, for example, one or more of SEQ ID Nos: 475, 476, 477, 478, 479, 494, 495, 496, 498, 505, 510, 511, 512, 513, 514, 515, 516, 517, 518, or 519. In some embodiments, the variant will comprise any one or more of the constructs from Table 2, Table 4, Table 5, or FIG. 67. In some embodiments, the variant is not one of the constructs of FIG. 78 (SEQ ID NOS: 40839-41074) or FIG. 79 (SEQ ID NOS: 41075-43474). In some embodiments, the variant comprises at least one of the constructs of FIG. 83, FIG. 84, or FIG. 85. In some embodiments, the TRAF2, TRAF2/3, or TRAF6 variant will be part of a CD40 protein. In some embodiments, the CD40 protein is part of a CoSTAR protein or other fusion construct as provided herein. In some embodiments, the TRAF variant is expressed in a T cell as provided herein. In some embodiments, the TRAF variant is expressed in a cell as shown in FIGS. 76A-76C. In some embodiments, the TRAF variant is part of a peptide construct as shown in FIGS. 77A-77C, 86A-86D, 87A-87D, 88A-88D, and/or 89A-89D.

[0156] In some embodiments, any of the proteins and/or CoSTARs provided herein can employ a CD40 or TRAF variant instead of a wild-type CD40 or TRAF domain. Any of the CD40, TRAF2, TRAF2/3, or TRAF6 variants provided herein, including those in FIGS. 28, 67, 77A-77C, 83-89D, and 92 (excluding those in FIGS. 78 and 79), and including those in Tables 2, 4-5, and 7-14, and including SEQ ID NOS: 42, 475-479, 494-498, 505, 510-519, and 840-40839, and Consensus sequences A-C, can be used in the present method and/or construct and/or protein. For all descriptions of CD40, TRAF, TRAF2, TRAF2/3, and TRAF6 variants provided herein, in some embodiments, the sequences of FIGS. 78 and 79 are optionally to be excluded from the options of variants of the invention.

[0157] In some embodiments, the sequence is a variant of TRAF2. In some embodiments, the sequence is selected from any one of SEQ ID NOS: 520-679. In some embodiments, the sequence has about 60%, about 70%, about 80%, about 90%, about 95%, about 99%, about 100%, or any integer that is between about 60 and about 100%, identity to any one of SEQ ID NOS: 520-679. In some embodiments, the sequence is a variant of TRAF2/3. In some embodiments, the sequence is selected from any one of SEQ ID NOS: 680-839. In some embodiments, the sequence has about 60%, about 70%, about 80%, about 90%, about 95%, about 99%, about 100%, or any integer that is between about 60 and about 100%, identity to any one of SEQ ID NOS: 680-839. In some embodiments, the sequence is a variant of TRAF6. In some embodiments, the sequence is selected from any one of SEQ ID NOS: 840-40839. In some embodiments, the sequence has about 60%, about 70%, about 80%, about 90%, about 95%, about 99%, about 100%, or any integer that is between about 60 and about 100%, identity to any one of SEQ ID NOS: 840-40839. In some embodiments, the sequence comprises at least 2, 3, and/or 4 variants of TRAF.

[0158] In some embodiments, the sequence comprises a sequence from Table 2, 4, or 5. In some embodiments, the sequence comprises a sequence that has about 60%, about 70%, about 80%, about 90%, about 95%, about 99%, about 100%, or any integer that is between about 60 and about 100%, identity to a sequence from Table 2, 4, or 5. In some embodiments, the sequence is selected from any one of SEQ ID NOS: 475, 476, 477, 478, 479, 494, 495, 496, 498, 505, 510, 511, 512, 513, 514, 515, 516, 517, 518, and 519. In some embodiments, the sequence has about 60%, about 70%, about 80%, about 90%, about 95%, about 99%, about 100%, or any integer that is between about 60 and about 100%, identity to any one of SEQ ID NOS: 475, 476, 477, 478, 479, 494, 495, 496, 498, 505, 510, 511, 512, 513, 514, 515, 516, 517, 518, and 519.

[0159] Some embodiments of the present disclosure relate to a protein comprising an amino acid sequence comprising a sequence of Consensus A, or X₁X₂X₃X₄X₅X₆X₇X₈X₉X₁₀X₁₁. In some embodiments, X₁ is any amino acid, X₂ is any amino acid, X₃ is P, X₄ is any amino acid, X₅ is Q, X₆ is C, E, or A, X₇ is any amino acid, X₈ is any amino acid, X₉ is any amino acid, X₁₀ is any amino acid, and X₁₁ is any amino acid. In some embodiments, X₁, and X₂ are any amino acids, X₃ is P, X₄ is any amino acid, X₅ is Q, and X₆, X₇, X₈, X₉, X₁₀, and X₁₁ are any amino acids. In some embodiments, any one of X₁-X₁₁ is a naturally occurring amino acid. In some embodiments, any one of X₁-X₁₁ is a modified amino acid. In some embodiments, X₃ and/or X₅ is conservatively mutated to another amino acid with similar properties as P and/or Q, respectively. In some embodiments, the protein is part of a TRAF domain. In some embodiments, the protein is part of a TRAF2 domain. In some embodiments, the protein is part of a TRAF2/3 domain. In some embodiments, the sequence comprises: X₁ is S or P, X₂ is V, H, or Y, X₄ is I, Q, V, X₇ is T or S, X₈ is D, X₉ is K, D, or G, X₁₀ is T, S, G, or A, and X₁₁ is D, S, N, or D; or the sequence is at least 60%, at least 70%, at least 80%, at least 90%, at least 95%, at least 99%, and/or at least 100%, identical to (a). In some embodiments, the protein is of the sequence GSNTX₁X₂X₃X₄X₅X₆X₇X₈X₉X₁₀X₁₁, SEQ ID NO: 42299. In some embodiments, the protein is of the sequence X₁X₂X₃X₄X₅X₆X₇X₈X₉X₁₀X₁₁QPVT, SEQ ID NO: 42377. In some embodiments, the protein is of the sequence GSNTX₁X₂X₃X₄X₅X₆X₇X₈X₉X₁₀X₁₁QPVT, SEQ ID NO: 42378.

[0160] In some embodiments, provided is a protein comprising an amino acid sequence comprising a sequence of Consensus B, or X₁X₂X₃X₄X₅X₆X₇X₈X₉X₁₀X₁₁, wherein: X₁ is any amino acid, X₂ is any amino acid, X₃ is P, S, A, or T, X₄ is any amino acid, X₅ is Q or E, X₆ is E, X₇ is any amino acid, X₈ is any amino acid, X₉ is any amino acid, X₁₀ is any amino acid, and X₁₁ is any amino acid. In some embodiments, any one of X₁-X₁₁ is a naturally occurring amino acid. In some embodiments, any one of X₁-X₁₁ is a modified amino acid. In some embodiments, X₃ is conservatively mutated to another amino acid with similar properties as P, S, A, and/or T. In some embodiments, X₅ is conservatively mutated to another amino acid with similar properties as Q and/or E. In some embodiments, X₆ is conservatively mutated to another amino acid with similar properties as E. In some embodiments, the protein is part of a TRAF domain. In some embodiments, the protein is part of a TRAF2 domain. In some embodiments, the protein is part of a TRAF2/3 domain. In some embodiments, the sequence comprises: X₁ is P, A, M, T, S, R, V, H, X₂ is F, A, L, I, T, V, G, C, A, F, P, X₄ is K, V, I, H, A, Q, T, E, S, X₇ is C, T, E, D, S, A, X₈ is A, L, G, Y, I, Q, D, E, X₉ is F, H, K, R, P, A, G, Y, E, N, X₁₀ is R, G, E, K, A, S, D, C, C, P, V, and X₁₁ is S, C, D, P, W, T, A, G, E; or the sequence is at least 60%, at least 70%, at least 80%, at least 90%, at least 95%, at least 99%, and/or at least 100%, identical to (a). In some embodiments, the sequence is part of a Traf 2/3 sequence. In some embodiments, the protein is of the sequence GSNTX₁X₂X₃X₄X₅X₆X₇X₈X₉X₁₀X₁₁, SEQ ID NO: 42300. In some embodiments, the protein is of the sequence X₁X₂X₃X₄X₅X₆X₇X₈X₉X₁₀X₁₀QPVT, SEQ ID NO: 42379. In some embodiments, the protein is of the sequence GSNTX₁X₂X₃X₄X₅X₆X₇X₈X₉X₁₀X₁₁QPVT, SEQ ID NO: 42380.

[0161] In some embodiments, provided is a protein comprising an amino acid sequence comprising a sequence of Consensus C, or X₁X₂X₃X₄X₅X₆, wherein: X₁ is P, X₂ is any amino acid, X₃ is E, X₄ is any amino acid, X₅ is any amino acid, and X₆ is Ac/Ar. In some embodiments, X₁ is P, and X₂, X₃ X₄, X₅ and X₆ are any amino acids. In some embodiments, any one of X₁—X₆ is a naturally occurring amino acid. In some embodiments, any one of X₁—X₆ is a modified amino acid. In some embodiments, X₁ is conservatively mutated to another amino acid with similar properties as P. In some embodiments, X₆ is an aromatic amino acid. In some embodiments, X₆ is an acidic amino acid. In some embodiments, X₆ is conservatively mutated to another amino acid with similar properties as an acidic and/or aromatic amino acid. In some embodiments, X₆ is selected from Y, H, W, or F amino acids. In some embodiments, X₆ is selected from D or E amino acids. In some embodiments, the protein is part of a TRAF domain. In some embodiments, the protein is part of a TRAF6 domain. In some embodiments, the sequence comprises: X₂ is Q, P, E, V, T, or S, X₄ is I, L M, N, S, T, N, D, X₅ is N, D, R, S, G, or Y; or the sequence is at least 60%, at least 70%, at least 80%, at least 90%, at least 95%, at least 99%, and/or at least 100%, identical to (a). In some embodiments, the protein is of the sequence PKQEX₁X₂X₃X₄X₅X₆X₇X₈X₉X₁₀X₁₁, SEQ ID NO: 42301. In some embodiments, the protein is of the sequence X₁X₂X₃X₄X₅X₆PDDL, SEQ ID NO: 42381. In some embodiments, the protein is of the sequence PKQEX₁X₂X₃X₄X₅X₆PDDL, SEQ ID NO: 42382.

[0162] Consensus sequences A, B, and C were determined as shown in Tables 1 and 3 and FIGS. 82A-82C.

[0163] In some embodiments, the amino acid sequence comprises: (a) one or more of SEQ ID NOs: 475, 476, 477, 478, 479, 494, 495, 496, 498, 505, 510, 511, 512, 513, 514, 515, 516, 517, 518, or 519; or (b) a sequence that is at least 60%, at least 70%, at least 80%, at least 90%, at least 95%, at least 99%, and/or at least 100%, identical to (a).

[0164] In some embodiments the TRAF domain is in a CD40 protein, wherein the TRAF domain comprises one or more of: (a) SEQ ID NOs: 475, 476, 477, 478, 479, 494, 495, 496, 498, 505, 510, 511, 512, 513, 514, 515, 516, 517, 518, or 519; or (b) a sequence that is at least 60%, at least 70%, at least 80%, at least 90%, at least 95%, at least 99%, and/or at least 100%, identical to (a).

[0165] In some embodiments the TRAF6 domain sequence comprises: PQEINF, PEEMSW, PPENYE, or PQENSY. In some embodiments is a TRAF2/3 domain sequence comprising: PVQET, TQEET, SKEET, AVEET, or PVQET. In some embodiments is a TRAF2 domain sequence comprising: SVQE, AVEE or PEEE.

[0166] In some embodiments the TRAF 6 or TRAF2/3 domain comprises: (a) the amino acid sequence of one of SEQ ID NOs: 475, 476, 477, 478, 479, 494, 495, 496, 498, 505, 510, 511, 512, 513, 514, 515, 516, 517, 518, or 519; or (b) a sequence that is at least 60%, at least 70%, at least 80%, at least 90%, at least 95%, at least 99%, and/or at least 100%, identical to (a).

[0167] In some embodiments, the sequence is within a CD40 protein sequence for the protein, amino acid sequence, or TRAF domain of any one of the embodiments of the present disclosure. In some embodiments, the sequence is within a CD40 protein and is located at a corresponding TRAF 2, TRAF2/3, and/or TRAF6 domain within the CD40 protein.

[0168] In some embodiments, the TRAF2/TRAF3 domain comprises an amino acid sequence of Consensus A, or X₁X₂X₃X₄X₅X₆X₇X₈X₉X₁₀X₁₁, wherein X₁ is any amino acid, X₂ is any amino acid, X₃ is P, X₄ is any amino acid, X₅ is Q, X₆ is C, E, or A, X₇ is any amino acid, X₈ is any amino acid, X₉ is any amino acid, X₁₀ is any amino acid, and X₁₁ is any amino acid. In some embodiments, the protein is of the sequence GSNTX₁X₂X₃X₄X₅X₆X₇X₈X₉X₁₀X₁₁, SEQ ID NO: 42299. In some embodiments, the protein is of the sequence X₁X₂X₃X₄X₅X₆X₇X₈X₉X₁₀X₁₁QPVT, SEQ ID NO: 42377. In some embodiments, the protein is of the sequence GSNTX₁X₂X₃X₄X₅X₆X₇X₈X₉X₁₀X₁₁QPVT, SEQ ID NO: 42378.

[0169] In some embodiments the TRAF2/TRAF3 domain comprises an amino acid sequence of Consensus B, or. X₁X₂X₃X₄X₅X₆X₇X₈X₉X₁₀X₁₁, wherein X₁ is any amino acid, X₂ is any amino acid, X₃ is P, S, A, or T, X₄ is any amino acid, X₅ is Q or E, X₆ is E, X₇ is any amino acid, X₈ is any amino acid, X₉ is any amino acid, X₁₀ is any amino acid, and X₁₁ is any amino acid. In some embodiments, the protein is of the sequence GSNTX₁X₂X₃X₄X₅X₆X₇X₈X₉X₁₀X₁₁, SEQ ID NO: 42300. In some embodiments, the protein is of the sequence X₁X₂X₃X₄X₅X₆X₇X₈X₉X₁₀X₁₁QPVT, SEQ ID NO: 42379. In some embodiments, the protein is of the sequence GSNTX₁X₂X₃X₄X₅X₆X₇X₈X₉X₁₀X₁₁QPVT, SEQ ID NO: 42380.

[0170] In some embodiments the TRAF6 domain comprises an amino acid sequence of Consensus C, or X₁X₂X₃X₄X₅X₆, wherein X₁ is P, X₂ is any amino acid, X₃ is E, X₄ is any amino acid, X₅ is any amino acid, and X₆ is Ac/Ar. In some embodiments, the protein is of the sequence PKQEX₁X₂X₃X₄X₅X₆, SEQ ID NO: 42301. In some embodiments, the protein is of the sequence X₁X₂X₃X₄X₅X₆PDDL, SEQ ID NO: 42381. In some embodiments, the protein is of the sequence PKQEX₁X₂X₃X₄X₅X₆PDDL, SEQ ID NO: 42382.

[0171] In some embodiments the CD40 domain comprises an amino acid sequence of one or more of the following: (a) TRAF2/TRAF3 domain that comprises an amino acid sequence of Consensus A, or X₁X₂X₃X₄X₅X₆X₇X₈X₉X₁₀X₁₁, wherein X₁ is any amino acid, X₂ is any amino acid, X₃ is P, X₄ is any amino acid, X₅ is Q, X₆ is C, E, or A, X₇ is any amino acid, X₈ is any amino acid, X₉ is any amino acid, X₁₀ is any amino acid, and X₁₁ is any amino acid. (b) a TRAF2/TRAF3 domain that comprises an amino acid sequence of Consensus B, or X₁X₂X₃X₄X₅X₆X₇X₈X₉X₁₀X₁₁, wherein X₁ is any amino acid, X₂ is any amino acid, X₃ is P, S, A, or T, X₄ is any amino acid, X₅ is Q or E, X₆ is E, X₇ is any amino acid, X₈ is any amino acid, X₉ is any amino acid, X₁₀ is any amino acid, and X₁₁ is any amino acid. (c) a TRAF 6 domain that comprises an amino acid sequence of Consensus C, or X₁X₂X₃X₄X₅X₆, wherein X₁ is P, X₂ is any amino acid, X₃ is E, X₄ is any amino acid, X₅ is any amino acid, and X₆ is Ac/Ar.

[0172] In some embodiments, provided is a chimeric costimulatory antigen receptor (CoStAR) which comprises: an extracellular binding domain that binds to a tumor associated antigen; a transmembrane domain that is linked to the extracellular binding domain, a first signaling domain; and a second signaling domain, wherein the second signaling domain comprises a variant CD40 signaling domain or a signaling fragment thereof, wherein the variant CD40 comprises a sequence of a variant TRAF2/TRAF3 sequence, or a variant TRAF6 sequence, or a variant TRAF2 sequence, wherein the variant CD40 does not comprise SEQ ID NO: 42. In some embodiments, any of the CD40, TRAF2, TRAF2/3, or TRAF6 variants provided herein, including those in FIGS. 28, 67, 77A-77C, 83-89D, and 92 (excluding those in FIGS. 78 and 79), and including those in Tables 2, 4-5, and 7-14, and including SEQ ID NOS: 42, 475-479, 494-498, 505, 510-519, and 840-40839, and Consensus sequences A-C, can be used in the present method and/or construct and/or protein. The sequence options in FIGS. 78 and 79 can be optionally excluded from all of the embodiments provided herein.

[0173] In some embodiments, provided is a chimeric costimulatory antigen receptor (CoStAR) which comprises: an extracellular binding domain that binds to carcinoembryonic antigen (CEA), or an extracellular binding domain that binds to mesothelin (MSLN); a transmembrane domain that is linked to the extracellular binding domain, a first signaling domain; and a second signaling domain, wherein the second signaling domain comprises a variant CD40 signaling domain or a signaling fragment thereof, wherein the variant CD40 comprises a sequence of a variant TRAF2/TRAF3 sequence, or a variant TRAF6 sequence, or a variant TRAF2 sequence, wherein the variant CD40 does not comprise SEQ ID NO: 42. In some embodiments, the first signaling domain comprises a signaling domain or signaling fragment of CD28 or CD278 (ICOS). In some embodiments, the first signaling domain comprises a full-length costimulatory domain. In some embodiments, the construct is as shown in FIG. 88A. In some embodiments, the construct is as shown in FIG. 88B. In some embodiments, the construct is as shown in FIG. 88C. In some embodiments, any of the CD40, TRAF2, TRAF2/3, or TRAF6 variants provided herein, including those in FIGS. 28, 67, 77A-77C, 83-89D, and 92 (excluding those in FIGS. 78 and 79), and including those in Tables 2, 4-5, and 7-14, and including SEQ ID NOS: 42, 475-479, 494-498, 505, 510-519, and 840-40839, and Consensus sequences A-C, can be used in the present method and/or construct and/or protein. The sequence options in FIGS. 78 and 79 can be optionally exclude from all of the embodiments provided herein.

[0174] In some embodiments, the extracellular binding domain is operatively linked to the transmembrane domain by a linker and/or a spacer. In some embodiments, the linker comprises about 2, 3, 5, 10, 15, 20, 25, 50, 75, 100, 150, 200, 250, 300, 350, or any integer that is between 2 and 350, amino acids. In some embodiments, the linker comprises from about 5 to about 20 amino acids. In some embodiments, the linker comprises from about 10 to about 250 amino acids. In some embodiments, the linker comprises 5 amino acids. In some embodiments, the linker comprises 10 amino acids. In some embodiments, the linker comprises 20 amino acids. In some embodiments, the linker comprises 50 amino acids. In some embodiments, the linker comprises 100 amino acids. In some embodiments, the linker comprises 250 amino acids.

[0175] In some embodiments, the transmembrane domain comprises a transmembrane domain from CD28, CD8, ICOS, DAP10, or NTRK. In some embodiments, the transmembrane domain comprises a transmembrane domain from CD28. In some embodiments, the transmembrane domain comprises a transmembrane domain from CD8. In some embodiments, the transmembrane domain comprises a transmembrane domain from ICOS. In some embodiments, the transmembrane domain comprises a transmembrane domain from DAP10. In some embodiments, the transmembrane domain comprises a transmembrane domain from NTRK. In some embodiments, the transmembrane domain comprises the transmembrane domain sequence of SEQ ID NO:20, SEQ ID NO:21, or SEQ ID NO:22. In some embodiments, the transmembrane domain comprises a sequence that has about 60%, about 70%, about 80%, about 90%, about 95%, about 99%, about 100%, or any integer that is between about 60 and about 100%, identity to any one SEQ ID NOS:20, SEQ ID NO:21, or SEQ ID NO:22. In some embodiments, the extracellular binding domain comprises an scFv, a peptide, an antibody heavy-chain variable domain, an antibody light-chain variable domain, or a CEA ligand. In some embodiments, any of the CD40, TRAF2, TRAF2/3, or TRAF6 variants provided herein, including those in FIGS. 28, 67, 77A-77C, 83-89D, and 92 (excluding those in FIGS. 78 and 79), and including those in Tables 2, 4-5, and 7-14, and including SEQ ID NOS: 42, 475-479, 494-498, 505, 510-519, and 840-40839, and Consensus sequences A-C, can be used in the present method and/or construct and/or protein. The sequence options in FIGS. 78 and 79 can be optionally excluded from all of the embodiments provided herein.

[0176] In some embodiments is a nucleic acid which encodes the CD40 TRAF variant construct of any one of the embodiments of the present disclosure.

[0177] In some embodiments is a nucleic acid which encodes the CoStAR of any one of the embodiments of the present disclosure.

[0178] In some embodiments is a vector comprising the nucleic acid of any one of the embodiments of the present disclosure.

[0179] In some embodiments is a cell which expresses the CD40 TRAF variant construct of any one of the embodiments of the present disclosure. In some embodiments, the cell comprises an alpha-beta T cell, gamma-delta T cell, T regulatory cell, TIL, NKT cell or NK cell. In some embodiments, the cell co-expresses a CAR or a TCR.

[0180] In some embodiments is a cell which expresses the CoStAR of any one of the embodiments of the present disclosure. In some embodiments, the cell comprises an alpha-beta T cell, gamma-delta T cell, T regulatory cell, TIL, NKT cell or NK cell. In some embodiments, the cell co-expresses a CAR or a TCR.

[0181] In some embodiments is a method of making the cell of any one of the embodiments of the present disclosure, which comprises the step of transducing or transfecting a cell with a vector of any one of the embodiments of the present disclosure

[0182] In some embodiments is a method for preparing a population of cells that express a CoStAR of any one the embodiments of the present disclosure, which comprises: detecting expression of the CoStAR on the surface of cells transfected or transduced with a vector of alternative 62; and selecting cells which are identified as expressing the CoStAR.

[0183] In some embodiments is a cell population which is enriched for cell expression a CoStAR of any one of the embodiments of the present disclosure.

[0184] In some embodiments is a method for treating a disease in a subject, which comprises the step of administering a cell according to any one of the embodiments of the present disclosure, or a cell population according to any one of the embodiments of the present disclosure, to the subject.

[0185] In some embodiments is a protein comprising the amino acid sequence of one of SEQ ID NOs: 510-519. In some embodiments, the protein comprises a sequence that has about 60%, about 70%, about 80%, about 90%, about 95%, about 99%, about 100%, or any integer that is between about 60 and about 100%, identity to any one SEQ ID NOS: SEQ ID NOs: 510-519. In some embodiments, the protein comprises the sequence of SEQ ID NO: 510. In some embodiments, the protein comprises a sequence that has about 60%, about 70%, about 80%, about 90%, about 95%, about 99%, about 100%, or any integer that is between about 60 and about 100%, identity to SEQ ID NO: 510. In some embodiments, the protein comprises the sequence of SEQ ID NO: 511. In some embodiments, the protein comprises a sequence that has about 60%, about 70%, about 80%, about 90%, about 95%, about 99%, about 100%, or any integer that is between about 60 and about 100%, identity to SEQ ID NO: 511. In some embodiments, the protein comprises the sequence of SEQ ID NO: 512. In some embodiments, the protein comprises a sequence that has about 60%, about 70%, about 80%, about 90%, about 95%, about 99%, about 100%, or any integer that is between about 60 and about 100%, identity to SEQ ID NO: 512. In some embodiments, the protein comprises the sequence of SEQ ID NO: 513. In some embodiments, the protein comprises a sequence that has about 60%, about 70%, about 80%, about 90%, about 95%, about 99%, about 100%, or any integer that is between about 60 and about 100%, identity to SEQ ID NO: 513. In some embodiments, the protein comprises the sequence of SEQ ID NO: 514. In some embodiments, the protein comprises a sequence that has about 60%, about 70%, about 80%, about 90%, about 95%, about 99%, about 100%, or any integer that is between about 60 and about 100%, identity to SEQ ID NO: 514. In some embodiments, the protein comprises the sequence of SEQ ID NO: 515. In some embodiments, the protein comprises a sequence that has about 60%, about 70%, about 80%, about 90%, about 95%, about 99%, about 100%, or any integer that is between about 60 and about 100%, identity to SEQ ID NO: 515. In some embodiments, the protein comprises the sequence of SEQ ID NO: 516. In some embodiments, the protein comprises a sequence that has about 60%, about 70%, about 80%, about 90%, about 95%, about 99%, about 100%, or any integer that is between about 60 and about 100%, identity to SEQ ID NO: 516. In some embodiments, the protein comprises the sequence of SEQ ID NO: 517. In some embodiments, the protein comprises a sequence that has about 60%, about 70%, about 80%, about 90%, about 95%, about 99%, about 100%, or any integer that is between about 60 and about 100%, identity to SEQ ID NO: 517. In some embodiments, the protein comprises the sequence of SEQ ID NO: 518. In some embodiments, the protein comprises a sequence that has about 60%, about 70%, about 80%, about 90%, about 95%, about 99%, about 100%, or any integer that is between about 60 and about 100%, identity to SEQ ID NO: 518. In some embodiments, the protein comprises the sequence of SEQ ID NO: 519. In some embodiments, the protein comprises a sequence that has about 60%, about 70%, about 80%, about 90%, about 95%, about 99%, about 100%, or any integer that is between about 60 and about 100%, identity to SEQ ID NO: 519. In some embodiments, any of the CD40, TRAF2, TRAF2/3, or TRAF6 variants provided herein, including those in FIGS. 28, 67, 77A-77C, 83-89D, and 92 (excluding those in FIGS. 78 and 79), and including those in Tables 2, 4-5, and 7-14, and including SEQ ID NOS: 42, 475-479, 494-498, 505, 510-519, and 840-40839, and Consensus sequences A-C, can be used in the present method and/or construct and/or protein. The sequence options in FIGS. 78 and 79 can be optionally excluded from all of the embodiments provided herein.

[0186] In some embodiments is an immune cell comprising an extracellular tumor-associated antigen (TAA) specific binding domain and a transmembrane domain, comprising: a) a CD28 intracellular signalling domain; and b) a CD40 intracellular signalling domain, wherein the CD40 intracellular signalling domain comprises a TRAF variant of any one of the embodiments of the present disclosure. In some embodiments is an isolated nucleic acid molecule encoding the chimeric receptor of an immune cell comprising an extracellular tumor-associated antigen (TAA) specific binding domain and a transmembrane domain, wherein the nucleic acid molecule further comprises a TRAF variant of any one of the embodiments of the present disclosure. In some embodiments, any of the CD40, TRAF2, TRAF2/3, or TRAF6 variants provided herein, including those in FIGS. 28, 67, 77A-77C, 83-89D, and 92 (excluding those in FIGS. 78 and 79), and including those in Tables 2, 4-5, and 7-14, and including SEQ ID NOS: 42, 475-479, 494-498, 505, 510-519, and 840-40839, and Consensus sequences A-C, can be used in the present method and/or construct and/or protein. The sequence options in FIGS. 78 and 79 can be optionally excluded from all of the embodiments provided herein.

[0187] In some embodiments is a chimeric costimulatory receptor (CoStAR) comprising an extracellular ligand binding fragment of a first costimulatory receptor and an intracellular signalling fragment of a second costimulatory receptor fused to a tumour associated antigen specific binding domain linked to a signalling domain, wherein the CoStAR further comprises a TRAF variant of any one of the embodiments of the present disclosure. In some embodiments is a CoStAR comprising an antigen specific binding domain, which is selected from: (a) a single chain antibody fragment which binds a tumour, associated antigen including, but not limited to, carcinoembryonic antigen (CEA), 5T4, melanotransferrin (CD228), Her2, EGFR, GPC3, melanoma-associated chondroitin sulphate proteoglycan (MCSP/CSPG4), CD71, folate receptor or CA125; or (b) a single chain antibody fragment which binds a tumour specific peptide (p)-major histocompatibility (MHO) complex; or (c) a tumour specific pMHC complex antigen specific single chain T-cell receptor (scTCR); or (d) a natural antigen binding polypeptide such as, but not limited to, transferrin; or (e) a domain which bind an antibody (e.g. Fe binding domains such as, but not limited to, CD16, CD32 or CD64), or other indirect method of antigen recognition. In some embodiments, the CoStAr is fused to at least one of: (1) a fusion signalling domain comprising or consisting of full length human CD28, or a variant thereof having at least 60%, 70%, 80%, 90%, 95%, 99%, 100%, or any integer that is between 60 and 100%, sequence identity at the protein level; (2) the intracellular domain from human CD137, such as or a variant thereof having at least 60%, 70%, 80%, 90%, 95%, 99%, 100%, or any integer that is between 60 and 100%, sequence identity at the protein level, (3) the intracellular domain from human CD134, or a variant thereof having at least 60%, 70%, 80%, 90%, 95%, 99%, 100%, or any integer that is between 60 and 100%, sequence identity at the protein level, (4) the intracellular domain from human CD2, or a variant thereof having at least 60%, 70%, 80%, 90%, 95%, 99%, 100%, or any integer that is between 60 and 100%, sequence identity at the protein level, (5) the intracellular domain from human CD29, or a variant thereof having at least 60%, 70%, 80%, 90%, 95%, 99%, 100%, or any integer that is between 60 and 100%, sequence identity at the protein level, (6) the intracellular domain from human GITR, or a variant thereof having at least 60%, 70%, 80%, 90%, 95%, 99%, 100%, or any integer that is between 60 and 100%, sequence identity at the protein level, (7) the intracellular domain from human IL2R-gamma, or a variant thereof having at least 60%, 70%, 80%, 90%, 95%, 99%, 100%, or any integer that is between 60 and 100%, sequence identity at the protein level, (8) the intracellular domain from human CD40, or a variant thereof having at least 60%, 70%, 80%, 90%, 95%, 99%, 100%, or any integer that is between 60 and 100%, sequence identity at the protein level, (9) the intracellular domain from human CD150, or a variant thereof having at least 60%, 70%, 80%, 90%, 95%, 99%, 100%, or any integer that is between 60 and 100%, sequence identity at the protein level, and/or (10) the intracellular domain from human CD2 and human CD40, or a variant thereof having at least 60%, 70%, 80%, 90%, 95%, 99%, 100%, or any integer that is between 60 and 100%, sequence identity at the protein level. In some embodiments, any of the CD40, TRAF2, TRAF2/3, or TRAF6 variants provided herein, including those in FIGS. 28, 67, 77A-77C, 83-89D, and 92 (excluding those in FIGS. 78 and 79), and including those in Tables 2, 4-5, and 7-14, and including SEQ ID NOS: 42, 475-479, 494-498, 505, 510-519, and 840-40839, and Consensus sequences A-C, can be used in the present method and/or construct and/or protein. The sequence options in FIGS. 78 and 79 can be optionally excluded from all of the embodiments provided herein.

[0188] In some embodiments is a chimeric costimulatory antigen receptor (CoStAR) which comprises: an extracellular binding domain operatively linked to a transmembrane domain, a CD28 signaling domain and a CD40 signaling domain, wherein the at least one extracellular binding domain comprises the amino acid sequence of SEQ ID NO:42275, wherein the CD28 signaling domain comprises the amino acid sequence of SEQ ID NO: 42276, and wherein the CD40 signaling domain comprises the amino acid sequence of SEQ ID NO: 42277. In some embodiments the CoStAR further comprises at least one TRAF variant of any one of the embodiments of the present disclosure. In some embodiments is a protein that comprises: a first portion that comprises the amino acid sequence of SEQ ID NO:42275 that is linked to; a second portion that comprises a transmembrane domain that is linked to; a third portion that comprises the amino acid sequence of SEQ ID NO: 42276 that is linked to; a fourth portion that comprises the amino acid sequence of SEQ ID NO: 42277. In some embodiments the protein further comprises at least one TRAF variant of any one of the embodiments of the present disclosure. In some embodiments is a protein that comprises: a first portion that comprises the amino acid sequence of SEQ ID NO: 42275; a second portion that comprises the amino acid sequence of SEQ ID NO: 42278; a third portion that comprises the amino acid sequence of SEQ ID NO: 42276; a fourth portion that comprises the amino acid sequence of SEQ ID NO: 42277; and a fifth portion that comprises SEQ ID NO: 42279, wherein the first portion is linked to the second portion by the fifth portion, wherein the third portion is linked to the second portion, and wherein the fourth portion is linked to the third portion. In some embodiments the protein further comprises at least one TRAF variant of any one of the embodiments of the present disclosure. In some embodiments, any of the CD40, TRAF2, TRAF2/3, or TRAF6 variants provided herein, including those in FIGS. 28, 67, 77A-77C, 83-89D, and 92 (excluding those in FIGS. 78 and 79), and including those in Tables 2, 4-5, and 7-14, and including SEQ ID NOS: 42, 475-479, 494-498, 505, 510-519, and 840-40839, and Consensus sequences A-C, can be used in the present method and/or construct and/or protein. The sequence options in FIGS. 78 and 79 can be optionally excluded from all of the embodiments provided herein.

[0189] In some embodiments is a chimeric costimulatory antigen receptor (CoStAR) which comprises: an extracellular binding domain comprising a VH of antibody 196-14 and a VL of antibody 196-14, operatively linked to a transmembrane domain, a CD28 signaling domain and a CD40 signaling domain, wherein the CD28 signaling domain comprises the amino acid sequence of SEQ ID NO: 42276, and wherein the CD40 signaling domain comprises the amino acid sequence of SEQ ID NO: 42277. In some embodiments the CoStAR further comprises at least one TRAF variant of any one of the embodiments of the present disclosure. In some embodiments is a cell population enriched for cell expression of a CoStAR, the CoStAR comprising: an extracellular binding domain comprising a VH of antibody 196-14 and a VL of antibody 196-14, operatively linked to a transmembrane domain, a CD28 signaling domain and a CD40 signaling domain, wherein the CD28 signaling domain comprises the amino acid sequence of SEQ ID NO: 42276, and wherein the CD40 signaling domain comprises the amino acid sequence of SEQ ID NO: 42277. In some embodiments the CoStAR further comprises at least one TRAF variant of any one of the embodiments of the present disclosure. In some embodiments, any of the CD40, TRAF2, TRAF2/3, or TRAF6 variants provided herein, including those in FIGS. 28, 67, 77A-77C, 83-89D, and 92 (excluding those in FIGS. 78 and 79), and including those in Tables 2, 4-5, and 7-14, and including SEQ ID NOS: 42, 475-479, 494-498, 505, 510-519, and 840-40839, and Consensus sequences A-C, can be used in the present method and/or construct and/or protein. The sequence options in FIGS. 78 and 79 can be optionally excluded from all of the embodiments provided herein.

[0190] In some embodiments is a CoStAR which comprises: an extracellular binding domain operatively linked to a transmembrane domain, a first signaling domain, a CD40 signaling domain or a fragment thereof, and at least one TRAF variant of any one of the embodiments of the present disclosure. In some embodiments, the CD40 signaling fragment comprises an SH3 motif (KPTNKAPH, SEQ ID NO: 42280), TRAF2 motif (PKQE, SEQ ID NO: 42281, PVQE, SEQ ID NO: 42282, SVQE, SEQ ID NO: 42283), TRAF6 motif (QEPQEINFP, SEQ ID NO: 42284), PKA motif (KKPTNKA, SEQ ID NO: 42285, SRISVQE, SEQ ID NO: 42286), or a combination thereof, or is a full length CD40 intracellular domain. In some embodiments, the first signaling domain comprises a signaling domain or signaling fragment of CD2, CD9, CD26, CD27, CD28, CD29, CD38, CD40, CD43, CD46, CD49d, CD55, CD73, CD81, CD82, CD99, CD100, CD134 (OX40), CD137 (41BB), CD150 (SLAM), CD270 (HVEM), CD278 (ICOS), CD357 (GITR), or EphB6. In some embodiments, the extracellular binding domain binds to CD70, CD146, FOLRI, carcinoembryonic antigen (CEA), 5T4, mellanotransferrin (CD228), Her2, EGFR, GPC3, melanoma-associated chondroitin sulphate proteoglycan (MCSP/CSPG4), CD71, EPCAM, SM5-1, folate receptor or CA125, PDL-1, CD155 PD-I, mesothelin, or a tumor specific peptide (p)-major histocompatability (MHC) complex, or a tumor specific pMHC complex antigen specific single chain T-cell receptor (scTCR), or transferrin, or an antibody or antigen binding protein. In some embodiments, any of the CD40, TRAF2, TRAF2/3, or TRAF6 variants provided herein, including those in FIGS. 28, 67, 77A-77C, 83-89D, and 92 (excluding those in FIGS. 78 and 79), and including those in Tables 2, 4-5, and 7-14, and including SEQ ID NOS: 42, 475-479, 494-498, 505, 510-519, and 840-40839, and Consensus sequences A-C, can be used in the present method and/or construct and/or protein. The sequence options in FIGS. 78 and 79 can be optionally excluded from all of the embodiments provided herein.

[0191] In some embodiments is a chimeric costimulatory antigen receptor (CoStAR) which comprises: an extracellular binding domain specific for a tumor associated antigen (TAA) operatively linked to a transmembrane domain, a CD28 signaling domain, a CD40 signaling domain or a signaling fragment thereof, and at least one TRAF variant of any one of the embodiments of the present disclosure. In some embodiments, the CoStAR is specific for FOLR1. In some embodiments, the CoStAR is specific for PDL1. In some embodiments, the CoStAR is specific for CEA. In some embodiments, the extracellular binding domain comprises MOV19 scFv. In some embodiments, the extracellular binding domain is specific for CD70, CD146, FOLR1, carcinoembryonic antigen (CEA), 5T4, mellanotransferrin (CD228), Her2, EGFR, GPC3, melanoma-associated chondroitin sulphate proteoglycan (MCSP/CSPG4), CD71, EPCAM, SM5-1, folate receptor or CA125, PDL-1, CD155 PD-1, mesothelin, or a tumor specific peptide (p)-major histocompatability (MHC) complex, or a tumor specific pMHC complex antigen specific single chain T-cell receptor (scTCR), or transferrin, or an antibody or antigen binding protein. In some embodiments, any of the CD40, TRAF2, TRAF2/3, or TRAF6 variants provided herein, including those in FIGS. 28, 67, 77A-77C, 83-89D, and 92 (excluding those in FIGS. 78 and 79), and including those in Tables 2, 4-5, and 7-14, and including SEQ ID NOS: 42, 475-479, 494-498, 505, 510-519, and 840-40839, and Consensus sequences A-C, can be used in the present method and/or construct and/or protein. The sequence options in FIGS. 78 and 79 can be optionally excluded from all of the embodiments provided herein.

[0192] In some embodiments is a fusion protein comprising: at least one TRAF variant of any one of the embodiments of the present disclosure, (a) a binding domain, wherein the binding domain comprises: an L-CDR1 sequence comprising the amino acid sequence of SEQ ID NO: 42287, an L-CDR2 sequence comprising the amino acid sequence of SEQ ID NO: 42288, an L-CDR3 sequence comprising the amino acid sequence of SEQ ID NO: 42289, an H-CDR1 sequence comprising the amino acid sequence of SEQ ID NO: 42290, an H-CDR2 sequence comprising the amino acid sequence of SEQ ID NO: 42291, and an H-CDR3 sequence comprising the amino acid sequence of SEQ ID NO: 173; (b) an amino acid sequence of SEQ ID NO: 42293 linked to the binding domain; (c) an amino acid sequence of SEQ ID NO: 42294 linked to (b); (d) an amino acid sequence of SEQ ID NO: 42295 linked to (c); and (e) an amino acid sequence of SEQ ID NO: 42296 linked to (d). In some embodiments is a fusion protein comprising the amino acid sequence of SEQ ID NO: 42297 or 42298, and at least one TRAF variant of any one of the embodiments of the present disclosure. In some embodiments, any of the CD40, TRAF2, TRAF2/3, or TRAF6 variants provided herein, including those in FIGS. 28, 67, 77A-77C, 83-89D, and 92 (excluding those in FIGS. 78 and 79), and including those in Tables 2, 4-5, and 7-14, and including SEQ ID NOS: 42, 475-479, 494-498, 505, 510-519, and 840-40839, and Consensus sequences A-C, can be used in the present method and/or construct and/or protein. The sequence options in FIGS. 78 and 79 can be optionally excluded from all of the embodiments provided herein.

[0193] In some embodiments is an engineered protein comprising a clustering domain and a signaling domain comprising a CD40 signaling domain or signaling fragment thereof and at least one TRAF variant of any one of the embodiments of the present disclosure is provided, wherein the clustering domain is capable of oligomerization whereby the signaling domain is activated. In some embodiments the protein comprises a constitutively stimulating antigen agnostic receptor (C-SAAR). In some embodiments, the protein comprises at least one of: LZ(cFos)-EGFRTM/JMD-CD28-CD40, LZ(cFos)-CD28TM-CD28-CD40, LZ(cJun)-EGFRTM/JMDCD28-CD40, LZ(cJun)-CD28TM-CD28-CD40, LZ(c/EBP)-EGFRTM/JMD-CD28-CD40, or LZ(c/EBP)-CD28TM-CD28-CD40. In some embodiments, the protein further comprises an inducible costimulatory receptor. In some embodiments, the protein comprises at least one of: anti-ID1-VHVL(A3 0514-pembro)-CD28TMD-CD28-CD40, or Anti-ID 1-VL-VH(A3 0514-pembro)CD28TMD-CD28-CD40, or Anti-ID2-VH-VL(A3 0523-pembro)-CD28TMD-CD28-CD40, or anti-ID2-VL-Vh(A3 0523-pembro)-CD28TMD-CD28-CD40, or Anti-ID3-Vh-VL(A3063 3-pembro)-CD28TMD-CD28-CD40, or Anti-ID3-VL-VH(A 3063 3-pembro)-CD28TMD-CD28-CD40. In some embodiments, the engineered protein comprises a transmembrane domain and the clustering domain oligomerizes when the engineered protein is bound by a ligand. In some embodiments, any of the CD40, TRAF2, TRAF2/3, or TRAF6 variants provided herein, including those in FIGS. 28, 67, 77A-77C, 83-89D, and 92 (excluding those in FIGS. 78 and 79), and including those in Tables 2, 4-5, and 7-14, and including SEQ ID NOS: 42, 475-479, 494-498, 505, 510-519, and 840-40839, and Consensus sequences A-C, can be used in the present method and/or construct and/or protein. The sequence options in FIGS. 78 and 79 can be optionally excluded from all of the embodiments provided herein.

[0194] In some embodiments is a CoStAR which comprises an extracellular binding domain that binds to carcinoembryonic antigen (CEA) and at least one TRAF variant of any one of the embodiments of the present disclosure. In some embodiments, the extracellular binding domain is operatively linked to ICOS, wherein ICOS comprises the amino acid sequence of SEQ ID NO: 515, wherein ICOS is linked to a CD40 signaling domain, and wherein the extracellular binding domain comprises: a HCDR1 that is an HCDR1 in SEQ ID NO: 12; a HCDR2 that is an HCDR2 in SEQ ID NO: 12; a HCDR3 that is an HCDR3 in SEQ ID NO: 12; a LCDR1 that is an LCDR1 in SEQ ID NO: 12; a LCDR2 that is an LCDR2 in SEQ ID NO: 12; and a LCDR3 that is an HCDR3 in SEQ ID NO: 12. In some embodiments is a fusion protein comprising at least one TRAF variant of any one of the embodiments of the present disclosure, wherein the fusion protein further comprises a HCDR1 that is an HCDR1 in SEQ ID NO: 12; a HCDR2 that is an HCDR2 in SEQ ID NO: 12; a HCDR3 that is an HCDR3 in SEQ ID NO: 12; a LCDR1 that is an LCDR1 in SEQ ID NO: 12; a LCDR2 that is an LCDR2 in SEQ ID NO: 12; and a LCDR3 that is an HCDR3 in SEQ ID NO: 12. In some embodiments, the construct is as shown in FIG. 88A. In some embodiments, the construct is as shown in FIG. 88B. In some embodiments, the construct is as shown in FIG. 88C. In some embodiments, any of the CD40, TRAF2, TRAF2/3, or TRAF6 variants provided herein, including those in FIGS. 28, 67, 77A-77C, 83-89D, and 92 (excluding those in FIGS. 78 and 79), and including those in Tables 2, 4-5, and 7-14, and including SEQ ID NOS: 42, 475-479, 494-498, 505, 510-519, and 840-40839, and Consensus sequences A-C, can be used in the present method and/or construct and/or protein. The sequence options in FIGS. 78 and 79 can be optionally excluded from all of the embodiments provided herein.

[0195] In some embodiments is a CoStAR which comprises: an extracellular binding domain that binds to mesothelin (MSLN) and at least one TRAF variant of any one of the embodiments of the present disclosure. In some embodiments, the CoStAR further comprises a transmembrane domain; a CD28 signaling domain, wherein the CD28 signaling domain comprises the amino acid sequence of SEQ ID NO: 25; and a CD40 signaling domain, wherein the extracellular binding domain comprises any one of: a HCDR1 that is an HCDR1 in SEQ ID NO: 186, a HCDR2 that is an HCDR2 in SEQ ID NO: 186, a HCDR3 that is an HCDR3 in SEQ ID NO: 186, a LCDR1 that is an LCDR1 in SEQ ID NO: 186, a LCDR2 that is an LCDR2 in SEQ ID NO: 186, and LCDR3 that is an LCDR3 in SEQ ID NO: 186; a HCDR1 that is an HCDR1 in SEQ ID NO: 187, a HCDR2 that is an HCDR2 in SEQ ID NO: 187, a HCDR3 that is an HCDR3 in SEQ ID NO: 187, a LCDR1 that is an LCDR1 in SEQ ID NO: 187, a LCDR2 that is an LCDR2 in SEQ ID NO: 187, and LCDR3 that is an LCDR3 in SEQ ID NO: 187; a HCDR1 that is an HCDR1 in SEQ ID NO: 188, a HCDR2 that is an HCDR2 in SEQ ID NO: 188, a HCDR3 that is an HCDR3 in SEQ ID NO: 188, a LCDR1 that is an LCDR1 in SEQ ID NO: 188, a LCDR2 that is an LCDR2 in SEQ ID NO: 188, and LCDR3 that is an LCDR3 in SEQ ID NO: 188; a HCDR1 that is an HCDR1 in SEQ ID NO: 189, a HCDR2 that is an HCDR2 in SEQ ID NO: 189, a HCDR3 that is an HCDR3 in SEQ ID NO: 189, a LCDR1 that is an LCDR1 in SEQ ID NO: 189, a LCDR2 that is an LCDR2 in SEQ ID NO: 189, and LCDR3 that is an LCDR3 in SEQ ID NO: 189; a HCDR1 that is an HCDR1 in SEQ ID NO: 190, a HCDR2 that is an HCDR2 in SEQ ID NO: 190, a HCDR3 that is an HCDR3 in SEQ ID NO: 190, a LCDR1 that is an LCDR1 in SEQ ID NO: 190, a LCDR2 that is an LCDR2 in SEQ ID NO: 190, and LCDR3 that is an LCDR3 in SEQ ID NO: 190; a HCDR1 that is an HCDR1 in SEQ ID NO: 191, a HCDR2 that is an HCDR2 in SEQ ID NO: 191, a HCDR3 that is an HCDR3 in SEQ ID NO: 191, a LCDR1 that is an LCDR1 in SEQ ID NO: 191, a LCDR2 that is an LCDR2 in SEQ ID NO: 191, and LCDR3 that is an LCDR3 in SEQ ID NO: 191; a VH that is a VH in SEQ ID NO: 186, and a VL that is a VL in SEQ ID NO: 186; a VH that is a VH in SEQ ID NO: 187, and a VL that is a VL in SEQ ID NO: 187; a VH that is a VH in SEQ ID NO: 188, and a VL that is a VL in SEQ ID NO: 188; a VH that is a VH in SEQ ID NO: 189, and a VL that is a VL in SEQ ID NO: 189; a VH that is a VH in SEQ ID NO: 190, and a VL that is a VL in SEQ ID NO: 190; or a VH that is a VH in SEQ ID NO: 191, and a VL that is a VL in SEQ ID NO: 191. In some embodiments is a fusion protein comprising at least one TRAF variant of any one of the embodiments of the present disclosure. In some embodiments, the fusion protein further comprises a first sequence, comprising any one or more of: a HCDR1 that is an HCDR1 in SEQ ID NO: 186, a HCDR2 that is an HCDR2 in SEQ ID NO: 186, a HCDR3 that is an HCDR3 in SEQ ID NO: 186, a LCDR1 that is an LCDR1 in SEQ ID NO: 186, a LCDR2 that is an LCDR2 in SEQ ID NO: 186, and LCDR3 that is an LCDR3 in SEQ ID NO: 186; a HCDR1 that is an HCDR1 in SEQ ID NO: 187, a HCDR2 that is an HCDR2 in SEQ ID NO: 187, a HCDR3 that is an HCDR3 in SEQ ID NO: 187, a LCDR1 that is an LCDR1 in SEQ ID NO: 187, a LCDR2 that is an LCDR2 in SEQ ID NO: 187, and LCDR3 that is an LCDR3 in SEQ ID NO: 187; a HCDR1 that is an HCDR1 in SEQ ID NO: 188, a HCDR2 that is an HCDR2 in SEQ ID NO: 188, a HCDR3 that is an HCDR3 in SEQ ID NO: 188, a LCDR1 that is an LCDR1 in SEQ ID NO: 188, a LCDR2 that is an LCDR2 in SEQ ID NO: 188, and LCDR3 that is an LCDR3 in SEQ ID NO: 188; a HCDR1 that is an HCDR1 in SEQ ID NO: 189, a HCDR2 that is an HCDR2 in SEQ ID NO: 189, a HCDR3 that is an HCDR3 in SEQ ID NO: 189, a LCDR1 that is an LCDR1 in SEQ ID NO: 189, a LCDR2 that is an LCDR2 in SEQ ID NO: 189, and LCDR3 that is an LCDR3 in SEQ ID NO: 189; a HCDR1 that is an HCDR1 in SEQ ID NO: 190, a HCDR2 that is an HCDR2 in SEQ ID NO: 190, a HCDR3 that is an HCDR3 in SEQ ID NO: 190, a LCDR1 that is an LCDR1 in SEQ ID NO: 190, a LCDR2 that is an LCDR2 in SEQ ID NO: 190, and LCDR3 that is an LCDR3 in SEQ ID NO: 190; a HCDR1 that is an HCDR1 in SEQ ID NO: 191, a HCDR2 that is an HCDR2 in SEQ ID NO: 191, a HCDR3 that is an HCDR3 in SEQ ID NO: 191, a LCDR1 that is an LCDR1 in SEQ ID NO: 191, a LCDR2 that is an LCDR2 in SEQ ID NO: 191, and LCDR3 that is an LCDR3 in SEQ ID NO: 191; a VH that is a VH in SEQ ID NO: 186, and a VL that is a VL in SEQ ID NO: 186; a VH that is a VH in SEQ ID NO: 187, and a VL that is a VL in SEQ ID NO: 187; a VH that is a VH in SEQ ID NO: 188, and a VL that is a VL in SEQ ID NO: 188; a VH that is a VH in SEQ ID NO: 189, and a VL that is a VL in SEQ ID NO: 189; a VH that is a VH in SEQ ID NO: 190, and a VL that is a VL in SEQ ID NO: 190; or a VH that is a VH in SEQ ID NO: 191, and a VL that is a VL in SEQ ID NO: 191. In some embodiments, the fusion protein further comprises a second sequence that is a transmembrane domain, a third sequence that comprises the amino acid sequence of SEQ ID NO: 25; and a fourth sequence that comprises the amino acid sequence of SEQ ID NO: 32, wherein the first sequence is linked to the second sequence, wherein the second sequence is linked to the third sequence, and wherein the third sequence is linked to the fourth sequence. In some embodiments, any of the CD40, TRAF2, TRAF2/3, or TRAF6 variants provided herein, including those in FIGS. 28, 67, 77A-77C, 83-89D, and 92 (excluding those in FIGS. 78 and 79), and including those in Tables 2, 4-5, and 7-14, and including SEQ ID NOS: 42, 475-479, 494-498, 505, 510-519, and 840-40839, and Consensus sequences A-C, can be used in the present method and/or construct and/or protein. The sequence options in FIGS. 78 and 79 can be optionally excluded from all of the embodiments provided herein.

[0196] In some embodiments is a CoStAR comprising at least one TRAF variant of any one of the embodiments of the present disclosure, wherein the CoStAR is capable of CoStAR-ligand-inducible activation of an immune cell bearing a T cell receptor (TCR) when the TCR is engaged by a target of the TCR, which comprises an extracellular ligand binding domain specific for the inducing ligand, a transmembrane domain, and an intracellular signaling domain. In some embodiments is a cell expressing the CoStAR, antibody, or protein of any one of the embodiments of the present disclosure. In some embodiments, the cell comprises an alpha-beta T cell. In some embodiments, the alpha-beta T cell comprises a tumor infiltrating lymphocyte (TIL). In some embodiments the CoStAR does not comprise a full length CD28 extracellular domain. In some embodiments the CoStAR comprises a truncated CD28 extracellular domain or a CD8 extracellular domain located between the ligand binding domain and the transmembrane domain. In some embodiments, the intracellular signaling domain comprises one or more of CD28, CD40, CD137, OX40, ICOS, CD2, or DAP10 or signaling fragments thereof. In some embodiments, the ligand-binding domain binds to tafasitamab, cetuximab, trastuzumab, and/or pembrolizumab. In some embodiments, any of the CD40, TRAF2, TRAF2/3, or TRAF6 variants provided herein, including those in FIGS. 28, 67, 77A-77C, 83-89D, and 92 (excluding those in FIGS. 78 and 79), and including those in Tables 2, 4-5, and 7-14, and including SEQ ID NOS: 42, 475-479, 494-498, 505, 510-519, and 840-40839, and Consensus sequences A-C, can be used in the present method and/or construct and/or protein. The sequence options in FIGS. 78 and 79 can be optionally excluded from all of the embodiments provided herein.

[0197] In some embodiments is a method of cell therapy, the method comprising identifying a subject in need thereof and administering the CoStAR, fusion protein, nucleic acid, vector, or cell of any one of the embodiments of the present disclosure.

[0198] In some embodiments is a method for preparing a population of cells enriched for the CoStAR or protein expressing the TRAF variant, the method comprising detecting expression of the CoStAR or protein on the surface of the cells transfected or transduced with a vector of any one of the embodiments of the present disclosure and selecting cells with are identified as expressing the CoStAR or protein.

[0199] In some embodiments is a method for treating a disease in a subject in need thereof, the method comprising administering the cell or cell population of any one of the embodiments of the present disclosure to the subject.

### CD40 and TRAF

[0200] CD40 is a TNF receptor superfamily member that provides activation signals in antigen-presenting cells such as B cells, macrophages, and dendritic cells. Multimerization of CD40 by its ligand initiates signaling by recruiting TNF receptor-associated factors (TRAFs) to the CD40 cytoplasmic domain. TRAF binding sites are responsible for the intracellular signalling of CD40.

[0201] The TRAF domain mediates oligomerization of TRAF proteins as well as their association with upstream receptors or adaptors and downstream effector proteins. The RING domain is best known for its function to mediate protein ubiquitination in a large family of E3 ubiquitinase ligases. Among the major downstream pathways regulated by TRAFs are those leading to activation of the nuclear factor kappa beta (NF-κB) and mitogen-activated protein kinases (MAPKs), which are in turn important for induction of genes associated with innate immunity, inflammation, and cell survival. TRAF2 and TRAF3, function as negative regulators in some signaling pathways involved in the survival of B cells and inflammatory responses of innate immune cells.

[0202] The canonical pathway of NF-κB is induced by TNFα, IL-1, or LPS and uses a large variety of signalling adaptors to engage IKK activity. Phosphorylation of serine residues in the signal responsive region (SRR) of classical IκBs by IKKβ leads to IκB ubiquitination and subsequent proteosomal degradation. This results in release of the NF-κB dimer, which can then translocate to the nucleus and induce transcription of target genes. The non-canonical pathway depends on NIK (NF-κB-inducing kinase) induced activation of IKKα. IKKα phosphorylates the p100 NF-κB subunit, which leads to proteosomal processing of p100 to p52. This results in the activation of p52-RelB dimers, which target specific κB elements.

[0203] It has been discovered that costimulatory receptors comprising a CD40 signaling domain display novel and improved activity profiles. It has further been discovered that variants of TRAF2, TRAF2/3, and TRAF6 binding domains within CD40 modulate signaling. The activity profiles can be modulated by selecting an intracellular domain of a receptor protein for joining to the CD40 signaling domain and/or by selecting elements of the CD40 signaling domains to join to the intracellular domain of a receptor protein. Provided herein are recombinant costimulatory antigen receptors (CoStARs) comprising: (i) a disease- or tumor-associated antigen binding domain, (ii) a first intracellular segment comprising an intracellular signaling domain of a receptor protein, and (iii) a second intracellular signaling domain of a CD40 receptor protein or signal transducing fragment thereof. Optionally, the CoStAR comprises an extracellular segment of a stimulatory receptor protein. In some embodiments, the extracellular segment of the stimulatory receptor protein is capable of binding ligand. In some embodiments, the extracellular segment of a stimulatory receptor protein is truncated and does not bind ligand. In some embodiments the extracellular segment of the stimulatory receptor protein operates as an adjustable length spacer allowing the disease- or tumor-associated antigen binding domain to be located away from the surface of the cell in which it is expressed for example to form a more optimal immune synapse. In some embodiments, the extracellular segment of a stimulatory receptor protein and the first intracellular segment comprise segments of the same receptor protein. In some embodiments, the extracellular segment and the first intracellular segment comprise segments of different receptor proteins. The CoStARs comprise an intervening transmembrane domain between the disease or tumor antigen binding domain and the first intracellular domain. When an extracellular segment of a stimulatory receptor protein is present, the transmembrane domain is intervening between the extracellular segment and the first intracellular signaling domain. In some embodiments, any of the CD40, TRAF2, TRAF2/3, or TRAF6 variants provided herein, including those in FIGS. 28, 67, 77A-77C, 83-89D, and 92 (excluding those in FIGS. 78 and 79), and including those in Tables 2, 4-5, and 7-14, and including SEQ ID NOS: 42, 475-479, 494-498, 505, 510-519, and 840-40839, and Consensus sequences A-C, can be used in the present methods and/or constructs and/or proteins. The sequence options in FIGS. 78 and 79 can be optionally excluded from all of the embodiments provided herein.

[0204] As used herein, “full length protein” or “full length receptor” refers to a receptor protein, such as, for example, a CD28 receptor protein. The term “full length” encompasses receptor proteins lacking up to about 5 or up to 10 amino acids, for example 1, 2, 3, 4, 5, 6, 7, 8, 9, or 10 amino acids, at the N-terminal of the mature receptor protein once its signal peptide has been cleaved. For instance, while a specific cleavage site of a receptors N-terminal signal peptide may be defined, variability in exact point of cleavage has been observed. The term “full length” does not imply presence or absence of amino acids of the receptors N-terminal signal peptide. In one embodiment, the term “full length” (e.g. a full length CD28 or a full length CD40 intracellular domain, according to certain aspects of the invention) encompasses mature receptor proteins (e.g. CD28 according to certain aspects of the invention) lacking the N terminal signal peptide lacking up to about 5, for example 1, 2, 3, 4, 5, or up to 10 amino acids at the N-terminal of the mature receptor protein once its signal peptide has been cleaved. As mentioned above, a “full length” CD28 receptor or other receptor or tumor antigen binding domain according to the various aspects of the invention does not include the signal peptide and may lack up to about 5, for example 1, 2, 3, 4, 5, or up to 10 amino acids at the N-terminal of the mature receptor protein (e.g. N terminal residues N, K, I, L and/or V). This is shown in the exemplary fusions, e.g. SEQ ID Nos. 4-12 (note that these may lack up to about 5, for example 1, 2, 3, 4, 5, or up to 10 amino acids at the N-terminal of the mature receptor protein as shown in the boxed region).

[0205] CoStARs have modular form and can be constructed to comprise extracellular, transmembrane and intracellular domains obtained from a one or more proteins, along with the scFv obtained from an antibody that binds to a disease-associated antigen, for example, a tumor associated antigen.

[0206] According to the invention, in one embodiment, a CoStAR comprises a disease-associated, for example a tumor-associated, antigen receptor, such as but not limited to a tumor-associated antigen specific scFv, and a primary costimulatory receptor protein that is capable of binding to its cognate ligand and providing an intracellular signal. In some embodiments, the primary costimulatory receptor can be less than a full length protein but is sufficient to bind cognate ligand and transduce a signal. In some embodiments, the primary costimulatory receptor domain is full length, such as but not limited to, full length CD28. Thus, both the antigen specific binding domain and the ligand specific receptor are capable of binding cognate antigen and ligand respectively. The amino acid sequences provided herein provide embodiments of several CoStAR constructs. These include CoStARs constructs that comprise an antigen binding domain, an optional spacer, an optional costimulatory receptor protein comprising an extracellular ligand binding segment or fragment thereof and intracellular CD40 signaling domain. In another embodiment, a CoStAR comprises an antigen binding domain, an optional spacer, an extracellular ligand-binding portion of a costimulatory receptor protein, a transmembrane domain, and an intracellular signaling domain of a selected costimulatory receptor protein and intracellular CD40 signaling domain. In some embodiments, the extracellular ligand-binding portion comprises a CD28 truncation, for example, a C-terminal CD28 truncation after amino acids IEV, and is followed by an intracellular signaling domain. In some embodiments, the intracellular signaling domain is from CD40. The transmembrane domain separating the extracellular ligand-binding and intracellular signaling domains can be from, with limitation, CD28, CD40. In further embodiments, CoStARs can comprise additional costimulatory domains, for example a third, intracellular costimulatory signaling domain and in this respect may be similar to certain chimeric antigen receptors (CARs), which have been classified into first (CD3ζ only), second (one costimulatory domain+CD3ζ), or third generation (more than one costimulatory domain+CD3ζ).

[0207] Costimulatory receptor proteins useful in CoStARs of the invention include, without limitation, CD2, CD9, CD26, CD27, CD28, CD29, CD38, CD40, CD43, CD46, CD49d, CD55, CD73, CD81, CD82, CD99, CD100, CD134 (OX40), CD137 (41BB), CD150 (SLAM), CD270 (HVEM), CD278 (ICOS), CD357 (GITR), or EphB6, which in their natural form comprise extracellular ligand binding domains and intracellular signal transducing domains. For example, CD2 is characterized as a cell adhesion molecule found on the surface of T cells and is capable of initiating intracellular signals necessary for T cell activation. CD27 is characterized as a type II transmembrane glycoprotein belonging to the TNFR superfamily (TNFRSF) whose expression on B cells is induced by antigen-receptor activation in B cells. CD28 is one of the proteins on T cells and is the receptor for CD80 (B7.1) and CD86 (B7.2) ligands on antigen-presenting cells. CD137 (4-1BB) ligand is found on most leukocytes and on some non-immune cells. OX40 ligand is expressed on many antigen-presenting cells such as DC2s (dendritic cells), macrophages, and B lymphocytes. In one embodiment, the costimulatory receptor protein is full length CD28 as defined herein.

[0208] CD40 is a member of the tumor necrosis factor receptor (TNFR) superfamily and several isoforms are generated by alternative splicing. Its ligand, CD154 (also called CD40L) is a protein that is primarily expressed on activated T cells. For reference, the human CD40 isoform 1 protein sequence is set forth in GenBank accession No. NP_001241.1, including signal peptide (amino acids 1-20), transmembrane domain (amino acids 194-215), and cytoplasmic domain (amino acids 216-277)(SEQ ID NO:32). CD40 receptor signaling involves adaptor proteins including but not limited to TNF receptor-associated factors (TRAF), and the CD40 cytoplasmic domain comprises signaling components, including amino acid sequences fitting an SH3 motif (KPTNKAPH) (SEQ ID NO:35), TRAF2 motif (PKQE (SEQ ID NO:36), PVQE (SEQ ID NO:37), SVQE (SEQ ID NO:38)), TRAF6 motif (QEPQEINFP) (SEQ ID NO:39) and PKA motif (KKPTNKA (SEQ ID NO:40), SRISVQE (SEQ ID NO:41)). The invention further includes engineered signaling domains, such as engineered CD40 signaling domains, comprising TRAF-binding amino acid sequences. Engineered signaling domains that bind to TRAF1, TRAF2, TRAF3, and TRAF5 may comprise the major consensus sequence (P/S/A/T)X(Q/E)E or minor consensus sequence PXQXXD and can be identified in or obtained from, without limitation, TNFR family members such as CD30, OX40, 41BB, and the EBV oncoprotein LMP1. (See, e.g., Ye, H et al., The Structural Basis for the Recognition of Diverse Receptor Sequences by TRAF2. Molecular Cell, 1999; 4(3):321-30. doi: 10.1016/51097-2765(00)80334-2; Park H H, Structure of TRAF Family: Current Understanding of Receptor Recognition. Front. Immunol. 2018; 9:1999. doi: 10.3389/fimmu.2018.01999; Chung, J. Y. et al., All TRAFs are not created equal: common and distinct molecular mechanisms of TRAF-mediated signal transduction. Journal of Cell Science 2002; 115:679-688).

[0209] Examples disclosed herein demonstrate operation of CD40 as a costimulatory signaling domain in a CoStAR and further that cytokine and chemokine expression profiles are altered by signaling domain selection. In some embodiments, the costimulatory CD40 signaling domain of a CoStAR promotes pro-inflammatory cytokines (e.g., IL-2, TNFα). In some embodiments, the costimulatory CD40 signaling domain of a CoStAR reduces immunosuppressive cytokines (e.g., IL-5, IL-10). Costimulatory activity of a CD40 signaling domain or fragment can be observed in combination with a first receptor signaling domain such as but not limited to CD2, CD9, CD26, CD27, CD28, CD29, CD38, CD40, CD43, CD46, CD49d, CD55, CD73, CD81, CD82, CD99, CD100, CD134 (OX40), CD137 (41BB), CD150 (SLAM), CD270 (HVEM), CD278 (ICOS), CD357 (GITR), or EphB6, as compared to activity of the first receptor signaling domain without the CD40 signaling domain or fragment. In this regard, the CD40 signaling domains of the invention, including signaling fragments comprising particular factor binding sites or wherein particular factor binding sites are mutated, in combination with a costimulatory first signaling domain, are capable of promoting or suppressing relative expression of particular cytokines and/or chemokines as compared to the first signaling domain alone. activity of a costimulatory signaling domain. (See, e.g., Ahonen, C L et al., The CD40-TRAF6 axis controls affinity maturation and the generation of long-lived plasma cells. Nat Immunol. 2002; 3: 451-456; Mackey M F et al., Distinct contributions of different CD40 TRAF binding sites to CD154-induced dendritic cell maturation and IL-12 secretion. Eur J Immunol. 2003; 33: 779-789; Mukundan L et al., TNF receptor-associated factor 6 is an essential mediator of CD40-activated proinflammatory pathways in monocytes and macrophages. J Immunol. 2005; 174: 1081-1090.

[0210] In some embodiments, a CoStAR of the invention comprises substantially all of a CD40 costimulatory domain. In some embodiments, a CoStAR of the invention comprises two or more CD40 costimulatory domains. In some embodiments, a CoStAR of the invention comprises a CD40 costimulatory domain signaling component or fragment or motif. In some embodiments, the CD40 signaling fragment or motif comprises, consists, or consists essentially of an SH3 binding sequence (e.g., without limitation, KPTNKAPH (SEQ ID NO:35), PTNKAPHP (SEQ ID NO:443) or PTNKAPH (SEQ ID NO:444)), TRAF2/TRAF3 binding sequence (e.g., without limitation, PKQE (SEQ ID NO:506), PKQET (SEQ ID NO:445), PVQE (SEQ ID NO:507), PVQET (SEQ ID NO:446), SVQE (SEQ ID NO:508), SVQET (SEQ ID NO:447)), TRAF6 binding sequence (e.g., without limitation, PQEINF (SEQ ID NO:509), QEPQEINF (SEQ ID NO:448) or QEPQEINFP (SEQ ID NO:39)) or PKA sequence (e.g., without limitation, KKPTNKA (SEQ ID NO:40), or SRISVQE (SEQ ID NO:41) as well as two or more, or three or more, or four or more such components or motifs, or combinations thereof, which can be in multiple copies and arranged in any order. In some embodiments, a CoStAR of the invention comprises a CD40 costimulatory domain and a CD40 costimulatory domain signaling component or motif. In some embodiments, one or more of the SH3, TRAF2/TRAF3, TRAF6, or PKA motifs of the CD40 signaling domain is mutated. In some embodiments, the SH3 motif, TRAF2/TRAF3 motif, and TRAF6 motif are sufficient to modulate pro-inflammatory and/or immunosuppressive cytokines. In some embodiments, adding tandem copies of those motifs and/or mutating certain motifs amplifies these effects.

[0211] Table 1 provides non-limiting examples of TRAF2/TRAF3 binding domains. The alignments of Table 1 with the minor and major consensus sequences are as shown in FIGS. 82A-82B, respectively.

TABLE 1
Exemplary TRAF2/TRAF3 binding sequences

| | | | | | | | | | | | | SEQ |
|---|---|---|---|---|---|---|---|---|---|---|---|---|
| | | | | | | | | | | | | ID |
| Source | P-4 | P-3 | P-2 | P-1 | P0 | P1 | P2 | P3 | P4 | P5 | P6 | NO. |
| hTNFR2 | P | F | S | K | E | E | C | A | F | R | S | 450 |
| hCD40 | A | A | P | V | Q | E | T | L | H | G | C | 451 |
| hCD30 | M | L | S | V | E | E | E | G | K | E | D | 452 |
| hCD27 | T | I | P | I | Q | E | D | Y | R | K | P | 453 |
| hLTβR | S | T | P | H | Q | E | D | G | K | A | W | 454 |
| hATAR | T | V | A | V | E | E | T | I | P | S | T | 455 |
| hOX40 | R | T | P | I | Q | E | E | Q | A | D | A | 456 |
| m41BB | T | G | A | A | Q | E | E | D | A | C | S | 457 |
| m41BB | R | C | P | Q | E | E | E | G | G | G | G | 458 |
| h41BB | V | Q | T | T | Q | E | E | D | G | C | S | 459 |
| h41BB | R | F | P | E | E | E | E | G | G | C | E | 460 |
| bLMP1 | R | T | P | V | Q | E | S | G | Y | P | D | 461 |
| bLMP1 | R | P | P | V | Q | E | T | G | G | G | G | 462 |
| bLMP1 | H | P | P | V | Q | E | T | G | G | G | G | 463 |
| bLMP1 | H | P | P | V | Q | E | T | G | E | G | G | 464 |
| bLMP1 | H | P | P | I | Q | E | T | G | N | G | G | 465 |
| LAT | A | L | S | S | Q | E | A | E | E | V | E | 466 |
| hTANK | S | V | P | I | Q | C | T | D | K | T | D | 467 |
| hLMP1 | P | H | P | Q | Q | A | T | D | D | S | S | 468 |
| rLMP1 | P | Y | P | I | Q | A | T | D | G | G | N | 469 |
| rLMP1 | P | H | P | I | Q | A | T | D | G | A | N | 470 |
| rLMP1 | P | Y | P | V | Q | A | S | D | G | G | D | 471 |
| Minor | | | P/S/ | X | Q/E | E | | | | | | 472 |
| Consensus | | | A/T | | | | | | | | | |
| Major | | | P | V | Q | E | | | | | | 473 |
| Consensus | | | | | | | | | | | | |

[0212] Accordingly, TRAF2/TRAF3 binding sequences of the invention further include sequences such as P1V₂Q₃E₄ and variants wherein P₁ is substituted with S, A, or T, V₂ is substituted with Q, K, or E, Q₃ is substituted with E, and/or E4 is substituted with A. In such variants, any one, two, three, or all four of P₁V₂Q₃E₄ may be substituted. Non-limiting examples are shown in Table 1 at positions P-2, P-1, P0, P1.

[0213] Illustrative non-limiting examples of CD40 TRAF2/TRAF3 sequence variants include the following, the amino acids at P-2, P-1, P0, and P1 enclosed by dashes, and the TRAF2/TRAF3 source protein identified.

TABLE 2
Exemplary CD40 TRAF2/TRAF3 variants

| | | TRAF2/3 |
|---|---|---|
| SEQ ID | | sequence |
| NO: | Amino acid sequence based on CD40 | origin |
| 474 | KKVAKKPTNKAPHPKQEPQEINFPDDLPGSNTAA--PVQE-- | CD40 WT |
| | TLHGCQPVTQEDGKESRI--SVQE--RQ | |
| 475 | KKVAKKPTNKAPHPKQEPQEINFPDDLPGSNTAA--TQEE-- | CD40/ |
| | TLHGCQPVTQEDGKESRISVQERQ | v41BB |
| 476 | KKVAKKPTNKAPHPKQEPQEINFPDDLPGSNTAA--SKEE-- | CD40/ |
| | TLHGCQPVTQEDGKESRISVQERQ | VTNFR2 |
| 477 | KKVAKKPTNKAPHPKQEPQEINFPDDLPGSNTAA--AVEE-- | CD40/ |
| | TLHGCQPVTQEDGKESRISVQERQ | vATAR |
| 478 | KKVAKKPTNKAPHPKQEPQEINFPDDLPGSNTAAPVQE | CD40/ |
| | TLHGCQPVTQEDGKESRI--AVEE--RQ | vATAR |
| 479 | KKVAKKPTNKAPHPKQEPQEINFPDDLPGSNTAAPVQE | CD40/ |
| | TLHGCQPVTQEDGKESRI--PEEE--RQ | v41BB |

[0214] Table 3 provides non-limiting examples of TRAF6 binding sequences. The alignments of Table 3 with the major TRAF6 consensus sequences is as shown in FIG. 82C.

TABLE 3
Exemplary TRAF6 binding sequences

| | | | | | | | SEQ |
|---|---|---|---|---|---|---|---|
| | | | | | | | ID |
| | P-2 | P-1 | P0 | P1 | P2 | P3 | NO: |
| hCD40 | P | Q | E | I | N | F | 480 |
| hTRANCE-R | P | Q | E | I | D | F | 481 |
| Mal | P | P | E | L | R | F | 482 |
| TRIF | P | E | E | M | S | W | 483 |
| IRAK(1) | P | Q | E | N | S | Y | 484 |
| IRAK (2) | P | V | E | S | D | E | 485 |
| IRAK (3) | P | E | E | S | D | E | 486 |
| IRAK-2 (1) | P | E | E | T | D | E | 487 |
| IRAK-2 (2) | P | T | E | N | G | E | 488 |
| IRAK-M | P | V | E | D | D | E | 489 |
| RIP2 | P | P | E | N | Y | E | 490 |
| MyD88 | P | S | E | L | R | F | 491 |
| Consensus | P | X | E | X | X | Ac/Ar | 492 |

Ac = acidic residue; Ar = Aromatic residue

[0215] Illustrative non-limiting examples of CD40 TRAF6 sequence variants include the following, the amino acids at P-2, P-1, P0, P1, P2, and P3 enclosed by dashes, and the TRAF6 sequence origin identified.

TABLE 4
Exemplary CD40 TRAF6 variants

| | | TRAF6 |
|---|---|---|
| SEQ ID | | sequence |
| No: | Amino acid sequence based on CD40 | origin |
| 493 | KKVAKKPTNKAPHPKQE--PQEINF--PDDLPGSNTAAPVQE | CD40 WT |
| | TLHGCQPVTQEDGKESRISVQERQ | |
| 494 | KKVAKKPTNKAPHPKQE--PEEMSW--PDDLPGSNTAAPVQE | CD40/ |
| | TLHGCQPVTQEDGKESRISVQERQ | vTRIF |
| 495 | KKVAKKPTNKAPHPKQE--PPENYE--PDDLPGSNTAAPVQE | CD40/ |
| | TLHGCQPVTQEDGKESRISVQERQ | vRIP2 |
| 496 | KKVAKKPTNKAPHPKQE--PQENSY--PDDLPGSNTAAPVQE | CD40/ |
| | TLHGCQPVTQEDGKESRISVQERQ | vIRAK(1) |

TABLE 5
Exemplary CD40 TRAF2/TRAF3/TRAF6 consensus variants

| SEQ ID | | |
|---|---|---|
| No: | Amino acid sequence variants based on CD40 | |
| 497 | KKVAKKPTNKAPHPKQE--PQEINF--PDDLPGSNTAA--PVQE-- | CD40 |
| | TLHGCQPVTQEDGKESRI--SVQE--RQ | WT |
| 498 | KKVAKKPTNKAPHPKQE--PXEXX(Ac/Ar)-- | |
| | PDDLPGSNTAAPVQETLHGCQPVTQEDGKESRISVQERQ | |
| 499 | KKVAKKPTNKAPHPKQEPQEINFPDDLPGSNTAA-- | |
| | (P/S/A/T)X(Q/E)E--TLHGCQPVTQEDGKESRISVQERQ | |
| 500 | KKVAKKPTNKAPHPKQEPQEINFPDDLPGSNTAAPVQE | |
| | TLHGCQPVTQEDGKESRI--(P/S/A/T)X(Q/E)E--RQ | |
| 501 | KKVAKKPTNKAPHPKQE--PXEXX(Ac/Ar)--PDDLPGSNTAA-- | |
| | (P/S/A/T)X(Q/E)--ETLHGCQPVTQEDGKESRISVQERQ | |
| 502 | KKVAKKPTNKAPHPKQEPQEINFPDDLPGSNTAA-- | |
| | (P/S/A/T)X(Q/E)E--TLHGCQPVTQEDGKESRI-- | |
| | (P/S/A/T)X(Q/E)E--RQ | |
| 503 | KKVAKKPTNKAPHPKQE--PXEXX(Ac/Ar)-- | |
| | PDDLPGSNTAAPVQE | |
| | TLHGCQPVTQEDGKESRI--(P/S/A/T)X(Q/E)E--RQ | |
| 504 | KKVAKKPTNKAPHPKQE--PXEXX(Ac/Ar)--PDDLPGSNTAA-- | |
| | (P/S/A/T)X(Q/E)E--TLHGCQPVTQEDGKESRI-- | |
| | (P/S/A/T)X(Q/E)E--RQ | |
| 505 | KKVAKKPTNKAPHPKQE--PEELRW--PDDLPGSNTAA--THEE-- | |
| | TLHGCQPVTQEDGKESRI--AIEE--RQ | |

Ar = aromatic residue; Ac = acidic residue

[0216] In some embodiments, selection of one or more costimulatory domain signaling component or motif is guided by the cell in which the CoStAR is to be expressed and/or a desired costimulatory activity more closely identified with a signaling component or motif, or avoidance of a costimulatory activity more closely identified with a signaling component or motif.

[0217] In some embodiments, a CoStAR signaling domain comprises, in addition to a CD40 costimulatory domain or signaling component or motif thereof, or two or more such domains or components or motifs or combinations thereof, an additional full length costimulatory domain or signaling component thereof from, without limitation, CD2, CD9, CD26, CD27, CD28, CD29, CD38, CD40, CD43, CD46, CD49d, CD55, CD73, CD81, CD82, CD99, CD100, CD134 (OX40), CD137 (41BB), CD150 (SLAM), CD270 (HVEM), CD278 (ICOS), CD357 (GITR), or EphB6,

[0218] For reference, the human CD28 protein sequence is set forth in GenBank accession No. NP_006130.1, including signal peptide (amino acids 1-18), extracellular domain (amino acids 19-152), transmembrane domain (amino acids 153-179) and cytoplasmic domain (amino acids 180-200). The extracellular domain includes an immunoglobulin type domain (amino acids 21-136) which contains amino acids with compose the antigen binding site and amino acids that form the homodimer interface. The extracellular domain includes several asparagine residues which may be glycosylated, and the intracellular domain comprises serine and tyrosine residues, which may be phosphorylated.

[0219] For reference, the human CD8 alpha chain protein sequence is set forth by GenBank accession No. NP_001139345.1, including signal peptide (amino acids 1-21), extracellular domain (amino acids 22-182), transmembrane domain (amino acids 183-203), and cytoplasmic domain (amino acids 204-235). The extracellular domain includes an immunoglobulin type domain (amino acids 28-128) which contains amino acids with compose the antigen binding site and amino acids that form the homodimer interface. The extracellular domain includes several asparagine residues which may be glycosylated, and the intracellular domain comprises serine and tyrosine residues, which may be phosphorylated.

[0220] For reference, the human IgG4 constant region sequence is set forth in UniProtKB/Swiss-Prot: accession No. P01861.1, including CH1 (amino acids 1-98), hinge (amino acids 99-110), CH2 (amino acids 111-220), CH3 (amino acids 221-327). The CH2 region includes asparagine at amino acid 177, which is the glycosylated and associated with Fc receptor and antibody-dependent cell-mediated cytotoxicity (ADCC).

[0221] For reference, the protein sequence of human CD137 (4-1BB), another TNFR superfamily member, is set forth by GenBank accession No. NP_001552.2, including signal peptide (amino acids 1-23), extracellular domain (amino acids 24-186), transmembrane domain (amino acids 187-213), and cytoplasmic domain (amino acids 214-255). Binding of CD137L ligand trimers expressed on antigen presenting cells to CD137 leads to receptor trimerization and activation of signaling cascades involved in T cell reactivity and survival (Li et al., Limited Cross-Linking of 4-1BB by 4-1BB Ligand and the Agonist Monoclonal Antibody Utomilumab. Cell Reports 2018; 25:909-920). Coimmunoprecipitation of CD137 with the signaling adaptors TRAF-2 and TRAF-1 and the structural basis for the interactions has been reported (Ye, H et al., Molecular Cell, 1999; 4(3):321-30).

[0222] For reference, the human CD134 (OX40) protein sequence is set forth by GenBank accession No. NP_003318.1, including signal peptide (amino acids 1-28), extracellular domain (amino acids 29-214), transmembrane domain (amino acids 215-235), and cytoplasmic domain (amino acids 236-277). This receptor has been shown to activate NF-kappaB through its interaction with adaptor proteins TRAF2 and TRAF5 and studies suggest that this receptor promotes expression of apoptosis inhibitors BCL2 and BCL21L1/BCL2-XL.

[0223] The human T-cell surface antigen CD2 has at least two isoforms. For reference, the human CD2 isoform1 protein sequence is set forth by NP_001315538.1, including signal peptide (amino acids 1-24), extracellular domain (amino acids 25-235), transmembrane domain (amino acids 236-261), and cytoplasmic domain (amino acids 262-377). The human CD2 isoform2 protein sequence is set forth by NP_001758.2

[0224] For reference, the human CD357 (GITR) isoform-1 protein sequence is set forth by GenBank accession No. NP_004186.1, including signal peptide (amino acids 1-25), extracellular domain (amino acids 26-162), transmembrane domain (amino acids 163-183), and cytoplasmic domain (amino acids 184-241).

[0225] For reference, the human CD29 (beta1 integrin) protein sequence is set forth by GenBank accession No. NP_596867, including signal peptide (amino acids 1-20), extracellular domain (amino acids 21-728), transmembrane domain (amino acids 729-751), and cytoplasmic domain (amino acids 752-798).

[0226] The human CD150 (SLAM) protein sequence has at several isoforms. In addition to the transmembrane form of CD150 (mCD150), cells of hematopoietic lineage express mRNA encoding the secreted form of CD150 (sCD150), which lacks the entire transmembrane region of 30 amino acids. For reference, human SLAM isoform b is set forth by GenBank accession No. NP_003028.1, including signal peptide (amino acids 1-20), extracellular domain (amino acids 21-237), transmembrane domain (amino acids 238-258), and cytoplasmic domain (amino acids 259-335). Human SLAM isoform a is set forth by GenBank accession No. NP_001317683.1.

[0227] CD278 or ICOS (Inducible T cell COStimulator) is a CD28-superfamily costimulatory molecule that is expressed on activated T cells. Human ICOS precursor (199 aa with signal peptide) is set forth by GenBank accession No. NP_036224.1, including signal peptide (amino acids 1-20), an Ig-V-like domain (amino acids 21-140), transmembrane domain (amino acids 141-161) and intracellular domain (amino acids 162-199). ICOS contains an IProx motif sequence SSSVHDPNGE (SEQ ID NO:466). The IProx motif sequence SSSXXXPXGE (SEQ ID NO:467) resembles certain binding sites of TRAF1 (SASFQRPQSE (SEQ ID NO:468)), TRAF2 (SSSFQRPVND (SEQ ID NO:469)), TRAF3 (SSFKKPTGE (SEQ ID NO:470)), and TRAF5 (SSSFKRPDGE (SEQ ID NO:471)).

[0228] Hematopoietic cell signal transducer (HCST) also known as DAP10, KAP10, PIK3AP, and hematopoietic cell signal transducer (GenBank accession No. NP_055081.1) encodes a transmembrane signaling adaptor thought to form part of a receptor complex with the C-type lectin-like receptor NKG2D. The intracellular domain contains a YxxM motif of a phosphatidylinositol 3-kinase binding site.

[0229] In embodiments of the invention, a CoStAR may be expressed alone under the control of a promoter in a therapeutic population of cells that have therapeutic activity, for example, Tumour Infiltrating Lymphocytes (TILs). Alternatively, the CoStAR may be expressed along with a therapeutic transgene such as a chimeric antigen receptor (CAR) and/or T-cell Receptor (TCR), (note that may lack up to about 5, for example 1, 2, 3, 4, 5, or up to 10 amino acids at the N-terminal of the mature receptor protein). Thus, in one aspect, the invention also relates to CoStAR constructs, not limited to those having a sequence as shown in any of SEQ ID NOS:42-185, 192-335, 344-430, including one of these sequences which lacks up to about 5, for example 1, 2, 3, 4, 5, or up to 10 amino acids at the N-terminal of the mature receptor protein). Suitable TCRs and CARs are well known in the literature, for example HLA-A*02-NYESO-1 specific TCRs (Rapoport et al. Nat Med 2015) or anti-CD19scFv.CD3ζ fusion CARs (Kochenderfer et al. J Clin Oncol 2015) which have been successfully used to treat Myeloma or B-cell malignancies respectively. The CoStARs described herein may be expressed with any known CAR or TCR thus providing the cell with a regulatable growth switch to allow cell expansion in-vitro or in-vivo, and a conventional activation mechanism in the form of the TCR or CAR for anti-cancer activity. Thus the invention provides a cell for use in adoptive cell therapy comprising a CoStAR as described herein and a TCR and/or CAR that specifically binds to a tumor associated antigen. An exemplary CoStAR comprising CD28 includes an extracellular antigen binding domain and an extracellular, transmembrane and intracellular signaling domain.

[0230] The term “antigen binding domain” as used herein refers to an antibody fragment including, but not limited to, a diabody, a Fab, a Fab′, a F(ab′)2, an Fv fragment, a disulfide stabilized Fv fragment (dsFv), a (dsFv)2, a bispecific dsFv (dsFv-dsFv′), a disulfide stabilized diabody (ds diabody), a single-chain antibody molecule (scFv), an scFv dimer (bivalent diabody), a multispecific antibody formed from a portion of an antibody comprising one or more CDRs, a camelized single domain antibody, a nanobody, a domain antibody, a bivalent domain antibody, or any other antibody fragment that binds to an antigen but does not comprise a complete antibody structure. An antigen binding domain is capable of binding to the same antigen to which the parent antibody or a parent antibody fragment (e.g., a parent scFv) binds. In some embodiments, an antigen-binding fragment may comprise one or more complementarity determining regions (CDRs) from a particular human antibody grafted to frameworks (FRs) from one or more different human antibodies. An “antigen binding domain” may be referred to as a “ligand binding domain.”

[0231] The antigen binding domain can be made specific for any disease-associated antigen, including but not limited to tumor-associated antigens (TAAs) and infectious disease-associated antigens. In some embodiments, the ligand binding domain is bispecific. Antigens have been identified in most of the human cancers, including Burkitt lymphoma, neuroblastoma, melanoma, osteosarcoma, renal cell carcinoma, breast cancer, prostate cancer, lung carcinoma, and colon cancer. TAA's include, without limitation, CD19, CD20, CD22, CD24, CD33, CD38, CD123, CD228, CD138, BCMA, GPC3, CEA, folate receptor (FRα), mesothelin, CD276, gp100, 5T4, GD2, EGFR, MUC-1, PSMA, EpCAM, MCSP, SM5-1, MICA, MICB, ULBP and HER-2. TAAs further include neoantigens, peptide/MHC complexes, and HSP/peptide complexes.

[0232] In some embodiments, the antigen binding domain comprises a T-cell receptor or binding fragment thereof that binds to a defined tumor specific peptide-MHC complex. The term “T cell receptor,” or “TCR,” refers to a heterodimeric receptor composed of αβ or γδ chains that pair on the surface of a T cell. Each a, 3, 7, and 6 chain is composed of two Ig-like domains: a variable domain (V) that confers antigen recognition through the complementarity determining regions (CDR), followed by a constant domain (C) that is anchored to cell membrane by a connecting peptide and a transmembrane (TM) region. The TM region associates with the invariant subunits of the CD3 signaling apparatus. Each of the V domains has three CDRs. These CDRs interact with a complex between an antigenic peptide bound to a protein encoded by the major histocompatibility complex (pMHC) (Davis and Bjorkman (1988) Nature, 334, 395-402; Davis et al. (1998) Annu Rev Immunol, 16, 523-544; Murphy (2012), xix, 868 p.).

[0233] In some embodiments, the antigen binding domain comprises a natural ligand of a tumor expressed protein or tumor-binding fragment thereof. A non-limiting example is PD1 which binds to PDL1. Another example is the transferrin receptor 1 (TfR1), also known as CD71, a homodimeric protein that is a key regulator of cellular iron homeostasis and proliferation. Although TfR1 is expressed at a low level in a broad variety of cells, it is expressed at higher levels in rapidly proliferating cells, including malignant cells in which overexpression has been associated with poor prognosis. In some embodiments of the invention, the antigen binding domain comprises transferrin or a transferrin receptor-binding fragment thereof.

[0234] In some embodiments, the antigen binding domain is specific to a defined tumor associated antigen, such as but not limited to FRα, CEA, 5T4, CA125, SM5-1 or CD71. In some embodiments, the tumor associated antigen can be a tumor-specific peptide-MHC complex. In certain such embodiments, the peptide is a neoantigen. In other embodiments, the tumor associated antigen it a peptide-heat shock protein complex.

[0235] In various embodiments, the invention provides a CoStAR which comprises

[0236] i. an scFv that binds to carcinoembryonic antigen (CEA), a spacer and transmembrane sequence of CD28, a CD28 signaling domain, and a CD40 signaling domain.

[0237] ii. an scFv that binds to CEA, a spacer and transmembrane sequence of CD28, and a CD40 signaling domain.

[0238] iii. an scFv that binds to CEA, a spacer and transmembrane sequence of CD28, a CD137 signaling domain, and a CD40 signaling domain.

[0239] iv. an scFv that binds to CEA, a spacer and transmembrane sequence of CD28, a CD134 signaling domain, and a CD40 signaling domain.

[0240] v. an scFv that binds to CEA, a spacer and transmembrane sequence of CD28, a CD2 signaling domain, and a CD40 signaling domain.

[0241] vi. an scFv that binds to CEA, a spacer and transmembrane sequence of CD28, a GITR signaling domain, and a CD40 signaling domain.

[0242] vii. an scFv that binds to CEA, a spacer and transmembrane sequence of CD28, a CD29 signaling domain, and a CD40 signaling domain.

[0243] viii. an scFv that binds to CEA, a spacer and transmembrane sequence of CD28, a CD150 signaling domain, and a CD40 signaling domain.

[0244] ix. an scFv that binds to CEA, a spacer and transmembrane sequence of CD8, a CD28 signaling domain, and a CD40 signaling domain.

[0245] x. an scFv that binds to CEA, a spacer and transmembrane sequence of CD8, and a CD40 signaling domain.

[0246] xi. an scFv that binds to CEA, a spacer and transmembrane sequence of CD8, a CD137 signaling domain, and a CD40 signaling domain.

[0247] xii. an scFv that binds to CEA, a spacer and transmembrane sequence of CD8, a CD134 signaling domain, and a CD40 signaling domain.

[0248] xiii. an scFv that binds to CEA, a spacer and transmembrane sequence of CD8, a CD2 signaling domain, and a CD40 signaling domain.

[0249] xiv. an scFv that binds to CEA, a spacer and transmembrane sequence of CD8, a GITR signaling domain, and a CD40 signaling domain.

[0250] xv. an scFv that binds to CEA, a spacer and transmembrane sequence of CD8, a CD29 signaling domain, and a CD40 signaling domain.

[0251] xvi. an scFv that binds to CEA, a spacer and transmembrane sequence of CD8, a CD150 signaling domain, and a CD40 signaling domain.

[0252] xvii. an scFv that binds to CEA, a spacer comprising an IgG4 constant region and CD28 transmembrane sequence, a CD28 signaling domain, and a CD40 signaling domain.

[0253] xviii. an scFv that binds to CEA, a spacer comprising an IgG4 constant region and CD28 transmembrane sequence, and a CD40 signaling domain.

[0254] xix. an scFv that binds to CEA, a spacer comprising an IgG4 constant region and CD28 transmembrane sequence, a CD137 signaling domain, and a CD40 signaling domain.

[0255] xx. an scFv that binds to CEA, a spacer comprising an IgG4 constant region and CD28 transmembrane sequence, a CD134 signaling domain, and a CD40 signaling domain.

[0256] xxi. an scFv that binds to CEA, a spacer comprising an IgG4 constant region and CD28 transmembrane sequence, a CD2 signaling domain, and a CD40 signaling domain.

[0257] xxii. an scFv that binds to CEA, a spacer comprising an IgG4 constant region and CD28 transmembrane sequence, a GITR signaling domain, and a CD40 signaling domain.

[0258] xxiii. an scFv that binds to CEA, a spacer comprising an IgG4 constant region and CD28 transmembrane sequence, a CD29 signaling domain, and a CD40 signaling domain.

[0259] xxiv. an scFv that binds to CEA, a spacer comprising an IgG4 constant region and CD28 transmembrane sequence, a CD150 signaling domain, and a CD40 signaling domain.

[0260] xxv. an scFv that binds to CEA, a spacer comprising an IgG4 constant region and CD28 transmembrane sequence, a first CD40 signaling domain and a second CD40 signaling domain

[0261] xxvi. an scFv that binds to CEA, a spacer comprising an IgG4 constant region and CD28 transmembrane sequence, a first CD40 signaling domain and a second mutated CD40 signaling domain

[0262] xxvii. a binding domain that binds to PDL1, a short spacer and transmembrane sequence of CD28, a CD28 signaling domain, and a CD40 signaling domain.

[0263] xxviii. a binding domain that binds to PDL1, a short spacer and transmembrane sequence of CD28, and a CD40 signaling domain.

[0264] xxix. a binding domain that binds to CD155, CD112, or CD113, a CD28 transmembrane domain, a CD28 signaling domain, and a CD40 signaling domain.

[0265] xxx. a binding domain that binds to CD155, CD112, or CD113, a CD28 transmembrane domain, and a CD40 signaling domain.

[0266] xxxi. an scFv that binds to CEA, a binding domain that binds to PDL1, a short spacer and transmembrane sequence of CD28, a CD28 signaling domain, and a CD40 signaling domain.

[0267] xxxii. an scFv that binds to CEA, a binding domain that binds to PDL1, a short spacer and transmembrane sequence of CD28, and a CD40 signaling domain.

[0268] xxxiii. an scFv that binds to CEA, a binding domain that binds to CD155, CD112, or CD113, a short spacer and transmembrane sequence of CD28, a CD28 signaling domain, and a CD40 signaling domain.

[0269] xxxiv. an scFv that binds to CEA, a binding domain that binds to CD155, CD112, or CD113, a short spacer and transmembrane sequence of CD28, and a CD40 signaling domain.

[0270] xxxv. an scFv that binds to CEA, a spacer comprising the CD28 extracellular domain, and transmembrane sequence of CD28, and a NTRK1 signaling domain

[0271] xxxvi. an scFv that binds to CEA, a spacer comprising the CD28 extracellular domain and transmembrane sequence of CD28, a NTRK1 signaling domain, and a CD40 signaling domain.

[0272] xxxvii. an scFv that binds to CEA, a spacer comprising the CD28 extracellular domain and transmembrane sequence of CD28, a CD28 signaling domain, and a NTRK1 signaling domain.

[0273] xxxviii. an scFv that binds to CEA, a spacer comprising the CD28 extracellular domain and transmembrane sequence of CD28, a CD28 signaling domain, a NTRK1 signaling domain, and a CD40 signaling domain.

[0274] xxxix. an scFv that binds to CEA, a spacer comprising the ICOS extracellular domain and transmembrane sequence of ICOS, an ICOS signaling domain, and a CD40 signaling domain

[0275] xl. an scFv that binds to CEA, a spacer comprising the CD28 extracellular domain and transmembrane sequence of CD28, a CD28 signaling domain, and an ICOS signaling domain.

[0276] xli. an scFv that binds to CEA, a spacer comprising the CD28 extracellular domain and transmembrane sequence of CD28, a CD28 signaling domain, an ICOS signaling domain, and a CD40 signaling domain.

[0277] xlii. an scFv that binds to CEA, a spacer comprising the CD2 extracellular domain and transmembrane sequence of CD2, a CD2 signaling domain, and a CD40 signaling domain.

[0278] xliii. an scFv that binds to CEA, a spacer comprising the CD28 extracellular domain and transmembrane sequence of CD28, a CD28 signaling domain, and a CD2 signaling domain.

[0279] xliv. an scFv that binds to CEA, a spacer comprising the CD28 extracellular domain and transmembrane sequence of CD28, a CD28 signaling domain, a CD40 signaling domain, and a CD2 signaling domain.

[0280] xlv. an scFv that binds to CEA, a spacer comprising the CD28 extracellular domain and transmembrane sequence of CD28, a CD28 signaling domain, and aCD137 signaling domain.

[0281] xlvi. an scFv that binds to CEA, a spacer comprising the CD28 extracellular domain and transmembrane sequence of CD28, a CD28 signaling domain, a CD40 signaling domains, and a CD137 signaling domain.

[0282] xlvii. an scFv that binds to CEA, a spacer comprising the CD28 extracellular domain and transmembrane sequence of CD28, a CD28 signaling domain, and a DAP10 signaling domain.

[0283] xlviii. an scFv that binds to CEA, a spacer comprising the CD28 extracellular domain and transmembrane sequence of CD28, a CD28 signaling domain, a CD40 signaling domain, and a DAP10 signaling domain.

[0284] xlix. an scFv that binds to CEA, a spacer comprising the CD28 extracellular domain and transmembrane sequence of CD28, a CD28 signaling domain, and a CD134 signaling domain.

[0285] xlx. an scFv that binds to CEA, a spacer comprising the CD28 extracellular domain and transmembrane sequence of CD28, a CD40 signaling domain, and a CD134 signaling domain.

[0286] In some embodiments, the invention provides a CoStAR which comprises an scFv that binds to MSLN linked to the spacer, transmembrane, and signaling domain structure of any one of paragraphs i-xlx.

[0287] In some embodiments, the invention provides a CoStAR which comprises an scFv that binds to FolR1linked to the spacer, transmembrane, and signaling domain structure of any one of paragraphs i-xlx.

[0288] In some embodiments, the invention provides a CoStAR which comprises the spacer, transmembrane, and signaling domain structure of any one of i-xxxiv and binds to FolR1 by a binding domain which comprises an antigen-binding fragment of scFv MOV19 (SEQ ID NO:9).

[0289] In some embodiments, the invention provides a CoStAR which comprises the spacer, transmembrane, and signaling domain structure of any one of i-xxxiv and binds to CEA by a binding domain which comprises an antigen-binding fragment of scFv MFE23 (SEQ ID NO:10).

[0290] In some embodiments, the invention provides a CoStAR which comprises the spacer, transmembrane, and signaling domain structure of any one of i-xxvi and xxxi to xxxiv and binds to CEA by a binding domain which comprises an antigen-binding fragment of scFv MFE23(K>Q) (SEQ ID NO:11).

[0291] In some embodiments, the invention provides a CoStAR which comprises the spacer, transmembrane, and signaling domain structure of any one of i-xxvi and xxxi to xxxiv and binds to CEA by a binding domain which comprises an antigen-binding fragment of humanized scFv MFE23 (hMFE23) (SEQ ID NO:12).

[0292] In some embodiments, the invention provides a CoStAR which comprises the spacer, transmembrane, and signaling domain structure of any one of i-xxvi and xxxi to xxxiv and binds to CEA by a binding domain which comprises an antigen-binding fragment of scFv CEA6 (SEQ ID NO:13).

[0293] In some embodiments, the invention provides a CoStAR which comprises the spacer, transmembrane, and signaling domain structure of any one of i-xxvi and xxxi to xxxiv and binds to CEA by a binding domain which comprises an antigen-binding fragment of scFv BW431/26 (SEQ ID NO:14).

[0294] In some embodiments, the invention provides a CoStAR which comprises the spacer, transmembrane, and signaling domain structure of any one of i-xxvi and xxxi to xxxiv and binds to CEA by a binding domain which comprises an antigen-binding fragment of scFv HuT84.66(M5A) (SEQ ID NO:15).

[0295] In some embodiments, the invention provides a CoStAR which comprises the spacer, transmembrane, and signaling domain structure of any one of i-xxxiv and binds to FolR1 by a binding domain which comprises an antigen-binding fragment of scFv MOV19 (SEQ ID NO:9).

[0296] In some embodiments, the invention provides a CoStAR which comprises the spacer, transmembrane, and signaling domain structure of any one of i-xxxiv and xxxi to xxxiv and binds to MSLN by a binding domain which comprises an antigen-binding fragment of scFv SS1 (SEQ ID NO:186).

[0297] In some embodiments, the invention provides a CoStAR which comprises the spacer, transmembrane, and signaling domain structure of any one of i-xxvi and xxxi to xxxiv and binds to MSLN by a binding domain which comprises an antigen-binding fragment of scFv M5 (humanized SS1) (SEQ ID NO:187).

[0298] In some embodiments, the invention provides a CoStAR which comprises the spacer, transmembrane, and signaling domain structure of any one of i-xxvi and xxxi to xxxiv and binds to MSLN by a binding domain which comprises an antigen-binding fragment of humanized scFv HN1 (SEQ ID NO:188).

[0299] In some embodiments, the invention provides a CoStAR which comprises the spacer, transmembrane, and signaling domain structure of any one of i-xxvi and xxxi to xxxiv and binds to MSLN by a binding domain which comprises an antigen-binding fragment of scFv M912 (SEQ ID NO:189).

[0300] In some embodiments, the invention provides a CoStAR which comprises the spacer, transmembrane, and signaling domain structure of any one of i-xxvi and xxxi to xxxiv and binds to MSLN by a binding domain which comprises an antigen-binding fragment of scFv HuYP218 (SEQ ID NO:190).

[0301] In some embodiments, the invention provides a CoStAR which comprises the spacer, transmembrane, and signaling domain structure of any one of i-xxvi and xxxi to xxxiv and binds to MSLN by a binding domain which comprises an antigen-binding fragment of scFv P4 (SEQ ID NO:191).

[0302] In some embodiments, any of the above (including I to xlx) can be used with a CD40, TRAF2, TRAF2/3, or TRAF6 variants provided herein, including those in FIGS. 28, 67, 77A-77C, 83-89D, and 92 (excluding those in FIGS. 78 and 79), and including those in Tables 2, 4-5, and 7-14, and including SEQ ID NOS: 42, 475-479, 494-498, 505, 510-519, and 840-40839, and Consensus sequences A-C.

[0303] As use herein, the term “specifically binds” or “is specific for” refers to measurable and reproducible interactions, such as binding between a target and an antibody or antibody moiety that is determinative of the presence of the target in the presence of a heterogeneous population of molecules, including biological molecules. For example, an antibody moiety that specifically binds to a target (which can be an epitope) is an antibody moiety that binds the target with greater affinity, avidity, more readily, and/or with greater duration than its bindings to other targets. In some embodiments, an antibody moiety that specifically binds to an antigen reacts with one or more antigenic determinants of the antigen (for example a cell surface antigen or a peptide/MHC protein complex) with a binding affinity that is at least about 10 times its binding affinity for other targets.

### Spacer

[0304] A CoStAR of the invention optionally comprises a spacer region between the antigen binding domain and the costimulatory receptor. As used herein, the term “spacer” refers to the extracellular structural region of a CoStAR that separates the antigen binding domain from the external ligand binding domain of the costimulatory protein. The spacer provides flexibility to access the targeted antigen and receptor ligand. In some embodiments long spacers are employed, for example to target membrane-proximal epitopes or glycosylated antigens (see Guest R. D. et al. The role of extracellular spacer regions in the optimal design of chimeric immune receptors: evaluation of four different scFvs and antigens. J. Immunother. 2005; 28:203-211; Wilkie S. et al., Retargeting of human T cells to tumor-associated MUC1: the evolution of a chimeric antigen receptor. J. Immunol. 2008; 180:4901-4909). In other embodiments, CoStARs bear short spacers, for example to target membrane distal epitopes (see Hudecek M. et al., Receptor affinity and extracellular domain modifications affect tumor recognition by ROR1-specific chimeric antigen receptor T cells. Clin. Cancer Res. 2013; 19:3153-3164; Hudecek M. et al., The nonsignaling extracellular spacer domain of chimeric antigen receptors is decisive for in vivo antitumor activity. Cancer Immunol. Res. 2015; 3:125-135). In some embodiments, the spacer comprises all or part of or is derived from an IgG hinge, including but not limited to IgG1, IgG2, or IgG4. By “derived from an Ig hinge” is meant a spacer comprising insertions, deletions, or mutations in an IgG hinge. In some embodiments, a spacer can comprise all or part of one or more antibody constant domains, such as but not limited to CH2 and/or CH3 domains. In some embodiments, in a spacer comprising all or part of a CH2 domain, the CH2 domain is modified so as not to bind to an Fc receptor. For example, Fc receptor binding in myeloid cells has been found to impair CAR T cell functionality. In some embodiments, the spacer comprises all or part of an Ig-like hinge from CD28, CD8, or other protein comprising a hinge region. In some embodiments of the invention that comprise a spacer, the spacer is from 1 and 50 amino acids in length.

[0305] In an non-limiting embodiment, the spacer comprises essentially all of an extracellular domain, for example a CD28 extracellular domain (i.e. from about amino acid 19, 20, 21, or 22 to about amino acid 152) or an extracellular domain of another protein, including but not limited to another TNFR superfamily member. In some embodiments, the spacer comprises a portion of an extracellular domain, for example a portion of a CD28 extracellular domain, and may lack all or most of the Ig domain. In another embodiment, the spacer includes amino acids of CD28 from about 141 to about 152 but not other portions of the CD28 extracellular domain. In another embodiment, the spacer includes amino acids of CD8 from about 128 to about 182 but not other portions of the CD8 extracellular domain.

### Linker

[0306] In some embodiments, the CoStAR extracellular domain comprises a linker. Linkers comprise short runs of amino acids used to connect domains, for example a binding domain with a spacer or transmembrane domain. In order for there to be flexibility to bind ligand, a ligand binding domain will usually be connected to a spacer or a transmembrane domain by flexible linker comprising from about 5 to 25 amino acids, such as, for example, AAAGSGGSG (SEQ ID NO:18), GGGGSGGGGSGGGGS (SEQ ID NO:431). In some embodiments, a CoStAR comprises a binding domain joined directly to a transmembrane domain by a linker, and without a spacer. In some embodiments, a CoStAR comprises a binding domain joined directly to a transmembrane by a spacer and without a linker.

### Signaling Domain

[0307] As discussed above, in some embodiments, a CoStAR comprises a full length primary costimulatory receptor which can comprise an extracellular ligand binding and intracellular signaling portion of, without limitation, CD2, CD9, CD26, CD27, CD28, CD29, CD38, CD40, CD43, CD46, CD49d, CD55, CD73, CD81, CD82, CD99, CD100, CD134 (OX40), CD137 (41BB), CD150 (SLAM), CD270 (HVEM), CD278 (ICOS), CD357 (GITR), or EphB6. In other embodiments, the costimulatory receptor comprises a chimeric protein, for instance comprising an extracellular ligand binding domain of one of the aforementioned proteins and an intracellular signaling domain of another of the aforementioned proteins. In some embodiments, the signaling portion of the CoStAR comprises a single signaling domain. In other embodiments, the signaling portion of the CoStAR comprises a second intracellular signaling domain such as but not limited to: CD2, CD27, CD28, CD40, CD134 (OX40), CD137 (4-1BB), CD150 (SLAM). In some embodiments, the first and second intracellular signaling domains are the same. In other embodiments, the first and second intracellular signaling domains are different. In some embodiments, the costimulatory receptor is capable of dimerization. Without being bound by theory, it is thought that CoStARs dimerize or associate with other accessory molecules for signal initiation. In some embodiments, CoStARs dimerize or associate with accessory molecules through transmembrane domain interactions. In some embodiments, dimerization or association with accessory molecules is assisted by costimulatory receptor interactions in the intracellular portion, and/or the extracellular portion of the costimulatory receptor.

### Transmembrane Domain

[0308] Although the main function of the transmembrane is to anchor the CoStAR in the T cell membrane, in some embodiments, the transmembrane domain influences CoStAR function. In some embodiments, the transmembrane domain is comprised by the full length primary costimulatory receptor domain. In embodiments of the invention wherein the CoStAR construct comprises an extracellular domain of one receptor and an intracellular signaling domain of a second receptor, the transmembrane domain can be that of the extracellular domain or the intracellular domain. In some embodiments, the transmembrane domain is from CD4, CD8a, CD28, or ICOS. Gueden et al. associated use of the ICOS transmembrane domain with increased CAR T cell persistence and overall anti-tumor efficacy (Guedan S. et al., Enhancing CAR T cell persistence through ICOS and 4-1BB costimulation. JCI Insight. 2018; 3:96976). In some embodiments, the transmembrane domain comprises a hydrophobic a helix that spans the cell membrane.

[0309] In some embodiments, the transmembrane domain comprises amino acids of the CD28 transmembrane domain from about amino acid 153 to about amino acid 179. In another embodiment, the transmembrane domain comprises amino acids of the CD8 transmembrane domain from about amino acid 183 to about amino acid 203. In some embodiments, the CoStARs of the invention may include several amino acids between the transmembrane domain and signaling domain. For example, in one construct described herein the link from a CD8 transmembrane domain to a signaling domain comprises several amino acids of the CD8 cytoplasmic domain (e.g., amino acids 204-210 of CD8).

### Variants

[0310] In some embodiments, amino acid sequence variants of the antibody moieties or other moieties provided herein are contemplated. For example, it may be desirable to improve the binding affinity and/or other biological properties of the antibody moiety. Amino acid sequence variants of an antibody moiety may be prepared by introducing appropriate modifications into the nucleotide sequence encoding the antibody moiety, or by peptide synthesis. Such modifications include, for example, deletions from, and/or insertions into and/or substitutions of residues within the amino acid sequences of the antibody moiety. Any combination of deletion, insertion, and substitution can be made to arrive at the final construct, provided that the final construct possesses the desired characteristics, e.g., antigen-binding.

[0311] In some embodiments, antibody binding domain moieties comprising one or more amino acid substitutions, deletions, or insertions are provided. Sites of interest for mutational changes include the antibody binding domain heavy and light chain variable regions (VRs) and frameworks (FRs). Amino acid substitutions may be introduced into a binding domain of interest and the products screened for a desired activity, e.g., retained/improved antigen binding or decreased immunogenicity. In some embodiments, amino acid substitutions may be introduced into one or more of the primary co-stimulatory receptor domain (extracellular or intracellular), secondary costimulatory receptor domain, or extracellular co-receptor domain. Accordingly, the invention encompasses CoStAR proteins and component parts particularly disclosed herein as well as variants thereof, i.e. CoStAR proteins and component parts having at least 75%, at least 80%, at least 85%, at least 87%, at least 90%, at least 91%, at least 92%, at least 93%, at least 94%, at least 95%, at least 96%, at least 97%, at least 98%, at least 99% sequence identity to the amino acid sequences particularly disclosed herein. The terms “percent similarity,” “percent identity,” and “percent homology” when referring to a particular sequence are used as set forth in the University of Wisconsin GCG software program BestFit. Other algorithms may be used, e.g. BLAST, psiBLAST or TBLASTN (which use the method of Altschul et al. (1990) J. Mol. Biol. 215: 405-410), FASTA (which uses the method of Pearson and Lipman (1988) PNAS USA 85: 2444-2448).

[0312] Particular amino acid sequence variants may differ from a reference sequence by insertion, addition, substitution or deletion of 1 amino acid, 2, 3, 4, 5-10, 10-20 or 20-30 amino acids. In some embodiments, a variant sequence may comprise the reference sequence with 1, 2, 3, 4, 5, 6, 7, 8, 9, 10 or more residues inserted, deleted or substituted. For example, 5, 10, 15, up to 20, up to 30 or up to 40 residues may be inserted, deleted or substituted.

[0313] In some preferred embodiments, a variant may differ from a reference sequence by 1, 2, 3, 4, 5, 6, 7, 8, 9, 10 or more conservative substitutions. Conservative substitutions involve the replacement of an amino acid with a different amino acid having similar properties. For example, an aliphatic residue may be replaced by another aliphatic residue, a non-polar residue may be replaced by another non-polar residue, an acidic residue may be replaced by another acidic residue, a basic residue may be replaced by another basic residue, a polar residue may be replaced by another polar residue or an aromatic residue may be replaced by another aromatic residue. Conservative substitutions may, for example, be between amino acids within the following groups:

[0314] Conservative substitutions are shown in Table 6 below.

TABLE 6
Amino Acid Substitutions

| Original | | Preferred |
|---|---|---|
| Residue | Exemplary Substitutions | Substitutions |
| Ala (A) | Val; Leu; Ile | Val |
| Arg (R) | Lys; Gln; Asn | Lys |
| Asn (N) | Gln; His; Asp; Lys; Arg | Gln |
| Asp (D) | Glu; Asn | Glu |
| Cys (C) | Ser; Ala | Ser |
| Gln (Q) | Asn; Glu | Asn |
| Glu (E) | Asp; Gln | Asp |
| Gly (G) | Ala | Ala |
| His (H) | Asn; Gln; Lys; Arg | Arg |
| Ile (I) | Leu; Val; Met; Ala; Phe; Norleucine | Leu |
| Leu (L) | Norleucine; Ile; Val; Met; Ala; Phe | Ile |
| Lys (K) | Arg; Gln; Asn | Arg |
| Met (M) | Leu; Phe; Ile | Leu |
| Phe (F) | Trp; Leu; Val; Ile; Ala; Tyr | Tyr |
| Pro (P) | Ala | Ala |
| Ser (S) | Thr | Thr |
| Thr (T) | Val; Ser | Ser |
| Trp (W) | Tyr; Phe | Tyr |
| Tyr (Y) | Trp; Phe; Thr; Ser | Phe |
| Val (V) | Ile; Leu; Met; Phe; Ala; Norleucine | Leu |

[0315] Amino acids may be grouped into different classes according to common side-chain properties: a. hydrophobic: Norleucine, Met, Ala, Val, Leu, Ile; b. neutral hydrophilic: Cys, Ser, Thr, Asn, Gln; c. acidic: Asp, Glu; d. basic: His, Lys, Arg; e. residues that influence chain orientation: Gly, Pro; aromatic: Trp, Tyr, Phe. Non-conservative substitutions will entail exchanging a member of one of these classes for another class.

### Cells

[0316] The cells used in the present invention may be any lymphocyte that is useful in adoptive cell therapy, such as a T-cell or a natural killer (NK) cell, an NKT cell, a gamma/delta T-cell or T regulatory cell. The cells may be allogeneic or autologous to the patient.

[0317] T cells or T lymphocytes are a type of lymphocyte that have a central role in cell-mediated immunity. They can be distinguished from other lymphocytes, such as B cells and natural killer cells (NK cells), by the presence of a T-cell receptor (TCR) on the cell surface. There are various types of T cell, as summarized below. Cytotoxic T cells (TC cells, or CTLs) destroy virally infected cells and tumor cells, and are also implicated in transplant rejection. CTLs express the CD8 molecule at their surface.

[0318] These cells recognize their targets by binding to antigen associated with MHC class I, which is present on the surface of all nucleated cells. Through IL-10, adenosine and other molecules secreted by regulatory T cells, the CD8+ cells can be inactivated to an anergic state, which prevent autoimmune diseases such as experimental autoimmune encephalomyelitis.

[0319] Memory T cells are a subset of antigen-specific T cells that persist long-term after an infection has resolved. They quickly expand to large numbers of effector T cells upon re-exposure to their cognate antigen, thus providing the immune system with “memory” against past infections. Memory T cells comprise three subtypes: central memory T cells (TCM cells) and two types of effector memory T cells (TEM cells and TEMRA cells). Memory cells may be either CD4+ or CD8+. Memory T cells typically express the cell surface protein CD45RO. Regulatory T cells (Treg cells), formerly known as suppressor T cells, are crucial for the maintenance of immunological tolerance. Their major role is to shut down T cell-mediated immunity toward the end of an immune reaction and to suppress auto-reactive T cells that escaped the process of negative selection in the thymus.

[0320] Two major classes of CD4+ Treg cells have been described naturally occurring Treg cells and adaptive Treg cells. Naturally occurring Treg cells (also known as CD4⁺CD25⁺FoxP3⁺ Treg cells) arise in the thymus and have been linked to interactions between developing T cells with both myeloid (CD11c⁺) and plasmacytoid (CD123⁺) dendritic cells that have been activated with TSLP. Naturally occurring Treg cells can be distinguished from other T cells by the presence of an intracellular molecule called FoxP3. Adaptive Treg cells (also known as Tr1 cells or Th3 cells) may originate during a normal immune response.

[0321] Natural Killer Cells (or NK cells) are a type of cytolytic cell which form part of the innate immune system. NK cells provide rapid responses to innate signals from virally infected cells in an MHC independent manner. NK cells (belonging to the group of innate lymphoid cells) are defined as large granular lymphocytes (LGL) and constitute the third kind of cells differentiated from the common lymphoid progenitor generating B and T lymphocytes.

[0322] In some embodiments, therapeutic cells of the invention comprise autologous cells engineered to express a CoStAR. In some embodiments, therapeutic cells of the invention comprise allogeneic cells engineered to express a CoStAR. Autologous cells expressing CoStARs may be advantageous in avoiding graft-versus-host disease (GVHD) due to TCR-mediated recognition of recipient alloantigens. Also, the immune system of a CoStAR recipient could attack the infused CoStAR cells, causing rejection. In certain embodiments, to prevent GVHD, and to reduce rejection, endogenous TcR is removed from allogeneic CoStAR cells by genome editing.

### Nucleic Acids

[0323] An aspect of the invention provides a nucleic acid sequence of the invention, encoding any of the CoStARs, polypeptides, or proteins described herein (including functional portions and functional variants thereof). As used herein, the terms “polynucleotide”, “nucleotide”, and “nucleic acid” are intended to be synonymous with each other. It will be understood by a skilled person that numerous different polynucleotides and nucleic acids can encode the same polypeptide as a result of the degeneracy of the genetic code. In addition, it is to be understood that skilled persons may, using routine techniques, make nucleotide substitutions that do not affect the polypeptide sequence encoded by the polynucleotides described here to reflect the codon usage of any particular host organism in which the polypeptides are to be expressed, e.g. codon optimization. Nucleic acids according to the invention may comprise DNA or RNA. They may be single stranded or double-stranded. They may also be polynucleotides which include within them synthetic or modified nucleotides. A number of different types of modification to oligonucleotides are known in the art. These include methylphosphonate and phosphorothioate backbones, addition of acridine or polylysine chains at the 3′ and/or 5′ ends of the molecule. For the purposes of the present invention, it is to be understood that the polynucleotides may be modified by any method available in the art. Such modifications may be carried out in order to enhance the in vivo activity or life span of polynucleotides of interest.

[0324] The terms “variant”, “homologue” or “derivative” in relation to a nucleotide sequence include any substitution of, variation of, modification of, replacement of, deletion of or addition of one (or more) nucleic acid from or to the sequence.

[0325] The nucleic acid sequence may encode the CoStAR proteins including without limitation any one of SEQ ID NOS:42-247 or a variant thereof. The nucleotide sequence may comprise a codon optimized nucleic acid sequence shown engineered for expression in human cells.

[0326] The invention also provides a nucleic acid sequence which comprises a nucleic acid sequence encoding a CoStAR and a further nucleic acid sequence encoding a T-cell receptor (TCR) and/or chimeric antigen receptor (CAR).

[0327] The nucleic acid sequences may be joined by a sequence allowing co-expression of the two or more nucleic acid sequences. For example, the construct may comprise an internal promoter, an internal ribosome entry sequence (IRES) sequence or a sequence encoding a cleavage site. The cleavage site may be self-cleaving, such that when the polypeptide is produced, it is immediately cleaved into the discrete proteins without the need for any external cleavage activity. Various self-cleaving sites are known, including the Foot- and Mouth disease virus (FMDV) and the 2A self-cleaving peptide. The co-expressing sequence may be an internal ribosome entry sequence (IRES). The co-expressing sequence may be an internal promoter.

### Vectors

[0328] In an aspect, the present invention provides a vector which comprises a nucleic acid sequence or nucleic acid construct of the invention.

[0329] Such a vector may be used to introduce the nucleic acid sequence(s) or nucleic acid construct(s) into a host cell so that it expresses one or more CoStAR(s) according to the first aspect of the invention and, optionally, one or more other proteins of interest (POI), for example a TCR or a CAR. The vector may, for example, be a plasmid or a viral vector, such as a retroviral vector or a lentiviral vector, or a transposon-based vector or synthetic mRNA.

[0330] The nucleic acids of the present invention may also be used for nucleic acid immunization and gene therapy, using standard gene delivery protocols. Methods for gene delivery are known in the art. See, e.g., U.S. Pat. Nos. 5,399,346, 5,580,859, 5,589,466, incorporated by reference herein in their entireties.

[0331] Vectors derived from retroviruses, such as the lentivirus, are suitable tools to achieve long-term gene transfer since they allow long-term, stable integration of a transgene or transgenes and its propagation in daughter cells. The vector may be capable of transfecting or transducing a lymphocyte including a T cell or an NK cell. The present invention also provides vectors in which a nucleic acid of the present invention is inserted. The expression of natural or synthetic nucleic acids encoding a CoStAR, and optionally a TCR or CAR is typically achieved by operably linking a nucleic acid encoding the CoStAR and TCR/CAR polypeptide or portions thereof to one or more promoters, and incorporating the construct into an expression vector.

[0332] Additional promoter elements, e.g., enhancers, regulate the frequency of transcriptional initiation. Typically, these are located in the region 30-110 bp upstream of the start site, although a number of promoters have recently been shown to contain functional elements downstream of the start site as well. The spacing between promoter elements frequently is flexible, so that promoter function is preserved when elements are inverted or moved relative to one another. In the thymidine kinase (tk) promoter, the spacing between promoter elements can be increased to 50 bp apart before activity begins to decline.

[0333] One example of a suitable promoter is the immediate early cytomegalovirus (CMV) promoter sequence. This promoter sequence is a strong constitutive promoter sequence capable of driving high levels of expression of any polynucleotide sequence operatively linked thereto. Another example of a suitable promoter is Elongation Growth Factor-1α (EF-1α). However, other constitutive promoter sequences may also be used, including, but not limited to the simian virus 40 (SV40) early promoter, mouse mammary tumor virus (MMTV), human immunodeficiency virus (HIV) long terminal repeat (LTR) promoter, MoMuLV promoter, MSCV promoter, MND promoter, an avian leukemia virus promoter, an Epstein-Barr virus immediate early promoter, a Rous sarcoma virus promoter, as well as human gene promoters such as, but not limited to, the actin promoter, the myosin promoter, the hemoglobin promoter, and the creatine kinase promoter.

[0334] The vectors can be suitable for replication and integration in eukaryotic cells. Typical cloning vectors contain transcription and translation terminators, initiation sequences, and promoters useful for regulation of the expression of the desired nucleic acid sequence. Viral vector technology is well known in the art and is described, for example, in Sambrook et al. (2001, Molecular Cloning: A Laboratory Manual, Cold Spring Harbor Laboratory, New York), and in other virology and molecular biology manuals, see also, WO 01/96584; WO 01/29058; and U.S. Pat. No. 6,326,193). In some embodiments, the constructs expressed are as shown in SEQ ID NOS:42-247. In some embodiments the nucleic acids are multi-cistronic constructs that permit the expression of multiple transgenes (e.g., CoStAR and a TCR and/or CAR etc.) under the control of a single promoter. In some embodiments, the transgenes (e.g., CoStAR and a TCR and/or CAR etc.) are separated by a self-cleaving 2A peptide. Examples of 2A peptides useful in the nucleic acid constructs of the invention include F2A, P2A, T2A and E2A. In other embodiments of the invention, the nucleic acid construct of the invention is a multi-cistronic construct comprising two promoters; one promoter driving the expression of CoStAR and the other promoter driving the expression of the TCR or CAR. In some embodiments, the dual promoter constructs of the invention are uni-directional. In other embodiments, the dual promoter constructs of the invention are bi-directional. In order to assess the expression of the CoStAR polypeptide or portions thereof, the expression vector to be introduced into a cell can also contain either a selectable marker gene or a reporter gene or both to facilitate identification and selection of expressing cells from the population of cells sought to be transfected or transduced through viral vectors.

### Sources of Cells

[0335] Prior to expansion and genetic modification, a source of cells (e.g., immune effector cells, e.g., T cells or NK cells) is obtained from a subject. The term “subject” is intended to include living organisms in which an immune response can be elicited (e.g., mammals). Examples of subjects include humans, dogs, cats, mice, rats, and transgenic species thereof. T cells can be obtained from a number of sources, including peripheral blood mononuclear cells, bone marrow, lymph node tissue, cord blood, thymus tissue, tissue from a site of infection, ascites, pleural effusion, spleen tissue, and tumors.

[0336] In one aspect, T cells are isolated from peripheral blood lymphocytes by lysing the red blood cells and depleting the monocytes, for example, by centrifugation through a PERCOLL™ gradient or by counterflow centrifugal elutriation. T cell may be collected at an apheresis center and cell storage facility where T cells can be harvested, maintained, and easily transferred. The T cells can be cryopreserved and stored for later use. An acceptable duration of storage may be determined and validated and can be up to 6 months, up to a year, or longer.

[0337] In some embodiments, Tumor infiltrating cells (TILs) are isolated and/or expanded from a tumor, for example by a fragmented, dissected, or enzyme digested tumor biopsy or mass. The TILs may be produced in a two-stage process using a tumor biopsy as the starting material: Stage 1 (generally performed over 2-3 hours) initial collection and processing of tumor material using dissection, enzymatic digestion and homogenization to produce a single cell suspension which can be directly cryopreserved to stabilize the starting material for subsequent manufacture and Stage 2 which can occur days or years later. Stage 2 may be performed over 4 weeks, which may be a continuous process starting with thawing of the product of Stage 1 and growth of the TIL out of the tumor starting material (about 2 weeks) followed by a rapid expansion process of the TIL cells (about 2 weeks) to increase the amount of cells and therefore dose. The TILs maybe concentrated and washed prior to formulation as a liquid suspension of cells.

[0338] The TIL population can be transduced at any point following collection. In some embodiments, a cryopreserved TIL population is transduced to express a CoStAR following thawing. In some embodiments, a TIL population is transduced to express a CoStAR during outgrowth or initial expansion from tumor starting material. In some embodiments, a TIL population is transduced to express a CoStAR during REP, for example but not limited to from about day 8 to about day 10 of REP. An exemplary TIL preparation is described in Applicant's U.S. patent application Ser. No. 62/951,559, filed Dec. 20, 2019.

[0339] A specific subpopulation of T cells, such as CD3+, CD28+, CD4+, CD8+, CD45RA+, and CD45RO+ T cells, can be further isolated by positive or negative selection techniques. For example, in one aspect, T cells are isolated by incubation with anti-CD3/anti-CD28-conjugated beads, such as DYNABEADS® M-450 CD3/CD28 T, for a time period sufficient for positive selection of the desired T cells. In one aspect, the time period is about 30 minutes. In a further aspect, the time period ranges from 30 minutes to 36 hours or longer and all integer values there between. In a further aspect, the time period is at least 1, 2, 3, 4, 5, or 6 hours. In yet another preferred aspect, the time period is 10 to 24 hours. In one aspect, the incubation time period is 24 hours. Longer incubation times may be used to isolate T cells in any situation where there are few T cells as compared to other cell types, such in isolating tumor infiltrating lymphocytes (TIL) from tumor tissue or from immunocompromised individuals. Further, use of longer incubation times can increase the efficiency of capture of CD8+ T cells. Thus, by simply shortening or lengthening the time T cells are allowed to bind to the CD3/CD28 beads and/or by increasing or decreasing the ratio of beads to T cells (as described further herein), subpopulations of T cells can be preferentially selected for or against at culture initiation or at other time points during the process. Additionally, by increasing or decreasing the ratio of anti-CD3 and/or anti-CD28 antibodies on the beads or other surface, subpopulations of T cells can be preferentially selected for or against at culture initiation or at other desired time points. The skilled artisan would recognize that multiple rounds of selection can also be used in the context of this invention. In certain aspects, it may be desirable to perform the selection procedure and use the “unselected” cells in the activation and expansion process. “Unselected” cells can also be subjected to further rounds of selection.

[0340] Enrichment of a T cell population by negative selection can be accomplished with a combination of antibodies directed to surface markers unique to the negatively selected cells. One method is cell sorting and/or selection via negative magnetic immunoadherence or flow cytometry that uses a cocktail of monoclonal antibodies directed to cell surface markers present on the cells negatively selected. For example, to enrich for CD4+ cells by negative selection, a monoclonal antibody cocktail typically includes antibodies to CD14, CD20, CD16, HLA-DR, and CD8. In certain aspects, it may be desirable to enrich for or positively select for regulatory T cells which typically express CD4+, CD25+, CD62Lhi, GITR+, CD137, PD1, TIM3, LAG-3, CD150 and FoxP3+. Alternatively, in certain aspects, T regulatory cells are depleted by anti-CD25 conjugated beads or other similar method of selection.

[0341] The methods described herein can include, e.g., selection of a specific subpopulation of immune effector cells, e.g., T cells, that are a T regulatory cell-depleted population, CD25+ depleted cells, using, e.g., a negative selection technique, e.g., described herein. Preferably, the population of T regulatory depleted cells contains less than 30%, 25%, 20%, 15%, 10%, 5%, 4%, 3%, 2%, 1% of CD25+ cells.

[0342] A specific subpopulation of CoStAR effector cells that specifically bind to a target antigen can be enriched for by positive selection techniques. For example, in some embodiments, effector cells are enriched for by incubation with target antigen-conjugated beads for a time period sufficient for positive selection of the desired abTCR effector cells. In some embodiments, the time period is about 30 minutes. In some embodiments, the time period ranges from 30 minutes to 36 hours or longer (including all ranges between these values). In some embodiments, the time period is at least one, 2, 3, 4, 5, or 6 hours. In some embodiments, the time period is 10 to 24 hours. In some embodiments, the incubation time period is 24 hours. For isolation of effector cells present at low levels in the heterogeneous cell population, use of longer incubation times, such as 24 hours, can increase cell yield. Longer incubation times may be used to isolate effector cells in any situation where there are few effector cells as compared to other cell types. The skilled artisan would recognize that multiple rounds of selection can also be used in the context of this invention.

[0343] T cells for stimulation can also be frozen after a washing step. After the washing step that removes plasma and platelets, the cells may be suspended in a freezing solution. While many freezing solutions and parameters are known in the art and will be useful in this context, one method involves using PBS containing 20% DMSO and 8% human serum albumin, or culture media containing 10% Dextran 40 and 5% Dextrose, 20% Human Serum Albumin and 7.5% DMSO, or 31.25% Plasmalyte-A, 31.25% Dextrose 5%, 0.45% NaCl, 10% Dextran 40 and 5% Dextrose, 20% Human Serum Albumin, and 7.5% DMSO or other suitable cell freezing media containing for example, Hespan and PlasmaLyte A, the cells then are frozen to −80° C. at a rate of 1° per minute and stored in the vapor phase of a liquid nitrogen storage tank. Other methods of controlled freezing may be used as well as uncontrolled freezing immediately at −20° C. or in liquid nitrogen.

### Allogneic CoStAR

[0344] In embodiments described herein, the immune effector cell can be an allogeneic immune effector cell, e.g., T cell or NK cell. For example, the cell can be an allogeneic T cell, e.g., an allogeneic T cell lacking expression of endogenous T cell receptor (TCR) and/or human leukocyte antigen (HLA), e.g., HLA class I and/or HLA class II.

[0345] A T cell lacking a functional endogenous TCR can be, e.g., engineered such that it does not express any functional TCR on its surface, engineered such that it does not express one or more subunits that comprise a functional TCR (e.g., engineered such that it does not express (or exhibits reduced expression) of TCR alpha, TCR beta, TCR gamma, TCR delta, TCR epsilon, and/or TCR zeta) or engineered such that it produces very little functional TCR on its surface. Alternatively, the T cell can express a substantially impaired TCR, e.g., by expression of mutated or truncated forms of one or more of the subunits of the TCR. The term “substantially impaired TCR” means that this TCR will not elicit an adverse immune reaction in a host.

[0346] A T cell described herein can be, e.g., engineered such that it does not express a functional HLA on its surface. For example, a T cell described herein, can be engineered such that cell surface expression HLA, e.g., HLA class 1 and/or HLA class II, is downregulated. In some aspects, downregulation of HLA may be accomplished by reducing or eliminating expression of beta-2 microglobulin (B2M).

[0347] In some embodiments, the T cell can lack a functional TCR and a functional HLA, e.g., HLA class I and/or HLA class II. Modified T cells that lack expression of a functional TCR and/or HLA can be obtained by any suitable means, including a knock out or knock down of one or more subunit of TCR or HLA. For example, the T cell can include a knock down of TCR and/or HLA using siRNA, shRNA, clustered regularly interspaced short palindromic repeats (CRISPR) transcription-activator like effector nuclease (TALEN), or zinc finger endonuclease (ZFN).

[0348] In some embodiments, the allogeneic cell can be a cell which does not expresses or expresses at low levels an inhibitory molecule, e.g. a cell engineered by any method described herein. For example, the cell can be a cell that does not express or expresses at low levels an inhibitory molecule, e.g., that can decrease the ability of a CoStAR-expressing cell to mount an immune effector response. Examples of inhibitory molecules include PD1, PD-L1, PD-L2, CTLA4, TIM3, CEACAM (e.g., CEACAM-1, CEACAM-3 and/or CEACAM-5), LAG3, VISTA, BTLA, TIGIT, LAIR1, CD160, 2B4, CD80, CD86, B7-H3 (CD276), B7-H4 (VTCN1), HVEM (TNFRSF14 or CD270), KIR, A2aR, MHC class I, MHC class II, Gal9, adenosine, and TGFR beta. Inhibition of an inhibitory molecule, e.g., by inhibition at the DNA, RNA or protein level, can optimize a CAR-expressing cell performance. In embodiments, an inhibitory nucleic acid, e.g., an inhibitory nucleic acid, e.g., a dsRNA, e.g., an siRNA or shRNA, a clustered regularly interspaced short palindromic repeats (CRISPR), a transcription-activator like effector nuclease (TALEN), or a zinc finger endonuclease (ZFN), e.g., as described herein, can be used.

[0349] Use of siRNA or shRNA to Inhibit Endogenous TCR or HLA

[0350] In some embodiments, TCR expression and/or HLA expression can be inhibited using siRNA or shRNA that targets a nucleic acid encoding a TCR and/or HLA, and/or an inhibitory molecule described herein (e.g., PD1, PD-L1, PD-L2, CTLA4, TIM3, CEACAM (e.g., CEACAM-1, CEACAM-3 and/or CEACAM-5), LAG3, VISTA, BTLA, TIGIT, LAIR1, CD160, 2B4, CD80, CD86, B7-H3 (CD276), B7-H4 (VTCN1), HVEM (TNFRSF14 or CD270), KIR, A2aR, MHC class I, MHC class II, Gal9, adenosine, and TGFR beta), in a T cell.

[0351] Expression of siRNA and shRNAs in T cells can be achieved using any conventional expression system, e.g., such as a lentiviral expression system. Exemplary shRNAs that downregulate expression of components of the TCR are described, e.g., in US Publication No.: 2012/0321667. Exemplary siRNA and shRNA that downregulate expression of HLA class I and/or HLA class II genes are described, e.g., in U.S. publication No.: US 2007/0036773.

[0352] CRISPR to Inhibit TCR or HLA

[0353] “CRISPR” or “CRISPR to inhibit TCR and/or HLA” as used herein refers to a set of clustered regularly interspaced short palindromic repeats, or a system comprising such a set of repeats. “Cas”, as used herein, refers to a CRISPR-associated protein. A “CRISPR/Cas” system refers to a system derived from CRISPR and Cas which can be used to silence or mutate a TCR and/or HLA gene, and/or an inhibitory molecule described herein (e.g., PD1, PD-L1, PD-L2, CTLA4, TIM3, CEACAM (e.g., CEACAM-1, CEACAM-3 and/or CEACAM-5), LAG3, VISTA, BTLA, TIGIT, LAIR1, CD160, 2B4, CD80, CD86, B7-H3 (CD276), B7-H4 (VTCN1), HVEM (TNFRSF14 or CD270), KIR, A2aR, MHC class I, MHC class II, GAL9, adenosine, and TGFR beta).

[0354] Naturally-occurring CRISPR/Cas systems are found in approximately 40% of sequenced eubacteria genomes and 90% of sequenced archaea. Grissa et al. (2007) BMC Bioinformatics 8: 172. This system is a type of prokaryotic immune system that confers resistance to foreign genetic elements such as plasmids and phages and provides a form of acquired immunity. Barrangou et al. (2007) Science 315: 1709-1712; Marragini et al. (2008) Science 322: 1843-1845.

[0355] Activation and Expansion of T Cells

[0356] T cells may be activated and expanded generally using methods as described, for example, in U.S. Pat. Nos. 6,352,694; 6,534,055; 6,905,680; 6,692,964; 5,858,358; 6,887,466; 6,905,681; 7,144,575; 7,067,318; 7,172,869; 7,232,566; 7,175,843; 5,883,223; 6,905,874; 6,797,514; 6,867,041; and U.S. Patent Application Publication No. 20060121005.

[0357] Generally, the T cells of the invention may be expanded by contact with a surface having attached thereto an agent that stimulates a CD3/TCR complex associated signal and a ligand that stimulates a costimulatory molecule on the surface of the T cells. In particular, T cell populations may be stimulated as described herein, such as by contact with an anti-CD3 antibody, or antigen-binding fragment thereof, or an anti-CD2 antibody immobilized on a surface, or by contact with a protein kinase C activator (e.g., bryostatin) in conjunction with a calcium ionophore. For co-stimulation of an accessory molecule on the surface of the T cells, a ligand that binds the accessory molecule is used. For example, a population of T cells can be contacted with an anti-CD3 antibody and an anti-CD28 antibody, under conditions appropriate for stimulating proliferation of the T cells. To stimulate proliferation of either CD4+ T cells or CD8+ T cells, an anti-CD3 antibody and an anti-CD28 antibody can be used. Examples of an anti-CD28 antibody include 9.3, B-T3, XR-CD28 (Diaclone, Besancon, France) can be used as can other methods commonly known in the art (Berg et al., Transplant Proc. 30(8):3975-3977, 1998; Haanen et al., J. Exp. Med. 190(9):13191328, 1999; Garland et al., J. Immunol Meth. 227(1-2):53-63, 1999).

[0358] In some embodiments, expansion can be performed using flasks or containers, or gas-permeable containers known by those of skill in the art and can proceed for 7 days, 8 days, 9 days, 10 days, 11 days, 12 days, 13 days, or 14 days, about 7 days to about 14 days, about 8 days to about 14 days, about 9 days to about 14 days, about 10 days to about 14 days, about 11 days to about 14 days, about 12 days to about 14 days, or about 13 days to about 14 days. In some embodiments, the second TIL expansion can proceed for about 14 days.

[0359] In some embodiments, the expansion can be performed using non-specific T-cell receptor stimulation in the presence of interleukin-2 (IL-2) or interleukin-15 (IL-15). The non-specific T-cell receptor stimulus can include, for example, an anti-CD3 antibody, such as about 30 ng/ml of OKT3, a mouse monoclonal anti-CD3 antibody (commercially available from Ortho-McNeil, Raritan, N.J. or Miltenyi Biotech, Auburn, Calif.) or UHCT-1 (commercially available from BioLegend, San Diego, Calif., USA). CoStAR cells can be expanded in vitro by including one or more antigens, including antigenic portions thereof, such as epitope(s), of a cancer, which can be optionally expressed from a vector, such as a human leukocyte antigen A2 (HLA-A2) binding peptide, e.g., 0.3 uM MART-1:26-35 (27L) or gp100:209-217 (210M), optionally in the presence of a T-cell growth factor, such as 300 IU/mL IL-2 or IL-15. Other suitable antigens may include, e.g., NY-ESO-1, TRP-1, TRP-2, tyrosinase cancer antigen, MAGE-A3, SSX-2, and VEGFR2, or antigenic portions thereof. CoStAR cells may also be rapidly expanded by re-stimulation with the same antigen(s) of the cancer pulsed onto HLA-A2-expressing antigen-presenting cells. Alternatively, the CoStAR cells can be further stimulated with, e.g., example, irradiated, autologous lymphocytes or with irradiated HLA-A2+ allogeneic lymphocytes and IL-2. In some embodiments, the stimulation occurs as part of the expansion. In some embodiments, the expansion occurs in the presence of irradiated, autologous lymphocytes or with irradiated HLA-A2+ allogeneic lymphocytes and IL-2.

[0360] In some embodiments, the cell culture medium comprises IL-2. In some embodiments, the cell culture medium comprises about 1000 IU/mL, about 1500 IU/mL, about 2000 IU/mL, about 2500 IU/mL, about 3000 IU/mL, about 3500 IU/mL, about 4000 IU/mL, about 4500 IU/mL, about 5000 IU/mL, about 5500 IU/mL, about 6000 IU/mL, about 6500 IU/mL, about 7000 IU/mL, about 7500 IU/mL, or about 8000 IU/mL, or between 1000 and 2000 IU/mL, between 2000 and 3000 IU/mL, between 3000 and 4000 IU/mL, between 4000 and 5000 IU/mL, between 5000 and 6000 IU/mL, between 6000 and 7000 IU/mL, between 7000 and 8000 IU/mL, or between 8000 IU/mL of IL-2.

[0361] In some embodiments, the cell culture medium comprises OKT3 antibody. In some embodiments, the cell culture medium comprises about 0.1 ng/mL, about 0.5 ng/mL, about 1 ng/mL, about 2.5 ng/mL, about 5 ng/mL, about 7.5 ng/mL, about 10 ng/mL, about 15 ng/mL, about 20 ng/mL, about 25 ng/mL, about 30 ng/mL, about 35 ng/mL, about 40 ng/mL, about 50 ng/mL, about 60 ng/mL, about 70 ng/mL, about 80 ng/mL, about 90 ng/mL, about 100 ng/mL, about 200 ng/mL, about 500 ng/mL, about 1 μg/mL or between 0.1 ng/mL and 1 ng/mL, between 1 ng/mL and 5 ng/mL, between 5 ng/mL and 10 ng/mL, between 10 ng/mL and 20 ng/mL, between 20 ng/mL and 30 ng/mL, between 30 ng/mL and 40 ng/mL, between 40 ng/mL and 50 ng/mL, or between 50 ng/mL and 100 ng/mL of OKT3 antibody.

[0362] In some embodiments, a combination of IL-2, IL-7, IL-15, and/or IL-21 are employed as a combination during the expansion. In some embodiments, IL-2, IL-7, IL-15, and/or IL-21 as well as any combinations thereof can be included during the expansion. In some embodiments, a combination of IL-2, IL-15, and IL-21 are employed as a combination during the expansion. In some embodiments, IL-2, IL-15, and IL-21 as well as any combinations thereof can be included.

[0363] In some embodiments, the expansion can be conducted in a supplemented cell culture medium comprising IL-2, OKT-3, and antigen-presenting feeder cells.

[0364] In some embodiments, the expansion culture media comprises about 500 IU/mL of IL-15, about 400 IU/mL of IL-15, about 300 IU/mL of IL-15, about 200 IU/mL of IL-15, about 180 IU/mL of IL-15, about 160 IU/mL of IL-15, about 140 IU/mL of IL-15, about 120 IU/mL of IL-15, or about 100 IU/mL of IL-15, or about 500 IU/mL of IL-15 to about 100 IU/mL of IL-15, or about 400 IU/mL of IL-15 to about 100 IU/mL of IL-15 or about 300 IU/mL of IL-15 to about 100 IU/mL of IL-15 or about 200 IU/mL of IL-15, or about 180 IU/mL of IL-15.

[0365] In some embodiments, the expansion culture media comprises about 20 IU/mL of IL-21, about 15 IU/mL of IL-21, about 12 IU/mL of IL-21, about 10 IU/mL of IL-21, about 5 IU/mL of IL-21, about 4 IU/mL of IL-21, about 3 IU/mL of IL-21, about 2 IU/mL of IL-21, about 1 IU/mL of IL-21, or about 0.5 IU/mL of IL-21, or about 20 IU/mL of IL-21 to about 0.5 IU/mL of IL-21, or about 15 IU/mL of IL-21 to about 0.5 IU/mL of IL-21, or about 12 IU/mL of IL-21 to about 0.5 IU/mL of IL-21, or about 10 IU/mL of IL-21 to about 0.5 IU/mL of IL-21, or about 5 IU/mL of IL-21 to about 1 IU/mL of IL-21, or about 2 IU/mL of IL-21. In some embodiments, the cell culture medium comprises about 1 IU/mL of IL-21, or about 0.5 IU/mL of IL-21.

[0366] In some embodiments the antigen-presenting feeder cells (APCs) are PBMCs. In some embodiments, the ratio of CoStAR cells to PBMCs and/or antigen-presenting cells in the expansion is about 1 to 25, about 1 to 50, about 1 to 100, about 1 to 125, about 1 to 150, about 1 to 175, about 1 to 200, about 1 to 225, about 1 to 250, about 1 to 275, about 1 to 300, about 1 to 325, about 1 to 350, about 1 to 375, about 1 to 400, or about 1 to 500, or between 1 to 50 and 1 to 300, or between 1 to 100 and 1 to 200.

[0367] In certain aspects, the primary stimulatory signal and the costimulatory signal for the T cell may be provided by different protocols. For example, the agents providing each signal may be in solution or coupled to a surface. When coupled to a surface, the agents may be coupled to the same surface (i.e., in “cis” formation) or to separate surfaces (i.e., in “trans” formation). Alternatively, one agent may be coupled to a surface and the other agent in solution. In one aspect, the agent providing the costimulatory signal is bound to a cell surface and the agent providing the primary activation signal is in solution or coupled to a surface. In certain aspects, both agents can be in solution. In one aspect, the agents may be in soluble form, and then cross-linked to a surface, such as a cell expressing Fc receptors or an antibody or other binding agent which will bind to the agents. In this regard, see for example, U.S. Patent Application Publication Nos. 20040101519 and 20060034810 for artificial antigen presenting cells (aAPCs) that are contemplated for use in activating and expanding T cells in the present invention.

[0368] In one aspect, the two agents are immobilized on beads, either on the same bead, i.e., “cis,” or to separate beads, i.e., “trans.” By way of example, the agent providing the primary activation signal is an anti-CD3 antibody or an antigen-binding fragment thereof and the agent providing the costimulatory signal is an anti-CD28 antibody or antigen-binding fragment thereof; and both agents are co-immobilized to the same bead in equivalent molecular amounts. In one aspect, a 1:1 ratio of each antibody bound to the beads for CD4+ T cell expansion and T cell growth is used. In certain aspects of the present invention, a ratio of anti CD3:CD28 antibodies bound to the beads is used such that an increase in T cell expansion is observed as compared to the expansion observed using a ratio of 1:1. In one particular aspect an increase of from about 1 to about 3 fold is observed as compared to the expansion observed using a ratio of 1:1. In one aspect, the ratio of CD3:CD28 antibody bound to the beads ranges from 100:1 to 1:100 and all integer values there between. In one aspect of the present invention, more anti-CD28 antibody is bound to the particles than anti-CD3 antibody, i.e., the ratio of CD3:CD28 is less than one. In certain aspects of the invention, the ratio of anti CD28 antibody to anti CD3 antibody bound to the beads is greater than 2:1. In one particular aspect, a 1:100 CD3:CD28 ratio of antibody bound to beads is used. In one aspect, a 1:75 CD3:CD28 ratio of antibody bound to beads is used. In a further aspect, a 1:50 CD3:CD28 ratio of antibody bound to beads is used. In one aspect, a 1:30 CD3:CD28 ratio of antibody bound to beads is used. In one preferred aspect, a 1:10 CD3:CD28 ratio of antibody bound to beads is used. In one aspect, a 1:3 CD3:CD28 ratio of antibody bound to the beads is used. In yet one aspect, a 3:1 CD3:CD28 ratio of antibody bound to the beads is used.

[0369] Ratios of particles to cells from 1:500 to 500:1 and any integer values in between may be used to stimulate T cells or other target cells. As those of ordinary skill in the art can readily appreciate, the ratio of particles to cells may depend on particle size relative to the target cell. For example, small sized beads could only bind a few cells, while larger beads could bind many. In certain aspects the ratio of cells to particles ranges from 1:100 to 100:1 and any integer values in-between and in further aspects the ratio comprises 1:9 to 9:1 and any integer values in between, can also be used to stimulate T cells. The ratio of anti-CD3- and anti-CD28-coupled particles to T cells that result in T cell stimulation can vary as noted above, however certain preferred values include 1:100, 1:50, 1:40, 1:30, 1:20, 1:10, 1:9, 1:8, 1:7, 1:6, 1:5, 1:4, 1:3, 1:2, 1:1, 2:1, 3:1, 4:1, 5:1, 6:1, 7:1, 8:1, 9:1, 10:1, and 15:1 with one preferred ratio being at least 1:1 particles per T cell. In one aspect, a ratio of particles to cells of 1:1 or less is used. In one particular aspect, a preferred particle: cell ratio is 1:5. In further aspects, the ratio of particles to cells can be varied depending on the day of stimulation. For example, in one aspect, the ratio of particles to cells is from 1:1 to 10:1 on the first day and additional particles are added to the cells every day or every other day thereafter for up to 10 days, at final ratios of from 1:1 to 1:10 (based on cell counts on the day of addition). In one particular aspect, the ratio of particles to cells is 1:1 on the first day of stimulation and adjusted to 1:5 on the third and fifth days of stimulation. In one aspect, particles are added on a daily or every other day basis to a final ratio of 1:1 on the first day, and 1:5 on the third and fifth days of stimulation. In one aspect, the ratio of particles to cells is 2:1 on the first day of stimulation and adjusted to 1:10 on the third and fifth days of stimulation. In one aspect, particles are added on a daily or every other day basis to a final ratio of 1:1 on the first day, and 1:10 on the third and fifth days of stimulation. One of skill in the art will appreciate that a variety of other ratios may be suitable for use in the present invention. In particular, ratios will vary depending on particle size and on cell size and type. In one aspect, the most typical ratios for use are in the neighborhood of 1:1, 2:1 and 3:1 on the first day.

[0370] In further aspects of the present invention, the cells, such as T cells, are combined with agent-coated beads, the beads and the cells are subsequently separated, and then the cells are cultured. In an alternative aspect, prior to culture, the agent-coated beads and cells are not separated but are cultured together. In a further aspect, the beads and cells are first concentrated by application of a force, such as a magnetic force, resulting in increased ligation of cell surface markers, thereby inducing cell stimulation.

### Preparation of CoStAR Cells

[0371] Viral- and non-viral-based genetic engineering tools can be used to generate CoStAR cells, including without limitation T cells, NK cells resulting in permanent or transient expression of therapeutic genes. Retrovirus-based gene delivery is a mature, well-characterized technology, which has been used to permanently integrate CARs into the host cell genome (Scholler J., e.g. Decade-long safety and function of retroviral-modified chimeric antigen receptor T cells. Sci. Transl. Med. 2012; 4:132ra53; Rosenberg S. A. et al., Gene transfer into humans-immunotherapy of patients with advanced melanoma, using tumor-infiltrating lymphocytes modified by retroviral gene transduction. N. Engl. J. Med. 1990; 323:570-578)

[0372] Non-viral DNA transfection methods can also be used. For example, Singh et al describes use of the Sleeping Beauty (SB) transposon system developed to engineer CAR T cells (Singh H., et al., Redirecting specificity of T-cell populations for CD19 using the Sleeping Beauty system. Cancer Res. 2008; 68:2961-2971) and is being used in clinical trials (see e.g., ClinicalTrials.gov: NCT00968760 and NCT01653717). The same technology is applicable to engineer CoStARs cells.

[0373] Multiple SB enzymes have been used to deliver transgenes. Mátés describes a hyperactive transposase (SB100X) with approximately 100-fold enhancement in efficiency when compared to the first-generation transposase. SB100X supported 35-50% stable gene transfer in human CD34(+) cells enriched in hematopoietic stem or progenitor cells. (Mit6s L. et al., Molecular evolution of a novel hyperactive Sleeping Beauty transposase enables robust stable gene transfer in vertebrates. Nat. Genet. 2009; 41:753-761) and multiple transgenes can be delivered from multicistronic single plasmids (e.g., Thokala R. et al., Redirecting specificity of T cells using the Sleeping Beauty system to express chimeric antigen receptors by mix-and-matching of VL and VH domains targeting CD123+ tumors. PLoS ONE. 2016; 11:e0159477) or multiple plasmids (e.g., Hurton L. V. et al., Tethered IL-15 augments antitumor activity and promotes a stem-cell memory subset in tumor-specific T cells. Proc. Natl. Acad. Sci. USA. 2016; 113:E7788-E7797). Such systems are used with CoStARs of the invention.

[0374] Morita et al, describes the piggyBac transposon system to integrate larger transgenes (Morita D. et al., Enhanced expression of anti-CD19 chimeric antigen receptor in piggyBac transposon-engineered T cells. Mol. Ther. Methods Clin. Dev. 2017; 8:131-140) Nakazawa et al. describes use of the system to generate EBV-specific cytotoxic T-cells expressing HER2-specific chimeric antigen receptor (Nakazawa Y et al, PiggyBac-mediated cancer immunotherapy using EBV-specific cytotoxic T-cells expressing HER2-specific chimeric antigen receptor. Mol. Ther. 2011; 19:2133-2143). Manuri et al used the system to generate CD-19 specific T cells (Manuri P. V. R. et al., piggyBac transposon/transposase system to generate CD19-specific T cells for the treatment of B-lineage malignancies. Hum. Gene Ther. 2010; 21:427-437).

[0375] Transposon technology is easy and economical. One potential drawback is the longer expansion protocols currently employed may result in T cell differentiation, impaired activity and poor persistence of the infused cells. Monjezi et al describe development minicircle vectors that minimize these difficulties through higher efficiency integrations (Monjezi R. et al., Enhanced CAR T-cell engineering using non-viral Sleeping Beauty transposition from minicircle vectors. Leukemia. 2017; 31:186-194). These transposon technologies can be used for CoStARs of the invention.

### Pharmaceutical Compositions

[0376] The present invention also relates to a pharmaceutical composition containing a vector or a CoStAR expressing cell of the invention together with a pharmaceutically acceptable carrier, diluent or excipient, and optionally one or more further pharmaceutically active polypeptides and/or compounds.

[0377] In some embodiments, a pharmaceutical composition is provided comprising a CoStAR described above and a pharmaceutically acceptable carrier. In some embodiments, a pharmaceutical composition is provided comprising a nucleic acid encoding a CoStAR according to any of the embodiments described above and a pharmaceutically acceptable carrier. In some embodiments, a pharmaceutical composition is provided comprising an effector cell expressing a CoStAR described above and a pharmaceutically acceptable carrier. Such a formulation may, for example, be in a form suitable for intravenous infusion.

[0378] As used herein, by “pharmaceutically acceptable” or “pharmacologically compatible” is meant a material that is not biologically or otherwise undesirable, e.g., the material may be incorporated into a pharmaceutical composition administered to a patient without causing any significant undesirable biological effects or interacting in a deleterious manner with any of the other components of the composition in which it is contained. Pharmaceutically acceptable carriers or excipients have preferably met the required standards of toxicological and manufacturing testing and/or are included on the Inactive Ingredient Guide prepared by the U.S. Food and Drug administration.

[0379] An aspect of the invention provides a population of modified T cells expressing a recombinant CoStAR. A suitable population may be produced by a method described above.

[0380] The population of modified T cells may be for use as a medicament. For example, a population of modified T cells as described herein may be used in cancer immunotherapy therapy, for example adoptive T cell therapy.

[0381] Other aspects of the invention provide the use of a population of modified T cells as described herein for the manufacture of a medicament for the treatment of cancer, a population of modified T cells as described herein for the treatment of cancer, and a method of treatment of cancer may comprise administering a population of modified T cells as described herein to an individual in need thereof.

[0382] The population of modified T cells may be autologous i.e. the modified T cells were originally obtained from the same individual to whom they are subsequently administered (i.e. the donor and recipient individual are the same). A suitable population of modified T cells for administration to the individual may be produced by a method comprising providing an initial population of T cells obtained from the individual, modifying the T cells to express a cAMP PDE or fragment thereof and an antigen receptor which binds specifically to cancer cells in the individual, and culturing the modified T cells.

[0383] The population of modified T cells may be allogeneic i.e. the modified T cells were originally obtained from a different individual to the individual to whom they are subsequently administered (i.e. the donor and recipient individual are different). The donor and recipient individuals may be HLA matched to avoid GVHD and other undesirable immune effects. A suitable population of modified T cells for administration to a recipient individual may be produced by a method comprising providing an initial population of T cells obtained from a donor individual, modifying the T cells to express a CoStAR which binds specifically to cancer cells in the recipient individual, and culturing the modified T cells.

[0384] Following administration of the modified T cells, the recipient individual may exhibit a T cell mediated immune response against cancer cells in the recipient individual. This may have a beneficial effect on the cancer condition in the individual.

[0385] Cancer conditions may be characterized by the abnormal proliferation of malignant cancer cells and may include leukemias, such as AML, CML, ALL and CLL, lymphomas, such as Hodgkin lymphoma, non-Hodgkin lymphoma and multiple myeloma, and solid cancers such as sarcomas, skin cancer, melanoma, bladder cancer, brain cancer, breast cancer, uterus cancer, ovary cancer, prostate cancer, lung cancer, colorectal cancer, cervical cancer, liver cancer, head and neck cancer, oesophageal cancer, pancreas cancer, renal cancer, adrenal cancer, stomach cancer, testicular cancer, cancer of the gall bladder and biliary tracts, thyroid cancer, thymus cancer, cancer of bone, and cerebral cancer, as well as cancer of unknown primary (CUP).

[0386] Cancer cells within an individual may be immunologically distinct from normal somatic cells in the individual (i.e. the cancerous tumor may be immunogenic). For example, the cancer cells may be capable of eliciting a systemic immune response in the individual against one or more antigens expressed by the cancer cells. The tumor antigens that elicit the immune response may be specific to cancer cells or may be shared by one or more normal cells in the individual.

[0387] An individual suitable for treatment as described above may be a mammal, such as a rodent (e.g. a guinea pig, a hamster, a rat, a mouse), murine (e.g. a mouse), canine (e.g. a dog), feline (e.g. a cat), equine (e.g. a horse), a primate, simian (e.g. a monkey or ape), a monkey (e.g. marmoset, baboon), an ape (e.g. gorilla, chimpanzee, orangutan, gibbon), or a human.

[0388] In preferred embodiments, the individual is a human. In other preferred embodiments, non-human mammals, especially mammals that are conventionally used as models for demonstrating therapeutic efficacy in humans (e.g. murine, primate, porcine, canine, or rabbit animals) may be employed.

### Method of Treatment

[0389] The term “therapeutically effective amount” refers to an amount of a CoStAR or composition comprising a CoStAR as disclosed herein, effective to “treat” a disease or disorder in an individual. In the case of cancer, the therapeutically effective amount of a CoStAR or composition comprising a CoStAR as disclosed herein can reduce the number of cancer cells; reduce the tumor size or weight; inhibit (i.e., slow to some extent and preferably stop) cancer cell infiltration into peripheral organs; inhibit (i.e., slow to some extent and preferably stop) tumor metastasis; inhibit, to some extent, tumor growth; and/or relieve to some extent one or more of the symptoms associated with the cancer. To the extent a CoStAR or composition comprising a CoStAR as disclosed herein can prevent growth and/or kill existing cancer cells, it can be cytostatic and/or cytotoxic. In some embodiments, the therapeutically effective amount is a growth inhibitory amount. In some embodiments, the therapeutically effective amount is an amount that improves progression free survival of a patient. In the case of infectious disease, such as viral infection, the therapeutically effective amount of a CoStAR or composition comprising a CoStAR as disclosed herein can reduce the number of cells infected by the pathogen; reduce the production or release of pathogen-derived antigens; inhibit (i.e., slow to some extent and preferably stop) spread of the pathogen to uninfected cells; and/or relieve to some extent one or more symptoms associated with the infection. In some embodiments, the therapeutically effective amount is an amount that extends the survival of a patient.

[0390] Cells, including T and NK cells, expressing CoStARs for use in the methods of the present may either be created ex vivo either from a patient's own peripheral blood (autologous), or in the setting of a haematopoietic stem cell transplant from donor peripheral blood (allogenic), or peripheral blood from an unconnected donor (allogenic). Alternatively, T-cells or NK cells may be derived from ex-vivo differentiation of inducible progenitor cells or embryonic progenitor cells to T-cells or NK cells. In these instances, T-cells expressing a CoStAR and, optionally, a CAR and/or TCR, are generated by introducing DNA or RNA coding for the CoStAR and, optionally, a CAR and/or TCR, by one of many means including transduction with a viral vector, transfection with DNA or RNA.

[0391] T or NK cells expressing a CoStAR of the present invention and, optionally, expressing a TCR and/or CAR may be used for the treatment of haematological cancers or solid tumors.

[0392] A method for the treatment of disease relates to the therapeutic use of a vector or cell, including a T or NK cell, of the invention. In this respect, the vector, or T or NK cell may be administered to a subject having an existing disease or condition in order to lessen, reduce or improve at least one symptom associated with the disease and/or to slow down, reduce or block the progression of the disease. The method of the invention may cause or promote T-cell mediated killing of cancer cells. The vector, or T or NK cell according to the present invention may be administered to a patient with one or more additional therapeutic agents. The one or more additional therapeutic agents can be co-administered to the patient. By “co-administering” is meant administering one or more additional therapeutic agents and the vector, or T or NK cell of the present invention sufficiently close in time such that the vector, or T or NK cell can enhance the effect of one or more additional therapeutic agents, or vice versa. In this regard, the vectors or cells can be administered first and the one or more additional therapeutic agents can be administered second, or vice versa. Alternatively, the vectors or cells and the one or more additional therapeutic agents can be administered simultaneously. One co-administered therapeutic agent that may be useful is IL-2, as this is currently used in existing cell therapies to boost the activity of administered cells. However, IL-2 treatment is associated with toxicity and tolerability issues.

[0393] As mentioned, for administration to a patient, the CoStAR effector cells can be allogeneic or autologous to the patient. In some embodiments, allogeneic cells are further genetically modified, for example by gene editing, so as to minimize or prevent GVHD and/or a patient's immune response against the CoStAR cells.

[0394] The CoStAR effector cells are used to treat cancers and neoplastic diseases associated with a target antigen. Cancers and neoplastic diseases that may be treated using any of the methods described herein include tumors that are not vascularized, or not yet substantially vascularized, as well as vascularized tumors. The cancers may comprise non-solid tumors (such as hematological tumors, for example, leukemias and lymphomas) or may comprise solid tumors. Types of cancers to be treated with the CoStAR effector cells of the invention include, but are not limited to, carcinoma, blastoma, and sarcoma, and certain leukemia or lymphoid malignancies, benign and malignant tumors, and malignancies e.g., sarcomas, carcinomas, and melanomas. Adult tumors/cancers and pediatric tumors/cancers are also included.

[0395] Hematologic cancers are cancers of the blood or bone marrow. Examples of hematological (or hematogenous) cancers include leukemias, including acute leukemias (such as acute lymphocytic leukemia, acute myelocytic leukemia, acute myelogenous leukemia and myeloblastic, promyelocytic, myelomonocytic, monocytic and erythroleukemia), chronic leukemias (such as chronic myelocytic (granulocytic) leukemia, chronic myelogenous leukemia, and chronic lymphocytic leukemia), polycythemia vera, lymphoma, Hodgkin's disease, non-Hodgkin's lymphoma (indolent and high grade forms), multiple myeloma, plasmacytoma, Waldenstrom's macroglobulinemia, heavy chain disease, myelodysplastic syndrome, hairy cell leukemia and myelodysplasia.

[0396] Solid tumors are abnormal masses of tissue that usually do not contain cysts or liquid areas. Solid tumors can be benign or malignant. Different types of solid tumors are named for the type of cells that form them (such as sarcomas, carcinomas, and lymphomas). Examples of solid tumors, such as sarcomas and carcinomas, include adrenocortical carcinoma, cholangiocarcinoma, fibrosarcoma, myosarcoma, liposarcoma, chondrosarcoma, osteosarcoma, and other sarcomas, synovioma, mesothelioma, Ewing's tumor, leiomyosarcoma, rhabdomyosarcoma, colon carcinoma, stomach cancer, lymphoid malignancy, pancreatic cancer, breast cancer, lung cancers, ovarian cancer, prostate cancer, hepatocellular carcinoma, squamous cell carcinoma, basal cell carcinoma, adenocarcinoma, sweat gland carcinoma, thyroid cancer (e.g., medullary thyroid carcinoma and papillary thyroid carcinoma), pheochromocytomas sebaceous gland carcinoma, papillary carcinoma, papillary adenocarcinomas, medullary carcinoma, bronchogenic carcinoma, renal cell carcinoma, hepatoma, bile duct carcinoma, choriocarcinoma, Wilms' tumor, cervical cancer (e.g., cervical carcinoma and pre-invasive cervical dysplasia), colorectal cancer, cancer of the anus, anal canal, or anorectum, vaginal cancer, cancer of the vulva (e.g., squamous cell carcinoma, intraepithelial carcinoma, adenocarcinoma, and fibrosarcoma), penile cancer, oropharyngeal cancer, esophageal cancer, head cancers (e.g., squamous cell carcinoma), neck cancers (e.g., squamous cell carcinoma), testicular cancer (e.g., seminoma, teratoma, embryonal carcinoma, teratocarcinoma, choriocarcinoma, sarcoma, Leydig cell tumor, fibroma, fibroadenoma, adenomatoid tumors, and lipoma), bladder carcinoma, kidney cancer, melanoma, cancer of the uterus (e.g., endometrial carcinoma), urothelial cancers (e.g., squamous cell carcinoma, transitional cell carcinoma, adenocarcinoma, ureter cancer, and urinary bladder cancer), and CNS tumors (such as a glioma (such as brainstem glioma and mixed gliomas), glioblastoma (also known as glioblastoma multiforme) astrocytoma, CNS lymphoma, germinoma, medulloblastoma, Schwannoma craniopharyogioma, ependymoma, pinealoma, hemangioblastoma, acoustic neuroma, oligodendroglioma, meningioma, neuroblastoma, retinoblastoma and brain metastases).

[0397] When “an immunologically effective amount,” “an anti-tumor effective amount,” “a tumor-inhibiting effective amount,” or “therapeutic amount” is indicated, the precise amount of the compositions of the present invention to be administered can be determined by a physician with consideration of individual differences in age, weight, tumor size, extent of infection or metastasis, and condition of the patient (subject). It can generally be stated that a pharmaceutical composition comprising the T cells described herein may be administered at a dosage of 10⁴ to 10⁹ cells/kg body weight, in some instances 10⁵ to 10⁶ cells/kg body weight, including all integer values within those ranges. T cell compositions may also be administered multiple times at these dosages. The cells can be administered by using infusion techniques that are commonly known in immunotherapy (see, e.g., Rosenberg et al., New Eng. J. of Med. 319:1676, 1988).

### Combination Therapies

[0398] A CoStAR-expressing cell described herein may be used in combination with other known agents and therapies. Administered “in combination”, as used herein, means that two (or more) different treatments are delivered to the subject during the course of the subject's affliction with the disorder, e.g., the two or more treatments are delivered after the subject has been diagnosed with the disorder and before the disorder has been cured or eliminated or treatment has ceased for other reasons. In some embodiments, the delivery of one treatment is still occurring when the delivery of the second begins, so that there is overlap in terms of administration. This is sometimes referred to herein as “simultaneous” or “concurrent delivery”. In other embodiments, the delivery of one treatment ends before the delivery of the other treatment begins. In some embodiments of either case, the treatment is more effective because of combined administration. For example, the second treatment is more effective, e.g., an equivalent effect is seen with less of the second treatment, or the second treatment reduces symptoms to a greater extent, than would be seen if the second treatment were administered in the absence of the first treatment, or the analogous situation is seen with the first treatment. In some embodiments, delivery is such that the reduction in a symptom, or other parameter related to the disorder is greater than what would be observed with one treatment delivered in the absence of the other. The effect of the two treatments can be partially additive, wholly additive, or greater than additive. The delivery can be such that an effect of the first treatment delivered is still detectable when the second is delivered.

[0399] A CoStAR-expressing cell described herein and the at least one additional therapeutic agent can be administered simultaneously, in the same or in separate compositions, or sequentially. For sequential administration, the CAR-expressing cell described herein can be administered first, and the additional agent can be administered second, or the order of administration can be reversed.

[0400] The CoStAR therapy and/or other therapeutic agents, procedures or modalities can be administered during periods of active disorder, or during a period of remission or less active disease. The CoStAR therapy can be administered before the other treatment, concurrently with the treatment, post-treatment, or during remission of the disorder.

[0401] When administered in combination, the therapy and the additional agent (e.g., second or third agent), or all, can be administered in an amount or dose that is higher, lower or the same than the amount or dosage of each agent used individually, e.g., as a monotherapy. In some embodiments, the administered amount or dosage of the CoStAR therapy, the additional agent (e.g., second or third agent), or all, is lower (e.g., at least 20%, at least 30%, at least 40%, or at least 50%) than the amount or dosage of each agent used individually, e.g., as a monotherapy. In other embodiments, the amount or dosage of the CoStAR therapy, the additional agent (e.g., second or third agent), or all, that results in a desired effect (e.g., treatment of cancer) is lower (e.g., at least 20%, at least 30%, at least 40%, or at least 50% lower) than the amount or dosage of each agent used individually, e.g., as a monotherapy, required to achieve the same therapeutic effect.

[0402] In further aspects, a CoStAR-expressing cell described herein may be used in a treatment regimen in combination with surgery, chemotherapy, radiation, immunosuppressive agents, such as cyclosporin, azathioprine, methotrexate, mycophenolate, and FK506, antibodies, or other immunoablative agents such as CAMPATH, anti-CD3 antibodies or other antibody therapies, cytoxin, fludarabine, cyclosporin, FK506, rapamycin, mycophenolic acid, steroids, FR901228, cytokines, and irradiation, peptide vaccine, such as that described in Izumoto et al. 2008 J Neurosurg 108:963-971.

[0403] In certain instances, compounds of the present invention are combined with other therapeutic agents, such as other anti-cancer agents, anti-allergic agents, anti-nausea agents (or anti-emetics), pain relievers, cytoprotective agents, and combinations thereof.

[0404] In one embodiment, a CoStAR-expressing cell described herein can be used in combination with a chemotherapeutic agent. Exemplary chemotherapeutic agents include an anthracycline (e.g., doxorubicin (e.g., liposomal doxorubicin)), a vinca alkaloid (e.g., vinblastine, vincristine, vindesine, vinorelbine), an alkylating agent (e.g., cyclophosphamide, decarbazine, melphalan, ifosfamide, temozolomide), an immune cell antibody (e.g., alemtuzamab, gemtuzumab, rituximab, ofatumumab, tositumomab, brentuximab), an antimetabolite (including, e.g., folic acid antagonists, pyrimidine analogs, purine analogs and adenosine deaminase inhibitors (e.g., fludarabine)), an mTOR inhibitor, a TNFR glucocorticoid induced TNFR related protein (GITR) agonist, a proteasome inhibitor (e.g., aclacinomycin A, gliotoxin or bortezomib), an immunomodulator such as thalidomide or a thalidomide derivative (e.g., lenalidomide).

[0405] General Chemotherapeutic agents considered for use in combination therapies include busulfan (Myleran®), busulfan injection (Busulfex®), cladribine (Leustatin®), cyclophosphamide (Cytoxan® or Neosar®), cytarabine, cytosine arabinoside (Cytosar-U®), cytarabine liposome injection (DepoCyt®), daunorubicin hydrochloride (Cerubidine®), daunorubicin citrate liposome injection (DaunoXome®), dexamethasone, doxorubicin hydrochloride (Adriamycin®, Rubex®), etoposide (Vepesid®), fludarabine phosphate (Fludara®), hydroxyurea (Hydrea®), Idarubicin (Idamycin®), mitoxantrone (Novantrone®), Gemtuzumab Ozogamicin (Mylotarg®).

[0406] In embodiments, general chemotherapeutic agents considered for use in combination therapies include anastrozole (Arimidex®), bicalutamide (Casodex®), bleomycin sulfate (Blenoxane®), busulfan (Myleran®), busulfan injection (Busulfex®), capecitabine (Xeloda®), N4-pentoxycarbonyl-5-deoxy-5-fluorocytidine, carboplatin (Paraplatin®), carmustine (BiCNU®), chlorambucil (Leukeran®), cisplatin (Platinol®), cladribine (Leustatin®), cyclophosphamide (Cytoxan® or Neosar®), cytarabine, cytosine arabinoside (Cytosar-U®), cytarabine liposome injection (DepoCyt®), dacarbazine (DTIC-Dome®), dactinomycin (Actinomycin D, Cosmegan), daunorubicin hydrochloride (Cerubidine®), daunorubicin citrate liposome injection (DaunoXome®), dexamethasone, docetaxel (Taxotere®), doxorubicin hydrochloride (Adriamycin®, Rubex®), etoposide (Vepesid®), fludarabine phosphate (Fludara®), 5-fluorouracil (Adrucil®, Efudex®), flutamide (Eulexin®), tezacitibine, Gemcitabine (difluorodeoxycitidine), hydroxyurea (Hydrea®), Idarubicin (Idamycin®), ifosfamide (IFEX®), irinotecan (Camptosar®), L-asparaginase (ELSPAR®), leucovorin calcium, melphalan (Alkeran®), 6-mercaptopurine (Purinethol®), methotrexate (Folex®), mitoxantrone (Novantrone®), mylotarg, paclitaxel (Taxol®), phoenix (Yttrium90/MX-DTPA), pentostatin, polifeprosan 20 with carmustine implant (Gliadel®), tamoxifen citrate (Nolvadex®), teniposide (Vumon®), 6-thioguanine, thiotepa, tirapazamine (Tirazone®), topotecan hydrochloride for injection (Hycamptin®), vinblastine (Velban®), vincristine (Oncovin®), and vinorelbine (Navelbine®).

[0407] Treatments can be evaluated, for example, by tumor regression, tumor weight or size shrinkage, time to progression, duration of survival, progression free survival, overall response rate, duration of response, quality of life, protein expression and/or activity. Approaches to determining efficacy of the therapy can be employed, including for example, measurement of response through radiological imaging.

### Sequences

[0408] The following sequences include complete CoStARs and CoStAR components and are non-limiting. Components include signal peptides (SP), binding domains (BD), linkers, spacers and transmembrane domains (STM), a CD28 transmembrane fragment without extracellular or intracellular sequences (STM-CD28TM), intracellular signal domains (SD) and CD40 domains and motifs. Whereas SEQ ID NOS:42-247 comprise CoStARs with N-terminal signal peptides, it will be understood that the N-terminal signal peptides are removed from a mature CoStAR. Further, is will be understood that a mature CoStAR may lack 1, 2, 3, 4, 5, 6, 7, 8, 9, or 10 or more amino acids at the N-terminal (i.e., counted from the C-terminal end of the signal peptide). Component locations within whole proteins can be confirmed from GenBank and other sources. The constructs and components are illustrative as to precise sizes and extents and components can be from more than one source. Where there is more than one intracellular signaling domain or signaling fragment, the multiple domains can be in any order. It will be understood that whereas certain proteins may comprise N-terminal signal peptides when expressed, those signal peptides are cleaved and may be imprecisely cleaved when the proteins are expressed, and that the resulting proteins from which signal peptides are removed comprise binding domains having variation of up to about five amino acids in the location of the N-terminal amino acid.

TABLE 7
Amino Acid Sequences

| ID | | |
|---|---|---|
| No | Component | Sequence |
| 1 | SP-OSM | MGVLLTQRTL LSLVLALLFP SMSAM |
| 2 | SP-CD8α | MALPVTALLL PLALLLHAAR P |
| 3 | SP-CD2 | MSFPCKFVAS FLLIFNVSSK GAVS |
| 4 | SP-IL2 | MYRMQLLSCI ALSLALVTNS |
| 5 | SP-GM-CSF | MWLQSLLLLG TVACSIS |
| 6 | SP-hIgGk-VIII | MEAPAQLLFL LLLWLPDTTR |
| 7 | SP-PD1 | MGVLLTQRTL LSLVLALLFP SMASM |
| 8 | SP-TIGIT | MQIPQAPWPV VWAVLQLGWR PGW |
| 9 | BD1-MOV | QVQLQQSGAE LVKPGASVKI SCKASGYSFT GYFMNWVKQS HGKSLEWIGR |
| | | IHPYDGDTFY NQNFKDKATL TVDKSSNTAH MELLSLTSED FAVYYCTRYD |
| | | GSRAMDYWGQ GTTVTVSSGG GGSGGGGSGG GGSDIELTQS PASLAVSLGQ |
| | | RAIISCKASQ SVSFAGTSLM HWYHQKPGQQ PKLLIYRASN LEAGVPTRFS |
| | | GSGSKTDFTL NIHPVEEEDA ATYYCQQSRE YPYTFGGGTK LEIK |
| 10 | MFE23 | QVKLQQSGAE LVRSGTSVKL SCTASGFNIK DSYMHWLRQG PEQGLEWIGW |
| | | IDPENGDTEY APKFQGKATF TTDTSSNTAY LQLSSLTSED TAVYYCNEGT |
| | | PTGPYYFDYW GQGTTVTVSS GGGGSGGGGS GGGGSENVLT QSPAIMSASP |
| | | GEKVTITCSA SSSVSYMHWF QQKPGTSPKL WIYSTSNLAS GVPARFSGSG |
| | | SGTSYSLTIS RMEAEDAATY YCQQRSSYPL TFGAGTKLEL KR |
| 11 | MFE23 | QVQLQQSGAE LVRSGTSVKL SCTASGFNIK DSYMHWLRQG PEQGLEWIGW |
| | (K > Q) | IDPENGDTEY APKFQGKATF TTDTSSNTAY LQLSSLTSED TAVYYCNEGT |
| | | PTGPYYFDYW GQGTTVTVSS GGGGSGGGGS GGGGSENVLT QSPAIMSASP |
| | | GEKVTITCSA SSSVSYMHWF QQKPGTSPKL WIYSTSNLAS GVPARFSGSG |
| | | SGTSYSLTIS RMEAEDAATY YCQQRSSYPL TFGAGTKLEL KR |
| 12 | hMFE23 | QVKLEQSGAE VVKPGASVKL SCKASGFNIK DSYMHWLRQG PGQRLEWIGW |
| | | IDPENGDTEY APKFQGKATF TTDTSANTAY LGLSSLRPED TAVYYCNEGT |
| | | PTGPYYFDYW GQGTLVTVSS GGGGSGGGGS GGGGSENVLT QSPSSMSASV |
| | | GDRVNIACSA SSSVSYMHWF QQKPGKSPKL WIYSTSNLAS GVPSRFSGSG |
| | | SGTDYSLTIS SMQPEDAATY YCQQRSSYPL TFGGGTKLEI K |
| 13 | CEA6 | QVQLVQSGAE VKKPGSSVKV SCKASGGTFS NSPINWLRQA PGQGLEWMGS |
| | | IIPSFGTANY AQKFQGRLTI TADESTSTAY MELSSLRSED TAVYYCAGRS |
| | | HNYELYYYYM DVWGQGTMVT VSSGGGGSGG GGSGGGGSDI QMTQSPSTLS |
| | | ASIGDRVTIT CRASEGIYHW LAWYQQKPGK APKLLIYKAS SLASGAPSRF |
| | | SGSGSGTDFT LTISSLQPDD FATYYCQQYS NYPLTFGGGT KLEIKR |
| 14 | BW431/26 | QLQESGPGLV RPSQTLSLTC TVSGFTISSG YSWHWVRQPP GRGLEWIGYI |
| | | QYSGITNYNP SLKSRVTMLV DTSKNQFSLR LSSVTAADTA VYYCAREDYD |
| | | YHWYFDVWGQ GSLVTVSSGG GGSGGGGSGG GGSGVHSDIQ MTQSPSSLSA |
| | | SVGDRVTITC STSSSVSYMH WYQQKPGKAP KLLIYSTSNL ASGVPSRFSG |
| | | SGSGTDFTFT ISSLQPEDIA TYYCHQWSSY PTFGQGTKVE IKR |
| 15 | HuT84.66 | EVQLVESGGG LVQPGGSLRL SCAASGFNIK DTYMHWVRQA PGKGLEWVAR |
| | (M5A) | IDPANGNSKY ADSVKGRFTI SADTSKNTAY LQMNSLRAED TAVYYCAPFG |
| | | YYVSDYAMAY WGQGTLVTVS SGGGGSGGGG SGGGGSDIQL TQSPSSLSAS |
| | | VGDRVTITCR AGESVDIFGV GFLHWYQQKP GKAPKLLIYR ASNLESGVPS |
| | | RFSGSGSRTD FTLTISSLQP EDFATYYCQQ TNEDPYTFGQ GTKVEIK |
| 16 | BD1-PD1 | RPGWFLDSPD RPWNPPTFSP ALLVVTEGDN ATFTCSFSNT SESFVLNWYR |
| | | MSPSNQTDKL AAFPEDRSQP GQDCRFRVTQ LPNGRDFHMS VVRARRNDSG |
| | | TYLCGAISLA PKAQIKESLR AELRVTERRA EVPTAH |
| 17 | BD1-TIGIT | MMTGTIETTG NISAEKGGSI ILQCHLSSTT AQVTQVNWEQ QDQLLAICNA |
| | | DLGWHISPSF KDRVAPGPGL GLTLQSLTVN DTGEYFCIYH TYPDGTYTGR |
| | | IFLEVLESSV AEHGARFQIP |
| 18 | 3XA2Xgsg | AAAGSGGSG |
| 19 | STM-spCD28 | ILVKQSPMLV AYDNAVNLSC KYSYNLFSRE FRASLHKGLD SAVEVCVVYG |
| | | NYSQQLQVYS KTGFNCDGKL GNESVTFYLQ NLYVNQTDIY FCKIEVMYPP |
| | | PYLDNEKSNG TIIHVKGKHL CPSPLFPGPS KPFWVLVVVG GVLACYSLLV |
| | | TVAFIIFWV |
| 20 | STM-spCD8 | FVPVFLPAKP TTTPAPRPPT PAPTIASQPL SLRPEACRPA AGGAVHTRGL |
| | | DFACDIYIWA PLAGTCGVLL LSLVITLYCN HRN |
| 21 | STM-CD28TM | FWVLVVVGGV LACYSLLVTV AFIIFWV |
| 22 | STM-spCD28TM | CPSPLFPGPS KPFWVLVVVG GVLACYSLLV TVAFIIFWV |
| 23 | STM- | IIHVKGKHLC PSPLFPGPSK PFWVLVVVGG VLACYSLLVT VAFIIFWV |
| | CD28IIH (trun) | |
| 24 | STM-spIG4 | ESKYGPPCPS CPAPEFLGGP SVFLFPPKPK DTLMISRTPE VTCVVVDVSQ |
| | | EDPEVQFNWY VDGVEVHNAK TKPREEQFNS TYRVVSVLTV LHQDWLNGKE |
| | | YKCKVSNKGL PSSIEKTISK AKGQPREPQV YTLPPSQEEM TKNQVSLTCL |
| | | VKGFYPSDIA VEWESNGQPE NNYKTTPPVL DSDGSFFLYS RLTVDKSRWQ |
| | | EGNVFSCSVM HEALHNHYTQ KSLSLSLGKM FWVLVVVGGV LACYSLLVTV |
| | | AFIIFWV |
| 25 | Sig-CD28 | RSKRSRLLHS DYMNMTPRRP GPTRKHYQPY APPRDFAAYR S |
| 26 | Sig-CD137 | RFSVVKRGRK KLLYIFKQPF MRPVQTTQEE DGCSCRFPEE EEGGCE |
| 27 | Sig-CD134 | RRDQRLPPDA HKPPGGGSFR TPIQEEQADA HSTLAKI |
| 28 | Sig-CD2 | KRKKQRSRRN DEELETRAHR VATEERGRKP HQIPASTPQN PATSQHPPPP |
| | | PGHRSQAPSH RPPPPGHRVQ HQPQKRPPAP SGTQVHQQKG PPLPRPRVQP |
| | | KPPHGAAENS LSPSSN |
| 29 | Sig GITR | QLGLHIWQLR SQCMWPRETQ LLLEVPPSTE DARSCQFPEE ERGERSAEEK |
| | | GRLGDLWV |
| 30 | Sig-CD29 | KLLMIIHDRR EFAKFEKEKM NAKWDTGENP IYKSAVTTVV NPKYEGK |
| 31 | Sig-CD150 | RRRGKTNHYQ TTVEKKSLTI YAQVQKPGPL QKKLDSFPAQ DPCTTIYVAA |
| | | TEPVPESVQE TNSITVYASV TLPES |
| 32 | CD40 | KKVAKKPTNK APHPKQEPQE INFPDDLPGS NTAAPVQETL HGCQPVTQED |
| | | GKESRISVQE RQ |
| 33 | CD40_tandem | AKKPTNKAPH PKQEPQEINF PDDLPGSNTA APVQETLHGC QPVTQEDGKE |
| | | SRISVQERQK KVAKKPTNKA PHPKQEPQEI NFPDDLPGSN TAAPVQETLH |
| | | GCQPVTQEDG KESRISVQER QKKVA |
| 34 | CD40_P227A | KKVAKKPTNK AAHPKQEPQE INFPDDLPGS NTAAPVQETL HGCQPVTQED |
| | | GKESRISVQE RQ |
| 35 | SH3_motif | KPTNKAPH |
| 36 | TRAF2_motif1 | PKQE |
| 37 | TRAF2_motif2 | PVQE |
| 38 | TRAF2_motif3 | SVQE |
| 39 | TRAF6_motif | QEPQEINFP |
| 40 | PKA_motif1 | KKPTNKA |
| 41 | PKA_motif2 | SRISVQE |
| 42 | OSM_MFE23_ | MGVLLTQRTL LSLVLALLFP SMASMQVKLQ QSGAELVRSG TSVKLSCTAS |
| | spCD28_ | GFNIKDSYMH WLRQGPEQGL EWIGWIDPEN GDTEYAPKFQ GKATFTTDTS |
| | CD28_CD40 | SNTAYLQLSS LTSEDTAVYY CNEGTPTGPY YFDYWGQGTT VTVSSGGGGS |
| | CTP194 | GGGGSGGGGS ENVLTQSPAI MSASPGEKVT ITCSASSSVS YMHWFQQKPG |
| | | TSPKLWIYST SNLASGVPAR FSGSGSGTSY SLTISRMEAE DAATYYCQQR |
| | | SSYPLTFGAG TKLELKRAAA GSGGSGILVK QSPMLVAYDN AVNLSCKYSY |
| | | NLFSREFRAS LHKGLDSAVE VCVVYGNYSQ QLQVYSKTGF NCDGKLGNES |
| | | VTFYLQNLYV NQTDIYFCKI EVMYPPPYLD NEKSNGTIIH VKGKHLCPSP |
| | | LFPGPSKPFW VLVVVGGVLA CYSLLVTVAF IIFWVRSKRS RLLHSDYMNM |
| | | TPRRPGPTRK HYQPYAPPRD FAAYRSKKVA KKPTNKAPHP KQEPQEINFP |
| | | DDLPGSNTAA PVQETLHGCQ PVTQEDGKES RISVQERQ |
| 43 | CD8α_MFE23_ | MALPVTALLL PLALLLHAAR PQVKLQQSGA ELVRSGTSVK LSCTASGFNI |
| | spCD28_ | KDSYMHWLRQ GPEQGLEWIG WIDPENGDTE YAPKFQGKAT FTTDTSSNTA |
| | CD28_CD40 | YLQLSSLTSE DTAVYYCNEG TPTGPYYFDY WGQGTTVTVS SGGGGSGGGG |
| | CTP255 | SGGGGSENVL TQSPAIMSAS PGEKVTITCS ASSSVSYMHW FQQKPGTSPK |
| | | LWIYSTSNLA SGVPARFSGS GSGTSYSLTI SRMEAEDAAT YYCQQRSSYP |
| | | LTFGAGTKLE LKRAAAGSGG SGILVKQSPM LVAYDNAVNL SCKYSYNLFS |
| | | REFRASLHKG LDSAVEVCVV YGNYSQQLQV YSKTGFNCDG KLGNESVTFY |
| | | LQNLYVNQTD IYFCKIEVMY PPPYLDNEKS NGTIIHVKGK HLCPSPLFPG |
| | | PSKPFWVLVV VGGVLACYSL LVTVAFIIFW VRSKRSRLLH SDYMNMTPRR |
| | | PGPTRKHYQP YAPPRDFAAY RSKKVAKKPT NKAPHPKQEP QEINFPDDLP |
| | | GSNTAAPVQE TLHGCQPVTQ EDGKESRISV QERQ |
| 44 | CD2_MFE23_ | MSFPCKFVAS FLLIFNVSSK GAVSQVKLQQ SGAELVRSGT SVKLSCTASG |
| | spCD28_ | FNIKDSYMHW LRQGPEQGLE WIGWIDPENG DTEYAPKFQG KATFTTDTSS |
| | CD28_CD40 | NTAYLQLSSL TSEDTAVYYC NEGTPTGPYY FDYWGQGTTV TVSSGGGGSG |
| | CTP256 | GGGSGGGGSE NVLTQSPAIM SASPGEKVTI TCSASSSVSY MHWFQQKPGT |
| | | SPKLWIYSTS NLASGVPARF SGSGSGTSYS LTISRMEAED AATYYCQQRS |
| | | SYPLTFGAGT KLELKRAAAG SGGSGILVKQ SPMLVAYDNA VNLSCKYSYN |
| | | LFSREFRASL HKGLDSAVEV CVVYGNYSQQ LQVYSKTGFN CDGKLGNESV |
| | | TFYLQNLYVN QTDIYFCKIE VMYPPPYLDN EKSNGTIIHV KGKHLCPSPL |
| | | FPGPSKPFWV LVVVGGVLAC YSLLVTVAFI IFWVRSKRSR LLHSDYMNMT |
| | | PRRPGPTRKH YQPYAPPRDF AAYRSKKVAK KPTNKAPHPK QEPQEINFPD |
| | | DLPGSNTAAP VQETLHGCQP VTQEDGKESR ISVQERQ |
| 45 | IL2_MFE23_ | MYRMQLLSCI ALSLALVTNS QVKLQQSGAE LVRSGTSVKL SCTASGFNIK |
| | spCD28_ | DSYMHWLRQG PEQGLEWIGW IDPENGDTEY APKFQGKATF TTDTSSNTAY |
| | CD28_CD40 | LQLSSLTSED TAVYYCNEGT PTGPYYFDYW GQGTTVTVSS GGGGSGGGGS |
| | CTP257 | GGGGSENVLT QSPAIMSASP GEKVTITCSA SSSVSYMHWF QQKPGTSPKL |
| | | WIYSTSNLAS GVPARFSGSG SGTSYSLTIS RMEAEDAATY YCQQRSSYPL |
| | | TFGAGTKLEL KRAAAGSGGS GILVKQSPML VAYDNAVNLS CKYSYNLFSR |
| | | EFRASLHKGL DSAVEVCVVY GNYSQQLQVY SKTGFNCDGK LGNESVTFYL |
| | | QNLYVNQTDI YFCKIEVMYP PPYLDNEKSN GTIIHVKGKH LCPSPLFPGP |
| | | SKPFWVLVVV GGVLACYSLL VTVAFIIFWV RSKRSRLLHS DYMNMTPRRP |
| | | GPTRKHYQPY APPRDFAAYR SKKVAKKPTN KAPHPKQEPQ EINFPDDLPG |
| | | SNTAAPVQET LHGCQPVTQE DGKESRISVQ ERQ |
| 46 | GM-CSF_MFE23_ | MWLQSLLLLG TVACSISQVK LQQSGAELVR SGTSVKLSCT ASGFNIKDSY |
| | spCD28_ | MHWLRQGPEQ GLEWIGWIDP ENGDTEYAPK FQGKATFTTD TSSNTAYLQL |
| | CD28_CD40 | SSLTSEDTAV YYCNEGTPTG PYYFDYWGQG TTVTVSSGGG GSGGGGSGGG |
| | CTP258 | GSENVLTQSP AIMSASPGEK VTITCSASSS VSYMHWFQQK PGTSPKLWIY |
| | | STSNLASGVP ARFSGSGSGT SYSLTISRME AEDAATYYCQ QRSSYPLTFG |
| | | AGTKLELKRA AAGSGGSGIL VKQSPMLVAY DNAVNLSCKY SYNLFSREFR |
| | | ASLHKGLDSA VEVCVVYGNY SQQLQVYSKT GFNCDGKLGN ESVTFYLQNL |
| | | YVNQTDIYFC KIEVMYPPPY LDNEKSNGTI IHVKGKHLCP SPLFPGPSKP |
| | | FWVLVVVGGV LACYSLLVTV AFIIFWVRSK RSRLLHSDYM NMTPRRPGPT |
| | | RKHYQPYAPP RDFAAYRSKK VAKKPTNKAP HPKQEPQEIN FPDDLPGSNT |
| | | AAPVQETLHG CQPVTQEDGK ESRISVQERQ |
| 47 | hIgGk- | MEAPAQLLFL LLLWLPDTTR QVKLQQSGAE LVRSGTSVKL SCTASGFNIK |
| | VIII_MFE23_ | DSYMHWLRQG PEQGLEWIGW IDPENGDTEY APKFQGKATF TTDTSSNTAY |
| | spCD28_ | LQLSSLTSED TAVYYCNEGT PTGPYYFDYW GQGTTVTVSS GGGGSGGGGS |
| | CD28_CD40 | GGGGSENVLT QSPAIMSASP GEKVTITCSA SSSVSYMHWF QQKPGTSPKL |
| | CTP259 | WIYSTSNLAS GVPARFSGSG SGTSYSLTIS RMEAEDAATY YCQQRSSYPL |
| | | TFGAGTKLEL KRAAAGSGGS GILVKQSPML VAYDNAVNLS CKYSYNLFSR |
| | | EFRASLHKGL DSAVEVCVVY GNYSQQLQVY SKTGFNCDGK LGNESVTFYL |
| | | QNLYVNQTDI YFCKIEVMYP PPYLDNEKSN GTIIHVKGKH LCPSPLFPGP |
| | | SKPFWVLVVV GGVLACYSLL VTVAFIIFWV RSKRSRLLHS DYMNMTPRRP |
| | | GPTRKHYQPY APPRDFAAYR SKKVAKKPTN KAPHPKQEPQ EINFPDDLPG |
| | | SNTAAPVQET LHGCQPVTQE DGKESRISVQ ERQ |
| 48 | OSM_MFE23_ | MGVLLTQRTL LSLVLALLFP SMASMQVKLQ QSGAELVRSG TSVKLSCTAS |
| | spCD8_ | GFNIKDSYMH WLRQGPEQGL EWIGWIDPEN GDTEYAPKFQ GKATFTTDTS |
| | CD28_CD40 | SNTAYLQLSS LTSEDTAVYY CNEGTPTGPY YFDYWGQGTT VTVSSGGGGS |
| | CTP190 | GGGGSGGGGS ENVLTQSPAI MSASPGEKVT ITCSASSSVS YMHWFQQKPG |
| | | TSPKLWIYST SNLASGVPAR FSGSGSGTSY SLTISRMEAE DAATYYCQQR |
| | | SSYPLTFGAG TKLELKRAAA GSGGSGFVPV FLPAKPTTTP APRPPTPAPT |
| | | IASQPLSLRP EACRPAAGGA VHTRGLDFAC DIYIWAPLAG TCGVLLLSLV |
| | | ITLYCNHRNR SKRSRLLHSD YMNMTPRRPG PTRKHYQPYA PPRDFAAYRS |
| | | KKVAKKPTNK APHPKQEPQE INFPDDLPGS NTAAPVQETL HGCQPVTQED |
| | | GKESRISVQE RQ |
| 49 | CD8a_MFE23_ | MALPVTALLL PLALLLHAAR PQVKLQQSGA ELVRSGTSVK LSCTASGFNI |
| | spCD8_ | KDSYMHWLRQ GPEQGLEWIG WIDPENGDTE YAPKFQGKAT FTTDTSSNTA |
| | CD28_CD40 | YLQLSSLTSE DTAVYYCNEG TPTGPYYFDY WGQGTTVTVS SGGGGSGGGG |
| | | SGGGGSENVL TQSPAIMSAS PGEKVTITCS ASSSVSYMHW FQQKPGTSPK |
| | | LWIYSTSNLA SGVPARFSGS GSGTSYSLTI SRMEAEDAAT YYCQQRSSYP |
| | | LTFGAGTKLE LKRAAAGSGG SGFVPVFLPA KPTTTPAPRP PTPAPTIASQ |
| | | PLSLRPEACR PAAGGAVHTR GLDFACDIYI WAPLAGTCGV LLLSLVITLY |
| | | CNHRNRSKRS RLLHSDYMNM TPRRPGPTRK HYQPYAPPRD FAAYRSKKVA |
| | | KKPTNKAPHP KQEPQEINFP DDLPGSNTAA PVQETLHGCQ PVTQEDGKES |
| | | RISVQERQ |
| 50 | CD2_MFE23_ | MSFPCKFVAS FLLIFNVSSK GAVSQVKLQQ SGAELVRSGT SVKLSCTASG |
| | spCD8_ | FNIKDSYMHW LRQGPEQGLE WIGWIDPENG DTEYAPKFQG KATFTTDTSS |
| | CD28_CD40 | NTAYLQLSSL TSEDTAVYYC NEGTPTGPYY FDYWGQGTTV TVSSGGGGSG |
| | | GGGSGGGGSE NVLTQSPAIM SASPGEKVTI TCSASSSVSY MHWFQQKPGT |
| | | SPKLWIYSTS NLASGVPARF SGSGSGTSYS LTISRMEAED AATYYCQQRS |
| | | SYPLTFGAGT KLELKRAAAG SGGSGFVPVF LPAKPTTTPA PRPPTPAPTI |
| | | ASQPLSLRPE ACRPAAGGAV HTRGLDFACD IYIWAPLAGT CGVLLLSLVI |
| | | TLYCNHRNRS KRSRLLHSDY MNMTPRRPGP TRKHYQPYAP PRDFAAYRSK |
| | | KVAKKPTNKA PHPKQEPQEI NFPDDLPGSN TAAPVQETLH GCQPVTQEDG |
| | | KESRISVQER Q |
| 51 | IL2_MFE23_ | MYRMQLLSCI ALSLALVTNS QVKLQQSGAE LVRSGTSVKL SCTASGFNIK |
| | spCD8_ | DSYMHWLRQG PEQGLEWIGW IDPENGDTEY APKFQGKATF TTDTSSNTAY |
| | CD28_CD40 | LQLSSLTSED TAVYYCNEGT PTGPYYFDYW GQGTTVTVSS GGGGSGGGGS |
| | | GGGGSENVLT QSPAIMSASP GEKVTITCSA SSSVSYMHWF QQKPGTSPKL |
| | | WIYSTSNLAS GVPARFSGSG SGTSYSLTIS RMEAEDAATY YCQQRSSYPL |
| | | TFGAGTKLEL KRAAAGSGGS GFVPVFLPAK PTTTPAPRPP TPAPTIASQP |
| | | LSLRPEACRP AAGGAVHTRG LDFACDIYIW APLAGTCGVL LLSLVITLYC |
| | | NHRNRSKRSR LLHSDYMNMT PRRPGPTRKH YQPYAPPRDF AAYRSKKVAK |
| | | KPTNKAPHPK QEPQEINFPD DLPGSNTAAP VQETLHGCQP VTQEDGKESR |
| | | ISVQERQ |
| 52 | GM-CSF_MFE23_ | MWLQSLLLLG TVACSISQVK LQQSGAELVR SGTSVKLSCT ASGFNIKDSY |
| | spCD8_ | MHWLRQGPEQ GLEWIGWIDP ENGDTEYAPK FQGKATFTTD TSSNTAYLQL |
| | CD28_CD40 | SSLTSEDTAV YYCNEGTPTG PYYFDYWGQG TTVTVSSGGG GSGGGGSGGG |
| | | GSENVLTQSP AIMSASPGEK VTITCSASSS VSYMHWFQQK PGTSPKLWIY |
| | | STSNLASGVP ARFSGSGSGT SYSLTISRME AEDAATYYCQ QRSSYPLTFG |
| | | AGTKLELKRA AAGSGGSGFV PVFLPAKPTT TPAPRPPTPA PTIASQPLSL |
| | | RPEACRPAAG GAVHTRGLDF ACDIYIWAPL AGTCGVLLLS LVITLYCNHR |
| | | NRSKRSRLLH SDYMNMTPRR PGPTRKHYQP YAPPRDFAAY RSKKVAKKPT |
| | | NKAPHPKQEP QEINFPDDLP GSNTAAPVQE TLHGCQPVTQ EDGKESRISV |
| | | QERQ |
| 53 | hIgGk- | MEAPAQLLFL LLLWLPDTTR QVKLQQSGAE LVRSGTSVKL SCTASGFNIK |
| | VIII_MFE23_ | DSYMHWLRQG PEQGLEWIGW IDPENGDTEY APKFQGKATF TTDTSSNTAY |
| | spCD8_ | LQLSSLTSED TAVYYCNEGT PTGPYYFDYW GQGTTVTVSS GGGGSGGGGS |
| | CD28_CD40 | GGGGSENVLT QSPAIMSASP GEKVTITCSA SSSVSYMHWF QQKPGTSPKL |
| | | WIYSTSNLAS GVPARFSGSG SGTSYSLTIS RMEAEDAATY YCQQRSSYPL |
| | | TFGAGTKLEL KRAAAGSGGS GFVPVFLPAK PTTTPAPRPP TPAPTIASQP |
| | | LSLRPEACRP AAGGAVHTRG LDFACDIYIW APLAGTCGVL LLSLVITLYC |
| | | NHRNRSKRSR LLHSDYMNMT PRRPGPTRKH YQPYAPPRDF AAYRSKKVAK |
| | | KPTNKAPHPK QEPQEINFPD DLPGSNTAAP VQETLHGCQP VTQEDGKESR |
| | | ISVQERQ |
| 54 | OSM_MFE23_ | MGVLLTQRTL LSLVLALLFP SMASMQVKLQ QSGAELVRSG TSVKLSCTAS |
| | CD28TM_ | GFNIKDSYMH WLRQGPEQGL EWIGWIDPEN GDTEYAPKFQ GKATFTTDTS |
| | CD28_CD40 | SNTAYLQLSS LTSEDTAVYY CNEGTPTGPY YFDYWGQGTT VTVSSGGGGS |
| | | GGGGSGGGGS ENVLTQSPAI MSASPGEKVT ITCSASSSVS YMHWFQQKPG |
| | | TSPKLWIYST SNLASGVPAR FSGSGSGTSY SLTISRMEAE DAATYYCQQR |
| | | SSYPLTFGAG TKLELKRAAA GSGGSGFWVL VVVGGVLACY SLLVTVAFII |
| | | FWVRSKRSRL LHSDYMNMTP RRPGPTRKHY QPYAPPRDFA AYRSKKVAKK |
| | | PTNKAPHPKQ EPQEINFPDD LPGSNTAAPV QETLHGCQPV TQEDGKESRI |
| | | SVQERQ |
| 55 | CD8a_MFE23_ | MALPVTALLL PLALLLHAAR PQVKLQQSGA ELVRSGTSVK LSCTASGFNI |
| | CD28TM_ | KDSYMHWLRQ GPEQGLEWIG WIDPENGDTE YAPKFQGKAT FTTDTSSNTA |
| | CD28_CD40 | YLQLSSLTSE DTAVYYCNEG TPTGPYYFDY WGQGTTVTVS SGGGGSGGGG |
| | | SGGGGSENVL TQSPAIMSAS PGEKVTITCS ASSSVSYMHW FQQKPGTSPK |
| | | LWIYSTSNLA SGVPARFSGS GSGTSYSLTI SRMEAEDAAT YYCQQRSSYP |
| | | LTFGAGTKLE LKRAAAGSGG SGFWVLVVVG GVLACYSLLV TVAFIIFWVR |
| | | SKRSRLLHSD YMNMTPRRPG PTRKHYQPYA PPRDFAAYRS KKVAKKPTNK |
| | | APHPKQEPQE INFPDDLPGS NTAAPVQETL HGCQPVTQED GKESRISVQE |
| | | RQ |
| 56 | CD2_MFE23_ | MSFPCKFVAS FLLIFNVSSK GAVSQVKLQQ SGAELVRSGT SVKLSCTASG |
| | CD28TM_ | FNIKDSYMHW LRQGPEQGLE WIGWIDPENG DTEYAPKFQG KATFTTDTSS |
| | CD28_CD40 | NTAYLQLSSL TSEDTAVYYC NEGTPTGPYY FDYWGQGTTV TVSSGGGGSG |
| | | GGGSGGGGSE NVLTQSPAIM SASPGEKVTI TCSASSSVSY MHWFQQKPGT |
| | | SPKLWIYSTS NLASGVPARF SGSGSGTSYS LTISRMEAED AATYYCQQRS |
| | | SYPLTFGAGT KLELKRAAAG SGGSGFWVLV VVGGVLACYS LLVTVAFIIF |
| | | WVRSKRSRLL HSDYMNMTPR RPGPTRKHYQ PYAPPRDFAA YRSKKVAKKP |
| | | TNKAPHPKQE PQEINFPDDL PGSNTAAPVQ ETLHGCQPVT QEDGKESRIS |
| | | VQERQ |
| 57 | IL2_MFE23_ | MYRMQLLSCI ALSLALVTNS QVKLQQSGAE LVRSGTSVKL SCTASGFNIK |
| | CD28TM_ | DSYMHWLRQG PEQGLEWIGW IDPENGDTEY APKFQGKATF TTDTSSNTAY |
| | CD28_CD40 | LQLSSLTSED TAVYYCNEGT PTGPYYFDYW GQGTTVTVSS GGGGSGGGGS |
| | | GGGGSENVLT QSPAIMSASP GEKVTITCSA SSSVSYMHWF QQKPGTSPKL |
| | | WIYSTSNLAS GVPARFSGSG SGTSYSLTIS RMEAEDAATY YCQQRSSYPL |
| | | TFGAGTKLEL KRAAAGSGGS GFWVLVVVGG VLACYSLLVT VAFIIFWVRS |
| | | KRSRLLHSDY MNMTPRRPGP TRKHYQPYAP PRDFAAYRSK KVAKKPTNKA |
| | | PHPKQEPQEI NFPDDLPGSN TAAPVQETLH GCQPVTQEDG KESRISVQER |
| | | Q |
| 58 | GM-CSF_MFE23_ | MWLQSLLLLG TVACSISQVK LQQSGAELVR SGTSVKLSCT ASGFNIKDSY |
| | CD28TM_ | MHWLRQGPEQ GLEWIGWIDP ENGDTEYAPK FQGKATFTTD TSSNTAYLQL |
| | CD28_CD40 | SSLTSEDTAV YYCNEGTPTG PYYFDYWGQG TTVTVSSGGG GSGGGGSGGG |
| | | GSENVLTQSP AIMSASPGEK VTITCSASSS VSYMHWFQQK PGTSPKLWIY |
| | | STSNLASGVP ARFSGSGSGT SYSLTISRME AEDAATYYCQ QRSSYPLTFG |
| | | AGTKLELKRA AAGSGGSGFW VLVVVGGVLA CYSLLVTVAF IIFWVRSKRS |
| | | [symbol] |
| 59 | hIgGk- | MEAPAQLLFL LLLWLPDTTR QVKLQQSGAE LVRSGTSVKL SCTASGFNIK |
| | VIII_MFE23_ | DSYMHWLRQG PEQGLEWIGW IDPENGDTEY APKFQGKATF TTDTSSNTAY |
| | CD28TM_ | LQLSSLTSED TAVYYCNEGT PTGPYYFDYW GQGTTVTVSS GGGGSGGGGS |
| | CD28_CD40 | GGGGSENVLT QSPAIMSASP GEKVTITCSA SSSVSYMHWF QQKPGTSPKL |
| | | WIYSTSNLAS GVPARFSGSG SGTSYSLTIS RMEAEDAATY YCQQRSSYPL |
| | | TFGAGTKLEL KRAAAGSGGS GFWVLVVVGG VLACYSLLVT VAFIIFWVRS |
| | | KRSRLLHSDY MNMTPRRPGP TRKHYQPYAP PRDFAAYRSK KVAKKPTNKA |
| | | PHPKQEPQEI NFPDDLPGSN TAAPVQETLH GCQPVTQEDG KESRISVQER |
| | | Q |
| 60 | OSM_MFE23 | MGVLLTQRTL LSLVLALLFP SMASMQVQLQ QSGAELVRSG TSVKLSCTAS |
| | (K > Q)_ | GFNIKDSYMH WLRQGPEQGL EWIGWIDPEN GDTEYAPKFQ GKATFTTDTS |
| | spCD28_CD28_ | SNTAYLQLSS LTSEDTAVYY CNEGTPTGPY YFDYWGQGTT VTVSSGGGGS |
| | CD40 | GGGGSGGGGS ENVLTQSPAI MSASPGEKVT ITCSASSSVS YMHWFQQKPG |
| | CTP219 | TSPKLWIYST SNLASGVPAR FSGSGSGTSY SLTISRMEAE DAATYYCQQR |
| | | SSYPLTFGAG TKLELKRAAA GSGGSGILVK QSPMLVAYDN AVNLSCKYSY |
| | | NLFSREFRAS LHKGLDSAVE VCVVYGNYSQ QLQVYSKTGF NCDGKLGNES |
| | | VTFYLQNLYV NQTDIYFCKI EVMYPPPYLD NEKSNGTIIH VKGKHLCPSP |
| | | LFPGPSKPFW VLVVVGGVLA CYSLLVTVAF IIFWVRSKRS RLLHSDYMNM |
| | | TPRRPGPTRK HYQPYAPPRD FAAYRSKKVA KKPTNKAPHP KQEPQEINFP |
| | | DDLPGSNTAA PVQETLHGCQ PVTQEDGKES RISVQERQ |
| 61 | CD8a_MFE23 | MALPVTALLL PLALLLHAAR PQVQLQQSGA ELVRSGTSVK LSCTASGFNI |
| | (K > Q)_ | KDSYMHWLRQ GPEQGLEWIG WIDPENGDTE YAPKFQGKAT FTTDTSSNTA |
| | spCD28_CD28_ | YLQLSSLTSE DTAVYYCNEG TPTGPYYFDY WGQGTTVTVS SGGGGSGGGG |
| | CD40 | SGGGGSENVL TQSPAIMSAS PGEKVTITCS ASSSVSYMHW FQQKPGTSPK |
| | | LWIYSTSNLA SGVPARFSGS GSGTSYSLTI SRMEAEDAAT YYCQQRSSYP |
| | | LTFGAGTKLE LKRAAAGSGG SGILVKQSPM LVAYDNAVNL SCKYSYNLFS |
| | | REFRASLHKG LDSAVEVCVV YGNYSQQLQV YSKTGFNCDG KLGNESVTFY |
| | | LQNLYVNQTD IYFCKIEVMY PPPYLDNEKS NGTIIHVKGK HLCPSPLFPG |
| | | PSKPFWVLVV VGGVLACYSL LVTVAFIIFW VRSKRSRLLH SDYMNMTPRR |
| | | PGPTRKHYQP YAPPRDFAAY RSKKVAKKPT NKAPHPKQEP QEINFPDDLP |
| | | GSNTAAPVQE TLHGCQPVTQ EDGKESRISV QERQ |
| 62 | CD2_MFE23 | MSFPCKFVAS FLLIFNVSSK GAVSQVQLQQ SGAELVRSGT SVKLSCTASG |
| | (K > Q)_ | FNIKDSYMHW LRQGPEQGLE WIGWIDPENG DTEYAPKFQG KATFTTDTSS |
| | spCD28_ | NTAYLQLSSL TSEDTAVYYC NEGTPTGPYY FDYWGQGTTV TVSSGGGGSG |
| | CD28_CD40 | GGGSGGGGSE NVLTQSPAIM SASPGEKVTI TCSASSSVSY MHWFQQKPGT |
| | | SPKLWIYSTS NLASGVPARF SGSGSGTSYS LTISRMEAED AATYYCQQRS |
| | | SYPLTFGAGT KLELKRAAAG SGGSGILVKQ SPMLVAYDNA VNLSCKYSYN |
| | | LFSREFRASL HKGLDSAVEV CVVYGNYSQQ LQVYSKTGFN CDGKLGNESV |
| | | TFYLQNLYVN QTDIYFCKIE VMYPPPYLDN EKSNGTIIHV KGKHLCPSPL |
| | | FPGPSKPFWV LVVVGGVLAC YSLLVTVAFI IFWVRSKRSR LLHSDYMNMT |
| | | PRRPGPTRKH YQPYAPPRDF AAYRSKKVAK KPTNKAPHPK QEPQEINFPD |
| | | DLPGSNTAAP VQETLHGCQP VTQEDGKESR ISVQERQ |
| 63 | IL2_MFE23 | MYRMQLLSCI ALSLALVTNS QVQLQQSGAE LVRSGTSVKL SCTASGFNIK |
| | (K > Q)_ | DSYMHWLRQG PEQGLEWIGW IDPENGDTEY APKFQGKATF TTDTSSNTAY |
| | spCD28_ | LQLSSLTSED TAVYYCNEGT PTGPYYFDYW GQGTTVTVSS GGGGSGGGGS |
| | CD28_CD40 | GGGGSENVLT QSPAIMSASP GEKVTITCSA SSSVSYMHWF QQKPGTSPKL |
| | | WIYSTSNLAS GVPARFSGSG SGTSYSLTIS RMEAEDAATY YCQQRSSYPL |
| | | TFGAGTKLEL KRAAAGSGGS GILVKQSPML VAYDNAVNLS CKYSYNLFSR |
| | | EFRASLHKGL DSAVEVCVVY GNYSQQLQVY SKTGFNCDGK LGNESVTFYL |
| | | QNLYVNQTDI YFCKIEVMYP PPYLDNEKSN GTIIHVKGKH LCPSPLFPGP |
| | | SKPFWVLVVV GGVLACYSLL VTVAFIIFWV RSKRSRLLHS DYMNMTPRRP |
| | | GPTRKHYQPY APPRDFAAYR SKKVAKKPTN KAPHPKQEPQ EINFPDDLPG |
| | | SNTAAPVQET LHGCQPVTQE DGKESRISVQ ERQ |
| 64 | GM-CSF_ | MWLQSLLLLG TVACSISQVQ LQQSGAELVR SGTSVKLSCT ASGFNIKDSY |
| | MFE23(K > Q)_ | MHWLRQGPEQ GLEWIGWIDP ENGDTEYAPK FQGKATFTTD TSSNTAYLQL |
| | spCD28_ | SSLTSEDTAV YYCNEGTPTG PYYFDYWGQG TTVTVSSGGG GSGGGGSGGG |
| | CD28_CD40 | GSENVLTQSP AIMSASPGEK VTITCSASSS VSYMHWFQQK PGTSPKLWIY |
| | | STSNLASGVP ARFSGSGSGT SYSLTISRME AEDAATYYCQ QRSSYPLTFG |
| | | AGTKLELKRA AAGSGGSGIL VKQSPMLVAY DNAVNLSCKY SYNLFSREFR |
| | | ASLHKGLDSA VEVCVVYGNY SQQLQVYSKT GFNCDGKLGN ESVTFYLQNL |
| | | YVNQTDIYFC KIEVMYPPPY LDNEKSNGTI IHVKGKHLCP SPLFPGPSKP |
| | | FWVLVVVGGV LACYSLLVTV AFIIFWVRSK RSRLLHSDYM NMTPRRPGPT |
| | | RKHYQPYAPP RDFAAYRSKK VAKKPTNKAP HPKQEPQEIN FPDDLPGSNT |
| | | AAPVQETLHG CQPVTQEDGK ESRISVQERQ |
| 65 | hIgGk-VIII_ | MEAPAQLLFL LLLWLPDTTR QVQLQQSGAE LVRSGTSVKL SCTASGFNIK |
| | MFE23(K > Q)_ | DSYMHWLRQG PEQGLEWIGW IDPENGDTEY APKFQGKATF TTDTSSNTAY |
| | spCD28_ | LQLSSLTSED TAVYYCNEGT PTGPYYFDYW GQGTTVTVSS GGGGSGGGGS |
| | CD28_CD40 | GGGGSENVLT QSPAIMSASP GEKVTITCSA SSSVSYMHWF QQKPGTSPKL |
| | | WIYSTSNLAS GVPARFSGSG SGTSYSLTIS RMEAEDAATY YCQQRSSYPL |
| | | TFGAGTKLEL KRAAAGSGGS GILVKQSPML VAYDNAVNLS CKYSYNLFSR |
| | | EFRASLHKGL DSAVEVCVVY GNYSQQLQVY SKTGFNCDGK LGNESVTFYL |
| | | QNLYVNQTDI YFCKIEVMYP PPYLDNEKSN GTIIHVKGKH LCPSPLFPGP |
| | | SKPFWVLVVV GGVLACYSLL VTVAFIIFWV RSKRSRLLHS DYMNMTPRRP |
| | | GPTRKHYQPY APPRDFAAYR SKKVAKKPTN KAPHPKQEPQ EINFPDDLPG |
| | | SNTAAPVQET LHGCQPVTQE DGKESRISVQ ERQ |
| 66 | OSM_MFE23 | MGVLLTQRTL LSLVLALLFP SMASMQVOLQ QSGAELVRSG TSVKLSCTAS |
| | (K > Q)_ | GFNIKDSYMH WLRQGPEQGL EWIGWIDPEN GDTEYAPKFQ GKATFTTDTS |
| | spCD8_CD28_ | SNTAYLQLSS LTSEDTAVYY CNEGTPTGPY YFDYWGQGTT VTVSSGGGGS |
| | CD40 | GGGGSGGGGS ENVLTQSPAI MSASPGEKVT ITCSASSSVS YMHWFQQKPG |
| | | TSPKLWIYST SNLASGVPAR FSGSGSGTSY SLTISRMEAE DAATYYCQQR |
| | | SSYPLTFGAG TKLELKRAAA GSGGSGFVPV FLPAKPTTTP APRPPTPAPT |
| | | IASQPLSLRP EACRPAAGGA VHTRGLDFAC DIYIWAPLAG TCGVLLLSLV |
| | | ITLYCNHRNR SKRSRLLHSD YMNMTPRRPG PTRKHYQPYA PPRDFAAYRS |
| | | KKVAKKPTNK APHPKQEPQE INFPDDLPGS NTAAPVQETL HGCQPVTQED |
| | | GKESRISVQE RQ |
| 67 | CD8a_ | MALPVTALLL PLALLLHAAR PQVQLQQSGA ELVRSGTSVK LSCTASGFNI |
| | MFE23(K > Q)_ | KDSYMHWLRQ GPEQGLEWIG WIDPENGDTE YAPKFQGKAT FTTDTSSNTA |
| | spCD8_ | YLQLSSLTSE DTAVYYCNEG TPTGPYYFDY WGQGTTVTVS SGGGGSGGGG |
| | CD28_CD40 | SGGGGSENVL TQSPAIMSAS PGEKVTITCS ASSSVSYMHW FQQKPGTSPK |
| | | LWIYSTSNLA SGVPARFSGS GSGTSYSLTI SRMEAEDAAT YYCQQRSSYP |
| | | LTFGAGTKLE LKRAAAGSGG SGFVPVFLPA KPTTTPAPRP PTPAPTIASQ |
| | | PLSLRPEACR PAAGGAVHTR GLDFACDIYI WAPLAGTCGV LLLSLVITLY |
| | | CNHRNRSKRS RLLHSDYMNM TPRRPGPTRK HYQPYAPPRD FAAYRSKKVA |
| | | KKPTNKAPHP KQEPQEINFP DDLPGSNTAA PVQETLHGCQ PVTQEDGKES |
| | | RISVQERQ |
| 68 | CD2_MFE23 | MSFPCKFVAS FLLIFNVSSK GAVSQVQLQQ SGAELVRSGT SVKLSCTASG |
| | (K > Q)_ | FNIKDSYMHW LRQGPEQGLE WIGWIDPENG DTEYAPKFQG KATFTTDTSS |
| | spCD8_ | NTAYLQLSSL TSEDTAVYYC NEGTPTGPYY FDYWGQGTTV TVSSGGGGSG |
| | CD28_CD40 | GGGSGGGGSE NVLTQSPAIM SASPGEKVTI TCSASSSVSY MHWFQQKPGT |
| | | SPKLWIYSTS NLASGVPARF SGSGSGTSYS LTISRMEAED AATYYCQQRS |
| | | SYPLTFGAGT KLELKRAAAG SGGSGFVPVF LPAKPTTTPA PRPPTPAPTI |
| | | ASQPLSLRPE ACRPAAGGAV HTRGLDFACD IYIWAPLAGT CGVLLLSLVI |
| | | TLYCNHRNRS KRSRLLHSDY MNMTPRRPGP TRKHYQPYAP PRDFAAYRSK |
| | | KVAKKPTNKA PHPKQEPQEI NFPDDLPGSN TAAPVQETLH GCQPVTQEDG |
| | | KESRISVQER Q |
| 69 | IL2_MFE23 | MYRMQLLSCI ALSLALVTNS QVQLQQSGAE LVRSGTSVKL SCTASGFNIK |
| | (K > Q)_ | DSYMHWLRQG PEQGLEWIGW IDPENGDTEY APKFQGKATF TTDTSSNTAY |
| | spCD8_ | LQLSSLTSED TAVYYCNEGT PTGPYYFDYW GQGTTVTVSS GGGGSGGGGS |
| | CD28_CD40 | GGGGSENVLT QSPAIMSASP GEKVTITCSA SSSVSYMHWF QQKPGTSPKL |
| | | WIYSTSNLAS GVPARFSGSG SGTSYSLTIS RMEAEDAATY YCQQRSSYPL |
| | | TFGAGTKLEL KRAAAGSGGS GFVPVFLPAK PTTTPAPRPP TPAPTIASQP |
| | | LSLRPEACRP AAGGAVHTRG LDFACDIYIW APLAGTCGVL LLSLVITLYC |
| | | NHRNRSKRSR LLHSDYMNMT PRRPGPTRKH YQPYAPPRDF AAYRSKKVAK |
| | | KPTNKAPHPK QEPQEINFPD DLPGSNTAAP VQETLHGCQP VTQEDGKESR |
| | | ISVQERQ |
| 70 | GM-CSF_ | MWLQSLLLLG TVACSISQVQ LQQSGAELVR SGTSVKLSCT ASGFNIKDSY |
| | MFE23(K > Q)_ | MHWLRQGPEQ GLEWIGWIDP ENGDTEYAPK FQGKATFTTD TSSNTAYLQL |
| | spCD8_ | SSLTSEDTAV YYCNEGTPTG PYYFDYWGQG TTVTVSSGGG GSGGGGSGGG |
| | CD28_CD40 | GSENVLTQSP AIMSASPGEK VTITCSASSS VSYMHWFQQK PGTSPKLWIY |
| | | STSNLASGVP ARFSGSGSGT SYSLTISRME AEDAATYYCQ QRSSYPLTFG |
| | | AGTKLELKRA AAGSGGSGFV PVFLPAKPTT TPAPRPPTPA PTIASQPLSL |
| | | RPEACRPAAG GAVHTRGLDF ACDIYIWAPL AGTCGVLLLS LVITLYCNHR |
| | | NRSKRSRLLH SDYMNMTPRR PGPTRKHYQP YAPPRDFAAY RSKKVAKKPT |
| | | NKAPHPKQEP QEINFPDDLP GSNTAAPVQE TLHGCQPVTQ EDGKESRISV |
| | | QERQ |
| 71 | hIgGk-VIII_ | MEAPAQLLFL LLLWLPDTTR QVQLQQSGAE LVRSGTSVKL SCTASGFNIK |
| | MFE23(K > Q)_ | DSYMHWLRQG PEQGLEWIGW IDPENGDTEY APKFQGKATF TTDTSSNTAY |
| | spCD8_ | LQLSSLTSED TAVYYCNEGT PTGPYYFDYW GQGTTVTVSS GGGGSGGGGS |
| | CD28_CD40 | GGGGSENVLT QSPAIMSASP GEKVTITCSA SSSVSYMHWF QQKPGTSPKL |
| | | WIYSTSNLAS GVPARFSGSG SGTSYSLTIS RMEAEDAATY YCQQRSSYPL |
| | | TFGAGTKLEL KRAAAGSGGS GFVPVFLPAK PTTTPAPRPP TPAPTIASQP |
| | | LSLRPEACRP AAGGAVHTRG LDFACDIYIW APLAGTCGVL LLSLVITLYC |
| | | NHRNRSKRSR LLHSDYMNMT PRRPGPTRKH YQPYAPPRDF AAYRSKKVAK |
| | | KPTNKAPHPK QEPQEINFPD DLPGSNTAAP VQETLHGCQP VTQEDGKESR |
| | | ISVQERQ |
| 72 | OSM_MFE23 | MGVLLTQRTL LSLVLALLFP SMASMQVQLQ QSGAELVRSG TSVKLSCTAS |
| | (K > Q)_ | GFNIKDSYMH WLRQGPEQGL EWIGWIDPEN GDTEYAPKFQ GKATFTTDTS |
| | CD28TM_ | SNTAYLQLSS LTSEDTAVYY CNEGTPTGPY YFDYWGQGTT VTVSSGGGGS |
| | CD28_CD40 | GGGGSGGGGS ENVLTQSPAI MSASPGEKVT ITCSASSSVS YMHWFQQKPG |
| | | TSPKLWIYST SNLASGVPAR FSGSGSGTSY SLTISRMEAE DAATYYCQQR |
| | | SSYPLTFGAG TKLELKRAAA GSGGSGFWVL VVVGGVLACY SLLVTVAFII |
| | | FWVRSKRSRL LHSDYMNMTP RRPGPTRKHY QPYAPPRDFA AYRSKKVAKK |
| | | PTNKAPHPKQ EPQEINFPDD LPGSNTAAPV QETLHGCQPV TQEDGKESRI |
| | | SVQERQ |
| 73 | CD8a_ | MALPVTALLL PLALLLHAAR PQVQLQQSGA ELVRSGTSVK LSCTASGFNI |
| | MFE23(K > Q)_ | KDSYMHWLRQ GPEQGLEWIG WIDPENGDTE YAPKFQGKAT FTTDTSSNTA |
| | CD28TM_ | YLQLSSLTSE DTAVYYCNEG TPTGPYYFDY WGQGTTVTVS SGGGGSGGGG |
| | CD28_CD40 | SGGGGSENVL TQSPAIMSAS PGEKVTITCS ASSSVSYMHW FQQKPGTSPK |
| | | LWIYSTSNLA SGVPARFSGS GSGTSYSLTI SRMEAEDAAT YYCQQRSSYP |
| | | LTFGAGTKLE LKRAAAGSGG SGFWVLVVVG GVLACYSLLV TVAFIIFWVR |
| | | SKRSRLLHSD YMNMTPRRPG PTRKHYQPYA PPRDFAAYRS KKVAKKPTNK |
| | | APHPKQEPQE INFPDDLPGS NTAAPVQETL HGCQPVTQED GKESRISVQE |
| | | RQ |
| 74 | CD2_MFE23 | MSFPCKFVAS FLLIFNVSSK GAVSQVQLQQ SGAELVRSGT SVKLSCTASG |
| | (K > Q)_ | FNIKDSYMHW LRQGPEQGLE WIGWIDPENG DTEYAPKFQG KATFTTDTSS |
| | CD28TM_ | NTAYLQLSSL TSEDTAVYYC NEGTPTGPYY FDYWGQGTTV TVSSGGGGSG |
| | CD28_CD40 | GGGSGGGGSE NVLTQSPAIM SASPGEKVTI TCSASSSVSY MHWFQQKPGT |
| | | SPKLWIYSTS NLASGVPARF SGSGSGTSYS LTISRMEAED AATYYCQQRS |
| | | SYPLTFGAGT KLELKRAAAG SGGSGFWVLV VVGGVLACYS LLVTVAFIIF |
| | | WVRSKRSRLL HSDYMNMTPR RPGPTRKHYQ PYAPPRDFAA YRSKKVAKKP |
| | | TNKAPHPKQE PQEINFPDDL PGSNTAAPVQ ETLHGCQPVT QEDGKESRIS |
| | | VQERQ |
| 75 | IL2_MFE23 | MYRMQLLSCI ALSLALVTNS QVQLQQSGAE LVRSGTSVKL SCTASGFNIK |
| | (K > Q)_ | DSYMHWLRQG PEQGLEWIGW IDPENGDTEY APKFQGKATF TTDTSSNTAY |
| | CD28TM_ | LQLSSLTSED TAVYYCNEGT PTGPYYFDYW GQGTTVTVSS GGGGSGGGGS |
| | CD28_CD40 | GGGGSENVLT QSPAIMSASP GEKVTITCSA SSSVSYMHWF QQKPGTSPKL |
| | | WIYSTSNLAS GVPARFSGSG SGTSYSLTIS RMEAEDAATY YCQQRSSYPL |
| | | TFGAGTKLEL KRAAAGSGGS GFWVLVVVGG VLACYSLLVT VAFIIFWVRS |
| | | KRSRLLHSDY MNMTPRRPGP TRKHYQPYAP PRDFAAYRSK KVAKKPTNKA |
| | | PHPKQEPQEI NFPDDLPGSN TAAPVQETLH GCQPVTQEDG KESRISVQER |
| | | Q |
| 76 | GM-CSF_ | MWLQSLLLLG TVACSISQVQ LQQSGAELVR SGTSVKLSCT ASGFNIKDSY |
| | MFE23(K > Q)_ | MHWLRQGPEQ GLEWIGWIDP ENGDTEYAPK FQGKATFTTD TSSNTAYLQL |
| | CD28TM_ | SSLTSEDTAV YYCNEGTPTG PYYFDYWGQG TTVTVSSGGG GSGGGGSGGG |
| | CD28_CD40 | GSENVLTQSP AIMSASPGEK VTITCSASSS VSYMHWFQQK PGTSPKLWIY |
| | | STSNLASGVP ARFSGSGSGT SYSLTISRME AEDAATYYCQ QRSSYPLTFG |
| | | AGTKLELKRA AAGSGGSGFW VLVVVGGVLA CYSLLVTVAF IIFWVRSKRS |
| | | RLLHSDYMNM TPRRPGPTRK HYQPYAPPRD FAAYRSKKVA KKPTNKAPHP |
| | | KQEPQEINFP DDLPGSNTAA PVQETLHGCQ PVTQEDGKES RISVQERQ |
| 77 | hIgGk-VIII_ | MEAPAQLLFL LLLWLPDTTR QVQLQQSGAE LVRSGTSVKL SCTASGFNIK |
| | MFE23(K > Q)_ | DSYMHWLRQG PEQGLEWIGW IDPENGDTEY APKFQGKATF TTDTSSNTAY |
| | CD28TM_ | LQLSSLTSED TAVYYCNEGT PTGPYYFDYW GQGTTVTVSS GGGGSGGGGS |
| | CD28_CD40 | GGGGSENVLT QSPAIMSASP GEKVTITCSA SSSVSYMHWF QQKPGTSPKL |
| | | WIYSTSNLAS GVPARFSGSG SGTSYSLTIS RMEAEDAATY YCQQRSSYPL |
| | | TFGAGTKLEL KRAAAGSGGS GFWVLVVVGG VLACYSLLVT VAFIIFWVRS |
| | | KRSRLLHSDY MNMTPRRPGP TRKHYQPYAP PRDFAAYRSK KVAKKPTNKA |
| | | PHPKQEPQEI NFPDDLPGSN TAAPVQETLH GCQPVTQEDG KESRISVQER |
| | | Q |
| 78 | OSM_HuMFE23_ | MGVLLTQRTL LSLVLALLFP SMASMQVKLE QSGAEVVKPG ASVKLSCKAS |
| | spCD28_ | GFNIKDSYMH WLRQGPGQRL EWIGWIDPEN GDTEYAPKFQ GKATFTTDTS |
| | CD28_CD40 | ANTAYLGLSS LRPEDTAVYY CNEGTPTGPY YFDYWGQGTL VTVSSGGGGS |
| | CTP220 | GGGGSGGGGS ENVLTQSPSS MSASVGDRVN IACSASSSVS YMHWFQQKPG |
| | | KSPKLWIYST SNLASGVPSR FSGSGSGTDY SLTISSMQPE DAATYYCQQR |
| | | SSYPLTFGGG TKLEIKAAAG SGGSGILVKQ SPMLVAYDNA VNLSCKYSYN |
| | | LFSREFRASL HKGLDSAVEV CVVYGNYSQQ LQVYSKTGFN CDGKLGNESV |
| | | TFYLQNLYVN QTDIYFCKIE VMYPPPYLDN EKSNGTIIHV KGKHLCPSPL |
| | | FPGPSKPFWV LVVVGGVLAC YSLLVTVAFI IFWVRSKRSR LLHSDYMNMT |
| | | PRRPGPTRKH YQPYAPPRDF AAYRSKKVAK KPTNKAPHPK QEPQEINFPD |
| | | DLPGSNTAAP VQETLHGCQP VTQEDGKESR ISVQERQ |
| 79 | CD8a_HuMFE23_ | MALPVTALLL PLALLLHAAR PQVKLEQSGA EVVKPGASVK LSCKASGFNI |
| | spCD28_ | KDSYMHWLRQ GPGQRLEWIG WIDPENGDTE YAPKFQGKAT FTTDTSANTA |
| | CD28_CD40 | YLGLSSLRPE DTAVYYCNEG TPTGPYYFDY WGQGTLVTVS SGGGGSGGGG |
| | | SGGGGSENVL TQSPSSMSAS VGDRVNIACS ASSSVSYMHW FQQKPGKSPK |
| | | LWIYSTSNLA SGVPSRFSGS GSGTDYSLTI SSMQPEDAAT YYCQQRSSYP |
| | | LTFGGGTKLE IKAAAGSGGS GILVKQSPML VAYDNAVNLS CKYSYNLFSR |
| | | EFRASLHKGL DSAVEVCVVY GNYSQQLQVY SKTGFNCDGK LGNESVTFYL |
| | | QNLYVNQTDI YFCKIEVMYP PPYLDNEKSN GTIIHVKGKH LCPSPLFPGP |
| | | SKPFWVLVVV GGVLACYSLL VTVAFIIFWV RSKRSRLLHS DYMNMTPRRP |
| | | GPTRKHYQPY APPRDFAAYR SKKVAKKPTN KAPHPKQEPQ EINFPDDLPG |
| | | SNTAAPVQET LHGCQPVTQE DGKESRISVQ ERQ |
| 80 | CD2_HuMFE23_ | MSFPCKFVAS FLLIFNVSSK GAVSQVKLEQ SGAEVVKPGA SVKLSCKASG |
| | spCD28_ | FNIKDSYMHW LRQGPGQRLE WIGWIDPENG DTEYAPKFQG KATFTTDTSA |
| | CD28_CD40 | NTAYLGLSSL RPEDTAVYYC NEGTPTGPYY FDYWGQGTLV TVSSGGGGSG |
| | | GGGSGGGGSE NVLTQSPSSM SASVGDRVNI ACSASSSVSY MHWFQQKPGK |
| | | SPKLWIYSTS NLASGVPSRF SGSGSGTDYS LTISSMQPED AATYYCQQRS |
| | | SYPLTFGGGT KLEIKAAAGS GGSGILVKQS PMLVAYDNAV NLSCKYSYNL |
| | | FSREFRASLH KGLDSAVEVC VVYGNYSQQL QVYSKTGFNC DGKLGNESVT |
| | | FYLQNLYVNQ TDIYFCKIEV MYPPPYLDNE KSNGTIIHVK GKHLCPSPLF |
| | | PGPSKPFWVL VVVGGVLACY SLLVTVAFII FWVRSKRSRL LHSDYMNMTP |
| | | RRPGPTRKHY QPYAPPRDFA AYRSKKVAKK PTNKAPHPKQ EPQEINFPDD |
| | | LPGSNTAAPV QETLHGCQPV TQEDGKESRI SVQERQ |
| 81 | IL2_HuMFE23_ | MYRMQLLSCI ALSLALVTNS QVKLEQSGAE VVKPGASVKL SCKASGFNIK |
| | spCD28_ | DSYMHWLRQG PGQRLEWIGW IDPENGDTEY APKFQGKATF TTDTSANTAY |
| | CD28_CD40 | LGLSSLRPED TAVYYCNEGT PTGPYYFDYW GQGTLVTVSS GGGGSGGGGS |
| | | GGGGSENVLT QSPSSMSASV GDRVNIACSA SSSVSYMHWF QQKPGKSPKL |
| | | WIYSTSNLAS GVPSRFSGSG SGTDYSLTIS SMQPEDAATY YCQQRSSYPL |
| | | TFGGGTKLEI KAAAGSGGSG ILVKQSPMLV AYDNAVNLSC KYSYNLFSRE |
| | | FRASLHKGLD SAVEVCVVYG NYSQQLQVYS KTGFNCDGKL GNESVTFYLQ |
| | | NLYVNQTDIY FCKIEVMYPP PYLDNEKSNG TIIHVKGKHL CPSPLFPGPS |
| | | KPFWVLVVVG GVLACYSLLV TVAFIIFWVR SKRSRLLHSD YMNMTPRRPG |
| | | PTRKHYQPYA PPRDFAAYRS KKVAKKPTNK APHPKQEPQE INFPDDLPGS |
| | | NTAAPVQETL HGCQPVTQED GKESRISVQE RQ |
| 82 | GM-CSF_ | MWLQSLLLLG TVACSISQVK LEQSGAEVVK PGASVKLSCK ASGFNIKDSY |
| | HuMFE23_ | MHWLRQGPGQ RLEWIGWIDP ENGDTEYAPK FQGKATFTTD TSANTAYLGL |
| | spCD28_ | SSLRPEDTAV YYCNEGTPTG PYYFDYWGQG TLVTVSSGGG GSGGGGSGGG |
| | CD28_CD40 | GSENVLTQSP SSMSASVGDR VNIACSASSS VSYMHWFQQK PGKSPKLWIY |
| | | STSNLASGVP SRFSGSGSGT DYSLTISSMQ PEDAATYYCQ QRSSYPLTFG |
| | | GGTKLEIKAA AGSGGSGILV KQSPMLVAYD NAVNLSCKYS YNLFSREFRA |
| | | SLHKGLDSAV EVCVVYGNYS QQLQVYSKTG FNCDGKLGNE SVTFYLQNLY |
| | | VNQTDIYFCK IEVMYPPPYL DNEKSNGTII HVKGKHLCPS PLFPGPSKPF |
| | | WVLVVVGGVL ACYSLLVTVA FIIFWVRSKR SRLLHSDYMN MTPRRPGPTR |
| | | KHYQPYAPPR DFAAYRSKKV AKKPTNKAPH PKQEPQEINF PDDLPGSNTA |
| | | APVQETLHGC QPVTQEDGKE SRISVQERQ |
| 83 | hIgGk-VIII_ | MEAPAQLLFL LLLWLPDTTR QVKLEQSGAE VVKPGASVKL SCKASGFNIK |
| | HuMFE23_ | DSYMHWLRQG PGQRLEWIGW IDPENGDTEY APKFQGKATF TTDTSANTAY |
| | spCD28_ | LGLSSLRPED TAVYYCNEGT PTGPYYFDYW GQGTLVTVSS GGGGSGGGGS |
| | CD28_CD40 | GGGGSENVLT QSPSSMSASV GDRVNIACSA SSSVSYMHWF QQKPGKSPKL |
| | | WIYSTSNLAS GVPSRFSGSG SGTDYSLTIS SMQPEDAATY YCQQRSSYPL |
| | | TFGGGTKLEI KAAAGSGGSG ILVKQSPMLV AYDNAVNLSC KYSYNLFSRE |
| | | FRASLHKGLD SAVEVCVVYG NYSQQLQVYS KTGFNCDGKL GNESVTFYLQ |
| | | NLYVNQTDIY FCKIEVMYPP PYLDNEKSNG TIIHVKGKHL CPSPLFPGPS |
| | | KPFWVLVVVG GVLACYSLLV TVAFIIFWVR SKRSRLLHSD YMNMTPRRPG |
| | | PTRKHYQPYA PPRDFAAYRS KKVAKKPTNK APHPKQEPQE INFPDDLPGS |
| | | NTAAPVQETL HGCQPVTQED GKESRISVQE RQ |
| 84 | OSM_HuMFE23_ | MGVLLTQRTL LSLVLALLFP SMASMQVKLE QSGAEVVKPG ASVKLSCKAS |
| | spCD8_ | GFNIKDSYMH WLRQGPGQRL EWIGWIDPEN GDTEYAPKFQ GKATFTTDTS |
| | CD28_CD40 | ANTAYLGLSS LRPEDTAVYY CNEGTPTGPY YFDYWGQGTL VTVSSGGGGS |
| | CTP232 | GGGGSGGGGS ENVLTQSPSS MSASVGDRVN IACSASSSVS YMHWFQQKPG |
| | | KSPKLWIYST SNLASGVPSR FSGSGSGTDY SLTISSMQPE DAATYYCQQR |
| | | SSYPLTFGGG TKLEIKAAAG SGGSGFVPVF LPAKPTTTPA PRPPTPAPTI |
| | | ASQPLSLRPE ACRPAAGGAV HTRGLDFACD IYIWAPLAGT CGVLLLSLVI |
| | | TLYCNHRNRS KRSRLLHSDY MNMTPRRPGP TRKHYQPYAP PRDFAAYRSK |
| | | KVAKKPTNKA PHPKQEPQEI NFPDDLPGSN TAAPVQETLH GCQPVTQEDG |
| | | KESRISVQER Q |
| 85 | CD8a_HuMFE23_ | MALPVTALLL PLALLLHAAR PQVKLEQSGA EVVKPGASVK LSCKASGFNI |
| | spCD8_ | KDSYMHWLRQ GPGQRLEWIG WIDPENGDTE YAPKFQGKAT FTTDTSANTA |
| | CD28_CD40 | YLGLSSLRPE DTAVYYCNEG TPTGPYYFDY WGQGTLVTVS SGGGGSGGGG |
| | | SGGGGSENVL TQSPSSMSAS VGDRVNIACS ASSSVSYMHW FQQKPGKSPK |
| | | LWIYSTSNLA SGVPSRFSGS GSGTDYSLTI SSMQPEDAAT YYCQQRSSYP |
| | | LTFGGGTKLE IKAAAGSGGS GFVPVFLPAK PTTTPAPRPP TPAPTIASQP |
| | | LSLRPEACRP AAGGAVHTRG LDFACDIYIW APLAGTCGVL LLSLVITLYC |
| | | NHRNRSKRSR LLHSDYMNMT PRRPGPTRKH YQPYAPPRDF AAYRSKKVAK |
| | | KPTNKAPHPK QEPQEINFPD DLPGSNTAAP VQETLHGCQP VTQEDGKESR |
| | | ISVQERQ |
| 86 | CD2_HuMFE23_ | MSFPCKFVAS FLLIFNVSSK GAVSQVKLEQ SGAEVVKPGA SVKLSCKASG |
| | spCD8_ | FNIKDSYMHW LRQGPGQRLE WIGWIDPENG DTEYAPKFQG KATFTTDTSA |
| | CD28_CD40 | NTAYLGLSSL RPEDTAVYYC NEGTPTGPYY FDYWGQGTLV TVSSGGGGSG |
| | | GGGSGGGGSE NVLTQSPSSM SASVGDRVNI ACSASSSVSY MHWFQQKPGK |
| | | SPKLWIYSTS NLASGVPSRF SGSGSGTDYS LTISSMQPED AATYYCQQRS |
| | | SYPLTFGGGT KLEIKAAAGS GGSGFVPVFL PAKPTTTPAP RPPTPAPTIA |
| | | SQPLSLRPEA CRPAAGGAVH TRGLDFACDI YIWAPLAGTC GVLLLSLVIT |
| | | LYCNHRNRSK RSRLLHSDYM NMTPRRPGPT RKHYQPYAPP RDFAAYRSKK |
| | | VAKKPTNKAP HPKQEPQEIN FPDDLPGSNT AAPVQETLHG CQPVTQEDGK |
| | | ESRISVQERQ |
| 87 | IL2_HuMFE23_ | MYRMQLLSCI ALSLALVTNS QVKLEQSGAE VVKPGASVKL SCKASGFNIK |
| | spCD8_ | DSYMHWLRQG PGQRLEWIGW IDPENGDTEY APKFQGKATF TTDTSANTAY |
| | CD28_CD40 | LGLSSLRPED TAVYYCNEGT PTGPYYFDYW GQGTLVTVSS GGGGSGGGGS |
| | | GGGGSENVLT QSPSSMSASV GDRVNIACSA SSSVSYMHWF QQKPGKSPKL |
| | | WIYSTSNLAS GVPSRFSGSG SGTDYSLTIS SMQPEDAATY YCQQRSSYPL |
| | | TFGGGTKLEI KAAAGSGGSG FVPVFLPAKP TTTPAPRPPT PAPTIASQPL |
| | | SLRPEACRPA AGGAVHTRGL DFACDIYIWA PLAGTCGVLL LSLVITLYCN |
| | | HRNRSKRSRL LHSDYMNMTP RRPGPTRKHY QPYAPPRDFA AYRSKKVAKK |
| | | PTNKAPHPKQ EPQEINFPDD LPGSNTAAPV QETLHGCQPV TQEDGKESRI |
| | | SVQERQ |
| 88 | GM-CSF_ | MWLQSLLLLG TVACSISQVK LEQSGAEVVK PGASVKLSCK ASGFNIKDSY |
| | HuMFE23_ | MHWLRQGPGQ RLEWIGWIDP ENGDTEYAPK FQGKATFTTD TSANTAYLGL |
| | spCD8_ | SSLRPEDTAV YYCNEGTPTG PYYFDYWGQG TLVTVSSGGG GSGGGGSGGG |
| | CD28_CD40 | GSENVLTQSP SSMSASVGDR VNIACSASSS VSYMHWFQQK PGKSPKLWIY |
| | | STSNLASGVP SRFSGSGSGT DYSLTISSMQ PEDAATYYCQ QRSSYPLTFG |
| | | GGTKLEIKAA AGSGGSGFVP VFLPAKPTTT PAPRPPTPAP TIASQPLSLR |
| | | PEACRPAAGG AVHTRGLDFA CDIYIWAPLA GTCGVLLLSL VITLYCNHRN |
| | | RSKRSRLLHS DYMNMTPRRP GPTRKHYQPY APPRDFAAYR SKKVAKKPTN |
| | | KAPHPKQEPQ EINFPDDLPG SNTAAPVQET LHGCQPVTQE DGKESRISVQ |
| | | ERQ |
| 89 | hIgGk-VIII_ | MEAPAQLLFL LLLWLPDTTR QVKLEQSGAE VVKPGASVKL SCKASGFNIK |
| | HuMFE23_ | DSYMHWLRQG PGQRLEWIGW IDPENGDTEY APKFQGKATF TTDTSANTAY |
| | spCD8_ | LGLSSLRPED TAVYYCNEGT PTGPYYFDYW GQGTLVTVSS GGGGSGGGGS |
| | CD28_CD40 | GGGGSENVLT QSPSSMSASV GDRVNIACSA SSSVSYMHWF QQKPGKSPKL |
| | | WIYSTSNLAS GVPSRFSGSG SGTDYSLTIS SMQPEDAATY YCQQRSSYPL |
| | | TFGGGTKLEI KAAAGSGGSG FVPVFLPAKP TTTPAPRPPT PAPTIASQPL |
| | | SLRPEACRPA AGGAVHTRGL DFACDIYIWA PLAGTCGVLL LSLVITLYCN |
| | | HRNRSKRSRL LHSDYMNMTP RRPGPTRKHY QPYAPPRDFA AYRSKKVAKK |
| | | PTNKAPHPKQ EPQEINFPDD LPGSNTAAPV QETLHGCQPV TQEDGKESRI |
| | | SVQERQ |
| 90 | OSM_HuMFE23_ | MGVLLTQRTL LSLVLALLFP SMASMQVKLE QSGAEVVKPG ASVKLSCKAS |
| | CD28TM_ | GFNIKDSYMH WLRQGPGQRL EWIGWIDPEN GDTEYAPKFQ GKATFTTDTS |
| | CD28_CD40 | ANTAYLGLSS LRPEDTAVYY CNEGTPTGPY YFDYWGQGTL VTVSSGGGGS |
| | | GGGGSGGGGS ENVLTQSPSS MSASVGDRVN IACSASSSVS YMHWFQQKPG |
| | | KSPKLWIYST SNLASGVPSR FSGSGSGTDY SLTISSMQPE DAATYYCQQR |
| | | SSYPLTFGGG TKLEIKAAAG SGGSGFWVLV VVGGVLACYS LLVTVAFIIF |
| | | WVRSKRSRLL HSDYMNMTPR RPGPTRKHYQ PYAPPRDFAA YRSKKVAKKP |
| | | TNKAPHPKQE PQEINFPDDL PGSNTAAPVQ ETLHGCQPVT QEDGKESRIS |
| | | VQERQ |
| 91 | CD8a_HuMFE23_ | MALPVTALLL PLALLLHAAR PQVKLEQSGA EVVKPGASVK LSCKASGFNI |
| | CD28TM_ | KDSYMHWLRQ GPGQRLEWIG WIDPENGDTE YAPKFQGKAT FTTDTSANTA |
| | CD28_CD40 | YLGLSSLRPE DTAVYYCNEG TPTGPYYFDY WGQGTLVTVS SGGGGSGGGG |
| | | SGGGGSENVL TQSPSSMSAS VGDRVNIACS ASSSVSYMHW FQQKPGKSPK |
| | | LWIYSTSNLA SGVPSRFSGS GSGTDYSLTI SSMQPEDAAT YYCQQRSSYP |
| | | LTFGGGTKLE IKAAAGSGGS GFWVLVVVGG VLACYSLLVT VAFIIFWVRS |
| | | KRSRLLHSDY MNMTPRRPGP TRKHYQPYAP PRDFAAYRSK KVAKKPTNKA |
| | | PHPKQEPQEI NFPDDLPGSN TAAPVQETLH GCQPVTQEDG KESRISVQER |
| | | Q |
| 92 | CD2_HuMFE23_ | MSFPCKFVAS FLLIFNVSSK GAVSQVKLEQ SGAEVVKPGA SVKLSCKASG |
| | CD28TM_ | FNIKDSYMHW LRQGPGQRLE WIGWIDPENG DTEYAPKFQG KATFTTDTSA |
| | CD28_CD40 | NTAYLGLSSL RPEDTAVYYC NEGTPTGPYY FDYWGQGTLV TVSSGGGGSG |
| | | GGGSGGGGSE NVLTQSPSSM SASVGDRVNI ACSASSSVSY MHWFQQKPGK |
| | | SPKLWIYSTS NLASGVPSRF SGSGSGTDYS LTISSMQPED AATYYCQQRS |
| | | SYPLTFGGGT KLEIKAAAGS GGSGFWVLVV VGGVLACYSL LVTVAFIIFW |
| | | VRSKRSRLLH SDYMNMTPRR PGPTRKHYQP YAPPRDFAAY RSKKVAKKPT |
| | | NKAPHPKQEP QEINFPDDLP GSNTAAPVQE TLHGCQPVTQ EDGKESRISV |
| | | QERQ |
| 93 | IL2_HuMFE23_ | MYRMQLLSCI ALSLALVTNS QVKLEQSGAE VVKPGASVKL SCKASGFNIK |
| | CD28TM_ | DSYMHWLRQG PGQRLEWIGW IDPENGDTEY APKFQGKATF TTDTSANTAY |
| | CD28_CD40 | LGLSSLRPED TAVYYCNEGT PTGPYYFDYW GQGTLVTVSS GGGGSGGGGS |
| | | GGGGSENVLT QSPSSMSASV GDRVNIACSA SSSVSYMHWF QQKPGKSPKL |
| | | WIYSTSNLAS GVPSRFSGSG SGTDYSLTIS SMQPEDAATY YCQQRSSYPL |
| | | TFGGGTKLEI KAAAGSGGSG FWVLVVVGGV LACYSLLVTV AFIIFWVRSK |
| | | RSRLLHSDYM NMTPRRPGPT RKHYQPYAPP RDFAAYRSKK VAKKPTNKAP |
| | | HPKQEPQEIN FPDDLPGSNT AAPVQETLHG CQPVTQEDGK ESRISVQERQ |
| 94 | GM-CSF_ | MWLQSLLLLG TVACSISQVK LEQSGAEVVK PGASVKLSCK ASGFNIKDSY |
| | HuMFE23_ | MHWLRQGPGQ RLEWIGWIDP ENGDTEYAPK FQGKATFTTD TSANTAYLGL |
| | CD28TM_ | SSLRPEDTAV YYCNEGTPTG PYYFDYWGQG TLVTVSSGGG GSGGGGSGGG |
| | CD28_CD40 | GSENVLTQSP SSMSASVGDR VNIACSASSS VSYMHWFQQK PGKSPKLWIY |
| | | STSNLASGVP SRFSGSGSGT DYSLTISSMQ PEDAATYYCQ QRSSYPLTFG |
| | | GGTKLEIKAA AGSGGSGFWV LVVVGGVLAC YSLLVTVAFI IFWVRSKRSR |
| | | LLHSDYMNMT PRRPGPTRKH YQPYAPPRDF AAYRSKKVAK KPTNKAPHPK |
| | | QEPQEINFPD DLPGSNTAAP VQETLHGCQP VTQEDGKESR ISVQERQ |
| 95 | hIgGk-VIII_ | MEAPAQLLFL LLLWLPDTTR QVKLEQSGAE VVKPGASVKL SCKASGFNIK |
| | HuMFE23_ | DSYMHWLRQG PGQRLEWIGW IDPENGDTEY APKFQGKATF TTDTSANTAY |
| | CD28TM_ | LGLSSLRPED TAVYYCNEGT PTGPYYFDYW GQGTLVTVSS GGGGSGGGGS |
| | CD28_CD40 | GGGGSENVLT QSPSSMSASV GDRVNIACSA SSSVSYMHWF QQKPGKSPKL |
| | | WIYSTSNLAS GVPSRFSGSG SGTDYSLTIS SMQPEDAATY YCQQRSSYPL |
| | | TFGGGTKLEI KAAAGSGGSG FWVLVVVGGV LACYSLLVTV AFIIFWVRSK |
| | | RSRLLHSDYM NMTPRRPGPT RKHYQPYAPP RDFAAYRSKK VAKKPTNKAP |
| | | HPKQEPQEIN FPDDLPGSNT AAPVQETLHG CQPVTQEDGK ESRISVQERQ |
| 96 | OSM_CEA6_ | MGVLLTQRTL LSLVLALLFP SMASMQVQLV QSGAEVKKPG SSVKVSCKAS |
| | spCD28_ | GGTFSNSPIN WLRQAPGQGL EWMGSIIPSF GTANYAQKFQ GRLTITADES |
| | CD28_CD40 | TSTAYMELSS LRSEDTAVYY CAGRSHNYEL YYYYMDVWGQ GTMVTVSSGG |
| | CTP221 | GGSGGGGSGG GGSDIQMTQS PSTLSASIGD RVTITCRASE GIYHWLAWYQ |
| | | QKPGKAPKLL IYKASSLASG APSRFSGSGS GTDFTLTISS LQPDDFATYY |
| | | CQQYSNYPLT FGGGTKLEIK RAAAGSGGSG ILVKQSPMLV AYDNAVNLSC |
| | | KYSYNLFSRE FRASLHKGLD SAVEVCVVYG NYSQQLQVYS KTGFNCDGKL |
| | | GNESVTFYLQ NLYVNQTDIY FCKIEVMYPP PYLDNEKSNG TIIHVKGKHL |
| | | CPSPLFPGPS KPFWVLVVVG GVLACYSLLV TVAFIIFWVR SKRSRLLHSD |
| | | YMNMTPRRPG PTRKHYQPYA PPRDFAAYRS KKVAKKPTNK APHPKQEPQE |
| | | INFPDDLPGS NTAAPVQETL HGCQPVTQED GKESRISVQE RQ |
| 97 | CD8a_CEA6_ | MALPVTALLL PLALLLHAAR PQVQLVQSGA EVKKPGSSVK VSCKASGGTF |
| | spCD28_ | SNSPINWLRQ APGQGLEWMG SIIPSFGTAN YAQKFQGRLT ITADESTSTA |
| | CD28_CD40 | YMELSSLRSE DTAVYYCAGR SHNYELYYYY MDVWGQGTMV TVSSGGGGSG |
| | | GGGSGGGGSD IQMTQSPSTL SASIGDRVTI TGRASEGIYH WLAWYQQKPG |
| | | KAPKLLIYKA SSLASGAPSR FSGSGSGTDF TLTISSLQPD DFATYYCQQY |
| | | SNYPLTFGGG TKLEIKRAAA GSGGSGILVK QSPMLVAYDN AVNLSCKYSY |
| | | NLFSREFRAS LHKGLDSAVE VCVVYGNYSQ QLQVYSKTGF NCDGKLGNES |
| | | VTFYLQNLYV NQTDIYFCKI EVMYPPPYLD NEKSNGTIIH VKGKHLCPSP |
| | | LFPGPSKPFW VLVVVGGVLA CYSLLVTVAF IIFWVRSKRS RLLHSDYMNM |
| | | TPRRPGPTRK HYQPYAPPRD FAAYRSKKVA KKPTNKAPHP KQEPQEINFP |
| | | DDLPGSNTAA PVQETLHGCQ PVTQEDGKES RISVQERQ |
| 98 | CD2_CEA6_ | MSFPCKFVAS FLLIFNVSSK GAVSQVQLVQ SGAEVKKPGS SVKVSCKASG |
| | spCD28_ | GTFSNSPINW LRQAPGQGLE WMGSIIPSFG TANYAQKFQG RLTITADEST |
| | CD28_CD40 | STAYMELSSL RSEDTAVYYC AGRSHNYELY YYYMDVWGQG TMVTVSSGGG |
| | | GSGGGGSGGG GSDIQMTQSP STLSASIGDR VTITCRASEG IYHWLAWYQQ |
| | | KPGKAPKLLI YKASSLASGA PSRFSGSGSG TDFTLTISSL QPDDFATYYC |
| | | QQYSNYPLTF GGGTKLEIKR AAAGSGGSGI LVKQSPMLVA YDNAVNLSCK |
| | | YSYNLFSREF RASLHKGLDS AVEVCVVYGN YSQQLQVYSK TGFNCDGKLG |
| | | NESVTFYLQN LYVNQTDIYF CKIEVMYPPP YLDNEKSNGT IIHVKGKHLC |
| | | PSPLFPGPSK PFWVLVVVGG VLACYSLLVT VAFIIFWVRS KRSRLLHSDY |
| | | MNMTPRRPGP TRKHYQPYAP PRDFAAYRSK KVAKKPTNKA PHPKQEPQEI |
| | | NFPDDLPGSN TAAPVQETLH GCQPVTQEDG KESRISVQER Q |
| 99 | IL2_CEA6_ | MYRMQLLSCI ALSLALVTNS QVQLVQSGAE VKKPGSSVKV SCKASGGTFS |
| | spCD28_ | NSPINWLRQA PGQGLEWMGS IIPSFGTANY AQKFQGRLTI TADESTSTAY |
| | CD28_CD40 | MELSSLRSED TAVYYCAGRS HNYELYYYYM DVWGQGTMVT VSSGGGGSGG |
| | | GGSGGGGSDI QMTQSPSTLS ASIGDRVTIT CRASEGIYHW LAWYQQKPGK |
| | | APKLLIYKAS SLASGAPSRF SGSGSGTDFT LTISSLQPDD FATYYCQQYS |
| | | NYPLTFGGGT KLEIKRAAAG SGGSGILVKQ SPMLVAYDNA VNLSCKYSYN |
| | | LFSREFRASL HKGLDSAVEV CVVYGNYSQQ LQVYSKTGFN CDGKLGNESV |
| | | TFYLQNLYVN QTDIYFCKIE VMYPPPYLDN EKSNGTIIHV KGKHLCPSPL |
| | | FPGPSKPFWV LVVVGGVLAC YSLLVTVAFI IFWVRSKRSR LLHSDYMNMT |
| | | PRRPGPTRKH YQPYAPPRDF AAYRSKKVAK KPTNKAPHPK QEPQEINFPD |
| | | DLPGSNTAAP VQETLHGCQP VTQEDGKESR ISVQERQ |
| 100 | GM-CSF_CEA6_ | MWLQSLLLLG TVACSISQVQ LVQSGAEVKK PGSSVKVSCK ASGGTFSNSP |
| | spCD28_ | INWLRQAPGQ GLEWMGSIIP SFGTANYAQK FQGRLTITAD ESTSTAYMEL |
| | CD28_CD40 | SSLRSEDTAV YYCAGRSHNY ELYYYYMDVW GQGTMVTVSS GGGGSGGGGS |
| | | GGGGSDIQMT QSPSTLSASI GDRVTITCRA SEGIYHWLAW YQQKPGKAPK |
| | | LLIYKASSLA SGAPSRFSGS GSGTDFTLTI SSLQPDDFAT YYCQQYSNYP |
| | | LTFGGGTKLE IKRAAAGSGG SGILVKQSPM LVAYDNAVNL SCKYSYNLFS |
| | | REFRASLHKG LDSAVEVCVV YGNYSQQLQV YSKTGFNCDG KLGNESVTFY |
| | | LQNLYVNQTD IYFCKIEVMY PPPYLDNEKS NGTIIHVKGK HLCPSPLFPG |
| | | PSKPFWVLVV VGGVLACYSL LVTVAFIIFW VRSKRSRLLH SDYMNMTPRR |
| | | PGPTRKHYQP YAPPRDFAAY RSKKVAKKPT NKAPHPKQEP QEINFPDDLP |
| | | GSNTAAPVQE TLHGCQPVTQ EDGKESRISV QERQ |
| 101 | hIgGk-VIII_ | MEAPAQLLFL LLLWLPDTTR QVQLVQSGAE VKKPGSSVKV SCKASGGTFS |
| | CEA6_spCD28_ | NSPINWLRQA PGQGLEWMGS IIPSFGTANY AQKFQGRLTI TADESTSTAY |
| | CD28_CD40 | MELSSLRSED TAVYYCAGRS HNYELYYYYM DVWGQGTMVT VSSGGGGSGG |
| | | GGSGGGGSDI QMTQSPSTLS ASIGDRVTIT CRASEGIYHW LAWYQQKPGK |
| | | APKLLIYKAS SLASGAPSRF SGSGSGTDFT LTISSLQPDD FATYYCQQYS |
| | | NYPLTFGGGT KLEIKRAAAG SGGSGILVKQ SPMLVAYDNA VNLSCKYSYN |
| | | LFSREFRASL HKGLDSAVEV CVVYGNYSQQ LQVYSKTGFN CDGKLGNESV |
| | | TFYLQNLYVN QTDIYFCKIE VMYPPPYLDN EKSNGTIIHV KGKHLCPSPL |
| | | FPGPSKPFWV LVVVGGVLAC YSLLVTVAFI IFWVRSKRSR LLHSDYMNMT |
| | | PRRPGPTRKH YQPYAPPRDF AAYRSKKVAK KPTNKAPHPK QEPQEINFPD |
| | | DLPGSNTAAP VQETLHGCQP VTQEDGKESR ISVQERQ |
| 102 | OSM_CEA6_ | MGVLLTQRTL LSLVLALLFP SMASMQVQLV QSGAEVKKPG SSVKVSCKAS |
| | spCD8_ | GGTFSNSPIN WLRQAPGQGL EWMGSIIPSF GTANYAQKFQ GRLTITADES |
| | CD28_CD40 | TSTAYMELSS LRSEDTAVYY CAGRSHNYEL YYYYMDVWGQ GTMVTVSSGG |
| | | GGSGGGGSGG GGSDIQMTQS PSTLSASIGD RVTITCRASE GIYHWLAWYQ |
| | | QKPGKAPKLL IYKASSLASG APSRFSGSGS GTDFTLTISS LQPDDFATYY |
| | | CQQYSNYPLT FGGGTKLEIK RAAAGSGGSG FVPVFLPAKP TTTPAPRPPT |
| | | PAPTIASQPL SLRPEACRPA AGGAVHTRGL DFACDIYIWA PLAGTCGVLL |
| | | LSLVITLYCN HRNRSKRSRL LHSDYMNMTP RRPGPTRKHY QPYAPPRDFA |
| | | AYRSKKVAKK PTNKAPHPKQ EPQEINFPDD LPGSNTAAPV QETLHGCQPV |
| | | TQEDGKESRI SVQERQ |
| 103 | CD8a_CEA6_ | MALPVTALLL PLALLLHAAR PQVQLVQSGA EVKKPGSSVK VSCKASGGTF |
| | spCD8_ | SNSPINWLRQ APGQGLEWMG SIIPSFGTAN YAQKFQGRLT ITADESTSTA |
| | CD28_CD40 | YMELSSLRSE DTAVYYCAGR SHNYELYYYY MDVWGQGTMV TVSSGGGGSG |
| | | GGGSGGGGSD IQMTQSPSTL SASIGDRVTI TGRASEGIYH WLAWYQQKPG |
| | | KAPKLLIYKA SSLASGAPSR FSGSGSGTDF TLTISSLQPD DFATYYCQQY |
| | | SNYPLTFGGG TKLEIKRAAA GSGGSGFVPV FLPAKPTTTP APRPPTPAPT |
| | | IASQPLSLRP EACRPAAGGA VHTRGLDFAC DIYIWAPLAG TCGVLLLSLV |
| | | ITLYCNHRNR SKRSRLLHSD YMNMTPRRPG PTRKHYQPYA PPRDFAAYRS |
| | | KKVAKKPTNK APHPKQEPQE INFPDDLPGS NTAAPVQETL HGCQPVTQED |
| | | GKESRISVQE RQ |
| 104 | CD2_CEA6_ | MSFPCKFVAS FLLIFNVSSK GAVSQVQLVQ SGAEVKKPGS SVKVSCKASG |
| | spCD8_ | GTFSNSPINW LRQAPGQGLE WMGSIIPSFG TANYAQKFQG RLTITADEST |
| | CD28_CD40 | STAYMELSSL RSEDTAVYYC AGRSHNYELY YYYMDVWGQG TMVTVSSGGG |
| | | GSGGGGSGGG GSDIQMTQSP STLSASIGDR VTITCRASEG IYHWLAWYQQ |
| | | KPGKAPKLLI YKASSLASGA PSRFSGSGSG TDFTLTISSL QPDDFATYYC |
| | | QQYSNYPLTF GGGTKLEIKR AAAGSGGSGF VPVFLPAKPT TTPAPRPPTP |
| | | APTIASQPLS LRPEACRPAA GGAVHTRGLD FACDIYIWAP LAGTCGVLLL |
| | | SLVITLYCNH RNRSKRSRLL HSDYMNMTPR RPGPTRKHYQ PYAPPRDFAA |
| | | YRSKKVAKKP TNKAPHPKQE PQEINFPDDL PGSNTAAPVQ ETLHGCQPVT |
| | | QEDGKESRIS VQERQ |
| 105 | IL2_CEA6_ | MYRMQLLSCI ALSLALVTNS QVQLVQSGAE VKKPGSSVKV SCKASGGTFS |
| | spCD8_ | NSPINWLRQA PGQGLEWMGS IIPSFGTANY AQKFQGRLTI TADESTSTAY |
| | CD28_CD40 | MELSSLRSED TAVYYCAGRS HNYELYYYYM DVWGQGTMVT VSSGGGGSGG |
| | | GGSGGGGSDI QMTQSPSTLS ASIGDRVTIT CRASEGIYHW LAWYQQKPGK |
| | | APKLLIYKAS SLASGAPSRF SGSGSGTDFT LTISSLQPDD FATYYCQQYS |
| | | NYPLTFGGGT KLEIKRAAAG SGGSGFVPVF LPAKPTTTPA PRPPTPAPTI |
| | | ASQPLSLRPE ACRPAAGGAV HTRGLDFACD IYIWAPLAGT CGVLLLSLVI |
| | | TLYCNHRNRS KRSRLLHSDY MNMTPRRPGP TRKHYQPYAP PRDFAAYRSK |
| | | KVAKKPTNKA PHPKQEPQEI NFPDDLPGSN TAAPVQETLH GCQPVTQEDG |
| | | KESRISVQER Q |
| 106 | GM-CSFCEA_ | MWLQSLLLLG TVACSISQVQ LVQSGAEVKK PGSSVKVSCK ASGGTFSNSP |
| | spCD8_ | INWLRQAPGQ GLEWMGSIIP SFGTANYAQK FQGRLTITAD ESTSTAYMEL |
| | CD28_CD40 | SSLRSEDTAV YYCAGRSHNY ELYYYYMDVW GQGTMVTVSS GGGGSGGGGS |
| | | GGGGSDIQMT QSPSTLSASI GDRVTITCRA SEGIYHWLAW YQQKPGKAPK |
| | | LLIYKASSLA SGAPSRFSGS GSGTDFTLTI SSLQPDDFAT YYCQQYSNYP |
| | | LTFGGGTKLE IKRAAAGSGG SGFVPVFLPA KPTTTPAPRP PTPAPTIASQ |
| | | PLSLRPEACR PAAGGAVHTR GLDFACDIYI WAPLAGTCGV LLLSLVITLY |
| | | CNHRNRSKRS RLLHSDYMNM TPRRPGPTRK HYQPYAPPRD FAAYRSKKVA |
| | | KKPTNKAPHP KQEPQEINFP DDLPGSNTAA PVQETLHGCQ PVTQEDGKES |
| | | RISVQERQ |
| 107 | hIgGk-VIII_ | MEAPAQLLFL LLLWLPDTTR QVQLVQSGAE VKKPGSSVKV SCKASGGTFS |
| | CEA6_ | NSPINWLRQA PGQGLEWMGS IIPSFGTANY AQKFQGRLTI TADESTSTAY |
| | spCD8_ | MELSSLRSED TAVYYCAGRS HNYELYYYYM DVWGQGTMVT VSSGGGGSGG |
| | CD28_CD40 | GGSGGGGSDI QMTQSPSTLS ASIGDRVTIT CRASEGIYHW LAWYQQKPGK |
| | | APKLLIYKAS SLASGAPSRF SGSGSGTDFT LTISSLQPDD FATYYCQQYS |
| | | NYPLTFGGGT KLEIKRAAAG SGGSGFVPVF LPAKPTTTPA PRPPTPAPTI |
| | | ASQPLSLRPE ACRPAAGGAV HTRGLDFACD IYIWAPLAGT CGVLLLSLVI |
| | | TLYCNHRNRS KRSRLLHSDY MNMTPRRPGP TRKHYQPYAP PRDFAAYRSK |
| | | KVAKKPTNKA PHPKQEPQEI NFPDDLPGSN TAAPVQETLH GCQPVTQEDG |
| | | KESRISVQER Q |
| 108 | OSM_CEA6_ | MGVLLTQRTL LSLVLALLFP SMASMQVQLV QSGAEVKKPG SSVKVSCKAS |
| | CD28TM_ | GGTFSNSPIN WLRQAPGQGL EWMGSIIPSF GTANYAQKFQ GRLTITADES |
| | CD28_CD40 | TSTAYMELSS LRSEDTAVYY CAGRSHNYEL YYYYMDVWGQ GTMVTVSSGG |
| | | GGSGGGGSGG GGSDIQMTQS PSTLSASIGD RVTITCRASE GIYHWLAWYQ |
| | | QKPGKAPKLL IYKASSLASG APSRFSGSGS GTDFTLTISS LQPDDFATYY |
| | | CQQYSNYPLT FGGGTKLEIK RAAAGSGGSG FWVLVVVGGV LACYSLLVTV |
| | | AFIIFWVRSK RSRLLHSDYM NMTPRRPGPT RKHYQPYAPP RDFAAYRSKK |
| | | VAKKPTNKAP HPKQEPQEIN FPDDLPGSNT AAPVQETLHG CQPVTQEDGK |
| | | ESRISVQERQ |
| 109 | CD8a_CEA6_ | MALPVTALLL PLALLLHAAR PQVQLVQSGA EVKKPGSSVK VSCKASGGTF |
| | CD28TM_ | SNSPINWLRQ APGQGLEWMG SIIPSFGTAN YAQKFQGRLT ITADESTSTA |
| | CD28_CD40 | YMELSSLRSE DTAVYYCAGR SHNYELYYYY MDVWGQGTMV TVSSGGGGSG |
| | | GGGSGGGGSD IQMTQSPSTL SASIGDRVTI TCRASEGIYH WLAWYQQKPG |
| | | KAPKLLIYKA SSLASGAPSR FSGSGSGTDF TLTISSLQPD DFATYYCQQY |
| | | SNYPLTFGGG TKLEIKRAAA GSGGSGFWVL VVVGGVLACY SLLVTVAFII |
| | | FWVRSKRSRL LHSDYMNMTP RRPGPTRKHY QPYAPPRDFA AYRSKKVAKK |
| | | PTNKAPHPKQ EPQEINFPDD LPGSNTAAPV QETLHGCQPV TQEDGKESRI |
| | | SVQERQ |
| 110 | CD2_CEA6_ | MSFPCKFVAS FLLIFNVSSK GAVSQVQLVQ SGAEVKKPGS SVKVSCKASG |
| | CD28TM_ | GTFSNSPINW LRQAPGQGLE WMGSIIPSFG TANYAQKFQG RLTITADEST |
| | CD28_CD40 | STAYMELSSL RSEDTAVYYC AGRSHNYELY YYYMDVWGQG TMVTVSSGGG |
| | | GSGGGGSGGG GSDIQMTQSP STLSASIGDR VTITCRASEG IYHWLAWYQQ |
| | | KPGKAPKLLI YKASSLASGA PSRFSGSGSG TDFTLTISSL QPDDFATYYC |
| | | QQYSNYPLTF GGGTKLEIKR AAAGSGGSGF WVLVVVGGVL ACYSLLVTVA |
| | | FIIFWVRSKR SRLLHSDYMN MTPRRPGPTR KHYQPYAPPR DFAAYRSKKV |
| | | AKKPTNKAPH PKQEPQEINF PDDLPGSNTA APVQETLHGC QPVTQEDGKE |
| | | SRISVQERQ |
| 111 | IL2_CEA6_ | MYRMQLLSCI ALSLALVTNS QVQLVQSGAE VKKPGSSVKV SCKASGGTFS |
| | CD28TM_ | NSPINWLRQA PGQGLEWMGS IIPSFGTANY AQKFQGRLTI TADESTSTAY |
| | CD28_CD40 | MELSSLRSED TAVYYCAGRS HNYELYYYYM DVWGQGTMVT VSSGGGGSGG |
| | | GGSGGGGSDI QMTQSPSTLS ASIGDRVTIT CRASEGIYHW LAWYQQKPGK |
| | | APKLLIYKAS SLASGAPSRF SGSGSGTDFT LTISSLQPDD FATYYCQQYS |
| | | NYPLTFGGGT KLEIKRAAAG SGGSGFWVLV VVGGVLACYS LLVTVAFIIF |
| | | WVRSKRSRLL HSDYMNMTPR RPGPTRKHYQ PYAPPRDFAA YRSKKVAKKP |
| | | TNKAPHPKQE PQEINFPDDL PGSNTAAPVQ ETLHGCQPVT QEDGKESRIS |
| | | VQERQ |
| 112 | GM-CSF_CEA6_ | MWLQSLLLLG TVACSISQVQ LVQSGAEVKK PGSSVKVSCK ASGGTFSNSP |
| | CD28TM_ | INWLRQAPGQ GLEWMGSIIP SFGTANYAQK FQGRLTITAD ESTSTAYMEL |
| | CD28_CD40 | SSLRSEDTAV YYCAGRSHNY ELYYYYMDVW GQGTMVTVSS GGGGSGGGGS |
| | | GGGGSDIQMT QSPSTLSASI GDRVTITCRA SEGIYHWLAW YQQKPGKAPK |
| | | LLIYKASSLA SGAPSRFSGS GSGTDFTLTI SSLQPDDFAT YYCQQYSNYP |
| | | LTFGGGTKLE IKRAAAGSGG SGFWVLVVVG GVLACYSLLV TVAFIIFWVR |
| | | SKRSRLLHSD YMNMTPRRPG PTRKHYQPYA PPRDFAAYRS KKVAKKPTNK |
| | | APHPKQEPQE INFPDDLPGS NTAAPVQETL HGCQPVTQED GKESRISVQE |
| | | RQ |
| 113 | hIgGk-VIII_ | MEAPAQLLFL LLLWLPDTTR QVQLVQSGAE VKKPGSSVKV SCKASGGTFS |
| | CEA6_ | NSPINWLRQA PGQGLEWMGS IIPSFGTANY AQKFQGRLTI TADESTSTAY |
| | CD28TM_ | MELSSLRSED TAVYYCAGRS HNYELYYYYM DVWGQGTMVT VSSGGGGSGG |
| | CD28_CD40 | GGSGGGGSDI QMTQSPSTLS ASIGDRVTIT CRASEGIYHW LAWYQQKPGK |
| | | APKLLIYKAS SLASGAPSRF SGSGSGTDFT LTISSLQPDD FATYYCQQYS |
| | | NYPLTFGGGT KLEIKRAAAG SGGSGFWVLV VVGGVLACYS LLVTVAFIIF |
| | | WVRSKRSRLL HSDYMNMTPR RPGPTRKHYQ PYAPPRDFAA YRSKKVAKKP |
| | | TNKAPHPKQE PQEINFPDDL PGSNTAAPVQ ETLHGCQPVT QEDGKESRIS |
| | | VQERQ |
| 114 | OSM_BW431/26_ | MGVLLTQRTL LSLVLALLFP SMASMQLQES GPGLVRPSQT LSLTCTVSGF |
| | spCD28_ | TISSGYSWHW VRQPPGRGLE WIGYIQYSGI TNYNPSLKSR VTMLVDTSKN |
| | CD28_CD40 | QFSLRLSSVT AADTAVYYCA REDYDYHWYF DVWGQGSLVT VSSGGGGSGG |
| | CTP222 | GGSGGGGSGV HSDIQMTQSP SSLSASVGDR VTITCSTSSS VSYMHWYQQK |
| | | PGKAPKLLIY STSNLASGVP SRFSGSGSGT DFTFTISSLQ PEDIATYYCH |
| | | QWSSYPTFGQ GTKVEIKRAA AGSGGSGILV KQSPMLVAYD NAVNLSCKYS |
| | | YNLFSREFRA SLHKGLDSAV EVCVVYGNYS QQLQVYSKTG FNCDGKLGNE |
| | | SVTFYLQNLY VNQTDIYFCK IEVMYPPPYL DNEKSNGTII HVKGKHLCPS |
| | | PLFPGPSKPF WVLVVVGGVL ACYSLLVTVA FIIFWVRSKR SRLLHSDYMN |
| | | MTPRRPGPTR KHYQPYAPPR DFAAYRSKKV AKKPTNKAPH PKQEPQEINF |
| | | PDDLPGSNTA APVQETLHGC QPVTQEDGKE SRISVQERQ |
| 115 | CD8a_BW431/26_ | MALPVTALLL PLALLLHAAR PQLQESGPGL VRPSQTLSLT CTVSGFTISS |
| | spCD28_ | GYSWHWVRQP PGRGLEWIGY IQYSGITNYN PSLKSRVTML VDTSKNQFSL |
| | CD28_CD40 | RLSSVTAADT AVYYCAREDY DYHWYFDVWG QGSLVTVSSG GGGSGGGGSG |
| | | GGGSGVHSDI QMTQSPSSLS ASVGDRVTIT CSTSSSVSYM HWYQQKPGKA |
| | | PKLLIYSTSN LASGVPSRFS GSGSGTDFTF TISSLQPEDI ATYYCHQWSS |
| | | YPTFGQGTKV EIKRAAAGSG GSGILVKQSP MLVAYDNAVN LSCKYSYNLF |
| | | SREFRASLHK GLDSAVEVCV VYGNYSQQLQ VYSKTGFNCD GKLGNESVTF |
| | | YLQNLYVNQT DIYFCKIEVM YPPPYLDNEK SNGTIIHVKG KHLCPSPLFP |
| | | GPSKPFWVLV VVGGVLACYS LLVTVAFIIF WVRSKRSRLL HSDYMNMTPR |
| | | RPGPTRKHYQ PYAPPRDFAA YRSKKVAKKP TNKAPHPKQE PQEINFPDDL |
| | | PGSNTAAPVQ ETLHGCQPVT QEDGKESRIS VQERQ |
| 116 | CD2_BW431/26_ | MSFPCKFVAS FLLIFNVSSK GAVSQLQESG PGLVRPSQTL SLTCTVSGFT |
| | spCD28_ | ISSGYSWHWV RQPPGRGLEW IGYIQYSGIT NYNPSLKSRV TMLVDTSKNQ |
| | CD28_CD40 | FSLRLSSVTA ADTAVYYCAR EDYDYHWYFD VWGQGSLVTV SSGGGGSGGG |
| | | GSGGGGSGVH SDIQMTQSPS SLSASVGDRV TITCSTSSSV SYMHWYQQKP |
| | | GKAPKLLIYS TSNLASGVPS RFSGSGSGTD FTFTISSLQP EDIATYYCHQ |
| | | WSSYPTFGQG TKVEIKRAAA GSGGSGILVK QSPMLVAYDN AVNLSCKYSY |
| | | NLFSREFRAS LHKGLDSAVE VCVVYGNYSQ QLQVYSKTGF NCDGKLGNES |
| | | VTFYLQNLYV NQTDIYFCKI EVMYPPPYLD NEKSNGTIIH VKGKHLCPSP |
| | | LFPGPSKPFW VLVVVGGVLA CYSLLVTVAF IIFWVRSKRS RLLHSDYMNM |
| | | TPRRPGPTRK HYQPYAPPRD FAAYRSKKVA KKPTNKAPHP KQEPQEINFP |
| | | DDLPGSNTAA PVQETLHGCQ PVTQEDGKES RISVQERQ |
| 117 | IL2_BW431/26_ | MYRMQLLSCI ALSLALVTNS QLQESGPGLV RPSQTLSLTC TVSGFTISSG |
| | spCD28_ | YSWHWVRQPP GRGLEWIGYI QYSGITNYNP SLKSRVTMLV DTSKNQFSLR |
| | CD28_CD40 | LSSVTAADTA VYYCAREDYD YHWYFDVWGQ GSLVTVSSGG GGSGGGGSGG |
| | | GGSGVHSDIQ MTQSPSSLSA SVGDRVTITC STSSSVSYMH WYQQKPGKAP |
| | | KLLIYSTSNL ASGVPSRFSG SGSGTDFTFT ISSLQPEDIA TYYCHQWSSY |
| | | PTFGQGTKVE IKRAAAGSGG SGILVKQSPM LVAYDNAVNL SCKYSYNLFS |
| | | REFRASLHKG LDSAVEVCVV YGNYSQQLQV YSKTGFNCDG KLGNESVTFY |
| | | LQNLYVNQTD IYFCKIEVMY PPPYLDNEKS NGTIIHVKGK HLCPSPLFPG |
| | | PSKPFWVLVV VGGVLACYSL LVTVAFIIFW VRSKRSRLLH SDYMNMTPRR |
| | | PGPTRKHYQP YAPPRDFAAY RSKKVAKKPT NKAPHPKQEP QEINFPDDLP |
| | | GSNTAAPVQE TLHGCQPVTQ EDGKESRISV QERQ |
| 118 | GM-CSF_ | MWLQSLLLLG TVACSISQLQ ESGPGLVRPS QTLSLTCTVS GFTISSGYSW |
| | BW431/26_ | HWVRQPPGRG LEWIGYIQYS GITNYNPSLK SRVTMLVDTS KNQFSLRLSS |
| | spCD28_ | VTAADTAVYY CAREDYDYHW YFDVWGQGSL VTVSSGGGGS GGGGSGGGGS |
| | CD28_CD40 | GVHSDIQMTQ SPSSLSASVG DRVTITCSTS SSVSYMHWYQ QKPGKAPKLL |
| | | IYSTSNLASG VPSRFSGSGS GTDFTFTISS LQPEDIATYY CHQWSSYPTF |
| | | GQGTKVEIKR AAAGSGGSGI LVKQSPMLVA YDNAVNLSCK YSYNLFSREF |
| | | RASLHKGLDS AVEVCVVYGN YSQQLQVYSK TGFNCDGKLG NESVTFYLQN |
| | | LYVNQTDIYF CKIEVMYPPP YLDNEKSNGT IIHVKGKHLC PSPLFPGPSK |
| | | PFWVLVVVGG VLACYSLLVT VAFIIFWVRS KRSRLLHSDY MNMTPRRPGP |
| | | TRKHYQPYAP PRDFAAYRSK KVAKKPTNKA PHPKQEPQEI NFPDDLPGSN |
| | | TAAPVQETLH GCQPVTQEDG KESRISVQER Q |
| 119 | hIgGk-VIII_ | MEAPAQLLFL LLLWLPDTTR QLQESGPGLV RPSQTLSLTC TVSGFTISSG |
| | BW431/26_ | YSWHWVRQPP GRGLEWIGYI QYSGITNYNP SLKSRVTMLV DTSKNQFSLR |
| | spCD28_ | LSSVTAADTA VYYCAREDYD YHWYFDVWGQ GSLVTVSSGG GGSGGGGSGG |
| | CD28_CD40 | GGSGVHSDIQ MTQSPSSLSA SVGDRVTITC STSSSVSYMH WYQQKPGKAP |
| | | KLLIYSTSNL ASGVPSRFSG SGSGTDFTFT ISSLQPEDIA TYYCHQWSSY |
| | | PTFGQGTKVE IKRAAAGSGG SGILVKQSPM LVAYDNAVNL SCKYSYNLFS |
| | | REFRASLHKG LDSAVEVCVV YGNYSQQLQV YSKTGFNCDG KLGNESVTFY |
| | | LQNLYVNQTD IYFCKIEVMY PPPYLDNEKS NGTIIHVKGK HLCPSPLFPG |
| | | PSKPFWVLVV VGGVLACYSL LVTVAFIIFW VRSKRSRLLH SDYMNMTPRR |
| | | PGPTRKHYQP YAPPRDFAAY RSKKVAKKPT NKAPHPKQEP QEINFPDDLP |
| | | GSNTAAPVQE TLHGCQPVTQ EDGKESRISV QERQ |
| 120 | OSM_BW431/26_ | MGVLLTQRTL LSLVLALLFP SMASMQLQES GPGLVRPSQT LSLTCTVSGF |
| | spCD8_ | TISSGYSWHW VRQPPGRGLE WIGYIQYSGI TNYNPSLKSR VTMLVDTSKN |
| | CD28_CD40 | QFSLRLSSVT AADTAVYYCA REDYDYHWYF DVWGQGSLVT VSSGGGGSGG |
| | | GGSGGGGSGV HSDIQMTQSP SSLSASVGDR VTITCSTSSS VSYMHWYQQK |
| | | PGKAPKLLIY STSNLASGVP SRFSGSGSGT DFTFTISSLQ PEDIATYYCH |
| | | QWSSYPTFGQ GTKVEIKRAA AGSGGSGFVP VFLPAKPTTT PAPRPPTPAP |
| | | TIASQPLSLR PEACRPAAGG AVHTRGLDFA CDIYIWAPLA GTCGVLLLSL |
| | | VITLYCNHRN RSKRSRLLHS DYMNMTPRRP GPTRKHYQPY APPRDFAAYR |
| | | SKKVAKKPTN KAPHPKQEPQ EINFPDDLPG SNTAAPVQET LHGCQPVTQE |
| | | DGKESRISVQ ERQ |
| 121 | CD8a_BW431/26_ | MALPVTALLL PLALLLHAAR PQLQESGPGL VRPSQTLSLT CTVSGFTISS |
| | spCD8_ | GYSWHWVRQP PGRGLEWIGY IQYSGITNYN PSLKSRVTML VDTSKNQFSL |
| | CD28_CD40 | RLSSVTAADT AVYYCAREDY DYHWYFDVWG QGSLVTVSSG GGGSGGGGSG |
| | | GGGSGVHSDI QMTQSPSSLS ASVGDRVTIT CSTSSSVSYM HWYQQKPGKA |
| | | PKLLIYSTSN LASGVPSRFS GSGSGTDFTF TISSLQPEDI ATYYCHQWSS |
| | | YPTFGQGTKV EIKRAAAGSG GSGFVPVFLP AKPTTTPAPR PPTPAPTIAS |
| | | QPLSLRPEAC RPAAGGAVHT RGLDFACDIY IWAPLAGTCG VLLLSLVITL |
| | | YCNHRNRSKR SRLLHSDYMN MTPRRPGPTR KHYQPYAPPR DFAAYRSKKV |
| | | AKKPTNKAPH PKQEPQEINF PDDLPGSNTA APVQETLHGC QPVTQEDGKE |
| | | SRISVQERQ |
| 122 | CD2_BW431/26_ | MSFPCKFVAS FLLIFNVSSK GAVSQLQESG PGLVRPSQTL SLTCTVSGFT |
| | spCD8_ | ISSGYSWHWV RQPPGRGLEW IGYIQYSGIT NYNPSLKSRV TMLVDTSKNQ |
| | CD28_CD40 | FSLRLSSVTA ADTAVYYCAR EDYDYHWYFD VWGQGSLVTV SSGGGGSGGG |
| | | GSGGGGSGVH SDIQMTQSPS SLSASVGDRV TITCSTSSSV SYMHWYQQKP |
| | | GKAPKLLIYS TSNLASGVPS RFSGSGSGTD FTFTISSLQP EDIATYYCHQ |
| | | WSSYPTFGQG TKVEIKRAAA GSGGSGFVPV FLPAKPTTTP APRPPTPAPT |
| | | IASQPLSLRP EACRPAAGGA VHTRGLDFAC DIYIWAPLAG TCGVLLLSLV |
| | | ITLYCNHRNR SKRSRLLHSD YMNMTPRRPG PTRKHYQPYA PPRDFAAYRS |
| | | KKVAKKPTNK APHPKQEPQE INFPDDLPGS NTAAPVQETL HGCQPVTQED |
| | | GKESRISVQE RQ |
| 123 | IL2_BW431/26_ | MYRMQLLSCI ALSLALVTNS QLQESGPGLV RPSQTLSLTC TVSGFTISSG |
| | spCD8_ | YSWHWVRQPP GRGLEWIGYI QYSGITNYNP SLKSRVTMLV DTSKNQFSLR |
| | CD28_CD40 | LSSVTAADTA VYYCAREDYD YHWYFDVWGQ GSLVTVSSGG GGSGGGGSGG |
| | | GGSGVHSDIQ MTQSPSSLSA SVGDRVTITC STSSSVSYMH WYQQKPGKAP |
| | | KLLIYSTSNL ASGVPSRFSG SGSGTDFTFT ISSLQPEDIA TYYCHQWSSY |
| | | PTFGQGTKVE IKRAAAGSGG SGFVPVFLPA KPTTTPAPRP PTPAPTIASQ |
| | | PLSLRPEACR PAAGGAVHTR GLDFACDIYI WAPLAGTCGV LLLSLVITLY |
| | | CNHRNRSKRS RLLHSDYMNM TPRRPGPTRK HYQPYAPPRD FAAYRSKKVA |
| | | KKPTNKAPHP KQEPQEINFP DDLPGSNTAA PVQETLHGCQ PVTQEDGKES |
| | | RISVQERQ |
| 124 | GM-CSF_ | MWLQSLLLLG TVACSISQLQ ESGPGLVRPS QTLSLTCTVS GFTISSGYSW |
| | BW431/26_spCD8_ | HWVRQPPGRG LEWIGYIQYS GITNYNPSLK SRVTMLVDTS KNQFSLRLSS |
| | CD28_CD40 | VTAADTAVYY CAREDYDYHW YFDVWGQGSL VTVSSGGGGS GGGGSGGGGS |
| | | GVHSDIQMTQ SPSSLSASVG DRVTITCSTS SSVSYMHWYQ QKPGKAPKLL |
| | | IYSTSNLASG VPSRFSGSGS GTDFTFTISS LQPEDIATYY CHQWSSYPTF |
| | | GQGTKVEIKR AAAGSGGSGF VPVFLPAKPT TTPAPRPPTP APTIASQPLS |
| | | LRPEACRPAA GGAVHTRGLD FACDIYIWAP LAGTCGVLLL SLVITLYCNH |
| | | RNRSKRSRLL HSDYMNMTPR RPGPTRKHYQ PYAPPRDFAA YRSKKVAKKP |
| | | TNKAPHPKQE PQEINFPDDL PGSNTAAPVQ ETLHGCQPVT QEDGKESRIS |
| | | VQERQ |
| 125 | hIgGk- | MEAPAQLLFL LLLWLPDTTR QLQESGPGLV RPSQTLSLTC TVSGFTISSG |
| | VIII_BW431/26_ | YSWHWVRQPP GRGLEWIGYI QYSGITNYNP SLKSRVTMLV DTSKNQFSLR |
| | spCD8_ | LSSVTAADTA VYYCAREDYD YHWYFDVWGQ GSLVTVSSGG GGSGGGGSGG |
| | CD28_CD40 | GGSGVHSDIQ MTQSPSSLSA SVGDRVTITC STSSSVSYMH WYQQKPGKAP |
| | | KLLIYSTSNL ASGVPSRFSG SGSGTDFTFT ISSLQPEDIA TYYCHQWSSY |
| | | PTFGQGTKVE IKRAAAGSGG SGFVPVFLPA KPTTTPAPRP PTPAPTIASQ |
| | | PLSLRPEACR PAAGGAVHTR GLDFACDIYI WAPLAGTCGV LLLSLVITLY |
| | | CNHRNRSKRS RLLHSDYMNM TPRRPGPTRK HYQPYAPPRD FAAYRSKKVA |
| | | KKPTNKAPHP KQEPQEINFP DDLPGSNTAA PVQETLHGCQ PVTQEDGKES |
| | | RISVQERQ |
| 126 | OSM_BW431/26_ | MGVLLTQRTL LSLVLALLFP SMASMQLQES GPGLVRPSQT LSLTCTVSGF |
| | CD28TM_ | TISSGYSWHW VRQPPGRGLE WIGYIQYSGI TNYNPSLKSR VTMLVDTSKN |
| | CD28_CD40 | QFSLRLSSVT AADTAVYYCA REDYDYHWYF DVWGQGSLVT VSSGGGGSGG |
| | | GGSGGGGSGV HSDIQMTQSP SSLSASVGDR VTITCSTSSS VSYMHWYQQK |
| | | PGKAPKLLIY STSNLASGVP SRFSGSGSGT DFTFTISSLQ PEDIATYYCH |
| | | QWSSYPTFGQ GTKVEIKRAA AGSGGSGFWV LVVVGGVLAC YSLLVTVAFI |
| | | IFWVRSKRSR LLHSDYMNMT PRRPGPTRKH YQPYAPPRDF AAYRSKKVAK |
| | | KPTNKAPHPK QEPQEINFPD DLPGSNTAAP VQETLHGCQP VTQEDGKESR |
| | | ISVQERQ |
| 127 | CD8a_BW431/26_ | MALPVTALLL PLALLLHAAR PQLQESGPGL VRPSQTLSLT CTVSGFTISS |
| | CD28TM_ | GYSWHWVRQP PGRGLEWIGY IQYSGITNYN PSLKSRVTML VDTSKNQFSL |
| | CD28_CD40 | RLSSVTAADT AVYYCAREDY DYHWYFDVWG QGSLVTVSSG GGGSGGGGSG |
| | | GGGSGVHSDI QMTQSPSSLS ASVGDRVTIT CSTSSSVSYM HWYQQKPGKA |
| | | PKLLIYSTSN LASGVPSRFS GSGSGTDFTF TISSLQPEDI ATYYCHQWSS |
| | | YPTFGQGTKV EIKRAAAGSG GSGFWVLVVV GGVLACYSLL VTVAFIIFWV |
| | | RSKRSRLLHS DYMNMTPRRP GPTRKHYQPY APPRDFAAYR SKKVAKKPTN |
| | | KAPHPKQEPQ EINFPDDLPG SNTAAPVQET LHGCQPVTQE DGKESRISVQ |
| | | ERQ |
| 128 | CD2_BW431/26_ | MSFPCKFVAS FLLIFNVSSK GAVSQLQESG PGLVRPSQTL SLTCTVSGFT |
| | CD28TM_ | ISSGYSWHWV RQPPGRGLEW IGYIQYSGIT NYNPSLKSRV TMLVDTSKNQ |
| | CD28_CD40 | FSLRLSSVTA ADTAVYYCAR EDYDYHWYFD VWGQGSLVTV SSGGGGSGGG |
| | | GSGGGGSGVH SDIQMTQSPS SLSASVGDRV TITCSTSSSV SYMHWYQQKP |
| | | GKAPKLLIYS TSNLASGVPS RFSGSGSGTD FTFTISSLQP EDIATYYCHQ |
| | | WSSYPTFGQG TKVEIKRAAA GSGGSGFWVL VVVGGVLACY SLLVTVAFII |
| | | FWVRSKRSRL LHSDYMNMTP RRPGPTRKHY QPYAPPRDFA AYRSKKVAKK |
| | | PTNKAPHPKQ EPQEINFPDD LPGSNTAAPV QETLHGCQPV TQEDGKESRI |
| | | SVQERQ |
| 129 | IL2_BW431/26_ | MYRMQLLSCI ALSLALVTNS QLQESGPGLV RPSQTLSLTC TVSGFTISSG |
| | CD28TM_ | YSWHWVRQPP GRGLEWIGYI QYSGITNYNP SLKSRVTMLV DTSKNQFSLR |
| | CD28_CD40 | LSSVTAADTA VYYCAREDYD YHWYFDVWGQ GSLVTVSSGG GGSGGGGSGG |
| | | GGSGVHSDIQ MTQSPSSLSA SVGDRVTITC STSSSVSYMH WYQQKPGKAP |
| | | KLLIYSTSNL ASGVPSRFSG SGSGTDFTFT ISSLQPEDIA TYYCHQWSSY |
| | | PTFGQGTKVE IKRAAAGSGG SGFWVLVVVG GVLACYSLLV TVAFIIFWVR |
| | | SKRSRLLHSD YMNMTPRRPG PTRKHYQPYA PPRDFAAYRS KKVAKKPTNK |
| | | APHPKQEPQE INFPDDLPGS NTAAPVQETL HGCQPVTQED GKESRISVQE |
| | | RQ |
| 130 | GM-CSF_ | MWLQSLLLLG TVACSISQLQ ESGPGLVRPS QTLSLTCTVS GFTISSGYSW |
| | BW431/26_ | HWVRQPPGRG LEWIGYIQYS GITNYNPSLK SRVTMLVDTS KNQFSLRLSS |
| | CD28TM_ | VTAADTAVYY CAREDYDYHW YFDVWGQGSL VTVSSGGGGS GGGGSGGGGS |
| | CD28_CD40 | GVHSDIQMTQ SPSSLSASVG DRVTITCSTS SSVSYMHWYQ QKPGKAPKLL |
| | | IYSTSNLASG VPSRFSGSGS GTDFTFTISS LQPEDIATYY CHQWSSYPTF |
| | | GQGTKVEIKR AAAGSGGSGF WVLVVVGGVL ACYSLLVTVA FIIFWVRSKR |
| | | SRLLHSDYMN MTPRRPGPTR KHYQPYAPPR DFAAYRSKKV AKKPTNKAPH |
| | | PKQEPQEINF PDDLPGSNTA APVQETLHGC QPVTQEDGKE SRISVQERQ |
| 131 | hIgGk-VIII_ | MEAPAQLLFL LLLWLPDTTR QLQESGPGLV RPSQTLSLTC TVSGFTISSG |
| | BW431/26_ | YSWHWVRQPP GRGLEWIGYI QYSGITNYNP SLKSRVTMLV DTSKNQFSLR |
| | CD28TM_ | LSSVTAADTA VYYCAREDYD YHWYFDVWGQ GSLVTVSSGG GGSGGGGSGG |
| | CD28_CD40 | GGSGVHSDIQ MTQSPSSLSA SVGDRVTITC STSSSVSYMH WYQQKPGKAP |
| | | KLLIYSTSNL ASGVPSRFSG SGSGTDFTFT ISSLQPEDIA TYYCHQWSSY |
| | | PTFGQGTKVE IKRAAAGSGG SGFWVLVVVG GVLACYSLLV TVAFIIFWVR |
| | | SKRSRLLHSD YMNMTPRRPG PTRKHYQPYA PPRDFAAYRS KKVAKKPTNK |
| | | APHPKQEPQE INFPDDLPGS NTAAPVQETL HGCQPVTQED GKESRISVQE |
| | | RQ |
| 132 | OSM_HuT84.66_ | MGVLLTQRTL LSLVLALLFP SMASMEVQLV ESGGGLVQPG GSLRLSCAAS |
| | spCD28_ | GFNIKDTYMH WVRQAPGKGL EWVARIDPAN GNSKYADSVK GRFTISADTS |
| | CD28_CD40 | KNTAYLQMNS LRAEDTAVYY CAPFGYYVSD YAMAYWGQGT LVTVSSGGGG |
| | CTP223 | SGGGGSGGGG SDIQLTQSPS SLSASVGDRV TITCRAGESV DIFGVGFLHW |
| | | YQQKPGKAPK LLIYRASNLE SGVPSRFSGS GSRTDFTLTI SSLQPEDFAT |
| | | YYCQQTNEDP YTFGQGTKVE IKAAAGSGGS GILVKQSPML VAYDNAVNLS |
| | | CKYSYNLFSR EFRASLHKGL DSAVEVCVVY GNYSQQLQVY SKTGFNCDGK |
| | | LGNESVTFYL QNLYVNQTDI YFCKIEVMYP PPYLDNEKSN GTIIHVKGKH |
| | | LCPSPLFPGP SKPFWVLVVV GGVLACYSLL VTVAFIIFWV RSKRSRLLHS |
| | | DYMNMTPRRP GPTRKHYQPY APPRDFAAYR SKKVAKKPTN KAPHPKQEPQ |
| | | EINFPDDLPG SNTAAPVQET LHGCQPVTQE DGKESRISVQ ERQ |
| 133 | CD8a_HuT84.66_ | MALPVTALLL PLALLLHAAR PEVQLVESGG GLVQPGGSLR LSCAASGFNI |
| | spCD28_ | KDTYMHWVRQ APGKGLEWVA RIDPANGNSK YADSVKGRFT ISADTSKNTA |
| | CD28_CD40 | YLQMNSLRAE DTAVYYCAPF GYYVSDYAMA YWGQGTLVTV SSGGGGSGGG |
| | | GSGGGGSDIQ LTQSPSSLSA SVGDRVTITC RAGESVDIFG VGFLHWYQQK |
| | | PGKAPKLLIY RASNLESGVP SRFSGSGSRT DFTLTISSLQ PEDFATYYCQ |
| | | QTNEDPYTFG QGTKVEIKAA AGSGGSGILV KQSPMLVAYD NAVNLSCKYS |
| | | YNLFSREFRA SLHKGLDSAV EVCVVYGNYS QQLQVYSKTG FNCDGKLGNE |
| | | SVTFYLQNLY VNQTDIYFCK IEVMYPPPYL DNEKSNGTII HVKGKHLCPS |
| | | PLFPGPSKPF WVLVVVGGVL ACYSLLVTVA FIIFWVRSKR SRLLHSDYMN |
| | | MTPRRPGPTR KHYQPYAPPR DFAAYRSKKV AKKPTNKAPH PKQEPQEINF |
| | | PDDLPGSNTA APVQETLHGC QPVTQEDGKE SRISVQERQ |
| 134 | CD2_HuT84.66_ | MSFPCKFVAS FLLIFNVSSK GAVSEVQLVE SGGGLVQPGG SLRLSCAASG |
| | spCD28_ | FNIKDTYMHW VRQAPGKGLE WVARIDPANG NSKYADSVKG RFTISADTSK |
| | CD28_CD40 | NTAYLQMNSL RAEDTAVYYC APFGYYVSDY AMAYWGQGTL VTVSSGGGGS |
| | | GGGGSGGGGS DIQLTQSPSS LSASVGDRVT ITCRAGESVD IFGVGFLHWY |
| | | QQKPGKAPKL LIYRASNLES GVPSRFSGSG SRTDFTLTIS SLQPEDFATY |
| | | YCQQTNEDPY TFGQGTKVEI KAAAGSGGSG ILVKQSPMLV AYDNAVNLSC |
| | | KYSYNLFSRE FRASLHKGLD SAVEVCVVYG NYSQQLQVYS KTGFNCDGKL |
| | | GNESVTFYLQ NLYVNQTDIY FCKIEVMYPP PYLDNEKSNG TIIHVKGKHL |
| | | CPSPLFPGPS KPFWVLVVVG GVLACYSLLV TVAFIIFWVR SKRSRLLHSD |
| | | YMNMTPRRPG PTRKHYQPYA PPRDFAAYRS KKVAKKPTNK APHPKQEPQE |
| | | INFPDDLPGS NTAAPVQETL HGCQPVTQED GKESRISVQE RQ |
| 135 | IL2_HuT84.66 | MYRMQLLSCI ALSLALVTNS EVQLVESGGG LVQPGGSLRL SCAASGFNIK |
| | _spCD28 | DTYMHWVRQA PGKGLEWVAR IDPANGNSKY ADSVKGRFTI SADTSKNTAY |
| | _CD28_CD40 | LQMNSLRAED TAVYYCAPFG YYVSDYAMAY WGQGTLVTVS SGGGGSGGGG |
| | | SGGGGSDIQL TQSPSSLSAS VGDRVTITCR AGESVDIFGV GFLHWYQQKP |
| | | GKAPKLLIYR ASNLESGVPS RFSGSGSRTD FTLTISSLQP EDFATYYCQQ |
| | | TNEDPYTFGQ GTKVEIKAAA GSGGSGILVK QSPMLVAYDN AVNLSCKYSY |
| | | NLFSREFRAS LHKGLDSAVE VCVVYGNYSQ QLQVYSKTGF NCDGKLGNES |
| | | VTFYLQNLYV NQTDIYFCKI EVMYPPPYLD NEKSNGTIIH VKGKHLCPSP |
| | | LFPGPSKPFW VLVVVGGVLA CYSLLVTVAF IIFWVRSKRS RLLHSDYMNM |
| | | TPRRPGPTRK HYQPYAPPRD FAAYRSKKVA KKPTNKAPHP KQEPQEINFP |
| | | DDLPGSNTAA PVQETLHGCQ PVTQEDGKES RISVQERQ |
| 136 | GM-CSF_ | MWLQSLLLLG TVACSISEVQ LVESGGGLVQ PGGSLRLSCA ASGFNIKDTY |
| | HuT84.66_ | MHWVRQAPGK GLEWVARIDP ANGNSKYADS VKGRFTISAD TSKNTAYLQM |
| | spCD28_ | NSLRAEDTAV YYCAPFGYYV SDYAMAYWGQ GTLVTVSSGG GGSGGGGSGG |
| | CD28_CD40 | GGSDIQLTQS PSSLSASVGD RVTITCRAGE SVDIFGVGFL HWYQQKPGKA |
| | | PKLLIYRASN LESGVPSRFS GSGSRTDFTL TISSLQPEDF ATYYCQQTNE |
| | | DPYTFGQGTK VEIKAAAGSG GSGILVKQSP MLVAYDNAVN LSCKYSYNLF |
| | | SREFRASLHK GLDSAVEVCV VYGNYSQQLQ VYSKTGFNCD GKLGNESVTF |
| | | YLQNLYVNQT DIYFCKIEVM YPPPYLDNEK SNGTIIHVKG KHLCPSPLFP |
| | | GPSKPFWVLV VVGGVLACYS LLVTVAFIIF WVRSKRSRLL HSDYMNMTPR |
| | | RPGPTRKHYQ PYAPPRDFAA YRSKKVAKKP TNKAPHPKQE PQEINFPDDL |
| | | PGSNTAAPVQ ETLHGCQPVT QEDGKESRIS VQERQ |
| 137 | hIgGk- | MEAPAQLLFL LLLWLPDTTR EVQLVESGGG LVQPGGSLRL SCAASGFNIK |
| | VIII_HuT84.66_ | DTYMHWVRQA PGKGLEWVAR IDPANGNSKY ADSVKGRFTI SADTSKNTAY |
| | spCD28_ | LQMNSLRAED TAVYYCAPFG YYVSDYAMAY WGQGTLVTVS SGGGGSGGGG |
| | CD28_CD40 | SGGGGSDIQL TQSPSSLSAS VGDRVTITCR AGESVDIFGV GFLHWYQQKP |
| | | GKAPKLLIYR ASNLESGVPS RFSGSGSRTD FTLTISSLQP EDFATYYCQQ |
| | | TNEDPYTFGQ GTKVEIKAAA GSGGSGILVK QSPMLVAYDN AVNLSCKYSY |
| | | NLFSREFRAS LHKGLDSAVE VCVVYGNYSQ QLQVYSKTGF NCDGKLGNES |
| | | VTFYLQNLYV NQTDIYFCKI EVMYPPPYLD NEKSNGTIIH VKGKHLCPSP |
| | | LFPGPSKPFW VLVVVGGVLA CYSLLVTVAF IIFWVRSKRS RLLHSDYMNM |
| | | TPRRPGPTRK HYQPYAPPRD FAAYRSKKVA KKPTNKAPHP KQEPQEINFP |
| | | DDLPGSNTAA PVQETLHGCQ PVTQEDGKES RISVQERQ |
| 138 | OSM_HuT84.66_ | MGVLLTQRTL LSLVLALLFP SMASMEVQLV ESGGGLVQPG GSLRLSCAAS |
| | spCD8_ | GFNIKDTYMH WVRQAPGKGL EWVARIDPAN GNSKYADSVK GRFTISADTS |
| | CD28_CD40 | KNTAYLQMNS LRAEDTAVYY CAPFGYYVSD YAMAYWGQGT LVTVSSGGGG |
| | | SGGGGSGGGG SDIQLTQSPS SLSASVGDRV TITCRAGESV DIFGVGFLHW |
| | | YQQKPGKAPK LLIYRASNLE SGVPSRFSGS GSRTDFTLTI SSLQPEDFAT |
| | | YYCQQTNEDP YTFGQGTKVE IKAAAGSGGS GFVPVFLPAK PTTTPAPRPP |
| | | TPAPTIASQP LSLRPEACRP AAGGAVHTRG LDFACDIYIW APLAGTCGVL |
| | | LLSLVITLYC NHRNRSKRSR LLHSDYMNMT PRRPGPTRKH YQPYAPPRDF |
| | | AAYRSKKVAK KPTNKAPHPK QEPQEINFPD DLPGSNTAAP VQETLHGCQP |
| | | VTQEDGKESR ISVQERQ |
| 139 | CD8a_HuT84.66_ | MALPVTALLL PLALLLHAAR PEVQLVESGG GLVQPGGSLR LSCAASGFNI |
| | spCD8_ | KDTYMHWVRQ APGKGLEWVA RIDPANGNSK YADSVKGRFT ISADTSKNTA |
| | CD28_CD40 | YLQMNSLRAE DTAVYYCAPF GYYVSDYAMA YWGQGTLVTV SSGGGGSGGG |
| | | GSGGGGSDIQ LTQSPSSLSA SVGDRVTITC RAGESVDIFG VGFLHWYQQK |
| | | PGKAPKLLIY RASNLESGVP SRFSGSGSRT DFTLTISSLQ PEDFATYYCQ |
| | | QTNEDPYTFG QGTKVEIKAA AGSGGSGFVP VFLPAKPTTT PAPRPPTPAP |
| | | TIASQPLSLR PEACRPAAGG AVHTRGLDFA CDIYIWAPLA GTCGVLLLSL |
| | | VITLYCNHRN RSKRSRLLHS DYMNMTPRRP GPTRKHYQPY APPRDFAAYR |
| | | SKKVAKKPTN KAPHPKQEPQ EINFPDDLPG SNTAAPVQET LHGCQPVTQE |
| | | DGKESRISVQ ERQ |
| 140 | CD2_HuT84.66_ | MSFPCKFVAS FLLIFNVSSK GAVSEVQLVE SGGGLVQPGG SLRLSCAASG |
| | spCD8_ | FNIKDTYMHW VRQAPGKGLE WVARIDPANG NSKYADSVKG RFTISADTSK |
| | CD28_CD40 | NTAYLQMNSL RAEDTAVYYC APFGYYVSDY AMAYWGQGTL VTVSSGGGGS |
| | | GGGGSGGGGS DIQLTQSPSS LSASVGDRVT ITCRAGESVD IFGVGFLHWY |
| | | QQKPGKAPKL LIYRASNLES GVPSRFSGSG SRTDFTLTIS SLQPEDFATY |
| | | YCQQTNEDPY TFGQGTKVEI KAAAGSGGSG FVPVFLPAKP TTTPAPRPPT |
| | | PAPTIASQPL SLRPEACRPA AGGAVHTRGL DFACDIYIWA PLAGTCGVLL |
| | | LSLVITLYCN HRNRSKRSRL LHSDYMNMTP RRPGPTRKHY QPYAPPRDFA |
| | | AYRSKKVAKK PTNKAPHPKQ EPQEINFPDD LPGSNTAAPV QETLHGCQPV |
| | | TQEDGKESRI SVQERQ |
| 141 | IL2_HuT84.66_ | MYRMQLLSCI ALSLALVTNS EVQLVESGGG LVQPGGSLRL SCAASGFNIK |
| | spCD8_ | DTYMHWVRQA PGKGLEWVAR IDPANGNSKY ADSVKGRFTI SADTSKNTAY |
| | CD28_CD40 | LQMNSLRAED TAVYYCAPFG YYVSDYAMAY WGQGTLVTVS SGGGGSGGGG |
| | | SGGGGSDIQL TQSPSSLSAS VGDRVTITCR AGESVDIFGV GFLHWYQQKP |
| | | GKAPKLLIYR ASNLESGVPS RFSGSGSRTD FTLTISSLQP EDFATYYCQQ |
| | | TNEDPYTFGQ GTKVEIKAAA GSGGSGFVPV FLPAKPTTTP APRPPTPAPT |
| | | IASQPLSLRP EACRPAAGGA VHTRGLDFAC DIYIWAPLAG TCGVLLLSLV |
| | | ITLYCNHRNR SKRSRLLHSD YMNMTPRRPG PTRKHYQPYA PPRDFAAYRS |
| | | KKVAKKPTNK APHPKQEPQE INFPDDLPGS NTAAPVQETL HGCQPVTQED |
| | | GKESRISVQE RQ |
| 142 | GM-CSF_ | MWLQSLLLLG TVACSISEVQ LVESGGGLVQ PGGSLRLSCA ASGFNIKDTY |
| | HuT84.66_ | MHWVRQAPGK GLEWVARIDP ANGNSKYADS VKGRFTISAD TSKNTAYLQM |
| | spCD8_CD28_ | NSLRAEDTAV YYCAPFGYYV SDYAMAYWGQ GTLVTVSSGG GGSGGGGSGG |
| | CD40 | GGSDIQLTQS PSSLSASVGD RVTITCRAGE SVDIFGVGFL HWYQQKPGKA |
| | | PKLLIYRASN LESGVPSRFS GSGSRTDFTL TISSLQPEDF ATYYCQQTNE |
| | | DPYTFGQGTK VEIKAAAGSG GSGFVPVFLP AKPTTTPAPR PPTPAPTIAS |
| | | QPLSLRPEAC RPAAGGAVHT RGLDFACDIY IWAPLAGTCG VLLLSLVITL |
| | | YCNHRNRSKR SRLLHSDYMN MTPRRPGPTR KHYQPYAPPR DFAAYRSKKV |
| | | AKKPTNKAPH PKQEPQEINF PDDLPGSNTA APVQETLHGC QPVTQEDGKE |
| | | SRISVQERQ |
| 143 | hIgGk- | MEAPAQLLFL LLLWLPDTTR EVQLVESGGG LVQPGGSLRL SCAASGFNIK |
| | VIII_HuT84.66_ | DTYMHWVRQA PGKGLEWVAR IDPANGNSKY ADSVKGRFTI SADTSKNTAY |
| | spCD8_ | LQMNSLRAED TAVYYCAPFG YYVSDYAMAY WGQGTLVTVS SGGGGSGGGG |
| | CD28_CD40 | SGGGGSDIQL TQSPSSLSAS VGDRVTITCR AGESVDIFGV GFLHWYQQKP |
| | | GKAPKLLIYR ASNLESGVPS RFSGSGSRTD FTLTISSLQP EDFATYYCQQ |
| | | TNEDPYTFGQ GTKVEIKAAA GSGGSGFVPV FLPAKPTTTP APRPPTPAPT |
| | | IASQPLSLRP EACRPAAGGA VHTRGLDFAC DIYIWAPLAG TCGVLLLSLV |
| | | ITLYCNHRNR SKRSRLLHSD YMNMTPRRPG PTRKHYQPYA PPRDFAAYRS |
| | | KKVAKKPTNK APHPKQEPQE INFPDDLPGS NTAAPVQETL HGCQPVTQED |
| | | GKESRISVQE RQ |
| 144 | OSM_HuT84.66_ | MGVLLTQRTL LSLVLALLFP SMASMEVQLV ESGGGLVQPG GSLRLSCAAS |
| | CD28TM_ | GFNIKDTYMH WVRQAPGKGL EWVARIDPAN GNSKYADSVK GRFTISADTS |
| | CD28_CD40 | KNTAYLQMNS LRAEDTAVYY CAPFGYYVSD YAMAYWGQGT LVTVSSGGGG |
| | | SGGGGSGGGG SDIQLTQSPS SLSASVGDRV TITCRAGESV DIFGVGFLHW |
| | | YQQKPGKAPK LLIYRASNLE SGVPSRFSGS GSRTDFTLTI SSLQPEDFAT |
| | | YYCQQTNEDP YTFGQGTKVE IKAAAGSGGS GFWVLVVVGG VLACYSLLVT |
| | | VAFIIFWVRS KRSRLLHSDY MNMTPRRPGP TRKHYQPYAP PRDFAAYRSK |
| | | KVAKKPTNKA PHPKQEPQEI NFPDDLPGSN TAAPVQETLH GCQPVTQEDG |
| | | KESRISVQER Q |
| 145 | CD8a_HuT84.66_ | MALPVTALLL PLALLLHAAR PEVQLVESGG GLVQPGGSLR LSCAASGFNI |
| | CD28TM_ | KDTYMHWVRQ APGKGLEWVA RIDPANGNSK YADSVKGRFT ISADTSKNTA |
| | CD28_CD40 | YLQMNSLRAE DTAVYYCAPF GYYVSDYAMA YWGQGTLVTV SSGGGGSGGG |
| | | GSGGGGSDIQ LTQSPSSLSA SVGDRVTITC RAGESVDIFG VGFLHWYQQK |
| | | PGKAPKLLIY RASNLESGVP SRFSGSGSRT DFTLTISSLQ PEDFATYYCQ |
| | | QTNEDPYTFG QGTKVEIKAA AGSGGSGFWV LVVVGGVLAC YSLLVTVAFI |
| | | IFWVRSKRSR LLHSDYMNMT PRRPGPTRKH YQPYAPPRDF AAYRSKKVAK |
| | | KPTNKAPHPK QEPQEINFPD DLPGSNTAAP VQETLHGCQP VTQEDGKESR |
| | | ISVQERQ |
| 146 | CD2_HuT84.66_ | MSFPCKFVAS FLLIFNVSSK GAVSEVQLVE SGGGLVQPGG SLRLSCAASG |
| | CD28TM_ | FNIKDTYMHW VRQAPGKGLE WVARIDPANG NSKYADSVKG RFTISADTSK |
| | CD28_CD40 | NTAYLQMNSL RAEDTAVYYC APFGYYVSDY AMAYWGQGTL VTVSSGGGGS |
| | | GGGGSGGGGS DIQLTQSPSS LSASVGDRVT ITCRAGESVD IFGVGFLHWY |
| | | QQKPGKAPKL LIYRASNLES GVPSRFSGSG SRTDFTLTIS SLQPEDFATY |
| | | YCQQTNEDPY TFGQGTKVEI KAAAGSGGSG FWVLVVVGGV LACYSLLVTV |
| | | AFIIFWVRSK RSRLLHSDYM NMTPRRPGPT RKHYQPYAPP RDFAAYRSKK |
| | | VAKKPTNKAP HPKQEPQEIN FPDDLPGSNT AAPVQETLHG CQPVTQEDGK |
| | | ESRISVQERQ |
| 147 | IL2_HuT84.66_ | MYRMQLLSCI ALSLALVTNS EVQLVESGGG LVQPGGSLRL SCAASGFNIK |
| | CD28TM_ | DTYMHWVRQA PGKGLEWVAR IDPANGNSKY ADSVKGRFTI SADTSKNTAY |
| | CD28_CD40 | LQMNSLRAED TAVYYCAPFG YYVSDYAMAY WGQGTLVTVS SGGGGSGGGG |
| | | SGGGGSDIQL TQSPSSLSAS VGDRVTITCR AGESVDIFGV GFLHWYQQKP |
| | | GKAPKLLIYR ASNLESGVPS RFSGSGSRTD FTLTISSLQP EDFATYYCQQ |
| | | TNEDPYTFGQ GTKVEIKAAA GSGGSGFWVL VVVGGVLACY SLLVTVAFII |
| | | FWVRSKRSRL LHSDYMNMTP RRPGPTRKHY QPYAPPRDFA AYRSKKVAKK |
| | | PTNKAPHPKQ EPQEINFPDD LPGSNTAAPV QETLHGCQPV TQEDGKESRI |
| | | SVQERQ |
| 148 | GM-CSF_ | MWLQSLLLLG TVACSISEVQ LVESGGGLVQ PGGSLRLSCA ASGFNIKDTY |
| | HuT84.66_ | MHWVRQAPGK GLEWVARIDP ANGNSKYADS VKGRFTISAD TSKNTAYLQM |
| | CD28TM_CD28_ | NSLRAEDTAV YYCAPFGYYV SDYAMAYWGQ GTLVTVSSGG GGSGGGGSGG |
| | CD40 | GGSDIQLTQS PSSLSASVGD RVTITCRAGE SVDIFGVGFL HWYQQKPGKA |
| | | PKLLIYRASN LESGVPSRFS GSGSRTDFTL TISSLQPEDF ATYYCQQTNE |
| | | DPYTFGQGTK VEIKAAAGSG GSGFWVLVVV GGVLACYSLL VTVAFIIFWV |
| | | RSKRSRLLHS DYMNMTPRRP GPTRKHYQPY APPRDFAAYR SKKVAKKPTN |
| | | KAPHPKQEPQ EINFPDDLPG SNTAAPVQET LHGCQPVTQE DGKESRISVQ |
| | | ERQ |
| 149 | hIgGk- | MEAPAQLLFL LLLWLPDTTR EVQLVESGGG LVQPGGSLRL SCAASGFNIK |
| | VIII_HuT84.66_ | DTYMHWVRQA PGKGLEWVAR IDPANGNSKY ADSVKGRFTI SADTSKNTAY |
| | CD28TM_ | LQMNSLRAED TAVYYCAPFG YYVSDYAMAY WGQGTLVTVS SGGGGSGGGG |
| | CD28_CD40 | SGGGGSDIQL TQSPSSLSAS VGDRVTITCR AGESVDIFGV GFLHWYQQKP |
| | | GKAPKLLIYR ASNLESGVPS RFSGSGSRTD FTLTISSLQP EDFATYYCQQ |
| | | TNEDPYTFGQ GTKVEIKAAA GSGGSGFWVL VVVGGVLACY SLLVTVAFII |
| | | FWVRSKRSRL LHSDYMNMTP RRPGPTRKHY QPYAPPRDFA AYRSKKVAKK |
| | | PTNKAPHPKQ EPQEINFPDD LPGSNTAAPV QETLHGCQPV TQEDGKESRI |
| | | SVQERQ |
| 150 | OSM_MFE23_ | MGVLLTQRTL LSLVLALLFP SMASMQVKLQ QSGAELVRSG TSVKLSCTAS |
| | spCD28(trun)_ | GFNIKDSYMH WLRQGPEQGL EWIGWIDPEN GDTEYAPKFQ GKATFTTDTS |
| | CD28_CD40 | SNTAYLQLSS LTSEDTAVYY CNEGTPTGPY YFDYWGQGTT VTVSSGGGGS |
| | | GGGGSGGGGS ENVLTQSPAI MSASPGEKVT ITCSASSSVS YMHWFQQKPG |
| | | TSPKLWIYST SNLASGVPAR FSGSGSGTSY SLTISRMEAE DAATYYCQQR |
| | | SSYPLTFGAG TKLELKRAAA GSGGSGIIHV KGKHLCPSPL FPGPSKPFWV |
| | | LVVVGGVLAC YSLLVTVAFI IFWVRSKRSR LLHSDYMNMT PRRPGPTRKH |
| | | YQPYAPPRDF AAYRSKKVAK KPTNKAPHPK QEPQEINFPD DLPGSNTAAP |
| | | VQETLHGCQP VTQEDGKESR ISVQERQ |
| 151 | CD8a_MFE23_ | MALPVTALLL PLALLLHAAR PQVKLQQSGA ELVRSGTSVK LSCTASGFNI |
| | spCD28(trun)_ | KDSYMHWLRQ GPEQGLEWIG WIDPENGDTE YAPKFQGKAT FTTDTSSNTA |
| | CD28_CD40 | YLQLSSLTSE DTAVYYCNEG TPTGPYYFDY WGQGTTVTVS SGGGGSGGGG |
| | | SGGGGSENVL TQSPAIMSAS PGEKVTITCS ASSSVSYMHW FQQKPGTSPK |
| | | LWIYSTSNLA SGVPARFSGS GSGTSYSLTI SRMEAEDAAT YYCQQRSSYP |
| | | LTFGAGTKLE LKRAAAGSGG SGIIHVKGKH LCPSPLFPGP SKPFWVLVVV |
| | | GGVLACYSLL VTVAFIIFWV RSKRSRLLHS DYMNMTPRRP GPTRKHYQPY |
| | | APPRDFAAYR SKKVAKKPTN KAPHPKQEPQ EINFPDDLPG SNTAAPVQET |
| | | LHGCQPVTQE DGKESRISVQ ERQ |
| 152 | CD2_MFE23_ | MSFPCKFVAS FLLIFNVSSK GAVSQVKLQQ SGAELVRSGT SVKLSCTASG |
| | spCD28(trun)_ | FNIKDSYMHW LRQGPEQGLE WIGWIDPENG DTEYAPKFQG KATFTTDTSS |
| | CD28_CD40 | NTAYLQLSSL TSEDTAVYYC NEGTPTGPYY FDYWGQGTTV TVSSGGGGSG |
| | | GGGSGGGGSE NVLTQSPAIM SASPGEKVTI TCSASSSVSY MHWFQQKPGT |
| | | SPKLWIYSTS NLASGVPARF SGSGSGTSYS LTISRMEAED AATYYCQQRS |
| | | SYPLTFGAGT KLELKRAAAG SGGSGIIHVK GKHLCPSPLF PGPSKPFWVL |
| | | VVVGGVLACY SLLVTVAFII FWVRSKRSRL LHSDYMNMTP RRPGPTRKHY |
| | | QPYAPPRDFA AYRSKKVAKK PTNKAPHPKQ EPQEINFPDD LPGSNTAAPV |
| | | QETLHGCQPV TQEDGKESRI SVQERQ |
| 153 | IL2_MFE23_ | MYRMQLLSCI ALSLALVTNS QVKLQQSGAE LVRSGTSVKL SCTASGFNIK |
| | spCD28(trun)_ | DSYMHWLRQG PEQGLEWIGW IDPENGDTEY APKFQGKATF TTDTSSNTAY |
| | CD28_CD40 | LQLSSLTSED TAVYYCNEGT PTGPYYFDYW GQGTTVTVSS GGGGSGGGGS |
| | | GGGGSENVLT QSPAIMSASP GEKVTITCSA SSSVSYMHWF QQKPGTSPKL |
| | | WIYSTSNLAS GVPARFSGSG SGTSYSLTIS RMEAEDAATY YCQQRSSYPL |
| | | TFGAGTKLEL KRAAAGSGGS GIIHVKGKHL CPSPLFPGPS KPFWVLVVVG |
| | | GVLACYSLLV TVAFIIFWVR SKRSRLLHSD YMNMTPRRPG PTRKHYQPYA |
| | | PPRDFAAYRS KKVAKKPTNK APHPKQEPQE INFPDDLPGS NTAAPVQETL |
| | | HGCQPVTQED GKESRISVQE RQ |
| 154 | GM-CSF_MFE23_ | MWLQSLLLLG TVACSISQVK LQQSGAELVR SGTSVKLSCT ASGFNIKDSY |
| | spCD28(trun)_ | MHWLRQGPEQ GLEWIGWIDP ENGDTEYAPK FQGKATFTTD TSSNTAYLQL |
| | CD28_CD40 | SSLTSEDTAV YYCNEGTPTG PYYFDYWGQG TTVTVSSGGG GSGGGGSGGG |
| | | GSENVLTQSP AIMSASPGEK VTITCSASSS VSYMHWFQQK PGTSPKLWIY |
| | | STSNLASGVP ARFSGSGSGT SYSLTISRME AEDAATYYCQ QRSSYPLTFG |
| | | AGTKLELKRA AAGSGGSGII HVKGKHLCPS PLFPGPSKPF WVLVVVGGVL |
| | | ACYSLLVTVA FIIFWVRSKR SRLLHSDYMN MTPRRPGPTR KHYQPYAPPR |
| | | DFAAYRSKKV AKKPTNKAPH PKQEPQEINF PDDLPGSNTA APVQETLHGC |
| | | QPVTQEDGKE SRISVQERQ |
| 155 | hIgGk- | MEAPAQLLFL LLLWLPDTTR QVKLQQSGAE LVRSGTSVKL SCTASGFNIK |
| | VIII_MFE23_ | DSYMHWLRQG PEQGLEWIGW IDPENGDTEY APKFQGKATF TTDTSSNTAY |
| | spCD28(trun)_ | LQLSSLTSED TAVYYCNEGT PTGPYYFDYW GQGTTVTVSS GGGGSGGGGS |
| | CD28_CD40 | GGGGSENVLT QSPAIMSASP GEKVTITCSA SSSVSYMHWF QQKPGTSPKL |
| | | WIYSTSNLAS GVPARFSGSG SGTSYSLTIS RMEAEDAATY YCQQRSSYPL |
| | | TFGAGTKLEL KRAAAGSGGS GIIHVKGKHL CPSPLFPGPS KPFWVLVVVG |
| | | GVLACYSLLV TVAFIIFWVR SKRSRLLHSD YMNMTPRRPG PTRKHYQPYA |
| | | PPRDFAAYRS KKVAKKPTNK APHPKQEPQE INFPDDLPGS NTAAPVQETL |
| | | HGCQPVTQED GKESRISVQE RQ |
| 156 | OSM_MFE23 | MGVLLTQRTL LSLVLALLFP SMASMQVOLQ QSGAELVRSG TSVKLSCTAS |
| | (K > Q)_spCD28 | GFNIKDSYMH WLRQGPEQGL EWIGWIDPEN GDTEYAPKFQ GKATFTTDTS |
| | (trun)_ | SNTAYLQLSS LTSEDTAVYY CNEGTPTGPY YFDYWGQGTT VTVSSGGGGS |
| | CD28_CD40 | GGGGSGGGGS ENVLTQSPAI MSASPGEKVT ITCSASSSVS YMHWFQQKPG |
| | | TSPKLWIYST SNLASGVPAR FSGSGSGTSY SLTISRMEAE DAATYYCQQR |
| | | SSYPLTFGAG TKLELKRAAA GSGGSGIIHV KGKHLCPSPL FPGPSKPFWV |
| | | LVVVGGVLAC YSLLVTVAFI IFWVRSKRSR LLHSDYMNMT PRRPGPTRKH |
| | | YQPYAPPRDF AAYRSKKVAK KPTNKAPHPK QEPQEINFPD DLPGSNTAAP |
| | | VQETLHGCQP VTQEDGKESR ISVQERQ |
| 157 | CD8a_ | MALPVTALLL PLALLLHAAR PQVQLQQSGA ELVRSGTSVK LSCTASGFNI |
| | MFE23(K > Q)_ | KDSYMHWLRQ GPEQGLEWIG WIDPENGDTE YAPKFQGKAT FTTDTSSNTA |
| | spCD28(trun)_ | YLQLSSLTSE DTAVYYCNEG TPTGPYYFDY WGQGTTVTVS SGGGGSGGGG |
| | CD28_CD40 | SGGGGSENVL TQSPAIMSAS PGEKVTITCS ASSSVSYMHW FQQKPGTSPK |
| | | LWIYSTSNLA SGVPARFSGS GSGTSYSLTI SRMEAEDAAT YYCQQRSSYP |
| | | LTFGAGTKLE LKRAAAGSGG SGIIHVKGKH LCPSPLFPGP SKPFWVLVVV |
| | | GGVLACYSLL VTVAFIIFWV RSKRSRLLHS DYMNMTPRRP GPTRKHYQPY |
| | | APPRDFAAYR SKKVAKKPTN KAPHPKQEPQ EINFPDDLPG SNTAAPVQET |
| | | LHGCQPVTQE DGKESRISVQ ERQ |
| 158 | CD2_MFE23 | MSFPCKFVAS FLLIFNVSSK GAVSQVQLQQ SGAELVRSGT SVKLSCTASG |
| | (K > Q)_spCD28 | FNIKDSYMHW LRQGPEQGLE WIGWIDPENG DTEYAPKFQG KATFTTDTSS |
| | (trun)_ | NTAYLQLSSL TSEDTAVYYC NEGTPTGPYY FDYWGQGTTV TVSSGGGGSG |
| | CD28_CD40 | GGGSGGGGSE NVLTQSPAIM SASPGEKVTI TCSASSSVSY MHWFQQKPGT |
| | | SPKLWIYSTS NLASGVPARF SGSGSGTSYS LTISRMEAED AATYYCQQRS |
| | | SYPLTFGAGT KLELKRAAAG SGGSGIIHVK GKHLCPSPLF PGPSKPFWVL |
| | | VVVGGVLACY SLLVTVAFII FWVRSKRSRL LHSDYMNMTP RRPGPTRKHY |
| | | QPYAPPRDFA AYRSKKVAKK PTNKAPHPKQ EPQEINFPDD LPGSNTAAPV |
| | | QETLHGCQPV TQEDGKESRI SVQERQ |
| 159 | IL2_MFE23 | MYRMQLLSCI ALSLALVTNS QVQLQQSGAE LVRSGTSVKL SCTASGFNIK |
| | (K > Q)_spCD28 | DSYMHWLRQG PEQGLEWIGW IDPENGDTEY APKFQGKATF TTDTSSNTAY |
| | (trun)_ | LQLSSLTSED TAVYYCNEGT PTGPYYFDYW GQGTTVTVSS GGGGSGGGGS |
| | CD28_CD40 | GGGGSENVLT QSPAIMSASP GEKVTITCSA SSSVSYMHWF QQKPGTSPKL |
| | | WIYSTSNLAS GVPARFSGSG SGTSYSLTIS RMEAEDAATY YCQQRSSYPL |
| | | TFGAGTKLEL KRAAAGSGGS GIIHVKGKHL CPSPLFPGPS KPFWVLVVVG |
| | | GVLACYSLLV TVAFIIFWVR SKRSRLLHSD YMNMTPRRPG PTRKHYQPYA |
| | | PPRDFAAYRS KKVAKKPTNK APHPKQEPQE INFPDDLPGS NTAAPVQETL |
| | | HGCQPVTQED GKESRISVQE RQ |
| 160 | GM-CSF_ | MWLQSLLLLG TVACSISQVQ LQQSGAELVR SGTSVKLSCT ASGFNIKDSY |
| | MFE23(K > Q)_ | MHWLRQGPEQ GLEWIGWIDP ENGDTEYAPK FQGKATFTTD TSSNTAYLQL |
| | spCD28(trun)_ | SSLTSEDTAV YYCNEGTPTG PYYFDYWGQG TTVTVSSGGG GSGGGGSGGG |
| | CD28_CD40 | GSENVLTQSP AIMSASPGEK VTITCSASSS VSYMHWFQQK PGTSPKLWIY |
| | | STSNLASGVP ARFSGSGSGT SYSLTISRME AEDAATYYCQ QRSSYPLTFG |
| | | AGTKLELKRA AAGSGGSGII HVKGKHLCPS PLFPGPSKPF WVLVVVGGVL |
| | | ACYSLLVTVA FIIFWVRSKR SRLLHSDYMN MTPRRPGPTR KHYQPYAPPR |
| | | DFAAYRSKKV AKKPTNKAPH PKQEPQEINF PDDLPGSNTA APVQETLHGC |
| | | QPVTQEDGKE SRISVQERQ |
| 161 | hIgGk-VIII_ | MEAPAQLLFL LLLWLPDTTR QVQLQQSGAE LVRSGTSVKL SCTASGFNIK |
| | MFE23(K > Q)_ | DSYMHWLRQG PEQGLEWIGW IDPENGDTEY APKFQGKATF TTDTSSNTAY |
| | spCD28(trun)_ | LQLSSLTSED TAVYYCNEGT PTGPYYFDYW GQGTTVTVSS GGGGSGGGGS |
| | CD28_CD40 | GGGGSENVLT QSPAIMSASP GEKVTITCSA SSSVSYMHWF QQKPGTSPKL |
| | | WIYSTSNLAS GVPARFSGSG SGTSYSLTIS RMEAEDAATY YCQQRSSYPL |
| | | TFGAGTKLEL KRAAAGSGGS GIIHVKGKHL CPSPLFPGPS KPFWVLVVVG |
| | | GVLACYSLLV TVAFIIFWVR SKRSRLLHSD YMNMTPRRPG PTRKHYQPYA |
| | | PPRDFAAYRS KKVAKKPTNK APHPKQEPQE INFPDDLPGS NTAAPVQETL |
| | | HGCQPVTQED GKESRISVQE RQ |
| 162 | OSM_HuMFE23_ | MGVLLTQRTL LSLVLALLFP SMASMQVKLE QSGAEVVKPG ASVKLSCKAS |
| | spCD28(trun)_ | GFNIKDSYMH WLRQGPGQRL EWIGWIDPEN GDTEYAPKFQ GKATFTTDTS |
| | CD28_CD40 | ANTAYLGLSS LRPEDTAVYY CNEGTPTGPY YFDYWGQGTL VTVSSGGGGS |
| | CTP244 | GGGGSGGGGS ENVLTQSPSS MSASVGDRVN IACSASSSVS YMHWFQQKPG |
| | | KSPKLWIYST SNLASGVPSR FSGSGSGTDY SLTISSMQPE DAATYYCQQR |
| | | SSYPLTFGGG TKLEIKAAAG SGGSGIIHVK GKHLCPSPLF PGPSKPFWVL |
| | | VVVGGVLACY SLLVTVAFII FWVRSKRSRL LHSDYMNMTP RRPGPTRKHY |
| | | QPYAPPRDFA AYRSKKVAKK PTNKAPHPKQ EPQEINFPDD LPGSNTAAPV |
| | | QETLHGCQPV TQEDGKESRI SVQERQ |
| 163 | CD8a_HuMFE23_ | MALPVTALLL PLALLLHAAR PQVKLEQSGA EVVKPGASVK LSCKASGFNI |
| | spCD28(trun)_ | KDSYMHWLRQ GPGQRLEWIG WIDPENGDTE YAPKFQGKAT FTTDTSANTA |
| | CD28_CD40 | YLGLSSLRPE DTAVYYCNEG TPTGPYYFDY WGQGTLVTVS SGGGGSGGGG |
| | | SGGGGSENVL TQSPSSMSAS VGDRVNIACS ASSSVSYMHW FQQKPGKSPK |
| | | LWIYSTSNLA SGVPSRFSGS GSGTDYSLTI SSMQPEDAAT YYCQQRSSYP |
| | | LTFGGGTKLE IKAAAGSGGS GIIHVKGKHL CPSPLFPGPS KPFWVLVVVG |
| | | GVLACYSLLV TVAFIIFWVR SKRSRLLHSD YMNMTPRRPG PTRKHYQPYA |
| | | PPRDFAAYRS KKVAKKPTNK APHPKQEPQE INFPDDLPGS NTAAPVQETL |
| | | HGCQPVTQED GKESRISVQE RQ |
| 164 | CD2_HuMFE23_ | MSFPCKFVAS FLLIFNVSSK GAVSQVKLEQ SGAEVVKPGA SVKLSCKASG |
| | spCD28(trun)_ | FNIKDSYMHW LRQGPGQRLE WIGWIDPENG DTEYAPKFQG KATFTTDTSA |
| | CD28_CD40 | NTAYLGLSSL RPEDTAVYYC NEGTPTGPYY FDYWGQGTLV TVSSGGGGSG |
| | | GGGSGGGGSE NVLTQSPSSM SASVGDRVNI ACSASSSVSY MHWFQQKPGK |
| | | SPKLWIYSTS NLASGVPSRF SGSGSGTDYS LTISSMQPED AATYYCQQRS |
| | | SYPLTFGGGT KLEIKAAAGS GGSGIIHVKG KHLCPSPLFP GPSKPFWVLV |
| | | VVGGVLACYS LLVTVAFIIF WVRSKRSRLL HSDYMNMTPR RPGPTRKHYQ |
| | | PYAPPRDFAA YRSKKVAKKP TNKAPHPKQE PQEINFPDDL PGSNTAAPVQ |
| | | ETLHGCQPVT QEDGKESRIS VQERQ |
| 165 | IL2_HuMFE23_ | MYRMQLLSCI ALSLALVTNS QVKLEQSGAE VVKPGASVKL SCKASGFNIK |
| | spCD28(trun)_ | DSYMHWLRQG PGQRLEWIGW IDPENGDTEY APKFQGKATF TTDTSANTAY |
| | CD28_CD40 | LGLSSLRPED TAVYYCNEGT PTGPYYFDYW GQGTLVTVSS GGGGSGGGGS |
| | | GGGGSENVLT QSPSSMSASV GDRVNIACSA SSSVSYMHWF QQKPGKSPKL |
| | | WIYSTSNLAS GVPSRFSGSG SGTDYSLTIS SMQPEDAATY YCQQRSSYPL |
| | | TFGGGTKLEI KAAAGSGGSG IIHVKGKHLC PSPLFPGPSK PFWVLVVVGG |
| | | VLACYSLLVT VAFIIFWVRS KRSRLLHSDY MNMTPRRPGP TRKHYQPYAP |
| | | PRDFAAYRSK KVAKKPTNKA PHPKQEPQEI NFPDDLPGSN TAAPVQETLH |
| | | GCQPVTQEDG KESRISVQER Q |
| 166 | GM-CSF_HuMFE23_ | MWLQSLLLLG TVACSISQVK LEQSGAEVVK PGASVKLSCK ASGFNIKDSY |
| | spCD28(trun)_ | MHWLRQGPGQ RLEWIGWIDP ENGDTEYAPK FQGKATFTTD TSANTAYLGL |
| | CD28_CD40 | SSLRPEDTAV YYCNEGTPTG PYYFDYWGQG TLVTVSSGGG GSGGGGSGGG |
| | | GSENVLTQSP SSMSASVGDR VNIACSASSS VSYMHWFQQK PGKSPKLWIY |
| | | STSNLASGVP SRFSGSGSGT DYSLTISSMQ PEDAATYYCQ QRSSYPLTFG |
| | | GGTKLEIKAA AGSGGSGIIH VKGKHLCPSP LFPGPSKPFW VLVVVGGVLA |
| | | CYSLLVTVAF IIFWVRSKRS RLLHSDYMNM TPRRPGPTRK HYQPYAPPRD |
| | | FAAYRSKKVA KKPTNKAPHP KQEPQEINFP DDLPGSNTAA PVQETLHGCQ |
| | | PVTQEDGKES RISVQERQ |
| 167 | hIgGk-VIII_ | MEAPAQLLFL LLLWLPDTTR QVKLEQSGAE VVKPGASVKL SCKASGFNIK |
| | HuMFE23_ | DSYMHWLRQG PGQRLEWIGW IDPENGDTEY APKFQGKATF TTDTSANTAY |
| | spCD28(trun)_ | LGLSSLRPED TAVYYCNEGT PTGPYYFDYW GQGTLVTVSS GGGGSGGGGS |
| | CD28_CD40 | GGGGSENVLT QSPSSMSASV GDRVNIACSA SSSVSYMHWF QQKPGKSPKL |
| | | WIYSTSNLAS GVPSRFSGSG SGTDYSLTIS SMQPEDAATY YCQQRSSYPL |
| | | TFGGGTKLEI KAAAGSGGSG IIHVKGKHLC PSPLFPGPSK PFWVLVVVGG |
| | | VLACYSLLVT VAFIIFWVRS KRSRLLHSDY MNMTPRRPGP TRKHYQPYAP |
| | | PRDFAAYRSK KVAKKPTNKA PHPKQEPQEI NFPDDLPGSN TAAPVQETLH |
| | | GCQPVTQEDG KESRISVQER Q |
| 168 | OSM_CEA6_ | MGVLLTQRTL LSLVLALLFP SMASMQVQLV QSGAEVKKPG SSVKVSCKAS |
| | spCD28(trun)_ | GGTFSNSPIN WLRQAPGQGL EWMGSIIPSF GTANYAQKFQ GRLTITADES |
| | CD28_CD40 | TSTAYMELSS LRSEDTAVYY CAGRSHNYEL YYYYMDVWGQ GTMVTVSSGG |
| | | GGSGGGGSGG GGSDIQMTQS PSTLSASIGD RVTITCRASE GIYHWLAWYQ |
| | | QKPGKAPKLL IYKASSLASG APSRFSGSGS GTDFTLTISS LQPDDFATYY |
| | | CQQYSNYPLT FGGGTKLEIK RAAAGSGGSG IIHVKGKHLC PSPLFPGPSK |
| | | PFWVLVVVGG VLACYSLLVT VAFIIFWVRS KRSRLLHSDY MNMTPRRPGP |
| | | TRKHYQPYAP PRDFAAYRSK KVAKKPTNKA PHPKQEPQEI NFPDDLPGSN |
| | | TAAPVQETLH GCQPVTQEDG KESRISVQER Q |
| 169 | CD8a_CEA6_ | MALPVTALLL PLALLLHAAR PQVQLVQSGA EVKKPGSSVK VSCKASGGTF |
| | spCD28(trun)_ | SNSPINWLRQ APGQGLEWMG SIIPSFGTAN YAQKFQGRLT ITADESTSTA |
| | CD28_CD40 | YMELSSLRSE DTAVYYCAGR SHNYELYYYY MDVWGQGTMV TVSSGGGGSG |
| | | GGGSGGGGSD IQMTQSPSTL SASIGDRVTI TCRASEGIYH WLAWYQQKPG |
| | | KAPKLLIYKA SSLASGAPSR FSGSGSGTDF TLTISSLQPD DFATYYCQQY |
| | | SNYPLTFGGG TKLEIKRAAA GSGGSGIIHV KGKHLCPSPL FPGPSKPFWV |
| | | LVVVGGVLAC YSLLVTVAFI IFWVRSKRSR LLHSDYMNMT PRRPGPTRKH |
| | | YQPYAPPRDF AAYRSKKVAK KPTNKAPHPK QEPQEINFPD DLPGSNTAAP |
| | | VQETLHGCQP VTQEDGKESR ISVQERQ |
| 170 | CD2_CEA6_ | MSFPCKFVAS FLLIFNVSSK GAVSQVQLVQ SGAEVKKPGS SVKVSCKASG |
| | spCD28(trun)_ | GTFSNSPINW LRQAPGQGLE WMGSIIPSFG TANYAQKFQG RLTITADEST |
| | CD28_CD40 | STAYMELSSL RSEDTAVYYC AGRSHNYELY YYYMDVWGQG TMVTVSSGGG |
| | | GSGGGGSGGG GSDIQMTQSP STLSASIGDR VTITCRASEG IYHWLAWYQQ |
| | | KPGKAPKLLI YKASSLASGA PSRFSGSGSG TDFTLTISSL QPDDFATYYC |
| | | QQYSNYPLTF GGGTKLEIKR AAAGSGGSGI IHVKGKHLCP SPLFPGPSKP |
| | | FWVLVVVGGV LACYSLLVTV AFIIFWVRSK RSRLLHSDYM NMTPRRPGPT |
| | | RKHYQPYAPP RDFAAYRSKK VAKKPTNKAP HPKQEPQEIN FPDDLPGSNT |
| | | AAPVQETLHG CQPVTQEDGK ESRISVQERQ |
| 171 | IL2_CEA6_ | MYRMQLLSCI ALSLALVTNS QVQLVQSGAE VKKPGSSVKV SCKASGGTFS |
| | spCD28(trun)_ | NSPINWLRQA PGQGLEWMGS IIPSEGTANY AQKFQGRLTI TADESTSTAY |
| | CD28_CD40 | MELSSLRSED TAVYYCAGRS HNYELYYYYM DVWGQGTMVT VSSGGGGSGG |
| | | GGSGGGGSDI QMTQSPSTLS ASIGDRVTIT CRASEGIYHW LAWYQQKPGK |
| | | APKLLIYKAS SLASGAPSRF SGSGSGTDFT LTISSLQPDD FATYYCQQYS |
| | | NYPLTFGGGT KLEIKRAAAG SGGSGIIHVK GKHLCPSPLF PGPSKPFWVL |
| | | VVVGGVLACY SLLVTVAFII FWVRSKRSRL LHSDYMNMTP RRPGPTRKHY |
| | | QPYAPPRDFA AYRSKKVAKK PTNKAPHPKQ EPQEINFPDD LPGSNTAAPV |
| | | QETLHGCQPV TQEDGKESRI SVQERQ |
| 172 | GM-CSF_CEA6_ | MWLQSLLLLG TVACSISQVQ LVQSGAEVKK PGSSVKVSCK ASGGTFSNSP |
| | spCD28(trun)_ | INWLRQAPGQ GLEWMGSIIP SFGTANYAQK FQGRLTITAD ESTSTAYMEL |
| | CD28_CD40 | SSLRSEDTAV YYCAGRSHNY ELYYYYMDVW GQGTMVTVSS GGGGSGGGGS |
| | | GGGGSDIQMT QSPSTLSASI GDRVTITCRA SEGIYHWLAW YQQKPGKAPK |
| | | LLIYKASSLA SGAPSRFSGS GSGTDFTLTI SSLQPDDFAT YYCQQYSNYP |
| | | LTFGGGTKLE IKRAAAGSGG SGIIHVKGKH LCPSPLFPGP SKPFWVLVVV |
| | | GGVLACYSLL VTVAFIIFWV RSKRSRLLHS DYMNMTPRRP GPTRKHYQPY |
| | | APPRDFAAYR SKKVAKKPTN KAPHPKQEPQ EINFPDDLPG SNTAAPVQET |
| | | LHGCQPVTQE DGKESRISVQ ERQ |
| 173 | hIgGk-VIII_ | MEAPAQLLFL LLLWLPDTTR QVQLVQSGAE VKKPGSSVKV SCKASGGTFS |
| | CEA6_ | NSPINWLRQA PGQGLEWMGS IIPSEGTANY AQKFQGRLTI TADESTSTAY |
| | spCD28(trun)_ | MELSSLRSED TAVYYCAGRS HNYELYYYYM DVWGQGTMVT VSSGGGGSGG |
| | CD28_CD40 | GGSGGGGSDI QMTQSPSTLS ASIGDRVTIT CRASEGIYHW LAWYQQKPGK |
| | | APKLLIYKAS SLASGAPSRF SGSGSGTDFT LTISSLQPDD FATYYCQQYS |
| | | NYPLTFGGGT KLEIKRAAAG SGGSGIIHVK GKHLCPSPLF PGPSKPFWVL |
| | | VVVGGVLACY SLLVTVAFII FWVRSKRSRL LHSDYMNMTP RRPGPTRKHY |
| | | QPYAPPRDFA AYRSKKVAKK PTNKAPHPKQ EPQEINFPDD LPGSNTAAPV |
| | | QETLHGCQPV TQEDGKESRI SVQERQ |
| 174 | OSM_BW431/26_ | MGVLLTQRTL LSLVLALLFP SMASMQLQES GPGLVRPSQT LSLTCTVSGF |
| | spCD28(trun)_ | TISSGYSWHW VRQPPGRGLE WIGYIQYSGI TNYNPSLKSR VTMLVDTSKN |
| | CD28_CD40 | QFSLRLSSVT AADTAVYYCA REDYDYHWYF DVWGQGSLVT VSSGGGGSGG |
| | | GGSGGGGSGV HSDIQMTQSP SSLSASVGDR VTITCSTSSS VSYMHWYQQK |
| | | PGKAPKLLIY STSNLASGVP SRFSGSGSGT DFTFTISSLQ PEDIATYYCH |
| | | QWSSYPTFGQ GTKVEIKRAA AGSGGSGIIH VKGKHLCPSP LFPGPSKPFW |
| | | VLVVVGGVLA CYSLLVTVAF IIFWVRSKRS RLLHSDYMNM TPRRPGPTRK |
| | | HYQPYAPPRD FAAYRSKKVA KKPTNKAPHP KQEPQEINFP DDLPGSNTAA |
| | | PVQETLHGCQ PVTQEDGKES RISVQERQ |
| 175 | CD8a_BW431/26_ | MALPVTALLL PLALLLHAAR PQLQESGPGL VRPSQTLSLT CTVSGFTISS |
| | spCD28(trun)_ | GYSWHWVRQP PGRGLEWIGY IQYSGITNYN PSLKSRVTML VDTSKNQFSL |
| | CD28_CD40 | RLSSVTAADT AVYYCAREDY DYHWYFDVWG QGSLVTVSSG GGGSGGGGSG |
| | | GGGSGVHSDI QMTQSPSSLS ASVGDRVTIT CSTSSSVSYM HWYQQKPGKA |
| | | PKLLIYSTSN LASGVPSRFS GSGSGTDFTF TISSLQPEDI ATYYCHQWSS |
| | | YPTFGQGTKV EIKRAAAGSG GSGIIHVKGK HLCPSPLFPG PSKPFWVLVV |
| | | VGGVLACYSL LVTVAFIIFW VRSKRSRLLH SDYMNMTPRR PGPTRKHYQP |
| | | YAPPRDFAAY RSKKVAKKPT NKAPHPKQEP QEINFPDDLP GSNTAAPVQE |
| | | TLHGCQPVTQ EDGKESRISV QERQ |
| 176 | CD2_BW431/26_ | MSFPCKFVAS FLLIFNVSSK GAVSQLQESG PGLVRPSQTL SLTCTVSGFT |
| | spCD28(trun)_ | ISSGYSWHWV RQPPGRGLEW IGYIQYSGIT NYNPSLKSRV TMLVDTSKNQ |
| | CD28_CD40 | FSLRLSSVTA ADTAVYYCAR EDYDYHWYFD VWGQGSLVTV SSGGGGSGGG |
| | | GSGGGGSGVH SDIQMTQSPS SLSASVGDRV TITCSTSSSV SYMHWYQQKP |
| | | GKAPKLLIYS TSNLASGVPS RFSGSGSGTD FTFTISSLQP EDIATYYCHQ |
| | | WSSYPTFGQG TKVEIKRAAA GSGGSGIIHV KGKHLCPSPL FPGPSKPFWV |
| | | LVVVGGVLAC YSLLVTVAFI IFWVRSKRSR LLHSDYMNMT PRRPGPTRKH |
| | | YQPYAPPRDF AAYRSKKVAK KPTNKAPHPK QEPQEINFPD DLPGSNTAAP |
| | | VQETLHGCQP VTQEDGKESR ISVQERQ |
| 177 | IL2_BW431/26_ | MYRMQLLSCI ALSLALVTNS QLQESGPGLV RPSQTLSLTC TVSGFTISSG |
| | spCD28(trun)_ | YSWHWVRQPP GRGLEWIGYI QYSGITNYNP SLKSRVTMLV DTSKNQFSLR |
| | CD28_CD40 | LSSVTAADTA VYYCAREDYD YHWYFDVWGQ GSLVTVSSGG GGSGGGGSGG |
| | | GGSGVHSDIQ MTQSPSSLSA SVGDRVTITC STSSSVSYMH WYQQKPGKAP |
| | | KLLIYSTSNL ASGVPSRFSG SGSGTDFTFT ISSLQPEDIA TYYCHQWSSY |
| | | PTFGQGTKVE IKRAAAGSGG SGIIHVKGKH LCPSPLFPGP SKPFWVLVVV |
| | | GGVLACYSLL VTVAFIIFWV RSKRSRLLHS DYMNMTPRRP GPTRKHYQPY |
| | | APPRDFAAYR SKKVAKKPTN KAPHPKQEPQ EINFPDDLPG SNTAAPVQET |
| | | LHGCQPVTQE DGKESRISVQ ERQ |
| 178 | GM-CSF_ | MWLQSLLLLG TVACSISQLQ ESGPGLVRPS QTLSLTCTVS GFTISSGYSW |
| | BW431/26_ | HWVRQPPGRG LEWIGYIQYS GITNYNPSLK SRVTMLVDTS KNQFSLRLSS |
| | spCD28(trun)_ | VTAADTAVYY CAREDYDYHW YFDVWGQGSL VTVSSGGGGS GGGGSGGGGS |
| | CD28_CD40 | GVHSDIQMTQ SPSSLSASVG DRVTITCSTS SSVSYMHWYQ QKPGKAPKLL |
| | | IYSTSNLASG VPSRFSGSGS GTDFTFTISS LQPEDIATYY CHQWSSYPTF |
| | | GQGTKVEIKR AAAGSGGSGI IHVKGKHLCP SPLFPGPSKP FWVLVVVGGV |
| | | LACYSLLVTV AFIIFWVRSK RSRLLHSDYM NMTPRRPGPT RKHYQPYAPP |
| | | RDFAAYRSKK VAKKPTNKAP HPKQEPQEIN FPDDLPGSNT AAPVQETLHG |
| | | CQPVTQEDGK ESRISVQERQ |
| 179 | hIgGk-VIII_ | MEAPAQLLFL LLLWLPDTTR QLQESGPGLV RPSQTLSLTC TVSGFTISSG |
| | BW431/26_ | YSWHWVRQPP GRGLEWIGYI QYSGITNYNP SLKSRVTMLV DTSKNQFSLR |
| | spCD28(trun)_ | LSSVTAADTA VYYCAREDYD YHWYFDVWGQ GSLVTVSSGG GGSGGGGSGG |
| | CD28_CD40 | GGSGVHSDIQ MTQSPSSLSA SVGDRVTITC STSSSVSYMH WYQQKPGKAP |
| | | KLLIYSTSNL ASGVPSRFSG SGSGTDFTFT ISSLQPEDIA TYYCHQWSSY |
| | | PTFGQGTKVE IKRAAAGSGG SGIIHVKGKH LCPSPLFPGP SKPFWVLVVV |
| | | GGVLACYSLL VTVAFIIFWV RSKRSRLLHS DYMNMTPRRP GPTRKHYQPY |
| | | APPRDFAAYR SKKVAKKPTN KAPHPKQEPQ EINFPDDLPG SNTAAPVQET |
| | | LHGCQPVTQE DGKESRISVQ ERQ |
| 180 | OSM_HuT84.66_ | MGVLLTQRTL LSLVLALLFP SMASMEVQLV ESGGGLVQPG GSLRLSCAAS |
| | spCD28(trun)_ | GFNIKDTYMH WVRQAPGKGL EWVARIDPAN GNSKYADSVK GRFTISADTS |
| | CD28_CD40 | KNTAYLQMNS LRAEDTAVYY CAPFGYYVSD YAMAYWGQGT LVTVSSGGGG |
| | | SGGGGSGGGG SDIQLTQSPS SLSASVGDRV TITCRAGESV DIFGVGFLHW |
| | | YQQKPGKAPK LLIYRASNLE SGVPSRFSGS GSRTDFTLTI SSLQPEDFAT |
| | | YYCQQTNEDP YTFGQGTKVE IKAAAGSGGS GIIHVKGKHL CPSPLFPGPS |
| | | KPFWVLVVVG GVLACYSLLV TVAFIIFWVR SKRSRLLHSD YMNMTPRRPG |
| | | PTRKHYQPYA PPRDFAAYRS KKVAKKPTNK APHPKQEPQE INFPDDLPGS |
| | | NTAAPVQETL HGCQPVTQED GKESRISVQE RQ |
| 181 | CD8a_HuT84.66_ | MALPVTALLL PLALLLHAAR PEVQLVESGG GLVQPGGSLR LSCAASGFNI |
| | spCD28(trun)_ | KDTYMHWVRQ APGKGLEWVA RIDPANGNSK YADSVKGRFT ISADTSKNTA |
| | CD28_CD40 | YLQMNSLRAE DTAVYYCAPF GYYVSDYAMA YWGQGTLVTV SSGGGGSGGG |
| | | GSGGGGSDIQ LTQSPSSLSA SVGDRVTITC RAGESVDIFG VGFLHWYQQK |
| | | PGKAPKLLIY RASNLESGVP SRFSGSGSRT DFTLTISSLQ PEDFATYYCQ |
| | | QTNEDPYTFG QGTKVEIKAA AGSGGSGIIH VKGKHLCPSP LFPGPSKPFW |
| | | VLVVVGGVLA CYSLLVTVAF IIFWVRSKRS RLLHSDYMNM TPRRPGPTRK |
| | | HYQPYAPPRD FAAYRSKKVA KKPTNKAPHP KQEPQEINFP DDLPGSNTAA |
| | | PVQETLHGCQ PVTQEDGKES RISVQERQ |
| 182 | CD2_HuT84.66_ | MSFPCKFVAS FLLIFNVSSK GAVSEVQLVE SGGGLVQPGG SLRLSCAASG |
| | spCD28(trun)_ | FNIKDTYMHW VRQAPGKGLE WVARIDPANG NSKYADSVKG RFTISADTSK |
| | CD28_CD40 | NTAYLQMNSL RAEDTAVYYC APFGYYVSDY AMAYWGQGTL VTVSSGGGGS |
| | | GGGGSGGGGS DIQLTQSPSS LSASVGDRVT ITCRAGESVD IFGVGFLHWY |
| | | QQKPGKAPKL LIYRASNLES GVPSRFSGSG SRTDFTLTIS SLQPEDFATY |
| | | YCQQTNEDPY TFGQGTKVEI KAAAGSGGSG IIHVKGKHLC PSPLFPGPSK |
| | | PFWVLVVVGG VLACYSLLVT VAFIIFWVRS KRSRLLHSDY MNMTPRRPGP |
| | | TRKHYQPYAP PRDFAAYRSK KVAKKPTNKA PHPKQEPQEI NFPDDLPGSN |
| | | TAAPVQETLH GCQPVTQEDG KESRISVQER Q |
| 183 | IL2_HuT84.66_ | MYRMQLLSCI ALSLALVTNS EVQLVESGGG LVQPGGSLRL SCAASGFNIK |
| | spCD28(trun)_ | DTYMHWVRQA PGKGLEWVAR IDPANGNSKY ADSVKGRFTI SADTSKNTAY |
| | CD28_CD40 | LQMNSLRAED TAVYYCAPFG YYVSDYAMAY WGQGTLVTVS SGGGGSGGGG |
| | | SGGGGSDIQL TQSPSSLSAS VGDRVTITCR AGESVDIFGV GFLHWYQQKP |
| | | GKAPKLLIYR ASNLESGVPS RFSGSGSRTD FTLTISSLQP EDFATYYCQQ |
| | | TNEDPYTFGQ GTKVEIKAAA GSGGSGIIHV KGKHLCPSPL FPGPSKPFWV |
| | | LVVVGGVLAC YSLLVTVAFI IFWVRSKRSR LLHSDYMNMT PRRPGPTRKH |
| | | YQPYAPPRDF AAYRSKKVAK KPTNKAPHPK QEPQEINFPD DLPGSNTAAP |
| | | VQETLHGCQP VTQEDGKESR ISVQERQ |
| 184 | GM-CSF_ | MWLQSLLLLG TVACSISEVQ LVESGGGLVQ PGGSLRLSCA ASGFNIKDTY |
| | HuT84.66_ | MHWVRQAPGK GLEWVARIDP ANGNSKYADS VKGRFTISAD TSKNTAYLQM |
| | spCD28(trun)_ | NSLRAEDTAV YYCAPFGYYV SDYAMAYWGQ GTLVTVSSGG GGSGGGGSGG |
| | CD28_CD40 | GGSDIQLTQS PSSLSASVGD RVTITCRAGE SVDIFGVGFL HWYQQKPGKA |
| | | PKLLIYRASN LESGVPSRFS GSGSRTDFTL TISSLQPEDF ATYYCQQTNE |
| | | DPYTFGQGTK VEIKAAAGSG GSGIIHVKGK HLCPSPLFPG PSKPFWVLVV |
| | | VGGVLACYSL LVTVAFIIFW VRSKRSRLLH SDYMNMTPRR PGPTRKHYQP |
| | | YAPPRDFAAY RSKKVAKKPT NKAPHPKQEP QEINFPDDLP GSNTAAPVQE |
| | | TLHGCQPVTQ EDGKESRISV QERQ |
| 185 | hIgGk- | MEAPAQLLFL LLLWLPDTTR EVQLVESGGG LVQPGGSLRL SCAASGFNIK |
| | VIII_HuT84.66_ | DTYMHWVRQA PGKGLEWVAR IDPANGNSKY ADSVKGRFTI SADTSKNTAY |
| | spCD28(trun)_ | LQMNSLRAED TAVYYCAPFG YYVSDYAMAY WGQGTLVTVS SGGGGSGGGG |
| | CD28_CD40 | SGGGGSDIQL TQSPSSLSAS VGDRVTITCR AGESVDIFGV GFLHWYQQKP |
| | | GKAPKLLIYR ASNLESGVPS RFSGSGSRTD FTLTISSLQP EDFATYYCQQ |
| | | TNEDPYTFGQ GTKVEIKAAA GSGGSGIIHV KGKHLCPSPL FPGPSKPFWV |
| | | LVVVGGVLAC YSLLVTVAFI IFWVRSKRSR LLHSDYMNMT PRRPGPTRKH |
| | | YQPYAPPRDF AAYRSKKVAK KPTNKAPHPK QEPQEINFPD DLPGSNTAAP |
| | | VQETLHGCQP VTQEDGKESR ISVQERQ |
| 186 | SS1 | QVQLQQSGPE LEKPGASVKL SCKASGYSFT GYTMNWVKQS HGKSLEWIGL |
| | | ITPYNGASSY NQKFRGKATL TVDKSSSTAY MDLLSLTSED SAVYFCARGG |
| | | YDGRGFDYWG QGTTVTVSSG GGGSGGGGSG GGGSDIELTQ SPAIMSASPG |
| | | EKVTMTCSAS SSVSYMHWYQ QKSGTSPKRW IYDTSKLASG VPGRFSGSGS |
| | | GNSYSLTISS VEAEDDATYY CQQWSKHPLT FGAGTKLEIK |
| 187 | M5 | QVQLVQSGAE VEKPGASVKV SCKASGYTFT DYYMHWVRQA PGQGLEWMGW |
| | (humanized SS1) | INPNSGGTNY AQKFQGRVTM TRDTSISTAY MELSRLRSDD TAVYYCASGW |
| | | DFDYWGQGTL VTVSSGGGGS GGGGSGGGGS DIVMTQSPSS LSASVGDRVT |
| | | ITCRASQSIR YYLSWYQQKP GKAPKLLIYT ASILQNGVPS RFSGSGSGTD |
| | | FTLTISSLQP EDFATYYCLQ TYTTPDFGPG TKVEIK |
| 188 | HN1 | QVQLVQSGAE VKRPGASVQV SCRASGYSIN TYYMQWVRQA PGAGLEWMGV |
| | | INPSGVTSYA QKFQGRVTLT NDTSTNTVYM QLNSLTSADT AVYYCARWAL |
| | | WGDFGMDVWG KGTLVTVSSG GGGSGGGGSG GGGSDIQMTQ SPSTLSASIG |
| | | DRVTITCRAS EGIYHWLAWY QQKPGKAPKL LIYKASSLAS GAPSRFSGSG |
| | | SGTDFTLTIS SLQPDDFATY YCQQYSNYPL TFGGGTKLEI K |
| 189 | M912 | QVQLQESGPG LVKPSETLSL TCTVSGGSVS SGSYYWSWIR QPPGKGLEWI |
| | | GYIYYSGSTN YNPSLKSRVT ISVDTSKNQF SLKLSSVTAA DTAVYYCARE |
| | | GKNGAFDIWG QGTMVTVSSG GGGSGGGGSG GGGSDIQMTQ SPSSLSASVG |
| | | DRVTITCRAS QSISSYLNWY QQKPGKAPKL LIYAASSLQS GVPSGFSGSG |
| | | SGTDFTLTIS SLQPEDFATY YCQQSYSTPL TFGGGTKVEI K |
| 190 | HuYP218 | EVQLVESGGG LVQPGGSLRL SCAASGFDLG FYFYACWVRQ APGKGLEWVS |
| | | GIYTAGSGST YYASWAKGRF TISRDNSKNT LYLQMNSLRA EDTAVYYCAR |
| | | STANTRSTYY LNLWGQGTLV TVSSGGGGSG GGGSGGGGSD IQMTQSPSSL |
| | | SASVGDRVTI TCQASQRISS YLSWYQQKPG KVPKLLIYGA STLASGVPSR |
| | | FSGSGSGTDF TLTISSLQPE DVATYYCQSY AYFDSNNWHA FGGGTKVEI |
| 191 | P4 | QVQLQQSGPG LVTPSQTLSL TCAISGDSVS SNSATWNWIR QSPSRGLEWL |
| | | GRTYYRSKWY NDYAVSVKSR MSINPDTSKN QFSLQLNSVT PEDTAVYYCA |
| | | RGMMTYYYGM DVWGQGTTVT VSSGGGGSGG GGSGGGGSQP VLTQSSSLSA |
| | | SPGASASLTC TLRSGINVGP YRIYWYQQKP GSPPQYLLNY KSDSDKQQGS |
| | | GVPSRFSGSK DASANAGVLL ISGLRSEDEA DYYCMIWHSS AAVFGGGTQL |
| | | TVLS |
| 192 | OSM_SS1_ | MGVLLTQRTL LSLVLALLFP SMASMQVQLQ QSGPELEKPG ASVKLSCKAS |
| | spCD28_ | GYSFTGYTMN WVKQSHGKSL EWIGLITPYN GASSYNQKFR GKATLTVDKS |
| | CD28_CD40 | SSTAYMDLLS LTSEDSAVYF CARGGYDGRG FDYWGQGTTV TVSSGGGGSG |
| | CTP224 | GGGSGGGGSD IELTQSPAIM SASPGEKVTM TCSASSSVSY MHWYQQKSGT |
| | | SPKRWIYDTS KLASGVPGRF SGSGSGNSYS LTISSVEAED DATYYCQQWS |
| | | KHPLTFGAGT KLEIKAAAGS GGSGILVKQS PMLVAYDNAV NLSCKYSYNL |
| | | FSREFRASLH KGLDSAVEVC VVYGNYSQQL QVYSKTGFNC DGKLGNESVT |
| | | FYLQNLYVNQ TDIYFCKIEV MYPPPYLDNE KSNGTIIHVK GKHLCPSPLF |
| | | PGPSKPFWVL VVVGGVLACY SLLVTVAFII FWVRSKRSRL LHSDYMNMTP |
| | | RRPGPTRKHY QPYAPPRDFA AYRSKKVAKK PTNKAPHPKQ EPQEINFPDD |
| | | LPGSNTAAPV QETLHGCQPV TQEDGKESRI SVQERQ |
| 193 | CD8a_SS1_ | MALPVTALLL PLALLLHAAR PQVQLQQSGP ELEKPGASVK LSCKASGYSF |
| | spCD28_ | TGYTMNWVKQ SHGKSLEWIG LITPYNGASS YNQKFRGKAT LTVDKSSSTA |
| | CD28_CD40 | YMDLLSLTSE DSAVYFCARG GYDGRGFDYW GQGTTVTVSS GGGGSGGGGS |
| | | GGGGSDIELT QSPAIMSASP GEKVTMTCSA SSSVSYMHWY QQKSGTSPKR |
| | | WIYDTSKLAS GVPGRFSGSG SGNSYSLTIS SVEAEDDATY YCQQWSKHPL |
| | | TFGAGTKLEI KAAAGSGGSG ILVKQSPMLV AYDNAVNLSC KYSYNLFSRE |
| | | FRASLHKGLD SAVEVCVVYG NYSQQLQVYS KTGFNCDGKL GNESVTFYLQ |
| | | NLYVNQTDIY FCKIEVMYPP PYLDNEKSNG TIIHVKGKHL CPSPLFPGPS |
| | | KPFWVLVVVG GVLACYSLLV TVAFIIFWVR SKRSRLLHSD YMNMTPRRPG |
| | | PTRKHYQPYA PPRDFAAYRS KKVAKKPTNK APHPKQEPQE INFPDDLPGS |
| | | NTAAPVQETL HGCQPVTQED GKESRISVQE RQ |
| 194 | CD2_SS1_ | MSFPCKFVAS FLLIFNVSSK GAVSQVQLQQ SGPELEKPGA SVKLSCKASG |
| | spCD28_ | YSFTGYTMNW VKQSHGKSLE WIGLITPYNG ASSYNQKFRG KATLTVDKSS |
| | CD28_CD40 | STAYMDLLSL TSEDSAVYFC ARGGYDGRGF DYWGQGTTVT VSSGGGGSGG |
| | | GGSGGGGSDI ELTQSPAIMS ASPGEKVTMT CSASSSVSYM HWYQQKSGTS |
| | | PKRWIYDTSK LASGVPGRFS GSGSGNSYSL TISSVEAEDD ATYYCQQWSK |
| | | HPLTFGAGTK LEIKAAAGSG GSGILVKQSP MLVAYDNAVN LSCKYSYNLF |
| | | SREFRASLHK GLDSAVEVCV VYGNYSQQLQ VYSKTGFNCD GKLGNESVTF |
| | | YLQNLYVNQT DIYFCKIEVM YPPPYLDNEK SNGTIIHVKG KHLCPSPLFP |
| | | GPSKPFWVLV VVGGVLACYS LLVTVAFIIF WVRSKRSRLL HSDYMNMTPR |
| | | RPGPTRKHYQ PYAPPRDFAA YRSKKVAKKP TNKAPHPKQE PQEINFPDDL |
| | | PGSNTAAPVQ ETLHGCQPVT QEDGKESRIS VQERQ |
| 195 | IL2_SS1_ | MYRMQLLSCI ALSLALVTNS QVQLQQSGPE LEKPGASVKL SCKASGYSFT |
| | spCD28_ | GYTMNWVKQS HGKSLEWIGL ITPYNGASSY NQKFRGKATL TVDKSSSTAY |
| | CD28_CD40 | MDLLSLTSED SAVYFCARGG YDGRGFDYWG QGTTVTVSSG GGGSGGGGSG |
| | | GGGSDIELTQ SPAIMSASPG EKVTMTCSAS SSVSYMHWYQ QKSGTSPKRW |
| | | IYDTSKLASG VPGRFSGSGS GNSYSLTISS VEAEDDATYY CQQWSKHPLT |
| | | FGAGTKLEIK AAAGSGGSGI LVKQSPMLVA YDNAVNLSCK YSYNLFSREF |
| | | RASLHKGLDS AVEVCVVYGN YSQQLQVYSK TGFNCDGKLG NESVTFYLQN |
| | | LYVNQTDIYF CKIEVMYPPP YLDNEKSNGT IIHVKGKHLC PSPLFPGPSK |
| | | PFWVLVVVGG VLACYSLLVT VAFIIFWVRS KRSRLLHSDY MNMTPRRPGP |
| | | TRKHYQPYAP PRDFAAYRSK KVAKKPTNKA PHPKQEPQEI NFPDDLPGSN |
| | | TAAPVQETLH GCQPVTQEDG KESRISVQER Q |
| 196 | GM-CSF_SS1_ | MWLQSLLLLG TVACSISQVQ LQQSGPELEK PGASVKLSCK ASGYSFTGYT |
| | spCD28_ | MNWVKQSHGK SLEWIGLITP YNGASSYNQK FRGKATLTVD KSSSTAYMDL |
| | CD28_CD40 | LSLTSEDSAV YFCARGGYDG RGFDYWGQGT TVTVSSGGGG SGGGGSGGGG |
| | | SDIELTQSPA IMSASPGEKV TMTCSASSSV SYMHWYQQKS GTSPKRWIYD |
| | | TSKLASGVPG RFSGSGSGNS YSLTISSVEA EDDATYYCQQ WSKHPLTFGA |
| | | GTKLEIKAAA GSGGSGILVK QSPMLVAYDN AVNLSCKYSY NLFSREFRAS |
| | | LHKGLDSAVE VCVVYGNYSQ QLQVYSKTGF NCDGKLGNES VTFYLQNLYV |
| | | NQTDIYFCKI EVMYPPPYLD NEKSNGTIIH VKGKHLCPSP LFPGPSKPFW |
| | | VLVVVGGVLA CYSLLVTVAF IIFWVRSKRS RLLHSDYMNM TPRRPGPTRK |
| | | HYQPYAPPRD FAAYRSKKVA KKPTNKAPHP KQEPQEINFP DDLPGSNTAA |
| | | PVQETLHGCQ PVTQEDGKES RISVQERQ |
| 197 | hIgGk-VIII_ | MEAPAQLLFL LLLWLPDTTR QVQLQQSGPE LEKPGASVKL SCKASGYSFT |
| | SS1_spCD28_ | GYTMNWVKQS HGKSLEWIGL ITPYNGASSY NQKFRGKATL TVDKSSSTAY |
| | CD28_CD40 | MDLLSLTSED SAVYFCARGG YDGRGFDYWG QGTTVTVSSG GGGSGGGGSG |
| | | GGGSDIELTQ SPAIMSASPG EKVTMTCSAS SSVSYMHWYQ QKSGTSPKRW |
| | | IYDTSKLASG VPGRFSGSGS GNSYSLTISS VEAEDDATYY CQQWSKHPLT |
| | | FGAGTKLEIK AAAGSGGSGI LVKQSPMLVA YDNAVNLSCK YSYNLFSREF |
| | | RASLHKGLDS AVEVCVVYGN YSQQLQVYSK TGFNCDGKLG NESVTFYLQN |
| | | LYVNQTDIYF CKIEVMYPPP YLDNEKSNGT IIHVKGKHLC PSPLFPGPSK |
| | | PFWVLVVVGG VLACYSLLVT VAFIIFWVRS KRSRLLHSDY MNMTPRRPGP |
| | | TRKHYQPYAP PRDFAAYRSK KVAKKPTNKA PHPKQEPQEI NFPDDLPGSN |
| | | TAAPVQETLH GCQPVTQEDG KESRISVQER Q |
| 198 | OSM_SS1_spCD8_ | MGVLLTQRTL LSLVLALLFP SMASMQVOLQ QSGPELEKPG ASVKLSCKAS |
| | CD28_CD40 | GYSFTGYTMN WVKQSHGKSL EWIGLITPYN GASSYNQKFR GKATLTVDKS |
| | CTP236 | SSTAYMDLLS LTSEDSAVYF CARGGYDGRG FDYWGQGTTV TVSSGGGGSG |
| | | GGGSGGGGSD IELTQSPAIM SASPGEKVTM TCSASSSVSY MHWYQQKSGT |
| | | SPKRWIYDTS KLASGVPGRF SGSGSGNSYS LTISSVEAED DATYYCQQWS |
| | | KHPLTFGAGT KLEIKAAAGS GGSGFVPVFL PAKPTTTPAP RPPTPAPTIA |
| | | SQPLSLRPEA CRPAAGGAVH TRGLDFACDI YIWAPLAGTC GVLLLSLVIT |
| | | LYCNHRNRSK RSRLLHSDYM NMTPRRPGPT RKHYQPYAPP RDFAAYRSKK |
| | | VAKKPTNKAP HPKQEPQEIN FPDDLPGSNT AAPVQETLHG CQPVTQEDGK |
| | | ESRISVQERQ |
| 199 | CD8a_SS1_ | MALPVTALLL PLALLLHAAR PQVQLQQSGP ELEKPGASVK LSCKASGYSF |
| | spCD8_ | TGYTMNWVKQ SHGKSLEWIG LITPYNGASS YNQKFRGKAT LTVDKSSSTA |
| | CD28_CD40 | YMDLLSLTSE DSAVYFCARG GYDGRGFDYW GQGTTVTVSS GGGGSGGGGS |
| | | GGGGSDIELT QSPAIMSASP GEKVTMTCSA SSSVSYMHWY QQKSGTSPKR |
| | | WIYDTSKLAS GVPGRFSGSG SGNSYSLTIS SVEAEDDATY YCQQWSKHPL |
| | | TFGAGTKLEI KAAAGSGGSG FVPVFLPAKP TTTPAPRPPT PAPTIASQPL |
| | | SLRPEACRPA AGGAVHTRGL DFACDIYIWA PLAGTCGVLL LSLVITLYCN |
| | | HRNRSKRSRL LHSDYMNMTP RRPGPTRKHY QPYAPPRDFA AYRSKKVAKK |
| | | PTNKAPHPKQ EPQEINFPDD LPGSNTAAPV QETLHGCQPV TQEDGKESRI |
| | | SVQERQ |
| 200 | CD2_SS1_spCD8_ | MSFPCKFVAS FLLIFNVSSK GAVSQVQLQQ SGPELEKPGA SVKLSCKASG |
| | CD28_CD40 | YSFTGYTMNW VKQSHGKSLE WIGLITPYNG ASSYNQKFRG KATLTVDKSS |
| | | STAYMDLLSL TSEDSAVYFC ARGGYDGRGF DYWGQGTTVT VSSGGGGSGG |
| | | GGSGGGGSDI ELTQSPAIMS ASPGEKVTMT CSASSSVSYM HWYQQKSGTS |
| | | PKRWIYDTSK LASGVPGRFS GSGSGNSYSL TISSVEAEDD ATYYCQQWSK |
| | | HPLTFGAGTK LEIKAAAGSG GSGFVPVFLP AKPTTTPAPR PPTPAPTIAS |
| | | QPLSLRPEAC RPAAGGAVHT RGLDFACDIY IWAPLAGTCG VLLLSLVITL |
| | | YCNHRNRSKR SRLLHSDYMN MTPRRPGPTR KHYQPYAPPR DFAAYRSKKV |
| | | AKKPTNKAPH PKQEPQEINF PDDLPGSNTA APVQETLHGC QPVTQEDGKE |
| | | SRISVQERQ |
| 201 | IL2_SS1_spCD8_ | MYRMQLLSCI ALSLALVTNS QVQLQQSGPE LEKPGASVKL SCKASGYSFT |
| | CD28_CD40 | GYTMNWVKQS HGKSLEWIGL ITPYNGASSY NQKFRGKATL TVDKSSSTAY |
| | | MDLLSLTSED SAVYFCARGG YDGRGFDYWG QGTTVTVSSG GGGSGGGGSG |
| | | GGGSDIELTQ SPAIMSASPG EKVTMTCSAS SSVSYMHWYQ QKSGTSPKRW |
| | | IYDTSKLASG VPGRFSGSGS GNSYSLTISS VEAEDDATYY CQQWSKHPLT |
| | | FGAGTKLEIK AAAGSGGSGF VPVFLPAKPT TTPAPRPPTP APTIASQPLS |
| | | LRPEACRPAA GGAVHTRGLD FACDIYIWAP LAGTCGVLLL SLVITLYCNH |
| | | RNRSKRSRLL HSDYMNMTPR RPGPTRKHYQ PYAPPRDFAA YRSKKVAKKP |
| | | TNKAPHPKQE PQEINFPDDL PGSNTAAPVQ ETLHGCQPVT QEDGKESRIS |
| | | VQERQ |
| 202 | GM-CSF_SS1_ | MWLQSLLLLG TVACSISQVQ LQQSGPELEK PGASVKLSCK ASGYSFTGYT |
| | spCD8_ | MNWVKQSHGK SLEWIGLITP YNGASSYNQK FRGKATLTVD KSSSTAYMDL |
| | CD28_CD40 | LSLTSEDSAV YFCARGGYDG RGFDYWGQGT TVTVSSGGGG SGGGGSGGGG |
| | | SDIELTQSPA IMSASPGEKV TMTCSASSSV SYMHWYQQKS GTSPKRWIYD |
| | | TSKLASGVPG RFSGSGSGNS YSLTISSVEA EDDATYYCQQ WSKHPLTFGA |
| | | GTKLEIKAAA GSGGSGFVPV FLPAKPTTTP APRPPTPAPT IASQPLSLRP |
| | | EACRPAAGGA VHTRGLDFAC DIYIWAPLAG TCGVLLLSLV ITLYCNHRNR |
| | | SKRSRLLHSD YMNMTPRRPG PTRKHYQPYA PPRDFAAYRS KKVAKKPTNK |
| | | APHPKQEPQE INFPDDLPGS NTAAPVQETL HGCQPVTQED GKESRISVQE |
| | | RQ |
| 203 | hIgGk-VIII_ | MEAPAQLLFL LLLWLPDTTR QVQLQQSGPE LEKPGASVKL SCKASGYSFT |
| | SS1_spCD8_ | GYTMNWVKQS HGKSLEWIGL ITPYNGASSY NQKFRGKATL TVDKSSSTAY |
| | CD28_CD40 | MDLLSLTSED SAVYFCARGG YDGRGFDYWG QGTTVTVSSG GGGSGGGGSG |
| | | GGGSDIELTQ SPAIMSASPG EKVTMTCSAS SSVSYMHWYQ QKSGTSPKRW |
| | | IYDTSKLASG VPGRFSGSGS GNSYSLTISS VEAEDDATYY CQQWSKHPLT |
| | | FGAGTKLEIK AAAGSGGSGF VPVFLPAKPT TTPAPRPPTP APTIASQPLS |
| | | LRPEACRPAA GGAVHTRGLD FACDIYIWAP LAGTCGVLLL SLVITLYCNH |
| | | RNRSKRSRLL HSDYMNMTPR RPGPTRKHYQ PYAPPRDFAA YRSKKVAKKP |
| | | TNKAPHPKQE PQEINFPDDL PGSNTAAPVQ ETLHGCQPVT QEDGKESRIS |
| | | VQERQ |
| 204 | OSM_SS1_ | MGVLLTQRTL LSLVLALLFP SMASMQVQLQ QSGPELEKPG ASVKLSCKAS |
| | CD28TM_ | GYSFTGYTMN WVKQSHGKSL EWIGLITPYN GASSYNQKFR GKATLTVDKS |
| | CD28_CD40 | SSTAYMDLLS LTSEDSAVYF CARGGYDGRG FDYWGQGTTV TVSSGGGGSG |
| | | GGGSGGGGSD IELTQSPAIM SASPGEKVTM TCSASSSVSY MHWYQQKSGT |
| | | SPKRWIYDTS KLASGVPGRF SGSGSGNSYS LTISSVEAED DATYYCQQWS |
| | | KHPLTFGAGT KLEIKAAAGS GGSGFWVLVV VGGVLACYSL LVTVAFIIFW |
| | | VRSKRSRLLH SDYMNMTPRR PGPTRKHYQP YAPPRDFAAY RSKKVAKKPT |
| | | NKAPHPKQEP QEINFPDDLP GSNTAAPVQE TLHGCQPVTQ EDGKESRISV |
| | | QERQ |
| 205 | CD8a_SS1_ | MALPVTALLL PLALLLHAAR PQVQLQQSGP ELEKPGASVK LSCKASGYSF |
| | CD28TM_ | TGYTMNWVKQ SHGKSLEWIG LITPYNGASS YNQKFRGKAT LTVDKSSSTA |
| | CD28_CD40 | YMDLLSLTSE DSAVYFCARG GYDGRGFDYW GQGTTVTVSS GGGGSGGGGS |
| | | GGGGSDIELT QSPAIMSASP GEKVTMTCSA SSSVSYMHWY QQKSGTSPKR |
| | | WIYDTSKLAS GVPGRFSGSG SGNSYSLTIS SVEAEDDATY YCQQWSKHPL |
| | | TFGAGTKLEI KAAAGSGGSG FWVLVVVGGV LACYSLLVTV AFIIFWVRSK |
| | | RSRLLHSDYM NMTPRRPGPT RKHYQPYAPP RDFAAYRSKK VAKKPTNKAP |
| | | HPKQEPQEIN FPDDLPGSNT AAPVQETLHG CQPVTQEDGK ESRISVQERQ |
| 206 | CD2_SS1_ | MSFPCKFVAS FLLIFNVSSK GAVSQVQLQQ SGPELEKPGA SVKLSCKASG |
| | CD28TM_ | YSFTGYTMNW VKQSHGKSLE WIGLITPYNG ASSYNQKFRG KATLTVDKSS |
| | CD28_CD40 | STAYMDLLSL TSEDSAVYFC ARGGYDGRGF DYWGQGTTVT VSSGGGGSGG |
| | | GGSGGGGSDI ELTQSPAIMS ASPGEKVTMT CSASSSVSYM HWYQQKSGTS |
| | | PKRWIYDTSK LASGVPGRFS GSGSGNSYSL TISSVEAEDD ATYYCQQWSK |
| | | HPLTFGAGTK LEIKAAAGSG GSGFWVLVVV GGVLACYSLL VTVAFIIFWV |
| | | RSKRSRLLHS DYMNMTPRRP GPTRKHYQPY APPRDFAAYR SKKVAKKPTN |
| | | KAPHPKQEPQ EINFPDDLPG SNTAAPVQET LHGCQPVTQE DGKESRISVQ |
| | | ERQ |
| 207 | IL2_SS1_ | MYRMQLLSCI ALSLALVTNS QVQLQQSGPE LEKPGASVKL SCKASGYSFT |
| | CD28TM_ | GYTMNWVKQS HGKSLEWIGL ITPYNGASSY NQKFRGKATL TVDKSSSTAY |
| | CD28_CD40 | MDLLSLTSED SAVYFCARGG YDGRGFDYWG QGTTVTVSSG GGGSGGGGSG |
| | | GGGSDIELTQ SPAIMSASPG EKVTMTCSAS SSVSYMHWYQ QKSGTSPKRW |
| | | IYDTSKLASG VPGRFSGSGS GNSYSLTISS VEAEDDATYY CQQWSKHPLT |
| | | FGAGTKLEIK AAAGSGGSGF WVLVVVGGVL ACYSLLVTVA FIIFWVRSKR |
| | | SRLLHSDYMN MTPRRPGPTR KHYQPYAPPR DFAAYRSKKV AKKPTNKAPH |
| | | PKQEPQEINF PDDLPGSNTA APVQETLHGC QPVTQEDGKE SRISVQERQ |
| 208 | GM-CSF_SS1_ | MWLQSLLLLG TVACSISQVQ LQQSGPELEK PGASVKLSCK ASGYSFTGYT |
| | CD28TM_ | MNWVKQSHGK SLEWIGLITP YNGASSYNQK FRGKATLTVD KSSSTAYMDL |
| | CD28_CD40 | LSLTSEDSAV YFCARGGYDG RGFDYWGQGT TVTVSSGGGG SGGGGSGGGG |
| | | SDIELTQSPA IMSASPGEKV TMTCSASSSV SYMHWYQQKS GTSPKRWIYD |
| | | TSKLASGVPG RFSGSGSGNS YSLTISSVEA EDDATYYCQQ WSKHPLTFGA |
| | | GTKLEIKAAA GSGGSGFWVL VVVGGVLACY SLLVTVAFII FWVRSKRSRL |
| | | LHSDYMNMTP RRPGPTRKHY QPYAPPRDFA AYRSKKVAKK PTNKAPHPKQ |
| | | EPQEINFPDD LPGSNTAAPV QETLHGCQPV TQEDGKESRI SVQERQ |
| 209 | hIgGk-VIII_ | MEAPAQLLFL LLLWLPDTTR QVQLQQSGPE LEKPGASVKL SCKASGYSFT |
| | SS1_CD28TM_ | GYTMNWVKQS HGKSLEWIGL ITPYNGASSY NQKFRGKATL TVDKSSSTAY |
| | CD28_CD40 | MDLLSLTSED SAVYFCARGG YDGRGFDYWG QGTTVTVSSG GGGSGGGGSG |
| | | GGGSDIELTQ SPAIMSASPG EKVTMTCSAS SSVSYMHWYQ QKSGTSPKRW |
| | | IYDTSKLASG VPGRFSGSGS GNSYSLTISS VEAEDDATYY CQQWSKHPLT |
| | | FGAGTKLEIK AAAGSGGSGF WVLVVVGGVL ACYSLLVTVA FIIFWVRSKR |
| | | SRLLHSDYMN MTPRRPGPTR KHYQPYAPPR DFAAYRSKKV AKKPTNKAPH |
| | | PKQEPQEINF PDDLPGSNTA APVQETLHGC QPVTQEDGKE SRISVQERQ |
| 210 | OSM_M5_ | MGVLLTQRTL LSLVLALLFP SMASMQVQLV QSGAEVEKPG ASVKVSCKAS |
| | spCD28_ | GYTFTDYYMH WVRQAPGQGL EWMGWINPNS GGTNYAQKFQ GRVTMTRDTS |
| | CD28_CD40 | ISTAYMELSR LRSDDTAVYY CASGWDFDYW GQGTLVTVSS GGGGSGGGGS |
| | CTP225 | GGGGSDIVMT QSPSSLSASV GDRVTITCRA SQSIRYYLSW YQQKPGKAPK |
| | | LLIYTASILQ NGVPSRFSGS GSGTDFTLTI SSLQPEDFAT YYCLQTYTTP |
| | | DFGPGTKVEI KAAAGSGGSG ILVKQSPMLV AYDNAVNLSC KYSYNLFSRE |
| | | FRASLHKGLD SAVEVCVVYG NYSQQLQVYS KTGFNCDGKL GNESVTFYLQ |
| | | NLYVNQTDIY FCKIEVMYPP PYLDNEKSNG TIIHVKGKHL CPSPLFPGPS |
| | | KPFWVLVVVG GVLACYSLLV TVAFIIFWVR SKRSRLLHSD YMNMTPRRPG |
| | | PTRKHYQPYA PPRDFAAYRS KKVAKKPTNK APHPKQEPQE INFPDDLPGS |
| | | NTAAPVQETL HGCQPVTQED GKESRISVQE RQ |
| 211 | CD8a_M5_ | MALPVTALLL PLALLLHAAR PQVQLVQSGA EVEKPGASVK VSCKASGYTF |
| | spCD28_ | TDYYMHWVRQ APGQGLEWMG WINPNSGGTN YAQKFQGRVT MTRDTSISTA |
| | CD28_CD40 | YMELSRLRSD DTAVYYCASG WDFDYWGQGT LVTVSSGGGG SGGGGSGGGG |
| | | SDIVMTQSPS SLSASVGDRV TITCRASQSI RYYLSWYQQK PGKAPKLLIY |
| | | TASILQNGVP SRFSGSGSGT DFTLTISSLQ PEDFATYYCL QTYTTPDFGP |
| | | GTKVEIKAAA GSGGSGILVK QSPMLVAYDN AVNLSCKYSY NLFSREFRAS |
| | | LHKGLDSAVE VCVVYGNYSQ QLQVYSKTGF NCDGKLGNES VTFYLQNLYV |
| | | NQTDIYFCKI EVMYPPPYLD NEKSNGTIIH VKGKHLCPSP LFPGPSKPFW |
| | | VLVVVGGVLA CYSLLVTVAF IIFWVRSKRS RLLHSDYMNM TPRRPGPTRK |
| | | HYQPYAPPRD FAAYRSKKVA KKPTNKAPHP KQEPQEINFP DDLPGSNTAA |
| | | PVQETLHGCQ PVTQEDGKES RISVQERQ |
| 212 | CD2_M5_ | MSFPCKFVAS FLLIFNVSSK GAVSQVQLVQ SGAEVEKPGA SVKVSCKASG |
| | spCD28_ | YTFTDYYMHW VRQAPGQGLE WMGWINPNSG GTNYAQKFQG RVTMTRDTSI |
| | CD28_CD40 | STAYMELSRL RSDDTAVYYC ASGWDFDYWG QGTLVTVSSG GGGSGGGGSG |
| | | GGGSDIVMTQ SPSSLSASVG DRVTITCRAS QSIRYYLSWY QQKPGKAPKL |
| | | LIYTASILQN GVPSRFSGSG SGTDFTLTIS SLQPEDFATY YCLQTYTTPD |
| | | FGPGTKVEIK AAAGSGGSGI LVKQSPMLVA YDNAVNLSCK YSYNLFSREF |
| | | RASLHKGLDS AVEVCVVYGN YSQQLQVYSK TGFNCDGKLG NESVTFYLQN |
| | | LYVNQTDIYF CKIEVMYPPP YLDNEKSNGT IIHVKGKHLC PSPLFPGPSK |
| | | PFWVLVVVGG VLACYSLLVT VAFIIFWVRS KRSRLLHSDY MNMTPRRPGP |
| | | TRKHYQPYAP PRDFAAYRSK KVAKKPTNKA PHPKQEPQEI NFPDDLPGSN |
| | | TAAPVQETLH GCQPVTQEDG KESRISVQER Q |
| 213 | IL2_M5_ | MYRMQLLSCI ALSLALVTNS QVQLVQSGAE VEKPGASVKV SCKASGYTFT |
| | spCD28_ | DYYMHWVRQA PGQGLEWMGW INPNSGGTNY AQKFQGRVTM TRDTSISTAY |
| | CD28_CD40 | MELSRLRSDD TAVYYCASGW DFDYWGQGTL VTVSSGGGGS GGGGSGGGGS |
| | | DIVMTQSPSS LSASVGDRVT ITCRASQSIR YYLSWYQQKP GKAPKLLIYT |
| | | ASILQNGVPS RFSGSGSGTD FTLTISSLQP EDFATYYCLQ TYTTPDFGPG |
| | | TKVEIKAAAG SGGSGILVKQ SPMLVAYDNA VNLSCKYSYN LFSREFRASL |
| | | HKGLDSAVEV CVVYGNYSQQ LQVYSKTGFN CDGKLGNESV TFYLQNLYVN |
| | | QTDIYFCKIE VMYPPPYLDN EKSNGTIIHV KGKHLCPSPL FPGPSKPFWV |
| | | LVVVGGVLAC YSLLVTVAFI IFWVRSKRSR LLHSDYMNMT PRRPGPTRKH |
| | | YQPYAPPRDF AAYRSKKVAK KPTNKAPHPK QEPQEINFPD DLPGSNTAAP |
| | | VQETLHGCQP VTQEDGKESR ISVQERQ |
| 214 | GM-CSF_M5_ | MWLQSLLLLG TVACSISQVQ LVQSGAEVEK PGASVKVSCK ASGYTFTDYY |
| | spCD28_ | MHWVRQAPGQ GLEWMGWINP NSGGTNYAQK FQGRVTMTRD TSISTAYMEL |
| | CD28_CD40 | SRLRSDDTAV YYCASGWDFD YWGQGTLVTV SSGGGGSGGG GSGGGGSDIV |
| | | MTQSPSSLSA SVGDRVTITC RASQSIRYYL SWYQQKPGKA PKLLIYTASI |
| | | LQNGVPSRFS GSGSGTDFTL TISSLQPEDF ATYYCLQTYT TPDFGPGTKV |
| | | EIKAAAGSGG SGILVKQSPM LVAYDNAVNL SCKYSYNLFS REFRASLHKG |
| | | LDSAVEVCVV YGNYSQQLQV YSKTGFNCDG KLGNESVTFY LQNLYVNQTD |
| | | IYFCKIEVMY PPPYLDNEKS NGTIIHVKGK HLCPSPLFPG PSKPFWVLVV |
| | | VGGVLACYSL LVTVAFIIFW VRSKRSRLLH SDYMNMTPRR PGPTRKHYQP |
| | | YAPPRDFAAY RSKKVAKKPT NKAPHPKQEP QEINFPDDLP GSNTAAPVQE |
| | | TLHGCQPVTQ EDGKESRISV QERQ |
| 215 | hIgGk-VIII_ | MEAPAQLLFL LLLWLPDTTR QVQLVQSGAE VEKPGASVKV SCKASGYTFT |
| | M5_ | DYYMHWVRQA PGQGLEWMGW INPNSGGTNY AQKFQGRVTM TRDTSISTAY |
| | spCD28_ | MELSRLRSDD TAVYYCASGW DFDYWGQGTL VTVSSGGGGS GGGGSGGGGS |
| | CD28_CD40 | DIVMTQSPSS LSASVGDRVT ITCRASQSIR YYLSWYQQKP GKAPKLLIYT |
| | | ASILQNGVPS RFSGSGSGTD FTLTISSLQP EDFATYYCLQ TYTTPDFGPG |
| | | TKVEIKAAAG SGGSGILVKQ SPMLVAYDNA VNLSCKYSYN LFSREFRASL |
| | | HKGLDSAVEV CVVYGNYSQQ LQVYSKTGFN CDGKLGNESV TFYLQNLYVN |
| | | QTDIYFCKIE VMYPPPYLDN EKSNGTIIHV KGKHLCPSPL FPGPSKPFWV |
| | | LVVVGGVLAC YSLLVTVAFI IFWVRSKRSR LLHSDYMNMT PRRPGPTRKH |
| | | YQPYAPPRDF AAYRSKKVAK KPTNKAPHPK QEPQEINFPD DLPGSNTAAP |
| | | VQETLHGCQP VTQEDGKESR ISVQERQ |
| 216 | OSM_M5_spCD8_ | MGVLLTQRTL LSLVLALLFP SMASMQVQLV QSGAEVEKPG ASVKVSCKAS |
| | CD28_CD40 | GYTFTDYYMH WVRQAPGQGL EWMGWINPNS GGTNYAQKFQ GRVTMTRDTS |
| | CTP237 | ISTAYMELSR LRSDDTAVYY CASGWDFDYW GQGTLVTVSS GGGGSGGGGS |
| | | GGGGSDIVMT QSPSSLSASV GDRVTITCRA SQSIRYYLSW YQQKPGKAPK |
| | | LLIYTASILQ NGVPSRFSGS GSGTDFTLTI SSLQPEDFAT YYCLQTYTTP |
| | | DFGPGTKVEI KAAAGSGGSG FVPVFLPAKP TTTPAPRPPT PAPTIASQPL |
| | | SLRPEACRPA AGGAVHTRGL DFACDIYIWA PLAGTCGVLL LSLVITLYCN |
| | | HRNRSKRSRL LHSDYMNMTP RRPGPTRKHY QPYAPPRDFA AYRSKKVAKK |
| | | PTNKAPHPKQ EPQEINFPDD LPGSNTAAPV QETLHGCQPV TQEDGKESRI |
| | | SVQERQ |
| 217 | CD8a_M5_spCD8_ | MALPVTALLL PLALLLHAAR PQVQLVQSGA EVEKPGASVK VSCKASGYTF |
| | CD28_CD40 | TDYYMHWVRQ APGQGLEWMG WINPNSGGTN YAQKFQGRVT MTRDTSISTA |
| | | YMELSRLRSD DTAVYYCASG WDFDYWGQGT LVTVSSGGGG SGGGGSGGGG |
| | | SDIVMTQSPS SLSASVGDRV TITCRASQSI RYYLSWYQQK PGKAPKLLIY |
| | | TASILQNGVP SRFSGSGSGT DFTLTISSLQ PEDFATYYCL QTYTTPDFGP |
| | | GTKVEIKAAA GSGGSGFVPV FLPAKPTTTP APRPPTPAPT IASQPLSLRP |
| | | EACRPAAGGA VHTRGLDFAC DIYIWAPLAG TCGVLLLSLV ITLYCNHRNR |
| | | SKRSRLLHSD YMNMTPRRPG PTRKHYQPYA PPRDFAAYRS KKVAKKPTNK |
| | | APHPKQEPQE INFPDDLPGS NTAAPVQETL HGCQPVTQED GKESRISVQE |
| | | RQ |
| 218 | CD2_M5_spCD8_ | MSFPCKFVAS FLLIFNVSSK GAVSQVQLVQ SGAEVEKPGA SVKVSCKASG |
| | CD28_CD40 | YTFTDYYMHW VRQAPGQGLE WMGWINPNSG GTNYAQKFQG RVTMTRDTSI |
| | | STAYMELSRL RSDDTAVYYC ASGWDFDYWG QGTLVTVSSG GGGSGGGGSG |
| | | GGGSDIVMTQ SPSSLSASVG DRVTITCRAS QSIRYYLSWY QQKPGKAPKL |
| | | LIYTASILON GVPSRFSGSG SGTDFTLTIS SLQPEDFATY YCLQTYTTPD |
| | | FGPGTKVEIK AAAGSGGSGF VPVFLPAKPT TTPAPRPPTP APTIASQPLS |
| | | LRPEACRPAA GGAVHTRGLD FACDIYIWAP LAGTCGVLLL SLVITLYCNH |
| | | RNRSKRSRLL HSDYMNMTPR RPGPTRKHYQ PYAPPRDFAA YRSKKVAKKP |
| | | TNKAPHPKQE PQEINFPDDL PGSNTAAPVQ ETLHGCQPVT QEDGKESRIS |
| | | VQERQ |
| 219 | IL2_M5_spCD8_ | MYRMQLLSCI ALSLALVTNS QVQLVQSGAE VEKPGASVKV SCKASGYTFT |
| | CD28_CD40 | DYYMHWVRQA PGQGLEWMGW INPNSGGTNY AQKFQGRVTM TRDTSISTAY |
| | | MELSRLRSDD TAVYYCASGW DFDYWGQGTL VTVSSGGGGS GGGGSGGGGS |
| | | DIVMTQSPSS LSASVGDRVT ITCRASQSIR YYLSWYQQKP GKAPKLLIYT |
| | | ASILQNGVPS RFSGSGSGTD FTLTISSLQP EDFATYYCLQ TYTTPDFGPG |
| | | TKVEIKAAAG SGGSGFVPVF LPAKPTTTPA PRPPTPAPTI ASQPLSLRPE |
| | | ACRPAAGGAV HTRGLDFACD IYIWAPLAGT CGVLLLSLVI TLYCNHRNRS |
| | | KRSRLLHSDY MNMTPRRPGP TRKHYQPYAP PRDFAAYRSK KVAKKPTNKA |
| | | PHPKQEPQEI NFPDDLPGSN TAAPVQETLH GCQPVTQEDG KESRISVQER |
| | | Q |
| 220 | GM-CSF_M5_ | MWLQSLLLLG TVACSISQVQ LVQSGAEVEK PGASVKVSCK ASGYTFTDYY |
| | spCD8_CD28_CD40 | MHWVRQAPGQ GLEWMGWINP NSGGTNYAQK FQGRVTMTRD TSISTAYMEL |
| | | SRLRSDDTAV YYCASGWDFD YWGQGTLVTV SSGGGGSGGG GSGGGGSDIV |
| | | MTQSPSSLSA SVGDRVTITC RASQSIRYYL SWYQQKPGKA PKLLIYTASI |
| | | LQNGVPSRFS GSGSGTDFTL TISSLQPEDF ATYYCLQTYT TPDFGPGTKV |
| | | EIKAAAGSGG SGFVPVFLPA KPTTTPAPRP PTPAPTIASQ PLSLRPEACR |
| | | PAAGGAVHTR GLDFACDIYI WAPLAGTCGV LLLSLVITLY CNHRNRSKRS |
| | | RLLHSDYMNM TPRRPGPTRK HYQPYAPPRD FAAYRSKKVA KKPTNKAPHP |
| | | KQEPQEINFP DDLPGSNTAA PVQETLHGCQ PVTQEDGKES RISVQERQ |
| 221 | hIgGk-VIII_ | MEAPAQLLFL LLLWLPDTTR QVQLVQSGAE VEKPGASVKV SCKASGYTFT |
| | M5_spCD8_ | DYYMHWVRQA PGQGLEWMGW INPNSGGTNY AQKFQGRVTM TRDTSISTAY |
| | CD28_CD40 | MELSRLRSDD TAVYYCASGW DFDYWGQGTL VTVSSGGGGS GGGGSGGGGS |
| | | DIVMTQSPSS LSASVGDRVT ITCRASQSIR YYLSWYQQKP GKAPKLLIYT |
| | | ASILQNGVPS RFSGSGSGTD FTLTISSLQP EDFATYYCLQ TYTTPDFGPG |
| | | TKVEIKAAAG SGGSGFVPVF LPAKPTTTPA PRPPTPAPTI ASQPLSLRPE |
| | | ACRPAAGGAV HTRGLDFACD IYIWAPLAGT CGVLLLSLVI TLYCNHRNRS |
| | | KRSRLLHSDY MNMTPRRPGP TRKHYQPYAP PRDFAAYRSK KVAKKPTNKA |
| | | PHPKQEPQEI NFPDDLPGSN TAAPVQETLH GCQPVTQEDG KESRISVQER |
| | | Q |
| 222 | OSM_M5_CD28TM_ | MGVLLTQRTL LSLVLALLFP SMASMQVQLV QSGAEVEKPG ASVKVSCKAS |
| | CD28_CD40 | GYTFTDYYMH WVRQAPGQGL EWMGWINPNS GGTNYAQKFQ GRVTMTRDTS |
| | | ISTAYMELSR LRSDDTAVYY CASGWDFDYW GQGTLVTVSS GGGGSGGGGS |
| | | GGGGSDIVMT QSPSSLSASV GDRVTITCRA SQSIRYYLSW YQQKPGKAPK |
| | | LLIYTASILQ NGVPSRFSGS GSGTDFTLTI SSLQPEDFAT YYCLQTYTTP |
| | | DFGPGTKVEI KAAAGSGGSG FWVLVVVGGV LACYSLLVTV AFIIFWVRSK |
| | | RSRLLHSDYM NMTPRRPGPT RKHYQPYAPP RDFAAYRSKK VAKKPTNKAP |
| | | HPKQEPQEIN FPDDLPGSNT AAPVQETLHG CQPVTQEDGK ESRISVQERQ |
| 223 | CD8a_M5_CD28TM_ | MALPVTALLL PLALLLHAAR PQVQLVQSGA EVEKPGASVK VSCKASGYTF |
| | CD28_CD40 | TDYYMHWVRQ APGQGLEWMG WINPNSGGTN YAQKFQGRVT MTRDTSISTA |
| | | YMELSRLRSD DTAVYYCASG WDFDYWGQGT LVTVSSGGGG SGGGGSGGGG |
| | | SDIVMTQSPS SLSASVGDRV TITCRASQSI RYYLSWYQQK PGKAPKLLIY |
| | | TASILQNGVP SRFSGSGSGT DFTLTISSLQ PEDFATYYCL QTYTTPDFGP |
| | | GTKVEIKAAA GSGGSGFWVL VVVGGVLACY SLLVTVAFII FWVRSKRSRL |
| | | LHSDYMNMTP RRPGPTRKHY QPYAPPRDFA AYRSKKVAKK PTNKAPHPKQ |
| | | EPQEINFPDD LPGSNTAAPV QETLHGCQPV TQEDGKESRI SVQERQ |
| 224 | CD2_M5_CD28TM_ | MSFPCKFVAS FLLIFNVSSK GAVSQVQLVQ SGAEVEKPGA SVKVSCKASG |
| | CD28_CD40 | YTFTDYYMHW VRQAPGQGLE WMGWINPNSG GTNYAQKFQG RVTMTRDTSI |
| | | STAYMELSRL RSDDTAVYYC ASGWDFDYWG QGTLVTVSSG GGGSGGGGSG |
| | | GGGSDIVMTQ SPSSLSASVG DRVTITCRAS QSIRYYLSWY QQKPGKAPKL |
| | | LIYTASILON GVPSRFSGSG SGTDFTLTIS SLQPEDFATY YCLQTYTTPD |
| | | FGPGTKVEIK AAAGSGGSGF WVLVVVGGVL ACYSLLVTVA FIIFWVRSKR |
| | | SRLLHSDYMN MTPRRPGPTR KHYQPYAPPR DFAAYRSKKV AKKPTNKAPH |
| | | PKQEPQEINF PDDLPGSNTA APVQETLHGC QPVTQEDGKE SRISVQERQ |
| 225 | IL2_M5_CD28TM_ | MYRMQLLSCI ALSLALVTNS QVQLVQSGAE VEKPGASVKV SCKASGYTFT |
| | CD28_CD40 | DYYMHWVRQA PGQGLEWMGW INPNSGGTNY AQKFQGRVTM TRDTSISTAY |
| | | MELSRLRSDD TAVYYCASGW DFDYWGQGTL VTVSSGGGGS GGGGSGGGGS |
| | | DIVMTQSPSS LSASVGDRVT ITCRASQSIR YYLSWYQQKP GKAPKLLIYT |
| | | ASILQNGVPS RFSGSGSGTD FTLTISSLQP EDFATYYCLQ TYTTPDFGPG |
| | | TKVEIKAAAG SGGSGFWVLV VVGGVLACYS LLVTVAFIIF WVRSKRSRLL |
| | | HSDYMNMTPR RPGPTRKHYQ PYAPPRDFAA YRSKKVAKKP TNKAPHPKQE |
| | | PQEINFPDDL PGSNTAAPVQ ETLHGCQPVT QEDGKESRIS VQERQ |
| 226 | GM-CSF_M5_ | MWLQSLLLLG TVACSISQVQ LVQSGAEVEK PGASVKVSCK ASGYTFTDYY |
| | CD28TM_ | MHWVRQAPGQ GLEWMGWINP NSGGTNYAQK FQGRVTMTRD TSISTAYMEL |
| | CD28_CD40 | SRLRSDDTAV YYCASGWDFD YWGQGTLVTV SSGGGGSGGG GSGGGGSDIV |
| | | MTQSPSSLSA SVGDRVTITC RASQSIRYYL SWYQQKPGKA PKLLIYTASI |
| | | LQNGVPSRFS GSGSGTDFTL TISSLQPEDF ATYYCLQTYT TPDFGPGTKV |
| | | EIKAAAGSGG SGFWVLVVVG GVLACYSLLV TVAFIIFWVR SKRSRLLHSD |
| | | YMNMTPRRPG PTRKHYQPYA PPRDFAAYRS KKVAKKPTNK APHPKQEPQE |
| | | INFPDDLPGS NTAAPVQETL HGCQPVTQED GKESRISVQE RQ |
| 227 | hIgGk-VIII_ | MEAPAQLLFL LLLWLPDTTR QVQLVQSGAE VEKPGASVKV SCKASGYTFT |
| | M5_CD28TM_ | DYYMHWVRQA PGQGLEWMGW INPNSGGTNY AQKFQGRVTM TRDTSISTAY |
| | CD28_CD40 | MELSRLRSDD TAVYYCASGW DFDYWGQGTL VTVSSGGGGS GGGGSGGGGS |
| | | DIVMTQSPSS LSASVGDRVT ITCRASQSIR YYLSWYQQKP GKAPKLLIYT |
| | | ASILQNGVPS RFSGSGSGTD FTLTISSLQP EDFATYYCLQ TYTTPDFGPG |
| | | TKVEIKAAAG SGGSGFWVLV VVGGVLACYS LLVTVAFIIF WVRSKRSRLL |
| | | HSDYMNMTPR RPGPTRKHYQ PYAPPRDFAA YRSKKVAKKP TNKAPHPKQE |
| | | PQEINFPDDL PGSNTAAPVQ ETLHGCQPVT QEDGKESRIS VQERQ |
| 228 | OSM_HN1_ | MGVLLTQRTL LSLVLALLFP SMASMQVQLV QSGAEVKRPG ASVQVSCRAS |
| | spCD28_ | GYSINTYYMQ WVRQAPGAGL EWMGVINPSG VTSYAQKFQG RVTLTNDTST |
| | CD28_CD40 | NTVYMQLNSL TSADTAVYYC ARWALWGDFG MDVWGKGTLV TVSSGGGGSG |
| | CTP226 | GGGSGGGGSD IQMTQSPSTL SASIGDRVTI TGRASEGIYH WLAWYQQKPG |
| | | KAPKLLIYKA SSLASGAPSR FSGSGSGTDF TLTISSLQPD DFATYYCQQY |
| | | SNYPLTFGGG TKLEIKAAAG SGGSGILVKQ SPMLVAYDNA VNLSCKYSYN |
| | | LFSREFRASL HKGLDSAVEV CVVYGNYSQQ LQVYSKTGFN CDGKLGNESV |
| | | TFYLQNLYVN QTDIYFCKIE VMYPPPYLDN EKSNGTIIHV KGKHLCPSPL |
| | | FPGPSKPFWV LVVVGGVLAC YSLLVTVAFI IFWVRSKRSR LLHSDYMNMT |
| | | PRRPGPTRKH YQPYAPPRDF AAYRSKKVAK KPTNKAPHPK QEPQEINFPD |
| | | DLPGSNTAAP VQETLHGCQP VTQEDGKESR ISVQERQ |
| 229 | CD8a_HN1_ | MALPVTALLL PLALLLHAAR PQVQLVQSGA EVKRPGASVQ VSCRASGYSI |
| | spCD28_ | NTYYMQWVRQ APGAGLEWMG VINPSGVTSY AQKFQGRVTL TNDTSTNTVY |
| | CD28_CD40 | MQLNSLTSAD TAVYYCARWA LWGDFGMDVW GKGTLVTVSS GGGGSGGGGS |
| | | GGGGSDIQMT QSPSTLSASI GDRVTITCRA SEGIYHWLAW YQQKPGKAPK |
| | | LLIYKASSLA SGAPSRFSGS GSGTDFTLTI SSLQPDDFAT YYCQQYSNYP |
| | | LTFGGGTKLE IKAAAGSGGS GILVKQSPML VAYDNAVNLS CKYSYNLFSR |
| | | EFRASLHKGL DSAVEVCVVY GNYSQQLQVY SKTGFNCDGK LGNESVTFYL |
| | | QNLYVNQTDI YFCKIEVMYP PPYLDNEKSN GTIIHVKGKH LCPSPLFPGP |
| | | SKPFWVLVVV GGVLACYSLL VTVAFIIFWV RSKRSRLLHS DYMNMTPRRP |
| | | GPTRKHYQPY APPRDFAAYR SKKVAKKPTN KAPHPKQEPQ EINFPDDLPG |
| | | SNTAAPVQET LHGCQPVTQE DGKESRISVQ ERQ |
| 230 | CD2_HN1_ | MSFPCKFVAS FLLIFNVSSK GAVSQVQLVQ SGAEVKRPGA SVQVSCRASG |
| | spCD28_ | YSINTYYMQW VRQAPGAGLE WMGVINPSGV TSYAQKFQGR VTLTNDTSTN |
| | CD28_CD40 | TVYMQLNSLT SADTAVYYGA RWALWGDFGM DVWGKGTLVT VSSGGGGSGG |
| | | GGSGGGGSDI QMTQSPSTLS ASIGDRVTIT CRASEGIYHW LAWYQQKPGK |
| | | APKLLIYKAS SLASGAPSRF SGSGSGTDFT LTISSLQPDD FATYYCQQYS |
| | | NYPLTFGGGT KLEIKAAAGS GGSGILVKQS PMLVAYDNAV NLSCKYSYNL |
| | | FSREFRASLH KGLDSAVEVC VVYGNYSQQL QVYSKTGFNC DGKLGNESVT |
| | | FYLQNLYVNQ TDIYFCKIEV MYPPPYLDNE KSNGTIIHVK GKHLCPSPLF |
| | | PGPSKPFWVL VVVGGVLACY SLLVTVAFII FWVRSKRSRL LHSDYMNMTP |
| | | RRPGPTRKHY QPYAPPRDFA AYRSKKVAKK PTNKAPHPKQ EPQEINFPDD |
| | | LPGSNTAAPV QETLHGCQPV TQEDGKESRI SVQERQ |
| 231 | IL2_HN1_ | MYRMQLLSCI ALSLALVTNS QVQLVQSGAE VKRPGASVQV SCRASGYSIN |
| | spCD28_ | TYYMQWVRQA PGAGLEWMGV INPSGVTSYA QKFQGRVTLT NDTSTNTVYM |
| | CD28_CD40 | QLNSLTSADT AVYYCARWAL WGDFGMDVWG KGTLVTVSSG GGGSGGGGSG |
| | | GGGSDIQMTQ SPSTLSASIG DRVTITCRAS EGIYHWLAWY QQKPGKAPKL |
| | | LIYKASSLAS GAPSRFSGSG SGTDFTLTIS SLQPDDFATY YCQQYSNYPL |
| | | TFGGGTKLEI KAAAGSGGSG ILVKQSPMLV AYDNAVNLSC KYSYNLFSRE |
| | | FRASLHKGLD SAVEVCVVYG NYSQQLQVYS KTGFNCDGKL GNESVTFYLQ |
| | | NLYVNQTDIY FCKIEVMYPP PYLDNEKSNG TIIHVKGKHL CPSPLFPGPS |
| | | KPFWVLVVVG GVLACYSLLV TVAFIIFWVR SKRSRLLHSD YMNMTPRRPG |
| | | PTRKHYQPYA PPRDFAAYRS KKVAKKPTNK APHPKQEPQE INFPDDLPGS |
| | | NTAAPVQETL HGCQPVTQED GKESRISVQE RQ |
| 232 | GM-CSF_HN1_ | MWLQSLLLLG TVACSISQVQ LVQSGAEVKR PGASVQVSCR ASGYSINTYY |
| | spCD28_ | MQWVRQAPGA GLEWMGVINP SGVTSYAQKF QGRVTLTNDT STNTVYMQLN |
| | CD28_CD40 | SLTSADTAVY YCARWALWGD FGMDVWGKGT LVTVSSGGGG SGGGGSGGGG |
| | | SDIQMTQSPS TLSASIGDRV TITCRASEGI YHWLAWYQQK PGKAPKLLIY |
| | | KASSLASGAP SRFSGSGSGT DFTLTISSLQ PDDFATYYCQ QYSNYPLTFG |
| | | GGTKLEIKAA AGSGGSGILV KQSPMLVAYD NAVNLSCKYS YNLFSREFRA |
| | | SLHKGLDSAV EVCVVYGNYS QQLQVYSKTG FNCDGKLGNE SVTFYLQNLY |
| | | VNQTDIYFCK IEVMYPPPYL DNEKSNGTII HVKGKHLCPS PLFPGPSKPF |
| | | WVLVVVGGVL ACYSLLVTVA FIIFWVRSKR SRLLHSDYMN MTPRRPGPTR |
| | | KHYQPYAPPR DFAAYRSKKV AKKPTNKAPH PKQEPQEINF PDDLPGSNTA |
| | | APVQETLHGC QPVTQEDGKE SRISVQERQ |
| 233 | hIgGk-VIII_ | MEAPAQLLFL LLLWLPDTTR QVQLVQSGAE VKRPGASVQV SCRASGYSIN |
| | HN1_ | TYYMQWVRQA PGAGLEWMGV INPSGVTSYA QKFQGRVTLT NDTSTNTVYM |
| | spCD28_ | QLNSLTSADT AVYYCARWAL WGDFGMDVWG KGTLVTVSSG GGGSGGGGSG |
| | CD28_CD40 | GGGSDIQMTQ SPSTLSASIG DRVTITCRAS EGIYHWLAWY QQKPGKAPKL |
| | | LIYKASSLAS GAPSRFSGSG SGTDFTLTIS SLQPDDFATY YCQQYSNYPL |
| | | TFGGGTKLEI KAAAGSGGSG ILVKQSPMLV AYDNAVNLSC KYSYNLFSRE |
| | | FRASLHKGLD SAVEVCVVYG NYSQQLQVYS KTGFNCDGKL GNESVTFYLQ |
| | | NLYVNQTDIY FCKIEVMYPP PYLDNEKSNG TIIHVKGKHL CPSPLFPGPS |
| | | KPFWVLVVVG GVLACYSLLV TVAFIIFWVR SKRSRLLHSD YMNMTPRRPG |
| | | PTRKHYQPYA PPRDFAAYRS KKVAKKPTNK APHPKQEPQE INFPDDLPGS |
| | | NTAAPVQETL HGCQPVTQED GKESRISVQE RQ |
| 234 | OSM_HN1_spCD8_ | MGVLLTQRTL LSLVLALLFP SMASMQVQLV QSGAEVKRPG ASVQVSCRAS |
| | CD28_CD40 | GYSINTYYMQ WVRQAPGAGL EWMGVINPSG VTSYAQKFQG RVTLTNDTST |
| | CTP238 | NTVYMQLNSL TSADTAVYYC ARWALWGDFG MDVWGKGTLV TVSSGGGGSG |
| | | GGGSGGGGSD IQMTQSPSTL SASIGDRVTI TCRASEGIYH WLAWYQQKPG |
| | | KAPKLLIYKA SSLASGAPSR FSGSGSGTDF TLTISSLQPD DFATYYCQQY |
| | | SNYPLTFGGG TKLEIKAAAG SGGSGFVPVF LPAKPTTTPA PRPPTPAPTI |
| | | ASQPLSLRPE ACRPAAGGAV HTRGLDFACD IYIWAPLAGT CGVLLLSLVI |
| | | TLYCNHRNRS KRSRLLHSDY MNMTPRRPGP TRKHYQPYAP PRDFAAYRSK |
| | | KVAKKPTNKA PHPKQEPQEI NFPDDLPGSN TAAPVQETLH GCQPVTQEDG |
| | | KESRISVQER Q |
| 235 | CD8a_HN1_spCD8_ | MALPVTALLL PLALLLHAAR PQVQLVQSGA EVKRPGASVQ VSCRASGYSI |
| | CD28_CD40 | NTYYMQWVRQ APGAGLEWMG VINPSGVTSY AQKFQGRVTL TNDTSTNTVY |
| | | MQLNSLTSAD TAVYYCARWA LWGDFGMDVW GKGTLVTVSS GGGGSGGGGS |
| | | GGGGSDIQMT QSPSTLSASI GDRVTITCRA SEGIYHWLAW YQQKPGKAPK |
| | | LLIYKASSLA SGAPSRFSGS GSGTDFTLTI SSLQPDDFAT YYCQQYSNYP |
| | | LTFGGGTKLE IKAAAGSGGS GFVPVFLPAK PTTTPAPRPP TPAPTIASQP |
| | | LSLRPEACRP AAGGAVHTRG LDFACDIYIW APLAGTCGVL LLSLVITLYC |
| | | NHRNRSKRSR LLHSDYMNMT PRRPGPTRKH YQPYAPPRDF AAYRSKKVAK |
| | | KPTNKAPHPK QEPQEINFPD DLPGSNTAAP VQETLHGCQP VTQEDGKESR |
| | | ISVQERQ |
| 236 | CD2_HN1_spCD8_ | MSFPCKFVAS FLLIFNVSSK GAVSQVQLVQ SGAEVKRPGA SVQVSCRASG |
| | CD28_CD40 | YSINTYYMQW VRQAPGAGLE WMGVINPSGV TSYAQKFQGR VTLTNDTSTN |
| | | TVYMQLNSLT SADTAVYYGA RWALWGDFGM DVWGKGTLVT VSSGGGGSGG |
| | | GGSGGGGSDI QMTQSPSTLS ASIGDRVTIT CRASEGIYHW LAWYQQKPGK |
| | | APKLLIYKAS SLASGAPSRF SGSGSGTDFT LTISSLQPDD FATYYCQQYS |
| | | NYPLTFGGGT KLEIKAAAGS GGSGFVPVFL PAKPTTTPAP RPPTPAPTIA |
| | | SQPLSLRPEA CRPAAGGAVH TRGLDFACDI YIWAPLAGTC GVLLLSLVIT |
| | | LYCNHRNRSK RSRLLHSDYM NMTPRRPGPT RKHYQPYAPP RDFAAYRSKK |
| | | VAKKPTNKAP HPKQEPQEIN FPDDLPGSNT AAPVQETLHG CQPVTQEDGK |
| | | ESRISVQERQ |
| 237 | IL2_HN1_spCD8_ | MYRMQLLSCI ALSLALVTNS QVQLVQSGAE VKRPGASVQV SCRASGYSIN |
| | CD28_CD40 | TYYMQWVRQA PGAGLEWMGV INPSGVTSYA QKFQGRVTLT NDTSTNTVYM |
| | | QLNSLTSADT AVYYCARWAL WGDFGMDVWG KGTLVTVSSG GGGSGGGGSG |
| | | GGGSDIQMTQ SPSTLSASIG DRVTITCRAS EGIYHWLAWY QQKPGKAPKL |
| | | LIYKASSLAS GAPSRFSGSG SGTDFTLTIS SLQPDDFATY YCQQYSNYPL |
| | | TFGGGTKLEI KAAAGSGGSG FVPVFLPAKP TTTPAPRPPT PAPTIASQPL |
| | | SLRPEACRPA AGGAVHTRGL DFACDIYIWA PLAGTCGVLL LSLVITLYCN |
| | | HRNRSKRSRL LHSDYMNMTP RRPGPTRKHY QPYAPPRDFA AYRSKKVAKK |
| | | PTNKAPHPKQ EPQEINFPDD LPGSNTAAPV QETLHGCQPV TQEDGKESRI |
| | | SVQERQ |
| 238 | GM-CSF_HN1_ | MWLQSLLLLG TVACSISQVQ LVQSGAEVKR PGASVQVSCR ASGYSINTYY |
| | spCD8_ | MQWVRQAPGA GLEWMGVINP SGVTSYAQKF QGRVTLTNDT STNTVYMQLN |
| | CD28_CD40 | SLTSADTAVY YCARWALWGD FGMDVWGKGT LVTVSSGGGG SGGGGSGGGG |
| | | SDIQMTQSPS TLSASIGDRV TITCRASEGI YHWLAWYQQK PGKAPKLLIY |
| | | KASSLASGAP SRFSGSGSGT DFTLTISSLQ PDDFATYYCQ QYSNYPLTFG |
| | | GGTKLEIKAA AGSGGSGFVP VFLPAKPTTT PAPRPPTPAP TIASQPLSLR |
| | | PEACRPAAGG AVHTRGLDFA CDIYIWAPLA GTCGVLLLSL VITLYCNHRN |
| | | RSKRSRLLHS DYMNMTPRRP GPTRKHYQPY APPRDFAAYR SKKVAKKPTN |
| | | KAPHPKQEPQ EINFPDDLPG SNTAAPVQET LHGCQPVTQE DGKESRISVQ |
| | | ERQ |
| 239 | hIgGk-VIII_ | MEAPAQLLFL LLLWLPDTTR QVQLVQSGAE VKRPGASVQV SCRASGYSIN |
| | HN1_spCD8_ | TYYMQWVRQA PGAGLEWMGV INPSGVTSYA QKFQGRVTLT NDTSTNTVYM |
| | CD28_CD40 | QLNSLTSADT AVYYCARWAL WGDFGMDVWG KGTLVTVSSG GGGSGGGGSG |
| | | GGGSDIQMTQ SPSTLSASIG DRVTITCRAS EGIYHWLAWY QQKPGKAPKL |
| | | LIYKASSLAS GAPSRFSGSG SGTDFTLTIS SLQPDDFATY YCQQYSNYPL |
| | | TFGGGTKLEI KAAAGSGGSG FVPVFLPAKP TTTPAPRPPT PAPTIASQPL |
| | | SLRPEACRPA AGGAVHTRGL DFACDIYIWA PLAGTCGVLL LSLVITLYCN |
| | | HRNRSKRSRL LHSDYMNMTP RRPGPTRKHY QPYAPPRDFA AYRSKKVAKK |
| | | PTNKAPHPKQ EPQEINFPDD LPGSNTAAPV QETLHGCQPV TQEDGKESRI |
| | | SVQERQ |
| 240 | OSM_HN1_ | MGVLLTQRTL LSLVLALLFP SMASMQVQLV QSGAEVKRPG ASVQVSCRAS |
| | CD28TM_CD28_ | GYSINTYYMQ WVRQAPGAGL EWMGVINPSG VTSYAQKFQG RVTLTNDTST |
| | CD40 | NTVYMQLNSL TSADTAVYYC ARWALWGDFG MDVWGKGTLV TVSSGGGGSG |
| | | GGGSGGGGSD IQMTQSPSTL SASIGDRVTI TGRASEGIYH WLAWYQQKPG |
| | | KAPKLLIYKA SSLASGAPSR FSGSGSGTDF TLTISSLQPD DFATYYCQQY |
| | | SNYPLTFGGG TKLEIKAAAG SGGSGFWVLV VVGGVLACYS LLVTVAFIIF |
| | | WVRSKRSRLL HSDYMNMTPR RPGPTRKHYQ PYAPPRDFAA YRSKKVAKKP |
| | | TNKAPHPKQE PQEINFPDDL PGSNTAAPVQ ETLHGCQPVT QEDGKESRIS |
| | | VQERQRSKRS RLLHSDYMNM TPRRPGPTRK HYQPYAPPRD FAAYRSKKVA |
| | | KKPTNKAPHP KQEPQEINFP DDLPGSNTAA PVQETLHGCQ PVTQEDGKES |
| | | RISVQERQ |
| 241 | CD8a_HN1_ | MALPVTALLL PLALLLHAAR PQVQLVQSGA EVKRPGASVQ VSCRASGYSI |
| | CD28TM_CD28_ | NTYYMQWVRQ APGAGLEWMG VINPSGVTSY AQKFQGRVTL TNDTSTNTVY |
| | CD40 | MQLNSLTSAD TAVYYCARWA LWGDFGMDVW GKGTLVTVSS GGGGSGGGGS |
| | | GGGGSDIQMT QSPSTLSASI GDRVTITCRA SEGIYHWLAW YQQKPGKAPK |
| | | LLIYKASSLA SGAPSRFSGS GSGTDFTLTI SSLQPDDFAT YYCQQYSNYP |
| | | LTFGGGTKLE IKAAAGSGGS GFWVLVVVGG VLACYSLLVT VAFIIFWVRS |
| | | KRSRLLHSDY MNMTPRRPGP TRKHYQPYAP PRDFAAYRSK KVAKKPTNKA |
| | | PHPKQEPQEI NFPDDLPGSN TAAPVQETLH GCQPVTQEDG KESRISVQER |
| | | Q |
| 242 | CD2_HN1_ | MSFPCKFVAS FLLIFNVSSK GAVSQVQLVQ SGAEVKRPGA SVQVSCRASG |
| | CD28TM_CD28_ | YSINTYYMQW VRQAPGAGLE WMGVINPSGV TSYAQKFQGR VTLTNDTSTN |
| | CD40 | TVYMQLNSLT SADTAVYYCA RWALWGDFGM DVWGKGTLVT VSSGGGGSGG |
| | | GGSGGGGSDI QMTQSPSTLS ASIGDRVTIT CRASEGIYHW LAWYQQKPGK |
| | | APKLLIYKAS SLASGAPSRF SGSGSGTDFT LTISSLQPDD FATYYCQQYS |
| | | NYPLTFGGGT KLEIKAAAGS GGSGFWVLVV VGGVLACYSL LVTVAFIIFW |
| | | VRSKRSRLLH SDYMNMTPRR PGPTRKHYQP YAPPRDFAAY RSKKVAKKPT |
| | | NKAPHPKQEP QEINFPDDLP GSNTAAPVQE TLHGCQPVTQ EDGKESRISV |
| | | QERQ |
| 243 | IL2_HN1_ | MYRMQLLSCI ALSLALVTNS QVQLVQSGAE VKRPGASVQV SCRASGYSIN |
| | CD28TM_CD28_ | TYYMQWVRQA PGAGLEWMGV INPSGVTSYA QKFQGRVTLT NDTSTNTVYM |
| | CD40 | QLNSLTSADT AVYYCARWAL WGDFGMDVWG KGTLVTVSSG GGGSGGGGSG |
| | | GGGSDIQMTQ SPSTLSASIG DRVTITCRAS EGIYHWLAWY QQKPGKAPKL |
| | | LIYKASSLAS GAPSRFSGSG SGTDFTLTIS SLQPDDFATY YCQQYSNYPL |
| | | TFGGGTKLEI KAAAGSGGSG FWVLVVVGGV LACYSLLVTV AFIIFWVRSK |
| | | RSRLLHSDYM NMTPRRPGPT RKHYQPYAPP RDFAAYRSKK VAKKPTNKAP |
| | | HPKQEPQEIN FPDDLPGSNT AAPVQETLHG CQPVTQEDGK ESRISVQERQ |
| 244 | GM-CSF_HN1_ | MWLQSLLLLG TVACSISQVQ LVQSGAEVKR PGASVQVSCR ASGYSINTYY |
| | CD28TM_ | MQWVRQAPGA GLEWMGVINP SGVTSYAQKF QGRVTLTNDT STNTVYMQLN |
| | CD28_CD40 | SLTSADTAVY YCARWALWGD FGMDVWGKGT LVTVSSGGGG SGGGGSGGGG |
| | | SDIQMTQSPS TLSASIGDRV TITCRASEGI YHWLAWYQQK PGKAPKLLIY |
| | | KASSLASGAP SRFSGSGSGT DFTLTISSLQ PDDFATYYCQ QYSNYPLTFG |
| | | GGTKLEIKAA AGSGGSGFWV LVVVGGVLAC YSLLVTVAFI IFWVRSKRSR |
| | | LLHSDYMNMT PRRPGPTRKH YQPYAPPRDF AAYRSKKVAK KPTNKAPHPK |
| | | QEPQEINFPD DLPGSNTAAP VQETLHGCQP VTQEDGKESR ISVQERQ |
| 245 | hIgGk-VIII_ | MEAPAQLLFL LLLWLPDTTR QVQLVQSGAE VKRPGASVQV SCRASGYSIN |
| | HN1_CD28TM_ | TYYMQWVRQA PGAGLEWMGV INPSGVTSYA QKFQGRVTLT NDTSTNTVYM |
| | CD28_CD40 | QLNSLTSADT AVYYCARWAL WGDFGMDVWG KGTLVTVSSG GGGSGGGGSG |
| | | GGGSDIQMTQ SPSTLSASIG DRVTITCRAS EGIYHWLAWY QQKPGKAPKL |
| | | LIYKASSLAS GAPSRFSGSG SGTDFTLTIS SLQPDDFATY YCQQYSNYPL |
| | | TFGGGTKLEI KAAAGSGGSG FWVLVVVGGV LACYSLLVTV AFIIFWVRSK |
| | | RSRLLHSDYM NMTPRRPGPT RKHYQPYAPP RDFAAYRSKK VAKKPTNKAP |
| | | HPKQEPQEIN FPDDLPGSNT AAPVQETLHG CQPVTQEDGK ESRISVQERQ |
| 246 | OSM_M912_ | MGVLLTQRTL LSLVLALLFP SMASMQVQLQ ESGPGLVKPS ETLSLTCTVS |
| | spCD28_ | GGSVSSGSYY WSWIRQPPGK GLEWIGYIYY SGSTNYNPSL KSRVTISVDT |
| | CD28_CD40 | SKNQFSLKLS SVTAADTAVY YCAREGKNGA FDIWGQGTMV TVSSGGGGSG |
| | CTP227 | GGGSGGGGSD IQMTQSPSSL SASVGDRVTI TCRASQSISS YLNWYQQKPG |
| | | KAPKLLIYAA SSLQSGVPSG FSGSGSGTDF TLTISSLQPE DFATYYCQQS |
| | | YSTPLTFGGG TKVEIKAAAG SGGSGILVKQ SPMLVAYDNA VNLSCKYSYN |
| | | LFSREFRASL HKGLDSAVEV CVVYGNYSQQ LQVYSKTGFN CDGKLGNESV |
| | | TFYLQNLYVN QTDIYFCKIE VMYPPPYLDN EKSNGTIIHV KGKHLCPSPL |
| | | FPGPSKPFWV LVVVGGVLAC YSLLVTVAFI IFWVRSKRSR LLHSDYMNMT |
| | | PRRPGPTRKH YQPYAPPRDF AAYRSKKVAK KPTNKAPHPK QEPQEINFPD |
| | | DLPGSNTAAP VQETLHGCQP VTQEDGKESR ISVQERQ |
| 247 | CD8a_M912_ | MALPVTALLL PLALLLHAAR PQVQLQESGP GLVKPSETLS LTCTVSGGSV |
| | spCD28_ | SSGSYYWSWI RQPPGKGLEW IGYIYYSGST NYNPSLKSRV TISVDTSKNQ |
| | CD28_CD40 | FSLKLSSVTA ADTAVYYCAR EGKNGAFDIW GQGTMVTVSS GGGGSGGGGS |
| | | GGGGSDIQMT QSPSSLSASV GDRVTITCRA SQSISSYLNW YQQKPGKAPK |
| | | LLIYAASSLQ SGVPSGFSGS GSGTDFTLTI SSLQPEDFAT YYCQQSYSTP |
| | | LTFGGGTKVE IKAAAGSGGS GILVKQSPML VAYDNAVNLS CKYSYNLFSR |
| | | EFRASLHKGL DSAVEVCVVY GNYSQQLQVY SKTGFNCDGK LGNESVTFYL |
| | | QNLYVNQTDI YFCKIEVMYP PPYLDNEKSN GTIIHVKGKH LCPSPLFPGP |
| | | SKPFWVLVVV GGVLACYSLL VTVAFIIFWV RSKRSRLLHS DYMNMTPRRP |
| | | GPTRKHYQPY APPRDFAAYR SKKVAKKPTN KAPHPKQEPQ EINFPDDLPG |
| | | SNTAAPVQET LHGCQPVTQE DGKESRISVQ ERQ |
| 248 | CD2_M912_ | MSFPCKFVAS FLLIFNVSSK GAVSQVQLQE SGPGLVKPSE TLSLTCTVSG |
| | spCD28_ | GSVSSGSYYW SWIRQPPGKG LEWIGYIYYS GSTNYNPSLK SRVTISVDTS |
| | CD28_CD40 | KNQFSLKLSS VTAADTAVYY CAREGKNGAF DIWGQGTMVT VSSGGGGSGG |
| | | GGSGGGGSDI QMTQSPSSLS ASVGDRVTIT CRASQSISSY LNWYQQKPGK |
| | | APKLLIYAAS SLQSGVPSGF SGSGSGTDFT LTISSLQPED FATYYCQQSY |
| | | STPLTFGGGT KVEIKAAAGS GGSGILVKQS PMLVAYDNAV NLSCKYSYNL |
| | | FSREFRASLH KGLDSAVEVC VVYGNYSQQL QVYSKTGFNC DGKLGNESVT |
| | | FYLQNLYVNQ TDIYFCKIEV MYPPPYLDNE KSNGTIIHVK GKHLCPSPLF |
| | | PGPSKPFWVL VVVGGVLACY SLLVTVAFII FWVRSKRSRL LHSDYMNMTP |
| | | RRPGPTRKHY QPYAPPRDFA AYRSKKVAKK PTNKAPHPKQ EPQEINFPDD |
| | | LPGSNTAAPV QETLHGCQPV TQEDGKESRI SVQERQ |
| 249 | IL2_M912_ | MYRMQLLSCI ALSLALVTNS QVQLQESGPG LVKPSETLSL TCTVSGGSVS |
| | spCD28_ | SGSYYWSWIR QPPGKGLEWI GYIYYSGSTN YNPSLKSRVT ISVDTSKNQF |
| | CD28_CD40 | SLKLSSVTAA DTAVYYCARE GKNGAFDIWG QGTMVTVSSG GGGSGGGGSG |
| | | GGGSDIQMTQ SPSSLSASVG DRVTITCRAS QSISSYLNWY QQKPGKAPKL |
| | | LIYAASSLQS GVPSGFSGSG SGTDFTLTIS SLQPEDFATY YCQQSYSTPL |
| | | TFGGGTKVEI KAAAGSGGSG ILVKQSPMLV AYDNAVNLSC KYSYNLFSRE |
| | | FRASLHKGLD SAVEVCVVYG NYSQQLQVYS KTGFNCDGKL GNESVTFYLQ |
| | | NLYVNQTDIY FCKIEVMYPP PYLDNEKSNG TIIHVKGKHL CPSPLFPGPS |
| | | KPFWVLVVVG GVLACYSLLV TVAFIIFWVR SKRSRLLHSD YMNMTPRRPG |
| | | PTRKHYQPYA PPRDFAAYRS KKVAKKPTNK APHPKQEPQE INFPDDLPGS |
| | | NTAAPVQETL HGCQPVTQED GKESRISVQE RQ |
| 250 | GM-CSF_M912_ | MWLQSLLLLG TVACSISQVQ LQESGPGLVK PSETLSLTCT VSGGSVSSGS |
| | spCD28_ | YYWSWIRQPP GKGLEWIGYI YYSGSTNYNP SLKSRVTISV DTSKNQFSLK |
| | CD28_CD40 | LSSVTAADTA VYYCAREGKN GAFDIWGQGT MVTVSSGGGG SGGGGSGGGG |
| | | SDIQMTQSPS SLSASVGDRV TITCRASQSI SSYLNWYQQK PGKAPKLLIY |
| | | AASSLQSGVP SGFSGSGSGT DFTLTISSLQ PEDFATYYCQ QSYSTPLTFG |
| | | GGTKVEIKAA AGSGGSGILV KQSPMLVAYD NAVNLSCKYS YNLFSREFRA |
| | | SLHKGLDSAV EVCVVYGNYS QQLQVYSKTG FNCDGKLGNE SVTFYLQNLY |
| | | VNQTDIYFCK IEVMYPPPYL DNEKSNGTII HVKGKHLCPS PLFPGPSKPF |
| | | WVLVVVGGVL ACYSLLVTVA FIIFWVRSKR SRLLHSDYMN MTPRRPGPTR |
| | | KHYQPYAPPR DFAAYRSKKV AKKPTNKAPH PKQEPQEINF PDDLPGSNTA |
| | | APVQETLHGC QPVTQEDGKE SRISVQERQ |
| 251 | hIgGk-VIII_ | MEAPAQLLFL LLLWLPDTTR QVQLQESGPG LVKPSETLSL TCTVSGGSVS |
| | M912_ | SGSYYWSWIR QPPGKGLEWI GYIYYSGSTN YNPSLKSRVT ISVDTSKNQF |
| | spCD28_ | SLKLSSVTAA DTAVYYCARE GKNGAFDIWG QGTMVTVSSG GGGSGGGGSG |
| | CD28_CD40 | GGGSDIQMTQ SPSSLSASVG DRVTITCRAS QSISSYLNWY QQKPGKAPKL |
| | | LIYAASSLQS GVPSGFSGSG SGTDFTLTIS SLQPEDFATY YCQQSYSTPL |
| | | TFGGGTKVEI KAAAGSGGSG ILVKQSPMLV AYDNAVNLSC KYSYNLFSRE |
| | | FRASLHKGLD SAVEVCVVYG NYSQQLQVYS KTGFNCDGKL GNESVTFYLQ |
| | | NLYVNQTDIY FCKIEVMYPP PYLDNEKSNG TIIHVKGKHL CPSPLFPGPS |
| | | KPFWVLVVVG GVLACYSLLV TVAFIIFWVR SKRSRLLHSD YMNMTPRRPG |
| | | PTRKHYQPYA PPRDFAAYRS KKVAKKPTNK APHPKQEPQE INFPDDLPGS |
| | | NTAAPVQETL HGCQPVTQED GKESRISVQE RQ |
| 252 | OSM_M912_ | MGVLLTQRTL LSLVLALLFP SMASMQVQLQ ESGPGLVKPS ETLSLTCTVS |
| | spCD8_CD28_CD40 | GGSVSSGSYY WSWIRQPPGK GLEWIGYIYY SGSTNYNPSL KSRVTISVDT |
| | CTP239 | SKNQFSLKLS SVTAADTAVY YCAREGKNGA FDIWGQGTMV TVSSGGGGSG |
| | | GGGSGGGGSD IQMTQSPSSL SASVGDRVTI TCRASQSISS YLNWYQQKPG |
| | | KAPKLLIYAA SSLQSGVPSG FSGSGSGTDF TLTISSLQPE DFATYYCQQS |
| | | YSTPLTFGGG TKVEIKAAAG SGGSGFVPVF LPAKPTTTPA PRPPTPAPTI |
| | | ASQPLSLRPE ACRPAAGGAV HTRGLDFACD IYIWAPLAGT CGVLLLSLVI |
| | | TLYCNHRNRS KRSRLLHSDY MNMTPRRPGP TRKHYQPYAP PRDFAAYRSK |
| | | KVAKKPTNKA PHPKQEPQEI NFPDDLPGSN TAAPVQETLH GCQPVTQEDG |
| | | KESRISVQER Q |
| 253 | CD8a_M912_ | MALPVTALLL PLALLLHAAR PQVQLQESGP GLVKPSETLS LTCTVSGGSV |
| | spCD8_CD28_CD40 | SSGSYYWSWI RQPPGKGLEW IGYIYYSGST NYNPSLKSRV TISVDTSKNQ |
| | | FSLKLSSVTA ADTAVYYCAR EGKNGAFDIW GQGTMVTVSS GGGGSGGGGS |
| | | GGGGSDIQMT QSPSSLSASV GDRVTITCRA SQSISSYLNW YQQKPGKAPK |
| | | LLIYAASSLQ SGVPSGFSGS GSGTDFTLTI SSLQPEDFAT YYCQQSYSTP |
| | | LTFGGGTKVE IKAAAGSGGS GFVPVFLPAK PTTTPAPRPP TPAPTIASQP |
| | | LSLRPEACRP AAGGAVHTRG LDFACDIYIW APLAGTCGVL LLSLVITLYC |
| | | NHRNRSKRSR LLHSDYMNMT PRRPGPTRKH YQPYAPPRDF AAYRSKKVAK |
| | | KPTNKAPHPK QEPQEINFPD DLPGSNTAAP VQETLHGCQP VTQEDGKESR |
| | | ISVQERQ |
| 254 | CD2_M912_spCD8_ | MSFPCKFVAS FLLIFNVSSK GAVSQVQLQE SGPGLVKPSE TLSLTCTVSG |
| | CD28_CD40 | GSVSSGSYYW SWIRQPPGKG LEWIGYIYYS GSTNYNPSLK SRVTISVDTS |
| | | KNQFSLKLSS VTAADTAVYY CAREGKNGAF DIWGQGTMVT VSSGGGGSGG |
| | | GGSGGGGSDI QMTQSPSSLS ASVGDRVTIT CRASQSISSY LNWYQQKPGK |
| | | APKLLIYAAS SLQSGVPSGF SGSGSGTDFT LTISSLQPED FATYYCQQSY |
| | | STPLTFGGGT KVEIKAAAGS GGSGFVPVFL PAKPTTTPAP RPPTPAPTIA |
| | | SQPLSLRPEA CRPAAGGAVH TRGLDFACDI YIWAPLAGTC GVLLLSLVIT |
| | | LYCNHRNRSK RSRLLHSDYM NMTPRRPGPT RKHYQPYAPP RDFAAYRSKK |
| | | VAKKPTNKAP HPKQEPQEIN FPDDLPGSNT AAPVQETLHG CQPVTQEDGK |
| | | ESRISVQERQ |
| 255 | IL2_M912_spCD8_ | MYRMQLLSCI ALSLALVTNS QVQLQESGPG LVKPSETLSL TCTVSGGSVS |
| | CD28_CD40 | SGSYYWSWIR QPPGKGLEWI GYIYYSGSTN YNPSLKSRVT ISVDTSKNQF |
| | | SLKLSSVTAA DTAVYYCARE GKNGAFDIWG QGTMVTVSSG GGGSGGGGSG |
| | | GGGSDIQMTQ SPSSLSASVG DRVTITCRAS QSISSYLNWY QQKPGKAPKL |
| | | LIYAASSLQS GVPSGFSGSG SGTDFTLTIS SLQPEDFATY YCQQSYSTPL |
| | | TFGGGTKVEI KAAAGSGGSG FVPVFLPAKP TTTPAPRPPT PAPTIASQPL |
| | | SLRPEACRPA AGGAVHTRGL DFACDIYIWA PLAGTCGVLL LSLVITLYCN |
| | | HRNRSKRSRL LHSDYMNMTP RRPGPTRKHY QPYAPPRDFA AYRSKKVAKK |
| | | PTNKAPHPKQ EPQEINFPDD LPGSNTAAPV QETLHGCQPV TQEDGKESRI |
| | | SVQERQ |
| 256 | GM-CSF_ | MWLQSLLLLG TVACSISQVQ LQESGPGLVK PSETLSLTCT VSGGSVSSGS |
| | M912_spCD8_ | YYWSWIRQPP GKGLEWIGYI YYSGSTNYNP SLKSRVTISV DTSKNQFSLK |
| | CD28_CD40 | LSSVTAADTA VYYCAREGKN GAFDIWGQGT MVTVSSGGGG SGGGGSGGGG |
| | | SDIQMTQSPS SLSASVGDRV TITCRASQSI SSYLNWYQQK PGKAPKLLIY |
| | | AASSLQSGVP SGFSGSGSGT DFTLTISSLQ PEDFATYYCQ QSYSTPLTFG |
| | | GGTKVEIKAA AGSGGSGFVP VFLPAKPTTT PAPRPPTPAP TIASQPLSLR |
| | | PEACRPAAGG AVHTRGLDFA CDIYIWAPLA GTCGVLLLSL VITLYCNHRN |
| | | RSKRSRLLHS DYMNMTPRRP GPTRKHYQPY APPRDFAAYR SKKVAKKPTN |
| | | KAPHPKQEPQ EINFPDDLPG SNTAAPVQET LHGCQPVTQE DGKESRISVQ |
| | | ERQ |
| 257 | hIgGk-VIII_ | MEAPAQLLFL LLLWLPDTTR QVQLQESGPG LVKPSETLSL TCTVSGGSVS |
| | M912_spCD8_ | SGSYYWSWIR QPPGKGLEWI GYIYYSGSTN YNPSLKSRVT ISVDTSKNQF |
| | CD28_CD40 | SLKLSSVTAA DTAVYYCARE GKNGAFDIWG QGTMVTVSSG GGGSGGGGSG |
| | | GGGSDIQMTQ SPSSLSASVG DRVTITCRAS QSISSYLNWY QQKPGKAPKL |
| | | LIYAASSLQS GVPSGFSGSG SGTDFTLTIS SLQPEDFATY YCQQSYSTPL |
| | | TFGGGTKVEI KAAAGSGGSG FVPVFLPAKP TTTPAPRPPT PAPTIASQPL |
| | | SLRPEACRPA AGGAVHTRGL DFACDIYIWA PLAGTCGVLL LSLVITLYCN |
| | | HRNRSKRSRL LHSDYMNMTP RRPGPTRKHY QPYAPPRDFA AYRSKKVAKK |
| | | PTNKAPHPKQ EPQEINFPDD LPGSNTAAPV QETLHGCQPV TQEDGKESRI |
| | | SVQERQ |
| 258 | OSM_M912_ | MGVLLTQRTL LSLVLALLFP SMASMQVOLQ ESGPGLVKPS ETLSLTCTVS |
| | CD28TM_ | GGSVSSGSYY WSWIRQPPGK GLEWIGYIYY SGSTNYNPSL KSRVTISVDT |
| | CD28_CD40 | SKNQFSLKLS SVTAADTAVY YCAREGKNGA FDIWGQGTMV TVSSGGGGSG |
| | | GGGSGGGGSD IQMTQSPSSL SASVGDRVTI TCRASQSISS YLNWYQQKPG |
| | | KAPKLLIYAA SSLQSGVPSG FSGSGSGTDF TLTISSLQPE DFATYYCQQS |
| | | YSTPLTFGGG TKVEIKAAAG SGGSGFWVLV VVGGVLACYS LLVTVAFIIF |
| | | WVRSKRSRLL HSDYMNMTPR RPGPTRKHYQ PYAPPRDFAA YRSKKVAKKP |
| | | TNKAPHPKQE PQEINFPDDL PGSNTAAPVQ ETLHGCQPVT QEDGKESRIS |
| | | VQERQ |
| 259 | CD8a_M912_ | MALPVTALLL PLALLLHAAR PQVQLQESGP GLVKPSETLS LTCTVSGGSV |
| | CD28TM_ | SSGSYYWSWI RQPPGKGLEW IGYIYYSGST NYNPSLKSRV TISVDTSKNQ |
| | CD28_CD40 | FSLKLSSVTA ADTAVYYCAR EGKNGAFDIW GQGTMVTVSS GGGGSGGGGS |
| | | GGGGSDIQMT QSPSSLSASV GDRVTITCRA SQSISSYLNW YQQKPGKAPK |
| | | LLIYAASSLQ SGVPSGFSGS GSGTDFTLTI SSLQPEDFAT YYCQQSYSTP |
| | | LTFGGGTKVE IKAAAGSGGS GFWVLVVVGG VLACYSLLVT VAFIIFWVRS |
| | | KRSRLLHSDY MNMTPRRPGP TRKHYQPYAP PRDFAAYRSK KVAKKPTNKA |
| | | PHPKQEPQEI NFPDDLPGSN TAAPVQETLH GCQPVTQEDG KESRISVQER |
| | | Q |
| 260 | CD2_M912_ | MSFPCKFVAS FLLIFNVSSK GAVSQVQLQE SGPGLVKPSE TLSLTCTVSG |
| | CD28TM_ | GSVSSGSYYW SWIRQPPGKG LEWIGYIYYS GSTNYNPSLK SRVTISVDTS |
| | CD28_CD40 | KNQFSLKLSS VTAADTAVYY CAREGKNGAF DIWGQGTMVT VSSGGGGSGG |
| | | GGSGGGGSDI QMTQSPSSLS ASVGDRVTIT CRASQSISSY LNWYQQKPGK |
| | | APKLLIYAAS SLQSGVPSGF SGSGSGTDFT LTISSLQPED FATYYCQQSY |
| | | STPLTFGGGT KVEIKAAAGS GGSGFWVLVV VGGVLACYSL LVTVAFIIFW |
| | | VRSKRSRLLH SDYMNMTPRR PGPTRKHYQP YAPPRDFAAY RSKKVAKKPT |
| | | NKAPHPKQEP QEINFPDDLP GSNTAAPVQE TLHGCQPVTQ EDGKESRISV |
| | | QERQ |
| 261 | IL2_M912_ | MYRMQLLSCI ALSLALVTNS QVQLQESGPG LVKPSETLSL TCTVSGGSVS |
| | CD28TM_ | SGSYYWSWIR QPPGKGLEWI GYIYYSGSTN YNPSLKSRVT ISVDTSKNQF |
| | CD28_CD40 | SLKLSSVTAA DTAVYYCARE GKNGAFDIWG QGTMVTVSSG GGGSGGGGSG |
| | | GGGSDIQMTQ SPSSLSASVG DRVTITCRAS QSISSYLNWY QQKPGKAPKL |
| | | LIYAASSLQS GVPSGFSGSG SGTDFTLTIS SLQPEDFATY YCQQSYSTPL |
| | | TFGGGTKVEI KAAAGSGGSG FWVLVVVGGV LACYSLLVTV AFIIFWVRSK |
| | | RSRLLHSDYM NMTPRRPGPT RKHYQPYAPP RDFAAYRSKK VAKKPTNKAP |
| | | HPKQEPQEIN FPDDLPGSNT AAPVQETLHG CQPVTQEDGK ESRISVQERQ |
| 262 | GM-CSF_M912_ | MWLQSLLLLG TVACSISQVQ LQESGPGLVK PSETLSLTCT VSGGSVSSGS |
| | CD28TM_ | YYWSWIRQPP GKGLEWIGYI YYSGSTNYNP SLKSRVTISV DTSKNQFSLK |
| | CD28_CD40 | LSSVTAADTA VYYCAREGKN GAFDIWGQGT MVTVSSGGGG SGGGGSGGGG |
| | | SDIQMTQSPS SLSASVGDRV TITCRASQSI SSYLNWYQQK PGKAPKLLIY |
| | | AASSLQSGVP SGFSGSGSGT DFTLTISSLQ PEDFATYYCQ QSYSTPLTFG |
| | | GGTKVEIKAA AGSGGSGFWV LVVVGGVLAC YSLLVTVAFI IFWVRSKRSR |
| | | LLHSDYMNMT PRRPGPTRKH YQPYAPPRDF AAYRSKKVAK KPTNKAPHPK |
| | | QEPQEINFPD DLPGSNTAAP VQETLHGCQP VTQEDGKESR ISVQERQ |
| 263 | hIgGk-VIII_ | MEAPAQLLFL LLLWLPDTTR QVQLQESGPG LVKPSETLSL TCTVSGGSVS |
| | M912_ | SGSYYWSWIR QPPGKGLEWI GYIYYSGSTN YNPSLKSRVT ISVDTSKNQF |
| | CD28TM_ | SLKLSSVTAA DTAVYYCARE GKNGAFDIWG QGTMVTVSSG GGGSGGGGSG |
| | CD28_CD40 | GGGSDIQMTQ SPSSLSASVG DRVTITCRAS QSISSYLNWY QQKPGKAPKL |
| | | LIYAASSLQS GVPSGFSGSG SGTDFTLTIS SLQPEDFATY YCQQSYSTPL |
| | | TFGGGTKVEI KAAAGSGGSG FWVLVVVGGV LACYSLLVTV AFIIFWVRSK |
| | | RSRLLHSDYM NMTPRRPGPT RKHYQPYAPP RDFAAYRSKK VAKKPTNKAP |
| | | HPKQEPQEIN FPDDLPGSNT AAPVQETLHG CQPVTQEDGK ESRISVQERQ |
| 264 | OSM_HuYP218_ | MGVLLTQRTL LSLVLALLFP SMASMEVQLV ESGGGLVQPG GSLRLSCAAS |
| | spCD28_ | GFDLGFYFYA CWVRQAPGKG LEWVSCIYTA GSGSTYYASW AKGRFTISRD |
| | CD28_CD40 | NSKNTLYLQM NSLRAEDTAV YYCARSTANT RSTYYLNLWG QGTLVTVSSG |
| | CTP228 | GGGSGGGGSG GGGSDIQMTQ SPSSLSASVG DRVTITCQAS QRISSYLSWY |
| | | QQKPGKVPKL LIYGASTLAS GVPSRFSGSG SGTDFTLTIS SLQPEDVATY |
| | | YCQSYAYFDS NNWHAFGGGT KVEIAAAGSG GSGILVKQSP MLVAYDNAVN |
| | | LSCKYSYNLF SREFRASLHK GLDSAVEVCV VYGNYSQQLQ VYSKTGFNCD |
| | | GKLGNESVTF YLQNLYVNQT DIYFCKIEVM YPPPYLDNEK SNGTIIHVKG |
| | | KHLCPSPLFP GPSKPFWVLV VVGGVLACYS LLVTVAFIIF WVRSKRSRLL |
| | | HSDYMNMTPR RPGPTRKHYQ PYAPPRDFAA YRSKKVAKKP TNKAPHPKQE |
| | | PQEINFPDDL PGSNTAAPVQ ETLHGCQPVT QEDGKESRIS VQERQ |
| 265 | CD8a_HuYP218_ | MALPVTALLL PLALLLHAAR PEVQLVESGG GLVQPGGSLR LSCAASGFDL |
| | spCD28_ | GFYFYACWVR QAPGKGLEWV SCIYTAGSGS TYYASWAKGR FTISRDNSKN |
| | CD28_CD40 | TLYLQMNSLR AEDTAVYYGA RSTANTRSTY YLNLWGQGTL VTVSSGGGGS |
| | | GGGGSGGGGS DIQMTQSPSS LSASVGDRVT ITCQASQRIS SYLSWYQQKP |
| | | GKVPKLLIYG ASTLASGVPS RFSGSGSGTD FTLTISSLQP EDVATYYCQS |
| | | YAYFDSNNWH AFGGGTKVEI AAAGSGGSGI LVKQSPMLVA YDNAVNLSCK |
| | | YSYNLFSREF RASLHKGLDS AVEVCVVYGN YSQQLQVYSK TGFNCDGKLG |
| | | NESVTFYLQN LYVNQTDIYF CKIEVMYPPP YLDNEKSNGT IIHVKGKHLC |
| | | PSPLFPGPSK PFWVLVVVGG VLACYSLLVT VAFIIFWVRS KRSRLLHSDY |
| | | MNMTPRRPGP TRKHYQPYAP PRDFAAYRSK KVAKKPTNKA PHPKQEPQEI |
| | | NFPDDLPGSN TAAPVQETLH GCQPVTQEDG KESRISVQER Q |
| 266 | CD2_HuYP218_ | MSFPCKFVAS FLLIFNVSSK GAVSEVQLVE SGGGLVQPGG SLRLSCAASG |
| | spCD28_ | FDLGFYFYAC WVRQAPGKGL EWVSCIYTAG SGSTYYASWA KGRFTISRDN |
| | CD28_CD40 | SKNTLYLQMN SLRAEDTAVY YCARSTANTR STYYLNLWGQ GTLVTVSSGG |
| | | GGSGGGGSGG GGSDIQMTQS PSSLSASVGD RVTITCQASQ RISSYLSWYQ |
| | | QKPGKVPKLL IYGASTLASG VPSRFSGSGS GTDFTLTISS LQPEDVATYY |
| | | CQSYAYFDSN NWHAFGGGTK VEIAAAGSGG SGILVKQSPM LVAYDNAVNL |
| | | SCKYSYNLFS REFRASLHKG LDSAVEVCVV YGNYSQQLQV YSKTGFNCDG |
| | | KLGNESVTFY LQNLYVNQTD IYFCKIEVMY PPPYLDNEKS NGTIIHVKGK |
| | | HLCPSPLFPG PSKPFWVLVV VGGVLACYSL LVTVAFIIFW VRSKRSRLLH |
| | | SDYMNMTPRR PGPTRKHYQP YAPPRDFAAY RSKKVAKKPT NKAPHPKQEP |
| | | QEINFPDDLP GSNTAAPVQE TLHGCQPVTQ EDGKESRISV QERQ |
| 267 | IL2_HuYP218_ | MYRMQLLSCI ALSLALVTNS EVQLVESGGG LVQPGGSLRL SCAASGFDLG |
| | spCD28_ | FYFYACWVRQ APGKGLEWVS GIYTAGSGST YYASWAKGRF TISRDNSKNT |
| | CD28_CD40 | LYLQMNSLRA EDTAVYYCAR STANTRSTYY LNLWGQGTLV TVSSGGGGSG |
| | | GGGSGGGGSD IQMTQSPSSL SASVGDRVTI TCQASQRISS YLSWYQQKPG |
| | | KVPKLLIYGA STLASGVPSR FSGSGSGTDF TLTISSLQPE DVATYYCQSY |
| | | AYFDSNNWHA FGGGTKVEIA AAGSGGSGIL VKQSPMLVAY DNAVNLSCKY |
| | | SYNLFSREFR ASLHKGLDSA VEVCVVYGNY SQQLQVYSKT GFNCDGKLGN |
| | | ESVTFYLQNL YVNQTDIYFC KIEVMYPPPY LDNEKSNGTI IHVKGKHLCP |
| | | SPLFPGPSKP FWVLVVVGGV LACYSLLVTV AFIIFWVRSK RSRLLHSDYM |
| | | NMTPRRPGPT RKHYQPYAPP RDFAAYRSKK VAKKPTNKAP HPKQEPQEIN |
| | | FPDDLPGSNT AAPVQETLHG CQPVTQEDGK ESRISVQERQ |
| 268 | GM-CSF_HuYP218_ | MWLQSLLLLG TVACSISEVQ LVESGGGLVQ PGGSLRLSCA ASGFDLGFYF |
| | spCD28_ | YACWVRQAPG KGLEWVSCIY TAGSGSTYYA SWAKGRFTIS RDNSKNTLYL |
| | CD28_CD40 | QMNSLRAEDT AVYYCARSTA NTRSTYYLNL WGQGTLVTVS SGGGGSGGGG |
| | | SGGGGSDIQM TQSPSSLSAS VGDRVTITCQ ASQRISSYLS WYQQKPGKVP |
| | | KLLIYGASTL ASGVPSRFSG SGSGTDFTLT ISSLQPEDVA TYYCQSYAYF |
| | | DSNNWHAFGG GTKVEIAAAG SGGSGILVKQ SPMLVAYDNA VNLSCKYSYN |
| | | LFSREFRASL HKGLDSAVEV CVVYGNYSQQ LQVYSKTGFN CDGKLGNESV |
| | | TFYLQNLYVN QTDIYFCKIE VMYPPPYLDN EKSNGTIIHV KGKHLCPSPL |
| | | FPGPSKPFWV LVVVGGVLAC YSLLVTVAFI IFWVRSKRSR LLHSDYMNMT |
| | | PRRPGPTRKH YQPYAPPRDF AAYRSKKVAK KPTNKAPHPK QEPQEINFPD |
| | | DLPGSNTAAP VQETLHGCQP VTQEDGKESR ISVQERQ |
| 269 | hIgGk-VIII_ | MEAPAQLLFL LLLWLPDTTR EVQLVESGGG LVQPGGSLRL SCAASGFDLG |
| | HuYP218_ | FYFYACWVRQ APGKGLEWVS GIYTAGSGST YYASWAKGRF TISRDNSKNT |
| | spCD28_ | LYLQMNSLRA EDTAVYYCAR STANTRSTYY LNLWGQGTLV TVSSGGGGSG |
| | CD28_CD40 | GGGSGGGGSD IQMTQSPSSL SASVGDRVTI TCQASQRISS YLSWYQQKPG |
| | | KVPKLLIYGA STLASGVPSR FSGSGSGTDF TLTISSLQPE DVATYYCQSY |
| | | AYFDSNNWHA FGGGTKVEIA AAGSGGSGIL VKQSPMLVAY DNAVNLSCKY |
| | | SYNLFSREFR ASLHKGLDSA VEVCVVYGNY SQQLQVYSKT GFNCDGKLGN |
| | | ESVTFYLQNL YVNQTDIYFC KIEVMYPPPY LDNEKSNGTI IHVKGKHLCP |
| | | SPLFPGPSKP FWVLVVVGGV LACYSLLVTV AFIIFWVRSK RSRLLHSDYM |
| | | NMTPRRPGPT RKHYQPYAPP RDFAAYRSKK VAKKPTNKAP HPKQEPQEIN |
| | | FPDDLPGSNT AAPVQETLHG CQPVTQEDGK ESRISVQERQ |
| 270 | OSM_HuYP218_ | MGVLLTQRTL LSLVLALLFP SMASMEVQLV ESGGGLVQPG GSLRLSCAAS |
| | spCD8_ | GFDLGFYFYA CWVRQAPGKG LEWVSCIYTA GSGSTYYASW AKGRFTISRD |
| | CD28_CD40 | NSKNTLYLQM NSLRAEDTAV YYCARSTANT RSTYYLNLWG QGTLVTVSSG |
| | CTP240 | GGGSGGGGSG GGGSDIQMTQ SPSSLSASVG DRVTITCQAS QRISSYLSWY |
| | | QQKPGKVPKL LIYGASTLAS GVPSRFSGSG SGTDFTLTIS SLQPEDVATY |
| | | YCQSYAYFDS NNWHAFGGGT KVEIAAAGSG GSGFVPVFLP AKPTTTPAPR |
| | | PPTPAPTIAS QPLSLRPEAC RPAAGGAVHT RGLDFACDIY IWAPLAGTCG |
| | | VLLLSLVITL YCNHRNRSKR SRLLHSDYMN MTPRRPGPTR KHYQPYAPPR |
| | | DFAAYRSKKV AKKPTNKAPH PKQEPQEINF PDDLPGSNTA APVQETLHGC |
| | | QPVTQEDGKE SRISVQERQ |
| 271 | CD8a_HuYP218_ | MALPVTALLL PLALLLHAAR PEVQLVESGG GLVQPGGSLR LSCAASGFDL |
| | spCD8_ | GFYFYACWVR QAPGKGLEWV SCIYTAGSGS TYYASWAKGR FTISRDNSKN |
| | CD28_CD40 | TLYLQMNSLR AEDTAVYYCA RSTANTRSTY YLNLWGQGTL VTVSSGGGGS |
| | | GGGGSGGGGS DIQMTQSPSS LSASVGDRVT ITCQASQRIS SYLSWYQQKP |
| | | GKVPKLLIYG ASTLASGVPS RFSGSGSGTD FTLTISSLQP EDVATYYCQS |
| | | YAYFDSNNWH AFGGGTKVEI AAAGSGGSGF VPVFLPAKPT TTPAPRPPTP |
| | | APTIASQPLS LRPEACRPAA GGAVHTRGLD FACDIYIWAP LAGTCGVLLL |
| | | SLVITLYCNH RNRSKRSRLL HSDYMNMTPR RPGPTRKHYQ PYAPPRDFAA |
| | | YRSKKVAKKP TNKAPHPKQE PQEINFPDDL PGSNTAAPVQ ETLHGCQPVT |
| | | QEDGKESRIS VQERQ |
| 272 | CD2_HuYP218_ | MSFPCKFVAS FLLIFNVSSK GAVSEVQLVE SGGGLVQPGG SLRLSCAASG |
| | spCD8_ | FDLGFYFYAC WVRQAPGKGL EWVSCIYTAG SGSTYYASWA KGRFTISRDN |
| | CD28_CD40 | SKNTLYLQMN SLRAEDTAVY YCARSTANTR STYYLNLWGQ GTLVTVSSGG |
| | | GGSGGGGSGG GGSDIQMTQS PSSLSASVGD RVTITCQASQ RISSYLSWYQ |
| | | QKPGKVPKLL IYGASTLASG VPSRFSGSGS GTDFTLTISS LQPEDVATYY |
| | | CQSYAYFDSN NWHAFGGGTK VEIAAAGSGG SGFVPVFLPA KPTTTPAPRP |
| | | PTPAPTIASQ PLSLRPEACR PAAGGAVHTR GLDFACDIYI WAPLAGTCGV |
| | | LLLSLVITLY CNHRNRSKRS RLLHSDYMNM TPRRPGPTRK HYQPYAPPRD |
| | | FAAYRSKKVA KKPTNKAPHP KQEPQEINFP DDLPGSNTAA PVQETLHGCQ |
| | | PVTQEDGKES RISVQERQ |
| 273 | IL2_HuYP218_ | MYRMQLLSCI ALSLALVTNS EVQLVESGGG LVQPGGSLRL SCAASGFDLG |
| | spCD8_ | FYFYACWVRQ APGKGLEWVS GIYTAGSGST YYASWAKGRF TISRDNSKNT |
| | CD28_CD40 | LYLQMNSLRA EDTAVYYCAR STANTRSTYY LNLWGQGTLV TVSSGGGGSG |
| | | GGGSGGGGSD IQMTQSPSSL SASVGDRVTI TCQASQRISS YLSWYQQKPG |
| | | KVPKLLIYGA STLASGVPSR FSGSGSGTDF TLTISSLQPE DVATYYCQSY |
| | | AYFDSNNWHA FGGGTKVEIA AAGSGGSGFV PVFLPAKPTT TPAPRPPTPA |
| | | PTIASQPLSL RPEACRPAAG GAVHTRGLDF ACDIYIWAPL AGTCGVLLLS |
| | | LVITLYCNHR NRSKRSRLLH SDYMNMTPRR PGPTRKHYQP YAPPRDFAAY |
| | | RSKKVAKKPT NKAPHPKQEP QEINFPDDLP GSNTAAPVQE TLHGCQPVTQ |
| | | EDGKESRISV QERQ |
| 274 | GM-CSF_ | MWLQSLLLLG TVACSISEVQ LVESGGGLVQ PGGSLRLSCA ASGFDLGFYF |
| | HuYP218_ | YACWVRQAPG KGLEWVSCIY TAGSGSTYYA SWAKGRFTIS RDNSKNTLYL |
| | spCD8_ | QMNSLRAEDT AVYYCARSTA NTRSTYYLNL WGQGTLVTVS SGGGGSGGGG |
| | CD28_CD40 | SGGGGSDIQM TQSPSSLSAS VGDRVTITCQ ASQRISSYLS WYQQKPGKVP |
| | | KLLIYGASTL ASGVPSRFSG SGSGTDFTLT ISSLQPEDVA TYYCQSYAYF |
| | | DSNNWHAFGG GTKVEIAAAG SGGSGFVPVF LPAKPTTTPA PRPPTPAPTI |
| | | ASQPLSLRPE AGRPAAGGAV HTRGLDFACD IYIWAPLAGT CGVLLLSLVI |
| | | TLYCNHRNRS KRSRLLHSDY MNMTPRRPGP TRKHYQPYAP PRDFAAYRSK |
| | | KVAKKPTNKA PHPKQEPQEI NFPDDLPGSN TAAPVQETLH GCQPVTQEDG |
| | | KESRISVQER Q |
| 275 | hIgGk-VIII_ | MEAPAQLLFL LLLWLPDTTR EVQLVESGGG LVQPGGSLRL SCAASGFDLG |
| | HuYP218_ | FYFYACWVRQ APGKGLEWVS GIYTAGSGST YYASWAKGRF TISRDNSKNT |
| | spCD8_ | LYLQMNSLRA EDTAVYYCAR STANTRSTYY LNLWGQGTLV TVSSGGGGSG |
| | CD28_CD40 | GGGSGGGGSD IQMTQSPSSL SASVGDRVTI TCQASQRISS YLSWYQQKPG |
| | | KVPKLLIYGA STLASGVPSR FSGSGSGTDF TLTISSLQPE DVATYYCQSY |
| | | AYFDSNNWHA FGGGTKVEIA AAGSGGSGFV PVFLPAKPTT TPAPRPPTPA |
| | | PTIASQPLSL RPEACRPAAG GAVHTRGLDF ACDIYIWAPL AGTCGVLLLS |
| | | LVITLYCNHR NRSKRSRLLH SDYMNMTPRR PGPTRKHYQP YAPPRDFAAY |
| | | RSKKVAKKPT NKAPHPKQEP QEINFPDDLP GSNTAAPVQE TLHGCQPVTQ |
| | | EDGKESRISV QERQ |
| 276 | OSM_HuYP218_ | MGVLLTQRTL LSLVLALLFP SMASMEVQLV ESGGGLVQPG GSLRLSCAAS |
| | CD28TM_ | GFDLGFYFYA CWVRQAPGKG LEWVSCIYTA GSGSTYYASW AKGRFTISRD |
| | CD28_CD40 | NSKNTLYLQM NSLRAEDTAV YYCARSTANT RSTYYLNLWG QGTLVTVSSG |
| | | GGGSGGGGSG GGGSDIQMTQ SPSSLSASVG DRVTITCQAS QRISSYLSWY |
| | | QQKPGKVPKL LIYGASTLAS GVPSRFSGSG SGTDFTLTIS SLQPEDVATY |
| | | YCQSYAYFDS NNWHAFGGGT KVEIAAAGSG GSGFWVLVVV GGVLACYSLL |
| | | VTVAFIIFWV RSKRSRLLHS DYMNMTPRRP GPTRKHYQPY APPRDFAAYR |
| | | SKKVAKKPTN KAPHPKQEPQ EINFPDDLPG SNTAAPVQET LHGCQPVTQE |
| | | DGKESRISVQ ERQ |
| 277 | CD8a_HuYP218_ | MALPVTALLL PLALLLHAAR PEVQLVESGG GLVQPGGSLR LSCAASGFDL |
| | CD28TM_ | GFYFYACWVR QAPGKGLEWV SCIYTAGSGS TYYASWAKGR FTISRDNSKN |
| | CD28_CD40 | TLYLQMNSLR AEDTAVYYCA RSTANTRSTY YLNLWGQGTL VTVSSGGGGS |
| | | GGGGSGGGGS DIQMTQSPSS LSASVGDRVT ITCQASQRIS SYLSWYQQKP |
| | | GKVPKLLIYG ASTLASGVPS RFSGSGSGTD FTLTISSLQP EDVATYYCQS |
| | | YAYFDSNNWH AFGGGTKVEI AAAGSGGSGF WVLVVVGGVL ACYSLLVTVA |
| | | FIIFWVRSKR SRLLHSDYMN MTPRRPGPTR KHYQPYAPPR DFAAYRSKKV |
| | | AKKPTNKAPH PKQEPQEINF PDDLPGSNTA APVQETLHGC QPVTQEDGKE |
| | | SRISVQERQ |
| 278 | CD2_HuYP218_ | MSFPCKFVAS FLLIFNVSSK GAVSEVQLVE SGGGLVQPGG SLRLSCAASG |
| | CD28TM_ | FDLGFYFYAC WVRQAPGKGL EWVSCIYTAG SGSTYYASWA KGRFTISRDN |
| | CD28_CD40 | SKNTLYLQMN SLRAEDTAVY YCARSTANTR STYYLNLWGQ GTLVTVSSGG |
| | | GGSGGGGSGG GGSDIQMTQS PSSLSASVGD RVTITCQASQ RISSYLSWYQ |
| | | QKPGKVPKLL TYGASTLASG VPSRFSGSGS GTDFTLTISS LQPEDVATYY |
| | | CQSYAYFDSN NWHAFGGGTK VEIAAAGSGG SGFWVLVVVG GVLACYSLLV |
| | | TVAFIIFWVR SKRSRLLHSD YMNMTPRRPG PTRKHYQPYA PPRDFAAYRS |
| | | KKVAKKPTNK APHPKQEPQE INFPDDLPGS NTAAPVQETL HGCQPVTQED |
| | | GKESRISVQE RQ |
| 279 | IL2_HuYP218_ | MYRMQLLSCI ALSLALVTNS EVQLVESGGG LVQPGGSLRL SCAASGFDLG |
| | CD28TM_ | FYFYACWVRQ APGKGLEWVS GIYTAGSGST YYASWAKGRF TISRDNSKNT |
| | CD28_CD40 | LYLQMNSLRA EDTAVYYCAR STANTRSTYY LNLWGQGTLV TVSSGGGGSG |
| | | GGGSGGGGSD IQMTQSPSSL SASVGDRVTI TCQASQRISS YLSWYQQKPG |
| | | KVPKLLIYGA STLASGVPSR FSGSGSGTDF TLTISSLQPE DVATYYCQSY |
| | | AYFDSNNWHA FGGGTKVEIA AAGSGGSGFW VLVVVGGVLA CYSLLVTVAF |
| | | IIFWVRSKRS RLLHSDYMNM TPRRPGPTRK HYQPYAPPRD FAAYRSKKVA |
| | | KKPTNKAPHP KQEPQEINFP DDLPGSNTAA PVQETLHGCQ PVTQEDGKES |
| | | RISVQERQ |
| 280 | GM-CSF_HuYP218_ | MWLQSLLLLG TVACSISEVQ LVESGGGLVQ PGGSLRLSCA ASGFDLGFYF |
| | CD28TM_ | YACWVRQAPG KGLEWVSCIY TAGSGSTYYA SWAKGRFTIS RDNSKNTLYL |
| | CD28_CD40 | QMNSLRAEDT AVYYCARSTA NTRSTYYLNL WGQGTLVTVS SGGGGSGGGG |
| | | SGGGGSDIQM TQSPSSLSAS VGDRVTITCQ ASQRISSYLS WYQQKPGKVP |
| | | KLLIYGASTL ASGVPSRFSG SGSGTDFTLT ISSLQPEDVA TYYCQSYAYF |
| | | DSNNWHAFGG GTKVEIAAAG SGGSGFWVLV VVGGVLACYS LLVTVAFIIF |
| | | WVRSKRSRLL HSDYMNMTPR RPGPTRKHYQ PYAPPRDFAA YRSKKVAKKP |
| | | TNKAPHPKQE PQEINFPDDL PGSNTAAPVQ ETLHGCQPVT QEDGKESRIS |
| | | VQERQ |
| 281 | hIgGk-VIII_ | MEAPAQLLFL LLLWLPDTTR EVQLVESGGG LVQPGGSLRL SCAASGFDLG |
| | HuYP218_ | FYFYACWVRQ APGKGLEWVS GIYTAGSGST YYASWAKGRF TISRDNSKNT |
| | CD28TM_ | LYLQMNSLRA EDTAVYYCAR STANTRSTYY LNLWGQGTLV TVSSGGGGSG |
| | CD28_CD40 | GGGSGGGGSD IQMTQSPSSL SASVGDRVTI TCQASQRISS YLSWYQQKPG |
| | | KVPKLLIYGA STLASGVPSR FSGSGSGTDF TLTISSLQPE DVATYYCQSY |
| | | AYFDSNNWHA FGGGTKVEIA AAGSGGSGFW VLVVVGGVLA CYSLLVTVAF |
| | | IIFWVRSKRS RLLHSDYMNM TPRRPGPTRK HYQPYAPPRD FAAYRSKKVA |
| | | KKPTNKAPHP KQEPQEINFP DDLPGSNTAA PVQETLHGCQ PVTQEDGKES |
| | | RISVQERQ |
| 282 | OSM_P4_ | MGVLLTQRTL LSLVLALLFP SMASMQVQLQ QSGPGLVTPS QTLSLTCAIS |
| | spCD28_ | GDSVSSNSAT WNWIRQSPSR GLEWLGRTYY RSKWYNDYAV SVKSRMSINP |
| | CD28_CD40 | DTSKNQFSLQ LNSVTPEDTA VYYCARGMMT YYYGMDVWGQ GTTVTVSSGG |
| | CTP229 | GGSGGGGSGG GGSQPVLTQS SSLSASPGAS ASLTCTLRSG INVGPYRIYW |
| | | YQQKPGSPPQ YLLNYKSDSD KQQGSGVPSR FSGSKDASAN AGVLLISGLR |
| | | SEDEADYYCM IWHSSAAVFG GGTQLTVLSA AAGSGGSGIL VKQSPMLVAY |
| | | DNAVNLSCKY SYNLFSREFR ASLHKGLDSA VEVCVVYGNY SQQLQVYSKT |
| | | GFNCDGKLGN ESVTFYLQNL YVNQTDIYFC KIEVMYPPPY LDNEKSNGTI |
| | | IHVKGKHLCP SPLFPGPSKP FWVLVVVGGV LACYSLLVTV AFIIFWVRSK |
| | | RSRLLHSDYM NMTPRRPGPT RKHYQPYAPP RDFAAYRSKK VAKKPTNKAP |
| | | HPKQEPQEIN FPDDLPGSNT AAPVQETLHG CQPVTQEDGK ESRISVQERQ |
| 283 | CD8a_P4_ | MALPVTALLL PLALLLHAAR PQVQLQQSGP GLVTPSQTLS LTCAISGDSV |
| | spCD28_ | SSNSATWNWI RQSPSRGLEW LGRTYYRSKW YNDYAVSVKS RMSINPDTSK |
| | CD28_CD40 | NQFSLQLNSV TPEDTAVYYC ARGMMTYYYG MDVWGQGTTV TVSSGGGGSG |
| | | GGGSGGGGSQ PVLTQSSSLS ASPGASASLT CTLRSGINVG PYRIYWYQQK |
| | | PGSPPQYLLN YKSDSDKQQG SGVPSRFSGS KDASANAGVL LISGLRSEDE |
| | | ADYYCMIWHS SAAVFGGGTQ LTVLSAAAGS GGSGILVKQS PMLVAYDNAV |
| | | NLSCKYSYNL FSREFRASLH KGLDSAVEVC VVYGNYSQQL QVYSKTGFNC |
| | | DGKLGNESVT FYLQNLYVNQ TDIYFCKIEV MYPPPYLDNE KSNGTIIHVK |
| | | GKHLCPSPLF PGPSKPFWVL VVVGGVLACY SLLVTVAFII FWVRSKRSRL |
| | | LHSDYMNMTP RRPGPTRKHY QPYAPPRDFA AYRSKKVAKK PTNKAPHPKQ |
| | | EPQEINFPDD LPGSNTAAPV QETLHGCQPV TQEDGKESRI SVQERQ |
| 284 | CD2_P4_ | MSFPCKFVAS FLLIFNVSSK GAVSQVQLQQ SGPGLVTPSQ TLSLTCAISG |
| | spCD28_ | DSVSSNSATW NWIRQSPSRG LEWLGRTYYR SKWYNDYAVS VKSRMSINPD |
| | CD28_CD40 | TSKNQFSLQL NSVTPEDTAV YYCARGMMTY YYGMDVWGQG TTVTVSSGGG |
| | | GSGGGGSGGG GSQPVLTQSS SLSASPGASA SLTCTLRSGI NVGPYRIYWY |
| | | QQKPGSPPQY LLNYKSDSDK QQGSGVPSRF SGSKDASANA GVLLISGLRS |
| | | EDEADYYCMI WHSSAAVFGG GTQLTVLSAA AGSGGSGILV KQSPMLVAYD |
| | | NAVNLSCKYS YNLFSREFRA SLHKGLDSAV EVCVVYGNYS QQLQVYSKTG |
| | | FNCDGKLGNE SVTFYLQNLY VNQTDIYFCK IEVMYPPPYL DNEKSNGTII |
| | | HVKGKHLCPS PLFPGPSKPF WVLVVVGGVL ACYSLLVTVA FIIFWVRSKR |
| | | SRLLHSDYMN MTPRRPGPTR KHYQPYAPPR DFAAYRSKKV AKKPTNKAPH |
| | | PKQEPQEINF PDDLPGSNTA APVQETLHGC QPVTQEDGKE SRISVQERQ |
| 285 | IL2_P4_ | MYRMQLLSCI ALSLALVTNS QVQLQQSGPG LVTPSQTLSL TCAISGDSVS |
| | spCD28_ | SNSATWNWIR QSPSRGLEWL GRTYYRSKWY NDYAVSVKSR MSINPDTSKN |
| | CD28_CD40 | QFSLQLNSVT PEDTAVYYCA RGMMTYYYGM DVWGQGTTVT VSSGGGGSGG |
| | | GGSGGGGSQP VLTQSSSLSA SPGASASLTC TLRSGINVGP YRIYWYQQKP |
| | | GSPPQYLLNY KSDSDKQQGS GVPSRFSGSK DASANAGVLL ISGLRSEDEA |
| | | DYYCMIWHSS AAVFGGGTQL TVLSAAAGSG GSGILVKQSP MLVAYDNAVN |
| | | LSCKYSYNLF SREFRASLHK GLDSAVEVCV VYGNYSQQLQ VYSKTGFNCD |
| | | GKLGNESVTF YLQNLYVNQT DIYFCKIEVM YPPPYLDNEK SNGTIIHVKG |
| | | KHLCPSPLFP GPSKPFWVLV VVGGVLACYS LLVTVAFIIF WVRSKRSRLL |
| | | HSDYMNMTPR RPGPTRKHYQ PYAPPRDFAA YRSKKVAKKP TNKAPHPKQE |
| | | PQEINFPDDL PGSNTAAPVQ ETLHGCQPVT QEDGKESRIS VQERQ |
| 286 | GM-CSF_P4_ | MWLQSLLLLG TVACSISQVQ LQQSGPGLVT PSQTLSLTCA ISGDSVSSNS |
| | spCD28_ | ATWNWIRQSP SRGLEWLGRT YYRSKWYNDY AVSVKSRMSI NPDTSKNQFS |
| | CD28_CD40 | LQLNSVTPED TAVYYCARGM MTYYYGMDVW GQGTTVTVSS GGGGSGGGGS |
| | | GGGGSQPVLT QSSSLSASPG ASASLTCTLR SGINVGPYRI YWYQQKPGSP |
| | | PQYLLNYKSD SDKQQGSGVP SRFSGSKDAS ANAGVLLISG LRSEDEADYY |
| | | CMIWHSSAAV FGGGTQLTVL SAAAGSGGSG ILVKQSPMLV AYDNAVNLSC |
| | | KYSYNLFSRE FRASLHKGLD SAVEVCVVYG NYSQQLQVYS KTGFNCDGKL |
| | | GNESVTFYLQ NLYVNQTDIY FCKIEVMYPP PYLDNEKSNG TIIHVKGKHL |
| | | CPSPLFPGPS KPFWVLVVVG GVLACYSLLV TVAFIIFWVR SKRSRLLHSD |
| | | YMNMTPRRPG PTRKHYQPYA PPRDFAAYRS KKVAKKPTNK APHPKQEPQE |
| | | INFPDDLPGS NTAAPVQETL HGCQPVTQED GKESRISVQE RQ |
| 287 | hIgGk-VIII_ | MEAPAQLLFL LLLWLPDTTR QVQLQQSGPG LVTPSQTLSL TCAISGDSVS |
| | P4_ | SNSATWNWIR QSPSRGLEWL GRTYYRSKWY NDYAVSVKSR MSINPDTSKN |
| | spCD28_ | QFSLQLNSVT PEDTAVYYCA RGMMTYYYGM DVWGQGTTVT VSSGGGGSGG |
| | CD28_CD40 | GGSGGGGSQP VLTQSSSLSA SPGASASLTC TLRSGINVGP YRIYWYQQKP |
| | | GSPPQYLLNY KSDSDKQQGS GVPSRFSGSK DASANAGVLL ISGLRSEDEA |
| | | DYYCMIWHSS AAVFGGGTQL TVLSAAAGSG GSGILVKQSP MLVAYDNAVN |
| | | LSCKYSYNLF SREFRASLHK GLDSAVEVCV VYGNYSQQLQ VYSKTGFNCD |
| | | GKLGNESVTF YLQNLYVNQT DIYFCKIEVM YPPPYLDNEK SNGTIIHVKG |
| | | KHLCPSPLFP GPSKPFWVLV VVGGVLACYS LLVTVAFIIF WVRSKRSRLL |
| | | HSDYMNMTPR RPGPTRKHYQ PYAPPRDFAA YRSKKVAKKP TNKAPHPKQE |
| | | PQEINFPDDL PGSNTAAPVQ ETLHGCQPVT QEDGKESRIS VQERQ |
| 288 | OSM_P4_spCD8_ | MGVLLTQRTL LSLVLALLFP SMASMQVOLQ QSGPGLVTPS QTLSLTCAIS |
| | CD28_CD40 | GDSVSSNSAT WNWIRQSPSR GLEWLGRTYY RSKWYNDYAV SVKSRMSINP |
| | CTP241 | DTSKNQFSLQ LNSVTPEDTA VYYCARGMMT YYYGMDVWGQ GTTVTVSSGG |
| | | GGSGGGGSGG GGSQPVLTQS SSLSASPGAS ASLTCTLRSG INVGPYRIYW |
| | | YQQKPGSPPQ YLLNYKSDSD KQQGSGVPSR FSGSKDASAN AGVLLISGLR |
| | | SEDEADYYGM IWHSSAAVFG GGTQLTVLSA AAGSGGSGFV PVFLPAKPTT |
| | | TPAPRPPTPA PTIASQPLSL RPEACRPAAG GAVHTRGLDF ACDIYIWAPL |
| | | AGTCGVLLLS LVITLYCNHR NRSKRSRLLH SDYMNMTPRR PGPTRKHYQP |
| | | YAPPRDFAAY RSKKVAKKPT NKAPHPKQEP QEINFPDDLP GSNTAAPVQE |
| | | TLHGCQPVTQ EDGKESRISV QERQ |
| 289 | CD8a_P4_spCD8_ | MALPVTALLL PLALLLHAAR PQVQLQQSGP GLVTPSQTLS LTCAISGDSV |
| | CD28_CD40 | SSNSATWNWI RQSPSRGLEW LGRTYYRSKW YNDYAVSVKS RMSINPDTSK |
| | | NQFSLQLNSV TPEDTAVYYC ARGMMTYYYG MDVWGQGTTV TVSSGGGGSG |
| | | GGGSGGGGSQ PVLTQSSSLS ASPGASASLT CTLRSGINVG PYRIYWYQQK |
| | | PGSPPQYLLN YKSDSDKQQG SGVPSRFSGS KDASANAGVL LISGLRSEDE |
| | | ADYYCMIWHS SAAVFGGGTQ LTVLSAAAGS GGSGFVPVFL PAKPTTTPAP |
| | | RPPTPAPTIA SQPLSLRPEA CRPAAGGAVH TRGLDFACDI YIWAPLAGTC |
| | | GVLLLSLVIT LYCNHRNRSK RSRLLHSDYM NMTPRRPGPT RKHYQPYAPP |
| | | RDFAAYRSKK VAKKPTNKAP HPKQEPQEIN FPDDLPGSNT AAPVQETLHG |
| | | CQPVTQEDGK ESRISVQERQ |
| 290 | CD2_P4_spCD8_ | MSFPCKFVAS FLLIFNVSSK GAVSQVQLQQ SGPGLVTPSQ TLSLTCAISG |
| | CD28_CD40 | DSVSSNSATW NWIRQSPSRG LEWLGRTYYR SKWYNDYAVS VKSRMSINPD |
| | | TSKNQFSLQL NSVTPEDTAV YYCARGMMTY YYGMDVWGQG TTVTVSSGGG |
| | | GSGGGGSGGG GSQPVLTQSS SLSASPGASA SLTCTLRSGI NVGPYRIYWY |
| | | QQKPGSPPQY LLNYKSDSDK QQGSGVPSRF SGSKDASANA GVLLISGLRS |
| | | EDEADYYCMI WHSSAAVFGG GTQLTVLSAA AGSGGSGFVP VFLPAKPTTT |
| | | PAPRPPTPAP TIASQPLSLR PEACRPAAGG AVHTRGLDFA CDIYIWAPLA |
| | | GTCGVLLLSL VITLYCNHRN RSKRSRLLHS DYMNMTPRRP GPTRKHYQPY |
| | | APPRDFAAYR SKKVAKKPTN KAPHPKQEPQ EINFPDDLPG SNTAAPVQET |
| | | LHGCQPVTQE DGKESRISVQ ERQ |
| 291 | IL2_P4_spCD8_ | MYRMQLLSCI ALSLALVTNS QVQLQQSGPG LVTPSQTLSL TCAISGDSVS |
| | CD28_CD40 | SNSATWNWIR QSPSRGLEWL GRTYYRSKWY NDYAVSVKSR MSINPDTSKN |
| | | QFSLQLNSVT PEDTAVYYCA RGMMTYYYGM DVWGQGTTVT VSSGGGGSGG |
| | | GGSGGGGSQP VLTQSSSLSA SPGASASLTC TLRSGINVGP YRIYWYQQKP |
| | | GSPPQYLLNY KSDSDKQQGS GVPSRFSGSK DASANAGVLL ISGLRSEDEA |
| | | DYYCMIWHSS AAVFGGGTQL TVLSAAAGSG GSGFVPVFLP AKPTTTPAPR |
| | | PPTPAPTIAS QPLSLRPEAC RPAAGGAVHT RGLDFACDIY IWAPLAGTCG |
| | | VLLLSLVITL YCNHRNRSKR SRLLHSDYMN MTPRRPGPTR KHYQPYAPPR |
| | | DFAAYRSKKV AKKPTNKAPH PKQEPQEINF PDDLPGSNTA APVQETLHGC |
| | | QPVTQEDGKE SRISVQERQ |
| 292 | GM-CSF_P4_ | MWLQSLLLLG TVACSISQVQ LQQSGPGLVT PSQTLSLTCA ISGDSVSSNS |
| | spCD8_CD28_CD40 | ATWNWIRQSP SRGLEWLGRT YYRSKWYNDY AVSVKSRMSI NPDTSKNQFS |
| | | LQLNSVTPED TAVYYCARGM MTYYYGMDVW GQGTTVTVSS GGGGSGGGGS |
| | | GGGGSQPVLT QSSSLSASPG ASASLTCTLR SGINVGPYRI YWYQQKPGSP |
| | | PQYLLNYKSD SDKQQGSGVP SRFSGSKDAS ANAGVLLISG LRSEDEADYY |
| | | CMIWHSSAAV FGGGTQLTVL SAAAGSGGSG FVPVFLPAKP TTTPAPRPPT |
| | | PAPTIASQPL SLRPEACRPA AGGAVHTRGL DFACDIYIWA PLAGTCGVLL |
| | | LSLVITLYCN HRNRSKRSRL LHSDYMNMTP RRPGPTRKHY QPYAPPRDFA |
| | | AYRSKKVAKK PTNKAPHPKQ EPQEINFPDD LPGSNTAAPV QETLHGCQPV |
| | | TQEDGKESRI SVQERQ |
| 293 | hIgGk-VIII_ | MEAPAQLLFL LLLWLPDTTR QVQLQQSGPG LVTPSQTLSL TCAISGDSVS |
| | P4_spCD8_ | SNSATWNWIR QSPSRGLEWL GRTYYRSKWY NDYAVSVKSR MSINPDTSKN |
| | CD28_CD40 | QFSLQLNSVT PEDTAVYYCA RGMMTYYYGM DVWGQGTTVT VSSGGGGSGG |
| | | GGSGGGGSQP VLTQSSSLSA SPGASASLTC TLRSGINVGP YRIYWYQQKP |
| | | GSPPQYLLNY KSDSDKQQGS GVPSRFSGSK DASANAGVLL ISGLRSEDEA |
| | | DYYCMIWHSS AAVFGGGTQL TVLSAAAGSG GSGFVPVFLP AKPTTTPAPR |
| | | PPTPAPTIAS QPLSLRPEAC RPAAGGAVHT RGLDFACDIY IWAPLAGTCG |
| | | VLLLSLVITL YCNHRNRSKR SRLLHSDYMN MTPRRPGPTR KHYQPYAPPR |
| | | DFAAYRSKKV AKKPTNKAPH PKQEPQEINF PDDLPGSNTA APVQETLHGC |
| | | QPVTQEDGKE SRISVQERQ |
| 294 | OSM_P4_CD28TM_ | MGVLLTQRTL LSLVLALLFP SMASMQVOLQ QSGPGLVTPS QTLSLTCAIS |
| | CD28_CD40 | GDSVSSNSAT WNWIRQSPSR GLEWLGRTYY RSKWYNDYAV SVKSRMSINP |
| | | DTSKNQFSLQ LNSVTPEDTA VYYCARGMMT YYYGMDVWGQ GTTVTVSSGG |
| | | GGSGGGGSGG GGSQPVLTQS SSLSASPGAS ASLTCTLRSG INVGPYRIYW |
| | | YQQKPGSPPQ YLLNYKSDSD KQQGSGVPSR FSGSKDASAN AGVLLISGLR |
| | | SEDEADYYGM IWHSSAAVFG GGTQLTVLSA AAGSGGSGFW VLVVVGGVLA |
| | | CYSLLVTVAF IIFWVRSKRS RLLHSDYMNM TPRRPGPTRK HYQPYAPPRD |
| | | FAAYRSKKVA KKPTNKAPHP KQEPQEINFP DDLPGSNTAA PVQETLHGCQ |
| | | PVTQEDGKES RISVQERQ |
| 295 | CD8a_P4_ | MALPVTALLL PLALLLHAAR PQVQLQQSGP GLVTPSQTLS LTCAISGDSV |
| | CD28TM_CD28_ | SSNSATWNWI RQSPSRGLEW LGRTYYRSKW YNDYAVSVKS RMSINPDTSK |
| | CD40 | NQFSLQLNSV TPEDTAVYYC ARGMMTYYYG MDVWGQGTTV TVSSGGGGSG |
| | | GGGSGGGGSQ PVLTQSSSLS ASPGASASLT CTLRSGINVG PYRIYWYQQK |
| | | PGSPPQYLLN YKSDSDKQQG SGVPSRFSGS KDASANAGVL LISGLRSEDE |
| | | ADYYCMIWHS SAAVFGGGTQ LTVLSAAAGS GGSGFWVLVV VGGVLACYSL |
| | | LVTVAFIIFW VRSKRSRLLH SDYMNMTPRR PGPTRKHYQP YAPPRDFAAY |
| | | RSKKVAKKPT NKAPHPKQEP QEINFPDDLP GSNTAAPVQE TLHGCQPVTQ |
| | | EDGKESRISV QERQ |
| 296 | CD2_P4_CD28TM_ | MSFPCKFVAS FLLIFNVSSK GAVSQVQLQQ SGPGLVTPSQ TLSLTCAISG |
| | CD28_CD40 | DSVSSNSATW NWIRQSPSRG LEWLGRTYYR SKWYNDYAVS VKSRMSINPD |
| | | TSKNQFSLQL NSVTPEDTAV YYCARGMMTY YYGMDVWGQG TTVTVSSGGG |
| | | GSGGGGSGGG GSQPVLTQSS SLSASPGASA SLTCTLRSGI NVGPYRIYWY |
| | | QQKPGSPPQY LLNYKSDSDK QQGSGVPSRF SGSKDASANA GVLLISGLRS |
| | | EDEADYYCMI WHSSAAVFGG GTQLTVLSAA AGSGGSGFWV LVVVGGVLAC |
| | | YSLLVTVAFI IFWVRSKRSR LLHSDYMNMT PRRPGPTRKH YQPYAPPRDF |
| | | AAYRSKKVAK KPTNKAPHPK QEPQEINFPD DLPGSNTAAP VQETLHGCQP |
| | | VTQEDGKESR ISVQERQ |
| 297 | IL2_P4_CD28TM_ | MYRMQLLSCI ALSLALVTNS QVQLQQSGPG LVTPSQTLSL TCAISGDSVS |
| | CD28_CD40 | SNSATWNWIR QSPSRGLEWL GRTYYRSKWY NDYAVSVKSR MSINPDTSKN |
| | | QFSLQLNSVT PEDTAVYYCA RGMMTYYYGM DVWGQGTTVT VSSGGGGSGG |
| | | GGSGGGGSQP VLTQSSSLSA SPGASASLTC TLRSGINVGP YRIYWYQQKP |
| | | GSPPQYLLNY KSDSDKQQGS GVPSRFSGSK DASANAGVLL ISGLRSEDEA |
| | | DYYCMIWHSS AAVFGGGTQL TVLSAAAGSG GSGFWVLVVV GGVLACYSLL |
| | | VTVAFIIFWV RSKRSRLLHS DYMNMTPRRP GPTRKHYQPY APPRDFAAYR |
| | | SKKVAKKPTN KAPHPKQEPQ EINFPDDLPG SNTAAPVQET LHGCQPVTQE |
| | | DGKESRISVQ ERQ |
| 298 | GM-CSF_P4_ | MWLQSLLLLG TVACSISQVQ LQQSGPGLVT PSQTLSLTCA ISGDSVSSNS |
| | CD28TM_ | ATWNWIRQSP SRGLEWLGRT YYRSKWYNDY AVSVKSRMSI NPDTSKNQFS |
| | CD28_CD40 | LQLNSVTPED TAVYYCARGM MTYYYGMDVW GQGTTVTVSS GGGGSGGGGS |
| | | GGGGSQPVLT QSSSLSASPG ASASLTCTLR SGINVGPYRI YWYQQKPGSP |
| | | PQYLLNYKSD SDKQQGSGVP SRFSGSKDAS ANAGVLLISG LRSEDEADYY |
| | | CMIWHSSAAV FGGGTQLTVL SAAAGSGGSG FWVLVVVGGV LACYSLLVTV |
| | | AFIIFWVRSK RSRLLHSDYM NMTPRRPGPT RKHYQPYAPP RDFAAYRSKK |
| | | VAKKPTNKAP HPKQEPQEIN FPDDLPGSNT AAPVQETLHG CQPVTQEDGK |
| | | ESRISVQERQ |
| 299 | hIgGk-VIII_ | MEAPAQLLFL LLLWLPDTTR QVQLQQSGPG LVTPSQTLSL TCAISGDSVS |
| | P4_CD28TM_ | SNSATWNWIR QSPSRGLEWL GRTYYRSKWY NDYAVSVKSR MSINPDTSKN |
| | CD28_CD40 | QFSLQLNSVT PEDTAVYYCA RGMMTYYYGM DVWGQGTTVT VSSGGGGSGG |
| | | GGSGGGGSQP VLTQSSSLSA SPGASASLTC TLRSGINVGP YRIYWYQQKP |
| | | GSPPQYLLNY KSDSDKQQGS GVPSRFSGSK DASANAGVLL ISGLRSEDEA |
| | | DYYCMIWHSS AAVFGGGTQL TVLSAAAGSG GSGFWVLVVV GGVLACYSLL |
| | | VTVAFIIFWV RSKRSRLLHS DYMNMTPRRP GPTRKHYQPY APPRDFAAYR |
| | | SKKVAKKPTN KAPHPKQEPQ EINFPDDLPG SNTAAPVQET LHGCQPVTQE |
| | | DGKESRISVQ ERQ |
| 300 | OSM_SS1_ | MGVLLTQRTL LSLVLALLFP SMASMQVQLQ QSGPELEKPG ASVKLSCKAS |
| | spCD28(trun)_ | GYSFTGYTMN WVKQSHGKSL EWIGLITPYN GASSYNQKFR GKATLTVDKS |
| | CD28_CD40 | SSTAYMDLLS LTSEDSAVYF CARGGYDGRG FDYWGQGTTV TVSSGGGGSG |
| | CTP248 | GGGSGGGGSD IELTQSPAIM SASPGEKVTM TCSASSSVSY MHWYQQKSGT |
| | | SPKRWIYDTS KLASGVPGRF SGSGSGNSYS LTISSVEAED DATYYCQQWS |
| | | KHPLTFGAGT KLEIKAAAGS GGSGIIHVKG KHLCPSPLFP GPSKPFWVLV |
| | | VVGGVLACYS LLVTVAFIIF WVRSKRSRLL HSDYMNMTPR RPGPTRKHYQ |
| | | PYAPPRDFAA YRSKKVAKKP TNKAPHPKQE PQEINFPDDL PGSNTAAPVQ |
| | | ETLHGCQPVT QEDGKESRIS VQERQ |
| 301 | CD8a_SS1_ | MALPVTALLL PLALLLHAAR PQVQLQQSGP ELEKPGASVK LSCKASGYSF |
| | spCD28(trun)_ | TGYTMNWVKQ SHGKSLEWIG LITPYNGASS YNQKFRGKAT LTVDKSSSTA |
| | CD28_CD40 | YMDLLSLTSE DSAVYFCARG GYDGRGFDYW GQGTTVTVSS GGGGSGGGGS |
| | | GGGGSDIELT QSPAIMSASP GEKVTMTCSA SSSVSYMHWY QQKSGTSPKR |
| | | WIYDTSKLAS GVPGRFSGSG SGNSYSLTIS SVEAEDDATY YCQQWSKHPL |
| | | TFGAGTKLEI KAAAGSGGSG IIHVKGKHLC PSPLFPGPSK PFWVLVVVGG |
| | | VLACYSLLVT VAFIIFWVRS KRSRLLHSDY MNMTPRRPGP TRKHYQPYAP |
| | | PRDFAAYRSK KVAKKPTNKA PHPKQEPQEI NFPDDLPGSN TAAPVQETLH |
| | | GCQPVTQEDG KESRISVQER Q |
| 302 | CD2_SS1_ | MSFPCKFVAS FLLIFNVSSK GAVSQVQLQQ SGPELEKPGA SVKLSCKASG |
| | spCD28(trun)_ | YSFTGYTMNW VKQSHGKSLE WIGLITPYNG ASSYNQKFRG KATLTVDKSS |
| | CD28_CD40 | STAYMDLLSL TSEDSAVYFC ARGGYDGRGF DYWGQGTTVT VSSGGGGSGG |
| | | GGSGGGGSDI ELTQSPAIMS ASPGEKVTMT CSASSSVSYM HWYQQKSGTS |
| | | PKRWIYDTSK LASGVPGRFS GSGSGNSYSL TISSVEAEDD ATYYCQQWSK |
| | | HPLTFGAGTK LEIKAAAGSG GSGIIHVKGK HLCPSPLFPG PSKPFWVLVV |
| | | VGGVLACYSL LVTVAFIIFW VRSKRSRLLH SDYMNMTPRR PGPTRKHYQP |
| | | YAPPRDFAAY RSKKVAKKPT NKAPHPKQEP QEINFPDDLP GSNTAAPVQE |
| | | TLHGCQPVTQ EDGKESRISV QERQ |
| 303 | IL2_SS1_ | MYRMQLLSCI ALSLALVTNS QVQLQQSGPE LEKPGASVKL SCKASGYSFT |
| | spCD28(trun)_ | GYTMNWVKQS HGKSLEWIGL ITPYNGASSY NQKFRGKATL TVDKSSSTAY |
| | CD28_CD40 | MDLLSLTSED SAVYFCARGG YDGRGFDYWG QGTTVTVSSG GGGSGGGGSG |
| | | GGGSDIELTQ SPAIMSASPG EKVTMTCSAS SSVSYMHWYQ QKSGTSPKRW |
| | | IYDTSKLASG VPGRFSGSGS GNSYSLTISS VEAEDDATYY CQQWSKHPLT |
| | | FGAGTKLEIK AAAGSGGSGI IHVKGKHLCP SPLFPGPSKP FWVLVVVGGV |
| | | LACYSLLVTV AFIIFWVRSK RSRLLHSDYM NMTPRRPGPT RKHYQPYAPP |
| | | RDFAAYRSKK VAKKPTNKAP HPKQEPQEIN FPDDLPGSNT AAPVQETLHG |
| | | CQPVTQEDGK ESRISVQERQ |
| 304 | GM-CSF_SS1_ | MWLQSLLLLG TVACSISQVQ LQQSGPELEK PGASVKLSCK ASGYSFTGYT |
| | spCD28(trun)_ | MNWVKQSHGK SLEWIGLITP YNGASSYNQK FRGKATLTVD KSSSTAYMDL |
| | CD28_CD40 | LSLTSEDSAV YFCARGGYDG RGFDYWGQGT TVTVSSGGGG SGGGGSGGGG |
| | | SDIELTQSPA IMSASPGEKV TMTCSASSSV SYMHWYQQKS GTSPKRWIYD |
| | | TSKLASGVPG RFSGSGSGNS YSLTISSVEA EDDATYYCQQ WSKHPLTFGA |
| | | GTKLEIKAAA GSGGSGIIHV KGKHLCPSPL FPGPSKPFWV LVVVGGVLAC |
| | | YSLLVTVAFI IFWVRSKRSR LLHSDYMNMT PRRPGPTRKH YQPYAPPRDF |
| | | AAYRSKKVAK KPTNKAPHPK QEPQEINFPD DLPGSNTAAP VQETLHGCQP |
| | | VTQEDGKESR ISVQERQ |
| 305 | hIgGk-VIII_ | MEAPAQLLFL LLLWLPDTTR QVQLQQSGPE LEKPGASVKL SCKASGYSFT |
| | SS1_ | GYTMNWVKQS HGKSLEWIGL ITPYNGASSY NQKFRGKATL TVDKSSSTAY |
| | spCD28(trun)_ | MDLLSLTSED SAVYFCARGG YDGRGFDYWG QGTTVTVSSG GGGSGGGGSG |
| | CD28_CD40 | GGGSDIELTQ SPAIMSASPG EKVTMTCSAS SSVSYMHWYQ QKSGTSPKRW |
| | | IYDTSKLASG VPGRFSGSGS GNSYSLTISS VEAEDDATYY CQQWSKHPLT |
| | | FGAGTKLEIK AAAGSGGSGI IHVKGKHLCP SPLFPGPSKP FWVLVVVGGV |
| | | LACYSLLVTV AFIIFWVRSK RSRLLHSDYM NMTPRRPGPT RKHYQPYAPP |
| | | RDFAAYRSKK VAKKPTNKAP HPKQEPQEIN FPDDLPGSNT AAPVQETLHG |
| | | CQPVTQEDGK ESRISVQERQ |
| 306 | OSM_M5_ | MGVLLTQRTL LSLVLALLFP SMASMQVQLV QSGAEVEKPG ASVKVSCKAS |
| | spCD28(trun)_ | GYTFTDYYMH WVRQAPGQGL EWMGWINPNS GGTNYAQKFQ GRVTMTRDTS |
| | CD28_CD40 | ISTAYMELSR LRSDDTAVYY CASGWDFDYW GQGTLVTVSS GGGGSGGGGS |
| | CTP249 | GGGGSDIVMT QSPSSLSASV GDRVTITCRA SQSIRYYLSW YQQKPGKAPK |
| | | LLIYTASILQ NGVPSRFSGS GSGTDFTLTI SSLQPEDFAT YYCLQTYTTP |
| | | DFGPGTKVEI KAAAGSGGSG IIHVKGKHLC PSPLFPGPSK PFWVLVVVGG |
| | | VLACYSLLVT VAFIIFWVRS KRSRLLHSDY MNMTPRRPGP TRKHYQPYAP |
| | | PRDFAAYRSK KVAKKPTNKA PHPKQEPQEI NFPDDLPGSN TAAPVQETLH |
| | | GCQPVTQEDG KESRISVQER Q |
| 307 | CD8a_M5_ | MALPVTALLL PLALLLHAAR PQVQLVQSGA EVEKPGASVK VSCKASGYTF |
| | spCD28(trun)_ | TDYYMHWVRQ APGQGLEWMG WINPNSGGTN YAQKFQGRVT MTRDTSISTA |
| | CD28_CD40 | YMELSRLRSD DTAVYYCASG WDFDYWGQGT LVTVSSGGGG SGGGGSGGGG |
| | | SDIVMTQSPS SLSASVGDRV TITCRASQSI RYYLSWYQQK PGKAPKLLIY |
| | | TASILQNGVP SRFSGSGSGT DFTLTISSLQ PEDFATYYCL QTYTTPDFGP |
| | | GTKVEIKAAA GSGGSGIIHV KGKHLCPSPL FPGPSKPFWV LVVVGGVLAC |
| | | YSLLVTVAFI IFWVRSKRSR LLHSDYMNMT PRRPGPTRKH YQPYAPPRDF |
| | | AAYRSKKVAK KPTNKAPHPK QEPQEINFPD DLPGSNTAAP VQETLHGCQP |
| | | VTQEDGKESR ISVQERQ |
| 308 | CD2_M5_ | MSFPCKFVAS FLLIFNVSSK GAVSQVQLVQ SGAEVEKPGA SVKVSCKASG |
| | spCD28(trun)_ | YTFTDYYMHW VRQAPGQGLE WMGWINPNSG GTNYAQKFQG RVTMTRDTSI |
| | CD28_CD40 | STAYMELSRL RSDDTAVYYC ASGWDFDYWG QGTLVTVSSG GGGSGGGGSG |
| | | GGGSDIVMTQ SPSSLSASVG DRVTITCRAS QSIRYYLSWY QQKPGKAPKL |
| | | LIYTASILON GVPSRFSGSG SGTDFTLTIS SLQPEDFATY YCLQTYTTPD |
| | | FGPGTKVEIK AAAGSGGSGI IHVKGKHLCP SPLFPGPSKP FWVLVVVGGV |
| | | LACYSLLVTV AFIIFWVRSK RSRLLHSDYM NMTPRRPGPT RKHYQPYAPP |
| | | RDFAAYRSKK VAKKPTNKAP HPKQEPQEIN FPDDLPGSNT AAPVQETLHG |
| | | CQPVTQEDGK ESRISVQERQ |
| 309 | IL2_M5_ | MYRMQLLSCI ALSLALVTNS QVQLVQSGAE VEKPGASVKV SCKASGYTFT |
| | spCD28(trun)_ | DYYMHWVRQA PGQGLEWMGW INPNSGGTNY AQKFQGRVTM TRDTSISTAY |
| | CD28_CD40 | MELSRLRSDD TAVYYCASGW DFDYWGQGTL VTVSSGGGGS GGGGSGGGGS |
| | | DIVMTQSPSS LSASVGDRVT ITCRASQSIR YYLSWYQQKP GKAPKLLIYT |
| | | ASILQNGVPS RFSGSGSGTD FTLTISSLQP EDFATYYCLQ TYTTPDFGPG |
| | | TKVEIKAAAG SGGSGIIHVK GKHLCPSPLF PGPSKPFWVL VVVGGVLACY |
| | | SLLVTVAFII FWVRSKRSRL LHSDYMNMTP RRPGPTRKHY QPYAPPRDFA |
| | | AYRSKKVAKK PTNKAPHPKQ EPQEINFPDD LPGSNTAAPV QETLHGCQPV |
| | | TQEDGKESRI SVQERQ |
| 310 | GM-CSF_M5_ | MWLQSLLLLG TVACSISQVQ LVQSGAEVEK PGASVKVSCK ASGYTFTDYY |
| | spCD28(trun)_ | MHWVRQAPGQ GLEWMGWINP NSGGTNYAQK FQGRVTMTRD TSISTAYMEL |
| | CD28_CD40 | SRLRSDDTAV YYCASGWDFD YWGQGTLVTV SSGGGGSGGG GSGGGGSDIV |
| | | MTQSPSSLSA SVGDRVTITC RASQSIRYYL SWYQQKPGKA PKLLIYTASI |
| | | LQNGVPSRFS GSGSGTDFTL TISSLQPEDF ATYYCLQTYT TPDFGPGTKV |
| | | EIKAAAGSGG SGIIHVKGKH LCPSPLFPGP SKPFWVLVVV GGVLACYSLL |
| | | VTVAFIIFWV RSKRSRLLHS DYMNMTPRRP GPTRKHYQPY APPRDFAAYR |
| | | SKKVAKKPTN KAPHPKQEPQ EINFPDDLPG SNTAAPVQET LHGCQPVTQE |
| | | DGKESRISVQ ERQ |
| 311 | hIgGk-VIII_ | MEAPAQLLFL LLLWLPDTTR QVQLVQSGAE VEKPGASVKV SCKASGYTFT |
| | M5_ | DYYMHWVRQA PGQGLEWMGW INPNSGGTNY AQKFQGRVTM TRDTSISTAY |
| | spCD28(trun)_ | MELSRLRSDD TAVYYCASGW DFDYWGQGTL VTVSSGGGGS GGGGSGGGGS |
| | CD28_CD40 | DIVMTQSPSS LSASVGDRVT ITCRASQSIR YYLSWYQQKP GKAPKLLIYT |
| | | ASILQNGVPS RFSGSGSGTD FTLTISSLQP EDFATYYCLQ TYTTPDFGPG |
| | | TKVEIKAAAG SGGSGIIHVK GKHLCPSPLF PGPSKPFWVL VVVGGVLACY |
| | | SLLVTVAFII FWVRSKRSRL LHSDYMNMTP RRPGPTRKHY QPYAPPRDFA |
| | | AYRSKKVAKK PTNKAPHPKQ EPQEINFPDD LPGSNTAAPV QETLHGCQPV |
| | | TQEDGKESRI SVQERQ |
| 312 | OSM_HN1_ | MGVLLTQRTL LSLVLALLFP SMASMQVQLV QSGAEVKRPG ASVQVSCRAS |
| | spCD28(trun)_ | GYSINTYYMQ WVRQAPGAGL EWMGVINPSG VTSYAQKFQG RVTLTNDTST |
| | CD28_CD40 | NTVYMQLNSL TSADTAVYYC ARWALWGDFG MDVWGKGTLV TVSSGGGGSG |
| | CTP250 | GGGSGGGGSD IQMTQSPSTL SASIGDRVTI TGRASEGIYH WLAWYQQKPG |
| | | KAPKLLIYKA SSLASGAPSR FSGSGSGTDF TLTISSLQPD DFATYYCQQY |
| | | SNYPLTFGGG TKLEIKAAAG SGGSGIIHVK GKHLCPSPLF PGPSKPFWVL |
| | | VVVGGVLACY SLLVTVAFII FWVRSKRSRL LHSDYMNMTP RRPGPTRKHY |
| | | QPYAPPRDFA AYRSKKVAKK PTNKAPHPKQ EPQEINFPDD LPGSNTAAPV |
| | | QETLHGCQPV TQEDGKESRI SVQERQ |
| 313 | CD8a_HN1_ | MALPVTALLL PLALLLHAAR PQVQLVQSGA EVKRPGASVQ VSCRASGYSI |
| | spCD28(trun)_ | NTYYMQWVRQ APGAGLEWMG VINPSGVTSY AQKFQGRVTL TNDTSTNTVY |
| | CD28_CD40 | MQLNSLTSAD TAVYYCARWA LWGDFGMDVW GKGTLVTVSS GGGGSGGGGS |
| | | GGGGSDIQMT QSPSTLSASI GDRVTITCRA SEGIYHWLAW YQQKPGKAPK |
| | | LLIYKASSLA SGAPSRFSGS GSGTDFTLTI SSLQPDDFAT YYCQQYSNYP |
| | | LTFGGGTKLE IKAAAGSGGS GIIHVKGKHL CPSPLFPGPS KPFWVLVVVG |
| | | GVLACYSLLV TVAFIIFWVR SKRSRLLHSD YMNMTPRRPG PTRKHYQPYA |
| | | PPRDFAAYRS KKVAKKPTNK APHPKQEPQE INFPDDLPGS NTAAPVQETL |
| | | HGCQPVTQED GKESRISVQE RQ |
| 314 | CD2_HN1_ | MSFPCKFVAS FLLIFNVSSK GAVSQVQLVQ SGAEVKRPGA SVQVSCRASG |
| | spCD28(trun)_ | YSINTYYMOW VRQAPGAGLE WMGVINPSGV TSYAQKFQGR VTLTNDTSTN |
| | CD28_CD40 | TVYMQLNSLT SADTAVYYGA RWALWGDFGM DVWGKGTLVT VSSGGGGSGG |
| | | GGSGGGGSDI QMTQSPSTLS ASIGDRVTIT CRASEGIYHW LAWYQQKPGK |
| | | APKLLIYKAS SLASGAPSRF SGSGSGTDFT LTISSLQPDD FATYYCQQYS |
| | | NYPLTFGGGT KLEIKAAAGS GGSGIIHVKG KHLCPSPLFP GPSKPFWVLV |
| | | VVGGVLACYS LLVTVAFIIF WVRSKRSRLL HSDYMNMTPR RPGPTRKHYQ |
| | | PYAPPRDFAA YRSKKVAKKP TNKAPHPKQE PQEINFPDDL PGSNTAAPVQ |
| | | ETLHGCQPVT QEDGKESRIS VQERQ |
| 315 | IL2_HN1_ | MYRMQLLSCI ALSLALVTNS QVQLVQSGAE VKRPGASVQV SCRASGYSIN |
| | spCD28(trun)_ | TYYMQWVRQA PGAGLEWMGV INPSGVTSYA QKFQGRVTLT NDTSTNTVYM |
| | CD28_CD40 | QLNSLTSADT AVYYCARWAL WGDFGMDVWG KGTLVTVSSG GGGSGGGGSG |
| | | GGGSDIQMTQ SPSTLSASIG DRVTITCRAS EGIYHWLAWY QQKPGKAPKL |
| | | LIYKASSLAS GAPSRFSGSG SGTDFTLTIS SLQPDDFATY YCQQYSNYPL |
| | | TFGGGTKLEI KAAAGSGGSG IIHVKGKHLC PSPLFPGPSK PFWVLVVVGG |
| | | VLACYSLLVT VAFIIFWVRS KRSRLLHSDY MNMTPRRPGP TRKHYQPYAP |
| | | PRDFAAYRSK KVAKKPTNKA PHPKQEPQEI NFPDDLPGSN TAAPVQETLH |
| | | GCQPVTQEDG KESRISVQER Q |
| 316 | GM-CSF_HN1_ | MWLQSLLLLG TVACSISQVQ LVQSGAEVKR PGASVQVSCR ASGYSINTYY |
| | spCD28(trun)_ | MQWVRQAPGA GLEWMGVINP SGVTSYAQKF QGRVTLTNDT STNTVYMQLN |
| | CD28_CD40 | SLTSADTAVY YCARWALWGD FGMDVWGKGT LVTVSSGGGG SGGGGSGGGG |
| | | SDIQMTQSPS TLSASIGDRV TITCRASEGI YHWLAWYQQK PGKAPKLLIY |
| | | KASSLASGAP SRFSGSGSGT DFTLTISSLQ PDDFATYYCQ QYSNYPLTFG |
| | | GGTKLEIKAA AGSGGSGIIH VKGKHLCPSP LFPGPSKPFW VLVVVGGVLA |
| | | CYSLLVTVAF IIFWVRSKRS RLLHSDYMNM TPRRPGPTRK HYQPYAPPRD |
| | | FAAYRSKKVA KKPTNKAPHP KQEPQEINFP DDLPGSNTAA PVQETLHGCQ |
| | | PVTQEDGKES RISVQERQ |
| 317 | hIgGk-VIII_ | MEAPAQLLFL LLLWLPDTTR QVQLVQSGAE VKRPGASVQV SCRASGYSIN |
| | HN1_ | TYYMQWVRQA PGAGLEWMGV INPSGVTSYA QKFQGRVTLT NDTSTNTVYM |
| | spCD28(trun)_ | QLNSLTSADT AVYYCARWAL WGDFGMDVWG KGTLVTVSSG GGGSGGGGSG |
| | CD28_CD40 | GGGSDIQMTQ SPSTLSASIG DRVTITCRAS EGIYHWLAWY QQKPGKAPKL |
| | | LIYKASSLAS GAPSRFSGSG SGTDFTLTIS SLQPDDFATY YCQQYSNYPL |
| | | TFGGGTKLEI KAAAGSGGSG IIHVKGKHLC PSPLFPGPSK PFWVLVVVGG |
| | | VLACYSLLVT VAFIIFWVRS KRSRLLHSDY MNMTPRRPGP TRKHYQPYAP |
| | | PRDFAAYRSK KVAKKPTNKA PHPKQEPQEI NFPDDLPGSN TAAPVQETLH |
| | | GCQPVTQEDG KESRISVQER Q |
| 318 | OSM_M912_ | MGVLLTQRTL LSLVLALLFP SMASMQVQLQ ESGPGLVKPS ETLSLTCTVS |
| | spCD28(trun)_ | GGSVSSGSYY WSWIRQPPGK GLEWIGYIYY SGSTNYNPSL KSRVTISVDT |
| | CD28_CD40 | SKNQFSLKLS SVTAADTAVY YCAREGKNGA FDIWGQGTMV TVSSGGGGSG |
| | CTP251 | GGGSGGGGSD IQMTQSPSSL SASVGDRVTI TCRASQSISS YLNWYQQKPG |
| | | KAPKLLIYAA SSLQSGVPSG FSGSGSGTDF TLTISSLQPE DFATYYCQQS |
| | | YSTPLTFGGG TKVEIKAAAG SGGSGIIHVK GKHLCPSPLF PGPSKPFWVL |
| | | VVVGGVLACY SLLVTVAFII FWVRSKRSRL LHSDYMNMTP RRPGPTRKHY |
| | | QPYAPPRDFA AYRSKKVAKK PTNKAPHPKQ EPQEINFPDD LPGSNTAAPV |
| | | QETLHGCQPV TQEDGKESRI SVQERQ |
| 319 | CD8a_M912_ | MALPVTALLL PLALLLHAAR PQVQLQESGP GLVKPSETLS LTCTVSGGSV |
| | spCD28(trun)_ | SSGSYYWSWI RQPPGKGLEW IGYIYYSGST NYNPSLKSRV TISVDTSKNQ |
| | CD28_CD40 | FSLKLSSVTA ADTAVYYCAR EGKNGAFDIW GQGTMVTVSS GGGGSGGGGS |
| | | GGGGSDIQMT QSPSSLSASV GDRVTITCRA SQSISSYLNW YQQKPGKAPK |
| | | LLIYAASSLQ SGVPSGFSGS GSGTDFTLTI SSLQPEDFAT YYCQQSYSTP |
| | | LTFGGGTKVE IKAAAGSGGS GIIHVKGKHL CPSPLFPGPS KPFWVLVVVG |
| | | GVLACYSLLV TVAFIIFWVR SKRSRLLHSD YMNMTPRRPG PTRKHYQPYA |
| | | PPRDFAAYRS KKVAKKPTNK APHPKQEPQE INFPDDLPGS NTAAPVQETL |
| | | HGCQPVTQED GKESRISVQE RQ |
| 320 | CD2_M912_ | MSFPCKFVAS FLLIFNVSSK GAVSQVQLQE SGPGLVKPSE TLSLTCTVSG |
| | spCD28(trun)_ | GSVSSGSYYW SWIRQPPGKG LEWIGYIYYS GSTNYNPSLK SRVTISVDTS |
| | CD28_CD40 | KNQFSLKLSS VTAADTAVYY CAREGKNGAF DIWGQGTMVT VSSGGGGSGG |
| | | GGSGGGGSDI QMTQSPSSLS ASVGDRVTIT CRASQSISSY LNWYQQKPGK |
| | | APKLLIYAAS SLQSGVPSGF SGSGSGTDFT LTISSLQPED FATYYCQQSY |
| | | STPLTFGGGT KVEIKAAAGS GGSGIIHVKG KHLCPSPLFP GPSKPFWVLV |
| | | VVGGVLACYS LLVTVAFIIF WVRSKRSRLL HSDYMNMTPR RPGPTRKHYQ |
| | | PYAPPRDFAA YRSKKVAKKP TNKAPHPKQE PQEINFPDDL PGSNTAAPVQ |
| | | ETLHGCQPVT QEDGKESRIS VQERQ |
| 321 | IL2_M912_ | MYRMQLLSCI ALSLALVTNS QVQLQESGPG LVKPSETLSL TCTVSGGSVS |
| | spCD28(trun)_ | SGSYYWSWIR QPPGKGLEWI GYIYYSGSTN YNPSLKSRVT ISVDTSKNQF |
| | CD28_CD40 | SLKLSSVTAA DTAVYYCARE GKNGAFDIWG QGTMVTVSSG GGGSGGGGSG |
| | | GGGSDIQMTQ SPSSLSASVG DRVTITCRAS QSISSYLNWY QQKPGKAPKL |
| | | LIYAASSLQS GVPSGFSGSG SGTDFTLTIS SLQPEDFATY YCQQSYSTPL |
| | | TFGGGTKVEI KAAAGSGGSG IIHVKGKHLC PSPLFPGPSK PFWVLVVVGG |
| | | VLACYSLLVT VAFIIFWVRS KRSRLLHSDY MNMTPRRPGP TRKHYQPYAP |
| | | PRDFAAYRSK KVAKKPTNKA PHPKQEPQEI NFPDDLPGSN TAAPVQETLH |
| | | GCQPVTQEDG KESRISVQER Q |
| 322 | GM-CSF_M912_ | MWLQSLLLLG TVACSISQVQ LQESGPGLVK PSETLSLTCT VSGGSVSSGS |
| | spCD28(trun)_ | YYWSWIRQPP GKGLEWIGYI YYSGSTNYNP SLKSRVTISV DTSKNQFSLK |
| | CD28_CD40 | LSSVTAADTA VYYCAREGKN GAFDIWGQGT MVTVSSGGGG SGGGGSGGGG |
| | | SDIQMTQSPS SLSASVGDRV TITCRASQSI SSYLNWYQQK PGKAPKLLIY |
| | | AASSLQSGVP SGFSGSGSGT DFTLTISSLQ PEDFATYYCQ QSYSTPLTFG |
| | | GGTKVEIKAA AGSGGSGIIH VKGKHLCPSP LFPGPSKPFW VLVVVGGVLA |
| | | CYSLLVTVAF IIFWVRSKRS RLLHSDYMNM TPRRPGPTRK HYQPYAPPRD |
| | | FAAYRSKKVA KKPTNKAPHP KQEPQEINFP DDLPGSNTAA PVQETLHGCQ |
| | | PVTQEDGKES RISVQERQ |
| 323 | hIgGk-VIII_ | MEAPAQLLFL LLLWLPDTTR QVQLQESGPG LVKPSETLSL TCTVSGGSVS |
| | M912_ | SGSYYWSWIR QPPGKGLEWI GYIYYSGSTN YNPSLKSRVT ISVDTSKNQF |
| | spCD28(trun)_ | SLKLSSVTAA DTAVYYCARE GKNGAFDIWG QGTMVTVSSG GGGSGGGGSG |
| | CD28_CD40 | GGGSDIQMTQ SPSSLSASVG DRVTITCRAS QSISSYLNWY QQKPGKAPKL |
| | | LIYAASSLQS GVPSGFSGSG SGTDFTLTIS SLQPEDFATY YCQQSYSTPL |
| | | TFGGGTKVEI KAAAGSGGSG IIHVKGKHLC PSPLFPGPSK PFWVLVVVGG |
| | | VLACYSLLVT VAFIIFWVRS KRSRLLHSDY MNMTPRRPGP TRKHYQPYAP |
| | | PRDFAAYRSK KVAKKPTNKA PHPKQEPQEI NFPDDLPGSN TAAPVQETLH |
| | | GCQPVTQEDG KESRISVQER Q |
| 324 | OSM_HuYP218_ | MGVLLTQRTL LSLVLALLFP SMASMEVQLV ESGGGLVQPG GSLRLSCAAS |
| | spCD28(trun)_ | GFDLGFYFYA CWVRQAPGKG LEWVSCIYTA GSGSTYYASW AKGRFTISRD |
| | CD28_CD40 | NSKNTLYLQM NSLRAEDTAV YYCARSTANT RSTYYLNLWG QGTLVTVSSG |
| | CTP252 | GGGSGGGGSG GGGSDIQMTQ SPSSLSASVG DRVTITCQAS QRISSYLSWY |
| | | QQKPGKVPKL LIYGASTLAS GVPSRFSGSG SGTDFTLTIS SLQPEDVATY |
| | | YCQSYAYFDS NNWHAFGGGT KVEIAAAGSG GSGIIHVKGK HLCPSPLFPG |
| | | PSKPFWVLVV VGGVLACYSL LVTVAFIIFW VRSKRSRLLH SDYMNMTPRR |
| | | PGPTRKHYQP YAPPRDFAAY RSKKVAKKPT NKAPHPKQEP QEINFPDDLP |
| | | GSNTAAPVQE TLHGCQPVTQ EDGKESRISV QERQ |
| 325 | CD8a_HuYP218_ | MALPVTALLL PLALLLHAAR PEVQLVESGG GLVQPGGSLR LSCAASGFDL |
| | spCD28(trun)_ | GFYFYACWVR QAPGKGLEWV SCIYTAGSGS TYYASWAKGR FTISRDNSKN |
| | CD28_CD40 | TLYLQMNSLR AEDTAVYYGA RSTANTRSTY YLNLWGQGTL VTVSSGGGGS |
| | | GGGGSGGGGS DIQMTQSPSS LSASVGDRVT ITCQASQRIS SYLSWYQQKP |
| | | GKVPKLLIYG ASTLASGVPS RFSGSGSGTD FTLTISSLQP EDVATYYCQS |
| | | YAYFDSNNWH AFGGGTKVEI AAAGSGGSGI IHVKGKHLCP SPLFPGPSKP |
| | | FWVLVVVGGV LACYSLLVTV AFIIFWVRSK RSRLLHSDYM NMTPRRPGPT |
| | | RKHYQPYAPP RDFAAYRSKK VAKKPTNKAP HPKQEPQEIN FPDDLPGSNT |
| | | AAPVQETLHG CQPVTQEDGK ESRISVQERQ |
| 326 | CD2_HuYP218_ | MSFPCKFVAS FLLIFNVSSK GAVSEVQLVE SGGGLVQPGG SLRLSCAASG |
| | spCD28(trun)_ | FDLGFYFYAC WVRQAPGKGL EWVSCIYTAG SGSTYYASWA KGRFTISRDN |
| | CD28_CD40 | SKNTLYLQMN SLRAEDTAVY YCARSTANTR STYYLNLWGQ GTLVTVSSGG |
| | | GGSGGGGSGG GGSDIQMTQS PSSLSASVGD RVTITCQASQ RISSYLSWYQ |
| | | QKPGKVPKLL IYGASTLASG VPSRFSGSGS GTDFTLTISS LQPEDVATYY |
| | | CQSYAYFDSN NWHAFGGGTK VEIAAAGSGG SGIIHVKGKH LCPSPLFPGP |
| | | SKPFWVLVVV GGVLACYSLL VTVAFIIFWV RSKRSRLLHS DYMNMTPRRP |
| | | GPTRKHYQPY APPRDFAAYR SKKVAKKPTN KAPHPKQEPQ EINFPDDLPG |
| | | SNTAAPVQET LHGCQPVTQE DGKESRISVQ ERQ |
| 327 | IL2_HuYP218_ | MYRMQLLSCI ALSLALVTNS EVQLVESGGG LVQPGGSLRL SCAASGFDLG |
| | spCD28(trun)_ | FYFYACWVRQ APGKGLEWVS GIYTAGSGST YYASWAKGRF TISRDNSKNT |
| | CD28_CD40 | LYLQMNSLRA EDTAVYYCAR STANTRSTYY LNLWGQGTLV TVSSGGGGSG |
| | | GGGSGGGGSD IQMTQSPSSL SASVGDRVTI TCQASQRISS YLSWYQQKPG |
| | | KVPKLLIYGA STLASGVPSR FSGSGSGTDF TLTISSLQPE DVATYYCQSY |
| | | AYFDSNNWHA FGGGTKVEIA AAGSGGSGII HVKGKHLCPS PLFPGPSKPF |
| | | WVLVVVGGVL ACYSLLVTVA FIIFWVRSKR SRLLHSDYMN MTPRRPGPTR |
| | | KHYQPYAPPR DFAAYRSKKV AKKPTNKAPH PKQEPQEINF PDDLPGSNTA |
| | | APVQETLHGC QPVTQEDGKE SRISVQERQ |
| 328 | GM-CSF_ | MWLQSLLLLG TVACSISEVQ LVESGGGLVQ PGGSLRLSCA ASGFDLGFYF |
| | HuYP218_ | YACWVRQAPG KGLEWVSCIY TAGSGSTYYA SWAKGRFTIS RDNSKNTLYL |
| | spCD28(trun)_ | QMNSLRAEDT AVYYCARSTA NTRSTYYLNL WGQGTLVTVS SGGGGSGGGG |
| | CD28_CD40 | SGGGGSDIQM TQSPSSLSAS VGDRVTITCQ ASQRISSYLS WYQQKPGKVP |
| | | KLLIYGASTL ASGVPSRFSG SGSGTDFTLT ISSLQPEDVA TYYCQSYAYF |
| | | DSNNWHAFGG GTKVEIAAAG SGGSGIIHVK GKHLCPSPLF PGPSKPFWVL |
| | | VVVGGVLACY SLLVTVAFII FWVRSKRSRL LHSDYMNMTP RRPGPTRKHY |
| | | QPYAPPRDFA AYRSKKVAKK PTNKAPHPKQ EPQEINFPDD LPGSNTAAPV |
| | | QETLHGCQPV TQEDGKESRI SVQERQ |
| 329 | hIgGk-VIII_ | MEAPAQLLFL LLLWLPDTTR EVQLVESGGG LVQPGGSLRL SCAASGFDLG |
| | HuYP218_ | FYFYACWVRQ APGKGLEWVS GIYTAGSGST YYASWAKGRF TISRDNSKNT |
| | spCD28(trun)_ | LYLQMNSLRA EDTAVYYCAR STANTRSTYY LNLWGQGTLV TVSSGGGGSG |
| | CD28_CD40 | GGGSGGGGSD IQMTQSPSSL SASVGDRVTI TCQASQRISS YLSWYQQKPG |
| | | KVPKLLIYGA STLASGVPSR FSGSGSGTDF TLTISSLQPE DVATYYCQSY |
| | | AYFDSNNWHA FGGGTKVEIA AAGSGGSGII HVKGKHLCPS PLFPGPSKPF |
| | | WVLVVVGGVL ACYSLLVTVA FIIFWVRSKR SRLLHSDYMN MTPRRPGPTR |
| | | KHYQPYAPPR DFAAYRSKKV AKKPTNKAPH PKQEPQEINF PDDLPGSNTA |
| | | APVQETLHGC QPVTQEDGKE SRISVQERQ |
| 330 | OSM_P4_ | MGVLLTQRTL LSLVLALLFP SMASMQVQLQ QSGPGLVTPS QTLSLTCAIS |
| | spCD28(trun)_ | GDSVSSNSAT WNWIRQSPSR GLEWLGRTYY RSKWYNDYAV SVKSRMSINP |
| | CD28_CD40 | DTSKNQFSLQ LNSVTPEDTA VYYCARGMMT YYYGMDVWGQ GTTVTVSSGG |
| | CTP253 | GGSGGGGSGG GGSQPVLTQS SSLSASPGAS ASLTCTLRSG INVGPYRIYW |
| | | YQQKPGSPPQ YLLNYKSDSD KQQGSGVPSR FSGSKDASAN AGVLLISGLR |
| | | SEDEADYYGM IWHSSAAVFG GGTQLTVLSA AAGSGGSGII HVKGKHLCPS |
| | | PLFPGPSKPF WVLVVVGGVL ACYSLLVTVA FIIFWVRSKR SRLLHSDYMN |
| | | MTPRRPGPTR KHYQPYAPPR DFAAYRSKKV AKKPTNKAPH PKQEPQEINF |
| | | PDDLPGSNTA APVQETLHGC QPVTQEDGKE SRISVQERQ |
| 331 | CD8a_P4_ | MALPVTALLL PLALLLHAAR PQVQLQQSGP GLVTPSQTLS LTCAISGDSV |
| | spCD28(trun)_ | SSNSATWNWI RQSPSRGLEW LGRTYYRSKW YNDYAVSVKS RMSINPDTSK |
| | CD28_CD40 | NQFSLQLNSV TPEDTAVYYC ARGMMTYYYG MDVWGQGTTV TVSSGGGGSG |
| | | GGGSGGGGSQ PVLTQSSSLS ASPGASASLT CTLRSGINVG PYRIYWYQQK |
| | | PGSPPQYLLN YKSDSDKQQG SGVPSRFSGS KDASANAGVL LISGLRSEDE |
| | | ADYYCMIWHS SAAVFGGGTQ LTVLSAAAGS GGSGIIHVKG KHLCPSPLFP |
| | | GPSKPFWVLV VVGGVLACYS LLVTVAFIIF WVRSKRSRLL HSDYMNMTPR |
| | | RPGPTRKHYQ PYAPPRDFAA YRSKKVAKKP TNKAPHPKQE PQEINFPDDL |
| | | PGSNTAAPVQ ETLHGCQPVT QEDGKESRIS VQERQ |
| 332 | CD2_P4_ | MSFPCKFVAS FLLIFNVSSK GAVSQVQLQQ SGPGLVTPSQ TLSLTCAISG |
| | spCD28(trun)_ | DSVSSNSATW NWIRQSPSRG LEWLGRTYYR SKWYNDYAVS VKSRMSINPD |
| | CD28_CD40 | TSKNQFSLQL NSVTPEDTAV YYCARGMMTY YYGMDVWGQG TTVTVSSGGG |
| | | GSGGGGSGGG GSQPVLTQSS SLSASPGASA SLTCTLRSGI NVGPYRIYWY |
| | | QQKPGSPPQY LLNYKSDSDK QQGSGVPSRF SGSKDASANA GVLLISGLRS |
| | | EDEADYYCMI WHSSAAVFGG GTQLTVLSAA AGSGGSGIIH VKGKHLCPSP |
| | | LFPGPSKPFW VLVVVGGVLA CYSLLVTVAF IIFWVRSKRS RLLHSDYMNM |
| | | TPRRPGPTRK HYQPYAPPRD FAAYRSKKVA KKPTNKAPHP KQEPQEINFP |
| | | DDLPGSNTAA PVQETLHGCQ PVTQEDGKES RISVQERQ |
| 333 | IL2_P4_ | MYRMQLLSCI ALSLALVTNS QVQLQQSGPG LVTPSQTLSL TCAISGDSVS |
| | spCD28(trun)_ | SNSATWNWIR QSPSRGLEWL GRTYYRSKWY NDYAVSVKSR MSINPDTSKN |
| | CD28_CD40 | QFSLQLNSVT PEDTAVYYCA RGMMTYYYGM DVWGQGTTVT VSSGGGGSGG |
| | | GGSGGGGSQP VLTQSSSLSA SPGASASLTC TLRSGINVGP YRIYWYQQKP |
| | | GSPPQYLLNY KSDSDKQQGS GVPSRFSGSK DASANAGVLL ISGLRSEDEA |
| | | DYYCMIWHSS AAVFGGGTQL TVLSAAAGSG GSGIIHVKGK HLCPSPLFPG |
| | | PSKPFWVLVV VGGVLACYSL LVTVAFIIFW VRSKRSRLLH SDYMNMTPRR |
| | | PGPTRKHYQP YAPPRDFAAY RSKKVAKKPT NKAPHPKQEP QEINFPDDLP |
| | | GSNTAAPVQE TLHGCQPVTQ EDGKESRISV QERQ |
| 334 | GM-CSF_P4_ | MWLQSLLLLG TVACSISQVQ LQQSGPGLVT PSQTLSLTCA ISGDSVSSNS |
| | spCD28(trun)_ | ATWNWIRQSP SRGLEWLGRT YYRSKWYNDY AVSVKSRMSI NPDTSKNQFS |
| | CD28_CD40 | LQLNSVTPED TAVYYCARGM MTYYYGMDVW GQGTTVTVSS GGGGSGGGGS |
| | | GGGGSQPVLT QSSSLSASPG ASASLTCTLR SGINVGPYRI YWYQQKPGSP |
| | | PQYLLNYKSD SDKQQGSGVP SRFSGSKDAS ANAGVLLISG LRSEDEADYY |
| | | CMIWHSSAAV FGGGTQLTVL SAAAGSGGSG IIHVKGKHLC PSPLFPGPSK |
| | | PFWVLVVVGG VLACYSLLVT VAFIIFWVRS KRSRLLHSDY MNMTPRRPGP |
| | | TRKHYQPYAP PRDFAAYRSK KVAKKPTNKA PHPKQEPQEI NFPDDLPGSN |
| | | TAAPVQETLH GCQPVTQEDG KESRISVQER Q |
| 335 | hIgGk-VIII_ | MEAPAQLLFL LLLWLPDTTR QVQLQQSGPG LVTPSQTLSL TCAISGDSVS |
| | P4_ | SNSATWNWIR QSPSRGLEWL GRTYYRSKWY NDYAVSVKSR MSINPDTSKN |
| | spCD28(trun)_ | QFSLQLNSVT PEDTAVYYCA RGMMTYYYGM DVWGQGTTVT VSSGGGGSGG |
| | CD28_CD40 | GGSGGGGSQP VLTQSSSLSA SPGASASLTC TLRSGINVGP YRIYWYQQKP |
| | | GSPPQYLLNY KSDSDKQQGS GVPSRFSGSK DASANAGVLL ISGLRSEDEA |
| | | DYYCMIWHSS AAVFGGGTQL TVLSAAAGSG GSGIIHVKGK HLCPSPLFPG |
| | | PSKPFWVLVV VGGVLACYSL LVTVAFIIFW VRSKRSRLLH SDYMNMTPRR |
| | | PGPTRKHYQP YAPPRDFAAY RSKKVAKKPT NKAPHPKQEP QEINFPDDLP |
| | | GSNTAAPVQE TLHGCQPVTQ EDGKESRISV QERQ |
| 336 | NTRK1 IC domain | NKCGRRNKFG INRPAVLAPE DGLAMSLHFM TLGGSSLSPT EGKGSGLQGH |
| | | IIENPQYFSD ACVHHIKRRD IVLKWELGEG AFGKVFLAEC HNLLPEQDKM |
| | | LVAVKALKEA SESARQDFQR EAELLTMLQH QHIVRFFGVC TEGRPLLMVF |
| | | EYMRHGDLNR FLRSHGPDAK LLAGGEDVAP GPLGLGQLLA VASQVAAGMV |
| | | YLAGLHFVHR DLATRNCLVG QGLVVKIGDF GMSRDIYSTD YYRVGGRTML |
| | | PIRWMPPESI LYRKFTTESD VWSFGVVLWE IFTYGKQPWY QLSNTEAIDC |
| | | ITQGRELERP RACPPEVYAI MRGCWQREPQ QRHSIKDVHA RLQALAQAPP |
| | | VYLDVLG |
| 337 | ICOS | MKSGLWYFFLFLCRIKVLTGEINGSANYEMFIFHNGGVQILCKYPDIVQQ |
| | | FKMQLLKGGQILCDLTKTKGSGNTVSIKSLKFCHSQLSNNSVSFFLYNLD |
| | | HSHANYYFCNLSIFDPPPFKVTLTGGYLHIYESQLCCQLKFWLPIGCAAF |
| | | VVVCILGCILICWLTKKKYSSSVHDPNGEYMFMRAVNTAKKSRLTDVTL |
| 338 | ICOS IC domain | CWLTKKKYSS SVHDPNGEYM FMRAVNTAKK SRLTDVTL |
| 339 | mouse CD2 | RDNETIWGVL GHGITLNIPN FQMTDDIDEV RWVRRGTLVA EFKRKKPPFL |
| | | ISETYEVLAN GSLKIKKPMM RNDSGTYNVM VYGTNGMTRL EKDLDVRILE |
| | | RVSKPMIHWE CPNTTLTCAV LQGTDFELKL YQGETLLNSL PQKNMSYQWT |
| | | NLNAPFKCEA INPVSKESKM EVVNCPEKGL SFYVTVGVGA GGLLLVLLVA |
| | | LFIFCICKRR KRNRRRKDEE LEIKASRTST VERGPKPHST PAAAAQNSVA |
| | | LQAPPPPGHH LQTPGHRPLP PGHRTREHQQ KKRPPPSGTQ IHQQKGPPLP |
| | | RPRVQPKPPC GSGDGVSLPP PN |
| 340 | mouse CD2 IC | KRRKRNRRRK DEELEIKASR TSTVERGPKP HSTPAAAAQN SVALQAPPPP |
| | domain | GHHLQTPGHR PLPPGHRTRE HQQKKRPPPS GTQIHQQKGP PLPRPRVQPK |
| | | PPCGSGDGVS LPPPN |
| 341 | CD137 IC domain | KRGRKKLLYI FKQPFMRPVQ TTQEEDGCSC RFPEEEEGGC EL |
| 342 | DAP10 IC domain | LCARPRRSPA QEDGKVYINM PGRG |
| 343 | CD134 IC domain | ALYLLRRDQR LPPDAHKPPG GGSFRTPIQE EQADAHSTLA KI |
| 344 | hMFE23. | MGVLLTQRTL LSLVLALLFP SMASMQVKLE QSGAEVVKPG ASVKLSCKAS |
| | TMtCD28.NTRK1 | GFNIKDSYMH WLRQGPGQRL EWIGWIDPEN GDTEYAPKFQ GKATFTTDTS |
| | CTP313 | ANTAYLGLSS LRPEDTAVYY CNEGTPTGPY YFDYWGQGTL VTVSSGGGGS |
| | | GGGGSGGGGS ENVLTQSPSS MSASVGDRVN IACSASSSVS YMHWFQQKPG |
| | | KSPKLWIYST SNLASGVPSR FSGSGSGTDY SLTISSMQPE DAATYYCQQR |
| | | SSYPLTFGGG TKLEIKAAAG SGGSGILVKQ SPMLVAYDNA VNLSCKYSYN |
| | | LFSREFRASL HKGLDSAVEV CVVYGNYSQQ LQVYSKTGFN CDGKLGNESV |
| | | TFYLQNLYVN QTDIYFCKIE VMYPPPYLDN EKSNGTIIHV KGKHLCPSPL |
| | | FPGPSKPFWV LVVVGGVLAC YSLLVTVAFI IFWVNKCGRR NKFGINRPAV |
| | | LAPEDGLAMS LHFMTLGGSS LSPTEGKGSG LQGHIIENPQ YFSDACVHHI |
| | | KRRDIVLKWE LGEGAFGKVF LAECHNLLPE QDKMLVAVKA LKEASESARQ |
| | | DFQREAELLT MLQHQHIVRF FGVCTEGRPL LMVFEYMRHG DLNRFLRSHG |
| | | PDAKLLAGGE DVAPGPLGLG QLLAVASQVA AGMVYLAGLH FVHRDLATRN |
| | | CLVGQGLVVK IGDFGMSRDI YSTDYYRVGG RTMLPIRWMP PESILYRKFT |
| | | TESDVWSFGV VLWEIFTYGK QPWYQLSNTE AIDCITQGRE LERPRACPPE |
| | | VYAIMRGCWQ REPQQRHSIK DVHARLQALA QAPPVYLDVLG |
| 345 | hMFE23. | MGVLLTQRTL LSLVLALLFP SMASMQVKLE QSGAEVVKPG ASVKLSCKAS |
| | TMFCD28. | GFNIKDSYMH WLRQGPGQRL EWIGWIDPEN GDTEYAPKFQ GKATFTTDTS |
| | NTRK1.CD40 | ANTAYLGLSS LRPEDTAVYY CNEGTPTGPY YFDYWGQGTL VTVSSGGGGS |
| | CTP314 | GGGGSGGGGS ENVLTQSPSS MSASVGDRVN IACSASSSVS YMHWFQQKPG |
| | | KSPKLWIYST SNLASGVPSR FSGSGSGTDY SLTISSMQPE DAATYYCQQR |
| | | SSYPLTFGGG TKLEIKAAAG SGGSGILVKQ SPMLVAYDNA VNLSCKYSYN |
| | | LFSREFRASL HKGLDSAVEV CVVYGNYSQQ LQVYSKTGFN CDGKLGNESV |
| | | TFYLQNLYVN QTDIYFCKIE VMYPPPYLDN EKSNGTIIHV KGKHLCPSPL |
| | | FPGPSKPFWV LVVVGGVLAC YSLLVTVAFI IFWVNKCGRR NKFGINRPAV |
| | | LAPEDGLAMS LHFMTLGGSS LSPTEGKGSG LQGHIIENPQ YFSDACVHHI |
| | | KRRDIVLKWE LGEGAFGKVF LAECHNLLPE QDKMLVAVKA LKEASESARQ |
| | | DFQREAELLT MLQHQHIVRF FGVCTEGRPL LMVFEYMRHG DLNRFLRSHG |
| | | PDAKLLAGGE DVAPGPLGLG QLLAVASQVA AGMVYLAGLH FVHRDLATRN |
| | | CLVGQGLVVK IGDFGMSRDI YSTDYYRVGG RTMLPIRWMP PESILYRKFT |
| | | TESDVWSFGV VLWEIFTYGK QPWYQLSNTE AIDCITQGRE LERPRACPPE |
| | | VYAIMRGCWQ REPQQRHSIK DVHARLQALA QAPPVYLDVL GKKVAKKPTN |
| | | KAPHPKQEPQ EINFPDDLPG SNTAAPVQET LHGCQPVTQE DGKESRISVQ |
| | | ERQ |
| 346 | hMFE23.CD28. | MGVLLTQRTL LSLVLALLFP SMASMQVKLE QSGAEVVKPG ASVKLSCKAS |
| | tICNTRK1 | GFNIKDSYMH WLRQGPGQRL EWIGWIDPEN GDTEYAPKFQ GKATFTTDTS |
| | CTP315 | ANTAYLGLSS LRPEDTAVYY CNEGTPTGPY YFDYWGQGTL VTVSSGGGGS |
| | | GGGGSGGGGS ENVLTQSPSS MSASVGDRVN IACSASSSVS YMHWFQQKPG |
| | | KSPKLWIYST SNLASGVPSR FSGSGSGTDY SLTISSMQPE DAATYYCQQR |
| | | SSYPLTFGGG TKLEIKAAAG SGGSGILVKQ SPMLVAYDNA VNLSCKYSYN |
| | | LFSREFRASL HKGLDSAVEV CVVYGNYSQQ LQVYSKTGFN CDGKLGNESV |
| | | TFYLQNLYVN QTDIYFCKIE VMYPPPYLDN EKSNGTIIHV KGKHLCPSPL |
| | | FPGPSKPFWV LVVVGGVLAC YSLLVTVAFI IFWVRSKRSR LLHSDYMNMT |
| | | PRRPGPTRKH YQPYAPPRDF AAYRSNKCGR RNKFGINRPA VLAPEDGLAM |
| | | SLHFMTLGGS SLSPTEGKGS GLQGHIIENP QYFSDACVHH IKRRDIVLKW |
| | | ELGEGAFGKV FLAECHNLLP EQDKMLVAVK ALKEASESAR QDFQREAELL |
| | | TMLQHQHIVR FFGVCTEGRP LLMVFEYMRH GDLNRFLRSH GPDAKLLAGG |
| | | EDVAPGPLGL GQLLAVASQV AAGMVYLAGL HFVHRDLATR NCLVGQGLVV |
| | | KIGDFGMSRD IYSTDYYRVG GRTMLPIRWM PPESILYRKF TTESDVWSFG |
| | | VVLWEIFTYG KQPWYQLSNT EAIDCITQGR ELERPRACPP EVYAIMRGCW |
| | | QREPQQRHSI KDVHARLQAL AQAPPVYLDV LG |
| 347 | hMFE23.CD28. | MGVLLTQRTL LSLVLALLFP SMASMQVKLE QSGAEVVKPG ASVKLSCKAS |
| | tICNTRK1.CD40 | GFNIKDSYMH WLRQGPGQRL EWIGWIDPEN GDTEYAPKFQ GKATFTTDTS |
| | CTP316 | ANTAYLGLSS LRPEDTAVYY CNEGTPTGPY YFDYWGQGTL VTVSSGGGGS |
| | | GGGGSGGGGS ENVLTQSPSS MSASVGDRVN IACSASSSVS YMHWFQQKPG |
| | | KSPKLWIYST SNLASGVPSR FSGSGSGTDY SLTISSMQPE DAATYYCQQR |
| | | SSYPLTFGGG TKLEIKAAAG SGGSGILVKQ SPMLVAYDNA VNLSCKYSYN |
| | | LFSREFRASL HKGLDSAVEV CVVYGNYSQQ LQVYSKTGFN CDGKLGNESV |
| | | TFYLQNLYVN QTDIYFCKIE VMYPPPYLDN EKSNGTIIHV KGKHLCPSPL |
| | | FPGPSKPFWV LVVVGGVLAC YSLLVTVAFI IFWVRSKRSR LLHSDYMNMT |
| | | PRRPGPTRKH YQPYAPPRDF AAYRSNKCGR RNKFGINRPA VLAPEDGLAM |
| | | SLHFMTLGGS SLSPTEGKGS GLQGHIIENP QYFSDACVHH IKRRDIVLKW |
| | | ELGEGAFGKV FLAECHNLLP EQDKMLVAVK ALKEASESAR QDFQREAELL |
| | | TMLQHQHIVR FFGVCTEGRP LLMVFEYMRH GDLNRFLRSH GPDAKLLAGG |
| | | EDVAPGPLGL GQLLAVASQV AAGMVYLAGL HFVHRDLATR NCLVGQGLVV |
| | | KIGDFGMSRD IYSTDYYRVG GRTMLPIRWM PPESILYRKF TTESDVWSFG |
| | | VVLWEIFTYG KQPWYQLSNT EAIDCITQGR ELERPRACPP EVYAIMRGCW |
| | | QREPQQRHSI KDVHARLQAL AQAPPVYLDV LGKKVAKKPT NKAPHPKQEP |
| | | QEINFPDDLP GSNTAAPVQE TLHGCQPVTQ EDGKESRISV QERQ |
| 348 | hMFE23. | MGVLLTQRTL LSLVLALLFP SMASMQVKLE QSGAEVVKPG ASVKLSCKAS |
| | ICOS.CD40 | GFNIKDSYMH WLRQGPGQRL EWIGWIDPEN GDTEYAPKFQ GKATFTTDTS |
| | CTP317 | ANTAYLGLSS LRPEDTAVYY CNEGTPTGPY YFDYWGQGTL VTVSSGGGGS |
| | | GGGGSGGGGS ENVLTQSPSS MSASVGDRVN IACSASSSVS YMHWFQQKPG |
| | | KSPKLWIYST SNLASGVPSR FSGSGSGTDY SLTISSMQPE DAATYYCQQR |
| | | SSYPLTFGGG TKLEIKAAAG SGGSGGEING SANYEMFIFH NGGVQILCKY |
| | | PDIVQQFKMQ LLKGGQILCD LTKTKGSGNT VSIKSLKFCH SQLSNNSVSF |
| | | FLYNLDHSHA NYYFCNLSIF DPPPFKVTLT GGYLHIYESQ LCCQLKFWLP |
| | | IGCAAFVVVC ILGCILICWL TKKKYSSSVH DPNGEYMFMR AVNTAKKSRL |
| | | TDVTLKKVAK KPTNKAPHPK QEPQEINFPD DLPGSNTAAP VQETLHGCQP |
| | | VTQEDGKESR ISVQERQ |
| 349 | hMFE23. | MGVLLTQRTL LSLVLALLFP SMASMQVKLE QSGAEVVKPG ASVKLSCKAS |
| | CD28.ICOS | GFNIKDSYMH WLRQGPGQRL EWIGWIDPEN GDTEYAPKFQ GKATFTTDTS |
| | CTP318 | ANTAYLGLSS LRPEDTAVYY CNEGTPTGPY YFDYWGQGTL VTVSSGGGGS |
| | | GGGGSGGGGS ENVLTQSPSS MSASVGDRVN IACSASSSVS YMHWFQQKPG |
| | | KSPKLWIYST SNLASGVPSR FSGSGSGTDY SLTISSMQPE DAATYYCQQR |
| | | SSYPLTFGGG TKLEIKAAAG SGGSGILVKQ SPMLVAYDNA VNLSCKYSYN |
| | | LFSREFRASL HKGLDSAVEV CVVYGNYSQQ LQVYSKTGFN CDGKLGNESV |
| | | TFYLQNLYVN QTDIYFCKIE VMYPPPYLDN EKSNGTIIHV KGKHLCPSPL |
| | | FPGPSKPFWV LVVVGGVLAC YSLLVTVAFI IFWVRSKRSR LLHSDYMNMT |
| | | PRRPGPTRKH YQPYAPPRDF AAYRSCWLTK KKYSSSVHDP NGEYMFMRAV |
| | | NTAKKSRLTD VTL |
| 350 | hMFE23.CD28. | MGVLLTQRTL LSLVLALLFP SMASMQVKLE QSGAEVVKPG ASVKLSCKAS |
| | ICOS.CD40 | GFNIKDSYMH WLRQGPGQRL EWIGWIDPEN GDTEYAPKFQ GKATFTTDTS |
| | CTP319 | ANTAYLGLSS LRPEDTAVYY CNEGTPTGPY YFDYWGQGTL VTVSSGGGGS |
| | | GGGGSGGGGS ENVLTQSPSS MSASVGDRVN IACSASSSVS YMHWFQQKPG |
| | | KSPKLWIYST SNLASGVPSR FSGSGSGTDY SLTISSMQPE DAATYYCQQR |
| | | SSYPLTFGGG TKLEIKAAAG SGGSGILVKQ SPMLVAYDNA VNLSCKYSYN |
| | | LFSREFRASL HKGLDSAVEV CVVYGNYSQQ LQVYSKTGFN CDGKLGNESV |
| | | TFYLQNLYVN QTDIYFCKIE VMYPPPYLDN EKSNGTIIHV KGKHLCPSPL |
| | | FPGPSKPFWV LVVVGGVLAC YSLLVTVAFI IFWVRSKRSR LLHSDYMNMT |
| | | PRRPGPTRKH YQPYAPPRDF AAYRSCWLTK KKYSSSVHDP NGEYMFMRAV |
| | | NTAKKSRLTD VTLKKVAKKP TNKAPHPKQE PQEINFPDDL PGSNTAAPVQ |
| | | ETLHGCQPVT QEDGKESRIS VQERQ |
| 351 | hMFE23.CD2.CD40 | MGVLLTQRTL LSLVLALLFP SMASMQVKLE QSGAEVVKPG ASVKLSCKAS |
| | CTP320 | GFNIKDSYMH WLRQGPGQRL EWIGWIDPEN GDTEYAPKFQ GKATFTTDTS |
| | | ANTAYLGLSS LRPEDTAVYY CNEGTPTGPY YFDYWGQGTL VTVSSGGGGS |
| | | GGGGSGGGGS ENVLTQSPSS MSASVGDRVN IACSASSSVS YMHWFQQKPG |
| | | KSPKLWIYST SNLASGVPSR FSGSGSGTDY SLTISSMQPE DAATYYCQQR |
| | | SSYPLTFGGG TKLEIKAAAG SGGSGRDNET IWGVLGHGIT LNIPNFQMTD |
| | | DIDEVRWVRR GTLVAEFKRK KPPFLISETY EVLANGSLKI KKPMMRNDSG |
| | | TYNVMVYGTN GMTRLEKDLD VRILERVSKP MIHWECPNTT LTCAVLQGTD |
| | | FELKLYQGET LLNSLPQKNM SYQWTNLNAP FKCEAINPVS KESKMEVVNC |
| | | PEKGLSFYVT VGVGAGGLLL VLLVALFIFC ICKRRKRNRR RKDEELEIKA |
| | | SRTSTVERGP KPHSTPAAAA QNSVALQAPP PPGHHLQTPG HRPLPPGHRT |
| | | REHQQKKRPP PSGTQIHQQK GPPLPRPRVQ PKPPCGSGDG VSLPPPNKKV |
| | | AKKPTNKAPH PKQEPQEINF PDDLPGSNTA APVQETLHGC QPVTQEDGKE |
| | | SRISVQERQ |
| 352 | hMFE23. | MGVLLTQRTL LSLVLALLFP SMASMQVKLE QSGAEVVKPG ASVKLSCKAS |
| | CD28.CD2 | GFNIKDSYMH WLRQGPGQRL EWIGWIDPEN GDTEYAPKFQ GKATFTTDTS |
| | CTP321 | ANTAYLGLSS LRPEDTAVYY CNEGTPTGPY YFDYWGQGTL VTVSSGGGGS |
| | | GGGGSGGGGS ENVLTQSPSS MSASVGDRVN IACSASSSVS YMHWFQQKPG |
| | | KSPKLWIYST SNLASGVPSR FSGSGSGTDY SLTISSMQPE DAATYYCQQR |
| | | SSYPLTFGGG TKLEIKAAAG SGGSGILVKQ SPMLVAYDNA VNLSCKYSYN |
| | | LFSREFRASL HKGLDSAVEV CVVYGNYSQQ LQVYSKTGFN CDGKLGNESV |
| | | TFYLQNLYVN QTDIYFCKIE VMYPPPYLDN EKSNGTIIHV KGKHLCPSPL |
| | | FPGPSKPFWV LVVVGGVLAC YSLLVTVAFI IFWVRSKRSR LLHSDYMNMT |
| | | PRRPGPTRKH YQPYAPPRDF AAYRSKRRKR NRRRKDEELE IKASRTSTVE |
| | | RGPKPHSTPA AAAQNSVALQ APPPPGHHLQ TPGHRPLPPG HRTREHQQKK |
| | | RPPPSGTQIH QQKGPPLPRP RVQPKPPCGS GDGVSLPPPN |
| 353 | hMFE23.CD28. | MGVLLTQRTL LSLVLALLFP SMASMQVKLE QSGAEVVKPG ASVKLSCKAS |
| | CD40.CD2 | GFNIKDSYMH WLRQGPGQRL EWIGWIDPEN GDTEYAPKFQ GKATFTTDTS |
| | CTP322 | ANTAYLGLSS LRPEDTAVYY CNEGTPTGPY YFDYWGQGTL VTVSSGGGGS |
| | | GGGGSGGGGS ENVLTQSPSS MSASVGDRVN IACSASSSVS YMHWFQQKPG |
| | | KSPKLWIYST SNLASGVPSR FSGSGSGTDY SLTISSMQPE DAATYYCQQR |
| | | SSYPLTFGGG TKLEIKAAAG SGGSGILVKQ SPMLVAYDNA VNLSCKYSYN |
| | | LFSREFRASL HKGLDSAVEV CVVYGNYSQQ LQVYSKTGFN CDGKLGNESV |
| | | TFYLQNLYVN QTDIYFCKIE VMYPPPYLDN EKSNGTIIHV KGKHLCPSPL |
| | | FPGPSKPFWV LVVVGGVLAC YSLLVTVAFI IFWVRSKRSR LLHSDYMNMT |
| | | PRRPGPTRKH YQPYAPPRDF AAYRSKKVAK KPTNKAPHPK QEPQEINFPD |
| | | DLPGSNTAAP VQETLHGCQP VTQEDGKESR ISVQERQKRR KRNRRRKDEE |
| | | LEIKASRTST VERGPKPHST PAAAAQNSVA LQAPPPPGHH LQTPGHRPLP |
| | | PGHRTREHQQ KKRPPPSGTQ IHQQKGPPLP RPRVQPKPPC GSGDGVSLPP |
| | | PN |
| 354 | hMFE23. | MGVLLTQRTL LSLVLALLFP SMASMQVKLE QSGAEVVKPG ASVKLSCKAS |
| | CD28.CD137 | GFNIKDSYMH WLRQGPGQRL EWIGWIDPEN GDTEYAPKFQ GKATFTTDTS |
| | CTP323 | ANTAYLGLSS LRPEDTAVYY CNEGTPTGPY YFDYWGQGTL VTVSSGGGGS |
| | | GGGGSGGGGS ENVLTQSPSS MSASVGDRVN IACSASSSVS YMHWFQQKPG |
| | | KSPKLWIYST SNLASGVPSR FSGSGSGTDY SLTISSMQPE DAATYYCQQR |
| | | SSYPLTFGGG TKLEIKAAAG SGGSGILVKQ SPMLVAYDNA VNLSCKYSYN |
| | | LFSREFRASL HKGLDSAVEV CVVYGNYSQQ LQVYSKTGFN CDGKLGNESV |
| | | TFYLQNLYVN QTDIYFCKIE VMYPPPYLDN EKSNGTIIHV KGKHLCPSPL |
| | | FPGPSKPFWV LVVVGGVLAC YSLLVTVAFI IFWVRSKRSR LLHSDYMNMT |
| | | PRRPGPTRKH YQPYAPPRDF AAYRSKRGRK KLLYIFKQPF MRPVQTTQEE |
| | | DGCSCRFPEE EEGGCEL |
| 355 | hMFE23.CD28. | MGVLLTQRTL LSLVLALLFP SMASMQVKLE QSGAEVVKPG ASVKLSCKAS |
| | CD40.CD137 | GFNIKDSYMH WLRQGPGQRL EWIGWIDPEN GDTEYAPKFQ GKATFTTDTS |
| | CTP324 | ANTAYLGLSS LRPEDTAVYY CNEGTPTGPY YFDYWGQGTL VTVSSGGGGS |
| | | GGGGSGGGGS ENVLTQSPSS MSASVGDRVN IACSASSSVS YMHWFQQKPG |
| | | KSPKLWIYST SNLASGVPSR FSGSGSGTDY SLTISSMQPE DAATYYCQQR |
| | | SSYPLTFGGG TKLEIKAAAG SGGSGILVKQ SPMLVAYDNA VNLSCKYSYN |
| | | LFSREFRASL HKGLDSAVEV CVVYGNYSQQ LQVYSKTGFN CDGKLGNESV |
| | | TFYLQNLYVN QTDIYFCKIE VMYPPPYLDN EKSNGTIIHV KGKHLCPSPL |
| | | FPGPSKPFWV LVVVGGVLAC YSLLVTVAFI IFWVRSKRSR LLHSDYMNMT |
| | | PRRPGPTRKH YQPYAPPRDF AAYRSKKVAK KPTNKAPHPK QEPQEINFPD |
| | | DLPGSNTAAP VQETLHGCQP VTQEDGKESR ISVQERQKRG RKKLLYIFKQ |
| | | PFMRPVQTTQ EEDGCSCRFP EEEEGGCEL |
| 356 | hMFE23.CD28. | MGVLLTQRTL LSLVLALLFP SMASMQVKLE QSGAEVVKPG ASVKLSCKAS |
| | DAP10 | GFNIKDSYMH WLRQGPGQRL EWIGWIDPEN GDTEYAPKFQ GKATFTTDTS |
| | CTP325 | ANTAYLGLSS LRPEDTAVYY CNEGTPTGPY YFDYWGQGTL VTVSSGGGGS |
| | | GGGGSGGGGS ENVLTQSPSS MSASVGDRVN IACSASSSVS YMHWFQQKPG |
| | | KSPKLWIYST SNLASGVPSR FSGSGSGTDY SLTISSMQPE DAATYYCQQR |
| | | SSYPLTFGGG TKLEIKAAAG SGGSGILVKQ SPMLVAYDNA VNLSCKYSYN |
| | | LFSREFRASL HKGLDSAVEV CVVYGNYSQQ LQVYSKTGFN CDGKLGNESV |
| | | TFYLQNLYVN QTDIYFCKIE VMYPPPYLDN EKSNGTIIHV KGKHLCPSPL |
| | | FPGPSKPFWV LVVVGGVLAC YSLLVTVAFI IFWVRSKRSR LLHSDYMNMT |
| | | PRRPGPTRKH YQPYAPPRDF AAYRSLCARP RRSPAQEDGK VYINMPGRG |
| 357 | hMFE23.CD28. | MGVLLTQRTL LSLVLALLFP SMASMQVKLE QSGAEVVKPG ASVKLSCKAS |
| | CD40.DAP10 | GFNIKDSYMH WLRQGPGQRL EWIGWIDPEN GDTEYAPKFQ GKATFTTDTS |
| | CTP326 | ANTAYLGLSS LRPEDTAVYY CNEGTPTGPY YFDYWGQGTL VTVSSGGGGS |
| | | GGGGSGGGGS ENVLTQSPSS MSASVGDRVN IACSASSSVS YMHWFQQKPG |
| | | KSPKLWIYST SNLASGVPSR FSGSGSGTDY SLTISSMQPE DAATYYCQQR |
| | | SSYPLTFGGG TKLEIKAAAG SGGSGILVKQ SPMLVAYDNA VNLSCKYSYN |
| | | LFSREFRASL HKGLDSAVEV CVVYGNYSQQ LQVYSKTGFN CDGKLGNESV |
| | | TFYLQNLYVN QTDIYFCKIE VMYPPPYLDN EKSNGTIIHV KGKHLCPSPL |
| | | FPGPSKPFWV LVVVGGVLAC YSLLVTVAFI IFWVRSKRSR LLHSDYMNMT |
| | | PRRPGPTRKH YQPYAPPRDF AAYRSKKVAK KPTNKAPHPK QEPQEINFPD |
| | | DLPGSNTAAP VQETLHGCQP VTQEDGKESR ISVQERQLCA RPRRSPAQED |
| | | GKVYINMPGR G |
| 358 | hMFE23.CD28. | MGVLLTQRTL LSLVLALLFP SMASMQVKLE QSGAEVVKPG ASVKLSCKAS |
| | CD134 | GFNIKDSYMH WLRQGPGQRL EWIGWIDPEN GDTEYAPKFQ GKATFTTDTS |
| | CTP327 | ANTAYLGLSS LRPEDTAVYY CNEGTPTGPY YFDYWGQGTL VTVSSGGGGS |
| | | GGGGSGGGGS ENVLTQSPSS MSASVGDRVN IACSASSSVS YMHWFQQKPG |
| | | KSPKLWIYST SNLASGVPSR FSGSGSGTDY SLTISSMQPE DAATYYCQQR |
| | | SSYPLTFGGG TKLEIKAAAG SGGSGILVKQ SPMLVAYDNA VNLSCKYSYN |
| | | LFSREFRASL HKGLDSAVEV CVVYGNYSQQ LQVYSKTGFN CDGKLGNESV |
| | | TFYLQNLYVN QTDIYFCKIE VMYPPPYLDN EKSNGTIIHV KGKHLCPSPL |
| | | FPGPSKPFWV LVVVGGVLAC YSLLVTVAFI IFWVRSKRSR LLHSDYMNMT |
| | | PRRPGPTRKH YQPYAPPRDF AAYRSALYLL RRDQRLPPDA HKPPGGGSFR |
| | | TPIQEEQADA HSTLAKI |
| 359 | hMFE23.CD28. | MGVLLTQRTL LSLVLALLFP SMASMQVKLE QSGAEVVKPG ASVKLSCKAS |
| | CD40.CD134 | GFNIKDSYMH WLRQGPGQRL EWIGWIDPEN GDTEYAPKFQ GKATFTTDTS |
| | CTP328 | ANTAYLGLSS LRPEDTAVYY CNEGTPTGPY YFDYWGQGTL VTVSSGGGGS |
| | | GGGGSGGGGS ENVLTQSPSS MSASVGDRVN IACSASSSVS YMHWFQQKPG |
| | | KSPKLWIYST SNLASGVPSR FSGSGSGTDY SLTISSMQPE DAATYYCQQR |
| | | SSYPLTFGGG TKLEIKAAAG SGGSGILVKQ SPMLVAYDNA VNLSCKYSYN |
| | | LFSREFRASL HKGLDSAVEV CVVYGNYSQQ LQVYSKTGFN CDGKLGNESV |
| | | TFYLQNLYVN QTDIYFCKIE VMYPPPYLDN EKSNGTIIHV KGKHLCPSPL |
| | | FPGPSKPFWV LVVVGGVLAC YSLLVTVAFI IFWVRSKRSR LLHSDYMNMT |
| | | PRRPGPTRKH YQPYAPPRDF AAYRSKKVAK KPTNKAPHPK QEPQEINFPD |
| | | DLPGSNTAAP VQETLHGCQP VTQEDGKESR ISVQERQALY LLRRDQRLPP |
| | | DAHKPPGGGS FRTPIQEEQA DAHSTLAKI |
| 360 | PD1_PDl_ | MQIPQAPWPV VWAVLQLGWR PGWFLDSPDR PWNPPTFSPA LLVVTEGDNA |
| | sCD28TM_CD28_ | TFTCSFSNTS ESFVLNWYRM SPSNQTDKLA AFPEDRSQPG QDCRFRVTQL |
| | CD40 | PNGRDFHMSV VRARRNDSGT YLCGAISLAP KAQIKESLRA ELRVTERRAE |
| | (monomeric) | VPTAHPSPSP RPAGQFWVLV VVGGVLACYS LLVTVAFIIF WVRSKRSRLL |
| | CTP189 | HSDYMNMTPR RPGPTRKHYQ PYAPPRDFAA YRSKKVAKKP TNKAPHPKQE |
| | | PQEINFPDDL PGSNTAAPVQ ETLHGCQPVT QEDGKESRIS VQERQ |
| 361 | OSM_MFE23_ | MGVLLTQRTL LSLVLALLFP SMASMQVQLQ QSGAELVRSG TSVKLSCTAS |
| | spCD28_ | GFNIKDSYMH WLRQGPEQGL EWIGWIDPEN GDTEYAPKFQ GKATFTTDTS |
| | CD28_CD40 | SNTAYLQLSS LTSEDTAVYY CNEGTPTGPY YFDYWGQGTT VTVSSGGGGS |
| | (SVQE-AVQA) | GGGGSGGGGS ENVLTQSPAI MSASPGEKVT ITCSASSSVS YMHWFQQKPG |
| | CTP195 | TSPKLWIYST SNLASGVPAR FSGSGSGTSY SLTISRMEAE DAATYYCQQR |
| | | SSYPLTFGAG TKLELKRAAA GSGGSGILVK QSPMLVAYDN AVNLSCKYSY |
| | | NLFSREFRAS LHKGLDSAVE VCVVYGNYSQ QLQVYSKTGF NCDGKLGNES |
| | | VTFYLQNLYV NQTDIYFCKI EVMYPPPYLD NEKSNGTIIH VKGKHLCPSP |
| | | LFPGPSKPFW VLVVVGGVLA CYSLLVTVAF IIFWVRSKRS RLLHSDYMNM |
| | | TPRRPGPTRK HYQPYAPPRD FAAYRSKKVA KKPTNKAPHP KQEPQEINFP |
| | | DDLPGSNTAA PVQETLHGCQ PVTQEDGKES RIAVQARQ |
| 362 | OSM_MFE23_ | MGVLLTQRTL LSLVLALLFP SMASMQVQLQ QSGAELVRSG TSVKLSCTAS |
| | spCD28_ | GFNIKDSYMH WLRQGPEQGL EWIGWIDPEN GDTEYAPKFQ GKATFTTDTS |
| | CD28_CD40 | SNTAYLQLSS LTSEDTAVYY CNEGTPTGPY YFDYWGQGTT VTVSSGGGGS |
| | (PVQET-AVAEA) | GGGGSGGGGS ENVLTQSPAI MSASPGEKVT ITCSASSSVS YMHWFQQKPG |
| | CTP196 | TSPKLWIYST SNLASGVPAR FSGSGSGTSY SLTISRMEAE DAATYYCQQR |
| | | SSYPLTFGAG TKLELKRAAA GSGGSGILVK QSPMLVAYDN AVNLSCKYSY |
| | | NLFSREFRAS LHKGLDSAVE VCVVYGNYSQ QLQVYSKTGF NCDGKLGNES |
| | | VTFYLQNLYV NQTDIYFCKI EVMYPPPYLD NEKSNGTIIH VKGKHLCPSP |
| | | LFPGPSKPFW VLVVVGGVLA CYSLLVTVAF IIFWVRSKRS RLLHSDYMNM |
| | | TPRRPGPTRK HYQPYAPPRD FAAYRSKKVA KKPTNKAPHP KQEPQEINFP |
| | | DDLPGSNTAA AVAEALHGCQ PVTQEDGKES RISVQERQ |
| 363 | OSM_MFE23_ | MGVLLTQRTL LSLVLALLFP SMASMQVQLQ QSGAELVRSG TSVKLSCTAS |
| | spCD28_ | GFNIKDSYMH WLRQGPEQGL EWIGWIDPEN GDTEYAPKFQ GKATFTTDTS |
| | CD28_CD40 | SNTAYLQLSS LTSEDTAVYY CNEGTPTGPY YFDYWGQGTT VTVSSGGGGS |
| | (PQEINF-AQAINF) | GGGGSGGGGS ENVLTQSPAI MSASPGEKVT ITCSASSSVS YMHWFQQKPG |
| | CTP197 | TSPKLWIYST SNLASGVPAR FSGSGSGTSY SLTISRMEAE DAATYYCQQR |
| | | SSYPLTFGAG TKLELKRAAA GSGGSGILVK QSPMLVAYDN AVNLSCKYSY |
| | | NLFSREFRAS LHKGLDSAVE VCVVYGNYSQ QLQVYSKTGF NCDGKLGNES |
| | | VTFYLQNLYV NQTDIYFCKI EVMYPPPYLD NEKSNGTIIH VKGKHLCPSP |
| | | LFPGPSKPFW VLVVVGGVLA CYSLLVTVAF IIFWVRSKRS RLLHSDYMNM |
| | | TPRRPGPTRK HYQPYAPPRD FAAYRSKKVA KKPTNKAPHP KQEAQAINFP |
| | | DDLPGSNTAA PVQETLHGCQ PVTQEDGKES RISVQERQ |
| 364 | OSM_MFE23_ | MGVLLTQRTL LSLVLALLFP SMASMQVQLQ QSGAELVRSG TSVKLSCTAS |
| | spCD28_ | GFNIKDSYMH WLRQGPEQGL EWIGWIDPEN GDTEYAPKFQ GKATFTTDTS |
| | CD28_CD40 | SNTAYLQLSS LTSEDTAVYY CNEGTPTGPY YFDYWGQGTT VTVSSGGGGS |
| | (P227A) | GGGGSGGGGS ENVLTQSPAI MSASPGEKVT ITCSASSSVS YMHWFQQKPG |
| | CTP198 | TSPKLWIYST SNLASGVPAR FSGSGSGTSY SLTISRMEAE DAATYYCQQR |
| | | SSYPLTFGAG TKLELKRAAA GSGGSGILVK QSPMLVAYDN AVNLSCKYSY |
| | | NLFSREFRAS LHKGLDSAVE VCVVYGNYSQ QLQVYSKTGF NCDGKLGNES |
| | | VTFYLQNLYV NQTDIYFCKI EVMYPPPYLD NEKSNGTIIH VKGKHLCPSP |
| | | LFPGPSKPFW VLVVVGGVLA CYSLLVTVAF IIFWVRSKRS RLLHSDYMNM |
| | | TPRRPGPTRK HYQPYAPPRD FAAYRSKKVA KKPTNKAAHP KQEPQEINFP |
| | | DDLPGSNTAA PVQETLHGCQ PVTQEDGKES RISVQERQ |
| 365 | OSM_MFE23_ | MGVLLTQRTL LSLVLALLFP SMASMQVOLQ QSGAELVRSG TSVKLSCTAS |
| | spCD28_CD28_ | GFNIKDSYMH WLRQGPEQGL EWIGWIDPEN GDTEYAPKFQ GKATFTTDTS |
| | CD40(Q263A) | SNTAYLQLSS LTSEDTAVYY CNEGTPTGPY YFDYWGQGTT VTVSSGGGGS |
| | CTP199 | GGGGSGGGGS ENVLTQSPAI MSASPGEKVT ITCSASSSVS YMHWFQQKPG |
| | | TSPKLWIYST SNLASGVPAR FSGSGSGTSY SLTISRMEAE DAATYYCQQR |
| | | SSYPLTFGAG TKLELKRAAA GSGGSGILVK QSPMLVAYDN AVNLSCKYSY |
| | | NLFSREFRAS LHKGLDSAVE VCVVYGNYSQ QLQVYSKTGF NCDGKLGNES |
| | | VTFYLQNLYV NQTDIYFCKI EVMYPPPYLD NEKSNGTIIH VKGKHLCPSP |
| | | LFPGPSKPFW VLVVVGGVLA CYSLLVTVAF IIFWVRSKRS RLLHSDYMNM |
| | | TPRRPGPTRK HYQPYAPPRD FAAYRSKKVA KKPTNKAPHP KQEPQEINFP |
| | | DDLPGSNTAA PVQETLHGCQ PVTAEDGKES RISVQERQ |
| 366 | OSM_MFE23_ | MGVLLTQRTL LSLVLALLFP SMASMQVQLQ QSGAELVRSG TSVKLSCTAS |
| | spCD28_ | GFNIKDSYMH WLRQGPEQGL EWIGWIDPEN GDTEYAPKFQ GKATFTTDTS |
| | CD28_ | SNTAYLQLSS LTSEDTAVYY CNEGTPTGPY YFDYWGQGTT VTVSSGGGGS |
| | CD40_ | GGGGSGGGGS ENVLTQSPAI MSASPGEKVT ITCSASSSVS YMHWFQQKPG |
| | CD40_CD40 | TSPKLWIYST SNLASGVPAR FSGSGSGTSY SLTISRMEAE DAATYYCQQR |
| | CTP200 | SSYPLTFGAG TKLELKRAAA GSGGSGILVK QSPMLVAYDN AVNLSCKYSY |
| | | NLFSREFRAS LHKGLDSAVE VCVVYGNYSQ QLQVYSKTGF NCDGKLGNES |
| | | VTFYLQNLYV NQTDIYFCKI EVMYPPPYLD NEKSNGTIIH VKGKHLCPSP |
| | | LFPGPSKPFW VLVVVGGVLA CYSLLVTVAF IIFWVRSKRS RLLHSDYMNM |
| | | TPRRPGPTRK HYQPYAPPRD FAAYRSKKVA KKPTNKAPHP KQEPQEINFP |
| | | DDLPGSNTAA PVQETLHGCQ PVTAEDGKES RISVQERQKK VAKKPTNKAP |
| | | HPKQEPQEIN FPDDLPGSNT AAPVQETLHG CQPVTAEDGK ESRISVQERQ |
| 367 | OSM_MFE23_ | MGVLLTQRTL LSLVLALLFP SMASMQVQLQ QSGAELVRSG TSVKLSCTAS |
| | spCD28_CD28 | GFNIKDSYMH WLRQGPEQGL EWIGWIDPEN GDTEYAPKFQ GKATFTTDTS |
| | (PYAPP-AYAA)_ | SNTAYLQLSS LTSEDTAVYY CNEGTPTGPY YFDYWGQGTT VTVSSGGGGS |
| | CD40 | GGGGSGGGGS ENVLTQSPAI MSASPGEKVT ITCSASSSVS YMHWFQQKPG |
| | CTP201 | TSPKLWIYST SNLASGVPAR FSGSGSGTSY SLTISRMEAE DAATYYCQQR |
| | | SSYPLTFGAG TKLELKRAAA GSGGSGILVK QSPMLVAYDN AVNLSCKYSY |
| | | NLFSREFRAS LHKGLDSAVE VCVVYGNYSQ QLQVYSKTGF NCDGKLGNES |
| | | VTFYLQNLYV NQTDIYFCKI EVMYPPPYLD NEKSNGTIIH VKGKHLCPSP |
| | | LFPGPSKPFW VLVVVGGVLA CYSLLVTVAF IIFWVRSKRS RLLHSDYMNM |
| | | TPRRPGPTRK HYQAYAAPRD FAAYRSKKVA KKPTNKAPHP KQEPQEINFP |
| | | DDLPGSNTAA PVQETLHGCQ PVTQEDGKES RISVQERQ |
| 368 | OSM_MFE23_ | MGVLLTQRTL LSLVLALLFP SMASMQVOLQ QSGAELVRSG TSVKLSCTAS |
| | spCD28_CD28 | GFNIKDSYMH WLRQGPEQGL EWIGWIDPEN GDTEYAPKFQ GKATFTTDTS |
| | (YMNM-FMNM)_ | SNTAYLQLSS LTSEDTAVYY CNEGTPTGPY YFDYWGQGTT VTVSSGGGGS |
| | CD40 | GGGGSGGGGS ENVLTQSPAI MSASPGEKVT ITCSASSSVS YMHWFQQKPG |
| | CTP202 | TSPKLWIYST SNLASGVPAR FSGSGSGTSY SLTISRMEAE DAATYYCQQR |
| | | SSYPLTFGAG TKLELKRAAA GSGGSGILVK QSPMLVAYDN AVNLSCKYSY |
| | | NLFSREFRAS LHKGLDSAVE VCVVYGNYSQ QLQVYSKTGF NCDGKLGNES |
| | | VTFYLQNLYV NQTDIYFCKI EVMYPPPYLD NEKSNGTIIH VKGKHLCPSP |
| | | LFPGPSKPFW VLVVVGGVLA CYSLLVTVAF IIFWVRSKRS RLLHSDFMNM |
| | | TPRRPGPTRK HYQPYAPPRD FAAYRSKKVA KKPTNKAPHP KQEPQEINFP |
| | | DDLPGSNTAA PVQETLHGCQ PVTQEDGKES RISVQERQ |
| 369 | OSM_MFE23_ | MGVLLTQRTL LSLVLALLFP SMASMQVQLQ QSGAELVRSG TSVKLSCTAS |
| | spCD28_CD40 | GFNIKDSYMH WLRQGPEQGL EWIGWIDPEN GDTEYAPKFQ GKATFTTDTS |
| | | SNTAYLQLSS LTSEDTAVYY CNEGTPTGPY YFDYWGQGTT VTVSSGGGGS |
| | | GGGGSGGGGS ENVLTQSPAI MSASPGEKVT ITCSASSSVS YMHWFQQKPG |
| | | TSPKLWIYST SNLASGVPAR FSGSGSGTSY SLTISRMEAE DAATYYCQQR |
| | | SSYPLTFGAG TKLELKRAAA GSGGSGILVK QSPMLVAYDN AVNLSCKYSY |
| | | NLFSREFRAS LHKGLDSAVE VCVVYGNYSQ QLQVYSKTGF NCDGKLGNES |
| | | VTFYLQNLYV NQTDIYFCKI EVMYPPPYLD NEKSNGTIIH VKGKHLCPSP |
| | | LFPGPSKPFW VLVVVGGVLA CYSLLVTVAF IIFWVKKVAK KPTNKAPHPK |
| | | QEPQEINFPD DLPGSNTAAP VQETLHGCQP VTQEDGKESR ISVQERQ |
| 370 | OSM_MFE23_ | MGVLLTQRTL LSLVLALLFP SMASMQVQLQ QSGAELVRSG TSVKLSCTAS |
| | spCD28_ | GFNIKDSYMH WLRQGPEQGL EWIGWIDPEN GDTEYAPKFQ GKATFTTDTS |
| | CD137_CD40 | SNTAYLQLSS LTSEDTAVYY CNEGTPTGPY YFDYWGQGTT VTVSSGGGGS |
| | | GGGGSGGGGS ENVLTQSPAI MSASPGEKVT ITCSASSSVS YMHWFQQKPG |
| | | TSPKLWIYST SNLASGVPAR FSGSGSGTSY SLTISRMEAE DAATYYCQQR |
| | | SSYPLTFGAG TKLELKRAAA GSGGSGILVK QSPMLVAYDN AVNLSCKYSY |
| | | NLFSREFRAS LHKGLDSAVE VCVVYGNYSQ QLQVYSKTGF NCDGKLGNES |
| | | VTFYLQNLYV NQTDIYFCKI EVMYPPPYLD NEKSNGTIIH VKGKHLCPSP |
| | | LFPGPSKPFW VLVVVGGVLA CYSLLVTVAF IIFWVRFSVV KRGRKKLLYI |
| | | FKQPFMRPVQ TTQEEDGCSC RFPEEEEGGC EKKVAKKPTN KAPHPKQEPQ |
| | | EINFPDDLPG SNTAAPVQET LHGCQPVTQE DGKESRISVQ ERQ |
| 371 | OSM_MFE23_ | MGVLLTQRTL LSLVLALLFP SMASMQVQLQ QSGAELVRSG TSVKLSCTAS |
| | spCD28_ | GFNIKDSYMH WLRQGPEQGL EWIGWIDPEN GDTEYAPKFQ GKATFTTDTS |
| | CD134_CD40 | SNTAYLQLSS LTSEDTAVYY CNEGTPTGPY YFDYWGQGTT VTVSSGGGGS |
| | | GGGGSGGGGS ENVLTQSPAI MSASPGEKVT ITCSASSSVS YMHWFQQKPG |
| | | TSPKLWIYST SNLASGVPAR FSGSGSGTSY SLTISRMEAE DAATYYCQQR |
| | | SSYPLTFGAG TKLELKRAAA GSGGSGILVK QSPMLVAYDN AVNLSCKYSY |
| | | NLFSREFRAS LHKGLDSAVE VCVVYGNYSQ QLQVYSKTGF NCDGKLGNES |
| | | VTFYLQNLYV NQTDIYFCKI EVMYPPPYLD NEKSNGTIIH VKGKHLCPSP |
| | | LFPGPSKPFW VLVVVGGVLA CYSLLVTVAF IIFWVRRDQR LPPDAHKPPG |
| | | GGSFRTPIQE EQADAHSTLA KIKKVAKKPT NKAPHPKQEP QEINFPDDLP |
| | | GSNTAAPVQE TLHGCQPVTQ EDGKESRISV QERQ |
| 372 | OSM_MFE23_ | MGVLLTQRTL LSLVLALLFP SMASMQVQLQ QSGAELVRSG TSVKLSCTAS |
| | spCD28_ | GFNIKDSYMH WLRQGPEQGL EWIGWIDPEN GDTEYAPKFQ GKATFTTDTS |
| | CD2_CD40 | SNTAYLQLSS LTSEDTAVYY CNEGTPTGPY YFDYWGQGTT VTVSSGGGGS |
| | | GGGGSGGGGS ENVLTQSPAI MSASPGEKVT ITCSASSSVS YMHWFQQKPG |
| | | TSPKLWIYST SNLASGVPAR FSGSGSGTSY SLTISRMEAE DAATYYCQQR |
| | | SSYPLTFGAG TKLELKRAAA GSGGSGILVK QSPMLVAYDN AVNLSCKYSY |
| | | NLFSREFRAS LHKGLDSAVE VCVVYGNYSQ QLQVYSKTGF NCDGKLGNES |
| | | VTFYLQNLYV NQTDIYFCKI EVMYPPPYLD NEKSNGTIIH VKGKHLCPSP |
| | | LFPGPSKPFW VLVVVGGVLA CYSLLVTVAF IIFWVKRKKQ RSRRNDEELE |
| | | TRAHRVATEE RGRKPHQIPA STPQNPATSQ HPPPPPGHRS QAPSHRPPPP |
| | | GHRVQHQPQK RPPAPSGTQV HQQKGPPLPR PRVQPKPPHG AAENSLSPSS |
| | | NKKVAKKPTN KAPHPKQEPQ EINFPDDLPG SNTAAPVQET LHGCQPVTQE |
| | | DGKESRISVQ ERQ |
| 373 | OSM_MFE23_ | MGVLLTQRTL LSLVLALLFP SMASMQVQLQ QSGAELVRSG TSVKLSCTAS |
| | spCD28_ | GFNIKDSYMH WLRQGPEQGL EWIGWIDPEN GDTEYAPKFQ GKATFTTDTS |
| | GITR_CD40 | SNTAYLQLSS LTSEDTAVYY CNEGTPTGPY YFDYWGQGTT VTVSSGGGGS |
| | | GGGGSGGGGS ENVLTQSPAI MSASPGEKVT ITCSASSSVS YMHWFQQKPG |
| | | TSPKLWIYST SNLASGVPAR FSGSGSGTSY SLTISRMEAE DAATYYCQQR |
| | | SSYPLTFGAG TKLELKRAAA GSGGSGILVK QSPMLVAYDN AVNLSCKYSY |
| | | NLFSREFRAS LHKGLDSAVE VCVVYGNYSQ QLQVYSKTGF NCDGKLGNES |
| | | VTFYLQNLYV NQTDIYFCKI EVMYPPPYLD NEKSNGTIIH VKGKHLCPSP |
| | | LFPGPSKPFW VLVVVGGVLA CYSLLVTVAF IIFWVQLGLH IWQLRSQCMW |
| | | PRETQLLLEV PPSTEDARSC QFPEEERGER SAEEKGRLGD LWVKKVAKKP |
| | | TNKAPHPKQE PQEINFPDDL PGSNTAAPVQ ETLHGCQPVT QEDGKESRIS |
| | | VQERQ |
| 374 | OSM_MFE23_ | MGVLLTQRTL LSLVLALLFP SMASMQVQLQ QSGAELVRSG TSVKLSCTAS |
| | spCD28_ | GFNIKDSYMH WLRQGPEQGL EWIGWIDPEN GDTEYAPKFQ GKATFTTDTS |
| | CD29_CD40 | SNTAYLQLSS LTSEDTAVYY CNEGTPTGPY YFDYWGQGTT VTVSSGGGGS |
| | | GGGGSGGGGS ENVLTQSPAI MSASPGEKVT ITCSASSSVS YMHWFQQKPG |
| | | TSPKLWIYST SNLASGVPAR FSGSGSGTSY SLTISRMEAE DAATYYCQQR |
| | | SSYPLTFGAG TKLELKRAAA GSGGSGILVK QSPMLVAYDN AVNLSCKYSY |
| | | NLFSREFRAS LHKGLDSAVE VCVVYGNYSQ QLQVYSKTGF NCDGKLGNES |
| | | VTFYLQNLYV NQTDIYFCKI EVMYPPPYLD NEKSNGTIIH VKGKHLCPSP |
| | | LFPGPSKPFW VLVVVGGVLA CYSLLVTVAF IIFWVKLLMI IHDRREFAKF |
| | | EKEKMNAKWD TGENPIYKSA VTTVVNPKYE GKKKVAKKPT NKAPHPKQEP |
| | | QEINFPDDLP GSNTAAPVQE TLHGCQPVTQ EDGKESRISV QERQ |
| 375 | OSM_MFE23_ | MGVLLTQRTL LSLVLALLFP SMASMQVQLQ QSGAELVRSG TSVKLSCTAS |
| | spCD28_ | GFNIKDSYMH WLRQGPEQGL EWIGWIDPEN GDTEYAPKFQ GKATFTTDTS |
| | CD150_CD40 | SNTAYLQLSS LTSEDTAVYY CNEGTPTGPY YFDYWGQGTT VTVSSGGGGS |
| | | GGGGSGGGGS ENVLTQSPAI MSASPGEKVT ITCSASSSVS YMHWFQQKPG |
| | | TSPKLWIYST SNLASGVPAR FSGSGSGTSY SLTISRMEAE DAATYYCQQR |
| | | SSYPLTFGAG TKLELKRAAA GSGGSGILVK QSPMLVAYDN AVNLSCKYSY |
| | | NLFSREFRAS LHKGLDSAVE VCVVYGNYSQ QLQVYSKTGF NCDGKLGNES |
| | | VTFYLQNLYV NQTDIYFCKI EVMYPPPYLD NEKSNGTIIH VKGKHLCPSP |
| | | LFPGPSKPFW VLVVVGGVLA CYSLLVTVAF IIFWVRRRGK TNHYQTTVEK |
| | | KSLTIYAQVQ KPGPLQKKLD SFPAQDPCTT IYVAATEPVP ESVQETNSIT |
| | | VYASVTLPES KKVAKKPTNK APHPKQEPQE INFPDDLPGS NTAAPVQETL |
| | | HGCQPVTQED GKESRISVQE RQ |
| 376 | OSM_MFE23_ | MGVLLTQRTL LSLVLALLFP SMASMQVQLQ QSGAELVRSG TSVKLSCTAS |
| | spCD8_CD40 | GFNIKDSYMH WLRQGPEQGL EWIGWIDPEN GDTEYAPKFQ GKATFTTDTS |
| | CTP193 | SNTAYLQLSS LTSEDTAVYY CNEGTPTGPY YFDYWGQGTT VTVSSGGGGS |
| | | GGGGSGGGGS ENVLTQSPAI MSASPGEKVT ITCSASSSVS YMHWFQQKPG |
| | | TSPKLWIYST SNLASGVPAR FSGSGSGTSY SLTISRMEAE DAATYYCQQR |
| | | SSYPLTFGAG TKLELKRAAA GSGGSGFVPV FLPAKPTTTP APRPPTPAPT |
| | | IASQPLSLRP EACRPAAGGA VHTRGLDFAC DIYIWAPLAG TCGVLLLSLV |
| | | ITLYCNHRNK KVAKKPTNKA PHPKQEPQEI NFPDDLPGSN TAAPVQETLH |
| | | GCQPVTQEDG KESRISVQER Q |
| 377 | OSM_MFE23_ | MGVLLTQRTL LSLVLALLFP SMASMQVQLQ QSGAELVRSG TSVKLSCTAS |
| | spCD8_ | GFNIKDSYMH WLRQGPEQGL EWIGWIDPEN GDTEYAPKFQ GKATFTTDTS |
| | CD137_CD40 | SNTAYLQLSS LTSEDTAVYY CNEGTPTGPY YFDYWGQGTT VTVSSGGGGS |
| | CTP192 | GGGGSGGGGS ENVLTQSPAI MSASPGEKVT ITCSASSSVS YMHWFQQKPG |
| | | TSPKLWIYST SNLASGVPAR FSGSGSGTSY SLTISRMEAE DAATYYCQQR |
| | | SSYPLTFGAG TKLELKRAAA GSGGSGFVPV FLPAKPTTTP APRPPTPAPT |
| | | IASQPLSLRP EACRPAAGGA VHTRGLDFAC DIYIWAPLAG TCGVLLLSLV |
| | | ITLYCNHRNR FSVVKRGRKK LLYIFKQPFM RPVQTTQEED GCSCRFPEEE |
| | | EGGGEKKVAK KPTNKAPHPK QEPQEINFPD DLPGSNTAAP VQETLHGCQP |
| | | VTQEDGKESR ISVQERQ |
| 378 | OSM_MFE23_ | MGVLLTQRTL LSLVLALLFP SMASMQVOLQ QSGAELVRSG TSVKLSCTAS |
| | spCD8_ | GFNIKDSYMH WLRQGPEQGL EWIGWIDPEN GDTEYAPKFQ GKATFTTDTS |
| | CD134_CD40 | SNTAYLQLSS LTSEDTAVYY CNEGTPTGPY YFDYWGQGTT VTVSSGGGGS |
| | | GGGGSGGGGS ENVLTQSPAI MSASPGEKVT ITCSASSSVS YMHWFQQKPG |
| | | TSPKLWIYST SNLASGVPAR FSGSGSGTSY SLTISRMEAE DAATYYCQQR |
| | | SSYPLTFGAG TKLELKRAAA GSGGSGFVPV FLPAKPTTTP APRPPTPAPT |
| | | IASQPLSLRP EACRPAAGGA VHTRGLDFAC DIYIWAPLAG TCGVLLLSLV |
| | | ITLYCNHRNR RDQRLPPDAH KPPGGGSFRT PIQEEQADAH STLAKIKKVA |
| | | KKPTNKAPHP KQEPQEINFP DDLPGSNTAA PVQETLHGCQ PVTQEDGKSR |
| | | ISVQERQ |
| 379 | OSM_MFE23_ | MGVLLTQRTL LSLVLALLFP SMASMQVQLQ QSGAELVRSG TSVKLSCTAS |
| | spCD8_ | GFNIKDSYMH WLRQGPEQGL EWIGWIDPEN GDTEYAPKFQ GKATFTTDTS |
| | CD2_CD40 | SNTAYLQLSS LTSEDTAVYY CNEGTPTGPY YFDYWGQGTT VTVSSGGGGS |
| | CTP191 | GGGGSGGGGS ENVLTQSPAI MSASPGEKVT ITCSASSSVS YMHWFQQKPG |
| | | TSPKLWIYST SNLASGVPAR FSGSGSGTSY SLTISRMEAE DAATYYCQQR |
| | | SSYPLTFGAG TKLELKRAAA GSGGSGFVPV FLPAKPTTTP APRPPTPAPT |
| | | IASQPLSLRP EACRPAAGGA VHTRGLDFAC DIYIWAPLAG TCGVLLLSLV |
| | | ITLYCNHRNK RKKQRSRRND EELETRAHRV ATEERGRKPH QIPASTPQNP |
| | | ATSQHPPPPP GHRSQAPSHR PPPPGHRVQH QPQKRPPAPS GTQVHQQKGP |
| | | PLPRPRVQPK PPHGAAENSL SPSSNKKVAK KPTNKAPHPK QEPQEINFPD |
| | | DLPGSNTAAP VQETLHGCQP VTQEDGKESR ISVQERQ |
| 380 | OSM_MFE23_ | MGVLLTQRTL LSLVLALLFP SMASMQVQLQ QSGAELVRSG TSVKLSCTAS |
| | spCD8_ | GFNIKDSYMH WLRQGPEQGL EWIGWIDPEN GDTEYAPKFQ GKATFTTDTS |
| | GITR_CD40 | SNTAYLQLSS LTSEDTAVYY CNEGTPTGPY YFDYWGQGTT VTVSSGGGGS |
| | | GGGGSGGGGS ENVLTQSPAI MSASPGEKVT ITCSASSSVS YMHWFQQKPG |
| | | TSPKLWIYST SNLASGVPAR FSGSGSGTSY SLTISRMEAE DAATYYCQQR |
| | | SSYPLTFGAG TKLELKRAAA GSGGSGFVPV FLPAKPTTTP APRPPTPAPT |
| | | IASQPLSLRP EACRPAAGGA VHTRGLDFAC DIYIWAPLAG TCGVLLLSLV |
| | | ITLYCNHRNQ LGLHIWQLRS QCMWPRETQL LLEVPPSTED ARSCQFPEEE |
| | | RGERSAEEKG RLGDLWVKKV AKKPTNKAPH PKQEPQEINF PDDLPGSNTA |
| | | APVQETLHGC QPVTQEDGKE SRISVQERQ |
| 381 | OSM_MFE23_ | MGVLLTQRTL LSLVLALLFP SMASMQVQLQ QSGAELVRSG TSVKLSCTAS |
| | spCD8_ | GFNIKDSYMH WLRQGPEQGL EWIGWIDPEN GDTEYAPKFQ GKATFTTDTS |
| | CD29_CD40 | SNTAYLQLSS LTSEDTAVYY CNEGTPTGPY YFDYWGQGTT VTVSSGGGGS |
| | | GGGGSGGGGS ENVLTQSPAI MSASPGEKVT ITCSASSSVS YMHWFQQKPG |
| | | TSPKLWIYST SNLASGVPAR FSGSGSGTSY SLTISRMEAE DAATYYCQQR |
| | | SSYPLTFGAG TKLELKRAAA GSGGSGFVPV FLPAKPTTTP APRPPTPAPT |
| | | IASQPLSLRP EACRPAAGGA VHTRGLDFAC DIYIWAPLAG TCGVLLLSLV |
| | | ITLYCNHRNK LLMIIHDRRE FAKFEKEKMN AKWDTGENPI YKSAVTTVVN |
| | | PKYEGKKKVA KKPTNKAPHP KQEPQEINFP DDLPGSNTAA PVQETLHGCQ |
| | | PVTQEDGKES RISVQERQ |
| 382 | OSM_MFE23_ | MGVLLTQRTL LSLVLALLFP SMASMQVQLQ QSGAELVRSG TSVKLSCTAS |
| | spCD8_ | GFNIKDSYMH WLRQGPEQGL EWIGWIDPEN GDTEYAPKFQ GKATFTTDTS |
| | CD150_CD40 | SNTAYLQLSS LTSEDTAVYY CNEGTPTGPY YFDYWGQGTT VTVSSGGGGS |
| | | GGGGSGGGGS ENVLTQSPAI MSASPGEKVT ITCSASSSVS YMHWFQQKPG |
| | | TSPKLWIYST SNLASGVPAR FSGSGSGTSY SLTISRMEAE DAATYYCQQR |
| | | SSYPLTFGAG TKLELKRAAA GSGGSGFVPV FLPAKPTTTP APRPPTPAPT |
| | | IASQPLSLRP EACRPAAGGA VHTRGLDFAC DIYIWAPLAG TCGVLLLSLV |
| | | ITLYCNHRNR RRGKTNHYQT TVEKKSLTIY AQVQKPGPLQ KKLDSFPAQD |
| | | PCTTIYVAAT EPVPESVQET NSITVYASVT LPESKKVAKK PTNKAPHPKQ |
| | | EPQEINFPDD LPGSNTAAPV QETLHGCQPV TQEDGKESRI SVQERQ |
| 383 | OSM_MFE23_ | MGVLLTQRTL LSLVLALLFP SMASMQVQLQ QSGAELVRSG TSVKLSCTAS |
| | spIG4_ | GFNIKDSYMH WLRQGPEQGL EWIGWIDPEN GDTEYAPKFQ GKATFTTDTS |
| | CD28_CD40 | SNTAYLQLSS LTSEDTAVYY CNEGTPTGPY YFDYWGQGTT VTVSSGGGGS |
| | CTP203 | GGGGSGGGGS ENVLTQSPAI MSASPGEKVT ITCSASSSVS YMHWFQQKPG |
| | | TSPKLWIYST SNLASGVPAR FSGSGSGTSY SLTISRMEAE DAATYYCQQR |
| | | SSYPLTFGAG TKLELKRAAA GSGGSGESKY GPPCPSCPAP EFLGGPSVFL |
| | | FPPKPKDTLM ISRTPEVTCV VVDVSQEDPE VQFNWYVDGV EVHNAKTKPR |
| | | EEQFNSTYRV VSVLTVLHQD WLNGKEYKCK VSNKGLPSSI EKTISKAKGQ |
| | | PREPQVYTLP PSQEEMTKNQ VSLTCLVKGF YPSDIAVEWE SNGQPENNYK |
| | | TTPPVLDSDG SFFLYSRLTV DKSRWQEGNV FSCSVMHEAL HNHYTQKSLS |
| | | LSLGKMFWVL VVVGGVLACY SLLVTVAFII FWVRSKRSRL LHSDYMNMTP |
| | | RRPGPTRKHY QPYAPPRDFA AYRSKKVAKK PTNKAPHPKQ EPQEINFPDD |
| | | LPGSNTAAPV QETLHGCQPV TQEDGKESRI SVQERQ |
| 384 | OSM_MFE23_ | MGVLLTQRTL LSLVLALLFP SMASMQVQLQ QSGAELVRSG TSVKLSCTAS |
| | spIG4_CD40 | GFNIKDSYMH WLRQGPEQGL EWIGWIDPEN GDTEYAPKFQ GKATFTTDTS |
| | | SNTAYLQLSS LTSEDTAVYY CNEGTPTGPY YFDYWGQGTT VTVSSGGGGS |
| | | GGGGSGGGGS ENVLTQSPAI MSASPGEKVT ITCSASSSVS YMHWFQQKPG |
| | | TSPKLWIYST SNLASGVPAR FSGSGSGTSY SLTISRMEAE DAATYYCQQR |
| | | SSYPLTFGAG TKLELKRAAA GSGGSGESKY GPPCPSCPAP EFLGGPSVFL |
| | | FPPKPKDTLM ISRTPEVTCV VVDVSQEDPE VQFNWYVDGV EVHNAKTKPR |
| | | EEQFNSTYRV VSVLTVLHQD WLNGKEYKCK VSNKGLPSSI EKTISKAKGQ |
| | | PREPQVYTLP PSQEEMTKNQ VSLTCLVKGF YPSDIAVEWE SNGQPENNYK |
| | | TTPPVLDSDG SFFLYSRLTV DKSRWQEGNV FSCSVMHEAL HNHYTQKSLS |
| | | LSLGKMFWVL VVVGGVLACY SLLVTVAFII FWVKKVAKKP TNKAPHPKQE |
| | | PQEINFPDDL PGSNTAAPVQ ETLHGCQPVT QEDGKESRIS VQERQ |
| 385 | OSM_MFE23_ | MGVLLTQRTL LSLVLALLFP SMASMQVOLQ QSGAELVRSG TSVKLSCTAS |
| | spIG4_ | GFNIKDSYMH WLRQGPEQGL EWIGWIDPEN GDTEYAPKFQ GKATFTTDTS |
| | CD137_CD40 | SNTAYLQLSS LTSEDTAVYY CNEGTPTGPY YFDYWGQGTT VTVSSGGGGS |
| | | GGGGSGGGGS ENVLTQSPAI MSASPGEKVT ITCSASSSVS YMHWFQQKPG |
| | | TSPKLWIYST SNLASGVPAR FSGSGSGTSY SLTISRMEAE DAATYYCQQR |
| | | SSYPLTFGAG TKLELKRAAA GSGGSGESKY GPPCPSCPAP EFLGGPSVFL |
| | | FPPKPKDTLM ISRTPEVTCV VVDVSQEDPE VQFNWYVDGV EVHNAKTKPR |
| | | EEQFNSTYRV VSVLTVLHQD WLNGKEYKCK VSNKGLPSSI EKTISKAKGQ |
| | | PREPQVYTLP PSQEEMTKNQ VSLTCLVKGF YPSDIAVEWE SNGQPENNYK |
| | | TTPPVLDSDG SFFLYSRLTV DKSRWQEGNV FSCSVMHEAL HNHYTQKSLS |
| | | LSLGKMFWVL VVVGGVLACY SLLVTVAFII FWVKKVAKKP TNKAPHPKQE |
| | | PQEINFPDDL PGSNTAAPVQ ETLHGCQPVT QEDGKESRIS VQERQ |
| 386 | OSM_MFE23_ | MGVLLTQRTL LSLVLALLFP SMASMQVQLQ QSGAELVRSG TSVKLSCTAS |
| | spIG4_ | GFNIKDSYMH WLRQGPEQGL EWIGWIDPEN GDTEYAPKFQ GKATFTTDTS |
| | CD134_CD40 | SNTAYLQLSS LTSEDTAVYY CNEGTPTGPY YFDYWGQGTT VTVSSGGGGS |
| | | GGGGSGGGGS ENVLTQSPAI MSASPGEKVT ITCSASSSVS YMHWFQQKPG |
| | | TSPKLWIYST SNLASGVPAR FSGSGSGTSY SLTISRMEAE DAATYYCQQR |
| | | SSYPLTFGAG TKLELKRAAA GSGGSGESKY GPPCPSCPAP EFLGGPSVFL |
| | | FPPKPKDTLM ISRTPEVTCV VVDVSQEDPE VQFNWYVDGV EVHNAKTKPR |
| | | EEQFNSTYRV VSVLTVLHQD WLNGKEYKCK VSNKGLPSSI EKTISKAKGQ |
| | | PREPQVYTLP PSQEEMTKNQ VSLTCLVKGF YPSDIAVEWE SNGQPENNYK |
| | | TTPPVLDSDG SFFLYSRLTV DKSRWQEGNV FSCSVMHEAL HNHYTQKSLS |
| | | LSLGKMFWVL VVVGGVLACY SLLVTVAFII FWVRRDQRLP PDAHKPPGGG |
| | | SFRTPIQEEQ ADAHSTLAKI KKVAKKPTNK APHPKQEPQE INFPDDLPGS |
| | | NTAAPVQETL HGCQPVTQED GKESRISVQE RQ |
| 387 | OSM_MFE23_ | MGVLLTQRTL LSLVLALLFP SMASMQVQLQ QSGAELVRSG TSVKLSCTAS |
| | spIG4_ | GFNIKDSYMH WLRQGPEQGL EWIGWIDPEN GDTEYAPKFQ GKATFTTDTS |
| | CD2_CD40 | SNTAYLQLSS LTSEDTAVYY CNEGTPTGPY YFDYWGQGTT VTVSSGGGGS |
| | | GGGGSGGGGS ENVLTQSPAI MSASPGEKVT ITCSASSSVS YMHWFQQKPG |
| | | TSPKLWIYST SNLASGVPAR FSGSGSGTSY SLTISRMEAE DAATYYCQQR |
| | | SSYPLTFGAG TKLELKRAAA GSGGSGESKY GPPCPSCPAP EFLGGPSVFL |
| | | FPPKPKDTLM ISRTPEVTCV VVDVSQEDPE VQFNWYVDGV EVHNAKTKPR |
| | | EEQFNSTYRV VSVLTVLHQD WLNGKEYKCK VSNKGLPSSI EKTISKAKGQ |
| | | PREPQVYTLP PSQEEMTKNQ VSLTCLVKGF YPSDIAVEWE SNGQPENNYK |
| | | TTPPVLDSDG SFFLYSRLTV DKSRWQEGNV FSCSVMHEAL HNHYTQKSLS |
| | | LSLGKMFWVL VVVGGVLACY SLLVTVAFII FWVKRKKQRS RRNDEELETR |
| | | AHRVATEERG RKPHQIPAST PQNPATSQHP PPPPGHRSQA PSHRPPPPGH |
| | | RVQHQPQKRP PAPSGTQVHQ QKGPPLPRPR VQPKPPHGAA ENSLSPSSNK |
| | | KVAKKPTNKA PHPKQEPQEI NFPDDLPGSN TAAPVQETLH GCQPVTQEDG |
| | | KESRISVQER Q |
| 388 | OSM_MFE23_ | MGVLLTQRTL LSLVLALLFP SMASMQVOLQ QSGAELVRSG TSVKLSCTAS |
| | spIG4_ | GFNIKDSYMH WLRQGPEQGL EWIGWIDPEN GDTEYAPKFQ GKATFTTDTS |
| | GITR_CD40 | SNTAYLQLSS LTSEDTAVYY CNEGTPTGPY YFDYWGQGTT VTVSSGGGGS |
| | | GGGGSGGGGS ENVLTQSPAI MSASPGEKVT ITCSASSSVS YMHWFQQKPG |
| | | TSPKLWIYST SNLASGVPAR FSGSGSGTSY SLTISRMEAE DAATYYCQQR |
| | | SSYPLTFGAG TKLELKRAAA GSGGSGESKY GPPCPSCPAP EFLGGPSVFL |
| | | FPPKPKDTLM ISRTPEVTCV VVDVSQEDPE VQFNWYVDGV EVHNAKTKPR |
| | | EEQFNSTYRV VSVLTVLHQD WLNGKEYKCK VSNKGLPSSI EKTISKAKGQ |
| | | PREPQVYTLP PSQEEMTKNQ VSLTCLVKGF YPSDIAVEWE SNGQPENNYK |
| | | TTPPVLDSDG SFFLYSRLTV DKSRWQEGNV FSCSVMHEAL HNHYTQKSLS |
| | | LSLGKMFWVL VVVGGVLACY SLLVTVAFII FWVQLGLHIW QLRSQCMWPR |
| | | ETQLLLEVPP STEDARSCQF PEEERGERSA EEKGRLGDLW VKKVAKKPTN |
| | | KAPHPKQEPQ EINFPDDLPG SNTAAPVQET LHGCQPVTQE DGKESRISVQ |
| | | ERQ |
| 389 | OSM_MFE23_ | MGVLLTQRTL LSLVLALLFP SMASMQVQLQ QSGAELVRSG TSVKLSCTAS |
| | spIG4_ | GFNIKDSYMH WLRQGPEQGL EWIGWIDPEN GDTEYAPKFQ GKATFTTDTS |
| | CD29_CD40 | SNTAYLQLSS LTSEDTAVYY CNEGTPTGPY YFDYWGQGTT VTVSSGGGGS |
| | | GGGGSGGGGS ENVLTQSPAI MSASPGEKVT ITCSASSSVS YMHWFQQKPG |
| | | TSPKLWIYST SNLASGVPAR FSGSGSGTSY SLTISRMEAE DAATYYCQQR |
| | | SSYPLTFGAG TKLELKRAAA GSGGSGESKY GPPCPSCPAP EFLGGPSVFL |
| | | FPPKPKDTLM ISRTPEVTCV VVDVSQEDPE VQFNWYVDGV EVHNAKTKPR |
| | | EEQFNSTYRV VSVLTVLHQD WLNGKEYKCK VSNKGLPSSI EKTISKAKGQ |
| | | PREPQVYTLP PSQEEMTKNQ VSLTCLVKGF YPSDIAVEWE SNGQPENNYK |
| | | TTPPVLDSDG SFFLYSRLTV DKSRWQEGNV FSCSVMHEAL HNHYTQKSLS |
| | | LSLGKMFWVL VVVGGVLACY SLLVTVAFII FWVKLLMIIH DRREFAKFEK |
| | | EKMNAKWDTG ENPIYKSAVT TVVNPKYEGK KKVAKKPTNK APHPKQEPQE |
| | | INFPDDLPGS NTAAPVQETL HGCQPVTQED GKESRISVQE RQ |
| 390 | OSM_MFE23_ | MGVLLTQRTL LSLVLALLFP SMASMQVQLQ QSGAELVRSG TSVKLSCTAS |
| | spIG4_ | GFNIKDSYMH WLRQGPEQGL EWIGWIDPEN GDTEYAPKFQ GKATFTTDTS |
| | CD150_CD40 | SNTAYLQLSS LTSEDTAVYY CNEGTPTGPY YFDYWGQGTT VTVSSGGGGS |
| | | GGGGSGGGGS ENVLTQSPAI MSASPGEKVT ITCSASSSVS YMHWFQQKPG |
| | | TSPKLWIYST SNLASGVPAR FSGSGSGTSY SLTISRMEAE DAATYYCQQR |
| | | SSYPLTFGAG TKLELKRAAA GSGGSGESKY GPPCPSCPAP EFLGGPSVFL |
| | | FPPKPKDTLM ISRTPEVTCV VVDVSQEDPE VQFNWYVDGV EVHNAKTKPR |
| | | EEQFNSTYRV VSVLTVLHQD WLNGKEYKCK VSNKGLPSSI EKTISKAKGQ |
| | | PREPQVYTLP PSQEEMTKNQ VSLTCLVKGF YPSDIAVEWE SNGQPENNYK |
| | | TTPPVLDSDG SFFLYSRLTV DKSRWQEGNV FSCSVMHEAL HNHYTQKSLS |
| | | LSLGKMFWVL VVVGGVLACY SLLVTVAFII FWVRRRGKTN HYQTTVEKKS |
| | | LTIYAQVQKP GPLQKKLDSF PAQDPCTTIY VAATEPVPES VQETNSITVY |
| | | ASVTLPESKK VAKKPTNKAP HPKQEPQEIN FPDDLPGSNT AAPVQETLHG |
| | | CQPVTQEDGK ESRISVQERQ |
| 391 | OSM_MFE23_ | MGVLLTQRTL LSLVLALLFP SMASMQVQLQ QSGAELVRSG TSVKLSCTAS |
| | spIG4_ | GFNIKDSYMH WLRQGPEQGL EWIGWIDPEN GDTEYAPKFQ GKATFTTDTS |
| | CD40_tandem | SNTAYLQLSS LTSEDTAVYY CNEGTPTGPY YFDYWGQGTT VTVSSGGGGS |
| | | GGGGSGGGGS ENVLTQSPAI MSASPGEKVT ITCSASSSVS YMHWFQQKPG |
| | | TSPKLWIYST SNLASGVPAR FSGSGSGTSY SLTISRMEAE DAATYYCQQR |
| | | SSYPLTFGAG TKLELKRAAA GSGGSGESKY GPPCPSCPAP EFLGGPSVFL |
| | | FPPKPKDTLM ISRTPEVTCV VVDVSQEDPE VQFNWYVDGV EVHNAKTKPR |
| | | EEQFNSTYRV VSVLTVLHQD WLNGKEYKCK VSNKGLPSSI EKTISKAKGQ |
| | | PREPQVYTLP PSQEEMTKNQ VSLTCLVKGF YPSDIAVEWE SNGQPENNYK |
| | | TTPPVLDSDG SFFLYSRLTV DKSRWQEGNV FSCSVMHEAL HNHYTQKSLS |
| | | LSLGKMFWVL VVVGGVLACY SLLVTVAFII FWVAKKPTNK APHPKQEPQE |
| | | INFPDDLPGS NTAAPVQETL HGCQPVTQED GKESRISVQE RQKKVAKKPT |
| | | NKAPHPKQEP QEINFPDDLP GSNTAAPVQE TLHGCQPVTQ EDGKESRISV |
| | | QERQKKVA |
| 392 | OSM_MFE23_ | MGVLLTQRTL LSLVLALLFP SMASMQVQLQ QSGAELVRSG TSVKLSCTAS |
| | spIG4_ | GFNIKDSYMH WLRQGPEQGL EWIGWIDPEN GDTEYAPKFQ GKATFTTDTS |
| | CD40_P227A | SNTAYLQLSS LTSEDTAVYY CNEGTPTGPY YFDYWGQGTT VTVSSGGGGS |
| | | GGGGSGGGGS ENVLTQSPAI MSASPGEKVT ITCSASSSVS YMHWFQQKPG |
| | | TSPKLWIYST SNLASGVPAR FSGSGSGTSY SLTISRMEAE DAATYYCQQR |
| | | SSYPLTFGAG TKLELKRAAA GSGGSGESKY GPPCPSCPAP EFLGGPSVFL |
| | | FPPKPKDTLM ISRTPEVTCV VVDVSQEDPE VQFNWYVDGV EVHNAKTKPR |
| | | EEQFNSTYRV VSVLTVLHQD WLNGKEYKCK VSNKGLPSSI EKTISKAKGQ |
| | | PREPQVYTLP PSQEEMTKNQ VSLTCLVKGF YPSDIAVEWE SNGQPENNYK |
| | | TTPPVLDSDG SFFLYSRLTV DKSRWQEGNV FSCSVMHEAL HNHYTQKSLS |
| | | LSLGKMFWVL VVVGGVLACY SLLVTVAFII FWVKKVAKKP TNKAAHPKQE |
| | | PQEINFPDDL PGSNTAAPVQ ETLHGCQPVT QEDGKESRIS VQERQ |
| 393 | OSM_MFE23_PD1_ | MGVLLTQRTL LSLVLALLFP SMASMQVOLQ QSGAELVRSG TSVKLSCTAS |
| | sCD28TM_CD28_ | GFNIKDSYMH WLRQGPEQGL EWIGWIDPEN GDTEYAPKFQ GKATFTTDTS |
| | CD40 | SNTAYLQLSS LTSEDTAVYY CNEGTPTGPY YFDYWGQGTT VTVSSGGGGS |
| | CTP204 | GGGGSGGGGS ENVLTQSPAI MSASPGEKVT ITCSASSSVS YMHWFQQKPG |
| | | TSPKLWIYST SNLASGVPAR FSGSGSGTSY SLTISRMEAE DAATYYCQQR |
| | | SSYPLTFGAG TKLELKRAAA GSGGSGRPGW FLDSPDRPWN PPTFSPALLV |
| | | VTEGDNATFT CSFSNTSESF VLNWYRMSPS NQTDKLAAFP EDRSQPGQDC |
| | | RFRVTQLPNG RDFHMSVVRA RRNDSGTYLC GAISLAPKAQ IKESLRAELR |
| | | VTERRAEVPT AHCPSPLFPG PSKPFWVLVV VGGVLACYSL LVTVAFIIFW |
| | | VRSKRSRLLH SDYMNMTPRR PGPTRKHYQP YAPPRDFAAY RSKKVAKKPT |
| | | NKAPHPKQEP QEINFPDDLP GSNTAAPVQE TLHGCQPVTQ EDGKESRISV |
| | | QERQ |
| 394 | OSM_MFE23_PD1_ | MGVLLTQRTL LSLVLALLFP SMASMQVQLQ QSGAELVRSG TSVKLSCTAS |
| | sCD28TM_CD40 | GFNIKDSYMH WLRQGPEQGL EWIGWIDPEN GDTEYAPKFQ GKATFTTDTS |
| | | SNTAYLQLSS LTSEDTAVYY CNEGTPTGPY YFDYWGQGTT VTVSSGGGGS |
| | | GGGGSGGGGS ENVLTQSPAI MSASPGEKVT ITCSASSSVS YMHWFQQKPG |
| | | TSPKLWIYST SNLASGVPAR FSGSGSGTSY SLTISRMEAE DAATYYCQQR |
| | | SSYPLTFGAG TKLELKRAAA GSGGSGRPGW FLDSPDRPWN PPTFSPALLV |
| | | VTEGDNATFT CSFSNTSESF VLNWYRMSPS NQTDKLAAFP EDRSQPGQDC |
| | | RFRVTQLPNG RDFHMSVVRA RRNDSGTYLC GAISLAPKAQ IKESLRAELR |
| | | VTERRAEVPT AHCPSPLFPG PSKPFWVLVV VGGVLACYSL LVTVAFIIFW |
| | | VKKVAKKPTN KAPHPKQEPQ EINFPDDLPG SNTAAPVQET LHGCQPVTQE |
| | | DGKESRISVQ ERQ |
| 395 | OSM_MFE23_ | MGVLLTQRTL LSLVLALLFP SMASMQVQLQ QSGAELVRSG TSVKLSCTAS |
| | TIGIT_sCD28TM_ | GFNIKDSYMH WLRQGPEQGL EWIGWIDPEN GDTEYAPKFQ GKATFTTDTS |
| | CD28_CD40 | SNTAYLQLSS LTSEDTAVYY CNEGTPTGPY YFDYWGQGTT VTVSSGGGGS |
| | | GGGGSGGGGS ENVLTQSPAI MSASPGEKVT ITCSASSSVS YMHWFQQKPG |
| | | TSPKLWIYST SNLASGVPAR FSGSGSGTSY SLTISRMEAE DAATYYCQQR |
| | | SSYPLTFGAG TKLELKRAAA GSGGSGMMTG TIETTGNISA EKGGSIILQC |
| | | HLSSTTAQVT QVNWEQQDQL LAICNADLGW HISPSFKDRV APGPGLGLTL |
| | | QSLTVNDTGE YFCIYHTYPD GTYTGRIFLE VLESSVAEHG ARFQIPFWVL |
| | | VVVGGVLACY SLLVTVAFII FWVRSKRSRL LHSDYMNMTP RRPGPTRKHY |
| | | QPYAPPRDFA AYRSKKVAKK PTNKAPHPKQ EPQEINFPDD LPGSNTAAPV |
| | | QETLHGCQPV TQEDGKESRI SVQERQ |
| 396 | OSM_MFE23_ | MGVLLTQRTL LSLVLALLFP SMASMQVQLQ QSGAELVRSG TSVKLSCTAS |
| | TIGIT_sCD28TM_ | GFNIKDSYMH WLRQGPEQGL EWIGWIDPEN GDTEYAPKFQ GKATFTTDTS |
| | CD40 | SNTAYLQLSS LTSEDTAVYY CNEGTPTGPY YFDYWGQGTT VTVSSGGGGS |
| | | GGGGSGGGGS ENVLTQSPAI MSASPGEKVT ITCSASSSVS YMHWFQQKPG |
| | | TSPKLWIYST SNLASGVPAR FSGSGSGTSY SLTISRMEAE DAATYYCQQR |
| | | SSYPLTFGAG TKLELKRAAA GSGGSGMMTG TIETTGNISA EKGGSIILQC |
| | | HLSSTTAQVT QVNWEQQDQL LAICNADLGW HISPSFKDRV APGPGLGLTL |
| | | QSLTVNDTGE YFCIYHTYPD GTYTGRIFLE VLESSVAEHG ARFQIPFWVL |
| | | VVVGGVLACY SLLVTVAFII FWVKKVAKKP TNKAPHPKQE PQEINFPDDL |
| | | PGSNTAAPVQ ETLHGCQPVT QEDGKESRIS VQERQ |
| 397 | OSM_MOV19_ | MGVLLTQRTL LSLVLALLFP SMASMQVQLQ QSGAELVKPG ASVKISCKAS |
| | spCD28_ | GYSFTGYFMN WVKQSHGKSL EWIGRIHPYD GDTFYNQNFK DKATLTVDKS |
| | CD28_CD40 | SNTAHMELLS LTSEDFAVYY CTRYDGSRAM DYWGQGTTVT VSSGGGGSGG |
| | | GGSGGGGSDI ELTQSPASLA VSLGQRAIIS CKASQSVSFA GTSLMHWYHQ |
| | | KPGQQPKLLI YRASNLEAGV PTRFSGSGSK TDFTLNIHPV EEEDAATYYC |
| | | QQSREYPYTF GGGTKLEIKA AAGSGGSGIL VKQSPMLVAY DNAVNLSCKY |
| | | SYNLFSREFR ASLHKGLDSA VEVCVVYGNY SQQLQVYSKT GFNCDGKLGN |
| | | ESVTFYLQNL YVNQTDIYFC KIEVMYPPPY LDNEKSNGTI IHVKGKHLCP |
| | | SPLFPGPSKP FWVLVVVGGV LACYSLLVTV AFIIFWVRSK RSRLLHSDYM |
| | | NMTPRRPGPT RKHYQPYAPP RDFAAYRSKK VAKKPTNKAP HPKQEPQEIN |
| | | FPDDLPGSNT AAPVQETLHG CQPVTQEDGK ESRISVQERQ |
| 398 | OSM_MOV19_ | MGVLLTQRTL LSLVLALLFP SMASMQVQLQ QSGAELVKPG ASVKISCKAS |
| | spCD28_CD40 | GYSFTGYFMN WVKQSHGKSL EWIGRIHPYD GDTFYNQNFK DKATLTVDKS |
| | | SNTAHMELLS LTSEDFAVYY CTRYDGSRAM DYWGQGTTVT VSSGGGGSGG |
| | | GGSGGGGSDI ELTQSPASLA VSLGQRAIIS CKASQSVSFA GTSLMHWYHQ |
| | | KPGQQPKLLI YRASNLEAGV PTRFSGSGSK TDFTLNIHPV EEEDAATYYC |
| | | QQSREYPYTF GGGTKLEIKA AAGSGGSGIL VKQSPMLVAY DNAVNLSCKY |
| | | SYNLFSREFR ASLHKGLDSA VEVCVVYGNY SQQLQVYSKT GFNCDGKLGN |
| | | ESVTFYLQNL YVNQTDIYFC KIEVMYPPPY LDNEKSNGTI IHVKGKHLCP |
| | | SPLFPGPSKP FWVLVVVGGV LACYSLLVTV AFIIFWVKKV AKKPTNKAPH |
| | | PKQEPQEINF PDDLPGSNTA APVQETLHGC QPVTQEDGKE SRISVQERQ |
| 399 | OSM_MOV19_ | MGVLLTQRTL LSLVLALLFP SMASMQVQLQ QSGAELVKPG ASVKISCKAS |
| | spCD28_ | GYSFTGYFMN WVKQSHGKSL EWIGRIHPYD GDTFYNQNFK DKATLTVDKS |
| | CD137_CD40 | SNTAHMELLS LTSEDFAVYY CTRYDGSRAM DYWGQGTTVT VSSGGGGSGG |
| | | GGSGGGGSDI ELTQSPASLA VSLGQRAIIS CKASQSVSFA GTSLMHWYHQ |
| | | KPGQQPKLLI YRASNLEAGV PTRFSGSGSK TDFTLNIHPV EEEDAATYYC |
| | | QQSREYPYTF GGGTKLEIKA AAGSGGSGIL VKQSPMLVAY DNAVNLSCKY |
| | | SYNLFSREFR ASLHKGLDSA VEVCVVYGNY SQQLQVYSKT GFNCDGKLGN |
| | | ESVTFYLQNL YVNQTDIYFC KIEVMYPPPY LDNEKSNGTI IHVKGKHLCP |
| | | SPLFPGPSKP FWVLVVVGGV LACYSLLVTV AFIIFWVRFS WKRGRKKLL |
| | | YIFKQPFMRP VQTTQEEDGC SCRFPEEEEG GCEKKVAKKP TNKAPHPKQE |
| | | PQEINFPDDL PGSNTAAPVQ ETLHGCQPVT QEDGKESRIS VQERQ |
| 400 | OSM_MOV19_ | MGVLLTQRTL LSLVLALLFP SMASMQVOLQ QSGAELVKPG ASVKISCKAS |
| | spCD28_ | GYSFTGYFMN WVKQSHGKSL EWIGRIHPYD GDTFYNQNFK DKATLTVDKS |
| | CD134_CD40 | SNTAHMELLS LTSEDFAVYY CTRYDGSRAM DYWGQGTTVT VSSGGGGSGG |
| | | GGSGGGGSDI ELTQSPASLA VSLGQRAIIS CKASQSVSFA GTSLMHWYHQ |
| | | KPGQQPKLLI YRASNLEAGV PTRFSGSGSK TDFTLNIHPV EEEDAATYYC |
| | | QQSREYPYTF GGGTKLEIKA AAGSGGSGIL VKQSPMLVAY DNAVNLSCKY |
| | | SYNLFSREFR ASLHKGLDSA VEVCVVYGNY SQQLQVYSKT GFNCDGKLGN |
| | | ESVTFYLQNL YVNQTDIYFC KIEVMYPPPY LDNEKSNGTI IHVKGKHLCP |
| | | SPLFPGPSKP FWVLVVVGGV LACYSLLVTV AFIIFWVRRD QRLPPDAHKP |
| | | PGGGSFRTPI QEEQADAHST LAKIKKVAKK PTNKAPHPKQ EPQEINFPDD |
| | | LPGSNTAAPV QETLHGCQPV TQEDGKESRI SVQERQ |
| 401 | OSM_MOV19_ | MGVLLTQRTL LSLVLALLFP SMASMQVQLQ QSGAELVKPG ASVKISCKAS |
| | spCD28_ | GYSFTGYFMN WVKQSHGKSL EWIGRIHPYD GDTFYNQNFK DKATLTVDKS |
| | CD2_CD40 | SNTAHMELLS LTSEDFAVYY CTRYDGSRAM DYWGQGTTVT VSSGGGGSGG |
| | | GGSGGGGSDI ELTQSPASLA VSLGQRAIIS CKASQSVSFA GTSLMHWYHQ |
| | | KPGQQPKLLI YRASNLEAGV PTRFSGSGSK TDFTLNIHPV EEEDAATYYC |
| | | QQSREYPYTF GGGTKLEIKA AAGSGGSGIL VKQSPMLVAY DNAVNLSCKY |
| | | SYNLFSREFR ASLHKGLDSA VEVCVVYGNY SQQLQVYSKT GFNCDGKLGN |
| | | ESVTFYLQNL YVNQTDIYFC KIEVMYPPPY LDNEKSNGTI IHVKGKHLCP |
| | | SPLFPGPSKP FWVLVVVGGV LACYSLLVTV AFIIFWVKRK KQRSRRNDEE |
| | | LETRAHRVAT EERGRKPHQI PASTPQNPAT SQHPPPPPGH RSQAPSHRPP |
| | | PPGHRVQHQP QKRPPAPSGT QVHQQKGPPL PRPRVQPKPP HGAAENSLSP |
| | | SSNKKVAKKP TNKAPHPKQE PQEINFPDDL PGSNTAAPVQ ETLHGCQPVT |
| | | QEDGKESRIS VQERQ |
| 402 | OSM_MOV19_ | MGVLLTQRTL LSLVLALLFP SMASMQVQLQ QSGAELVKPG ASVKISCKAS |
| | spCD28_ | GYSFTGYFMN WVKQSHGKSL EWIGRIHPYD GDTFYNQNFK DKATLTVDKS |
| | GITR_CD40 | SNTAHMELLS LTSEDFAVYY CTRYDGSRAM DYWGQGTTVT VSSGGGGSGG |
| | | GGSGGGGSDI ELTQSPASLA VSLGQRAIIS CKASQSVSFA GTSLMHWYHQ |
| | | KPGQQPKLLI YRASNLEAGV PTRFSGSGSK TDFTLNIHPV EEEDAATYYC |
| | | QQSREYPYTF GGGTKLEIKA AAGSGGSGIL VKQSPMLVAY DNAVNLSCKY |
| | | SYNLFSREFR ASLHKGLDSA VEVCVVYGNY SQQLQVYSKT GFNCDGKLGN |
| | | ESVTFYLQNL YVNQTDIYFC KIEVMYPPPY LDNEKSNGTI IHVKGKHLCP |
| | | SPLFPGPSKP FWVLVVVGGV LACYSLLVTV AFIIFWVQLG LHIWQLRSQC |
| | | MWPRETQLLL EVPPSTEDAR SCQFPEEERG ERSAEEKGRL GDLWVKKVAK |
| | | KPTNKAPHPK QEPQEINFPD DLPGSNTAAP VQETLHGCQP VTQEDGKESR |
| | | ISVQERQ |
| 403 | OSM_MOV19_ | MGVLLTQRTL LSLVLALLFP SMASMQVOLQ QSGAELVKPG ASVKISCKAS |
| | spCD28_ | GYSFTGYFMN WVKQSHGKSL EWIGRIHPYD GDTFYNQNFK DKATLTVDKS |
| | CD29_CD40 | SNTAHMELLS LTSEDFAVYY CTRYDGSRAM DYWGQGTTVT VSSGGGGSGG |
| | | GGSGGGGSDI ELTQSPASLA VSLGQRAIIS CKASQSVSFA GTSLMHWYHQ |
| | | KPGQQPKLLI YRASNLEAGV PTRFSGSGSK TDFTLNIHPV EEEDAATYYC |
| | | QQSREYPYTF GGGTKLEIKA AAGSGGSGIL VKQSPMLVAY DNAVNLSCKY |
| | | SYNLFSREFR ASLHKGLDSA VEVCVVYGNY SQQLQVYSKT GFNCDGKLGN |
| | | ESVTFYLQNL YVNQTDIYFC KIEVMYPPPY LDNEKSNGTI IHVKGKHLCP |
| | | SPLFPGPSKP FWVLVVVGGV LACYSLLVTV AFIIFWVKLL MIIHDRREFA |
| | | KFEKEKMNAK WDTGENPIYK SAVTTVVNPK YEGKKKVAKK PTNKAPHPKQ |
| | | EPQEINFPDD LPGSNTAAPV QETLHGCQPV TQEDGKESRI SVQERQ |
| 404 | OSM_MOV19_ | MGVLLTQRTL LSLVLALLFP SMASMQVQLQ QSGAELVKPG ASVKISCKAS |
| | spCD28_ | GYSFTGYFMN WVKQSHGKSL EWIGRIHPYD GDTFYNQNFK DKATLTVDKS |
| | CD150_CD40 | SNTAHMELLS LTSEDFAVYY CTRYDGSRAM DYWGQGTTVT VSSGGGGSGG |
| | | GGSGGGGSDI ELTQSPASLA VSLGQRAIIS CKASQSVSFA GTSLMHWYHQ |
| | | KPGQQPKLLI YRASNLEAGV PTRFSGSGSK TDFTLNIHPV EEEDAATYYC |
| | | QQSREYPYTF GGGTKLEIKA AAGSGGSGIL VKQSPMLVAY DNAVNLSCKY |
| | | SYNLFSREFR ASLHKGLDSA VEVCVVYGNY SQQLQVYSKT GFNCDGKLGN |
| | | ESVTFYLQNL YVNQTDIYFC KIEVMYPPPY LDNEKSNGTI IHVKGKHLCP |
| | | SPLFPGPSKP FWVLVVVGGV LACYSLLVTV AFIIFWVRRR GKTNHYQTTV |
| | | EKKSLTIYAQ VQKPGPLQKK LDSFPAQDPC TTIYVAATEP VPESVQETNS |
| | | ITVYASVTLP ESKKVAKKPT NKAPHPKQEP QEINFPDDLP GSNTAAPVQE |
| | | TLHGCQPVTQ EDGKESRISV QERQ |
| 405 | OSM_MOV19_ | MGVLLTQRTL LSLVLALLFP SMASMQVQLQ QSGAELVKPG ASVKISCKAS |
| | spCD8_CD28_ | GYSFTGYFMN WVKQSHGKSL EWIGRIHPYD GDTFYNQNFK DKATLTVDKS |
| | CD40 | SNTAHMELLS LTSEDFAVYY CTRYDGSRAM DYWGQGTTVT VSSGGGGSGG |
| | | GGSGGGGSDI ELTQSPASLA VSLGQRAIIS CKASQSVSFA GTSLMHWYHQ |
| | | KPGQQPKLLI YRASNLEAGV PTRFSGSGSK TDFTLNIHPV EEEDAATYYC |
| | | QQSREYPYTF GGGTKLEIKA AAGSGGSGFV PVFLPAKPTT TPAPRPPTPA |
| | | PTIASQPLSL RPEACRPAAG GAVHTRGLDF ACDIYIWAPL AGTCGVLLLS |
| | | LVITLYCNHR NRSKRSRLLH SDYMNMTPRR PGPTRKHYQP YAPPRDFAAY |
| | | RSKKVAKKPT NKAPHPKQEP QEINFPDDLP GSNTAAPVQE TLHGCQPVTQ |
| | | EDGKESRISV QERQ |
| 406 | OSM_MOV19 | MGVLLTQRTL LSLVLALLFP SMASMQVQLQ QSGAELVKPG ASVKISCKAS |
| | _spCD8_CD40 | GYSFTGYFMN WVKQSHGKSL EWIGRIHPYD GDTFYNQNFK DKATLTVDKS |
| | | SNTAHMELLS LTSEDFAVYY CTRYDGSRAM DYWGQGTTVT VSSGGGGSGG |
| | | GGSGGGGSDI ELTQSPASLA VSLGQRAIIS CKASQSVSFA GTSLMHWYHQ |
| | | KPGQQPKLLI YRASNLEAGV PTRFSGSGSK TDFTLNIHPV EEEDAATYYC |
| | | QQSREYPYTF GGGTKLEIKA AAGSGGSGFV PVFLPAKPTT TPAPRPPTPA |
| | | PTIASQPLSL RPEACRPAAG GAVHTRGLDF ACDIYIWAPL AGTCGVLLLS |
| | | LVITLYCNHR NKKVAKKPTN KAPHPKQEPQ EINFPDDLPG SNTAAPVQET |
| | | LHGCQPVTQE DGKESRISVQ ERQ |
| 407 | OSM_MOV19_ | MGVLLTQRTL LSLVLALLFP SMASMQVQLQ QSGAELVKPG ASVKISCKAS |
| | spCD8_CD137_ | GYSFTGYFMN WVKQSHGKSL EWIGRIHPYD GDTFYNQNFK DKATLTVDKS |
| | CD40 | SNTAHMELLS LTSEDFAVYY CTRYDGSRAM DYWGQGTTVT VSSGGGGSGG |
| | | GGSGGGGSDI ELTQSPASLA VSLGQRAIIS CKASQSVSFA GTSLMHWYHQ |
| | | KPGQQPKLLI YRASNLEAGV PTRFSGSGSK TDFTLNIHPV EEEDAATYYC |
| | | QQSREYPYTF GGGTKLEIKA AAGSGGSGFV PVFLPAKPTT TPAPRPPTPA |
| | | PTIASQPLSL RPEACRPAAG GAVHTRGLDF ACDIYIWAPL AGTCGVLLLS |
| | | LVITLYCNHR NRFSVVKRGR KKLLYIFKQP FMRPVQTTQE EDGCSCRFPE |
| | | EEEGGCEKKV AKKPTNKAPH PKQEPQEINF PDDLPGSNTA APVQETLHGC |
| | | QPVTQEDGKE SRISVQERQ |
| 408 | OSM_MOV19_ | MGVLLTQRTL LSLVLALLFP SMASMQVQLQ QSGAELVKPG ASVKISCKAS |
| | spCD8_CD134_ | GYSFTGYFMN WVKQSHGKSL EWIGRIHPYD GDTFYNQNFK DKATLTVDKS |
| | CD40 | SNTAHMELLS LTSEDFAVYY CTRYDGSRAM DYWGQGTTVT VSSGGGGSGG |
| | | GGSGGGGSDI ELTQSPASLA VSLGQRAIIS CKASQSVSFA GTSLMHWYHQ |
| | | KPGQQPKLLI YRASNLEAGV PTRFSGSGSK TDFTLNIHPV EEEDAATYYC |
| | | QQSREYPYTF GGGTKLEIKA AAGSGGSGFV PVFLPAKPTT TPAPRPPTPA |
| | | PTIASQPLSL RPEACRPAAG GAVHTRGLDF ACDIYIWAPL AGTCGVLLLS |
| | | LVITLYCNHR NRRDQRLPPD AHKPPGGGSF RTPIQEEQAD AHSTLAKIKK |
| | | VAKKPTNKAP HPKQEPQEIN FPDDLPGSNT AAPVQETLHG CQPVTQEDGK |
| | | SRISVQERQ |
| 409 | OSM_MOV19_ | MGVLLTQRTL LSLVLALLFP SMASMQVQLQ QSGAELVKPG ASVKISCKAS |
| | spCD8_CD2_CD40 | GYSFTGYFMN WVKQSHGKSL EWIGRIHPYD GDTFYNQNFK DKATLTVDKS |
| | | SNTAHMELLS LTSEDFAVYY CTRYDGSRAM DYWGQGTTVT VSSGGGGSGG |
| | | GGSGGGGSDI ELTQSPASLA VSLGQRAIIS CKASQSVSFA GTSLMHWYHQ |
| | | KPGQQPKLLI YRASNLEAGV PTRFSGSGSK TDFTLNIHPV EEEDAATYYC |
| | | QQSREYPYTF GGGTKLEIKA AAGSGGSGFV PVFLPAKPTT TPAPRPPTPA |
| | | PTIASQPLSL RPEACRPAAG GAVHTRGLDF ACDIYIWAPL AGTCGVLLLS |
| | | LVITLYCNHR NKRKKQRSRR NDEELETRAH RVATEERGRK PHQIPASTPQ |
| | | NPATSQHPPP PPGHRSQAPS HRPPPPGHRV QHQPQKRPPA PSGTQVHQQK |
| | | GPPLPRPRVQ PKPPHGAAEN SLSPSSNKKV AKKPTNKAPH PKQEPQEINF |
| | | PDDLPGSNTA APVQETLHGC QPVTQEDGKE SRISVQERQ |
| 410 | OSM_MOV19_ | MGVLLTQRTL LSLVLALLFP SMASMQVOLQ QSGAELVKPG ASVKISCKAS |
| | spCD8_GITR_ | GYSFTGYFMN WVKQSHGKSL EWIGRIHPYD GDTFYNQNFK DKATLTVDKS |
| | CD40 | SNTAHMELLS LTSEDFAVYY CTRYDGSRAM DYWGQGTTVT VSSGGGGSGG |
| | | GGSGGGGSDI ELTQSPASLA VSLGQRAIIS CKASQSVSFA GTSLMHWYHQ |
| | | KPGQQPKLLI YRASNLEAGV PTRFSGSGSK TDFTLNIHPV EEEDAATYYC |
| | | QQSREYPYTF GGGTKLEIKA AAGSGGSGFV PVFLPAKPTT TPAPRPPTPA |
| | | PTIASQPLSL RPEACRPAAG GAVHTRGLDF ACDIYIWAPL AGTCGVLLLS |
| | | LVITLYCNHR NQLGLHIWQL RSQCMWPRET QLLLEVPPST EDARSCQFPE |
| | | EERGERSAEE KGRLGDLWVK KVAKKPTNKA PHPKQEPQEI NFPDDLPGSN |
| | | TAAPVQETLH GCQPVTQEDG KESRISVQER Q |
| 411 | OSM_MOV19_ | MGVLLTQRTL LSLVLALLFP SMASMQVQLQ QSGAELVKPG ASVKISCKAS |
| | spCD8_CD29_ | GYSFTGYFMN WVKQSHGKSL EWIGRIHPYD GDTFYNQNFK DKATLTVDKS |
| | CD40 | SNTAHMELLS LTSEDFAVYY CTRYDGSRAM DYWGQGTTVT VSSGGGGSGG |
| | | GGSGGGGSDI ELTQSPASLA VSLGQRAIIS CKASQSVSFA GTSLMHWYHQ |
| | | KPGQQPKLLI YRASNLEAGV PTRFSGSGSK TDFTLNIHPV EEEDAATYYC |
| | | QQSREYPYTF GGGTKLEIKA AAGSGGSGFV PVFLPAKPTT TPAPRPPTPA |
| | | PTIASQPLSL RPEACRPAAG GAVHTRGLDF ACDIYIWAPL AGTCGVLLLS |
| | | LVITLYCNHR NKLLMIIHDR REFAKFEKEK MNAKWDTGEN PIYKSAVTTV |
| | | VNPKYEGKKK VAKKPTNKAP HPKQEPQEIN FPDDLPGSNT AAPVQETLHG |
| | | CQPVTQEDGK ESRISVQERQ |
| 412 | OSM_MOV19_ | MGVLLTQRTL LSLVLALLFP SMASMQVQLQ QSGAELVKPG ASVKISCKAS |
| | spCD8_CD150_ | GYSFTGYFMN WVKQSHGKSL EWIGRIHPYD GDTFYNQNFK DKATLTVDKS |
| | CD40 | SNTAHMELLS LTSEDFAVYY CTRYDGSRAM DYWGQGTTVT VSSGGGGSGG |
| | | GGSGGGGSDI ELTQSPASLA VSLGQRAIIS CKASQSVSFA GTSLMHWYHQ |
| | | KPGQQPKLLI YRASNLEAGV PTRFSGSGSK TDFTLNIHPV EEEDAATYYC |
| | | QQSREYPYTF GGGTKLEIKA AAGSGGSGFV PVFLPAKPTT TPAPRPPTPA |
| | | PTIASQPLSL RPEACRPAAG GAVHTRGLDF ACDIYIWAPL AGTCGVLLLS |
| | | LVITLYCNHR NRRRGKTNHY QTTVEKKSLT IYAQVQKPGP LQKKLDSFPA |
| | | QDPCTTIYVA ATEPVPESVQ ETNSITVYAS VTLPESKKVA KKPTNKAPHP |
| | | KQEPQEINFP DDLPGSNTAA PVQETLHGCQ PVTQEDGKES RISVQERQ |
| 413 | OSM_MOV19_ | MGVLLTQRTL LSLVLALLFP SMASMQVQLQ QSGAELVKPG ASVKISCKAS |
| | spIG4_CD28_ | GYSFTGYFMN WVKQSHGKSL EWIGRIHPYD GDTFYNQNFK DKATLTVDKS |
| | CD40 | SNTAHMELLS LTSEDFAVYY CTRYDGSRAM DYWGQGTTVT VSSGGGGSGG |
| | | GGSGGGGSDI ELTQSPASLA VSLGQRAIIS CKASQSVSFA GTSLMHWYHQ |
| | | KPGQQPKLLI YRASNLEAGV PTRFSGSGSK TDFTLNIHPV EEEDAATYYC |
| | | QQSREYPYTF GGGTKLEIKA AAGSGGSGES KYGPPCPSCP APEFLGGPSV |
| | | FLFPPKPKDT LMISRTPEVT CVVVDVSQED PEVQFNWYVD GVEVHNAKTK |
| | | PREEQFNSTY RVVSVLTVLH QDWLNGKEYK CKVSNKGLPS SIEKTISKAK |
| | | GQPREPQVYT LPPSQEEMTK NQVSLTCLVK GFYPSDIAVE WESNGQPENN |
| | | YKTTPPVLDS DGSFFLYSRL TVDKSRWQEG NVFSCSVMHE ALHNHYTQKS |
| | | LSLSLGKMFW VLVVVGGVLA CYSLLVTVAF IIFWVRSKRS RLLHSDYMNM |
| | | TPRRPGPTRK HYQPYAPPRD FAAYRSKKVA KKPTNKAPHP KQEPQEINFP |
| | | DDLPGSNTAA PVQETLHGCQ PVTQEDGKES RISVQERQ |
| 414 | OSM_MOV19_ | MGVLLTQRTL LSLVLALLFP SMASMQVOLQ QSGAELVKPG ASVKISCKAS |
| | spIG4_CD40 | GYSFTGYFMN WVKQSHGKSL EWIGRIHPYD GDTFYNQNFK DKATLTVDKS |
| | | SNTAHMELLS LTSEDFAVYY CTRYDGSRAM DYWGQGTTVT VSSGGGGSGG |
| | | GGSGGGGSDI ELTQSPASLA VSLGQRAIIS CKASQSVSFA GTSLMHWYHQ |
| | | KPGQQPKLLI YRASNLEAGV PTRFSGSGSK TDFTLNIHPV EEEDAATYYC |
| | | QQSREYPYTF GGGTKLEIKA AAGSGGSGES KYGPPCPSCP APEFLGGPSV |
| | | FLFPPKPKDT LMISRTPEVT CVVVDVSQED PEVQFNWYVD GVEVHNAKTK |
| | | PREEQFNSTY RVVSVLTVLH QDWLNGKEYK CKVSNKGLPS SIEKTISKAK |
| | | GQPREPQVYT LPPSQEEMTK NQVSLTCLVK GFYPSDIAVE WESNGQPENN |
| | | YKTTPPVLDS DGSFFLYSRL TVDKSRWQEG NVFSCSVMHE ALHNHYTQKS |
| | | LSLSLGKMFW VLVVVGGVLA CYSLLVTVAF IIFWVKKVAK KPTNKAPHPK |
| | | QEPQEINFPD DLPGSNTAAP VQETLHGCQP VTQEDGKESR ISVQERQ |
| 415 | OSM_MOV19_ | MGVLLTQRTL LSLVLALLFP SMASMQVQLQ QSGAELVKPG ASVKISCKAS |
| | spIG4_CD137_ | GYSFTGYFMN WVKQSHGKSL EWIGRIHPYD GDTFYNQNFK DKATLTVDKS |
| | CD40 | SNTAHMELLS LTSEDFAVYY CTRYDGSRAM DYWGQGTTVT VSSGGGGSGG |
| | | GGSGGGGSDI ELTQSPASLA VSLGQRAIIS CKASQSVSFA GTSLMHWYHQ |
| | | KPGQQPKLLI YRASNLEAGV PTRFSGSGSK TDFTLNIHPV EEEDAATYYC |
| | | QQSREYPYTF GGGTKLEIKA AAGSGGSGES KYGPPCPSCP APEFLGGPSV |
| | | FLFPPKPKDT LMISRTPEVT CVVVDVSQED PEVQFNWYVD GVEVHNAKTK |
| | | PREEQFNSTY RVVSVLTVLH QDWLNGKEYK CKVSNKGLPS SIEKTISKAK |
| | | GQPREPQVYT LPPSQEEMTK NQVSLTCLVK GFYPSDIAVE WESNGQPENN |
| | | YKTTPPVLDS DGSFFLYSRL TVDKSRWQEG NVFSCSVMHE ALHNHYTQKS |
| | | LSLSLGKMFW VLVVVGGVLA CYSLLVTVAF IIFWVKKVAK KPTNKAPHPK |
| | | QEPQEINFPD DLPGSNTAAP VQETLHGCQP VTQEDGKESR ISVQERQ |
| 416 | OSM_MOV19_ | MGVLLTQRTL LSLVLALLFP SMASMQVQLQ QSGAELVKPG ASVKISCKAS |
| | spIG4_CD134_ | GYSFTGYFMN WVKQSHGKSL EWIGRIHPYD GDTFYNQNFK DKATLTVDKS |
| | CD40 | SNTAHMELLS LTSEDFAVYY CTRYDGSRAM DYWGQGTTVT VSSGGGGSGG |
| | | GGSGGGGSDI ELTQSPASLA VSLGQRAIIS CKASQSVSFA GTSLMHWYHQ |
| | | KPGQQPKLLI YRASNLEAGV PTRFSGSGSK TDFTLNIHPV EEEDAATYYC |
| | | QQSREYPYTF GGGTKLEIKA AAGSGGSGES KYGPPCPSCP APEFLGGPSV |
| | | FLFPPKPKDT LMISRTPEVT CVVVDVSQED PEVQFNWYVD GVEVHNAKTK |
| | | PREEQFNSTY RVVSVLTVLH QDWLNGKEYK CKVSNKGLPS SIEKTISKAK |
| | | GQPREPQVYT LPPSQEEMTK NQVSLTCLVK GFYPSDIAVE WESNGQPENN |
| | | YKTTPPVLDS DGSFFLYSRL TVDKSRWQEG NVFSCSVMHE ALHNHYTQKS |
| | | LSLSLGKMFW VLVVVGGVLA CYSLLVTVAF IIFWVRRDQR LPPDAHKPPG |
| | | GGSFRTPIQE EQADAHSTLA KIKKVAKKPT NKAPHPKQEP QEINFPDDLP |
| | | GSNTAAPVQE TLHGCQPVTQ EDGKESRISV QERQ |
| 417 | OSM_MOV19_ | MGVLLTQRTL LSLVLALLFP SMASMQVOLQ QSGAELVKPG ASVKISCKAS |
| | spIG4_CD2_CD40 | GYSFTGYFMN WVKQSHGKSL EWIGRIHPYD GDTFYNQNFK DKATLTVDKS |
| | | SNTAHMELLS LTSEDFAVYY CTRYDGSRAM DYWGQGTTVT VSSGGGGSGG |
| | | GGSGGGGSDI ELTQSPASLA VSLGQRAIIS CKASQSVSFA GTSLMHWYHQ |
| | | KPGQQPKLLI YRASNLEAGV PTRFSGSGSK TDFTLNIHPV EEEDAATYYC |
| | | QQSREYPYTF GGGTKLEIKA AAGSGGSGES KYGPPCPSCP APEFLGGPSV |
| | | FLFPPKPKDT LMISRTPEVT CVVVDVSQED PEVQFNWYVD GVEVHNAKTK |
| | | PREEQFNSTY RVVSVLTVLH QDWLNGKEYK CKVSNKGLPS SIEKTISKAK |
| | | GQPREPQVYT LPPSQEEMTK NQVSLTCLVK GFYPSDIAVE WESNGQPENN |
| | | YKTTPPVLDS DGSFFLYSRL TVDKSRWQEG NVFSCSVMHE ALHNHYTQKS |
| | | LSLSLGKMFW VLVVVGGVLA CYSLLVTVAF IIFWVKRKKQ RSRRNDEELE |
| | | TRAHRVATEE RGRKPHQIPA STPQNPATSQ HPPPPPGHRS QAPSHRPPPP |
| | | GHRVQHQPQK RPPAPSGTQV HQQKGPPLPR PRVQPKPPHG AAENSLSPSS |
| | | NKKVAKKPTN KAPHPKQEPQ EINFPDDLPG SNTAAPVQET LHGCQPVTQE |
| | | DGKESRISVQ ERQ |
| 418 | OSM_MOV19_ | MGVLLTQRTL LSLVLALLFP SMASMQVQLQ QSGAELVKPG ASVKISCKAS |
| | spIG4_GITR_CD40 | GYSFTGYFMN WVKQSHGKSL EWIGRIHPYD GDTFYNQNFK DKATLTVDKS |
| | | SNTAHMELLS LTSEDFAVYY CTRYDGSRAM DYWGQGTTVT VSSGGGGSGG |
| | | GGSGGGGSDI ELTQSPASLA VSLGQRAIIS CKASQSVSFA GTSLMHWYHQ |
| | | KPGQQPKLLI YRASNLEAGV PTRFSGSGSK TDFTLNIHPV EEEDAATYYC |
| | | QQSREYPYTF GGGTKLEIKA AAGSGGSGES KYGPPCPSCP APEFLGGPSV |
| | | FLFPPKPKDT LMISRTPEVT CVVVDVSQED PEVQFNWYVD GVEVHNAKTK |
| | | PREEQFNSTY RVVSVLTVLH QDWLNGKEYK CKVSNKGLPS SIEKTISKAK |
| | | GQPREPQVYT LPPSQEEMTK NQVSLTCLVK GFYPSDIAVE WESNGQPENN |
| | | YKTTPPVLDS DGSFFLYSRL TVDKSRWQEG NVFSCSVMHE ALHNHYTQKS |
| | | LSLSLGKMFW VLVVVGGVLA CYSLLVTVAF IIFWVQLGLH IWQLRSQCMW |
| | | PRETQLLLEV PPSTEDARSC QFPEEERGER SAEEKGRLGD LWVKKVAKKP |
| | | TNKAPHPKQE PQEINFPDDL PGSNTAAPVQ ETLHGCQPVT QEDGKESRIS |
| | | VQERQ |
| 419 | OSM_MOV19_ | MGVLLTQRTL LSLVLALLFP SMASMQVQLQ QSGAELVKPG ASVKISCKAS |
| | spIG4_CD29_CD40 | GYSFTGYFMN WVKQSHGKSL EWIGRIHPYD GDTFYNQNFK DKATLTVDKS |
| | | SNTAHMELLS LTSEDFAVYY CTRYDGSRAM DYWGQGTTVT VSSGGGGSGG |
| | | GGSGGGGSDI ELTQSPASLA VSLGQRAIIS CKASQSVSFA GTSLMHWYHQ |
| | | KPGQQPKLLI YRASNLEAGV PTRFSGSGSK TDFTLNIHPV EEEDAATYYC |
| | | QQSREYPYTF GGGTKLEIKA AAGSGGSGES KYGPPCPSCP APEFLGGPSV |
| | | FLFPPKPKDT LMISRTPEVT CVVVDVSQED PEVQFNWYVD GVEVHNAKTK |
| | | PREEQFNSTY RVVSVLTVLH QDWLNGKEYK CKVSNKGLPS SIEKTISKAK |
| | | GQPREPQVYT LPPSQEEMTK NQVSLTCLVK GFYPSDIAVE WESNGQPENN |
| | | YKTTPPVLDS DGSFFLYSRL TVDKSRWQEG NVFSCSVMHE ALHNHYTQKS |
| | | LSLSLGKMFW VLVVVGGVLA CYSLLVTVAF IIFWVKLLMI IHDRREFAKF |
| | | EKEKMNAKWD TGENPIYKSA VTTVVNPKYE GKKKVAKKPT NKAPHPKQEP |
| | | QEINFPDDLP GSNTAAPVQE TLHGCQPVTQ EDGKESRISV QERQ |
| 420 | OSM_MOV19_ | MGVLLTQRTL LSLVLALLFP SMASMQVQLQ QSGAELVKPG ASVKISCKAS |
| | spIG4_CD150_ | GYSFTGYFMN WVKQSHGKSL EWIGRIHPYD GDTFYNQNFK DKATLTVDKS |
| | CD40 | SNTAHMELLS LTSEDFAVYY CTRYDGSRAM DYWGQGTTVT VSSGGGGSGG |
| | | GGSGGGGSDI ELTQSPASLA VSLGQRAIIS CKASQSVSFA GTSLMHWYHQ |
| | | KPGQQPKLLI YRASNLEAGV PTRFSGSGSK TDFTLNIHPV EEEDAATYYC |
| | | QQSREYPYTF GGGTKLEIKA AAGSGGSGES KYGPPCPSCP APEFLGGPSV |
| | | FLFPPKPKDT LMISRTPEVT CVVVDVSQED PEVQFNWYVD GVEVHNAKTK |
| | | PREEQFNSTY RVVSVLTVLH QDWLNGKEYK CKVSNKGLPS SIEKTISKAK |
| | | GQPREPQVYT LPPSQEEMTK NQVSLTCLVK GFYPSDIAVE WESNGQPENN |
| | | YKTTPPVLDS DGSFFLYSRL TVDKSRWQEG NVFSCSVMHE ALHNHYTQKS |
| | | LSLSLGKMFW VLVVVGGVLA CYSLLVTVAF IIFWVRRRGK TNHYQTTVEK |
| | | KSLTIYAQVQ KPGPLQKKLD SFPAQDPCTT IYVAATEPVP ESVQETNSIT |
| | | VYASVTLPES KKVAKKPTNK APHPKQEPQE INFPDDLPGS NTAAPVQETL |
| | | HGCQPVTQED GKESRISVQE RQ |
| 421 | OSM_MOV19_ | MGVLLTQRTL LSLVLALLFP SMASMQVQLQ QSGAELVKPG ASVKISCKAS |
| | spIG4_CD40_ | GYSFTGYFMN WVKQSHGKSL EWIGRIHPYD GDTFYNQNFK DKATLTVDKS |
| | tandem | SNTAHMELLS LTSEDFAVYY CTRYDGSRAM DYWGQGTTVT VSSGGGGSGG |
| | | GGSGGGGSDI ELTQSPASLA VSLGQRAIIS CKASQSVSFA GTSLMHWYHQ |
| | | KPGQQPKLLI YRASNLEAGV PTRFSGSGSK TDFTLNIHPV EEEDAATYYC |
| | | QQSREYPYTF GGGTKLEIKA AAGSGGSGES KYGPPCPSCP APEFLGGPSV |
| | | FLFPPKPKDT LMISRTPEVT CVVVDVSQED PEVQFNWYVD GVEVHNAKTK |
| | | PREEQFNSTY RVVSVLTVLH QDWLNGKEYK CKVSNKGLPS SIEKTISKAK |
| | | GQPREPQVYT LPPSQEEMTK NQVSLTCLVK GFYPSDIAVE WESNGQPENN |
| | | YKTTPPVLDS DGSFFLYSRL TVDKSRWQEG NVFSCSVMHE ALHNHYTQKS |
| | | LSLSLGKMFW VLVVVGGVLA CYSLLVTVAF IIFWVAKKPT NKAPHPKQEP |
| | | QEINFPDDLP GSNTAAPVQE TLHGCQPVTQ EDGKESRISV QERQKKVAKK |
| | | PTNKAPHPKQ EPQEINFPDD LPGSNTAAPV QETLHGCQPV TQEDGKESRI |
| | | SVQERQKKVA |
| 422 | OSM_MOV19_ | MGVLLTQRTL LSLVLALLFP SMASMQVOLQ QSGAELVKPG ASVKISCKAS |
| | spIG4_CD40_ | GYSFTGYFMN WVKQSHGKSL EWIGRIHPYD GDTFYNQNFK DKATLTVDKS |
| | P227A | SNTAHMELLS LTSEDFAVYY CTRYDGSRAM DYWGQGTTVT VSSGGGGSGG |
| | | GGSGGGGSDI ELTQSPASLA VSLGQRAIIS CKASQSVSFA GTSLMHWYHQ |
| | | KPGQQPKLLI YRASNLEAGV PTRFSGSGSK TDFTLNIHPV EEEDAATYYC |
| | | QQSREYPYTF GGGTKLEIKA AAGSGGSGES KYGPPCPSCP APEFLGGPSV |
| | | FLFPPKPKDT LMISRTPEVT CVVVDVSQED PEVQFNWYVD GVEVHNAKTK |
| | | PREEQFNSTY RVVSVLTVLH QDWLNGKEYK CKVSNKGLPS SIEKTISKAK |
| | | GQPREPQVYT LPPSQEEMTK NQVSLTCLVK GFYPSDIAVE WESNGQPENN |
| | | YKTTPPVLDS DGSFFLYSRL TVDKSRWQEG NVFSCSVMHE ALHNHYTQKS |
| | | LSLSLGKMFW VLVVVGGVLA CYSLLVTVAF IIFWVKKVAK KPTNKAAHPK |
| | | QEPQEINFPD DLPGSNTAAP VQETLHGCQP VTQEDGKESR ISVQERQ |
| 423 | PD1_PD1_ | MQIPQAPWPV VWAVLQLGWR PGWFLDSPDR PWNPPTFSPA LLVVTEGDNA |
| | sCD28TM_CD28_ | TFTCSFSNTS ESFVLNWYRM SPSNQTDKLA AFPEDRSQPG QDCRFRVTQL |
| | CD40 | PNGRDFHMSV VRARRNDSGT YLCGAISLAP KAQIKESLRA ELRVTERRAE |
| | (dimeric) | VPTAHCPSPL FPGPSKPFWV LVVVGGVLAC YSLLVTVAFI IFWVRSKRSR |
| | CTP188 | LLHSDYMNMT PRRPGPTRKH YQPYAPPRDF AAYRSKKVAK KPTNKAPHPK |
| | | QEPQEINFPD DLPGSNTAAP VQETLHGCQP VTQEDGKESR ISVQERQ |
| 424 | PD1_PD1_ | MQIPQAPWPV VWAVLQLGWR PGWRPGWFLD SPDRPWNPPT FSPALLVVTE |
| | sCD28TM_CD40 | GDNATFTCSF SNTSESFVLN WYRMSPSNQT DKLAAFPEDR SQPGQDCRFR |
| | | VTQLPNGRDF HMSVVRARRN DSGTYLCGAI SLAPKAQIKE SLRAELRVTE |
| | | RRAEVPTAHC PSPLFPGPSK PFWVLVVVGG VLACYSLLVT VAFIIFWVKK |
| | | VAKKPTNKAP HPKQEPQEIN FPDDLPGSNT AAPVQETLHG CQPVTQEDGK |
| | | ESRISVQERQ |
| 425 | TIGIT_TIGIT_ | MRWCLLLIWA QGLRQAPLAS GMMTGTIETT GNISAEKGGS IILQCHLSST |
| | CD28TM_ | TAQVTQVNWE QQDQLLAICN ADLGWHISPS FKDRVAPGPG LGLTLQSLTV |
| | CD28_CD40 | NDTGEYFCIY HTYPDGTYTG RIFLEVLESS VAEHGARFQI PFWVLVVVGG |
| | | VLACYSLLVT VAFIIFWVRS KRSRLLHSDY MNMTPRRPGP TRKHYQPYAP |
| | | PRDFAAYRSK KVAKKPTNKA PHPKQEPQEI NFPDDLPGSN TAAPVQETLH |
| | | GCQPVTQEDG KESRISVQER Q |
| 426 | TIGIT_TIGIT_ | MRWCLLLIWA QGLRQAPLAS GMMTGTIETT GNISAEKGGS IILQCHLSST |
| | CD28TM_CD40 | TAQVTQVNWE QQDQLLAICN ADLGWHISPS FKDRVAPGPG LGLTLQSLTV |
| | | NDTGEYFCIY HTYPDGTYTG RIFLEVLESS VAEHGARFQI PFWVLVVVGG |
| | | VLACYSLLVT VAFIIFWVKK VAKKPTNKAP HPKQEPQEIN FPDDLPGSNT |
| | | AAPVQETLHG CQPVTQEDGK ESRISVQERQ |
| 427 | OSM_MOV19_PD1_ | MGVLLTQRTL LSLVLALLFP SMASMQVOLQ QSGAELVKPG ASVKISCKAS |
| | sCD28TM_CD28_ | GYSFTGYFMN WVKQSHGKSL EWIGRIHPYD GDTFYNQNFK DKATLTVDKS |
| | CD40 | SNTAHMELLS LTSEDFAVYY CTRYDGSRAM DYWGQGTTVT VSSGGGGSGG |
| | | GGSGGGGSDI ELTQSPASLA VSLGQRAIIS CKASQSVSFA GTSLMHWYHQ |
| | | KPGQQPKLLI YRASNLEAGV PTRFSGSGSK TDFTLNIHPV EEEDAATYYC |
| | | QQSREYPYTF GGGTKLEIKA AAGSGGSGRP GWFLDSPDRP WNPPTFSPAL |
| | | LVVTEGDNAT FTCSFSNTSE SFVLNWYRMS PSNQTDKLAA FPEDRSQPGQ |
| | | DCRFRVTQLP NGRDFHMSVV RARRNDSGTY LCGAISLAPK AQIKESLRAE |
| | | LRVTERRAEV PTAHCPSPLF PGPSKPFWVL VVVGGVLACY SLLVTVAFII |
| | | FWVRSKRSRL LHSDYMNMTP RRPGPTRKHY QPYAPPRDFA AYRSKKVAKK |
| | | PTNKAPHPKQ EPQEINFPDD LPGSNTAAPV QETLHGCQPV TQEDGKESRI |
| | | SVQERQ |
| 428 | OSM_MOV19_PD1_ | MGVLLTQRTL LSLVLALLFP SMASMQVQLQ QSGAELVKPG ASVKISCKAS |
| | sCD28TM_CD40 | GYSFTGYFMN WVKQSHGKSL EWIGRIHPYD GDTFYNQNFK DKATLTVDKS |
| | | SNTAHMELLS LTSEDFAVYY CTRYDGSRAM DYWGQGTTVT VSSGGGGSGG |
| | | GGSGGGGSDI ELTQSPASLA VSLGQRAIIS CKASQSVSFA GTSLMHWYHQ |
| | | KPGQQPKLLI YRASNLEAGV PTRFSGSGSK TDFTLNIHPV EEEDAATYYC |
| | | QQSREYPYTF GGGTKLEIKA AAGSGGSGRP GWFLDSPDRP WNPPTFSPAL |
| | | LVVTEGDNAT FTCSFSNTSE SFVLNWYRMS PSNQTDKLAA FPEDRSQPGQ |
| | | DCRFRVTQLP NGRDFHMSVV RARRNDSGTY LCGAISLAPK AQIKESLRAE |
| | | LRVTERRAEV PTAHCPSPLF PGPSKPFWVL VVVGGVLACY SLLVTVAFII |
| | | FWVKKVAKKP TNKAPHPKQE PQEINFPDDL PGSNTAAPVQ ETLHGCQPVT |
| | | QEDGKESRIS VQERQ |
| 429 | OSM_MOV19_ | MGVLLTQRTL LSLVLALLFP SMASMQVQLQ QSGAELVKPG ASVKISCKAS |
| | TIGIT_sCD28TM_ | GYSFTGYFMN WVKQSHGKSL EWIGRIHPYD GDTFYNQNFK DKATLTVDKS |
| | CD28_CD40 | SNTAHMELLS LTSEDFAVYY CTRYDGSRAM DYWGQGTTVT VSSGGGGSGG |
| | | GGSGGGGSDI ELTQSPASLA VSLGQRAIIS CKASQSVSFA GTSLMHWYHQ |
| | | KPGQQPKLLI YRASNLEAGV PTRFSGSGSK TDFTLNIHPV EEEDAATYYC |
| | | QQSREYPYTF GGGTKLEIKA AAGSGGSGMM TGTIETTGNI SAEKGGSIIL |
| | | QCHLSSTTAQ VTQVNWEQQD QLLAICNADL GWHISPSFKD RVAPGPGLGL |
| | | TLQSLTVNDT GEYFCIYHTY PDGTYTGRIF LEVLESSVAE HGARFQIPFW |
| | | VLVVVGGVLA CYSLLVTVAF IIFWVRSKRS RLLHSDYMNM TPRRPGPTRK |
| | | HYQPYAPPRD FAAYRSKKVA KKPTNKAPHP KQEPQEINFP DDLPGSNTAA |
| | | PVQETLHGCQ PVTQEDGKES RISVQERQ |
| 430 | OSM_MOV19_ | MGVLLTQRTL LSLVLALLFP SMASMQVQLQ QSGAELVKPG ASVKISCKAS |
| | TIGIT_sCD28TM_ | GYSFTGYFMN WVKQSHGKSL EWIGRIHPYD GDTFYNQNFK DKATLTVDKS |
| | CD40 | SNTAHMELLS LTSEDFAVYY CTRYDGSRAM DYWGQGTTVT VSSGGGGSGG |
| | | GGSGGGGSDI ELTQSPASLA VSLGQRAIIS CKASQSVSFA GTSLMHWYHQ |
| | | KPGQQPKLLI YRASNLEAGV PTRFSGSGSK TDFTLNIHPV EEEDAATYYC |
| | | QQSREYPYTF GGGTKLEIKA AAGSGGSGMM TGTIETTGNI SAEKGGSIIL |
| | | QCHLSSTTAQ VTQVNWEQQD QLLAICNADL GWHISPSFKD RVAPGPGLGL |
| | | TLQSLTVNDT GEYFCIYHTY PDGTYTGRIF LEVLESSVAE HGARFQIPFW |
| | | VLVVVGGVLA CYSLLVTVAF IIFWVKKVAK KPTNKAPHPK QEPQEINFPD |
| | | DLPGSNTAAP VQETLHGCQP VTQEDGKESR ISVQERQ |
| 431 | Linker | GGGGSGGGGS GGGGS |
| 432 | Truncated | NKILVKQSPM LVAYDNAVNL SCKYSYNLFS REFRASLHKG LDSAVEVCVV |
| | Cytoplasmic | YGNYSQQLQV YSKTGFNCDG KLGNESVTFY LQNLYVNQTD IYFCKIEVMY |
| | domain CD28 | PPPYLDNEKS NGTIIHVKGK HLCPSPLFPG PSKPFWVLVV VGGVLACYSL |
| | Variant | LVTVAFIIFW VRSKR |
| 433 | CD28.CD137 | NKILVKQSPM LVAYDNAVNL SCKYSYNLFS REFRASLHKG LDSAVEVCVV |
| | fusion | YGNYSQQLQV YSKTGFNCDG KLGNESVTFY LQNLYVNQTD IYFCKIEVMY |
| | | PPPYLDNEKS NGTIIHVKGK HLCPSPLFPG PSKPFWVLVV VGGVLACYSL |
| | | LVTVAFIIFW VRSKRSRLLH SDYMNMTPRR PGPTRKHYQP YAPPRDFAAY |
| | | RSRFSVVKRG RKKLLYIFKQ PFMRPVQTTQ EEDGCSCRFP EEEEGGCE |
| 434 | CD28.CD134 | NKILVKQSPM LVAYDNAVNL SCKYSYNLFS REFRASLHKG LDSAVEVCVV |
| | fusion | YGNYSQQLQV YSKTGFNCDG KLGNESVTFY LQNLYVNQTD IYFCKIEVMY |
| | | PPPYLDNEKS NGTIIHVKGK HLCPSPLFPG PSKPFWVLVV VGGVLACYSL |
| | | LVTVAFIIFW VRSKRSRLLH SDYMNMTPRR PGPTRKHYQP YAPPRDFAAY |
| | | RSRRDQRLPP DAHKPPGGGS FRTPIQEEQA DAHSTLAKI |
| 435 | CD28.CD2 fusion | NKILVKQSPM LVAYDNAVNL SCKYSYNLFS REFRASLHKG LDSAVEVCVV |
| | | YGNYSQQLQV YSKTGFNCDG KLGNESVTFY LQNLYVNQTD IYFCKIEVMY |
| | | PPPYLDNEKS NGTIIHVKGK HLCPSPLFPG PSKPFWVLVV VGGVLACYSL |
| | | LVTVAFIIFW VRSKRSRLLH SDYMNMTPRR PGPTRKHYQP YAPPRDFAAY |
| | | RSKRKKQRSR RNDEELETRA HRVATEERGR KPHQIPASTP QNPATSQHPP |
| | | PPPGHRSQAP SHRPPPPGHR VQHQPQKRPP APSGTQVHQQ KGPPLPRPRV |
| | | QPKPPHGAAE NSLSPSSN |
| 436 | CD28.CD29 | NKILVKQSPM LVAYDNAVNL SCKYSYNLFS REFRASLHKG LDSAVEVCVV |
| | fusion | YGNYSQQLQV YSKTGFNCDG KLGNESVTFY LQNLYVNQTD IYFCKIEVMY |
| | | PPPYLDNEKS NGTIIHVKGK HLCPSPLFPG PSKPFWVLVV VGGVLACYSL |
| | | LVTVAFIIFW VRSKRSRLLH SDYMNMTPRR PGPTRKHYQP YAPPRDFAAY |
| | | RSKLLMIIHD RREFAKFEKE KMNAKWDTGE NPIYKSAVTT VVNPKYEGK |
| 437 | CD28.GITR | NKILVKQSPM LVAYDNAVNL SCKYSYNLFS REFRASLHKG LDSAVEVCVV |
| | fusion | YGNYSQQLQV YSKTGFNCDG KLGNESVTFY LQNLYVNQTD IYFCKIEVMY |
| | | PPPYLDNEKS NGTIIHVKGK HLCPSPLFPG PSKPFWVLVV VGGVLACYSL |
| | | LVTVAFIIFW VRSKRSRLLH SDYMNMTPRR PGPTRKHYQP YAPPRDFAAY |
| | | RSQLGLHIWQ LRSQCMWPRE TQLLLEVPPS TEDARSCQFP EEERGERSAE |
| | | EKGRLGDLWV |
| 438 | CD28.IL2Rγ | NKILVKQSPM LVAYDNAVNL SCKYSYNLFS REFRASLHKG LDSAVEVCVV |
| | fusion | YGNYSQQLQV YSKTGFNCDG KLGNESVTFY LQNLYVNQTD IYFCKIEVMY |
| | | PPPYLDNEKS NGTIIHVKGK HLCPSPLFPG PSKPFWVLVV VGGVLACYSL |
| | | LVTVAFIIFW VRSKRSRLLH SDYMNMTPRR PGPTRKHYQP YAPPRDFAAY |
| | | RSERTMPRIP TLKNLEDLVT EYHGNFSAWS GVSKGLAESL QPDYSERLCL |
| | | VSEIPPKGGA LGEGPGASPC NQHSPYWAPP CYTLKPET |
| 439 | CD28.CD40 | NKILVKQSPM LVAYDNAVNL SCKYSYNLFS REFRASLHKG LDSAVEVCVV |
| | fusion | YGNYSQQLQV YSKTGFNCDG KLGNESVTFY LQNLYVNQTD IYFCKIEVMY |
| | | PPPYLDNEKS NGTIIHVKGK HLCPSPLFPG PSKPFWVLVV VGGVLACYSL |
| | | LVTVAFIIFW VRSKRSRLLH SDYMNMTPRR PGPTRKHYQP YAPPRDFAAY |
| | | RSKKVAKKPT NKAPHPKQEP QEINFPDDLP GSNTAAPVQE TLHGCQPVTQ |
| | | EDGKESRISV QERQ |
| 440 | CD28.CD150 | NKILVKQSPM LVAYDNAVNL SCKYSYNLFS REFRASLHKG LDSAVEVCVV |
| | fusion | YGNYSQQLQV YSKTGFNCDG KLGNESVTFY LQNLYVNQTD IYFCKIEVMY |
| | | PPPYLDNEKS NGTIIHVKGK HLCPSPLFPG PSKPFWVLVV VGGVLACYSL |
| | | LVTVAFIIFW VRSKRSRLLH SDYMNMTPRR PGPTRKHYQP YAPPRDFAAY |
| | | RSRRRGKTNH YQTTVEKKSL TIYAQVQKPG PLQKKLDSFP AQDPCTTIYV |
| | | AATEPVPESV QETNSITVYA SVTLPES |
| 441 | CD28.CD2.CD40 | NKILVKQSPM LVAYDNAVNL SCKYSYNLFS REFRASLHKG LDSAVEVCVV |
| | fusion | YGNYSQQLQV YSKTGFNCDG KLGNESVTFY LQNLYVNQTD IYFCKIEVMY |
| | | PPPYLDNEKS NGTIIHVKGK HLCPSPLFPG PSKPFWVLVV VGGVLACYSL |
| | | LVTVAFIIFW VRSKRSRLLH SDYMNMTPRR PGPTRKHYQP YAPPRDFAAY |
| | | RSKRKKQRSR RNDEELETRA HRVATEERGR KPHQIPASTP QNPATSQHPP |
| | | PPPGHRSQAP SHRPPPPGHR VQHQPQKRPP APSGTQVHQQ KGPPLPRPRV |
| | | QPKPPHGAAE NSLSPSSNKK VAKKPTNKAP HPKQEPQEIN FPDDLPGSNT |
| | | AAPVQETLHG CQPVTQEDGK ESRISVQERQ |
| 442 | CD28(IEV) | IEVMYPPPYL DNEKSNGTII HVKGKHLCPS PLFPGPSKPF WVLVVVGGVL |
| | Variant | ACYSLLVTVA FIIFWVRSKR SRLLHSDYMN MTPRRPGPTR KHYQPYAPPR |
| | | DFAAYRS |
| 443 | SH3 motif2 | PTNKAPHP |
| 444 | SH3 motif3 | PTNKAPH |
| 445 | TRAF2_motif4 | PKQET |
| 446 | TRAF2_motif5 | PVQET |
| 447 | TRAF2_motif6 | SVQET |
| 448 | TRAF6-Motif2 | QEPQEINF |
| 449 | HIS tag | DYKDDDDK |

[symbol]

indicates data missing or illegible when filed

[0409] Although the present invention and its advantages have been described in detail, it should be understood that various changes, substitutions and alterations can be made herein without departing from the spirit and scope of the invention as defined in the appended claims.

[0410] The present invention will be further illustrated in the following Examples which are given for illustration purposes only and are not intended to limit the invention in any way.

[0411] Embodiments of the present disclosure provided herein are described by way of the following exemplary numbered arrangements:

[0412] 1. An chimeric costimulatory antigen receptor (CoStAR) which comprises:

[0413] an extracellular binding domain that binds to carcinoembryonic antigen (CEA), or an extracellular binding domain that binds to mesothelin (MSLN), operatively linked to a transmembrane domain, and

[0414] a first signaling domain and an intracellular domain of ICOS or a signaling fragment thereof, or

[0415] a first signaling domain and an intracellular domain of NTRK1 or a signaling fragment thereof, or

[0416] a first signaling domain and an intracellular domain of DAP10 or a signaling fragment thereof, or

[0417] a first signaling domain and a CD40 signaling domain or a signaling fragment thereof, or

[0418] a first signaling domain and one or more of a TRAF2/TRAF3 sequence, a TRAF6 sequence, a TRAF2 sequence, or an IProx sequence.

[0419] 2. The CoStAR of arrangement 1, wherein the first signaling domain comprises a signaling domain or signaling fragment of CD2, CD9, CD26, CD27, CD28, CD29, CD38, CD40, CD43, CD46, CD49d, CD55, CD73, CD81, CD82, CD99, CD100, CD134 (OX40), CD137 (41BB), CD150 (SLAM), CD270 (HVEM), CD278 (ICOS), CD357 (GITR), or EphB6.

[0420] 3. The CoStAR of arrangement 1, wherein the CoStAR comprises a second signaling domain.

[0421] 4. The CoStAR of arrangement 3, wherein the second signaling domain comprises a signaling domain or signaling fragment of CD2, CD9, CD26, CD27, CD28, CD29, CD38, CD40, CD43, CD46, CD49d, CD55, CD73, CD81, CD82, CD99, CD100, CD134 (OX40), CD137 (41BB), CD150 (SLAM), CD270 (HVEM), CD278 (ICOS), CD357 (GITR), or EphB6.

[0422] 5. The CoStAR of arrangement 1, wherein the CD40 signaling fragment comprises an SH3 motif (KPTNKAPH, SEQ ID NO:35), TRAF2 motif (PKQE, SEQ ID NO:36, PVQE, SEQ ID NO:37, SVQE, SEQ ID NO:38), TRAF6 motif (QEPQEINFP, SEQ ID NO:39), PKA motif (KKPTNKA, SEQ ID NO:40, SRISVQE, SEQ ID NO:41), or a combination thereof, or is a full length CD40 intracellular domain.

[0423] 6. The CoStAR of arrangement 2, wherein the first signaling domain comprises a full length costimulatory domain.

[0424] 7. The CoStAR of arrangement 1, wherein the extracellular binding domain is operatively linked to the transmembrane domain by a linker and/or a spacer.

[0425] 8. The CoStAR of arrangement 7, wherein the linker comprises from about 5 to about 20 amino acids.

[0426] 9. The CoStAR of arrangement 7, wherein the linker comprises from about 10 to about 250 amino acids.

[0427] 10. The CoStAR of arrangement 1, wherein the CoStAR comprises a second extracellular binding domain.

[0428] 11. The CoStAR of arrangement 10, wherein the second extracellular binding domain comprises a ligand binding domain from CD8, CD28, or ICOS.

[0429] 12. The CoStAR of arrangement 1, wherein the transmembrane domain comprises a transmembrane domain from CD28, CD8, ICOS, DAP10, or NTRK.

[0430] 13. The CoStAR of arrangement 1, wherein the transmembrane domain comprises the transmembrane domain sequence of SEQ ID NO:20, SEQ ID NO:21, or SEQ ID NO:22.

[0431] 14. The CoStAR of arrangement 1, wherein the extracellular binding domain comprises an scFv, a peptide, an antibody heavy-chain variable domain, an antibody light-chain variable domain, or a CEA ligand.

[0432] 15. The CoStAR of any one of arrangements 1 to 15, which further comprises a CD3ζ signaling domain at the C-terminus.

[0433] 16. The CoStAR of any one of arrangements 1 to 14, which further comprises an N-terminal signal peptide.

[0434] 17. The CoStAR of arrangement 17, wherein the N-terminal signal peptide comprises the signal peptide of oncostatin M (OSM), CD8a, CD2, interleukin-2 (IL-2), granulocyte-macrophage colony stimulating factor (GM-CSF), or human IgGκ.

[0435] 18. A nucleic acid which encodes the CoStAR of any one of arrangements 1 to 17.

[0436] 19. A vector which comprises the nucleic acid of arrangement 18.

[0437] 20. A cell which expresses the CoStAR of any one of arrangements 1 to 16.

[0438] 21. The cell of arrangement 20, wherein the cell comprises an alpha-beta T cell, gamma-delta T cell, T regulatory cell, TIL, NKT cell or NK cell.

[0439] 22. The cell of arrangement 20, wherein the cell coexpresses a CAR or a TCR.

[0440] 23. A method of making the cell of arrangement 20, which comprises the step of transducing or transfecting a cell with a vector of arrangement 19.

[0441] 24. A method for preparing a population of cells that express a CoStAR of any one of arrangements 1 to 16, which comprises
[0442] i) detecting expression of the CoStAR on the surface of cells transfected or transduced with a vector of arrangement 19; and
[0443] ii) selecting cells which are identified as expressing the CoStAR.

[0444] 25. A cell population which is enriched for cell expression a CoStAR of any one of arrangements 1 to 16.

[0445] 26. A method for treating a disease in a subject, which comprises the step of administering a cell according to any of arrangements 20 to 22, or a cell population according to arrangement 25 to the subject.

[0446] 27. A protein comprising an amino acid sequence comprising a sequence of Consensus A, or X₁X₂X₃X₄X₅X₆X₇X₈X₉X₁₀X₁₁, wherein:
[0447] a. X₁ is any amino acid,
[0448] b. X₂ is any amino acid,
[0449] c. X₃ is P, X₄ is any amino acid,
[0450] d. X₅ is Q,
[0451] e. X₆ is C or A,
[0452] f. X₇ is any amino acid,
[0453] g. X₈ is any amino acid,
[0454] h. X₉ is any amino acid,
[0455] i. X₁₀ is any amino acid, and
[0456] j. X₁₁ is any amino acid.

[0457] 28. The protein of arrangement 27, wherein the protein is part of a TRAF domain.

[0458] 29. The protein of any of the preceding arrangements, wherein the protein is part of a TRAF2 domain.

[0459] 30. The protein of any of the preceding arrangements, wherein:
[0460] a. the sequence comprises:
[0461] i. X₁ is S or P,
[0462] ii. X₂ is V, H, or Y,
[0463] iii. X₄ is I, Q, V,
[0464] iv. X₇ is T or S,
[0465] V. X₈ is D,
[0466] vi. X₉ is K, D, or G,
[0467] vii. X₁₀ is T, S, G, or A, and
[0468] viii. X₁₁ is D, S, N, or D; or
[0469] b. the sequence is at least 60% identical to a).

[0470] 31. A protein comprising an amino acid sequence comprising a sequence of Consensus B, or X₁X₂X₃X₄X₅X₆X₇X₈X₉X₁₀X₁₁, wherein:
[0471] a. X₁ is any amino acid,
[0472] b. X₂ is any amino acid,
[0473] c. X₃ is P, S, A, or T,
[0474] d. X₄ is any amino acid,
[0475] e. X₅ is Q or E,
[0476] f. X₆ is E,
[0477] g. X₇ is any amino acid,
[0478] h. X₈ is any amino acid,
[0479] i. X₉ is any amino acid,
[0480] j. X₁₀ is any amino acid, and
[0481] k. X₁₁ is any amino acid.

[0482] 32. The protein of arrangement 31, wherein the protein is part of a TRAF domain.

[0483] 33. The protein of any of the preceding arrangements, wherein the protein is part of a TRAF2 domain.

[0484] 34. The protein of any of the preceding arrangements, wherein:
[0485] a. the sequence comprises:
[0486] i. X₁ is P, A, M, T, S, R, V, H,
[0487] ii. X₂ is F, A, L, I, T, V, G, C, A, F, P,
[0488] iii. X₄ is K, V, I, H, A, Q, T, E, S,
[0489] iv. X₇ is C, T, E, D, S, A,
[0490] v. X₈ is A, L, G, Y, I, Q, D, E,
[0491] vi. X₉ is F, H, K, R, P, A, G, Y, E, N,
[0492] vii. X₁₀ is R, G, E, K, A, S, D, C, C, P, V, and
[0493] viii. X₁₁ is S, C, D, P, W, T, A, G, E; or
[0494] b. the sequence is at least 60% identical to a).

[0495] 35. The protein of any one of the preceding arrangements, wherein the sequence is part of a Traf 2/3 sequence.

[0496] 36. A protein comprising an amino acid sequence comprising a sequence of Consensus C, or X₁X₂X₃X₄X₅X₆, wherein:
[0497] a. X₁ is P,
[0498] b. X₂ is any amino acid,
[0499] c. X₃ is E,
[0500] d. X₄ is any amino acid,
[0501] e. X₅ is any amino acid, and
[0502] f. X₆ is Ac/Ar.

[0503] 37. The protein of arrangement 36, wherein the protein is part of a TRAF domain.

[0504] 38. The protein of any of the preceding arrangements, wherein the protein is part of a TRAF6 domain.

[0505] 39. The protein of any of the preceding arrangements, wherein
[0506] a. the sequence comprises:
[0507] i. X₂ is Q, P, E, V, T, or S,
[0508] ii. X₄ is I, L M, N, S, T, N, D,
[0509] iii. X₅ is N, D, R, S, G, or Y; or
[0510] b. the sequence is at least 60% identical to a).

[0511] 40. An amino acid sequence comprising:
[0512] a) one or more of SEQ ID NOs: 475, 476, 477, 478, 479, 494, 495, 496, 498, 505, 510, 511, 512, 513, 514, 515, 516, 517, 518, or 519;
[0513] b) a sequence that is at least 70% identical to a sequence in a); or
[0514] c) a sequence that is at least 80% similar to a).

[0515] 41. A TRAF domain in a CD40 protein, wherein the TRAF domain comprises one or more of:
[0516] a) SEQ ID NOs: 475, 476, 477, 478, 479, 494, 495, 496, 498, 505, 510, 511, 512, 513, 514, 515, 516, 517, 518, or 519;
[0517] b) a sequence that is at least 70% identical to a sequence in a); or
[0518] c) a sequence that is at least 80% similar to a).

[0519] 42. A TRAF6 domain sequence comprising: PQEINF, PEEMSW, PPENYE, or PQENSY.

[0520] 43. A TRAF2/3 domain sequence comprising: PVQET, TQEET, SKEET, AVEET, or PVQET.

[0521] 44. A TRAF2 domain sequence comprising: SVQE, AVEE or PEEE.

[0522] 45. A TRAF 6 or TRAF2/3 domain that comprises:
[0523] a) the amino acid sequence of one of SEQ ID NOs: 475, 476, 477, 478, 479, 494, 495, 496, 498, 505, 510, 511, 512, 513, 514, 515, 516, 517, 518, or 519;
[0524] b) the amino acid sequence that is at least 70% identical to a) or
[0525] c) the amino acid sequence that is at least 80% similar to a).

[0526] 46. The protein, amino acid sequence, or TRAF domain of any one of the preceding arrangements, wherein the sequence is within a CD40 protein sequence.

[0527] 47. The protein, amino acid sequence, or TRAF domain of any one of the preceding arrangements, wherein the sequence is within a CD40 protein and is located at a corresponding TRAF 2, TRAF2/3, and/or TRAF6 domain within the CD40 protein.

[0528] 48. A TRAF2/TRAF3 domain that comprises an amino acid sequence of Consensus A, or X₁X₂X₃X₄X₅X₆X₇X₈X₉X₁₀X₁₁, wherein
[0529] a. X₁ is any amino acid,
[0530] b. X₂ is any amino acid,
[0531] c. X₃ is P, X₄ is any amino acid,
[0532] d. X₅ is Q,
[0533] e. X₆ is C or A,
[0534] f. X₇ is any amino acid,
[0535] g. X₈ is any amino acid,
[0536] h. X₉ is any amino acid,
[0537] i. X₁₀ is any amino acid, and
[0538] j. X₁₁ is any amino acid.

[0539] 49. A TRAF2/TRAF3 domain that comprises an amino acid sequence of Consensus B, or X₁X₂X₃X₄X₅X₆X₇X₈X₉X₁₀X₁₁, wherein
[0540] a. X₁ is any amino acid,
[0541] b. X₂ is any amino acid,
[0542] c. X₃ is P, S, A, or T,
[0543] d. X₄ is any amino acid,
[0544] e. X₅ is Q or E,
[0545] f. X₆ is E,
[0546] g. X₇ is any amino acid,
[0547] h. X₈ is any amino acid,
[0548] i. X₉ is any amino acid,
[0549] j. X₁₀ is any amino acid, and
[0550] k. X₁₁ is any amino acid.

[0551] 50. A TRAF6 domain that comprises an amino acid sequence of Consensus C, or X₁X₂X₃X₄X₅X₆, wherein
[0552] a. X₁ is P,
[0553] b. X₂ is any amino acid,
[0554] c. X₃ is E,
[0555] d. X₄ is any amino acid,
[0556] e. X₅ is any amino acid, and
[0557] f. X₆ is Ac/Ar.

[0558] 51. A CD40 domain that comprises an amino acid sequence of one or more of the following:
[0559] a. A TRAF2/TRAF3 domain that comprises an amino acid sequence of Consensus A, or X₁X₂X₃X₄X₅X₆X₇X₈X₉X₁₀X₁₁, wherein
[0560] i. X₁ is any amino acid,
[0561] ii. X₂ is any amino acid,
[0562] iii. X₃ is P, X₄ is any amino acid,
[0563] iv. X₅ is Q,
[0564] v. X₆ is C or A,
[0565] vi. X₇ is any amino acid,
[0566] vii. X₈ is any amino acid,
[0567] viii. X₉ is any amino acid,
[0568] ix. X₁₀ is any amino acid, and
[0569] x. X₁₁ is any amino acid.
[0570] b. A TRAF2/TRAF3 domain that comprises an amino acid sequence of Consensus B, or X₁X₂X₃X₄X₅X₆X₇X₈X₉X₁₀X₁₁, wherein
[0571] i. X₁ is any amino acid,
[0572] ii. X₂ is any amino acid,
[0573] iii. X₃ is P, S, A, or T,
[0574] iv. X₄ is any amino acid,
[0575] v. X₅ is Q or E,
[0576] vi. X₆ is E,
[0577] vii. X₇ is any amino acid,
[0578] viii. X₈ is any amino acid,
[0579] ix. X₉ is any amino acid,
[0580] x. X₁₀ is any amino acid, and
[0581] xi. X₁₁ is any amino acid.
[0582] c. A TRAF6 domain that comprises an amino acid sequence of Consensus C, or X₁X₂X₃X₄X₅X₆, wherein
[0583] i. X₁ is P,
[0584] ii. X₂ is any amino acid,
[0585] iii. X₃ is E,
[0586] iv. X₄ is any amino acid,
[0587] v. X₅ is any amino acid, and
[0588] vi. X₆ is Ac/Ar.

[0589] 52. An chimeric costimulatory antigen receptor (CoStAR) which comprises:
[0590] an extracellular binding domain that binds to carcinoembryonic antigen (CEA), or an extracellular binding domain that binds to mesothelin (MSLN);
[0591] a transmembrane domain that is linked to the extracellular binding domain,
[0592] a first signaling domain; and
[0593] a second signaling domain, wherein the second signaling domain comprises a variant CD40 signaling domain or a signaling fragment thereof, wherein the variant CD40 comprises a sequence of a variant TRAF2/TRAF3 sequence, or a variant TRAF6 sequence, or a variant TRAF2 sequence, wherein the variant CD40 does not comprise SEQ ID NO: 42.

[0594] 53. The CoStAR of arrangement 52, wherein the first signalling domain comprises a signalling domain or signaling fragment of CD28 or CD278 (ICOS).

[0595] 54. The CoStAR of arrangement 52, wherein the first signalling domain comprises a full-length costimulatory domain.

[0596] 55. The CoStAR of arrangement 52, wherein the extracellular binding domain is operatively linked to the transmembrane domain by a linker and/or a spacer.

[0597] 56. The CoStAR of arrangement 55, wherein the linker comprises from about 5 to about 20 amino acids.

[0598] 57. The CoStAR of arrangement 55, wherein the linker comprises from about 10 to about 250 amino acids.

[0599] 58. The CoStAR of arrangement 55, wherein the transmembrane domain comprises a transmembrane domain from CD28, CD8, ICOS, DAP10, or NTRK.

[0600] 59. The CoStAR of arrangement 55, wherein the transmembrane domain comprises the transmembrane domain sequence of SEQ ID NO:20, SEQ ID NO:21, or SEQ ID NO:22.

[0601] 60. The CoStAR of arrangement 55, wherein the extracellular binding domain comprises an scFv, a peptide, an antibody heavy-chain variable domain, an antibody light-chain variable domain, or a CEA ligand.

[0602] 61. A nucleic acid which encodes the CoStAR of any one of arrangements 27 to 60.

[0603] 62. A vector which comprises the nucleic acid of arrangement 61.

[0604] 63. A cell which expresses the CoStAR of any one of arrangements 27 to 62.

[0605] 64. The cell of arrangement 63, wherein the cell comprises an alpha-beta T cell, gamma-delta T cell, T regulatory cell, TIL, NKT cell or NK cell.

[0606] 65. The cell of arrangement 64, wherein the cell coexpresses a CAR or a TCR.

[0607] 66. A method of making the cell of any one of arrangements 63-65, which comprises the step of transducing or transfecting a cell with a vector of arrangement 62.

[0608] 67. A method for preparing a population of cells that express a CoStAR of any one of arrangements 52-60, which comprises:
[0609] a. detecting expression of the CoStAR on the surface of cells transfected or transduced with a vector of arrangement 62; and
[0610] b. selecting cells which are identified as expressing the CoStAR.

[0611] 68. A cell population which is enriched for cell expression a CoStAR of any one of arrangements 52-60.

[0612] 69. A method for treating a disease in a subject, which comprises the step of administering a cell according to any of arrangements 63-65, or a cell population according to arrangement 68 to the subject.

[0613] 70. A protein comprising the amino acid sequence of one of SEQ ID NOs: 510-519.

[0614] 71. The protein of arrangement 70, wherein the protein comprises the sequence of SEQ ID NO: 510.

[0615] 72. The protein of arrangement 70, wherein the protein comprises the sequence of SEQ ID NO: 511.

[0616] 73. The protein of arrangement 70, wherein the protein comprises the sequence of SEQ ID NO: 512.

[0617] 74. The protein of arrangement 70, wherein the protein comprises the sequence of SEQ ID NO: 513.

[0618] 75. The protein of arrangement 70, wherein the protein comprises the sequence of SEQ ID NO: 514.

[0619] 76. The protein of arrangement 70, wherein the protein comprises the sequence of SEQ ID NO: 515.

[0620] 77. The protein of arrangement 70, wherein the protein comprises the sequence of SEQ ID NO: 516.

[0621] 78. The protein of arrangement 70, wherein the protein comprises the sequence of SEQ ID NO: 517.

[0622] 79. The protein of arrangement 70, wherein the protein comprises the sequence of SEQ ID NO: 518.

[0623] 80. The protein of arrangement 70, wherein the protein comprises the sequence of SEQ ID NO: 519.

### EXAMPLES

### Example 1—Production of T-Cells Expressing CoStAR

[0624] Materials and Methods

[0625] Construct design—The MFE23 CoStAR consists of a CEA-specific MFE23, humanized (hu) MFE23, CEA6, BW431/26 or huT84.66 derived single chain antibody fragment nucleotide sequence with an oncostatin M1, CD8α, CD2, IL-2, GM-CSF or hIgGκ VIII leader sequence. Each CoStAR has an extracellular spacer domain derived from CD8 or CD28 or truncated CD28 and a signalling domain derived from CD28 and CD40. The constructs were cloned into pSF.Lenti (Oxford Genetics) containing an MND promoter, and separated from a truncated CD34 marker gene via a P2A cleavage sequence.

[0626] Lentiviral Production—Lentiviral production was performed using a three-plasmid packaging system (Cell Biolabs, San Diego, USA) by mixing 10 μg of each plasmid, plus 10 μg of the pSF.Lenti lentiviral plasmid containing the transgene, together in serum free RPMI containing 50 mM CaCl₂). The mixture was added dropwise to a 50% confluent monolayer of 293T cells in 75 cm² flasks. The viral supernatants were collected at 48 and 72 h post transfection, pooled and concentrated using LentiPac lentiviral supernatant concentration (GeneCopoeia, Rockville, Md., USA) solution according to the manufacturer's instructions. Lentiviral supernatants were concentrated 10-fold and used to directly infect primary human T-cells in the presence of 4 g/ml polybrene (Sigma-Aldrich, Dorset, UK). Peripheral blood mononuclear cells were isolated from normal healthy donors before activation for 24 hours with T-cell activation and expansion beads (Invitrogen) according to the manufacturer's instructions before addition of lentiviral supernatants.

[0627] Cell transduction was assessed 96 hours post infection using CEA.hFc protein and anti-hFc-PE secondary, plus anti-CD34-APC or by anti-CD34-PE antibodies alone. Cells were then expanded further using ×10 donor mismatched irradiated PBMC feeders at a 1:20-1:200 ratio in RPMI+10% FCS with the addition of 1 μg/ml PHA and 200 IU/ml IL-2. After 14 days the cells were stained as previous and stored ready for assay.

[0628] Functionality assays were performed by mixing CoStAR positive or negative cells with wild-type or OKT3 engineered CEA-Positive LoVo or LS174T cells. Briefly, T-cells were mixed with LoVo cells at varying ratios in 96-well plates and IFNγ or IL-2 measured by ELISA. The remaining cells were incubated with 1:10 dilution of WST-1 reagent (Sigma, UK) for 30 min before absorbance reading at 450 nm. % Cytotoxicity was determined using the following equation=100−((Experimental reading−T-cells alone)/(tumour alone))×100.

[0629] Proliferation assays were performed by first loading T-cells with 10 μM eFluor450 proliferation dye (eBioscience, UK) for 10 min at 37° C. at a concentration of 1×10⁷ cells/ml before incubating the cells in 5 volumes of cold T-cell media for 5 min on ice. Cells were then washed excessively to remove unbound dye and added to cocultures containing tumour cells. Cells were removed at 2, 6 and 10 days, 1:200 dilution of DRAQ7 added and the cells analysed using a MACSQuant cytometer and MACSQuantify software.

[0630] Cell counts for proliferation assays were performed by taking cells from the wells and staining with anti-CD2 PerCP eFluor710 antibody (eBioscience, UK) for 20 min in the dark, followed by DRAQ7 staining and counts made using a MACSQuant analyser.

[0631] Results

[0632] Primary human T-cells were isolated from Buffy coats obtained from the NHSBT. T-cells were isolated by Ficoll-mediated isolation and T-cell negative isolation kits (StemCell Technologies). The isolated T-cells were activated with human T-cell activation and expansion beads (Invitrogen, UK). Cells were incubated with concentrated lentiviral particles and expanded over a number of days. The lentivirus contained the DNA sequence of the MFE.CoStAR.2A.tCD34 construct (MFE23.scFv fused to full length human CD28 co-expressed with truncated human CD34 via a 2A cleavage sequence). Successfully transduced cells were further expanded using irradiated feeders as outlined in materials and methods. Donor 1 transduction was measured at 22.69% (17.15 CD34+/CoStAR+ plus 5.53% CD34−/CoStAR+), donor 2 was measured at 20.73%, and donor 3 at 13.34%. Cells were enriched for CoStAR expression using anti-CD34 antibodies to obtain T-cell populations greater than 90% CoStAR positive.

[0633] To generate a physiologically relevant in vitro model to test the impact of CoStAR on T-cell activity, the non-transduced and transduced cells were tested against the CEA+ tumour cell lines LoVo and LS174T. To enable activation of the T-cells in response to the unmatched tumour lines we engineered the tumour cells to express an anti-CD3 single chain antibody fragment anchored to the cell membrane by way of a synthetic transmembrane domain and split from the GFP marker gene using an IRES element to visualise transduced cells using flow cytometry.

[0634] Single cell clones of LoVo and LS174T were generated from bulk transfectants. Non-transduced and CoStAR transduced T-cells were mixed at varying effector:target ratios with wild-type non-transduced or OKT3-engineered LS174T or LoVo cells. After 24 hours coculture media was taken for IL-2 ELISA measurement. Activation dependent IL-2 secretion was observed from both CoStAR+ and CoStAR− T-cell populations from three donors in response to OKT3 engineered LS174T cells with only background IL-2 secretion seen from transduced and non-transduced T-cells in response to un-engineered tumour cells (FIG. 3 A-C). CoStAR enhanced IL-2 secretion towards OKT3 engineered tumour cells was found in all three donors tested. The effect was most evident at E:T ratios of 8:1 and 16:1 and at higher E:T ratios IL-2 secretion was too low to measure accurately. At lower effector to target ratios it appeared that IL-2 secretion was saturating from non-transduced cells. These observations were repeated in LoVo cells with two of the three donors tested against LS174T with similar results (FIGS. 3D & E).

[0635] To determine the impact of CoStAR on T-cell expansion, transduced or non-transduced T-cells were mixed with wild-type or OKT3-GFP engineered LoVo cells the number of total cells after 3 days was counted. CoStAR enhanced survival and/or proliferation of engineered T-cells in response to LoVo-OKT3 but not wild-type LoVo cells in the presence of IL-2 (FIG. 4A) and absence of IL-2 (FIG. 4B). To further investigate this phenomenon, cell proliferation analysis was performed in T-cells from two donors using proliferation dye to count the number of cell cycles each population went through over 6 days (FIGS. 4C & D). A larger proportion of CoStAR engineered cells went through 5, 6 or 7 proliferation cycles over 6 days compared to non-engineered cells in response to LoVo− OKT3, whereas CoStAR transduced and non-transduced cells went through an average of approximately 2 cycles over the same duration in response to wild-type LoVo.

[0636] A variety of fusion receptors consisting of CD28 fused to an N-terminal additional costimulatory domain were generated. Costimulatory domains obtained from: CD137, CD2, CD29, CD134, CD150, CD40, GITR and the signalling domain from the IL-2 receptor γ-chain (IL2RT) were chosen. A receptor as close to that used in previous studies of inducible costimulation was included. This receptor designated CD28(IEV) is truncated such that the C-terminal motif of CD28 is the amino acid triad ‘IEV’. Sequences were generated de novo by Genewiz and cloned into a lentiviral vector under an EF1α promoter along with a CD34 marker gene separated from the fusion CoStAR by a 2A self-cleaving peptide. Primary CD8+ T-cells were isolated using EasySep beads (StemCell Technologies) and activated with anti-CD3/anti-CD28 activation/expansion Dynabeads before addition of lentiviral particles. Following a short expansion period the cells were mixed with LoVo or LoVo-OKT3 cells, with the inclusion of anti-CD107a antibodies and brefeldin and monensin, and following a 16 hour incubation were fixed and stained with antibodies to the marker gene (CD34) as well as antibodies to IL-2, IFNγ and bcl-xL. Analysis was performed using a MACSQuant analyser and MACSQuantify software. FIG. 5 shows the IL-2 response from CD34− (CoStAR non-transduced) and CD34+ (CoStAR transduced). Statistical analysis demonstrated that all receptors tested induced a significant increase in the proportion of cells producing IL-2 when harbouring the variant CoStAR receptors. Three other read outs were concurrently measured: IFNγ, a cytokine released under normal signal 1 conditions but enhanced by costimulation; CD107a, a marker of degranulation; and bcl-xL, an antiapoptotic protein upregulated by costimulation. Engagement of CoStAR enhanced all the effector functions analysed to varying degrees. CD28.CD2 and CD28.CD40 fusions receptors appeared to elicit the most robust response of all the receptors tested (See FIG. 6)

### Example 2

[0637] The effect of CD28 and CD28.CD40 based CoStARs on population based cytokine secretion was compared. Primary T-cells from three donors were transduced with either the CD28(IEV) truncated CoStAR, full length CD28 CoStAR or CD28.CD40 CoStAR (having the full length CD28 as shown in SEQ ID NO:439, but lacking the N terminal N and K residues) or left non-transduced. T-cells were enriched for CoStAR expression using the CD34 marker gene, and following expansion cells were mixed with LoVo-OKT3 cells and IL-2 secretion analysed by ELISA (See FIG. 7). Non-transduced cells on average produced 0.80 ng/ml IL-2, with CD28(IEV) and full length CD28 CoStAR producing 4.6 and 5.0 ng/ml IL-2 respectively. However CD28.CD40 induced 29.0 ng/ml IL-2 on average across three donors thus demonstrating a clear benefit to incorporating CD40 into the basic CD28-based CoStAR.

[0638] Next the effect of CoStAR on T-cell expansion was analysed. T-cells from seven donors were transduced with either CD28 or CD28.CD40 CoStARs with either an anti-CA125 (196-14) or anti-Folate receptor (MOV-19) scFv, or an anti-Folate receptor peptide (C7) antigen binding domain. Additional cells were transduced with a CD28 CoStAR harboring an anti-CEA scFv as a mismatched control. Cells were then mixed with CA125+/Folate receptor+/CEA− cell line OvCAR3 engineered to express a membrane bound OKT3 (OvCAR-OKT3). T-cell counts were made after 7, 14 and 21 days, and fresh OvCAR− OKT3 added at days 7, and 14. Limited expansion of cells harbouring the anti-CA125 scFv was observed (mean fold expansion: CD28: 15.1; CD28.CD40: 69.1), however cells targeting Folate receptor with an scFv did expand in both the CD28 and CD28.CD40 cohorts (mean fold expansion: CD28: 186.7; CD28.CD40: 1295.0). More limited expansion was seen when the C7 peptide was used to target the Folate receptor (mean fold expansion: CD28: 71.5; CD28.CD40: 28.0). The control CEA targeting receptor demonstrated limited expansion (mean fold expansion: 28.0).

[0639] To better understand the synergy of signal 1 and signal 2 T-cells were engineered with a murine constant domain modified TCR which recognizes a CEA peptide (691-699) in the context of HLA-A*02 as well as the CD28 or CD28.CD40 CoStAR targeted towards cell surface CEA protein. As a control cells were also transduced with a CA125 specific CD28 CoStAR. The T-cells were mixed with HLA-A*02+/CEA+H508 cells and cytokine production analysed by intracellular flow cytometry staining. Flow cytometric gating was performed using antibodies directed towards the murine TCRβ constant domain (marks the TCR engineered cells) as well as the DYKDDDDK (SEQ ID NO:449) epitope tag (marks the CoStAR engineered cells). Thus it was possible to analyse the TCR−/CoStAR−, TCR+/CoStAR−, TCR−/CoStAR+ and TCR+/CoStAR+ cells in each coculture well. Cytokine production was then plotted in each subpopulation in either the CD4+ or CD8+ T-cells (FIG. 9). In CD4+ cells CD28.CD40 CoStAR enhanced CD137 and TNFα production above TCR stimulation alone, however the TCR response in CD4+ cells was poor due to the dependency of the TCR on CD8. In CD8+ cells there was more robust effector activity with IL-2 and CD107a in particular showing a stronger induction in the CD28.CD40 CoStAR groups. To better compare the receptors the effector activity in just the TCR+/CoStAR+ groups was plotted in CD4+ and CD8+ cells (FIG. 10). In CD4+ cells induction of CD137 was significantly enhanced by CD28.CD40 compared to either CEA or mismatched targeting CD28 CoStAR. In CD8+ cells CD137 induction was significantly increased compared to either CEA or mismatched targeting CD28 CoStAR, whereas CD107a induction was increased compared to the control CoStAR. Thus CD28.CD40 shows enhanced effector activity across a broad range of models and effector activities.

### Example 3

[0640] To evaluate costimulation by CD40 bearing CoStARs, primary human T-cells were mock transduced or transduced with MFE23.CD28 or MFE23.CD28.CD40 CoStAR, each harbouring a CD34 marker gene separated by a 2A cleavage peptide. MFE23 is a single chain Fv antibody that has a high affinity for carcinoembryonic antigen (CEA). Following in vitro culture cells were enriched for CD34 using MACS™ paramagnetic selection reagents (Miltenyi Biotech) and then the cells expanded in number using irradiated feeder cells. MFE23.CD28 CoStAR strongly mediated expansion of CD34⁺ T cells, and MFE23.CD28.CD40 CoStAR further enhanced expansion (FIG. 11).

[0641] To evaluate costimulatory activity and persistence, T cells mock transduced or transfected with MFE23.CD28 or MFE23.CD28.CD40 were cocultured with LoVo-OKT3 cells at an 8:1 effector:target ratio in the presence (200 IU/ml) or absence of exogenous IL-2. At days 1, 4, 7, 11 and 18 cells were taken and the number of viable T-cells enumerated by using anti-CD2 reagents on a MACSQuant flow cytometer. In the absence of stimulation by tumor and IL-2, cells declined in number as would be expected (FIG. 12A). In the absence of stimulation but presence of IL-2 there was a more apparent survival of the cells, but no specific growth (FIG. 12B). In the presence of tumor, but absence of IL-2 mock cells did not show specific survival. MFE23.CD28 CoStAR mediated an apparent doubling in expansion over the first four days followed by decline. MFE23.CD28.CD40 mediated a greater expansion up to day 7 followed by a steady decline (FIG. 12C). Under the same conditions but in the presence of IL-2 both mock and MFE23.CD28 transduced cells demonstrated a 20-fold expansion over 18 days, whereas MFE23.CD28.CD40 cells expanded by over 60-fold (FIG. 12D). Thus CD28.CD40 based receptors demonstrated superior expansion and survival under conditions of stimulation both in the presence and absence of exogenous IL-2.

[0642] Mock transduced and T cells transduced with MFE23.CD28 or MFE23.CD28.CD40 CoStARs were then tested for cytokine production. Bead array analysis was performed on supernatants obtained from T-cell/tumour cocultures. Engineered T-cells were incubated at a 1:1 effector:target ratio with LoVo-OKT3 cells for 24 hours and supernatant collected. Conditioned supernatant was also collected from an equal number of T-cells alone, or LoVo-OKT3 cells alone. Production of IL-2, IFN-γ, TNFα, IL-4, IL-5, IL-13, IL-17A, IL-17F, IL-22, IL-6, IL-10, IL-9, and IL-21 was analysed using a Legendplex™ Human TH1/TH2 cytokine panel (Biolegend) (FIG. 13A-13M). Cytokines were either very low or undetectable in media from T-cells or tumour alone. However when cocultured with tumour cytokine production was enhanced. MFE23.CD28 enhanced production of IL-2, IL-5, IL-17A/17F, IL-10, IL-9 and IL-21 compared to mock. However, MFE23.CD28.CD40 also enhanced production of TNFα, IL-13 and IL-22. MFE23.CD28.CD40 also enhanced the production of a number of cytokines greater than that elicited by MFE23.CD28 (IL-2, IL-9 and IL-17F), but also reduced the production of some cytokines below the levels seen with MFE23.CD28 (IL-5 and IL-10). Together this data demonstrates that addition of CD40 to CD28-based Costimulatory receptors enhances and/or modulates their specific activity with respect to chemokine production.

[0643] Mock transduced and T cells transduced with MFE23.CD28 or MFE23.CD28.CD40 CoStARs were further tested for chemokine production. Production of IL-8 (CXCL8), IP-10 (CSCL10), Eotaxin (CCL11), TARC (CCL17), MCP-1 (CCL2), RANTES (CCL5), MIP-1a (CCL3), MIG (CXCL9), ENA-78 (CXCL5), MIP-3a (CCL20), GROα (CXCL1), I-TAC (CXCL11), and MEP-10 (CCL4) was analysed using a Legendplex™ Human Pro inflammatory chemokine panel. (FIG. 14A-14M). Chemokines were either very low or undetectable in media from T-cells alone. However when cocultured with tumor, chemokine production was enhanced. MFE23.CD28 enhanced production of CXCL5, CXCL10, CXCL11, CCL17 and CCL20 compared to mock. However, MFE23.CD28.CD40 also enhanced production of CCL2, CXCL1 and CXCL9. MFE23.CD28.CD40 also further enhanced the production of certain cytokines to a greater amount than that elicited by MFE23.CD28 (CXCL1, CXCL9, CXCL10, CXCL11, CCL17, CCL2, CXCL9, CCL5 and CCL20), while reducing the production of some cytokines below the levels seen with MFE23.CD28 (CCL4). Together this data demonstrates that addition of CD40 to CD28-based Costimulatory receptors enhances and/or modulates their specific activity with respect to chemokine production.

[0644] CoStARs were tested for functional activity against cancer targets. Cells were transduced with CD28 or CD28.CD40 CoStARs engineered with an scFv binding domain specific for FolR or CA125 (scFv MOV19 and scFv 196-14 respectively). Human folate receptor alpha (FolR) represents a suitable target for a number of tumours including ovarian, head and neck, renal and lung and CA125 represents an alternative target for ovarian cancer. Primary human T-cells from six healthy donors were engineered with either 196-14.CD28, 196-14.CD28.CD40, MOV19.CD28 or MOV19.CD28.CD40 receptors, all harbouring a DYKDDDDK epitope tag for detection. Transduced cells were mixed with FolR+/CA125+ OvCAR-OKT3 cells before analysis of effector activity using intracellular staining in the epitope tag positive and negative populations. Specific enhancement of effector activity determined by production of IL-2 (FIGS. 15A and 15B), TNFα (FIGS. 15C and 15D), CD137 (FIGS. 15E and 15F), and BCL-xL (FIGS. 15G and 15H) was observed in CD28 and CD28.CD40 engineered cells compared to mock transduce cells in response to both CA125 and FolR, although specific BCL-xL induction by MOV19.CD28 was not substantial as compared to MOV19.CD28.CD40.

[0645] Mock transduced TILs or TILs engineered with MOV19.CD28.CD40 CoStAR were evaluated for expansion and CD137 production stimulated by patient matched tumour digest (FIG. 16). Three donor tumours were tested which displayed varying levels of FolR on the digest, ranging from negative (6A), low expression (6B) to high expression (6C). Mock and CoStAR negative TIL in the CoStAR engineered populations of TIL matched for the FolR negative digest demonstrated similar levels of CD137 upregulation following tumour coculture which was not enhanced by the presence of CoStAR (FIG. 16D). In the TIL exposed to FolR low expressing digest there was an enhancement in activity in the CoStAR+ cells compared to CoStAR−, with CD137 expression increasing from <10% to >20% (FIG. 16E). In the TIL exposed to FolR high expressing tumour digest there was an increase in activity from around 20% in the CoStAR− population, up to approximately 50% in the CoStAR+ population (FIG. 16F).

[0646] A FolR targeting CoStAR was examined for enhancement of effector functions. MOV19.CD28.CD40 enhanced CD137 expression from ˜20% to ˜50% (FIG. 17A), TNFα production from 10% to 15% (FIG. 17B) and IL-2 production from 2% to 5% (FIG. 17C) in response to FolR+ tumour digest.

[0647] CoStAR mediated stimulation by soluble ligand was also examined. T-cells from three healthy donors were engineered with MOV19.CD28 or MOV19.CD28.CD40 CoStAR and activated with either immobilised OKT3, providing stimulation in the absence of FolR, or with OvCAR-OKT3, to provide TCR and CoStAR activity. Bcl-XL activity was increased from between 10 and 20% across the three donors following OKT3 stimulation (FIG. 18A) whereas IL-2 was increased between 0 and 12% (FIG. 18B) and TNFα increased between 0 and 20% (FIG. 18C). The presence of exogenous soluble FolR did not enhance any of these particular effector functions. In the presence of OvCAR-OKT3 Bcl-XL induction was enhanced by ˜20% in CD28 CoStAR and by ˜35% in CD28.CD40 CoStAR (FIG. 18D), IL-2 induction was enhanced by ˜20% in CD28 CoStAR and 30-50% in CD28.CD40 CoStAR (FIG. 18E) and TNFα production was enhanced by 20-30% in CD28 CoStAR and 25-50% in CD28.CD40 CoStAR (FIG. 18F). Exogenous soluble FolR did not have an inhibitory effect on any of these effector functions.

### Example 4

[0648] Materials and Methods

[0649] Construct design—The MFE23, MOV19 and 196-14 CoStAR constructs include an MFE23 (CEA specific), MOV19 (Folate receptor a specific) or 196-14 (CA125 specific) derived single chain antibody fragment nucleotide sequence with an oncostatin M1 leader sequence fused to a costimulatory domain. The costimulatory domains contain an extracellular spacer region and transmembrane domain derived from human CD8 or CD28 and a signalling domain of either CD28, CD2 or CD137 and/or wild-type or mutant CD40 variants. Some CoStARs detailed herein comprise a human PD1 extracellular domain fused to CD28 and CD40. Receptors were cloned with a P2A cleavage sequence and a truncated form of human CD34 to permit detection of transduced cells. The CoStAR nucleotide sequence was codon optimised and gene synthesised by Genewiz Inc. The constructs were cloned into a third generation lentiviral vector.

[0650] Peripheral blood mononuclear cells were isolated from normal healthy donors before activation for 24 hours with T-cell activation and expansion beads (Invitrogen) according to the manufacturer's instructions before addition of lentiviral supernatants.

[0651] Cell transduction was assessed 96 hours post infection using CEA.hFc protein (R&D Systems) and anti-hFc-PE secondary, plus anti-CD34-APC or by anti-CD34-PE antibodies alone. Cells were then expanded further using ×10 donor mismatched irradiated PBMC feeders at a 1:20-1:200 ratio in RPMI+10% FCS with the addition of 30 ng/ml OKT3 and 200 IU/ml IL-2. After 14 days the cells were stained as previous and stored ready for assay.

[0652] Functionality assays were performed by mixing CoStAR positive or negative cells with wild-type or OKT3 engineered CEA-Positive LoVo cells. Briefly, T-cells were mixed with LoVo cells at varying ratios in 96-well plates. For flow analysis cocultures were incubated with Brefeldin and monensin and anti-CD107a antibodies for 16 hours following which cells were stained with Fixable Viability Dye ef450 (eBiosciences), fixed with 4% paraformaldehyde and then permeabilised using Fix/Perm wash buffer (BD Biosciences). Cells were then stained with anti-CD34 or anti DYKDDDDK antibodies to differentiate between the CoStAR+ and CoStAR-populations, anti-IL-2, anti-TNFα and anti-IFNγ antibodies (Biolegend). For soluble analyte analysis supernatants were collected for analysis by ELISA, cytokine bead array (LEGENDPLEX™ Human Th Cytokine Panel (12-plex)) or chemokine bead array (LEGENDPLEX™ Human Proinflammatory Chemokine Panel (13-plex).

[0653] Proliferation assays were performed by mixing T-cells and tumour cells at an 8:1 effector:target ratio in complete T-cell media (TCM: RPMI supplemented with 10% FCS, 0.01 M HEPES and 1% Penicillin/streptomycin, 50 mM β-mercaptoethanol) in the presence or absence of IL-2. Cell counts were made at indicated time points and fresh tumour cells were added in restimulation assays at a final E:T of 8:1. Cell counts for proliferation assays were performed by taking cells from the wells and staining with anti-CD2 PerCP eFluor710 antibody (eBioscience, UK) for 20 min in the dark, followed by DRAQ7 staining and counts made using a MACSQuant analyser.

### Example 5

[0654] To determine which receptor signaling motifs contribute to CD40 enhancement of CoStAR activity, variant receptors were generated harbouring mutations in the TRAF6 binding motif (MFE23.CD28.CD40 (PQEINF mutated to AQAINF)), the TRAF2 binding motif (MFE23.CD28.CD40 (SVQE mutated to AVQA)) or the TRAF1/2/3/5 binding motif (MFE23.CD28.CD40 (PVQET mutated to AVAEA)). Primary human T-cells isolated from three separate healthy donors were transduced with the indicated CoStARs and cells enriched for CoStAR expression via CD34. Cocultures were set up with LoVo-OKT3 cells and supernatants collected for cytokine analysis.

[0655] IL2 production by non-transduced cells was very low, but elevated in cells expressing the wild-type MFE23.CD28.CD40 CoStAR. IL2 production was not largely affected by mutations to the SVQE, PQEINF or Q263A mutation. However, mutation to the PVQET motif had a dramatic effect on IL2 production by T-cells.

[0656] Concurrently proliferation of engineered T-cells was assessed in response to LoVo-OKT3 cells over 2 rounds of stimulation with LoVo-OKT3 cells. Non-transduced cells did not survive even one round of stimulation, whereas cells expressing the wild-type receptor underwent a 10-fold expansion over 2 rounds of stimulation over 14-days. Cells harboring either a SVQE-AVQA mutation, or PQEINF-AQAINF mutation displayed a reduced capacity to undergo proliferation, this was further exacerbated in cells harboring a Q263A mutation. However, cells harboring a PVQET-AVAEA mutation in the TRAF2/3 binding region displayed a profound inability to proliferate over 2 rounds of stimulation.

### Example 6

[0657] Design of CoStARs that bind to CEA—The CoStAR consists of a CEA specific MFE23, humanised (hu) MFE23, CEA6, BW431/26 or huT84.66 derived single chain antibody fragment nucleotide sequence with an oncostatin M1, CD8α, CD2, IL-2, GM-CSF or hIgGκ VIII leader sequence. Each CoStAR has an extracellular spacer domain derived from CD8 or CD28 or truncated CD28 and a signalling domain derived from CD28 and CD40. The constructs are cloned into pSF.Lenti (Oxford Genetics) containing an MND promoter, and separated from a truncated CD34 marker gene via a P2A cleavage sequence.

[0658] Lentiviral Production—Lentiviral production is performed using a three-plasmid packaging system (Cell Biolabs, San Diego, USA) by mixing 10 μg of each plasmid, plus 10 μg of the pSF.Lenti lentiviral plasmid containing the transgene, together in serum free RPMI containing 50 mM CaCl₂). The mixture is added dropwise to a 50% confluent monolayer of 293T cells in 75 cm2 flasks. The viral supernatants are collected at 48 and 72 h post transfection, pooled and concentrated using Lenti-X lentiviral supernatant concentration (Takara Bio Inc. Japan) solution according to the manufacturer's instructions. Lentiviral supernatants are concentrated 10-fold and used to directly infect primary human T-cells at an MOI of 3-5 in the presence of 4 μg/ml polybrene (Sigma-Aldrich, Dorset, UK). Peripheral blood mononuclear cells are isolated from normal healthy donors before activation for 24 hours with T-cell activation and expansion beads (Invitrogen) according to the manufacturer's instructions before addition of lentiviral supernatants.

[0659] Cell transduction is assessed 96 hours post infection using CEA.hFc protein and anti-hFc-PE secondary, plus anti-CD34-APC or by anti-CD34-PE antibodies alone. Cells are then expanded further using ×10 donor mismatched irradiated PBMC feeders at a 1:200 ratio in T-cell media (RPMI 1640, 10% FBS, 10 mM HEPES, 50 μM β-mercaptoethanol and 50 u/ml Penicillin/streptomycin), 200 IU/ml IL-2 and a final concentration of 30 ng/ml anti-CD3 (OKT3). After 12-14 days the cells are stained as previous and stored ready for assay.

[0660] Functionality assays are performed by mixing CoStAR positive or negative cells with wild-type or OKT3 engineered CEA positive cell lines (LoVo, HT29, SW480, H508). Briefly, T-cells are mixed with target cells at varying ratios in 96-well plates and cytokine release measured by ELISA and MSD analysis.

[0661] Cytotoxicity assays are performed using the xCELLigence RTCA SP real time cell analyser system (Acea). A program was generated to test well conductivity (cell index) of a 96-well PET E-plate every 15 min for the duration of the experiment (up to 250 hr). 50 μL T cell medium was added to the wells which were to have cell index tested and incubated at room temperature (RT) for 30 minutes. The E-plate was added to the RTCA SP device and background conductivity readings measured.

[0662] The optimal density of target cells to seed is defined as that which reaches a stable cell index between 24- and 36-hours after the beginning of the assay and does not decrease without intervention (i.e. addition of Triton-x-100 or effector cell populations) before the end of the assay. Target cells at optimal density for killing assays (cell line dependent) are counted using a quantitative method capable of dead-cell discrimination. The E-plate is removed from the device and the optimal density of live cells is added to the wells containing T cell medium at a final volume of 100 μL before incubation for 30 minutes at RT.

[0663] The E-plate us then placed back on the analyser and cell index values acquired until a stable cell index is observed, at which point the program is paused and the E-plate removed from the RTCA SP device. Treatments are added to the appropriate wells. Treatments consist of either 100 μL T cell medium (no treatment control), or the same volume containing effector cells or 0.5% Triton-x-100 (full lysis control). Effector cell counting uses a quantitative method capable of dead- and apoptotic-cell discrimination. The number of effectors to target cells varied depending on the experiment.

[0664] During data analysis, the cell index is normalized using the following equation in the RTCA software package:

NormalisedCIti=CIti/CInml_time

[0665] Where CIti=Cell index (CI) at a specific time point, and CInml_time=CI at the time point prior to addition of T cells.

[0666] Data is then further manipulated relative to the full lysis control to give % cytolysis:

% Cytolysisst=[1−(NCIst)/(AvgNCIRt)]×100

[0667] where, NCIst is the Normalised Cell Index for the sample and NCIRt is the average of Normalise Cell Index for the matching reference wells.

[0668] Repeat stimulation assays are performed by mixing 5×10⁴ CoStAR transduced or mock-transduced cells at an 8:1 E:T ration with LoVo-OKT3 cells in the absence of exogenous IL-2, in triplicate well of a 96-well U-bottom plate. T-cell counts are made on D1, 4 and 7 via flow cytometric assessment of numbers based on αCD2 gating, and fresh tumour cells added at seven day intervals. Relative expansion is assessed by splitting of wells and enumeration of fold change based upon the original seeding density with the proportion of cells removed for counting also factored in.

[0669] Results

[0670] A model system is developed to evaluate the impact of various structural components of CEA directed CoStAR receptors. To this end the signal peptide (SP), single chain antibody fragment (scFv) and extracellular spacer (ES) are assessed for their impact on expression and function.

[0671] The impact of the signal peptide on expression of the CoStAR is tested, as it is known that different signal peptides can affect expression of various recombinant proteins (REF). The MFE23.CD28.CD40 CoStAR receptors are generated with various different leader sequences (which encode the desired signal peptide) sequences. These include signal peptides derived from: Oncostatin M1 (OSM), IL2, CD2, CD8α, GMCSF and hIgGκ VIII. Each leader sequence is cloned in frame with the MFE23 scFv sequence to generate SP.MFE23.CD28.CD40.P2A.tCD34. A Jurkat cell line model is selected to investigate the relative expression of each SP modified CoStAR relative to the tCD34 marker gene. To this end Jurkat JRT3-T3.5 T-cells are incubated with lentiviral particles at an MOI of 5. Seven days post transduction the cells are stained with anti-CD34 antibodies to stain for the transduced cells, and CEA.hFc protein followed by anti-hFc secondary antibodies to identify for the CEA CoStAR. All SP modified CoStAR variants tested are found to be expressed in the CD34+ proportion of the JRT3-T3.5 cells.

[0672] Next, the impact of different CEA specific scFv in the context of CoStAR is assessed, as well as investigating different spacer domains. Six different scFvs are compared; as well as the MFE23 sequence described above (Chester et al. 1994), including an MFE23 K>Q mutant, humanised (Hu) MFE23 (Begent et al. 2003), CEA6 (Jackson et al. 1998), BW431/26 (Seenmann et al. 1991) and HuT84.66 (Yazaki et al. 2005).

[0673] Primary human T-cells are isolated from Buffy coats obtained from the NHSBT. T-cells are isolated by Ficoll-mediated isolation and T-cell negative isolation kits (StemCell Technologies). The isolated T-cells are activated with human T-cell activation and expansion beads (Invitrogen, UK). Cells are incubated with concentrated lentiviral particles, encoding CEA CoStARs containing the OSM SP, and expanded over a number of days. Cells are enriched for CoStAR expression using anti-CD34 antibodies to obtain T-cell populations greater than 90% CoStAR positive before being placed in a rapid expansion protocol (REP), with irradiated buffy coat derived PBMCs as outlined in the materials and methods.

[0674] A physiologically relevant in vitro model is employed to test the impact of CoStAR on T-cell activity. Transduced and non-transduced cells are tested against the CEA+ cell lines LoVo, H508, SW480 or HT29. The murine CEA− cell line Ba/F3 is engineered to express CEA as a control. To enable activation of the T-cells in response to the unmatched tumour lines the tumour cells are engineered to express an anti-CD3 single chain antibody fragment anchored to the cell membrane by way of a synthetic transmembrane domain and split from a GFP marker gene using an IRES element to visualise transduced cells using flow cytometry. Cell lines are also engineered to express firefly-luciferase (ffLuc) under puromycin selection to permit analysis of target cell lysis.

[0675] Non-transduced and CoStAR transduced T-cells are mixed at varying effector:target ratios with wild-type or OKT3-engineered tumour cell lines. After 24 hours coculture media is taken for IL-2 ELISA measurement. Activation dependent IL-2 secretion is observed from both CoStAR+ and CoStAR− T-cell populations from all donors in response to OKT3 engineered cells with only background IL-2 secretion seen from transduced and non-transduced T-cells in response to un-engineered tumour cells. In all donors tested, the presence of CEA CoStAR enhances effector activity (IL2, IL3, CXCL10) towards OKT3 engineered CEA+ tumour lines.

[0676] Cocultures with Ba/F3 cells demonstrate the targeted approach of the CEA CoStARs. Coculture of CEA CoStAR engineered cells with Ba/F3 or Ba/F3-CEA does not result in specific IL2 release whereas incubation with Ba/F3-OKT3 enhances IL-2 secretion. However, incubation of T-cells with Ba/F3-OKT3/CEA significantly enhances IL2 secretion compared to Ba/F3-OKT3 alone.

[0677] The impact of CoStAR on tumour cell killing is determined. Transduced or non-transduced T-cells are mixed with wild-type or OKT3-GFP engineered tumour cells and quantified residual tumour cell derived luciferase activity at defined time points. The presence of CoStAR enhances the ability of T-cells to mediate target cell lysis. This enhanced ability of CoStAR+ cells to mediate anti-tumour activity is also evident using the xCELLigence device as outlined in materials and methods.

[0678] Repeat stimulation assays are performed according to materials and methods. In brief mock or CoStAR engineered cells are mixed at an 8:1 E:T ratio with OKT3 engineered target lines and the relative expansion of T-cells enumerated at the indicated time points, with fresh tumour added at seven day intervals. All CoStARs tested mediate prolonged survival and expansion of T-cells across multiple rounds of stimulation, whereas mock transduced cells decline in number following repeat stimulations.

[0679] To evaluate CoStAR activity in TIL specimens, TIL are engineered with CEA specific CoStAR constructs. To this end tumours are digested and analysed for CEA expression using flow cytometry. Tumour digests testing positive are engineered with CEA CoStARs. Following outgrowth and rapid expansion protocol, engineered and matched non-engineered TIL are mixed with either tumour digest, or where available, matched autologous tumour lines. In all donors tested the presence of the CEA CoStAR enhances specific effector activity as measured by IFNγ and IL-2 compared to cells which are mock transduced.

### Example 7

[0680] Anti-MSLN CoStAR Expression

[0681] Anti-MSLN CoStARs comprising different scFv antigen-binding domains (Table 8) were compared for surface expression on T cells from healthy donors.

TABLE 8

| Clone | CTP224 | CTP225 | CTP226 | CTP227 | CTP228 | CTP229 |
|---|---|---|---|---|---|---|
| SEQ ID NO: | 192 | 210 | 228 | 246 | 264 | 282 |
| Signal peptide | OSM1 | | | | | |
| scFv | SS1 | M5 | HN1 | M912 | huYP218 | P4 |

| | |
|---|---|
| Linker | AAAGSGGSG |
| Spacer | CD28 EC |
| TM | CD28 |
| Intracellular | CD28 · CD40 |

[0682] T cells from healthy donor (HD) PBMCs were lentivirus transduced, at a multiplicity of infection (MOI) 5, with six variable scFV constructs against mesothelin (MSNL) that possessed CD28.CD40 signaling domains. Non-transduced (MOCK) cells were used as controls. Cells were sorted using CD34 microbeads and underwent a rapid expansion protocol (REP) for 14 days. Following expansion, 1×10⁵ cells were assessed for transduction efficiency either via surface detection of the marker gene tCD34 or CoStAR molecule using an anti-CD34-APC (black) or anti-MSLN-PE (red) antibody, respectively. (FIG. 19). The results represent 3 biological replicates.

### Example 8

[0683] Anti-MSLN CoStAR Activity

[0684] Cytokine production was assessed in CoStAR transduced HD T cells cocultured with target cell lines. A variety of CoStARs comprising different anti-MSLN binding domains, spacers, or transmembrane domains (Table 8, Table 9, Table 10) were tested.

TABLE 9

| Clone | CTP248 | CTP249 | CTP250 | CTP251 | CTP252 | CTP253 |
|---|---|---|---|---|---|---|
| SEQ ID NO: | 300 | 306 | 312 | 318 | 324 | 330 |
| Signal peptide | OSM1 | | | | | |
| scFv | SS1 | M5 | HN1 | M912 | huYP218 | P4 |

| | |
|---|---|
| Linker | AAAGSGGSG |
| Spacer | Truncated CD28 EC |
| TM | CD28 |
| Intracellular | CD28 · CD40 |

TABLE 10

| Clone | CTP236 | CTP237 | CTP238 | CTP239 | CTP240 | CTP241 |
|---|---|---|---|---|---|---|
| SEQ ID NO: | 198 | 216 | 234 | 252 | 270 | 288 |
| Signal peptide | OSM1 | | | | | |
| scFv | SS1 | M5 | HN1 | M912 | huYP218 | P4 |

| | |
|---|---|
| Linker | AAAGSGGSG |
| Spacer | CD8 EC |
| TM | CD8 |
| Intracellular | CD28 · CD40 |

[0685] Nontransduced (MOCK) and anti-MSNL CoStAR transduced HD T cells were cocultured with engineered OVCAR3 target cell lines at an effector to target (E:T) ratio of 8:1 (1×10⁵: 1.25×10⁴) for 24 hours and MSD immunoassay was performed to evaluate the concentration of cytokines secreted. Cytokine concentrations were determined for IL-2 (FIG. 20A) IFNγ (FIG. 20B) and TNFα (FIG. 20C) following cocultures with OVCAR-3 or OVCAR3-OKT3 cell lines. Non-treated T cells were used as a control. The results represent 1-3 biological replicates with 3 technical replicates each.

[0686] Nontransduced (MOCK) and anti-MSNL CoStAR transduced HD T cells were cocultured with engineered K562 target cell lines at an effector to target (E:T) ratio of 8:1 (1×10⁵: 1.25×10⁴) for 24 hours and MSD immunoassay was performed to evaluate the concentration of cytokines secreted. Cytokine concentrations were determined for IL-2 (FIG. 21A) IFNγ (FIG. 21B) and TNFα (FIG. 21C) following cocultures with K562-MSNL or K562-MSNL-OKT3 cell lines. Non-treated T cells were used as a control. The results represent 1-3 biological replicates with 3 technical replicates each.

[0687] Anti-CEA CoStAR Expression

[0688] Anti-CEA CoStAR expression was evaluated for anti-CEA CoStARs comprising differing signal peptides (Table 11) or scFv antigen binding domains (Table 12).

TABLE 11

| Clone | CTP194 | CTP255 | CTP256 | CTP257 | CTP258 | CTP259 |
|---|---|---|---|---|---|---|
| SEQ ID NO: | 42 | 43 | 44 | 45 | 46 | 47 |
| Signal peptide | OSM1 | CD8 | CD2 | IL2 | GMCSF | hIgGK |

| | |
|---|---|
| scFv | MFE23 |
| Linker | AAAGSGGSG |
| Spacer | CD28 EC |
| TM | CD28 |
| Intracellular | CD28 · CD40 |

TABLE 12

| Clone | CTP194 | CTP219 | CTP220 | CTP221 | CTP222 | CTP223 |
|---|---|---|---|---|---|---|
| SEQ ID | 42 | 60 | 78 | 96 | 114 | 132 |
| NO: | | | | | | |
| Signal | OSM1 | | | | | |
| peptide | | | | | | |
| scFv | MFE23 | MFE23 | hMFE23 | CEA6 | BW431/26 | hT84.66 |
| | | (Q > K) | | | | |

| | |
|---|---|
| Linker | AAAGSGGSG |
| Spacer | CD28 EC |
| TM | CD28 |
| Intracellular | CD28 · CD40 |

[0689] To examine signal peptide variants, T cells from healthy donor PBMCs were lentivirus transduced at a multiplicity of infection (MOI) 5, with the MFE23 scFV constructs against the carcinoembryonic antigen 5 (CEA) that possessed CD28.CD40 domains. The constructs had variations in the signal peptide and non-transduced (MOCK) cells were used as controls. Cells were sorted using CD34 microbeads and underwent a rapid expansion protocol (REP) for 14 days. Following expansion, 1×10⁵ cells were assessed for transduction efficiency (FIG. 22) either via surface detection of the marker gene tCD34 or CoStAR molecule using an anti-CD34-APC (black bars) or using a primary rhCEACAM5-Fc antibody with a secondary anti-IgG-Fc-PE (grey bars) antibody, respectively.

[0690] T cells from healthy donor PBMCs were also lentivirus transduced, at a multiplicity of infection (MOI) 5, with variable scFV constructs against the carcinoembryonic antigen 5 (CEA) that possessed CD28.CD40 domains. As above, non-transduced (MOCK) cells were used as controls. Cells were sorted using CD34 microbeads and underwent a rapid expansion protocol (REP) for 14 days. Following expansion, 1×10⁵ cells were assessed for transduction efficiency (FIG. 23) either via surface detection of the marker gene tCD34 or CoStAR molecule using an anti-CD34-APC (black bars) or using a primary rhCEACAM5-Fc antibody with a secondary anti-IgG-Fc-PE (grey bars) antibody, respectively.

### Example 9

[0691] Anti-CEA CoStAR Activity

[0692] Cytokine production was assessed in CoStAR transduced HD T cells cocultured with Lovo target cell lines. CoStARs comprising different anti-CEA binding domains (Table 12) were tested. Nontransduced (MOCK) and anti-CEA CoStAR transduced HD T cells were cocultured with engineered target cell lines at an effector to target (E:T) ratio of 8:1 (1×10⁵: 1.25×10⁴) for 24 hours and MSD immunoassay was performed to evaluate the concentration of cytokines secreted. Cytokine concentrations were determined for IL-2 (FIG. 24A) IFNγ (FIG. 24B) and TNFα (FIG. 24C) following cocultures with Lovo or Lovo-OKT3 cell lines. Non-treated T cells were used as a control. The results represent 1 biological replicate with 3 technical replicates.

[0693] Cytokine production was also assessed in CoStAR transduced HD T cells cocultured with K562 target cell lines. As above, cells were cocultured with engineered target cell lines at an effector to target (E:T) ratio of 8:1 (1×10⁵: 1.25×10⁴) for 24 hours and MSD immunoassay was performed to evaluate the concentration of cytokines secreted and cytokine concentrations were determined for IL-2 (FIG. 25A) IFNγ (FIG. 25B) and TNFα (FIG. 25C) following cocultures with K562.CEACAM5 or K562.CEACAM5.OKT3 cell lines. Non-treated T cells were used as a control.

[0694] Spacer-transmembrane variants were also examined. In one experiment, anti-CEA CoStARs comprising an hMFE23 CEA-binding domain and different spacer/transmembrane domains (Table 13) were compared.

TABLE 13

| Clone | CTP220 | CTP232 | CTP244 |
|---|---|---|---|
| SEQ ID NO: | 78 | 84 | 162 |
| Signal Peptide | OSM1 | | |
| scFv | hMFE23 | | |
| linker | AAAGSGGSG | | |
| Spacer | CD28 EC | CD8 EC | CD28 (trunc IIH) |
| TM | CD28 | CD8 | CD28 |

| | |
|---|---|
| Intracellular | CD28.CD40 |

[0695] T cells from healthy donor PBMCs were lentivirus transduced at a multiplicity of infection (MOI) 5, with the hMF23 scFV constructs against the carcinoembryonic antigen 5 (CEA) that possessed CD28.CD40 domains. Cells were sorted using CD34 microbeads and underwent a rapid expansion protocol (REP) for 14 days. Following expansion, 1×10⁵ cells were assessed for transduction efficiency (FIG. 26) via surface detection of the marker gene tCD34 using an anti-CD34-APC (black bars) or detection of the CoStAR molecule or using a primary rhCEACAM5-Fc antibody with a secondary anti-IgG-Fc-PE (grey bars) antibody. All variants were efficiently expressed.

[0696] Cytokine production was assessed in CoStAR transduced HD T cells cocultured with Lovo target cell lines. As above, cells were cocultured with engineered target cell lines at an effector to target (E:T) ratio of 8:1 (1×10⁵: 1.25×10⁴) for 24 hours and MSD immunoassay was performed to evaluate the concentration of cytokines secreted and cytokine concentrations were determined for IL-2 (FIG. 27A) IFNγ (FIG. 27B) and TNFα (FIG. 27C) following cocultures with Lovo or Lovo-OKT3 cell lines. Non-treated T cells were used as a control.

### Example 10

[0697] CoStARs were constructed to test intracellular signaling domains. FIG. 28 and Table 14 depict anti-CEA CoStARs comprising an hMFE23 CEA-binding domain with intracellular signaling domains comprising CD40, CD134, CD137, CD2, ICOS, DAP10, and NTRK1 signaling elements.

TABLE 14

| Clone | CTP313 | CTP314 | CTP315 | CTP316 | CTP317 |
|---|---|---|---|---|---|
| SEQ ID NO: | 344 | 345 | 346 | 347 | 348 |

| Signal peptide | OSM1 | |
|---|---|---|
| scFv | hMFE23 | |
| Linker | AAAGSGGSG | |
| Spacer | CD28 EC | ICOS |
| TM | CD28 | ICOS |

| | | | | | |
|---|---|---|---|---|---|
| Intracellular | NTRK1 | NTRK1 | CD28 | CD28 | ICOS |
| | | CD40 | NTRK1 | NTRK1 | CD40 |
| | | | | CD40 | |

| Clone | CTP318 | CTP319 | CTP320 | CTP321 | CTP322 | CTP323 |
|---|---|---|---|---|---|---|
| SEQ ID NO: | 349 | 350 | 351 | 352 | 353 | 354 |
| Signal peptide | OSM1 | | | | | |
| scFv | hMFE23 | | | | | |
| Linker | AAAGSGGSG | | | | | |
| Spacer | CD28 EC | | CD2 EC | CD28 EC | | |
| TM | CD28 | | CD2 | CD28 | | |
| Intracellular | CD28 | CD28 | CD2 | CD28 | CD28 | CD28 |
| | ICOS | ICOS | CD40 | CD2 | CD40 | CD137 |
| | | CD40 | | | CD2 | |

| Clone | CTP324 | CTP325 | CTP326 | CTP327 | CTP328 |
|---|---|---|---|---|---|
| SEQ ID NO: | 355 | 356 | 357 | 358 | 359 |
| Signal peptide | OSM1 | | | | |
| scFv | hMFE23 | | | | |
| Linker | AAAGSGGSG | | | | |
| Spacer | CD28 EC | | | | |
| TM | CD28 | | | | |
| Intracellular | CD28 | CD28 | CD28 | CD28 | CD28 |
| | CD40 | DAP10 | CD40 | CD134 | CD40 |
| | CD137 | | DAP10 | | CD134 |

[0698] T cells from healthy donor PBMCs were lentivirus transduced at a multiplicity of infection (MOI) 5 with the hMF23 scFV constructs against the carcinoembryonic antigen 5 (CEA). Nontransduced (MOCK) cells were used as controls. Cells were sorted using CD34 microbeads and underwent a rapid expansion protocol (REP) for 14 days. Following expansion, 1×10⁵ cells were assessed for transduction efficiency (FIG. 29) either via surface detection of the marker gene tCD34 or CoStAR molecule using an anti-CD34-APC (black) or using a primary rhCEACAM5-Fc antibody with a secondary anti-IgG-Fc-PE (red) antibody, respectively. The results represent 3 biological replicates.

[0699] CoStAR transduced cells were phenotypically characterized. Following outgrowth and REP, 1×10⁵ cells were assessed for the differentiation subtype using flow cytometry.

TABLE 15
T Cell Differentiation Subtype Definition

| | | | |
|---|---|---|---|
| TN | CD45RO− | CCR7+ | CD95− |
| Tscm | CD45RO− | CCR7+ | CD95+ |
| Tcm | CD45RO+ | CCR7+ | CD95+ |
| Tem | CD45RO+ | CCR7− | CD95+ |
| Tte | CD45RO− | CCR7− | CD95+ |

Tcm, central memory T cell;
Tem, effector memory T cell;
Tn, naïve T cell;
Tscm; stem cell memory T cell;
Tte, terminal effector T cell

[0700] T cells from HD PBMCs of three donors were lentivirus transduced with the hMF23 scFV constructs of FIG. 28. Cells were sorted using CD34 microbeads and underwent a rapid expansion protocol (REP) for 14 days. Following outgrowth and REP, 1×10⁵ cells were assessed for the differentiation subtype compared to non-transduced cells using flow cytometry. T cell phenotypes are depicted in FIG. 30 as a proportion of CD3 cells.

### Example 11

[0701] Cytokine secretion anti-CEA hFME23 CoStAR transduced T cells was assessed by coculture with K562 target cells. Nontransduced (MOCK) and anti-CEA CoStAR transduced HD T cells were cocultured with engineered target cell lines at an effector to target (E:T) ratio of 8:1 (1×10⁵: 1.25×10⁴) for 24 hours and MSD immunoassay was performed to evaluate the concentration of cytokines secreted. Cytokine concentrations for IL-2 (FIG. 31A) IFNγ (FIG. 31B) and TNFα (FIG. 31C), following cocultures with K562.CEACAM5 (signal 2) or K562.CEACAM5.OKT3 (signal 1+2) cell lines are shown. Non-treated T cells were used as a control.

[0702] Cytokine expression was also assessed. Nontransduced (MOCK) and anti-CEA CoStAR transduced HD T cells were cocultured with engineered target cell lines at an effector to target (E:T) ratio of 1:1 (1×10⁵: 1×10⁵) for 16 hours in the presence of Brefeldin A and cytokine producing cells were measured using intracellular flow cytometry. Frequency of IL-2 (FIG. 32A) IFNγ (FIG. 32B) and TNFα (FIG. 32C) expressing cells following cocultures with K562.CEACAM5 (signal 2) or K562.CEACAM5.OKT3 (signal 1+2) cell lines are shown. Non-treated T cells were used as a control.

### Example 12

[0703] Proliferation of Anti-CEA CoStAR Transduced Cells.

[0704] HD T cells were transduced with hMFE23 anti-CEA CoStARs and cocultured with engineered target cells. Nontransduced (MOCK) and anti-CEA CoStAR transduced HD T cells were cocultured with K562.CEACAM5.OKT3 engineered target cell lines at an effector to target (E:T) ratio of 8:1 (1×10⁵: 1.25×10⁴) on Day 0. Nontransduced (MOCK) cells were used as controls. On Day 7, a maximum 50000 cells were re-stimulated with K562.CEACAM5.OKT3 engineered target cell lines at an E:T of 8:1. On Day 5, Day 7 and Day 9 post stimulation a portion of the cocultures were collected for counting by flow cytometry. For all counts, DRAQ7 was used for live cell discrimination and CD2 to enumerate the T cells (FIG. 33). The figures represent fold expansion of input cells. N=2

[0705] HD T cells transduced with hMFE23 anti-CEA CoStARs and cocultured with K562.CEACAM5.OKT3 engineered target cell lines as above were sampled for counting on Day 6 to evaluate fold expansion (FIG. 34). Cells were counted by flow cytometry using DRAQ7 for live cell discrimination and CD2 to enumerate the T cells.

### Example 13

[0706] Signal Transduction and Intracellular Domain Binding Sites and Motifs.

[0707] The effect of mutations in TRAF2/TRAF3 and TRAF6 binding sites (FIG. 35) of CD40 on cytokine secretion and long term survival and proliferation of CD28.CD40 CoStAR transduced T cells was examined. Cells of three donors were activated with Dynabeads and transduced with WT CD28.CD40 (CTP194), CD28.CD40 containing TRAF2 binding site mutation SVQE>AVQA (CTP195), TRAF2/TRAF3 binding site mutation PVQET>AVAEA (CTP196), TRAF6 binding site mutation PQEINF>AQAINF (CTP197), Q263A (CTP199), or mock transduced. Cells were enriched for CD34 marker expression, expanded following the rapid expansion protocol (REP) and frozen for subsequent experiments. After thaw, cells were rested for 3-4 days in complete RPMI supplemented with IL-2 and their transduction rate was determined looking at the CD34 marker gene expression. The viability and absolute count were assessed after overnight IL-2 starvation using DRAQ-7 (1:200) by flow cytometry (Novocyte) and data were analysed using the NovoExpress 1.5.0 software. Transduced T cells were cocultured in absence of IL-2 with LoVo (CCL-229™ from ATCC) or LoVo.OKT3.GFP tumor cells at 8:1 effector to target ratio. After 24 hours, supernatants were collected and frozen. LoVo and LoVo.OKT3.GFP naturally express CEA and PD-L1 on their surface, conferring signal 2 through the CoStAR alone (LoVo) or associated with signal 1 (LoVo.OKT3.GFP) to the transduced T cells. Cocultures were performed in triplicates and corresponding negative (T cells alone, tumor cells alone) and positive (PMA+ ionomycin) controls were included in the experiment. After thaw, secreted IL-2 was detected by ELISA and the absorbance was measured using the FLUOstar Omega microplate reader and subsequently analysed with the Omega MARS 3.42 R5 software (FIG. 36A). Each dot represents the mean of triplicates for one donor. Note that negative controls (T cells alone, tumor cells alone) were all below the detection range.

[0708] After 6-8 days, the viability and absolute count were assessed, and live T cells were rechallenged for an additional week with fresh LoVo.OKT3.GFP tumor cells as described above. At the end of the long-term coculture, the viability and absolute count were measured, and the fold expansion was calculated (FIG. 36B). Data shown as mean+/−SEM of n≤3 donors analysed in triplicates.

[0709] Mutation of the TRAF2 binding site (SVQE>AVQA; CTP195) resulted little reduction in IL-2 secretion and moderate reduction of expansion (FIG. 80). Mutation of the TRAF2/TRAF3 binding site (PVQET>AVAEA; CTP196) resulted in substantial reduction in IL-2 secretion and expansion. Mutation of the TRAF6 binding site (PQEINF>AQAINF; CTP197) resulted in moderate reduction in IL-2 secretion and moderate reduction of expansion.

### Example 14

[0710] Non-transduced (Non-Td) and anti-FOLR1 CoStAR transduced (Td) TILs were generated using a 24-day protocol. Briefly, aliquots of OC digest were thawed and transduced with anti-FOLR1 CoStAR lentivirus at a multiplicity of infection (MOI) of 5 at 48 h and 72 h. Cells were then expanded for 8 days (outgrowth), and then subjected to a rapid expansion protocol (REP) with allogeneic irradiated peripheral blood mononuclear cells (PBMCs) for 12 days.

[0711] After production, TIL CD4/CD8 ratio and anti-FOLR1 CoStAR transduction efficiency was measured. TILs were phenotypically characterized for their differentiation status, expression of co-inhibitory and co-stimulatory markers, T cell subsets and cytokine producing potential using flow cytometric panels.

[0712] Complete TIL T cell media (TCM) for outgrowth consists of 450 mL of GIBCO custom P158718 media with 50 mL of heat inactivated Fetal Bovine Serum, gentamycin (10 μg/mL)/amphotericin (0.25 μg/mL) and vancomycin (50 μg/mL). Complete rapid expansion protocol (REP) media consists of 460 mL of GIBCO custom P158718 with 40 mL human AB serum, gentamycin (10 μg/mL)/amphotericin (0.25 μg/mL) and vancomycin (50 μg/mL).

[0713] Generation of Anti-FOLR1 CoStAR OC TILs

[0714] Five OC samples were used to generate anti-FOLR1 CoStAR modified TILs. The outgrowth period of TILs was 12 days. On day 1 (D1), samples from each donor were thawed in complete TIL TCM, the cells were washed once by centrifuging at 400×g for 5 minutes, resuspended in fresh TIL TCM and counted. All cell counts were performed using a DRAQ7 dye and anti-CD2 antibody stains using a Novocyte 3005 Flow Cytometer System. TILs were then centrifuged at 400×g for 5 minutes, resuspended at a concentration of 1×10⁶ cells/mL, placed into an appropriate vessel with 3000 IU/mL IL-2 and rested for two days in a 5% CO2 incubator set to 37° C.

[0715] Following the rest period on day 3, cells were collected, washed, centrifuged at 400×g for 5 minutes, and resuspended in fresh complete TCM. The number of viable cells in each sample was determined using a Novocyte 3005 as described above, cells were centrifuged at 400×g for 5 minutes and resuspended at a concentration of 1×10⁶ cells/mL. Each sample was split into two equal parts, one for production of Non-Td and other for transduced (Td) TIL, modified to express anti-FOLR1 CoStAR. Transduction with anti-FOLR1 CoStAR lentivirus was performed at an MOI of 5 based on the total number of live cells. IL-2 was added at a concentration of 3000 IU/mL and the cells were placed in a 5% CO2 incubator set to 37° C.

[0716] On day 4, the cells were collected, washed once with complete TIL TCM, and resuspended in the same volume of fresh complete TIL TCM as on day 3 for the second day of transduction. Transduction was performed using the anti-FOLR1 CoStAR lentivirus at an MOI of 5 and IL-2 at 3000 IU/mL was added to the cells prior to placing them in a 5% CO2 incubator set to 37° C. for 8 days. IL-2 (3000 IU/mL) was added to the cells every 2-3 days until D13.

[0717] On day 13 cells were collected, washed, resuspended in complete TIL TCM and counted using a Novocyte 3005. After determining the TIL numbers on day 13, the cells were seeded in appropriate scale G-REX plates for REP using 10 healthy donors worth of irradiated allogeneic PBMCs as feeders at a 200:1 ratio of feeders:TIL. The media used for the REP was the complete REP TIL TCM with anti-CD3 (OKT3) antibody was added at a concentration of 30 ng/mL for activation. IL-2 was added at a concentration of 3000 IU/mL and the cells were placed in a 5% CO2 incubator set to 37° C. The REP period was 12 days during which IL-2 (3000 IU/mL) was supplemented every 2-3 days.

[0718] On day 19 (i.e., day 6 of REP), 5 mL of medium from the 24 well G-REX plates or 25 mL of medium from the 6 well G-REX plates was removed without disturbing the cells and replaced with fresh complete REP TIL TCM and IL-2 (3000 IU/mL). On D25, at the end of the REP, TILs were harvested by centrifugation at 400×g for 5 minutes and resuspended in fresh media for counting using a Novocyte 3005. TILs were resuspended at a concentration of 1×10⁶ cells/mL. TILs were then assessed for transduction efficiency by staining 1×10⁵ cells of each sample with antibodies against CD3, CD4, CD8, CoStAR and a viability stain. DNA was extracted from 1×10⁶ cells from each sample using the DNeasy Blood & Tissue Kit following the manufacturer's instructions. Isolated DNA was used to analyze the vector copy number (VCN) using Droplet Digital PCR (ddPCR) and primers specific to the anti-FOLR1 CoStAR and the reference gene Poly(rC) binding protein 2 (PCBP2). For subsequent experiments 2-5×10⁷ cells were rested in fresh complete REP TIL TCM for 3 days with IL-2 (3000 IU/mL). Remaining TIL were resuspended in cryoprotectant and aliquoted to cryovials, cooled to −80° C. overnight, and then transferred to −150° C. for short term storage. Cryopreserved TIL were thawed in a 37° C. water bath, washed once with PBS by centrifugation at 400×g for 5 minutes, then underwent an identical rest period as described above prior to experimentation.

[0719] Phenotypic characterization of anti-FOLR1 CoStAR OC TILs from four donors.

[0720] Non-Td and Td cells from four donors were rested for 3 days in REP TCM media with IL-2 (3000 IU/mL). Subsequently, the cells were harvested, washed once with media by centrifugation at 400×g for 5 minutes, resuspended in fresh complete REP TIL TCM, counted using Novocyte 3005, and resuspended at a concentration of 1×10⁶ cells/mL. Cytometric evaluation of TILs was performed on 1×10⁵ cells per well, in triplicates, using four flow cytometry panels. Assessment of differentiation status was performed using a panel with antibodies against CD3, CD4, CD8, CD27, CD95, CCR7, CD45RA, CD45RO, CoStAR, and a viability stain. Coinhibitory and costimulatory marker expression was assessed using antibodies against CD4, CD8, CD137, programmed cell death protein 1 (PD-1), cytotoxic T-lymphocyte-associated protein 4 (CTLA-4), lymphocyte-activation gene 3 (LAG-3), T cell immunoglobulin and mucin domain protein 3 (TIM-3), signaling lymphocyte activation molecule (SLAM), CoStAR, and a viability stain. Cell subpopulations, including Tregs, were assessed using antibodies against CD3, CD4, CD25, forkhead box Protein 3 (FOXP3), T cell receptor alpha beta (TCRαβ), T cell receptor gamma delta (TCRγ6), CD56, CD127, CoStAR, and a viability stain. Cytokine production upon mitogenic stimulation was assessed using antibodies against CD3, CD4, CD8, IL-22, TNFα, IL-17A, IFNγ, CoStAR, and a viability stain. For this panel, TILs were activated by addition of PMA (50 ng/mL)/ionomycin (1 μg/mL), and Brefeldin A (1000×) and placed in a 5% CO2 incubator set to 37° C. for four hours. Following activation, TILs were collected, centrifuged at 400×g for 5 minutes, counted, and 1×10⁵ cells were seeded in triplicate for cytometric analysis. For all flow cytometry panels, fixation and permeabilization was performed using BD Cytofix/Cytoperm per manufacturer's instructions. Following staining, cells were washed and resuspended in PEF (500 mL DPBS, 2 mL EDTA and 2.5 mL of heat inactivated FBS) for analysis using a Novocyte 3005 Flow Cytometer System.

### Analysis of the Non-Td and Td Cells

[0721] For the four panels of phenotypic characterization, recombinant human FOLR1 with Fc tag (rhFOLR1-FC) was used for the detection of anti-FOLR1 CoStAR cells, and the populations of interest were reported from CoStAR− subset for the Non-Td TILs, and both CoStAR- and CoStAR+ fractions from the Td TILs (anti-FOLR1 CoStAR− Td TILs and anti-FOLR1 CoStAR+Td TILs). Further subset characterization was performed on these populations.

[0722] Differentiation Status

[0723] The gating strategy employed for characterizing T cell differentiation status was as follows: a lymphocyte gate followed by doublet and dead cell exclusion, CD3+, CD4+ and CD8+ gates. From all three populations (CD3+, CD4+, and CD8+), further analysis was performed on the T cell fractions of interest. To characterize the different T cell memory subsets, CD45RA+CD45RO− and CD45RA-CD45RO+ cells were gated from CD3+ cells. CD45RO+ CCR7+ and CD45RO+ CCR7− populations were then gated from CD45RA−CD45RO+ cells. Using these gates, the central memory T cells (Tcm; CD45RO+ CCR7+CD95+CD27+) cells and effector memory T cells (Tem; CD45RO+ CCR7−CD95+CD27+/−) cells were further gated. Additionally, CD45RA+ CCR7+ and CD45RA+ CCR7− populations were gated from CD45RA+CD45RO− cells. Using these gates, stem cell memory T cells (Tscm; CD45RA+ CCR7+CD95+CD27+) and naïve T cells (Tn; CD45RA+ CCR7+CD95−CD27+) were gated from CD45RA+ CCR7+ cells, whilst terminal effector T cells (Tte; (CD45RA+ CCR7−CD27−CD95+) cells were gated from CD45RA+ CCR7− cells.

[0724] Coinhibitory and Costimulatory Markers

[0725] The gating strategy employed for characterizing coinhibitory and costimulatory molecules included doublet and dead cell exclusion. Gating of CD4+ and CD8+ and CoStAR+/− cells was performed and populations were further analyzed for CD137, PD-1, CTLA-4, LAG-3, TIM-3 and SLAM expression.

[0726] T Cell Subtype

[0727] The gating strategy employed for characterizing T cell subtypes included doublet and dead cell exclusion and a CD3+ gate. Using these populations, the expression of TCRαβ, TCRγδ, and CD56 was assessed. Subsequently, the CD3+CD4+ cells were gated for expression of TCRαβ and CD56, and further analysis of the CD3+CD4+TCRαβ+ population for CD25 and CD127 expression was performed. Using the CD25+CD127−gate the FOXP3+ cells were gated to determine the population of Tregs. Therefore, Tregs are defined as CD3+TCRab+CD4+CD25+CD127-FOXP3+ and CoStAR+/− depending on the population assessed.

[0728] Cytokine Production Upon Mitogenic Stimulation

[0729] The gating strategy employed for characterizing intracellular cytokine production included doublet and dead cell exclusion, CD3+, CD4+, and CD8+ gates. CoStAR expression analysis on the different populations was performed followed by further analysis of the frequency of cells expressing IL-22, IL-17A, TNFα, and IFNγ.

[0730] Clinical Characteristics

[0731] Clinical characteristics of TILs from five ovarian cancer patients are shown in Table 16. Patients were all treatment naïve, and the specific histology revealed three serous cystadenocarcinomas, one endometrioid, and one clear cell adenocarcinoma. Sample weights ranged between 0.55-2.62 grams with a mean weight of 2.39±1.31 grams. After processing, samples were cryopreserved at 6×10⁶-2.5×10⁷ cells in 1 mL per vial. On day 1, samples were thawed and counted using flow cytometry where the average percentage of CD2+ TILs was 19.5±9.43. The total TILs harvested in the thawed samples ranged between 4.4×10⁵-3.3×10⁶ cells.

TABLE 16
Ovarian tumor sample information

| | Tumor type/ | Tumor | | Clinical | | | Treatment |
|---|---|---|---|---|---|---|---|
| ID | Histology | weight | Markers | stage | TNM | Grade | status |
| 1 | Ovarian Cancer/ | 2.62 | CA125- | IB | T1b- | G2-Moderately | Treatment- |
| | Serous | | 937 | | N0-M0 | differentiated | naïve |
| | cystadenocarcinoma- | | | | | | |
| | M-84413 | | | | | | |
| 2 | Ovarian Cancer/ | 0.55 | CA125- | IV | T3-Nx- | G3-Poorly | Treatment- |
| | Serous | | 478, 83 | | M1 | differentiated | naïve |
| | cystadenocarcinoma- | | | | | | |
| | M-84413 | | | | | | |
| 3 | Ovarian | 4.2 | CA125- | IIB | T2b- | G3-Poorly | Treatment- |
| | Cancer/Serous | | 50, 53 | | Nx-M0 | differentiated | naïve |
| | cystadenocarcinoma- | | | | | | |
| | M-84413 | | | | | | |
| 4 | Ovarian Cancer/ | 2.1 | CA125- | IC | T1c- | G2-Moderately | Treatment- |
| | Endometrioid | | 1096 | | Nx-M0 | differentiated | naïve |
| | carcinoma-M- | | HE4- | | | | |
| | 83803 | | 1487 | | | | |
| 5 | Ovarian Cancer/ | 2.5 | CA125- | IIIC | T3c- | G3-Poorly | Treatment- |
| | Clear cell | | 187 | | Nx-M0 | differentiated | naïve |
| | adenocarcinoma-M- | | | | | | |
| | 83103 | | | | | | |

Abbreviations: ID, identification; CA125, cancer antigen 125; TNM, tumor, nodes, metastases.

[0732] After TIL production, cell numbers of Non-Td and Td TILs were compared to assess any effect of anti-FOLR1 CoStAR modification on TIL growth. Results showed no significant impact on the cell numbers of TILs (FIG. 38). Proportions of transduced CD3+, CD4+ and CD8+ cells were assessed after TIL production (FIG. 39A-C). CD4 cells showed higher transduction percentage (50.8±15.2%) than the CD8 cells (32.7±20.6%), and this was statistically significant (p=0.384). Additionally, VCN was assessed using ddPCR to detect the CoStAR transgene relative to the PCBP2 reference gene and <4 integrations per cell were measured (FIG. 39). Comparison of the CD4 and CD8 population composition in the product indicated most cells were CD4+ with levels ranging between 53.0-58.7% and fewer CD8+ cells (30.8-38.2%). CD4+CD8+ and CD4−CD8− cells were also detected at low levels ranging between 3.47-4.43% and 3.19-6.97%, respectively. There were no significant differences between the Non-Td, anti-FOLR1 CoStAR-Td, and anti-FOLR1 CoStAR+Td TILs with regards to the CD4/CD8 cell composition (FIG. 40).

[0733] The TILs were further characterized to determine whether anti-FOLR1 CoStAR modification impacted TIL function. The composition of Tn, Tscm, Tcm, Tem and Tte were assessed from CD3+, CD4+ and CD8+ T cell compartments of Non-Td, anti-FOLR1 CoStAR− Td and anti-FOLR1 CoStAR+Td TILs (FIG. 41A-C). Results show that majority of TILs were Tem across the CD3+(63.2-78.6%), CD4+(76.9-88.8%) and CD8+(48.3-66.9%) populations. Tcm cell frequencies were between 6.28-15.7%, 6.72-17.5% and 5.18-11.7% for CD3+, CD4+ and CD8+ TILs, respectively. Tte cells made up 14.8-15.9% of bulk CD3+ TILs. These were mainly in the CD8+ subpopulation with frequencies of 22.1-25.1% versus 2.68-3.79% in the CD4+ subpopulation. Few Tscm cells were detected for CD3+, CD4+ and CD8+ TILs with frequencies of 0.15-1.38%, 0.05-0.50% and 0.53-3.24%, respectively. The lowest frequency memory subtype were the Tn cells, and these ranged between 0.002-0.019% across all three populations. There were no significant differences between the Non-Td, anti-FOLR1 CoStAR− Td and anti-FOLR1 CoStAR+Td TILs with regards to Tn, Tem, Tcm or Tte frequencies. Despite the low Tscm TILs, significantly lower Tscm TILs were detected in the anti-FOLR1+Td TILs in CD3+(0.15±0.05% vs 1.38±0.69%) and CD4+(0.05±0.02% vs 0.51±0.27%) populations compared to the anti-FOLR1− Td TILs, but not the Non-Td TILs. Overall, the data shows that anti-FOLR1 CoStAR modification did not significantly affect differentiation status of TILs.

[0734] CD8+ and CD4+ TILs were assessed for the expression of CD137, PD-1, CTLA-4, LAG-3, TIM-3 and SLAM (FIG. 42). In CD4+ TILs, expression for all three populations of interest were in the range of 39.8-47.7%, 61.0-64.4%, 52.7-57.6, and 65.6-72.1% for LAG-3, PD-1, SLAM, and TIM-3, respectively. In CD8+ TILs, expression ranged between 86.7-88.2%, 38.2-46.5%, 61.5-67.2%, and 90.0-94.3% for LAG-3, PD-1, SLAM, and TIM-3, respectively. CTLA-4 ranged between 8.92-15.2% and 4.10-7.29%, and CD137 was 2.80-8.30% and 7.70-17.1%, for CD4+ and CD8+ cells, respectively.

[0735] Comparison of the three TIL populations, Non-Td, anti-FOLR1 CoStAR− Td and anti-FOLR1 CoStAR+Td TILs, indicated that there was no effect of the anti-FOLR1 CoStAR on coinhibitory and costimulatory marker expression in CD4+ TILs. In CD8+ TILs, CD137+(17.1±8.79% vs 7.70±3.92% vs 7.77±4.01%) and CTLA-4+(7.29±2.41% vs 4.66±1.51% vs 4.10±1.07%) cells were of higher frequency in anti-FOLR1+Td when compared to both the non-Td and anti-FOLR1 CoStAR− Td TILs. PD-1+ TIL frequency was only higher in comparison to the anti-FOLR1− Td TILs but not the Non-Td TILs (46.5±21.1% vs 38.2±19.6% vs 40.6±26.8%, respectively). Overall, there was little observed effect of CoStAR modification of TILs for coinhibitory or costimulatory marker expression except for the slight but significant increase in the frequency of CD8+CD137+, CTLA4+, and PD-1+ TILs.

[0736] T cell subset frequency was assessed in TIL samples, using markers for Treg detection in addition to the expression of TCRαβ and TCRγδ. The majority of the CD3+ cells expressed TCRαβ (90.0-93.5%) with relatively few TCRγδ cells (1.35-3.08%) detected (FIG. 43A) and no differences were observed between the three populations. The percentage of Tregs (CD3+TCRαβ+CD4+CD25+CD127-FOXP3+) either in the CoStAR- or CoStAR+ TILs was very low. Specifically, the detection frequencies were 0.63±0.48%, 0.66±0.36% and 0.93±0.63% for non-Td, anti-FOLR1 CoStAR- and anti-FOLR1 CoStAR+Td TILs, respectively (FIG. 43B). Overall, there was no effect of anti-FOLR1 CoStAR on TCRαβ, TCRγ6, and Treg frequencies when comparing the Non-Td, anti-FOLR1 CoStAR− Td and anti-FOLR1 CoStAR+Td TILs.

[0737] TILs were assessed the ability of the cells to produce cytokines upon mitogenic activation using PMA/ionomycin. The Non-Td and Td TILs were activated for 4 hours using PMA/ionomycin and then stained for IFNγ, IL-22, IL-17A, and TNFα from CD3+, CD4+, and CD8+ cells. Upon stimulation, high frequencies of CD3+ TILs expressing TNFα (61.8-73-6%) and IFNγ (32.5-42.0%), and lower frequencies of IL-22 (4.74-8.07%) and IL-17A (5.74-11.0%) expressing cells were detected (FIG. 44A). The frequency of TNFα+ cells was higher in anti-FOLR1 CoStAR+Td compared to anti-FOLR1 CoStAR− Td TILs (73.6±14% vs 61.8±18.3%), but not Non-Td TILs (72.1±9.20%).

[0738] In CD4+ TILs, high frequencies of cells expressing TNFα (54.3-67.2%), and lower frequencies of IFNγ (19.3-26.2%), IL-22 (7.63-10.5%) and IL-17A (12.0-20.2%) expressing cells were detected (FIG. 44B). The frequencies of TNFα+(67.2±15.5% vs 54.3±17.2%) and IL-17A+ cells (20.2±11.3 vs 12.0±7.06) were higher in anti-FOLR1 CoStAR+Td relative to anti-FOLR1 CoStAR− Td TILs. No significant differences were observed in the frequency of CD4+ expressing TNFα or IL-17A when comparing either anti-FOLR1 CoStAR+/− Td TILs to Non-Td TILs.

[0739] Similar observations were made for the CD8+ TIL population, where high TNFα (62.7-86.7%) and IFNγ (45.3-63.0%), and lower IL-22 (6.80-17.0%) and IL-17A (6.93-15.3%) frequencies of positive cells were detected (FIG. 44C). In this population, higher frequencies of cytokines expressing cells were identified in the anti-FOLR1 CoStAR+Td TILs compared to anti-FOLR1 CoStAR− TILs with regards to TNFα (86.7±8.37% vs 62.7±18.2%), IL-17A (15.3±7.24% vs 6.93±2.77%), and IL-22 (17.0±6.90% vs 6.80±2.48%). Again, no significant differences were observed between either anti-FOLR1 CoStAR+/− Td TILs compared to Non-Td TILS.

[0740] The significant differences observed both in the CD4+ and CD8+ subpopulations between the IL-17A+ anti-FOLR1 CoStAR+Td TILs and anti-FOLR1 CoStAR-Td TILs were not statistically significant in the CD3+ bulk population (p=0.0527). Collectively, some statistically significant differences were observed within CD3+, CD4+, or CD8+ TIL populations in the proportion of IL-17A, IL-22, and TNFα expressing cells between anti-FOLR1 CoStAR+/− populations of Td cells. However, no significant differences were observed in the frequency of IFNγ, IL-17A, IL-22, and TNFα producing cells when comparing either Td population (ie, anti-FOLR1 CostAR−/+ fractions) to Non-Td TILs.

### Example 15

[0741] Antitumor Reactivity of CoStAR positive TILs

[0742] Complete Rapid Expansion Protocol (REP) Medium Consisted of 460 mL GIBCO custom P158718 supplemented with 40 mL human AB serum, gentamycin (10 μg/mL)/amphotericin (0.25 μg/mL) and vancomycin (50 μg/mL). Complete T cell medium (TCM) consisted of 450 mL RPMI 1640 GlutaMAX™ Supplement HEPES medium supplemented with 5 mL Penicillin-Streptomycin, 500 μL 2-Mercaptoethanol (50 mM), and 50 mL Fetal Bovine Serum (FBS).

[0743] Preparation of CoStAR Modified OC TILs for Functional Characterization

[0744] Non-Td and Td TILs from five OC samples were produced as described in ITIL-306-NC-010 and the transduction percentages are shown in Table 17.

TABLE 17
Non-Td and Td TIL donors

| | CoStAR % of | CoStAR % | |
|---|---|---|---|
| Donor | CD3 in Non-Td | of CD3 in Td | Symbol |
| 1 | 0.98 | 34.00 | ▪ |
| 2 | 0.11 | 24.33 | ● |
| 3 | 0.20 | 47.11 | ▾ |
| 4 | 0.09 | 45.65 | ▴ |
| 5 | 0.15 | 64.60 | ♦ |

[0745] TILs were either used directly after the REP or upon thaw from long-term cryopreservation (−150° C.; stored in cryoprotectant consisting of FBS with 10% DMSO). ovarian cancer TILs were thawed using a 37° C. water bath, transferred to a 50 mL Falcon tube with 10 mL of complete REP TCM, centrifuged at 400×g for 5 minutes and resuspended in complete REP TCM. Both post-REP and post-thaw TILs, were counted using the NovoCyte 3005 Flow Cytometer System following DRAQ7 dead cell exclusion and a CD2+ count and placed in T75 flasks at a density of 1×10⁶ cells/mL in complete REP TCM supplemented with 3000 IU/ml of interleukin 2 (IL-2). The cells were then placed in a 5% CO2 incubator set to 37° C. for 2-3-days. Before the assay, TILs were resuspended in complete REP TCM at a density of 1×10⁶ cells/mL without IL-2 and placed in a 5% CO2 incubator set to 37° C. overnight.

### Assessment of FOLR1 Expression by Autologous Tumor Digest.

[0746] All autologous tumor digests were thawed from long-term cryopreservation (−150° C.; stored in cryoprotectant consisting of FBS with 10% DMSO) using a 37° C. water bath, transferred to a 15 mL Falcon tube with 9 mL of complete TCM, centrifuged at 400×g for 5 minutes and resuspended in 5 mL of complete TCM. The number of viable cells in each sample was determined using the NovoCyte 3005 Flow Cytometer System following DRAQ7 dead cell exclusion, and the cells were resuspended at a concentration of 1×10⁶ cells/mL in completed TCM. 1×10⁵ autologous tumor digest cells were then analyzed according to the flow cytometry staining protocol and acquired using the Novocyte 3005 Flow Cytometer System.

[0747] The quantification of FOLR1 expression was conducted according to the following gating strategy: a cell gate (forward scatter-height [FSC]-H vs side scatter-height [SSC]-H), then a doublet exclusion gate (SSC-H vs side scatter-area [SSC-A]) followed by a dead cell exclusion gate (SSC-A vs Fixable Viability dye eFluor 450). The CD2-cells were then gated from which the frequency of the FOLR1+ cells were quantified (SSC-A vs FOLR1-PE).

### Cytokine Production Assessed by Intracellular Flow Cytometry

[0748] To measure the frequencies of cytokine producing T cells, Non-Td and anti-FOLR1 CoStAR Td TILs were cocultured at a 1:1 effector to target ratio (E:T, 1×10⁵ TILs:1×10⁵ target cells) with either autologous tumor digests, K-562, or OVCAR-3 derived engineered cell lines as targets. Cocultures took place in 96 well round bottom plates with 200 μL complete TCM supplemented with 1× Brefeldin A and were incubated in a 5% CO2 incubator set to 37° C. for 16 hours. Unstimulated TILs or target cells alone were used as negative controls, and positive control TILs were activated with 50 ng/mL phorbol-myristate-acetate (PMA) and 1 μg/mL ionomycin. All conditions were performed in triplicates.

[0749] Measurement of cytokine production was performed using a panel with antibodies against CD3, CD4, CD8, CoStAR (anti-idiotype 19.1 primary and anti-mouse IgG1 secondary antibodies), tumor necrosis factor alpha (TNFα), IL-2, and a viability stain. Following the 16-hour incubation, cocultures were harvested by centrifugation at 500×g for 4 minutes. The supernatant was discarded, and samples were analyzed by flow cytometry. Briefly, cells were labelled using 100 μl of fixable viability dye (1:1000 diluted in PBS) and incubated for 10 minutes at room temperature. Subsequently, cells were washed using BD stain buffer, centrifuged at 500×g for 4 minutes, and cell pellets were resuspended in 100 μl of BD stain buffer with FcR blocking reagent for 10 minutes at room temperature. Following the incubation step, cells were washed once with BD stain buffer and fixed using 4% paraformaldehyde (PFA) for 15 minutes at room temperature. A wash with BD perm/wash buffer, staining using the 19.1 anti-idiotype for 25 minutes at 4° C. and two more BD perm/wash buffer washes followed. Cells were then resuspended in 100 μl of BD stain buffer with CD3, CD4, CD8, anti-mouse IgG1, TNFα, and IL-2 and incubated at 4° C. for 25 minutes. Following two more wash steps using BD perm/wash buffer, cell pellets were resuspended in 100 μl of BD stain buffer for acquisition on NovoCyte 3005 Flow Cytometer System.

[0750] The quantification of TNFα and IL-2 producing cell frequencies in the CD4 and CD8 subpopulations was conducted according to a gating strategy that included dead cell exclusion. CD3+ cells were gated from the live gate (SSC-A vs CD3-A) and then CD4+ and CD8+ cells were gated from the CD3+ gate (CD4-A vs CD8-A). TNFα and IL-2 producing cells were reported from the CoStAR negative (−) subset for the Non-Td TILs, and both CoStAR− and CoStAR positive (+) fractions from the Td TILs (anti-FOLR1 CoStAR− Td TILs and anti-FOLR1 CoStAR+Td TILs).

### Cytokine Production Assessed by MSD Immunoassay

[0751] To measure cytokine secretion, non-Td and anti-FOLR1 CoStAR Td TILs were cocultured at a 1:1 ratio (E:T, 1×10⁵ TILs:1×10⁵ target cells) with autologous tumor digests and at a 8:1 ratio (E:T, 1×10⁵ TILs:1.25×10⁴ target cells) with K-562 or BA/F3 derived engineered cell lines. Cocultures were performed in 200 μL complete TCM in triplicate. In experiments where MHC blocking was conducted, autologous tumor digests were pre-incubated (4° C.) with antibodies directed against MHC Class I (HLA-ABC; 40 μg/mL), MHC Class II (HLA-DRDPDQ; 40 g/mL), MHC Class I+II (both 40 μg/mL), or an isotype control (Mouse IgG2a; 80 μg/mL) for 45 minutes in 100 μL complete TCM. Following the incubation, TILs were added to the appropriate wells. For all experiments, unstimulated TILs or target cells alone were used as negative controls, and TILs activated with 50 ng/mL phorbol-myristate-acetate (PMA) and 1 g/mL ionomycin were used as a positive control. The cells were then placed in a 5% CO2 incubator set to 37° C. for 24 hours.

[0752] Following the 24-hour incubation, samples were centrifuged at 400×g for 5 minutes, and the supernatant was harvested before storage at −80° C. Upon thaw, samples were appropriately diluted in complete TCM and Diluent 2 from the V-Plex Plus Proinflammatory Panel 1 kit from Meso scale discovery (MSD). The assay was performed per manufacturer's instructions.

### Target Cell Cytotoxicity Assessed by Flow Cytometry

[0753] To measure the cytotoxic activity of TILs, Non-Td and anti-FOLR1 CoStAR Td TILs were cocultured at a 1:1 ratio (E:T, 1×10⁵ TILs: 1×10⁵ target cells) with BA/F3 derived engineered cell lines. Cocultures were performed in 96 well round bottom plates with 200 μL complete TCM in triplicate, and incubated for 20 hours in a 5% CO2 incubator set to 37° C. TILs and target cells were cultured alone as negative controls.

[0754] Following the 20-hour coculture, samples were centrifuged at 400×g for 5 minutes, the supernatant was discarded, and samples were analyzed by flow cytometry. Briefly, cells were labelled using 100 μl of fixable viability dye (1:1000 diluted in PBS) and incubated for 10 minutes at room temperature. All washes were performed using BD stain buffer. After the incubation cells were washed, centrifuged at 500×g for 4 minutes, and cell pellets were resuspended in 100 μl of BD stain buffer with FcR Blocking reagent for 10 minutes at room temperature. Following the incubation step, cells were washed once resuspended in 100 μl of BD stain buffer with CD2 and incubated at 4° C. for 25 minutes. Cells were washed twice, and cell pellets were resuspended in 100 μl of BD stain buffer for acquisition on NovoCyte 3005 Flow Cytometer System.

[0755] Target cell counts were enumerated by flow cytometry after doublet and dead cell exclusion. CD2-cells were gated from the live gate (SSC-A vs CD2-A) and quantified by the absolute count function of the NovoCyte 3005 Flow Cytometer System.

[0756] Target Cell Cytotoxicity Assessed by xCELLigence

[0757] Assessment of target cell cytotoxicity by xCELLigence was performed according to manufacturer's instructions. Briefly, E-plates were equilibrated by adding 50 μL TCM per well, incubated at room temperature for 30 minutes, and background electrical impedance was acquired on the RTCA Analyzer (37° C., 5% CO2). Following this, 3×10⁴ OVCAR-3 derived engineered cell lines in 50 μL TCM were added per well of each E-plate and incubated at room temperature for 30 minutes before cell growth was assessed by electrical impedance (cell index) upon the RTCA Analyzer (37° C., 5% CO2). The cell index was measured every 15 minutes throughout the duration of the assay. Upon reaching confluency (between 24-31 hours), 6×10³ or 1×10³ Non-Td or Td TILs in 100 μL TCM were added to OVCAR-3 derived engineered cell lines (E:T ratios of 1:5 and 1:30, respectively). These were incubated at room temperature for 30 minutes prior to 169 hours of further cell index readings upon the RTCA Analyzer (37° C., 5% CO2). Control conditions included wells containing target cell lines alone, target cell lines with 0.5% Triton X-100 added at OC TIL loading time-point (full lysis control), and TILs alone. The normalized cell index (NCI) was determined according to manufacturer's instructions using RTCA software pro. The area under the NCI curve as extracted from RTCA software pro for the 169-hour period of OC TIL coculture with OVCAR-3 derived engineered cell lines is reported as a quantitative readout. Both the RTCA SP and DP were used. For the 1:30 ratio of Non-Td and Td TILs from 9831 and 9260 tumor digests, cocultures were run in duplicate.

### Analysis

[0758] Following the production and characterization of TIL from cryopreserved tumor samples, retained input tumor digest samples were thawed and assessed for their expression of FOLR1; the ligand of anti-FOLR1 CoStAR. FOLR1 could be detected on the surface of CD2−cells in all 5 tumors with the proportion of FOLR1 positive cells ranging from 5.44-22.1% (FIG. 45).

[0759] Intracellular flow cytometry was used to assess the frequency of T cells that recognize and respond to autologous tumor. PMA/I stimulation was used as a positive control for frequencies of TIL capable of readily producing IL-2 and TNFα. No IL-2+ or TNFα+ TILs were detected in tumor digests cultured overnight (16 hours) alone with brefeldin A. In contrast, IL-2+ and TNFα+ TILs were detected upon 16-hour coculture of expanded TIL with autologous tumor digest (FIG. 46). CD4+ anti-FOLR1 CoStAR+Td TILs were characterized by significantly higher frequency of IL-2 producing cells compared to Non-Td TILs with a marked 6.56-fold increase (12.0±12.9% vs 1.83±0.55%) (FIG. 46A). Although not significant, CD4+ anti-FOLR1 CoStAR+Td TILs also had a 3.33-fold increase in IL-2 producing cell frequencies compared to anti-FOLR1 CoStAR− Td TILs (12.0±12.9% vs 3.61±3.10%). A slight but significant increase in the number of anti-FOLR1 CoStAR+CD4 T cells producing TNFα (6.96±3.56%) when cultured alone relative to anti-FOLR1 CoStAR− Td TILs (2.58±1.60%), but not Non-Td TILs (3.31±3.62%) was also detected (FIG. 46C). Upon coculture with the autologous digest, TNFα+ cells seemed to increase in frequency in the anti-FOLR1 CoStAR+Td TIL population, although a statistically significant difference compared to anti-FOLR1 CoStAR− Td and Non-Td TILs was not observed (32.3% vs 17.8% vs 11.6%).

[0760] Similar observations were made for the CD8+ population upon coculture with autologous digest (FIG. 46). A significantly higher frequency of CD8+IL-2+ cells was detected by anti-FOLR1 CoStAR+Td TILs (4.13±2.26%) relative to anti-FOLR1 CoStAR− Td TILs (1.42±1.00%; 2.9-fold increase) but not the Non-Td TILs (1.11±0.55%; 4.13-fold increase, p=0.1097) (FIG. 46B). CD8+ TNFα producing cell frequencies were increased in the anti-FOLR1 CoStAR+Td TILs relative to anti-FOLR1 CoStAR-Td and Non-Td TILs, however, these differences did not reach statistical significance (22.6% vs 12.5% vs 10.5%) (FIG. 46D).

[0761] Overall, CoStAR modification significantly increased the frequencies of CD4+ and CD8+ cells producing IL-2 upon stimulation with the autologous digest. In the same setting, CD4+ and CD8+ cells frequencies producing TNFα+ trend similarly, although statistical significance was not reached.

[0762] An MSD immunoassay was conducted to assess the quantity of cytokines released upon TIL coculture with autologous digest (FIG. 47). PMA/I stimulation was used as a positive control for cytokine production, which was similar between CoStAR modified and Non-Td TIL. CoStAR modification of TIL led to a statistically significant increase in the secretion of IL-2, TNFα, IL-13 and IFNγ secretion in response to autologous tumor in comparison to Non-Td TILs (FIG. 47A-D). A trend of increased background cytokines levels from Td vs Non-Td TILs when cultured alone (FIG. 47A-D) was observed and was only significant for IL-2 (70.6 pg/mL vs 31.8 pg/mL) (FIG. 47A). Upon coculture with the autologous digest, although IL-2 secretion was significantly higher in Td TILs compared to Non-Td TILs (74.1 pg/mL vs 32.1 pg/mL), this was not different from background levels of TILs cultured alone. Td TILs secreted higher levels of IFNγ in response to autologous digest compared to Non-Td TIL with production levels of 8287 pg/mL vs 1970 pg/mL (FIG. 11D). Similarly, higher levels of TNFα (55.0 pg/mL vs 18.2 pg/mL, FIG. 47B) and IL-13 (152 pg/mL vs 48.4 pg/mL, FIG. 47C) were detected when Td TILs were cocultured with the autologous digest relative to Non-Td TILs. These indicate a 3-, 4.2- and 3.1-fold increase in TNFα, IFNγ and IL-13 production by CoStAR modified Td TILs, respectively.

[0763] A statistically significant positive correlation (r²=0.9191) was observed between IFNγ released by CoStAR modified TIL upon coculture with autologous tumor and the proportion of tumor digest expressing FOLR1 (FIG. 47E). This correlation was not observed for Non-Td TILs, confirming CoStAR-FOLR1 interactions are key for TIL enhancement. Moreover, CoStAR modified TIL IFNγ release is enhanced even against ovarian tumors harboring frequencies of FOLR1 positive cells as low as 5.44% (FIG. 11E).

[0764] MHC blocking antibodies prevent TCRs from engaging their target and mediating TCR signaling. To assess the MHC-restricted antigen recognition of CoStAR modified TIL, Non-Td and Td TILs were cocultured with autologous tumor digest in the presence of MHC blocking, or irrelevant isotype control antibodies, and TIL anti-tumor activity was measured by IFNγ release (FIG. 48). As CoStAR modification enhanced the cytokine production in response to autologous tumor (FIG. 47), percentage reduction relative to TILs cocultured with autologous digest without blocking agents was assessed. The percentage of cytokine release was not significantly different between Non-Td and Td TILs in any of the conditions assessed. Antibodies blocking MHCI, MHCII, and both MHCI and MHCII in combination significantly decreased IFNγ release of both Non-Td (32.7%, 43.1%, and 43.1%, respectively) and Td TILs (35.0%, 27.0%, and 27.3%, respectively), relative to TIL coculture with autologous digest with no antibody present. Additionally, inhibition of cytokine release by the blocking reagents resulted in reduction that was not significantly different between any of the blocking conditions and TILs alone. Isotype control antibody had little effect on IFNγ release from Td (79.1%) or Non-Td TILs (92.7%), relative to TIL coculture with autologous digest with no antibody present. Reductions in IFNγ release from TIL by MHC blocking antibodies were statistically significant in comparison to isotype control and levels of inhibition were not statistically significantly different between Td and Non-Td TILs demonstrating equivalent dependence upon MHC-restricted antigen recognition.

[0765] Assessment of robust TIL effector function and the full potential of CoStAR to enhance these functions was demonstrated using a range of engineered cell lines (Table 18). K-562 and BA/F3 cell lines were engineered to express surface bound OKT3 (to induce a CD3 mediated signal 1) or FOLR1 (CoStAR mediated signal 2) or both OKT3 and FOLR1 (for signal 1 and 2). Additionally, the ovarian carcinoma cell line OVCAR-3, which endogenously expresses FOLR1 (63.68% FOLR1+), was engineered to express surface bound OKT3. Using these cell lines, Non-Td and Td TIL were cocultured to assess the impact of CoStAR-mediated effector functions by evaluating cytokine production and secretion by intracellular flow cytometry and MSD immunoassay, respectively.

TABLE 18
Engineered cell lines

| Parental line | Manufacturer | Derived/Engineered line |
|---|---|---|
| K-562 | ATCC | K-562 (no signal) |
| | | K-562-OKT3 (signal 1) |
| | | K-562-FOLR1 (signal 2) |
| | | K-562-OKT3-FOLR1 (signal 1 & 2) |
| OVCAR-3 | ATCC | OVCAR-3 (signal 2) |
| | | OVCAR3-OKT3 (signal 1 & 2) |
| BA/F3 | DSMZ | BA/F3 (no signal) |
| | | BA/F3-OKT3 (signal 1) |
| | | BA/F3-FOLR1 (signal 2) |
| | | BA/F3-OKT3-FOLR1 (signal 1 & 2) |

[0766] Intracellular flow cytometry was used to enumerate cytokine producing cells after 16-hour coculture with engineered K-562 and OVCAR-3 cell lines (FIG. 49). IL-2 producing cell frequencies in response to K-562 and K-562-FOLR1 were minimal for CD4+ (1.47-4.17%) and CD8+ (0.23-3.73%) cells across all populations of interest (FIG. 49A). Culture with K-562-OKT3 resulted in IL-2+ cell frequencies of 23.0-34.0% and 20.0-39.7% for CD4+ and CD8+ cell populations, respectively. No statistically significant difference in IL-2 producing cell frequencies was observed between Non-Td and anti-FOLR1 CoStAR+/− populations upon coculture with control cell lines, with the exception of CD8+ anti-FOLR1 CoStAR+Td TILs which were higher than anti-FOLR1 CoStAR− Td TILs, but not Non-Td TILs (39.7±21.7% vs 20.0±15.1% vs 24.8±13.4%, respectively). Coculture with the K-562-OKT3-FOLR1 cell line resulted in significantly higher frequencies of CD4+IL-2 producing anti-FOLR1 CoStAR+Td TILs with a marked increase of 1.84- and 2.38-fold relative to anti-FOLR1 CoStAR− Td and Non-Td TILs, respectively (54.9±20.5% vs 29.9±19.4% vs 23.1±13.4%, respectively). The same observation was true for the CD8+IL-2+ cell frequencies with a 2.53- and 2.29-fold increase in anti-FOLR1 CoStAR+Td TILs compared to anti-FOLR1 CoStAR− Td and Non-Td TILs, respectively (53.0±23.9 vs 21.0±15.5% vs 23.2±12.2%, respectively).

[0767] TILs cultured alone or cocultured with OVCAR-3 were characterized by minimal frequencies of IL-2 producing cells for both CD4+(0.78-1.38%) and CD8+ (0.22-0.80%) populations (FIG. 49A). Upon stimulation with both signals provided by the OVCAR-3-OKT3 cell line, a significant increase in the frequency of IL-2 producing cells was observed by the anti-FOLR1 CoStAR+Td TILs (39.1±14.5%) in the CD4+ population with a 1.74- and a 2.46-fold increase in comparison to anti-FOLR1 CoStAR− Td TILs (22.4±14.0%) and Non-Td TILs (15.9±9.47%), respectively. Similarly, in the CD8+ population, anti-FOLR1 CoStAR+Td TILs (34.1±13.2%) demonstrated a 2.65- and 2.36-fold increase in IL-2 producing cell frequencies compared to anti-FOLR1 CoStAR− Td TILs (12.9±10.2%) and Non-Td TILs (14.5±9.58%), respectively.

[0768] CD4+ TNFα positive cell frequencies were significantly higher in the anti-FOLR1 CoStAR+Td TILs cocultured with K-562-OKT3 compared to anti-FOLR1 CoStAR− Td TILs (75.9±8.35% vs 66.2±5.04%), and with K-562-FOLR1 compared to Non-Td TILs (12.6±7.08% vs 0.73±0.34%) (FIG. 49B). No significance was observed in the same conditions for the CD8+ TNFα positive cell populations. Stimulation with K-562-OKT3-FOLR1 expressing both signals resulted in higher frequencies of TNFα producing CD4+ cells relative to both anti-FOLR1 CoStAR− Td with 1.31-fold increase and Non-Td TILs with 1.39-fold increase (89.3±6.15% vs 68.1±4.99% vs 64.2±14.0%, respectively). The same trend was observed in the CD8+ population, however, statistical significance was only reached when comparing anti-FOLR1 CoStAR+Td TILs to anti-FOLR1 CoStAR− Td TILs (1.25-fold increase), but not the Non-Td TILs (1.14-fold increase) (90.2±5.35 vs 72.2±9.92% vs 79.3±6.30%, respectively).

[0769] In conditions where TILs were cultured alone, small but significant differences in TNFα percentage were observed between the anti-FOLR1 CoStAR+Td TILs compared to anti-FOLR1 CoStAR− Td TILs in CD4+(5.81±3.38% vs 1.85±1.42%) and CD8+(4.85±2.46% vs 1.53±0.76%) cell populations (FIG. 49B). There were no significant differences compared to Non-Td TILs in either population. In the presence of OVCAR-3 expressing signal 2, a slight but significantly higher CD4+ TNFα+ cell frequencies were detected in the anti-FOLR1 CoStAR+Td TILs relative to both the anti-FOLR1 CoStAR− Td and Non-Td TILs (8.29±4.34% vs 1.00±0.78% vs 0.40±0.23%, respectively). On the contrary, no differences were observed between these populations in the CD8+ cells. Importantly, significantly higher frequencies of CD4+ TNFα producing cells were detected upon coculture of the TILs with the OVCAR-3-OKT3 cell line in anti-FOLR1 CoStAR+Td TILs (83.5±6.99%) with a 1.24- and 1.37-fold increase compared to anti-FOLR1 CoStAR+Td TILs (67.4±5.35%) and Non-Td TILs (60.9±10.9%), respectively. Similar frequencies were detected in the CD8+ cell population, with a 1.31-fold increase between anti-FOLR1 CoStAR+Td and anti-FOLR1 CoStAR− Td TILs (88.5±3.72% vs 67.8±10.3%) and a 1.21-fold increase between anti-FOLR1 CoStAR+Td and Non-Td TILs (88.5±3.72% vs 73.2±4.57%).

[0770] Collectively, these results demonstrate a significant increase in the frequencies of IL-2+ and TNFα+ cells in the CoStAR+ fraction of the modified TILs compared to the CoStAR− fraction and Non-Td TILs when coculture with engineered cell lines expressing both signals. Although minimal, some background of higher frequencies of TNFα+ cell populations were observed in both CD4+ and CD8+ cells. Similarly, some enhancement of the CoStAR effect was observed by higher frequencies of CD8+IL-2+ and CD4+ TNFα+ cells in cocultures with K-562-OKT3 cell line, which could be potentially explained by the low levels of FOLR1 expression on the K-562.

[0771] In addition to assessing the frequency of activated T cells by flow cytometry, MSD immunoassay was used to evaluate levels of secreted cytokines upon coculture with K-562 and BA/F3 engineered cell lines (Table 18). Cytokine secretion was minimal in cocultures with wild type cell lines or those engineered to express signal 2 alone (FIG. 50). IL-2 release stimulated by K-562-OKT3-FOLR1 cell lines was higher in the Td TILs (2682 pg/mL) compared to the Non-Td TILs (521.5 pg/mL) demonstrating a 5.14-fold increase (FIG. 50A). Similarly, in TILs cocultured with BA/F3-OKT3-FOLR1, IL-2 secretion was 9.31-fold higher in the Td TILs compared to Non-Td TILs (FIG. 50A). Significantly higher TNFα production was also detected in Td TILs compared to Non-Td TILs when cocultured with K-562-OKT3-FOLR1 (2337 pg/ml vs 1211 pg/mL, 1.93-fold increase) and BA/F3-OKT3-FOLR1 (900.3 pg/mL vs 278.0 pg/mL, 3.24-fold increase).

[0772] IL-13 and IFNγ production was also significantly higher upon stimulation with cell lines expressing both signals (FIG. 50C-D). More specifically, in response to stimulation with K-562-OKT3-FORL1 Td TILs secreted high levels of IL-13 (1590 pg/mL) compared with Non-Td TILs (587.0 pg/mL), showing a 2.71fold higher secretion by OKT3-FORL1 Td TILs. Similarly, a 2.26-fold higher amount of IFNγ was observed in OKT3-FORL1 Td TILs (194559 pg/mL) vs Non-Td TILs (86183 pg/mL). Similarly, IL-13 and IFNγ concentrations were significantly elevated in Td TILs cocultured with BA/F3-OKT3-FOLR1 over Non-Td TILs in the same conditions with a 4.35- (983.9 pg/mL vs 226.1 pg/mL) and 5.13-fold (65594 pg/mL vs 12786 pg/mL) greater cytokine secretion, respectively (FIG. 50C-D). Interestingly, a significantly higher IFNγ secretion was observed by Td TILs compared to Non-Td TILs in cocultures with K-562-OKT3 (1.33-fold increase, 98804 pg/mL vs 74917 pg/mL) which could be attributed to the low levels of FOLR1 expression on the K-562 cells.

[0773] To determine the impact of CoStAR modification on the cytotoxic capacity of TILs, flow cytometry-based and xCELLigence-based killing assays were conducted against BA/F3 and OVCAR-3 engineered cell lines, respectively (FIG. 51). In cocultures assessed by flow cytometry, OKT3 was sufficient to induce cytotoxicity as Non-Td and Td TILs killed specifically BA/F3 cells expressing either OKT3 or both OKT3 and FOLF1 with no significant differences detected (FIG. 51A). Importantly, no cytotoxicity was observed against BA/F3 or BA/F3-FOLR1 demonstrating the requirement of signal 1 to induce killing. Similar observations were true for cocultures with OVCAR-3 cells as target cell lines using RTCA assays (FIG. 51B). In cocultures with OVCAR-3 OKT3 expressing both signals, there was no significant difference in the AUC (NCI×hours) between Non-Td and Td-TILs at any E:T ratio tested. OVCAR-3 cells alone were not eliminated at early timepoints, however a slight decrease in NCI of OVCAR-3 cells in 4 of 5 donors occurred following addition of Non-Td or Td TILs at an E:T 1:5 ratio at later time points.

[0774] Collectively, these data demonstrate a lack of cytotoxicity mediated by CoStAR bearing TIL against target cells expressing CoStAR target alone. Engagement of TCR was sufficient in mediating cytotoxicity in both Non-Td and Td TILs in all assays, showing no impact of CoStAR on cytotoxicity in the presence of a potent signal 1 such as OKT3.

### Example 16

[0775] CD40 signaling motif mutant constructs CTP198, CTP197, CTP196, CTP199, and CTP195 were designed and individually incorporated into a CD40 wild type signaling motif, which contained the CD34 marker gene for sorting (FIG. 61). These constructs were then expressed in vitro, and screened for transcriptional changes compared to wild type CD40 (data not shown). From this, it was established that: (1) incorporation of CTP197 into CD40 resulted in some reduction in cell expansion, and reduction in IL-2 secretion, (2) incorporation of CTP196 into CD40 resulted in a large degree of reduction in cell expansion, and large reduction in IL-2 secretion, and (3) incorporation of CTP195 into CD40 resulted in some reduction in cell expansion, but no reduction in IL-2 secretion. From these observations, the inventors concluded that altering a CoStAR TRAF2/3 domain has a deleterious effect on cytokine production and cell proliferation. This implicates that the TRAF2/3 domain is potentially providing the majority of the CoStAR mediated activity.

[0776] TRAF domains and their influence on CoStAR signalling can be monitored by a series of mutations to either inhibit TRAF binding, inhibit expression of TRAF, modulate the TRAF binding motif, or swap TRAF domains.

### Example 17

[0777] Mutational analysis of CD40 TRAF sequence variants such as those in Table 2, 4, and 5, was conducted to further establish the function of the signaling motifs. This analysis was done in order to assess if modifying TRAF 2, 2/3 and/or 6 signalling motifs of CD40 improves proliferation and cytokine release.

[0778] TRAF domains of CD40 were swapped in the constructs as shown in Table 17, and in FIG. 67. There was a total of 12 mutant CD40 constructs generated, as well as one wild type CD40 construct, and one “mock” construct of a CoStAR without CD40.

TABLE 17

| | Construct ID | Plasmid design | Notes |
|---|---|---|---|
| | CTP343 | pSF.Lenti.MND.MOV19.CD28(TOP) | Construct without CD40 |
| | (SEQ ID NO: | | |
| | 42376) | | |
| CoStAR | CTP205 | pSF.Lenti.MND.MOV19.CD28 | Non-mutated CoStAR |
| | (SEQ ID NO: | | |
| | 42) | | |
| Traf | CTP406 | pSF.Lenti.MND.MOV19.CD28 | TRAF2/3 binding domain |
| domain | (SEQ ID NO: | (PVQE-TQEE) | targeting |
| swop | 510) | | |
| | CTP407 | pSF.Lenti.MND.MOV19.CD28 | TRAF2/3 binding domain |
| | (SEQ ID NO: | (PVQE-SKEE) | targeting |
| | 511) | | |
| | CTP408 | pSF.Lenti.MND.MOV19.CD28 | TRAF2/3 binding domain |
| | (SEQ ID NO: | (PVQE-AVEE) | targeting |
| | 512) | | |
| | CTP409 | pSF.Lenti.MND.MOV19.CD28 | TRAF2 binding domain |
| | (SEQ ID NO: | (SVQE - AVEE) | targeting |
| | 513) | | |
| | CTP410 | pSF.Lenti.MND.MOV19.CD28 | TRAF2 binding domain |
| | (SEQ ID NO: | (SVQE - PEEE) | targeting |
| | 514) | | |
| | CTP411 | pSF.Lenti.MND.MOV19.CD28 | TRAF6 binding domain |
| | (SEQ ID NO: | (PQEINF-PEEMSW) | targeting |
| | 515) | | |
| | CTP412 | pSF.Lenti.MND.MOV19.CD28 | TRAF6 binding domain |
| | (SEQ ID NO: | (PQEINF-PPENYN) | targeting |
| | 516) | | |
| | CTP413 | pSF.Lenti.MND.MOV19.CD28 | TRAF6 binding domain |
| | (SEQ ID NO: | (PQEINF-PQENSY) | targeting |
| | 517) | | |
| | CTP414 | pSF.Lenti.MND.MOV19.CD28 | TRAF2, TRAF2/3 and |
| | (SEQ ID NO: | (2-3-6 mt) | TRAF6 binding domain |
| | 518) | | mutant |
| | CTP421 | pSF.Lenti.MND.MOV19.CD28.TRAF2/3 | Contains CD28 domain |
| | (SEQ ID NO: | | plus “critical” CD40 |
| | 519) | | TRAF2/3 domain flanked |
| | | | by 5 amino acids on either |
| | | | side |

[0779] Each construct was transduced into primary human pan T cells obtained from STEM cell (#Cat 70024) from one of three donors. The proliferation of TRAF variant T cells expressing each construct was then assessed in a co-culture with Ba/f3.luc.puro.FOLR1.OKT3 at an effector to target ratio of 8:1. The proliferation experiment pipeline was conducted as shown in FIGS. 62A-62B. These experiments were conducted in 96 well plates, wherein cells were treated with or without 200 units/mL IL-2 to activate dynabeads. For the manufacturing of TRAF variant CoStAR T cells, cells were transduced after two days, dynabeads were removed at day 5, and flow cytometry was then used to detect the expression of CoStAR at day 6 (FIG. 62A). Day 9-23 then followed 14 days of REP.

[0780] For the TRAF variant proliferation experiment, cells were given 200 units/mL IL-2 for three days, followed by one day of IL-2 starvation. On day 4, flow cytometry was again used to detect expression of CoStAR. Cells were co-cultured with Ba/f3.luc.puro.FOLR1.OKT3 at an effector to target ratio of 8:1 on day 5. On days 12, 19, and 26, proliferation was assessed (as “Days 7, 14, and 21” in the figures). In addition, supernatant was collected when changing media for cytokine MSD analysis and a short term 24 co-culture experiment was set up for cytokine MSD analysis.

[0781] The change in total cell number and fold-change in number across the T cells from three donors (HD 702C, HD 1004, and HD 2000) with and without IL-2 treatment is as shown in FIGS. 63A-66C.

[0782] CTP411 and CTP413 (TRAF6 variants) had increased proliferation with and without IL-2 for HD donor 702C in comparison to CD28−CD40 CoSTAR (CTP205) and CD28 CoStAR (CTP343) by day 21 of the co-culture. CTP410 (TRAF2 variant) had improved proliferation in the presence of IL-2 only in comparison to CD28−CD40 CoSTAR (CTP205) by day 21. CTP408 (TRAF2/3 variant), CTP409 & CTP410 (TRAF2 variant), CTP411, CTP412 (TRAF6 variants) and CTP421 had increased proliferation in comparison to CD28−CD40 CoSTAR (CTP205) and CD28 CoStAR (CTP343) when treated with IL-2 by day 7. CD28−CD40 CoStAR (CTP205) had the highest rate of proliferation for donor HD 1004 without IL-2. CD28−CD40 CoStAR (CTP205) had the highest rate of proliferation for donor HD 2000 with IL-2. CTP411 (TRAF 6 variant) had the highest rate of proliferation for donor HD 2000 without IL-2 in comparison to CD28−CD40 CoSTAR (CTP205) and CD28 CoStAR (CTP343).

### Example 18—Production of T-Cells Expressing CoStAR

[0783] MOV19 CoStAR contains the variable heavy (VH) and variable light (VL) chains of the anti-folate receptor antibody MOV19 (Figini et al. 1998 and CAA68252.1 and CAA68253.1). The heavy and light chains were joined with a codon optimised for human nucleotide sequence encoding a S(G4S)x3 serine-glycine linker region in the orientation of VH-VL, with addition of a codon optimised for human sequence for the OSM signal peptide. Following the VL region a codon optimised for human sequence encoding a AAA(GSG)x2 motif was included. The signalling domain consists of a fusion of codon optimised for human sequences for CD28 (NP_006130.1: residues 21-220) fused directly to CD40 (NP_001241.1: residues 216-277). Constructs were gene synthesised by GenScript and cloned into pSF.Lenti (Oxford Genetics).

[0784] Lentiviral production was performed using a three-plasmid packaging system by mixing 10 μg of each packaging plasmid, plus 10 μg of the pSF.Lenti lentiviral plasmid containing the transgene, together in serum free RPMI containing 50 mM CaCl₂. The mixture was added dropwise to a 50% confluent monolayer of 293T cells in 75 cm² flasks. The viral supernatants were collected at 48 and 72 h post transfection, pooled and concentrated using LentiPac lentiviral supernatant concentration (GeneCopoeia, Rockville, Md., USA) solution according to the manufacturer's instructions. Lentiviral supernatants titrated on Jurkat T cells and then used to directly infect primary human T cells at an MOI=5 in the presence of 4 μg/ml polybrene (Sigma-Aldrich). Human peripheral blood pan T-cells (StemCell Technologies) were activated for 24 hours with Dynabeads™ Human T-activator beads (Invitrogen) according to the manufacturer's instructions before addition of lentiviral supernatants.

[0785] Cell transduction was assessed 4 days post infection using FRα.hFc protein (Acro Biosystems) and anti-IgG-PE secondary (Sigma-Aldrich). Cells were then expanded further using ×10 donor mismatched irradiated PBMC feeders at a 1:200 ratio in RPMI+10% FCS with the addition of 30 ng/mL OKT3 and 200 IU/mL IL-2 After 14 days the cells were cryopreserved ready for assay. After thaw the cells were rested for 3 days and then starved for 24-48 h in the absence of Il-2 prior to assay set up. Cells were also stained for CoStAR expression 24 h prior to assay set up.

[0786] Functionality assays were performed by mixing CoStAR positive or negative cells with Ba/F3 cells expressing a membrane anchored OKT3 single chain antibody fragment. For proliferation assays 5×10⁴ T cells were mixed with 6,250 target cells (E:T 8:1) at day 0, in the preence and absence of exogenous IL-2 (200 IU/mL) and T cell counts made after 7 days. Additional Ba/F3 target cells were added at 8:1 at day 7, with multiple rounds of stimulation performed up to day 21. Coculture assays for cytokine secretion were set up with 5×10⁴ of T cells and targets (E:T=1:1) and supernatants collected after 20 h. Cytokine secretion (TNFα, IL-2 and IFNγ) was analysed using MSD multiplexed cytokine analysis (Mesoscale Discovery) according to the manufacturer's instructions.

[0787] Primary human T cells from three donors were engineered with a MOV19.CD28.CD40 CoStAR or variants thereof. These variants consisted of domains swap CoStARs in which the CD40 TRAF2, TRAF2/3 or TRAF6 domains were replaced with TRAF domains from other TRAF domain containing human proteins, using the constructs outlined in Table 17. Additional receptors were cloned which contained either TRAF domains in the TRAF2, 2/3 and 6 regions which were assigned randomly based on the TRAF consensus sequences, CD28 followed by just the TRAF2/3 binding domain flanked by 5 C- and N-terminal amino acids, or CD28 alone (lacking the entirety of the TRAF domain containing CD40 regions assigned here as MOV19.CD28 or ΔCD40). Additional mock transduced cells were included.

[0788] Following lentivirus addition and cell manufacturing transduction levels were analysed. FIG. 68 outlines the transduction levels for each receptor and each donor. CoStAR expression was normalized to the expression of the lowest transduction efficiency in each individual donor using excess mock transduced cells. By doing this we were able to start each donor at an equivalent transduction level to mitigate any effect that expression might have on overall performance. For donor 702C this was A2-6 at 30.4%, and for donors 1004 and 2000 this was the 2-2/3-6 variant at 27.3 and 42.6% respectively.

[0789] T cells were cocultured with Ba/F3-OKT3 cells at an E:T of 8:1 in the presence and absence of 200 IU/mL IL-2 and counts made at days 7, 14 and 21 in the presence and absence of exogenous IL-2. Fold change compared to base line was plotted for each donor and each receptor and also for all three donors combined. We found that swapping the TRAF6 domain did not dramatically impair the function of CoStAR compared to the wild-type receptor, and in some instances an enhancement in proliferation was observed, particularly at day 21 (FIGS. 69A-69F and 73A-73D). This effect was still observable in the absence of IL-2 but was less pronounced. Domain swaps within the TRAF2/3 domain were less well tolerated with a general reduction in proliferation seen across all three donors tested, particularly in the absence of exogenous IL-2 provision (FIGS. 70A-70F and 72A-72F). Similar results to the TRAF2/3 domain swaps were observed with the TRAF2 domain swaps, although generally the effect on proliferation was not as dramatic (FIGS. 71A-71F and 73A-73D). Finally addition of just the TRAF2/3 domain from CD40 to a basic CD28 CoStAR was not sufficient to mediate an enhancement in activity compared to the wild type receptor, and random TRAF domains based on consensus sequences were equally less efficient than the wildtype receptor and mediating T cell proliferation in the presence and absence of IL-2, particularly the latter (FIGS. 73A-73D and 74A-74D).

[0790] To better compare the performance of the receptors the day 21 fold change was plotted (FIGS. 75A-75B). The wild type MOV19.CD28.CD40 CoStAR as well as the three TRAF6 domain variant receptors (PQEINF-PEEMSW, PQEINF-PPENYE & PQEINF-PQENSY) significantly enhanced proliferation compared to mock transduced cells at day 21 in the presence of 11-2 (P=0.0443, 0.0045, 0.0053 & 0.0017 respectively by one-way ANOVA with post-hoc Tukey's test), with the TRAF6 variant PQENSY also demonstrating significantly enhanced proliferation compared to the A2-6 variant (P=0.0240). All other variants tested did not significantly enhance proliferation compared to mock transduced conditions. In the absence of Il-2 these trends were still observed, with the TRAF6 variants showing the best overall fold expansion along with the wild type receptor, and all TRAF2, TRAF2/3 and other TRAF variants showing little enhancement in expansion compared to mock transduced cells. Generally there was more inter-donor variability in the absence of IL-2 with all receptors tested.

### Example 19—Cytokine Production with T-Cells Expressing CoStAR

[0791] The inventors also assessed cytokine production from CoStAR variant T-cells. To this end, coculture experiments were set up between T cells and BA/F3.OKT3.FRα cells (providing signal 1 and 2). Supernatants were harvested after 20 hours and analysed for TNFα, IL-2 and IFNγ secretion by MSD (FIGS. 90A-90C). In general, wild type CD28.CD40 CoStAR+ cells induced greater cytokine production compared to mock transduced counterparts, and CoStAR containing CD28 alone (ΔCD40). The effect of the TRAF variantions was more variable but clearerst with IL-2 as a readout where variations to the TRAF2/3 domain (PVQE-TQEE, PVQE-SKEE and PVQE-AVEE) generally reduced IL-2 production compared to wild-type receptor, as did variants to the TRAF2 domain (SVQE-AVEE and SVQE-PEEE). Variations to the TRAF6 domain had more variable effects, but noticeably the PQEINF-PPENYE variant had a noticeable effect on increasing all three cytokines analysed compared to the wildtype receptor.

### Example 20—Cytokine Production with T-Cells Expressing CoStAR

[0792] Cells from three healthy donors (NBC360, NBC362, NBC361) were activated with Dynabeads and transduced (spinoculation, MOI 5) with CTP194-CTP200 or MOCK. The cells were then magnetically enriched for their CD34 expression, expanded following the rapid expansion protocol (REP) and froze down for subsequent experiments. After thaw, cells were rested for 3-4 days in complete RPMI supplemented with IL-2 and their transduction rate was determined looking at the CD34 marker gene expression. The viability and absolute count were assessed after overnight IL-2 starvation using DRAQ-7 (1:200) by flow cytometry (Novocyte) and data were analysed using the NovoExpress 1.5.0 software. Transduced T cells were cocultured in absence of IL-2 for 6-8 days with LoVo.OKT3.GFP tumor cells at 8:1 effector to target ratio, changing half of the culture medium every 3-4 days. LoVo.OKT3.GFP naturally expresses CEA and PD-L1 on their surface, conferring both signal 2 and signal 1 (OKT3) to the transduced T cells. After 6-8 days, the viability and absolute count were assessed, and live T cells were rechallenged for an additional week with fresh LoVo.OKT3.GFP tumor cells as described above. At the end of the long-term coculture, the viability and absolute count were measured, and the fold expansion was calculated (FIG. 91B), and IL-2 levels were assessed (FIG. 91A).

[0793] Having thus described in detail preferred embodiments of the present invention, it is to be understood that the invention defined by the above paragraphs is not to be limited to particular details set forth in the above description as many apparent variations thereof are possible without departing from the spirit or scope of the present invention.

The application's sequence listing, which the Patent Office published only in electronic form, follows.

SEQUENCE LISTING (42382 sequences)

SEQ ID NO: 1 - protein, 25 aa, synthetic construct
  REGION 1..25: note = Synthetic polypeptide
MGVLLTQRTLLSLVLALLFPSMASM

SEQ ID NO: 2 - protein, 21 aa, synthetic construct
  REGION 1..21: note = Synthetic polypeptide
MALPVTALLLPLALLLHAARP

SEQ ID NO: 3 - protein, 24 aa, synthetic construct
  REGION 1..24: note = Synthetic polypeptide
MSFPCKFVASFLLIFNVSSKGAVS

SEQ ID NO: 4 - protein, 20 aa, synthetic construct
  REGION 1..20: note = Synthetic polypeptide
MYRMQLLSCIALSLALVTNS

SEQ ID NO: 5 - protein, 17 aa, synthetic construct
  REGION 1..17: note = Synthetic polypeptide
MWLQSLLLLGTVACSIS

SEQ ID NO: 6 - protein, 20 aa, synthetic construct
  REGION 1..20: note = Synthetic polypeptide
MEAPAQLLFLLLLWLPDTTR

SEQ ID NO: 7 - protein, 25 aa, synthetic construct
  REGION 1..25: note = Synthetic polypeptide
MGVLLTQRTLLSLVLALLFPSMASM

SEQ ID NO: 8 - protein, 23 aa, synthetic construct
  REGION 1..23: note = Synthetic polypeptide
MQIPQAPWPVVWAVLQLGWRPGW

SEQ ID NO: 9 - protein, 244 aa, synthetic construct
  REGION 1..244: note = Synthetic polypeptide
QVQLQQSGAELVKPGASVKISCKASGYSFTGYFMNWVKQSHGKSLEWIGRIHPYDGDTFYNQNFKDKATLTVDKSSNTAHMELLSLTSEDFAVYYCTRYDGSRAMDYWGQGTTVTVSSGGGGSGGGGSGGGGSDIELTQSPASLAVSLGQRAIISCKASQSVSFAGTSLMHWYHQKPGQQPKLLIYRASNLEAGVPTRFSGSGSKTDFTLNIHPVEEEDAATYYCQQSREYPYTFGGGTKLEIK

SEQ ID NO: 10 - protein, 242 aa, synthetic construct
  REGION 1..242: note = Synthetic polypeptide
QVKLQQSGAELVRSGTSVKLSCTASGFNIKDSYMHWLRQGPEQGLEWIGWIDPENGDTEYAPKFQGKATFTTDTSSNTAYLQLSSLTSEDTAVYYCNEGTPTGPYYFDYWGQGTTVTVSSGGGGSGGGGSGGGGSENVLTQSPAIMSASPGEKVTITCSASSSVSYMHWFQQKPGTSPKLWIYSTSNLASGVPARFSGSGSGTSYSLTISRMEAEDAATYYCQQRSSYPLTFGAGTKLELKR

SEQ ID NO: 11 - protein, 242 aa, synthetic construct
  REGION 1..242: note = Synthetic polypeptide
QVQLQQSGAELVRSGTSVKLSCTASGFNIKDSYMHWLRQGPEQGLEWIGWIDPENGDTEYAPKFQGKATFTTDTSSNTAYLQLSSLTSEDTAVYYCNEGTPTGPYYFDYWGQGTTVTVSSGGGGSGGGGSGGGGSENVLTQSPAIMSASPGEKVTITCSASSSVSYMHWFQQKPGTSPKLWIYSTSNLASGVPARFSGSGSGTSYSLTISRMEAEDAATYYCQQRSSYPLTFGAGTKLELKR

SEQ ID NO: 12 - protein, 241 aa, synthetic construct
  REGION 1..241: note = Synthetic polypeptide
QVKLEQSGAEVVKPGASVKLSCKASGFNIKDSYMHWLRQGPGQRLEWIGWIDPENGDTEYAPKFQGKATFTTDTSANTAYLGLSSLRPEDTAVYYCNEGTPTGPYYFDYWGQGTLVTVSSGGGGSGGGGSGGGGSENVLTQSPSSMSASVGDRVNIACSASSSVSYMHWFQQKPGKSPKLWIYSTSNLASGVPSRFSGSGSGTDYSLTISSMQPEDAATYYCQQRSSYPLTFGGGTKLEIK

SEQ ID NO: 13 - protein, 246 aa, synthetic construct
  REGION 1..246: note = Synthetic polypeptide
QVQLVQSGAEVKKPGSSVKVSCKASGGTFSNSPINWLRQAPGQGLEWMGSIIPSFGTANYAQKFQGRLTITADESTSTAYMELSSLRSEDTAVYYCAGRSHNYELYYYYMDVWGQGTMVTVSSGGGGSGGGGSGGGGSDIQMTQSPSTLSASIGDRVTITCRASEGIYHWLAWYQQKPGKAPKLLIYKASSLASGAPSRFSGSGSGTDFTLTISSLQPDDFATYYCQQYSNYPLTFGGGTKLEIKR

SEQ ID NO: 14 - protein, 243 aa, synthetic construct
  REGION 1..243: note = Synthetic polypeptide
QLQESGPGLVRPSQTLSLTCTVSGFTISSGYSWHWVRQPPGRGLEWIGYIQYSGITNYNPSLKSRVTMLVDTSKNQFSLRLSSVTAADTAVYYCAREDYDYHWYFDVWGQGSLVTVSSGGGGSGGGGSGGGGSGVHSDIQMTQSPSSLSASVGDRVTITCSTSSSVSYMHWYQQKPGKAPKLLIYSTSNLASGVPSRFSGSGSGTDFTFTISSLQPEDIATYYCHQWSSYPTFGQGTKVEIKR

SEQ ID NO: 15 - protein, 247 aa, synthetic construct
  REGION 1..247: note = Synthetic polypeptide
EVQLVESGGGLVQPGGSLRLSCAASGFNIKDTYMHWVRQAPGKGLEWVARIDPANGNSKYADSVKGRFTISADTSKNTAYLQMNSLRAEDTAVYYCAPFGYYVSDYAMAYWGQGTLVTVSSGGGGSGGGGSGGGGSDIQLTQSPSSLSASVGDRVTITCRAGESVDIFGVGFLHWYQQKPGKAPKLLIYRASNLESGVPSRFSGSGSRTDFTLTISSLQPEDFATYYCQQTNEDPYTFGQGTKVEIK

SEQ ID NO: 16 - protein, 136 aa, synthetic construct
  REGION 1..136: note = Synthetic polypeptide
RPGWFLDSPDRPWNPPTFSPALLVVTEGDNATFTCSFSNTSESFVLNWYRMSPSNQTDKLAAFPEDRSQPGQDCRFRVTQLPNGRDFHMSVVRARRNDSGTYLCGAISLAPKAQIKESLRAELRVTERRAEVPTAH

SEQ ID NO: 17 - protein, 120 aa, synthetic construct
  REGION 1..120: note = Synthetic polypeptide
MMTGTIETTGNISAEKGGSIILQCHLSSTTAQVTQVNWEQQDQLLAICNADLGWHISPSFKDRVAPGPGLGLTLQSLTVNDTGEYFCIYHTYPDGTYTGRIFLEVLESSVAEHGARFQIP

SEQ ID NO: 18 - protein, 9 aa, synthetic construct
  REGION 1..9: note = Synthetic polypeptide
AAAGSGGSG

SEQ ID NO: 19 - protein, 159 aa, synthetic construct
  REGION 1..159: note = Synthetic polypeptide
ILVKQSPMLVAYDNAVNLSCKYSYNLFSREFRASLHKGLDSAVEVCVVYGNYSQQLQVYSKTGFNCDGKLGNESVTFYLQNLYVNQTDIYFCKIEVMYPPPYLDNEKSNGTIIHVKGKHLCPSPLFPGPSKPFWVLVVVGGVLACYSLLVTVAFIIFWV

SEQ ID NO: 20 - protein, 83 aa, synthetic construct
  REGION 1..83: note = Synthetic polypeptide
FVPVFLPAKPTTTPAPRPPTPAPTIASQPLSLRPEACRPAAGGAVHTRGLDFACDIYIWAPLAGTCGVLLLSLVITLYCNHRN

SEQ ID NO: 21 - protein, 27 aa, synthetic construct
  REGION 1..27: note = Synthetic polypeptide
FWVLVVVGGVLACYSLLVTVAFIIFWV

SEQ ID NO: 22 - protein, 39 aa, synthetic construct
  REGION 1..39: note = Synthetic polypeptide
CPSPLFPGPSKPFWVLVVVGGVLACYSLLVTVAFIIFWV

SEQ ID NO: 23 - protein, 48 aa, synthetic construct
  REGION 1..48: note = Synthetic polypeptide
IIHVKGKHLCPSPLFPGPSKPFWVLVVVGGVLACYSLLVTVAFIIFWV

SEQ ID NO: 24 - protein, 257 aa, synthetic construct
  REGION 1..257: note = Synthetic polypeptide
ESKYGPPCPSCPAPEFLGGPSVFLFPPKPKDTLMISRTPEVTCVVVDVSQEDPEVQFNWYVDGVEVHNAKTKPREEQFNSTYRVVSVLTVLHQDWLNGKEYKCKVSNKGLPSSIEKTISKAKGQPREPQVYTLPPSQEEMTKNQVSLTCLVKGFYPSDIAVEWESNGQPENNYKTTPPVLDSDGSFFLYSRLTVDKSRWQEGNVFSCSVMHEALHNHYTQKSLSLSLGKMFWVLVVVGGVLACYSLLVTVAFIIFWV

SEQ ID NO: 25 - protein, 41 aa, synthetic construct
  REGION 1..41: note = Synthetic polypeptide
RSKRSRLLHSDYMNMTPRRPGPTRKHYQPYAPPRDFAAYRS

SEQ ID NO: 26 - protein, 46 aa, synthetic construct
  REGION 1..46: note = Synthetic polypeptide
RFSVVKRGRKKLLYIFKQPFMRPVQTTQEEDGCSCRFPEEEEGGCE

SEQ ID NO: 27 - protein, 37 aa, synthetic construct
  REGION 1..37: note = Synthetic polypeptide
RRDQRLPPDAHKPPGGGSFRTPIQEEQADAHSTLAKI

SEQ ID NO: 28 - protein, 116 aa, synthetic construct
  REGION 1..116: note = Synthetic polypeptide
KRKKQRSRRNDEELETRAHRVATEERGRKPHQIPASTPQNPATSQHPPPPPGHRSQAPSHRPPPPGHRVQHQPQKRPPAPSGTQVHQQKGPPLPRPRVQPKPPHGAAENSLSPSSN

SEQ ID NO: 29 - protein, 58 aa, synthetic construct
  REGION 1..58: note = Synthetic polypeptide
QLGLHIWQLRSQCMWPRETQLLLEVPPSTEDARSCQFPEEERGERSAEEKGRLGDLWV

SEQ ID NO: 30 - protein, 47 aa, synthetic construct
  REGION 1..47: note = Synthetic polypeptide
KLLMIIHDRREFAKFEKEKMNAKWDTGENPIYKSAVTTVVNPKYEGK

SEQ ID NO: 31 - protein, 75 aa, synthetic construct
  REGION 1..75: note = Synthetic polypeptide
RRRGKTNHYQTTVEKKSLTIYAQVQKPGPLQKKLDSFPAQDPCTTIYVAATEPVPESVQETNSITVYASVTLPES

SEQ ID NO: 32 - protein, 62 aa, synthetic construct
  REGION 1..62: note = Synthetic polypeptide
KKVAKKPTNKAPHPKQEPQEINFPDDLPGSNTAAPVQETLHGCQPVTQEDGKESRISVQERQ

SEQ ID NO: 33 - protein, 125 aa, synthetic construct
  REGION 1..125: note = Synthetic polypeptide
AKKPTNKAPHPKQEPQEINFPDDLPGSNTAAPVQETLHGCQPVTQEDGKESRISVQERQKKVAKKPTNKAPHPKQEPQEINFPDDLPGSNTAAPVQETLHGCQPVTQEDGKESRISVQERQKKVA

SEQ ID NO: 34 - protein, 62 aa, synthetic construct
  REGION 1..62: note = Synthetic polypeptide
KKVAKKPTNKAAHPKQEPQEINFPDDLPGSNTAAPVQETLHGCQPVTQEDGKESRISVQERQ

SEQ ID NO: 35 - protein, 8 aa, synthetic construct
  REGION 1..8: note = Synthetic polypeptide
KPTNKAPH

SEQ ID NO: 36 - protein, 4 aa, synthetic construct
  REGION 1..4: note = Synthetic polypeptide
PKQE

SEQ ID NO: 37 - protein, 4 aa, synthetic construct
  REGION 1..4: note = Synthetic polypeptide
PVQE

SEQ ID NO: 38 - protein, 4 aa, synthetic construct
  REGION 1..4: note = Synthetic polypeptide
SVQE

SEQ ID NO: 39 - protein, 9 aa, synthetic construct
  REGION 1..9: note = Synthetic polypeptide
QEPQEINFP

SEQ ID NO: 40 - protein, 7 aa, synthetic construct
  REGION 1..7: note = Synthetic polypeptide
KKPTNKA

SEQ ID NO: 41 - protein, 7 aa, synthetic construct
  REGION 1..7: note = Synthetic polypeptide
SRISVQE

SEQ ID NO: 42 - protein, 538 aa, synthetic construct
  REGION 1..538: note = Synthetic polypeptide
MGVLLTQRTLLSLVLALLFPSMASMQVKLQQSGAELVRSGTSVKLSCTASGFNIKDSYMHWLRQGPEQGLEWIGWIDPENGDTEYAPKFQGKATFTTDTSSNTAYLQLSSLTSEDTAVYYCNEGTPTGPYYFDYWGQGTTVTVSSGGGGSGGGGSGGGGSENVLTQSPAIMSASPGEKVTITCSASSSVSYMHWFQQKPGTSPKLWIYSTSNLASGVPARFSGSGSGTSYSLTISRMEAEDAATYYCQQRSSYPLTFGAGTKLELKRAAAGSGGSGILVKQSPMLVAYDNAVNLSCKYSYNLFSREFRASLHKGLDSAVEVCVVYGNYSQQLQVYSKTGFNCDGKLGNESVTFYLQNLYVNQTDIYFCKIEVMYPPPYLDNEKSNGTIIHVKGKHLCPSPLFPGPSKPFWVLVVVGGVLACYSLLVTVAFIIFWVRSKRSRLLHSDYMNMTPRRPGPTRKHYQPYAPPRDFAAYRSKKVAKKPTNKAPHPKQEPQEINFPDDLPGSNTAAPVQETLHGCQPVTQEDGKESRISVQERQ

SEQ ID NO: 43 - protein, 534 aa, synthetic construct
  REGION 1..534: note = Synthetic polypeptide
MALPVTALLLPLALLLHAARPQVKLQQSGAELVRSGTSVKLSCTASGFNIKDSYMHWLRQGPEQGLEWIGWIDPENGDTEYAPKFQGKATFTTDTSSNTAYLQLSSLTSEDTAVYYCNEGTPTGPYYFDYWGQGTTVTVSSGGGGSGGGGSGGGGSENVLTQSPAIMSASPGEKVTITCSASSSVSYMHWFQQKPGTSPKLWIYSTSNLASGVPARFSGSGSGTSYSLTISRMEAEDAATYYCQQRSSYPLTFGAGTKLELKRAAAGSGGSGILVKQSPMLVAYDNAVNLSCKYSYNLFSREFRASLHKGLDSAVEVCVVYGNYSQQLQVYSKTGFNCDGKLGNESVTFYLQNLYVNQTDIYFCKIEVMYPPPYLDNEKSNGTIIHVKGKHLCPSPLFPGPSKPFWVLVVVGGVLACYSLLVTVAFIIFWVRSKRSRLLHSDYMNMTPRRPGPTRKHYQPYAPPRDFAAYRSKKVAKKPTNKAPHPKQEPQEINFPDDLPGSNTAAPVQETLHGCQPVTQEDGKESRISVQERQ

SEQ ID NO: 44 - protein, 537 aa, synthetic construct
  REGION 1..537: note = Synthetic polypeptide
MSFPCKFVASFLLIFNVSSKGAVSQVKLQQSGAELVRSGTSVKLSCTASGFNIKDSYMHWLRQGPEQGLEWIGWIDPENGDTEYAPKFQGKATFTTDTSSNTAYLQLSSLTSEDTAVYYCNEGTPTGPYYFDYWGQGTTVTVSSGGGGSGGGGSGGGGSENVLTQSPAIMSASPGEKVTITCSASSSVSYMHWFQQKPGTSPKLWIYSTSNLASGVPARFSGSGSGTSYSLTISRMEAEDAATYYCQQRSSYPLTFGAGTKLELKRAAAGSGGSGILVKQSPMLVAYDNAVNLSCKYSYNLFSREFRASLHKGLDSAVEVCVVYGNYSQQLQVYSKTGFNCDGKLGNESVTFYLQNLYVNQTDIYFCKIEVMYPPPYLDNEKSNGTIIHVKGKHLCPSPLFPGPSKPFWVLVVVGGVLACYSLLVTVAFIIFWVRSKRSRLLHSDYMNMTPRRPGPTRKHYQPYAPPRDFAAYRSKKVAKKPTNKAPHPKQEPQEINFPDDLPGSNTAAPVQETLHGCQPVTQEDGKESRISVQERQ

SEQ ID NO: 45 - protein, 533 aa, synthetic construct
  REGION 1..533: note = Synthetic polypeptide
MYRMQLLSCIALSLALVTNSQVKLQQSGAELVRSGTSVKLSCTASGFNIKDSYMHWLRQGPEQGLEWIGWIDPENGDTEYAPKFQGKATFTTDTSSNTAYLQLSSLTSEDTAVYYCNEGTPTGPYYFDYWGQGTTVTVSSGGGGSGGGGSGGGGSENVLTQSPAIMSASPGEKVTITCSASSSVSYMHWFQQKPGTSPKLWIYSTSNLASGVPARFSGSGSGTSYSLTISRMEAEDAATYYCQQRSSYPLTFGAGTKLELKRAAAGSGGSGILVKQSPMLVAYDNAVNLSCKYSYNLFSREFRASLHKGLDSAVEVCVVYGNYSQQLQVYSKTGFNCDGKLGNESVTFYLQNLYVNQTDIYFCKIEVMYPPPYLDNEKSNGTIIHVKGKHLCPSPLFPGPSKPFWVLVVVGGVLACYSLLVTVAFIIFWVRSKRSRLLHSDYMNMTPRRPGPTRKHYQPYAPPRDFAAYRSKKVAKKPTNKAPHPKQEPQEINFPDDLPGSNTAAPVQETLHGCQPVTQEDGKESRISVQERQ

SEQ ID NO: 46 - protein, 530 aa, synthetic construct
  REGION 1..530: note = Synthetic polypeptide
MWLQSLLLLGTVACSISQVKLQQSGAELVRSGTSVKLSCTASGFNIKDSYMHWLRQGPEQGLEWIGWIDPENGDTEYAPKFQGKATFTTDTSSNTAYLQLSSLTSEDTAVYYCNEGTPTGPYYFDYWGQGTTVTVSSGGGGSGGGGSGGGGSENVLTQSPAIMSASPGEKVTITCSASSSVSYMHWFQQKPGTSPKLWIYSTSNLASGVPARFSGSGSGTSYSLTISRMEAEDAATYYCQQRSSYPLTFGAGTKLELKRAAAGSGGSGILVKQSPMLVAYDNAVNLSCKYSYNLFSREFRASLHKGLDSAVEVCVVYGNYSQQLQVYSKTGFNCDGKLGNESVTFYLQNLYVNQTDIYFCKIEVMYPPPYLDNEKSNGTIIHVKGKHLCPSPLFPGPSKPFWVLVVVGGVLACYSLLVTVAFIIFWVRSKRSRLLHSDYMNMTPRRPGPTRKHYQPYAPPRDFAAYRSKKVAKKPTNKAPHPKQEPQEINFPDDLPGSNTAAPVQETLHGCQPVTQEDGKESRISVQERQ

SEQ ID NO: 47 - protein, 533 aa, synthetic construct
  REGION 1..533: note = Synthetic polypeptide
MEAPAQLLFLLLLWLPDTTRQVKLQQSGAELVRSGTSVKLSCTASGFNIKDSYMHWLRQGPEQGLEWIGWIDPENGDTEYAPKFQGKATFTTDTSSNTAYLQLSSLTSEDTAVYYCNEGTPTGPYYFDYWGQGTTVTVSSGGGGSGGGGSGGGGSENVLTQSPAIMSASPGEKVTITCSASSSVSYMHWFQQKPGTSPKLWIYSTSNLASGVPARFSGSGSGTSYSLTISRMEAEDAATYYCQQRSSYPLTFGAGTKLELKRAAAGSGGSGILVKQSPMLVAYDNAVNLSCKYSYNLFSREFRASLHKGLDSAVEVCVVYGNYSQQLQVYSKTGFNCDGKLGNESVTFYLQNLYVNQTDIYFCKIEVMYPPPYLDNEKSNGTIIHVKGKHLCPSPLFPGPSKPFWVLVVVGGVLACYSLLVTVAFIIFWVRSKRSRLLHSDYMNMTPRRPGPTRKHYQPYAPPRDFAAYRSKKVAKKPTNKAPHPKQEPQEINFPDDLPGSNTAAPVQETLHGCQPVTQEDGKESRISVQERQ

SEQ ID NO: 48 - protein, 462 aa, synthetic construct
  REGION 1..462: note = Synthetic polypeptide
MGVLLTQRTLLSLVLALLFPSMASMQVKLQQSGAELVRSGTSVKLSCTASGFNIKDSYMHWLRQGPEQGLEWIGWIDPENGDTEYAPKFQGKATFTTDTSSNTAYLQLSSLTSEDTAVYYCNEGTPTGPYYFDYWGQGTTVTVSSGGGGSGGGGSGGGGSENVLTQSPAIMSASPGEKVTITCSASSSVSYMHWFQQKPGTSPKLWIYSTSNLASGVPARFSGSGSGTSYSLTISRMEAEDAATYYCQQRSSYPLTFGAGTKLELKRAAAGSGGSGFVPVFLPAKPTTTPAPRPPTPAPTIASQPLSLRPEACRPAAGGAVHTRGLDFACDIYIWAPLAGTCGVLLLSLVITLYCNHRNRSKRSRLLHSDYMNMTPRRPGPTRKHYQPYAPPRDFAAYRSKKVAKKPTNKAPHPKQEPQEINFPDDLPGSNTAAPVQETLHGCQPVTQEDGKESRISVQERQ

SEQ ID NO: 49 - protein, 458 aa, synthetic construct
  REGION 1..458: note = Synthetic polypeptide
MALPVTALLLPLALLLHAARPQVKLQQSGAELVRSGTSVKLSCTASGFNIKDSYMHWLRQGPEQGLEWIGWIDPENGDTEYAPKFQGKATFTTDTSSNTAYLQLSSLTSEDTAVYYCNEGTPTGPYYFDYWGQGTTVTVSSGGGGSGGGGSGGGGSENVLTQSPAIMSASPGEKVTITCSASSSVSYMHWFQQKPGTSPKLWIYSTSNLASGVPARFSGSGSGTSYSLTISRMEAEDAATYYCQQRSSYPLTFGAGTKLELKRAAAGSGGSGFVPVFLPAKPTTTPAPRPPTPAPTIASQPLSLRPEACRPAAGGAVHTRGLDFACDIYIWAPLAGTCGVLLLSLVITLYCNHRNRSKRSRLLHSDYMNMTPRRPGPTRKHYQPYAPPRDFAAYRSKKVAKKPTNKAPHPKQEPQEINFPDDLPGSNTAAPVQETLHGCQPVTQEDGKESRISVQERQ

SEQ ID NO: 50 - protein, 461 aa, synthetic construct
  REGION 1..461: note = Synthetic polypeptide
MSFPCKFVASFLLIFNVSSKGAVSQVKLQQSGAELVRSGTSVKLSCTASGFNIKDSYMHWLRQGPEQGLEWIGWIDPENGDTEYAPKFQGKATFTTDTSSNTAYLQLSSLTSEDTAVYYCNEGTPTGPYYFDYWGQGTTVTVSSGGGGSGGGGSGGGGSENVLTQSPAIMSASPGEKVTITCSASSSVSYMHWFQQKPGTSPKLWIYSTSNLASGVPARFSGSGSGTSYSLTISRMEAEDAATYYCQQRSSYPLTFGAGTKLELKRAAAGSGGSGFVPVFLPAKPTTTPAPRPPTPAPTIASQPLSLRPEACRPAAGGAVHTRGLDFACDIYIWAPLAGTCGVLLLSLVITLYCNHRNRSKRSRLLHSDYMNMTPRRPGPTRKHYQPYAPPRDFAAYRSKKVAKKPTNKAPHPKQEPQEINFPDDLPGSNTAAPVQETLHGCQPVTQEDGKESRISVQERQ

SEQ ID NO: 51 - protein, 457 aa, synthetic construct
  REGION 1..457: note = Synthetic polypeptide
MYRMQLLSCIALSLALVTNSQVKLQQSGAELVRSGTSVKLSCTASGFNIKDSYMHWLRQGPEQGLEWIGWIDPENGDTEYAPKFQGKATFTTDTSSNTAYLQLSSLTSEDTAVYYCNEGTPTGPYYFDYWGQGTTVTVSSGGGGSGGGGSGGGGSENVLTQSPAIMSASPGEKVTITCSASSSVSYMHWFQQKPGTSPKLWIYSTSNLASGVPARFSGSGSGTSYSLTISRMEAEDAATYYCQQRSSYPLTFGAGTKLELKRAAAGSGGSGFVPVFLPAKPTTTPAPRPPTPAPTIASQPLSLRPEACRPAAGGAVHTRGLDFACDIYIWAPLAGTCGVLLLSLVITLYCNHRNRSKRSRLLHSDYMNMTPRRPGPTRKHYQPYAPPRDFAAYRSKKVAKKPTNKAPHPKQEPQEINFPDDLPGSNTAAPVQETLHGCQPVTQEDGKESRISVQERQ

SEQ ID NO: 52 - protein, 454 aa, synthetic construct
  REGION 1..454: note = Synthetic polypeptide
MWLQSLLLLGTVACSISQVKLQQSGAELVRSGTSVKLSCTASGFNIKDSYMHWLRQGPEQGLEWIGWIDPENGDTEYAPKFQGKATFTTDTSSNTAYLQLSSLTSEDTAVYYCNEGTPTGPYYFDYWGQGTTVTVSSGGGGSGGGGSGGGGSENVLTQSPAIMSASPGEKVTITCSASSSVSYMHWFQQKPGTSPKLWIYSTSNLASGVPARFSGSGSGTSYSLTISRMEAEDAATYYCQQRSSYPLTFGAGTKLELKRAAAGSGGSGFVPVFLPAKPTTTPAPRPPTPAPTIASQPLSLRPEACRPAAGGAVHTRGLDFACDIYIWAPLAGTCGVLLLSLVITLYCNHRNRSKRSRLLHSDYMNMTPRRPGPTRKHYQPYAPPRDFAAYRSKKVAKKPTNKAPHPKQEPQEINFPDDLPGSNTAAPVQETLHGCQPVTQEDGKESRISVQERQ

SEQ ID NO: 53 - protein, 457 aa, synthetic construct
  REGION 1..457: note = Synthetic polypeptide
MEAPAQLLFLLLLWLPDTTRQVKLQQSGAELVRSGTSVKLSCTASGFNIKDSYMHWLRQGPEQGLEWIGWIDPENGDTEYAPKFQGKATFTTDTSSNTAYLQLSSLTSEDTAVYYCNEGTPTGPYYFDYWGQGTTVTVSSGGGGSGGGGSGGGGSENVLTQSPAIMSASPGEKVTITCSASSSVSYMHWFQQKPGTSPKLWIYSTSNLASGVPARFSGSGSGTSYSLTISRMEAEDAATYYCQQRSSYPLTFGAGTKLELKRAAAGSGGSGFVPVFLPAKPTTTPAPRPPTPAPTIASQPLSLRPEACRPAAGGAVHTRGLDFACDIYIWAPLAGTCGVLLLSLVITLYCNHRNRSKRSRLLHSDYMNMTPRRPGPTRKHYQPYAPPRDFAAYRSKKVAKKPTNKAPHPKQEPQEINFPDDLPGSNTAAPVQETLHGCQPVTQEDGKESRISVQERQ

SEQ ID NO: 54 - protein, 406 aa, synthetic construct
  REGION 1..406: note = Synthetic polypeptide
MGVLLTQRTLLSLVLALLFPSMASMQVKLQQSGAELVRSGTSVKLSCTASGFNIKDSYMHWLRQGPEQGLEWIGWIDPENGDTEYAPKFQGKATFTTDTSSNTAYLQLSSLTSEDTAVYYCNEGTPTGPYYFDYWGQGTTVTVSSGGGGSGGGGSGGGGSENVLTQSPAIMSASPGEKVTITCSASSSVSYMHWFQQKPGTSPKLWIYSTSNLASGVPARFSGSGSGTSYSLTISRMEAEDAATYYCQQRSSYPLTFGAGTKLELKRAAAGSGGSGFWVLVVVGGVLACYSLLVTVAFIIFWVRSKRSRLLHSDYMNMTPRRPGPTRKHYQPYAPPRDFAAYRSKKVAKKPTNKAPHPKQEPQEINFPDDLPGSNTAAPVQETLHGCQPVTQEDGKESRISVQERQ

SEQ ID NO: 55 - protein, 402 aa, synthetic construct
  REGION 1..402: note = Synthetic polypeptide
MALPVTALLLPLALLLHAARPQVKLQQSGAELVRSGTSVKLSCTASGFNIKDSYMHWLRQGPEQGLEWIGWIDPENGDTEYAPKFQGKATFTTDTSSNTAYLQLSSLTSEDTAVYYCNEGTPTGPYYFDYWGQGTTVTVSSGGGGSGGGGSGGGGSENVLTQSPAIMSASPGEKVTITCSASSSVSYMHWFQQKPGTSPKLWIYSTSNLASGVPARFSGSGSGTSYSLTISRMEAEDAATYYCQQRSSYPLTFGAGTKLELKRAAAGSGGSGFWVLVVVGGVLACYSLLVTVAFIIFWVRSKRSRLLHSDYMNMTPRRPGPTRKHYQPYAPPRDFAAYRSKKVAKKPTNKAPHPKQEPQEINFPDDLPGSNTAAPVQETLHGCQPVTQEDGKESRISVQERQ

SEQ ID NO: 56 - protein, 405 aa, synthetic construct
  REGION 1..405: note = Synthetic polypeptide
MSFPCKFVASFLLIFNVSSKGAVSQVKLQQSGAELVRSGTSVKLSCTASGFNIKDSYMHWLRQGPEQGLEWIGWIDPENGDTEYAPKFQGKATFTTDTSSNTAYLQLSSLTSEDTAVYYCNEGTPTGPYYFDYWGQGTTVTVSSGGGGSGGGGSGGGGSENVLTQSPAIMSASPGEKVTITCSASSSVSYMHWFQQKPGTSPKLWIYSTSNLASGVPARFSGSGSGTSYSLTISRMEAEDAATYYCQQRSSYPLTFGAGTKLELKRAAAGSGGSGFWVLVVVGGVLACYSLLVTVAFIIFWVRSKRSRLLHSDYMNMTPRRPGPTRKHYQPYAPPRDFAAYRSKKVAKKPTNKAPHPKQEPQEINFPDDLPGSNTAAPVQETLHGCQPVTQEDGKESRISVQERQ

SEQ ID NO: 57 - protein, 401 aa, synthetic construct
  REGION 1..401: note = Synthetic polypeptide
MYRMQLLSCIALSLALVTNSQVKLQQSGAELVRSGTSVKLSCTASGFNIKDSYMHWLRQGPEQGLEWIGWIDPENGDTEYAPKFQGKATFTTDTSSNTAYLQLSSLTSEDTAVYYCNEGTPTGPYYFDYWGQGTTVTVSSGGGGSGGGGSGGGGSENVLTQSPAIMSASPGEKVTITCSASSSVSYMHWFQQKPGTSPKLWIYSTSNLASGVPARFSGSGSGTSYSLTISRMEAEDAATYYCQQRSSYPLTFGAGTKLELKRAAAGSGGSGFWVLVVVGGVLACYSLLVTVAFIIFWVRSKRSRLLHSDYMNMTPRRPGPTRKHYQPYAPPRDFAAYRSKKVAKKPTNKAPHPKQEPQEINFPDDLPGSNTAAPVQETLHGCQPVTQEDGKESRISVQERQ

SEQ ID NO: 58 - protein, 398 aa, synthetic construct
  REGION 1..398: note = Synthetic polypeptide
MWLQSLLLLGTVACSISQVKLQQSGAELVRSGTSVKLSCTASGFNIKDSYMHWLRQGPEQGLEWIGWIDPENGDTEYAPKFQGKATFTTDTSSNTAYLQLSSLTSEDTAVYYCNEGTPTGPYYFDYWGQGTTVTVSSGGGGSGGGGSGGGGSENVLTQSPAIMSASPGEKVTITCSASSSVSYMHWFQQKPGTSPKLWIYSTSNLASGVPARFSGSGSGTSYSLTISRMEAEDAATYYCQQRSSYPLTFGAGTKLELKRAAAGSGGSGFWVLVVVGGVLACYSLLVTVAFIIFWVRSKRSRLLHSDYMNMTPRRPGPTRKHYQPYAPPRDFAAYRSKKVAKKPTNKAPHPKQEPQEINFPDDLPGSNTAAPVQETLHGCQPVTQEDGKESRISVQERQ

SEQ ID NO: 59 - protein, 401 aa, synthetic construct
  REGION 1..401: note = Synthetic polypeptide
MEAPAQLLFLLLLWLPDTTRQVKLQQSGAELVRSGTSVKLSCTASGFNIKDSYMHWLRQGPEQGLEWIGWIDPENGDTEYAPKFQGKATFTTDTSSNTAYLQLSSLTSEDTAVYYCNEGTPTGPYYFDYWGQGTTVTVSSGGGGSGGGGSGGGGSENVLTQSPAIMSASPGEKVTITCSASSSVSYMHWFQQKPGTSPKLWIYSTSNLASGVPARFSGSGSGTSYSLTISRMEAEDAATYYCQQRSSYPLTFGAGTKLELKRAAAGSGGSGFWVLVVVGGVLACYSLLVTVAFIIFWVRSKRSRLLHSDYMNMTPRRPGPTRKHYQPYAPPRDFAAYRSKKVAKKPTNKAPHPKQEPQEINFPDDLPGSNTAAPVQETLHGCQPVTQEDGKESRISVQERQ

SEQ ID NO: 60 - protein, 538 aa, synthetic construct
  REGION 1..538: note = Synthetic polypeptide
MGVLLTQRTLLSLVLALLFPSMASMQVQLQQSGAELVRSGTSVKLSCTASGFNIKDSYMHWLRQGPEQGLEWIGWIDPENGDTEYAPKFQGKATFTTDTSSNTAYLQLSSLTSEDTAVYYCNEGTPTGPYYFDYWGQGTTVTVSSGGGGSGGGGSGGGGSENVLTQSPAIMSASPGEKVTITCSASSSVSYMHWFQQKPGTSPKLWIYSTSNLASGVPARFSGSGSGTSYSLTISRMEAEDAATYYCQQRSSYPLTFGAGTKLELKRAAAGSGGSGILVKQSPMLVAYDNAVNLSCKYSYNLFSREFRASLHKGLDSAVEVCVVYGNYSQQLQVYSKTGFNCDGKLGNESVTFYLQNLYVNQTDIYFCKIEVMYPPPYLDNEKSNGTIIHVKGKHLCPSPLFPGPSKPFWVLVVVGGVLACYSLLVTVAFIIFWVRSKRSRLLHSDYMNMTPRRPGPTRKHYQPYAPPRDFAAYRSKKVAKKPTNKAPHPKQEPQEINFPDDLPGSNTAAPVQETLHGCQPVTQEDGKESRISVQERQ

SEQ ID NO: 61 - protein, 534 aa, synthetic construct
  REGION 1..534: note = Synthetic polypeptide
MALPVTALLLPLALLLHAARPQVQLQQSGAELVRSGTSVKLSCTASGFNIKDSYMHWLRQGPEQGLEWIGWIDPENGDTEYAPKFQGKATFTTDTSSNTAYLQLSSLTSEDTAVYYCNEGTPTGPYYFDYWGQGTTVTVSSGGGGSGGGGSGGGGSENVLTQSPAIMSASPGEKVTITCSASSSVSYMHWFQQKPGTSPKLWIYSTSNLASGVPARFSGSGSGTSYSLTISRMEAEDAATYYCQQRSSYPLTFGAGTKLELKRAAAGSGGSGILVKQSPMLVAYDNAVNLSCKYSYNLFSREFRASLHKGLDSAVEVCVVYGNYSQQLQVYSKTGFNCDGKLGNESVTFYLQNLYVNQTDIYFCKIEVMYPPPYLDNEKSNGTIIHVKGKHLCPSPLFPGPSKPFWVLVVVGGVLACYSLLVTVAFIIFWVRSKRSRLLHSDYMNMTPRRPGPTRKHYQPYAPPRDFAAYRSKKVAKKPTNKAPHPKQEPQEINFPDDLPGSNTAAPVQETLHGCQPVTQEDGKESRISVQERQ

SEQ ID NO: 62 - protein, 537 aa, synthetic construct
  REGION 1..537: note = Synthetic polypeptide
MSFPCKFVASFLLIFNVSSKGAVSQVQLQQSGAELVRSGTSVKLSCTASGFNIKDSYMHWLRQGPEQGLEWIGWIDPENGDTEYAPKFQGKATFTTDTSSNTAYLQLSSLTSEDTAVYYCNEGTPTGPYYFDYWGQGTTVTVSSGGGGSGGGGSGGGGSENVLTQSPAIMSASPGEKVTITCSASSSVSYMHWFQQKPGTSPKLWIYSTSNLASGVPARFSGSGSGTSYSLTISRMEAEDAATYYCQQRSSYPLTFGAGTKLELKRAAAGSGGSGILVKQSPMLVAYDNAVNLSCKYSYNLFSREFRASLHKGLDSAVEVCVVYGNYSQQLQVYSKTGFNCDGKLGNESVTFYLQNLYVNQTDIYFCKIEVMYPPPYLDNEKSNGTIIHVKGKHLCPSPLFPGPSKPFWVLVVVGGVLACYSLLVTVAFIIFWVRSKRSRLLHSDYMNMTPRRPGPTRKHYQPYAPPRDFAAYRSKKVAKKPTNKAPHPKQEPQEINFPDDLPGSNTAAPVQETLHGCQPVTQEDGKESRISVQERQ

SEQ ID NO: 63 - protein, 533 aa, synthetic construct
  REGION 1..533: note = Synthetic polypeptide
MYRMQLLSCIALSLALVTNSQVQLQQSGAELVRSGTSVKLSCTASGFNIKDSYMHWLRQGPEQGLEWIGWIDPENGDTEYAPKFQGKATFTTDTSSNTAYLQLSSLTSEDTAVYYCNEGTPTGPYYFDYWGQGTTVTVSSGGGGSGGGGSGGGGSENVLTQSPAIMSASPGEKVTITCSASSSVSYMHWFQQKPGTSPKLWIYSTSNLASGVPARFSGSGSGTSYSLTISRMEAEDAATYYCQQRSSYPLTFGAGTKLELKRAAAGSGGSGILVKQSPMLVAYDNAVNLSCKYSYNLFSREFRASLHKGLDSAVEVCVVYGNYSQQLQVYSKTGFNCDGKLGNESVTFYLQNLYVNQTDIYFCKIEVMYPPPYLDNEKSNGTIIHVKGKHLCPSPLFPGPSKPFWVLVVVGGVLACYSLLVTVAFIIFWVRSKRSRLLHSDYMNMTPRRPGPTRKHYQPYAPPRDFAAYRSKKVAKKPTNKAPHPKQEPQEINFPDDLPGSNTAAPVQETLHGCQPVTQEDGKESRISVQERQ

SEQ ID NO: 64 - protein, 530 aa, synthetic construct
  REGION 1..530: note = Synthetic polypeptide
MWLQSLLLLGTVACSISQVQLQQSGAELVRSGTSVKLSCTASGFNIKDSYMHWLRQGPEQGLEWIGWIDPENGDTEYAPKFQGKATFTTDTSSNTAYLQLSSLTSEDTAVYYCNEGTPTGPYYFDYWGQGTTVTVSSGGGGSGGGGSGGGGSENVLTQSPAIMSASPGEKVTITCSASSSVSYMHWFQQKPGTSPKLWIYSTSNLASGVPARFSGSGSGTSYSLTISRMEAEDAATYYCQQRSSYPLTFGAGTKLELKRAAAGSGGSGILVKQSPMLVAYDNAVNLSCKYSYNLFSREFRASLHKGLDSAVEVCVVYGNYSQQLQVYSKTGFNCDGKLGNESVTFYLQNLYVNQTDIYFCKIEVMYPPPYLDNEKSNGTIIHVKGKHLCPSPLFPGPSKPFWVLVVVGGVLACYSLLVTVAFIIFWVRSKRSRLLHSDYMNMTPRRPGPTRKHYQPYAPPRDFAAYRSKKVAKKPTNKAPHPKQEPQEINFPDDLPGSNTAAPVQETLHGCQPVTQEDGKESRISVQERQ

SEQ ID NO: 65 - protein, 533 aa, synthetic construct
  REGION 1..533: note = Synthetic polypeptide
MEAPAQLLFLLLLWLPDTTRQVQLQQSGAELVRSGTSVKLSCTASGFNIKDSYMHWLRQGPEQGLEWIGWIDPENGDTEYAPKFQGKATFTTDTSSNTAYLQLSSLTSEDTAVYYCNEGTPTGPYYFDYWGQGTTVTVSSGGGGSGGGGSGGGGSENVLTQSPAIMSASPGEKVTITCSASSSVSYMHWFQQKPGTSPKLWIYSTSNLASGVPARFSGSGSGTSYSLTISRMEAEDAATYYCQQRSSYPLTFGAGTKLELKRAAAGSGGSGILVKQSPMLVAYDNAVNLSCKYSYNLFSREFRASLHKGLDSAVEVCVVYGNYSQQLQVYSKTGFNCDGKLGNESVTFYLQNLYVNQTDIYFCKIEVMYPPPYLDNEKSNGTIIHVKGKHLCPSPLFPGPSKPFWVLVVVGGVLACYSLLVTVAFIIFWVRSKRSRLLHSDYMNMTPRRPGPTRKHYQPYAPPRDFAAYRSKKVAKKPTNKAPHPKQEPQEINFPDDLPGSNTAAPVQETLHGCQPVTQEDGKESRISVQERQ

SEQ ID NO: 66 - protein, 462 aa, synthetic construct
  REGION 1..462: note = Synthetic polypeptide
MGVLLTQRTLLSLVLALLFPSMASMQVQLQQSGAELVRSGTSVKLSCTASGFNIKDSYMHWLRQGPEQGLEWIGWIDPENGDTEYAPKFQGKATFTTDTSSNTAYLQLSSLTSEDTAVYYCNEGTPTGPYYFDYWGQGTTVTVSSGGGGSGGGGSGGGGSENVLTQSPAIMSASPGEKVTITCSASSSVSYMHWFQQKPGTSPKLWIYSTSNLASGVPARFSGSGSGTSYSLTISRMEAEDAATYYCQQRSSYPLTFGAGTKLELKRAAAGSGGSGFVPVFLPAKPTTTPAPRPPTPAPTIASQPLSLRPEACRPAAGGAVHTRGLDFACDIYIWAPLAGTCGVLLLSLVITLYCNHRNRSKRSRLLHSDYMNMTPRRPGPTRKHYQPYAPPRDFAAYRSKKVAKKPTNKAPHPKQEPQEINFPDDLPGSNTAAPVQETLHGCQPVTQEDGKESRISVQERQ

SEQ ID NO: 67 - protein, 458 aa, synthetic construct
  REGION 1..458: note = Synthetic polypeptide
MALPVTALLLPLALLLHAARPQVQLQQSGAELVRSGTSVKLSCTASGFNIKDSYMHWLRQGPEQGLEWIGWIDPENGDTEYAPKFQGKATFTTDTSSNTAYLQLSSLTSEDTAVYYCNEGTPTGPYYFDYWGQGTTVTVSSGGGGSGGGGSGGGGSENVLTQSPAIMSASPGEKVTITCSASSSVSYMHWFQQKPGTSPKLWIYSTSNLASGVPARFSGSGSGTSYSLTISRMEAEDAATYYCQQRSSYPLTFGAGTKLELKRAAAGSGGSGFVPVFLPAKPTTTPAPRPPTPAPTIASQPLSLRPEACRPAAGGAVHTRGLDFACDIYIWAPLAGTCGVLLLSLVITLYCNHRNRSKRSRLLHSDYMNMTPRRPGPTRKHYQPYAPPRDFAAYRSKKVAKKPTNKAPHPKQEPQEINFPDDLPGSNTAAPVQETLHGCQPVTQEDGKESRISVQERQ

SEQ ID NO: 68 - protein, 461 aa, synthetic construct
  REGION 1..461: note = Synthetic polypeptide
MSFPCKFVASFLLIFNVSSKGAVSQVQLQQSGAELVRSGTSVKLSCTASGFNIKDSYMHWLRQGPEQGLEWIGWIDPENGDTEYAPKFQGKATFTTDTSSNTAYLQLSSLTSEDTAVYYCNEGTPTGPYYFDYWGQGTTVTVSSGGGGSGGGGSGGGGSENVLTQSPAIMSASPGEKVTITCSASSSVSYMHWFQQKPGTSPKLWIYSTSNLASGVPARFSGSGSGTSYSLTISRMEAEDAATYYCQQRSSYPLTFGAGTKLELKRAAAGSGGSGFVPVFLPAKPTTTPAPRPPTPAPTIASQPLSLRPEACRPAAGGAVHTRGLDFACDIYIWAPLAGTCGVLLLSLVITLYCNHRNRSKRSRLLHSDYMNMTPRRPGPTRKHYQPYAPPRDFAAYRSKKVAKKPTNKAPHPKQEPQEINFPDDLPGSNTAAPVQETLHGCQPVTQEDGKESRISVQERQ

SEQ ID NO: 69 - protein, 457 aa, synthetic construct
  REGION 1..457: note = Synthetic polypeptide
MYRMQLLSCIALSLALVTNSQVQLQQSGAELVRSGTSVKLSCTASGFNIKDSYMHWLRQGPEQGLEWIGWIDPENGDTEYAPKFQGKATFTTDTSSNTAYLQLSSLTSEDTAVYYCNEGTPTGPYYFDYWGQGTTVTVSSGGGGSGGGGSGGGGSENVLTQSPAIMSASPGEKVTITCSASSSVSYMHWFQQKPGTSPKLWIYSTSNLASGVPARFSGSGSGTSYSLTISRMEAEDAATYYCQQRSSYPLTFGAGTKLELKRAAAGSGGSGFVPVFLPAKPTTTPAPRPPTPAPTIASQPLSLRPEACRPAAGGAVHTRGLDFACDIYIWAPLAGTCGVLLLSLVITLYCNHRNRSKRSRLLHSDYMNMTPRRPGPTRKHYQPYAPPRDFAAYRSKKVAKKPTNKAPHPKQEPQEINFPDDLPGSNTAAPVQETLHGCQPVTQEDGKESRISVQERQ

SEQ ID NO: 70 - protein, 454 aa, synthetic construct
  REGION 1..454: note = Synthetic polypeptide
MWLQSLLLLGTVACSISQVQLQQSGAELVRSGTSVKLSCTASGFNIKDSYMHWLRQGPEQGLEWIGWIDPENGDTEYAPKFQGKATFTTDTSSNTAYLQLSSLTSEDTAVYYCNEGTPTGPYYFDYWGQGTTVTVSSGGGGSGGGGSGGGGSENVLTQSPAIMSASPGEKVTITCSASSSVSYMHWFQQKPGTSPKLWIYSTSNLASGVPARFSGSGSGTSYSLTISRMEAEDAATYYCQQRSSYPLTFGAGTKLELKRAAAGSGGSGFVPVFLPAKPTTTPAPRPPTPAPTIASQPLSLRPEACRPAAGGAVHTRGLDFACDIYIWAPLAGTCGVLLLSLVITLYCNHRNRSKRSRLLHSDYMNMTPRRPGPTRKHYQPYAPPRDFAAYRSKKVAKKPTNKAPHPKQEPQEINFPDDLPGSNTAAPVQETLHGCQPVTQEDGKESRISVQERQ

SEQ ID NO: 71 - protein, 457 aa, synthetic construct
  REGION 1..457: note = Synthetic polypeptide
MEAPAQLLFLLLLWLPDTTRQVQLQQSGAELVRSGTSVKLSCTASGFNIKDSYMHWLRQGPEQGLEWIGWIDPENGDTEYAPKFQGKATFTTDTSSNTAYLQLSSLTSEDTAVYYCNEGTPTGPYYFDYWGQGTTVTVSSGGGGSGGGGSGGGGSENVLTQSPAIMSASPGEKVTITCSASSSVSYMHWFQQKPGTSPKLWIYSTSNLASGVPARFSGSGSGTSYSLTISRMEAEDAATYYCQQRSSYPLTFGAGTKLELKRAAAGSGGSGFVPVFLPAKPTTTPAPRPPTPAPTIASQPLSLRPEACRPAAGGAVHTRGLDFACDIYIWAPLAGTCGVLLLSLVITLYCNHRNRSKRSRLLHSDYMNMTPRRPGPTRKHYQPYAPPRDFAAYRSKKVAKKPTNKAPHPKQEPQEINFPDDLPGSNTAAPVQETLHGCQPVTQEDGKESRISVQERQ

SEQ ID NO: 72 - protein, 406 aa, synthetic construct
  REGION 1..406: note = Synthetic polypeptide
MGVLLTQRTLLSLVLALLFPSMASMQVQLQQSGAELVRSGTSVKLSCTASGFNIKDSYMHWLRQGPEQGLEWIGWIDPENGDTEYAPKFQGKATFTTDTSSNTAYLQLSSLTSEDTAVYYCNEGTPTGPYYFDYWGQGTTVTVSSGGGGSGGGGSGGGGSENVLTQSPAIMSASPGEKVTITCSASSSVSYMHWFQQKPGTSPKLWIYSTSNLASGVPARFSGSGSGTSYSLTISRMEAEDAATYYCQQRSSYPLTFGAGTKLELKRAAAGSGGSGFWVLVVVGGVLACYSLLVTVAFIIFWVRSKRSRLLHSDYMNMTPRRPGPTRKHYQPYAPPRDFAAYRSKKVAKKPTNKAPHPKQEPQEINFPDDLPGSNTAAPVQETLHGCQPVTQEDGKESRISVQERQ

SEQ ID NO: 73 - protein, 402 aa, synthetic construct
  REGION 1..402: note = Synthetic polypeptide
MALPVTALLLPLALLLHAARPQVQLQQSGAELVRSGTSVKLSCTASGFNIKDSYMHWLRQGPEQGLEWIGWIDPENGDTEYAPKFQGKATFTTDTSSNTAYLQLSSLTSEDTAVYYCNEGTPTGPYYFDYWGQGTTVTVSSGGGGSGGGGSGGGGSENVLTQSPAIMSASPGEKVTITCSASSSVSYMHWFQQKPGTSPKLWIYSTSNLASGVPARFSGSGSGTSYSLTISRMEAEDAATYYCQQRSSYPLTFGAGTKLELKRAAAGSGGSGFWVLVVVGGVLACYSLLVTVAFIIFWVRSKRSRLLHSDYMNMTPRRPGPTRKHYQPYAPPRDFAAYRSKKVAKKPTNKAPHPKQEPQEINFPDDLPGSNTAAPVQETLHGCQPVTQEDGKESRISVQERQ

SEQ ID NO: 74 - protein, 405 aa, synthetic construct
  REGION 1..405: note = Synthetic polypeptide
MSFPCKFVASFLLIFNVSSKGAVSQVQLQQSGAELVRSGTSVKLSCTASGFNIKDSYMHWLRQGPEQGLEWIGWIDPENGDTEYAPKFQGKATFTTDTSSNTAYLQLSSLTSEDTAVYYCNEGTPTGPYYFDYWGQGTTVTVSSGGGGSGGGGSGGGGSENVLTQSPAIMSASPGEKVTITCSASSSVSYMHWFQQKPGTSPKLWIYSTSNLASGVPARFSGSGSGTSYSLTISRMEAEDAATYYCQQRSSYPLTFGAGTKLELKRAAAGSGGSGFWVLVVVGGVLACYSLLVTVAFIIFWVRSKRSRLLHSDYMNMTPRRPGPTRKHYQPYAPPRDFAAYRSKKVAKKPTNKAPHPKQEPQEINFPDDLPGSNTAAPVQETLHGCQPVTQEDGKESRISVQERQ

SEQ ID NO: 75 - protein, 401 aa, synthetic construct
  REGION 1..401: note = Synthetic polypeptide
MYRMQLLSCIALSLALVTNSQVQLQQSGAELVRSGTSVKLSCTASGFNIKDSYMHWLRQGPEQGLEWIGWIDPENGDTEYAPKFQGKATFTTDTSSNTAYLQLSSLTSEDTAVYYCNEGTPTGPYYFDYWGQGTTVTVSSGGGGSGGGGSGGGGSENVLTQSPAIMSASPGEKVTITCSASSSVSYMHWFQQKPGTSPKLWIYSTSNLASGVPARFSGSGSGTSYSLTISRMEAEDAATYYCQQRSSYPLTFGAGTKLELKRAAAGSGGSGFWVLVVVGGVLACYSLLVTVAFIIFWVRSKRSRLLHSDYMNMTPRRPGPTRKHYQPYAPPRDFAAYRSKKVAKKPTNKAPHPKQEPQEINFPDDLPGSNTAAPVQETLHGCQPVTQEDGKESRISVQERQ

SEQ ID NO: 76 - protein, 398 aa, synthetic construct
  REGION 1..398: note = Synthetic polypeptide
MWLQSLLLLGTVACSISQVQLQQSGAELVRSGTSVKLSCTASGFNIKDSYMHWLRQGPEQGLEWIGWIDPENGDTEYAPKFQGKATFTTDTSSNTAYLQLSSLTSEDTAVYYCNEGTPTGPYYFDYWGQGTTVTVSSGGGGSGGGGSGGGGSENVLTQSPAIMSASPGEKVTITCSASSSVSYMHWFQQKPGTSPKLWIYSTSNLASGVPARFSGSGSGTSYSLTISRMEAEDAATYYCQQRSSYPLTFGAGTKLELKRAAAGSGGSGFWVLVVVGGVLACYSLLVTVAFIIFWVRSKRSRLLHSDYMNMTPRRPGPTRKHYQPYAPPRDFAAYRSKKVAKKPTNKAPHPKQEPQEINFPDDLPGSNTAAPVQETLHGCQPVTQEDGKESRISVQERQ

SEQ ID NO: 77 - protein, 401 aa, synthetic construct
  REGION 1..401: note = Synthetic polypeptide
MEAPAQLLFLLLLWLPDTTRQVQLQQSGAELVRSGTSVKLSCTASGFNIKDSYMHWLRQGPEQGLEWIGWIDPENGDTEYAPKFQGKATFTTDTSSNTAYLQLSSLTSEDTAVYYCNEGTPTGPYYFDYWGQGTTVTVSSGGGGSGGGGSGGGGSENVLTQSPAIMSASPGEKVTITCSASSSVSYMHWFQQKPGTSPKLWIYSTSNLASGVPARFSGSGSGTSYSLTISRMEAEDAATYYCQQRSSYPLTFGAGTKLELKRAAAGSGGSGFWVLVVVGGVLACYSLLVTVAFIIFWVRSKRSRLLHSDYMNMTPRRPGPTRKHYQPYAPPRDFAAYRSKKVAKKPTNKAPHPKQEPQEINFPDDLPGSNTAAPVQETLHGCQPVTQEDGKESRISVQERQ

SEQ ID NO: 78 - protein, 537 aa, synthetic construct
  REGION 1..537: note = Synthetic polypeptide
MGVLLTQRTLLSLVLALLFPSMASMQVKLEQSGAEVVKPGASVKLSCKASGFNIKDSYMHWLRQGPGQRLEWIGWIDPENGDTEYAPKFQGKATFTTDTSANTAYLGLSSLRPEDTAVYYCNEGTPTGPYYFDYWGQGTLVTVSSGGGGSGGGGSGGGGSENVLTQSPSSMSASVGDRVNIACSASSSVSYMHWFQQKPGKSPKLWIYSTSNLASGVPSRFSGSGSGTDYSLTISSMQPEDAATYYCQQRSSYPLTFGGGTKLEIKAAAGSGGSGILVKQSPMLVAYDNAVNLSCKYSYNLFSREFRASLHKGLDSAVEVCVVYGNYSQQLQVYSKTGFNCDGKLGNESVTFYLQNLYVNQTDIYFCKIEVMYPPPYLDNEKSNGTIIHVKGKHLCPSPLFPGPSKPFWVLVVVGGVLACYSLLVTVAFIIFWVRSKRSRLLHSDYMNMTPRRPGPTRKHYQPYAPPRDFAAYRSKKVAKKPTNKAPHPKQEPQEINFPDDLPGSNTAAPVQETLHGCQPVTQEDGKESRISVQERQ

SEQ ID NO: 79 - protein, 533 aa, synthetic construct
  REGION 1..533: note = Synthetic polypeptide
MALPVTALLLPLALLLHAARPQVKLEQSGAEVVKPGASVKLSCKASGFNIKDSYMHWLRQGPGQRLEWIGWIDPENGDTEYAPKFQGKATFTTDTSANTAYLGLSSLRPEDTAVYYCNEGTPTGPYYFDYWGQGTLVTVSSGGGGSGGGGSGGGGSENVLTQSPSSMSASVGDRVNIACSASSSVSYMHWFQQKPGKSPKLWIYSTSNLASGVPSRFSGSGSGTDYSLTISSMQPEDAATYYCQQRSSYPLTFGGGTKLEIKAAAGSGGSGILVKQSPMLVAYDNAVNLSCKYSYNLFSREFRASLHKGLDSAVEVCVVYGNYSQQLQVYSKTGFNCDGKLGNESVTFYLQNLYVNQTDIYFCKIEVMYPPPYLDNEKSNGTIIHVKGKHLCPSPLFPGPSKPFWVLVVVGGVLACYSLLVTVAFIIFWVRSKRSRLLHSDYMNMTPRRPGPTRKHYQPYAPPRDFAAYRSKKVAKKPTNKAPHPKQEPQEINFPDDLPGSNTAAPVQETLHGCQPVTQEDGKESRISVQERQ

SEQ ID NO: 80 - protein, 536 aa, synthetic construct
  REGION 1..536: note = Synthetic polypeptide
MSFPCKFVASFLLIFNVSSKGAVSQVKLEQSGAEVVKPGASVKLSCKASGFNIKDSYMHWLRQGPGQRLEWIGWIDPENGDTEYAPKFQGKATFTTDTSANTAYLGLSSLRPEDTAVYYCNEGTPTGPYYFDYWGQGTLVTVSSGGGGSGGGGSGGGGSENVLTQSPSSMSASVGDRVNIACSASSSVSYMHWFQQKPGKSPKLWIYSTSNLASGVPSRFSGSGSGTDYSLTISSMQPEDAATYYCQQRSSYPLTFGGGTKLEIKAAAGSGGSGILVKQSPMLVAYDNAVNLSCKYSYNLFSREFRASLHKGLDSAVEVCVVYGNYSQQLQVYSKTGFNCDGKLGNESVTFYLQNLYVNQTDIYFCKIEVMYPPPYLDNEKSNGTIIHVKGKHLCPSPLFPGPSKPFWVLVVVGGVLACYSLLVTVAFIIFWVRSKRSRLLHSDYMNMTPRRPGPTRKHYQPYAPPRDFAAYRSKKVAKKPTNKAPHPKQEPQEINFPDDLPGSNTAAPVQETLHGCQPVTQEDGKESRISVQERQ

SEQ ID NO: 81 - protein, 532 aa, synthetic construct
  REGION 1..532: note = Synthetic polypeptide
MYRMQLLSCIALSLALVTNSQVKLEQSGAEVVKPGASVKLSCKASGFNIKDSYMHWLRQGPGQRLEWIGWIDPENGDTEYAPKFQGKATFTTDTSANTAYLGLSSLRPEDTAVYYCNEGTPTGPYYFDYWGQGTLVTVSSGGGGSGGGGSGGGGSENVLTQSPSSMSASVGDRVNIACSASSSVSYMHWFQQKPGKSPKLWIYSTSNLASGVPSRFSGSGSGTDYSLTISSMQPEDAATYYCQQRSSYPLTFGGGTKLEIKAAAGSGGSGILVKQSPMLVAYDNAVNLSCKYSYNLFSREFRASLHKGLDSAVEVCVVYGNYSQQLQVYSKTGFNCDGKLGNESVTFYLQNLYVNQTDIYFCKIEVMYPPPYLDNEKSNGTIIHVKGKHLCPSPLFPGPSKPFWVLVVVGGVLACYSLLVTVAFIIFWVRSKRSRLLHSDYMNMTPRRPGPTRKHYQPYAPPRDFAAYRSKKVAKKPTNKAPHPKQEPQEINFPDDLPGSNTAAPVQETLHGCQPVTQEDGKESRISVQERQ

SEQ ID NO: 82 - protein, 529 aa, synthetic construct
  REGION 1..529: note = Synthetic polypeptide
MWLQSLLLLGTVACSISQVKLEQSGAEVVKPGASVKLSCKASGFNIKDSYMHWLRQGPGQRLEWIGWIDPENGDTEYAPKFQGKATFTTDTSANTAYLGLSSLRPEDTAVYYCNEGTPTGPYYFDYWGQGTLVTVSSGGGGSGGGGSGGGGSENVLTQSPSSMSASVGDRVNIACSASSSVSYMHWFQQKPGKSPKLWIYSTSNLASGVPSRFSGSGSGTDYSLTISSMQPEDAATYYCQQRSSYPLTFGGGTKLEIKAAAGSGGSGILVKQSPMLVAYDNAVNLSCKYSYNLFSREFRASLHKGLDSAVEVCVVYGNYSQQLQVYSKTGFNCDGKLGNESVTFYLQNLYVNQTDIYFCKIEVMYPPPYLDNEKSNGTIIHVKGKHLCPSPLFPGPSKPFWVLVVVGGVLACYSLLVTVAFIIFWVRSKRSRLLHSDYMNMTPRRPGPTRKHYQPYAPPRDFAAYRSKKVAKKPTNKAPHPKQEPQEINFPDDLPGSNTAAPVQETLHGCQPVTQEDGKESRISVQERQ

SEQ ID NO: 83 - protein, 532 aa, synthetic construct
  REGION 1..532: note = Synthetic polypeptide
MEAPAQLLFLLLLWLPDTTRQVKLEQSGAEVVKPGASVKLSCKASGFNIKDSYMHWLRQGPGQRLEWIGWIDPENGDTEYAPKFQGKATFTTDTSANTAYLGLSSLRPEDTAVYYCNEGTPTGPYYFDYWGQGTLVTVSSGGGGSGGGGSGGGGSENVLTQSPSSMSASVGDRVNIACSASSSVSYMHWFQQKPGKSPKLWIYSTSNLASGVPSRFSGSGSGTDYSLTISSMQPEDAATYYCQQRSSYPLTFGGGTKLEIKAAAGSGGSGILVKQSPMLVAYDNAVNLSCKYSYNLFSREFRASLHKGLDSAVEVCVVYGNYSQQLQVYSKTGFNCDGKLGNESVTFYLQNLYVNQTDIYFCKIEVMYPPPYLDNEKSNGTIIHVKGKHLCPSPLFPGPSKPFWVLVVVGGVLACYSLLVTVAFIIFWVRSKRSRLLHSDYMNMTPRRPGPTRKHYQPYAPPRDFAAYRSKKVAKKPTNKAPHPKQEPQEINFPDDLPGSNTAAPVQETLHGCQPVTQEDGKESRISVQERQ

SEQ ID NO: 84 - protein, 461 aa, synthetic construct
  REGION 1..461: note = Synthetic polypeptide
MGVLLTQRTLLSLVLALLFPSMASMQVKLEQSGAEVVKPGASVKLSCKASGFNIKDSYMHWLRQGPGQRLEWIGWIDPENGDTEYAPKFQGKATFTTDTSANTAYLGLSSLRPEDTAVYYCNEGTPTGPYYFDYWGQGTLVTVSSGGGGSGGGGSGGGGSENVLTQSPSSMSASVGDRVNIACSASSSVSYMHWFQQKPGKSPKLWIYSTSNLASGVPSRFSGSGSGTDYSLTISSMQPEDAATYYCQQRSSYPLTFGGGTKLEIKAAAGSGGSGFVPVFLPAKPTTTPAPRPPTPAPTIASQPLSLRPEACRPAAGGAVHTRGLDFACDIYIWAPLAGTCGVLLLSLVITLYCNHRNRSKRSRLLHSDYMNMTPRRPGPTRKHYQPYAPPRDFAAYRSKKVAKKPTNKAPHPKQEPQEINFPDDLPGSNTAAPVQETLHGCQPVTQEDGKESRISVQERQ

SEQ ID NO: 85 - protein, 457 aa, synthetic construct
  REGION 1..457: note = Synthetic polypeptide
MALPVTALLLPLALLLHAARPQVKLEQSGAEVVKPGASVKLSCKASGFNIKDSYMHWLRQGPGQRLEWIGWIDPENGDTEYAPKFQGKATFTTDTSANTAYLGLSSLRPEDTAVYYCNEGTPTGPYYFDYWGQGTLVTVSSGGGGSGGGGSGGGGSENVLTQSPSSMSASVGDRVNIACSASSSVSYMHWFQQKPGKSPKLWIYSTSNLASGVPSRFSGSGSGTDYSLTISSMQPEDAATYYCQQRSSYPLTFGGGTKLEIKAAAGSGGSGFVPVFLPAKPTTTPAPRPPTPAPTIASQPLSLRPEACRPAAGGAVHTRGLDFACDIYIWAPLAGTCGVLLLSLVITLYCNHRNRSKRSRLLHSDYMNMTPRRPGPTRKHYQPYAPPRDFAAYRSKKVAKKPTNKAPHPKQEPQEINFPDDLPGSNTAAPVQETLHGCQPVTQEDGKESRISVQERQ

SEQ ID NO: 86 - protein, 460 aa, synthetic construct
  REGION 1..460: note = Synthetic polypeptide
MSFPCKFVASFLLIFNVSSKGAVSQVKLEQSGAEVVKPGASVKLSCKASGFNIKDSYMHWLRQGPGQRLEWIGWIDPENGDTEYAPKFQGKATFTTDTSANTAYLGLSSLRPEDTAVYYCNEGTPTGPYYFDYWGQGTLVTVSSGGGGSGGGGSGGGGSENVLTQSPSSMSASVGDRVNIACSASSSVSYMHWFQQKPGKSPKLWIYSTSNLASGVPSRFSGSGSGTDYSLTISSMQPEDAATYYCQQRSSYPLTFGGGTKLEIKAAAGSGGSGFVPVFLPAKPTTTPAPRPPTPAPTIASQPLSLRPEACRPAAGGAVHTRGLDFACDIYIWAPLAGTCGVLLLSLVITLYCNHRNRSKRSRLLHSDYMNMTPRRPGPTRKHYQPYAPPRDFAAYRSKKVAKKPTNKAPHPKQEPQEINFPDDLPGSNTAAPVQETLHGCQPVTQEDGKESRISVQERQ

SEQ ID NO: 87 - protein, 456 aa, synthetic construct
  REGION 1..456: note = Synthetic polypeptide
MYRMQLLSCIALSLALVTNSQVKLEQSGAEVVKPGASVKLSCKASGFNIKDSYMHWLRQGPGQRLEWIGWIDPENGDTEYAPKFQGKATFTTDTSANTAYLGLSSLRPEDTAVYYCNEGTPTGPYYFDYWGQGTLVTVSSGGGGSGGGGSGGGGSENVLTQSPSSMSASVGDRVNIACSASSSVSYMHWFQQKPGKSPKLWIYSTSNLASGVPSRFSGSGSGTDYSLTISSMQPEDAATYYCQQRSSYPLTFGGGTKLEIKAAAGSGGSGFVPVFLPAKPTTTPAPRPPTPAPTIASQPLSLRPEACRPAAGGAVHTRGLDFACDIYIWAPLAGTCGVLLLSLVITLYCNHRNRSKRSRLLHSDYMNMTPRRPGPTRKHYQPYAPPRDFAAYRSKKVAKKPTNKAPHPKQEPQEINFPDDLPGSNTAAPVQETLHGCQPVTQEDGKESRISVQERQ

SEQ ID NO: 88 - protein, 453 aa, synthetic construct
  REGION 1..453: note = Synthetic polypeptide
MWLQSLLLLGTVACSISQVKLEQSGAEVVKPGASVKLSCKASGFNIKDSYMHWLRQGPGQRLEWIGWIDPENGDTEYAPKFQGKATFTTDTSANTAYLGLSSLRPEDTAVYYCNEGTPTGPYYFDYWGQGTLVTVSSGGGGSGGGGSGGGGSENVLTQSPSSMSASVGDRVNIACSASSSVSYMHWFQQKPGKSPKLWIYSTSNLASGVPSRFSGSGSGTDYSLTISSMQPEDAATYYCQQRSSYPLTFGGGTKLEIKAAAGSGGSGFVPVFLPAKPTTTPAPRPPTPAPTIASQPLSLRPEACRPAAGGAVHTRGLDFACDIYIWAPLAGTCGVLLLSLVITLYCNHRNRSKRSRLLHSDYMNMTPRRPGPTRKHYQPYAPPRDFAAYRSKKVAKKPTNKAPHPKQEPQEINFPDDLPGSNTAAPVQETLHGCQPVTQEDGKESRISVQERQ

SEQ ID NO: 89 - protein, 456 aa, synthetic construct
  REGION 1..456: note = Synthetic polypeptide
MEAPAQLLFLLLLWLPDTTRQVKLEQSGAEVVKPGASVKLSCKASGFNIKDSYMHWLRQGPGQRLEWIGWIDPENGDTEYAPKFQGKATFTTDTSANTAYLGLSSLRPEDTAVYYCNEGTPTGPYYFDYWGQGTLVTVSSGGGGSGGGGSGGGGSENVLTQSPSSMSASVGDRVNIACSASSSVSYMHWFQQKPGKSPKLWIYSTSNLASGVPSRFSGSGSGTDYSLTISSMQPEDAATYYCQQRSSYPLTFGGGTKLEIKAAAGSGGSGFVPVFLPAKPTTTPAPRPPTPAPTIASQPLSLRPEACRPAAGGAVHTRGLDFACDIYIWAPLAGTCGVLLLSLVITLYCNHRNRSKRSRLLHSDYMNMTPRRPGPTRKHYQPYAPPRDFAAYRSKKVAKKPTNKAPHPKQEPQEINFPDDLPGSNTAAPVQETLHGCQPVTQEDGKESRISVQERQ

SEQ ID NO: 90 - protein, 405 aa, synthetic construct
  REGION 1..405: note = Synthetic polypeptide
MGVLLTQRTLLSLVLALLFPSMASMQVKLEQSGAEVVKPGASVKLSCKASGFNIKDSYMHWLRQGPGQRLEWIGWIDPENGDTEYAPKFQGKATFTTDTSANTAYLGLSSLRPEDTAVYYCNEGTPTGPYYFDYWGQGTLVTVSSGGGGSGGGGSGGGGSENVLTQSPSSMSASVGDRVNIACSASSSVSYMHWFQQKPGKSPKLWIYSTSNLASGVPSRFSGSGSGTDYSLTISSMQPEDAATYYCQQRSSYPLTFGGGTKLEIKAAAGSGGSGFWVLVVVGGVLACYSLLVTVAFIIFWVRSKRSRLLHSDYMNMTPRRPGPTRKHYQPYAPPRDFAAYRSKKVAKKPTNKAPHPKQEPQEINFPDDLPGSNTAAPVQETLHGCQPVTQEDGKESRISVQERQ

SEQ ID NO: 91 - protein, 401 aa, synthetic construct
  REGION 1..401: note = Synthetic polypeptide
MALPVTALLLPLALLLHAARPQVKLEQSGAEVVKPGASVKLSCKASGFNIKDSYMHWLRQGPGQRLEWIGWIDPENGDTEYAPKFQGKATFTTDTSANTAYLGLSSLRPEDTAVYYCNEGTPTGPYYFDYWGQGTLVTVSSGGGGSGGGGSGGGGSENVLTQSPSSMSASVGDRVNIACSASSSVSYMHWFQQKPGKSPKLWIYSTSNLASGVPSRFSGSGSGTDYSLTISSMQPEDAATYYCQQRSSYPLTFGGGTKLEIKAAAGSGGSGFWVLVVVGGVLACYSLLVTVAFIIFWVRSKRSRLLHSDYMNMTPRRPGPTRKHYQPYAPPRDFAAYRSKKVAKKPTNKAPHPKQEPQEINFPDDLPGSNTAAPVQETLHGCQPVTQEDGKESRISVQERQ

SEQ ID NO: 92 - protein, 404 aa, synthetic construct
  REGION 1..404: note = Synthetic polypeptide
MSFPCKFVASFLLIFNVSSKGAVSQVKLEQSGAEVVKPGASVKLSCKASGFNIKDSYMHWLRQGPGQRLEWIGWIDPENGDTEYAPKFQGKATFTTDTSANTAYLGLSSLRPEDTAVYYCNEGTPTGPYYFDYWGQGTLVTVSSGGGGSGGGGSGGGGSENVLTQSPSSMSASVGDRVNIACSASSSVSYMHWFQQKPGKSPKLWIYSTSNLASGVPSRFSGSGSGTDYSLTISSMQPEDAATYYCQQRSSYPLTFGGGTKLEIKAAAGSGGSGFWVLVVVGGVLACYSLLVTVAFIIFWVRSKRSRLLHSDYMNMTPRRPGPTRKHYQPYAPPRDFAAYRSKKVAKKPTNKAPHPKQEPQEINFPDDLPGSNTAAPVQETLHGCQPVTQEDGKESRISVQERQ

SEQ ID NO: 93 - protein, 400 aa, synthetic construct
  REGION 1..400: note = Synthetic polypeptide
MYRMQLLSCIALSLALVTNSQVKLEQSGAEVVKPGASVKLSCKASGFNIKDSYMHWLRQGPGQRLEWIGWIDPENGDTEYAPKFQGKATFTTDTSANTAYLGLSSLRPEDTAVYYCNEGTPTGPYYFDYWGQGTLVTVSSGGGGSGGGGSGGGGSENVLTQSPSSMSASVGDRVNIACSASSSVSYMHWFQQKPGKSPKLWIYSTSNLASGVPSRFSGSGSGTDYSLTISSMQPEDAATYYCQQRSSYPLTFGGGTKLEIKAAAGSGGSGFWVLVVVGGVLACYSLLVTVAFIIFWVRSKRSRLLHSDYMNMTPRRPGPTRKHYQPYAPPRDFAAYRSKKVAKKPTNKAPHPKQEPQEINFPDDLPGSNTAAPVQETLHGCQPVTQEDGKESRISVQERQ

SEQ ID NO: 94 - protein, 397 aa, synthetic construct
  REGION 1..397: note = Synthetic polypeptide
MWLQSLLLLGTVACSISQVKLEQSGAEVVKPGASVKLSCKASGFNIKDSYMHWLRQGPGQRLEWIGWIDPENGDTEYAPKFQGKATFTTDTSANTAYLGLSSLRPEDTAVYYCNEGTPTGPYYFDYWGQGTLVTVSSGGGGSGGGGSGGGGSENVLTQSPSSMSASVGDRVNIACSASSSVSYMHWFQQKPGKSPKLWIYSTSNLASGVPSRFSGSGSGTDYSLTISSMQPEDAATYYCQQRSSYPLTFGGGTKLEIKAAAGSGGSGFWVLVVVGGVLACYSLLVTVAFIIFWVRSKRSRLLHSDYMNMTPRRPGPTRKHYQPYAPPRDFAAYRSKKVAKKPTNKAPHPKQEPQEINFPDDLPGSNTAAPVQETLHGCQPVTQEDGKESRISVQERQ

SEQ ID NO: 95 - protein, 400 aa, synthetic construct
  REGION 1..400: note = Synthetic polypeptide
MEAPAQLLFLLLLWLPDTTRQVKLEQSGAEVVKPGASVKLSCKASGFNIKDSYMHWLRQGPGQRLEWIGWIDPENGDTEYAPKFQGKATFTTDTSANTAYLGLSSLRPEDTAVYYCNEGTPTGPYYFDYWGQGTLVTVSSGGGGSGGGGSGGGGSENVLTQSPSSMSASVGDRVNIACSASSSVSYMHWFQQKPGKSPKLWIYSTSNLASGVPSRFSGSGSGTDYSLTISSMQPEDAATYYCQQRSSYPLTFGGGTKLEIKAAAGSGGSGFWVLVVVGGVLACYSLLVTVAFIIFWVRSKRSRLLHSDYMNMTPRRPGPTRKHYQPYAPPRDFAAYRSKKVAKKPTNKAPHPKQEPQEINFPDDLPGSNTAAPVQETLHGCQPVTQEDGKESRISVQERQ

SEQ ID NO: 96 - protein, 542 aa, synthetic construct
  REGION 1..542: note = Synthetic polypeptide
MGVLLTQRTLLSLVLALLFPSMASMQVQLVQSGAEVKKPGSSVKVSCKASGGTFSNSPINWLRQAPGQGLEWMGSIIPSFGTANYAQKFQGRLTITADESTSTAYMELSSLRSEDTAVYYCAGRSHNYELYYYYMDVWGQGTMVTVSSGGGGSGGGGSGGGGSDIQMTQSPSTLSASIGDRVTITCRASEGIYHWLAWYQQKPGKAPKLLIYKASSLASGAPSRFSGSGSGTDFTLTISSLQPDDFATYYCQQYSNYPLTFGGGTKLEIKRAAAGSGGSGILVKQSPMLVAYDNAVNLSCKYSYNLFSREFRASLHKGLDSAVEVCVVYGNYSQQLQVYSKTGFNCDGKLGNESVTFYLQNLYVNQTDIYFCKIEVMYPPPYLDNEKSNGTIIHVKGKHLCPSPLFPGPSKPFWVLVVVGGVLACYSLLVTVAFIIFWVRSKRSRLLHSDYMNMTPRRPGPTRKHYQPYAPPRDFAAYRSKKVAKKPTNKAPHPKQEPQEINFPDDLPGSNTAAPVQETLHGCQPVTQEDGKESRISVQERQ

SEQ ID NO: 97 - protein, 538 aa, synthetic construct
  REGION 1..538: note = Synthetic polypeptide
MALPVTALLLPLALLLHAARPQVQLVQSGAEVKKPGSSVKVSCKASGGTFSNSPINWLRQAPGQGLEWMGSIIPSFGTANYAQKFQGRLTITADESTSTAYMELSSLRSEDTAVYYCAGRSHNYELYYYYMDVWGQGTMVTVSSGGGGSGGGGSGGGGSDIQMTQSPSTLSASIGDRVTITCRASEGIYHWLAWYQQKPGKAPKLLIYKASSLASGAPSRFSGSGSGTDFTLTISSLQPDDFATYYCQQYSNYPLTFGGGTKLEIKRAAAGSGGSGILVKQSPMLVAYDNAVNLSCKYSYNLFSREFRASLHKGLDSAVEVCVVYGNYSQQLQVYSKTGFNCDGKLGNESVTFYLQNLYVNQTDIYFCKIEVMYPPPYLDNEKSNGTIIHVKGKHLCPSPLFPGPSKPFWVLVVVGGVLACYSLLVTVAFIIFWVRSKRSRLLHSDYMNMTPRRPGPTRKHYQPYAPPRDFAAYRSKKVAKKPTNKAPHPKQEPQEINFPDDLPGSNTAAPVQETLHGCQPVTQEDGKESRISVQERQ

SEQ ID NO: 98 - protein, 541 aa, synthetic construct
  REGION 1..541: note = Synthetic polypeptide
MSFPCKFVASFLLIFNVSSKGAVSQVQLVQSGAEVKKPGSSVKVSCKASGGTFSNSPINWLRQAPGQGLEWMGSIIPSFGTANYAQKFQGRLTITADESTSTAYMELSSLRSEDTAVYYCAGRSHNYELYYYYMDVWGQGTMVTVSSGGGGSGGGGSGGGGSDIQMTQSPSTLSASIGDRVTITCRASEGIYHWLAWYQQKPGKAPKLLIYKASSLASGAPSRFSGSGSGTDFTLTISSLQPDDFATYYCQQYSNYPLTFGGGTKLEIKRAAAGSGGSGILVKQSPMLVAYDNAVNLSCKYSYNLFSREFRASLHKGLDSAVEVCVVYGNYSQQLQVYSKTGFNCDGKLGNESVTFYLQNLYVNQTDIYFCKIEVMYPPPYLDNEKSNGTIIHVKGKHLCPSPLFPGPSKPFWVLVVVGGVLACYSLLVTVAFIIFWVRSKRSRLLHSDYMNMTPRRPGPTRKHYQPYAPPRDFAAYRSKKVAKKPTNKAPHPKQEPQEINFPDDLPGSNTAAPVQETLHGCQPVTQEDGKESRISVQERQ

SEQ ID NO: 99 - protein, 537 aa, synthetic construct
  REGION 1..537: note = Synthetic polypeptide
MYRMQLLSCIALSLALVTNSQVQLVQSGAEVKKPGSSVKVSCKASGGTFSNSPINWLRQAPGQGLEWMGSIIPSFGTANYAQKFQGRLTITADESTSTAYMELSSLRSEDTAVYYCAGRSHNYELYYYYMDVWGQGTMVTVSSGGGGSGGGGSGGGGSDIQMTQSPSTLSASIGDRVTITCRASEGIYHWLAWYQQKPGKAPKLLIYKASSLASGAPSRFSGSGSGTDFTLTISSLQPDDFATYYCQQYSNYPLTFGGGTKLEIKRAAAGSGGSGILVKQSPMLVAYDNAVNLSCKYSYNLFSREFRASLHKGLDSAVEVCVVYGNYSQQLQVYSKTGFNCDGKLGNESVTFYLQNLYVNQTDIYFCKIEVMYPPPYLDNEKSNGTIIHVKGKHLCPSPLFPGPSKPFWVLVVVGGVLACYSLLVTVAFIIFWVRSKRSRLLHSDYMNMTPRRPGPTRKHYQPYAPPRDFAAYRSKKVAKKPTNKAPHPKQEPQEINFPDDLPGSNTAAPVQETLHGCQPVTQEDGKESRISVQERQ

SEQ ID NO: 100 - protein, 534 aa, synthetic construct
  REGION 1..534: note = Synthetic polypeptide
MWLQSLLLLGTVACSISQVQLVQSGAEVKKPGSSVKVSCKASGGTFSNSPINWLRQAPGQGLEWMGSIIPSFGTANYAQKFQGRLTITADESTSTAYMELSSLRSEDTAVYYCAGRSHNYELYYYYMDVWGQGTMVTVSSGGGGSGGGGSGGGGSDIQMTQSPSTLSASIGDRVTITCRASEGIYHWLAWYQQKPGKAPKLLIYKASSLASGAPSRFSGSGSGTDFTLTISSLQPDDFATYYCQQYSNYPLTFGGGTKLEIKRAAAGSGGSGILVKQSPMLVAYDNAVNLSCKYSYNLFSREFRASLHKGLDSAVEVCVVYGNYSQQLQVYSKTGFNCDGKLGNESVTFYLQNLYVNQTDIYFCKIEVMYPPPYLDNEKSNGTIIHVKGKHLCPSPLFPGPSKPFWVLVVVGGVLACYSLLVTVAFIIFWVRSKRSRLLHSDYMNMTPRRPGPTRKHYQPYAPPRDFAAYRSKKVAKKPTNKAPHPKQEPQEINFPDDLPGSNTAAPVQETLHGCQPVTQEDGKESRISVQERQ

SEQ ID NO: 101 - protein, 537 aa, synthetic construct
  REGION 1..537: note = Synthetic polypeptide
MEAPAQLLFLLLLWLPDTTRQVQLVQSGAEVKKPGSSVKVSCKASGGTFSNSPINWLRQAPGQGLEWMGSIIPSFGTANYAQKFQGRLTITADESTSTAYMELSSLRSEDTAVYYCAGRSHNYELYYYYMDVWGQGTMVTVSSGGGGSGGGGSGGGGSDIQMTQSPSTLSASIGDRVTITCRASEGIYHWLAWYQQKPGKAPKLLIYKASSLASGAPSRFSGSGSGTDFTLTISSLQPDDFATYYCQQYSNYPLTFGGGTKLEIKRAAAGSGGSGILVKQSPMLVAYDNAVNLSCKYSYNLFSREFRASLHKGLDSAVEVCVVYGNYSQQLQVYSKTGFNCDGKLGNESVTFYLQNLYVNQTDIYFCKIEVMYPPPYLDNEKSNGTIIHVKGKHLCPSPLFPGPSKPFWVLVVVGGVLACYSLLVTVAFIIFWVRSKRSRLLHSDYMNMTPRRPGPTRKHYQPYAPPRDFAAYRSKKVAKKPTNKAPHPKQEPQEINFPDDLPGSNTAAPVQETLHGCQPVTQEDGKESRISVQERQ

SEQ ID NO: 102 - protein, 466 aa, synthetic construct
  REGION 1..466: note = Synthetic polypeptide
MGVLLTQRTLLSLVLALLFPSMASMQVQLVQSGAEVKKPGSSVKVSCKASGGTFSNSPINWLRQAPGQGLEWMGSIIPSFGTANYAQKFQGRLTITADESTSTAYMELSSLRSEDTAVYYCAGRSHNYELYYYYMDVWGQGTMVTVSSGGGGSGGGGSGGGGSDIQMTQSPSTLSASIGDRVTITCRASEGIYHWLAWYQQKPGKAPKLLIYKASSLASGAPSRFSGSGSGTDFTLTISSLQPDDFATYYCQQYSNYPLTFGGGTKLEIKRAAAGSGGSGFVPVFLPAKPTTTPAPRPPTPAPTIASQPLSLRPEACRPAAGGAVHTRGLDFACDIYIWAPLAGTCGVLLLSLVITLYCNHRNRSKRSRLLHSDYMNMTPRRPGPTRKHYQPYAPPRDFAAYRSKKVAKKPTNKAPHPKQEPQEINFPDDLPGSNTAAPVQETLHGCQPVTQEDGKESRISVQERQ

SEQ ID NO: 103 - protein, 462 aa, synthetic construct
  REGION 1..462: note = Synthetic polypeptide
MALPVTALLLPLALLLHAARPQVQLVQSGAEVKKPGSSVKVSCKASGGTFSNSPINWLRQAPGQGLEWMGSIIPSFGTANYAQKFQGRLTITADESTSTAYMELSSLRSEDTAVYYCAGRSHNYELYYYYMDVWGQGTMVTVSSGGGGSGGGGSGGGGSDIQMTQSPSTLSASIGDRVTITCRASEGIYHWLAWYQQKPGKAPKLLIYKASSLASGAPSRFSGSGSGTDFTLTISSLQPDDFATYYCQQYSNYPLTFGGGTKLEIKRAAAGSGGSGFVPVFLPAKPTTTPAPRPPTPAPTIASQPLSLRPEACRPAAGGAVHTRGLDFACDIYIWAPLAGTCGVLLLSLVITLYCNHRNRSKRSRLLHSDYMNMTPRRPGPTRKHYQPYAPPRDFAAYRSKKVAKKPTNKAPHPKQEPQEINFPDDLPGSNTAAPVQETLHGCQPVTQEDGKESRISVQERQ

SEQ ID NO: 104 - protein, 465 aa, synthetic construct
  REGION 1..465: note = Synthetic polypeptide
MSFPCKFVASFLLIFNVSSKGAVSQVQLVQSGAEVKKPGSSVKVSCKASGGTFSNSPINWLRQAPGQGLEWMGSIIPSFGTANYAQKFQGRLTITADESTSTAYMELSSLRSEDTAVYYCAGRSHNYELYYYYMDVWGQGTMVTVSSGGGGSGGGGSGGGGSDIQMTQSPSTLSASIGDRVTITCRASEGIYHWLAWYQQKPGKAPKLLIYKASSLASGAPSRFSGSGSGTDFTLTISSLQPDDFATYYCQQYSNYPLTFGGGTKLEIKRAAAGSGGSGFVPVFLPAKPTTTPAPRPPTPAPTIASQPLSLRPEACRPAAGGAVHTRGLDFACDIYIWAPLAGTCGVLLLSLVITLYCNHRNRSKRSRLLHSDYMNMTPRRPGPTRKHYQPYAPPRDFAAYRSKKVAKKPTNKAPHPKQEPQEINFPDDLPGSNTAAPVQETLHGCQPVTQEDGKESRISVQERQ

SEQ ID NO: 105 - protein, 461 aa, synthetic construct
  REGION 1..461: note = Synthetic polypeptide
MYRMQLLSCIALSLALVTNSQVQLVQSGAEVKKPGSSVKVSCKASGGTFSNSPINWLRQAPGQGLEWMGSIIPSFGTANYAQKFQGRLTITADESTSTAYMELSSLRSEDTAVYYCAGRSHNYELYYYYMDVWGQGTMVTVSSGGGGSGGGGSGGGGSDIQMTQSPSTLSASIGDRVTITCRASEGIYHWLAWYQQKPGKAPKLLIYKASSLASGAPSRFSGSGSGTDFTLTISSLQPDDFATYYCQQYSNYPLTFGGGTKLEIKRAAAGSGGSGFVPVFLPAKPTTTPAPRPPTPAPTIASQPLSLRPEACRPAAGGAVHTRGLDFACDIYIWAPLAGTCGVLLLSLVITLYCNHRNRSKRSRLLHSDYMNMTPRRPGPTRKHYQPYAPPRDFAAYRSKKVAKKPTNKAPHPKQEPQEINFPDDLPGSNTAAPVQETLHGCQPVTQEDGKESRISVQERQ

SEQ ID NO: 106 - protein, 458 aa, synthetic construct
  REGION 1..458: note = Synthetic polypeptide
MWLQSLLLLGTVACSISQVQLVQSGAEVKKPGSSVKVSCKASGGTFSNSPINWLRQAPGQGLEWMGSIIPSFGTANYAQKFQGRLTITADESTSTAYMELSSLRSEDTAVYYCAGRSHNYELYYYYMDVWGQGTMVTVSSGGGGSGGGGSGGGGSDIQMTQSPSTLSASIGDRVTITCRASEGIYHWLAWYQQKPGKAPKLLIYKASSLASGAPSRFSGSGSGTDFTLTISSLQPDDFATYYCQQYSNYPLTFGGGTKLEIKRAAAGSGGSGFVPVFLPAKPTTTPAPRPPTPAPTIASQPLSLRPEACRPAAGGAVHTRGLDFACDIYIWAPLAGTCGVLLLSLVITLYCNHRNRSKRSRLLHSDYMNMTPRRPGPTRKHYQPYAPPRDFAAYRSKKVAKKPTNKAPHPKQEPQEINFPDDLPGSNTAAPVQETLHGCQPVTQEDGKESRISVQERQ

SEQ ID NO: 107 - protein, 461 aa, synthetic construct
  REGION 1..461: note = Synthetic polypeptide
MEAPAQLLFLLLLWLPDTTRQVQLVQSGAEVKKPGSSVKVSCKASGGTFSNSPINWLRQAPGQGLEWMGSIIPSFGTANYAQKFQGRLTITADESTSTAYMELSSLRSEDTAVYYCAGRSHNYELYYYYMDVWGQGTMVTVSSGGGGSGGGGSGGGGSDIQMTQSPSTLSASIGDRVTITCRASEGIYHWLAWYQQKPGKAPKLLIYKASSLASGAPSRFSGSGSGTDFTLTISSLQPDDFATYYCQQYSNYPLTFGGGTKLEIKRAAAGSGGSGFVPVFLPAKPTTTPAPRPPTPAPTIASQPLSLRPEACRPAAGGAVHTRGLDFACDIYIWAPLAGTCGVLLLSLVITLYCNHRNRSKRSRLLHSDYMNMTPRRPGPTRKHYQPYAPPRDFAAYRSKKVAKKPTNKAPHPKQEPQEINFPDDLPGSNTAAPVQETLHGCQPVTQEDGKESRISVQERQ

SEQ ID NO: 108 - protein, 410 aa, synthetic construct
  REGION 1..410: note = Synthetic polypeptide
MGVLLTQRTLLSLVLALLFPSMASMQVQLVQSGAEVKKPGSSVKVSCKASGGTFSNSPINWLRQAPGQGLEWMGSIIPSFGTANYAQKFQGRLTITADESTSTAYMELSSLRSEDTAVYYCAGRSHNYELYYYYMDVWGQGTMVTVSSGGGGSGGGGSGGGGSDIQMTQSPSTLSASIGDRVTITCRASEGIYHWLAWYQQKPGKAPKLLIYKASSLASGAPSRFSGSGSGTDFTLTISSLQPDDFATYYCQQYSNYPLTFGGGTKLEIKRAAAGSGGSGFWVLVVVGGVLACYSLLVTVAFIIFWVRSKRSRLLHSDYMNMTPRRPGPTRKHYQPYAPPRDFAAYRSKKVAKKPTNKAPHPKQEPQEINFPDDLPGSNTAAPVQETLHGCQPVTQEDGKESRISVQERQ

SEQ ID NO: 109 - protein, 406 aa, synthetic construct
  REGION 1..406: note = Synthetic polypeptide
MALPVTALLLPLALLLHAARPQVQLVQSGAEVKKPGSSVKVSCKASGGTFSNSPINWLRQAPGQGLEWMGSIIPSFGTANYAQKFQGRLTITADESTSTAYMELSSLRSEDTAVYYCAGRSHNYELYYYYMDVWGQGTMVTVSSGGGGSGGGGSGGGGSDIQMTQSPSTLSASIGDRVTITCRASEGIYHWLAWYQQKPGKAPKLLIYKASSLASGAPSRFSGSGSGTDFTLTISSLQPDDFATYYCQQYSNYPLTFGGGTKLEIKRAAAGSGGSGFWVLVVVGGVLACYSLLVTVAFIIFWVRSKRSRLLHSDYMNMTPRRPGPTRKHYQPYAPPRDFAAYRSKKVAKKPTNKAPHPKQEPQEINFPDDLPGSNTAAPVQETLHGCQPVTQEDGKESRISVQERQ

SEQ ID NO: 110 - protein, 409 aa, synthetic construct
  REGION 1..409: note = Synthetic polypeptide
MSFPCKFVASFLLIFNVSSKGAVSQVQLVQSGAEVKKPGSSVKVSCKASGGTFSNSPINWLRQAPGQGLEWMGSIIPSFGTANYAQKFQGRLTITADESTSTAYMELSSLRSEDTAVYYCAGRSHNYELYYYYMDVWGQGTMVTVSSGGGGSGGGGSGGGGSDIQMTQSPSTLSASIGDRVTITCRASEGIYHWLAWYQQKPGKAPKLLIYKASSLASGAPSRFSGSGSGTDFTLTISSLQPDDFATYYCQQYSNYPLTFGGGTKLEIKRAAAGSGGSGFWVLVVVGGVLACYSLLVTVAFIIFWVRSKRSRLLHSDYMNMTPRRPGPTRKHYQPYAPPRDFAAYRSKKVAKKPTNKAPHPKQEPQEINFPDDLPGSNTAAPVQETLHGCQPVTQEDGKESRISVQERQ

SEQ ID NO: 111 - protein, 405 aa, synthetic construct
  REGION 1..405: note = Synthetic polypeptide
MYRMQLLSCIALSLALVTNSQVQLVQSGAEVKKPGSSVKVSCKASGGTFSNSPINWLRQAPGQGLEWMGSIIPSFGTANYAQKFQGRLTITADESTSTAYMELSSLRSEDTAVYYCAGRSHNYELYYYYMDVWGQGTMVTVSSGGGGSGGGGSGGGGSDIQMTQSPSTLSASIGDRVTITCRASEGIYHWLAWYQQKPGKAPKLLIYKASSLASGAPSRFSGSGSGTDFTLTISSLQPDDFATYYCQQYSNYPLTFGGGTKLEIKRAAAGSGGSGFWVLVVVGGVLACYSLLVTVAFIIFWVRSKRSRLLHSDYMNMTPRRPGPTRKHYQPYAPPRDFAAYRSKKVAKKPTNKAPHPKQEPQEINFPDDLPGSNTAAPVQETLHGCQPVTQEDGKESRISVQERQ

SEQ ID NO: 112 - protein, 402 aa, synthetic construct
  REGION 1..402: note = Synthetic polypeptide
MWLQSLLLLGTVACSISQVQLVQSGAEVKKPGSSVKVSCKASGGTFSNSPINWLRQAPGQGLEWMGSIIPSFGTANYAQKFQGRLTITADESTSTAYMELSSLRSEDTAVYYCAGRSHNYELYYYYMDVWGQGTMVTVSSGGGGSGGGGSGGGGSDIQMTQSPSTLSASIGDRVTITCRASEGIYHWLAWYQQKPGKAPKLLIYKASSLASGAPSRFSGSGSGTDFTLTISSLQPDDFATYYCQQYSNYPLTFGGGTKLEIKRAAAGSGGSGFWVLVVVGGVLACYSLLVTVAFIIFWVRSKRSRLLHSDYMNMTPRRPGPTRKHYQPYAPPRDFAAYRSKKVAKKPTNKAPHPKQEPQEINFPDDLPGSNTAAPVQETLHGCQPVTQEDGKESRISVQERQ

SEQ ID NO: 113 - protein, 405 aa, synthetic construct
  REGION 1..405: note = Synthetic polypeptide
MEAPAQLLFLLLLWLPDTTRQVQLVQSGAEVKKPGSSVKVSCKASGGTFSNSPINWLRQAPGQGLEWMGSIIPSFGTANYAQKFQGRLTITADESTSTAYMELSSLRSEDTAVYYCAGRSHNYELYYYYMDVWGQGTMVTVSSGGGGSGGGGSGGGGSDIQMTQSPSTLSASIGDRVTITCRASEGIYHWLAWYQQKPGKAPKLLIYKASSLASGAPSRFSGSGSGTDFTLTISSLQPDDFATYYCQQYSNYPLTFGGGTKLEIKRAAAGSGGSGFWVLVVVGGVLACYSLLVTVAFIIFWVRSKRSRLLHSDYMNMTPRRPGPTRKHYQPYAPPRDFAAYRSKKVAKKPTNKAPHPKQEPQEINFPDDLPGSNTAAPVQETLHGCQPVTQEDGKESRISVQERQ

SEQ ID NO: 114 - protein, 539 aa, synthetic construct
  REGION 1..539: note = Synthetic polypeptide
MGVLLTQRTLLSLVLALLFPSMASMQLQESGPGLVRPSQTLSLTCTVSGFTISSGYSWHWVRQPPGRGLEWIGYIQYSGITNYNPSLKSRVTMLVDTSKNQFSLRLSSVTAADTAVYYCAREDYDYHWYFDVWGQGSLVTVSSGGGGSGGGGSGGGGSGVHSDIQMTQSPSSLSASVGDRVTITCSTSSSVSYMHWYQQKPGKAPKLLIYSTSNLASGVPSRFSGSGSGTDFTFTISSLQPEDIATYYCHQWSSYPTFGQGTKVEIKRAAAGSGGSGILVKQSPMLVAYDNAVNLSCKYSYNLFSREFRASLHKGLDSAVEVCVVYGNYSQQLQVYSKTGFNCDGKLGNESVTFYLQNLYVNQTDIYFCKIEVMYPPPYLDNEKSNGTIIHVKGKHLCPSPLFPGPSKPFWVLVVVGGVLACYSLLVTVAFIIFWVRSKRSRLLHSDYMNMTPRRPGPTRKHYQPYAPPRDFAAYRSKKVAKKPTNKAPHPKQEPQEINFPDDLPGSNTAAPVQETLHGCQPVTQEDGKESRISVQERQ

SEQ ID NO: 115 - protein, 535 aa, synthetic construct
  REGION 1..535: note = Synthetic polypeptide
MALPVTALLLPLALLLHAARPQLQESGPGLVRPSQTLSLTCTVSGFTISSGYSWHWVRQPPGRGLEWIGYIQYSGITNYNPSLKSRVTMLVDTSKNQFSLRLSSVTAADTAVYYCAREDYDYHWYFDVWGQGSLVTVSSGGGGSGGGGSGGGGSGVHSDIQMTQSPSSLSASVGDRVTITCSTSSSVSYMHWYQQKPGKAPKLLIYSTSNLASGVPSRFSGSGSGTDFTFTISSLQPEDIATYYCHQWSSYPTFGQGTKVEIKRAAAGSGGSGILVKQSPMLVAYDNAVNLSCKYSYNLFSREFRASLHKGLDSAVEVCVVYGNYSQQLQVYSKTGFNCDGKLGNESVTFYLQNLYVNQTDIYFCKIEVMYPPPYLDNEKSNGTIIHVKGKHLCPSPLFPGPSKPFWVLVVVGGVLACYSLLVTVAFIIFWVRSKRSRLLHSDYMNMTPRRPGPTRKHYQPYAPPRDFAAYRSKKVAKKPTNKAPHPKQEPQEINFPDDLPGSNTAAPVQETLHGCQPVTQEDGKESRISVQERQ

SEQ ID NO: 116 - protein, 538 aa, synthetic construct
  REGION 1..538: note = Synthetic polypeptide
MSFPCKFVASFLLIFNVSSKGAVSQLQESGPGLVRPSQTLSLTCTVSGFTISSGYSWHWVRQPPGRGLEWIGYIQYSGITNYNPSLKSRVTMLVDTSKNQFSLRLSSVTAADTAVYYCAREDYDYHWYFDVWGQGSLVTVSSGGGGSGGGGSGGGGSGVHSDIQMTQSPSSLSASVGDRVTITCSTSSSVSYMHWYQQKPGKAPKLLIYSTSNLASGVPSRFSGSGSGTDFTFTISSLQPEDIATYYCHQWSSYPTFGQGTKVEIKRAAAGSGGSGILVKQSPMLVAYDNAVNLSCKYSYNLFSREFRASLHKGLDSAVEVCVVYGNYSQQLQVYSKTGFNCDGKLGNESVTFYLQNLYVNQTDIYFCKIEVMYPPPYLDNEKSNGTIIHVKGKHLCPSPLFPGPSKPFWVLVVVGGVLACYSLLVTVAFIIFWVRSKRSRLLHSDYMNMTPRRPGPTRKHYQPYAPPRDFAAYRSKKVAKKPTNKAPHPKQEPQEINFPDDLPGSNTAAPVQETLHGCQPVTQEDGKESRISVQERQ

SEQ ID NO: 117 - protein, 534 aa, synthetic construct
  REGION 1..534: note = Synthetic polypeptide
MYRMQLLSCIALSLALVTNSQLQESGPGLVRPSQTLSLTCTVSGFTISSGYSWHWVRQPPGRGLEWIGYIQYSGITNYNPSLKSRVTMLVDTSKNQFSLRLSSVTAADTAVYYCAREDYDYHWYFDVWGQGSLVTVSSGGGGSGGGGSGGGGSGVHSDIQMTQSPSSLSASVGDRVTITCSTSSSVSYMHWYQQKPGKAPKLLIYSTSNLASGVPSRFSGSGSGTDFTFTISSLQPEDIATYYCHQWSSYPTFGQGTKVEIKRAAAGSGGSGILVKQSPMLVAYDNAVNLSCKYSYNLFSREFRASLHKGLDSAVEVCVVYGNYSQQLQVYSKTGFNCDGKLGNESVTFYLQNLYVNQTDIYFCKIEVMYPPPYLDNEKSNGTIIHVKGKHLCPSPLFPGPSKPFWVLVVVGGVLACYSLLVTVAFIIFWVRSKRSRLLHSDYMNMTPRRPGPTRKHYQPYAPPRDFAAYRSKKVAKKPTNKAPHPKQEPQEINFPDDLPGSNTAAPVQETLHGCQPVTQEDGKESRISVQERQ

SEQ ID NO: 118 - protein, 531 aa, synthetic construct
  REGION 1..531: note = Synthetic polypeptide
MWLQSLLLLGTVACSISQLQESGPGLVRPSQTLSLTCTVSGFTISSGYSWHWVRQPPGRGLEWIGYIQYSGITNYNPSLKSRVTMLVDTSKNQFSLRLSSVTAADTAVYYCAREDYDYHWYFDVWGQGSLVTVSSGGGGSGGGGSGGGGSGVHSDIQMTQSPSSLSASVGDRVTITCSTSSSVSYMHWYQQKPGKAPKLLIYSTSNLASGVPSRFSGSGSGTDFTFTISSLQPEDIATYYCHQWSSYPTFGQGTKVEIKRAAAGSGGSGILVKQSPMLVAYDNAVNLSCKYSYNLFSREFRASLHKGLDSAVEVCVVYGNYSQQLQVYSKTGFNCDGKLGNESVTFYLQNLYVNQTDIYFCKIEVMYPPPYLDNEKSNGTIIHVKGKHLCPSPLFPGPSKPFWVLVVVGGVLACYSLLVTVAFIIFWVRSKRSRLLHSDYMNMTPRRPGPTRKHYQPYAPPRDFAAYRSKKVAKKPTNKAPHPKQEPQEINFPDDLPGSNTAAPVQETLHGCQPVTQEDGKESRISVQERQ

SEQ ID NO: 119 - protein, 534 aa, synthetic construct
  REGION 1..534: note = Synthetic polypeptide
MEAPAQLLFLLLLWLPDTTRQLQESGPGLVRPSQTLSLTCTVSGFTISSGYSWHWVRQPPGRGLEWIGYIQYSGITNYNPSLKSRVTMLVDTSKNQFSLRLSSVTAADTAVYYCAREDYDYHWYFDVWGQGSLVTVSSGGGGSGGGGSGGGGSGVHSDIQMTQSPSSLSASVGDRVTITCSTSSSVSYMHWYQQKPGKAPKLLIYSTSNLASGVPSRFSGSGSGTDFTFTISSLQPEDIATYYCHQWSSYPTFGQGTKVEIKRAAAGSGGSGILVKQSPMLVAYDNAVNLSCKYSYNLFSREFRASLHKGLDSAVEVCVVYGNYSQQLQVYSKTGFNCDGKLGNESVTFYLQNLYVNQTDIYFCKIEVMYPPPYLDNEKSNGTIIHVKGKHLCPSPLFPGPSKPFWVLVVVGGVLACYSLLVTVAFIIFWVRSKRSRLLHSDYMNMTPRRPGPTRKHYQPYAPPRDFAAYRSKKVAKKPTNKAPHPKQEPQEINFPDDLPGSNTAAPVQETLHGCQPVTQEDGKESRISVQERQ

SEQ ID NO: 120 - protein, 463 aa, synthetic construct
  REGION 1..463: note = Synthetic polypeptide
MGVLLTQRTLLSLVLALLFPSMASMQLQESGPGLVRPSQTLSLTCTVSGFTISSGYSWHWVRQPPGRGLEWIGYIQYSGITNYNPSLKSRVTMLVDTSKNQFSLRLSSVTAADTAVYYCAREDYDYHWYFDVWGQGSLVTVSSGGGGSGGGGSGGGGSGVHSDIQMTQSPSSLSASVGDRVTITCSTSSSVSYMHWYQQKPGKAPKLLIYSTSNLASGVPSRFSGSGSGTDFTFTISSLQPEDIATYYCHQWSSYPTFGQGTKVEIKRAAAGSGGSGFVPVFLPAKPTTTPAPRPPTPAPTIASQPLSLRPEACRPAAGGAVHTRGLDFACDIYIWAPLAGTCGVLLLSLVITLYCNHRNRSKRSRLLHSDYMNMTPRRPGPTRKHYQPYAPPRDFAAYRSKKVAKKPTNKAPHPKQEPQEINFPDDLPGSNTAAPVQETLHGCQPVTQEDGKESRISVQERQ

SEQ ID NO: 121 - protein, 459 aa, synthetic construct
  REGION 1..459: note = Synthetic polypeptide
MALPVTALLLPLALLLHAARPQLQESGPGLVRPSQTLSLTCTVSGFTISSGYSWHWVRQPPGRGLEWIGYIQYSGITNYNPSLKSRVTMLVDTSKNQFSLRLSSVTAADTAVYYCAREDYDYHWYFDVWGQGSLVTVSSGGGGSGGGGSGGGGSGVHSDIQMTQSPSSLSASVGDRVTITCSTSSSVSYMHWYQQKPGKAPKLLIYSTSNLASGVPSRFSGSGSGTDFTFTISSLQPEDIATYYCHQWSSYPTFGQGTKVEIKRAAAGSGGSGFVPVFLPAKPTTTPAPRPPTPAPTIASQPLSLRPEACRPAAGGAVHTRGLDFACDIYIWAPLAGTCGVLLLSLVITLYCNHRNRSKRSRLLHSDYMNMTPRRPGPTRKHYQPYAPPRDFAAYRSKKVAKKPTNKAPHPKQEPQEINFPDDLPGSNTAAPVQETLHGCQPVTQEDGKESRISVQERQ

SEQ ID NO: 122 - protein, 462 aa, synthetic construct
  REGION 1..462: note = Synthetic polypeptide
MSFPCKFVASFLLIFNVSSKGAVSQLQESGPGLVRPSQTLSLTCTVSGFTISSGYSWHWVRQPPGRGLEWIGYIQYSGITNYNPSLKSRVTMLVDTSKNQFSLRLSSVTAADTAVYYCAREDYDYHWYFDVWGQGSLVTVSSGGGGSGGGGSGGGGSGVHSDIQMTQSPSSLSASVGDRVTITCSTSSSVSYMHWYQQKPGKAPKLLIYSTSNLASGVPSRFSGSGSGTDFTFTISSLQPEDIATYYCHQWSSYPTFGQGTKVEIKRAAAGSGGSGFVPVFLPAKPTTTPAPRPPTPAPTIASQPLSLRPEACRPAAGGAVHTRGLDFACDIYIWAPLAGTCGVLLLSLVITLYCNHRNRSKRSRLLHSDYMNMTPRRPGPTRKHYQPYAPPRDFAAYRSKKVAKKPTNKAPHPKQEPQEINFPDDLPGSNTAAPVQETLHGCQPVTQEDGKESRISVQERQ

SEQ ID NO: 123 - protein, 458 aa, synthetic construct
  REGION 1..458: note = Synthetic polypeptide
MYRMQLLSCIALSLALVTNSQLQESGPGLVRPSQTLSLTCTVSGFTISSGYSWHWVRQPPGRGLEWIGYIQYSGITNYNPSLKSRVTMLVDTSKNQFSLRLSSVTAADTAVYYCAREDYDYHWYFDVWGQGSLVTVSSGGGGSGGGGSGGGGSGVHSDIQMTQSPSSLSASVGDRVTITCSTSSSVSYMHWYQQKPGKAPKLLIYSTSNLASGVPSRFSGSGSGTDFTFTISSLQPEDIATYYCHQWSSYPTFGQGTKVEIKRAAAGSGGSGFVPVFLPAKPTTTPAPRPPTPAPTIASQPLSLRPEACRPAAGGAVHTRGLDFACDIYIWAPLAGTCGVLLLSLVITLYCNHRNRSKRSRLLHSDYMNMTPRRPGPTRKHYQPYAPPRDFAAYRSKKVAKKPTNKAPHPKQEPQEINFPDDLPGSNTAAPVQETLHGCQPVTQEDGKESRISVQERQ

SEQ ID NO: 124 - protein, 455 aa, synthetic construct
  REGION 1..455: note = Synthetic polypeptide
MWLQSLLLLGTVACSISQLQESGPGLVRPSQTLSLTCTVSGFTISSGYSWHWVRQPPGRGLEWIGYIQYSGITNYNPSLKSRVTMLVDTSKNQFSLRLSSVTAADTAVYYCAREDYDYHWYFDVWGQGSLVTVSSGGGGSGGGGSGGGGSGVHSDIQMTQSPSSLSASVGDRVTITCSTSSSVSYMHWYQQKPGKAPKLLIYSTSNLASGVPSRFSGSGSGTDFTFTISSLQPEDIATYYCHQWSSYPTFGQGTKVEIKRAAAGSGGSGFVPVFLPAKPTTTPAPRPPTPAPTIASQPLSLRPEACRPAAGGAVHTRGLDFACDIYIWAPLAGTCGVLLLSLVITLYCNHRNRSKRSRLLHSDYMNMTPRRPGPTRKHYQPYAPPRDFAAYRSKKVAKKPTNKAPHPKQEPQEINFPDDLPGSNTAAPVQETLHGCQPVTQEDGKESRISVQERQ

SEQ ID NO: 125 - protein, 458 aa, synthetic construct
  REGION 1..458: note = Synthetic polypeptide
MEAPAQLLFLLLLWLPDTTRQLQESGPGLVRPSQTLSLTCTVSGFTISSGYSWHWVRQPPGRGLEWIGYIQYSGITNYNPSLKSRVTMLVDTSKNQFSLRLSSVTAADTAVYYCAREDYDYHWYFDVWGQGSLVTVSSGGGGSGGGGSGGGGSGVHSDIQMTQSPSSLSASVGDRVTITCSTSSSVSYMHWYQQKPGKAPKLLIYSTSNLASGVPSRFSGSGSGTDFTFTISSLQPEDIATYYCHQWSSYPTFGQGTKVEIKRAAAGSGGSGFVPVFLPAKPTTTPAPRPPTPAPTIASQPLSLRPEACRPAAGGAVHTRGLDFACDIYIWAPLAGTCGVLLLSLVITLYCNHRNRSKRSRLLHSDYMNMTPRRPGPTRKHYQPYAPPRDFAAYRSKKVAKKPTNKAPHPKQEPQEINFPDDLPGSNTAAPVQETLHGCQPVTQEDGKESRISVQERQ

SEQ ID NO: 126 - protein, 407 aa, synthetic construct
  REGION 1..407: note = Synthetic polypeptide
MGVLLTQRTLLSLVLALLFPSMASMQLQESGPGLVRPSQTLSLTCTVSGFTISSGYSWHWVRQPPGRGLEWIGYIQYSGITNYNPSLKSRVTMLVDTSKNQFSLRLSSVTAADTAVYYCAREDYDYHWYFDVWGQGSLVTVSSGGGGSGGGGSGGGGSGVHSDIQMTQSPSSLSASVGDRVTITCSTSSSVSYMHWYQQKPGKAPKLLIYSTSNLASGVPSRFSGSGSGTDFTFTISSLQPEDIATYYCHQWSSYPTFGQGTKVEIKRAAAGSGGSGFWVLVVVGGVLACYSLLVTVAFIIFWVRSKRSRLLHSDYMNMTPRRPGPTRKHYQPYAPPRDFAAYRSKKVAKKPTNKAPHPKQEPQEINFPDDLPGSNTAAPVQETLHGCQPVTQEDGKESRISVQERQ

SEQ ID NO: 127 - protein, 403 aa, synthetic construct
  REGION 1..403: note = Synthetic polypeptide
MALPVTALLLPLALLLHAARPQLQESGPGLVRPSQTLSLTCTVSGFTISSGYSWHWVRQPPGRGLEWIGYIQYSGITNYNPSLKSRVTMLVDTSKNQFSLRLSSVTAADTAVYYCAREDYDYHWYFDVWGQGSLVTVSSGGGGSGGGGSGGGGSGVHSDIQMTQSPSSLSASVGDRVTITCSTSSSVSYMHWYQQKPGKAPKLLIYSTSNLASGVPSRFSGSGSGTDFTFTISSLQPEDIATYYCHQWSSYPTFGQGTKVEIKRAAAGSGGSGFWVLVVVGGVLACYSLLVTVAFIIFWVRSKRSRLLHSDYMNMTPRRPGPTRKHYQPYAPPRDFAAYRSKKVAKKPTNKAPHPKQEPQEINFPDDLPGSNTAAPVQETLHGCQPVTQEDGKESRISVQERQ

SEQ ID NO: 128 - protein, 406 aa, synthetic construct
  REGION 1..406: note = Synthetic polypeptide
MSFPCKFVASFLLIFNVSSKGAVSQLQESGPGLVRPSQTLSLTCTVSGFTISSGYSWHWVRQPPGRGLEWIGYIQYSGITNYNPSLKSRVTMLVDTSKNQFSLRLSSVTAADTAVYYCAREDYDYHWYFDVWGQGSLVTVSSGGGGSGGGGSGGGGSGVHSDIQMTQSPSSLSASVGDRVTITCSTSSSVSYMHWYQQKPGKAPKLLIYSTSNLASGVPSRFSGSGSGTDFTFTISSLQPEDIATYYCHQWSSYPTFGQGTKVEIKRAAAGSGGSGFWVLVVVGGVLACYSLLVTVAFIIFWVRSKRSRLLHSDYMNMTPRRPGPTRKHYQPYAPPRDFAAYRSKKVAKKPTNKAPHPKQEPQEINFPDDLPGSNTAAPVQETLHGCQPVTQEDGKESRISVQERQ

SEQ ID NO: 129 - protein, 402 aa, synthetic construct
  REGION 1..402: note = Synthetic polypeptide
MYRMQLLSCIALSLALVTNSQLQESGPGLVRPSQTLSLTCTVSGFTISSGYSWHWVRQPPGRGLEWIGYIQYSGITNYNPSLKSRVTMLVDTSKNQFSLRLSSVTAADTAVYYCAREDYDYHWYFDVWGQGSLVTVSSGGGGSGGGGSGGGGSGVHSDIQMTQSPSSLSASVGDRVTITCSTSSSVSYMHWYQQKPGKAPKLLIYSTSNLASGVPSRFSGSGSGTDFTFTISSLQPEDIATYYCHQWSSYPTFGQGTKVEIKRAAAGSGGSGFWVLVVVGGVLACYSLLVTVAFIIFWVRSKRSRLLHSDYMNMTPRRPGPTRKHYQPYAPPRDFAAYRSKKVAKKPTNKAPHPKQEPQEINFPDDLPGSNTAAPVQETLHGCQPVTQEDGKESRISVQERQ

SEQ ID NO: 130 - protein, 399 aa, synthetic construct
  REGION 1..399: note = Synthetic polypeptide
MWLQSLLLLGTVACSISQLQESGPGLVRPSQTLSLTCTVSGFTISSGYSWHWVRQPPGRGLEWIGYIQYSGITNYNPSLKSRVTMLVDTSKNQFSLRLSSVTAADTAVYYCAREDYDYHWYFDVWGQGSLVTVSSGGGGSGGGGSGGGGSGVHSDIQMTQSPSSLSASVGDRVTITCSTSSSVSYMHWYQQKPGKAPKLLIYSTSNLASGVPSRFSGSGSGTDFTFTISSLQPEDIATYYCHQWSSYPTFGQGTKVEIKRAAAGSGGSGFWVLVVVGGVLACYSLLVTVAFIIFWVRSKRSRLLHSDYMNMTPRRPGPTRKHYQPYAPPRDFAAYRSKKVAKKPTNKAPHPKQEPQEINFPDDLPGSNTAAPVQETLHGCQPVTQEDGKESRISVQERQ

SEQ ID NO: 131 - protein, 402 aa, synthetic construct
  REGION 1..402: note = Synthetic polypeptide
MEAPAQLLFLLLLWLPDTTRQLQESGPGLVRPSQTLSLTCTVSGFTISSGYSWHWVRQPPGRGLEWIGYIQYSGITNYNPSLKSRVTMLVDTSKNQFSLRLSSVTAADTAVYYCAREDYDYHWYFDVWGQGSLVTVSSGGGGSGGGGSGGGGSGVHSDIQMTQSPSSLSASVGDRVTITCSTSSSVSYMHWYQQKPGKAPKLLIYSTSNLASGVPSRFSGSGSGTDFTFTISSLQPEDIATYYCHQWSSYPTFGQGTKVEIKRAAAGSGGSGFWVLVVVGGVLACYSLLVTVAFIIFWVRSKRSRLLHSDYMNMTPRRPGPTRKHYQPYAPPRDFAAYRSKKVAKKPTNKAPHPKQEPQEINFPDDLPGSNTAAPVQETLHGCQPVTQEDGKESRISVQERQ

SEQ ID NO: 132 - protein, 543 aa, synthetic construct
  REGION 1..543: note = Synthetic polypeptide
MGVLLTQRTLLSLVLALLFPSMASMEVQLVESGGGLVQPGGSLRLSCAASGFNIKDTYMHWVRQAPGKGLEWVARIDPANGNSKYADSVKGRFTISADTSKNTAYLQMNSLRAEDTAVYYCAPFGYYVSDYAMAYWGQGTLVTVSSGGGGSGGGGSGGGGSDIQLTQSPSSLSASVGDRVTITCRAGESVDIFGVGFLHWYQQKPGKAPKLLIYRASNLESGVPSRFSGSGSRTDFTLTISSLQPEDFATYYCQQTNEDPYTFGQGTKVEIKAAAGSGGSGILVKQSPMLVAYDNAVNLSCKYSYNLFSREFRASLHKGLDSAVEVCVVYGNYSQQLQVYSKTGFNCDGKLGNESVTFYLQNLYVNQTDIYFCKIEVMYPPPYLDNEKSNGTIIHVKGKHLCPSPLFPGPSKPFWVLVVVGGVLACYSLLVTVAFIIFWVRSKRSRLLHSDYMNMTPRRPGPTRKHYQPYAPPRDFAAYRSKKVAKKPTNKAPHPKQEPQEINFPDDLPGSNTAAPVQETLHGCQPVTQEDGKESRISVQERQ

SEQ ID NO: 133 - protein, 539 aa, synthetic construct
  REGION 1..539: note = Synthetic polypeptide
MALPVTALLLPLALLLHAARPEVQLVESGGGLVQPGGSLRLSCAASGFNIKDTYMHWVRQAPGKGLEWVARIDPANGNSKYADSVKGRFTISADTSKNTAYLQMNSLRAEDTAVYYCAPFGYYVSDYAMAYWGQGTLVTVSSGGGGSGGGGSGGGGSDIQLTQSPSSLSASVGDRVTITCRAGESVDIFGVGFLHWYQQKPGKAPKLLIYRASNLESGVPSRFSGSGSRTDFTLTISSLQPEDFATYYCQQTNEDPYTFGQGTKVEIKAAAGSGGSGILVKQSPMLVAYDNAVNLSCKYSYNLFSREFRASLHKGLDSAVEVCVVYGNYSQQLQVYSKTGFNCDGKLGNESVTFYLQNLYVNQTDIYFCKIEVMYPPPYLDNEKSNGTIIHVKGKHLCPSPLFPGPSKPFWVLVVVGGVLACYSLLVTVAFIIFWVRSKRSRLLHSDYMNMTPRRPGPTRKHYQPYAPPRDFAAYRSKKVAKKPTNKAPHPKQEPQEINFPDDLPGSNTAAPVQETLHGCQPVTQEDGKESRISVQERQ

SEQ ID NO: 134 - protein, 542 aa, synthetic construct
  REGION 1..542: note = Synthetic polypeptide
MSFPCKFVASFLLIFNVSSKGAVSEVQLVESGGGLVQPGGSLRLSCAASGFNIKDTYMHWVRQAPGKGLEWVARIDPANGNSKYADSVKGRFTISADTSKNTAYLQMNSLRAEDTAVYYCAPFGYYVSDYAMAYWGQGTLVTVSSGGGGSGGGGSGGGGSDIQLTQSPSSLSASVGDRVTITCRAGESVDIFGVGFLHWYQQKPGKAPKLLIYRASNLESGVPSRFSGSGSRTDFTLTISSLQPEDFATYYCQQTNEDPYTFGQGTKVEIKAAAGSGGSGILVKQSPMLVAYDNAVNLSCKYSYNLFSREFRASLHKGLDSAVEVCVVYGNYSQQLQVYSKTGFNCDGKLGNESVTFYLQNLYVNQTDIYFCKIEVMYPPPYLDNEKSNGTIIHVKGKHLCPSPLFPGPSKPFWVLVVVGGVLACYSLLVTVAFIIFWVRSKRSRLLHSDYMNMTPRRPGPTRKHYQPYAPPRDFAAYRSKKVAKKPTNKAPHPKQEPQEINFPDDLPGSNTAAPVQETLHGCQPVTQEDGKESRISVQERQ

SEQ ID NO: 135 - protein, 538 aa, synthetic construct
  REGION 1..538: note = Synthetic polypeptide
MYRMQLLSCIALSLALVTNSEVQLVESGGGLVQPGGSLRLSCAASGFNIKDTYMHWVRQAPGKGLEWVARIDPANGNSKYADSVKGRFTISADTSKNTAYLQMNSLRAEDTAVYYCAPFGYYVSDYAMAYWGQGTLVTVSSGGGGSGGGGSGGGGSDIQLTQSPSSLSASVGDRVTITCRAGESVDIFGVGFLHWYQQKPGKAPKLLIYRASNLESGVPSRFSGSGSRTDFTLTISSLQPEDFATYYCQQTNEDPYTFGQGTKVEIKAAAGSGGSGILVKQSPMLVAYDNAVNLSCKYSYNLFSREFRASLHKGLDSAVEVCVVYGNYSQQLQVYSKTGFNCDGKLGNESVTFYLQNLYVNQTDIYFCKIEVMYPPPYLDNEKSNGTIIHVKGKHLCPSPLFPGPSKPFWVLVVVGGVLACYSLLVTVAFIIFWVRSKRSRLLHSDYMNMTPRRPGPTRKHYQPYAPPRDFAAYRSKKVAKKPTNKAPHPKQEPQEINFPDDLPGSNTAAPVQETLHGCQPVTQEDGKESRISVQERQ

SEQ ID NO: 136 - protein, 535 aa, synthetic construct
  REGION 1..535: note = Synthetic polypeptide
MWLQSLLLLGTVACSISEVQLVESGGGLVQPGGSLRLSCAASGFNIKDTYMHWVRQAPGKGLEWVARIDPANGNSKYADSVKGRFTISADTSKNTAYLQMNSLRAEDTAVYYCAPFGYYVSDYAMAYWGQGTLVTVSSGGGGSGGGGSGGGGSDIQLTQSPSSLSASVGDRVTITCRAGESVDIFGVGFLHWYQQKPGKAPKLLIYRASNLESGVPSRFSGSGSRTDFTLTISSLQPEDFATYYCQQTNEDPYTFGQGTKVEIKAAAGSGGSGILVKQSPMLVAYDNAVNLSCKYSYNLFSREFRASLHKGLDSAVEVCVVYGNYSQQLQVYSKTGFNCDGKLGNESVTFYLQNLYVNQTDIYFCKIEVMYPPPYLDNEKSNGTIIHVKGKHLCPSPLFPGPSKPFWVLVVVGGVLACYSLLVTVAFIIFWVRSKRSRLLHSDYMNMTPRRPGPTRKHYQPYAPPRDFAAYRSKKVAKKPTNKAPHPKQEPQEINFPDDLPGSNTAAPVQETLHGCQPVTQEDGKESRISVQERQ

SEQ ID NO: 137 - protein, 538 aa, synthetic construct
  REGION 1..538: note = Synthetic polypeptide
MEAPAQLLFLLLLWLPDTTREVQLVESGGGLVQPGGSLRLSCAASGFNIKDTYMHWVRQAPGKGLEWVARIDPANGNSKYADSVKGRFTISADTSKNTAYLQMNSLRAEDTAVYYCAPFGYYVSDYAMAYWGQGTLVTVSSGGGGSGGGGSGGGGSDIQLTQSPSSLSASVGDRVTITCRAGESVDIFGVGFLHWYQQKPGKAPKLLIYRASNLESGVPSRFSGSGSRTDFTLTISSLQPEDFATYYCQQTNEDPYTFGQGTKVEIKAAAGSGGSGILVKQSPMLVAYDNAVNLSCKYSYNLFSREFRASLHKGLDSAVEVCVVYGNYSQQLQVYSKTGFNCDGKLGNESVTFYLQNLYVNQTDIYFCKIEVMYPPPYLDNEKSNGTIIHVKGKHLCPSPLFPGPSKPFWVLVVVGGVLACYSLLVTVAFIIFWVRSKRSRLLHSDYMNMTPRRPGPTRKHYQPYAPPRDFAAYRSKKVAKKPTNKAPHPKQEPQEINFPDDLPGSNTAAPVQETLHGCQPVTQEDGKESRISVQERQ

SEQ ID NO: 138 - protein, 467 aa, synthetic construct
  REGION 1..467: note = Synthetic polypeptide
MGVLLTQRTLLSLVLALLFPSMASMEVQLVESGGGLVQPGGSLRLSCAASGFNIKDTYMHWVRQAPGKGLEWVARIDPANGNSKYADSVKGRFTISADTSKNTAYLQMNSLRAEDTAVYYCAPFGYYVSDYAMAYWGQGTLVTVSSGGGGSGGGGSGGGGSDIQLTQSPSSLSASVGDRVTITCRAGESVDIFGVGFLHWYQQKPGKAPKLLIYRASNLESGVPSRFSGSGSRTDFTLTISSLQPEDFATYYCQQTNEDPYTFGQGTKVEIKAAAGSGGSGFVPVFLPAKPTTTPAPRPPTPAPTIASQPLSLRPEACRPAAGGAVHTRGLDFACDIYIWAPLAGTCGVLLLSLVITLYCNHRNRSKRSRLLHSDYMNMTPRRPGPTRKHYQPYAPPRDFAAYRSKKVAKKPTNKAPHPKQEPQEINFPDDLPGSNTAAPVQETLHGCQPVTQEDGKESRISVQERQ

SEQ ID NO: 139 - protein, 463 aa, synthetic construct
  REGION 1..463: note = Synthetic polypeptide
MALPVTALLLPLALLLHAARPEVQLVESGGGLVQPGGSLRLSCAASGFNIKDTYMHWVRQAPGKGLEWVARIDPANGNSKYADSVKGRFTISADTSKNTAYLQMNSLRAEDTAVYYCAPFGYYVSDYAMAYWGQGTLVTVSSGGGGSGGGGSGGGGSDIQLTQSPSSLSASVGDRVTITCRAGESVDIFGVGFLHWYQQKPGKAPKLLIYRASNLESGVPSRFSGSGSRTDFTLTISSLQPEDFATYYCQQTNEDPYTFGQGTKVEIKAAAGSGGSGFVPVFLPAKPTTTPAPRPPTPAPTIASQPLSLRPEACRPAAGGAVHTRGLDFACDIYIWAPLAGTCGVLLLSLVITLYCNHRNRSKRSRLLHSDYMNMTPRRPGPTRKHYQPYAPPRDFAAYRSKKVAKKPTNKAPHPKQEPQEINFPDDLPGSNTAAPVQETLHGCQPVTQEDGKESRISVQERQ

SEQ ID NO: 140 - protein, 466 aa, synthetic construct
  REGION 1..466: note = Synthetic polypeptide
MSFPCKFVASFLLIFNVSSKGAVSEVQLVESGGGLVQPGGSLRLSCAASGFNIKDTYMHWVRQAPGKGLEWVARIDPANGNSKYADSVKGRFTISADTSKNTAYLQMNSLRAEDTAVYYCAPFGYYVSDYAMAYWGQGTLVTVSSGGGGSGGGGSGGGGSDIQLTQSPSSLSASVGDRVTITCRAGESVDIFGVGFLHWYQQKPGKAPKLLIYRASNLESGVPSRFSGSGSRTDFTLTISSLQPEDFATYYCQQTNEDPYTFGQGTKVEIKAAAGSGGSGFVPVFLPAKPTTTPAPRPPTPAPTIASQPLSLRPEACRPAAGGAVHTRGLDFACDIYIWAPLAGTCGVLLLSLVITLYCNHRNRSKRSRLLHSDYMNMTPRRPGPTRKHYQPYAPPRDFAAYRSKKVAKKPTNKAPHPKQEPQEINFPDDLPGSNTAAPVQETLHGCQPVTQEDGKESRISVQERQ

SEQ ID NO: 141 - protein, 462 aa, synthetic construct
  REGION 1..462: note = Synthetic polypeptide
MYRMQLLSCIALSLALVTNSEVQLVESGGGLVQPGGSLRLSCAASGFNIKDTYMHWVRQAPGKGLEWVARIDPANGNSKYADSVKGRFTISADTSKNTAYLQMNSLRAEDTAVYYCAPFGYYVSDYAMAYWGQGTLVTVSSGGGGSGGGGSGGGGSDIQLTQSPSSLSASVGDRVTITCRAGESVDIFGVGFLHWYQQKPGKAPKLLIYRASNLESGVPSRFSGSGSRTDFTLTISSLQPEDFATYYCQQTNEDPYTFGQGTKVEIKAAAGSGGSGFVPVFLPAKPTTTPAPRPPTPAPTIASQPLSLRPEACRPAAGGAVHTRGLDFACDIYIWAPLAGTCGVLLLSLVITLYCNHRNRSKRSRLLHSDYMNMTPRRPGPTRKHYQPYAPPRDFAAYRSKKVAKKPTNKAPHPKQEPQEINFPDDLPGSNTAAPVQETLHGCQPVTQEDGKESRISVQERQ

SEQ ID NO: 142 - protein, 459 aa, synthetic construct
  REGION 1..459: note = Synthetic polypeptide
MWLQSLLLLGTVACSISEVQLVESGGGLVQPGGSLRLSCAASGFNIKDTYMHWVRQAPGKGLEWVARIDPANGNSKYADSVKGRFTISADTSKNTAYLQMNSLRAEDTAVYYCAPFGYYVSDYAMAYWGQGTLVTVSSGGGGSGGGGSGGGGSDIQLTQSPSSLSASVGDRVTITCRAGESVDIFGVGFLHWYQQKPGKAPKLLIYRASNLESGVPSRFSGSGSRTDFTLTISSLQPEDFATYYCQQTNEDPYTFGQGTKVEIKAAAGSGGSGFVPVFLPAKPTTTPAPRPPTPAPTIASQPLSLRPEACRPAAGGAVHTRGLDFACDIYIWAPLAGTCGVLLLSLVITLYCNHRNRSKRSRLLHSDYMNMTPRRPGPTRKHYQPYAPPRDFAAYRSKKVAKKPTNKAPHPKQEPQEINFPDDLPGSNTAAPVQETLHGCQPVTQEDGKESRISVQERQ

SEQ ID NO: 143 - protein, 462 aa, synthetic construct
  REGION 1..462: note = Synthetic polypeptide
MEAPAQLLFLLLLWLPDTTREVQLVESGGGLVQPGGSLRLSCAASGFNIKDTYMHWVRQAPGKGLEWVARIDPANGNSKYADSVKGRFTISADTSKNTAYLQMNSLRAEDTAVYYCAPFGYYVSDYAMAYWGQGTLVTVSSGGGGSGGGGSGGGGSDIQLTQSPSSLSASVGDRVTITCRAGESVDIFGVGFLHWYQQKPGKAPKLLIYRASNLESGVPSRFSGSGSRTDFTLTISSLQPEDFATYYCQQTNEDPYTFGQGTKVEIKAAAGSGGSGFVPVFLPAKPTTTPAPRPPTPAPTIASQPLSLRPEACRPAAGGAVHTRGLDFACDIYIWAPLAGTCGVLLLSLVITLYCNHRNRSKRSRLLHSDYMNMTPRRPGPTRKHYQPYAPPRDFAAYRSKKVAKKPTNKAPHPKQEPQEINFPDDLPGSNTAAPVQETLHGCQPVTQEDGKESRISVQERQ

SEQ ID NO: 144 - protein, 411 aa, synthetic construct
  REGION 1..411: note = Synthetic polypeptide
MGVLLTQRTLLSLVLALLFPSMASMEVQLVESGGGLVQPGGSLRLSCAASGFNIKDTYMHWVRQAPGKGLEWVARIDPANGNSKYADSVKGRFTISADTSKNTAYLQMNSLRAEDTAVYYCAPFGYYVSDYAMAYWGQGTLVTVSSGGGGSGGGGSGGGGSDIQLTQSPSSLSASVGDRVTITCRAGESVDIFGVGFLHWYQQKPGKAPKLLIYRASNLESGVPSRFSGSGSRTDFTLTISSLQPEDFATYYCQQTNEDPYTFGQGTKVEIKAAAGSGGSGFWVLVVVGGVLACYSLLVTVAFIIFWVRSKRSRLLHSDYMNMTPRRPGPTRKHYQPYAPPRDFAAYRSKKVAKKPTNKAPHPKQEPQEINFPDDLPGSNTAAPVQETLHGCQPVTQEDGKESRISVQERQ

SEQ ID NO: 145 - protein, 407 aa, synthetic construct
  REGION 1..407: note = Synthetic polypeptide
MALPVTALLLPLALLLHAARPEVQLVESGGGLVQPGGSLRLSCAASGFNIKDTYMHWVRQAPGKGLEWVARIDPANGNSKYADSVKGRFTISADTSKNTAYLQMNSLRAEDTAVYYCAPFGYYVSDYAMAYWGQGTLVTVSSGGGGSGGGGSGGGGSDIQLTQSPSSLSASVGDRVTITCRAGESVDIFGVGFLHWYQQKPGKAPKLLIYRASNLESGVPSRFSGSGSRTDFTLTISSLQPEDFATYYCQQTNEDPYTFGQGTKVEIKAAAGSGGSGFWVLVVVGGVLACYSLLVTVAFIIFWVRSKRSRLLHSDYMNMTPRRPGPTRKHYQPYAPPRDFAAYRSKKVAKKPTNKAPHPKQEPQEINFPDDLPGSNTAAPVQETLHGCQPVTQEDGKESRISVQERQ

SEQ ID NO: 146 - protein, 410 aa, synthetic construct
  REGION 1..410: note = Synthetic polypeptide
MSFPCKFVASFLLIFNVSSKGAVSEVQLVESGGGLVQPGGSLRLSCAASGFNIKDTYMHWVRQAPGKGLEWVARIDPANGNSKYADSVKGRFTISADTSKNTAYLQMNSLRAEDTAVYYCAPFGYYVSDYAMAYWGQGTLVTVSSGGGGSGGGGSGGGGSDIQLTQSPSSLSASVGDRVTITCRAGESVDIFGVGFLHWYQQKPGKAPKLLIYRASNLESGVPSRFSGSGSRTDFTLTISSLQPEDFATYYCQQTNEDPYTFGQGTKVEIKAAAGSGGSGFWVLVVVGGVLACYSLLVTVAFIIFWVRSKRSRLLHSDYMNMTPRRPGPTRKHYQPYAPPRDFAAYRSKKVAKKPTNKAPHPKQEPQEINFPDDLPGSNTAAPVQETLHGCQPVTQEDGKESRISVQERQ

SEQ ID NO: 147 - protein, 406 aa, synthetic construct
  REGION 1..406: note = Synthetic polypeptide
MYRMQLLSCIALSLALVTNSEVQLVESGGGLVQPGGSLRLSCAASGFNIKDTYMHWVRQAPGKGLEWVARIDPANGNSKYADSVKGRFTISADTSKNTAYLQMNSLRAEDTAVYYCAPFGYYVSDYAMAYWGQGTLVTVSSGGGGSGGGGSGGGGSDIQLTQSPSSLSASVGDRVTITCRAGESVDIFGVGFLHWYQQKPGKAPKLLIYRASNLESGVPSRFSGSGSRTDFTLTISSLQPEDFATYYCQQTNEDPYTFGQGTKVEIKAAAGSGGSGFWVLVVVGGVLACYSLLVTVAFIIFWVRSKRSRLLHSDYMNMTPRRPGPTRKHYQPYAPPRDFAAYRSKKVAKKPTNKAPHPKQEPQEINFPDDLPGSNTAAPVQETLHGCQPVTQEDGKESRISVQERQ

SEQ ID NO: 148 - protein, 403 aa, synthetic construct
  REGION 1..403: note = Synthetic polypeptide
MWLQSLLLLGTVACSISEVQLVESGGGLVQPGGSLRLSCAASGFNIKDTYMHWVRQAPGKGLEWVARIDPANGNSKYADSVKGRFTISADTSKNTAYLQMNSLRAEDTAVYYCAPFGYYVSDYAMAYWGQGTLVTVSSGGGGSGGGGSGGGGSDIQLTQSPSSLSASVGDRVTITCRAGESVDIFGVGFLHWYQQKPGKAPKLLIYRASNLESGVPSRFSGSGSRTDFTLTISSLQPEDFATYYCQQTNEDPYTFGQGTKVEIKAAAGSGGSGFWVLVVVGGVLACYSLLVTVAFIIFWVRSKRSRLLHSDYMNMTPRRPGPTRKHYQPYAPPRDFAAYRSKKVAKKPTNKAPHPKQEPQEINFPDDLPGSNTAAPVQETLHGCQPVTQEDGKESRISVQERQ

SEQ ID NO: 149 - protein, 406 aa, synthetic construct
  REGION 1..406: note = Synthetic polypeptide
MEAPAQLLFLLLLWLPDTTREVQLVESGGGLVQPGGSLRLSCAASGFNIKDTYMHWVRQAPGKGLEWVARIDPANGNSKYADSVKGRFTISADTSKNTAYLQMNSLRAEDTAVYYCAPFGYYVSDYAMAYWGQGTLVTVSSGGGGSGGGGSGGGGSDIQLTQSPSSLSASVGDRVTITCRAGESVDIFGVGFLHWYQQKPGKAPKLLIYRASNLESGVPSRFSGSGSRTDFTLTISSLQPEDFATYYCQQTNEDPYTFGQGTKVEIKAAAGSGGSGFWVLVVVGGVLACYSLLVTVAFIIFWVRSKRSRLLHSDYMNMTPRRPGPTRKHYQPYAPPRDFAAYRSKKVAKKPTNKAPHPKQEPQEINFPDDLPGSNTAAPVQETLHGCQPVTQEDGKESRISVQERQ

SEQ ID NO: 150 - protein, 427 aa, synthetic construct
  REGION 1..427: note = Synthetic polypeptide
MGVLLTQRTLLSLVLALLFPSMASMQVKLQQSGAELVRSGTSVKLSCTASGFNIKDSYMHWLRQGPEQGLEWIGWIDPENGDTEYAPKFQGKATFTTDTSSNTAYLQLSSLTSEDTAVYYCNEGTPTGPYYFDYWGQGTTVTVSSGGGGSGGGGSGGGGSENVLTQSPAIMSASPGEKVTITCSASSSVSYMHWFQQKPGTSPKLWIYSTSNLASGVPARFSGSGSGTSYSLTISRMEAEDAATYYCQQRSSYPLTFGAGTKLELKRAAAGSGGSGIIHVKGKHLCPSPLFPGPSKPFWVLVVVGGVLACYSLLVTVAFIIFWVRSKRSRLLHSDYMNMTPRRPGPTRKHYQPYAPPRDFAAYRSKKVAKKPTNKAPHPKQEPQEINFPDDLPGSNTAAPVQETLHGCQPVTQEDGKESRISVQERQ

SEQ ID NO: 151 - protein, 423 aa, synthetic construct
  REGION 1..423: note = Synthetic polypeptide
MALPVTALLLPLALLLHAARPQVKLQQSGAELVRSGTSVKLSCTASGFNIKDSYMHWLRQGPEQGLEWIGWIDPENGDTEYAPKFQGKATFTTDTSSNTAYLQLSSLTSEDTAVYYCNEGTPTGPYYFDYWGQGTTVTVSSGGGGSGGGGSGGGGSENVLTQSPAIMSASPGEKVTITCSASSSVSYMHWFQQKPGTSPKLWIYSTSNLASGVPARFSGSGSGTSYSLTISRMEAEDAATYYCQQRSSYPLTFGAGTKLELKRAAAGSGGSGIIHVKGKHLCPSPLFPGPSKPFWVLVVVGGVLACYSLLVTVAFIIFWVRSKRSRLLHSDYMNMTPRRPGPTRKHYQPYAPPRDFAAYRSKKVAKKPTNKAPHPKQEPQEINFPDDLPGSNTAAPVQETLHGCQPVTQEDGKESRISVQERQ

SEQ ID NO: 152 - protein, 426 aa, synthetic construct
  REGION 1..426: note = Synthetic polypeptide
MSFPCKFVASFLLIFNVSSKGAVSQVKLQQSGAELVRSGTSVKLSCTASGFNIKDSYMHWLRQGPEQGLEWIGWIDPENGDTEYAPKFQGKATFTTDTSSNTAYLQLSSLTSEDTAVYYCNEGTPTGPYYFDYWGQGTTVTVSSGGGGSGGGGSGGGGSENVLTQSPAIMSASPGEKVTITCSASSSVSYMHWFQQKPGTSPKLWIYSTSNLASGVPARFSGSGSGTSYSLTISRMEAEDAATYYCQQRSSYPLTFGAGTKLELKRAAAGSGGSGIIHVKGKHLCPSPLFPGPSKPFWVLVVVGGVLACYSLLVTVAFIIFWVRSKRSRLLHSDYMNMTPRRPGPTRKHYQPYAPPRDFAAYRSKKVAKKPTNKAPHPKQEPQEINFPDDLPGSNTAAPVQETLHGCQPVTQEDGKESRISVQERQ

SEQ ID NO: 153 - protein, 422 aa, synthetic construct
  REGION 1..422: note = Synthetic polypeptide
MYRMQLLSCIALSLALVTNSQVKLQQSGAELVRSGTSVKLSCTASGFNIKDSYMHWLRQGPEQGLEWIGWIDPENGDTEYAPKFQGKATFTTDTSSNTAYLQLSSLTSEDTAVYYCNEGTPTGPYYFDYWGQGTTVTVSSGGGGSGGGGSGGGGSENVLTQSPAIMSASPGEKVTITCSASSSVSYMHWFQQKPGTSPKLWIYSTSNLASGVPARFSGSGSGTSYSLTISRMEAEDAATYYCQQRSSYPLTFGAGTKLELKRAAAGSGGSGIIHVKGKHLCPSPLFPGPSKPFWVLVVVGGVLACYSLLVTVAFIIFWVRSKRSRLLHSDYMNMTPRRPGPTRKHYQPYAPPRDFAAYRSKKVAKKPTNKAPHPKQEPQEINFPDDLPGSNTAAPVQETLHGCQPVTQEDGKESRISVQERQ

SEQ ID NO: 154 - protein, 419 aa, synthetic construct
  REGION 1..419: note = Synthetic polypeptide
MWLQSLLLLGTVACSISQVKLQQSGAELVRSGTSVKLSCTASGFNIKDSYMHWLRQGPEQGLEWIGWIDPENGDTEYAPKFQGKATFTTDTSSNTAYLQLSSLTSEDTAVYYCNEGTPTGPYYFDYWGQGTTVTVSSGGGGSGGGGSGGGGSENVLTQSPAIMSASPGEKVTITCSASSSVSYMHWFQQKPGTSPKLWIYSTSNLASGVPARFSGSGSGTSYSLTISRMEAEDAATYYCQQRSSYPLTFGAGTKLELKRAAAGSGGSGIIHVKGKHLCPSPLFPGPSKPFWVLVVVGGVLACYSLLVTVAFIIFWVRSKRSRLLHSDYMNMTPRRPGPTRKHYQPYAPPRDFAAYRSKKVAKKPTNKAPHPKQEPQEINFPDDLPGSNTAAPVQETLHGCQPVTQEDGKESRISVQERQ

SEQ ID NO: 155 - protein, 422 aa, synthetic construct
  REGION 1..422: note = Synthetic polypeptide
MEAPAQLLFLLLLWLPDTTRQVKLQQSGAELVRSGTSVKLSCTASGFNIKDSYMHWLRQGPEQGLEWIGWIDPENGDTEYAPKFQGKATFTTDTSSNTAYLQLSSLTSEDTAVYYCNEGTPTGPYYFDYWGQGTTVTVSSGGGGSGGGGSGGGGSENVLTQSPAIMSASPGEKVTITCSASSSVSYMHWFQQKPGTSPKLWIYSTSNLASGVPARFSGSGSGTSYSLTISRMEAEDAATYYCQQRSSYPLTFGAGTKLELKRAAAGSGGSGIIHVKGKHLCPSPLFPGPSKPFWVLVVVGGVLACYSLLVTVAFIIFWVRSKRSRLLHSDYMNMTPRRPGPTRKHYQPYAPPRDFAAYRSKKVAKKPTNKAPHPKQEPQEINFPDDLPGSNTAAPVQETLHGCQPVTQEDGKESRISVQERQ

SEQ ID NO: 156 - protein, 427 aa, synthetic construct
  REGION 1..427: note = Synthetic polypeptide
MGVLLTQRTLLSLVLALLFPSMASMQVQLQQSGAELVRSGTSVKLSCTASGFNIKDSYMHWLRQGPEQGLEWIGWIDPENGDTEYAPKFQGKATFTTDTSSNTAYLQLSSLTSEDTAVYYCNEGTPTGPYYFDYWGQGTTVTVSSGGGGSGGGGSGGGGSENVLTQSPAIMSASPGEKVTITCSASSSVSYMHWFQQKPGTSPKLWIYSTSNLASGVPARFSGSGSGTSYSLTISRMEAEDAATYYCQQRSSYPLTFGAGTKLELKRAAAGSGGSGIIHVKGKHLCPSPLFPGPSKPFWVLVVVGGVLACYSLLVTVAFIIFWVRSKRSRLLHSDYMNMTPRRPGPTRKHYQPYAPPRDFAAYRSKKVAKKPTNKAPHPKQEPQEINFPDDLPGSNTAAPVQETLHGCQPVTQEDGKESRISVQERQ

SEQ ID NO: 157 - protein, 423 aa, synthetic construct
  REGION 1..423: note = Synthetic polypeptide
MALPVTALLLPLALLLHAARPQVQLQQSGAELVRSGTSVKLSCTASGFNIKDSYMHWLRQGPEQGLEWIGWIDPENGDTEYAPKFQGKATFTTDTSSNTAYLQLSSLTSEDTAVYYCNEGTPTGPYYFDYWGQGTTVTVSSGGGGSGGGGSGGGGSENVLTQSPAIMSASPGEKVTITCSASSSVSYMHWFQQKPGTSPKLWIYSTSNLASGVPARFSGSGSGTSYSLTISRMEAEDAATYYCQQRSSYPLTFGAGTKLELKRAAAGSGGSGIIHVKGKHLCPSPLFPGPSKPFWVLVVVGGVLACYSLLVTVAFIIFWVRSKRSRLLHSDYMNMTPRRPGPTRKHYQPYAPPRDFAAYRSKKVAKKPTNKAPHPKQEPQEINFPDDLPGSNTAAPVQETLHGCQPVTQEDGKESRISVQERQ

SEQ ID NO: 158 - protein, 426 aa, synthetic construct
  REGION 1..426: note = Synthetic polypeptide
MSFPCKFVASFLLIFNVSSKGAVSQVQLQQSGAELVRSGTSVKLSCTASGFNIKDSYMHWLRQGPEQGLEWIGWIDPENGDTEYAPKFQGKATFTTDTSSNTAYLQLSSLTSEDTAVYYCNEGTPTGPYYFDYWGQGTTVTVSSGGGGSGGGGSGGGGSENVLTQSPAIMSASPGEKVTITCSASSSVSYMHWFQQKPGTSPKLWIYSTSNLASGVPARFSGSGSGTSYSLTISRMEAEDAATYYCQQRSSYPLTFGAGTKLELKRAAAGSGGSGIIHVKGKHLCPSPLFPGPSKPFWVLVVVGGVLACYSLLVTVAFIIFWVRSKRSRLLHSDYMNMTPRRPGPTRKHYQPYAPPRDFAAYRSKKVAKKPTNKAPHPKQEPQEINFPDDLPGSNTAAPVQETLHGCQPVTQEDGKESRISVQERQ

SEQ ID NO: 159 - protein, 422 aa, synthetic construct
  REGION 1..422: note = Synthetic polypeptide
MYRMQLLSCIALSLALVTNSQVQLQQSGAELVRSGTSVKLSCTASGFNIKDSYMHWLRQGPEQGLEWIGWIDPENGDTEYAPKFQGKATFTTDTSSNTAYLQLSSLTSEDTAVYYCNEGTPTGPYYFDYWGQGTTVTVSSGGGGSGGGGSGGGGSENVLTQSPAIMSASPGEKVTITCSASSSVSYMHWFQQKPGTSPKLWIYSTSNLASGVPARFSGSGSGTSYSLTISRMEAEDAATYYCQQRSSYPLTFGAGTKLELKRAAAGSGGSGIIHVKGKHLCPSPLFPGPSKPFWVLVVVGGVLACYSLLVTVAFIIFWVRSKRSRLLHSDYMNMTPRRPGPTRKHYQPYAPPRDFAAYRSKKVAKKPTNKAPHPKQEPQEINFPDDLPGSNTAAPVQETLHGCQPVTQEDGKESRISVQERQ

SEQ ID NO: 160 - protein, 419 aa, synthetic construct
  REGION 1..419: note = Synthetic polypeptide
MWLQSLLLLGTVACSISQVQLQQSGAELVRSGTSVKLSCTASGFNIKDSYMHWLRQGPEQGLEWIGWIDPENGDTEYAPKFQGKATFTTDTSSNTAYLQLSSLTSEDTAVYYCNEGTPTGPYYFDYWGQGTTVTVSSGGGGSGGGGSGGGGSENVLTQSPAIMSASPGEKVTITCSASSSVSYMHWFQQKPGTSPKLWIYSTSNLASGVPARFSGSGSGTSYSLTISRMEAEDAATYYCQQRSSYPLTFGAGTKLELKRAAAGSGGSGIIHVKGKHLCPSPLFPGPSKPFWVLVVVGGVLACYSLLVTVAFIIFWVRSKRSRLLHSDYMNMTPRRPGPTRKHYQPYAPPRDFAAYRSKKVAKKPTNKAPHPKQEPQEINFPDDLPGSNTAAPVQETLHGCQPVTQEDGKESRISVQERQ

SEQ ID NO: 161 - protein, 422 aa, synthetic construct
  REGION 1..422: note = Synthetic polypeptide
MEAPAQLLFLLLLWLPDTTRQVQLQQSGAELVRSGTSVKLSCTASGFNIKDSYMHWLRQGPEQGLEWIGWIDPENGDTEYAPKFQGKATFTTDTSSNTAYLQLSSLTSEDTAVYYCNEGTPTGPYYFDYWGQGTTVTVSSGGGGSGGGGSGGGGSENVLTQSPAIMSASPGEKVTITCSASSSVSYMHWFQQKPGTSPKLWIYSTSNLASGVPARFSGSGSGTSYSLTISRMEAEDAATYYCQQRSSYPLTFGAGTKLELKRAAAGSGGSGIIHVKGKHLCPSPLFPGPSKPFWVLVVVGGVLACYSLLVTVAFIIFWVRSKRSRLLHSDYMNMTPRRPGPTRKHYQPYAPPRDFAAYRSKKVAKKPTNKAPHPKQEPQEINFPDDLPGSNTAAPVQETLHGCQPVTQEDGKESRISVQERQ

SEQ ID NO: 162 - protein, 426 aa, synthetic construct
  REGION 1..426: note = Synthetic polypeptide
MGVLLTQRTLLSLVLALLFPSMASMQVKLEQSGAEVVKPGASVKLSCKASGFNIKDSYMHWLRQGPGQRLEWIGWIDPENGDTEYAPKFQGKATFTTDTSANTAYLGLSSLRPEDTAVYYCNEGTPTGPYYFDYWGQGTLVTVSSGGGGSGGGGSGGGGSENVLTQSPSSMSASVGDRVNIACSASSSVSYMHWFQQKPGKSPKLWIYSTSNLASGVPSRFSGSGSGTDYSLTISSMQPEDAATYYCQQRSSYPLTFGGGTKLEIKAAAGSGGSGIIHVKGKHLCPSPLFPGPSKPFWVLVVVGGVLACYSLLVTVAFIIFWVRSKRSRLLHSDYMNMTPRRPGPTRKHYQPYAPPRDFAAYRSKKVAKKPTNKAPHPKQEPQEINFPDDLPGSNTAAPVQETLHGCQPVTQEDGKESRISVQERQ

SEQ ID NO: 163 - protein, 422 aa, synthetic construct
  REGION 1..422: note = Synthetic polypeptide
MALPVTALLLPLALLLHAARPQVKLEQSGAEVVKPGASVKLSCKASGFNIKDSYMHWLRQGPGQRLEWIGWIDPENGDTEYAPKFQGKATFTTDTSANTAYLGLSSLRPEDTAVYYCNEGTPTGPYYFDYWGQGTLVTVSSGGGGSGGGGSGGGGSENVLTQSPSSMSASVGDRVNIACSASSSVSYMHWFQQKPGKSPKLWIYSTSNLASGVPSRFSGSGSGTDYSLTISSMQPEDAATYYCQQRSSYPLTFGGGTKLEIKAAAGSGGSGIIHVKGKHLCPSPLFPGPSKPFWVLVVVGGVLACYSLLVTVAFIIFWVRSKRSRLLHSDYMNMTPRRPGPTRKHYQPYAPPRDFAAYRSKKVAKKPTNKAPHPKQEPQEINFPDDLPGSNTAAPVQETLHGCQPVTQEDGKESRISVQERQ

SEQ ID NO: 164 - protein, 425 aa, synthetic construct
  REGION 1..425: note = Synthetic polypeptide
MSFPCKFVASFLLIFNVSSKGAVSQVKLEQSGAEVVKPGASVKLSCKASGFNIKDSYMHWLRQGPGQRLEWIGWIDPENGDTEYAPKFQGKATFTTDTSANTAYLGLSSLRPEDTAVYYCNEGTPTGPYYFDYWGQGTLVTVSSGGGGSGGGGSGGGGSENVLTQSPSSMSASVGDRVNIACSASSSVSYMHWFQQKPGKSPKLWIYSTSNLASGVPSRFSGSGSGTDYSLTISSMQPEDAATYYCQQRSSYPLTFGGGTKLEIKAAAGSGGSGIIHVKGKHLCPSPLFPGPSKPFWVLVVVGGVLACYSLLVTVAFIIFWVRSKRSRLLHSDYMNMTPRRPGPTRKHYQPYAPPRDFAAYRSKKVAKKPTNKAPHPKQEPQEINFPDDLPGSNTAAPVQETLHGCQPVTQEDGKESRISVQERQ

SEQ ID NO: 165 - protein, 421 aa, synthetic construct
  REGION 1..421: note = Synthetic polypeptide
MYRMQLLSCIALSLALVTNSQVKLEQSGAEVVKPGASVKLSCKASGFNIKDSYMHWLRQGPGQRLEWIGWIDPENGDTEYAPKFQGKATFTTDTSANTAYLGLSSLRPEDTAVYYCNEGTPTGPYYFDYWGQGTLVTVSSGGGGSGGGGSGGGGSENVLTQSPSSMSASVGDRVNIACSASSSVSYMHWFQQKPGKSPKLWIYSTSNLASGVPSRFSGSGSGTDYSLTISSMQPEDAATYYCQQRSSYPLTFGGGTKLEIKAAAGSGGSGIIHVKGKHLCPSPLFPGPSKPFWVLVVVGGVLACYSLLVTVAFIIFWVRSKRSRLLHSDYMNMTPRRPGPTRKHYQPYAPPRDFAAYRSKKVAKKPTNKAPHPKQEPQEINFPDDLPGSNTAAPVQETLHGCQPVTQEDGKESRISVQERQ

SEQ ID NO: 166 - protein, 418 aa, synthetic construct
  REGION 1..418: note = Synthetic polypeptide
MWLQSLLLLGTVACSISQVKLEQSGAEVVKPGASVKLSCKASGFNIKDSYMHWLRQGPGQRLEWIGWIDPENGDTEYAPKFQGKATFTTDTSANTAYLGLSSLRPEDTAVYYCNEGTPTGPYYFDYWGQGTLVTVSSGGGGSGGGGSGGGGSENVLTQSPSSMSASVGDRVNIACSASSSVSYMHWFQQKPGKSPKLWIYSTSNLASGVPSRFSGSGSGTDYSLTISSMQPEDAATYYCQQRSSYPLTFGGGTKLEIKAAAGSGGSGIIHVKGKHLCPSPLFPGPSKPFWVLVVVGGVLACYSLLVTVAFIIFWVRSKRSRLLHSDYMNMTPRRPGPTRKHYQPYAPPRDFAAYRSKKVAKKPTNKAPHPKQEPQEINFPDDLPGSNTAAPVQETLHGCQPVTQEDGKESRISVQERQ

SEQ ID NO: 167 - protein, 421 aa, synthetic construct
  REGION 1..421: note = Synthetic polypeptide
MEAPAQLLFLLLLWLPDTTRQVKLEQSGAEVVKPGASVKLSCKASGFNIKDSYMHWLRQGPGQRLEWIGWIDPENGDTEYAPKFQGKATFTTDTSANTAYLGLSSLRPEDTAVYYCNEGTPTGPYYFDYWGQGTLVTVSSGGGGSGGGGSGGGGSENVLTQSPSSMSASVGDRVNIACSASSSVSYMHWFQQKPGKSPKLWIYSTSNLASGVPSRFSGSGSGTDYSLTISSMQPEDAATYYCQQRSSYPLTFGGGTKLEIKAAAGSGGSGIIHVKGKHLCPSPLFPGPSKPFWVLVVVGGVLACYSLLVTVAFIIFWVRSKRSRLLHSDYMNMTPRRPGPTRKHYQPYAPPRDFAAYRSKKVAKKPTNKAPHPKQEPQEINFPDDLPGSNTAAPVQETLHGCQPVTQEDGKESRISVQERQ

SEQ ID NO: 168 - protein, 431 aa, synthetic construct
  REGION 1..431: note = Synthetic polypeptide
MGVLLTQRTLLSLVLALLFPSMASMQVQLVQSGAEVKKPGSSVKVSCKASGGTFSNSPINWLRQAPGQGLEWMGSIIPSFGTANYAQKFQGRLTITADESTSTAYMELSSLRSEDTAVYYCAGRSHNYELYYYYMDVWGQGTMVTVSSGGGGSGGGGSGGGGSDIQMTQSPSTLSASIGDRVTITCRASEGIYHWLAWYQQKPGKAPKLLIYKASSLASGAPSRFSGSGSGTDFTLTISSLQPDDFATYYCQQYSNYPLTFGGGTKLEIKRAAAGSGGSGIIHVKGKHLCPSPLFPGPSKPFWVLVVVGGVLACYSLLVTVAFIIFWVRSKRSRLLHSDYMNMTPRRPGPTRKHYQPYAPPRDFAAYRSKKVAKKPTNKAPHPKQEPQEINFPDDLPGSNTAAPVQETLHGCQPVTQEDGKESRISVQERQ

SEQ ID NO: 169 - protein, 427 aa, synthetic construct
  REGION 1..427: note = Synthetic polypeptide
MALPVTALLLPLALLLHAARPQVQLVQSGAEVKKPGSSVKVSCKASGGTFSNSPINWLRQAPGQGLEWMGSIIPSFGTANYAQKFQGRLTITADESTSTAYMELSSLRSEDTAVYYCAGRSHNYELYYYYMDVWGQGTMVTVSSGGGGSGGGGSGGGGSDIQMTQSPSTLSASIGDRVTITCRASEGIYHWLAWYQQKPGKAPKLLIYKASSLASGAPSRFSGSGSGTDFTLTISSLQPDDFATYYCQQYSNYPLTFGGGTKLEIKRAAAGSGGSGIIHVKGKHLCPSPLFPGPSKPFWVLVVVGGVLACYSLLVTVAFIIFWVRSKRSRLLHSDYMNMTPRRPGPTRKHYQPYAPPRDFAAYRSKKVAKKPTNKAPHPKQEPQEINFPDDLPGSNTAAPVQETLHGCQPVTQEDGKESRISVQERQ

SEQ ID NO: 170 - protein, 430 aa, synthetic construct
  REGION 1..430: note = Synthetic polypeptide
MSFPCKFVASFLLIFNVSSKGAVSQVQLVQSGAEVKKPGSSVKVSCKASGGTFSNSPINWLRQAPGQGLEWMGSIIPSFGTANYAQKFQGRLTITADESTSTAYMELSSLRSEDTAVYYCAGRSHNYELYYYYMDVWGQGTMVTVSSGGGGSGGGGSGGGGSDIQMTQSPSTLSASIGDRVTITCRASEGIYHWLAWYQQKPGKAPKLLIYKASSLASGAPSRFSGSGSGTDFTLTISSLQPDDFATYYCQQYSNYPLTFGGGTKLEIKRAAAGSGGSGIIHVKGKHLCPSPLFPGPSKPFWVLVVVGGVLACYSLLVTVAFIIFWVRSKRSRLLHSDYMNMTPRRPGPTRKHYQPYAPPRDFAAYRSKKVAKKPTNKAPHPKQEPQEINFPDDLPGSNTAAPVQETLHGCQPVTQEDGKESRISVQERQ

SEQ ID NO: 171 - protein, 426 aa, synthetic construct
  REGION 1..426: note = Synthetic polypeptide
MYRMQLLSCIALSLALVTNSQVQLVQSGAEVKKPGSSVKVSCKASGGTFSNSPINWLRQAPGQGLEWMGSIIPSFGTANYAQKFQGRLTITADESTSTAYMELSSLRSEDTAVYYCAGRSHNYELYYYYMDVWGQGTMVTVSSGGGGSGGGGSGGGGSDIQMTQSPSTLSASIGDRVTITCRASEGIYHWLAWYQQKPGKAPKLLIYKASSLASGAPSRFSGSGSGTDFTLTISSLQPDDFATYYCQQYSNYPLTFGGGTKLEIKRAAAGSGGSGIIHVKGKHLCPSPLFPGPSKPFWVLVVVGGVLACYSLLVTVAFIIFWVRSKRSRLLHSDYMNMTPRRPGPTRKHYQPYAPPRDFAAYRSKKVAKKPTNKAPHPKQEPQEINFPDDLPGSNTAAPVQETLHGCQPVTQEDGKESRISVQERQ

SEQ ID NO: 172 - protein, 423 aa, synthetic construct
  REGION 1..423: note = Synthetic polypeptide
MWLQSLLLLGTVACSISQVQLVQSGAEVKKPGSSVKVSCKASGGTFSNSPINWLRQAPGQGLEWMGSIIPSFGTANYAQKFQGRLTITADESTSTAYMELSSLRSEDTAVYYCAGRSHNYELYYYYMDVWGQGTMVTVSSGGGGSGGGGSGGGGSDIQMTQSPSTLSASIGDRVTITCRASEGIYHWLAWYQQKPGKAPKLLIYKASSLASGAPSRFSGSGSGTDFTLTISSLQPDDFATYYCQQYSNYPLTFGGGTKLEIKRAAAGSGGSGIIHVKGKHLCPSPLFPGPSKPFWVLVVVGGVLACYSLLVTVAFIIFWVRSKRSRLLHSDYMNMTPRRPGPTRKHYQPYAPPRDFAAYRSKKVAKKPTNKAPHPKQEPQEINFPDDLPGSNTAAPVQETLHGCQPVTQEDGKESRISVQERQ

SEQ ID NO: 173 - protein, 426 aa, synthetic construct
  REGION 1..426: note = Synthetic polypeptide
MEAPAQLLFLLLLWLPDTTRQVQLVQSGAEVKKPGSSVKVSCKASGGTFSNSPINWLRQAPGQGLEWMGSIIPSFGTANYAQKFQGRLTITADESTSTAYMELSSLRSEDTAVYYCAGRSHNYELYYYYMDVWGQGTMVTVSSGGGGSGGGGSGGGGSDIQMTQSPSTLSASIGDRVTITCRASEGIYHWLAWYQQKPGKAPKLLIYKASSLASGAPSRFSGSGSGTDFTLTISSLQPDDFATYYCQQYSNYPLTFGGGTKLEIKRAAAGSGGSGIIHVKGKHLCPSPLFPGPSKPFWVLVVVGGVLACYSLLVTVAFIIFWVRSKRSRLLHSDYMNMTPRRPGPTRKHYQPYAPPRDFAAYRSKKVAKKPTNKAPHPKQEPQEINFPDDLPGSNTAAPVQETLHGCQPVTQEDGKESRISVQERQ

SEQ ID NO: 174 - protein, 428 aa, synthetic construct
  REGION 1..428: note = Synthetic polypeptide
MGVLLTQRTLLSLVLALLFPSMASMQLQESGPGLVRPSQTLSLTCTVSGFTISSGYSWHWVRQPPGRGLEWIGYIQYSGITNYNPSLKSRVTMLVDTSKNQFSLRLSSVTAADTAVYYCAREDYDYHWYFDVWGQGSLVTVSSGGGGSGGGGSGGGGSGVHSDIQMTQSPSSLSASVGDRVTITCSTSSSVSYMHWYQQKPGKAPKLLIYSTSNLASGVPSRFSGSGSGTDFTFTISSLQPEDIATYYCHQWSSYPTFGQGTKVEIKRAAAGSGGSGIIHVKGKHLCPSPLFPGPSKPFWVLVVVGGVLACYSLLVTVAFIIFWVRSKRSRLLHSDYMNMTPRRPGPTRKHYQPYAPPRDFAAYRSKKVAKKPTNKAPHPKQEPQEINFPDDLPGSNTAAPVQETLHGCQPVTQEDGKESRISVQERQ

SEQ ID NO: 175 - protein, 424 aa, synthetic construct
  REGION 1..424: note = Synthetic polypeptide
MALPVTALLLPLALLLHAARPQLQESGPGLVRPSQTLSLTCTVSGFTISSGYSWHWVRQPPGRGLEWIGYIQYSGITNYNPSLKSRVTMLVDTSKNQFSLRLSSVTAADTAVYYCAREDYDYHWYFDVWGQGSLVTVSSGGGGSGGGGSGGGGSGVHSDIQMTQSPSSLSASVGDRVTITCSTSSSVSYMHWYQQKPGKAPKLLIYSTSNLASGVPSRFSGSGSGTDFTFTISSLQPEDIATYYCHQWSSYPTFGQGTKVEIKRAAAGSGGSGIIHVKGKHLCPSPLFPGPSKPFWVLVVVGGVLACYSLLVTVAFIIFWVRSKRSRLLHSDYMNMTPRRPGPTRKHYQPYAPPRDFAAYRSKKVAKKPTNKAPHPKQEPQEINFPDDLPGSNTAAPVQETLHGCQPVTQEDGKESRISVQERQ

SEQ ID NO: 176 - protein, 427 aa, synthetic construct
  REGION 1..427: note = Synthetic polypeptide
MSFPCKFVASFLLIFNVSSKGAVSQLQESGPGLVRPSQTLSLTCTVSGFTISSGYSWHWVRQPPGRGLEWIGYIQYSGITNYNPSLKSRVTMLVDTSKNQFSLRLSSVTAADTAVYYCAREDYDYHWYFDVWGQGSLVTVSSGGGGSGGGGSGGGGSGVHSDIQMTQSPSSLSASVGDRVTITCSTSSSVSYMHWYQQKPGKAPKLLIYSTSNLASGVPSRFSGSGSGTDFTFTISSLQPEDIATYYCHQWSSYPTFGQGTKVEIKRAAAGSGGSGIIHVKGKHLCPSPLFPGPSKPFWVLVVVGGVLACYSLLVTVAFIIFWVRSKRSRLLHSDYMNMTPRRPGPTRKHYQPYAPPRDFAAYRSKKVAKKPTNKAPHPKQEPQEINFPDDLPGSNTAAPVQETLHGCQPVTQEDGKESRISVQERQ

SEQ ID NO: 177 - protein, 423 aa, synthetic construct
  REGION 1..423: note = Synthetic polypeptide
MYRMQLLSCIALSLALVTNSQLQESGPGLVRPSQTLSLTCTVSGFTISSGYSWHWVRQPPGRGLEWIGYIQYSGITNYNPSLKSRVTMLVDTSKNQFSLRLSSVTAADTAVYYCAREDYDYHWYFDVWGQGSLVTVSSGGGGSGGGGSGGGGSGVHSDIQMTQSPSSLSASVGDRVTITCSTSSSVSYMHWYQQKPGKAPKLLIYSTSNLASGVPSRFSGSGSGTDFTFTISSLQPEDIATYYCHQWSSYPTFGQGTKVEIKRAAAGSGGSGIIHVKGKHLCPSPLFPGPSKPFWVLVVVGGVLACYSLLVTVAFIIFWVRSKRSRLLHSDYMNMTPRRPGPTRKHYQPYAPPRDFAAYRSKKVAKKPTNKAPHPKQEPQEINFPDDLPGSNTAAPVQETLHGCQPVTQEDGKESRISVQERQ

SEQ ID NO: 178 - protein, 420 aa, synthetic construct
  REGION 1..420: note = Synthetic polypeptide
MWLQSLLLLGTVACSISQLQESGPGLVRPSQTLSLTCTVSGFTISSGYSWHWVRQPPGRGLEWIGYIQYSGITNYNPSLKSRVTMLVDTSKNQFSLRLSSVTAADTAVYYCAREDYDYHWYFDVWGQGSLVTVSSGGGGSGGGGSGGGGSGVHSDIQMTQSPSSLSASVGDRVTITCSTSSSVSYMHWYQQKPGKAPKLLIYSTSNLASGVPSRFSGSGSGTDFTFTISSLQPEDIATYYCHQWSSYPTFGQGTKVEIKRAAAGSGGSGIIHVKGKHLCPSPLFPGPSKPFWVLVVVGGVLACYSLLVTVAFIIFWVRSKRSRLLHSDYMNMTPRRPGPTRKHYQPYAPPRDFAAYRSKKVAKKPTNKAPHPKQEPQEINFPDDLPGSNTAAPVQETLHGCQPVTQEDGKESRISVQERQ

SEQ ID NO: 179 - protein, 423 aa, synthetic construct
  REGION 1..423: note = Synthetic polypeptide
MEAPAQLLFLLLLWLPDTTRQLQESGPGLVRPSQTLSLTCTVSGFTISSGYSWHWVRQPPGRGLEWIGYIQYSGITNYNPSLKSRVTMLVDTSKNQFSLRLSSVTAADTAVYYCAREDYDYHWYFDVWGQGSLVTVSSGGGGSGGGGSGGGGSGVHSDIQMTQSPSSLSASVGDRVTITCSTSSSVSYMHWYQQKPGKAPKLLIYSTSNLASGVPSRFSGSGSGTDFTFTISSLQPEDIATYYCHQWSSYPTFGQGTKVEIKRAAAGSGGSGIIHVKGKHLCPSPLFPGPSKPFWVLVVVGGVLACYSLLVTVAFIIFWVRSKRSRLLHSDYMNMTPRRPGPTRKHYQPYAPPRDFAAYRSKKVAKKPTNKAPHPKQEPQEINFPDDLPGSNTAAPVQETLHGCQPVTQEDGKESRISVQERQ

SEQ ID NO: 180 - protein, 432 aa, synthetic construct
  REGION 1..432: note = Synthetic polypeptide
MGVLLTQRTLLSLVLALLFPSMASMEVQLVESGGGLVQPGGSLRLSCAASGFNIKDTYMHWVRQAPGKGLEWVARIDPANGNSKYADSVKGRFTISADTSKNTAYLQMNSLRAEDTAVYYCAPFGYYVSDYAMAYWGQGTLVTVSSGGGGSGGGGSGGGGSDIQLTQSPSSLSASVGDRVTITCRAGESVDIFGVGFLHWYQQKPGKAPKLLIYRASNLESGVPSRFSGSGSRTDFTLTISSLQPEDFATYYCQQTNEDPYTFGQGTKVEIKAAAGSGGSGIIHVKGKHLCPSPLFPGPSKPFWVLVVVGGVLACYSLLVTVAFIIFWVRSKRSRLLHSDYMNMTPRRPGPTRKHYQPYAPPRDFAAYRSKKVAKKPTNKAPHPKQEPQEINFPDDLPGSNTAAPVQETLHGCQPVTQEDGKESRISVQERQ

SEQ ID NO: 181 - protein, 428 aa, synthetic construct
  REGION 1..428: note = Synthetic polypeptide
MALPVTALLLPLALLLHAARPEVQLVESGGGLVQPGGSLRLSCAASGFNIKDTYMHWVRQAPGKGLEWVARIDPANGNSKYADSVKGRFTISADTSKNTAYLQMNSLRAEDTAVYYCAPFGYYVSDYAMAYWGQGTLVTVSSGGGGSGGGGSGGGGSDIQLTQSPSSLSASVGDRVTITCRAGESVDIFGVGFLHWYQQKPGKAPKLLIYRASNLESGVPSRFSGSGSRTDFTLTISSLQPEDFATYYCQQTNEDPYTFGQGTKVEIKAAAGSGGSGIIHVKGKHLCPSPLFPGPSKPFWVLVVVGGVLACYSLLVTVAFIIFWVRSKRSRLLHSDYMNMTPRRPGPTRKHYQPYAPPRDFAAYRSKKVAKKPTNKAPHPKQEPQEINFPDDLPGSNTAAPVQETLHGCQPVTQEDGKESRISVQERQ

SEQ ID NO: 182 - protein, 431 aa, synthetic construct
  REGION 1..431: note = Synthetic polypeptide
MSFPCKFVASFLLIFNVSSKGAVSEVQLVESGGGLVQPGGSLRLSCAASGFNIKDTYMHWVRQAPGKGLEWVARIDPANGNSKYADSVKGRFTISADTSKNTAYLQMNSLRAEDTAVYYCAPFGYYVSDYAMAYWGQGTLVTVSSGGGGSGGGGSGGGGSDIQLTQSPSSLSASVGDRVTITCRAGESVDIFGVGFLHWYQQKPGKAPKLLIYRASNLESGVPSRFSGSGSRTDFTLTISSLQPEDFATYYCQQTNEDPYTFGQGTKVEIKAAAGSGGSGIIHVKGKHLCPSPLFPGPSKPFWVLVVVGGVLACYSLLVTVAFIIFWVRSKRSRLLHSDYMNMTPRRPGPTRKHYQPYAPPRDFAAYRSKKVAKKPTNKAPHPKQEPQEINFPDDLPGSNTAAPVQETLHGCQPVTQEDGKESRISVQERQ

SEQ ID NO: 183 - protein, 427 aa, synthetic construct
  REGION 1..427: note = Synthetic polypeptide
MYRMQLLSCIALSLALVTNSEVQLVESGGGLVQPGGSLRLSCAASGFNIKDTYMHWVRQAPGKGLEWVARIDPANGNSKYADSVKGRFTISADTSKNTAYLQMNSLRAEDTAVYYCAPFGYYVSDYAMAYWGQGTLVTVSSGGGGSGGGGSGGGGSDIQLTQSPSSLSASVGDRVTITCRAGESVDIFGVGFLHWYQQKPGKAPKLLIYRASNLESGVPSRFSGSGSRTDFTLTISSLQPEDFATYYCQQTNEDPYTFGQGTKVEIKAAAGSGGSGIIHVKGKHLCPSPLFPGPSKPFWVLVVVGGVLACYSLLVTVAFIIFWVRSKRSRLLHSDYMNMTPRRPGPTRKHYQPYAPPRDFAAYRSKKVAKKPTNKAPHPKQEPQEINFPDDLPGSNTAAPVQETLHGCQPVTQEDGKESRISVQERQ

SEQ ID NO: 184 - protein, 424 aa, synthetic construct
  REGION 1..424: note = Synthetic polypeptide
MWLQSLLLLGTVACSISEVQLVESGGGLVQPGGSLRLSCAASGFNIKDTYMHWVRQAPGKGLEWVARIDPANGNSKYADSVKGRFTISADTSKNTAYLQMNSLRAEDTAVYYCAPFGYYVSDYAMAYWGQGTLVTVSSGGGGSGGGGSGGGGSDIQLTQSPSSLSASVGDRVTITCRAGESVDIFGVGFLHWYQQKPGKAPKLLIYRASNLESGVPSRFSGSGSRTDFTLTISSLQPEDFATYYCQQTNEDPYTFGQGTKVEIKAAAGSGGSGIIHVKGKHLCPSPLFPGPSKPFWVLVVVGGVLACYSLLVTVAFIIFWVRSKRSRLLHSDYMNMTPRRPGPTRKHYQPYAPPRDFAAYRSKKVAKKPTNKAPHPKQEPQEINFPDDLPGSNTAAPVQETLHGCQPVTQEDGKESRISVQERQ

SEQ ID NO: 185 - protein, 427 aa, synthetic construct
  REGION 1..427: note = Synthetic polypeptide
MEAPAQLLFLLLLWLPDTTREVQLVESGGGLVQPGGSLRLSCAASGFNIKDTYMHWVRQAPGKGLEWVARIDPANGNSKYADSVKGRFTISADTSKNTAYLQMNSLRAEDTAVYYCAPFGYYVSDYAMAYWGQGTLVTVSSGGGGSGGGGSGGGGSDIQLTQSPSSLSASVGDRVTITCRAGESVDIFGVGFLHWYQQKPGKAPKLLIYRASNLESGVPSRFSGSGSRTDFTLTISSLQPEDFATYYCQQTNEDPYTFGQGTKVEIKAAAGSGGSGIIHVKGKHLCPSPLFPGPSKPFWVLVVVGGVLACYSLLVTVAFIIFWVRSKRSRLLHSDYMNMTPRRPGPTRKHYQPYAPPRDFAAYRSKKVAKKPTNKAPHPKQEPQEINFPDDLPGSNTAAPVQETLHGCQPVTQEDGKESRISVQERQ

SEQ ID NO: 186 - protein, 240 aa, synthetic construct
  REGION 1..240: note = Synthetic polypeptide
QVQLQQSGPELEKPGASVKLSCKASGYSFTGYTMNWVKQSHGKSLEWIGLITPYNGASSYNQKFRGKATLTVDKSSSTAYMDLLSLTSEDSAVYFCARGGYDGRGFDYWGQGTTVTVSSGGGGSGGGGSGGGGSDIELTQSPAIMSASPGEKVTMTCSASSSVSYMHWYQQKSGTSPKRWIYDTSKLASGVPGRFSGSGSGNSYSLTISSVEAEDDATYYCQQWSKHPLTFGAGTKLEIK

SEQ ID NO: 187 - protein, 236 aa, synthetic construct
  REGION 1..236: note = Synthetic polypeptide
QVQLVQSGAEVEKPGASVKVSCKASGYTFTDYYMHWVRQAPGQGLEWMGWINPNSGGTNYAQKFQGRVTMTRDTSISTAYMELSRLRSDDTAVYYCASGWDFDYWGQGTLVTVSSGGGGSGGGGSGGGGSDIVMTQSPSSLSASVGDRVTITCRASQSIRYYLSWYQQKPGKAPKLLIYTASILQNGVPSRFSGSGSGTDFTLTISSLQPEDFATYYCLQTYTTPDFGPGTKVEIK

SEQ ID NO: 188 - protein, 241 aa, synthetic construct
  REGION 1..241: note = Synthetic polypeptide
QVQLVQSGAEVKRPGASVQVSCRASGYSINTYYMQWVRQAPGAGLEWMGVINPSGVTSYAQKFQGRVTLTNDTSTNTVYMQLNSLTSADTAVYYCARWALWGDFGMDVWGKGTLVTVSSGGGGSGGGGSGGGGSDIQMTQSPSTLSASIGDRVTITCRASEGIYHWLAWYQQKPGKAPKLLIYKASSLASGAPSRFSGSGSGTDFTLTISSLQPDDFATYYCQQYSNYPLTFGGGTKLEIK

SEQ ID NO: 189 - protein, 241 aa, synthetic construct
  REGION 1..241: note = Synthetic polypeptide
QVQLQESGPGLVKPSETLSLTCTVSGGSVSSGSYYWSWIRQPPGKGLEWIGYIYYSGSTNYNPSLKSRVTISVDTSKNQFSLKLSSVTAADTAVYYCAREGKNGAFDIWGQGTMVTVSSGGGGSGGGGSGGGGSDIQMTQSPSSLSASVGDRVTITCRASQSISSYLNWYQQKPGKAPKLLIYAASSLQSGVPSGFSGSGSGTDFTLTISSLQPEDFATYYCQQSYSTPLTFGGGTKVEIK

SEQ ID NO: 190 - protein, 249 aa, synthetic construct
  REGION 1..249: note = Synthetic polypeptide
EVQLVESGGGLVQPGGSLRLSCAASGFDLGFYFYACWVRQAPGKGLEWVSCIYTAGSGSTYYASWAKGRFTISRDNSKNTLYLQMNSLRAEDTAVYYCARSTANTRSTYYLNLWGQGTLVTVSSGGGGSGGGGSGGGGSDIQMTQSPSSLSASVGDRVTITCQASQRISSYLSWYQQKPGKVPKLLIYGASTLASGVPSRFSGSGSGTDFTLTISSLQPEDVATYYCQSYAYFDSNNWHAFGGGTKVEI

SEQ ID NO: 191 - protein, 254 aa, synthetic construct
  REGION 1..254: note = Synthetic polypeptide
QVQLQQSGPGLVTPSQTLSLTCAISGDSVSSNSATWNWIRQSPSRGLEWLGRTYYRSKWYNDYAVSVKSRMSINPDTSKNQFSLQLNSVTPEDTAVYYCARGMMTYYYGMDVWGQGTTVTVSSGGGGSGGGGSGGGGSQPVLTQSSSLSASPGASASLTCTLRSGINVGPYRIYWYQQKPGSPPQYLLNYKSDSDKQQGSGVPSRFSGSKDASANAGVLLISGLRSEDEADYYCMIWHSSAAVFGGGTQLTVLS

SEQ ID NO: 192 - protein, 536 aa, synthetic construct
  REGION 1..536: note = Synthetic polypeptide
MGVLLTQRTLLSLVLALLFPSMASMQVQLQQSGPELEKPGASVKLSCKASGYSFTGYTMNWVKQSHGKSLEWIGLITPYNGASSYNQKFRGKATLTVDKSSSTAYMDLLSLTSEDSAVYFCARGGYDGRGFDYWGQGTTVTVSSGGGGSGGGGSGGGGSDIELTQSPAIMSASPGEKVTMTCSASSSVSYMHWYQQKSGTSPKRWIYDTSKLASGVPGRFSGSGSGNSYSLTISSVEAEDDATYYCQQWSKHPLTFGAGTKLEIKAAAGSGGSGILVKQSPMLVAYDNAVNLSCKYSYNLFSREFRASLHKGLDSAVEVCVVYGNYSQQLQVYSKTGFNCDGKLGNESVTFYLQNLYVNQTDIYFCKIEVMYPPPYLDNEKSNGTIIHVKGKHLCPSPLFPGPSKPFWVLVVVGGVLACYSLLVTVAFIIFWVRSKRSRLLHSDYMNMTPRRPGPTRKHYQPYAPPRDFAAYRSKKVAKKPTNKAPHPKQEPQEINFPDDLPGSNTAAPVQETLHGCQPVTQEDGKESRISVQERQ

SEQ ID NO: 193 - protein, 532 aa, synthetic construct
  REGION 1..532: note = Synthetic polypeptide
MALPVTALLLPLALLLHAARPQVQLQQSGPELEKPGASVKLSCKASGYSFTGYTMNWVKQSHGKSLEWIGLITPYNGASSYNQKFRGKATLTVDKSSSTAYMDLLSLTSEDSAVYFCARGGYDGRGFDYWGQGTTVTVSSGGGGSGGGGSGGGGSDIELTQSPAIMSASPGEKVTMTCSASSSVSYMHWYQQKSGTSPKRWIYDTSKLASGVPGRFSGSGSGNSYSLTISSVEAEDDATYYCQQWSKHPLTFGAGTKLEIKAAAGSGGSGILVKQSPMLVAYDNAVNLSCKYSYNLFSREFRASLHKGLDSAVEVCVVYGNYSQQLQVYSKTGFNCDGKLGNESVTFYLQNLYVNQTDIYFCKIEVMYPPPYLDNEKSNGTIIHVKGKHLCPSPLFPGPSKPFWVLVVVGGVLACYSLLVTVAFIIFWVRSKRSRLLHSDYMNMTPRRPGPTRKHYQPYAPPRDFAAYRSKKVAKKPTNKAPHPKQEPQEINFPDDLPGSNTAAPVQETLHGCQPVTQEDGKESRISVQERQ

SEQ ID NO: 194 - protein, 535 aa, synthetic construct
  REGION 1..535: note = Synthetic polypeptide
MSFPCKFVASFLLIFNVSSKGAVSQVQLQQSGPELEKPGASVKLSCKASGYSFTGYTMNWVKQSHGKSLEWIGLITPYNGASSYNQKFRGKATLTVDKSSSTAYMDLLSLTSEDSAVYFCARGGYDGRGFDYWGQGTTVTVSSGGGGSGGGGSGGGGSDIELTQSPAIMSASPGEKVTMTCSASSSVSYMHWYQQKSGTSPKRWIYDTSKLASGVPGRFSGSGSGNSYSLTISSVEAEDDATYYCQQWSKHPLTFGAGTKLEIKAAAGSGGSGILVKQSPMLVAYDNAVNLSCKYSYNLFSREFRASLHKGLDSAVEVCVVYGNYSQQLQVYSKTGFNCDGKLGNESVTFYLQNLYVNQTDIYFCKIEVMYPPPYLDNEKSNGTIIHVKGKHLCPSPLFPGPSKPFWVLVVVGGVLACYSLLVTVAFIIFWVRSKRSRLLHSDYMNMTPRRPGPTRKHYQPYAPPRDFAAYRSKKVAKKPTNKAPHPKQEPQEINFPDDLPGSNTAAPVQETLHGCQPVTQEDGKESRISVQERQ

SEQ ID NO: 195 - protein, 531 aa, synthetic construct
  REGION 1..531: note = Synthetic polypeptide
MYRMQLLSCIALSLALVTNSQVQLQQSGPELEKPGASVKLSCKASGYSFTGYTMNWVKQSHGKSLEWIGLITPYNGASSYNQKFRGKATLTVDKSSSTAYMDLLSLTSEDSAVYFCARGGYDGRGFDYWGQGTTVTVSSGGGGSGGGGSGGGGSDIELTQSPAIMSASPGEKVTMTCSASSSVSYMHWYQQKSGTSPKRWIYDTSKLASGVPGRFSGSGSGNSYSLTISSVEAEDDATYYCQQWSKHPLTFGAGTKLEIKAAAGSGGSGILVKQSPMLVAYDNAVNLSCKYSYNLFSREFRASLHKGLDSAVEVCVVYGNYSQQLQVYSKTGFNCDGKLGNESVTFYLQNLYVNQTDIYFCKIEVMYPPPYLDNEKSNGTIIHVKGKHLCPSPLFPGPSKPFWVLVVVGGVLACYSLLVTVAFIIFWVRSKRSRLLHSDYMNMTPRRPGPTRKHYQPYAPPRDFAAYRSKKVAKKPTNKAPHPKQEPQEINFPDDLPGSNTAAPVQETLHGCQPVTQEDGKESRISVQERQ

SEQ ID NO: 196 - protein, 528 aa, synthetic construct
  REGION 1..528: note = Synthetic polypeptide
MWLQSLLLLGTVACSISQVQLQQSGPELEKPGASVKLSCKASGYSFTGYTMNWVKQSHGKSLEWIGLITPYNGASSYNQKFRGKATLTVDKSSSTAYMDLLSLTSEDSAVYFCARGGYDGRGFDYWGQGTTVTVSSGGGGSGGGGSGGGGSDIELTQSPAIMSASPGEKVTMTCSASSSVSYMHWYQQKSGTSPKRWIYDTSKLASGVPGRFSGSGSGNSYSLTISSVEAEDDATYYCQQWSKHPLTFGAGTKLEIKAAAGSGGSGILVKQSPMLVAYDNAVNLSCKYSYNLFSREFRASLHKGLDSAVEVCVVYGNYSQQLQVYSKTGFNCDGKLGNESVTFYLQNLYVNQTDIYFCKIEVMYPPPYLDNEKSNGTIIHVKGKHLCPSPLFPGPSKPFWVLVVVGGVLACYSLLVTVAFIIFWVRSKRSRLLHSDYMNMTPRRPGPTRKHYQPYAPPRDFAAYRSKKVAKKPTNKAPHPKQEPQEINFPDDLPGSNTAAPVQETLHGCQPVTQEDGKESRISVQERQ

SEQ ID NO: 197 - protein, 531 aa, synthetic construct
  REGION 1..531: note = Synthetic polypeptide
MEAPAQLLFLLLLWLPDTTRQVQLQQSGPELEKPGASVKLSCKASGYSFTGYTMNWVKQSHGKSLEWIGLITPYNGASSYNQKFRGKATLTVDKSSSTAYMDLLSLTSEDSAVYFCARGGYDGRGFDYWGQGTTVTVSSGGGGSGGGGSGGGGSDIELTQSPAIMSASPGEKVTMTCSASSSVSYMHWYQQKSGTSPKRWIYDTSKLASGVPGRFSGSGSGNSYSLTISSVEAEDDATYYCQQWSKHPLTFGAGTKLEIKAAAGSGGSGILVKQSPMLVAYDNAVNLSCKYSYNLFSREFRASLHKGLDSAVEVCVVYGNYSQQLQVYSKTGFNCDGKLGNESVTFYLQNLYVNQTDIYFCKIEVMYPPPYLDNEKSNGTIIHVKGKHLCPSPLFPGPSKPFWVLVVVGGVLACYSLLVTVAFIIFWVRSKRSRLLHSDYMNMTPRRPGPTRKHYQPYAPPRDFAAYRSKKVAKKPTNKAPHPKQEPQEINFPDDLPGSNTAAPVQETLHGCQPVTQEDGKESRISVQERQ

SEQ ID NO: 198 - protein, 460 aa, synthetic construct
  REGION 1..460: note = Synthetic polypeptide
MGVLLTQRTLLSLVLALLFPSMASMQVQLQQSGPELEKPGASVKLSCKASGYSFTGYTMNWVKQSHGKSLEWIGLITPYNGASSYNQKFRGKATLTVDKSSSTAYMDLLSLTSEDSAVYFCARGGYDGRGFDYWGQGTTVTVSSGGGGSGGGGSGGGGSDIELTQSPAIMSASPGEKVTMTCSASSSVSYMHWYQQKSGTSPKRWIYDTSKLASGVPGRFSGSGSGNSYSLTISSVEAEDDATYYCQQWSKHPLTFGAGTKLEIKAAAGSGGSGFVPVFLPAKPTTTPAPRPPTPAPTIASQPLSLRPEACRPAAGGAVHTRGLDFACDIYIWAPLAGTCGVLLLSLVITLYCNHRNRSKRSRLLHSDYMNMTPRRPGPTRKHYQPYAPPRDFAAYRSKKVAKKPTNKAPHPKQEPQEINFPDDLPGSNTAAPVQETLHGCQPVTQEDGKESRISVQERQ

SEQ ID NO: 199 - protein, 456 aa, synthetic construct
  REGION 1..456: note = Synthetic polypeptide
MALPVTALLLPLALLLHAARPQVQLQQSGPELEKPGASVKLSCKASGYSFTGYTMNWVKQSHGKSLEWIGLITPYNGASSYNQKFRGKATLTVDKSSSTAYMDLLSLTSEDSAVYFCARGGYDGRGFDYWGQGTTVTVSSGGGGSGGGGSGGGGSDIELTQSPAIMSASPGEKVTMTCSASSSVSYMHWYQQKSGTSPKRWIYDTSKLASGVPGRFSGSGSGNSYSLTISSVEAEDDATYYCQQWSKHPLTFGAGTKLEIKAAAGSGGSGFVPVFLPAKPTTTPAPRPPTPAPTIASQPLSLRPEACRPAAGGAVHTRGLDFACDIYIWAPLAGTCGVLLLSLVITLYCNHRNRSKRSRLLHSDYMNMTPRRPGPTRKHYQPYAPPRDFAAYRSKKVAKKPTNKAPHPKQEPQEINFPDDLPGSNTAAPVQETLHGCQPVTQEDGKESRISVQERQ

SEQ ID NO: 200 - protein, 459 aa, synthetic construct
  REGION 1..459: note = Synthetic polypeptide
MSFPCKFVASFLLIFNVSSKGAVSQVQLQQSGPELEKPGASVKLSCKASGYSFTGYTMNWVKQSHGKSLEWIGLITPYNGASSYNQKFRGKATLTVDKSSSTAYMDLLSLTSEDSAVYFCARGGYDGRGFDYWGQGTTVTVSSGGGGSGGGGSGGGGSDIELTQSPAIMSASPGEKVTMTCSASSSVSYMHWYQQKSGTSPKRWIYDTSKLASGVPGRFSGSGSGNSYSLTISSVEAEDDATYYCQQWSKHPLTFGAGTKLEIKAAAGSGGSGFVPVFLPAKPTTTPAPRPPTPAPTIASQPLSLRPEACRPAAGGAVHTRGLDFACDIYIWAPLAGTCGVLLLSLVITLYCNHRNRSKRSRLLHSDYMNMTPRRPGPTRKHYQPYAPPRDFAAYRSKKVAKKPTNKAPHPKQEPQEINFPDDLPGSNTAAPVQETLHGCQPVTQEDGKESRISVQERQ

SEQ ID NO: 201 - protein, 455 aa, synthetic construct
  REGION 1..455: note = Synthetic polypeptide
MYRMQLLSCIALSLALVTNSQVQLQQSGPELEKPGASVKLSCKASGYSFTGYTMNWVKQSHGKSLEWIGLITPYNGASSYNQKFRGKATLTVDKSSSTAYMDLLSLTSEDSAVYFCARGGYDGRGFDYWGQGTTVTVSSGGGGSGGGGSGGGGSDIELTQSPAIMSASPGEKVTMTCSASSSVSYMHWYQQKSGTSPKRWIYDTSKLASGVPGRFSGSGSGNSYSLTISSVEAEDDATYYCQQWSKHPLTFGAGTKLEIKAAAGSGGSGFVPVFLPAKPTTTPAPRPPTPAPTIASQPLSLRPEACRPAAGGAVHTRGLDFACDIYIWAPLAGTCGVLLLSLVITLYCNHRNRSKRSRLLHSDYMNMTPRRPGPTRKHYQPYAPPRDFAAYRSKKVAKKPTNKAPHPKQEPQEINFPDDLPGSNTAAPVQETLHGCQPVTQEDGKESRISVQERQ

SEQ ID NO: 202 - protein, 452 aa, synthetic construct
  REGION 1..452: note = Synthetic polypeptide
MWLQSLLLLGTVACSISQVQLQQSGPELEKPGASVKLSCKASGYSFTGYTMNWVKQSHGKSLEWIGLITPYNGASSYNQKFRGKATLTVDKSSSTAYMDLLSLTSEDSAVYFCARGGYDGRGFDYWGQGTTVTVSSGGGGSGGGGSGGGGSDIELTQSPAIMSASPGEKVTMTCSASSSVSYMHWYQQKSGTSPKRWIYDTSKLASGVPGRFSGSGSGNSYSLTISSVEAEDDATYYCQQWSKHPLTFGAGTKLEIKAAAGSGGSGFVPVFLPAKPTTTPAPRPPTPAPTIASQPLSLRPEACRPAAGGAVHTRGLDFACDIYIWAPLAGTCGVLLLSLVITLYCNHRNRSKRSRLLHSDYMNMTPRRPGPTRKHYQPYAPPRDFAAYRSKKVAKKPTNKAPHPKQEPQEINFPDDLPGSNTAAPVQETLHGCQPVTQEDGKESRISVQERQ

SEQ ID NO: 203 - protein, 455 aa, synthetic construct
  REGION 1..455: note = Synthetic polypeptide
MEAPAQLLFLLLLWLPDTTRQVQLQQSGPELEKPGASVKLSCKASGYSFTGYTMNWVKQSHGKSLEWIGLITPYNGASSYNQKFRGKATLTVDKSSSTAYMDLLSLTSEDSAVYFCARGGYDGRGFDYWGQGTTVTVSSGGGGSGGGGSGGGGSDIELTQSPAIMSASPGEKVTMTCSASSSVSYMHWYQQKSGTSPKRWIYDTSKLASGVPGRFSGSGSGNSYSLTISSVEAEDDATYYCQQWSKHPLTFGAGTKLEIKAAAGSGGSGFVPVFLPAKPTTTPAPRPPTPAPTIASQPLSLRPEACRPAAGGAVHTRGLDFACDIYIWAPLAGTCGVLLLSLVITLYCNHRNRSKRSRLLHSDYMNMTPRRPGPTRKHYQPYAPPRDFAAYRSKKVAKKPTNKAPHPKQEPQEINFPDDLPGSNTAAPVQETLHGCQPVTQEDGKESRISVQERQ

SEQ ID NO: 204 - protein, 404 aa, synthetic construct
  REGION 1..404: note = Synthetic polypeptide
MGVLLTQRTLLSLVLALLFPSMASMQVQLQQSGPELEKPGASVKLSCKASGYSFTGYTMNWVKQSHGKSLEWIGLITPYNGASSYNQKFRGKATLTVDKSSSTAYMDLLSLTSEDSAVYFCARGGYDGRGFDYWGQGTTVTVSSGGGGSGGGGSGGGGSDIELTQSPAIMSASPGEKVTMTCSASSSVSYMHWYQQKSGTSPKRWIYDTSKLASGVPGRFSGSGSGNSYSLTISSVEAEDDATYYCQQWSKHPLTFGAGTKLEIKAAAGSGGSGFWVLVVVGGVLACYSLLVTVAFIIFWVRSKRSRLLHSDYMNMTPRRPGPTRKHYQPYAPPRDFAAYRSKKVAKKPTNKAPHPKQEPQEINFPDDLPGSNTAAPVQETLHGCQPVTQEDGKESRISVQERQ

SEQ ID NO: 205 - protein, 400 aa, synthetic construct
  REGION 1..400: note = Synthetic polypeptide
MALPVTALLLPLALLLHAARPQVQLQQSGPELEKPGASVKLSCKASGYSFTGYTMNWVKQSHGKSLEWIGLITPYNGASSYNQKFRGKATLTVDKSSSTAYMDLLSLTSEDSAVYFCARGGYDGRGFDYWGQGTTVTVSSGGGGSGGGGSGGGGSDIELTQSPAIMSASPGEKVTMTCSASSSVSYMHWYQQKSGTSPKRWIYDTSKLASGVPGRFSGSGSGNSYSLTISSVEAEDDATYYCQQWSKHPLTFGAGTKLEIKAAAGSGGSGFWVLVVVGGVLACYSLLVTVAFIIFWVRSKRSRLLHSDYMNMTPRRPGPTRKHYQPYAPPRDFAAYRSKKVAKKPTNKAPHPKQEPQEINFPDDLPGSNTAAPVQETLHGCQPVTQEDGKESRISVQERQ

SEQ ID NO: 206 - protein, 403 aa, synthetic construct
  REGION 1..403: note = Synthetic polypeptide
MSFPCKFVASFLLIFNVSSKGAVSQVQLQQSGPELEKPGASVKLSCKASGYSFTGYTMNWVKQSHGKSLEWIGLITPYNGASSYNQKFRGKATLTVDKSSSTAYMDLLSLTSEDSAVYFCARGGYDGRGFDYWGQGTTVTVSSGGGGSGGGGSGGGGSDIELTQSPAIMSASPGEKVTMTCSASSSVSYMHWYQQKSGTSPKRWIYDTSKLASGVPGRFSGSGSGNSYSLTISSVEAEDDATYYCQQWSKHPLTFGAGTKLEIKAAAGSGGSGFWVLVVVGGVLACYSLLVTVAFIIFWVRSKRSRLLHSDYMNMTPRRPGPTRKHYQPYAPPRDFAAYRSKKVAKKPTNKAPHPKQEPQEINFPDDLPGSNTAAPVQETLHGCQPVTQEDGKESRISVQERQ

SEQ ID NO: 207 - protein, 399 aa, synthetic construct
  REGION 1..399: note = Synthetic polypeptide
MYRMQLLSCIALSLALVTNSQVQLQQSGPELEKPGASVKLSCKASGYSFTGYTMNWVKQSHGKSLEWIGLITPYNGASSYNQKFRGKATLTVDKSSSTAYMDLLSLTSEDSAVYFCARGGYDGRGFDYWGQGTTVTVSSGGGGSGGGGSGGGGSDIELTQSPAIMSASPGEKVTMTCSASSSVSYMHWYQQKSGTSPKRWIYDTSKLASGVPGRFSGSGSGNSYSLTISSVEAEDDATYYCQQWSKHPLTFGAGTKLEIKAAAGSGGSGFWVLVVVGGVLACYSLLVTVAFIIFWVRSKRSRLLHSDYMNMTPRRPGPTRKHYQPYAPPRDFAAYRSKKVAKKPTNKAPHPKQEPQEINFPDDLPGSNTAAPVQETLHGCQPVTQEDGKESRISVQERQ

SEQ ID NO: 208 - protein, 396 aa, synthetic construct
  REGION 1..396: note = Synthetic polypeptide
MWLQSLLLLGTVACSISQVQLQQSGPELEKPGASVKLSCKASGYSFTGYTMNWVKQSHGKSLEWIGLITPYNGASSYNQKFRGKATLTVDKSSSTAYMDLLSLTSEDSAVYFCARGGYDGRGFDYWGQGTTVTVSSGGGGSGGGGSGGGGSDIELTQSPAIMSASPGEKVTMTCSASSSVSYMHWYQQKSGTSPKRWIYDTSKLASGVPGRFSGSGSGNSYSLTISSVEAEDDATYYCQQWSKHPLTFGAGTKLEIKAAAGSGGSGFWVLVVVGGVLACYSLLVTVAFIIFWVRSKRSRLLHSDYMNMTPRRPGPTRKHYQPYAPPRDFAAYRSKKVAKKPTNKAPHPKQEPQEINFPDDLPGSNTAAPVQETLHGCQPVTQEDGKESRISVQERQ

SEQ ID NO: 209 - protein, 399 aa, synthetic construct
  REGION 1..399: note = Synthetic polypeptide
MEAPAQLLFLLLLWLPDTTRQVQLQQSGPELEKPGASVKLSCKASGYSFTGYTMNWVKQSHGKSLEWIGLITPYNGASSYNQKFRGKATLTVDKSSSTAYMDLLSLTSEDSAVYFCARGGYDGRGFDYWGQGTTVTVSSGGGGSGGGGSGGGGSDIELTQSPAIMSASPGEKVTMTCSASSSVSYMHWYQQKSGTSPKRWIYDTSKLASGVPGRFSGSGSGNSYSLTISSVEAEDDATYYCQQWSKHPLTFGAGTKLEIKAAAGSGGSGFWVLVVVGGVLACYSLLVTVAFIIFWVRSKRSRLLHSDYMNMTPRRPGPTRKHYQPYAPPRDFAAYRSKKVAKKPTNKAPHPKQEPQEINFPDDLPGSNTAAPVQETLHGCQPVTQEDGKESRISVQERQ

SEQ ID NO: 210 - protein, 532 aa, synthetic construct
  REGION 1..532: note = Synthetic polypeptide
MGVLLTQRTLLSLVLALLFPSMASMQVQLVQSGAEVEKPGASVKVSCKASGYTFTDYYMHWVRQAPGQGLEWMGWINPNSGGTNYAQKFQGRVTMTRDTSISTAYMELSRLRSDDTAVYYCASGWDFDYWGQGTLVTVSSGGGGSGGGGSGGGGSDIVMTQSPSSLSASVGDRVTITCRASQSIRYYLSWYQQKPGKAPKLLIYTASILQNGVPSRFSGSGSGTDFTLTISSLQPEDFATYYCLQTYTTPDFGPGTKVEIKAAAGSGGSGILVKQSPMLVAYDNAVNLSCKYSYNLFSREFRASLHKGLDSAVEVCVVYGNYSQQLQVYSKTGFNCDGKLGNESVTFYLQNLYVNQTDIYFCKIEVMYPPPYLDNEKSNGTIIHVKGKHLCPSPLFPGPSKPFWVLVVVGGVLACYSLLVTVAFIIFWVRSKRSRLLHSDYMNMTPRRPGPTRKHYQPYAPPRDFAAYRSKKVAKKPTNKAPHPKQEPQEINFPDDLPGSNTAAPVQETLHGCQPVTQEDGKESRISVQERQ

SEQ ID NO: 211 - protein, 528 aa, synthetic construct
  REGION 1..528: note = Synthetic polypeptide
MALPVTALLLPLALLLHAARPQVQLVQSGAEVEKPGASVKVSCKASGYTFTDYYMHWVRQAPGQGLEWMGWINPNSGGTNYAQKFQGRVTMTRDTSISTAYMELSRLRSDDTAVYYCASGWDFDYWGQGTLVTVSSGGGGSGGGGSGGGGSDIVMTQSPSSLSASVGDRVTITCRASQSIRYYLSWYQQKPGKAPKLLIYTASILQNGVPSRFSGSGSGTDFTLTISSLQPEDFATYYCLQTYTTPDFGPGTKVEIKAAAGSGGSGILVKQSPMLVAYDNAVNLSCKYSYNLFSREFRASLHKGLDSAVEVCVVYGNYSQQLQVYSKTGFNCDGKLGNESVTFYLQNLYVNQTDIYFCKIEVMYPPPYLDNEKSNGTIIHVKGKHLCPSPLFPGPSKPFWVLVVVGGVLACYSLLVTVAFIIFWVRSKRSRLLHSDYMNMTPRRPGPTRKHYQPYAPPRDFAAYRSKKVAKKPTNKAPHPKQEPQEINFPDDLPGSNTAAPVQETLHGCQPVTQEDGKESRISVQERQ

SEQ ID NO: 212 - protein, 531 aa, synthetic construct
  REGION 1..531: note = Synthetic polypeptide
MSFPCKFVASFLLIFNVSSKGAVSQVQLVQSGAEVEKPGASVKVSCKASGYTFTDYYMHWVRQAPGQGLEWMGWINPNSGGTNYAQKFQGRVTMTRDTSISTAYMELSRLRSDDTAVYYCASGWDFDYWGQGTLVTVSSGGGGSGGGGSGGGGSDIVMTQSPSSLSASVGDRVTITCRASQSIRYYLSWYQQKPGKAPKLLIYTASILQNGVPSRFSGSGSGTDFTLTISSLQPEDFATYYCLQTYTTPDFGPGTKVEIKAAAGSGGSGILVKQSPMLVAYDNAVNLSCKYSYNLFSREFRASLHKGLDSAVEVCVVYGNYSQQLQVYSKTGFNCDGKLGNESVTFYLQNLYVNQTDIYFCKIEVMYPPPYLDNEKSNGTIIHVKGKHLCPSPLFPGPSKPFWVLVVVGGVLACYSLLVTVAFIIFWVRSKRSRLLHSDYMNMTPRRPGPTRKHYQPYAPPRDFAAYRSKKVAKKPTNKAPHPKQEPQEINFPDDLPGSNTAAPVQETLHGCQPVTQEDGKESRISVQERQ

SEQ ID NO: 213 - protein, 527 aa, synthetic construct
  REGION 1..527: note = Synthetic polypeptide
MYRMQLLSCIALSLALVTNSQVQLVQSGAEVEKPGASVKVSCKASGYTFTDYYMHWVRQAPGQGLEWMGWINPNSGGTNYAQKFQGRVTMTRDTSISTAYMELSRLRSDDTAVYYCASGWDFDYWGQGTLVTVSSGGGGSGGGGSGGGGSDIVMTQSPSSLSASVGDRVTITCRASQSIRYYLSWYQQKPGKAPKLLIYTASILQNGVPSRFSGSGSGTDFTLTISSLQPEDFATYYCLQTYTTPDFGPGTKVEIKAAAGSGGSGILVKQSPMLVAYDNAVNLSCKYSYNLFSREFRASLHKGLDSAVEVCVVYGNYSQQLQVYSKTGFNCDGKLGNESVTFYLQNLYVNQTDIYFCKIEVMYPPPYLDNEKSNGTIIHVKGKHLCPSPLFPGPSKPFWVLVVVGGVLACYSLLVTVAFIIFWVRSKRSRLLHSDYMNMTPRRPGPTRKHYQPYAPPRDFAAYRSKKVAKKPTNKAPHPKQEPQEINFPDDLPGSNTAAPVQETLHGCQPVTQEDGKESRISVQERQ

SEQ ID NO: 214 - protein, 524 aa, synthetic construct
  REGION 1..524: note = Synthetic polypeptide
MWLQSLLLLGTVACSISQVQLVQSGAEVEKPGASVKVSCKASGYTFTDYYMHWVRQAPGQGLEWMGWINPNSGGTNYAQKFQGRVTMTRDTSISTAYMELSRLRSDDTAVYYCASGWDFDYWGQGTLVTVSSGGGGSGGGGSGGGGSDIVMTQSPSSLSASVGDRVTITCRASQSIRYYLSWYQQKPGKAPKLLIYTASILQNGVPSRFSGSGSGTDFTLTISSLQPEDFATYYCLQTYTTPDFGPGTKVEIKAAAGSGGSGILVKQSPMLVAYDNAVNLSCKYSYNLFSREFRASLHKGLDSAVEVCVVYGNYSQQLQVYSKTGFNCDGKLGNESVTFYLQNLYVNQTDIYFCKIEVMYPPPYLDNEKSNGTIIHVKGKHLCPSPLFPGPSKPFWVLVVVGGVLACYSLLVTVAFIIFWVRSKRSRLLHSDYMNMTPRRPGPTRKHYQPYAPPRDFAAYRSKKVAKKPTNKAPHPKQEPQEINFPDDLPGSNTAAPVQETLHGCQPVTQEDGKESRISVQERQ

SEQ ID NO: 215 - protein, 527 aa, synthetic construct
  REGION 1..527: note = Synthetic polypeptide
MEAPAQLLFLLLLWLPDTTRQVQLVQSGAEVEKPGASVKVSCKASGYTFTDYYMHWVRQAPGQGLEWMGWINPNSGGTNYAQKFQGRVTMTRDTSISTAYMELSRLRSDDTAVYYCASGWDFDYWGQGTLVTVSSGGGGSGGGGSGGGGSDIVMTQSPSSLSASVGDRVTITCRASQSIRYYLSWYQQKPGKAPKLLIYTASILQNGVPSRFSGSGSGTDFTLTISSLQPEDFATYYCLQTYTTPDFGPGTKVEIKAAAGSGGSGILVKQSPMLVAYDNAVNLSCKYSYNLFSREFRASLHKGLDSAVEVCVVYGNYSQQLQVYSKTGFNCDGKLGNESVTFYLQNLYVNQTDIYFCKIEVMYPPPYLDNEKSNGTIIHVKGKHLCPSPLFPGPSKPFWVLVVVGGVLACYSLLVTVAFIIFWVRSKRSRLLHSDYMNMTPRRPGPTRKHYQPYAPPRDFAAYRSKKVAKKPTNKAPHPKQEPQEINFPDDLPGSNTAAPVQETLHGCQPVTQEDGKESRISVQERQ

SEQ ID NO: 216 - protein, 456 aa, synthetic construct
  REGION 1..456: note = Synthetic polypeptide
MGVLLTQRTLLSLVLALLFPSMASMQVQLVQSGAEVEKPGASVKVSCKASGYTFTDYYMHWVRQAPGQGLEWMGWINPNSGGTNYAQKFQGRVTMTRDTSISTAYMELSRLRSDDTAVYYCASGWDFDYWGQGTLVTVSSGGGGSGGGGSGGGGSDIVMTQSPSSLSASVGDRVTITCRASQSIRYYLSWYQQKPGKAPKLLIYTASILQNGVPSRFSGSGSGTDFTLTISSLQPEDFATYYCLQTYTTPDFGPGTKVEIKAAAGSGGSGFVPVFLPAKPTTTPAPRPPTPAPTIASQPLSLRPEACRPAAGGAVHTRGLDFACDIYIWAPLAGTCGVLLLSLVITLYCNHRNRSKRSRLLHSDYMNMTPRRPGPTRKHYQPYAPPRDFAAYRSKKVAKKPTNKAPHPKQEPQEINFPDDLPGSNTAAPVQETLHGCQPVTQEDGKESRISVQERQ

SEQ ID NO: 217 - protein, 452 aa, synthetic construct
  REGION 1..452: note = Synthetic polypeptide
MALPVTALLLPLALLLHAARPQVQLVQSGAEVEKPGASVKVSCKASGYTFTDYYMHWVRQAPGQGLEWMGWINPNSGGTNYAQKFQGRVTMTRDTSISTAYMELSRLRSDDTAVYYCASGWDFDYWGQGTLVTVSSGGGGSGGGGSGGGGSDIVMTQSPSSLSASVGDRVTITCRASQSIRYYLSWYQQKPGKAPKLLIYTASILQNGVPSRFSGSGSGTDFTLTISSLQPEDFATYYCLQTYTTPDFGPGTKVEIKAAAGSGGSGFVPVFLPAKPTTTPAPRPPTPAPTIASQPLSLRPEACRPAAGGAVHTRGLDFACDIYIWAPLAGTCGVLLLSLVITLYCNHRNRSKRSRLLHSDYMNMTPRRPGPTRKHYQPYAPPRDFAAYRSKKVAKKPTNKAPHPKQEPQEINFPDDLPGSNTAAPVQETLHGCQPVTQEDGKESRISVQERQ

SEQ ID NO: 218 - protein, 455 aa, synthetic construct
  REGION 1..455: note = Synthetic polypeptide
MSFPCKFVASFLLIFNVSSKGAVSQVQLVQSGAEVEKPGASVKVSCKASGYTFTDYYMHWVRQAPGQGLEWMGWINPNSGGTNYAQKFQGRVTMTRDTSISTAYMELSRLRSDDTAVYYCASGWDFDYWGQGTLVTVSSGGGGSGGGGSGGGGSDIVMTQSPSSLSASVGDRVTITCRASQSIRYYLSWYQQKPGKAPKLLIYTASILQNGVPSRFSGSGSGTDFTLTISSLQPEDFATYYCLQTYTTPDFGPGTKVEIKAAAGSGGSGFVPVFLPAKPTTTPAPRPPTPAPTIASQPLSLRPEACRPAAGGAVHTRGLDFACDIYIWAPLAGTCGVLLLSLVITLYCNHRNRSKRSRLLHSDYMNMTPRRPGPTRKHYQPYAPPRDFAAYRSKKVAKKPTNKAPHPKQEPQEINFPDDLPGSNTAAPVQETLHGCQPVTQEDGKESRISVQERQ

SEQ ID NO: 219 - protein, 451 aa, synthetic construct
  REGION 1..451: note = Synthetic polypeptide
MYRMQLLSCIALSLALVTNSQVQLVQSGAEVEKPGASVKVSCKASGYTFTDYYMHWVRQAPGQGLEWMGWINPNSGGTNYAQKFQGRVTMTRDTSISTAYMELSRLRSDDTAVYYCASGWDFDYWGQGTLVTVSSGGGGSGGGGSGGGGSDIVMTQSPSSLSASVGDRVTITCRASQSIRYYLSWYQQKPGKAPKLLIYTASILQNGVPSRFSGSGSGTDFTLTISSLQPEDFATYYCLQTYTTPDFGPGTKVEIKAAAGSGGSGFVPVFLPAKPTTTPAPRPPTPAPTIASQPLSLRPEACRPAAGGAVHTRGLDFACDIYIWAPLAGTCGVLLLSLVITLYCNHRNRSKRSRLLHSDYMNMTPRRPGPTRKHYQPYAPPRDFAAYRSKKVAKKPTNKAPHPKQEPQEINFPDDLPGSNTAAPVQETLHGCQPVTQEDGKESRISVQERQ

SEQ ID NO: 220 - protein, 448 aa, synthetic construct
  REGION 1..448: note = Synthetic polypeptide
MWLQSLLLLGTVACSISQVQLVQSGAEVEKPGASVKVSCKASGYTFTDYYMHWVRQAPGQGLEWMGWINPNSGGTNYAQKFQGRVTMTRDTSISTAYMELSRLRSDDTAVYYCASGWDFDYWGQGTLVTVSSGGGGSGGGGSGGGGSDIVMTQSPSSLSASVGDRVTITCRASQSIRYYLSWYQQKPGKAPKLLIYTASILQNGVPSRFSGSGSGTDFTLTISSLQPEDFATYYCLQTYTTPDFGPGTKVEIKAAAGSGGSGFVPVFLPAKPTTTPAPRPPTPAPTIASQPLSLRPEACRPAAGGAVHTRGLDFACDIYIWAPLAGTCGVLLLSLVITLYCNHRNRSKRSRLLHSDYMNMTPRRPGPTRKHYQPYAPPRDFAAYRSKKVAKKPTNKAPHPKQEPQEINFPDDLPGSNTAAPVQETLHGCQPVTQEDGKESRISVQERQ

SEQ ID NO: 221 - protein, 451 aa, synthetic construct
  REGION 1..451: note = Synthetic polypeptide
MEAPAQLLFLLLLWLPDTTRQVQLVQSGAEVEKPGASVKVSCKASGYTFTDYYMHWVRQAPGQGLEWMGWINPNSGGTNYAQKFQGRVTMTRDTSISTAYMELSRLRSDDTAVYYCASGWDFDYWGQGTLVTVSSGGGGSGGGGSGGGGSDIVMTQSPSSLSASVGDRVTITCRASQSIRYYLSWYQQKPGKAPKLLIYTASILQNGVPSRFSGSGSGTDFTLTISSLQPEDFATYYCLQTYTTPDFGPGTKVEIKAAAGSGGSGFVPVFLPAKPTTTPAPRPPTPAPTIASQPLSLRPEACRPAAGGAVHTRGLDFACDIYIWAPLAGTCGVLLLSLVITLYCNHRNRSKRSRLLHSDYMNMTPRRPGPTRKHYQPYAPPRDFAAYRSKKVAKKPTNKAPHPKQEPQEINFPDDLPGSNTAAPVQETLHGCQPVTQEDGKESRISVQERQ

SEQ ID NO: 222 - protein, 400 aa, synthetic construct
  REGION 1..400: note = Synthetic polypeptide
MGVLLTQRTLLSLVLALLFPSMASMQVQLVQSGAEVEKPGASVKVSCKASGYTFTDYYMHWVRQAPGQGLEWMGWINPNSGGTNYAQKFQGRVTMTRDTSISTAYMELSRLRSDDTAVYYCASGWDFDYWGQGTLVTVSSGGGGSGGGGSGGGGSDIVMTQSPSSLSASVGDRVTITCRASQSIRYYLSWYQQKPGKAPKLLIYTASILQNGVPSRFSGSGSGTDFTLTISSLQPEDFATYYCLQTYTTPDFGPGTKVEIKAAAGSGGSGFWVLVVVGGVLACYSLLVTVAFIIFWVRSKRSRLLHSDYMNMTPRRPGPTRKHYQPYAPPRDFAAYRSKKVAKKPTNKAPHPKQEPQEINFPDDLPGSNTAAPVQETLHGCQPVTQEDGKESRISVQERQ

SEQ ID NO: 223 - protein, 396 aa, synthetic construct
  REGION 1..396: note = Synthetic polypeptide
MALPVTALLLPLALLLHAARPQVQLVQSGAEVEKPGASVKVSCKASGYTFTDYYMHWVRQAPGQGLEWMGWINPNSGGTNYAQKFQGRVTMTRDTSISTAYMELSRLRSDDTAVYYCASGWDFDYWGQGTLVTVSSGGGGSGGGGSGGGGSDIVMTQSPSSLSASVGDRVTITCRASQSIRYYLSWYQQKPGKAPKLLIYTASILQNGVPSRFSGSGSGTDFTLTISSLQPEDFATYYCLQTYTTPDFGPGTKVEIKAAAGSGGSGFWVLVVVGGVLACYSLLVTVAFIIFWVRSKRSRLLHSDYMNMTPRRPGPTRKHYQPYAPPRDFAAYRSKKVAKKPTNKAPHPKQEPQEINFPDDLPGSNTAAPVQETLHGCQPVTQEDGKESRISVQERQ

SEQ ID NO: 224 - protein, 399 aa, synthetic construct
  REGION 1..399: note = Synthetic polypeptide
MSFPCKFVASFLLIFNVSSKGAVSQVQLVQSGAEVEKPGASVKVSCKASGYTFTDYYMHWVRQAPGQGLEWMGWINPNSGGTNYAQKFQGRVTMTRDTSISTAYMELSRLRSDDTAVYYCASGWDFDYWGQGTLVTVSSGGGGSGGGGSGGGGSDIVMTQSPSSLSASVGDRVTITCRASQSIRYYLSWYQQKPGKAPKLLIYTASILQNGVPSRFSGSGSGTDFTLTISSLQPEDFATYYCLQTYTTPDFGPGTKVEIKAAAGSGGSGFWVLVVVGGVLACYSLLVTVAFIIFWVRSKRSRLLHSDYMNMTPRRPGPTRKHYQPYAPPRDFAAYRSKKVAKKPTNKAPHPKQEPQEINFPDDLPGSNTAAPVQETLHGCQPVTQEDGKESRISVQERQ

SEQ ID NO: 225 - protein, 395 aa, synthetic construct
  REGION 1..395: note = Synthetic polypeptide
MYRMQLLSCIALSLALVTNSQVQLVQSGAEVEKPGASVKVSCKASGYTFTDYYMHWVRQAPGQGLEWMGWINPNSGGTNYAQKFQGRVTMTRDTSISTAYMELSRLRSDDTAVYYCASGWDFDYWGQGTLVTVSSGGGGSGGGGSGGGGSDIVMTQSPSSLSASVGDRVTITCRASQSIRYYLSWYQQKPGKAPKLLIYTASILQNGVPSRFSGSGSGTDFTLTISSLQPEDFATYYCLQTYTTPDFGPGTKVEIKAAAGSGGSGFWVLVVVGGVLACYSLLVTVAFIIFWVRSKRSRLLHSDYMNMTPRRPGPTRKHYQPYAPPRDFAAYRSKKVAKKPTNKAPHPKQEPQEINFPDDLPGSNTAAPVQETLHGCQPVTQEDGKESRISVQERQ

SEQ ID NO: 226 - protein, 392 aa, synthetic construct
  REGION 1..392: note = Synthetic polypeptide
MWLQSLLLLGTVACSISQVQLVQSGAEVEKPGASVKVSCKASGYTFTDYYMHWVRQAPGQGLEWMGWINPNSGGTNYAQKFQGRVTMTRDTSISTAYMELSRLRSDDTAVYYCASGWDFDYWGQGTLVTVSSGGGGSGGGGSGGGGSDIVMTQSPSSLSASVGDRVTITCRASQSIRYYLSWYQQKPGKAPKLLIYTASILQNGVPSRFSGSGSGTDFTLTISSLQPEDFATYYCLQTYTTPDFGPGTKVEIKAAAGSGGSGFWVLVVVGGVLACYSLLVTVAFIIFWVRSKRSRLLHSDYMNMTPRRPGPTRKHYQPYAPPRDFAAYRSKKVAKKPTNKAPHPKQEPQEINFPDDLPGSNTAAPVQETLHGCQPVTQEDGKESRISVQERQ

SEQ ID NO: 227 - protein, 395 aa, synthetic construct
  REGION 1..395: note = Synthetic polypeptide
MEAPAQLLFLLLLWLPDTTRQVQLVQSGAEVEKPGASVKVSCKASGYTFTDYYMHWVRQAPGQGLEWMGWINPNSGGTNYAQKFQGRVTMTRDTSISTAYMELSRLRSDDTAVYYCASGWDFDYWGQGTLVTVSSGGGGSGGGGSGGGGSDIVMTQSPSSLSASVGDRVTITCRASQSIRYYLSWYQQKPGKAPKLLIYTASILQNGVPSRFSGSGSGTDFTLTISSLQPEDFATYYCLQTYTTPDFGPGTKVEIKAAAGSGGSGFWVLVVVGGVLACYSLLVTVAFIIFWVRSKRSRLLHSDYMNMTPRRPGPTRKHYQPYAPPRDFAAYRSKKVAKKPTNKAPHPKQEPQEINFPDDLPGSNTAAPVQETLHGCQPVTQEDGKESRISVQERQ

SEQ ID NO: 228 - protein, 537 aa, synthetic construct
  REGION 1..537: note = Synthetic polypeptide
MGVLLTQRTLLSLVLALLFPSMASMQVQLVQSGAEVKRPGASVQVSCRASGYSINTYYMQWVRQAPGAGLEWMGVINPSGVTSYAQKFQGRVTLTNDTSTNTVYMQLNSLTSADTAVYYCARWALWGDFGMDVWGKGTLVTVSSGGGGSGGGGSGGGGSDIQMTQSPSTLSASIGDRVTITCRASEGIYHWLAWYQQKPGKAPKLLIYKASSLASGAPSRFSGSGSGTDFTLTISSLQPDDFATYYCQQYSNYPLTFGGGTKLEIKAAAGSGGSGILVKQSPMLVAYDNAVNLSCKYSYNLFSREFRASLHKGLDSAVEVCVVYGNYSQQLQVYSKTGFNCDGKLGNESVTFYLQNLYVNQTDIYFCKIEVMYPPPYLDNEKSNGTIIHVKGKHLCPSPLFPGPSKPFWVLVVVGGVLACYSLLVTVAFIIFWVRSKRSRLLHSDYMNMTPRRPGPTRKHYQPYAPPRDFAAYRSKKVAKKPTNKAPHPKQEPQEINFPDDLPGSNTAAPVQETLHGCQPVTQEDGKESRISVQERQ

SEQ ID NO: 229 - protein, 533 aa, synthetic construct
  REGION 1..533: note = Synthetic polypeptide
MALPVTALLLPLALLLHAARPQVQLVQSGAEVKRPGASVQVSCRASGYSINTYYMQWVRQAPGAGLEWMGVINPSGVTSYAQKFQGRVTLTNDTSTNTVYMQLNSLTSADTAVYYCARWALWGDFGMDVWGKGTLVTVSSGGGGSGGGGSGGGGSDIQMTQSPSTLSASIGDRVTITCRASEGIYHWLAWYQQKPGKAPKLLIYKASSLASGAPSRFSGSGSGTDFTLTISSLQPDDFATYYCQQYSNYPLTFGGGTKLEIKAAAGSGGSGILVKQSPMLVAYDNAVNLSCKYSYNLFSREFRASLHKGLDSAVEVCVVYGNYSQQLQVYSKTGFNCDGKLGNESVTFYLQNLYVNQTDIYFCKIEVMYPPPYLDNEKSNGTIIHVKGKHLCPSPLFPGPSKPFWVLVVVGGVLACYSLLVTVAFIIFWVRSKRSRLLHSDYMNMTPRRPGPTRKHYQPYAPPRDFAAYRSKKVAKKPTNKAPHPKQEPQEINFPDDLPGSNTAAPVQETLHGCQPVTQEDGKESRISVQERQ

SEQ ID NO: 230 - protein, 536 aa, synthetic construct
  REGION 1..536: note = Synthetic polypeptide
MSFPCKFVASFLLIFNVSSKGAVSQVQLVQSGAEVKRPGASVQVSCRASGYSINTYYMQWVRQAPGAGLEWMGVINPSGVTSYAQKFQGRVTLTNDTSTNTVYMQLNSLTSADTAVYYCARWALWGDFGMDVWGKGTLVTVSSGGGGSGGGGSGGGGSDIQMTQSPSTLSASIGDRVTITCRASEGIYHWLAWYQQKPGKAPKLLIYKASSLASGAPSRFSGSGSGTDFTLTISSLQPDDFATYYCQQYSNYPLTFGGGTKLEIKAAAGSGGSGILVKQSPMLVAYDNAVNLSCKYSYNLFSREFRASLHKGLDSAVEVCVVYGNYSQQLQVYSKTGFNCDGKLGNESVTFYLQNLYVNQTDIYFCKIEVMYPPPYLDNEKSNGTIIHVKGKHLCPSPLFPGPSKPFWVLVVVGGVLACYSLLVTVAFIIFWVRSKRSRLLHSDYMNMTPRRPGPTRKHYQPYAPPRDFAAYRSKKVAKKPTNKAPHPKQEPQEINFPDDLPGSNTAAPVQETLHGCQPVTQEDGKESRISVQERQ

SEQ ID NO: 231 - protein, 532 aa, synthetic construct
  REGION 1..532: note = Synthetic polypeptide
MYRMQLLSCIALSLALVTNSQVQLVQSGAEVKRPGASVQVSCRASGYSINTYYMQWVRQAPGAGLEWMGVINPSGVTSYAQKFQGRVTLTNDTSTNTVYMQLNSLTSADTAVYYCARWALWGDFGMDVWGKGTLVTVSSGGGGSGGGGSGGGGSDIQMTQSPSTLSASIGDRVTITCRASEGIYHWLAWYQQKPGKAPKLLIYKASSLASGAPSRFSGSGSGTDFTLTISSLQPDDFATYYCQQYSNYPLTFGGGTKLEIKAAAGSGGSGILVKQSPMLVAYDNAVNLSCKYSYNLFSREFRASLHKGLDSAVEVCVVYGNYSQQLQVYSKTGFNCDGKLGNESVTFYLQNLYVNQTDIYFCKIEVMYPPPYLDNEKSNGTIIHVKGKHLCPSPLFPGPSKPFWVLVVVGGVLACYSLLVTVAFIIFWVRSKRSRLLHSDYMNMTPRRPGPTRKHYQPYAPPRDFAAYRSKKVAKKPTNKAPHPKQEPQEINFPDDLPGSNTAAPVQETLHGCQPVTQEDGKESRISVQERQ

SEQ ID NO: 232 - protein, 529 aa, synthetic construct
  REGION 1..529: note = Synthetic polypeptide
MWLQSLLLLGTVACSISQVQLVQSGAEVKRPGASVQVSCRASGYSINTYYMQWVRQAPGAGLEWMGVINPSGVTSYAQKFQGRVTLTNDTSTNTVYMQLNSLTSADTAVYYCARWALWGDFGMDVWGKGTLVTVSSGGGGSGGGGSGGGGSDIQMTQSPSTLSASIGDRVTITCRASEGIYHWLAWYQQKPGKAPKLLIYKASSLASGAPSRFSGSGSGTDFTLTISSLQPDDFATYYCQQYSNYPLTFGGGTKLEIKAAAGSGGSGILVKQSPMLVAYDNAVNLSCKYSYNLFSREFRASLHKGLDSAVEVCVVYGNYSQQLQVYSKTGFNCDGKLGNESVTFYLQNLYVNQTDIYFCKIEVMYPPPYLDNEKSNGTIIHVKGKHLCPSPLFPGPSKPFWVLVVVGGVLACYSLLVTVAFIIFWVRSKRSRLLHSDYMNMTPRRPGPTRKHYQPYAPPRDFAAYRSKKVAKKPTNKAPHPKQEPQEINFPDDLPGSNTAAPVQETLHGCQPVTQEDGKESRISVQERQ

SEQ ID NO: 233 - protein, 532 aa, synthetic construct
  REGION 1..532: note = Synthetic polypeptide
MEAPAQLLFLLLLWLPDTTRQVQLVQSGAEVKRPGASVQVSCRASGYSINTYYMQWVRQAPGAGLEWMGVINPSGVTSYAQKFQGRVTLTNDTSTNTVYMQLNSLTSADTAVYYCARWALWGDFGMDVWGKGTLVTVSSGGGGSGGGGSGGGGSDIQMTQSPSTLSASIGDRVTITCRASEGIYHWLAWYQQKPGKAPKLLIYKASSLASGAPSRFSGSGSGTDFTLTISSLQPDDFATYYCQQYSNYPLTFGGGTKLEIKAAAGSGGSGILVKQSPMLVAYDNAVNLSCKYSYNLFSREFRASLHKGLDSAVEVCVVYGNYSQQLQVYSKTGFNCDGKLGNESVTFYLQNLYVNQTDIYFCKIEVMYPPPYLDNEKSNGTIIHVKGKHLCPSPLFPGPSKPFWVLVVVGGVLACYSLLVTVAFIIFWVRSKRSRLLHSDYMNMTPRRPGPTRKHYQPYAPPRDFAAYRSKKVAKKPTNKAPHPKQEPQEINFPDDLPGSNTAAPVQETLHGCQPVTQEDGKESRISVQERQ

SEQ ID NO: 234 - protein, 461 aa, synthetic construct
  REGION 1..461: note = Synthetic polypeptide
MGVLLTQRTLLSLVLALLFPSMASMQVQLVQSGAEVKRPGASVQVSCRASGYSINTYYMQWVRQAPGAGLEWMGVINPSGVTSYAQKFQGRVTLTNDTSTNTVYMQLNSLTSADTAVYYCARWALWGDFGMDVWGKGTLVTVSSGGGGSGGGGSGGGGSDIQMTQSPSTLSASIGDRVTITCRASEGIYHWLAWYQQKPGKAPKLLIYKASSLASGAPSRFSGSGSGTDFTLTISSLQPDDFATYYCQQYSNYPLTFGGGTKLEIKAAAGSGGSGFVPVFLPAKPTTTPAPRPPTPAPTIASQPLSLRPEACRPAAGGAVHTRGLDFACDIYIWAPLAGTCGVLLLSLVITLYCNHRNRSKRSRLLHSDYMNMTPRRPGPTRKHYQPYAPPRDFAAYRSKKVAKKPTNKAPHPKQEPQEINFPDDLPGSNTAAPVQETLHGCQPVTQEDGKESRISVQERQ

SEQ ID NO: 235 - protein, 457 aa, synthetic construct
  REGION 1..457: note = Synthetic polypeptide
MALPVTALLLPLALLLHAARPQVQLVQSGAEVKRPGASVQVSCRASGYSINTYYMQWVRQAPGAGLEWMGVINPSGVTSYAQKFQGRVTLTNDTSTNTVYMQLNSLTSADTAVYYCARWALWGDFGMDVWGKGTLVTVSSGGGGSGGGGSGGGGSDIQMTQSPSTLSASIGDRVTITCRASEGIYHWLAWYQQKPGKAPKLLIYKASSLASGAPSRFSGSGSGTDFTLTISSLQPDDFATYYCQQYSNYPLTFGGGTKLEIKAAAGSGGSGFVPVFLPAKPTTTPAPRPPTPAPTIASQPLSLRPEACRPAAGGAVHTRGLDFACDIYIWAPLAGTCGVLLLSLVITLYCNHRNRSKRSRLLHSDYMNMTPRRPGPTRKHYQPYAPPRDFAAYRSKKVAKKPTNKAPHPKQEPQEINFPDDLPGSNTAAPVQETLHGCQPVTQEDGKESRISVQERQ

SEQ ID NO: 236 - protein, 460 aa, synthetic construct
  REGION 1..460: note = Synthetic polypeptide
MSFPCKFVASFLLIFNVSSKGAVSQVQLVQSGAEVKRPGASVQVSCRASGYSINTYYMQWVRQAPGAGLEWMGVINPSGVTSYAQKFQGRVTLTNDTSTNTVYMQLNSLTSADTAVYYCARWALWGDFGMDVWGKGTLVTVSSGGGGSGGGGSGGGGSDIQMTQSPSTLSASIGDRVTITCRASEGIYHWLAWYQQKPGKAPKLLIYKASSLASGAPSRFSGSGSGTDFTLTISSLQPDDFATYYCQQYSNYPLTFGGGTKLEIKAAAGSGGSGFVPVFLPAKPTTTPAPRPPTPAPTIASQPLSLRPEACRPAAGGAVHTRGLDFACDIYIWAPLAGTCGVLLLSLVITLYCNHRNRSKRSRLLHSDYMNMTPRRPGPTRKHYQPYAPPRDFAAYRSKKVAKKPTNKAPHPKQEPQEINFPDDLPGSNTAAPVQETLHGCQPVTQEDGKESRISVQERQ

SEQ ID NO: 237 - protein, 456 aa, synthetic construct
  REGION 1..456: note = Synthetic polypeptide
MYRMQLLSCIALSLALVTNSQVQLVQSGAEVKRPGASVQVSCRASGYSINTYYMQWVRQAPGAGLEWMGVINPSGVTSYAQKFQGRVTLTNDTSTNTVYMQLNSLTSADTAVYYCARWALWGDFGMDVWGKGTLVTVSSGGGGSGGGGSGGGGSDIQMTQSPSTLSASIGDRVTITCRASEGIYHWLAWYQQKPGKAPKLLIYKASSLASGAPSRFSGSGSGTDFTLTISSLQPDDFATYYCQQYSNYPLTFGGGTKLEIKAAAGSGGSGFVPVFLPAKPTTTPAPRPPTPAPTIASQPLSLRPEACRPAAGGAVHTRGLDFACDIYIWAPLAGTCGVLLLSLVITLYCNHRNRSKRSRLLHSDYMNMTPRRPGPTRKHYQPYAPPRDFAAYRSKKVAKKPTNKAPHPKQEPQEINFPDDLPGSNTAAPVQETLHGCQPVTQEDGKESRISVQERQ

SEQ ID NO: 238 - protein, 453 aa, synthetic construct
  REGION 1..453: note = Synthetic polypeptide
MWLQSLLLLGTVACSISQVQLVQSGAEVKRPGASVQVSCRASGYSINTYYMQWVRQAPGAGLEWMGVINPSGVTSYAQKFQGRVTLTNDTSTNTVYMQLNSLTSADTAVYYCARWALWGDFGMDVWGKGTLVTVSSGGGGSGGGGSGGGGSDIQMTQSPSTLSASIGDRVTITCRASEGIYHWLAWYQQKPGKAPKLLIYKASSLASGAPSRFSGSGSGTDFTLTISSLQPDDFATYYCQQYSNYPLTFGGGTKLEIKAAAGSGGSGFVPVFLPAKPTTTPAPRPPTPAPTIASQPLSLRPEACRPAAGGAVHTRGLDFACDIYIWAPLAGTCGVLLLSLVITLYCNHRNRSKRSRLLHSDYMNMTPRRPGPTRKHYQPYAPPRDFAAYRSKKVAKKPTNKAPHPKQEPQEINFPDDLPGSNTAAPVQETLHGCQPVTQEDGKESRISVQERQ

SEQ ID NO: 239 - protein, 456 aa, synthetic construct
  REGION 1..456: note = Synthetic polypeptide
MEAPAQLLFLLLLWLPDTTRQVQLVQSGAEVKRPGASVQVSCRASGYSINTYYMQWVRQAPGAGLEWMGVINPSGVTSYAQKFQGRVTLTNDTSTNTVYMQLNSLTSADTAVYYCARWALWGDFGMDVWGKGTLVTVSSGGGGSGGGGSGGGGSDIQMTQSPSTLSASIGDRVTITCRASEGIYHWLAWYQQKPGKAPKLLIYKASSLASGAPSRFSGSGSGTDFTLTISSLQPDDFATYYCQQYSNYPLTFGGGTKLEIKAAAGSGGSGFVPVFLPAKPTTTPAPRPPTPAPTIASQPLSLRPEACRPAAGGAVHTRGLDFACDIYIWAPLAGTCGVLLLSLVITLYCNHRNRSKRSRLLHSDYMNMTPRRPGPTRKHYQPYAPPRDFAAYRSKKVAKKPTNKAPHPKQEPQEINFPDDLPGSNTAAPVQETLHGCQPVTQEDGKESRISVQERQ

SEQ ID NO: 240 - protein, 508 aa, synthetic construct
  REGION 1..508: note = Synthetic polypeptide
MGVLLTQRTLLSLVLALLFPSMASMQVQLVQSGAEVKRPGASVQVSCRASGYSINTYYMQWVRQAPGAGLEWMGVINPSGVTSYAQKFQGRVTLTNDTSTNTVYMQLNSLTSADTAVYYCARWALWGDFGMDVWGKGTLVTVSSGGGGSGGGGSGGGGSDIQMTQSPSTLSASIGDRVTITCRASEGIYHWLAWYQQKPGKAPKLLIYKASSLASGAPSRFSGSGSGTDFTLTISSLQPDDFATYYCQQYSNYPLTFGGGTKLEIKAAAGSGGSGFWVLVVVGGVLACYSLLVTVAFIIFWVRSKRSRLLHSDYMNMTPRRPGPTRKHYQPYAPPRDFAAYRSKKVAKKPTNKAPHPKQEPQEINFPDDLPGSNTAAPVQETLHGCQPVTQEDGKESRISVQERQRSKRSRLLHSDYMNMTPRRPGPTRKHYQPYAPPRDFAAYRSKKVAKKPTNKAPHPKQEPQEINFPDDLPGSNTAAPVQETLHGCQPVTQEDGKESRISVQERQ

SEQ ID NO: 241 - protein, 401 aa, synthetic construct
  REGION 1..401: note = Synthetic polypeptide
MALPVTALLLPLALLLHAARPQVQLVQSGAEVKRPGASVQVSCRASGYSINTYYMQWVRQAPGAGLEWMGVINPSGVTSYAQKFQGRVTLTNDTSTNTVYMQLNSLTSADTAVYYCARWALWGDFGMDVWGKGTLVTVSSGGGGSGGGGSGGGGSDIQMTQSPSTLSASIGDRVTITCRASEGIYHWLAWYQQKPGKAPKLLIYKASSLASGAPSRFSGSGSGTDFTLTISSLQPDDFATYYCQQYSNYPLTFGGGTKLEIKAAAGSGGSGFWVLVVVGGVLACYSLLVTVAFIIFWVRSKRSRLLHSDYMNMTPRRPGPTRKHYQPYAPPRDFAAYRSKKVAKKPTNKAPHPKQEPQEINFPDDLPGSNTAAPVQETLHGCQPVTQEDGKESRISVQERQ

SEQ ID NO: 242 - protein, 404 aa, synthetic construct
  REGION 1..404: note = Synthetic polypeptide
MSFPCKFVASFLLIFNVSSKGAVSQVQLVQSGAEVKRPGASVQVSCRASGYSINTYYMQWVRQAPGAGLEWMGVINPSGVTSYAQKFQGRVTLTNDTSTNTVYMQLNSLTSADTAVYYCARWALWGDFGMDVWGKGTLVTVSSGGGGSGGGGSGGGGSDIQMTQSPSTLSASIGDRVTITCRASEGIYHWLAWYQQKPGKAPKLLIYKASSLASGAPSRFSGSGSGTDFTLTISSLQPDDFATYYCQQYSNYPLTFGGGTKLEIKAAAGSGGSGFWVLVVVGGVLACYSLLVTVAFIIFWVRSKRSRLLHSDYMNMTPRRPGPTRKHYQPYAPPRDFAAYRSKKVAKKPTNKAPHPKQEPQEINFPDDLPGSNTAAPVQETLHGCQPVTQEDGKESRISVQERQ

SEQ ID NO: 243 - protein, 400 aa, synthetic construct
  REGION 1..400: note = Synthetic polypeptide
MYRMQLLSCIALSLALVTNSQVQLVQSGAEVKRPGASVQVSCRASGYSINTYYMQWVRQAPGAGLEWMGVINPSGVTSYAQKFQGRVTLTNDTSTNTVYMQLNSLTSADTAVYYCARWALWGDFGMDVWGKGTLVTVSSGGGGSGGGGSGGGGSDIQMTQSPSTLSASIGDRVTITCRASEGIYHWLAWYQQKPGKAPKLLIYKASSLASGAPSRFSGSGSGTDFTLTISSLQPDDFATYYCQQYSNYPLTFGGGTKLEIKAAAGSGGSGFWVLVVVGGVLACYSLLVTVAFIIFWVRSKRSRLLHSDYMNMTPRRPGPTRKHYQPYAPPRDFAAYRSKKVAKKPTNKAPHPKQEPQEINFPDDLPGSNTAAPVQETLHGCQPVTQEDGKESRISVQERQ

SEQ ID NO: 244 - protein, 397 aa, synthetic construct
  REGION 1..397: note = Synthetic polypeptide
MWLQSLLLLGTVACSISQVQLVQSGAEVKRPGASVQVSCRASGYSINTYYMQWVRQAPGAGLEWMGVINPSGVTSYAQKFQGRVTLTNDTSTNTVYMQLNSLTSADTAVYYCARWALWGDFGMDVWGKGTLVTVSSGGGGSGGGGSGGGGSDIQMTQSPSTLSASIGDRVTITCRASEGIYHWLAWYQQKPGKAPKLLIYKASSLASGAPSRFSGSGSGTDFTLTISSLQPDDFATYYCQQYSNYPLTFGGGTKLEIKAAAGSGGSGFWVLVVVGGVLACYSLLVTVAFIIFWVRSKRSRLLHSDYMNMTPRRPGPTRKHYQPYAPPRDFAAYRSKKVAKKPTNKAPHPKQEPQEINFPDDLPGSNTAAPVQETLHGCQPVTQEDGKESRISVQERQ

SEQ ID NO: 245 - protein, 400 aa, synthetic construct
  REGION 1..400: note = Synthetic polypeptide
MEAPAQLLFLLLLWLPDTTRQVQLVQSGAEVKRPGASVQVSCRASGYSINTYYMQWVRQAPGAGLEWMGVINPSGVTSYAQKFQGRVTLTNDTSTNTVYMQLNSLTSADTAVYYCARWALWGDFGMDVWGKGTLVTVSSGGGGSGGGGSGGGGSDIQMTQSPSTLSASIGDRVTITCRASEGIYHWLAWYQQKPGKAPKLLIYKASSLASGAPSRFSGSGSGTDFTLTISSLQPDDFATYYCQQYSNYPLTFGGGTKLEIKAAAGSGGSGFWVLVVVGGVLACYSLLVTVAFIIFWVRSKRSRLLHSDYMNMTPRRPGPTRKHYQPYAPPRDFAAYRSKKVAKKPTNKAPHPKQEPQEINFPDDLPGSNTAAPVQETLHGCQPVTQEDGKESRISVQERQ

SEQ ID NO: 246 - protein, 537 aa, synthetic construct
  REGION 1..537: note = Synthetic polypeptide
MGVLLTQRTLLSLVLALLFPSMASMQVQLQESGPGLVKPSETLSLTCTVSGGSVSSGSYYWSWIRQPPGKGLEWIGYIYYSGSTNYNPSLKSRVTISVDTSKNQFSLKLSSVTAADTAVYYCAREGKNGAFDIWGQGTMVTVSSGGGGSGGGGSGGGGSDIQMTQSPSSLSASVGDRVTITCRASQSISSYLNWYQQKPGKAPKLLIYAASSLQSGVPSGFSGSGSGTDFTLTISSLQPEDFATYYCQQSYSTPLTFGGGTKVEIKAAAGSGGSGILVKQSPMLVAYDNAVNLSCKYSYNLFSREFRASLHKGLDSAVEVCVVYGNYSQQLQVYSKTGFNCDGKLGNESVTFYLQNLYVNQTDIYFCKIEVMYPPPYLDNEKSNGTIIHVKGKHLCPSPLFPGPSKPFWVLVVVGGVLACYSLLVTVAFIIFWVRSKRSRLLHSDYMNMTPRRPGPTRKHYQPYAPPRDFAAYRSKKVAKKPTNKAPHPKQEPQEINFPDDLPGSNTAAPVQETLHGCQPVTQEDGKESRISVQERQ

SEQ ID NO: 247 - protein, 533 aa, synthetic construct
  REGION 1..533: note = Synthetic polypeptide
MALPVTALLLPLALLLHAARPQVQLQESGPGLVKPSETLSLTCTVSGGSVSSGSYYWSWIRQPPGKGLEWIGYIYYSGSTNYNPSLKSRVTISVDTSKNQFSLKLSSVTAADTAVYYCAREGKNGAFDIWGQGTMVTVSSGGGGSGGGGSGGGGSDIQMTQSPSSLSASVGDRVTITCRASQSISSYLNWYQQKPGKAPKLLIYAASSLQSGVPSGFSGSGSGTDFTLTISSLQPEDFATYYCQQSYSTPLTFGGGTKVEIKAAAGSGGSGILVKQSPMLVAYDNAVNLSCKYSYNLFSREFRASLHKGLDSAVEVCVVYGNYSQQLQVYSKTGFNCDGKLGNESVTFYLQNLYVNQTDIYFCKIEVMYPPPYLDNEKSNGTIIHVKGKHLCPSPLFPGPSKPFWVLVVVGGVLACYSLLVTVAFIIFWVRSKRSRLLHSDYMNMTPRRPGPTRKHYQPYAPPRDFAAYRSKKVAKKPTNKAPHPKQEPQEINFPDDLPGSNTAAPVQETLHGCQPVTQEDGKESRISVQERQ

SEQ ID NO: 248 - protein, 536 aa, synthetic construct
  REGION 1..536: note = Synthetic polypeptide
MSFPCKFVASFLLIFNVSSKGAVSQVQLQESGPGLVKPSETLSLTCTVSGGSVSSGSYYWSWIRQPPGKGLEWIGYIYYSGSTNYNPSLKSRVTISVDTSKNQFSLKLSSVTAADTAVYYCAREGKNGAFDIWGQGTMVTVSSGGGGSGGGGSGGGGSDIQMTQSPSSLSASVGDRVTITCRASQSISSYLNWYQQKPGKAPKLLIYAASSLQSGVPSGFSGSGSGTDFTLTISSLQPEDFATYYCQQSYSTPLTFGGGTKVEIKAAAGSGGSGILVKQSPMLVAYDNAVNLSCKYSYNLFSREFRASLHKGLDSAVEVCVVYGNYSQQLQVYSKTGFNCDGKLGNESVTFYLQNLYVNQTDIYFCKIEVMYPPPYLDNEKSNGTIIHVKGKHLCPSPLFPGPSKPFWVLVVVGGVLACYSLLVTVAFIIFWVRSKRSRLLHSDYMNMTPRRPGPTRKHYQPYAPPRDFAAYRSKKVAKKPTNKAPHPKQEPQEINFPDDLPGSNTAAPVQETLHGCQPVTQEDGKESRISVQERQ

SEQ ID NO: 249 - protein, 532 aa, synthetic construct
  REGION 1..532: note = Synthetic polypeptide
MYRMQLLSCIALSLALVTNSQVQLQESGPGLVKPSETLSLTCTVSGGSVSSGSYYWSWIRQPPGKGLEWIGYIYYSGSTNYNPSLKSRVTISVDTSKNQFSLKLSSVTAADTAVYYCAREGKNGAFDIWGQGTMVTVSSGGGGSGGGGSGGGGSDIQMTQSPSSLSASVGDRVTITCRASQSISSYLNWYQQKPGKAPKLLIYAASSLQSGVPSGFSGSGSGTDFTLTISSLQPEDFATYYCQQSYSTPLTFGGGTKVEIKAAAGSGGSGILVKQSPMLVAYDNAVNLSCKYSYNLFSREFRASLHKGLDSAVEVCVVYGNYSQQLQVYSKTGFNCDGKLGNESVTFYLQNLYVNQTDIYFCKIEVMYPPPYLDNEKSNGTIIHVKGKHLCPSPLFPGPSKPFWVLVVVGGVLACYSLLVTVAFIIFWVRSKRSRLLHSDYMNMTPRRPGPTRKHYQPYAPPRDFAAYRSKKVAKKPTNKAPHPKQEPQEINFPDDLPGSNTAAPVQETLHGCQPVTQEDGKESRISVQERQ

SEQ ID NO: 250 - protein, 529 aa, synthetic construct
  REGION 1..529: note = Synthetic polypeptide
MWLQSLLLLGTVACSISQVQLQESGPGLVKPSETLSLTCTVSGGSVSSGSYYWSWIRQPPGKGLEWIGYIYYSGSTNYNPSLKSRVTISVDTSKNQFSLKLSSVTAADTAVYYCAREGKNGAFDIWGQGTMVTVSSGGGGSGGGGSGGGGSDIQMTQSPSSLSASVGDRVTITCRASQSISSYLNWYQQKPGKAPKLLIYAASSLQSGVPSGFSGSGSGTDFTLTISSLQPEDFATYYCQQSYSTPLTFGGGTKVEIKAAAGSGGSGILVKQSPMLVAYDNAVNLSCKYSYNLFSREFRASLHKGLDSAVEVCVVYGNYSQQLQVYSKTGFNCDGKLGNESVTFYLQNLYVNQTDIYFCKIEVMYPPPYLDNEKSNGTIIHVKGKHLCPSPLFPGPSKPFWVLVVVGGVLACYSLLVTVAFIIFWVRSKRSRLLHSDYMNMTPRRPGPTRKHYQPYAPPRDFAAYRSKKVAKKPTNKAPHPKQEPQEINFPDDLPGSNTAAPVQETLHGCQPVTQEDGKESRISVQERQ

SEQ ID NO: 251 - protein, 532 aa, synthetic construct
  REGION 1..532: note = Synthetic polypeptide
MEAPAQLLFLLLLWLPDTTRQVQLQESGPGLVKPSETLSLTCTVSGGSVSSGSYYWSWIRQPPGKGLEWIGYIYYSGSTNYNPSLKSRVTISVDTSKNQFSLKLSSVTAADTAVYYCAREGKNGAFDIWGQGTMVTVSSGGGGSGGGGSGGGGSDIQMTQSPSSLSASVGDRVTITCRASQSISSYLNWYQQKPGKAPKLLIYAASSLQSGVPSGFSGSGSGTDFTLTISSLQPEDFATYYCQQSYSTPLTFGGGTKVEIKAAAGSGGSGILVKQSPMLVAYDNAVNLSCKYSYNLFSREFRASLHKGLDSAVEVCVVYGNYSQQLQVYSKTGFNCDGKLGNESVTFYLQNLYVNQTDIYFCKIEVMYPPPYLDNEKSNGTIIHVKGKHLCPSPLFPGPSKPFWVLVVVGGVLACYSLLVTVAFIIFWVRSKRSRLLHSDYMNMTPRRPGPTRKHYQPYAPPRDFAAYRSKKVAKKPTNKAPHPKQEPQEINFPDDLPGSNTAAPVQETLHGCQPVTQEDGKESRISVQERQ

SEQ ID NO: 252 - protein, 461 aa, synthetic construct
  REGION 1..461: note = Synthetic polypeptide
MGVLLTQRTLLSLVLALLFPSMASMQVQLQESGPGLVKPSETLSLTCTVSGGSVSSGSYYWSWIRQPPGKGLEWIGYIYYSGSTNYNPSLKSRVTISVDTSKNQFSLKLSSVTAADTAVYYCAREGKNGAFDIWGQGTMVTVSSGGGGSGGGGSGGGGSDIQMTQSPSSLSASVGDRVTITCRASQSISSYLNWYQQKPGKAPKLLIYAASSLQSGVPSGFSGSGSGTDFTLTISSLQPEDFATYYCQQSYSTPLTFGGGTKVEIKAAAGSGGSGFVPVFLPAKPTTTPAPRPPTPAPTIASQPLSLRPEACRPAAGGAVHTRGLDFACDIYIWAPLAGTCGVLLLSLVITLYCNHRNRSKRSRLLHSDYMNMTPRRPGPTRKHYQPYAPPRDFAAYRSKKVAKKPTNKAPHPKQEPQEINFPDDLPGSNTAAPVQETLHGCQPVTQEDGKESRISVQERQ

SEQ ID NO: 253 - protein, 457 aa, synthetic construct
  REGION 1..457: note = Synthetic polypeptide
MALPVTALLLPLALLLHAARPQVQLQESGPGLVKPSETLSLTCTVSGGSVSSGSYYWSWIRQPPGKGLEWIGYIYYSGSTNYNPSLKSRVTISVDTSKNQFSLKLSSVTAADTAVYYCAREGKNGAFDIWGQGTMVTVSSGGGGSGGGGSGGGGSDIQMTQSPSSLSASVGDRVTITCRASQSISSYLNWYQQKPGKAPKLLIYAASSLQSGVPSGFSGSGSGTDFTLTISSLQPEDFATYYCQQSYSTPLTFGGGTKVEIKAAAGSGGSGFVPVFLPAKPTTTPAPRPPTPAPTIASQPLSLRPEACRPAAGGAVHTRGLDFACDIYIWAPLAGTCGVLLLSLVITLYCNHRNRSKRSRLLHSDYMNMTPRRPGPTRKHYQPYAPPRDFAAYRSKKVAKKPTNKAPHPKQEPQEINFPDDLPGSNTAAPVQETLHGCQPVTQEDGKESRISVQERQ

SEQ ID NO: 254 - protein, 460 aa, synthetic construct
  REGION 1..460: note = Synthetic polypeptide
MSFPCKFVASFLLIFNVSSKGAVSQVQLQESGPGLVKPSETLSLTCTVSGGSVSSGSYYWSWIRQPPGKGLEWIGYIYYSGSTNYNPSLKSRVTISVDTSKNQFSLKLSSVTAADTAVYYCAREGKNGAFDIWGQGTMVTVSSGGGGSGGGGSGGGGSDIQMTQSPSSLSASVGDRVTITCRASQSISSYLNWYQQKPGKAPKLLIYAASSLQSGVPSGFSGSGSGTDFTLTISSLQPEDFATYYCQQSYSTPLTFGGGTKVEIKAAAGSGGSGFVPVFLPAKPTTTPAPRPPTPAPTIASQPLSLRPEACRPAAGGAVHTRGLDFACDIYIWAPLAGTCGVLLLSLVITLYCNHRNRSKRSRLLHSDYMNMTPRRPGPTRKHYQPYAPPRDFAAYRSKKVAKKPTNKAPHPKQEPQEINFPDDLPGSNTAAPVQETLHGCQPVTQEDGKESRISVQERQ

SEQ ID NO: 255 - protein, 456 aa, synthetic construct
  REGION 1..456: note = Synthetic polypeptide
MYRMQLLSCIALSLALVTNSQVQLQESGPGLVKPSETLSLTCTVSGGSVSSGSYYWSWIRQPPGKGLEWIGYIYYSGSTNYNPSLKSRVTISVDTSKNQFSLKLSSVTAADTAVYYCAREGKNGAFDIWGQGTMVTVSSGGGGSGGGGSGGGGSDIQMTQSPSSLSASVGDRVTITCRASQSISSYLNWYQQKPGKAPKLLIYAASSLQSGVPSGFSGSGSGTDFTLTISSLQPEDFATYYCQQSYSTPLTFGGGTKVEIKAAAGSGGSGFVPVFLPAKPTTTPAPRPPTPAPTIASQPLSLRPEACRPAAGGAVHTRGLDFACDIYIWAPLAGTCGVLLLSLVITLYCNHRNRSKRSRLLHSDYMNMTPRRPGPTRKHYQPYAPPRDFAAYRSKKVAKKPTNKAPHPKQEPQEINFPDDLPGSNTAAPVQETLHGCQPVTQEDGKESRISVQERQ

SEQ ID NO: 256 - protein, 453 aa, synthetic construct
  REGION 1..453: note = Synthetic polypeptide
MWLQSLLLLGTVACSISQVQLQESGPGLVKPSETLSLTCTVSGGSVSSGSYYWSWIRQPPGKGLEWIGYIYYSGSTNYNPSLKSRVTISVDTSKNQFSLKLSSVTAADTAVYYCAREGKNGAFDIWGQGTMVTVSSGGGGSGGGGSGGGGSDIQMTQSPSSLSASVGDRVTITCRASQSISSYLNWYQQKPGKAPKLLIYAASSLQSGVPSGFSGSGSGTDFTLTISSLQPEDFATYYCQQSYSTPLTFGGGTKVEIKAAAGSGGSGFVPVFLPAKPTTTPAPRPPTPAPTIASQPLSLRPEACRPAAGGAVHTRGLDFACDIYIWAPLAGTCGVLLLSLVITLYCNHRNRSKRSRLLHSDYMNMTPRRPGPTRKHYQPYAPPRDFAAYRSKKVAKKPTNKAPHPKQEPQEINFPDDLPGSNTAAPVQETLHGCQPVTQEDGKESRISVQERQ

SEQ ID NO: 257 - protein, 456 aa, synthetic construct
  REGION 1..456: note = Synthetic polypeptide
MEAPAQLLFLLLLWLPDTTRQVQLQESGPGLVKPSETLSLTCTVSGGSVSSGSYYWSWIRQPPGKGLEWIGYIYYSGSTNYNPSLKSRVTISVDTSKNQFSLKLSSVTAADTAVYYCAREGKNGAFDIWGQGTMVTVSSGGGGSGGGGSGGGGSDIQMTQSPSSLSASVGDRVTITCRASQSISSYLNWYQQKPGKAPKLLIYAASSLQSGVPSGFSGSGSGTDFTLTISSLQPEDFATYYCQQSYSTPLTFGGGTKVEIKAAAGSGGSGFVPVFLPAKPTTTPAPRPPTPAPTIASQPLSLRPEACRPAAGGAVHTRGLDFACDIYIWAPLAGTCGVLLLSLVITLYCNHRNRSKRSRLLHSDYMNMTPRRPGPTRKHYQPYAPPRDFAAYRSKKVAKKPTNKAPHPKQEPQEINFPDDLPGSNTAAPVQETLHGCQPVTQEDGKESRISVQERQ

SEQ ID NO: 258 - protein, 405 aa, synthetic construct
  REGION 1..405: note = Synthetic polypeptide
MGVLLTQRTLLSLVLALLFPSMASMQVQLQESGPGLVKPSETLSLTCTVSGGSVSSGSYYWSWIRQPPGKGLEWIGYIYYSGSTNYNPSLKSRVTISVDTSKNQFSLKLSSVTAADTAVYYCAREGKNGAFDIWGQGTMVTVSSGGGGSGGGGSGGGGSDIQMTQSPSSLSASVGDRVTITCRASQSISSYLNWYQQKPGKAPKLLIYAASSLQSGVPSGFSGSGSGTDFTLTISSLQPEDFATYYCQQSYSTPLTFGGGTKVEIKAAAGSGGSGFWVLVVVGGVLACYSLLVTVAFIIFWVRSKRSRLLHSDYMNMTPRRPGPTRKHYQPYAPPRDFAAYRSKKVAKKPTNKAPHPKQEPQEINFPDDLPGSNTAAPVQETLHGCQPVTQEDGKESRISVQERQ

SEQ ID NO: 259 - protein, 401 aa, synthetic construct
  REGION 1..401: note = Synthetic polypeptide
MALPVTALLLPLALLLHAARPQVQLQESGPGLVKPSETLSLTCTVSGGSVSSGSYYWSWIRQPPGKGLEWIGYIYYSGSTNYNPSLKSRVTISVDTSKNQFSLKLSSVTAADTAVYYCAREGKNGAFDIWGQGTMVTVSSGGGGSGGGGSGGGGSDIQMTQSPSSLSASVGDRVTITCRASQSISSYLNWYQQKPGKAPKLLIYAASSLQSGVPSGFSGSGSGTDFTLTISSLQPEDFATYYCQQSYSTPLTFGGGTKVEIKAAAGSGGSGFWVLVVVGGVLACYSLLVTVAFIIFWVRSKRSRLLHSDYMNMTPRRPGPTRKHYQPYAPPRDFAAYRSKKVAKKPTNKAPHPKQEPQEINFPDDLPGSNTAAPVQETLHGCQPVTQEDGKESRISVQERQ

SEQ ID NO: 260 - protein, 404 aa, synthetic construct
  REGION 1..404: note = Synthetic polypeptide
MSFPCKFVASFLLIFNVSSKGAVSQVQLQESGPGLVKPSETLSLTCTVSGGSVSSGSYYWSWIRQPPGKGLEWIGYIYYSGSTNYNPSLKSRVTISVDTSKNQFSLKLSSVTAADTAVYYCAREGKNGAFDIWGQGTMVTVSSGGGGSGGGGSGGGGSDIQMTQSPSSLSASVGDRVTITCRASQSISSYLNWYQQKPGKAPKLLIYAASSLQSGVPSGFSGSGSGTDFTLTISSLQPEDFATYYCQQSYSTPLTFGGGTKVEIKAAAGSGGSGFWVLVVVGGVLACYSLLVTVAFIIFWVRSKRSRLLHSDYMNMTPRRPGPTRKHYQPYAPPRDFAAYRSKKVAKKPTNKAPHPKQEPQEINFPDDLPGSNTAAPVQETLHGCQPVTQEDGKESRISVQERQ

SEQ ID NO: 261 - protein, 400 aa, synthetic construct
  REGION 1..400: note = Synthetic polypeptide
MYRMQLLSCIALSLALVTNSQVQLQESGPGLVKPSETLSLTCTVSGGSVSSGSYYWSWIRQPPGKGLEWIGYIYYSGSTNYNPSLKSRVTISVDTSKNQFSLKLSSVTAADTAVYYCAREGKNGAFDIWGQGTMVTVSSGGGGSGGGGSGGGGSDIQMTQSPSSLSASVGDRVTITCRASQSISSYLNWYQQKPGKAPKLLIYAASSLQSGVPSGFSGSGSGTDFTLTISSLQPEDFATYYCQQSYSTPLTFGGGTKVEIKAAAGSGGSGFWVLVVVGGVLACYSLLVTVAFIIFWVRSKRSRLLHSDYMNMTPRRPGPTRKHYQPYAPPRDFAAYRSKKVAKKPTNKAPHPKQEPQEINFPDDLPGSNTAAPVQETLHGCQPVTQEDGKESRISVQERQ

SEQ ID NO: 262 - protein, 397 aa, synthetic construct
  REGION 1..397: note = Synthetic polypeptide
MWLQSLLLLGTVACSISQVQLQESGPGLVKPSETLSLTCTVSGGSVSSGSYYWSWIRQPPGKGLEWIGYIYYSGSTNYNPSLKSRVTISVDTSKNQFSLKLSSVTAADTAVYYCAREGKNGAFDIWGQGTMVTVSSGGGGSGGGGSGGGGSDIQMTQSPSSLSASVGDRVTITCRASQSISSYLNWYQQKPGKAPKLLIYAASSLQSGVPSGFSGSGSGTDFTLTISSLQPEDFATYYCQQSYSTPLTFGGGTKVEIKAAAGSGGSGFWVLVVVGGVLACYSLLVTVAFIIFWVRSKRSRLLHSDYMNMTPRRPGPTRKHYQPYAPPRDFAAYRSKKVAKKPTNKAPHPKQEPQEINFPDDLPGSNTAAPVQETLHGCQPVTQEDGKESRISVQERQ

SEQ ID NO: 263 - protein, 400 aa, synthetic construct
  REGION 1..400: note = Synthetic polypeptide
MEAPAQLLFLLLLWLPDTTRQVQLQESGPGLVKPSETLSLTCTVSGGSVSSGSYYWSWIRQPPGKGLEWIGYIYYSGSTNYNPSLKSRVTISVDTSKNQFSLKLSSVTAADTAVYYCAREGKNGAFDIWGQGTMVTVSSGGGGSGGGGSGGGGSDIQMTQSPSSLSASVGDRVTITCRASQSISSYLNWYQQKPGKAPKLLIYAASSLQSGVPSGFSGSGSGTDFTLTISSLQPEDFATYYCQQSYSTPLTFGGGTKVEIKAAAGSGGSGFWVLVVVGGVLACYSLLVTVAFIIFWVRSKRSRLLHSDYMNMTPRRPGPTRKHYQPYAPPRDFAAYRSKKVAKKPTNKAPHPKQEPQEINFPDDLPGSNTAAPVQETLHGCQPVTQEDGKESRISVQERQ

SEQ ID NO: 264 - protein, 545 aa, synthetic construct
  REGION 1..545: note = Synthetic polypeptide
MGVLLTQRTLLSLVLALLFPSMASMEVQLVESGGGLVQPGGSLRLSCAASGFDLGFYFYACWVRQAPGKGLEWVSCIYTAGSGSTYYASWAKGRFTISRDNSKNTLYLQMNSLRAEDTAVYYCARSTANTRSTYYLNLWGQGTLVTVSSGGGGSGGGGSGGGGSDIQMTQSPSSLSASVGDRVTITCQASQRISSYLSWYQQKPGKVPKLLIYGASTLASGVPSRFSGSGSGTDFTLTISSLQPEDVATYYCQSYAYFDSNNWHAFGGGTKVEIAAAGSGGSGILVKQSPMLVAYDNAVNLSCKYSYNLFSREFRASLHKGLDSAVEVCVVYGNYSQQLQVYSKTGFNCDGKLGNESVTFYLQNLYVNQTDIYFCKIEVMYPPPYLDNEKSNGTIIHVKGKHLCPSPLFPGPSKPFWVLVVVGGVLACYSLLVTVAFIIFWVRSKRSRLLHSDYMNMTPRRPGPTRKHYQPYAPPRDFAAYRSKKVAKKPTNKAPHPKQEPQEINFPDDLPGSNTAAPVQETLHGCQPVTQEDGKESRISVQERQ

SEQ ID NO: 265 - protein, 541 aa, synthetic construct
  REGION 1..541: note = Synthetic polypeptide
MALPVTALLLPLALLLHAARPEVQLVESGGGLVQPGGSLRLSCAASGFDLGFYFYACWVRQAPGKGLEWVSCIYTAGSGSTYYASWAKGRFTISRDNSKNTLYLQMNSLRAEDTAVYYCARSTANTRSTYYLNLWGQGTLVTVSSGGGGSGGGGSGGGGSDIQMTQSPSSLSASVGDRVTITCQASQRISSYLSWYQQKPGKVPKLLIYGASTLASGVPSRFSGSGSGTDFTLTISSLQPEDVATYYCQSYAYFDSNNWHAFGGGTKVEIAAAGSGGSGILVKQSPMLVAYDNAVNLSCKYSYNLFSREFRASLHKGLDSAVEVCVVYGNYSQQLQVYSKTGFNCDGKLGNESVTFYLQNLYVNQTDIYFCKIEVMYPPPYLDNEKSNGTIIHVKGKHLCPSPLFPGPSKPFWVLVVVGGVLACYSLLVTVAFIIFWVRSKRSRLLHSDYMNMTPRRPGPTRKHYQPYAPPRDFAAYRSKKVAKKPTNKAPHPKQEPQEINFPDDLPGSNTAAPVQETLHGCQPVTQEDGKESRISVQERQ

SEQ ID NO: 266 - protein, 544 aa, synthetic construct
  REGION 1..544: note = Synthetic polypeptide
MSFPCKFVASFLLIFNVSSKGAVSEVQLVESGGGLVQPGGSLRLSCAASGFDLGFYFYACWVRQAPGKGLEWVSCIYTAGSGSTYYASWAKGRFTISRDNSKNTLYLQMNSLRAEDTAVYYCARSTANTRSTYYLNLWGQGTLVTVSSGGGGSGGGGSGGGGSDIQMTQSPSSLSASVGDRVTITCQASQRISSYLSWYQQKPGKVPKLLIYGASTLASGVPSRFSGSGSGTDFTLTISSLQPEDVATYYCQSYAYFDSNNWHAFGGGTKVEIAAAGSGGSGILVKQSPMLVAYDNAVNLSCKYSYNLFSREFRASLHKGLDSAVEVCVVYGNYSQQLQVYSKTGFNCDGKLGNESVTFYLQNLYVNQTDIYFCKIEVMYPPPYLDNEKSNGTIIHVKGKHLCPSPLFPGPSKPFWVLVVVGGVLACYSLLVTVAFIIFWVRSKRSRLLHSDYMNMTPRRPGPTRKHYQPYAPPRDFAAYRSKKVAKKPTNKAPHPKQEPQEINFPDDLPGSNTAAPVQETLHGCQPVTQEDGKESRISVQERQ

SEQ ID NO: 267 - protein, 540 aa, synthetic construct
  REGION 1..540: note = Synthetic polypeptide
MYRMQLLSCIALSLALVTNSEVQLVESGGGLVQPGGSLRLSCAASGFDLGFYFYACWVRQAPGKGLEWVSCIYTAGSGSTYYASWAKGRFTISRDNSKNTLYLQMNSLRAEDTAVYYCARSTANTRSTYYLNLWGQGTLVTVSSGGGGSGGGGSGGGGSDIQMTQSPSSLSASVGDRVTITCQASQRISSYLSWYQQKPGKVPKLLIYGASTLASGVPSRFSGSGSGTDFTLTISSLQPEDVATYYCQSYAYFDSNNWHAFGGGTKVEIAAAGSGGSGILVKQSPMLVAYDNAVNLSCKYSYNLFSREFRASLHKGLDSAVEVCVVYGNYSQQLQVYSKTGFNCDGKLGNESVTFYLQNLYVNQTDIYFCKIEVMYPPPYLDNEKSNGTIIHVKGKHLCPSPLFPGPSKPFWVLVVVGGVLACYSLLVTVAFIIFWVRSKRSRLLHSDYMNMTPRRPGPTRKHYQPYAPPRDFAAYRSKKVAKKPTNKAPHPKQEPQEINFPDDLPGSNTAAPVQETLHGCQPVTQEDGKESRISVQERQ

SEQ ID NO: 268 - protein, 537 aa, synthetic construct
  REGION 1..537: note = Synthetic polypeptide
MWLQSLLLLGTVACSISEVQLVESGGGLVQPGGSLRLSCAASGFDLGFYFYACWVRQAPGKGLEWVSCIYTAGSGSTYYASWAKGRFTISRDNSKNTLYLQMNSLRAEDTAVYYCARSTANTRSTYYLNLWGQGTLVTVSSGGGGSGGGGSGGGGSDIQMTQSPSSLSASVGDRVTITCQASQRISSYLSWYQQKPGKVPKLLIYGASTLASGVPSRFSGSGSGTDFTLTISSLQPEDVATYYCQSYAYFDSNNWHAFGGGTKVEIAAAGSGGSGILVKQSPMLVAYDNAVNLSCKYSYNLFSREFRASLHKGLDSAVEVCVVYGNYSQQLQVYSKTGFNCDGKLGNESVTFYLQNLYVNQTDIYFCKIEVMYPPPYLDNEKSNGTIIHVKGKHLCPSPLFPGPSKPFWVLVVVGGVLACYSLLVTVAFIIFWVRSKRSRLLHSDYMNMTPRRPGPTRKHYQPYAPPRDFAAYRSKKVAKKPTNKAPHPKQEPQEINFPDDLPGSNTAAPVQETLHGCQPVTQEDGKESRISVQERQ

SEQ ID NO: 269 - protein, 540 aa, synthetic construct
  REGION 1..540: note = Synthetic polypeptide
MEAPAQLLFLLLLWLPDTTREVQLVESGGGLVQPGGSLRLSCAASGFDLGFYFYACWVRQAPGKGLEWVSCIYTAGSGSTYYASWAKGRFTISRDNSKNTLYLQMNSLRAEDTAVYYCARSTANTRSTYYLNLWGQGTLVTVSSGGGGSGGGGSGGGGSDIQMTQSPSSLSASVGDRVTITCQASQRISSYLSWYQQKPGKVPKLLIYGASTLASGVPSRFSGSGSGTDFTLTISSLQPEDVATYYCQSYAYFDSNNWHAFGGGTKVEIAAAGSGGSGILVKQSPMLVAYDNAVNLSCKYSYNLFSREFRASLHKGLDSAVEVCVVYGNYSQQLQVYSKTGFNCDGKLGNESVTFYLQNLYVNQTDIYFCKIEVMYPPPYLDNEKSNGTIIHVKGKHLCPSPLFPGPSKPFWVLVVVGGVLACYSLLVTVAFIIFWVRSKRSRLLHSDYMNMTPRRPGPTRKHYQPYAPPRDFAAYRSKKVAKKPTNKAPHPKQEPQEINFPDDLPGSNTAAPVQETLHGCQPVTQEDGKESRISVQERQ

SEQ ID NO: 270 - protein, 469 aa, synthetic construct
  REGION 1..469: note = Synthetic polypeptide
MGVLLTQRTLLSLVLALLFPSMASMEVQLVESGGGLVQPGGSLRLSCAASGFDLGFYFYACWVRQAPGKGLEWVSCIYTAGSGSTYYASWAKGRFTISRDNSKNTLYLQMNSLRAEDTAVYYCARSTANTRSTYYLNLWGQGTLVTVSSGGGGSGGGGSGGGGSDIQMTQSPSSLSASVGDRVTITCQASQRISSYLSWYQQKPGKVPKLLIYGASTLASGVPSRFSGSGSGTDFTLTISSLQPEDVATYYCQSYAYFDSNNWHAFGGGTKVEIAAAGSGGSGFVPVFLPAKPTTTPAPRPPTPAPTIASQPLSLRPEACRPAAGGAVHTRGLDFACDIYIWAPLAGTCGVLLLSLVITLYCNHRNRSKRSRLLHSDYMNMTPRRPGPTRKHYQPYAPPRDFAAYRSKKVAKKPTNKAPHPKQEPQEINFPDDLPGSNTAAPVQETLHGCQPVTQEDGKESRISVQERQ

SEQ ID NO: 271 - protein, 465 aa, synthetic construct
  REGION 1..465: note = Synthetic polypeptide
MALPVTALLLPLALLLHAARPEVQLVESGGGLVQPGGSLRLSCAASGFDLGFYFYACWVRQAPGKGLEWVSCIYTAGSGSTYYASWAKGRFTISRDNSKNTLYLQMNSLRAEDTAVYYCARSTANTRSTYYLNLWGQGTLVTVSSGGGGSGGGGSGGGGSDIQMTQSPSSLSASVGDRVTITCQASQRISSYLSWYQQKPGKVPKLLIYGASTLASGVPSRFSGSGSGTDFTLTISSLQPEDVATYYCQSYAYFDSNNWHAFGGGTKVEIAAAGSGGSGFVPVFLPAKPTTTPAPRPPTPAPTIASQPLSLRPEACRPAAGGAVHTRGLDFACDIYIWAPLAGTCGVLLLSLVITLYCNHRNRSKRSRLLHSDYMNMTPRRPGPTRKHYQPYAPPRDFAAYRSKKVAKKPTNKAPHPKQEPQEINFPDDLPGSNTAAPVQETLHGCQPVTQEDGKESRISVQERQ

SEQ ID NO: 272 - protein, 468 aa, synthetic construct
  REGION 1..468: note = Synthetic polypeptide
MSFPCKFVASFLLIFNVSSKGAVSEVQLVESGGGLVQPGGSLRLSCAASGFDLGFYFYACWVRQAPGKGLEWVSCIYTAGSGSTYYASWAKGRFTISRDNSKNTLYLQMNSLRAEDTAVYYCARSTANTRSTYYLNLWGQGTLVTVSSGGGGSGGGGSGGGGSDIQMTQSPSSLSASVGDRVTITCQASQRISSYLSWYQQKPGKVPKLLIYGASTLASGVPSRFSGSGSGTDFTLTISSLQPEDVATYYCQSYAYFDSNNWHAFGGGTKVEIAAAGSGGSGFVPVFLPAKPTTTPAPRPPTPAPTIASQPLSLRPEACRPAAGGAVHTRGLDFACDIYIWAPLAGTCGVLLLSLVITLYCNHRNRSKRSRLLHSDYMNMTPRRPGPTRKHYQPYAPPRDFAAYRSKKVAKKPTNKAPHPKQEPQEINFPDDLPGSNTAAPVQETLHGCQPVTQEDGKESRISVQERQ

SEQ ID NO: 273 - protein, 464 aa, synthetic construct
  REGION 1..464: note = Synthetic polypeptide
MYRMQLLSCIALSLALVTNSEVQLVESGGGLVQPGGSLRLSCAASGFDLGFYFYACWVRQAPGKGLEWVSCIYTAGSGSTYYASWAKGRFTISRDNSKNTLYLQMNSLRAEDTAVYYCARSTANTRSTYYLNLWGQGTLVTVSSGGGGSGGGGSGGGGSDIQMTQSPSSLSASVGDRVTITCQASQRISSYLSWYQQKPGKVPKLLIYGASTLASGVPSRFSGSGSGTDFTLTISSLQPEDVATYYCQSYAYFDSNNWHAFGGGTKVEIAAAGSGGSGFVPVFLPAKPTTTPAPRPPTPAPTIASQPLSLRPEACRPAAGGAVHTRGLDFACDIYIWAPLAGTCGVLLLSLVITLYCNHRNRSKRSRLLHSDYMNMTPRRPGPTRKHYQPYAPPRDFAAYRSKKVAKKPTNKAPHPKQEPQEINFPDDLPGSNTAAPVQETLHGCQPVTQEDGKESRISVQERQ

SEQ ID NO: 274 - protein, 461 aa, synthetic construct
  REGION 1..461: note = Synthetic polypeptide
MWLQSLLLLGTVACSISEVQLVESGGGLVQPGGSLRLSCAASGFDLGFYFYACWVRQAPGKGLEWVSCIYTAGSGSTYYASWAKGRFTISRDNSKNTLYLQMNSLRAEDTAVYYCARSTANTRSTYYLNLWGQGTLVTVSSGGGGSGGGGSGGGGSDIQMTQSPSSLSASVGDRVTITCQASQRISSYLSWYQQKPGKVPKLLIYGASTLASGVPSRFSGSGSGTDFTLTISSLQPEDVATYYCQSYAYFDSNNWHAFGGGTKVEIAAAGSGGSGFVPVFLPAKPTTTPAPRPPTPAPTIASQPLSLRPEACRPAAGGAVHTRGLDFACDIYIWAPLAGTCGVLLLSLVITLYCNHRNRSKRSRLLHSDYMNMTPRRPGPTRKHYQPYAPPRDFAAYRSKKVAKKPTNKAPHPKQEPQEINFPDDLPGSNTAAPVQETLHGCQPVTQEDGKESRISVQERQ

SEQ ID NO: 275 - protein, 464 aa, synthetic construct
  REGION 1..464: note = Synthetic polypeptide
MEAPAQLLFLLLLWLPDTTREVQLVESGGGLVQPGGSLRLSCAASGFDLGFYFYACWVRQAPGKGLEWVSCIYTAGSGSTYYASWAKGRFTISRDNSKNTLYLQMNSLRAEDTAVYYCARSTANTRSTYYLNLWGQGTLVTVSSGGGGSGGGGSGGGGSDIQMTQSPSSLSASVGDRVTITCQASQRISSYLSWYQQKPGKVPKLLIYGASTLASGVPSRFSGSGSGTDFTLTISSLQPEDVATYYCQSYAYFDSNNWHAFGGGTKVEIAAAGSGGSGFVPVFLPAKPTTTPAPRPPTPAPTIASQPLSLRPEACRPAAGGAVHTRGLDFACDIYIWAPLAGTCGVLLLSLVITLYCNHRNRSKRSRLLHSDYMNMTPRRPGPTRKHYQPYAPPRDFAAYRSKKVAKKPTNKAPHPKQEPQEINFPDDLPGSNTAAPVQETLHGCQPVTQEDGKESRISVQERQ

SEQ ID NO: 276 - protein, 413 aa, synthetic construct
  REGION 1..413: note = Synthetic polypeptide
MGVLLTQRTLLSLVLALLFPSMASMEVQLVESGGGLVQPGGSLRLSCAASGFDLGFYFYACWVRQAPGKGLEWVSCIYTAGSGSTYYASWAKGRFTISRDNSKNTLYLQMNSLRAEDTAVYYCARSTANTRSTYYLNLWGQGTLVTVSSGGGGSGGGGSGGGGSDIQMTQSPSSLSASVGDRVTITCQASQRISSYLSWYQQKPGKVPKLLIYGASTLASGVPSRFSGSGSGTDFTLTISSLQPEDVATYYCQSYAYFDSNNWHAFGGGTKVEIAAAGSGGSGFWVLVVVGGVLACYSLLVTVAFIIFWVRSKRSRLLHSDYMNMTPRRPGPTRKHYQPYAPPRDFAAYRSKKVAKKPTNKAPHPKQEPQEINFPDDLPGSNTAAPVQETLHGCQPVTQEDGKESRISVQERQ

SEQ ID NO: 277 - protein, 409 aa, synthetic construct
  REGION 1..409: note = Synthetic polypeptide
MALPVTALLLPLALLLHAARPEVQLVESGGGLVQPGGSLRLSCAASGFDLGFYFYACWVRQAPGKGLEWVSCIYTAGSGSTYYASWAKGRFTISRDNSKNTLYLQMNSLRAEDTAVYYCARSTANTRSTYYLNLWGQGTLVTVSSGGGGSGGGGSGGGGSDIQMTQSPSSLSASVGDRVTITCQASQRISSYLSWYQQKPGKVPKLLIYGASTLASGVPSRFSGSGSGTDFTLTISSLQPEDVATYYCQSYAYFDSNNWHAFGGGTKVEIAAAGSGGSGFWVLVVVGGVLACYSLLVTVAFIIFWVRSKRSRLLHSDYMNMTPRRPGPTRKHYQPYAPPRDFAAYRSKKVAKKPTNKAPHPKQEPQEINFPDDLPGSNTAAPVQETLHGCQPVTQEDGKESRISVQERQ

SEQ ID NO: 278 - protein, 412 aa, synthetic construct
  REGION 1..412: note = Synthetic polypeptide
MSFPCKFVASFLLIFNVSSKGAVSEVQLVESGGGLVQPGGSLRLSCAASGFDLGFYFYACWVRQAPGKGLEWVSCIYTAGSGSTYYASWAKGRFTISRDNSKNTLYLQMNSLRAEDTAVYYCARSTANTRSTYYLNLWGQGTLVTVSSGGGGSGGGGSGGGGSDIQMTQSPSSLSASVGDRVTITCQASQRISSYLSWYQQKPGKVPKLLIYGASTLASGVPSRFSGSGSGTDFTLTISSLQPEDVATYYCQSYAYFDSNNWHAFGGGTKVEIAAAGSGGSGFWVLVVVGGVLACYSLLVTVAFIIFWVRSKRSRLLHSDYMNMTPRRPGPTRKHYQPYAPPRDFAAYRSKKVAKKPTNKAPHPKQEPQEINFPDDLPGSNTAAPVQETLHGCQPVTQEDGKESRISVQERQ

SEQ ID NO: 279 - protein, 408 aa, synthetic construct
  REGION 1..408: note = Synthetic polypeptide
MYRMQLLSCIALSLALVTNSEVQLVESGGGLVQPGGSLRLSCAASGFDLGFYFYACWVRQAPGKGLEWVSCIYTAGSGSTYYASWAKGRFTISRDNSKNTLYLQMNSLRAEDTAVYYCARSTANTRSTYYLNLWGQGTLVTVSSGGGGSGGGGSGGGGSDIQMTQSPSSLSASVGDRVTITCQASQRISSYLSWYQQKPGKVPKLLIYGASTLASGVPSRFSGSGSGTDFTLTISSLQPEDVATYYCQSYAYFDSNNWHAFGGGTKVEIAAAGSGGSGFWVLVVVGGVLACYSLLVTVAFIIFWVRSKRSRLLHSDYMNMTPRRPGPTRKHYQPYAPPRDFAAYRSKKVAKKPTNKAPHPKQEPQEINFPDDLPGSNTAAPVQETLHGCQPVTQEDGKESRISVQERQ

SEQ ID NO: 280 - protein, 405 aa, synthetic construct
  REGION 1..405: note = Synthetic polypeptide
MWLQSLLLLGTVACSISEVQLVESGGGLVQPGGSLRLSCAASGFDLGFYFYACWVRQAPGKGLEWVSCIYTAGSGSTYYASWAKGRFTISRDNSKNTLYLQMNSLRAEDTAVYYCARSTANTRSTYYLNLWGQGTLVTVSSGGGGSGGGGSGGGGSDIQMTQSPSSLSASVGDRVTITCQASQRISSYLSWYQQKPGKVPKLLIYGASTLASGVPSRFSGSGSGTDFTLTISSLQPEDVATYYCQSYAYFDSNNWHAFGGGTKVEIAAAGSGGSGFWVLVVVGGVLACYSLLVTVAFIIFWVRSKRSRLLHSDYMNMTPRRPGPTRKHYQPYAPPRDFAAYRSKKVAKKPTNKAPHPKQEPQEINFPDDLPGSNTAAPVQETLHGCQPVTQEDGKESRISVQERQ

SEQ ID NO: 281 - protein, 408 aa, synthetic construct
  REGION 1..408: note = Synthetic polypeptide
MEAPAQLLFLLLLWLPDTTREVQLVESGGGLVQPGGSLRLSCAASGFDLGFYFYACWVRQAPGKGLEWVSCIYTAGSGSTYYASWAKGRFTISRDNSKNTLYLQMNSLRAEDTAVYYCARSTANTRSTYYLNLWGQGTLVTVSSGGGGSGGGGSGGGGSDIQMTQSPSSLSASVGDRVTITCQASQRISSYLSWYQQKPGKVPKLLIYGASTLASGVPSRFSGSGSGTDFTLTISSLQPEDVATYYCQSYAYFDSNNWHAFGGGTKVEIAAAGSGGSGFWVLVVVGGVLACYSLLVTVAFIIFWVRSKRSRLLHSDYMNMTPRRPGPTRKHYQPYAPPRDFAAYRSKKVAKKPTNKAPHPKQEPQEINFPDDLPGSNTAAPVQETLHGCQPVTQEDGKESRISVQERQ

SEQ ID NO: 282 - protein, 550 aa, synthetic construct
  REGION 1..550: note = Synthetic polypeptide
MGVLLTQRTLLSLVLALLFPSMASMQVQLQQSGPGLVTPSQTLSLTCAISGDSVSSNSATWNWIRQSPSRGLEWLGRTYYRSKWYNDYAVSVKSRMSINPDTSKNQFSLQLNSVTPEDTAVYYCARGMMTYYYGMDVWGQGTTVTVSSGGGGSGGGGSGGGGSQPVLTQSSSLSASPGASASLTCTLRSGINVGPYRIYWYQQKPGSPPQYLLNYKSDSDKQQGSGVPSRFSGSKDASANAGVLLISGLRSEDEADYYCMIWHSSAAVFGGGTQLTVLSAAAGSGGSGILVKQSPMLVAYDNAVNLSCKYSYNLFSREFRASLHKGLDSAVEVCVVYGNYSQQLQVYSKTGFNCDGKLGNESVTFYLQNLYVNQTDIYFCKIEVMYPPPYLDNEKSNGTIIHVKGKHLCPSPLFPGPSKPFWVLVVVGGVLACYSLLVTVAFIIFWVRSKRSRLLHSDYMNMTPRRPGPTRKHYQPYAPPRDFAAYRSKKVAKKPTNKAPHPKQEPQEINFPDDLPGSNTAAPVQETLHGCQPVTQEDGKESRISVQERQ

SEQ ID NO: 283 - protein, 546 aa, synthetic construct
  REGION 1..546: note = Synthetic polypeptide
MALPVTALLLPLALLLHAARPQVQLQQSGPGLVTPSQTLSLTCAISGDSVSSNSATWNWIRQSPSRGLEWLGRTYYRSKWYNDYAVSVKSRMSINPDTSKNQFSLQLNSVTPEDTAVYYCARGMMTYYYGMDVWGQGTTVTVSSGGGGSGGGGSGGGGSQPVLTQSSSLSASPGASASLTCTLRSGINVGPYRIYWYQQKPGSPPQYLLNYKSDSDKQQGSGVPSRFSGSKDASANAGVLLISGLRSEDEADYYCMIWHSSAAVFGGGTQLTVLSAAAGSGGSGILVKQSPMLVAYDNAVNLSCKYSYNLFSREFRASLHKGLDSAVEVCVVYGNYSQQLQVYSKTGFNCDGKLGNESVTFYLQNLYVNQTDIYFCKIEVMYPPPYLDNEKSNGTIIHVKGKHLCPSPLFPGPSKPFWVLVVVGGVLACYSLLVTVAFIIFWVRSKRSRLLHSDYMNMTPRRPGPTRKHYQPYAPPRDFAAYRSKKVAKKPTNKAPHPKQEPQEINFPDDLPGSNTAAPVQETLHGCQPVTQEDGKESRISVQERQ

SEQ ID NO: 284 - protein, 549 aa, synthetic construct
  REGION 1..549: note = Synthetic polypeptide
MSFPCKFVASFLLIFNVSSKGAVSQVQLQQSGPGLVTPSQTLSLTCAISGDSVSSNSATWNWIRQSPSRGLEWLGRTYYRSKWYNDYAVSVKSRMSINPDTSKNQFSLQLNSVTPEDTAVYYCARGMMTYYYGMDVWGQGTTVTVSSGGGGSGGGGSGGGGSQPVLTQSSSLSASPGASASLTCTLRSGINVGPYRIYWYQQKPGSPPQYLLNYKSDSDKQQGSGVPSRFSGSKDASANAGVLLISGLRSEDEADYYCMIWHSSAAVFGGGTQLTVLSAAAGSGGSGILVKQSPMLVAYDNAVNLSCKYSYNLFSREFRASLHKGLDSAVEVCVVYGNYSQQLQVYSKTGFNCDGKLGNESVTFYLQNLYVNQTDIYFCKIEVMYPPPYLDNEKSNGTIIHVKGKHLCPSPLFPGPSKPFWVLVVVGGVLACYSLLVTVAFIIFWVRSKRSRLLHSDYMNMTPRRPGPTRKHYQPYAPPRDFAAYRSKKVAKKPTNKAPHPKQEPQEINFPDDLPGSNTAAPVQETLHGCQPVTQEDGKESRISVQERQ

SEQ ID NO: 285 - protein, 545 aa, synthetic construct
  REGION 1..545: note = Synthetic polypeptide
MYRMQLLSCIALSLALVTNSQVQLQQSGPGLVTPSQTLSLTCAISGDSVSSNSATWNWIRQSPSRGLEWLGRTYYRSKWYNDYAVSVKSRMSINPDTSKNQFSLQLNSVTPEDTAVYYCARGMMTYYYGMDVWGQGTTVTVSSGGGGSGGGGSGGGGSQPVLTQSSSLSASPGASASLTCTLRSGINVGPYRIYWYQQKPGSPPQYLLNYKSDSDKQQGSGVPSRFSGSKDASANAGVLLISGLRSEDEADYYCMIWHSSAAVFGGGTQLTVLSAAAGSGGSGILVKQSPMLVAYDNAVNLSCKYSYNLFSREFRASLHKGLDSAVEVCVVYGNYSQQLQVYSKTGFNCDGKLGNESVTFYLQNLYVNQTDIYFCKIEVMYPPPYLDNEKSNGTIIHVKGKHLCPSPLFPGPSKPFWVLVVVGGVLACYSLLVTVAFIIFWVRSKRSRLLHSDYMNMTPRRPGPTRKHYQPYAPPRDFAAYRSKKVAKKPTNKAPHPKQEPQEINFPDDLPGSNTAAPVQETLHGCQPVTQEDGKESRISVQERQ

SEQ ID NO: 286 - protein, 542 aa, synthetic construct
  REGION 1..542: note = Synthetic polypeptide
MWLQSLLLLGTVACSISQVQLQQSGPGLVTPSQTLSLTCAISGDSVSSNSATWNWIRQSPSRGLEWLGRTYYRSKWYNDYAVSVKSRMSINPDTSKNQFSLQLNSVTPEDTAVYYCARGMMTYYYGMDVWGQGTTVTVSSGGGGSGGGGSGGGGSQPVLTQSSSLSASPGASASLTCTLRSGINVGPYRIYWYQQKPGSPPQYLLNYKSDSDKQQGSGVPSRFSGSKDASANAGVLLISGLRSEDEADYYCMIWHSSAAVFGGGTQLTVLSAAAGSGGSGILVKQSPMLVAYDNAVNLSCKYSYNLFSREFRASLHKGLDSAVEVCVVYGNYSQQLQVYSKTGFNCDGKLGNESVTFYLQNLYVNQTDIYFCKIEVMYPPPYLDNEKSNGTIIHVKGKHLCPSPLFPGPSKPFWVLVVVGGVLACYSLLVTVAFIIFWVRSKRSRLLHSDYMNMTPRRPGPTRKHYQPYAPPRDFAAYRSKKVAKKPTNKAPHPKQEPQEINFPDDLPGSNTAAPVQETLHGCQPVTQEDGKESRISVQERQ

SEQ ID NO: 287 - protein, 545 aa, synthetic construct
  REGION 1..545: note = Synthetic polypeptide
MEAPAQLLFLLLLWLPDTTRQVQLQQSGPGLVTPSQTLSLTCAISGDSVSSNSATWNWIRQSPSRGLEWLGRTYYRSKWYNDYAVSVKSRMSINPDTSKNQFSLQLNSVTPEDTAVYYCARGMMTYYYGMDVWGQGTTVTVSSGGGGSGGGGSGGGGSQPVLTQSSSLSASPGASASLTCTLRSGINVGPYRIYWYQQKPGSPPQYLLNYKSDSDKQQGSGVPSRFSGSKDASANAGVLLISGLRSEDEADYYCMIWHSSAAVFGGGTQLTVLSAAAGSGGSGILVKQSPMLVAYDNAVNLSCKYSYNLFSREFRASLHKGLDSAVEVCVVYGNYSQQLQVYSKTGFNCDGKLGNESVTFYLQNLYVNQTDIYFCKIEVMYPPPYLDNEKSNGTIIHVKGKHLCPSPLFPGPSKPFWVLVVVGGVLACYSLLVTVAFIIFWVRSKRSRLLHSDYMNMTPRRPGPTRKHYQPYAPPRDFAAYRSKKVAKKPTNKAPHPKQEPQEINFPDDLPGSNTAAPVQETLHGCQPVTQEDGKESRISVQERQ

SEQ ID NO: 288 - protein, 474 aa, synthetic construct
  REGION 1..474: note = Synthetic polypeptide
MGVLLTQRTLLSLVLALLFPSMASMQVQLQQSGPGLVTPSQTLSLTCAISGDSVSSNSATWNWIRQSPSRGLEWLGRTYYRSKWYNDYAVSVKSRMSINPDTSKNQFSLQLNSVTPEDTAVYYCARGMMTYYYGMDVWGQGTTVTVSSGGGGSGGGGSGGGGSQPVLTQSSSLSASPGASASLTCTLRSGINVGPYRIYWYQQKPGSPPQYLLNYKSDSDKQQGSGVPSRFSGSKDASANAGVLLISGLRSEDEADYYCMIWHSSAAVFGGGTQLTVLSAAAGSGGSGFVPVFLPAKPTTTPAPRPPTPAPTIASQPLSLRPEACRPAAGGAVHTRGLDFACDIYIWAPLAGTCGVLLLSLVITLYCNHRNRSKRSRLLHSDYMNMTPRRPGPTRKHYQPYAPPRDFAAYRSKKVAKKPTNKAPHPKQEPQEINFPDDLPGSNTAAPVQETLHGCQPVTQEDGKESRISVQERQ

SEQ ID NO: 289 - protein, 470 aa, synthetic construct
  REGION 1..470: note = Synthetic polypeptide
MALPVTALLLPLALLLHAARPQVQLQQSGPGLVTPSQTLSLTCAISGDSVSSNSATWNWIRQSPSRGLEWLGRTYYRSKWYNDYAVSVKSRMSINPDTSKNQFSLQLNSVTPEDTAVYYCARGMMTYYYGMDVWGQGTTVTVSSGGGGSGGGGSGGGGSQPVLTQSSSLSASPGASASLTCTLRSGINVGPYRIYWYQQKPGSPPQYLLNYKSDSDKQQGSGVPSRFSGSKDASANAGVLLISGLRSEDEADYYCMIWHSSAAVFGGGTQLTVLSAAAGSGGSGFVPVFLPAKPTTTPAPRPPTPAPTIASQPLSLRPEACRPAAGGAVHTRGLDFACDIYIWAPLAGTCGVLLLSLVITLYCNHRNRSKRSRLLHSDYMNMTPRRPGPTRKHYQPYAPPRDFAAYRSKKVAKKPTNKAPHPKQEPQEINFPDDLPGSNTAAPVQETLHGCQPVTQEDGKESRISVQERQ

SEQ ID NO: 290 - protein, 473 aa, synthetic construct
  REGION 1..473: note = Synthetic polypeptide
MSFPCKFVASFLLIFNVSSKGAVSQVQLQQSGPGLVTPSQTLSLTCAISGDSVSSNSATWNWIRQSPSRGLEWLGRTYYRSKWYNDYAVSVKSRMSINPDTSKNQFSLQLNSVTPEDTAVYYCARGMMTYYYGMDVWGQGTTVTVSSGGGGSGGGGSGGGGSQPVLTQSSSLSASPGASASLTCTLRSGINVGPYRIYWYQQKPGSPPQYLLNYKSDSDKQQGSGVPSRFSGSKDASANAGVLLISGLRSEDEADYYCMIWHSSAAVFGGGTQLTVLSAAAGSGGSGFVPVFLPAKPTTTPAPRPPTPAPTIASQPLSLRPEACRPAAGGAVHTRGLDFACDIYIWAPLAGTCGVLLLSLVITLYCNHRNRSKRSRLLHSDYMNMTPRRPGPTRKHYQPYAPPRDFAAYRSKKVAKKPTNKAPHPKQEPQEINFPDDLPGSNTAAPVQETLHGCQPVTQEDGKESRISVQERQ

SEQ ID NO: 291 - protein, 469 aa, synthetic construct
  REGION 1..469: note = Synthetic polypeptide
MYRMQLLSCIALSLALVTNSQVQLQQSGPGLVTPSQTLSLTCAISGDSVSSNSATWNWIRQSPSRGLEWLGRTYYRSKWYNDYAVSVKSRMSINPDTSKNQFSLQLNSVTPEDTAVYYCARGMMTYYYGMDVWGQGTTVTVSSGGGGSGGGGSGGGGSQPVLTQSSSLSASPGASASLTCTLRSGINVGPYRIYWYQQKPGSPPQYLLNYKSDSDKQQGSGVPSRFSGSKDASANAGVLLISGLRSEDEADYYCMIWHSSAAVFGGGTQLTVLSAAAGSGGSGFVPVFLPAKPTTTPAPRPPTPAPTIASQPLSLRPEACRPAAGGAVHTRGLDFACDIYIWAPLAGTCGVLLLSLVITLYCNHRNRSKRSRLLHSDYMNMTPRRPGPTRKHYQPYAPPRDFAAYRSKKVAKKPTNKAPHPKQEPQEINFPDDLPGSNTAAPVQETLHGCQPVTQEDGKESRISVQERQ

SEQ ID NO: 292 - protein, 466 aa, synthetic construct
  REGION 1..466: note = Synthetic polypeptide
MWLQSLLLLGTVACSISQVQLQQSGPGLVTPSQTLSLTCAISGDSVSSNSATWNWIRQSPSRGLEWLGRTYYRSKWYNDYAVSVKSRMSINPDTSKNQFSLQLNSVTPEDTAVYYCARGMMTYYYGMDVWGQGTTVTVSSGGGGSGGGGSGGGGSQPVLTQSSSLSASPGASASLTCTLRSGINVGPYRIYWYQQKPGSPPQYLLNYKSDSDKQQGSGVPSRFSGSKDASANAGVLLISGLRSEDEADYYCMIWHSSAAVFGGGTQLTVLSAAAGSGGSGFVPVFLPAKPTTTPAPRPPTPAPTIASQPLSLRPEACRPAAGGAVHTRGLDFACDIYIWAPLAGTCGVLLLSLVITLYCNHRNRSKRSRLLHSDYMNMTPRRPGPTRKHYQPYAPPRDFAAYRSKKVAKKPTNKAPHPKQEPQEINFPDDLPGSNTAAPVQETLHGCQPVTQEDGKESRISVQERQ

SEQ ID NO: 293 - protein, 469 aa, synthetic construct
  REGION 1..469: note = Synthetic polypeptide
MEAPAQLLFLLLLWLPDTTRQVQLQQSGPGLVTPSQTLSLTCAISGDSVSSNSATWNWIRQSPSRGLEWLGRTYYRSKWYNDYAVSVKSRMSINPDTSKNQFSLQLNSVTPEDTAVYYCARGMMTYYYGMDVWGQGTTVTVSSGGGGSGGGGSGGGGSQPVLTQSSSLSASPGASASLTCTLRSGINVGPYRIYWYQQKPGSPPQYLLNYKSDSDKQQGSGVPSRFSGSKDASANAGVLLISGLRSEDEADYYCMIWHSSAAVFGGGTQLTVLSAAAGSGGSGFVPVFLPAKPTTTPAPRPPTPAPTIASQPLSLRPEACRPAAGGAVHTRGLDFACDIYIWAPLAGTCGVLLLSLVITLYCNHRNRSKRSRLLHSDYMNMTPRRPGPTRKHYQPYAPPRDFAAYRSKKVAKKPTNKAPHPKQEPQEINFPDDLPGSNTAAPVQETLHGCQPVTQEDGKESRISVQERQ

SEQ ID NO: 294 - protein, 418 aa, synthetic construct
  REGION 1..418: note = Synthetic polypeptide
MGVLLTQRTLLSLVLALLFPSMASMQVQLQQSGPGLVTPSQTLSLTCAISGDSVSSNSATWNWIRQSPSRGLEWLGRTYYRSKWYNDYAVSVKSRMSINPDTSKNQFSLQLNSVTPEDTAVYYCARGMMTYYYGMDVWGQGTTVTVSSGGGGSGGGGSGGGGSQPVLTQSSSLSASPGASASLTCTLRSGINVGPYRIYWYQQKPGSPPQYLLNYKSDSDKQQGSGVPSRFSGSKDASANAGVLLISGLRSEDEADYYCMIWHSSAAVFGGGTQLTVLSAAAGSGGSGFWVLVVVGGVLACYSLLVTVAFIIFWVRSKRSRLLHSDYMNMTPRRPGPTRKHYQPYAPPRDFAAYRSKKVAKKPTNKAPHPKQEPQEINFPDDLPGSNTAAPVQETLHGCQPVTQEDGKESRISVQERQ

SEQ ID NO: 295 - protein, 414 aa, synthetic construct
  REGION 1..414: note = Synthetic polypeptide
MALPVTALLLPLALLLHAARPQVQLQQSGPGLVTPSQTLSLTCAISGDSVSSNSATWNWIRQSPSRGLEWLGRTYYRSKWYNDYAVSVKSRMSINPDTSKNQFSLQLNSVTPEDTAVYYCARGMMTYYYGMDVWGQGTTVTVSSGGGGSGGGGSGGGGSQPVLTQSSSLSASPGASASLTCTLRSGINVGPYRIYWYQQKPGSPPQYLLNYKSDSDKQQGSGVPSRFSGSKDASANAGVLLISGLRSEDEADYYCMIWHSSAAVFGGGTQLTVLSAAAGSGGSGFWVLVVVGGVLACYSLLVTVAFIIFWVRSKRSRLLHSDYMNMTPRRPGPTRKHYQPYAPPRDFAAYRSKKVAKKPTNKAPHPKQEPQEINFPDDLPGSNTAAPVQETLHGCQPVTQEDGKESRISVQERQ

SEQ ID NO: 296 - protein, 417 aa, synthetic construct
  REGION 1..417: note = Synthetic polypeptide
MSFPCKFVASFLLIFNVSSKGAVSQVQLQQSGPGLVTPSQTLSLTCAISGDSVSSNSATWNWIRQSPSRGLEWLGRTYYRSKWYNDYAVSVKSRMSINPDTSKNQFSLQLNSVTPEDTAVYYCARGMMTYYYGMDVWGQGTTVTVSSGGGGSGGGGSGGGGSQPVLTQSSSLSASPGASASLTCTLRSGINVGPYRIYWYQQKPGSPPQYLLNYKSDSDKQQGSGVPSRFSGSKDASANAGVLLISGLRSEDEADYYCMIWHSSAAVFGGGTQLTVLSAAAGSGGSGFWVLVVVGGVLACYSLLVTVAFIIFWVRSKRSRLLHSDYMNMTPRRPGPTRKHYQPYAPPRDFAAYRSKKVAKKPTNKAPHPKQEPQEINFPDDLPGSNTAAPVQETLHGCQPVTQEDGKESRISVQERQ

SEQ ID NO: 297 - protein, 413 aa, synthetic construct
  REGION 1..413: note = Synthetic polypeptide
MYRMQLLSCIALSLALVTNSQVQLQQSGPGLVTPSQTLSLTCAISGDSVSSNSATWNWIRQSPSRGLEWLGRTYYRSKWYNDYAVSVKSRMSINPDTSKNQFSLQLNSVTPEDTAVYYCARGMMTYYYGMDVWGQGTTVTVSSGGGGSGGGGSGGGGSQPVLTQSSSLSASPGASASLTCTLRSGINVGPYRIYWYQQKPGSPPQYLLNYKSDSDKQQGSGVPSRFSGSKDASANAGVLLISGLRSEDEADYYCMIWHSSAAVFGGGTQLTVLSAAAGSGGSGFWVLVVVGGVLACYSLLVTVAFIIFWVRSKRSRLLHSDYMNMTPRRPGPTRKHYQPYAPPRDFAAYRSKKVAKKPTNKAPHPKQEPQEINFPDDLPGSNTAAPVQETLHGCQPVTQEDGKESRISVQERQ

SEQ ID NO: 298 - protein, 410 aa, synthetic construct
  REGION 1..410: note = Synthetic polypeptide
MWLQSLLLLGTVACSISQVQLQQSGPGLVTPSQTLSLTCAISGDSVSSNSATWNWIRQSPSRGLEWLGRTYYRSKWYNDYAVSVKSRMSINPDTSKNQFSLQLNSVTPEDTAVYYCARGMMTYYYGMDVWGQGTTVTVSSGGGGSGGGGSGGGGSQPVLTQSSSLSASPGASASLTCTLRSGINVGPYRIYWYQQKPGSPPQYLLNYKSDSDKQQGSGVPSRFSGSKDASANAGVLLISGLRSEDEADYYCMIWHSSAAVFGGGTQLTVLSAAAGSGGSGFWVLVVVGGVLACYSLLVTVAFIIFWVRSKRSRLLHSDYMNMTPRRPGPTRKHYQPYAPPRDFAAYRSKKVAKKPTNKAPHPKQEPQEINFPDDLPGSNTAAPVQETLHGCQPVTQEDGKESRISVQERQ

SEQ ID NO: 299 - protein, 413 aa, synthetic construct
  REGION 1..413: note = Synthetic polypeptide
MEAPAQLLFLLLLWLPDTTRQVQLQQSGPGLVTPSQTLSLTCAISGDSVSSNSATWNWIRQSPSRGLEWLGRTYYRSKWYNDYAVSVKSRMSINPDTSKNQFSLQLNSVTPEDTAVYYCARGMMTYYYGMDVWGQGTTVTVSSGGGGSGGGGSGGGGSQPVLTQSSSLSASPGASASLTCTLRSGINVGPYRIYWYQQKPGSPPQYLLNYKSDSDKQQGSGVPSRFSGSKDASANAGVLLISGLRSEDEADYYCMIWHSSAAVFGGGTQLTVLSAAAGSGGSGFWVLVVVGGVLACYSLLVTVAFIIFWVRSKRSRLLHSDYMNMTPRRPGPTRKHYQPYAPPRDFAAYRSKKVAKKPTNKAPHPKQEPQEINFPDDLPGSNTAAPVQETLHGCQPVTQEDGKESRISVQERQ

SEQ ID NO: 300 - protein, 425 aa, synthetic construct
  REGION 1..425: note = Synthetic polypeptide
MGVLLTQRTLLSLVLALLFPSMASMQVQLQQSGPELEKPGASVKLSCKASGYSFTGYTMNWVKQSHGKSLEWIGLITPYNGASSYNQKFRGKATLTVDKSSSTAYMDLLSLTSEDSAVYFCARGGYDGRGFDYWGQGTTVTVSSGGGGSGGGGSGGGGSDIELTQSPAIMSASPGEKVTMTCSASSSVSYMHWYQQKSGTSPKRWIYDTSKLASGVPGRFSGSGSGNSYSLTISSVEAEDDATYYCQQWSKHPLTFGAGTKLEIKAAAGSGGSGIIHVKGKHLCPSPLFPGPSKPFWVLVVVGGVLACYSLLVTVAFIIFWVRSKRSRLLHSDYMNMTPRRPGPTRKHYQPYAPPRDFAAYRSKKVAKKPTNKAPHPKQEPQEINFPDDLPGSNTAAPVQETLHGCQPVTQEDGKESRISVQERQ

SEQ ID NO: 301 - protein, 421 aa, synthetic construct
  REGION 1..421: note = Synthetic polypeptide
MALPVTALLLPLALLLHAARPQVQLQQSGPELEKPGASVKLSCKASGYSFTGYTMNWVKQSHGKSLEWIGLITPYNGASSYNQKFRGKATLTVDKSSSTAYMDLLSLTSEDSAVYFCARGGYDGRGFDYWGQGTTVTVSSGGGGSGGGGSGGGGSDIELTQSPAIMSASPGEKVTMTCSASSSVSYMHWYQQKSGTSPKRWIYDTSKLASGVPGRFSGSGSGNSYSLTISSVEAEDDATYYCQQWSKHPLTFGAGTKLEIKAAAGSGGSGIIHVKGKHLCPSPLFPGPSKPFWVLVVVGGVLACYSLLVTVAFIIFWVRSKRSRLLHSDYMNMTPRRPGPTRKHYQPYAPPRDFAAYRSKKVAKKPTNKAPHPKQEPQEINFPDDLPGSNTAAPVQETLHGCQPVTQEDGKESRISVQERQ

SEQ ID NO: 302 - protein, 424 aa, synthetic construct
  REGION 1..424: note = Synthetic polypeptide
MSFPCKFVASFLLIFNVSSKGAVSQVQLQQSGPELEKPGASVKLSCKASGYSFTGYTMNWVKQSHGKSLEWIGLITPYNGASSYNQKFRGKATLTVDKSSSTAYMDLLSLTSEDSAVYFCARGGYDGRGFDYWGQGTTVTVSSGGGGSGGGGSGGGGSDIELTQSPAIMSASPGEKVTMTCSASSSVSYMHWYQQKSGTSPKRWIYDTSKLASGVPGRFSGSGSGNSYSLTISSVEAEDDATYYCQQWSKHPLTFGAGTKLEIKAAAGSGGSGIIHVKGKHLCPSPLFPGPSKPFWVLVVVGGVLACYSLLVTVAFIIFWVRSKRSRLLHSDYMNMTPRRPGPTRKHYQPYAPPRDFAAYRSKKVAKKPTNKAPHPKQEPQEINFPDDLPGSNTAAPVQETLHGCQPVTQEDGKESRISVQERQ

SEQ ID NO: 303 - protein, 420 aa, synthetic construct
  REGION 1..420: note = Synthetic polypeptide
MYRMQLLSCIALSLALVTNSQVQLQQSGPELEKPGASVKLSCKASGYSFTGYTMNWVKQSHGKSLEWIGLITPYNGASSYNQKFRGKATLTVDKSSSTAYMDLLSLTSEDSAVYFCARGGYDGRGFDYWGQGTTVTVSSGGGGSGGGGSGGGGSDIELTQSPAIMSASPGEKVTMTCSASSSVSYMHWYQQKSGTSPKRWIYDTSKLASGVPGRFSGSGSGNSYSLTISSVEAEDDATYYCQQWSKHPLTFGAGTKLEIKAAAGSGGSGIIHVKGKHLCPSPLFPGPSKPFWVLVVVGGVLACYSLLVTVAFIIFWVRSKRSRLLHSDYMNMTPRRPGPTRKHYQPYAPPRDFAAYRSKKVAKKPTNKAPHPKQEPQEINFPDDLPGSNTAAPVQETLHGCQPVTQEDGKESRISVQERQ

SEQ ID NO: 304 - protein, 417 aa, synthetic construct
  REGION 1..417: note = Synthetic polypeptide
MWLQSLLLLGTVACSISQVQLQQSGPELEKPGASVKLSCKASGYSFTGYTMNWVKQSHGKSLEWIGLITPYNGASSYNQKFRGKATLTVDKSSSTAYMDLLSLTSEDSAVYFCARGGYDGRGFDYWGQGTTVTVSSGGGGSGGGGSGGGGSDIELTQSPAIMSASPGEKVTMTCSASSSVSYMHWYQQKSGTSPKRWIYDTSKLASGVPGRFSGSGSGNSYSLTISSVEAEDDATYYCQQWSKHPLTFGAGTKLEIKAAAGSGGSGIIHVKGKHLCPSPLFPGPSKPFWVLVVVGGVLACYSLLVTVAFIIFWVRSKRSRLLHSDYMNMTPRRPGPTRKHYQPYAPPRDFAAYRSKKVAKKPTNKAPHPKQEPQEINFPDDLPGSNTAAPVQETLHGCQPVTQEDGKESRISVQERQ

SEQ ID NO: 305 - protein, 420 aa, synthetic construct
  REGION 1..420: note = Synthetic polypeptide
MEAPAQLLFLLLLWLPDTTRQVQLQQSGPELEKPGASVKLSCKASGYSFTGYTMNWVKQSHGKSLEWIGLITPYNGASSYNQKFRGKATLTVDKSSSTAYMDLLSLTSEDSAVYFCARGGYDGRGFDYWGQGTTVTVSSGGGGSGGGGSGGGGSDIELTQSPAIMSASPGEKVTMTCSASSSVSYMHWYQQKSGTSPKRWIYDTSKLASGVPGRFSGSGSGNSYSLTISSVEAEDDATYYCQQWSKHPLTFGAGTKLEIKAAAGSGGSGIIHVKGKHLCPSPLFPGPSKPFWVLVVVGGVLACYSLLVTVAFIIFWVRSKRSRLLHSDYMNMTPRRPGPTRKHYQPYAPPRDFAAYRSKKVAKKPTNKAPHPKQEPQEINFPDDLPGSNTAAPVQETLHGCQPVTQEDGKESRISVQERQ

SEQ ID NO: 306 - protein, 421 aa, synthetic construct
  REGION 1..421: note = Synthetic polypeptide
MGVLLTQRTLLSLVLALLFPSMASMQVQLVQSGAEVEKPGASVKVSCKASGYTFTDYYMHWVRQAPGQGLEWMGWINPNSGGTNYAQKFQGRVTMTRDTSISTAYMELSRLRSDDTAVYYCASGWDFDYWGQGTLVTVSSGGGGSGGGGSGGGGSDIVMTQSPSSLSASVGDRVTITCRASQSIRYYLSWYQQKPGKAPKLLIYTASILQNGVPSRFSGSGSGTDFTLTISSLQPEDFATYYCLQTYTTPDFGPGTKVEIKAAAGSGGSGIIHVKGKHLCPSPLFPGPSKPFWVLVVVGGVLACYSLLVTVAFIIFWVRSKRSRLLHSDYMNMTPRRPGPTRKHYQPYAPPRDFAAYRSKKVAKKPTNKAPHPKQEPQEINFPDDLPGSNTAAPVQETLHGCQPVTQEDGKESRISVQERQ

SEQ ID NO: 307 - protein, 417 aa, synthetic construct
  REGION 1..417: note = Synthetic polypeptide
MALPVTALLLPLALLLHAARPQVQLVQSGAEVEKPGASVKVSCKASGYTFTDYYMHWVRQAPGQGLEWMGWINPNSGGTNYAQKFQGRVTMTRDTSISTAYMELSRLRSDDTAVYYCASGWDFDYWGQGTLVTVSSGGGGSGGGGSGGGGSDIVMTQSPSSLSASVGDRVTITCRASQSIRYYLSWYQQKPGKAPKLLIYTASILQNGVPSRFSGSGSGTDFTLTISSLQPEDFATYYCLQTYTTPDFGPGTKVEIKAAAGSGGSGIIHVKGKHLCPSPLFPGPSKPFWVLVVVGGVLACYSLLVTVAFIIFWVRSKRSRLLHSDYMNMTPRRPGPTRKHYQPYAPPRDFAAYRSKKVAKKPTNKAPHPKQEPQEINFPDDLPGSNTAAPVQETLHGCQPVTQEDGKESRISVQERQ

SEQ ID NO: 308 - protein, 420 aa, synthetic construct
  REGION 1..420: note = Synthetic polypeptide
MSFPCKFVASFLLIFNVSSKGAVSQVQLVQSGAEVEKPGASVKVSCKASGYTFTDYYMHWVRQAPGQGLEWMGWINPNSGGTNYAQKFQGRVTMTRDTSISTAYMELSRLRSDDTAVYYCASGWDFDYWGQGTLVTVSSGGGGSGGGGSGGGGSDIVMTQSPSSLSASVGDRVTITCRASQSIRYYLSWYQQKPGKAPKLLIYTASILQNGVPSRFSGSGSGTDFTLTISSLQPEDFATYYCLQTYTTPDFGPGTKVEIKAAAGSGGSGIIHVKGKHLCPSPLFPGPSKPFWVLVVVGGVLACYSLLVTVAFIIFWVRSKRSRLLHSDYMNMTPRRPGPTRKHYQPYAPPRDFAAYRSKKVAKKPTNKAPHPKQEPQEINFPDDLPGSNTAAPVQETLHGCQPVTQEDGKESRISVQERQ

SEQ ID NO: 309 - protein, 416 aa, synthetic construct
  REGION 1..416: note = Synthetic polypeptide
MYRMQLLSCIALSLALVTNSQVQLVQSGAEVEKPGASVKVSCKASGYTFTDYYMHWVRQAPGQGLEWMGWINPNSGGTNYAQKFQGRVTMTRDTSISTAYMELSRLRSDDTAVYYCASGWDFDYWGQGTLVTVSSGGGGSGGGGSGGGGSDIVMTQSPSSLSASVGDRVTITCRASQSIRYYLSWYQQKPGKAPKLLIYTASILQNGVPSRFSGSGSGTDFTLTISSLQPEDFATYYCLQTYTTPDFGPGTKVEIKAAAGSGGSGIIHVKGKHLCPSPLFPGPSKPFWVLVVVGGVLACYSLLVTVAFIIFWVRSKRSRLLHSDYMNMTPRRPGPTRKHYQPYAPPRDFAAYRSKKVAKKPTNKAPHPKQEPQEINFPDDLPGSNTAAPVQETLHGCQPVTQEDGKESRISVQERQ

SEQ ID NO: 310 - protein, 413 aa, synthetic construct
  REGION 1..413: note = Synthetic polypeptide
MWLQSLLLLGTVACSISQVQLVQSGAEVEKPGASVKVSCKASGYTFTDYYMHWVRQAPGQGLEWMGWINPNSGGTNYAQKFQGRVTMTRDTSISTAYMELSRLRSDDTAVYYCASGWDFDYWGQGTLVTVSSGGGGSGGGGSGGGGSDIVMTQSPSSLSASVGDRVTITCRASQSIRYYLSWYQQKPGKAPKLLIYTASILQNGVPSRFSGSGSGTDFTLTISSLQPEDFATYYCLQTYTTPDFGPGTKVEIKAAAGSGGSGIIHVKGKHLCPSPLFPGPSKPFWVLVVVGGVLACYSLLVTVAFIIFWVRSKRSRLLHSDYMNMTPRRPGPTRKHYQPYAPPRDFAAYRSKKVAKKPTNKAPHPKQEPQEINFPDDLPGSNTAAPVQETLHGCQPVTQEDGKESRISVQERQ

SEQ ID NO: 311 - protein, 416 aa, synthetic construct
  REGION 1..416: note = Synthetic polypeptide
MEAPAQLLFLLLLWLPDTTRQVQLVQSGAEVEKPGASVKVSCKASGYTFTDYYMHWVRQAPGQGLEWMGWINPNSGGTNYAQKFQGRVTMTRDTSISTAYMELSRLRSDDTAVYYCASGWDFDYWGQGTLVTVSSGGGGSGGGGSGGGGSDIVMTQSPSSLSASVGDRVTITCRASQSIRYYLSWYQQKPGKAPKLLIYTASILQNGVPSRFSGSGSGTDFTLTISSLQPEDFATYYCLQTYTTPDFGPGTKVEIKAAAGSGGSGIIHVKGKHLCPSPLFPGPSKPFWVLVVVGGVLACYSLLVTVAFIIFWVRSKRSRLLHSDYMNMTPRRPGPTRKHYQPYAPPRDFAAYRSKKVAKKPTNKAPHPKQEPQEINFPDDLPGSNTAAPVQETLHGCQPVTQEDGKESRISVQERQ

SEQ ID NO: 312 - protein, 426 aa, synthetic construct
  REGION 1..426: note = Synthetic polypeptide
MGVLLTQRTLLSLVLALLFPSMASMQVQLVQSGAEVKRPGASVQVSCRASGYSINTYYMQWVRQAPGAGLEWMGVINPSGVTSYAQKFQGRVTLTNDTSTNTVYMQLNSLTSADTAVYYCARWALWGDFGMDVWGKGTLVTVSSGGGGSGGGGSGGGGSDIQMTQSPSTLSASIGDRVTITCRASEGIYHWLAWYQQKPGKAPKLLIYKASSLASGAPSRFSGSGSGTDFTLTISSLQPDDFATYYCQQYSNYPLTFGGGTKLEIKAAAGSGGSGIIHVKGKHLCPSPLFPGPSKPFWVLVVVGGVLACYSLLVTVAFIIFWVRSKRSRLLHSDYMNMTPRRPGPTRKHYQPYAPPRDFAAYRSKKVAKKPTNKAPHPKQEPQEINFPDDLPGSNTAAPVQETLHGCQPVTQEDGKESRISVQERQ

SEQ ID NO: 313 - protein, 422 aa, synthetic construct
  REGION 1..422: note = Synthetic polypeptide
MALPVTALLLPLALLLHAARPQVQLVQSGAEVKRPGASVQVSCRASGYSINTYYMQWVRQAPGAGLEWMGVINPSGVTSYAQKFQGRVTLTNDTSTNTVYMQLNSLTSADTAVYYCARWALWGDFGMDVWGKGTLVTVSSGGGGSGGGGSGGGGSDIQMTQSPSTLSASIGDRVTITCRASEGIYHWLAWYQQKPGKAPKLLIYKASSLASGAPSRFSGSGSGTDFTLTISSLQPDDFATYYCQQYSNYPLTFGGGTKLEIKAAAGSGGSGIIHVKGKHLCPSPLFPGPSKPFWVLVVVGGVLACYSLLVTVAFIIFWVRSKRSRLLHSDYMNMTPRRPGPTRKHYQPYAPPRDFAAYRSKKVAKKPTNKAPHPKQEPQEINFPDDLPGSNTAAPVQETLHGCQPVTQEDGKESRISVQERQ

SEQ ID NO: 314 - protein, 425 aa, synthetic construct
  REGION 1..425: note = Synthetic polypeptide
MSFPCKFVASFLLIFNVSSKGAVSQVQLVQSGAEVKRPGASVQVSCRASGYSINTYYMQWVRQAPGAGLEWMGVINPSGVTSYAQKFQGRVTLTNDTSTNTVYMQLNSLTSADTAVYYCARWALWGDFGMDVWGKGTLVTVSSGGGGSGGGGSGGGGSDIQMTQSPSTLSASIGDRVTITCRASEGIYHWLAWYQQKPGKAPKLLIYKASSLASGAPSRFSGSGSGTDFTLTISSLQPDDFATYYCQQYSNYPLTFGGGTKLEIKAAAGSGGSGIIHVKGKHLCPSPLFPGPSKPFWVLVVVGGVLACYSLLVTVAFIIFWVRSKRSRLLHSDYMNMTPRRPGPTRKHYQPYAPPRDFAAYRSKKVAKKPTNKAPHPKQEPQEINFPDDLPGSNTAAPVQETLHGCQPVTQEDGKESRISVQERQ

SEQ ID NO: 315 - protein, 421 aa, synthetic construct
  REGION 1..421: note = Synthetic polypeptide
MYRMQLLSCIALSLALVTNSQVQLVQSGAEVKRPGASVQVSCRASGYSINTYYMQWVRQAPGAGLEWMGVINPSGVTSYAQKFQGRVTLTNDTSTNTVYMQLNSLTSADTAVYYCARWALWGDFGMDVWGKGTLVTVSSGGGGSGGGGSGGGGSDIQMTQSPSTLSASIGDRVTITCRASEGIYHWLAWYQQKPGKAPKLLIYKASSLASGAPSRFSGSGSGTDFTLTISSLQPDDFATYYCQQYSNYPLTFGGGTKLEIKAAAGSGGSGIIHVKGKHLCPSPLFPGPSKPFWVLVVVGGVLACYSLLVTVAFIIFWVRSKRSRLLHSDYMNMTPRRPGPTRKHYQPYAPPRDFAAYRSKKVAKKPTNKAPHPKQEPQEINFPDDLPGSNTAAPVQETLHGCQPVTQEDGKESRISVQERQ

SEQ ID NO: 316 - protein, 418 aa, synthetic construct
  REGION 1..418: note = Synthetic polypeptide
MWLQSLLLLGTVACSISQVQLVQSGAEVKRPGASVQVSCRASGYSINTYYMQWVRQAPGAGLEWMGVINPSGVTSYAQKFQGRVTLTNDTSTNTVYMQLNSLTSADTAVYYCARWALWGDFGMDVWGKGTLVTVSSGGGGSGGGGSGGGGSDIQMTQSPSTLSASIGDRVTITCRASEGIYHWLAWYQQKPGKAPKLLIYKASSLASGAPSRFSGSGSGTDFTLTISSLQPDDFATYYCQQYSNYPLTFGGGTKLEIKAAAGSGGSGIIHVKGKHLCPSPLFPGPSKPFWVLVVVGGVLACYSLLVTVAFIIFWVRSKRSRLLHSDYMNMTPRRPGPTRKHYQPYAPPRDFAAYRSKKVAKKPTNKAPHPKQEPQEINFPDDLPGSNTAAPVQETLHGCQPVTQEDGKESRISVQERQ

SEQ ID NO: 317 - protein, 421 aa, synthetic construct
  REGION 1..421: note = Synthetic polypeptide
MEAPAQLLFLLLLWLPDTTRQVQLVQSGAEVKRPGASVQVSCRASGYSINTYYMQWVRQAPGAGLEWMGVINPSGVTSYAQKFQGRVTLTNDTSTNTVYMQLNSLTSADTAVYYCARWALWGDFGMDVWGKGTLVTVSSGGGGSGGGGSGGGGSDIQMTQSPSTLSASIGDRVTITCRASEGIYHWLAWYQQKPGKAPKLLIYKASSLASGAPSRFSGSGSGTDFTLTISSLQPDDFATYYCQQYSNYPLTFGGGTKLEIKAAAGSGGSGIIHVKGKHLCPSPLFPGPSKPFWVLVVVGGVLACYSLLVTVAFIIFWVRSKRSRLLHSDYMNMTPRRPGPTRKHYQPYAPPRDFAAYRSKKVAKKPTNKAPHPKQEPQEINFPDDLPGSNTAAPVQETLHGCQPVTQEDGKESRISVQERQ

SEQ ID NO: 318 - protein, 426 aa, synthetic construct
  REGION 1..426: note = Synthetic polypeptide
MGVLLTQRTLLSLVLALLFPSMASMQVQLQESGPGLVKPSETLSLTCTVSGGSVSSGSYYWSWIRQPPGKGLEWIGYIYYSGSTNYNPSLKSRVTISVDTSKNQFSLKLSSVTAADTAVYYCAREGKNGAFDIWGQGTMVTVSSGGGGSGGGGSGGGGSDIQMTQSPSSLSASVGDRVTITCRASQSISSYLNWYQQKPGKAPKLLIYAASSLQSGVPSGFSGSGSGTDFTLTISSLQPEDFATYYCQQSYSTPLTFGGGTKVEIKAAAGSGGSGIIHVKGKHLCPSPLFPGPSKPFWVLVVVGGVLACYSLLVTVAFIIFWVRSKRSRLLHSDYMNMTPRRPGPTRKHYQPYAPPRDFAAYRSKKVAKKPTNKAPHPKQEPQEINFPDDLPGSNTAAPVQETLHGCQPVTQEDGKESRISVQERQ

SEQ ID NO: 319 - protein, 422 aa, synthetic construct
  REGION 1..422: note = Synthetic polypeptide
MALPVTALLLPLALLLHAARPQVQLQESGPGLVKPSETLSLTCTVSGGSVSSGSYYWSWIRQPPGKGLEWIGYIYYSGSTNYNPSLKSRVTISVDTSKNQFSLKLSSVTAADTAVYYCAREGKNGAFDIWGQGTMVTVSSGGGGSGGGGSGGGGSDIQMTQSPSSLSASVGDRVTITCRASQSISSYLNWYQQKPGKAPKLLIYAASSLQSGVPSGFSGSGSGTDFTLTISSLQPEDFATYYCQQSYSTPLTFGGGTKVEIKAAAGSGGSGIIHVKGKHLCPSPLFPGPSKPFWVLVVVGGVLACYSLLVTVAFIIFWVRSKRSRLLHSDYMNMTPRRPGPTRKHYQPYAPPRDFAAYRSKKVAKKPTNKAPHPKQEPQEINFPDDLPGSNTAAPVQETLHGCQPVTQEDGKESRISVQERQ

SEQ ID NO: 320 - protein, 425 aa, synthetic construct
  REGION 1..425: note = Synthetic polypeptide
MSFPCKFVASFLLIFNVSSKGAVSQVQLQESGPGLVKPSETLSLTCTVSGGSVSSGSYYWSWIRQPPGKGLEWIGYIYYSGSTNYNPSLKSRVTISVDTSKNQFSLKLSSVTAADTAVYYCAREGKNGAFDIWGQGTMVTVSSGGGGSGGGGSGGGGSDIQMTQSPSSLSASVGDRVTITCRASQSISSYLNWYQQKPGKAPKLLIYAASSLQSGVPSGFSGSGSGTDFTLTISSLQPEDFATYYCQQSYSTPLTFGGGTKVEIKAAAGSGGSGIIHVKGKHLCPSPLFPGPSKPFWVLVVVGGVLACYSLLVTVAFIIFWVRSKRSRLLHSDYMNMTPRRPGPTRKHYQPYAPPRDFAAYRSKKVAKKPTNKAPHPKQEPQEINFPDDLPGSNTAAPVQETLHGCQPVTQEDGKESRISVQERQ

SEQ ID NO: 321 - protein, 421 aa, synthetic construct
  REGION 1..421: note = Synthetic polypeptide
MYRMQLLSCIALSLALVTNSQVQLQESGPGLVKPSETLSLTCTVSGGSVSSGSYYWSWIRQPPGKGLEWIGYIYYSGSTNYNPSLKSRVTISVDTSKNQFSLKLSSVTAADTAVYYCAREGKNGAFDIWGQGTMVTVSSGGGGSGGGGSGGGGSDIQMTQSPSSLSASVGDRVTITCRASQSISSYLNWYQQKPGKAPKLLIYAASSLQSGVPSGFSGSGSGTDFTLTISSLQPEDFATYYCQQSYSTPLTFGGGTKVEIKAAAGSGGSGIIHVKGKHLCPSPLFPGPSKPFWVLVVVGGVLACYSLLVTVAFIIFWVRSKRSRLLHSDYMNMTPRRPGPTRKHYQPYAPPRDFAAYRSKKVAKKPTNKAPHPKQEPQEINFPDDLPGSNTAAPVQETLHGCQPVTQEDGKESRISVQERQ

SEQ ID NO: 322 - protein, 418 aa, synthetic construct
  REGION 1..418: note = Synthetic polypeptide
MWLQSLLLLGTVACSISQVQLQESGPGLVKPSETLSLTCTVSGGSVSSGSYYWSWIRQPPGKGLEWIGYIYYSGSTNYNPSLKSRVTISVDTSKNQFSLKLSSVTAADTAVYYCAREGKNGAFDIWGQGTMVTVSSGGGGSGGGGSGGGGSDIQMTQSPSSLSASVGDRVTITCRASQSISSYLNWYQQKPGKAPKLLIYAASSLQSGVPSGFSGSGSGTDFTLTISSLQPEDFATYYCQQSYSTPLTFGGGTKVEIKAAAGSGGSGIIHVKGKHLCPSPLFPGPSKPFWVLVVVGGVLACYSLLVTVAFIIFWVRSKRSRLLHSDYMNMTPRRPGPTRKHYQPYAPPRDFAAYRSKKVAKKPTNKAPHPKQEPQEINFPDDLPGSNTAAPVQETLHGCQPVTQEDGKESRISVQERQ

SEQ ID NO: 323 - protein, 421 aa, synthetic construct
  REGION 1..421: note = Synthetic polypeptide
MEAPAQLLFLLLLWLPDTTRQVQLQESGPGLVKPSETLSLTCTVSGGSVSSGSYYWSWIRQPPGKGLEWIGYIYYSGSTNYNPSLKSRVTISVDTSKNQFSLKLSSVTAADTAVYYCAREGKNGAFDIWGQGTMVTVSSGGGGSGGGGSGGGGSDIQMTQSPSSLSASVGDRVTITCRASQSISSYLNWYQQKPGKAPKLLIYAASSLQSGVPSGFSGSGSGTDFTLTISSLQPEDFATYYCQQSYSTPLTFGGGTKVEIKAAAGSGGSGIIHVKGKHLCPSPLFPGPSKPFWVLVVVGGVLACYSLLVTVAFIIFWVRSKRSRLLHSDYMNMTPRRPGPTRKHYQPYAPPRDFAAYRSKKVAKKPTNKAPHPKQEPQEINFPDDLPGSNTAAPVQETLHGCQPVTQEDGKESRISVQERQ

SEQ ID NO: 324 - protein, 434 aa, synthetic construct
  REGION 1..434: note = Synthetic polypeptide
MGVLLTQRTLLSLVLALLFPSMASMEVQLVESGGGLVQPGGSLRLSCAASGFDLGFYFYACWVRQAPGKGLEWVSCIYTAGSGSTYYASWAKGRFTISRDNSKNTLYLQMNSLRAEDTAVYYCARSTANTRSTYYLNLWGQGTLVTVSSGGGGSGGGGSGGGGSDIQMTQSPSSLSASVGDRVTITCQASQRISSYLSWYQQKPGKVPKLLIYGASTLASGVPSRFSGSGSGTDFTLTISSLQPEDVATYYCQSYAYFDSNNWHAFGGGTKVEIAAAGSGGSGIIHVKGKHLCPSPLFPGPSKPFWVLVVVGGVLACYSLLVTVAFIIFWVRSKRSRLLHSDYMNMTPRRPGPTRKHYQPYAPPRDFAAYRSKKVAKKPTNKAPHPKQEPQEINFPDDLPGSNTAAPVQETLHGCQPVTQEDGKESRISVQERQ

SEQ ID NO: 325 - protein, 430 aa, synthetic construct
  REGION 1..430: note = Synthetic polypeptide
MALPVTALLLPLALLLHAARPEVQLVESGGGLVQPGGSLRLSCAASGFDLGFYFYACWVRQAPGKGLEWVSCIYTAGSGSTYYASWAKGRFTISRDNSKNTLYLQMNSLRAEDTAVYYCARSTANTRSTYYLNLWGQGTLVTVSSGGGGSGGGGSGGGGSDIQMTQSPSSLSASVGDRVTITCQASQRISSYLSWYQQKPGKVPKLLIYGASTLASGVPSRFSGSGSGTDFTLTISSLQPEDVATYYCQSYAYFDSNNWHAFGGGTKVEIAAAGSGGSGIIHVKGKHLCPSPLFPGPSKPFWVLVVVGGVLACYSLLVTVAFIIFWVRSKRSRLLHSDYMNMTPRRPGPTRKHYQPYAPPRDFAAYRSKKVAKKPTNKAPHPKQEPQEINFPDDLPGSNTAAPVQETLHGCQPVTQEDGKESRISVQERQ

SEQ ID NO: 326 - protein, 433 aa, synthetic construct
  REGION 1..433: note = Synthetic polypeptide
MSFPCKFVASFLLIFNVSSKGAVSEVQLVESGGGLVQPGGSLRLSCAASGFDLGFYFYACWVRQAPGKGLEWVSCIYTAGSGSTYYASWAKGRFTISRDNSKNTLYLQMNSLRAEDTAVYYCARSTANTRSTYYLNLWGQGTLVTVSSGGGGSGGGGSGGGGSDIQMTQSPSSLSASVGDRVTITCQASQRISSYLSWYQQKPGKVPKLLIYGASTLASGVPSRFSGSGSGTDFTLTISSLQPEDVATYYCQSYAYFDSNNWHAFGGGTKVEIAAAGSGGSGIIHVKGKHLCPSPLFPGPSKPFWVLVVVGGVLACYSLLVTVAFIIFWVRSKRSRLLHSDYMNMTPRRPGPTRKHYQPYAPPRDFAAYRSKKVAKKPTNKAPHPKQEPQEINFPDDLPGSNTAAPVQETLHGCQPVTQEDGKESRISVQERQ

SEQ ID NO: 327 - protein, 429 aa, synthetic construct
  REGION 1..429: note = Synthetic polypeptide
MYRMQLLSCIALSLALVTNSEVQLVESGGGLVQPGGSLRLSCAASGFDLGFYFYACWVRQAPGKGLEWVSCIYTAGSGSTYYASWAKGRFTISRDNSKNTLYLQMNSLRAEDTAVYYCARSTANTRSTYYLNLWGQGTLVTVSSGGGGSGGGGSGGGGSDIQMTQSPSSLSASVGDRVTITCQASQRISSYLSWYQQKPGKVPKLLIYGASTLASGVPSRFSGSGSGTDFTLTISSLQPEDVATYYCQSYAYFDSNNWHAFGGGTKVEIAAAGSGGSGIIHVKGKHLCPSPLFPGPSKPFWVLVVVGGVLACYSLLVTVAFIIFWVRSKRSRLLHSDYMNMTPRRPGPTRKHYQPYAPPRDFAAYRSKKVAKKPTNKAPHPKQEPQEINFPDDLPGSNTAAPVQETLHGCQPVTQEDGKESRISVQERQ

SEQ ID NO: 328 - protein, 426 aa, synthetic construct
  REGION 1..426: note = Synthetic polypeptide
MWLQSLLLLGTVACSISEVQLVESGGGLVQPGGSLRLSCAASGFDLGFYFYACWVRQAPGKGLEWVSCIYTAGSGSTYYASWAKGRFTISRDNSKNTLYLQMNSLRAEDTAVYYCARSTANTRSTYYLNLWGQGTLVTVSSGGGGSGGGGSGGGGSDIQMTQSPSSLSASVGDRVTITCQASQRISSYLSWYQQKPGKVPKLLIYGASTLASGVPSRFSGSGSGTDFTLTISSLQPEDVATYYCQSYAYFDSNNWHAFGGGTKVEIAAAGSGGSGIIHVKGKHLCPSPLFPGPSKPFWVLVVVGGVLACYSLLVTVAFIIFWVRSKRSRLLHSDYMNMTPRRPGPTRKHYQPYAPPRDFAAYRSKKVAKKPTNKAPHPKQEPQEINFPDDLPGSNTAAPVQETLHGCQPVTQEDGKESRISVQERQ

SEQ ID NO: 329 - protein, 429 aa, synthetic construct
  REGION 1..429: note = Synthetic polypeptide
MEAPAQLLFLLLLWLPDTTREVQLVESGGGLVQPGGSLRLSCAASGFDLGFYFYACWVRQAPGKGLEWVSCIYTAGSGSTYYASWAKGRFTISRDNSKNTLYLQMNSLRAEDTAVYYCARSTANTRSTYYLNLWGQGTLVTVSSGGGGSGGGGSGGGGSDIQMTQSPSSLSASVGDRVTITCQASQRISSYLSWYQQKPGKVPKLLIYGASTLASGVPSRFSGSGSGTDFTLTISSLQPEDVATYYCQSYAYFDSNNWHAFGGGTKVEIAAAGSGGSGIIHVKGKHLCPSPLFPGPSKPFWVLVVVGGVLACYSLLVTVAFIIFWVRSKRSRLLHSDYMNMTPRRPGPTRKHYQPYAPPRDFAAYRSKKVAKKPTNKAPHPKQEPQEINFPDDLPGSNTAAPVQETLHGCQPVTQEDGKESRISVQERQ

SEQ ID NO: 330 - protein, 439 aa, synthetic construct
  REGION 1..439: note = Synthetic polypeptide
MGVLLTQRTLLSLVLALLFPSMASMQVQLQQSGPGLVTPSQTLSLTCAISGDSVSSNSATWNWIRQSPSRGLEWLGRTYYRSKWYNDYAVSVKSRMSINPDTSKNQFSLQLNSVTPEDTAVYYCARGMMTYYYGMDVWGQGTTVTVSSGGGGSGGGGSGGGGSQPVLTQSSSLSASPGASASLTCTLRSGINVGPYRIYWYQQKPGSPPQYLLNYKSDSDKQQGSGVPSRFSGSKDASANAGVLLISGLRSEDEADYYCMIWHSSAAVFGGGTQLTVLSAAAGSGGSGIIHVKGKHLCPSPLFPGPSKPFWVLVVVGGVLACYSLLVTVAFIIFWVRSKRSRLLHSDYMNMTPRRPGPTRKHYQPYAPPRDFAAYRSKKVAKKPTNKAPHPKQEPQEINFPDDLPGSNTAAPVQETLHGCQPVTQEDGKESRISVQERQ

SEQ ID NO: 331 - protein, 435 aa, synthetic construct
  REGION 1..435: note = Synthetic polypeptide
MALPVTALLLPLALLLHAARPQVQLQQSGPGLVTPSQTLSLTCAISGDSVSSNSATWNWIRQSPSRGLEWLGRTYYRSKWYNDYAVSVKSRMSINPDTSKNQFSLQLNSVTPEDTAVYYCARGMMTYYYGMDVWGQGTTVTVSSGGGGSGGGGSGGGGSQPVLTQSSSLSASPGASASLTCTLRSGINVGPYRIYWYQQKPGSPPQYLLNYKSDSDKQQGSGVPSRFSGSKDASANAGVLLISGLRSEDEADYYCMIWHSSAAVFGGGTQLTVLSAAAGSGGSGIIHVKGKHLCPSPLFPGPSKPFWVLVVVGGVLACYSLLVTVAFIIFWVRSKRSRLLHSDYMNMTPRRPGPTRKHYQPYAPPRDFAAYRSKKVAKKPTNKAPHPKQEPQEINFPDDLPGSNTAAPVQETLHGCQPVTQEDGKESRISVQERQ

SEQ ID NO: 332 - protein, 438 aa, synthetic construct
  REGION 1..438: note = Synthetic polypeptide
MSFPCKFVASFLLIFNVSSKGAVSQVQLQQSGPGLVTPSQTLSLTCAISGDSVSSNSATWNWIRQSPSRGLEWLGRTYYRSKWYNDYAVSVKSRMSINPDTSKNQFSLQLNSVTPEDTAVYYCARGMMTYYYGMDVWGQGTTVTVSSGGGGSGGGGSGGGGSQPVLTQSSSLSASPGASASLTCTLRSGINVGPYRIYWYQQKPGSPPQYLLNYKSDSDKQQGSGVPSRFSGSKDASANAGVLLISGLRSEDEADYYCMIWHSSAAVFGGGTQLTVLSAAAGSGGSGIIHVKGKHLCPSPLFPGPSKPFWVLVVVGGVLACYSLLVTVAFIIFWVRSKRSRLLHSDYMNMTPRRPGPTRKHYQPYAPPRDFAAYRSKKVAKKPTNKAPHPKQEPQEINFPDDLPGSNTAAPVQETLHGCQPVTQEDGKESRISVQERQ

SEQ ID NO: 333 - protein, 434 aa, synthetic construct
  REGION 1..434: note = Synthetic polypeptide
MYRMQLLSCIALSLALVTNSQVQLQQSGPGLVTPSQTLSLTCAISGDSVSSNSATWNWIRQSPSRGLEWLGRTYYRSKWYNDYAVSVKSRMSINPDTSKNQFSLQLNSVTPEDTAVYYCARGMMTYYYGMDVWGQGTTVTVSSGGGGSGGGGSGGGGSQPVLTQSSSLSASPGASASLTCTLRSGINVGPYRIYWYQQKPGSPPQYLLNYKSDSDKQQGSGVPSRFSGSKDASANAGVLLISGLRSEDEADYYCMIWHSSAAVFGGGTQLTVLSAAAGSGGSGIIHVKGKHLCPSPLFPGPSKPFWVLVVVGGVLACYSLLVTVAFIIFWVRSKRSRLLHSDYMNMTPRRPGPTRKHYQPYAPPRDFAAYRSKKVAKKPTNKAPHPKQEPQEINFPDDLPGSNTAAPVQETLHGCQPVTQEDGKESRISVQERQ

SEQ ID NO: 334 - protein, 431 aa, synthetic construct
  REGION 1..431: note = Synthetic polypeptide
MWLQSLLLLGTVACSISQVQLQQSGPGLVTPSQTLSLTCAISGDSVSSNSATWNWIRQSPSRGLEWLGRTYYRSKWYNDYAVSVKSRMSINPDTSKNQFSLQLNSVTPEDTAVYYCARGMMTYYYGMDVWGQGTTVTVSSGGGGSGGGGSGGGGSQPVLTQSSSLSASPGASASLTCTLRSGINVGPYRIYWYQQKPGSPPQYLLNYKSDSDKQQGSGVPSRFSGSKDASANAGVLLISGLRSEDEADYYCMIWHSSAAVFGGGTQLTVLSAAAGSGGSGIIHVKGKHLCPSPLFPGPSKPFWVLVVVGGVLACYSLLVTVAFIIFWVRSKRSRLLHSDYMNMTPRRPGPTRKHYQPYAPPRDFAAYRSKKVAKKPTNKAPHPKQEPQEINFPDDLPGSNTAAPVQETLHGCQPVTQEDGKESRISVQERQ

SEQ ID NO: 335 - protein, 434 aa, synthetic construct
  REGION 1..434: note = Synthetic polypeptide
MEAPAQLLFLLLLWLPDTTRQVQLQQSGPGLVTPSQTLSLTCAISGDSVSSNSATWNWIRQSPSRGLEWLGRTYYRSKWYNDYAVSVKSRMSINPDTSKNQFSLQLNSVTPEDTAVYYCARGMMTYYYGMDVWGQGTTVTVSSGGGGSGGGGSGGGGSQPVLTQSSSLSASPGASASLTCTLRSGINVGPYRIYWYQQKPGSPPQYLLNYKSDSDKQQGSGVPSRFSGSKDASANAGVLLISGLRSEDEADYYCMIWHSSAAVFGGGTQLTVLSAAAGSGGSGIIHVKGKHLCPSPLFPGPSKPFWVLVVVGGVLACYSLLVTVAFIIFWVRSKRSRLLHSDYMNMTPRRPGPTRKHYQPYAPPRDFAAYRSKKVAKKPTNKAPHPKQEPQEINFPDDLPGSNTAAPVQETLHGCQPVTQEDGKESRISVQERQ

SEQ ID NO: 336 - protein, 357 aa, synthetic construct
  REGION 1..357: note = Synthetic polypeptide
NKCGRRNKFGINRPAVLAPEDGLAMSLHFMTLGGSSLSPTEGKGSGLQGHIIENPQYFSDACVHHIKRRDIVLKWELGEGAFGKVFLAECHNLLPEQDKMLVAVKALKEASESARQDFQREAELLTMLQHQHIVRFFGVCTEGRPLLMVFEYMRHGDLNRFLRSHGPDAKLLAGGEDVAPGPLGLGQLLAVASQVAAGMVYLAGLHFVHRDLATRNCLVGQGLVVKIGDFGMSRDIYSTDYYRVGGRTMLPIRWMPPESILYRKFTTESDVWSFGVVLWEIFTYGKQPWYQLSNTEAIDCITQGRELERPRACPPEVYAIMRGCWQREPQQRHSIKDVHARLQALAQAPPVYLDVLG

SEQ ID NO: 337 - protein, 199 aa, synthetic construct
  REGION 1..199: note = Synthetic polypeptide
MKSGLWYFFLFLCRIKVLTGEINGSANYEMFIFHNGGVQILCKYPDIVQQFKMQLLKGGQILCDLTKTKGSGNTVSIKSLKFCHSQLSNNSVSFFLYNLDHSHANYYFCNLSIFDPPPFKVTLTGGYLHIYESQLCCQLKFWLPIGCAAFVVVCILGCILICWLTKKKYSSSVHDPNGEYMFMRAVNTAKKSRLTDVTL

SEQ ID NO: 338 - protein, 38 aa, synthetic construct
  REGION 1..38: note = Synthetic polypeptide
CWLTKKKYSSSVHDPNGEYMFMRAVNTAKKSRLTDVTL

SEQ ID NO: 339 - protein, 322 aa, synthetic construct
  REGION 1..322: note = Synthetic polypeptide
RDNETIWGVLGHGITLNIPNFQMTDDIDEVRWVRRGTLVAEFKRKKPPFLISETYEVLANGSLKIKKPMMRNDSGTYNVMVYGTNGMTRLEKDLDVRILERVSKPMIHWECPNTTLTCAVLQGTDFELKLYQGETLLNSLPQKNMSYQWTNLNAPFKCEAINPVSKESKMEVVNCPEKGLSFYVTVGVGAGGLLLVLLVALFIFCICKRRKRNRRRKDEELEIKASRTSTVERGPKPHSTPAAAAQNSVALQAPPPPGHHLQTPGHRPLPPGHRTREHQQKKRPPPSGTQIHQQKGPPLPRPRVQPKPPCGSGDGVSLPPPN

SEQ ID NO: 340 - protein, 115 aa, synthetic construct
  REGION 1..115: note = Synthetic polypeptide
KRRKRNRRRKDEELEIKASRTSTVERGPKPHSTPAAAAQNSVALQAPPPPGHHLQTPGHRPLPPGHRTREHQQKKRPPPSGTQIHQQKGPPLPRPRVQPKPPCGSGDGVSLPPPN

SEQ ID NO: 341 - protein, 42 aa, synthetic construct
  REGION 1..42: note = Synthetic polypeptide
KRGRKKLLYIFKQPFMRPVQTTQEEDGCSCRFPEEEEGGCEL

SEQ ID NO: 342 - protein, 24 aa, synthetic construct
  REGION 1..24: note = Synthetic polypeptide
LCARPRRSPAQEDGKVYINMPGRG

SEQ ID NO: 343 - protein, 42 aa, synthetic construct
  REGION 1..42: note = Synthetic polypeptide
ALYLLRRDQRLPPDAHKPPGGGSFRTPIQEEQADAHSTLAKI

SEQ ID NO: 344 - protein, 791 aa, synthetic construct
  REGION 1..791: note = Synthetic polypeptide
MGVLLTQRTLLSLVLALLFPSMASMQVKLEQSGAEVVKPGASVKLSCKASGFNIKDSYMHWLRQGPGQRLEWIGWIDPENGDTEYAPKFQGKATFTTDTSANTAYLGLSSLRPEDTAVYYCNEGTPTGPYYFDYWGQGTLVTVSSGGGGSGGGGSGGGGSENVLTQSPSSMSASVGDRVNIACSASSSVSYMHWFQQKPGKSPKLWIYSTSNLASGVPSRFSGSGSGTDYSLTISSMQPEDAATYYCQQRSSYPLTFGGGTKLEIKAAAGSGGSGILVKQSPMLVAYDNAVNLSCKYSYNLFSREFRASLHKGLDSAVEVCVVYGNYSQQLQVYSKTGFNCDGKLGNESVTFYLQNLYVNQTDIYFCKIEVMYPPPYLDNEKSNGTIIHVKGKHLCPSPLFPGPSKPFWVLVVVGGVLACYSLLVTVAFIIFWVNKCGRRNKFGINRPAVLAPEDGLAMSLHFMTLGGSSLSPTEGKGSGLQGHIIENPQYFSDACVHHIKRRDIVLKWELGEGAFGKVFLAECHNLLPEQDKMLVAVKALKEASESARQDFQREAELLTMLQHQHIVRFFGVCTEGRPLLMVFEYMRHGDLNRFLRSHGPDAKLLAGGEDVAPGPLGLGQLLAVASQVAAGMVYLAGLHFVHRDLATRNCLVGQGLVVKIGDFGMSRDIYSTDYYRVGGRTMLPIRWMPPESILYRKFTTESDVWSFGVVLWEIFTYGKQPWYQLSNTEAIDCITQGRELERPRACPPEVYAIMRGCWQREPQQRHSIKDVHARLQALAQAPPVYLDVLG

SEQ ID NO: 345 - protein, 853 aa, synthetic construct
  REGION 1..853: note = Synthetic polypeptide
MGVLLTQRTLLSLVLALLFPSMASMQVKLEQSGAEVVKPGASVKLSCKASGFNIKDSYMHWLRQGPGQRLEWIGWIDPENGDTEYAPKFQGKATFTTDTSANTAYLGLSSLRPEDTAVYYCNEGTPTGPYYFDYWGQGTLVTVSSGGGGSGGGGSGGGGSENVLTQSPSSMSASVGDRVNIACSASSSVSYMHWFQQKPGKSPKLWIYSTSNLASGVPSRFSGSGSGTDYSLTISSMQPEDAATYYCQQRSSYPLTFGGGTKLEIKAAAGSGGSGILVKQSPMLVAYDNAVNLSCKYSYNLFSREFRASLHKGLDSAVEVCVVYGNYSQQLQVYSKTGFNCDGKLGNESVTFYLQNLYVNQTDIYFCKIEVMYPPPYLDNEKSNGTIIHVKGKHLCPSPLFPGPSKPFWVLVVVGGVLACYSLLVTVAFIIFWVNKCGRRNKFGINRPAVLAPEDGLAMSLHFMTLGGSSLSPTEGKGSGLQGHIIENPQYFSDACVHHIKRRDIVLKWELGEGAFGKVFLAECHNLLPEQDKMLVAVKALKEASESARQDFQREAELLTMLQHQHIVRFFGVCTEGRPLLMVFEYMRHGDLNRFLRSHGPDAKLLAGGEDVAPGPLGLGQLLAVASQVAAGMVYLAGLHFVHRDLATRNCLVGQGLVVKIGDFGMSRDIYSTDYYRVGGRTMLPIRWMPPESILYRKFTTESDVWSFGVVLWEIFTYGKQPWYQLSNTEAIDCITQGRELERPRACPPEVYAIMRGCWQREPQQRHSIKDVHARLQALAQAPPVYLDVLGKKVAKKPTNKAPHPKQEPQEINFPDDLPGSNTAAPVQETLHGCQPVTQEDGKESRISVQERQ

SEQ ID NO: 346 - protein, 832 aa, synthetic construct
  REGION 1..832: note = Synthetic polypeptide
MGVLLTQRTLLSLVLALLFPSMASMQVKLEQSGAEVVKPGASVKLSCKASGFNIKDSYMHWLRQGPGQRLEWIGWIDPENGDTEYAPKFQGKATFTTDTSANTAYLGLSSLRPEDTAVYYCNEGTPTGPYYFDYWGQGTLVTVSSGGGGSGGGGSGGGGSENVLTQSPSSMSASVGDRVNIACSASSSVSYMHWFQQKPGKSPKLWIYSTSNLASGVPSRFSGSGSGTDYSLTISSMQPEDAATYYCQQRSSYPLTFGGGTKLEIKAAAGSGGSGILVKQSPMLVAYDNAVNLSCKYSYNLFSREFRASLHKGLDSAVEVCVVYGNYSQQLQVYSKTGFNCDGKLGNESVTFYLQNLYVNQTDIYFCKIEVMYPPPYLDNEKSNGTIIHVKGKHLCPSPLFPGPSKPFWVLVVVGGVLACYSLLVTVAFIIFWVRSKRSRLLHSDYMNMTPRRPGPTRKHYQPYAPPRDFAAYRSNKCGRRNKFGINRPAVLAPEDGLAMSLHFMTLGGSSLSPTEGKGSGLQGHIIENPQYFSDACVHHIKRRDIVLKWELGEGAFGKVFLAECHNLLPEQDKMLVAVKALKEASESARQDFQREAELLTMLQHQHIVRFFGVCTEGRPLLMVFEYMRHGDLNRFLRSHGPDAKLLAGGEDVAPGPLGLGQLLAVASQVAAGMVYLAGLHFVHRDLATRNCLVGQGLVVKIGDFGMSRDIYSTDYYRVGGRTMLPIRWMPPESILYRKFTTESDVWSFGVVLWEIFTYGKQPWYQLSNTEAIDCITQGRELERPRACPPEVYAIMRGCWQREPQQRHSIKDVHARLQALAQAPPVYLDVLG

SEQ ID NO: 347 - protein, 894 aa, synthetic construct
  REGION 1..894: note = Synthetic polypeptide
MGVLLTQRTLLSLVLALLFPSMASMQVKLEQSGAEVVKPGASVKLSCKASGFNIKDSYMHWLRQGPGQRLEWIGWIDPENGDTEYAPKFQGKATFTTDTSANTAYLGLSSLRPEDTAVYYCNEGTPTGPYYFDYWGQGTLVTVSSGGGGSGGGGSGGGGSENVLTQSPSSMSASVGDRVNIACSASSSVSYMHWFQQKPGKSPKLWIYSTSNLASGVPSRFSGSGSGTDYSLTISSMQPEDAATYYCQQRSSYPLTFGGGTKLEIKAAAGSGGSGILVKQSPMLVAYDNAVNLSCKYSYNLFSREFRASLHKGLDSAVEVCVVYGNYSQQLQVYSKTGFNCDGKLGNESVTFYLQNLYVNQTDIYFCKIEVMYPPPYLDNEKSNGTIIHVKGKHLCPSPLFPGPSKPFWVLVVVGGVLACYSLLVTVAFIIFWVRSKRSRLLHSDYMNMTPRRPGPTRKHYQPYAPPRDFAAYRSNKCGRRNKFGINRPAVLAPEDGLAMSLHFMTLGGSSLSPTEGKGSGLQGHIIENPQYFSDACVHHIKRRDIVLKWELGEGAFGKVFLAECHNLLPEQDKMLVAVKALKEASESARQDFQREAELLTMLQHQHIVRFFGVCTEGRPLLMVFEYMRHGDLNRFLRSHGPDAKLLAGGEDVAPGPLGLGQLLAVASQVAAGMVYLAGLHFVHRDLATRNCLVGQGLVVKIGDFGMSRDIYSTDYYRVGGRTMLPIRWMPPESILYRKFTTESDVWSFGVVLWEIFTYGKQPWYQLSNTEAIDCITQGRELERPRACPPEVYAIMRGCWQREPQQRHSIKDVHARLQALAQAPPVYLDVLGKKVAKKPTNKAPHPKQEPQEINFPDDLPGSNTAAPVQETLHGCQPVTQEDGKESRISVQERQ

SEQ ID NO: 348 - protein, 517 aa, synthetic construct
  REGION 1..517: note = Synthetic polypeptide
MGVLLTQRTLLSLVLALLFPSMASMQVKLEQSGAEVVKPGASVKLSCKASGFNIKDSYMHWLRQGPGQRLEWIGWIDPENGDTEYAPKFQGKATFTTDTSANTAYLGLSSLRPEDTAVYYCNEGTPTGPYYFDYWGQGTLVTVSSGGGGSGGGGSGGGGSENVLTQSPSSMSASVGDRVNIACSASSSVSYMHWFQQKPGKSPKLWIYSTSNLASGVPSRFSGSGSGTDYSLTISSMQPEDAATYYCQQRSSYPLTFGGGTKLEIKAAAGSGGSGGEINGSANYEMFIFHNGGVQILCKYPDIVQQFKMQLLKGGQILCDLTKTKGSGNTVSIKSLKFCHSQLSNNSVSFFLYNLDHSHANYYFCNLSIFDPPPFKVTLTGGYLHIYESQLCCQLKFWLPIGCAAFVVVCILGCILICWLTKKKYSSSVHDPNGEYMFMRAVNTAKKSRLTDVTLKKVAKKPTNKAPHPKQEPQEINFPDDLPGSNTAAPVQETLHGCQPVTQEDGKESRISVQERQ

SEQ ID NO: 349 - protein, 513 aa, synthetic construct
  REGION 1..513: note = Synthetic polypeptide
MGVLLTQRTLLSLVLALLFPSMASMQVKLEQSGAEVVKPGASVKLSCKASGFNIKDSYMHWLRQGPGQRLEWIGWIDPENGDTEYAPKFQGKATFTTDTSANTAYLGLSSLRPEDTAVYYCNEGTPTGPYYFDYWGQGTLVTVSSGGGGSGGGGSGGGGSENVLTQSPSSMSASVGDRVNIACSASSSVSYMHWFQQKPGKSPKLWIYSTSNLASGVPSRFSGSGSGTDYSLTISSMQPEDAATYYCQQRSSYPLTFGGGTKLEIKAAAGSGGSGILVKQSPMLVAYDNAVNLSCKYSYNLFSREFRASLHKGLDSAVEVCVVYGNYSQQLQVYSKTGFNCDGKLGNESVTFYLQNLYVNQTDIYFCKIEVMYPPPYLDNEKSNGTIIHVKGKHLCPSPLFPGPSKPFWVLVVVGGVLACYSLLVTVAFIIFWVRSKRSRLLHSDYMNMTPRRPGPTRKHYQPYAPPRDFAAYRSCWLTKKKYSSSVHDPNGEYMFMRAVNTAKKSRLTDVTL

SEQ ID NO: 350 - protein, 575 aa, synthetic construct
  REGION 1..575: note = Synthetic polypeptide
MGVLLTQRTLLSLVLALLFPSMASMQVKLEQSGAEVVKPGASVKLSCKASGFNIKDSYMHWLRQGPGQRLEWIGWIDPENGDTEYAPKFQGKATFTTDTSANTAYLGLSSLRPEDTAVYYCNEGTPTGPYYFDYWGQGTLVTVSSGGGGSGGGGSGGGGSENVLTQSPSSMSASVGDRVNIACSASSSVSYMHWFQQKPGKSPKLWIYSTSNLASGVPSRFSGSGSGTDYSLTISSMQPEDAATYYCQQRSSYPLTFGGGTKLEIKAAAGSGGSGILVKQSPMLVAYDNAVNLSCKYSYNLFSREFRASLHKGLDSAVEVCVVYGNYSQQLQVYSKTGFNCDGKLGNESVTFYLQNLYVNQTDIYFCKIEVMYPPPYLDNEKSNGTIIHVKGKHLCPSPLFPGPSKPFWVLVVVGGVLACYSLLVTVAFIIFWVRSKRSRLLHSDYMNMTPRRPGPTRKHYQPYAPPRDFAAYRSCWLTKKKYSSSVHDPNGEYMFMRAVNTAKKSRLTDVTLKKVAKKPTNKAPHPKQEPQEINFPDDLPGSNTAAPVQETLHGCQPVTQEDGKESRISVQERQ

SEQ ID NO: 351 - protein, 659 aa, synthetic construct
  REGION 1..659: note = Synthetic polypeptide
MGVLLTQRTLLSLVLALLFPSMASMQVKLEQSGAEVVKPGASVKLSCKASGFNIKDSYMHWLRQGPGQRLEWIGWIDPENGDTEYAPKFQGKATFTTDTSANTAYLGLSSLRPEDTAVYYCNEGTPTGPYYFDYWGQGTLVTVSSGGGGSGGGGSGGGGSENVLTQSPSSMSASVGDRVNIACSASSSVSYMHWFQQKPGKSPKLWIYSTSNLASGVPSRFSGSGSGTDYSLTISSMQPEDAATYYCQQRSSYPLTFGGGTKLEIKAAAGSGGSGRDNETIWGVLGHGITLNIPNFQMTDDIDEVRWVRRGTLVAEFKRKKPPFLISETYEVLANGSLKIKKPMMRNDSGTYNVMVYGTNGMTRLEKDLDVRILERVSKPMIHWECPNTTLTCAVLQGTDFELKLYQGETLLNSLPQKNMSYQWTNLNAPFKCEAINPVSKESKMEVVNCPEKGLSFYVTVGVGAGGLLLVLLVALFIFCICKRRKRNRRRKDEELEIKASRTSTVERGPKPHSTPAAAAQNSVALQAPPPPGHHLQTPGHRPLPPGHRTREHQQKKRPPPSGTQIHQQKGPPLPRPRVQPKPPCGSGDGVSLPPPNKKVAKKPTNKAPHPKQEPQEINFPDDLPGSNTAAPVQETLHGCQPVTQEDGKESRISVQERQ

SEQ ID NO: 352 - protein, 590 aa, synthetic construct
  REGION 1..590: note = Synthetic polypeptide
MGVLLTQRTLLSLVLALLFPSMASMQVKLEQSGAEVVKPGASVKLSCKASGFNIKDSYMHWLRQGPGQRLEWIGWIDPENGDTEYAPKFQGKATFTTDTSANTAYLGLSSLRPEDTAVYYCNEGTPTGPYYFDYWGQGTLVTVSSGGGGSGGGGSGGGGSENVLTQSPSSMSASVGDRVNIACSASSSVSYMHWFQQKPGKSPKLWIYSTSNLASGVPSRFSGSGSGTDYSLTISSMQPEDAATYYCQQRSSYPLTFGGGTKLEIKAAAGSGGSGILVKQSPMLVAYDNAVNLSCKYSYNLFSREFRASLHKGLDSAVEVCVVYGNYSQQLQVYSKTGFNCDGKLGNESVTFYLQNLYVNQTDIYFCKIEVMYPPPYLDNEKSNGTIIHVKGKHLCPSPLFPGPSKPFWVLVVVGGVLACYSLLVTVAFIIFWVRSKRSRLLHSDYMNMTPRRPGPTRKHYQPYAPPRDFAAYRSKRRKRNRRRKDEELEIKASRTSTVERGPKPHSTPAAAAQNSVALQAPPPPGHHLQTPGHRPLPPGHRTREHQQKKRPPPSGTQIHQQKGPPLPRPRVQPKPPCGSGDGVSLPPPN

SEQ ID NO: 353 - protein, 652 aa, synthetic construct
  REGION 1..652: note = Synthetic polypeptide
MGVLLTQRTLLSLVLALLFPSMASMQVKLEQSGAEVVKPGASVKLSCKASGFNIKDSYMHWLRQGPGQRLEWIGWIDPENGDTEYAPKFQGKATFTTDTSANTAYLGLSSLRPEDTAVYYCNEGTPTGPYYFDYWGQGTLVTVSSGGGGSGGGGSGGGGSENVLTQSPSSMSASVGDRVNIACSASSSVSYMHWFQQKPGKSPKLWIYSTSNLASGVPSRFSGSGSGTDYSLTISSMQPEDAATYYCQQRSSYPLTFGGGTKLEIKAAAGSGGSGILVKQSPMLVAYDNAVNLSCKYSYNLFSREFRASLHKGLDSAVEVCVVYGNYSQQLQVYSKTGFNCDGKLGNESVTFYLQNLYVNQTDIYFCKIEVMYPPPYLDNEKSNGTIIHVKGKHLCPSPLFPGPSKPFWVLVVVGGVLACYSLLVTVAFIIFWVRSKRSRLLHSDYMNMTPRRPGPTRKHYQPYAPPRDFAAYRSKKVAKKPTNKAPHPKQEPQEINFPDDLPGSNTAAPVQETLHGCQPVTQEDGKESRISVQERQKRRKRNRRRKDEELEIKASRTSTVERGPKPHSTPAAAAQNSVALQAPPPPGHHLQTPGHRPLPPGHRTREHQQKKRPPPSGTQIHQQKGPPLPRPRVQPKPPCGSGDGVSLPPPN

SEQ ID NO: 354 - protein, 517 aa, synthetic construct
  REGION 1..517: note = Synthetic polypeptide
MGVLLTQRTLLSLVLALLFPSMASMQVKLEQSGAEVVKPGASVKLSCKASGFNIKDSYMHWLRQGPGQRLEWIGWIDPENGDTEYAPKFQGKATFTTDTSANTAYLGLSSLRPEDTAVYYCNEGTPTGPYYFDYWGQGTLVTVSSGGGGSGGGGSGGGGSENVLTQSPSSMSASVGDRVNIACSASSSVSYMHWFQQKPGKSPKLWIYSTSNLASGVPSRFSGSGSGTDYSLTISSMQPEDAATYYCQQRSSYPLTFGGGTKLEIKAAAGSGGSGILVKQSPMLVAYDNAVNLSCKYSYNLFSREFRASLHKGLDSAVEVCVVYGNYSQQLQVYSKTGFNCDGKLGNESVTFYLQNLYVNQTDIYFCKIEVMYPPPYLDNEKSNGTIIHVKGKHLCPSPLFPGPSKPFWVLVVVGGVLACYSLLVTVAFIIFWVRSKRSRLLHSDYMNMTPRRPGPTRKHYQPYAPPRDFAAYRSKRGRKKLLYIFKQPFMRPVQTTQEEDGCSCRFPEEEEGGCEL

SEQ ID NO: 355 - protein, 579 aa, synthetic construct
  REGION 1..579: note = Synthetic polypeptide
MGVLLTQRTLLSLVLALLFPSMASMQVKLEQSGAEVVKPGASVKLSCKASGFNIKDSYMHWLRQGPGQRLEWIGWIDPENGDTEYAPKFQGKATFTTDTSANTAYLGLSSLRPEDTAVYYCNEGTPTGPYYFDYWGQGTLVTVSSGGGGSGGGGSGGGGSENVLTQSPSSMSASVGDRVNIACSASSSVSYMHWFQQKPGKSPKLWIYSTSNLASGVPSRFSGSGSGTDYSLTISSMQPEDAATYYCQQRSSYPLTFGGGTKLEIKAAAGSGGSGILVKQSPMLVAYDNAVNLSCKYSYNLFSREFRASLHKGLDSAVEVCVVYGNYSQQLQVYSKTGFNCDGKLGNESVTFYLQNLYVNQTDIYFCKIEVMYPPPYLDNEKSNGTIIHVKGKHLCPSPLFPGPSKPFWVLVVVGGVLACYSLLVTVAFIIFWVRSKRSRLLHSDYMNMTPRRPGPTRKHYQPYAPPRDFAAYRSKKVAKKPTNKAPHPKQEPQEINFPDDLPGSNTAAPVQETLHGCQPVTQEDGKESRISVQERQKRGRKKLLYIFKQPFMRPVQTTQEEDGCSCRFPEEEEGGCEL

SEQ ID NO: 356 - protein, 499 aa, synthetic construct
  REGION 1..499: note = Synthetic polypeptide
MGVLLTQRTLLSLVLALLFPSMASMQVKLEQSGAEVVKPGASVKLSCKASGFNIKDSYMHWLRQGPGQRLEWIGWIDPENGDTEYAPKFQGKATFTTDTSANTAYLGLSSLRPEDTAVYYCNEGTPTGPYYFDYWGQGTLVTVSSGGGGSGGGGSGGGGSENVLTQSPSSMSASVGDRVNIACSASSSVSYMHWFQQKPGKSPKLWIYSTSNLASGVPSRFSGSGSGTDYSLTISSMQPEDAATYYCQQRSSYPLTFGGGTKLEIKAAAGSGGSGILVKQSPMLVAYDNAVNLSCKYSYNLFSREFRASLHKGLDSAVEVCVVYGNYSQQLQVYSKTGFNCDGKLGNESVTFYLQNLYVNQTDIYFCKIEVMYPPPYLDNEKSNGTIIHVKGKHLCPSPLFPGPSKPFWVLVVVGGVLACYSLLVTVAFIIFWVRSKRSRLLHSDYMNMTPRRPGPTRKHYQPYAPPRDFAAYRSLCARPRRSPAQEDGKVYINMPGRG

SEQ ID NO: 357 - protein, 561 aa, synthetic construct
  REGION 1..561: note = Synthetic polypeptide
MGVLLTQRTLLSLVLALLFPSMASMQVKLEQSGAEVVKPGASVKLSCKASGFNIKDSYMHWLRQGPGQRLEWIGWIDPENGDTEYAPKFQGKATFTTDTSANTAYLGLSSLRPEDTAVYYCNEGTPTGPYYFDYWGQGTLVTVSSGGGGSGGGGSGGGGSENVLTQSPSSMSASVGDRVNIACSASSSVSYMHWFQQKPGKSPKLWIYSTSNLASGVPSRFSGSGSGTDYSLTISSMQPEDAATYYCQQRSSYPLTFGGGTKLEIKAAAGSGGSGILVKQSPMLVAYDNAVNLSCKYSYNLFSREFRASLHKGLDSAVEVCVVYGNYSQQLQVYSKTGFNCDGKLGNESVTFYLQNLYVNQTDIYFCKIEVMYPPPYLDNEKSNGTIIHVKGKHLCPSPLFPGPSKPFWVLVVVGGVLACYSLLVTVAFIIFWVRSKRSRLLHSDYMNMTPRRPGPTRKHYQPYAPPRDFAAYRSKKVAKKPTNKAPHPKQEPQEINFPDDLPGSNTAAPVQETLHGCQPVTQEDGKESRISVQERQLCARPRRSPAQEDGKVYINMPGRG

SEQ ID NO: 358 - protein, 517 aa, synthetic construct
  REGION 1..517: note = Synthetic polypeptide
MGVLLTQRTLLSLVLALLFPSMASMQVKLEQSGAEVVKPGASVKLSCKASGFNIKDSYMHWLRQGPGQRLEWIGWIDPENGDTEYAPKFQGKATFTTDTSANTAYLGLSSLRPEDTAVYYCNEGTPTGPYYFDYWGQGTLVTVSSGGGGSGGGGSGGGGSENVLTQSPSSMSASVGDRVNIACSASSSVSYMHWFQQKPGKSPKLWIYSTSNLASGVPSRFSGSGSGTDYSLTISSMQPEDAATYYCQQRSSYPLTFGGGTKLEIKAAAGSGGSGILVKQSPMLVAYDNAVNLSCKYSYNLFSREFRASLHKGLDSAVEVCVVYGNYSQQLQVYSKTGFNCDGKLGNESVTFYLQNLYVNQTDIYFCKIEVMYPPPYLDNEKSNGTIIHVKGKHLCPSPLFPGPSKPFWVLVVVGGVLACYSLLVTVAFIIFWVRSKRSRLLHSDYMNMTPRRPGPTRKHYQPYAPPRDFAAYRSALYLLRRDQRLPPDAHKPPGGGSFRTPIQEEQADAHSTLAKI

SEQ ID NO: 359 - protein, 579 aa, synthetic construct
  REGION 1..579: note = Synthetic polypeptide
MGVLLTQRTLLSLVLALLFPSMASMQVKLEQSGAEVVKPGASVKLSCKASGFNIKDSYMHWLRQGPGQRLEWIGWIDPENGDTEYAPKFQGKATFTTDTSANTAYLGLSSLRPEDTAVYYCNEGTPTGPYYFDYWGQGTLVTVSSGGGGSGGGGSGGGGSENVLTQSPSSMSASVGDRVNIACSASSSVSYMHWFQQKPGKSPKLWIYSTSNLASGVPSRFSGSGSGTDYSLTISSMQPEDAATYYCQQRSSYPLTFGGGTKLEIKAAAGSGGSGILVKQSPMLVAYDNAVNLSCKYSYNLFSREFRASLHKGLDSAVEVCVVYGNYSQQLQVYSKTGFNCDGKLGNESVTFYLQNLYVNQTDIYFCKIEVMYPPPYLDNEKSNGTIIHVKGKHLCPSPLFPGPSKPFWVLVVVGGVLACYSLLVTVAFIIFWVRSKRSRLLHSDYMNMTPRRPGPTRKHYQPYAPPRDFAAYRSKKVAKKPTNKAPHPKQEPQEINFPDDLPGSNTAAPVQETLHGCQPVTQEDGKESRISVQERQALYLLRRDQRLPPDAHKPPGGGSFRTPIQEEQADAHSTLAKI

SEQ ID NO: 360 - protein, 295 aa, synthetic construct
  REGION 1..295: note = Synthetic polypeptide
MQIPQAPWPVVWAVLQLGWRPGWFLDSPDRPWNPPTFSPALLVVTEGDNATFTCSFSNTSESFVLNWYRMSPSNQTDKLAAFPEDRSQPGQDCRFRVTQLPNGRDFHMSVVRARRNDSGTYLCGAISLAPKAQIKESLRAELRVTERRAEVPTAHPSPSPRPAGQFWVLVVVGGVLACYSLLVTVAFIIFWVRSKRSRLLHSDYMNMTPRRPGPTRKHYQPYAPPRDFAAYRSKKVAKKPTNKAPHPKQEPQEINFPDDLPGSNTAAPVQETLHGCQPVTQEDGKESRISVQERQ

SEQ ID NO: 361 - protein, 538 aa, synthetic construct
  REGION 1..538: note = Synthetic polypeptide
MGVLLTQRTLLSLVLALLFPSMASMQVQLQQSGAELVRSGTSVKLSCTASGFNIKDSYMHWLRQGPEQGLEWIGWIDPENGDTEYAPKFQGKATFTTDTSSNTAYLQLSSLTSEDTAVYYCNEGTPTGPYYFDYWGQGTTVTVSSGGGGSGGGGSGGGGSENVLTQSPAIMSASPGEKVTITCSASSSVSYMHWFQQKPGTSPKLWIYSTSNLASGVPARFSGSGSGTSYSLTISRMEAEDAATYYCQQRSSYPLTFGAGTKLELKRAAAGSGGSGILVKQSPMLVAYDNAVNLSCKYSYNLFSREFRASLHKGLDSAVEVCVVYGNYSQQLQVYSKTGFNCDGKLGNESVTFYLQNLYVNQTDIYFCKIEVMYPPPYLDNEKSNGTIIHVKGKHLCPSPLFPGPSKPFWVLVVVGGVLACYSLLVTVAFIIFWVRSKRSRLLHSDYMNMTPRRPGPTRKHYQPYAPPRDFAAYRSKKVAKKPTNKAPHPKQEPQEINFPDDLPGSNTAAPVQETLHGCQPVTQEDGKESRIAVQARQ

SEQ ID NO: 362 - protein, 538 aa, synthetic construct
  REGION 1..538: note = Synthetic polypeptide
MGVLLTQRTLLSLVLALLFPSMASMQVQLQQSGAELVRSGTSVKLSCTASGFNIKDSYMHWLRQGPEQGLEWIGWIDPENGDTEYAPKFQGKATFTTDTSSNTAYLQLSSLTSEDTAVYYCNEGTPTGPYYFDYWGQGTTVTVSSGGGGSGGGGSGGGGSENVLTQSPAIMSASPGEKVTITCSASSSVSYMHWFQQKPGTSPKLWIYSTSNLASGVPARFSGSGSGTSYSLTISRMEAEDAATYYCQQRSSYPLTFGAGTKLELKRAAAGSGGSGILVKQSPMLVAYDNAVNLSCKYSYNLFSREFRASLHKGLDSAVEVCVVYGNYSQQLQVYSKTGFNCDGKLGNESVTFYLQNLYVNQTDIYFCKIEVMYPPPYLDNEKSNGTIIHVKGKHLCPSPLFPGPSKPFWVLVVVGGVLACYSLLVTVAFIIFWVRSKRSRLLHSDYMNMTPRRPGPTRKHYQPYAPPRDFAAYRSKKVAKKPTNKAPHPKQEPQEINFPDDLPGSNTAAAVAEALHGCQPVTQEDGKESRISVQERQ

SEQ ID NO: 363 - protein, 538 aa, synthetic construct
  REGION 1..538: note = Synthetic polypeptide
MGVLLTQRTLLSLVLALLFPSMASMQVQLQQSGAELVRSGTSVKLSCTASGFNIKDSYMHWLRQGPEQGLEWIGWIDPENGDTEYAPKFQGKATFTTDTSSNTAYLQLSSLTSEDTAVYYCNEGTPTGPYYFDYWGQGTTVTVSSGGGGSGGGGSGGGGSENVLTQSPAIMSASPGEKVTITCSASSSVSYMHWFQQKPGTSPKLWIYSTSNLASGVPARFSGSGSGTSYSLTISRMEAEDAATYYCQQRSSYPLTFGAGTKLELKRAAAGSGGSGILVKQSPMLVAYDNAVNLSCKYSYNLFSREFRASLHKGLDSAVEVCVVYGNYSQQLQVYSKTGFNCDGKLGNESVTFYLQNLYVNQTDIYFCKIEVMYPPPYLDNEKSNGTIIHVKGKHLCPSPLFPGPSKPFWVLVVVGGVLACYSLLVTVAFIIFWVRSKRSRLLHSDYMNMTPRRPGPTRKHYQPYAPPRDFAAYRSKKVAKKPTNKAPHPKQEAQAINFPDDLPGSNTAAPVQETLHGCQPVTQEDGKESRISVQERQ

SEQ ID NO: 364 - protein, 538 aa, synthetic construct
  REGION 1..538: note = Synthetic polypeptide
MGVLLTQRTLLSLVLALLFPSMASMQVQLQQSGAELVRSGTSVKLSCTASGFNIKDSYMHWLRQGPEQGLEWIGWIDPENGDTEYAPKFQGKATFTTDTSSNTAYLQLSSLTSEDTAVYYCNEGTPTGPYYFDYWGQGTTVTVSSGGGGSGGGGSGGGGSENVLTQSPAIMSASPGEKVTITCSASSSVSYMHWFQQKPGTSPKLWIYSTSNLASGVPARFSGSGSGTSYSLTISRMEAEDAATYYCQQRSSYPLTFGAGTKLELKRAAAGSGGSGILVKQSPMLVAYDNAVNLSCKYSYNLFSREFRASLHKGLDSAVEVCVVYGNYSQQLQVYSKTGFNCDGKLGNESVTFYLQNLYVNQTDIYFCKIEVMYPPPYLDNEKSNGTIIHVKGKHLCPSPLFPGPSKPFWVLVVVGGVLACYSLLVTVAFIIFWVRSKRSRLLHSDYMNMTPRRPGPTRKHYQPYAPPRDFAAYRSKKVAKKPTNKAAHPKQEPQEINFPDDLPGSNTAAPVQETLHGCQPVTQEDGKESRISVQERQ

SEQ ID NO: 365 - protein, 538 aa, synthetic construct
  REGION 1..538: note = Synthetic polypeptide
MGVLLTQRTLLSLVLALLFPSMASMQVQLQQSGAELVRSGTSVKLSCTASGFNIKDSYMHWLRQGPEQGLEWIGWIDPENGDTEYAPKFQGKATFTTDTSSNTAYLQLSSLTSEDTAVYYCNEGTPTGPYYFDYWGQGTTVTVSSGGGGSGGGGSGGGGSENVLTQSPAIMSASPGEKVTITCSASSSVSYMHWFQQKPGTSPKLWIYSTSNLASGVPARFSGSGSGTSYSLTISRMEAEDAATYYCQQRSSYPLTFGAGTKLELKRAAAGSGGSGILVKQSPMLVAYDNAVNLSCKYSYNLFSREFRASLHKGLDSAVEVCVVYGNYSQQLQVYSKTGFNCDGKLGNESVTFYLQNLYVNQTDIYFCKIEVMYPPPYLDNEKSNGTIIHVKGKHLCPSPLFPGPSKPFWVLVVVGGVLACYSLLVTVAFIIFWVRSKRSRLLHSDYMNMTPRRPGPTRKHYQPYAPPRDFAAYRSKKVAKKPTNKAPHPKQEPQEINFPDDLPGSNTAAPVQETLHGCQPVTAEDGKESRISVQERQ

SEQ ID NO: 366 - protein, 600 aa, synthetic construct
  REGION 1..600: note = Synthetic polypeptide
MGVLLTQRTLLSLVLALLFPSMASMQVQLQQSGAELVRSGTSVKLSCTASGFNIKDSYMHWLRQGPEQGLEWIGWIDPENGDTEYAPKFQGKATFTTDTSSNTAYLQLSSLTSEDTAVYYCNEGTPTGPYYFDYWGQGTTVTVSSGGGGSGGGGSGGGGSENVLTQSPAIMSASPGEKVTITCSASSSVSYMHWFQQKPGTSPKLWIYSTSNLASGVPARFSGSGSGTSYSLTISRMEAEDAATYYCQQRSSYPLTFGAGTKLELKRAAAGSGGSGILVKQSPMLVAYDNAVNLSCKYSYNLFSREFRASLHKGLDSAVEVCVVYGNYSQQLQVYSKTGFNCDGKLGNESVTFYLQNLYVNQTDIYFCKIEVMYPPPYLDNEKSNGTIIHVKGKHLCPSPLFPGPSKPFWVLVVVGGVLACYSLLVTVAFIIFWVRSKRSRLLHSDYMNMTPRRPGPTRKHYQPYAPPRDFAAYRSKKVAKKPTNKAPHPKQEPQEINFPDDLPGSNTAAPVQETLHGCQPVTAEDGKESRISVQERQKKVAKKPTNKAPHPKQEPQEINFPDDLPGSNTAAPVQETLHGCQPVTAEDGKESRISVQERQ

SEQ ID NO: 367 - protein, 538 aa, synthetic construct
  REGION 1..538: note = Synthetic polypeptide
MGVLLTQRTLLSLVLALLFPSMASMQVQLQQSGAELVRSGTSVKLSCTASGFNIKDSYMHWLRQGPEQGLEWIGWIDPENGDTEYAPKFQGKATFTTDTSSNTAYLQLSSLTSEDTAVYYCNEGTPTGPYYFDYWGQGTTVTVSSGGGGSGGGGSGGGGSENVLTQSPAIMSASPGEKVTITCSASSSVSYMHWFQQKPGTSPKLWIYSTSNLASGVPARFSGSGSGTSYSLTISRMEAEDAATYYCQQRSSYPLTFGAGTKLELKRAAAGSGGSGILVKQSPMLVAYDNAVNLSCKYSYNLFSREFRASLHKGLDSAVEVCVVYGNYSQQLQVYSKTGFNCDGKLGNESVTFYLQNLYVNQTDIYFCKIEVMYPPPYLDNEKSNGTIIHVKGKHLCPSPLFPGPSKPFWVLVVVGGVLACYSLLVTVAFIIFWVRSKRSRLLHSDYMNMTPRRPGPTRKHYQAYAAPRDFAAYRSKKVAKKPTNKAPHPKQEPQEINFPDDLPGSNTAAPVQETLHGCQPVTQEDGKESRISVQERQ

SEQ ID NO: 368 - protein, 538 aa, synthetic construct
  REGION 1..538: note = Synthetic polypeptide
MGVLLTQRTLLSLVLALLFPSMASMQVQLQQSGAELVRSGTSVKLSCTASGFNIKDSYMHWLRQGPEQGLEWIGWIDPENGDTEYAPKFQGKATFTTDTSSNTAYLQLSSLTSEDTAVYYCNEGTPTGPYYFDYWGQGTTVTVSSGGGGSGGGGSGGGGSENVLTQSPAIMSASPGEKVTITCSASSSVSYMHWFQQKPGTSPKLWIYSTSNLASGVPARFSGSGSGTSYSLTISRMEAEDAATYYCQQRSSYPLTFGAGTKLELKRAAAGSGGSGILVKQSPMLVAYDNAVNLSCKYSYNLFSREFRASLHKGLDSAVEVCVVYGNYSQQLQVYSKTGFNCDGKLGNESVTFYLQNLYVNQTDIYFCKIEVMYPPPYLDNEKSNGTIIHVKGKHLCPSPLFPGPSKPFWVLVVVGGVLACYSLLVTVAFIIFWVRSKRSRLLHSDFMNMTPRRPGPTRKHYQPYAPPRDFAAYRSKKVAKKPTNKAPHPKQEPQEINFPDDLPGSNTAAPVQETLHGCQPVTQEDGKESRISVQERQ

SEQ ID NO: 369 - protein, 497 aa, synthetic construct
  REGION 1..497: note = Synthetic polypeptide
MGVLLTQRTLLSLVLALLFPSMASMQVQLQQSGAELVRSGTSVKLSCTASGFNIKDSYMHWLRQGPEQGLEWIGWIDPENGDTEYAPKFQGKATFTTDTSSNTAYLQLSSLTSEDTAVYYCNEGTPTGPYYFDYWGQGTTVTVSSGGGGSGGGGSGGGGSENVLTQSPAIMSASPGEKVTITCSASSSVSYMHWFQQKPGTSPKLWIYSTSNLASGVPARFSGSGSGTSYSLTISRMEAEDAATYYCQQRSSYPLTFGAGTKLELKRAAAGSGGSGILVKQSPMLVAYDNAVNLSCKYSYNLFSREFRASLHKGLDSAVEVCVVYGNYSQQLQVYSKTGFNCDGKLGNESVTFYLQNLYVNQTDIYFCKIEVMYPPPYLDNEKSNGTIIHVKGKHLCPSPLFPGPSKPFWVLVVVGGVLACYSLLVTVAFIIFWVKKVAKKPTNKAPHPKQEPQEINFPDDLPGSNTAAPVQETLHGCQPVTQEDGKESRISVQERQ

SEQ ID NO: 370 - protein, 543 aa, synthetic construct
  REGION 1..543: note = Synthetic polypeptide
MGVLLTQRTLLSLVLALLFPSMASMQVQLQQSGAELVRSGTSVKLSCTASGFNIKDSYMHWLRQGPEQGLEWIGWIDPENGDTEYAPKFQGKATFTTDTSSNTAYLQLSSLTSEDTAVYYCNEGTPTGPYYFDYWGQGTTVTVSSGGGGSGGGGSGGGGSENVLTQSPAIMSASPGEKVTITCSASSSVSYMHWFQQKPGTSPKLWIYSTSNLASGVPARFSGSGSGTSYSLTISRMEAEDAATYYCQQRSSYPLTFGAGTKLELKRAAAGSGGSGILVKQSPMLVAYDNAVNLSCKYSYNLFSREFRASLHKGLDSAVEVCVVYGNYSQQLQVYSKTGFNCDGKLGNESVTFYLQNLYVNQTDIYFCKIEVMYPPPYLDNEKSNGTIIHVKGKHLCPSPLFPGPSKPFWVLVVVGGVLACYSLLVTVAFIIFWVRFSVVKRGRKKLLYIFKQPFMRPVQTTQEEDGCSCRFPEEEEGGCEKKVAKKPTNKAPHPKQEPQEINFPDDLPGSNTAAPVQETLHGCQPVTQEDGKESRISVQERQ

SEQ ID NO: 371 - protein, 534 aa, synthetic construct
  REGION 1..534: note = Synthetic polypeptide
MGVLLTQRTLLSLVLALLFPSMASMQVQLQQSGAELVRSGTSVKLSCTASGFNIKDSYMHWLRQGPEQGLEWIGWIDPENGDTEYAPKFQGKATFTTDTSSNTAYLQLSSLTSEDTAVYYCNEGTPTGPYYFDYWGQGTTVTVSSGGGGSGGGGSGGGGSENVLTQSPAIMSASPGEKVTITCSASSSVSYMHWFQQKPGTSPKLWIYSTSNLASGVPARFSGSGSGTSYSLTISRMEAEDAATYYCQQRSSYPLTFGAGTKLELKRAAAGSGGSGILVKQSPMLVAYDNAVNLSCKYSYNLFSREFRASLHKGLDSAVEVCVVYGNYSQQLQVYSKTGFNCDGKLGNESVTFYLQNLYVNQTDIYFCKIEVMYPPPYLDNEKSNGTIIHVKGKHLCPSPLFPGPSKPFWVLVVVGGVLACYSLLVTVAFIIFWVRRDQRLPPDAHKPPGGGSFRTPIQEEQADAHSTLAKIKKVAKKPTNKAPHPKQEPQEINFPDDLPGSNTAAPVQETLHGCQPVTQEDGKESRISVQERQ

SEQ ID NO: 372 - protein, 613 aa, synthetic construct
  REGION 1..613: note = Synthetic polypeptide
MGVLLTQRTLLSLVLALLFPSMASMQVQLQQSGAELVRSGTSVKLSCTASGFNIKDSYMHWLRQGPEQGLEWIGWIDPENGDTEYAPKFQGKATFTTDTSSNTAYLQLSSLTSEDTAVYYCNEGTPTGPYYFDYWGQGTTVTVSSGGGGSGGGGSGGGGSENVLTQSPAIMSASPGEKVTITCSASSSVSYMHWFQQKPGTSPKLWIYSTSNLASGVPARFSGSGSGTSYSLTISRMEAEDAATYYCQQRSSYPLTFGAGTKLELKRAAAGSGGSGILVKQSPMLVAYDNAVNLSCKYSYNLFSREFRASLHKGLDSAVEVCVVYGNYSQQLQVYSKTGFNCDGKLGNESVTFYLQNLYVNQTDIYFCKIEVMYPPPYLDNEKSNGTIIHVKGKHLCPSPLFPGPSKPFWVLVVVGGVLACYSLLVTVAFIIFWVKRKKQRSRRNDEELETRAHRVATEERGRKPHQIPASTPQNPATSQHPPPPPGHRSQAPSHRPPPPGHRVQHQPQKRPPAPSGTQVHQQKGPPLPRPRVQPKPPHGAAENSLSPSSNKKVAKKPTNKAPHPKQEPQEINFPDDLPGSNTAAPVQETLHGCQPVTQEDGKESRISVQERQ

SEQ ID NO: 373 - protein, 555 aa, synthetic construct
  REGION 1..555: note = Synthetic polypeptide
MGVLLTQRTLLSLVLALLFPSMASMQVQLQQSGAELVRSGTSVKLSCTASGFNIKDSYMHWLRQGPEQGLEWIGWIDPENGDTEYAPKFQGKATFTTDTSSNTAYLQLSSLTSEDTAVYYCNEGTPTGPYYFDYWGQGTTVTVSSGGGGSGGGGSGGGGSENVLTQSPAIMSASPGEKVTITCSASSSVSYMHWFQQKPGTSPKLWIYSTSNLASGVPARFSGSGSGTSYSLTISRMEAEDAATYYCQQRSSYPLTFGAGTKLELKRAAAGSGGSGILVKQSPMLVAYDNAVNLSCKYSYNLFSREFRASLHKGLDSAVEVCVVYGNYSQQLQVYSKTGFNCDGKLGNESVTFYLQNLYVNQTDIYFCKIEVMYPPPYLDNEKSNGTIIHVKGKHLCPSPLFPGPSKPFWVLVVVGGVLACYSLLVTVAFIIFWVQLGLHIWQLRSQCMWPRETQLLLEVPPSTEDARSCQFPEEERGERSAEEKGRLGDLWVKKVAKKPTNKAPHPKQEPQEINFPDDLPGSNTAAPVQETLHGCQPVTQEDGKESRISVQERQ

SEQ ID NO: 374 - protein, 544 aa, synthetic construct
  REGION 1..544: note = Synthetic polypeptide
MGVLLTQRTLLSLVLALLFPSMASMQVQLQQSGAELVRSGTSVKLSCTASGFNIKDSYMHWLRQGPEQGLEWIGWIDPENGDTEYAPKFQGKATFTTDTSSNTAYLQLSSLTSEDTAVYYCNEGTPTGPYYFDYWGQGTTVTVSSGGGGSGGGGSGGGGSENVLTQSPAIMSASPGEKVTITCSASSSVSYMHWFQQKPGTSPKLWIYSTSNLASGVPARFSGSGSGTSYSLTISRMEAEDAATYYCQQRSSYPLTFGAGTKLELKRAAAGSGGSGILVKQSPMLVAYDNAVNLSCKYSYNLFSREFRASLHKGLDSAVEVCVVYGNYSQQLQVYSKTGFNCDGKLGNESVTFYLQNLYVNQTDIYFCKIEVMYPPPYLDNEKSNGTIIHVKGKHLCPSPLFPGPSKPFWVLVVVGGVLACYSLLVTVAFIIFWVKLLMIIHDRREFAKFEKEKMNAKWDTGENPIYKSAVTTVVNPKYEGKKKVAKKPTNKAPHPKQEPQEINFPDDLPGSNTAAPVQETLHGCQPVTQEDGKESRISVQERQ

SEQ ID NO: 375 - protein, 572 aa, synthetic construct
  REGION 1..572: note = Synthetic polypeptide
MGVLLTQRTLLSLVLALLFPSMASMQVQLQQSGAELVRSGTSVKLSCTASGFNIKDSYMHWLRQGPEQGLEWIGWIDPENGDTEYAPKFQGKATFTTDTSSNTAYLQLSSLTSEDTAVYYCNEGTPTGPYYFDYWGQGTTVTVSSGGGGSGGGGSGGGGSENVLTQSPAIMSASPGEKVTITCSASSSVSYMHWFQQKPGTSPKLWIYSTSNLASGVPARFSGSGSGTSYSLTISRMEAEDAATYYCQQRSSYPLTFGAGTKLELKRAAAGSGGSGILVKQSPMLVAYDNAVNLSCKYSYNLFSREFRASLHKGLDSAVEVCVVYGNYSQQLQVYSKTGFNCDGKLGNESVTFYLQNLYVNQTDIYFCKIEVMYPPPYLDNEKSNGTIIHVKGKHLCPSPLFPGPSKPFWVLVVVGGVLACYSLLVTVAFIIFWVRRRGKTNHYQTTVEKKSLTIYAQVQKPGPLQKKLDSFPAQDPCTTIYVAATEPVPESVQETNSITVYASVTLPESKKVAKKPTNKAPHPKQEPQEINFPDDLPGSNTAAPVQETLHGCQPVTQEDGKESRISVQERQ

SEQ ID NO: 376 - protein, 421 aa, synthetic construct
  REGION 1..421: note = Synthetic polypeptide
MGVLLTQRTLLSLVLALLFPSMASMQVQLQQSGAELVRSGTSVKLSCTASGFNIKDSYMHWLRQGPEQGLEWIGWIDPENGDTEYAPKFQGKATFTTDTSSNTAYLQLSSLTSEDTAVYYCNEGTPTGPYYFDYWGQGTTVTVSSGGGGSGGGGSGGGGSENVLTQSPAIMSASPGEKVTITCSASSSVSYMHWFQQKPGTSPKLWIYSTSNLASGVPARFSGSGSGTSYSLTISRMEAEDAATYYCQQRSSYPLTFGAGTKLELKRAAAGSGGSGFVPVFLPAKPTTTPAPRPPTPAPTIASQPLSLRPEACRPAAGGAVHTRGLDFACDIYIWAPLAGTCGVLLLSLVITLYCNHRNKKVAKKPTNKAPHPKQEPQEINFPDDLPGSNTAAPVQETLHGCQPVTQEDGKESRISVQERQ

SEQ ID NO: 377 - protein, 467 aa, synthetic construct
  REGION 1..467: note = Synthetic polypeptide
MGVLLTQRTLLSLVLALLFPSMASMQVQLQQSGAELVRSGTSVKLSCTASGFNIKDSYMHWLRQGPEQGLEWIGWIDPENGDTEYAPKFQGKATFTTDTSSNTAYLQLSSLTSEDTAVYYCNEGTPTGPYYFDYWGQGTTVTVSSGGGGSGGGGSGGGGSENVLTQSPAIMSASPGEKVTITCSASSSVSYMHWFQQKPGTSPKLWIYSTSNLASGVPARFSGSGSGTSYSLTISRMEAEDAATYYCQQRSSYPLTFGAGTKLELKRAAAGSGGSGFVPVFLPAKPTTTPAPRPPTPAPTIASQPLSLRPEACRPAAGGAVHTRGLDFACDIYIWAPLAGTCGVLLLSLVITLYCNHRNRFSVVKRGRKKLLYIFKQPFMRPVQTTQEEDGCSCRFPEEEEGGCEKKVAKKPTNKAPHPKQEPQEINFPDDLPGSNTAAPVQETLHGCQPVTQEDGKESRISVQERQ

SEQ ID NO: 378 - protein, 457 aa, synthetic construct
  REGION 1..457: note = Synthetic polypeptide
MGVLLTQRTLLSLVLALLFPSMASMQVQLQQSGAELVRSGTSVKLSCTASGFNIKDSYMHWLRQGPEQGLEWIGWIDPENGDTEYAPKFQGKATFTTDTSSNTAYLQLSSLTSEDTAVYYCNEGTPTGPYYFDYWGQGTTVTVSSGGGGSGGGGSGGGGSENVLTQSPAIMSASPGEKVTITCSASSSVSYMHWFQQKPGTSPKLWIYSTSNLASGVPARFSGSGSGTSYSLTISRMEAEDAATYYCQQRSSYPLTFGAGTKLELKRAAAGSGGSGFVPVFLPAKPTTTPAPRPPTPAPTIASQPLSLRPEACRPAAGGAVHTRGLDFACDIYIWAPLAGTCGVLLLSLVITLYCNHRNRRDQRLPPDAHKPPGGGSFRTPIQEEQADAHSTLAKIKKVAKKPTNKAPHPKQEPQEINFPDDLPGSNTAAPVQETLHGCQPVTQEDGKSRISVQERQ

SEQ ID NO: 379 - protein, 537 aa, synthetic construct
  REGION 1..537: note = Synthetic polypeptide
MGVLLTQRTLLSLVLALLFPSMASMQVQLQQSGAELVRSGTSVKLSCTASGFNIKDSYMHWLRQGPEQGLEWIGWIDPENGDTEYAPKFQGKATFTTDTSSNTAYLQLSSLTSEDTAVYYCNEGTPTGPYYFDYWGQGTTVTVSSGGGGSGGGGSGGGGSENVLTQSPAIMSASPGEKVTITCSASSSVSYMHWFQQKPGTSPKLWIYSTSNLASGVPARFSGSGSGTSYSLTISRMEAEDAATYYCQQRSSYPLTFGAGTKLELKRAAAGSGGSGFVPVFLPAKPTTTPAPRPPTPAPTIASQPLSLRPEACRPAAGGAVHTRGLDFACDIYIWAPLAGTCGVLLLSLVITLYCNHRNKRKKQRSRRNDEELETRAHRVATEERGRKPHQIPASTPQNPATSQHPPPPPGHRSQAPSHRPPPPGHRVQHQPQKRPPAPSGTQVHQQKGPPLPRPRVQPKPPHGAAENSLSPSSNKKVAKKPTNKAPHPKQEPQEINFPDDLPGSNTAAPVQETLHGCQPVTQEDGKESRISVQERQ

SEQ ID NO: 380 - protein, 479 aa, synthetic construct
  REGION 1..479: note = Synthetic polypeptide
MGVLLTQRTLLSLVLALLFPSMASMQVQLQQSGAELVRSGTSVKLSCTASGFNIKDSYMHWLRQGPEQGLEWIGWIDPENGDTEYAPKFQGKATFTTDTSSNTAYLQLSSLTSEDTAVYYCNEGTPTGPYYFDYWGQGTTVTVSSGGGGSGGGGSGGGGSENVLTQSPAIMSASPGEKVTITCSASSSVSYMHWFQQKPGTSPKLWIYSTSNLASGVPARFSGSGSGTSYSLTISRMEAEDAATYYCQQRSSYPLTFGAGTKLELKRAAAGSGGSGFVPVFLPAKPTTTPAPRPPTPAPTIASQPLSLRPEACRPAAGGAVHTRGLDFACDIYIWAPLAGTCGVLLLSLVITLYCNHRNQLGLHIWQLRSQCMWPRETQLLLEVPPSTEDARSCQFPEEERGERSAEEKGRLGDLWVKKVAKKPTNKAPHPKQEPQEINFPDDLPGSNTAAPVQETLHGCQPVTQEDGKESRISVQERQ

SEQ ID NO: 381 - protein, 468 aa, synthetic construct
  REGION 1..468: note = Synthetic polypeptide
MGVLLTQRTLLSLVLALLFPSMASMQVQLQQSGAELVRSGTSVKLSCTASGFNIKDSYMHWLRQGPEQGLEWIGWIDPENGDTEYAPKFQGKATFTTDTSSNTAYLQLSSLTSEDTAVYYCNEGTPTGPYYFDYWGQGTTVTVSSGGGGSGGGGSGGGGSENVLTQSPAIMSASPGEKVTITCSASSSVSYMHWFQQKPGTSPKLWIYSTSNLASGVPARFSGSGSGTSYSLTISRMEAEDAATYYCQQRSSYPLTFGAGTKLELKRAAAGSGGSGFVPVFLPAKPTTTPAPRPPTPAPTIASQPLSLRPEACRPAAGGAVHTRGLDFACDIYIWAPLAGTCGVLLLSLVITLYCNHRNKLLMIIHDRREFAKFEKEKMNAKWDTGENPIYKSAVTTVVNPKYEGKKKVAKKPTNKAPHPKQEPQEINFPDDLPGSNTAAPVQETLHGCQPVTQEDGKESRISVQERQ

SEQ ID NO: 382 - protein, 496 aa, synthetic construct
  REGION 1..496: note = Synthetic polypeptide
MGVLLTQRTLLSLVLALLFPSMASMQVQLQQSGAELVRSGTSVKLSCTASGFNIKDSYMHWLRQGPEQGLEWIGWIDPENGDTEYAPKFQGKATFTTDTSSNTAYLQLSSLTSEDTAVYYCNEGTPTGPYYFDYWGQGTTVTVSSGGGGSGGGGSGGGGSENVLTQSPAIMSASPGEKVTITCSASSSVSYMHWFQQKPGTSPKLWIYSTSNLASGVPARFSGSGSGTSYSLTISRMEAEDAATYYCQQRSSYPLTFGAGTKLELKRAAAGSGGSGFVPVFLPAKPTTTPAPRPPTPAPTIASQPLSLRPEACRPAAGGAVHTRGLDFACDIYIWAPLAGTCGVLLLSLVITLYCNHRNRRRGKTNHYQTTVEKKSLTIYAQVQKPGPLQKKLDSFPAQDPCTTIYVAATEPVPESVQETNSITVYASVTLPESKKVAKKPTNKAPHPKQEPQEINFPDDLPGSNTAAPVQETLHGCQPVTQEDGKESRISVQERQ

SEQ ID NO: 383 - protein, 636 aa, synthetic construct
  REGION 1..636: note = Synthetic polypeptide
MGVLLTQRTLLSLVLALLFPSMASMQVQLQQSGAELVRSGTSVKLSCTASGFNIKDSYMHWLRQGPEQGLEWIGWIDPENGDTEYAPKFQGKATFTTDTSSNTAYLQLSSLTSEDTAVYYCNEGTPTGPYYFDYWGQGTTVTVSSGGGGSGGGGSGGGGSENVLTQSPAIMSASPGEKVTITCSASSSVSYMHWFQQKPGTSPKLWIYSTSNLASGVPARFSGSGSGTSYSLTISRMEAEDAATYYCQQRSSYPLTFGAGTKLELKRAAAGSGGSGESKYGPPCPSCPAPEFLGGPSVFLFPPKPKDTLMISRTPEVTCVVVDVSQEDPEVQFNWYVDGVEVHNAKTKPREEQFNSTYRVVSVLTVLHQDWLNGKEYKCKVSNKGLPSSIEKTISKAKGQPREPQVYTLPPSQEEMTKNQVSLTCLVKGFYPSDIAVEWESNGQPENNYKTTPPVLDSDGSFFLYSRLTVDKSRWQEGNVFSCSVMHEALHNHYTQKSLSLSLGKMFWVLVVVGGVLACYSLLVTVAFIIFWVRSKRSRLLHSDYMNMTPRRPGPTRKHYQPYAPPRDFAAYRSKKVAKKPTNKAPHPKQEPQEINFPDDLPGSNTAAPVQETLHGCQPVTQEDGKESRISVQERQ

SEQ ID NO: 384 - protein, 595 aa, synthetic construct
  REGION 1..595: note = Synthetic polypeptide
MGVLLTQRTLLSLVLALLFPSMASMQVQLQQSGAELVRSGTSVKLSCTASGFNIKDSYMHWLRQGPEQGLEWIGWIDPENGDTEYAPKFQGKATFTTDTSSNTAYLQLSSLTSEDTAVYYCNEGTPTGPYYFDYWGQGTTVTVSSGGGGSGGGGSGGGGSENVLTQSPAIMSASPGEKVTITCSASSSVSYMHWFQQKPGTSPKLWIYSTSNLASGVPARFSGSGSGTSYSLTISRMEAEDAATYYCQQRSSYPLTFGAGTKLELKRAAAGSGGSGESKYGPPCPSCPAPEFLGGPSVFLFPPKPKDTLMISRTPEVTCVVVDVSQEDPEVQFNWYVDGVEVHNAKTKPREEQFNSTYRVVSVLTVLHQDWLNGKEYKCKVSNKGLPSSIEKTISKAKGQPREPQVYTLPPSQEEMTKNQVSLTCLVKGFYPSDIAVEWESNGQPENNYKTTPPVLDSDGSFFLYSRLTVDKSRWQEGNVFSCSVMHEALHNHYTQKSLSLSLGKMFWVLVVVGGVLACYSLLVTVAFIIFWVKKVAKKPTNKAPHPKQEPQEINFPDDLPGSNTAAPVQETLHGCQPVTQEDGKESRISVQERQ

SEQ ID NO: 385 - protein, 595 aa, synthetic construct; identical to SEQ ID NO: 384
  REGION 1..595: note = Synthetic polypeptide

SEQ ID NO: 386 - protein, 632 aa, synthetic construct
  REGION 1..632: note = Synthetic polypeptide
MGVLLTQRTLLSLVLALLFPSMASMQVQLQQSGAELVRSGTSVKLSCTASGFNIKDSYMHWLRQGPEQGLEWIGWIDPENGDTEYAPKFQGKATFTTDTSSNTAYLQLSSLTSEDTAVYYCNEGTPTGPYYFDYWGQGTTVTVSSGGGGSGGGGSGGGGSENVLTQSPAIMSASPGEKVTITCSASSSVSYMHWFQQKPGTSPKLWIYSTSNLASGVPARFSGSGSGTSYSLTISRMEAEDAATYYCQQRSSYPLTFGAGTKLELKRAAAGSGGSGESKYGPPCPSCPAPEFLGGPSVFLFPPKPKDTLMISRTPEVTCVVVDVSQEDPEVQFNWYVDGVEVHNAKTKPREEQFNSTYRVVSVLTVLHQDWLNGKEYKCKVSNKGLPSSIEKTISKAKGQPREPQVYTLPPSQEEMTKNQVSLTCLVKGFYPSDIAVEWESNGQPENNYKTTPPVLDSDGSFFLYSRLTVDKSRWQEGNVFSCSVMHEALHNHYTQKSLSLSLGKMFWVLVVVGGVLACYSLLVTVAFIIFWVRRDQRLPPDAHKPPGGGSFRTPIQEEQADAHSTLAKIKKVAKKPTNKAPHPKQEPQEINFPDDLPGSNTAAPVQETLHGCQPVTQEDGKESRISVQERQ

SEQ ID NO: 387 - protein, 711 aa, synthetic construct
  REGION 1..711: note = Synthetic polypeptide
MGVLLTQRTLLSLVLALLFPSMASMQVQLQQSGAELVRSGTSVKLSCTASGFNIKDSYMHWLRQGPEQGLEWIGWIDPENGDTEYAPKFQGKATFTTDTSSNTAYLQLSSLTSEDTAVYYCNEGTPTGPYYFDYWGQGTTVTVSSGGGGSGGGGSGGGGSENVLTQSPAIMSASPGEKVTITCSASSSVSYMHWFQQKPGTSPKLWIYSTSNLASGVPARFSGSGSGTSYSLTISRMEAEDAATYYCQQRSSYPLTFGAGTKLELKRAAAGSGGSGESKYGPPCPSCPAPEFLGGPSVFLFPPKPKDTLMISRTPEVTCVVVDVSQEDPEVQFNWYVDGVEVHNAKTKPREEQFNSTYRVVSVLTVLHQDWLNGKEYKCKVSNKGLPSSIEKTISKAKGQPREPQVYTLPPSQEEMTKNQVSLTCLVKGFYPSDIAVEWESNGQPENNYKTTPPVLDSDGSFFLYSRLTVDKSRWQEGNVFSCSVMHEALHNHYTQKSLSLSLGKMFWVLVVVGGVLACYSLLVTVAFIIFWVKRKKQRSRRNDEELETRAHRVATEERGRKPHQIPASTPQNPATSQHPPPPPGHRSQAPSHRPPPPGHRVQHQPQKRPPAPSGTQVHQQKGPPLPRPRVQPKPPHGAAENSLSPSSNKKVAKKPTNKAPHPKQEPQEINFPDDLPGSNTAAPVQETLHGCQPVTQEDGKESRISVQERQ

SEQ ID NO: 388 - protein, 653 aa, synthetic construct
  REGION 1..653: note = Synthetic polypeptide
MGVLLTQRTLLSLVLALLFPSMASMQVQLQQSGAELVRSGTSVKLSCTASGFNIKDSYMHWLRQGPEQGLEWIGWIDPENGDTEYAPKFQGKATFTTDTSSNTAYLQLSSLTSEDTAVYYCNEGTPTGPYYFDYWGQGTTVTVSSGGGGSGGGGSGGGGSENVLTQSPAIMSASPGEKVTITCSASSSVSYMHWFQQKPGTSPKLWIYSTSNLASGVPARFSGSGSGTSYSLTISRMEAEDAATYYCQQRSSYPLTFGAGTKLELKRAAAGSGGSGESKYGPPCPSCPAPEFLGGPSVFLFPPKPKDTLMISRTPEVTCVVVDVSQEDPEVQFNWYVDGVEVHNAKTKPREEQFNSTYRVVSVLTVLHQDWLNGKEYKCKVSNKGLPSSIEKTISKAKGQPREPQVYTLPPSQEEMTKNQVSLTCLVKGFYPSDIAVEWESNGQPENNYKTTPPVLDSDGSFFLYSRLTVDKSRWQEGNVFSCSVMHEALHNHYTQKSLSLSLGKMFWVLVVVGGVLACYSLLVTVAFIIFWVQLGLHIWQLRSQCMWPRETQLLLEVPPSTEDARSCQFPEEERGERSAEEKGRLGDLWVKKVAKKPTNKAPHPKQEPQEINFPDDLPGSNTAAPVQETLHGCQPVTQEDGKESRISVQERQ

SEQ ID NO: 389 - protein, 642 aa, synthetic construct
  REGION 1..642: note = Synthetic polypeptide
MGVLLTQRTLLSLVLALLFPSMASMQVQLQQSGAELVRSGTSVKLSCTASGFNIKDSYMHWLRQGPEQGLEWIGWIDPENGDTEYAPKFQGKATFTTDTSSNTAYLQLSSLTSEDTAVYYCNEGTPTGPYYFDYWGQGTTVTVSSGGGGSGGGGSGGGGSENVLTQSPAIMSASPGEKVTITCSASSSVSYMHWFQQKPGTSPKLWIYSTSNLASGVPARFSGSGSGTSYSLTISRMEAEDAATYYCQQRSSYPLTFGAGTKLELKRAAAGSGGSGESKYGPPCPSCPAPEFLGGPSVFLFPPKPKDTLMISRTPEVTCVVVDVSQEDPEVQFNWYVDGVEVHNAKTKPREEQFNSTYRVVSVLTVLHQDWLNGKEYKCKVSNKGLPSSIEKTISKAKGQPREPQVYTLPPSQEEMTKNQVSLTCLVKGFYPSDIAVEWESNGQPENNYKTTPPVLDSDGSFFLYSRLTVDKSRWQEGNVFSCSVMHEALHNHYTQKSLSLSLGKMFWVLVVVGGVLACYSLLVTVAFIIFWVKLLMIIHDRREFAKFEKEKMNAKWDTGENPIYKSAVTTVVNPKYEGKKKVAKKPTNKAPHPKQEPQEINFPDDLPGSNTAAPVQETLHGCQPVTQEDGKESRISVQERQ

SEQ ID NO: 390 - protein, 670 aa, synthetic construct
  REGION 1..670: note = Synthetic polypeptide
MGVLLTQRTLLSLVLALLFPSMASMQVQLQQSGAELVRSGTSVKLSCTASGFNIKDSYMHWLRQGPEQGLEWIGWIDPENGDTEYAPKFQGKATFTTDTSSNTAYLQLSSLTSEDTAVYYCNEGTPTGPYYFDYWGQGTTVTVSSGGGGSGGGGSGGGGSENVLTQSPAIMSASPGEKVTITCSASSSVSYMHWFQQKPGTSPKLWIYSTSNLASGVPARFSGSGSGTSYSLTISRMEAEDAATYYCQQRSSYPLTFGAGTKLELKRAAAGSGGSGESKYGPPCPSCPAPEFLGGPSVFLFPPKPKDTLMISRTPEVTCVVVDVSQEDPEVQFNWYVDGVEVHNAKTKPREEQFNSTYRVVSVLTVLHQDWLNGKEYKCKVSNKGLPSSIEKTISKAKGQPREPQVYTLPPSQEEMTKNQVSLTCLVKGFYPSDIAVEWESNGQPENNYKTTPPVLDSDGSFFLYSRLTVDKSRWQEGNVFSCSVMHEALHNHYTQKSLSLSLGKMFWVLVVVGGVLACYSLLVTVAFIIFWVRRRGKTNHYQTTVEKKSLTIYAQVQKPGPLQKKLDSFPAQDPCTTIYVAATEPVPESVQETNSITVYASVTLPESKKVAKKPTNKAPHPKQEPQEINFPDDLPGSNTAAPVQETLHGCQPVTQEDGKESRISVQERQ

SEQ ID NO: 391 - protein, 658 aa, synthetic construct
  REGION 1..658: note = Synthetic polypeptide
MGVLLTQRTLLSLVLALLFPSMASMQVQLQQSGAELVRSGTSVKLSCTASGFNIKDSYMHWLRQGPEQGLEWIGWIDPENGDTEYAPKFQGKATFTTDTSSNTAYLQLSSLTSEDTAVYYCNEGTPTGPYYFDYWGQGTTVTVSSGGGGSGGGGSGGGGSENVLTQSPAIMSASPGEKVTITCSASSSVSYMHWFQQKPGTSPKLWIYSTSNLASGVPARFSGSGSGTSYSLTISRMEAEDAATYYCQQRSSYPLTFGAGTKLELKRAAAGSGGSGESKYGPPCPSCPAPEFLGGPSVFLFPPKPKDTLMISRTPEVTCVVVDVSQEDPEVQFNWYVDGVEVHNAKTKPREEQFNSTYRVVSVLTVLHQDWLNGKEYKCKVSNKGLPSSIEKTISKAKGQPREPQVYTLPPSQEEMTKNQVSLTCLVKGFYPSDIAVEWESNGQPENNYKTTPPVLDSDGSFFLYSRLTVDKSRWQEGNVFSCSVMHEALHNHYTQKSLSLSLGKMFWVLVVVGGVLACYSLLVTVAFIIFWVAKKPTNKAPHPKQEPQEINFPDDLPGSNTAAPVQETLHGCQPVTQEDGKESRISVQERQKKVAKKPTNKAPHPKQEPQEINFPDDLPGSNTAAPVQETLHGCQPVTQEDGKESRISVQERQKKVA

SEQ ID NO: 392 - protein, 595 aa, synthetic construct
  REGION 1..595: note = Synthetic polypeptide
MGVLLTQRTLLSLVLALLFPSMASMQVQLQQSGAELVRSGTSVKLSCTASGFNIKDSYMHWLRQGPEQGLEWIGWIDPENGDTEYAPKFQGKATFTTDTSSNTAYLQLSSLTSEDTAVYYCNEGTPTGPYYFDYWGQGTTVTVSSGGGGSGGGGSGGGGSENVLTQSPAIMSASPGEKVTITCSASSSVSYMHWFQQKPGTSPKLWIYSTSNLASGVPARFSGSGSGTSYSLTISRMEAEDAATYYCQQRSSYPLTFGAGTKLELKRAAAGSGGSGESKYGPPCPSCPAPEFLGGPSVFLFPPKPKDTLMISRTPEVTCVVVDVSQEDPEVQFNWYVDGVEVHNAKTKPREEQFNSTYRVVSVLTVLHQDWLNGKEYKCKVSNKGLPSSIEKTISKAKGQPREPQVYTLPPSQEEMTKNQVSLTCLVKGFYPSDIAVEWESNGQPENNYKTTPPVLDSDGSFFLYSRLTVDKSRWQEGNVFSCSVMHEALHNHYTQKSLSLSLGKMFWVLVVVGGVLACYSLLVTVAFIIFWVKKVAKKPTNKAAHPKQEPQEINFPDDLPGSNTAAPVQETLHGCQPVTQEDGKESRISVQERQ

SEQ ID NO: 393 - protein, 554 aa, synthetic construct
  REGION 1..554: note = Synthetic polypeptide
MGVLLTQRTLLSLVLALLFPSMASMQVQLQQSGAELVRSGTSVKLSCTASGFNIKDSYMHWLRQGPEQGLEWIGWIDPENGDTEYAPKFQGKATFTTDTSSNTAYLQLSSLTSEDTAVYYCNEGTPTGPYYFDYWGQGTTVTVSSGGGGSGGGGSGGGGSENVLTQSPAIMSASPGEKVTITCSASSSVSYMHWFQQKPGTSPKLWIYSTSNLASGVPARFSGSGSGTSYSLTISRMEAEDAATYYCQQRSSYPLTFGAGTKLELKRAAAGSGGSGRPGWFLDSPDRPWNPPTFSPALLVVTEGDNATFTCSFSNTSESFVLNWYRMSPSNQTDKLAAFPEDRSQPGQDCRFRVTQLPNGRDFHMSVVRARRNDSGTYLCGAISLAPKAQIKESLRAELRVTERRAEVPTAHCPSPLFPGPSKPFWVLVVVGGVLACYSLLVTVAFIIFWVRSKRSRLLHSDYMNMTPRRPGPTRKHYQPYAPPRDFAAYRSKKVAKKPTNKAPHPKQEPQEINFPDDLPGSNTAAPVQETLHGCQPVTQEDGKESRISVQERQ

SEQ ID NO: 394 - protein, 513 aa, synthetic construct
  REGION 1..513: note = Synthetic polypeptide
MGVLLTQRTLLSLVLALLFPSMASMQVQLQQSGAELVRSGTSVKLSCTASGFNIKDSYMHWLRQGPEQGLEWIGWIDPENGDTEYAPKFQGKATFTTDTSSNTAYLQLSSLTSEDTAVYYCNEGTPTGPYYFDYWGQGTTVTVSSGGGGSGGGGSGGGGSENVLTQSPAIMSASPGEKVTITCSASSSVSYMHWFQQKPGTSPKLWIYSTSNLASGVPARFSGSGSGTSYSLTISRMEAEDAATYYCQQRSSYPLTFGAGTKLELKRAAAGSGGSGRPGWFLDSPDRPWNPPTFSPALLVVTEGDNATFTCSFSNTSESFVLNWYRMSPSNQTDKLAAFPEDRSQPGQDCRFRVTQLPNGRDFHMSVVRARRNDSGTYLCGAISLAPKAQIKESLRAELRVTERRAEVPTAHCPSPLFPGPSKPFWVLVVVGGVLACYSLLVTVAFIIFWVKKVAKKPTNKAPHPKQEPQEINFPDDLPGSNTAAPVQETLHGCQPVTQEDGKESRISVQERQ

SEQ ID NO: 395 - protein, 526 aa, synthetic construct
  REGION 1..526: note = Synthetic polypeptide
MGVLLTQRTLLSLVLALLFPSMASMQVQLQQSGAELVRSGTSVKLSCTASGFNIKDSYMHWLRQGPEQGLEWIGWIDPENGDTEYAPKFQGKATFTTDTSSNTAYLQLSSLTSEDTAVYYCNEGTPTGPYYFDYWGQGTTVTVSSGGGGSGGGGSGGGGSENVLTQSPAIMSASPGEKVTITCSASSSVSYMHWFQQKPGTSPKLWIYSTSNLASGVPARFSGSGSGTSYSLTISRMEAEDAATYYCQQRSSYPLTFGAGTKLELKRAAAGSGGSGMMTGTIETTGNISAEKGGSIILQCHLSSTTAQVTQVNWEQQDQLLAICNADLGWHISPSFKDRVAPGPGLGLTLQSLTVNDTGEYFCIYHTYPDGTYTGRIFLEVLESSVAEHGARFQIPFWVLVVVGGVLACYSLLVTVAFIIFWVRSKRSRLLHSDYMNMTPRRPGPTRKHYQPYAPPRDFAAYRSKKVAKKPTNKAPHPKQEPQEINFPDDLPGSNTAAPVQETLHGCQPVTQEDGKESRISVQERQ

SEQ ID NO: 396 - protein, 485 aa, synthetic construct
  REGION 1..485: note = Synthetic polypeptide
MGVLLTQRTLLSLVLALLFPSMASMQVQLQQSGAELVRSGTSVKLSCTASGFNIKDSYMHWLRQGPEQGLEWIGWIDPENGDTEYAPKFQGKATFTTDTSSNTAYLQLSSLTSEDTAVYYCNEGTPTGPYYFDYWGQGTTVTVSSGGGGSGGGGSGGGGSENVLTQSPAIMSASPGEKVTITCSASSSVSYMHWFQQKPGTSPKLWIYSTSNLASGVPARFSGSGSGTSYSLTISRMEAEDAATYYCQQRSSYPLTFGAGTKLELKRAAAGSGGSGMMTGTIETTGNISAEKGGSIILQCHLSSTTAQVTQVNWEQQDQLLAICNADLGWHISPSFKDRVAPGPGLGLTLQSLTVNDTGEYFCIYHTYPDGTYTGRIFLEVLESSVAEHGARFQIPFWVLVVVGGVLACYSLLVTVAFIIFWVKKVAKKPTNKAPHPKQEPQEINFPDDLPGSNTAAPVQETLHGCQPVTQEDGKESRISVQERQ

SEQ ID NO: 397 - protein, 540 aa, synthetic construct
  REGION 1..540: note = Synthetic polypeptide
MGVLLTQRTLLSLVLALLFPSMASMQVQLQQSGAELVKPGASVKISCKASGYSFTGYFMNWVKQSHGKSLEWIGRIHPYDGDTFYNQNFKDKATLTVDKSSNTAHMELLSLTSEDFAVYYCTRYDGSRAMDYWGQGTTVTVSSGGGGSGGGGSGGGGSDIELTQSPASLAVSLGQRAIISCKASQSVSFAGTSLMHWYHQKPGQQPKLLIYRASNLEAGVPTRFSGSGSKTDFTLNIHPVEEEDAATYYCQQSREYPYTFGGGTKLEIKAAAGSGGSGILVKQSPMLVAYDNAVNLSCKYSYNLFSREFRASLHKGLDSAVEVCVVYGNYSQQLQVYSKTGFNCDGKLGNESVTFYLQNLYVNQTDIYFCKIEVMYPPPYLDNEKSNGTIIHVKGKHLCPSPLFPGPSKPFWVLVVVGGVLACYSLLVTVAFIIFWVRSKRSRLLHSDYMNMTPRRPGPTRKHYQPYAPPRDFAAYRSKKVAKKPTNKAPHPKQEPQEINFPDDLPGSNTAAPVQETLHGCQPVTQEDGKESRISVQERQ

SEQ ID NO: 398 - protein, 499 aa, synthetic construct
  REGION 1..499: note = Synthetic polypeptide
MGVLLTQRTLLSLVLALLFPSMASMQVQLQQSGAELVKPGASVKISCKASGYSFTGYFMNWVKQSHGKSLEWIGRIHPYDGDTFYNQNFKDKATLTVDKSSNTAHMELLSLTSEDFAVYYCTRYDGSRAMDYWGQGTTVTVSSGGGGSGGGGSGGGGSDIELTQSPASLAVSLGQRAIISCKASQSVSFAGTSLMHWYHQKPGQQPKLLIYRASNLEAGVPTRFSGSGSKTDFTLNIHPVEEEDAATYYCQQSREYPYTFGGGTKLEIKAAAGSGGSGILVKQSPMLVAYDNAVNLSCKYSYNLFSREFRASLHKGLDSAVEVCVVYGNYSQQLQVYSKTGFNCDGKLGNESVTFYLQNLYVNQTDIYFCKIEVMYPPPYLDNEKSNGTIIHVKGKHLCPSPLFPGPSKPFWVLVVVGGVLACYSLLVTVAFIIFWVKKVAKKPTNKAPHPKQEPQEINFPDDLPGSNTAAPVQETLHGCQPVTQEDGKESRISVQERQ

SEQ ID NO: 399 - protein, 545 aa, synthetic construct
  REGION 1..545: note = Synthetic polypeptide
MGVLLTQRTLLSLVLALLFPSMASMQVQLQQSGAELVKPGASVKISCKASGYSFTGYFMNWVKQSHGKSLEWIGRIHPYDGDTFYNQNFKDKATLTVDKSSNTAHMELLSLTSEDFAVYYCTRYDGSRAMDYWGQGTTVTVSSGGGGSGGGGSGGGGSDIELTQSPASLAVSLGQRAIISCKASQSVSFAGTSLMHWYHQKPGQQPKLLIYRASNLEAGVPTRFSGSGSKTDFTLNIHPVEEEDAATYYCQQSREYPYTFGGGTKLEIKAAAGSGGSGILVKQSPMLVAYDNAVNLSCKYSYNLFSREFRASLHKGLDSAVEVCVVYGNYSQQLQVYSKTGFNCDGKLGNESVTFYLQNLYVNQTDIYFCKIEVMYPPPYLDNEKSNGTIIHVKGKHLCPSPLFPGPSKPFWVLVVVGGVLACYSLLVTVAFIIFWVRFSVVKRGRKKLLYIFKQPFMRPVQTTQEEDGCSCRFPEEEEGGCEKKVAKKPTNKAPHPKQEPQEINFPDDLPGSNTAAPVQETLHGCQPVTQEDGKESRISVQERQ

SEQ ID NO: 400 - protein, 536 aa, synthetic construct
  REGION 1..536: note = Synthetic polypeptide
MGVLLTQRTLLSLVLALLFPSMASMQVQLQQSGAELVKPGASVKISCKASGYSFTGYFMNWVKQSHGKSLEWIGRIHPYDGDTFYNQNFKDKATLTVDKSSNTAHMELLSLTSEDFAVYYCTRYDGSRAMDYWGQGTTVTVSSGGGGSGGGGSGGGGSDIELTQSPASLAVSLGQRAIISCKASQSVSFAGTSLMHWYHQKPGQQPKLLIYRASNLEAGVPTRFSGSGSKTDFTLNIHPVEEEDAATYYCQQSREYPYTFGGGTKLEIKAAAGSGGSGILVKQSPMLVAYDNAVNLSCKYSYNLFSREFRASLHKGLDSAVEVCVVYGNYSQQLQVYSKTGFNCDGKLGNESVTFYLQNLYVNQTDIYFCKIEVMYPPPYLDNEKSNGTIIHVKGKHLCPSPLFPGPSKPFWVLVVVGGVLACYSLLVTVAFIIFWVRRDQRLPPDAHKPPGGGSFRTPIQEEQADAHSTLAKIKKVAKKPTNKAPHPKQEPQEINFPDDLPGSNTAAPVQETLHGCQPVTQEDGKESRISVQERQ

SEQ ID NO: 401 - protein, 615 aa, synthetic construct
  REGION 1..615: note = Synthetic polypeptide
MGVLLTQRTLLSLVLALLFPSMASMQVQLQQSGAELVKPGASVKISCKASGYSFTGYFMNWVKQSHGKSLEWIGRIHPYDGDTFYNQNFKDKATLTVDKSSNTAHMELLSLTSEDFAVYYCTRYDGSRAMDYWGQGTTVTVSSGGGGSGGGGSGGGGSDIELTQSPASLAVSLGQRAIISCKASQSVSFAGTSLMHWYHQKPGQQPKLLIYRASNLEAGVPTRFSGSGSKTDFTLNIHPVEEEDAATYYCQQSREYPYTFGGGTKLEIKAAAGSGGSGILVKQSPMLVAYDNAVNLSCKYSYNLFSREFRASLHKGLDSAVEVCVVYGNYSQQLQVYSKTGFNCDGKLGNESVTFYLQNLYVNQTDIYFCKIEVMYPPPYLDNEKSNGTIIHVKGKHLCPSPLFPGPSKPFWVLVVVGGVLACYSLLVTVAFIIFWVKRKKQRSRRNDEELETRAHRVATEERGRKPHQIPASTPQNPATSQHPPPPPGHRSQAPSHRPPPPGHRVQHQPQKRPPAPSGTQVHQQKGPPLPRPRVQPKPPHGAAENSLSPSSNKKVAKKPTNKAPHPKQEPQEINFPDDLPGSNTAAPVQETLHGCQPVTQEDGKESRISVQERQ

SEQ ID NO: 402 - protein, 557 aa, synthetic construct
  REGION 1..557: note = Synthetic polypeptide
MGVLLTQRTLLSLVLALLFPSMASMQVQLQQSGAELVKPGASVKISCKASGYSFTGYFMNWVKQSHGKSLEWIGRIHPYDGDTFYNQNFKDKATLTVDKSSNTAHMELLSLTSEDFAVYYCTRYDGSRAMDYWGQGTTVTVSSGGGGSGGGGSGGGGSDIELTQSPASLAVSLGQRAIISCKASQSVSFAGTSLMHWYHQKPGQQPKLLIYRASNLEAGVPTRFSGSGSKTDFTLNIHPVEEEDAATYYCQQSREYPYTFGGGTKLEIKAAAGSGGSGILVKQSPMLVAYDNAVNLSCKYSYNLFSREFRASLHKGLDSAVEVCVVYGNYSQQLQVYSKTGFNCDGKLGNESVTFYLQNLYVNQTDIYFCKIEVMYPPPYLDNEKSNGTIIHVKGKHLCPSPLFPGPSKPFWVLVVVGGVLACYSLLVTVAFIIFWVQLGLHIWQLRSQCMWPRETQLLLEVPPSTEDARSCQFPEEERGERSAEEKGRLGDLWVKKVAKKPTNKAPHPKQEPQEINFPDDLPGSNTAAPVQETLHGCQPVTQEDGKESRISVQERQ

SEQ ID NO: 403 - protein, 546 aa, synthetic construct
  REGION 1..546: note = Synthetic polypeptide
MGVLLTQRTLLSLVLALLFPSMASMQVQLQQSGAELVKPGASVKISCKASGYSFTGYFMNWVKQSHGKSLEWIGRIHPYDGDTFYNQNFKDKATLTVDKSSNTAHMELLSLTSEDFAVYYCTRYDGSRAMDYWGQGTTVTVSSGGGGSGGGGSGGGGSDIELTQSPASLAVSLGQRAIISCKASQSVSFAGTSLMHWYHQKPGQQPKLLIYRASNLEAGVPTRFSGSGSKTDFTLNIHPVEEEDAATYYCQQSREYPYTFGGGTKLEIKAAAGSGGSGILVKQSPMLVAYDNAVNLSCKYSYNLFSREFRASLHKGLDSAVEVCVVYGNYSQQLQVYSKTGFNCDGKLGNESVTFYLQNLYVNQTDIYFCKIEVMYPPPYLDNEKSNGTIIHVKGKHLCPSPLFPGPSKPFWVLVVVGGVLACYSLLVTVAFIIFWVKLLMIIHDRREFAKFEKEKMNAKWDTGENPIYKSAVTTVVNPKYEGKKKVAKKPTNKAPHPKQEPQEINFPDDLPGSNTAAPVQETLHGCQPVTQEDGKESRISVQERQ

SEQ ID NO: 404 - protein, 574 aa, synthetic construct
  REGION 1..574: note = Synthetic polypeptide
MGVLLTQRTLLSLVLALLFPSMASMQVQLQQSGAELVKPGASVKISCKASGYSFTGYFMNWVKQSHGKSLEWIGRIHPYDGDTFYNQNFKDKATLTVDKSSNTAHMELLSLTSEDFAVYYCTRYDGSRAMDYWGQGTTVTVSSGGGGSGGGGSGGGGSDIELTQSPASLAVSLGQRAIISCKASQSVSFAGTSLMHWYHQKPGQQPKLLIYRASNLEAGVPTRFSGSGSKTDFTLNIHPVEEEDAATYYCQQSREYPYTFGGGTKLEIKAAAGSGGSGILVKQSPMLVAYDNAVNLSCKYSYNLFSREFRASLHKGLDSAVEVCVVYGNYSQQLQVYSKTGFNCDGKLGNESVTFYLQNLYVNQTDIYFCKIEVMYPPPYLDNEKSNGTIIHVKGKHLCPSPLFPGPSKPFWVLVVVGGVLACYSLLVTVAFIIFWVRRRGKTNHYQTTVEKKSLTIYAQVQKPGPLQKKLDSFPAQDPCTTIYVAATEPVPESVQETNSITVYASVTLPESKKVAKKPTNKAPHPKQEPQEINFPDDLPGSNTAAPVQETLHGCQPVTQEDGKESRISVQERQ

SEQ ID NO: 405 - protein, 464 aa, synthetic construct
  REGION 1..464: note = Synthetic polypeptide
MGVLLTQRTLLSLVLALLFPSMASMQVQLQQSGAELVKPGASVKISCKASGYSFTGYFMNWVKQSHGKSLEWIGRIHPYDGDTFYNQNFKDKATLTVDKSSNTAHMELLSLTSEDFAVYYCTRYDGSRAMDYWGQGTTVTVSSGGGGSGGGGSGGGGSDIELTQSPASLAVSLGQRAIISCKASQSVSFAGTSLMHWYHQKPGQQPKLLIYRASNLEAGVPTRFSGSGSKTDFTLNIHPVEEEDAATYYCQQSREYPYTFGGGTKLEIKAAAGSGGSGFVPVFLPAKPTTTPAPRPPTPAPTIASQPLSLRPEACRPAAGGAVHTRGLDFACDIYIWAPLAGTCGVLLLSLVITLYCNHRNRSKRSRLLHSDYMNMTPRRPGPTRKHYQPYAPPRDFAAYRSKKVAKKPTNKAPHPKQEPQEINFPDDLPGSNTAAPVQETLHGCQPVTQEDGKESRISVQERQ

SEQ ID NO: 406 - protein, 423 aa, synthetic construct
  REGION 1..423: note = Synthetic polypeptide
MGVLLTQRTLLSLVLALLFPSMASMQVQLQQSGAELVKPGASVKISCKASGYSFTGYFMNWVKQSHGKSLEWIGRIHPYDGDTFYNQNFKDKATLTVDKSSNTAHMELLSLTSEDFAVYYCTRYDGSRAMDYWGQGTTVTVSSGGGGSGGGGSGGGGSDIELTQSPASLAVSLGQRAIISCKASQSVSFAGTSLMHWYHQKPGQQPKLLIYRASNLEAGVPTRFSGSGSKTDFTLNIHPVEEEDAATYYCQQSREYPYTFGGGTKLEIKAAAGSGGSGFVPVFLPAKPTTTPAPRPPTPAPTIASQPLSLRPEACRPAAGGAVHTRGLDFACDIYIWAPLAGTCGVLLLSLVITLYCNHRNKKVAKKPTNKAPHPKQEPQEINFPDDLPGSNTAAPVQETLHGCQPVTQEDGKESRISVQERQ

SEQ ID NO: 407 - protein, 469 aa, synthetic construct
  REGION 1..469: note = Synthetic polypeptide
MGVLLTQRTLLSLVLALLFPSMASMQVQLQQSGAELVKPGASVKISCKASGYSFTGYFMNWVKQSHGKSLEWIGRIHPYDGDTFYNQNFKDKATLTVDKSSNTAHMELLSLTSEDFAVYYCTRYDGSRAMDYWGQGTTVTVSSGGGGSGGGGSGGGGSDIELTQSPASLAVSLGQRAIISCKASQSVSFAGTSLMHWYHQKPGQQPKLLIYRASNLEAGVPTRFSGSGSKTDFTLNIHPVEEEDAATYYCQQSREYPYTFGGGTKLEIKAAAGSGGSGFVPVFLPAKPTTTPAPRPPTPAPTIASQPLSLRPEACRPAAGGAVHTRGLDFACDIYIWAPLAGTCGVLLLSLVITLYCNHRNRFSVVKRGRKKLLYIFKQPFMRPVQTTQEEDGCSCRFPEEEEGGCEKKVAKKPTNKAPHPKQEPQEINFPDDLPGSNTAAPVQETLHGCQPVTQEDGKESRISVQERQ

SEQ ID NO: 408 - protein, 459 aa, synthetic construct
  REGION 1..459: note = Synthetic polypeptide
MGVLLTQRTLLSLVLALLFPSMASMQVQLQQSGAELVKPGASVKISCKASGYSFTGYFMNWVKQSHGKSLEWIGRIHPYDGDTFYNQNFKDKATLTVDKSSNTAHMELLSLTSEDFAVYYCTRYDGSRAMDYWGQGTTVTVSSGGGGSGGGGSGGGGSDIELTQSPASLAVSLGQRAIISCKASQSVSFAGTSLMHWYHQKPGQQPKLLIYRASNLEAGVPTRFSGSGSKTDFTLNIHPVEEEDAATYYCQQSREYPYTFGGGTKLEIKAAAGSGGSGFVPVFLPAKPTTTPAPRPPTPAPTIASQPLSLRPEACRPAAGGAVHTRGLDFACDIYIWAPLAGTCGVLLLSLVITLYCNHRNRRDQRLPPDAHKPPGGGSFRTPIQEEQADAHSTLAKIKKVAKKPTNKAPHPKQEPQEINFPDDLPGSNTAAPVQETLHGCQPVTQEDGKSRISVQERQ

SEQ ID NO: 409 - protein, 539 aa, synthetic construct
  REGION 1..539: note = Synthetic polypeptide
MGVLLTQRTLLSLVLALLFPSMASMQVQLQQSGAELVKPGASVKISCKASGYSFTGYFMNWVKQSHGKSLEWIGRIHPYDGDTFYNQNFKDKATLTVDKSSNTAHMELLSLTSEDFAVYYCTRYDGSRAMDYWGQGTTVTVSSGGGGSGGGGSGGGGSDIELTQSPASLAVSLGQRAIISCKASQSVSFAGTSLMHWYHQKPGQQPKLLIYRASNLEAGVPTRFSGSGSKTDFTLNIHPVEEEDAATYYCQQSREYPYTFGGGTKLEIKAAAGSGGSGFVPVFLPAKPTTTPAPRPPTPAPTIASQPLSLRPEACRPAAGGAVHTRGLDFACDIYIWAPLAGTCGVLLLSLVITLYCNHRNKRKKQRSRRNDEELETRAHRVATEERGRKPHQIPASTPQNPATSQHPPPPPGHRSQAPSHRPPPPGHRVQHQPQKRPPAPSGTQVHQQKGPPLPRPRVQPKPPHGAAENSLSPSSNKKVAKKPTNKAPHPKQEPQEINFPDDLPGSNTAAPVQETLHGCQPVTQEDGKESRISVQERQ

SEQ ID NO: 410 - protein, 481 aa, synthetic construct
  REGION 1..481: note = Synthetic polypeptide
MGVLLTQRTLLSLVLALLFPSMASMQVQLQQSGAELVKPGASVKISCKASGYSFTGYFMNWVKQSHGKSLEWIGRIHPYDGDTFYNQNFKDKATLTVDKSSNTAHMELLSLTSEDFAVYYCTRYDGSRAMDYWGQGTTVTVSSGGGGSGGGGSGGGGSDIELTQSPASLAVSLGQRAIISCKASQSVSFAGTSLMHWYHQKPGQQPKLLIYRASNLEAGVPTRFSGSGSKTDFTLNIHPVEEEDAATYYCQQSREYPYTFGGGTKLEIKAAAGSGGSGFVPVFLPAKPTTTPAPRPPTPAPTIASQPLSLRPEACRPAAGGAVHTRGLDFACDIYIWAPLAGTCGVLLLSLVITLYCNHRNQLGLHIWQLRSQCMWPRETQLLLEVPPSTEDARSCQFPEEERGERSAEEKGRLGDLWVKKVAKKPTNKAPHPKQEPQEINFPDDLPGSNTAAPVQETLHGCQPVTQEDGKESRISVQERQ

SEQ ID NO: 411 - protein, 470 aa, synthetic construct
  REGION 1..470: note = Synthetic polypeptide
MGVLLTQRTLLSLVLALLFPSMASMQVQLQQSGAELVKPGASVKISCKASGYSFTGYFMNWVKQSHGKSLEWIGRIHPYDGDTFYNQNFKDKATLTVDKSSNTAHMELLSLTSEDFAVYYCTRYDGSRAMDYWGQGTTVTVSSGGGGSGGGGSGGGGSDIELTQSPASLAVSLGQRAIISCKASQSVSFAGTSLMHWYHQKPGQQPKLLIYRASNLEAGVPTRFSGSGSKTDFTLNIHPVEEEDAATYYCQQSREYPYTFGGGTKLEIKAAAGSGGSGFVPVFLPAKPTTTPAPRPPTPAPTIASQPLSLRPEACRPAAGGAVHTRGLDFACDIYIWAPLAGTCGVLLLSLVITLYCNHRNKLLMIIHDRREFAKFEKEKMNAKWDTGENPIYKSAVTTVVNPKYEGKKKVAKKPTNKAPHPKQEPQEINFPDDLPGSNTAAPVQETLHGCQPVTQEDGKESRISVQERQ

SEQ ID NO: 412 - protein, 498 aa, synthetic construct
  REGION 1..498: note = Synthetic polypeptide
MGVLLTQRTLLSLVLALLFPSMASMQVQLQQSGAELVKPGASVKISCKASGYSFTGYFMNWVKQSHGKSLEWIGRIHPYDGDTFYNQNFKDKATLTVDKSSNTAHMELLSLTSEDFAVYYCTRYDGSRAMDYWGQGTTVTVSSGGGGSGGGGSGGGGSDIELTQSPASLAVSLGQRAIISCKASQSVSFAGTSLMHWYHQKPGQQPKLLIYRASNLEAGVPTRFSGSGSKTDFTLNIHPVEEEDAATYYCQQSREYPYTFGGGTKLEIKAAAGSGGSGFVPVFLPAKPTTTPAPRPPTPAPTIASQPLSLRPEACRPAAGGAVHTRGLDFACDIYIWAPLAGTCGVLLLSLVITLYCNHRNRRRGKTNHYQTTVEKKSLTIYAQVQKPGPLQKKLDSFPAQDPCTTIYVAATEPVPESVQETNSITVYASVTLPESKKVAKKPTNKAPHPKQEPQEINFPDDLPGSNTAAPVQETLHGCQPVTQEDGKESRISVQERQ

SEQ ID NO: 413 - protein, 638 aa, synthetic construct
  REGION 1..638: note = Synthetic polypeptide
MGVLLTQRTLLSLVLALLFPSMASMQVQLQQSGAELVKPGASVKISCKASGYSFTGYFMNWVKQSHGKSLEWIGRIHPYDGDTFYNQNFKDKATLTVDKSSNTAHMELLSLTSEDFAVYYCTRYDGSRAMDYWGQGTTVTVSSGGGGSGGGGSGGGGSDIELTQSPASLAVSLGQRAIISCKASQSVSFAGTSLMHWYHQKPGQQPKLLIYRASNLEAGVPTRFSGSGSKTDFTLNIHPVEEEDAATYYCQQSREYPYTFGGGTKLEIKAAAGSGGSGESKYGPPCPSCPAPEFLGGPSVFLFPPKPKDTLMISRTPEVTCVVVDVSQEDPEVQFNWYVDGVEVHNAKTKPREEQFNSTYRVVSVLTVLHQDWLNGKEYKCKVSNKGLPSSIEKTISKAKGQPREPQVYTLPPSQEEMTKNQVSLTCLVKGFYPSDIAVEWESNGQPENNYKTTPPVLDSDGSFFLYSRLTVDKSRWQEGNVFSCSVMHEALHNHYTQKSLSLSLGKMFWVLVVVGGVLACYSLLVTVAFIIFWVRSKRSRLLHSDYMNMTPRRPGPTRKHYQPYAPPRDFAAYRSKKVAKKPTNKAPHPKQEPQEINFPDDLPGSNTAAPVQETLHGCQPVTQEDGKESRISVQERQ

SEQ ID NO: 414 - protein, 597 aa, synthetic construct
  REGION 1..597: note = Synthetic polypeptide
MGVLLTQRTLLSLVLALLFPSMASMQVQLQQSGAELVKPGASVKISCKASGYSFTGYFMNWVKQSHGKSLEWIGRIHPYDGDTFYNQNFKDKATLTVDKSSNTAHMELLSLTSEDFAVYYCTRYDGSRAMDYWGQGTTVTVSSGGGGSGGGGSGGGGSDIELTQSPASLAVSLGQRAIISCKASQSVSFAGTSLMHWYHQKPGQQPKLLIYRASNLEAGVPTRFSGSGSKTDFTLNIHPVEEEDAATYYCQQSREYPYTFGGGTKLEIKAAAGSGGSGESKYGPPCPSCPAPEFLGGPSVFLFPPKPKDTLMISRTPEVTCVVVDVSQEDPEVQFNWYVDGVEVHNAKTKPREEQFNSTYRVVSVLTVLHQDWLNGKEYKCKVSNKGLPSSIEKTISKAKGQPREPQVYTLPPSQEEMTKNQVSLTCLVKGFYPSDIAVEWESNGQPENNYKTTPPVLDSDGSFFLYSRLTVDKSRWQEGNVFSCSVMHEALHNHYTQKSLSLSLGKMFWVLVVVGGVLACYSLLVTVAFIIFWVKKVAKKPTNKAPHPKQEPQEINFPDDLPGSNTAAPVQETLHGCQPVTQEDGKESRISVQERQ

SEQ ID NO: 415 - protein, 597 aa, synthetic construct; identical to SEQ ID NO: 414
  REGION 1..597: note = Synthetic polypeptide

SEQ ID NO: 416 - protein, 634 aa, synthetic construct
  REGION 1..634: note = Synthetic polypeptide
MGVLLTQRTLLSLVLALLFPSMASMQVQLQQSGAELVKPGASVKISCKASGYSFTGYFMNWVKQSHGKSLEWIGRIHPYDGDTFYNQNFKDKATLTVDKSSNTAHMELLSLTSEDFAVYYCTRYDGSRAMDYWGQGTTVTVSSGGGGSGGGGSGGGGSDIELTQSPASLAVSLGQRAIISCKASQSVSFAGTSLMHWYHQKPGQQPKLLIYRASNLEAGVPTRFSGSGSKTDFTLNIHPVEEEDAATYYCQQSREYPYTFGGGTKLEIKAAAGSGGSGESKYGPPCPSCPAPEFLGGPSVFLFPPKPKDTLMISRTPEVTCVVVDVSQEDPEVQFNWYVDGVEVHNAKTKPREEQFNSTYRVVSVLTVLHQDWLNGKEYKCKVSNKGLPSSIEKTISKAKGQPREPQVYTLPPSQEEMTKNQVSLTCLVKGFYPSDIAVEWESNGQPENNYKTTPPVLDSDGSFFLYSRLTVDKSRWQEGNVFSCSVMHEALHNHYTQKSLSLSLGKMFWVLVVVGGVLACYSLLVTVAFIIFWVRRDQRLPPDAHKPPGGGSFRTPIQEEQADAHSTLAKIKKVAKKPTNKAPHPKQEPQEINFPDDLPGSNTAAPVQETLHGCQPVTQEDGKESRISVQERQ

SEQ ID NO: 417 - protein, 713 aa, synthetic construct
  REGION 1..713: note = Synthetic polypeptide
MGVLLTQRTLLSLVLALLFPSMASMQVQLQQSGAELVKPGASVKISCKASGYSFTGYFMNWVKQSHGKSLEWIGRIHPYDGDTFYNQNFKDKATLTVDKSSNTAHMELLSLTSEDFAVYYCTRYDGSRAMDYWGQGTTVTVSSGGGGSGGGGSGGGGSDIELTQSPASLAVSLGQRAIISCKASQSVSFAGTSLMHWYHQKPGQQPKLLIYRASNLEAGVPTRFSGSGSKTDFTLNIHPVEEEDAATYYCQQSREYPYTFGGGTKLEIKAAAGSGGSGESKYGPPCPSCPAPEFLGGPSVFLFPPKPKDTLMISRTPEVTCVVVDVSQEDPEVQFNWYVDGVEVHNAKTKPREEQFNSTYRVVSVLTVLHQDWLNGKEYKCKVSNKGLPSSIEKTISKAKGQPREPQVYTLPPSQEEMTKNQVSLTCLVKGFYPSDIAVEWESNGQPENNYKTTPPVLDSDGSFFLYSRLTVDKSRWQEGNVFSCSVMHEALHNHYTQKSLSLSLGKMFWVLVVVGGVLACYSLLVTVAFIIFWVKRKKQRSRRNDEELETRAHRVATEERGRKPHQIPASTPQNPATSQHPPPPPGHRSQAPSHRPPPPGHRVQHQPQKRPPAPSGTQVHQQKGPPLPRPRVQPKPPHGAAENSLSPSSNKKVAKKPTNKAPHPKQEPQEINFPDDLPGSNTAAPVQETLHGCQPVTQEDGKESRISVQERQ

SEQ ID NO: 418 - protein, 655 aa, synthetic construct
  REGION 1..655: note = Synthetic polypeptide
MGVLLTQRTLLSLVLALLFPSMASMQVQLQQSGAELVKPGASVKISCKASGYSFTGYFMNWVKQSHGKSLEWIGRIHPYDGDTFYNQNFKDKATLTVDKSSNTAHMELLSLTSEDFAVYYCTRYDGSRAMDYWGQGTTVTVSSGGGGSGGGGSGGGGSDIELTQSPASLAVSLGQRAIISCKASQSVSFAGTSLMHWYHQKPGQQPKLLIYRASNLEAGVPTRFSGSGSKTDFTLNIHPVEEEDAATYYCQQSREYPYTFGGGTKLEIKAAAGSGGSGESKYGPPCPSCPAPEFLGGPSVFLFPPKPKDTLMISRTPEVTCVVVDVSQEDPEVQFNWYVDGVEVHNAKTKPREEQFNSTYRVVSVLTVLHQDWLNGKEYKCKVSNKGLPSSIEKTISKAKGQPREPQVYTLPPSQEEMTKNQVSLTCLVKGFYPSDIAVEWESNGQPENNYKTTPPVLDSDGSFFLYSRLTVDKSRWQEGNVFSCSVMHEALHNHYTQKSLSLSLGKMFWVLVVVGGVLACYSLLVTVAFIIFWVQLGLHIWQLRSQCMWPRETQLLLEVPPSTEDARSCQFPEEERGERSAEEKGRLGDLWVKKVAKKPTNKAPHPKQEPQEINFPDDLPGSNTAAPVQETLHGCQPVTQEDGKESRISVQERQ

SEQ ID NO: 419 - protein, 644 aa, synthetic construct
  REGION 1..644: note = Synthetic polypeptide
MGVLLTQRTLLSLVLALLFPSMASMQVQLQQSGAELVKPGASVKISCKASGYSFTGYFMNWVKQSHGKSLEWIGRIHPYDGDTFYNQNFKDKATLTVDKSSNTAHMELLSLTSEDFAVYYCTRYDGSRAMDYWGQGTTVTVSSGGGGSGGGGSGGGGSDIELTQSPASLAVSLGQRAIISCKASQSVSFAGTSLMHWYHQKPGQQPKLLIYRASNLEAGVPTRFSGSGSKTDFTLNIHPVEEEDAATYYCQQSREYPYTFGGGTKLEIKAAAGSGGSGESKYGPPCPSCPAPEFLGGPSVFLFPPKPKDTLMISRTPEVTCVVVDVSQEDPEVQFNWYVDGVEVHNAKTKPREEQFNSTYRVVSVLTVLHQDWLNGKEYKCKVSNKGLPSSIEKTISKAKGQPREPQVYTLPPSQEEMTKNQVSLTCLVKGFYPSDIAVEWESNGQPENNYKTTPPVLDSDGSFFLYSRLTVDKSRWQEGNVFSCSVMHEALHNHYTQKSLSLSLGKMFWVLVVVGGVLACYSLLVTVAFIIFWVKLLMIIHDRREFAKFEKEKMNAKWDTGENPIYKSAVTTVVNPKYEGKKKVAKKPTNKAPHPKQEPQEINFPDDLPGSNTAAPVQETLHGCQPVTQEDGKESRISVQERQ

SEQ ID NO: 420 - protein, 672 aa, synthetic construct
  REGION 1..672: note = Synthetic polypeptide
MGVLLTQRTLLSLVLALLFPSMASMQVQLQQSGAELVKPGASVKISCKASGYSFTGYFMNWVKQSHGKSLEWIGRIHPYDGDTFYNQNFKDKATLTVDKSSNTAHMELLSLTSEDFAVYYCTRYDGSRAMDYWGQGTTVTVSSGGGGSGGGGSGGGGSDIELTQSPASLAVSLGQRAIISCKASQSVSFAGTSLMHWYHQKPGQQPKLLIYRASNLEAGVPTRFSGSGSKTDFTLNIHPVEEEDAATYYCQQSREYPYTFGGGTKLEIKAAAGSGGSGESKYGPPCPSCPAPEFLGGPSVFLFPPKPKDTLMISRTPEVTCVVVDVSQEDPEVQFNWYVDGVEVHNAKTKPREEQFNSTYRVVSVLTVLHQDWLNGKEYKCKVSNKGLPSSIEKTISKAKGQPREPQVYTLPPSQEEMTKNQVSLTCLVKGFYPSDIAVEWESNGQPENNYKTTPPVLDSDGSFFLYSRLTVDKSRWQEGNVFSCSVMHEALHNHYTQKSLSLSLGKMFWVLVVVGGVLACYSLLVTVAFIIFWVRRRGKTNHYQTTVEKKSLTIYAQVQKPGPLQKKLDSFPAQDPCTTIYVAATEPVPESVQETNSITVYASVTLPESKKVAKKPTNKAPHPKQEPQEINFPDDLPGSNTAAPVQETLHGCQPVTQEDGKESRISVQERQ

SEQ ID NO: 421 - protein, 660 aa, synthetic construct
  REGION 1..660: note = Synthetic polypeptide
MGVLLTQRTLLSLVLALLFPSMASMQVQLQQSGAELVKPGASVKISCKASGYSFTGYFMNWVKQSHGKSLEWIGRIHPYDGDTFYNQNFKDKATLTVDKSSNTAHMELLSLTSEDFAVYYCTRYDGSRAMDYWGQGTTVTVSSGGGGSGGGGSGGGGSDIELTQSPASLAVSLGQRAIISCKASQSVSFAGTSLMHWYHQKPGQQPKLLIYRASNLEAGVPTRFSGSGSKTDFTLNIHPVEEEDAATYYCQQSREYPYTFGGGTKLEIKAAAGSGGSGESKYGPPCPSCPAPEFLGGPSVFLFPPKPKDTLMISRTPEVTCVVVDVSQEDPEVQFNWYVDGVEVHNAKTKPREEQFNSTYRVVSVLTVLHQDWLNGKEYKCKVSNKGLPSSIEKTISKAKGQPREPQVYTLPPSQEEMTKNQVSLTCLVKGFYPSDIAVEWESNGQPENNYKTTPPVLDSDGSFFLYSRLTVDKSRWQEGNVFSCSVMHEALHNHYTQKSLSLSLGKMFWVLVVVGGVLACYSLLVTVAFIIFWVAKKPTNKAPHPKQEPQEINFPDDLPGSNTAAPVQETLHGCQPVTQEDGKESRISVQERQKKVAKKPTNKAPHPKQEPQEINFPDDLPGSNTAAPVQETLHGCQPVTQEDGKESRISVQERQKKVA

SEQ ID NO: 422 - protein, 597 aa, synthetic construct
  REGION 1..597: note = Synthetic polypeptide
MGVLLTQRTLLSLVLALLFPSMASMQVQLQQSGAELVKPGASVKISCKASGYSFTGYFMNWVKQSHGKSLEWIGRIHPYDGDTFYNQNFKDKATLTVDKSSNTAHMELLSLTSEDFAVYYCTRYDGSRAMDYWGQGTTVTVSSGGGGSGGGGSGGGGSDIELTQSPASLAVSLGQRAIISCKASQSVSFAGTSLMHWYHQKPGQQPKLLIYRASNLEAGVPTRFSGSGSKTDFTLNIHPVEEEDAATYYCQQSREYPYTFGGGTKLEIKAAAGSGGSGESKYGPPCPSCPAPEFLGGPSVFLFPPKPKDTLMISRTPEVTCVVVDVSQEDPEVQFNWYVDGVEVHNAKTKPREEQFNSTYRVVSVLTVLHQDWLNGKEYKCKVSNKGLPSSIEKTISKAKGQPREPQVYTLPPSQEEMTKNQVSLTCLVKGFYPSDIAVEWESNGQPENNYKTTPPVLDSDGSFFLYSRLTVDKSRWQEGNVFSCSVMHEALHNHYTQKSLSLSLGKMFWVLVVVGGVLACYSLLVTVAFIIFWVKKVAKKPTNKAAHPKQEPQEINFPDDLPGSNTAAPVQETLHGCQPVTQEDGKESRISVQERQ

SEQ ID NO: 423 - protein, 297 aa, synthetic construct
  REGION 1..297: note = Synthetic polypeptide
MQIPQAPWPVVWAVLQLGWRPGWFLDSPDRPWNPPTFSPALLVVTEGDNATFTCSFSNTSESFVLNWYRMSPSNQTDKLAAFPEDRSQPGQDCRFRVTQLPNGRDFHMSVVRARRNDSGTYLCGAISLAPKAQIKESLRAELRVTERRAEVPTAHCPSPLFPGPSKPFWVLVVVGGVLACYSLLVTVAFIIFWVRSKRSRLLHSDYMNMTPRRPGPTRKHYQPYAPPRDFAAYRSKKVAKKPTNKAPHPKQEPQEINFPDDLPGSNTAAPVQETLHGCQPVTQEDGKESRISVQERQ

SEQ ID NO: 424 - protein, 260 aa, synthetic construct
  REGION 1..260: note = Synthetic polypeptide
MQIPQAPWPVVWAVLQLGWRPGWRPGWFLDSPDRPWNPPTFSPALLVVTEGDNATFTCSFSNTSESFVLNWYRMSPSNQTDKLAAFPEDRSQPGQDCRFRVTQLPNGRDFHMSVVRARRNDSGTYLCGAISLAPKAQIKESLRAELRVTERRAEVPTAHCPSPLFPGPSKPFWVLVVVGGVLACYSLLVTVAFIIFWVKKVAKKPTNKAPHPKQEPQEINFPDDLPGSNTAAPVQETLHGCQPVTQEDGKESRISVQERQ

SEQ ID NO: 425 - protein, 271 aa, synthetic construct
  REGION 1..271: note = Synthetic polypeptide
MRWCLLLIWAQGLRQAPLASGMMTGTIETTGNISAEKGGSIILQCHLSSTTAQVTQVNWEQQDQLLAICNADLGWHISPSFKDRVAPGPGLGLTLQSLTVNDTGEYFCIYHTYPDGTYTGRIFLEVLESSVAEHGARFQIPFWVLVVVGGVLACYSLLVTVAFIIFWVRSKRSRLLHSDYMNMTPRRPGPTRKHYQPYAPPRDFAAYRSKKVAKKPTNKAPHPKQEPQEINFPDDLPGSNTAAPVQETLHGCQPVTQEDGKESRISVQERQ

SEQ ID NO: 426 - protein, 230 aa, synthetic construct
  REGION 1..230: note = Synthetic polypeptide
MRWCLLLIWAQGLRQAPLASGMMTGTIETTGNISAEKGGSIILQCHLSSTTAQVTQVNWEQQDQLLAICNADLGWHISPSFKDRVAPGPGLGLTLQSLTVNDTGEYFCIYHTYPDGTYTGRIFLEVLESSVAEHGARFQIPFWVLVVVGGVLACYSLLVTVAFIIFWVKKVAKKPTNKAPHPKQEPQEINFPDDLPGSNTAAPVQETLHGCQPVTQEDGKESRISVQERQ

SEQ ID NO: 427 - protein, 556 aa, synthetic construct
  REGION 1..556: note = Synthetic polypeptide
MGVLLTQRTLLSLVLALLFPSMASMQVQLQQSGAELVKPGASVKISCKASGYSFTGYFMNWVKQSHGKSLEWIGRIHPYDGDTFYNQNFKDKATLTVDKSSNTAHMELLSLTSEDFAVYYCTRYDGSRAMDYWGQGTTVTVSSGGGGSGGGGSGGGGSDIELTQSPASLAVSLGQRAIISCKASQSVSFAGTSLMHWYHQKPGQQPKLLIYRASNLEAGVPTRFSGSGSKTDFTLNIHPVEEEDAATYYCQQSREYPYTFGGGTKLEIKAAAGSGGSGRPGWFLDSPDRPWNPPTFSPALLVVTEGDNATFTCSFSNTSESFVLNWYRMSPSNQTDKLAAFPEDRSQPGQDCRFRVTQLPNGRDFHMSVVRARRNDSGTYLCGAISLAPKAQIKESLRAELRVTERRAEVPTAHCPSPLFPGPSKPFWVLVVVGGVLACYSLLVTVAFIIFWVRSKRSRLLHSDYMNMTPRRPGPTRKHYQPYAPPRDFAAYRSKKVAKKPTNKAPHPKQEPQEINFPDDLPGSNTAAPVQETLHGCQPVTQEDGKESRISVQERQ

SEQ ID NO: 428 - protein, 515 aa, synthetic construct
  REGION 1..515: note = Synthetic polypeptide
MGVLLTQRTLLSLVLALLFPSMASMQVQLQQSGAELVKPGASVKISCKASGYSFTGYFMNWVKQSHGKSLEWIGRIHPYDGDTFYNQNFKDKATLTVDKSSNTAHMELLSLTSEDFAVYYCTRYDGSRAMDYWGQGTTVTVSSGGGGSGGGGSGGGGSDIELTQSPASLAVSLGQRAIISCKASQSVSFAGTSLMHWYHQKPGQQPKLLIYRASNLEAGVPTRFSGSGSKTDFTLNIHPVEEEDAATYYCQQSREYPYTFGGGTKLEIKAAAGSGGSGRPGWFLDSPDRPWNPPTFSPALLVVTEGDNATFTCSFSNTSESFVLNWYRMSPSNQTDKLAAFPEDRSQPGQDCRFRVTQLPNGRDFHMSVVRARRNDSGTYLCGAISLAPKAQIKESLRAELRVTERRAEVPTAHCPSPLFPGPSKPFWVLVVVGGVLACYSLLVTVAFIIFWVKKVAKKPTNKAPHPKQEPQEINFPDDLPGSNTAAPVQETLHGCQPVTQEDGKESRISVQERQ

SEQ ID NO: 429 - protein, 528 aa, synthetic construct
  REGION 1..528: note = Synthetic polypeptide
MGVLLTQRTLLSLVLALLFPSMASMQVQLQQSGAELVKPGASVKISCKASGYSFTGYFMNWVKQSHGKSLEWIGRIHPYDGDTFYNQNFKDKATLTVDKSSNTAHMELLSLTSEDFAVYYCTRYDGSRAMDYWGQGTTVTVSSGGGGSGGGGSGGGGSDIELTQSPASLAVSLGQRAIISCKASQSVSFAGTSLMHWYHQKPGQQPKLLIYRASNLEAGVPTRFSGSGSKTDFTLNIHPVEEEDAATYYCQQSREYPYTFGGGTKLEIKAAAGSGGSGMMTGTIETTGNISAEKGGSIILQCHLSSTTAQVTQVNWEQQDQLLAICNADLGWHISPSFKDRVAPGPGLGLTLQSLTVNDTGEYFCIYHTYPDGTYTGRIFLEVLESSVAEHGARFQIPFWVLVVVGGVLACYSLLVTVAFIIFWVRSKRSRLLHSDYMNMTPRRPGPTRKHYQPYAPPRDFAAYRSKKVAKKPTNKAPHPKQEPQEINFPDDLPGSNTAAPVQETLHGCQPVTQEDGKESRISVQERQ

SEQ ID NO: 430 - protein, 487 aa, synthetic construct
  REGION 1..487: note = Synthetic polypeptide
MGVLLTQRTLLSLVLALLFPSMASMQVQLQQSGAELVKPGASVKISCKASGYSFTGYFMNWVKQSHGKSLEWIGRIHPYDGDTFYNQNFKDKATLTVDKSSNTAHMELLSLTSEDFAVYYCTRYDGSRAMDYWGQGTTVTVSSGGGGSGGGGSGGGGSDIELTQSPASLAVSLGQRAIISCKASQSVSFAGTSLMHWYHQKPGQQPKLLIYRASNLEAGVPTRFSGSGSKTDFTLNIHPVEEEDAATYYCQQSREYPYTFGGGTKLEIKAAAGSGGSGMMTGTIETTGNISAEKGGSIILQCHLSSTTAQVTQVNWEQQDQLLAICNADLGWHISPSFKDRVAPGPGLGLTLQSLTVNDTGEYFCIYHTYPDGTYTGRIFLEVLESSVAEHGARFQIPFWVLVVVGGVLACYSLLVTVAFIIFWVKKVAKKPTNKAPHPKQEPQEINFPDDLPGSNTAAPVQETLHGCQPVTQEDGKESRISVQERQ

SEQ ID NO: 431 - protein, 15 aa, synthetic construct
  REGION 1..15: note = Synthetic polypeptide
GGGGSGGGGSGGGGS

SEQ ID NO: 432 - protein, 165 aa, synthetic construct
  REGION 1..165: note = Synthetic polypeptide
NKILVKQSPMLVAYDNAVNLSCKYSYNLFSREFRASLHKGLDSAVEVCVVYGNYSQQLQVYSKTGFNCDGKLGNESVTFYLQNLYVNQTDIYFCKIEVMYPPPYLDNEKSNGTIIHVKGKHLCPSPLFPGPSKPFWVLVVVGGVLACYSLLVTVAFIIFWVRSKR

SEQ ID NO: 433 - protein, 248 aa, synthetic construct
  REGION 1..248: note = Synthetic polypeptide
NKILVKQSPMLVAYDNAVNLSCKYSYNLFSREFRASLHKGLDSAVEVCVVYGNYSQQLQVYSKTGFNCDGKLGNESVTFYLQNLYVNQTDIYFCKIEVMYPPPYLDNEKSNGTIIHVKGKHLCPSPLFPGPSKPFWVLVVVGGVLACYSLLVTVAFIIFWVRSKRSRLLHSDYMNMTPRRPGPTRKHYQPYAPPRDFAAYRSRFSVVKRGRKKLLYIFKQPFMRPVQTTQEEDGCSCRFPEEEEGGCE

SEQ ID NO: 434 - protein, 239 aa, synthetic construct
  REGION 1..239: note = Synthetic polypeptide
NKILVKQSPMLVAYDNAVNLSCKYSYNLFSREFRASLHKGLDSAVEVCVVYGNYSQQLQVYSKTGFNCDGKLGNESVTFYLQNLYVNQTDIYFCKIEVMYPPPYLDNEKSNGTIIHVKGKHLCPSPLFPGPSKPFWVLVVVGGVLACYSLLVTVAFIIFWVRSKRSRLLHSDYMNMTPRRPGPTRKHYQPYAPPRDFAAYRSRRDQRLPPDAHKPPGGGSFRTPIQEEQADAHSTLAKI

SEQ ID NO: 435 - protein, 318 aa, synthetic construct
  REGION 1..318: note = Synthetic polypeptide
NKILVKQSPMLVAYDNAVNLSCKYSYNLFSREFRASLHKGLDSAVEVCVVYGNYSQQLQVYSKTGFNCDGKLGNESVTFYLQNLYVNQTDIYFCKIEVMYPPPYLDNEKSNGTIIHVKGKHLCPSPLFPGPSKPFWVLVVVGGVLACYSLLVTVAFIIFWVRSKRSRLLHSDYMNMTPRRPGPTRKHYQPYAPPRDFAAYRSKRKKQRSRRNDEELETRAHRVATEERGRKPHQIPASTPQNPATSQHPPPPPGHRSQAPSHRPPPPGHRVQHQPQKRPPAPSGTQVHQQKGPPLPRPRVQPKPPHGAAENSLSPSSN

SEQ ID NO: 436 - protein, 249 aa, synthetic construct
  REGION 1..249: note = Synthetic polypeptide
NKILVKQSPMLVAYDNAVNLSCKYSYNLFSREFRASLHKGLDSAVEVCVVYGNYSQQLQVYSKTGFNCDGKLGNESVTFYLQNLYVNQTDIYFCKIEVMYPPPYLDNEKSNGTIIHVKGKHLCPSPLFPGPSKPFWVLVVVGGVLACYSLLVTVAFIIFWVRSKRSRLLHSDYMNMTPRRPGPTRKHYQPYAPPRDFAAYRSKLLMIIHDRREFAKFEKEKMNAKWDTGENPIYKSAVTTVVNPKYEGK

SEQ ID NO: 437 - protein, 260 aa, synthetic construct
  REGION 1..260: note = Synthetic polypeptide
NKILVKQSPMLVAYDNAVNLSCKYSYNLFSREFRASLHKGLDSAVEVCVVYGNYSQQLQVYSKTGFNCDGKLGNESVTFYLQNLYVNQTDIYFCKIEVMYPPPYLDNEKSNGTIIHVKGKHLCPSPLFPGPSKPFWVLVVVGGVLACYSLLVTVAFIIFWVRSKRSRLLHSDYMNMTPRRPGPTRKHYQPYAPPRDFAAYRSQLGLHIWQLRSQCMWPRETQLLLEVPPSTEDARSCQFPEEERGERSAEEKGRLGDLWV

SEQ ID NO: 438 - protein, 288 aa, synthetic construct
  REGION 1..288: note = Synthetic polypeptide
NKILVKQSPMLVAYDNAVNLSCKYSYNLFSREFRASLHKGLDSAVEVCVVYGNYSQQLQVYSKTGFNCDGKLGNESVTFYLQNLYVNQTDIYFCKIEVMYPPPYLDNEKSNGTIIHVKGKHLCPSPLFPGPSKPFWVLVVVGGVLACYSLLVTVAFIIFWVRSKRSRLLHSDYMNMTPRRPGPTRKHYQPYAPPRDFAAYRSERTMPRIPTLKNLEDLVTEYHGNFSAWSGVSKGLAESLQPDYSERLCLVSEIPPKGGALGEGPGASPCNQHSPYWAPPCYTLKPET

SEQ ID NO: 439 - protein, 264 aa, synthetic construct
  REGION 1..264: note = Synthetic polypeptide
NKILVKQSPMLVAYDNAVNLSCKYSYNLFSREFRASLHKGLDSAVEVCVVYGNYSQQLQVYSKTGFNCDGKLGNESVTFYLQNLYVNQTDIYFCKIEVMYPPPYLDNEKSNGTIIHVKGKHLCPSPLFPGPSKPFWVLVVVGGVLACYSLLVTVAFIIFWVRSKRSRLLHSDYMNMTPRRPGPTRKHYQPYAPPRDFAAYRSKKVAKKPTNKAPHPKQEPQEINFPDDLPGSNTAAPVQETLHGCQPVTQEDGKESRISVQERQ

SEQ ID NO: 440 - protein, 277 aa, synthetic construct
  REGION 1..277: note = Synthetic polypeptide
NKILVKQSPMLVAYDNAVNLSCKYSYNLFSREFRASLHKGLDSAVEVCVVYGNYSQQLQVYSKTGFNCDGKLGNESVTFYLQNLYVNQTDIYFCKIEVMYPPPYLDNEKSNGTIIHVKGKHLCPSPLFPGPSKPFWVLVVVGGVLACYSLLVTVAFIIFWVRSKRSRLLHSDYMNMTPRRPGPTRKHYQPYAPPRDFAAYRSRRRGKTNHYQTTVEKKSLTIYAQVQKPGPLQKKLDSFPAQDPCTTIYVAATEPVPESVQETNSITVYASVTLPES

SEQ ID NO: 441 - protein, 380 aa, synthetic construct
  REGION 1..380: note = Synthetic polypeptide
NKILVKQSPMLVAYDNAVNLSCKYSYNLFSREFRASLHKGLDSAVEVCVVYGNYSQQLQVYSKTGFNCDGKLGNESVTFYLQNLYVNQTDIYFCKIEVMYPPPYLDNEKSNGTIIHVKGKHLCPSPLFPGPSKPFWVLVVVGGVLACYSLLVTVAFIIFWVRSKRSRLLHSDYMNMTPRRPGPTRKHYQPYAPPRDFAAYRSKRKKQRSRRNDEELETRAHRVATEERGRKPHQIPASTPQNPATSQHPPPPPGHRSQAPSHRPPPPGHRVQHQPQKRPPAPSGTQVHQQKGPPLPRPRVQPKPPHGAAENSLSPSSNKKVAKKPTNKAPHPKQEPQEINFPDDLPGSNTAAPVQETLHGCQPVTQEDGKESRISVQERQ

SEQ ID NO: 442 - protein, 107 aa, synthetic construct
  REGION 1..107: note = Synthetic polypeptide
IEVMYPPPYLDNEKSNGTIIHVKGKHLCPSPLFPGPSKPFWVLVVVGGVLACYSLLVTVAFIIFWVRSKRSRLLHSDYMNMTPRRPGPTRKHYQPYAPPRDFAAYRS

SEQ ID NO: 443 - protein, 8 aa, synthetic construct
  REGION 1..8: note = Synthetic polypeptide
PTNKAPHP

SEQ ID NO: 444 - protein, 7 aa, synthetic construct
  REGION 1..7: note = Synthetic polypeptide
PTNKAPH

SEQ ID NO: 445 - protein, 5 aa, synthetic construct
  REGION 1..5: note = Synthetic polypeptide
PKQET

SEQ ID NO: 446 - protein, 5 aa, synthetic construct
  REGION 1..5: note = Synthetic polypeptide
PVQET

SEQ ID NO: 447 - protein, 5 aa, synthetic construct
  REGION 1..5: note = Synthetic polypeptide
SVQET

SEQ ID NO: 448 - protein, 8 aa, synthetic construct
  REGION 1..8: note = Synthetic polypeptide
QEPQEINF

SEQ ID NO: 449 - protein, 8 aa, synthetic construct
  REGION 1..8: note = Synthetic polypeptide
DYKDDDDK

SEQ ID NO: 450 - protein, 11 aa, synthetic construct
  REGION 1..11: note = Synthetic polypeptide
PFSKEECAFRS

SEQ ID NO: 451 - protein, 11 aa, synthetic construct
  REGION 1..11: note = Synthetic polypeptide
AAPVQETLHGC

SEQ ID NO: 452 - protein, 11 aa, synthetic construct
  REGION 1..11: note = Synthetic polypeptide
MLSVEEEGKED

SEQ ID NO: 453 - protein, 11 aa, synthetic construct
  REGION 1..11: note = Synthetic polypeptide
TIPIQEDYRKP

SEQ ID NO: 454 - protein, 11 aa, synthetic construct
  REGION 1..11: note = Synthetic polypeptide
STPHQEDGKAW

SEQ ID NO: 455 - protein, 11 aa, synthetic construct
  REGION 1..11: note = Synthetic polypeptide
TVAVEETIPST

SEQ ID NO: 456 - protein, 11 aa, synthetic construct
  REGION 1..11: note = Synthetic polypeptide
RTPIQEEQADA

SEQ ID NO: 457 - protein, 11 aa, synthetic construct
  REGION 1..11: note = Synthetic polypeptide
TGAAQEEDACS

SEQ ID NO: 458 - protein, 11 aa, synthetic construct
  REGION 1..11: note = Synthetic polypeptide
RCPQEEEGGGG

SEQ ID NO: 459 - protein, 11 aa, synthetic construct
  REGION 1..11: note = Synthetic polypeptide
VQTTQEEDGCS

SEQ ID NO: 460 - protein, 11 aa, synthetic construct
  REGION 1..11: note = Synthetic polypeptide
RFPEEEEGGCE

SEQ ID NO: 461 - protein, 11 aa, synthetic construct
  REGION 1..11: note = Synthetic polypeptide
RTPVQESGYPD

SEQ ID NO: 462 - protein, 11 aa, synthetic construct
  REGION 1..11: note = Synthetic polypeptide
RPPVQETGGGG

SEQ ID NO: 463 - protein, 11 aa, synthetic construct
  REGION 1..11: note = Synthetic polypeptide
HPPVQETGGGG

SEQ ID NO: 464 - protein, 11 aa, synthetic construct
  REGION 1..11: note = Synthetic polypeptide
HPPVQETGEGG

SEQ ID NO: 465 - protein, 11 aa, synthetic construct
  REGION 1..11: note = Synthetic polypeptide
HPPIQETGNGG

SEQ ID NO: 466 - protein, 11 aa, synthetic construct
  REGION 1..11: note = Synthetic polypeptide
ALSSQEAEEVE

SEQ ID NO: 467 - protein, 11 aa, synthetic construct
  REGION 1..11: note = Synthetic polypeptide
SVPIQCTDKTD

SEQ ID NO: 468 - protein, 11 aa, synthetic construct
  REGION 1..11: note = Synthetic polypeptide
PHPQQATDDSS

SEQ ID NO: 469 - protein, 11 aa, synthetic construct
  REGION 1..11: note = Synthetic polypeptide
PYPIQATDGGN

SEQ ID NO: 470 - protein, 11 aa, synthetic construct
  REGION 1..11: note = Synthetic polypeptide
PHPIQATDGAN

SEQ ID NO: 471 - protein, 11 aa, synthetic construct
  REGION 1..11: note = Synthetic polypeptide
PYPVQASDGGD

SEQ ID NO: 472 - protein, 8 aa, synthetic construct
  VARIANT 5: note = Xaa can be any amino acid
  REGION 1..8: note = Synthetic polypeptide
PSATXQEE

SEQ ID NO: 473 - protein, 4 aa, synthetic construct
  REGION 1..4: note = Synthetic polypeptide
PVQE

SEQ ID NO: 474 - protein, 38 aa, synthetic construct
  REGION 1..38: note = Synthetic polypeptide
KKVAKKPTNKAPHPKQEPQEINFPDDLPGSNTAAPVQE

SEQ ID NO: 475 - protein, 24 aa, synthetic construct
  REGION 1..24: note = Synthetic polypeptide
TLHGCQPVTQEDGKESRISVQERQ

SEQ ID NO: 476 - protein, 38 aa, synthetic construct
  REGION 1..38: note = Synthetic polypeptide
KKVAKKPTNKAPHPKQEPQEINFPDDLPGSNTAATQEE

SEQ ID NO: 477 - protein, 24 aa, synthetic construct
  REGION 1..24: note = Synthetic polypeptide
TLHGCQPVTQEDGKESRISVQERQ

SEQ ID NO: 478 - protein, 38 aa, synthetic construct
  REGION 1..38: note = Synthetic polypeptide
KKVAKKPTNKAPHPKQEPQEINFPDDLPGSNTAASKEE

SEQ ID NO: 479 - protein, 24 aa, synthetic construct
  REGION 1..24: note = Synthetic polypeptide
TLHGCQPVTQEDGKESRISVQERQ

SEQ ID NO: 480 - protein, 6 aa, synthetic construct
  REGION 1..6: note = Synthetic polypeptide
PQEINF

SEQ ID NO: 481 - protein, 6 aa, synthetic construct
  REGION 1..6: note = Synthetic polypeptide
PQEIDF

SEQ ID NO: 482 - protein, 6 aa, synthetic construct
  REGION 1..6: note = Synthetic polypeptide
PPELRF

SEQ ID NO: 483 - protein, 6 aa, synthetic construct
  REGION 1..6: note = Synthetic polypeptide
PEEMSW

SEQ ID NO: 484 - protein, 6 aa, synthetic construct
  REGION 1..6: note = Synthetic polypeptide
PQENSY

SEQ ID NO: 485 - protein, 6 aa, synthetic construct
  REGION 1..6: note = Synthetic polypeptide
PVESDE

SEQ ID NO: 486 - protein, 6 aa, synthetic construct
  REGION 1..6: note = Synthetic polypeptide
PEESDE

SEQ ID NO: 487 - protein, 6 aa, synthetic construct
  REGION 1..6: note = Synthetic polypeptide
PEETDE

SEQ ID NO: 488 - protein, 6 aa, synthetic construct
  REGION 1..6: note = Synthetic polypeptide
PTENGE

SEQ ID NO: 489 - protein, 6 aa, synthetic construct
  REGION 1..6: note = Synthetic polypeptide
PVEDDE

SEQ ID NO: 490 - protein, 6 aa, synthetic construct
  REGION 1..6: note = Synthetic polypeptide
PPENYE

SEQ ID NO: 491 - protein, 6 aa, synthetic construct
  REGION 1..6: note = Synthetic polypeptide
PSELRF

SEQ ID NO: 492 - skipped

SEQ ID NO: 493 - protein, 38 aa, synthetic construct; identical to SEQ ID NO: 474
  REGION 1..38: note = Synthetic polypeptide

SEQ ID NO: 494 - protein, 24 aa, synthetic construct
  REGION 1..24: note = Synthetic polypeptide
TLHGCQPVTQEDGKESRISVQERQ

SEQ ID NO: 495 - protein, 38 aa, synthetic construct
  REGION 1..38: note = Synthetic polypeptide
KKVAKKPTNKAPHPKQEPEEMSWPDDLPGSNTAAPVQE

SEQ ID NO: 496 - protein, 24 aa, synthetic construct
  REGION 1..24: note = Synthetic polypeptide
TLHGCQPVTQEDGKESRISVQERQ

SEQ ID NO: 497 - protein, 38 aa, synthetic construct; identical to SEQ ID NO: 474
  REGION 1..38: note = Synthetic polypeptide

SEQ ID NO: 498 - protein, 24 aa, synthetic construct
  REGION 1..24: note = Synthetic polypeptide
TLHGCQPVTQEDGKESRISVQERQ

SEQ ID NO: 499 - protein, 62 aa, synthetic construct
  REGION 1..62: note = Synthetic polypeptide
  VARIANT 19: note = Xaa can be any amino acid
  VARIANT 21..22: note = Xaa can be any amino acid
  VARIANT 23: note = Xaa can be any acidic or aromatic amino acid
KKVAKKPTNKAPHPKQEPXEXXXPDDLPGSNTAAPVQETLHGCQPVTQEDGKESRISVQERQ

SEQ ID NO: 500 - protein, 62 aa, synthetic construct
  REGION 1..62: note = Synthetic polypeptide
  VARIANT 35: note = Xaa can be P, S, A, or T
  VARIANT 36: note = Xaa can be any amino acid
  VARIANT 37: note = Xaa can be Q or E
KKVAKKPTNKAPHPKQEPQEINFPDDLPGSNTAAXXXETLHGCQPVTQEDGKESRISVQERQ

SEQ ID NO: 501 - protein, 38 aa, synthetic construct; identical to SEQ ID NO: 474
  REGION 1..38: note = Synthetic polypeptide

SEQ ID NO: 502 - protein, 24 aa, synthetic construct
  REGION 1..24: note = Synthetic polypeptide
  VARIANT 19: note = Xaa can be P, S, A, or T
  VARIANT 20: note = Xaa can be any amino acid
  VARIANT 21: note = Xaa can be Q or E
TLHGCQPVTQEDGKESRIXXXERQ

SEQ ID NO: 503 - protein, 62 aa, synthetic construct
  REGION 1..62: note = Synthetic polypeptide
  VARIANT 19: note = Xaa can be any amino acid
  VARIANT 21..22: note = Xaa can be any amino acid
  VARIANT 23: note = Xaa can be any acidic or aromatic amino acid
  VARIANT 35: note = Xaa can be P, S, A, or T
  VARIANT 36: note = Xaa can be any amino acid
  VARIANT 37: note = Xaa can be Q or E
KKVAKKPTNKAPHPKQEPXEXXXPDDLPGSNTAAXXXETLHGCQPVTQEDGKESRISVQERQ

SEQ ID NO: 504 - protein, 62 aa, synthetic construct
  REGION 1..62: note = Synthetic polypeptide
  VARIANT 35: note = Xaa can be P, S, A, or T
  VARIANT 36: note = Xaa can be any amino acid
  VARIANT 37: note = Xaa can be Q or E
  VARIANT 57: note = Xaa can be P, S, A, or T
  VARIANT 58: note = Xaa can be any amino acid
  VARIANT 59: note = Xaa can be Q or E
KKVAKKPTNKAPHPKQEPQEINFPDDLPGSNTAAXXXETLHGCQPVTQEDGKESRIXXXERQ

SEQ ID NO: 505 - protein, 38 aa, synthetic construct
  REGION 1..38: note = Synthetic polypeptide
  VARIANT 19: note = Xaa can be any amino acid
  VARIANT 21..22: note = Xaa can be any amino acid
  VARIANT 23: note = Xaa can be any acidic or aromatic amino acid
KKVAKKPTNKAPHPKQEPXEXXXPDDLPGSNTAAPVQE

SEQ ID NO: 506 - protein, 4 aa, synthetic construct
PKQE

SEQ ID NO: 507 - protein, 4 aa, synthetic construct
PVQE

SEQ ID NO: 508 - protein, 4 aa, synthetic construct
SVQE

SEQ ID NO: 509 - protein, 6 aa, synthetic construct
PQEINF

SEQ ID NO: 510 - protein, 540 aa, synthetic construct
MGVLLTQRTLLSLVLALLFPSMASMQVQLQQSGAELVKPGASVKISCKASGYSFTGYFMNWVKQSHGKSLEWIGRIHPYDGDTFYNQNFKDKATLTVDKSSNTAHMELLSLTSEDFAVYYCTRYDGSRAMDYWGQGTTVTVSSGGGGSGGGGSGGGGSDIELTQSPASLAVSLGQRAIISCKASQSVSFAGTSLMHWYHQKPGQQPKLLIYRASNLEAGVPTRFSGSGSKTDFTLNIHPVEEEDAATYYCQQSREYPYTFGGGTKLEIKAAAGSGGSGILVKQSPMLVAYDNAVNLSCKYSYNLFSREFRASLHKGLDSAVEVCVVYGNYSQQLQVYSKTGFNCDGKLGNESVTFYLQNLYVNQTDIYFCKIEVMYPPPYLDNEKSNGTIIHVKGKHLCPSPLFPGPSKPFWVLVVVGGVLACYSLLVTVAFIIFWVRSKRSRLLHSDYMNMTPRRPGPTRKHYQPYAPPRDFAAYRSKKVAKKPTNKAPHPKQEPQEINFPDDLPGSNTAATQEETLHGCQPVTQEDGKESRISVQERQ

SEQ ID NO: 511 - protein, 540 aa, synthetic construct
MGVLLTQRTLLSLVLALLFPSMASMQVQLQQSGAELVKPGASVKISCKASGYSFTGYFMNWVKQSHGKSLEWIGRIHPYDGDTFYNQNFKDKATLTVDKSSNTAHMELLSLTSEDFAVYYCTRYDGSRAMDYWGQGTTVTVSSGGGGSGGGGSGGGGSDIELTQSPASLAVSLGQRAIISCKASQSVSFAGTSLMHWYHQKPGQQPKLLIYRASNLEAGVPTRFSGSGSKTDFTLNIHPVEEEDAATYYCQQSREYPYTFGGGTKLEIKAAAGSGGSGILVKQSPMLVAYDNAVNLSCKYSYNLFSREFRASLHKGLDSAVEVCVVYGNYSQQLQVYSKTGFNCDGKLGNESVTFYLQNLYVNQTDIYFCKIEVMYPPPYLDNEKSNGTIIHVKGKHLCPSPLFPGPSKPFWVLVVVGGVLACYSLLVTVAFIIFWVRSKRSRLLHSDYMNMTPRRPGPTRKHYQPYAPPRDFAAYRSKKVAKKPTNKAPHPKQEPQEINFPDDLPGSNTAASKEETLHGCQPVTQEDGKESRISVQERQ

SEQ ID NO: 512 - protein, 540 aa, synthetic construct
MGVLLTQRTLLSLVLALLFPSMASMQVQLQQSGAELVKPGASVKISCKASGYSFTGYFMNWVKQSHGKSLEWIGRIHPYDGDTFYNQNFKDKATLTVDKSSNTAHMELLSLTSEDFAVYYCTRYDGSRAMDYWGQGTTVTVSSGGGGSGGGGSGGGGSDIELTQSPASLAVSLGQRAIISCKASQSVSFAGTSLMHWYHQKPGQQPKLLIYRASNLEAGVPTRFSGSGSKTDFTLNIHPVEEEDAATYYCQQSREYPYTFGGGTKLEIKAAAGSGGSGILVKQSPMLVAYDNAVNLSCKYSYNLFSREFRASLHKGLDSAVEVCVVYGNYSQQLQVYSKTGFNCDGKLGNESVTFYLQNLYVNQTDIYFCKIEVMYPPPYLDNEKSNGTIIHVKGKHLCPSPLFPGPSKPFWVLVVVGGVLACYSLLVTVAFIIFWVRSKRSRLLHSDYMNMTPRRPGPTRKHYQPYAPPRDFAAYRSKKVAKKPTNKAPHPKQEPQEINFPDDLPGSNTAAAVEETLHGCQPVTQEDGKESRISVQERQ

SEQ ID NO: 513 - protein, 540 aa, synthetic construct
MGVLLTQRTLLSLVLALLFPSMASMQVQLQQSGAELVKPGASVKISCKASGYSFTGYFMNWVKQSHGKSLEWIGRIHPYDGDTFYNQNFKDKATLTVDKSSNTAHMELLSLTSEDFAVYYCTRYDGSRAMDYWGQGTTVTVSSGGGGSGGGGSGGGGSDIELTQSPASLAVSLGQRAIISCKASQSVSFAGTSLMHWYHQKPGQQPKLLIYRASNLEAGVPTRFSGSGSKTDFTLNIHPVEEEDAATYYCQQSREYPYTFGGGTKLEIKAAAGSGGSGILVKQSPMLVAYDNAVNLSCKYSYNLFSREFRASLHKGLDSAVEVCVVYGNYSQQLQVYSKTGFNCDGKLGNESVTFYLQNLYVNQTDIYFCKIEVMYPPPYLDNEKSNGTIIHVKGKHLCPSPLFPGPSKPFWVLVVVGGVLACYSLLVTVAFIIFWVRSKRSRLLHSDYMNMTPRRPGPTRKHYQPYAPPRDFAAYRSKKVAKKPTNKAPHPKQEPQEINFPDDLPGSNTAAPVQETLHGCQPVTQEDGKESRIAVEERQ

SEQ ID NO: 514 - protein, 540 aa, synthetic construct
MGVLLTQRTLLSLVLALLFPSMASMQVQLQQSGAELVKPGASVKISCKASGYSFTGYFMNWVKQSHGKSLEWIGRIHPYDGDTFYNQNFKDKATLTVDKSSNTAHMELLSLTSEDFAVYYCTRYDGSRAMDYWGQGTTVTVSSGGGGSGGGGSGGGGSDIELTQSPASLAVSLGQRAIISCKASQSVSFAGTSLMHWYHQKPGQQPKLLIYRASNLEAGVPTRFSGSGSKTDFTLNIHPVEEEDAATYYCQQSREYPYTFGGGTKLEIKAAAGSGGSGILVKQSPMLVAYDNAVNLSCKYSYNLFSREFRASLHKGLDSAVEVCVVYGNYSQQLQVYSKTGFNCDGKLGNESVTFYLQNLYVNQTDIYFCKIEVMYPPPYLDNEKSNGTIIHVKGKHLCPSPLFPGPSKPFWVLVVVGGVLACYSLLVTVAFIIFWVRSKRSRLLHSDYMNMTPRRPGPTRKHYQPYAPPRDFAAYRSKKVAKKPTNKAPHPKQEPQEINFPDDLPGSNTAAPVQETLHGCQPVTQEDGKESRIPEEERQ

SEQ ID NO: 515 - protein, 540 aa, synthetic construct
MGVLLTQRTLLSLVLALLFPSMASMQVQLQQSGAELVKPGASVKISCKASGYSFTGYFMNWVKQSHGKSLEWIGRIHPYDGDTFYNQNFKDKATLTVDKSSNTAHMELLSLTSEDFAVYYCTRYDGSRAMDYWGQGTTVTVSSGGGGSGGGGSGGGGSDIELTQSPASLAVSLGQRAIISCKASQSVSFAGTSLMHWYHQKPGQQPKLLIYRASNLEAGVPTRFSGSGSKTDFTLNIHPVEEEDAATYYCQQSREYPYTFGGGTKLEIKAAAGSGGSGILVKQSPMLVAYDNAVNLSCKYSYNLFSREFRASLHKGLDSAVEVCVVYGNYSQQLQVYSKTGFNCDGKLGNESVTFYLQNLYVNQTDIYFCKIEVMYPPPYLDNEKSNGTIIHVKGKHLCPSPLFPGPSKPFWVLVVVGGVLACYSLLVTVAFIIFWVRSKRSRLLHSDYMNMTPRRPGPTRKHYQPYAPPRDFAAYRSKKVAKKPTNKAPHPKQEPEEMSWPDDLPGSNTAAPVQETLHGCQPVTQEDGKESRISVQERQ

SEQ ID NO: 516 - protein, 540 aa, synthetic construct
MGVLLTQRTLLSLVLALLFPSMASMQVQLQQSGAELVKPGASVKISCKASGYSFTGYFMNWVKQSHGKSLEWIGRIHPYDGDTFYNQNFKDKATLTVDKSSNTAHMELLSLTSEDFAVYYCTRYDGSRAMDYWGQGTTVTVSSGGGGSGGGGSGGGGSDIELTQSPASLAVSLGQRAIISCKASQSVSFAGTSLMHWYHQKPGQQPKLLIYRASNLEAGVPTRFSGSGSKTDFTLNIHPVEEEDAATYYCQQSREYPYTFGGGTKLEIKAAAGSGGSGILVKQSPMLVAYDNAVNLSCKYSYNLFSREFRASLHKGLDSAVEVCVVYGNYSQQLQVYSKTGFNCDGKLGNESVTFYLQNLYVNQTDIYFCKIEVMYPPPYLDNEKSNGTIIHVKGKHLCPSPLFPGPSKPFWVLVVVGGVLACYSLLVTVAFIIFWVRSKRSRLLHSDYMNMTPRRPGPTRKHYQPYAPPRDFAAYRSKKVAKKPTNKAPHPKQEPPENYEPDDLPGSNTAAPVQETLHGCQPVTQEDGKESRISVQERQ

SEQ ID NO: 517 - protein, 540 aa, synthetic construct
MGVLLTQRTLLSLVLALLFPSMASMQVQLQQSGAELVKPGASVKISCKASGYSFTGYFMNWVKQSHGKSLEWIGRIHPYDGDTFYNQNFKDKATLTVDKSSNTAHMELLSLTSEDFAVYYCTRYDGSRAMDYWGQGTTVTVSSGGGGSGGGGSGGGGSDIELTQSPASLAVSLGQRAIISCKASQSVSFAGTSLMHWYHQKPGQQPKLLIYRASNLEAGVPTRFSGSGSKTDFTLNIHPVEEEDAATYYCQQSREYPYTFGGGTKLEIKAAAGSGGSGILVKQSPMLVAYDNAVNLSCKYSYNLFSREFRASLHKGLDSAVEVCVVYGNYSQQLQVYSKTGFNCDGKLGNESVTFYLQNLYVNQTDIYFCKIEVMYPPPYLDNEKSNGTIIHVKGKHLCPSPLFPGPSKPFWVLVVVGGVLACYSLLVTVAFIIFWVRSKRSRLLHSDYMNMTPRRPGPTRKHYQPYAPPRDFAAYRSKKVAKKPTNKAPHPKQEPQENSYPDDLPGSNTAAPVQETLHGCQPVTQEDGKESRISVQERQ

SEQ ID NO: 518 - protein, 540 aa, synthetic construct
MGVLLTQRTLLSLVLALLFPSMASMQVQLQQSGAELVKPGASVKISCKASGYSFTGYFMNWVKQSHGKSLEWIGRIHPYDGDTFYNQNFKDKATLTVDKSSNTAHMELLSLTSEDFAVYYCTRYDGSRAMDYWGQGTTVTVSSGGGGSGGGGSGGGGSDIELTQSPASLAVSLGQRAIISCKASQSVSFAGTSLMHWYHQKPGQQPKLLIYRASNLEAGVPTRFSGSGSKTDFTLNIHPVEEEDAATYYCQQSREYPYTFGGGTKLEIKAAAGSGGSGILVKQSPMLVAYDNAVNLSCKYSYNLFSREFRASLHKGLDSAVEVCVVYGNYSQQLQVYSKTGFNCDGKLGNESVTFYLQNLYVNQTDIYFCKIEVMYPPPYLDNEKSNGTIIHVKGKHLCPSPLFPGPSKPFWVLVVVGGVLACYSLLVTVAFIIFWVRSKRSRLLHSDYMNMTPRRPGPTRKHYQPYAPPRDFAAYRSKKVAKKPTNKAPHPKQEPEELRWPDDLPGSNTAATHEETLHGCQPVTQEDGKESRIAIEERQ

SEQ ID NO: 519 - protein, 493 aa, synthetic construct
MGVLLTQRTLLSLVLALLFPSMASMQVQLQQSGAELVKPGASVKISCKASGYSFTGYFMNWVKQSHGKSLEWIGRIHPYDGDTFYNQNFKDKATLTVDKSSNTAHMELLSLTSEDFAVYYCTRYDGSRAMDYWGQGTTVTVSSGGGGSGGGGSGGGGSDIELTQSPASLAVSLGQRAIISCKASQSVSFAGTSLMHWYHQKPGQQPKLLIYRASNLEAGVPTRFSGSGSKTDFTLNIHPVEEEDAATYYCQQSREYPYTFGGGTKLEIKAAAGSGGSGILVKQSPMLVAYDNAVNLSCKYSYNLFSREFRASLHKGLDSAVEVCVVYGNYSQQLQVYSKTGFNCDGKLGNESVTFYLQNLYVNQTDIYFCKIEVMYPPPYLDNEKSNGTIIHVKGKHLCPSPLFPGPSKPFWVLVVVGGVLACYSLLVTVAFIIFWVRSKRSRLLHSDYMNMTPRRPGPTRKHYQPYAPPRDFAAYRSSNTAAPVQETLHGCQ

SEQ ID NO: 520 - protein, 4 aa, synthetic construct
PAQE

SEQ ID NO: 521 - protein, 4 aa, synthetic construct
PAEE

SEQ ID NO: 522 - protein, 4 aa, synthetic construct
PRQE

SEQ ID NO: 523 - protein, 4 aa, synthetic construct
PREE

SEQ ID NO: 524 - protein, 4 aa, synthetic construct
PNQE

SEQ ID NO: 525 - protein, 4 aa, synthetic construct
PNEE

SEQ ID NO: 526 - protein, 4 aa, synthetic construct
PDQE

SEQ ID NO: 527 - protein, 4 aa, synthetic construct
PDEE

SEQ ID NO: 528 - protein, 4 aa, synthetic construct
PCQE

SEQ ID NO: 529 - protein, 4 aa, synthetic construct
PCEE

SEQ ID NO: 530 - protein, 4 aa, synthetic construct
PQQE

SEQ ID NO: 531 - protein, 4 aa, synthetic construct
PQEE

SEQ ID NO: 532 - protein, 4 aa, synthetic construct
PEQE

SEQ ID NO: 533 - protein, 4 aa, synthetic construct
PEEE

SEQ ID NO: 534 - protein, 4 aa, synthetic construct
PGQE

SEQ ID NO: 535 - protein, 4 aa, synthetic construct
PGEE

SEQ ID NO: 536 - protein, 4 aa, synthetic construct
PHQE

SEQ ID NO: 537 - protein, 4 aa, synthetic construct
PHEE

SEQ ID NO: 538 - protein, 4 aa, synthetic construct
PIQE

SEQ ID NO: 539 - protein, 4 aa, synthetic construct
PIEE

SEQ ID NO: 540 - protein, 4 aa, synthetic construct
PLQE

SEQ ID NO: 541 - protein, 4 aa, synthetic construct
PLEE

SEQ ID NO: 542 - protein, 4 aa, synthetic construct
PKQE

SEQ ID NO: 543 - protein, 4 aa, synthetic construct
PKEE

SEQ ID NO: 544 - protein, 4 aa, synthetic construct
PMQE

SEQ ID NO: 545 - protein, 4 aa, synthetic construct
PMEE

SEQ ID NO: 546 - protein, 4 aa, synthetic construct
PFQE

SEQ ID NO: 547 - protein, 4 aa, synthetic construct
PFEE

SEQ ID NO: 548 - protein, 4 aa, synthetic construct
PPQE

SEQ ID NO: 549 - protein, 4 aa, synthetic construct
PPEE

SEQ ID NO: 550 - protein, 4 aa, synthetic construct
PSQE

SEQ ID NO: 551 - protein, 4 aa, synthetic construct
PSEE

SEQ ID NO: 552 - protein, 4 aa, synthetic construct
PTQE

SEQ ID NO: 553 - protein, 4 aa, synthetic construct
PTEE

SEQ ID NO: 554 - protein, 4 aa, synthetic construct
PWQE

SEQ ID NO: 555 - protein, 4 aa, synthetic construct
PWEE

SEQ ID NO: 556 - protein, 4 aa, synthetic construct
PYQE

SEQ ID NO: 557 - protein, 4 aa, synthetic construct
PYEE

SEQ ID NO: 558 - protein, 4 aa, synthetic construct
PVQE

SEQ ID NO: 559 - protein, 4 aa, synthetic construct
PVEE

SEQ ID NO: 560 - protein, 4 aa, synthetic construct
SAQE

SEQ ID NO: 561 - protein, 4 aa, synthetic construct
SAEE

SEQ ID NO: 562 - protein, 4 aa, synthetic construct
SRQE

SEQ ID NO: 563 - protein, 4 aa, synthetic construct
SREE

SEQ ID NO: 564 - protein, 4 aa, synthetic construct
SNQE

SEQ ID NO: 565 - protein, 4 aa, synthetic construct
SNEE

SEQ ID NO: 566 - protein, 4 aa, synthetic construct
SDQE

SEQ ID NO: 567 - protein, 4 aa, synthetic construct
SDEE

SEQ ID NO: 568 - protein, 4 aa, synthetic construct
SCQE

SEQ ID NO: 569 - protein, 4 aa, synthetic construct
SCEE

SEQ ID NO: 570 - protein, 4 aa, synthetic construct
SQQE

SEQ ID NO: 571 - protein, 4 aa, synthetic construct
SQEE

SEQ ID NO: 572 - protein, 4 aa, synthetic construct
SEQE

SEQ ID NO: 573 - protein, 4 aa, synthetic construct
SEEE

SEQ ID NO: 574 - protein, 4 aa, synthetic construct
SGQE

SEQ ID NO: 575 - protein, 4 aa, synthetic construct
SGEE

SEQ ID NO: 576 - protein, 4 aa, synthetic construct
SHQE

SEQ ID NO: 577 - protein, 4 aa, synthetic construct
SHEE

SEQ ID NO: 578 - protein, 4 aa, synthetic construct
SIQE

SEQ ID NO: 579 - protein, 4 aa, synthetic construct
SIEE

SEQ ID NO: 580 - protein, 4 aa, synthetic construct
SLQE

SEQ ID NO: 581 - protein, 4 aa, synthetic construct
SLEE

SEQ ID NO: 582 - protein, 4 aa, synthetic construct
SKQE

SEQ ID NO: 583 - protein, 4 aa, synthetic construct
SKEE

SEQ ID NO: 584 - protein, 4 aa, synthetic construct
SMQE

SEQ ID NO: 585 - protein, 4 aa, synthetic construct
SMEE

SEQ ID NO: 586 - protein, 4 aa, synthetic construct
SFQE

SEQ ID NO: 587 - protein, 4 aa, synthetic construct
SFEE

SEQ ID NO: 588 - protein, 4 aa, synthetic construct
SPQE

SEQ ID NO: 589 - protein, 4 aa, synthetic construct
SPEE

SEQ ID NO: 590 - protein, 4 aa, synthetic construct
SSQE

SEQ ID NO: 591 - protein, 4 aa, synthetic construct
SSEE

SEQ ID NO: 592 - protein, 4 aa, synthetic construct
STQE

SEQ ID NO: 593 - protein, 4 aa, synthetic construct
STEE

SEQ ID NO: 594 - protein, 4 aa, synthetic construct
SWQE

SEQ ID NO: 595 - protein, 4 aa, synthetic construct
SWEE

SEQ ID NO: 596 - protein, 4 aa, synthetic construct
SYQE

SEQ ID NO: 597 - protein, 4 aa, synthetic construct
SYEE

SEQ ID NO: 598 - protein, 4 aa, synthetic construct
SVQE

SEQ ID NO: 599 - protein, 4 aa, synthetic construct
SVEE

SEQ ID NO: 600 - protein, 4 aa, synthetic construct
AAQE

SEQ ID NO: 601 - protein, 4 aa, synthetic construct
AAEE

SEQ ID NO: 602 - protein, 4 aa, synthetic construct
ARQE

SEQ ID NO: 603 - protein, 4 aa, synthetic construct
AREE

SEQ ID NO: 604 - protein, 4 aa, synthetic construct
ANQE

SEQ ID NO: 605 - protein, 4 aa, synthetic construct
ANEE

SEQ ID NO: 606 - protein, 4 aa, synthetic construct
ADQE

SEQ ID NO: 607 - protein, 4 aa, synthetic construct
ADEE

SEQ ID NO: 608 - protein, 4 aa, synthetic construct
ACQE

SEQ ID NO: 609 - protein, 4 aa, synthetic construct
ACEE

SEQ ID NO: 610 - protein, 4 aa, synthetic construct
AQQE

SEQ ID NO: 611 - protein, 4 aa, synthetic construct
AQEE

SEQ ID NO: 612 - protein, 4 aa, synthetic construct
AEQE

SEQ ID NO: 613 - protein, 4 aa, synthetic construct
AEEE

SEQ ID NO: 614 - protein, 4 aa, synthetic construct
AGQE

SEQ ID NO: 615 - protein, 4 aa, synthetic construct
AGEE

SEQ ID NO: 616 - protein, 4 aa, synthetic construct
AHQE

SEQ ID NO: 617 - protein, 4 aa, synthetic construct
AHEE

SEQ ID NO: 618 - protein, 4 aa, synthetic construct
AIQE

SEQ ID NO: 619 - protein, 4 aa, synthetic construct
AIEE

SEQ ID NO: 620 - protein, 4 aa, synthetic construct
ALQE

SEQ ID NO: 621 - protein, 4 aa, synthetic construct
ALEE

SEQ ID NO: 622 - protein, 4 aa, synthetic construct
AKQE

SEQ ID NO: 623 - protein, 4 aa, synthetic construct
AKEE

SEQ ID NO: 624 - protein, 4 aa, synthetic construct
AMQE

SEQ ID NO: 625 - protein, 4 aa, synthetic construct
AMEE

SEQ ID NO: 626 - protein, 4 aa, synthetic construct
AFQE

SEQ ID NO: 627 - protein, 4 aa, synthetic construct
AFEE

SEQ ID NO: 628 - protein, 4 aa, synthetic construct
APQE

SEQ ID NO: 629 - protein, 4 aa, synthetic construct
APEE

SEQ ID NO: 630 - protein, 4 aa, synthetic construct
ASQE

SEQ ID NO: 631 - protein, 4 aa, synthetic construct
ASEE

SEQ ID NO: 632 - protein, 4 aa, synthetic construct
ATQE

SEQ ID NO: 633 - protein, 4 aa, synthetic construct
ATEE

SEQ ID NO: 634 - protein, 4 aa, synthetic construct
AWQE

SEQ ID NO: 635 - protein, 4 aa, synthetic construct
AWEE

SEQ ID NO: 636 - protein, 4 aa, synthetic construct
AYQE

SEQ ID NO: 637 - protein, 4 aa, synthetic construct
AYEE

SEQ ID NO: 638 - protein, 4 aa, synthetic construct
AVQE

SEQ ID NO: 639 - protein, 4 aa, synthetic construct
AVEE

SEQ ID NO: 640 - protein, 4 aa, synthetic construct
TAQE

SEQ ID NO: 641 - protein, 4 aa, synthetic construct
TAEE

SEQ ID NO: 642 - protein, 4 aa, synthetic construct
TRQE

SEQ ID NO: 643 - protein, 4 aa, synthetic construct
TREE

SEQ ID NO: 644 - protein, 4 aa, synthetic construct
TNQE

SEQ ID NO: 645 - protein, 4 aa, synthetic construct
TNEE

SEQ ID NO: 646 - protein, 4 aa, synthetic construct
TDQE

SEQ ID NO: 647 - protein, 4 aa, synthetic construct
TDEE

SEQ ID NO: 648 - protein, 4 aa, synthetic construct
TCQE

SEQ ID NO: 649 - protein, 4 aa, synthetic construct
TCEE

SEQ ID NO: 650 - protein, 4 aa, synthetic construct
TQQE

SEQ ID NO: 651 - protein, 4 aa, synthetic construct
TQEE

SEQ ID NO: 652 - protein, 4 aa, synthetic construct
TEQE

SEQ ID NO: 653 - protein, 4 aa, synthetic construct
TEEE

SEQ ID NO: 654 - protein, 4 aa, synthetic construct
TGQE

SEQ ID NO: 655 - protein, 4 aa, synthetic construct
TGEE

SEQ ID NO: 656 - protein, 4 aa, synthetic construct
THQE

SEQ ID NO: 657 - protein, 4 aa, synthetic construct
THEE

SEQ ID NO: 658 - protein, 4 aa, synthetic construct
TIQE

SEQ ID NO: 659 - protein, 4 aa, synthetic construct
TIEE

SEQ ID NO: 660 - protein, 4 aa, synthetic construct
TLQE

SEQ ID NO: 661 - protein, 4 aa, synthetic construct
TLEE

SEQ ID NO: 662 - protein, 4 aa, synthetic construct
TKQE

SEQ ID NO: 663 - protein, 4 aa, synthetic construct
TKEE

SEQ ID NO: 664 - protein, 4 aa, synthetic construct
TMQE

SEQ ID NO: 665 - protein, 4 aa, synthetic construct
TMEE

SEQ ID NO: 666 - protein, 4 aa, synthetic construct
TFQE

SEQ ID NO: 667 - protein, 4 aa, synthetic construct
TFEE

SEQ ID NO: 668 - protein, 4 aa, synthetic construct
TPQE

SEQ ID NO: 669 - protein, 4 aa, synthetic construct
TPEE

SEQ ID NO: 670 - protein, 4 aa, synthetic construct
TSQE

SEQ ID NO: 671 - protein, 4 aa, synthetic construct
TSEE

SEQ ID NO: 672 - protein, 4 aa, synthetic construct
TTQE

SEQ ID NO: 673 - protein, 4 aa, synthetic construct
TTEE

SEQ ID NO: 674 - protein, 4 aa, synthetic construct
TWQE

SEQ ID NO: 675 - protein, 4 aa, synthetic construct
TWEE

SEQ ID NO: 676 - protein, 4 aa, synthetic construct
TYQE

SEQ ID NO: 677 - protein, 4 aa, synthetic construct
TYEE

SEQ ID NO: 678 - protein, 4 aa, synthetic construct
TVQE

SEQ ID NO: 679 - protein, 4 aa, synthetic construct
TVEE

SEQ ID NO: 680 - protein, 4 aa, synthetic construct
PAQE

SEQ ID NO: 681 - protein, 4 aa, synthetic construct
PAEE

SEQ ID NO: 682 - protein, 4 aa, synthetic construct
PRQE

SEQ ID NO: 683 - protein, 4 aa, synthetic construct
PREE

SEQ ID NO: 684 - protein, 4 aa, synthetic construct
PNQE

SEQ ID NO: 685 - protein, 4 aa, synthetic construct
PNEE

SEQ ID NO: 686 - protein, 4 aa, synthetic construct
PDQE

SEQ ID NO: 687 - protein, 4 aa, synthetic construct
PDEE

SEQ ID NO: 688 - protein, 4 aa, synthetic construct
PCQE

SEQ ID NO: 689 - protein, 4 aa, synthetic construct
PCEE

SEQ ID NO: 690 - protein, 4 aa, synthetic construct
PQQE

SEQ ID NO: 691 - protein, 4 aa, synthetic construct
PQEE

SEQ ID NO: 692 - protein, 4 aa, synthetic construct
PEQE

SEQ ID NO: 693 - protein, 4 aa, synthetic construct
PEEE

SEQ ID NO: 694 - protein, 4 aa, synthetic construct
PGQE

SEQ ID NO: 695 - protein, 4 aa, synthetic construct
PGEE

SEQ ID NO: 696 - protein, 4 aa, synthetic construct
PHQE

SEQ ID NO: 697 - protein, 4 aa, synthetic construct
PHEE

SEQ ID NO: 698 - protein, 4 aa, synthetic construct
PIQE

SEQ ID NO: 699 - protein, 4 aa, synthetic construct
PIEE

SEQ ID NO: 700 - protein, 4 aa, synthetic construct
PLQE

SEQ ID NO: 701 - protein, 4 aa, synthetic construct
PLEE

SEQ ID NO: 702 - protein, 4 aa, synthetic construct
PKQE

SEQ ID NO: 703 - protein, 4 aa, synthetic construct
PKEE

SEQ ID NO: 704 - protein, 4 aa, synthetic construct
PMQE

SEQ ID NO: 705 - protein, 4 aa, synthetic construct
PMEE

SEQ ID NO: 706 - protein, 4 aa, synthetic construct
PFQE

SEQ ID NO: 707 - protein, 4 aa, synthetic construct
PFEE

SEQ ID NO: 708 - protein, 4 aa, synthetic construct
PPQE

SEQ ID NO: 709 - protein, 4 aa, synthetic construct
PPEE

SEQ ID NO: 710 - protein, 4 aa, synthetic construct
PSQE

SEQ ID NO: 711 - protein, 4 aa, synthetic construct
PSEE

SEQ ID NO: 712 - protein, 4 aa, synthetic construct
PTQE

SEQ ID NO: 713 - protein, 4 aa, synthetic construct
PTEE

SEQ ID NO: 714 - protein, 4 aa, synthetic construct
PWQE

SEQ ID NO: 715 - protein, 4 aa, synthetic construct
PWEE

SEQ ID NO: 716 - protein, 4 aa, synthetic construct
PYQE

SEQ ID NO: 717 - protein, 4 aa, synthetic construct
PYEE

SEQ ID NO: 718 - protein, 4 aa, synthetic construct
PVQE

SEQ ID NO: 719 - protein, 4 aa, synthetic construct
PVEE

SEQ ID NO: 720 - protein, 4 aa, synthetic construct
SAQE

SEQ ID NO: 721 - protein, 4 aa, synthetic construct
SAEE

SEQ ID NO: 722 - protein, 4 aa, synthetic construct
SRQE

SEQ ID NO: 723 - protein, 4 aa, synthetic construct
SREE

SEQ ID NO: 724 - protein, 4 aa, synthetic construct
SNQE

SEQ ID NO: 725 - protein, 4 aa, synthetic construct
SNEE

SEQ ID NO: 726 - protein, 4 aa, synthetic construct
SDQE

SEQ ID NO: 727 - protein, 4 aa, synthetic construct
SDEE

SEQ ID NO: 728 - protein, 4 aa, synthetic construct
SCQE

SEQ ID NO: 729 - protein, 4 aa, synthetic construct
SCEE

SEQ ID NO: 730 - protein, 4 aa, synthetic construct
SQQE

SEQ ID NO: 731 - protein, 4 aa, synthetic construct
SQEE

SEQ ID NO: 732 - protein, 4 aa, synthetic construct
SEQE

SEQ ID NO: 733 - protein, 4 aa, synthetic construct
SEEE

SEQ ID NO: 734 - protein, 4 aa, synthetic construct
SGQE

SEQ ID NO: 735 - protein, 4 aa, synthetic construct
SGEE

SEQ ID NO: 736 - protein, 4 aa, synthetic construct
SHQE

SEQ ID NO: 737 - protein, 4 aa, synthetic construct
SHEE

SEQ ID NO: 738 - protein, 4 aa, synthetic construct
SIQE

SEQ ID NO: 739 - protein, 4 aa, synthetic construct
SIEE

SEQ ID NO: 740 - protein, 4 aa, synthetic construct
SLQE

SEQ ID NO: 741 - protein, 4 aa, synthetic construct
SLEE

SEQ ID NO: 742 - protein, 4 aa, synthetic construct
SKQE

SEQ ID NO: 743 - protein, 4 aa, synthetic construct
SKEE

SEQ ID NO: 744 - protein, 4 aa, synthetic construct
SMQE

SEQ ID NO: 745 - protein, 4 aa, synthetic construct
SMEE

SEQ ID NO: 746 - protein, 4 aa, synthetic construct
SFQE

SEQ ID NO: 747 - protein, 4 aa, synthetic construct
SFEE

SEQ ID NO: 748 - protein, 4 aa, synthetic construct
SPQE

SEQ ID NO: 749 - protein, 4 aa, synthetic construct
SPEE

SEQ ID NO: 750 - protein, 4 aa, synthetic construct
SSQE

SEQ ID NO: 751 - protein, 4 aa, synthetic construct
SSEE

SEQ ID NO: 752 - protein, 4 aa, synthetic construct
STQE

SEQ ID NO: 753 - protein, 4 aa, synthetic construct
STEE

SEQ ID NO: 754 - protein, 4 aa, synthetic construct
SWQE

SEQ ID NO: 755 - protein, 4 aa, synthetic construct
SWEE

SEQ ID NO: 756 - protein, 4 aa, synthetic construct
SYQE

SEQ ID NO: 757 - protein, 4 aa, synthetic construct
SYEE

SEQ ID NO: 758 - protein, 4 aa, synthetic construct
SVQE

SEQ ID NO: 759 - protein, 4 aa, synthetic construct
SVEE

SEQ ID NO: 760 - protein, 4 aa, synthetic construct
AAQE

SEQ ID NO: 761 - protein, 4 aa, synthetic construct
AAEE

SEQ ID NO: 762 - protein, 4 aa, synthetic construct
ARQE

SEQ ID NO: 763 - protein, 4 aa, synthetic construct
AREE

SEQ ID NO: 764 - protein, 4 aa, synthetic construct
ANQE

SEQ ID NO: 765 - protein, 4 aa, synthetic construct
ANEE

SEQ ID NO: 766 - protein, 4 aa, synthetic construct
ADQE

SEQ ID NO: 767 - protein, 4 aa, synthetic construct
ADEE

SEQ ID NO: 768 - protein, 4 aa, synthetic construct
ACQE

SEQ ID NO: 769 - protein, 4 aa, synthetic construct
ACEE

SEQ ID NO: 770 - protein, 4 aa, synthetic construct
AQQE

SEQ ID NO: 771 - protein, 4 aa, synthetic construct
AQEE

SEQ ID NO: 772 - protein, 4 aa, synthetic construct
AEQE

SEQ ID NO: 773 - protein, 4 aa, synthetic construct
AEEE

SEQ ID NO: 774 - protein, 4 aa, synthetic construct
AGQE

SEQ ID NO: 775 - protein, 4 aa, synthetic construct
AGEE

SEQ ID NO: 776 - protein, 4 aa, synthetic construct
AHQE

SEQ ID NO: 777 - protein, 4 aa, synthetic construct
AHEE

SEQ ID NO: 778 - protein, 4 aa, synthetic construct
AIQE

SEQ ID NO: 779 - protein, 4 aa, synthetic construct
AIEE

SEQ ID NO: 780 - protein, 4 aa, synthetic construct
ALQE

SEQ ID NO: 781 - protein, 4 aa, synthetic construct
ALEE

SEQ ID NO: 782 - protein, 4 aa, synthetic construct
AKQE

SEQ ID NO: 783 - protein, 4 aa, synthetic construct
AKEE

SEQ ID NO: 784 - protein, 4 aa, synthetic construct
AMQE

SEQ ID NO: 785 - protein, 4 aa, synthetic construct
AMEE

SEQ ID NO: 786 - protein, 4 aa, synthetic construct
AFQE

SEQ ID NO: 787 - protein, 4 aa, synthetic construct
AFEE

SEQ ID NO: 788 - protein, 4 aa, synthetic construct
APQE

SEQ ID NO: 789 - protein, 4 aa, synthetic construct
APEE

SEQ ID NO: 790 - protein, 4 aa, synthetic construct
ASQE

SEQ ID NO: 791 - protein, 4 aa, synthetic construct
ASEE

SEQ ID NO: 792 - protein, 4 aa, synthetic construct
ATQE

SEQ ID NO: 793 - protein, 4 aa, synthetic construct
ATEE

SEQ ID NO: 794 - protein, 4 aa, synthetic construct
AWQE

SEQ ID NO: 795 - protein, 4 aa, synthetic construct
AWEE

SEQ ID NO: 796 - protein, 4 aa, synthetic construct
AYQE

SEQ ID NO: 797 - protein, 4 aa, synthetic construct
AYEE

SEQ ID NO: 798 - protein, 4 aa, synthetic construct
AVQE

SEQ ID NO: 799 - protein, 4 aa, synthetic construct
AVEE

SEQ ID NO: 800 - protein, 4 aa, synthetic construct
TAQE

SEQ ID NO: 801 - protein, 4 aa, synthetic construct
TAEE

SEQ ID NO: 802 - protein, 4 aa, synthetic construct
TRQE

SEQ ID NO: 803 - protein, 4 aa, synthetic construct
TREE

SEQ ID NO: 804 - protein, 4 aa, synthetic construct
TNQE

SEQ ID NO: 805 - protein, 4 aa, synthetic construct
TNEE

SEQ ID NO: 806 - protein, 4 aa, synthetic construct
TDQE

SEQ ID NO: 807 - protein, 4 aa, synthetic construct
TDEE

SEQ ID NO: 808 - protein, 4 aa, synthetic construct
TCQE

SEQ ID NO: 809 - protein, 4 aa, synthetic construct
TCEE

SEQ ID NO: 810 - protein, 4 aa, synthetic construct
TQQE

SEQ ID NO: 811 - protein, 4 aa, synthetic construct
TQEE

SEQ ID NO: 812 - protein, 4 aa, synthetic construct
TEQE

SEQ ID NO: 813 - protein, 4 aa, synthetic construct
TEEE

SEQ ID NO: 814 - protein, 4 aa, synthetic construct
TGQE

SEQ ID NO: 815 - protein, 4 aa, synthetic construct
TGEE

SEQ ID NO: 816 - protein, 4 aa, synthetic construct
THQE

SEQ ID NO: 817 - protein, 4 aa, synthetic construct
THEE

SEQ ID NO: 818 - protein, 4 aa, synthetic construct
TIQE

SEQ ID NO: 819 - protein, 4 aa, synthetic construct
TIEE

SEQ ID NO: 820 - protein, 4 aa, synthetic construct
TLQE

SEQ ID NO: 821 - protein, 4 aa, synthetic construct
TLEE

SEQ ID NO: 822 - protein, 4 aa, synthetic construct
TKQE

SEQ ID NO: 823 - protein, 4 aa, synthetic construct
TKEE

SEQ ID NO: 824 - protein, 4 aa, synthetic construct
TMQE

SEQ ID NO: 825 - protein, 4 aa, synthetic construct
TMEE

SEQ ID NO: 826 - protein, 4 aa, synthetic construct
TFQE

SEQ ID NO: 827 - protein, 4 aa, synthetic construct
TFEE

SEQ ID NO: 828 - protein, 4 aa, synthetic construct
TPQE

SEQ ID NO: 829 - protein, 4 aa, synthetic construct
TPEE

SEQ ID NO: 830 - protein, 4 aa, synthetic construct
TSQE

SEQ ID NO: 831 - protein, 4 aa, synthetic construct
TSEE

SEQ ID NO: 832 - protein, 4 aa, synthetic construct
TTQE

SEQ ID NO: 833 - protein, 4 aa, synthetic construct
TTEE

SEQ ID NO: 834 - protein, 4 aa, synthetic construct
TWQE

SEQ ID NO: 835 - protein, 4 aa, synthetic construct
TWEE

SEQ ID NO: 836 - protein, 4 aa, synthetic construct
TYQE

SEQ ID NO: 837 - protein, 4 aa, synthetic construct
TYEE

SEQ ID NO: 838 - protein, 4 aa, synthetic construct
TVQE

SEQ ID NO: 839 - protein, 4 aa, synthetic construct
TVEE

SEQ ID NO: 840 - protein, 6 aa, synthetic construct
PAEAAD

SEQ ID NO: 841 - protein, 6 aa, synthetic construct
PAEAAE

SEQ ID NO: 842 - protein, 6 aa, synthetic construct
PAEAAF

SEQ ID NO: 843 - protein, 6 aa, synthetic construct
PAEAAW

SEQ ID NO: 844 - protein, 6 aa, synthetic construct
PAEAAY

SEQ ID NO: 845 - protein, 6 aa, synthetic construct
PAEARD

SEQ ID NO: 846 - protein, 6 aa, synthetic construct
PAEARE

SEQ ID NO: 847 - protein, 6 aa, synthetic construct
PAEARF

SEQ ID NO: 848 - protein, 6 aa, synthetic construct
PAEARW

SEQ ID NO: 849 - protein, 6 aa, synthetic construct
PAEARY

SEQ ID NO: 850 - protein, 6 aa, synthetic construct
PAEAND

SEQ ID NO: 851 - protein, 6 aa, synthetic construct
PAEANE

SEQ ID NO: 852 - protein, 6 aa, synthetic construct
PAEANF

SEQ ID NO: 853 - protein, 6 aa, synthetic construct
PAEANW

SEQ ID NO: 854 - protein, 6 aa, synthetic construct
PAEANY

SEQ ID NO: 855 - protein, 6 aa, synthetic construct
PAEADD

SEQ ID NO: 856 - protein, 6 aa, synthetic construct
PAEADE

SEQ ID NO: 857 - protein, 6 aa, synthetic construct
PAEADF

SEQ ID NO: 858 - protein, 6 aa, synthetic construct
PAEADW

SEQ ID NO: 859 - protein, 6 aa, synthetic construct
PAEADY

SEQ ID NO: 860 - protein, 6 aa, synthetic construct
PAEACD

SEQ ID NO: 861 - protein, 6 aa, synthetic construct
PAEACE

SEQ ID NO: 862 - protein, 6 aa, synthetic construct
PAEACF

SEQ ID NO: 863 - protein, 6 aa, synthetic construct
PAEACW

SEQ ID NO: 864 - protein, 6 aa, synthetic construct
PAEACY

SEQ ID NO: 865 - protein, 6 aa, synthetic construct
PAEAQD

SEQ ID NO: 866 - protein, 6 aa, synthetic construct
PAEAQE

SEQ ID NO: 867 - protein, 6 aa, synthetic construct
PAEAQF

SEQ ID NO: 868 - protein, 6 aa, synthetic construct
PAEAQW

SEQ ID NO: 869 - protein, 6 aa, synthetic construct
PAEAQY

SEQ ID NO: 870 - protein, 6 aa, synthetic construct
PAEAED

SEQ ID NO: 871 - protein, 6 aa, synthetic construct
PAEAEE

SEQ ID NO: 872 - protein, 6 aa, synthetic construct
PAEAEF

SEQ ID NO: 873 - protein, 6 aa, synthetic construct
PAEAEW

SEQ ID NO: 874 - protein, 6 aa, synthetic construct
PAEAEY

SEQ ID NO: 875 - protein, 6 aa, synthetic construct
PAEAGD

SEQ ID NO: 876 - protein, 6 aa, synthetic construct
PAEAGE

SEQ ID NO: 877 - protein, 6 aa, synthetic construct
PAEAGF

SEQ ID NO: 878 - protein, 6 aa, synthetic construct
PAEAGW

SEQ ID NO: 879 - protein, 6 aa, synthetic construct
PAEAGY

SEQ ID NO: 880 - protein, 6 aa, synthetic construct
PAEAHD

SEQ ID NO: 881 - protein, 6 aa, synthetic construct
PAEAHE

SEQ ID NO: 882 - protein, 6 aa, synthetic construct
PAEAHF

SEQ ID NO: 883 - protein, 6 aa, synthetic construct
PAEAHW

SEQ ID NO: 884 - protein, 6 aa, synthetic construct
PAEAHY

SEQ ID NO: 885 - protein, 6 aa, synthetic construct
PAEAID

SEQ ID NO: 886 - protein, 6 aa, synthetic construct
PAEAIE

SEQ ID NO: 887 - protein, 6 aa, synthetic construct
PAEAIF

SEQ ID NO: 888 - protein, 6 aa, synthetic construct
PAEAIW

SEQ ID NO: 889 - protein, 6 aa, synthetic construct
PAEAIY

SEQ ID NO: 890 - protein, 6 aa, synthetic construct
PAEALD

SEQ ID NO: 891 - protein, 6 aa, synthetic construct
PAEALE

SEQ ID NO: 892 - protein, 6 aa, synthetic construct
PAEALF

SEQ ID NO: 893 - protein, 6 aa, synthetic construct
PAEALW

SEQ ID NO: 894 - protein, 6 aa, synthetic construct
PAEALY

SEQ ID NO: 895 - protein, 6 aa, synthetic construct
PAEAKD

SEQ ID NO: 896 - protein, 6 aa, synthetic construct
PAEAKE

SEQ ID NO: 897 - protein, 6 aa, synthetic construct
PAEAKF

SEQ ID NO: 898 - protein, 6 aa, synthetic construct
PAEAKW

SEQ ID NO: 899 - protein, 6 aa, synthetic construct
PAEAKY

SEQ ID NO: 900 - protein, 6 aa, synthetic construct
PAEAMD

SEQ ID NO: 901 - protein, 6 aa, synthetic construct
PAEAME

SEQ ID NO: 902 - protein, 6 aa, synthetic construct
PAEAMF

SEQ ID NO: 903 - protein, 6 aa, synthetic construct
PAEAMW

SEQ ID NO: 904 - protein, 6 aa, synthetic construct
PAEAMY

SEQ ID NO: 905 - protein, 6 aa, synthetic construct
PAEAFD

SEQ ID NO: 906 - protein, 6 aa, synthetic construct
PAEAFE

SEQ ID NO: 907 - protein, 6 aa, synthetic construct
PAEAFF

SEQ ID NO: 908 - protein, 6 aa, synthetic construct
PAEAFW

SEQ ID NO: 909 - protein, 6 aa, synthetic construct
PAEAFY

SEQ ID NO: 910 - protein, 6 aa, synthetic construct
PAEAPD

SEQ ID NO: 911 - protein, 6 aa, synthetic construct
PAEAPE

SEQ ID NO: 912 - protein, 6 aa, synthetic construct
PAEAPF

SEQ ID NO: 913 - protein, 6 aa, synthetic construct
PAEAPW

SEQ ID NO: 914 - protein, 6 aa, synthetic construct
PAEAPY

SEQ ID NO: 915 - protein, 6 aa, synthetic construct
PAEASD

SEQ ID NO: 916 - protein, 6 aa, synthetic construct
PAEASE

SEQ ID NO: 917 - protein, 6 aa, synthetic construct
PAEASF

SEQ ID NO: 918 - protein, 6 aa, synthetic construct
PAEASW

SEQ ID NO: 919 - protein, 6 aa, synthetic construct
PAEASY

SEQ ID NO: 920 - protein, 6 aa, synthetic construct
PAEATD

SEQ ID NO: 921 - protein, 6 aa, synthetic construct
PAEATE

SEQ ID NO: 922 - protein, 6 aa, synthetic construct
PAEATF

SEQ ID NO: 923 - protein, 6 aa, synthetic construct
PAEATW

SEQ ID NO: 924 - protein, 6 aa, synthetic construct
PAEATY

SEQ ID NO: 925 - protein, 6 aa, synthetic construct
PAEAWD

SEQ ID NO: 926 - protein, 6 aa, synthetic construct
PAEAWE

SEQ ID NO: 927 - protein, 6 aa, synthetic construct
PAEAWF

SEQ ID NO: 928 - protein, 6 aa, synthetic construct
PAEAWW

SEQ ID NO: 929 - protein, 6 aa, synthetic construct
PAEAWY

SEQ ID NO: 930 - protein, 6 aa, synthetic construct
PAEAYD

SEQ ID NO: 931 - protein, 6 aa, synthetic construct
PAEAYE

SEQ ID NO: 932 - protein, 6 aa, synthetic construct
PAEAYF

SEQ ID NO: 933 - protein, 6 aa, synthetic construct
PAEAYW

SEQ ID NO: 934 - protein, 6 aa, synthetic construct
PAEAYY

SEQ ID NO: 935 - protein, 6 aa, synthetic construct
PAEAVD

SEQ ID NO: 936 - protein, 6 aa, synthetic construct
PAEAVE

SEQ ID NO: 937 - protein, 6 aa, synthetic construct
PAEAVF

SEQ ID NO: 938 - protein, 6 aa, synthetic construct
PAEAVW

SEQ ID NO: 939 - protein, 6 aa, synthetic construct
PAEAVY

SEQ ID NO: 940 - protein, 6 aa, synthetic construct
PAERAD

SEQ ID NO: 941 - protein, 6 aa, synthetic construct
PAERAE

SEQ ID NO: 942 - protein, 6 aa, synthetic construct
PAERAF

SEQ ID NO: 943 - protein, 6 aa, synthetic construct
PAERAW

SEQ ID NO: 944 - protein, 6 aa, synthetic construct
PAERAY

SEQ ID NO: 945 - protein, 6 aa, synthetic construct
PAERRD

SEQ ID NO: 946 - protein, 6 aa, synthetic construct
PAERRE

SEQ ID NO: 947 - protein, 6 aa, synthetic construct
PAERRF

SEQ ID NO: 948 - protein, 6 aa, synthetic construct
PAERRW

SEQ ID NO: 949 - protein, 6 aa, synthetic construct
PAERRY

SEQ ID NO: 950 - protein, 6 aa, synthetic construct
PAERND

SEQ ID NO: 951 - protein, 6 aa, synthetic construct
PAERNE

SEQ ID NO: 952 - protein, 6 aa, synthetic construct
PAERNF

SEQ ID NO: 953 - protein, 6 aa, synthetic construct
PAERNW

SEQ ID NO: 954 - protein, 6 aa, synthetic construct
PAERNY

SEQ ID NO: 955 - protein, 6 aa, synthetic construct
PAERDD

SEQ ID NO: 956 - protein, 6 aa, synthetic construct
PAERDE

SEQ ID NO: 957 - protein, 6 aa, synthetic construct
PAERDF

SEQ ID NO: 958 - protein, 6 aa, synthetic construct
PAERDW

SEQ ID NO: 959 - protein, 6 aa, synthetic construct
PAERDY

SEQ ID NO: 960 - protein, 6 aa, synthetic construct
PAERCD

SEQ ID NO: 961 - protein, 6 aa, synthetic construct
PAERCE

SEQ ID NO: 962 - protein, 6 aa, synthetic construct
PAERCF

SEQ ID NO: 963 - protein, 6 aa, synthetic construct
PAERCW

SEQ ID NO: 964 - protein, 6 aa, synthetic construct
PAERCY

SEQ ID NO: 965 - protein, 6 aa, synthetic construct
PAERQD

SEQ ID NO: 966 - protein, 6 aa, synthetic construct
PAERQE

SEQ ID NO: 967 - protein, 6 aa, synthetic construct
PAERQF

SEQ ID NO: 968 - protein, 6 aa, synthetic construct
PAERQW

SEQ ID NO: 969 - protein, 6 aa, synthetic construct
PAERQY

SEQ ID NO: 970 - protein, 6 aa, synthetic construct
PAERED

SEQ ID NO: 971 - protein, 6 aa, synthetic construct
PAEREE

SEQ ID NO: 972 - protein, 6 aa, synthetic construct
PAEREF

SEQ ID NO: 973 - protein, 6 aa, synthetic construct
PAEREW

SEQ ID NO: 974 - protein, 6 aa, synthetic construct
PAEREY

SEQ ID NO: 975 - protein, 6 aa, synthetic construct
PAERGD

SEQ ID NO: 976 - protein, 6 aa, synthetic construct
PAERGE

SEQ ID NO: 977 - protein, 6 aa, synthetic construct
PAERGF

SEQ ID NO: 978 - protein, 6 aa, synthetic construct
PAERGW

SEQ ID NO: 979 - protein, 6 aa, synthetic construct
PAERGY

SEQ ID NO: 980 - protein, 6 aa, synthetic construct
PAERHD

SEQ ID NO: 981 - protein, 6 aa, synthetic construct
PAERHE

SEQ ID NO: 982 - protein, 6 aa, synthetic construct
PAERHF

SEQ ID NO: 983 - protein, 6 aa, synthetic construct
PAERHW

SEQ ID NO: 984 - protein, 6 aa, synthetic construct
PAERHY

SEQ ID NO: 985 - protein, 6 aa, synthetic construct
PAERID

SEQ ID NO: 986 - protein, 6 aa, synthetic construct
PAERIE

SEQ ID NO: 987 - protein, 6 aa, synthetic construct
PAERIF

SEQ ID NO: 988 - protein, 6 aa, synthetic construct
PAERIW

SEQ ID NO: 989 - protein, 6 aa, synthetic construct
PAERIY

SEQ ID NO: 990 - protein, 6 aa, synthetic construct
PAERLD

SEQ ID NO: 991 - protein, 6 aa, synthetic construct
PAERLE

SEQ ID NO: 992 - protein, 6 aa, synthetic construct
PAERLF

SEQ ID NO: 993 - protein, 6 aa, synthetic construct
PAERLW

SEQ ID NO: 994 - protein, 6 aa, synthetic construct
PAERLY

SEQ ID NO: 995 - protein, 6 aa, synthetic construct
PAERKD

SEQ ID NO: 996 - protein, 6 aa, synthetic construct
PAERKE

SEQ ID NO: 997 - protein, 6 aa, synthetic construct
PAERKF

SEQ ID NO: 998 - protein, 6 aa, synthetic construct
PAERKW

SEQ ID NO: 999 - protein, 6 aa, synthetic construct
PAERKY

SEQ ID NO: 1000 - protein, 6 aa, synthetic construct
PAERMD

SEQ ID NO: 1001 - protein, 6 aa, synthetic construct
PAERME

SEQ ID NO: 1002 - protein, 6 aa, synthetic construct
PAERMF

SEQ ID NO: 1003 - protein, 6 aa, synthetic construct
PAERMW

SEQ ID NO: 1004 - protein, 6 aa, synthetic construct
PAERMY

SEQ ID NO: 1005 - protein, 6 aa, synthetic construct
PAERFD

SEQ ID NO: 1006 - protein, 6 aa, synthetic construct
PAERFE

SEQ ID NO: 1007 - protein, 6 aa, synthetic construct
PAERFF

SEQ ID NO: 1008 - protein, 6 aa, synthetic construct
PAERFW

SEQ ID NO: 1009 - protein, 6 aa, synthetic construct
PAERFY

SEQ ID NO: 1010 - protein, 6 aa, synthetic construct
PAERPD

SEQ ID NO: 1011 - protein, 6 aa, synthetic construct
PAERPE

SEQ ID NO: 1012 - protein, 6 aa, synthetic construct
PAERPF

SEQ ID NO: 1013 - protein, 6 aa, synthetic construct
PAERPW

SEQ ID NO: 1014 - protein, 6 aa, synthetic construct
PAERPY

SEQ ID NO: 1015 - protein, 6 aa, synthetic construct
PAERSD

SEQ ID NO: 1016 - protein, 6 aa, synthetic construct
PAERSE

SEQ ID NO: 1017 - protein, 6 aa, synthetic construct
PAERSF

SEQ ID NO: 1018 - protein, 6 aa, synthetic construct
PAERSW

SEQ ID NO: 1019 - protein, 6 aa, synthetic construct
PAERSY

SEQ ID NO: 1020 - protein, 6 aa, synthetic construct
PAERTD

SEQ ID NO: 1021 - protein, 6 aa, synthetic construct
PAERTE

SEQ ID NO: 1022 - protein, 6 aa, synthetic construct
PAERTF

SEQ ID NO: 1023 - protein, 6 aa, synthetic construct
PAERTW

SEQ ID NO: 1024 - protein, 6 aa, synthetic construct
PAERTY

SEQ ID NO: 1025 - protein, 6 aa, synthetic construct
PAERWD

SEQ ID NO: 1026 - protein, 6 aa, synthetic construct
PAERWE

SEQ ID NO: 1027 - protein, 6 aa, synthetic construct
PAERWF

SEQ ID NO: 1028 - protein, 6 aa, synthetic construct
PAERWW

SEQ ID NO: 1029 - protein, 6 aa, synthetic construct
PAERWY

SEQ ID NO: 1030 - protein, 6 aa, synthetic construct
PAERYD

SEQ ID NO: 1031 - protein, 6 aa, synthetic construct
PAERYE

SEQ ID NO: 1032 - protein, 6 aa, synthetic construct
PAERYF

SEQ ID NO: 1033 - protein, 6 aa, synthetic construct
PAERYW

SEQ ID NO: 1034 - protein, 6 aa, synthetic construct
PAERYY

SEQ ID NO: 1035 - protein, 6 aa, synthetic construct
PAERVD

SEQ ID NO: 1036 - protein, 6 aa, synthetic construct
PAERVE

SEQ ID NO: 1037 - protein, 6 aa, synthetic construct
PAERVF

SEQ ID NO: 1038 - protein, 6 aa, synthetic construct
PAERVW

SEQ ID NO: 1039 - protein, 6 aa, synthetic construct
PAERVY

SEQ ID NO: 1040 - protein, 6 aa, synthetic construct
PAENAD

SEQ ID NO: 1041 - protein, 6 aa, synthetic construct
PAENAE

SEQ ID NO: 1042 - protein, 6 aa, synthetic construct
PAENAF

SEQ ID NO: 1043 - protein, 6 aa, synthetic construct
PAENAW

SEQ ID NO: 1044 - protein, 6 aa, synthetic construct
PAENAY

SEQ ID NO: 1045 - protein, 6 aa, synthetic construct
PAENRD

SEQ ID NO: 1046 - protein, 6 aa, synthetic construct
PAENRE

SEQ ID NO: 1047 - protein, 6 aa, synthetic construct
PAENRF

SEQ ID NO: 1048 - protein, 6 aa, synthetic construct
PAENRW

SEQ ID NO: 1049 - protein, 6 aa, synthetic construct
PAENRY

SEQ ID NO: 1050 - protein, 6 aa, synthetic construct
PAENND

SEQ ID NO: 1051 - protein, 6 aa, synthetic construct
PAENNE

SEQ ID NO: 1052 - protein, 6 aa, synthetic construct
PAENNF

SEQ ID NO: 1053 - protein, 6 aa, synthetic construct
PAENNW

SEQ ID NO: 1054 - protein, 6 aa, synthetic construct
PAENNY

SEQ ID NO: 1055 - protein, 6 aa, synthetic construct
PAENDD

SEQ ID NO: 1056 - protein, 6 aa, synthetic construct
PAENDE

SEQ ID NO: 1057 - protein, 6 aa, synthetic construct
PAENDF

SEQ ID NO: 1058 - protein, 6 aa, synthetic construct
PAENDW

SEQ ID NO: 1059 - protein, 6 aa, synthetic construct
PAENDY

SEQ ID NO: 1060 - protein, 6 aa, synthetic construct
PAENCD

SEQ ID NO: 1061 - protein, 6 aa, synthetic construct
PAENCE

SEQ ID NO: 1062 - protein, 6 aa, synthetic construct
PAENCF

SEQ ID NO: 1063 - protein, 6 aa, synthetic construct
PAENCW

SEQ ID NO: 1064 - protein, 6 aa, synthetic construct
PAENCY

SEQ ID NO: 1065 - protein, 6 aa, synthetic construct
PAENQD

SEQ ID NO: 1066 - protein, 6 aa, synthetic construct
PAENQE

SEQ ID NO: 1067 - protein, 6 aa, synthetic construct
PAENQF

SEQ ID NO: 1068 - protein, 6 aa, synthetic construct
PAENQW

SEQ ID NO: 1069 - protein, 6 aa, synthetic construct
PAENQY

SEQ ID NO: 1070 - protein, 6 aa, synthetic construct
PAENED

SEQ ID NO: 1071 - protein, 6 aa, synthetic construct
PAENEE

SEQ ID NO: 1072 - protein, 6 aa, synthetic construct
PAENEF

SEQ ID NO: 1073 - protein, 6 aa, synthetic construct
PAENEW

SEQ ID NO: 1074 - protein, 6 aa, synthetic construct
PAENEY

SEQ ID NO: 1075 - protein, 6 aa, synthetic construct
PAENGD

SEQ ID NO: 1076 - protein, 6 aa, synthetic construct
PAENGE

SEQ ID NO: 1077 - protein, 6 aa, synthetic construct
PAENGF

SEQ ID NO: 1078 - protein, 6 aa, synthetic construct
PAENGW

SEQ ID NO: 1079 - protein, 6 aa, synthetic construct
PAENGY

SEQ ID NO: 1080 - protein, 6 aa, synthetic construct
PAENHD

SEQ ID NO: 1081 - protein, 6 aa, synthetic construct
PAENHE

SEQ ID NO: 1082 - protein, 6 aa, synthetic construct
PAENHF

SEQ ID NO: 1083 - protein, 6 aa, synthetic construct
PAENHW

SEQ ID NO: 1084 - protein, 6 aa, synthetic construct
PAENHY

SEQ ID NO: 1085 - protein, 6 aa, synthetic construct
PAENID

SEQ ID NO: 1086 - protein, 6 aa, synthetic construct
PAENIE

SEQ ID NO: 1087 - protein, 6 aa, synthetic construct
PAENIF

SEQ ID NO: 1088 - protein, 6 aa, synthetic construct
PAENIW

SEQ ID NO: 1089 - protein, 6 aa, synthetic construct
PAENIY

SEQ ID NO: 1090 - protein, 6 aa, synthetic construct
PAENLD

SEQ ID NO: 1091 - protein, 6 aa, synthetic construct
PAENLE

SEQ ID NO: 1092 - protein, 6 aa, synthetic construct
PAENLF

SEQ ID NO: 1093 - protein, 6 aa, synthetic construct
PAENLW

SEQ ID NO: 1094 - protein, 6 aa, synthetic construct
PAENLY

SEQ ID NO: 1095 - protein, 6 aa, synthetic construct
PAENKD

SEQ ID NO: 1096 - protein, 6 aa, synthetic construct
PAENKE

SEQ ID NO: 1097 - protein, 6 aa, synthetic construct
PAENKF

SEQ ID NO: 1098 - protein, 6 aa, synthetic construct
PAENKW

SEQ ID NO: 1099 - protein, 6 aa, synthetic construct
PAENKY

SEQ ID NO: 1100 - protein, 6 aa, synthetic construct
PAENMD

SEQ ID NO: 1101 - protein, 6 aa, synthetic construct
PAENME

SEQ ID NO: 1102 - protein, 6 aa, synthetic construct
PAENMF

SEQ ID NO: 1103 - protein, 6 aa, synthetic construct
PAENMW

SEQ ID NO: 1104 - protein, 6 aa, synthetic construct
PAENMY

SEQ ID NO: 1105 - protein, 6 aa, synthetic construct
PAENFD

SEQ ID NO: 1106 - protein, 6 aa, synthetic construct
PAENFE

SEQ ID NO: 1107 - protein, 6 aa, synthetic construct
PAENFF

SEQ ID NO: 1108 - protein, 6 aa, synthetic construct
PAENFW

SEQ ID NO: 1109 - protein, 6 aa, synthetic construct
PAENFY

SEQ ID NO: 1110 - protein, 6 aa, synthetic construct
PAENPD

SEQ ID NO: 1111 - protein, 6 aa, synthetic construct
PAENPE

SEQ ID NO: 1112 - protein, 6 aa, synthetic construct
PAENPF

SEQ ID NO: 1113 - protein, 6 aa, synthetic construct
PAENPW

SEQ ID NO: 1114 - protein, 6 aa, synthetic construct
PAENPY

SEQ ID NO: 1115 - protein, 6 aa, synthetic construct
PAENSD

SEQ ID NO: 1116 - protein, 6 aa, synthetic construct
PAENSE

SEQ ID NO: 1117 - protein, 6 aa, synthetic construct
PAENSF

SEQ ID NO: 1118 - protein, 6 aa, synthetic construct
PAENSW

SEQ ID NO: 1119 - protein, 6 aa, synthetic construct
PAENSY

SEQ ID NO: 1120 - protein, 6 aa, synthetic construct
PAENTD

SEQ ID NO: 1121 - protein, 6 aa, synthetic construct
PAENTE

SEQ ID NO: 1122 - protein, 6 aa, synthetic construct
PAENTF

SEQ ID NO: 1123 - protein, 6 aa, synthetic construct
PAENTW

SEQ ID NO: 1124 - protein, 6 aa, synthetic construct
PAENTY

SEQ ID NO: 1125 - protein, 6 aa, synthetic construct
PAENWD

SEQ ID NO: 1126 - protein, 6 aa, synthetic construct
PAENWE

SEQ ID NO: 1127 - protein, 6 aa, synthetic construct
PAENWF

SEQ ID NO: 1128 - protein, 6 aa, synthetic construct
PAENWW

SEQ ID NO: 1129 - protein, 6 aa, synthetic construct
PAENWY

SEQ ID NO: 1130 - protein, 6 aa, synthetic construct
PAENYD

SEQ ID NO: 1131 - protein, 6 aa, synthetic construct
PAENYE

SEQ ID NO: 1132 - protein, 6 aa, synthetic construct
PAENYF

SEQ ID NO: 1133 - protein, 6 aa, synthetic construct
PAENYW

SEQ ID NO: 1134 - protein, 6 aa, synthetic construct
PAENYY

SEQ ID NO: 1135 - protein, 6 aa, synthetic construct
PAENVD

SEQ ID NO: 1136 - protein, 6 aa, synthetic construct
PAENVE

SEQ ID NO: 1137 - protein, 6 aa, synthetic construct
PAENVF

SEQ ID NO: 1138 - protein, 6 aa, synthetic construct
PAENVW

SEQ ID NO: 1139 - protein, 6 aa, synthetic construct
PAENVY

SEQ ID NO: 1140 - protein, 6 aa, synthetic construct
PAEDAD

SEQ ID NO: 1141 - protein, 6 aa, synthetic construct
PAEDAE

SEQ ID NO: 1142 - protein, 6 aa, synthetic construct
PAEDAF

SEQ ID NO: 1143 - protein, 6 aa, synthetic construct
PAEDAW

SEQ ID NO: 1144 - protein, 6 aa, synthetic construct
PAEDAY

SEQ ID NO: 1145 - protein, 6 aa, synthetic construct
PAEDRD

SEQ ID NO: 1146 - protein, 6 aa, synthetic construct
PAEDRE

SEQ ID NO: 1147 - protein, 6 aa, synthetic construct
PAEDRF

SEQ ID NO: 1148 - protein, 6 aa, synthetic construct
PAEDRW

SEQ ID NO: 1149 - protein, 6 aa, synthetic construct
PAEDRY

SEQ ID NO: 1150 - protein, 6 aa, synthetic construct
PAEDND

SEQ ID NO: 1151 - protein, 6 aa, synthetic construct
PAEDNE

SEQ ID NO: 1152 - protein, 6 aa, synthetic construct
PAEDNF

SEQ ID NO: 1153 - protein, 6 aa, synthetic construct
PAEDNW

SEQ ID NO: 1154 - protein, 6 aa, synthetic construct
PAEDNY

SEQ ID NO: 1155 - protein, 6 aa, synthetic construct
PAEDDD

SEQ ID NO: 1156 - protein, 6 aa, synthetic construct
PAEDDE

SEQ ID NO: 1157 - protein, 6 aa, synthetic construct
PAEDDF

SEQ ID NO: 1158 - protein, 6 aa, synthetic construct
PAEDDW

SEQ ID NO: 1159 - protein, 6 aa, synthetic construct
PAEDDY

SEQ ID NO: 1160 - protein, 6 aa, synthetic construct
PAEDCD

SEQ ID NO: 1161 - protein, 6 aa, synthetic construct
PAEDCE

SEQ ID NO: 1162 - protein, 6 aa, synthetic construct
PAEDCF

SEQ ID NO: 1163 - protein, 6 aa, synthetic construct
PAEDCW

SEQ ID NO: 1164 - protein, 6 aa, synthetic construct
PAEDCY

SEQ ID NO: 1165 - protein, 6 aa, synthetic construct
PAEDQD

SEQ ID NO: 1166 - protein, 6 aa, synthetic construct
PAEDQE

SEQ ID NO: 1167 - protein, 6 aa, synthetic construct
PAEDQF

SEQ ID NO: 1168 - protein, 6 aa, synthetic construct
PAEDQW

SEQ ID NO: 1169 - protein, 6 aa, synthetic construct
PAEDQY

SEQ ID NO: 1170 - protein, 6 aa, synthetic construct
PAEDED

SEQ ID NO: 1171 - protein, 6 aa, synthetic construct
PAEDEE

SEQ ID NO: 1172 - protein, 6 aa, synthetic construct
PAEDEF

SEQ ID NO: 1173 - protein, 6 aa, synthetic construct
PAEDEW

SEQ ID NO: 1174 - protein, 6 aa, synthetic construct
PAEDEY

SEQ ID NO: 1175 - protein, 6 aa, synthetic construct
PAEDGD

SEQ ID NO: 1176 - protein, 6 aa, synthetic construct
PAEDGE

SEQ ID NO: 1177 - protein, 6 aa, synthetic construct
PAEDGF

SEQ ID NO: 1178 - protein, 6 aa, synthetic construct
PAEDGW

SEQ ID NO: 1179 - protein, 6 aa, synthetic construct
PAEDGY

SEQ ID NO: 1180 - protein, 6 aa, synthetic construct
PAEDHD

SEQ ID NO: 1181 - protein, 6 aa, synthetic construct
PAEDHE

SEQ ID NO: 1182 - protein, 6 aa, synthetic construct
PAEDHF

SEQ ID NO: 1183 - protein, 6 aa, synthetic construct
PAEDHW

SEQ ID NO: 1184 - protein, 6 aa, synthetic construct
PAEDHY

SEQ ID NO: 1185 - protein, 6 aa, synthetic construct
PAEDID

SEQ ID NO: 1186 - protein, 6 aa, synthetic construct
PAEDIE

SEQ ID NO: 1187 - protein, 6 aa, synthetic construct
PAEDIF

SEQ ID NO: 1188 - protein, 6 aa, synthetic construct
PAEDIW

SEQ ID NO: 1189 - protein, 6 aa, synthetic construct
PAEDIY

SEQ ID NO: 1190 - protein, 6 aa, synthetic construct
PAEDLD

SEQ ID NO: 1191 - protein, 6 aa, synthetic construct
PAEDLE

SEQ ID NO: 1192 - protein, 6 aa, synthetic construct
PAEDLF

SEQ ID NO: 1193 - protein, 6 aa, synthetic construct
PAEDLW

SEQ ID NO: 1194 - protein, 6 aa, synthetic construct
PAEDLY

SEQ ID NO: 1195 - protein, 6 aa, synthetic construct
PAEDKD

SEQ ID NO: 1196 - protein, 6 aa, synthetic construct
PAEDKE

SEQ ID NO: 1197 - protein, 6 aa, synthetic construct
PAEDKF

SEQ ID NO: 1198 - protein, 6 aa, synthetic construct
PAEDKW

SEQ ID NO: 1199 - protein, 6 aa, synthetic construct
PAEDKY

SEQ ID NO: 1200 - protein, 6 aa, synthetic construct
PAEDMD

SEQ ID NO: 1201 - protein, 6 aa, synthetic construct
PAEDME

SEQ ID NO: 1202 - protein, 6 aa, synthetic construct
PAEDMF

SEQ ID NO: 1203 - protein, 6 aa, synthetic construct
PAEDMW

SEQ ID NO: 1204 - protein, 6 aa, synthetic construct
PAEDMY

SEQ ID NO: 1205 - protein, 6 aa, synthetic construct
PAEDFD

SEQ ID NO: 1206 - protein, 6 aa, synthetic construct
PAEDFE

SEQ ID NO: 1207 - protein, 6 aa, synthetic construct
PAEDFF

SEQ ID NO: 1208 - protein, 6 aa, synthetic construct
PAEDFW

SEQ ID NO: 1209 - protein, 6 aa, synthetic construct
PAEDFY

SEQ ID NO: 1210 - protein, 6 aa, synthetic construct
PAEDPD

SEQ ID NO: 1211 - protein, 6 aa, synthetic construct
PAEDPE

SEQ ID NO: 1212 - protein, 6 aa, synthetic construct
PAEDPF

SEQ ID NO: 1213 - protein, 6 aa, synthetic construct
PAEDPW

SEQ ID NO: 1214 - protein, 6 aa, synthetic construct
PAEDPY

SEQ ID NO: 1215 - protein, 6 aa, synthetic construct
PAEDSD

SEQ ID NO: 1216 - protein, 6 aa, synthetic construct
PAEDSE

SEQ ID NO: 1217 - protein, 6 aa, synthetic construct
PAEDSF

SEQ ID NO: 1218 - protein, 6 aa, synthetic construct
PAEDSW

SEQ ID NO: 1219 - protein, 6 aa, synthetic construct
PAEDSY

SEQ ID NO: 1220 - protein, 6 aa, synthetic construct
PAEDTD

SEQ ID NO: 1221 - protein, 6 aa, synthetic construct
PAEDTE

SEQ ID NO: 1222 - protein, 6 aa, synthetic construct
PAEDTF

SEQ ID NO: 1223 - protein, 6 aa, synthetic construct
PAEDTW

SEQ ID NO: 1224 - protein, 6 aa, synthetic construct
PAEDTY

SEQ ID NO: 1225 - protein, 6 aa, synthetic construct
PAEDWD

SEQ ID NO: 1226 - protein, 6 aa, synthetic construct
PAEDWE

SEQ ID NO: 1227 - protein, 6 aa, synthetic construct
PAEDWF

SEQ ID NO: 1228 - protein, 6 aa, synthetic construct
PAEDWW

SEQ ID NO: 1229 - protein, 6 aa, synthetic construct
PAEDWY

SEQ ID NO: 1230 - protein, 6 aa, synthetic construct
PAEDYD

SEQ ID NO: 1231 - protein, 6 aa, synthetic construct
PAEDYE

SEQ ID NO: 1232 - protein, 6 aa, synthetic construct
PAEDYF

SEQ ID NO: 1233 - protein, 6 aa, synthetic construct
PAEDYW

SEQ ID NO: 1234 - protein, 6 aa, synthetic construct
PAEDYY

SEQ ID NO: 1235 - protein, 6 aa, synthetic construct
PAEDVD

SEQ ID NO: 1236 - protein, 6 aa, synthetic construct
PAEDVE

SEQ ID NO: 1237 - protein, 6 aa, synthetic construct
PAEDVF

SEQ ID NO: 1238 - protein, 6 aa, synthetic construct
PAEDVW

SEQ ID NO: 1239 - protein, 6 aa, synthetic construct
PAEDVY

SEQ ID NO: 1240 - protein, 6 aa, synthetic construct
PAECAD

SEQ ID NO: 1241 - protein, 6 aa, synthetic construct
PAECAE

SEQ ID NO: 1242 - protein, 6 aa, synthetic construct
PAECAF

SEQ ID NO: 1243 - protein, 6 aa, synthetic construct
PAECAW

SEQ ID NO: 1244 - protein, 6 aa, synthetic construct
PAECAY

SEQ ID NO: 1245 - protein, 6 aa, synthetic construct
PAECRD

SEQ ID NO: 1246 - protein, 6 aa, synthetic construct
PAECRE

SEQ ID NO: 1247 - protein, 6 aa, synthetic construct
PAECRF

SEQ ID NO: 1248 - protein, 6 aa, synthetic construct
PAECRW

SEQ ID NO: 1249 - protein, 6 aa, synthetic construct
PAECRY

SEQ ID NO: 1250 - protein, 6 aa, synthetic construct
PAECND

SEQ ID NO: 1251 - protein, 6 aa, synthetic construct
PAECNE

SEQ ID NO: 1252 - protein, 6 aa, synthetic construct
PAECNF

SEQ ID NO: 1253 - protein, 6 aa, synthetic construct
PAECNW

SEQ ID NO: 1254 - protein, 6 aa, synthetic construct
PAECNY

SEQ ID NO: 1255 - protein, 6 aa, synthetic construct
PAECDD

SEQ ID NO: 1256 - protein, 6 aa, synthetic construct
PAECDE

SEQ ID NO: 1257 - protein, 6 aa, synthetic construct
PAECDF

SEQ ID NO: 1258 - protein, 6 aa, synthetic construct
PAECDW

SEQ ID NO: 1259 - protein, 6 aa, synthetic construct
PAECDY

SEQ ID NO: 1260 - protein, 6 aa, synthetic construct
PAECCD

SEQ ID NO: 1261 - protein, 6 aa, synthetic construct
PAECCE

SEQ ID NO: 1262 - protein, 6 aa, synthetic construct
PAECCF

SEQ ID NO: 1263 - protein, 6 aa, synthetic construct
PAECCW

SEQ ID NO: 1264 - protein, 6 aa, synthetic construct
PAECCY

SEQ ID NO: 1265 - protein, 6 aa, synthetic construct
PAECQD

SEQ ID NO: 1266 - protein, 6 aa, synthetic construct
PAECQE

SEQ ID NO: 1267 - protein, 6 aa, synthetic construct
PAECQF

SEQ ID NO: 1268 - protein, 6 aa, synthetic construct
PAECQW

SEQ ID NO: 1269 - protein, 6 aa, synthetic construct
PAECQY

SEQ ID NO: 1270 - protein, 6 aa, synthetic construct
PAECED

SEQ ID NO: 1271 - protein, 6 aa, synthetic construct
PAECEE

SEQ ID NO: 1272 - protein, 6 aa, synthetic construct
PAECEF

SEQ ID NO: 1273 - protein, 6 aa, synthetic construct
PAECEW

SEQ ID NO: 1274 - protein, 6 aa, synthetic construct
PAECEY

SEQ ID NO: 1275 - protein, 6 aa, synthetic construct
PAECGD

SEQ ID NO: 1276 - protein, 6 aa, synthetic construct
PAECGE

SEQ ID NO: 1277 - protein, 6 aa, synthetic construct
PAECGF

SEQ ID NO: 1278 - protein, 6 aa, synthetic construct
PAECGW

SEQ ID NO: 1279 - protein, 6 aa, synthetic construct
PAECGY

SEQ ID NO: 1280 - protein, 6 aa, synthetic construct
PAECHD

SEQ ID NO: 1281 - protein, 6 aa, synthetic construct
PAECHE

SEQ ID NO: 1282 - protein, 6 aa, synthetic construct
PAECHF

SEQ ID NO: 1283 - protein, 6 aa, synthetic construct
PAECHW

SEQ ID NO: 1284 - protein, 6 aa, synthetic construct
PAECHY

SEQ ID NO: 1285 - protein, 6 aa, synthetic construct
PAECID

SEQ ID NO: 1286 - protein, 6 aa, synthetic construct
PAECIE

SEQ ID NO: 1287 - protein, 6 aa, synthetic construct
PAECIF

SEQ ID NO: 1288 - protein, 6 aa, synthetic construct
PAECIW

SEQ ID NO: 1289 - protein, 6 aa, synthetic construct
PAECIY

SEQ ID NO: 1290 - protein, 6 aa, synthetic construct
PAECLD

SEQ ID NO: 1291 - protein, 6 aa, synthetic construct
PAECLE

SEQ ID NO: 1292 - protein, 6 aa, synthetic construct
PAECLF

SEQ ID NO: 1293 - protein, 6 aa, synthetic construct
PAECLW

SEQ ID NO: 1294 - protein, 6 aa, synthetic construct
PAECLY

SEQ ID NO: 1295 - protein, 6 aa, synthetic construct
PAECKD

SEQ ID NO: 1296 - protein, 6 aa, synthetic construct
PAECKE

SEQ ID NO: 1297 - protein, 6 aa, synthetic construct
PAECKF

SEQ ID NO: 1298 - protein, 6 aa, synthetic construct
PAECKW

SEQ ID NO: 1299 - protein, 6 aa, synthetic construct
PAECKY

SEQ ID NO: 1300 - protein, 6 aa, synthetic construct
PAECMD

SEQ ID NO: 1301 - protein, 6 aa, synthetic construct
PAECME

SEQ ID NO: 1302 - protein, 6 aa, synthetic construct
PAECMF

SEQ ID NO: 1303 - protein, 6 aa, synthetic construct
PAECMW

SEQ ID NO: 1304 - protein, 6 aa, synthetic construct
PAECMY

SEQ ID NO: 1305 - protein, 6 aa, synthetic construct
PAECFD

SEQ ID NO: 1306 - protein, 6 aa, synthetic construct
PAECFE

SEQ ID NO: 1307 - protein, 6 aa, synthetic construct
PAECFF

SEQ ID NO: 1308 - protein, 6 aa, synthetic construct
PAECFW

SEQ ID NO: 1309 - protein, 6 aa, synthetic construct
PAECFY

SEQ ID NO: 1310 - protein, 6 aa, synthetic construct
PAECPD

SEQ ID NO: 1311 - protein, 6 aa, synthetic construct
PAECPE

SEQ ID NO: 1312 - protein, 6 aa, synthetic construct
PAECPF

SEQ ID NO: 1313 - protein, 6 aa, synthetic construct
PAECPW

SEQ ID NO: 1314 - protein, 6 aa, synthetic construct
PAECPY

SEQ ID NO: 1315 - protein, 6 aa, synthetic construct
PAECSD

SEQ ID NO: 1316 - protein, 6 aa, synthetic construct
PAECSE

SEQ ID NO: 1317 - protein, 6 aa, synthetic construct
PAECSF

SEQ ID NO: 1318 - protein, 6 aa, synthetic construct
PAECSW

SEQ ID NO: 1319 - protein, 6 aa, synthetic construct
PAECSY

SEQ ID NO: 1320 - protein, 6 aa, synthetic construct
PAECTD

SEQ ID NO: 1321 - protein, 6 aa, synthetic construct
PAECTE

SEQ ID NO: 1322 - protein, 6 aa, synthetic construct
PAECTF

SEQ ID NO: 1323 - protein, 6 aa, synthetic construct
PAECTW

SEQ ID NO: 1324 - protein, 6 aa, synthetic construct
PAECTY

SEQ ID NO: 1325 - protein, 6 aa, synthetic construct
PAECWD

SEQ ID NO: 1326 - protein, 6 aa, synthetic construct
PAECWE

SEQ ID NO: 1327 - protein, 6 aa, synthetic construct
PAECWF

SEQ ID NO: 1328 - protein, 6 aa, synthetic construct
PAECWW

SEQ ID NO: 1329 - protein, 6 aa, synthetic construct
PAECWY

SEQ ID NO: 1330 - protein, 6 aa, synthetic construct
PAECYD

SEQ ID NO: 1331 - protein, 6 aa, synthetic construct
PAECYE

SEQ ID NO: 1332 - protein, 6 aa, synthetic construct
PAECYF

SEQ ID NO: 1333 - protein, 6 aa, synthetic construct
PAECYW

SEQ ID NO: 1334 - protein, 6 aa, synthetic construct
PAECYY

SEQ ID NO: 1335 - protein, 6 aa, synthetic construct
PAECVD

SEQ ID NO: 1336 - protein, 6 aa, synthetic construct
PAECVE

SEQ ID NO: 1337 - protein, 6 aa, synthetic construct
PAECVF

SEQ ID NO: 1338 - protein, 6 aa, synthetic construct
PAECVW

SEQ ID NO: 1339 - protein, 6 aa, synthetic construct
PAECVY

SEQ ID NO: 1340 - protein, 6 aa, synthetic construct
PAEQAD

SEQ ID NO: 1341 - protein, 6 aa, synthetic construct
PAEQAE

SEQ ID NO: 1342 - protein, 6 aa, synthetic construct
PAEQAF

SEQ ID NO: 1343 - protein, 6 aa, synthetic construct
PAEQAW

SEQ ID NO: 1344 - protein, 6 aa, synthetic construct
PAEQAY

SEQ ID NO: 1345 - protein, 6 aa, synthetic construct
PAEQRD

SEQ ID NO: 1346 - protein, 6 aa, synthetic construct
PAEQRE

SEQ ID NO: 1347 - protein, 6 aa, synthetic construct
PAEQRF

SEQ ID NO: 1348 - protein, 6 aa, synthetic construct
PAEQRW

SEQ ID NO: 1349 - protein, 6 aa, synthetic construct
PAEQRY

SEQ ID NO: 1350 - protein, 6 aa, synthetic construct
PAEQND

SEQ ID NO: 1351 - protein, 6 aa, synthetic construct
PAEQNE

SEQ ID NO: 1352 - protein, 6 aa, synthetic construct
PAEQNF

SEQ ID NO: 1353 - protein, 6 aa, synthetic construct
PAEQNW

SEQ ID NO: 1354 - protein, 6 aa, synthetic construct
PAEQNY

SEQ ID NO: 1355 - protein, 6 aa, synthetic construct
PAEQDD

SEQ ID NO: 1356 - protein, 6 aa, synthetic construct
PAEQDE

SEQ ID NO: 1357 - protein, 6 aa, synthetic construct
PAEQDF

SEQ ID NO: 1358 - protein, 6 aa, synthetic construct
PAEQDW

SEQ ID NO: 1359 - protein, 6 aa, synthetic construct
PAEQDY

SEQ ID NO: 1360 - protein, 6 aa, synthetic construct
PAEQCD

SEQ ID NO: 1361 - protein, 6 aa, synthetic construct
PAEQCE

SEQ ID NO: 1362 - protein, 6 aa, synthetic construct
PAEQCF

SEQ ID NO: 1363 - protein, 6 aa, synthetic construct
PAEQCW

SEQ ID NO: 1364 - protein, 6 aa, synthetic construct
PAEQCY

SEQ ID NO: 1365 - protein, 6 aa, synthetic construct
PAEQQD

SEQ ID NO: 1366 - protein, 6 aa, synthetic construct
PAEQQE

SEQ ID NO: 1367 - protein, 6 aa, synthetic construct
PAEQQF

SEQ ID NO: 1368 - protein, 6 aa, synthetic construct
PAEQQW

SEQ ID NO: 1369 - protein, 6 aa, synthetic construct
PAEQQY

SEQ ID NO: 1370 - protein, 6 aa, synthetic construct
PAEQED

SEQ ID NO: 1371 - protein, 6 aa, synthetic construct
PAEQEE

SEQ ID NO: 1372 - protein, 6 aa, synthetic construct
PAEQEF

SEQ ID NO: 1373 - protein, 6 aa, synthetic construct
PAEQEW

SEQ ID NO: 1374 - protein, 6 aa, synthetic construct
PAEQEY

SEQ ID NO: 1375 - protein, 6 aa, synthetic construct
PAEQGD

SEQ ID NO: 1376 - protein, 6 aa, synthetic construct
PAEQGE

SEQ ID NO: 1377 - protein, 6 aa, synthetic construct
PAEQGF

SEQ ID NO: 1378 - protein, 6 aa, synthetic construct
PAEQGW

SEQ ID NO: 1379 - protein, 6 aa, synthetic construct
PAEQGY

SEQ ID NO: 1380 - protein, 6 aa, synthetic construct
PAEQHD

SEQ ID NO: 1381 - protein, 6 aa, synthetic construct
PAEQHE

SEQ ID NO: 1382 - protein, 6 aa, synthetic construct
PAEQHF

SEQ ID NO: 1383 - protein, 6 aa, synthetic construct
PAEQHW

SEQ ID NO: 1384 - protein, 6 aa, synthetic construct
PAEQHY

SEQ ID NO: 1385 - protein, 6 aa, synthetic construct
PAEQID

SEQ ID NO: 1386 - protein, 6 aa, synthetic construct
PAEQIE

SEQ ID NO: 1387 - protein, 6 aa, synthetic construct
PAEQIF

SEQ ID NO: 1388 - protein, 6 aa, synthetic construct
PAEQIW

SEQ ID NO: 1389 - protein, 6 aa, synthetic construct
PAEQIY

SEQ ID NO: 1390 - protein, 6 aa, synthetic construct
PAEQLD

SEQ ID NO: 1391 - protein, 6 aa, synthetic construct
PAEQLE

SEQ ID NO: 1392 - protein, 6 aa, synthetic construct
PAEQLF

SEQ ID NO: 1393 - protein, 6 aa, synthetic construct
PAEQLW

SEQ ID NO: 1394 - protein, 6 aa, synthetic construct
PAEQLY

SEQ ID NO: 1395 - protein, 6 aa, synthetic construct
PAEQKD

SEQ ID NO: 1396 - protein, 6 aa, synthetic construct
PAEQKE

SEQ ID NO: 1397 - protein, 6 aa, synthetic construct
PAEQKF

SEQ ID NO: 1398 - protein, 6 aa, synthetic construct
PAEQKW

SEQ ID NO: 1399 - protein, 6 aa, synthetic construct
PAEQKY

SEQ ID NO: 1400 - protein, 6 aa, synthetic construct
PAEQMD

SEQ ID NO: 1401 - protein, 6 aa, synthetic construct
PAEQME

SEQ ID NO: 1402 - protein, 6 aa, synthetic construct
PAEQMF

SEQ ID NO: 1403 - protein, 6 aa, synthetic construct
PAEQMW

SEQ ID NO: 1404 - protein, 6 aa, synthetic construct
PAEQMY

SEQ ID NO: 1405 - protein, 6 aa, synthetic construct
PAEQFD

SEQ ID NO: 1406 - protein, 6 aa, synthetic construct
PAEQFE

SEQ ID NO: 1407 - protein, 6 aa, synthetic construct
PAEQFF

SEQ ID NO: 1408 - protein, 6 aa, synthetic construct
PAEQFW

SEQ ID NO: 1409 - protein, 6 aa, synthetic construct
PAEQFY

SEQ ID NO: 1410 - protein, 6 aa, synthetic construct
PAEQPD

SEQ ID NO: 1411 - protein, 6 aa, synthetic construct
PAEQPE

SEQ ID NO: 1412 - protein, 6 aa, synthetic construct
PAEQPF

SEQ ID NO: 1413 - protein, 6 aa, synthetic construct
PAEQPW

SEQ ID NO: 1414 - protein, 6 aa, synthetic construct
PAEQPY

SEQ ID NO: 1415 - protein, 6 aa, synthetic construct
PAEQSD

SEQ ID NO: 1416 - protein, 6 aa, synthetic construct
PAEQSE

SEQ ID NO: 1417 - protein, 6 aa, synthetic construct
PAEQSF

SEQ ID NO: 1418 - protein, 6 aa, synthetic construct
PAEQSW

SEQ ID NO: 1419 - protein, 6 aa, synthetic construct
PAEQSY

SEQ ID NO: 1420 - protein, 6 aa, synthetic construct
PAEQTD

SEQ ID NO: 1421 - protein, 6 aa, synthetic construct
PAEQTE

SEQ ID NO: 1422 - protein, 6 aa, synthetic construct
PAEQTF

SEQ ID NO: 1423 - protein, 6 aa, synthetic construct
PAEQTW

SEQ ID NO: 1424 - protein, 6 aa, synthetic construct
PAEQTY

SEQ ID NO: 1425 - protein, 6 aa, synthetic construct
PAEQWD

SEQ ID NO: 1426 - protein, 6 aa, synthetic construct
PAEQWE

SEQ ID NO: 1427 - protein, 6 aa, synthetic construct
PAEQWF

SEQ ID NO: 1428 - protein, 6 aa, synthetic construct
PAEQWW

SEQ ID NO: 1429 - protein, 6 aa, synthetic construct
PAEQWY

SEQ ID NO: 1430 - protein, 6 aa, synthetic construct
PAEQYD

SEQ ID NO: 1431 - protein, 6 aa, synthetic construct
PAEQYE

SEQ ID NO: 1432 - protein, 6 aa, synthetic construct
PAEQYF

SEQ ID NO: 1433 - protein, 6 aa, synthetic construct
PAEQYW

SEQ ID NO: 1434 - protein, 6 aa, synthetic construct
PAEQYY

SEQ ID NO: 1435 - protein, 6 aa, synthetic construct
PAEQVD

SEQ ID NO: 1436 - protein, 6 aa, synthetic construct
PAEQVE

SEQ ID NO: 1437 - protein, 6 aa, synthetic construct
PAEQVF

SEQ ID NO: 1438 - protein, 6 aa, synthetic construct
PAEQVW

SEQ ID NO: 1439 - protein, 6 aa, synthetic construct
PAEQVY

SEQ ID NO: 1440 - protein, 6 aa, synthetic construct
PAEEAD

SEQ ID NO: 1441 - protein, 6 aa, synthetic construct
PAEEAE

SEQ ID NO: 1442 - protein, 6 aa, synthetic construct
PAEEAF

SEQ ID NO: 1443 - protein, 6 aa, synthetic construct
PAEEAW

SEQ ID NO: 1444 - protein, 6 aa, synthetic construct
PAEEAY

SEQ ID NO: 1445 - protein, 6 aa, synthetic construct
PAEERD

SEQ ID NO: 1446 - protein, 6 aa, synthetic construct
PAEERE

SEQ ID NO: 1447 - protein, 6 aa, synthetic construct
PAEERF

SEQ ID NO: 1448 - protein, 6 aa, synthetic construct
PAEERW

SEQ ID NO: 1449 - protein, 6 aa, synthetic construct
PAEERY

SEQ ID NO: 1450 - protein, 6 aa, synthetic construct
PAEEND

SEQ ID NO: 1451 - protein, 6 aa, synthetic construct
PAEENE

SEQ ID NO: 1452 - protein, 6 aa, synthetic construct
PAEENF

SEQ ID NO: 1453 - protein, 6 aa, synthetic construct
PAEENW

SEQ ID NO: 1454 - protein, 6 aa, synthetic construct
PAEENY

SEQ ID NO: 1455 - protein, 6 aa, synthetic construct
PAEEDD

SEQ ID NO: 1456 - protein, 6 aa, synthetic construct
PAEEDE

SEQ ID NO: 1457 - protein, 6 aa, synthetic construct
PAEEDF

SEQ ID NO: 1458 - protein, 6 aa, synthetic construct
PAEEDW

SEQ ID NO: 1459 - protein, 6 aa, synthetic construct
PAEEDY

SEQ ID NO: 1460 - protein, 6 aa, synthetic construct
PAEECD

SEQ ID NO: 1461 - protein, 6 aa, synthetic construct
PAEECE

SEQ ID NO: 1462 - protein, 6 aa, synthetic construct
PAEECF

SEQ ID NO: 1463 - protein, 6 aa, synthetic construct
PAEECW

SEQ ID NO: 1464 - protein, 6 aa, synthetic construct
PAEECY

SEQ ID NO: 1465 - protein, 6 aa, synthetic construct
PAEEQD

SEQ ID NO: 1466 - protein, 6 aa, synthetic construct
PAEEQE

SEQ ID NO: 1467 - protein, 6 aa, synthetic construct
PAEEQF

SEQ ID NO: 1468 - protein, 6 aa, synthetic construct
PAEEQW

SEQ ID NO: 1469 - protein, 6 aa, synthetic construct
PAEEQY

SEQ ID NO: 1470 - protein, 6 aa, synthetic construct
PAEEED

SEQ ID NO: 1471 - protein, 6 aa, synthetic construct
PAEEEE

SEQ ID NO: 1472 - protein, 6 aa, synthetic construct
PAEEEF

SEQ ID NO: 1473 - protein, 6 aa, synthetic construct
PAEEEW

SEQ ID NO: 1474 - protein, 6 aa, synthetic construct
PAEEEY

SEQ ID NO: 1475 - protein, 6 aa, synthetic construct
PAEEGD

SEQ ID NO: 1476 - protein, 6 aa, synthetic construct
PAEEGE

SEQ ID NO: 1477 - protein, 6 aa, synthetic construct
PAEEGF

SEQ ID NO: 1478 - protein, 6 aa, synthetic construct
PAEEGW

SEQ ID NO: 1479 - protein, 6 aa, synthetic construct
PAEEGY

SEQ ID NO: 1480 - protein, 6 aa, synthetic construct
PAEEHD

SEQ ID NO: 1481 - protein, 6 aa, synthetic construct
PAEEHE

SEQ ID NO: 1482 - protein, 6 aa, synthetic construct
PAEEHF

SEQ ID NO: 1483 - protein, 6 aa, synthetic construct
PAEEHW

SEQ ID NO: 1484 - protein, 6 aa, synthetic construct
PAEEHY

SEQ ID NO: 1485 - protein, 6 aa, synthetic construct
PAEEID

SEQ ID NO: 1486 - protein, 6 aa, synthetic construct
PAEEIE

SEQ ID NO: 1487 - protein, 6 aa, synthetic construct
PAEEIF

SEQ ID NO: 1488 - protein, 6 aa, synthetic construct
PAEEIW

SEQ ID NO: 1489 - protein, 6 aa, synthetic construct
PAEEIY

SEQ ID NO: 1490 - protein, 6 aa, synthetic construct
PAEELD

SEQ ID NO: 1491 - protein, 6 aa, synthetic construct
PAEELE

SEQ ID NO: 1492 - protein, 6 aa, synthetic construct
PAEELF

SEQ ID NO: 1493 - protein, 6 aa, synthetic construct
PAEELW

SEQ ID NO: 1494 - protein, 6 aa, synthetic construct
PAEELY

SEQ ID NO: 1495 - protein, 6 aa, synthetic construct
PAEEKD

SEQ ID NO: 1496 - protein, 6 aa, synthetic construct
PAEEKE

SEQ ID NO: 1497 - protein, 6 aa, synthetic construct
PAEEKF

SEQ ID NO: 1498 - protein, 6 aa, synthetic construct
PAEEKW

SEQ ID NO: 1499 - protein, 6 aa, synthetic construct
PAEEKY

SEQ ID NO: 1500 - protein, 6 aa, synthetic construct
PAEEMD

SEQ ID NO: 1501 - protein, 6 aa, synthetic construct
PAEEME

SEQ ID NO: 1502 - protein, 6 aa, synthetic construct
PAEEMF

SEQ ID NO: 1503 - protein, 6 aa, synthetic construct
PAEEMW

SEQ ID NO: 1504 - protein, 6 aa, synthetic construct
PAEEMY

SEQ ID NO: 1505 - protein, 6 aa, synthetic construct
PAEEFD

SEQ ID NO: 1506 - protein, 6 aa, synthetic construct
PAEEFE

SEQ ID NO: 1507 - protein, 6 aa, synthetic construct
PAEEFF

SEQ ID NO: 1508 - protein, 6 aa, synthetic construct
PAEEFW

SEQ ID NO: 1509 - protein, 6 aa, synthetic construct
PAEEFY

SEQ ID NO: 1510 - protein, 6 aa, synthetic construct
PAEEPD

SEQ ID NO: 1511 - protein, 6 aa, synthetic construct
PAEEPE

SEQ ID NO: 1512 - protein, 6 aa, synthetic construct
PAEEPF

SEQ ID NO: 1513 - protein, 6 aa, synthetic construct
PAEEPW

SEQ ID NO: 1514 - protein, 6 aa, synthetic construct
PAEEPY

SEQ ID NO: 1515 - protein, 6 aa, synthetic construct
PAEESD

SEQ ID NO: 1516 - protein, 6 aa, synthetic construct
PAEESE

SEQ ID NO: 1517 - protein, 6 aa, synthetic construct
PAEESF

SEQ ID NO: 1518 - protein, 6 aa, synthetic construct
PAEESW

SEQ ID NO: 1519 - protein, 6 aa, synthetic construct
PAEESY

SEQ ID NO: 1520 - protein, 6 aa, synthetic construct
PAEETD

SEQ ID NO: 1521 - protein, 6 aa, synthetic construct
PAEETE

SEQ ID NO: 1522 - protein, 6 aa, synthetic construct
PAEETF

SEQ ID NO: 1523 - protein, 6 aa, synthetic construct
PAEETW

SEQ ID NO: 1524 - protein, 6 aa, synthetic construct
PAEETY

SEQ ID NO: 1525 - protein, 6 aa, synthetic construct
PAEEWD

SEQ ID NO: 1526 - protein, 6 aa, synthetic construct
PAEEWE

SEQ ID NO: 1527 - protein, 6 aa, synthetic construct
PAEEWF

SEQ ID NO: 1528 - protein, 6 aa, synthetic construct
PAEEWW

SEQ ID NO: 1529 - protein, 6 aa, synthetic construct
PAEEWY

SEQ ID NO: 1530 - protein, 6 aa, synthetic construct
PAEEYD

SEQ ID NO: 1531 - protein, 6 aa, synthetic construct
PAEEYE

SEQ ID NO: 1532 - protein, 6 aa, synthetic construct
PAEEYF

SEQ ID NO: 1533 - protein, 6 aa, synthetic construct
PAEEYW

SEQ ID NO: 1534 - protein, 6 aa, synthetic construct
PAEEYY

SEQ ID NO: 1535 - protein, 6 aa, synthetic construct
PAEEVD

SEQ ID NO: 1536 - protein, 6 aa, synthetic construct
PAEEVE

SEQ ID NO: 1537 - protein, 6 aa, synthetic construct
PAEEVF

SEQ ID NO: 1538 - protein, 6 aa, synthetic construct
PAEEVW

SEQ ID NO: 1539 - protein, 6 aa, synthetic construct
PAEEVY

SEQ ID NO: 1540 - protein, 6 aa, synthetic construct
PAEGAD

SEQ ID NO: 1541 - protein, 6 aa, synthetic construct
PAEGAE

SEQ ID NO: 1542 - protein, 6 aa, synthetic construct
PAEGAF

SEQ ID NO: 1543 - protein, 6 aa, synthetic construct
PAEGAW

SEQ ID NO: 1544 - protein, 6 aa, synthetic construct
PAEGAY

SEQ ID NO: 1545 - protein, 6 aa, synthetic construct
PAEGRD

SEQ ID NO: 1546 - protein, 6 aa, synthetic construct
PAEGRE

SEQ ID NO: 1547 - protein, 6 aa, synthetic construct
PAEGRF

SEQ ID NO: 1548 - protein, 6 aa, synthetic construct
PAEGRW

SEQ ID NO: 1549 - protein, 6 aa, synthetic construct
PAEGRY

SEQ ID NO: 1550 - protein, 6 aa, synthetic construct
PAEGND

SEQ ID NO: 1551 - protein, 6 aa, synthetic construct
PAEGNE

SEQ ID NO: 1552 - protein, 6 aa, synthetic construct
PAEGNF

SEQ ID NO: 1553 - protein, 6 aa, synthetic construct
PAEGNW

SEQ ID NO: 1554 - protein, 6 aa, synthetic construct
PAEGNY

SEQ ID NO: 1555 - protein, 6 aa, synthetic construct
PAEGDD

SEQ ID NO: 1556 - protein, 6 aa, synthetic construct
PAEGDE

SEQ ID NO: 1557 - protein, 6 aa, synthetic construct
PAEGDF

SEQ ID NO: 1558 - protein, 6 aa, synthetic construct
PAEGDW

SEQ ID NO: 1559 - protein, 6 aa, synthetic construct
PAEGDY

SEQ ID NO: 1560 - protein, 6 aa, synthetic construct
PAEGCD

SEQ ID NO: 1561 - protein, 6 aa, synthetic construct
PAEGCE

SEQ ID NO: 1562 - protein, 6 aa, synthetic construct
PAEGCF

SEQ ID NO: 1563 - protein, 6 aa, synthetic construct
PAEGCW

SEQ ID NO: 1564 - protein, 6 aa, synthetic construct
PAEGCY

SEQ ID NO: 1565 - protein, 6 aa, synthetic construct
PAEGQD

SEQ ID NO: 1566 - protein, 6 aa, synthetic construct
PAEGQE

SEQ ID NO: 1567 - protein, 6 aa, synthetic construct
PAEGQF

SEQ ID NO: 1568 - protein, 6 aa, synthetic construct
PAEGQW

SEQ ID NO: 1569 - protein, 6 aa, synthetic construct
PAEGQY

SEQ ID NO: 1570 - protein, 6 aa, synthetic construct
PAEGED

SEQ ID NO: 1571 - protein, 6 aa, synthetic construct
PAEGEE

SEQ ID NO: 1572 - protein, 6 aa, synthetic construct
PAEGEF

SEQ ID NO: 1573 - protein, 6 aa, synthetic construct
PAEGEW

SEQ ID NO: 1574 - protein, 6 aa, synthetic construct
PAEGEY

SEQ ID NO: 1575 - protein, 6 aa, synthetic construct
PAEGGD

SEQ ID NO: 1576 - protein, 6 aa, synthetic construct
PAEGGE

SEQ ID NO: 1577 - protein, 6 aa, synthetic construct
PAEGGF

SEQ ID NO: 1578 - protein, 6 aa, synthetic construct
PAEGGW

SEQ ID NO: 1579 - protein, 6 aa, synthetic construct
PAEGGY

SEQ ID NO: 1580 - protein, 6 aa, synthetic construct
PAEGHD

SEQ ID NO: 1581 - protein, 6 aa, synthetic construct
PAEGHE

SEQ ID NO: 1582 - protein, 6 aa, synthetic construct
PAEGHF

SEQ ID NO: 1583 - protein, 6 aa, synthetic construct
PAEGHW

SEQ ID NO: 1584 - protein, 6 aa, synthetic construct
PAEGHY

SEQ ID NO: 1585 - protein, 6 aa, synthetic construct
PAEGID

SEQ ID NO: 1586 - protein, 6 aa, synthetic construct
PAEGIE

SEQ ID NO: 1587 - protein, 6 aa, synthetic construct
PAEGIF

SEQ ID NO: 1588 - protein, 6 aa, synthetic construct
PAEGIW

SEQ ID NO: 1589 - protein, 6 aa, synthetic construct
PAEGIY

SEQ ID NO: 1590 - protein, 6 aa, synthetic construct
PAEGLD

SEQ ID NO: 1591 - protein, 6 aa, synthetic construct
PAEGLE

SEQ ID NO: 1592 - protein, 6 aa, synthetic construct
PAEGLF

SEQ ID NO: 1593 - protein, 6 aa, synthetic construct
PAEGLW

SEQ ID NO: 1594 - protein, 6 aa, synthetic construct
PAEGLY

SEQ ID NO: 1595 - protein, 6 aa, synthetic construct
PAEGKD

SEQ ID NO: 1596 - protein, 6 aa, synthetic construct
PAEGKE

SEQ ID NO: 1597 - protein, 6 aa, synthetic construct
PAEGKF

SEQ ID NO: 1598 - protein, 6 aa, synthetic construct
PAEGKW

SEQ ID NO: 1599 - protein, 6 aa, synthetic construct
PAEGKY

SEQ ID NO: 1600 - protein, 6 aa, synthetic construct
PAEGMD

SEQ ID NO: 1601 - protein, 6 aa, synthetic construct
PAEGME

SEQ ID NO: 1602 - protein, 6 aa, synthetic construct
PAEGMF

SEQ ID NO: 1603 - protein, 6 aa, synthetic construct
PAEGMW

SEQ ID NO: 1604 - protein, 6 aa, synthetic construct
PAEGMY

SEQ ID NO: 1605 - protein, 6 aa, synthetic construct
PAEGFD

SEQ ID NO: 1606 - protein, 6 aa, synthetic construct
PAEGFE

SEQ ID NO: 1607 - protein, 6 aa, synthetic construct
PAEGFF

SEQ ID NO: 1608 - protein, 6 aa, synthetic construct
PAEGFW

SEQ ID NO: 1609 - protein, 6 aa, synthetic construct
PAEGFY

SEQ ID NO: 1610 - protein, 6 aa, synthetic construct
PAEGPD

SEQ ID NO: 1611 - protein, 6 aa, synthetic construct
PAEGPE

SEQ ID NO: 1612 - protein, 6 aa, synthetic construct
PAEGPF

SEQ ID NO: 1613 - protein, 6 aa, synthetic construct
PAEGPW

SEQ ID NO: 1614 - protein, 6 aa, synthetic construct
PAEGPY

SEQ ID NO: 1615 - protein, 6 aa, synthetic construct
PAEGSD

SEQ ID NO: 1616 - protein, 6 aa, synthetic construct
PAEGSE

SEQ ID NO: 1617 - protein, 6 aa, synthetic construct
PAEGSF

SEQ ID NO: 1618 - protein, 6 aa, synthetic construct
PAEGSW

SEQ ID NO: 1619 - protein, 6 aa, synthetic construct
PAEGSY

SEQ ID NO: 1620 - protein, 6 aa, synthetic construct
PAEGTD

SEQ ID NO: 1621 - protein, 6 aa, synthetic construct
PAEGTE

SEQ ID NO: 1622 - protein, 6 aa, synthetic construct
PAEGTF

SEQ ID NO: 1623 - protein, 6 aa, synthetic construct
PAEGTW

SEQ ID NO: 1624 - protein, 6 aa, synthetic construct
PAEGTY

SEQ ID NO: 1625 - protein, 6 aa, synthetic construct
PAEGWD

SEQ ID NO: 1626 - protein, 6 aa, synthetic construct
PAEGWE

SEQ ID NO: 1627 - protein, 6 aa, synthetic construct
PAEGWF

SEQ ID NO: 1628 - protein, 6 aa, synthetic construct
PAEGWW

SEQ ID NO: 1629 - protein, 6 aa, synthetic construct
PAEGWY

SEQ ID NO: 1630 - protein, 6 aa, synthetic construct
PAEGYD

SEQ ID NO: 1631 - protein, 6 aa, synthetic construct
PAEGYE

SEQ ID NO: 1632 - protein, 6 aa, synthetic construct
PAEGYF

SEQ ID NO: 1633 - protein, 6 aa, synthetic construct
PAEGYW

SEQ ID NO: 1634 - protein, 6 aa, synthetic construct
PAEGYY

SEQ ID NO: 1635 - protein, 6 aa, synthetic construct
PAEGVD

SEQ ID NO: 1636 - protein, 6 aa, synthetic construct
PAEGVE

SEQ ID NO: 1637 - protein, 6 aa, synthetic construct
PAEGVF

SEQ ID NO: 1638 - protein, 6 aa, synthetic construct
PAEGVW

SEQ ID NO: 1639 - protein, 6 aa, synthetic construct
PAEGVY

SEQ ID NO: 1640 - protein, 6 aa, synthetic construct
PAEHAD

SEQ ID NO: 1641 - protein, 6 aa, synthetic construct
PAEHAE

SEQ ID NO: 1642 - protein, 6 aa, synthetic construct
PAEHAF

SEQ ID NO: 1643 - protein, 6 aa, synthetic construct
PAEHAW

SEQ ID NO: 1644 - protein, 6 aa, synthetic construct
PAEHAY

SEQ ID NO: 1645 - protein, 6 aa, synthetic construct
PAEHRD

SEQ ID NO: 1646 - protein, 6 aa, synthetic construct
PAEHRE

SEQ ID NO: 1647 - protein, 6 aa, synthetic construct
PAEHRF

SEQ ID NO: 1648 - protein, 6 aa, synthetic construct
PAEHRW

SEQ ID NO: 1649 - protein, 6 aa, synthetic construct
PAEHRY

SEQ ID NO: 1650 - protein, 6 aa, synthetic construct
PAEHND

SEQ ID NO: 1651 - protein, 6 aa, synthetic construct
PAEHNE

SEQ ID NO: 1652 - protein, 6 aa, synthetic construct
PAEHNF

SEQ ID NO: 1653 - protein, 6 aa, synthetic construct
PAEHNW

SEQ ID NO: 1654 - protein, 6 aa, synthetic construct
PAEHNY

SEQ ID NO: 1655 - protein, 6 aa, synthetic construct
PAEHDD

SEQ ID NO: 1656 - protein, 6 aa, synthetic construct
PAEHDE

SEQ ID NO: 1657 - protein, 6 aa, synthetic construct
PAEHDF

SEQ ID NO: 1658 - protein, 6 aa, synthetic construct
PAEHDW

SEQ ID NO: 1659 - protein, 6 aa, synthetic construct
PAEHDY

SEQ ID NO: 1660 - protein, 6 aa, synthetic construct
PAEHCD

SEQ ID NO: 1661 - protein, 6 aa, synthetic construct
PAEHCE

SEQ ID NO: 1662 - protein, 6 aa, synthetic construct
PAEHCF

SEQ ID NO: 1663 - protein, 6 aa, synthetic construct
PAEHCW

SEQ ID NO: 1664 - protein, 6 aa, synthetic construct
PAEHCY

SEQ ID NO: 1665 - protein, 6 aa, synthetic construct
PAEHQD

SEQ ID NO: 1666 - protein, 6 aa, synthetic construct
PAEHQE

SEQ ID NO: 1667 - protein, 6 aa, synthetic construct
PAEHQF

SEQ ID NO: 1668 - protein, 6 aa, synthetic construct
PAEHQW

SEQ ID NO: 1669 - protein, 6 aa, synthetic construct
PAEHQY

SEQ ID NO: 1670 - protein, 6 aa, synthetic construct
PAEHED

SEQ ID NO: 1671 - protein, 6 aa, synthetic construct
PAEHEE

SEQ ID NO: 1672 - protein, 6 aa, synthetic construct
PAEHEF

SEQ ID NO: 1673 - protein, 6 aa, synthetic construct
PAEHEW

SEQ ID NO: 1674 - protein, 6 aa, synthetic construct
PAEHEY

SEQ ID NO: 1675 - protein, 6 aa, synthetic construct
PAEHGD

SEQ ID NO: 1676 - protein, 6 aa, synthetic construct
PAEHGE

SEQ ID NO: 1677 - protein, 6 aa, synthetic construct
PAEHGF

SEQ ID NO: 1678 - protein, 6 aa, synthetic construct
PAEHGW

SEQ ID NO: 1679 - protein, 6 aa, synthetic construct
PAEHGY

SEQ ID NO: 1680 - protein, 6 aa, synthetic construct
PAEHHD

SEQ ID NO: 1681 - protein, 6 aa, synthetic construct
PAEHHE

SEQ ID NO: 1682 - protein, 6 aa, synthetic construct
PAEHHF

SEQ ID NO: 1683 - protein, 6 aa, synthetic construct
PAEHHW

SEQ ID NO: 1684 - protein, 6 aa, synthetic construct
PAEHHY

SEQ ID NO: 1685 - protein, 6 aa, synthetic construct
PAEHID

SEQ ID NO: 1686 - protein, 6 aa, synthetic construct
PAEHIE

SEQ ID NO: 1687 - protein, 6 aa, synthetic construct
PAEHIF

SEQ ID NO: 1688 - protein, 6 aa, synthetic construct
PAEHIW

SEQ ID NO: 1689 - protein, 6 aa, synthetic construct
PAEHIY

SEQ ID NO: 1690 - protein, 6 aa, synthetic construct
PAEHLD

SEQ ID NO: 1691 - protein, 6 aa, synthetic construct
PAEHLE

SEQ ID NO: 1692 - protein, 6 aa, synthetic construct
PAEHLF

SEQ ID NO: 1693 - protein, 6 aa, synthetic construct
PAEHLW

SEQ ID NO: 1694 - protein, 6 aa, synthetic construct
PAEHLY

SEQ ID NO: 1695 - protein, 6 aa, synthetic construct
PAEHKD

SEQ ID NO: 1696 - protein, 6 aa, synthetic construct
PAEHKE

SEQ ID NO: 1697 - protein, 6 aa, synthetic construct
PAEHKF

SEQ ID NO: 1698 - protein, 6 aa, synthetic construct
PAEHKW

SEQ ID NO: 1699 - protein, 6 aa, synthetic construct
PAEHKY

SEQ ID NO: 1700 - protein, 6 aa, synthetic construct
PAEHMD

SEQ ID NO: 1701 - protein, 6 aa, synthetic construct
PAEHME

SEQ ID NO: 1702 - protein, 6 aa, synthetic construct
PAEHMF

SEQ ID NO: 1703 - protein, 6 aa, synthetic construct
PAEHMW

SEQ ID NO: 1704 - protein, 6 aa, synthetic construct
PAEHMY

SEQ ID NO: 1705 - protein, 6 aa, synthetic construct
PAEHFD

SEQ ID NO: 1706 - protein, 6 aa, synthetic construct
PAEHFE

SEQ ID NO: 1707 - protein, 6 aa, synthetic construct
PAEHFF

SEQ ID NO: 1708 - protein, 6 aa, synthetic construct
PAEHFW

SEQ ID NO: 1709 - protein, 6 aa, synthetic construct
PAEHFY

SEQ ID NO: 1710 - protein, 6 aa, synthetic construct
PAEHPD

SEQ ID NO: 1711 - protein, 6 aa, synthetic construct
PAEHPE

SEQ ID NO: 1712 - protein, 6 aa, synthetic construct
PAEHPF

SEQ ID NO: 1713 - protein, 6 aa, synthetic construct
PAEHPW

SEQ ID NO: 1714 - protein, 6 aa, synthetic construct
PAEHPY

SEQ ID NO: 1715 - protein, 6 aa, synthetic construct
PAEHSD

SEQ ID NO: 1716 - protein, 6 aa, synthetic construct
PAEHSE

SEQ ID NO: 1717 - protein, 6 aa, synthetic construct
PAEHSF

SEQ ID NO: 1718 - protein, 6 aa, synthetic construct
PAEHSW

SEQ ID NO: 1719 - protein, 6 aa, synthetic construct
PAEHSY

SEQ ID NO: 1720 - protein, 6 aa, synthetic construct
PAEHTD

SEQ ID NO: 1721 - protein, 6 aa, synthetic construct
PAEHTE

SEQ ID NO: 1722 - protein, 6 aa, synthetic construct
PAEHTF

SEQ ID NO: 1723 - protein, 6 aa, synthetic construct
PAEHTW

SEQ ID NO: 1724 - protein, 6 aa, synthetic construct
PAEHTY

SEQ ID NO: 1725 - protein, 6 aa, synthetic construct
PAEHWD

SEQ ID NO: 1726 - protein, 6 aa, synthetic construct
PAEHWE

SEQ ID NO: 1727 - protein, 6 aa, synthetic construct
PAEHWF

SEQ ID NO: 1728 - protein, 6 aa, synthetic construct
PAEHWW

SEQ ID NO: 1729 - protein, 6 aa, synthetic construct
PAEHWY

SEQ ID NO: 1730 - protein, 6 aa, synthetic construct
PAEHYD

SEQ ID NO: 1731 - protein, 6 aa, synthetic construct
PAEHYE

SEQ ID NO: 1732 - protein, 6 aa, synthetic construct
PAEHYF

SEQ ID NO: 1733 - protein, 6 aa, synthetic construct
PAEHYW

SEQ ID NO: 1734 - protein, 6 aa, synthetic construct
PAEHYY

SEQ ID NO: 1735 - protein, 6 aa, synthetic construct
PAEHVD

SEQ ID NO: 1736 - protein, 6 aa, synthetic construct
PAEHVE

SEQ ID NO: 1737 - protein, 6 aa, synthetic construct
PAEHVF

SEQ ID NO: 1738 - protein, 6 aa, synthetic construct
PAEHVW

SEQ ID NO: 1739 - protein, 6 aa, synthetic construct
PAEHVY

SEQ ID NO: 1740 - protein, 6 aa, synthetic construct
PAEIAD

SEQ ID NO: 1741 - protein, 6 aa, synthetic construct
PAEIAE

SEQ ID NO: 1742 - protein, 6 aa, synthetic construct
PAEIAF

SEQ ID NO: 1743 - protein, 6 aa, synthetic construct
PAEIAW

SEQ ID NO: 1744 - protein, 6 aa, synthetic construct
PAEIAY

SEQ ID NO: 1745 - protein, 6 aa, synthetic construct
PAEIRD

SEQ ID NO: 1746 - protein, 6 aa, synthetic construct
PAEIRE

SEQ ID NO: 1747 - protein, 6 aa, synthetic construct
PAEIRF

SEQ ID NO: 1748 - protein, 6 aa, synthetic construct
PAEIRW

SEQ ID NO: 1749 - protein, 6 aa, synthetic construct
PAEIRY

SEQ ID NO: 1750 - protein, 6 aa, synthetic construct
PAEIND

SEQ ID NO: 1751 - protein, 6 aa, synthetic construct
PAEINE

SEQ ID NO: 1752 - protein, 6 aa, synthetic construct
PAEINF

SEQ ID NO: 1753 - protein, 6 aa, synthetic construct
PAEINW

SEQ ID NO: 1754 - protein, 6 aa, synthetic construct
PAEINY

SEQ ID NO: 1755 - protein, 6 aa, synthetic construct
PAEIDD

SEQ ID NO: 1756 - protein, 6 aa, synthetic construct
PAEIDE

SEQ ID NO: 1757 - protein, 6 aa, synthetic construct
PAEIDF

SEQ ID NO: 1758 - protein, 6 aa, synthetic construct
PAEIDW

SEQ ID NO: 1759 - protein, 6 aa, synthetic construct
PAEIDY

SEQ ID NO: 1760 - protein, 6 aa, synthetic construct
PAEICD

SEQ ID NO: 1761 - protein, 6 aa, synthetic construct
PAEICE

SEQ ID NO: 1762 - protein, 6 aa, synthetic construct
PAEICF

SEQ ID NO: 1763 - protein, 6 aa, synthetic construct
PAEICW

SEQ ID NO: 1764 - protein, 6 aa, synthetic construct
PAEICY

SEQ ID NO: 1765 - protein, 6 aa, synthetic construct
PAEIQD

SEQ ID NO: 1766 - protein, 6 aa, synthetic construct
PAEIQE

SEQ ID NO: 1767 - protein, 6 aa, synthetic construct
PAEIQF

SEQ ID NO: 1768 - protein, 6 aa, synthetic construct
PAEIQW

SEQ ID NO: 1769 - protein, 6 aa, synthetic construct
PAEIQY

SEQ ID NO: 1770 - protein, 6 aa, synthetic construct
PAEIED

SEQ ID NO: 1771 - protein, 6 aa, synthetic construct
PAEIEE

SEQ ID NO: 1772 - protein, 6 aa, synthetic construct
PAEIEF

SEQ ID NO: 1773 - protein, 6 aa, synthetic construct
PAEIEW

SEQ ID NO: 1774 - protein, 6 aa, synthetic construct
PAEIEY

SEQ ID NO: 1775 - protein, 6 aa, synthetic construct
PAEIGD

SEQ ID NO: 1776 - protein, 6 aa, synthetic construct
PAEIGE

SEQ ID NO: 1777 - protein, 6 aa, synthetic construct
PAEIGF

SEQ ID NO: 1778 - protein, 6 aa, synthetic construct
PAEIGW

SEQ ID NO: 1779 - protein, 6 aa, synthetic construct
PAEIGY

SEQ ID NO: 1780 - protein, 6 aa, synthetic construct
PAEIHD

SEQ ID NO: 1781 - protein, 6 aa, synthetic construct
PAEIHE

SEQ ID NO: 1782 - protein, 6 aa, synthetic construct
PAEIHF

SEQ ID NO: 1783 - protein, 6 aa, synthetic construct
PAEIHW

SEQ ID NO: 1784 - protein, 6 aa, synthetic construct
PAEIHY

SEQ ID NO: 1785 - protein, 6 aa, synthetic construct
PAEIID

SEQ ID NO: 1786 - protein, 6 aa, synthetic construct
PAEIIE

SEQ ID NO: 1787 - protein, 6 aa, synthetic construct
PAEIIF

SEQ ID NO: 1788 - protein, 6 aa, synthetic construct
PAEIIW

SEQ ID NO: 1789 - protein, 6 aa, synthetic construct
PAEIIY

SEQ ID NO: 1790 - protein, 6 aa, synthetic construct
PAEILD

SEQ ID NO: 1791 - protein, 6 aa, synthetic construct
PAEILE

SEQ ID NO: 1792 - protein, 6 aa, synthetic construct
PAEILF

SEQ ID NO: 1793 - protein, 6 aa, synthetic construct
PAEILW

SEQ ID NO: 1794 - protein, 6 aa, synthetic construct
PAEILY

SEQ ID NO: 1795 - protein, 6 aa, synthetic construct
PAEIKD

SEQ ID NO: 1796 - protein, 6 aa, synthetic construct
PAEIKE

SEQ ID NO: 1797 - protein, 6 aa, synthetic construct
PAEIKF

SEQ ID NO: 1798 - protein, 6 aa, synthetic construct
PAEIKW

SEQ ID NO: 1799 - protein, 6 aa, synthetic construct
PAEIKY

SEQ ID NO: 1800 - protein, 6 aa, synthetic construct
PAEIMD

SEQ ID NO: 1801 - protein, 6 aa, synthetic construct
PAEIME

SEQ ID NO: 1802 - protein, 6 aa, synthetic construct
PAEIMF

SEQ ID NO: 1803 - protein, 6 aa, synthetic construct
PAEIMW

SEQ ID NO: 1804 - protein, 6 aa, synthetic construct
PAEIMY

SEQ ID NO: 1805 - protein, 6 aa, synthetic construct
PAEIFD

SEQ ID NO: 1806 - protein, 6 aa, synthetic construct
PAEIFE

SEQ ID NO: 1807 - protein, 6 aa, synthetic construct
PAEIFF

SEQ ID NO: 1808 - protein, 6 aa, synthetic construct
PAEIFW

SEQ ID NO: 1809 - protein, 6 aa, synthetic construct
PAEIFY

SEQ ID NO: 1810 - protein, 6 aa, synthetic construct
PAEIPD

SEQ ID NO: 1811 - protein, 6 aa, synthetic construct
PAEIPE

SEQ ID NO: 1812 - protein, 6 aa, synthetic construct
PAEIPF

SEQ ID NO: 1813 - protein, 6 aa, synthetic construct
PAEIPW

SEQ ID NO: 1814 - protein, 6 aa, synthetic construct
PAEIPY

SEQ ID NO: 1815 - protein, 6 aa, synthetic construct
PAEISD

SEQ ID NO: 1816 - protein, 6 aa, synthetic construct
PAEISE

SEQ ID NO: 1817 - protein, 6 aa, synthetic construct
PAEISF

SEQ ID NO: 1818 - protein, 6 aa, synthetic construct
PAEISW

SEQ ID NO: 1819 - protein, 6 aa, synthetic construct
PAEISY

SEQ ID NO: 1820 - protein, 6 aa, synthetic construct
PAEITD

SEQ ID NO: 1821 - protein, 6 aa, synthetic construct
PAEITE

SEQ ID NO: 1822 - protein, 6 aa, synthetic construct
PAEITF

SEQ ID NO: 1823 - protein, 6 aa, synthetic construct
PAEITW

SEQ ID NO: 1824 - protein, 6 aa, synthetic construct
PAEITY

SEQ ID NO: 1825 - protein, 6 aa, synthetic construct
PAEIWD

SEQ ID NO: 1826 - protein, 6 aa, synthetic construct
PAEIWE

SEQ ID NO: 1827 - protein, 6 aa, synthetic construct
PAEIWF

SEQ ID NO: 1828 - protein, 6 aa, synthetic construct
PAEIWW

SEQ ID NO: 1829 - protein, 6 aa, synthetic construct
PAEIWY

SEQ ID NO: 1830 - protein, 6 aa, synthetic construct
PAEIYD

SEQ ID NO: 1831 - protein, 6 aa, synthetic construct
PAEIYE

SEQ ID NO: 1832 - protein, 6 aa, synthetic construct
PAEIYF

SEQ ID NO: 1833 - protein, 6 aa, synthetic construct
PAEIYW

SEQ ID NO: 1834 - protein, 6 aa, synthetic construct
PAEIYY

SEQ ID NO: 1835 - protein, 6 aa, synthetic construct
PAEIVD

SEQ ID NO: 1836 - protein, 6 aa, synthetic construct
PAEIVE

SEQ ID NO: 1837 - protein, 6 aa, synthetic construct
PAEIVF

SEQ ID NO: 1838 - protein, 6 aa, synthetic construct
PAEIVW

SEQ ID NO: 1839 - protein, 6 aa, synthetic construct
PAEIVY

SEQ ID NO: 1840 - protein, 6 aa, synthetic construct
PAELAD

SEQ ID NO: 1841 - protein, 6 aa, synthetic construct
PAELAE

SEQ ID NO: 1842 - protein, 6 aa, synthetic construct
PAELAF

SEQ ID NO: 1843 - protein, 6 aa, synthetic construct
PAELAW

SEQ ID NO: 1844 - protein, 6 aa, synthetic construct
PAELAY

SEQ ID NO: 1845 - protein, 6 aa, synthetic construct
PAELRD

SEQ ID NO: 1846 - protein, 6 aa, synthetic construct
PAELRE

SEQ ID NO: 1847 - protein, 6 aa, synthetic construct
PAELRF

SEQ ID NO: 1848 - protein, 6 aa, synthetic construct
PAELRW

SEQ ID NO: 1849 - protein, 6 aa, synthetic construct
PAELRY

SEQ ID NO: 1850 - protein, 6 aa, synthetic construct
PAELND

SEQ ID NO: 1851 - protein, 6 aa, synthetic construct
PAELNE

SEQ ID NO: 1852 - protein, 6 aa, synthetic construct
PAELNF

SEQ ID NO: 1853 - protein, 6 aa, synthetic construct
PAELNW

SEQ ID NO: 1854 - protein, 6 aa, synthetic construct
PAELNY

SEQ ID NO: 1855 - protein, 6 aa, synthetic construct
PAELDD

SEQ ID NO: 1856 - protein, 6 aa, synthetic construct
PAELDE

SEQ ID NO: 1857 - protein, 6 aa, synthetic construct
PAELDF

SEQ ID NO: 1858 - protein, 6 aa, synthetic construct
PAELDW

SEQ ID NO: 1859 - protein, 6 aa, synthetic construct
PAELDY

SEQ ID NO: 1860 - protein, 6 aa, synthetic construct
PAELCD

SEQ ID NO: 1861 - protein, 6 aa, synthetic construct
PAELCE

SEQ ID NO: 1862 - protein, 6 aa, synthetic construct
PAELCF

SEQ ID NO: 1863 - protein, 6 aa, synthetic construct
PAELCW

SEQ ID NO: 1864 - protein, 6 aa, synthetic construct
PAELCY

SEQ ID NO: 1865 - protein, 6 aa, synthetic construct
PAELQD

SEQ ID NO: 1866 - protein, 6 aa, synthetic construct
PAELQE

SEQ ID NO: 1867 - protein, 6 aa, synthetic construct
PAELQF

SEQ ID NO: 1868 - protein, 6 aa, synthetic construct
PAELQW

SEQ ID NO: 1869 - protein, 6 aa, synthetic construct
PAELQY

SEQ ID NO: 1870 - protein, 6 aa, synthetic construct
PAELED

SEQ ID NO: 1871 - protein, 6 aa, synthetic construct
PAELEE

SEQ ID NO: 1872 - protein, 6 aa, synthetic construct
PAELEF

SEQ ID NO: 1873 - protein, 6 aa, synthetic construct
PAELEW

SEQ ID NO: 1874 - protein, 6 aa, synthetic construct
PAELEY

SEQ ID NO: 1875 - protein, 6 aa, synthetic construct
PAELGD

SEQ ID NO: 1876 - protein, 6 aa, synthetic construct
PAELGE

SEQ ID NO: 1877 - protein, 6 aa, synthetic construct
PAELGF

SEQ ID NO: 1878 - protein, 6 aa, synthetic construct
PAELGW

SEQ ID NO: 1879 - protein, 6 aa, synthetic construct
PAELGY

SEQ ID NO: 1880 - protein, 6 aa, synthetic construct
PAELHD

SEQ ID NO: 1881 - protein, 6 aa, synthetic construct
PAELHE

SEQ ID NO: 1882 - protein, 6 aa, synthetic construct
PAELHF

SEQ ID NO: 1883 - protein, 6 aa, synthetic construct
PAELHW

SEQ ID NO: 1884 - protein, 6 aa, synthetic construct
PAELHY

SEQ ID NO: 1885 - protein, 6 aa, synthetic construct
PAELID

SEQ ID NO: 1886 - protein, 6 aa, synthetic construct
PAELIE

SEQ ID NO: 1887 - protein, 6 aa, synthetic construct
PAELIF

SEQ ID NO: 1888 - protein, 6 aa, synthetic construct
PAELIW

SEQ ID NO: 1889 - protein, 6 aa, synthetic construct
PAELIY

SEQ ID NO: 1890 - protein, 6 aa, synthetic construct
PAELLD

SEQ ID NO: 1891 - protein, 6 aa, synthetic construct
PAELLE

SEQ ID NO: 1892 - protein, 6 aa, synthetic construct
PAELLF

SEQ ID NO: 1893 - protein, 6 aa, synthetic construct
PAELLW

SEQ ID NO: 1894 - protein, 6 aa, synthetic construct
PAELLY

SEQ ID NO: 1895 - protein, 6 aa, synthetic construct
PAELKD

SEQ ID NO: 1896 - protein, 6 aa, synthetic construct
PAELKE

SEQ ID NO: 1897 - protein, 6 aa, synthetic construct
PAELKF

SEQ ID NO: 1898 - protein, 6 aa, synthetic construct
PAELKW

SEQ ID NO: 1899 - protein, 6 aa, synthetic construct
PAELKY

SEQ ID NO: 1900 - protein, 6 aa, synthetic construct
PAELMD

SEQ ID NO: 1901 - protein, 6 aa, synthetic construct
PAELME

SEQ ID NO: 1902 - protein, 6 aa, synthetic construct
PAELMF

SEQ ID NO: 1903 - protein, 6 aa, synthetic construct
PAELMW

SEQ ID NO: 1904 - protein, 6 aa, synthetic construct
PAELMY

SEQ ID NO: 1905 - protein, 6 aa, synthetic construct
PAELFD

SEQ ID NO: 1906 - protein, 6 aa, synthetic construct
PAELFE

SEQ ID NO: 1907 - protein, 6 aa, synthetic construct
PAELFF

SEQ ID NO: 1908 - protein, 6 aa, synthetic construct
PAELFW

SEQ ID NO: 1909 - protein, 6 aa, synthetic construct
PAELFY

SEQ ID NO: 1910 - protein, 6 aa, synthetic construct
PAELPD

SEQ ID NO: 1911 - protein, 6 aa, synthetic construct
PAELPE

SEQ ID NO: 1912 - protein, 6 aa, synthetic construct
PAELPF

SEQ ID NO: 1913 - protein, 6 aa, synthetic construct
PAELPW

SEQ ID NO: 1914 - protein, 6 aa, synthetic construct
PAELPY

SEQ ID NO: 1915 - protein, 6 aa, synthetic construct
PAELSD

SEQ ID NO: 1916 - protein, 6 aa, synthetic construct
PAELSE

SEQ ID NO: 1917 - protein, 6 aa, synthetic construct
PAELSF

SEQ ID NO: 1918 - protein, 6 aa, synthetic construct
PAELSW

SEQ ID NO: 1919 - protein, 6 aa, synthetic construct
PAELSY

SEQ ID NO: 1920 - protein, 6 aa, synthetic construct
PAELTD

SEQ ID NO: 1921 - protein, 6 aa, synthetic construct
PAELTE

SEQ ID NO: 1922 - protein, 6 aa, synthetic construct
PAELTF

SEQ ID NO: 1923 - protein, 6 aa, synthetic construct
PAELTW

SEQ ID NO: 1924 - protein, 6 aa, synthetic construct
PAELTY

SEQ ID NO: 1925 - protein, 6 aa, synthetic construct
PAELWD

SEQ ID NO: 1926 - protein, 6 aa, synthetic construct
PAELWE

SEQ ID NO: 1927 - protein, 6 aa, synthetic construct
PAELWF

SEQ ID NO: 1928 - protein, 6 aa, synthetic construct
PAELWW

SEQ ID NO: 1929 - protein, 6 aa, synthetic construct
PAELWY

SEQ ID NO: 1930 - protein, 6 aa, synthetic construct
PAELYD

SEQ ID NO: 1931 - protein, 6 aa, synthetic construct
PAELYE

SEQ ID NO: 1932 - protein, 6 aa, synthetic construct
PAELYF

SEQ ID NO: 1933 - protein, 6 aa, synthetic construct
PAELYW

SEQ ID NO: 1934 - protein, 6 aa, synthetic construct
PAELYY

SEQ ID NO: 1935 - protein, 6 aa, synthetic construct
PAELVD

SEQ ID NO: 1936 - protein, 6 aa, synthetic construct
PAELVE

SEQ ID NO: 1937 - protein, 6 aa, synthetic construct
PAELVF

SEQ ID NO: 1938 - protein, 6 aa, synthetic construct
PAELVW

SEQ ID NO: 1939 - protein, 6 aa, synthetic construct
PAELVY

SEQ ID NO: 1940 - protein, 6 aa, synthetic construct
PAEKAD

SEQ ID NO: 1941 - protein, 6 aa, synthetic construct
PAEKAE

SEQ ID NO: 1942 - protein, 6 aa, synthetic construct
PAEKAF

SEQ ID NO: 1943 - protein, 6 aa, synthetic construct
PAEKAW

SEQ ID NO: 1944 - protein, 6 aa, synthetic construct
PAEKAY

SEQ ID NO: 1945 - protein, 6 aa, synthetic construct
PAEKRD

SEQ ID NO: 1946 - protein, 6 aa, synthetic construct
PAEKRE

SEQ ID NO: 1947 - protein, 6 aa, synthetic construct
PAEKRF

SEQ ID NO: 1948 - protein, 6 aa, synthetic construct
PAEKRW

SEQ ID NO: 1949 - protein, 6 aa, synthetic construct
PAEKRY

SEQ ID NO: 1950 - protein, 6 aa, synthetic construct
PAEKND

SEQ ID NO: 1951 - protein, 6 aa, synthetic construct
PAEKNE

SEQ ID NO: 1952 - protein, 6 aa, synthetic construct
PAEKNF

SEQ ID NO: 1953 - protein, 6 aa, synthetic construct
PAEKNW

SEQ ID NO: 1954 - protein, 6 aa, synthetic construct
PAEKNY

SEQ ID NO: 1955 - protein, 6 aa, synthetic construct
PAEKDD

SEQ ID NO: 1956 - protein, 6 aa, synthetic construct
PAEKDE

SEQ ID NO: 1957 - protein, 6 aa, synthetic construct
PAEKDF

SEQ ID NO: 1958 - protein, 6 aa, synthetic construct
PAEKDW

SEQ ID NO: 1959 - protein, 6 aa, synthetic construct
PAEKDY

SEQ ID NO: 1960 - protein, 6 aa, synthetic construct
PAEKCD

SEQ ID NO: 1961 - protein, 6 aa, synthetic construct
PAEKCE

SEQ ID NO: 1962 - protein, 6 aa, synthetic construct
PAEKCF

SEQ ID NO: 1963 - protein, 6 aa, synthetic construct
PAEKCW

SEQ ID NO: 1964 - protein, 6 aa, synthetic construct
PAEKCY

SEQ ID NO: 1965 - protein, 6 aa, synthetic construct
PAEKQD

SEQ ID NO: 1966 - protein, 6 aa, synthetic construct
PAEKQE

SEQ ID NO: 1967 - protein, 6 aa, synthetic construct
PAEKQF

SEQ ID NO: 1968 - protein, 6 aa, synthetic construct
PAEKQW

SEQ ID NO: 1969 - protein, 6 aa, synthetic construct
PAEKQY

SEQ ID NO: 1970 - protein, 6 aa, synthetic construct
PAEKED

SEQ ID NO: 1971 - protein, 6 aa, synthetic construct
PAEKEE

SEQ ID NO: 1972 - protein, 6 aa, synthetic construct
PAEKEF

SEQ ID NO: 1973 - protein, 6 aa, synthetic construct
PAEKEW

SEQ ID NO: 1974 - protein, 6 aa, synthetic construct
PAEKEY

SEQ ID NO: 1975 - protein, 6 aa, synthetic construct
PAEKGD

SEQ ID NO: 1976 - protein, 6 aa, synthetic construct
PAEKGE

SEQ ID NO: 1977 - protein, 6 aa, synthetic construct
PAEKGF

SEQ ID NO: 1978 - protein, 6 aa, synthetic construct
PAEKGW

SEQ ID NO: 1979 - protein, 6 aa, synthetic construct
PAEKGY

SEQ ID NO: 1980 - protein, 6 aa, synthetic construct
PAEKHD

SEQ ID NO: 1981 - protein, 6 aa, synthetic construct
PAEKHE

SEQ ID NO: 1982 - protein, 6 aa, synthetic construct
PAEKHF

SEQ ID NO: 1983 - protein, 6 aa, synthetic construct
PAEKHW

SEQ ID NO: 1984 - protein, 6 aa, synthetic construct
PAEKHY

SEQ ID NO: 1985 - protein, 6 aa, synthetic construct
PAEKID

SEQ ID NO: 1986 - protein, 6 aa, synthetic construct
PAEKIE

SEQ ID NO: 1987 - protein, 6 aa, synthetic construct
PAEKIF

SEQ ID NO: 1988 - protein, 6 aa, synthetic construct
PAEKIW

SEQ ID NO: 1989 - protein, 6 aa, synthetic construct
PAEKIY

SEQ ID NO: 1990 - protein, 6 aa, synthetic construct
PAEKLD

SEQ ID NO: 1991 - protein, 6 aa, synthetic construct
PAEKLE

SEQ ID NO: 1992 - protein, 6 aa, synthetic construct
PAEKLF

SEQ ID NO: 1993 - protein, 6 aa, synthetic construct
PAEKLW

SEQ ID NO: 1994 - protein, 6 aa, synthetic construct
PAEKLY

SEQ ID NO: 1995 - protein, 6 aa, synthetic construct
PAEKKD

SEQ ID NO: 1996 - protein, 6 aa, synthetic construct
PAEKKE

SEQ ID NO: 1997 - protein, 6 aa, synthetic construct
PAEKKF

SEQ ID NO: 1998 - protein, 6 aa, synthetic construct
PAEKKW

SEQ ID NO: 1999 - protein, 6 aa, synthetic construct
PAEKKY

SEQ ID NO: 2000 - protein, 6 aa, synthetic construct
PAEKMD

SEQ ID NO: 2001 - protein, 6 aa, synthetic construct
PAEKME

SEQ ID NO: 2002 - protein, 6 aa, synthetic construct
PAEKMF

SEQ ID NO: 2003 - protein, 6 aa, synthetic construct
PAEKMW

SEQ ID NO: 2004 - protein, 6 aa, synthetic construct
PAEKMY

SEQ ID NO: 2005 - protein, 6 aa, synthetic construct
PAEKFD

SEQ ID NO: 2006 - protein, 6 aa, synthetic construct
PAEKFE

SEQ ID NO: 2007 - protein, 6 aa, synthetic construct
PAEKFF

SEQ ID NO: 2008 - protein, 6 aa, synthetic construct
PAEKFW

SEQ ID NO: 2009 - protein, 6 aa, synthetic construct
PAEKFY

SEQ ID NO: 2010 - protein, 6 aa, synthetic construct
PAEKPD

SEQ ID NO: 2011 - protein, 6 aa, synthetic construct
PAEKPE

SEQ ID NO: 2012 - protein, 6 aa, synthetic construct
PAEKPF

SEQ ID NO: 2013 - protein, 6 aa, synthetic construct
PAEKPW

SEQ ID NO: 2014 - protein, 6 aa, synthetic construct
PAEKPY

SEQ ID NO: 2015 - protein, 6 aa, synthetic construct
PAEKSD

SEQ ID NO: 2016 - protein, 6 aa, synthetic construct
PAEKSE

SEQ ID NO: 2017 - protein, 6 aa, synthetic construct
PAEKSF

SEQ ID NO: 2018 - protein, 6 aa, synthetic construct
PAEKSW

SEQ ID NO: 2019 - protein, 6 aa, synthetic construct
PAEKSY

SEQ ID NO: 2020 - protein, 6 aa, synthetic construct
PAEKTD

SEQ ID NO: 2021 - protein, 6 aa, synthetic construct
PAEKTE

SEQ ID NO: 2022 - protein, 6 aa, synthetic construct
PAEKTF

SEQ ID NO: 2023 - protein, 6 aa, synthetic construct
PAEKTW

SEQ ID NO: 2024 - protein, 6 aa, synthetic construct
PAEKTY

SEQ ID NO: 2025 - protein, 6 aa, synthetic construct
PAEKWD

SEQ ID NO: 2026 - protein, 6 aa, synthetic construct
PAEKWE

SEQ ID NO: 2027 - protein, 6 aa, synthetic construct
PAEKWF

SEQ ID NO: 2028 - protein, 6 aa, synthetic construct
PAEKWW

SEQ ID NO: 2029 - protein, 6 aa, synthetic construct
PAEKWY

SEQ ID NO: 2030 - protein, 6 aa, synthetic construct
PAEKYD

SEQ ID NO: 2031 - protein, 6 aa, synthetic construct
PAEKYE

SEQ ID NO: 2032 - protein, 6 aa, synthetic construct
PAEKYF

SEQ ID NO: 2033 - protein, 6 aa, synthetic construct
PAEKYW

SEQ ID NO: 2034 - protein, 6 aa, synthetic construct
PAEKYY

SEQ ID NO: 2035 - protein, 6 aa, synthetic construct
PAEKVD

SEQ ID NO: 2036 - protein, 6 aa, synthetic construct
PAEKVE

SEQ ID NO: 2037 - protein, 6 aa, synthetic construct
PAEKVF

SEQ ID NO: 2038 - protein, 6 aa, synthetic construct
PAEKVW

SEQ ID NO: 2039 - protein, 6 aa, synthetic construct
PAEKVY

SEQ ID NO: 2040 - protein, 6 aa, synthetic construct
PAEMAD

SEQ ID NO: 2041 - protein, 6 aa, synthetic construct
PAEMAE

SEQ ID NO: 2042 - protein, 6 aa, synthetic construct
PAEMAF

SEQ ID NO: 2043 - protein, 6 aa, synthetic construct
PAEMAW

SEQ ID NO: 2044 - protein, 6 aa, synthetic construct
PAEMAY

SEQ ID NO: 2045 - protein, 6 aa, synthetic construct
PAEMRD

SEQ ID NO: 2046 - protein, 6 aa, synthetic construct
PAEMRE

SEQ ID NO: 2047 - protein, 6 aa, synthetic construct
PAEMRF

SEQ ID NO: 2048 - protein, 6 aa, synthetic construct
PAEMRW

SEQ ID NO: 2049 - protein, 6 aa, synthetic construct
PAEMRY

SEQ ID NO: 2050 - protein, 6 aa, synthetic construct
PAEMND

SEQ ID NO: 2051 - protein, 6 aa, synthetic construct
PAEMNE

SEQ ID NO: 2052 - protein, 6 aa, synthetic construct
PAEMNF

SEQ ID NO: 2053 - protein, 6 aa, synthetic construct
PAEMNW

SEQ ID NO: 2054 - protein, 6 aa, synthetic construct
PAEMNY

SEQ ID NO: 2055 - protein, 6 aa, synthetic construct
PAEMDD

SEQ ID NO: 2056 - protein, 6 aa, synthetic construct
PAEMDE

SEQ ID NO: 2057 - protein, 6 aa, synthetic construct
PAEMDF

SEQ ID NO: 2058 - protein, 6 aa, synthetic construct
PAEMDW

SEQ ID NO: 2059 - protein, 6 aa, synthetic construct
PAEMDY

SEQ ID NO: 2060 - protein, 6 aa, synthetic construct
PAEMCD

SEQ ID NO: 2061 - protein, 6 aa, synthetic construct
PAEMCE

SEQ ID NO: 2062 - protein, 6 aa, synthetic construct
PAEMCF

SEQ ID NO: 2063 - protein, 6 aa, synthetic construct
PAEMCW

SEQ ID NO: 2064 - protein, 6 aa, synthetic construct
PAEMCY

SEQ ID NO: 2065 - protein, 6 aa, synthetic construct
PAEMQD

SEQ ID NO: 2066 - protein, 6 aa, synthetic construct
PAEMQE

SEQ ID NO: 2067 - protein, 6 aa, synthetic construct
PAEMQF

SEQ ID NO: 2068 - protein, 6 aa, synthetic construct
PAEMQW

SEQ ID NO: 2069 - protein, 6 aa, synthetic construct
PAEMQY

SEQ ID NO: 2070 - protein, 6 aa, synthetic construct
PAEMED

SEQ ID NO: 2071 - protein, 6 aa, synthetic construct
PAEMEE

SEQ ID NO: 2072 - protein, 6 aa, synthetic construct
PAEMEF

SEQ ID NO: 2073 - protein, 6 aa, synthetic construct
PAEMEW

SEQ ID NO: 2074 - protein, 6 aa, synthetic construct
PAEMEY

SEQ ID NO: 2075 - protein, 6 aa, synthetic construct
PAEMGD

SEQ ID NO: 2076 - protein, 6 aa, synthetic construct
PAEMGE

SEQ ID NO: 2077 - protein, 6 aa, synthetic construct
PAEMGF

SEQ ID NO: 2078 - protein, 6 aa, synthetic construct
PAEMGW

SEQ ID NO: 2079 - protein, 6 aa, synthetic construct
PAEMGY

SEQ ID NO: 2080 - protein, 6 aa, synthetic construct
PAEMHD

SEQ ID NO: 2081 - protein, 6 aa, synthetic construct
PAEMHE

SEQ ID NO: 2082 - protein, 6 aa, synthetic construct
PAEMHF

SEQ ID NO: 2083 - protein, 6 aa, synthetic construct
PAEMHW

SEQ ID NO: 2084 - protein, 6 aa, synthetic construct
PAEMHY

SEQ ID NO: 2085 - protein, 6 aa, synthetic construct
PAEMID

SEQ ID NO: 2086 - protein, 6 aa, synthetic construct
PAEMIE

SEQ ID NO: 2087 - protein, 6 aa, synthetic construct
PAEMIF

SEQ ID NO: 2088 - protein, 6 aa, synthetic construct
PAEMIW

SEQ ID NO: 2089 - protein, 6 aa, synthetic construct
PAEMIY

SEQ ID NO: 2090 - protein, 6 aa, synthetic construct
PAEMLD

SEQ ID NO: 2091 - protein, 6 aa, synthetic construct
PAEMLE

SEQ ID NO: 2092 - protein, 6 aa, synthetic construct
PAEMLF

SEQ ID NO: 2093 - protein, 6 aa, synthetic construct
PAEMLW

SEQ ID NO: 2094 - protein, 6 aa, synthetic construct
PAEMLY

SEQ ID NO: 2095 - protein, 6 aa, synthetic construct
PAEMKD

SEQ ID NO: 2096 - protein, 6 aa, synthetic construct
PAEMKE

SEQ ID NO: 2097 - protein, 6 aa, synthetic construct
PAEMKF

SEQ ID NO: 2098 - protein, 6 aa, synthetic construct
PAEMKW

SEQ ID NO: 2099 - protein, 6 aa, synthetic construct
PAEMKY

SEQ ID NO: 2100 - protein, 6 aa, synthetic construct
PAEMMD

SEQ ID NO: 2101 - protein, 6 aa, synthetic construct
PAEMME

SEQ ID NO: 2102 - protein, 6 aa, synthetic construct
PAEMMF

SEQ ID NO: 2103 - protein, 6 aa, synthetic construct
PAEMMW

SEQ ID NO: 2104 - protein, 6 aa, synthetic construct
PAEMMY

SEQ ID NO: 2105 - protein, 6 aa, synthetic construct
PAEMFD

SEQ ID NO: 2106 - protein, 6 aa, synthetic construct
PAEMFE

SEQ ID NO: 2107 - protein, 6 aa, synthetic construct
PAEMFF

SEQ ID NO: 2108 - protein, 6 aa, synthetic construct
PAEMFW

SEQ ID NO: 2109 - protein, 6 aa, synthetic construct
PAEMFY

SEQ ID NO: 2110 - protein, 6 aa, synthetic construct
PAEMPD

SEQ ID NO: 2111 - protein, 6 aa, synthetic construct
PAEMPE

SEQ ID NO: 2112 - protein, 6 aa, synthetic construct
PAEMPF

SEQ ID NO: 2113 - protein, 6 aa, synthetic construct
PAEMPW

SEQ ID NO: 2114 - protein, 6 aa, synthetic construct
PAEMPY

SEQ ID NO: 2115 - protein, 6 aa, synthetic construct
PAEMSD

SEQ ID NO: 2116 - protein, 6 aa, synthetic construct
PAEMSE

SEQ ID NO: 2117 - protein, 6 aa, synthetic construct
PAEMSF

SEQ ID NO: 2118 - protein, 6 aa, synthetic construct
PAEMSW

SEQ ID NO: 2119 - protein, 6 aa, synthetic construct
PAEMSY

SEQ ID NO: 2120 - protein, 6 aa, synthetic construct
PAEMTD

SEQ ID NO: 2121 - protein, 6 aa, synthetic construct
PAEMTE

SEQ ID NO: 2122 - protein, 6 aa, synthetic construct
PAEMTF

SEQ ID NO: 2123 - protein, 6 aa, synthetic construct
PAEMTW

SEQ ID NO: 2124 - protein, 6 aa, synthetic construct
PAEMTY

SEQ ID NO: 2125 - protein, 6 aa, synthetic construct
PAEMWD

SEQ ID NO: 2126 - protein, 6 aa, synthetic construct
PAEMWE

SEQ ID NO: 2127 - protein, 6 aa, synthetic construct
PAEMWF

SEQ ID NO: 2128 - protein, 6 aa, synthetic construct
PAEMWW

SEQ ID NO: 2129 - protein, 6 aa, synthetic construct
PAEMWY

SEQ ID NO: 2130 - protein, 6 aa, synthetic construct
PAEMYD

SEQ ID NO: 2131 - protein, 6 aa, synthetic construct
PAEMYE

SEQ ID NO: 2132 - protein, 6 aa, synthetic construct
PAEMYF

SEQ ID NO: 2133 - protein, 6 aa, synthetic construct
PAEMYW

SEQ ID NO: 2134 - protein, 6 aa, synthetic construct
PAEMYY

SEQ ID NO: 2135 - protein, 6 aa, synthetic construct
PAEMVD

SEQ ID NO: 2136 - protein, 6 aa, synthetic construct
PAEMVE

SEQ ID NO: 2137 - protein, 6 aa, synthetic construct
PAEMVF

SEQ ID NO: 2138 - protein, 6 aa, synthetic construct
PAEMVW

SEQ ID NO: 2139 - protein, 6 aa, synthetic construct
PAEMVY

SEQ ID NO: 2140 - protein, 6 aa, synthetic construct
PAEFAD

SEQ ID NO: 2141 - protein, 6 aa, synthetic construct
PAEFAE

SEQ ID NO: 2142 - protein, 6 aa, synthetic construct
PAEFAF

SEQ ID NO: 2143 - protein, 6 aa, synthetic construct
PAEFAW

SEQ ID NO: 2144 - protein, 6 aa, synthetic construct
PAEFAY

SEQ ID NO: 2145 - protein, 6 aa, synthetic construct
PAEFRD

SEQ ID NO: 2146 - protein, 6 aa, synthetic construct
PAEFRE

SEQ ID NO: 2147 - protein, 6 aa, synthetic construct
PAEFRF

SEQ ID NO: 2148 - protein, 6 aa, synthetic construct
PAEFRW

SEQ ID NO: 2149 - protein, 6 aa, synthetic construct
PAEFRY

SEQ ID NO: 2150 - protein, 6 aa, synthetic construct
PAEFND

SEQ ID NO: 2151 - protein, 6 aa, synthetic construct
PAEFNE

SEQ ID NO: 2152 - protein, 6 aa, synthetic construct
PAEFNF

SEQ ID NO: 2153 - protein, 6 aa, synthetic construct
PAEFNW

SEQ ID NO: 2154 - protein, 6 aa, synthetic construct
PAEFNY

SEQ ID NO: 2155 - protein, 6 aa, synthetic construct
PAEFDD

SEQ ID NO: 2156 - protein, 6 aa, synthetic construct
PAEFDE

SEQ ID NO: 2157 - protein, 6 aa, synthetic construct
PAEFDF

SEQ ID NO: 2158 - protein, 6 aa, synthetic construct
PAEFDW

SEQ ID NO: 2159 - protein, 6 aa, synthetic construct
PAEFDY

SEQ ID NO: 2160 - protein, 6 aa, synthetic construct
PAEFCD

SEQ ID NO: 2161 - protein, 6 aa, synthetic construct
PAEFCE

SEQ ID NO: 2162 - protein, 6 aa, synthetic construct
PAEFCF

SEQ ID NO: 2163 - protein, 6 aa, synthetic construct
PAEFCW

SEQ ID NO: 2164 - protein, 6 aa, synthetic construct
PAEFCY

SEQ ID NO: 2165 - protein, 6 aa, synthetic construct
PAEFQD

SEQ ID NO: 2166 - protein, 6 aa, synthetic construct
PAEFQE

SEQ ID NO: 2167 - protein, 6 aa, synthetic construct
PAEFQF

SEQ ID NO: 2168 - protein, 6 aa, synthetic construct
PAEFQW

SEQ ID NO: 2169 - protein, 6 aa, synthetic construct
PAEFQY

SEQ ID NO: 2170 - protein, 6 aa, synthetic construct
PAEFED

SEQ ID NO: 2171 - protein, 6 aa, synthetic construct
PAEFEE

SEQ ID NO: 2172 - protein, 6 aa, synthetic construct
PAEFEF

SEQ ID NO: 2173 - protein, 6 aa, synthetic construct
PAEFEW

SEQ ID NO: 2174 - protein, 6 aa, synthetic construct
PAEFEY

SEQ ID NO: 2175 - protein, 6 aa, synthetic construct
PAEFGD

SEQ ID NO: 2176 - protein, 6 aa, synthetic construct
PAEFGE

SEQ ID NO: 2177 - protein, 6 aa, synthetic construct
PAEFGF

SEQ ID NO: 2178 - protein, 6 aa, synthetic construct
PAEFGW

SEQ ID NO: 2179 - protein, 6 aa, synthetic construct
PAEFGY

SEQ ID NO: 2180 - protein, 6 aa, synthetic construct
PAEFHD

SEQ ID NO: 2181 - protein, 6 aa, synthetic construct
PAEFHE

SEQ ID NO: 2182 - protein, 6 aa, synthetic construct
PAEFHF

SEQ ID NO: 2183 - protein, 6 aa, synthetic construct
PAEFHW

SEQ ID NO: 2184 - protein, 6 aa, synthetic construct
PAEFHY

SEQ ID NO: 2185 - protein, 6 aa, synthetic construct
PAEFID

SEQ ID NO: 2186 - protein, 6 aa, synthetic construct
PAEFIE

SEQ ID NO: 2187 - protein, 6 aa, synthetic construct
PAEFIF

SEQ ID NO: 2188 - protein, 6 aa, synthetic construct
PAEFIW

SEQ ID NO: 2189 - protein, 6 aa, synthetic construct
PAEFIY

SEQ ID NO: 2190 - protein, 6 aa, synthetic construct
PAEFLD

SEQ ID NO: 2191 - protein, 6 aa, synthetic construct
PAEFLE

SEQ ID NO: 2192 - protein, 6 aa, synthetic construct
PAEFLF

SEQ ID NO: 2193 - protein, 6 aa, synthetic construct
PAEFLW

SEQ ID NO: 2194 - protein, 6 aa, synthetic construct
PAEFLY

SEQ ID NO: 2195 - protein, 6 aa, synthetic construct
PAEFKD

SEQ ID NO: 2196 - protein, 6 aa, synthetic construct
PAEFKE

SEQ ID NO: 2197 - protein, 6 aa, synthetic construct
PAEFKF

SEQ ID NO: 2198 - protein, 6 aa, synthetic construct
PAEFKW

SEQ ID NO: 2199 - protein, 6 aa, synthetic construct
PAEFKY

SEQ ID NO: 2200 - protein, 6 aa, synthetic construct
PAEFMD

SEQ ID NO: 2201 - protein, 6 aa, synthetic construct
PAEFME

SEQ ID NO: 2202 - protein, 6 aa, synthetic construct
PAEFMF

SEQ ID NO: 2203 - protein, 6 aa, synthetic construct
PAEFMW

SEQ ID NO: 2204 - protein, 6 aa, synthetic construct
PAEFMY

SEQ ID NO: 2205 - protein, 6 aa, synthetic construct
PAEFFD

SEQ ID NO: 2206 - protein, 6 aa, synthetic construct
PAEFFE

SEQ ID NO: 2207 - protein, 6 aa, synthetic construct
PAEFFF

SEQ ID NO: 2208 - protein, 6 aa, synthetic construct
PAEFFW

SEQ ID NO: 2209 - protein, 6 aa, synthetic construct
PAEFFY

SEQ ID NO: 2210 - protein, 6 aa, synthetic construct
PAEFPD

SEQ ID NO: 2211 - protein, 6 aa, synthetic construct
PAEFPE

SEQ ID NO: 2212 - protein, 6 aa, synthetic construct
PAEFPF

SEQ ID NO: 2213 - protein, 6 aa, synthetic construct
PAEFPW

SEQ ID NO: 2214 - protein, 6 aa, synthetic construct
PAEFPY

SEQ ID NO: 2215 - protein, 6 aa, synthetic construct
PAEFSD

SEQ ID NO: 2216 - protein, 6 aa, synthetic construct
PAEFSE

SEQ ID NO: 2217 - protein, 6 aa, synthetic construct
PAEFSF

SEQ ID NO: 2218 - protein, 6 aa, synthetic construct
PAEFSW

SEQ ID NO: 2219 - protein, 6 aa, synthetic construct
PAEFSY

SEQ ID NO: 2220 - protein, 6 aa, synthetic construct
PAEFTD

SEQ ID NO: 2221 - protein, 6 aa, synthetic construct
PAEFTE

SEQ ID NO: 2222 - protein, 6 aa, synthetic construct
PAEFTF

SEQ ID NO: 2223 - protein, 6 aa, synthetic construct
PAEFTW

SEQ ID NO: 2224 - protein, 6 aa, synthetic construct
PAEFTY

SEQ ID NO: 2225 - protein, 6 aa, synthetic construct
PAEFWD

SEQ ID NO: 2226 - protein, 6 aa, synthetic construct
PAEFWE

SEQ ID NO: 2227 - protein, 6 aa, synthetic construct
PAEFWF

SEQ ID NO: 2228 - protein, 6 aa, synthetic construct
PAEFWW

SEQ ID NO: 2229 - protein, 6 aa, synthetic construct
PAEFWY

SEQ ID NO: 2230 - protein, 6 aa, synthetic construct
PAEFYD

SEQ ID NO: 2231 - protein, 6 aa, synthetic construct
PAEFYE

SEQ ID NO: 2232 - protein, 6 aa, synthetic construct
PAEFYF

SEQ ID NO: 2233 - protein, 6 aa, synthetic construct
PAEFYW

SEQ ID NO: 2234 - protein, 6 aa, synthetic construct
PAEFYY

SEQ ID NO: 2235 - protein, 6 aa, synthetic construct
PAEFVD

SEQ ID NO: 2236 - protein, 6 aa, synthetic construct
PAEFVE

SEQ ID NO: 2237 - protein, 6 aa, synthetic construct
PAEFVF

SEQ ID NO: 2238 - protein, 6 aa, synthetic construct
PAEFVW

SEQ ID NO: 2239 - protein, 6 aa, synthetic construct
PAEFVY

SEQ ID NO: 2240 - protein, 6 aa, synthetic construct
PAEPAD

SEQ ID NO: 2241 - protein, 6 aa, synthetic construct
PAEPAE

SEQ ID NO: 2242 - protein, 6 aa, synthetic construct
PAEPAF

SEQ ID NO: 2243 - protein, 6 aa, synthetic construct
PAEPAW

SEQ ID NO: 2244 - protein, 6 aa, synthetic construct
PAEPAY

SEQ ID NO: 2245 - protein, 6 aa, synthetic construct
PAEPRD

SEQ ID NO: 2246 - protein, 6 aa, synthetic construct
PAEPRE

SEQ ID NO: 2247 - protein, 6 aa, synthetic construct
PAEPRF

SEQ ID NO: 2248 - protein, 6 aa, synthetic construct
PAEPRW

SEQ ID NO: 2249 - protein, 6 aa, synthetic construct
PAEPRY

SEQ ID NO: 2250 - protein, 6 aa, synthetic construct
PAEPND

SEQ ID NO: 2251 - protein, 6 aa, synthetic construct
PAEPNE

SEQ ID NO: 2252 - protein, 6 aa, synthetic construct
PAEPNF

SEQ ID NO: 2253 - protein, 6 aa, synthetic construct
PAEPNW

SEQ ID NO: 2254 - protein, 6 aa, synthetic construct
PAEPNY

SEQ ID NO: 2255 - protein, 6 aa, synthetic construct
PAEPDD

SEQ ID NO: 2256 - protein, 6 aa, synthetic construct
PAEPDE

SEQ ID NO: 2257 - protein, 6 aa, synthetic construct
PAEPDF

SEQ ID NO: 2258 - protein, 6 aa, synthetic construct
PAEPDW

SEQ ID NO: 2259 - protein, 6 aa, synthetic construct
PAEPDY

SEQ ID NO: 2260 - protein, 6 aa, synthetic construct
PAEPCD

SEQ ID NO: 2261 - protein, 6 aa, synthetic construct
PAEPCE

SEQ ID NO: 2262 - protein, 6 aa, synthetic construct
PAEPCF

SEQ ID NO: 2263 - protein, 6 aa, synthetic construct
PAEPCW

SEQ ID NO: 2264 - protein, 6 aa, synthetic construct
PAEPCY

SEQ ID NO: 2265 - protein, 6 aa, synthetic construct
PAEPQD

SEQ ID NO: 2266 - protein, 6 aa, synthetic construct
PAEPQE

SEQ ID NO: 2267 - protein, 6 aa, synthetic construct
PAEPQF

SEQ ID NO: 2268 - protein, 6 aa, synthetic construct
PAEPQW

SEQ ID NO: 2269 - protein, 6 aa, synthetic construct
PAEPQY

SEQ ID NO: 2270 - protein, 6 aa, synthetic construct
PAEPED

SEQ ID NO: 2271 - protein, 6 aa, synthetic construct
PAEPEE

SEQ ID NO: 2272 - protein, 6 aa, synthetic construct
PAEPEF

SEQ ID NO: 2273 - protein, 6 aa, synthetic construct
PAEPEW

SEQ ID NO: 2274 - protein, 6 aa, synthetic construct
PAEPEY

SEQ ID NO: 2275 - protein, 6 aa, synthetic construct
PAEPGD

SEQ ID NO: 2276 - protein, 6 aa, synthetic construct
PAEPGE

SEQ ID NO: 2277 - protein, 6 aa, synthetic construct
PAEPGF

SEQ ID NO: 2278 - protein, 6 aa, synthetic construct
PAEPGW

SEQ ID NO: 2279 - protein, 6 aa, synthetic construct
PAEPGY

SEQ ID NO: 2280 - protein, 6 aa, synthetic construct
PAEPHD

SEQ ID NO: 2281 - protein, 6 aa, synthetic construct
PAEPHE

SEQ ID NO: 2282 - protein, 6 aa, synthetic construct
PAEPHF

SEQ ID NO: 2283 - protein, 6 aa, synthetic construct
PAEPHW

SEQ ID NO: 2284 - protein, 6 aa, synthetic construct
PAEPHY

SEQ ID NO: 2285 - protein, 6 aa, synthetic construct
PAEPID

SEQ ID NO: 2286 - protein, 6 aa, synthetic construct
PAEPIE

SEQ ID NO: 2287 - protein, 6 aa, synthetic construct
PAEPIF

SEQ ID NO: 2288 - protein, 6 aa, synthetic construct
PAEPIW

SEQ ID NO: 2289 - protein, 6 aa, synthetic construct
PAEPIY

SEQ ID NO: 2290 - protein, 6 aa, synthetic construct
PAEPLD

SEQ ID NO: 2291 - protein, 6 aa, synthetic construct
PAEPLE

SEQ ID NO: 2292 - protein, 6 aa, synthetic construct
PAEPLF

SEQ ID NO: 2293 - protein, 6 aa, synthetic construct
PAEPLW

SEQ ID NO: 2294 - protein, 6 aa, synthetic construct
PAEPLY

SEQ ID NO: 2295 - protein, 6 aa, synthetic construct
PAEPKD

SEQ ID NO: 2296 - protein, 6 aa, synthetic construct
PAEPKE

SEQ ID NO: 2297 - protein, 6 aa, synthetic construct
PAEPKF

SEQ ID NO: 2298 - protein, 6 aa, synthetic construct
PAEPKW

SEQ ID NO: 2299 - protein, 6 aa, synthetic construct
PAEPKY

SEQ ID NO: 2300 - protein, 6 aa, synthetic construct
PAEPMD

SEQ ID NO: 2301 - protein, 6 aa, synthetic construct
PAEPME

SEQ ID NO: 2302 - protein, 6 aa, synthetic construct
PAEPMF

SEQ ID NO: 2303 - protein, 6 aa, synthetic construct
PAEPMW

SEQ ID NO: 2304 - protein, 6 aa, synthetic construct
PAEPMY

SEQ ID NO: 2305 - protein, 6 aa, synthetic construct
PAEPFD

SEQ ID NO: 2306 - protein, 6 aa, synthetic construct
PAEPFE

SEQ ID NO: 2307 - protein, 6 aa, synthetic construct
PAEPFF

SEQ ID NO: 2308 - protein, 6 aa, synthetic construct
PAEPFW

SEQ ID NO: 2309 - protein, 6 aa, synthetic construct
PAEPFY

SEQ ID NO: 2310 - protein, 6 aa, synthetic construct
PAEPPD

SEQ ID NO: 2311 - protein, 6 aa, synthetic construct
PAEPPE

SEQ ID NO: 2312 - protein, 6 aa, synthetic construct
PAEPPF

SEQ ID NO: 2313 - protein, 6 aa, synthetic construct
PAEPPW

SEQ ID NO: 2314 - protein, 6 aa, synthetic construct
PAEPPY

SEQ ID NO: 2315 - protein, 6 aa, synthetic construct
PAEPSD

SEQ ID NO: 2316 - protein, 6 aa, synthetic construct
PAEPSE

SEQ ID NO: 2317 - protein, 6 aa, synthetic construct
PAEPSF

SEQ ID NO: 2318 - protein, 6 aa, synthetic construct
PAEPSW

SEQ ID NO: 2319 - protein, 6 aa, synthetic construct
PAEPSY

SEQ ID NO: 2320 - protein, 6 aa, synthetic construct
PAEPTD

SEQ ID NO: 2321 - protein, 6 aa, synthetic construct
PAEPTE

SEQ ID NO: 2322 - protein, 6 aa, synthetic construct
PAEPTF

SEQ ID NO: 2323 - protein, 6 aa, synthetic construct
PAEPTW

SEQ ID NO: 2324 - protein, 6 aa, synthetic construct
PAEPTY

SEQ ID NO: 2325 - protein, 6 aa, synthetic construct
PAEPWD

SEQ ID NO: 2326 - protein, 6 aa, synthetic construct
PAEPWE

SEQ ID NO: 2327 - protein, 6 aa, synthetic construct
PAEPWF

SEQ ID NO: 2328 - protein, 6 aa, synthetic construct
PAEPWW

SEQ ID NO: 2329 - protein, 6 aa, synthetic construct
PAEPWY

SEQ ID NO: 2330 - protein, 6 aa, synthetic construct
PAEPYD

SEQ ID NO: 2331 - protein, 6 aa, synthetic construct
PAEPYE

SEQ ID NO: 2332 - protein, 6 aa, synthetic construct
PAEPYF

SEQ ID NO: 2333 - protein, 6 aa, synthetic construct
PAEPYW

SEQ ID NO: 2334 - protein, 6 aa, synthetic construct
PAEPYY

SEQ ID NO: 2335 - protein, 6 aa, synthetic construct
PAEPVD

SEQ ID NO: 2336 - protein, 6 aa, synthetic construct
PAEPVE

SEQ ID NO: 2337 - protein, 6 aa, synthetic construct
PAEPVF

SEQ ID NO: 2338 - protein, 6 aa, synthetic construct
PAEPVW

SEQ ID NO: 2339 - protein, 6 aa, synthetic construct
PAEPVY

SEQ ID NO: 2340 - protein, 6 aa, synthetic construct
PAESAD

SEQ ID NO: 2341 - protein, 6 aa, synthetic construct
PAESAE

SEQ ID NO: 2342 - protein, 6 aa, synthetic construct
PAESAF

SEQ ID NO: 2343 - protein, 6 aa, synthetic construct
PAESAW

SEQ ID NO: 2344 - protein, 6 aa, synthetic construct
PAESAY

SEQ ID NO: 2345 - protein, 6 aa, synthetic construct
PAESRD

SEQ ID NO: 2346 - protein, 6 aa, synthetic construct
PAESRE

SEQ ID NO: 2347 - protein, 6 aa, synthetic construct
PAESRF

SEQ ID NO: 2348 - protein, 6 aa, synthetic construct
PAESRW

SEQ ID NO: 2349 - protein, 6 aa, synthetic construct
PAESRY

SEQ ID NO: 2350 - protein, 6 aa, synthetic construct
PAESND

SEQ ID NO: 2351 - protein, 6 aa, synthetic construct
PAESNE

SEQ ID NO: 2352 - protein, 6 aa, synthetic construct
PAESNF

SEQ ID NO: 2353 - protein, 6 aa, synthetic construct
PAESNW

SEQ ID NO: 2354 - protein, 6 aa, synthetic construct
PAESNY

SEQ ID NO: 2355 - protein, 6 aa, synthetic construct
PAESDD

SEQ ID NO: 2356 - protein, 6 aa, synthetic construct
PAESDE

SEQ ID NO: 2357 - protein, 6 aa, synthetic construct
PAESDF

SEQ ID NO: 2358 - protein, 6 aa, synthetic construct
PAESDW

SEQ ID NO: 2359 - protein, 6 aa, synthetic construct
PAESDY

SEQ ID NO: 2360 - protein, 6 aa, synthetic construct
PAESCD

SEQ ID NO: 2361 - protein, 6 aa, synthetic construct
PAESCE

SEQ ID NO: 2362 - protein, 6 aa, synthetic construct
PAESCF

SEQ ID NO: 2363 - protein, 6 aa, synthetic construct
PAESCW

SEQ ID NO: 2364 - protein, 6 aa, synthetic construct
PAESCY

SEQ ID NO: 2365 - protein, 6 aa, synthetic construct
PAESQD

SEQ ID NO: 2366 - protein, 6 aa, synthetic construct
PAESQE

SEQ ID NO: 2367 - protein, 6 aa, synthetic construct
PAESQF

SEQ ID NO: 2368 - protein, 6 aa, synthetic construct
PAESQW

SEQ ID NO: 2369 - protein, 6 aa, synthetic construct
PAESQY

SEQ ID NO: 2370 - protein, 6 aa, synthetic construct
PAESED

SEQ ID NO: 2371 - protein, 6 aa, synthetic construct
PAESEE

SEQ ID NO: 2372 - protein, 6 aa, synthetic construct
PAESEF

SEQ ID NO: 2373 - protein, 6 aa, synthetic construct
PAESEW

SEQ ID NO: 2374 - protein, 6 aa, synthetic construct
PAESEY

SEQ ID NO: 2375 - protein, 6 aa, synthetic construct
PAESGD

SEQ ID NO: 2376 - protein, 6 aa, synthetic construct
PAESGE

SEQ ID NO: 2377 - protein, 6 aa, synthetic construct
PAESGF

SEQ ID NO: 2378 - protein, 6 aa, synthetic construct
PAESGW

SEQ ID NO: 2379 - protein, 6 aa, synthetic construct
PAESGY

SEQ ID NO: 2380 - protein, 6 aa, synthetic construct
PAESHD

SEQ ID NO: 2381 - protein, 6 aa, synthetic construct
PAESHE

SEQ ID NO: 2382 - protein, 6 aa, synthetic construct
PAESHF

SEQ ID NO: 2383 - protein, 6 aa, synthetic construct
PAESHW

SEQ ID NO: 2384 - protein, 6 aa, synthetic construct
PAESHY

SEQ ID NO: 2385 - protein, 6 aa, synthetic construct
PAESID

SEQ ID NO: 2386 - protein, 6 aa, synthetic construct
PAESIE

SEQ ID NO: 2387 - protein, 6 aa, synthetic construct
PAESIF

SEQ ID NO: 2388 - protein, 6 aa, synthetic construct
PAESIW

SEQ ID NO: 2389 - protein, 6 aa, synthetic construct
PAESIY

SEQ ID NO: 2390 - protein, 6 aa, synthetic construct
PAESLD

SEQ ID NO: 2391 - protein, 6 aa, synthetic construct
PAESLE

SEQ ID NO: 2392 - protein, 6 aa, synthetic construct
PAESLF

SEQ ID NO: 2393 - protein, 6 aa, synthetic construct
PAESLW

SEQ ID NO: 2394 - protein, 6 aa, synthetic construct
PAESLY

SEQ ID NO: 2395 - protein, 6 aa, synthetic construct
PAESKD

SEQ ID NO: 2396 - protein, 6 aa, synthetic construct
PAESKE

SEQ ID NO: 2397 - protein, 6 aa, synthetic construct
PAESKF

SEQ ID NO: 2398 - protein, 6 aa, synthetic construct
PAESKW

SEQ ID NO: 2399 - protein, 6 aa, synthetic construct
PAESKY

SEQ ID NO: 2400 - protein, 6 aa, synthetic construct
PAESMD

SEQ ID NO: 2401 - protein, 6 aa, synthetic construct
PAESME

SEQ ID NO: 2402 - protein, 6 aa, synthetic construct
PAESMF

SEQ ID NO: 2403 - protein, 6 aa, synthetic construct
PAESMW

SEQ ID NO: 2404 - protein, 6 aa, synthetic construct
PAESMY

SEQ ID NO: 2405 - protein, 6 aa, synthetic construct
PAESFD

SEQ ID NO: 2406 - protein, 6 aa, synthetic construct
PAESFE

SEQ ID NO: 2407 - protein, 6 aa, synthetic construct
PAESFF

SEQ ID NO: 2408 - protein, 6 aa, synthetic construct
PAESFW

SEQ ID NO: 2409 - protein, 6 aa, synthetic construct
PAESFY

SEQ ID NO: 2410 - protein, 6 aa, synthetic construct
PAESPD

SEQ ID NO: 2411 - protein, 6 aa, synthetic construct
PAESPE

SEQ ID NO: 2412 - protein, 6 aa, synthetic construct
PAESPF

SEQ ID NO: 2413 - protein, 6 aa, synthetic construct
PAESPW

SEQ ID NO: 2414 - protein, 6 aa, synthetic construct
PAESPY

SEQ ID NO: 2415 - protein, 6 aa, synthetic construct
PAESSD

SEQ ID NO: 2416 - protein, 6 aa, synthetic construct
PAESSE

SEQ ID NO: 2417 - protein, 6 aa, synthetic construct
PAESSF

SEQ ID NO: 2418 - protein, 6 aa, synthetic construct
PAESSW

SEQ ID NO: 2419 - protein, 6 aa, synthetic construct
PAESSY

SEQ ID NO: 2420 - protein, 6 aa, synthetic construct
PAESTD

SEQ ID NO: 2421 - protein, 6 aa, synthetic construct
PAESTE

SEQ ID NO: 2422 - protein, 6 aa, synthetic construct
PAESTF

SEQ ID NO: 2423 - protein, 6 aa, synthetic construct
PAESTW

SEQ ID NO: 2424 - protein, 6 aa, synthetic construct
PAESTY

SEQ ID NO: 2425 - protein, 6 aa, synthetic construct
PAESWD

SEQ ID NO: 2426 - protein, 6 aa, synthetic construct
PAESWE

SEQ ID NO: 2427 - protein, 6 aa, synthetic construct
PAESWF

SEQ ID NO: 2428 - protein, 6 aa, synthetic construct
PAESWW

SEQ ID NO: 2429 - protein, 6 aa, synthetic construct
PAESWY

SEQ ID NO: 2430 - protein, 6 aa, synthetic construct
PAESYD

SEQ ID NO: 2431 - protein, 6 aa, synthetic construct
PAESYE

SEQ ID NO: 2432 - protein, 6 aa, synthetic construct
PAESYF

SEQ ID NO: 2433 - protein, 6 aa, synthetic construct
PAESYW

SEQ ID NO: 2434 - protein, 6 aa, synthetic construct
PAESYY

SEQ ID NO: 2435 - protein, 6 aa, synthetic construct
PAESVD

SEQ ID NO: 2436 - protein, 6 aa, synthetic construct
PAESVE

SEQ ID NO: 2437 - protein, 6 aa, synthetic construct
PAESVF

SEQ ID NO: 2438 - protein, 6 aa, synthetic construct
PAESVW

SEQ ID NO: 2439 - protein, 6 aa, synthetic construct
PAESVY

SEQ ID NO: 2440 - protein, 6 aa, synthetic construct
PAETAD

SEQ ID NO: 2441 - protein, 6 aa, synthetic construct
PAETAE

SEQ ID NO: 2442 - protein, 6 aa, synthetic construct
PAETAF

SEQ ID NO: 2443 - protein, 6 aa, synthetic construct
PAETAW

SEQ ID NO: 2444 - protein, 6 aa, synthetic construct
PAETAY

SEQ ID NO: 2445 - protein, 6 aa, synthetic construct
PAETRD

SEQ ID NO: 2446 - protein, 6 aa, synthetic construct
PAETRE

SEQ ID NO: 2447 - protein, 6 aa, synthetic construct
PAETRF

SEQ ID NO: 2448 - protein, 6 aa, synthetic construct
PAETRW

SEQ ID NO: 2449 - protein, 6 aa, synthetic construct
PAETRY

SEQ ID NO: 2450 - protein, 6 aa, synthetic construct
PAETND

SEQ ID NO: 2451 - protein, 6 aa, synthetic construct
PAETNE

SEQ ID NO: 2452 - protein, 6 aa, synthetic construct
PAETNF

SEQ ID NO: 2453 - protein, 6 aa, synthetic construct
PAETNW

SEQ ID NO: 2454 - protein, 6 aa, synthetic construct
PAETNY

SEQ ID NO: 2455 - protein, 6 aa, synthetic construct
PAETDD

SEQ ID NO: 2456 - protein, 6 aa, synthetic construct
PAETDE

SEQ ID NO: 2457 - protein, 6 aa, synthetic construct
PAETDF

SEQ ID NO: 2458 - protein, 6 aa, synthetic construct
PAETDW

SEQ ID NO: 2459 - protein, 6 aa, synthetic construct
PAETDY

SEQ ID NO: 2460 - protein, 6 aa, synthetic construct
PAETCD

SEQ ID NO: 2461 - protein, 6 aa, synthetic construct
PAETCE

SEQ ID NO: 2462 - protein, 6 aa, synthetic construct
PAETCF

SEQ ID NO: 2463 - protein, 6 aa, synthetic construct
PAETCW

SEQ ID NO: 2464 - protein, 6 aa, synthetic construct
PAETCY

SEQ ID NO: 2465 - protein, 6 aa, synthetic construct
PAETQD

SEQ ID NO: 2466 - protein, 6 aa, synthetic construct
PAETQE

SEQ ID NO: 2467 - protein, 6 aa, synthetic construct
PAETQF

SEQ ID NO: 2468 - protein, 6 aa, synthetic construct
PAETQW

SEQ ID NO: 2469 - protein, 6 aa, synthetic construct
PAETQY

SEQ ID NO: 2470 - protein, 6 aa, synthetic construct
PAETED

SEQ ID NO: 2471 - protein, 6 aa, synthetic construct
PAETEE

SEQ ID NO: 2472 - protein, 6 aa, synthetic construct
PAETEF

SEQ ID NO: 2473 - protein, 6 aa, synthetic construct
PAETEW

SEQ ID NO: 2474 - protein, 6 aa, synthetic construct
PAETEY

SEQ ID NO: 2475 - protein, 6 aa, synthetic construct
PAETGD

SEQ ID NO: 2476 - protein, 6 aa, synthetic construct
PAETGE

SEQ ID NO: 2477 - protein, 6 aa, synthetic construct
PAETGF

SEQ ID NO: 2478 - protein, 6 aa, synthetic construct
PAETGW

SEQ ID NO: 2479 - protein, 6 aa, synthetic construct
PAETGY

SEQ ID NO: 2480 - protein, 6 aa, synthetic construct
PAETHD

SEQ ID NO: 2481 - protein, 6 aa, synthetic construct
PAETHE

SEQ ID NO: 2482 - protein, 6 aa, synthetic construct
PAETHF

SEQ ID NO: 2483 - protein, 6 aa, synthetic construct
PAETHW

SEQ ID NO: 2484 - protein, 6 aa, synthetic construct
PAETHY

SEQ ID NO: 2485 - protein, 6 aa, synthetic construct
PAETID

SEQ ID NO: 2486 - protein, 6 aa, synthetic construct
PAETIE

SEQ ID NO: 2487 - protein, 6 aa, synthetic construct
PAETIF

SEQ ID NO: 2488 - protein, 6 aa, synthetic construct
PAETIW

SEQ ID NO: 2489 - protein, 6 aa, synthetic construct
PAETIY

SEQ ID NO: 2490 - protein, 6 aa, synthetic construct
PAETLD

SEQ ID NO: 2491 - protein, 6 aa, synthetic construct
PAETLE

SEQ ID NO: 2492 - protein, 6 aa, synthetic construct
PAETLF

SEQ ID NO: 2493 - protein, 6 aa, synthetic construct
PAETLW

SEQ ID NO: 2494 - protein, 6 aa, synthetic construct
PAETLY

SEQ ID NO: 2495 - protein, 6 aa, synthetic construct
PAETKD

SEQ ID NO: 2496 - protein, 6 aa, synthetic construct
PAETKE

SEQ ID NO: 2497 - protein, 6 aa, synthetic construct
PAETKF

SEQ ID NO: 2498 - protein, 6 aa, synthetic construct
PAETKW

SEQ ID NO: 2499 - protein, 6 aa, synthetic construct
PAETKY

SEQ ID NO: 2500 - protein, 6 aa, synthetic construct
PAETMD

SEQ ID NO: 2501 - protein, 6 aa, synthetic construct
PAETME

SEQ ID NO: 2502 - protein, 6 aa, synthetic construct
PAETMF

SEQ ID NO: 2503 - protein, 6 aa, synthetic construct
PAETMW

SEQ ID NO: 2504 - protein, 6 aa, synthetic construct
PAETMY

SEQ ID NO: 2505 - protein, 6 aa, synthetic construct
PAETFD

SEQ ID NO: 2506 - protein, 6 aa, synthetic construct
PAETFE

SEQ ID NO: 2507 - protein, 6 aa, synthetic construct
PAETFF

SEQ ID NO: 2508 - protein, 6 aa, synthetic construct
PAETFW

SEQ ID NO: 2509 - protein, 6 aa, synthetic construct
PAETFY

SEQ ID NO: 2510 - protein, 6 aa, synthetic construct
PAETPD

SEQ ID NO: 2511 - protein, 6 aa, synthetic construct
PAETPE

SEQ ID NO: 2512 - protein, 6 aa, synthetic construct
PAETPF

SEQ ID NO: 2513 - protein, 6 aa, synthetic construct
PAETPW

SEQ ID NO: 2514 - protein, 6 aa, synthetic construct
PAETPY

SEQ ID NO: 2515 - protein, 6 aa, synthetic construct
PAETSD

SEQ ID NO: 2516 - protein, 6 aa, synthetic construct
PAETSE

SEQ ID NO: 2517 - protein, 6 aa, synthetic construct
PAETSF

SEQ ID NO: 2518 - protein, 6 aa, synthetic construct
PAETSW

SEQ ID NO: 2519 - protein, 6 aa, synthetic construct
PAETSY

SEQ ID NO: 2520 - protein, 6 aa, synthetic construct
PAETTD

SEQ ID NO: 2521 - protein, 6 aa, synthetic construct
PAETTE

SEQ ID NO: 2522 - protein, 6 aa, synthetic construct
PAETTF

SEQ ID NO: 2523 - protein, 6 aa, synthetic construct
PAETTW

SEQ ID NO: 2524 - protein, 6 aa, synthetic construct
PAETTY

SEQ ID NO: 2525 - protein, 6 aa, synthetic construct
PAETWD

SEQ ID NO: 2526 - protein, 6 aa, synthetic construct
PAETWE

SEQ ID NO: 2527 - protein, 6 aa, synthetic construct
PAETWF

SEQ ID NO: 2528 - protein, 6 aa, synthetic construct
PAETWW

SEQ ID NO: 2529 - protein, 6 aa, synthetic construct
PAETWY

SEQ ID NO: 2530 - protein, 6 aa, synthetic construct
PAETYD

SEQ ID NO: 2531 - protein, 6 aa, synthetic construct
PAETYE

SEQ ID NO: 2532 - protein, 6 aa, synthetic construct
PAETYF

SEQ ID NO: 2533 - protein, 6 aa, synthetic construct
PAETYW

SEQ ID NO: 2534 - protein, 6 aa, synthetic construct
PAETYY

SEQ ID NO: 2535 - protein, 6 aa, synthetic construct
PAETVD

SEQ ID NO: 2536 - protein, 6 aa, synthetic construct
PAETVE

SEQ ID NO: 2537 - protein, 6 aa, synthetic construct
PAETVF

SEQ ID NO: 2538 - protein, 6 aa, synthetic construct
PAETVW

SEQ ID NO: 2539 - protein, 6 aa, synthetic construct
PAETVY

SEQ ID NO: 2540 - protein, 6 aa, synthetic construct
PAEWAD

SEQ ID NO: 2541 - protein, 6 aa, synthetic construct
PAEWAE

SEQ ID NO: 2542 - protein, 6 aa, synthetic construct
PAEWAF

SEQ ID NO: 2543 - protein, 6 aa, synthetic construct
PAEWAW

SEQ ID NO: 2544 - protein, 6 aa, synthetic construct
PAEWAY

SEQ ID NO: 2545 - protein, 6 aa, synthetic construct
PAEWRD

SEQ ID NO: 2546 - protein, 6 aa, synthetic construct
PAEWRE

SEQ ID NO: 2547 - protein, 6 aa, synthetic construct
PAEWRF

SEQ ID NO: 2548 - protein, 6 aa, synthetic construct
PAEWRW

SEQ ID NO: 2549 - protein, 6 aa, synthetic construct
PAEWRY

SEQ ID NO: 2550 - protein, 6 aa, synthetic construct
PAEWND

SEQ ID NO: 2551 - protein, 6 aa, synthetic construct
PAEWNE

SEQ ID NO: 2552 - protein, 6 aa, synthetic construct
PAEWNF

SEQ ID NO: 2553 - protein, 6 aa, synthetic construct
PAEWNW

SEQ ID NO: 2554 - protein, 6 aa, synthetic construct
PAEWNY

SEQ ID NO: 2555 - protein, 6 aa, synthetic construct
PAEWDD

SEQ ID NO: 2556 - protein, 6 aa, synthetic construct
PAEWDE

SEQ ID NO: 2557 - protein, 6 aa, synthetic construct
PAEWDF

SEQ ID NO: 2558 - protein, 6 aa, synthetic construct
PAEWDW

SEQ ID NO: 2559 - protein, 6 aa, synthetic construct
PAEWDY

SEQ ID NO: 2560 - protein, 6 aa, synthetic construct
PAEWCD

SEQ ID NO: 2561 - protein, 6 aa, synthetic construct
PAEWCE

SEQ ID NO: 2562 - protein, 6 aa, synthetic construct
PAEWCF

SEQ ID NO: 2563 - protein, 6 aa, synthetic construct
PAEWCW

SEQ ID NO: 2564 - protein, 6 aa, synthetic construct
PAEWCY

SEQ ID NO: 2565 - protein, 6 aa, synthetic construct
PAEWQD

SEQ ID NO: 2566 - protein, 6 aa, synthetic construct
PAEWQE

SEQ ID NO: 2567 - protein, 6 aa, synthetic construct
PAEWQF

SEQ ID NO: 2568 - protein, 6 aa, synthetic construct
PAEWQW

SEQ ID NO: 2569 - protein, 6 aa, synthetic construct
PAEWQY

SEQ ID NO: 2570 - protein, 6 aa, synthetic construct
PAEWED

SEQ ID NO: 2571 - protein, 6 aa, synthetic construct
PAEWEE

SEQ ID NO: 2572 - protein, 6 aa, synthetic construct
PAEWEF

SEQ ID NO: 2573 - protein, 6 aa, synthetic construct
PAEWEW

SEQ ID NO: 2574 - protein, 6 aa, synthetic construct
PAEWEY

SEQ ID NO: 2575 - protein, 6 aa, synthetic construct
PAEWGD

SEQ ID NO: 2576 - protein, 6 aa, synthetic construct
PAEWGE

SEQ ID NO: 2577 - protein, 6 aa, synthetic construct
PAEWGF

SEQ ID NO: 2578 - protein, 6 aa, synthetic construct
PAEWGW

SEQ ID NO: 2579 - protein, 6 aa, synthetic construct
PAEWGY

SEQ ID NO: 2580 - protein, 6 aa, synthetic construct
PAEWHD

SEQ ID NO: 2581 - protein, 6 aa, synthetic construct
PAEWHE

SEQ ID NO: 2582 - protein, 6 aa, synthetic construct
PAEWHF

SEQ ID NO: 2583 - protein, 6 aa, synthetic construct
PAEWHW

SEQ ID NO: 2584 - protein, 6 aa, synthetic construct
PAEWHY

SEQ ID NO: 2585 - protein, 6 aa, synthetic construct
PAEWID

SEQ ID NO: 2586 - protein, 6 aa, synthetic construct
PAEWIE

SEQ ID NO: 2587 - protein, 6 aa, synthetic construct
PAEWIF

SEQ ID NO: 2588 - protein, 6 aa, synthetic construct
PAEWIW

SEQ ID NO: 2589 - protein, 6 aa, synthetic construct
PAEWIY

SEQ ID NO: 2590 - protein, 6 aa, synthetic construct
PAEWLD

SEQ ID NO: 2591 - protein, 6 aa, synthetic construct
PAEWLE

SEQ ID NO: 2592 - protein, 6 aa, synthetic construct
PAEWLF

SEQ ID NO: 2593 - protein, 6 aa, synthetic construct
PAEWLW

SEQ ID NO: 2594 - protein, 6 aa, synthetic construct
PAEWLY

SEQ ID NO: 2595 - protein, 6 aa, synthetic construct
PAEWKD

SEQ ID NO: 2596 - protein, 6 aa, synthetic construct
PAEWKE

SEQ ID NO: 2597 - protein, 6 aa, synthetic construct
PAEWKF

SEQ ID NO: 2598 - protein, 6 aa, synthetic construct
PAEWKW

SEQ ID NO: 2599 - protein, 6 aa, synthetic construct
PAEWKY

SEQ ID NO: 2600 - protein, 6 aa, synthetic construct
PAEWMD

SEQ ID NO: 2601 - protein, 6 aa, synthetic construct
PAEWME

SEQ ID NO: 2602 - protein, 6 aa, synthetic construct
PAEWMF

SEQ ID NO: 2603 - protein, 6 aa, synthetic construct
PAEWMW

SEQ ID NO: 2604 - protein, 6 aa, synthetic construct
PAEWMY

SEQ ID NO: 2605 - protein, 6 aa, synthetic construct
PAEWFD

SEQ ID NO: 2606 - protein, 6 aa, synthetic construct
PAEWFE

SEQ ID NO: 2607 - protein, 6 aa, synthetic construct
PAEWFF

SEQ ID NO: 2608 - protein, 6 aa, synthetic construct
PAEWFW

SEQ ID NO: 2609 - protein, 6 aa, synthetic construct
PAEWFY

SEQ ID NO: 2610 - protein, 6 aa, synthetic construct
PAEWPD

SEQ ID NO: 2611 - protein, 6 aa, synthetic construct
PAEWPE

SEQ ID NO: 2612 - protein, 6 aa, synthetic construct
PAEWPF

SEQ ID NO: 2613 - protein, 6 aa, synthetic construct
PAEWPW

SEQ ID NO: 2614 - protein, 6 aa, synthetic construct
PAEWPY

SEQ ID NO: 2615 - protein, 6 aa, synthetic construct
PAEWSD

SEQ ID NO: 2616 - protein, 6 aa, synthetic construct
PAEWSE

SEQ ID NO: 2617 - protein, 6 aa, synthetic construct
PAEWSF

SEQ ID NO: 2618 - protein, 6 aa, synthetic construct
PAEWSW

SEQ ID NO: 2619 - protein, 6 aa, synthetic construct
PAEWSY

SEQ ID NO: 2620 - protein, 6 aa, synthetic construct
PAEWTD

SEQ ID NO: 2621 - protein, 6 aa, synthetic construct
PAEWTE

SEQ ID NO: 2622 - protein, 6 aa, synthetic construct
PAEWTF

SEQ ID NO: 2623 - protein, 6 aa, synthetic construct
PAEWTW

SEQ ID NO: 2624 - protein, 6 aa, synthetic construct
PAEWTY

SEQ ID NO: 2625 - protein, 6 aa, synthetic construct
PAEWWD

SEQ ID NO: 2626 - protein, 6 aa, synthetic construct
PAEWWE

SEQ ID NO: 2627 - protein, 6 aa, synthetic construct
PAEWWF

SEQ ID NO: 2628 - protein, 6 aa, synthetic construct
PAEWWW

SEQ ID NO: 2629 - protein, 6 aa, synthetic construct
PAEWWY

SEQ ID NO: 2630 - protein, 6 aa, synthetic construct
PAEWYD

SEQ ID NO: 2631 - protein, 6 aa, synthetic construct
PAEWYE

SEQ ID NO: 2632 - protein, 6 aa, synthetic construct
PAEWYF

SEQ ID NO: 2633 - protein, 6 aa, synthetic construct
PAEWYW

SEQ ID NO: 2634 - protein, 6 aa, synthetic construct
PAEWYY

SEQ ID NO: 2635 - protein, 6 aa, synthetic construct
PAEWVD

SEQ ID NO: 2636 - protein, 6 aa, synthetic construct
PAEWVE

SEQ ID NO: 2637 - protein, 6 aa, synthetic construct
PAEWVF

SEQ ID NO: 2638 - protein, 6 aa, synthetic construct
PAEWVW

SEQ ID NO: 2639 - protein, 6 aa, synthetic construct
PAEWVY

SEQ ID NO: 2640 - protein, 6 aa, synthetic construct
PAEYAD

SEQ ID NO: 2641 - protein, 6 aa, synthetic construct
PAEYAE

SEQ ID NO: 2642 - protein, 6 aa, synthetic construct
PAEYAF

SEQ ID NO: 2643 - protein, 6 aa, synthetic construct
PAEYAW

SEQ ID NO: 2644 - protein, 6 aa, synthetic construct
PAEYAY

SEQ ID NO: 2645 - protein, 6 aa, synthetic construct
PAEYRD

SEQ ID NO: 2646 - protein, 6 aa, synthetic construct
PAEYRE

SEQ ID NO: 2647 - protein, 6 aa, synthetic construct
PAEYRF

SEQ ID NO: 2648 - protein, 6 aa, synthetic construct
PAEYRW

SEQ ID NO: 2649 - protein, 6 aa, synthetic construct
PAEYRY

SEQ ID NO: 2650 - protein, 6 aa, synthetic construct
PAEYND

SEQ ID NO: 2651 - protein, 6 aa, synthetic construct
PAEYNE

SEQ ID NO: 2652 - protein, 6 aa, synthetic construct
PAEYNF

SEQ ID NO: 2653 - protein, 6 aa, synthetic construct
PAEYNW

SEQ ID NO: 2654 - protein, 6 aa, synthetic construct
PAEYNY

SEQ ID NO: 2655 - protein, 6 aa, synthetic construct
PAEYDD

SEQ ID NO: 2656 - protein, 6 aa, synthetic construct
PAEYDE

SEQ ID NO: 2657 - protein, 6 aa, synthetic construct
PAEYDF

SEQ ID NO: 2658 - protein, 6 aa, synthetic construct
PAEYDW

SEQ ID NO: 2659 - protein, 6 aa, synthetic construct
PAEYDY

SEQ ID NO: 2660 - protein, 6 aa, synthetic construct
PAEYCD

SEQ ID NO: 2661 - protein, 6 aa, synthetic construct
PAEYCE

SEQ ID NO: 2662 - protein, 6 aa, synthetic construct
PAEYCF

SEQ ID NO: 2663 - protein, 6 aa, synthetic construct
PAEYCW

SEQ ID NO: 2664 - protein, 6 aa, synthetic construct
PAEYCY

SEQ ID NO: 2665 - protein, 6 aa, synthetic construct
PAEYQD

SEQ ID NO: 2666 - protein, 6 aa, synthetic construct
PAEYQE

SEQ ID NO: 2667 - protein, 6 aa, synthetic construct
PAEYQF

SEQ ID NO: 2668 - protein, 6 aa, synthetic construct
PAEYQW

SEQ ID NO: 2669 - protein, 6 aa, synthetic construct
PAEYQY

SEQ ID NO: 2670 - protein, 6 aa, synthetic construct
PAEYED

SEQ ID NO: 2671 - protein, 6 aa, synthetic construct
PAEYEE

SEQ ID NO: 2672 - protein, 6 aa, synthetic construct
PAEYEF

SEQ ID NO: 2673 - protein, 6 aa, synthetic construct
PAEYEW

SEQ ID NO: 2674 - protein, 6 aa, synthetic construct
PAEYEY

SEQ ID NO: 2675 - protein, 6 aa, synthetic construct
PAEYGD

SEQ ID NO: 2676 - protein, 6 aa, synthetic construct
PAEYGE

SEQ ID NO: 2677 - protein, 6 aa, synthetic construct
PAEYGF

SEQ ID NO: 2678 - protein, 6 aa, synthetic construct
PAEYGW

SEQ ID NO: 2679 - protein, 6 aa, synthetic construct
PAEYGY

SEQ ID NO: 2680 - protein, 6 aa, synthetic construct
PAEYHD

SEQ ID NO: 2681 - protein, 6 aa, synthetic construct
PAEYHE

SEQ ID NO: 2682 - protein, 6 aa, synthetic construct
PAEYHF

SEQ ID NO: 2683 - protein, 6 aa, synthetic construct
PAEYHW

SEQ ID NO: 2684 - protein, 6 aa, synthetic construct
PAEYHY

SEQ ID NO: 2685 - protein, 6 aa, synthetic construct
PAEYID

SEQ ID NO: 2686 - protein, 6 aa, synthetic construct
PAEYIE

SEQ ID NO: 2687 - protein, 6 aa, synthetic construct
PAEYIF

SEQ ID NO: 2688 - protein, 6 aa, synthetic construct
PAEYIW

SEQ ID NO: 2689 - protein, 6 aa, synthetic construct
PAEYIY

SEQ ID NO: 2690 - protein, 6 aa, synthetic construct
PAEYLD

SEQ ID NO: 2691 - protein, 6 aa, synthetic construct
PAEYLE

SEQ ID NO: 2692 - protein, 6 aa, synthetic construct
PAEYLF

SEQ ID NO: 2693 - protein, 6 aa, synthetic construct
PAEYLW

SEQ ID NO: 2694 - protein, 6 aa, synthetic construct
PAEYLY

SEQ ID NO: 2695 - protein, 6 aa, synthetic construct
PAEYKD

SEQ ID NO: 2696 - protein, 6 aa, synthetic construct
PAEYKE

SEQ ID NO: 2697 - protein, 6 aa, synthetic construct
PAEYKF

SEQ ID NO: 2698 - protein, 6 aa, synthetic construct
PAEYKW

SEQ ID NO: 2699 - protein, 6 aa, synthetic construct
PAEYKY

SEQ ID NO: 2700 - protein, 6 aa, synthetic construct
PAEYMD

SEQ ID NO: 2701 - protein, 6 aa, synthetic construct
PAEYME

SEQ ID NO: 2702 - protein, 6 aa, synthetic construct
PAEYMF

SEQ ID NO: 2703 - protein, 6 aa, synthetic construct
PAEYMW

SEQ ID NO: 2704 - protein, 6 aa, synthetic construct
PAEYMY

SEQ ID NO: 2705 - protein, 6 aa, synthetic construct
PAEYFD

SEQ ID NO: 2706 - protein, 6 aa, synthetic construct
PAEYFE

SEQ ID NO: 2707 - protein, 6 aa, synthetic construct
PAEYFF

SEQ ID NO: 2708 - protein, 6 aa, synthetic construct
PAEYFW

SEQ ID NO: 2709 - protein, 6 aa, synthetic construct
PAEYFY

SEQ ID NO: 2710 - protein, 6 aa, synthetic construct
PAEYPD

SEQ ID NO: 2711 - protein, 6 aa, synthetic construct
PAEYPE

SEQ ID NO: 2712 - protein, 6 aa, synthetic construct
PAEYPF

SEQ ID NO: 2713 - protein, 6 aa, synthetic construct
PAEYPW

SEQ ID NO: 2714 - protein, 6 aa, synthetic construct
PAEYPY

SEQ ID NO: 2715 - protein, 6 aa, synthetic construct
PAEYSD

SEQ ID NO: 2716 - protein, 6 aa, synthetic construct
PAEYSE

SEQ ID NO: 2717 - protein, 6 aa, synthetic construct
PAEYSF

SEQ ID NO: 2718 - protein, 6 aa, synthetic construct
PAEYSW

SEQ ID NO: 2719 - protein, 6 aa, synthetic construct
PAEYSY

SEQ ID NO: 2720 - protein, 6 aa, synthetic construct
PAEYTD

SEQ ID NO: 2721 - protein, 6 aa, synthetic construct
PAEYTE

SEQ ID NO: 2722 - protein, 6 aa, synthetic construct
PAEYTF

SEQ ID NO: 2723 - protein, 6 aa, synthetic construct
PAEYTW

SEQ ID NO: 2724 - protein, 6 aa, synthetic construct
PAEYTY

SEQ ID NO: 2725 - protein, 6 aa, synthetic construct
PAEYWD

SEQ ID NO: 2726 - protein, 6 aa, synthetic construct
PAEYWE

SEQ ID NO: 2727 - protein, 6 aa, synthetic construct
PAEYWF

SEQ ID NO: 2728 - protein, 6 aa, synthetic construct
PAEYWW

SEQ ID NO: 2729 - protein, 6 aa, synthetic construct
PAEYWY

SEQ ID NO: 2730 - protein, 6 aa, synthetic construct
PAEYYD

SEQ ID NO: 2731 - protein, 6 aa, synthetic construct
PAEYYE

SEQ ID NO: 2732 - protein, 6 aa, synthetic construct
PAEYYF

SEQ ID NO: 2733 - protein, 6 aa, synthetic construct
PAEYYW

SEQ ID NO: 2734 - protein, 6 aa, synthetic construct
PAEYYY

SEQ ID NO: 2735 - protein, 6 aa, synthetic construct
PAEYVD

SEQ ID NO: 2736 - protein, 6 aa, synthetic construct
PAEYVE

SEQ ID NO: 2737 - protein, 6 aa, synthetic construct
PAEYVF

SEQ ID NO: 2738 - protein, 6 aa, synthetic construct
PAEYVW

SEQ ID NO: 2739 - protein, 6 aa, synthetic construct
PAEYVY

SEQ ID NO: 2740 - protein, 6 aa, synthetic construct
PAEVAD

SEQ ID NO: 2741 - protein, 6 aa, synthetic construct
PAEVAE

SEQ ID NO: 2742 - protein, 6 aa, synthetic construct
PAEVAF

SEQ ID NO: 2743 - protein, 6 aa, synthetic construct
PAEVAW

SEQ ID NO: 2744 - protein, 6 aa, synthetic construct
PAEVAY

SEQ ID NO: 2745 - protein, 6 aa, synthetic construct
PAEVRD

SEQ ID NO: 2746 - protein, 6 aa, synthetic construct
PAEVRE

SEQ ID NO: 2747 - protein, 6 aa, synthetic construct
PAEVRF

SEQ ID NO: 2748 - protein, 6 aa, synthetic construct
PAEVRW

SEQ ID NO: 2749 - protein, 6 aa, synthetic construct
PAEVRY

SEQ ID NO: 2750 - protein, 6 aa, synthetic construct
PAEVND

SEQ ID NO: 2751 - protein, 6 aa, synthetic construct
PAEVNE

SEQ ID NO: 2752 - protein, 6 aa, synthetic construct
PAEVNF

SEQ ID NO: 2753 - protein, 6 aa, synthetic construct
PAEVNW

SEQ ID NO: 2754 - protein, 6 aa, synthetic construct
PAEVNY

SEQ ID NO: 2755 - protein, 6 aa, synthetic construct
PAEVDD

SEQ ID NO: 2756 - protein, 6 aa, synthetic construct
PAEVDE

SEQ ID NO: 2757 - protein, 6 aa, synthetic construct
PAEVDF

SEQ ID NO: 2758 - protein, 6 aa, synthetic construct
PAEVDW

SEQ ID NO: 2759 - protein, 6 aa, synthetic construct
PAEVDY

SEQ ID NO: 2760 - protein, 6 aa, synthetic construct
PAEVCD

SEQ ID NO: 2761 - protein, 6 aa, synthetic construct
PAEVCE

SEQ ID NO: 2762 - protein, 6 aa, synthetic construct
PAEVCF

SEQ ID NO: 2763 - protein, 6 aa, synthetic construct
PAEVCW

SEQ ID NO: 2764 - protein, 6 aa, synthetic construct
PAEVCY

SEQ ID NO: 2765 - protein, 6 aa, synthetic construct
PAEVQD

SEQ ID NO: 2766 - protein, 6 aa, synthetic construct
PAEVQE

SEQ ID NO: 2767 - protein, 6 aa, synthetic construct
PAEVQF

SEQ ID NO: 2768 - protein, 6 aa, synthetic construct
PAEVQW

SEQ ID NO: 2769 - protein, 6 aa, synthetic construct
PAEVQY

SEQ ID NO: 2770 - protein, 6 aa, synthetic construct
PAEVED

SEQ ID NO: 2771 - protein, 6 aa, synthetic construct
PAEVEE

SEQ ID NO: 2772 - protein, 6 aa, synthetic construct
PAEVEF

SEQ ID NO: 2773 - protein, 6 aa, synthetic construct
PAEVEW

SEQ ID NO: 2774 - protein, 6 aa, synthetic construct
PAEVEY

SEQ ID NO: 2775 - protein, 6 aa, synthetic construct
PAEVGD

SEQ ID NO: 2776 - protein, 6 aa, synthetic construct
PAEVGE

SEQ ID NO: 2777 - protein, 6 aa, synthetic construct
PAEVGF

SEQ ID NO: 2778 - protein, 6 aa, synthetic construct
PAEVGW

SEQ ID NO: 2779 - protein, 6 aa, synthetic construct
PAEVGY

SEQ ID NO: 2780 - protein, 6 aa, synthetic construct
PAEVHD

SEQ ID NO: 2781 - protein, 6 aa, synthetic construct
PAEVHE

SEQ ID NO: 2782 - protein, 6 aa, synthetic construct
PAEVHF

SEQ ID NO: 2783 - protein, 6 aa, synthetic construct
PAEVHW

SEQ ID NO: 2784 - protein, 6 aa, synthetic construct
PAEVHY

SEQ ID NO: 2785 - protein, 6 aa, synthetic construct
PAEVID

SEQ ID NO: 2786 - protein, 6 aa, synthetic construct
PAEVIE

SEQ ID NO: 2787 - protein, 6 aa, synthetic construct
PAEVIF

SEQ ID NO: 2788 - protein, 6 aa, synthetic construct
PAEVIW

SEQ ID NO: 2789 - protein, 6 aa, synthetic construct
PAEVIY

SEQ ID NO: 2790 - protein, 6 aa, synthetic construct
PAEVLD

SEQ ID NO: 2791 - protein, 6 aa, synthetic construct
PAEVLE

SEQ ID NO: 2792 - protein, 6 aa, synthetic construct
PAEVLF

SEQ ID NO: 2793 - protein, 6 aa, synthetic construct
PAEVLW

SEQ ID NO: 2794 - protein, 6 aa, synthetic construct
PAEVLY

SEQ ID NO: 2795 - protein, 6 aa, synthetic construct
PAEVKD

SEQ ID NO: 2796 - protein, 6 aa, synthetic construct
PAEVKE

SEQ ID NO: 2797 - protein, 6 aa, synthetic construct
PAEVKF

SEQ ID NO: 2798 - protein, 6 aa, synthetic construct
PAEVKW

SEQ ID NO: 2799 - protein, 6 aa, synthetic construct
PAEVKY

SEQ ID NO: 2800 - protein, 6 aa, synthetic construct
PAEVMD

SEQ ID NO: 2801 - protein, 6 aa, synthetic construct
PAEVME

SEQ ID NO: 2802 - protein, 6 aa, synthetic construct
PAEVMF

SEQ ID NO: 2803 - protein, 6 aa, synthetic construct
PAEVMW

SEQ ID NO: 2804 - protein, 6 aa, synthetic construct
PAEVMY

SEQ ID NO: 2805 - protein, 6 aa, synthetic construct
PAEVFD

SEQ ID NO: 2806 - protein, 6 aa, synthetic construct
PAEVFE

SEQ ID NO: 2807 - protein, 6 aa, synthetic construct
PAEVFF

SEQ ID NO: 2808 - protein, 6 aa, synthetic construct
PAEVFW

SEQ ID NO: 2809 - protein, 6 aa, synthetic construct
PAEVFY

SEQ ID NO: 2810 - protein, 6 aa, synthetic construct
PAEVPD

SEQ ID NO: 2811 - protein, 6 aa, synthetic construct
PAEVPE

SEQ ID NO: 2812 - protein, 6 aa, synthetic construct
PAEVPF

SEQ ID NO: 2813 - protein, 6 aa, synthetic construct
PAEVPW

SEQ ID NO: 2814 - protein, 6 aa, synthetic construct
PAEVPY

SEQ ID NO: 2815 - protein, 6 aa, synthetic construct
PAEVSD

SEQ ID NO: 2816 - protein, 6 aa, synthetic construct
PAEVSE

SEQ ID NO: 2817 - protein, 6 aa, synthetic construct
PAEVSF

SEQ ID NO: 2818 - protein, 6 aa, synthetic construct
PAEVSW

SEQ ID NO: 2819 - protein, 6 aa, synthetic construct
PAEVSY

SEQ ID NO: 2820 - protein, 6 aa, synthetic construct
PAEVTD

SEQ ID NO: 2821 - protein, 6 aa, synthetic construct
PAEVTE

SEQ ID NO: 2822 - protein, 6 aa, synthetic construct
PAEVTF

SEQ ID NO: 2823 - protein, 6 aa, synthetic construct
PAEVTW

SEQ ID NO: 2824 - protein, 6 aa, synthetic construct
PAEVTY

SEQ ID NO: 2825 - protein, 6 aa, synthetic construct
PAEVWD

SEQ ID NO: 2826 - protein, 6 aa, synthetic construct
PAEVWE

SEQ ID NO: 2827 - protein, 6 aa, synthetic construct
PAEVWF

SEQ ID NO: 2828 - protein, 6 aa, synthetic construct
PAEVWW

SEQ ID NO: 2829 - protein, 6 aa, synthetic construct
PAEVWY

SEQ ID NO: 2830 - protein, 6 aa, synthetic construct
PAEVYD

SEQ ID NO: 2831 - protein, 6 aa, synthetic construct
PAEVYE

SEQ ID NO: 2832 - protein, 6 aa, synthetic construct
PAEVYF

SEQ ID NO: 2833 - protein, 6 aa, synthetic construct
PAEVYW

SEQ ID NO: 2834 - protein, 6 aa, synthetic construct
PAEVYY

SEQ ID NO: 2835 - protein, 6 aa, synthetic construct
PAEVVD

SEQ ID NO: 2836 - protein, 6 aa, synthetic construct
PAEVVE

SEQ ID NO: 2837 - protein, 6 aa, synthetic construct
PAEVVF

SEQ ID NO: 2838 - protein, 6 aa, synthetic construct
PAEVVW

SEQ ID NO: 2839 - protein, 6 aa, synthetic construct
PAEVVY

SEQ ID NO: 2840 - protein, 6 aa, synthetic construct
PREAAD

SEQ ID NO: 2841 - protein, 6 aa, synthetic construct
PREAAE

SEQ ID NO: 2842 - protein, 6 aa, synthetic construct
PREAAF

SEQ ID NO: 2843 - protein, 6 aa, synthetic construct
PREAAW

SEQ ID NO: 2844 - protein, 6 aa, synthetic construct
PREAAY

SEQ ID NO: 2845 - protein, 6 aa, synthetic construct
PREARD

SEQ ID NO: 2846 - protein, 6 aa, synthetic construct
PREARE

SEQ ID NO: 2847 - protein, 6 aa, synthetic construct
PREARF

SEQ ID NO: 2848 - protein, 6 aa, synthetic construct
PREARW

SEQ ID NO: 2849 - protein, 6 aa, synthetic construct
PREARY

SEQ ID NO: 2850 - protein, 6 aa, synthetic construct
PREAND

SEQ ID NO: 2851 - protein, 6 aa, synthetic construct
PREANE

SEQ ID NO: 2852 - protein, 6 aa, synthetic construct
PREANF

SEQ ID NO: 2853 - protein, 6 aa, synthetic construct
PREANW

SEQ ID NO: 2854 - protein, 6 aa, synthetic construct
PREANY

SEQ ID NO: 2855 - protein, 6 aa, synthetic construct
PREADD

SEQ ID NO: 2856 - protein, 6 aa, synthetic construct
PREADE

SEQ ID NO: 2857 - protein, 6 aa, synthetic construct
PREADF

SEQ ID NO: 2858 - protein, 6 aa, synthetic construct
PREADW

SEQ ID NO: 2859 - protein, 6 aa, synthetic construct
PREADY

SEQ ID NO: 2860 - protein, 6 aa, synthetic construct
PREACD

SEQ ID NO: 2861 - protein, 6 aa, synthetic construct
PREACE

SEQ ID NO: 2862 - protein, 6 aa, synthetic construct
PREACF

SEQ ID NO: 2863 - protein, 6 aa, synthetic construct
PREACW

SEQ ID NO: 2864 - protein, 6 aa, synthetic construct
PREACY

SEQ ID NO: 2865 - protein, 6 aa, synthetic construct
PREAQD

SEQ ID NO: 2866 - protein, 6 aa, synthetic construct
PREAQE

SEQ ID NO: 2867 - protein, 6 aa, synthetic construct
PREAQF

SEQ ID NO: 2868 - protein, 6 aa, synthetic construct
PREAQW

SEQ ID NO: 2869 - protein, 6 aa, synthetic construct
PREAQY

SEQ ID NO: 2870 - protein, 6 aa, synthetic construct
PREAED

SEQ ID NO: 2871 - protein, 6 aa, synthetic construct
PREAEE

SEQ ID NO: 2872 - protein, 6 aa, synthetic construct
PREAEF

SEQ ID NO: 2873 - protein, 6 aa, synthetic construct
PREAEW

SEQ ID NO: 2874 - protein, 6 aa, synthetic construct
PREAEY

SEQ ID NO: 2875 - protein, 6 aa, synthetic construct
PREAGD

SEQ ID NO: 2876 - protein, 6 aa, synthetic construct
PREAGE

SEQ ID NO: 2877 - protein, 6 aa, synthetic construct
PREAGF

SEQ ID NO: 2878 - protein, 6 aa, synthetic construct
PREAGW

SEQ ID NO: 2879 - protein, 6 aa, synthetic construct
PREAGY

SEQ ID NO: 2880 - protein, 6 aa, synthetic construct
PREAHD

SEQ ID NO: 2881 - protein, 6 aa, synthetic construct
PREAHE

SEQ ID NO: 2882 - protein, 6 aa, synthetic construct
PREAHF

SEQ ID NO: 2883 - protein, 6 aa, synthetic construct
PREAHW

SEQ ID NO: 2884 - protein, 6 aa, synthetic construct
PREAHY

SEQ ID NO: 2885 - protein, 6 aa, synthetic construct
PREAID

SEQ ID NO: 2886 - protein, 6 aa, synthetic construct
PREAIE

SEQ ID NO: 2887 - protein, 6 aa, synthetic construct
PREAIF

SEQ ID NO: 2888 - protein, 6 aa, synthetic construct
PREAIW

SEQ ID NO: 2889 - protein, 6 aa, synthetic construct
PREAIY

SEQ ID NO: 2890 - protein, 6 aa, synthetic construct
PREALD

SEQ ID NO: 2891 - protein, 6 aa, synthetic construct
PREALE

SEQ ID NO: 2892 - protein, 6 aa, synthetic construct
PREALF

SEQ ID NO: 2893 - protein, 6 aa, synthetic construct
PREALW

SEQ ID NO: 2894 - protein, 6 aa, synthetic construct
PREALY

SEQ ID NO: 2895 - protein, 6 aa, synthetic construct
PREAKD

SEQ ID NO: 2896 - protein, 6 aa, synthetic construct
PREAKE

SEQ ID NO: 2897 - protein, 6 aa, synthetic construct
PREAKF

SEQ ID NO: 2898 - protein, 6 aa, synthetic construct
PREAKW

SEQ ID NO: 2899 - protein, 6 aa, synthetic construct
PREAKY

SEQ ID NO: 2900 - protein, 6 aa, synthetic construct
PREAMD

SEQ ID NO: 2901 - protein, 6 aa, synthetic construct
PREAME

SEQ ID NO: 2902 - protein, 6 aa, synthetic construct
PREAMF

SEQ ID NO: 2903 - protein, 6 aa, synthetic construct
PREAMW

SEQ ID NO: 2904 - protein, 6 aa, synthetic construct
PREAMY

SEQ ID NO: 2905 - protein, 6 aa, synthetic construct
PREAFD

SEQ ID NO: 2906 - protein, 6 aa, synthetic construct
PREAFE

SEQ ID NO: 2907 - protein, 6 aa, synthetic construct
PREAFF

SEQ ID NO: 2908 - protein, 6 aa, synthetic construct
PREAFW

SEQ ID NO: 2909 - protein, 6 aa, synthetic construct
PREAFY

SEQ ID NO: 2910 - protein, 6 aa, synthetic construct
PREAPD

SEQ ID NO: 2911 - protein, 6 aa, synthetic construct
PREAPE

SEQ ID NO: 2912 - protein, 6 aa, synthetic construct
PREAPF

SEQ ID NO: 2913 - protein, 6 aa, synthetic construct
PREAPW

SEQ ID NO: 2914 - protein, 6 aa, synthetic construct
PREAPY

SEQ ID NO: 2915 - protein, 6 aa, synthetic construct
PREASD

SEQ ID NO: 2916 - protein, 6 aa, synthetic construct
PREASE

SEQ ID NO: 2917 - protein, 6 aa, synthetic construct
PREASF

SEQ ID NO: 2918 - protein, 6 aa, synthetic construct
PREASW

SEQ ID NO: 2919 - protein, 6 aa, synthetic construct
PREASY

SEQ ID NO: 2920 - protein, 6 aa, synthetic construct
PREATD

SEQ ID NO: 2921 - protein, 6 aa, synthetic construct
PREATE

SEQ ID NO: 2922 - protein, 6 aa, synthetic construct
PREATF

SEQ ID NO: 2923 - protein, 6 aa, synthetic construct
PREATW

SEQ ID NO: 2924 - protein, 6 aa, synthetic construct
PREATY

SEQ ID NO: 2925 - protein, 6 aa, synthetic construct
PREAWD

SEQ ID NO: 2926 - protein, 6 aa, synthetic construct
PREAWE

SEQ ID NO: 2927 - protein, 6 aa, synthetic construct
PREAWF

SEQ ID NO: 2928 - protein, 6 aa, synthetic construct
PREAWW

SEQ ID NO: 2929 - protein, 6 aa, synthetic construct
PREAWY

SEQ ID NO: 2930 - protein, 6 aa, synthetic construct
PREAYD

SEQ ID NO: 2931 - protein, 6 aa, synthetic construct
PREAYE

SEQ ID NO: 2932 - protein, 6 aa, synthetic construct
PREAYF

SEQ ID NO: 2933 - protein, 6 aa, synthetic construct
PREAYW

SEQ ID NO: 2934 - protein, 6 aa, synthetic construct
PREAYY

SEQ ID NO: 2935 - protein, 6 aa, synthetic construct
PREAVD

SEQ ID NO: 2936 - protein, 6 aa, synthetic construct
PREAVE

SEQ ID NO: 2937 - protein, 6 aa, synthetic construct
PREAVF

SEQ ID NO: 2938 - protein, 6 aa, synthetic construct
PREAVW

SEQ ID NO: 2939 - protein, 6 aa, synthetic construct
PREAVY

SEQ ID NO: 2940 - protein, 6 aa, synthetic construct
PRERAD

SEQ ID NO: 2941 - protein, 6 aa, synthetic construct
PRERAE

SEQ ID NO: 2942 - protein, 6 aa, synthetic construct
PRERAF

SEQ ID NO: 2943 - protein, 6 aa, synthetic construct
PRERAW

SEQ ID NO: 2944 - protein, 6 aa, synthetic construct
PRERAY

SEQ ID NO: 2945 - protein, 6 aa, synthetic construct
PRERRD

SEQ ID NO: 2946 - protein, 6 aa, synthetic construct
PRERRE

SEQ ID NO: 2947 - protein, 6 aa, synthetic construct
PRERRF

SEQ ID NO: 2948 - protein, 6 aa, synthetic construct
PRERRW

SEQ ID NO: 2949 - protein, 6 aa, synthetic construct
PRERRY

SEQ ID NO: 2950 - protein, 6 aa, synthetic construct
PRERND

SEQ ID NO: 2951 - protein, 6 aa, synthetic construct
PRERNE

SEQ ID NO: 2952 - protein, 6 aa, synthetic construct
PRERNF

SEQ ID NO: 2953 - protein, 6 aa, synthetic construct
PRERNW

SEQ ID NO: 2954 - protein, 6 aa, synthetic construct
PRERNY

SEQ ID NO: 2955 - protein, 6 aa, synthetic construct
PRERDD

SEQ ID NO: 2956 - protein, 6 aa, synthetic construct
PRERDE

SEQ ID NO: 2957 - protein, 6 aa, synthetic construct
PRERDF

SEQ ID NO: 2958 - protein, 6 aa, synthetic construct
PRERDW

SEQ ID NO: 2959 - protein, 6 aa, synthetic construct
PRERDY

SEQ ID NO: 2960 - protein, 6 aa, synthetic construct
PRERCD

SEQ ID NO: 2961 - protein, 6 aa, synthetic construct
PRERCE

SEQ ID NO: 2962 - protein, 6 aa, synthetic construct
PRERCF

SEQ ID NO: 2963 - protein, 6 aa, synthetic construct
PRERCW

SEQ ID NO: 2964 - protein, 6 aa, synthetic construct
PRERCY

SEQ ID NO: 2965 - protein, 6 aa, synthetic construct
PRERQD

SEQ ID NO: 2966 - protein, 6 aa, synthetic construct
PRERQE

SEQ ID NO: 2967 - protein, 6 aa, synthetic construct
PRERQF

SEQ ID NO: 2968 - protein, 6 aa, synthetic construct
PRERQW

SEQ ID NO: 2969 - protein, 6 aa, synthetic construct
PRERQY

SEQ ID NO: 2970 - protein, 6 aa, synthetic construct
PRERED

SEQ ID NO: 2971 - protein, 6 aa, synthetic construct
PREREE

SEQ ID NO: 2972 - protein, 6 aa, synthetic construct
PREREF

SEQ ID NO: 2973 - protein, 6 aa, synthetic construct
PREREW

SEQ ID NO: 2974 - protein, 6 aa, synthetic construct
PREREY

SEQ ID NO: 2975 - protein, 6 aa, synthetic construct
PRERGD

SEQ ID NO: 2976 - protein, 6 aa, synthetic construct
PRERGE

SEQ ID NO: 2977 - protein, 6 aa, synthetic construct
PRERGF

SEQ ID NO: 2978 - protein, 6 aa, synthetic construct
PRERGW

SEQ ID NO: 2979 - protein, 6 aa, synthetic construct
PRERGY

SEQ ID NO: 2980 - protein, 6 aa, synthetic construct
PRERHD

SEQ ID NO: 2981 - protein, 6 aa, synthetic construct
PRERHE

SEQ ID NO: 2982 - protein, 6 aa, synthetic construct
PRERHF

SEQ ID NO: 2983 - protein, 6 aa, synthetic construct
PRERHW

SEQ ID NO: 2984 - protein, 6 aa, synthetic construct
PRERHY

SEQ ID NO: 2985 - protein, 6 aa, synthetic construct
PRERID

SEQ ID NO: 2986 - protein, 6 aa, synthetic construct
PRERIE

SEQ ID NO: 2987 - protein, 6 aa, synthetic construct
PRERIF

SEQ ID NO: 2988 - protein, 6 aa, synthetic construct
PRERIW

SEQ ID NO: 2989 - protein, 6 aa, synthetic construct
PRERIY

SEQ ID NO: 2990 - protein, 6 aa, synthetic construct
PRERLD

SEQ ID NO: 2991 - protein, 6 aa, synthetic construct
PRERLE

SEQ ID NO: 2992 - protein, 6 aa, synthetic construct
PRERLF

SEQ ID NO: 2993 - protein, 6 aa, synthetic construct
PRERLW

SEQ ID NO: 2994 - protein, 6 aa, synthetic construct
PRERLY

SEQ ID NO: 2995 - protein, 6 aa, synthetic construct
PRERKD

SEQ ID NO: 2996 - protein, 6 aa, synthetic construct
PRERKE

SEQ ID NO: 2997 - protein, 6 aa, synthetic construct
PRERKF

SEQ ID NO: 2998 - protein, 6 aa, synthetic construct
PRERKW

SEQ ID NO: 2999 - protein, 6 aa, synthetic construct
PRERKY

SEQ ID NO: 3000 - protein, 6 aa, synthetic construct
PRERMD

SEQ ID NO: 3001 - protein, 6 aa, synthetic construct
PRERME

SEQ ID NO: 3002 - protein, 6 aa, synthetic construct
PRERMF

SEQ ID NO: 3003 - protein, 6 aa, synthetic construct
PRERMW

SEQ ID NO: 3004 - protein, 6 aa, synthetic construct
PRERMY

SEQ ID NO: 3005 - protein, 6 aa, synthetic construct
PRERFD

SEQ ID NO: 3006 - protein, 6 aa, synthetic construct
PRERFE

SEQ ID NO: 3007 - protein, 6 aa, synthetic construct
PRERFF

SEQ ID NO: 3008 - protein, 6 aa, synthetic construct
PRERFW

SEQ ID NO: 3009 - protein, 6 aa, synthetic construct
PRERFY

SEQ ID NO: 3010 - protein, 6 aa, synthetic construct
PRERPD

SEQ ID NO: 3011 - protein, 6 aa, synthetic construct
PRERPE

SEQ ID NO: 3012 - protein, 6 aa, synthetic construct
PRERPF

SEQ ID NO: 3013 - protein, 6 aa, synthetic construct
PRERPW

SEQ ID NO: 3014 - protein, 6 aa, synthetic construct
PRERPY

SEQ ID NO: 3015 - protein, 6 aa, synthetic construct
PRERSD

SEQ ID NO: 3016 - protein, 6 aa, synthetic construct
PRERSE

SEQ ID NO: 3017 - protein, 6 aa, synthetic construct
PRERSF

SEQ ID NO: 3018 - protein, 6 aa, synthetic construct
PRERSW

SEQ ID NO: 3019 - protein, 6 aa, synthetic construct
PRERSY

SEQ ID NO: 3020 - protein, 6 aa, synthetic construct
PRERTD

SEQ ID NO: 3021 - protein, 6 aa, synthetic construct
PRERTE

SEQ ID NO: 3022 - protein, 6 aa, synthetic construct
PRERTF

SEQ ID NO: 3023 - protein, 6 aa, synthetic construct
PRERTW

SEQ ID NO: 3024 - protein, 6 aa, synthetic construct
PRERTY

SEQ ID NO: 3025 - protein, 6 aa, synthetic construct
PRERWD

SEQ ID NO: 3026 - protein, 6 aa, synthetic construct
PRERWE

SEQ ID NO: 3027 - protein, 6 aa, synthetic construct
PRERWF

SEQ ID NO: 3028 - protein, 6 aa, synthetic construct
PRERWW

SEQ ID NO: 3029 - protein, 6 aa, synthetic construct
PRERWY

SEQ ID NO: 3030 - protein, 6 aa, synthetic construct
PRERYD

SEQ ID NO: 3031 - protein, 6 aa, synthetic construct
PRERYE

SEQ ID NO: 3032 - protein, 6 aa, synthetic construct
PRERYF

SEQ ID NO: 3033 - protein, 6 aa, synthetic construct
PRERYW

SEQ ID NO: 3034 - protein, 6 aa, synthetic construct
PRERYY

SEQ ID NO: 3035 - protein, 6 aa, synthetic construct
PRERVD

SEQ ID NO: 3036 - protein, 6 aa, synthetic construct
PRERVE

SEQ ID NO: 3037 - protein, 6 aa, synthetic construct
PRERVF

SEQ ID NO: 3038 - protein, 6 aa, synthetic construct
PRERVW

SEQ ID NO: 3039 - protein, 6 aa, synthetic construct
PRERVY

SEQ ID NO: 3040 - protein, 6 aa, synthetic construct
PRENAD

SEQ ID NO: 3041 - protein, 6 aa, synthetic construct
PRENAE

SEQ ID NO: 3042 - protein, 6 aa, synthetic construct
PRENAF

SEQ ID NO: 3043 - protein, 6 aa, synthetic construct
PRENAW

SEQ ID NO: 3044 - protein, 6 aa, synthetic construct
PRENAY

SEQ ID NO: 3045 - protein, 6 aa, synthetic construct
PRENRD

SEQ ID NO: 3046 - protein, 6 aa, synthetic construct
PRENRE

SEQ ID NO: 3047 - protein, 6 aa, synthetic construct
PRENRF

SEQ ID NO: 3048 - protein, 6 aa, synthetic construct
PRENRW

SEQ ID NO: 3049 - protein, 6 aa, synthetic construct
PRENRY

SEQ ID NO: 3050 - protein, 6 aa, synthetic construct
PRENND

SEQ ID NO: 3051 - protein, 6 aa, synthetic construct
PRENNE

SEQ ID NO: 3052 - protein, 6 aa, synthetic construct
PRENNF

SEQ ID NO: 3053 - protein, 6 aa, synthetic construct
PRENNW

SEQ ID NO: 3054 - protein, 6 aa, synthetic construct
PRENNY

SEQ ID NO: 3055 - protein, 6 aa, synthetic construct
PRENDD

SEQ ID NO: 3056 - protein, 6 aa, synthetic construct
PRENDE

SEQ ID NO: 3057 - protein, 6 aa, synthetic construct
PRENDF

SEQ ID NO: 3058 - protein, 6 aa, synthetic construct
PRENDW

SEQ ID NO: 3059 - protein, 6 aa, synthetic construct
PRENDY

SEQ ID NO: 3060 - protein, 6 aa, synthetic construct
PRENCD

SEQ ID NO: 3061 - protein, 6 aa, synthetic construct
PRENCE

SEQ ID NO: 3062 - protein, 6 aa, synthetic construct
PRENCF

SEQ ID NO: 3063 - protein, 6 aa, synthetic construct
PRENCW

SEQ ID NO: 3064 - protein, 6 aa, synthetic construct
PRENCY

SEQ ID NO: 3065 - protein, 6 aa, synthetic construct
PRENQD

SEQ ID NO: 3066 - protein, 6 aa, synthetic construct
PRENQE

SEQ ID NO: 3067 - protein, 6 aa, synthetic construct
PRENQF

SEQ ID NO: 3068 - protein, 6 aa, synthetic construct
PRENQW

SEQ ID NO: 3069 - protein, 6 aa, synthetic construct
PRENQY

SEQ ID NO: 3070 - protein, 6 aa, synthetic construct
PRENED

SEQ ID NO: 3071 - protein, 6 aa, synthetic construct
PRENEE

SEQ ID NO: 3072 - protein, 6 aa, synthetic construct
PRENEF

SEQ ID NO: 3073 - protein, 6 aa, synthetic construct
PRENEW

SEQ ID NO: 3074 - protein, 6 aa, synthetic construct
PRENEY

SEQ ID NO: 3075 - protein, 6 aa, synthetic construct
PRENGD

SEQ ID NO: 3076 - protein, 6 aa, synthetic construct
PRENGE

SEQ ID NO: 3077 - protein, 6 aa, synthetic construct
PRENGF

SEQ ID NO: 3078 - protein, 6 aa, synthetic construct
PRENGW

SEQ ID NO: 3079 - protein, 6 aa, synthetic construct
PRENGY

SEQ ID NO: 3080 - protein, 6 aa, synthetic construct
PRENHD

SEQ ID NO: 3081 - protein, 6 aa, synthetic construct
PRENHE

SEQ ID NO: 3082 - protein, 6 aa, synthetic construct
PRENHF

SEQ ID NO: 3083 - protein, 6 aa, synthetic construct
PRENHW

SEQ ID NO: 3084 - protein, 6 aa, synthetic construct
PRENHY

SEQ ID NO: 3085 - protein, 6 aa, synthetic construct
PRENID

SEQ ID NO: 3086 - protein, 6 aa, synthetic construct
PRENIE

SEQ ID NO: 3087 - protein, 6 aa, synthetic construct
PRENIF

SEQ ID NO: 3088 - protein, 6 aa, synthetic construct
PRENIW

SEQ ID NO: 3089 - protein, 6 aa, synthetic construct
PRENIY

SEQ ID NO: 3090 - protein, 6 aa, synthetic construct
PRENLD

SEQ ID NO: 3091 - protein, 6 aa, synthetic construct
PRENLE

SEQ ID NO: 3092 - protein, 6 aa, synthetic construct
PRENLF

SEQ ID NO: 3093 - protein, 6 aa, synthetic construct
PRENLW

SEQ ID NO: 3094 - protein, 6 aa, synthetic construct
PRENLY

SEQ ID NO: 3095 - protein, 6 aa, synthetic construct
PRENKD

SEQ ID NO: 3096 - protein, 6 aa, synthetic construct
PRENKE

SEQ ID NO: 3097 - protein, 6 aa, synthetic construct
PRENKF

SEQ ID NO: 3098 - protein, 6 aa, synthetic construct
PRENKW

SEQ ID NO: 3099 - protein, 6 aa, synthetic construct
PRENKY

SEQ ID NO: 3100 - protein, 6 aa, synthetic construct
PRENMD

SEQ ID NO: 3101 - protein, 6 aa, synthetic construct
PRENME

SEQ ID NO: 3102 - protein, 6 aa, synthetic construct
PRENMF

SEQ ID NO: 3103 - protein, 6 aa, synthetic construct
PRENMW

SEQ ID NO: 3104 - protein, 6 aa, synthetic construct
PRENMY

SEQ ID NO: 3105 - protein, 6 aa, synthetic construct
PRENFD

SEQ ID NO: 3106 - protein, 6 aa, synthetic construct
PRENFE

SEQ ID NO: 3107 - protein, 6 aa, synthetic construct
PRENFF

SEQ ID NO: 3108 - protein, 6 aa, synthetic construct
PRENFW

SEQ ID NO: 3109 - protein, 6 aa, synthetic construct
PRENFY

SEQ ID NO: 3110 - protein, 6 aa, synthetic construct
PRENPD

SEQ ID NO: 3111 - protein, 6 aa, synthetic construct
PRENPE

SEQ ID NO: 3112 - protein, 6 aa, synthetic construct
PRENPF

SEQ ID NO: 3113 - protein, 6 aa, synthetic construct
PRENPW

SEQ ID NO: 3114 - protein, 6 aa, synthetic construct
PRENPY

SEQ ID NO: 3115 - protein, 6 aa, synthetic construct
PRENSD

SEQ ID NO: 3116 - protein, 6 aa, synthetic construct
PRENSE

SEQ ID NO: 3117 - protein, 6 aa, synthetic construct
PRENSF

SEQ ID NO: 3118 - protein, 6 aa, synthetic construct
PRENSW

SEQ ID NO: 3119 - protein, 6 aa, synthetic construct
PRENSY

SEQ ID NO: 3120 - protein, 6 aa, synthetic construct
PRENTD

SEQ ID NO: 3121 - protein, 6 aa, synthetic construct
PRENTE

SEQ ID NO: 3122 - protein, 6 aa, synthetic construct
PRENTF

SEQ ID NO: 3123 - protein, 6 aa, synthetic construct
PRENTW

SEQ ID NO: 3124 - protein, 6 aa, synthetic construct
PRENTY

SEQ ID NO: 3125 - protein, 6 aa, synthetic construct
PRENWD

SEQ ID NO: 3126 - protein, 6 aa, synthetic construct
PRENWE

SEQ ID NO: 3127 - protein, 6 aa, synthetic construct
PRENWF

SEQ ID NO: 3128 - protein, 6 aa, synthetic construct
PRENWW

SEQ ID NO: 3129 - protein, 6 aa, synthetic construct
PRENWY

SEQ ID NO: 3130 - protein, 6 aa, synthetic construct
PRENYD

SEQ ID NO: 3131 - protein, 6 aa, synthetic construct
PRENYE

SEQ ID NO: 3132 - protein, 6 aa, synthetic construct
PRENYF

SEQ ID NO: 3133 - protein, 6 aa, synthetic construct
PRENYW

SEQ ID NO: 3134 - protein, 6 aa, synthetic construct
PRENYY

SEQ ID NO: 3135 - protein, 6 aa, synthetic construct
PRENVD

SEQ ID NO: 3136 - protein, 6 aa, synthetic construct
PRENVE

SEQ ID NO: 3137 - protein, 6 aa, synthetic construct
PRENVF

SEQ ID NO: 3138 - protein, 6 aa, synthetic construct
PRENVW

SEQ ID NO: 3139 - protein, 6 aa, synthetic construct
PRENVY

SEQ ID NO: 3140 - protein, 6 aa, synthetic construct
PREDAD

SEQ ID NO: 3141 - protein, 6 aa, synthetic construct
PREDAE

SEQ ID NO: 3142 - protein, 6 aa, synthetic construct
PREDAF

SEQ ID NO: 3143 - protein, 6 aa, synthetic construct
PREDAW

SEQ ID NO: 3144 - protein, 6 aa, synthetic construct
PREDAY

SEQ ID NO: 3145 - protein, 6 aa, synthetic construct
PREDRD

SEQ ID NO: 3146 - protein, 6 aa, synthetic construct
PREDRE

SEQ ID NO: 3147 - protein, 6 aa, synthetic construct
PREDRF

SEQ ID NO: 3148 - protein, 6 aa, synthetic construct
PREDRW

SEQ ID NO: 3149 - protein, 6 aa, synthetic construct
PREDRY

SEQ ID NO: 3150 - protein, 6 aa, synthetic construct
PREDND

SEQ ID NO: 3151 - protein, 6 aa, synthetic construct
PREDNE

SEQ ID NO: 3152 - protein, 6 aa, synthetic construct
PREDNF

SEQ ID NO: 3153 - protein, 6 aa, synthetic construct
PREDNW

SEQ ID NO: 3154 - protein, 6 aa, synthetic construct
PREDNY

SEQ ID NO: 3155 - protein, 6 aa, synthetic construct
PREDDD

SEQ ID NO: 3156 - protein, 6 aa, synthetic construct
PREDDE

SEQ ID NO: 3157 - protein, 6 aa, synthetic construct
PREDDF

SEQ ID NO: 3158 - protein, 6 aa, synthetic construct
PREDDW

SEQ ID NO: 3159 - protein, 6 aa, synthetic construct
PREDDY

SEQ ID NO: 3160 - protein, 6 aa, synthetic construct
PREDCD

SEQ ID NO: 3161 - protein, 6 aa, synthetic construct
PREDCE

SEQ ID NO: 3162 - protein, 6 aa, synthetic construct
PREDCF

SEQ ID NO: 3163 - protein, 6 aa, synthetic construct
PREDCW

SEQ ID NO: 3164 - protein, 6 aa, synthetic construct
PREDCY

SEQ ID NO: 3165 - protein, 6 aa, synthetic construct
PREDQD

SEQ ID NO: 3166 - protein, 6 aa, synthetic construct
PREDQE

SEQ ID NO: 3167 - protein, 6 aa, synthetic construct
PREDQF

SEQ ID NO: 3168 - protein, 6 aa, synthetic construct
PREDQW

SEQ ID NO: 3169 - protein, 6 aa, synthetic construct
PREDQY

SEQ ID NO: 3170 - protein, 6 aa, synthetic construct
PREDED

SEQ ID NO: 3171 - protein, 6 aa, synthetic construct
PREDEE

SEQ ID NO: 3172 - protein, 6 aa, synthetic construct
PREDEF

SEQ ID NO: 3173 - protein, 6 aa, synthetic construct
PREDEW

SEQ ID NO: 3174 - protein, 6 aa, synthetic construct
PREDEY

SEQ ID NO: 3175 - protein, 6 aa, synthetic construct
PREDGD

SEQ ID NO: 3176 - protein, 6 aa, synthetic construct
PREDGE

SEQ ID NO: 3177 - protein, 6 aa, synthetic construct
PREDGF

SEQ ID NO: 3178 - protein, 6 aa, synthetic construct
PREDGW

SEQ ID NO: 3179 - protein, 6 aa, synthetic construct
PREDGY

SEQ ID NO: 3180 - protein, 6 aa, synthetic construct
PREDHD

SEQ ID NO: 3181 - protein, 6 aa, synthetic construct
PREDHE

SEQ ID NO: 3182 - protein, 6 aa, synthetic construct
PREDHF

SEQ ID NO: 3183 - protein, 6 aa, synthetic construct
PREDHW

SEQ ID NO: 3184 - protein, 6 aa, synthetic construct
PREDHY

SEQ ID NO: 3185 - protein, 6 aa, synthetic construct
PREDID

SEQ ID NO: 3186 - protein, 6 aa, synthetic construct
PREDIE

SEQ ID NO: 3187 - protein, 6 aa, synthetic construct
PREDIF

SEQ ID NO: 3188 - protein, 6 aa, synthetic construct
PREDIW

SEQ ID NO: 3189 - protein, 6 aa, synthetic construct
PREDIY

SEQ ID NO: 3190 - protein, 6 aa, synthetic construct
PREDLD

SEQ ID NO: 3191 - protein, 6 aa, synthetic construct
PREDLE

SEQ ID NO: 3192 - protein, 6 aa, synthetic construct
PREDLF

SEQ ID NO: 3193 - protein, 6 aa, synthetic construct
PREDLW

SEQ ID NO: 3194 - protein, 6 aa, synthetic construct
PREDLY

SEQ ID NO: 3195 - protein, 6 aa, synthetic construct
PREDKD

SEQ ID NO: 3196 - protein, 6 aa, synthetic construct
PREDKE

SEQ ID NO: 3197 - protein, 6 aa, synthetic construct
PREDKF

SEQ ID NO: 3198 - protein, 6 aa, synthetic construct
PREDKW

SEQ ID NO: 3199 - protein, 6 aa, synthetic construct
PREDKY

SEQ ID NO: 3200 - protein, 6 aa, synthetic construct
PREDMD

SEQ ID NO: 3201 - protein, 6 aa, synthetic construct
PREDME

SEQ ID NO: 3202 - protein, 6 aa, synthetic construct
PREDMF

SEQ ID NO: 3203 - protein, 6 aa, synthetic construct
PREDMW

SEQ ID NO: 3204 - protein, 6 aa, synthetic construct
PREDMY

SEQ ID NO: 3205 - protein, 6 aa, synthetic construct
PREDFD

SEQ ID NO: 3206 - protein, 6 aa, synthetic construct
PREDFE

SEQ ID NO: 3207 - protein, 6 aa, synthetic construct
PREDFF

SEQ ID NO: 3208 - protein, 6 aa, synthetic construct
PREDFW

SEQ ID NO: 3209 - protein, 6 aa, synthetic construct
PREDFY

SEQ ID NO: 3210 - protein, 6 aa, synthetic construct
PREDPD

SEQ ID NO: 3211 - protein, 6 aa, synthetic construct
PREDPE

SEQ ID NO: 3212 - protein, 6 aa, synthetic construct
PREDPF

SEQ ID NO: 3213 - protein, 6 aa, synthetic construct
PREDPW

SEQ ID NO: 3214 - protein, 6 aa, synthetic construct
PREDPY

SEQ ID NO: 3215 - protein, 6 aa, synthetic construct
PREDSD

SEQ ID NO: 3216 - protein, 6 aa, synthetic construct
PREDSE

SEQ ID NO: 3217 - protein, 6 aa, synthetic construct
PREDSF

SEQ ID NO: 3218 - protein, 6 aa, synthetic construct
PREDSW

SEQ ID NO: 3219 - protein, 6 aa, synthetic construct
PREDSY

SEQ ID NO: 3220 - protein, 6 aa, synthetic construct
PREDTD

SEQ ID NO: 3221 - protein, 6 aa, synthetic construct
PREDTE

SEQ ID NO: 3222 - protein, 6 aa, synthetic construct
PREDTF

SEQ ID NO: 3223 - protein, 6 aa, synthetic construct
PREDTW

SEQ ID NO: 3224 - protein, 6 aa, synthetic construct
PREDTY

SEQ ID NO: 3225 - protein, 6 aa, synthetic construct
PREDWD

SEQ ID NO: 3226 - protein, 6 aa, synthetic construct
PREDWE

SEQ ID NO: 3227 - protein, 6 aa, synthetic construct
PREDWF

SEQ ID NO: 3228 - protein, 6 aa, synthetic construct
PREDWW

SEQ ID NO: 3229 - protein, 6 aa, synthetic construct
PREDWY

SEQ ID NO: 3230 - protein, 6 aa, synthetic construct
PREDYD

SEQ ID NO: 3231 - protein, 6 aa, synthetic construct
PREDYE

SEQ ID NO: 3232 - protein, 6 aa, synthetic construct
PREDYF

SEQ ID NO: 3233 - protein, 6 aa, synthetic construct
PREDYW

SEQ ID NO: 3234 - protein, 6 aa, synthetic construct
PREDYY

SEQ ID NO: 3235 - protein, 6 aa, synthetic construct
PREDVD

SEQ ID NO: 3236 - protein, 6 aa, synthetic construct
PREDVE

SEQ ID NO: 3237 - protein, 6 aa, synthetic construct
PREDVF

SEQ ID NO: 3238 - protein, 6 aa, synthetic construct
PREDVW

SEQ ID NO: 3239 - protein, 6 aa, synthetic construct
PREDVY

SEQ ID NO: 3240 - protein, 6 aa, synthetic construct
PRECAD

SEQ ID NO: 3241 - protein, 6 aa, synthetic construct
PRECAE

SEQ ID NO: 3242 - protein, 6 aa, synthetic construct
PRECAF

SEQ ID NO: 3243 - protein, 6 aa, synthetic construct
PRECAW

SEQ ID NO: 3244 - protein, 6 aa, synthetic construct
PRECAY

SEQ ID NO: 3245 - protein, 6 aa, synthetic construct
PRECRD

SEQ ID NO: 3246 - protein, 6 aa, synthetic construct
PRECRE

SEQ ID NO: 3247 - protein, 6 aa, synthetic construct
PRECRF

SEQ ID NO: 3248 - protein, 6 aa, synthetic construct
PRECRW

SEQ ID NO: 3249 - protein, 6 aa, synthetic construct
PRECRY

SEQ ID NO: 3250 - protein, 6 aa, synthetic construct
PRECND

SEQ ID NO: 3251 - protein, 6 aa, synthetic construct
PRECNE

SEQ ID NO: 3252 - protein, 6 aa, synthetic construct
PRECNF

SEQ ID NO: 3253 - protein, 6 aa, synthetic construct
PRECNW

SEQ ID NO: 3254 - protein, 6 aa, synthetic construct
PRECNY

SEQ ID NO: 3255 - protein, 6 aa, synthetic construct
PRECDD

SEQ ID NO: 3256 - protein, 6 aa, synthetic construct
PRECDE

SEQ ID NO: 3257 - protein, 6 aa, synthetic construct
PRECDF

SEQ ID NO: 3258 - protein, 6 aa, synthetic construct
PRECDW

SEQ ID NO: 3259 - protein, 6 aa, synthetic construct
PRECDY

SEQ ID NO: 3260 - protein, 6 aa, synthetic construct
PRECCD

SEQ ID NO: 3261 - protein, 6 aa, synthetic construct
PRECCE

SEQ ID NO: 3262 - protein, 6 aa, synthetic construct
PRECCF

SEQ ID NO: 3263 - protein, 6 aa, synthetic construct
PRECCW

SEQ ID NO: 3264 - protein, 6 aa, synthetic construct
PRECCY

SEQ ID NO: 3265 - protein, 6 aa, synthetic construct
PRECQD

SEQ ID NO: 3266 - protein, 6 aa, synthetic construct
PRECQE

SEQ ID NO: 3267 - protein, 6 aa, synthetic construct
PRECQF

SEQ ID NO: 3268 - protein, 6 aa, synthetic construct
PRECQW

SEQ ID NO: 3269 - protein, 6 aa, synthetic construct
PRECQY

SEQ ID NO: 3270 - protein, 6 aa, synthetic construct
PRECED

SEQ ID NO: 3271 - protein, 6 aa, synthetic construct
PRECEE

SEQ ID NO: 3272 - protein, 6 aa, synthetic construct
PRECEF

SEQ ID NO: 3273 - protein, 6 aa, synthetic construct
PRECEW

SEQ ID NO: 3274 - protein, 6 aa, synthetic construct
PRECEY

SEQ ID NO: 3275 - protein, 6 aa, synthetic construct
PRECGD

SEQ ID NO: 3276 - protein, 6 aa, synthetic construct
PRECGE

SEQ ID NO: 3277 - protein, 6 aa, synthetic construct
PRECGF

SEQ ID NO: 3278 - protein, 6 aa, synthetic construct
PRECGW

SEQ ID NO: 3279 - protein, 6 aa, synthetic construct
PRECGY

SEQ ID NO: 3280 - protein, 6 aa, synthetic construct
PRECHD

SEQ ID NO: 3281 - protein, 6 aa, synthetic construct
PRECHE

SEQ ID NO: 3282 - protein, 6 aa, synthetic construct
PRECHF

SEQ ID NO: 3283 - protein, 6 aa, synthetic construct
PRECHW

SEQ ID NO: 3284 - protein, 6 aa, synthetic construct
PRECHY

SEQ ID NO: 3285 - protein, 6 aa, synthetic construct
PRECID

SEQ ID NO: 3286 - protein, 6 aa, synthetic construct
PRECIE

SEQ ID NO: 3287 - protein, 6 aa, synthetic construct
PRECIF

SEQ ID NO: 3288 - protein, 6 aa, synthetic construct
PRECIW

SEQ ID NO: 3289 - protein, 6 aa, synthetic construct
PRECIY

SEQ ID NO: 3290 - protein, 6 aa, synthetic construct
PRECLD

SEQ ID NO: 3291 - protein, 6 aa, synthetic construct
PRECLE

SEQ ID NO: 3292 - protein, 6 aa, synthetic construct
PRECLF

SEQ ID NO: 3293 - protein, 6 aa, synthetic construct
PRECLW

SEQ ID NO: 3294 - protein, 6 aa, synthetic construct
PRECLY

SEQ ID NO: 3295 - protein, 6 aa, synthetic construct
PRECKD

SEQ ID NO: 3296 - protein, 6 aa, synthetic construct
PRECKE

SEQ ID NO: 3297 - protein, 6 aa, synthetic construct
PRECKF

SEQ ID NO: 3298 - protein, 6 aa, synthetic construct
PRECKW

SEQ ID NO: 3299 - protein, 6 aa, synthetic construct
PRECKY

SEQ ID NO: 3300 - protein, 6 aa, synthetic construct
PRECMD

SEQ ID NO: 3301 - protein, 6 aa, synthetic construct
PRECME

SEQ ID NO: 3302 - protein, 6 aa, synthetic construct
PRECMF

SEQ ID NO: 3303 - protein, 6 aa, synthetic construct
PRECMW

SEQ ID NO: 3304 - protein, 6 aa, synthetic construct
PRECMY

SEQ ID NO: 3305 - protein, 6 aa, synthetic construct
PRECFD

SEQ ID NO: 3306 - protein, 6 aa, synthetic construct
PRECFE

SEQ ID NO: 3307 - protein, 6 aa, synthetic construct
PRECFF

SEQ ID NO: 3308 - protein, 6 aa, synthetic construct
PRECFW

SEQ ID NO: 3309 - protein, 6 aa, synthetic construct
PRECFY

SEQ ID NO: 3310 - protein, 6 aa, synthetic construct
PRECPD

SEQ ID NO: 3311 - protein, 6 aa, synthetic construct
PRECPE

SEQ ID NO: 3312 - protein, 6 aa, synthetic construct
PRECPF

SEQ ID NO: 3313 - protein, 6 aa, synthetic construct
PRECPW

SEQ ID NO: 3314 - protein, 6 aa, synthetic construct
PRECPY

SEQ ID NO: 3315 - protein, 6 aa, synthetic construct
PRECSD

SEQ ID NO: 3316 - protein, 6 aa, synthetic construct
PRECSE

SEQ ID NO: 3317 - protein, 6 aa, synthetic construct
PRECSF

SEQ ID NO: 3318 - protein, 6 aa, synthetic construct
PRECSW

SEQ ID NO: 3319 - protein, 6 aa, synthetic construct
PRECSY

SEQ ID NO: 3320 - protein, 6 aa, synthetic construct
PRECTD

SEQ ID NO: 3321 - protein, 6 aa, synthetic construct
PRECTE

SEQ ID NO: 3322 - protein, 6 aa, synthetic construct
PRECTF

SEQ ID NO: 3323 - protein, 6 aa, synthetic construct
PRECTW

SEQ ID NO: 3324 - protein, 6 aa, synthetic construct
PRECTY

SEQ ID NO: 3325 - protein, 6 aa, synthetic construct
PRECWD

SEQ ID NO: 3326 - protein, 6 aa, synthetic construct
PRECWE

SEQ ID NO: 3327 - protein, 6 aa, synthetic construct
PRECWF

SEQ ID NO: 3328 - protein, 6 aa, synthetic construct
PRECWW

SEQ ID NO: 3329 - protein, 6 aa, synthetic construct
PRECWY

SEQ ID NO: 3330 - protein, 6 aa, synthetic construct
PRECYD

SEQ ID NO: 3331 - protein, 6 aa, synthetic construct
PRECYE

SEQ ID NO: 3332 - protein, 6 aa, synthetic construct
PRECYF

SEQ ID NO: 3333 - protein, 6 aa, synthetic construct
PRECYW

SEQ ID NO: 3334 - protein, 6 aa, synthetic construct
PRECYY

SEQ ID NO: 3335 - protein, 6 aa, synthetic construct
PRECVD

SEQ ID NO: 3336 - protein, 6 aa, synthetic construct
PRECVE

SEQ ID NO: 3337 - protein, 6 aa, synthetic construct
PRECVF

SEQ ID NO: 3338 - protein, 6 aa, synthetic construct
PRECVW

SEQ ID NO: 3339 - protein, 6 aa, synthetic construct
PRECVY

SEQ ID NO: 3340 - protein, 6 aa, synthetic construct
PREQAD

SEQ ID NO: 3341 - protein, 6 aa, synthetic construct
PREQAE

SEQ ID NO: 3342 - protein, 6 aa, synthetic construct
PREQAF

SEQ ID NO: 3343 - protein, 6 aa, synthetic construct
PREQAW

SEQ ID NO: 3344 - protein, 6 aa, synthetic construct
PREQAY

SEQ ID NO: 3345 - protein, 6 aa, synthetic construct
PREQRD

SEQ ID NO: 3346 - protein, 6 aa, synthetic construct
PREQRE

SEQ ID NO: 3347 - protein, 6 aa, synthetic construct
PREQRF

SEQ ID NO: 3348 - protein, 6 aa, synthetic construct
PREQRW

SEQ ID NO: 3349 - protein, 6 aa, synthetic construct
PREQRY

SEQ ID NO: 3350 - protein, 6 aa, synthetic construct
PREQND

SEQ ID NO: 3351 - protein, 6 aa, synthetic construct
PREQNE

SEQ ID NO: 3352 - protein, 6 aa, synthetic construct
PREQNF

SEQ ID NO: 3353 - protein, 6 aa, synthetic construct
PREQNW

SEQ ID NO: 3354 - protein, 6 aa, synthetic construct
PREQNY

SEQ ID NO: 3355 - protein, 6 aa, synthetic construct
PREQDD

SEQ ID NO: 3356 - protein, 6 aa, synthetic construct
PREQDE

SEQ ID NO: 3357 - protein, 6 aa, synthetic construct
PREQDF

SEQ ID NO: 3358 - protein, 6 aa, synthetic construct
PREQDW

SEQ ID NO: 3359 - protein, 6 aa, synthetic construct
PREQDY

SEQ ID NO: 3360 - protein, 6 aa, synthetic construct
PREQCD

SEQ ID NO: 3361 - protein, 6 aa, synthetic construct
PREQCE

SEQ ID NO: 3362 - protein, 6 aa, synthetic construct
PREQCF

SEQ ID NO: 3363 - protein, 6 aa, synthetic construct
PREQCW

SEQ ID NO: 3364 - protein, 6 aa, synthetic construct
PREQCY

SEQ ID NO: 3365 - protein, 6 aa, synthetic construct
PREQQD

SEQ ID NO: 3366 - protein, 6 aa, synthetic construct
PREQQE

SEQ ID NO: 3367 - protein, 6 aa, synthetic construct
PREQQF

SEQ ID NO: 3368 - protein, 6 aa, synthetic construct
PREQQW

SEQ ID NO: 3369 - protein, 6 aa, synthetic construct
PREQQY

SEQ ID NO: 3370 - protein, 6 aa, synthetic construct
PREQED

SEQ ID NO: 3371 - protein, 6 aa, synthetic construct
PREQEE

SEQ ID NO: 3372 - protein, 6 aa, synthetic construct
PREQEF

SEQ ID NO: 3373 - protein, 6 aa, synthetic construct
PREQEW

SEQ ID NO: 3374 - protein, 6 aa, synthetic construct
PREQEY

SEQ ID NO: 3375 - protein, 6 aa, synthetic construct
PREQGD

SEQ ID NO: 3376 - protein, 6 aa, synthetic construct
PREQGE

SEQ ID NO: 3377 - protein, 6 aa, synthetic construct
PREQGF

SEQ ID NO: 3378 - protein, 6 aa, synthetic construct
PREQGW

SEQ ID NO: 3379 - protein, 6 aa, synthetic construct
PREQGY

SEQ ID NO: 3380 - protein, 6 aa, synthetic construct
PREQHD

SEQ ID NO: 3381 - protein, 6 aa, synthetic construct
PREQHE

SEQ ID NO: 3382 - protein, 6 aa, synthetic construct
PREQHF

SEQ ID NO: 3383 - protein, 6 aa, synthetic construct
PREQHW

SEQ ID NO: 3384 - protein, 6 aa, synthetic construct
PREQHY

SEQ ID NO: 3385 - protein, 6 aa, synthetic construct
PREQID

SEQ ID NO: 3386 - protein, 6 aa, synthetic construct
PREQIE

SEQ ID NO: 3387 - protein, 6 aa, synthetic construct
PREQIF

SEQ ID NO: 3388 - protein, 6 aa, synthetic construct
PREQIW

SEQ ID NO: 3389 - protein, 6 aa, synthetic construct
PREQIY

SEQ ID NO: 3390 - protein, 6 aa, synthetic construct
PREQLD

SEQ ID NO: 3391 - protein, 6 aa, synthetic construct
PREQLE

SEQ ID NO: 3392 - protein, 6 aa, synthetic construct
PREQLF

SEQ ID NO: 3393 - protein, 6 aa, synthetic construct
PREQLW

SEQ ID NO: 3394 - protein, 6 aa, synthetic construct
PREQLY

SEQ ID NO: 3395 - protein, 6 aa, synthetic construct
PREQKD

SEQ ID NO: 3396 - protein, 6 aa, synthetic construct
PREQKE

SEQ ID NO: 3397 - protein, 6 aa, synthetic construct
PREQKF

SEQ ID NO: 3398 - protein, 6 aa, synthetic construct
PREQKW

SEQ ID NO: 3399 - protein, 6 aa, synthetic construct
PREQKY

SEQ ID NO: 3400 - protein, 6 aa, synthetic construct
PREQMD

SEQ ID NO: 3401 - protein, 6 aa, synthetic construct
PREQME

SEQ ID NO: 3402 - protein, 6 aa, synthetic construct
PREQMF

SEQ ID NO: 3403 - protein, 6 aa, synthetic construct
PREQMW

SEQ ID NO: 3404 - protein, 6 aa, synthetic construct
PREQMY

SEQ ID NO: 3405 - protein, 6 aa, synthetic construct
PREQFD

SEQ ID NO: 3406 - protein, 6 aa, synthetic construct
PREQFE

SEQ ID NO: 3407 - protein, 6 aa, synthetic construct
PREQFF

SEQ ID NO: 3408 - protein, 6 aa, synthetic construct
PREQFW

SEQ ID NO: 3409 - protein, 6 aa, synthetic construct
PREQFY

SEQ ID NO: 3410 - protein, 6 aa, synthetic construct
PREQPD

SEQ ID NO: 3411 - protein, 6 aa, synthetic construct
PREQPE

SEQ ID NO: 3412 - protein, 6 aa, synthetic construct
PREQPF

SEQ ID NO: 3413 - protein, 6 aa, synthetic construct
PREQPW

SEQ ID NO: 3414 - protein, 6 aa, synthetic construct
PREQPY

SEQ ID NO: 3415 - protein, 6 aa, synthetic construct
PREQSD

SEQ ID NO: 3416 - protein, 6 aa, synthetic construct
PREQSE

SEQ ID NO: 3417 - protein, 6 aa, synthetic construct
PREQSF

SEQ ID NO: 3418 - protein, 6 aa, synthetic construct
PREQSW

SEQ ID NO: 3419 - protein, 6 aa, synthetic construct
PREQSY

SEQ ID NO: 3420 - protein, 6 aa, synthetic construct
PREQTD

SEQ ID NO: 3421 - protein, 6 aa, synthetic construct
PREQTE

SEQ ID NO: 3422 - protein, 6 aa, synthetic construct
PREQTF

SEQ ID NO: 3423 - protein, 6 aa, synthetic construct
PREQTW

SEQ ID NO: 3424 - protein, 6 aa, synthetic construct
PREQTY

SEQ ID NO: 3425 - protein, 6 aa, synthetic construct
PREQWD

SEQ ID NO: 3426 - protein, 6 aa, synthetic construct
PREQWE

SEQ ID NO: 3427 - protein, 6 aa, synthetic construct
PREQWF

SEQ ID NO: 3428 - protein, 6 aa, synthetic construct
PREQWW

SEQ ID NO: 3429 - protein, 6 aa, synthetic construct
PREQWY

SEQ ID NO: 3430 - protein, 6 aa, synthetic construct
PREQYD

SEQ ID NO: 3431 - protein, 6 aa, synthetic construct
PREQYE

SEQ ID NO: 3432 - protein, 6 aa, synthetic construct
PREQYF

SEQ ID NO: 3433 - protein, 6 aa, synthetic construct
PREQYW

SEQ ID NO: 3434 - protein, 6 aa, synthetic construct
PREQYY

SEQ ID NO: 3435 - protein, 6 aa, synthetic construct
PREQVD

SEQ ID NO: 3436 - protein, 6 aa, synthetic construct
PREQVE

SEQ ID NO: 3437 - protein, 6 aa, synthetic construct
PREQVF

SEQ ID NO: 3438 - protein, 6 aa, synthetic construct
PREQVW

SEQ ID NO: 3439 - protein, 6 aa, synthetic construct
PREQVY

SEQ ID NO: 3440 - protein, 6 aa, synthetic construct
PREEAD

SEQ ID NO: 3441 - protein, 6 aa, synthetic construct
PREEAE

SEQ ID NO: 3442 - protein, 6 aa, synthetic construct
PREEAF

SEQ ID NO: 3443 - protein, 6 aa, synthetic construct
PREEAW

SEQ ID NO: 3444 - protein, 6 aa, synthetic construct
PREEAY

SEQ ID NO: 3445 - protein, 6 aa, synthetic construct
PREERD

SEQ ID NO: 3446 - protein, 6 aa, synthetic construct
PREERE

SEQ ID NO: 3447 - protein, 6 aa, synthetic construct
PREERF

SEQ ID NO: 3448 - protein, 6 aa, synthetic construct
PREERW

SEQ ID NO: 3449 - protein, 6 aa, synthetic construct
PREERY

SEQ ID NO: 3450 - protein, 6 aa, synthetic construct
PREEND

SEQ ID NO: 3451 - protein, 6 aa, synthetic construct
PREENE

SEQ ID NO: 3452 - protein, 6 aa, synthetic construct
PREENF

SEQ ID NO: 3453 - protein, 6 aa, synthetic construct
PREENW

SEQ ID NO: 3454 - protein, 6 aa, synthetic construct
PREENY

SEQ ID NO: 3455 - protein, 6 aa, synthetic construct
PREEDD

SEQ ID NO: 3456 - protein, 6 aa, synthetic construct
PREEDE

SEQ ID NO: 3457 - protein, 6 aa, synthetic construct
PREEDF

SEQ ID NO: 3458 - protein, 6 aa, synthetic construct
PREEDW

SEQ ID NO: 3459 - protein, 6 aa, synthetic construct
PREEDY

SEQ ID NO: 3460 - protein, 6 aa, synthetic construct
PREECD

SEQ ID NO: 3461 - protein, 6 aa, synthetic construct
PREECE

SEQ ID NO: 3462 - protein, 6 aa, synthetic construct
PREECF

SEQ ID NO: 3463 - protein, 6 aa, synthetic construct
PREECW

SEQ ID NO: 3464 - protein, 6 aa, synthetic construct
PREECY

SEQ ID NO: 3465 - protein, 6 aa, synthetic construct
PREEQD

SEQ ID NO: 3466 - protein, 6 aa, synthetic construct
PREEQE

SEQ ID NO: 3467 - protein, 6 aa, synthetic construct
PREEQF

SEQ ID NO: 3468 - protein, 6 aa, synthetic construct
PREEQW

SEQ ID NO: 3469 - protein, 6 aa, synthetic construct
PREEQY

SEQ ID NO: 3470 - protein, 6 aa, synthetic construct
PREEED

SEQ ID NO: 3471 - protein, 6 aa, synthetic construct
PREEEE

SEQ ID NO: 3472 - protein, 6 aa, synthetic construct
PREEEF

SEQ ID NO: 3473 - protein, 6 aa, synthetic construct
PREEEW

SEQ ID NO: 3474 - protein, 6 aa, synthetic construct
PREEEY

SEQ ID NO: 3475 - protein, 6 aa, synthetic construct
PREEGD

SEQ ID NO: 3476 - protein, 6 aa, synthetic construct
PREEGE

SEQ ID NO: 3477 - protein, 6 aa, synthetic construct
PREEGF

SEQ ID NO: 3478 - protein, 6 aa, synthetic construct
PREEGW

SEQ ID NO: 3479 - protein, 6 aa, synthetic construct
PREEGY

SEQ ID NO: 3480 - protein, 6 aa, synthetic construct
PREEHD

SEQ ID NO: 3481 - protein, 6 aa, synthetic construct
PREEHE

SEQ ID NO: 3482 - protein, 6 aa, synthetic construct
PREEHF

SEQ ID NO: 3483 - protein, 6 aa, synthetic construct
PREEHW

SEQ ID NO: 3484 - protein, 6 aa, synthetic construct
PREEHY

SEQ ID NO: 3485 - protein, 6 aa, synthetic construct
PREEID

SEQ ID NO: 3486 - protein, 6 aa, synthetic construct
PREEIE

SEQ ID NO: 3487 - protein, 6 aa, synthetic construct
PREEIF

SEQ ID NO: 3488 - protein, 6 aa, synthetic construct
PREEIW

SEQ ID NO: 3489 - protein, 6 aa, synthetic construct
PREEIY

SEQ ID NO: 3490 - protein, 6 aa, synthetic construct
PREELD

SEQ ID NO: 3491 - protein, 6 aa, synthetic construct
PREELE

SEQ ID NO: 3492 - protein, 6 aa, synthetic construct
PREELF

SEQ ID NO: 3493 - protein, 6 aa, synthetic construct
PREELW

SEQ ID NO: 3494 - protein, 6 aa, synthetic construct
PREELY

SEQ ID NO: 3495 - protein, 6 aa, synthetic construct
PREEKD

SEQ ID NO: 3496 - protein, 6 aa, synthetic construct
PREEKE

SEQ ID NO: 3497 - protein, 6 aa, synthetic construct
PREEKF

SEQ ID NO: 3498 - protein, 6 aa, synthetic construct
PREEKW

SEQ ID NO: 3499 - protein, 6 aa, synthetic construct
PREEKY

SEQ ID NO: 3500 - protein, 6 aa, synthetic construct
PREEMD

SEQ ID NO: 3501 - protein, 6 aa, synthetic construct
PREEME

SEQ ID NO: 3502 - protein, 6 aa, synthetic construct
PREEMF

SEQ ID NO: 3503 - protein, 6 aa, synthetic construct
PREEMW

SEQ ID NO: 3504 - protein, 6 aa, synthetic construct
PREEMY

SEQ ID NO: 3505 - protein, 6 aa, synthetic construct
PREEFD

SEQ ID NO: 3506 - protein, 6 aa, synthetic construct
PREEFE

SEQ ID NO: 3507 - protein, 6 aa, synthetic construct
PREEFF

SEQ ID NO: 3508 - protein, 6 aa, synthetic construct
PREEFW

SEQ ID NO: 3509 - protein, 6 aa, synthetic construct
PREEFY

SEQ ID NO: 3510 - protein, 6 aa, synthetic construct
PREEPD

SEQ ID NO: 3511 - protein, 6 aa, synthetic construct
PREEPE

SEQ ID NO: 3512 - protein, 6 aa, synthetic construct
PREEPF

SEQ ID NO: 3513 - protein, 6 aa, synthetic construct
PREEPW

SEQ ID NO: 3514 - protein, 6 aa, synthetic construct
PREEPY

SEQ ID NO: 3515 - protein, 6 aa, synthetic construct
PREESD

SEQ ID NO: 3516 - protein, 6 aa, synthetic construct
PREESE

SEQ ID NO: 3517 - protein, 6 aa, synthetic construct
PREESF

SEQ ID NO: 3518 - protein, 6 aa, synthetic construct
PREESW

SEQ ID NO: 3519 - protein, 6 aa, synthetic construct
PREESY

SEQ ID NO: 3520 - protein, 6 aa, synthetic construct
PREETD

SEQ ID NO: 3521 - protein, 6 aa, synthetic construct
PREETE

SEQ ID NO: 3522 - protein, 6 aa, synthetic construct
PREETF

SEQ ID NO: 3523 - protein, 6 aa, synthetic construct
PREETW

SEQ ID NO: 3524 - protein, 6 aa, synthetic construct
PREETY

SEQ ID NO: 3525 - protein, 6 aa, synthetic construct
PREEWD

SEQ ID NO: 3526 - protein, 6 aa, synthetic construct
PREEWE

SEQ ID NO: 3527 - protein, 6 aa, synthetic construct
PREEWF

SEQ ID NO: 3528 - protein, 6 aa, synthetic construct
PREEWW

SEQ ID NO: 3529 - protein, 6 aa, synthetic construct
PREEWY

SEQ ID NO: 3530 - protein, 6 aa, synthetic construct
PREEYD

SEQ ID NO: 3531 - protein, 6 aa, synthetic construct
PREEYE

SEQ ID NO: 3532 - protein, 6 aa, synthetic construct
PREEYF

SEQ ID NO: 3533 - protein, 6 aa, synthetic construct
PREEYW

SEQ ID NO: 3534 - protein, 6 aa, synthetic construct
PREEYY

SEQ ID NO: 3535 - protein, 6 aa, synthetic construct
PREEVD

SEQ ID NO: 3536 - protein, 6 aa, synthetic construct
PREEVE

SEQ ID NO: 3537 - protein, 6 aa, synthetic construct
PREEVF

SEQ ID NO: 3538 - protein, 6 aa, synthetic construct
PREEVW

SEQ ID NO: 3539 - protein, 6 aa, synthetic construct
PREEVY

SEQ ID NO: 3540 - protein, 6 aa, synthetic construct
PREGAD

SEQ ID NO: 3541 - protein, 6 aa, synthetic construct
PREGAE

SEQ ID NO: 3542 - protein, 6 aa, synthetic construct
PREGAF

SEQ ID NO: 3543 - protein, 6 aa, synthetic construct
PREGAW

SEQ ID NO: 3544 - protein, 6 aa, synthetic construct
PREGAY

SEQ ID NO: 3545 - protein, 6 aa, synthetic construct
PREGRD

SEQ ID NO: 3546 - protein, 6 aa, synthetic construct
PREGRE

SEQ ID NO: 3547 - protein, 6 aa, synthetic construct
PREGRF

SEQ ID NO: 3548 - protein, 6 aa, synthetic construct
PREGRW

SEQ ID NO: 3549 - protein, 6 aa, synthetic construct
PREGRY

SEQ ID NO: 3550 - protein, 6 aa, synthetic construct
PREGND

SEQ ID NO: 3551 - protein, 6 aa, synthetic construct
PREGNE

SEQ ID NO: 3552 - protein, 6 aa, synthetic construct
PREGNF

SEQ ID NO: 3553 - protein, 6 aa, synthetic construct
PREGNW

SEQ ID NO: 3554 - protein, 6 aa, synthetic construct
PREGNY

SEQ ID NO: 3555 - protein, 6 aa, synthetic construct
PREGDD

SEQ ID NO: 3556 - protein, 6 aa, synthetic construct
PREGDE

SEQ ID NO: 3557 - protein, 6 aa, synthetic construct
PREGDF

SEQ ID NO: 3558 - protein, 6 aa, synthetic construct
PREGDW

SEQ ID NO: 3559 - protein, 6 aa, synthetic construct
PREGDY

SEQ ID NO: 3560 - protein, 6 aa, synthetic construct
PREGCD

SEQ ID NO: 3561 - protein, 6 aa, synthetic construct
PREGCE

SEQ ID NO: 3562 - protein, 6 aa, synthetic construct
PREGCF

SEQ ID NO: 3563 - protein, 6 aa, synthetic construct
PREGCW

SEQ ID NO: 3564 - protein, 6 aa, synthetic construct
PREGCY

SEQ ID NO: 3565 - protein, 6 aa, synthetic construct
PREGQD

SEQ ID NO: 3566 - protein, 6 aa, synthetic construct
PREGQE

SEQ ID NO: 3567 - protein, 6 aa, synthetic construct
PREGQF

SEQ ID NO: 3568 - protein, 6 aa, synthetic construct
PREGQW

SEQ ID NO: 3569 - protein, 6 aa, synthetic construct
PREGQY

SEQ ID NO: 3570 - protein, 6 aa, synthetic construct
PREGED

SEQ ID NO: 3571 - protein, 6 aa, synthetic construct
PREGEE

SEQ ID NO: 3572 - protein, 6 aa, synthetic construct
PREGEF

SEQ ID NO: 3573 - protein, 6 aa, synthetic construct
PREGEW

SEQ ID NO: 3574 - protein, 6 aa, synthetic construct
PREGEY

SEQ ID NO: 3575 - protein, 6 aa, synthetic construct
PREGGD

SEQ ID NO: 3576 - protein, 6 aa, synthetic construct
PREGGE

SEQ ID NO: 3577 - protein, 6 aa, synthetic construct
PREGGF

SEQ ID NO: 3578 - protein, 6 aa, synthetic construct
PREGGW

SEQ ID NO: 3579 - protein, 6 aa, synthetic construct
PREGGY

SEQ ID NO: 3580 - protein, 6 aa, synthetic construct
PREGHD

SEQ ID NO: 3581 - protein, 6 aa, synthetic construct
PREGHE

SEQ ID NO: 3582 - protein, 6 aa, synthetic construct
PREGHF

SEQ ID NO: 3583 - protein, 6 aa, synthetic construct
PREGHW

SEQ ID NO: 3584 - protein, 6 aa, synthetic construct
PREGHY

SEQ ID NO: 3585 - protein, 6 aa, synthetic construct
PREGID

SEQ ID NO: 3586 - protein, 6 aa, synthetic construct
PREGIE

SEQ ID NO: 3587 - protein, 6 aa, synthetic construct
PREGIF

SEQ ID NO: 3588 - protein, 6 aa, synthetic construct
PREGIW

SEQ ID NO: 3589 - protein, 6 aa, synthetic construct
PREGIY

SEQ ID NO: 3590 - protein, 6 aa, synthetic construct
PREGLD

SEQ ID NO: 3591 - protein, 6 aa, synthetic construct
PREGLE

SEQ ID NO: 3592 - protein, 6 aa, synthetic construct
PREGLF

SEQ ID NO: 3593 - protein, 6 aa, synthetic construct
PREGLW

SEQ ID NO: 3594 - protein, 6 aa, synthetic construct
PREGLY

SEQ ID NO: 3595 - protein, 6 aa, synthetic construct
PREGKD

SEQ ID NO: 3596 - protein, 6 aa, synthetic construct
PREGKE

SEQ ID NO: 3597 - protein, 6 aa, synthetic construct
PREGKF

SEQ ID NO: 3598 - protein, 6 aa, synthetic construct
PREGKW

SEQ ID NO: 3599 - protein, 6 aa, synthetic construct
PREGKY

SEQ ID NO: 3600 - protein, 6 aa, synthetic construct
PREGMD

SEQ ID NO: 3601 - protein, 6 aa, synthetic construct
PREGME

SEQ ID NO: 3602 - protein, 6 aa, synthetic construct
PREGMF

SEQ ID NO: 3603 - protein, 6 aa, synthetic construct
PREGMW

SEQ ID NO: 3604 - protein, 6 aa, synthetic construct
PREGMY

SEQ ID NO: 3605 - protein, 6 aa, synthetic construct
PREGFD

SEQ ID NO: 3606 - protein, 6 aa, synthetic construct
PREGFE

SEQ ID NO: 3607 - protein, 6 aa, synthetic construct
PREGFF

SEQ ID NO: 3608 - protein, 6 aa, synthetic construct
PREGFW

SEQ ID NO: 3609 - protein, 6 aa, synthetic construct
PREGFY

SEQ ID NO: 3610 - protein, 6 aa, synthetic construct
PREGPD

SEQ ID NO: 3611 - protein, 6 aa, synthetic construct
PREGPE

SEQ ID NO: 3612 - protein, 6 aa, synthetic construct
PREGPF

SEQ ID NO: 3613 - protein, 6 aa, synthetic construct
PREGPW

SEQ ID NO: 3614 - protein, 6 aa, synthetic construct
PREGPY

SEQ ID NO: 3615 - protein, 6 aa, synthetic construct
PREGSD

SEQ ID NO: 3616 - protein, 6 aa, synthetic construct
PREGSE

SEQ ID NO: 3617 - protein, 6 aa, synthetic construct
PREGSF

SEQ ID NO: 3618 - protein, 6 aa, synthetic construct
PREGSW

SEQ ID NO: 3619 - protein, 6 aa, synthetic construct
PREGSY

SEQ ID NO: 3620 - protein, 6 aa, synthetic construct
PREGTD

SEQ ID NO: 3621 - protein, 6 aa, synthetic construct
PREGTE

SEQ ID NO: 3622 - protein, 6 aa, synthetic construct
PREGTF

SEQ ID NO: 3623 - protein, 6 aa, synthetic construct
PREGTW

SEQ ID NO: 3624 - protein, 6 aa, synthetic construct
PREGTY

SEQ ID NO: 3625 - protein, 6 aa, synthetic construct
PREGWD

SEQ ID NO: 3626 - protein, 6 aa, synthetic construct
PREGWE

SEQ ID NO: 3627 - protein, 6 aa, synthetic construct
PREGWF

SEQ ID NO: 3628 - protein, 6 aa, synthetic construct
PREGWW

SEQ ID NO: 3629 - protein, 6 aa, synthetic construct
PREGWY

SEQ ID NO: 3630 - protein, 6 aa, synthetic construct
PREGYD

SEQ ID NO: 3631 - protein, 6 aa, synthetic construct
PREGYE

SEQ ID NO: 3632 - protein, 6 aa, synthetic construct
PREGYF

SEQ ID NO: 3633 - protein, 6 aa, synthetic construct
PREGYW

SEQ ID NO: 3634 - protein, 6 aa, synthetic construct
PREGYY

SEQ ID NO: 3635 - protein, 6 aa, synthetic construct
PREGVD

SEQ ID NO: 3636 - protein, 6 aa, synthetic construct
PREGVE

SEQ ID NO: 3637 - protein, 6 aa, synthetic construct
PREGVF

SEQ ID NO: 3638 - protein, 6 aa, synthetic construct
PREGVW

SEQ ID NO: 3639 - protein, 6 aa, synthetic construct
PREGVY

SEQ ID NO: 3640 - protein, 6 aa, synthetic construct
PREHAD

SEQ ID NO: 3641 - protein, 6 aa, synthetic construct
PREHAE

SEQ ID NO: 3642 - protein, 6 aa, synthetic construct
PREHAF

SEQ ID NO: 3643 - protein, 6 aa, synthetic construct
PREHAW

SEQ ID NO: 3644 - protein, 6 aa, synthetic construct
PREHAY

SEQ ID NO: 3645 - protein, 6 aa, synthetic construct
PREHRD

SEQ ID NO: 3646 - protein, 6 aa, synthetic construct
PREHRE

SEQ ID NO: 3647 - protein, 6 aa, synthetic construct
PREHRF

SEQ ID NO: 3648 - protein, 6 aa, synthetic construct
PREHRW

SEQ ID NO: 3649 - protein, 6 aa, synthetic construct
PREHRY

SEQ ID NO: 3650 - protein, 6 aa, synthetic construct
PREHND

SEQ ID NO: 3651 - protein, 6 aa, synthetic construct
PREHNE

SEQ ID NO: 3652 - protein, 6 aa, synthetic construct
PREHNF

SEQ ID NO: 3653 - protein, 6 aa, synthetic construct
PREHNW

SEQ ID NO: 3654 - protein, 6 aa, synthetic construct
PREHNY

SEQ ID NO: 3655 - protein, 6 aa, synthetic construct
PREHDD

SEQ ID NO: 3656 - protein, 6 aa, synthetic construct
PREHDE

SEQ ID NO: 3657 - protein, 6 aa, synthetic construct
PREHDF

SEQ ID NO: 3658 - protein, 6 aa, synthetic construct
PREHDW

SEQ ID NO: 3659 - protein, 6 aa, synthetic construct
PREHDY

SEQ ID NO: 3660 - protein, 6 aa, synthetic construct
PREHCD

SEQ ID NO: 3661 - protein, 6 aa, synthetic construct
PREHCE

SEQ ID NO: 3662 - protein, 6 aa, synthetic construct
PREHCF

SEQ ID NO: 3663 - protein, 6 aa, synthetic construct
PREHCW

SEQ ID NO: 3664 - protein, 6 aa, synthetic construct
PREHCY

SEQ ID NO: 3665 - protein, 6 aa, synthetic construct
PREHQD

SEQ ID NO: 3666 - protein, 6 aa, synthetic construct
PREHQE

SEQ ID NO: 3667 - protein, 6 aa, synthetic construct
PREHQF

SEQ ID NO: 3668 - protein, 6 aa, synthetic construct
PREHQW

SEQ ID NO: 3669 - protein, 6 aa, synthetic construct
PREHQY

SEQ ID NO: 3670 - protein, 6 aa, synthetic construct
PREHED

SEQ ID NO: 3671 - protein, 6 aa, synthetic construct
PREHEE

SEQ ID NO: 3672 - protein, 6 aa, synthetic construct
PREHEF

SEQ ID NO: 3673 - protein, 6 aa, synthetic construct
PREHEW

SEQ ID NO: 3674 - protein, 6 aa, synthetic construct
PREHEY

SEQ ID NO: 3675 - protein, 6 aa, synthetic construct
PREHGD

SEQ ID NO: 3676 - protein, 6 aa, synthetic construct
PREHGE

SEQ ID NO: 3677 - protein, 6 aa, synthetic construct
PREHGF

SEQ ID NO: 3678 - protein, 6 aa, synthetic construct
PREHGW

SEQ ID NO: 3679 - protein, 6 aa, synthetic construct
PREHGY

SEQ ID NO: 3680 - protein, 6 aa, synthetic construct
PREHHD

SEQ ID NO: 3681 - protein, 6 aa, synthetic construct
PREHHE

SEQ ID NO: 3682 - protein, 6 aa, synthetic construct
PREHHF

SEQ ID NO: 3683 - protein, 6 aa, synthetic construct
PREHHW

SEQ ID NO: 3684 - protein, 6 aa, synthetic construct
PREHHY

SEQ ID NO: 3685 - protein, 6 aa, synthetic construct
PREHID

SEQ ID NO: 3686 - protein, 6 aa, synthetic construct
PREHIE

SEQ ID NO: 3687 - protein, 6 aa, synthetic construct
PREHIF

SEQ ID NO: 3688 - protein, 6 aa, synthetic construct
PREHIW

SEQ ID NO: 3689 - protein, 6 aa, synthetic construct
PREHIY

SEQ ID NO: 3690 - protein, 6 aa, synthetic construct
PREHLD

SEQ ID NO: 3691 - protein, 6 aa, synthetic construct
PREHLE

SEQ ID NO: 3692 - protein, 6 aa, synthetic construct
PREHLF

SEQ ID NO: 3693 - protein, 6 aa, synthetic construct
PREHLW

SEQ ID NO: 3694 - protein, 6 aa, synthetic construct
PREHLY

SEQ ID NO: 3695 - protein, 6 aa, synthetic construct
PREHKD

SEQ ID NO: 3696 - protein, 6 aa, synthetic construct
PREHKE

SEQ ID NO: 3697 - protein, 6 aa, synthetic construct
PREHKF

SEQ ID NO: 3698 - protein, 6 aa, synthetic construct
PREHKW

SEQ ID NO: 3699 - protein, 6 aa, synthetic construct
PREHKY

SEQ ID NO: 3700 - protein, 6 aa, synthetic construct
PREHMD

SEQ ID NO: 3701 - protein, 6 aa, synthetic construct
PREHME

SEQ ID NO: 3702 - protein, 6 aa, synthetic construct
PREHMF

SEQ ID NO: 3703 - protein, 6 aa, synthetic construct
PREHMW

SEQ ID NO: 3704 - protein, 6 aa, synthetic construct
PREHMY

SEQ ID NO: 3705 - protein, 6 aa, synthetic construct
PREHFD

SEQ ID NO: 3706 - protein, 6 aa, synthetic construct
PREHFE

SEQ ID NO: 3707 - protein, 6 aa, synthetic construct
PREHFF

SEQ ID NO: 3708 - protein, 6 aa, synthetic construct
PREHFW

SEQ ID NO: 3709 - protein, 6 aa, synthetic construct
PREHFY

SEQ ID NO: 3710 - protein, 6 aa, synthetic construct
PREHPD

SEQ ID NO: 3711 - protein, 6 aa, synthetic construct
PREHPE

SEQ ID NO: 3712 - protein, 6 aa, synthetic construct
PREHPF

SEQ ID NO: 3713 - protein, 6 aa, synthetic construct
PREHPW

SEQ ID NO: 3714 - protein, 6 aa, synthetic construct
PREHPY

SEQ ID NO: 3715 - protein, 6 aa, synthetic construct
PREHSD

SEQ ID NO: 3716 - protein, 6 aa, synthetic construct
PREHSE

SEQ ID NO: 3717 - protein, 6 aa, synthetic construct
PREHSF

SEQ ID NO: 3718 - protein, 6 aa, synthetic construct
PREHSW

SEQ ID NO: 3719 - protein, 6 aa, synthetic construct
PREHSY

SEQ ID NO: 3720 - protein, 6 aa, synthetic construct
PREHTD

SEQ ID NO: 3721 - protein, 6 aa, synthetic construct
PREHTE

SEQ ID NO: 3722 - protein, 6 aa, synthetic construct
PREHTF

SEQ ID NO: 3723 - protein, 6 aa, synthetic construct
PREHTW

SEQ ID NO: 3724 - protein, 6 aa, synthetic construct
PREHTY

SEQ ID NO: 3725 - protein, 6 aa, synthetic construct
PREHWD

SEQ ID NO: 3726 - protein, 6 aa, synthetic construct
PREHWE

SEQ ID NO: 3727 - protein, 6 aa, synthetic construct
PREHWF

SEQ ID NO: 3728 - protein, 6 aa, synthetic construct
PREHWW

SEQ ID NO: 3729 - protein, 6 aa, synthetic construct
PREHWY

SEQ ID NO: 3730 - protein, 6 aa, synthetic construct
PREHYD

SEQ ID NO: 3731 - protein, 6 aa, synthetic construct
PREHYE

SEQ ID NO: 3732 - protein, 6 aa, synthetic construct
PREHYF

SEQ ID NO: 3733 - protein, 6 aa, synthetic construct
PREHYW

SEQ ID NO: 3734 - protein, 6 aa, synthetic construct
PREHYY

SEQ ID NO: 3735 - protein, 6 aa, synthetic construct
PREHVD

SEQ ID NO: 3736 - protein, 6 aa, synthetic construct
PREHVE

SEQ ID NO: 3737 - protein, 6 aa, synthetic construct
PREHVF

SEQ ID NO: 3738 - protein, 6 aa, synthetic construct
PREHVW

SEQ ID NO: 3739 - protein, 6 aa, synthetic construct
PREHVY

SEQ ID NO: 3740 - protein, 6 aa, synthetic construct
PREIAD

SEQ ID NO: 3741 - protein, 6 aa, synthetic construct
PREIAE

SEQ ID NO: 3742 - protein, 6 aa, synthetic construct
PREIAF

SEQ ID NO: 3743 - protein, 6 aa, synthetic construct
PREIAW

SEQ ID NO: 3744 - protein, 6 aa, synthetic construct
PREIAY

SEQ ID NO: 3745 - protein, 6 aa, synthetic construct
PREIRD

SEQ ID NO: 3746 - protein, 6 aa, synthetic construct
PREIRE

SEQ ID NO: 3747 - protein, 6 aa, synthetic construct
PREIRF

SEQ ID NO: 3748 - protein, 6 aa, synthetic construct
PREIRW

SEQ ID NO: 3749 - protein, 6 aa, synthetic construct
PREIRY

SEQ ID NO: 3750 - protein, 6 aa, synthetic construct
PREIND

SEQ ID NO: 3751 - protein, 6 aa, synthetic construct
PREINE

SEQ ID NO: 3752 - protein, 6 aa, synthetic construct
PREINF

SEQ ID NO: 3753 - protein, 6 aa, synthetic construct
PREINW

SEQ ID NO: 3754 - protein, 6 aa, synthetic construct
PREINY

SEQ ID NO: 3755 - protein, 6 aa, synthetic construct
PREIDD

SEQ ID NO: 3756 - protein, 6 aa, synthetic construct
PREIDE

SEQ ID NO: 3757 - protein, 6 aa, synthetic construct
PREIDF

SEQ ID NO: 3758 - protein, 6 aa, synthetic construct
PREIDW

SEQ ID NO: 3759 - protein, 6 aa, synthetic construct
PREIDY

SEQ ID NO: 3760 - protein, 6 aa, synthetic construct
PREICD

SEQ ID NO: 3761 - protein, 6 aa, synthetic construct
PREICE

SEQ ID NO: 3762 - protein, 6 aa, synthetic construct
PREICF

SEQ ID NO: 3763 - protein, 6 aa, synthetic construct
PREICW

SEQ ID NO: 3764 - protein, 6 aa, synthetic construct
PREICY

SEQ ID NO: 3765 - protein, 6 aa, synthetic construct
PREIQD

SEQ ID NO: 3766 - protein, 6 aa, synthetic construct
PREIQE

SEQ ID NO: 3767 - protein, 6 aa, synthetic construct
PREIQF

SEQ ID NO: 3768 - protein, 6 aa, synthetic construct
PREIQW

SEQ ID NO: 3769 - protein, 6 aa, synthetic construct
PREIQY

SEQ ID NO: 3770 - protein, 6 aa, synthetic construct
PREIED

SEQ ID NO: 3771 - protein, 6 aa, synthetic construct
PREIEE

SEQ ID NO: 3772 - protein, 6 aa, synthetic construct
PREIEF

SEQ ID NO: 3773 - protein, 6 aa, synthetic construct
PREIEW

SEQ ID NO: 3774 - protein, 6 aa, synthetic construct
PREIEY

SEQ ID NO: 3775 - protein, 6 aa, synthetic construct
PREIGD

SEQ ID NO: 3776 - protein, 6 aa, synthetic construct
PREIGE

SEQ ID NO: 3777 - protein, 6 aa, synthetic construct
PREIGF

SEQ ID NO: 3778 - protein, 6 aa, synthetic construct
PREIGW

SEQ ID NO: 3779 - protein, 6 aa, synthetic construct
PREIGY

SEQ ID NO: 3780 - protein, 6 aa, synthetic construct
PREIHD

SEQ ID NO: 3781 - protein, 6 aa, synthetic construct
PREIHE

SEQ ID NO: 3782 - protein, 6 aa, synthetic construct
PREIHF

SEQ ID NO: 3783 - protein, 6 aa, synthetic construct
PREIHW

SEQ ID NO: 3784 - protein, 6 aa, synthetic construct
PREIHY

SEQ ID NO: 3785 - protein, 6 aa, synthetic construct
PREIID

SEQ ID NO: 3786 - protein, 6 aa, synthetic construct
PREIIE

SEQ ID NO: 3787 - protein, 6 aa, synthetic construct
PREIIF

SEQ ID NO: 3788 - protein, 6 aa, synthetic construct
PREIIW

SEQ ID NO: 3789 - protein, 6 aa, synthetic construct
PREIIY

SEQ ID NO: 3790 - protein, 6 aa, synthetic construct
PREILD

SEQ ID NO: 3791 - protein, 6 aa, synthetic construct
PREILE

SEQ ID NO: 3792 - protein, 6 aa, synthetic construct
PREILF

SEQ ID NO: 3793 - protein, 6 aa, synthetic construct
PREILW

SEQ ID NO: 3794 - protein, 6 aa, synthetic construct
PREILY

SEQ ID NO: 3795 - protein, 6 aa, synthetic construct
PREIKD

SEQ ID NO: 3796 - protein, 6 aa, synthetic construct
PREIKE

SEQ ID NO: 3797 - protein, 6 aa, synthetic construct
PREIKF

SEQ ID NO: 3798 - protein, 6 aa, synthetic construct
PREIKW

SEQ ID NO: 3799 - protein, 6 aa, synthetic construct
PREIKY

SEQ ID NO: 3800 - protein, 6 aa, synthetic construct
PREIMD

SEQ ID NO: 3801 - protein, 6 aa, synthetic construct
PREIME

SEQ ID NO: 3802 - protein, 6 aa, synthetic construct
PREIMF

SEQ ID NO: 3803 - protein, 6 aa, synthetic construct
PREIMW

SEQ ID NO: 3804 - protein, 6 aa, synthetic construct
PREIMY

SEQ ID NO: 3805 - protein, 6 aa, synthetic construct
PREIFD

SEQ ID NO: 3806 - protein, 6 aa, synthetic construct
PREIFE

SEQ ID NO: 3807 - protein, 6 aa, synthetic construct
PREIFF

SEQ ID NO: 3808 - protein, 6 aa, synthetic construct
PREIFW

SEQ ID NO: 3809 - protein, 6 aa, synthetic construct
PREIFY

SEQ ID NO: 3810 - protein, 6 aa, synthetic construct
PREIPD

SEQ ID NO: 3811 - protein, 6 aa, synthetic construct
PREIPE

SEQ ID NO: 3812 - protein, 6 aa, synthetic construct
PREIPF

SEQ ID NO: 3813 - protein, 6 aa, synthetic construct
PREIPW

SEQ ID NO: 3814 - protein, 6 aa, synthetic construct
PREIPY

SEQ ID NO: 3815 - protein, 6 aa, synthetic construct
PREISD

SEQ ID NO: 3816 - protein, 6 aa, synthetic construct
PREISE

SEQ ID NO: 3817 - protein, 6 aa, synthetic construct
PREISF

SEQ ID NO: 3818 - protein, 6 aa, synthetic construct
PREISW

SEQ ID NO: 3819 - protein, 6 aa, synthetic construct
PREISY

SEQ ID NO: 3820 - protein, 6 aa, synthetic construct
PREITD

SEQ ID NO: 3821 - protein, 6 aa, synthetic construct
PREITE

SEQ ID NO: 3822 - protein, 6 aa, synthetic construct
PREITF

SEQ ID NO: 3823 - protein, 6 aa, synthetic construct
PREITW

SEQ ID NO: 3824 - protein, 6 aa, synthetic construct
PREITY

SEQ ID NO: 3825 - protein, 6 aa, synthetic construct
PREIWD

SEQ ID NO: 3826 - protein, 6 aa, synthetic construct
PREIWE

SEQ ID NO: 3827 - protein, 6 aa, synthetic construct
PREIWF

SEQ ID NO: 3828 - protein, 6 aa, synthetic construct
PREIWW

SEQ ID NO: 3829 - protein, 6 aa, synthetic construct
PREIWY

SEQ ID NO: 3830 - protein, 6 aa, synthetic construct
PREIYD

SEQ ID NO: 3831 - protein, 6 aa, synthetic construct
PREIYE

SEQ ID NO: 3832 - protein, 6 aa, synthetic construct
PREIYF

SEQ ID NO: 3833 - protein, 6 aa, synthetic construct
PREIYW

SEQ ID NO: 3834 - protein, 6 aa, synthetic construct
PREIYY

SEQ ID NO: 3835 - protein, 6 aa, synthetic construct
PREIVD

SEQ ID NO: 3836 - protein, 6 aa, synthetic construct
PREIVE

SEQ ID NO: 3837 - protein, 6 aa, synthetic construct
PREIVF

SEQ ID NO: 3838 - protein, 6 aa, synthetic construct
PREIVW

SEQ ID NO: 3839 - protein, 6 aa, synthetic construct
PREIVY

SEQ ID NO: 3840 - protein, 6 aa, synthetic construct
PRELAD

SEQ ID NO: 3841 - protein, 6 aa, synthetic construct
PRELAE

SEQ ID NO: 3842 - protein, 6 aa, synthetic construct
PRELAF

SEQ ID NO: 3843 - protein, 6 aa, synthetic construct
PRELAW

SEQ ID NO: 3844 - protein, 6 aa, synthetic construct
PRELAY

SEQ ID NO: 3845 - protein, 6 aa, synthetic construct
PRELRD

SEQ ID NO: 3846 - protein, 6 aa, synthetic construct
PRELRE

SEQ ID NO: 3847 - protein, 6 aa, synthetic construct
PRELRF

SEQ ID NO: 3848 - protein, 6 aa, synthetic construct
PRELRW

SEQ ID NO: 3849 - protein, 6 aa, synthetic construct
PRELRY

SEQ ID NO: 3850 - protein, 6 aa, synthetic construct
PRELND

SEQ ID NO: 3851 - protein, 6 aa, synthetic construct
PRELNE

SEQ ID NO: 3852 - protein, 6 aa, synthetic construct
PRELNF

SEQ ID NO: 3853 - protein, 6 aa, synthetic construct
PRELNW

SEQ ID NO: 3854 - protein, 6 aa, synthetic construct
PRELNY

SEQ ID NO: 3855 - protein, 6 aa, synthetic construct
PRELDD

SEQ ID NO: 3856 - protein, 6 aa, synthetic construct
PRELDE

SEQ ID NO: 3857 - protein, 6 aa, synthetic construct
PRELDF

SEQ ID NO: 3858 - protein, 6 aa, synthetic construct
PRELDW

SEQ ID NO: 3859 - protein, 6 aa, synthetic construct
PRELDY

SEQ ID NO: 3860 - protein, 6 aa, synthetic construct
PRELCD

SEQ ID NO: 3861 - protein, 6 aa, synthetic construct
PRELCE

SEQ ID NO: 3862 - protein, 6 aa, synthetic construct
PRELCF

SEQ ID NO: 3863 - protein, 6 aa, synthetic construct
PRELCW

SEQ ID NO: 3864 - protein, 6 aa, synthetic construct
PRELCY

SEQ ID NO: 3865 - protein, 6 aa, synthetic construct
PRELQD

SEQ ID NO: 3866 - protein, 6 aa, synthetic construct
PRELQE

SEQ ID NO: 3867 - protein, 6 aa, synthetic construct
PRELQF

SEQ ID NO: 3868 - protein, 6 aa, synthetic construct
PRELQW

SEQ ID NO: 3869 - protein, 6 aa, synthetic construct
PRELQY

SEQ ID NO: 3870 - protein, 6 aa, synthetic construct
PRELED

SEQ ID NO: 3871 - protein, 6 aa, synthetic construct
PRELEE

SEQ ID NO: 3872 - protein, 6 aa, synthetic construct
PRELEF

SEQ ID NO: 3873 - protein, 6 aa, synthetic construct
PRELEW

SEQ ID NO: 3874 - protein, 6 aa, synthetic construct
PRELEY

SEQ ID NO: 3875 - protein, 6 aa, synthetic construct
PRELGD

SEQ ID NO: 3876 - protein, 6 aa, synthetic construct
PRELGE

SEQ ID NO: 3877 - protein, 6 aa, synthetic construct
PRELGF

SEQ ID NO: 3878 - protein, 6 aa, synthetic construct
PRELGW

SEQ ID NO: 3879 - protein, 6 aa, synthetic construct
PRELGY

SEQ ID NO: 3880 - protein, 6 aa, synthetic construct
PRELHD

SEQ ID NO: 3881 - protein, 6 aa, synthetic construct
PRELHE

SEQ ID NO: 3882 - protein, 6 aa, synthetic construct
PRELHF

SEQ ID NO: 3883 - protein, 6 aa, synthetic construct
PRELHW

SEQ ID NO: 3884 - protein, 6 aa, synthetic construct
PRELHY

SEQ ID NO: 3885 - protein, 6 aa, synthetic construct
PRELID

SEQ ID NO: 3886 - protein, 6 aa, synthetic construct
PRELIE

SEQ ID NO: 3887 - protein, 6 aa, synthetic construct
PRELIF

SEQ ID NO: 3888 - protein, 6 aa, synthetic construct
PRELIW

SEQ ID NO: 3889 - protein, 6 aa, synthetic construct
PRELIY

SEQ ID NO: 3890 - protein, 6 aa, synthetic construct
PRELLD

SEQ ID NO: 3891 - protein, 6 aa, synthetic construct
PRELLE

SEQ ID NO: 3892 - protein, 6 aa, synthetic construct
PRELLF

SEQ ID NO: 3893 - protein, 6 aa, synthetic construct
PRELLW

SEQ ID NO: 3894 - protein, 6 aa, synthetic construct
PRELLY

SEQ ID NO: 3895 - protein, 6 aa, synthetic construct
PRELKD

SEQ ID NO: 3896 - protein, 6 aa, synthetic construct
PRELKE

SEQ ID NO: 3897 - protein, 6 aa, synthetic construct
PRELKF

SEQ ID NO: 3898 - protein, 6 aa, synthetic construct
PRELKW

SEQ ID NO: 3899 - protein, 6 aa, synthetic construct
PRELKY

SEQ ID NO: 3900 - protein, 6 aa, synthetic construct
PRELMD

SEQ ID NO: 3901 - protein, 6 aa, synthetic construct
PRELME

SEQ ID NO: 3902 - protein, 6 aa, synthetic construct
PRELMF

SEQ ID NO: 3903 - protein, 6 aa, synthetic construct
PRELMW

SEQ ID NO: 3904 - protein, 6 aa, synthetic construct
PRELMY

SEQ ID NO: 3905 - protein, 6 aa, synthetic construct
PRELFD

SEQ ID NO: 3906 - protein, 6 aa, synthetic construct
PRELFE

SEQ ID NO: 3907 - protein, 6 aa, synthetic construct
PRELFF

SEQ ID NO: 3908 - protein, 6 aa, synthetic construct
PRELFW

SEQ ID NO: 3909 - protein, 6 aa, synthetic construct
PRELFY

SEQ ID NO: 3910 - protein, 6 aa, synthetic construct
PRELPD

SEQ ID NO: 3911 - protein, 6 aa, synthetic construct
PRELPE

SEQ ID NO: 3912 - protein, 6 aa, synthetic construct
PRELPF

SEQ ID NO: 3913 - protein, 6 aa, synthetic construct
PRELPW

SEQ ID NO: 3914 - protein, 6 aa, synthetic construct
PRELPY

SEQ ID NO: 3915 - protein, 6 aa, synthetic construct
PRELSD

SEQ ID NO: 3916 - protein, 6 aa, synthetic construct
PRELSE

SEQ ID NO: 3917 - protein, 6 aa, synthetic construct
PRELSF

SEQ ID NO: 3918 - protein, 6 aa, synthetic construct
PRELSW

SEQ ID NO: 3919 - protein, 6 aa, synthetic construct
PRELSY

SEQ ID NO: 3920 - protein, 6 aa, synthetic construct
PRELTD

SEQ ID NO: 3921 - protein, 6 aa, synthetic construct
PRELTE

SEQ ID NO: 3922 - protein, 6 aa, synthetic construct
PRELTF

SEQ ID NO: 3923 - protein, 6 aa, synthetic construct
PRELTW

SEQ ID NO: 3924 - protein, 6 aa, synthetic construct
PRELTY

SEQ ID NO: 3925 - protein, 6 aa, synthetic construct
PRELWD

SEQ ID NO: 3926 - protein, 6 aa, synthetic construct
PRELWE

SEQ ID NO: 3927 - protein, 6 aa, synthetic construct
PRELWF

SEQ ID NO: 3928 - protein, 6 aa, synthetic construct
PRELWW

SEQ ID NO: 3929 - protein, 6 aa, synthetic construct
PRELWY

SEQ ID NO: 3930 - protein, 6 aa, synthetic construct
PRELYD

SEQ ID NO: 3931 - protein, 6 aa, synthetic construct
PRELYE

SEQ ID NO: 3932 - protein, 6 aa, synthetic construct
PRELYF

SEQ ID NO: 3933 - protein, 6 aa, synthetic construct
PRELYW

SEQ ID NO: 3934 - protein, 6 aa, synthetic construct
PRELYY

SEQ ID NO: 3935 - protein, 6 aa, synthetic construct
PRELVD

SEQ ID NO: 3936 - protein, 6 aa, synthetic construct
PRELVE

SEQ ID NO: 3937 - protein, 6 aa, synthetic construct
PRELVF

SEQ ID NO: 3938 - protein, 6 aa, synthetic construct
PRELVW

SEQ ID NO: 3939 - protein, 6 aa, synthetic construct
PRELVY

SEQ ID NO: 3940 - protein, 6 aa, synthetic construct
PREKAD

SEQ ID NO: 3941 - protein, 6 aa, synthetic construct
PREKAE

SEQ ID NO: 3942 - protein, 6 aa, synthetic construct
PREKAF

SEQ ID NO: 3943 - protein, 6 aa, synthetic construct
PREKAW

SEQ ID NO: 3944 - protein, 6 aa, synthetic construct
PREKAY

SEQ ID NO: 3945 - protein, 6 aa, synthetic construct
PREKRD

SEQ ID NO: 3946 - protein, 6 aa, synthetic construct
PREKRE

SEQ ID NO: 3947 - protein, 6 aa, synthetic construct
PREKRF

SEQ ID NO: 3948 - protein, 6 aa, synthetic construct
PREKRW

SEQ ID NO: 3949 - protein, 6 aa, synthetic construct
PREKRY

SEQ ID NO: 3950 - protein, 6 aa, synthetic construct
PREKND

SEQ ID NO: 3951 - protein, 6 aa, synthetic construct
PREKNE

SEQ ID NO: 3952 - protein, 6 aa, synthetic construct
PREKNF

SEQ ID NO: 3953 - protein, 6 aa, synthetic construct
PREKNW

SEQ ID NO: 3954 - protein, 6 aa, synthetic construct
PREKNY

SEQ ID NO: 3955 - protein, 6 aa, synthetic construct
PREKDD

SEQ ID NO: 3956 - protein, 6 aa, synthetic construct
PREKDE

SEQ ID NO: 3957 - protein, 6 aa, synthetic construct
PREKDF

SEQ ID NO: 3958 - protein, 6 aa, synthetic construct
PREKDW

SEQ ID NO: 3959 - protein, 6 aa, synthetic construct
PREKDY

SEQ ID NO: 3960 - protein, 6 aa, synthetic construct
PREKCD

SEQ ID NO: 3961 - protein, 6 aa, synthetic construct
PREKCE

SEQ ID NO: 3962 - protein, 6 aa, synthetic construct
PREKCF

SEQ ID NO: 3963 - protein, 6 aa, synthetic construct
PREKCW

SEQ ID NO: 3964 - protein, 6 aa, synthetic construct
PREKCY

SEQ ID NO: 3965 - protein, 6 aa, synthetic construct
PREKQD

SEQ ID NO: 3966 - protein, 6 aa, synthetic construct
PREKQE

SEQ ID NO: 3967 - protein, 6 aa, synthetic construct
PREKQF

SEQ ID NO: 3968 - protein, 6 aa, synthetic construct
PREKQW

SEQ ID NO: 3969 - protein, 6 aa, synthetic construct
PREKQY

SEQ ID NO: 3970 - protein, 6 aa, synthetic construct
PREKED

SEQ ID NO: 3971 - protein, 6 aa, synthetic construct
PREKEE

SEQ ID NO: 3972 - protein, 6 aa, synthetic construct
PREKEF

SEQ ID NO: 3973 - protein, 6 aa, synthetic construct
PREKEW

SEQ ID NO: 3974 - protein, 6 aa, synthetic construct
PREKEY

SEQ ID NO: 3975 - protein, 6 aa, synthetic construct
PREKGD

SEQ ID NO: 3976 - protein, 6 aa, synthetic construct
PREKGE

SEQ ID NO: 3977 - protein, 6 aa, synthetic construct
PREKGF

SEQ ID NO: 3978 - protein, 6 aa, synthetic construct
PREKGW

SEQ ID NO: 3979 - protein, 6 aa, synthetic construct
PREKGY

SEQ ID NO: 3980 - protein, 6 aa, synthetic construct
PREKHD

SEQ ID NO: 3981 - protein, 6 aa, synthetic construct
PREKHE

SEQ ID NO: 3982 - protein, 6 aa, synthetic construct
PREKHF

SEQ ID NO: 3983 - protein, 6 aa, synthetic construct
PREKHW

SEQ ID NO: 3984 - protein, 6 aa, synthetic construct
PREKHY

SEQ ID NO: 3985 - protein, 6 aa, synthetic construct
PREKID

SEQ ID NO: 3986 - protein, 6 aa, synthetic construct
PREKIE

SEQ ID NO: 3987 - protein, 6 aa, synthetic construct
PREKIF

SEQ ID NO: 3988 - protein, 6 aa, synthetic construct
PREKIW

SEQ ID NO: 3989 - protein, 6 aa, synthetic construct
PREKIY

SEQ ID NO: 3990 - protein, 6 aa, synthetic construct
PREKLD

SEQ ID NO: 3991 - protein, 6 aa, synthetic construct
PREKLE

SEQ ID NO: 3992 - protein, 6 aa, synthetic construct
PREKLF

SEQ ID NO: 3993 - protein, 6 aa, synthetic construct
PREKLW

SEQ ID NO: 3994 - protein, 6 aa, synthetic construct
PREKLY

SEQ ID NO: 3995 - protein, 6 aa, synthetic construct
PREKKD

SEQ ID NO: 3996 - protein, 6 aa, synthetic construct
PREKKE

SEQ ID NO: 3997 - protein, 6 aa, synthetic construct
PREKKF

SEQ ID NO: 3998 - protein, 6 aa, synthetic construct
PREKKW

SEQ ID NO: 3999 - protein, 6 aa, synthetic construct
PREKKY

SEQ ID NO: 4000 - protein, 6 aa, synthetic construct
PREKMD

SEQ ID NO: 4001 - protein, 6 aa, synthetic construct
PREKME

SEQ ID NO: 4002 - protein, 6 aa, synthetic construct
PREKMF

SEQ ID NO: 4003 - protein, 6 aa, synthetic construct
PREKMW

SEQ ID NO: 4004 - protein, 6 aa, synthetic construct
PREKMY

SEQ ID NO: 4005 - protein, 6 aa, synthetic construct
PREKFD

SEQ ID NO: 4006 - protein, 6 aa, synthetic construct
PREKFE

SEQ ID NO: 4007 - protein, 6 aa, synthetic construct
PREKFF

SEQ ID NO: 4008 - protein, 6 aa, synthetic construct
PREKFW

SEQ ID NO: 4009 - protein, 6 aa, synthetic construct
PREKFY

SEQ ID NO: 4010 - protein, 6 aa, synthetic construct
PREKPD

SEQ ID NO: 4011 - protein, 6 aa, synthetic construct
PREKPE

SEQ ID NO: 4012 - protein, 6 aa, synthetic construct
PREKPF

SEQ ID NO: 4013 - protein, 6 aa, synthetic construct
PREKPW

SEQ ID NO: 4014 - protein, 6 aa, synthetic construct
PREKPY

SEQ ID NO: 4015 - protein, 6 aa, synthetic construct
PREKSD

SEQ ID NO: 4016 - protein, 6 aa, synthetic construct
PREKSE

SEQ ID NO: 4017 - protein, 6 aa, synthetic construct
PREKSF

SEQ ID NO: 4018 - protein, 6 aa, synthetic construct
PREKSW

SEQ ID NO: 4019 - protein, 6 aa, synthetic construct
PREKSY

SEQ ID NO: 4020 - protein, 6 aa, synthetic construct
PREKTD

SEQ ID NO: 4021 - protein, 6 aa, synthetic construct
PREKTE

SEQ ID NO: 4022 - protein, 6 aa, synthetic construct
PREKTF

SEQ ID NO: 4023 - protein, 6 aa, synthetic construct
PREKTW

SEQ ID NO: 4024 - protein, 6 aa, synthetic construct
PREKTY

SEQ ID NO: 4025 - protein, 6 aa, synthetic construct
PREKWD

SEQ ID NO: 4026 - protein, 6 aa, synthetic construct
PREKWE

SEQ ID NO: 4027 - protein, 6 aa, synthetic construct
PREKWF

SEQ ID NO: 4028 - protein, 6 aa, synthetic construct
PREKWW

SEQ ID NO: 4029 - protein, 6 aa, synthetic construct
PREKWY

SEQ ID NO: 4030 - protein, 6 aa, synthetic construct
PREKYD

SEQ ID NO: 4031 - protein, 6 aa, synthetic construct
PREKYE

SEQ ID NO: 4032 - protein, 6 aa, synthetic construct
PREKYF

SEQ ID NO: 4033 - protein, 6 aa, synthetic construct
PREKYW

SEQ ID NO: 4034 - protein, 6 aa, synthetic construct
PREKYY

SEQ ID NO: 4035 - protein, 6 aa, synthetic construct
PREKVD

SEQ ID NO: 4036 - protein, 6 aa, synthetic construct
PREKVE

SEQ ID NO: 4037 - protein, 6 aa, synthetic construct
PREKVF

SEQ ID NO: 4038 - protein, 6 aa, synthetic construct
PREKVW

SEQ ID NO: 4039 - protein, 6 aa, synthetic construct
PREKVY

SEQ ID NO: 4040 - protein, 6 aa, synthetic construct
PREMAD

SEQ ID NO: 4041 - protein, 6 aa, synthetic construct
PREMAE

SEQ ID NO: 4042 - protein, 6 aa, synthetic construct
PREMAF

SEQ ID NO: 4043 - protein, 6 aa, synthetic construct
PREMAW

SEQ ID NO: 4044 - protein, 6 aa, synthetic construct
PREMAY

SEQ ID NO: 4045 - protein, 6 aa, synthetic construct
PREMRD

SEQ ID NO: 4046 - protein, 6 aa, synthetic construct
PREMRE

SEQ ID NO: 4047 - protein, 6 aa, synthetic construct
PREMRF

SEQ ID NO: 4048 - protein, 6 aa, synthetic construct
PREMRW

SEQ ID NO: 4049 - protein, 6 aa, synthetic construct
PREMRY

SEQ ID NO: 4050 - protein, 6 aa, synthetic construct
PREMND

SEQ ID NO: 4051 - protein, 6 aa, synthetic construct
PREMNE

SEQ ID NO: 4052 - protein, 6 aa, synthetic construct
PREMNF

SEQ ID NO: 4053 - protein, 6 aa, synthetic construct
PREMNW

SEQ ID NO: 4054 - protein, 6 aa, synthetic construct
PREMNY

SEQ ID NO: 4055 - protein, 6 aa, synthetic construct
PREMDD

SEQ ID NO: 4056 - protein, 6 aa, synthetic construct
PREMDE

SEQ ID NO: 4057 - protein, 6 aa, synthetic construct
PREMDF

SEQ ID NO: 4058 - protein, 6 aa, synthetic construct
PREMDW

SEQ ID NO: 4059 - protein, 6 aa, synthetic construct
PREMDY

SEQ ID NO: 4060 - protein, 6 aa, synthetic construct
PREMCD

SEQ ID NO: 4061 - protein, 6 aa, synthetic construct
PREMCE

SEQ ID NO: 4062 - protein, 6 aa, synthetic construct
PREMCF

SEQ ID NO: 4063 - protein, 6 aa, synthetic construct
PREMCW

SEQ ID NO: 4064 - protein, 6 aa, synthetic construct
PREMCY

SEQ ID NO: 4065 - protein, 6 aa, synthetic construct
PREMQD

SEQ ID NO: 4066 - protein, 6 aa, synthetic construct
PREMQE

SEQ ID NO: 4067 - protein, 6 aa, synthetic construct
PREMQF

SEQ ID NO: 4068 - protein, 6 aa, synthetic construct
PREMQW

SEQ ID NO: 4069 - protein, 6 aa, synthetic construct
PREMQY

SEQ ID NO: 4070 - protein, 6 aa, synthetic construct
PREMED

SEQ ID NO: 4071 - protein, 6 aa, synthetic construct
PREMEE

SEQ ID NO: 4072 - protein, 6 aa, synthetic construct
PREMEF

SEQ ID NO: 4073 - protein, 6 aa, synthetic construct
PREMEW

SEQ ID NO: 4074 - protein, 6 aa, synthetic construct
PREMEY

SEQ ID NO: 4075 - protein, 6 aa, synthetic construct
PREMGD

SEQ ID NO: 4076 - protein, 6 aa, synthetic construct
PREMGE

SEQ ID NO: 4077 - protein, 6 aa, synthetic construct
PREMGF

SEQ ID NO: 4078 - protein, 6 aa, synthetic construct
PREMGW

SEQ ID NO: 4079 - protein, 6 aa, synthetic construct
PREMGY

SEQ ID NO: 4080 - protein, 6 aa, synthetic construct
PREMHD

SEQ ID NO: 4081 - protein, 6 aa, synthetic construct
PREMHE

SEQ ID NO: 4082 - protein, 6 aa, synthetic construct
PREMHF

SEQ ID NO: 4083 - protein, 6 aa, synthetic construct
PREMHW

SEQ ID NO: 4084 - protein, 6 aa, synthetic construct
PREMHY

SEQ ID NO: 4085 - protein, 6 aa, synthetic construct
PREMID

SEQ ID NO: 4086 - protein, 6 aa, synthetic construct
PREMIE

SEQ ID NO: 4087 - protein, 6 aa, synthetic construct
PREMIF

SEQ ID NO: 4088 - protein, 6 aa, synthetic construct
PREMIW

SEQ ID NO: 4089 - protein, 6 aa, synthetic construct
PREMIY

SEQ ID NO: 4090 - protein, 6 aa, synthetic construct
PREMLD

SEQ ID NO: 4091 - protein, 6 aa, synthetic construct
PREMLE

SEQ ID NO: 4092 - protein, 6 aa, synthetic construct
PREMLF

SEQ ID NO: 4093 - protein, 6 aa, synthetic construct
PREMLW

SEQ ID NO: 4094 - protein, 6 aa, synthetic construct
PREMLY

SEQ ID NO: 4095 - protein, 6 aa, synthetic construct
PREMKD

SEQ ID NO: 4096 - protein, 6 aa, synthetic construct
PREMKE

SEQ ID NO: 4097 - protein, 6 aa, synthetic construct
PREMKF

SEQ ID NO: 4098 - protein, 6 aa, synthetic construct
PREMKW

SEQ ID NO: 4099 - protein, 6 aa, synthetic construct
PREMKY

SEQ ID NO: 4100 - protein, 6 aa, synthetic construct
PREMMD

SEQ ID NO: 4101 - protein, 6 aa, synthetic construct
PREMME

SEQ ID NO: 4102 - protein, 6 aa, synthetic construct
PREMMF

SEQ ID NO: 4103 - protein, 6 aa, synthetic construct
PREMMW

SEQ ID NO: 4104 - protein, 6 aa, synthetic construct
PREMMY

SEQ ID NO: 4105 - protein, 6 aa, synthetic construct
PREMFD

SEQ ID NO: 4106 - protein, 6 aa, synthetic construct
PREMFE

SEQ ID NO: 4107 - protein, 6 aa, synthetic construct
PREMFF

SEQ ID NO: 4108 - protein, 6 aa, synthetic construct
PREMFW

SEQ ID NO: 4109 - protein, 6 aa, synthetic construct
PREMFY

SEQ ID NO: 4110 - protein, 6 aa, synthetic construct
PREMPD

SEQ ID NO: 4111 - protein, 6 aa, synthetic construct
PREMPE

SEQ ID NO: 4112 - protein, 6 aa, synthetic construct
PREMPF

SEQ ID NO: 4113 - protein, 6 aa, synthetic construct
PREMPW

SEQ ID NO: 4114 - protein, 6 aa, synthetic construct
PREMPY

SEQ ID NO: 4115 - protein, 6 aa, synthetic construct
PREMSD

SEQ ID NO: 4116 - protein, 6 aa, synthetic construct
PREMSE

SEQ ID NO: 4117 - protein, 6 aa, synthetic construct
PREMSF

SEQ ID NO: 4118 - protein, 6 aa, synthetic construct
PREMSW

SEQ ID NO: 4119 - protein, 6 aa, synthetic construct
PREMSY

SEQ ID NO: 4120 - protein, 6 aa, synthetic construct
PREMTD

SEQ ID NO: 4121 - protein, 6 aa, synthetic construct
PREMTE

SEQ ID NO: 4122 - protein, 6 aa, synthetic construct
PREMTF

SEQ ID NO: 4123 - protein, 6 aa, synthetic construct
PREMTW

SEQ ID NO: 4124 - protein, 6 aa, synthetic construct
PREMTY

SEQ ID NO: 4125 - protein, 6 aa, synthetic construct
PREMWD

SEQ ID NO: 4126 - protein, 6 aa, synthetic construct
PREMWE

SEQ ID NO: 4127 - protein, 6 aa, synthetic construct
PREMWF

SEQ ID NO: 4128 - protein, 6 aa, synthetic construct
PREMWW

SEQ ID NO: 4129 - protein, 6 aa, synthetic construct
PREMWY

SEQ ID NO: 4130 - protein, 6 aa, synthetic construct
PREMYD

SEQ ID NO: 4131 - protein, 6 aa, synthetic construct
PREMYE

SEQ ID NO: 4132 - protein, 6 aa, synthetic construct
PREMYF

SEQ ID NO: 4133 - protein, 6 aa, synthetic construct
PREMYW

SEQ ID NO: 4134 - protein, 6 aa, synthetic construct
PREMYY

SEQ ID NO: 4135 - protein, 6 aa, synthetic construct
PREMVD

SEQ ID NO: 4136 - protein, 6 aa, synthetic construct
PREMVE

SEQ ID NO: 4137 - protein, 6 aa, synthetic construct
PREMVF

SEQ ID NO: 4138 - protein, 6 aa, synthetic construct
PREMVW

SEQ ID NO: 4139 - protein, 6 aa, synthetic construct
PREMVY

SEQ ID NO: 4140 - protein, 6 aa, synthetic construct
PREFAD

SEQ ID NO: 4141 - protein, 6 aa, synthetic construct
PREFAE

SEQ ID NO: 4142 - protein, 6 aa, synthetic construct
PREFAF

SEQ ID NO: 4143 - protein, 6 aa, synthetic construct
PREFAW

SEQ ID NO: 4144 - protein, 6 aa, synthetic construct
PREFAY

SEQ ID NO: 4145 - protein, 6 aa, synthetic construct
PREFRD

SEQ ID NO: 4146 - protein, 6 aa, synthetic construct
PREFRE

SEQ ID NO: 4147 - protein, 6 aa, synthetic construct
PREFRF

SEQ ID NO: 4148 - protein, 6 aa, synthetic construct
PREFRW

SEQ ID NO: 4149 - protein, 6 aa, synthetic construct
PREFRY

SEQ ID NO: 4150 - protein, 6 aa, synthetic construct
PREFND

SEQ ID NO: 4151 - protein, 6 aa, synthetic construct
PREFNE

SEQ ID NO: 4152 - protein, 6 aa, synthetic construct
PREFNF

SEQ ID NO: 4153 - protein, 6 aa, synthetic construct
PREFNW

SEQ ID NO: 4154 - protein, 6 aa, synthetic construct
PREFNY

SEQ ID NO: 4155 - protein, 6 aa, synthetic construct
PREFDD

SEQ ID NO: 4156 - protein, 6 aa, synthetic construct
PREFDE

SEQ ID NO: 4157 - protein, 6 aa, synthetic construct
PREFDF

SEQ ID NO: 4158 - protein, 6 aa, synthetic construct
PREFDW

SEQ ID NO: 4159 - protein, 6 aa, synthetic construct
PREFDY

SEQ ID NO: 4160 - protein, 6 aa, synthetic construct
PREFCD

SEQ ID NO: 4161 - protein, 6 aa, synthetic construct
PREFCE

SEQ ID NO: 4162 - protein, 6 aa, synthetic construct
PREFCF

SEQ ID NO: 4163 - protein, 6 aa, synthetic construct
PREFCW

SEQ ID NO: 4164 - protein, 6 aa, synthetic construct
PREFCY

SEQ ID NO: 4165 - protein, 6 aa, synthetic construct
PREFQD

SEQ ID NO: 4166 - protein, 6 aa, synthetic construct
PREFQE

SEQ ID NO: 4167 - protein, 6 aa, synthetic construct
PREFQF

SEQ ID NO: 4168 - protein, 6 aa, synthetic construct
PREFQW

SEQ ID NO: 4169 - protein, 6 aa, synthetic construct
PREFQY

SEQ ID NO: 4170 - protein, 6 aa, synthetic construct
PREFED

SEQ ID NO: 4171 - protein, 6 aa, synthetic construct
PREFEE

SEQ ID NO: 4172 - protein, 6 aa, synthetic construct
PREFEF

SEQ ID NO: 4173 - protein, 6 aa, synthetic construct
PREFEW

SEQ ID NO: 4174 - protein, 6 aa, synthetic construct
PREFEY

SEQ ID NO: 4175 - protein, 6 aa, synthetic construct
PREFGD

SEQ ID NO: 4176 - protein, 6 aa, synthetic construct
PREFGE

SEQ ID NO: 4177 - protein, 6 aa, synthetic construct
PREFGF

SEQ ID NO: 4178 - protein, 6 aa, synthetic construct
PREFGW

SEQ ID NO: 4179 - protein, 6 aa, synthetic construct
PREFGY

SEQ ID NO: 4180 - protein, 6 aa, synthetic construct
PREFHD

SEQ ID NO: 4181 - protein, 6 aa, synthetic construct
PREFHE

SEQ ID NO: 4182 - protein, 6 aa, synthetic construct
PREFHF

SEQ ID NO: 4183 - protein, 6 aa, synthetic construct
PREFHW

SEQ ID NO: 4184 - protein, 6 aa, synthetic construct
PREFHY

SEQ ID NO: 4185 - protein, 6 aa, synthetic construct
PREFID

SEQ ID NO: 4186 - protein, 6 aa, synthetic construct
PREFIE

SEQ ID NO: 4187 - protein, 6 aa, synthetic construct
PREFIF

SEQ ID NO: 4188 - protein, 6 aa, synthetic construct
PREFIW

SEQ ID NO: 4189 - protein, 6 aa, synthetic construct
PREFIY

SEQ ID NO: 4190 - protein, 6 aa, synthetic construct
PREFLD

SEQ ID NO: 4191 - protein, 6 aa, synthetic construct
PREFLE

SEQ ID NO: 4192 - protein, 6 aa, synthetic construct
PREFLF

SEQ ID NO: 4193 - protein, 6 aa, synthetic construct
PREFLW

SEQ ID NO: 4194 - protein, 6 aa, synthetic construct
PREFLY

SEQ ID NO: 4195 - protein, 6 aa, synthetic construct
PREFKD

SEQ ID NO: 4196 - protein, 6 aa, synthetic construct
PREFKE

SEQ ID NO: 4197 - protein, 6 aa, synthetic construct
PREFKF

SEQ ID NO: 4198 - protein, 6 aa, synthetic construct
PREFKW

SEQ ID NO: 4199 - protein, 6 aa, synthetic construct
PREFKY

SEQ ID NO: 4200 - protein, 6 aa, synthetic construct
PREFMD

SEQ ID NO: 4201 - protein, 6 aa, synthetic construct
PREFME

SEQ ID NO: 4202 - protein, 6 aa, synthetic construct
PREFMF

SEQ ID NO: 4203 - protein, 6 aa, synthetic construct
PREFMW

SEQ ID NO: 4204 - protein, 6 aa, synthetic construct
PREFMY

SEQ ID NO: 4205 - protein, 6 aa, synthetic construct
PREFFD

SEQ ID NO: 4206 - protein, 6 aa, synthetic construct
PREFFE

SEQ ID NO: 4207 - protein, 6 aa, synthetic construct
PREFFF

SEQ ID NO: 4208 - protein, 6 aa, synthetic construct
PREFFW

SEQ ID NO: 4209 - protein, 6 aa, synthetic construct
PREFFY

SEQ ID NO: 4210 - protein, 6 aa, synthetic construct
PREFPD

SEQ ID NO: 4211 - protein, 6 aa, synthetic construct
PREFPE

SEQ ID NO: 4212 - protein, 6 aa, synthetic construct
PREFPF

SEQ ID NO: 4213 - protein, 6 aa, synthetic construct
PREFPW

SEQ ID NO: 4214 - protein, 6 aa, synthetic construct
PREFPY

SEQ ID NO: 4215 - protein, 6 aa, synthetic construct
PREFSD

SEQ ID NO: 4216 - protein, 6 aa, synthetic construct
PREFSE

SEQ ID NO: 4217 - protein, 6 aa, synthetic construct
PREFSF

SEQ ID NO: 4218 - protein, 6 aa, synthetic construct
PREFSW

SEQ ID NO: 4219 - protein, 6 aa, synthetic construct
PREFSY

SEQ ID NO: 4220 - protein, 6 aa, synthetic construct
PREFTD

SEQ ID NO: 4221 - protein, 6 aa, synthetic construct
PREFTE

SEQ ID NO: 4222 - protein, 6 aa, synthetic construct
PREFTF

SEQ ID NO: 4223 - protein, 6 aa, synthetic construct
PREFTW

SEQ ID NO: 4224 - protein, 6 aa, synthetic construct
PREFTY

SEQ ID NO: 4225 - protein, 6 aa, synthetic construct
PREFWD

SEQ ID NO: 4226 - protein, 6 aa, synthetic construct
PREFWE

SEQ ID NO: 4227 - protein, 6 aa, synthetic construct
PREFWF

SEQ ID NO: 4228 - protein, 6 aa, synthetic construct
PREFWW

SEQ ID NO: 4229 - protein, 6 aa, synthetic construct
PREFWY

SEQ ID NO: 4230 - protein, 6 aa, synthetic construct
PREFYD

SEQ ID NO: 4231 - protein, 6 aa, synthetic construct
PREFYE

SEQ ID NO: 4232 - protein, 6 aa, synthetic construct
PREFYF

SEQ ID NO: 4233 - protein, 6 aa, synthetic construct
PREFYW

SEQ ID NO: 4234 - protein, 6 aa, synthetic construct
PREFYY

SEQ ID NO: 4235 - protein, 6 aa, synthetic construct
PREFVD

SEQ ID NO: 4236 - protein, 6 aa, synthetic construct
PREFVE

SEQ ID NO: 4237 - protein, 6 aa, synthetic construct
PREFVF

SEQ ID NO: 4238 - protein, 6 aa, synthetic construct
PREFVW

SEQ ID NO: 4239 - protein, 6 aa, synthetic construct
PREFVY

SEQ ID NO: 4240 - protein, 6 aa, synthetic construct
PREPAD

SEQ ID NO: 4241 - protein, 6 aa, synthetic construct
PREPAE

SEQ ID NO: 4242 - protein, 6 aa, synthetic construct
PREPAF

SEQ ID NO: 4243 - protein, 6 aa, synthetic construct
PREPAW

SEQ ID NO: 4244 - protein, 6 aa, synthetic construct
PREPAY

SEQ ID NO: 4245 - protein, 6 aa, synthetic construct
PREPRD

SEQ ID NO: 4246 - protein, 6 aa, synthetic construct
PREPRE

SEQ ID NO: 4247 - protein, 6 aa, synthetic construct
PREPRF

SEQ ID NO: 4248 - protein, 6 aa, synthetic construct
PREPRW

SEQ ID NO: 4249 - protein, 6 aa, synthetic construct
PREPRY

SEQ ID NO: 4250 - protein, 6 aa, synthetic construct
PREPND

SEQ ID NO: 4251 - protein, 6 aa, synthetic construct
PREPNE

SEQ ID NO: 4252 - protein, 6 aa, synthetic construct
PREPNF

SEQ ID NO: 4253 - protein, 6 aa, synthetic construct
PREPNW

SEQ ID NO: 4254 - protein, 6 aa, synthetic construct
PREPNY

SEQ ID NO: 4255 - protein, 6 aa, synthetic construct
PREPDD

SEQ ID NO: 4256 - protein, 6 aa, synthetic construct
PREPDE

SEQ ID NO: 4257 - protein, 6 aa, synthetic construct
PREPDF

SEQ ID NO: 4258 - protein, 6 aa, synthetic construct
PREPDW

SEQ ID NO: 4259 - protein, 6 aa, synthetic construct
PREPDY

SEQ ID NO: 4260 - protein, 6 aa, synthetic construct
PREPCD

SEQ ID NO: 4261 - protein, 6 aa, synthetic construct
PREPCE

SEQ ID NO: 4262 - protein, 6 aa, synthetic construct
PREPCF

SEQ ID NO: 4263 - protein, 6 aa, synthetic construct
PREPCW

SEQ ID NO: 4264 - protein, 6 aa, synthetic construct
PREPCY

SEQ ID NO: 4265 - protein, 6 aa, synthetic construct
PREPQD

SEQ ID NO: 4266 - protein, 6 aa, synthetic construct
PREPQE

SEQ ID NO: 4267 - protein, 6 aa, synthetic construct
PREPQF

SEQ ID NO: 4268 - protein, 6 aa, synthetic construct
PREPQW

SEQ ID NO: 4269 - protein, 6 aa, synthetic construct
PREPQY

SEQ ID NO: 4270 - protein, 6 aa, synthetic construct
PREPED

SEQ ID NO: 4271 - protein, 6 aa, synthetic construct
PREPEE

SEQ ID NO: 4272 - protein, 6 aa, synthetic construct
PREPEF

SEQ ID NO: 4273 - protein, 6 aa, synthetic construct
PREPEW

SEQ ID NO: 4274 - protein, 6 aa, synthetic construct
PREPEY

SEQ ID NO: 4275 - protein, 6 aa, synthetic construct
PREPGD

SEQ ID NO: 4276 - protein, 6 aa, synthetic construct
PREPGE

SEQ ID NO: 4277 - protein, 6 aa, synthetic construct
PREPGF

SEQ ID NO: 4278 - protein, 6 aa, synthetic construct
PREPGW

SEQ ID NO: 4279 - protein, 6 aa, synthetic construct
PREPGY

SEQ ID NO: 4280 - protein, 6 aa, synthetic construct
PREPHD

SEQ ID NO: 4281 - protein, 6 aa, synthetic construct
PREPHE

SEQ ID NO: 4282 - protein, 6 aa, synthetic construct
PREPHF

SEQ ID NO: 4283 - protein, 6 aa, synthetic construct
PREPHW

SEQ ID NO: 4284 - protein, 6 aa, synthetic construct
PREPHY

SEQ ID NO: 4285 - protein, 6 aa, synthetic construct
PREPID

SEQ ID NO: 4286 - protein, 6 aa, synthetic construct
PREPIE

SEQ ID NO: 4287 - protein, 6 aa, synthetic construct
PREPIF

SEQ ID NO: 4288 - protein, 6 aa, synthetic construct
PREPIW

SEQ ID NO: 4289 - protein, 6 aa, synthetic construct
PREPIY

SEQ ID NO: 4290 - protein, 6 aa, synthetic construct
PREPLD

SEQ ID NO: 4291 - protein, 6 aa, synthetic construct
PREPLE

SEQ ID NO: 4292 - protein, 6 aa, synthetic construct
PREPLF

SEQ ID NO: 4293 - protein, 6 aa, synthetic construct
PREPLW

SEQ ID NO: 4294 - protein, 6 aa, synthetic construct
PREPLY

SEQ ID NO: 4295 - protein, 6 aa, synthetic construct
PREPKD

SEQ ID NO: 4296 - protein, 6 aa, synthetic construct
PREPKE

SEQ ID NO: 4297 - protein, 6 aa, synthetic construct
PREPKF

SEQ ID NO: 4298 - protein, 6 aa, synthetic construct
PREPKW

SEQ ID NO: 4299 - protein, 6 aa, synthetic construct
PREPKY

SEQ ID NO: 4300 - protein, 6 aa, synthetic construct
PREPMD

SEQ ID NO: 4301 - protein, 6 aa, synthetic construct
PREPME

SEQ ID NO: 4302 - protein, 6 aa, synthetic construct
PREPMF

SEQ ID NO: 4303 - protein, 6 aa, synthetic construct
PREPMW

SEQ ID NO: 4304 - protein, 6 aa, synthetic construct
PREPMY

SEQ ID NO: 4305 - protein, 6 aa, synthetic construct
PREPFD

SEQ ID NO: 4306 - protein, 6 aa, synthetic construct
PREPFE

SEQ ID NO: 4307 - protein, 6 aa, synthetic construct
PREPFF

SEQ ID NO: 4308 - protein, 6 aa, synthetic construct
PREPFW

SEQ ID NO: 4309 - protein, 6 aa, synthetic construct
PREPFY

SEQ ID NO: 4310 - protein, 6 aa, synthetic construct
PREPPD

SEQ ID NO: 4311 - protein, 6 aa, synthetic construct
PREPPE

SEQ ID NO: 4312 - protein, 6 aa, synthetic construct
PREPPF

SEQ ID NO: 4313 - protein, 6 aa, synthetic construct
PREPPW

SEQ ID NO: 4314 - protein, 6 aa, synthetic construct
PREPPY

SEQ ID NO: 4315 - protein, 6 aa, synthetic construct
PREPSD

SEQ ID NO: 4316 - protein, 6 aa, synthetic construct
PREPSE

SEQ ID NO: 4317 - protein, 6 aa, synthetic construct
PREPSF

SEQ ID NO: 4318 - protein, 6 aa, synthetic construct
PREPSW

SEQ ID NO: 4319 - protein, 6 aa, synthetic construct
PREPSY

SEQ ID NO: 4320 - protein, 6 aa, synthetic construct
PREPTD

SEQ ID NO: 4321 - protein, 6 aa, synthetic construct
PREPTE

SEQ ID NO: 4322 - protein, 6 aa, synthetic construct
PREPTF

SEQ ID NO: 4323 - protein, 6 aa, synthetic construct
PREPTW

SEQ ID NO: 4324 - protein, 6 aa, synthetic construct
PREPTY

SEQ ID NO: 4325 - protein, 6 aa, synthetic construct
PREPWD

SEQ ID NO: 4326 - protein, 6 aa, synthetic construct
PREPWE

SEQ ID NO: 4327 - protein, 6 aa, synthetic construct
PREPWF

SEQ ID NO: 4328 - protein, 6 aa, synthetic construct
PREPWW

SEQ ID NO: 4329 - protein, 6 aa, synthetic construct
PREPWY

SEQ ID NO: 4330 - protein, 6 aa, synthetic construct
PREPYD

SEQ ID NO: 4331 - protein, 6 aa, synthetic construct
PREPYE

SEQ ID NO: 4332 - protein, 6 aa, synthetic construct
PREPYF

SEQ ID NO: 4333 - protein, 6 aa, synthetic construct
PREPYW

SEQ ID NO: 4334 - protein, 6 aa, synthetic construct
PREPYY

SEQ ID NO: 4335 - protein, 6 aa, synthetic construct
PREPVD

SEQ ID NO: 4336 - protein, 6 aa, synthetic construct
PREPVE

SEQ ID NO: 4337 - protein, 6 aa, synthetic construct
PREPVF

SEQ ID NO: 4338 - protein, 6 aa, synthetic construct
PREPVW

SEQ ID NO: 4339 - protein, 6 aa, synthetic construct
PREPVY

SEQ ID NO: 4340 - protein, 6 aa, synthetic construct
PRESAD

SEQ ID NO: 4341 - protein, 6 aa, synthetic construct
PRESAE

SEQ ID NO: 4342 - protein, 6 aa, synthetic construct
PRESAF

SEQ ID NO: 4343 - protein, 6 aa, synthetic construct
PRESAW

SEQ ID NO: 4344 - protein, 6 aa, synthetic construct
PRESAY

SEQ ID NO: 4345 - protein, 6 aa, synthetic construct
PRESRD

SEQ ID NO: 4346 - protein, 6 aa, synthetic construct
PRESRE

SEQ ID NO: 4347 - protein, 6 aa, synthetic construct
PRESRF

SEQ ID NO: 4348 - protein, 6 aa, synthetic construct
PRESRW

SEQ ID NO: 4349 - protein, 6 aa, synthetic construct
PRESRY

SEQ ID NO: 4350 - protein, 6 aa, synthetic construct
PRESND

SEQ ID NO: 4351 - protein, 6 aa, synthetic construct
PRESNE

SEQ ID NO: 4352 - protein, 6 aa, synthetic construct
PRESNF

SEQ ID NO: 4353 - protein, 6 aa, synthetic construct
PRESNW

SEQ ID NO: 4354 - protein, 6 aa, synthetic construct
PRESNY

SEQ ID NO: 4355 - protein, 6 aa, synthetic construct
PRESDD

SEQ ID NO: 4356 - protein, 6 aa, synthetic construct
PRESDE

SEQ ID NO: 4357 - protein, 6 aa, synthetic construct
PRESDF

SEQ ID NO: 4358 - protein, 6 aa, synthetic construct
PRESDW

SEQ ID NO: 4359 - protein, 6 aa, synthetic construct
PRESDY

SEQ ID NO: 4360 - protein, 6 aa, synthetic construct
PRESCD

SEQ ID NO: 4361 - protein, 6 aa, synthetic construct
PRESCE

SEQ ID NO: 4362 - protein, 6 aa, synthetic construct
PRESCF

SEQ ID NO: 4363 - protein, 6 aa, synthetic construct
PRESCW

SEQ ID NO: 4364 - protein, 6 aa, synthetic construct
PRESCY

SEQ ID NO: 4365 - protein, 6 aa, synthetic construct
PRESQD

SEQ ID NO: 4366 - protein, 6 aa, synthetic construct
PRESQE

SEQ ID NO: 4367 - protein, 6 aa, synthetic construct
PRESQF

SEQ ID NO: 4368 - protein, 6 aa, synthetic construct
PRESQW

SEQ ID NO: 4369 - protein, 6 aa, synthetic construct
PRESQY

SEQ ID NO: 4370 - protein, 6 aa, synthetic construct
PRESED

SEQ ID NO: 4371 - protein, 6 aa, synthetic construct
PRESEE

SEQ ID NO: 4372 - protein, 6 aa, synthetic construct
PRESEF

SEQ ID NO: 4373 - protein, 6 aa, synthetic construct
PRESEW

SEQ ID NO: 4374 - protein, 6 aa, synthetic construct
PRESEY

SEQ ID NO: 4375 - protein, 6 aa, synthetic construct
PRESGD

SEQ ID NO: 4376 - protein, 6 aa, synthetic construct
PRESGE

SEQ ID NO: 4377 - protein, 6 aa, synthetic construct
PRESGF

SEQ ID NO: 4378 - protein, 6 aa, synthetic construct
PRESGW

SEQ ID NO: 4379 - protein, 6 aa, synthetic construct
PRESGY

SEQ ID NO: 4380 - protein, 6 aa, synthetic construct
PRESHD

SEQ ID NO: 4381 - protein, 6 aa, synthetic construct
PRESHE

SEQ ID NO: 4382 - protein, 6 aa, synthetic construct
PRESHF

SEQ ID NO: 4383 - protein, 6 aa, synthetic construct
PRESHW

SEQ ID NO: 4384 - protein, 6 aa, synthetic construct
PRESHY

SEQ ID NO: 4385 - protein, 6 aa, synthetic construct
PRESID

SEQ ID NO: 4386 - protein, 6 aa, synthetic construct
PRESIE

SEQ ID NO: 4387 - protein, 6 aa, synthetic construct
PRESIF

SEQ ID NO: 4388 - protein, 6 aa, synthetic construct
PRESIW

SEQ ID NO: 4389 - protein, 6 aa, synthetic construct
PRESIY

SEQ ID NO: 4390 - protein, 6 aa, synthetic construct
PRESLD

SEQ ID NO: 4391 - protein, 6 aa, synthetic construct
PRESLE

SEQ ID NO: 4392 - protein, 6 aa, synthetic construct
PRESLF

SEQ ID NO: 4393 - protein, 6 aa, synthetic construct
PRESLW

SEQ ID NO: 4394 - protein, 6 aa, synthetic construct
PRESLY

SEQ ID NO: 4395 - protein, 6 aa, synthetic construct
PRESKD

SEQ ID NO: 4396 - protein, 6 aa, synthetic construct
PRESKE

SEQ ID NO: 4397 - protein, 6 aa, synthetic construct
PRESKF

SEQ ID NO: 4398 - protein, 6 aa, synthetic construct
PRESKW

SEQ ID NO: 4399 - protein, 6 aa, synthetic construct
PRESKY

SEQ ID NO: 4400 - protein, 6 aa, synthetic construct
PRESMD

SEQ ID NO: 4401 - protein, 6 aa, synthetic construct
PRESME

SEQ ID NO: 4402 - protein, 6 aa, synthetic construct
PRESMF

SEQ ID NO: 4403 - protein, 6 aa, synthetic construct
PRESMW

SEQ ID NO: 4404 - protein, 6 aa, synthetic construct
PRESMY

SEQ ID NO: 4405 - protein, 6 aa, synthetic construct
PRESFD

SEQ ID NO: 4406 - protein, 6 aa, synthetic construct
PRESFE

SEQ ID NO: 4407 - protein, 6 aa, synthetic construct
PRESFF

SEQ ID NO: 4408 - protein, 6 aa, synthetic construct
PRESFW

SEQ ID NO: 4409 - protein, 6 aa, synthetic construct
PRESFY

SEQ ID NO: 4410 - protein, 6 aa, synthetic construct
PRESPD

SEQ ID NO: 4411 - protein, 6 aa, synthetic construct
PRESPE

SEQ ID NO: 4412 - protein, 6 aa, synthetic construct
PRESPF

SEQ ID NO: 4413 - protein, 6 aa, synthetic construct
PRESPW

SEQ ID NO: 4414 - protein, 6 aa, synthetic construct
PRESPY

SEQ ID NO: 4415 - protein, 6 aa, synthetic construct
PRESSD

SEQ ID NO: 4416 - protein, 6 aa, synthetic construct
PRESSE

SEQ ID NO: 4417 - protein, 6 aa, synthetic construct
PRESSF

SEQ ID NO: 4418 - protein, 6 aa, synthetic construct
PRESSW

SEQ ID NO: 4419 - protein, 6 aa, synthetic construct
PRESSY

SEQ ID NO: 4420 - protein, 6 aa, synthetic construct
PRESTD

SEQ ID NO: 4421 - protein, 6 aa, synthetic construct
PRESTE

SEQ ID NO: 4422 - protein, 6 aa, synthetic construct
PRESTF

SEQ ID NO: 4423 - protein, 6 aa, synthetic construct
PRESTW

SEQ ID NO: 4424 - protein, 6 aa, synthetic construct
PRESTY

SEQ ID NO: 4425 - protein, 6 aa, synthetic construct
PRESWD

SEQ ID NO: 4426 - protein, 6 aa, synthetic construct
PRESWE

SEQ ID NO: 4427 - protein, 6 aa, synthetic construct
PRESWF

SEQ ID NO: 4428 - protein, 6 aa, synthetic construct
PRESWW

SEQ ID NO: 4429 - protein, 6 aa, synthetic construct
PRESWY

SEQ ID NO: 4430 - protein, 6 aa, synthetic construct
PRESYD

SEQ ID NO: 4431 - protein, 6 aa, synthetic construct
PRESYE

SEQ ID NO: 4432 - protein, 6 aa, synthetic construct
PRESYF

SEQ ID NO: 4433 - protein, 6 aa, synthetic construct
PRESYW

SEQ ID NO: 4434 - protein, 6 aa, synthetic construct
PRESYY

SEQ ID NO: 4435 - protein, 6 aa, synthetic construct
PRESVD

SEQ ID NO: 4436 - protein, 6 aa, synthetic construct
PRESVE

SEQ ID NO: 4437 - protein, 6 aa, synthetic construct
PRESVF

SEQ ID NO: 4438 - protein, 6 aa, synthetic construct
PRESVW

SEQ ID NO: 4439 - protein, 6 aa, synthetic construct
PRESVY

SEQ ID NO: 4440 - protein, 6 aa, synthetic construct
PRETAD

SEQ ID NO: 4441 - protein, 6 aa, synthetic construct
PRETAE

SEQ ID NO: 4442 - protein, 6 aa, synthetic construct
PRETAF

SEQ ID NO: 4443 - protein, 6 aa, synthetic construct
PRETAW

SEQ ID NO: 4444 - protein, 6 aa, synthetic construct
PRETAY

SEQ ID NO: 4445 - protein, 6 aa, synthetic construct
PRETRD

SEQ ID NO: 4446 - protein, 6 aa, synthetic construct
PRETRE

SEQ ID NO: 4447 - protein, 6 aa, synthetic construct
PRETRF

SEQ ID NO: 4448 - protein, 6 aa, synthetic construct
PRETRW

SEQ ID NO: 4449 - protein, 6 aa, synthetic construct
PRETRY

SEQ ID NO: 4450 - protein, 6 aa, synthetic construct
PRETND

SEQ ID NO: 4451 - protein, 6 aa, synthetic construct
PRETNE

SEQ ID NO: 4452 - protein, 6 aa, synthetic construct
PRETNF

SEQ ID NO: 4453 - protein, 6 aa, synthetic construct
PRETNW

SEQ ID NO: 4454 - protein, 6 aa, synthetic construct
PRETNY

SEQ ID NO: 4455 - protein, 6 aa, synthetic construct
PRETDD

SEQ ID NO: 4456 - protein, 6 aa, synthetic construct
PRETDE

SEQ ID NO: 4457 - protein, 6 aa, synthetic construct
PRETDF

SEQ ID NO: 4458 - protein, 6 aa, synthetic construct
PRETDW

SEQ ID NO: 4459 - protein, 6 aa, synthetic construct
PRETDY

SEQ ID NO: 4460 - protein, 6 aa, synthetic construct
PRETCD

SEQ ID NO: 4461 - protein, 6 aa, synthetic construct
PRETCE

SEQ ID NO: 4462 - protein, 6 aa, synthetic construct
PRETCF

SEQ ID NO: 4463 - protein, 6 aa, synthetic construct
PRETCW

SEQ ID NO: 4464 - protein, 6 aa, synthetic construct
PRETCY

SEQ ID NO: 4465 - protein, 6 aa, synthetic construct
PRETQD

SEQ ID NO: 4466 - protein, 6 aa, synthetic construct
PRETQE

SEQ ID NO: 4467 - protein, 6 aa, synthetic construct
PRETQF

SEQ ID NO: 4468 - protein, 6 aa, synthetic construct
PRETQW

SEQ ID NO: 4469 - protein, 6 aa, synthetic construct
PRETQY

SEQ ID NO: 4470 - protein, 6 aa, synthetic construct
PRETED

SEQ ID NO: 4471 - protein, 6 aa, synthetic construct
PRETEE

SEQ ID NO: 4472 - protein, 6 aa, synthetic construct
PRETEF

SEQ ID NO: 4473 - protein, 6 aa, synthetic construct
PRETEW

SEQ ID NO: 4474 - protein, 6 aa, synthetic construct
PRETEY

SEQ ID NO: 4475 - protein, 6 aa, synthetic construct
PRETGD

SEQ ID NO: 4476 - protein, 6 aa, synthetic construct
PRETGE

SEQ ID NO: 4477 - protein, 6 aa, synthetic construct
PRETGF

SEQ ID NO: 4478 - protein, 6 aa, synthetic construct
PRETGW

SEQ ID NO: 4479 - protein, 6 aa, synthetic construct
PRETGY

SEQ ID NO: 4480 - protein, 6 aa, synthetic construct
PRETHD

SEQ ID NO: 4481 - protein, 6 aa, synthetic construct
PRETHE

SEQ ID NO: 4482 - protein, 6 aa, synthetic construct
PRETHF

SEQ ID NO: 4483 - protein, 6 aa, synthetic construct
PRETHW

SEQ ID NO: 4484 - protein, 6 aa, synthetic construct
PRETHY

SEQ ID NO: 4485 - protein, 6 aa, synthetic construct
PRETID

SEQ ID NO: 4486 - protein, 6 aa, synthetic construct
PRETIE

SEQ ID NO: 4487 - protein, 6 aa, synthetic construct
PRETIF

SEQ ID NO: 4488 - protein, 6 aa, synthetic construct
PRETIW

SEQ ID NO: 4489 - protein, 6 aa, synthetic construct
PRETIY

SEQ ID NO: 4490 - protein, 6 aa, synthetic construct
PRETLD

SEQ ID NO: 4491 - protein, 6 aa, synthetic construct
PRETLE

SEQ ID NO: 4492 - protein, 6 aa, synthetic construct
PRETLF

SEQ ID NO: 4493 - protein, 6 aa, synthetic construct
PRETLW

SEQ ID NO: 4494 - protein, 6 aa, synthetic construct
PRETLY

SEQ ID NO: 4495 - protein, 6 aa, synthetic construct
PRETKD

SEQ ID NO: 4496 - protein, 6 aa, synthetic construct
PRETKE

SEQ ID NO: 4497 - protein, 6 aa, synthetic construct
PRETKF

SEQ ID NO: 4498 - protein, 6 aa, synthetic construct
PRETKW

SEQ ID NO: 4499 - protein, 6 aa, synthetic construct
PRETKY

SEQ ID NO: 4500 - protein, 6 aa, synthetic construct
PRETMD

SEQ ID NO: 4501 - protein, 6 aa, synthetic construct
PRETME

SEQ ID NO: 4502 - protein, 6 aa, synthetic construct
PRETMF

SEQ ID NO: 4503 - protein, 6 aa, synthetic construct
PRETMW

SEQ ID NO: 4504 - protein, 6 aa, synthetic construct
PRETMY

SEQ ID NO: 4505 - protein, 6 aa, synthetic construct
PRETFD

SEQ ID NO: 4506 - protein, 6 aa, synthetic construct
PRETFE

SEQ ID NO: 4507 - protein, 6 aa, synthetic construct
PRETFF

SEQ ID NO: 4508 - protein, 6 aa, synthetic construct
PRETFW

SEQ ID NO: 4509 - protein, 6 aa, synthetic construct
PRETFY

SEQ ID NO: 4510 - protein, 6 aa, synthetic construct
PRETPD

SEQ ID NO: 4511 - protein, 6 aa, synthetic construct
PRETPE

SEQ ID NO: 4512 - protein, 6 aa, synthetic construct
PRETPF

SEQ ID NO: 4513 - protein, 6 aa, synthetic construct
PRETPW

SEQ ID NO: 4514 - protein, 6 aa, synthetic construct
PRETPY

SEQ ID NO: 4515 - protein, 6 aa, synthetic construct
PRETSD

SEQ ID NO: 4516 - protein, 6 aa, synthetic construct
PRETSE

SEQ ID NO: 4517 - protein, 6 aa, synthetic construct
PRETSF

SEQ ID NO: 4518 - protein, 6 aa, synthetic construct
PRETSW

SEQ ID NO: 4519 - protein, 6 aa, synthetic construct
PRETSY

SEQ ID NO: 4520 - protein, 6 aa, synthetic construct
PRETTD

SEQ ID NO: 4521 - protein, 6 aa, synthetic construct
PRETTE

SEQ ID NO: 4522 - protein, 6 aa, synthetic construct
PRETTF

SEQ ID NO: 4523 - protein, 6 aa, synthetic construct
PRETTW

SEQ ID NO: 4524 - protein, 6 aa, synthetic construct
PRETTY

SEQ ID NO: 4525 - protein, 6 aa, synthetic construct
PRETWD

SEQ ID NO: 4526 - protein, 6 aa, synthetic construct
PRETWE

SEQ ID NO: 4527 - protein, 6 aa, synthetic construct
PRETWF

SEQ ID NO: 4528 - protein, 6 aa, synthetic construct
PRETWW

SEQ ID NO: 4529 - protein, 6 aa, synthetic construct
PRETWY

SEQ ID NO: 4530 - protein, 6 aa, synthetic construct
PRETYD

SEQ ID NO: 4531 - protein, 6 aa, synthetic construct
PRETYE

SEQ ID NO: 4532 - protein, 6 aa, synthetic construct
PRETYF

SEQ ID NO: 4533 - protein, 6 aa, synthetic construct
PRETYW

SEQ ID NO: 4534 - protein, 6 aa, synthetic construct
PRETYY

SEQ ID NO: 4535 - protein, 6 aa, synthetic construct
PRETVD

SEQ ID NO: 4536 - protein, 6 aa, synthetic construct
PRETVE

SEQ ID NO: 4537 - protein, 6 aa, synthetic construct
PRETVF

SEQ ID NO: 4538 - protein, 6 aa, synthetic construct
PRETVW

SEQ ID NO: 4539 - protein, 6 aa, synthetic construct
PRETVY

SEQ ID NO: 4540 - protein, 6 aa, synthetic construct
PREWAD

SEQ ID NO: 4541 - protein, 6 aa, synthetic construct
PREWAE

SEQ ID NO: 4542 - protein, 6 aa, synthetic construct
PREWAF

SEQ ID NO: 4543 - protein, 6 aa, synthetic construct
PREWAW

SEQ ID NO: 4544 - protein, 6 aa, synthetic construct
PREWAY

SEQ ID NO: 4545 - protein, 6 aa, synthetic construct
PREWRD

SEQ ID NO: 4546 - protein, 6 aa, synthetic construct
PREWRE

SEQ ID NO: 4547 - protein, 6 aa, synthetic construct
PREWRF

SEQ ID NO: 4548 - protein, 6 aa, synthetic construct
PREWRW

SEQ ID NO: 4549 - protein, 6 aa, synthetic construct
PREWRY

SEQ ID NO: 4550 - protein, 6 aa, synthetic construct
PREWND

SEQ ID NO: 4551 - protein, 6 aa, synthetic construct
PREWNE

SEQ ID NO: 4552 - protein, 6 aa, synthetic construct
PREWNF

SEQ ID NO: 4553 - protein, 6 aa, synthetic construct
PREWNW

SEQ ID NO: 4554 - protein, 6 aa, synthetic construct
PREWNY

SEQ ID NO: 4555 - protein, 6 aa, synthetic construct
PREWDD

SEQ ID NO: 4556 - protein, 6 aa, synthetic construct
PREWDE

SEQ ID NO: 4557 - protein, 6 aa, synthetic construct
PREWDF

SEQ ID NO: 4558 - protein, 6 aa, synthetic construct
PREWDW

SEQ ID NO: 4559 - protein, 6 aa, synthetic construct
PREWDY

SEQ ID NO: 4560 - protein, 6 aa, synthetic construct
PREWCD

SEQ ID NO: 4561 - protein, 6 aa, synthetic construct
PREWCE

SEQ ID NO: 4562 - protein, 6 aa, synthetic construct
PREWCF

SEQ ID NO: 4563 - protein, 6 aa, synthetic construct
PREWCW

SEQ ID NO: 4564 - protein, 6 aa, synthetic construct
PREWCY

SEQ ID NO: 4565 - protein, 6 aa, synthetic construct
PREWQD

SEQ ID NO: 4566 - protein, 6 aa, synthetic construct
PREWQE

SEQ ID NO: 4567 - protein, 6 aa, synthetic construct
PREWQF

SEQ ID NO: 4568 - protein, 6 aa, synthetic construct
PREWQW

SEQ ID NO: 4569 - protein, 6 aa, synthetic construct
PREWQY

SEQ ID NO: 4570 - protein, 6 aa, synthetic construct
PREWED

SEQ ID NO: 4571 - protein, 6 aa, synthetic construct
PREWEE

SEQ ID NO: 4572 - protein, 6 aa, synthetic construct
PREWEF

SEQ ID NO: 4573 - protein, 6 aa, synthetic construct
PREWEW

SEQ ID NO: 4574 - protein, 6 aa, synthetic construct
PREWEY

SEQ ID NO: 4575 - protein, 6 aa, synthetic construct
PREWGD

SEQ ID NO: 4576 - protein, 6 aa, synthetic construct
PREWGE

SEQ ID NO: 4577 - protein, 6 aa, synthetic construct
PREWGF

SEQ ID NO: 4578 - protein, 6 aa, synthetic construct
PREWGW

SEQ ID NO: 4579 - protein, 6 aa, synthetic construct
PREWGY

SEQ ID NO: 4580 - protein, 6 aa, synthetic construct
PREWHD

SEQ ID NO: 4581 - protein, 6 aa, synthetic construct
PREWHE

SEQ ID NO: 4582 - protein, 6 aa, synthetic construct
PREWHF

SEQ ID NO: 4583 - protein, 6 aa, synthetic construct
PREWHW

SEQ ID NO: 4584 - protein, 6 aa, synthetic construct
PREWHY

SEQ ID NO: 4585 - protein, 6 aa, synthetic construct
PREWID

SEQ ID NO: 4586 - protein, 6 aa, synthetic construct
PREWIE

SEQ ID NO: 4587 - protein, 6 aa, synthetic construct
PREWIF

SEQ ID NO: 4588 - protein, 6 aa, synthetic construct
PREWIW

SEQ ID NO: 4589 - protein, 6 aa, synthetic construct
PREWIY

SEQ ID NO: 4590 - protein, 6 aa, synthetic construct
PREWLD

SEQ ID NO: 4591 - protein, 6 aa, synthetic construct
PREWLE

SEQ ID NO: 4592 - protein, 6 aa, synthetic construct
PREWLF

SEQ ID NO: 4593 - protein, 6 aa, synthetic construct
PREWLW

SEQ ID NO: 4594 - protein, 6 aa, synthetic construct
PREWLY

SEQ ID NO: 4595 - protein, 6 aa, synthetic construct
PREWKD

SEQ ID NO: 4596 - protein, 6 aa, synthetic construct
PREWKE

SEQ ID NO: 4597 - protein, 6 aa, synthetic construct
PREWKF

SEQ ID NO: 4598 - protein, 6 aa, synthetic construct
PREWKW

SEQ ID NO: 4599 - protein, 6 aa, synthetic construct
PREWKY

SEQ ID NO: 4600 - protein, 6 aa, synthetic construct
PREWMD

SEQ ID NO: 4601 - protein, 6 aa, synthetic construct
PREWME

SEQ ID NO: 4602 - protein, 6 aa, synthetic construct
PREWMF

SEQ ID NO: 4603 - protein, 6 aa, synthetic construct
PREWMW

SEQ ID NO: 4604 - protein, 6 aa, synthetic construct
PREWMY

SEQ ID NO: 4605 - protein, 6 aa, synthetic construct
PREWFD

SEQ ID NO: 4606 - protein, 6 aa, synthetic construct
PREWFE

SEQ ID NO: 4607 - protein, 6 aa, synthetic construct
PREWFF

SEQ ID NO: 4608 - protein, 6 aa, synthetic construct
PREWFW

SEQ ID NO: 4609 - protein, 6 aa, synthetic construct
PREWFY

SEQ ID NO: 4610 - protein, 6 aa, synthetic construct
PREWPD

SEQ ID NO: 4611 - protein, 6 aa, synthetic construct
PREWPE

SEQ ID NO: 4612 - protein, 6 aa, synthetic construct
PREWPF

SEQ ID NO: 4613 - protein, 6 aa, synthetic construct
PREWPW

SEQ ID NO: 4614 - protein, 6 aa, synthetic construct
PREWPY

SEQ ID NO: 4615 - protein, 6 aa, synthetic construct
PREWSD

SEQ ID NO: 4616 - protein, 6 aa, synthetic construct
PREWSE

SEQ ID NO: 4617 - protein, 6 aa, synthetic construct
PREWSF

SEQ ID NO: 4618 - protein, 6 aa, synthetic construct
PREWSW

SEQ ID NO: 4619 - protein, 6 aa, synthetic construct
PREWSY

SEQ ID NO: 4620 - protein, 6 aa, synthetic construct
PREWTD

SEQ ID NO: 4621 - protein, 6 aa, synthetic construct
PREWTE

SEQ ID NO: 4622 - protein, 6 aa, synthetic construct
PREWTF

SEQ ID NO: 4623 - protein, 6 aa, synthetic construct
PREWTW

SEQ ID NO: 4624 - protein, 6 aa, synthetic construct
PREWTY

SEQ ID NO: 4625 - protein, 6 aa, synthetic construct
PREWWD

SEQ ID NO: 4626 - protein, 6 aa, synthetic construct
PREWWE

SEQ ID NO: 4627 - protein, 6 aa, synthetic construct
PREWWF

SEQ ID NO: 4628 - protein, 6 aa, synthetic construct
PREWWW

SEQ ID NO: 4629 - protein, 6 aa, synthetic construct
PREWWY

SEQ ID NO: 4630 - protein, 6 aa, synthetic construct
PREWYD

SEQ ID NO: 4631 - protein, 6 aa, synthetic construct
PREWYE

SEQ ID NO: 4632 - protein, 6 aa, synthetic construct
PREWYF

SEQ ID NO: 4633 - protein, 6 aa, synthetic construct
PREWYW

SEQ ID NO: 4634 - protein, 6 aa, synthetic construct
PREWYY

SEQ ID NO: 4635 - protein, 6 aa, synthetic construct
PREWVD

SEQ ID NO: 4636 - protein, 6 aa, synthetic construct
PREWVE

SEQ ID NO: 4637 - protein, 6 aa, synthetic construct
PREWVF

SEQ ID NO: 4638 - protein, 6 aa, synthetic construct
PREWVW

SEQ ID NO: 4639 - protein, 6 aa, synthetic construct
PREWVY

SEQ ID NO: 4640 - protein, 6 aa, synthetic construct
PREYAD

SEQ ID NO: 4641 - protein, 6 aa, synthetic construct
PREYAE

SEQ ID NO: 4642 - protein, 6 aa, synthetic construct
PREYAF

SEQ ID NO: 4643 - protein, 6 aa, synthetic construct
PREYAW

SEQ ID NO: 4644 - protein, 6 aa, synthetic construct
PREYAY

SEQ ID NO: 4645 - protein, 6 aa, synthetic construct
PREYRD

SEQ ID NO: 4646 - protein, 6 aa, synthetic construct
PREYRE

SEQ ID NO: 4647 - protein, 6 aa, synthetic construct
PREYRF

SEQ ID NO: 4648 - protein, 6 aa, synthetic construct
PREYRW

SEQ ID NO: 4649 - protein, 6 aa, synthetic construct
PREYRY

SEQ ID NO: 4650 - protein, 6 aa, synthetic construct
PREYND

SEQ ID NO: 4651 - protein, 6 aa, synthetic construct
PREYNE

SEQ ID NO: 4652 - protein, 6 aa, synthetic construct
PREYNF

SEQ ID NO: 4653 - protein, 6 aa, synthetic construct
PREYNW

SEQ ID NO: 4654 - protein, 6 aa, synthetic construct
PREYNY

SEQ ID NO: 4655 - protein, 6 aa, synthetic construct
PREYDD

SEQ ID NO: 4656 - protein, 6 aa, synthetic construct
PREYDE

SEQ ID NO: 4657 - protein, 6 aa, synthetic construct
PREYDF

SEQ ID NO: 4658 - protein, 6 aa, synthetic construct
PREYDW

SEQ ID NO: 4659 - protein, 6 aa, synthetic construct
PREYDY

SEQ ID NO: 4660 - protein, 6 aa, synthetic construct
PREYCD

SEQ ID NO: 4661 - protein, 6 aa, synthetic construct
PREYCE

SEQ ID NO: 4662 - protein, 6 aa, synthetic construct
PREYCF

SEQ ID NO: 4663 - protein, 6 aa, synthetic construct
PREYCW

SEQ ID NO: 4664 - protein, 6 aa, synthetic construct
PREYCY

SEQ ID NO: 4665 - protein, 6 aa, synthetic construct
PREYQD

SEQ ID NO: 4666 - protein, 6 aa, synthetic construct
PREYQE

SEQ ID NO: 4667 - protein, 6 aa, synthetic construct
PREYQF

SEQ ID NO: 4668 - protein, 6 aa, synthetic construct
PREYQW

SEQ ID NO: 4669 - protein, 6 aa, synthetic construct
PREYQY

SEQ ID NO: 4670 - protein, 6 aa, synthetic construct
PREYED

SEQ ID NO: 4671 - protein, 6 aa, synthetic construct
PREYEE

SEQ ID NO: 4672 - protein, 6 aa, synthetic construct
PREYEF

SEQ ID NO: 4673 - protein, 6 aa, synthetic construct
PREYEW

SEQ ID NO: 4674 - protein, 6 aa, synthetic construct
PREYEY

SEQ ID NO: 4675 - protein, 6 aa, synthetic construct
PREYGD

SEQ ID NO: 4676 - protein, 6 aa, synthetic construct
PREYGE

SEQ ID NO: 4677 - protein, 6 aa, synthetic construct
PREYGF

SEQ ID NO: 4678 - protein, 6 aa, synthetic construct
PREYGW

SEQ ID NO: 4679 - protein, 6 aa, synthetic construct
PREYGY

SEQ ID NO: 4680 - protein, 6 aa, synthetic construct
PREYHD

SEQ ID NO: 4681 - protein, 6 aa, synthetic construct
PREYHE

SEQ ID NO: 4682 - protein, 6 aa, synthetic construct
PREYHF

SEQ ID NO: 4683 - protein, 6 aa, synthetic construct
PREYHW

SEQ ID NO: 4684 - protein, 6 aa, synthetic construct
PREYHY

SEQ ID NO: 4685 - protein, 6 aa, synthetic construct
PREYID

SEQ ID NO: 4686 - protein, 6 aa, synthetic construct
PREYIE

SEQ ID NO: 4687 - protein, 6 aa, synthetic construct
PREYIF

SEQ ID NO: 4688 - protein, 6 aa, synthetic construct
PREYIW

SEQ ID NO: 4689 - protein, 6 aa, synthetic construct
PREYIY

SEQ ID NO: 4690 - protein, 6 aa, synthetic construct
PREYLD

SEQ ID NO: 4691 - protein, 6 aa, synthetic construct
PREYLE

SEQ ID NO: 4692 - protein, 6 aa, synthetic construct
PREYLF

SEQ ID NO: 4693 - protein, 6 aa, synthetic construct
PREYLW

SEQ ID NO: 4694 - protein, 6 aa, synthetic construct
PREYLY

SEQ ID NO: 4695 - protein, 6 aa, synthetic construct
PREYKD

SEQ ID NO: 4696 - protein, 6 aa, synthetic construct
PREYKE

SEQ ID NO: 4697 - protein, 6 aa, synthetic construct
PREYKF

SEQ ID NO: 4698 - protein, 6 aa, synthetic construct
PREYKW

SEQ ID NO: 4699 - protein, 6 aa, synthetic construct
PREYKY

SEQ ID NO: 4700 - protein, 6 aa, synthetic construct
PREYMD

SEQ ID NO: 4701 - protein, 6 aa, synthetic construct
PREYME

SEQ ID NO: 4702 - protein, 6 aa, synthetic construct
PREYMF

SEQ ID NO: 4703 - protein, 6 aa, synthetic construct
PREYMW

SEQ ID NO: 4704 - protein, 6 aa, synthetic construct
PREYMY

SEQ ID NO: 4705 - protein, 6 aa, synthetic construct
PREYFD

SEQ ID NO: 4706 - protein, 6 aa, synthetic construct
PREYFE

SEQ ID NO: 4707 - protein, 6 aa, synthetic construct
PREYFF

SEQ ID NO: 4708 - protein, 6 aa, synthetic construct
PREYFW

SEQ ID NO: 4709 - protein, 6 aa, synthetic construct
PREYFY

SEQ ID NO: 4710 - protein, 6 aa, synthetic construct
PREYPD

SEQ ID NO: 4711 - protein, 6 aa, synthetic construct
PREYPE

SEQ ID NO: 4712 - protein, 6 aa, synthetic construct
PREYPF

SEQ ID NO: 4713 - protein, 6 aa, synthetic construct
PREYPW

SEQ ID NO: 4714 - protein, 6 aa, synthetic construct
PREYPY

SEQ ID NO: 4715 - protein, 6 aa, synthetic construct
PREYSD

SEQ ID NO: 4716 - protein, 6 aa, synthetic construct
PREYSE

SEQ ID NO: 4717 - protein, 6 aa, synthetic construct
PREYSF

SEQ ID NO: 4718 - protein, 6 aa, synthetic construct
PREYSW

SEQ ID NO: 4719 - protein, 6 aa, synthetic construct
PREYSY

SEQ ID NO: 4720 - protein, 6 aa, synthetic construct
PREYTD

SEQ ID NO: 4721 - protein, 6 aa, synthetic construct
PREYTE

SEQ ID NO: 4722 - protein, 6 aa, synthetic construct
PREYTF

SEQ ID NO: 4723 - protein, 6 aa, synthetic construct
PREYTW

SEQ ID NO: 4724 - protein, 6 aa, synthetic construct
PREYTY

SEQ ID NO: 4725 - protein, 6 aa, synthetic construct
PREYWD

SEQ ID NO: 4726 - protein, 6 aa, synthetic construct
PREYWE

SEQ ID NO: 4727 - protein, 6 aa, synthetic construct
PREYWF

SEQ ID NO: 4728 - protein, 6 aa, synthetic construct
PREYWW

SEQ ID NO: 4729 - protein, 6 aa, synthetic construct
PREYWY

SEQ ID NO: 4730 - protein, 6 aa, synthetic construct
PREYYD

SEQ ID NO: 4731 - protein, 6 aa, synthetic construct
PREYYE

SEQ ID NO: 4732 - protein, 6 aa, synthetic construct
PREYYF

SEQ ID NO: 4733 - protein, 6 aa, synthetic construct
PREYYW

SEQ ID NO: 4734 - protein, 6 aa, synthetic construct
PREYYY

SEQ ID NO: 4735 - protein, 6 aa, synthetic construct
PREYVD

SEQ ID NO: 4736 - protein, 6 aa, synthetic construct
PREYVE

SEQ ID NO: 4737 - protein, 6 aa, synthetic construct
PREYVF

SEQ ID NO: 4738 - protein, 6 aa, synthetic construct
PREYVW

SEQ ID NO: 4739 - protein, 6 aa, synthetic construct
PREYVY

SEQ ID NO: 4740 - protein, 6 aa, synthetic construct
PREVAD

SEQ ID NO: 4741 - protein, 6 aa, synthetic construct
PREVAE

SEQ ID NO: 4742 - protein, 6 aa, synthetic construct
PREVAF

SEQ ID NO: 4743 - protein, 6 aa, synthetic construct
PREVAW

SEQ ID NO: 4744 - protein, 6 aa, synthetic construct
PREVAY

SEQ ID NO: 4745 - protein, 6 aa, synthetic construct
PREVRD

SEQ ID NO: 4746 - protein, 6 aa, synthetic construct
PREVRE

SEQ ID NO: 4747 - protein, 6 aa, synthetic construct
PREVRF

SEQ ID NO: 4748 - protein, 6 aa, synthetic construct
PREVRW

SEQ ID NO: 4749 - protein, 6 aa, synthetic construct
PREVRY

SEQ ID NO: 4750 - protein, 6 aa, synthetic construct
PREVND

SEQ ID NO: 4751 - protein, 6 aa, synthetic construct
PREVNE

SEQ ID NO: 4752 - protein, 6 aa, synthetic construct
PREVNF

SEQ ID NO: 4753 - protein, 6 aa, synthetic construct
PREVNW

SEQ ID NO: 4754 - protein, 6 aa, synthetic construct
PREVNY

SEQ ID NO: 4755 - protein, 6 aa, synthetic construct
PREVDD

SEQ ID NO: 4756 - protein, 6 aa, synthetic construct
PREVDE

SEQ ID NO: 4757 - protein, 6 aa, synthetic construct
PREVDF

SEQ ID NO: 4758 - protein, 6 aa, synthetic construct
PREVDW

SEQ ID NO: 4759 - protein, 6 aa, synthetic construct
PREVDY

SEQ ID NO: 4760 - protein, 6 aa, synthetic construct
PREVCD

SEQ ID NO: 4761 - protein, 6 aa, synthetic construct
PREVCE

SEQ ID NO: 4762 - protein, 6 aa, synthetic construct
PREVCF

SEQ ID NO: 4763 - protein, 6 aa, synthetic construct
PREVCW

SEQ ID NO: 4764 - protein, 6 aa, synthetic construct
PREVCY

SEQ ID NO: 4765 - protein, 6 aa, synthetic construct
PREVQD

SEQ ID NO: 4766 - protein, 6 aa, synthetic construct
PREVQE

SEQ ID NO: 4767 - protein, 6 aa, synthetic construct
PREVQF

SEQ ID NO: 4768 - protein, 6 aa, synthetic construct
PREVQW

SEQ ID NO: 4769 - protein, 6 aa, synthetic construct
PREVQY

SEQ ID NO: 4770 - protein, 6 aa, synthetic construct
PREVED

SEQ ID NO: 4771 - protein, 6 aa, synthetic construct
PREVEE

SEQ ID NO: 4772 - protein, 6 aa, synthetic construct
PREVEF

SEQ ID NO: 4773 - protein, 6 aa, synthetic construct
PREVEW

SEQ ID NO: 4774 - protein, 6 aa, synthetic construct
PREVEY

SEQ ID NO: 4775 - protein, 6 aa, synthetic construct
PREVGD

SEQ ID NO: 4776 - protein, 6 aa, synthetic construct
PREVGE

SEQ ID NO: 4777 - protein, 6 aa, synthetic construct
PREVGF

SEQ ID NO: 4778 - protein, 6 aa, synthetic construct
PREVGW

SEQ ID NO: 4779 - protein, 6 aa, synthetic construct
PREVGY

SEQ ID NO: 4780 - protein, 6 aa, synthetic construct
PREVHD

SEQ ID NO: 4781 - protein, 6 aa, synthetic construct
PREVHE

SEQ ID NO: 4782 - protein, 6 aa, synthetic construct
PREVHF

SEQ ID NO: 4783 - protein, 6 aa, synthetic construct
PREVHW

SEQ ID NO: 4784 - protein, 6 aa, synthetic construct
PREVHY

SEQ ID NO: 4785 - protein, 6 aa, synthetic construct
PREVID

SEQ ID NO: 4786 - protein, 6 aa, synthetic construct
PREVIE

SEQ ID NO: 4787 - protein, 6 aa, synthetic construct
PREVIF

SEQ ID NO: 4788 - protein, 6 aa, synthetic construct
PREVIW

SEQ ID NO: 4789 - protein, 6 aa, synthetic construct
PREVIY

SEQ ID NO: 4790 - protein, 6 aa, synthetic construct
PREVLD

SEQ ID NO: 4791 - protein, 6 aa, synthetic construct
PREVLE

SEQ ID NO: 4792 - protein, 6 aa, synthetic construct
PREVLF

SEQ ID NO: 4793 - protein, 6 aa, synthetic construct
PREVLW

SEQ ID NO: 4794 - protein, 6 aa, synthetic construct
PREVLY

SEQ ID NO: 4795 - protein, 6 aa, synthetic construct
PREVKD

SEQ ID NO: 4796 - protein, 6 aa, synthetic construct
PREVKE

SEQ ID NO: 4797 - protein, 6 aa, synthetic construct
PREVKF

SEQ ID NO: 4798 - protein, 6 aa, synthetic construct
PREVKW

SEQ ID NO: 4799 - protein, 6 aa, synthetic construct
PREVKY

SEQ ID NO: 4800 - protein, 6 aa, synthetic construct
PREVMD

SEQ ID NO: 4801 - protein, 6 aa, synthetic construct
PREVME

SEQ ID NO: 4802 - protein, 6 aa, synthetic construct
PREVMF

SEQ ID NO: 4803 - protein, 6 aa, synthetic construct
PREVMW

SEQ ID NO: 4804 - protein, 6 aa, synthetic construct
PREVMY

SEQ ID NO: 4805 - protein, 6 aa, synthetic construct
PREVFD

SEQ ID NO: 4806 - protein, 6 aa, synthetic construct
PREVFE

SEQ ID NO: 4807 - protein, 6 aa, synthetic construct
PREVFF

SEQ ID NO: 4808 - protein, 6 aa, synthetic construct
PREVFW

SEQ ID NO: 4809 - protein, 6 aa, synthetic construct
PREVFY

SEQ ID NO: 4810 - protein, 6 aa, synthetic construct
PREVPD

SEQ ID NO: 4811 - protein, 6 aa, synthetic construct
PREVPE

SEQ ID NO: 4812 - protein, 6 aa, synthetic construct
PREVPF

SEQ ID NO: 4813 - protein, 6 aa, synthetic construct
PREVPW

SEQ ID NO: 4814 - protein, 6 aa, synthetic construct
PREVPY

SEQ ID NO: 4815 - protein, 6 aa, synthetic construct
PREVSD

SEQ ID NO: 4816 - protein, 6 aa, synthetic construct
PREVSE

SEQ ID NO: 4817 - protein, 6 aa, synthetic construct
PREVSF

SEQ ID NO: 4818 - protein, 6 aa, synthetic construct
PREVSW

SEQ ID NO: 4819 - protein, 6 aa, synthetic construct
PREVSY

SEQ ID NO: 4820 - protein, 6 aa, synthetic construct
PREVTD

SEQ ID NO: 4821 - protein, 6 aa, synthetic construct
PREVTE

SEQ ID NO: 4822 - protein, 6 aa, synthetic construct
PREVTF

SEQ ID NO: 4823 - protein, 6 aa, synthetic construct
PREVTW

SEQ ID NO: 4824 - protein, 6 aa, synthetic construct
PREVTY

SEQ ID NO: 4825 - protein, 6 aa, synthetic construct
PREVWD

SEQ ID NO: 4826 - protein, 6 aa, synthetic construct
PREVWE

SEQ ID NO: 4827 - protein, 6 aa, synthetic construct
PREVWF

SEQ ID NO: 4828 - protein, 6 aa, synthetic construct
PREVWW

SEQ ID NO: 4829 - protein, 6 aa, synthetic construct
PREVWY

SEQ ID NO: 4830 - protein, 6 aa, synthetic construct
PREVYD

SEQ ID NO: 4831 - protein, 6 aa, synthetic construct
PREVYE

SEQ ID NO: 4832 - protein, 6 aa, synthetic construct
PREVYF

SEQ ID NO: 4833 - protein, 6 aa, synthetic construct
PREVYW

SEQ ID NO: 4834 - protein, 6 aa, synthetic construct
PREVYY

SEQ ID NO: 4835 - protein, 6 aa, synthetic construct
PREVVD

SEQ ID NO: 4836 - protein, 6 aa, synthetic construct
PREVVE

SEQ ID NO: 4837 - protein, 6 aa, synthetic construct
PREVVF

SEQ ID NO: 4838 - protein, 6 aa, synthetic construct
PREVVW

SEQ ID NO: 4839 - protein, 6 aa, synthetic construct
PREVVY

SEQ ID NO: 4840 - protein, 6 aa, synthetic construct
PNEAAD

SEQ ID NO: 4841 - protein, 6 aa, synthetic construct
PNEAAE

SEQ ID NO: 4842 - protein, 6 aa, synthetic construct
PNEAAF

SEQ ID NO: 4843 - protein, 6 aa, synthetic construct
PNEAAW

SEQ ID NO: 4844 - protein, 6 aa, synthetic construct
PNEAAY

SEQ ID NO: 4845 - protein, 6 aa, synthetic construct
PNEARD

SEQ ID NO: 4846 - protein, 6 aa, synthetic construct
PNEARE

SEQ ID NO: 4847 - protein, 6 aa, synthetic construct
PNEARF

SEQ ID NO: 4848 - protein, 6 aa, synthetic construct
PNEARW

SEQ ID NO: 4849 - protein, 6 aa, synthetic construct
PNEARY

SEQ ID NO: 4850 - protein, 6 aa, synthetic construct
PNEAND

SEQ ID NO: 4851 - protein, 6 aa, synthetic construct
PNEANE

SEQ ID NO: 4852 - protein, 6 aa, synthetic construct
PNEANF

SEQ ID NO: 4853 - protein, 6 aa, synthetic construct
PNEANW

SEQ ID NO: 4854 - protein, 6 aa, synthetic construct
PNEANY

SEQ ID NO: 4855 - protein, 6 aa, synthetic construct
PNEADD

SEQ ID NO: 4856 - protein, 6 aa, synthetic construct
PNEADE

SEQ ID NO: 4857 - protein, 6 aa, synthetic construct
PNEADF

SEQ ID NO: 4858 - protein, 6 aa, synthetic construct
PNEADW

SEQ ID NO: 4859 - protein, 6 aa, synthetic construct
PNEADY

SEQ ID NO: 4860 - protein, 6 aa, synthetic construct
PNEACD

SEQ ID NO: 4861 - protein, 6 aa, synthetic construct
PNEACE

SEQ ID NO: 4862 - protein, 6 aa, synthetic construct
PNEACF

SEQ ID NO: 4863 - protein, 6 aa, synthetic construct
PNEACW

SEQ ID NO: 4864 - protein, 6 aa, synthetic construct
PNEACY

SEQ ID NO: 4865 - protein, 6 aa, synthetic construct
PNEAQD

SEQ ID NO: 4866 - protein, 6 aa, synthetic construct
PNEAQE

SEQ ID NO: 4867 - protein, 6 aa, synthetic construct
PNEAQF

SEQ ID NO: 4868 - protein, 6 aa, synthetic construct
PNEAQW

SEQ ID NO: 4869 - protein, 6 aa, synthetic construct
PNEAQY

SEQ ID NO: 4870 - protein, 6 aa, synthetic construct
PNEAED

SEQ ID NO: 4871 - protein, 6 aa, synthetic construct
PNEAEE

SEQ ID NO: 4872 - protein, 6 aa, synthetic construct
PNEAEF

SEQ ID NO: 4873 - protein, 6 aa, synthetic construct
PNEAEW

SEQ ID NO: 4874 - protein, 6 aa, synthetic construct
PNEAEY

SEQ ID NO: 4875 - protein, 6 aa, synthetic construct
PNEAGD

SEQ ID NO: 4876 - protein, 6 aa, synthetic construct
PNEAGE

SEQ ID NO: 4877 - protein, 6 aa, synthetic construct
PNEAGF

SEQ ID NO: 4878 - protein, 6 aa, synthetic construct
PNEAGW

SEQ ID NO: 4879 - protein, 6 aa, synthetic construct
PNEAGY

SEQ ID NO: 4880 - protein, 6 aa, synthetic construct
PNEAHD

SEQ ID NO: 4881 - protein, 6 aa, synthetic construct
PNEAHE

SEQ ID NO: 4882 - protein, 6 aa, synthetic construct
PNEAHF

SEQ ID NO: 4883 - protein, 6 aa, synthetic construct
PNEAHW

SEQ ID NO: 4884 - protein, 6 aa, synthetic construct
PNEAHY

SEQ ID NO: 4885 - protein, 6 aa, synthetic construct
PNEAID

SEQ ID NO: 4886 - protein, 6 aa, synthetic construct
PNEAIE

SEQ ID NO: 4887 - protein, 6 aa, synthetic construct
PNEAIF

SEQ ID NO: 4888 - protein, 6 aa, synthetic construct
PNEAIW

SEQ ID NO: 4889 - protein, 6 aa, synthetic construct
PNEAIY

SEQ ID NO: 4890 - protein, 6 aa, synthetic construct
PNEALD

SEQ ID NO: 4891 - protein, 6 aa, synthetic construct
PNEALE

SEQ ID NO: 4892 - protein, 6 aa, synthetic construct
PNEALF

SEQ ID NO: 4893 - protein, 6 aa, synthetic construct
PNEALW

SEQ ID NO: 4894 - protein, 6 aa, synthetic construct
PNEALY

SEQ ID NO: 4895 - protein, 6 aa, synthetic construct
PNEAKD

SEQ ID NO: 4896 - protein, 6 aa, synthetic construct
PNEAKE

SEQ ID NO: 4897 - protein, 6 aa, synthetic construct
PNEAKF

SEQ ID NO: 4898 - protein, 6 aa, synthetic construct
PNEAKW

SEQ ID NO: 4899 - protein, 6 aa, synthetic construct
PNEAKY

SEQ ID NO: 4900 - protein, 6 aa, synthetic construct
PNEAMD

SEQ ID NO: 4901 - protein, 6 aa, synthetic construct
PNEAME

SEQ ID NO: 4902 - protein, 6 aa, synthetic construct
PNEAMF

SEQ ID NO: 4903 - protein, 6 aa, synthetic construct
PNEAMW

SEQ ID NO: 4904 - protein, 6 aa, synthetic construct
PNEAMY

SEQ ID NO: 4905 - protein, 6 aa, synthetic construct
PNEAFD

SEQ ID NO: 4906 - protein, 6 aa, synthetic construct
PNEAFE

SEQ ID NO: 4907 - protein, 6 aa, synthetic construct
PNEAFF

SEQ ID NO: 4908 - protein, 6 aa, synthetic construct
PNEAFW

SEQ ID NO: 4909 - protein, 6 aa, synthetic construct
PNEAFY

SEQ ID NO: 4910 - protein, 6 aa, synthetic construct
PNEAPD

SEQ ID NO: 4911 - protein, 6 aa, synthetic construct
PNEAPE

SEQ ID NO: 4912 - protein, 6 aa, synthetic construct
PNEAPF

SEQ ID NO: 4913 - protein, 6 aa, synthetic construct
PNEAPW

SEQ ID NO: 4914 - protein, 6 aa, synthetic construct
PNEAPY

SEQ ID NO: 4915 - protein, 6 aa, synthetic construct
PNEASD

SEQ ID NO: 4916 - protein, 6 aa, synthetic construct
PNEASE

SEQ ID NO: 4917 - protein, 6 aa, synthetic construct
PNEASF

SEQ ID NO: 4918 - protein, 6 aa, synthetic construct
PNEASW

SEQ ID NO: 4919 - protein, 6 aa, synthetic construct
PNEASY

SEQ ID NO: 4920 - protein, 6 aa, synthetic construct
PNEATD

SEQ ID NO: 4921 - protein, 6 aa, synthetic construct
PNEATE

SEQ ID NO: 4922 - protein, 6 aa, synthetic construct
PNEATF

SEQ ID NO: 4923 - protein, 6 aa, synthetic construct
PNEATW

SEQ ID NO: 4924 - protein, 6 aa, synthetic construct
PNEATY

SEQ ID NO: 4925 - protein, 6 aa, synthetic construct
PNEAWD

SEQ ID NO: 4926 - protein, 6 aa, synthetic construct
PNEAWE

SEQ ID NO: 4927 - protein, 6 aa, synthetic construct
PNEAWF

SEQ ID NO: 4928 - protein, 6 aa, synthetic construct
PNEAWW

SEQ ID NO: 4929 - protein, 6 aa, synthetic construct
PNEAWY

SEQ ID NO: 4930 - protein, 6 aa, synthetic construct
PNEAYD

SEQ ID NO: 4931 - protein, 6 aa, synthetic construct
PNEAYE

SEQ ID NO: 4932 - protein, 6 aa, synthetic construct
PNEAYF

SEQ ID NO: 4933 - protein, 6 aa, synthetic construct
PNEAYW

SEQ ID NO: 4934 - protein, 6 aa, synthetic construct
PNEAYY

SEQ ID NO: 4935 - protein, 6 aa, synthetic construct
PNEAVD

SEQ ID NO: 4936 - protein, 6 aa, synthetic construct
PNEAVE

SEQ ID NO: 4937 - protein, 6 aa, synthetic construct
PNEAVF

SEQ ID NO: 4938 - protein, 6 aa, synthetic construct
PNEAVW

SEQ ID NO: 4939 - protein, 6 aa, synthetic construct
PNEAVY

SEQ ID NO: 4940 - protein, 6 aa, synthetic construct
PNERAD

SEQ ID NO: 4941 - protein, 6 aa, synthetic construct
PNERAE

SEQ ID NO: 4942 - protein, 6 aa, synthetic construct
PNERAF

SEQ ID NO: 4943 - protein, 6 aa, synthetic construct
PNERAW

SEQ ID NO: 4944 - protein, 6 aa, synthetic construct
PNERAY

SEQ ID NO: 4945 - protein, 6 aa, synthetic construct
PNERRD

SEQ ID NO: 4946 - protein, 6 aa, synthetic construct
PNERRE

SEQ ID NO: 4947 - protein, 6 aa, synthetic construct
PNERRF

SEQ ID NO: 4948 - protein, 6 aa, synthetic construct
PNERRW

SEQ ID NO: 4949 - protein, 6 aa, synthetic construct
PNERRY

SEQ ID NO: 4950 - protein, 6 aa, synthetic construct
PNERND

SEQ ID NO: 4951 - protein, 6 aa, synthetic construct
PNERNE

SEQ ID NO: 4952 - protein, 6 aa, synthetic construct
PNERNF

SEQ ID NO: 4953 - protein, 6 aa, synthetic construct
PNERNW

SEQ ID NO: 4954 - protein, 6 aa, synthetic construct
PNERNY

SEQ ID NO: 4955 - protein, 6 aa, synthetic construct
PNERDD

SEQ ID NO: 4956 - protein, 6 aa, synthetic construct
PNERDE

SEQ ID NO: 4957 - protein, 6 aa, synthetic construct
PNERDF

SEQ ID NO: 4958 - protein, 6 aa, synthetic construct
PNERDW

SEQ ID NO: 4959 - protein, 6 aa, synthetic construct
PNERDY

SEQ ID NO: 4960 - protein, 6 aa, synthetic construct
PNERCD

SEQ ID NO: 4961 - protein, 6 aa, synthetic construct
PNERCE

SEQ ID NO: 4962 - protein, 6 aa, synthetic construct
PNERCF

SEQ ID NO: 4963 - protein, 6 aa, synthetic construct
PNERCW

SEQ ID NO: 4964 - protein, 6 aa, synthetic construct
PNERCY

SEQ ID NO: 4965 - protein, 6 aa, synthetic construct
PNERQD

SEQ ID NO: 4966 - protein, 6 aa, synthetic construct
PNERQE

SEQ ID NO: 4967 - protein, 6 aa, synthetic construct
PNERQF

SEQ ID NO: 4968 - protein, 6 aa, synthetic construct
PNERQW

SEQ ID NO: 4969 - protein, 6 aa, synthetic construct
PNERQY

SEQ ID NO: 4970 - protein, 6 aa, synthetic construct
PNERED

SEQ ID NO: 4971 - protein, 6 aa, synthetic construct
PNEREE

SEQ ID NO: 4972 - protein, 6 aa, synthetic construct
PNEREF

SEQ ID NO: 4973 - protein, 6 aa, synthetic construct
PNEREW

SEQ ID NO: 4974 - protein, 6 aa, synthetic construct
PNEREY

SEQ ID NO: 4975 - protein, 6 aa, synthetic construct
PNERGD

SEQ ID NO: 4976 - protein, 6 aa, synthetic construct
PNERGE

SEQ ID NO: 4977 - protein, 6 aa, synthetic construct
PNERGF

SEQ ID NO: 4978 - protein, 6 aa, synthetic construct
PNERGW

SEQ ID NO: 4979 - protein, 6 aa, synthetic construct
PNERGY

SEQ ID NO: 4980 - protein, 6 aa, synthetic construct
PNERHD

SEQ ID NO: 4981 - protein, 6 aa, synthetic construct
PNERHE

SEQ ID NO: 4982 - protein, 6 aa, synthetic construct
PNERHF

SEQ ID NO: 4983 - protein, 6 aa, synthetic construct
PNERHW

SEQ ID NO: 4984 - protein, 6 aa, synthetic construct
PNERHY

SEQ ID NO: 4985 - protein, 6 aa, synthetic construct
PNERID

SEQ ID NO: 4986 - protein, 6 aa, synthetic construct
PNERIE

SEQ ID NO: 4987 - protein, 6 aa, synthetic construct
PNERIF

SEQ ID NO: 4988 - protein, 6 aa, synthetic construct
PNERIW

SEQ ID NO: 4989 - protein, 6 aa, synthetic construct
PNERIY

SEQ ID NO: 4990 - protein, 6 aa, synthetic construct
PNERLD

SEQ ID NO: 4991 - protein, 6 aa, synthetic construct
PNERLE

SEQ ID NO: 4992 - protein, 6 aa, synthetic construct
PNERLF

SEQ ID NO: 4993 - protein, 6 aa, synthetic construct
PNERLW

SEQ ID NO: 4994 - protein, 6 aa, synthetic construct
PNERLY

SEQ ID NO: 4995 - protein, 6 aa, synthetic construct
PNERKD

SEQ ID NO: 4996 - protein, 6 aa, synthetic construct
PNERKE

SEQ ID NO: 4997 - protein, 6 aa, synthetic construct
PNERKF

SEQ ID NO: 4998 - protein, 6 aa, synthetic construct
PNERKW

SEQ ID NO: 4999 - protein, 6 aa, synthetic construct
PNERKY

SEQ ID NO: 5000 - protein, 6 aa, synthetic construct
PNERMD

SEQ ID NO: 5001 - protein, 6 aa, synthetic construct
PNERME

SEQ ID NO: 5002 - protein, 6 aa, synthetic construct
PNERMF

SEQ ID NO: 5003 - protein, 6 aa, synthetic construct
PNERMW

SEQ ID NO: 5004 - protein, 6 aa, synthetic construct
PNERMY

SEQ ID NO: 5005 - protein, 6 aa, synthetic construct
PNERFD

SEQ ID NO: 5006 - protein, 6 aa, synthetic construct
PNERFE

SEQ ID NO: 5007 - protein, 6 aa, synthetic construct
PNERFF

SEQ ID NO: 5008 - protein, 6 aa, synthetic construct
PNERFW

SEQ ID NO: 5009 - protein, 6 aa, synthetic construct
PNERFY

SEQ ID NO: 5010 - protein, 6 aa, synthetic construct
PNERPD

SEQ ID NO: 5011 - protein, 6 aa, synthetic construct
PNERPE

SEQ ID NO: 5012 - protein, 6 aa, synthetic construct
PNERPF

SEQ ID NO: 5013 - protein, 6 aa, synthetic construct
PNERPW

SEQ ID NO: 5014 - protein, 6 aa, synthetic construct
PNERPY

SEQ ID NO: 5015 - protein, 6 aa, synthetic construct
PNERSD

SEQ ID NO: 5016 - protein, 6 aa, synthetic construct
PNERSE

SEQ ID NO: 5017 - protein, 6 aa, synthetic construct
PNERSF

SEQ ID NO: 5018 - protein, 6 aa, synthetic construct
PNERSW

SEQ ID NO: 5019 - protein, 6 aa, synthetic construct
PNERSY

SEQ ID NO: 5020 - protein, 6 aa, synthetic construct
PNERTD

SEQ ID NO: 5021 - protein, 6 aa, synthetic construct
PNERTE

SEQ ID NO: 5022 - protein, 6 aa, synthetic construct
PNERTF

SEQ ID NO: 5023 - protein, 6 aa, synthetic construct
PNERTW

SEQ ID NO: 5024 - protein, 6 aa, synthetic construct
PNERTY

SEQ ID NO: 5025 - protein, 6 aa, synthetic construct
PNERWD

SEQ ID NO: 5026 - protein, 6 aa, synthetic construct
PNERWE

SEQ ID NO: 5027 - protein, 6 aa, synthetic construct
PNERWF

SEQ ID NO: 5028 - protein, 6 aa, synthetic construct
PNERWW

SEQ ID NO: 5029 - protein, 6 aa, synthetic construct
PNERWY

SEQ ID NO: 5030 - protein, 6 aa, synthetic construct
PNERYD

SEQ ID NO: 5031 - protein, 6 aa, synthetic construct
PNERYE

SEQ ID NO: 5032 - protein, 6 aa, synthetic construct
PNERYF

SEQ ID NO: 5033 - protein, 6 aa, synthetic construct
PNERYW

SEQ ID NO: 5034 - protein, 6 aa, synthetic construct
PNERYY

SEQ ID NO: 5035 - protein, 6 aa, synthetic construct
PNERVD

SEQ ID NO: 5036 - protein, 6 aa, synthetic construct
PNERVE

SEQ ID NO: 5037 - protein, 6 aa, synthetic construct
PNERVF

SEQ ID NO: 5038 - protein, 6 aa, synthetic construct
PNERVW

SEQ ID NO: 5039 - protein, 6 aa, synthetic construct
PNERVY

SEQ ID NO: 5040 - protein, 6 aa, synthetic construct
PNENAD

SEQ ID NO: 5041 - protein, 6 aa, synthetic construct
PNENAE

SEQ ID NO: 5042 - protein, 6 aa, synthetic construct
PNENAF

SEQ ID NO: 5043 - protein, 6 aa, synthetic construct
PNENAW

SEQ ID NO: 5044 - protein, 6 aa, synthetic construct
PNENAY

SEQ ID NO: 5045 - protein, 6 aa, synthetic construct
PNENRD

SEQ ID NO: 5046 - protein, 6 aa, synthetic construct
PNENRE

SEQ ID NO: 5047 - protein, 6 aa, synthetic construct
PNENRF

SEQ ID NO: 5048 - protein, 6 aa, synthetic construct
PNENRW

SEQ ID NO: 5049 - protein, 6 aa, synthetic construct
PNENRY

SEQ ID NO: 5050 - protein, 6 aa, synthetic construct
PNENND

SEQ ID NO: 5051 - protein, 6 aa, synthetic construct
PNENNE

SEQ ID NO: 5052 - protein, 6 aa, synthetic construct
PNENNF

SEQ ID NO: 5053 - protein, 6 aa, synthetic construct
PNENNW

SEQ ID NO: 5054 - protein, 6 aa, synthetic construct
PNENNY

SEQ ID NO: 5055 - protein, 6 aa, synthetic construct
PNENDD

SEQ ID NO: 5056 - protein, 6 aa, synthetic construct
PNENDE

SEQ ID NO: 5057 - protein, 6 aa, synthetic construct
PNENDF

SEQ ID NO: 5058 - protein, 6 aa, synthetic construct
PNENDW

SEQ ID NO: 5059 - protein, 6 aa, synthetic construct
PNENDY

SEQ ID NO: 5060 - protein, 6 aa, synthetic construct
PNENCD

SEQ ID NO: 5061 - protein, 6 aa, synthetic construct
PNENCE

SEQ ID NO: 5062 - protein, 6 aa, synthetic construct
PNENCF

SEQ ID NO: 5063 - protein, 6 aa, synthetic construct
PNENCW

SEQ ID NO: 5064 - protein, 6 aa, synthetic construct
PNENCY

SEQ ID NO: 5065 - protein, 6 aa, synthetic construct
PNENQD

SEQ ID NO: 5066 - protein, 6 aa, synthetic construct
PNENQE

SEQ ID NO: 5067 - protein, 6 aa, synthetic construct
PNENQF

SEQ ID NO: 5068 - protein, 6 aa, synthetic construct
PNENQW

SEQ ID NO: 5069 - protein, 6 aa, synthetic construct
PNENQY

SEQ ID NO: 5070 - protein, 6 aa, synthetic construct
PNENED

SEQ ID NO: 5071 - protein, 6 aa, synthetic construct
PNENEE

SEQ ID NO: 5072 - protein, 6 aa, synthetic construct
PNENEF

SEQ ID NO: 5073 - protein, 6 aa, synthetic construct
PNENEW

SEQ ID NO: 5074 - protein, 6 aa, synthetic construct
PNENEY

SEQ ID NO: 5075 - protein, 6 aa, synthetic construct
PNENGD

SEQ ID NO: 5076 - protein, 6 aa, synthetic construct
PNENGE

SEQ ID NO: 5077 - protein, 6 aa, synthetic construct
PNENGF

SEQ ID NO: 5078 - protein, 6 aa, synthetic construct
PNENGW

SEQ ID NO: 5079 - protein, 6 aa, synthetic construct
PNENGY

SEQ ID NO: 5080 - protein, 6 aa, synthetic construct
PNENHD

SEQ ID NO: 5081 - protein, 6 aa, synthetic construct
PNENHE

SEQ ID NO: 5082 - protein, 6 aa, synthetic construct
PNENHF

SEQ ID NO: 5083 - protein, 6 aa, synthetic construct
PNENHW

SEQ ID NO: 5084 - protein, 6 aa, synthetic construct
PNENHY

SEQ ID NO: 5085 - protein, 6 aa, synthetic construct
PNENID

SEQ ID NO: 5086 - protein, 6 aa, synthetic construct
PNENIE

SEQ ID NO: 5087 - protein, 6 aa, synthetic construct
PNENIF

SEQ ID NO: 5088 - protein, 6 aa, synthetic construct
PNENIW

SEQ ID NO: 5089 - protein, 6 aa, synthetic construct
PNENIY

SEQ ID NO: 5090 - protein, 6 aa, synthetic construct
PNENLD

SEQ ID NO: 5091 - protein, 6 aa, synthetic construct
PNENLE

SEQ ID NO: 5092 - protein, 6 aa, synthetic construct
PNENLF

SEQ ID NO: 5093 - protein, 6 aa, synthetic construct
PNENLW

SEQ ID NO: 5094 - protein, 6 aa, synthetic construct
PNENLY

SEQ ID NO: 5095 - protein, 6 aa, synthetic construct
PNENKD

SEQ ID NO: 5096 - protein, 6 aa, synthetic construct
PNENKE

SEQ ID NO: 5097 - protein, 6 aa, synthetic construct
PNENKF

SEQ ID NO: 5098 - protein, 6 aa, synthetic construct
PNENKW

SEQ ID NO: 5099 - protein, 6 aa, synthetic construct
PNENKY

SEQ ID NO: 5100 - protein, 6 aa, synthetic construct
PNENMD

SEQ ID NO: 5101 - protein, 6 aa, synthetic construct
PNENME

SEQ ID NO: 5102 - protein, 6 aa, synthetic construct
PNENMF

SEQ ID NO: 5103 - protein, 6 aa, synthetic construct
PNENMW

SEQ ID NO: 5104 - protein, 6 aa, synthetic construct
PNENMY

SEQ ID NO: 5105 - protein, 6 aa, synthetic construct
PNENFD

SEQ ID NO: 5106 - protein, 6 aa, synthetic construct
PNENFE

SEQ ID NO: 5107 - protein, 6 aa, synthetic construct
PNENFF

SEQ ID NO: 5108 - protein, 6 aa, synthetic construct
PNENFW

SEQ ID NO: 5109 - protein, 6 aa, synthetic construct
PNENFY

SEQ ID NO: 5110 - protein, 6 aa, synthetic construct
PNENPD

SEQ ID NO: 5111 - protein, 6 aa, synthetic construct
PNENPE

SEQ ID NO: 5112 - protein, 6 aa, synthetic construct
PNENPF

SEQ ID NO: 5113 - protein, 6 aa, synthetic construct
PNENPW

SEQ ID NO: 5114 - protein, 6 aa, synthetic construct
PNENPY

SEQ ID NO: 5115 - protein, 6 aa, synthetic construct
PNENSD

SEQ ID NO: 5116 - protein, 6 aa, synthetic construct
PNENSE

SEQ ID NO: 5117 - protein, 6 aa, synthetic construct
PNENSF

SEQ ID NO: 5118 - protein, 6 aa, synthetic construct
PNENSW

SEQ ID NO: 5119 - protein, 6 aa, synthetic construct
PNENSY

SEQ ID NO: 5120 - protein, 6 aa, synthetic construct
PNENTD

SEQ ID NO: 5121 - protein, 6 aa, synthetic construct
PNENTE

SEQ ID NO: 5122 - protein, 6 aa, synthetic construct
PNENTF

SEQ ID NO: 5123 - protein, 6 aa, synthetic construct
PNENTW

SEQ ID NO: 5124 - protein, 6 aa, synthetic construct
PNENTY

SEQ ID NO: 5125 - protein, 6 aa, synthetic construct
PNENWD

SEQ ID NO: 5126 - protein, 6 aa, synthetic construct
PNENWE

SEQ ID NO: 5127 - protein, 6 aa, synthetic construct
PNENWF

SEQ ID NO: 5128 - protein, 6 aa, synthetic construct
PNENWW

SEQ ID NO: 5129 - protein, 6 aa, synthetic construct
PNENWY

SEQ ID NO: 5130 - protein, 6 aa, synthetic construct
PNENYD

SEQ ID NO: 5131 - protein, 6 aa, synthetic construct
PNENYE

SEQ ID NO: 5132 - protein, 6 aa, synthetic construct
PNENYF

SEQ ID NO: 5133 - protein, 6 aa, synthetic construct
PNENYW

SEQ ID NO: 5134 - protein, 6 aa, synthetic construct
PNENYY

SEQ ID NO: 5135 - protein, 6 aa, synthetic construct
PNENVD

SEQ ID NO: 5136 - protein, 6 aa, synthetic construct
PNENVE

SEQ ID NO: 5137 - protein, 6 aa, synthetic construct
PNENVF

SEQ ID NO: 5138 - protein, 6 aa, synthetic construct
PNENVW

SEQ ID NO: 5139 - protein, 6 aa, synthetic construct
PNENVY

SEQ ID NO: 5140 - protein, 6 aa, synthetic construct
PNEDAD

SEQ ID NO: 5141 - protein, 6 aa, synthetic construct
PNEDAE

SEQ ID NO: 5142 - protein, 6 aa, synthetic construct
PNEDAF

SEQ ID NO: 5143 - protein, 6 aa, synthetic construct
PNEDAW

SEQ ID NO: 5144 - protein, 6 aa, synthetic construct
PNEDAY

SEQ ID NO: 5145 - protein, 6 aa, synthetic construct
PNEDRD

SEQ ID NO: 5146 - protein, 6 aa, synthetic construct
PNEDRE

SEQ ID NO: 5147 - protein, 6 aa, synthetic construct
PNEDRF

SEQ ID NO: 5148 - protein, 6 aa, synthetic construct
PNEDRW

SEQ ID NO: 5149 - protein, 6 aa, synthetic construct
PNEDRY

SEQ ID NO: 5150 - protein, 6 aa, synthetic construct
PNEDND

SEQ ID NO: 5151 - protein, 6 aa, synthetic construct
PNEDNE

SEQ ID NO: 5152 - protein, 6 aa, synthetic construct
PNEDNF

SEQ ID NO: 5153 - protein, 6 aa, synthetic construct
PNEDNW

SEQ ID NO: 5154 - protein, 6 aa, synthetic construct
PNEDNY

SEQ ID NO: 5155 - protein, 6 aa, synthetic construct
PNEDDD

SEQ ID NO: 5156 - protein, 6 aa, synthetic construct
PNEDDE

SEQ ID NO: 5157 - protein, 6 aa, synthetic construct
PNEDDF

SEQ ID NO: 5158 - protein, 6 aa, synthetic construct
PNEDDW

SEQ ID NO: 5159 - protein, 6 aa, synthetic construct
PNEDDY

SEQ ID NO: 5160 - protein, 6 aa, synthetic construct
PNEDCD

SEQ ID NO: 5161 - protein, 6 aa, synthetic construct
PNEDCE

SEQ ID NO: 5162 - protein, 6 aa, synthetic construct
PNEDCF

SEQ ID NO: 5163 - protein, 6 aa, synthetic construct
PNEDCW

SEQ ID NO: 5164 - protein, 6 aa, synthetic construct
PNEDCY

SEQ ID NO: 5165 - protein, 6 aa, synthetic construct
PNEDQD

SEQ ID NO: 5166 - protein, 6 aa, synthetic construct
PNEDQE

SEQ ID NO: 5167 - protein, 6 aa, synthetic construct
PNEDQF

SEQ ID NO: 5168 - protein, 6 aa, synthetic construct
PNEDQW

SEQ ID NO: 5169 - protein, 6 aa, synthetic construct
PNEDQY

SEQ ID NO: 5170 - protein, 6 aa, synthetic construct
PNEDED

SEQ ID NO: 5171 - protein, 6 aa, synthetic construct
PNEDEE

SEQ ID NO: 5172 - protein, 6 aa, synthetic construct
PNEDEF

SEQ ID NO: 5173 - protein, 6 aa, synthetic construct
PNEDEW

SEQ ID NO: 5174 - protein, 6 aa, synthetic construct
PNEDEY

SEQ ID NO: 5175 - protein, 6 aa, synthetic construct
PNEDGD

SEQ ID NO: 5176 - protein, 6 aa, synthetic construct
PNEDGE

SEQ ID NO: 5177 - protein, 6 aa, synthetic construct
PNEDGF

SEQ ID NO: 5178 - protein, 6 aa, synthetic construct
PNEDGW

SEQ ID NO: 5179 - protein, 6 aa, synthetic construct
PNEDGY

SEQ ID NO: 5180 - protein, 6 aa, synthetic construct
PNEDHD

SEQ ID NO: 5181 - protein, 6 aa, synthetic construct
PNEDHE

SEQ ID NO: 5182 - protein, 6 aa, synthetic construct
PNEDHF

SEQ ID NO: 5183 - protein, 6 aa, synthetic construct
PNEDHW

SEQ ID NO: 5184 - protein, 6 aa, synthetic construct
PNEDHY

SEQ ID NO: 5185 - protein, 6 aa, synthetic construct
PNEDID

SEQ ID NO: 5186 - protein, 6 aa, synthetic construct
PNEDIE

SEQ ID NO: 5187 - protein, 6 aa, synthetic construct
PNEDIF

SEQ ID NO: 5188 - protein, 6 aa, synthetic construct
PNEDIW

SEQ ID NO: 5189 - protein, 6 aa, synthetic construct
PNEDIY

SEQ ID NO: 5190 - protein, 6 aa, synthetic construct
PNEDLD

SEQ ID NO: 5191 - protein, 6 aa, synthetic construct
PNEDLE

SEQ ID NO: 5192 - protein, 6 aa, synthetic construct
PNEDLF

SEQ ID NO: 5193 - protein, 6 aa, synthetic construct
PNEDLW

SEQ ID NO: 5194 - protein, 6 aa, synthetic construct
PNEDLY

SEQ ID NO: 5195 - protein, 6 aa, synthetic construct
PNEDKD

SEQ ID NO: 5196 - protein, 6 aa, synthetic construct
PNEDKE

SEQ ID NO: 5197 - protein, 6 aa, synthetic construct
PNEDKF

SEQ ID NO: 5198 - protein, 6 aa, synthetic construct
PNEDKW

SEQ ID NO: 5199 - protein, 6 aa, synthetic construct
PNEDKY

SEQ ID NO: 5200 - protein, 6 aa, synthetic construct
PNEDMD

SEQ ID NO: 5201 - protein, 6 aa, synthetic construct
PNEDME

SEQ ID NO: 5202 - protein, 6 aa, synthetic construct
PNEDMF

SEQ ID NO: 5203 - protein, 6 aa, synthetic construct
PNEDMW

SEQ ID NO: 5204 - protein, 6 aa, synthetic construct
PNEDMY

SEQ ID NO: 5205 - protein, 6 aa, synthetic construct
PNEDFD

SEQ ID NO: 5206 - protein, 6 aa, synthetic construct
PNEDFE

SEQ ID NO: 5207 - protein, 6 aa, synthetic construct
PNEDFF

SEQ ID NO: 5208 - protein, 6 aa, synthetic construct
PNEDFW

SEQ ID NO: 5209 - protein, 6 aa, synthetic construct
PNEDFY

SEQ ID NO: 5210 - protein, 6 aa, synthetic construct
PNEDPD

SEQ ID NO: 5211 - protein, 6 aa, synthetic construct
PNEDPE

SEQ ID NO: 5212 - protein, 6 aa, synthetic construct
PNEDPF

SEQ ID NO: 5213 - protein, 6 aa, synthetic construct
PNEDPW

SEQ ID NO: 5214 - protein, 6 aa, synthetic construct
PNEDPY

SEQ ID NO: 5215 - protein, 6 aa, synthetic construct
PNEDSD

SEQ ID NO: 5216 - protein, 6 aa, synthetic construct
PNEDSE

SEQ ID NO: 5217 - protein, 6 aa, synthetic construct
PNEDSF

SEQ ID NO: 5218 - protein, 6 aa, synthetic construct
PNEDSW

SEQ ID NO: 5219 - protein, 6 aa, synthetic construct
PNEDSY

SEQ ID NO: 5220 - protein, 6 aa, synthetic construct
PNEDTD

SEQ ID NO: 5221 - protein, 6 aa, synthetic construct
PNEDTE

SEQ ID NO: 5222 - protein, 6 aa, synthetic construct
PNEDTF

SEQ ID NO: 5223 - protein, 6 aa, synthetic construct
PNEDTW

SEQ ID NO: 5224 - protein, 6 aa, synthetic construct
PNEDTY

SEQ ID NO: 5225 - protein, 6 aa, synthetic construct
PNEDWD

SEQ ID NO: 5226 - protein, 6 aa, synthetic construct
PNEDWE

SEQ ID NO: 5227 - protein, 6 aa, synthetic construct
PNEDWF

SEQ ID NO: 5228 - protein, 6 aa, synthetic construct
PNEDWW

SEQ ID NO: 5229 - protein, 6 aa, synthetic construct
PNEDWY

SEQ ID NO: 5230 - protein, 6 aa, synthetic construct
PNEDYD

SEQ ID NO: 5231 - protein, 6 aa, synthetic construct
PNEDYE

SEQ ID NO: 5232 - protein, 6 aa, synthetic construct
PNEDYF

SEQ ID NO: 5233 - protein, 6 aa, synthetic construct
PNEDYW

SEQ ID NO: 5234 - protein, 6 aa, synthetic construct
PNEDYY

SEQ ID NO: 5235 - protein, 6 aa, synthetic construct
PNEDVD

SEQ ID NO: 5236 - protein, 6 aa, synthetic construct
PNEDVE

SEQ ID NO: 5237 - protein, 6 aa, synthetic construct
PNEDVF

SEQ ID NO: 5238 - protein, 6 aa, synthetic construct
PNEDVW

SEQ ID NO: 5239 - protein, 6 aa, synthetic construct
PNEDVY

SEQ ID NO: 5240 - protein, 6 aa, synthetic construct
PNECAD

SEQ ID NO: 5241 - protein, 6 aa, synthetic construct
PNECAE

SEQ ID NO: 5242 - protein, 6 aa, synthetic construct
PNECAF

SEQ ID NO: 5243 - protein, 6 aa, synthetic construct
PNECAW

SEQ ID NO: 5244 - protein, 6 aa, synthetic construct
PNECAY

SEQ ID NO: 5245 - protein, 6 aa, synthetic construct
PNECRD

SEQ ID NO: 5246 - protein, 6 aa, synthetic construct
PNECRE

SEQ ID NO: 5247 - protein, 6 aa, synthetic construct
PNECRF

SEQ ID NO: 5248 - protein, 6 aa, synthetic construct
PNECRW

SEQ ID NO: 5249 - protein, 6 aa, synthetic construct
PNECRY

SEQ ID NO: 5250 - protein, 6 aa, synthetic construct
PNECND

SEQ ID NO: 5251 - protein, 6 aa, synthetic construct
PNECNE

SEQ ID NO: 5252 - protein, 6 aa, synthetic construct
PNECNF

SEQ ID NO: 5253 - protein, 6 aa, synthetic construct
PNECNW

SEQ ID NO: 5254 - protein, 6 aa, synthetic construct
PNECNY

SEQ ID NO: 5255 - protein, 6 aa, synthetic construct
PNECDD

SEQ ID NO: 5256 - protein, 6 aa, synthetic construct
PNECDE

SEQ ID NO: 5257 - protein, 6 aa, synthetic construct
PNECDF

SEQ ID NO: 5258 - protein, 6 aa, synthetic construct
PNECDW

SEQ ID NO: 5259 - protein, 6 aa, synthetic construct
PNECDY

SEQ ID NO: 5260 - protein, 6 aa, synthetic construct
PNECCD

SEQ ID NO: 5261 - protein, 6 aa, synthetic construct
PNECCE

SEQ ID NO: 5262 - protein, 6 aa, synthetic construct
PNECCF

SEQ ID NO: 5263 - protein, 6 aa, synthetic construct
PNECCW

SEQ ID NO: 5264 - protein, 6 aa, synthetic construct
PNECCY

SEQ ID NO: 5265 - protein, 6 aa, synthetic construct
PNECQD

SEQ ID NO: 5266 - protein, 6 aa, synthetic construct
PNECQE

SEQ ID NO: 5267 - protein, 6 aa, synthetic construct
PNECQF

SEQ ID NO: 5268 - protein, 6 aa, synthetic construct
PNECQW

SEQ ID NO: 5269 - protein, 6 aa, synthetic construct
PNECQY

SEQ ID NO: 5270 - protein, 6 aa, synthetic construct
PNECED

SEQ ID NO: 5271 - protein, 6 aa, synthetic construct
PNECEE

SEQ ID NO: 5272 - protein, 6 aa, synthetic construct
PNECEF

SEQ ID NO: 5273 - protein, 6 aa, synthetic construct
PNECEW

SEQ ID NO: 5274 - protein, 6 aa, synthetic construct
PNECEY

SEQ ID NO: 5275 - protein, 6 aa, synthetic construct
PNECGD

SEQ ID NO: 5276 - protein, 6 aa, synthetic construct
PNECGE

SEQ ID NO: 5277 - protein, 6 aa, synthetic construct
PNECGF

SEQ ID NO: 5278 - protein, 6 aa, synthetic construct
PNECGW

SEQ ID NO: 5279 - protein, 6 aa, synthetic construct
PNECGY

SEQ ID NO: 5280 - protein, 6 aa, synthetic construct
PNECHD

SEQ ID NO: 5281 - protein, 6 aa, synthetic construct
PNECHE

SEQ ID NO: 5282 - protein, 6 aa, synthetic construct
PNECHF

SEQ ID NO: 5283 - protein, 6 aa, synthetic construct
PNECHW

SEQ ID NO: 5284 - protein, 6 aa, synthetic construct
PNECHY

SEQ ID NO: 5285 - protein, 6 aa, synthetic construct
PNECID

SEQ ID NO: 5286 - protein, 6 aa, synthetic construct
PNECIE

SEQ ID NO: 5287 - protein, 6 aa, synthetic construct
PNECIF

SEQ ID NO: 5288 - protein, 6 aa, synthetic construct
PNECIW

SEQ ID NO: 5289 - protein, 6 aa, synthetic construct
PNECIY

SEQ ID NO: 5290 - protein, 6 aa, synthetic construct
PNECLD

SEQ ID NO: 5291 - protein, 6 aa, synthetic construct
PNECLE

SEQ ID NO: 5292 - protein, 6 aa, synthetic construct
PNECLF

SEQ ID NO: 5293 - protein, 6 aa, synthetic construct
PNECLW

SEQ ID NO: 5294 - protein, 6 aa, synthetic construct
PNECLY

SEQ ID NO: 5295 - protein, 6 aa, synthetic construct
PNECKD

SEQ ID NO: 5296 - protein, 6 aa, synthetic construct
PNECKE

SEQ ID NO: 5297 - protein, 6 aa, synthetic construct
PNECKF

SEQ ID NO: 5298 - protein, 6 aa, synthetic construct
PNECKW

SEQ ID NO: 5299 - protein, 6 aa, synthetic construct
PNECKY

SEQ ID NO: 5300 - protein, 6 aa, synthetic construct
PNECMD

SEQ ID NO: 5301 - protein, 6 aa, synthetic construct
PNECME

SEQ ID NO: 5302 - protein, 6 aa, synthetic construct
PNECMF

SEQ ID NO: 5303 - protein, 6 aa, synthetic construct
PNECMW

SEQ ID NO: 5304 - protein, 6 aa, synthetic construct
PNECMY

SEQ ID NO: 5305 - protein, 6 aa, synthetic construct
PNECFD

SEQ ID NO: 5306 - protein, 6 aa, synthetic construct
PNECFE

SEQ ID NO: 5307 - protein, 6 aa, synthetic construct
PNECFF

SEQ ID NO: 5308 - protein, 6 aa, synthetic construct
PNECFW

SEQ ID NO: 5309 - protein, 6 aa, synthetic construct
PNECFY

SEQ ID NO: 5310 - protein, 6 aa, synthetic construct
PNECPD

SEQ ID NO: 5311 - protein, 6 aa, synthetic construct
PNECPE

SEQ ID NO: 5312 - protein, 6 aa, synthetic construct
PNECPF

SEQ ID NO: 5313 - protein, 6 aa, synthetic construct
PNECPW

SEQ ID NO: 5314 - protein, 6 aa, synthetic construct
PNECPY

SEQ ID NO: 5315 - protein, 6 aa, synthetic construct
PNECSD

SEQ ID NO: 5316 - protein, 6 aa, synthetic construct
PNECSE

SEQ ID NO: 5317 - protein, 6 aa, synthetic construct
PNECSF

SEQ ID NO: 5318 - protein, 6 aa, synthetic construct
PNECSW

SEQ ID NO: 5319 - protein, 6 aa, synthetic construct
PNECSY

SEQ ID NO: 5320 - protein, 6 aa, synthetic construct
PNECTD

SEQ ID NO: 5321 - protein, 6 aa, synthetic construct
PNECTE

SEQ ID NO: 5322 - protein, 6 aa, synthetic construct
PNECTF

SEQ ID NO: 5323 - protein, 6 aa, synthetic construct
PNECTW

SEQ ID NO: 5324 - protein, 6 aa, synthetic construct
PNECTY

SEQ ID NO: 5325 - protein, 6 aa, synthetic construct
PNECWD

SEQ ID NO: 5326 - protein, 6 aa, synthetic construct
PNECWE

SEQ ID NO: 5327 - protein, 6 aa, synthetic construct
PNECWF

SEQ ID NO: 5328 - protein, 6 aa, synthetic construct
PNECWW

SEQ ID NO: 5329 - protein, 6 aa, synthetic construct
PNECWY

SEQ ID NO: 5330 - protein, 6 aa, synthetic construct
PNECYD

SEQ ID NO: 5331 - protein, 6 aa, synthetic construct
PNECYE

SEQ ID NO: 5332 - protein, 6 aa, synthetic construct
PNECYF

SEQ ID NO: 5333 - protein, 6 aa, synthetic construct
PNECYW

SEQ ID NO: 5334 - protein, 6 aa, synthetic construct
PNECYY

SEQ ID NO: 5335 - protein, 6 aa, synthetic construct
PNECVD

SEQ ID NO: 5336 - protein, 6 aa, synthetic construct
PNECVE

SEQ ID NO: 5337 - protein, 6 aa, synthetic construct
PNECVF

SEQ ID NO: 5338 - protein, 6 aa, synthetic construct
PNECVW

SEQ ID NO: 5339 - protein, 6 aa, synthetic construct
PNECVY

SEQ ID NO: 5340 - protein, 6 aa, synthetic construct
PNEQAD

SEQ ID NO: 5341 - protein, 6 aa, synthetic construct
PNEQAE

SEQ ID NO: 5342 - protein, 6 aa, synthetic construct
PNEQAF

SEQ ID NO: 5343 - protein, 6 aa, synthetic construct
PNEQAW

SEQ ID NO: 5344 - protein, 6 aa, synthetic construct
PNEQAY

SEQ ID NO: 5345 - protein, 6 aa, synthetic construct
PNEQRD

SEQ ID NO: 5346 - protein, 6 aa, synthetic construct
PNEQRE

SEQ ID NO: 5347 - protein, 6 aa, synthetic construct
PNEQRF

SEQ ID NO: 5348 - protein, 6 aa, synthetic construct
PNEQRW

SEQ ID NO: 5349 - protein, 6 aa, synthetic construct
PNEQRY

SEQ ID NO: 5350 - protein, 6 aa, synthetic construct
PNEQND

SEQ ID NO: 5351 - protein, 6 aa, synthetic construct
PNEQNE

SEQ ID NO: 5352 - protein, 6 aa, synthetic construct
PNEQNF

SEQ ID NO: 5353 - protein, 6 aa, synthetic construct
PNEQNW

SEQ ID NO: 5354 - protein, 6 aa, synthetic construct
PNEQNY

SEQ ID NO: 5355 - protein, 6 aa, synthetic construct
PNEQDD

SEQ ID NO: 5356 - protein, 6 aa, synthetic construct
PNEQDE

SEQ ID NO: 5357 - protein, 6 aa, synthetic construct
PNEQDF

SEQ ID NO: 5358 - protein, 6 aa, synthetic construct
PNEQDW

SEQ ID NO: 5359 - protein, 6 aa, synthetic construct
PNEQDY

SEQ ID NO: 5360 - protein, 6 aa, synthetic construct
PNEQCD

SEQ ID NO: 5361 - protein, 6 aa, synthetic construct
PNEQCE

SEQ ID NO: 5362 - protein, 6 aa, synthetic construct
PNEQCF

SEQ ID NO: 5363 - protein, 6 aa, synthetic construct
PNEQCW

SEQ ID NO: 5364 - protein, 6 aa, synthetic construct
PNEQCY

SEQ ID NO: 5365 - protein, 6 aa, synthetic construct
PNEQQD

SEQ ID NO: 5366 - protein, 6 aa, synthetic construct
PNEQQE

SEQ ID NO: 5367 - protein, 6 aa, synthetic construct
PNEQQF

SEQ ID NO: 5368 - protein, 6 aa, synthetic construct
PNEQQW

SEQ ID NO: 5369 - protein, 6 aa, synthetic construct
PNEQQY

SEQ ID NO: 5370 - protein, 6 aa, synthetic construct
PNEQED

SEQ ID NO: 5371 - protein, 6 aa, synthetic construct
PNEQEE

SEQ ID NO: 5372 - protein, 6 aa, synthetic construct
PNEQEF

SEQ ID NO: 5373 - protein, 6 aa, synthetic construct
PNEQEW

SEQ ID NO: 5374 - protein, 6 aa, synthetic construct
PNEQEY

SEQ ID NO: 5375 - protein, 6 aa, synthetic construct
PNEQGD

SEQ ID NO: 5376 - protein, 6 aa, synthetic construct
PNEQGE

SEQ ID NO: 5377 - protein, 6 aa, synthetic construct
PNEQGF

SEQ ID NO: 5378 - protein, 6 aa, synthetic construct
PNEQGW

SEQ ID NO: 5379 - protein, 6 aa, synthetic construct
PNEQGY

SEQ ID NO: 5380 - protein, 6 aa, synthetic construct
PNEQHD

SEQ ID NO: 5381 - protein, 6 aa, synthetic construct
PNEQHE

SEQ ID NO: 5382 - protein, 6 aa, synthetic construct
PNEQHF

SEQ ID NO: 5383 - protein, 6 aa, synthetic construct
PNEQHW

SEQ ID NO: 5384 - protein, 6 aa, synthetic construct
PNEQHY

SEQ ID NO: 5385 - protein, 6 aa, synthetic construct
PNEQID

SEQ ID NO: 5386 - protein, 6 aa, synthetic construct
PNEQIE

SEQ ID NO: 5387 - protein, 6 aa, synthetic construct
PNEQIF

SEQ ID NO: 5388 - protein, 6 aa, synthetic construct
PNEQIW

SEQ ID NO: 5389 - protein, 6 aa, synthetic construct
PNEQIY

SEQ ID NO: 5390 - protein, 6 aa, synthetic construct
PNEQLD

SEQ ID NO: 5391 - protein, 6 aa, synthetic construct
PNEQLE

SEQ ID NO: 5392 - protein, 6 aa, synthetic construct
PNEQLF

SEQ ID NO: 5393 - protein, 6 aa, synthetic construct
PNEQLW

SEQ ID NO: 5394 - protein, 6 aa, synthetic construct
PNEQLY

SEQ ID NO: 5395 - protein, 6 aa, synthetic construct
PNEQKD

SEQ ID NO: 5396 - protein, 6 aa, synthetic construct
PNEQKE

SEQ ID NO: 5397 - protein, 6 aa, synthetic construct
PNEQKF

SEQ ID NO: 5398 - protein, 6 aa, synthetic construct
PNEQKW

SEQ ID NO: 5399 - protein, 6 aa, synthetic construct
PNEQKY

SEQ ID NO: 5400 - protein, 6 aa, synthetic construct
PNEQMD

SEQ ID NO: 5401 - protein, 6 aa, synthetic construct
PNEQME

SEQ ID NO: 5402 - protein, 6 aa, synthetic construct
PNEQMF

SEQ ID NO: 5403 - protein, 6 aa, synthetic construct
PNEQMW

SEQ ID NO: 5404 - protein, 6 aa, synthetic construct
PNEQMY

SEQ ID NO: 5405 - protein, 6 aa, synthetic construct
PNEQFD

SEQ ID NO: 5406 - protein, 6 aa, synthetic construct
PNEQFE

SEQ ID NO: 5407 - protein, 6 aa, synthetic construct
PNEQFF

SEQ ID NO: 5408 - protein, 6 aa, synthetic construct
PNEQFW

SEQ ID NO: 5409 - protein, 6 aa, synthetic construct
PNEQFY

SEQ ID NO: 5410 - protein, 6 aa, synthetic construct
PNEQPD

SEQ ID NO: 5411 - protein, 6 aa, synthetic construct
PNEQPE

SEQ ID NO: 5412 - protein, 6 aa, synthetic construct
PNEQPF

SEQ ID NO: 5413 - protein, 6 aa, synthetic construct
PNEQPW

SEQ ID NO: 5414 - protein, 6 aa, synthetic construct
PNEQPY

SEQ ID NO: 5415 - protein, 6 aa, synthetic construct
PNEQSD

SEQ ID NO: 5416 - protein, 6 aa, synthetic construct
PNEQSE

SEQ ID NO: 5417 - protein, 6 aa, synthetic construct
PNEQSF

SEQ ID NO: 5418 - protein, 6 aa, synthetic construct
PNEQSW

SEQ ID NO: 5419 - protein, 6 aa, synthetic construct
PNEQSY

SEQ ID NO: 5420 - protein, 6 aa, synthetic construct
PNEQTD

SEQ ID NO: 5421 - protein, 6 aa, synthetic construct
PNEQTE

SEQ ID NO: 5422 - protein, 6 aa, synthetic construct
PNEQTF

SEQ ID NO: 5423 - protein, 6 aa, synthetic construct
PNEQTW

SEQ ID NO: 5424 - protein, 6 aa, synthetic construct
PNEQTY

SEQ ID NO: 5425 - protein, 6 aa, synthetic construct
PNEQWD

SEQ ID NO: 5426 - protein, 6 aa, synthetic construct
PNEQWE

SEQ ID NO: 5427 - protein, 6 aa, synthetic construct
PNEQWF

SEQ ID NO: 5428 - protein, 6 aa, synthetic construct
PNEQWW

SEQ ID NO: 5429 - protein, 6 aa, synthetic construct
PNEQWY

SEQ ID NO: 5430 - protein, 6 aa, synthetic construct
PNEQYD

SEQ ID NO: 5431 - protein, 6 aa, synthetic construct
PNEQYE

SEQ ID NO: 5432 - protein, 6 aa, synthetic construct
PNEQYF

SEQ ID NO: 5433 - protein, 6 aa, synthetic construct
PNEQYW

SEQ ID NO: 5434 - protein, 6 aa, synthetic construct
PNEQYY

SEQ ID NO: 5435 - protein, 6 aa, synthetic construct
PNEQVD

SEQ ID NO: 5436 - protein, 6 aa, synthetic construct
PNEQVE

SEQ ID NO: 5437 - protein, 6 aa, synthetic construct
PNEQVF

SEQ ID NO: 5438 - protein, 6 aa, synthetic construct
PNEQVW

SEQ ID NO: 5439 - protein, 6 aa, synthetic construct
PNEQVY

SEQ ID NO: 5440 - protein, 6 aa, synthetic construct
PNEEAD

SEQ ID NO: 5441 - protein, 6 aa, synthetic construct
PNEEAE

SEQ ID NO: 5442 - protein, 6 aa, synthetic construct
PNEEAF

SEQ ID NO: 5443 - protein, 6 aa, synthetic construct
PNEEAW

SEQ ID NO: 5444 - protein, 6 aa, synthetic construct
PNEEAY

SEQ ID NO: 5445 - protein, 6 aa, synthetic construct
PNEERD

SEQ ID NO: 5446 - protein, 6 aa, synthetic construct
PNEERE

SEQ ID NO: 5447 - protein, 6 aa, synthetic construct
PNEERF

SEQ ID NO: 5448 - protein, 6 aa, synthetic construct
PNEERW

SEQ ID NO: 5449 - protein, 6 aa, synthetic construct
PNEERY

SEQ ID NO: 5450 - protein, 6 aa, synthetic construct
PNEEND

SEQ ID NO: 5451 - protein, 6 aa, synthetic construct
PNEENE

SEQ ID NO: 5452 - protein, 6 aa, synthetic construct
PNEENF

SEQ ID NO: 5453 - protein, 6 aa, synthetic construct
PNEENW

SEQ ID NO: 5454 - protein, 6 aa, synthetic construct
PNEENY

SEQ ID NO: 5455 - protein, 6 aa, synthetic construct
PNEEDD

SEQ ID NO: 5456 - protein, 6 aa, synthetic construct
PNEEDE

SEQ ID NO: 5457 - protein, 6 aa, synthetic construct
PNEEDF

SEQ ID NO: 5458 - protein, 6 aa, synthetic construct
PNEEDW

SEQ ID NO: 5459 - protein, 6 aa, synthetic construct
PNEEDY

SEQ ID NO: 5460 - protein, 6 aa, synthetic construct
PNEECD

SEQ ID NO: 5461 - protein, 6 aa, synthetic construct
PNEECE

SEQ ID NO: 5462 - protein, 6 aa, synthetic construct
PNEECF

SEQ ID NO: 5463 - protein, 6 aa, synthetic construct
PNEECW

SEQ ID NO: 5464 - protein, 6 aa, synthetic construct
PNEECY

SEQ ID NO: 5465 - protein, 6 aa, synthetic construct
PNEEQD

SEQ ID NO: 5466 - protein, 6 aa, synthetic construct
PNEEQE

SEQ ID NO: 5467 - protein, 6 aa, synthetic construct
PNEEQF

SEQ ID NO: 5468 - protein, 6 aa, synthetic construct
PNEEQW

SEQ ID NO: 5469 - protein, 6 aa, synthetic construct
PNEEQY

SEQ ID NO: 5470 - protein, 6 aa, synthetic construct
PNEEED

SEQ ID NO: 5471 - protein, 6 aa, synthetic construct
PNEEEE

SEQ ID NO: 5472 - protein, 6 aa, synthetic construct
PNEEEF

SEQ ID NO: 5473 - protein, 6 aa, synthetic construct
PNEEEW

SEQ ID NO: 5474 - protein, 6 aa, synthetic construct
PNEEEY

SEQ ID NO: 5475 - protein, 6 aa, synthetic construct
PNEEGD

SEQ ID NO: 5476 - protein, 6 aa, synthetic construct
PNEEGE

SEQ ID NO: 5477 - protein, 6 aa, synthetic construct
PNEEGF

SEQ ID NO: 5478 - protein, 6 aa, synthetic construct
PNEEGW

SEQ ID NO: 5479 - protein, 6 aa, synthetic construct
PNEEGY

SEQ ID NO: 5480 - protein, 6 aa, synthetic construct
PNEEHD

SEQ ID NO: 5481 - protein, 6 aa, synthetic construct
PNEEHE

SEQ ID NO: 5482 - protein, 6 aa, synthetic construct
PNEEHF

SEQ ID NO: 5483 - protein, 6 aa, synthetic construct
PNEEHW

SEQ ID NO: 5484 - protein, 6 aa, synthetic construct
PNEEHY

SEQ ID NO: 5485 - protein, 6 aa, synthetic construct
PNEEID

SEQ ID NO: 5486 - protein, 6 aa, synthetic construct
PNEEIE

SEQ ID NO: 5487 - protein, 6 aa, synthetic construct
PNEEIF

SEQ ID NO: 5488 - protein, 6 aa, synthetic construct
PNEEIW

SEQ ID NO: 5489 - protein, 6 aa, synthetic construct
PNEEIY

SEQ ID NO: 5490 - protein, 6 aa, synthetic construct
PNEELD

SEQ ID NO: 5491 - protein, 6 aa, synthetic construct
PNEELE

SEQ ID NO: 5492 - protein, 6 aa, synthetic construct
PNEELF

SEQ ID NO: 5493 - protein, 6 aa, synthetic construct
PNEELW

SEQ ID NO: 5494 - protein, 6 aa, synthetic construct
PNEELY

SEQ ID NO: 5495 - protein, 6 aa, synthetic construct
PNEEKD

SEQ ID NO: 5496 - protein, 6 aa, synthetic construct
PNEEKE

SEQ ID NO: 5497 - protein, 6 aa, synthetic construct
PNEEKF

SEQ ID NO: 5498 - protein, 6 aa, synthetic construct
PNEEKW

SEQ ID NO: 5499 - protein, 6 aa, synthetic construct
PNEEKY

SEQ ID NO: 5500 - protein, 6 aa, synthetic construct
PNEEMD

SEQ ID NO: 5501 - protein, 6 aa, synthetic construct
PNEEME

SEQ ID NO: 5502 - protein, 6 aa, synthetic construct
PNEEMF

SEQ ID NO: 5503 - protein, 6 aa, synthetic construct
PNEEMW

SEQ ID NO: 5504 - protein, 6 aa, synthetic construct
PNEEMY

SEQ ID NO: 5505 - protein, 6 aa, synthetic construct
PNEEFD

SEQ ID NO: 5506 - protein, 6 aa, synthetic construct
PNEEFE

SEQ ID NO: 5507 - protein, 6 aa, synthetic construct
PNEEFF

SEQ ID NO: 5508 - protein, 6 aa, synthetic construct
PNEEFW

SEQ ID NO: 5509 - protein, 6 aa, synthetic construct
PNEEFY

SEQ ID NO: 5510 - protein, 6 aa, synthetic construct
PNEEPD

SEQ ID NO: 5511 - protein, 6 aa, synthetic construct
PNEEPE

SEQ ID NO: 5512 - protein, 6 aa, synthetic construct
PNEEPF

SEQ ID NO: 5513 - protein, 6 aa, synthetic construct
PNEEPW

SEQ ID NO: 5514 - protein, 6 aa, synthetic construct
PNEEPY

SEQ ID NO: 5515 - protein, 6 aa, synthetic construct
PNEESD

SEQ ID NO: 5516 - protein, 6 aa, synthetic construct
PNEESE

SEQ ID NO: 5517 - protein, 6 aa, synthetic construct
PNEESF

SEQ ID NO: 5518 - protein, 6 aa, synthetic construct
PNEESW

SEQ ID NO: 5519 - protein, 6 aa, synthetic construct
PNEESY

SEQ ID NO: 5520 - protein, 6 aa, synthetic construct
PNEETD

SEQ ID NO: 5521 - protein, 6 aa, synthetic construct
PNEETE

SEQ ID NO: 5522 - protein, 6 aa, synthetic construct
PNEETF

SEQ ID NO: 5523 - protein, 6 aa, synthetic construct
PNEETW

SEQ ID NO: 5524 - protein, 6 aa, synthetic construct
PNEETY

SEQ ID NO: 5525 - protein, 6 aa, synthetic construct
PNEEWD

SEQ ID NO: 5526 - protein, 6 aa, synthetic construct
PNEEWE

SEQ ID NO: 5527 - protein, 6 aa, synthetic construct
PNEEWF

SEQ ID NO: 5528 - protein, 6 aa, synthetic construct
PNEEWW

SEQ ID NO: 5529 - protein, 6 aa, synthetic construct
PNEEWY

SEQ ID NO: 5530 - protein, 6 aa, synthetic construct
PNEEYD

SEQ ID NO: 5531 - protein, 6 aa, synthetic construct
PNEEYE

SEQ ID NO: 5532 - protein, 6 aa, synthetic construct
PNEEYF

SEQ ID NO: 5533 - protein, 6 aa, synthetic construct
PNEEYW

SEQ ID NO: 5534 - protein, 6 aa, synthetic construct
PNEEYY

SEQ ID NO: 5535 - protein, 6 aa, synthetic construct
PNEEVD

SEQ ID NO: 5536 - protein, 6 aa, synthetic construct
PNEEVE

SEQ ID NO: 5537 - protein, 6 aa, synthetic construct
PNEEVF

SEQ ID NO: 5538 - protein, 6 aa, synthetic construct
PNEEVW

SEQ ID NO: 5539 - protein, 6 aa, synthetic construct
PNEEVY

SEQ ID NO: 5540 - protein, 6 aa, synthetic construct
PNEGAD

SEQ ID NO: 5541 - protein, 6 aa, synthetic construct
PNEGAE

SEQ ID NO: 5542 - protein, 6 aa, synthetic construct
PNEGAF

SEQ ID NO: 5543 - protein, 6 aa, synthetic construct
PNEGAW

SEQ ID NO: 5544 - protein, 6 aa, synthetic construct
PNEGAY

SEQ ID NO: 5545 - protein, 6 aa, synthetic construct
PNEGRD

SEQ ID NO: 5546 - protein, 6 aa, synthetic construct
PNEGRE

SEQ ID NO: 5547 - protein, 6 aa, synthetic construct
PNEGRF

SEQ ID NO: 5548 - protein, 6 aa, synthetic construct
PNEGRW

SEQ ID NO: 5549 - protein, 6 aa, synthetic construct
PNEGRY

SEQ ID NO: 5550 - protein, 6 aa, synthetic construct
PNEGND

SEQ ID NO: 5551 - protein, 6 aa, synthetic construct
PNEGNE

SEQ ID NO: 5552 - protein, 6 aa, synthetic construct
PNEGNF

SEQ ID NO: 5553 - protein, 6 aa, synthetic construct
PNEGNW

SEQ ID NO: 5554 - protein, 6 aa, synthetic construct
PNEGNY

SEQ ID NO: 5555 - protein, 6 aa, synthetic construct
PNEGDD

SEQ ID NO: 5556 - protein, 6 aa, synthetic construct
PNEGDE

SEQ ID NO: 5557 - protein, 6 aa, synthetic construct
PNEGDF

SEQ ID NO: 5558 - protein, 6 aa, synthetic construct
PNEGDW

SEQ ID NO: 5559 - protein, 6 aa, synthetic construct
PNEGDY

SEQ ID NO: 5560 - protein, 6 aa, synthetic construct
PNEGCD

SEQ ID NO: 5561 - protein, 6 aa, synthetic construct
PNEGCE

SEQ ID NO: 5562 - protein, 6 aa, synthetic construct
PNEGCF

SEQ ID NO: 5563 - protein, 6 aa, synthetic construct
PNEGCW

SEQ ID NO: 5564 - protein, 6 aa, synthetic construct
PNEGCY

SEQ ID NO: 5565 - protein, 6 aa, synthetic construct
PNEGQD

SEQ ID NO: 5566 - protein, 6 aa, synthetic construct
PNEGQE

SEQ ID NO: 5567 - protein, 6 aa, synthetic construct
PNEGQF

SEQ ID NO: 5568 - protein, 6 aa, synthetic construct
PNEGQW

SEQ ID NO: 5569 - protein, 6 aa, synthetic construct
PNEGQY

SEQ ID NO: 5570 - protein, 6 aa, synthetic construct
PNEGED

SEQ ID NO: 5571 - protein, 6 aa, synthetic construct
PNEGEE

SEQ ID NO: 5572 - protein, 6 aa, synthetic construct
PNEGEF

SEQ ID NO: 5573 - protein, 6 aa, synthetic construct
PNEGEW

SEQ ID NO: 5574 - protein, 6 aa, synthetic construct
PNEGEY

SEQ ID NO: 5575 - protein, 6 aa, synthetic construct
PNEGGD

SEQ ID NO: 5576 - protein, 6 aa, synthetic construct
PNEGGE

SEQ ID NO: 5577 - protein, 6 aa, synthetic construct
PNEGGF

SEQ ID NO: 5578 - protein, 6 aa, synthetic construct
PNEGGW

SEQ ID NO: 5579 - protein, 6 aa, synthetic construct
PNEGGY

SEQ ID NO: 5580 - protein, 6 aa, synthetic construct
PNEGHD

SEQ ID NO: 5581 - protein, 6 aa, synthetic construct
PNEGHE

SEQ ID NO: 5582 - protein, 6 aa, synthetic construct
PNEGHF

SEQ ID NO: 5583 - protein, 6 aa, synthetic construct
PNEGHW

SEQ ID NO: 5584 - protein, 6 aa, synthetic construct
PNEGHY

SEQ ID NO: 5585 - protein, 6 aa, synthetic construct
PNEGID

SEQ ID NO: 5586 - protein, 6 aa, synthetic construct
PNEGIE

SEQ ID NO: 5587 - protein, 6 aa, synthetic construct
PNEGIF

SEQ ID NO: 5588 - protein, 6 aa, synthetic construct
PNEGIW

SEQ ID NO: 5589 - protein, 6 aa, synthetic construct
PNEGIY

SEQ ID NO: 5590 - protein, 6 aa, synthetic construct
PNEGLD

SEQ ID NO: 5591 - protein, 6 aa, synthetic construct
PNEGLE

SEQ ID NO: 5592 - protein, 6 aa, synthetic construct
PNEGLF

SEQ ID NO: 5593 - protein, 6 aa, synthetic construct
PNEGLW

SEQ ID NO: 5594 - protein, 6 aa, synthetic construct
PNEGLY

SEQ ID NO: 5595 - protein, 6 aa, synthetic construct
PNEGKD

SEQ ID NO: 5596 - protein, 6 aa, synthetic construct
PNEGKE

SEQ ID NO: 5597 - protein, 6 aa, synthetic construct
PNEGKF

SEQ ID NO: 5598 - protein, 6 aa, synthetic construct
PNEGKW

SEQ ID NO: 5599 - protein, 6 aa, synthetic construct
PNEGKY

SEQ ID NO: 5600 - protein, 6 aa, synthetic construct
PNEGMD

SEQ ID NO: 5601 - protein, 6 aa, synthetic construct
PNEGME

SEQ ID NO: 5602 - protein, 6 aa, synthetic construct
PNEGMF

SEQ ID NO: 5603 - protein, 6 aa, synthetic construct
PNEGMW

SEQ ID NO: 5604 - protein, 6 aa, synthetic construct
PNEGMY

SEQ ID NO: 5605 - protein, 6 aa, synthetic construct
PNEGFD

SEQ ID NO: 5606 - protein, 6 aa, synthetic construct
PNEGFE

SEQ ID NO: 5607 - protein, 6 aa, synthetic construct
PNEGFF

SEQ ID NO: 5608 - protein, 6 aa, synthetic construct
PNEGFW

SEQ ID NO: 5609 - protein, 6 aa, synthetic construct
PNEGFY

SEQ ID NO: 5610 - protein, 6 aa, synthetic construct
PNEGPD

SEQ ID NO: 5611 - protein, 6 aa, synthetic construct
PNEGPE

SEQ ID NO: 5612 - protein, 6 aa, synthetic construct
PNEGPF

SEQ ID NO: 5613 - protein, 6 aa, synthetic construct
PNEGPW

SEQ ID NO: 5614 - protein, 6 aa, synthetic construct
PNEGPY

SEQ ID NO: 5615 - protein, 6 aa, synthetic construct
PNEGSD

SEQ ID NO: 5616 - protein, 6 aa, synthetic construct
PNEGSE

SEQ ID NO: 5617 - protein, 6 aa, synthetic construct
PNEGSF

SEQ ID NO: 5618 - protein, 6 aa, synthetic construct
PNEGSW

SEQ ID NO: 5619 - protein, 6 aa, synthetic construct
PNEGSY

SEQ ID NO: 5620 - protein, 6 aa, synthetic construct
PNEGTD

SEQ ID NO: 5621 - protein, 6 aa, synthetic construct
PNEGTE

SEQ ID NO: 5622 - protein, 6 aa, synthetic construct
PNEGTF

SEQ ID NO: 5623 - protein, 6 aa, synthetic construct
PNEGTW

SEQ ID NO: 5624 - protein, 6 aa, synthetic construct
PNEGTY

SEQ ID NO: 5625 - protein, 6 aa, synthetic construct
PNEGWD

SEQ ID NO: 5626 - protein, 6 aa, synthetic construct
PNEGWE

SEQ ID NO: 5627 - protein, 6 aa, synthetic construct
PNEGWF

SEQ ID NO: 5628 - protein, 6 aa, synthetic construct
PNEGWW

SEQ ID NO: 5629 - protein, 6 aa, synthetic construct
PNEGWY

SEQ ID NO: 5630 - protein, 6 aa, synthetic construct
PNEGYD

SEQ ID NO: 5631 - protein, 6 aa, synthetic construct
PNEGYE

SEQ ID NO: 5632 - protein, 6 aa, synthetic construct
PNEGYF

SEQ ID NO: 5633 - protein, 6 aa, synthetic construct
PNEGYW

SEQ ID NO: 5634 - protein, 6 aa, synthetic construct
PNEGYY

SEQ ID NO: 5635 - protein, 6 aa, synthetic construct
PNEGVD

SEQ ID NO: 5636 - protein, 6 aa, synthetic construct
PNEGVE

SEQ ID NO: 5637 - protein, 6 aa, synthetic construct
PNEGVF

SEQ ID NO: 5638 - protein, 6 aa, synthetic construct
PNEGVW

SEQ ID NO: 5639 - protein, 6 aa, synthetic construct
PNEGVY

SEQ ID NO: 5640 - protein, 6 aa, synthetic construct
PNEHAD

SEQ ID NO: 5641 - protein, 6 aa, synthetic construct
PNEHAE

SEQ ID NO: 5642 - protein, 6 aa, synthetic construct
PNEHAF

SEQ ID NO: 5643 - protein, 6 aa, synthetic construct
PNEHAW

SEQ ID NO: 5644 - protein, 6 aa, synthetic construct
PNEHAY

SEQ ID NO: 5645 - protein, 6 aa, synthetic construct
PNEHRD

SEQ ID NO: 5646 - protein, 6 aa, synthetic construct
PNEHRE

SEQ ID NO: 5647 - protein, 6 aa, synthetic construct
PNEHRF

SEQ ID NO: 5648 - protein, 6 aa, synthetic construct
PNEHRW

SEQ ID NO: 5649 - protein, 6 aa, synthetic construct
PNEHRY

SEQ ID NO: 5650 - protein, 6 aa, synthetic construct
PNEHND

SEQ ID NO: 5651 - protein, 6 aa, synthetic construct
PNEHNE

SEQ ID NO: 5652 - protein, 6 aa, synthetic construct
PNEHNF

SEQ ID NO: 5653 - protein, 6 aa, synthetic construct
PNEHNW

SEQ ID NO: 5654 - protein, 6 aa, synthetic construct
PNEHNY

SEQ ID NO: 5655 - protein, 6 aa, synthetic construct
PNEHDD

SEQ ID NO: 5656 - protein, 6 aa, synthetic construct
PNEHDE

SEQ ID NO: 5657 - protein, 6 aa, synthetic construct
PNEHDF

SEQ ID NO: 5658 - protein, 6 aa, synthetic construct
PNEHDW

SEQ ID NO: 5659 - protein, 6 aa, synthetic construct
PNEHDY

SEQ ID NO: 5660 - protein, 6 aa, synthetic construct
PNEHCD

SEQ ID NO: 5661 - protein, 6 aa, synthetic construct
PNEHCE

SEQ ID NO: 5662 - protein, 6 aa, synthetic construct
PNEHCF

SEQ ID NO: 5663 - protein, 6 aa, synthetic construct
PNEHCW

SEQ ID NO: 5664 - protein, 6 aa, synthetic construct
PNEHCY

SEQ ID NO: 5665 - protein, 6 aa, synthetic construct
PNEHQD

SEQ ID NO: 5666 - protein, 6 aa, synthetic construct
PNEHQE

SEQ ID NO: 5667 - protein, 6 aa, synthetic construct
PNEHQF

SEQ ID NO: 5668 - protein, 6 aa, synthetic construct
PNEHQW

SEQ ID NO: 5669 - protein, 6 aa, synthetic construct
PNEHQY

SEQ ID NO: 5670 - protein, 6 aa, synthetic construct
PNEHED

SEQ ID NO: 5671 - protein, 6 aa, synthetic construct
PNEHEE

SEQ ID NO: 5672 - protein, 6 aa, synthetic construct
PNEHEF

SEQ ID NO: 5673 - protein, 6 aa, synthetic construct
PNEHEW

SEQ ID NO: 5674 - protein, 6 aa, synthetic construct
PNEHEY

SEQ ID NO: 5675 - protein, 6 aa, synthetic construct
PNEHGD

SEQ ID NO: 5676 - protein, 6 aa, synthetic construct
PNEHGE

SEQ ID NO: 5677 - protein, 6 aa, synthetic construct
PNEHGF

SEQ ID NO: 5678 - protein, 6 aa, synthetic construct
PNEHGW

SEQ ID NO: 5679 - protein, 6 aa, synthetic construct
PNEHGY

SEQ ID NO: 5680 - protein, 6 aa, synthetic construct
PNEHHD

SEQ ID NO: 5681 - protein, 6 aa, synthetic construct
PNEHHE

SEQ ID NO: 5682 - protein, 6 aa, synthetic construct
PNEHHF

SEQ ID NO: 5683 - protein, 6 aa, synthetic construct
PNEHHW

SEQ ID NO: 5684 - protein, 6 aa, synthetic construct
PNEHHY

SEQ ID NO: 5685 - protein, 6 aa, synthetic construct
PNEHID

SEQ ID NO: 5686 - protein, 6 aa, synthetic construct
PNEHIE

SEQ ID NO: 5687 - protein, 6 aa, synthetic construct
PNEHIF

SEQ ID NO: 5688 - protein, 6 aa, synthetic construct
PNEHIW

SEQ ID NO: 5689 - protein, 6 aa, synthetic construct
PNEHIY

SEQ ID NO: 5690 - protein, 6 aa, synthetic construct
PNEHLD

SEQ ID NO: 5691 - protein, 6 aa, synthetic construct
PNEHLE

SEQ ID NO: 5692 - protein, 6 aa, synthetic construct
PNEHLF

SEQ ID NO: 5693 - protein, 6 aa, synthetic construct
PNEHLW

SEQ ID NO: 5694 - protein, 6 aa, synthetic construct
PNEHLY

SEQ ID NO: 5695 - protein, 6 aa, synthetic construct
PNEHKD

SEQ ID NO: 5696 - protein, 6 aa, synthetic construct
PNEHKE

SEQ ID NO: 5697 - protein, 6 aa, synthetic construct
PNEHKF

SEQ ID NO: 5698 - protein, 6 aa, synthetic construct
PNEHKW

SEQ ID NO: 5699 - protein, 6 aa, synthetic construct
PNEHKY

SEQ ID NO: 5700 - protein, 6 aa, synthetic construct
PNEHMD

SEQ ID NO: 5701 - protein, 6 aa, synthetic construct
PNEHME

SEQ ID NO: 5702 - protein, 6 aa, synthetic construct
PNEHMF

SEQ ID NO: 5703 - protein, 6 aa, synthetic construct
PNEHMW

SEQ ID NO: 5704 - protein, 6 aa, synthetic construct
PNEHMY

SEQ ID NO: 5705 - protein, 6 aa, synthetic construct
PNEHFD

SEQ ID NO: 5706 - protein, 6 aa, synthetic construct
PNEHFE

SEQ ID NO: 5707 - protein, 6 aa, synthetic construct
PNEHFF

SEQ ID NO: 5708 - protein, 6 aa, synthetic construct
PNEHFW

SEQ ID NO: 5709 - protein, 6 aa, synthetic construct
PNEHFY

SEQ ID NO: 5710 - protein, 6 aa, synthetic construct
PNEHPD

SEQ ID NO: 5711 - protein, 6 aa, synthetic construct
PNEHPE

SEQ ID NO: 5712 - protein, 6 aa, synthetic construct
PNEHPF

SEQ ID NO: 5713 - protein, 6 aa, synthetic construct
PNEHPW

SEQ ID NO: 5714 - protein, 6 aa, synthetic construct
PNEHPY

SEQ ID NO: 5715 - protein, 6 aa, synthetic construct
PNEHSD

SEQ ID NO: 5716 - protein, 6 aa, synthetic construct
PNEHSE

SEQ ID NO: 5717 - protein, 6 aa, synthetic construct
PNEHSF

SEQ ID NO: 5718 - protein, 6 aa, synthetic construct
PNEHSW

SEQ ID NO: 5719 - protein, 6 aa, synthetic construct
PNEHSY

SEQ ID NO: 5720 - protein, 6 aa, synthetic construct
PNEHTD

SEQ ID NO: 5721 - protein, 6 aa, synthetic construct
PNEHTE

SEQ ID NO: 5722 - protein, 6 aa, synthetic construct
PNEHTF

SEQ ID NO: 5723 - protein, 6 aa, synthetic construct
PNEHTW

SEQ ID NO: 5724 - protein, 6 aa, synthetic construct
PNEHTY

SEQ ID NO: 5725 - protein, 6 aa, synthetic construct
PNEHWD

SEQ ID NO: 5726 - protein, 6 aa, synthetic construct
PNEHWE

SEQ ID NO: 5727 - protein, 6 aa, synthetic construct
PNEHWF

SEQ ID NO: 5728 - protein, 6 aa, synthetic construct
PNEHWW

SEQ ID NO: 5729 - protein, 6 aa, synthetic construct
PNEHWY

SEQ ID NO: 5730 - protein, 6 aa, synthetic construct
PNEHYD

SEQ ID NO: 5731 - protein, 6 aa, synthetic construct
PNEHYE

SEQ ID NO: 5732 - protein, 6 aa, synthetic construct
PNEHYF

SEQ ID NO: 5733 - protein, 6 aa, synthetic construct
PNEHYW

SEQ ID NO: 5734 - protein, 6 aa, synthetic construct
PNEHYY

SEQ ID NO: 5735 - protein, 6 aa, synthetic construct
PNEHVD

SEQ ID NO: 5736 - protein, 6 aa, synthetic construct
PNEHVE

SEQ ID NO: 5737 - protein, 6 aa, synthetic construct
PNEHVF

SEQ ID NO: 5738 - protein, 6 aa, synthetic construct
PNEHVW

SEQ ID NO: 5739 - protein, 6 aa, synthetic construct
PNEHVY

SEQ ID NO: 5740 - protein, 6 aa, synthetic construct
PNEIAD

SEQ ID NO: 5741 - protein, 6 aa, synthetic construct
PNEIAE

SEQ ID NO: 5742 - protein, 6 aa, synthetic construct
PNEIAF

SEQ ID NO: 5743 - protein, 6 aa, synthetic construct
PNEIAW

SEQ ID NO: 5744 - protein, 6 aa, synthetic construct
PNEIAY

SEQ ID NO: 5745 - protein, 6 aa, synthetic construct
PNEIRD

SEQ ID NO: 5746 - protein, 6 aa, synthetic construct
PNEIRE

SEQ ID NO: 5747 - protein, 6 aa, synthetic construct
PNEIRF

SEQ ID NO: 5748 - protein, 6 aa, synthetic construct
PNEIRW

SEQ ID NO: 5749 - protein, 6 aa, synthetic construct
PNEIRY

SEQ ID NO: 5750 - protein, 6 aa, synthetic construct
PNEIND

SEQ ID NO: 5751 - protein, 6 aa, synthetic construct
PNEINE

SEQ ID NO: 5752 - protein, 6 aa, synthetic construct
PNEINF

SEQ ID NO: 5753 - protein, 6 aa, synthetic construct
PNEINW

SEQ ID NO: 5754 - protein, 6 aa, synthetic construct
PNEINY

SEQ ID NO: 5755 - protein, 6 aa, synthetic construct
PNEIDD

SEQ ID NO: 5756 - protein, 6 aa, synthetic construct
PNEIDE

SEQ ID NO: 5757 - protein, 6 aa, synthetic construct
PNEIDF

SEQ ID NO: 5758 - protein, 6 aa, synthetic construct
PNEIDW

SEQ ID NO: 5759 - protein, 6 aa, synthetic construct
PNEIDY

SEQ ID NO: 5760 - protein, 6 aa, synthetic construct
PNEICD

SEQ ID NO: 5761 - protein, 6 aa, synthetic construct
PNEICE

SEQ ID NO: 5762 - protein, 6 aa, synthetic construct
PNEICF

SEQ ID NO: 5763 - protein, 6 aa, synthetic construct
PNEICW

SEQ ID NO: 5764 - protein, 6 aa, synthetic construct
PNEICY

SEQ ID NO: 5765 - protein, 6 aa, synthetic construct
PNEIQD

SEQ ID NO: 5766 - protein, 6 aa, synthetic construct
PNEIQE

SEQ ID NO: 5767 - protein, 6 aa, synthetic construct
PNEIQF

SEQ ID NO: 5768 - protein, 6 aa, synthetic construct
PNEIQW

SEQ ID NO: 5769 - protein, 6 aa, synthetic construct
PNEIQY

SEQ ID NO: 5770 - protein, 6 aa, synthetic construct
PNEIED

SEQ ID NO: 5771 - protein, 6 aa, synthetic construct
PNEIEE

SEQ ID NO: 5772 - protein, 6 aa, synthetic construct
PNEIEF

SEQ ID NO: 5773 - protein, 6 aa, synthetic construct
PNEIEW

SEQ ID NO: 5774 - protein, 6 aa, synthetic construct
PNEIEY

SEQ ID NO: 5775 - protein, 6 aa, synthetic construct
PNEIGD

SEQ ID NO: 5776 - protein, 6 aa, synthetic construct
PNEIGE

SEQ ID NO: 5777 - protein, 6 aa, synthetic construct
PNEIGF

SEQ ID NO: 5778 - protein, 6 aa, synthetic construct
PNEIGW

SEQ ID NO: 5779 - protein, 6 aa, synthetic construct
PNEIGY

SEQ ID NO: 5780 - protein, 6 aa, synthetic construct
PNEIHD

SEQ ID NO: 5781 - protein, 6 aa, synthetic construct
PNEIHE

SEQ ID NO: 5782 - protein, 6 aa, synthetic construct
PNEIHF

SEQ ID NO: 5783 - protein, 6 aa, synthetic construct
PNEIHW

SEQ ID NO: 5784 - protein, 6 aa, synthetic construct
PNEIHY

SEQ ID NO: 5785 - protein, 6 aa, synthetic construct
PNEIID

SEQ ID NO: 5786 - protein, 6 aa, synthetic construct
PNEIIE

SEQ ID NO: 5787 - protein, 6 aa, synthetic construct
PNEIIF

SEQ ID NO: 5788 - protein, 6 aa, synthetic construct
PNEIIW

SEQ ID NO: 5789 - protein, 6 aa, synthetic construct
PNEIIY

SEQ ID NO: 5790 - protein, 6 aa, synthetic construct
PNEILD

SEQ ID NO: 5791 - protein, 6 aa, synthetic construct
PNEILE

SEQ ID NO: 5792 - protein, 6 aa, synthetic construct
PNEILF

SEQ ID NO: 5793 - protein, 6 aa, synthetic construct
PNEILW

SEQ ID NO: 5794 - protein, 6 aa, synthetic construct
PNEILY

SEQ ID NO: 5795 - protein, 6 aa, synthetic construct
PNEIKD

SEQ ID NO: 5796 - protein, 6 aa, synthetic construct
PNEIKE

SEQ ID NO: 5797 - protein, 6 aa, synthetic construct
PNEIKF

SEQ ID NO: 5798 - protein, 6 aa, synthetic construct
PNEIKW

SEQ ID NO: 5799 - protein, 6 aa, synthetic construct
PNEIKY

SEQ ID NO: 5800 - protein, 6 aa, synthetic construct
PNEIMD

SEQ ID NO: 5801 - protein, 6 aa, synthetic construct
PNEIME

SEQ ID NO: 5802 - protein, 6 aa, synthetic construct
PNEIMF

SEQ ID NO: 5803 - protein, 6 aa, synthetic construct
PNEIMW

SEQ ID NO: 5804 - protein, 6 aa, synthetic construct
PNEIMY

SEQ ID NO: 5805 - protein, 6 aa, synthetic construct
PNEIFD

SEQ ID NO: 5806 - protein, 6 aa, synthetic construct
PNEIFE

SEQ ID NO: 5807 - protein, 6 aa, synthetic construct
PNEIFF

SEQ ID NO: 5808 - protein, 6 aa, synthetic construct
PNEIFW

SEQ ID NO: 5809 - protein, 6 aa, synthetic construct
PNEIFY

SEQ ID NO: 5810 - protein, 6 aa, synthetic construct
PNEIPD

SEQ ID NO: 5811 - protein, 6 aa, synthetic construct
PNEIPE

SEQ ID NO: 5812 - protein, 6 aa, synthetic construct
PNEIPF

SEQ ID NO: 5813 - protein, 6 aa, synthetic construct
PNEIPW

SEQ ID NO: 5814 - protein, 6 aa, synthetic construct
PNEIPY

SEQ ID NO: 5815 - protein, 6 aa, synthetic construct
PNEISD

SEQ ID NO: 5816 - protein, 6 aa, synthetic construct
PNEISE

SEQ ID NO: 5817 - protein, 6 aa, synthetic construct
PNEISF

SEQ ID NO: 5818 - protein, 6 aa, synthetic construct
PNEISW

SEQ ID NO: 5819 - protein, 6 aa, synthetic construct
PNEISY

SEQ ID NO: 5820 - protein, 6 aa, synthetic construct
PNEITD

SEQ ID NO: 5821 - protein, 6 aa, synthetic construct
PNEITE

SEQ ID NO: 5822 - protein, 6 aa, synthetic construct
PNEITF

SEQ ID NO: 5823 - protein, 6 aa, synthetic construct
PNEITW

SEQ ID NO: 5824 - protein, 6 aa, synthetic construct
PNEITY

SEQ ID NO: 5825 - protein, 6 aa, synthetic construct
PNEIWD

SEQ ID NO: 5826 - protein, 6 aa, synthetic construct
PNEIWE

SEQ ID NO: 5827 - protein, 6 aa, synthetic construct
PNEIWF

SEQ ID NO: 5828 - protein, 6 aa, synthetic construct
PNEIWW

SEQ ID NO: 5829 - protein, 6 aa, synthetic construct
PNEIWY

SEQ ID NO: 5830 - protein, 6 aa, synthetic construct
PNEIYD

SEQ ID NO: 5831 - protein, 6 aa, synthetic construct
PNEIYE

SEQ ID NO: 5832 - protein, 6 aa, synthetic construct
PNEIYF

SEQ ID NO: 5833 - protein, 6 aa, synthetic construct
PNEIYW

SEQ ID NO: 5834 - protein, 6 aa, synthetic construct
PNEIYY

SEQ ID NO: 5835 - protein, 6 aa, synthetic construct
PNEIVD

SEQ ID NO: 5836 - protein, 6 aa, synthetic construct
PNEIVE

SEQ ID NO: 5837 - protein, 6 aa, synthetic construct
PNEIVF

SEQ ID NO: 5838 - protein, 6 aa, synthetic construct
PNEIVW

SEQ ID NO: 5839 - protein, 6 aa, synthetic construct
PNEIVY

SEQ ID NO: 5840 - protein, 6 aa, synthetic construct
PNELAD

SEQ ID NO: 5841 - protein, 6 aa, synthetic construct
PNELAE

SEQ ID NO: 5842 - protein, 6 aa, synthetic construct
PNELAF

SEQ ID NO: 5843 - protein, 6 aa, synthetic construct
PNELAW

SEQ ID NO: 5844 - protein, 6 aa, synthetic construct
PNELAY

SEQ ID NO: 5845 - protein, 6 aa, synthetic construct
PNELRD

SEQ ID NO: 5846 - protein, 6 aa, synthetic construct
PNELRE

SEQ ID NO: 5847 - protein, 6 aa, synthetic construct
PNELRF

SEQ ID NO: 5848 - protein, 6 aa, synthetic construct
PNELRW

SEQ ID NO: 5849 - protein, 6 aa, synthetic construct
PNELRY

SEQ ID NO: 5850 - protein, 6 aa, synthetic construct
PNELND

SEQ ID NO: 5851 - protein, 6 aa, synthetic construct
PNELNE

SEQ ID NO: 5852 - protein, 6 aa, synthetic construct
PNELNF

SEQ ID NO: 5853 - protein, 6 aa, synthetic construct
PNELNW

SEQ ID NO: 5854 - protein, 6 aa, synthetic construct
PNELNY

SEQ ID NO: 5855 - protein, 6 aa, synthetic construct
PNELDD

SEQ ID NO: 5856 - protein, 6 aa, synthetic construct
PNELDE

SEQ ID NO: 5857 - protein, 6 aa, synthetic construct
PNELDF

SEQ ID NO: 5858 - protein, 6 aa, synthetic construct
PNELDW

SEQ ID NO: 5859 - protein, 6 aa, synthetic construct
PNELDY

SEQ ID NO: 5860 - protein, 6 aa, synthetic construct
PNELCD

SEQ ID NO: 5861 - protein, 6 aa, synthetic construct
PNELCE

SEQ ID NO: 5862 - protein, 6 aa, synthetic construct
PNELCF

SEQ ID NO: 5863 - protein, 6 aa, synthetic construct
PNELCW

SEQ ID NO: 5864 - protein, 6 aa, synthetic construct
PNELCY

SEQ ID NO: 5865 - protein, 6 aa, synthetic construct
PNELQD

SEQ ID NO: 5866 - protein, 6 aa, synthetic construct
PNELQE

SEQ ID NO: 5867 - protein, 6 aa, synthetic construct
PNELQF

SEQ ID NO: 5868 - protein, 6 aa, synthetic construct
PNELQW

SEQ ID NO: 5869 - protein, 6 aa, synthetic construct
PNELQY

SEQ ID NO: 5870 - protein, 6 aa, synthetic construct
PNELED

SEQ ID NO: 5871 - protein, 6 aa, synthetic construct
PNELEE

SEQ ID NO: 5872 - protein, 6 aa, synthetic construct
PNELEF

SEQ ID NO: 5873 - protein, 6 aa, synthetic construct
PNELEW

SEQ ID NO: 5874 - protein, 6 aa, synthetic construct
PNELEY

SEQ ID NO: 5875 - protein, 6 aa, synthetic construct
PNELGD

SEQ ID NO: 5876 - protein, 6 aa, synthetic construct
PNELGE

SEQ ID NO: 5877 - protein, 6 aa, synthetic construct
PNELGF

SEQ ID NO: 5878 - protein, 6 aa, synthetic construct
PNELGW

SEQ ID NO: 5879 - protein, 6 aa, synthetic construct
PNELGY

SEQ ID NO: 5880 - protein, 6 aa, synthetic construct
PNELHD

SEQ ID NO: 5881 - protein, 6 aa, synthetic construct
PNELHE

SEQ ID NO: 5882 - protein, 6 aa, synthetic construct
PNELHF

SEQ ID NO: 5883 - protein, 6 aa, synthetic construct
PNELHW

SEQ ID NO: 5884 - protein, 6 aa, synthetic construct
PNELHY

SEQ ID NO: 5885 - protein, 6 aa, synthetic construct
PNELID

SEQ ID NO: 5886 - protein, 6 aa, synthetic construct
PNELIE

SEQ ID NO: 5887 - protein, 6 aa, synthetic construct
PNELIF

SEQ ID NO: 5888 - protein, 6 aa, synthetic construct
PNELIW

SEQ ID NO: 5889 - protein, 6 aa, synthetic construct
PNELIY

SEQ ID NO: 5890 - protein, 6 aa, synthetic construct
PNELLD

SEQ ID NO: 5891 - protein, 6 aa, synthetic construct
PNELLE

SEQ ID NO: 5892 - protein, 6 aa, synthetic construct
PNELLF

SEQ ID NO: 5893 - protein, 6 aa, synthetic construct
PNELLW

SEQ ID NO: 5894 - protein, 6 aa, synthetic construct
PNELLY

SEQ ID NO: 5895 - protein, 6 aa, synthetic construct
PNELKD

SEQ ID NO: 5896 - protein, 6 aa, synthetic construct
PNELKE

SEQ ID NO: 5897 - protein, 6 aa, synthetic construct
PNELKF

SEQ ID NO: 5898 - protein, 6 aa, synthetic construct
PNELKW

SEQ ID NO: 5899 - protein, 6 aa, synthetic construct
PNELKY

SEQ ID NO: 5900 - protein, 6 aa, synthetic construct
PNELMD

SEQ ID NO: 5901 - protein, 6 aa, synthetic construct
PNELME

SEQ ID NO: 5902 - protein, 6 aa, synthetic construct
PNELMF

SEQ ID NO: 5903 - protein, 6 aa, synthetic construct
PNELMW

SEQ ID NO: 5904 - protein, 6 aa, synthetic construct
PNELMY

SEQ ID NO: 5905 - protein, 6 aa, synthetic construct
PNELFD

SEQ ID NO: 5906 - protein, 6 aa, synthetic construct
PNELFE

SEQ ID NO: 5907 - protein, 6 aa, synthetic construct
PNELFF

SEQ ID NO: 5908 - protein, 6 aa, synthetic construct
PNELFW

SEQ ID NO: 5909 - protein, 6 aa, synthetic construct
PNELFY

SEQ ID NO: 5910 - protein, 6 aa, synthetic construct
PNELPD

SEQ ID NO: 5911 - protein, 6 aa, synthetic construct
PNELPE

SEQ ID NO: 5912 - protein, 6 aa, synthetic construct
PNELPF

SEQ ID NO: 5913 - protein, 6 aa, synthetic construct
PNELPW

SEQ ID NO: 5914 - protein, 6 aa, synthetic construct
PNELPY

SEQ ID NO: 5915 - protein, 6 aa, synthetic construct
PNELSD

SEQ ID NO: 5916 - protein, 6 aa, synthetic construct
PNELSE

SEQ ID NO: 5917 - protein, 6 aa, synthetic construct
PNELSF

SEQ ID NO: 5918 - protein, 6 aa, synthetic construct
PNELSW

SEQ ID NO: 5919 - protein, 6 aa, synthetic construct
PNELSY

SEQ ID NO: 5920 - protein, 6 aa, synthetic construct
PNELTD

SEQ ID NO: 5921 - protein, 6 aa, synthetic construct
PNELTE

SEQ ID NO: 5922 - protein, 6 aa, synthetic construct
PNELTF

SEQ ID NO: 5923 - protein, 6 aa, synthetic construct
PNELTW

SEQ ID NO: 5924 - protein, 6 aa, synthetic construct
PNELTY

SEQ ID NO: 5925 - protein, 6 aa, synthetic construct
PNELWD

SEQ ID NO: 5926 - protein, 6 aa, synthetic construct
PNELWE

SEQ ID NO: 5927 - protein, 6 aa, synthetic construct
PNELWF

SEQ ID NO: 5928 - protein, 6 aa, synthetic construct
PNELWW

SEQ ID NO: 5929 - protein, 6 aa, synthetic construct
PNELWY

SEQ ID NO: 5930 - protein, 6 aa, synthetic construct
PNELYD

SEQ ID NO: 5931 - protein, 6 aa, synthetic construct
PNELYE

SEQ ID NO: 5932 - protein, 6 aa, synthetic construct
PNELYF

SEQ ID NO: 5933 - protein, 6 aa, synthetic construct
PNELYW

SEQ ID NO: 5934 - protein, 6 aa, synthetic construct
PNELYY

SEQ ID NO: 5935 - protein, 6 aa, synthetic construct
PNELVD

SEQ ID NO: 5936 - protein, 6 aa, synthetic construct
PNELVE

SEQ ID NO: 5937 - protein, 6 aa, synthetic construct
PNELVF

SEQ ID NO: 5938 - protein, 6 aa, synthetic construct
PNELVW

SEQ ID NO: 5939 - protein, 6 aa, synthetic construct
PNELVY

SEQ ID NO: 5940 - protein, 6 aa, synthetic construct
PNEKAD

SEQ ID NO: 5941 - protein, 6 aa, synthetic construct
PNEKAE

SEQ ID NO: 5942 - protein, 6 aa, synthetic construct
PNEKAF

SEQ ID NO: 5943 - protein, 6 aa, synthetic construct
PNEKAW

SEQ ID NO: 5944 - protein, 6 aa, synthetic construct
PNEKAY

SEQ ID NO: 5945 - protein, 6 aa, synthetic construct
PNEKRD

SEQ ID NO: 5946 - protein, 6 aa, synthetic construct
PNEKRE

SEQ ID NO: 5947 - protein, 6 aa, synthetic construct
PNEKRF

SEQ ID NO: 5948 - protein, 6 aa, synthetic construct
PNEKRW

SEQ ID NO: 5949 - protein, 6 aa, synthetic construct
PNEKRY

SEQ ID NO: 5950 - protein, 6 aa, synthetic construct
PNEKND

SEQ ID NO: 5951 - protein, 6 aa, synthetic construct
PNEKNE

SEQ ID NO: 5952 - protein, 6 aa, synthetic construct
PNEKNF

SEQ ID NO: 5953 - protein, 6 aa, synthetic construct
PNEKNW

SEQ ID NO: 5954 - protein, 6 aa, synthetic construct
PNEKNY

SEQ ID NO: 5955 - protein, 6 aa, synthetic construct
PNEKDD

SEQ ID NO: 5956 - protein, 6 aa, synthetic construct
PNEKDE

SEQ ID NO: 5957 - protein, 6 aa, synthetic construct
PNEKDF

SEQ ID NO: 5958 - protein, 6 aa, synthetic construct
PNEKDW

SEQ ID NO: 5959 - protein, 6 aa, synthetic construct
PNEKDY

SEQ ID NO: 5960 - protein, 6 aa, synthetic construct
PNEKCD

SEQ ID NO: 5961 - protein, 6 aa, synthetic construct
PNEKCE

SEQ ID NO: 5962 - protein, 6 aa, synthetic construct
PNEKCF

SEQ ID NO: 5963 - protein, 6 aa, synthetic construct
PNEKCW

SEQ ID NO: 5964 - protein, 6 aa, synthetic construct
PNEKCY

SEQ ID NO: 5965 - protein, 6 aa, synthetic construct
PNEKQD

SEQ ID NO: 5966 - protein, 6 aa, synthetic construct
PNEKQE

SEQ ID NO: 5967 - protein, 6 aa, synthetic construct
PNEKQF

SEQ ID NO: 5968 - protein, 6 aa, synthetic construct
PNEKQW

SEQ ID NO: 5969 - protein, 6 aa, synthetic construct
PNEKQY

SEQ ID NO: 5970 - protein, 6 aa, synthetic construct
PNEKED

SEQ ID NO: 5971 - protein, 6 aa, synthetic construct
PNEKEE

SEQ ID NO: 5972 - protein, 6 aa, synthetic construct
PNEKEF

SEQ ID NO: 5973 - protein, 6 aa, synthetic construct
PNEKEW

SEQ ID NO: 5974 - protein, 6 aa, synthetic construct
PNEKEY

SEQ ID NO: 5975 - protein, 6 aa, synthetic construct
PNEKGD

SEQ ID NO: 5976 - protein, 6 aa, synthetic construct
PNEKGE

SEQ ID NO: 5977 - protein, 6 aa, synthetic construct
PNEKGF

SEQ ID NO: 5978 - protein, 6 aa, synthetic construct
PNEKGW

SEQ ID NO: 5979 - protein, 6 aa, synthetic construct
PNEKGY

SEQ ID NO: 5980 - protein, 6 aa, synthetic construct
PNEKHD

SEQ ID NO: 5981 - protein, 6 aa, synthetic construct
PNEKHE

SEQ ID NO: 5982 - protein, 6 aa, synthetic construct
PNEKHF

SEQ ID NO: 5983 - protein, 6 aa, synthetic construct
PNEKHW

SEQ ID NO: 5984 - protein, 6 aa, synthetic construct
PNEKHY

SEQ ID NO: 5985 - protein, 6 aa, synthetic construct
PNEKID

SEQ ID NO: 5986 - protein, 6 aa, synthetic construct
PNEKIE

SEQ ID NO: 5987 - protein, 6 aa, synthetic construct
PNEKIF

SEQ ID NO: 5988 - protein, 6 aa, synthetic construct
PNEKIW

SEQ ID NO: 5989 - protein, 6 aa, synthetic construct
PNEKIY

SEQ ID NO: 5990 - protein, 6 aa, synthetic construct
PNEKLD

SEQ ID NO: 5991 - protein, 6 aa, synthetic construct
PNEKLE

SEQ ID NO: 5992 - protein, 6 aa, synthetic construct
PNEKLF

SEQ ID NO: 5993 - protein, 6 aa, synthetic construct
PNEKLW

SEQ ID NO: 5994 - protein, 6 aa, synthetic construct
PNEKLY

SEQ ID NO: 5995 - protein, 6 aa, synthetic construct
PNEKKD

SEQ ID NO: 5996 - protein, 6 aa, synthetic construct
PNEKKE

SEQ ID NO: 5997 - protein, 6 aa, synthetic construct
PNEKKF

SEQ ID NO: 5998 - protein, 6 aa, synthetic construct
PNEKKW

SEQ ID NO: 5999 - protein, 6 aa, synthetic construct
PNEKKY

SEQ ID NO: 6000 - protein, 6 aa, synthetic construct
PNEKMD

SEQ ID NO: 6001 - protein, 6 aa, synthetic construct
PNEKME

SEQ ID NO: 6002 - protein, 6 aa, synthetic construct
PNEKMF

SEQ ID NO: 6003 - protein, 6 aa, synthetic construct
PNEKMW

SEQ ID NO: 6004 - protein, 6 aa, synthetic construct
PNEKMY

SEQ ID NO: 6005 - protein, 6 aa, synthetic construct
PNEKFD

SEQ ID NO: 6006 - protein, 6 aa, synthetic construct
PNEKFE

SEQ ID NO: 6007 - protein, 6 aa, synthetic construct
PNEKFF

SEQ ID NO: 6008 - protein, 6 aa, synthetic construct
PNEKFW

SEQ ID NO: 6009 - protein, 6 aa, synthetic construct
PNEKFY

SEQ ID NO: 6010 - protein, 6 aa, synthetic construct
PNEKPD

SEQ ID NO: 6011 - protein, 6 aa, synthetic construct
PNEKPE

SEQ ID NO: 6012 - protein, 6 aa, synthetic construct
PNEKPF

SEQ ID NO: 6013 - protein, 6 aa, synthetic construct
PNEKPW

SEQ ID NO: 6014 - protein, 6 aa, synthetic construct
PNEKPY

SEQ ID NO: 6015 - protein, 6 aa, synthetic construct
PNEKSD

SEQ ID NO: 6016 - protein, 6 aa, synthetic construct
PNEKSE

SEQ ID NO: 6017 - protein, 6 aa, synthetic construct
PNEKSF

SEQ ID NO: 6018 - protein, 6 aa, synthetic construct
PNEKSW

SEQ ID NO: 6019 - protein, 6 aa, synthetic construct
PNEKSY

SEQ ID NO: 6020 - protein, 6 aa, synthetic construct
PNEKTD

SEQ ID NO: 6021 - protein, 6 aa, synthetic construct
PNEKTE

SEQ ID NO: 6022 - protein, 6 aa, synthetic construct
PNEKTF

SEQ ID NO: 6023 - protein, 6 aa, synthetic construct
PNEKTW

SEQ ID NO: 6024 - protein, 6 aa, synthetic construct
PNEKTY

SEQ ID NO: 6025 - protein, 6 aa, synthetic construct
PNEKWD

SEQ ID NO: 6026 - protein, 6 aa, synthetic construct
PNEKWE

SEQ ID NO: 6027 - protein, 6 aa, synthetic construct
PNEKWF

SEQ ID NO: 6028 - protein, 6 aa, synthetic construct
PNEKWW

SEQ ID NO: 6029 - protein, 6 aa, synthetic construct
PNEKWY

SEQ ID NO: 6030 - protein, 6 aa, synthetic construct
PNEKYD

SEQ ID NO: 6031 - protein, 6 aa, synthetic construct
PNEKYE

SEQ ID NO: 6032 - protein, 6 aa, synthetic construct
PNEKYF

SEQ ID NO: 6033 - protein, 6 aa, synthetic construct
PNEKYW

SEQ ID NO: 6034 - protein, 6 aa, synthetic construct
PNEKYY

SEQ ID NO: 6035 - protein, 6 aa, synthetic construct
PNEKVD

SEQ ID NO: 6036 - protein, 6 aa, synthetic construct
PNEKVE

SEQ ID NO: 6037 - protein, 6 aa, synthetic construct
PNEKVF

SEQ ID NO: 6038 - protein, 6 aa, synthetic construct
PNEKVW

SEQ ID NO: 6039 - protein, 6 aa, synthetic construct
PNEKVY

SEQ ID NO: 6040 - protein, 6 aa, synthetic construct
PNEMAD

SEQ ID NO: 6041 - protein, 6 aa, synthetic construct
PNEMAE

SEQ ID NO: 6042 - protein, 6 aa, synthetic construct
PNEMAF

SEQ ID NO: 6043 - protein, 6 aa, synthetic construct
PNEMAW

SEQ ID NO: 6044 - protein, 6 aa, synthetic construct
PNEMAY

SEQ ID NO: 6045 - protein, 6 aa, synthetic construct
PNEMRD

SEQ ID NO: 6046 - protein, 6 aa, synthetic construct
PNEMRE

SEQ ID NO: 6047 - protein, 6 aa, synthetic construct
PNEMRF

SEQ ID NO: 6048 - protein, 6 aa, synthetic construct
PNEMRW

SEQ ID NO: 6049 - protein, 6 aa, synthetic construct
PNEMRY

SEQ ID NO: 6050 - protein, 6 aa, synthetic construct
PNEMND

SEQ ID NO: 6051 - protein, 6 aa, synthetic construct
PNEMNE

SEQ ID NO: 6052 - protein, 6 aa, synthetic construct
PNEMNF

SEQ ID NO: 6053 - protein, 6 aa, synthetic construct
PNEMNW

SEQ ID NO: 6054 - protein, 6 aa, synthetic construct
PNEMNY

SEQ ID NO: 6055 - protein, 6 aa, synthetic construct
PNEMDD

SEQ ID NO: 6056 - protein, 6 aa, synthetic construct
PNEMDE

SEQ ID NO: 6057 - protein, 6 aa, synthetic construct
PNEMDF

SEQ ID NO: 6058 - protein, 6 aa, synthetic construct
PNEMDW

SEQ ID NO: 6059 - protein, 6 aa, synthetic construct
PNEMDY

SEQ ID NO: 6060 - protein, 6 aa, synthetic construct
PNEMCD

SEQ ID NO: 6061 - protein, 6 aa, synthetic construct
PNEMCE

SEQ ID NO: 6062 - protein, 6 aa, synthetic construct
PNEMCF

SEQ ID NO: 6063 - protein, 6 aa, synthetic construct
PNEMCW

SEQ ID NO: 6064 - protein, 6 aa, synthetic construct
PNEMCY

SEQ ID NO: 6065 - protein, 6 aa, synthetic construct
PNEMQD

SEQ ID NO: 6066 - protein, 6 aa, synthetic construct
PNEMQE

SEQ ID NO: 6067 - protein, 6 aa, synthetic construct
PNEMQF

SEQ ID NO: 6068 - protein, 6 aa, synthetic construct
PNEMQW

SEQ ID NO: 6069 - protein, 6 aa, synthetic construct
PNEMQY

SEQ ID NO: 6070 - protein, 6 aa, synthetic construct
PNEMED

SEQ ID NO: 6071 - protein, 6 aa, synthetic construct
PNEMEE

SEQ ID NO: 6072 - protein, 6 aa, synthetic construct
PNEMEF

SEQ ID NO: 6073 - protein, 6 aa, synthetic construct
PNEMEW

SEQ ID NO: 6074 - protein, 6 aa, synthetic construct
PNEMEY

SEQ ID NO: 6075 - protein, 6 aa, synthetic construct
PNEMGD

SEQ ID NO: 6076 - protein, 6 aa, synthetic construct
PNEMGE

SEQ ID NO: 6077 - protein, 6 aa, synthetic construct
PNEMGF

SEQ ID NO: 6078 - protein, 6 aa, synthetic construct
PNEMGW

SEQ ID NO: 6079 - protein, 6 aa, synthetic construct
PNEMGY

SEQ ID NO: 6080 - protein, 6 aa, synthetic construct
PNEMHD

SEQ ID NO: 6081 - protein, 6 aa, synthetic construct
PNEMHE

SEQ ID NO: 6082 - protein, 6 aa, synthetic construct
PNEMHF

SEQ ID NO: 6083 - protein, 6 aa, synthetic construct
PNEMHW

SEQ ID NO: 6084 - protein, 6 aa, synthetic construct
PNEMHY

SEQ ID NO: 6085 - protein, 6 aa, synthetic construct
PNEMID

SEQ ID NO: 6086 - protein, 6 aa, synthetic construct
PNEMIE

SEQ ID NO: 6087 - protein, 6 aa, synthetic construct
PNEMIF

SEQ ID NO: 6088 - protein, 6 aa, synthetic construct
PNEMIW

SEQ ID NO: 6089 - protein, 6 aa, synthetic construct
PNEMIY

SEQ ID NO: 6090 - protein, 6 aa, synthetic construct
PNEMLD

SEQ ID NO: 6091 - protein, 6 aa, synthetic construct
PNEMLE

SEQ ID NO: 6092 - protein, 6 aa, synthetic construct
PNEMLF

SEQ ID NO: 6093 - protein, 6 aa, synthetic construct
PNEMLW

SEQ ID NO: 6094 - protein, 6 aa, synthetic construct
PNEMLY

SEQ ID NO: 6095 - protein, 6 aa, synthetic construct
PNEMKD

SEQ ID NO: 6096 - protein, 6 aa, synthetic construct
PNEMKE

SEQ ID NO: 6097 - protein, 6 aa, synthetic construct
PNEMKF

SEQ ID NO: 6098 - protein, 6 aa, synthetic construct
PNEMKW

SEQ ID NO: 6099 - protein, 6 aa, synthetic construct
PNEMKY

SEQ ID NO: 6100 - protein, 6 aa, synthetic construct
PNEMMD

SEQ ID NO: 6101 - protein, 6 aa, synthetic construct
PNEMME

SEQ ID NO: 6102 - protein, 6 aa, synthetic construct
PNEMMF

SEQ ID NO: 6103 - protein, 6 aa, synthetic construct
PNEMMW

SEQ ID NO: 6104 - protein, 6 aa, synthetic construct
PNEMMY

SEQ ID NO: 6105 - protein, 6 aa, synthetic construct
PNEMFD

SEQ ID NO: 6106 - protein, 6 aa, synthetic construct
PNEMFE

SEQ ID NO: 6107 - protein, 6 aa, synthetic construct
PNEMFF

SEQ ID NO: 6108 - protein, 6 aa, synthetic construct
PNEMFW

SEQ ID NO: 6109 - protein, 6 aa, synthetic construct
PNEMFY

SEQ ID NO: 6110 - protein, 6 aa, synthetic construct
PNEMPD

SEQ ID NO: 6111 - protein, 6 aa, synthetic construct
PNEMPE

SEQ ID NO: 6112 - protein, 6 aa, synthetic construct
PNEMPF

SEQ ID NO: 6113 - protein, 6 aa, synthetic construct
PNEMPW

SEQ ID NO: 6114 - protein, 6 aa, synthetic construct
PNEMPY

SEQ ID NO: 6115 - protein, 6 aa, synthetic construct
PNEMSD

SEQ ID NO: 6116 - protein, 6 aa, synthetic construct
PNEMSE

SEQ ID NO: 6117 - protein, 6 aa, synthetic construct
PNEMSF

SEQ ID NO: 6118 - protein, 6 aa, synthetic construct
PNEMSW

SEQ ID NO: 6119 - protein, 6 aa, synthetic construct
PNEMSY

SEQ ID NO: 6120 - protein, 6 aa, synthetic construct
PNEMTD

SEQ ID NO: 6121 - protein, 6 aa, synthetic construct
PNEMTE

SEQ ID NO: 6122 - protein, 6 aa, synthetic construct
PNEMTF

SEQ ID NO: 6123 - protein, 6 aa, synthetic construct
PNEMTW

SEQ ID NO: 6124 - protein, 6 aa, synthetic construct
PNEMTY

SEQ ID NO: 6125 - protein, 6 aa, synthetic construct
PNEMWD

SEQ ID NO: 6126 - protein, 6 aa, synthetic construct
PNEMWE

SEQ ID NO: 6127 - protein, 6 aa, synthetic construct
PNEMWF

SEQ ID NO: 6128 - protein, 6 aa, synthetic construct
PNEMWW

SEQ ID NO: 6129 - protein, 6 aa, synthetic construct
PNEMWY

SEQ ID NO: 6130 - protein, 6 aa, synthetic construct
PNEMYD

SEQ ID NO: 6131 - protein, 6 aa, synthetic construct
PNEMYE

SEQ ID NO: 6132 - protein, 6 aa, synthetic construct
PNEMYF

SEQ ID NO: 6133 - protein, 6 aa, synthetic construct
PNEMYW

SEQ ID NO: 6134 - protein, 6 aa, synthetic construct
PNEMYY

SEQ ID NO: 6135 - protein, 6 aa, synthetic construct
PNEMVD

SEQ ID NO: 6136 - protein, 6 aa, synthetic construct
PNEMVE

SEQ ID NO: 6137 - protein, 6 aa, synthetic construct
PNEMVF

SEQ ID NO: 6138 - protein, 6 aa, synthetic construct
PNEMVW

SEQ ID NO: 6139 - protein, 6 aa, synthetic construct
PNEMVY

SEQ ID NO: 6140 - protein, 6 aa, synthetic construct
PNEFAD

SEQ ID NO: 6141 - protein, 6 aa, synthetic construct
PNEFAE

SEQ ID NO: 6142 - protein, 6 aa, synthetic construct
PNEFAF

SEQ ID NO: 6143 - protein, 6 aa, synthetic construct
PNEFAW

SEQ ID NO: 6144 - protein, 6 aa, synthetic construct
PNEFAY

SEQ ID NO: 6145 - protein, 6 aa, synthetic construct
PNEFRD

SEQ ID NO: 6146 - protein, 6 aa, synthetic construct
PNEFRE

SEQ ID NO: 6147 - protein, 6 aa, synthetic construct
PNEFRF

SEQ ID NO: 6148 - protein, 6 aa, synthetic construct
PNEFRW

SEQ ID NO: 6149 - protein, 6 aa, synthetic construct
PNEFRY

SEQ ID NO: 6150 - protein, 6 aa, synthetic construct
PNEFND

SEQ ID NO: 6151 - protein, 6 aa, synthetic construct
PNEFNE

SEQ ID NO: 6152 - protein, 6 aa, synthetic construct
PNEFNF

SEQ ID NO: 6153 - protein, 6 aa, synthetic construct
PNEFNW

SEQ ID NO: 6154 - protein, 6 aa, synthetic construct
PNEFNY

SEQ ID NO: 6155 - protein, 6 aa, synthetic construct
PNEFDD

SEQ ID NO: 6156 - protein, 6 aa, synthetic construct
PNEFDE

SEQ ID NO: 6157 - protein, 6 aa, synthetic construct
PNEFDF

SEQ ID NO: 6158 - protein, 6 aa, synthetic construct
PNEFDW

SEQ ID NO: 6159 - protein, 6 aa, synthetic construct
PNEFDY

SEQ ID NO: 6160 - protein, 6 aa, synthetic construct
PNEFCD

SEQ ID NO: 6161 - protein, 6 aa, synthetic construct
PNEFCE

SEQ ID NO: 6162 - protein, 6 aa, synthetic construct
PNEFCF

SEQ ID NO: 6163 - protein, 6 aa, synthetic construct
PNEFCW

SEQ ID NO: 6164 - protein, 6 aa, synthetic construct
PNEFCY

SEQ ID NO: 6165 - protein, 6 aa, synthetic construct
PNEFQD

SEQ ID NO: 6166 - protein, 6 aa, synthetic construct
PNEFQE

SEQ ID NO: 6167 - protein, 6 aa, synthetic construct
PNEFQF

SEQ ID NO: 6168 - protein, 6 aa, synthetic construct
PNEFQW

SEQ ID NO: 6169 - protein, 6 aa, synthetic construct
PNEFQY

SEQ ID NO: 6170 - protein, 6 aa, synthetic construct
PNEFED

SEQ ID NO: 6171 - protein, 6 aa, synthetic construct
PNEFEE

SEQ ID NO: 6172 - protein, 6 aa, synthetic construct
PNEFEF

SEQ ID NO: 6173 - protein, 6 aa, synthetic construct
PNEFEW

SEQ ID NO: 6174 - protein, 6 aa, synthetic construct
PNEFEY

SEQ ID NO: 6175 - protein, 6 aa, synthetic construct
PNEFGD

SEQ ID NO: 6176 - protein, 6 aa, synthetic construct
PNEFGE

SEQ ID NO: 6177 - protein, 6 aa, synthetic construct
PNEFGF

SEQ ID NO: 6178 - protein, 6 aa, synthetic construct
PNEFGW

SEQ ID NO: 6179 - protein, 6 aa, synthetic construct
PNEFGY

SEQ ID NO: 6180 - protein, 6 aa, synthetic construct
PNEFHD

SEQ ID NO: 6181 - protein, 6 aa, synthetic construct
PNEFHE

SEQ ID NO: 6182 - protein, 6 aa, synthetic construct
PNEFHF

SEQ ID NO: 6183 - protein, 6 aa, synthetic construct
PNEFHW

SEQ ID NO: 6184 - protein, 6 aa, synthetic construct
PNEFHY

SEQ ID NO: 6185 - protein, 6 aa, synthetic construct
PNEFID

SEQ ID NO: 6186 - protein, 6 aa, synthetic construct
PNEFIE

SEQ ID NO: 6187 - protein, 6 aa, synthetic construct
PNEFIF

SEQ ID NO: 6188 - protein, 6 aa, synthetic construct
PNEFIW

SEQ ID NO: 6189 - protein, 6 aa, synthetic construct
PNEFIY

SEQ ID NO: 6190 - protein, 6 aa, synthetic construct
PNEFLD

SEQ ID NO: 6191 - protein, 6 aa, synthetic construct
PNEFLE

SEQ ID NO: 6192 - protein, 6 aa, synthetic construct
PNEFLF

SEQ ID NO: 6193 - protein, 6 aa, synthetic construct
PNEFLW

SEQ ID NO: 6194 - protein, 6 aa, synthetic construct
PNEFLY

SEQ ID NO: 6195 - protein, 6 aa, synthetic construct
PNEFKD

SEQ ID NO: 6196 - protein, 6 aa, synthetic construct
PNEFKE

SEQ ID NO: 6197 - protein, 6 aa, synthetic construct
PNEFKF

SEQ ID NO: 6198 - protein, 6 aa, synthetic construct
PNEFKW

SEQ ID NO: 6199 - protein, 6 aa, synthetic construct
PNEFKY

SEQ ID NO: 6200 - protein, 6 aa, synthetic construct
PNEFMD

SEQ ID NO: 6201 - protein, 6 aa, synthetic construct
PNEFME

SEQ ID NO: 6202 - protein, 6 aa, synthetic construct
PNEFMF

SEQ ID NO: 6203 - protein, 6 aa, synthetic construct
PNEFMW

SEQ ID NO: 6204 - protein, 6 aa, synthetic construct
PNEFMY

SEQ ID NO: 6205 - protein, 6 aa, synthetic construct
PNEFFD

SEQ ID NO: 6206 - protein, 6 aa, synthetic construct
PNEFFE

SEQ ID NO: 6207 - protein, 6 aa, synthetic construct
PNEFFF

SEQ ID NO: 6208 - protein, 6 aa, synthetic construct
PNEFFW

SEQ ID NO: 6209 - protein, 6 aa, synthetic construct
PNEFFY

SEQ ID NO: 6210 - protein, 6 aa, synthetic construct
PNEFPD

SEQ ID NO: 6211 - protein, 6 aa, synthetic construct
PNEFPE

SEQ ID NO: 6212 - protein, 6 aa, synthetic construct
PNEFPF

SEQ ID NO: 6213 - protein, 6 aa, synthetic construct
PNEFPW

SEQ ID NO: 6214 - protein, 6 aa, synthetic construct
PNEFPY

SEQ ID NO: 6215 - protein, 6 aa, synthetic construct
PNEFSD

SEQ ID NO: 6216 - protein, 6 aa, synthetic construct
PNEFSE

SEQ ID NO: 6217 - protein, 6 aa, synthetic construct
PNEFSF

SEQ ID NO: 6218 - protein, 6 aa, synthetic construct
PNEFSW

SEQ ID NO: 6219 - protein, 6 aa, synthetic construct
PNEFSY

SEQ ID NO: 6220 - protein, 6 aa, synthetic construct
PNEFTD

SEQ ID NO: 6221 - protein, 6 aa, synthetic construct
PNEFTE

SEQ ID NO: 6222 - protein, 6 aa, synthetic construct
PNEFTF

SEQ ID NO: 6223 - protein, 6 aa, synthetic construct
PNEFTW

SEQ ID NO: 6224 - protein, 6 aa, synthetic construct
PNEFTY

SEQ ID NO: 6225 - protein, 6 aa, synthetic construct
PNEFWD

SEQ ID NO: 6226 - protein, 6 aa, synthetic construct
PNEFWE

SEQ ID NO: 6227 - protein, 6 aa, synthetic construct
PNEFWF

SEQ ID NO: 6228 - protein, 6 aa, synthetic construct
PNEFWW

SEQ ID NO: 6229 - protein, 6 aa, synthetic construct
PNEFWY

SEQ ID NO: 6230 - protein, 6 aa, synthetic construct
PNEFYD

SEQ ID NO: 6231 - protein, 6 aa, synthetic construct
PNEFYE

SEQ ID NO: 6232 - protein, 6 aa, synthetic construct
PNEFYF

SEQ ID NO: 6233 - protein, 6 aa, synthetic construct
PNEFYW

SEQ ID NO: 6234 - protein, 6 aa, synthetic construct
PNEFYY

SEQ ID NO: 6235 - protein, 6 aa, synthetic construct
PNEFVD

SEQ ID NO: 6236 - protein, 6 aa, synthetic construct
PNEFVE

SEQ ID NO: 6237 - protein, 6 aa, synthetic construct
PNEFVF

SEQ ID NO: 6238 - protein, 6 aa, synthetic construct
PNEFVW

SEQ ID NO: 6239 - protein, 6 aa, synthetic construct
PNEFVY

SEQ ID NO: 6240 - protein, 6 aa, synthetic construct
PNEPAD

SEQ ID NO: 6241 - protein, 6 aa, synthetic construct
PNEPAE

SEQ ID NO: 6242 - protein, 6 aa, synthetic construct
PNEPAF

SEQ ID NO: 6243 - protein, 6 aa, synthetic construct
PNEPAW

SEQ ID NO: 6244 - protein, 6 aa, synthetic construct
PNEPAY

SEQ ID NO: 6245 - protein, 6 aa, synthetic construct
PNEPRD

SEQ ID NO: 6246 - protein, 6 aa, synthetic construct
PNEPRE

SEQ ID NO: 6247 - protein, 6 aa, synthetic construct
PNEPRF

SEQ ID NO: 6248 - protein, 6 aa, synthetic construct
PNEPRW

SEQ ID NO: 6249 - protein, 6 aa, synthetic construct
PNEPRY

SEQ ID NO: 6250 - protein, 6 aa, synthetic construct
PNEPND

SEQ ID NO: 6251 - protein, 6 aa, synthetic construct
PNEPNE

SEQ ID NO: 6252 - protein, 6 aa, synthetic construct
PNEPNF

SEQ ID NO: 6253 - protein, 6 aa, synthetic construct
PNEPNW

SEQ ID NO: 6254 - protein, 6 aa, synthetic construct
PNEPNY

SEQ ID NO: 6255 - protein, 6 aa, synthetic construct
PNEPDD

SEQ ID NO: 6256 - protein, 6 aa, synthetic construct
PNEPDE

SEQ ID NO: 6257 - protein, 6 aa, synthetic construct
PNEPDF

SEQ ID NO: 6258 - protein, 6 aa, synthetic construct
PNEPDW

SEQ ID NO: 6259 - protein, 6 aa, synthetic construct
PNEPDY

SEQ ID NO: 6260 - protein, 6 aa, synthetic construct
PNEPCD

SEQ ID NO: 6261 - protein, 6 aa, synthetic construct
PNEPCE

SEQ ID NO: 6262 - protein, 6 aa, synthetic construct
PNEPCF

SEQ ID NO: 6263 - protein, 6 aa, synthetic construct
PNEPCW

SEQ ID NO: 6264 - protein, 6 aa, synthetic construct
PNEPCY

SEQ ID NO: 6265 - protein, 6 aa, synthetic construct
PNEPQD

SEQ ID NO: 6266 - protein, 6 aa, synthetic construct
PNEPQE

SEQ ID NO: 6267 - protein, 6 aa, synthetic construct
PNEPQF

SEQ ID NO: 6268 - protein, 6 aa, synthetic construct
PNEPQW

SEQ ID NO: 6269 - protein, 6 aa, synthetic construct
PNEPQY

SEQ ID NO: 6270 - protein, 6 aa, synthetic construct
PNEPED

SEQ ID NO: 6271 - protein, 6 aa, synthetic construct
PNEPEE

SEQ ID NO: 6272 - protein, 6 aa, synthetic construct
PNEPEF

SEQ ID NO: 6273 - protein, 6 aa, synthetic construct
PNEPEW

SEQ ID NO: 6274 - protein, 6 aa, synthetic construct
PNEPEY

SEQ ID NO: 6275 - protein, 6 aa, synthetic construct
PNEPGD

SEQ ID NO: 6276 - protein, 6 aa, synthetic construct
PNEPGE

SEQ ID NO: 6277 - protein, 6 aa, synthetic construct
PNEPGF

SEQ ID NO: 6278 - protein, 6 aa, synthetic construct
PNEPGW

SEQ ID NO: 6279 - protein, 6 aa, synthetic construct
PNEPGY

SEQ ID NO: 6280 - protein, 6 aa, synthetic construct
PNEPHD

SEQ ID NO: 6281 - protein, 6 aa, synthetic construct
PNEPHE

SEQ ID NO: 6282 - protein, 6 aa, synthetic construct
PNEPHF

SEQ ID NO: 6283 - protein, 6 aa, synthetic construct
PNEPHW

SEQ ID NO: 6284 - protein, 6 aa, synthetic construct
PNEPHY

SEQ ID NO: 6285 - protein, 6 aa, synthetic construct
PNEPID

SEQ ID NO: 6286 - protein, 6 aa, synthetic construct
PNEPIE

SEQ ID NO: 6287 - protein, 6 aa, synthetic construct
PNEPIF

SEQ ID NO: 6288 - protein, 6 aa, synthetic construct
PNEPIW

SEQ ID NO: 6289 - protein, 6 aa, synthetic construct
PNEPIY

SEQ ID NO: 6290 - protein, 6 aa, synthetic construct
PNEPLD

SEQ ID NO: 6291 - protein, 6 aa, synthetic construct
PNEPLE

SEQ ID NO: 6292 - protein, 6 aa, synthetic construct
PNEPLF

SEQ ID NO: 6293 - protein, 6 aa, synthetic construct
PNEPLW

SEQ ID NO: 6294 - protein, 6 aa, synthetic construct
PNEPLY

SEQ ID NO: 6295 - protein, 6 aa, synthetic construct
PNEPKD

SEQ ID NO: 6296 - protein, 6 aa, synthetic construct
PNEPKE

SEQ ID NO: 6297 - protein, 6 aa, synthetic construct
PNEPKF

SEQ ID NO: 6298 - protein, 6 aa, synthetic construct
PNEPKW

SEQ ID NO: 6299 - protein, 6 aa, synthetic construct
PNEPKY

SEQ ID NO: 6300 - protein, 6 aa, synthetic construct
PNEPMD

SEQ ID NO: 6301 - protein, 6 aa, synthetic construct
PNEPME

SEQ ID NO: 6302 - protein, 6 aa, synthetic construct
PNEPMF

SEQ ID NO: 6303 - protein, 6 aa, synthetic construct
PNEPMW

SEQ ID NO: 6304 - protein, 6 aa, synthetic construct
PNEPMY

SEQ ID NO: 6305 - protein, 6 aa, synthetic construct
PNEPFD

SEQ ID NO: 6306 - protein, 6 aa, synthetic construct
PNEPFE

SEQ ID NO: 6307 - protein, 6 aa, synthetic construct
PNEPFF

SEQ ID NO: 6308 - protein, 6 aa, synthetic construct
PNEPFW

SEQ ID NO: 6309 - protein, 6 aa, synthetic construct
PNEPFY

SEQ ID NO: 6310 - protein, 6 aa, synthetic construct
PNEPPD

SEQ ID NO: 6311 - protein, 6 aa, synthetic construct
PNEPPE

SEQ ID NO: 6312 - protein, 6 aa, synthetic construct
PNEPPF

SEQ ID NO: 6313 - protein, 6 aa, synthetic construct
PNEPPW

SEQ ID NO: 6314 - protein, 6 aa, synthetic construct
PNEPPY

SEQ ID NO: 6315 - protein, 6 aa, synthetic construct
PNEPSD

SEQ ID NO: 6316 - protein, 6 aa, synthetic construct
PNEPSE

SEQ ID NO: 6317 - protein, 6 aa, synthetic construct
PNEPSF

SEQ ID NO: 6318 - protein, 6 aa, synthetic construct
PNEPSW

SEQ ID NO: 6319 - protein, 6 aa, synthetic construct
PNEPSY

SEQ ID NO: 6320 - protein, 6 aa, synthetic construct
PNEPTD

SEQ ID NO: 6321 - protein, 6 aa, synthetic construct
PNEPTE

SEQ ID NO: 6322 - protein, 6 aa, synthetic construct
PNEPTF

SEQ ID NO: 6323 - protein, 6 aa, synthetic construct
PNEPTW

SEQ ID NO: 6324 - protein, 6 aa, synthetic construct
PNEPTY

SEQ ID NO: 6325 - protein, 6 aa, synthetic construct
PNEPWD

SEQ ID NO: 6326 - protein, 6 aa, synthetic construct
PNEPWE

SEQ ID NO: 6327 - protein, 6 aa, synthetic construct
PNEPWF

SEQ ID NO: 6328 - protein, 6 aa, synthetic construct
PNEPWW

SEQ ID NO: 6329 - protein, 6 aa, synthetic construct
PNEPWY

SEQ ID NO: 6330 - protein, 6 aa, synthetic construct
PNEPYD

SEQ ID NO: 6331 - protein, 6 aa, synthetic construct
PNEPYE

SEQ ID NO: 6332 - protein, 6 aa, synthetic construct
PNEPYF

SEQ ID NO: 6333 - protein, 6 aa, synthetic construct
PNEPYW

SEQ ID NO: 6334 - protein, 6 aa, synthetic construct
PNEPYY

SEQ ID NO: 6335 - protein, 6 aa, synthetic construct
PNEPVD

SEQ ID NO: 6336 - protein, 6 aa, synthetic construct
PNEPVE

SEQ ID NO: 6337 - protein, 6 aa, synthetic construct
PNEPVF

SEQ ID NO: 6338 - protein, 6 aa, synthetic construct
PNEPVW

SEQ ID NO: 6339 - protein, 6 aa, synthetic construct
PNEPVY

SEQ ID NO: 6340 - protein, 6 aa, synthetic construct
PNESAD

SEQ ID NO: 6341 - protein, 6 aa, synthetic construct
PNESAE

SEQ ID NO: 6342 - protein, 6 aa, synthetic construct
PNESAF

SEQ ID NO: 6343 - protein, 6 aa, synthetic construct
PNESAW

SEQ ID NO: 6344 - protein, 6 aa, synthetic construct
PNESAY

SEQ ID NO: 6345 - protein, 6 aa, synthetic construct
PNESRD

SEQ ID NO: 6346 - protein, 6 aa, synthetic construct
PNESRE

SEQ ID NO: 6347 - protein, 6 aa, synthetic construct
PNESRF

SEQ ID NO: 6348 - protein, 6 aa, synthetic construct
PNESRW

SEQ ID NO: 6349 - protein, 6 aa, synthetic construct
PNESRY

SEQ ID NO: 6350 - protein, 6 aa, synthetic construct
PNESND

SEQ ID NO: 6351 - protein, 6 aa, synthetic construct
PNESNE

SEQ ID NO: 6352 - protein, 6 aa, synthetic construct
PNESNF

SEQ ID NO: 6353 - protein, 6 aa, synthetic construct
PNESNW

SEQ ID NO: 6354 - protein, 6 aa, synthetic construct
PNESNY

SEQ ID NO: 6355 - protein, 6 aa, synthetic construct
PNESDD

SEQ ID NO: 6356 - protein, 6 aa, synthetic construct
PNESDE

SEQ ID NO: 6357 - protein, 6 aa, synthetic construct
PNESDF

SEQ ID NO: 6358 - protein, 6 aa, synthetic construct
PNESDW

SEQ ID NO: 6359 - protein, 6 aa, synthetic construct
PNESDY

SEQ ID NO: 6360 - protein, 6 aa, synthetic construct
PNESCD

SEQ ID NO: 6361 - protein, 6 aa, synthetic construct
PNESCE

SEQ ID NO: 6362 - protein, 6 aa, synthetic construct
PNESCF

SEQ ID NO: 6363 - protein, 6 aa, synthetic construct
PNESCW

SEQ ID NO: 6364 - protein, 6 aa, synthetic construct
PNESCY

SEQ ID NO: 6365 - protein, 6 aa, synthetic construct
PNESQD

SEQ ID NO: 6366 - protein, 6 aa, synthetic construct
PNESQE

SEQ ID NO: 6367 - protein, 6 aa, synthetic construct
PNESQF

SEQ ID NO: 6368 - protein, 6 aa, synthetic construct
PNESQW

SEQ ID NO: 6369 - protein, 6 aa, synthetic construct
PNESQY

SEQ ID NO: 6370 - protein, 6 aa, synthetic construct
PNESED

SEQ ID NO: 6371 - protein, 6 aa, synthetic construct
PNESEE

SEQ ID NO: 6372 - protein, 6 aa, synthetic construct
PNESEF

SEQ ID NO: 6373 - protein, 6 aa, synthetic construct
PNESEW

SEQ ID NO: 6374 - protein, 6 aa, synthetic construct
PNESEY

SEQ ID NO: 6375 - protein, 6 aa, synthetic construct
PNESGD

SEQ ID NO: 6376 - protein, 6 aa, synthetic construct
PNESGE

SEQ ID NO: 6377 - protein, 6 aa, synthetic construct
PNESGF

SEQ ID NO: 6378 - protein, 6 aa, synthetic construct
PNESGW

SEQ ID NO: 6379 - protein, 6 aa, synthetic construct
PNESGY

SEQ ID NO: 6380 - protein, 6 aa, synthetic construct
PNESHD

SEQ ID NO: 6381 - protein, 6 aa, synthetic construct
PNESHE

SEQ ID NO: 6382 - protein, 6 aa, synthetic construct
PNESHF

SEQ ID NO: 6383 - protein, 6 aa, synthetic construct
PNESHW

SEQ ID NO: 6384 - protein, 6 aa, synthetic construct
PNESHY

SEQ ID NO: 6385 - protein, 6 aa, synthetic construct
PNESID

SEQ ID NO: 6386 - protein, 6 aa, synthetic construct
PNESIE

SEQ ID NO: 6387 - protein, 6 aa, synthetic construct
PNESIF

SEQ ID NO: 6388 - protein, 6 aa, synthetic construct
PNESIW

SEQ ID NO: 6389 - protein, 6 aa, synthetic construct
PNESIY

SEQ ID NO: 6390 - protein, 6 aa, synthetic construct
PNESLD

SEQ ID NO: 6391 - protein, 6 aa, synthetic construct
PNESLE

SEQ ID NO: 6392 - protein, 6 aa, synthetic construct
PNESLF

SEQ ID NO: 6393 - protein, 6 aa, synthetic construct
PNESLW

SEQ ID NO: 6394 - protein, 6 aa, synthetic construct
PNESLY

SEQ ID NO: 6395 - protein, 6 aa, synthetic construct
PNESKD

SEQ ID NO: 6396 - protein, 6 aa, synthetic construct
PNESKE

SEQ ID NO: 6397 - protein, 6 aa, synthetic construct
PNESKF

SEQ ID NO: 6398 - protein, 6 aa, synthetic construct
PNESKW

SEQ ID NO: 6399 - protein, 6 aa, synthetic construct
PNESKY

SEQ ID NO: 6400 - protein, 6 aa, synthetic construct
PNESMD

SEQ ID NO: 6401 - protein, 6 aa, synthetic construct
PNESME

SEQ ID NO: 6402 - protein, 6 aa, synthetic construct
PNESMF

SEQ ID NO: 6403 - protein, 6 aa, synthetic construct
PNESMW

SEQ ID NO: 6404 - protein, 6 aa, synthetic construct
PNESMY

SEQ ID NO: 6405 - protein, 6 aa, synthetic construct
PNESFD

SEQ ID NO: 6406 - protein, 6 aa, synthetic construct
PNESFE

SEQ ID NO: 6407 - protein, 6 aa, synthetic construct
PNESFF

SEQ ID NO: 6408 - protein, 6 aa, synthetic construct
PNESFW

SEQ ID NO: 6409 - protein, 6 aa, synthetic construct
PNESFY

SEQ ID NO: 6410 - protein, 6 aa, synthetic construct
PNESPD

SEQ ID NO: 6411 - protein, 6 aa, synthetic construct
PNESPE

SEQ ID NO: 6412 - protein, 6 aa, synthetic construct
PNESPF

SEQ ID NO: 6413 - protein, 6 aa, synthetic construct
PNESPW

SEQ ID NO: 6414 - protein, 6 aa, synthetic construct
PNESPY

SEQ ID NO: 6415 - protein, 6 aa, synthetic construct
PNESSD

SEQ ID NO: 6416 - protein, 6 aa, synthetic construct
PNESSE

SEQ ID NO: 6417 - protein, 6 aa, synthetic construct
PNESSF

SEQ ID NO: 6418 - protein, 6 aa, synthetic construct
PNESSW

SEQ ID NO: 6419 - protein, 6 aa, synthetic construct
PNESSY

SEQ ID NO: 6420 - protein, 6 aa, synthetic construct
PNESTD

SEQ ID NO: 6421 - protein, 6 aa, synthetic construct
PNESTE

SEQ ID NO: 6422 - protein, 6 aa, synthetic construct
PNESTF

SEQ ID NO: 6423 - protein, 6 aa, synthetic construct
PNESTW

SEQ ID NO: 6424 - protein, 6 aa, synthetic construct
PNESTY

SEQ ID NO: 6425 - protein, 6 aa, synthetic construct
PNESWD

SEQ ID NO: 6426 - protein, 6 aa, synthetic construct
PNESWE

SEQ ID NO: 6427 - protein, 6 aa, synthetic construct
PNESWF

SEQ ID NO: 6428 - protein, 6 aa, synthetic construct
PNESWW

SEQ ID NO: 6429 - protein, 6 aa, synthetic construct
PNESWY

SEQ ID NO: 6430 - protein, 6 aa, synthetic construct
PNESYD

SEQ ID NO: 6431 - protein, 6 aa, synthetic construct
PNESYE

SEQ ID NO: 6432 - protein, 6 aa, synthetic construct
PNESYF

SEQ ID NO: 6433 - protein, 6 aa, synthetic construct
PNESYW

SEQ ID NO: 6434 - protein, 6 aa, synthetic construct
PNESYY

SEQ ID NO: 6435 - protein, 6 aa, synthetic construct
PNESVD

SEQ ID NO: 6436 - protein, 6 aa, synthetic construct
PNESVE

SEQ ID NO: 6437 - protein, 6 aa, synthetic construct
PNESVF

SEQ ID NO: 6438 - protein, 6 aa, synthetic construct
PNESVW

SEQ ID NO: 6439 - protein, 6 aa, synthetic construct
PNESVY

SEQ ID NO: 6440 - protein, 6 aa, synthetic construct
PNETAD

SEQ ID NO: 6441 - protein, 6 aa, synthetic construct
PNETAE

SEQ ID NO: 6442 - protein, 6 aa, synthetic construct
PNETAF

SEQ ID NO: 6443 - protein, 6 aa, synthetic construct
PNETAW

SEQ ID NO: 6444 - protein, 6 aa, synthetic construct
PNETAY

SEQ ID NO: 6445 - protein, 6 aa, synthetic construct
PNETRD

SEQ ID NO: 6446 - protein, 6 aa, synthetic construct
PNETRE

SEQ ID NO: 6447 - protein, 6 aa, synthetic construct
PNETRF

SEQ ID NO: 6448 - protein, 6 aa, synthetic construct
PNETRW

SEQ ID NO: 6449 - protein, 6 aa, synthetic construct
PNETRY

SEQ ID NO: 6450 - protein, 6 aa, synthetic construct
PNETND

SEQ ID NO: 6451 - protein, 6 aa, synthetic construct
PNETNE

SEQ ID NO: 6452 - protein, 6 aa, synthetic construct
PNETNF

SEQ ID NO: 6453 - protein, 6 aa, synthetic construct
PNETNW

SEQ ID NO: 6454 - protein, 6 aa, synthetic construct
PNETNY

SEQ ID NO: 6455 - protein, 6 aa, synthetic construct
PNETDD

SEQ ID NO: 6456 - protein, 6 aa, synthetic construct
PNETDE

SEQ ID NO: 6457 - protein, 6 aa, synthetic construct
PNETDF

SEQ ID NO: 6458 - protein, 6 aa, synthetic construct
PNETDW

SEQ ID NO: 6459 - protein, 6 aa, synthetic construct
PNETDY

SEQ ID NO: 6460 - protein, 6 aa, synthetic construct
PNETCD

SEQ ID NO: 6461 - protein, 6 aa, synthetic construct
PNETCE

SEQ ID NO: 6462 - protein, 6 aa, synthetic construct
PNETCF

SEQ ID NO: 6463 - protein, 6 aa, synthetic construct
PNETCW

SEQ ID NO: 6464 - protein, 6 aa, synthetic construct
PNETCY

SEQ ID NO: 6465 - protein, 6 aa, synthetic construct
PNETQD

SEQ ID NO: 6466 - protein, 6 aa, synthetic construct
PNETQE

SEQ ID NO: 6467 - protein, 6 aa, synthetic construct
PNETQF

SEQ ID NO: 6468 - protein, 6 aa, synthetic construct
PNETQW

SEQ ID NO: 6469 - protein, 6 aa, synthetic construct
PNETQY

SEQ ID NO: 6470 - protein, 6 aa, synthetic construct
PNETED

SEQ ID NO: 6471 - protein, 6 aa, synthetic construct
PNETEE

SEQ ID NO: 6472 - protein, 6 aa, synthetic construct
PNETEF

SEQ ID NO: 6473 - protein, 6 aa, synthetic construct
PNETEW

SEQ ID NO: 6474 - protein, 6 aa, synthetic construct
PNETEY

SEQ ID NO: 6475 - protein, 6 aa, synthetic construct
PNETGD

SEQ ID NO: 6476 - protein, 6 aa, synthetic construct
PNETGE

SEQ ID NO: 6477 - protein, 6 aa, synthetic construct
PNETGF

SEQ ID NO: 6478 - protein, 6 aa, synthetic construct
PNETGW

SEQ ID NO: 6479 - protein, 6 aa, synthetic construct
PNETGY

SEQ ID NO: 6480 - protein, 6 aa, synthetic construct
PNETHD

SEQ ID NO: 6481 - protein, 6 aa, synthetic construct
PNETHE

SEQ ID NO: 6482 - protein, 6 aa, synthetic construct
PNETHF

SEQ ID NO: 6483 - protein, 6 aa, synthetic construct
PNETHW

SEQ ID NO: 6484 - protein, 6 aa, synthetic construct
PNETHY

SEQ ID NO: 6485 - protein, 6 aa, synthetic construct
PNETID

SEQ ID NO: 6486 - protein, 6 aa, synthetic construct
PNETIE

SEQ ID NO: 6487 - protein, 6 aa, synthetic construct
PNETIF

SEQ ID NO: 6488 - protein, 6 aa, synthetic construct
PNETIW

SEQ ID NO: 6489 - protein, 6 aa, synthetic construct
PNETIY

SEQ ID NO: 6490 - protein, 6 aa, synthetic construct
PNETLD

SEQ ID NO: 6491 - protein, 6 aa, synthetic construct
PNETLE

SEQ ID NO: 6492 - protein, 6 aa, synthetic construct
PNETLF

SEQ ID NO: 6493 - protein, 6 aa, synthetic construct
PNETLW

SEQ ID NO: 6494 - protein, 6 aa, synthetic construct
PNETLY

SEQ ID NO: 6495 - protein, 6 aa, synthetic construct
PNETKD

SEQ ID NO: 6496 - protein, 6 aa, synthetic construct
PNETKE

SEQ ID NO: 6497 - protein, 6 aa, synthetic construct
PNETKF

SEQ ID NO: 6498 - protein, 6 aa, synthetic construct
PNETKW

SEQ ID NO: 6499 - protein, 6 aa, synthetic construct
PNETKY

SEQ ID NO: 6500 - protein, 6 aa, synthetic construct
PNETMD

SEQ ID NO: 6501 - protein, 6 aa, synthetic construct
PNETME

SEQ ID NO: 6502 - protein, 6 aa, synthetic construct
PNETMF

SEQ ID NO: 6503 - protein, 6 aa, synthetic construct
PNETMW

SEQ ID NO: 6504 - protein, 6 aa, synthetic construct
PNETMY

SEQ ID NO: 6505 - protein, 6 aa, synthetic construct
PNETFD

SEQ ID NO: 6506 - protein, 6 aa, synthetic construct
PNETFE

SEQ ID NO: 6507 - protein, 6 aa, synthetic construct
PNETFF

SEQ ID NO: 6508 - protein, 6 aa, synthetic construct
PNETFW

SEQ ID NO: 6509 - protein, 6 aa, synthetic construct
PNETFY

SEQ ID NO: 6510 - protein, 6 aa, synthetic construct
PNETPD

SEQ ID NO: 6511 - protein, 6 aa, synthetic construct
PNETPE

SEQ ID NO: 6512 - protein, 6 aa, synthetic construct
PNETPF

SEQ ID NO: 6513 - protein, 6 aa, synthetic construct
PNETPW

SEQ ID NO: 6514 - protein, 6 aa, synthetic construct
PNETPY

SEQ ID NO: 6515 - protein, 6 aa, synthetic construct
PNETSD

SEQ ID NO: 6516 - protein, 6 aa, synthetic construct
PNETSE

SEQ ID NO: 6517 - protein, 6 aa, synthetic construct
PNETSF

SEQ ID NO: 6518 - protein, 6 aa, synthetic construct
PNETSW

SEQ ID NO: 6519 - protein, 6 aa, synthetic construct
PNETSY

SEQ ID NO: 6520 - protein, 6 aa, synthetic construct
PNETTD

SEQ ID NO: 6521 - protein, 6 aa, synthetic construct
PNETTE

SEQ ID NO: 6522 - protein, 6 aa, synthetic construct
PNETTF

SEQ ID NO: 6523 - protein, 6 aa, synthetic construct
PNETTW

SEQ ID NO: 6524 - protein, 6 aa, synthetic construct
PNETTY

SEQ ID NO: 6525 - protein, 6 aa, synthetic construct
PNETWD

SEQ ID NO: 6526 - protein, 6 aa, synthetic construct
PNETWE

SEQ ID NO: 6527 - protein, 6 aa, synthetic construct
PNETWF

SEQ ID NO: 6528 - protein, 6 aa, synthetic construct
PNETWW

SEQ ID NO: 6529 - protein, 6 aa, synthetic construct
PNETWY

SEQ ID NO: 6530 - protein, 6 aa, synthetic construct
PNETYD

SEQ ID NO: 6531 - protein, 6 aa, synthetic construct
PNETYE

SEQ ID NO: 6532 - protein, 6 aa, synthetic construct
PNETYF

SEQ ID NO: 6533 - protein, 6 aa, synthetic construct
PNETYW

SEQ ID NO: 6534 - protein, 6 aa, synthetic construct
PNETYY

SEQ ID NO: 6535 - protein, 6 aa, synthetic construct
PNETVD

SEQ ID NO: 6536 - protein, 6 aa, synthetic construct
PNETVE

SEQ ID NO: 6537 - protein, 6 aa, synthetic construct
PNETVF

SEQ ID NO: 6538 - protein, 6 aa, synthetic construct
PNETVW

SEQ ID NO: 6539 - protein, 6 aa, synthetic construct
PNETVY

SEQ ID NO: 6540 - protein, 6 aa, synthetic construct
PNEWAD

SEQ ID NO: 6541 - protein, 6 aa, synthetic construct
PNEWAE

SEQ ID NO: 6542 - protein, 6 aa, synthetic construct
PNEWAF

SEQ ID NO: 6543 - protein, 6 aa, synthetic construct
PNEWAW

SEQ ID NO: 6544 - protein, 6 aa, synthetic construct
PNEWAY

SEQ ID NO: 6545 - protein, 6 aa, synthetic construct
PNEWRD

SEQ ID NO: 6546 - protein, 6 aa, synthetic construct
PNEWRE

SEQ ID NO: 6547 - protein, 6 aa, synthetic construct
PNEWRF

SEQ ID NO: 6548 - protein, 6 aa, synthetic construct
PNEWRW

SEQ ID NO: 6549 - protein, 6 aa, synthetic construct
PNEWRY

SEQ ID NO: 6550 - protein, 6 aa, synthetic construct
PNEWND

SEQ ID NO: 6551 - protein, 6 aa, synthetic construct
PNEWNE

SEQ ID NO: 6552 - protein, 6 aa, synthetic construct
PNEWNF

SEQ ID NO: 6553 - protein, 6 aa, synthetic construct
PNEWNW

SEQ ID NO: 6554 - protein, 6 aa, synthetic construct
PNEWNY

SEQ ID NO: 6555 - protein, 6 aa, synthetic construct
PNEWDD

SEQ ID NO: 6556 - protein, 6 aa, synthetic construct
PNEWDE

SEQ ID NO: 6557 - protein, 6 aa, synthetic construct
PNEWDF

SEQ ID NO: 6558 - protein, 6 aa, synthetic construct
PNEWDW

SEQ ID NO: 6559 - protein, 6 aa, synthetic construct
PNEWDY

SEQ ID NO: 6560 - protein, 6 aa, synthetic construct
PNEWCD

SEQ ID NO: 6561 - protein, 6 aa, synthetic construct
PNEWCE

SEQ ID NO: 6562 - protein, 6 aa, synthetic construct
PNEWCF

SEQ ID NO: 6563 - protein, 6 aa, synthetic construct
PNEWCW

SEQ ID NO: 6564 - protein, 6 aa, synthetic construct
PNEWCY

SEQ ID NO: 6565 - protein, 6 aa, synthetic construct
PNEWQD

SEQ ID NO: 6566 - protein, 6 aa, synthetic construct
PNEWQE

SEQ ID NO: 6567 - protein, 6 aa, synthetic construct
PNEWQF

SEQ ID NO: 6568 - protein, 6 aa, synthetic construct
PNEWQW

SEQ ID NO: 6569 - protein, 6 aa, synthetic construct
PNEWQY

SEQ ID NO: 6570 - protein, 6 aa, synthetic construct
PNEWED

SEQ ID NO: 6571 - protein, 6 aa, synthetic construct
PNEWEE

SEQ ID NO: 6572 - protein, 6 aa, synthetic construct
PNEWEF

SEQ ID NO: 6573 - protein, 6 aa, synthetic construct
PNEWEW

SEQ ID NO: 6574 - protein, 6 aa, synthetic construct
PNEWEY

SEQ ID NO: 6575 - protein, 6 aa, synthetic construct
PNEWGD

SEQ ID NO: 6576 - protein, 6 aa, synthetic construct
PNEWGE

SEQ ID NO: 6577 - protein, 6 aa, synthetic construct
PNEWGF

SEQ ID NO: 6578 - protein, 6 aa, synthetic construct
PNEWGW

SEQ ID NO: 6579 - protein, 6 aa, synthetic construct
PNEWGY

SEQ ID NO: 6580 - protein, 6 aa, synthetic construct
PNEWHD

SEQ ID NO: 6581 - protein, 6 aa, synthetic construct
PNEWHE

SEQ ID NO: 6582 - protein, 6 aa, synthetic construct
PNEWHF

SEQ ID NO: 6583 - protein, 6 aa, synthetic construct
PNEWHW

SEQ ID NO: 6584 - protein, 6 aa, synthetic construct
PNEWHY

SEQ ID NO: 6585 - protein, 6 aa, synthetic construct
PNEWID

SEQ ID NO: 6586 - protein, 6 aa, synthetic construct
PNEWIE

SEQ ID NO: 6587 - protein, 6 aa, synthetic construct
PNEWIF

SEQ ID NO: 6588 - protein, 6 aa, synthetic construct
PNEWIW

SEQ ID NO: 6589 - protein, 6 aa, synthetic construct
PNEWIY

SEQ ID NO: 6590 - protein, 6 aa, synthetic construct
PNEWLD

SEQ ID NO: 6591 - protein, 6 aa, synthetic construct
PNEWLE

SEQ ID NO: 6592 - protein, 6 aa, synthetic construct
PNEWLF

SEQ ID NO: 6593 - protein, 6 aa, synthetic construct
PNEWLW

SEQ ID NO: 6594 - protein, 6 aa, synthetic construct
PNEWLY

SEQ ID NO: 6595 - protein, 6 aa, synthetic construct
PNEWKD

SEQ ID NO: 6596 - protein, 6 aa, synthetic construct
PNEWKE

SEQ ID NO: 6597 - protein, 6 aa, synthetic construct
PNEWKF

SEQ ID NO: 6598 - protein, 6 aa, synthetic construct
PNEWKW

SEQ ID NO: 6599 - protein, 6 aa, synthetic construct
PNEWKY

SEQ ID NO: 6600 - protein, 6 aa, synthetic construct
PNEWMD

SEQ ID NO: 6601 - protein, 6 aa, synthetic construct
PNEWME

SEQ ID NO: 6602 - protein, 6 aa, synthetic construct
PNEWMF

SEQ ID NO: 6603 - protein, 6 aa, synthetic construct
PNEWMW

SEQ ID NO: 6604 - protein, 6 aa, synthetic construct
PNEWMY

SEQ ID NO: 6605 - protein, 6 aa, synthetic construct
PNEWFD

SEQ ID NO: 6606 - protein, 6 aa, synthetic construct
PNEWFE

SEQ ID NO: 6607 - protein, 6 aa, synthetic construct
PNEWFF

SEQ ID NO: 6608 - protein, 6 aa, synthetic construct
PNEWFW

SEQ ID NO: 6609 - protein, 6 aa, synthetic construct
PNEWFY

SEQ ID NO: 6610 - protein, 6 aa, synthetic construct
PNEWPD

SEQ ID NO: 6611 - protein, 6 aa, synthetic construct
PNEWPE

SEQ ID NO: 6612 - protein, 6 aa, synthetic construct
PNEWPF

SEQ ID NO: 6613 - protein, 6 aa, synthetic construct
PNEWPW

SEQ ID NO: 6614 - protein, 6 aa, synthetic construct
PNEWPY

SEQ ID NO: 6615 - protein, 6 aa, synthetic construct
PNEWSD

SEQ ID NO: 6616 - protein, 6 aa, synthetic construct
PNEWSE

SEQ ID NO: 6617 - protein, 6 aa, synthetic construct
PNEWSF

SEQ ID NO: 6618 - protein, 6 aa, synthetic construct
PNEWSW

SEQ ID NO: 6619 - protein, 6 aa, synthetic construct
PNEWSY

SEQ ID NO: 6620 - protein, 6 aa, synthetic construct
PNEWTD

SEQ ID NO: 6621 - protein, 6 aa, synthetic construct
PNEWTE

SEQ ID NO: 6622 - protein, 6 aa, synthetic construct
PNEWTF

SEQ ID NO: 6623 - protein, 6 aa, synthetic construct
PNEWTW

SEQ ID NO: 6624 - protein, 6 aa, synthetic construct
PNEWTY

SEQ ID NO: 6625 - protein, 6 aa, synthetic construct
PNEWWD

SEQ ID NO: 6626 - protein, 6 aa, synthetic construct
PNEWWE

SEQ ID NO: 6627 - protein, 6 aa, synthetic construct
PNEWWF

SEQ ID NO: 6628 - protein, 6 aa, synthetic construct
PNEWWW

SEQ ID NO: 6629 - protein, 6 aa, synthetic construct
PNEWWY

SEQ ID NO: 6630 - protein, 6 aa, synthetic construct
PNEWYD

SEQ ID NO: 6631 - protein, 6 aa, synthetic construct
PNEWYE

SEQ ID NO: 6632 - protein, 6 aa, synthetic construct
PNEWYF

SEQ ID NO: 6633 - protein, 6 aa, synthetic construct
PNEWYW

SEQ ID NO: 6634 - protein, 6 aa, synthetic construct
PNEWYY

SEQ ID NO: 6635 - protein, 6 aa, synthetic construct
PNEWVD

SEQ ID NO: 6636 - protein, 6 aa, synthetic construct
PNEWVE

SEQ ID NO: 6637 - protein, 6 aa, synthetic construct
PNEWVF

SEQ ID NO: 6638 - protein, 6 aa, synthetic construct
PNEWVW

SEQ ID NO: 6639 - protein, 6 aa, synthetic construct
PNEWVY

SEQ ID NO: 6640 - protein, 6 aa, synthetic construct
PNEYAD

SEQ ID NO: 6641 - protein, 6 aa, synthetic construct
PNEYAE

SEQ ID NO: 6642 - protein, 6 aa, synthetic construct
PNEYAF

SEQ ID NO: 6643 - protein, 6 aa, synthetic construct
PNEYAW

SEQ ID NO: 6644 - protein, 6 aa, synthetic construct
PNEYAY

SEQ ID NO: 6645 - protein, 6 aa, synthetic construct
PNEYRD

SEQ ID NO: 6646 - protein, 6 aa, synthetic construct
PNEYRE

SEQ ID NO: 6647 - protein, 6 aa, synthetic construct
PNEYRF

SEQ ID NO: 6648 - protein, 6 aa, synthetic construct
PNEYRW

SEQ ID NO: 6649 - protein, 6 aa, synthetic construct
PNEYRY

SEQ ID NO: 6650 - protein, 6 aa, synthetic construct
PNEYND

SEQ ID NO: 6651 - protein, 6 aa, synthetic construct
PNEYNE

SEQ ID NO: 6652 - protein, 6 aa, synthetic construct
PNEYNF

SEQ ID NO: 6653 - protein, 6 aa, synthetic construct
PNEYNW

SEQ ID NO: 6654 - protein, 6 aa, synthetic construct
PNEYNY

SEQ ID NO: 6655 - protein, 6 aa, synthetic construct
PNEYDD

SEQ ID NO: 6656 - protein, 6 aa, synthetic construct
PNEYDE

SEQ ID NO: 6657 - protein, 6 aa, synthetic construct
PNEYDF

SEQ ID NO: 6658 - protein, 6 aa, synthetic construct
PNEYDW

SEQ ID NO: 6659 - protein, 6 aa, synthetic construct
PNEYDY

SEQ ID NO: 6660 - protein, 6 aa, synthetic construct
PNEYCD

SEQ ID NO: 6661 - protein, 6 aa, synthetic construct
PNEYCE

SEQ ID NO: 6662 - protein, 6 aa, synthetic construct
PNEYCF

SEQ ID NO: 6663 - protein, 6 aa, synthetic construct
PNEYCW

SEQ ID NO: 6664 - protein, 6 aa, synthetic construct
PNEYCY

SEQ ID NO: 6665 - protein, 6 aa, synthetic construct
PNEYQD

SEQ ID NO: 6666 - protein, 6 aa, synthetic construct
PNEYQE

SEQ ID NO: 6667 - protein, 6 aa, synthetic construct
PNEYQF

SEQ ID NO: 6668 - protein, 6 aa, synthetic construct
PNEYQW

SEQ ID NO: 6669 - protein, 6 aa, synthetic construct
PNEYQY

SEQ ID NO: 6670 - protein, 6 aa, synthetic construct
PNEYED

SEQ ID NO: 6671 - protein, 6 aa, synthetic construct
PNEYEE

SEQ ID NO: 6672 - protein, 6 aa, synthetic construct
PNEYEF

SEQ ID NO: 6673 - protein, 6 aa, synthetic construct
PNEYEW

SEQ ID NO: 6674 - protein, 6 aa, synthetic construct
PNEYEY

SEQ ID NO: 6675 - protein, 6 aa, synthetic construct
PNEYGD

SEQ ID NO: 6676 - protein, 6 aa, synthetic construct
PNEYGE

SEQ ID NO: 6677 - protein, 6 aa, synthetic construct
PNEYGF

SEQ ID NO: 6678 - protein, 6 aa, synthetic construct
PNEYGW

SEQ ID NO: 6679 - protein, 6 aa, synthetic construct
PNEYGY

SEQ ID NO: 6680 - protein, 6 aa, synthetic construct
PNEYHD

SEQ ID NO: 6681 - protein, 6 aa, synthetic construct
PNEYHE

SEQ ID NO: 6682 - protein, 6 aa, synthetic construct
PNEYHF

SEQ ID NO: 6683 - protein, 6 aa, synthetic construct
PNEYHW

SEQ ID NO: 6684 - protein, 6 aa, synthetic construct
PNEYHY

SEQ ID NO: 6685 - protein, 6 aa, synthetic construct
PNEYID

SEQ ID NO: 6686 - protein, 6 aa, synthetic construct
PNEYIE

SEQ ID NO: 6687 - protein, 6 aa, synthetic construct
PNEYIF

SEQ ID NO: 6688 - protein, 6 aa, synthetic construct
PNEYIW

SEQ ID NO: 6689 - protein, 6 aa, synthetic construct
PNEYIY

SEQ ID NO: 6690 - protein, 6 aa, synthetic construct
PNEYLD

SEQ ID NO: 6691 - protein, 6 aa, synthetic construct
PNEYLE

SEQ ID NO: 6692 - protein, 6 aa, synthetic construct
PNEYLF

SEQ ID NO: 6693 - protein, 6 aa, synthetic construct
PNEYLW

SEQ ID NO: 6694 - protein, 6 aa, synthetic construct
PNEYLY

SEQ ID NO: 6695 - protein, 6 aa, synthetic construct
PNEYKD

SEQ ID NO: 6696 - protein, 6 aa, synthetic construct
PNEYKE

SEQ ID NO: 6697 - protein, 6 aa, synthetic construct
PNEYKF

SEQ ID NO: 6698 - protein, 6 aa, synthetic construct
PNEYKW

SEQ ID NO: 6699 - protein, 6 aa, synthetic construct
PNEYKY

SEQ ID NO: 6700 - protein, 6 aa, synthetic construct
PNEYMD

SEQ ID NO: 6701 - protein, 6 aa, synthetic construct
PNEYME

SEQ ID NO: 6702 - protein, 6 aa, synthetic construct
PNEYMF

SEQ ID NO: 6703 - protein, 6 aa, synthetic construct
PNEYMW

SEQ ID NO: 6704 - protein, 6 aa, synthetic construct
PNEYMY

SEQ ID NO: 6705 - protein, 6 aa, synthetic construct
PNEYFD

SEQ ID NO: 6706 - protein, 6 aa, synthetic construct
PNEYFE

SEQ ID NO: 6707 - protein, 6 aa, synthetic construct
PNEYFF

SEQ ID NO: 6708 - protein, 6 aa, synthetic construct
PNEYFW

SEQ ID NO: 6709 - protein, 6 aa, synthetic construct
PNEYFY

SEQ ID NO: 6710 - protein, 6 aa, synthetic construct
PNEYPD

SEQ ID NO: 6711 - protein, 6 aa, synthetic construct
PNEYPE

SEQ ID NO: 6712 - protein, 6 aa, synthetic construct
PNEYPF

SEQ ID NO: 6713 - protein, 6 aa, synthetic construct
PNEYPW

SEQ ID NO: 6714 - protein, 6 aa, synthetic construct
PNEYPY

SEQ ID NO: 6715 - protein, 6 aa, synthetic construct
PNEYSD

SEQ ID NO: 6716 - protein, 6 aa, synthetic construct
PNEYSE

SEQ ID NO: 6717 - protein, 6 aa, synthetic construct
PNEYSF

SEQ ID NO: 6718 - protein, 6 aa, synthetic construct
PNEYSW

SEQ ID NO: 6719 - protein, 6 aa, synthetic construct
PNEYSY

SEQ ID NO: 6720 - protein, 6 aa, synthetic construct
PNEYTD

SEQ ID NO: 6721 - protein, 6 aa, synthetic construct
PNEYTE

SEQ ID NO: 6722 - protein, 6 aa, synthetic construct
PNEYTF

SEQ ID NO: 6723 - protein, 6 aa, synthetic construct
PNEYTW

SEQ ID NO: 6724 - protein, 6 aa, synthetic construct
PNEYTY

SEQ ID NO: 6725 - protein, 6 aa, synthetic construct
PNEYWD

SEQ ID NO: 6726 - protein, 6 aa, synthetic construct
PNEYWE

SEQ ID NO: 6727 - protein, 6 aa, synthetic construct
PNEYWF

SEQ ID NO: 6728 - protein, 6 aa, synthetic construct
PNEYWW

SEQ ID NO: 6729 - protein, 6 aa, synthetic construct
PNEYWY

SEQ ID NO: 6730 - protein, 6 aa, synthetic construct
PNEYYD

SEQ ID NO: 6731 - protein, 6 aa, synthetic construct
PNEYYE

SEQ ID NO: 6732 - protein, 6 aa, synthetic construct
PNEYYF

SEQ ID NO: 6733 - protein, 6 aa, synthetic construct
PNEYYW

SEQ ID NO: 6734 - protein, 6 aa, synthetic construct
PNEYYY

SEQ ID NO: 6735 - protein, 6 aa, synthetic construct
PNEYVD

SEQ ID NO: 6736 - protein, 6 aa, synthetic construct
PNEYVE

SEQ ID NO: 6737 - protein, 6 aa, synthetic construct
PNEYVF

SEQ ID NO: 6738 - protein, 6 aa, synthetic construct
PNEYVW

SEQ ID NO: 6739 - protein, 6 aa, synthetic construct
PNEYVY

SEQ ID NO: 6740 - protein, 6 aa, synthetic construct
PNEVAD

SEQ ID NO: 6741 - protein, 6 aa, synthetic construct
PNEVAE

SEQ ID NO: 6742 - protein, 6 aa, synthetic construct
PNEVAF

SEQ ID NO: 6743 - protein, 6 aa, synthetic construct
PNEVAW

SEQ ID NO: 6744 - protein, 6 aa, synthetic construct
PNEVAY

SEQ ID NO: 6745 - protein, 6 aa, synthetic construct
PNEVRD

SEQ ID NO: 6746 - protein, 6 aa, synthetic construct
PNEVRE

SEQ ID NO: 6747 - protein, 6 aa, synthetic construct
PNEVRF

SEQ ID NO: 6748 - protein, 6 aa, synthetic construct
PNEVRW

SEQ ID NO: 6749 - protein, 6 aa, synthetic construct
PNEVRY

SEQ ID NO: 6750 - protein, 6 aa, synthetic construct
PNEVND

SEQ ID NO: 6751 - protein, 6 aa, synthetic construct
PNEVNE

SEQ ID NO: 6752 - protein, 6 aa, synthetic construct
PNEVNF

SEQ ID NO: 6753 - protein, 6 aa, synthetic construct
PNEVNW

SEQ ID NO: 6754 - protein, 6 aa, synthetic construct
PNEVNY

SEQ ID NO: 6755 - protein, 6 aa, synthetic construct
PNEVDD

SEQ ID NO: 6756 - protein, 6 aa, synthetic construct
PNEVDE

SEQ ID NO: 6757 - protein, 6 aa, synthetic construct
PNEVDF

SEQ ID NO: 6758 - protein, 6 aa, synthetic construct
PNEVDW

SEQ ID NO: 6759 - protein, 6 aa, synthetic construct
PNEVDY

SEQ ID NO: 6760 - protein, 6 aa, synthetic construct
PNEVCD

SEQ ID NO: 6761 - protein, 6 aa, synthetic construct
PNEVCE

SEQ ID NO: 6762 - protein, 6 aa, synthetic construct
PNEVCF

SEQ ID NO: 6763 - protein, 6 aa, synthetic construct
PNEVCW

SEQ ID NO: 6764 - protein, 6 aa, synthetic construct
PNEVCY

SEQ ID NO: 6765 - protein, 6 aa, synthetic construct
PNEVQD

SEQ ID NO: 6766 - protein, 6 aa, synthetic construct
PNEVQE

SEQ ID NO: 6767 - protein, 6 aa, synthetic construct
PNEVQF

SEQ ID NO: 6768 - protein, 6 aa, synthetic construct
PNEVQW

SEQ ID NO: 6769 - protein, 6 aa, synthetic construct
PNEVQY

SEQ ID NO: 6770 - protein, 6 aa, synthetic construct
PNEVED

SEQ ID NO: 6771 - protein, 6 aa, synthetic construct
PNEVEE

SEQ ID NO: 6772 - protein, 6 aa, synthetic construct
PNEVEF

SEQ ID NO: 6773 - protein, 6 aa, synthetic construct
PNEVEW

SEQ ID NO: 6774 - protein, 6 aa, synthetic construct
PNEVEY

SEQ ID NO: 6775 - protein, 6 aa, synthetic construct
PNEVGD

SEQ ID NO: 6776 - protein, 6 aa, synthetic construct
PNEVGE

SEQ ID NO: 6777 - protein, 6 aa, synthetic construct
PNEVGF

SEQ ID NO: 6778 - protein, 6 aa, synthetic construct
PNEVGW

SEQ ID NO: 6779 - protein, 6 aa, synthetic construct
PNEVGY

SEQ ID NO: 6780 - protein, 6 aa, synthetic construct
PNEVHD

SEQ ID NO: 6781 - protein, 6 aa, synthetic construct
PNEVHE

SEQ ID NO: 6782 - protein, 6 aa, synthetic construct
PNEVHF

SEQ ID NO: 6783 - protein, 6 aa, synthetic construct
PNEVHW

SEQ ID NO: 6784 - protein, 6 aa, synthetic construct
PNEVHY

SEQ ID NO: 6785 - protein, 6 aa, synthetic construct
PNEVID

SEQ ID NO: 6786 - protein, 6 aa, synthetic construct
PNEVIE

SEQ ID NO: 6787 - protein, 6 aa, synthetic construct
PNEVIF

SEQ ID NO: 6788 - protein, 6 aa, synthetic construct
PNEVIW

SEQ ID NO: 6789 - protein, 6 aa, synthetic construct
PNEVIY

SEQ ID NO: 6790 - protein, 6 aa, synthetic construct
PNEVLD

SEQ ID NO: 6791 - protein, 6 aa, synthetic construct
PNEVLE

SEQ ID NO: 6792 - protein, 6 aa, synthetic construct
PNEVLF

SEQ ID NO: 6793 - protein, 6 aa, synthetic construct
PNEVLW

SEQ ID NO: 6794 - protein, 6 aa, synthetic construct
PNEVLY

SEQ ID NO: 6795 - protein, 6 aa, synthetic construct
PNEVKD

SEQ ID NO: 6796 - protein, 6 aa, synthetic construct
PNEVKE

SEQ ID NO: 6797 - protein, 6 aa, synthetic construct
PNEVKF

SEQ ID NO: 6798 - protein, 6 aa, synthetic construct
PNEVKW

SEQ ID NO: 6799 - protein, 6 aa, synthetic construct
PNEVKY

SEQ ID NO: 6800 - protein, 6 aa, synthetic construct
PNEVMD

SEQ ID NO: 6801 - protein, 6 aa, synthetic construct
PNEVME

SEQ ID NO: 6802 - protein, 6 aa, synthetic construct
PNEVMF

SEQ ID NO: 6803 - protein, 6 aa, synthetic construct
PNEVMW

SEQ ID NO: 6804 - protein, 6 aa, synthetic construct
PNEVMY

SEQ ID NO: 6805 - protein, 6 aa, synthetic construct
PNEVFD

SEQ ID NO: 6806 - protein, 6 aa, synthetic construct
PNEVFE

SEQ ID NO: 6807 - protein, 6 aa, synthetic construct
PNEVFF

SEQ ID NO: 6808 - protein, 6 aa, synthetic construct
PNEVFW

SEQ ID NO: 6809 - protein, 6 aa, synthetic construct
PNEVFY

SEQ ID NO: 6810 - protein, 6 aa, synthetic construct
PNEVPD

SEQ ID NO: 6811 - protein, 6 aa, synthetic construct
PNEVPE

SEQ ID NO: 6812 - protein, 6 aa, synthetic construct
PNEVPF

SEQ ID NO: 6813 - protein, 6 aa, synthetic construct
PNEVPW

SEQ ID NO: 6814 - protein, 6 aa, synthetic construct
PNEVPY

SEQ ID NO: 6815 - protein, 6 aa, synthetic construct
PNEVSD

SEQ ID NO: 6816 - protein, 6 aa, synthetic construct
PNEVSE

SEQ ID NO: 6817 - protein, 6 aa, synthetic construct
PNEVSF

SEQ ID NO: 6818 - protein, 6 aa, synthetic construct
PNEVSW

SEQ ID NO: 6819 - protein, 6 aa, synthetic construct
PNEVSY

SEQ ID NO: 6820 - protein, 6 aa, synthetic construct
PNEVTD

SEQ ID NO: 6821 - protein, 6 aa, synthetic construct
PNEVTE

SEQ ID NO: 6822 - protein, 6 aa, synthetic construct
PNEVTF

SEQ ID NO: 6823 - protein, 6 aa, synthetic construct
PNEVTW

SEQ ID NO: 6824 - protein, 6 aa, synthetic construct
PNEVTY

SEQ ID NO: 6825 - protein, 6 aa, synthetic construct
PNEVWD

SEQ ID NO: 6826 - protein, 6 aa, synthetic construct
PNEVWE

SEQ ID NO: 6827 - protein, 6 aa, synthetic construct
PNEVWF

SEQ ID NO: 6828 - protein, 6 aa, synthetic construct
PNEVWW

SEQ ID NO: 6829 - protein, 6 aa, synthetic construct
PNEVWY

SEQ ID NO: 6830 - protein, 6 aa, synthetic construct
PNEVYD

SEQ ID NO: 6831 - protein, 6 aa, synthetic construct
PNEVYE

SEQ ID NO: 6832 - protein, 6 aa, synthetic construct
PNEVYF

SEQ ID NO: 6833 - protein, 6 aa, synthetic construct
PNEVYW

SEQ ID NO: 6834 - protein, 6 aa, synthetic construct
PNEVYY

SEQ ID NO: 6835 - protein, 6 aa, synthetic construct
PNEVVD

SEQ ID NO: 6836 - protein, 6 aa, synthetic construct
PNEVVE

SEQ ID NO: 6837 - protein, 6 aa, synthetic construct
PNEVVF

SEQ ID NO: 6838 - protein, 6 aa, synthetic construct
PNEVVW

SEQ ID NO: 6839 - protein, 6 aa, synthetic construct
PNEVVY

SEQ ID NO: 6840 - protein, 6 aa, synthetic construct
PDEAAD

SEQ ID NO: 6841 - protein, 6 aa, synthetic construct
PDEAAE

SEQ ID NO: 6842 - protein, 6 aa, synthetic construct
PDEAAF

SEQ ID NO: 6843 - protein, 6 aa, synthetic construct
PDEAAW

SEQ ID NO: 6844 - protein, 6 aa, synthetic construct
PDEAAY

SEQ ID NO: 6845 - protein, 6 aa, synthetic construct
PDEARD

SEQ ID NO: 6846 - protein, 6 aa, synthetic construct
PDEARE

SEQ ID NO: 6847 - protein, 6 aa, synthetic construct
PDEARF

SEQ ID NO: 6848 - protein, 6 aa, synthetic construct
PDEARW

SEQ ID NO: 6849 - protein, 6 aa, synthetic construct
PDEARY

SEQ ID NO: 6850 - protein, 6 aa, synthetic construct
PDEAND

SEQ ID NO: 6851 - protein, 6 aa, synthetic construct
PDEANE

SEQ ID NO: 6852 - protein, 6 aa, synthetic construct
PDEANF

SEQ ID NO: 6853 - protein, 6 aa, synthetic construct
PDEANW

SEQ ID NO: 6854 - protein, 6 aa, synthetic construct
PDEANY

SEQ ID NO: 6855 - protein, 6 aa, synthetic construct
PDEADD

SEQ ID NO: 6856 - protein, 6 aa, synthetic construct
PDEADE

SEQ ID NO: 6857 - protein, 6 aa, synthetic construct
PDEADF

SEQ ID NO: 6858 - protein, 6 aa, synthetic construct
PDEADW

SEQ ID NO: 6859 - protein, 6 aa, synthetic construct
PDEADY

SEQ ID NO: 6860 - protein, 6 aa, synthetic construct
PDEACD

SEQ ID NO: 6861 - protein, 6 aa, synthetic construct
PDEACE

SEQ ID NO: 6862 - protein, 6 aa, synthetic construct
PDEACF

SEQ ID NO: 6863 - protein, 6 aa, synthetic construct
PDEACW

SEQ ID NO: 6864 - protein, 6 aa, synthetic construct
PDEACY

SEQ ID NO: 6865 - protein, 6 aa, synthetic construct
PDEAQD

SEQ ID NO: 6866 - protein, 6 aa, synthetic construct
PDEAQE

SEQ ID NO: 6867 - protein, 6 aa, synthetic construct
PDEAQF

SEQ ID NO: 6868 - protein, 6 aa, synthetic construct
PDEAQW

SEQ ID NO: 6869 - protein, 6 aa, synthetic construct
PDEAQY

SEQ ID NO: 6870 - protein, 6 aa, synthetic construct
PDEAED

SEQ ID NO: 6871 - protein, 6 aa, synthetic construct
PDEAEE

SEQ ID NO: 6872 - protein, 6 aa, synthetic construct
PDEAEF

SEQ ID NO: 6873 - protein, 6 aa, synthetic construct
PDEAEW

SEQ ID NO: 6874 - protein, 6 aa, synthetic construct
PDEAEY

SEQ ID NO: 6875 - protein, 6 aa, synthetic construct
PDEAGD

SEQ ID NO: 6876 - protein, 6 aa, synthetic construct
PDEAGE

SEQ ID NO: 6877 - protein, 6 aa, synthetic construct
PDEAGF

SEQ ID NO: 6878 - protein, 6 aa, synthetic construct
PDEAGW

SEQ ID NO: 6879 - protein, 6 aa, synthetic construct
PDEAGY

SEQ ID NO: 6880 - protein, 6 aa, synthetic construct
PDEAHD

SEQ ID NO: 6881 - protein, 6 aa, synthetic construct
PDEAHE

SEQ ID NO: 6882 - protein, 6 aa, synthetic construct
PDEAHF

SEQ ID NO: 6883 - protein, 6 aa, synthetic construct
PDEAHW

SEQ ID NO: 6884 - protein, 6 aa, synthetic construct
PDEAHY

SEQ ID NO: 6885 - protein, 6 aa, synthetic construct
PDEAID

SEQ ID NO: 6886 - protein, 6 aa, synthetic construct
PDEAIE

SEQ ID NO: 6887 - protein, 6 aa, synthetic construct
PDEAIF

SEQ ID NO: 6888 - protein, 6 aa, synthetic construct
PDEAIW

SEQ ID NO: 6889 - protein, 6 aa, synthetic construct
PDEAIY

SEQ ID NO: 6890 - protein, 6 aa, synthetic construct
PDEALD

SEQ ID NO: 6891 - protein, 6 aa, synthetic construct
PDEALE

SEQ ID NO: 6892 - protein, 6 aa, synthetic construct
PDEALF

SEQ ID NO: 6893 - protein, 6 aa, synthetic construct
PDEALW

SEQ ID NO: 6894 - protein, 6 aa, synthetic construct
PDEALY

SEQ ID NO: 6895 - protein, 6 aa, synthetic construct
PDEAKD

SEQ ID NO: 6896 - protein, 6 aa, synthetic construct
PDEAKE

SEQ ID NO: 6897 - protein, 6 aa, synthetic construct
PDEAKF

SEQ ID NO: 6898 - protein, 6 aa, synthetic construct
PDEAKW

SEQ ID NO: 6899 - protein, 6 aa, synthetic construct
PDEAKY

SEQ ID NO: 6900 - protein, 6 aa, synthetic construct
PDEAMD

SEQ ID NO: 6901 - protein, 6 aa, synthetic construct
PDEAME

SEQ ID NO: 6902 - protein, 6 aa, synthetic construct
PDEAMF

SEQ ID NO: 6903 - protein, 6 aa, synthetic construct
PDEAMW

SEQ ID NO: 6904 - protein, 6 aa, synthetic construct
PDEAMY

SEQ ID NO: 6905 - protein, 6 aa, synthetic construct
PDEAFD

SEQ ID NO: 6906 - protein, 6 aa, synthetic construct
PDEAFE

SEQ ID NO: 6907 - protein, 6 aa, synthetic construct
PDEAFF

SEQ ID NO: 6908 - protein, 6 aa, synthetic construct
PDEAFW

SEQ ID NO: 6909 - protein, 6 aa, synthetic construct
PDEAFY

SEQ ID NO: 6910 - protein, 6 aa, synthetic construct
PDEAPD

SEQ ID NO: 6911 - protein, 6 aa, synthetic construct
PDEAPE

SEQ ID NO: 6912 - protein, 6 aa, synthetic construct
PDEAPF

SEQ ID NO: 6913 - protein, 6 aa, synthetic construct
PDEAPW

SEQ ID NO: 6914 - protein, 6 aa, synthetic construct
PDEAPY

SEQ ID NO: 6915 - protein, 6 aa, synthetic construct
PDEASD

SEQ ID NO: 6916 - protein, 6 aa, synthetic construct
PDEASE

SEQ ID NO: 6917 - protein, 6 aa, synthetic construct
PDEASF

SEQ ID NO: 6918 - protein, 6 aa, synthetic construct
PDEASW

SEQ ID NO: 6919 - protein, 6 aa, synthetic construct
PDEASY

SEQ ID NO: 6920 - protein, 6 aa, synthetic construct
PDEATD

SEQ ID NO: 6921 - protein, 6 aa, synthetic construct
PDEATE

SEQ ID NO: 6922 - protein, 6 aa, synthetic construct
PDEATF

SEQ ID NO: 6923 - protein, 6 aa, synthetic construct
PDEATW

SEQ ID NO: 6924 - protein, 6 aa, synthetic construct
PDEATY

SEQ ID NO: 6925 - protein, 6 aa, synthetic construct
PDEAWD

SEQ ID NO: 6926 - protein, 6 aa, synthetic construct
PDEAWE

SEQ ID NO: 6927 - protein, 6 aa, synthetic construct
PDEAWF

SEQ ID NO: 6928 - protein, 6 aa, synthetic construct
PDEAWW

SEQ ID NO: 6929 - protein, 6 aa, synthetic construct
PDEAWY

SEQ ID NO: 6930 - protein, 6 aa, synthetic construct
PDEAYD

SEQ ID NO: 6931 - protein, 6 aa, synthetic construct
PDEAYE

SEQ ID NO: 6932 - protein, 6 aa, synthetic construct
PDEAYF

SEQ ID NO: 6933 - protein, 6 aa, synthetic construct
PDEAYW

SEQ ID NO: 6934 - protein, 6 aa, synthetic construct
PDEAYY

SEQ ID NO: 6935 - protein, 6 aa, synthetic construct
PDEAVD

SEQ ID NO: 6936 - protein, 6 aa, synthetic construct
PDEAVE

SEQ ID NO: 6937 - protein, 6 aa, synthetic construct
PDEAVF

SEQ ID NO: 6938 - protein, 6 aa, synthetic construct
PDEAVW

SEQ ID NO: 6939 - protein, 6 aa, synthetic construct
PDEAVY

SEQ ID NO: 6940 - protein, 6 aa, synthetic construct
PDERAD

SEQ ID NO: 6941 - protein, 6 aa, synthetic construct
PDERAE

SEQ ID NO: 6942 - protein, 6 aa, synthetic construct
PDERAF

SEQ ID NO: 6943 - protein, 6 aa, synthetic construct
PDERAW

SEQ ID NO: 6944 - protein, 6 aa, synthetic construct
PDERAY

SEQ ID NO: 6945 - protein, 6 aa, synthetic construct
PDERRD

SEQ ID NO: 6946 - protein, 6 aa, synthetic construct
PDERRE

SEQ ID NO: 6947 - protein, 6 aa, synthetic construct
PDERRF

SEQ ID NO: 6948 - protein, 6 aa, synthetic construct
PDERRW

SEQ ID NO: 6949 - protein, 6 aa, synthetic construct
PDERRY

SEQ ID NO: 6950 - protein, 6 aa, synthetic construct
PDERND

SEQ ID NO: 6951 - protein, 6 aa, synthetic construct
PDERNE

SEQ ID NO: 6952 - protein, 6 aa, synthetic construct
PDERNF

SEQ ID NO: 6953 - protein, 6 aa, synthetic construct
PDERNW

SEQ ID NO: 6954 - protein, 6 aa, synthetic construct
PDERNY

SEQ ID NO: 6955 - protein, 6 aa, synthetic construct
PDERDD

SEQ ID NO: 6956 - protein, 6 aa, synthetic construct
PDERDE

SEQ ID NO: 6957 - protein, 6 aa, synthetic construct
PDERDF

SEQ ID NO: 6958 - protein, 6 aa, synthetic construct
PDERDW

SEQ ID NO: 6959 - protein, 6 aa, synthetic construct
PDERDY

SEQ ID NO: 6960 - protein, 6 aa, synthetic construct
PDERCD

SEQ ID NO: 6961 - protein, 6 aa, synthetic construct
PDERCE

SEQ ID NO: 6962 - protein, 6 aa, synthetic construct
PDERCF

SEQ ID NO: 6963 - protein, 6 aa, synthetic construct
PDERCW

SEQ ID NO: 6964 - protein, 6 aa, synthetic construct
PDERCY

SEQ ID NO: 6965 - protein, 6 aa, synthetic construct
PDERQD

SEQ ID NO: 6966 - protein, 6 aa, synthetic construct
PDERQE

SEQ ID NO: 6967 - protein, 6 aa, synthetic construct
PDERQF

SEQ ID NO: 6968 - protein, 6 aa, synthetic construct
PDERQW

SEQ ID NO: 6969 - protein, 6 aa, synthetic construct
PDERQY

SEQ ID NO: 6970 - protein, 6 aa, synthetic construct
PDERED

SEQ ID NO: 6971 - protein, 6 aa, synthetic construct
PDEREE

SEQ ID NO: 6972 - protein, 6 aa, synthetic construct
PDEREF

SEQ ID NO: 6973 - protein, 6 aa, synthetic construct
PDEREW

SEQ ID NO: 6974 - protein, 6 aa, synthetic construct
PDEREY

SEQ ID NO: 6975 - protein, 6 aa, synthetic construct
PDERGD

SEQ ID NO: 6976 - protein, 6 aa, synthetic construct
PDERGE

SEQ ID NO: 6977 - protein, 6 aa, synthetic construct
PDERGF

SEQ ID NO: 6978 - protein, 6 aa, synthetic construct
PDERGW

SEQ ID NO: 6979 - protein, 6 aa, synthetic construct
PDERGY

SEQ ID NO: 6980 - protein, 6 aa, synthetic construct
PDERHD

SEQ ID NO: 6981 - protein, 6 aa, synthetic construct
PDERHE

SEQ ID NO: 6982 - protein, 6 aa, synthetic construct
PDERHF

SEQ ID NO: 6983 - protein, 6 aa, synthetic construct
PDERHW

SEQ ID NO: 6984 - protein, 6 aa, synthetic construct
PDERHY

SEQ ID NO: 6985 - protein, 6 aa, synthetic construct
PDERID

SEQ ID NO: 6986 - protein, 6 aa, synthetic construct
PDERIE

SEQ ID NO: 6987 - protein, 6 aa, synthetic construct
PDERIF

SEQ ID NO: 6988 - protein, 6 aa, synthetic construct
PDERIW

SEQ ID NO: 6989 - protein, 6 aa, synthetic construct
PDERIY

SEQ ID NO: 6990 - protein, 6 aa, synthetic construct
PDERLD

SEQ ID NO: 6991 - protein, 6 aa, synthetic construct
PDERLE

SEQ ID NO: 6992 - protein, 6 aa, synthetic construct
PDERLF

SEQ ID NO: 6993 - protein, 6 aa, synthetic construct
PDERLW

SEQ ID NO: 6994 - protein, 6 aa, synthetic construct
PDERLY

SEQ ID NO: 6995 - protein, 6 aa, synthetic construct
PDERKD

SEQ ID NO: 6996 - protein, 6 aa, synthetic construct
PDERKE

SEQ ID NO: 6997 - protein, 6 aa, synthetic construct
PDERKF

SEQ ID NO: 6998 - protein, 6 aa, synthetic construct
PDERKW

SEQ ID NO: 6999 - protein, 6 aa, synthetic construct
PDERKY

SEQ ID NO: 7000 - protein, 6 aa, synthetic construct
PDERMD

SEQ ID NO: 7001 - protein, 6 aa, synthetic construct
PDERME

SEQ ID NO: 7002 - protein, 6 aa, synthetic construct
PDERMF

SEQ ID NO: 7003 - protein, 6 aa, synthetic construct
PDERMW

SEQ ID NO: 7004 - protein, 6 aa, synthetic construct
PDERMY

SEQ ID NO: 7005 - protein, 6 aa, synthetic construct
PDERFD

SEQ ID NO: 7006 - protein, 6 aa, synthetic construct
PDERFE

SEQ ID NO: 7007 - protein, 6 aa, synthetic construct
PDERFF

SEQ ID NO: 7008 - protein, 6 aa, synthetic construct
PDERFW

SEQ ID NO: 7009 - protein, 6 aa, synthetic construct
PDERFY

SEQ ID NO: 7010 - protein, 6 aa, synthetic construct
PDERPD

SEQ ID NO: 7011 - protein, 6 aa, synthetic construct
PDERPE

SEQ ID NO: 7012 - protein, 6 aa, synthetic construct
PDERPF

SEQ ID NO: 7013 - protein, 6 aa, synthetic construct
PDERPW

SEQ ID NO: 7014 - protein, 6 aa, synthetic construct
PDERPY

SEQ ID NO: 7015 - protein, 6 aa, synthetic construct
PDERSD

SEQ ID NO: 7016 - protein, 6 aa, synthetic construct
PDERSE

SEQ ID NO: 7017 - protein, 6 aa, synthetic construct
PDERSF

SEQ ID NO: 7018 - protein, 6 aa, synthetic construct
PDERSW

SEQ ID NO: 7019 - protein, 6 aa, synthetic construct
PDERSY

SEQ ID NO: 7020 - protein, 6 aa, synthetic construct
PDERTD

SEQ ID NO: 7021 - protein, 6 aa, synthetic construct
PDERTE

SEQ ID NO: 7022 - protein, 6 aa, synthetic construct
PDERTF

SEQ ID NO: 7023 - protein, 6 aa, synthetic construct
PDERTW

SEQ ID NO: 7024 - protein, 6 aa, synthetic construct
PDERTY

SEQ ID NO: 7025 - protein, 6 aa, synthetic construct
PDERWD

SEQ ID NO: 7026 - protein, 6 aa, synthetic construct
PDERWE

SEQ ID NO: 7027 - protein, 6 aa, synthetic construct
PDERWF

SEQ ID NO: 7028 - protein, 6 aa, synthetic construct
PDERWW

SEQ ID NO: 7029 - protein, 6 aa, synthetic construct
PDERWY

SEQ ID NO: 7030 - protein, 6 aa, synthetic construct
PDERYD

SEQ ID NO: 7031 - protein, 6 aa, synthetic construct
PDERYE

SEQ ID NO: 7032 - protein, 6 aa, synthetic construct
PDERYF

SEQ ID NO: 7033 - protein, 6 aa, synthetic construct
PDERYW

SEQ ID NO: 7034 - protein, 6 aa, synthetic construct
PDERYY

SEQ ID NO: 7035 - protein, 6 aa, synthetic construct
PDERVD

SEQ ID NO: 7036 - protein, 6 aa, synthetic construct
PDERVE

SEQ ID NO: 7037 - protein, 6 aa, synthetic construct
PDERVF

SEQ ID NO: 7038 - protein, 6 aa, synthetic construct
PDERVW

SEQ ID NO: 7039 - protein, 6 aa, synthetic construct
PDERVY

SEQ ID NO: 7040 - protein, 6 aa, synthetic construct
PDENAD

SEQ ID NO: 7041 - protein, 6 aa, synthetic construct
PDENAE

SEQ ID NO: 7042 - protein, 6 aa, synthetic construct
PDENAF

SEQ ID NO: 7043 - protein, 6 aa, synthetic construct
PDENAW

SEQ ID NO: 7044 - protein, 6 aa, synthetic construct
PDENAY

SEQ ID NO: 7045 - protein, 6 aa, synthetic construct
PDENRD

SEQ ID NO: 7046 - protein, 6 aa, synthetic construct
PDENRE

SEQ ID NO: 7047 - protein, 6 aa, synthetic construct
PDENRF

SEQ ID NO: 7048 - protein, 6 aa, synthetic construct
PDENRW

SEQ ID NO: 7049 - protein, 6 aa, synthetic construct
PDENRY

SEQ ID NO: 7050 - protein, 6 aa, synthetic construct
PDENND

SEQ ID NO: 7051 - protein, 6 aa, synthetic construct
PDENNE

SEQ ID NO: 7052 - protein, 6 aa, synthetic construct
PDENNF

SEQ ID NO: 7053 - protein, 6 aa, synthetic construct
PDENNW

SEQ ID NO: 7054 - protein, 6 aa, synthetic construct
PDENNY

SEQ ID NO: 7055 - protein, 6 aa, synthetic construct
PDENDD

SEQ ID NO: 7056 - protein, 6 aa, synthetic construct
PDENDE

SEQ ID NO: 7057 - protein, 6 aa, synthetic construct
PDENDF

SEQ ID NO: 7058 - protein, 6 aa, synthetic construct
PDENDW

SEQ ID NO: 7059 - protein, 6 aa, synthetic construct
PDENDY

SEQ ID NO: 7060 - protein, 6 aa, synthetic construct
PDENCD

SEQ ID NO: 7061 - protein, 6 aa, synthetic construct
PDENCE

SEQ ID NO: 7062 - protein, 6 aa, synthetic construct
PDENCF

SEQ ID NO: 7063 - protein, 6 aa, synthetic construct
PDENCW

SEQ ID NO: 7064 - protein, 6 aa, synthetic construct
PDENCY

SEQ ID NO: 7065 - protein, 6 aa, synthetic construct
PDENQD

SEQ ID NO: 7066 - protein, 6 aa, synthetic construct
PDENQE

SEQ ID NO: 7067 - protein, 6 aa, synthetic construct
PDENQF

SEQ ID NO: 7068 - protein, 6 aa, synthetic construct
PDENQW

SEQ ID NO: 7069 - protein, 6 aa, synthetic construct
PDENQY

SEQ ID NO: 7070 - protein, 6 aa, synthetic construct
PDENED

SEQ ID NO: 7071 - protein, 6 aa, synthetic construct
PDENEE

SEQ ID NO: 7072 - protein, 6 aa, synthetic construct
PDENEF

SEQ ID NO: 7073 - protein, 6 aa, synthetic construct
PDENEW

SEQ ID NO: 7074 - protein, 6 aa, synthetic construct
PDENEY

SEQ ID NO: 7075 - protein, 6 aa, synthetic construct
PDENGD

SEQ ID NO: 7076 - protein, 6 aa, synthetic construct
PDENGE

SEQ ID NO: 7077 - protein, 6 aa, synthetic construct
PDENGF

SEQ ID NO: 7078 - protein, 6 aa, synthetic construct
PDENGW

SEQ ID NO: 7079 - protein, 6 aa, synthetic construct
PDENGY

SEQ ID NO: 7080 - protein, 6 aa, synthetic construct
PDENHD

SEQ ID NO: 7081 - protein, 6 aa, synthetic construct
PDENHE

SEQ ID NO: 7082 - protein, 6 aa, synthetic construct
PDENHF

SEQ ID NO: 7083 - protein, 6 aa, synthetic construct
PDENHW

SEQ ID NO: 7084 - protein, 6 aa, synthetic construct
PDENHY

SEQ ID NO: 7085 - protein, 6 aa, synthetic construct
PDENID

SEQ ID NO: 7086 - protein, 6 aa, synthetic construct
PDENIE

SEQ ID NO: 7087 - protein, 6 aa, synthetic construct
PDENIF

SEQ ID NO: 7088 - protein, 6 aa, synthetic construct
PDENIW

SEQ ID NO: 7089 - protein, 6 aa, synthetic construct
PDENIY

SEQ ID NO: 7090 - protein, 6 aa, synthetic construct
PDENLD

SEQ ID NO: 7091 - protein, 6 aa, synthetic construct
PDENLE

SEQ ID NO: 7092 - protein, 6 aa, synthetic construct
PDENLF

SEQ ID NO: 7093 - protein, 6 aa, synthetic construct
PDENLW

SEQ ID NO: 7094 - protein, 6 aa, synthetic construct
PDENLY

SEQ ID NO: 7095 - protein, 6 aa, synthetic construct
PDENKD

SEQ ID NO: 7096 - protein, 6 aa, synthetic construct
PDENKE

SEQ ID NO: 7097 - protein, 6 aa, synthetic construct
PDENKF

SEQ ID NO: 7098 - protein, 6 aa, synthetic construct
PDENKW

SEQ ID NO: 7099 - protein, 6 aa, synthetic construct
PDENKY

SEQ ID NO: 7100 - protein, 6 aa, synthetic construct
PDENMD

SEQ ID NO: 7101 - protein, 6 aa, synthetic construct
PDENME

SEQ ID NO: 7102 - protein, 6 aa, synthetic construct
PDENMF

SEQ ID NO: 7103 - protein, 6 aa, synthetic construct
PDENMW

SEQ ID NO: 7104 - protein, 6 aa, synthetic construct
PDENMY

SEQ ID NO: 7105 - protein, 6 aa, synthetic construct
PDENFD

SEQ ID NO: 7106 - protein, 6 aa, synthetic construct
PDENFE

SEQ ID NO: 7107 - protein, 6 aa, synthetic construct
PDENFF

SEQ ID NO: 7108 - protein, 6 aa, synthetic construct
PDENFW

SEQ ID NO: 7109 - protein, 6 aa, synthetic construct
PDENFY

SEQ ID NO: 7110 - protein, 6 aa, synthetic construct
PDENPD

SEQ ID NO: 7111 - protein, 6 aa, synthetic construct
PDENPE

SEQ ID NO: 7112 - protein, 6 aa, synthetic construct
PDENPF

SEQ ID NO: 7113 - protein, 6 aa, synthetic construct
PDENPW

SEQ ID NO: 7114 - protein, 6 aa, synthetic construct
PDENPY

SEQ ID NO: 7115 - protein, 6 aa, synthetic construct
PDENSD

SEQ ID NO: 7116 - protein, 6 aa, synthetic construct
PDENSE

SEQ ID NO: 7117 - protein, 6 aa, synthetic construct
PDENSF

SEQ ID NO: 7118 - protein, 6 aa, synthetic construct
PDENSW

SEQ ID NO: 7119 - protein, 6 aa, synthetic construct
PDENSY

SEQ ID NO: 7120 - protein, 6 aa, synthetic construct
PDENTD

SEQ ID NO: 7121 - protein, 6 aa, synthetic construct
PDENTE

SEQ ID NO: 7122 - protein, 6 aa, synthetic construct
PDENTF

SEQ ID NO: 7123 - protein, 6 aa, synthetic construct
PDENTW

SEQ ID NO: 7124 - protein, 6 aa, synthetic construct
PDENTY

SEQ ID NO: 7125 - protein, 6 aa, synthetic construct
PDENWD

SEQ ID NO: 7126 - protein, 6 aa, synthetic construct
PDENWE

SEQ ID NO: 7127 - protein, 6 aa, synthetic construct
PDENWF

SEQ ID NO: 7128 - protein, 6 aa, synthetic construct
PDENWW

SEQ ID NO: 7129 - protein, 6 aa, synthetic construct
PDENWY

SEQ ID NO: 7130 - protein, 6 aa, synthetic construct
PDENYD

SEQ ID NO: 7131 - protein, 6 aa, synthetic construct
PDENYE

SEQ ID NO: 7132 - protein, 6 aa, synthetic construct
PDENYF

SEQ ID NO: 7133 - protein, 6 aa, synthetic construct
PDENYW

SEQ ID NO: 7134 - protein, 6 aa, synthetic construct
PDENYY

SEQ ID NO: 7135 - protein, 6 aa, synthetic construct
PDENVD

SEQ ID NO: 7136 - protein, 6 aa, synthetic construct
PDENVE

SEQ ID NO: 7137 - protein, 6 aa, synthetic construct
PDENVF

SEQ ID NO: 7138 - protein, 6 aa, synthetic construct
PDENVW

SEQ ID NO: 7139 - protein, 6 aa, synthetic construct
PDENVY

SEQ ID NO: 7140 - protein, 6 aa, synthetic construct
PDEDAD

SEQ ID NO: 7141 - protein, 6 aa, synthetic construct
PDEDAE

SEQ ID NO: 7142 - protein, 6 aa, synthetic construct
PDEDAF

SEQ ID NO: 7143 - protein, 6 aa, synthetic construct
PDEDAW

SEQ ID NO: 7144 - protein, 6 aa, synthetic construct
PDEDAY

SEQ ID NO: 7145 - protein, 6 aa, synthetic construct
PDEDRD

SEQ ID NO: 7146 - protein, 6 aa, synthetic construct
PDEDRE

SEQ ID NO: 7147 - protein, 6 aa, synthetic construct
PDEDRF

SEQ ID NO: 7148 - protein, 6 aa, synthetic construct
PDEDRW

SEQ ID NO: 7149 - protein, 6 aa, synthetic construct
PDEDRY

SEQ ID NO: 7150 - protein, 6 aa, synthetic construct
PDEDND

SEQ ID NO: 7151 - protein, 6 aa, synthetic construct
PDEDNE

SEQ ID NO: 7152 - protein, 6 aa, synthetic construct
PDEDNF

SEQ ID NO: 7153 - protein, 6 aa, synthetic construct
PDEDNW

SEQ ID NO: 7154 - protein, 6 aa, synthetic construct
PDEDNY

SEQ ID NO: 7155 - protein, 6 aa, synthetic construct
PDEDDD

SEQ ID NO: 7156 - protein, 6 aa, synthetic construct
PDEDDE

SEQ ID NO: 7157 - protein, 6 aa, synthetic construct
PDEDDF

SEQ ID NO: 7158 - protein, 6 aa, synthetic construct
PDEDDW

SEQ ID NO: 7159 - protein, 6 aa, synthetic construct
PDEDDY

SEQ ID NO: 7160 - protein, 6 aa, synthetic construct
PDEDCD

SEQ ID NO: 7161 - protein, 6 aa, synthetic construct
PDEDCE

SEQ ID NO: 7162 - protein, 6 aa, synthetic construct
PDEDCF

SEQ ID NO: 7163 - protein, 6 aa, synthetic construct
PDEDCW

SEQ ID NO: 7164 - protein, 6 aa, synthetic construct
PDEDCY

SEQ ID NO: 7165 - protein, 6 aa, synthetic construct
PDEDQD

SEQ ID NO: 7166 - protein, 6 aa, synthetic construct
PDEDQE

SEQ ID NO: 7167 - protein, 6 aa, synthetic construct
PDEDQF

SEQ ID NO: 7168 - protein, 6 aa, synthetic construct
PDEDQW

SEQ ID NO: 7169 - protein, 6 aa, synthetic construct
PDEDQY

SEQ ID NO: 7170 - protein, 6 aa, synthetic construct
PDEDED

SEQ ID NO: 7171 - protein, 6 aa, synthetic construct
PDEDEE

SEQ ID NO: 7172 - protein, 6 aa, synthetic construct
PDEDEF

SEQ ID NO: 7173 - protein, 6 aa, synthetic construct
PDEDEW

SEQ ID NO: 7174 - protein, 6 aa, synthetic construct
PDEDEY

SEQ ID NO: 7175 - protein, 6 aa, synthetic construct
PDEDGD

SEQ ID NO: 7176 - protein, 6 aa, synthetic construct
PDEDGE

SEQ ID NO: 7177 - protein, 6 aa, synthetic construct
PDEDGF

SEQ ID NO: 7178 - protein, 6 aa, synthetic construct
PDEDGW

SEQ ID NO: 7179 - protein, 6 aa, synthetic construct
PDEDGY

SEQ ID NO: 7180 - protein, 6 aa, synthetic construct
PDEDHD

SEQ ID NO: 7181 - protein, 6 aa, synthetic construct
PDEDHE

SEQ ID NO: 7182 - protein, 6 aa, synthetic construct
PDEDHF

SEQ ID NO: 7183 - protein, 6 aa, synthetic construct
PDEDHW

SEQ ID NO: 7184 - protein, 6 aa, synthetic construct
PDEDHY

SEQ ID NO: 7185 - protein, 6 aa, synthetic construct
PDEDID

SEQ ID NO: 7186 - protein, 6 aa, synthetic construct
PDEDIE

SEQ ID NO: 7187 - protein, 6 aa, synthetic construct
PDEDIF

SEQ ID NO: 7188 - protein, 6 aa, synthetic construct
PDEDIW

SEQ ID NO: 7189 - protein, 6 aa, synthetic construct
PDEDIY

SEQ ID NO: 7190 - protein, 6 aa, synthetic construct
PDEDLD

SEQ ID NO: 7191 - protein, 6 aa, synthetic construct
PDEDLE

SEQ ID NO: 7192 - protein, 6 aa, synthetic construct
PDEDLF

SEQ ID NO: 7193 - protein, 6 aa, synthetic construct
PDEDLW

SEQ ID NO: 7194 - protein, 6 aa, synthetic construct
PDEDLY

SEQ ID NO: 7195 - protein, 6 aa, synthetic construct
PDEDKD

SEQ ID NO: 7196 - protein, 6 aa, synthetic construct
PDEDKE

SEQ ID NO: 7197 - protein, 6 aa, synthetic construct
PDEDKF

SEQ ID NO: 7198 - protein, 6 aa, synthetic construct
PDEDKW

SEQ ID NO: 7199 - protein, 6 aa, synthetic construct
PDEDKY

SEQ ID NO: 7200 - protein, 6 aa, synthetic construct
PDEDMD

SEQ ID NO: 7201 - protein, 6 aa, synthetic construct
PDEDME

SEQ ID NO: 7202 - protein, 6 aa, synthetic construct
PDEDMF

SEQ ID NO: 7203 - protein, 6 aa, synthetic construct
PDEDMW

SEQ ID NO: 7204 - protein, 6 aa, synthetic construct
PDEDMY

SEQ ID NO: 7205 - protein, 6 aa, synthetic construct
PDEDFD

SEQ ID NO: 7206 - protein, 6 aa, synthetic construct
PDEDFE

SEQ ID NO: 7207 - protein, 6 aa, synthetic construct
PDEDFF

SEQ ID NO: 7208 - protein, 6 aa, synthetic construct
PDEDFW

SEQ ID NO: 7209 - protein, 6 aa, synthetic construct
PDEDFY

SEQ ID NO: 7210 - protein, 6 aa, synthetic construct
PDEDPD

SEQ ID NO: 7211 - protein, 6 aa, synthetic construct
PDEDPE

SEQ ID NO: 7212 - protein, 6 aa, synthetic construct
PDEDPF

SEQ ID NO: 7213 - protein, 6 aa, synthetic construct
PDEDPW

SEQ ID NO: 7214 - protein, 6 aa, synthetic construct
PDEDPY

SEQ ID NO: 7215 - protein, 6 aa, synthetic construct
PDEDSD

SEQ ID NO: 7216 - protein, 6 aa, synthetic construct
PDEDSE

SEQ ID NO: 7217 - protein, 6 aa, synthetic construct
PDEDSF

SEQ ID NO: 7218 - protein, 6 aa, synthetic construct
PDEDSW

SEQ ID NO: 7219 - protein, 6 aa, synthetic construct
PDEDSY

SEQ ID NO: 7220 - protein, 6 aa, synthetic construct
PDEDTD

SEQ ID NO: 7221 - protein, 6 aa, synthetic construct
PDEDTE

SEQ ID NO: 7222 - protein, 6 aa, synthetic construct
PDEDTF

SEQ ID NO: 7223 - protein, 6 aa, synthetic construct
PDEDTW

SEQ ID NO: 7224 - protein, 6 aa, synthetic construct
PDEDTY

SEQ ID NO: 7225 - protein, 6 aa, synthetic construct
PDEDWD

SEQ ID NO: 7226 - protein, 6 aa, synthetic construct
PDEDWE

SEQ ID NO: 7227 - protein, 6 aa, synthetic construct
PDEDWF

SEQ ID NO: 7228 - protein, 6 aa, synthetic construct
PDEDWW

SEQ ID NO: 7229 - protein, 6 aa, synthetic construct
PDEDWY

SEQ ID NO: 7230 - protein, 6 aa, synthetic construct
PDEDYD

SEQ ID NO: 7231 - protein, 6 aa, synthetic construct
PDEDYE

SEQ ID NO: 7232 - protein, 6 aa, synthetic construct
PDEDYF

SEQ ID NO: 7233 - protein, 6 aa, synthetic construct
PDEDYW

SEQ ID NO: 7234 - protein, 6 aa, synthetic construct
PDEDYY

SEQ ID NO: 7235 - protein, 6 aa, synthetic construct
PDEDVD

SEQ ID NO: 7236 - protein, 6 aa, synthetic construct
PDEDVE

SEQ ID NO: 7237 - protein, 6 aa, synthetic construct
PDEDVF

SEQ ID NO: 7238 - protein, 6 aa, synthetic construct
PDEDVW

SEQ ID NO: 7239 - protein, 6 aa, synthetic construct
PDEDVY

SEQ ID NO: 7240 - protein, 6 aa, synthetic construct
PDECAD

SEQ ID NO: 7241 - protein, 6 aa, synthetic construct
PDECAE

SEQ ID NO: 7242 - protein, 6 aa, synthetic construct
PDECAF

SEQ ID NO: 7243 - protein, 6 aa, synthetic construct
PDECAW

SEQ ID NO: 7244 - protein, 6 aa, synthetic construct
PDECAY

SEQ ID NO: 7245 - protein, 6 aa, synthetic construct
PDECRD

SEQ ID NO: 7246 - protein, 6 aa, synthetic construct
PDECRE

SEQ ID NO: 7247 - protein, 6 aa, synthetic construct
PDECRF

SEQ ID NO: 7248 - protein, 6 aa, synthetic construct
PDECRW

SEQ ID NO: 7249 - protein, 6 aa, synthetic construct
PDECRY

SEQ ID NO: 7250 - protein, 6 aa, synthetic construct
PDECND

SEQ ID NO: 7251 - protein, 6 aa, synthetic construct
PDECNE

SEQ ID NO: 7252 - protein, 6 aa, synthetic construct
PDECNF

SEQ ID NO: 7253 - protein, 6 aa, synthetic construct
PDECNW

SEQ ID NO: 7254 - protein, 6 aa, synthetic construct
PDECNY

SEQ ID NO: 7255 - protein, 6 aa, synthetic construct
PDECDD

SEQ ID NO: 7256 - protein, 6 aa, synthetic construct
PDECDE

SEQ ID NO: 7257 - protein, 6 aa, synthetic construct
PDECDF

SEQ ID NO: 7258 - protein, 6 aa, synthetic construct
PDECDW

SEQ ID NO: 7259 - protein, 6 aa, synthetic construct
PDECDY

SEQ ID NO: 7260 - protein, 6 aa, synthetic construct
PDECCD

SEQ ID NO: 7261 - protein, 6 aa, synthetic construct
PDECCE

SEQ ID NO: 7262 - protein, 6 aa, synthetic construct
PDECCF

SEQ ID NO: 7263 - protein, 6 aa, synthetic construct
PDECCW

SEQ ID NO: 7264 - protein, 6 aa, synthetic construct
PDECCY

SEQ ID NO: 7265 - protein, 6 aa, synthetic construct
PDECQD

SEQ ID NO: 7266 - protein, 6 aa, synthetic construct
PDECQE

SEQ ID NO: 7267 - protein, 6 aa, synthetic construct
PDECQF

SEQ ID NO: 7268 - protein, 6 aa, synthetic construct
PDECQW

SEQ ID NO: 7269 - protein, 6 aa, synthetic construct
PDECQY

SEQ ID NO: 7270 - protein, 6 aa, synthetic construct
PDECED

SEQ ID NO: 7271 - protein, 6 aa, synthetic construct
PDECEE

SEQ ID NO: 7272 - protein, 6 aa, synthetic construct
PDECEF

SEQ ID NO: 7273 - protein, 6 aa, synthetic construct
PDECEW

SEQ ID NO: 7274 - protein, 6 aa, synthetic construct
PDECEY

SEQ ID NO: 7275 - protein, 6 aa, synthetic construct
PDECGD

SEQ ID NO: 7276 - protein, 6 aa, synthetic construct
PDECGE

SEQ ID NO: 7277 - protein, 6 aa, synthetic construct
PDECGF

SEQ ID NO: 7278 - protein, 6 aa, synthetic construct
PDECGW

SEQ ID NO: 7279 - protein, 6 aa, synthetic construct
PDECGY

SEQ ID NO: 7280 - protein, 6 aa, synthetic construct
PDECHD

SEQ ID NO: 7281 - protein, 6 aa, synthetic construct
PDECHE

SEQ ID NO: 7282 - protein, 6 aa, synthetic construct
PDECHF

SEQ ID NO: 7283 - protein, 6 aa, synthetic construct
PDECHW

SEQ ID NO: 7284 - protein, 6 aa, synthetic construct
PDECHY

SEQ ID NO: 7285 - protein, 6 aa, synthetic construct
PDECID

SEQ ID NO: 7286 - protein, 6 aa, synthetic construct
PDECIE

SEQ ID NO: 7287 - protein, 6 aa, synthetic construct
PDECIF

SEQ ID NO: 7288 - protein, 6 aa, synthetic construct
PDECIW

SEQ ID NO: 7289 - protein, 6 aa, synthetic construct
PDECIY

SEQ ID NO: 7290 - protein, 6 aa, synthetic construct
PDECLD

SEQ ID NO: 7291 - protein, 6 aa, synthetic construct
PDECLE

SEQ ID NO: 7292 - protein, 6 aa, synthetic construct
PDECLF

SEQ ID NO: 7293 - protein, 6 aa, synthetic construct
PDECLW

SEQ ID NO: 7294 - protein, 6 aa, synthetic construct
PDECLY

SEQ ID NO: 7295 - protein, 6 aa, synthetic construct
PDECKD

SEQ ID NO: 7296 - protein, 6 aa, synthetic construct
PDECKE

SEQ ID NO: 7297 - protein, 6 aa, synthetic construct
PDECKF

SEQ ID NO: 7298 - protein, 6 aa, synthetic construct
PDECKW

SEQ ID NO: 7299 - protein, 6 aa, synthetic construct
PDECKY

SEQ ID NO: 7300 - protein, 6 aa, synthetic construct
PDECMD

SEQ ID NO: 7301 - protein, 6 aa, synthetic construct
PDECME

SEQ ID NO: 7302 - protein, 6 aa, synthetic construct
PDECMF

SEQ ID NO: 7303 - protein, 6 aa, synthetic construct
PDECMW

SEQ ID NO: 7304 - protein, 6 aa, synthetic construct
PDECMY

SEQ ID NO: 7305 - protein, 6 aa, synthetic construct
PDECFD

SEQ ID NO: 7306 - protein, 6 aa, synthetic construct
PDECFE

SEQ ID NO: 7307 - protein, 6 aa, synthetic construct
PDECFF

SEQ ID NO: 7308 - protein, 6 aa, synthetic construct
PDECFW

SEQ ID NO: 7309 - protein, 6 aa, synthetic construct
PDECFY

SEQ ID NO: 7310 - protein, 6 aa, synthetic construct
PDECPD

SEQ ID NO: 7311 - protein, 6 aa, synthetic construct
PDECPE

SEQ ID NO: 7312 - protein, 6 aa, synthetic construct
PDECPF

SEQ ID NO: 7313 - protein, 6 aa, synthetic construct
PDECPW

SEQ ID NO: 7314 - protein, 6 aa, synthetic construct
PDECPY

SEQ ID NO: 7315 - protein, 6 aa, synthetic construct
PDECSD

SEQ ID NO: 7316 - protein, 6 aa, synthetic construct
PDECSE

SEQ ID NO: 7317 - protein, 6 aa, synthetic construct
PDECSF

SEQ ID NO: 7318 - protein, 6 aa, synthetic construct
PDECSW

SEQ ID NO: 7319 - protein, 6 aa, synthetic construct
PDECSY

SEQ ID NO: 7320 - protein, 6 aa, synthetic construct
PDECTD

SEQ ID NO: 7321 - protein, 6 aa, synthetic construct
PDECTE

SEQ ID NO: 7322 - protein, 6 aa, synthetic construct
PDECTF

SEQ ID NO: 7323 - protein, 6 aa, synthetic construct
PDECTW

SEQ ID NO: 7324 - protein, 6 aa, synthetic construct
PDECTY

SEQ ID NO: 7325 - protein, 6 aa, synthetic construct
PDECWD

SEQ ID NO: 7326 - protein, 6 aa, synthetic construct
PDECWE

SEQ ID NO: 7327 - protein, 6 aa, synthetic construct
PDECWF

SEQ ID NO: 7328 - protein, 6 aa, synthetic construct
PDECWW

SEQ ID NO: 7329 - protein, 6 aa, synthetic construct
PDECWY

SEQ ID NO: 7330 - protein, 6 aa, synthetic construct
PDECYD

SEQ ID NO: 7331 - protein, 6 aa, synthetic construct
PDECYE

SEQ ID NO: 7332 - protein, 6 aa, synthetic construct
PDECYF

SEQ ID NO: 7333 - protein, 6 aa, synthetic construct
PDECYW

SEQ ID NO: 7334 - protein, 6 aa, synthetic construct
PDECYY

SEQ ID NO: 7335 - protein, 6 aa, synthetic construct
PDECVD

SEQ ID NO: 7336 - protein, 6 aa, synthetic construct
PDECVE

SEQ ID NO: 7337 - protein, 6 aa, synthetic construct
PDECVF

SEQ ID NO: 7338 - protein, 6 aa, synthetic construct
PDECVW

SEQ ID NO: 7339 - protein, 6 aa, synthetic construct
PDECVY

SEQ ID NO: 7340 - protein, 6 aa, synthetic construct
PDEQAD

SEQ ID NO: 7341 - protein, 6 aa, synthetic construct
PDEQAE

SEQ ID NO: 7342 - protein, 6 aa, synthetic construct
PDEQAF

SEQ ID NO: 7343 - protein, 6 aa, synthetic construct
PDEQAW

SEQ ID NO: 7344 - protein, 6 aa, synthetic construct
PDEQAY

SEQ ID NO: 7345 - protein, 6 aa, synthetic construct
PDEQRD

SEQ ID NO: 7346 - protein, 6 aa, synthetic construct
PDEQRE

SEQ ID NO: 7347 - protein, 6 aa, synthetic construct
PDEQRF

SEQ ID NO: 7348 - protein, 6 aa, synthetic construct
PDEQRW

SEQ ID NO: 7349 - protein, 6 aa, synthetic construct
PDEQRY

SEQ ID NO: 7350 - protein, 6 aa, synthetic construct
PDEQND

SEQ ID NO: 7351 - protein, 6 aa, synthetic construct
PDEQNE

SEQ ID NO: 7352 - protein, 6 aa, synthetic construct
PDEQNF

SEQ ID NO: 7353 - protein, 6 aa, synthetic construct
PDEQNW

SEQ ID NO: 7354 - protein, 6 aa, synthetic construct
PDEQNY

SEQ ID NO: 7355 - protein, 6 aa, synthetic construct
PDEQDD

SEQ ID NO: 7356 - protein, 6 aa, synthetic construct
PDEQDE

SEQ ID NO: 7357 - protein, 6 aa, synthetic construct
PDEQDF

SEQ ID NO: 7358 - protein, 6 aa, synthetic construct
PDEQDW

SEQ ID NO: 7359 - protein, 6 aa, synthetic construct
PDEQDY

SEQ ID NO: 7360 - protein, 6 aa, synthetic construct
PDEQCD

SEQ ID NO: 7361 - protein, 6 aa, synthetic construct
PDEQCE

SEQ ID NO: 7362 - protein, 6 aa, synthetic construct
PDEQCF

SEQ ID NO: 7363 - protein, 6 aa, synthetic construct
PDEQCW

SEQ ID NO: 7364 - protein, 6 aa, synthetic construct
PDEQCY

SEQ ID NO: 7365 - protein, 6 aa, synthetic construct
PDEQQD

SEQ ID NO: 7366 - protein, 6 aa, synthetic construct
PDEQQE

SEQ ID NO: 7367 - protein, 6 aa, synthetic construct
PDEQQF

SEQ ID NO: 7368 - protein, 6 aa, synthetic construct
PDEQQW

SEQ ID NO: 7369 - protein, 6 aa, synthetic construct
PDEQQY

SEQ ID NO: 7370 - protein, 6 aa, synthetic construct
PDEQED

SEQ ID NO: 7371 - protein, 6 aa, synthetic construct
PDEQEE

SEQ ID NO: 7372 - protein, 6 aa, synthetic construct
PDEQEF

SEQ ID NO: 7373 - protein, 6 aa, synthetic construct
PDEQEW

SEQ ID NO: 7374 - protein, 6 aa, synthetic construct
PDEQEY

SEQ ID NO: 7375 - protein, 6 aa, synthetic construct
PDEQGD

SEQ ID NO: 7376 - protein, 6 aa, synthetic construct
PDEQGE

SEQ ID NO: 7377 - protein, 6 aa, synthetic construct
PDEQGF

SEQ ID NO: 7378 - protein, 6 aa, synthetic construct
PDEQGW

SEQ ID NO: 7379 - protein, 6 aa, synthetic construct
PDEQGY

SEQ ID NO: 7380 - protein, 6 aa, synthetic construct
PDEQHD

SEQ ID NO: 7381 - protein, 6 aa, synthetic construct
PDEQHE

SEQ ID NO: 7382 - protein, 6 aa, synthetic construct
PDEQHF

SEQ ID NO: 7383 - protein, 6 aa, synthetic construct
PDEQHW

SEQ ID NO: 7384 - protein, 6 aa, synthetic construct
PDEQHY

SEQ ID NO: 7385 - protein, 6 aa, synthetic construct
PDEQID

SEQ ID NO: 7386 - protein, 6 aa, synthetic construct
PDEQIE

SEQ ID NO: 7387 - protein, 6 aa, synthetic construct
PDEQIF

SEQ ID NO: 7388 - protein, 6 aa, synthetic construct
PDEQIW

SEQ ID NO: 7389 - protein, 6 aa, synthetic construct
PDEQIY

SEQ ID NO: 7390 - protein, 6 aa, synthetic construct
PDEQLD

SEQ ID NO: 7391 - protein, 6 aa, synthetic construct
PDEQLE

SEQ ID NO: 7392 - protein, 6 aa, synthetic construct
PDEQLF

SEQ ID NO: 7393 - protein, 6 aa, synthetic construct
PDEQLW

SEQ ID NO: 7394 - protein, 6 aa, synthetic construct
PDEQLY

SEQ ID NO: 7395 - protein, 6 aa, synthetic construct
PDEQKD

SEQ ID NO: 7396 - protein, 6 aa, synthetic construct
PDEQKE

SEQ ID NO: 7397 - protein, 6 aa, synthetic construct
PDEQKF

SEQ ID NO: 7398 - protein, 6 aa, synthetic construct
PDEQKW

SEQ ID NO: 7399 - protein, 6 aa, synthetic construct
PDEQKY

SEQ ID NO: 7400 - protein, 6 aa, synthetic construct
PDEQMD

SEQ ID NO: 7401 - protein, 6 aa, synthetic construct
PDEQME

SEQ ID NO: 7402 - protein, 6 aa, synthetic construct
PDEQMF

SEQ ID NO: 7403 - protein, 6 aa, synthetic construct
PDEQMW

SEQ ID NO: 7404 - protein, 6 aa, synthetic construct
PDEQMY

SEQ ID NO: 7405 - protein, 6 aa, synthetic construct
PDEQFD

SEQ ID NO: 7406 - protein, 6 aa, synthetic construct
PDEQFE

SEQ ID NO: 7407 - protein, 6 aa, synthetic construct
PDEQFF

SEQ ID NO: 7408 - protein, 6 aa, synthetic construct
PDEQFW

SEQ ID NO: 7409 - protein, 6 aa, synthetic construct
PDEQFY

SEQ ID NO: 7410 - protein, 6 aa, synthetic construct
PDEQPD

SEQ ID NO: 7411 - protein, 6 aa, synthetic construct
PDEQPE

SEQ ID NO: 7412 - protein, 6 aa, synthetic construct
PDEQPF

SEQ ID NO: 7413 - protein, 6 aa, synthetic construct
PDEQPW

SEQ ID NO: 7414 - protein, 6 aa, synthetic construct
PDEQPY

SEQ ID NO: 7415 - protein, 6 aa, synthetic construct
PDEQSD

SEQ ID NO: 7416 - protein, 6 aa, synthetic construct
PDEQSE

SEQ ID NO: 7417 - protein, 6 aa, synthetic construct
PDEQSF

SEQ ID NO: 7418 - protein, 6 aa, synthetic construct
PDEQSW

SEQ ID NO: 7419 - protein, 6 aa, synthetic construct
PDEQSY

SEQ ID NO: 7420 - protein, 6 aa, synthetic construct
PDEQTD

SEQ ID NO: 7421 - protein, 6 aa, synthetic construct
PDEQTE

SEQ ID NO: 7422 - protein, 6 aa, synthetic construct
PDEQTF

SEQ ID NO: 7423 - protein, 6 aa, synthetic construct
PDEQTW

SEQ ID NO: 7424 - protein, 6 aa, synthetic construct
PDEQTY

SEQ ID NO: 7425 - protein, 6 aa, synthetic construct
PDEQWD

SEQ ID NO: 7426 - protein, 6 aa, synthetic construct
PDEQWE

SEQ ID NO: 7427 - protein, 6 aa, synthetic construct
PDEQWF

SEQ ID NO: 7428 - protein, 6 aa, synthetic construct
PDEQWW

SEQ ID NO: 7429 - protein, 6 aa, synthetic construct
PDEQWY

SEQ ID NO: 7430 - protein, 6 aa, synthetic construct
PDEQYD

SEQ ID NO: 7431 - protein, 6 aa, synthetic construct
PDEQYE

SEQ ID NO: 7432 - protein, 6 aa, synthetic construct
PDEQYF

SEQ ID NO: 7433 - protein, 6 aa, synthetic construct
PDEQYW

SEQ ID NO: 7434 - protein, 6 aa, synthetic construct
PDEQYY

SEQ ID NO: 7435 - protein, 6 aa, synthetic construct
PDEQVD

SEQ ID NO: 7436 - protein, 6 aa, synthetic construct
PDEQVE

SEQ ID NO: 7437 - protein, 6 aa, synthetic construct
PDEQVF

SEQ ID NO: 7438 - protein, 6 aa, synthetic construct
PDEQVW

SEQ ID NO: 7439 - protein, 6 aa, synthetic construct
PDEQVY

SEQ ID NO: 7440 - protein, 6 aa, synthetic construct
PDEEAD

SEQ ID NO: 7441 - protein, 6 aa, synthetic construct
PDEEAE

SEQ ID NO: 7442 - protein, 6 aa, synthetic construct
PDEEAF

SEQ ID NO: 7443 - protein, 6 aa, synthetic construct
PDEEAW

SEQ ID NO: 7444 - protein, 6 aa, synthetic construct
PDEEAY

SEQ ID NO: 7445 - protein, 6 aa, synthetic construct
PDEERD

SEQ ID NO: 7446 - protein, 6 aa, synthetic construct
PDEERE

SEQ ID NO: 7447 - protein, 6 aa, synthetic construct
PDEERF

SEQ ID NO: 7448 - protein, 6 aa, synthetic construct
PDEERW

SEQ ID NO: 7449 - protein, 6 aa, synthetic construct
PDEERY

SEQ ID NO: 7450 - protein, 6 aa, synthetic construct
PDEEND

SEQ ID NO: 7451 - protein, 6 aa, synthetic construct
PDEENE

SEQ ID NO: 7452 - protein, 6 aa, synthetic construct
PDEENF

SEQ ID NO: 7453 - protein, 6 aa, synthetic construct
PDEENW

SEQ ID NO: 7454 - protein, 6 aa, synthetic construct
PDEENY

SEQ ID NO: 7455 - protein, 6 aa, synthetic construct
PDEEDD

SEQ ID NO: 7456 - protein, 6 aa, synthetic construct
PDEEDE

SEQ ID NO: 7457 - protein, 6 aa, synthetic construct
PDEEDF

SEQ ID NO: 7458 - protein, 6 aa, synthetic construct
PDEEDW

SEQ ID NO: 7459 - protein, 6 aa, synthetic construct
PDEEDY

SEQ ID NO: 7460 - protein, 6 aa, synthetic construct
PDEECD

SEQ ID NO: 7461 - protein, 6 aa, synthetic construct
PDEECE

SEQ ID NO: 7462 - protein, 6 aa, synthetic construct
PDEECF

SEQ ID NO: 7463 - protein, 6 aa, synthetic construct
PDEECW

SEQ ID NO: 7464 - protein, 6 aa, synthetic construct
PDEECY

SEQ ID NO: 7465 - protein, 6 aa, synthetic construct
PDEEQD

SEQ ID NO: 7466 - protein, 6 aa, synthetic construct
PDEEQE

SEQ ID NO: 7467 - protein, 6 aa, synthetic construct
PDEEQF

SEQ ID NO: 7468 - protein, 6 aa, synthetic construct
PDEEQW

SEQ ID NO: 7469 - protein, 6 aa, synthetic construct
PDEEQY

SEQ ID NO: 7470 - protein, 6 aa, synthetic construct
PDEEED

SEQ ID NO: 7471 - protein, 6 aa, synthetic construct
PDEEEE

SEQ ID NO: 7472 - protein, 6 aa, synthetic construct
PDEEEF

SEQ ID NO: 7473 - protein, 6 aa, synthetic construct
PDEEEW

SEQ ID NO: 7474 - protein, 6 aa, synthetic construct
PDEEEY

SEQ ID NO: 7475 - protein, 6 aa, synthetic construct
PDEEGD

SEQ ID NO: 7476 - protein, 6 aa, synthetic construct
PDEEGE

SEQ ID NO: 7477 - protein, 6 aa, synthetic construct
PDEEGF

SEQ ID NO: 7478 - protein, 6 aa, synthetic construct
PDEEGW

SEQ ID NO: 7479 - protein, 6 aa, synthetic construct
PDEEGY

SEQ ID NO: 7480 - protein, 6 aa, synthetic construct
PDEEHD

SEQ ID NO: 7481 - protein, 6 aa, synthetic construct
PDEEHE

SEQ ID NO: 7482 - protein, 6 aa, synthetic construct
PDEEHF

SEQ ID NO: 7483 - protein, 6 aa, synthetic construct
PDEEHW

SEQ ID NO: 7484 - protein, 6 aa, synthetic construct
PDEEHY

SEQ ID NO: 7485 - protein, 6 aa, synthetic construct
PDEEID

SEQ ID NO: 7486 - protein, 6 aa, synthetic construct
PDEEIE

SEQ ID NO: 7487 - protein, 6 aa, synthetic construct
PDEEIF

SEQ ID NO: 7488 - protein, 6 aa, synthetic construct
PDEEIW

SEQ ID NO: 7489 - protein, 6 aa, synthetic construct
PDEEIY

SEQ ID NO: 7490 - protein, 6 aa, synthetic construct
PDEELD

SEQ ID NO: 7491 - protein, 6 aa, synthetic construct
PDEELE

SEQ ID NO: 7492 - protein, 6 aa, synthetic construct
PDEELF

SEQ ID NO: 7493 - protein, 6 aa, synthetic construct
PDEELW

SEQ ID NO: 7494 - protein, 6 aa, synthetic construct
PDEELY

SEQ ID NO: 7495 - protein, 6 aa, synthetic construct
PDEEKD

SEQ ID NO: 7496 - protein, 6 aa, synthetic construct
PDEEKE

SEQ ID NO: 7497 - protein, 6 aa, synthetic construct
PDEEKF

SEQ ID NO: 7498 - protein, 6 aa, synthetic construct
PDEEKW

SEQ ID NO: 7499 - protein, 6 aa, synthetic construct
PDEEKY

SEQ ID NO: 7500 - protein, 6 aa, synthetic construct
PDEEMD

SEQ ID NO: 7501 - protein, 6 aa, synthetic construct
PDEEME

SEQ ID NO: 7502 - protein, 6 aa, synthetic construct
PDEEMF

SEQ ID NO: 7503 - protein, 6 aa, synthetic construct
PDEEMW

SEQ ID NO: 7504 - protein, 6 aa, synthetic construct
PDEEMY

SEQ ID NO: 7505 - protein, 6 aa, synthetic construct
PDEEFD

SEQ ID NO: 7506 - protein, 6 aa, synthetic construct
PDEEFE

SEQ ID NO: 7507 - protein, 6 aa, synthetic construct
PDEEFF

SEQ ID NO: 7508 - protein, 6 aa, synthetic construct
PDEEFW

SEQ ID NO: 7509 - protein, 6 aa, synthetic construct
PDEEFY

SEQ ID NO: 7510 - protein, 6 aa, synthetic construct
PDEEPD

SEQ ID NO: 7511 - protein, 6 aa, synthetic construct
PDEEPE

SEQ ID NO: 7512 - protein, 6 aa, synthetic construct
PDEEPF

SEQ ID NO: 7513 - protein, 6 aa, synthetic construct
PDEEPW

SEQ ID NO: 7514 - protein, 6 aa, synthetic construct
PDEEPY

SEQ ID NO: 7515 - protein, 6 aa, synthetic construct
PDEESD

SEQ ID NO: 7516 - protein, 6 aa, synthetic construct
PDEESE

SEQ ID NO: 7517 - protein, 6 aa, synthetic construct
PDEESF

SEQ ID NO: 7518 - protein, 6 aa, synthetic construct
PDEESW

SEQ ID NO: 7519 - protein, 6 aa, synthetic construct
PDEESY

SEQ ID NO: 7520 - protein, 6 aa, synthetic construct
PDEETD

SEQ ID NO: 7521 - protein, 6 aa, synthetic construct
PDEETE

SEQ ID NO: 7522 - protein, 6 aa, synthetic construct
PDEETF

SEQ ID NO: 7523 - protein, 6 aa, synthetic construct
PDEETW

SEQ ID NO: 7524 - protein, 6 aa, synthetic construct
PDEETY

SEQ ID NO: 7525 - protein, 6 aa, synthetic construct
PDEEWD

SEQ ID NO: 7526 - protein, 6 aa, synthetic construct
PDEEWE

SEQ ID NO: 7527 - protein, 6 aa, synthetic construct
PDEEWF

SEQ ID NO: 7528 - protein, 6 aa, synthetic construct
PDEEWW

SEQ ID NO: 7529 - protein, 6 aa, synthetic construct
PDEEWY

SEQ ID NO: 7530 - protein, 6 aa, synthetic construct
PDEEYD

SEQ ID NO: 7531 - protein, 6 aa, synthetic construct
PDEEYE

SEQ ID NO: 7532 - protein, 6 aa, synthetic construct
PDEEYF

SEQ ID NO: 7533 - protein, 6 aa, synthetic construct
PDEEYW

SEQ ID NO: 7534 - protein, 6 aa, synthetic construct
PDEEYY

SEQ ID NO: 7535 - protein, 6 aa, synthetic construct
PDEEVD

SEQ ID NO: 7536 - protein, 6 aa, synthetic construct
PDEEVE

SEQ ID NO: 7537 - protein, 6 aa, synthetic construct
PDEEVF

SEQ ID NO: 7538 - protein, 6 aa, synthetic construct
PDEEVW

SEQ ID NO: 7539 - protein, 6 aa, synthetic construct
PDEEVY

SEQ ID NO: 7540 - protein, 6 aa, synthetic construct
PDEGAD

SEQ ID NO: 7541 - protein, 6 aa, synthetic construct
PDEGAE

SEQ ID NO: 7542 - protein, 6 aa, synthetic construct
PDEGAF

SEQ ID NO: 7543 - protein, 6 aa, synthetic construct
PDEGAW

SEQ ID NO: 7544 - protein, 6 aa, synthetic construct
PDEGAY

SEQ ID NO: 7545 - protein, 6 aa, synthetic construct
PDEGRD

SEQ ID NO: 7546 - protein, 6 aa, synthetic construct
PDEGRE

SEQ ID NO: 7547 - protein, 6 aa, synthetic construct
PDEGRF

SEQ ID NO: 7548 - protein, 6 aa, synthetic construct
PDEGRW

SEQ ID NO: 7549 - protein, 6 aa, synthetic construct
PDEGRY

SEQ ID NO: 7550 - protein, 6 aa, synthetic construct
PDEGND

SEQ ID NO: 7551 - protein, 6 aa, synthetic construct
PDEGNE

SEQ ID NO: 7552 - protein, 6 aa, synthetic construct
PDEGNF

SEQ ID NO: 7553 - protein, 6 aa, synthetic construct
PDEGNW

SEQ ID NO: 7554 - protein, 6 aa, synthetic construct
PDEGNY

SEQ ID NO: 7555 - protein, 6 aa, synthetic construct
PDEGDD

SEQ ID NO: 7556 - protein, 6 aa, synthetic construct
PDEGDE

SEQ ID NO: 7557 - protein, 6 aa, synthetic construct
PDEGDF

SEQ ID NO: 7558 - protein, 6 aa, synthetic construct
PDEGDW

SEQ ID NO: 7559 - protein, 6 aa, synthetic construct
PDEGDY

SEQ ID NO: 7560 - protein, 6 aa, synthetic construct
PDEGCD

SEQ ID NO: 7561 - protein, 6 aa, synthetic construct
PDEGCE

SEQ ID NO: 7562 - protein, 6 aa, synthetic construct
PDEGCF

SEQ ID NO: 7563 - protein, 6 aa, synthetic construct
PDEGCW

SEQ ID NO: 7564 - protein, 6 aa, synthetic construct
PDEGCY

SEQ ID NO: 7565 - protein, 6 aa, synthetic construct
PDEGQD

SEQ ID NO: 7566 - protein, 6 aa, synthetic construct
PDEGQE

SEQ ID NO: 7567 - protein, 6 aa, synthetic construct
PDEGQF

SEQ ID NO: 7568 - protein, 6 aa, synthetic construct
PDEGQW

SEQ ID NO: 7569 - protein, 6 aa, synthetic construct
PDEGQY

SEQ ID NO: 7570 - protein, 6 aa, synthetic construct
PDEGED

SEQ ID NO: 7571 - protein, 6 aa, synthetic construct
PDEGEE

SEQ ID NO: 7572 - protein, 6 aa, synthetic construct
PDEGEF

SEQ ID NO: 7573 - protein, 6 aa, synthetic construct
PDEGEW

SEQ ID NO: 7574 - protein, 6 aa, synthetic construct
PDEGEY

SEQ ID NO: 7575 - protein, 6 aa, synthetic construct
PDEGGD

SEQ ID NO: 7576 - protein, 6 aa, synthetic construct
PDEGGE

SEQ ID NO: 7577 - protein, 6 aa, synthetic construct
PDEGGF

SEQ ID NO: 7578 - protein, 6 aa, synthetic construct
PDEGGW

SEQ ID NO: 7579 - protein, 6 aa, synthetic construct
PDEGGY

SEQ ID NO: 7580 - protein, 6 aa, synthetic construct
PDEGHD

SEQ ID NO: 7581 - protein, 6 aa, synthetic construct
PDEGHE

SEQ ID NO: 7582 - protein, 6 aa, synthetic construct
PDEGHF

SEQ ID NO: 7583 - protein, 6 aa, synthetic construct
PDEGHW

SEQ ID NO: 7584 - protein, 6 aa, synthetic construct
PDEGHY

SEQ ID NO: 7585 - protein, 6 aa, synthetic construct
PDEGID

SEQ ID NO: 7586 - protein, 6 aa, synthetic construct
PDEGIE

SEQ ID NO: 7587 - protein, 6 aa, synthetic construct
PDEGIF

SEQ ID NO: 7588 - protein, 6 aa, synthetic construct
PDEGIW

SEQ ID NO: 7589 - protein, 6 aa, synthetic construct
PDEGIY

SEQ ID NO: 7590 - protein, 6 aa, synthetic construct
PDEGLD

SEQ ID NO: 7591 - protein, 6 aa, synthetic construct
PDEGLE

SEQ ID NO: 7592 - protein, 6 aa, synthetic construct
PDEGLF

SEQ ID NO: 7593 - protein, 6 aa, synthetic construct
PDEGLW

SEQ ID NO: 7594 - protein, 6 aa, synthetic construct
PDEGLY

SEQ ID NO: 7595 - protein, 6 aa, synthetic construct
PDEGKD

SEQ ID NO: 7596 - protein, 6 aa, synthetic construct
PDEGKE

SEQ ID NO: 7597 - protein, 6 aa, synthetic construct
PDEGKF

SEQ ID NO: 7598 - protein, 6 aa, synthetic construct
PDEGKW

SEQ ID NO: 7599 - protein, 6 aa, synthetic construct
PDEGKY

SEQ ID NO: 7600 - protein, 6 aa, synthetic construct
PDEGMD

SEQ ID NO: 7601 - protein, 6 aa, synthetic construct
PDEGME

SEQ ID NO: 7602 - protein, 6 aa, synthetic construct
PDEGMF

SEQ ID NO: 7603 - protein, 6 aa, synthetic construct
PDEGMW

SEQ ID NO: 7604 - protein, 6 aa, synthetic construct
PDEGMY

SEQ ID NO: 7605 - protein, 6 aa, synthetic construct
PDEGFD

SEQ ID NO: 7606 - protein, 6 aa, synthetic construct
PDEGFE

SEQ ID NO: 7607 - protein, 6 aa, synthetic construct
PDEGFF

SEQ ID NO: 7608 - protein, 6 aa, synthetic construct
PDEGFW

SEQ ID NO: 7609 - protein, 6 aa, synthetic construct
PDEGFY

SEQ ID NO: 7610 - protein, 6 aa, synthetic construct
PDEGPD

SEQ ID NO: 7611 - protein, 6 aa, synthetic construct
PDEGPE

SEQ ID NO: 7612 - protein, 6 aa, synthetic construct
PDEGPF

SEQ ID NO: 7613 - protein, 6 aa, synthetic construct
PDEGPW

SEQ ID NO: 7614 - protein, 6 aa, synthetic construct
PDEGPY

SEQ ID NO: 7615 - protein, 6 aa, synthetic construct
PDEGSD

SEQ ID NO: 7616 - protein, 6 aa, synthetic construct
PDEGSE

SEQ ID NO: 7617 - protein, 6 aa, synthetic construct
PDEGSF

SEQ ID NO: 7618 - protein, 6 aa, synthetic construct
PDEGSW

SEQ ID NO: 7619 - protein, 6 aa, synthetic construct
PDEGSY

SEQ ID NO: 7620 - protein, 6 aa, synthetic construct
PDEGTD

SEQ ID NO: 7621 - protein, 6 aa, synthetic construct
PDEGTE

SEQ ID NO: 7622 - protein, 6 aa, synthetic construct
PDEGTF

SEQ ID NO: 7623 - protein, 6 aa, synthetic construct
PDEGTW

SEQ ID NO: 7624 - protein, 6 aa, synthetic construct
PDEGTY

SEQ ID NO: 7625 - protein, 6 aa, synthetic construct
PDEGWD

SEQ ID NO: 7626 - protein, 6 aa, synthetic construct
PDEGWE

SEQ ID NO: 7627 - protein, 6 aa, synthetic construct
PDEGWF

SEQ ID NO: 7628 - protein, 6 aa, synthetic construct
PDEGWW

SEQ ID NO: 7629 - protein, 6 aa, synthetic construct
PDEGWY

SEQ ID NO: 7630 - protein, 6 aa, synthetic construct
PDEGYD

SEQ ID NO: 7631 - protein, 6 aa, synthetic construct
PDEGYE

SEQ ID NO: 7632 - protein, 6 aa, synthetic construct
PDEGYF

SEQ ID NO: 7633 - protein, 6 aa, synthetic construct
PDEGYW

SEQ ID NO: 7634 - protein, 6 aa, synthetic construct
PDEGYY

SEQ ID NO: 7635 - protein, 6 aa, synthetic construct
PDEGVD

SEQ ID NO: 7636 - protein, 6 aa, synthetic construct
PDEGVE

SEQ ID NO: 7637 - protein, 6 aa, synthetic construct
PDEGVF

SEQ ID NO: 7638 - protein, 6 aa, synthetic construct
PDEGVW

SEQ ID NO: 7639 - protein, 6 aa, synthetic construct
PDEGVY

SEQ ID NO: 7640 - protein, 6 aa, synthetic construct
PDEHAD

SEQ ID NO: 7641 - protein, 6 aa, synthetic construct
PDEHAE

SEQ ID NO: 7642 - protein, 6 aa, synthetic construct
PDEHAF

SEQ ID NO: 7643 - protein, 6 aa, synthetic construct
PDEHAW

SEQ ID NO: 7644 - protein, 6 aa, synthetic construct
PDEHAY

SEQ ID NO: 7645 - protein, 6 aa, synthetic construct
PDEHRD

SEQ ID NO: 7646 - protein, 6 aa, synthetic construct
PDEHRE

SEQ ID NO: 7647 - protein, 6 aa, synthetic construct
PDEHRF

SEQ ID NO: 7648 - protein, 6 aa, synthetic construct
PDEHRW

SEQ ID NO: 7649 - protein, 6 aa, synthetic construct
PDEHRY

SEQ ID NO: 7650 - protein, 6 aa, synthetic construct
PDEHND

SEQ ID NO: 7651 - protein, 6 aa, synthetic construct
PDEHNE

SEQ ID NO: 7652 - protein, 6 aa, synthetic construct
PDEHNF

SEQ ID NO: 7653 - protein, 6 aa, synthetic construct
PDEHNW

SEQ ID NO: 7654 - protein, 6 aa, synthetic construct
PDEHNY

SEQ ID NO: 7655 - protein, 6 aa, synthetic construct
PDEHDD

SEQ ID NO: 7656 - protein, 6 aa, synthetic construct
PDEHDE

SEQ ID NO: 7657 - protein, 6 aa, synthetic construct
PDEHDF

SEQ ID NO: 7658 - protein, 6 aa, synthetic construct
PDEHDW

SEQ ID NO: 7659 - protein, 6 aa, synthetic construct
PDEHDY

SEQ ID NO: 7660 - protein, 6 aa, synthetic construct
PDEHCD

SEQ ID NO: 7661 - protein, 6 aa, synthetic construct
PDEHCE

SEQ ID NO: 7662 - protein, 6 aa, synthetic construct
PDEHCF

SEQ ID NO: 7663 - protein, 6 aa, synthetic construct
PDEHCW

SEQ ID NO: 7664 - protein, 6 aa, synthetic construct
PDEHCY

SEQ ID NO: 7665 - protein, 6 aa, synthetic construct
PDEHQD

SEQ ID NO: 7666 - protein, 6 aa, synthetic construct
PDEHQE

SEQ ID NO: 7667 - protein, 6 aa, synthetic construct
PDEHQF

SEQ ID NO: 7668 - protein, 6 aa, synthetic construct
PDEHQW

SEQ ID NO: 7669 - protein, 6 aa, synthetic construct
PDEHQY

SEQ ID NO: 7670 - protein, 6 aa, synthetic construct
PDEHED

SEQ ID NO: 7671 - protein, 6 aa, synthetic construct
PDEHEE

SEQ ID NO: 7672 - protein, 6 aa, synthetic construct
PDEHEF

SEQ ID NO: 7673 - protein, 6 aa, synthetic construct
PDEHEW

SEQ ID NO: 7674 - protein, 6 aa, synthetic construct
PDEHEY

SEQ ID NO: 7675 - protein, 6 aa, synthetic construct
PDEHGD

SEQ ID NO: 7676 - protein, 6 aa, synthetic construct
PDEHGE

SEQ ID NO: 7677 - protein, 6 aa, synthetic construct
PDEHGF

SEQ ID NO: 7678 - protein, 6 aa, synthetic construct
PDEHGW

SEQ ID NO: 7679 - protein, 6 aa, synthetic construct
PDEHGY

SEQ ID NO: 7680 - protein, 6 aa, synthetic construct
PDEHHD

SEQ ID NO: 7681 - protein, 6 aa, synthetic construct
PDEHHE

SEQ ID NO: 7682 - protein, 6 aa, synthetic construct
PDEHHF

SEQ ID NO: 7683 - protein, 6 aa, synthetic construct
PDEHHW

SEQ ID NO: 7684 - protein, 6 aa, synthetic construct
PDEHHY

SEQ ID NO: 7685 - protein, 6 aa, synthetic construct
PDEHID

SEQ ID NO: 7686 - protein, 6 aa, synthetic construct
PDEHIE

SEQ ID NO: 7687 - protein, 6 aa, synthetic construct
PDEHIF

SEQ ID NO: 7688 - protein, 6 aa, synthetic construct
PDEHIW

SEQ ID NO: 7689 - protein, 6 aa, synthetic construct
PDEHIY

SEQ ID NO: 7690 - protein, 6 aa, synthetic construct
PDEHLD

SEQ ID NO: 7691 - protein, 6 aa, synthetic construct
PDEHLE

SEQ ID NO: 7692 - protein, 6 aa, synthetic construct
PDEHLF

SEQ ID NO: 7693 - protein, 6 aa, synthetic construct
PDEHLW

SEQ ID NO: 7694 - protein, 6 aa, synthetic construct
PDEHLY

SEQ ID NO: 7695 - protein, 6 aa, synthetic construct
PDEHKD

SEQ ID NO: 7696 - protein, 6 aa, synthetic construct
PDEHKE

SEQ ID NO: 7697 - protein, 6 aa, synthetic construct
PDEHKF

SEQ ID NO: 7698 - protein, 6 aa, synthetic construct
PDEHKW

SEQ ID NO: 7699 - protein, 6 aa, synthetic construct
PDEHKY

SEQ ID NO: 7700 - protein, 6 aa, synthetic construct
PDEHMD

SEQ ID NO: 7701 - protein, 6 aa, synthetic construct
PDEHME

SEQ ID NO: 7702 - protein, 6 aa, synthetic construct
PDEHMF

SEQ ID NO: 7703 - protein, 6 aa, synthetic construct
PDEHMW

SEQ ID NO: 7704 - protein, 6 aa, synthetic construct
PDEHMY

SEQ ID NO: 7705 - protein, 6 aa, synthetic construct
PDEHFD

SEQ ID NO: 7706 - protein, 6 aa, synthetic construct
PDEHFE

SEQ ID NO: 7707 - protein, 6 aa, synthetic construct
PDEHFF

SEQ ID NO: 7708 - protein, 6 aa, synthetic construct
PDEHFW

SEQ ID NO: 7709 - protein, 6 aa, synthetic construct
PDEHFY

SEQ ID NO: 7710 - protein, 6 aa, synthetic construct
PDEHPD

SEQ ID NO: 7711 - protein, 6 aa, synthetic construct
PDEHPE

SEQ ID NO: 7712 - protein, 6 aa, synthetic construct
PDEHPF

SEQ ID NO: 7713 - protein, 6 aa, synthetic construct
PDEHPW

SEQ ID NO: 7714 - protein, 6 aa, synthetic construct
PDEHPY

SEQ ID NO: 7715 - protein, 6 aa, synthetic construct
PDEHSD

SEQ ID NO: 7716 - protein, 6 aa, synthetic construct
PDEHSE

SEQ ID NO: 7717 - protein, 6 aa, synthetic construct
PDEHSF

SEQ ID NO: 7718 - protein, 6 aa, synthetic construct
PDEHSW

SEQ ID NO: 7719 - protein, 6 aa, synthetic construct
PDEHSY

SEQ ID NO: 7720 - protein, 6 aa, synthetic construct
PDEHTD

SEQ ID NO: 7721 - protein, 6 aa, synthetic construct
PDEHTE

SEQ ID NO: 7722 - protein, 6 aa, synthetic construct
PDEHTF

SEQ ID NO: 7723 - protein, 6 aa, synthetic construct
PDEHTW

SEQ ID NO: 7724 - protein, 6 aa, synthetic construct
PDEHTY

SEQ ID NO: 7725 - protein, 6 aa, synthetic construct
PDEHWD

SEQ ID NO: 7726 - protein, 6 aa, synthetic construct
PDEHWE

SEQ ID NO: 7727 - protein, 6 aa, synthetic construct
PDEHWF

SEQ ID NO: 7728 - protein, 6 aa, synthetic construct
PDEHWW

SEQ ID NO: 7729 - protein, 6 aa, synthetic construct
PDEHWY

SEQ ID NO: 7730 - protein, 6 aa, synthetic construct
PDEHYD

SEQ ID NO: 7731 - protein, 6 aa, synthetic construct
PDEHYE

SEQ ID NO: 7732 - protein, 6 aa, synthetic construct
PDEHYF

SEQ ID NO: 7733 - protein, 6 aa, synthetic construct
PDEHYW

SEQ ID NO: 7734 - protein, 6 aa, synthetic construct
PDEHYY

SEQ ID NO: 7735 - protein, 6 aa, synthetic construct
PDEHVD

SEQ ID NO: 7736 - protein, 6 aa, synthetic construct
PDEHVE

SEQ ID NO: 7737 - protein, 6 aa, synthetic construct
PDEHVF

SEQ ID NO: 7738 - protein, 6 aa, synthetic construct
PDEHVW

SEQ ID NO: 7739 - protein, 6 aa, synthetic construct
PDEHVY

SEQ ID NO: 7740 - protein, 6 aa, synthetic construct
PDEIAD

SEQ ID NO: 7741 - protein, 6 aa, synthetic construct
PDEIAE

SEQ ID NO: 7742 - protein, 6 aa, synthetic construct
PDEIAF

SEQ ID NO: 7743 - protein, 6 aa, synthetic construct
PDEIAW

SEQ ID NO: 7744 - protein, 6 aa, synthetic construct
PDEIAY

SEQ ID NO: 7745 - protein, 6 aa, synthetic construct
PDEIRD

SEQ ID NO: 7746 - protein, 6 aa, synthetic construct
PDEIRE

SEQ ID NO: 7747 - protein, 6 aa, synthetic construct
PDEIRF

SEQ ID NO: 7748 - protein, 6 aa, synthetic construct
PDEIRW

SEQ ID NO: 7749 - protein, 6 aa, synthetic construct
PDEIRY

SEQ ID NO: 7750 - protein, 6 aa, synthetic construct
PDEIND

SEQ ID NO: 7751 - protein, 6 aa, synthetic construct
PDEINE

SEQ ID NO: 7752 - protein, 6 aa, synthetic construct
PDEINF

SEQ ID NO: 7753 - protein, 6 aa, synthetic construct
PDEINW

SEQ ID NO: 7754 - protein, 6 aa, synthetic construct
PDEINY

SEQ ID NO: 7755 - protein, 6 aa, synthetic construct
PDEIDD

SEQ ID NO: 7756 - protein, 6 aa, synthetic construct
PDEIDE

SEQ ID NO: 7757 - protein, 6 aa, synthetic construct
PDEIDF

SEQ ID NO: 7758 - protein, 6 aa, synthetic construct
PDEIDW

SEQ ID NO: 7759 - protein, 6 aa, synthetic construct
PDEIDY

SEQ ID NO: 7760 - protein, 6 aa, synthetic construct
PDEICD

SEQ ID NO: 7761 - protein, 6 aa, synthetic construct
PDEICE

SEQ ID NO: 7762 - protein, 6 aa, synthetic construct
PDEICF

SEQ ID NO: 7763 - protein, 6 aa, synthetic construct
PDEICW

SEQ ID NO: 7764 - protein, 6 aa, synthetic construct
PDEICY

SEQ ID NO: 7765 - protein, 6 aa, synthetic construct
PDEIQD

SEQ ID NO: 7766 - protein, 6 aa, synthetic construct
PDEIQE

SEQ ID NO: 7767 - protein, 6 aa, synthetic construct
PDEIQF

SEQ ID NO: 7768 - protein, 6 aa, synthetic construct
PDEIQW

SEQ ID NO: 7769 - protein, 6 aa, synthetic construct
PDEIQY

SEQ ID NO: 7770 - protein, 6 aa, synthetic construct
PDEIED

SEQ ID NO: 7771 - protein, 6 aa, synthetic construct
PDEIEE

SEQ ID NO: 7772 - protein, 6 aa, synthetic construct
PDEIEF

SEQ ID NO: 7773 - protein, 6 aa, synthetic construct
PDEIEW

SEQ ID NO: 7774 - protein, 6 aa, synthetic construct
PDEIEY

SEQ ID NO: 7775 - protein, 6 aa, synthetic construct
PDEIGD

SEQ ID NO: 7776 - protein, 6 aa, synthetic construct
PDEIGE

SEQ ID NO: 7777 - protein, 6 aa, synthetic construct
PDEIGF

SEQ ID NO: 7778 - protein, 6 aa, synthetic construct
PDEIGW

SEQ ID NO: 7779 - protein, 6 aa, synthetic construct
PDEIGY

SEQ ID NO: 7780 - protein, 6 aa, synthetic construct
PDEIHD

SEQ ID NO: 7781 - protein, 6 aa, synthetic construct
PDEIHE

SEQ ID NO: 7782 - protein, 6 aa, synthetic construct
PDEIHF

SEQ ID NO: 7783 - protein, 6 aa, synthetic construct
PDEIHW

SEQ ID NO: 7784 - protein, 6 aa, synthetic construct
PDEIHY

SEQ ID NO: 7785 - protein, 6 aa, synthetic construct
PDEIID

SEQ ID NO: 7786 - protein, 6 aa, synthetic construct
PDEIIE

SEQ ID NO: 7787 - protein, 6 aa, synthetic construct
PDEIIF

SEQ ID NO: 7788 - protein, 6 aa, synthetic construct
PDEIIW

SEQ ID NO: 7789 - protein, 6 aa, synthetic construct
PDEIIY

SEQ ID NO: 7790 - protein, 6 aa, synthetic construct
PDEILD

SEQ ID NO: 7791 - protein, 6 aa, synthetic construct
PDEILE

SEQ ID NO: 7792 - protein, 6 aa, synthetic construct
PDEILF

SEQ ID NO: 7793 - protein, 6 aa, synthetic construct
PDEILW

SEQ ID NO: 7794 - protein, 6 aa, synthetic construct
PDEILY

SEQ ID NO: 7795 - protein, 6 aa, synthetic construct
PDEIKD

SEQ ID NO: 7796 - protein, 6 aa, synthetic construct
PDEIKE

SEQ ID NO: 7797 - protein, 6 aa, synthetic construct
PDEIKF

SEQ ID NO: 7798 - protein, 6 aa, synthetic construct
PDEIKW

SEQ ID NO: 7799 - protein, 6 aa, synthetic construct
PDEIKY

SEQ ID NO: 7800 - protein, 6 aa, synthetic construct
PDEIMD

SEQ ID NO: 7801 - protein, 6 aa, synthetic construct
PDEIME

SEQ ID NO: 7802 - protein, 6 aa, synthetic construct
PDEIMF

SEQ ID NO: 7803 - protein, 6 aa, synthetic construct
PDEIMW

SEQ ID NO: 7804 - protein, 6 aa, synthetic construct
PDEIMY

SEQ ID NO: 7805 - protein, 6 aa, synthetic construct
PDEIFD

SEQ ID NO: 7806 - protein, 6 aa, synthetic construct
PDEIFE

SEQ ID NO: 7807 - protein, 6 aa, synthetic construct
PDEIFF

SEQ ID NO: 7808 - protein, 6 aa, synthetic construct
PDEIFW

SEQ ID NO: 7809 - protein, 6 aa, synthetic construct
PDEIFY

SEQ ID NO: 7810 - protein, 6 aa, synthetic construct
PDEIPD

SEQ ID NO: 7811 - protein, 6 aa, synthetic construct
PDEIPE

SEQ ID NO: 7812 - protein, 6 aa, synthetic construct
PDEIPF

SEQ ID NO: 7813 - protein, 6 aa, synthetic construct
PDEIPW

SEQ ID NO: 7814 - protein, 6 aa, synthetic construct
PDEIPY

SEQ ID NO: 7815 - protein, 6 aa, synthetic construct
PDEISD

SEQ ID NO: 7816 - protein, 6 aa, synthetic construct
PDEISE

SEQ ID NO: 7817 - protein, 6 aa, synthetic construct
PDEISF

SEQ ID NO: 7818 - protein, 6 aa, synthetic construct
PDEISW

SEQ ID NO: 7819 - protein, 6 aa, synthetic construct
PDEISY

SEQ ID NO: 7820 - protein, 6 aa, synthetic construct
PDEITD

SEQ ID NO: 7821 - protein, 6 aa, synthetic construct
PDEITE

SEQ ID NO: 7822 - protein, 6 aa, synthetic construct
PDEITF

SEQ ID NO: 7823 - protein, 6 aa, synthetic construct
PDEITW

SEQ ID NO: 7824 - protein, 6 aa, synthetic construct
PDEITY

SEQ ID NO: 7825 - protein, 6 aa, synthetic construct
PDEIWD

SEQ ID NO: 7826 - protein, 6 aa, synthetic construct
PDEIWE

SEQ ID NO: 7827 - protein, 6 aa, synthetic construct
PDEIWF

SEQ ID NO: 7828 - protein, 6 aa, synthetic construct
PDEIWW

SEQ ID NO: 7829 - protein, 6 aa, synthetic construct
PDEIWY

SEQ ID NO: 7830 - protein, 6 aa, synthetic construct
PDEIYD

SEQ ID NO: 7831 - protein, 6 aa, synthetic construct
PDEIYE

SEQ ID NO: 7832 - protein, 6 aa, synthetic construct
PDEIYF

SEQ ID NO: 7833 - protein, 6 aa, synthetic construct
PDEIYW

SEQ ID NO: 7834 - protein, 6 aa, synthetic construct
PDEIYY

SEQ ID NO: 7835 - protein, 6 aa, synthetic construct
PDEIVD

SEQ ID NO: 7836 - protein, 6 aa, synthetic construct
PDEIVE

SEQ ID NO: 7837 - protein, 6 aa, synthetic construct
PDEIVF

SEQ ID NO: 7838 - protein, 6 aa, synthetic construct
PDEIVW

SEQ ID NO: 7839 - protein, 6 aa, synthetic construct
PDEIVY

SEQ ID NO: 7840 - protein, 6 aa, synthetic construct
PDELAD

SEQ ID NO: 7841 - protein, 6 aa, synthetic construct
PDELAE

SEQ ID NO: 7842 - protein, 6 aa, synthetic construct
PDELAF

SEQ ID NO: 7843 - protein, 6 aa, synthetic construct
PDELAW

SEQ ID NO: 7844 - protein, 6 aa, synthetic construct
PDELAY

SEQ ID NO: 7845 - protein, 6 aa, synthetic construct
PDELRD

SEQ ID NO: 7846 - protein, 6 aa, synthetic construct
PDELRE

SEQ ID NO: 7847 - protein, 6 aa, synthetic construct
PDELRF

SEQ ID NO: 7848 - protein, 6 aa, synthetic construct
PDELRW

SEQ ID NO: 7849 - protein, 6 aa, synthetic construct
PDELRY

SEQ ID NO: 7850 - protein, 6 aa, synthetic construct
PDELND

SEQ ID NO: 7851 - protein, 6 aa, synthetic construct
PDELNE

SEQ ID NO: 7852 - protein, 6 aa, synthetic construct
PDELNF

SEQ ID NO: 7853 - protein, 6 aa, synthetic construct
PDELNW

SEQ ID NO: 7854 - protein, 6 aa, synthetic construct
PDELNY

SEQ ID NO: 7855 - protein, 6 aa, synthetic construct
PDELDD

SEQ ID NO: 7856 - protein, 6 aa, synthetic construct
PDELDE

SEQ ID NO: 7857 - protein, 6 aa, synthetic construct
PDELDF

SEQ ID NO: 7858 - protein, 6 aa, synthetic construct
PDELDW

SEQ ID NO: 7859 - protein, 6 aa, synthetic construct
PDELDY

SEQ ID NO: 7860 - protein, 6 aa, synthetic construct
PDELCD

SEQ ID NO: 7861 - protein, 6 aa, synthetic construct
PDELCE

SEQ ID NO: 7862 - protein, 6 aa, synthetic construct
PDELCF

SEQ ID NO: 7863 - protein, 6 aa, synthetic construct
PDELCW

SEQ ID NO: 7864 - protein, 6 aa, synthetic construct
PDELCY

SEQ ID NO: 7865 - protein, 6 aa, synthetic construct
PDELQD

SEQ ID NO: 7866 - protein, 6 aa, synthetic construct
PDELQE

SEQ ID NO: 7867 - protein, 6 aa, synthetic construct
PDELQF

SEQ ID NO: 7868 - protein, 6 aa, synthetic construct
PDELQW

SEQ ID NO: 7869 - protein, 6 aa, synthetic construct
PDELQY

SEQ ID NO: 7870 - protein, 6 aa, synthetic construct
PDELED

SEQ ID NO: 7871 - protein, 6 aa, synthetic construct
PDELEE

SEQ ID NO: 7872 - protein, 6 aa, synthetic construct
PDELEF

SEQ ID NO: 7873 - protein, 6 aa, synthetic construct
PDELEW

SEQ ID NO: 7874 - protein, 6 aa, synthetic construct
PDELEY

SEQ ID NO: 7875 - protein, 6 aa, synthetic construct
PDELGD

SEQ ID NO: 7876 - protein, 6 aa, synthetic construct
PDELGE

SEQ ID NO: 7877 - protein, 6 aa, synthetic construct
PDELGF

SEQ ID NO: 7878 - protein, 6 aa, synthetic construct
PDELGW

SEQ ID NO: 7879 - protein, 6 aa, synthetic construct
PDELGY

SEQ ID NO: 7880 - protein, 6 aa, synthetic construct
PDELHD

SEQ ID NO: 7881 - protein, 6 aa, synthetic construct
PDELHE

SEQ ID NO: 7882 - protein, 6 aa, synthetic construct
PDELHF

SEQ ID NO: 7883 - protein, 6 aa, synthetic construct
PDELHW

SEQ ID NO: 7884 - protein, 6 aa, synthetic construct
PDELHY

SEQ ID NO: 7885 - protein, 6 aa, synthetic construct
PDELID

SEQ ID NO: 7886 - protein, 6 aa, synthetic construct
PDELIE

SEQ ID NO: 7887 - protein, 6 aa, synthetic construct
PDELIF

SEQ ID NO: 7888 - protein, 6 aa, synthetic construct
PDELIW

SEQ ID NO: 7889 - protein, 6 aa, synthetic construct
PDELIY

SEQ ID NO: 7890 - protein, 6 aa, synthetic construct
PDELLD

SEQ ID NO: 7891 - protein, 6 aa, synthetic construct
PDELLE

SEQ ID NO: 7892 - protein, 6 aa, synthetic construct
PDELLF

SEQ ID NO: 7893 - protein, 6 aa, synthetic construct
PDELLW

SEQ ID NO: 7894 - protein, 6 aa, synthetic construct
PDELLY

SEQ ID NO: 7895 - protein, 6 aa, synthetic construct
PDELKD

SEQ ID NO: 7896 - protein, 6 aa, synthetic construct
PDELKE

SEQ ID NO: 7897 - protein, 6 aa, synthetic construct
PDELKF

SEQ ID NO: 7898 - protein, 6 aa, synthetic construct
PDELKW

SEQ ID NO: 7899 - protein, 6 aa, synthetic construct
PDELKY

SEQ ID NO: 7900 - protein, 6 aa, synthetic construct
PDELMD

SEQ ID NO: 7901 - protein, 6 aa, synthetic construct
PDELME

SEQ ID NO: 7902 - protein, 6 aa, synthetic construct
PDELMF

SEQ ID NO: 7903 - protein, 6 aa, synthetic construct
PDELMW

SEQ ID NO: 7904 - protein, 6 aa, synthetic construct
PDELMY

SEQ ID NO: 7905 - protein, 6 aa, synthetic construct
PDELFD

SEQ ID NO: 7906 - protein, 6 aa, synthetic construct
PDELFE

SEQ ID NO: 7907 - protein, 6 aa, synthetic construct
PDELFF

SEQ ID NO: 7908 - protein, 6 aa, synthetic construct
PDELFW

SEQ ID NO: 7909 - protein, 6 aa, synthetic construct
PDELFY

SEQ ID NO: 7910 - protein, 6 aa, synthetic construct
PDELPD

SEQ ID NO: 7911 - protein, 6 aa, synthetic construct
PDELPE

SEQ ID NO: 7912 - protein, 6 aa, synthetic construct
PDELPF

SEQ ID NO: 7913 - protein, 6 aa, synthetic construct
PDELPW

SEQ ID NO: 7914 - protein, 6 aa, synthetic construct
PDELPY

SEQ ID NO: 7915 - protein, 6 aa, synthetic construct
PDELSD

SEQ ID NO: 7916 - protein, 6 aa, synthetic construct
PDELSE

SEQ ID NO: 7917 - protein, 6 aa, synthetic construct
PDELSF

SEQ ID NO: 7918 - protein, 6 aa, synthetic construct
PDELSW

SEQ ID NO: 7919 - protein, 6 aa, synthetic construct
PDELSY

SEQ ID NO: 7920 - protein, 6 aa, synthetic construct
PDELTD

SEQ ID NO: 7921 - protein, 6 aa, synthetic construct
PDELTE

SEQ ID NO: 7922 - protein, 6 aa, synthetic construct
PDELTF

SEQ ID NO: 7923 - protein, 6 aa, synthetic construct
PDELTW

SEQ ID NO: 7924 - protein, 6 aa, synthetic construct
PDELTY

SEQ ID NO: 7925 - protein, 6 aa, synthetic construct
PDELWD

SEQ ID NO: 7926 - protein, 6 aa, synthetic construct
PDELWE

SEQ ID NO: 7927 - protein, 6 aa, synthetic construct
PDELWF

SEQ ID NO: 7928 - protein, 6 aa, synthetic construct
PDELWW

SEQ ID NO: 7929 - protein, 6 aa, synthetic construct
PDELWY

SEQ ID NO: 7930 - protein, 6 aa, synthetic construct
PDELYD

SEQ ID NO: 7931 - protein, 6 aa, synthetic construct
PDELYE

SEQ ID NO: 7932 - protein, 6 aa, synthetic construct
PDELYF

SEQ ID NO: 7933 - protein, 6 aa, synthetic construct
PDELYW

SEQ ID NO: 7934 - protein, 6 aa, synthetic construct
PDELYY

SEQ ID NO: 7935 - protein, 6 aa, synthetic construct
PDELVD

SEQ ID NO: 7936 - protein, 6 aa, synthetic construct
PDELVE

SEQ ID NO: 7937 - protein, 6 aa, synthetic construct
PDELVF

SEQ ID NO: 7938 - protein, 6 aa, synthetic construct
PDELVW

SEQ ID NO: 7939 - protein, 6 aa, synthetic construct
PDELVY

SEQ ID NO: 7940 - protein, 6 aa, synthetic construct
PDEKAD

SEQ ID NO: 7941 - protein, 6 aa, synthetic construct
PDEKAE

SEQ ID NO: 7942 - protein, 6 aa, synthetic construct
PDEKAF

SEQ ID NO: 7943 - protein, 6 aa, synthetic construct
PDEKAW

SEQ ID NO: 7944 - protein, 6 aa, synthetic construct
PDEKAY

SEQ ID NO: 7945 - protein, 6 aa, synthetic construct
PDEKRD

SEQ ID NO: 7946 - protein, 6 aa, synthetic construct
PDEKRE

SEQ ID NO: 7947 - protein, 6 aa, synthetic construct
PDEKRF

SEQ ID NO: 7948 - protein, 6 aa, synthetic construct
PDEKRW

SEQ ID NO: 7949 - protein, 6 aa, synthetic construct
PDEKRY

SEQ ID NO: 7950 - protein, 6 aa, synthetic construct
PDEKND

SEQ ID NO: 7951 - protein, 6 aa, synthetic construct
PDEKNE

SEQ ID NO: 7952 - protein, 6 aa, synthetic construct
PDEKNF

SEQ ID NO: 7953 - protein, 6 aa, synthetic construct
PDEKNW

SEQ ID NO: 7954 - protein, 6 aa, synthetic construct
PDEKNY

SEQ ID NO: 7955 - protein, 6 aa, synthetic construct
PDEKDD

SEQ ID NO: 7956 - protein, 6 aa, synthetic construct
PDEKDE

SEQ ID NO: 7957 - protein, 6 aa, synthetic construct
PDEKDF

SEQ ID NO: 7958 - protein, 6 aa, synthetic construct
PDEKDW

SEQ ID NO: 7959 - protein, 6 aa, synthetic construct
PDEKDY

SEQ ID NO: 7960 - protein, 6 aa, synthetic construct
PDEKCD

SEQ ID NO: 7961 - protein, 6 aa, synthetic construct
PDEKCE

SEQ ID NO: 7962 - protein, 6 aa, synthetic construct
PDEKCF

SEQ ID NO: 7963 - protein, 6 aa, synthetic construct
PDEKCW

SEQ ID NO: 7964 - protein, 6 aa, synthetic construct
PDEKCY

SEQ ID NO: 7965 - protein, 6 aa, synthetic construct
PDEKQD

SEQ ID NO: 7966 - protein, 6 aa, synthetic construct
PDEKQE

SEQ ID NO: 7967 - protein, 6 aa, synthetic construct
PDEKQF

SEQ ID NO: 7968 - protein, 6 aa, synthetic construct
PDEKQW

SEQ ID NO: 7969 - protein, 6 aa, synthetic construct
PDEKQY

SEQ ID NO: 7970 - protein, 6 aa, synthetic construct
PDEKED

SEQ ID NO: 7971 - protein, 6 aa, synthetic construct
PDEKEE

SEQ ID NO: 7972 - protein, 6 aa, synthetic construct
PDEKEF

SEQ ID NO: 7973 - protein, 6 aa, synthetic construct
PDEKEW

SEQ ID NO: 7974 - protein, 6 aa, synthetic construct
PDEKEY

SEQ ID NO: 7975 - protein, 6 aa, synthetic construct
PDEKGD

SEQ ID NO: 7976 - protein, 6 aa, synthetic construct
PDEKGE

SEQ ID NO: 7977 - protein, 6 aa, synthetic construct
PDEKGF

SEQ ID NO: 7978 - protein, 6 aa, synthetic construct
PDEKGW

SEQ ID NO: 7979 - protein, 6 aa, synthetic construct
PDEKGY

SEQ ID NO: 7980 - protein, 6 aa, synthetic construct
PDEKHD

SEQ ID NO: 7981 - protein, 6 aa, synthetic construct
PDEKHE

SEQ ID NO: 7982 - protein, 6 aa, synthetic construct
PDEKHF

SEQ ID NO: 7983 - protein, 6 aa, synthetic construct
PDEKHW

SEQ ID NO: 7984 - protein, 6 aa, synthetic construct
PDEKHY

SEQ ID NO: 7985 - protein, 6 aa, synthetic construct
PDEKID

SEQ ID NO: 7986 - protein, 6 aa, synthetic construct
PDEKIE

SEQ ID NO: 7987 - protein, 6 aa, synthetic construct
PDEKIF

SEQ ID NO: 7988 - protein, 6 aa, synthetic construct
PDEKIW

SEQ ID NO: 7989 - protein, 6 aa, synthetic construct
PDEKIY

SEQ ID NO: 7990 - protein, 6 aa, synthetic construct
PDEKLD

SEQ ID NO: 7991 - protein, 6 aa, synthetic construct
PDEKLE

SEQ ID NO: 7992 - protein, 6 aa, synthetic construct
PDEKLF

SEQ ID NO: 7993 - protein, 6 aa, synthetic construct
PDEKLW

SEQ ID NO: 7994 - protein, 6 aa, synthetic construct
PDEKLY

SEQ ID NO: 7995 - protein, 6 aa, synthetic construct
PDEKKD

SEQ ID NO: 7996 - protein, 6 aa, synthetic construct
PDEKKE

SEQ ID NO: 7997 - protein, 6 aa, synthetic construct
PDEKKF

SEQ ID NO: 7998 - protein, 6 aa, synthetic construct
PDEKKW

SEQ ID NO: 7999 - protein, 6 aa, synthetic construct
PDEKKY

SEQ ID NO: 8000 - protein, 6 aa, synthetic construct
PDEKMD

SEQ ID NO: 8001 - protein, 6 aa, synthetic construct
PDEKME

SEQ ID NO: 8002 - protein, 6 aa, synthetic construct
PDEKMF

SEQ ID NO: 8003 - protein, 6 aa, synthetic construct
PDEKMW

SEQ ID NO: 8004 - protein, 6 aa, synthetic construct
PDEKMY

SEQ ID NO: 8005 - protein, 6 aa, synthetic construct
PDEKFD

SEQ ID NO: 8006 - protein, 6 aa, synthetic construct
PDEKFE

SEQ ID NO: 8007 - protein, 6 aa, synthetic construct
PDEKFF

SEQ ID NO: 8008 - protein, 6 aa, synthetic construct
PDEKFW

SEQ ID NO: 8009 - protein, 6 aa, synthetic construct
PDEKFY

SEQ ID NO: 8010 - protein, 6 aa, synthetic construct
PDEKPD

SEQ ID NO: 8011 - protein, 6 aa, synthetic construct
PDEKPE

SEQ ID NO: 8012 - protein, 6 aa, synthetic construct
PDEKPF

SEQ ID NO: 8013 - protein, 6 aa, synthetic construct
PDEKPW

SEQ ID NO: 8014 - protein, 6 aa, synthetic construct
PDEKPY

SEQ ID NO: 8015 - protein, 6 aa, synthetic construct
PDEKSD

SEQ ID NO: 8016 - protein, 6 aa, synthetic construct
PDEKSE

SEQ ID NO: 8017 - protein, 6 aa, synthetic construct
PDEKSF

SEQ ID NO: 8018 - protein, 6 aa, synthetic construct
PDEKSW

SEQ ID NO: 8019 - protein, 6 aa, synthetic construct
PDEKSY

SEQ ID NO: 8020 - protein, 6 aa, synthetic construct
PDEKTD

SEQ ID NO: 8021 - protein, 6 aa, synthetic construct
PDEKTE

SEQ ID NO: 8022 - protein, 6 aa, synthetic construct
PDEKTF

SEQ ID NO: 8023 - protein, 6 aa, synthetic construct
PDEKTW

SEQ ID NO: 8024 - protein, 6 aa, synthetic construct
PDEKTY

SEQ ID NO: 8025 - protein, 6 aa, synthetic construct
PDEKWD

SEQ ID NO: 8026 - protein, 6 aa, synthetic construct
PDEKWE

SEQ ID NO: 8027 - protein, 6 aa, synthetic construct
PDEKWF

SEQ ID NO: 8028 - protein, 6 aa, synthetic construct
PDEKWW

SEQ ID NO: 8029 - protein, 6 aa, synthetic construct
PDEKWY

SEQ ID NO: 8030 - protein, 6 aa, synthetic construct
PDEKYD

SEQ ID NO: 8031 - protein, 6 aa, synthetic construct
PDEKYE

SEQ ID NO: 8032 - protein, 6 aa, synthetic construct
PDEKYF

SEQ ID NO: 8033 - protein, 6 aa, synthetic construct
PDEKYW

SEQ ID NO: 8034 - protein, 6 aa, synthetic construct
PDEKYY

SEQ ID NO: 8035 - protein, 6 aa, synthetic construct
PDEKVD

SEQ ID NO: 8036 - protein, 6 aa, synthetic construct
PDEKVE

SEQ ID NO: 8037 - protein, 6 aa, synthetic construct
PDEKVF

SEQ ID NO: 8038 - protein, 6 aa, synthetic construct
PDEKVW

SEQ ID NO: 8039 - protein, 6 aa, synthetic construct
PDEKVY

SEQ ID NO: 8040 - protein, 6 aa, synthetic construct
PDEMAD

SEQ ID NO: 8041 - protein, 6 aa, synthetic construct
PDEMAE

SEQ ID NO: 8042 - protein, 6 aa, synthetic construct
PDEMAF

SEQ ID NO: 8043 - protein, 6 aa, synthetic construct
PDEMAW

SEQ ID NO: 8044 - protein, 6 aa, synthetic construct
PDEMAY

SEQ ID NO: 8045 - protein, 6 aa, synthetic construct
PDEMRD

SEQ ID NO: 8046 - protein, 6 aa, synthetic construct
PDEMRE

SEQ ID NO: 8047 - protein, 6 aa, synthetic construct
PDEMRF

SEQ ID NO: 8048 - protein, 6 aa, synthetic construct
PDEMRW

SEQ ID NO: 8049 - protein, 6 aa, synthetic construct
PDEMRY

SEQ ID NO: 8050 - protein, 6 aa, synthetic construct
PDEMND

SEQ ID NO: 8051 - protein, 6 aa, synthetic construct
PDEMNE

SEQ ID NO: 8052 - protein, 6 aa, synthetic construct
PDEMNF

SEQ ID NO: 8053 - protein, 6 aa, synthetic construct
PDEMNW

SEQ ID NO: 8054 - protein, 6 aa, synthetic construct
PDEMNY

SEQ ID NO: 8055 - protein, 6 aa, synthetic construct
PDEMDD

SEQ ID NO: 8056 - protein, 6 aa, synthetic construct
PDEMDE

SEQ ID NO: 8057 - protein, 6 aa, synthetic construct
PDEMDF

SEQ ID NO: 8058 - protein, 6 aa, synthetic construct
PDEMDW

SEQ ID NO: 8059 - protein, 6 aa, synthetic construct
PDEMDY

SEQ ID NO: 8060 - protein, 6 aa, synthetic construct
PDEMCD

SEQ ID NO: 8061 - protein, 6 aa, synthetic construct
PDEMCE

SEQ ID NO: 8062 - protein, 6 aa, synthetic construct
PDEMCF

SEQ ID NO: 8063 - protein, 6 aa, synthetic construct
PDEMCW

SEQ ID NO: 8064 - protein, 6 aa, synthetic construct
PDEMCY

SEQ ID NO: 8065 - protein, 6 aa, synthetic construct
PDEMQD

SEQ ID NO: 8066 - protein, 6 aa, synthetic construct
PDEMQE

SEQ ID NO: 8067 - protein, 6 aa, synthetic construct
PDEMQF

SEQ ID NO: 8068 - protein, 6 aa, synthetic construct
PDEMQW

SEQ ID NO: 8069 - protein, 6 aa, synthetic construct
PDEMQY

SEQ ID NO: 8070 - protein, 6 aa, synthetic construct
PDEMED

SEQ ID NO: 8071 - protein, 6 aa, synthetic construct
PDEMEE

SEQ ID NO: 8072 - protein, 6 aa, synthetic construct
PDEMEF

SEQ ID NO: 8073 - protein, 6 aa, synthetic construct
PDEMEW

SEQ ID NO: 8074 - protein, 6 aa, synthetic construct
PDEMEY

SEQ ID NO: 8075 - protein, 6 aa, synthetic construct
PDEMGD

SEQ ID NO: 8076 - protein, 6 aa, synthetic construct
PDEMGE

SEQ ID NO: 8077 - protein, 6 aa, synthetic construct
PDEMGF

SEQ ID NO: 8078 - protein, 6 aa, synthetic construct
PDEMGW

SEQ ID NO: 8079 - protein, 6 aa, synthetic construct
PDEMGY

SEQ ID NO: 8080 - protein, 6 aa, synthetic construct
PDEMHD

SEQ ID NO: 8081 - protein, 6 aa, synthetic construct
PDEMHE

SEQ ID NO: 8082 - protein, 6 aa, synthetic construct
PDEMHF

SEQ ID NO: 8083 - protein, 6 aa, synthetic construct
PDEMHW

SEQ ID NO: 8084 - protein, 6 aa, synthetic construct
PDEMHY

SEQ ID NO: 8085 - protein, 6 aa, synthetic construct
PDEMID

SEQ ID NO: 8086 - protein, 6 aa, synthetic construct
PDEMIE

SEQ ID NO: 8087 - protein, 6 aa, synthetic construct
PDEMIF

SEQ ID NO: 8088 - protein, 6 aa, synthetic construct
PDEMIW

SEQ ID NO: 8089 - protein, 6 aa, synthetic construct
PDEMIY

SEQ ID NO: 8090 - protein, 6 aa, synthetic construct
PDEMLD

SEQ ID NO: 8091 - protein, 6 aa, synthetic construct
PDEMLE

SEQ ID NO: 8092 - protein, 6 aa, synthetic construct
PDEMLF

SEQ ID NO: 8093 - protein, 6 aa, synthetic construct
PDEMLW

SEQ ID NO: 8094 - protein, 6 aa, synthetic construct
PDEMLY

SEQ ID NO: 8095 - protein, 6 aa, synthetic construct
PDEMKD

SEQ ID NO: 8096 - protein, 6 aa, synthetic construct
PDEMKE

SEQ ID NO: 8097 - protein, 6 aa, synthetic construct
PDEMKF

SEQ ID NO: 8098 - protein, 6 aa, synthetic construct
PDEMKW

SEQ ID NO: 8099 - protein, 6 aa, synthetic construct
PDEMKY

SEQ ID NO: 8100 - protein, 6 aa, synthetic construct
PDEMMD

SEQ ID NO: 8101 - protein, 6 aa, synthetic construct
PDEMME

SEQ ID NO: 8102 - protein, 6 aa, synthetic construct
PDEMMF

SEQ ID NO: 8103 - protein, 6 aa, synthetic construct
PDEMMW

SEQ ID NO: 8104 - protein, 6 aa, synthetic construct
PDEMMY

SEQ ID NO: 8105 - protein, 6 aa, synthetic construct
PDEMFD

SEQ ID NO: 8106 - protein, 6 aa, synthetic construct
PDEMFE

SEQ ID NO: 8107 - protein, 6 aa, synthetic construct
PDEMFF

SEQ ID NO: 8108 - protein, 6 aa, synthetic construct
PDEMFW

SEQ ID NO: 8109 - protein, 6 aa, synthetic construct
PDEMFY

SEQ ID NO: 8110 - protein, 6 aa, synthetic construct
PDEMPD

SEQ ID NO: 8111 - protein, 6 aa, synthetic construct
PDEMPE

SEQ ID NO: 8112 - protein, 6 aa, synthetic construct
PDEMPF

SEQ ID NO: 8113 - protein, 6 aa, synthetic construct
PDEMPW

SEQ ID NO: 8114 - protein, 6 aa, synthetic construct
PDEMPY

SEQ ID NO: 8115 - protein, 6 aa, synthetic construct
PDEMSD

SEQ ID NO: 8116 - protein, 6 aa, synthetic construct
PDEMSE

SEQ ID NO: 8117 - protein, 6 aa, synthetic construct
PDEMSF

SEQ ID NO: 8118 - protein, 6 aa, synthetic construct
PDEMSW

SEQ ID NO: 8119 - protein, 6 aa, synthetic construct
PDEMSY

SEQ ID NO: 8120 - protein, 6 aa, synthetic construct
PDEMTD

SEQ ID NO: 8121 - protein, 6 aa, synthetic construct
PDEMTE

SEQ ID NO: 8122 - protein, 6 aa, synthetic construct
PDEMTF

SEQ ID NO: 8123 - protein, 6 aa, synthetic construct
PDEMTW

SEQ ID NO: 8124 - protein, 6 aa, synthetic construct
PDEMTY

SEQ ID NO: 8125 - protein, 6 aa, synthetic construct
PDEMWD

SEQ ID NO: 8126 - protein, 6 aa, synthetic construct
PDEMWE

SEQ ID NO: 8127 - protein, 6 aa, synthetic construct
PDEMWF

SEQ ID NO: 8128 - protein, 6 aa, synthetic construct
PDEMWW

SEQ ID NO: 8129 - protein, 6 aa, synthetic construct
PDEMWY

SEQ ID NO: 8130 - protein, 6 aa, synthetic construct
PDEMYD

SEQ ID NO: 8131 - protein, 6 aa, synthetic construct
PDEMYE

SEQ ID NO: 8132 - protein, 6 aa, synthetic construct
PDEMYF

SEQ ID NO: 8133 - protein, 6 aa, synthetic construct
PDEMYW

SEQ ID NO: 8134 - protein, 6 aa, synthetic construct
PDEMYY

SEQ ID NO: 8135 - protein, 6 aa, synthetic construct
PDEMVD

SEQ ID NO: 8136 - protein, 6 aa, synthetic construct
PDEMVE

SEQ ID NO: 8137 - protein, 6 aa, synthetic construct
PDEMVF

SEQ ID NO: 8138 - protein, 6 aa, synthetic construct
PDEMVW

SEQ ID NO: 8139 - protein, 6 aa, synthetic construct
PDEMVY

SEQ ID NO: 8140 - protein, 6 aa, synthetic construct
PDEFAD

SEQ ID NO: 8141 - protein, 6 aa, synthetic construct
PDEFAE

SEQ ID NO: 8142 - protein, 6 aa, synthetic construct
PDEFAF

SEQ ID NO: 8143 - protein, 6 aa, synthetic construct
PDEFAW

SEQ ID NO: 8144 - protein, 6 aa, synthetic construct
PDEFAY

SEQ ID NO: 8145 - protein, 6 aa, synthetic construct
PDEFRD

SEQ ID NO: 8146 - protein, 6 aa, synthetic construct
PDEFRE

SEQ ID NO: 8147 - protein, 6 aa, synthetic construct
PDEFRF

SEQ ID NO: 8148 - protein, 6 aa, synthetic construct
PDEFRW

SEQ ID NO: 8149 - protein, 6 aa, synthetic construct
PDEFRY

SEQ ID NO: 8150 - protein, 6 aa, synthetic construct
PDEFND

SEQ ID NO: 8151 - protein, 6 aa, synthetic construct
PDEFNE

SEQ ID NO: 8152 - protein, 6 aa, synthetic construct
PDEFNF

SEQ ID NO: 8153 - protein, 6 aa, synthetic construct
PDEFNW

SEQ ID NO: 8154 - protein, 6 aa, synthetic construct
PDEFNY

SEQ ID NO: 8155 - protein, 6 aa, synthetic construct
PDEFDD

SEQ ID NO: 8156 - protein, 6 aa, synthetic construct
PDEFDE

SEQ ID NO: 8157 - protein, 6 aa, synthetic construct
PDEFDF

SEQ ID NO: 8158 - protein, 6 aa, synthetic construct
PDEFDW

SEQ ID NO: 8159 - protein, 6 aa, synthetic construct
PDEFDY

SEQ ID NO: 8160 - protein, 6 aa, synthetic construct
PDEFCD

SEQ ID NO: 8161 - protein, 6 aa, synthetic construct
PDEFCE

SEQ ID NO: 8162 - protein, 6 aa, synthetic construct
PDEFCF

SEQ ID NO: 8163 - protein, 6 aa, synthetic construct
PDEFCW

SEQ ID NO: 8164 - protein, 6 aa, synthetic construct
PDEFCY

SEQ ID NO: 8165 - protein, 6 aa, synthetic construct
PDEFQD

SEQ ID NO: 8166 - protein, 6 aa, synthetic construct
PDEFQE

SEQ ID NO: 8167 - protein, 6 aa, synthetic construct
PDEFQF

SEQ ID NO: 8168 - protein, 6 aa, synthetic construct
PDEFQW

SEQ ID NO: 8169 - protein, 6 aa, synthetic construct
PDEFQY

SEQ ID NO: 8170 - protein, 6 aa, synthetic construct
PDEFED

SEQ ID NO: 8171 - protein, 6 aa, synthetic construct
PDEFEE

SEQ ID NO: 8172 - protein, 6 aa, synthetic construct
PDEFEF

SEQ ID NO: 8173 - protein, 6 aa, synthetic construct
PDEFEW

SEQ ID NO: 8174 - protein, 6 aa, synthetic construct
PDEFEY

SEQ ID NO: 8175 - protein, 6 aa, synthetic construct
PDEFGD

SEQ ID NO: 8176 - protein, 6 aa, synthetic construct
PDEFGE

SEQ ID NO: 8177 - protein, 6 aa, synthetic construct
PDEFGF

SEQ ID NO: 8178 - protein, 6 aa, synthetic construct
PDEFGW

SEQ ID NO: 8179 - protein, 6 aa, synthetic construct
PDEFGY

SEQ ID NO: 8180 - protein, 6 aa, synthetic construct
PDEFHD

SEQ ID NO: 8181 - protein, 6 aa, synthetic construct
PDEFHE

SEQ ID NO: 8182 - protein, 6 aa, synthetic construct
PDEFHF

SEQ ID NO: 8183 - protein, 6 aa, synthetic construct
PDEFHW

SEQ ID NO: 8184 - protein, 6 aa, synthetic construct
PDEFHY

SEQ ID NO: 8185 - protein, 6 aa, synthetic construct
PDEFID

SEQ ID NO: 8186 - protein, 6 aa, synthetic construct
PDEFIE

SEQ ID NO: 8187 - protein, 6 aa, synthetic construct
PDEFIF

SEQ ID NO: 8188 - protein, 6 aa, synthetic construct
PDEFIW

SEQ ID NO: 8189 - protein, 6 aa, synthetic construct
PDEFIY

SEQ ID NO: 8190 - protein, 6 aa, synthetic construct
PDEFLD

SEQ ID NO: 8191 - protein, 6 aa, synthetic construct
PDEFLE

SEQ ID NO: 8192 - protein, 6 aa, synthetic construct
PDEFLF

SEQ ID NO: 8193 - protein, 6 aa, synthetic construct
PDEFLW

SEQ ID NO: 8194 - protein, 6 aa, synthetic construct
PDEFLY

SEQ ID NO: 8195 - protein, 6 aa, synthetic construct
PDEFKD

SEQ ID NO: 8196 - protein, 6 aa, synthetic construct
PDEFKE

SEQ ID NO: 8197 - protein, 6 aa, synthetic construct
PDEFKF

SEQ ID NO: 8198 - protein, 6 aa, synthetic construct
PDEFKW

SEQ ID NO: 8199 - protein, 6 aa, synthetic construct
PDEFKY

SEQ ID NO: 8200 - protein, 6 aa, synthetic construct
PDEFMD

SEQ ID NO: 8201 - protein, 6 aa, synthetic construct
PDEFME

SEQ ID NO: 8202 - protein, 6 aa, synthetic construct
PDEFMF

SEQ ID NO: 8203 - protein, 6 aa, synthetic construct
PDEFMW

SEQ ID NO: 8204 - protein, 6 aa, synthetic construct
PDEFMY

SEQ ID NO: 8205 - protein, 6 aa, synthetic construct
PDEFFD

SEQ ID NO: 8206 - protein, 6 aa, synthetic construct
PDEFFE

SEQ ID NO: 8207 - protein, 6 aa, synthetic construct
PDEFFF

SEQ ID NO: 8208 - protein, 6 aa, synthetic construct
PDEFFW

SEQ ID NO: 8209 - protein, 6 aa, synthetic construct
PDEFFY

SEQ ID NO: 8210 - protein, 6 aa, synthetic construct
PDEFPD

SEQ ID NO: 8211 - protein, 6 aa, synthetic construct
PDEFPE

SEQ ID NO: 8212 - protein, 6 aa, synthetic construct
PDEFPF

SEQ ID NO: 8213 - protein, 6 aa, synthetic construct
PDEFPW

SEQ ID NO: 8214 - protein, 6 aa, synthetic construct
PDEFPY

SEQ ID NO: 8215 - protein, 6 aa, synthetic construct
PDEFSD

SEQ ID NO: 8216 - protein, 6 aa, synthetic construct
PDEFSE

SEQ ID NO: 8217 - protein, 6 aa, synthetic construct
PDEFSF

SEQ ID NO: 8218 - protein, 6 aa, synthetic construct
PDEFSW

SEQ ID NO: 8219 - protein, 6 aa, synthetic construct
PDEFSY

SEQ ID NO: 8220 - protein, 6 aa, synthetic construct
PDEFTD

SEQ ID NO: 8221 - protein, 6 aa, synthetic construct
PDEFTE

SEQ ID NO: 8222 - protein, 6 aa, synthetic construct
PDEFTF

SEQ ID NO: 8223 - protein, 6 aa, synthetic construct
PDEFTW

SEQ ID NO: 8224 - protein, 6 aa, synthetic construct
PDEFTY

SEQ ID NO: 8225 - protein, 6 aa, synthetic construct
PDEFWD

SEQ ID NO: 8226 - protein, 6 aa, synthetic construct
PDEFWE

SEQ ID NO: 8227 - protein, 6 aa, synthetic construct
PDEFWF

SEQ ID NO: 8228 - protein, 6 aa, synthetic construct
PDEFWW

SEQ ID NO: 8229 - protein, 6 aa, synthetic construct
PDEFWY

SEQ ID NO: 8230 - protein, 6 aa, synthetic construct
PDEFYD

SEQ ID NO: 8231 - protein, 6 aa, synthetic construct
PDEFYE

SEQ ID NO: 8232 - protein, 6 aa, synthetic construct
PDEFYF

SEQ ID NO: 8233 - protein, 6 aa, synthetic construct
PDEFYW

SEQ ID NO: 8234 - protein, 6 aa, synthetic construct
PDEFYY

SEQ ID NO: 8235 - protein, 6 aa, synthetic construct
PDEFVD

SEQ ID NO: 8236 - protein, 6 aa, synthetic construct
PDEFVE

SEQ ID NO: 8237 - protein, 6 aa, synthetic construct
PDEFVF

SEQ ID NO: 8238 - protein, 6 aa, synthetic construct
PDEFVW

SEQ ID NO: 8239 - protein, 6 aa, synthetic construct
PDEFVY

SEQ ID NO: 8240 - protein, 6 aa, synthetic construct
PDEPAD

SEQ ID NO: 8241 - protein, 6 aa, synthetic construct
PDEPAE

SEQ ID NO: 8242 - protein, 6 aa, synthetic construct
PDEPAF

SEQ ID NO: 8243 - protein, 6 aa, synthetic construct
PDEPAW

SEQ ID NO: 8244 - protein, 6 aa, synthetic construct
PDEPAY

SEQ ID NO: 8245 - protein, 6 aa, synthetic construct
PDEPRD

SEQ ID NO: 8246 - protein, 6 aa, synthetic construct
PDEPRE

SEQ ID NO: 8247 - protein, 6 aa, synthetic construct
PDEPRF

SEQ ID NO: 8248 - protein, 6 aa, synthetic construct
PDEPRW

SEQ ID NO: 8249 - protein, 6 aa, synthetic construct
PDEPRY

SEQ ID NO: 8250 - protein, 6 aa, synthetic construct
PDEPND

SEQ ID NO: 8251 - protein, 6 aa, synthetic construct
PDEPNE

SEQ ID NO: 8252 - protein, 6 aa, synthetic construct
PDEPNF

SEQ ID NO: 8253 - protein, 6 aa, synthetic construct
PDEPNW

SEQ ID NO: 8254 - protein, 6 aa, synthetic construct
PDEPNY

SEQ ID NO: 8255 - protein, 6 aa, synthetic construct
PDEPDD

SEQ ID NO: 8256 - protein, 6 aa, synthetic construct
PDEPDE

SEQ ID NO: 8257 - protein, 6 aa, synthetic construct
PDEPDF

SEQ ID NO: 8258 - protein, 6 aa, synthetic construct
PDEPDW

SEQ ID NO: 8259 - protein, 6 aa, synthetic construct
PDEPDY

SEQ ID NO: 8260 - protein, 6 aa, synthetic construct
PDEPCD

SEQ ID NO: 8261 - protein, 6 aa, synthetic construct
PDEPCE

SEQ ID NO: 8262 - protein, 6 aa, synthetic construct
PDEPCF

SEQ ID NO: 8263 - protein, 6 aa, synthetic construct
PDEPCW

SEQ ID NO: 8264 - protein, 6 aa, synthetic construct
PDEPCY

SEQ ID NO: 8265 - protein, 6 aa, synthetic construct
PDEPQD

SEQ ID NO: 8266 - protein, 6 aa, synthetic construct
PDEPQE

SEQ ID NO: 8267 - protein, 6 aa, synthetic construct
PDEPQF

SEQ ID NO: 8268 - protein, 6 aa, synthetic construct
PDEPQW

SEQ ID NO: 8269 - protein, 6 aa, synthetic construct
PDEPQY

SEQ ID NO: 8270 - protein, 6 aa, synthetic construct
PDEPED

SEQ ID NO: 8271 - protein, 6 aa, synthetic construct
PDEPEE

SEQ ID NO: 8272 - protein, 6 aa, synthetic construct
PDEPEF

SEQ ID NO: 8273 - protein, 6 aa, synthetic construct
PDEPEW

SEQ ID NO: 8274 - protein, 6 aa, synthetic construct
PDEPEY

SEQ ID NO: 8275 - protein, 6 aa, synthetic construct
PDEPGD

SEQ ID NO: 8276 - protein, 6 aa, synthetic construct
PDEPGE

SEQ ID NO: 8277 - protein, 6 aa, synthetic construct
PDEPGF

SEQ ID NO: 8278 - protein, 6 aa, synthetic construct
PDEPGW

SEQ ID NO: 8279 - protein, 6 aa, synthetic construct
PDEPGY

SEQ ID NO: 8280 - protein, 6 aa, synthetic construct
PDEPHD

SEQ ID NO: 8281 - protein, 6 aa, synthetic construct
PDEPHE

SEQ ID NO: 8282 - protein, 6 aa, synthetic construct
PDEPHF

SEQ ID NO: 8283 - protein, 6 aa, synthetic construct
PDEPHW

SEQ ID NO: 8284 - protein, 6 aa, synthetic construct
PDEPHY

SEQ ID NO: 8285 - protein, 6 aa, synthetic construct
PDEPID

SEQ ID NO: 8286 - protein, 6 aa, synthetic construct
PDEPIE

SEQ ID NO: 8287 - protein, 6 aa, synthetic construct
PDEPIF

SEQ ID NO: 8288 - protein, 6 aa, synthetic construct
PDEPIW

SEQ ID NO: 8289 - protein, 6 aa, synthetic construct
PDEPIY

SEQ ID NO: 8290 - protein, 6 aa, synthetic construct
PDEPLD

SEQ ID NO: 8291 - protein, 6 aa, synthetic construct
PDEPLE

SEQ ID NO: 8292 - protein, 6 aa, synthetic construct
PDEPLF

SEQ ID NO: 8293 - protein, 6 aa, synthetic construct
PDEPLW

SEQ ID NO: 8294 - protein, 6 aa, synthetic construct
PDEPLY

SEQ ID NO: 8295 - protein, 6 aa, synthetic construct
PDEPKD

SEQ ID NO: 8296 - protein, 6 aa, synthetic construct
PDEPKE

SEQ ID NO: 8297 - protein, 6 aa, synthetic construct
PDEPKF

SEQ ID NO: 8298 - protein, 6 aa, synthetic construct
PDEPKW

SEQ ID NO: 8299 - protein, 6 aa, synthetic construct
PDEPKY

SEQ ID NO: 8300 - protein, 6 aa, synthetic construct
PDEPMD

SEQ ID NO: 8301 - protein, 6 aa, synthetic construct
PDEPME

SEQ ID NO: 8302 - protein, 6 aa, synthetic construct
PDEPMF

SEQ ID NO: 8303 - protein, 6 aa, synthetic construct
PDEPMW

SEQ ID NO: 8304 - protein, 6 aa, synthetic construct
PDEPMY

SEQ ID NO: 8305 - protein, 6 aa, synthetic construct
PDEPFD

SEQ ID NO: 8306 - protein, 6 aa, synthetic construct
PDEPFE

SEQ ID NO: 8307 - protein, 6 aa, synthetic construct
PDEPFF

SEQ ID NO: 8308 - protein, 6 aa, synthetic construct
PDEPFW

SEQ ID NO: 8309 - protein, 6 aa, synthetic construct
PDEPFY

SEQ ID NO: 8310 - protein, 6 aa, synthetic construct
PDEPPD

SEQ ID NO: 8311 - protein, 6 aa, synthetic construct
PDEPPE

SEQ ID NO: 8312 - protein, 6 aa, synthetic construct
PDEPPF

SEQ ID NO: 8313 - protein, 6 aa, synthetic construct
PDEPPW

SEQ ID NO: 8314 - protein, 6 aa, synthetic construct
PDEPPY

SEQ ID NO: 8315 - protein, 6 aa, synthetic construct
PDEPSD

SEQ ID NO: 8316 - protein, 6 aa, synthetic construct
PDEPSE

SEQ ID NO: 8317 - protein, 6 aa, synthetic construct
PDEPSF

SEQ ID NO: 8318 - protein, 6 aa, synthetic construct
PDEPSW

SEQ ID NO: 8319 - protein, 6 aa, synthetic construct
PDEPSY

SEQ ID NO: 8320 - protein, 6 aa, synthetic construct
PDEPTD

SEQ ID NO: 8321 - protein, 6 aa, synthetic construct
PDEPTE

SEQ ID NO: 8322 - protein, 6 aa, synthetic construct
PDEPTF

SEQ ID NO: 8323 - protein, 6 aa, synthetic construct
PDEPTW

SEQ ID NO: 8324 - protein, 6 aa, synthetic construct
PDEPTY

SEQ ID NO: 8325 - protein, 6 aa, synthetic construct
PDEPWD

SEQ ID NO: 8326 - protein, 6 aa, synthetic construct
PDEPWE

SEQ ID NO: 8327 - protein, 6 aa, synthetic construct
PDEPWF

SEQ ID NO: 8328 - protein, 6 aa, synthetic construct
PDEPWW

SEQ ID NO: 8329 - protein, 6 aa, synthetic construct
PDEPWY

SEQ ID NO: 8330 - protein, 6 aa, synthetic construct
PDEPYD

SEQ ID NO: 8331 - protein, 6 aa, synthetic construct
PDEPYE

SEQ ID NO: 8332 - protein, 6 aa, synthetic construct
PDEPYF

SEQ ID NO: 8333 - protein, 6 aa, synthetic construct
PDEPYW

SEQ ID NO: 8334 - protein, 6 aa, synthetic construct
PDEPYY

SEQ ID NO: 8335 - protein, 6 aa, synthetic construct
PDEPVD

SEQ ID NO: 8336 - protein, 6 aa, synthetic construct
PDEPVE

SEQ ID NO: 8337 - protein, 6 aa, synthetic construct
PDEPVF

SEQ ID NO: 8338 - protein, 6 aa, synthetic construct
PDEPVW

SEQ ID NO: 8339 - protein, 6 aa, synthetic construct
PDEPVY

SEQ ID NO: 8340 - protein, 6 aa, synthetic construct
PDESAD

SEQ ID NO: 8341 - protein, 6 aa, synthetic construct
PDESAE

SEQ ID NO: 8342 - protein, 6 aa, synthetic construct
PDESAF

SEQ ID NO: 8343 - protein, 6 aa, synthetic construct
PDESAW

SEQ ID NO: 8344 - protein, 6 aa, synthetic construct
PDESAY

SEQ ID NO: 8345 - protein, 6 aa, synthetic construct
PDESRD

SEQ ID NO: 8346 - protein, 6 aa, synthetic construct
PDESRE

SEQ ID NO: 8347 - protein, 6 aa, synthetic construct
PDESRF

SEQ ID NO: 8348 - protein, 6 aa, synthetic construct
PDESRW

SEQ ID NO: 8349 - protein, 6 aa, synthetic construct
PDESRY

SEQ ID NO: 8350 - protein, 6 aa, synthetic construct
PDESND

SEQ ID NO: 8351 - protein, 6 aa, synthetic construct
PDESNE

SEQ ID NO: 8352 - protein, 6 aa, synthetic construct
PDESNF

SEQ ID NO: 8353 - protein, 6 aa, synthetic construct
PDESNW

SEQ ID NO: 8354 - protein, 6 aa, synthetic construct
PDESNY

SEQ ID NO: 8355 - protein, 6 aa, synthetic construct
PDESDD

SEQ ID NO: 8356 - protein, 6 aa, synthetic construct
PDESDE

SEQ ID NO: 8357 - protein, 6 aa, synthetic construct
PDESDF

SEQ ID NO: 8358 - protein, 6 aa, synthetic construct
PDESDW

SEQ ID NO: 8359 - protein, 6 aa, synthetic construct
PDESDY

SEQ ID NO: 8360 - protein, 6 aa, synthetic construct
PDESCD

SEQ ID NO: 8361 - protein, 6 aa, synthetic construct
PDESCE

SEQ ID NO: 8362 - protein, 6 aa, synthetic construct
PDESCF

SEQ ID NO: 8363 - protein, 6 aa, synthetic construct
PDESCW

SEQ ID NO: 8364 - protein, 6 aa, synthetic construct
PDESCY

SEQ ID NO: 8365 - protein, 6 aa, synthetic construct
PDESQD

SEQ ID NO: 8366 - protein, 6 aa, synthetic construct
PDESQE

SEQ ID NO: 8367 - protein, 6 aa, synthetic construct
PDESQF

SEQ ID NO: 8368 - protein, 6 aa, synthetic construct
PDESQW

SEQ ID NO: 8369 - protein, 6 aa, synthetic construct
PDESQY

SEQ ID NO: 8370 - protein, 6 aa, synthetic construct
PDESED

SEQ ID NO: 8371 - protein, 6 aa, synthetic construct
PDESEE

SEQ ID NO: 8372 - protein, 6 aa, synthetic construct
PDESEF

SEQ ID NO: 8373 - protein, 6 aa, synthetic construct
PDESEW

SEQ ID NO: 8374 - protein, 6 aa, synthetic construct
PDESEY

SEQ ID NO: 8375 - protein, 6 aa, synthetic construct
PDESGD

SEQ ID NO: 8376 - protein, 6 aa, synthetic construct
PDESGE

SEQ ID NO: 8377 - protein, 6 aa, synthetic construct
PDESGF

SEQ ID NO: 8378 - protein, 6 aa, synthetic construct
PDESGW

SEQ ID NO: 8379 - protein, 6 aa, synthetic construct
PDESGY

SEQ ID NO: 8380 - protein, 6 aa, synthetic construct
PDESHD

SEQ ID NO: 8381 - protein, 6 aa, synthetic construct
PDESHE

SEQ ID NO: 8382 - protein, 6 aa, synthetic construct
PDESHF

SEQ ID NO: 8383 - protein, 6 aa, synthetic construct
PDESHW

SEQ ID NO: 8384 - protein, 6 aa, synthetic construct
PDESHY

SEQ ID NO: 8385 - protein, 6 aa, synthetic construct
PDESID

SEQ ID NO: 8386 - protein, 6 aa, synthetic construct
PDESIE

SEQ ID NO: 8387 - protein, 6 aa, synthetic construct
PDESIF

SEQ ID NO: 8388 - protein, 6 aa, synthetic construct
PDESIW

SEQ ID NO: 8389 - protein, 6 aa, synthetic construct
PDESIY

SEQ ID NO: 8390 - protein, 6 aa, synthetic construct
PDESLD

SEQ ID NO: 8391 - protein, 6 aa, synthetic construct
PDESLE

SEQ ID NO: 8392 - protein, 6 aa, synthetic construct
PDESLF

SEQ ID NO: 8393 - protein, 6 aa, synthetic construct
PDESLW

SEQ ID NO: 8394 - protein, 6 aa, synthetic construct
PDESLY

SEQ ID NO: 8395 - protein, 6 aa, synthetic construct
PDESKD

SEQ ID NO: 8396 - protein, 6 aa, synthetic construct
PDESKE

SEQ ID NO: 8397 - protein, 6 aa, synthetic construct
PDESKF

SEQ ID NO: 8398 - protein, 6 aa, synthetic construct
PDESKW

SEQ ID NO: 8399 - protein, 6 aa, synthetic construct
PDESKY

SEQ ID NO: 8400 - protein, 6 aa, synthetic construct
PDESMD

SEQ ID NO: 8401 - protein, 6 aa, synthetic construct
PDESME

SEQ ID NO: 8402 - protein, 6 aa, synthetic construct
PDESMF

SEQ ID NO: 8403 - protein, 6 aa, synthetic construct
PDESMW

SEQ ID NO: 8404 - protein, 6 aa, synthetic construct
PDESMY

SEQ ID NO: 8405 - protein, 6 aa, synthetic construct
PDESFD

SEQ ID NO: 8406 - protein, 6 aa, synthetic construct
PDESFE

SEQ ID NO: 8407 - protein, 6 aa, synthetic construct
PDESFF

SEQ ID NO: 8408 - protein, 6 aa, synthetic construct
PDESFW

SEQ ID NO: 8409 - protein, 6 aa, synthetic construct
PDESFY

SEQ ID NO: 8410 - protein, 6 aa, synthetic construct
PDESPD

SEQ ID NO: 8411 - protein, 6 aa, synthetic construct
PDESPE

SEQ ID NO: 8412 - protein, 6 aa, synthetic construct
PDESPF

SEQ ID NO: 8413 - protein, 6 aa, synthetic construct
PDESPW

SEQ ID NO: 8414 - protein, 6 aa, synthetic construct
PDESPY

SEQ ID NO: 8415 - protein, 6 aa, synthetic construct
PDESSD

SEQ ID NO: 8416 - protein, 6 aa, synthetic construct
PDESSE

SEQ ID NO: 8417 - protein, 6 aa, synthetic construct
PDESSF

SEQ ID NO: 8418 - protein, 6 aa, synthetic construct
PDESSW

SEQ ID NO: 8419 - protein, 6 aa, synthetic construct
PDESSY

SEQ ID NO: 8420 - protein, 6 aa, synthetic construct
PDESTD

SEQ ID NO: 8421 - protein, 6 aa, synthetic construct
PDESTE

SEQ ID NO: 8422 - protein, 6 aa, synthetic construct
PDESTF

SEQ ID NO: 8423 - protein, 6 aa, synthetic construct
PDESTW

SEQ ID NO: 8424 - protein, 6 aa, synthetic construct
PDESTY

SEQ ID NO: 8425 - protein, 6 aa, synthetic construct
PDESWD

SEQ ID NO: 8426 - protein, 6 aa, synthetic construct
PDESWE

SEQ ID NO: 8427 - protein, 6 aa, synthetic construct
PDESWF

SEQ ID NO: 8428 - protein, 6 aa, synthetic construct
PDESWW

SEQ ID NO: 8429 - protein, 6 aa, synthetic construct
PDESWY

SEQ ID NO: 8430 - protein, 6 aa, synthetic construct
PDESYD

SEQ ID NO: 8431 - protein, 6 aa, synthetic construct
PDESYE

SEQ ID NO: 8432 - protein, 6 aa, synthetic construct
PDESYF

SEQ ID NO: 8433 - protein, 6 aa, synthetic construct
PDESYW

SEQ ID NO: 8434 - protein, 6 aa, synthetic construct
PDESYY

SEQ ID NO: 8435 - protein, 6 aa, synthetic construct
PDESVD

SEQ ID NO: 8436 - protein, 6 aa, synthetic construct
PDESVE

SEQ ID NO: 8437 - protein, 6 aa, synthetic construct
PDESVF

SEQ ID NO: 8438 - protein, 6 aa, synthetic construct
PDESVW

SEQ ID NO: 8439 - protein, 6 aa, synthetic construct
PDESVY

SEQ ID NO: 8440 - protein, 6 aa, synthetic construct
PDETAD

SEQ ID NO: 8441 - protein, 6 aa, synthetic construct
PDETAE

SEQ ID NO: 8442 - protein, 6 aa, synthetic construct
PDETAF

SEQ ID NO: 8443 - protein, 6 aa, synthetic construct
PDETAW

SEQ ID NO: 8444 - protein, 6 aa, synthetic construct
PDETAY

SEQ ID NO: 8445 - protein, 6 aa, synthetic construct
PDETRD

SEQ ID NO: 8446 - protein, 6 aa, synthetic construct
PDETRE

SEQ ID NO: 8447 - protein, 6 aa, synthetic construct
PDETRF

SEQ ID NO: 8448 - protein, 6 aa, synthetic construct
PDETRW

SEQ ID NO: 8449 - protein, 6 aa, synthetic construct
PDETRY

SEQ ID NO: 8450 - protein, 6 aa, synthetic construct
PDETND

SEQ ID NO: 8451 - protein, 6 aa, synthetic construct
PDETNE

SEQ ID NO: 8452 - protein, 6 aa, synthetic construct
PDETNF

SEQ ID NO: 8453 - protein, 6 aa, synthetic construct
PDETNW

SEQ ID NO: 8454 - protein, 6 aa, synthetic construct
PDETNY

SEQ ID NO: 8455 - protein, 6 aa, synthetic construct
PDETDD

SEQ ID NO: 8456 - protein, 6 aa, synthetic construct
PDETDE

SEQ ID NO: 8457 - protein, 6 aa, synthetic construct
PDETDF

SEQ ID NO: 8458 - protein, 6 aa, synthetic construct
PDETDW

SEQ ID NO: 8459 - protein, 6 aa, synthetic construct
PDETDY

SEQ ID NO: 8460 - protein, 6 aa, synthetic construct
PDETCD

SEQ ID NO: 8461 - protein, 6 aa, synthetic construct
PDETCE

SEQ ID NO: 8462 - protein, 6 aa, synthetic construct
PDETCF

SEQ ID NO: 8463 - protein, 6 aa, synthetic construct
PDETCW

SEQ ID NO: 8464 - protein, 6 aa, synthetic construct
PDETCY

SEQ ID NO: 8465 - protein, 6 aa, synthetic construct
PDETQD

SEQ ID NO: 8466 - protein, 6 aa, synthetic construct
PDETQE

SEQ ID NO: 8467 - protein, 6 aa, synthetic construct
PDETQF

SEQ ID NO: 8468 - protein, 6 aa, synthetic construct
PDETQW

SEQ ID NO: 8469 - protein, 6 aa, synthetic construct
PDETQY

SEQ ID NO: 8470 - protein, 6 aa, synthetic construct
PDETED

SEQ ID NO: 8471 - protein, 6 aa, synthetic construct
PDETEE

SEQ ID NO: 8472 - protein, 6 aa, synthetic construct
PDETEF

SEQ ID NO: 8473 - protein, 6 aa, synthetic construct
PDETEW

SEQ ID NO: 8474 - protein, 6 aa, synthetic construct
PDETEY

SEQ ID NO: 8475 - protein, 6 aa, synthetic construct
PDETGD

SEQ ID NO: 8476 - protein, 6 aa, synthetic construct
PDETGE

SEQ ID NO: 8477 - protein, 6 aa, synthetic construct
PDETGF

SEQ ID NO: 8478 - protein, 6 aa, synthetic construct
PDETGW

SEQ ID NO: 8479 - protein, 6 aa, synthetic construct
PDETGY

SEQ ID NO: 8480 - protein, 6 aa, synthetic construct
PDETHD

SEQ ID NO: 8481 - protein, 6 aa, synthetic construct
PDETHE

SEQ ID NO: 8482 - protein, 6 aa, synthetic construct
PDETHF

SEQ ID NO: 8483 - protein, 6 aa, synthetic construct
PDETHW

SEQ ID NO: 8484 - protein, 6 aa, synthetic construct
PDETHY

SEQ ID NO: 8485 - protein, 6 aa, synthetic construct
PDETID

SEQ ID NO: 8486 - protein, 6 aa, synthetic construct
PDETIE

SEQ ID NO: 8487 - protein, 6 aa, synthetic construct
PDETIF

SEQ ID NO: 8488 - protein, 6 aa, synthetic construct
PDETIW

SEQ ID NO: 8489 - protein, 6 aa, synthetic construct
PDETIY

SEQ ID NO: 8490 - protein, 6 aa, synthetic construct
PDETLD

SEQ ID NO: 8491 - protein, 6 aa, synthetic construct
PDETLE

SEQ ID NO: 8492 - protein, 6 aa, synthetic construct
PDETLF

SEQ ID NO: 8493 - protein, 6 aa, synthetic construct
PDETLW

SEQ ID NO: 8494 - protein, 6 aa, synthetic construct
PDETLY

SEQ ID NO: 8495 - protein, 6 aa, synthetic construct
PDETKD

SEQ ID NO: 8496 - protein, 6 aa, synthetic construct
PDETKE

SEQ ID NO: 8497 - protein, 6 aa, synthetic construct
PDETKF

SEQ ID NO: 8498 - protein, 6 aa, synthetic construct
PDETKW

SEQ ID NO: 8499 - protein, 6 aa, synthetic construct
PDETKY

SEQ ID NO: 8500 - protein, 6 aa, synthetic construct
PDETMD

SEQ ID NO: 8501 - protein, 6 aa, synthetic construct
PDETME

SEQ ID NO: 8502 - protein, 6 aa, synthetic construct
PDETMF

SEQ ID NO: 8503 - protein, 6 aa, synthetic construct
PDETMW

SEQ ID NO: 8504 - protein, 6 aa, synthetic construct
PDETMY

SEQ ID NO: 8505 - protein, 6 aa, synthetic construct
PDETFD

SEQ ID NO: 8506 - protein, 6 aa, synthetic construct
PDETFE

SEQ ID NO: 8507 - protein, 6 aa, synthetic construct
PDETFF

SEQ ID NO: 8508 - protein, 6 aa, synthetic construct
PDETFW

SEQ ID NO: 8509 - protein, 6 aa, synthetic construct
PDETFY

SEQ ID NO: 8510 - protein, 6 aa, synthetic construct
PDETPD

SEQ ID NO: 8511 - protein, 6 aa, synthetic construct
PDETPE

SEQ ID NO: 8512 - protein, 6 aa, synthetic construct
PDETPF

SEQ ID NO: 8513 - protein, 6 aa, synthetic construct
PDETPW

SEQ ID NO: 8514 - protein, 6 aa, synthetic construct
PDETPY

SEQ ID NO: 8515 - protein, 6 aa, synthetic construct
PDETSD

SEQ ID NO: 8516 - protein, 6 aa, synthetic construct
PDETSE

SEQ ID NO: 8517 - protein, 6 aa, synthetic construct
PDETSF

SEQ ID NO: 8518 - protein, 6 aa, synthetic construct
PDETSW

SEQ ID NO: 8519 - protein, 6 aa, synthetic construct
PDETSY

SEQ ID NO: 8520 - protein, 6 aa, synthetic construct
PDETTD

SEQ ID NO: 8521 - protein, 6 aa, synthetic construct
PDETTE

SEQ ID NO: 8522 - protein, 6 aa, synthetic construct
PDETTF

SEQ ID NO: 8523 - protein, 6 aa, synthetic construct
PDETTW

SEQ ID NO: 8524 - protein, 6 aa, synthetic construct
PDETTY

SEQ ID NO: 8525 - protein, 6 aa, synthetic construct
PDETWD

SEQ ID NO: 8526 - protein, 6 aa, synthetic construct
PDETWE

SEQ ID NO: 8527 - protein, 6 aa, synthetic construct
PDETWF

SEQ ID NO: 8528 - protein, 6 aa, synthetic construct
PDETWW

SEQ ID NO: 8529 - protein, 6 aa, synthetic construct
PDETWY

SEQ ID NO: 8530 - protein, 6 aa, synthetic construct
PDETYD

SEQ ID NO: 8531 - protein, 6 aa, synthetic construct
PDETYE

SEQ ID NO: 8532 - protein, 6 aa, synthetic construct
PDETYF

SEQ ID NO: 8533 - protein, 6 aa, synthetic construct
PDETYW

SEQ ID NO: 8534 - protein, 6 aa, synthetic construct
PDETYY

SEQ ID NO: 8535 - protein, 6 aa, synthetic construct
PDETVD

SEQ ID NO: 8536 - protein, 6 aa, synthetic construct
PDETVE

SEQ ID NO: 8537 - protein, 6 aa, synthetic construct
PDETVF

SEQ ID NO: 8538 - protein, 6 aa, synthetic construct
PDETVW

SEQ ID NO: 8539 - protein, 6 aa, synthetic construct
PDETVY

SEQ ID NO: 8540 - protein, 6 aa, synthetic construct
PDEWAD

SEQ ID NO: 8541 - protein, 6 aa, synthetic construct
PDEWAE

SEQ ID NO: 8542 - protein, 6 aa, synthetic construct
PDEWAF

SEQ ID NO: 8543 - protein, 6 aa, synthetic construct
PDEWAW

SEQ ID NO: 8544 - protein, 6 aa, synthetic construct
PDEWAY

SEQ ID NO: 8545 - protein, 6 aa, synthetic construct
PDEWRD

SEQ ID NO: 8546 - protein, 6 aa, synthetic construct
PDEWRE

SEQ ID NO: 8547 - protein, 6 aa, synthetic construct
PDEWRF

SEQ ID NO: 8548 - protein, 6 aa, synthetic construct
PDEWRW

SEQ ID NO: 8549 - protein, 6 aa, synthetic construct
PDEWRY

SEQ ID NO: 8550 - protein, 6 aa, synthetic construct
PDEWND

SEQ ID NO: 8551 - protein, 6 aa, synthetic construct
PDEWNE

SEQ ID NO: 8552 - protein, 6 aa, synthetic construct
PDEWNF

SEQ ID NO: 8553 - protein, 6 aa, synthetic construct
PDEWNW

SEQ ID NO: 8554 - protein, 6 aa, synthetic construct
PDEWNY

SEQ ID NO: 8555 - protein, 6 aa, synthetic construct
PDEWDD

SEQ ID NO: 8556 - protein, 6 aa, synthetic construct
PDEWDE

SEQ ID NO: 8557 - protein, 6 aa, synthetic construct
PDEWDF

SEQ ID NO: 8558 - protein, 6 aa, synthetic construct
PDEWDW

SEQ ID NO: 8559 - protein, 6 aa, synthetic construct
PDEWDY

SEQ ID NO: 8560 - protein, 6 aa, synthetic construct
PDEWCD

SEQ ID NO: 8561 - protein, 6 aa, synthetic construct
PDEWCE

SEQ ID NO: 8562 - protein, 6 aa, synthetic construct
PDEWCF

SEQ ID NO: 8563 - protein, 6 aa, synthetic construct
PDEWCW

SEQ ID NO: 8564 - protein, 6 aa, synthetic construct
PDEWCY

SEQ ID NO: 8565 - protein, 6 aa, synthetic construct
PDEWQD

SEQ ID NO: 8566 - protein, 6 aa, synthetic construct
PDEWQE

SEQ ID NO: 8567 - protein, 6 aa, synthetic construct
PDEWQF

SEQ ID NO: 8568 - protein, 6 aa, synthetic construct
PDEWQW

SEQ ID NO: 8569 - protein, 6 aa, synthetic construct
PDEWQY

SEQ ID NO: 8570 - protein, 6 aa, synthetic construct
PDEWED

SEQ ID NO: 8571 - protein, 6 aa, synthetic construct
PDEWEE

SEQ ID NO: 8572 - protein, 6 aa, synthetic construct
PDEWEF

SEQ ID NO: 8573 - protein, 6 aa, synthetic construct
PDEWEW

SEQ ID NO: 8574 - protein, 6 aa, synthetic construct
PDEWEY

SEQ ID NO: 8575 - protein, 6 aa, synthetic construct
PDEWGD

SEQ ID NO: 8576 - protein, 6 aa, synthetic construct
PDEWGE

SEQ ID NO: 8577 - protein, 6 aa, synthetic construct
PDEWGF

SEQ ID NO: 8578 - protein, 6 aa, synthetic construct
PDEWGW

SEQ ID NO: 8579 - protein, 6 aa, synthetic construct
PDEWGY

SEQ ID NO: 8580 - protein, 6 aa, synthetic construct
PDEWHD

SEQ ID NO: 8581 - protein, 6 aa, synthetic construct
PDEWHE

SEQ ID NO: 8582 - protein, 6 aa, synthetic construct
PDEWHF

SEQ ID NO: 8583 - protein, 6 aa, synthetic construct
PDEWHW

SEQ ID NO: 8584 - protein, 6 aa, synthetic construct
PDEWHY

SEQ ID NO: 8585 - protein, 6 aa, synthetic construct
PDEWID

SEQ ID NO: 8586 - protein, 6 aa, synthetic construct
PDEWIE

SEQ ID NO: 8587 - protein, 6 aa, synthetic construct
PDEWIF

SEQ ID NO: 8588 - protein, 6 aa, synthetic construct
PDEWIW

SEQ ID NO: 8589 - protein, 6 aa, synthetic construct
PDEWIY

SEQ ID NO: 8590 - protein, 6 aa, synthetic construct
PDEWLD

SEQ ID NO: 8591 - protein, 6 aa, synthetic construct
PDEWLE

SEQ ID NO: 8592 - protein, 6 aa, synthetic construct
PDEWLF

SEQ ID NO: 8593 - protein, 6 aa, synthetic construct
PDEWLW

SEQ ID NO: 8594 - protein, 6 aa, synthetic construct
PDEWLY

SEQ ID NO: 8595 - protein, 6 aa, synthetic construct
PDEWKD

SEQ ID NO: 8596 - protein, 6 aa, synthetic construct
PDEWKE

SEQ ID NO: 8597 - protein, 6 aa, synthetic construct
PDEWKF

SEQ ID NO: 8598 - protein, 6 aa, synthetic construct
PDEWKW

SEQ ID NO: 8599 - protein, 6 aa, synthetic construct
PDEWKY

SEQ ID NO: 8600 - protein, 6 aa, synthetic construct
PDEWMD

SEQ ID NO: 8601 - protein, 6 aa, synthetic construct
PDEWME

SEQ ID NO: 8602 - protein, 6 aa, synthetic construct
PDEWMF

SEQ ID NO: 8603 - protein, 6 aa, synthetic construct
PDEWMW

SEQ ID NO: 8604 - protein, 6 aa, synthetic construct
PDEWMY

SEQ ID NO: 8605 - protein, 6 aa, synthetic construct
PDEWFD

SEQ ID NO: 8606 - protein, 6 aa, synthetic construct
PDEWFE

SEQ ID NO: 8607 - protein, 6 aa, synthetic construct
PDEWFF

SEQ ID NO: 8608 - protein, 6 aa, synthetic construct
PDEWFW

SEQ ID NO: 8609 - protein, 6 aa, synthetic construct
PDEWFY

SEQ ID NO: 8610 - protein, 6 aa, synthetic construct
PDEWPD

SEQ ID NO: 8611 - protein, 6 aa, synthetic construct
PDEWPE

SEQ ID NO: 8612 - protein, 6 aa, synthetic construct
PDEWPF

SEQ ID NO: 8613 - protein, 6 aa, synthetic construct
PDEWPW

SEQ ID NO: 8614 - protein, 6 aa, synthetic construct
PDEWPY

SEQ ID NO: 8615 - protein, 6 aa, synthetic construct
PDEWSD

SEQ ID NO: 8616 - protein, 6 aa, synthetic construct
PDEWSE

SEQ ID NO: 8617 - protein, 6 aa, synthetic construct
PDEWSF

SEQ ID NO: 8618 - protein, 6 aa, synthetic construct
PDEWSW

SEQ ID NO: 8619 - protein, 6 aa, synthetic construct
PDEWSY

SEQ ID NO: 8620 - protein, 6 aa, synthetic construct
PDEWTD

SEQ ID NO: 8621 - protein, 6 aa, synthetic construct
PDEWTE

SEQ ID NO: 8622 - protein, 6 aa, synthetic construct
PDEWTF

SEQ ID NO: 8623 - protein, 6 aa, synthetic construct
PDEWTW

SEQ ID NO: 8624 - protein, 6 aa, synthetic construct
PDEWTY

SEQ ID NO: 8625 - protein, 6 aa, synthetic construct
PDEWWD

SEQ ID NO: 8626 - protein, 6 aa, synthetic construct
PDEWWE

SEQ ID NO: 8627 - protein, 6 aa, synthetic construct
PDEWWF

SEQ ID NO: 8628 - protein, 6 aa, synthetic construct
PDEWWW

SEQ ID NO: 8629 - protein, 6 aa, synthetic construct
PDEWWY

SEQ ID NO: 8630 - protein, 6 aa, synthetic construct
PDEWYD

SEQ ID NO: 8631 - protein, 6 aa, synthetic construct
PDEWYE

SEQ ID NO: 8632 - protein, 6 aa, synthetic construct
PDEWYF

SEQ ID NO: 8633 - protein, 6 aa, synthetic construct
PDEWYW

SEQ ID NO: 8634 - protein, 6 aa, synthetic construct
PDEWYY

SEQ ID NO: 8635 - protein, 6 aa, synthetic construct
PDEWVD

SEQ ID NO: 8636 - protein, 6 aa, synthetic construct
PDEWVE

SEQ ID NO: 8637 - protein, 6 aa, synthetic construct
PDEWVF

SEQ ID NO: 8638 - protein, 6 aa, synthetic construct
PDEWVW

SEQ ID NO: 8639 - protein, 6 aa, synthetic construct
PDEWVY

SEQ ID NO: 8640 - protein, 6 aa, synthetic construct
PDEYAD

SEQ ID NO: 8641 - protein, 6 aa, synthetic construct
PDEYAE

SEQ ID NO: 8642 - protein, 6 aa, synthetic construct
PDEYAF

SEQ ID NO: 8643 - protein, 6 aa, synthetic construct
PDEYAW

SEQ ID NO: 8644 - protein, 6 aa, synthetic construct
PDEYAY

SEQ ID NO: 8645 - protein, 6 aa, synthetic construct
PDEYRD

SEQ ID NO: 8646 - protein, 6 aa, synthetic construct
PDEYRE

SEQ ID NO: 8647 - protein, 6 aa, synthetic construct
PDEYRF

SEQ ID NO: 8648 - protein, 6 aa, synthetic construct
PDEYRW

SEQ ID NO: 8649 - protein, 6 aa, synthetic construct
PDEYRY

SEQ ID NO: 8650 - protein, 6 aa, synthetic construct
PDEYND

SEQ ID NO: 8651 - protein, 6 aa, synthetic construct
PDEYNE

SEQ ID NO: 8652 - protein, 6 aa, synthetic construct
PDEYNF

SEQ ID NO: 8653 - protein, 6 aa, synthetic construct
PDEYNW

SEQ ID NO: 8654 - protein, 6 aa, synthetic construct
PDEYNY

SEQ ID NO: 8655 - protein, 6 aa, synthetic construct
PDEYDD

SEQ ID NO: 8656 - protein, 6 aa, synthetic construct
PDEYDE

SEQ ID NO: 8657 - protein, 6 aa, synthetic construct
PDEYDF

SEQ ID NO: 8658 - protein, 6 aa, synthetic construct
PDEYDW

SEQ ID NO: 8659 - protein, 6 aa, synthetic construct
PDEYDY

SEQ ID NO: 8660 - protein, 6 aa, synthetic construct
PDEYCD

SEQ ID NO: 8661 - protein, 6 aa, synthetic construct
PDEYCE

SEQ ID NO: 8662 - protein, 6 aa, synthetic construct
PDEYCF

SEQ ID NO: 8663 - protein, 6 aa, synthetic construct
PDEYCW

SEQ ID NO: 8664 - protein, 6 aa, synthetic construct
PDEYCY

SEQ ID NO: 8665 - protein, 6 aa, synthetic construct
PDEYQD

SEQ ID NO: 8666 - protein, 6 aa, synthetic construct
PDEYQE

SEQ ID NO: 8667 - protein, 6 aa, synthetic construct
PDEYQF

SEQ ID NO: 8668 - protein, 6 aa, synthetic construct
PDEYQW

SEQ ID NO: 8669 - protein, 6 aa, synthetic construct
PDEYQY

SEQ ID NO: 8670 - protein, 6 aa, synthetic construct
PDEYED

SEQ ID NO: 8671 - protein, 6 aa, synthetic construct
PDEYEE

SEQ ID NO: 8672 - protein, 6 aa, synthetic construct
PDEYEF

SEQ ID NO: 8673 - protein, 6 aa, synthetic construct
PDEYEW

SEQ ID NO: 8674 - protein, 6 aa, synthetic construct
PDEYEY

SEQ ID NO: 8675 - protein, 6 aa, synthetic construct
PDEYGD

SEQ ID NO: 8676 - protein, 6 aa, synthetic construct
PDEYGE

SEQ ID NO: 8677 - protein, 6 aa, synthetic construct
PDEYGF

SEQ ID NO: 8678 - protein, 6 aa, synthetic construct
PDEYGW

SEQ ID NO: 8679 - protein, 6 aa, synthetic construct
PDEYGY

SEQ ID NO: 8680 - protein, 6 aa, synthetic construct
PDEYHD

SEQ ID NO: 8681 - protein, 6 aa, synthetic construct
PDEYHE

SEQ ID NO: 8682 - protein, 6 aa, synthetic construct
PDEYHF

SEQ ID NO: 8683 - protein, 6 aa, synthetic construct
PDEYHW

SEQ ID NO: 8684 - protein, 6 aa, synthetic construct
PDEYHY

SEQ ID NO: 8685 - protein, 6 aa, synthetic construct
PDEYID

SEQ ID NO: 8686 - protein, 6 aa, synthetic construct
PDEYIE

SEQ ID NO: 8687 - protein, 6 aa, synthetic construct
PDEYIF

SEQ ID NO: 8688 - protein, 6 aa, synthetic construct
PDEYIW

SEQ ID NO: 8689 - protein, 6 aa, synthetic construct
PDEYIY

SEQ ID NO: 8690 - protein, 6 aa, synthetic construct
PDEYLD

SEQ ID NO: 8691 - protein, 6 aa, synthetic construct
PDEYLE

SEQ ID NO: 8692 - protein, 6 aa, synthetic construct
PDEYLF

SEQ ID NO: 8693 - protein, 6 aa, synthetic construct
PDEYLW

SEQ ID NO: 8694 - protein, 6 aa, synthetic construct
PDEYLY

SEQ ID NO: 8695 - protein, 6 aa, synthetic construct
PDEYKD

SEQ ID NO: 8696 - protein, 6 aa, synthetic construct
PDEYKE

SEQ ID NO: 8697 - protein, 6 aa, synthetic construct
PDEYKF

SEQ ID NO: 8698 - protein, 6 aa, synthetic construct
PDEYKW

SEQ ID NO: 8699 - protein, 6 aa, synthetic construct
PDEYKY

SEQ ID NO: 8700 - protein, 6 aa, synthetic construct
PDEYMD

SEQ ID NO: 8701 - protein, 6 aa, synthetic construct
PDEYME

SEQ ID NO: 8702 - protein, 6 aa, synthetic construct
PDEYMF

SEQ ID NO: 8703 - protein, 6 aa, synthetic construct
PDEYMW

SEQ ID NO: 8704 - protein, 6 aa, synthetic construct
PDEYMY

SEQ ID NO: 8705 - protein, 6 aa, synthetic construct
PDEYFD

SEQ ID NO: 8706 - protein, 6 aa, synthetic construct
PDEYFE

SEQ ID NO: 8707 - protein, 6 aa, synthetic construct
PDEYFF

SEQ ID NO: 8708 - protein, 6 aa, synthetic construct
PDEYFW

SEQ ID NO: 8709 - protein, 6 aa, synthetic construct
PDEYFY

SEQ ID NO: 8710 - protein, 6 aa, synthetic construct
PDEYPD

SEQ ID NO: 8711 - protein, 6 aa, synthetic construct
PDEYPE

SEQ ID NO: 8712 - protein, 6 aa, synthetic construct
PDEYPF

SEQ ID NO: 8713 - protein, 6 aa, synthetic construct
PDEYPW

SEQ ID NO: 8714 - protein, 6 aa, synthetic construct
PDEYPY

SEQ ID NO: 8715 - protein, 6 aa, synthetic construct
PDEYSD

SEQ ID NO: 8716 - protein, 6 aa, synthetic construct
PDEYSE

SEQ ID NO: 8717 - protein, 6 aa, synthetic construct
PDEYSF

SEQ ID NO: 8718 - protein, 6 aa, synthetic construct
PDEYSW

SEQ ID NO: 8719 - protein, 6 aa, synthetic construct
PDEYSY

SEQ ID NO: 8720 - protein, 6 aa, synthetic construct
PDEYTD

SEQ ID NO: 8721 - protein, 6 aa, synthetic construct
PDEYTE

SEQ ID NO: 8722 - protein, 6 aa, synthetic construct
PDEYTF

SEQ ID NO: 8723 - protein, 6 aa, synthetic construct
PDEYTW

SEQ ID NO: 8724 - protein, 6 aa, synthetic construct
PDEYTY

SEQ ID NO: 8725 - protein, 6 aa, synthetic construct
PDEYWD

SEQ ID NO: 8726 - protein, 6 aa, synthetic construct
PDEYWE

SEQ ID NO: 8727 - protein, 6 aa, synthetic construct
PDEYWF

SEQ ID NO: 8728 - protein, 6 aa, synthetic construct
PDEYWW

SEQ ID NO: 8729 - protein, 6 aa, synthetic construct
PDEYWY

SEQ ID NO: 8730 - protein, 6 aa, synthetic construct
PDEYYD

SEQ ID NO: 8731 - protein, 6 aa, synthetic construct
PDEYYE

SEQ ID NO: 8732 - protein, 6 aa, synthetic construct
PDEYYF

SEQ ID NO: 8733 - protein, 6 aa, synthetic construct
PDEYYW

SEQ ID NO: 8734 - protein, 6 aa, synthetic construct
PDEYYY

SEQ ID NO: 8735 - protein, 6 aa, synthetic construct
PDEYVD

SEQ ID NO: 8736 - protein, 6 aa, synthetic construct
PDEYVE

SEQ ID NO: 8737 - protein, 6 aa, synthetic construct
PDEYVF

SEQ ID NO: 8738 - protein, 6 aa, synthetic construct
PDEYVW

SEQ ID NO: 8739 - protein, 6 aa, synthetic construct
PDEYVY

SEQ ID NO: 8740 - protein, 6 aa, synthetic construct
PDEVAD

SEQ ID NO: 8741 - protein, 6 aa, synthetic construct
PDEVAE

SEQ ID NO: 8742 - protein, 6 aa, synthetic construct
PDEVAF

SEQ ID NO: 8743 - protein, 6 aa, synthetic construct
PDEVAW

SEQ ID NO: 8744 - protein, 6 aa, synthetic construct
PDEVAY

SEQ ID NO: 8745 - protein, 6 aa, synthetic construct
PDEVRD

SEQ ID NO: 8746 - protein, 6 aa, synthetic construct
PDEVRE

SEQ ID NO: 8747 - protein, 6 aa, synthetic construct
PDEVRF

SEQ ID NO: 8748 - protein, 6 aa, synthetic construct
PDEVRW

SEQ ID NO: 8749 - protein, 6 aa, synthetic construct
PDEVRY

SEQ ID NO: 8750 - protein, 6 aa, synthetic construct
PDEVND

SEQ ID NO: 8751 - protein, 6 aa, synthetic construct
PDEVNE

SEQ ID NO: 8752 - protein, 6 aa, synthetic construct
PDEVNF

SEQ ID NO: 8753 - protein, 6 aa, synthetic construct
PDEVNW

SEQ ID NO: 8754 - protein, 6 aa, synthetic construct
PDEVNY

SEQ ID NO: 8755 - protein, 6 aa, synthetic construct
PDEVDD

SEQ ID NO: 8756 - protein, 6 aa, synthetic construct
PDEVDE

SEQ ID NO: 8757 - protein, 6 aa, synthetic construct
PDEVDF

SEQ ID NO: 8758 - protein, 6 aa, synthetic construct
PDEVDW

SEQ ID NO: 8759 - protein, 6 aa, synthetic construct
PDEVDY

SEQ ID NO: 8760 - protein, 6 aa, synthetic construct
PDEVCD

SEQ ID NO: 8761 - protein, 6 aa, synthetic construct
PDEVCE

SEQ ID NO: 8762 - protein, 6 aa, synthetic construct
PDEVCF

SEQ ID NO: 8763 - protein, 6 aa, synthetic construct
PDEVCW

SEQ ID NO: 8764 - protein, 6 aa, synthetic construct
PDEVCY

SEQ ID NO: 8765 - protein, 6 aa, synthetic construct
PDEVQD

SEQ ID NO: 8766 - protein, 6 aa, synthetic construct
PDEVQE

SEQ ID NO: 8767 - protein, 6 aa, synthetic construct
PDEVQF

SEQ ID NO: 8768 - protein, 6 aa, synthetic construct
PDEVQW

SEQ ID NO: 8769 - protein, 6 aa, synthetic construct
PDEVQY

SEQ ID NO: 8770 - protein, 6 aa, synthetic construct
PDEVED

SEQ ID NO: 8771 - protein, 6 aa, synthetic construct
PDEVEE

SEQ ID NO: 8772 - protein, 6 aa, synthetic construct
PDEVEF

SEQ ID NO: 8773 - protein, 6 aa, synthetic construct
PDEVEW

SEQ ID NO: 8774 - protein, 6 aa, synthetic construct
PDEVEY

SEQ ID NO: 8775 - protein, 6 aa, synthetic construct
PDEVGD

SEQ ID NO: 8776 - protein, 6 aa, synthetic construct
PDEVGE

SEQ ID NO: 8777 - protein, 6 aa, synthetic construct
PDEVGF

SEQ ID NO: 8778 - protein, 6 aa, synthetic construct
PDEVGW

SEQ ID NO: 8779 - protein, 6 aa, synthetic construct
PDEVGY

SEQ ID NO: 8780 - protein, 6 aa, synthetic construct
PDEVHD

SEQ ID NO: 8781 - protein, 6 aa, synthetic construct
PDEVHE

SEQ ID NO: 8782 - protein, 6 aa, synthetic construct
PDEVHF

SEQ ID NO: 8783 - protein, 6 aa, synthetic construct
PDEVHW

SEQ ID NO: 8784 - protein, 6 aa, synthetic construct
PDEVHY

SEQ ID NO: 8785 - protein, 6 aa, synthetic construct
PDEVID

SEQ ID NO: 8786 - protein, 6 aa, synthetic construct
PDEVIE

SEQ ID NO: 8787 - protein, 6 aa, synthetic construct
PDEVIF

SEQ ID NO: 8788 - protein, 6 aa, synthetic construct
PDEVIW

SEQ ID NO: 8789 - protein, 6 aa, synthetic construct
PDEVIY

SEQ ID NO: 8790 - protein, 6 aa, synthetic construct
PDEVLD

SEQ ID NO: 8791 - protein, 6 aa, synthetic construct
PDEVLE

SEQ ID NO: 8792 - protein, 6 aa, synthetic construct
PDEVLF

SEQ ID NO: 8793 - protein, 6 aa, synthetic construct
PDEVLW

SEQ ID NO: 8794 - protein, 6 aa, synthetic construct
PDEVLY

SEQ ID NO: 8795 - protein, 6 aa, synthetic construct
PDEVKD

SEQ ID NO: 8796 - protein, 6 aa, synthetic construct
PDEVKE

SEQ ID NO: 8797 - protein, 6 aa, synthetic construct
PDEVKF

SEQ ID NO: 8798 - protein, 6 aa, synthetic construct
PDEVKW

SEQ ID NO: 8799 - protein, 6 aa, synthetic construct
PDEVKY

SEQ ID NO: 8800 - protein, 6 aa, synthetic construct
PDEVMD

SEQ ID NO: 8801 - protein, 6 aa, synthetic construct
PDEVME

SEQ ID NO: 8802 - protein, 6 aa, synthetic construct
PDEVMF

SEQ ID NO: 8803 - protein, 6 aa, synthetic construct
PDEVMW

SEQ ID NO: 8804 - protein, 6 aa, synthetic construct
PDEVMY

SEQ ID NO: 8805 - protein, 6 aa, synthetic construct
PDEVFD

SEQ ID NO: 8806 - protein, 6 aa, synthetic construct
PDEVFE

SEQ ID NO: 8807 - protein, 6 aa, synthetic construct
PDEVFF

SEQ ID NO: 8808 - protein, 6 aa, synthetic construct
PDEVFW

SEQ ID NO: 8809 - protein, 6 aa, synthetic construct
PDEVFY

SEQ ID NO: 8810 - protein, 6 aa, synthetic construct
PDEVPD

SEQ ID NO: 8811 - protein, 6 aa, synthetic construct
PDEVPE

SEQ ID NO: 8812 - protein, 6 aa, synthetic construct
PDEVPF

SEQ ID NO: 8813 - protein, 6 aa, synthetic construct
PDEVPW

SEQ ID NO: 8814 - protein, 6 aa, synthetic construct
PDEVPY

SEQ ID NO: 8815 - protein, 6 aa, synthetic construct
PDEVSD

SEQ ID NO: 8816 - protein, 6 aa, synthetic construct
PDEVSE

SEQ ID NO: 8817 - protein, 6 aa, synthetic construct
PDEVSF

SEQ ID NO: 8818 - protein, 6 aa, synthetic construct
PDEVSW

SEQ ID NO: 8819 - protein, 6 aa, synthetic construct
PDEVSY

SEQ ID NO: 8820 - protein, 6 aa, synthetic construct
PDEVTD

SEQ ID NO: 8821 - protein, 6 aa, synthetic construct
PDEVTE

SEQ ID NO: 8822 - protein, 6 aa, synthetic construct
PDEVTF

SEQ ID NO: 8823 - protein, 6 aa, synthetic construct
PDEVTW

SEQ ID NO: 8824 - protein, 6 aa, synthetic construct
PDEVTY

SEQ ID NO: 8825 - protein, 6 aa, synthetic construct
PDEVWD

SEQ ID NO: 8826 - protein, 6 aa, synthetic construct
PDEVWE

SEQ ID NO: 8827 - protein, 6 aa, synthetic construct
PDEVWF

SEQ ID NO: 8828 - protein, 6 aa, synthetic construct
PDEVWW

SEQ ID NO: 8829 - protein, 6 aa, synthetic construct
PDEVWY

SEQ ID NO: 8830 - protein, 6 aa, synthetic construct
PDEVYD

SEQ ID NO: 8831 - protein, 6 aa, synthetic construct
PDEVYE

SEQ ID NO: 8832 - protein, 6 aa, synthetic construct
PDEVYF

SEQ ID NO: 8833 - protein, 6 aa, synthetic construct
PDEVYW

SEQ ID NO: 8834 - protein, 6 aa, synthetic construct
PDEVYY

SEQ ID NO: 8835 - protein, 6 aa, synthetic construct
PDEVVD

SEQ ID NO: 8836 - protein, 6 aa, synthetic construct
PDEVVE

SEQ ID NO: 8837 - protein, 6 aa, synthetic construct
PDEVVF

SEQ ID NO: 8838 - protein, 6 aa, synthetic construct
PDEVVW

SEQ ID NO: 8839 - protein, 6 aa, synthetic construct
PDEVVY

SEQ ID NO: 8840 - protein, 6 aa, synthetic construct
PCEAAD

SEQ ID NO: 8841 - protein, 6 aa, synthetic construct
PCEAAE

SEQ ID NO: 8842 - protein, 6 aa, synthetic construct
PCEAAF

SEQ ID NO: 8843 - protein, 6 aa, synthetic construct
PCEAAW

SEQ ID NO: 8844 - protein, 6 aa, synthetic construct
PCEAAY

SEQ ID NO: 8845 - protein, 6 aa, synthetic construct
PCEARD

SEQ ID NO: 8846 - protein, 6 aa, synthetic construct
PCEARE

SEQ ID NO: 8847 - protein, 6 aa, synthetic construct
PCEARF

SEQ ID NO: 8848 - protein, 6 aa, synthetic construct
PCEARW

SEQ ID NO: 8849 - protein, 6 aa, synthetic construct
PCEARY

SEQ ID NO: 8850 - protein, 6 aa, synthetic construct
PCEAND

SEQ ID NO: 8851 - protein, 6 aa, synthetic construct
PCEANE

SEQ ID NO: 8852 - protein, 6 aa, synthetic construct
PCEANF

SEQ ID NO: 8853 - protein, 6 aa, synthetic construct
PCEANW

SEQ ID NO: 8854 - protein, 6 aa, synthetic construct
PCEANY

SEQ ID NO: 8855 - protein, 6 aa, synthetic construct
PCEADD

SEQ ID NO: 8856 - protein, 6 aa, synthetic construct
PCEADE

SEQ ID NO: 8857 - protein, 6 aa, synthetic construct
PCEADF

SEQ ID NO: 8858 - protein, 6 aa, synthetic construct
PCEADW

SEQ ID NO: 8859 - protein, 6 aa, synthetic construct
PCEADY

SEQ ID NO: 8860 - protein, 6 aa, synthetic construct
PCEACD

SEQ ID NO: 8861 - protein, 6 aa, synthetic construct
PCEACE

SEQ ID NO: 8862 - protein, 6 aa, synthetic construct
PCEACF

SEQ ID NO: 8863 - protein, 6 aa, synthetic construct
PCEACW

SEQ ID NO: 8864 - protein, 6 aa, synthetic construct
PCEACY

SEQ ID NO: 8865 - protein, 6 aa, synthetic construct
PCEAQD

SEQ ID NO: 8866 - protein, 6 aa, synthetic construct
PCEAQE

SEQ ID NO: 8867 - protein, 6 aa, synthetic construct
PCEAQF

SEQ ID NO: 8868 - protein, 6 aa, synthetic construct
PCEAQW

SEQ ID NO: 8869 - protein, 6 aa, synthetic construct
PCEAQY

SEQ ID NO: 8870 - protein, 6 aa, synthetic construct
PCEAED

SEQ ID NO: 8871 - protein, 6 aa, synthetic construct
PCEAEE

SEQ ID NO: 8872 - protein, 6 aa, synthetic construct
PCEAEF

SEQ ID NO: 8873 - protein, 6 aa, synthetic construct
PCEAEW

SEQ ID NO: 8874 - protein, 6 aa, synthetic construct
PCEAEY

SEQ ID NO: 8875 - protein, 6 aa, synthetic construct
PCEAGD

SEQ ID NO: 8876 - protein, 6 aa, synthetic construct
PCEAGE

SEQ ID NO: 8877 - protein, 6 aa, synthetic construct
PCEAGF

SEQ ID NO: 8878 - protein, 6 aa, synthetic construct
PCEAGW

SEQ ID NO: 8879 - protein, 6 aa, synthetic construct
PCEAGY

SEQ ID NO: 8880 - protein, 6 aa, synthetic construct
PCEAHD

SEQ ID NO: 8881 - protein, 6 aa, synthetic construct
PCEAHE

SEQ ID NO: 8882 - protein, 6 aa, synthetic construct
PCEAHF

SEQ ID NO: 8883 - protein, 6 aa, synthetic construct
PCEAHW

SEQ ID NO: 8884 - protein, 6 aa, synthetic construct
PCEAHY

SEQ ID NO: 8885 - protein, 6 aa, synthetic construct
PCEAID

SEQ ID NO: 8886 - protein, 6 aa, synthetic construct
PCEAIE

SEQ ID NO: 8887 - protein, 6 aa, synthetic construct
PCEAIF

SEQ ID NO: 8888 - protein, 6 aa, synthetic construct
PCEAIW

SEQ ID NO: 8889 - protein, 6 aa, synthetic construct
PCEAIY

SEQ ID NO: 8890 - protein, 6 aa, synthetic construct
PCEALD

SEQ ID NO: 8891 - protein, 6 aa, synthetic construct
PCEALE

SEQ ID NO: 8892 - protein, 6 aa, synthetic construct
PCEALF

SEQ ID NO: 8893 - protein, 6 aa, synthetic construct
PCEALW

SEQ ID NO: 8894 - protein, 6 aa, synthetic construct
PCEALY

SEQ ID NO: 8895 - protein, 6 aa, synthetic construct
PCEAKD

SEQ ID NO: 8896 - protein, 6 aa, synthetic construct
PCEAKE

SEQ ID NO: 8897 - protein, 6 aa, synthetic construct
PCEAKF

SEQ ID NO: 8898 - protein, 6 aa, synthetic construct
PCEAKW

SEQ ID NO: 8899 - protein, 6 aa, synthetic construct
PCEAKY

SEQ ID NO: 8900 - protein, 6 aa, synthetic construct
PCEAMD

SEQ ID NO: 8901 - protein, 6 aa, synthetic construct
PCEAME

SEQ ID NO: 8902 - protein, 6 aa, synthetic construct
PCEAMF

SEQ ID NO: 8903 - protein, 6 aa, synthetic construct
PCEAMW

SEQ ID NO: 8904 - protein, 6 aa, synthetic construct
PCEAMY

SEQ ID NO: 8905 - protein, 6 aa, synthetic construct
PCEAFD

SEQ ID NO: 8906 - protein, 6 aa, synthetic construct
PCEAFE

SEQ ID NO: 8907 - protein, 6 aa, synthetic construct
PCEAFF

SEQ ID NO: 8908 - protein, 6 aa, synthetic construct
PCEAFW

SEQ ID NO: 8909 - protein, 6 aa, synthetic construct
PCEAFY

SEQ ID NO: 8910 - protein, 6 aa, synthetic construct
PCEAPD

SEQ ID NO: 8911 - protein, 6 aa, synthetic construct
PCEAPE

SEQ ID NO: 8912 - protein, 6 aa, synthetic construct
PCEAPF

SEQ ID NO: 8913 - protein, 6 aa, synthetic construct
PCEAPW

SEQ ID NO: 8914 - protein, 6 aa, synthetic construct
PCEAPY

SEQ ID NO: 8915 - protein, 6 aa, synthetic construct
PCEASD

SEQ ID NO: 8916 - protein, 6 aa, synthetic construct
PCEASE

SEQ ID NO: 8917 - protein, 6 aa, synthetic construct
PCEASF

SEQ ID NO: 8918 - protein, 6 aa, synthetic construct
PCEASW

SEQ ID NO: 8919 - protein, 6 aa, synthetic construct
PCEASY

SEQ ID NO: 8920 - protein, 6 aa, synthetic construct
PCEATD

SEQ ID NO: 8921 - protein, 6 aa, synthetic construct
PCEATE

SEQ ID NO: 8922 - protein, 6 aa, synthetic construct
PCEATF

SEQ ID NO: 8923 - protein, 6 aa, synthetic construct
PCEATW

SEQ ID NO: 8924 - protein, 6 aa, synthetic construct
PCEATY

SEQ ID NO: 8925 - protein, 6 aa, synthetic construct
PCEAWD

SEQ ID NO: 8926 - protein, 6 aa, synthetic construct
PCEAWE

SEQ ID NO: 8927 - protein, 6 aa, synthetic construct
PCEAWF

SEQ ID NO: 8928 - protein, 6 aa, synthetic construct
PCEAWW

SEQ ID NO: 8929 - protein, 6 aa, synthetic construct
PCEAWY

SEQ ID NO: 8930 - protein, 6 aa, synthetic construct
PCEAYD

SEQ ID NO: 8931 - protein, 6 aa, synthetic construct
PCEAYE

SEQ ID NO: 8932 - protein, 6 aa, synthetic construct
PCEAYF

SEQ ID NO: 8933 - protein, 6 aa, synthetic construct
PCEAYW

SEQ ID NO: 8934 - protein, 6 aa, synthetic construct
PCEAYY

SEQ ID NO: 8935 - protein, 6 aa, synthetic construct
PCEAVD

SEQ ID NO: 8936 - protein, 6 aa, synthetic construct
PCEAVE

SEQ ID NO: 8937 - protein, 6 aa, synthetic construct
PCEAVF

SEQ ID NO: 8938 - protein, 6 aa, synthetic construct
PCEAVW

SEQ ID NO: 8939 - protein, 6 aa, synthetic construct
PCEAVY

SEQ ID NO: 8940 - protein, 6 aa, synthetic construct
PCERAD

SEQ ID NO: 8941 - protein, 6 aa, synthetic construct
PCERAE

SEQ ID NO: 8942 - protein, 6 aa, synthetic construct
PCERAF

SEQ ID NO: 8943 - protein, 6 aa, synthetic construct
PCERAW

SEQ ID NO: 8944 - protein, 6 aa, synthetic construct
PCERAY

SEQ ID NO: 8945 - protein, 6 aa, synthetic construct
PCERRD

SEQ ID NO: 8946 - protein, 6 aa, synthetic construct
PCERRE

SEQ ID NO: 8947 - protein, 6 aa, synthetic construct
PCERRF

SEQ ID NO: 8948 - protein, 6 aa, synthetic construct
PCERRW

SEQ ID NO: 8949 - protein, 6 aa, synthetic construct
PCERRY

SEQ ID NO: 8950 - protein, 6 aa, synthetic construct
PCERND

SEQ ID NO: 8951 - protein, 6 aa, synthetic construct
PCERNE

SEQ ID NO: 8952 - protein, 6 aa, synthetic construct
PCERNF

SEQ ID NO: 8953 - protein, 6 aa, synthetic construct
PCERNW

SEQ ID NO: 8954 - protein, 6 aa, synthetic construct
PCERNY

SEQ ID NO: 8955 - protein, 6 aa, synthetic construct
PCERDD

SEQ ID NO: 8956 - protein, 6 aa, synthetic construct
PCERDE

SEQ ID NO: 8957 - protein, 6 aa, synthetic construct
PCERDF

SEQ ID NO: 8958 - protein, 6 aa, synthetic construct
PCERDW

SEQ ID NO: 8959 - protein, 6 aa, synthetic construct
PCERDY

SEQ ID NO: 8960 - protein, 6 aa, synthetic construct
PCERCD

SEQ ID NO: 8961 - protein, 6 aa, synthetic construct
PCERCE

SEQ ID NO: 8962 - protein, 6 aa, synthetic construct
PCERCF

SEQ ID NO: 8963 - protein, 6 aa, synthetic construct
PCERCW

SEQ ID NO: 8964 - protein, 6 aa, synthetic construct
PCERCY

SEQ ID NO: 8965 - protein, 6 aa, synthetic construct
PCERQD

SEQ ID NO: 8966 - protein, 6 aa, synthetic construct
PCERQE

SEQ ID NO: 8967 - protein, 6 aa, synthetic construct
PCERQF

SEQ ID NO: 8968 - protein, 6 aa, synthetic construct
PCERQW

SEQ ID NO: 8969 - protein, 6 aa, synthetic construct
PCERQY

SEQ ID NO: 8970 - protein, 6 aa, synthetic construct
PCERED

SEQ ID NO: 8971 - protein, 6 aa, synthetic construct
PCEREE

SEQ ID NO: 8972 - protein, 6 aa, synthetic construct
PCEREF

SEQ ID NO: 8973 - protein, 6 aa, synthetic construct
PCEREW

SEQ ID NO: 8974 - protein, 6 aa, synthetic construct
PCEREY

SEQ ID NO: 8975 - protein, 6 aa, synthetic construct
PCERGD

SEQ ID NO: 8976 - protein, 6 aa, synthetic construct
PCERGE

SEQ ID NO: 8977 - protein, 6 aa, synthetic construct
PCERGF

SEQ ID NO: 8978 - protein, 6 aa, synthetic construct
PCERGW

SEQ ID NO: 8979 - protein, 6 aa, synthetic construct
PCERGY

SEQ ID NO: 8980 - protein, 6 aa, synthetic construct
PCERHD

SEQ ID NO: 8981 - protein, 6 aa, synthetic construct
PCERHE

SEQ ID NO: 8982 - protein, 6 aa, synthetic construct
PCERHF

SEQ ID NO: 8983 - protein, 6 aa, synthetic construct
PCERHW

SEQ ID NO: 8984 - protein, 6 aa, synthetic construct
PCERHY

SEQ ID NO: 8985 - protein, 6 aa, synthetic construct
PCERID

SEQ ID NO: 8986 - protein, 6 aa, synthetic construct
PCERIE

SEQ ID NO: 8987 - protein, 6 aa, synthetic construct
PCERIF

SEQ ID NO: 8988 - protein, 6 aa, synthetic construct
PCERIW

SEQ ID NO: 8989 - protein, 6 aa, synthetic construct
PCERIY

SEQ ID NO: 8990 - protein, 6 aa, synthetic construct
PCERLD

SEQ ID NO: 8991 - protein, 6 aa, synthetic construct
PCERLE

SEQ ID NO: 8992 - protein, 6 aa, synthetic construct
PCERLF

SEQ ID NO: 8993 - protein, 6 aa, synthetic construct
PCERLW

SEQ ID NO: 8994 - protein, 6 aa, synthetic construct
PCERLY

SEQ ID NO: 8995 - protein, 6 aa, synthetic construct
PCERKD

SEQ ID NO: 8996 - protein, 6 aa, synthetic construct
PCERKE

SEQ ID NO: 8997 - protein, 6 aa, synthetic construct
PCERKF

SEQ ID NO: 8998 - protein, 6 aa, synthetic construct
PCERKW

SEQ ID NO: 8999 - protein, 6 aa, synthetic construct
PCERKY

SEQ ID NO: 9000 - protein, 6 aa, synthetic construct
PCERMD

SEQ ID NO: 9001 - protein, 6 aa, synthetic construct
PCERME

SEQ ID NO: 9002 - protein, 6 aa, synthetic construct
PCERMF

SEQ ID NO: 9003 - protein, 6 aa, synthetic construct
PCERMW

SEQ ID NO: 9004 - protein, 6 aa, synthetic construct
PCERMY

SEQ ID NO: 9005 - protein, 6 aa, synthetic construct
PCERFD

SEQ ID NO: 9006 - protein, 6 aa, synthetic construct
PCERFE

SEQ ID NO: 9007 - protein, 6 aa, synthetic construct
PCERFF

SEQ ID NO: 9008 - protein, 6 aa, synthetic construct
PCERFW

SEQ ID NO: 9009 - protein, 6 aa, synthetic construct
PCERFY

SEQ ID NO: 9010 - protein, 6 aa, synthetic construct
PCERPD

SEQ ID NO: 9011 - protein, 6 aa, synthetic construct
PCERPE

SEQ ID NO: 9012 - protein, 6 aa, synthetic construct
PCERPF

SEQ ID NO: 9013 - protein, 6 aa, synthetic construct
PCERPW

SEQ ID NO: 9014 - protein, 6 aa, synthetic construct
PCERPY

SEQ ID NO: 9015 - protein, 6 aa, synthetic construct
PCERSD

SEQ ID NO: 9016 - protein, 6 aa, synthetic construct
PCERSE

SEQ ID NO: 9017 - protein, 6 aa, synthetic construct
PCERSF

SEQ ID NO: 9018 - protein, 6 aa, synthetic construct
PCERSW

SEQ ID NO: 9019 - protein, 6 aa, synthetic construct
PCERSY

SEQ ID NO: 9020 - protein, 6 aa, synthetic construct
PCERTD

SEQ ID NO: 9021 - protein, 6 aa, synthetic construct
PCERTE

SEQ ID NO: 9022 - protein, 6 aa, synthetic construct
PCERTF

SEQ ID NO: 9023 - protein, 6 aa, synthetic construct
PCERTW

SEQ ID NO: 9024 - protein, 6 aa, synthetic construct
PCERTY

SEQ ID NO: 9025 - protein, 6 aa, synthetic construct
PCERWD

SEQ ID NO: 9026 - protein, 6 aa, synthetic construct
PCERWE

SEQ ID NO: 9027 - protein, 6 aa, synthetic construct
PCERWF

SEQ ID NO: 9028 - protein, 6 aa, synthetic construct
PCERWW

SEQ ID NO: 9029 - protein, 6 aa, synthetic construct
PCERWY

SEQ ID NO: 9030 - protein, 6 aa, synthetic construct
PCERYD

SEQ ID NO: 9031 - protein, 6 aa, synthetic construct
PCERYE

SEQ ID NO: 9032 - protein, 6 aa, synthetic construct
PCERYF

SEQ ID NO: 9033 - protein, 6 aa, synthetic construct
PCERYW

SEQ ID NO: 9034 - protein, 6 aa, synthetic construct
PCERYY

SEQ ID NO: 9035 - protein, 6 aa, synthetic construct
PCERVD

SEQ ID NO: 9036 - protein, 6 aa, synthetic construct
PCERVE

SEQ ID NO: 9037 - protein, 6 aa, synthetic construct
PCERVF

SEQ ID NO: 9038 - protein, 6 aa, synthetic construct
PCERVW

SEQ ID NO: 9039 - protein, 6 aa, synthetic construct
PCERVY

SEQ ID NO: 9040 - protein, 6 aa, synthetic construct
PCENAD

SEQ ID NO: 9041 - protein, 6 aa, synthetic construct
PCENAE

SEQ ID NO: 9042 - protein, 6 aa, synthetic construct
PCENAF

SEQ ID NO: 9043 - protein, 6 aa, synthetic construct
PCENAW

SEQ ID NO: 9044 - protein, 6 aa, synthetic construct
PCENAY

SEQ ID NO: 9045 - protein, 6 aa, synthetic construct
PCENRD

SEQ ID NO: 9046 - protein, 6 aa, synthetic construct
PCENRE

SEQ ID NO: 9047 - protein, 6 aa, synthetic construct
PCENRF

SEQ ID NO: 9048 - protein, 6 aa, synthetic construct
PCENRW

SEQ ID NO: 9049 - protein, 6 aa, synthetic construct
PCENRY

SEQ ID NO: 9050 - protein, 6 aa, synthetic construct
PCENND

SEQ ID NO: 9051 - protein, 6 aa, synthetic construct
PCENNE

SEQ ID NO: 9052 - protein, 6 aa, synthetic construct
PCENNF

SEQ ID NO: 9053 - protein, 6 aa, synthetic construct
PCENNW

SEQ ID NO: 9054 - protein, 6 aa, synthetic construct
PCENNY

SEQ ID NO: 9055 - protein, 6 aa, synthetic construct
PCENDD

SEQ ID NO: 9056 - protein, 6 aa, synthetic construct
PCENDE

SEQ ID NO: 9057 - protein, 6 aa, synthetic construct
PCENDF

SEQ ID NO: 9058 - protein, 6 aa, synthetic construct
PCENDW

SEQ ID NO: 9059 - protein, 6 aa, synthetic construct
PCENDY

SEQ ID NO: 9060 - protein, 6 aa, synthetic construct
PCENCD

SEQ ID NO: 9061 - protein, 6 aa, synthetic construct
PCENCE

SEQ ID NO: 9062 - protein, 6 aa, synthetic construct
PCENCF

SEQ ID NO: 9063 - protein, 6 aa, synthetic construct
PCENCW

SEQ ID NO: 9064 - protein, 6 aa, synthetic construct
PCENCY

SEQ ID NO: 9065 - protein, 6 aa, synthetic construct
PCENQD

SEQ ID NO: 9066 - protein, 6 aa, synthetic construct
PCENQE

SEQ ID NO: 9067 - protein, 6 aa, synthetic construct
PCENQF

SEQ ID NO: 9068 - protein, 6 aa, synthetic construct
PCENQW

SEQ ID NO: 9069 - protein, 6 aa, synthetic construct
PCENQY

SEQ ID NO: 9070 - protein, 6 aa, synthetic construct
PCENED

SEQ ID NO: 9071 - protein, 6 aa, synthetic construct
PCENEE

SEQ ID NO: 9072 - protein, 6 aa, synthetic construct
PCENEF

SEQ ID NO: 9073 - protein, 6 aa, synthetic construct
PCENEW

SEQ ID NO: 9074 - protein, 6 aa, synthetic construct
PCENEY

SEQ ID NO: 9075 - protein, 6 aa, synthetic construct
PCENGD

SEQ ID NO: 9076 - protein, 6 aa, synthetic construct
PCENGE

SEQ ID NO: 9077 - protein, 6 aa, synthetic construct
PCENGF

SEQ ID NO: 9078 - protein, 6 aa, synthetic construct
PCENGW

SEQ ID NO: 9079 - protein, 6 aa, synthetic construct
PCENGY

SEQ ID NO: 9080 - protein, 6 aa, synthetic construct
PCENHD

SEQ ID NO: 9081 - protein, 6 aa, synthetic construct
PCENHE

SEQ ID NO: 9082 - protein, 6 aa, synthetic construct
PCENHF

SEQ ID NO: 9083 - protein, 6 aa, synthetic construct
PCENHW

SEQ ID NO: 9084 - protein, 6 aa, synthetic construct
PCENHY

SEQ ID NO: 9085 - protein, 6 aa, synthetic construct
PCENID

SEQ ID NO: 9086 - protein, 6 aa, synthetic construct
PCENIE

SEQ ID NO: 9087 - protein, 6 aa, synthetic construct
PCENIF

SEQ ID NO: 9088 - protein, 6 aa, synthetic construct
PCENIW

SEQ ID NO: 9089 - protein, 6 aa, synthetic construct
PCENIY

SEQ ID NO: 9090 - protein, 6 aa, synthetic construct
PCENLD

SEQ ID NO: 9091 - protein, 6 aa, synthetic construct
PCENLE

SEQ ID NO: 9092 - protein, 6 aa, synthetic construct
PCENLF

SEQ ID NO: 9093 - protein, 6 aa, synthetic construct
PCENLW

SEQ ID NO: 9094 - protein, 6 aa, synthetic construct
PCENLY

SEQ ID NO: 9095 - protein, 6 aa, synthetic construct
PCENKD

SEQ ID NO: 9096 - protein, 6 aa, synthetic construct
PCENKE

SEQ ID NO: 9097 - protein, 6 aa, synthetic construct
PCENKF

SEQ ID NO: 9098 - protein, 6 aa, synthetic construct
PCENKW

SEQ ID NO: 9099 - protein, 6 aa, synthetic construct
PCENKY

SEQ ID NO: 9100 - protein, 6 aa, synthetic construct
PCENMD

SEQ ID NO: 9101 - protein, 6 aa, synthetic construct
PCENME

SEQ ID NO: 9102 - protein, 6 aa, synthetic construct
PCENMF

SEQ ID NO: 9103 - protein, 6 aa, synthetic construct
PCENMW

SEQ ID NO: 9104 - protein, 6 aa, synthetic construct
PCENMY

SEQ ID NO: 9105 - protein, 6 aa, synthetic construct
PCENFD

SEQ ID NO: 9106 - protein, 6 aa, synthetic construct
PCENFE

SEQ ID NO: 9107 - protein, 6 aa, synthetic construct
PCENFF

SEQ ID NO: 9108 - protein, 6 aa, synthetic construct
PCENFW

SEQ ID NO: 9109 - protein, 6 aa, synthetic construct
PCENFY

SEQ ID NO: 9110 - protein, 6 aa, synthetic construct
PCENPD

SEQ ID NO: 9111 - protein, 6 aa, synthetic construct
PCENPE

SEQ ID NO: 9112 - protein, 6 aa, synthetic construct
PCENPF

SEQ ID NO: 9113 - protein, 6 aa, synthetic construct
PCENPW

SEQ ID NO: 9114 - protein, 6 aa, synthetic construct
PCENPY

SEQ ID NO: 9115 - protein, 6 aa, synthetic construct
PCENSD

SEQ ID NO: 9116 - protein, 6 aa, synthetic construct
PCENSE

SEQ ID NO: 9117 - protein, 6 aa, synthetic construct
PCENSF

SEQ ID NO: 9118 - protein, 6 aa, synthetic construct
PCENSW

SEQ ID NO: 9119 - protein, 6 aa, synthetic construct
PCENSY

SEQ ID NO: 9120 - protein, 6 aa, synthetic construct
PCENTD

SEQ ID NO: 9121 - protein, 6 aa, synthetic construct
PCENTE

SEQ ID NO: 9122 - protein, 6 aa, synthetic construct
PCENTF

SEQ ID NO: 9123 - protein, 6 aa, synthetic construct
PCENTW

SEQ ID NO: 9124 - protein, 6 aa, synthetic construct
PCENTY

SEQ ID NO: 9125 - protein, 6 aa, synthetic construct
PCENWD

SEQ ID NO: 9126 - protein, 6 aa, synthetic construct
PCENWE

SEQ ID NO: 9127 - protein, 6 aa, synthetic construct
PCENWF

SEQ ID NO: 9128 - protein, 6 aa, synthetic construct
PCENWW

SEQ ID NO: 9129 - protein, 6 aa, synthetic construct
PCENWY

SEQ ID NO: 9130 - protein, 6 aa, synthetic construct
PCENYD

SEQ ID NO: 9131 - protein, 6 aa, synthetic construct
PCENYE

SEQ ID NO: 9132 - protein, 6 aa, synthetic construct
PCENYF

SEQ ID NO: 9133 - protein, 6 aa, synthetic construct
PCENYW

SEQ ID NO: 9134 - protein, 6 aa, synthetic construct
PCENYY

SEQ ID NO: 9135 - protein, 6 aa, synthetic construct
PCENVD

SEQ ID NO: 9136 - protein, 6 aa, synthetic construct
PCENVE

SEQ ID NO: 9137 - protein, 6 aa, synthetic construct
PCENVF

SEQ ID NO: 9138 - protein, 6 aa, synthetic construct
PCENVW

SEQ ID NO: 9139 - protein, 6 aa, synthetic construct
PCENVY

SEQ ID NO: 9140 - protein, 6 aa, synthetic construct
PCEDAD

SEQ ID NO: 9141 - protein, 6 aa, synthetic construct
PCEDAE

SEQ ID NO: 9142 - protein, 6 aa, synthetic construct
PCEDAF

SEQ ID NO: 9143 - protein, 6 aa, synthetic construct
PCEDAW

SEQ ID NO: 9144 - protein, 6 aa, synthetic construct
PCEDAY

SEQ ID NO: 9145 - protein, 6 aa, synthetic construct
PCEDRD

SEQ ID NO: 9146 - protein, 6 aa, synthetic construct
PCEDRE

SEQ ID NO: 9147 - protein, 6 aa, synthetic construct
PCEDRF

SEQ ID NO: 9148 - protein, 6 aa, synthetic construct
PCEDRW

SEQ ID NO: 9149 - protein, 6 aa, synthetic construct
PCEDRY

SEQ ID NO: 9150 - protein, 6 aa, synthetic construct
PCEDND

SEQ ID NO: 9151 - protein, 6 aa, synthetic construct
PCEDNE

SEQ ID NO: 9152 - protein, 6 aa, synthetic construct
PCEDNF

SEQ ID NO: 9153 - protein, 6 aa, synthetic construct
PCEDNW

SEQ ID NO: 9154 - protein, 6 aa, synthetic construct
PCEDNY

SEQ ID NO: 9155 - protein, 6 aa, synthetic construct
PCEDDD

SEQ ID NO: 9156 - protein, 6 aa, synthetic construct
PCEDDE

SEQ ID NO: 9157 - protein, 6 aa, synthetic construct
PCEDDF

SEQ ID NO: 9158 - protein, 6 aa, synthetic construct
PCEDDW

SEQ ID NO: 9159 - protein, 6 aa, synthetic construct
PCEDDY

SEQ ID NO: 9160 - protein, 6 aa, synthetic construct
PCEDCD

SEQ ID NO: 9161 - protein, 6 aa, synthetic construct
PCEDCE

SEQ ID NO: 9162 - protein, 6 aa, synthetic construct
PCEDCF

SEQ ID NO: 9163 - protein, 6 aa, synthetic construct
PCEDCW

SEQ ID NO: 9164 - protein, 6 aa, synthetic construct
PCEDCY

SEQ ID NO: 9165 - protein, 6 aa, synthetic construct
PCEDQD

SEQ ID NO: 9166 - protein, 6 aa, synthetic construct
PCEDQE

SEQ ID NO: 9167 - protein, 6 aa, synthetic construct
PCEDQF

SEQ ID NO: 9168 - protein, 6 aa, synthetic construct
PCEDQW

SEQ ID NO: 9169 - protein, 6 aa, synthetic construct
PCEDQY

SEQ ID NO: 9170 - protein, 6 aa, synthetic construct
PCEDED

SEQ ID NO: 9171 - protein, 6 aa, synthetic construct
PCEDEE

SEQ ID NO: 9172 - protein, 6 aa, synthetic construct
PCEDEF

SEQ ID NO: 9173 - protein, 6 aa, synthetic construct
PCEDEW

SEQ ID NO: 9174 - protein, 6 aa, synthetic construct
PCEDEY

SEQ ID NO: 9175 - protein, 6 aa, synthetic construct
PCEDGD

SEQ ID NO: 9176 - protein, 6 aa, synthetic construct
PCEDGE

SEQ ID NO: 9177 - protein, 6 aa, synthetic construct
PCEDGF

SEQ ID NO: 9178 - protein, 6 aa, synthetic construct
PCEDGW

SEQ ID NO: 9179 - protein, 6 aa, synthetic construct
PCEDGY

SEQ ID NO: 9180 - protein, 6 aa, synthetic construct
PCEDHD

SEQ ID NO: 9181 - protein, 6 aa, synthetic construct
PCEDHE

SEQ ID NO: 9182 - protein, 6 aa, synthetic construct
PCEDHF

SEQ ID NO: 9183 - protein, 6 aa, synthetic construct
PCEDHW

SEQ ID NO: 9184 - protein, 6 aa, synthetic construct
PCEDHY

SEQ ID NO: 9185 - protein, 6 aa, synthetic construct
PCEDID

SEQ ID NO: 9186 - protein, 6 aa, synthetic construct
PCEDIE

SEQ ID NO: 9187 - protein, 6 aa, synthetic construct
PCEDIF

SEQ ID NO: 9188 - protein, 6 aa, synthetic construct
PCEDIW

SEQ ID NO: 9189 - protein, 6 aa, synthetic construct
PCEDIY

SEQ ID NO: 9190 - protein, 6 aa, synthetic construct
PCEDLD

SEQ ID NO: 9191 - protein, 6 aa, synthetic construct
PCEDLE

SEQ ID NO: 9192 - protein, 6 aa, synthetic construct
PCEDLF

SEQ ID NO: 9193 - protein, 6 aa, synthetic construct
PCEDLW

SEQ ID NO: 9194 - protein, 6 aa, synthetic construct
PCEDLY

SEQ ID NO: 9195 - protein, 6 aa, synthetic construct
PCEDKD

SEQ ID NO: 9196 - protein, 6 aa, synthetic construct
PCEDKE

SEQ ID NO: 9197 - protein, 6 aa, synthetic construct
PCEDKF

SEQ ID NO: 9198 - protein, 6 aa, synthetic construct
PCEDKW

SEQ ID NO: 9199 - protein, 6 aa, synthetic construct
PCEDKY

SEQ ID NO: 9200 - protein, 6 aa, synthetic construct
PCEDMD

SEQ ID NO: 9201 - protein, 6 aa, synthetic construct
PCEDME

SEQ ID NO: 9202 - protein, 6 aa, synthetic construct
PCEDMF

SEQ ID NO: 9203 - protein, 6 aa, synthetic construct
PCEDMW

SEQ ID NO: 9204 - protein, 6 aa, synthetic construct
PCEDMY

SEQ ID NO: 9205 - protein, 6 aa, synthetic construct
PCEDFD

SEQ ID NO: 9206 - protein, 6 aa, synthetic construct
PCEDFE

SEQ ID NO: 9207 - protein, 6 aa, synthetic construct
PCEDFF

SEQ ID NO: 9208 - protein, 6 aa, synthetic construct
PCEDFW

SEQ ID NO: 9209 - protein, 6 aa, synthetic construct
PCEDFY

SEQ ID NO: 9210 - protein, 6 aa, synthetic construct
PCEDPD

SEQ ID NO: 9211 - protein, 6 aa, synthetic construct
PCEDPE

SEQ ID NO: 9212 - protein, 6 aa, synthetic construct
PCEDPF

SEQ ID NO: 9213 - protein, 6 aa, synthetic construct
PCEDPW

SEQ ID NO: 9214 - protein, 6 aa, synthetic construct
PCEDPY

SEQ ID NO: 9215 - protein, 6 aa, synthetic construct
PCEDSD

SEQ ID NO: 9216 - protein, 6 aa, synthetic construct
PCEDSE

SEQ ID NO: 9217 - protein, 6 aa, synthetic construct
PCEDSF

SEQ ID NO: 9218 - protein, 6 aa, synthetic construct
PCEDSW

SEQ ID NO: 9219 - protein, 6 aa, synthetic construct
PCEDSY

SEQ ID NO: 9220 - protein, 6 aa, synthetic construct
PCEDTD

SEQ ID NO: 9221 - protein, 6 aa, synthetic construct
PCEDTE

SEQ ID NO: 9222 - protein, 6 aa, synthetic construct
PCEDTF

SEQ ID NO: 9223 - protein, 6 aa, synthetic construct
PCEDTW

SEQ ID NO: 9224 - protein, 6 aa, synthetic construct
PCEDTY

SEQ ID NO: 9225 - protein, 6 aa, synthetic construct
PCEDWD

SEQ ID NO: 9226 - protein, 6 aa, synthetic construct
PCEDWE

SEQ ID NO: 9227 - protein, 6 aa, synthetic construct
PCEDWF

SEQ ID NO: 9228 - protein, 6 aa, synthetic construct
PCEDWW

SEQ ID NO: 9229 - protein, 6 aa, synthetic construct
PCEDWY

SEQ ID NO: 9230 - protein, 6 aa, synthetic construct
PCEDYD

SEQ ID NO: 9231 - protein, 6 aa, synthetic construct
PCEDYE

SEQ ID NO: 9232 - protein, 6 aa, synthetic construct
PCEDYF

SEQ ID NO: 9233 - protein, 6 aa, synthetic construct
PCEDYW

SEQ ID NO: 9234 - protein, 6 aa, synthetic construct
PCEDYY

SEQ ID NO: 9235 - protein, 6 aa, synthetic construct
PCEDVD

SEQ ID NO: 9236 - protein, 6 aa, synthetic construct
PCEDVE

SEQ ID NO: 9237 - protein, 6 aa, synthetic construct
PCEDVF

SEQ ID NO: 9238 - protein, 6 aa, synthetic construct
PCEDVW

SEQ ID NO: 9239 - protein, 6 aa, synthetic construct
PCEDVY

SEQ ID NO: 9240 - protein, 6 aa, synthetic construct
PCECAD

SEQ ID NO: 9241 - protein, 6 aa, synthetic construct
PCECAE

SEQ ID NO: 9242 - protein, 6 aa, synthetic construct
PCECAF

SEQ ID NO: 9243 - protein, 6 aa, synthetic construct
PCECAW

SEQ ID NO: 9244 - protein, 6 aa, synthetic construct
PCECAY

SEQ ID NO: 9245 - protein, 6 aa, synthetic construct
PCECRD

SEQ ID NO: 9246 - protein, 6 aa, synthetic construct
PCECRE

SEQ ID NO: 9247 - protein, 6 aa, synthetic construct
PCECRF

SEQ ID NO: 9248 - protein, 6 aa, synthetic construct
PCECRW

SEQ ID NO: 9249 - protein, 6 aa, synthetic construct
PCECRY

SEQ ID NO: 9250 - protein, 6 aa, synthetic construct
PCECND

SEQ ID NO: 9251 - protein, 6 aa, synthetic construct
PCECNE

SEQ ID NO: 9252 - protein, 6 aa, synthetic construct
PCECNF

SEQ ID NO: 9253 - protein, 6 aa, synthetic construct
PCECNW

SEQ ID NO: 9254 - protein, 6 aa, synthetic construct
PCECNY

SEQ ID NO: 9255 - protein, 6 aa, synthetic construct
PCECDD

SEQ ID NO: 9256 - protein, 6 aa, synthetic construct
PCECDE

SEQ ID NO: 9257 - protein, 6 aa, synthetic construct
PCECDF

SEQ ID NO: 9258 - protein, 6 aa, synthetic construct
PCECDW

SEQ ID NO: 9259 - protein, 6 aa, synthetic construct
PCECDY

SEQ ID NO: 9260 - protein, 6 aa, synthetic construct
PCECCD

SEQ ID NO: 9261 - protein, 6 aa, synthetic construct
PCECCE

SEQ ID NO: 9262 - protein, 6 aa, synthetic construct
PCECCF

SEQ ID NO: 9263 - protein, 6 aa, synthetic construct
PCECCW

SEQ ID NO: 9264 - protein, 6 aa, synthetic construct
PCECCY

SEQ ID NO: 9265 - protein, 6 aa, synthetic construct
PCECQD

SEQ ID NO: 9266 - protein, 6 aa, synthetic construct
PCECQE

SEQ ID NO: 9267 - protein, 6 aa, synthetic construct
PCECQF

SEQ ID NO: 9268 - protein, 6 aa, synthetic construct
PCECQW

SEQ ID NO: 9269 - protein, 6 aa, synthetic construct
PCECQY

SEQ ID NO: 9270 - protein, 6 aa, synthetic construct
PCECED

SEQ ID NO: 9271 - protein, 6 aa, synthetic construct
PCECEE

SEQ ID NO: 9272 - protein, 6 aa, synthetic construct
PCECEF

SEQ ID NO: 9273 - protein, 6 aa, synthetic construct
PCECEW

SEQ ID NO: 9274 - protein, 6 aa, synthetic construct
PCECEY

SEQ ID NO: 9275 - protein, 6 aa, synthetic construct
PCECGD

SEQ ID NO: 9276 - protein, 6 aa, synthetic construct
PCECGE

SEQ ID NO: 9277 - protein, 6 aa, synthetic construct
PCECGF

SEQ ID NO: 9278 - protein, 6 aa, synthetic construct
PCECGW

SEQ ID NO: 9279 - protein, 6 aa, synthetic construct
PCECGY

SEQ ID NO: 9280 - protein, 6 aa, synthetic construct
PCECHD

SEQ ID NO: 9281 - protein, 6 aa, synthetic construct
PCECHE

SEQ ID NO: 9282 - protein, 6 aa, synthetic construct
PCECHF

SEQ ID NO: 9283 - protein, 6 aa, synthetic construct
PCECHW

SEQ ID NO: 9284 - protein, 6 aa, synthetic construct
PCECHY

SEQ ID NO: 9285 - protein, 6 aa, synthetic construct
PCECID

SEQ ID NO: 9286 - protein, 6 aa, synthetic construct
PCECIE

SEQ ID NO: 9287 - protein, 6 aa, synthetic construct
PCECIF

SEQ ID NO: 9288 - protein, 6 aa, synthetic construct
PCECIW

SEQ ID NO: 9289 - protein, 6 aa, synthetic construct
PCECIY

SEQ ID NO: 9290 - protein, 6 aa, synthetic construct
PCECLD

SEQ ID NO: 9291 - protein, 6 aa, synthetic construct
PCECLE

SEQ ID NO: 9292 - protein, 6 aa, synthetic construct
PCECLF

SEQ ID NO: 9293 - protein, 6 aa, synthetic construct
PCECLW

SEQ ID NO: 9294 - protein, 6 aa, synthetic construct
PCECLY

SEQ ID NO: 9295 - protein, 6 aa, synthetic construct
PCECKD

SEQ ID NO: 9296 - protein, 6 aa, synthetic construct
PCECKE

SEQ ID NO: 9297 - protein, 6 aa, synthetic construct
PCECKF

SEQ ID NO: 9298 - protein, 6 aa, synthetic construct
PCECKW

SEQ ID NO: 9299 - protein, 6 aa, synthetic construct
PCECKY

SEQ ID NO: 9300 - protein, 6 aa, synthetic construct
PCECMD

SEQ ID NO: 9301 - protein, 6 aa, synthetic construct
PCECME

SEQ ID NO: 9302 - protein, 6 aa, synthetic construct
PCECMF

SEQ ID NO: 9303 - protein, 6 aa, synthetic construct
PCECMW

SEQ ID NO: 9304 - protein, 6 aa, synthetic construct
PCECMY

SEQ ID NO: 9305 - protein, 6 aa, synthetic construct
PCECFD

SEQ ID NO: 9306 - protein, 6 aa, synthetic construct
PCECFE

SEQ ID NO: 9307 - protein, 6 aa, synthetic construct
PCECFF

SEQ ID NO: 9308 - protein, 6 aa, synthetic construct
PCECFW

SEQ ID NO: 9309 - protein, 6 aa, synthetic construct
PCECFY

SEQ ID NO: 9310 - protein, 6 aa, synthetic construct
PCECPD

SEQ ID NO: 9311 - protein, 6 aa, synthetic construct
PCECPE

SEQ ID NO: 9312 - protein, 6 aa, synthetic construct
PCECPF

SEQ ID NO: 9313 - protein, 6 aa, synthetic construct
PCECPW

SEQ ID NO: 9314 - protein, 6 aa, synthetic construct
PCECPY

SEQ ID NO: 9315 - protein, 6 aa, synthetic construct
PCECSD

SEQ ID NO: 9316 - protein, 6 aa, synthetic construct
PCECSE

SEQ ID NO: 9317 - protein, 6 aa, synthetic construct
PCECSF

SEQ ID NO: 9318 - protein, 6 aa, synthetic construct
PCECSW

SEQ ID NO: 9319 - protein, 6 aa, synthetic construct
PCECSY

SEQ ID NO: 9320 - protein, 6 aa, synthetic construct
PCECTD

SEQ ID NO: 9321 - protein, 6 aa, synthetic construct
PCECTE

SEQ ID NO: 9322 - protein, 6 aa, synthetic construct
PCECTF

SEQ ID NO: 9323 - protein, 6 aa, synthetic construct
PCECTW

SEQ ID NO: 9324 - protein, 6 aa, synthetic construct
PCECTY

SEQ ID NO: 9325 - protein, 6 aa, synthetic construct
PCECWD

SEQ ID NO: 9326 - protein, 6 aa, synthetic construct
PCECWE

SEQ ID NO: 9327 - protein, 6 aa, synthetic construct
PCECWF

SEQ ID NO: 9328 - protein, 6 aa, synthetic construct
PCECWW

SEQ ID NO: 9329 - protein, 6 aa, synthetic construct
PCECWY

SEQ ID NO: 9330 - protein, 6 aa, synthetic construct
PCECYD

SEQ ID NO: 9331 - protein, 6 aa, synthetic construct
PCECYE

SEQ ID NO: 9332 - protein, 6 aa, synthetic construct
PCECYF

SEQ ID NO: 9333 - protein, 6 aa, synthetic construct
PCECYW

SEQ ID NO: 9334 - protein, 6 aa, synthetic construct
PCECYY

SEQ ID NO: 9335 - protein, 6 aa, synthetic construct
PCECVD

SEQ ID NO: 9336 - protein, 6 aa, synthetic construct
PCECVE

SEQ ID NO: 9337 - protein, 6 aa, synthetic construct
PCECVF

SEQ ID NO: 9338 - protein, 6 aa, synthetic construct
PCECVW

SEQ ID NO: 9339 - protein, 6 aa, synthetic construct
PCECVY

SEQ ID NO: 9340 - protein, 6 aa, synthetic construct
PCEQAD

SEQ ID NO: 9341 - protein, 6 aa, synthetic construct
PCEQAE

SEQ ID NO: 9342 - protein, 6 aa, synthetic construct
PCEQAF

SEQ ID NO: 9343 - protein, 6 aa, synthetic construct
PCEQAW

SEQ ID NO: 9344 - protein, 6 aa, synthetic construct
PCEQAY

SEQ ID NO: 9345 - protein, 6 aa, synthetic construct
PCEQRD

SEQ ID NO: 9346 - protein, 6 aa, synthetic construct
PCEQRE

SEQ ID NO: 9347 - protein, 6 aa, synthetic construct
PCEQRF

SEQ ID NO: 9348 - protein, 6 aa, synthetic construct
PCEQRW

SEQ ID NO: 9349 - protein, 6 aa, synthetic construct
PCEQRY

SEQ ID NO: 9350 - protein, 6 aa, synthetic construct
PCEQND

SEQ ID NO: 9351 - protein, 6 aa, synthetic construct
PCEQNE

SEQ ID NO: 9352 - protein, 6 aa, synthetic construct
PCEQNF

SEQ ID NO: 9353 - protein, 6 aa, synthetic construct
PCEQNW

SEQ ID NO: 9354 - protein, 6 aa, synthetic construct
PCEQNY

SEQ ID NO: 9355 - protein, 6 aa, synthetic construct
PCEQDD

SEQ ID NO: 9356 - protein, 6 aa, synthetic construct
PCEQDE

SEQ ID NO: 9357 - protein, 6 aa, synthetic construct
PCEQDF

SEQ ID NO: 9358 - protein, 6 aa, synthetic construct
PCEQDW

SEQ ID NO: 9359 - protein, 6 aa, synthetic construct
PCEQDY

SEQ ID NO: 9360 - protein, 6 aa, synthetic construct
PCEQCD

SEQ ID NO: 9361 - protein, 6 aa, synthetic construct
PCEQCE

SEQ ID NO: 9362 - protein, 6 aa, synthetic construct
PCEQCF

SEQ ID NO: 9363 - protein, 6 aa, synthetic construct
PCEQCW

SEQ ID NO: 9364 - protein, 6 aa, synthetic construct
PCEQCY

SEQ ID NO: 9365 - protein, 6 aa, synthetic construct
PCEQQD

SEQ ID NO: 9366 - protein, 6 aa, synthetic construct
PCEQQE

SEQ ID NO: 9367 - protein, 6 aa, synthetic construct
PCEQQF

SEQ ID NO: 9368 - protein, 6 aa, synthetic construct
PCEQQW

SEQ ID NO: 9369 - protein, 6 aa, synthetic construct
PCEQQY

SEQ ID NO: 9370 - protein, 6 aa, synthetic construct
PCEQED

SEQ ID NO: 9371 - protein, 6 aa, synthetic construct
PCEQEE

SEQ ID NO: 9372 - protein, 6 aa, synthetic construct
PCEQEF

SEQ ID NO: 9373 - protein, 6 aa, synthetic construct
PCEQEW

SEQ ID NO: 9374 - protein, 6 aa, synthetic construct
PCEQEY

SEQ ID NO: 9375 - protein, 6 aa, synthetic construct
PCEQGD

SEQ ID NO: 9376 - protein, 6 aa, synthetic construct
PCEQGE

SEQ ID NO: 9377 - protein, 6 aa, synthetic construct
PCEQGF

SEQ ID NO: 9378 - protein, 6 aa, synthetic construct
PCEQGW

SEQ ID NO: 9379 - protein, 6 aa, synthetic construct
PCEQGY

SEQ ID NO: 9380 - protein, 6 aa, synthetic construct
PCEQHD

SEQ ID NO: 9381 - protein, 6 aa, synthetic construct
PCEQHE

SEQ ID NO: 9382 - protein, 6 aa, synthetic construct
PCEQHF

SEQ ID NO: 9383 - protein, 6 aa, synthetic construct
PCEQHW

SEQ ID NO: 9384 - protein, 6 aa, synthetic construct
PCEQHY

SEQ ID NO: 9385 - protein, 6 aa, synthetic construct
PCEQID

SEQ ID NO: 9386 - protein, 6 aa, synthetic construct
PCEQIE

SEQ ID NO: 9387 - protein, 6 aa, synthetic construct
PCEQIF

SEQ ID NO: 9388 - protein, 6 aa, synthetic construct
PCEQIW

SEQ ID NO: 9389 - protein, 6 aa, synthetic construct
PCEQIY

SEQ ID NO: 9390 - protein, 6 aa, synthetic construct
PCEQLD

SEQ ID NO: 9391 - protein, 6 aa, synthetic construct
PCEQLE

SEQ ID NO: 9392 - protein, 6 aa, synthetic construct
PCEQLF

SEQ ID NO: 9393 - protein, 6 aa, synthetic construct
PCEQLW

SEQ ID NO: 9394 - protein, 6 aa, synthetic construct
PCEQLY

SEQ ID NO: 9395 - protein, 6 aa, synthetic construct
PCEQKD

SEQ ID NO: 9396 - protein, 6 aa, synthetic construct
PCEQKE

SEQ ID NO: 9397 - protein, 6 aa, synthetic construct
PCEQKF

SEQ ID NO: 9398 - protein, 6 aa, synthetic construct
PCEQKW

SEQ ID NO: 9399 - protein, 6 aa, synthetic construct
PCEQKY

SEQ ID NO: 9400 - protein, 6 aa, synthetic construct
PCEQMD

SEQ ID NO: 9401 - protein, 6 aa, synthetic construct
PCEQME

SEQ ID NO: 9402 - protein, 6 aa, synthetic construct
PCEQMF

SEQ ID NO: 9403 - protein, 6 aa, synthetic construct
PCEQMW

SEQ ID NO: 9404 - protein, 6 aa, synthetic construct
PCEQMY

SEQ ID NO: 9405 - protein, 6 aa, synthetic construct
PCEQFD

SEQ ID NO: 9406 - protein, 6 aa, synthetic construct
PCEQFE

SEQ ID NO: 9407 - protein, 6 aa, synthetic construct
PCEQFF

SEQ ID NO: 9408 - protein, 6 aa, synthetic construct
PCEQFW

SEQ ID NO: 9409 - protein, 6 aa, synthetic construct
PCEQFY

SEQ ID NO: 9410 - protein, 6 aa, synthetic construct
PCEQPD

SEQ ID NO: 9411 - protein, 6 aa, synthetic construct
PCEQPE

SEQ ID NO: 9412 - protein, 6 aa, synthetic construct
PCEQPF

SEQ ID NO: 9413 - protein, 6 aa, synthetic construct
PCEQPW

SEQ ID NO: 9414 - protein, 6 aa, synthetic construct
PCEQPY

SEQ ID NO: 9415 - protein, 6 aa, synthetic construct
PCEQSD

SEQ ID NO: 9416 - protein, 6 aa, synthetic construct
PCEQSE

SEQ ID NO: 9417 - protein, 6 aa, synthetic construct
PCEQSF

SEQ ID NO: 9418 - protein, 6 aa, synthetic construct
PCEQSW

SEQ ID NO: 9419 - protein, 6 aa, synthetic construct
PCEQSY

SEQ ID NO: 9420 - protein, 6 aa, synthetic construct
PCEQTD

SEQ ID NO: 9421 - protein, 6 aa, synthetic construct
PCEQTE

SEQ ID NO: 9422 - protein, 6 aa, synthetic construct
PCEQTF

SEQ ID NO: 9423 - protein, 6 aa, synthetic construct
PCEQTW

SEQ ID NO: 9424 - protein, 6 aa, synthetic construct
PCEQTY

SEQ ID NO: 9425 - protein, 6 aa, synthetic construct
PCEQWD

SEQ ID NO: 9426 - protein, 6 aa, synthetic construct
PCEQWE

SEQ ID NO: 9427 - protein, 6 aa, synthetic construct
PCEQWF

SEQ ID NO: 9428 - protein, 6 aa, synthetic construct
PCEQWW

SEQ ID NO: 9429 - protein, 6 aa, synthetic construct
PCEQWY

SEQ ID NO: 9430 - protein, 6 aa, synthetic construct
PCEQYD

SEQ ID NO: 9431 - protein, 6 aa, synthetic construct
PCEQYE

SEQ ID NO: 9432 - protein, 6 aa, synthetic construct
PCEQYF

SEQ ID NO: 9433 - protein, 6 aa, synthetic construct
PCEQYW

SEQ ID NO: 9434 - protein, 6 aa, synthetic construct
PCEQYY

SEQ ID NO: 9435 - protein, 6 aa, synthetic construct
PCEQVD

SEQ ID NO: 9436 - protein, 6 aa, synthetic construct
PCEQVE

SEQ ID NO: 9437 - protein, 6 aa, synthetic construct
PCEQVF

SEQ ID NO: 9438 - protein, 6 aa, synthetic construct
PCEQVW

SEQ ID NO: 9439 - protein, 6 aa, synthetic construct
PCEQVY

SEQ ID NO: 9440 - protein, 6 aa, synthetic construct
PCEEAD

SEQ ID NO: 9441 - protein, 6 aa, synthetic construct
PCEEAE

SEQ ID NO: 9442 - protein, 6 aa, synthetic construct
PCEEAF

SEQ ID NO: 9443 - protein, 6 aa, synthetic construct
PCEEAW

SEQ ID NO: 9444 - protein, 6 aa, synthetic construct
PCEEAY

SEQ ID NO: 9445 - protein, 6 aa, synthetic construct
PCEERD

SEQ ID NO: 9446 - protein, 6 aa, synthetic construct
PCEERE

SEQ ID NO: 9447 - protein, 6 aa, synthetic construct
PCEERF

SEQ ID NO: 9448 - protein, 6 aa, synthetic construct
PCEERW

SEQ ID NO: 9449 - protein, 6 aa, synthetic construct
PCEERY

SEQ ID NO: 9450 - protein, 6 aa, synthetic construct
PCEEND

SEQ ID NO: 9451 - protein, 6 aa, synthetic construct
PCEENE

SEQ ID NO: 9452 - protein, 6 aa, synthetic construct
PCEENF

SEQ ID NO: 9453 - protein, 6 aa, synthetic construct
PCEENW

SEQ ID NO: 9454 - protein, 6 aa, synthetic construct
PCEENY

SEQ ID NO: 9455 - protein, 6 aa, synthetic construct
PCEEDD

SEQ ID NO: 9456 - protein, 6 aa, synthetic construct
PCEEDE

SEQ ID NO: 9457 - protein, 6 aa, synthetic construct
PCEEDF

SEQ ID NO: 9458 - protein, 6 aa, synthetic construct
PCEEDW

SEQ ID NO: 9459 - protein, 6 aa, synthetic construct
PCEEDY

SEQ ID NO: 9460 - protein, 6 aa, synthetic construct
PCEECD

SEQ ID NO: 9461 - protein, 6 aa, synthetic construct
PCEECE

SEQ ID NO: 9462 - protein, 6 aa, synthetic construct
PCEECF

SEQ ID NO: 9463 - protein, 6 aa, synthetic construct
PCEECW

SEQ ID NO: 9464 - protein, 6 aa, synthetic construct
PCEECY

SEQ ID NO: 9465 - protein, 6 aa, synthetic construct
PCEEQD

SEQ ID NO: 9466 - protein, 6 aa, synthetic construct
PCEEQE

SEQ ID NO: 9467 - protein, 6 aa, synthetic construct
PCEEQF

SEQ ID NO: 9468 - protein, 6 aa, synthetic construct
PCEEQW

SEQ ID NO: 9469 - protein, 6 aa, synthetic construct
PCEEQY

SEQ ID NO: 9470 - protein, 6 aa, synthetic construct
PCEEED

SEQ ID NO: 9471 - protein, 6 aa, synthetic construct
PCEEEE

SEQ ID NO: 9472 - protein, 6 aa, synthetic construct
PCEEEF

SEQ ID NO: 9473 - protein, 6 aa, synthetic construct
PCEEEW

SEQ ID NO: 9474 - protein, 6 aa, synthetic construct
PCEEEY

SEQ ID NO: 9475 - protein, 6 aa, synthetic construct
PCEEGD

SEQ ID NO: 9476 - protein, 6 aa, synthetic construct
PCEEGE

SEQ ID NO: 9477 - protein, 6 aa, synthetic construct
PCEEGF

SEQ ID NO: 9478 - protein, 6 aa, synthetic construct
PCEEGW

SEQ ID NO: 9479 - protein, 6 aa, synthetic construct
PCEEGY

SEQ ID NO: 9480 - protein, 6 aa, synthetic construct
PCEEHD

SEQ ID NO: 9481 - protein, 6 aa, synthetic construct
PCEEHE

SEQ ID NO: 9482 - protein, 6 aa, synthetic construct
PCEEHF

SEQ ID NO: 9483 - protein, 6 aa, synthetic construct
PCEEHW

SEQ ID NO: 9484 - protein, 6 aa, synthetic construct
PCEEHY

SEQ ID NO: 9485 - protein, 6 aa, synthetic construct
PCEEID

SEQ ID NO: 9486 - protein, 6 aa, synthetic construct
PCEEIE

SEQ ID NO: 9487 - protein, 6 aa, synthetic construct
PCEEIF

SEQ ID NO: 9488 - protein, 6 aa, synthetic construct
PCEEIW

SEQ ID NO: 9489 - protein, 6 aa, synthetic construct
PCEEIY

SEQ ID NO: 9490 - protein, 6 aa, synthetic construct
PCEELD

SEQ ID NO: 9491 - protein, 6 aa, synthetic construct
PCEELE

SEQ ID NO: 9492 - protein, 6 aa, synthetic construct
PCEELF

SEQ ID NO: 9493 - protein, 6 aa, synthetic construct
PCEELW

SEQ ID NO: 9494 - protein, 6 aa, synthetic construct
PCEELY

SEQ ID NO: 9495 - protein, 6 aa, synthetic construct
PCEEKD

SEQ ID NO: 9496 - protein, 6 aa, synthetic construct
PCEEKE

SEQ ID NO: 9497 - protein, 6 aa, synthetic construct
PCEEKF

SEQ ID NO: 9498 - protein, 6 aa, synthetic construct
PCEEKW

SEQ ID NO: 9499 - protein, 6 aa, synthetic construct
PCEEKY

SEQ ID NO: 9500 - protein, 6 aa, synthetic construct
PCEEMD

SEQ ID NO: 9501 - protein, 6 aa, synthetic construct
PCEEME

SEQ ID NO: 9502 - protein, 6 aa, synthetic construct
PCEEMF

SEQ ID NO: 9503 - protein, 6 aa, synthetic construct
PCEEMW

SEQ ID NO: 9504 - protein, 6 aa, synthetic construct
PCEEMY

SEQ ID NO: 9505 - protein, 6 aa, synthetic construct
PCEEFD

SEQ ID NO: 9506 - protein, 6 aa, synthetic construct
PCEEFE

SEQ ID NO: 9507 - protein, 6 aa, synthetic construct
PCEEFF

SEQ ID NO: 9508 - protein, 6 aa, synthetic construct
PCEEFW

SEQ ID NO: 9509 - protein, 6 aa, synthetic construct
PCEEFY

SEQ ID NO: 9510 - protein, 6 aa, synthetic construct
PCEEPD

SEQ ID NO: 9511 - protein, 6 aa, synthetic construct
PCEEPE

SEQ ID NO: 9512 - protein, 6 aa, synthetic construct
PCEEPF

SEQ ID NO: 9513 - protein, 6 aa, synthetic construct
PCEEPW

SEQ ID NO: 9514 - protein, 6 aa, synthetic construct
PCEEPY

SEQ ID NO: 9515 - protein, 6 aa, synthetic construct
PCEESD

SEQ ID NO: 9516 - protein, 6 aa, synthetic construct
PCEESE

SEQ ID NO: 9517 - protein, 6 aa, synthetic construct
PCEESF

SEQ ID NO: 9518 - protein, 6 aa, synthetic construct
PCEESW

SEQ ID NO: 9519 - protein, 6 aa, synthetic construct
PCEESY

SEQ ID NO: 9520 - protein, 6 aa, synthetic construct
PCEETD

SEQ ID NO: 9521 - protein, 6 aa, synthetic construct
PCEETE

SEQ ID NO: 9522 - protein, 6 aa, synthetic construct
PCEETF

SEQ ID NO: 9523 - protein, 6 aa, synthetic construct
PCEETW

SEQ ID NO: 9524 - protein, 6 aa, synthetic construct
PCEETY

SEQ ID NO: 9525 - protein, 6 aa, synthetic construct
PCEEWD

SEQ ID NO: 9526 - protein, 6 aa, synthetic construct
PCEEWE

SEQ ID NO: 9527 - protein, 6 aa, synthetic construct
PCEEWF

SEQ ID NO: 9528 - protein, 6 aa, synthetic construct
PCEEWW

SEQ ID NO: 9529 - protein, 6 aa, synthetic construct
PCEEWY

SEQ ID NO: 9530 - protein, 6 aa, synthetic construct
PCEEYD

SEQ ID NO: 9531 - protein, 6 aa, synthetic construct
PCEEYE

SEQ ID NO: 9532 - protein, 6 aa, synthetic construct
PCEEYF

SEQ ID NO: 9533 - protein, 6 aa, synthetic construct
PCEEYW

SEQ ID NO: 9534 - protein, 6 aa, synthetic construct
PCEEYY

SEQ ID NO: 9535 - protein, 6 aa, synthetic construct
PCEEVD

SEQ ID NO: 9536 - protein, 6 aa, synthetic construct
PCEEVE

SEQ ID NO: 9537 - protein, 6 aa, synthetic construct
PCEEVF

SEQ ID NO: 9538 - protein, 6 aa, synthetic construct
PCEEVW

SEQ ID NO: 9539 - protein, 6 aa, synthetic construct
PCEEVY

SEQ ID NO: 9540 - protein, 6 aa, synthetic construct
PCEGAD

SEQ ID NO: 9541 - protein, 6 aa, synthetic construct
PCEGAE

SEQ ID NO: 9542 - protein, 6 aa, synthetic construct
PCEGAF

SEQ ID NO: 9543 - protein, 6 aa, synthetic construct
PCEGAW

SEQ ID NO: 9544 - protein, 6 aa, synthetic construct
PCEGAY

SEQ ID NO: 9545 - protein, 6 aa, synthetic construct
PCEGRD

SEQ ID NO: 9546 - protein, 6 aa, synthetic construct
PCEGRE

SEQ ID NO: 9547 - protein, 6 aa, synthetic construct
PCEGRF

SEQ ID NO: 9548 - protein, 6 aa, synthetic construct
PCEGRW

SEQ ID NO: 9549 - protein, 6 aa, synthetic construct
PCEGRY

SEQ ID NO: 9550 - protein, 6 aa, synthetic construct
PCEGND

SEQ ID NO: 9551 - protein, 6 aa, synthetic construct
PCEGNE

SEQ ID NO: 9552 - protein, 6 aa, synthetic construct
PCEGNF

SEQ ID NO: 9553 - protein, 6 aa, synthetic construct
PCEGNW

SEQ ID NO: 9554 - protein, 6 aa, synthetic construct
PCEGNY

SEQ ID NO: 9555 - protein, 6 aa, synthetic construct
PCEGDD

SEQ ID NO: 9556 - protein, 6 aa, synthetic construct
PCEGDE

SEQ ID NO: 9557 - protein, 6 aa, synthetic construct
PCEGDF

SEQ ID NO: 9558 - protein, 6 aa, synthetic construct
PCEGDW

SEQ ID NO: 9559 - protein, 6 aa, synthetic construct
PCEGDY

SEQ ID NO: 9560 - protein, 6 aa, synthetic construct
PCEGCD

SEQ ID NO: 9561 - protein, 6 aa, synthetic construct
PCEGCE

SEQ ID NO: 9562 - protein, 6 aa, synthetic construct
PCEGCF

SEQ ID NO: 9563 - protein, 6 aa, synthetic construct
PCEGCW

SEQ ID NO: 9564 - protein, 6 aa, synthetic construct
PCEGCY

SEQ ID NO: 9565 - protein, 6 aa, synthetic construct
PCEGQD

SEQ ID NO: 9566 - protein, 6 aa, synthetic construct
PCEGQE

SEQ ID NO: 9567 - protein, 6 aa, synthetic construct
PCEGQF

SEQ ID NO: 9568 - protein, 6 aa, synthetic construct
PCEGQW

SEQ ID NO: 9569 - protein, 6 aa, synthetic construct
PCEGQY

SEQ ID NO: 9570 - protein, 6 aa, synthetic construct
PCEGED

SEQ ID NO: 9571 - protein, 6 aa, synthetic construct
PCEGEE

SEQ ID NO: 9572 - protein, 6 aa, synthetic construct
PCEGEF

SEQ ID NO: 9573 - protein, 6 aa, synthetic construct
PCEGEW

SEQ ID NO: 9574 - protein, 6 aa, synthetic construct
PCEGEY

SEQ ID NO: 9575 - protein, 6 aa, synthetic construct
PCEGGD

SEQ ID NO: 9576 - protein, 6 aa, synthetic construct
PCEGGE

SEQ ID NO: 9577 - protein, 6 aa, synthetic construct
PCEGGF

SEQ ID NO: 9578 - protein, 6 aa, synthetic construct
PCEGGW

SEQ ID NO: 9579 - protein, 6 aa, synthetic construct
PCEGGY

SEQ ID NO: 9580 - protein, 6 aa, synthetic construct
PCEGHD

SEQ ID NO: 9581 - protein, 6 aa, synthetic construct
PCEGHE

SEQ ID NO: 9582 - protein, 6 aa, synthetic construct
PCEGHF

SEQ ID NO: 9583 - protein, 6 aa, synthetic construct
PCEGHW

SEQ ID NO: 9584 - protein, 6 aa, synthetic construct
PCEGHY

SEQ ID NO: 9585 - protein, 6 aa, synthetic construct
PCEGID

SEQ ID NO: 9586 - protein, 6 aa, synthetic construct
PCEGIE

SEQ ID NO: 9587 - protein, 6 aa, synthetic construct
PCEGIF

SEQ ID NO: 9588 - protein, 6 aa, synthetic construct
PCEGIW

SEQ ID NO: 9589 - protein, 6 aa, synthetic construct
PCEGIY

SEQ ID NO: 9590 - protein, 6 aa, synthetic construct
PCEGLD

SEQ ID NO: 9591 - protein, 6 aa, synthetic construct
PCEGLE

SEQ ID NO: 9592 - protein, 6 aa, synthetic construct
PCEGLF

SEQ ID NO: 9593 - protein, 6 aa, synthetic construct
PCEGLW

SEQ ID NO: 9594 - protein, 6 aa, synthetic construct
PCEGLY

SEQ ID NO: 9595 - protein, 6 aa, synthetic construct
PCEGKD

SEQ ID NO: 9596 - protein, 6 aa, synthetic construct
PCEGKE

SEQ ID NO: 9597 - protein, 6 aa, synthetic construct
PCEGKF

SEQ ID NO: 9598 - protein, 6 aa, synthetic construct
PCEGKW

SEQ ID NO: 9599 - protein, 6 aa, synthetic construct
PCEGKY

SEQ ID NO: 9600 - protein, 6 aa, synthetic construct
PCEGMD

SEQ ID NO: 9601 - protein, 6 aa, synthetic construct
PCEGME

SEQ ID NO: 9602 - protein, 6 aa, synthetic construct
PCEGMF

SEQ ID NO: 9603 - protein, 6 aa, synthetic construct
PCEGMW

SEQ ID NO: 9604 - protein, 6 aa, synthetic construct
PCEGMY

SEQ ID NO: 9605 - protein, 6 aa, synthetic construct
PCEGFD

SEQ ID NO: 9606 - protein, 6 aa, synthetic construct
PCEGFE

SEQ ID NO: 9607 - protein, 6 aa, synthetic construct
PCEGFF

SEQ ID NO: 9608 - protein, 6 aa, synthetic construct
PCEGFW

SEQ ID NO: 9609 - protein, 6 aa, synthetic construct
PCEGFY

SEQ ID NO: 9610 - protein, 6 aa, synthetic construct
PCEGPD

SEQ ID NO: 9611 - protein, 6 aa, synthetic construct
PCEGPE

SEQ ID NO: 9612 - protein, 6 aa, synthetic construct
PCEGPF

SEQ ID NO: 9613 - protein, 6 aa, synthetic construct
PCEGPW

SEQ ID NO: 9614 - protein, 6 aa, synthetic construct
PCEGPY

SEQ ID NO: 9615 - protein, 6 aa, synthetic construct
PCEGSD

SEQ ID NO: 9616 - protein, 6 aa, synthetic construct
PCEGSE

SEQ ID NO: 9617 - protein, 6 aa, synthetic construct
PCEGSF

SEQ ID NO: 9618 - protein, 6 aa, synthetic construct
PCEGSW

SEQ ID NO: 9619 - protein, 6 aa, synthetic construct
PCEGSY

SEQ ID NO: 9620 - protein, 6 aa, synthetic construct
PCEGTD

SEQ ID NO: 9621 - protein, 6 aa, synthetic construct
PCEGTE

SEQ ID NO: 9622 - protein, 6 aa, synthetic construct
PCEGTF

SEQ ID NO: 9623 - protein, 6 aa, synthetic construct
PCEGTW

SEQ ID NO: 9624 - protein, 6 aa, synthetic construct
PCEGTY

SEQ ID NO: 9625 - protein, 6 aa, synthetic construct
PCEGWD

SEQ ID NO: 9626 - protein, 6 aa, synthetic construct
PCEGWE

SEQ ID NO: 9627 - protein, 6 aa, synthetic construct
PCEGWF

SEQ ID NO: 9628 - protein, 6 aa, synthetic construct
PCEGWW

SEQ ID NO: 9629 - protein, 6 aa, synthetic construct
PCEGWY

SEQ ID NO: 9630 - protein, 6 aa, synthetic construct
PCEGYD

SEQ ID NO: 9631 - protein, 6 aa, synthetic construct
PCEGYE

SEQ ID NO: 9632 - protein, 6 aa, synthetic construct
PCEGYF

SEQ ID NO: 9633 - protein, 6 aa, synthetic construct
PCEGYW

SEQ ID NO: 9634 - protein, 6 aa, synthetic construct
PCEGYY

SEQ ID NO: 9635 - protein, 6 aa, synthetic construct
PCEGVD

SEQ ID NO: 9636 - protein, 6 aa, synthetic construct
PCEGVE

SEQ ID NO: 9637 - protein, 6 aa, synthetic construct
PCEGVF

SEQ ID NO: 9638 - protein, 6 aa, synthetic construct
PCEGVW

SEQ ID NO: 9639 - protein, 6 aa, synthetic construct
PCEGVY

SEQ ID NO: 9640 - protein, 6 aa, synthetic construct
PCEHAD

SEQ ID NO: 9641 - protein, 6 aa, synthetic construct
PCEHAE

SEQ ID NO: 9642 - protein, 6 aa, synthetic construct
PCEHAF

SEQ ID NO: 9643 - protein, 6 aa, synthetic construct
PCEHAW

SEQ ID NO: 9644 - protein, 6 aa, synthetic construct
PCEHAY

SEQ ID NO: 9645 - protein, 6 aa, synthetic construct
PCEHRD

SEQ ID NO: 9646 - protein, 6 aa, synthetic construct
PCEHRE

SEQ ID NO: 9647 - protein, 6 aa, synthetic construct
PCEHRF

SEQ ID NO: 9648 - protein, 6 aa, synthetic construct
PCEHRW

SEQ ID NO: 9649 - protein, 6 aa, synthetic construct
PCEHRY

SEQ ID NO: 9650 - protein, 6 aa, synthetic construct
PCEHND

SEQ ID NO: 9651 - protein, 6 aa, synthetic construct
PCEHNE

SEQ ID NO: 9652 - protein, 6 aa, synthetic construct
PCEHNF

SEQ ID NO: 9653 - protein, 6 aa, synthetic construct
PCEHNW

SEQ ID NO: 9654 - protein, 6 aa, synthetic construct
PCEHNY

SEQ ID NO: 9655 - protein, 6 aa, synthetic construct
PCEHDD

SEQ ID NO: 9656 - protein, 6 aa, synthetic construct
PCEHDE

SEQ ID NO: 9657 - protein, 6 aa, synthetic construct
PCEHDF

SEQ ID NO: 9658 - protein, 6 aa, synthetic construct
PCEHDW

SEQ ID NO: 9659 - protein, 6 aa, synthetic construct
PCEHDY

SEQ ID NO: 9660 - protein, 6 aa, synthetic construct
PCEHCD

SEQ ID NO: 9661 - protein, 6 aa, synthetic construct
PCEHCE

SEQ ID NO: 9662 - protein, 6 aa, synthetic construct
PCEHCF

SEQ ID NO: 9663 - protein, 6 aa, synthetic construct
PCEHCW

SEQ ID NO: 9664 - protein, 6 aa, synthetic construct
PCEHCY

SEQ ID NO: 9665 - protein, 6 aa, synthetic construct
PCEHQD

SEQ ID NO: 9666 - protein, 6 aa, synthetic construct
PCEHQE

SEQ ID NO: 9667 - protein, 6 aa, synthetic construct
PCEHQF

SEQ ID NO: 9668 - protein, 6 aa, synthetic construct
PCEHQW

SEQ ID NO: 9669 - protein, 6 aa, synthetic construct
PCEHQY

SEQ ID NO: 9670 - protein, 6 aa, synthetic construct
PCEHED

SEQ ID NO: 9671 - protein, 6 aa, synthetic construct
PCEHEE

SEQ ID NO: 9672 - protein, 6 aa, synthetic construct
PCEHEF

SEQ ID NO: 9673 - protein, 6 aa, synthetic construct
PCEHEW

SEQ ID NO: 9674 - protein, 6 aa, synthetic construct
PCEHEY

SEQ ID NO: 9675 - protein, 6 aa, synthetic construct
PCEHGD

SEQ ID NO: 9676 - protein, 6 aa, synthetic construct
PCEHGE

SEQ ID NO: 9677 - protein, 6 aa, synthetic construct
PCEHGF

SEQ ID NO: 9678 - protein, 6 aa, synthetic construct
PCEHGW

SEQ ID NO: 9679 - protein, 6 aa, synthetic construct
PCEHGY

SEQ ID NO: 9680 - protein, 6 aa, synthetic construct
PCEHHD

SEQ ID NO: 9681 - protein, 6 aa, synthetic construct
PCEHHE

SEQ ID NO: 9682 - protein, 6 aa, synthetic construct
PCEHHF

SEQ ID NO: 9683 - protein, 6 aa, synthetic construct
PCEHHW

SEQ ID NO: 9684 - protein, 6 aa, synthetic construct
PCEHHY

SEQ ID NO: 9685 - protein, 6 aa, synthetic construct
PCEHID

SEQ ID NO: 9686 - protein, 6 aa, synthetic construct
PCEHIE

SEQ ID NO: 9687 - protein, 6 aa, synthetic construct
PCEHIF

SEQ ID NO: 9688 - protein, 6 aa, synthetic construct
PCEHIW

SEQ ID NO: 9689 - protein, 6 aa, synthetic construct
PCEHIY

SEQ ID NO: 9690 - protein, 6 aa, synthetic construct
PCEHLD

SEQ ID NO: 9691 - protein, 6 aa, synthetic construct
PCEHLE

SEQ ID NO: 9692 - protein, 6 aa, synthetic construct
PCEHLF

SEQ ID NO: 9693 - protein, 6 aa, synthetic construct
PCEHLW

SEQ ID NO: 9694 - protein, 6 aa, synthetic construct
PCEHLY

SEQ ID NO: 9695 - protein, 6 aa, synthetic construct
PCEHKD

SEQ ID NO: 9696 - protein, 6 aa, synthetic construct
PCEHKE

SEQ ID NO: 9697 - protein, 6 aa, synthetic construct
PCEHKF

SEQ ID NO: 9698 - protein, 6 aa, synthetic construct
PCEHKW

SEQ ID NO: 9699 - protein, 6 aa, synthetic construct
PCEHKY

SEQ ID NO: 9700 - protein, 6 aa, synthetic construct
PCEHMD

SEQ ID NO: 9701 - protein, 6 aa, synthetic construct
PCEHME

SEQ ID NO: 9702 - protein, 6 aa, synthetic construct
PCEHMF

SEQ ID NO: 9703 - protein, 6 aa, synthetic construct
PCEHMW

SEQ ID NO: 9704 - protein, 6 aa, synthetic construct
PCEHMY

SEQ ID NO: 9705 - protein, 6 aa, synthetic construct
PCEHFD

SEQ ID NO: 9706 - protein, 6 aa, synthetic construct
PCEHFE

SEQ ID NO: 9707 - protein, 6 aa, synthetic construct
PCEHFF

SEQ ID NO: 9708 - protein, 6 aa, synthetic construct
PCEHFW

SEQ ID NO: 9709 - protein, 6 aa, synthetic construct
PCEHFY

SEQ ID NO: 9710 - protein, 6 aa, synthetic construct
PCEHPD

SEQ ID NO: 9711 - protein, 6 aa, synthetic construct
PCEHPE

SEQ ID NO: 9712 - protein, 6 aa, synthetic construct
PCEHPF

SEQ ID NO: 9713 - protein, 6 aa, synthetic construct
PCEHPW

SEQ ID NO: 9714 - protein, 6 aa, synthetic construct
PCEHPY

SEQ ID NO: 9715 - protein, 6 aa, synthetic construct
PCEHSD

SEQ ID NO: 9716 - protein, 6 aa, synthetic construct
PCEHSE

SEQ ID NO: 9717 - protein, 6 aa, synthetic construct
PCEHSF

SEQ ID NO: 9718 - protein, 6 aa, synthetic construct
PCEHSW

SEQ ID NO: 9719 - protein, 6 aa, synthetic construct
PCEHSY

SEQ ID NO: 9720 - protein, 6 aa, synthetic construct
PCEHTD

SEQ ID NO: 9721 - protein, 6 aa, synthetic construct
PCEHTE

SEQ ID NO: 9722 - protein, 6 aa, synthetic construct
PCEHTF

SEQ ID NO: 9723 - protein, 6 aa, synthetic construct
PCEHTW

SEQ ID NO: 9724 - protein, 6 aa, synthetic construct
PCEHTY

SEQ ID NO: 9725 - protein, 6 aa, synthetic construct
PCEHWD

SEQ ID NO: 9726 - protein, 6 aa, synthetic construct
PCEHWE

SEQ ID NO: 9727 - protein, 6 aa, synthetic construct
PCEHWF

SEQ ID NO: 9728 - protein, 6 aa, synthetic construct
PCEHWW

SEQ ID NO: 9729 - protein, 6 aa, synthetic construct
PCEHWY

SEQ ID NO: 9730 - protein, 6 aa, synthetic construct
PCEHYD

SEQ ID NO: 9731 - protein, 6 aa, synthetic construct
PCEHYE

SEQ ID NO: 9732 - protein, 6 aa, synthetic construct
PCEHYF

SEQ ID NO: 9733 - protein, 6 aa, synthetic construct
PCEHYW

SEQ ID NO: 9734 - protein, 6 aa, synthetic construct
PCEHYY

SEQ ID NO: 9735 - protein, 6 aa, synthetic construct
PCEHVD

SEQ ID NO: 9736 - protein, 6 aa, synthetic construct
PCEHVE

SEQ ID NO: 9737 - protein, 6 aa, synthetic construct
PCEHVF

SEQ ID NO: 9738 - protein, 6 aa, synthetic construct
PCEHVW

SEQ ID NO: 9739 - protein, 6 aa, synthetic construct
PCEHVY

SEQ ID NO: 9740 - protein, 6 aa, synthetic construct
PCEIAD

SEQ ID NO: 9741 - protein, 6 aa, synthetic construct
PCEIAE

SEQ ID NO: 9742 - protein, 6 aa, synthetic construct
PCEIAF

SEQ ID NO: 9743 - protein, 6 aa, synthetic construct
PCEIAW

SEQ ID NO: 9744 - protein, 6 aa, synthetic construct
PCEIAY

SEQ ID NO: 9745 - protein, 6 aa, synthetic construct
PCEIRD

SEQ ID NO: 9746 - protein, 6 aa, synthetic construct
PCEIRE

SEQ ID NO: 9747 - protein, 6 aa, synthetic construct
PCEIRF

SEQ ID NO: 9748 - protein, 6 aa, synthetic construct
PCEIRW

SEQ ID NO: 9749 - protein, 6 aa, synthetic construct
PCEIRY

SEQ ID NO: 9750 - protein, 6 aa, synthetic construct
PCEIND

SEQ ID NO: 9751 - protein, 6 aa, synthetic construct
PCEINE

SEQ ID NO: 9752 - protein, 6 aa, synthetic construct
PCEINF

SEQ ID NO: 9753 - protein, 6 aa, synthetic construct
PCEINW

SEQ ID NO: 9754 - protein, 6 aa, synthetic construct
PCEINY

SEQ ID NO: 9755 - protein, 6 aa, synthetic construct
PCEIDD

SEQ ID NO: 9756 - protein, 6 aa, synthetic construct
PCEIDE

SEQ ID NO: 9757 - protein, 6 aa, synthetic construct
PCEIDF

SEQ ID NO: 9758 - protein, 6 aa, synthetic construct
PCEIDW

SEQ ID NO: 9759 - protein, 6 aa, synthetic construct
PCEIDY

SEQ ID NO: 9760 - protein, 6 aa, synthetic construct
PCEICD

SEQ ID NO: 9761 - protein, 6 aa, synthetic construct
PCEICE

SEQ ID NO: 9762 - protein, 6 aa, synthetic construct
PCEICF

SEQ ID NO: 9763 - protein, 6 aa, synthetic construct
PCEICW

SEQ ID NO: 9764 - protein, 6 aa, synthetic construct
PCEICY

SEQ ID NO: 9765 - protein, 6 aa, synthetic construct
PCEIQD

SEQ ID NO: 9766 - protein, 6 aa, synthetic construct
PCEIQE

SEQ ID NO: 9767 - protein, 6 aa, synthetic construct
PCEIQF

SEQ ID NO: 9768 - protein, 6 aa, synthetic construct
PCEIQW

SEQ ID NO: 9769 - protein, 6 aa, synthetic construct
PCEIQY

SEQ ID NO: 9770 - protein, 6 aa, synthetic construct
PCEIED

SEQ ID NO: 9771 - protein, 6 aa, synthetic construct
PCEIEE

SEQ ID NO: 9772 - protein, 6 aa, synthetic construct
PCEIEF

SEQ ID NO: 9773 - protein, 6 aa, synthetic construct
PCEIEW

SEQ ID NO: 9774 - protein, 6 aa, synthetic construct
PCEIEY

SEQ ID NO: 9775 - protein, 6 aa, synthetic construct
PCEIGD

SEQ ID NO: 9776 - protein, 6 aa, synthetic construct
PCEIGE

SEQ ID NO: 9777 - protein, 6 aa, synthetic construct
PCEIGF

SEQ ID NO: 9778 - protein, 6 aa, synthetic construct
PCEIGW

SEQ ID NO: 9779 - protein, 6 aa, synthetic construct
PCEIGY

SEQ ID NO: 9780 - protein, 6 aa, synthetic construct
PCEIHD

SEQ ID NO: 9781 - protein, 6 aa, synthetic construct
PCEIHE

SEQ ID NO: 9782 - protein, 6 aa, synthetic construct
PCEIHF

SEQ ID NO: 9783 - protein, 6 aa, synthetic construct
PCEIHW

SEQ ID NO: 9784 - protein, 6 aa, synthetic construct
PCEIHY

SEQ ID NO: 9785 - protein, 6 aa, synthetic construct
PCEIID

SEQ ID NO: 9786 - protein, 6 aa, synthetic construct
PCEIIE

SEQ ID NO: 9787 - protein, 6 aa, synthetic construct
PCEIIF

SEQ ID NO: 9788 - protein, 6 aa, synthetic construct
PCEIIW

SEQ ID NO: 9789 - protein, 6 aa, synthetic construct
PCEIIY

SEQ ID NO: 9790 - protein, 6 aa, synthetic construct
PCEILD

SEQ ID NO: 9791 - protein, 6 aa, synthetic construct
PCEILE

SEQ ID NO: 9792 - protein, 6 aa, synthetic construct
PCEILF

SEQ ID NO: 9793 - protein, 6 aa, synthetic construct
PCEILW

SEQ ID NO: 9794 - protein, 6 aa, synthetic construct
PCEILY

SEQ ID NO: 9795 - protein, 6 aa, synthetic construct
PCEIKD

SEQ ID NO: 9796 - protein, 6 aa, synthetic construct
PCEIKE

SEQ ID NO: 9797 - protein, 6 aa, synthetic construct
PCEIKF

SEQ ID NO: 9798 - protein, 6 aa, synthetic construct
PCEIKW

SEQ ID NO: 9799 - protein, 6 aa, synthetic construct
PCEIKY

SEQ ID NO: 9800 - protein, 6 aa, synthetic construct
PCEIMD

SEQ ID NO: 9801 - protein, 6 aa, synthetic construct
PCEIME

SEQ ID NO: 9802 - protein, 6 aa, synthetic construct
PCEIMF

SEQ ID NO: 9803 - protein, 6 aa, synthetic construct
PCEIMW

SEQ ID NO: 9804 - protein, 6 aa, synthetic construct
PCEIMY

SEQ ID NO: 9805 - protein, 6 aa, synthetic construct
PCEIFD

SEQ ID NO: 9806 - protein, 6 aa, synthetic construct
PCEIFE

SEQ ID NO: 9807 - protein, 6 aa, synthetic construct
PCEIFF

SEQ ID NO: 9808 - protein, 6 aa, synthetic construct
PCEIFW

SEQ ID NO: 9809 - protein, 6 aa, synthetic construct
PCEIFY

SEQ ID NO: 9810 - protein, 6 aa, synthetic construct
PCEIPD

SEQ ID NO: 9811 - protein, 6 aa, synthetic construct
PCEIPE

SEQ ID NO: 9812 - protein, 6 aa, synthetic construct
PCEIPF

SEQ ID NO: 9813 - protein, 6 aa, synthetic construct
PCEIPW

SEQ ID NO: 9814 - protein, 6 aa, synthetic construct
PCEIPY

SEQ ID NO: 9815 - protein, 6 aa, synthetic construct
PCEISD

SEQ ID NO: 9816 - protein, 6 aa, synthetic construct
PCEISE

SEQ ID NO: 9817 - protein, 6 aa, synthetic construct
PCEISF

SEQ ID NO: 9818 - protein, 6 aa, synthetic construct
PCEISW

SEQ ID NO: 9819 - protein, 6 aa, synthetic construct
PCEISY

SEQ ID NO: 9820 - protein, 6 aa, synthetic construct
PCEITD

SEQ ID NO: 9821 - protein, 6 aa, synthetic construct
PCEITE

SEQ ID NO: 9822 - protein, 6 aa, synthetic construct
PCEITF

SEQ ID NO: 9823 - protein, 6 aa, synthetic construct
PCEITW

SEQ ID NO: 9824 - protein, 6 aa, synthetic construct
PCEITY

SEQ ID NO: 9825 - protein, 6 aa, synthetic construct
PCEIWD

SEQ ID NO: 9826 - protein, 6 aa, synthetic construct
PCEIWE

SEQ ID NO: 9827 - protein, 6 aa, synthetic construct
PCEIWF

SEQ ID NO: 9828 - protein, 6 aa, synthetic construct
PCEIWW

SEQ ID NO: 9829 - protein, 6 aa, synthetic construct
PCEIWY

SEQ ID NO: 9830 - protein, 6 aa, synthetic construct
PCEIYD

SEQ ID NO: 9831 - protein, 6 aa, synthetic construct
PCEIYE

SEQ ID NO: 9832 - protein, 6 aa, synthetic construct
PCEIYF

SEQ ID NO: 9833 - protein, 6 aa, synthetic construct
PCEIYW

SEQ ID NO: 9834 - protein, 6 aa, synthetic construct
PCEIYY

SEQ ID NO: 9835 - protein, 6 aa, synthetic construct
PCEIVD

SEQ ID NO: 9836 - protein, 6 aa, synthetic construct
PCEIVE

SEQ ID NO: 9837 - protein, 6 aa, synthetic construct
PCEIVF

SEQ ID NO: 9838 - protein, 6 aa, synthetic construct
PCEIVW

SEQ ID NO: 9839 - protein, 6 aa, synthetic construct
PCEIVY

SEQ ID NO: 9840 - protein, 6 aa, synthetic construct
PCELAD

SEQ ID NO: 9841 - protein, 6 aa, synthetic construct
PCELAE

SEQ ID NO: 9842 - protein, 6 aa, synthetic construct
PCELAF

SEQ ID NO: 9843 - protein, 6 aa, synthetic construct
PCELAW

SEQ ID NO: 9844 - protein, 6 aa, synthetic construct
PCELAY

SEQ ID NO: 9845 - protein, 6 aa, synthetic construct
PCELRD

SEQ ID NO: 9846 - protein, 6 aa, synthetic construct
PCELRE

SEQ ID NO: 9847 - protein, 6 aa, synthetic construct
PCELRF

SEQ ID NO: 9848 - protein, 6 aa, synthetic construct
PCELRW

SEQ ID NO: 9849 - protein, 6 aa, synthetic construct
PCELRY

SEQ ID NO: 9850 - protein, 6 aa, synthetic construct
PCELND

SEQ ID NO: 9851 - protein, 6 aa, synthetic construct
PCELNE

SEQ ID NO: 9852 - protein, 6 aa, synthetic construct
PCELNF

SEQ ID NO: 9853 - protein, 6 aa, synthetic construct
PCELNW

SEQ ID NO: 9854 - protein, 6 aa, synthetic construct
PCELNY

SEQ ID NO: 9855 - protein, 6 aa, synthetic construct
PCELDD

SEQ ID NO: 9856 - protein, 6 aa, synthetic construct
PCELDE

SEQ ID NO: 9857 - protein, 6 aa, synthetic construct
PCELDF

SEQ ID NO: 9858 - protein, 6 aa, synthetic construct
PCELDW

SEQ ID NO: 9859 - protein, 6 aa, synthetic construct
PCELDY

SEQ ID NO: 9860 - protein, 6 aa, synthetic construct
PCELCD

SEQ ID NO: 9861 - protein, 6 aa, synthetic construct
PCELCE

SEQ ID NO: 9862 - protein, 6 aa, synthetic construct
PCELCF

SEQ ID NO: 9863 - protein, 6 aa, synthetic construct
PCELCW

SEQ ID NO: 9864 - protein, 6 aa, synthetic construct
PCELCY

SEQ ID NO: 9865 - protein, 6 aa, synthetic construct
PCELQD

SEQ ID NO: 9866 - protein, 6 aa, synthetic construct
PCELQE

SEQ ID NO: 9867 - protein, 6 aa, synthetic construct
PCELQF

SEQ ID NO: 9868 - protein, 6 aa, synthetic construct
PCELQW

SEQ ID NO: 9869 - protein, 6 aa, synthetic construct
PCELQY

SEQ ID NO: 9870 - protein, 6 aa, synthetic construct
PCELED

SEQ ID NO: 9871 - protein, 6 aa, synthetic construct
PCELEE

SEQ ID NO: 9872 - protein, 6 aa, synthetic construct
PCELEF

SEQ ID NO: 9873 - protein, 6 aa, synthetic construct
PCELEW

SEQ ID NO: 9874 - protein, 6 aa, synthetic construct
PCELEY

SEQ ID NO: 9875 - protein, 6 aa, synthetic construct
PCELGD

SEQ ID NO: 9876 - protein, 6 aa, synthetic construct
PCELGE

SEQ ID NO: 9877 - protein, 6 aa, synthetic construct
PCELGF

SEQ ID NO: 9878 - protein, 6 aa, synthetic construct
PCELGW

SEQ ID NO: 9879 - protein, 6 aa, synthetic construct
PCELGY

SEQ ID NO: 9880 - protein, 6 aa, synthetic construct
PCELHD

SEQ ID NO: 9881 - protein, 6 aa, synthetic construct
PCELHE

SEQ ID NO: 9882 - protein, 6 aa, synthetic construct
PCELHF

SEQ ID NO: 9883 - protein, 6 aa, synthetic construct
PCELHW

SEQ ID NO: 9884 - protein, 6 aa, synthetic construct
PCELHY

SEQ ID NO: 9885 - protein, 6 aa, synthetic construct
PCELID

SEQ ID NO: 9886 - protein, 6 aa, synthetic construct
PCELIE

SEQ ID NO: 9887 - protein, 6 aa, synthetic construct
PCELIF

SEQ ID NO: 9888 - protein, 6 aa, synthetic construct
PCELIW

SEQ ID NO: 9889 - protein, 6 aa, synthetic construct
PCELIY

SEQ ID NO: 9890 - protein, 6 aa, synthetic construct
PCELLD

SEQ ID NO: 9891 - protein, 6 aa, synthetic construct
PCELLE

SEQ ID NO: 9892 - protein, 6 aa, synthetic construct
PCELLF

SEQ ID NO: 9893 - protein, 6 aa, synthetic construct
PCELLW

SEQ ID NO: 9894 - protein, 6 aa, synthetic construct
PCELLY

SEQ ID NO: 9895 - protein, 6 aa, synthetic construct
PCELKD

SEQ ID NO: 9896 - protein, 6 aa, synthetic construct
PCELKE

SEQ ID NO: 9897 - protein, 6 aa, synthetic construct
PCELKF

SEQ ID NO: 9898 - protein, 6 aa, synthetic construct
PCELKW

SEQ ID NO: 9899 - protein, 6 aa, synthetic construct
PCELKY

SEQ ID NO: 9900 - protein, 6 aa, synthetic construct
PCELMD

SEQ ID NO: 9901 - protein, 6 aa, synthetic construct
PCELME

SEQ ID NO: 9902 - protein, 6 aa, synthetic construct
PCELMF

SEQ ID NO: 9903 - protein, 6 aa, synthetic construct
PCELMW

SEQ ID NO: 9904 - protein, 6 aa, synthetic construct
PCELMY

SEQ ID NO: 9905 - protein, 6 aa, synthetic construct
PCELFD

SEQ ID NO: 9906 - protein, 6 aa, synthetic construct
PCELFE

SEQ ID NO: 9907 - protein, 6 aa, synthetic construct
PCELFF

SEQ ID NO: 9908 - protein, 6 aa, synthetic construct
PCELFW

SEQ ID NO: 9909 - protein, 6 aa, synthetic construct
PCELFY

SEQ ID NO: 9910 - protein, 6 aa, synthetic construct
PCELPD

SEQ ID NO: 9911 - protein, 6 aa, synthetic construct
PCELPE

SEQ ID NO: 9912 - protein, 6 aa, synthetic construct
PCELPF

SEQ ID NO: 9913 - protein, 6 aa, synthetic construct
PCELPW

SEQ ID NO: 9914 - protein, 6 aa, synthetic construct
PCELPY

SEQ ID NO: 9915 - protein, 6 aa, synthetic construct
PCELSD

SEQ ID NO: 9916 - protein, 6 aa, synthetic construct
PCELSE

SEQ ID NO: 9917 - protein, 6 aa, synthetic construct
PCELSF

SEQ ID NO: 9918 - protein, 6 aa, synthetic construct
PCELSW

SEQ ID NO: 9919 - protein, 6 aa, synthetic construct
PCELSY

SEQ ID NO: 9920 - protein, 6 aa, synthetic construct
PCELTD

SEQ ID NO: 9921 - protein, 6 aa, synthetic construct
PCELTE

SEQ ID NO: 9922 - protein, 6 aa, synthetic construct
PCELTF

SEQ ID NO: 9923 - protein, 6 aa, synthetic construct
PCELTW

SEQ ID NO: 9924 - protein, 6 aa, synthetic construct
PCELTY

SEQ ID NO: 9925 - protein, 6 aa, synthetic construct
PCELWD

SEQ ID NO: 9926 - protein, 6 aa, synthetic construct
PCELWE

SEQ ID NO: 9927 - protein, 6 aa, synthetic construct
PCELWF

SEQ ID NO: 9928 - protein, 6 aa, synthetic construct
PCELWW

SEQ ID NO: 9929 - protein, 6 aa, synthetic construct
PCELWY

SEQ ID NO: 9930 - protein, 6 aa, synthetic construct
PCELYD

SEQ ID NO: 9931 - protein, 6 aa, synthetic construct
PCELYE

SEQ ID NO: 9932 - protein, 6 aa, synthetic construct
PCELYF

SEQ ID NO: 9933 - protein, 6 aa, synthetic construct
PCELYW

SEQ ID NO: 9934 - protein, 6 aa, synthetic construct
PCELYY

SEQ ID NO: 9935 - protein, 6 aa, synthetic construct
PCELVD

SEQ ID NO: 9936 - protein, 6 aa, synthetic construct
PCELVE

SEQ ID NO: 9937 - protein, 6 aa, synthetic construct
PCELVF

SEQ ID NO: 9938 - protein, 6 aa, synthetic construct
PCELVW

SEQ ID NO: 9939 - protein, 6 aa, synthetic construct
PCELVY

SEQ ID NO: 9940 - protein, 6 aa, synthetic construct
PCEKAD

SEQ ID NO: 9941 - protein, 6 aa, synthetic construct
PCEKAE

SEQ ID NO: 9942 - protein, 6 aa, synthetic construct
PCEKAF

SEQ ID NO: 9943 - protein, 6 aa, synthetic construct
PCEKAW

SEQ ID NO: 9944 - protein, 6 aa, synthetic construct
PCEKAY

SEQ ID NO: 9945 - protein, 6 aa, synthetic construct
PCEKRD

SEQ ID NO: 9946 - protein, 6 aa, synthetic construct
PCEKRE

SEQ ID NO: 9947 - protein, 6 aa, synthetic construct
PCEKRF

SEQ ID NO: 9948 - protein, 6 aa, synthetic construct
PCEKRW

SEQ ID NO: 9949 - protein, 6 aa, synthetic construct
PCEKRY

SEQ ID NO: 9950 - protein, 6 aa, synthetic construct
PCEKND

SEQ ID NO: 9951 - protein, 6 aa, synthetic construct
PCEKNE

SEQ ID NO: 9952 - protein, 6 aa, synthetic construct
PCEKNF

SEQ ID NO: 9953 - protein, 6 aa, synthetic construct
PCEKNW

SEQ ID NO: 9954 - protein, 6 aa, synthetic construct
PCEKNY

SEQ ID NO: 9955 - protein, 6 aa, synthetic construct
PCEKDD

SEQ ID NO: 9956 - protein, 6 aa, synthetic construct
PCEKDE

SEQ ID NO: 9957 - protein, 6 aa, synthetic construct
PCEKDF

SEQ ID NO: 9958 - protein, 6 aa, synthetic construct
PCEKDW

SEQ ID NO: 9959 - protein, 6 aa, synthetic construct
PCEKDY

SEQ ID NO: 9960 - protein, 6 aa, synthetic construct
PCEKCD

SEQ ID NO: 9961 - protein, 6 aa, synthetic construct
PCEKCE

SEQ ID NO: 9962 - protein, 6 aa, synthetic construct
PCEKCF

SEQ ID NO: 9963 - protein, 6 aa, synthetic construct
PCEKCW

SEQ ID NO: 9964 - protein, 6 aa, synthetic construct
PCEKCY

SEQ ID NO: 9965 - protein, 6 aa, synthetic construct
PCEKQD

SEQ ID NO: 9966 - protein, 6 aa, synthetic construct
PCEKQE

SEQ ID NO: 9967 - protein, 6 aa, synthetic construct
PCEKQF

SEQ ID NO: 9968 - protein, 6 aa, synthetic construct
PCEKQW

SEQ ID NO: 9969 - protein, 6 aa, synthetic construct
PCEKQY

SEQ ID NO: 9970 - protein, 6 aa, synthetic construct
PCEKED

SEQ ID NO: 9971 - protein, 6 aa, synthetic construct
PCEKEE

SEQ ID NO: 9972 - protein, 6 aa, synthetic construct
PCEKEF

SEQ ID NO: 9973 - protein, 6 aa, synthetic construct
PCEKEW

SEQ ID NO: 9974 - protein, 6 aa, synthetic construct
PCEKEY

SEQ ID NO: 9975 - protein, 6 aa, synthetic construct
PCEKGD

SEQ ID NO: 9976 - protein, 6 aa, synthetic construct
PCEKGE

SEQ ID NO: 9977 - protein, 6 aa, synthetic construct
PCEKGF

SEQ ID NO: 9978 - protein, 6 aa, synthetic construct
PCEKGW

SEQ ID NO: 9979 - protein, 6 aa, synthetic construct
PCEKGY

SEQ ID NO: 9980 - protein, 6 aa, synthetic construct
PCEKHD

SEQ ID NO: 9981 - protein, 6 aa, synthetic construct
PCEKHE

SEQ ID NO: 9982 - protein, 6 aa, synthetic construct
PCEKHF

SEQ ID NO: 9983 - protein, 6 aa, synthetic construct
PCEKHW

SEQ ID NO: 9984 - protein, 6 aa, synthetic construct
PCEKHY

SEQ ID NO: 9985 - protein, 6 aa, synthetic construct
PCEKID

SEQ ID NO: 9986 - protein, 6 aa, synthetic construct
PCEKIE

SEQ ID NO: 9987 - protein, 6 aa, synthetic construct
PCEKIF

SEQ ID NO: 9988 - protein, 6 aa, synthetic construct
PCEKIW

SEQ ID NO: 9989 - protein, 6 aa, synthetic construct
PCEKIY

SEQ ID NO: 9990 - protein, 6 aa, synthetic construct
PCEKLD

SEQ ID NO: 9991 - protein, 6 aa, synthetic construct
PCEKLE

SEQ ID NO: 9992 - protein, 6 aa, synthetic construct
PCEKLF

SEQ ID NO: 9993 - protein, 6 aa, synthetic construct
PCEKLW

SEQ ID NO: 9994 - protein, 6 aa, synthetic construct
PCEKLY

SEQ ID NO: 9995 - protein, 6 aa, synthetic construct
PCEKKD

SEQ ID NO: 9996 - protein, 6 aa, synthetic construct
PCEKKE

SEQ ID NO: 9997 - protein, 6 aa, synthetic construct
PCEKKF

SEQ ID NO: 9998 - protein, 6 aa, synthetic construct
PCEKKW

SEQ ID NO: 9999 - protein, 6 aa, synthetic construct
PCEKKY

SEQ ID NO: 10000 - protein, 6 aa, synthetic construct
PCEKMD

SEQ ID NO: 10001 - protein, 6 aa, synthetic construct
PCEKME

SEQ ID NO: 10002 - protein, 6 aa, synthetic construct
PCEKMF

SEQ ID NO: 10003 - protein, 6 aa, synthetic construct
PCEKMW

SEQ ID NO: 10004 - protein, 6 aa, synthetic construct
PCEKMY

SEQ ID NO: 10005 - protein, 6 aa, synthetic construct
PCEKFD

SEQ ID NO: 10006 - protein, 6 aa, synthetic construct
PCEKFE

SEQ ID NO: 10007 - protein, 6 aa, synthetic construct
PCEKFF

SEQ ID NO: 10008 - protein, 6 aa, synthetic construct
PCEKFW

SEQ ID NO: 10009 - protein, 6 aa, synthetic construct
PCEKFY

SEQ ID NO: 10010 - protein, 6 aa, synthetic construct
PCEKPD

SEQ ID NO: 10011 - protein, 6 aa, synthetic construct
PCEKPE

SEQ ID NO: 10012 - protein, 6 aa, synthetic construct
PCEKPF

SEQ ID NO: 10013 - protein, 6 aa, synthetic construct
PCEKPW

SEQ ID NO: 10014 - protein, 6 aa, synthetic construct
PCEKPY

SEQ ID NO: 10015 - protein, 6 aa, synthetic construct
PCEKSD

SEQ ID NO: 10016 - protein, 6 aa, synthetic construct
PCEKSE

SEQ ID NO: 10017 - protein, 6 aa, synthetic construct
PCEKSF

SEQ ID NO: 10018 - protein, 6 aa, synthetic construct
PCEKSW

SEQ ID NO: 10019 - protein, 6 aa, synthetic construct
PCEKSY

SEQ ID NO: 10020 - protein, 6 aa, synthetic construct
PCEKTD

SEQ ID NO: 10021 - protein, 6 aa, synthetic construct
PCEKTE

SEQ ID NO: 10022 - protein, 6 aa, synthetic construct
PCEKTF

SEQ ID NO: 10023 - protein, 6 aa, synthetic construct
PCEKTW

SEQ ID NO: 10024 - protein, 6 aa, synthetic construct
PCEKTY

SEQ ID NO: 10025 - protein, 6 aa, synthetic construct
PCEKWD

SEQ ID NO: 10026 - protein, 6 aa, synthetic construct
PCEKWE

SEQ ID NO: 10027 - protein, 6 aa, synthetic construct
PCEKWF

SEQ ID NO: 10028 - protein, 6 aa, synthetic construct
PCEKWW

SEQ ID NO: 10029 - protein, 6 aa, synthetic construct
PCEKWY

SEQ ID NO: 10030 - protein, 6 aa, synthetic construct
PCEKYD

SEQ ID NO: 10031 - protein, 6 aa, synthetic construct
PCEKYE

SEQ ID NO: 10032 - protein, 6 aa, synthetic construct
PCEKYF

SEQ ID NO: 10033 - protein, 6 aa, synthetic construct
PCEKYW

SEQ ID NO: 10034 - protein, 6 aa, synthetic construct
PCEKYY

SEQ ID NO: 10035 - protein, 6 aa, synthetic construct
PCEKVD

SEQ ID NO: 10036 - protein, 6 aa, synthetic construct
PCEKVE

SEQ ID NO: 10037 - protein, 6 aa, synthetic construct
PCEKVF

SEQ ID NO: 10038 - protein, 6 aa, synthetic construct
PCEKVW

SEQ ID NO: 10039 - protein, 6 aa, synthetic construct
PCEKVY

SEQ ID NO: 10040 - protein, 6 aa, synthetic construct
PCEMAD

SEQ ID NO: 10041 - protein, 6 aa, synthetic construct
PCEMAE

SEQ ID NO: 10042 - protein, 6 aa, synthetic construct
PCEMAF

SEQ ID NO: 10043 - protein, 6 aa, synthetic construct
PCEMAW

SEQ ID NO: 10044 - protein, 6 aa, synthetic construct
PCEMAY

SEQ ID NO: 10045 - protein, 6 aa, synthetic construct
PCEMRD

SEQ ID NO: 10046 - protein, 6 aa, synthetic construct
PCEMRE

SEQ ID NO: 10047 - protein, 6 aa, synthetic construct
PCEMRF

SEQ ID NO: 10048 - protein, 6 aa, synthetic construct
PCEMRW

SEQ ID NO: 10049 - protein, 6 aa, synthetic construct
PCEMRY

SEQ ID NO: 10050 - protein, 6 aa, synthetic construct
PCEMND

SEQ ID NO: 10051 - protein, 6 aa, synthetic construct
PCEMNE

SEQ ID NO: 10052 - protein, 6 aa, synthetic construct
PCEMNF

SEQ ID NO: 10053 - protein, 6 aa, synthetic construct
PCEMNW

SEQ ID NO: 10054 - protein, 6 aa, synthetic construct
PCEMNY

SEQ ID NO: 10055 - protein, 6 aa, synthetic construct
PCEMDD

SEQ ID NO: 10056 - protein, 6 aa, synthetic construct
PCEMDE

SEQ ID NO: 10057 - protein, 6 aa, synthetic construct
PCEMDF

SEQ ID NO: 10058 - protein, 6 aa, synthetic construct
PCEMDW

SEQ ID NO: 10059 - protein, 6 aa, synthetic construct
PCEMDY

SEQ ID NO: 10060 - protein, 6 aa, synthetic construct
PCEMCD

SEQ ID NO: 10061 - protein, 6 aa, synthetic construct
PCEMCE

SEQ ID NO: 10062 - protein, 6 aa, synthetic construct
PCEMCF

SEQ ID NO: 10063 - protein, 6 aa, synthetic construct
PCEMCW

SEQ ID NO: 10064 - protein, 6 aa, synthetic construct
PCEMCY

SEQ ID NO: 10065 - protein, 6 aa, synthetic construct
PCEMQD

SEQ ID NO: 10066 - protein, 6 aa, synthetic construct
PCEMQE

SEQ ID NO: 10067 - protein, 6 aa, synthetic construct
PCEMQF

SEQ ID NO: 10068 - protein, 6 aa, synthetic construct
PCEMQW

SEQ ID NO: 10069 - protein, 6 aa, synthetic construct
PCEMQY

SEQ ID NO: 10070 - protein, 6 aa, synthetic construct
PCEMED

SEQ ID NO: 10071 - protein, 6 aa, synthetic construct
PCEMEE

SEQ ID NO: 10072 - protein, 6 aa, synthetic construct
PCEMEF

SEQ ID NO: 10073 - protein, 6 aa, synthetic construct
PCEMEW

SEQ ID NO: 10074 - protein, 6 aa, synthetic construct
PCEMEY

SEQ ID NO: 10075 - protein, 6 aa, synthetic construct
PCEMGD

SEQ ID NO: 10076 - protein, 6 aa, synthetic construct
PCEMGE

SEQ ID NO: 10077 - protein, 6 aa, synthetic construct
PCEMGF

SEQ ID NO: 10078 - protein, 6 aa, synthetic construct
PCEMGW

SEQ ID NO: 10079 - protein, 6 aa, synthetic construct
PCEMGY

SEQ ID NO: 10080 - protein, 6 aa, synthetic construct
PCEMHD

SEQ ID NO: 10081 - protein, 6 aa, synthetic construct
PCEMHE

SEQ ID NO: 10082 - protein, 6 aa, synthetic construct
PCEMHF

SEQ ID NO: 10083 - protein, 6 aa, synthetic construct
PCEMHW

SEQ ID NO: 10084 - protein, 6 aa, synthetic construct
PCEMHY

SEQ ID NO: 10085 - protein, 6 aa, synthetic construct
PCEMID

SEQ ID NO: 10086 - protein, 6 aa, synthetic construct
PCEMIE

SEQ ID NO: 10087 - protein, 6 aa, synthetic construct
PCEMIF

SEQ ID NO: 10088 - protein, 6 aa, synthetic construct
PCEMIW

SEQ ID NO: 10089 - protein, 6 aa, synthetic construct
PCEMIY

SEQ ID NO: 10090 - protein, 6 aa, synthetic construct
PCEMLD

SEQ ID NO: 10091 - protein, 6 aa, synthetic construct
PCEMLE

SEQ ID NO: 10092 - protein, 6 aa, synthetic construct
PCEMLF

SEQ ID NO: 10093 - protein, 6 aa, synthetic construct
PCEMLW

SEQ ID NO: 10094 - protein, 6 aa, synthetic construct
PCEMLY

SEQ ID NO: 10095 - protein, 6 aa, synthetic construct
PCEMKD

SEQ ID NO: 10096 - protein, 6 aa, synthetic construct
PCEMKE

SEQ ID NO: 10097 - protein, 6 aa, synthetic construct
PCEMKF

SEQ ID NO: 10098 - protein, 6 aa, synthetic construct
PCEMKW

SEQ ID NO: 10099 - protein, 6 aa, synthetic construct
PCEMKY

SEQ ID NO: 10100 - protein, 6 aa, synthetic construct
PCEMMD

SEQ ID NO: 10101 - protein, 6 aa, synthetic construct
PCEMME

SEQ ID NO: 10102 - protein, 6 aa, synthetic construct
PCEMMF

SEQ ID NO: 10103 - protein, 6 aa, synthetic construct
PCEMMW

SEQ ID NO: 10104 - protein, 6 aa, synthetic construct
PCEMMY

SEQ ID NO: 10105 - protein, 6 aa, synthetic construct
PCEMFD

SEQ ID NO: 10106 - protein, 6 aa, synthetic construct
PCEMFE

SEQ ID NO: 10107 - protein, 6 aa, synthetic construct
PCEMFF

SEQ ID NO: 10108 - protein, 6 aa, synthetic construct
PCEMFW

SEQ ID NO: 10109 - protein, 6 aa, synthetic construct
PCEMFY

SEQ ID NO: 10110 - protein, 6 aa, synthetic construct
PCEMPD

SEQ ID NO: 10111 - protein, 6 aa, synthetic construct
PCEMPE

SEQ ID NO: 10112 - protein, 6 aa, synthetic construct
PCEMPF

SEQ ID NO: 10113 - protein, 6 aa, synthetic construct
PCEMPW

SEQ ID NO: 10114 - protein, 6 aa, synthetic construct
PCEMPY

SEQ ID NO: 10115 - protein, 6 aa, synthetic construct
PCEMSD

SEQ ID NO: 10116 - protein, 6 aa, synthetic construct
PCEMSE

SEQ ID NO: 10117 - protein, 6 aa, synthetic construct
PCEMSF

SEQ ID NO: 10118 - protein, 6 aa, synthetic construct
PCEMSW

SEQ ID NO: 10119 - protein, 6 aa, synthetic construct
PCEMSY

SEQ ID NO: 10120 - protein, 6 aa, synthetic construct
PCEMTD

SEQ ID NO: 10121 - protein, 6 aa, synthetic construct
PCEMTE

SEQ ID NO: 10122 - protein, 6 aa, synthetic construct
PCEMTF

SEQ ID NO: 10123 - protein, 6 aa, synthetic construct
PCEMTW

SEQ ID NO: 10124 - protein, 6 aa, synthetic construct
PCEMTY

SEQ ID NO: 10125 - protein, 6 aa, synthetic construct
PCEMWD

SEQ ID NO: 10126 - protein, 6 aa, synthetic construct
PCEMWE

SEQ ID NO: 10127 - protein, 6 aa, synthetic construct
PCEMWF

SEQ ID NO: 10128 - protein, 6 aa, synthetic construct
PCEMWW

SEQ ID NO: 10129 - protein, 6 aa, synthetic construct
PCEMWY

SEQ ID NO: 10130 - protein, 6 aa, synthetic construct
PCEMYD

SEQ ID NO: 10131 - protein, 6 aa, synthetic construct
PCEMYE

SEQ ID NO: 10132 - protein, 6 aa, synthetic construct
PCEMYF

SEQ ID NO: 10133 - protein, 6 aa, synthetic construct
PCEMYW

SEQ ID NO: 10134 - protein, 6 aa, synthetic construct
PCEMYY

SEQ ID NO: 10135 - protein, 6 aa, synthetic construct
PCEMVD

SEQ ID NO: 10136 - protein, 6 aa, synthetic construct
PCEMVE

SEQ ID NO: 10137 - protein, 6 aa, synthetic construct
PCEMVF

SEQ ID NO: 10138 - protein, 6 aa, synthetic construct
PCEMVW

SEQ ID NO: 10139 - protein, 6 aa, synthetic construct
PCEMVY

SEQ ID NO: 10140 - protein, 6 aa, synthetic construct
PCEFAD

SEQ ID NO: 10141 - protein, 6 aa, synthetic construct
PCEFAE

SEQ ID NO: 10142 - protein, 6 aa, synthetic construct
PCEFAF

SEQ ID NO: 10143 - protein, 6 aa, synthetic construct
PCEFAW

SEQ ID NO: 10144 - protein, 6 aa, synthetic construct
PCEFAY

SEQ ID NO: 10145 - protein, 6 aa, synthetic construct
PCEFRD

SEQ ID NO: 10146 - protein, 6 aa, synthetic construct
PCEFRE

SEQ ID NO: 10147 - protein, 6 aa, synthetic construct
PCEFRF

SEQ ID NO: 10148 - protein, 6 aa, synthetic construct
PCEFRW

SEQ ID NO: 10149 - protein, 6 aa, synthetic construct
PCEFRY

SEQ ID NO: 10150 - protein, 6 aa, synthetic construct
PCEFND

SEQ ID NO: 10151 - protein, 6 aa, synthetic construct
PCEFNE

SEQ ID NO: 10152 - protein, 6 aa, synthetic construct
PCEFNF

SEQ ID NO: 10153 - protein, 6 aa, synthetic construct
PCEFNW

SEQ ID NO: 10154 - protein, 6 aa, synthetic construct
PCEFNY

SEQ ID NO: 10155 - protein, 6 aa, synthetic construct
PCEFDD

SEQ ID NO: 10156 - protein, 6 aa, synthetic construct
PCEFDE

SEQ ID NO: 10157 - protein, 6 aa, synthetic construct
PCEFDF

SEQ ID NO: 10158 - protein, 6 aa, synthetic construct
PCEFDW

SEQ ID NO: 10159 - protein, 6 aa, synthetic construct
PCEFDY

SEQ ID NO: 10160 - protein, 6 aa, synthetic construct
PCEFCD

SEQ ID NO: 10161 - protein, 6 aa, synthetic construct
PCEFCE

SEQ ID NO: 10162 - protein, 6 aa, synthetic construct
PCEFCF

SEQ ID NO: 10163 - protein, 6 aa, synthetic construct
PCEFCW

SEQ ID NO: 10164 - protein, 6 aa, synthetic construct
PCEFCY

SEQ ID NO: 10165 - protein, 6 aa, synthetic construct
PCEFQD

SEQ ID NO: 10166 - protein, 6 aa, synthetic construct
PCEFQE

SEQ ID NO: 10167 - protein, 6 aa, synthetic construct
PCEFQF

SEQ ID NO: 10168 - protein, 6 aa, synthetic construct
PCEFQW

SEQ ID NO: 10169 - protein, 6 aa, synthetic construct
PCEFQY

SEQ ID NO: 10170 - protein, 6 aa, synthetic construct
PCEFED

SEQ ID NO: 10171 - protein, 6 aa, synthetic construct
PCEFEE

SEQ ID NO: 10172 - protein, 6 aa, synthetic construct
PCEFEF

SEQ ID NO: 10173 - protein, 6 aa, synthetic construct
PCEFEW

SEQ ID NO: 10174 - protein, 6 aa, synthetic construct
PCEFEY

SEQ ID NO: 10175 - protein, 6 aa, synthetic construct
PCEFGD

SEQ ID NO: 10176 - protein, 6 aa, synthetic construct
PCEFGE

SEQ ID NO: 10177 - protein, 6 aa, synthetic construct
PCEFGF

SEQ ID NO: 10178 - protein, 6 aa, synthetic construct
PCEFGW

SEQ ID NO: 10179 - protein, 6 aa, synthetic construct
PCEFGY

SEQ ID NO: 10180 - protein, 6 aa, synthetic construct
PCEFHD

SEQ ID NO: 10181 - protein, 6 aa, synthetic construct
PCEFHE

SEQ ID NO: 10182 - protein, 6 aa, synthetic construct
PCEFHF

SEQ ID NO: 10183 - protein, 6 aa, synthetic construct
PCEFHW

SEQ ID NO: 10184 - protein, 6 aa, synthetic construct
PCEFHY

SEQ ID NO: 10185 - protein, 6 aa, synthetic construct
PCEFID

SEQ ID NO: 10186 - protein, 6 aa, synthetic construct
PCEFIE

SEQ ID NO: 10187 - protein, 6 aa, synthetic construct
PCEFIF

SEQ ID NO: 10188 - protein, 6 aa, synthetic construct
PCEFIW

SEQ ID NO: 10189 - protein, 6 aa, synthetic construct
PCEFIY

SEQ ID NO: 10190 - protein, 6 aa, synthetic construct
PCEFLD

SEQ ID NO: 10191 - protein, 6 aa, synthetic construct
PCEFLE

SEQ ID NO: 10192 - protein, 6 aa, synthetic construct
PCEFLF

SEQ ID NO: 10193 - protein, 6 aa, synthetic construct
PCEFLW

SEQ ID NO: 10194 - protein, 6 aa, synthetic construct
PCEFLY

SEQ ID NO: 10195 - protein, 6 aa, synthetic construct
PCEFKD

SEQ ID NO: 10196 - protein, 6 aa, synthetic construct
PCEFKE

SEQ ID NO: 10197 - protein, 6 aa, synthetic construct
PCEFKF

SEQ ID NO: 10198 - protein, 6 aa, synthetic construct
PCEFKW

SEQ ID NO: 10199 - protein, 6 aa, synthetic construct
PCEFKY

SEQ ID NO: 10200 - protein, 6 aa, synthetic construct
PCEFMD

SEQ ID NO: 10201 - protein, 6 aa, synthetic construct
PCEFME

SEQ ID NO: 10202 - protein, 6 aa, synthetic construct
PCEFMF

SEQ ID NO: 10203 - protein, 6 aa, synthetic construct
PCEFMW

SEQ ID NO: 10204 - protein, 6 aa, synthetic construct
PCEFMY

SEQ ID NO: 10205 - protein, 6 aa, synthetic construct
PCEFFD

SEQ ID NO: 10206 - protein, 6 aa, synthetic construct
PCEFFE

SEQ ID NO: 10207 - protein, 6 aa, synthetic construct
PCEFFF

SEQ ID NO: 10208 - protein, 6 aa, synthetic construct
PCEFFW

SEQ ID NO: 10209 - protein, 6 aa, synthetic construct
PCEFFY

SEQ ID NO: 10210 - protein, 6 aa, synthetic construct
PCEFPD

SEQ ID NO: 10211 - protein, 6 aa, synthetic construct
PCEFPE

SEQ ID NO: 10212 - protein, 6 aa, synthetic construct
PCEFPF

SEQ ID NO: 10213 - protein, 6 aa, synthetic construct
PCEFPW

SEQ ID NO: 10214 - protein, 6 aa, synthetic construct
PCEFPY

SEQ ID NO: 10215 - protein, 6 aa, synthetic construct
PCEFSD

SEQ ID NO: 10216 - protein, 6 aa, synthetic construct
PCEFSE

SEQ ID NO: 10217 - protein, 6 aa, synthetic construct
PCEFSF

SEQ ID NO: 10218 - protein, 6 aa, synthetic construct
PCEFSW

SEQ ID NO: 10219 - protein, 6 aa, synthetic construct
PCEFSY

SEQ ID NO: 10220 - protein, 6 aa, synthetic construct
PCEFTD

SEQ ID NO: 10221 - protein, 6 aa, synthetic construct
PCEFTE

SEQ ID NO: 10222 - protein, 6 aa, synthetic construct
PCEFTF

SEQ ID NO: 10223 - protein, 6 aa, synthetic construct
PCEFTW

SEQ ID NO: 10224 - protein, 6 aa, synthetic construct
PCEFTY

SEQ ID NO: 10225 - protein, 6 aa, synthetic construct
PCEFWD

SEQ ID NO: 10226 - protein, 6 aa, synthetic construct
PCEFWE

SEQ ID NO: 10227 - protein, 6 aa, synthetic construct
PCEFWF

SEQ ID NO: 10228 - protein, 6 aa, synthetic construct
PCEFWW

SEQ ID NO: 10229 - protein, 6 aa, synthetic construct
PCEFWY

SEQ ID NO: 10230 - protein, 6 aa, synthetic construct
PCEFYD

SEQ ID NO: 10231 - protein, 6 aa, synthetic construct
PCEFYE

SEQ ID NO: 10232 - protein, 6 aa, synthetic construct
PCEFYF

SEQ ID NO: 10233 - protein, 6 aa, synthetic construct
PCEFYW

SEQ ID NO: 10234 - protein, 6 aa, synthetic construct
PCEFYY

SEQ ID NO: 10235 - protein, 6 aa, synthetic construct
PCEFVD

SEQ ID NO: 10236 - protein, 6 aa, synthetic construct
PCEFVE

SEQ ID NO: 10237 - protein, 6 aa, synthetic construct
PCEFVF

SEQ ID NO: 10238 - protein, 6 aa, synthetic construct
PCEFVW

SEQ ID NO: 10239 - protein, 6 aa, synthetic construct
PCEFVY

SEQ ID NO: 10240 - protein, 6 aa, synthetic construct
PCEPAD

SEQ ID NO: 10241 - protein, 6 aa, synthetic construct
PCEPAE

SEQ ID NO: 10242 - protein, 6 aa, synthetic construct
PCEPAF

SEQ ID NO: 10243 - protein, 6 aa, synthetic construct
PCEPAW

SEQ ID NO: 10244 - protein, 6 aa, synthetic construct
PCEPAY

SEQ ID NO: 10245 - protein, 6 aa, synthetic construct
PCEPRD

SEQ ID NO: 10246 - protein, 6 aa, synthetic construct
PCEPRE

SEQ ID NO: 10247 - protein, 6 aa, synthetic construct
PCEPRF

SEQ ID NO: 10248 - protein, 6 aa, synthetic construct
PCEPRW

SEQ ID NO: 10249 - protein, 6 aa, synthetic construct
PCEPRY

SEQ ID NO: 10250 - protein, 6 aa, synthetic construct
PCEPND

SEQ ID NO: 10251 - protein, 6 aa, synthetic construct
PCEPNE

SEQ ID NO: 10252 - protein, 6 aa, synthetic construct
PCEPNF

SEQ ID NO: 10253 - protein, 6 aa, synthetic construct
PCEPNW

SEQ ID NO: 10254 - protein, 6 aa, synthetic construct
PCEPNY

SEQ ID NO: 10255 - protein, 6 aa, synthetic construct
PCEPDD

SEQ ID NO: 10256 - protein, 6 aa, synthetic construct
PCEPDE

SEQ ID NO: 10257 - protein, 6 aa, synthetic construct
PCEPDF

SEQ ID NO: 10258 - protein, 6 aa, synthetic construct
PCEPDW

SEQ ID NO: 10259 - protein, 6 aa, synthetic construct
PCEPDY

SEQ ID NO: 10260 - protein, 6 aa, synthetic construct
PCEPCD

SEQ ID NO: 10261 - protein, 6 aa, synthetic construct
PCEPCE

SEQ ID NO: 10262 - protein, 6 aa, synthetic construct
PCEPCF

SEQ ID NO: 10263 - protein, 6 aa, synthetic construct
PCEPCW

SEQ ID NO: 10264 - protein, 6 aa, synthetic construct
PCEPCY

SEQ ID NO: 10265 - protein, 6 aa, synthetic construct
PCEPQD

SEQ ID NO: 10266 - protein, 6 aa, synthetic construct
PCEPQE

SEQ ID NO: 10267 - protein, 6 aa, synthetic construct
PCEPQF

SEQ ID NO: 10268 - protein, 6 aa, synthetic construct
PCEPQW

SEQ ID NO: 10269 - protein, 6 aa, synthetic construct
PCEPQY

SEQ ID NO: 10270 - protein, 6 aa, synthetic construct
PCEPED

SEQ ID NO: 10271 - protein, 6 aa, synthetic construct
PCEPEE

SEQ ID NO: 10272 - protein, 6 aa, synthetic construct
PCEPEF

SEQ ID NO: 10273 - protein, 6 aa, synthetic construct
PCEPEW

SEQ ID NO: 10274 - protein, 6 aa, synthetic construct
PCEPEY

SEQ ID NO: 10275 - protein, 6 aa, synthetic construct
PCEPGD

SEQ ID NO: 10276 - protein, 6 aa, synthetic construct
PCEPGE

SEQ ID NO: 10277 - protein, 6 aa, synthetic construct
PCEPGF

SEQ ID NO: 10278 - protein, 6 aa, synthetic construct
PCEPGW

SEQ ID NO: 10279 - protein, 6 aa, synthetic construct
PCEPGY

SEQ ID NO: 10280 - protein, 6 aa, synthetic construct
PCEPHD

SEQ ID NO: 10281 - protein, 6 aa, synthetic construct
PCEPHE

SEQ ID NO: 10282 - protein, 6 aa, synthetic construct
PCEPHF

SEQ ID NO: 10283 - protein, 6 aa, synthetic construct
PCEPHW

SEQ ID NO: 10284 - protein, 6 aa, synthetic construct
PCEPHY

SEQ ID NO: 10285 - protein, 6 aa, synthetic construct
PCEPID

SEQ ID NO: 10286 - protein, 6 aa, synthetic construct
PCEPIE

SEQ ID NO: 10287 - protein, 6 aa, synthetic construct
PCEPIF

SEQ ID NO: 10288 - protein, 6 aa, synthetic construct
PCEPIW

SEQ ID NO: 10289 - protein, 6 aa, synthetic construct
PCEPIY

SEQ ID NO: 10290 - protein, 6 aa, synthetic construct
PCEPLD

SEQ ID NO: 10291 - protein, 6 aa, synthetic construct
PCEPLE

SEQ ID NO: 10292 - protein, 6 aa, synthetic construct
PCEPLF

SEQ ID NO: 10293 - protein, 6 aa, synthetic construct
PCEPLW

SEQ ID NO: 10294 - protein, 6 aa, synthetic construct
PCEPLY

SEQ ID NO: 10295 - protein, 6 aa, synthetic construct
PCEPKD

SEQ ID NO: 10296 - protein, 6 aa, synthetic construct
PCEPKE

SEQ ID NO: 10297 - protein, 6 aa, synthetic construct
PCEPKF

SEQ ID NO: 10298 - protein, 6 aa, synthetic construct
PCEPKW

SEQ ID NO: 10299 - protein, 6 aa, synthetic construct
PCEPKY

SEQ ID NO: 10300 - protein, 6 aa, synthetic construct
PCEPMD

SEQ ID NO: 10301 - protein, 6 aa, synthetic construct
PCEPME

SEQ ID NO: 10302 - protein, 6 aa, synthetic construct
PCEPMF

SEQ ID NO: 10303 - protein, 6 aa, synthetic construct
PCEPMW

SEQ ID NO: 10304 - protein, 6 aa, synthetic construct
PCEPMY

SEQ ID NO: 10305 - protein, 6 aa, synthetic construct
PCEPFD

SEQ ID NO: 10306 - protein, 6 aa, synthetic construct
PCEPFE

SEQ ID NO: 10307 - protein, 6 aa, synthetic construct
PCEPFF

SEQ ID NO: 10308 - protein, 6 aa, synthetic construct
PCEPFW

SEQ ID NO: 10309 - protein, 6 aa, synthetic construct
PCEPFY

SEQ ID NO: 10310 - protein, 6 aa, synthetic construct
PCEPPD

SEQ ID NO: 10311 - protein, 6 aa, synthetic construct
PCEPPE

SEQ ID NO: 10312 - protein, 6 aa, synthetic construct
PCEPPF

SEQ ID NO: 10313 - protein, 6 aa, synthetic construct
PCEPPW

SEQ ID NO: 10314 - protein, 6 aa, synthetic construct
PCEPPY

SEQ ID NO: 10315 - protein, 6 aa, synthetic construct
PCEPSD

SEQ ID NO: 10316 - protein, 6 aa, synthetic construct
PCEPSE

SEQ ID NO: 10317 - protein, 6 aa, synthetic construct
PCEPSF

SEQ ID NO: 10318 - protein, 6 aa, synthetic construct
PCEPSW

SEQ ID NO: 10319 - protein, 6 aa, synthetic construct
PCEPSY

SEQ ID NO: 10320 - protein, 6 aa, synthetic construct
PCEPTD

SEQ ID NO: 10321 - protein, 6 aa, synthetic construct
PCEPTE

SEQ ID NO: 10322 - protein, 6 aa, synthetic construct
PCEPTF

SEQ ID NO: 10323 - protein, 6 aa, synthetic construct
PCEPTW

SEQ ID NO: 10324 - protein, 6 aa, synthetic construct
PCEPTY

SEQ ID NO: 10325 - protein, 6 aa, synthetic construct
PCEPWD

SEQ ID NO: 10326 - protein, 6 aa, synthetic construct
PCEPWE

SEQ ID NO: 10327 - protein, 6 aa, synthetic construct
PCEPWF

SEQ ID NO: 10328 - protein, 6 aa, synthetic construct
PCEPWW

SEQ ID NO: 10329 - protein, 6 aa, synthetic construct
PCEPWY

SEQ ID NO: 10330 - protein, 6 aa, synthetic construct
PCEPYD

SEQ ID NO: 10331 - protein, 6 aa, synthetic construct
PCEPYE

SEQ ID NO: 10332 - protein, 6 aa, synthetic construct
PCEPYF

SEQ ID NO: 10333 - protein, 6 aa, synthetic construct
PCEPYW

SEQ ID NO: 10334 - protein, 6 aa, synthetic construct
PCEPYY

SEQ ID NO: 10335 - protein, 6 aa, synthetic construct
PCEPVD

SEQ ID NO: 10336 - protein, 6 aa, synthetic construct
PCEPVE

SEQ ID NO: 10337 - protein, 6 aa, synthetic construct
PCEPVF

SEQ ID NO: 10338 - protein, 6 aa, synthetic construct
PCEPVW

SEQ ID NO: 10339 - protein, 6 aa, synthetic construct
PCEPVY

SEQ ID NO: 10340 - protein, 6 aa, synthetic construct
PCESAD

SEQ ID NO: 10341 - protein, 6 aa, synthetic construct
PCESAE

SEQ ID NO: 10342 - protein, 6 aa, synthetic construct
PCESAF

SEQ ID NO: 10343 - protein, 6 aa, synthetic construct
PCESAW

SEQ ID NO: 10344 - protein, 6 aa, synthetic construct
PCESAY

SEQ ID NO: 10345 - protein, 6 aa, synthetic construct
PCESRD

SEQ ID NO: 10346 - protein, 6 aa, synthetic construct
PCESRE

SEQ ID NO: 10347 - protein, 6 aa, synthetic construct
PCESRF

SEQ ID NO: 10348 - protein, 6 aa, synthetic construct
PCESRW

SEQ ID NO: 10349 - protein, 6 aa, synthetic construct
PCESRY

SEQ ID NO: 10350 - protein, 6 aa, synthetic construct
PCESND

SEQ ID NO: 10351 - protein, 6 aa, synthetic construct
PCESNE

SEQ ID NO: 10352 - protein, 6 aa, synthetic construct
PCESNF

SEQ ID NO: 10353 - protein, 6 aa, synthetic construct
PCESNW

SEQ ID NO: 10354 - protein, 6 aa, synthetic construct
PCESNY

SEQ ID NO: 10355 - protein, 6 aa, synthetic construct
PCESDD

SEQ ID NO: 10356 - protein, 6 aa, synthetic construct
PCESDE

SEQ ID NO: 10357 - protein, 6 aa, synthetic construct
PCESDF

SEQ ID NO: 10358 - protein, 6 aa, synthetic construct
PCESDW

SEQ ID NO: 10359 - protein, 6 aa, synthetic construct
PCESDY

SEQ ID NO: 10360 - protein, 6 aa, synthetic construct
PCESCD

SEQ ID NO: 10361 - protein, 6 aa, synthetic construct
PCESCE

SEQ ID NO: 10362 - protein, 6 aa, synthetic construct
PCESCF

SEQ ID NO: 10363 - protein, 6 aa, synthetic construct
PCESCW

SEQ ID NO: 10364 - protein, 6 aa, synthetic construct
PCESCY

SEQ ID NO: 10365 - protein, 6 aa, synthetic construct
PCESQD

SEQ ID NO: 10366 - protein, 6 aa, synthetic construct
PCESQE

SEQ ID NO: 10367 - protein, 6 aa, synthetic construct
PCESQF

SEQ ID NO: 10368 - protein, 6 aa, synthetic construct
PCESQW

SEQ ID NO: 10369 - protein, 6 aa, synthetic construct
PCESQY

SEQ ID NO: 10370 - protein, 6 aa, synthetic construct
PCESED

SEQ ID NO: 10371 - protein, 6 aa, synthetic construct
PCESEE

SEQ ID NO: 10372 - protein, 6 aa, synthetic construct
PCESEF

SEQ ID NO: 10373 - protein, 6 aa, synthetic construct
PCESEW

SEQ ID NO: 10374 - protein, 6 aa, synthetic construct
PCESEY

SEQ ID NO: 10375 - protein, 6 aa, synthetic construct
PCESGD

SEQ ID NO: 10376 - protein, 6 aa, synthetic construct
PCESGE

SEQ ID NO: 10377 - protein, 6 aa, synthetic construct
PCESGF

SEQ ID NO: 10378 - protein, 6 aa, synthetic construct
PCESGW

SEQ ID NO: 10379 - protein, 6 aa, synthetic construct
PCESGY

SEQ ID NO: 10380 - protein, 6 aa, synthetic construct
PCESHD

SEQ ID NO: 10381 - protein, 6 aa, synthetic construct
PCESHE

SEQ ID NO: 10382 - protein, 6 aa, synthetic construct
PCESHF

SEQ ID NO: 10383 - protein, 6 aa, synthetic construct
PCESHW

SEQ ID NO: 10384 - protein, 6 aa, synthetic construct
PCESHY

SEQ ID NO: 10385 - protein, 6 aa, synthetic construct
PCESID

SEQ ID NO: 10386 - protein, 6 aa, synthetic construct
PCESIE

SEQ ID NO: 10387 - protein, 6 aa, synthetic construct
PCESIF

SEQ ID NO: 10388 - protein, 6 aa, synthetic construct
PCESIW

SEQ ID NO: 10389 - protein, 6 aa, synthetic construct
PCESIY

SEQ ID NO: 10390 - protein, 6 aa, synthetic construct
PCESLD

SEQ ID NO: 10391 - protein, 6 aa, synthetic construct
PCESLE

SEQ ID NO: 10392 - protein, 6 aa, synthetic construct
PCESLF

SEQ ID NO: 10393 - protein, 6 aa, synthetic construct
PCESLW

SEQ ID NO: 10394 - protein, 6 aa, synthetic construct
PCESLY

SEQ ID NO: 10395 - protein, 6 aa, synthetic construct
PCESKD

SEQ ID NO: 10396 - protein, 6 aa, synthetic construct
PCESKE

SEQ ID NO: 10397 - protein, 6 aa, synthetic construct
PCESKF

SEQ ID NO: 10398 - protein, 6 aa, synthetic construct
PCESKW

SEQ ID NO: 10399 - protein, 6 aa, synthetic construct
PCESKY

SEQ ID NO: 10400 - protein, 6 aa, synthetic construct
PCESMD

SEQ ID NO: 10401 - protein, 6 aa, synthetic construct
PCESME

SEQ ID NO: 10402 - protein, 6 aa, synthetic construct
PCESMF

SEQ ID NO: 10403 - protein, 6 aa, synthetic construct
PCESMW

SEQ ID NO: 10404 - protein, 6 aa, synthetic construct
PCESMY

SEQ ID NO: 10405 - protein, 6 aa, synthetic construct
PCESFD

SEQ ID NO: 10406 - protein, 6 aa, synthetic construct
PCESFE

SEQ ID NO: 10407 - protein, 6 aa, synthetic construct
PCESFF

SEQ ID NO: 10408 - protein, 6 aa, synthetic construct
PCESFW

SEQ ID NO: 10409 - protein, 6 aa, synthetic construct
PCESFY

SEQ ID NO: 10410 - protein, 6 aa, synthetic construct
PCESPD

SEQ ID NO: 10411 - protein, 6 aa, synthetic construct
PCESPE

SEQ ID NO: 10412 - protein, 6 aa, synthetic construct
PCESPF

SEQ ID NO: 10413 - protein, 6 aa, synthetic construct
PCESPW

SEQ ID NO: 10414 - protein, 6 aa, synthetic construct
PCESPY

SEQ ID NO: 10415 - protein, 6 aa, synthetic construct
PCESSD

SEQ ID NO: 10416 - protein, 6 aa, synthetic construct
PCESSE

SEQ ID NO: 10417 - protein, 6 aa, synthetic construct
PCESSF

SEQ ID NO: 10418 - protein, 6 aa, synthetic construct
PCESSW

SEQ ID NO: 10419 - protein, 6 aa, synthetic construct
PCESSY

SEQ ID NO: 10420 - protein, 6 aa, synthetic construct
PCESTD

SEQ ID NO: 10421 - protein, 6 aa, synthetic construct
PCESTE

SEQ ID NO: 10422 - protein, 6 aa, synthetic construct
PCESTF

SEQ ID NO: 10423 - protein, 6 aa, synthetic construct
PCESTW

SEQ ID NO: 10424 - protein, 6 aa, synthetic construct
PCESTY

SEQ ID NO: 10425 - protein, 6 aa, synthetic construct
PCESWD

SEQ ID NO: 10426 - protein, 6 aa, synthetic construct
PCESWE

SEQ ID NO: 10427 - protein, 6 aa, synthetic construct
PCESWF

SEQ ID NO: 10428 - protein, 6 aa, synthetic construct
PCESWW

SEQ ID NO: 10429 - protein, 6 aa, synthetic construct
PCESWY

SEQ ID NO: 10430 - protein, 6 aa, synthetic construct
PCESYD

SEQ ID NO: 10431 - protein, 6 aa, synthetic construct
PCESYE

SEQ ID NO: 10432 - protein, 6 aa, synthetic construct
PCESYF

SEQ ID NO: 10433 - protein, 6 aa, synthetic construct
PCESYW

SEQ ID NO: 10434 - protein, 6 aa, synthetic construct
PCESYY

SEQ ID NO: 10435 - protein, 6 aa, synthetic construct
PCESVD

SEQ ID NO: 10436 - protein, 6 aa, synthetic construct
PCESVE

SEQ ID NO: 10437 - protein, 6 aa, synthetic construct
PCESVF

SEQ ID NO: 10438 - protein, 6 aa, synthetic construct
PCESVW

SEQ ID NO: 10439 - protein, 6 aa, synthetic construct
PCESVY

SEQ ID NO: 10440 - protein, 6 aa, synthetic construct
PCETAD

SEQ ID NO: 10441 - protein, 6 aa, synthetic construct
PCETAE

SEQ ID NO: 10442 - protein, 6 aa, synthetic construct
PCETAF

SEQ ID NO: 10443 - protein, 6 aa, synthetic construct
PCETAW

SEQ ID NO: 10444 - protein, 6 aa, synthetic construct
PCETAY

SEQ ID NO: 10445 - protein, 6 aa, synthetic construct
PCETRD

SEQ ID NO: 10446 - protein, 6 aa, synthetic construct
PCETRE

SEQ ID NO: 10447 - protein, 6 aa, synthetic construct
PCETRF

SEQ ID NO: 10448 - protein, 6 aa, synthetic construct
PCETRW

SEQ ID NO: 10449 - protein, 6 aa, synthetic construct
PCETRY

SEQ ID NO: 10450 - protein, 6 aa, synthetic construct
PCETND

SEQ ID NO: 10451 - protein, 6 aa, synthetic construct
PCETNE

SEQ ID NO: 10452 - protein, 6 aa, synthetic construct
PCETNF

SEQ ID NO: 10453 - protein, 6 aa, synthetic construct
PCETNW

SEQ ID NO: 10454 - protein, 6 aa, synthetic construct
PCETNY

SEQ ID NO: 10455 - protein, 6 aa, synthetic construct
PCETDD

SEQ ID NO: 10456 - protein, 6 aa, synthetic construct
PCETDE

SEQ ID NO: 10457 - protein, 6 aa, synthetic construct
PCETDF

SEQ ID NO: 10458 - protein, 6 aa, synthetic construct
PCETDW

SEQ ID NO: 10459 - protein, 6 aa, synthetic construct
PCETDY

SEQ ID NO: 10460 - protein, 6 aa, synthetic construct
PCETCD

SEQ ID NO: 10461 - protein, 6 aa, synthetic construct
PCETCE

SEQ ID NO: 10462 - protein, 6 aa, synthetic construct
PCETCF

SEQ ID NO: 10463 - protein, 6 aa, synthetic construct
PCETCW

SEQ ID NO: 10464 - protein, 6 aa, synthetic construct
PCETCY

SEQ ID NO: 10465 - protein, 6 aa, synthetic construct
PCETQD

SEQ ID NO: 10466 - protein, 6 aa, synthetic construct
PCETQE

SEQ ID NO: 10467 - protein, 6 aa, synthetic construct
PCETQF

SEQ ID NO: 10468 - protein, 6 aa, synthetic construct
PCETQW

SEQ ID NO: 10469 - protein, 6 aa, synthetic construct
PCETQY

SEQ ID NO: 10470 - protein, 6 aa, synthetic construct
PCETED

SEQ ID NO: 10471 - protein, 6 aa, synthetic construct
PCETEE

SEQ ID NO: 10472 - protein, 6 aa, synthetic construct
PCETEF

SEQ ID NO: 10473 - protein, 6 aa, synthetic construct
PCETEW

SEQ ID NO: 10474 - protein, 6 aa, synthetic construct
PCETEY

SEQ ID NO: 10475 - protein, 6 aa, synthetic construct
PCETGD

SEQ ID NO: 10476 - protein, 6 aa, synthetic construct
PCETGE

SEQ ID NO: 10477 - protein, 6 aa, synthetic construct
PCETGF

SEQ ID NO: 10478 - protein, 6 aa, synthetic construct
PCETGW

SEQ ID NO: 10479 - protein, 6 aa, synthetic construct
PCETGY

SEQ ID NO: 10480 - protein, 6 aa, synthetic construct
PCETHD

SEQ ID NO: 10481 - protein, 6 aa, synthetic construct
PCETHE

SEQ ID NO: 10482 - protein, 6 aa, synthetic construct
PCETHF

SEQ ID NO: 10483 - protein, 6 aa, synthetic construct
PCETHW

SEQ ID NO: 10484 - protein, 6 aa, synthetic construct
PCETHY

SEQ ID NO: 10485 - protein, 6 aa, synthetic construct
PCETID

SEQ ID NO: 10486 - protein, 6 aa, synthetic construct
PCETIE

SEQ ID NO: 10487 - protein, 6 aa, synthetic construct
PCETIF

SEQ ID NO: 10488 - protein, 6 aa, synthetic construct
PCETIW

SEQ ID NO: 10489 - protein, 6 aa, synthetic construct
PCETIY

SEQ ID NO: 10490 - protein, 6 aa, synthetic construct
PCETLD

SEQ ID NO: 10491 - protein, 6 aa, synthetic construct
PCETLE

SEQ ID NO: 10492 - protein, 6 aa, synthetic construct
PCETLF

SEQ ID NO: 10493 - protein, 6 aa, synthetic construct
PCETLW

SEQ ID NO: 10494 - protein, 6 aa, synthetic construct
PCETLY

SEQ ID NO: 10495 - protein, 6 aa, synthetic construct
PCETKD

SEQ ID NO: 10496 - protein, 6 aa, synthetic construct
PCETKE

SEQ ID NO: 10497 - protein, 6 aa, synthetic construct
PCETKF

SEQ ID NO: 10498 - protein, 6 aa, synthetic construct
PCETKW

SEQ ID NO: 10499 - protein, 6 aa, synthetic construct
PCETKY

SEQ ID NO: 10500 - protein, 6 aa, synthetic construct
PCETMD

SEQ ID NO: 10501 - protein, 6 aa, synthetic construct
PCETME

SEQ ID NO: 10502 - protein, 6 aa, synthetic construct
PCETMF

SEQ ID NO: 10503 - protein, 6 aa, synthetic construct
PCETMW

SEQ ID NO: 10504 - protein, 6 aa, synthetic construct
PCETMY

SEQ ID NO: 10505 - protein, 6 aa, synthetic construct
PCETFD

SEQ ID NO: 10506 - protein, 6 aa, synthetic construct
PCETFE

SEQ ID NO: 10507 - protein, 6 aa, synthetic construct
PCETFF

SEQ ID NO: 10508 - protein, 6 aa, synthetic construct
PCETFW

SEQ ID NO: 10509 - protein, 6 aa, synthetic construct
PCETFY

SEQ ID NO: 10510 - protein, 6 aa, synthetic construct
PCETPD

SEQ ID NO: 10511 - protein, 6 aa, synthetic construct
PCETPE

SEQ ID NO: 10512 - protein, 6 aa, synthetic construct
PCETPF

SEQ ID NO: 10513 - protein, 6 aa, synthetic construct
PCETPW

SEQ ID NO: 10514 - protein, 6 aa, synthetic construct
PCETPY

SEQ ID NO: 10515 - protein, 6 aa, synthetic construct
PCETSD

SEQ ID NO: 10516 - protein, 6 aa, synthetic construct
PCETSE

SEQ ID NO: 10517 - protein, 6 aa, synthetic construct
PCETSF

SEQ ID NO: 10518 - protein, 6 aa, synthetic construct
PCETSW

SEQ ID NO: 10519 - protein, 6 aa, synthetic construct
PCETSY

SEQ ID NO: 10520 - protein, 6 aa, synthetic construct
PCETTD

SEQ ID NO: 10521 - protein, 6 aa, synthetic construct
PCETTE

SEQ ID NO: 10522 - protein, 6 aa, synthetic construct
PCETTF

SEQ ID NO: 10523 - protein, 6 aa, synthetic construct
PCETTW

SEQ ID NO: 10524 - protein, 6 aa, synthetic construct
PCETTY

SEQ ID NO: 10525 - protein, 6 aa, synthetic construct
PCETWD

SEQ ID NO: 10526 - protein, 6 aa, synthetic construct
PCETWE

SEQ ID NO: 10527 - protein, 6 aa, synthetic construct
PCETWF

SEQ ID NO: 10528 - protein, 6 aa, synthetic construct
PCETWW

SEQ ID NO: 10529 - protein, 6 aa, synthetic construct
PCETWY

SEQ ID NO: 10530 - protein, 6 aa, synthetic construct
PCETYD

SEQ ID NO: 10531 - protein, 6 aa, synthetic construct
PCETYE

SEQ ID NO: 10532 - protein, 6 aa, synthetic construct
PCETYF

SEQ ID NO: 10533 - protein, 6 aa, synthetic construct
PCETYW

SEQ ID NO: 10534 - protein, 6 aa, synthetic construct
PCETYY

SEQ ID NO: 10535 - protein, 6 aa, synthetic construct
PCETVD

SEQ ID NO: 10536 - protein, 6 aa, synthetic construct
PCETVE

SEQ ID NO: 10537 - protein, 6 aa, synthetic construct
PCETVF

SEQ ID NO: 10538 - protein, 6 aa, synthetic construct
PCETVW

SEQ ID NO: 10539 - protein, 6 aa, synthetic construct
PCETVY

SEQ ID NO: 10540 - protein, 6 aa, synthetic construct
PCEWAD

SEQ ID NO: 10541 - protein, 6 aa, synthetic construct
PCEWAE

SEQ ID NO: 10542 - protein, 6 aa, synthetic construct
PCEWAF

SEQ ID NO: 10543 - protein, 6 aa, synthetic construct
PCEWAW

SEQ ID NO: 10544 - protein, 6 aa, synthetic construct
PCEWAY

SEQ ID NO: 10545 - protein, 6 aa, synthetic construct
PCEWRD

SEQ ID NO: 10546 - protein, 6 aa, synthetic construct
PCEWRE

SEQ ID NO: 10547 - protein, 6 aa, synthetic construct
PCEWRF

SEQ ID NO: 10548 - protein, 6 aa, synthetic construct
PCEWRW

SEQ ID NO: 10549 - protein, 6 aa, synthetic construct
PCEWRY

SEQ ID NO: 10550 - protein, 6 aa, synthetic construct
PCEWND

SEQ ID NO: 10551 - protein, 6 aa, synthetic construct
PCEWNE

SEQ ID NO: 10552 - protein, 6 aa, synthetic construct
PCEWNF

SEQ ID NO: 10553 - protein, 6 aa, synthetic construct
PCEWNW

SEQ ID NO: 10554 - protein, 6 aa, synthetic construct
PCEWNY

SEQ ID NO: 10555 - protein, 6 aa, synthetic construct
PCEWDD

SEQ ID NO: 10556 - protein, 6 aa, synthetic construct
PCEWDE

SEQ ID NO: 10557 - protein, 6 aa, synthetic construct
PCEWDF

SEQ ID NO: 10558 - protein, 6 aa, synthetic construct
PCEWDW

SEQ ID NO: 10559 - protein, 6 aa, synthetic construct
PCEWDY

SEQ ID NO: 10560 - protein, 6 aa, synthetic construct
PCEWCD

SEQ ID NO: 10561 - protein, 6 aa, synthetic construct
PCEWCE

SEQ ID NO: 10562 - protein, 6 aa, synthetic construct
PCEWCF

SEQ ID NO: 10563 - protein, 6 aa, synthetic construct
PCEWCW

SEQ ID NO: 10564 - protein, 6 aa, synthetic construct
PCEWCY

SEQ ID NO: 10565 - protein, 6 aa, synthetic construct
PCEWQD

SEQ ID NO: 10566 - protein, 6 aa, synthetic construct
PCEWQE

SEQ ID NO: 10567 - protein, 6 aa, synthetic construct
PCEWQF

SEQ ID NO: 10568 - protein, 6 aa, synthetic construct
PCEWQW

SEQ ID NO: 10569 - protein, 6 aa, synthetic construct
PCEWQY

SEQ ID NO: 10570 - protein, 6 aa, synthetic construct
PCEWED

SEQ ID NO: 10571 - protein, 6 aa, synthetic construct
PCEWEE

SEQ ID NO: 10572 - protein, 6 aa, synthetic construct
PCEWEF

SEQ ID NO: 10573 - protein, 6 aa, synthetic construct
PCEWEW

SEQ ID NO: 10574 - protein, 6 aa, synthetic construct
PCEWEY

SEQ ID NO: 10575 - protein, 6 aa, synthetic construct
PCEWGD

SEQ ID NO: 10576 - protein, 6 aa, synthetic construct
PCEWGE

SEQ ID NO: 10577 - protein, 6 aa, synthetic construct
PCEWGF

SEQ ID NO: 10578 - protein, 6 aa, synthetic construct
PCEWGW

SEQ ID NO: 10579 - protein, 6 aa, synthetic construct
PCEWGY

SEQ ID NO: 10580 - protein, 6 aa, synthetic construct
PCEWHD

SEQ ID NO: 10581 - protein, 6 aa, synthetic construct
PCEWHE

SEQ ID NO: 10582 - protein, 6 aa, synthetic construct
PCEWHF

SEQ ID NO: 10583 - protein, 6 aa, synthetic construct
PCEWHW

SEQ ID NO: 10584 - protein, 6 aa, synthetic construct
PCEWHY

SEQ ID NO: 10585 - protein, 6 aa, synthetic construct
PCEWID

SEQ ID NO: 10586 - protein, 6 aa, synthetic construct
PCEWIE

SEQ ID NO: 10587 - protein, 6 aa, synthetic construct
PCEWIF

SEQ ID NO: 10588 - protein, 6 aa, synthetic construct
PCEWIW

SEQ ID NO: 10589 - protein, 6 aa, synthetic construct
PCEWIY

SEQ ID NO: 10590 - protein, 6 aa, synthetic construct
PCEWLD

SEQ ID NO: 10591 - protein, 6 aa, synthetic construct
PCEWLE

SEQ ID NO: 10592 - protein, 6 aa, synthetic construct
PCEWLF

SEQ ID NO: 10593 - protein, 6 aa, synthetic construct
PCEWLW

SEQ ID NO: 10594 - protein, 6 aa, synthetic construct
PCEWLY

SEQ ID NO: 10595 - protein, 6 aa, synthetic construct
PCEWKD

SEQ ID NO: 10596 - protein, 6 aa, synthetic construct
PCEWKE

SEQ ID NO: 10597 - protein, 6 aa, synthetic construct
PCEWKF

SEQ ID NO: 10598 - protein, 6 aa, synthetic construct
PCEWKW

SEQ ID NO: 10599 - protein, 6 aa, synthetic construct
PCEWKY

SEQ ID NO: 10600 - protein, 6 aa, synthetic construct
PCEWMD

SEQ ID NO: 10601 - protein, 6 aa, synthetic construct
PCEWME

SEQ ID NO: 10602 - protein, 6 aa, synthetic construct
PCEWMF

SEQ ID NO: 10603 - protein, 6 aa, synthetic construct
PCEWMW

SEQ ID NO: 10604 - protein, 6 aa, synthetic construct
PCEWMY

SEQ ID NO: 10605 - protein, 6 aa, synthetic construct
PCEWFD

SEQ ID NO: 10606 - protein, 6 aa, synthetic construct
PCEWFE

SEQ ID NO: 10607 - protein, 6 aa, synthetic construct
PCEWFF

SEQ ID NO: 10608 - protein, 6 aa, synthetic construct
PCEWFW

SEQ ID NO: 10609 - protein, 6 aa, synthetic construct
PCEWFY

SEQ ID NO: 10610 - protein, 6 aa, synthetic construct
PCEWPD

SEQ ID NO: 10611 - protein, 6 aa, synthetic construct
PCEWPE

SEQ ID NO: 10612 - protein, 6 aa, synthetic construct
PCEWPF

SEQ ID NO: 10613 - protein, 6 aa, synthetic construct
PCEWPW

SEQ ID NO: 10614 - protein, 6 aa, synthetic construct
PCEWPY

SEQ ID NO: 10615 - protein, 6 aa, synthetic construct
PCEWSD

SEQ ID NO: 10616 - protein, 6 aa, synthetic construct
PCEWSE

SEQ ID NO: 10617 - protein, 6 aa, synthetic construct
PCEWSF

SEQ ID NO: 10618 - protein, 6 aa, synthetic construct
PCEWSW

SEQ ID NO: 10619 - protein, 6 aa, synthetic construct
PCEWSY

SEQ ID NO: 10620 - protein, 6 aa, synthetic construct
PCEWTD

SEQ ID NO: 10621 - protein, 6 aa, synthetic construct
PCEWTE

SEQ ID NO: 10622 - protein, 6 aa, synthetic construct
PCEWTF

SEQ ID NO: 10623 - protein, 6 aa, synthetic construct
PCEWTW

SEQ ID NO: 10624 - protein, 6 aa, synthetic construct
PCEWTY

SEQ ID NO: 10625 - protein, 6 aa, synthetic construct
PCEWWD

SEQ ID NO: 10626 - protein, 6 aa, synthetic construct
PCEWWE

SEQ ID NO: 10627 - protein, 6 aa, synthetic construct
PCEWWF

SEQ ID NO: 10628 - protein, 6 aa, synthetic construct
PCEWWW

SEQ ID NO: 10629 - protein, 6 aa, synthetic construct
PCEWWY

SEQ ID NO: 10630 - protein, 6 aa, synthetic construct
PCEWYD

SEQ ID NO: 10631 - protein, 6 aa, synthetic construct
PCEWYE

SEQ ID NO: 10632 - protein, 6 aa, synthetic construct
PCEWYF

SEQ ID NO: 10633 - protein, 6 aa, synthetic construct
PCEWYW

SEQ ID NO: 10634 - protein, 6 aa, synthetic construct
PCEWYY

SEQ ID NO: 10635 - protein, 6 aa, synthetic construct
PCEWVD

SEQ ID NO: 10636 - protein, 6 aa, synthetic construct
PCEWVE

SEQ ID NO: 10637 - protein, 6 aa, synthetic construct
PCEWVF

SEQ ID NO: 10638 - protein, 6 aa, synthetic construct
PCEWVW

SEQ ID NO: 10639 - protein, 6 aa, synthetic construct
PCEWVY

SEQ ID NO: 10640 - protein, 6 aa, synthetic construct
PCEYAD

SEQ ID NO: 10641 - protein, 6 aa, synthetic construct
PCEYAE

SEQ ID NO: 10642 - protein, 6 aa, synthetic construct
PCEYAF

SEQ ID NO: 10643 - protein, 6 aa, synthetic construct
PCEYAW

SEQ ID NO: 10644 - protein, 6 aa, synthetic construct
PCEYAY

SEQ ID NO: 10645 - protein, 6 aa, synthetic construct
PCEYRD

SEQ ID NO: 10646 - protein, 6 aa, synthetic construct
PCEYRE

SEQ ID NO: 10647 - protein, 6 aa, synthetic construct
PCEYRF

SEQ ID NO: 10648 - protein, 6 aa, synthetic construct
PCEYRW

SEQ ID NO: 10649 - protein, 6 aa, synthetic construct
PCEYRY

SEQ ID NO: 10650 - protein, 6 aa, synthetic construct
PCEYND

SEQ ID NO: 10651 - protein, 6 aa, synthetic construct
PCEYNE

SEQ ID NO: 10652 - protein, 6 aa, synthetic construct
PCEYNF

SEQ ID NO: 10653 - protein, 6 aa, synthetic construct
PCEYNW

SEQ ID NO: 10654 - protein, 6 aa, synthetic construct
PCEYNY

SEQ ID NO: 10655 - protein, 6 aa, synthetic construct
PCEYDD

SEQ ID NO: 10656 - protein, 6 aa, synthetic construct
PCEYDE

SEQ ID NO: 10657 - protein, 6 aa, synthetic construct
PCEYDF

SEQ ID NO: 10658 - protein, 6 aa, synthetic construct
PCEYDW

SEQ ID NO: 10659 - protein, 6 aa, synthetic construct
PCEYDY

SEQ ID NO: 10660 - protein, 6 aa, synthetic construct
PCEYCD

SEQ ID NO: 10661 - protein, 6 aa, synthetic construct
PCEYCE

SEQ ID NO: 10662 - protein, 6 aa, synthetic construct
PCEYCF

SEQ ID NO: 10663 - protein, 6 aa, synthetic construct
PCEYCW

SEQ ID NO: 10664 - protein, 6 aa, synthetic construct
PCEYCY

SEQ ID NO: 10665 - protein, 6 aa, synthetic construct
PCEYQD

SEQ ID NO: 10666 - protein, 6 aa, synthetic construct
PCEYQE

SEQ ID NO: 10667 - protein, 6 aa, synthetic construct
PCEYQF

SEQ ID NO: 10668 - protein, 6 aa, synthetic construct
PCEYQW

SEQ ID NO: 10669 - protein, 6 aa, synthetic construct
PCEYQY

SEQ ID NO: 10670 - protein, 6 aa, synthetic construct
PCEYED

SEQ ID NO: 10671 - protein, 6 aa, synthetic construct
PCEYEE

SEQ ID NO: 10672 - protein, 6 aa, synthetic construct
PCEYEF

SEQ ID NO: 10673 - protein, 6 aa, synthetic construct
PCEYEW

SEQ ID NO: 10674 - protein, 6 aa, synthetic construct
PCEYEY

SEQ ID NO: 10675 - protein, 6 aa, synthetic construct
PCEYGD

SEQ ID NO: 10676 - protein, 6 aa, synthetic construct
PCEYGE

SEQ ID NO: 10677 - protein, 6 aa, synthetic construct
PCEYGF

SEQ ID NO: 10678 - protein, 6 aa, synthetic construct
PCEYGW

SEQ ID NO: 10679 - protein, 6 aa, synthetic construct
PCEYGY

SEQ ID NO: 10680 - protein, 6 aa, synthetic construct
PCEYHD

SEQ ID NO: 10681 - protein, 6 aa, synthetic construct
PCEYHE

SEQ ID NO: 10682 - protein, 6 aa, synthetic construct
PCEYHF

SEQ ID NO: 10683 - protein, 6 aa, synthetic construct
PCEYHW

SEQ ID NO: 10684 - protein, 6 aa, synthetic construct
PCEYHY

SEQ ID NO: 10685 - protein, 6 aa, synthetic construct
PCEYID

SEQ ID NO: 10686 - protein, 6 aa, synthetic construct
PCEYIE

SEQ ID NO: 10687 - protein, 6 aa, synthetic construct
PCEYIF

SEQ ID NO: 10688 - protein, 6 aa, synthetic construct
PCEYIW

SEQ ID NO: 10689 - protein, 6 aa, synthetic construct
PCEYIY

SEQ ID NO: 10690 - protein, 6 aa, synthetic construct
PCEYLD

SEQ ID NO: 10691 - protein, 6 aa, synthetic construct
PCEYLE

SEQ ID NO: 10692 - protein, 6 aa, synthetic construct
PCEYLF

SEQ ID NO: 10693 - protein, 6 aa, synthetic construct
PCEYLW

SEQ ID NO: 10694 - protein, 6 aa, synthetic construct
PCEYLY

SEQ ID NO: 10695 - protein, 6 aa, synthetic construct
PCEYKD

SEQ ID NO: 10696 - protein, 6 aa, synthetic construct
PCEYKE

SEQ ID NO: 10697 - protein, 6 aa, synthetic construct
PCEYKF

SEQ ID NO: 10698 - protein, 6 aa, synthetic construct
PCEYKW

SEQ ID NO: 10699 - protein, 6 aa, synthetic construct
PCEYKY

SEQ ID NO: 10700 - protein, 6 aa, synthetic construct
PCEYMD

SEQ ID NO: 10701 - protein, 6 aa, synthetic construct
PCEYME

SEQ ID NO: 10702 - protein, 6 aa, synthetic construct
PCEYMF

SEQ ID NO: 10703 - protein, 6 aa, synthetic construct
PCEYMW

SEQ ID NO: 10704 - protein, 6 aa, synthetic construct
PCEYMY

SEQ ID NO: 10705 - protein, 6 aa, synthetic construct
PCEYFD

SEQ ID NO: 10706 - protein, 6 aa, synthetic construct
PCEYFE

SEQ ID NO: 10707 - protein, 6 aa, synthetic construct
PCEYFF

SEQ ID NO: 10708 - protein, 6 aa, synthetic construct
PCEYFW

SEQ ID NO: 10709 - protein, 6 aa, synthetic construct
PCEYFY

SEQ ID NO: 10710 - protein, 6 aa, synthetic construct
PCEYPD

SEQ ID NO: 10711 - protein, 6 aa, synthetic construct
PCEYPE

SEQ ID NO: 10712 - protein, 6 aa, synthetic construct
PCEYPF

SEQ ID NO: 10713 - protein, 6 aa, synthetic construct
PCEYPW

SEQ ID NO: 10714 - protein, 6 aa, synthetic construct
PCEYPY

SEQ ID NO: 10715 - protein, 6 aa, synthetic construct
PCEYSD

SEQ ID NO: 10716 - protein, 6 aa, synthetic construct
PCEYSE

SEQ ID NO: 10717 - protein, 6 aa, synthetic construct
PCEYSF

SEQ ID NO: 10718 - protein, 6 aa, synthetic construct
PCEYSW

SEQ ID NO: 10719 - protein, 6 aa, synthetic construct
PCEYSY

SEQ ID NO: 10720 - protein, 6 aa, synthetic construct
PCEYTD

SEQ ID NO: 10721 - protein, 6 aa, synthetic construct
PCEYTE

SEQ ID NO: 10722 - protein, 6 aa, synthetic construct
PCEYTF

SEQ ID NO: 10723 - protein, 6 aa, synthetic construct
PCEYTW

SEQ ID NO: 10724 - protein, 6 aa, synthetic construct
PCEYTY

SEQ ID NO: 10725 - protein, 6 aa, synthetic construct
PCEYWD

SEQ ID NO: 10726 - protein, 6 aa, synthetic construct
PCEYWE

SEQ ID NO: 10727 - protein, 6 aa, synthetic construct
PCEYWF

SEQ ID NO: 10728 - protein, 6 aa, synthetic construct
PCEYWW

SEQ ID NO: 10729 - protein, 6 aa, synthetic construct
PCEYWY

SEQ ID NO: 10730 - protein, 6 aa, synthetic construct
PCEYYD

SEQ ID NO: 10731 - protein, 6 aa, synthetic construct
PCEYYE

SEQ ID NO: 10732 - protein, 6 aa, synthetic construct
PCEYYF

SEQ ID NO: 10733 - protein, 6 aa, synthetic construct
PCEYYW

SEQ ID NO: 10734 - protein, 6 aa, synthetic construct
PCEYYY

SEQ ID NO: 10735 - protein, 6 aa, synthetic construct
PCEYVD

SEQ ID NO: 10736 - protein, 6 aa, synthetic construct
PCEYVE

SEQ ID NO: 10737 - protein, 6 aa, synthetic construct
PCEYVF

SEQ ID NO: 10738 - protein, 6 aa, synthetic construct
PCEYVW

SEQ ID NO: 10739 - protein, 6 aa, synthetic construct
PCEYVY

SEQ ID NO: 10740 - protein, 6 aa, synthetic construct
PCEVAD

SEQ ID NO: 10741 - protein, 6 aa, synthetic construct
PCEVAE

SEQ ID NO: 10742 - protein, 6 aa, synthetic construct
PCEVAF

SEQ ID NO: 10743 - protein, 6 aa, synthetic construct
PCEVAW

SEQ ID NO: 10744 - protein, 6 aa, synthetic construct
PCEVAY

SEQ ID NO: 10745 - protein, 6 aa, synthetic construct
PCEVRD

SEQ ID NO: 10746 - protein, 6 aa, synthetic construct
PCEVRE

SEQ ID NO: 10747 - protein, 6 aa, synthetic construct
PCEVRF

SEQ ID NO: 10748 - protein, 6 aa, synthetic construct
PCEVRW

SEQ ID NO: 10749 - protein, 6 aa, synthetic construct
PCEVRY

SEQ ID NO: 10750 - protein, 6 aa, synthetic construct
PCEVND

SEQ ID NO: 10751 - protein, 6 aa, synthetic construct
PCEVNE

SEQ ID NO: 10752 - protein, 6 aa, synthetic construct
PCEVNF

SEQ ID NO: 10753 - protein, 6 aa, synthetic construct
PCEVNW

SEQ ID NO: 10754 - protein, 6 aa, synthetic construct
PCEVNY

SEQ ID NO: 10755 - protein, 6 aa, synthetic construct
PCEVDD

SEQ ID NO: 10756 - protein, 6 aa, synthetic construct
PCEVDE

SEQ ID NO: 10757 - protein, 6 aa, synthetic construct
PCEVDF

SEQ ID NO: 10758 - protein, 6 aa, synthetic construct
PCEVDW

SEQ ID NO: 10759 - protein, 6 aa, synthetic construct
PCEVDY

SEQ ID NO: 10760 - protein, 6 aa, synthetic construct
PCEVCD

SEQ ID NO: 10761 - protein, 6 aa, synthetic construct
PCEVCE

SEQ ID NO: 10762 - protein, 6 aa, synthetic construct
PCEVCF

SEQ ID NO: 10763 - protein, 6 aa, synthetic construct
PCEVCW

SEQ ID NO: 10764 - protein, 6 aa, synthetic construct
PCEVCY

SEQ ID NO: 10765 - protein, 6 aa, synthetic construct
PCEVQD

SEQ ID NO: 10766 - protein, 6 aa, synthetic construct
PCEVQE

SEQ ID NO: 10767 - protein, 6 aa, synthetic construct
PCEVQF

SEQ ID NO: 10768 - protein, 6 aa, synthetic construct
PCEVQW

SEQ ID NO: 10769 - protein, 6 aa, synthetic construct
PCEVQY

SEQ ID NO: 10770 - protein, 6 aa, synthetic construct
PCEVED

SEQ ID NO: 10771 - protein, 6 aa, synthetic construct
PCEVEE

SEQ ID NO: 10772 - protein, 6 aa, synthetic construct
PCEVEF

SEQ ID NO: 10773 - protein, 6 aa, synthetic construct
PCEVEW

SEQ ID NO: 10774 - protein, 6 aa, synthetic construct
PCEVEY

SEQ ID NO: 10775 - protein, 6 aa, synthetic construct
PCEVGD

SEQ ID NO: 10776 - protein, 6 aa, synthetic construct
PCEVGE

SEQ ID NO: 10777 - protein, 6 aa, synthetic construct
PCEVGF

SEQ ID NO: 10778 - protein, 6 aa, synthetic construct
PCEVGW

SEQ ID NO: 10779 - protein, 6 aa, synthetic construct
PCEVGY

SEQ ID NO: 10780 - protein, 6 aa, synthetic construct
PCEVHD

SEQ ID NO: 10781 - protein, 6 aa, synthetic construct
PCEVHE

SEQ ID NO: 10782 - protein, 6 aa, synthetic construct
PCEVHF

SEQ ID NO: 10783 - protein, 6 aa, synthetic construct
PCEVHW

SEQ ID NO: 10784 - protein, 6 aa, synthetic construct
PCEVHY

SEQ ID NO: 10785 - protein, 6 aa, synthetic construct
PCEVID

SEQ ID NO: 10786 - protein, 6 aa, synthetic construct
PCEVIE

SEQ ID NO: 10787 - protein, 6 aa, synthetic construct
PCEVIF

SEQ ID NO: 10788 - protein, 6 aa, synthetic construct
PCEVIW

SEQ ID NO: 10789 - protein, 6 aa, synthetic construct
PCEVIY

SEQ ID NO: 10790 - protein, 6 aa, synthetic construct
PCEVLD

SEQ ID NO: 10791 - protein, 6 aa, synthetic construct
PCEVLE

SEQ ID NO: 10792 - protein, 6 aa, synthetic construct
PCEVLF

SEQ ID NO: 10793 - protein, 6 aa, synthetic construct
PCEVLW

SEQ ID NO: 10794 - protein, 6 aa, synthetic construct
PCEVLY

SEQ ID NO: 10795 - protein, 6 aa, synthetic construct
PCEVKD

SEQ ID NO: 10796 - protein, 6 aa, synthetic construct
PCEVKE

SEQ ID NO: 10797 - protein, 6 aa, synthetic construct
PCEVKF

SEQ ID NO: 10798 - protein, 6 aa, synthetic construct
PCEVKW

SEQ ID NO: 10799 - protein, 6 aa, synthetic construct
PCEVKY

SEQ ID NO: 10800 - protein, 6 aa, synthetic construct
PCEVMD

SEQ ID NO: 10801 - protein, 6 aa, synthetic construct
PCEVME

SEQ ID NO: 10802 - protein, 6 aa, synthetic construct
PCEVMF

SEQ ID NO: 10803 - protein, 6 aa, synthetic construct
PCEVMW

SEQ ID NO: 10804 - protein, 6 aa, synthetic construct
PCEVMY

SEQ ID NO: 10805 - protein, 6 aa, synthetic construct
PCEVFD

SEQ ID NO: 10806 - protein, 6 aa, synthetic construct
PCEVFE

SEQ ID NO: 10807 - protein, 6 aa, synthetic construct
PCEVFF

SEQ ID NO: 10808 - protein, 6 aa, synthetic construct
PCEVFW

SEQ ID NO: 10809 - protein, 6 aa, synthetic construct
PCEVFY

SEQ ID NO: 10810 - protein, 6 aa, synthetic construct
PCEVPD

SEQ ID NO: 10811 - protein, 6 aa, synthetic construct
PCEVPE

SEQ ID NO: 10812 - protein, 6 aa, synthetic construct
PCEVPF

SEQ ID NO: 10813 - protein, 6 aa, synthetic construct
PCEVPW

SEQ ID NO: 10814 - protein, 6 aa, synthetic construct
PCEVPY

SEQ ID NO: 10815 - protein, 6 aa, synthetic construct
PCEVSD

SEQ ID NO: 10816 - protein, 6 aa, synthetic construct
PCEVSE

SEQ ID NO: 10817 - protein, 6 aa, synthetic construct
PCEVSF

SEQ ID NO: 10818 - protein, 6 aa, synthetic construct
PCEVSW

SEQ ID NO: 10819 - protein, 6 aa, synthetic construct
PCEVSY

SEQ ID NO: 10820 - protein, 6 aa, synthetic construct
PCEVTD

SEQ ID NO: 10821 - protein, 6 aa, synthetic construct
PCEVTE

SEQ ID NO: 10822 - protein, 6 aa, synthetic construct
PCEVTF

SEQ ID NO: 10823 - protein, 6 aa, synthetic construct
PCEVTW

SEQ ID NO: 10824 - protein, 6 aa, synthetic construct
PCEVTY

SEQ ID NO: 10825 - protein, 6 aa, synthetic construct
PCEVWD

SEQ ID NO: 10826 - protein, 6 aa, synthetic construct
PCEVWE

SEQ ID NO: 10827 - protein, 6 aa, synthetic construct
PCEVWF

SEQ ID NO: 10828 - protein, 6 aa, synthetic construct
PCEVWW

SEQ ID NO: 10829 - protein, 6 aa, synthetic construct
PCEVWY

SEQ ID NO: 10830 - protein, 6 aa, synthetic construct
PCEVYD

SEQ ID NO: 10831 - protein, 6 aa, synthetic construct
PCEVYE

SEQ ID NO: 10832 - protein, 6 aa, synthetic construct
PCEVYF

SEQ ID NO: 10833 - protein, 6 aa, synthetic construct
PCEVYW

SEQ ID NO: 10834 - protein, 6 aa, synthetic construct
PCEVYY

SEQ ID NO: 10835 - protein, 6 aa, synthetic construct
PCEVVD

SEQ ID NO: 10836 - protein, 6 aa, synthetic construct
PCEVVE

SEQ ID NO: 10837 - protein, 6 aa, synthetic construct
PCEVVF

SEQ ID NO: 10838 - protein, 6 aa, synthetic construct
PCEVVW

SEQ ID NO: 10839 - protein, 6 aa, synthetic construct
PCEVVY

SEQ ID NO: 10840 - protein, 6 aa, synthetic construct
PQEAAD

SEQ ID NO: 10841 - protein, 6 aa, synthetic construct
PQEAAE

SEQ ID NO: 10842 - protein, 6 aa, synthetic construct
PQEAAF

SEQ ID NO: 10843 - protein, 6 aa, synthetic construct
PQEAAW

SEQ ID NO: 10844 - protein, 6 aa, synthetic construct
PQEAAY

SEQ ID NO: 10845 - protein, 6 aa, synthetic construct
PQEARD

SEQ ID NO: 10846 - protein, 6 aa, synthetic construct
PQEARE

SEQ ID NO: 10847 - protein, 6 aa, synthetic construct
PQEARF

SEQ ID NO: 10848 - protein, 6 aa, synthetic construct
PQEARW

SEQ ID NO: 10849 - protein, 6 aa, synthetic construct
PQEARY

SEQ ID NO: 10850 - protein, 6 aa, synthetic construct
PQEAND

SEQ ID NO: 10851 - protein, 6 aa, synthetic construct
PQEANE

SEQ ID NO: 10852 - protein, 6 aa, synthetic construct
PQEANF

SEQ ID NO: 10853 - protein, 6 aa, synthetic construct
PQEANW

SEQ ID NO: 10854 - protein, 6 aa, synthetic construct
PQEANY

SEQ ID NO: 10855 - protein, 6 aa, synthetic construct
PQEADD

SEQ ID NO: 10856 - protein, 6 aa, synthetic construct
PQEADE

SEQ ID NO: 10857 - protein, 6 aa, synthetic construct
PQEADF

SEQ ID NO: 10858 - protein, 6 aa, synthetic construct
PQEADW

SEQ ID NO: 10859 - protein, 6 aa, synthetic construct
PQEADY

SEQ ID NO: 10860 - protein, 6 aa, synthetic construct
PQEACD

SEQ ID NO: 10861 - protein, 6 aa, synthetic construct
PQEACE

SEQ ID NO: 10862 - protein, 6 aa, synthetic construct
PQEACF

SEQ ID NO: 10863 - protein, 6 aa, synthetic construct
PQEACW

SEQ ID NO: 10864 - protein, 6 aa, synthetic construct
PQEACY

SEQ ID NO: 10865 - protein, 6 aa, synthetic construct
PQEAQD

SEQ ID NO: 10866 - protein, 6 aa, synthetic construct
PQEAQE

SEQ ID NO: 10867 - protein, 6 aa, synthetic construct
PQEAQF

SEQ ID NO: 10868 - protein, 6 aa, synthetic construct
PQEAQW

SEQ ID NO: 10869 - protein, 6 aa, synthetic construct
PQEAQY

SEQ ID NO: 10870 - protein, 6 aa, synthetic construct
PQEAED

SEQ ID NO: 10871 - protein, 6 aa, synthetic construct
PQEAEE

SEQ ID NO: 10872 - protein, 6 aa, synthetic construct
PQEAEF

SEQ ID NO: 10873 - protein, 6 aa, synthetic construct
PQEAEW

SEQ ID NO: 10874 - protein, 6 aa, synthetic construct
PQEAEY

SEQ ID NO: 10875 - protein, 6 aa, synthetic construct
PQEAGD

SEQ ID NO: 10876 - protein, 6 aa, synthetic construct
PQEAGE

SEQ ID NO: 10877 - protein, 6 aa, synthetic construct
PQEAGF

SEQ ID NO: 10878 - protein, 6 aa, synthetic construct
PQEAGW

SEQ ID NO: 10879 - protein, 6 aa, synthetic construct
PQEAGY

SEQ ID NO: 10880 - protein, 6 aa, synthetic construct
PQEAHD

SEQ ID NO: 10881 - protein, 6 aa, synthetic construct
PQEAHE

SEQ ID NO: 10882 - protein, 6 aa, synthetic construct
PQEAHF

SEQ ID NO: 10883 - protein, 6 aa, synthetic construct
PQEAHW

SEQ ID NO: 10884 - protein, 6 aa, synthetic construct
PQEAHY

SEQ ID NO: 10885 - protein, 6 aa, synthetic construct
PQEAID

SEQ ID NO: 10886 - protein, 6 aa, synthetic construct
PQEAIE

SEQ ID NO: 10887 - protein, 6 aa, synthetic construct
PQEAIF

SEQ ID NO: 10888 - protein, 6 aa, synthetic construct
PQEAIW

SEQ ID NO: 10889 - protein, 6 aa, synthetic construct
PQEAIY

SEQ ID NO: 10890 - protein, 6 aa, synthetic construct
PQEALD

SEQ ID NO: 10891 - protein, 6 aa, synthetic construct
PQEALE

SEQ ID NO: 10892 - protein, 6 aa, synthetic construct
PQEALF

SEQ ID NO: 10893 - protein, 6 aa, synthetic construct
PQEALW

SEQ ID NO: 10894 - protein, 6 aa, synthetic construct
PQEALY

SEQ ID NO: 10895 - protein, 6 aa, synthetic construct
PQEAKD

SEQ ID NO: 10896 - protein, 6 aa, synthetic construct
PQEAKE

SEQ ID NO: 10897 - protein, 6 aa, synthetic construct
PQEAKF

SEQ ID NO: 10898 - protein, 6 aa, synthetic construct
PQEAKW

SEQ ID NO: 10899 - protein, 6 aa, synthetic construct
PQEAKY

SEQ ID NO: 10900 - protein, 6 aa, synthetic construct
PQEAMD

SEQ ID NO: 10901 - protein, 6 aa, synthetic construct
PQEAME

SEQ ID NO: 10902 - protein, 6 aa, synthetic construct
PQEAMF

SEQ ID NO: 10903 - protein, 6 aa, synthetic construct
PQEAMW

SEQ ID NO: 10904 - protein, 6 aa, synthetic construct
PQEAMY

SEQ ID NO: 10905 - protein, 6 aa, synthetic construct
PQEAFD

SEQ ID NO: 10906 - protein, 6 aa, synthetic construct
PQEAFE

SEQ ID NO: 10907 - protein, 6 aa, synthetic construct
PQEAFF

SEQ ID NO: 10908 - protein, 6 aa, synthetic construct
PQEAFW

SEQ ID NO: 10909 - protein, 6 aa, synthetic construct
PQEAFY

SEQ ID NO: 10910 - protein, 6 aa, synthetic construct
PQEAPD

SEQ ID NO: 10911 - protein, 6 aa, synthetic construct
PQEAPE

SEQ ID NO: 10912 - protein, 6 aa, synthetic construct
PQEAPF

SEQ ID NO: 10913 - protein, 6 aa, synthetic construct
PQEAPW

SEQ ID NO: 10914 - protein, 6 aa, synthetic construct
PQEAPY

SEQ ID NO: 10915 - protein, 6 aa, synthetic construct
PQEASD

SEQ ID NO: 10916 - protein, 6 aa, synthetic construct
PQEASE

SEQ ID NO: 10917 - protein, 6 aa, synthetic construct
PQEASF

SEQ ID NO: 10918 - protein, 6 aa, synthetic construct
PQEASW

SEQ ID NO: 10919 - protein, 6 aa, synthetic construct
PQEASY

SEQ ID NO: 10920 - protein, 6 aa, synthetic construct
PQEATD

SEQ ID NO: 10921 - protein, 6 aa, synthetic construct
PQEATE

SEQ ID NO: 10922 - protein, 6 aa, synthetic construct
PQEATF

SEQ ID NO: 10923 - protein, 6 aa, synthetic construct
PQEATW

SEQ ID NO: 10924 - protein, 6 aa, synthetic construct
PQEATY

SEQ ID NO: 10925 - protein, 6 aa, synthetic construct
PQEAWD

SEQ ID NO: 10926 - protein, 6 aa, synthetic construct
PQEAWE

SEQ ID NO: 10927 - protein, 6 aa, synthetic construct
PQEAWF

SEQ ID NO: 10928 - protein, 6 aa, synthetic construct
PQEAWW

SEQ ID NO: 10929 - protein, 6 aa, synthetic construct
PQEAWY

SEQ ID NO: 10930 - protein, 6 aa, synthetic construct
PQEAYD

SEQ ID NO: 10931 - protein, 6 aa, synthetic construct
PQEAYE

SEQ ID NO: 10932 - protein, 6 aa, synthetic construct
PQEAYF

SEQ ID NO: 10933 - protein, 6 aa, synthetic construct
PQEAYW

SEQ ID NO: 10934 - protein, 6 aa, synthetic construct
PQEAYY

SEQ ID NO: 10935 - protein, 6 aa, synthetic construct
PQEAVD

SEQ ID NO: 10936 - protein, 6 aa, synthetic construct
PQEAVE

SEQ ID NO: 10937 - protein, 6 aa, synthetic construct
PQEAVF

SEQ ID NO: 10938 - protein, 6 aa, synthetic construct
PQEAVW

SEQ ID NO: 10939 - protein, 6 aa, synthetic construct
PQEAVY

SEQ ID NO: 10940 - protein, 6 aa, synthetic construct
PQERAD

SEQ ID NO: 10941 - protein, 6 aa, synthetic construct
PQERAE

SEQ ID NO: 10942 - protein, 6 aa, synthetic construct
PQERAF

SEQ ID NO: 10943 - protein, 6 aa, synthetic construct
PQERAW

SEQ ID NO: 10944 - protein, 6 aa, synthetic construct
PQERAY

SEQ ID NO: 10945 - protein, 6 aa, synthetic construct
PQERRD

SEQ ID NO: 10946 - protein, 6 aa, synthetic construct
PQERRE

SEQ ID NO: 10947 - protein, 6 aa, synthetic construct
PQERRF

SEQ ID NO: 10948 - protein, 6 aa, synthetic construct
PQERRW

SEQ ID NO: 10949 - protein, 6 aa, synthetic construct
PQERRY

SEQ ID NO: 10950 - protein, 6 aa, synthetic construct
PQERND

SEQ ID NO: 10951 - protein, 6 aa, synthetic construct
PQERNE

SEQ ID NO: 10952 - protein, 6 aa, synthetic construct
PQERNF

SEQ ID NO: 10953 - protein, 6 aa, synthetic construct
PQERNW

SEQ ID NO: 10954 - protein, 6 aa, synthetic construct
PQERNY

SEQ ID NO: 10955 - protein, 6 aa, synthetic construct
PQERDD

SEQ ID NO: 10956 - protein, 6 aa, synthetic construct
PQERDE

SEQ ID NO: 10957 - protein, 6 aa, synthetic construct
PQERDF

SEQ ID NO: 10958 - protein, 6 aa, synthetic construct
PQERDW

SEQ ID NO: 10959 - protein, 6 aa, synthetic construct
PQERDY

SEQ ID NO: 10960 - protein, 6 aa, synthetic construct
PQERCD

SEQ ID NO: 10961 - protein, 6 aa, synthetic construct
PQERCE

SEQ ID NO: 10962 - protein, 6 aa, synthetic construct
PQERCF

SEQ ID NO: 10963 - protein, 6 aa, synthetic construct
PQERCW

SEQ ID NO: 10964 - protein, 6 aa, synthetic construct
PQERCY

SEQ ID NO: 10965 - protein, 6 aa, synthetic construct
PQERQD

SEQ ID NO: 10966 - protein, 6 aa, synthetic construct
PQERQE

SEQ ID NO: 10967 - protein, 6 aa, synthetic construct
PQERQF

SEQ ID NO: 10968 - protein, 6 aa, synthetic construct
PQERQW

SEQ ID NO: 10969 - protein, 6 aa, synthetic construct
PQERQY

SEQ ID NO: 10970 - protein, 6 aa, synthetic construct
PQERED

SEQ ID NO: 10971 - protein, 6 aa, synthetic construct
PQEREE

SEQ ID NO: 10972 - protein, 6 aa, synthetic construct
PQEREF

SEQ ID NO: 10973 - protein, 6 aa, synthetic construct
PQEREW

SEQ ID NO: 10974 - protein, 6 aa, synthetic construct
PQEREY

SEQ ID NO: 10975 - protein, 6 aa, synthetic construct
PQERGD

SEQ ID NO: 10976 - protein, 6 aa, synthetic construct
PQERGE

SEQ ID NO: 10977 - protein, 6 aa, synthetic construct
PQERGF

SEQ ID NO: 10978 - protein, 6 aa, synthetic construct
PQERGW

SEQ ID NO: 10979 - protein, 6 aa, synthetic construct
PQERGY

SEQ ID NO: 10980 - protein, 6 aa, synthetic construct
PQERHD

SEQ ID NO: 10981 - protein, 6 aa, synthetic construct
PQERHE

SEQ ID NO: 10982 - protein, 6 aa, synthetic construct
PQERHF

SEQ ID NO: 10983 - protein, 6 aa, synthetic construct
PQERHW

SEQ ID NO: 10984 - protein, 6 aa, synthetic construct
PQERHY

SEQ ID NO: 10985 - protein, 6 aa, synthetic construct
PQERID

SEQ ID NO: 10986 - protein, 6 aa, synthetic construct
PQERIE

SEQ ID NO: 10987 - protein, 6 aa, synthetic construct
PQERIF

SEQ ID NO: 10988 - protein, 6 aa, synthetic construct
PQERIW

SEQ ID NO: 10989 - protein, 6 aa, synthetic construct
PQERIY

SEQ ID NO: 10990 - protein, 6 aa, synthetic construct
PQERLD

SEQ ID NO: 10991 - protein, 6 aa, synthetic construct
PQERLE

SEQ ID NO: 10992 - protein, 6 aa, synthetic construct
PQERLF

SEQ ID NO: 10993 - protein, 6 aa, synthetic construct
PQERLW

SEQ ID NO: 10994 - protein, 6 aa, synthetic construct
PQERLY

SEQ ID NO: 10995 - protein, 6 aa, synthetic construct
PQERKD

SEQ ID NO: 10996 - protein, 6 aa, synthetic construct
PQERKE

SEQ ID NO: 10997 - protein, 6 aa, synthetic construct
PQERKF

SEQ ID NO: 10998 - protein, 6 aa, synthetic construct
PQERKW

SEQ ID NO: 10999 - protein, 6 aa, synthetic construct
PQERKY

SEQ ID NO: 11000 - protein, 6 aa, synthetic construct
PQERMD

SEQ ID NO: 11001 - protein, 6 aa, synthetic construct
PQERME

SEQ ID NO: 11002 - protein, 6 aa, synthetic construct
PQERMF

SEQ ID NO: 11003 - protein, 6 aa, synthetic construct
PQERMW

SEQ ID NO: 11004 - protein, 6 aa, synthetic construct
PQERMY

SEQ ID NO: 11005 - protein, 6 aa, synthetic construct
PQERFD

SEQ ID NO: 11006 - protein, 6 aa, synthetic construct
PQERFE

SEQ ID NO: 11007 - protein, 6 aa, synthetic construct
PQERFF

SEQ ID NO: 11008 - protein, 6 aa, synthetic construct
PQERFW

SEQ ID NO: 11009 - protein, 6 aa, synthetic construct
PQERFY

SEQ ID NO: 11010 - protein, 6 aa, synthetic construct
PQERPD

SEQ ID NO: 11011 - protein, 6 aa, synthetic construct
PQERPE

SEQ ID NO: 11012 - protein, 6 aa, synthetic construct
PQERPF

SEQ ID NO: 11013 - protein, 6 aa, synthetic construct
PQERPW

SEQ ID NO: 11014 - protein, 6 aa, synthetic construct
PQERPY

SEQ ID NO: 11015 - protein, 6 aa, synthetic construct
PQERSD

SEQ ID NO: 11016 - protein, 6 aa, synthetic construct
PQERSE

SEQ ID NO: 11017 - protein, 6 aa, synthetic construct
PQERSF

SEQ ID NO: 11018 - protein, 6 aa, synthetic construct
PQERSW

SEQ ID NO: 11019 - protein, 6 aa, synthetic construct
PQERSY

SEQ ID NO: 11020 - protein, 6 aa, synthetic construct
PQERTD

SEQ ID NO: 11021 - protein, 6 aa, synthetic construct
PQERTE

SEQ ID NO: 11022 - protein, 6 aa, synthetic construct
PQERTF

SEQ ID NO: 11023 - protein, 6 aa, synthetic construct
PQERTW

SEQ ID NO: 11024 - protein, 6 aa, synthetic construct
PQERTY

SEQ ID NO: 11025 - protein, 6 aa, synthetic construct
PQERWD

SEQ ID NO: 11026 - protein, 6 aa, synthetic construct
PQERWE

SEQ ID NO: 11027 - protein, 6 aa, synthetic construct
PQERWF

SEQ ID NO: 11028 - protein, 6 aa, synthetic construct
PQERWW

SEQ ID NO: 11029 - protein, 6 aa, synthetic construct
PQERWY

SEQ ID NO: 11030 - protein, 6 aa, synthetic construct
PQERYD

SEQ ID NO: 11031 - protein, 6 aa, synthetic construct
PQERYE

SEQ ID NO: 11032 - protein, 6 aa, synthetic construct
PQERYF

SEQ ID NO: 11033 - protein, 6 aa, synthetic construct
PQERYW

SEQ ID NO: 11034 - protein, 6 aa, synthetic construct
PQERYY

SEQ ID NO: 11035 - protein, 6 aa, synthetic construct
PQERVD

SEQ ID NO: 11036 - protein, 6 aa, synthetic construct
PQERVE

SEQ ID NO: 11037 - protein, 6 aa, synthetic construct
PQERVF

SEQ ID NO: 11038 - protein, 6 aa, synthetic construct
PQERVW

SEQ ID NO: 11039 - protein, 6 aa, synthetic construct
PQERVY

SEQ ID NO: 11040 - protein, 6 aa, synthetic construct
PQENAD

SEQ ID NO: 11041 - protein, 6 aa, synthetic construct
PQENAE

SEQ ID NO: 11042 - protein, 6 aa, synthetic construct
PQENAF

SEQ ID NO: 11043 - protein, 6 aa, synthetic construct
PQENAW

SEQ ID NO: 11044 - protein, 6 aa, synthetic construct
PQENAY

SEQ ID NO: 11045 - protein, 6 aa, synthetic construct
PQENRD

SEQ ID NO: 11046 - protein, 6 aa, synthetic construct
PQENRE

SEQ ID NO: 11047 - protein, 6 aa, synthetic construct
PQENRF

SEQ ID NO: 11048 - protein, 6 aa, synthetic construct
PQENRW

SEQ ID NO: 11049 - protein, 6 aa, synthetic construct
PQENRY

SEQ ID NO: 11050 - protein, 6 aa, synthetic construct
PQENND

SEQ ID NO: 11051 - protein, 6 aa, synthetic construct
PQENNE

SEQ ID NO: 11052 - protein, 6 aa, synthetic construct
PQENNF

SEQ ID NO: 11053 - protein, 6 aa, synthetic construct
PQENNW

SEQ ID NO: 11054 - protein, 6 aa, synthetic construct
PQENNY

SEQ ID NO: 11055 - protein, 6 aa, synthetic construct
PQENDD

SEQ ID NO: 11056 - protein, 6 aa, synthetic construct
PQENDE

SEQ ID NO: 11057 - protein, 6 aa, synthetic construct
PQENDF

SEQ ID NO: 11058 - protein, 6 aa, synthetic construct
PQENDW

SEQ ID NO: 11059 - protein, 6 aa, synthetic construct
PQENDY

SEQ ID NO: 11060 - protein, 6 aa, synthetic construct
PQENCD

SEQ ID NO: 11061 - protein, 6 aa, synthetic construct
PQENCE

SEQ ID NO: 11062 - protein, 6 aa, synthetic construct
PQENCF

SEQ ID NO: 11063 - protein, 6 aa, synthetic construct
PQENCW

SEQ ID NO: 11064 - protein, 6 aa, synthetic construct
PQENCY

SEQ ID NO: 11065 - protein, 6 aa, synthetic construct
PQENQD

SEQ ID NO: 11066 - protein, 6 aa, synthetic construct
PQENQE

SEQ ID NO: 11067 - protein, 6 aa, synthetic construct
PQENQF

SEQ ID NO: 11068 - protein, 6 aa, synthetic construct
PQENQW

SEQ ID NO: 11069 - protein, 6 aa, synthetic construct
PQENQY

SEQ ID NO: 11070 - protein, 6 aa, synthetic construct
PQENED

SEQ ID NO: 11071 - protein, 6 aa, synthetic construct
PQENEE

SEQ ID NO: 11072 - protein, 6 aa, synthetic construct
PQENEF

SEQ ID NO: 11073 - protein, 6 aa, synthetic construct
PQENEW

SEQ ID NO: 11074 - protein, 6 aa, synthetic construct
PQENEY

SEQ ID NO: 11075 - protein, 6 aa, synthetic construct
PQENGD

SEQ ID NO: 11076 - protein, 6 aa, synthetic construct
PQENGE

SEQ ID NO: 11077 - protein, 6 aa, synthetic construct
PQENGF

SEQ ID NO: 11078 - protein, 6 aa, synthetic construct
PQENGW

SEQ ID NO: 11079 - protein, 6 aa, synthetic construct
PQENGY

SEQ ID NO: 11080 - protein, 6 aa, synthetic construct
PQENHD

SEQ ID NO: 11081 - protein, 6 aa, synthetic construct
PQENHE

SEQ ID NO: 11082 - protein, 6 aa, synthetic construct
PQENHF

SEQ ID NO: 11083 - protein, 6 aa, synthetic construct
PQENHW

SEQ ID NO: 11084 - protein, 6 aa, synthetic construct
PQENHY

SEQ ID NO: 11085 - protein, 6 aa, synthetic construct
PQENID

SEQ ID NO: 11086 - protein, 6 aa, synthetic construct
PQENIE

SEQ ID NO: 11087 - protein, 6 aa, synthetic construct
PQENIF

SEQ ID NO: 11088 - protein, 6 aa, synthetic construct
PQENIW

SEQ ID NO: 11089 - protein, 6 aa, synthetic construct
PQENIY

SEQ ID NO: 11090 - protein, 6 aa, synthetic construct
PQENLD

SEQ ID NO: 11091 - protein, 6 aa, synthetic construct
PQENLE

SEQ ID NO: 11092 - protein, 6 aa, synthetic construct
PQENLF

SEQ ID NO: 11093 - protein, 6 aa, synthetic construct
PQENLW

SEQ ID NO: 11094 - protein, 6 aa, synthetic construct
PQENLY

SEQ ID NO: 11095 - protein, 6 aa, synthetic construct
PQENKD

SEQ ID NO: 11096 - protein, 6 aa, synthetic construct
PQENKE

SEQ ID NO: 11097 - protein, 6 aa, synthetic construct
PQENKF

SEQ ID NO: 11098 - protein, 6 aa, synthetic construct
PQENKW

SEQ ID NO: 11099 - protein, 6 aa, synthetic construct
PQENKY

SEQ ID NO: 11100 - protein, 6 aa, synthetic construct
PQENMD

SEQ ID NO: 11101 - protein, 6 aa, synthetic construct
PQENME

SEQ ID NO: 11102 - protein, 6 aa, synthetic construct
PQENMF

SEQ ID NO: 11103 - protein, 6 aa, synthetic construct
PQENMW

SEQ ID NO: 11104 - protein, 6 aa, synthetic construct
PQENMY

SEQ ID NO: 11105 - protein, 6 aa, synthetic construct
PQENFD

SEQ ID NO: 11106 - protein, 6 aa, synthetic construct
PQENFE

SEQ ID NO: 11107 - protein, 6 aa, synthetic construct
PQENFF

SEQ ID NO: 11108 - protein, 6 aa, synthetic construct
PQENFW

SEQ ID NO: 11109 - protein, 6 aa, synthetic construct
PQENFY

SEQ ID NO: 11110 - protein, 6 aa, synthetic construct
PQENPD

SEQ ID NO: 11111 - protein, 6 aa, synthetic construct
PQENPE

SEQ ID NO: 11112 - protein, 6 aa, synthetic construct
PQENPF

SEQ ID NO: 11113 - protein, 6 aa, synthetic construct
PQENPW

SEQ ID NO: 11114 - protein, 6 aa, synthetic construct
PQENPY

SEQ ID NO: 11115 - protein, 6 aa, synthetic construct
PQENSD

SEQ ID NO: 11116 - protein, 6 aa, synthetic construct
PQENSE

SEQ ID NO: 11117 - protein, 6 aa, synthetic construct
PQENSF

SEQ ID NO: 11118 - protein, 6 aa, synthetic construct
PQENSW

SEQ ID NO: 11119 - protein, 6 aa, synthetic construct
PQENSY

SEQ ID NO: 11120 - protein, 6 aa, synthetic construct
PQENTD

SEQ ID NO: 11121 - protein, 6 aa, synthetic construct
PQENTE

SEQ ID NO: 11122 - protein, 6 aa, synthetic construct
PQENTF

SEQ ID NO: 11123 - protein, 6 aa, synthetic construct
PQENTW

SEQ ID NO: 11124 - protein, 6 aa, synthetic construct
PQENTY

SEQ ID NO: 11125 - protein, 6 aa, synthetic construct
PQENWD

SEQ ID NO: 11126 - protein, 6 aa, synthetic construct
PQENWE

SEQ ID NO: 11127 - protein, 6 aa, synthetic construct
PQENWF

SEQ ID NO: 11128 - protein, 6 aa, synthetic construct
PQENWW

SEQ ID NO: 11129 - protein, 6 aa, synthetic construct
PQENWY

SEQ ID NO: 11130 - protein, 6 aa, synthetic construct
PQENYD

SEQ ID NO: 11131 - protein, 6 aa, synthetic construct
PQENYE

SEQ ID NO: 11132 - protein, 6 aa, synthetic construct
PQENYF

SEQ ID NO: 11133 - protein, 6 aa, synthetic construct
PQENYW

SEQ ID NO: 11134 - protein, 6 aa, synthetic construct
PQENYY

SEQ ID NO: 11135 - protein, 6 aa, synthetic construct
PQENVD

SEQ ID NO: 11136 - protein, 6 aa, synthetic construct
PQENVE

SEQ ID NO: 11137 - protein, 6 aa, synthetic construct
PQENVF

SEQ ID NO: 11138 - protein, 6 aa, synthetic construct
PQENVW

SEQ ID NO: 11139 - protein, 6 aa, synthetic construct
PQENVY

SEQ ID NO: 11140 - protein, 6 aa, synthetic construct
PQEDAD

SEQ ID NO: 11141 - protein, 6 aa, synthetic construct
PQEDAE

SEQ ID NO: 11142 - protein, 6 aa, synthetic construct
PQEDAF

SEQ ID NO: 11143 - protein, 6 aa, synthetic construct
PQEDAW

SEQ ID NO: 11144 - protein, 6 aa, synthetic construct
PQEDAY

SEQ ID NO: 11145 - protein, 6 aa, synthetic construct
PQEDRD

SEQ ID NO: 11146 - protein, 6 aa, synthetic construct
PQEDRE

SEQ ID NO: 11147 - protein, 6 aa, synthetic construct
PQEDRF

SEQ ID NO: 11148 - protein, 6 aa, synthetic construct
PQEDRW

SEQ ID NO: 11149 - protein, 6 aa, synthetic construct
PQEDRY

SEQ ID NO: 11150 - protein, 6 aa, synthetic construct
PQEDND

SEQ ID NO: 11151 - protein, 6 aa, synthetic construct
PQEDNE

SEQ ID NO: 11152 - protein, 6 aa, synthetic construct
PQEDNF

SEQ ID NO: 11153 - protein, 6 aa, synthetic construct
PQEDNW

SEQ ID NO: 11154 - protein, 6 aa, synthetic construct
PQEDNY

SEQ ID NO: 11155 - protein, 6 aa, synthetic construct
PQEDDD

SEQ ID NO: 11156 - protein, 6 aa, synthetic construct
PQEDDE

SEQ ID NO: 11157 - protein, 6 aa, synthetic construct
PQEDDF

SEQ ID NO: 11158 - protein, 6 aa, synthetic construct
PQEDDW

SEQ ID NO: 11159 - protein, 6 aa, synthetic construct
PQEDDY

SEQ ID NO: 11160 - protein, 6 aa, synthetic construct
PQEDCD

SEQ ID NO: 11161 - protein, 6 aa, synthetic construct
PQEDCE

SEQ ID NO: 11162 - protein, 6 aa, synthetic construct
PQEDCF

SEQ ID NO: 11163 - protein, 6 aa, synthetic construct
PQEDCW

SEQ ID NO: 11164 - protein, 6 aa, synthetic construct
PQEDCY

SEQ ID NO: 11165 - protein, 6 aa, synthetic construct
PQEDQD

SEQ ID NO: 11166 - protein, 6 aa, synthetic construct
PQEDQE

SEQ ID NO: 11167 - protein, 6 aa, synthetic construct
PQEDQF

SEQ ID NO: 11168 - protein, 6 aa, synthetic construct
PQEDQW

SEQ ID NO: 11169 - protein, 6 aa, synthetic construct
PQEDQY

SEQ ID NO: 11170 - protein, 6 aa, synthetic construct
PQEDED

SEQ ID NO: 11171 - protein, 6 aa, synthetic construct
PQEDEE

SEQ ID NO: 11172 - protein, 6 aa, synthetic construct
PQEDEF

SEQ ID NO: 11173 - protein, 6 aa, synthetic construct
PQEDEW

SEQ ID NO: 11174 - protein, 6 aa, synthetic construct
PQEDEY

SEQ ID NO: 11175 - protein, 6 aa, synthetic construct
PQEDGD

SEQ ID NO: 11176 - protein, 6 aa, synthetic construct
PQEDGE

SEQ ID NO: 11177 - protein, 6 aa, synthetic construct
PQEDGF

SEQ ID NO: 11178 - protein, 6 aa, synthetic construct
PQEDGW

SEQ ID NO: 11179 - protein, 6 aa, synthetic construct
PQEDGY

SEQ ID NO: 11180 - protein, 6 aa, synthetic construct
PQEDHD

SEQ ID NO: 11181 - protein, 6 aa, synthetic construct
PQEDHE

SEQ ID NO: 11182 - protein, 6 aa, synthetic construct
PQEDHF

SEQ ID NO: 11183 - protein, 6 aa, synthetic construct
PQEDHW

SEQ ID NO: 11184 - protein, 6 aa, synthetic construct
PQEDHY

SEQ ID NO: 11185 - protein, 6 aa, synthetic construct
PQEDID

SEQ ID NO: 11186 - protein, 6 aa, synthetic construct
PQEDIE

SEQ ID NO: 11187 - protein, 6 aa, synthetic construct
PQEDIF

SEQ ID NO: 11188 - protein, 6 aa, synthetic construct
PQEDIW

SEQ ID NO: 11189 - protein, 6 aa, synthetic construct
PQEDIY

SEQ ID NO: 11190 - protein, 6 aa, synthetic construct
PQEDLD

SEQ ID NO: 11191 - protein, 6 aa, synthetic construct
PQEDLE

SEQ ID NO: 11192 - protein, 6 aa, synthetic construct
PQEDLF

SEQ ID NO: 11193 - protein, 6 aa, synthetic construct
PQEDLW

SEQ ID NO: 11194 - protein, 6 aa, synthetic construct
PQEDLY

SEQ ID NO: 11195 - protein, 6 aa, synthetic construct
PQEDKD

SEQ ID NO: 11196 - protein, 6 aa, synthetic construct
PQEDKE

SEQ ID NO: 11197 - protein, 6 aa, synthetic construct
PQEDKF

SEQ ID NO: 11198 - protein, 6 aa, synthetic construct
PQEDKW

SEQ ID NO: 11199 - protein, 6 aa, synthetic construct
PQEDKY

SEQ ID NO: 11200 - protein, 6 aa, synthetic construct
PQEDMD

SEQ ID NO: 11201 - protein, 6 aa, synthetic construct
PQEDME

SEQ ID NO: 11202 - protein, 6 aa, synthetic construct
PQEDMF

SEQ ID NO: 11203 - protein, 6 aa, synthetic construct
PQEDMW

SEQ ID NO: 11204 - protein, 6 aa, synthetic construct
PQEDMY

SEQ ID NO: 11205 - protein, 6 aa, synthetic construct
PQEDFD

SEQ ID NO: 11206 - protein, 6 aa, synthetic construct
PQEDFE

SEQ ID NO: 11207 - protein, 6 aa, synthetic construct
PQEDFF

SEQ ID NO: 11208 - protein, 6 aa, synthetic construct
PQEDFW

SEQ ID NO: 11209 - protein, 6 aa, synthetic construct
PQEDFY

SEQ ID NO: 11210 - protein, 6 aa, synthetic construct
PQEDPD

SEQ ID NO: 11211 - protein, 6 aa, synthetic construct
PQEDPE

SEQ ID NO: 11212 - protein, 6 aa, synthetic construct
PQEDPF

SEQ ID NO: 11213 - protein, 6 aa, synthetic construct
PQEDPW

SEQ ID NO: 11214 - protein, 6 aa, synthetic construct
PQEDPY

SEQ ID NO: 11215 - protein, 6 aa, synthetic construct
PQEDSD

SEQ ID NO: 11216 - protein, 6 aa, synthetic construct
PQEDSE

SEQ ID NO: 11217 - protein, 6 aa, synthetic construct
PQEDSF

SEQ ID NO: 11218 - protein, 6 aa, synthetic construct
PQEDSW

SEQ ID NO: 11219 - protein, 6 aa, synthetic construct
PQEDSY

SEQ ID NO: 11220 - protein, 6 aa, synthetic construct
PQEDTD

SEQ ID NO: 11221 - protein, 6 aa, synthetic construct
PQEDTE

SEQ ID NO: 11222 - protein, 6 aa, synthetic construct
PQEDTF

SEQ ID NO: 11223 - protein, 6 aa, synthetic construct
PQEDTW

SEQ ID NO: 11224 - protein, 6 aa, synthetic construct
PQEDTY

SEQ ID NO: 11225 - protein, 6 aa, synthetic construct
PQEDWD

SEQ ID NO: 11226 - protein, 6 aa, synthetic construct
PQEDWE

SEQ ID NO: 11227 - protein, 6 aa, synthetic construct
PQEDWF

SEQ ID NO: 11228 - protein, 6 aa, synthetic construct
PQEDWW

SEQ ID NO: 11229 - protein, 6 aa, synthetic construct
PQEDWY

SEQ ID NO: 11230 - protein, 6 aa, synthetic construct
PQEDYD

SEQ ID NO: 11231 - protein, 6 aa, synthetic construct
PQEDYE

SEQ ID NO: 11232 - protein, 6 aa, synthetic construct
PQEDYF

SEQ ID NO: 11233 - protein, 6 aa, synthetic construct
PQEDYW

SEQ ID NO: 11234 - protein, 6 aa, synthetic construct
PQEDYY

SEQ ID NO: 11235 - protein, 6 aa, synthetic construct
PQEDVD

SEQ ID NO: 11236 - protein, 6 aa, synthetic construct
PQEDVE

SEQ ID NO: 11237 - protein, 6 aa, synthetic construct
PQEDVF

SEQ ID NO: 11238 - protein, 6 aa, synthetic construct
PQEDVW

SEQ ID NO: 11239 - protein, 6 aa, synthetic construct
PQEDVY

SEQ ID NO: 11240 - protein, 6 aa, synthetic construct
PQECAD

SEQ ID NO: 11241 - protein, 6 aa, synthetic construct
PQECAE

SEQ ID NO: 11242 - protein, 6 aa, synthetic construct
PQECAF

SEQ ID NO: 11243 - protein, 6 aa, synthetic construct
PQECAW

SEQ ID NO: 11244 - protein, 6 aa, synthetic construct
PQECAY

SEQ ID NO: 11245 - protein, 6 aa, synthetic construct
PQECRD

SEQ ID NO: 11246 - protein, 6 aa, synthetic construct
PQECRE

SEQ ID NO: 11247 - protein, 6 aa, synthetic construct
PQECRF

SEQ ID NO: 11248 - protein, 6 aa, synthetic construct
PQECRW

SEQ ID NO: 11249 - protein, 6 aa, synthetic construct
PQECRY

SEQ ID NO: 11250 - protein, 6 aa, synthetic construct
PQECND

SEQ ID NO: 11251 - protein, 6 aa, synthetic construct
PQECNE

SEQ ID NO: 11252 - protein, 6 aa, synthetic construct
PQECNF

SEQ ID NO: 11253 - protein, 6 aa, synthetic construct
PQECNW

SEQ ID NO: 11254 - protein, 6 aa, synthetic construct
PQECNY

SEQ ID NO: 11255 - protein, 6 aa, synthetic construct
PQECDD

SEQ ID NO: 11256 - protein, 6 aa, synthetic construct
PQECDE

SEQ ID NO: 11257 - protein, 6 aa, synthetic construct
PQECDF

SEQ ID NO: 11258 - protein, 6 aa, synthetic construct
PQECDW

SEQ ID NO: 11259 - protein, 6 aa, synthetic construct
PQECDY

SEQ ID NO: 11260 - protein, 6 aa, synthetic construct
PQECCD

SEQ ID NO: 11261 - protein, 6 aa, synthetic construct
PQECCE

SEQ ID NO: 11262 - protein, 6 aa, synthetic construct
PQECCF

SEQ ID NO: 11263 - protein, 6 aa, synthetic construct
PQECCW

SEQ ID NO: 11264 - protein, 6 aa, synthetic construct
PQECCY

SEQ ID NO: 11265 - protein, 6 aa, synthetic construct
PQECQD

SEQ ID NO: 11266 - protein, 6 aa, synthetic construct
PQECQE

SEQ ID NO: 11267 - protein, 6 aa, synthetic construct
PQECQF

SEQ ID NO: 11268 - protein, 6 aa, synthetic construct
PQECQW

SEQ ID NO: 11269 - protein, 6 aa, synthetic construct
PQECQY

SEQ ID NO: 11270 - protein, 6 aa, synthetic construct
PQECED

SEQ ID NO: 11271 - protein, 6 aa, synthetic construct
PQECEE

SEQ ID NO: 11272 - protein, 6 aa, synthetic construct
PQECEF

SEQ ID NO: 11273 - protein, 6 aa, synthetic construct
PQECEW

SEQ ID NO: 11274 - protein, 6 aa, synthetic construct
PQECEY

SEQ ID NO: 11275 - protein, 6 aa, synthetic construct
PQECGD

SEQ ID NO: 11276 - protein, 6 aa, synthetic construct
PQECGE

SEQ ID NO: 11277 - protein, 6 aa, synthetic construct
PQECGF

SEQ ID NO: 11278 - protein, 6 aa, synthetic construct
PQECGW

SEQ ID NO: 11279 - protein, 6 aa, synthetic construct
PQECGY

SEQ ID NO: 11280 - protein, 6 aa, synthetic construct
PQECHD

SEQ ID NO: 11281 - protein, 6 aa, synthetic construct
PQECHE

SEQ ID NO: 11282 - protein, 6 aa, synthetic construct
PQECHF

SEQ ID NO: 11283 - protein, 6 aa, synthetic construct
PQECHW

SEQ ID NO: 11284 - protein, 6 aa, synthetic construct
PQECHY

SEQ ID NO: 11285 - protein, 6 aa, synthetic construct
PQECID

SEQ ID NO: 11286 - protein, 6 aa, synthetic construct
PQECIE

SEQ ID NO: 11287 - protein, 6 aa, synthetic construct
PQECIF

SEQ ID NO: 11288 - protein, 6 aa, synthetic construct
PQECIW

SEQ ID NO: 11289 - protein, 6 aa, synthetic construct
PQECIY

SEQ ID NO: 11290 - protein, 6 aa, synthetic construct
PQECLD

SEQ ID NO: 11291 - protein, 6 aa, synthetic construct
PQECLE

SEQ ID NO: 11292 - protein, 6 aa, synthetic construct
PQECLF

SEQ ID NO: 11293 - protein, 6 aa, synthetic construct
PQECLW

SEQ ID NO: 11294 - protein, 6 aa, synthetic construct
PQECLY

SEQ ID NO: 11295 - protein, 6 aa, synthetic construct
PQECKD

SEQ ID NO: 11296 - protein, 6 aa, synthetic construct
PQECKE

SEQ ID NO: 11297 - protein, 6 aa, synthetic construct
PQECKF

SEQ ID NO: 11298 - protein, 6 aa, synthetic construct
PQECKW

SEQ ID NO: 11299 - protein, 6 aa, synthetic construct
PQECKY

SEQ ID NO: 11300 - protein, 6 aa, synthetic construct
PQECMD

SEQ ID NO: 11301 - protein, 6 aa, synthetic construct
PQECME

SEQ ID NO: 11302 - protein, 6 aa, synthetic construct
PQECMF

SEQ ID NO: 11303 - protein, 6 aa, synthetic construct
PQECMW

SEQ ID NO: 11304 - protein, 6 aa, synthetic construct
PQECMY

SEQ ID NO: 11305 - protein, 6 aa, synthetic construct
PQECFD

SEQ ID NO: 11306 - protein, 6 aa, synthetic construct
PQECFE

SEQ ID NO: 11307 - protein, 6 aa, synthetic construct
PQECFF

SEQ ID NO: 11308 - protein, 6 aa, synthetic construct
PQECFW

SEQ ID NO: 11309 - protein, 6 aa, synthetic construct
PQECFY

SEQ ID NO: 11310 - protein, 6 aa, synthetic construct
PQECPD

SEQ ID NO: 11311 - protein, 6 aa, synthetic construct
PQECPE

SEQ ID NO: 11312 - protein, 6 aa, synthetic construct
PQECPF

SEQ ID NO: 11313 - protein, 6 aa, synthetic construct
PQECPW

SEQ ID NO: 11314 - protein, 6 aa, synthetic construct
PQECPY

SEQ ID NO: 11315 - protein, 6 aa, synthetic construct
PQECSD

SEQ ID NO: 11316 - protein, 6 aa, synthetic construct
PQECSE

SEQ ID NO: 11317 - protein, 6 aa, synthetic construct
PQECSF

SEQ ID NO: 11318 - protein, 6 aa, synthetic construct
PQECSW

SEQ ID NO: 11319 - protein, 6 aa, synthetic construct
PQECSY

SEQ ID NO: 11320 - protein, 6 aa, synthetic construct
PQECTD

SEQ ID NO: 11321 - protein, 6 aa, synthetic construct
PQECTE

SEQ ID NO: 11322 - protein, 6 aa, synthetic construct
PQECTF

SEQ ID NO: 11323 - protein, 6 aa, synthetic construct
PQECTW

SEQ ID NO: 11324 - protein, 6 aa, synthetic construct
PQECTY

SEQ ID NO: 11325 - protein, 6 aa, synthetic construct
PQECWD

SEQ ID NO: 11326 - protein, 6 aa, synthetic construct
PQECWE

SEQ ID NO: 11327 - protein, 6 aa, synthetic construct
PQECWF

SEQ ID NO: 11328 - protein, 6 aa, synthetic construct
PQECWW

SEQ ID NO: 11329 - protein, 6 aa, synthetic construct
PQECWY

SEQ ID NO: 11330 - protein, 6 aa, synthetic construct
PQECYD

SEQ ID NO: 11331 - protein, 6 aa, synthetic construct
PQECYE

SEQ ID NO: 11332 - protein, 6 aa, synthetic construct
PQECYF

SEQ ID NO: 11333 - protein, 6 aa, synthetic construct
PQECYW

SEQ ID NO: 11334 - protein, 6 aa, synthetic construct
PQECYY

SEQ ID NO: 11335 - protein, 6 aa, synthetic construct
PQECVD

SEQ ID NO: 11336 - protein, 6 aa, synthetic construct
PQECVE

SEQ ID NO: 11337 - protein, 6 aa, synthetic construct
PQECVF

SEQ ID NO: 11338 - protein, 6 aa, synthetic construct
PQECVW

SEQ ID NO: 11339 - protein, 6 aa, synthetic construct
PQECVY

SEQ ID NO: 11340 - protein, 6 aa, synthetic construct
PQEQAD

SEQ ID NO: 11341 - protein, 6 aa, synthetic construct
PQEQAE

SEQ ID NO: 11342 - protein, 6 aa, synthetic construct
PQEQAF

SEQ ID NO: 11343 - protein, 6 aa, synthetic construct
PQEQAW

SEQ ID NO: 11344 - protein, 6 aa, synthetic construct
PQEQAY

SEQ ID NO: 11345 - protein, 6 aa, synthetic construct
PQEQRD

SEQ ID NO: 11346 - protein, 6 aa, synthetic construct
PQEQRE

SEQ ID NO: 11347 - protein, 6 aa, synthetic construct
PQEQRF

SEQ ID NO: 11348 - protein, 6 aa, synthetic construct
PQEQRW

SEQ ID NO: 11349 - protein, 6 aa, synthetic construct
PQEQRY

SEQ ID NO: 11350 - protein, 6 aa, synthetic construct
PQEQND

SEQ ID NO: 11351 - protein, 6 aa, synthetic construct
PQEQNE

SEQ ID NO: 11352 - protein, 6 aa, synthetic construct
PQEQNF

SEQ ID NO: 11353 - protein, 6 aa, synthetic construct
PQEQNW

SEQ ID NO: 11354 - protein, 6 aa, synthetic construct
PQEQNY

SEQ ID NO: 11355 - protein, 6 aa, synthetic construct
PQEQDD

SEQ ID NO: 11356 - protein, 6 aa, synthetic construct
PQEQDE

SEQ ID NO: 11357 - protein, 6 aa, synthetic construct
PQEQDF

SEQ ID NO: 11358 - protein, 6 aa, synthetic construct
PQEQDW

SEQ ID NO: 11359 - protein, 6 aa, synthetic construct
PQEQDY

SEQ ID NO: 11360 - protein, 6 aa, synthetic construct
PQEQCD

SEQ ID NO: 11361 - protein, 6 aa, synthetic construct
PQEQCE

SEQ ID NO: 11362 - protein, 6 aa, synthetic construct
PQEQCF

SEQ ID NO: 11363 - protein, 6 aa, synthetic construct
PQEQCW

SEQ ID NO: 11364 - protein, 6 aa, synthetic construct
PQEQCY

SEQ ID NO: 11365 - protein, 6 aa, synthetic construct
PQEQQD

SEQ ID NO: 11366 - protein, 6 aa, synthetic construct
PQEQQE

SEQ ID NO: 11367 - protein, 6 aa, synthetic construct
PQEQQF

SEQ ID NO: 11368 - protein, 6 aa, synthetic construct
PQEQQW

SEQ ID NO: 11369 - protein, 6 aa, synthetic construct
PQEQQY

SEQ ID NO: 11370 - protein, 6 aa, synthetic construct
PQEQED

SEQ ID NO: 11371 - protein, 6 aa, synthetic construct
PQEQEE

SEQ ID NO: 11372 - protein, 6 aa, synthetic construct
PQEQEF

SEQ ID NO: 11373 - protein, 6 aa, synthetic construct
PQEQEW

SEQ ID NO: 11374 - protein, 6 aa, synthetic construct
PQEQEY

SEQ ID NO: 11375 - protein, 6 aa, synthetic construct
PQEQGD

SEQ ID NO: 11376 - protein, 6 aa, synthetic construct
PQEQGE

SEQ ID NO: 11377 - protein, 6 aa, synthetic construct
PQEQGF

SEQ ID NO: 11378 - protein, 6 aa, synthetic construct
PQEQGW

SEQ ID NO: 11379 - protein, 6 aa, synthetic construct
PQEQGY

SEQ ID NO: 11380 - protein, 6 aa, synthetic construct
PQEQHD

SEQ ID NO: 11381 - protein, 6 aa, synthetic construct
PQEQHE

SEQ ID NO: 11382 - protein, 6 aa, synthetic construct
PQEQHF

SEQ ID NO: 11383 - protein, 6 aa, synthetic construct
PQEQHW

SEQ ID NO: 11384 - protein, 6 aa, synthetic construct
PQEQHY

SEQ ID NO: 11385 - protein, 6 aa, synthetic construct
PQEQID

SEQ ID NO: 11386 - protein, 6 aa, synthetic construct
PQEQIE

SEQ ID NO: 11387 - protein, 6 aa, synthetic construct
PQEQIF

SEQ ID NO: 11388 - protein, 6 aa, synthetic construct
PQEQIW

SEQ ID NO: 11389 - protein, 6 aa, synthetic construct
PQEQIY

SEQ ID NO: 11390 - protein, 6 aa, synthetic construct
PQEQLD

SEQ ID NO: 11391 - protein, 6 aa, synthetic construct
PQEQLE

SEQ ID NO: 11392 - protein, 6 aa, synthetic construct
PQEQLF

SEQ ID NO: 11393 - protein, 6 aa, synthetic construct
PQEQLW

SEQ ID NO: 11394 - protein, 6 aa, synthetic construct
PQEQLY

SEQ ID NO: 11395 - protein, 6 aa, synthetic construct
PQEQKD

SEQ ID NO: 11396 - protein, 6 aa, synthetic construct
PQEQKE

SEQ ID NO: 11397 - protein, 6 aa, synthetic construct
PQEQKF

SEQ ID NO: 11398 - protein, 6 aa, synthetic construct
PQEQKW

SEQ ID NO: 11399 - protein, 6 aa, synthetic construct
PQEQKY

SEQ ID NO: 11400 - protein, 6 aa, synthetic construct
PQEQMD

SEQ ID NO: 11401 - protein, 6 aa, synthetic construct
PQEQME

SEQ ID NO: 11402 - protein, 6 aa, synthetic construct
PQEQMF

SEQ ID NO: 11403 - protein, 6 aa, synthetic construct
PQEQMW

SEQ ID NO: 11404 - protein, 6 aa, synthetic construct
PQEQMY

SEQ ID NO: 11405 - protein, 6 aa, synthetic construct
PQEQFD

SEQ ID NO: 11406 - protein, 6 aa, synthetic construct
PQEQFE

SEQ ID NO: 11407 - protein, 6 aa, synthetic construct
PQEQFF

SEQ ID NO: 11408 - protein, 6 aa, synthetic construct
PQEQFW

SEQ ID NO: 11409 - protein, 6 aa, synthetic construct
PQEQFY

SEQ ID NO: 11410 - protein, 6 aa, synthetic construct
PQEQPD

SEQ ID NO: 11411 - protein, 6 aa, synthetic construct
PQEQPE

SEQ ID NO: 11412 - protein, 6 aa, synthetic construct
PQEQPF

SEQ ID NO: 11413 - protein, 6 aa, synthetic construct
PQEQPW

SEQ ID NO: 11414 - protein, 6 aa, synthetic construct
PQEQPY

SEQ ID NO: 11415 - protein, 6 aa, synthetic construct
PQEQSD

SEQ ID NO: 11416 - protein, 6 aa, synthetic construct
PQEQSE

SEQ ID NO: 11417 - protein, 6 aa, synthetic construct
PQEQSF

SEQ ID NO: 11418 - protein, 6 aa, synthetic construct
PQEQSW

SEQ ID NO: 11419 - protein, 6 aa, synthetic construct
PQEQSY

SEQ ID NO: 11420 - protein, 6 aa, synthetic construct
PQEQTD

SEQ ID NO: 11421 - protein, 6 aa, synthetic construct
PQEQTE

SEQ ID NO: 11422 - protein, 6 aa, synthetic construct
PQEQTF

SEQ ID NO: 11423 - protein, 6 aa, synthetic construct
PQEQTW

SEQ ID NO: 11424 - protein, 6 aa, synthetic construct
PQEQTY

SEQ ID NO: 11425 - protein, 6 aa, synthetic construct
PQEQWD

SEQ ID NO: 11426 - protein, 6 aa, synthetic construct
PQEQWE

SEQ ID NO: 11427 - protein, 6 aa, synthetic construct
PQEQWF

SEQ ID NO: 11428 - protein, 6 aa, synthetic construct
PQEQWW

SEQ ID NO: 11429 - protein, 6 aa, synthetic construct
PQEQWY

SEQ ID NO: 11430 - protein, 6 aa, synthetic construct
PQEQYD

SEQ ID NO: 11431 - protein, 6 aa, synthetic construct
PQEQYE

SEQ ID NO: 11432 - protein, 6 aa, synthetic construct
PQEQYF

SEQ ID NO: 11433 - protein, 6 aa, synthetic construct
PQEQYW

SEQ ID NO: 11434 - protein, 6 aa, synthetic construct
PQEQYY

SEQ ID NO: 11435 - protein, 6 aa, synthetic construct
PQEQVD

SEQ ID NO: 11436 - protein, 6 aa, synthetic construct
PQEQVE

SEQ ID NO: 11437 - protein, 6 aa, synthetic construct
PQEQVF

SEQ ID NO: 11438 - protein, 6 aa, synthetic construct
PQEQVW

SEQ ID NO: 11439 - protein, 6 aa, synthetic construct
PQEQVY

SEQ ID NO: 11440 - protein, 6 aa, synthetic construct
PQEEAD

SEQ ID NO: 11441 - protein, 6 aa, synthetic construct
PQEEAE

SEQ ID NO: 11442 - protein, 6 aa, synthetic construct
PQEEAF

SEQ ID NO: 11443 - protein, 6 aa, synthetic construct
PQEEAW

SEQ ID NO: 11444 - protein, 6 aa, synthetic construct
PQEEAY

SEQ ID NO: 11445 - protein, 6 aa, synthetic construct
PQEERD

SEQ ID NO: 11446 - protein, 6 aa, synthetic construct
PQEERE

SEQ ID NO: 11447 - protein, 6 aa, synthetic construct
PQEERF

SEQ ID NO: 11448 - protein, 6 aa, synthetic construct
PQEERW

SEQ ID NO: 11449 - protein, 6 aa, synthetic construct
PQEERY

SEQ ID NO: 11450 - protein, 6 aa, synthetic construct
PQEEND

SEQ ID NO: 11451 - protein, 6 aa, synthetic construct
PQEENE

SEQ ID NO: 11452 - protein, 6 aa, synthetic construct
PQEENF

SEQ ID NO: 11453 - protein, 6 aa, synthetic construct
PQEENW

SEQ ID NO: 11454 - protein, 6 aa, synthetic construct
PQEENY

SEQ ID NO: 11455 - protein, 6 aa, synthetic construct
PQEEDD

SEQ ID NO: 11456 - protein, 6 aa, synthetic construct
PQEEDE

SEQ ID NO: 11457 - protein, 6 aa, synthetic construct
PQEEDF

SEQ ID NO: 11458 - protein, 6 aa, synthetic construct
PQEEDW

SEQ ID NO: 11459 - protein, 6 aa, synthetic construct
PQEEDY

SEQ ID NO: 11460 - protein, 6 aa, synthetic construct
PQEECD

SEQ ID NO: 11461 - protein, 6 aa, synthetic construct
PQEECE

SEQ ID NO: 11462 - protein, 6 aa, synthetic construct
PQEECF

SEQ ID NO: 11463 - protein, 6 aa, synthetic construct
PQEECW

SEQ ID NO: 11464 - protein, 6 aa, synthetic construct
PQEECY

SEQ ID NO: 11465 - protein, 6 aa, synthetic construct
PQEEQD

SEQ ID NO: 11466 - protein, 6 aa, synthetic construct
PQEEQE

SEQ ID NO: 11467 - protein, 6 aa, synthetic construct
PQEEQF

SEQ ID NO: 11468 - protein, 6 aa, synthetic construct
PQEEQW

SEQ ID NO: 11469 - protein, 6 aa, synthetic construct
PQEEQY

SEQ ID NO: 11470 - protein, 6 aa, synthetic construct
PQEEED

SEQ ID NO: 11471 - protein, 6 aa, synthetic construct
PQEEEE

SEQ ID NO: 11472 - protein, 6 aa, synthetic construct
PQEEEF

SEQ ID NO: 11473 - protein, 6 aa, synthetic construct
PQEEEW

SEQ ID NO: 11474 - protein, 6 aa, synthetic construct
PQEEEY

SEQ ID NO: 11475 - protein, 6 aa, synthetic construct
PQEEGD

SEQ ID NO: 11476 - protein, 6 aa, synthetic construct
PQEEGE

SEQ ID NO: 11477 - protein, 6 aa, synthetic construct
PQEEGF

SEQ ID NO: 11478 - protein, 6 aa, synthetic construct
PQEEGW

SEQ ID NO: 11479 - protein, 6 aa, synthetic construct
PQEEGY

SEQ ID NO: 11480 - protein, 6 aa, synthetic construct
PQEEHD

SEQ ID NO: 11481 - protein, 6 aa, synthetic construct
PQEEHE

SEQ ID NO: 11482 - protein, 6 aa, synthetic construct
PQEEHF

SEQ ID NO: 11483 - protein, 6 aa, synthetic construct
PQEEHW

SEQ ID NO: 11484 - protein, 6 aa, synthetic construct
PQEEHY

SEQ ID NO: 11485 - protein, 6 aa, synthetic construct
PQEEID

SEQ ID NO: 11486 - protein, 6 aa, synthetic construct
PQEEIE

SEQ ID NO: 11487 - protein, 6 aa, synthetic construct
PQEEIF

SEQ ID NO: 11488 - protein, 6 aa, synthetic construct
PQEEIW

SEQ ID NO: 11489 - protein, 6 aa, synthetic construct
PQEEIY

SEQ ID NO: 11490 - protein, 6 aa, synthetic construct
PQEELD

SEQ ID NO: 11491 - protein, 6 aa, synthetic construct
PQEELE

SEQ ID NO: 11492 - protein, 6 aa, synthetic construct
PQEELF

SEQ ID NO: 11493 - protein, 6 aa, synthetic construct
PQEELW

SEQ ID NO: 11494 - protein, 6 aa, synthetic construct
PQEELY

SEQ ID NO: 11495 - protein, 6 aa, synthetic construct
PQEEKD

SEQ ID NO: 11496 - protein, 6 aa, synthetic construct
PQEEKE

SEQ ID NO: 11497 - protein, 6 aa, synthetic construct
PQEEKF

SEQ ID NO: 11498 - protein, 6 aa, synthetic construct
PQEEKW

SEQ ID NO: 11499 - protein, 6 aa, synthetic construct
PQEEKY

SEQ ID NO: 11500 - protein, 6 aa, synthetic construct
PQEEMD

SEQ ID NO: 11501 - protein, 6 aa, synthetic construct
PQEEME

SEQ ID NO: 11502 - protein, 6 aa, synthetic construct
PQEEMF

SEQ ID NO: 11503 - protein, 6 aa, synthetic construct
PQEEMW

SEQ ID NO: 11504 - protein, 6 aa, synthetic construct
PQEEMY

SEQ ID NO: 11505 - protein, 6 aa, synthetic construct
PQEEFD

SEQ ID NO: 11506 - protein, 6 aa, synthetic construct
PQEEFE

SEQ ID NO: 11507 - protein, 6 aa, synthetic construct
PQEEFF

SEQ ID NO: 11508 - protein, 6 aa, synthetic construct
PQEEFW

SEQ ID NO: 11509 - protein, 6 aa, synthetic construct
PQEEFY

SEQ ID NO: 11510 - protein, 6 aa, synthetic construct
PQEEPD

SEQ ID NO: 11511 - protein, 6 aa, synthetic construct
PQEEPE

SEQ ID NO: 11512 - protein, 6 aa, synthetic construct
PQEEPF

SEQ ID NO: 11513 - protein, 6 aa, synthetic construct
PQEEPW

SEQ ID NO: 11514 - protein, 6 aa, synthetic construct
PQEEPY

SEQ ID NO: 11515 - protein, 6 aa, synthetic construct
PQEESD

SEQ ID NO: 11516 - protein, 6 aa, synthetic construct
PQEESE

SEQ ID NO: 11517 - protein, 6 aa, synthetic construct
PQEESF

SEQ ID NO: 11518 - protein, 6 aa, synthetic construct
PQEESW

SEQ ID NO: 11519 - protein, 6 aa, synthetic construct
PQEESY

SEQ ID NO: 11520 - protein, 6 aa, synthetic construct
PQEETD

SEQ ID NO: 11521 - protein, 6 aa, synthetic construct
PQEETE

SEQ ID NO: 11522 - protein, 6 aa, synthetic construct
PQEETF

SEQ ID NO: 11523 - protein, 6 aa, synthetic construct
PQEETW

SEQ ID NO: 11524 - protein, 6 aa, synthetic construct
PQEETY

SEQ ID NO: 11525 - protein, 6 aa, synthetic construct
PQEEWD

SEQ ID NO: 11526 - protein, 6 aa, synthetic construct
PQEEWE

SEQ ID NO: 11527 - protein, 6 aa, synthetic construct
PQEEWF

SEQ ID NO: 11528 - protein, 6 aa, synthetic construct
PQEEWW

SEQ ID NO: 11529 - protein, 6 aa, synthetic construct
PQEEWY

SEQ ID NO: 11530 - protein, 6 aa, synthetic construct
PQEEYD

SEQ ID NO: 11531 - protein, 6 aa, synthetic construct
PQEEYE

SEQ ID NO: 11532 - protein, 6 aa, synthetic construct
PQEEYF

SEQ ID NO: 11533 - protein, 6 aa, synthetic construct
PQEEYW

SEQ ID NO: 11534 - protein, 6 aa, synthetic construct
PQEEYY

SEQ ID NO: 11535 - protein, 6 aa, synthetic construct
PQEEVD

SEQ ID NO: 11536 - protein, 6 aa, synthetic construct
PQEEVE

SEQ ID NO: 11537 - protein, 6 aa, synthetic construct
PQEEVF

SEQ ID NO: 11538 - protein, 6 aa, synthetic construct
PQEEVW

SEQ ID NO: 11539 - protein, 6 aa, synthetic construct
PQEEVY

SEQ ID NO: 11540 - protein, 6 aa, synthetic construct
PQEGAD

SEQ ID NO: 11541 - protein, 6 aa, synthetic construct
PQEGAE

SEQ ID NO: 11542 - protein, 6 aa, synthetic construct
PQEGAF

SEQ ID NO: 11543 - protein, 6 aa, synthetic construct
PQEGAW

SEQ ID NO: 11544 - protein, 6 aa, synthetic construct
PQEGAY

SEQ ID NO: 11545 - protein, 6 aa, synthetic construct
PQEGRD

SEQ ID NO: 11546 - protein, 6 aa, synthetic construct
PQEGRE

SEQ ID NO: 11547 - protein, 6 aa, synthetic construct
PQEGRF

SEQ ID NO: 11548 - protein, 6 aa, synthetic construct
PQEGRW

SEQ ID NO: 11549 - protein, 6 aa, synthetic construct
PQEGRY

SEQ ID NO: 11550 - protein, 6 aa, synthetic construct
PQEGND

SEQ ID NO: 11551 - protein, 6 aa, synthetic construct
PQEGNE

SEQ ID NO: 11552 - protein, 6 aa, synthetic construct
PQEGNF

SEQ ID NO: 11553 - protein, 6 aa, synthetic construct
PQEGNW

SEQ ID NO: 11554 - protein, 6 aa, synthetic construct
PQEGNY

SEQ ID NO: 11555 - protein, 6 aa, synthetic construct
PQEGDD

SEQ ID NO: 11556 - protein, 6 aa, synthetic construct
PQEGDE

SEQ ID NO: 11557 - protein, 6 aa, synthetic construct
PQEGDF

SEQ ID NO: 11558 - protein, 6 aa, synthetic construct
PQEGDW

SEQ ID NO: 11559 - protein, 6 aa, synthetic construct
PQEGDY

SEQ ID NO: 11560 - protein, 6 aa, synthetic construct
PQEGCD

SEQ ID NO: 11561 - protein, 6 aa, synthetic construct
PQEGCE

SEQ ID NO: 11562 - protein, 6 aa, synthetic construct
PQEGCF

SEQ ID NO: 11563 - protein, 6 aa, synthetic construct
PQEGCW

SEQ ID NO: 11564 - protein, 6 aa, synthetic construct
PQEGCY

SEQ ID NO: 11565 - protein, 6 aa, synthetic construct
PQEGQD

SEQ ID NO: 11566 - protein, 6 aa, synthetic construct
PQEGQE

SEQ ID NO: 11567 - protein, 6 aa, synthetic construct
PQEGQF

SEQ ID NO: 11568 - protein, 6 aa, synthetic construct
PQEGQW

SEQ ID NO: 11569 - protein, 6 aa, synthetic construct
PQEGQY

SEQ ID NO: 11570 - protein, 6 aa, synthetic construct
PQEGED

SEQ ID NO: 11571 - protein, 6 aa, synthetic construct
PQEGEE

SEQ ID NO: 11572 - protein, 6 aa, synthetic construct
PQEGEF

SEQ ID NO: 11573 - protein, 6 aa, synthetic construct
PQEGEW

SEQ ID NO: 11574 - protein, 6 aa, synthetic construct
PQEGEY

SEQ ID NO: 11575 - protein, 6 aa, synthetic construct
PQEGGD

SEQ ID NO: 11576 - protein, 6 aa, synthetic construct
PQEGGE

SEQ ID NO: 11577 - protein, 6 aa, synthetic construct
PQEGGF

SEQ ID NO: 11578 - protein, 6 aa, synthetic construct
PQEGGW

SEQ ID NO: 11579 - protein, 6 aa, synthetic construct
PQEGGY

SEQ ID NO: 11580 - protein, 6 aa, synthetic construct
PQEGHD

SEQ ID NO: 11581 - protein, 6 aa, synthetic construct
PQEGHE

SEQ ID NO: 11582 - protein, 6 aa, synthetic construct
PQEGHF

SEQ ID NO: 11583 - protein, 6 aa, synthetic construct
PQEGHW

SEQ ID NO: 11584 - protein, 6 aa, synthetic construct
PQEGHY

SEQ ID NO: 11585 - protein, 6 aa, synthetic construct
PQEGID

SEQ ID NO: 11586 - protein, 6 aa, synthetic construct
PQEGIE

SEQ ID NO: 11587 - protein, 6 aa, synthetic construct
PQEGIF

SEQ ID NO: 11588 - protein, 6 aa, synthetic construct
PQEGIW

SEQ ID NO: 11589 - protein, 6 aa, synthetic construct
PQEGIY

SEQ ID NO: 11590 - protein, 6 aa, synthetic construct
PQEGLD

SEQ ID NO: 11591 - protein, 6 aa, synthetic construct
PQEGLE

SEQ ID NO: 11592 - protein, 6 aa, synthetic construct
PQEGLF

SEQ ID NO: 11593 - protein, 6 aa, synthetic construct
PQEGLW

SEQ ID NO: 11594 - protein, 6 aa, synthetic construct
PQEGLY

SEQ ID NO: 11595 - protein, 6 aa, synthetic construct
PQEGKD

SEQ ID NO: 11596 - protein, 6 aa, synthetic construct
PQEGKE

SEQ ID NO: 11597 - protein, 6 aa, synthetic construct
PQEGKF

SEQ ID NO: 11598 - protein, 6 aa, synthetic construct
PQEGKW

SEQ ID NO: 11599 - protein, 6 aa, synthetic construct
PQEGKY

SEQ ID NO: 11600 - protein, 6 aa, synthetic construct
PQEGMD

SEQ ID NO: 11601 - protein, 6 aa, synthetic construct
PQEGME

SEQ ID NO: 11602 - protein, 6 aa, synthetic construct
PQEGMF

SEQ ID NO: 11603 - protein, 6 aa, synthetic construct
PQEGMW

SEQ ID NO: 11604 - protein, 6 aa, synthetic construct
PQEGMY

SEQ ID NO: 11605 - protein, 6 aa, synthetic construct
PQEGFD

SEQ ID NO: 11606 - protein, 6 aa, synthetic construct
PQEGFE

SEQ ID NO: 11607 - protein, 6 aa, synthetic construct
PQEGFF

SEQ ID NO: 11608 - protein, 6 aa, synthetic construct
PQEGFW

SEQ ID NO: 11609 - protein, 6 aa, synthetic construct
PQEGFY

SEQ ID NO: 11610 - protein, 6 aa, synthetic construct
PQEGPD

SEQ ID NO: 11611 - protein, 6 aa, synthetic construct
PQEGPE

SEQ ID NO: 11612 - protein, 6 aa, synthetic construct
PQEGPF

SEQ ID NO: 11613 - protein, 6 aa, synthetic construct
PQEGPW

SEQ ID NO: 11614 - protein, 6 aa, synthetic construct
PQEGPY

SEQ ID NO: 11615 - protein, 6 aa, synthetic construct
PQEGSD

SEQ ID NO: 11616 - protein, 6 aa, synthetic construct
PQEGSE

SEQ ID NO: 11617 - protein, 6 aa, synthetic construct
PQEGSF

SEQ ID NO: 11618 - protein, 6 aa, synthetic construct
PQEGSW

SEQ ID NO: 11619 - protein, 6 aa, synthetic construct
PQEGSY

SEQ ID NO: 11620 - protein, 6 aa, synthetic construct
PQEGTD

SEQ ID NO: 11621 - protein, 6 aa, synthetic construct
PQEGTE

SEQ ID NO: 11622 - protein, 6 aa, synthetic construct
PQEGTF

SEQ ID NO: 11623 - protein, 6 aa, synthetic construct
PQEGTW

SEQ ID NO: 11624 - protein, 6 aa, synthetic construct
PQEGTY

SEQ ID NO: 11625 - protein, 6 aa, synthetic construct
PQEGWD

SEQ ID NO: 11626 - protein, 6 aa, synthetic construct
PQEGWE

SEQ ID NO: 11627 - protein, 6 aa, synthetic construct
PQEGWF

SEQ ID NO: 11628 - protein, 6 aa, synthetic construct
PQEGWW

SEQ ID NO: 11629 - protein, 6 aa, synthetic construct
PQEGWY

SEQ ID NO: 11630 - protein, 6 aa, synthetic construct
PQEGYD

SEQ ID NO: 11631 - protein, 6 aa, synthetic construct
PQEGYE

SEQ ID NO: 11632 - protein, 6 aa, synthetic construct
PQEGYF

SEQ ID NO: 11633 - protein, 6 aa, synthetic construct
PQEGYW

SEQ ID NO: 11634 - protein, 6 aa, synthetic construct
PQEGYY

SEQ ID NO: 11635 - protein, 6 aa, synthetic construct
PQEGVD

SEQ ID NO: 11636 - protein, 6 aa, synthetic construct
PQEGVE

SEQ ID NO: 11637 - protein, 6 aa, synthetic construct
PQEGVF

SEQ ID NO: 11638 - protein, 6 aa, synthetic construct
PQEGVW

SEQ ID NO: 11639 - protein, 6 aa, synthetic construct
PQEGVY

SEQ ID NO: 11640 - protein, 6 aa, synthetic construct
PQEHAD

SEQ ID NO: 11641 - protein, 6 aa, synthetic construct
PQEHAE

SEQ ID NO: 11642 - protein, 6 aa, synthetic construct
PQEHAF

SEQ ID NO: 11643 - protein, 6 aa, synthetic construct
PQEHAW

SEQ ID NO: 11644 - protein, 6 aa, synthetic construct
PQEHAY

SEQ ID NO: 11645 - protein, 6 aa, synthetic construct
PQEHRD

SEQ ID NO: 11646 - protein, 6 aa, synthetic construct
PQEHRE

SEQ ID NO: 11647 - protein, 6 aa, synthetic construct
PQEHRF

SEQ ID NO: 11648 - protein, 6 aa, synthetic construct
PQEHRW

SEQ ID NO: 11649 - protein, 6 aa, synthetic construct
PQEHRY

SEQ ID NO: 11650 - protein, 6 aa, synthetic construct
PQEHND

SEQ ID NO: 11651 - protein, 6 aa, synthetic construct
PQEHNE

SEQ ID NO: 11652 - protein, 6 aa, synthetic construct
PQEHNF

SEQ ID NO: 11653 - protein, 6 aa, synthetic construct
PQEHNW

SEQ ID NO: 11654 - protein, 6 aa, synthetic construct
PQEHNY

SEQ ID NO: 11655 - protein, 6 aa, synthetic construct
PQEHDD

SEQ ID NO: 11656 - protein, 6 aa, synthetic construct
PQEHDE

SEQ ID NO: 11657 - protein, 6 aa, synthetic construct
PQEHDF

SEQ ID NO: 11658 - protein, 6 aa, synthetic construct
PQEHDW

SEQ ID NO: 11659 - protein, 6 aa, synthetic construct
PQEHDY

SEQ ID NO: 11660 - protein, 6 aa, synthetic construct
PQEHCD

SEQ ID NO: 11661 - protein, 6 aa, synthetic construct
PQEHCE

SEQ ID NO: 11662 - protein, 6 aa, synthetic construct
PQEHCF

SEQ ID NO: 11663 - protein, 6 aa, synthetic construct
PQEHCW

SEQ ID NO: 11664 - protein, 6 aa, synthetic construct
PQEHCY

SEQ ID NO: 11665 - protein, 6 aa, synthetic construct
PQEHQD

SEQ ID NO: 11666 - protein, 6 aa, synthetic construct
PQEHQE

SEQ ID NO: 11667 - protein, 6 aa, synthetic construct
PQEHQF

SEQ ID NO: 11668 - protein, 6 aa, synthetic construct
PQEHQW

SEQ ID NO: 11669 - protein, 6 aa, synthetic construct
PQEHQY

SEQ ID NO: 11670 - protein, 6 aa, synthetic construct
PQEHED

SEQ ID NO: 11671 - protein, 6 aa, synthetic construct
PQEHEE

SEQ ID NO: 11672 - protein, 6 aa, synthetic construct
PQEHEF

SEQ ID NO: 11673 - protein, 6 aa, synthetic construct
PQEHEW

SEQ ID NO: 11674 - protein, 6 aa, synthetic construct
PQEHEY

SEQ ID NO: 11675 - protein, 6 aa, synthetic construct
PQEHGD

SEQ ID NO: 11676 - protein, 6 aa, synthetic construct
PQEHGE

SEQ ID NO: 11677 - protein, 6 aa, synthetic construct
PQEHGF

SEQ ID NO: 11678 - protein, 6 aa, synthetic construct
PQEHGW

SEQ ID NO: 11679 - protein, 6 aa, synthetic construct
PQEHGY

SEQ ID NO: 11680 - protein, 6 aa, synthetic construct
PQEHHD

SEQ ID NO: 11681 - protein, 6 aa, synthetic construct
PQEHHE

SEQ ID NO: 11682 - protein, 6 aa, synthetic construct
PQEHHF

SEQ ID NO: 11683 - protein, 6 aa, synthetic construct
PQEHHW

SEQ ID NO: 11684 - protein, 6 aa, synthetic construct
PQEHHY

SEQ ID NO: 11685 - protein, 6 aa, synthetic construct
PQEHID

SEQ ID NO: 11686 - protein, 6 aa, synthetic construct
PQEHIE

SEQ ID NO: 11687 - protein, 6 aa, synthetic construct
PQEHIF

SEQ ID NO: 11688 - protein, 6 aa, synthetic construct
PQEHIW

SEQ ID NO: 11689 - protein, 6 aa, synthetic construct
PQEHIY

SEQ ID NO: 11690 - protein, 6 aa, synthetic construct
PQEHLD

SEQ ID NO: 11691 - protein, 6 aa, synthetic construct
PQEHLE

SEQ ID NO: 11692 - protein, 6 aa, synthetic construct
PQEHLF

SEQ ID NO: 11693 - protein, 6 aa, synthetic construct
PQEHLW

SEQ ID NO: 11694 - protein, 6 aa, synthetic construct
PQEHLY

SEQ ID NO: 11695 - protein, 6 aa, synthetic construct
PQEHKD

SEQ ID NO: 11696 - protein, 6 aa, synthetic construct
PQEHKE

SEQ ID NO: 11697 - protein, 6 aa, synthetic construct
PQEHKF

SEQ ID NO: 11698 - protein, 6 aa, synthetic construct
PQEHKW

SEQ ID NO: 11699 - protein, 6 aa, synthetic construct
PQEHKY

SEQ ID NO: 11700 - protein, 6 aa, synthetic construct
PQEHMD

SEQ ID NO: 11701 - protein, 6 aa, synthetic construct
PQEHME

SEQ ID NO: 11702 - protein, 6 aa, synthetic construct
PQEHMF

SEQ ID NO: 11703 - protein, 6 aa, synthetic construct
PQEHMW

SEQ ID NO: 11704 - protein, 6 aa, synthetic construct
PQEHMY

SEQ ID NO: 11705 - protein, 6 aa, synthetic construct
PQEHFD

SEQ ID NO: 11706 - protein, 6 aa, synthetic construct
PQEHFE

SEQ ID NO: 11707 - protein, 6 aa, synthetic construct
PQEHFF

SEQ ID NO: 11708 - protein, 6 aa, synthetic construct
PQEHFW

SEQ ID NO: 11709 - protein, 6 aa, synthetic construct
PQEHFY

SEQ ID NO: 11710 - protein, 6 aa, synthetic construct
PQEHPD

SEQ ID NO: 11711 - protein, 6 aa, synthetic construct
PQEHPE

SEQ ID NO: 11712 - protein, 6 aa, synthetic construct
PQEHPF

SEQ ID NO: 11713 - protein, 6 aa, synthetic construct
PQEHPW

SEQ ID NO: 11714 - protein, 6 aa, synthetic construct
PQEHPY

SEQ ID NO: 11715 - protein, 6 aa, synthetic construct
PQEHSD

SEQ ID NO: 11716 - protein, 6 aa, synthetic construct
PQEHSE

SEQ ID NO: 11717 - protein, 6 aa, synthetic construct
PQEHSF

SEQ ID NO: 11718 - protein, 6 aa, synthetic construct
PQEHSW

SEQ ID NO: 11719 - protein, 6 aa, synthetic construct
PQEHSY

SEQ ID NO: 11720 - protein, 6 aa, synthetic construct
PQEHTD

SEQ ID NO: 11721 - protein, 6 aa, synthetic construct
PQEHTE

SEQ ID NO: 11722 - protein, 6 aa, synthetic construct
PQEHTF

SEQ ID NO: 11723 - protein, 6 aa, synthetic construct
PQEHTW

SEQ ID NO: 11724 - protein, 6 aa, synthetic construct
PQEHTY

SEQ ID NO: 11725 - protein, 6 aa, synthetic construct
PQEHWD

SEQ ID NO: 11726 - protein, 6 aa, synthetic construct
PQEHWE

SEQ ID NO: 11727 - protein, 6 aa, synthetic construct
PQEHWF

SEQ ID NO: 11728 - protein, 6 aa, synthetic construct
PQEHWW

SEQ ID NO: 11729 - protein, 6 aa, synthetic construct
PQEHWY

SEQ ID NO: 11730 - protein, 6 aa, synthetic construct
PQEHYD

SEQ ID NO: 11731 - protein, 6 aa, synthetic construct
PQEHYE

SEQ ID NO: 11732 - protein, 6 aa, synthetic construct
PQEHYF

SEQ ID NO: 11733 - protein, 6 aa, synthetic construct
PQEHYW

SEQ ID NO: 11734 - protein, 6 aa, synthetic construct
PQEHYY

SEQ ID NO: 11735 - protein, 6 aa, synthetic construct
PQEHVD

SEQ ID NO: 11736 - protein, 6 aa, synthetic construct
PQEHVE

SEQ ID NO: 11737 - protein, 6 aa, synthetic construct
PQEHVF

SEQ ID NO: 11738 - protein, 6 aa, synthetic construct
PQEHVW

SEQ ID NO: 11739 - protein, 6 aa, synthetic construct
PQEHVY

SEQ ID NO: 11740 - protein, 6 aa, synthetic construct
PQEIAD

SEQ ID NO: 11741 - protein, 6 aa, synthetic construct
PQEIAE

SEQ ID NO: 11742 - protein, 6 aa, synthetic construct
PQEIAF

SEQ ID NO: 11743 - protein, 6 aa, synthetic construct
PQEIAW

SEQ ID NO: 11744 - protein, 6 aa, synthetic construct
PQEIAY

SEQ ID NO: 11745 - protein, 6 aa, synthetic construct
PQEIRD

SEQ ID NO: 11746 - protein, 6 aa, synthetic construct
PQEIRE

SEQ ID NO: 11747 - protein, 6 aa, synthetic construct
PQEIRF

SEQ ID NO: 11748 - protein, 6 aa, synthetic construct
PQEIRW

SEQ ID NO: 11749 - protein, 6 aa, synthetic construct
PQEIRY

SEQ ID NO: 11750 - protein, 6 aa, synthetic construct
PQEIND

SEQ ID NO: 11751 - protein, 6 aa, synthetic construct
PQEINE

SEQ ID NO: 11752 - protein, 6 aa, synthetic construct
PQEINF

SEQ ID NO: 11753 - protein, 6 aa, synthetic construct
PQEINW

SEQ ID NO: 11754 - protein, 6 aa, synthetic construct
PQEINY

SEQ ID NO: 11755 - protein, 6 aa, synthetic construct
PQEIDD

SEQ ID NO: 11756 - protein, 6 aa, synthetic construct
PQEIDE

SEQ ID NO: 11757 - protein, 6 aa, synthetic construct
PQEIDF

SEQ ID NO: 11758 - protein, 6 aa, synthetic construct
PQEIDW

SEQ ID NO: 11759 - protein, 6 aa, synthetic construct
PQEIDY

SEQ ID NO: 11760 - protein, 6 aa, synthetic construct
PQEICD

SEQ ID NO: 11761 - protein, 6 aa, synthetic construct
PQEICE

SEQ ID NO: 11762 - protein, 6 aa, synthetic construct
PQEICF

SEQ ID NO: 11763 - protein, 6 aa, synthetic construct
PQEICW

SEQ ID NO: 11764 - protein, 6 aa, synthetic construct
PQEICY

SEQ ID NO: 11765 - protein, 6 aa, synthetic construct
PQEIQD

SEQ ID NO: 11766 - protein, 6 aa, synthetic construct
PQEIQE

SEQ ID NO: 11767 - protein, 6 aa, synthetic construct
PQEIQF

SEQ ID NO: 11768 - protein, 6 aa, synthetic construct
PQEIQW

SEQ ID NO: 11769 - protein, 6 aa, synthetic construct
PQEIQY

SEQ ID NO: 11770 - protein, 6 aa, synthetic construct
PQEIED

SEQ ID NO: 11771 - protein, 6 aa, synthetic construct
PQEIEE

SEQ ID NO: 11772 - protein, 6 aa, synthetic construct
PQEIEF

SEQ ID NO: 11773 - protein, 6 aa, synthetic construct
PQEIEW

SEQ ID NO: 11774 - protein, 6 aa, synthetic construct
PQEIEY

SEQ ID NO: 11775 - protein, 6 aa, synthetic construct
PQEIGD

SEQ ID NO: 11776 - protein, 6 aa, synthetic construct
PQEIGE

SEQ ID NO: 11777 - protein, 6 aa, synthetic construct
PQEIGF

SEQ ID NO: 11778 - protein, 6 aa, synthetic construct
PQEIGW

SEQ ID NO: 11779 - protein, 6 aa, synthetic construct
PQEIGY

SEQ ID NO: 11780 - protein, 6 aa, synthetic construct
PQEIHD

SEQ ID NO: 11781 - protein, 6 aa, synthetic construct
PQEIHE

SEQ ID NO: 11782 - protein, 6 aa, synthetic construct
PQEIHF

SEQ ID NO: 11783 - protein, 6 aa, synthetic construct
PQEIHW

SEQ ID NO: 11784 - protein, 6 aa, synthetic construct
PQEIHY

SEQ ID NO: 11785 - protein, 6 aa, synthetic construct
PQEIID

SEQ ID NO: 11786 - protein, 6 aa, synthetic construct
PQEIIE

SEQ ID NO: 11787 - protein, 6 aa, synthetic construct
PQEIIF

SEQ ID NO: 11788 - protein, 6 aa, synthetic construct
PQEIIW

SEQ ID NO: 11789 - protein, 6 aa, synthetic construct
PQEIIY

SEQ ID NO: 11790 - protein, 6 aa, synthetic construct
PQEILD

SEQ ID NO: 11791 - protein, 6 aa, synthetic construct
PQEILE

SEQ ID NO: 11792 - protein, 6 aa, synthetic construct
PQEILF

SEQ ID NO: 11793 - protein, 6 aa, synthetic construct
PQEILW

SEQ ID NO: 11794 - protein, 6 aa, synthetic construct
PQEILY

SEQ ID NO: 11795 - protein, 6 aa, synthetic construct
PQEIKD

SEQ ID NO: 11796 - protein, 6 aa, synthetic construct
PQEIKE

SEQ ID NO: 11797 - protein, 6 aa, synthetic construct
PQEIKF

SEQ ID NO: 11798 - protein, 6 aa, synthetic construct
PQEIKW

SEQ ID NO: 11799 - protein, 6 aa, synthetic construct
PQEIKY

SEQ ID NO: 11800 - protein, 6 aa, synthetic construct
PQEIMD

SEQ ID NO: 11801 - protein, 6 aa, synthetic construct
PQEIME

SEQ ID NO: 11802 - protein, 6 aa, synthetic construct
PQEIMF

SEQ ID NO: 11803 - protein, 6 aa, synthetic construct
PQEIMW

SEQ ID NO: 11804 - protein, 6 aa, synthetic construct
PQEIMY

SEQ ID NO: 11805 - protein, 6 aa, synthetic construct
PQEIFD

SEQ ID NO: 11806 - protein, 6 aa, synthetic construct
PQEIFE

SEQ ID NO: 11807 - protein, 6 aa, synthetic construct
PQEIFF

SEQ ID NO: 11808 - protein, 6 aa, synthetic construct
PQEIFW

SEQ ID NO: 11809 - protein, 6 aa, synthetic construct
PQEIFY

SEQ ID NO: 11810 - protein, 6 aa, synthetic construct
PQEIPD

SEQ ID NO: 11811 - protein, 6 aa, synthetic construct
PQEIPE

SEQ ID NO: 11812 - protein, 6 aa, synthetic construct
PQEIPF

SEQ ID NO: 11813 - protein, 6 aa, synthetic construct
PQEIPW

SEQ ID NO: 11814 - protein, 6 aa, synthetic construct
PQEIPY

SEQ ID NO: 11815 - protein, 6 aa, synthetic construct
PQEISD

SEQ ID NO: 11816 - protein, 6 aa, synthetic construct
PQEISE

SEQ ID NO: 11817 - protein, 6 aa, synthetic construct
PQEISF

SEQ ID NO: 11818 - protein, 6 aa, synthetic construct
PQEISW

SEQ ID NO: 11819 - protein, 6 aa, synthetic construct
PQEISY

SEQ ID NO: 11820 - protein, 6 aa, synthetic construct
PQEITD

SEQ ID NO: 11821 - protein, 6 aa, synthetic construct
PQEITE

SEQ ID NO: 11822 - protein, 6 aa, synthetic construct
PQEITF

SEQ ID NO: 11823 - protein, 6 aa, synthetic construct
PQEITW

SEQ ID NO: 11824 - protein, 6 aa, synthetic construct
PQEITY

SEQ ID NO: 11825 - protein, 6 aa, synthetic construct
PQEIWD

SEQ ID NO: 11826 - protein, 6 aa, synthetic construct
PQEIWE

SEQ ID NO: 11827 - protein, 6 aa, synthetic construct
PQEIWF

SEQ ID NO: 11828 - protein, 6 aa, synthetic construct
PQEIWW

SEQ ID NO: 11829 - protein, 6 aa, synthetic construct
PQEIWY

SEQ ID NO: 11830 - protein, 6 aa, synthetic construct
PQEIYD

SEQ ID NO: 11831 - protein, 6 aa, synthetic construct
PQEIYE

SEQ ID NO: 11832 - protein, 6 aa, synthetic construct
PQEIYF

SEQ ID NO: 11833 - protein, 6 aa, synthetic construct
PQEIYW

SEQ ID NO: 11834 - protein, 6 aa, synthetic construct
PQEIYY

SEQ ID NO: 11835 - protein, 6 aa, synthetic construct
PQEIVD

SEQ ID NO: 11836 - protein, 6 aa, synthetic construct
PQEIVE

SEQ ID NO: 11837 - protein, 6 aa, synthetic construct
PQEIVF

SEQ ID NO: 11838 - protein, 6 aa, synthetic construct
PQEIVW

SEQ ID NO: 11839 - protein, 6 aa, synthetic construct
PQEIVY

SEQ ID NO: 11840 - protein, 6 aa, synthetic construct
PQELAD

SEQ ID NO: 11841 - protein, 6 aa, synthetic construct
PQELAE

SEQ ID NO: 11842 - protein, 6 aa, synthetic construct
PQELAF

SEQ ID NO: 11843 - protein, 6 aa, synthetic construct
PQELAW

SEQ ID NO: 11844 - protein, 6 aa, synthetic construct
PQELAY

SEQ ID NO: 11845 - protein, 6 aa, synthetic construct
PQELRD

SEQ ID NO: 11846 - protein, 6 aa, synthetic construct
PQELRE

SEQ ID NO: 11847 - protein, 6 aa, synthetic construct
PQELRF

SEQ ID NO: 11848 - protein, 6 aa, synthetic construct
PQELRW

SEQ ID NO: 11849 - protein, 6 aa, synthetic construct
PQELRY

SEQ ID NO: 11850 - protein, 6 aa, synthetic construct
PQELND

SEQ ID NO: 11851 - protein, 6 aa, synthetic construct
PQELNE

SEQ ID NO: 11852 - protein, 6 aa, synthetic construct
PQELNF

SEQ ID NO: 11853 - protein, 6 aa, synthetic construct
PQELNW

SEQ ID NO: 11854 - protein, 6 aa, synthetic construct
PQELNY

SEQ ID NO: 11855 - protein, 6 aa, synthetic construct
PQELDD

SEQ ID NO: 11856 - protein, 6 aa, synthetic construct
PQELDE

SEQ ID NO: 11857 - protein, 6 aa, synthetic construct
PQELDF

SEQ ID NO: 11858 - protein, 6 aa, synthetic construct
PQELDW

SEQ ID NO: 11859 - protein, 6 aa, synthetic construct
PQELDY

SEQ ID NO: 11860 - protein, 6 aa, synthetic construct
PQELCD

SEQ ID NO: 11861 - protein, 6 aa, synthetic construct
PQELCE

SEQ ID NO: 11862 - protein, 6 aa, synthetic construct
PQELCF

SEQ ID NO: 11863 - protein, 6 aa, synthetic construct
PQELCW

SEQ ID NO: 11864 - protein, 6 aa, synthetic construct
PQELCY

SEQ ID NO: 11865 - protein, 6 aa, synthetic construct
PQELQD

SEQ ID NO: 11866 - protein, 6 aa, synthetic construct
PQELQE

SEQ ID NO: 11867 - protein, 6 aa, synthetic construct
PQELQF

SEQ ID NO: 11868 - protein, 6 aa, synthetic construct
PQELQW

SEQ ID NO: 11869 - protein, 6 aa, synthetic construct
PQELQY

SEQ ID NO: 11870 - protein, 6 aa, synthetic construct
PQELED

SEQ ID NO: 11871 - protein, 6 aa, synthetic construct
PQELEE

SEQ ID NO: 11872 - protein, 6 aa, synthetic construct
PQELEF

SEQ ID NO: 11873 - protein, 6 aa, synthetic construct
PQELEW

SEQ ID NO: 11874 - protein, 6 aa, synthetic construct
PQELEY

SEQ ID NO: 11875 - protein, 6 aa, synthetic construct
PQELGD

SEQ ID NO: 11876 - protein, 6 aa, synthetic construct
PQELGE

SEQ ID NO: 11877 - protein, 6 aa, synthetic construct
PQELGF

SEQ ID NO: 11878 - protein, 6 aa, synthetic construct
PQELGW

SEQ ID NO: 11879 - protein, 6 aa, synthetic construct
PQELGY

SEQ ID NO: 11880 - protein, 6 aa, synthetic construct
PQELHD

SEQ ID NO: 11881 - protein, 6 aa, synthetic construct
PQELHE

SEQ ID NO: 11882 - protein, 6 aa, synthetic construct
PQELHF

SEQ ID NO: 11883 - protein, 6 aa, synthetic construct
PQELHW

SEQ ID NO: 11884 - protein, 6 aa, synthetic construct
PQELHY

SEQ ID NO: 11885 - protein, 6 aa, synthetic construct
PQELID

SEQ ID NO: 11886 - protein, 6 aa, synthetic construct
PQELIE

SEQ ID NO: 11887 - protein, 6 aa, synthetic construct
PQELIF

SEQ ID NO: 11888 - protein, 6 aa, synthetic construct
PQELIW

SEQ ID NO: 11889 - protein, 6 aa, synthetic construct
PQELIY

SEQ ID NO: 11890 - protein, 6 aa, synthetic construct
PQELLD

SEQ ID NO: 11891 - protein, 6 aa, synthetic construct
PQELLE

SEQ ID NO: 11892 - protein, 6 aa, synthetic construct
PQELLF

SEQ ID NO: 11893 - protein, 6 aa, synthetic construct
PQELLW

SEQ ID NO: 11894 - protein, 6 aa, synthetic construct
PQELLY

SEQ ID NO: 11895 - protein, 6 aa, synthetic construct
PQELKD

SEQ ID NO: 11896 - protein, 6 aa, synthetic construct
PQELKE

SEQ ID NO: 11897 - protein, 6 aa, synthetic construct
PQELKF

SEQ ID NO: 11898 - protein, 6 aa, synthetic construct
PQELKW

SEQ ID NO: 11899 - protein, 6 aa, synthetic construct
PQELKY

SEQ ID NO: 11900 - protein, 6 aa, synthetic construct
PQELMD

SEQ ID NO: 11901 - protein, 6 aa, synthetic construct
PQELME

SEQ ID NO: 11902 - protein, 6 aa, synthetic construct
PQELMF

SEQ ID NO: 11903 - protein, 6 aa, synthetic construct
PQELMW

SEQ ID NO: 11904 - protein, 6 aa, synthetic construct
PQELMY

SEQ ID NO: 11905 - protein, 6 aa, synthetic construct
PQELFD

SEQ ID NO: 11906 - protein, 6 aa, synthetic construct
PQELFE

SEQ ID NO: 11907 - protein, 6 aa, synthetic construct
PQELFF

SEQ ID NO: 11908 - protein, 6 aa, synthetic construct
PQELFW

SEQ ID NO: 11909 - protein, 6 aa, synthetic construct
PQELFY

SEQ ID NO: 11910 - protein, 6 aa, synthetic construct
PQELPD

SEQ ID NO: 11911 - protein, 6 aa, synthetic construct
PQELPE

SEQ ID NO: 11912 - protein, 6 aa, synthetic construct
PQELPF

SEQ ID NO: 11913 - protein, 6 aa, synthetic construct
PQELPW

SEQ ID NO: 11914 - protein, 6 aa, synthetic construct
PQELPY

SEQ ID NO: 11915 - protein, 6 aa, synthetic construct
PQELSD

SEQ ID NO: 11916 - protein, 6 aa, synthetic construct
PQELSE

SEQ ID NO: 11917 - protein, 6 aa, synthetic construct
PQELSF

SEQ ID NO: 11918 - protein, 6 aa, synthetic construct
PQELSW

SEQ ID NO: 11919 - protein, 6 aa, synthetic construct
PQELSY

SEQ ID NO: 11920 - protein, 6 aa, synthetic construct
PQELTD

SEQ ID NO: 11921 - protein, 6 aa, synthetic construct
PQELTE

SEQ ID NO: 11922 - protein, 6 aa, synthetic construct
PQELTF

SEQ ID NO: 11923 - protein, 6 aa, synthetic construct
PQELTW

SEQ ID NO: 11924 - protein, 6 aa, synthetic construct
PQELTY

SEQ ID NO: 11925 - protein, 6 aa, synthetic construct
PQELWD

SEQ ID NO: 11926 - protein, 6 aa, synthetic construct
PQELWE

SEQ ID NO: 11927 - protein, 6 aa, synthetic construct
PQELWF

SEQ ID NO: 11928 - protein, 6 aa, synthetic construct
PQELWW

SEQ ID NO: 11929 - protein, 6 aa, synthetic construct
PQELWY

SEQ ID NO: 11930 - protein, 6 aa, synthetic construct
PQELYD

SEQ ID NO: 11931 - protein, 6 aa, synthetic construct
PQELYE

SEQ ID NO: 11932 - protein, 6 aa, synthetic construct
PQELYF

SEQ ID NO: 11933 - protein, 6 aa, synthetic construct
PQELYW

SEQ ID NO: 11934 - protein, 6 aa, synthetic construct
PQELYY

SEQ ID NO: 11935 - protein, 6 aa, synthetic construct
PQELVD

SEQ ID NO: 11936 - protein, 6 aa, synthetic construct
PQELVE

SEQ ID NO: 11937 - protein, 6 aa, synthetic construct
PQELVF

SEQ ID NO: 11938 - protein, 6 aa, synthetic construct
PQELVW

SEQ ID NO: 11939 - protein, 6 aa, synthetic construct
PQELVY

SEQ ID NO: 11940 - protein, 6 aa, synthetic construct
PQEKAD

SEQ ID NO: 11941 - protein, 6 aa, synthetic construct
PQEKAE

SEQ ID NO: 11942 - protein, 6 aa, synthetic construct
PQEKAF

SEQ ID NO: 11943 - protein, 6 aa, synthetic construct
PQEKAW

SEQ ID NO: 11944 - protein, 6 aa, synthetic construct
PQEKAY

SEQ ID NO: 11945 - protein, 6 aa, synthetic construct
PQEKRD

SEQ ID NO: 11946 - protein, 6 aa, synthetic construct
PQEKRE

SEQ ID NO: 11947 - protein, 6 aa, synthetic construct
PQEKRF

SEQ ID NO: 11948 - protein, 6 aa, synthetic construct
PQEKRW

SEQ ID NO: 11949 - protein, 6 aa, synthetic construct
PQEKRY

SEQ ID NO: 11950 - protein, 6 aa, synthetic construct
PQEKND

SEQ ID NO: 11951 - protein, 6 aa, synthetic construct
PQEKNE

SEQ ID NO: 11952 - protein, 6 aa, synthetic construct
PQEKNF

SEQ ID NO: 11953 - protein, 6 aa, synthetic construct
PQEKNW

SEQ ID NO: 11954 - protein, 6 aa, synthetic construct
PQEKNY

SEQ ID NO: 11955 - protein, 6 aa, synthetic construct
PQEKDD

SEQ ID NO: 11956 - protein, 6 aa, synthetic construct
PQEKDE

SEQ ID NO: 11957 - protein, 6 aa, synthetic construct
PQEKDF

SEQ ID NO: 11958 - protein, 6 aa, synthetic construct
PQEKDW

SEQ ID NO: 11959 - protein, 6 aa, synthetic construct
PQEKDY

SEQ ID NO: 11960 - protein, 6 aa, synthetic construct
PQEKCD

SEQ ID NO: 11961 - protein, 6 aa, synthetic construct
PQEKCE

SEQ ID NO: 11962 - protein, 6 aa, synthetic construct
PQEKCF

SEQ ID NO: 11963 - protein, 6 aa, synthetic construct
PQEKCW

SEQ ID NO: 11964 - protein, 6 aa, synthetic construct
PQEKCY

SEQ ID NO: 11965 - protein, 6 aa, synthetic construct
PQEKQD

SEQ ID NO: 11966 - protein, 6 aa, synthetic construct
PQEKQE

SEQ ID NO: 11967 - protein, 6 aa, synthetic construct
PQEKQF

SEQ ID NO: 11968 - protein, 6 aa, synthetic construct
PQEKQW

SEQ ID NO: 11969 - protein, 6 aa, synthetic construct
PQEKQY

SEQ ID NO: 11970 - protein, 6 aa, synthetic construct
PQEKED

SEQ ID NO: 11971 - protein, 6 aa, synthetic construct
PQEKEE

SEQ ID NO: 11972 - protein, 6 aa, synthetic construct
PQEKEF

SEQ ID NO: 11973 - protein, 6 aa, synthetic construct
PQEKEW

SEQ ID NO: 11974 - protein, 6 aa, synthetic construct
PQEKEY

SEQ ID NO: 11975 - protein, 6 aa, synthetic construct
PQEKGD

SEQ ID NO: 11976 - protein, 6 aa, synthetic construct
PQEKGE

SEQ ID NO: 11977 - protein, 6 aa, synthetic construct
PQEKGF

SEQ ID NO: 11978 - protein, 6 aa, synthetic construct
PQEKGW

SEQ ID NO: 11979 - protein, 6 aa, synthetic construct
PQEKGY

SEQ ID NO: 11980 - protein, 6 aa, synthetic construct
PQEKHD

SEQ ID NO: 11981 - protein, 6 aa, synthetic construct
PQEKHE

SEQ ID NO: 11982 - protein, 6 aa, synthetic construct
PQEKHF

SEQ ID NO: 11983 - protein, 6 aa, synthetic construct
PQEKHW

SEQ ID NO: 11984 - protein, 6 aa, synthetic construct
PQEKHY

SEQ ID NO: 11985 - protein, 6 aa, synthetic construct
PQEKID

SEQ ID NO: 11986 - protein, 6 aa, synthetic construct
PQEKIE

SEQ ID NO: 11987 - protein, 6 aa, synthetic construct
PQEKIF

SEQ ID NO: 11988 - protein, 6 aa, synthetic construct
PQEKIW

SEQ ID NO: 11989 - protein, 6 aa, synthetic construct
PQEKIY

SEQ ID NO: 11990 - protein, 6 aa, synthetic construct
PQEKLD

SEQ ID NO: 11991 - protein, 6 aa, synthetic construct
PQEKLE

SEQ ID NO: 11992 - protein, 6 aa, synthetic construct
PQEKLF

SEQ ID NO: 11993 - protein, 6 aa, synthetic construct
PQEKLW

SEQ ID NO: 11994 - protein, 6 aa, synthetic construct
PQEKLY

SEQ ID NO: 11995 - protein, 6 aa, synthetic construct
PQEKKD

SEQ ID NO: 11996 - protein, 6 aa, synthetic construct
PQEKKE

SEQ ID NO: 11997 - protein, 6 aa, synthetic construct
PQEKKF

SEQ ID NO: 11998 - protein, 6 aa, synthetic construct
PQEKKW

SEQ ID NO: 11999 - protein, 6 aa, synthetic construct
PQEKKY

SEQ ID NO: 12000 - protein, 6 aa, synthetic construct
PQEKMD

SEQ ID NO: 12001 - protein, 6 aa, synthetic construct
PQEKME

SEQ ID NO: 12002 - protein, 6 aa, synthetic construct
PQEKMF

SEQ ID NO: 12003 - protein, 6 aa, synthetic construct
PQEKMW

SEQ ID NO: 12004 - protein, 6 aa, synthetic construct
PQEKMY

SEQ ID NO: 12005 - protein, 6 aa, synthetic construct
PQEKFD

SEQ ID NO: 12006 - protein, 6 aa, synthetic construct
PQEKFE

SEQ ID NO: 12007 - protein, 6 aa, synthetic construct
PQEKFF

SEQ ID NO: 12008 - protein, 6 aa, synthetic construct
PQEKFW

SEQ ID NO: 12009 - protein, 6 aa, synthetic construct
PQEKFY

SEQ ID NO: 12010 - protein, 6 aa, synthetic construct
PQEKPD

SEQ ID NO: 12011 - protein, 6 aa, synthetic construct
PQEKPE

SEQ ID NO: 12012 - protein, 6 aa, synthetic construct
PQEKPF

SEQ ID NO: 12013 - protein, 6 aa, synthetic construct
PQEKPW

SEQ ID NO: 12014 - protein, 6 aa, synthetic construct
PQEKPY

SEQ ID NO: 12015 - protein, 6 aa, synthetic construct
PQEKSD

SEQ ID NO: 12016 - protein, 6 aa, synthetic construct
PQEKSE

SEQ ID NO: 12017 - protein, 6 aa, synthetic construct
PQEKSF

SEQ ID NO: 12018 - protein, 6 aa, synthetic construct
PQEKSW

SEQ ID NO: 12019 - protein, 6 aa, synthetic construct
PQEKSY

SEQ ID NO: 12020 - protein, 6 aa, synthetic construct
PQEKTD

SEQ ID NO: 12021 - protein, 6 aa, synthetic construct
PQEKTE

SEQ ID NO: 12022 - protein, 6 aa, synthetic construct
PQEKTF

SEQ ID NO: 12023 - protein, 6 aa, synthetic construct
PQEKTW

SEQ ID NO: 12024 - protein, 6 aa, synthetic construct
PQEKTY

SEQ ID NO: 12025 - protein, 6 aa, synthetic construct
PQEKWD

SEQ ID NO: 12026 - protein, 6 aa, synthetic construct
PQEKWE

SEQ ID NO: 12027 - protein, 6 aa, synthetic construct
PQEKWF

SEQ ID NO: 12028 - protein, 6 aa, synthetic construct
PQEKWW

SEQ ID NO: 12029 - protein, 6 aa, synthetic construct
PQEKWY

SEQ ID NO: 12030 - protein, 6 aa, synthetic construct
PQEKYD

SEQ ID NO: 12031 - protein, 6 aa, synthetic construct
PQEKYE

SEQ ID NO: 12032 - protein, 6 aa, synthetic construct
PQEKYF

SEQ ID NO: 12033 - protein, 6 aa, synthetic construct
PQEKYW

SEQ ID NO: 12034 - protein, 6 aa, synthetic construct
PQEKYY

SEQ ID NO: 12035 - protein, 6 aa, synthetic construct
PQEKVD

SEQ ID NO: 12036 - protein, 6 aa, synthetic construct
PQEKVE

SEQ ID NO: 12037 - protein, 6 aa, synthetic construct
PQEKVF

SEQ ID NO: 12038 - protein, 6 aa, synthetic construct
PQEKVW

SEQ ID NO: 12039 - protein, 6 aa, synthetic construct
PQEKVY

SEQ ID NO: 12040 - protein, 6 aa, synthetic construct
PQEMAD

SEQ ID NO: 12041 - protein, 6 aa, synthetic construct
PQEMAE

SEQ ID NO: 12042 - protein, 6 aa, synthetic construct
PQEMAF

SEQ ID NO: 12043 - protein, 6 aa, synthetic construct
PQEMAW

SEQ ID NO: 12044 - protein, 6 aa, synthetic construct
PQEMAY

SEQ ID NO: 12045 - protein, 6 aa, synthetic construct
PQEMRD

SEQ ID NO: 12046 - protein, 6 aa, synthetic construct
PQEMRE

SEQ ID NO: 12047 - protein, 6 aa, synthetic construct
PQEMRF

SEQ ID NO: 12048 - protein, 6 aa, synthetic construct
PQEMRW

SEQ ID NO: 12049 - protein, 6 aa, synthetic construct
PQEMRY

SEQ ID NO: 12050 - protein, 6 aa, synthetic construct
PQEMND

SEQ ID NO: 12051 - protein, 6 aa, synthetic construct
PQEMNE

SEQ ID NO: 12052 - protein, 6 aa, synthetic construct
PQEMNF

SEQ ID NO: 12053 - protein, 6 aa, synthetic construct
PQEMNW

SEQ ID NO: 12054 - protein, 6 aa, synthetic construct
PQEMNY

SEQ ID NO: 12055 - protein, 6 aa, synthetic construct
PQEMDD

SEQ ID NO: 12056 - protein, 6 aa, synthetic construct
PQEMDE

SEQ ID NO: 12057 - protein, 6 aa, synthetic construct
PQEMDF

SEQ ID NO: 12058 - protein, 6 aa, synthetic construct
PQEMDW

SEQ ID NO: 12059 - protein, 6 aa, synthetic construct
PQEMDY

SEQ ID NO: 12060 - protein, 6 aa, synthetic construct
PQEMCD

SEQ ID NO: 12061 - protein, 6 aa, synthetic construct
PQEMCE

SEQ ID NO: 12062 - protein, 6 aa, synthetic construct
PQEMCF

SEQ ID NO: 12063 - protein, 6 aa, synthetic construct
PQEMCW

SEQ ID NO: 12064 - protein, 6 aa, synthetic construct
PQEMCY

SEQ ID NO: 12065 - protein, 6 aa, synthetic construct
PQEMQD

SEQ ID NO: 12066 - protein, 6 aa, synthetic construct
PQEMQE

SEQ ID NO: 12067 - protein, 6 aa, synthetic construct
PQEMQF

SEQ ID NO: 12068 - protein, 6 aa, synthetic construct
PQEMQW

SEQ ID NO: 12069 - protein, 6 aa, synthetic construct
PQEMQY

SEQ ID NO: 12070 - protein, 6 aa, synthetic construct
PQEMED

SEQ ID NO: 12071 - protein, 6 aa, synthetic construct
PQEMEE

SEQ ID NO: 12072 - protein, 6 aa, synthetic construct
PQEMEF

SEQ ID NO: 12073 - protein, 6 aa, synthetic construct
PQEMEW

SEQ ID NO: 12074 - protein, 6 aa, synthetic construct
PQEMEY

SEQ ID NO: 12075 - protein, 6 aa, synthetic construct
PQEMGD

SEQ ID NO: 12076 - protein, 6 aa, synthetic construct
PQEMGE

SEQ ID NO: 12077 - protein, 6 aa, synthetic construct
PQEMGF

SEQ ID NO: 12078 - protein, 6 aa, synthetic construct
PQEMGW

SEQ ID NO: 12079 - protein, 6 aa, synthetic construct
PQEMGY

SEQ ID NO: 12080 - protein, 6 aa, synthetic construct
PQEMHD

SEQ ID NO: 12081 - protein, 6 aa, synthetic construct
PQEMHE

SEQ ID NO: 12082 - protein, 6 aa, synthetic construct
PQEMHF

SEQ ID NO: 12083 - protein, 6 aa, synthetic construct
PQEMHW

SEQ ID NO: 12084 - protein, 6 aa, synthetic construct
PQEMHY

SEQ ID NO: 12085 - protein, 6 aa, synthetic construct
PQEMID

SEQ ID NO: 12086 - protein, 6 aa, synthetic construct
PQEMIE

SEQ ID NO: 12087 - protein, 6 aa, synthetic construct
PQEMIF

SEQ ID NO: 12088 - protein, 6 aa, synthetic construct
PQEMIW

SEQ ID NO: 12089 - protein, 6 aa, synthetic construct
PQEMIY

SEQ ID NO: 12090 - protein, 6 aa, synthetic construct
PQEMLD

SEQ ID NO: 12091 - protein, 6 aa, synthetic construct
PQEMLE

SEQ ID NO: 12092 - protein, 6 aa, synthetic construct
PQEMLF

SEQ ID NO: 12093 - protein, 6 aa, synthetic construct
PQEMLW

SEQ ID NO: 12094 - protein, 6 aa, synthetic construct
PQEMLY

SEQ ID NO: 12095 - protein, 6 aa, synthetic construct
PQEMKD

SEQ ID NO: 12096 - protein, 6 aa, synthetic construct
PQEMKE

SEQ ID NO: 12097 - protein, 6 aa, synthetic construct
PQEMKF

SEQ ID NO: 12098 - protein, 6 aa, synthetic construct
PQEMKW

SEQ ID NO: 12099 - protein, 6 aa, synthetic construct
PQEMKY

SEQ ID NO: 12100 - protein, 6 aa, synthetic construct
PQEMMD

SEQ ID NO: 12101 - protein, 6 aa, synthetic construct
PQEMME

SEQ ID NO: 12102 - protein, 6 aa, synthetic construct
PQEMMF

SEQ ID NO: 12103 - protein, 6 aa, synthetic construct
PQEMMW

SEQ ID NO: 12104 - protein, 6 aa, synthetic construct
PQEMMY

SEQ ID NO: 12105 - protein, 6 aa, synthetic construct
PQEMFD

SEQ ID NO: 12106 - protein, 6 aa, synthetic construct
PQEMFE

SEQ ID NO: 12107 - protein, 6 aa, synthetic construct
PQEMFF

SEQ ID NO: 12108 - protein, 6 aa, synthetic construct
PQEMFW

SEQ ID NO: 12109 - protein, 6 aa, synthetic construct
PQEMFY

SEQ ID NO: 12110 - protein, 6 aa, synthetic construct
PQEMPD

SEQ ID NO: 12111 - protein, 6 aa, synthetic construct
PQEMPE

SEQ ID NO: 12112 - protein, 6 aa, synthetic construct
PQEMPF

SEQ ID NO: 12113 - protein, 6 aa, synthetic construct
PQEMPW

SEQ ID NO: 12114 - protein, 6 aa, synthetic construct
PQEMPY

SEQ ID NO: 12115 - protein, 6 aa, synthetic construct
PQEMSD

SEQ ID NO: 12116 - protein, 6 aa, synthetic construct
PQEMSE

SEQ ID NO: 12117 - protein, 6 aa, synthetic construct
PQEMSF

SEQ ID NO: 12118 - protein, 6 aa, synthetic construct
PQEMSW

SEQ ID NO: 12119 - protein, 6 aa, synthetic construct
PQEMSY

SEQ ID NO: 12120 - protein, 6 aa, synthetic construct
PQEMTD

SEQ ID NO: 12121 - protein, 6 aa, synthetic construct
PQEMTE

SEQ ID NO: 12122 - protein, 6 aa, synthetic construct
PQEMTF

SEQ ID NO: 12123 - protein, 6 aa, synthetic construct
PQEMTW

SEQ ID NO: 12124 - protein, 6 aa, synthetic construct
PQEMTY

SEQ ID NO: 12125 - protein, 6 aa, synthetic construct
PQEMWD

SEQ ID NO: 12126 - protein, 6 aa, synthetic construct
PQEMWE

SEQ ID NO: 12127 - protein, 6 aa, synthetic construct
PQEMWF

SEQ ID NO: 12128 - protein, 6 aa, synthetic construct
PQEMWW

SEQ ID NO: 12129 - protein, 6 aa, synthetic construct
PQEMWY

SEQ ID NO: 12130 - protein, 6 aa, synthetic construct
PQEMYD

SEQ ID NO: 12131 - protein, 6 aa, synthetic construct
PQEMYE

SEQ ID NO: 12132 - protein, 6 aa, synthetic construct
PQEMYF

SEQ ID NO: 12133 - protein, 6 aa, synthetic construct
PQEMYW

SEQ ID NO: 12134 - protein, 6 aa, synthetic construct
PQEMYY

SEQ ID NO: 12135 - protein, 6 aa, synthetic construct
PQEMVD

SEQ ID NO: 12136 - protein, 6 aa, synthetic construct
PQEMVE

SEQ ID NO: 12137 - protein, 6 aa, synthetic construct
PQEMVF

SEQ ID NO: 12138 - protein, 6 aa, synthetic construct
PQEMVW

SEQ ID NO: 12139 - protein, 6 aa, synthetic construct
PQEMVY

SEQ ID NO: 12140 - protein, 6 aa, synthetic construct
PQEFAD

SEQ ID NO: 12141 - protein, 6 aa, synthetic construct
PQEFAE

SEQ ID NO: 12142 - protein, 6 aa, synthetic construct
PQEFAF

SEQ ID NO: 12143 - protein, 6 aa, synthetic construct
PQEFAW

SEQ ID NO: 12144 - protein, 6 aa, synthetic construct
PQEFAY

SEQ ID NO: 12145 - protein, 6 aa, synthetic construct
PQEFRD

SEQ ID NO: 12146 - protein, 6 aa, synthetic construct
PQEFRE

SEQ ID NO: 12147 - protein, 6 aa, synthetic construct
PQEFRF

SEQ ID NO: 12148 - protein, 6 aa, synthetic construct
PQEFRW

SEQ ID NO: 12149 - protein, 6 aa, synthetic construct
PQEFRY

SEQ ID NO: 12150 - protein, 6 aa, synthetic construct
PQEFND

SEQ ID NO: 12151 - protein, 6 aa, synthetic construct
PQEFNE

SEQ ID NO: 12152 - protein, 6 aa, synthetic construct
PQEFNF

SEQ ID NO: 12153 - protein, 6 aa, synthetic construct
PQEFNW

SEQ ID NO: 12154 - protein, 6 aa, synthetic construct
PQEFNY

SEQ ID NO: 12155 - protein, 6 aa, synthetic construct
PQEFDD

SEQ ID NO: 12156 - protein, 6 aa, synthetic construct
PQEFDE

SEQ ID NO: 12157 - protein, 6 aa, synthetic construct
PQEFDF

SEQ ID NO: 12158 - protein, 6 aa, synthetic construct
PQEFDW

SEQ ID NO: 12159 - protein, 6 aa, synthetic construct
PQEFDY

SEQ ID NO: 12160 - protein, 6 aa, synthetic construct
PQEFCD

SEQ ID NO: 12161 - protein, 6 aa, synthetic construct
PQEFCE

SEQ ID NO: 12162 - protein, 6 aa, synthetic construct
PQEFCF

SEQ ID NO: 12163 - protein, 6 aa, synthetic construct
PQEFCW

SEQ ID NO: 12164 - protein, 6 aa, synthetic construct
PQEFCY

SEQ ID NO: 12165 - protein, 6 aa, synthetic construct
PQEFQD

SEQ ID NO: 12166 - protein, 6 aa, synthetic construct
PQEFQE

SEQ ID NO: 12167 - protein, 6 aa, synthetic construct
PQEFQF

SEQ ID NO: 12168 - protein, 6 aa, synthetic construct
PQEFQW

SEQ ID NO: 12169 - protein, 6 aa, synthetic construct
PQEFQY

SEQ ID NO: 12170 - protein, 6 aa, synthetic construct
PQEFED

SEQ ID NO: 12171 - protein, 6 aa, synthetic construct
PQEFEE

SEQ ID NO: 12172 - protein, 6 aa, synthetic construct
PQEFEF

SEQ ID NO: 12173 - protein, 6 aa, synthetic construct
PQEFEW

SEQ ID NO: 12174 - protein, 6 aa, synthetic construct
PQEFEY

SEQ ID NO: 12175 - protein, 6 aa, synthetic construct
PQEFGD

SEQ ID NO: 12176 - protein, 6 aa, synthetic construct
PQEFGE

SEQ ID NO: 12177 - protein, 6 aa, synthetic construct
PQEFGF

SEQ ID NO: 12178 - protein, 6 aa, synthetic construct
PQEFGW

SEQ ID NO: 12179 - protein, 6 aa, synthetic construct
PQEFGY

SEQ ID NO: 12180 - protein, 6 aa, synthetic construct
PQEFHD

SEQ ID NO: 12181 - protein, 6 aa, synthetic construct
PQEFHE

SEQ ID NO: 12182 - protein, 6 aa, synthetic construct
PQEFHF

SEQ ID NO: 12183 - protein, 6 aa, synthetic construct
PQEFHW

SEQ ID NO: 12184 - protein, 6 aa, synthetic construct
PQEFHY

SEQ ID NO: 12185 - protein, 6 aa, synthetic construct
PQEFID

SEQ ID NO: 12186 - protein, 6 aa, synthetic construct
PQEFIE

SEQ ID NO: 12187 - protein, 6 aa, synthetic construct
PQEFIF

SEQ ID NO: 12188 - protein, 6 aa, synthetic construct
PQEFIW

SEQ ID NO: 12189 - protein, 6 aa, synthetic construct
PQEFIY

SEQ ID NO: 12190 - protein, 6 aa, synthetic construct
PQEFLD

SEQ ID NO: 12191 - protein, 6 aa, synthetic construct
PQEFLE

SEQ ID NO: 12192 - protein, 6 aa, synthetic construct
PQEFLF

SEQ ID NO: 12193 - protein, 6 aa, synthetic construct
PQEFLW

SEQ ID NO: 12194 - protein, 6 aa, synthetic construct
PQEFLY

SEQ ID NO: 12195 - protein, 6 aa, synthetic construct
PQEFKD

SEQ ID NO: 12196 - protein, 6 aa, synthetic construct
PQEFKE

SEQ ID NO: 12197 - protein, 6 aa, synthetic construct
PQEFKF

SEQ ID NO: 12198 - protein, 6 aa, synthetic construct
PQEFKW

SEQ ID NO: 12199 - protein, 6 aa, synthetic construct
PQEFKY

SEQ ID NO: 12200 - protein, 6 aa, synthetic construct
PQEFMD

SEQ ID NO: 12201 - protein, 6 aa, synthetic construct
PQEFME

SEQ ID NO: 12202 - protein, 6 aa, synthetic construct
PQEFMF

SEQ ID NO: 12203 - protein, 6 aa, synthetic construct
PQEFMW

SEQ ID NO: 12204 - protein, 6 aa, synthetic construct
PQEFMY

SEQ ID NO: 12205 - protein, 6 aa, synthetic construct
PQEFFD

SEQ ID NO: 12206 - protein, 6 aa, synthetic construct
PQEFFE

SEQ ID NO: 12207 - protein, 6 aa, synthetic construct
PQEFFF

SEQ ID NO: 12208 - protein, 6 aa, synthetic construct
PQEFFW

SEQ ID NO: 12209 - protein, 6 aa, synthetic construct
PQEFFY

SEQ ID NO: 12210 - protein, 6 aa, synthetic construct
PQEFPD

SEQ ID NO: 12211 - protein, 6 aa, synthetic construct
PQEFPE

SEQ ID NO: 12212 - protein, 6 aa, synthetic construct
PQEFPF

SEQ ID NO: 12213 - protein, 6 aa, synthetic construct
PQEFPW

SEQ ID NO: 12214 - protein, 6 aa, synthetic construct
PQEFPY

SEQ ID NO: 12215 - protein, 6 aa, synthetic construct
PQEFSD

SEQ ID NO: 12216 - protein, 6 aa, synthetic construct
PQEFSE

SEQ ID NO: 12217 - protein, 6 aa, synthetic construct
PQEFSF

SEQ ID NO: 12218 - protein, 6 aa, synthetic construct
PQEFSW

SEQ ID NO: 12219 - protein, 6 aa, synthetic construct
PQEFSY

SEQ ID NO: 12220 - protein, 6 aa, synthetic construct
PQEFTD

SEQ ID NO: 12221 - protein, 6 aa, synthetic construct
PQEFTE

SEQ ID NO: 12222 - protein, 6 aa, synthetic construct
PQEFTF

SEQ ID NO: 12223 - protein, 6 aa, synthetic construct
PQEFTW

SEQ ID NO: 12224 - protein, 6 aa, synthetic construct
PQEFTY

SEQ ID NO: 12225 - protein, 6 aa, synthetic construct
PQEFWD

SEQ ID NO: 12226 - protein, 6 aa, synthetic construct
PQEFWE

SEQ ID NO: 12227 - protein, 6 aa, synthetic construct
PQEFWF

SEQ ID NO: 12228 - protein, 6 aa, synthetic construct
PQEFWW

SEQ ID NO: 12229 - protein, 6 aa, synthetic construct
PQEFWY

SEQ ID NO: 12230 - protein, 6 aa, synthetic construct
PQEFYD

SEQ ID NO: 12231 - protein, 6 aa, synthetic construct
PQEFYE

SEQ ID NO: 12232 - protein, 6 aa, synthetic construct
PQEFYF

SEQ ID NO: 12233 - protein, 6 aa, synthetic construct
PQEFYW

SEQ ID NO: 12234 - protein, 6 aa, synthetic construct
PQEFYY

SEQ ID NO: 12235 - protein, 6 aa, synthetic construct
PQEFVD

SEQ ID NO: 12236 - protein, 6 aa, synthetic construct
PQEFVE

SEQ ID NO: 12237 - protein, 6 aa, synthetic construct
PQEFVF

SEQ ID NO: 12238 - protein, 6 aa, synthetic construct
PQEFVW

SEQ ID NO: 12239 - protein, 6 aa, synthetic construct
PQEFVY

SEQ ID NO: 12240 - protein, 6 aa, synthetic construct
PQEPAD

SEQ ID NO: 12241 - protein, 6 aa, synthetic construct
PQEPAE

SEQ ID NO: 12242 - protein, 6 aa, synthetic construct
PQEPAF

SEQ ID NO: 12243 - protein, 6 aa, synthetic construct
PQEPAW

SEQ ID NO: 12244 - protein, 6 aa, synthetic construct
PQEPAY

SEQ ID NO: 12245 - protein, 6 aa, synthetic construct
PQEPRD

SEQ ID NO: 12246 - protein, 6 aa, synthetic construct
PQEPRE

SEQ ID NO: 12247 - protein, 6 aa, synthetic construct
PQEPRF

SEQ ID NO: 12248 - protein, 6 aa, synthetic construct
PQEPRW

SEQ ID NO: 12249 - protein, 6 aa, synthetic construct
PQEPRY

SEQ ID NO: 12250 - protein, 6 aa, synthetic construct
PQEPND

SEQ ID NO: 12251 - protein, 6 aa, synthetic construct
PQEPNE

SEQ ID NO: 12252 - protein, 6 aa, synthetic construct
PQEPNF

SEQ ID NO: 12253 - protein, 6 aa, synthetic construct
PQEPNW

SEQ ID NO: 12254 - protein, 6 aa, synthetic construct
PQEPNY

SEQ ID NO: 12255 - protein, 6 aa, synthetic construct
PQEPDD

SEQ ID NO: 12256 - protein, 6 aa, synthetic construct
PQEPDE

SEQ ID NO: 12257 - protein, 6 aa, synthetic construct
PQEPDF

SEQ ID NO: 12258 - protein, 6 aa, synthetic construct
PQEPDW

SEQ ID NO: 12259 - protein, 6 aa, synthetic construct
PQEPDY

SEQ ID NO: 12260 - protein, 6 aa, synthetic construct
PQEPCD

SEQ ID NO: 12261 - protein, 6 aa, synthetic construct
PQEPCE

SEQ ID NO: 12262 - protein, 6 aa, synthetic construct
PQEPCF

SEQ ID NO: 12263 - protein, 6 aa, synthetic construct
PQEPCW

SEQ ID NO: 12264 - protein, 6 aa, synthetic construct
PQEPCY

SEQ ID NO: 12265 - protein, 6 aa, synthetic construct
PQEPQD

SEQ ID NO: 12266 - protein, 6 aa, synthetic construct
PQEPQE

SEQ ID NO: 12267 - protein, 6 aa, synthetic construct
PQEPQF

SEQ ID NO: 12268 - protein, 6 aa, synthetic construct
PQEPQW

SEQ ID NO: 12269 - protein, 6 aa, synthetic construct
PQEPQY

SEQ ID NO: 12270 - protein, 6 aa, synthetic construct
PQEPED

SEQ ID NO: 12271 - protein, 6 aa, synthetic construct
PQEPEE

SEQ ID NO: 12272 - protein, 6 aa, synthetic construct
PQEPEF

SEQ ID NO: 12273 - protein, 6 aa, synthetic construct
PQEPEW

SEQ ID NO: 12274 - protein, 6 aa, synthetic construct
PQEPEY

SEQ ID NO: 12275 - protein, 6 aa, synthetic construct
PQEPGD

SEQ ID NO: 12276 - protein, 6 aa, synthetic construct
PQEPGE

SEQ ID NO: 12277 - protein, 6 aa, synthetic construct
PQEPGF

SEQ ID NO: 12278 - protein, 6 aa, synthetic construct
PQEPGW

SEQ ID NO: 12279 - protein, 6 aa, synthetic construct
PQEPGY

SEQ ID NO: 12280 - protein, 6 aa, synthetic construct
PQEPHD

SEQ ID NO: 12281 - protein, 6 aa, synthetic construct
PQEPHE

SEQ ID NO: 12282 - protein, 6 aa, synthetic construct
PQEPHF

SEQ ID NO: 12283 - protein, 6 aa, synthetic construct
PQEPHW

SEQ ID NO: 12284 - protein, 6 aa, synthetic construct
PQEPHY

SEQ ID NO: 12285 - protein, 6 aa, synthetic construct
PQEPID

SEQ ID NO: 12286 - protein, 6 aa, synthetic construct
PQEPIE

SEQ ID NO: 12287 - protein, 6 aa, synthetic construct
PQEPIF

SEQ ID NO: 12288 - protein, 6 aa, synthetic construct
PQEPIW

SEQ ID NO: 12289 - protein, 6 aa, synthetic construct
PQEPIY

SEQ ID NO: 12290 - protein, 6 aa, synthetic construct
PQEPLD

SEQ ID NO: 12291 - protein, 6 aa, synthetic construct
PQEPLE

SEQ ID NO: 12292 - protein, 6 aa, synthetic construct
PQEPLF

SEQ ID NO: 12293 - protein, 6 aa, synthetic construct
PQEPLW

SEQ ID NO: 12294 - protein, 6 aa, synthetic construct
PQEPLY

SEQ ID NO: 12295 - protein, 6 aa, synthetic construct
PQEPKD

SEQ ID NO: 12296 - protein, 6 aa, synthetic construct
PQEPKE

SEQ ID NO: 12297 - protein, 6 aa, synthetic construct
PQEPKF

SEQ ID NO: 12298 - protein, 6 aa, synthetic construct
PQEPKW

SEQ ID NO: 12299 - protein, 6 aa, synthetic construct
PQEPKY

SEQ ID NO: 12300 - protein, 6 aa, synthetic construct
PQEPMD

SEQ ID NO: 12301 - protein, 6 aa, synthetic construct
PQEPME

SEQ ID NO: 12302 - protein, 6 aa, synthetic construct
PQEPMF

SEQ ID NO: 12303 - protein, 6 aa, synthetic construct
PQEPMW

SEQ ID NO: 12304 - protein, 6 aa, synthetic construct
PQEPMY

SEQ ID NO: 12305 - protein, 6 aa, synthetic construct
PQEPFD

SEQ ID NO: 12306 - protein, 6 aa, synthetic construct
PQEPFE

SEQ ID NO: 12307 - protein, 6 aa, synthetic construct
PQEPFF

SEQ ID NO: 12308 - protein, 6 aa, synthetic construct
PQEPFW

SEQ ID NO: 12309 - protein, 6 aa, synthetic construct
PQEPFY

SEQ ID NO: 12310 - protein, 6 aa, synthetic construct
PQEPPD

SEQ ID NO: 12311 - protein, 6 aa, synthetic construct
PQEPPE

SEQ ID NO: 12312 - protein, 6 aa, synthetic construct
PQEPPF

SEQ ID NO: 12313 - protein, 6 aa, synthetic construct
PQEPPW

SEQ ID NO: 12314 - protein, 6 aa, synthetic construct
PQEPPY

SEQ ID NO: 12315 - protein, 6 aa, synthetic construct
PQEPSD

SEQ ID NO: 12316 - protein, 6 aa, synthetic construct
PQEPSE

SEQ ID NO: 12317 - protein, 6 aa, synthetic construct
PQEPSF

SEQ ID NO: 12318 - protein, 6 aa, synthetic construct
PQEPSW

SEQ ID NO: 12319 - protein, 6 aa, synthetic construct
PQEPSY

SEQ ID NO: 12320 - protein, 6 aa, synthetic construct
PQEPTD

SEQ ID NO: 12321 - protein, 6 aa, synthetic construct
PQEPTE

SEQ ID NO: 12322 - protein, 6 aa, synthetic construct
PQEPTF

SEQ ID NO: 12323 - protein, 6 aa, synthetic construct
PQEPTW

SEQ ID NO: 12324 - protein, 6 aa, synthetic construct
PQEPTY

SEQ ID NO: 12325 - protein, 6 aa, synthetic construct
PQEPWD

SEQ ID NO: 12326 - protein, 6 aa, synthetic construct
PQEPWE

SEQ ID NO: 12327 - protein, 6 aa, synthetic construct
PQEPWF

SEQ ID NO: 12328 - protein, 6 aa, synthetic construct
PQEPWW

SEQ ID NO: 12329 - protein, 6 aa, synthetic construct
PQEPWY

SEQ ID NO: 12330 - protein, 6 aa, synthetic construct
PQEPYD

SEQ ID NO: 12331 - protein, 6 aa, synthetic construct
PQEPYE

SEQ ID NO: 12332 - protein, 6 aa, synthetic construct
PQEPYF

SEQ ID NO: 12333 - protein, 6 aa, synthetic construct
PQEPYW

SEQ ID NO: 12334 - protein, 6 aa, synthetic construct
PQEPYY

SEQ ID NO: 12335 - protein, 6 aa, synthetic construct
PQEPVD

SEQ ID NO: 12336 - protein, 6 aa, synthetic construct
PQEPVE

SEQ ID NO: 12337 - protein, 6 aa, synthetic construct
PQEPVF

SEQ ID NO: 12338 - protein, 6 aa, synthetic construct
PQEPVW

SEQ ID NO: 12339 - protein, 6 aa, synthetic construct
PQEPVY

SEQ ID NO: 12340 - protein, 6 aa, synthetic construct
PQESAD

SEQ ID NO: 12341 - protein, 6 aa, synthetic construct
PQESAE

SEQ ID NO: 12342 - protein, 6 aa, synthetic construct
PQESAF

SEQ ID NO: 12343 - protein, 6 aa, synthetic construct
PQESAW

SEQ ID NO: 12344 - protein, 6 aa, synthetic construct
PQESAY

SEQ ID NO: 12345 - protein, 6 aa, synthetic construct
PQESRD

SEQ ID NO: 12346 - protein, 6 aa, synthetic construct
PQESRE

SEQ ID NO: 12347 - protein, 6 aa, synthetic construct
PQESRF

SEQ ID NO: 12348 - protein, 6 aa, synthetic construct
PQESRW

SEQ ID NO: 12349 - protein, 6 aa, synthetic construct
PQESRY

SEQ ID NO: 12350 - protein, 6 aa, synthetic construct
PQESND

SEQ ID NO: 12351 - protein, 6 aa, synthetic construct
PQESNE

SEQ ID NO: 12352 - protein, 6 aa, synthetic construct
PQESNF

SEQ ID NO: 12353 - protein, 6 aa, synthetic construct
PQESNW

SEQ ID NO: 12354 - protein, 6 aa, synthetic construct
PQESNY

SEQ ID NO: 12355 - protein, 6 aa, synthetic construct
PQESDD

SEQ ID NO: 12356 - protein, 6 aa, synthetic construct
PQESDE

SEQ ID NO: 12357 - protein, 6 aa, synthetic construct
PQESDF

SEQ ID NO: 12358 - protein, 6 aa, synthetic construct
PQESDW

SEQ ID NO: 12359 - protein, 6 aa, synthetic construct
PQESDY

SEQ ID NO: 12360 - protein, 6 aa, synthetic construct
PQESCD

SEQ ID NO: 12361 - protein, 6 aa, synthetic construct
PQESCE

SEQ ID NO: 12362 - protein, 6 aa, synthetic construct
PQESCF

SEQ ID NO: 12363 - protein, 6 aa, synthetic construct
PQESCW

SEQ ID NO: 12364 - protein, 6 aa, synthetic construct
PQESCY

SEQ ID NO: 12365 - protein, 6 aa, synthetic construct
PQESQD

SEQ ID NO: 12366 - protein, 6 aa, synthetic construct
PQESQE

SEQ ID NO: 12367 - protein, 6 aa, synthetic construct
PQESQF

SEQ ID NO: 12368 - protein, 6 aa, synthetic construct
PQESQW

SEQ ID NO: 12369 - protein, 6 aa, synthetic construct
PQESQY

SEQ ID NO: 12370 - protein, 6 aa, synthetic construct
PQESED

SEQ ID NO: 12371 - protein, 6 aa, synthetic construct
PQESEE

SEQ ID NO: 12372 - protein, 6 aa, synthetic construct
PQESEF

SEQ ID NO: 12373 - protein, 6 aa, synthetic construct
PQESEW

SEQ ID NO: 12374 - protein, 6 aa, synthetic construct
PQESEY

SEQ ID NO: 12375 - protein, 6 aa, synthetic construct
PQESGD

SEQ ID NO: 12376 - protein, 6 aa, synthetic construct
PQESGE

SEQ ID NO: 12377 - protein, 6 aa, synthetic construct
PQESGF

SEQ ID NO: 12378 - protein, 6 aa, synthetic construct
PQESGW

SEQ ID NO: 12379 - protein, 6 aa, synthetic construct
PQESGY

SEQ ID NO: 12380 - protein, 6 aa, synthetic construct
PQESHD

SEQ ID NO: 12381 - protein, 6 aa, synthetic construct
PQESHE

SEQ ID NO: 12382 - protein, 6 aa, synthetic construct
PQESHF

SEQ ID NO: 12383 - protein, 6 aa, synthetic construct
PQESHW

SEQ ID NO: 12384 - protein, 6 aa, synthetic construct
PQESHY

SEQ ID NO: 12385 - protein, 6 aa, synthetic construct
PQESID

SEQ ID NO: 12386 - protein, 6 aa, synthetic construct
PQESIE

SEQ ID NO: 12387 - protein, 6 aa, synthetic construct
PQESIF

SEQ ID NO: 12388 - protein, 6 aa, synthetic construct
PQESIW

SEQ ID NO: 12389 - protein, 6 aa, synthetic construct
PQESIY

SEQ ID NO: 12390 - protein, 6 aa, synthetic construct
PQESLD

SEQ ID NO: 12391 - protein, 6 aa, synthetic construct
PQESLE

SEQ ID NO: 12392 - protein, 6 aa, synthetic construct
PQESLF

SEQ ID NO: 12393 - protein, 6 aa, synthetic construct
PQESLW

SEQ ID NO: 12394 - protein, 6 aa, synthetic construct
PQESLY

SEQ ID NO: 12395 - protein, 6 aa, synthetic construct
PQESKD

SEQ ID NO: 12396 - protein, 6 aa, synthetic construct
PQESKE

SEQ ID NO: 12397 - protein, 6 aa, synthetic construct
PQESKF

SEQ ID NO: 12398 - protein, 6 aa, synthetic construct
PQESKW

SEQ ID NO: 12399 - protein, 6 aa, synthetic construct
PQESKY

SEQ ID NO: 12400 - protein, 6 aa, synthetic construct
PQESMD

SEQ ID NO: 12401 - protein, 6 aa, synthetic construct
PQESME

SEQ ID NO: 12402 - protein, 6 aa, synthetic construct
PQESMF

SEQ ID NO: 12403 - protein, 6 aa, synthetic construct
PQESMW

SEQ ID NO: 12404 - protein, 6 aa, synthetic construct
PQESMY

SEQ ID NO: 12405 - protein, 6 aa, synthetic construct
PQESFD

SEQ ID NO: 12406 - protein, 6 aa, synthetic construct
PQESFE

SEQ ID NO: 12407 - protein, 6 aa, synthetic construct
PQESFF

SEQ ID NO: 12408 - protein, 6 aa, synthetic construct
PQESFW

SEQ ID NO: 12409 - protein, 6 aa, synthetic construct
PQESFY

SEQ ID NO: 12410 - protein, 6 aa, synthetic construct
PQESPD

SEQ ID NO: 12411 - protein, 6 aa, synthetic construct
PQESPE

SEQ ID NO: 12412 - protein, 6 aa, synthetic construct
PQESPF

SEQ ID NO: 12413 - protein, 6 aa, synthetic construct
PQESPW

SEQ ID NO: 12414 - protein, 6 aa, synthetic construct
PQESPY

SEQ ID NO: 12415 - protein, 6 aa, synthetic construct
PQESSD

SEQ ID NO: 12416 - protein, 6 aa, synthetic construct
PQESSE

SEQ ID NO: 12417 - protein, 6 aa, synthetic construct
PQESSF

SEQ ID NO: 12418 - protein, 6 aa, synthetic construct
PQESSW

SEQ ID NO: 12419 - protein, 6 aa, synthetic construct
PQESSY

SEQ ID NO: 12420 - protein, 6 aa, synthetic construct
PQESTD

SEQ ID NO: 12421 - protein, 6 aa, synthetic construct
PQESTE

SEQ ID NO: 12422 - protein, 6 aa, synthetic construct
PQESTF

SEQ ID NO: 12423 - protein, 6 aa, synthetic construct
PQESTW

SEQ ID NO: 12424 - protein, 6 aa, synthetic construct
PQESTY

SEQ ID NO: 12425 - protein, 6 aa, synthetic construct
PQESWD

SEQ ID NO: 12426 - protein, 6 aa, synthetic construct
PQESWE

SEQ ID NO: 12427 - protein, 6 aa, synthetic construct
PQESWF

SEQ ID NO: 12428 - protein, 6 aa, synthetic construct
PQESWW

SEQ ID NO: 12429 - protein, 6 aa, synthetic construct
PQESWY

SEQ ID NO: 12430 - protein, 6 aa, synthetic construct
PQESYD

SEQ ID NO: 12431 - protein, 6 aa, synthetic construct
PQESYE

SEQ ID NO: 12432 - protein, 6 aa, synthetic construct
PQESYF

SEQ ID NO: 12433 - protein, 6 aa, synthetic construct
PQESYW

SEQ ID NO: 12434 - protein, 6 aa, synthetic construct
PQESYY

SEQ ID NO: 12435 - protein, 6 aa, synthetic construct
PQESVD

SEQ ID NO: 12436 - protein, 6 aa, synthetic construct
PQESVE

SEQ ID NO: 12437 - protein, 6 aa, synthetic construct
PQESVF

SEQ ID NO: 12438 - protein, 6 aa, synthetic construct
PQESVW

SEQ ID NO: 12439 - protein, 6 aa, synthetic construct
PQESVY

SEQ ID NO: 12440 - protein, 6 aa, synthetic construct
PQETAD

SEQ ID NO: 12441 - protein, 6 aa, synthetic construct
PQETAE

SEQ ID NO: 12442 - protein, 6 aa, synthetic construct
PQETAF

SEQ ID NO: 12443 - protein, 6 aa, synthetic construct
PQETAW

SEQ ID NO: 12444 - protein, 6 aa, synthetic construct
PQETAY

SEQ ID NO: 12445 - protein, 6 aa, synthetic construct
PQETRD

SEQ ID NO: 12446 - protein, 6 aa, synthetic construct
PQETRE

SEQ ID NO: 12447 - protein, 6 aa, synthetic construct
PQETRF

SEQ ID NO: 12448 - protein, 6 aa, synthetic construct
PQETRW

SEQ ID NO: 12449 - protein, 6 aa, synthetic construct
PQETRY

SEQ ID NO: 12450 - protein, 6 aa, synthetic construct
PQETND

SEQ ID NO: 12451 - protein, 6 aa, synthetic construct
PQETNE

SEQ ID NO: 12452 - protein, 6 aa, synthetic construct
PQETNF

SEQ ID NO: 12453 - protein, 6 aa, synthetic construct
PQETNW

SEQ ID NO: 12454 - protein, 6 aa, synthetic construct
PQETNY

SEQ ID NO: 12455 - protein, 6 aa, synthetic construct
PQETDD

SEQ ID NO: 12456 - protein, 6 aa, synthetic construct
PQETDE

SEQ ID NO: 12457 - protein, 6 aa, synthetic construct
PQETDF

SEQ ID NO: 12458 - protein, 6 aa, synthetic construct
PQETDW

SEQ ID NO: 12459 - protein, 6 aa, synthetic construct
PQETDY

SEQ ID NO: 12460 - protein, 6 aa, synthetic construct
PQETCD

SEQ ID NO: 12461 - protein, 6 aa, synthetic construct
PQETCE

SEQ ID NO: 12462 - protein, 6 aa, synthetic construct
PQETCF

SEQ ID NO: 12463 - protein, 6 aa, synthetic construct
PQETCW

SEQ ID NO: 12464 - protein, 6 aa, synthetic construct
PQETCY

SEQ ID NO: 12465 - protein, 6 aa, synthetic construct
PQETQD

SEQ ID NO: 12466 - protein, 6 aa, synthetic construct
PQETQE

SEQ ID NO: 12467 - protein, 6 aa, synthetic construct
PQETQF

SEQ ID NO: 12468 - protein, 6 aa, synthetic construct
PQETQW

SEQ ID NO: 12469 - protein, 6 aa, synthetic construct
PQETQY

SEQ ID NO: 12470 - protein, 6 aa, synthetic construct
PQETED

SEQ ID NO: 12471 - protein, 6 aa, synthetic construct
PQETEE

SEQ ID NO: 12472 - protein, 6 aa, synthetic construct
PQETEF

SEQ ID NO: 12473 - protein, 6 aa, synthetic construct
PQETEW

SEQ ID NO: 12474 - protein, 6 aa, synthetic construct
PQETEY

SEQ ID NO: 12475 - protein, 6 aa, synthetic construct
PQETGD

SEQ ID NO: 12476 - protein, 6 aa, synthetic construct
PQETGE

SEQ ID NO: 12477 - protein, 6 aa, synthetic construct
PQETGF

SEQ ID NO: 12478 - protein, 6 aa, synthetic construct
PQETGW

SEQ ID NO: 12479 - protein, 6 aa, synthetic construct
PQETGY

SEQ ID NO: 12480 - protein, 6 aa, synthetic construct
PQETHD

SEQ ID NO: 12481 - protein, 6 aa, synthetic construct
PQETHE

SEQ ID NO: 12482 - protein, 6 aa, synthetic construct
PQETHF

SEQ ID NO: 12483 - protein, 6 aa, synthetic construct
PQETHW

SEQ ID NO: 12484 - protein, 6 aa, synthetic construct
PQETHY

SEQ ID NO: 12485 - protein, 6 aa, synthetic construct
PQETID

SEQ ID NO: 12486 - protein, 6 aa, synthetic construct
PQETIE

SEQ ID NO: 12487 - protein, 6 aa, synthetic construct
PQETIF

SEQ ID NO: 12488 - protein, 6 aa, synthetic construct
PQETIW

SEQ ID NO: 12489 - protein, 6 aa, synthetic construct
PQETIY

SEQ ID NO: 12490 - protein, 6 aa, synthetic construct
PQETLD

SEQ ID NO: 12491 - protein, 6 aa, synthetic construct
PQETLE

SEQ ID NO: 12492 - protein, 6 aa, synthetic construct
PQETLF

SEQ ID NO: 12493 - protein, 6 aa, synthetic construct
PQETLW

SEQ ID NO: 12494 - protein, 6 aa, synthetic construct
PQETLY

SEQ ID NO: 12495 - protein, 6 aa, synthetic construct
PQETKD

SEQ ID NO: 12496 - protein, 6 aa, synthetic construct
PQETKE

SEQ ID NO: 12497 - protein, 6 aa, synthetic construct
PQETKF

SEQ ID NO: 12498 - protein, 6 aa, synthetic construct
PQETKW

SEQ ID NO: 12499 - protein, 6 aa, synthetic construct
PQETKY

SEQ ID NO: 12500 - protein, 6 aa, synthetic construct
PQETMD

SEQ ID NO: 12501 - protein, 6 aa, synthetic construct
PQETME

SEQ ID NO: 12502 - protein, 6 aa, synthetic construct
PQETMF

SEQ ID NO: 12503 - protein, 6 aa, synthetic construct
PQETMW

SEQ ID NO: 12504 - protein, 6 aa, synthetic construct
PQETMY

SEQ ID NO: 12505 - protein, 6 aa, synthetic construct
PQETFD

SEQ ID NO: 12506 - protein, 6 aa, synthetic construct
PQETFE

SEQ ID NO: 12507 - protein, 6 aa, synthetic construct
PQETFF

SEQ ID NO: 12508 - protein, 6 aa, synthetic construct
PQETFW

SEQ ID NO: 12509 - protein, 6 aa, synthetic construct
PQETFY

SEQ ID NO: 12510 - protein, 6 aa, synthetic construct
PQETPD

SEQ ID NO: 12511 - protein, 6 aa, synthetic construct
PQETPE

SEQ ID NO: 12512 - protein, 6 aa, synthetic construct
PQETPF

SEQ ID NO: 12513 - protein, 6 aa, synthetic construct
PQETPW

SEQ ID NO: 12514 - protein, 6 aa, synthetic construct
PQETPY

SEQ ID NO: 12515 - protein, 6 aa, synthetic construct
PQETSD

SEQ ID NO: 12516 - protein, 6 aa, synthetic construct
PQETSE

SEQ ID NO: 12517 - protein, 6 aa, synthetic construct
PQETSF

SEQ ID NO: 12518 - protein, 6 aa, synthetic construct
PQETSW

SEQ ID NO: 12519 - protein, 6 aa, synthetic construct
PQETSY

SEQ ID NO: 12520 - protein, 6 aa, synthetic construct
PQETTD

SEQ ID NO: 12521 - protein, 6 aa, synthetic construct
PQETTE

SEQ ID NO: 12522 - protein, 6 aa, synthetic construct
PQETTF

SEQ ID NO: 12523 - protein, 6 aa, synthetic construct
PQETTW

SEQ ID NO: 12524 - protein, 6 aa, synthetic construct
PQETTY

SEQ ID NO: 12525 - protein, 6 aa, synthetic construct
PQETWD

SEQ ID NO: 12526 - protein, 6 aa, synthetic construct
PQETWE

SEQ ID NO: 12527 - protein, 6 aa, synthetic construct
PQETWF

SEQ ID NO: 12528 - protein, 6 aa, synthetic construct
PQETWW

SEQ ID NO: 12529 - protein, 6 aa, synthetic construct
PQETWY

SEQ ID NO: 12530 - protein, 6 aa, synthetic construct
PQETYD

SEQ ID NO: 12531 - protein, 6 aa, synthetic construct
PQETYE

SEQ ID NO: 12532 - protein, 6 aa, synthetic construct
PQETYF

SEQ ID NO: 12533 - protein, 6 aa, synthetic construct
PQETYW

SEQ ID NO: 12534 - protein, 6 aa, synthetic construct
PQETYY

SEQ ID NO: 12535 - protein, 6 aa, synthetic construct
PQETVD

SEQ ID NO: 12536 - protein, 6 aa, synthetic construct
PQETVE

SEQ ID NO: 12537 - protein, 6 aa, synthetic construct
PQETVF

SEQ ID NO: 12538 - protein, 6 aa, synthetic construct
PQETVW

SEQ ID NO: 12539 - protein, 6 aa, synthetic construct
PQETVY

SEQ ID NO: 12540 - protein, 6 aa, synthetic construct
PQEWAD

SEQ ID NO: 12541 - protein, 6 aa, synthetic construct
PQEWAE

SEQ ID NO: 12542 - protein, 6 aa, synthetic construct
PQEWAF

SEQ ID NO: 12543 - protein, 6 aa, synthetic construct
PQEWAW

SEQ ID NO: 12544 - protein, 6 aa, synthetic construct
PQEWAY

SEQ ID NO: 12545 - protein, 6 aa, synthetic construct
PQEWRD

SEQ ID NO: 12546 - protein, 6 aa, synthetic construct
PQEWRE

SEQ ID NO: 12547 - protein, 6 aa, synthetic construct
PQEWRF

SEQ ID NO: 12548 - protein, 6 aa, synthetic construct
PQEWRW

SEQ ID NO: 12549 - protein, 6 aa, synthetic construct
PQEWRY

SEQ ID NO: 12550 - protein, 6 aa, synthetic construct
PQEWND

SEQ ID NO: 12551 - protein, 6 aa, synthetic construct
PQEWNE

SEQ ID NO: 12552 - protein, 6 aa, synthetic construct
PQEWNF

SEQ ID NO: 12553 - protein, 6 aa, synthetic construct
PQEWNW

SEQ ID NO: 12554 - protein, 6 aa, synthetic construct
PQEWNY

SEQ ID NO: 12555 - protein, 6 aa, synthetic construct
PQEWDD

SEQ ID NO: 12556 - protein, 6 aa, synthetic construct
PQEWDE

SEQ ID NO: 12557 - protein, 6 aa, synthetic construct
PQEWDF

SEQ ID NO: 12558 - protein, 6 aa, synthetic construct
PQEWDW

SEQ ID NO: 12559 - protein, 6 aa, synthetic construct
PQEWDY

SEQ ID NO: 12560 - protein, 6 aa, synthetic construct
PQEWCD

SEQ ID NO: 12561 - protein, 6 aa, synthetic construct
PQEWCE

SEQ ID NO: 12562 - protein, 6 aa, synthetic construct
PQEWCF

SEQ ID NO: 12563 - protein, 6 aa, synthetic construct
PQEWCW

SEQ ID NO: 12564 - protein, 6 aa, synthetic construct
PQEWCY

SEQ ID NO: 12565 - protein, 6 aa, synthetic construct
PQEWQD

SEQ ID NO: 12566 - protein, 6 aa, synthetic construct
PQEWQE

SEQ ID NO: 12567 - protein, 6 aa, synthetic construct
PQEWQF

SEQ ID NO: 12568 - protein, 6 aa, synthetic construct
PQEWQW

SEQ ID NO: 12569 - protein, 6 aa, synthetic construct
PQEWQY

SEQ ID NO: 12570 - protein, 6 aa, synthetic construct
PQEWED

SEQ ID NO: 12571 - protein, 6 aa, synthetic construct
PQEWEE

SEQ ID NO: 12572 - protein, 6 aa, synthetic construct
PQEWEF

SEQ ID NO: 12573 - protein, 6 aa, synthetic construct
PQEWEW

SEQ ID NO: 12574 - protein, 6 aa, synthetic construct
PQEWEY

SEQ ID NO: 12575 - protein, 6 aa, synthetic construct
PQEWGD

SEQ ID NO: 12576 - protein, 6 aa, synthetic construct
PQEWGE

SEQ ID NO: 12577 - protein, 6 aa, synthetic construct
PQEWGF

SEQ ID NO: 12578 - protein, 6 aa, synthetic construct
PQEWGW

SEQ ID NO: 12579 - protein, 6 aa, synthetic construct
PQEWGY

SEQ ID NO: 12580 - protein, 6 aa, synthetic construct
PQEWHD

SEQ ID NO: 12581 - protein, 6 aa, synthetic construct
PQEWHE

SEQ ID NO: 12582 - protein, 6 aa, synthetic construct
PQEWHF

SEQ ID NO: 12583 - protein, 6 aa, synthetic construct
PQEWHW

SEQ ID NO: 12584 - protein, 6 aa, synthetic construct
PQEWHY

SEQ ID NO: 12585 - protein, 6 aa, synthetic construct
PQEWID

SEQ ID NO: 12586 - protein, 6 aa, synthetic construct
PQEWIE

SEQ ID NO: 12587 - protein, 6 aa, synthetic construct
PQEWIF

SEQ ID NO: 12588 - protein, 6 aa, synthetic construct
PQEWIW

SEQ ID NO: 12589 - protein, 6 aa, synthetic construct
PQEWIY

SEQ ID NO: 12590 - protein, 6 aa, synthetic construct
PQEWLD

SEQ ID NO: 12591 - protein, 6 aa, synthetic construct
PQEWLE

SEQ ID NO: 12592 - protein, 6 aa, synthetic construct
PQEWLF

SEQ ID NO: 12593 - protein, 6 aa, synthetic construct
PQEWLW

SEQ ID NO: 12594 - protein, 6 aa, synthetic construct
PQEWLY

SEQ ID NO: 12595 - protein, 6 aa, synthetic construct
PQEWKD

SEQ ID NO: 12596 - protein, 6 aa, synthetic construct
PQEWKE

SEQ ID NO: 12597 - protein, 6 aa, synthetic construct
PQEWKF

SEQ ID NO: 12598 - protein, 6 aa, synthetic construct
PQEWKW

SEQ ID NO: 12599 - protein, 6 aa, synthetic construct
PQEWKY

SEQ ID NO: 12600 - protein, 6 aa, synthetic construct
PQEWMD

SEQ ID NO: 12601 - protein, 6 aa, synthetic construct
PQEWME

SEQ ID NO: 12602 - protein, 6 aa, synthetic construct
PQEWMF

SEQ ID NO: 12603 - protein, 6 aa, synthetic construct
PQEWMW

SEQ ID NO: 12604 - protein, 6 aa, synthetic construct
PQEWMY

SEQ ID NO: 12605 - protein, 6 aa, synthetic construct
PQEWFD

SEQ ID NO: 12606 - protein, 6 aa, synthetic construct
PQEWFE

SEQ ID NO: 12607 - protein, 6 aa, synthetic construct
PQEWFF

SEQ ID NO: 12608 - protein, 6 aa, synthetic construct
PQEWFW

SEQ ID NO: 12609 - protein, 6 aa, synthetic construct
PQEWFY

SEQ ID NO: 12610 - protein, 6 aa, synthetic construct
PQEWPD

SEQ ID NO: 12611 - protein, 6 aa, synthetic construct
PQEWPE

SEQ ID NO: 12612 - protein, 6 aa, synthetic construct
PQEWPF

SEQ ID NO: 12613 - protein, 6 aa, synthetic construct
PQEWPW

SEQ ID NO: 12614 - protein, 6 aa, synthetic construct
PQEWPY

SEQ ID NO: 12615 - protein, 6 aa, synthetic construct
PQEWSD

SEQ ID NO: 12616 - protein, 6 aa, synthetic construct
PQEWSE

SEQ ID NO: 12617 - protein, 6 aa, synthetic construct
PQEWSF

SEQ ID NO: 12618 - protein, 6 aa, synthetic construct
PQEWSW

SEQ ID NO: 12619 - protein, 6 aa, synthetic construct
PQEWSY

SEQ ID NO: 12620 - protein, 6 aa, synthetic construct
PQEWTD

SEQ ID NO: 12621 - protein, 6 aa, synthetic construct
PQEWTE

SEQ ID NO: 12622 - protein, 6 aa, synthetic construct
PQEWTF

SEQ ID NO: 12623 - protein, 6 aa, synthetic construct
PQEWTW

SEQ ID NO: 12624 - protein, 6 aa, synthetic construct
PQEWTY

SEQ ID NO: 12625 - protein, 6 aa, synthetic construct
PQEWWD

SEQ ID NO: 12626 - protein, 6 aa, synthetic construct
PQEWWE

SEQ ID NO: 12627 - protein, 6 aa, synthetic construct
PQEWWF

SEQ ID NO: 12628 - protein, 6 aa, synthetic construct
PQEWWW

SEQ ID NO: 12629 - protein, 6 aa, synthetic construct
PQEWWY

SEQ ID NO: 12630 - protein, 6 aa, synthetic construct
PQEWYD

SEQ ID NO: 12631 - protein, 6 aa, synthetic construct
PQEWYE

SEQ ID NO: 12632 - protein, 6 aa, synthetic construct
PQEWYF

SEQ ID NO: 12633 - protein, 6 aa, synthetic construct
PQEWYW

SEQ ID NO: 12634 - protein, 6 aa, synthetic construct
PQEWYY

SEQ ID NO: 12635 - protein, 6 aa, synthetic construct
PQEWVD

SEQ ID NO: 12636 - protein, 6 aa, synthetic construct
PQEWVE

SEQ ID NO: 12637 - protein, 6 aa, synthetic construct
PQEWVF

SEQ ID NO: 12638 - protein, 6 aa, synthetic construct
PQEWVW

SEQ ID NO: 12639 - protein, 6 aa, synthetic construct
PQEWVY

SEQ ID NO: 12640 - protein, 6 aa, synthetic construct
PQEYAD

SEQ ID NO: 12641 - protein, 6 aa, synthetic construct
PQEYAE

SEQ ID NO: 12642 - protein, 6 aa, synthetic construct
PQEYAF

SEQ ID NO: 12643 - protein, 6 aa, synthetic construct
PQEYAW

SEQ ID NO: 12644 - protein, 6 aa, synthetic construct
PQEYAY

SEQ ID NO: 12645 - protein, 6 aa, synthetic construct
PQEYRD

SEQ ID NO: 12646 - protein, 6 aa, synthetic construct
PQEYRE

SEQ ID NO: 12647 - protein, 6 aa, synthetic construct
PQEYRF

SEQ ID NO: 12648 - protein, 6 aa, synthetic construct
PQEYRW

SEQ ID NO: 12649 - protein, 6 aa, synthetic construct
PQEYRY

SEQ ID NO: 12650 - protein, 6 aa, synthetic construct
PQEYND

SEQ ID NO: 12651 - protein, 6 aa, synthetic construct
PQEYNE

SEQ ID NO: 12652 - protein, 6 aa, synthetic construct
PQEYNF

SEQ ID NO: 12653 - protein, 6 aa, synthetic construct
PQEYNW

SEQ ID NO: 12654 - protein, 6 aa, synthetic construct
PQEYNY

SEQ ID NO: 12655 - protein, 6 aa, synthetic construct
PQEYDD

SEQ ID NO: 12656 - protein, 6 aa, synthetic construct
PQEYDE

SEQ ID NO: 12657 - protein, 6 aa, synthetic construct
PQEYDF

SEQ ID NO: 12658 - protein, 6 aa, synthetic construct
PQEYDW

SEQ ID NO: 12659 - protein, 6 aa, synthetic construct
PQEYDY

SEQ ID NO: 12660 - protein, 6 aa, synthetic construct
PQEYCD

SEQ ID NO: 12661 - protein, 6 aa, synthetic construct
PQEYCE

SEQ ID NO: 12662 - protein, 6 aa, synthetic construct
PQEYCF

SEQ ID NO: 12663 - protein, 6 aa, synthetic construct
PQEYCW

SEQ ID NO: 12664 - protein, 6 aa, synthetic construct
PQEYCY

SEQ ID NO: 12665 - protein, 6 aa, synthetic construct
PQEYQD

SEQ ID NO: 12666 - protein, 6 aa, synthetic construct
PQEYQE

SEQ ID NO: 12667 - protein, 6 aa, synthetic construct
PQEYQF

SEQ ID NO: 12668 - protein, 6 aa, synthetic construct
PQEYQW

SEQ ID NO: 12669 - protein, 6 aa, synthetic construct
PQEYQY

SEQ ID NO: 12670 - protein, 6 aa, synthetic construct
PQEYED

SEQ ID NO: 12671 - protein, 6 aa, synthetic construct
PQEYEE

SEQ ID NO: 12672 - protein, 6 aa, synthetic construct
PQEYEF

SEQ ID NO: 12673 - protein, 6 aa, synthetic construct
PQEYEW

SEQ ID NO: 12674 - protein, 6 aa, synthetic construct
PQEYEY

SEQ ID NO: 12675 - protein, 6 aa, synthetic construct
PQEYGD

SEQ ID NO: 12676 - protein, 6 aa, synthetic construct
PQEYGE

SEQ ID NO: 12677 - protein, 6 aa, synthetic construct
PQEYGF

SEQ ID NO: 12678 - protein, 6 aa, synthetic construct
PQEYGW

SEQ ID NO: 12679 - protein, 6 aa, synthetic construct
PQEYGY

SEQ ID NO: 12680 - protein, 6 aa, synthetic construct
PQEYHD

SEQ ID NO: 12681 - protein, 6 aa, synthetic construct
PQEYHE

SEQ ID NO: 12682 - protein, 6 aa, synthetic construct
PQEYHF

SEQ ID NO: 12683 - protein, 6 aa, synthetic construct
PQEYHW

SEQ ID NO: 12684 - protein, 6 aa, synthetic construct
PQEYHY

SEQ ID NO: 12685 - protein, 6 aa, synthetic construct
PQEYID

SEQ ID NO: 12686 - protein, 6 aa, synthetic construct
PQEYIE

SEQ ID NO: 12687 - protein, 6 aa, synthetic construct
PQEYIF

SEQ ID NO: 12688 - protein, 6 aa, synthetic construct
PQEYIW

SEQ ID NO: 12689 - protein, 6 aa, synthetic construct
PQEYIY

SEQ ID NO: 12690 - protein, 6 aa, synthetic construct
PQEYLD

SEQ ID NO: 12691 - protein, 6 aa, synthetic construct
PQEYLE

SEQ ID NO: 12692 - protein, 6 aa, synthetic construct
PQEYLF

SEQ ID NO: 12693 - protein, 6 aa, synthetic construct
PQEYLW

SEQ ID NO: 12694 - protein, 6 aa, synthetic construct
PQEYLY

SEQ ID NO: 12695 - protein, 6 aa, synthetic construct
PQEYKD

SEQ ID NO: 12696 - protein, 6 aa, synthetic construct
PQEYKE

SEQ ID NO: 12697 - protein, 6 aa, synthetic construct
PQEYKF

SEQ ID NO: 12698 - protein, 6 aa, synthetic construct
PQEYKW

SEQ ID NO: 12699 - protein, 6 aa, synthetic construct
PQEYKY

SEQ ID NO: 12700 - protein, 6 aa, synthetic construct
PQEYMD

SEQ ID NO: 12701 - protein, 6 aa, synthetic construct
PQEYME

SEQ ID NO: 12702 - protein, 6 aa, synthetic construct
PQEYMF

SEQ ID NO: 12703 - protein, 6 aa, synthetic construct
PQEYMW

SEQ ID NO: 12704 - protein, 6 aa, synthetic construct
PQEYMY

SEQ ID NO: 12705 - protein, 6 aa, synthetic construct
PQEYFD

SEQ ID NO: 12706 - protein, 6 aa, synthetic construct
PQEYFE

SEQ ID NO: 12707 - protein, 6 aa, synthetic construct
PQEYFF

SEQ ID NO: 12708 - protein, 6 aa, synthetic construct
PQEYFW

SEQ ID NO: 12709 - protein, 6 aa, synthetic construct
PQEYFY

SEQ ID NO: 12710 - protein, 6 aa, synthetic construct
PQEYPD

SEQ ID NO: 12711 - protein, 6 aa, synthetic construct
PQEYPE

SEQ ID NO: 12712 - protein, 6 aa, synthetic construct
PQEYPF

SEQ ID NO: 12713 - protein, 6 aa, synthetic construct
PQEYPW

SEQ ID NO: 12714 - protein, 6 aa, synthetic construct
PQEYPY

SEQ ID NO: 12715 - protein, 6 aa, synthetic construct
PQEYSD

SEQ ID NO: 12716 - protein, 6 aa, synthetic construct
PQEYSE

SEQ ID NO: 12717 - protein, 6 aa, synthetic construct
PQEYSF

SEQ ID NO: 12718 - protein, 6 aa, synthetic construct
PQEYSW

SEQ ID NO: 12719 - protein, 6 aa, synthetic construct
PQEYSY

SEQ ID NO: 12720 - protein, 6 aa, synthetic construct
PQEYTD

SEQ ID NO: 12721 - protein, 6 aa, synthetic construct
PQEYTE

SEQ ID NO: 12722 - protein, 6 aa, synthetic construct
PQEYTF

SEQ ID NO: 12723 - protein, 6 aa, synthetic construct
PQEYTW

SEQ ID NO: 12724 - protein, 6 aa, synthetic construct
PQEYTY

SEQ ID NO: 12725 - protein, 6 aa, synthetic construct
PQEYWD

SEQ ID NO: 12726 - protein, 6 aa, synthetic construct
PQEYWE

SEQ ID NO: 12727 - protein, 6 aa, synthetic construct
PQEYWF

SEQ ID NO: 12728 - protein, 6 aa, synthetic construct
PQEYWW

SEQ ID NO: 12729 - protein, 6 aa, synthetic construct
PQEYWY

SEQ ID NO: 12730 - protein, 6 aa, synthetic construct
PQEYYD

SEQ ID NO: 12731 - protein, 6 aa, synthetic construct
PQEYYE

SEQ ID NO: 12732 - protein, 6 aa, synthetic construct
PQEYYF

SEQ ID NO: 12733 - protein, 6 aa, synthetic construct
PQEYYW

SEQ ID NO: 12734 - protein, 6 aa, synthetic construct
PQEYYY

SEQ ID NO: 12735 - protein, 6 aa, synthetic construct
PQEYVD

SEQ ID NO: 12736 - protein, 6 aa, synthetic construct
PQEYVE

SEQ ID NO: 12737 - protein, 6 aa, synthetic construct
PQEYVF

SEQ ID NO: 12738 - protein, 6 aa, synthetic construct
PQEYVW

SEQ ID NO: 12739 - protein, 6 aa, synthetic construct
PQEYVY

SEQ ID NO: 12740 - protein, 6 aa, synthetic construct
PQEVAD

SEQ ID NO: 12741 - protein, 6 aa, synthetic construct
PQEVAE

SEQ ID NO: 12742 - protein, 6 aa, synthetic construct
PQEVAF

SEQ ID NO: 12743 - protein, 6 aa, synthetic construct
PQEVAW

SEQ ID NO: 12744 - protein, 6 aa, synthetic construct
PQEVAY

SEQ ID NO: 12745 - protein, 6 aa, synthetic construct
PQEVRD

SEQ ID NO: 12746 - protein, 6 aa, synthetic construct
PQEVRE

SEQ ID NO: 12747 - protein, 6 aa, synthetic construct
PQEVRF

SEQ ID NO: 12748 - protein, 6 aa, synthetic construct
PQEVRW

SEQ ID NO: 12749 - protein, 6 aa, synthetic construct
PQEVRY

SEQ ID NO: 12750 - protein, 6 aa, synthetic construct
PQEVND

SEQ ID NO: 12751 - protein, 6 aa, synthetic construct
PQEVNE

SEQ ID NO: 12752 - protein, 6 aa, synthetic construct
PQEVNF

SEQ ID NO: 12753 - protein, 6 aa, synthetic construct
PQEVNW

SEQ ID NO: 12754 - protein, 6 aa, synthetic construct
PQEVNY

SEQ ID NO: 12755 - protein, 6 aa, synthetic construct
PQEVDD

SEQ ID NO: 12756 - protein, 6 aa, synthetic construct
PQEVDE

SEQ ID NO: 12757 - protein, 6 aa, synthetic construct
PQEVDF

SEQ ID NO: 12758 - protein, 6 aa, synthetic construct
PQEVDW

SEQ ID NO: 12759 - protein, 6 aa, synthetic construct
PQEVDY

SEQ ID NO: 12760 - protein, 6 aa, synthetic construct
PQEVCD

SEQ ID NO: 12761 - protein, 6 aa, synthetic construct
PQEVCE

SEQ ID NO: 12762 - protein, 6 aa, synthetic construct
PQEVCF

SEQ ID NO: 12763 - protein, 6 aa, synthetic construct
PQEVCW

SEQ ID NO: 12764 - protein, 6 aa, synthetic construct
PQEVCY

SEQ ID NO: 12765 - protein, 6 aa, synthetic construct
PQEVQD

SEQ ID NO: 12766 - protein, 6 aa, synthetic construct
PQEVQE

SEQ ID NO: 12767 - protein, 6 aa, synthetic construct
PQEVQF

SEQ ID NO: 12768 - protein, 6 aa, synthetic construct
PQEVQW

SEQ ID NO: 12769 - protein, 6 aa, synthetic construct
PQEVQY

SEQ ID NO: 12770 - protein, 6 aa, synthetic construct
PQEVED

SEQ ID NO: 12771 - protein, 6 aa, synthetic construct
PQEVEE

SEQ ID NO: 12772 - protein, 6 aa, synthetic construct
PQEVEF

SEQ ID NO: 12773 - protein, 6 aa, synthetic construct
PQEVEW

SEQ ID NO: 12774 - protein, 6 aa, synthetic construct
PQEVEY

SEQ ID NO: 12775 - protein, 6 aa, synthetic construct
PQEVGD

SEQ ID NO: 12776 - protein, 6 aa, synthetic construct
PQEVGE

SEQ ID NO: 12777 - protein, 6 aa, synthetic construct
PQEVGF

SEQ ID NO: 12778 - protein, 6 aa, synthetic construct
PQEVGW

SEQ ID NO: 12779 - protein, 6 aa, synthetic construct
PQEVGY

SEQ ID NO: 12780 - protein, 6 aa, synthetic construct
PQEVHD

SEQ ID NO: 12781 - protein, 6 aa, synthetic construct
PQEVHE

SEQ ID NO: 12782 - protein, 6 aa, synthetic construct
PQEVHF

SEQ ID NO: 12783 - protein, 6 aa, synthetic construct
PQEVHW

SEQ ID NO: 12784 - protein, 6 aa, synthetic construct
PQEVHY

SEQ ID NO: 12785 - protein, 6 aa, synthetic construct
PQEVID

SEQ ID NO: 12786 - protein, 6 aa, synthetic construct
PQEVIE

SEQ ID NO: 12787 - protein, 6 aa, synthetic construct
PQEVIF

SEQ ID NO: 12788 - protein, 6 aa, synthetic construct
PQEVIW

SEQ ID NO: 12789 - protein, 6 aa, synthetic construct
PQEVIY

SEQ ID NO: 12790 - protein, 6 aa, synthetic construct
PQEVLD

SEQ ID NO: 12791 - protein, 6 aa, synthetic construct
PQEVLE

SEQ ID NO: 12792 - protein, 6 aa, synthetic construct
PQEVLF

SEQ ID NO: 12793 - protein, 6 aa, synthetic construct
PQEVLW

SEQ ID NO: 12794 - protein, 6 aa, synthetic construct
PQEVLY

SEQ ID NO: 12795 - protein, 6 aa, synthetic construct
PQEVKD

SEQ ID NO: 12796 - protein, 6 aa, synthetic construct
PQEVKE

SEQ ID NO: 12797 - protein, 6 aa, synthetic construct
PQEVKF

SEQ ID NO: 12798 - protein, 6 aa, synthetic construct
PQEVKW

SEQ ID NO: 12799 - protein, 6 aa, synthetic construct
PQEVKY

SEQ ID NO: 12800 - protein, 6 aa, synthetic construct
PQEVMD

SEQ ID NO: 12801 - protein, 6 aa, synthetic construct
PQEVME

SEQ ID NO: 12802 - protein, 6 aa, synthetic construct
PQEVMF

SEQ ID NO: 12803 - protein, 6 aa, synthetic construct
PQEVMW

SEQ ID NO: 12804 - protein, 6 aa, synthetic construct
PQEVMY

SEQ ID NO: 12805 - protein, 6 aa, synthetic construct
PQEVFD

SEQ ID NO: 12806 - protein, 6 aa, synthetic construct
PQEVFE

SEQ ID NO: 12807 - protein, 6 aa, synthetic construct
PQEVFF

SEQ ID NO: 12808 - protein, 6 aa, synthetic construct
PQEVFW

SEQ ID NO: 12809 - protein, 6 aa, synthetic construct
PQEVFY

SEQ ID NO: 12810 - protein, 6 aa, synthetic construct
PQEVPD

SEQ ID NO: 12811 - protein, 6 aa, synthetic construct
PQEVPE

SEQ ID NO: 12812 - protein, 6 aa, synthetic construct
PQEVPF

SEQ ID NO: 12813 - protein, 6 aa, synthetic construct
PQEVPW

SEQ ID NO: 12814 - protein, 6 aa, synthetic construct
PQEVPY

SEQ ID NO: 12815 - protein, 6 aa, synthetic construct
PQEVSD

SEQ ID NO: 12816 - protein, 6 aa, synthetic construct
PQEVSE

SEQ ID NO: 12817 - protein, 6 aa, synthetic construct
PQEVSF

SEQ ID NO: 12818 - protein, 6 aa, synthetic construct
PQEVSW

SEQ ID NO: 12819 - protein, 6 aa, synthetic construct
PQEVSY

SEQ ID NO: 12820 - protein, 6 aa, synthetic construct
PQEVTD

SEQ ID NO: 12821 - protein, 6 aa, synthetic construct
PQEVTE

SEQ ID NO: 12822 - protein, 6 aa, synthetic construct
PQEVTF

SEQ ID NO: 12823 - protein, 6 aa, synthetic construct
PQEVTW

SEQ ID NO: 12824 - protein, 6 aa, synthetic construct
PQEVTY

SEQ ID NO: 12825 - protein, 6 aa, synthetic construct
PQEVWD

SEQ ID NO: 12826 - protein, 6 aa, synthetic construct
PQEVWE

SEQ ID NO: 12827 - protein, 6 aa, synthetic construct
PQEVWF

SEQ ID NO: 12828 - protein, 6 aa, synthetic construct
PQEVWW

SEQ ID NO: 12829 - protein, 6 aa, synthetic construct
PQEVWY

SEQ ID NO: 12830 - protein, 6 aa, synthetic construct
PQEVYD

SEQ ID NO: 12831 - protein, 6 aa, synthetic construct
PQEVYE

SEQ ID NO: 12832 - protein, 6 aa, synthetic construct
PQEVYF

SEQ ID NO: 12833 - protein, 6 aa, synthetic construct
PQEVYW

SEQ ID NO: 12834 - protein, 6 aa, synthetic construct
PQEVYY

SEQ ID NO: 12835 - protein, 6 aa, synthetic construct
PQEVVD

SEQ ID NO: 12836 - protein, 6 aa, synthetic construct
PQEVVE

SEQ ID NO: 12837 - protein, 6 aa, synthetic construct
PQEVVF

SEQ ID NO: 12838 - protein, 6 aa, synthetic construct
PQEVVW

SEQ ID NO: 12839 - protein, 6 aa, synthetic construct
PQEVVY

SEQ ID NO: 12840 - protein, 6 aa, synthetic construct
PEEAAD

SEQ ID NO: 12841 - protein, 6 aa, synthetic construct
PEEAAE

SEQ ID NO: 12842 - protein, 6 aa, synthetic construct
PEEAAF

SEQ ID NO: 12843 - protein, 6 aa, synthetic construct
PEEAAW

SEQ ID NO: 12844 - protein, 6 aa, synthetic construct
PEEAAY

SEQ ID NO: 12845 - protein, 6 aa, synthetic construct
PEEARD

SEQ ID NO: 12846 - protein, 6 aa, synthetic construct
PEEARE

SEQ ID NO: 12847 - protein, 6 aa, synthetic construct
PEEARF

SEQ ID NO: 12848 - protein, 6 aa, synthetic construct
PEEARW

SEQ ID NO: 12849 - protein, 6 aa, synthetic construct
PEEARY

SEQ ID NO: 12850 - protein, 6 aa, synthetic construct
PEEAND

SEQ ID NO: 12851 - protein, 6 aa, synthetic construct
PEEANE

SEQ ID NO: 12852 - protein, 6 aa, synthetic construct
PEEANF

SEQ ID NO: 12853 - protein, 6 aa, synthetic construct
PEEANW

SEQ ID NO: 12854 - protein, 6 aa, synthetic construct
PEEANY

SEQ ID NO: 12855 - protein, 6 aa, synthetic construct
PEEADD

SEQ ID NO: 12856 - protein, 6 aa, synthetic construct
PEEADE

SEQ ID NO: 12857 - protein, 6 aa, synthetic construct
PEEADF

SEQ ID NO: 12858 - protein, 6 aa, synthetic construct
PEEADW

SEQ ID NO: 12859 - protein, 6 aa, synthetic construct
PEEADY

SEQ ID NO: 12860 - protein, 6 aa, synthetic construct
PEEACD

SEQ ID NO: 12861 - protein, 6 aa, synthetic construct
PEEACE

SEQ ID NO: 12862 - protein, 6 aa, synthetic construct
PEEACF

SEQ ID NO: 12863 - protein, 6 aa, synthetic construct
PEEACW

SEQ ID NO: 12864 - protein, 6 aa, synthetic construct
PEEACY

SEQ ID NO: 12865 - protein, 6 aa, synthetic construct
PEEAQD

SEQ ID NO: 12866 - protein, 6 aa, synthetic construct
PEEAQE

SEQ ID NO: 12867 - protein, 6 aa, synthetic construct
PEEAQF

SEQ ID NO: 12868 - protein, 6 aa, synthetic construct
PEEAQW

SEQ ID NO: 12869 - protein, 6 aa, synthetic construct
PEEAQY

SEQ ID NO: 12870 - protein, 6 aa, synthetic construct
PEEAED

SEQ ID NO: 12871 - protein, 6 aa, synthetic construct
PEEAEE

SEQ ID NO: 12872 - protein, 6 aa, synthetic construct
PEEAEF

SEQ ID NO: 12873 - protein, 6 aa, synthetic construct
PEEAEW

SEQ ID NO: 12874 - protein, 6 aa, synthetic construct
PEEAEY

SEQ ID NO: 12875 - protein, 6 aa, synthetic construct
PEEAGD

SEQ ID NO: 12876 - protein, 6 aa, synthetic construct
PEEAGE

SEQ ID NO: 12877 - protein, 6 aa, synthetic construct
PEEAGF

SEQ ID NO: 12878 - protein, 6 aa, synthetic construct
PEEAGW

SEQ ID NO: 12879 - protein, 6 aa, synthetic construct
PEEAGY

SEQ ID NO: 12880 - protein, 6 aa, synthetic construct
PEEAHD

SEQ ID NO: 12881 - protein, 6 aa, synthetic construct
PEEAHE

SEQ ID NO: 12882 - protein, 6 aa, synthetic construct
PEEAHF

SEQ ID NO: 12883 - protein, 6 aa, synthetic construct
PEEAHW

SEQ ID NO: 12884 - protein, 6 aa, synthetic construct
PEEAHY

SEQ ID NO: 12885 - protein, 6 aa, synthetic construct
PEEAID

SEQ ID NO: 12886 - protein, 6 aa, synthetic construct
PEEAIE

SEQ ID NO: 12887 - protein, 6 aa, synthetic construct
PEEAIF

SEQ ID NO: 12888 - protein, 6 aa, synthetic construct
PEEAIW

SEQ ID NO: 12889 - protein, 6 aa, synthetic construct
PEEAIY

SEQ ID NO: 12890 - protein, 6 aa, synthetic construct
PEEALD

SEQ ID NO: 12891 - protein, 6 aa, synthetic construct
PEEALE

SEQ ID NO: 12892 - protein, 6 aa, synthetic construct
PEEALF

SEQ ID NO: 12893 - protein, 6 aa, synthetic construct
PEEALW

SEQ ID NO: 12894 - protein, 6 aa, synthetic construct
PEEALY

SEQ ID NO: 12895 - protein, 6 aa, synthetic construct
PEEAKD

SEQ ID NO: 12896 - protein, 6 aa, synthetic construct
PEEAKE

SEQ ID NO: 12897 - protein, 6 aa, synthetic construct
PEEAKF

SEQ ID NO: 12898 - protein, 6 aa, synthetic construct
PEEAKW

SEQ ID NO: 12899 - protein, 6 aa, synthetic construct
PEEAKY

SEQ ID NO: 12900 - protein, 6 aa, synthetic construct
PEEAMD

SEQ ID NO: 12901 - protein, 6 aa, synthetic construct
PEEAME

SEQ ID NO: 12902 - protein, 6 aa, synthetic construct
PEEAMF

SEQ ID NO: 12903 - protein, 6 aa, synthetic construct
PEEAMW

SEQ ID NO: 12904 - protein, 6 aa, synthetic construct
PEEAMY

SEQ ID NO: 12905 - protein, 6 aa, synthetic construct
PEEAFD

SEQ ID NO: 12906 - protein, 6 aa, synthetic construct
PEEAFE

SEQ ID NO: 12907 - protein, 6 aa, synthetic construct
PEEAFF

SEQ ID NO: 12908 - protein, 6 aa, synthetic construct
PEEAFW

SEQ ID NO: 12909 - protein, 6 aa, synthetic construct
PEEAFY

SEQ ID NO: 12910 - protein, 6 aa, synthetic construct
PEEAPD

SEQ ID NO: 12911 - protein, 6 aa, synthetic construct
PEEAPE

SEQ ID NO: 12912 - protein, 6 aa, synthetic construct
PEEAPF

SEQ ID NO: 12913 - protein, 6 aa, synthetic construct
PEEAPW

SEQ ID NO: 12914 - protein, 6 aa, synthetic construct
PEEAPY

SEQ ID NO: 12915 - protein, 6 aa, synthetic construct
PEEASD

SEQ ID NO: 12916 - protein, 6 aa, synthetic construct
PEEASE

SEQ ID NO: 12917 - protein, 6 aa, synthetic construct
PEEASF

SEQ ID NO: 12918 - protein, 6 aa, synthetic construct
PEEASW

SEQ ID NO: 12919 - protein, 6 aa, synthetic construct
PEEASY

SEQ ID NO: 12920 - protein, 6 aa, synthetic construct
PEEATD

SEQ ID NO: 12921 - protein, 6 aa, synthetic construct
PEEATE

SEQ ID NO: 12922 - protein, 6 aa, synthetic construct
PEEATF

SEQ ID NO: 12923 - protein, 6 aa, synthetic construct
PEEATW

SEQ ID NO: 12924 - protein, 6 aa, synthetic construct
PEEATY

SEQ ID NO: 12925 - protein, 6 aa, synthetic construct
PEEAWD

SEQ ID NO: 12926 - protein, 6 aa, synthetic construct
PEEAWE

SEQ ID NO: 12927 - protein, 6 aa, synthetic construct
PEEAWF

SEQ ID NO: 12928 - protein, 6 aa, synthetic construct
PEEAWW

SEQ ID NO: 12929 - protein, 6 aa, synthetic construct
PEEAWY

SEQ ID NO: 12930 - protein, 6 aa, synthetic construct
PEEAYD

SEQ ID NO: 12931 - protein, 6 aa, synthetic construct
PEEAYE

SEQ ID NO: 12932 - protein, 6 aa, synthetic construct
PEEAYF

SEQ ID NO: 12933 - protein, 6 aa, synthetic construct
PEEAYW

SEQ ID NO: 12934 - protein, 6 aa, synthetic construct
PEEAYY

SEQ ID NO: 12935 - protein, 6 aa, synthetic construct
PEEAVD

SEQ ID NO: 12936 - protein, 6 aa, synthetic construct
PEEAVE

SEQ ID NO: 12937 - protein, 6 aa, synthetic construct
PEEAVF

SEQ ID NO: 12938 - protein, 6 aa, synthetic construct
PEEAVW

SEQ ID NO: 12939 - protein, 6 aa, synthetic construct
PEEAVY

SEQ ID NO: 12940 - protein, 6 aa, synthetic construct
PEERAD

SEQ ID NO: 12941 - protein, 6 aa, synthetic construct
PEERAE

SEQ ID NO: 12942 - protein, 6 aa, synthetic construct
PEERAF

SEQ ID NO: 12943 - protein, 6 aa, synthetic construct
PEERAW

SEQ ID NO: 12944 - protein, 6 aa, synthetic construct
PEERAY

SEQ ID NO: 12945 - protein, 6 aa, synthetic construct
PEERRD

SEQ ID NO: 12946 - protein, 6 aa, synthetic construct
PEERRE

SEQ ID NO: 12947 - protein, 6 aa, synthetic construct
PEERRF

SEQ ID NO: 12948 - protein, 6 aa, synthetic construct
PEERRW

SEQ ID NO: 12949 - protein, 6 aa, synthetic construct
PEERRY

SEQ ID NO: 12950 - protein, 6 aa, synthetic construct
PEERND

SEQ ID NO: 12951 - protein, 6 aa, synthetic construct
PEERNE

SEQ ID NO: 12952 - protein, 6 aa, synthetic construct
PEERNF

SEQ ID NO: 12953 - protein, 6 aa, synthetic construct
PEERNW

SEQ ID NO: 12954 - protein, 6 aa, synthetic construct
PEERNY

SEQ ID NO: 12955 - protein, 6 aa, synthetic construct
PEERDD

SEQ ID NO: 12956 - protein, 6 aa, synthetic construct
PEERDE

SEQ ID NO: 12957 - protein, 6 aa, synthetic construct
PEERDF

SEQ ID NO: 12958 - protein, 6 aa, synthetic construct
PEERDW

SEQ ID NO: 12959 - protein, 6 aa, synthetic construct
PEERDY

SEQ ID NO: 12960 - protein, 6 aa, synthetic construct
PEERCD

SEQ ID NO: 12961 - protein, 6 aa, synthetic construct
PEERCE

SEQ ID NO: 12962 - protein, 6 aa, synthetic construct
PEERCF

SEQ ID NO: 12963 - protein, 6 aa, synthetic construct
PEERCW

SEQ ID NO: 12964 - protein, 6 aa, synthetic construct
PEERCY

SEQ ID NO: 12965 - protein, 6 aa, synthetic construct
PEERQD

SEQ ID NO: 12966 - protein, 6 aa, synthetic construct
PEERQE

SEQ ID NO: 12967 - protein, 6 aa, synthetic construct
PEERQF

SEQ ID NO: 12968 - protein, 6 aa, synthetic construct
PEERQW

SEQ ID NO: 12969 - protein, 6 aa, synthetic construct
PEERQY

SEQ ID NO: 12970 - protein, 6 aa, synthetic construct
PEERED

SEQ ID NO: 12971 - protein, 6 aa, synthetic construct
PEEREE

SEQ ID NO: 12972 - protein, 6 aa, synthetic construct
PEEREF

SEQ ID NO: 12973 - protein, 6 aa, synthetic construct
PEEREW

SEQ ID NO: 12974 - protein, 6 aa, synthetic construct
PEEREY

SEQ ID NO: 12975 - protein, 6 aa, synthetic construct
PEERGD

SEQ ID NO: 12976 - protein, 6 aa, synthetic construct
PEERGE

SEQ ID NO: 12977 - protein, 6 aa, synthetic construct
PEERGF

SEQ ID NO: 12978 - protein, 6 aa, synthetic construct
PEERGW

SEQ ID NO: 12979 - protein, 6 aa, synthetic construct
PEERGY

SEQ ID NO: 12980 - protein, 6 aa, synthetic construct
PEERHD

SEQ ID NO: 12981 - protein, 6 aa, synthetic construct
PEERHE

SEQ ID NO: 12982 - protein, 6 aa, synthetic construct
PEERHF

SEQ ID NO: 12983 - protein, 6 aa, synthetic construct
PEERHW

SEQ ID NO: 12984 - protein, 6 aa, synthetic construct
PEERHY

SEQ ID NO: 12985 - protein, 6 aa, synthetic construct
PEERID

SEQ ID NO: 12986 - protein, 6 aa, synthetic construct
PEERIE

SEQ ID NO: 12987 - protein, 6 aa, synthetic construct
PEERIF

SEQ ID NO: 12988 - protein, 6 aa, synthetic construct
PEERIW

SEQ ID NO: 12989 - protein, 6 aa, synthetic construct
PEERIY

SEQ ID NO: 12990 - protein, 6 aa, synthetic construct
PEERLD

SEQ ID NO: 12991 - protein, 6 aa, synthetic construct
PEERLE

SEQ ID NO: 12992 - protein, 6 aa, synthetic construct
PEERLF

SEQ ID NO: 12993 - protein, 6 aa, synthetic construct
PEERLW

SEQ ID NO: 12994 - protein, 6 aa, synthetic construct
PEERLY

SEQ ID NO: 12995 - protein, 6 aa, synthetic construct
PEERKD

SEQ ID NO: 12996 - protein, 6 aa, synthetic construct
PEERKE

SEQ ID NO: 12997 - protein, 6 aa, synthetic construct
PEERKF

SEQ ID NO: 12998 - protein, 6 aa, synthetic construct
PEERKW

SEQ ID NO: 12999 - protein, 6 aa, synthetic construct
PEERKY

SEQ ID NO: 13000 - protein, 6 aa, synthetic construct
PEERMD

SEQ ID NO: 13001 - protein, 6 aa, synthetic construct
PEERME

SEQ ID NO: 13002 - protein, 6 aa, synthetic construct
PEERMF

SEQ ID NO: 13003 - protein, 6 aa, synthetic construct
PEERMW

SEQ ID NO: 13004 - protein, 6 aa, synthetic construct
PEERMY

SEQ ID NO: 13005 - protein, 6 aa, synthetic construct
PEERFD

SEQ ID NO: 13006 - protein, 6 aa, synthetic construct
PEERFE

SEQ ID NO: 13007 - protein, 6 aa, synthetic construct
PEERFF

SEQ ID NO: 13008 - protein, 6 aa, synthetic construct
PEERFW

SEQ ID NO: 13009 - protein, 6 aa, synthetic construct
PEERFY

SEQ ID NO: 13010 - protein, 6 aa, synthetic construct
PEERPD

SEQ ID NO: 13011 - protein, 6 aa, synthetic construct
PEERPE

SEQ ID NO: 13012 - protein, 6 aa, synthetic construct
PEERPF

SEQ ID NO: 13013 - protein, 6 aa, synthetic construct
PEERPW

SEQ ID NO: 13014 - protein, 6 aa, synthetic construct
PEERPY

SEQ ID NO: 13015 - protein, 6 aa, synthetic construct
PEERSD

SEQ ID NO: 13016 - protein, 6 aa, synthetic construct
PEERSE

SEQ ID NO: 13017 - protein, 6 aa, synthetic construct
PEERSF

SEQ ID NO: 13018 - protein, 6 aa, synthetic construct
PEERSW

SEQ ID NO: 13019 - protein, 6 aa, synthetic construct
PEERSY

SEQ ID NO: 13020 - protein, 6 aa, synthetic construct
PEERTD

SEQ ID NO: 13021 - protein, 6 aa, synthetic construct
PEERTE

SEQ ID NO: 13022 - protein, 6 aa, synthetic construct
PEERTF

SEQ ID NO: 13023 - protein, 6 aa, synthetic construct
PEERTW

SEQ ID NO: 13024 - protein, 6 aa, synthetic construct
PEERTY

SEQ ID NO: 13025 - protein, 6 aa, synthetic construct
PEERWD

SEQ ID NO: 13026 - protein, 6 aa, synthetic construct
PEERWE

SEQ ID NO: 13027 - protein, 6 aa, synthetic construct
PEERWF

SEQ ID NO: 13028 - protein, 6 aa, synthetic construct
PEERWW

SEQ ID NO: 13029 - protein, 6 aa, synthetic construct
PEERWY

SEQ ID NO: 13030 - protein, 6 aa, synthetic construct
PEERYD

SEQ ID NO: 13031 - protein, 6 aa, synthetic construct
PEERYE

SEQ ID NO: 13032 - protein, 6 aa, synthetic construct
PEERYF

SEQ ID NO: 13033 - protein, 6 aa, synthetic construct
PEERYW

SEQ ID NO: 13034 - protein, 6 aa, synthetic construct
PEERYY

SEQ ID NO: 13035 - protein, 6 aa, synthetic construct
PEERVD

SEQ ID NO: 13036 - protein, 6 aa, synthetic construct
PEERVE

SEQ ID NO: 13037 - protein, 6 aa, synthetic construct
PEERVF

SEQ ID NO: 13038 - protein, 6 aa, synthetic construct
PEERVW

SEQ ID NO: 13039 - protein, 6 aa, synthetic construct
PEERVY

SEQ ID NO: 13040 - protein, 6 aa, synthetic construct
PEENAD

SEQ ID NO: 13041 - protein, 6 aa, synthetic construct
PEENAE

SEQ ID NO: 13042 - protein, 6 aa, synthetic construct
PEENAF

SEQ ID NO: 13043 - protein, 6 aa, synthetic construct
PEENAW

SEQ ID NO: 13044 - protein, 6 aa, synthetic construct
PEENAY

SEQ ID NO: 13045 - protein, 6 aa, synthetic construct
PEENRD

SEQ ID NO: 13046 - protein, 6 aa, synthetic construct
PEENRE

SEQ ID NO: 13047 - protein, 6 aa, synthetic construct
PEENRF

SEQ ID NO: 13048 - protein, 6 aa, synthetic construct
PEENRW

SEQ ID NO: 13049 - protein, 6 aa, synthetic construct
PEENRY

SEQ ID NO: 13050 - protein, 6 aa, synthetic construct
PEENND

SEQ ID NO: 13051 - protein, 6 aa, synthetic construct
PEENNE

SEQ ID NO: 13052 - protein, 6 aa, synthetic construct
PEENNF

SEQ ID NO: 13053 - protein, 6 aa, synthetic construct
PEENNW

SEQ ID NO: 13054 - protein, 6 aa, synthetic construct
PEENNY

SEQ ID NO: 13055 - protein, 6 aa, synthetic construct
PEENDD

SEQ ID NO: 13056 - protein, 6 aa, synthetic construct
PEENDE

SEQ ID NO: 13057 - protein, 6 aa, synthetic construct
PEENDF

SEQ ID NO: 13058 - protein, 6 aa, synthetic construct
PEENDW

SEQ ID NO: 13059 - protein, 6 aa, synthetic construct
PEENDY

SEQ ID NO: 13060 - protein, 6 aa, synthetic construct
PEENCD

SEQ ID NO: 13061 - protein, 6 aa, synthetic construct
PEENCE

SEQ ID NO: 13062 - protein, 6 aa, synthetic construct
PEENCF

SEQ ID NO: 13063 - protein, 6 aa, synthetic construct
PEENCW

SEQ ID NO: 13064 - protein, 6 aa, synthetic construct
PEENCY

SEQ ID NO: 13065 - protein, 6 aa, synthetic construct
PEENQD

SEQ ID NO: 13066 - protein, 6 aa, synthetic construct
PEENQE

SEQ ID NO: 13067 - protein, 6 aa, synthetic construct
PEENQF

SEQ ID NO: 13068 - protein, 6 aa, synthetic construct
PEENQW

SEQ ID NO: 13069 - protein, 6 aa, synthetic construct
PEENQY

SEQ ID NO: 13070 - protein, 6 aa, synthetic construct
PEENED

SEQ ID NO: 13071 - protein, 6 aa, synthetic construct
PEENEE

SEQ ID NO: 13072 - protein, 6 aa, synthetic construct
PEENEF

SEQ ID NO: 13073 - protein, 6 aa, synthetic construct
PEENEW

SEQ ID NO: 13074 - protein, 6 aa, synthetic construct
PEENEY

SEQ ID NO: 13075 - protein, 6 aa, synthetic construct
PEENGD

SEQ ID NO: 13076 - protein, 6 aa, synthetic construct
PEENGE

SEQ ID NO: 13077 - protein, 6 aa, synthetic construct
PEENGF

SEQ ID NO: 13078 - protein, 6 aa, synthetic construct
PEENGW

SEQ ID NO: 13079 - protein, 6 aa, synthetic construct
PEENGY

SEQ ID NO: 13080 - protein, 6 aa, synthetic construct
PEENHD

SEQ ID NO: 13081 - protein, 6 aa, synthetic construct
PEENHE

SEQ ID NO: 13082 - protein, 6 aa, synthetic construct
PEENHF

SEQ ID NO: 13083 - protein, 6 aa, synthetic construct
PEENHW

SEQ ID NO: 13084 - protein, 6 aa, synthetic construct
PEENHY

SEQ ID NO: 13085 - protein, 6 aa, synthetic construct
PEENID

SEQ ID NO: 13086 - protein, 6 aa, synthetic construct
PEENIE

SEQ ID NO: 13087 - protein, 6 aa, synthetic construct
PEENIF

SEQ ID NO: 13088 - protein, 6 aa, synthetic construct
PEENIW

SEQ ID NO: 13089 - protein, 6 aa, synthetic construct
PEENIY

SEQ ID NO: 13090 - protein, 6 aa, synthetic construct
PEENLD

SEQ ID NO: 13091 - protein, 6 aa, synthetic construct
PEENLE

SEQ ID NO: 13092 - protein, 6 aa, synthetic construct
PEENLF

SEQ ID NO: 13093 - protein, 6 aa, synthetic construct
PEENLW

SEQ ID NO: 13094 - protein, 6 aa, synthetic construct
PEENLY

SEQ ID NO: 13095 - protein, 6 aa, synthetic construct
PEENKD

SEQ ID NO: 13096 - protein, 6 aa, synthetic construct
PEENKE

SEQ ID NO: 13097 - protein, 6 aa, synthetic construct
PEENKF

SEQ ID NO: 13098 - protein, 6 aa, synthetic construct
PEENKW

SEQ ID NO: 13099 - protein, 6 aa, synthetic construct
PEENKY

SEQ ID NO: 13100 - protein, 6 aa, synthetic construct
PEENMD

SEQ ID NO: 13101 - protein, 6 aa, synthetic construct
PEENME

SEQ ID NO: 13102 - protein, 6 aa, synthetic construct
PEENMF

SEQ ID NO: 13103 - protein, 6 aa, synthetic construct
PEENMW

SEQ ID NO: 13104 - protein, 6 aa, synthetic construct
PEENMY

SEQ ID NO: 13105 - protein, 6 aa, synthetic construct
PEENFD

SEQ ID NO: 13106 - protein, 6 aa, synthetic construct
PEENFE

SEQ ID NO: 13107 - protein, 6 aa, synthetic construct
PEENFF

SEQ ID NO: 13108 - protein, 6 aa, synthetic construct
PEENFW

SEQ ID NO: 13109 - protein, 6 aa, synthetic construct
PEENFY

SEQ ID NO: 13110 - protein, 6 aa, synthetic construct
PEENPD

SEQ ID NO: 13111 - protein, 6 aa, synthetic construct
PEENPE

SEQ ID NO: 13112 - protein, 6 aa, synthetic construct
PEENPF

SEQ ID NO: 13113 - protein, 6 aa, synthetic construct
PEENPW

SEQ ID NO: 13114 - protein, 6 aa, synthetic construct
PEENPY

SEQ ID NO: 13115 - protein, 6 aa, synthetic construct
PEENSD

SEQ ID NO: 13116 - protein, 6 aa, synthetic construct
PEENSE

SEQ ID NO: 13117 - protein, 6 aa, synthetic construct
PEENSF

SEQ ID NO: 13118 - protein, 6 aa, synthetic construct
PEENSW

SEQ ID NO: 13119 - protein, 6 aa, synthetic construct
PEENSY

SEQ ID NO: 13120 - protein, 6 aa, synthetic construct
PEENTD

SEQ ID NO: 13121 - protein, 6 aa, synthetic construct
PEENTE

SEQ ID NO: 13122 - protein, 6 aa, synthetic construct
PEENTF

SEQ ID NO: 13123 - protein, 6 aa, synthetic construct
PEENTW

SEQ ID NO: 13124 - protein, 6 aa, synthetic construct
PEENTY

SEQ ID NO: 13125 - protein, 6 aa, synthetic construct
PEENWD

SEQ ID NO: 13126 - protein, 6 aa, synthetic construct
PEENWE

SEQ ID NO: 13127 - protein, 6 aa, synthetic construct
PEENWF

SEQ ID NO: 13128 - protein, 6 aa, synthetic construct
PEENWW

SEQ ID NO: 13129 - protein, 6 aa, synthetic construct
PEENWY

SEQ ID NO: 13130 - protein, 6 aa, synthetic construct
PEENYD

SEQ ID NO: 13131 - protein, 6 aa, synthetic construct
PEENYE

SEQ ID NO: 13132 - protein, 6 aa, synthetic construct
PEENYF

SEQ ID NO: 13133 - protein, 6 aa, synthetic construct
PEENYW

SEQ ID NO: 13134 - protein, 6 aa, synthetic construct
PEENYY

SEQ ID NO: 13135 - protein, 6 aa, synthetic construct
PEENVD

SEQ ID NO: 13136 - protein, 6 aa, synthetic construct
PEENVE

SEQ ID NO: 13137 - protein, 6 aa, synthetic construct
PEENVF

SEQ ID NO: 13138 - protein, 6 aa, synthetic construct
PEENVW

SEQ ID NO: 13139 - protein, 6 aa, synthetic construct
PEENVY

SEQ ID NO: 13140 - protein, 6 aa, synthetic construct
PEEDAD

SEQ ID NO: 13141 - protein, 6 aa, synthetic construct
PEEDAE

SEQ ID NO: 13142 - protein, 6 aa, synthetic construct
PEEDAF

SEQ ID NO: 13143 - protein, 6 aa, synthetic construct
PEEDAW

SEQ ID NO: 13144 - protein, 6 aa, synthetic construct
PEEDAY

SEQ ID NO: 13145 - protein, 6 aa, synthetic construct
PEEDRD

SEQ ID NO: 13146 - protein, 6 aa, synthetic construct
PEEDRE

SEQ ID NO: 13147 - protein, 6 aa, synthetic construct
PEEDRF

SEQ ID NO: 13148 - protein, 6 aa, synthetic construct
PEEDRW

SEQ ID NO: 13149 - protein, 6 aa, synthetic construct
PEEDRY

SEQ ID NO: 13150 - protein, 6 aa, synthetic construct
PEEDND

SEQ ID NO: 13151 - protein, 6 aa, synthetic construct
PEEDNE

SEQ ID NO: 13152 - protein, 6 aa, synthetic construct
PEEDNF

SEQ ID NO: 13153 - protein, 6 aa, synthetic construct
PEEDNW

SEQ ID NO: 13154 - protein, 6 aa, synthetic construct
PEEDNY

SEQ ID NO: 13155 - protein, 6 aa, synthetic construct
PEEDDD

SEQ ID NO: 13156 - protein, 6 aa, synthetic construct
PEEDDE

SEQ ID NO: 13157 - protein, 6 aa, synthetic construct
PEEDDF

SEQ ID NO: 13158 - protein, 6 aa, synthetic construct
PEEDDW

SEQ ID NO: 13159 - protein, 6 aa, synthetic construct
PEEDDY

SEQ ID NO: 13160 - protein, 6 aa, synthetic construct
PEEDCD

SEQ ID NO: 13161 - protein, 6 aa, synthetic construct
PEEDCE

SEQ ID NO: 13162 - protein, 6 aa, synthetic construct
PEEDCF

SEQ ID NO: 13163 - protein, 6 aa, synthetic construct
PEEDCW

SEQ ID NO: 13164 - protein, 6 aa, synthetic construct
PEEDCY

SEQ ID NO: 13165 - protein, 6 aa, synthetic construct
PEEDQD

SEQ ID NO: 13166 - protein, 6 aa, synthetic construct
PEEDQE

SEQ ID NO: 13167 - protein, 6 aa, synthetic construct
PEEDQF

SEQ ID NO: 13168 - protein, 6 aa, synthetic construct
PEEDQW

SEQ ID NO: 13169 - protein, 6 aa, synthetic construct
PEEDQY

SEQ ID NO: 13170 - protein, 6 aa, synthetic construct
PEEDED

SEQ ID NO: 13171 - protein, 6 aa, synthetic construct
PEEDEE

SEQ ID NO: 13172 - protein, 6 aa, synthetic construct
PEEDEF

SEQ ID NO: 13173 - protein, 6 aa, synthetic construct
PEEDEW

SEQ ID NO: 13174 - protein, 6 aa, synthetic construct
PEEDEY

SEQ ID NO: 13175 - protein, 6 aa, synthetic construct
PEEDGD

SEQ ID NO: 13176 - protein, 6 aa, synthetic construct
PEEDGE

SEQ ID NO: 13177 - protein, 6 aa, synthetic construct
PEEDGF

SEQ ID NO: 13178 - protein, 6 aa, synthetic construct
PEEDGW

SEQ ID NO: 13179 - protein, 6 aa, synthetic construct
PEEDGY

SEQ ID NO: 13180 - protein, 6 aa, synthetic construct
PEEDHD

SEQ ID NO: 13181 - protein, 6 aa, synthetic construct
PEEDHE

SEQ ID NO: 13182 - protein, 6 aa, synthetic construct
PEEDHF

SEQ ID NO: 13183 - protein, 6 aa, synthetic construct
PEEDHW

SEQ ID NO: 13184 - protein, 6 aa, synthetic construct
PEEDHY

SEQ ID NO: 13185 - protein, 6 aa, synthetic construct
PEEDID

SEQ ID NO: 13186 - protein, 6 aa, synthetic construct
PEEDIE

SEQ ID NO: 13187 - protein, 6 aa, synthetic construct
PEEDIF

SEQ ID NO: 13188 - protein, 6 aa, synthetic construct
PEEDIW

SEQ ID NO: 13189 - protein, 6 aa, synthetic construct
PEEDIY

SEQ ID NO: 13190 - protein, 6 aa, synthetic construct
PEEDLD

SEQ ID NO: 13191 - protein, 6 aa, synthetic construct
PEEDLE

SEQ ID NO: 13192 - protein, 6 aa, synthetic construct
PEEDLF

SEQ ID NO: 13193 - protein, 6 aa, synthetic construct
PEEDLW

SEQ ID NO: 13194 - protein, 6 aa, synthetic construct
PEEDLY

SEQ ID NO: 13195 - protein, 6 aa, synthetic construct
PEEDKD

SEQ ID NO: 13196 - protein, 6 aa, synthetic construct
PEEDKE

SEQ ID NO: 13197 - protein, 6 aa, synthetic construct
PEEDKF

SEQ ID NO: 13198 - protein, 6 aa, synthetic construct
PEEDKW

SEQ ID NO: 13199 - protein, 6 aa, synthetic construct
PEEDKY

SEQ ID NO: 13200 - protein, 6 aa, synthetic construct
PEEDMD

SEQ ID NO: 13201 - protein, 6 aa, synthetic construct
PEEDME

SEQ ID NO: 13202 - protein, 6 aa, synthetic construct
PEEDMF

SEQ ID NO: 13203 - protein, 6 aa, synthetic construct
PEEDMW

SEQ ID NO: 13204 - protein, 6 aa, synthetic construct
PEEDMY

SEQ ID NO: 13205 - protein, 6 aa, synthetic construct
PEEDFD

SEQ ID NO: 13206 - protein, 6 aa, synthetic construct
PEEDFE

SEQ ID NO: 13207 - protein, 6 aa, synthetic construct
PEEDFF

SEQ ID NO: 13208 - protein, 6 aa, synthetic construct
PEEDFW

SEQ ID NO: 13209 - protein, 6 aa, synthetic construct
PEEDFY

SEQ ID NO: 13210 - protein, 6 aa, synthetic construct
PEEDPD

SEQ ID NO: 13211 - protein, 6 aa, synthetic construct
PEEDPE

SEQ ID NO: 13212 - protein, 6 aa, synthetic construct
PEEDPF

SEQ ID NO: 13213 - protein, 6 aa, synthetic construct
PEEDPW

SEQ ID NO: 13214 - protein, 6 aa, synthetic construct
PEEDPY

SEQ ID NO: 13215 - protein, 6 aa, synthetic construct
PEEDSD

SEQ ID NO: 13216 - protein, 6 aa, synthetic construct
PEEDSE

SEQ ID NO: 13217 - protein, 6 aa, synthetic construct
PEEDSF

SEQ ID NO: 13218 - protein, 6 aa, synthetic construct
PEEDSW

SEQ ID NO: 13219 - protein, 6 aa, synthetic construct
PEEDSY

SEQ ID NO: 13220 - protein, 6 aa, synthetic construct
PEEDTD

SEQ ID NO: 13221 - protein, 6 aa, synthetic construct
PEEDTE

SEQ ID NO: 13222 - protein, 6 aa, synthetic construct
PEEDTF

SEQ ID NO: 13223 - protein, 6 aa, synthetic construct
PEEDTW

SEQ ID NO: 13224 - protein, 6 aa, synthetic construct
PEEDTY

SEQ ID NO: 13225 - protein, 6 aa, synthetic construct
PEEDWD

SEQ ID NO: 13226 - protein, 6 aa, synthetic construct
PEEDWE

SEQ ID NO: 13227 - protein, 6 aa, synthetic construct
PEEDWF

SEQ ID NO: 13228 - protein, 6 aa, synthetic construct
PEEDWW

SEQ ID NO: 13229 - protein, 6 aa, synthetic construct
PEEDWY

SEQ ID NO: 13230 - protein, 6 aa, synthetic construct
PEEDYD

SEQ ID NO: 13231 - protein, 6 aa, synthetic construct
PEEDYE

SEQ ID NO: 13232 - protein, 6 aa, synthetic construct
PEEDYF

SEQ ID NO: 13233 - protein, 6 aa, synthetic construct
PEEDYW

SEQ ID NO: 13234 - protein, 6 aa, synthetic construct
PEEDYY

SEQ ID NO: 13235 - protein, 6 aa, synthetic construct
PEEDVD

SEQ ID NO: 13236 - protein, 6 aa, synthetic construct
PEEDVE

SEQ ID NO: 13237 - protein, 6 aa, synthetic construct
PEEDVF

SEQ ID NO: 13238 - protein, 6 aa, synthetic construct
PEEDVW

SEQ ID NO: 13239 - protein, 6 aa, synthetic construct
PEEDVY

SEQ ID NO: 13240 - protein, 6 aa, synthetic construct
PEECAD

SEQ ID NO: 13241 - protein, 6 aa, synthetic construct
PEECAE

SEQ ID NO: 13242 - protein, 6 aa, synthetic construct
PEECAF

SEQ ID NO: 13243 - protein, 6 aa, synthetic construct
PEECAW

SEQ ID NO: 13244 - protein, 6 aa, synthetic construct
PEECAY

SEQ ID NO: 13245 - protein, 6 aa, synthetic construct
PEECRD

SEQ ID NO: 13246 - protein, 6 aa, synthetic construct
PEECRE

SEQ ID NO: 13247 - protein, 6 aa, synthetic construct
PEECRF

SEQ ID NO: 13248 - protein, 6 aa, synthetic construct
PEECRW

SEQ ID NO: 13249 - protein, 6 aa, synthetic construct
PEECRY

SEQ ID NO: 13250 - protein, 6 aa, synthetic construct
PEECND

SEQ ID NO: 13251 - protein, 6 aa, synthetic construct
PEECNE

SEQ ID NO: 13252 - protein, 6 aa, synthetic construct
PEECNF

SEQ ID NO: 13253 - protein, 6 aa, synthetic construct
PEECNW

SEQ ID NO: 13254 - protein, 6 aa, synthetic construct
PEECNY

SEQ ID NO: 13255 - protein, 6 aa, synthetic construct
PEECDD

SEQ ID NO: 13256 - protein, 6 aa, synthetic construct
PEECDE

SEQ ID NO: 13257 - protein, 6 aa, synthetic construct
PEECDF

SEQ ID NO: 13258 - protein, 6 aa, synthetic construct
PEECDW

SEQ ID NO: 13259 - protein, 6 aa, synthetic construct
PEECDY

SEQ ID NO: 13260 - protein, 6 aa, synthetic construct
PEECCD

SEQ ID NO: 13261 - protein, 6 aa, synthetic construct
PEECCE

SEQ ID NO: 13262 - protein, 6 aa, synthetic construct
PEECCF

SEQ ID NO: 13263 - protein, 6 aa, synthetic construct
PEECCW

SEQ ID NO: 13264 - protein, 6 aa, synthetic construct
PEECCY

SEQ ID NO: 13265 - protein, 6 aa, synthetic construct
PEECQD

SEQ ID NO: 13266 - protein, 6 aa, synthetic construct
PEECQE

SEQ ID NO: 13267 - protein, 6 aa, synthetic construct
PEECQF

SEQ ID NO: 13268 - protein, 6 aa, synthetic construct
PEECQW

SEQ ID NO: 13269 - protein, 6 aa, synthetic construct
PEECQY

SEQ ID NO: 13270 - protein, 6 aa, synthetic construct
PEECED

SEQ ID NO: 13271 - protein, 6 aa, synthetic construct
PEECEE

SEQ ID NO: 13272 - protein, 6 aa, synthetic construct
PEECEF

SEQ ID NO: 13273 - protein, 6 aa, synthetic construct
PEECEW

SEQ ID NO: 13274 - protein, 6 aa, synthetic construct
PEECEY

SEQ ID NO: 13275 - protein, 6 aa, synthetic construct
PEECGD

SEQ ID NO: 13276 - protein, 6 aa, synthetic construct
PEECGE

SEQ ID NO: 13277 - protein, 6 aa, synthetic construct
PEECGF

SEQ ID NO: 13278 - protein, 6 aa, synthetic construct
PEECGW

SEQ ID NO: 13279 - protein, 6 aa, synthetic construct
PEECGY

SEQ ID NO: 13280 - protein, 6 aa, synthetic construct
PEECHD

SEQ ID NO: 13281 - protein, 6 aa, synthetic construct
PEECHE

SEQ ID NO: 13282 - protein, 6 aa, synthetic construct
PEECHF

SEQ ID NO: 13283 - protein, 6 aa, synthetic construct
PEECHW

SEQ ID NO: 13284 - protein, 6 aa, synthetic construct
PEECHY

SEQ ID NO: 13285 - protein, 6 aa, synthetic construct
PEECID

SEQ ID NO: 13286 - protein, 6 aa, synthetic construct
PEECIE

SEQ ID NO: 13287 - protein, 6 aa, synthetic construct
PEECIF

SEQ ID NO: 13288 - protein, 6 aa, synthetic construct
PEECIW

SEQ ID NO: 13289 - protein, 6 aa, synthetic construct
PEECIY

SEQ ID NO: 13290 - protein, 6 aa, synthetic construct
PEECLD

SEQ ID NO: 13291 - protein, 6 aa, synthetic construct
PEECLE

SEQ ID NO: 13292 - protein, 6 aa, synthetic construct
PEECLF

SEQ ID NO: 13293 - protein, 6 aa, synthetic construct
PEECLW

SEQ ID NO: 13294 - protein, 6 aa, synthetic construct
PEECLY

SEQ ID NO: 13295 - protein, 6 aa, synthetic construct
PEECKD

SEQ ID NO: 13296 - protein, 6 aa, synthetic construct
PEECKE

SEQ ID NO: 13297 - protein, 6 aa, synthetic construct
PEECKF

SEQ ID NO: 13298 - protein, 6 aa, synthetic construct
PEECKW

SEQ ID NO: 13299 - protein, 6 aa, synthetic construct
PEECKY

SEQ ID NO: 13300 - protein, 6 aa, synthetic construct
PEECMD

SEQ ID NO: 13301 - protein, 6 aa, synthetic construct
PEECME

SEQ ID NO: 13302 - protein, 6 aa, synthetic construct
PEECMF

SEQ ID NO: 13303 - protein, 6 aa, synthetic construct
PEECMW

SEQ ID NO: 13304 - protein, 6 aa, synthetic construct
PEECMY

SEQ ID NO: 13305 - protein, 6 aa, synthetic construct
PEECFD

SEQ ID NO: 13306 - protein, 6 aa, synthetic construct
PEECFE

SEQ ID NO: 13307 - protein, 6 aa, synthetic construct
PEECFF

SEQ ID NO: 13308 - protein, 6 aa, synthetic construct
PEECFW

SEQ ID NO: 13309 - protein, 6 aa, synthetic construct
PEECFY

SEQ ID NO: 13310 - protein, 6 aa, synthetic construct
PEECPD

SEQ ID NO: 13311 - protein, 6 aa, synthetic construct
PEECPE

SEQ ID NO: 13312 - protein, 6 aa, synthetic construct
PEECPF

SEQ ID NO: 13313 - protein, 6 aa, synthetic construct
PEECPW

SEQ ID NO: 13314 - protein, 6 aa, synthetic construct
PEECPY

SEQ ID NO: 13315 - protein, 6 aa, synthetic construct
PEECSD

SEQ ID NO: 13316 - protein, 6 aa, synthetic construct
PEECSE

SEQ ID NO: 13317 - protein, 6 aa, synthetic construct
PEECSF

SEQ ID NO: 13318 - protein, 6 aa, synthetic construct
PEECSW

SEQ ID NO: 13319 - protein, 6 aa, synthetic construct
PEECSY

SEQ ID NO: 13320 - protein, 6 aa, synthetic construct
PEECTD

SEQ ID NO: 13321 - protein, 6 aa, synthetic construct
PEECTE

SEQ ID NO: 13322 - protein, 6 aa, synthetic construct
PEECTF

SEQ ID NO: 13323 - protein, 6 aa, synthetic construct
PEECTW

SEQ ID NO: 13324 - protein, 6 aa, synthetic construct
PEECTY

SEQ ID NO: 13325 - protein, 6 aa, synthetic construct
PEECWD

SEQ ID NO: 13326 - protein, 6 aa, synthetic construct
PEECWE

SEQ ID NO: 13327 - protein, 6 aa, synthetic construct
PEECWF

SEQ ID NO: 13328 - protein, 6 aa, synthetic construct
PEECWW

SEQ ID NO: 13329 - protein, 6 aa, synthetic construct
PEECWY

SEQ ID NO: 13330 - protein, 6 aa, synthetic construct
PEECYD

SEQ ID NO: 13331 - protein, 6 aa, synthetic construct
PEECYE

SEQ ID NO: 13332 - protein, 6 aa, synthetic construct
PEECYF

SEQ ID NO: 13333 - protein, 6 aa, synthetic construct
PEECYW

SEQ ID NO: 13334 - protein, 6 aa, synthetic construct
PEECYY

SEQ ID NO: 13335 - protein, 6 aa, synthetic construct
PEECVD

SEQ ID NO: 13336 - protein, 6 aa, synthetic construct
PEECVE

SEQ ID NO: 13337 - protein, 6 aa, synthetic construct
PEECVF

SEQ ID NO: 13338 - protein, 6 aa, synthetic construct
PEECVW

SEQ ID NO: 13339 - protein, 6 aa, synthetic construct
PEECVY

SEQ ID NO: 13340 - protein, 6 aa, synthetic construct
PEEQAD

SEQ ID NO: 13341 - protein, 6 aa, synthetic construct
PEEQAE

SEQ ID NO: 13342 - protein, 6 aa, synthetic construct
PEEQAF

SEQ ID NO: 13343 - protein, 6 aa, synthetic construct
PEEQAW

SEQ ID NO: 13344 - protein, 6 aa, synthetic construct
PEEQAY

SEQ ID NO: 13345 - protein, 6 aa, synthetic construct
PEEQRD

SEQ ID NO: 13346 - protein, 6 aa, synthetic construct
PEEQRE

SEQ ID NO: 13347 - protein, 6 aa, synthetic construct
PEEQRF

SEQ ID NO: 13348 - protein, 6 aa, synthetic construct
PEEQRW

SEQ ID NO: 13349 - protein, 6 aa, synthetic construct
PEEQRY

SEQ ID NO: 13350 - protein, 6 aa, synthetic construct
PEEQND

SEQ ID NO: 13351 - protein, 6 aa, synthetic construct
PEEQNE

SEQ ID NO: 13352 - protein, 6 aa, synthetic construct
PEEQNF

SEQ ID NO: 13353 - protein, 6 aa, synthetic construct
PEEQNW

SEQ ID NO: 13354 - protein, 6 aa, synthetic construct
PEEQNY

SEQ ID NO: 13355 - protein, 6 aa, synthetic construct
PEEQDD

SEQ ID NO: 13356 - protein, 6 aa, synthetic construct
PEEQDE

SEQ ID NO: 13357 - protein, 6 aa, synthetic construct
PEEQDF

SEQ ID NO: 13358 - protein, 6 aa, synthetic construct
PEEQDW

SEQ ID NO: 13359 - protein, 6 aa, synthetic construct
PEEQDY

SEQ ID NO: 13360 - protein, 6 aa, synthetic construct
PEEQCD

SEQ ID NO: 13361 - protein, 6 aa, synthetic construct
PEEQCE

SEQ ID NO: 13362 - protein, 6 aa, synthetic construct
PEEQCF

SEQ ID NO: 13363 - protein, 6 aa, synthetic construct
PEEQCW

SEQ ID NO: 13364 - protein, 6 aa, synthetic construct
PEEQCY

SEQ ID NO: 13365 - protein, 6 aa, synthetic construct
PEEQQD

SEQ ID NO: 13366 - protein, 6 aa, synthetic construct
PEEQQE

SEQ ID NO: 13367 - protein, 6 aa, synthetic construct
PEEQQF

SEQ ID NO: 13368 - protein, 6 aa, synthetic construct
PEEQQW

SEQ ID NO: 13369 - protein, 6 aa, synthetic construct
PEEQQY

SEQ ID NO: 13370 - protein, 6 aa, synthetic construct
PEEQED

SEQ ID NO: 13371 - protein, 6 aa, synthetic construct
PEEQEE

SEQ ID NO: 13372 - protein, 6 aa, synthetic construct
PEEQEF

SEQ ID NO: 13373 - protein, 6 aa, synthetic construct
PEEQEW

SEQ ID NO: 13374 - protein, 6 aa, synthetic construct
PEEQEY

SEQ ID NO: 13375 - protein, 6 aa, synthetic construct
PEEQGD

SEQ ID NO: 13376 - protein, 6 aa, synthetic construct
PEEQGE

SEQ ID NO: 13377 - protein, 6 aa, synthetic construct
PEEQGF

SEQ ID NO: 13378 - protein, 6 aa, synthetic construct
PEEQGW

SEQ ID NO: 13379 - protein, 6 aa, synthetic construct
PEEQGY

SEQ ID NO: 13380 - protein, 6 aa, synthetic construct
PEEQHD

SEQ ID NO: 13381 - protein, 6 aa, synthetic construct
PEEQHE

SEQ ID NO: 13382 - protein, 6 aa, synthetic construct
PEEQHF

SEQ ID NO: 13383 - protein, 6 aa, synthetic construct
PEEQHW

SEQ ID NO: 13384 - protein, 6 aa, synthetic construct
PEEQHY

SEQ ID NO: 13385 - protein, 6 aa, synthetic construct
PEEQID

SEQ ID NO: 13386 - protein, 6 aa, synthetic construct
PEEQIE

SEQ ID NO: 13387 - protein, 6 aa, synthetic construct
PEEQIF

SEQ ID NO: 13388 - protein, 6 aa, synthetic construct
PEEQIW

SEQ ID NO: 13389 - protein, 6 aa, synthetic construct
PEEQIY

SEQ ID NO: 13390 - protein, 6 aa, synthetic construct
PEEQLD

SEQ ID NO: 13391 - protein, 6 aa, synthetic construct
PEEQLE

SEQ ID NO: 13392 - protein, 6 aa, synthetic construct
PEEQLF

SEQ ID NO: 13393 - protein, 6 aa, synthetic construct
PEEQLW

SEQ ID NO: 13394 - protein, 6 aa, synthetic construct
PEEQLY

SEQ ID NO: 13395 - protein, 6 aa, synthetic construct
PEEQKD

SEQ ID NO: 13396 - protein, 6 aa, synthetic construct
PEEQKE

SEQ ID NO: 13397 - protein, 6 aa, synthetic construct
PEEQKF

SEQ ID NO: 13398 - protein, 6 aa, synthetic construct
PEEQKW

SEQ ID NO: 13399 - protein, 6 aa, synthetic construct
PEEQKY

SEQ ID NO: 13400 - protein, 6 aa, synthetic construct
PEEQMD

SEQ ID NO: 13401 - protein, 6 aa, synthetic construct
PEEQME

SEQ ID NO: 13402 - protein, 6 aa, synthetic construct
PEEQMF

SEQ ID NO: 13403 - protein, 6 aa, synthetic construct
PEEQMW

SEQ ID NO: 13404 - protein, 6 aa, synthetic construct
PEEQMY

SEQ ID NO: 13405 - protein, 6 aa, synthetic construct
PEEQFD

SEQ ID NO: 13406 - protein, 6 aa, synthetic construct
PEEQFE

SEQ ID NO: 13407 - protein, 6 aa, synthetic construct
PEEQFF

SEQ ID NO: 13408 - protein, 6 aa, synthetic construct
PEEQFW

SEQ ID NO: 13409 - protein, 6 aa, synthetic construct
PEEQFY

SEQ ID NO: 13410 - protein, 6 aa, synthetic construct
PEEQPD

SEQ ID NO: 13411 - protein, 6 aa, synthetic construct
PEEQPE

SEQ ID NO: 13412 - protein, 6 aa, synthetic construct
PEEQPF

SEQ ID NO: 13413 - protein, 6 aa, synthetic construct
PEEQPW

SEQ ID NO: 13414 - protein, 6 aa, synthetic construct
PEEQPY

SEQ ID NO: 13415 - protein, 6 aa, synthetic construct
PEEQSD

SEQ ID NO: 13416 - protein, 6 aa, synthetic construct
PEEQSE

SEQ ID NO: 13417 - protein, 6 aa, synthetic construct
PEEQSF

SEQ ID NO: 13418 - protein, 6 aa, synthetic construct
PEEQSW

SEQ ID NO: 13419 - protein, 6 aa, synthetic construct
PEEQSY

SEQ ID NO: 13420 - protein, 6 aa, synthetic construct
PEEQTD

SEQ ID NO: 13421 - protein, 6 aa, synthetic construct
PEEQTE

SEQ ID NO: 13422 - protein, 6 aa, synthetic construct
PEEQTF

SEQ ID NO: 13423 - protein, 6 aa, synthetic construct
PEEQTW

SEQ ID NO: 13424 - protein, 6 aa, synthetic construct
PEEQTY

SEQ ID NO: 13425 - protein, 6 aa, synthetic construct
PEEQWD

SEQ ID NO: 13426 - protein, 6 aa, synthetic construct
PEEQWE

SEQ ID NO: 13427 - protein, 6 aa, synthetic construct
PEEQWF

SEQ ID NO: 13428 - protein, 6 aa, synthetic construct
PEEQWW

SEQ ID NO: 13429 - protein, 6 aa, synthetic construct
PEEQWY

SEQ ID NO: 13430 - protein, 6 aa, synthetic construct
PEEQYD

SEQ ID NO: 13431 - protein, 6 aa, synthetic construct
PEEQYE

SEQ ID NO: 13432 - protein, 6 aa, synthetic construct
PEEQYF

SEQ ID NO: 13433 - protein, 6 aa, synthetic construct
PEEQYW

SEQ ID NO: 13434 - protein, 6 aa, synthetic construct
PEEQYY

SEQ ID NO: 13435 - protein, 6 aa, synthetic construct
PEEQVD

SEQ ID NO: 13436 - protein, 6 aa, synthetic construct
PEEQVE

SEQ ID NO: 13437 - protein, 6 aa, synthetic construct
PEEQVF

SEQ ID NO: 13438 - protein, 6 aa, synthetic construct
PEEQVW

SEQ ID NO: 13439 - protein, 6 aa, synthetic construct
PEEQVY

SEQ ID NO: 13440 - protein, 6 aa, synthetic construct
PEEEAD

SEQ ID NO: 13441 - protein, 6 aa, synthetic construct
PEEEAE

SEQ ID NO: 13442 - protein, 6 aa, synthetic construct
PEEEAF

SEQ ID NO: 13443 - protein, 6 aa, synthetic construct
PEEEAW

SEQ ID NO: 13444 - protein, 6 aa, synthetic construct
PEEEAY

SEQ ID NO: 13445 - protein, 6 aa, synthetic construct
PEEERD

SEQ ID NO: 13446 - protein, 6 aa, synthetic construct
PEEERE

SEQ ID NO: 13447 - protein, 6 aa, synthetic construct
PEEERF

SEQ ID NO: 13448 - protein, 6 aa, synthetic construct
PEEERW

SEQ ID NO: 13449 - protein, 6 aa, synthetic construct
PEEERY

SEQ ID NO: 13450 - protein, 6 aa, synthetic construct
PEEEND

SEQ ID NO: 13451 - protein, 6 aa, synthetic construct
PEEENE

SEQ ID NO: 13452 - protein, 6 aa, synthetic construct
PEEENF

SEQ ID NO: 13453 - protein, 6 aa, synthetic construct
PEEENW

SEQ ID NO: 13454 - protein, 6 aa, synthetic construct
PEEENY

SEQ ID NO: 13455 - protein, 6 aa, synthetic construct
PEEEDD

SEQ ID NO: 13456 - protein, 6 aa, synthetic construct
PEEEDE

SEQ ID NO: 13457 - protein, 6 aa, synthetic construct
PEEEDF

SEQ ID NO: 13458 - protein, 6 aa, synthetic construct
PEEEDW

SEQ ID NO: 13459 - protein, 6 aa, synthetic construct
PEEEDY

SEQ ID NO: 13460 - protein, 6 aa, synthetic construct
PEEECD

SEQ ID NO: 13461 - protein, 6 aa, synthetic construct
PEEECE

SEQ ID NO: 13462 - protein, 6 aa, synthetic construct
PEEECF

SEQ ID NO: 13463 - protein, 6 aa, synthetic construct
PEEECW

SEQ ID NO: 13464 - protein, 6 aa, synthetic construct
PEEECY

SEQ ID NO: 13465 - protein, 6 aa, synthetic construct
PEEEQD

SEQ ID NO: 13466 - protein, 6 aa, synthetic construct
PEEEQE

SEQ ID NO: 13467 - protein, 6 aa, synthetic construct
PEEEQF

SEQ ID NO: 13468 - protein, 6 aa, synthetic construct
PEEEQW

SEQ ID NO: 13469 - protein, 6 aa, synthetic construct
PEEEQY

SEQ ID NO: 13470 - protein, 6 aa, synthetic construct
PEEEED

SEQ ID NO: 13471 - protein, 6 aa, synthetic construct
PEEEEE

SEQ ID NO: 13472 - protein, 6 aa, synthetic construct
PEEEEF

SEQ ID NO: 13473 - protein, 6 aa, synthetic construct
PEEEEW

SEQ ID NO: 13474 - protein, 6 aa, synthetic construct
PEEEEY

SEQ ID NO: 13475 - protein, 6 aa, synthetic construct
PEEEGD

SEQ ID NO: 13476 - protein, 6 aa, synthetic construct
PEEEGE

SEQ ID NO: 13477 - protein, 6 aa, synthetic construct
PEEEGF

SEQ ID NO: 13478 - protein, 6 aa, synthetic construct
PEEEGW

SEQ ID NO: 13479 - protein, 6 aa, synthetic construct
PEEEGY

SEQ ID NO: 13480 - protein, 6 aa, synthetic construct
PEEEHD

SEQ ID NO: 13481 - protein, 6 aa, synthetic construct
PEEEHE

SEQ ID NO: 13482 - protein, 6 aa, synthetic construct
PEEEHF

SEQ ID NO: 13483 - protein, 6 aa, synthetic construct
PEEEHW

SEQ ID NO: 13484 - protein, 6 aa, synthetic construct
PEEEHY

SEQ ID NO: 13485 - protein, 6 aa, synthetic construct
PEEEID

SEQ ID NO: 13486 - protein, 6 aa, synthetic construct
PEEEIE

SEQ ID NO: 13487 - protein, 6 aa, synthetic construct
PEEEIF

SEQ ID NO: 13488 - protein, 6 aa, synthetic construct
PEEEIW

SEQ ID NO: 13489 - protein, 6 aa, synthetic construct
PEEEIY

SEQ ID NO: 13490 - protein, 6 aa, synthetic construct
PEEELD

SEQ ID NO: 13491 - protein, 6 aa, synthetic construct
PEEELE

SEQ ID NO: 13492 - protein, 6 aa, synthetic construct
PEEELF

SEQ ID NO: 13493 - protein, 6 aa, synthetic construct
PEEELW

SEQ ID NO: 13494 - protein, 6 aa, synthetic construct
PEEELY

SEQ ID NO: 13495 - protein, 6 aa, synthetic construct
PEEEKD

SEQ ID NO: 13496 - protein, 6 aa, synthetic construct
PEEEKE

SEQ ID NO: 13497 - protein, 6 aa, synthetic construct
PEEEKF

SEQ ID NO: 13498 - protein, 6 aa, synthetic construct
PEEEKW

SEQ ID NO: 13499 - protein, 6 aa, synthetic construct
PEEEKY

SEQ ID NO: 13500 - protein, 6 aa, synthetic construct
PEEEMD

SEQ ID NO: 13501 - protein, 6 aa, synthetic construct
PEEEME

SEQ ID NO: 13502 - protein, 6 aa, synthetic construct
PEEEMF

SEQ ID NO: 13503 - protein, 6 aa, synthetic construct
PEEEMW

SEQ ID NO: 13504 - protein, 6 aa, synthetic construct
PEEEMY

SEQ ID NO: 13505 - protein, 6 aa, synthetic construct
PEEEFD

SEQ ID NO: 13506 - protein, 6 aa, synthetic construct
PEEEFE

SEQ ID NO: 13507 - protein, 6 aa, synthetic construct
PEEEFF

SEQ ID NO: 13508 - protein, 6 aa, synthetic construct
PEEEFW

SEQ ID NO: 13509 - protein, 6 aa, synthetic construct
PEEEFY

SEQ ID NO: 13510 - protein, 6 aa, synthetic construct
PEEEPD

SEQ ID NO: 13511 - protein, 6 aa, synthetic construct
PEEEPE

SEQ ID NO: 13512 - protein, 6 aa, synthetic construct
PEEEPF

SEQ ID NO: 13513 - protein, 6 aa, synthetic construct
PEEEPW

SEQ ID NO: 13514 - protein, 6 aa, synthetic construct
PEEEPY

SEQ ID NO: 13515 - protein, 6 aa, synthetic construct
PEEESD

SEQ ID NO: 13516 - protein, 6 aa, synthetic construct
PEEESE

SEQ ID NO: 13517 - protein, 6 aa, synthetic construct
PEEESF

SEQ ID NO: 13518 - protein, 6 aa, synthetic construct
PEEESW

SEQ ID NO: 13519 - protein, 6 aa, synthetic construct
PEEESY

SEQ ID NO: 13520 - protein, 6 aa, synthetic construct
PEEETD

SEQ ID NO: 13521 - protein, 6 aa, synthetic construct
PEEETE

SEQ ID NO: 13522 - protein, 6 aa, synthetic construct
PEEETF

SEQ ID NO: 13523 - protein, 6 aa, synthetic construct
PEEETW

SEQ ID NO: 13524 - protein, 6 aa, synthetic construct
PEEETY

SEQ ID NO: 13525 - protein, 6 aa, synthetic construct
PEEEWD

SEQ ID NO: 13526 - protein, 6 aa, synthetic construct
PEEEWE

SEQ ID NO: 13527 - protein, 6 aa, synthetic construct
PEEEWF

SEQ ID NO: 13528 - protein, 6 aa, synthetic construct
PEEEWW

SEQ ID NO: 13529 - protein, 6 aa, synthetic construct
PEEEWY

SEQ ID NO: 13530 - protein, 6 aa, synthetic construct
PEEEYD

SEQ ID NO: 13531 - protein, 6 aa, synthetic construct
PEEEYE

SEQ ID NO: 13532 - protein, 6 aa, synthetic construct
PEEEYF

SEQ ID NO: 13533 - protein, 6 aa, synthetic construct
PEEEYW

SEQ ID NO: 13534 - protein, 6 aa, synthetic construct
PEEEYY

SEQ ID NO: 13535 - protein, 6 aa, synthetic construct
PEEEVD

SEQ ID NO: 13536 - protein, 6 aa, synthetic construct
PEEEVE

SEQ ID NO: 13537 - protein, 6 aa, synthetic construct
PEEEVF

SEQ ID NO: 13538 - protein, 6 aa, synthetic construct
PEEEVW

SEQ ID NO: 13539 - protein, 6 aa, synthetic construct
PEEEVY

SEQ ID NO: 13540 - protein, 6 aa, synthetic construct
PEEGAD

SEQ ID NO: 13541 - protein, 6 aa, synthetic construct
PEEGAE

SEQ ID NO: 13542 - protein, 6 aa, synthetic construct
PEEGAF

SEQ ID NO: 13543 - protein, 6 aa, synthetic construct
PEEGAW

SEQ ID NO: 13544 - protein, 6 aa, synthetic construct
PEEGAY

SEQ ID NO: 13545 - protein, 6 aa, synthetic construct
PEEGRD

SEQ ID NO: 13546 - protein, 6 aa, synthetic construct
PEEGRE

SEQ ID NO: 13547 - protein, 6 aa, synthetic construct
PEEGRF

SEQ ID NO: 13548 - protein, 6 aa, synthetic construct
PEEGRW

SEQ ID NO: 13549 - protein, 6 aa, synthetic construct
PEEGRY

SEQ ID NO: 13550 - protein, 6 aa, synthetic construct
PEEGND

SEQ ID NO: 13551 - protein, 6 aa, synthetic construct
PEEGNE

SEQ ID NO: 13552 - protein, 6 aa, synthetic construct
PEEGNF

SEQ ID NO: 13553 - protein, 6 aa, synthetic construct
PEEGNW

SEQ ID NO: 13554 - protein, 6 aa, synthetic construct
PEEGNY

SEQ ID NO: 13555 - protein, 6 aa, synthetic construct
PEEGDD

SEQ ID NO: 13556 - protein, 6 aa, synthetic construct
PEEGDE

SEQ ID NO: 13557 - protein, 6 aa, synthetic construct
PEEGDF

SEQ ID NO: 13558 - protein, 6 aa, synthetic construct
PEEGDW

SEQ ID NO: 13559 - protein, 6 aa, synthetic construct
PEEGDY

SEQ ID NO: 13560 - protein, 6 aa, synthetic construct
PEEGCD

SEQ ID NO: 13561 - protein, 6 aa, synthetic construct
PEEGCE

SEQ ID NO: 13562 - protein, 6 aa, synthetic construct
PEEGCF

SEQ ID NO: 13563 - protein, 6 aa, synthetic construct
PEEGCW

SEQ ID NO: 13564 - protein, 6 aa, synthetic construct
PEEGCY

SEQ ID NO: 13565 - protein, 6 aa, synthetic construct
PEEGQD

SEQ ID NO: 13566 - protein, 6 aa, synthetic construct
PEEGQE

SEQ ID NO: 13567 - protein, 6 aa, synthetic construct
PEEGQF

SEQ ID NO: 13568 - protein, 6 aa, synthetic construct
PEEGQW

SEQ ID NO: 13569 - protein, 6 aa, synthetic construct
PEEGQY

SEQ ID NO: 13570 - protein, 6 aa, synthetic construct
PEEGED

SEQ ID NO: 13571 - protein, 6 aa, synthetic construct
PEEGEE

SEQ ID NO: 13572 - protein, 6 aa, synthetic construct
PEEGEF

SEQ ID NO: 13573 - protein, 6 aa, synthetic construct
PEEGEW

SEQ ID NO: 13574 - protein, 6 aa, synthetic construct
PEEGEY

SEQ ID NO: 13575 - protein, 6 aa, synthetic construct
PEEGGD

SEQ ID NO: 13576 - protein, 6 aa, synthetic construct
PEEGGE

SEQ ID NO: 13577 - protein, 6 aa, synthetic construct
PEEGGF

SEQ ID NO: 13578 - protein, 6 aa, synthetic construct
PEEGGW

SEQ ID NO: 13579 - protein, 6 aa, synthetic construct
PEEGGY

SEQ ID NO: 13580 - protein, 6 aa, synthetic construct
PEEGHD

SEQ ID NO: 13581 - protein, 6 aa, synthetic construct
PEEGHE

SEQ ID NO: 13582 - protein, 6 aa, synthetic construct
PEEGHF

SEQ ID NO: 13583 - protein, 6 aa, synthetic construct
PEEGHW

SEQ ID NO: 13584 - protein, 6 aa, synthetic construct
PEEGHY

SEQ ID NO: 13585 - protein, 6 aa, synthetic construct
PEEGID

SEQ ID NO: 13586 - protein, 6 aa, synthetic construct
PEEGIE

SEQ ID NO: 13587 - protein, 6 aa, synthetic construct
PEEGIF

SEQ ID NO: 13588 - protein, 6 aa, synthetic construct
PEEGIW

SEQ ID NO: 13589 - protein, 6 aa, synthetic construct
PEEGIY

SEQ ID NO: 13590 - protein, 6 aa, synthetic construct
PEEGLD

SEQ ID NO: 13591 - protein, 6 aa, synthetic construct
PEEGLE

SEQ ID NO: 13592 - protein, 6 aa, synthetic construct
PEEGLF

SEQ ID NO: 13593 - protein, 6 aa, synthetic construct
PEEGLW

SEQ ID NO: 13594 - protein, 6 aa, synthetic construct
PEEGLY

SEQ ID NO: 13595 - protein, 6 aa, synthetic construct
PEEGKD

SEQ ID NO: 13596 - protein, 6 aa, synthetic construct
PEEGKE

SEQ ID NO: 13597 - protein, 6 aa, synthetic construct
PEEGKF

SEQ ID NO: 13598 - protein, 6 aa, synthetic construct
PEEGKW

SEQ ID NO: 13599 - protein, 6 aa, synthetic construct
PEEGKY

SEQ ID NO: 13600 - protein, 6 aa, synthetic construct
PEEGMD

SEQ ID NO: 13601 - protein, 6 aa, synthetic construct
PEEGME

SEQ ID NO: 13602 - protein, 6 aa, synthetic construct
PEEGMF

SEQ ID NO: 13603 - protein, 6 aa, synthetic construct
PEEGMW

SEQ ID NO: 13604 - protein, 6 aa, synthetic construct
PEEGMY

SEQ ID NO: 13605 - protein, 6 aa, synthetic construct
PEEGFD

SEQ ID NO: 13606 - protein, 6 aa, synthetic construct
PEEGFE

SEQ ID NO: 13607 - protein, 6 aa, synthetic construct
PEEGFF

SEQ ID NO: 13608 - protein, 6 aa, synthetic construct
PEEGFW

SEQ ID NO: 13609 - protein, 6 aa, synthetic construct
PEEGFY

SEQ ID NO: 13610 - protein, 6 aa, synthetic construct
PEEGPD

SEQ ID NO: 13611 - protein, 6 aa, synthetic construct
PEEGPE

SEQ ID NO: 13612 - protein, 6 aa, synthetic construct
PEEGPF

SEQ ID NO: 13613 - protein, 6 aa, synthetic construct
PEEGPW

SEQ ID NO: 13614 - protein, 6 aa, synthetic construct
PEEGPY

SEQ ID NO: 13615 - protein, 6 aa, synthetic construct
PEEGSD

SEQ ID NO: 13616 - protein, 6 aa, synthetic construct
PEEGSE

SEQ ID NO: 13617 - protein, 6 aa, synthetic construct
PEEGSF

SEQ ID NO: 13618 - protein, 6 aa, synthetic construct
PEEGSW

SEQ ID NO: 13619 - protein, 6 aa, synthetic construct
PEEGSY

SEQ ID NO: 13620 - protein, 6 aa, synthetic construct
PEEGTD

SEQ ID NO: 13621 - protein, 6 aa, synthetic construct
PEEGTE

SEQ ID NO: 13622 - protein, 6 aa, synthetic construct
PEEGTF

SEQ ID NO: 13623 - protein, 6 aa, synthetic construct
PEEGTW

SEQ ID NO: 13624 - protein, 6 aa, synthetic construct
PEEGTY

SEQ ID NO: 13625 - protein, 6 aa, synthetic construct
PEEGWD

SEQ ID NO: 13626 - protein, 6 aa, synthetic construct
PEEGWE

SEQ ID NO: 13627 - protein, 6 aa, synthetic construct
PEEGWF

SEQ ID NO: 13628 - protein, 6 aa, synthetic construct
PEEGWW

SEQ ID NO: 13629 - protein, 6 aa, synthetic construct
PEEGWY

SEQ ID NO: 13630 - protein, 6 aa, synthetic construct
PEEGYD

SEQ ID NO: 13631 - protein, 6 aa, synthetic construct
PEEGYE

SEQ ID NO: 13632 - protein, 6 aa, synthetic construct
PEEGYF

SEQ ID NO: 13633 - protein, 6 aa, synthetic construct
PEEGYW

SEQ ID NO: 13634 - protein, 6 aa, synthetic construct
PEEGYY

SEQ ID NO: 13635 - protein, 6 aa, synthetic construct
PEEGVD

SEQ ID NO: 13636 - protein, 6 aa, synthetic construct
PEEGVE

SEQ ID NO: 13637 - protein, 6 aa, synthetic construct
PEEGVF

SEQ ID NO: 13638 - protein, 6 aa, synthetic construct
PEEGVW

SEQ ID NO: 13639 - protein, 6 aa, synthetic construct
PEEGVY

SEQ ID NO: 13640 - protein, 6 aa, synthetic construct
PEEHAD

SEQ ID NO: 13641 - protein, 6 aa, synthetic construct
PEEHAE

SEQ ID NO: 13642 - protein, 6 aa, synthetic construct
PEEHAF

SEQ ID NO: 13643 - protein, 6 aa, synthetic construct
PEEHAW

SEQ ID NO: 13644 - protein, 6 aa, synthetic construct
PEEHAY

SEQ ID NO: 13645 - protein, 6 aa, synthetic construct
PEEHRD

SEQ ID NO: 13646 - protein, 6 aa, synthetic construct
PEEHRE

SEQ ID NO: 13647 - protein, 6 aa, synthetic construct
PEEHRF

SEQ ID NO: 13648 - protein, 6 aa, synthetic construct
PEEHRW

SEQ ID NO: 13649 - protein, 6 aa, synthetic construct
PEEHRY

SEQ ID NO: 13650 - protein, 6 aa, synthetic construct
PEEHND

SEQ ID NO: 13651 - protein, 6 aa, synthetic construct
PEEHNE

SEQ ID NO: 13652 - protein, 6 aa, synthetic construct
PEEHNF

SEQ ID NO: 13653 - protein, 6 aa, synthetic construct
PEEHNW

SEQ ID NO: 13654 - protein, 6 aa, synthetic construct
PEEHNY

SEQ ID NO: 13655 - protein, 6 aa, synthetic construct
PEEHDD

SEQ ID NO: 13656 - protein, 6 aa, synthetic construct
PEEHDE

SEQ ID NO: 13657 - protein, 6 aa, synthetic construct
PEEHDF

SEQ ID NO: 13658 - protein, 6 aa, synthetic construct
PEEHDW

SEQ ID NO: 13659 - protein, 6 aa, synthetic construct
PEEHDY

SEQ ID NO: 13660 - protein, 6 aa, synthetic construct
PEEHCD

SEQ ID NO: 13661 - protein, 6 aa, synthetic construct
PEEHCE

SEQ ID NO: 13662 - protein, 6 aa, synthetic construct
PEEHCF

SEQ ID NO: 13663 - protein, 6 aa, synthetic construct
PEEHCW

SEQ ID NO: 13664 - protein, 6 aa, synthetic construct
PEEHCY

SEQ ID NO: 13665 - protein, 6 aa, synthetic construct
PEEHQD

SEQ ID NO: 13666 - protein, 6 aa, synthetic construct
PEEHQE

SEQ ID NO: 13667 - protein, 6 aa, synthetic construct
PEEHQF

SEQ ID NO: 13668 - protein, 6 aa, synthetic construct
PEEHQW

SEQ ID NO: 13669 - protein, 6 aa, synthetic construct
PEEHQY

SEQ ID NO: 13670 - protein, 6 aa, synthetic construct
PEEHED

SEQ ID NO: 13671 - protein, 6 aa, synthetic construct
PEEHEE

SEQ ID NO: 13672 - protein, 6 aa, synthetic construct
PEEHEF

SEQ ID NO: 13673 - protein, 6 aa, synthetic construct
PEEHEW

SEQ ID NO: 13674 - protein, 6 aa, synthetic construct
PEEHEY

SEQ ID NO: 13675 - protein, 6 aa, synthetic construct
PEEHGD

SEQ ID NO: 13676 - protein, 6 aa, synthetic construct
PEEHGE

SEQ ID NO: 13677 - protein, 6 aa, synthetic construct
PEEHGF

SEQ ID NO: 13678 - protein, 6 aa, synthetic construct
PEEHGW

SEQ ID NO: 13679 - protein, 6 aa, synthetic construct
PEEHGY

SEQ ID NO: 13680 - protein, 6 aa, synthetic construct
PEEHHD

SEQ ID NO: 13681 - protein, 6 aa, synthetic construct
PEEHHE

SEQ ID NO: 13682 - protein, 6 aa, synthetic construct
PEEHHF

SEQ ID NO: 13683 - protein, 6 aa, synthetic construct
PEEHHW

SEQ ID NO: 13684 - protein, 6 aa, synthetic construct
PEEHHY

SEQ ID NO: 13685 - protein, 6 aa, synthetic construct
PEEHID

SEQ ID NO: 13686 - protein, 6 aa, synthetic construct
PEEHIE

SEQ ID NO: 13687 - protein, 6 aa, synthetic construct
PEEHIF

SEQ ID NO: 13688 - protein, 6 aa, synthetic construct
PEEHIW

SEQ ID NO: 13689 - protein, 6 aa, synthetic construct
PEEHIY

SEQ ID NO: 13690 - protein, 6 aa, synthetic construct
PEEHLD

SEQ ID NO: 13691 - protein, 6 aa, synthetic construct
PEEHLE

SEQ ID NO: 13692 - protein, 6 aa, synthetic construct
PEEHLF

SEQ ID NO: 13693 - protein, 6 aa, synthetic construct
PEEHLW

SEQ ID NO: 13694 - protein, 6 aa, synthetic construct
PEEHLY

SEQ ID NO: 13695 - protein, 6 aa, synthetic construct
PEEHKD

SEQ ID NO: 13696 - protein, 6 aa, synthetic construct
PEEHKE

SEQ ID NO: 13697 - protein, 6 aa, synthetic construct
PEEHKF

SEQ ID NO: 13698 - protein, 6 aa, synthetic construct
PEEHKW

SEQ ID NO: 13699 - protein, 6 aa, synthetic construct
PEEHKY

SEQ ID NO: 13700 - protein, 6 aa, synthetic construct
PEEHMD

SEQ ID NO: 13701 - protein, 6 aa, synthetic construct
PEEHME

SEQ ID NO: 13702 - protein, 6 aa, synthetic construct
PEEHMF

SEQ ID NO: 13703 - protein, 6 aa, synthetic construct
PEEHMW

SEQ ID NO: 13704 - protein, 6 aa, synthetic construct
PEEHMY

SEQ ID NO: 13705 - protein, 6 aa, synthetic construct
PEEHFD

SEQ ID NO: 13706 - protein, 6 aa, synthetic construct
PEEHFE

SEQ ID NO: 13707 - protein, 6 aa, synthetic construct
PEEHFF

SEQ ID NO: 13708 - protein, 6 aa, synthetic construct
PEEHFW

SEQ ID NO: 13709 - protein, 6 aa, synthetic construct
PEEHFY

SEQ ID NO: 13710 - protein, 6 aa, synthetic construct
PEEHPD

SEQ ID NO: 13711 - protein, 6 aa, synthetic construct
PEEHPE

SEQ ID NO: 13712 - protein, 6 aa, synthetic construct
PEEHPF

SEQ ID NO: 13713 - protein, 6 aa, synthetic construct
PEEHPW

SEQ ID NO: 13714 - protein, 6 aa, synthetic construct
PEEHPY

SEQ ID NO: 13715 - protein, 6 aa, synthetic construct
PEEHSD

SEQ ID NO: 13716 - protein, 6 aa, synthetic construct
PEEHSE

SEQ ID NO: 13717 - protein, 6 aa, synthetic construct
PEEHSF

SEQ ID NO: 13718 - protein, 6 aa, synthetic construct
PEEHSW

SEQ ID NO: 13719 - protein, 6 aa, synthetic construct
PEEHSY

SEQ ID NO: 13720 - protein, 6 aa, synthetic construct
PEEHTD

SEQ ID NO: 13721 - protein, 6 aa, synthetic construct
PEEHTE

SEQ ID NO: 13722 - protein, 6 aa, synthetic construct
PEEHTF

SEQ ID NO: 13723 - protein, 6 aa, synthetic construct
PEEHTW

SEQ ID NO: 13724 - protein, 6 aa, synthetic construct
PEEHTY

SEQ ID NO: 13725 - protein, 6 aa, synthetic construct
PEEHWD

SEQ ID NO: 13726 - protein, 6 aa, synthetic construct
PEEHWE

SEQ ID NO: 13727 - protein, 6 aa, synthetic construct
PEEHWF

SEQ ID NO: 13728 - protein, 6 aa, synthetic construct
PEEHWW

SEQ ID NO: 13729 - protein, 6 aa, synthetic construct
PEEHWY

SEQ ID NO: 13730 - protein, 6 aa, synthetic construct
PEEHYD

SEQ ID NO: 13731 - protein, 6 aa, synthetic construct
PEEHYE

SEQ ID NO: 13732 - protein, 6 aa, synthetic construct
PEEHYF

SEQ ID NO: 13733 - protein, 6 aa, synthetic construct
PEEHYW

SEQ ID NO: 13734 - protein, 6 aa, synthetic construct
PEEHYY

SEQ ID NO: 13735 - protein, 6 aa, synthetic construct
PEEHVD

SEQ ID NO: 13736 - protein, 6 aa, synthetic construct
PEEHVE

SEQ ID NO: 13737 - protein, 6 aa, synthetic construct
PEEHVF

SEQ ID NO: 13738 - protein, 6 aa, synthetic construct
PEEHVW

SEQ ID NO: 13739 - protein, 6 aa, synthetic construct
PEEHVY

SEQ ID NO: 13740 - protein, 6 aa, synthetic construct
PEEIAD

SEQ ID NO: 13741 - protein, 6 aa, synthetic construct
PEEIAE

SEQ ID NO: 13742 - protein, 6 aa, synthetic construct
PEEIAF

SEQ ID NO: 13743 - protein, 6 aa, synthetic construct
PEEIAW

SEQ ID NO: 13744 - protein, 6 aa, synthetic construct
PEEIAY

SEQ ID NO: 13745 - protein, 6 aa, synthetic construct
PEEIRD

SEQ ID NO: 13746 - protein, 6 aa, synthetic construct
PEEIRE

SEQ ID NO: 13747 - protein, 6 aa, synthetic construct
PEEIRF

SEQ ID NO: 13748 - protein, 6 aa, synthetic construct
PEEIRW

SEQ ID NO: 13749 - protein, 6 aa, synthetic construct
PEEIRY

SEQ ID NO: 13750 - protein, 6 aa, synthetic construct
PEEIND

SEQ ID NO: 13751 - protein, 6 aa, synthetic construct
PEEINE

SEQ ID NO: 13752 - protein, 6 aa, synthetic construct
PEEINF

SEQ ID NO: 13753 - protein, 6 aa, synthetic construct
PEEINW

SEQ ID NO: 13754 - protein, 6 aa, synthetic construct
PEEINY

SEQ ID NO: 13755 - protein, 6 aa, synthetic construct
PEEIDD

SEQ ID NO: 13756 - protein, 6 aa, synthetic construct
PEEIDE

SEQ ID NO: 13757 - protein, 6 aa, synthetic construct
PEEIDF

SEQ ID NO: 13758 - protein, 6 aa, synthetic construct
PEEIDW

SEQ ID NO: 13759 - protein, 6 aa, synthetic construct
PEEIDY

SEQ ID NO: 13760 - protein, 6 aa, synthetic construct
PEEICD

SEQ ID NO: 13761 - protein, 6 aa, synthetic construct
PEEICE

SEQ ID NO: 13762 - protein, 6 aa, synthetic construct
PEEICF

SEQ ID NO: 13763 - protein, 6 aa, synthetic construct
PEEICW

SEQ ID NO: 13764 - protein, 6 aa, synthetic construct
PEEICY

SEQ ID NO: 13765 - protein, 6 aa, synthetic construct
PEEIQD

SEQ ID NO: 13766 - protein, 6 aa, synthetic construct
PEEIQE

SEQ ID NO: 13767 - protein, 6 aa, synthetic construct
PEEIQF

SEQ ID NO: 13768 - protein, 6 aa, synthetic construct
PEEIQW

SEQ ID NO: 13769 - protein, 6 aa, synthetic construct
PEEIQY

SEQ ID NO: 13770 - protein, 6 aa, synthetic construct
PEEIED

SEQ ID NO: 13771 - protein, 6 aa, synthetic construct
PEEIEE

SEQ ID NO: 13772 - protein, 6 aa, synthetic construct
PEEIEF

SEQ ID NO: 13773 - protein, 6 aa, synthetic construct
PEEIEW

SEQ ID NO: 13774 - protein, 6 aa, synthetic construct
PEEIEY

SEQ ID NO: 13775 - protein, 6 aa, synthetic construct
PEEIGD

SEQ ID NO: 13776 - protein, 6 aa, synthetic construct
PEEIGE

SEQ ID NO: 13777 - protein, 6 aa, synthetic construct
PEEIGF

SEQ ID NO: 13778 - protein, 6 aa, synthetic construct
PEEIGW

SEQ ID NO: 13779 - protein, 6 aa, synthetic construct
PEEIGY

SEQ ID NO: 13780 - protein, 6 aa, synthetic construct
PEEIHD

SEQ ID NO: 13781 - protein, 6 aa, synthetic construct
PEEIHE

SEQ ID NO: 13782 - protein, 6 aa, synthetic construct
PEEIHF

SEQ ID NO: 13783 - protein, 6 aa, synthetic construct
PEEIHW

SEQ ID NO: 13784 - protein, 6 aa, synthetic construct
PEEIHY

SEQ ID NO: 13785 - protein, 6 aa, synthetic construct
PEEIID

SEQ ID NO: 13786 - protein, 6 aa, synthetic construct
PEEIIE

SEQ ID NO: 13787 - protein, 6 aa, synthetic construct
PEEIIF

SEQ ID NO: 13788 - protein, 6 aa, synthetic construct
PEEIIW

SEQ ID NO: 13789 - protein, 6 aa, synthetic construct
PEEIIY

SEQ ID NO: 13790 - protein, 6 aa, synthetic construct
PEEILD

SEQ ID NO: 13791 - protein, 6 aa, synthetic construct
PEEILE

SEQ ID NO: 13792 - protein, 6 aa, synthetic construct
PEEILF

SEQ ID NO: 13793 - protein, 6 aa, synthetic construct
PEEILW

SEQ ID NO: 13794 - protein, 6 aa, synthetic construct
PEEILY

SEQ ID NO: 13795 - protein, 6 aa, synthetic construct
PEEIKD

SEQ ID NO: 13796 - protein, 6 aa, synthetic construct
PEEIKE

SEQ ID NO: 13797 - protein, 6 aa, synthetic construct
PEEIKF

SEQ ID NO: 13798 - protein, 6 aa, synthetic construct
PEEIKW

SEQ ID NO: 13799 - protein, 6 aa, synthetic construct
PEEIKY

SEQ ID NO: 13800 - protein, 6 aa, synthetic construct
PEEIMD

SEQ ID NO: 13801 - protein, 6 aa, synthetic construct
PEEIME

SEQ ID NO: 13802 - protein, 6 aa, synthetic construct
PEEIMF

SEQ ID NO: 13803 - protein, 6 aa, synthetic construct
PEEIMW

SEQ ID NO: 13804 - protein, 6 aa, synthetic construct
PEEIMY

SEQ ID NO: 13805 - protein, 6 aa, synthetic construct
PEEIFD

SEQ ID NO: 13806 - protein, 6 aa, synthetic construct
PEEIFE

SEQ ID NO: 13807 - protein, 6 aa, synthetic construct
PEEIFF

SEQ ID NO: 13808 - protein, 6 aa, synthetic construct
PEEIFW

SEQ ID NO: 13809 - protein, 6 aa, synthetic construct
PEEIFY

SEQ ID NO: 13810 - protein, 6 aa, synthetic construct
PEEIPD

SEQ ID NO: 13811 - protein, 6 aa, synthetic construct
PEEIPE

SEQ ID NO: 13812 - protein, 6 aa, synthetic construct
PEEIPF

SEQ ID NO: 13813 - protein, 6 aa, synthetic construct
PEEIPW

SEQ ID NO: 13814 - protein, 6 aa, synthetic construct
PEEIPY

SEQ ID NO: 13815 - protein, 6 aa, synthetic construct
PEEISD

SEQ ID NO: 13816 - protein, 6 aa, synthetic construct
PEEISE

SEQ ID NO: 13817 - protein, 6 aa, synthetic construct
PEEISF

SEQ ID NO: 13818 - protein, 6 aa, synthetic construct
PEEISW

SEQ ID NO: 13819 - protein, 6 aa, synthetic construct
PEEISY

SEQ ID NO: 13820 - protein, 6 aa, synthetic construct
PEEITD

SEQ ID NO: 13821 - protein, 6 aa, synthetic construct
PEEITE

SEQ ID NO: 13822 - protein, 6 aa, synthetic construct
PEEITF

SEQ ID NO: 13823 - protein, 6 aa, synthetic construct
PEEITW

SEQ ID NO: 13824 - protein, 6 aa, synthetic construct
PEEITY

SEQ ID NO: 13825 - protein, 6 aa, synthetic construct
PEEIWD

SEQ ID NO: 13826 - protein, 6 aa, synthetic construct
PEEIWE

SEQ ID NO: 13827 - protein, 6 aa, synthetic construct
PEEIWF

SEQ ID NO: 13828 - protein, 6 aa, synthetic construct
PEEIWW

SEQ ID NO: 13829 - protein, 6 aa, synthetic construct
PEEIWY

SEQ ID NO: 13830 - protein, 6 aa, synthetic construct
PEEIYD

SEQ ID NO: 13831 - protein, 6 aa, synthetic construct
PEEIYE

SEQ ID NO: 13832 - protein, 6 aa, synthetic construct
PEEIYF

SEQ ID NO: 13833 - protein, 6 aa, synthetic construct
PEEIYW

SEQ ID NO: 13834 - protein, 6 aa, synthetic construct
PEEIYY

SEQ ID NO: 13835 - protein, 6 aa, synthetic construct
PEEIVD

SEQ ID NO: 13836 - protein, 6 aa, synthetic construct
PEEIVE

SEQ ID NO: 13837 - protein, 6 aa, synthetic construct
PEEIVF

SEQ ID NO: 13838 - protein, 6 aa, synthetic construct
PEEIVW

SEQ ID NO: 13839 - protein, 6 aa, synthetic construct
PEEIVY

SEQ ID NO: 13840 - protein, 6 aa, synthetic construct
PEELAD

SEQ ID NO: 13841 - protein, 6 aa, synthetic construct
PEELAE

SEQ ID NO: 13842 - protein, 6 aa, synthetic construct
PEELAF

SEQ ID NO: 13843 - protein, 6 aa, synthetic construct
PEELAW

SEQ ID NO: 13844 - protein, 6 aa, synthetic construct
PEELAY

SEQ ID NO: 13845 - protein, 6 aa, synthetic construct
PEELRD

SEQ ID NO: 13846 - protein, 6 aa, synthetic construct
PEELRE

SEQ ID NO: 13847 - protein, 6 aa, synthetic construct
PEELRF

SEQ ID NO: 13848 - protein, 6 aa, synthetic construct
PEELRW

SEQ ID NO: 13849 - protein, 6 aa, synthetic construct
PEELRY

SEQ ID NO: 13850 - protein, 6 aa, synthetic construct
PEELND

SEQ ID NO: 13851 - protein, 6 aa, synthetic construct
PEELNE

SEQ ID NO: 13852 - protein, 6 aa, synthetic construct
PEELNF

SEQ ID NO: 13853 - protein, 6 aa, synthetic construct
PEELNW

SEQ ID NO: 13854 - protein, 6 aa, synthetic construct
PEELNY

SEQ ID NO: 13855 - protein, 6 aa, synthetic construct
PEELDD

SEQ ID NO: 13856 - protein, 6 aa, synthetic construct
PEELDE

SEQ ID NO: 13857 - protein, 6 aa, synthetic construct
PEELDF

SEQ ID NO: 13858 - protein, 6 aa, synthetic construct
PEELDW

SEQ ID NO: 13859 - protein, 6 aa, synthetic construct
PEELDY

SEQ ID NO: 13860 - protein, 6 aa, synthetic construct
PEELCD

SEQ ID NO: 13861 - protein, 6 aa, synthetic construct
PEELCE

SEQ ID NO: 13862 - protein, 6 aa, synthetic construct
PEELCF

SEQ ID NO: 13863 - protein, 6 aa, synthetic construct
PEELCW

SEQ ID NO: 13864 - protein, 6 aa, synthetic construct
PEELCY

SEQ ID NO: 13865 - protein, 6 aa, synthetic construct
PEELQD

SEQ ID NO: 13866 - protein, 6 aa, synthetic construct
PEELQE

SEQ ID NO: 13867 - protein, 6 aa, synthetic construct
PEELQF

SEQ ID NO: 13868 - protein, 6 aa, synthetic construct
PEELQW

SEQ ID NO: 13869 - protein, 6 aa, synthetic construct
PEELQY

SEQ ID NO: 13870 - protein, 6 aa, synthetic construct
PEELED

SEQ ID NO: 13871 - protein, 6 aa, synthetic construct
PEELEE

SEQ ID NO: 13872 - protein, 6 aa, synthetic construct
PEELEF

SEQ ID NO: 13873 - protein, 6 aa, synthetic construct
PEELEW

SEQ ID NO: 13874 - protein, 6 aa, synthetic construct
PEELEY

SEQ ID NO: 13875 - protein, 6 aa, synthetic construct
PEELGD

SEQ ID NO: 13876 - protein, 6 aa, synthetic construct
PEELGE

SEQ ID NO: 13877 - protein, 6 aa, synthetic construct
PEELGF

SEQ ID NO: 13878 - protein, 6 aa, synthetic construct
PEELGW

SEQ ID NO: 13879 - protein, 6 aa, synthetic construct
PEELGY

SEQ ID NO: 13880 - protein, 6 aa, synthetic construct
PEELHD

SEQ ID NO: 13881 - protein, 6 aa, synthetic construct
PEELHE

SEQ ID NO: 13882 - protein, 6 aa, synthetic construct
PEELHF

SEQ ID NO: 13883 - protein, 6 aa, synthetic construct
PEELHW

SEQ ID NO: 13884 - protein, 6 aa, synthetic construct
PEELHY

SEQ ID NO: 13885 - protein, 6 aa, synthetic construct
PEELID

SEQ ID NO: 13886 - protein, 6 aa, synthetic construct
PEELIE

SEQ ID NO: 13887 - protein, 6 aa, synthetic construct
PEELIF

SEQ ID NO: 13888 - protein, 6 aa, synthetic construct
PEELIW

SEQ ID NO: 13889 - protein, 6 aa, synthetic construct
PEELIY

SEQ ID NO: 13890 - protein, 6 aa, synthetic construct
PEELLD

SEQ ID NO: 13891 - protein, 6 aa, synthetic construct
PEELLE

SEQ ID NO: 13892 - protein, 6 aa, synthetic construct
PEELLF

SEQ ID NO: 13893 - protein, 6 aa, synthetic construct
PEELLW

SEQ ID NO: 13894 - protein, 6 aa, synthetic construct
PEELLY

SEQ ID NO: 13895 - protein, 6 aa, synthetic construct
PEELKD

SEQ ID NO: 13896 - protein, 6 aa, synthetic construct
PEELKE

SEQ ID NO: 13897 - protein, 6 aa, synthetic construct
PEELKF

SEQ ID NO: 13898 - protein, 6 aa, synthetic construct
PEELKW

SEQ ID NO: 13899 - protein, 6 aa, synthetic construct
PEELKY

SEQ ID NO: 13900 - protein, 6 aa, synthetic construct
PEELMD

SEQ ID NO: 13901 - protein, 6 aa, synthetic construct
PEELME

SEQ ID NO: 13902 - protein, 6 aa, synthetic construct
PEELMF

SEQ ID NO: 13903 - protein, 6 aa, synthetic construct
PEELMW

SEQ ID NO: 13904 - protein, 6 aa, synthetic construct
PEELMY

SEQ ID NO: 13905 - protein, 6 aa, synthetic construct
PEELFD

SEQ ID NO: 13906 - protein, 6 aa, synthetic construct
PEELFE

SEQ ID NO: 13907 - protein, 6 aa, synthetic construct
PEELFF

SEQ ID NO: 13908 - protein, 6 aa, synthetic construct
PEELFW

SEQ ID NO: 13909 - protein, 6 aa, synthetic construct
PEELFY

SEQ ID NO: 13910 - protein, 6 aa, synthetic construct
PEELPD

SEQ ID NO: 13911 - protein, 6 aa, synthetic construct
PEELPE

SEQ ID NO: 13912 - protein, 6 aa, synthetic construct
PEELPF

SEQ ID NO: 13913 - protein, 6 aa, synthetic construct
PEELPW

SEQ ID NO: 13914 - protein, 6 aa, synthetic construct
PEELPY

SEQ ID NO: 13915 - protein, 6 aa, synthetic construct
PEELSD

SEQ ID NO: 13916 - protein, 6 aa, synthetic construct
PEELSE

SEQ ID NO: 13917 - protein, 6 aa, synthetic construct
PEELSF

SEQ ID NO: 13918 - protein, 6 aa, synthetic construct
PEELSW

SEQ ID NO: 13919 - protein, 6 aa, synthetic construct
PEELSY

SEQ ID NO: 13920 - protein, 6 aa, synthetic construct
PEELTD

SEQ ID NO: 13921 - protein, 6 aa, synthetic construct
PEELTE

SEQ ID NO: 13922 - protein, 6 aa, synthetic construct
PEELTF

SEQ ID NO: 13923 - protein, 6 aa, synthetic construct
PEELTW

SEQ ID NO: 13924 - protein, 6 aa, synthetic construct
PEELTY

SEQ ID NO: 13925 - protein, 6 aa, synthetic construct
PEELWD

SEQ ID NO: 13926 - protein, 6 aa, synthetic construct
PEELWE

SEQ ID NO: 13927 - protein, 6 aa, synthetic construct
PEELWF

SEQ ID NO: 13928 - protein, 6 aa, synthetic construct
PEELWW

SEQ ID NO: 13929 - protein, 6 aa, synthetic construct
PEELWY

SEQ ID NO: 13930 - protein, 6 aa, synthetic construct
PEELYD

SEQ ID NO: 13931 - protein, 6 aa, synthetic construct
PEELYE

SEQ ID NO: 13932 - protein, 6 aa, synthetic construct
PEELYF

SEQ ID NO: 13933 - protein, 6 aa, synthetic construct
PEELYW

SEQ ID NO: 13934 - protein, 6 aa, synthetic construct
PEELYY

SEQ ID NO: 13935 - protein, 6 aa, synthetic construct
PEELVD

SEQ ID NO: 13936 - protein, 6 aa, synthetic construct
PEELVE

SEQ ID NO: 13937 - protein, 6 aa, synthetic construct
PEELVF

SEQ ID NO: 13938 - protein, 6 aa, synthetic construct
PEELVW

SEQ ID NO: 13939 - protein, 6 aa, synthetic construct
PEELVY

SEQ ID NO: 13940 - protein, 6 aa, synthetic construct
PEEKAD

SEQ ID NO: 13941 - protein, 6 aa, synthetic construct
PEEKAE

SEQ ID NO: 13942 - protein, 6 aa, synthetic construct
PEEKAF

SEQ ID NO: 13943 - protein, 6 aa, synthetic construct
PEEKAW

SEQ ID NO: 13944 - protein, 6 aa, synthetic construct
PEEKAY

SEQ ID NO: 13945 - protein, 6 aa, synthetic construct
PEEKRD

SEQ ID NO: 13946 - protein, 6 aa, synthetic construct
PEEKRE

SEQ ID NO: 13947 - protein, 6 aa, synthetic construct
PEEKRF

SEQ ID NO: 13948 - protein, 6 aa, synthetic construct
PEEKRW

SEQ ID NO: 13949 - protein, 6 aa, synthetic construct
PEEKRY

SEQ ID NO: 13950 - protein, 6 aa, synthetic construct
PEEKND

SEQ ID NO: 13951 - protein, 6 aa, synthetic construct
PEEKNE

SEQ ID NO: 13952 - protein, 6 aa, synthetic construct
PEEKNF

SEQ ID NO: 13953 - protein, 6 aa, synthetic construct
PEEKNW

SEQ ID NO: 13954 - protein, 6 aa, synthetic construct
PEEKNY

SEQ ID NO: 13955 - protein, 6 aa, synthetic construct
PEEKDD

SEQ ID NO: 13956 - protein, 6 aa, synthetic construct
PEEKDE

SEQ ID NO: 13957 - protein, 6 aa, synthetic construct
PEEKDF

SEQ ID NO: 13958 - protein, 6 aa, synthetic construct
PEEKDW

SEQ ID NO: 13959 - protein, 6 aa, synthetic construct
PEEKDY

SEQ ID NO: 13960 - protein, 6 aa, synthetic construct
PEEKCD

SEQ ID NO: 13961 - protein, 6 aa, synthetic construct
PEEKCE

SEQ ID NO: 13962 - protein, 6 aa, synthetic construct
PEEKCF

SEQ ID NO: 13963 - protein, 6 aa, synthetic construct
PEEKCW

SEQ ID NO: 13964 - protein, 6 aa, synthetic construct
PEEKCY

SEQ ID NO: 13965 - protein, 6 aa, synthetic construct
PEEKQD

SEQ ID NO: 13966 - protein, 6 aa, synthetic construct
PEEKQE

SEQ ID NO: 13967 - protein, 6 aa, synthetic construct
PEEKQF

SEQ ID NO: 13968 - protein, 6 aa, synthetic construct
PEEKQW

SEQ ID NO: 13969 - protein, 6 aa, synthetic construct
PEEKQY

SEQ ID NO: 13970 - protein, 6 aa, synthetic construct
PEEKED

SEQ ID NO: 13971 - protein, 6 aa, synthetic construct
PEEKEE

SEQ ID NO: 13972 - protein, 6 aa, synthetic construct
PEEKEF

SEQ ID NO: 13973 - protein, 6 aa, synthetic construct
PEEKEW

SEQ ID NO: 13974 - protein, 6 aa, synthetic construct
PEEKEY

SEQ ID NO: 13975 - protein, 6 aa, synthetic construct
PEEKGD

SEQ ID NO: 13976 - protein, 6 aa, synthetic construct
PEEKGE

SEQ ID NO: 13977 - protein, 6 aa, synthetic construct
PEEKGF

SEQ ID NO: 13978 - protein, 6 aa, synthetic construct
PEEKGW

SEQ ID NO: 13979 - protein, 6 aa, synthetic construct
PEEKGY

SEQ ID NO: 13980 - protein, 6 aa, synthetic construct
PEEKHD

SEQ ID NO: 13981 - protein, 6 aa, synthetic construct
PEEKHE

SEQ ID NO: 13982 - protein, 6 aa, synthetic construct
PEEKHF

SEQ ID NO: 13983 - protein, 6 aa, synthetic construct
PEEKHW

SEQ ID NO: 13984 - protein, 6 aa, synthetic construct
PEEKHY

SEQ ID NO: 13985 - protein, 6 aa, synthetic construct
PEEKID

SEQ ID NO: 13986 - protein, 6 aa, synthetic construct
PEEKIE

SEQ ID NO: 13987 - protein, 6 aa, synthetic construct
PEEKIF

SEQ ID NO: 13988 - protein, 6 aa, synthetic construct
PEEKIW

SEQ ID NO: 13989 - protein, 6 aa, synthetic construct
PEEKIY

SEQ ID NO: 13990 - protein, 6 aa, synthetic construct
PEEKLD

SEQ ID NO: 13991 - protein, 6 aa, synthetic construct
PEEKLE

SEQ ID NO: 13992 - protein, 6 aa, synthetic construct
PEEKLF

SEQ ID NO: 13993 - protein, 6 aa, synthetic construct
PEEKLW

SEQ ID NO: 13994 - protein, 6 aa, synthetic construct
PEEKLY

SEQ ID NO: 13995 - protein, 6 aa, synthetic construct
PEEKKD

SEQ ID NO: 13996 - protein, 6 aa, synthetic construct
PEEKKE

SEQ ID NO: 13997 - protein, 6 aa, synthetic construct
PEEKKF

SEQ ID NO: 13998 - protein, 6 aa, synthetic construct
PEEKKW

SEQ ID NO: 13999 - protein, 6 aa, synthetic construct
PEEKKY

SEQ ID NO: 14000 - protein, 6 aa, synthetic construct
PEEKMD

SEQ ID NO: 14001 - protein, 6 aa, synthetic construct
PEEKME

SEQ ID NO: 14002 - protein, 6 aa, synthetic construct
PEEKMF

SEQ ID NO: 14003 - protein, 6 aa, synthetic construct
PEEKMW

SEQ ID NO: 14004 - protein, 6 aa, synthetic construct
PEEKMY

SEQ ID NO: 14005 - protein, 6 aa, synthetic construct
PEEKFD

SEQ ID NO: 14006 - protein, 6 aa, synthetic construct
PEEKFE

SEQ ID NO: 14007 - protein, 6 aa, synthetic construct
PEEKFF

SEQ ID NO: 14008 - protein, 6 aa, synthetic construct
PEEKFW

SEQ ID NO: 14009 - protein, 6 aa, synthetic construct
PEEKFY

SEQ ID NO: 14010 - protein, 6 aa, synthetic construct
PEEKPD

SEQ ID NO: 14011 - protein, 6 aa, synthetic construct
PEEKPE

SEQ ID NO: 14012 - protein, 6 aa, synthetic construct
PEEKPF

SEQ ID NO: 14013 - protein, 6 aa, synthetic construct
PEEKPW

SEQ ID NO: 14014 - protein, 6 aa, synthetic construct
PEEKPY

SEQ ID NO: 14015 - protein, 6 aa, synthetic construct
PEEKSD

SEQ ID NO: 14016 - protein, 6 aa, synthetic construct
PEEKSE

SEQ ID NO: 14017 - protein, 6 aa, synthetic construct
PEEKSF

SEQ ID NO: 14018 - protein, 6 aa, synthetic construct
PEEKSW

SEQ ID NO: 14019 - protein, 6 aa, synthetic construct
PEEKSY

SEQ ID NO: 14020 - protein, 6 aa, synthetic construct
PEEKTD

SEQ ID NO: 14021 - protein, 6 aa, synthetic construct
PEEKTE

SEQ ID NO: 14022 - protein, 6 aa, synthetic construct
PEEKTF

SEQ ID NO: 14023 - protein, 6 aa, synthetic construct
PEEKTW

SEQ ID NO: 14024 - protein, 6 aa, synthetic construct
PEEKTY

SEQ ID NO: 14025 - protein, 6 aa, synthetic construct
PEEKWD

SEQ ID NO: 14026 - protein, 6 aa, synthetic construct
PEEKWE

SEQ ID NO: 14027 - protein, 6 aa, synthetic construct
PEEKWF

SEQ ID NO: 14028 - protein, 6 aa, synthetic construct
PEEKWW

SEQ ID NO: 14029 - protein, 6 aa, synthetic construct
PEEKWY

SEQ ID NO: 14030 - protein, 6 aa, synthetic construct
PEEKYD

SEQ ID NO: 14031 - protein, 6 aa, synthetic construct
PEEKYE

SEQ ID NO: 14032 - protein, 6 aa, synthetic construct
PEEKYF

SEQ ID NO: 14033 - protein, 6 aa, synthetic construct
PEEKYW

SEQ ID NO: 14034 - protein, 6 aa, synthetic construct
PEEKYY

SEQ ID NO: 14035 - protein, 6 aa, synthetic construct
PEEKVD

SEQ ID NO: 14036 - protein, 6 aa, synthetic construct
PEEKVE

SEQ ID NO: 14037 - protein, 6 aa, synthetic construct
PEEKVF

SEQ ID NO: 14038 - protein, 6 aa, synthetic construct
PEEKVW

SEQ ID NO: 14039 - protein, 6 aa, synthetic construct
PEEKVY

SEQ ID NO: 14040 - protein, 6 aa, synthetic construct
PEEMAD

SEQ ID NO: 14041 - protein, 6 aa, synthetic construct
PEEMAE

SEQ ID NO: 14042 - protein, 6 aa, synthetic construct
PEEMAF

SEQ ID NO: 14043 - protein, 6 aa, synthetic construct
PEEMAW

SEQ ID NO: 14044 - protein, 6 aa, synthetic construct
PEEMAY

SEQ ID NO: 14045 - protein, 6 aa, synthetic construct
PEEMRD

SEQ ID NO: 14046 - protein, 6 aa, synthetic construct
PEEMRE

SEQ ID NO: 14047 - protein, 6 aa, synthetic construct
PEEMRF

SEQ ID NO: 14048 - protein, 6 aa, synthetic construct
PEEMRW

SEQ ID NO: 14049 - protein, 6 aa, synthetic construct
PEEMRY

SEQ ID NO: 14050 - protein, 6 aa, synthetic construct
PEEMND

SEQ ID NO: 14051 - protein, 6 aa, synthetic construct
PEEMNE

SEQ ID NO: 14052 - protein, 6 aa, synthetic construct
PEEMNF

SEQ ID NO: 14053 - protein, 6 aa, synthetic construct
PEEMNW

SEQ ID NO: 14054 - protein, 6 aa, synthetic construct
PEEMNY

SEQ ID NO: 14055 - protein, 6 aa, synthetic construct
PEEMDD

SEQ ID NO: 14056 - protein, 6 aa, synthetic construct
PEEMDE

SEQ ID NO: 14057 - protein, 6 aa, synthetic construct
PEEMDF

SEQ ID NO: 14058 - protein, 6 aa, synthetic construct
PEEMDW

SEQ ID NO: 14059 - protein, 6 aa, synthetic construct
PEEMDY

SEQ ID NO: 14060 - protein, 6 aa, synthetic construct
PEEMCD

SEQ ID NO: 14061 - protein, 6 aa, synthetic construct
PEEMCE

SEQ ID NO: 14062 - protein, 6 aa, synthetic construct
PEEMCF

SEQ ID NO: 14063 - protein, 6 aa, synthetic construct
PEEMCW

SEQ ID NO: 14064 - protein, 6 aa, synthetic construct
PEEMCY

SEQ ID NO: 14065 - protein, 6 aa, synthetic construct
PEEMQD

SEQ ID NO: 14066 - protein, 6 aa, synthetic construct
PEEMQE

SEQ ID NO: 14067 - protein, 6 aa, synthetic construct
PEEMQF

SEQ ID NO: 14068 - protein, 6 aa, synthetic construct
PEEMQW

SEQ ID NO: 14069 - protein, 6 aa, synthetic construct
PEEMQY

SEQ ID NO: 14070 - protein, 6 aa, synthetic construct
PEEMED

SEQ ID NO: 14071 - protein, 6 aa, synthetic construct
PEEMEE

SEQ ID NO: 14072 - protein, 6 aa, synthetic construct
PEEMEF

SEQ ID NO: 14073 - protein, 6 aa, synthetic construct
PEEMEW

SEQ ID NO: 14074 - protein, 6 aa, synthetic construct
PEEMEY

SEQ ID NO: 14075 - protein, 6 aa, synthetic construct
PEEMGD

SEQ ID NO: 14076 - protein, 6 aa, synthetic construct
PEEMGE

SEQ ID NO: 14077 - protein, 6 aa, synthetic construct
PEEMGF

SEQ ID NO: 14078 - protein, 6 aa, synthetic construct
PEEMGW

SEQ ID NO: 14079 - protein, 6 aa, synthetic construct
PEEMGY

SEQ ID NO: 14080 - protein, 6 aa, synthetic construct
PEEMHD

SEQ ID NO: 14081 - protein, 6 aa, synthetic construct
PEEMHE

SEQ ID NO: 14082 - protein, 6 aa, synthetic construct
PEEMHF

SEQ ID NO: 14083 - protein, 6 aa, synthetic construct
PEEMHW

SEQ ID NO: 14084 - protein, 6 aa, synthetic construct
PEEMHY

SEQ ID NO: 14085 - protein, 6 aa, synthetic construct
PEEMID

SEQ ID NO: 14086 - protein, 6 aa, synthetic construct
PEEMIE

SEQ ID NO: 14087 - protein, 6 aa, synthetic construct
PEEMIF

SEQ ID NO: 14088 - protein, 6 aa, synthetic construct
PEEMIW

SEQ ID NO: 14089 - protein, 6 aa, synthetic construct
PEEMIY

SEQ ID NO: 14090 - protein, 6 aa, synthetic construct
PEEMLD

SEQ ID NO: 14091 - protein, 6 aa, synthetic construct
PEEMLE

SEQ ID NO: 14092 - protein, 6 aa, synthetic construct
PEEMLF

SEQ ID NO: 14093 - protein, 6 aa, synthetic construct
PEEMLW

SEQ ID NO: 14094 - protein, 6 aa, synthetic construct
PEEMLY

SEQ ID NO: 14095 - protein, 6 aa, synthetic construct
PEEMKD

SEQ ID NO: 14096 - protein, 6 aa, synthetic construct
PEEMKE

SEQ ID NO: 14097 - protein, 6 aa, synthetic construct
PEEMKF

SEQ ID NO: 14098 - protein, 6 aa, synthetic construct
PEEMKW

SEQ ID NO: 14099 - protein, 6 aa, synthetic construct
PEEMKY

SEQ ID NO: 14100 - protein, 6 aa, synthetic construct
PEEMMD

SEQ ID NO: 14101 - protein, 6 aa, synthetic construct
PEEMME

SEQ ID NO: 14102 - protein, 6 aa, synthetic construct
PEEMMF

SEQ ID NO: 14103 - protein, 6 aa, synthetic construct
PEEMMW

SEQ ID NO: 14104 - protein, 6 aa, synthetic construct
PEEMMY

SEQ ID NO: 14105 - protein, 6 aa, synthetic construct
PEEMFD

SEQ ID NO: 14106 - protein, 6 aa, synthetic construct
PEEMFE

SEQ ID NO: 14107 - protein, 6 aa, synthetic construct
PEEMFF

SEQ ID NO: 14108 - protein, 6 aa, synthetic construct
PEEMFW

SEQ ID NO: 14109 - protein, 6 aa, synthetic construct
PEEMFY

SEQ ID NO: 14110 - protein, 6 aa, synthetic construct
PEEMPD

SEQ ID NO: 14111 - protein, 6 aa, synthetic construct
PEEMPE

SEQ ID NO: 14112 - protein, 6 aa, synthetic construct
PEEMPF

SEQ ID NO: 14113 - protein, 6 aa, synthetic construct
PEEMPW

SEQ ID NO: 14114 - protein, 6 aa, synthetic construct
PEEMPY

SEQ ID NO: 14115 - protein, 6 aa, synthetic construct
PEEMSD

SEQ ID NO: 14116 - protein, 6 aa, synthetic construct
PEEMSE

SEQ ID NO: 14117 - protein, 6 aa, synthetic construct
PEEMSF

SEQ ID NO: 14118 - protein, 6 aa, synthetic construct
PEEMSW

SEQ ID NO: 14119 - protein, 6 aa, synthetic construct
PEEMSY

SEQ ID NO: 14120 - protein, 6 aa, synthetic construct
PEEMTD

SEQ ID NO: 14121 - protein, 6 aa, synthetic construct
PEEMTE

SEQ ID NO: 14122 - protein, 6 aa, synthetic construct
PEEMTF

SEQ ID NO: 14123 - protein, 6 aa, synthetic construct
PEEMTW

SEQ ID NO: 14124 - protein, 6 aa, synthetic construct
PEEMTY

SEQ ID NO: 14125 - protein, 6 aa, synthetic construct
PEEMWD

SEQ ID NO: 14126 - protein, 6 aa, synthetic construct
PEEMWE

SEQ ID NO: 14127 - protein, 6 aa, synthetic construct
PEEMWF

SEQ ID NO: 14128 - protein, 6 aa, synthetic construct
PEEMWW

SEQ ID NO: 14129 - protein, 6 aa, synthetic construct
PEEMWY

SEQ ID NO: 14130 - protein, 6 aa, synthetic construct
PEEMYD

SEQ ID NO: 14131 - protein, 6 aa, synthetic construct
PEEMYE

SEQ ID NO: 14132 - protein, 6 aa, synthetic construct
PEEMYF

SEQ ID NO: 14133 - protein, 6 aa, synthetic construct
PEEMYW

SEQ ID NO: 14134 - protein, 6 aa, synthetic construct
PEEMYY

SEQ ID NO: 14135 - protein, 6 aa, synthetic construct
PEEMVD

SEQ ID NO: 14136 - protein, 6 aa, synthetic construct
PEEMVE

SEQ ID NO: 14137 - protein, 6 aa, synthetic construct
PEEMVF

SEQ ID NO: 14138 - protein, 6 aa, synthetic construct
PEEMVW

SEQ ID NO: 14139 - protein, 6 aa, synthetic construct
PEEMVY

SEQ ID NO: 14140 - protein, 6 aa, synthetic construct
PEEFAD

SEQ ID NO: 14141 - protein, 6 aa, synthetic construct
PEEFAE

SEQ ID NO: 14142 - protein, 6 aa, synthetic construct
PEEFAF

SEQ ID NO: 14143 - protein, 6 aa, synthetic construct
PEEFAW

SEQ ID NO: 14144 - protein, 6 aa, synthetic construct
PEEFAY

SEQ ID NO: 14145 - protein, 6 aa, synthetic construct
PEEFRD

SEQ ID NO: 14146 - protein, 6 aa, synthetic construct
PEEFRE

SEQ ID NO: 14147 - protein, 6 aa, synthetic construct
PEEFRF

SEQ ID NO: 14148 - protein, 6 aa, synthetic construct
PEEFRW

SEQ ID NO: 14149 - protein, 6 aa, synthetic construct
PEEFRY

SEQ ID NO: 14150 - protein, 6 aa, synthetic construct
PEEFND

SEQ ID NO: 14151 - protein, 6 aa, synthetic construct
PEEFNE

SEQ ID NO: 14152 - protein, 6 aa, synthetic construct
PEEFNF

SEQ ID NO: 14153 - protein, 6 aa, synthetic construct
PEEFNW

SEQ ID NO: 14154 - protein, 6 aa, synthetic construct
PEEFNY

SEQ ID NO: 14155 - protein, 6 aa, synthetic construct
PEEFDD

SEQ ID NO: 14156 - protein, 6 aa, synthetic construct
PEEFDE

SEQ ID NO: 14157 - protein, 6 aa, synthetic construct
PEEFDF

SEQ ID NO: 14158 - protein, 6 aa, synthetic construct
PEEFDW

SEQ ID NO: 14159 - protein, 6 aa, synthetic construct
PEEFDY

SEQ ID NO: 14160 - protein, 6 aa, synthetic construct
PEEFCD

SEQ ID NO: 14161 - protein, 6 aa, synthetic construct
PEEFCE

SEQ ID NO: 14162 - protein, 6 aa, synthetic construct
PEEFCF

SEQ ID NO: 14163 - protein, 6 aa, synthetic construct
PEEFCW

SEQ ID NO: 14164 - protein, 6 aa, synthetic construct
PEEFCY

SEQ ID NO: 14165 - protein, 6 aa, synthetic construct
PEEFQD

SEQ ID NO: 14166 - protein, 6 aa, synthetic construct
PEEFQE

SEQ ID NO: 14167 - protein, 6 aa, synthetic construct
PEEFQF

SEQ ID NO: 14168 - protein, 6 aa, synthetic construct
PEEFQW

SEQ ID NO: 14169 - protein, 6 aa, synthetic construct
PEEFQY

SEQ ID NO: 14170 - protein, 6 aa, synthetic construct
PEEFED

SEQ ID NO: 14171 - protein, 6 aa, synthetic construct
PEEFEE

SEQ ID NO: 14172 - protein, 6 aa, synthetic construct
PEEFEF

SEQ ID NO: 14173 - protein, 6 aa, synthetic construct
PEEFEW

SEQ ID NO: 14174 - protein, 6 aa, synthetic construct
PEEFEY

SEQ ID NO: 14175 - protein, 6 aa, synthetic construct
PEEFGD

SEQ ID NO: 14176 - protein, 6 aa, synthetic construct
PEEFGE

SEQ ID NO: 14177 - protein, 6 aa, synthetic construct
PEEFGF

SEQ ID NO: 14178 - protein, 6 aa, synthetic construct
PEEFGW

SEQ ID NO: 14179 - protein, 6 aa, synthetic construct
PEEFGY

SEQ ID NO: 14180 - protein, 6 aa, synthetic construct
PEEFHD

SEQ ID NO: 14181 - protein, 6 aa, synthetic construct
PEEFHE

SEQ ID NO: 14182 - protein, 6 aa, synthetic construct
PEEFHF

SEQ ID NO: 14183 - protein, 6 aa, synthetic construct
PEEFHW

SEQ ID NO: 14184 - protein, 6 aa, synthetic construct
PEEFHY

SEQ ID NO: 14185 - protein, 6 aa, synthetic construct
PEEFID

SEQ ID NO: 14186 - protein, 6 aa, synthetic construct
PEEFIE

SEQ ID NO: 14187 - protein, 6 aa, synthetic construct
PEEFIF

SEQ ID NO: 14188 - protein, 6 aa, synthetic construct
PEEFIW

SEQ ID NO: 14189 - protein, 6 aa, synthetic construct
PEEFIY

SEQ ID NO: 14190 - protein, 6 aa, synthetic construct
PEEFLD

SEQ ID NO: 14191 - protein, 6 aa, synthetic construct
PEEFLE

SEQ ID NO: 14192 - protein, 6 aa, synthetic construct
PEEFLF

SEQ ID NO: 14193 - protein, 6 aa, synthetic construct
PEEFLW

SEQ ID NO: 14194 - protein, 6 aa, synthetic construct
PEEFLY

SEQ ID NO: 14195 - protein, 6 aa, synthetic construct
PEEFKD

SEQ ID NO: 14196 - protein, 6 aa, synthetic construct
PEEFKE

SEQ ID NO: 14197 - protein, 6 aa, synthetic construct
PEEFKF

SEQ ID NO: 14198 - protein, 6 aa, synthetic construct
PEEFKW

SEQ ID NO: 14199 - protein, 6 aa, synthetic construct
PEEFKY

SEQ ID NO: 14200 - protein, 6 aa, synthetic construct
PEEFMD

SEQ ID NO: 14201 - protein, 6 aa, synthetic construct
PEEFME

SEQ ID NO: 14202 - protein, 6 aa, synthetic construct
PEEFMF

SEQ ID NO: 14203 - protein, 6 aa, synthetic construct
PEEFMW

SEQ ID NO: 14204 - protein, 6 aa, synthetic construct
PEEFMY

SEQ ID NO: 14205 - protein, 6 aa, synthetic construct
PEEFFD

SEQ ID NO: 14206 - protein, 6 aa, synthetic construct
PEEFFE

SEQ ID NO: 14207 - protein, 6 aa, synthetic construct
PEEFFF

SEQ ID NO: 14208 - protein, 6 aa, synthetic construct
PEEFFW

SEQ ID NO: 14209 - protein, 6 aa, synthetic construct
PEEFFY

SEQ ID NO: 14210 - protein, 6 aa, synthetic construct
PEEFPD

SEQ ID NO: 14211 - protein, 6 aa, synthetic construct
PEEFPE

SEQ ID NO: 14212 - protein, 6 aa, synthetic construct
PEEFPF

SEQ ID NO: 14213 - protein, 6 aa, synthetic construct
PEEFPW

SEQ ID NO: 14214 - protein, 6 aa, synthetic construct
PEEFPY

SEQ ID NO: 14215 - protein, 6 aa, synthetic construct
PEEFSD

SEQ ID NO: 14216 - protein, 6 aa, synthetic construct
PEEFSE

SEQ ID NO: 14217 - protein, 6 aa, synthetic construct
PEEFSF

SEQ ID NO: 14218 - protein, 6 aa, synthetic construct
PEEFSW

SEQ ID NO: 14219 - protein, 6 aa, synthetic construct
PEEFSY

SEQ ID NO: 14220 - protein, 6 aa, synthetic construct
PEEFTD

SEQ ID NO: 14221 - protein, 6 aa, synthetic construct
PEEFTE

SEQ ID NO: 14222 - protein, 6 aa, synthetic construct
PEEFTF

SEQ ID NO: 14223 - protein, 6 aa, synthetic construct
PEEFTW

SEQ ID NO: 14224 - protein, 6 aa, synthetic construct
PEEFTY

SEQ ID NO: 14225 - protein, 6 aa, synthetic construct
PEEFWD

SEQ ID NO: 14226 - protein, 6 aa, synthetic construct
PEEFWE

SEQ ID NO: 14227 - protein, 6 aa, synthetic construct
PEEFWF

SEQ ID NO: 14228 - protein, 6 aa, synthetic construct
PEEFWW

SEQ ID NO: 14229 - protein, 6 aa, synthetic construct
PEEFWY

SEQ ID NO: 14230 - protein, 6 aa, synthetic construct
PEEFYD

SEQ ID NO: 14231 - protein, 6 aa, synthetic construct
PEEFYE

SEQ ID NO: 14232 - protein, 6 aa, synthetic construct
PEEFYF

SEQ ID NO: 14233 - protein, 6 aa, synthetic construct
PEEFYW

SEQ ID NO: 14234 - protein, 6 aa, synthetic construct
PEEFYY

SEQ ID NO: 14235 - protein, 6 aa, synthetic construct
PEEFVD

SEQ ID NO: 14236 - protein, 6 aa, synthetic construct
PEEFVE

SEQ ID NO: 14237 - protein, 6 aa, synthetic construct
PEEFVF

SEQ ID NO: 14238 - protein, 6 aa, synthetic construct
PEEFVW

SEQ ID NO: 14239 - protein, 6 aa, synthetic construct
PEEFVY

SEQ ID NO: 14240 - protein, 6 aa, synthetic construct
PEEPAD

SEQ ID NO: 14241 - protein, 6 aa, synthetic construct
PEEPAE

SEQ ID NO: 14242 - protein, 6 aa, synthetic construct
PEEPAF

SEQ ID NO: 14243 - protein, 6 aa, synthetic construct
PEEPAW

SEQ ID NO: 14244 - protein, 6 aa, synthetic construct
PEEPAY

SEQ ID NO: 14245 - protein, 6 aa, synthetic construct
PEEPRD

SEQ ID NO: 14246 - protein, 6 aa, synthetic construct
PEEPRE

SEQ ID NO: 14247 - protein, 6 aa, synthetic construct
PEEPRF

SEQ ID NO: 14248 - protein, 6 aa, synthetic construct
PEEPRW

SEQ ID NO: 14249 - protein, 6 aa, synthetic construct
PEEPRY

SEQ ID NO: 14250 - protein, 6 aa, synthetic construct
PEEPND

SEQ ID NO: 14251 - protein, 6 aa, synthetic construct
PEEPNE

SEQ ID NO: 14252 - protein, 6 aa, synthetic construct
PEEPNF

SEQ ID NO: 14253 - protein, 6 aa, synthetic construct
PEEPNW

SEQ ID NO: 14254 - protein, 6 aa, synthetic construct
PEEPNY

SEQ ID NO: 14255 - protein, 6 aa, synthetic construct
PEEPDD

SEQ ID NO: 14256 - protein, 6 aa, synthetic construct
PEEPDE

SEQ ID NO: 14257 - protein, 6 aa, synthetic construct
PEEPDF

SEQ ID NO: 14258 - protein, 6 aa, synthetic construct
PEEPDW

SEQ ID NO: 14259 - protein, 6 aa, synthetic construct
PEEPDY

SEQ ID NO: 14260 - protein, 6 aa, synthetic construct
PEEPCD

SEQ ID NO: 14261 - protein, 6 aa, synthetic construct
PEEPCE

SEQ ID NO: 14262 - protein, 6 aa, synthetic construct
PEEPCF

SEQ ID NO: 14263 - protein, 6 aa, synthetic construct
PEEPCW

SEQ ID NO: 14264 - protein, 6 aa, synthetic construct
PEEPCY

SEQ ID NO: 14265 - protein, 6 aa, synthetic construct
PEEPQD

SEQ ID NO: 14266 - protein, 6 aa, synthetic construct
PEEPQE

SEQ ID NO: 14267 - protein, 6 aa, synthetic construct
PEEPQF

SEQ ID NO: 14268 - protein, 6 aa, synthetic construct
PEEPQW

SEQ ID NO: 14269 - protein, 6 aa, synthetic construct
PEEPQY

SEQ ID NO: 14270 - protein, 6 aa, synthetic construct
PEEPED

SEQ ID NO: 14271 - protein, 6 aa, synthetic construct
PEEPEE

SEQ ID NO: 14272 - protein, 6 aa, synthetic construct
PEEPEF

SEQ ID NO: 14273 - protein, 6 aa, synthetic construct
PEEPEW

SEQ ID NO: 14274 - protein, 6 aa, synthetic construct
PEEPEY

SEQ ID NO: 14275 - protein, 6 aa, synthetic construct
PEEPGD

SEQ ID NO: 14276 - protein, 6 aa, synthetic construct
PEEPGE

SEQ ID NO: 14277 - protein, 6 aa, synthetic construct
PEEPGF

SEQ ID NO: 14278 - protein, 6 aa, synthetic construct
PEEPGW

SEQ ID NO: 14279 - protein, 6 aa, synthetic construct
PEEPGY

SEQ ID NO: 14280 - protein, 6 aa, synthetic construct
PEEPHD

SEQ ID NO: 14281 - protein, 6 aa, synthetic construct
PEEPHE

SEQ ID NO: 14282 - protein, 6 aa, synthetic construct
PEEPHF

SEQ ID NO: 14283 - protein, 6 aa, synthetic construct
PEEPHW

SEQ ID NO: 14284 - protein, 6 aa, synthetic construct
PEEPHY

SEQ ID NO: 14285 - protein, 6 aa, synthetic construct
PEEPID

SEQ ID NO: 14286 - protein, 6 aa, synthetic construct
PEEPIE

SEQ ID NO: 14287 - protein, 6 aa, synthetic construct
PEEPIF

SEQ ID NO: 14288 - protein, 6 aa, synthetic construct
PEEPIW

SEQ ID NO: 14289 - protein, 6 aa, synthetic construct
PEEPIY

SEQ ID NO: 14290 - protein, 6 aa, synthetic construct
PEEPLD

SEQ ID NO: 14291 - protein, 6 aa, synthetic construct
PEEPLE

SEQ ID NO: 14292 - protein, 6 aa, synthetic construct
PEEPLF

SEQ ID NO: 14293 - protein, 6 aa, synthetic construct
PEEPLW

SEQ ID NO: 14294 - protein, 6 aa, synthetic construct
PEEPLY

SEQ ID NO: 14295 - protein, 6 aa, synthetic construct
PEEPKD

SEQ ID NO: 14296 - protein, 6 aa, synthetic construct
PEEPKE

SEQ ID NO: 14297 - protein, 6 aa, synthetic construct
PEEPKF

SEQ ID NO: 14298 - protein, 6 aa, synthetic construct
PEEPKW

SEQ ID NO: 14299 - protein, 6 aa, synthetic construct
PEEPKY

SEQ ID NO: 14300 - protein, 6 aa, synthetic construct
PEEPMD

SEQ ID NO: 14301 - protein, 6 aa, synthetic construct
PEEPME

SEQ ID NO: 14302 - protein, 6 aa, synthetic construct
PEEPMF

SEQ ID NO: 14303 - protein, 6 aa, synthetic construct
PEEPMW

SEQ ID NO: 14304 - protein, 6 aa, synthetic construct
PEEPMY

SEQ ID NO: 14305 - protein, 6 aa, synthetic construct
PEEPFD

SEQ ID NO: 14306 - protein, 6 aa, synthetic construct
PEEPFE

SEQ ID NO: 14307 - protein, 6 aa, synthetic construct
PEEPFF

SEQ ID NO: 14308 - protein, 6 aa, synthetic construct
PEEPFW

SEQ ID NO: 14309 - protein, 6 aa, synthetic construct
PEEPFY

SEQ ID NO: 14310 - protein, 6 aa, synthetic construct
PEEPPD

SEQ ID NO: 14311 - protein, 6 aa, synthetic construct
PEEPPE

SEQ ID NO: 14312 - protein, 6 aa, synthetic construct
PEEPPF

SEQ ID NO: 14313 - protein, 6 aa, synthetic construct
PEEPPW

SEQ ID NO: 14314 - protein, 6 aa, synthetic construct
PEEPPY

SEQ ID NO: 14315 - protein, 6 aa, synthetic construct
PEEPSD

SEQ ID NO: 14316 - protein, 6 aa, synthetic construct
PEEPSE

SEQ ID NO: 14317 - protein, 6 aa, synthetic construct
PEEPSF

SEQ ID NO: 14318 - protein, 6 aa, synthetic construct
PEEPSW

SEQ ID NO: 14319 - protein, 6 aa, synthetic construct
PEEPSY

SEQ ID NO: 14320 - protein, 6 aa, synthetic construct
PEEPTD

SEQ ID NO: 14321 - protein, 6 aa, synthetic construct
PEEPTE

SEQ ID NO: 14322 - protein, 6 aa, synthetic construct
PEEPTF

SEQ ID NO: 14323 - protein, 6 aa, synthetic construct
PEEPTW

SEQ ID NO: 14324 - protein, 6 aa, synthetic construct
PEEPTY

SEQ ID NO: 14325 - protein, 6 aa, synthetic construct
PEEPWD

SEQ ID NO: 14326 - protein, 6 aa, synthetic construct
PEEPWE

SEQ ID NO: 14327 - protein, 6 aa, synthetic construct
PEEPWF

SEQ ID NO: 14328 - protein, 6 aa, synthetic construct
PEEPWW

SEQ ID NO: 14329 - protein, 6 aa, synthetic construct
PEEPWY

SEQ ID NO: 14330 - protein, 6 aa, synthetic construct
PEEPYD

SEQ ID NO: 14331 - protein, 6 aa, synthetic construct
PEEPYE

SEQ ID NO: 14332 - protein, 6 aa, synthetic construct
PEEPYF

SEQ ID NO: 14333 - protein, 6 aa, synthetic construct
PEEPYW

SEQ ID NO: 14334 - protein, 6 aa, synthetic construct
PEEPYY

SEQ ID NO: 14335 - protein, 6 aa, synthetic construct
PEEPVD

SEQ ID NO: 14336 - protein, 6 aa, synthetic construct
PEEPVE

SEQ ID NO: 14337 - protein, 6 aa, synthetic construct
PEEPVF

SEQ ID NO: 14338 - protein, 6 aa, synthetic construct
PEEPVW

SEQ ID NO: 14339 - protein, 6 aa, synthetic construct
PEEPVY

SEQ ID NO: 14340 - protein, 6 aa, synthetic construct
PEESAD

SEQ ID NO: 14341 - protein, 6 aa, synthetic construct
PEESAE

SEQ ID NO: 14342 - protein, 6 aa, synthetic construct
PEESAF

SEQ ID NO: 14343 - protein, 6 aa, synthetic construct
PEESAW

SEQ ID NO: 14344 - protein, 6 aa, synthetic construct
PEESAY

SEQ ID NO: 14345 - protein, 6 aa, synthetic construct
PEESRD

SEQ ID NO: 14346 - protein, 6 aa, synthetic construct
PEESRE

SEQ ID NO: 14347 - protein, 6 aa, synthetic construct
PEESRF

SEQ ID NO: 14348 - protein, 6 aa, synthetic construct
PEESRW

SEQ ID NO: 14349 - protein, 6 aa, synthetic construct
PEESRY

SEQ ID NO: 14350 - protein, 6 aa, synthetic construct
PEESND

SEQ ID NO: 14351 - protein, 6 aa, synthetic construct
PEESNE

SEQ ID NO: 14352 - protein, 6 aa, synthetic construct
PEESNF

SEQ ID NO: 14353 - protein, 6 aa, synthetic construct
PEESNW

SEQ ID NO: 14354 - protein, 6 aa, synthetic construct
PEESNY

SEQ ID NO: 14355 - protein, 6 aa, synthetic construct
PEESDD

SEQ ID NO: 14356 - protein, 6 aa, synthetic construct
PEESDE

SEQ ID NO: 14357 - protein, 6 aa, synthetic construct
PEESDF

SEQ ID NO: 14358 - protein, 6 aa, synthetic construct
PEESDW

SEQ ID NO: 14359 - protein, 6 aa, synthetic construct
PEESDY

SEQ ID NO: 14360 - protein, 6 aa, synthetic construct
PEESCD

SEQ ID NO: 14361 - protein, 6 aa, synthetic construct
PEESCE

SEQ ID NO: 14362 - protein, 6 aa, synthetic construct
PEESCF

SEQ ID NO: 14363 - protein, 6 aa, synthetic construct
PEESCW

SEQ ID NO: 14364 - protein, 6 aa, synthetic construct
PEESCY

SEQ ID NO: 14365 - protein, 6 aa, synthetic construct
PEESQD

SEQ ID NO: 14366 - protein, 6 aa, synthetic construct
PEESQE

SEQ ID NO: 14367 - protein, 6 aa, synthetic construct
PEESQF

SEQ ID NO: 14368 - protein, 6 aa, synthetic construct
PEESQW

SEQ ID NO: 14369 - protein, 6 aa, synthetic construct
PEESQY

SEQ ID NO: 14370 - protein, 6 aa, synthetic construct
PEESED

SEQ ID NO: 14371 - protein, 6 aa, synthetic construct
PEESEE

SEQ ID NO: 14372 - protein, 6 aa, synthetic construct
PEESEF

SEQ ID NO: 14373 - protein, 6 aa, synthetic construct
PEESEW

SEQ ID NO: 14374 - protein, 6 aa, synthetic construct
PEESEY

SEQ ID NO: 14375 - protein, 6 aa, synthetic construct
PEESGD

SEQ ID NO: 14376 - protein, 6 aa, synthetic construct
PEESGE

SEQ ID NO: 14377 - protein, 6 aa, synthetic construct
PEESGF

SEQ ID NO: 14378 - protein, 6 aa, synthetic construct
PEESGW

SEQ ID NO: 14379 - protein, 6 aa, synthetic construct
PEESGY

SEQ ID NO: 14380 - protein, 6 aa, synthetic construct
PEESHD

SEQ ID NO: 14381 - protein, 6 aa, synthetic construct
PEESHE

SEQ ID NO: 14382 - protein, 6 aa, synthetic construct
PEESHF

SEQ ID NO: 14383 - protein, 6 aa, synthetic construct
PEESHW

SEQ ID NO: 14384 - protein, 6 aa, synthetic construct
PEESHY

SEQ ID NO: 14385 - protein, 6 aa, synthetic construct
PEESID

SEQ ID NO: 14386 - protein, 6 aa, synthetic construct
PEESIE

SEQ ID NO: 14387 - protein, 6 aa, synthetic construct
PEESIF

SEQ ID NO: 14388 - protein, 6 aa, synthetic construct
PEESIW

SEQ ID NO: 14389 - protein, 6 aa, synthetic construct
PEESIY

SEQ ID NO: 14390 - protein, 6 aa, synthetic construct
PEESLD

SEQ ID NO: 14391 - protein, 6 aa, synthetic construct
PEESLE

SEQ ID NO: 14392 - protein, 6 aa, synthetic construct
PEESLF

SEQ ID NO: 14393 - protein, 6 aa, synthetic construct
PEESLW

SEQ ID NO: 14394 - protein, 6 aa, synthetic construct
PEESLY

SEQ ID NO: 14395 - protein, 6 aa, synthetic construct
PEESKD

SEQ ID NO: 14396 - protein, 6 aa, synthetic construct
PEESKE

SEQ ID NO: 14397 - protein, 6 aa, synthetic construct
PEESKF

SEQ ID NO: 14398 - protein, 6 aa, synthetic construct
PEESKW

SEQ ID NO: 14399 - protein, 6 aa, synthetic construct
PEESKY

SEQ ID NO: 14400 - protein, 6 aa, synthetic construct
PEESMD

SEQ ID NO: 14401 - protein, 6 aa, synthetic construct
PEESME

SEQ ID NO: 14402 - protein, 6 aa, synthetic construct
PEESMF

SEQ ID NO: 14403 - protein, 6 aa, synthetic construct
PEESMW

SEQ ID NO: 14404 - protein, 6 aa, synthetic construct
PEESMY

SEQ ID NO: 14405 - protein, 6 aa, synthetic construct
PEESFD

SEQ ID NO: 14406 - protein, 6 aa, synthetic construct
PEESFE

SEQ ID NO: 14407 - protein, 6 aa, synthetic construct
PEESFF

SEQ ID NO: 14408 - protein, 6 aa, synthetic construct
PEESFW

SEQ ID NO: 14409 - protein, 6 aa, synthetic construct
PEESFY

SEQ ID NO: 14410 - protein, 6 aa, synthetic construct
PEESPD

SEQ ID NO: 14411 - protein, 6 aa, synthetic construct
PEESPE

SEQ ID NO: 14412 - protein, 6 aa, synthetic construct
PEESPF

SEQ ID NO: 14413 - protein, 6 aa, synthetic construct
PEESPW

SEQ ID NO: 14414 - protein, 6 aa, synthetic construct
PEESPY

SEQ ID NO: 14415 - protein, 6 aa, synthetic construct
PEESSD

SEQ ID NO: 14416 - protein, 6 aa, synthetic construct
PEESSE

SEQ ID NO: 14417 - protein, 6 aa, synthetic construct
PEESSF

SEQ ID NO: 14418 - protein, 6 aa, synthetic construct
PEESSW

SEQ ID NO: 14419 - protein, 6 aa, synthetic construct
PEESSY

SEQ ID NO: 14420 - protein, 6 aa, synthetic construct
PEESTD

SEQ ID NO: 14421 - protein, 6 aa, synthetic construct
PEESTE

SEQ ID NO: 14422 - protein, 6 aa, synthetic construct
PEESTF

SEQ ID NO: 14423 - protein, 6 aa, synthetic construct
PEESTW

SEQ ID NO: 14424 - protein, 6 aa, synthetic construct
PEESTY

SEQ ID NO: 14425 - protein, 6 aa, synthetic construct
PEESWD

SEQ ID NO: 14426 - protein, 6 aa, synthetic construct
PEESWE

SEQ ID NO: 14427 - protein, 6 aa, synthetic construct
PEESWF

SEQ ID NO: 14428 - protein, 6 aa, synthetic construct
PEESWW

SEQ ID NO: 14429 - protein, 6 aa, synthetic construct
PEESWY

SEQ ID NO: 14430 - protein, 6 aa, synthetic construct
PEESYD

SEQ ID NO: 14431 - protein, 6 aa, synthetic construct
PEESYE

SEQ ID NO: 14432 - protein, 6 aa, synthetic construct
PEESYF

SEQ ID NO: 14433 - protein, 6 aa, synthetic construct
PEESYW

SEQ ID NO: 14434 - protein, 6 aa, synthetic construct
PEESYY

SEQ ID NO: 14435 - protein, 6 aa, synthetic construct
PEESVD

SEQ ID NO: 14436 - protein, 6 aa, synthetic construct
PEESVE

SEQ ID NO: 14437 - protein, 6 aa, synthetic construct
PEESVF

SEQ ID NO: 14438 - protein, 6 aa, synthetic construct
PEESVW

SEQ ID NO: 14439 - protein, 6 aa, synthetic construct
PEESVY

SEQ ID NO: 14440 - protein, 6 aa, synthetic construct
PEETAD

SEQ ID NO: 14441 - protein, 6 aa, synthetic construct
PEETAE

SEQ ID NO: 14442 - protein, 6 aa, synthetic construct
PEETAF

SEQ ID NO: 14443 - protein, 6 aa, synthetic construct
PEETAW

SEQ ID NO: 14444 - protein, 6 aa, synthetic construct
PEETAY

SEQ ID NO: 14445 - protein, 6 aa, synthetic construct
PEETRD

SEQ ID NO: 14446 - protein, 6 aa, synthetic construct
PEETRE

SEQ ID NO: 14447 - protein, 6 aa, synthetic construct
PEETRF

SEQ ID NO: 14448 - protein, 6 aa, synthetic construct
PEETRW

SEQ ID NO: 14449 - protein, 6 aa, synthetic construct
PEETRY

SEQ ID NO: 14450 - protein, 6 aa, synthetic construct
PEETND

SEQ ID NO: 14451 - protein, 6 aa, synthetic construct
PEETNE

SEQ ID NO: 14452 - protein, 6 aa, synthetic construct
PEETNF

SEQ ID NO: 14453 - protein, 6 aa, synthetic construct
PEETNW

SEQ ID NO: 14454 - protein, 6 aa, synthetic construct
PEETNY

SEQ ID NO: 14455 - protein, 6 aa, synthetic construct
PEETDD

SEQ ID NO: 14456 - protein, 6 aa, synthetic construct
PEETDE

SEQ ID NO: 14457 - protein, 6 aa, synthetic construct
PEETDF

SEQ ID NO: 14458 - protein, 6 aa, synthetic construct
PEETDW

SEQ ID NO: 14459 - protein, 6 aa, synthetic construct
PEETDY

SEQ ID NO: 14460 - protein, 6 aa, synthetic construct
PEETCD

SEQ ID NO: 14461 - protein, 6 aa, synthetic construct
PEETCE

SEQ ID NO: 14462 - protein, 6 aa, synthetic construct
PEETCF

SEQ ID NO: 14463 - protein, 6 aa, synthetic construct
PEETCW

SEQ ID NO: 14464 - protein, 6 aa, synthetic construct
PEETCY

SEQ ID NO: 14465 - protein, 6 aa, synthetic construct
PEETQD

SEQ ID NO: 14466 - protein, 6 aa, synthetic construct
PEETQE

SEQ ID NO: 14467 - protein, 6 aa, synthetic construct
PEETQF

SEQ ID NO: 14468 - protein, 6 aa, synthetic construct
PEETQW

SEQ ID NO: 14469 - protein, 6 aa, synthetic construct
PEETQY

SEQ ID NO: 14470 - protein, 6 aa, synthetic construct
PEETED

SEQ ID NO: 14471 - protein, 6 aa, synthetic construct
PEETEE

SEQ ID NO: 14472 - protein, 6 aa, synthetic construct
PEETEF

SEQ ID NO: 14473 - protein, 6 aa, synthetic construct
PEETEW

SEQ ID NO: 14474 - protein, 6 aa, synthetic construct
PEETEY

SEQ ID NO: 14475 - protein, 6 aa, synthetic construct
PEETGD

SEQ ID NO: 14476 - protein, 6 aa, synthetic construct
PEETGE

SEQ ID NO: 14477 - protein, 6 aa, synthetic construct
PEETGF

SEQ ID NO: 14478 - protein, 6 aa, synthetic construct
PEETGW

SEQ ID NO: 14479 - protein, 6 aa, synthetic construct
PEETGY

SEQ ID NO: 14480 - protein, 6 aa, synthetic construct
PEETHD

SEQ ID NO: 14481 - protein, 6 aa, synthetic construct
PEETHE

SEQ ID NO: 14482 - protein, 6 aa, synthetic construct
PEETHF

SEQ ID NO: 14483 - protein, 6 aa, synthetic construct
PEETHW

SEQ ID NO: 14484 - protein, 6 aa, synthetic construct
PEETHY

SEQ ID NO: 14485 - protein, 6 aa, synthetic construct
PEETID

SEQ ID NO: 14486 - protein, 6 aa, synthetic construct
PEETIE

SEQ ID NO: 14487 - protein, 6 aa, synthetic construct
PEETIF

SEQ ID NO: 14488 - protein, 6 aa, synthetic construct
PEETIW

SEQ ID NO: 14489 - protein, 6 aa, synthetic construct
PEETIY

SEQ ID NO: 14490 - protein, 6 aa, synthetic construct
PEETLD

SEQ ID NO: 14491 - protein, 6 aa, synthetic construct
PEETLE

SEQ ID NO: 14492 - protein, 6 aa, synthetic construct
PEETLF

SEQ ID NO: 14493 - protein, 6 aa, synthetic construct
PEETLW

SEQ ID NO: 14494 - protein, 6 aa, synthetic construct
PEETLY

SEQ ID NO: 14495 - protein, 6 aa, synthetic construct
PEETKD

SEQ ID NO: 14496 - protein, 6 aa, synthetic construct
PEETKE

SEQ ID NO: 14497 - protein, 6 aa, synthetic construct
PEETKF

SEQ ID NO: 14498 - protein, 6 aa, synthetic construct
PEETKW

SEQ ID NO: 14499 - protein, 6 aa, synthetic construct
PEETKY

SEQ ID NO: 14500 - protein, 6 aa, synthetic construct
PEETMD

SEQ ID NO: 14501 - protein, 6 aa, synthetic construct
PEETME

SEQ ID NO: 14502 - protein, 6 aa, synthetic construct
PEETMF

SEQ ID NO: 14503 - protein, 6 aa, synthetic construct
PEETMW

SEQ ID NO: 14504 - protein, 6 aa, synthetic construct
PEETMY

SEQ ID NO: 14505 - protein, 6 aa, synthetic construct
PEETFD

SEQ ID NO: 14506 - protein, 6 aa, synthetic construct
PEETFE

SEQ ID NO: 14507 - protein, 6 aa, synthetic construct
PEETFF

SEQ ID NO: 14508 - protein, 6 aa, synthetic construct
PEETFW

SEQ ID NO: 14509 - protein, 6 aa, synthetic construct
PEETFY

SEQ ID NO: 14510 - protein, 6 aa, synthetic construct
PEETPD

SEQ ID NO: 14511 - protein, 6 aa, synthetic construct
PEETPE

SEQ ID NO: 14512 - protein, 6 aa, synthetic construct
PEETPF

SEQ ID NO: 14513 - protein, 6 aa, synthetic construct
PEETPW

SEQ ID NO: 14514 - protein, 6 aa, synthetic construct
PEETPY

SEQ ID NO: 14515 - protein, 6 aa, synthetic construct
PEETSD

SEQ ID NO: 14516 - protein, 6 aa, synthetic construct
PEETSE

SEQ ID NO: 14517 - protein, 6 aa, synthetic construct
PEETSF

SEQ ID NO: 14518 - protein, 6 aa, synthetic construct
PEETSW

SEQ ID NO: 14519 - protein, 6 aa, synthetic construct
PEETSY

SEQ ID NO: 14520 - protein, 6 aa, synthetic construct
PEETTD

SEQ ID NO: 14521 - protein, 6 aa, synthetic construct
PEETTE

SEQ ID NO: 14522 - protein, 6 aa, synthetic construct
PEETTF

SEQ ID NO: 14523 - protein, 6 aa, synthetic construct
PEETTW

SEQ ID NO: 14524 - protein, 6 aa, synthetic construct
PEETTY

SEQ ID NO: 14525 - protein, 6 aa, synthetic construct
PEETWD

SEQ ID NO: 14526 - protein, 6 aa, synthetic construct
PEETWE

SEQ ID NO: 14527 - protein, 6 aa, synthetic construct
PEETWF

SEQ ID NO: 14528 - protein, 6 aa, synthetic construct
PEETWW

SEQ ID NO: 14529 - protein, 6 aa, synthetic construct
PEETWY

SEQ ID NO: 14530 - protein, 6 aa, synthetic construct
PEETYD

SEQ ID NO: 14531 - protein, 6 aa, synthetic construct
PEETYE

SEQ ID NO: 14532 - protein, 6 aa, synthetic construct
PEETYF

SEQ ID NO: 14533 - protein, 6 aa, synthetic construct
PEETYW

SEQ ID NO: 14534 - protein, 6 aa, synthetic construct
PEETYY

SEQ ID NO: 14535 - protein, 6 aa, synthetic construct
PEETVD

SEQ ID NO: 14536 - protein, 6 aa, synthetic construct
PEETVE

SEQ ID NO: 14537 - protein, 6 aa, synthetic construct
PEETVF

SEQ ID NO: 14538 - protein, 6 aa, synthetic construct
PEETVW

SEQ ID NO: 14539 - protein, 6 aa, synthetic construct
PEETVY

SEQ ID NO: 14540 - protein, 6 aa, synthetic construct
PEEWAD

SEQ ID NO: 14541 - protein, 6 aa, synthetic construct
PEEWAE

SEQ ID NO: 14542 - protein, 6 aa, synthetic construct
PEEWAF

SEQ ID NO: 14543 - protein, 6 aa, synthetic construct
PEEWAW

SEQ ID NO: 14544 - protein, 6 aa, synthetic construct
PEEWAY

SEQ ID NO: 14545 - protein, 6 aa, synthetic construct
PEEWRD

SEQ ID NO: 14546 - protein, 6 aa, synthetic construct
PEEWRE

SEQ ID NO: 14547 - protein, 6 aa, synthetic construct
PEEWRF

SEQ ID NO: 14548 - protein, 6 aa, synthetic construct
PEEWRW

SEQ ID NO: 14549 - protein, 6 aa, synthetic construct
PEEWRY

SEQ ID NO: 14550 - protein, 6 aa, synthetic construct
PEEWND

SEQ ID NO: 14551 - protein, 6 aa, synthetic construct
PEEWNE

SEQ ID NO: 14552 - protein, 6 aa, synthetic construct
PEEWNF

SEQ ID NO: 14553 - protein, 6 aa, synthetic construct
PEEWNW

SEQ ID NO: 14554 - protein, 6 aa, synthetic construct
PEEWNY

SEQ ID NO: 14555 - protein, 6 aa, synthetic construct
PEEWDD

SEQ ID NO: 14556 - protein, 6 aa, synthetic construct
PEEWDE

SEQ ID NO: 14557 - protein, 6 aa, synthetic construct
PEEWDF

SEQ ID NO: 14558 - protein, 6 aa, synthetic construct
PEEWDW

SEQ ID NO: 14559 - protein, 6 aa, synthetic construct
PEEWDY

SEQ ID NO: 14560 - protein, 6 aa, synthetic construct
PEEWCD

SEQ ID NO: 14561 - protein, 6 aa, synthetic construct
PEEWCE

SEQ ID NO: 14562 - protein, 6 aa, synthetic construct
PEEWCF

SEQ ID NO: 14563 - protein, 6 aa, synthetic construct
PEEWCW

SEQ ID NO: 14564 - protein, 6 aa, synthetic construct
PEEWCY

SEQ ID NO: 14565 - protein, 6 aa, synthetic construct
PEEWQD

SEQ ID NO: 14566 - protein, 6 aa, synthetic construct
PEEWQE

SEQ ID NO: 14567 - protein, 6 aa, synthetic construct
PEEWQF

SEQ ID NO: 14568 - protein, 6 aa, synthetic construct
PEEWQW

SEQ ID NO: 14569 - protein, 6 aa, synthetic construct
PEEWQY

SEQ ID NO: 14570 - protein, 6 aa, synthetic construct
PEEWED

SEQ ID NO: 14571 - protein, 6 aa, synthetic construct
PEEWEE

SEQ ID NO: 14572 - protein, 6 aa, synthetic construct
PEEWEF

SEQ ID NO: 14573 - protein, 6 aa, synthetic construct
PEEWEW

SEQ ID NO: 14574 - protein, 6 aa, synthetic construct
PEEWEY

SEQ ID NO: 14575 - protein, 6 aa, synthetic construct
PEEWGD

SEQ ID NO: 14576 - protein, 6 aa, synthetic construct
PEEWGE

SEQ ID NO: 14577 - protein, 6 aa, synthetic construct
PEEWGF

SEQ ID NO: 14578 - protein, 6 aa, synthetic construct
PEEWGW

SEQ ID NO: 14579 - protein, 6 aa, synthetic construct
PEEWGY

SEQ ID NO: 14580 - protein, 6 aa, synthetic construct
PEEWHD

SEQ ID NO: 14581 - protein, 6 aa, synthetic construct
PEEWHE

SEQ ID NO: 14582 - protein, 6 aa, synthetic construct
PEEWHF

SEQ ID NO: 14583 - protein, 6 aa, synthetic construct
PEEWHW

SEQ ID NO: 14584 - protein, 6 aa, synthetic construct
PEEWHY

SEQ ID NO: 14585 - protein, 6 aa, synthetic construct
PEEWID

SEQ ID NO: 14586 - protein, 6 aa, synthetic construct
PEEWIE

SEQ ID NO: 14587 - protein, 6 aa, synthetic construct
PEEWIF

SEQ ID NO: 14588 - protein, 6 aa, synthetic construct
PEEWIW

SEQ ID NO: 14589 - protein, 6 aa, synthetic construct
PEEWIY

SEQ ID NO: 14590 - protein, 6 aa, synthetic construct
PEEWLD

SEQ ID NO: 14591 - protein, 6 aa, synthetic construct
PEEWLE

SEQ ID NO: 14592 - protein, 6 aa, synthetic construct
PEEWLF

SEQ ID NO: 14593 - protein, 6 aa, synthetic construct
PEEWLW

SEQ ID NO: 14594 - protein, 6 aa, synthetic construct
PEEWLY

SEQ ID NO: 14595 - protein, 6 aa, synthetic construct
PEEWKD

SEQ ID NO: 14596 - protein, 6 aa, synthetic construct
PEEWKE

SEQ ID NO: 14597 - protein, 6 aa, synthetic construct
PEEWKF

SEQ ID NO: 14598 - protein, 6 aa, synthetic construct
PEEWKW

SEQ ID NO: 14599 - protein, 6 aa, synthetic construct
PEEWKY

SEQ ID NO: 14600 - protein, 6 aa, synthetic construct
PEEWMD

SEQ ID NO: 14601 - protein, 6 aa, synthetic construct
PEEWME

SEQ ID NO: 14602 - protein, 6 aa, synthetic construct
PEEWMF

SEQ ID NO: 14603 - protein, 6 aa, synthetic construct
PEEWMW

SEQ ID NO: 14604 - protein, 6 aa, synthetic construct
PEEWMY

SEQ ID NO: 14605 - protein, 6 aa, synthetic construct
PEEWFD

SEQ ID NO: 14606 - protein, 6 aa, synthetic construct
PEEWFE

SEQ ID NO: 14607 - protein, 6 aa, synthetic construct
PEEWFF

SEQ ID NO: 14608 - protein, 6 aa, synthetic construct
PEEWFW

SEQ ID NO: 14609 - protein, 6 aa, synthetic construct
PEEWFY

SEQ ID NO: 14610 - protein, 6 aa, synthetic construct
PEEWPD

SEQ ID NO: 14611 - protein, 6 aa, synthetic construct
PEEWPE

SEQ ID NO: 14612 - protein, 6 aa, synthetic construct
PEEWPF

SEQ ID NO: 14613 - protein, 6 aa, synthetic construct
PEEWPW

SEQ ID NO: 14614 - protein, 6 aa, synthetic construct
PEEWPY

SEQ ID NO: 14615 - protein, 6 aa, synthetic construct
PEEWSD

SEQ ID NO: 14616 - protein, 6 aa, synthetic construct
PEEWSE

SEQ ID NO: 14617 - protein, 6 aa, synthetic construct
PEEWSF

SEQ ID NO: 14618 - protein, 6 aa, synthetic construct
PEEWSW

SEQ ID NO: 14619 - protein, 6 aa, synthetic construct
PEEWSY

SEQ ID NO: 14620 - protein, 6 aa, synthetic construct
PEEWTD

SEQ ID NO: 14621 - protein, 6 aa, synthetic construct
PEEWTE

SEQ ID NO: 14622 - protein, 6 aa, synthetic construct
PEEWTF

SEQ ID NO: 14623 - protein, 6 aa, synthetic construct
PEEWTW

SEQ ID NO: 14624 - protein, 6 aa, synthetic construct
PEEWTY

SEQ ID NO: 14625 - protein, 6 aa, synthetic construct
PEEWWD

SEQ ID NO: 14626 - protein, 6 aa, synthetic construct
PEEWWE

SEQ ID NO: 14627 - protein, 6 aa, synthetic construct
PEEWWF

SEQ ID NO: 14628 - protein, 6 aa, synthetic construct
PEEWWW

SEQ ID NO: 14629 - protein, 6 aa, synthetic construct
PEEWWY

SEQ ID NO: 14630 - protein, 6 aa, synthetic construct
PEEWYD

SEQ ID NO: 14631 - protein, 6 aa, synthetic construct
PEEWYE

SEQ ID NO: 14632 - protein, 6 aa, synthetic construct
PEEWYF

SEQ ID NO: 14633 - protein, 6 aa, synthetic construct
PEEWYW

SEQ ID NO: 14634 - protein, 6 aa, synthetic construct
PEEWYY

SEQ ID NO: 14635 - protein, 6 aa, synthetic construct
PEEWVD

SEQ ID NO: 14636 - protein, 6 aa, synthetic construct
PEEWVE

SEQ ID NO: 14637 - protein, 6 aa, synthetic construct
PEEWVF

SEQ ID NO: 14638 - protein, 6 aa, synthetic construct
PEEWVW

SEQ ID NO: 14639 - protein, 6 aa, synthetic construct
PEEWVY

SEQ ID NO: 14640 - protein, 6 aa, synthetic construct
PEEYAD

SEQ ID NO: 14641 - protein, 6 aa, synthetic construct
PEEYAE

SEQ ID NO: 14642 - protein, 6 aa, synthetic construct
PEEYAF

SEQ ID NO: 14643 - protein, 6 aa, synthetic construct
PEEYAW

SEQ ID NO: 14644 - protein, 6 aa, synthetic construct
PEEYAY

SEQ ID NO: 14645 - protein, 6 aa, synthetic construct
PEEYRD

SEQ ID NO: 14646 - protein, 6 aa, synthetic construct
PEEYRE

SEQ ID NO: 14647 - protein, 6 aa, synthetic construct
PEEYRF

SEQ ID NO: 14648 - protein, 6 aa, synthetic construct
PEEYRW

SEQ ID NO: 14649 - protein, 6 aa, synthetic construct
PEEYRY

SEQ ID NO: 14650 - protein, 6 aa, synthetic construct
PEEYND

SEQ ID NO: 14651 - protein, 6 aa, synthetic construct
PEEYNE

SEQ ID NO: 14652 - protein, 6 aa, synthetic construct
PEEYNF

SEQ ID NO: 14653 - protein, 6 aa, synthetic construct
PEEYNW

SEQ ID NO: 14654 - protein, 6 aa, synthetic construct
PEEYNY

SEQ ID NO: 14655 - protein, 6 aa, synthetic construct
PEEYDD

SEQ ID NO: 14656 - protein, 6 aa, synthetic construct
PEEYDE

SEQ ID NO: 14657 - protein, 6 aa, synthetic construct
PEEYDF

SEQ ID NO: 14658 - protein, 6 aa, synthetic construct
PEEYDW

SEQ ID NO: 14659 - protein, 6 aa, synthetic construct
PEEYDY

SEQ ID NO: 14660 - protein, 6 aa, synthetic construct
PEEYCD

SEQ ID NO: 14661 - protein, 6 aa, synthetic construct
PEEYCE

SEQ ID NO: 14662 - protein, 6 aa, synthetic construct
PEEYCF

SEQ ID NO: 14663 - protein, 6 aa, synthetic construct
PEEYCW

SEQ ID NO: 14664 - protein, 6 aa, synthetic construct
PEEYCY

SEQ ID NO: 14665 - protein, 6 aa, synthetic construct
PEEYQD

SEQ ID NO: 14666 - protein, 6 aa, synthetic construct
PEEYQE

SEQ ID NO: 14667 - protein, 6 aa, synthetic construct
PEEYQF

SEQ ID NO: 14668 - protein, 6 aa, synthetic construct
PEEYQW

SEQ ID NO: 14669 - protein, 6 aa, synthetic construct
PEEYQY

SEQ ID NO: 14670 - protein, 6 aa, synthetic construct
PEEYED

SEQ ID NO: 14671 - protein, 6 aa, synthetic construct
PEEYEE

SEQ ID NO: 14672 - protein, 6 aa, synthetic construct
PEEYEF

SEQ ID NO: 14673 - protein, 6 aa, synthetic construct
PEEYEW

SEQ ID NO: 14674 - protein, 6 aa, synthetic construct
PEEYEY

SEQ ID NO: 14675 - protein, 6 aa, synthetic construct
PEEYGD

SEQ ID NO: 14676 - protein, 6 aa, synthetic construct
PEEYGE

SEQ ID NO: 14677 - protein, 6 aa, synthetic construct
PEEYGF

SEQ ID NO: 14678 - protein, 6 aa, synthetic construct
PEEYGW

SEQ ID NO: 14679 - protein, 6 aa, synthetic construct
PEEYGY

SEQ ID NO: 14680 - protein, 6 aa, synthetic construct
PEEYHD

SEQ ID NO: 14681 - protein, 6 aa, synthetic construct
PEEYHE

SEQ ID NO: 14682 - protein, 6 aa, synthetic construct
PEEYHF

SEQ ID NO: 14683 - protein, 6 aa, synthetic construct
PEEYHW

SEQ ID NO: 14684 - protein, 6 aa, synthetic construct
PEEYHY

SEQ ID NO: 14685 - protein, 6 aa, synthetic construct
PEEYID

SEQ ID NO: 14686 - protein, 6 aa, synthetic construct
PEEYIE

SEQ ID NO: 14687 - protein, 6 aa, synthetic construct
PEEYIF

SEQ ID NO: 14688 - protein, 6 aa, synthetic construct
PEEYIW

SEQ ID NO: 14689 - protein, 6 aa, synthetic construct
PEEYIY

SEQ ID NO: 14690 - protein, 6 aa, synthetic construct
PEEYLD

SEQ ID NO: 14691 - protein, 6 aa, synthetic construct
PEEYLE

SEQ ID NO: 14692 - protein, 6 aa, synthetic construct
PEEYLF

SEQ ID NO: 14693 - protein, 6 aa, synthetic construct
PEEYLW

SEQ ID NO: 14694 - protein, 6 aa, synthetic construct
PEEYLY

SEQ ID NO: 14695 - protein, 6 aa, synthetic construct
PEEYKD

SEQ ID NO: 14696 - protein, 6 aa, synthetic construct
PEEYKE

SEQ ID NO: 14697 - protein, 6 aa, synthetic construct
PEEYKF

SEQ ID NO: 14698 - protein, 6 aa, synthetic construct
PEEYKW

SEQ ID NO: 14699 - protein, 6 aa, synthetic construct
PEEYKY

SEQ ID NO: 14700 - protein, 6 aa, synthetic construct
PEEYMD

SEQ ID NO: 14701 - protein, 6 aa, synthetic construct
PEEYME

SEQ ID NO: 14702 - protein, 6 aa, synthetic construct
PEEYMF

SEQ ID NO: 14703 - protein, 6 aa, synthetic construct
PEEYMW

SEQ ID NO: 14704 - protein, 6 aa, synthetic construct
PEEYMY

SEQ ID NO: 14705 - protein, 6 aa, synthetic construct
PEEYFD

SEQ ID NO: 14706 - protein, 6 aa, synthetic construct
PEEYFE

SEQ ID NO: 14707 - protein, 6 aa, synthetic construct
PEEYFF

SEQ ID NO: 14708 - protein, 6 aa, synthetic construct
PEEYFW

SEQ ID NO: 14709 - protein, 6 aa, synthetic construct
PEEYFY

SEQ ID NO: 14710 - protein, 6 aa, synthetic construct
PEEYPD

SEQ ID NO: 14711 - protein, 6 aa, synthetic construct
PEEYPE

SEQ ID NO: 14712 - protein, 6 aa, synthetic construct
PEEYPF

SEQ ID NO: 14713 - protein, 6 aa, synthetic construct
PEEYPW

SEQ ID NO: 14714 - protein, 6 aa, synthetic construct
PEEYPY

SEQ ID NO: 14715 - protein, 6 aa, synthetic construct
PEEYSD

SEQ ID NO: 14716 - protein, 6 aa, synthetic construct
PEEYSE

SEQ ID NO: 14717 - protein, 6 aa, synthetic construct
PEEYSF

SEQ ID NO: 14718 - protein, 6 aa, synthetic construct
PEEYSW

SEQ ID NO: 14719 - protein, 6 aa, synthetic construct
PEEYSY

SEQ ID NO: 14720 - protein, 6 aa, synthetic construct
PEEYTD

SEQ ID NO: 14721 - protein, 6 aa, synthetic construct
PEEYTE

SEQ ID NO: 14722 - protein, 6 aa, synthetic construct
PEEYTF

SEQ ID NO: 14723 - protein, 6 aa, synthetic construct
PEEYTW

SEQ ID NO: 14724 - protein, 6 aa, synthetic construct
PEEYTY

SEQ ID NO: 14725 - protein, 6 aa, synthetic construct
PEEYWD

SEQ ID NO: 14726 - protein, 6 aa, synthetic construct
PEEYWE

SEQ ID NO: 14727 - protein, 6 aa, synthetic construct
PEEYWF

SEQ ID NO: 14728 - protein, 6 aa, synthetic construct
PEEYWW

SEQ ID NO: 14729 - protein, 6 aa, synthetic construct
PEEYWY

SEQ ID NO: 14730 - protein, 6 aa, synthetic construct
PEEYYD

SEQ ID NO: 14731 - protein, 6 aa, synthetic construct
PEEYYE

SEQ ID NO: 14732 - protein, 6 aa, synthetic construct
PEEYYF

SEQ ID NO: 14733 - protein, 6 aa, synthetic construct
PEEYYW

SEQ ID NO: 14734 - protein, 6 aa, synthetic construct
PEEYYY

SEQ ID NO: 14735 - protein, 6 aa, synthetic construct
PEEYVD

SEQ ID NO: 14736 - protein, 6 aa, synthetic construct
PEEYVE

SEQ ID NO: 14737 - protein, 6 aa, synthetic construct
PEEYVF

SEQ ID NO: 14738 - protein, 6 aa, synthetic construct
PEEYVW

SEQ ID NO: 14739 - protein, 6 aa, synthetic construct
PEEYVY

SEQ ID NO: 14740 - protein, 6 aa, synthetic construct
PEEVAD

SEQ ID NO: 14741 - protein, 6 aa, synthetic construct
PEEVAE

SEQ ID NO: 14742 - protein, 6 aa, synthetic construct
PEEVAF

SEQ ID NO: 14743 - protein, 6 aa, synthetic construct
PEEVAW

SEQ ID NO: 14744 - protein, 6 aa, synthetic construct
PEEVAY

SEQ ID NO: 14745 - protein, 6 aa, synthetic construct
PEEVRD

SEQ ID NO: 14746 - protein, 6 aa, synthetic construct
PEEVRE

SEQ ID NO: 14747 - protein, 6 aa, synthetic construct
PEEVRF

SEQ ID NO: 14748 - protein, 6 aa, synthetic construct
PEEVRW

SEQ ID NO: 14749 - protein, 6 aa, synthetic construct
PEEVRY

SEQ ID NO: 14750 - protein, 6 aa, synthetic construct
PEEVND

SEQ ID NO: 14751 - protein, 6 aa, synthetic construct
PEEVNE

SEQ ID NO: 14752 - protein, 6 aa, synthetic construct
PEEVNF

SEQ ID NO: 14753 - protein, 6 aa, synthetic construct
PEEVNW

SEQ ID NO: 14754 - protein, 6 aa, synthetic construct
PEEVNY

SEQ ID NO: 14755 - protein, 6 aa, synthetic construct
PEEVDD

SEQ ID NO: 14756 - protein, 6 aa, synthetic construct
PEEVDE

SEQ ID NO: 14757 - protein, 6 aa, synthetic construct
PEEVDF

SEQ ID NO: 14758 - protein, 6 aa, synthetic construct
PEEVDW

SEQ ID NO: 14759 - protein, 6 aa, synthetic construct
PEEVDY

SEQ ID NO: 14760 - protein, 6 aa, synthetic construct
PEEVCD

SEQ ID NO: 14761 - protein, 6 aa, synthetic construct
PEEVCE

SEQ ID NO: 14762 - protein, 6 aa, synthetic construct
PEEVCF

SEQ ID NO: 14763 - protein, 6 aa, synthetic construct
PEEVCW

SEQ ID NO: 14764 - protein, 6 aa, synthetic construct
PEEVCY

SEQ ID NO: 14765 - protein, 6 aa, synthetic construct
PEEVQD

SEQ ID NO: 14766 - protein, 6 aa, synthetic construct
PEEVQE

SEQ ID NO: 14767 - protein, 6 aa, synthetic construct
PEEVQF

SEQ ID NO: 14768 - protein, 6 aa, synthetic construct
PEEVQW

SEQ ID NO: 14769 - protein, 6 aa, synthetic construct
PEEVQY

SEQ ID NO: 14770 - protein, 6 aa, synthetic construct
PEEVED

SEQ ID NO: 14771 - protein, 6 aa, synthetic construct
PEEVEE

SEQ ID NO: 14772 - protein, 6 aa, synthetic construct
PEEVEF

SEQ ID NO: 14773 - protein, 6 aa, synthetic construct
PEEVEW

SEQ ID NO: 14774 - protein, 6 aa, synthetic construct
PEEVEY

SEQ ID NO: 14775 - protein, 6 aa, synthetic construct
PEEVGD

SEQ ID NO: 14776 - protein, 6 aa, synthetic construct
PEEVGE

SEQ ID NO: 14777 - protein, 6 aa, synthetic construct
PEEVGF

SEQ ID NO: 14778 - protein, 6 aa, synthetic construct
PEEVGW

SEQ ID NO: 14779 - protein, 6 aa, synthetic construct
PEEVGY

SEQ ID NO: 14780 - protein, 6 aa, synthetic construct
PEEVHD

SEQ ID NO: 14781 - protein, 6 aa, synthetic construct
PEEVHE

SEQ ID NO: 14782 - protein, 6 aa, synthetic construct
PEEVHF

SEQ ID NO: 14783 - protein, 6 aa, synthetic construct
PEEVHW

SEQ ID NO: 14784 - protein, 6 aa, synthetic construct
PEEVHY

SEQ ID NO: 14785 - protein, 6 aa, synthetic construct
PEEVID

SEQ ID NO: 14786 - protein, 6 aa, synthetic construct
PEEVIE

SEQ ID NO: 14787 - protein, 6 aa, synthetic construct
PEEVIF

SEQ ID NO: 14788 - protein, 6 aa, synthetic construct
PEEVIW

SEQ ID NO: 14789 - protein, 6 aa, synthetic construct
PEEVIY

SEQ ID NO: 14790 - protein, 6 aa, synthetic construct
PEEVLD

SEQ ID NO: 14791 - protein, 6 aa, synthetic construct
PEEVLE

SEQ ID NO: 14792 - protein, 6 aa, synthetic construct
PEEVLF

SEQ ID NO: 14793 - protein, 6 aa, synthetic construct
PEEVLW

SEQ ID NO: 14794 - protein, 6 aa, synthetic construct
PEEVLY

SEQ ID NO: 14795 - protein, 6 aa, synthetic construct
PEEVKD

SEQ ID NO: 14796 - protein, 6 aa, synthetic construct
PEEVKE

SEQ ID NO: 14797 - protein, 6 aa, synthetic construct
PEEVKF

SEQ ID NO: 14798 - protein, 6 aa, synthetic construct
PEEVKW

SEQ ID NO: 14799 - protein, 6 aa, synthetic construct
PEEVKY

SEQ ID NO: 14800 - protein, 6 aa, synthetic construct
PEEVMD

SEQ ID NO: 14801 - protein, 6 aa, synthetic construct
PEEVME

SEQ ID NO: 14802 - protein, 6 aa, synthetic construct
PEEVMF

SEQ ID NO: 14803 - protein, 6 aa, synthetic construct
PEEVMW

SEQ ID NO: 14804 - protein, 6 aa, synthetic construct
PEEVMY

SEQ ID NO: 14805 - protein, 6 aa, synthetic construct
PEEVFD

SEQ ID NO: 14806 - protein, 6 aa, synthetic construct
PEEVFE

SEQ ID NO: 14807 - protein, 6 aa, synthetic construct
PEEVFF

SEQ ID NO: 14808 - protein, 6 aa, synthetic construct
PEEVFW

SEQ ID NO: 14809 - protein, 6 aa, synthetic construct
PEEVFY

SEQ ID NO: 14810 - protein, 6 aa, synthetic construct
PEEVPD

SEQ ID NO: 14811 - protein, 6 aa, synthetic construct
PEEVPE

SEQ ID NO: 14812 - protein, 6 aa, synthetic construct
PEEVPF

SEQ ID NO: 14813 - protein, 6 aa, synthetic construct
PEEVPW

SEQ ID NO: 14814 - protein, 6 aa, synthetic construct
PEEVPY

SEQ ID NO: 14815 - protein, 6 aa, synthetic construct
PEEVSD

SEQ ID NO: 14816 - protein, 6 aa, synthetic construct
PEEVSE

SEQ ID NO: 14817 - protein, 6 aa, synthetic construct
PEEVSF

SEQ ID NO: 14818 - protein, 6 aa, synthetic construct
PEEVSW

SEQ ID NO: 14819 - protein, 6 aa, synthetic construct
PEEVSY

SEQ ID NO: 14820 - protein, 6 aa, synthetic construct
PEEVTD

SEQ ID NO: 14821 - protein, 6 aa, synthetic construct
PEEVTE

SEQ ID NO: 14822 - protein, 6 aa, synthetic construct
PEEVTF

SEQ ID NO: 14823 - protein, 6 aa, synthetic construct
PEEVTW

SEQ ID NO: 14824 - protein, 6 aa, synthetic construct
PEEVTY

SEQ ID NO: 14825 - protein, 6 aa, synthetic construct
PEEVWD

SEQ ID NO: 14826 - protein, 6 aa, synthetic construct
PEEVWE

SEQ ID NO: 14827 - protein, 6 aa, synthetic construct
PEEVWF

SEQ ID NO: 14828 - protein, 6 aa, synthetic construct
PEEVWW

SEQ ID NO: 14829 - protein, 6 aa, synthetic construct
PEEVWY

SEQ ID NO: 14830 - protein, 6 aa, synthetic construct
PEEVYD

SEQ ID NO: 14831 - protein, 6 aa, synthetic construct
PEEVYE

SEQ ID NO: 14832 - protein, 6 aa, synthetic construct
PEEVYF

SEQ ID NO: 14833 - protein, 6 aa, synthetic construct
PEEVYW

SEQ ID NO: 14834 - protein, 6 aa, synthetic construct
PEEVYY

SEQ ID NO: 14835 - protein, 6 aa, synthetic construct
PEEVVD

SEQ ID NO: 14836 - protein, 6 aa, synthetic construct
PEEVVE

SEQ ID NO: 14837 - protein, 6 aa, synthetic construct
PEEVVF

SEQ ID NO: 14838 - protein, 6 aa, synthetic construct
PEEVVW

SEQ ID NO: 14839 - protein, 6 aa, synthetic construct
PEEVVY

SEQ ID NO: 14840 - protein, 6 aa, synthetic construct
PGEAAD

SEQ ID NO: 14841 - protein, 6 aa, synthetic construct
PGEAAE

SEQ ID NO: 14842 - protein, 6 aa, synthetic construct
PGEAAF

SEQ ID NO: 14843 - protein, 6 aa, synthetic construct
PGEAAW

SEQ ID NO: 14844 - protein, 6 aa, synthetic construct
PGEAAY

SEQ ID NO: 14845 - protein, 6 aa, synthetic construct
PGEARD

SEQ ID NO: 14846 - protein, 6 aa, synthetic construct
PGEARE

SEQ ID NO: 14847 - protein, 6 aa, synthetic construct
PGEARF

SEQ ID NO: 14848 - protein, 6 aa, synthetic construct
PGEARW

SEQ ID NO: 14849 - protein, 6 aa, synthetic construct
PGEARY

SEQ ID NO: 14850 - protein, 6 aa, synthetic construct
PGEAND

SEQ ID NO: 14851 - protein, 6 aa, synthetic construct
PGEANE

SEQ ID NO: 14852 - protein, 6 aa, synthetic construct
PGEANF

SEQ ID NO: 14853 - protein, 6 aa, synthetic construct
PGEANW

SEQ ID NO: 14854 - protein, 6 aa, synthetic construct
PGEANY

SEQ ID NO: 14855 - protein, 6 aa, synthetic construct
PGEADD

SEQ ID NO: 14856 - protein, 6 aa, synthetic construct
PGEADE

SEQ ID NO: 14857 - protein, 6 aa, synthetic construct
PGEADF

SEQ ID NO: 14858 - protein, 6 aa, synthetic construct
PGEADW

SEQ ID NO: 14859 - protein, 6 aa, synthetic construct
PGEADY

SEQ ID NO: 14860 - protein, 6 aa, synthetic construct
PGEACD

SEQ ID NO: 14861 - protein, 6 aa, synthetic construct
PGEACE

SEQ ID NO: 14862 - protein, 6 aa, synthetic construct
PGEACF

SEQ ID NO: 14863 - protein, 6 aa, synthetic construct
PGEACW

SEQ ID NO: 14864 - protein, 6 aa, synthetic construct
PGEACY

SEQ ID NO: 14865 - protein, 6 aa, synthetic construct
PGEAQD

SEQ ID NO: 14866 - protein, 6 aa, synthetic construct
PGEAQE

SEQ ID NO: 14867 - protein, 6 aa, synthetic construct
PGEAQF

SEQ ID NO: 14868 - protein, 6 aa, synthetic construct
PGEAQW

SEQ ID NO: 14869 - protein, 6 aa, synthetic construct
PGEAQY

SEQ ID NO: 14870 - protein, 6 aa, synthetic construct
PGEAED

SEQ ID NO: 14871 - protein, 6 aa, synthetic construct
PGEAEE

SEQ ID NO: 14872 - protein, 6 aa, synthetic construct
PGEAEF

SEQ ID NO: 14873 - protein, 6 aa, synthetic construct
PGEAEW

SEQ ID NO: 14874 - protein, 6 aa, synthetic construct
PGEAEY

SEQ ID NO: 14875 - protein, 6 aa, synthetic construct
PGEAGD

SEQ ID NO: 14876 - protein, 6 aa, synthetic construct
PGEAGE

SEQ ID NO: 14877 - protein, 6 aa, synthetic construct
PGEAGF

SEQ ID NO: 14878 - protein, 6 aa, synthetic construct
PGEAGW

SEQ ID NO: 14879 - protein, 6 aa, synthetic construct
PGEAGY

SEQ ID NO: 14880 - protein, 6 aa, synthetic construct
PGEAHD

SEQ ID NO: 14881 - protein, 6 aa, synthetic construct
PGEAHE

SEQ ID NO: 14882 - protein, 6 aa, synthetic construct
PGEAHF

SEQ ID NO: 14883 - protein, 6 aa, synthetic construct
PGEAHW

SEQ ID NO: 14884 - protein, 6 aa, synthetic construct
PGEAHY

SEQ ID NO: 14885 - protein, 6 aa, synthetic construct
PGEAID

SEQ ID NO: 14886 - protein, 6 aa, synthetic construct
PGEAIE

SEQ ID NO: 14887 - protein, 6 aa, synthetic construct
PGEAIF

SEQ ID NO: 14888 - protein, 6 aa, synthetic construct
PGEAIW

SEQ ID NO: 14889 - protein, 6 aa, synthetic construct
PGEAIY

SEQ ID NO: 14890 - protein, 6 aa, synthetic construct
PGEALD

SEQ ID NO: 14891 - protein, 6 aa, synthetic construct
PGEALE

SEQ ID NO: 14892 - protein, 6 aa, synthetic construct
PGEALF

SEQ ID NO: 14893 - protein, 6 aa, synthetic construct
PGEALW

SEQ ID NO: 14894 - protein, 6 aa, synthetic construct
PGEALY

SEQ ID NO: 14895 - protein, 6 aa, synthetic construct
PGEAKD

SEQ ID NO: 14896 - protein, 6 aa, synthetic construct
PGEAKE

SEQ ID NO: 14897 - protein, 6 aa, synthetic construct
PGEAKF

SEQ ID NO: 14898 - protein, 6 aa, synthetic construct
PGEAKW

SEQ ID NO: 14899 - protein, 6 aa, synthetic construct
PGEAKY

SEQ ID NO: 14900 - protein, 6 aa, synthetic construct
PGEAMD

SEQ ID NO: 14901 - protein, 6 aa, synthetic construct
PGEAME

SEQ ID NO: 14902 - protein, 6 aa, synthetic construct
PGEAMF

SEQ ID NO: 14903 - protein, 6 aa, synthetic construct
PGEAMW

SEQ ID NO: 14904 - protein, 6 aa, synthetic construct
PGEAMY

SEQ ID NO: 14905 - protein, 6 aa, synthetic construct
PGEAFD

SEQ ID NO: 14906 - protein, 6 aa, synthetic construct
PGEAFE

SEQ ID NO: 14907 - protein, 6 aa, synthetic construct
PGEAFF

SEQ ID NO: 14908 - protein, 6 aa, synthetic construct
PGEAFW

SEQ ID NO: 14909 - protein, 6 aa, synthetic construct
PGEAFY

SEQ ID NO: 14910 - protein, 6 aa, synthetic construct
PGEAPD

SEQ ID NO: 14911 - protein, 6 aa, synthetic construct
PGEAPE

SEQ ID NO: 14912 - protein, 6 aa, synthetic construct
PGEAPF

SEQ ID NO: 14913 - protein, 6 aa, synthetic construct
PGEAPW

SEQ ID NO: 14914 - protein, 6 aa, synthetic construct
PGEAPY

SEQ ID NO: 14915 - protein, 6 aa, synthetic construct
PGEASD

SEQ ID NO: 14916 - protein, 6 aa, synthetic construct
PGEASE

SEQ ID NO: 14917 - protein, 6 aa, synthetic construct
PGEASF

SEQ ID NO: 14918 - protein, 6 aa, synthetic construct
PGEASW

SEQ ID NO: 14919 - protein, 6 aa, synthetic construct
PGEASY

SEQ ID NO: 14920 - protein, 6 aa, synthetic construct
PGEATD

SEQ ID NO: 14921 - protein, 6 aa, synthetic construct
PGEATE

SEQ ID NO: 14922 - protein, 6 aa, synthetic construct
PGEATF

SEQ ID NO: 14923 - protein, 6 aa, synthetic construct
PGEATW

SEQ ID NO: 14924 - protein, 6 aa, synthetic construct
PGEATY

SEQ ID NO: 14925 - protein, 6 aa, synthetic construct
PGEAWD

SEQ ID NO: 14926 - protein, 6 aa, synthetic construct
PGEAWE

SEQ ID NO: 14927 - protein, 6 aa, synthetic construct
PGEAWF

SEQ ID NO: 14928 - protein, 6 aa, synthetic construct
PGEAWW

SEQ ID NO: 14929 - protein, 6 aa, synthetic construct
PGEAWY

SEQ ID NO: 14930 - protein, 6 aa, synthetic construct
PGEAYD

SEQ ID NO: 14931 - protein, 6 aa, synthetic construct
PGEAYE

SEQ ID NO: 14932 - protein, 6 aa, synthetic construct
PGEAYF

SEQ ID NO: 14933 - protein, 6 aa, synthetic construct
PGEAYW

SEQ ID NO: 14934 - protein, 6 aa, synthetic construct
PGEAYY

SEQ ID NO: 14935 - protein, 6 aa, synthetic construct
PGEAVD

SEQ ID NO: 14936 - protein, 6 aa, synthetic construct
PGEAVE

SEQ ID NO: 14937 - protein, 6 aa, synthetic construct
PGEAVF

SEQ ID NO: 14938 - protein, 6 aa, synthetic construct
PGEAVW

SEQ ID NO: 14939 - protein, 6 aa, synthetic construct
PGEAVY

SEQ ID NO: 14940 - protein, 6 aa, synthetic construct
PGERAD

SEQ ID NO: 14941 - protein, 6 aa, synthetic construct
PGERAE

SEQ ID NO: 14942 - protein, 6 aa, synthetic construct
PGERAF

SEQ ID NO: 14943 - protein, 6 aa, synthetic construct
PGERAW

SEQ ID NO: 14944 - protein, 6 aa, synthetic construct
PGERAY

SEQ ID NO: 14945 - protein, 6 aa, synthetic construct
PGERRD

SEQ ID NO: 14946 - protein, 6 aa, synthetic construct
PGERRE

SEQ ID NO: 14947 - protein, 6 aa, synthetic construct
PGERRF

SEQ ID NO: 14948 - protein, 6 aa, synthetic construct
PGERRW

SEQ ID NO: 14949 - protein, 6 aa, synthetic construct
PGERRY

SEQ ID NO: 14950 - protein, 6 aa, synthetic construct
PGERND

SEQ ID NO: 14951 - protein, 6 aa, synthetic construct
PGERNE

SEQ ID NO: 14952 - protein, 6 aa, synthetic construct
PGERNF

SEQ ID NO: 14953 - protein, 6 aa, synthetic construct
PGERNW

SEQ ID NO: 14954 - protein, 6 aa, synthetic construct
PGERNY

SEQ ID NO: 14955 - protein, 6 aa, synthetic construct
PGERDD

SEQ ID NO: 14956 - protein, 6 aa, synthetic construct
PGERDE

SEQ ID NO: 14957 - protein, 6 aa, synthetic construct
PGERDF

SEQ ID NO: 14958 - protein, 6 aa, synthetic construct
PGERDW

SEQ ID NO: 14959 - protein, 6 aa, synthetic construct
PGERDY

SEQ ID NO: 14960 - protein, 6 aa, synthetic construct
PGERCD

SEQ ID NO: 14961 - protein, 6 aa, synthetic construct
PGERCE

SEQ ID NO: 14962 - protein, 6 aa, synthetic construct
PGERCF

SEQ ID NO: 14963 - protein, 6 aa, synthetic construct
PGERCW

SEQ ID NO: 14964 - protein, 6 aa, synthetic construct
PGERCY

SEQ ID NO: 14965 - protein, 6 aa, synthetic construct
PGERQD

SEQ ID NO: 14966 - protein, 6 aa, synthetic construct
PGERQE

SEQ ID NO: 14967 - protein, 6 aa, synthetic construct
PGERQF

SEQ ID NO: 14968 - protein, 6 aa, synthetic construct
PGERQW

SEQ ID NO: 14969 - protein, 6 aa, synthetic construct
PGERQY

SEQ ID NO: 14970 - protein, 6 aa, synthetic construct
PGERED

SEQ ID NO: 14971 - protein, 6 aa, synthetic construct
PGEREE

SEQ ID NO: 14972 - protein, 6 aa, synthetic construct
PGEREF

SEQ ID NO: 14973 - protein, 6 aa, synthetic construct
PGEREW

SEQ ID NO: 14974 - protein, 6 aa, synthetic construct
PGEREY

SEQ ID NO: 14975 - protein, 6 aa, synthetic construct
PGERGD

SEQ ID NO: 14976 - protein, 6 aa, synthetic construct
PGERGE

SEQ ID NO: 14977 - protein, 6 aa, synthetic construct
PGERGF

SEQ ID NO: 14978 - protein, 6 aa, synthetic construct
PGERGW

SEQ ID NO: 14979 - protein, 6 aa, synthetic construct
PGERGY

SEQ ID NO: 14980 - protein, 6 aa, synthetic construct
PGERHD

SEQ ID NO: 14981 - protein, 6 aa, synthetic construct
PGERHE

SEQ ID NO: 14982 - protein, 6 aa, synthetic construct
PGERHF

SEQ ID NO: 14983 - protein, 6 aa, synthetic construct
PGERHW

SEQ ID NO: 14984 - protein, 6 aa, synthetic construct
PGERHY

SEQ ID NO: 14985 - protein, 6 aa, synthetic construct
PGERID

SEQ ID NO: 14986 - protein, 6 aa, synthetic construct
PGERIE

SEQ ID NO: 14987 - protein, 6 aa, synthetic construct
PGERIF

SEQ ID NO: 14988 - protein, 6 aa, synthetic construct
PGERIW

SEQ ID NO: 14989 - protein, 6 aa, synthetic construct
PGERIY

SEQ ID NO: 14990 - protein, 6 aa, synthetic construct
PGERLD

SEQ ID NO: 14991 - protein, 6 aa, synthetic construct
PGERLE

SEQ ID NO: 14992 - protein, 6 aa, synthetic construct
PGERLF

SEQ ID NO: 14993 - protein, 6 aa, synthetic construct
PGERLW

SEQ ID NO: 14994 - protein, 6 aa, synthetic construct
PGERLY

SEQ ID NO: 14995 - protein, 6 aa, synthetic construct
PGERKD

SEQ ID NO: 14996 - protein, 6 aa, synthetic construct
PGERKE

SEQ ID NO: 14997 - protein, 6 aa, synthetic construct
PGERKF

SEQ ID NO: 14998 - protein, 6 aa, synthetic construct
PGERKW

SEQ ID NO: 14999 - protein, 6 aa, synthetic construct
PGERKY

SEQ ID NO: 15000 - protein, 6 aa, synthetic construct
PGERMD

SEQ ID NO: 15001 - protein, 6 aa, synthetic construct
PGERME

SEQ ID NO: 15002 - protein, 6 aa, synthetic construct
PGERMF

SEQ ID NO: 15003 - protein, 6 aa, synthetic construct
PGERMW

SEQ ID NO: 15004 - protein, 6 aa, synthetic construct
PGERMY

SEQ ID NO: 15005 - protein, 6 aa, synthetic construct
PGERFD

SEQ ID NO: 15006 - protein, 6 aa, synthetic construct
PGERFE

SEQ ID NO: 15007 - protein, 6 aa, synthetic construct
PGERFF

SEQ ID NO: 15008 - protein, 6 aa, synthetic construct
PGERFW

SEQ ID NO: 15009 - protein, 6 aa, synthetic construct
PGERFY

SEQ ID NO: 15010 - protein, 6 aa, synthetic construct
PGERPD

SEQ ID NO: 15011 - protein, 6 aa, synthetic construct
PGERPE

SEQ ID NO: 15012 - protein, 6 aa, synthetic construct
PGERPF

SEQ ID NO: 15013 - protein, 6 aa, synthetic construct
PGERPW

SEQ ID NO: 15014 - protein, 6 aa, synthetic construct
PGERPY

SEQ ID NO: 15015 - protein, 6 aa, synthetic construct
PGERSD

SEQ ID NO: 15016 - protein, 6 aa, synthetic construct
PGERSE

SEQ ID NO: 15017 - protein, 6 aa, synthetic construct
PGERSF

SEQ ID NO: 15018 - protein, 6 aa, synthetic construct
PGERSW

SEQ ID NO: 15019 - protein, 6 aa, synthetic construct
PGERSY

SEQ ID NO: 15020 - protein, 6 aa, synthetic construct
PGERTD

SEQ ID NO: 15021 - protein, 6 aa, synthetic construct
PGERTE

SEQ ID NO: 15022 - protein, 6 aa, synthetic construct
PGERTF

SEQ ID NO: 15023 - protein, 6 aa, synthetic construct
PGERTW

SEQ ID NO: 15024 - protein, 6 aa, synthetic construct
PGERTY

SEQ ID NO: 15025 - protein, 6 aa, synthetic construct
PGERWD

SEQ ID NO: 15026 - protein, 6 aa, synthetic construct
PGERWE

SEQ ID NO: 15027 - protein, 6 aa, synthetic construct
PGERWF

SEQ ID NO: 15028 - protein, 6 aa, synthetic construct
PGERWW

SEQ ID NO: 15029 - protein, 6 aa, synthetic construct
PGERWY

SEQ ID NO: 15030 - protein, 6 aa, synthetic construct
PGERYD

SEQ ID NO: 15031 - protein, 6 aa, synthetic construct
PGERYE

SEQ ID NO: 15032 - protein, 6 aa, synthetic construct
PGERYF

SEQ ID NO: 15033 - protein, 6 aa, synthetic construct
PGERYW

SEQ ID NO: 15034 - protein, 6 aa, synthetic construct
PGERYY

SEQ ID NO: 15035 - protein, 6 aa, synthetic construct
PGERVD

SEQ ID NO: 15036 - protein, 6 aa, synthetic construct
PGERVE

SEQ ID NO: 15037 - protein, 6 aa, synthetic construct
PGERVF

SEQ ID NO: 15038 - protein, 6 aa, synthetic construct
PGERVW

SEQ ID NO: 15039 - protein, 6 aa, synthetic construct
PGERVY

SEQ ID NO: 15040 - protein, 6 aa, synthetic construct
PGENAD

SEQ ID NO: 15041 - protein, 6 aa, synthetic construct
PGENAE

SEQ ID NO: 15042 - protein, 6 aa, synthetic construct
PGENAF

SEQ ID NO: 15043 - protein, 6 aa, synthetic construct
PGENAW

SEQ ID NO: 15044 - protein, 6 aa, synthetic construct
PGENAY

SEQ ID NO: 15045 - protein, 6 aa, synthetic construct
PGENRD

SEQ ID NO: 15046 - protein, 6 aa, synthetic construct
PGENRE

SEQ ID NO: 15047 - protein, 6 aa, synthetic construct
PGENRF

SEQ ID NO: 15048 - protein, 6 aa, synthetic construct
PGENRW

SEQ ID NO: 15049 - protein, 6 aa, synthetic construct
PGENRY

SEQ ID NO: 15050 - protein, 6 aa, synthetic construct
PGENND

SEQ ID NO: 15051 - protein, 6 aa, synthetic construct
PGENNE

SEQ ID NO: 15052 - protein, 6 aa, synthetic construct
PGENNF

SEQ ID NO: 15053 - protein, 6 aa, synthetic construct
PGENNW

SEQ ID NO: 15054 - protein, 6 aa, synthetic construct
PGENNY

SEQ ID NO: 15055 - protein, 6 aa, synthetic construct
PGENDD

SEQ ID NO: 15056 - protein, 6 aa, synthetic construct
PGENDE

SEQ ID NO: 15057 - protein, 6 aa, synthetic construct
PGENDF

SEQ ID NO: 15058 - protein, 6 aa, synthetic construct
PGENDW

SEQ ID NO: 15059 - protein, 6 aa, synthetic construct
PGENDY

SEQ ID NO: 15060 - protein, 6 aa, synthetic construct
PGENCD

SEQ ID NO: 15061 - protein, 6 aa, synthetic construct
PGENCE

SEQ ID NO: 15062 - protein, 6 aa, synthetic construct
PGENCF

SEQ ID NO: 15063 - protein, 6 aa, synthetic construct
PGENCW

SEQ ID NO: 15064 - protein, 6 aa, synthetic construct
PGENCY

SEQ ID NO: 15065 - protein, 6 aa, synthetic construct
PGENQD

SEQ ID NO: 15066 - protein, 6 aa, synthetic construct
PGENQE

SEQ ID NO: 15067 - protein, 6 aa, synthetic construct
PGENQF

SEQ ID NO: 15068 - protein, 6 aa, synthetic construct
PGENQW

SEQ ID NO: 15069 - protein, 6 aa, synthetic construct
PGENQY

SEQ ID NO: 15070 - protein, 6 aa, synthetic construct
PGENED

SEQ ID NO: 15071 - protein, 6 aa, synthetic construct
PGENEE

SEQ ID NO: 15072 - protein, 6 aa, synthetic construct
PGENEF

SEQ ID NO: 15073 - protein, 6 aa, synthetic construct
PGENEW

SEQ ID NO: 15074 - protein, 6 aa, synthetic construct
PGENEY

SEQ ID NO: 15075 - protein, 6 aa, synthetic construct
PGENGD

SEQ ID NO: 15076 - protein, 6 aa, synthetic construct
PGENGE

SEQ ID NO: 15077 - protein, 6 aa, synthetic construct
PGENGF

SEQ ID NO: 15078 - protein, 6 aa, synthetic construct
PGENGW

SEQ ID NO: 15079 - protein, 6 aa, synthetic construct
PGENGY

SEQ ID NO: 15080 - protein, 6 aa, synthetic construct
PGENHD

SEQ ID NO: 15081 - protein, 6 aa, synthetic construct
PGENHE

SEQ ID NO: 15082 - protein, 6 aa, synthetic construct
PGENHF

SEQ ID NO: 15083 - protein, 6 aa, synthetic construct
PGENHW

SEQ ID NO: 15084 - protein, 6 aa, synthetic construct
PGENHY

SEQ ID NO: 15085 - protein, 6 aa, synthetic construct
PGENID

SEQ ID NO: 15086 - protein, 6 aa, synthetic construct
PGENIE

SEQ ID NO: 15087 - protein, 6 aa, synthetic construct
PGENIF

SEQ ID NO: 15088 - protein, 6 aa, synthetic construct
PGENIW

SEQ ID NO: 15089 - protein, 6 aa, synthetic construct
PGENIY

SEQ ID NO: 15090 - protein, 6 aa, synthetic construct
PGENLD

SEQ ID NO: 15091 - protein, 6 aa, synthetic construct
PGENLE

SEQ ID NO: 15092 - protein, 6 aa, synthetic construct
PGENLF

SEQ ID NO: 15093 - protein, 6 aa, synthetic construct
PGENLW

SEQ ID NO: 15094 - protein, 6 aa, synthetic construct
PGENLY

SEQ ID NO: 15095 - protein, 6 aa, synthetic construct
PGENKD

SEQ ID NO: 15096 - protein, 6 aa, synthetic construct
PGENKE

SEQ ID NO: 15097 - protein, 6 aa, synthetic construct
PGENKF

SEQ ID NO: 15098 - protein, 6 aa, synthetic construct
PGENKW

SEQ ID NO: 15099 - protein, 6 aa, synthetic construct
PGENKY

SEQ ID NO: 15100 - protein, 6 aa, synthetic construct
PGENMD

SEQ ID NO: 15101 - protein, 6 aa, synthetic construct
PGENME

SEQ ID NO: 15102 - protein, 6 aa, synthetic construct
PGENMF

SEQ ID NO: 15103 - protein, 6 aa, synthetic construct
PGENMW

SEQ ID NO: 15104 - protein, 6 aa, synthetic construct
PGENMY

SEQ ID NO: 15105 - protein, 6 aa, synthetic construct
PGENFD

SEQ ID NO: 15106 - protein, 6 aa, synthetic construct
PGENFE

SEQ ID NO: 15107 - protein, 6 aa, synthetic construct
PGENFF

SEQ ID NO: 15108 - protein, 6 aa, synthetic construct
PGENFW

SEQ ID NO: 15109 - protein, 6 aa, synthetic construct
PGENFY

SEQ ID NO: 15110 - protein, 6 aa, synthetic construct
PGENPD

SEQ ID NO: 15111 - protein, 6 aa, synthetic construct
PGENPE

SEQ ID NO: 15112 - protein, 6 aa, synthetic construct
PGENPF

SEQ ID NO: 15113 - protein, 6 aa, synthetic construct
PGENPW

SEQ ID NO: 15114 - protein, 6 aa, synthetic construct
PGENPY

SEQ ID NO: 15115 - protein, 6 aa, synthetic construct
PGENSD

SEQ ID NO: 15116 - protein, 6 aa, synthetic construct
PGENSE

SEQ ID NO: 15117 - protein, 6 aa, synthetic construct
PGENSF

SEQ ID NO: 15118 - protein, 6 aa, synthetic construct
PGENSW

SEQ ID NO: 15119 - protein, 6 aa, synthetic construct
PGENSY

SEQ ID NO: 15120 - protein, 6 aa, synthetic construct
PGENTD

SEQ ID NO: 15121 - protein, 6 aa, synthetic construct
PGENTE

SEQ ID NO: 15122 - protein, 6 aa, synthetic construct
PGENTF

SEQ ID NO: 15123 - protein, 6 aa, synthetic construct
PGENTW

SEQ ID NO: 15124 - protein, 6 aa, synthetic construct
PGENTY

SEQ ID NO: 15125 - protein, 6 aa, synthetic construct
PGENWD

SEQ ID NO: 15126 - protein, 6 aa, synthetic construct
PGENWE

SEQ ID NO: 15127 - protein, 6 aa, synthetic construct
PGENWF

SEQ ID NO: 15128 - protein, 6 aa, synthetic construct
PGENWW

SEQ ID NO: 15129 - protein, 6 aa, synthetic construct
PGENWY

SEQ ID NO: 15130 - protein, 6 aa, synthetic construct
PGENYD

SEQ ID NO: 15131 - protein, 6 aa, synthetic construct
PGENYE

SEQ ID NO: 15132 - protein, 6 aa, synthetic construct
PGENYF

SEQ ID NO: 15133 - protein, 6 aa, synthetic construct
PGENYW

SEQ ID NO: 15134 - protein, 6 aa, synthetic construct
PGENYY

SEQ ID NO: 15135 - protein, 6 aa, synthetic construct
PGENVD

SEQ ID NO: 15136 - protein, 6 aa, synthetic construct
PGENVE

SEQ ID NO: 15137 - protein, 6 aa, synthetic construct
PGENVF

SEQ ID NO: 15138 - protein, 6 aa, synthetic construct
PGENVW

SEQ ID NO: 15139 - protein, 6 aa, synthetic construct
PGENVY

SEQ ID NO: 15140 - protein, 6 aa, synthetic construct
PGEDAD

SEQ ID NO: 15141 - protein, 6 aa, synthetic construct
PGEDAE

SEQ ID NO: 15142 - protein, 6 aa, synthetic construct
PGEDAF

SEQ ID NO: 15143 - protein, 6 aa, synthetic construct
PGEDAW

SEQ ID NO: 15144 - protein, 6 aa, synthetic construct
PGEDAY

SEQ ID NO: 15145 - protein, 6 aa, synthetic construct
PGEDRD

SEQ ID NO: 15146 - protein, 6 aa, synthetic construct
PGEDRE

SEQ ID NO: 15147 - protein, 6 aa, synthetic construct
PGEDRF

SEQ ID NO: 15148 - protein, 6 aa, synthetic construct
PGEDRW

SEQ ID NO: 15149 - protein, 6 aa, synthetic construct
PGEDRY

SEQ ID NO: 15150 - protein, 6 aa, synthetic construct
PGEDND

SEQ ID NO: 15151 - protein, 6 aa, synthetic construct
PGEDNE

SEQ ID NO: 15152 - protein, 6 aa, synthetic construct
PGEDNF

SEQ ID NO: 15153 - protein, 6 aa, synthetic construct
PGEDNW

SEQ ID NO: 15154 - protein, 6 aa, synthetic construct
PGEDNY

SEQ ID NO: 15155 - protein, 6 aa, synthetic construct
PGEDDD

SEQ ID NO: 15156 - protein, 6 aa, synthetic construct
PGEDDE

SEQ ID NO: 15157 - protein, 6 aa, synthetic construct
PGEDDF

SEQ ID NO: 15158 - protein, 6 aa, synthetic construct
PGEDDW

SEQ ID NO: 15159 - protein, 6 aa, synthetic construct
PGEDDY

SEQ ID NO: 15160 - protein, 6 aa, synthetic construct
PGEDCD

SEQ ID NO: 15161 - protein, 6 aa, synthetic construct
PGEDCE

SEQ ID NO: 15162 - protein, 6 aa, synthetic construct
PGEDCF

SEQ ID NO: 15163 - protein, 6 aa, synthetic construct
PGEDCW

SEQ ID NO: 15164 - protein, 6 aa, synthetic construct
PGEDCY

SEQ ID NO: 15165 - protein, 6 aa, synthetic construct
PGEDQD

SEQ ID NO: 15166 - protein, 6 aa, synthetic construct
PGEDQE

SEQ ID NO: 15167 - protein, 6 aa, synthetic construct
PGEDQF

SEQ ID NO: 15168 - protein, 6 aa, synthetic construct
PGEDQW

SEQ ID NO: 15169 - protein, 6 aa, synthetic construct
PGEDQY

SEQ ID NO: 15170 - protein, 6 aa, synthetic construct
PGEDED

SEQ ID NO: 15171 - protein, 6 aa, synthetic construct
PGEDEE

SEQ ID NO: 15172 - protein, 6 aa, synthetic construct
PGEDEF

SEQ ID NO: 15173 - protein, 6 aa, synthetic construct
PGEDEW

SEQ ID NO: 15174 - protein, 6 aa, synthetic construct
PGEDEY

SEQ ID NO: 15175 - protein, 6 aa, synthetic construct
PGEDGD

SEQ ID NO: 15176 - protein, 6 aa, synthetic construct
PGEDGE

SEQ ID NO: 15177 - protein, 6 aa, synthetic construct
PGEDGF

SEQ ID NO: 15178 - protein, 6 aa, synthetic construct
PGEDGW

SEQ ID NO: 15179 - protein, 6 aa, synthetic construct
PGEDGY

SEQ ID NO: 15180 - protein, 6 aa, synthetic construct
PGEDHD

SEQ ID NO: 15181 - protein, 6 aa, synthetic construct
PGEDHE

SEQ ID NO: 15182 - protein, 6 aa, synthetic construct
PGEDHF

SEQ ID NO: 15183 - protein, 6 aa, synthetic construct
PGEDHW

SEQ ID NO: 15184 - protein, 6 aa, synthetic construct
PGEDHY

SEQ ID NO: 15185 - protein, 6 aa, synthetic construct
PGEDID

SEQ ID NO: 15186 - protein, 6 aa, synthetic construct
PGEDIE

SEQ ID NO: 15187 - protein, 6 aa, synthetic construct
PGEDIF

SEQ ID NO: 15188 - protein, 6 aa, synthetic construct
PGEDIW

SEQ ID NO: 15189 - protein, 6 aa, synthetic construct
PGEDIY

SEQ ID NO: 15190 - protein, 6 aa, synthetic construct
PGEDLD

SEQ ID NO: 15191 - protein, 6 aa, synthetic construct
PGEDLE

SEQ ID NO: 15192 - protein, 6 aa, synthetic construct
PGEDLF

SEQ ID NO: 15193 - protein, 6 aa, synthetic construct
PGEDLW

SEQ ID NO: 15194 - protein, 6 aa, synthetic construct
PGEDLY

SEQ ID NO: 15195 - protein, 6 aa, synthetic construct
PGEDKD

SEQ ID NO: 15196 - protein, 6 aa, synthetic construct
PGEDKE

SEQ ID NO: 15197 - protein, 6 aa, synthetic construct
PGEDKF

SEQ ID NO: 15198 - protein, 6 aa, synthetic construct
PGEDKW

SEQ ID NO: 15199 - protein, 6 aa, synthetic construct
PGEDKY

SEQ ID NO: 15200 - protein, 6 aa, synthetic construct
PGEDMD

SEQ ID NO: 15201 - protein, 6 aa, synthetic construct
PGEDME

SEQ ID NO: 15202 - protein, 6 aa, synthetic construct
PGEDMF

SEQ ID NO: 15203 - protein, 6 aa, synthetic construct
PGEDMW

SEQ ID NO: 15204 - protein, 6 aa, synthetic construct
PGEDMY

SEQ ID NO: 15205 - protein, 6 aa, synthetic construct
PGEDFD

SEQ ID NO: 15206 - protein, 6 aa, synthetic construct
PGEDFE

SEQ ID NO: 15207 - protein, 6 aa, synthetic construct
PGEDFF

SEQ ID NO: 15208 - protein, 6 aa, synthetic construct
PGEDFW

SEQ ID NO: 15209 - protein, 6 aa, synthetic construct
PGEDFY

SEQ ID NO: 15210 - protein, 6 aa, synthetic construct
PGEDPD

SEQ ID NO: 15211 - protein, 6 aa, synthetic construct
PGEDPE

SEQ ID NO: 15212 - protein, 6 aa, synthetic construct
PGEDPF

SEQ ID NO: 15213 - protein, 6 aa, synthetic construct
PGEDPW

SEQ ID NO: 15214 - protein, 6 aa, synthetic construct
PGEDPY

SEQ ID NO: 15215 - protein, 6 aa, synthetic construct
PGEDSD

SEQ ID NO: 15216 - protein, 6 aa, synthetic construct
PGEDSE

SEQ ID NO: 15217 - protein, 6 aa, synthetic construct
PGEDSF

SEQ ID NO: 15218 - protein, 6 aa, synthetic construct
PGEDSW

SEQ ID NO: 15219 - protein, 6 aa, synthetic construct
PGEDSY

SEQ ID NO: 15220 - protein, 6 aa, synthetic construct
PGEDTD

SEQ ID NO: 15221 - protein, 6 aa, synthetic construct
PGEDTE

SEQ ID NO: 15222 - protein, 6 aa, synthetic construct
PGEDTF

SEQ ID NO: 15223 - protein, 6 aa, synthetic construct
PGEDTW

SEQ ID NO: 15224 - protein, 6 aa, synthetic construct
PGEDTY

SEQ ID NO: 15225 - protein, 6 aa, synthetic construct
PGEDWD

SEQ ID NO: 15226 - protein, 6 aa, synthetic construct
PGEDWE

SEQ ID NO: 15227 - protein, 6 aa, synthetic construct
PGEDWF

SEQ ID NO: 15228 - protein, 6 aa, synthetic construct
PGEDWW

SEQ ID NO: 15229 - protein, 6 aa, synthetic construct
PGEDWY

SEQ ID NO: 15230 - protein, 6 aa, synthetic construct
PGEDYD

SEQ ID NO: 15231 - protein, 6 aa, synthetic construct
PGEDYE

SEQ ID NO: 15232 - protein, 6 aa, synthetic construct
PGEDYF

SEQ ID NO: 15233 - protein, 6 aa, synthetic construct
PGEDYW

SEQ ID NO: 15234 - protein, 6 aa, synthetic construct
PGEDYY

SEQ ID NO: 15235 - protein, 6 aa, synthetic construct
PGEDVD

SEQ ID NO: 15236 - protein, 6 aa, synthetic construct
PGEDVE

SEQ ID NO: 15237 - protein, 6 aa, synthetic construct
PGEDVF

SEQ ID NO: 15238 - protein, 6 aa, synthetic construct
PGEDVW

SEQ ID NO: 15239 - protein, 6 aa, synthetic construct
PGEDVY

SEQ ID NO: 15240 - protein, 6 aa, synthetic construct
PGECAD

SEQ ID NO: 15241 - protein, 6 aa, synthetic construct
PGECAE

SEQ ID NO: 15242 - protein, 6 aa, synthetic construct
PGECAF

SEQ ID NO: 15243 - protein, 6 aa, synthetic construct
PGECAW

SEQ ID NO: 15244 - protein, 6 aa, synthetic construct
PGECAY

SEQ ID NO: 15245 - protein, 6 aa, synthetic construct
PGECRD

SEQ ID NO: 15246 - protein, 6 aa, synthetic construct
PGECRE

SEQ ID NO: 15247 - protein, 6 aa, synthetic construct
PGECRF

SEQ ID NO: 15248 - protein, 6 aa, synthetic construct
PGECRW

SEQ ID NO: 15249 - protein, 6 aa, synthetic construct
PGECRY

SEQ ID NO: 15250 - protein, 6 aa, synthetic construct
PGECND

SEQ ID NO: 15251 - protein, 6 aa, synthetic construct
PGECNE

SEQ ID NO: 15252 - protein, 6 aa, synthetic construct
PGECNF

SEQ ID NO: 15253 - protein, 6 aa, synthetic construct
PGECNW

SEQ ID NO: 15254 - protein, 6 aa, synthetic construct
PGECNY

SEQ ID NO: 15255 - protein, 6 aa, synthetic construct
PGECDD

SEQ ID NO: 15256 - protein, 6 aa, synthetic construct
PGECDE

SEQ ID NO: 15257 - protein, 6 aa, synthetic construct
PGECDF

SEQ ID NO: 15258 - protein, 6 aa, synthetic construct
PGECDW

SEQ ID NO: 15259 - protein, 6 aa, synthetic construct
PGECDY

SEQ ID NO: 15260 - protein, 6 aa, synthetic construct
PGECCD

SEQ ID NO: 15261 - protein, 6 aa, synthetic construct
PGECCE

SEQ ID NO: 15262 - protein, 6 aa, synthetic construct
PGECCF

SEQ ID NO: 15263 - protein, 6 aa, synthetic construct
PGECCW

SEQ ID NO: 15264 - protein, 6 aa, synthetic construct
PGECCY

SEQ ID NO: 15265 - protein, 6 aa, synthetic construct
PGECQD

SEQ ID NO: 15266 - protein, 6 aa, synthetic construct
PGECQE

SEQ ID NO: 15267 - protein, 6 aa, synthetic construct
PGECQF

SEQ ID NO: 15268 - protein, 6 aa, synthetic construct
PGECQW

SEQ ID NO: 15269 - protein, 6 aa, synthetic construct
PGECQY

SEQ ID NO: 15270 - protein, 6 aa, synthetic construct
PGECED

SEQ ID NO: 15271 - protein, 6 aa, synthetic construct
PGECEE

SEQ ID NO: 15272 - protein, 6 aa, synthetic construct
PGECEF

SEQ ID NO: 15273 - protein, 6 aa, synthetic construct
PGECEW

SEQ ID NO: 15274 - protein, 6 aa, synthetic construct
PGECEY

SEQ ID NO: 15275 - protein, 6 aa, synthetic construct
PGECGD

SEQ ID NO: 15276 - protein, 6 aa, synthetic construct
PGECGE

SEQ ID NO: 15277 - protein, 6 aa, synthetic construct
PGECGF

SEQ ID NO: 15278 - protein, 6 aa, synthetic construct
PGECGW

SEQ ID NO: 15279 - protein, 6 aa, synthetic construct
PGECGY

SEQ ID NO: 15280 - protein, 6 aa, synthetic construct
PGECHD

SEQ ID NO: 15281 - protein, 6 aa, synthetic construct
PGECHE

SEQ ID NO: 15282 - protein, 6 aa, synthetic construct
PGECHF

SEQ ID NO: 15283 - protein, 6 aa, synthetic construct
PGECHW

SEQ ID NO: 15284 - protein, 6 aa, synthetic construct
PGECHY

SEQ ID NO: 15285 - protein, 6 aa, synthetic construct
PGECID

SEQ ID NO: 15286 - protein, 6 aa, synthetic construct
PGECIE

SEQ ID NO: 15287 - protein, 6 aa, synthetic construct
PGECIF

SEQ ID NO: 15288 - protein, 6 aa, synthetic construct
PGECIW

SEQ ID NO: 15289 - protein, 6 aa, synthetic construct
PGECIY

SEQ ID NO: 15290 - protein, 6 aa, synthetic construct
PGECLD

SEQ ID NO: 15291 - protein, 6 aa, synthetic construct
PGECLE

SEQ ID NO: 15292 - protein, 6 aa, synthetic construct
PGECLF

SEQ ID NO: 15293 - protein, 6 aa, synthetic construct
PGECLW

SEQ ID NO: 15294 - protein, 6 aa, synthetic construct
PGECLY

SEQ ID NO: 15295 - protein, 6 aa, synthetic construct
PGECKD

SEQ ID NO: 15296 - protein, 6 aa, synthetic construct
PGECKE

SEQ ID NO: 15297 - protein, 6 aa, synthetic construct
PGECKF

SEQ ID NO: 15298 - protein, 6 aa, synthetic construct
PGECKW

SEQ ID NO: 15299 - protein, 6 aa, synthetic construct
PGECKY

SEQ ID NO: 15300 - protein, 6 aa, synthetic construct
PGECMD

SEQ ID NO: 15301 - protein, 6 aa, synthetic construct
PGECME

SEQ ID NO: 15302 - protein, 6 aa, synthetic construct
PGECMF

SEQ ID NO: 15303 - protein, 6 aa, synthetic construct
PGECMW

SEQ ID NO: 15304 - protein, 6 aa, synthetic construct
PGECMY

SEQ ID NO: 15305 - protein, 6 aa, synthetic construct
PGECFD

SEQ ID NO: 15306 - protein, 6 aa, synthetic construct
PGECFE

SEQ ID NO: 15307 - protein, 6 aa, synthetic construct
PGECFF

SEQ ID NO: 15308 - protein, 6 aa, synthetic construct
PGECFW

SEQ ID NO: 15309 - protein, 6 aa, synthetic construct
PGECFY

SEQ ID NO: 15310 - protein, 6 aa, synthetic construct
PGECPD

SEQ ID NO: 15311 - protein, 6 aa, synthetic construct
PGECPE

SEQ ID NO: 15312 - protein, 6 aa, synthetic construct
PGECPF

SEQ ID NO: 15313 - protein, 6 aa, synthetic construct
PGECPW

SEQ ID NO: 15314 - protein, 6 aa, synthetic construct
PGECPY

SEQ ID NO: 15315 - protein, 6 aa, synthetic construct
PGECSD

SEQ ID NO: 15316 - protein, 6 aa, synthetic construct
PGECSE

SEQ ID NO: 15317 - protein, 6 aa, synthetic construct
PGECSF

SEQ ID NO: 15318 - protein, 6 aa, synthetic construct
PGECSW

SEQ ID NO: 15319 - protein, 6 aa, synthetic construct
PGECSY

SEQ ID NO: 15320 - protein, 6 aa, synthetic construct
PGECTD

SEQ ID NO: 15321 - protein, 6 aa, synthetic construct
PGECTE

SEQ ID NO: 15322 - protein, 6 aa, synthetic construct
PGECTF

SEQ ID NO: 15323 - protein, 6 aa, synthetic construct
PGECTW

SEQ ID NO: 15324 - protein, 6 aa, synthetic construct
PGECTY

SEQ ID NO: 15325 - protein, 6 aa, synthetic construct
PGECWD

SEQ ID NO: 15326 - protein, 6 aa, synthetic construct
PGECWE

SEQ ID NO: 15327 - protein, 6 aa, synthetic construct
PGECWF

SEQ ID NO: 15328 - protein, 6 aa, synthetic construct
PGECWW

SEQ ID NO: 15329 - protein, 6 aa, synthetic construct
PGECWY

SEQ ID NO: 15330 - protein, 6 aa, synthetic construct
PGECYD

SEQ ID NO: 15331 - protein, 6 aa, synthetic construct
PGECYE

SEQ ID NO: 15332 - protein, 6 aa, synthetic construct
PGECYF

SEQ ID NO: 15333 - protein, 6 aa, synthetic construct
PGECYW

SEQ ID NO: 15334 - protein, 6 aa, synthetic construct
PGECYY

SEQ ID NO: 15335 - protein, 6 aa, synthetic construct
PGECVD

SEQ ID NO: 15336 - protein, 6 aa, synthetic construct
PGECVE

SEQ ID NO: 15337 - protein, 6 aa, synthetic construct
PGECVF

SEQ ID NO: 15338 - protein, 6 aa, synthetic construct
PGECVW

SEQ ID NO: 15339 - protein, 6 aa, synthetic construct
PGECVY

SEQ ID NO: 15340 - protein, 6 aa, synthetic construct
PGEQAD

SEQ ID NO: 15341 - protein, 6 aa, synthetic construct
PGEQAE

SEQ ID NO: 15342 - protein, 6 aa, synthetic construct
PGEQAF

SEQ ID NO: 15343 - protein, 6 aa, synthetic construct
PGEQAW

SEQ ID NO: 15344 - protein, 6 aa, synthetic construct
PGEQAY

SEQ ID NO: 15345 - protein, 6 aa, synthetic construct
PGEQRD

SEQ ID NO: 15346 - protein, 6 aa, synthetic construct
PGEQRE

SEQ ID NO: 15347 - protein, 6 aa, synthetic construct
PGEQRF

SEQ ID NO: 15348 - protein, 6 aa, synthetic construct
PGEQRW

SEQ ID NO: 15349 - protein, 6 aa, synthetic construct
PGEQRY

SEQ ID NO: 15350 - protein, 6 aa, synthetic construct
PGEQND

SEQ ID NO: 15351 - protein, 6 aa, synthetic construct
PGEQNE

SEQ ID NO: 15352 - protein, 6 aa, synthetic construct
PGEQNF

SEQ ID NO: 15353 - protein, 6 aa, synthetic construct
PGEQNW

SEQ ID NO: 15354 - protein, 6 aa, synthetic construct
PGEQNY

SEQ ID NO: 15355 - protein, 6 aa, synthetic construct
PGEQDD

SEQ ID NO: 15356 - protein, 6 aa, synthetic construct
PGEQDE

SEQ ID NO: 15357 - protein, 6 aa, synthetic construct
PGEQDF

SEQ ID NO: 15358 - protein, 6 aa, synthetic construct
PGEQDW

SEQ ID NO: 15359 - protein, 6 aa, synthetic construct
PGEQDY

SEQ ID NO: 15360 - protein, 6 aa, synthetic construct
PGEQCD

SEQ ID NO: 15361 - protein, 6 aa, synthetic construct
PGEQCE

SEQ ID NO: 15362 - protein, 6 aa, synthetic construct
PGEQCF

SEQ ID NO: 15363 - protein, 6 aa, synthetic construct
PGEQCW

SEQ ID NO: 15364 - protein, 6 aa, synthetic construct
PGEQCY

SEQ ID NO: 15365 - protein, 6 aa, synthetic construct
PGEQQD

SEQ ID NO: 15366 - protein, 6 aa, synthetic construct
PGEQQE

SEQ ID NO: 15367 - protein, 6 aa, synthetic construct
PGEQQF

SEQ ID NO: 15368 - protein, 6 aa, synthetic construct
PGEQQW

SEQ ID NO: 15369 - protein, 6 aa, synthetic construct
PGEQQY

SEQ ID NO: 15370 - protein, 6 aa, synthetic construct
PGEQED

SEQ ID NO: 15371 - protein, 6 aa, synthetic construct
PGEQEE

SEQ ID NO: 15372 - protein, 6 aa, synthetic construct
PGEQEF

SEQ ID NO: 15373 - protein, 6 aa, synthetic construct
PGEQEW

SEQ ID NO: 15374 - protein, 6 aa, synthetic construct
PGEQEY

SEQ ID NO: 15375 - protein, 6 aa, synthetic construct
PGEQGD

SEQ ID NO: 15376 - protein, 6 aa, synthetic construct
PGEQGE

SEQ ID NO: 15377 - protein, 6 aa, synthetic construct
PGEQGF

SEQ ID NO: 15378 - protein, 6 aa, synthetic construct
PGEQGW

SEQ ID NO: 15379 - protein, 6 aa, synthetic construct
PGEQGY

SEQ ID NO: 15380 - protein, 6 aa, synthetic construct
PGEQHD

SEQ ID NO: 15381 - protein, 6 aa, synthetic construct
PGEQHE

SEQ ID NO: 15382 - protein, 6 aa, synthetic construct
PGEQHF

SEQ ID NO: 15383 - protein, 6 aa, synthetic construct
PGEQHW

SEQ ID NO: 15384 - protein, 6 aa, synthetic construct
PGEQHY

SEQ ID NO: 15385 - protein, 6 aa, synthetic construct
PGEQID

SEQ ID NO: 15386 - protein, 6 aa, synthetic construct
PGEQIE

SEQ ID NO: 15387 - protein, 6 aa, synthetic construct
PGEQIF

SEQ ID NO: 15388 - protein, 6 aa, synthetic construct
PGEQIW

SEQ ID NO: 15389 - protein, 6 aa, synthetic construct
PGEQIY

SEQ ID NO: 15390 - protein, 6 aa, synthetic construct
PGEQLD

SEQ ID NO: 15391 - protein, 6 aa, synthetic construct
PGEQLE

SEQ ID NO: 15392 - protein, 6 aa, synthetic construct
PGEQLF

SEQ ID NO: 15393 - protein, 6 aa, synthetic construct
PGEQLW

SEQ ID NO: 15394 - protein, 6 aa, synthetic construct
PGEQLY

SEQ ID NO: 15395 - protein, 6 aa, synthetic construct
PGEQKD

SEQ ID NO: 15396 - protein, 6 aa, synthetic construct
PGEQKE

SEQ ID NO: 15397 - protein, 6 aa, synthetic construct
PGEQKF

SEQ ID NO: 15398 - protein, 6 aa, synthetic construct
PGEQKW

SEQ ID NO: 15399 - protein, 6 aa, synthetic construct
PGEQKY

SEQ ID NO: 15400 - protein, 6 aa, synthetic construct
PGEQMD

SEQ ID NO: 15401 - protein, 6 aa, synthetic construct
PGEQME

SEQ ID NO: 15402 - protein, 6 aa, synthetic construct
PGEQMF

SEQ ID NO: 15403 - protein, 6 aa, synthetic construct
PGEQMW

SEQ ID NO: 15404 - protein, 6 aa, synthetic construct
PGEQMY

SEQ ID NO: 15405 - protein, 6 aa, synthetic construct
PGEQFD

SEQ ID NO: 15406 - protein, 6 aa, synthetic construct
PGEQFE

SEQ ID NO: 15407 - protein, 6 aa, synthetic construct
PGEQFF

SEQ ID NO: 15408 - protein, 6 aa, synthetic construct
PGEQFW

SEQ ID NO: 15409 - protein, 6 aa, synthetic construct
PGEQFY

SEQ ID NO: 15410 - protein, 6 aa, synthetic construct
PGEQPD

SEQ ID NO: 15411 - protein, 6 aa, synthetic construct
PGEQPE

SEQ ID NO: 15412 - protein, 6 aa, synthetic construct
PGEQPF

SEQ ID NO: 15413 - protein, 6 aa, synthetic construct
PGEQPW

SEQ ID NO: 15414 - protein, 6 aa, synthetic construct
PGEQPY

SEQ ID NO: 15415 - protein, 6 aa, synthetic construct
PGEQSD

SEQ ID NO: 15416 - protein, 6 aa, synthetic construct
PGEQSE

SEQ ID NO: 15417 - protein, 6 aa, synthetic construct
PGEQSF

SEQ ID NO: 15418 - protein, 6 aa, synthetic construct
PGEQSW

SEQ ID NO: 15419 - protein, 6 aa, synthetic construct
PGEQSY

SEQ ID NO: 15420 - protein, 6 aa, synthetic construct
PGEQTD

SEQ ID NO: 15421 - protein, 6 aa, synthetic construct
PGEQTE

SEQ ID NO: 15422 - protein, 6 aa, synthetic construct
PGEQTF

SEQ ID NO: 15423 - protein, 6 aa, synthetic construct
PGEQTW

SEQ ID NO: 15424 - protein, 6 aa, synthetic construct
PGEQTY

SEQ ID NO: 15425 - protein, 6 aa, synthetic construct
PGEQWD

SEQ ID NO: 15426 - protein, 6 aa, synthetic construct
PGEQWE

SEQ ID NO: 15427 - protein, 6 aa, synthetic construct
PGEQWF

SEQ ID NO: 15428 - protein, 6 aa, synthetic construct
PGEQWW

SEQ ID NO: 15429 - protein, 6 aa, synthetic construct
PGEQWY

SEQ ID NO: 15430 - protein, 6 aa, synthetic construct
PGEQYD

SEQ ID NO: 15431 - protein, 6 aa, synthetic construct
PGEQYE

SEQ ID NO: 15432 - protein, 6 aa, synthetic construct
PGEQYF

SEQ ID NO: 15433 - protein, 6 aa, synthetic construct
PGEQYW

SEQ ID NO: 15434 - protein, 6 aa, synthetic construct
PGEQYY

SEQ ID NO: 15435 - protein, 6 aa, synthetic construct
PGEQVD

SEQ ID NO: 15436 - protein, 6 aa, synthetic construct
PGEQVE

SEQ ID NO: 15437 - protein, 6 aa, synthetic construct
PGEQVF

SEQ ID NO: 15438 - protein, 6 aa, synthetic construct
PGEQVW

SEQ ID NO: 15439 - protein, 6 aa, synthetic construct
PGEQVY

SEQ ID NO: 15440 - protein, 6 aa, synthetic construct
PGEEAD

SEQ ID NO: 15441 - protein, 6 aa, synthetic construct
PGEEAE

SEQ ID NO: 15442 - protein, 6 aa, synthetic construct
PGEEAF

SEQ ID NO: 15443 - protein, 6 aa, synthetic construct
PGEEAW

SEQ ID NO: 15444 - protein, 6 aa, synthetic construct
PGEEAY

SEQ ID NO: 15445 - protein, 6 aa, synthetic construct
PGEERD

SEQ ID NO: 15446 - protein, 6 aa, synthetic construct
PGEERE

SEQ ID NO: 15447 - protein, 6 aa, synthetic construct
PGEERF

SEQ ID NO: 15448 - protein, 6 aa, synthetic construct
PGEERW

SEQ ID NO: 15449 - protein, 6 aa, synthetic construct
PGEERY

SEQ ID NO: 15450 - protein, 6 aa, synthetic construct
PGEEND

SEQ ID NO: 15451 - protein, 6 aa, synthetic construct
PGEENE

SEQ ID NO: 15452 - protein, 6 aa, synthetic construct
PGEENF

SEQ ID NO: 15453 - protein, 6 aa, synthetic construct
PGEENW

SEQ ID NO: 15454 - protein, 6 aa, synthetic construct
PGEENY

SEQ ID NO: 15455 - protein, 6 aa, synthetic construct
PGEEDD

SEQ ID NO: 15456 - protein, 6 aa, synthetic construct
PGEEDE

SEQ ID NO: 15457 - protein, 6 aa, synthetic construct
PGEEDF

SEQ ID NO: 15458 - protein, 6 aa, synthetic construct
PGEEDW

SEQ ID NO: 15459 - protein, 6 aa, synthetic construct
PGEEDY

SEQ ID NO: 15460 - protein, 6 aa, synthetic construct
PGEECD

SEQ ID NO: 15461 - protein, 6 aa, synthetic construct
PGEECE

SEQ ID NO: 15462 - protein, 6 aa, synthetic construct
PGEECF

SEQ ID NO: 15463 - protein, 6 aa, synthetic construct
PGEECW

SEQ ID NO: 15464 - protein, 6 aa, synthetic construct
PGEECY

SEQ ID NO: 15465 - protein, 6 aa, synthetic construct
PGEEQD

SEQ ID NO: 15466 - protein, 6 aa, synthetic construct
PGEEQE

SEQ ID NO: 15467 - protein, 6 aa, synthetic construct
PGEEQF

SEQ ID NO: 15468 - protein, 6 aa, synthetic construct
PGEEQW

SEQ ID NO: 15469 - protein, 6 aa, synthetic construct
PGEEQY

SEQ ID NO: 15470 - protein, 6 aa, synthetic construct
PGEEED

SEQ ID NO: 15471 - protein, 6 aa, synthetic construct
PGEEEE

SEQ ID NO: 15472 - protein, 6 aa, synthetic construct
PGEEEF

SEQ ID NO: 15473 - protein, 6 aa, synthetic construct
PGEEEW

SEQ ID NO: 15474 - protein, 6 aa, synthetic construct
PGEEEY

SEQ ID NO: 15475 - protein, 6 aa, synthetic construct
PGEEGD

SEQ ID NO: 15476 - protein, 6 aa, synthetic construct
PGEEGE

SEQ ID NO: 15477 - protein, 6 aa, synthetic construct
PGEEGF

SEQ ID NO: 15478 - protein, 6 aa, synthetic construct
PGEEGW

SEQ ID NO: 15479 - protein, 6 aa, synthetic construct
PGEEGY

SEQ ID NO: 15480 - protein, 6 aa, synthetic construct
PGEEHD

SEQ ID NO: 15481 - protein, 6 aa, synthetic construct
PGEEHE

SEQ ID NO: 15482 - protein, 6 aa, synthetic construct
PGEEHF

SEQ ID NO: 15483 - protein, 6 aa, synthetic construct
PGEEHW

SEQ ID NO: 15484 - protein, 6 aa, synthetic construct
PGEEHY

SEQ ID NO: 15485 - protein, 6 aa, synthetic construct
PGEEID

SEQ ID NO: 15486 - protein, 6 aa, synthetic construct
PGEEIE

SEQ ID NO: 15487 - protein, 6 aa, synthetic construct
PGEEIF

SEQ ID NO: 15488 - protein, 6 aa, synthetic construct
PGEEIW

SEQ ID NO: 15489 - protein, 6 aa, synthetic construct
PGEEIY

SEQ ID NO: 15490 - protein, 6 aa, synthetic construct
PGEELD

SEQ ID NO: 15491 - protein, 6 aa, synthetic construct
PGEELE

SEQ ID NO: 15492 - protein, 6 aa, synthetic construct
PGEELF

SEQ ID NO: 15493 - protein, 6 aa, synthetic construct
PGEELW

SEQ ID NO: 15494 - protein, 6 aa, synthetic construct
PGEELY

SEQ ID NO: 15495 - protein, 6 aa, synthetic construct
PGEEKD

SEQ ID NO: 15496 - protein, 6 aa, synthetic construct
PGEEKE

SEQ ID NO: 15497 - protein, 6 aa, synthetic construct
PGEEKF

SEQ ID NO: 15498 - protein, 6 aa, synthetic construct
PGEEKW

SEQ ID NO: 15499 - protein, 6 aa, synthetic construct
PGEEKY

SEQ ID NO: 15500 - protein, 6 aa, synthetic construct
PGEEMD

SEQ ID NO: 15501 - protein, 6 aa, synthetic construct
PGEEME

SEQ ID NO: 15502 - protein, 6 aa, synthetic construct
PGEEMF

SEQ ID NO: 15503 - protein, 6 aa, synthetic construct
PGEEMW

SEQ ID NO: 15504 - protein, 6 aa, synthetic construct
PGEEMY

SEQ ID NO: 15505 - protein, 6 aa, synthetic construct
PGEEFD

SEQ ID NO: 15506 - protein, 6 aa, synthetic construct
PGEEFE

SEQ ID NO: 15507 - protein, 6 aa, synthetic construct
PGEEFF

SEQ ID NO: 15508 - protein, 6 aa, synthetic construct
PGEEFW

SEQ ID NO: 15509 - protein, 6 aa, synthetic construct
PGEEFY

SEQ ID NO: 15510 - protein, 6 aa, synthetic construct
PGEEPD

SEQ ID NO: 15511 - protein, 6 aa, synthetic construct
PGEEPE

SEQ ID NO: 15512 - protein, 6 aa, synthetic construct
PGEEPF

SEQ ID NO: 15513 - protein, 6 aa, synthetic construct
PGEEPW

SEQ ID NO: 15514 - protein, 6 aa, synthetic construct
PGEEPY

SEQ ID NO: 15515 - protein, 6 aa, synthetic construct
PGEESD

SEQ ID NO: 15516 - protein, 6 aa, synthetic construct
PGEESE

SEQ ID NO: 15517 - protein, 6 aa, synthetic construct
PGEESF

SEQ ID NO: 15518 - protein, 6 aa, synthetic construct
PGEESW

SEQ ID NO: 15519 - protein, 6 aa, synthetic construct
PGEESY

SEQ ID NO: 15520 - protein, 6 aa, synthetic construct
PGEETD

SEQ ID NO: 15521 - protein, 6 aa, synthetic construct
PGEETE

SEQ ID NO: 15522 - protein, 6 aa, synthetic construct
PGEETF

SEQ ID NO: 15523 - protein, 6 aa, synthetic construct
PGEETW

SEQ ID NO: 15524 - protein, 6 aa, synthetic construct
PGEETY

SEQ ID NO: 15525 - protein, 6 aa, synthetic construct
PGEEWD

SEQ ID NO: 15526 - protein, 6 aa, synthetic construct
PGEEWE

SEQ ID NO: 15527 - protein, 6 aa, synthetic construct
PGEEWF

SEQ ID NO: 15528 - protein, 6 aa, synthetic construct
PGEEWW

SEQ ID NO: 15529 - protein, 6 aa, synthetic construct
PGEEWY

SEQ ID NO: 15530 - protein, 6 aa, synthetic construct
PGEEYD

SEQ ID NO: 15531 - protein, 6 aa, synthetic construct
PGEEYE

SEQ ID NO: 15532 - protein, 6 aa, synthetic construct
PGEEYF

SEQ ID NO: 15533 - protein, 6 aa, synthetic construct
PGEEYW

SEQ ID NO: 15534 - protein, 6 aa, synthetic construct
PGEEYY

SEQ ID NO: 15535 - protein, 6 aa, synthetic construct
PGEEVD

SEQ ID NO: 15536 - protein, 6 aa, synthetic construct
PGEEVE

SEQ ID NO: 15537 - protein, 6 aa, synthetic construct
PGEEVF

SEQ ID NO: 15538 - protein, 6 aa, synthetic construct
PGEEVW

SEQ ID NO: 15539 - protein, 6 aa, synthetic construct
PGEEVY

SEQ ID NO: 15540 - protein, 6 aa, synthetic construct
PGEGAD

SEQ ID NO: 15541 - protein, 6 aa, synthetic construct
PGEGAE

SEQ ID NO: 15542 - protein, 6 aa, synthetic construct
PGEGAF

SEQ ID NO: 15543 - protein, 6 aa, synthetic construct
PGEGAW

SEQ ID NO: 15544 - protein, 6 aa, synthetic construct
PGEGAY

SEQ ID NO: 15545 - protein, 6 aa, synthetic construct
PGEGRD

SEQ ID NO: 15546 - protein, 6 aa, synthetic construct
PGEGRE

SEQ ID NO: 15547 - protein, 6 aa, synthetic construct
PGEGRF

SEQ ID NO: 15548 - protein, 6 aa, synthetic construct
PGEGRW

SEQ ID NO: 15549 - protein, 6 aa, synthetic construct
PGEGRY

SEQ ID NO: 15550 - protein, 6 aa, synthetic construct
PGEGND

SEQ ID NO: 15551 - protein, 6 aa, synthetic construct
PGEGNE

SEQ ID NO: 15552 - protein, 6 aa, synthetic construct
PGEGNF

SEQ ID NO: 15553 - protein, 6 aa, synthetic construct
PGEGNW

SEQ ID NO: 15554 - protein, 6 aa, synthetic construct
PGEGNY

SEQ ID NO: 15555 - protein, 6 aa, synthetic construct
PGEGDD

SEQ ID NO: 15556 - protein, 6 aa, synthetic construct
PGEGDE

SEQ ID NO: 15557 - protein, 6 aa, synthetic construct
PGEGDF

SEQ ID NO: 15558 - protein, 6 aa, synthetic construct
PGEGDW

SEQ ID NO: 15559 - protein, 6 aa, synthetic construct
PGEGDY

SEQ ID NO: 15560 - protein, 6 aa, synthetic construct
PGEGCD

SEQ ID NO: 15561 - protein, 6 aa, synthetic construct
PGEGCE

SEQ ID NO: 15562 - protein, 6 aa, synthetic construct
PGEGCF

SEQ ID NO: 15563 - protein, 6 aa, synthetic construct
PGEGCW

SEQ ID NO: 15564 - protein, 6 aa, synthetic construct
PGEGCY

SEQ ID NO: 15565 - protein, 6 aa, synthetic construct
PGEGQD

SEQ ID NO: 15566 - protein, 6 aa, synthetic construct
PGEGQE

SEQ ID NO: 15567 - protein, 6 aa, synthetic construct
PGEGQF

SEQ ID NO: 15568 - protein, 6 aa, synthetic construct
PGEGQW

SEQ ID NO: 15569 - protein, 6 aa, synthetic construct
PGEGQY

SEQ ID NO: 15570 - protein, 6 aa, synthetic construct
PGEGED

SEQ ID NO: 15571 - protein, 6 aa, synthetic construct
PGEGEE

SEQ ID NO: 15572 - protein, 6 aa, synthetic construct
PGEGEF

SEQ ID NO: 15573 - protein, 6 aa, synthetic construct
PGEGEW

SEQ ID NO: 15574 - protein, 6 aa, synthetic construct
PGEGEY

SEQ ID NO: 15575 - protein, 6 aa, synthetic construct
PGEGGD

SEQ ID NO: 15576 - protein, 6 aa, synthetic construct
PGEGGE

SEQ ID NO: 15577 - protein, 6 aa, synthetic construct
PGEGGF

SEQ ID NO: 15578 - protein, 6 aa, synthetic construct
PGEGGW

SEQ ID NO: 15579 - protein, 6 aa, synthetic construct
PGEGGY

SEQ ID NO: 15580 - protein, 6 aa, synthetic construct
PGEGHD

SEQ ID NO: 15581 - protein, 6 aa, synthetic construct
PGEGHE

SEQ ID NO: 15582 - protein, 6 aa, synthetic construct
PGEGHF

SEQ ID NO: 15583 - protein, 6 aa, synthetic construct
PGEGHW

SEQ ID NO: 15584 - protein, 6 aa, synthetic construct
PGEGHY

SEQ ID NO: 15585 - protein, 6 aa, synthetic construct
PGEGID

SEQ ID NO: 15586 - protein, 6 aa, synthetic construct
PGEGIE

SEQ ID NO: 15587 - protein, 6 aa, synthetic construct
PGEGIF

SEQ ID NO: 15588 - protein, 6 aa, synthetic construct
PGEGIW

SEQ ID NO: 15589 - protein, 6 aa, synthetic construct
PGEGIY

SEQ ID NO: 15590 - protein, 6 aa, synthetic construct
PGEGLD

SEQ ID NO: 15591 - protein, 6 aa, synthetic construct
PGEGLE

SEQ ID NO: 15592 - protein, 6 aa, synthetic construct
PGEGLF

SEQ ID NO: 15593 - protein, 6 aa, synthetic construct
PGEGLW

SEQ ID NO: 15594 - protein, 6 aa, synthetic construct
PGEGLY

SEQ ID NO: 15595 - protein, 6 aa, synthetic construct
PGEGKD

SEQ ID NO: 15596 - protein, 6 aa, synthetic construct
PGEGKE

SEQ ID NO: 15597 - protein, 6 aa, synthetic construct
PGEGKF

SEQ ID NO: 15598 - protein, 6 aa, synthetic construct
PGEGKW

SEQ ID NO: 15599 - protein, 6 aa, synthetic construct
PGEGKY

SEQ ID NO: 15600 - protein, 6 aa, synthetic construct
PGEGMD

SEQ ID NO: 15601 - protein, 6 aa, synthetic construct
PGEGME

SEQ ID NO: 15602 - protein, 6 aa, synthetic construct
PGEGMF

SEQ ID NO: 15603 - protein, 6 aa, synthetic construct
PGEGMW

SEQ ID NO: 15604 - protein, 6 aa, synthetic construct
PGEGMY

SEQ ID NO: 15605 - protein, 6 aa, synthetic construct
PGEGFD

SEQ ID NO: 15606 - protein, 6 aa, synthetic construct
PGEGFE

SEQ ID NO: 15607 - protein, 6 aa, synthetic construct
PGEGFF

SEQ ID NO: 15608 - protein, 6 aa, synthetic construct
PGEGFW

SEQ ID NO: 15609 - protein, 6 aa, synthetic construct
PGEGFY

SEQ ID NO: 15610 - protein, 6 aa, synthetic construct
PGEGPD

SEQ ID NO: 15611 - protein, 6 aa, synthetic construct
PGEGPE

SEQ ID NO: 15612 - protein, 6 aa, synthetic construct
PGEGPF

SEQ ID NO: 15613 - protein, 6 aa, synthetic construct
PGEGPW

SEQ ID NO: 15614 - protein, 6 aa, synthetic construct
PGEGPY

SEQ ID NO: 15615 - protein, 6 aa, synthetic construct
PGEGSD

SEQ ID NO: 15616 - protein, 6 aa, synthetic construct
PGEGSE

SEQ ID NO: 15617 - protein, 6 aa, synthetic construct
PGEGSF

SEQ ID NO: 15618 - protein, 6 aa, synthetic construct
PGEGSW

SEQ ID NO: 15619 - protein, 6 aa, synthetic construct
PGEGSY

SEQ ID NO: 15620 - protein, 6 aa, synthetic construct
PGEGTD

SEQ ID NO: 15621 - protein, 6 aa, synthetic construct
PGEGTE

SEQ ID NO: 15622 - protein, 6 aa, synthetic construct
PGEGTF

SEQ ID NO: 15623 - protein, 6 aa, synthetic construct
PGEGTW

SEQ ID NO: 15624 - protein, 6 aa, synthetic construct
PGEGTY

SEQ ID NO: 15625 - protein, 6 aa, synthetic construct
PGEGWD

SEQ ID NO: 15626 - protein, 6 aa, synthetic construct
PGEGWE

SEQ ID NO: 15627 - protein, 6 aa, synthetic construct
PGEGWF

SEQ ID NO: 15628 - protein, 6 aa, synthetic construct
PGEGWW

SEQ ID NO: 15629 - protein, 6 aa, synthetic construct
PGEGWY

SEQ ID NO: 15630 - protein, 6 aa, synthetic construct
PGEGYD

SEQ ID NO: 15631 - protein, 6 aa, synthetic construct
PGEGYE

SEQ ID NO: 15632 - protein, 6 aa, synthetic construct
PGEGYF

SEQ ID NO: 15633 - protein, 6 aa, synthetic construct
PGEGYW

SEQ ID NO: 15634 - protein, 6 aa, synthetic construct
PGEGYY

SEQ ID NO: 15635 - protein, 6 aa, synthetic construct
PGEGVD

SEQ ID NO: 15636 - protein, 6 aa, synthetic construct
PGEGVE

SEQ ID NO: 15637 - protein, 6 aa, synthetic construct
PGEGVF

SEQ ID NO: 15638 - protein, 6 aa, synthetic construct
PGEGVW

SEQ ID NO: 15639 - protein, 6 aa, synthetic construct
PGEGVY

SEQ ID NO: 15640 - protein, 6 aa, synthetic construct
PGEHAD

SEQ ID NO: 15641 - protein, 6 aa, synthetic construct
PGEHAE

SEQ ID NO: 15642 - protein, 6 aa, synthetic construct
PGEHAF

SEQ ID NO: 15643 - protein, 6 aa, synthetic construct
PGEHAW

SEQ ID NO: 15644 - protein, 6 aa, synthetic construct
PGEHAY

SEQ ID NO: 15645 - protein, 6 aa, synthetic construct
PGEHRD

SEQ ID NO: 15646 - protein, 6 aa, synthetic construct
PGEHRE

SEQ ID NO: 15647 - protein, 6 aa, synthetic construct
PGEHRF

SEQ ID NO: 15648 - protein, 6 aa, synthetic construct
PGEHRW

SEQ ID NO: 15649 - protein, 6 aa, synthetic construct
PGEHRY

SEQ ID NO: 15650 - protein, 6 aa, synthetic construct
PGEHND

SEQ ID NO: 15651 - protein, 6 aa, synthetic construct
PGEHNE

SEQ ID NO: 15652 - protein, 6 aa, synthetic construct
PGEHNF

SEQ ID NO: 15653 - protein, 6 aa, synthetic construct
PGEHNW

SEQ ID NO: 15654 - protein, 6 aa, synthetic construct
PGEHNY

SEQ ID NO: 15655 - protein, 6 aa, synthetic construct
PGEHDD

SEQ ID NO: 15656 - protein, 6 aa, synthetic construct
PGEHDE

SEQ ID NO: 15657 - protein, 6 aa, synthetic construct
PGEHDF

SEQ ID NO: 15658 - protein, 6 aa, synthetic construct
PGEHDW

SEQ ID NO: 15659 - protein, 6 aa, synthetic construct
PGEHDY

SEQ ID NO: 15660 - protein, 6 aa, synthetic construct
PGEHCD

SEQ ID NO: 15661 - protein, 6 aa, synthetic construct
PGEHCE

SEQ ID NO: 15662 - protein, 6 aa, synthetic construct
PGEHCF

SEQ ID NO: 15663 - protein, 6 aa, synthetic construct
PGEHCW

SEQ ID NO: 15664 - protein, 6 aa, synthetic construct
PGEHCY

SEQ ID NO: 15665 - protein, 6 aa, synthetic construct
PGEHQD

SEQ ID NO: 15666 - protein, 6 aa, synthetic construct
PGEHQE

SEQ ID NO: 15667 - protein, 6 aa, synthetic construct
PGEHQF

SEQ ID NO: 15668 - protein, 6 aa, synthetic construct
PGEHQW

SEQ ID NO: 15669 - protein, 6 aa, synthetic construct
PGEHQY

SEQ ID NO: 15670 - protein, 6 aa, synthetic construct
PGEHED

SEQ ID NO: 15671 - protein, 6 aa, synthetic construct
PGEHEE

SEQ ID NO: 15672 - protein, 6 aa, synthetic construct
PGEHEF

SEQ ID NO: 15673 - protein, 6 aa, synthetic construct
PGEHEW

SEQ ID NO: 15674 - protein, 6 aa, synthetic construct
PGEHEY

SEQ ID NO: 15675 - protein, 6 aa, synthetic construct
PGEHGD

SEQ ID NO: 15676 - protein, 6 aa, synthetic construct
PGEHGE

SEQ ID NO: 15677 - protein, 6 aa, synthetic construct
PGEHGF

SEQ ID NO: 15678 - protein, 6 aa, synthetic construct
PGEHGW

SEQ ID NO: 15679 - protein, 6 aa, synthetic construct
PGEHGY

SEQ ID NO: 15680 - protein, 6 aa, synthetic construct
PGEHHD

SEQ ID NO: 15681 - protein, 6 aa, synthetic construct
PGEHHE

SEQ ID NO: 15682 - protein, 6 aa, synthetic construct
PGEHHF

SEQ ID NO: 15683 - protein, 6 aa, synthetic construct
PGEHHW

SEQ ID NO: 15684 - protein, 6 aa, synthetic construct
PGEHHY

SEQ ID NO: 15685 - protein, 6 aa, synthetic construct
PGEHID

SEQ ID NO: 15686 - protein, 6 aa, synthetic construct
PGEHIE

SEQ ID NO: 15687 - protein, 6 aa, synthetic construct
PGEHIF

SEQ ID NO: 15688 - protein, 6 aa, synthetic construct
PGEHIW

SEQ ID NO: 15689 - protein, 6 aa, synthetic construct
PGEHIY

SEQ ID NO: 15690 - protein, 6 aa, synthetic construct
PGEHLD

SEQ ID NO: 15691 - protein, 6 aa, synthetic construct
PGEHLE

SEQ ID NO: 15692 - protein, 6 aa, synthetic construct
PGEHLF

SEQ ID NO: 15693 - protein, 6 aa, synthetic construct
PGEHLW

SEQ ID NO: 15694 - protein, 6 aa, synthetic construct
PGEHLY

SEQ ID NO: 15695 - protein, 6 aa, synthetic construct
PGEHKD

SEQ ID NO: 15696 - protein, 6 aa, synthetic construct
PGEHKE

SEQ ID NO: 15697 - protein, 6 aa, synthetic construct
PGEHKF

SEQ ID NO: 15698 - protein, 6 aa, synthetic construct
PGEHKW

SEQ ID NO: 15699 - protein, 6 aa, synthetic construct
PGEHKY

SEQ ID NO: 15700 - protein, 6 aa, synthetic construct
PGEHMD

SEQ ID NO: 15701 - protein, 6 aa, synthetic construct
PGEHME

SEQ ID NO: 15702 - protein, 6 aa, synthetic construct
PGEHMF

SEQ ID NO: 15703 - protein, 6 aa, synthetic construct
PGEHMW

SEQ ID NO: 15704 - protein, 6 aa, synthetic construct
PGEHMY

SEQ ID NO: 15705 - protein, 6 aa, synthetic construct
PGEHFD

SEQ ID NO: 15706 - protein, 6 aa, synthetic construct
PGEHFE

SEQ ID NO: 15707 - protein, 6 aa, synthetic construct
PGEHFF

SEQ ID NO: 15708 - protein, 6 aa, synthetic construct
PGEHFW

SEQ ID NO: 15709 - protein, 6 aa, synthetic construct
PGEHFY

SEQ ID NO: 15710 - protein, 6 aa, synthetic construct
PGEHPD

SEQ ID NO: 15711 - protein, 6 aa, synthetic construct
PGEHPE

SEQ ID NO: 15712 - protein, 6 aa, synthetic construct
PGEHPF

SEQ ID NO: 15713 - protein, 6 aa, synthetic construct
PGEHPW

SEQ ID NO: 15714 - protein, 6 aa, synthetic construct
PGEHPY

SEQ ID NO: 15715 - protein, 6 aa, synthetic construct
PGEHSD

SEQ ID NO: 15716 - protein, 6 aa, synthetic construct
PGEHSE

SEQ ID NO: 15717 - protein, 6 aa, synthetic construct
PGEHSF

SEQ ID NO: 15718 - protein, 6 aa, synthetic construct
PGEHSW

SEQ ID NO: 15719 - protein, 6 aa, synthetic construct
PGEHSY

SEQ ID NO: 15720 - protein, 6 aa, synthetic construct
PGEHTD

SEQ ID NO: 15721 - protein, 6 aa, synthetic construct
PGEHTE

SEQ ID NO: 15722 - protein, 6 aa, synthetic construct
PGEHTF

SEQ ID NO: 15723 - protein, 6 aa, synthetic construct
PGEHTW

SEQ ID NO: 15724 - protein, 6 aa, synthetic construct
PGEHTY

SEQ ID NO: 15725 - protein, 6 aa, synthetic construct
PGEHWD

SEQ ID NO: 15726 - protein, 6 aa, synthetic construct
PGEHWE

SEQ ID NO: 15727 - protein, 6 aa, synthetic construct
PGEHWF

SEQ ID NO: 15728 - protein, 6 aa, synthetic construct
PGEHWW

SEQ ID NO: 15729 - protein, 6 aa, synthetic construct
PGEHWY

SEQ ID NO: 15730 - protein, 6 aa, synthetic construct
PGEHYD

SEQ ID NO: 15731 - protein, 6 aa, synthetic construct
PGEHYE

SEQ ID NO: 15732 - protein, 6 aa, synthetic construct
PGEHYF

SEQ ID NO: 15733 - protein, 6 aa, synthetic construct
PGEHYW

SEQ ID NO: 15734 - protein, 6 aa, synthetic construct
PGEHYY

SEQ ID NO: 15735 - protein, 6 aa, synthetic construct
PGEHVD

SEQ ID NO: 15736 - protein, 6 aa, synthetic construct
PGEHVE

SEQ ID NO: 15737 - protein, 6 aa, synthetic construct
PGEHVF

SEQ ID NO: 15738 - protein, 6 aa, synthetic construct
PGEHVW

SEQ ID NO: 15739 - protein, 6 aa, synthetic construct
PGEHVY

SEQ ID NO: 15740 - protein, 6 aa, synthetic construct
PGEIAD

SEQ ID NO: 15741 - protein, 6 aa, synthetic construct
PGEIAE

SEQ ID NO: 15742 - protein, 6 aa, synthetic construct
PGEIAF

SEQ ID NO: 15743 - protein, 6 aa, synthetic construct
PGEIAW

SEQ ID NO: 15744 - protein, 6 aa, synthetic construct
PGEIAY

SEQ ID NO: 15745 - protein, 6 aa, synthetic construct
PGEIRD

SEQ ID NO: 15746 - protein, 6 aa, synthetic construct
PGEIRE

SEQ ID NO: 15747 - protein, 6 aa, synthetic construct
PGEIRF

SEQ ID NO: 15748 - protein, 6 aa, synthetic construct
PGEIRW

SEQ ID NO: 15749 - protein, 6 aa, synthetic construct
PGEIRY

SEQ ID NO: 15750 - protein, 6 aa, synthetic construct
PGEIND

SEQ ID NO: 15751 - protein, 6 aa, synthetic construct
PGEINE

SEQ ID NO: 15752 - protein, 6 aa, synthetic construct
PGEINF

SEQ ID NO: 15753 - protein, 6 aa, synthetic construct
PGEINW

SEQ ID NO: 15754 - protein, 6 aa, synthetic construct
PGEINY

SEQ ID NO: 15755 - protein, 6 aa, synthetic construct
PGEIDD

SEQ ID NO: 15756 - protein, 6 aa, synthetic construct
PGEIDE

SEQ ID NO: 15757 - protein, 6 aa, synthetic construct
PGEIDF

SEQ ID NO: 15758 - protein, 6 aa, synthetic construct
PGEIDW

SEQ ID NO: 15759 - protein, 6 aa, synthetic construct
PGEIDY

SEQ ID NO: 15760 - protein, 6 aa, synthetic construct
PGEICD

SEQ ID NO: 15761 - protein, 6 aa, synthetic construct
PGEICE

SEQ ID NO: 15762 - protein, 6 aa, synthetic construct
PGEICF

SEQ ID NO: 15763 - protein, 6 aa, synthetic construct
PGEICW

SEQ ID NO: 15764 - protein, 6 aa, synthetic construct
PGEICY

SEQ ID NO: 15765 - protein, 6 aa, synthetic construct
PGEIQD

SEQ ID NO: 15766 - protein, 6 aa, synthetic construct
PGEIQE

SEQ ID NO: 15767 - protein, 6 aa, synthetic construct
PGEIQF

SEQ ID NO: 15768 - protein, 6 aa, synthetic construct
PGEIQW

SEQ ID NO: 15769 - protein, 6 aa, synthetic construct
PGEIQY

SEQ ID NO: 15770 - protein, 6 aa, synthetic construct
PGEIED

SEQ ID NO: 15771 - protein, 6 aa, synthetic construct
PGEIEE

SEQ ID NO: 15772 - protein, 6 aa, synthetic construct
PGEIEF

SEQ ID NO: 15773 - protein, 6 aa, synthetic construct
PGEIEW

SEQ ID NO: 15774 - protein, 6 aa, synthetic construct
PGEIEY

SEQ ID NO: 15775 - protein, 6 aa, synthetic construct
PGEIGD

SEQ ID NO: 15776 - protein, 6 aa, synthetic construct
PGEIGE

SEQ ID NO: 15777 - protein, 6 aa, synthetic construct
PGEIGF

SEQ ID NO: 15778 - protein, 6 aa, synthetic construct
PGEIGW

SEQ ID NO: 15779 - protein, 6 aa, synthetic construct
PGEIGY

SEQ ID NO: 15780 - protein, 6 aa, synthetic construct
PGEIHD

SEQ ID NO: 15781 - protein, 6 aa, synthetic construct
PGEIHE

SEQ ID NO: 15782 - protein, 6 aa, synthetic construct
PGEIHF

SEQ ID NO: 15783 - protein, 6 aa, synthetic construct
PGEIHW

SEQ ID NO: 15784 - protein, 6 aa, synthetic construct
PGEIHY

SEQ ID NO: 15785 - protein, 6 aa, synthetic construct
PGEIID

SEQ ID NO: 15786 - protein, 6 aa, synthetic construct
PGEIIE

SEQ ID NO: 15787 - protein, 6 aa, synthetic construct
PGEIIF

SEQ ID NO: 15788 - protein, 6 aa, synthetic construct
PGEIIW

SEQ ID NO: 15789 - protein, 6 aa, synthetic construct
PGEIIY

SEQ ID NO: 15790 - protein, 6 aa, synthetic construct
PGEILD

SEQ ID NO: 15791 - protein, 6 aa, synthetic construct
PGEILE

SEQ ID NO: 15792 - protein, 6 aa, synthetic construct
PGEILF

SEQ ID NO: 15793 - protein, 6 aa, synthetic construct
PGEILW

SEQ ID NO: 15794 - protein, 6 aa, synthetic construct
PGEILY

SEQ ID NO: 15795 - protein, 6 aa, synthetic construct
PGEIKD

SEQ ID NO: 15796 - protein, 6 aa, synthetic construct
PGEIKE

SEQ ID NO: 15797 - protein, 6 aa, synthetic construct
PGEIKF

SEQ ID NO: 15798 - protein, 6 aa, synthetic construct
PGEIKW

SEQ ID NO: 15799 - protein, 6 aa, synthetic construct
PGEIKY

SEQ ID NO: 15800 - protein, 6 aa, synthetic construct
PGEIMD

SEQ ID NO: 15801 - protein, 6 aa, synthetic construct
PGEIME

SEQ ID NO: 15802 - protein, 6 aa, synthetic construct
PGEIMF

SEQ ID NO: 15803 - protein, 6 aa, synthetic construct
PGEIMW

SEQ ID NO: 15804 - protein, 6 aa, synthetic construct
PGEIMY

SEQ ID NO: 15805 - protein, 6 aa, synthetic construct
PGEIFD

SEQ ID NO: 15806 - protein, 6 aa, synthetic construct
PGEIFE

SEQ ID NO: 15807 - protein, 6 aa, synthetic construct
PGEIFF

SEQ ID NO: 15808 - protein, 6 aa, synthetic construct
PGEIFW

SEQ ID NO: 15809 - protein, 6 aa, synthetic construct
PGEIFY

SEQ ID NO: 15810 - protein, 6 aa, synthetic construct
PGEIPD

SEQ ID NO: 15811 - protein, 6 aa, synthetic construct
PGEIPE

SEQ ID NO: 15812 - protein, 6 aa, synthetic construct
PGEIPF

SEQ ID NO: 15813 - protein, 6 aa, synthetic construct
PGEIPW

SEQ ID NO: 15814 - protein, 6 aa, synthetic construct
PGEIPY

SEQ ID NO: 15815 - protein, 6 aa, synthetic construct
PGEISD

SEQ ID NO: 15816 - protein, 6 aa, synthetic construct
PGEISE

SEQ ID NO: 15817 - protein, 6 aa, synthetic construct
PGEISF

SEQ ID NO: 15818 - protein, 6 aa, synthetic construct
PGEISW

SEQ ID NO: 15819 - protein, 6 aa, synthetic construct
PGEISY

SEQ ID NO: 15820 - protein, 6 aa, synthetic construct
PGEITD

SEQ ID NO: 15821 - protein, 6 aa, synthetic construct
PGEITE

SEQ ID NO: 15822 - protein, 6 aa, synthetic construct
PGEITF

SEQ ID NO: 15823 - protein, 6 aa, synthetic construct
PGEITW

SEQ ID NO: 15824 - protein, 6 aa, synthetic construct
PGEITY

SEQ ID NO: 15825 - protein, 6 aa, synthetic construct
PGEIWD

SEQ ID NO: 15826 - protein, 6 aa, synthetic construct
PGEIWE

SEQ ID NO: 15827 - protein, 6 aa, synthetic construct
PGEIWF

SEQ ID NO: 15828 - protein, 6 aa, synthetic construct
PGEIWW

SEQ ID NO: 15829 - protein, 6 aa, synthetic construct
PGEIWY

SEQ ID NO: 15830 - protein, 6 aa, synthetic construct
PGEIYD

SEQ ID NO: 15831 - protein, 6 aa, synthetic construct
PGEIYE

SEQ ID NO: 15832 - protein, 6 aa, synthetic construct
PGEIYF

SEQ ID NO: 15833 - protein, 6 aa, synthetic construct
PGEIYW

SEQ ID NO: 15834 - protein, 6 aa, synthetic construct
PGEIYY

SEQ ID NO: 15835 - protein, 6 aa, synthetic construct
PGEIVD

SEQ ID NO: 15836 - protein, 6 aa, synthetic construct
PGEIVE

SEQ ID NO: 15837 - protein, 6 aa, synthetic construct
PGEIVF

SEQ ID NO: 15838 - protein, 6 aa, synthetic construct
PGEIVW

SEQ ID NO: 15839 - protein, 6 aa, synthetic construct
PGEIVY

SEQ ID NO: 15840 - protein, 6 aa, synthetic construct
PGELAD

SEQ ID NO: 15841 - protein, 6 aa, synthetic construct
PGELAE

SEQ ID NO: 15842 - protein, 6 aa, synthetic construct
PGELAF

SEQ ID NO: 15843 - protein, 6 aa, synthetic construct
PGELAW

SEQ ID NO: 15844 - protein, 6 aa, synthetic construct
PGELAY

SEQ ID NO: 15845 - protein, 6 aa, synthetic construct
PGELRD

SEQ ID NO: 15846 - protein, 6 aa, synthetic construct
PGELRE

SEQ ID NO: 15847 - protein, 6 aa, synthetic construct
PGELRF

SEQ ID NO: 15848 - protein, 6 aa, synthetic construct
PGELRW

SEQ ID NO: 15849 - protein, 6 aa, synthetic construct
PGELRY

SEQ ID NO: 15850 - protein, 6 aa, synthetic construct
PGELND

SEQ ID NO: 15851 - protein, 6 aa, synthetic construct
PGELNE

SEQ ID NO: 15852 - protein, 6 aa, synthetic construct
PGELNF

SEQ ID NO: 15853 - protein, 6 aa, synthetic construct
PGELNW

SEQ ID NO: 15854 - protein, 6 aa, synthetic construct
PGELNY

SEQ ID NO: 15855 - protein, 6 aa, synthetic construct
PGELDD

SEQ ID NO: 15856 - protein, 6 aa, synthetic construct
PGELDE

SEQ ID NO: 15857 - protein, 6 aa, synthetic construct
PGELDF

SEQ ID NO: 15858 - protein, 6 aa, synthetic construct
PGELDW

SEQ ID NO: 15859 - protein, 6 aa, synthetic construct
PGELDY

SEQ ID NO: 15860 - protein, 6 aa, synthetic construct
PGELCD

SEQ ID NO: 15861 - protein, 6 aa, synthetic construct
PGELCE

SEQ ID NO: 15862 - protein, 6 aa, synthetic construct
PGELCF

SEQ ID NO: 15863 - protein, 6 aa, synthetic construct
PGELCW

SEQ ID NO: 15864 - protein, 6 aa, synthetic construct
PGELCY

SEQ ID NO: 15865 - protein, 6 aa, synthetic construct
PGELQD

SEQ ID NO: 15866 - protein, 6 aa, synthetic construct
PGELQE

SEQ ID NO: 15867 - protein, 6 aa, synthetic construct
PGELQF

SEQ ID NO: 15868 - protein, 6 aa, synthetic construct
PGELQW

SEQ ID NO: 15869 - protein, 6 aa, synthetic construct
PGELQY

SEQ ID NO: 15870 - protein, 6 aa, synthetic construct
PGELED

SEQ ID NO: 15871 - protein, 6 aa, synthetic construct
PGELEE

SEQ ID NO: 15872 - protein, 6 aa, synthetic construct
PGELEF

SEQ ID NO: 15873 - protein, 6 aa, synthetic construct
PGELEW

SEQ ID NO: 15874 - protein, 6 aa, synthetic construct
PGELEY

SEQ ID NO: 15875 - protein, 6 aa, synthetic construct
PGELGD

SEQ ID NO: 15876 - protein, 6 aa, synthetic construct
PGELGE

SEQ ID NO: 15877 - protein, 6 aa, synthetic construct
PGELGF

SEQ ID NO: 15878 - protein, 6 aa, synthetic construct
PGELGW

SEQ ID NO: 15879 - protein, 6 aa, synthetic construct
PGELGY

SEQ ID NO: 15880 - protein, 6 aa, synthetic construct
PGELHD

SEQ ID NO: 15881 - protein, 6 aa, synthetic construct
PGELHE

SEQ ID NO: 15882 - protein, 6 aa, synthetic construct
PGELHF

SEQ ID NO: 15883 - protein, 6 aa, synthetic construct
PGELHW

SEQ ID NO: 15884 - protein, 6 aa, synthetic construct
PGELHY

SEQ ID NO: 15885 - protein, 6 aa, synthetic construct
PGELID

SEQ ID NO: 15886 - protein, 6 aa, synthetic construct
PGELIE

SEQ ID NO: 15887 - protein, 6 aa, synthetic construct
PGELIF

SEQ ID NO: 15888 - protein, 6 aa, synthetic construct
PGELIW

SEQ ID NO: 15889 - protein, 6 aa, synthetic construct
PGELIY

SEQ ID NO: 15890 - protein, 6 aa, synthetic construct
PGELLD

SEQ ID NO: 15891 - protein, 6 aa, synthetic construct
PGELLE

SEQ ID NO: 15892 - protein, 6 aa, synthetic construct
PGELLF

SEQ ID NO: 15893 - protein, 6 aa, synthetic construct
PGELLW

SEQ ID NO: 15894 - protein, 6 aa, synthetic construct
PGELLY

SEQ ID NO: 15895 - protein, 6 aa, synthetic construct
PGELKD

SEQ ID NO: 15896 - protein, 6 aa, synthetic construct
PGELKE

SEQ ID NO: 15897 - protein, 6 aa, synthetic construct
PGELKF

SEQ ID NO: 15898 - protein, 6 aa, synthetic construct
PGELKW

SEQ ID NO: 15899 - protein, 6 aa, synthetic construct
PGELKY

SEQ ID NO: 15900 - protein, 6 aa, synthetic construct
PGELMD

SEQ ID NO: 15901 - protein, 6 aa, synthetic construct
PGELME

SEQ ID NO: 15902 - protein, 6 aa, synthetic construct
PGELMF

SEQ ID NO: 15903 - protein, 6 aa, synthetic construct
PGELMW

SEQ ID NO: 15904 - protein, 6 aa, synthetic construct
PGELMY

SEQ ID NO: 15905 - protein, 6 aa, synthetic construct
PGELFD

SEQ ID NO: 15906 - protein, 6 aa, synthetic construct
PGELFE

SEQ ID NO: 15907 - protein, 6 aa, synthetic construct
PGELFF

SEQ ID NO: 15908 - protein, 6 aa, synthetic construct
PGELFW

SEQ ID NO: 15909 - protein, 6 aa, synthetic construct
PGELFY

SEQ ID NO: 15910 - protein, 6 aa, synthetic construct
PGELPD

SEQ ID NO: 15911 - protein, 6 aa, synthetic construct
PGELPE

SEQ ID NO: 15912 - protein, 6 aa, synthetic construct
PGELPF

SEQ ID NO: 15913 - protein, 6 aa, synthetic construct
PGELPW

SEQ ID NO: 15914 - protein, 6 aa, synthetic construct
PGELPY

SEQ ID NO: 15915 - protein, 6 aa, synthetic construct
PGELSD

SEQ ID NO: 15916 - protein, 6 aa, synthetic construct
PGELSE

SEQ ID NO: 15917 - protein, 6 aa, synthetic construct
PGELSF

SEQ ID NO: 15918 - protein, 6 aa, synthetic construct
PGELSW

SEQ ID NO: 15919 - protein, 6 aa, synthetic construct
PGELSY

SEQ ID NO: 15920 - protein, 6 aa, synthetic construct
PGELTD

SEQ ID NO: 15921 - protein, 6 aa, synthetic construct
PGELTE

SEQ ID NO: 15922 - protein, 6 aa, synthetic construct
PGELTF

SEQ ID NO: 15923 - protein, 6 aa, synthetic construct
PGELTW

SEQ ID NO: 15924 - protein, 6 aa, synthetic construct
PGELTY

SEQ ID NO: 15925 - protein, 6 aa, synthetic construct
PGELWD

SEQ ID NO: 15926 - protein, 6 aa, synthetic construct
PGELWE

SEQ ID NO: 15927 - protein, 6 aa, synthetic construct
PGELWF

SEQ ID NO: 15928 - protein, 6 aa, synthetic construct
PGELWW

SEQ ID NO: 15929 - protein, 6 aa, synthetic construct
PGELWY

SEQ ID NO: 15930 - protein, 6 aa, synthetic construct
PGELYD

SEQ ID NO: 15931 - protein, 6 aa, synthetic construct
PGELYE

SEQ ID NO: 15932 - protein, 6 aa, synthetic construct
PGELYF

SEQ ID NO: 15933 - protein, 6 aa, synthetic construct
PGELYW

SEQ ID NO: 15934 - protein, 6 aa, synthetic construct
PGELYY

SEQ ID NO: 15935 - protein, 6 aa, synthetic construct
PGELVD

SEQ ID NO: 15936 - protein, 6 aa, synthetic construct
PGELVE

SEQ ID NO: 15937 - protein, 6 aa, synthetic construct
PGELVF

SEQ ID NO: 15938 - protein, 6 aa, synthetic construct
PGELVW

SEQ ID NO: 15939 - protein, 6 aa, synthetic construct
PGELVY

SEQ ID NO: 15940 - protein, 6 aa, synthetic construct
PGEKAD

SEQ ID NO: 15941 - protein, 6 aa, synthetic construct
PGEKAE

SEQ ID NO: 15942 - protein, 6 aa, synthetic construct
PGEKAF

SEQ ID NO: 15943 - protein, 6 aa, synthetic construct
PGEKAW

SEQ ID NO: 15944 - protein, 6 aa, synthetic construct
PGEKAY

SEQ ID NO: 15945 - protein, 6 aa, synthetic construct
PGEKRD

SEQ ID NO: 15946 - protein, 6 aa, synthetic construct
PGEKRE

SEQ ID NO: 15947 - protein, 6 aa, synthetic construct
PGEKRF

SEQ ID NO: 15948 - protein, 6 aa, synthetic construct
PGEKRW

SEQ ID NO: 15949 - protein, 6 aa, synthetic construct
PGEKRY

SEQ ID NO: 15950 - protein, 6 aa, synthetic construct
PGEKND

SEQ ID NO: 15951 - protein, 6 aa, synthetic construct
PGEKNE

SEQ ID NO: 15952 - protein, 6 aa, synthetic construct
PGEKNF

SEQ ID NO: 15953 - protein, 6 aa, synthetic construct
PGEKNW

SEQ ID NO: 15954 - protein, 6 aa, synthetic construct
PGEKNY

SEQ ID NO: 15955 - protein, 6 aa, synthetic construct
PGEKDD

SEQ ID NO: 15956 - protein, 6 aa, synthetic construct
PGEKDE

SEQ ID NO: 15957 - protein, 6 aa, synthetic construct
PGEKDF

SEQ ID NO: 15958 - protein, 6 aa, synthetic construct
PGEKDW

SEQ ID NO: 15959 - protein, 6 aa, synthetic construct
PGEKDY

SEQ ID NO: 15960 - protein, 6 aa, synthetic construct
PGEKCD

SEQ ID NO: 15961 - protein, 6 aa, synthetic construct
PGEKCE

SEQ ID NO: 15962 - protein, 6 aa, synthetic construct
PGEKCF

SEQ ID NO: 15963 - protein, 6 aa, synthetic construct
PGEKCW

SEQ ID NO: 15964 - protein, 6 aa, synthetic construct
PGEKCY

SEQ ID NO: 15965 - protein, 6 aa, synthetic construct
PGEKQD

SEQ ID NO: 15966 - protein, 6 aa, synthetic construct
PGEKQE

SEQ ID NO: 15967 - protein, 6 aa, synthetic construct
PGEKQF

SEQ ID NO: 15968 - protein, 6 aa, synthetic construct
PGEKQW

SEQ ID NO: 15969 - protein, 6 aa, synthetic construct
PGEKQY

SEQ ID NO: 15970 - protein, 6 aa, synthetic construct
PGEKED

SEQ ID NO: 15971 - protein, 6 aa, synthetic construct
PGEKEE

SEQ ID NO: 15972 - protein, 6 aa, synthetic construct
PGEKEF

SEQ ID NO: 15973 - protein, 6 aa, synthetic construct
PGEKEW

SEQ ID NO: 15974 - protein, 6 aa, synthetic construct
PGEKEY

SEQ ID NO: 15975 - protein, 6 aa, synthetic construct
PGEKGD

SEQ ID NO: 15976 - protein, 6 aa, synthetic construct
PGEKGE

SEQ ID NO: 15977 - protein, 6 aa, synthetic construct
PGEKGF

SEQ ID NO: 15978 - protein, 6 aa, synthetic construct
PGEKGW

SEQ ID NO: 15979 - protein, 6 aa, synthetic construct
PGEKGY

SEQ ID NO: 15980 - protein, 6 aa, synthetic construct
PGEKHD

SEQ ID NO: 15981 - protein, 6 aa, synthetic construct
PGEKHE

SEQ ID NO: 15982 - protein, 6 aa, synthetic construct
PGEKHF

SEQ ID NO: 15983 - protein, 6 aa, synthetic construct
PGEKHW

SEQ ID NO: 15984 - protein, 6 aa, synthetic construct
PGEKHY

SEQ ID NO: 15985 - protein, 6 aa, synthetic construct
PGEKID

SEQ ID NO: 15986 - protein, 6 aa, synthetic construct
PGEKIE

SEQ ID NO: 15987 - protein, 6 aa, synthetic construct
PGEKIF

SEQ ID NO: 15988 - protein, 6 aa, synthetic construct
PGEKIW

SEQ ID NO: 15989 - protein, 6 aa, synthetic construct
PGEKIY

SEQ ID NO: 15990 - protein, 6 aa, synthetic construct
PGEKLD

SEQ ID NO: 15991 - protein, 6 aa, synthetic construct
PGEKLE

SEQ ID NO: 15992 - protein, 6 aa, synthetic construct
PGEKLF

SEQ ID NO: 15993 - protein, 6 aa, synthetic construct
PGEKLW

SEQ ID NO: 15994 - protein, 6 aa, synthetic construct
PGEKLY

SEQ ID NO: 15995 - protein, 6 aa, synthetic construct
PGEKKD

SEQ ID NO: 15996 - protein, 6 aa, synthetic construct
PGEKKE

SEQ ID NO: 15997 - protein, 6 aa, synthetic construct
PGEKKF

SEQ ID NO: 15998 - protein, 6 aa, synthetic construct
PGEKKW

SEQ ID NO: 15999 - protein, 6 aa, synthetic construct
PGEKKY

SEQ ID NO: 16000 - protein, 6 aa, synthetic construct
PGEKMD

SEQ ID NO: 16001 - protein, 6 aa, synthetic construct
PGEKME

SEQ ID NO: 16002 - protein, 6 aa, synthetic construct
PGEKMF

SEQ ID NO: 16003 - protein, 6 aa, synthetic construct
PGEKMW

SEQ ID NO: 16004 - protein, 6 aa, synthetic construct
PGEKMY

SEQ ID NO: 16005 - protein, 6 aa, synthetic construct
PGEKFD

SEQ ID NO: 16006 - protein, 6 aa, synthetic construct
PGEKFE

SEQ ID NO: 16007 - protein, 6 aa, synthetic construct
PGEKFF

SEQ ID NO: 16008 - protein, 6 aa, synthetic construct
PGEKFW

SEQ ID NO: 16009 - protein, 6 aa, synthetic construct
PGEKFY

SEQ ID NO: 16010 - protein, 6 aa, synthetic construct
PGEKPD

SEQ ID NO: 16011 - protein, 6 aa, synthetic construct
PGEKPE

SEQ ID NO: 16012 - protein, 6 aa, synthetic construct
PGEKPF

SEQ ID NO: 16013 - protein, 6 aa, synthetic construct
PGEKPW

SEQ ID NO: 16014 - protein, 6 aa, synthetic construct
PGEKPY

SEQ ID NO: 16015 - protein, 6 aa, synthetic construct
PGEKSD

SEQ ID NO: 16016 - protein, 6 aa, synthetic construct
PGEKSE

SEQ ID NO: 16017 - protein, 6 aa, synthetic construct
PGEKSF

SEQ ID NO: 16018 - protein, 6 aa, synthetic construct
PGEKSW

SEQ ID NO: 16019 - protein, 6 aa, synthetic construct
PGEKSY

SEQ ID NO: 16020 - protein, 6 aa, synthetic construct
PGEKTD

SEQ ID NO: 16021 - protein, 6 aa, synthetic construct
PGEKTE

SEQ ID NO: 16022 - protein, 6 aa, synthetic construct
PGEKTF

SEQ ID NO: 16023 - protein, 6 aa, synthetic construct
PGEKTW

SEQ ID NO: 16024 - protein, 6 aa, synthetic construct
PGEKTY

SEQ ID NO: 16025 - protein, 6 aa, synthetic construct
PGEKWD

SEQ ID NO: 16026 - protein, 6 aa, synthetic construct
PGEKWE

SEQ ID NO: 16027 - protein, 6 aa, synthetic construct
PGEKWF

SEQ ID NO: 16028 - protein, 6 aa, synthetic construct
PGEKWW

SEQ ID NO: 16029 - protein, 6 aa, synthetic construct
PGEKWY

SEQ ID NO: 16030 - protein, 6 aa, synthetic construct
PGEKYD

SEQ ID NO: 16031 - protein, 6 aa, synthetic construct
PGEKYE

SEQ ID NO: 16032 - protein, 6 aa, synthetic construct
PGEKYF

SEQ ID NO: 16033 - protein, 6 aa, synthetic construct
PGEKYW

SEQ ID NO: 16034 - protein, 6 aa, synthetic construct
PGEKYY

SEQ ID NO: 16035 - protein, 6 aa, synthetic construct
PGEKVD

SEQ ID NO: 16036 - protein, 6 aa, synthetic construct
PGEKVE

SEQ ID NO: 16037 - protein, 6 aa, synthetic construct
PGEKVF

SEQ ID NO: 16038 - protein, 6 aa, synthetic construct
PGEKVW

SEQ ID NO: 16039 - protein, 6 aa, synthetic construct
PGEKVY

SEQ ID NO: 16040 - protein, 6 aa, synthetic construct
PGEMAD

SEQ ID NO: 16041 - protein, 6 aa, synthetic construct
PGEMAE

SEQ ID NO: 16042 - protein, 6 aa, synthetic construct
PGEMAF

SEQ ID NO: 16043 - protein, 6 aa, synthetic construct
PGEMAW

SEQ ID NO: 16044 - protein, 6 aa, synthetic construct
PGEMAY

SEQ ID NO: 16045 - protein, 6 aa, synthetic construct
PGEMRD

SEQ ID NO: 16046 - protein, 6 aa, synthetic construct
PGEMRE

SEQ ID NO: 16047 - protein, 6 aa, synthetic construct
PGEMRF

SEQ ID NO: 16048 - protein, 6 aa, synthetic construct
PGEMRW

SEQ ID NO: 16049 - protein, 6 aa, synthetic construct
PGEMRY

SEQ ID NO: 16050 - protein, 6 aa, synthetic construct
PGEMND

SEQ ID NO: 16051 - protein, 6 aa, synthetic construct
PGEMNE

SEQ ID NO: 16052 - protein, 6 aa, synthetic construct
PGEMNF

SEQ ID NO: 16053 - protein, 6 aa, synthetic construct
PGEMNW

SEQ ID NO: 16054 - protein, 6 aa, synthetic construct
PGEMNY

SEQ ID NO: 16055 - protein, 6 aa, synthetic construct
PGEMDD

SEQ ID NO: 16056 - protein, 6 aa, synthetic construct
PGEMDE

SEQ ID NO: 16057 - protein, 6 aa, synthetic construct
PGEMDF

SEQ ID NO: 16058 - protein, 6 aa, synthetic construct
PGEMDW

SEQ ID NO: 16059 - protein, 6 aa, synthetic construct
PGEMDY

SEQ ID NO: 16060 - protein, 6 aa, synthetic construct
PGEMCD

SEQ ID NO: 16061 - protein, 6 aa, synthetic construct
PGEMCE

SEQ ID NO: 16062 - protein, 6 aa, synthetic construct
PGEMCF

SEQ ID NO: 16063 - protein, 6 aa, synthetic construct
PGEMCW

SEQ ID NO: 16064 - protein, 6 aa, synthetic construct
PGEMCY

SEQ ID NO: 16065 - protein, 6 aa, synthetic construct
PGEMQD

SEQ ID NO: 16066 - protein, 6 aa, synthetic construct
PGEMQE

SEQ ID NO: 16067 - protein, 6 aa, synthetic construct
PGEMQF

SEQ ID NO: 16068 - protein, 6 aa, synthetic construct
PGEMQW

SEQ ID NO: 16069 - protein, 6 aa, synthetic construct
PGEMQY

SEQ ID NO: 16070 - protein, 6 aa, synthetic construct
PGEMED

SEQ ID NO: 16071 - protein, 6 aa, synthetic construct
PGEMEE

SEQ ID NO: 16072 - protein, 6 aa, synthetic construct
PGEMEF

SEQ ID NO: 16073 - protein, 6 aa, synthetic construct
PGEMEW

SEQ ID NO: 16074 - protein, 6 aa, synthetic construct
PGEMEY

SEQ ID NO: 16075 - protein, 6 aa, synthetic construct
PGEMGD

SEQ ID NO: 16076 - protein, 6 aa, synthetic construct
PGEMGE

SEQ ID NO: 16077 - protein, 6 aa, synthetic construct
PGEMGF

SEQ ID NO: 16078 - protein, 6 aa, synthetic construct
PGEMGW

SEQ ID NO: 16079 - protein, 6 aa, synthetic construct
PGEMGY

SEQ ID NO: 16080 - protein, 6 aa, synthetic construct
PGEMHD

SEQ ID NO: 16081 - protein, 6 aa, synthetic construct
PGEMHE

SEQ ID NO: 16082 - protein, 6 aa, synthetic construct
PGEMHF

SEQ ID NO: 16083 - protein, 6 aa, synthetic construct
PGEMHW

SEQ ID NO: 16084 - protein, 6 aa, synthetic construct
PGEMHY

SEQ ID NO: 16085 - protein, 6 aa, synthetic construct
PGEMID

SEQ ID NO: 16086 - protein, 6 aa, synthetic construct
PGEMIE

SEQ ID NO: 16087 - protein, 6 aa, synthetic construct
PGEMIF

SEQ ID NO: 16088 - protein, 6 aa, synthetic construct
PGEMIW

SEQ ID NO: 16089 - protein, 6 aa, synthetic construct
PGEMIY

SEQ ID NO: 16090 - protein, 6 aa, synthetic construct
PGEMLD

SEQ ID NO: 16091 - protein, 6 aa, synthetic construct
PGEMLE

SEQ ID NO: 16092 - protein, 6 aa, synthetic construct
PGEMLF

SEQ ID NO: 16093 - protein, 6 aa, synthetic construct
PGEMLW

SEQ ID NO: 16094 - protein, 6 aa, synthetic construct
PGEMLY

SEQ ID NO: 16095 - protein, 6 aa, synthetic construct
PGEMKD

SEQ ID NO: 16096 - protein, 6 aa, synthetic construct
PGEMKE

SEQ ID NO: 16097 - protein, 6 aa, synthetic construct
PGEMKF

SEQ ID NO: 16098 - protein, 6 aa, synthetic construct
PGEMKW

SEQ ID NO: 16099 - protein, 6 aa, synthetic construct
PGEMKY

SEQ ID NO: 16100 - protein, 6 aa, synthetic construct
PGEMMD

SEQ ID NO: 16101 - protein, 6 aa, synthetic construct
PGEMME

SEQ ID NO: 16102 - protein, 6 aa, synthetic construct
PGEMMF

SEQ ID NO: 16103 - protein, 6 aa, synthetic construct
PGEMMW

SEQ ID NO: 16104 - protein, 6 aa, synthetic construct
PGEMMY

SEQ ID NO: 16105 - protein, 6 aa, synthetic construct
PGEMFD

SEQ ID NO: 16106 - protein, 6 aa, synthetic construct
PGEMFE

SEQ ID NO: 16107 - protein, 6 aa, synthetic construct
PGEMFF

SEQ ID NO: 16108 - protein, 6 aa, synthetic construct
PGEMFW

SEQ ID NO: 16109 - protein, 6 aa, synthetic construct
PGEMFY

SEQ ID NO: 16110 - protein, 6 aa, synthetic construct
PGEMPD

SEQ ID NO: 16111 - protein, 6 aa, synthetic construct
PGEMPE

SEQ ID NO: 16112 - protein, 6 aa, synthetic construct
PGEMPF

SEQ ID NO: 16113 - protein, 6 aa, synthetic construct
PGEMPW

SEQ ID NO: 16114 - protein, 6 aa, synthetic construct
PGEMPY

SEQ ID NO: 16115 - protein, 6 aa, synthetic construct
PGEMSD

SEQ ID NO: 16116 - protein, 6 aa, synthetic construct
PGEMSE

SEQ ID NO: 16117 - protein, 6 aa, synthetic construct
PGEMSF

SEQ ID NO: 16118 - protein, 6 aa, synthetic construct
PGEMSW

SEQ ID NO: 16119 - protein, 6 aa, synthetic construct
PGEMSY

SEQ ID NO: 16120 - protein, 6 aa, synthetic construct
PGEMTD

SEQ ID NO: 16121 - protein, 6 aa, synthetic construct
PGEMTE

SEQ ID NO: 16122 - protein, 6 aa, synthetic construct
PGEMTF

SEQ ID NO: 16123 - protein, 6 aa, synthetic construct
PGEMTW

SEQ ID NO: 16124 - protein, 6 aa, synthetic construct
PGEMTY

SEQ ID NO: 16125 - protein, 6 aa, synthetic construct
PGEMWD

SEQ ID NO: 16126 - protein, 6 aa, synthetic construct
PGEMWE

SEQ ID NO: 16127 - protein, 6 aa, synthetic construct
PGEMWF

SEQ ID NO: 16128 - protein, 6 aa, synthetic construct
PGEMWW

SEQ ID NO: 16129 - protein, 6 aa, synthetic construct
PGEMWY

SEQ ID NO: 16130 - protein, 6 aa, synthetic construct
PGEMYD

SEQ ID NO: 16131 - protein, 6 aa, synthetic construct
PGEMYE

SEQ ID NO: 16132 - protein, 6 aa, synthetic construct
PGEMYF

SEQ ID NO: 16133 - protein, 6 aa, synthetic construct
PGEMYW

SEQ ID NO: 16134 - protein, 6 aa, synthetic construct
PGEMYY

SEQ ID NO: 16135 - protein, 6 aa, synthetic construct
PGEMVD

SEQ ID NO: 16136 - protein, 6 aa, synthetic construct
PGEMVE

SEQ ID NO: 16137 - protein, 6 aa, synthetic construct
PGEMVF

SEQ ID NO: 16138 - protein, 6 aa, synthetic construct
PGEMVW

SEQ ID NO: 16139 - protein, 6 aa, synthetic construct
PGEMVY

SEQ ID NO: 16140 - protein, 6 aa, synthetic construct
PGEFAD

SEQ ID NO: 16141 - protein, 6 aa, synthetic construct
PGEFAE

SEQ ID NO: 16142 - protein, 6 aa, synthetic construct
PGEFAF

SEQ ID NO: 16143 - protein, 6 aa, synthetic construct
PGEFAW

SEQ ID NO: 16144 - protein, 6 aa, synthetic construct
PGEFAY

SEQ ID NO: 16145 - protein, 6 aa, synthetic construct
PGEFRD

SEQ ID NO: 16146 - protein, 6 aa, synthetic construct
PGEFRE

SEQ ID NO: 16147 - protein, 6 aa, synthetic construct
PGEFRF

SEQ ID NO: 16148 - protein, 6 aa, synthetic construct
PGEFRW

SEQ ID NO: 16149 - protein, 6 aa, synthetic construct
PGEFRY

SEQ ID NO: 16150 - protein, 6 aa, synthetic construct
PGEFND

SEQ ID NO: 16151 - protein, 6 aa, synthetic construct
PGEFNE

SEQ ID NO: 16152 - protein, 6 aa, synthetic construct
PGEFNF

SEQ ID NO: 16153 - protein, 6 aa, synthetic construct
PGEFNW

SEQ ID NO: 16154 - protein, 6 aa, synthetic construct
PGEFNY

SEQ ID NO: 16155 - protein, 6 aa, synthetic construct
PGEFDD

SEQ ID NO: 16156 - protein, 6 aa, synthetic construct
PGEFDE

SEQ ID NO: 16157 - protein, 6 aa, synthetic construct
PGEFDF

SEQ ID NO: 16158 - protein, 6 aa, synthetic construct
PGEFDW

SEQ ID NO: 16159 - protein, 6 aa, synthetic construct
PGEFDY

SEQ ID NO: 16160 - protein, 6 aa, synthetic construct
PGEFCD

SEQ ID NO: 16161 - protein, 6 aa, synthetic construct
PGEFCE

SEQ ID NO: 16162 - protein, 6 aa, synthetic construct
PGEFCF

SEQ ID NO: 16163 - protein, 6 aa, synthetic construct
PGEFCW

SEQ ID NO: 16164 - protein, 6 aa, synthetic construct
PGEFCY

SEQ ID NO: 16165 - protein, 6 aa, synthetic construct
PGEFQD

SEQ ID NO: 16166 - protein, 6 aa, synthetic construct
PGEFQE

SEQ ID NO: 16167 - protein, 6 aa, synthetic construct
PGEFQF

SEQ ID NO: 16168 - protein, 6 aa, synthetic construct
PGEFQW

SEQ ID NO: 16169 - protein, 6 aa, synthetic construct
PGEFQY

SEQ ID NO: 16170 - protein, 6 aa, synthetic construct
PGEFED

SEQ ID NO: 16171 - protein, 6 aa, synthetic construct
PGEFEE

SEQ ID NO: 16172 - protein, 6 aa, synthetic construct
PGEFEF

SEQ ID NO: 16173 - protein, 6 aa, synthetic construct
PGEFEW

SEQ ID NO: 16174 - protein, 6 aa, synthetic construct
PGEFEY

SEQ ID NO: 16175 - protein, 6 aa, synthetic construct
PGEFGD

SEQ ID NO: 16176 - protein, 6 aa, synthetic construct
PGEFGE

SEQ ID NO: 16177 - protein, 6 aa, synthetic construct
PGEFGF

SEQ ID NO: 16178 - protein, 6 aa, synthetic construct
PGEFGW

SEQ ID NO: 16179 - protein, 6 aa, synthetic construct
PGEFGY

SEQ ID NO: 16180 - protein, 6 aa, synthetic construct
PGEFHD

SEQ ID NO: 16181 - protein, 6 aa, synthetic construct
PGEFHE

SEQ ID NO: 16182 - protein, 6 aa, synthetic construct
PGEFHF

SEQ ID NO: 16183 - protein, 6 aa, synthetic construct
PGEFHW

SEQ ID NO: 16184 - protein, 6 aa, synthetic construct
PGEFHY

SEQ ID NO: 16185 - protein, 6 aa, synthetic construct
PGEFID

SEQ ID NO: 16186 - protein, 6 aa, synthetic construct
PGEFIE

SEQ ID NO: 16187 - protein, 6 aa, synthetic construct
PGEFIF

SEQ ID NO: 16188 - protein, 6 aa, synthetic construct
PGEFIW

SEQ ID NO: 16189 - protein, 6 aa, synthetic construct
PGEFIY

SEQ ID NO: 16190 - protein, 6 aa, synthetic construct
PGEFLD

SEQ ID NO: 16191 - protein, 6 aa, synthetic construct
PGEFLE

SEQ ID NO: 16192 - protein, 6 aa, synthetic construct
PGEFLF

SEQ ID NO: 16193 - protein, 6 aa, synthetic construct
PGEFLW

SEQ ID NO: 16194 - protein, 6 aa, synthetic construct
PGEFLY

SEQ ID NO: 16195 - protein, 6 aa, synthetic construct
PGEFKD

SEQ ID NO: 16196 - protein, 6 aa, synthetic construct
PGEFKE

SEQ ID NO: 16197 - protein, 6 aa, synthetic construct
PGEFKF

SEQ ID NO: 16198 - protein, 6 aa, synthetic construct
PGEFKW

SEQ ID NO: 16199 - protein, 6 aa, synthetic construct
PGEFKY

SEQ ID NO: 16200 - protein, 6 aa, synthetic construct
PGEFMD

SEQ ID NO: 16201 - protein, 6 aa, synthetic construct
PGEFME

SEQ ID NO: 16202 - protein, 6 aa, synthetic construct
PGEFMF

SEQ ID NO: 16203 - protein, 6 aa, synthetic construct
PGEFMW

SEQ ID NO: 16204 - protein, 6 aa, synthetic construct
PGEFMY

SEQ ID NO: 16205 - protein, 6 aa, synthetic construct
PGEFFD

SEQ ID NO: 16206 - protein, 6 aa, synthetic construct
PGEFFE

SEQ ID NO: 16207 - protein, 6 aa, synthetic construct
PGEFFF

SEQ ID NO: 16208 - protein, 6 aa, synthetic construct
PGEFFW

SEQ ID NO: 16209 - protein, 6 aa, synthetic construct
PGEFFY

SEQ ID NO: 16210 - protein, 6 aa, synthetic construct
PGEFPD

SEQ ID NO: 16211 - protein, 6 aa, synthetic construct
PGEFPE

SEQ ID NO: 16212 - protein, 6 aa, synthetic construct
PGEFPF

SEQ ID NO: 16213 - protein, 6 aa, synthetic construct
PGEFPW

SEQ ID NO: 16214 - protein, 6 aa, synthetic construct
PGEFPY

SEQ ID NO: 16215 - protein, 6 aa, synthetic construct
PGEFSD

SEQ ID NO: 16216 - protein, 6 aa, synthetic construct
PGEFSE

SEQ ID NO: 16217 - protein, 6 aa, synthetic construct
PGEFSF

SEQ ID NO: 16218 - protein, 6 aa, synthetic construct
PGEFSW

SEQ ID NO: 16219 - protein, 6 aa, synthetic construct
PGEFSY

SEQ ID NO: 16220 - protein, 6 aa, synthetic construct
PGEFTD

SEQ ID NO: 16221 - protein, 6 aa, synthetic construct
PGEFTE

SEQ ID NO: 16222 - protein, 6 aa, synthetic construct
PGEFTF

SEQ ID NO: 16223 - protein, 6 aa, synthetic construct
PGEFTW

SEQ ID NO: 16224 - protein, 6 aa, synthetic construct
PGEFTY

SEQ ID NO: 16225 - protein, 6 aa, synthetic construct
PGEFWD

SEQ ID NO: 16226 - protein, 6 aa, synthetic construct
PGEFWE

SEQ ID NO: 16227 - protein, 6 aa, synthetic construct
PGEFWF

SEQ ID NO: 16228 - protein, 6 aa, synthetic construct
PGEFWW

SEQ ID NO: 16229 - protein, 6 aa, synthetic construct
PGEFWY

SEQ ID NO: 16230 - protein, 6 aa, synthetic construct
PGEFYD

SEQ ID NO: 16231 - protein, 6 aa, synthetic construct
PGEFYE

SEQ ID NO: 16232 - protein, 6 aa, synthetic construct
PGEFYF

SEQ ID NO: 16233 - protein, 6 aa, synthetic construct
PGEFYW

SEQ ID NO: 16234 - protein, 6 aa, synthetic construct
PGEFYY

SEQ ID NO: 16235 - protein, 6 aa, synthetic construct
PGEFVD

SEQ ID NO: 16236 - protein, 6 aa, synthetic construct
PGEFVE

SEQ ID NO: 16237 - protein, 6 aa, synthetic construct
PGEFVF

SEQ ID NO: 16238 - protein, 6 aa, synthetic construct
PGEFVW

SEQ ID NO: 16239 - protein, 6 aa, synthetic construct
PGEFVY

SEQ ID NO: 16240 - protein, 6 aa, synthetic construct
PGEPAD

SEQ ID NO: 16241 - protein, 6 aa, synthetic construct
PGEPAE

SEQ ID NO: 16242 - protein, 6 aa, synthetic construct
PGEPAF

SEQ ID NO: 16243 - protein, 6 aa, synthetic construct
PGEPAW

SEQ ID NO: 16244 - protein, 6 aa, synthetic construct
PGEPAY

SEQ ID NO: 16245 - protein, 6 aa, synthetic construct
PGEPRD

SEQ ID NO: 16246 - protein, 6 aa, synthetic construct
PGEPRE

SEQ ID NO: 16247 - protein, 6 aa, synthetic construct
PGEPRF

SEQ ID NO: 16248 - protein, 6 aa, synthetic construct
PGEPRW

SEQ ID NO: 16249 - protein, 6 aa, synthetic construct
PGEPRY

SEQ ID NO: 16250 - protein, 6 aa, synthetic construct
PGEPND

SEQ ID NO: 16251 - protein, 6 aa, synthetic construct
PGEPNE

SEQ ID NO: 16252 - protein, 6 aa, synthetic construct
PGEPNF

SEQ ID NO: 16253 - protein, 6 aa, synthetic construct
PGEPNW

SEQ ID NO: 16254 - protein, 6 aa, synthetic construct
PGEPNY

SEQ ID NO: 16255 - protein, 6 aa, synthetic construct
PGEPDD

SEQ ID NO: 16256 - protein, 6 aa, synthetic construct
PGEPDE

SEQ ID NO: 16257 - protein, 6 aa, synthetic construct
PGEPDF

SEQ ID NO: 16258 - protein, 6 aa, synthetic construct
PGEPDW

SEQ ID NO: 16259 - protein, 6 aa, synthetic construct
PGEPDY

SEQ ID NO: 16260 - protein, 6 aa, synthetic construct
PGEPCD

SEQ ID NO: 16261 - protein, 6 aa, synthetic construct
PGEPCE

SEQ ID NO: 16262 - protein, 6 aa, synthetic construct
PGEPCF

SEQ ID NO: 16263 - protein, 6 aa, synthetic construct
PGEPCW

SEQ ID NO: 16264 - protein, 6 aa, synthetic construct
PGEPCY

SEQ ID NO: 16265 - protein, 6 aa, synthetic construct
PGEPQD

SEQ ID NO: 16266 - protein, 6 aa, synthetic construct
PGEPQE

SEQ ID NO: 16267 - protein, 6 aa, synthetic construct
PGEPQF

SEQ ID NO: 16268 - protein, 6 aa, synthetic construct
PGEPQW

SEQ ID NO: 16269 - protein, 6 aa, synthetic construct
PGEPQY

SEQ ID NO: 16270 - protein, 6 aa, synthetic construct
PGEPED

SEQ ID NO: 16271 - protein, 6 aa, synthetic construct
PGEPEE

SEQ ID NO: 16272 - protein, 6 aa, synthetic construct
PGEPEF

SEQ ID NO: 16273 - protein, 6 aa, synthetic construct
PGEPEW

SEQ ID NO: 16274 - protein, 6 aa, synthetic construct
PGEPEY

SEQ ID NO: 16275 - protein, 6 aa, synthetic construct
PGEPGD

SEQ ID NO: 16276 - protein, 6 aa, synthetic construct
PGEPGE

SEQ ID NO: 16277 - protein, 6 aa, synthetic construct
PGEPGF

SEQ ID NO: 16278 - protein, 6 aa, synthetic construct
PGEPGW

SEQ ID NO: 16279 - protein, 6 aa, synthetic construct
PGEPGY

SEQ ID NO: 16280 - protein, 6 aa, synthetic construct
PGEPHD

SEQ ID NO: 16281 - protein, 6 aa, synthetic construct
PGEPHE

SEQ ID NO: 16282 - protein, 6 aa, synthetic construct
PGEPHF

SEQ ID NO: 16283 - protein, 6 aa, synthetic construct
PGEPHW

SEQ ID NO: 16284 - protein, 6 aa, synthetic construct
PGEPHY

SEQ ID NO: 16285 - protein, 6 aa, synthetic construct
PGEPID

SEQ ID NO: 16286 - protein, 6 aa, synthetic construct
PGEPIE

SEQ ID NO: 16287 - protein, 6 aa, synthetic construct
PGEPIF

SEQ ID NO: 16288 - protein, 6 aa, synthetic construct
PGEPIW

SEQ ID NO: 16289 - protein, 6 aa, synthetic construct
PGEPIY

SEQ ID NO: 16290 - protein, 6 aa, synthetic construct
PGEPLD

SEQ ID NO: 16291 - protein, 6 aa, synthetic construct
PGEPLE

SEQ ID NO: 16292 - protein, 6 aa, synthetic construct
PGEPLF

SEQ ID NO: 16293 - protein, 6 aa, synthetic construct
PGEPLW

SEQ ID NO: 16294 - protein, 6 aa, synthetic construct
PGEPLY

SEQ ID NO: 16295 - protein, 6 aa, synthetic construct
PGEPKD

SEQ ID NO: 16296 - protein, 6 aa, synthetic construct
PGEPKE

SEQ ID NO: 16297 - protein, 6 aa, synthetic construct
PGEPKF

SEQ ID NO: 16298 - protein, 6 aa, synthetic construct
PGEPKW

SEQ ID NO: 16299 - protein, 6 aa, synthetic construct
PGEPKY

SEQ ID NO: 16300 - protein, 6 aa, synthetic construct
PGEPMD

SEQ ID NO: 16301 - protein, 6 aa, synthetic construct
PGEPME

SEQ ID NO: 16302 - protein, 6 aa, synthetic construct
PGEPMF

SEQ ID NO: 16303 - protein, 6 aa, synthetic construct
PGEPMW

SEQ ID NO: 16304 - protein, 6 aa, synthetic construct
PGEPMY

SEQ ID NO: 16305 - protein, 6 aa, synthetic construct
PGEPFD

SEQ ID NO: 16306 - protein, 6 aa, synthetic construct
PGEPFE

SEQ ID NO: 16307 - protein, 6 aa, synthetic construct
PGEPFF

SEQ ID NO: 16308 - protein, 6 aa, synthetic construct
PGEPFW

SEQ ID NO: 16309 - protein, 6 aa, synthetic construct
PGEPFY

SEQ ID NO: 16310 - protein, 6 aa, synthetic construct
PGEPPD

SEQ ID NO: 16311 - protein, 6 aa, synthetic construct
PGEPPE

SEQ ID NO: 16312 - protein, 6 aa, synthetic construct
PGEPPF

SEQ ID NO: 16313 - protein, 6 aa, synthetic construct
PGEPPW

SEQ ID NO: 16314 - protein, 6 aa, synthetic construct
PGEPPY

SEQ ID NO: 16315 - protein, 6 aa, synthetic construct
PGEPSD

SEQ ID NO: 16316 - protein, 6 aa, synthetic construct
PGEPSE

SEQ ID NO: 16317 - protein, 6 aa, synthetic construct
PGEPSF

SEQ ID NO: 16318 - protein, 6 aa, synthetic construct
PGEPSW

SEQ ID NO: 16319 - protein, 6 aa, synthetic construct
PGEPSY

SEQ ID NO: 16320 - protein, 6 aa, synthetic construct
PGEPTD

SEQ ID NO: 16321 - protein, 6 aa, synthetic construct
PGEPTE

SEQ ID NO: 16322 - protein, 6 aa, synthetic construct
PGEPTF

SEQ ID NO: 16323 - protein, 6 aa, synthetic construct
PGEPTW

SEQ ID NO: 16324 - protein, 6 aa, synthetic construct
PGEPTY

SEQ ID NO: 16325 - protein, 6 aa, synthetic construct
PGEPWD

SEQ ID NO: 16326 - protein, 6 aa, synthetic construct
PGEPWE

SEQ ID NO: 16327 - protein, 6 aa, synthetic construct
PGEPWF

SEQ ID NO: 16328 - protein, 6 aa, synthetic construct
PGEPWW

SEQ ID NO: 16329 - protein, 6 aa, synthetic construct
PGEPWY

SEQ ID NO: 16330 - protein, 6 aa, synthetic construct
PGEPYD

SEQ ID NO: 16331 - protein, 6 aa, synthetic construct
PGEPYE

SEQ ID NO: 16332 - protein, 6 aa, synthetic construct
PGEPYF

SEQ ID NO: 16333 - protein, 6 aa, synthetic construct
PGEPYW

SEQ ID NO: 16334 - protein, 6 aa, synthetic construct
PGEPYY

SEQ ID NO: 16335 - protein, 6 aa, synthetic construct
PGEPVD

SEQ ID NO: 16336 - protein, 6 aa, synthetic construct
PGEPVE

SEQ ID NO: 16337 - protein, 6 aa, synthetic construct
PGEPVF

SEQ ID NO: 16338 - protein, 6 aa, synthetic construct
PGEPVW

SEQ ID NO: 16339 - protein, 6 aa, synthetic construct
PGEPVY

SEQ ID NO: 16340 - protein, 6 aa, synthetic construct
PGESAD

SEQ ID NO: 16341 - protein, 6 aa, synthetic construct
PGESAE

SEQ ID NO: 16342 - protein, 6 aa, synthetic construct
PGESAF

SEQ ID NO: 16343 - protein, 6 aa, synthetic construct
PGESAW

SEQ ID NO: 16344 - protein, 6 aa, synthetic construct
PGESAY

SEQ ID NO: 16345 - protein, 6 aa, synthetic construct
PGESRD

SEQ ID NO: 16346 - protein, 6 aa, synthetic construct
PGESRE

SEQ ID NO: 16347 - protein, 6 aa, synthetic construct
PGESRF

SEQ ID NO: 16348 - protein, 6 aa, synthetic construct
PGESRW

SEQ ID NO: 16349 - protein, 6 aa, synthetic construct
PGESRY

SEQ ID NO: 16350 - protein, 6 aa, synthetic construct
PGESND

SEQ ID NO: 16351 - protein, 6 aa, synthetic construct
PGESNE

SEQ ID NO: 16352 - protein, 6 aa, synthetic construct
PGESNF

SEQ ID NO: 16353 - protein, 6 aa, synthetic construct
PGESNW

SEQ ID NO: 16354 - protein, 6 aa, synthetic construct
PGESNY

SEQ ID NO: 16355 - protein, 6 aa, synthetic construct
PGESDD

SEQ ID NO: 16356 - protein, 6 aa, synthetic construct
PGESDE

SEQ ID NO: 16357 - protein, 6 aa, synthetic construct
PGESDF

SEQ ID NO: 16358 - protein, 6 aa, synthetic construct
PGESDW

SEQ ID NO: 16359 - protein, 6 aa, synthetic construct
PGESDY

SEQ ID NO: 16360 - protein, 6 aa, synthetic construct
PGESCD

SEQ ID NO: 16361 - protein, 6 aa, synthetic construct
PGESCE

SEQ ID NO: 16362 - protein, 6 aa, synthetic construct
PGESCF

SEQ ID NO: 16363 - protein, 6 aa, synthetic construct
PGESCW

SEQ ID NO: 16364 - protein, 6 aa, synthetic construct
PGESCY

SEQ ID NO: 16365 - protein, 6 aa, synthetic construct
PGESQD

SEQ ID NO: 16366 - protein, 6 aa, synthetic construct
PGESQE

SEQ ID NO: 16367 - protein, 6 aa, synthetic construct
PGESQF

SEQ ID NO: 16368 - protein, 6 aa, synthetic construct
PGESQW

SEQ ID NO: 16369 - protein, 6 aa, synthetic construct
PGESQY

SEQ ID NO: 16370 - protein, 6 aa, synthetic construct
PGESED

SEQ ID NO: 16371 - protein, 6 aa, synthetic construct
PGESEE

SEQ ID NO: 16372 - protein, 6 aa, synthetic construct
PGESEF

SEQ ID NO: 16373 - protein, 6 aa, synthetic construct
PGESEW

SEQ ID NO: 16374 - protein, 6 aa, synthetic construct
PGESEY

SEQ ID NO: 16375 - protein, 6 aa, synthetic construct
PGESGD

SEQ ID NO: 16376 - protein, 6 aa, synthetic construct
PGESGE

SEQ ID NO: 16377 - protein, 6 aa, synthetic construct
PGESGF

SEQ ID NO: 16378 - protein, 6 aa, synthetic construct
PGESGW

SEQ ID NO: 16379 - protein, 6 aa, synthetic construct
PGESGY

SEQ ID NO: 16380 - protein, 6 aa, synthetic construct
PGESHD

SEQ ID NO: 16381 - protein, 6 aa, synthetic construct
PGESHE

SEQ ID NO: 16382 - protein, 6 aa, synthetic construct
PGESHF

SEQ ID NO: 16383 - protein, 6 aa, synthetic construct
PGESHW

SEQ ID NO: 16384 - protein, 6 aa, synthetic construct
PGESHY

SEQ ID NO: 16385 - protein, 6 aa, synthetic construct
PGESID

SEQ ID NO: 16386 - protein, 6 aa, synthetic construct
PGESIE

SEQ ID NO: 16387 - protein, 6 aa, synthetic construct
PGESIF

SEQ ID NO: 16388 - protein, 6 aa, synthetic construct
PGESIW

SEQ ID NO: 16389 - protein, 6 aa, synthetic construct
PGESIY

SEQ ID NO: 16390 - protein, 6 aa, synthetic construct
PGESLD

SEQ ID NO: 16391 - protein, 6 aa, synthetic construct
PGESLE

SEQ ID NO: 16392 - protein, 6 aa, synthetic construct
PGESLF

SEQ ID NO: 16393 - protein, 6 aa, synthetic construct
PGESLW

SEQ ID NO: 16394 - protein, 6 aa, synthetic construct
PGESLY

SEQ ID NO: 16395 - protein, 6 aa, synthetic construct
PGESKD

SEQ ID NO: 16396 - protein, 6 aa, synthetic construct
PGESKE

SEQ ID NO: 16397 - protein, 6 aa, synthetic construct
PGESKF

SEQ ID NO: 16398 - protein, 6 aa, synthetic construct
PGESKW

SEQ ID NO: 16399 - protein, 6 aa, synthetic construct
PGESKY

SEQ ID NO: 16400 - protein, 6 aa, synthetic construct
PGESMD

SEQ ID NO: 16401 - protein, 6 aa, synthetic construct
PGESME

SEQ ID NO: 16402 - protein, 6 aa, synthetic construct
PGESMF

SEQ ID NO: 16403 - protein, 6 aa, synthetic construct
PGESMW

SEQ ID NO: 16404 - protein, 6 aa, synthetic construct
PGESMY

SEQ ID NO: 16405 - protein, 6 aa, synthetic construct
PGESFD

SEQ ID NO: 16406 - protein, 6 aa, synthetic construct
PGESFE

SEQ ID NO: 16407 - protein, 6 aa, synthetic construct
PGESFF

SEQ ID NO: 16408 - protein, 6 aa, synthetic construct
PGESFW

SEQ ID NO: 16409 - protein, 6 aa, synthetic construct
PGESFY

SEQ ID NO: 16410 - protein, 6 aa, synthetic construct
PGESPD

SEQ ID NO: 16411 - protein, 6 aa, synthetic construct
PGESPE

SEQ ID NO: 16412 - protein, 6 aa, synthetic construct
PGESPF

SEQ ID NO: 16413 - protein, 6 aa, synthetic construct
PGESPW

SEQ ID NO: 16414 - protein, 6 aa, synthetic construct
PGESPY

SEQ ID NO: 16415 - protein, 6 aa, synthetic construct
PGESSD

SEQ ID NO: 16416 - protein, 6 aa, synthetic construct
PGESSE

SEQ ID NO: 16417 - protein, 6 aa, synthetic construct
PGESSF

SEQ ID NO: 16418 - protein, 6 aa, synthetic construct
PGESSW

SEQ ID NO: 16419 - protein, 6 aa, synthetic construct
PGESSY

SEQ ID NO: 16420 - protein, 6 aa, synthetic construct
PGESTD

SEQ ID NO: 16421 - protein, 6 aa, synthetic construct
PGESTE

SEQ ID NO: 16422 - protein, 6 aa, synthetic construct
PGESTF

SEQ ID NO: 16423 - protein, 6 aa, synthetic construct
PGESTW

SEQ ID NO: 16424 - protein, 6 aa, synthetic construct
PGESTY

SEQ ID NO: 16425 - protein, 6 aa, synthetic construct
PGESWD

SEQ ID NO: 16426 - protein, 6 aa, synthetic construct
PGESWE

SEQ ID NO: 16427 - protein, 6 aa, synthetic construct
PGESWF

SEQ ID NO: 16428 - protein, 6 aa, synthetic construct
PGESWW

SEQ ID NO: 16429 - protein, 6 aa, synthetic construct
PGESWY

SEQ ID NO: 16430 - protein, 6 aa, synthetic construct
PGESYD

SEQ ID NO: 16431 - protein, 6 aa, synthetic construct
PGESYE

SEQ ID NO: 16432 - protein, 6 aa, synthetic construct
PGESYF

SEQ ID NO: 16433 - protein, 6 aa, synthetic construct
PGESYW

SEQ ID NO: 16434 - protein, 6 aa, synthetic construct
PGESYY

SEQ ID NO: 16435 - protein, 6 aa, synthetic construct
PGESVD

SEQ ID NO: 16436 - protein, 6 aa, synthetic construct
PGESVE

SEQ ID NO: 16437 - protein, 6 aa, synthetic construct
PGESVF

SEQ ID NO: 16438 - protein, 6 aa, synthetic construct
PGESVW

SEQ ID NO: 16439 - protein, 6 aa, synthetic construct
PGESVY

SEQ ID NO: 16440 - protein, 6 aa, synthetic construct
PGETAD

SEQ ID NO: 16441 - protein, 6 aa, synthetic construct
PGETAE

SEQ ID NO: 16442 - protein, 6 aa, synthetic construct
PGETAF

SEQ ID NO: 16443 - protein, 6 aa, synthetic construct
PGETAW

SEQ ID NO: 16444 - protein, 6 aa, synthetic construct
PGETAY

SEQ ID NO: 16445 - protein, 6 aa, synthetic construct
PGETRD

SEQ ID NO: 16446 - protein, 6 aa, synthetic construct
PGETRE

SEQ ID NO: 16447 - protein, 6 aa, synthetic construct
PGETRF

SEQ ID NO: 16448 - protein, 6 aa, synthetic construct
PGETRW

SEQ ID NO: 16449 - protein, 6 aa, synthetic construct
PGETRY

SEQ ID NO: 16450 - protein, 6 aa, synthetic construct
PGETND

SEQ ID NO: 16451 - protein, 6 aa, synthetic construct
PGETNE

SEQ ID NO: 16452 - protein, 6 aa, synthetic construct
PGETNF

SEQ ID NO: 16453 - protein, 6 aa, synthetic construct
PGETNW

SEQ ID NO: 16454 - protein, 6 aa, synthetic construct
PGETNY

SEQ ID NO: 16455 - protein, 6 aa, synthetic construct
PGETDD

SEQ ID NO: 16456 - protein, 6 aa, synthetic construct
PGETDE

SEQ ID NO: 16457 - protein, 6 aa, synthetic construct
PGETDF

SEQ ID NO: 16458 - protein, 6 aa, synthetic construct
PGETDW

SEQ ID NO: 16459 - protein, 6 aa, synthetic construct
PGETDY

SEQ ID NO: 16460 - protein, 6 aa, synthetic construct
PGETCD

SEQ ID NO: 16461 - protein, 6 aa, synthetic construct
PGETCE

SEQ ID NO: 16462 - protein, 6 aa, synthetic construct
PGETCF

SEQ ID NO: 16463 - protein, 6 aa, synthetic construct
PGETCW

SEQ ID NO: 16464 - protein, 6 aa, synthetic construct
PGETCY

SEQ ID NO: 16465 - protein, 6 aa, synthetic construct
PGETQD

SEQ ID NO: 16466 - protein, 6 aa, synthetic construct
PGETQE

SEQ ID NO: 16467 - protein, 6 aa, synthetic construct
PGETQF

SEQ ID NO: 16468 - protein, 6 aa, synthetic construct
PGETQW

SEQ ID NO: 16469 - protein, 6 aa, synthetic construct
PGETQY

SEQ ID NO: 16470 - protein, 6 aa, synthetic construct
PGETED

SEQ ID NO: 16471 - protein, 6 aa, synthetic construct
PGETEE

SEQ ID NO: 16472 - protein, 6 aa, synthetic construct
PGETEF

SEQ ID NO: 16473 - protein, 6 aa, synthetic construct
PGETEW

SEQ ID NO: 16474 - protein, 6 aa, synthetic construct
PGETEY

SEQ ID NO: 16475 - protein, 6 aa, synthetic construct
PGETGD

SEQ ID NO: 16476 - protein, 6 aa, synthetic construct
PGETGE

SEQ ID NO: 16477 - protein, 6 aa, synthetic construct
PGETGF

SEQ ID NO: 16478 - protein, 6 aa, synthetic construct
PGETGW

SEQ ID NO: 16479 - protein, 6 aa, synthetic construct
PGETGY

SEQ ID NO: 16480 - protein, 6 aa, synthetic construct
PGETHD

SEQ ID NO: 16481 - protein, 6 aa, synthetic construct
PGETHE

SEQ ID NO: 16482 - protein, 6 aa, synthetic construct
PGETHF

SEQ ID NO: 16483 - protein, 6 aa, synthetic construct
PGETHW

SEQ ID NO: 16484 - protein, 6 aa, synthetic construct
PGETHY

SEQ ID NO: 16485 - protein, 6 aa, synthetic construct
PGETID

SEQ ID NO: 16486 - protein, 6 aa, synthetic construct
PGETIE

SEQ ID NO: 16487 - protein, 6 aa, synthetic construct
PGETIF

SEQ ID NO: 16488 - protein, 6 aa, synthetic construct
PGETIW

SEQ ID NO: 16489 - protein, 6 aa, synthetic construct
PGETIY

SEQ ID NO: 16490 - protein, 6 aa, synthetic construct
PGETLD

SEQ ID NO: 16491 - protein, 6 aa, synthetic construct
PGETLE

SEQ ID NO: 16492 - protein, 6 aa, synthetic construct
PGETLF

SEQ ID NO: 16493 - protein, 6 aa, synthetic construct
PGETLW

SEQ ID NO: 16494 - protein, 6 aa, synthetic construct
PGETLY

SEQ ID NO: 16495 - protein, 6 aa, synthetic construct
PGETKD

SEQ ID NO: 16496 - protein, 6 aa, synthetic construct
PGETKE

SEQ ID NO: 16497 - protein, 6 aa, synthetic construct
PGETKF

SEQ ID NO: 16498 - protein, 6 aa, synthetic construct
PGETKW

SEQ ID NO: 16499 - protein, 6 aa, synthetic construct
PGETKY

SEQ ID NO: 16500 - protein, 6 aa, synthetic construct
PGETMD

SEQ ID NO: 16501 - protein, 6 aa, synthetic construct
PGETME

SEQ ID NO: 16502 - protein, 6 aa, synthetic construct
PGETMF

SEQ ID NO: 16503 - protein, 6 aa, synthetic construct
PGETMW

SEQ ID NO: 16504 - protein, 6 aa, synthetic construct
PGETMY

SEQ ID NO: 16505 - protein, 6 aa, synthetic construct
PGETFD

SEQ ID NO: 16506 - protein, 6 aa, synthetic construct
PGETFE

SEQ ID NO: 16507 - protein, 6 aa, synthetic construct
PGETFF

SEQ ID NO: 16508 - protein, 6 aa, synthetic construct
PGETFW

SEQ ID NO: 16509 - protein, 6 aa, synthetic construct
PGETFY

SEQ ID NO: 16510 - protein, 6 aa, synthetic construct
PGETPD

SEQ ID NO: 16511 - protein, 6 aa, synthetic construct
PGETPE

SEQ ID NO: 16512 - protein, 6 aa, synthetic construct
PGETPF

SEQ ID NO: 16513 - protein, 6 aa, synthetic construct
PGETPW

SEQ ID NO: 16514 - protein, 6 aa, synthetic construct
PGETPY

SEQ ID NO: 16515 - protein, 6 aa, synthetic construct
PGETSD

SEQ ID NO: 16516 - protein, 6 aa, synthetic construct
PGETSE

SEQ ID NO: 16517 - protein, 6 aa, synthetic construct
PGETSF

SEQ ID NO: 16518 - protein, 6 aa, synthetic construct
PGETSW

SEQ ID NO: 16519 - protein, 6 aa, synthetic construct
PGETSY

SEQ ID NO: 16520 - protein, 6 aa, synthetic construct
PGETTD

SEQ ID NO: 16521 - protein, 6 aa, synthetic construct
PGETTE

SEQ ID NO: 16522 - protein, 6 aa, synthetic construct
PGETTF

SEQ ID NO: 16523 - protein, 6 aa, synthetic construct
PGETTW

SEQ ID NO: 16524 - protein, 6 aa, synthetic construct
PGETTY

SEQ ID NO: 16525 - protein, 6 aa, synthetic construct
PGETWD

SEQ ID NO: 16526 - protein, 6 aa, synthetic construct
PGETWE

SEQ ID NO: 16527 - protein, 6 aa, synthetic construct
PGETWF

SEQ ID NO: 16528 - protein, 6 aa, synthetic construct
PGETWW

SEQ ID NO: 16529 - protein, 6 aa, synthetic construct
PGETWY

SEQ ID NO: 16530 - protein, 6 aa, synthetic construct
PGETYD

SEQ ID NO: 16531 - protein, 6 aa, synthetic construct
PGETYE

SEQ ID NO: 16532 - protein, 6 aa, synthetic construct
PGETYF

SEQ ID NO: 16533 - protein, 6 aa, synthetic construct
PGETYW

SEQ ID NO: 16534 - protein, 6 aa, synthetic construct
PGETYY

SEQ ID NO: 16535 - protein, 6 aa, synthetic construct
PGETVD

SEQ ID NO: 16536 - protein, 6 aa, synthetic construct
PGETVE

SEQ ID NO: 16537 - protein, 6 aa, synthetic construct
PGETVF

SEQ ID NO: 16538 - protein, 6 aa, synthetic construct
PGETVW

SEQ ID NO: 16539 - protein, 6 aa, synthetic construct
PGETVY

SEQ ID NO: 16540 - protein, 6 aa, synthetic construct
PGEWAD

SEQ ID NO: 16541 - protein, 6 aa, synthetic construct
PGEWAE

SEQ ID NO: 16542 - protein, 6 aa, synthetic construct
PGEWAF

SEQ ID NO: 16543 - protein, 6 aa, synthetic construct
PGEWAW

SEQ ID NO: 16544 - protein, 6 aa, synthetic construct
PGEWAY

SEQ ID NO: 16545 - protein, 6 aa, synthetic construct
PGEWRD

SEQ ID NO: 16546 - protein, 6 aa, synthetic construct
PGEWRE

SEQ ID NO: 16547 - protein, 6 aa, synthetic construct
PGEWRF

SEQ ID NO: 16548 - protein, 6 aa, synthetic construct
PGEWRW

SEQ ID NO: 16549 - protein, 6 aa, synthetic construct
PGEWRY

SEQ ID NO: 16550 - protein, 6 aa, synthetic construct
PGEWND

SEQ ID NO: 16551 - protein, 6 aa, synthetic construct
PGEWNE

SEQ ID NO: 16552 - protein, 6 aa, synthetic construct
PGEWNF

SEQ ID NO: 16553 - protein, 6 aa, synthetic construct
PGEWNW

SEQ ID NO: 16554 - protein, 6 aa, synthetic construct
PGEWNY

SEQ ID NO: 16555 - protein, 6 aa, synthetic construct
PGEWDD

SEQ ID NO: 16556 - protein, 6 aa, synthetic construct
PGEWDE

SEQ ID NO: 16557 - protein, 6 aa, synthetic construct
PGEWDF

SEQ ID NO: 16558 - protein, 6 aa, synthetic construct
PGEWDW

SEQ ID NO: 16559 - protein, 6 aa, synthetic construct
PGEWDY

SEQ ID NO: 16560 - protein, 6 aa, synthetic construct
PGEWCD

SEQ ID NO: 16561 - protein, 6 aa, synthetic construct
PGEWCE

SEQ ID NO: 16562 - protein, 6 aa, synthetic construct
PGEWCF

SEQ ID NO: 16563 - protein, 6 aa, synthetic construct
PGEWCW

SEQ ID NO: 16564 - protein, 6 aa, synthetic construct
PGEWCY

SEQ ID NO: 16565 - protein, 6 aa, synthetic construct
PGEWQD

SEQ ID NO: 16566 - protein, 6 aa, synthetic construct
PGEWQE

SEQ ID NO: 16567 - protein, 6 aa, synthetic construct
PGEWQF

SEQ ID NO: 16568 - protein, 6 aa, synthetic construct
PGEWQW

SEQ ID NO: 16569 - protein, 6 aa, synthetic construct
PGEWQY

SEQ ID NO: 16570 - protein, 6 aa, synthetic construct
PGEWED

SEQ ID NO: 16571 - protein, 6 aa, synthetic construct
PGEWEE

SEQ ID NO: 16572 - protein, 6 aa, synthetic construct
PGEWEF

SEQ ID NO: 16573 - protein, 6 aa, synthetic construct
PGEWEW

SEQ ID NO: 16574 - protein, 6 aa, synthetic construct
PGEWEY

SEQ ID NO: 16575 - protein, 6 aa, synthetic construct
PGEWGD

SEQ ID NO: 16576 - protein, 6 aa, synthetic construct
PGEWGE

SEQ ID NO: 16577 - protein, 6 aa, synthetic construct
PGEWGF

SEQ ID NO: 16578 - protein, 6 aa, synthetic construct
PGEWGW

SEQ ID NO: 16579 - protein, 6 aa, synthetic construct
PGEWGY

SEQ ID NO: 16580 - protein, 6 aa, synthetic construct
PGEWHD

SEQ ID NO: 16581 - protein, 6 aa, synthetic construct
PGEWHE

SEQ ID NO: 16582 - protein, 6 aa, synthetic construct
PGEWHF

SEQ ID NO: 16583 - protein, 6 aa, synthetic construct
PGEWHW

SEQ ID NO: 16584 - protein, 6 aa, synthetic construct
PGEWHY

SEQ ID NO: 16585 - protein, 6 aa, synthetic construct
PGEWID

SEQ ID NO: 16586 - protein, 6 aa, synthetic construct
PGEWIE

SEQ ID NO: 16587 - protein, 6 aa, synthetic construct
PGEWIF

SEQ ID NO: 16588 - protein, 6 aa, synthetic construct
PGEWIW

SEQ ID NO: 16589 - protein, 6 aa, synthetic construct
PGEWIY

SEQ ID NO: 16590 - protein, 6 aa, synthetic construct
PGEWLD

SEQ ID NO: 16591 - protein, 6 aa, synthetic construct
PGEWLE

SEQ ID NO: 16592 - protein, 6 aa, synthetic construct
PGEWLF

SEQ ID NO: 16593 - protein, 6 aa, synthetic construct
PGEWLW

SEQ ID NO: 16594 - protein, 6 aa, synthetic construct
PGEWLY

SEQ ID NO: 16595 - protein, 6 aa, synthetic construct
PGEWKD

SEQ ID NO: 16596 - protein, 6 aa, synthetic construct
PGEWKE

SEQ ID NO: 16597 - protein, 6 aa, synthetic construct
PGEWKF

SEQ ID NO: 16598 - protein, 6 aa, synthetic construct
PGEWKW

SEQ ID NO: 16599 - protein, 6 aa, synthetic construct
PGEWKY

SEQ ID NO: 16600 - protein, 6 aa, synthetic construct
PGEWMD

SEQ ID NO: 16601 - protein, 6 aa, synthetic construct
PGEWME

SEQ ID NO: 16602 - protein, 6 aa, synthetic construct
PGEWMF

SEQ ID NO: 16603 - protein, 6 aa, synthetic construct
PGEWMW

SEQ ID NO: 16604 - protein, 6 aa, synthetic construct
PGEWMY

SEQ ID NO: 16605 - protein, 6 aa, synthetic construct
PGEWFD

SEQ ID NO: 16606 - protein, 6 aa, synthetic construct
PGEWFE

SEQ ID NO: 16607 - protein, 6 aa, synthetic construct
PGEWFF

SEQ ID NO: 16608 - protein, 6 aa, synthetic construct
PGEWFW

SEQ ID NO: 16609 - protein, 6 aa, synthetic construct
PGEWFY

SEQ ID NO: 16610 - protein, 6 aa, synthetic construct
PGEWPD

SEQ ID NO: 16611 - protein, 6 aa, synthetic construct
PGEWPE

SEQ ID NO: 16612 - protein, 6 aa, synthetic construct
PGEWPF

SEQ ID NO: 16613 - protein, 6 aa, synthetic construct
PGEWPW

SEQ ID NO: 16614 - protein, 6 aa, synthetic construct
PGEWPY

SEQ ID NO: 16615 - protein, 6 aa, synthetic construct
PGEWSD

SEQ ID NO: 16616 - protein, 6 aa, synthetic construct
PGEWSE

SEQ ID NO: 16617 - protein, 6 aa, synthetic construct
PGEWSF

SEQ ID NO: 16618 - protein, 6 aa, synthetic construct
PGEWSW

SEQ ID NO: 16619 - protein, 6 aa, synthetic construct
PGEWSY

SEQ ID NO: 16620 - protein, 6 aa, synthetic construct
PGEWTD

SEQ ID NO: 16621 - protein, 6 aa, synthetic construct
PGEWTE

SEQ ID NO: 16622 - protein, 6 aa, synthetic construct
PGEWTF

SEQ ID NO: 16623 - protein, 6 aa, synthetic construct
PGEWTW

SEQ ID NO: 16624 - protein, 6 aa, synthetic construct
PGEWTY

SEQ ID NO: 16625 - protein, 6 aa, synthetic construct
PGEWWD

SEQ ID NO: 16626 - protein, 6 aa, synthetic construct
PGEWWE

SEQ ID NO: 16627 - protein, 6 aa, synthetic construct
PGEWWF

SEQ ID NO: 16628 - protein, 6 aa, synthetic construct
PGEWWW

SEQ ID NO: 16629 - protein, 6 aa, synthetic construct
PGEWWY

SEQ ID NO: 16630 - protein, 6 aa, synthetic construct
PGEWYD

SEQ ID NO: 16631 - protein, 6 aa, synthetic construct
PGEWYE

SEQ ID NO: 16632 - protein, 6 aa, synthetic construct
PGEWYF

SEQ ID NO: 16633 - protein, 6 aa, synthetic construct
PGEWYW

SEQ ID NO: 16634 - protein, 6 aa, synthetic construct
PGEWYY

SEQ ID NO: 16635 - protein, 6 aa, synthetic construct
PGEWVD

SEQ ID NO: 16636 - protein, 6 aa, synthetic construct
PGEWVE

SEQ ID NO: 16637 - protein, 6 aa, synthetic construct
PGEWVF

SEQ ID NO: 16638 - protein, 6 aa, synthetic construct
PGEWVW

SEQ ID NO: 16639 - protein, 6 aa, synthetic construct
PGEWVY

SEQ ID NO: 16640 - protein, 6 aa, synthetic construct
PGEYAD

SEQ ID NO: 16641 - protein, 6 aa, synthetic construct
PGEYAE

SEQ ID NO: 16642 - protein, 6 aa, synthetic construct
PGEYAF

SEQ ID NO: 16643 - protein, 6 aa, synthetic construct
PGEYAW

SEQ ID NO: 16644 - protein, 6 aa, synthetic construct
PGEYAY

SEQ ID NO: 16645 - protein, 6 aa, synthetic construct
PGEYRD

SEQ ID NO: 16646 - protein, 6 aa, synthetic construct
PGEYRE

SEQ ID NO: 16647 - protein, 6 aa, synthetic construct
PGEYRF

SEQ ID NO: 16648 - protein, 6 aa, synthetic construct
PGEYRW

SEQ ID NO: 16649 - protein, 6 aa, synthetic construct
PGEYRY

SEQ ID NO: 16650 - protein, 6 aa, synthetic construct
PGEYND

SEQ ID NO: 16651 - protein, 6 aa, synthetic construct
PGEYNE

SEQ ID NO: 16652 - protein, 6 aa, synthetic construct
PGEYNF

SEQ ID NO: 16653 - protein, 6 aa, synthetic construct
PGEYNW

SEQ ID NO: 16654 - protein, 6 aa, synthetic construct
PGEYNY

SEQ ID NO: 16655 - protein, 6 aa, synthetic construct
PGEYDD

SEQ ID NO: 16656 - protein, 6 aa, synthetic construct
PGEYDE

SEQ ID NO: 16657 - protein, 6 aa, synthetic construct
PGEYDF

SEQ ID NO: 16658 - protein, 6 aa, synthetic construct
PGEYDW

SEQ ID NO: 16659 - protein, 6 aa, synthetic construct
PGEYDY

SEQ ID NO: 16660 - protein, 6 aa, synthetic construct
PGEYCD

SEQ ID NO: 16661 - protein, 6 aa, synthetic construct
PGEYCE

SEQ ID NO: 16662 - protein, 6 aa, synthetic construct
PGEYCF

SEQ ID NO: 16663 - protein, 6 aa, synthetic construct
PGEYCW

SEQ ID NO: 16664 - protein, 6 aa, synthetic construct
PGEYCY

SEQ ID NO: 16665 - protein, 6 aa, synthetic construct
PGEYQD

SEQ ID NO: 16666 - protein, 6 aa, synthetic construct
PGEYQE

SEQ ID NO: 16667 - protein, 6 aa, synthetic construct
PGEYQF

SEQ ID NO: 16668 - protein, 6 aa, synthetic construct
PGEYQW

SEQ ID NO: 16669 - protein, 6 aa, synthetic construct
PGEYQY

SEQ ID NO: 16670 - protein, 6 aa, synthetic construct
PGEYED

SEQ ID NO: 16671 - protein, 6 aa, synthetic construct
PGEYEE

SEQ ID NO: 16672 - protein, 6 aa, synthetic construct
PGEYEF

SEQ ID NO: 16673 - protein, 6 aa, synthetic construct
PGEYEW

SEQ ID NO: 16674 - protein, 6 aa, synthetic construct
PGEYEY

SEQ ID NO: 16675 - protein, 6 aa, synthetic construct
PGEYGD

SEQ ID NO: 16676 - protein, 6 aa, synthetic construct
PGEYGE

SEQ ID NO: 16677 - protein, 6 aa, synthetic construct
PGEYGF

SEQ ID NO: 16678 - protein, 6 aa, synthetic construct
PGEYGW

SEQ ID NO: 16679 - protein, 6 aa, synthetic construct
PGEYGY

SEQ ID NO: 16680 - protein, 6 aa, synthetic construct
PGEYHD

SEQ ID NO: 16681 - protein, 6 aa, synthetic construct
PGEYHE

SEQ ID NO: 16682 - protein, 6 aa, synthetic construct
PGEYHF

SEQ ID NO: 16683 - protein, 6 aa, synthetic construct
PGEYHW

SEQ ID NO: 16684 - protein, 6 aa, synthetic construct
PGEYHY

SEQ ID NO: 16685 - protein, 6 aa, synthetic construct
PGEYID

SEQ ID NO: 16686 - protein, 6 aa, synthetic construct
PGEYIE

SEQ ID NO: 16687 - protein, 6 aa, synthetic construct
PGEYIF

SEQ ID NO: 16688 - protein, 6 aa, synthetic construct
PGEYIW

SEQ ID NO: 16689 - protein, 6 aa, synthetic construct
PGEYIY

SEQ ID NO: 16690 - protein, 6 aa, synthetic construct
PGEYLD

SEQ ID NO: 16691 - protein, 6 aa, synthetic construct
PGEYLE

SEQ ID NO: 16692 - protein, 6 aa, synthetic construct
PGEYLF

SEQ ID NO: 16693 - protein, 6 aa, synthetic construct
PGEYLW

SEQ ID NO: 16694 - protein, 6 aa, synthetic construct
PGEYLY

SEQ ID NO: 16695 - protein, 6 aa, synthetic construct
PGEYKD

SEQ ID NO: 16696 - protein, 6 aa, synthetic construct
PGEYKE

SEQ ID NO: 16697 - protein, 6 aa, synthetic construct
PGEYKF

SEQ ID NO: 16698 - protein, 6 aa, synthetic construct
PGEYKW

SEQ ID NO: 16699 - protein, 6 aa, synthetic construct
PGEYKY

SEQ ID NO: 16700 - protein, 6 aa, synthetic construct
PGEYMD

SEQ ID NO: 16701 - protein, 6 aa, synthetic construct
PGEYME

SEQ ID NO: 16702 - protein, 6 aa, synthetic construct
PGEYMF

SEQ ID NO: 16703 - protein, 6 aa, synthetic construct
PGEYMW

SEQ ID NO: 16704 - protein, 6 aa, synthetic construct
PGEYMY

SEQ ID NO: 16705 - protein, 6 aa, synthetic construct
PGEYFD

SEQ ID NO: 16706 - protein, 6 aa, synthetic construct
PGEYFE

SEQ ID NO: 16707 - protein, 6 aa, synthetic construct
PGEYFF

SEQ ID NO: 16708 - protein, 6 aa, synthetic construct
PGEYFW

SEQ ID NO: 16709 - protein, 6 aa, synthetic construct
PGEYFY

SEQ ID NO: 16710 - protein, 6 aa, synthetic construct
PGEYPD

SEQ ID NO: 16711 - protein, 6 aa, synthetic construct
PGEYPE

SEQ ID NO: 16712 - protein, 6 aa, synthetic construct
PGEYPF

SEQ ID NO: 16713 - protein, 6 aa, synthetic construct
PGEYPW

SEQ ID NO: 16714 - protein, 6 aa, synthetic construct
PGEYPY

SEQ ID NO: 16715 - protein, 6 aa, synthetic construct
PGEYSD

SEQ ID NO: 16716 - protein, 6 aa, synthetic construct
PGEYSE

SEQ ID NO: 16717 - protein, 6 aa, synthetic construct
PGEYSF

SEQ ID NO: 16718 - protein, 6 aa, synthetic construct
PGEYSW

SEQ ID NO: 16719 - protein, 6 aa, synthetic construct
PGEYSY

SEQ ID NO: 16720 - protein, 6 aa, synthetic construct
PGEYTD

SEQ ID NO: 16721 - protein, 6 aa, synthetic construct
PGEYTE

SEQ ID NO: 16722 - protein, 6 aa, synthetic construct
PGEYTF

SEQ ID NO: 16723 - protein, 6 aa, synthetic construct
PGEYTW

SEQ ID NO: 16724 - protein, 6 aa, synthetic construct
PGEYTY

SEQ ID NO: 16725 - protein, 6 aa, synthetic construct
PGEYWD

SEQ ID NO: 16726 - protein, 6 aa, synthetic construct
PGEYWE

SEQ ID NO: 16727 - protein, 6 aa, synthetic construct
PGEYWF

SEQ ID NO: 16728 - protein, 6 aa, synthetic construct
PGEYWW

SEQ ID NO: 16729 - protein, 6 aa, synthetic construct
PGEYWY

SEQ ID NO: 16730 - protein, 6 aa, synthetic construct
PGEYYD

SEQ ID NO: 16731 - protein, 6 aa, synthetic construct
PGEYYE

SEQ ID NO: 16732 - protein, 6 aa, synthetic construct
PGEYYF

SEQ ID NO: 16733 - protein, 6 aa, synthetic construct
PGEYYW

SEQ ID NO: 16734 - protein, 6 aa, synthetic construct
PGEYYY

SEQ ID NO: 16735 - protein, 6 aa, synthetic construct
PGEYVD

SEQ ID NO: 16736 - protein, 6 aa, synthetic construct
PGEYVE

SEQ ID NO: 16737 - protein, 6 aa, synthetic construct
PGEYVF

SEQ ID NO: 16738 - protein, 6 aa, synthetic construct
PGEYVW

SEQ ID NO: 16739 - protein, 6 aa, synthetic construct
PGEYVY

SEQ ID NO: 16740 - protein, 6 aa, synthetic construct
PGEVAD

SEQ ID NO: 16741 - protein, 6 aa, synthetic construct
PGEVAE

SEQ ID NO: 16742 - protein, 6 aa, synthetic construct
PGEVAF

SEQ ID NO: 16743 - protein, 6 aa, synthetic construct
PGEVAW

SEQ ID NO: 16744 - protein, 6 aa, synthetic construct
PGEVAY

SEQ ID NO: 16745 - protein, 6 aa, synthetic construct
PGEVRD

SEQ ID NO: 16746 - protein, 6 aa, synthetic construct
PGEVRE

SEQ ID NO: 16747 - protein, 6 aa, synthetic construct
PGEVRF

SEQ ID NO: 16748 - protein, 6 aa, synthetic construct
PGEVRW

SEQ ID NO: 16749 - protein, 6 aa, synthetic construct
PGEVRY

SEQ ID NO: 16750 - protein, 6 aa, synthetic construct
PGEVND

SEQ ID NO: 16751 - protein, 6 aa, synthetic construct
PGEVNE

SEQ ID NO: 16752 - protein, 6 aa, synthetic construct
PGEVNF

SEQ ID NO: 16753 - protein, 6 aa, synthetic construct
PGEVNW

SEQ ID NO: 16754 - protein, 6 aa, synthetic construct
PGEVNY

SEQ ID NO: 16755 - protein, 6 aa, synthetic construct
PGEVDD

SEQ ID NO: 16756 - protein, 6 aa, synthetic construct
PGEVDE

SEQ ID NO: 16757 - protein, 6 aa, synthetic construct
PGEVDF

SEQ ID NO: 16758 - protein, 6 aa, synthetic construct
PGEVDW

SEQ ID NO: 16759 - protein, 6 aa, synthetic construct
PGEVDY

SEQ ID NO: 16760 - protein, 6 aa, synthetic construct
PGEVCD

SEQ ID NO: 16761 - protein, 6 aa, synthetic construct
PGEVCE

SEQ ID NO: 16762 - protein, 6 aa, synthetic construct
PGEVCF

SEQ ID NO: 16763 - protein, 6 aa, synthetic construct
PGEVCW

SEQ ID NO: 16764 - protein, 6 aa, synthetic construct
PGEVCY

SEQ ID NO: 16765 - protein, 6 aa, synthetic construct
PGEVQD

SEQ ID NO: 16766 - protein, 6 aa, synthetic construct
PGEVQE

SEQ ID NO: 16767 - protein, 6 aa, synthetic construct
PGEVQF

SEQ ID NO: 16768 - protein, 6 aa, synthetic construct
PGEVQW

SEQ ID NO: 16769 - protein, 6 aa, synthetic construct
PGEVQY

SEQ ID NO: 16770 - protein, 6 aa, synthetic construct
PGEVED

SEQ ID NO: 16771 - protein, 6 aa, synthetic construct
PGEVEE

SEQ ID NO: 16772 - protein, 6 aa, synthetic construct
PGEVEF

SEQ ID NO: 16773 - protein, 6 aa, synthetic construct
PGEVEW

SEQ ID NO: 16774 - protein, 6 aa, synthetic construct
PGEVEY

SEQ ID NO: 16775 - protein, 6 aa, synthetic construct
PGEVGD

SEQ ID NO: 16776 - protein, 6 aa, synthetic construct
PGEVGE

SEQ ID NO: 16777 - protein, 6 aa, synthetic construct
PGEVGF

SEQ ID NO: 16778 - protein, 6 aa, synthetic construct
PGEVGW

SEQ ID NO: 16779 - protein, 6 aa, synthetic construct
PGEVGY

SEQ ID NO: 16780 - protein, 6 aa, synthetic construct
PGEVHD

SEQ ID NO: 16781 - protein, 6 aa, synthetic construct
PGEVHE

SEQ ID NO: 16782 - protein, 6 aa, synthetic construct
PGEVHF

SEQ ID NO: 16783 - protein, 6 aa, synthetic construct
PGEVHW

SEQ ID NO: 16784 - protein, 6 aa, synthetic construct
PGEVHY

SEQ ID NO: 16785 - protein, 6 aa, synthetic construct
PGEVID

SEQ ID NO: 16786 - protein, 6 aa, synthetic construct
PGEVIE

SEQ ID NO: 16787 - protein, 6 aa, synthetic construct
PGEVIF

SEQ ID NO: 16788 - protein, 6 aa, synthetic construct
PGEVIW

SEQ ID NO: 16789 - protein, 6 aa, synthetic construct
PGEVIY

SEQ ID NO: 16790 - protein, 6 aa, synthetic construct
PGEVLD

SEQ ID NO: 16791 - protein, 6 aa, synthetic construct
PGEVLE

SEQ ID NO: 16792 - protein, 6 aa, synthetic construct
PGEVLF

SEQ ID NO: 16793 - protein, 6 aa, synthetic construct
PGEVLW

SEQ ID NO: 16794 - protein, 6 aa, synthetic construct
PGEVLY

SEQ ID NO: 16795 - protein, 6 aa, synthetic construct
PGEVKD

SEQ ID NO: 16796 - protein, 6 aa, synthetic construct
PGEVKE

SEQ ID NO: 16797 - protein, 6 aa, synthetic construct
PGEVKF

SEQ ID NO: 16798 - protein, 6 aa, synthetic construct
PGEVKW

SEQ ID NO: 16799 - protein, 6 aa, synthetic construct
PGEVKY

SEQ ID NO: 16800 - protein, 6 aa, synthetic construct
PGEVMD

SEQ ID NO: 16801 - protein, 6 aa, synthetic construct
PGEVME

SEQ ID NO: 16802 - protein, 6 aa, synthetic construct
PGEVMF

SEQ ID NO: 16803 - protein, 6 aa, synthetic construct
PGEVMW

SEQ ID NO: 16804 - protein, 6 aa, synthetic construct
PGEVMY

SEQ ID NO: 16805 - protein, 6 aa, synthetic construct
PGEVFD

SEQ ID NO: 16806 - protein, 6 aa, synthetic construct
PGEVFE

SEQ ID NO: 16807 - protein, 6 aa, synthetic construct
PGEVFF

SEQ ID NO: 16808 - protein, 6 aa, synthetic construct
PGEVFW

SEQ ID NO: 16809 - protein, 6 aa, synthetic construct
PGEVFY

SEQ ID NO: 16810 - protein, 6 aa, synthetic construct
PGEVPD

SEQ ID NO: 16811 - protein, 6 aa, synthetic construct
PGEVPE

SEQ ID NO: 16812 - protein, 6 aa, synthetic construct
PGEVPF

SEQ ID NO: 16813 - protein, 6 aa, synthetic construct
PGEVPW

SEQ ID NO: 16814 - protein, 6 aa, synthetic construct
PGEVPY

SEQ ID NO: 16815 - protein, 6 aa, synthetic construct
PGEVSD

SEQ ID NO: 16816 - protein, 6 aa, synthetic construct
PGEVSE

SEQ ID NO: 16817 - protein, 6 aa, synthetic construct
PGEVSF

SEQ ID NO: 16818 - protein, 6 aa, synthetic construct
PGEVSW

SEQ ID NO: 16819 - protein, 6 aa, synthetic construct
PGEVSY

SEQ ID NO: 16820 - protein, 6 aa, synthetic construct
PGEVTD

SEQ ID NO: 16821 - protein, 6 aa, synthetic construct
PGEVTE

SEQ ID NO: 16822 - protein, 6 aa, synthetic construct
PGEVTF

SEQ ID NO: 16823 - protein, 6 aa, synthetic construct
PGEVTW

SEQ ID NO: 16824 - protein, 6 aa, synthetic construct
PGEVTY

SEQ ID NO: 16825 - protein, 6 aa, synthetic construct
PGEVWD

SEQ ID NO: 16826 - protein, 6 aa, synthetic construct
PGEVWE

SEQ ID NO: 16827 - protein, 6 aa, synthetic construct
PGEVWF

SEQ ID NO: 16828 - protein, 6 aa, synthetic construct
PGEVWW

SEQ ID NO: 16829 - protein, 6 aa, synthetic construct
PGEVWY

SEQ ID NO: 16830 - protein, 6 aa, synthetic construct
PGEVYD

SEQ ID NO: 16831 - protein, 6 aa, synthetic construct
PGEVYE

SEQ ID NO: 16832 - protein, 6 aa, synthetic construct
PGEVYF

SEQ ID NO: 16833 - protein, 6 aa, synthetic construct
PGEVYW

SEQ ID NO: 16834 - protein, 6 aa, synthetic construct
PGEVYY

SEQ ID NO: 16835 - protein, 6 aa, synthetic construct
PGEVVD

SEQ ID NO: 16836 - protein, 6 aa, synthetic construct
PGEVVE

SEQ ID NO: 16837 - protein, 6 aa, synthetic construct
PGEVVF

SEQ ID NO: 16838 - protein, 6 aa, synthetic construct
PGEVVW

SEQ ID NO: 16839 - protein, 6 aa, synthetic construct
PGEVVY

SEQ ID NO: 16840 - protein, 6 aa, synthetic construct
PHEAAD

SEQ ID NO: 16841 - protein, 6 aa, synthetic construct
PHEAAE

SEQ ID NO: 16842 - protein, 6 aa, synthetic construct
PHEAAF

SEQ ID NO: 16843 - protein, 6 aa, synthetic construct
PHEAAW

SEQ ID NO: 16844 - protein, 6 aa, synthetic construct
PHEAAY

SEQ ID NO: 16845 - protein, 6 aa, synthetic construct
PHEARD

SEQ ID NO: 16846 - protein, 6 aa, synthetic construct
PHEARE

SEQ ID NO: 16847 - protein, 6 aa, synthetic construct
PHEARF

SEQ ID NO: 16848 - protein, 6 aa, synthetic construct
PHEARW

SEQ ID NO: 16849 - protein, 6 aa, synthetic construct
PHEARY

SEQ ID NO: 16850 - protein, 6 aa, synthetic construct
PHEAND

SEQ ID NO: 16851 - protein, 6 aa, synthetic construct
PHEANE

SEQ ID NO: 16852 - protein, 6 aa, synthetic construct
PHEANF

SEQ ID NO: 16853 - protein, 6 aa, synthetic construct
PHEANW

SEQ ID NO: 16854 - protein, 6 aa, synthetic construct
PHEANY

SEQ ID NO: 16855 - protein, 6 aa, synthetic construct
PHEADD

SEQ ID NO: 16856 - protein, 6 aa, synthetic construct
PHEADE

SEQ ID NO: 16857 - protein, 6 aa, synthetic construct
PHEADF

SEQ ID NO: 16858 - protein, 6 aa, synthetic construct
PHEADW

SEQ ID NO: 16859 - protein, 6 aa, synthetic construct
PHEADY

SEQ ID NO: 16860 - protein, 6 aa, synthetic construct
PHEACD

SEQ ID NO: 16861 - protein, 6 aa, synthetic construct
PHEACE

SEQ ID NO: 16862 - protein, 6 aa, synthetic construct
PHEACF

SEQ ID NO: 16863 - protein, 6 aa, synthetic construct
PHEACW

SEQ ID NO: 16864 - protein, 6 aa, synthetic construct
PHEACY

SEQ ID NO: 16865 - protein, 6 aa, synthetic construct
PHEAQD

SEQ ID NO: 16866 - protein, 6 aa, synthetic construct
PHEAQE

SEQ ID NO: 16867 - protein, 6 aa, synthetic construct
PHEAQF

SEQ ID NO: 16868 - protein, 6 aa, synthetic construct
PHEAQW

SEQ ID NO: 16869 - protein, 6 aa, synthetic construct
PHEAQY

SEQ ID NO: 16870 - protein, 6 aa, synthetic construct
PHEAED

SEQ ID NO: 16871 - protein, 6 aa, synthetic construct
PHEAEE

SEQ ID NO: 16872 - protein, 6 aa, synthetic construct
PHEAEF

SEQ ID NO: 16873 - protein, 6 aa, synthetic construct
PHEAEW

SEQ ID NO: 16874 - protein, 6 aa, synthetic construct
PHEAEY

SEQ ID NO: 16875 - protein, 6 aa, synthetic construct
PHEAGD

SEQ ID NO: 16876 - protein, 6 aa, synthetic construct
PHEAGE

SEQ ID NO: 16877 - protein, 6 aa, synthetic construct
PHEAGF

SEQ ID NO: 16878 - protein, 6 aa, synthetic construct
PHEAGW

SEQ ID NO: 16879 - protein, 6 aa, synthetic construct
PHEAGY

SEQ ID NO: 16880 - protein, 6 aa, synthetic construct
PHEAHD

SEQ ID NO: 16881 - protein, 6 aa, synthetic construct
PHEAHE

SEQ ID NO: 16882 - protein, 6 aa, synthetic construct
PHEAHF

SEQ ID NO: 16883 - protein, 6 aa, synthetic construct
PHEAHW

SEQ ID NO: 16884 - protein, 6 aa, synthetic construct
PHEAHY

SEQ ID NO: 16885 - protein, 6 aa, synthetic construct
PHEAID

SEQ ID NO: 16886 - protein, 6 aa, synthetic construct
PHEAIE

SEQ ID NO: 16887 - protein, 6 aa, synthetic construct
PHEAIF

SEQ ID NO: 16888 - protein, 6 aa, synthetic construct
PHEAIW

SEQ ID NO: 16889 - protein, 6 aa, synthetic construct
PHEAIY

SEQ ID NO: 16890 - protein, 6 aa, synthetic construct
PHEALD

SEQ ID NO: 16891 - protein, 6 aa, synthetic construct
PHEALE

SEQ ID NO: 16892 - protein, 6 aa, synthetic construct
PHEALF

SEQ ID NO: 16893 - protein, 6 aa, synthetic construct
PHEALW

SEQ ID NO: 16894 - protein, 6 aa, synthetic construct
PHEALY

SEQ ID NO: 16895 - protein, 6 aa, synthetic construct
PHEAKD

SEQ ID NO: 16896 - protein, 6 aa, synthetic construct
PHEAKE

SEQ ID NO: 16897 - protein, 6 aa, synthetic construct
PHEAKF

SEQ ID NO: 16898 - protein, 6 aa, synthetic construct
PHEAKW

SEQ ID NO: 16899 - protein, 6 aa, synthetic construct
PHEAKY

SEQ ID NO: 16900 - protein, 6 aa, synthetic construct
PHEAMD

SEQ ID NO: 16901 - protein, 6 aa, synthetic construct
PHEAME

SEQ ID NO: 16902 - protein, 6 aa, synthetic construct
PHEAMF

SEQ ID NO: 16903 - protein, 6 aa, synthetic construct
PHEAMW

SEQ ID NO: 16904 - protein, 6 aa, synthetic construct
PHEAMY

SEQ ID NO: 16905 - protein, 6 aa, synthetic construct
PHEAFD

SEQ ID NO: 16906 - protein, 6 aa, synthetic construct
PHEAFE

SEQ ID NO: 16907 - protein, 6 aa, synthetic construct
PHEAFF

SEQ ID NO: 16908 - protein, 6 aa, synthetic construct
PHEAFW

SEQ ID NO: 16909 - protein, 6 aa, synthetic construct
PHEAFY

SEQ ID NO: 16910 - protein, 6 aa, synthetic construct
PHEAPD

SEQ ID NO: 16911 - protein, 6 aa, synthetic construct
PHEAPE

SEQ ID NO: 16912 - protein, 6 aa, synthetic construct
PHEAPF

SEQ ID NO: 16913 - protein, 6 aa, synthetic construct
PHEAPW

SEQ ID NO: 16914 - protein, 6 aa, synthetic construct
PHEAPY

SEQ ID NO: 16915 - protein, 6 aa, synthetic construct
PHEASD

SEQ ID NO: 16916 - protein, 6 aa, synthetic construct
PHEASE

SEQ ID NO: 16917 - protein, 6 aa, synthetic construct
PHEASF

SEQ ID NO: 16918 - protein, 6 aa, synthetic construct
PHEASW

SEQ ID NO: 16919 - protein, 6 aa, synthetic construct
PHEASY

SEQ ID NO: 16920 - protein, 6 aa, synthetic construct
PHEATD

SEQ ID NO: 16921 - protein, 6 aa, synthetic construct
PHEATE

SEQ ID NO: 16922 - protein, 6 aa, synthetic construct
PHEATF

SEQ ID NO: 16923 - protein, 6 aa, synthetic construct
PHEATW

SEQ ID NO: 16924 - protein, 6 aa, synthetic construct
PHEATY

SEQ ID NO: 16925 - protein, 6 aa, synthetic construct
PHEAWD

SEQ ID NO: 16926 - protein, 6 aa, synthetic construct
PHEAWE

SEQ ID NO: 16927 - protein, 6 aa, synthetic construct
PHEAWF

SEQ ID NO: 16928 - protein, 6 aa, synthetic construct
PHEAWW

SEQ ID NO: 16929 - protein, 6 aa, synthetic construct
PHEAWY

SEQ ID NO: 16930 - protein, 6 aa, synthetic construct
PHEAYD

SEQ ID NO: 16931 - protein, 6 aa, synthetic construct
PHEAYE

SEQ ID NO: 16932 - protein, 6 aa, synthetic construct
PHEAYF

SEQ ID NO: 16933 - protein, 6 aa, synthetic construct
PHEAYW

SEQ ID NO: 16934 - protein, 6 aa, synthetic construct
PHEAYY

SEQ ID NO: 16935 - protein, 6 aa, synthetic construct
PHEAVD

SEQ ID NO: 16936 - protein, 6 aa, synthetic construct
PHEAVE

SEQ ID NO: 16937 - protein, 6 aa, synthetic construct
PHEAVF

SEQ ID NO: 16938 - protein, 6 aa, synthetic construct
PHEAVW

SEQ ID NO: 16939 - protein, 6 aa, synthetic construct
PHEAVY

SEQ ID NO: 16940 - protein, 6 aa, synthetic construct
PHERAD

SEQ ID NO: 16941 - protein, 6 aa, synthetic construct
PHERAE

SEQ ID NO: 16942 - protein, 6 aa, synthetic construct
PHERAF

SEQ ID NO: 16943 - protein, 6 aa, synthetic construct
PHERAW

SEQ ID NO: 16944 - protein, 6 aa, synthetic construct
PHERAY

SEQ ID NO: 16945 - protein, 6 aa, synthetic construct
PHERRD

SEQ ID NO: 16946 - protein, 6 aa, synthetic construct
PHERRE

SEQ ID NO: 16947 - protein, 6 aa, synthetic construct
PHERRF

SEQ ID NO: 16948 - protein, 6 aa, synthetic construct
PHERRW

SEQ ID NO: 16949 - protein, 6 aa, synthetic construct
PHERRY

SEQ ID NO: 16950 - protein, 6 aa, synthetic construct
PHERND

SEQ ID NO: 16951 - protein, 6 aa, synthetic construct
PHERNE

SEQ ID NO: 16952 - protein, 6 aa, synthetic construct
PHERNF

SEQ ID NO: 16953 - protein, 6 aa, synthetic construct
PHERNW

SEQ ID NO: 16954 - protein, 6 aa, synthetic construct
PHERNY

SEQ ID NO: 16955 - protein, 6 aa, synthetic construct
PHERDD

SEQ ID NO: 16956 - protein, 6 aa, synthetic construct
PHERDE

SEQ ID NO: 16957 - protein, 6 aa, synthetic construct
PHERDF

SEQ ID NO: 16958 - protein, 6 aa, synthetic construct
PHERDW

SEQ ID NO: 16959 - protein, 6 aa, synthetic construct
PHERDY

SEQ ID NO: 16960 - protein, 6 aa, synthetic construct
PHERCD

SEQ ID NO: 16961 - protein, 6 aa, synthetic construct
PHERCE

SEQ ID NO: 16962 - protein, 6 aa, synthetic construct
PHERCF

SEQ ID NO: 16963 - protein, 6 aa, synthetic construct
PHERCW

SEQ ID NO: 16964 - protein, 6 aa, synthetic construct
PHERCY

SEQ ID NO: 16965 - protein, 6 aa, synthetic construct
PHERQD

SEQ ID NO: 16966 - protein, 6 aa, synthetic construct
PHERQE

SEQ ID NO: 16967 - protein, 6 aa, synthetic construct
PHERQF

SEQ ID NO: 16968 - protein, 6 aa, synthetic construct
PHERQW

SEQ ID NO: 16969 - protein, 6 aa, synthetic construct
PHERQY

SEQ ID NO: 16970 - protein, 6 aa, synthetic construct
PHERED

SEQ ID NO: 16971 - protein, 6 aa, synthetic construct
PHEREE

SEQ ID NO: 16972 - protein, 6 aa, synthetic construct
PHEREF

SEQ ID NO: 16973 - protein, 6 aa, synthetic construct
PHEREW

SEQ ID NO: 16974 - protein, 6 aa, synthetic construct
PHEREY

SEQ ID NO: 16975 - protein, 6 aa, synthetic construct
PHERGD

SEQ ID NO: 16976 - protein, 6 aa, synthetic construct
PHERGE

SEQ ID NO: 16977 - protein, 6 aa, synthetic construct
PHERGF

SEQ ID NO: 16978 - protein, 6 aa, synthetic construct
PHERGW

SEQ ID NO: 16979 - protein, 6 aa, synthetic construct
PHERGY

SEQ ID NO: 16980 - protein, 6 aa, synthetic construct
PHERHD

SEQ ID NO: 16981 - protein, 6 aa, synthetic construct
PHERHE

SEQ ID NO: 16982 - protein, 6 aa, synthetic construct
PHERHF

SEQ ID NO: 16983 - protein, 6 aa, synthetic construct
PHERHW

SEQ ID NO: 16984 - protein, 6 aa, synthetic construct
PHERHY

SEQ ID NO: 16985 - protein, 6 aa, synthetic construct
PHERID

SEQ ID NO: 16986 - protein, 6 aa, synthetic construct
PHERIE

SEQ ID NO: 16987 - protein, 6 aa, synthetic construct
PHERIF

SEQ ID NO: 16988 - protein, 6 aa, synthetic construct
PHERIW

SEQ ID NO: 16989 - protein, 6 aa, synthetic construct
PHERIY

SEQ ID NO: 16990 - protein, 6 aa, synthetic construct
PHERLD

SEQ ID NO: 16991 - protein, 6 aa, synthetic construct
PHERLE

SEQ ID NO: 16992 - protein, 6 aa, synthetic construct
PHERLF

SEQ ID NO: 16993 - protein, 6 aa, synthetic construct
PHERLW

SEQ ID NO: 16994 - protein, 6 aa, synthetic construct
PHERLY

SEQ ID NO: 16995 - protein, 6 aa, synthetic construct
PHERKD

SEQ ID NO: 16996 - protein, 6 aa, synthetic construct
PHERKE

SEQ ID NO: 16997 - protein, 6 aa, synthetic construct
PHERKF

SEQ ID NO: 16998 - protein, 6 aa, synthetic construct
PHERKW

SEQ ID NO: 16999 - protein, 6 aa, synthetic construct
PHERKY

SEQ ID NO: 17000 - protein, 6 aa, synthetic construct
PHERMD

SEQ ID NO: 17001 - protein, 6 aa, synthetic construct
PHERME

SEQ ID NO: 17002 - protein, 6 aa, synthetic construct
PHERMF

SEQ ID NO: 17003 - protein, 6 aa, synthetic construct
PHERMW

SEQ ID NO: 17004 - protein, 6 aa, synthetic construct
PHERMY

SEQ ID NO: 17005 - protein, 6 aa, synthetic construct
PHERFD

SEQ ID NO: 17006 - protein, 6 aa, synthetic construct
PHERFE

SEQ ID NO: 17007 - protein, 6 aa, synthetic construct
PHERFF

SEQ ID NO: 17008 - protein, 6 aa, synthetic construct
PHERFW

SEQ ID NO: 17009 - protein, 6 aa, synthetic construct
PHERFY

SEQ ID NO: 17010 - protein, 6 aa, synthetic construct
PHERPD

SEQ ID NO: 17011 - protein, 6 aa, synthetic construct
PHERPE

SEQ ID NO: 17012 - protein, 6 aa, synthetic construct
PHERPF

SEQ ID NO: 17013 - protein, 6 aa, synthetic construct
PHERPW

SEQ ID NO: 17014 - protein, 6 aa, synthetic construct
PHERPY

SEQ ID NO: 17015 - protein, 6 aa, synthetic construct
PHERSD

SEQ ID NO: 17016 - protein, 6 aa, synthetic construct
PHERSE

SEQ ID NO: 17017 - protein, 6 aa, synthetic construct
PHERSF

SEQ ID NO: 17018 - protein, 6 aa, synthetic construct
PHERSW

SEQ ID NO: 17019 - protein, 6 aa, synthetic construct
PHERSY

SEQ ID NO: 17020 - protein, 6 aa, synthetic construct
PHERTD

SEQ ID NO: 17021 - protein, 6 aa, synthetic construct
PHERTE

SEQ ID NO: 17022 - protein, 6 aa, synthetic construct
PHERTF

SEQ ID NO: 17023 - protein, 6 aa, synthetic construct
PHERTW

SEQ ID NO: 17024 - protein, 6 aa, synthetic construct
PHERTY

SEQ ID NO: 17025 - protein, 6 aa, synthetic construct
PHERWD

SEQ ID NO: 17026 - protein, 6 aa, synthetic construct
PHERWE

SEQ ID NO: 17027 - protein, 6 aa, synthetic construct
PHERWF

SEQ ID NO: 17028 - protein, 6 aa, synthetic construct
PHERWW

SEQ ID NO: 17029 - protein, 6 aa, synthetic construct
PHERWY

SEQ ID NO: 17030 - protein, 6 aa, synthetic construct
PHERYD

SEQ ID NO: 17031 - protein, 6 aa, synthetic construct
PHERYE

SEQ ID NO: 17032 - protein, 6 aa, synthetic construct
PHERYF

SEQ ID NO: 17033 - protein, 6 aa, synthetic construct
PHERYW

SEQ ID NO: 17034 - protein, 6 aa, synthetic construct
PHERYY

SEQ ID NO: 17035 - protein, 6 aa, synthetic construct
PHERVD

SEQ ID NO: 17036 - protein, 6 aa, synthetic construct
PHERVE

SEQ ID NO: 17037 - protein, 6 aa, synthetic construct
PHERVF

SEQ ID NO: 17038 - protein, 6 aa, synthetic construct
PHERVW

SEQ ID NO: 17039 - protein, 6 aa, synthetic construct
PHERVY

SEQ ID NO: 17040 - protein, 6 aa, synthetic construct
PHENAD

SEQ ID NO: 17041 - protein, 6 aa, synthetic construct
PHENAE

SEQ ID NO: 17042 - protein, 6 aa, synthetic construct
PHENAF

SEQ ID NO: 17043 - protein, 6 aa, synthetic construct
PHENAW

SEQ ID NO: 17044 - protein, 6 aa, synthetic construct
PHENAY

SEQ ID NO: 17045 - protein, 6 aa, synthetic construct
PHENRD

SEQ ID NO: 17046 - protein, 6 aa, synthetic construct
PHENRE

SEQ ID NO: 17047 - protein, 6 aa, synthetic construct
PHENRF

SEQ ID NO: 17048 - protein, 6 aa, synthetic construct
PHENRW

SEQ ID NO: 17049 - protein, 6 aa, synthetic construct
PHENRY

SEQ ID NO: 17050 - protein, 6 aa, synthetic construct
PHENND

SEQ ID NO: 17051 - protein, 6 aa, synthetic construct
PHENNE

SEQ ID NO: 17052 - protein, 6 aa, synthetic construct
PHENNF

SEQ ID NO: 17053 - protein, 6 aa, synthetic construct
PHENNW

SEQ ID NO: 17054 - protein, 6 aa, synthetic construct
PHENNY

SEQ ID NO: 17055 - protein, 6 aa, synthetic construct
PHENDD

SEQ ID NO: 17056 - protein, 6 aa, synthetic construct
PHENDE

SEQ ID NO: 17057 - protein, 6 aa, synthetic construct
PHENDF

SEQ ID NO: 17058 - protein, 6 aa, synthetic construct
PHENDW

SEQ ID NO: 17059 - protein, 6 aa, synthetic construct
PHENDY

SEQ ID NO: 17060 - protein, 6 aa, synthetic construct
PHENCD

SEQ ID NO: 17061 - protein, 6 aa, synthetic construct
PHENCE

SEQ ID NO: 17062 - protein, 6 aa, synthetic construct
PHENCF

SEQ ID NO: 17063 - protein, 6 aa, synthetic construct
PHENCW

SEQ ID NO: 17064 - protein, 6 aa, synthetic construct
PHENCY

SEQ ID NO: 17065 - protein, 6 aa, synthetic construct
PHENQD

SEQ ID NO: 17066 - protein, 6 aa, synthetic construct
PHENQE

SEQ ID NO: 17067 - protein, 6 aa, synthetic construct
PHENQF

SEQ ID NO: 17068 - protein, 6 aa, synthetic construct
PHENQW

SEQ ID NO: 17069 - protein, 6 aa, synthetic construct
PHENQY

SEQ ID NO: 17070 - protein, 6 aa, synthetic construct
PHENED

SEQ ID NO: 17071 - protein, 6 aa, synthetic construct
PHENEE

SEQ ID NO: 17072 - protein, 6 aa, synthetic construct
PHENEF

SEQ ID NO: 17073 - protein, 6 aa, synthetic construct
PHENEW

SEQ ID NO: 17074 - protein, 6 aa, synthetic construct
PHENEY

SEQ ID NO: 17075 - protein, 6 aa, synthetic construct
PHENGD

SEQ ID NO: 17076 - protein, 6 aa, synthetic construct
PHENGE

SEQ ID NO: 17077 - protein, 6 aa, synthetic construct
PHENGF

SEQ ID NO: 17078 - protein, 6 aa, synthetic construct
PHENGW

SEQ ID NO: 17079 - protein, 6 aa, synthetic construct
PHENGY

SEQ ID NO: 17080 - protein, 6 aa, synthetic construct
PHENHD

SEQ ID NO: 17081 - protein, 6 aa, synthetic construct
PHENHE

SEQ ID NO: 17082 - protein, 6 aa, synthetic construct
PHENHF

SEQ ID NO: 17083 - protein, 6 aa, synthetic construct
PHENHW

SEQ ID NO: 17084 - protein, 6 aa, synthetic construct
PHENHY

SEQ ID NO: 17085 - protein, 6 aa, synthetic construct
PHENID

SEQ ID NO: 17086 - protein, 6 aa, synthetic construct
PHENIE

SEQ ID NO: 17087 - protein, 6 aa, synthetic construct
PHENIF

SEQ ID NO: 17088 - protein, 6 aa, synthetic construct
PHENIW

SEQ ID NO: 17089 - protein, 6 aa, synthetic construct
PHENIY

SEQ ID NO: 17090 - protein, 6 aa, synthetic construct
PHENLD

SEQ ID NO: 17091 - protein, 6 aa, synthetic construct
PHENLE

SEQ ID NO: 17092 - protein, 6 aa, synthetic construct
PHENLF

SEQ ID NO: 17093 - protein, 6 aa, synthetic construct
PHENLW

SEQ ID NO: 17094 - protein, 6 aa, synthetic construct
PHENLY

SEQ ID NO: 17095 - protein, 6 aa, synthetic construct
PHENKD

SEQ ID NO: 17096 - protein, 6 aa, synthetic construct
PHENKE

SEQ ID NO: 17097 - protein, 6 aa, synthetic construct
PHENKF

SEQ ID NO: 17098 - protein, 6 aa, synthetic construct
PHENKW

SEQ ID NO: 17099 - protein, 6 aa, synthetic construct
PHENKY

SEQ ID NO: 17100 - protein, 6 aa, synthetic construct
PHENMD

SEQ ID NO: 17101 - protein, 6 aa, synthetic construct
PHENME

SEQ ID NO: 17102 - protein, 6 aa, synthetic construct
PHENMF

SEQ ID NO: 17103 - protein, 6 aa, synthetic construct
PHENMW

SEQ ID NO: 17104 - protein, 6 aa, synthetic construct
PHENMY

SEQ ID NO: 17105 - protein, 6 aa, synthetic construct
PHENFD

SEQ ID NO: 17106 - protein, 6 aa, synthetic construct
PHENFE

SEQ ID NO: 17107 - protein, 6 aa, synthetic construct
PHENFF

SEQ ID NO: 17108 - protein, 6 aa, synthetic construct
PHENFW

SEQ ID NO: 17109 - protein, 6 aa, synthetic construct
PHENFY

SEQ ID NO: 17110 - protein, 6 aa, synthetic construct
PHENPD

SEQ ID NO: 17111 - protein, 6 aa, synthetic construct
PHENPE

SEQ ID NO: 17112 - protein, 6 aa, synthetic construct
PHENPF

SEQ ID NO: 17113 - protein, 6 aa, synthetic construct
PHENPW

SEQ ID NO: 17114 - protein, 6 aa, synthetic construct
PHENPY

SEQ ID NO: 17115 - protein, 6 aa, synthetic construct
PHENSD

SEQ ID NO: 17116 - protein, 6 aa, synthetic construct
PHENSE

SEQ ID NO: 17117 - protein, 6 aa, synthetic construct
PHENSF

SEQ ID NO: 17118 - protein, 6 aa, synthetic construct
PHENSW

SEQ ID NO: 17119 - protein, 6 aa, synthetic construct
PHENSY

SEQ ID NO: 17120 - protein, 6 aa, synthetic construct
PHENTD

SEQ ID NO: 17121 - protein, 6 aa, synthetic construct
PHENTE

SEQ ID NO: 17122 - protein, 6 aa, synthetic construct
PHENTF

SEQ ID NO: 17123 - protein, 6 aa, synthetic construct
PHENTW

SEQ ID NO: 17124 - protein, 6 aa, synthetic construct
PHENTY

SEQ ID NO: 17125 - protein, 6 aa, synthetic construct
PHENWD

SEQ ID NO: 17126 - protein, 6 aa, synthetic construct
PHENWE

SEQ ID NO: 17127 - protein, 6 aa, synthetic construct
PHENWF

SEQ ID NO: 17128 - protein, 6 aa, synthetic construct
PHENWW

SEQ ID NO: 17129 - protein, 6 aa, synthetic construct
PHENWY

SEQ ID NO: 17130 - protein, 6 aa, synthetic construct
PHENYD

SEQ ID NO: 17131 - protein, 6 aa, synthetic construct
PHENYE

SEQ ID NO: 17132 - protein, 6 aa, synthetic construct
PHENYF

SEQ ID NO: 17133 - protein, 6 aa, synthetic construct
PHENYW

SEQ ID NO: 17134 - protein, 6 aa, synthetic construct
PHENYY

SEQ ID NO: 17135 - protein, 6 aa, synthetic construct
PHENVD

SEQ ID NO: 17136 - protein, 6 aa, synthetic construct
PHENVE

SEQ ID NO: 17137 - protein, 6 aa, synthetic construct
PHENVF

SEQ ID NO: 17138 - protein, 6 aa, synthetic construct
PHENVW

SEQ ID NO: 17139 - protein, 6 aa, synthetic construct
PHENVY

SEQ ID NO: 17140 - protein, 6 aa, synthetic construct
PHEDAD

SEQ ID NO: 17141 - protein, 6 aa, synthetic construct
PHEDAE

SEQ ID NO: 17142 - protein, 6 aa, synthetic construct
PHEDAF

SEQ ID NO: 17143 - protein, 6 aa, synthetic construct
PHEDAW

SEQ ID NO: 17144 - protein, 6 aa, synthetic construct
PHEDAY

SEQ ID NO: 17145 - protein, 6 aa, synthetic construct
PHEDRD

SEQ ID NO: 17146 - protein, 6 aa, synthetic construct
PHEDRE

SEQ ID NO: 17147 - protein, 6 aa, synthetic construct
PHEDRF

SEQ ID NO: 17148 - protein, 6 aa, synthetic construct
PHEDRW

SEQ ID NO: 17149 - protein, 6 aa, synthetic construct
PHEDRY

SEQ ID NO: 17150 - protein, 6 aa, synthetic construct
PHEDND

SEQ ID NO: 17151 - protein, 6 aa, synthetic construct
PHEDNE

SEQ ID NO: 17152 - protein, 6 aa, synthetic construct
PHEDNF

SEQ ID NO: 17153 - protein, 6 aa, synthetic construct
PHEDNW

SEQ ID NO: 17154 - protein, 6 aa, synthetic construct
PHEDNY

SEQ ID NO: 17155 - protein, 6 aa, synthetic construct
PHEDDD

SEQ ID NO: 17156 - protein, 6 aa, synthetic construct
PHEDDE

SEQ ID NO: 17157 - protein, 6 aa, synthetic construct
PHEDDF

SEQ ID NO: 17158 - protein, 6 aa, synthetic construct
PHEDDW

SEQ ID NO: 17159 - protein, 6 aa, synthetic construct
PHEDDY

SEQ ID NO: 17160 - protein, 6 aa, synthetic construct
PHEDCD

SEQ ID NO: 17161 - protein, 6 aa, synthetic construct
PHEDCE

SEQ ID NO: 17162 - protein, 6 aa, synthetic construct
PHEDCF

SEQ ID NO: 17163 - protein, 6 aa, synthetic construct
PHEDCW

SEQ ID NO: 17164 - protein, 6 aa, synthetic construct
PHEDCY

SEQ ID NO: 17165 - protein, 6 aa, synthetic construct
PHEDQD

SEQ ID NO: 17166 - protein, 6 aa, synthetic construct
PHEDQE

SEQ ID NO: 17167 - protein, 6 aa, synthetic construct
PHEDQF

SEQ ID NO: 17168 - protein, 6 aa, synthetic construct
PHEDQW

SEQ ID NO: 17169 - protein, 6 aa, synthetic construct
PHEDQY

SEQ ID NO: 17170 - protein, 6 aa, synthetic construct
PHEDED

SEQ ID NO: 17171 - protein, 6 aa, synthetic construct
PHEDEE

SEQ ID NO: 17172 - protein, 6 aa, synthetic construct
PHEDEF

SEQ ID NO: 17173 - protein, 6 aa, synthetic construct
PHEDEW

SEQ ID NO: 17174 - protein, 6 aa, synthetic construct
PHEDEY

SEQ ID NO: 17175 - protein, 6 aa, synthetic construct
PHEDGD

SEQ ID NO: 17176 - protein, 6 aa, synthetic construct
PHEDGE

SEQ ID NO: 17177 - protein, 6 aa, synthetic construct
PHEDGF

SEQ ID NO: 17178 - protein, 6 aa, synthetic construct
PHEDGW

SEQ ID NO: 17179 - protein, 6 aa, synthetic construct
PHEDGY

SEQ ID NO: 17180 - protein, 6 aa, synthetic construct
PHEDHD

SEQ ID NO: 17181 - protein, 6 aa, synthetic construct
PHEDHE

SEQ ID NO: 17182 - protein, 6 aa, synthetic construct
PHEDHF

SEQ ID NO: 17183 - protein, 6 aa, synthetic construct
PHEDHW

SEQ ID NO: 17184 - protein, 6 aa, synthetic construct
PHEDHY

SEQ ID NO: 17185 - protein, 6 aa, synthetic construct
PHEDID

SEQ ID NO: 17186 - protein, 6 aa, synthetic construct
PHEDIE

SEQ ID NO: 17187 - protein, 6 aa, synthetic construct
PHEDIF

SEQ ID NO: 17188 - protein, 6 aa, synthetic construct
PHEDIW

SEQ ID NO: 17189 - protein, 6 aa, synthetic construct
PHEDIY

SEQ ID NO: 17190 - protein, 6 aa, synthetic construct
PHEDLD

SEQ ID NO: 17191 - protein, 6 aa, synthetic construct
PHEDLE

SEQ ID NO: 17192 - protein, 6 aa, synthetic construct
PHEDLF

SEQ ID NO: 17193 - protein, 6 aa, synthetic construct
PHEDLW

SEQ ID NO: 17194 - protein, 6 aa, synthetic construct
PHEDLY

SEQ ID NO: 17195 - protein, 6 aa, synthetic construct
PHEDKD

SEQ ID NO: 17196 - protein, 6 aa, synthetic construct
PHEDKE

SEQ ID NO: 17197 - protein, 6 aa, synthetic construct
PHEDKF

SEQ ID NO: 17198 - protein, 6 aa, synthetic construct
PHEDKW

SEQ ID NO: 17199 - protein, 6 aa, synthetic construct
PHEDKY

SEQ ID NO: 17200 - protein, 6 aa, synthetic construct
PHEDMD

SEQ ID NO: 17201 - protein, 6 aa, synthetic construct
PHEDME

SEQ ID NO: 17202 - protein, 6 aa, synthetic construct
PHEDMF

SEQ ID NO: 17203 - protein, 6 aa, synthetic construct
PHEDMW

SEQ ID NO: 17204 - protein, 6 aa, synthetic construct
PHEDMY

SEQ ID NO: 17205 - protein, 6 aa, synthetic construct
PHEDFD

SEQ ID NO: 17206 - protein, 6 aa, synthetic construct
PHEDFE

SEQ ID NO: 17207 - protein, 6 aa, synthetic construct
PHEDFF

SEQ ID NO: 17208 - protein, 6 aa, synthetic construct
PHEDFW

SEQ ID NO: 17209 - protein, 6 aa, synthetic construct
PHEDFY

SEQ ID NO: 17210 - protein, 6 aa, synthetic construct
PHEDPD

SEQ ID NO: 17211 - protein, 6 aa, synthetic construct
PHEDPE

SEQ ID NO: 17212 - protein, 6 aa, synthetic construct
PHEDPF

SEQ ID NO: 17213 - protein, 6 aa, synthetic construct
PHEDPW

SEQ ID NO: 17214 - protein, 6 aa, synthetic construct
PHEDPY

SEQ ID NO: 17215 - protein, 6 aa, synthetic construct
PHEDSD

SEQ ID NO: 17216 - protein, 6 aa, synthetic construct
PHEDSE

SEQ ID NO: 17217 - protein, 6 aa, synthetic construct
PHEDSF

SEQ ID NO: 17218 - protein, 6 aa, synthetic construct
PHEDSW

SEQ ID NO: 17219 - protein, 6 aa, synthetic construct
PHEDSY

SEQ ID NO: 17220 - protein, 6 aa, synthetic construct
PHEDTD

SEQ ID NO: 17221 - protein, 6 aa, synthetic construct
PHEDTE

SEQ ID NO: 17222 - protein, 6 aa, synthetic construct
PHEDTF

SEQ ID NO: 17223 - protein, 6 aa, synthetic construct
PHEDTW

SEQ ID NO: 17224 - protein, 6 aa, synthetic construct
PHEDTY

SEQ ID NO: 17225 - protein, 6 aa, synthetic construct
PHEDWD

SEQ ID NO: 17226 - protein, 6 aa, synthetic construct
PHEDWE

SEQ ID NO: 17227 - protein, 6 aa, synthetic construct
PHEDWF

SEQ ID NO: 17228 - protein, 6 aa, synthetic construct
PHEDWW

SEQ ID NO: 17229 - protein, 6 aa, synthetic construct
PHEDWY

SEQ ID NO: 17230 - protein, 6 aa, synthetic construct
PHEDYD

SEQ ID NO: 17231 - protein, 6 aa, synthetic construct
PHEDYE

SEQ ID NO: 17232 - protein, 6 aa, synthetic construct
PHEDYF

SEQ ID NO: 17233 - protein, 6 aa, synthetic construct
PHEDYW

SEQ ID NO: 17234 - protein, 6 aa, synthetic construct
PHEDYY

SEQ ID NO: 17235 - protein, 6 aa, synthetic construct
PHEDVD

SEQ ID NO: 17236 - protein, 6 aa, synthetic construct
PHEDVE

SEQ ID NO: 17237 - protein, 6 aa, synthetic construct
PHEDVF

SEQ ID NO: 17238 - protein, 6 aa, synthetic construct
PHEDVW

SEQ ID NO: 17239 - protein, 6 aa, synthetic construct
PHEDVY

SEQ ID NO: 17240 - protein, 6 aa, synthetic construct
PHECAD

SEQ ID NO: 17241 - protein, 6 aa, synthetic construct
PHECAE

SEQ ID NO: 17242 - protein, 6 aa, synthetic construct
PHECAF

SEQ ID NO: 17243 - protein, 6 aa, synthetic construct
PHECAW

SEQ ID NO: 17244 - protein, 6 aa, synthetic construct
PHECAY

SEQ ID NO: 17245 - protein, 6 aa, synthetic construct
PHECRD

SEQ ID NO: 17246 - protein, 6 aa, synthetic construct
PHECRE

SEQ ID NO: 17247 - protein, 6 aa, synthetic construct
PHECRF

SEQ ID NO: 17248 - protein, 6 aa, synthetic construct
PHECRW

SEQ ID NO: 17249 - protein, 6 aa, synthetic construct
PHECRY

SEQ ID NO: 17250 - protein, 6 aa, synthetic construct
PHECND

SEQ ID NO: 17251 - protein, 6 aa, synthetic construct
PHECNE

SEQ ID NO: 17252 - protein, 6 aa, synthetic construct
PHECNF

SEQ ID NO: 17253 - protein, 6 aa, synthetic construct
PHECNW

SEQ ID NO: 17254 - protein, 6 aa, synthetic construct
PHECNY

SEQ ID NO: 17255 - protein, 6 aa, synthetic construct
PHECDD

SEQ ID NO: 17256 - protein, 6 aa, synthetic construct
PHECDE

SEQ ID NO: 17257 - protein, 6 aa, synthetic construct
PHECDF

SEQ ID NO: 17258 - protein, 6 aa, synthetic construct
PHECDW

SEQ ID NO: 17259 - protein, 6 aa, synthetic construct
PHECDY

SEQ ID NO: 17260 - protein, 6 aa, synthetic construct
PHECCD

SEQ ID NO: 17261 - protein, 6 aa, synthetic construct
PHECCE

SEQ ID NO: 17262 - protein, 6 aa, synthetic construct
PHECCF

SEQ ID NO: 17263 - protein, 6 aa, synthetic construct
PHECCW

SEQ ID NO: 17264 - protein, 6 aa, synthetic construct
PHECCY

SEQ ID NO: 17265 - protein, 6 aa, synthetic construct
PHECQD

SEQ ID NO: 17266 - protein, 6 aa, synthetic construct
PHECQE

SEQ ID NO: 17267 - protein, 6 aa, synthetic construct
PHECQF

SEQ ID NO: 17268 - protein, 6 aa, synthetic construct
PHECQW

SEQ ID NO: 17269 - protein, 6 aa, synthetic construct
PHECQY

SEQ ID NO: 17270 - protein, 6 aa, synthetic construct
PHECED

SEQ ID NO: 17271 - protein, 6 aa, synthetic construct
PHECEE

SEQ ID NO: 17272 - protein, 6 aa, synthetic construct
PHECEF

SEQ ID NO: 17273 - protein, 6 aa, synthetic construct
PHECEW

SEQ ID NO: 17274 - protein, 6 aa, synthetic construct
PHECEY

SEQ ID NO: 17275 - protein, 6 aa, synthetic construct
PHECGD

SEQ ID NO: 17276 - protein, 6 aa, synthetic construct
PHECGE

SEQ ID NO: 17277 - protein, 6 aa, synthetic construct
PHECGF

SEQ ID NO: 17278 - protein, 6 aa, synthetic construct
PHECGW

SEQ ID NO: 17279 - protein, 6 aa, synthetic construct
PHECGY

SEQ ID NO: 17280 - protein, 6 aa, synthetic construct
PHECHD

SEQ ID NO: 17281 - protein, 6 aa, synthetic construct
PHECHE

SEQ ID NO: 17282 - protein, 6 aa, synthetic construct
PHECHF

SEQ ID NO: 17283 - protein, 6 aa, synthetic construct
PHECHW

SEQ ID NO: 17284 - protein, 6 aa, synthetic construct
PHECHY

SEQ ID NO: 17285 - protein, 6 aa, synthetic construct
PHECID

SEQ ID NO: 17286 - protein, 6 aa, synthetic construct
PHECIE

SEQ ID NO: 17287 - protein, 6 aa, synthetic construct
PHECIF

SEQ ID NO: 17288 - protein, 6 aa, synthetic construct
PHECIW

SEQ ID NO: 17289 - protein, 6 aa, synthetic construct
PHECIY

SEQ ID NO: 17290 - protein, 6 aa, synthetic construct
PHECLD

SEQ ID NO: 17291 - protein, 6 aa, synthetic construct
PHECLE

SEQ ID NO: 17292 - protein, 6 aa, synthetic construct
PHECLF

SEQ ID NO: 17293 - protein, 6 aa, synthetic construct
PHECLW

SEQ ID NO: 17294 - protein, 6 aa, synthetic construct
PHECLY

SEQ ID NO: 17295 - protein, 6 aa, synthetic construct
PHECKD

SEQ ID NO: 17296 - protein, 6 aa, synthetic construct
PHECKE

SEQ ID NO: 17297 - protein, 6 aa, synthetic construct
PHECKF

SEQ ID NO: 17298 - protein, 6 aa, synthetic construct
PHECKW

SEQ ID NO: 17299 - protein, 6 aa, synthetic construct
PHECKY

SEQ ID NO: 17300 - protein, 6 aa, synthetic construct
PHECMD

SEQ ID NO: 17301 - protein, 6 aa, synthetic construct
PHECME

SEQ ID NO: 17302 - protein, 6 aa, synthetic construct
PHECMF

SEQ ID NO: 17303 - protein, 6 aa, synthetic construct
PHECMW

SEQ ID NO: 17304 - protein, 6 aa, synthetic construct
PHECMY

SEQ ID NO: 17305 - protein, 6 aa, synthetic construct
PHECFD

SEQ ID NO: 17306 - protein, 6 aa, synthetic construct
PHECFE

SEQ ID NO: 17307 - protein, 6 aa, synthetic construct
PHECFF

SEQ ID NO: 17308 - protein, 6 aa, synthetic construct
PHECFW

SEQ ID NO: 17309 - protein, 6 aa, synthetic construct
PHECFY

SEQ ID NO: 17310 - protein, 6 aa, synthetic construct
PHECPD

SEQ ID NO: 17311 - protein, 6 aa, synthetic construct
PHECPE

SEQ ID NO: 17312 - protein, 6 aa, synthetic construct
PHECPF

SEQ ID NO: 17313 - protein, 6 aa, synthetic construct
PHECPW

SEQ ID NO: 17314 - protein, 6 aa, synthetic construct
PHECPY

SEQ ID NO: 17315 - protein, 6 aa, synthetic construct
PHECSD

SEQ ID NO: 17316 - protein, 6 aa, synthetic construct
PHECSE

SEQ ID NO: 17317 - protein, 6 aa, synthetic construct
PHECSF

SEQ ID NO: 17318 - protein, 6 aa, synthetic construct
PHECSW

SEQ ID NO: 17319 - protein, 6 aa, synthetic construct
PHECSY

SEQ ID NO: 17320 - protein, 6 aa, synthetic construct
PHECTD

SEQ ID NO: 17321 - protein, 6 aa, synthetic construct
PHECTE

SEQ ID NO: 17322 - protein, 6 aa, synthetic construct
PHECTF

SEQ ID NO: 17323 - protein, 6 aa, synthetic construct
PHECTW

SEQ ID NO: 17324 - protein, 6 aa, synthetic construct
PHECTY

SEQ ID NO: 17325 - protein, 6 aa, synthetic construct
PHECWD

SEQ ID NO: 17326 - protein, 6 aa, synthetic construct
PHECWE

SEQ ID NO: 17327 - protein, 6 aa, synthetic construct
PHECWF

SEQ ID NO: 17328 - protein, 6 aa, synthetic construct
PHECWW

SEQ ID NO: 17329 - protein, 6 aa, synthetic construct
PHECWY

SEQ ID NO: 17330 - protein, 6 aa, synthetic construct
PHECYD

SEQ ID NO: 17331 - protein, 6 aa, synthetic construct
PHECYE

SEQ ID NO: 17332 - protein, 6 aa, synthetic construct
PHECYF

SEQ ID NO: 17333 - protein, 6 aa, synthetic construct
PHECYW

SEQ ID NO: 17334 - protein, 6 aa, synthetic construct
PHECYY

SEQ ID NO: 17335 - protein, 6 aa, synthetic construct
PHECVD

SEQ ID NO: 17336 - protein, 6 aa, synthetic construct
PHECVE

SEQ ID NO: 17337 - protein, 6 aa, synthetic construct
PHECVF

SEQ ID NO: 17338 - protein, 6 aa, synthetic construct
PHECVW

SEQ ID NO: 17339 - protein, 6 aa, synthetic construct
PHECVY

SEQ ID NO: 17340 - protein, 6 aa, synthetic construct
PHEQAD

SEQ ID NO: 17341 - protein, 6 aa, synthetic construct
PHEQAE

SEQ ID NO: 17342 - protein, 6 aa, synthetic construct
PHEQAF

SEQ ID NO: 17343 - protein, 6 aa, synthetic construct
PHEQAW

SEQ ID NO: 17344 - protein, 6 aa, synthetic construct
PHEQAY

SEQ ID NO: 17345 - protein, 6 aa, synthetic construct
PHEQRD

SEQ ID NO: 17346 - protein, 6 aa, synthetic construct
PHEQRE

SEQ ID NO: 17347 - protein, 6 aa, synthetic construct
PHEQRF

SEQ ID NO: 17348 - protein, 6 aa, synthetic construct
PHEQRW

SEQ ID NO: 17349 - protein, 6 aa, synthetic construct
PHEQRY

SEQ ID NO: 17350 - protein, 6 aa, synthetic construct
PHEQND

SEQ ID NO: 17351 - protein, 6 aa, synthetic construct
PHEQNE

SEQ ID NO: 17352 - protein, 6 aa, synthetic construct
PHEQNF

SEQ ID NO: 17353 - protein, 6 aa, synthetic construct
PHEQNW

SEQ ID NO: 17354 - protein, 6 aa, synthetic construct
PHEQNY

SEQ ID NO: 17355 - protein, 6 aa, synthetic construct
PHEQDD

SEQ ID NO: 17356 - protein, 6 aa, synthetic construct
PHEQDE

SEQ ID NO: 17357 - protein, 6 aa, synthetic construct
PHEQDF

SEQ ID NO: 17358 - protein, 6 aa, synthetic construct
PHEQDW

SEQ ID NO: 17359 - protein, 6 aa, synthetic construct
PHEQDY

SEQ ID NO: 17360 - protein, 6 aa, synthetic construct
PHEQCD

SEQ ID NO: 17361 - protein, 6 aa, synthetic construct
PHEQCE

SEQ ID NO: 17362 - protein, 6 aa, synthetic construct
PHEQCF

SEQ ID NO: 17363 - protein, 6 aa, synthetic construct
PHEQCW

SEQ ID NO: 17364 - protein, 6 aa, synthetic construct
PHEQCY

SEQ ID NO: 17365 - protein, 6 aa, synthetic construct
PHEQQD

SEQ ID NO: 17366 - protein, 6 aa, synthetic construct
PHEQQE

SEQ ID NO: 17367 - protein, 6 aa, synthetic construct
PHEQQF

SEQ ID NO: 17368 - protein, 6 aa, synthetic construct
PHEQQW

SEQ ID NO: 17369 - protein, 6 aa, synthetic construct
PHEQQY

SEQ ID NO: 17370 - protein, 6 aa, synthetic construct
PHEQED

SEQ ID NO: 17371 - protein, 6 aa, synthetic construct
PHEQEE

SEQ ID NO: 17372 - protein, 6 aa, synthetic construct
PHEQEF

SEQ ID NO: 17373 - protein, 6 aa, synthetic construct
PHEQEW

SEQ ID NO: 17374 - protein, 6 aa, synthetic construct
PHEQEY

SEQ ID NO: 17375 - protein, 6 aa, synthetic construct
PHEQGD

SEQ ID NO: 17376 - protein, 6 aa, synthetic construct
PHEQGE

SEQ ID NO: 17377 - protein, 6 aa, synthetic construct
PHEQGF

SEQ ID NO: 17378 - protein, 6 aa, synthetic construct
PHEQGW

SEQ ID NO: 17379 - protein, 6 aa, synthetic construct
PHEQGY

SEQ ID NO: 17380 - protein, 6 aa, synthetic construct
PHEQHD

SEQ ID NO: 17381 - protein, 6 aa, synthetic construct
PHEQHE

SEQ ID NO: 17382 - protein, 6 aa, synthetic construct
PHEQHF

SEQ ID NO: 17383 - protein, 6 aa, synthetic construct
PHEQHW

SEQ ID NO: 17384 - protein, 6 aa, synthetic construct
PHEQHY

SEQ ID NO: 17385 - protein, 6 aa, synthetic construct
PHEQID

SEQ ID NO: 17386 - protein, 6 aa, synthetic construct
PHEQIE

SEQ ID NO: 17387 - protein, 6 aa, synthetic construct
PHEQIF

SEQ ID NO: 17388 - protein, 6 aa, synthetic construct
PHEQIW

SEQ ID NO: 17389 - protein, 6 aa, synthetic construct
PHEQIY

SEQ ID NO: 17390 - protein, 6 aa, synthetic construct
PHEQLD

SEQ ID NO: 17391 - protein, 6 aa, synthetic construct
PHEQLE

SEQ ID NO: 17392 - protein, 6 aa, synthetic construct
PHEQLF

SEQ ID NO: 17393 - protein, 6 aa, synthetic construct
PHEQLW

SEQ ID NO: 17394 - protein, 6 aa, synthetic construct
PHEQLY

SEQ ID NO: 17395 - protein, 6 aa, synthetic construct
PHEQKD

SEQ ID NO: 17396 - protein, 6 aa, synthetic construct
PHEQKE

SEQ ID NO: 17397 - protein, 6 aa, synthetic construct
PHEQKF

SEQ ID NO: 17398 - protein, 6 aa, synthetic construct
PHEQKW

SEQ ID NO: 17399 - protein, 6 aa, synthetic construct
PHEQKY

SEQ ID NO: 17400 - protein, 6 aa, synthetic construct
PHEQMD

SEQ ID NO: 17401 - protein, 6 aa, synthetic construct
PHEQME

SEQ ID NO: 17402 - protein, 6 aa, synthetic construct
PHEQMF

SEQ ID NO: 17403 - protein, 6 aa, synthetic construct
PHEQMW

SEQ ID NO: 17404 - protein, 6 aa, synthetic construct
PHEQMY

SEQ ID NO: 17405 - protein, 6 aa, synthetic construct
PHEQFD

SEQ ID NO: 17406 - protein, 6 aa, synthetic construct
PHEQFE

SEQ ID NO: 17407 - protein, 6 aa, synthetic construct
PHEQFF

SEQ ID NO: 17408 - protein, 6 aa, synthetic construct
PHEQFW

SEQ ID NO: 17409 - protein, 6 aa, synthetic construct
PHEQFY

SEQ ID NO: 17410 - protein, 6 aa, synthetic construct
PHEQPD

SEQ ID NO: 17411 - protein, 6 aa, synthetic construct
PHEQPE

SEQ ID NO: 17412 - protein, 6 aa, synthetic construct
PHEQPF

SEQ ID NO: 17413 - protein, 6 aa, synthetic construct
PHEQPW

SEQ ID NO: 17414 - protein, 6 aa, synthetic construct
PHEQPY

SEQ ID NO: 17415 - protein, 6 aa, synthetic construct
PHEQSD

SEQ ID NO: 17416 - protein, 6 aa, synthetic construct
PHEQSE

SEQ ID NO: 17417 - protein, 6 aa, synthetic construct
PHEQSF

SEQ ID NO: 17418 - protein, 6 aa, synthetic construct
PHEQSW

SEQ ID NO: 17419 - protein, 6 aa, synthetic construct
PHEQSY

SEQ ID NO: 17420 - protein, 6 aa, synthetic construct
PHEQTD

SEQ ID NO: 17421 - protein, 6 aa, synthetic construct
PHEQTE

SEQ ID NO: 17422 - protein, 6 aa, synthetic construct
PHEQTF

SEQ ID NO: 17423 - protein, 6 aa, synthetic construct
PHEQTW

SEQ ID NO: 17424 - protein, 6 aa, synthetic construct
PHEQTY

SEQ ID NO: 17425 - protein, 6 aa, synthetic construct
PHEQWD

SEQ ID NO: 17426 - protein, 6 aa, synthetic construct
PHEQWE

SEQ ID NO: 17427 - protein, 6 aa, synthetic construct
PHEQWF

SEQ ID NO: 17428 - protein, 6 aa, synthetic construct
PHEQWW

SEQ ID NO: 17429 - protein, 6 aa, synthetic construct
PHEQWY

SEQ ID NO: 17430 - protein, 6 aa, synthetic construct
PHEQYD

SEQ ID NO: 17431 - protein, 6 aa, synthetic construct
PHEQYE

SEQ ID NO: 17432 - protein, 6 aa, synthetic construct
PHEQYF

SEQ ID NO: 17433 - protein, 6 aa, synthetic construct
PHEQYW

SEQ ID NO: 17434 - protein, 6 aa, synthetic construct
PHEQYY

SEQ ID NO: 17435 - protein, 6 aa, synthetic construct
PHEQVD

SEQ ID NO: 17436 - protein, 6 aa, synthetic construct
PHEQVE

SEQ ID NO: 17437 - protein, 6 aa, synthetic construct
PHEQVF

SEQ ID NO: 17438 - protein, 6 aa, synthetic construct
PHEQVW

SEQ ID NO: 17439 - protein, 6 aa, synthetic construct
PHEQVY

SEQ ID NO: 17440 - protein, 6 aa, synthetic construct
PHEEAD

SEQ ID NO: 17441 - protein, 6 aa, synthetic construct
PHEEAE

SEQ ID NO: 17442 - protein, 6 aa, synthetic construct
PHEEAF

SEQ ID NO: 17443 - protein, 6 aa, synthetic construct
PHEEAW

SEQ ID NO: 17444 - protein, 6 aa, synthetic construct
PHEEAY

SEQ ID NO: 17445 - protein, 6 aa, synthetic construct
PHEERD

SEQ ID NO: 17446 - protein, 6 aa, synthetic construct
PHEERE

SEQ ID NO: 17447 - protein, 6 aa, synthetic construct
PHEERF

SEQ ID NO: 17448 - protein, 6 aa, synthetic construct
PHEERW

SEQ ID NO: 17449 - protein, 6 aa, synthetic construct
PHEERY

SEQ ID NO: 17450 - protein, 6 aa, synthetic construct
PHEEND

SEQ ID NO: 17451 - protein, 6 aa, synthetic construct
PHEENE

SEQ ID NO: 17452 - protein, 6 aa, synthetic construct
PHEENF

SEQ ID NO: 17453 - protein, 6 aa, synthetic construct
PHEENW

SEQ ID NO: 17454 - protein, 6 aa, synthetic construct
PHEENY

SEQ ID NO: 17455 - protein, 6 aa, synthetic construct
PHEEDD

SEQ ID NO: 17456 - protein, 6 aa, synthetic construct
PHEEDE

SEQ ID NO: 17457 - protein, 6 aa, synthetic construct
PHEEDF

SEQ ID NO: 17458 - protein, 6 aa, synthetic construct
PHEEDW

SEQ ID NO: 17459 - protein, 6 aa, synthetic construct
PHEEDY

SEQ ID NO: 17460 - protein, 6 aa, synthetic construct
PHEECD

SEQ ID NO: 17461 - protein, 6 aa, synthetic construct
PHEECE

SEQ ID NO: 17462 - protein, 6 aa, synthetic construct
PHEECF

SEQ ID NO: 17463 - protein, 6 aa, synthetic construct
PHEECW

SEQ ID NO: 17464 - protein, 6 aa, synthetic construct
PHEECY

SEQ ID NO: 17465 - protein, 6 aa, synthetic construct
PHEEQD

SEQ ID NO: 17466 - protein, 6 aa, synthetic construct
PHEEQE

SEQ ID NO: 17467 - protein, 6 aa, synthetic construct
PHEEQF

SEQ ID NO: 17468 - protein, 6 aa, synthetic construct
PHEEQW

SEQ ID NO: 17469 - protein, 6 aa, synthetic construct
PHEEQY

SEQ ID NO: 17470 - protein, 6 aa, synthetic construct
PHEEED

SEQ ID NO: 17471 - protein, 6 aa, synthetic construct
PHEEEE

SEQ ID NO: 17472 - protein, 6 aa, synthetic construct
PHEEEF

SEQ ID NO: 17473 - protein, 6 aa, synthetic construct
PHEEEW

SEQ ID NO: 17474 - protein, 6 aa, synthetic construct
PHEEEY

SEQ ID NO: 17475 - protein, 6 aa, synthetic construct
PHEEGD

SEQ ID NO: 17476 - protein, 6 aa, synthetic construct
PHEEGE

SEQ ID NO: 17477 - protein, 6 aa, synthetic construct
PHEEGF

SEQ ID NO: 17478 - protein, 6 aa, synthetic construct
PHEEGW

SEQ ID NO: 17479 - protein, 6 aa, synthetic construct
PHEEGY

SEQ ID NO: 17480 - protein, 6 aa, synthetic construct
PHEEHD

SEQ ID NO: 17481 - protein, 6 aa, synthetic construct
PHEEHE

SEQ ID NO: 17482 - protein, 6 aa, synthetic construct
PHEEHF

SEQ ID NO: 17483 - protein, 6 aa, synthetic construct
PHEEHW

SEQ ID NO: 17484 - protein, 6 aa, synthetic construct
PHEEHY

SEQ ID NO: 17485 - protein, 6 aa, synthetic construct
PHEEID

SEQ ID NO: 17486 - protein, 6 aa, synthetic construct
PHEEIE

SEQ ID NO: 17487 - protein, 6 aa, synthetic construct
PHEEIF

SEQ ID NO: 17488 - protein, 6 aa, synthetic construct
PHEEIW

SEQ ID NO: 17489 - protein, 6 aa, synthetic construct
PHEEIY

SEQ ID NO: 17490 - protein, 6 aa, synthetic construct
PHEELD

SEQ ID NO: 17491 - protein, 6 aa, synthetic construct
PHEELE

SEQ ID NO: 17492 - protein, 6 aa, synthetic construct
PHEELF

SEQ ID NO: 17493 - protein, 6 aa, synthetic construct
PHEELW

SEQ ID NO: 17494 - protein, 6 aa, synthetic construct
PHEELY

SEQ ID NO: 17495 - protein, 6 aa, synthetic construct
PHEEKD

SEQ ID NO: 17496 - protein, 6 aa, synthetic construct
PHEEKE

SEQ ID NO: 17497 - protein, 6 aa, synthetic construct
PHEEKF

SEQ ID NO: 17498 - protein, 6 aa, synthetic construct
PHEEKW

SEQ ID NO: 17499 - protein, 6 aa, synthetic construct
PHEEKY

SEQ ID NO: 17500 - protein, 6 aa, synthetic construct
PHEEMD

SEQ ID NO: 17501 - protein, 6 aa, synthetic construct
PHEEME

SEQ ID NO: 17502 - protein, 6 aa, synthetic construct
PHEEMF

SEQ ID NO: 17503 - protein, 6 aa, synthetic construct
PHEEMW

SEQ ID NO: 17504 - protein, 6 aa, synthetic construct
PHEEMY

SEQ ID NO: 17505 - protein, 6 aa, synthetic construct
PHEEFD

SEQ ID NO: 17506 - protein, 6 aa, synthetic construct
PHEEFE

SEQ ID NO: 17507 - protein, 6 aa, synthetic construct
PHEEFF

SEQ ID NO: 17508 - protein, 6 aa, synthetic construct
PHEEFW

SEQ ID NO: 17509 - protein, 6 aa, synthetic construct
PHEEFY

SEQ ID NO: 17510 - protein, 6 aa, synthetic construct
PHEEPD

SEQ ID NO: 17511 - protein, 6 aa, synthetic construct
PHEEPE

SEQ ID NO: 17512 - protein, 6 aa, synthetic construct
PHEEPF

SEQ ID NO: 17513 - protein, 6 aa, synthetic construct
PHEEPW

SEQ ID NO: 17514 - protein, 6 aa, synthetic construct
PHEEPY

SEQ ID NO: 17515 - protein, 6 aa, synthetic construct
PHEESD

SEQ ID NO: 17516 - protein, 6 aa, synthetic construct
PHEESE

SEQ ID NO: 17517 - protein, 6 aa, synthetic construct
PHEESF

SEQ ID NO: 17518 - protein, 6 aa, synthetic construct
PHEESW

SEQ ID NO: 17519 - protein, 6 aa, synthetic construct
PHEESY

SEQ ID NO: 17520 - protein, 6 aa, synthetic construct
PHEETD

SEQ ID NO: 17521 - protein, 6 aa, synthetic construct
PHEETE

SEQ ID NO: 17522 - protein, 6 aa, synthetic construct
PHEETF

SEQ ID NO: 17523 - protein, 6 aa, synthetic construct
PHEETW

SEQ ID NO: 17524 - protein, 6 aa, synthetic construct
PHEETY

SEQ ID NO: 17525 - protein, 6 aa, synthetic construct
PHEEWD

SEQ ID NO: 17526 - protein, 6 aa, synthetic construct
PHEEWE

SEQ ID NO: 17527 - protein, 6 aa, synthetic construct
PHEEWF

SEQ ID NO: 17528 - protein, 6 aa, synthetic construct
PHEEWW

SEQ ID NO: 17529 - protein, 6 aa, synthetic construct
PHEEWY

SEQ ID NO: 17530 - protein, 6 aa, synthetic construct
PHEEYD

SEQ ID NO: 17531 - protein, 6 aa, synthetic construct
PHEEYE

SEQ ID NO: 17532 - protein, 6 aa, synthetic construct
PHEEYF

SEQ ID NO: 17533 - protein, 6 aa, synthetic construct
PHEEYW

SEQ ID NO: 17534 - protein, 6 aa, synthetic construct
PHEEYY

SEQ ID NO: 17535 - protein, 6 aa, synthetic construct
PHEEVD

SEQ ID NO: 17536 - protein, 6 aa, synthetic construct
PHEEVE

SEQ ID NO: 17537 - protein, 6 aa, synthetic construct
PHEEVF

SEQ ID NO: 17538 - protein, 6 aa, synthetic construct
PHEEVW

SEQ ID NO: 17539 - protein, 6 aa, synthetic construct
PHEEVY

SEQ ID NO: 17540 - protein, 6 aa, synthetic construct
PHEGAD

SEQ ID NO: 17541 - protein, 6 aa, synthetic construct
PHEGAE

SEQ ID NO: 17542 - protein, 6 aa, synthetic construct
PHEGAF

SEQ ID NO: 17543 - protein, 6 aa, synthetic construct
PHEGAW

SEQ ID NO: 17544 - protein, 6 aa, synthetic construct
PHEGAY

SEQ ID NO: 17545 - protein, 6 aa, synthetic construct
PHEGRD

SEQ ID NO: 17546 - protein, 6 aa, synthetic construct
PHEGRE

SEQ ID NO: 17547 - protein, 6 aa, synthetic construct
PHEGRF

SEQ ID NO: 17548 - protein, 6 aa, synthetic construct
PHEGRW

SEQ ID NO: 17549 - protein, 6 aa, synthetic construct
PHEGRY

SEQ ID NO: 17550 - protein, 6 aa, synthetic construct
PHEGND

SEQ ID NO: 17551 - protein, 6 aa, synthetic construct
PHEGNE

SEQ ID NO: 17552 - protein, 6 aa, synthetic construct
PHEGNF

SEQ ID NO: 17553 - protein, 6 aa, synthetic construct
PHEGNW

SEQ ID NO: 17554 - protein, 6 aa, synthetic construct
PHEGNY

SEQ ID NO: 17555 - protein, 6 aa, synthetic construct
PHEGDD

SEQ ID NO: 17556 - protein, 6 aa, synthetic construct
PHEGDE

SEQ ID NO: 17557 - protein, 6 aa, synthetic construct
PHEGDF

SEQ ID NO: 17558 - protein, 6 aa, synthetic construct
PHEGDW

SEQ ID NO: 17559 - protein, 6 aa, synthetic construct
PHEGDY

SEQ ID NO: 17560 - protein, 6 aa, synthetic construct
PHEGCD

SEQ ID NO: 17561 - protein, 6 aa, synthetic construct
PHEGCE

SEQ ID NO: 17562 - protein, 6 aa, synthetic construct
PHEGCF

SEQ ID NO: 17563 - protein, 6 aa, synthetic construct
PHEGCW

SEQ ID NO: 17564 - protein, 6 aa, synthetic construct
PHEGCY

SEQ ID NO: 17565 - protein, 6 aa, synthetic construct
PHEGQD

SEQ ID NO: 17566 - protein, 6 aa, synthetic construct
PHEGQE

SEQ ID NO: 17567 - protein, 6 aa, synthetic construct
PHEGQF

SEQ ID NO: 17568 - protein, 6 aa, synthetic construct
PHEGQW

SEQ ID NO: 17569 - protein, 6 aa, synthetic construct
PHEGQY

SEQ ID NO: 17570 - protein, 6 aa, synthetic construct
PHEGED

SEQ ID NO: 17571 - protein, 6 aa, synthetic construct
PHEGEE

SEQ ID NO: 17572 - protein, 6 aa, synthetic construct
PHEGEF

SEQ ID NO: 17573 - protein, 6 aa, synthetic construct
PHEGEW

SEQ ID NO: 17574 - protein, 6 aa, synthetic construct
PHEGEY

SEQ ID NO: 17575 - protein, 6 aa, synthetic construct
PHEGGD

SEQ ID NO: 17576 - protein, 6 aa, synthetic construct
PHEGGE

SEQ ID NO: 17577 - protein, 6 aa, synthetic construct
PHEGGF

SEQ ID NO: 17578 - protein, 6 aa, synthetic construct
PHEGGW

SEQ ID NO: 17579 - protein, 6 aa, synthetic construct
PHEGGY

SEQ ID NO: 17580 - protein, 6 aa, synthetic construct
PHEGHD

SEQ ID NO: 17581 - protein, 6 aa, synthetic construct
PHEGHE

SEQ ID NO: 17582 - protein, 6 aa, synthetic construct
PHEGHF

SEQ ID NO: 17583 - protein, 6 aa, synthetic construct
PHEGHW

SEQ ID NO: 17584 - protein, 6 aa, synthetic construct
PHEGHY

SEQ ID NO: 17585 - protein, 6 aa, synthetic construct
PHEGID

SEQ ID NO: 17586 - protein, 6 aa, synthetic construct
PHEGIE

SEQ ID NO: 17587 - protein, 6 aa, synthetic construct
PHEGIF

SEQ ID NO: 17588 - protein, 6 aa, synthetic construct
PHEGIW

SEQ ID NO: 17589 - protein, 6 aa, synthetic construct
PHEGIY

SEQ ID NO: 17590 - protein, 6 aa, synthetic construct
PHEGLD

SEQ ID NO: 17591 - protein, 6 aa, synthetic construct
PHEGLE

SEQ ID NO: 17592 - protein, 6 aa, synthetic construct
PHEGLF

SEQ ID NO: 17593 - protein, 6 aa, synthetic construct
PHEGLW

SEQ ID NO: 17594 - protein, 6 aa, synthetic construct
PHEGLY

SEQ ID NO: 17595 - protein, 6 aa, synthetic construct
PHEGKD

SEQ ID NO: 17596 - protein, 6 aa, synthetic construct
PHEGKE

SEQ ID NO: 17597 - protein, 6 aa, synthetic construct
PHEGKF

SEQ ID NO: 17598 - protein, 6 aa, synthetic construct
PHEGKW

SEQ ID NO: 17599 - protein, 6 aa, synthetic construct
PHEGKY

SEQ ID NO: 17600 - protein, 6 aa, synthetic construct
PHEGMD

SEQ ID NO: 17601 - protein, 6 aa, synthetic construct
PHEGME

SEQ ID NO: 17602 - protein, 6 aa, synthetic construct
PHEGMF

SEQ ID NO: 17603 - protein, 6 aa, synthetic construct
PHEGMW

SEQ ID NO: 17604 - protein, 6 aa, synthetic construct
PHEGMY

SEQ ID NO: 17605 - protein, 6 aa, synthetic construct
PHEGFD

SEQ ID NO: 17606 - protein, 6 aa, synthetic construct
PHEGFE

SEQ ID NO: 17607 - protein, 6 aa, synthetic construct
PHEGFF

SEQ ID NO: 17608 - protein, 6 aa, synthetic construct
PHEGFW

SEQ ID NO: 17609 - protein, 6 aa, synthetic construct
PHEGFY

SEQ ID NO: 17610 - protein, 6 aa, synthetic construct
PHEGPD

SEQ ID NO: 17611 - protein, 6 aa, synthetic construct
PHEGPE

SEQ ID NO: 17612 - protein, 6 aa, synthetic construct
PHEGPF

SEQ ID NO: 17613 - protein, 6 aa, synthetic construct
PHEGPW

SEQ ID NO: 17614 - protein, 6 aa, synthetic construct
PHEGPY

SEQ ID NO: 17615 - protein, 6 aa, synthetic construct
PHEGSD

SEQ ID NO: 17616 - protein, 6 aa, synthetic construct
PHEGSE

SEQ ID NO: 17617 - protein, 6 aa, synthetic construct
PHEGSF

SEQ ID NO: 17618 - protein, 6 aa, synthetic construct
PHEGSW

SEQ ID NO: 17619 - protein, 6 aa, synthetic construct
PHEGSY

SEQ ID NO: 17620 - protein, 6 aa, synthetic construct
PHEGTD

SEQ ID NO: 17621 - protein, 6 aa, synthetic construct
PHEGTE

SEQ ID NO: 17622 - protein, 6 aa, synthetic construct
PHEGTF

SEQ ID NO: 17623 - protein, 6 aa, synthetic construct
PHEGTW

SEQ ID NO: 17624 - protein, 6 aa, synthetic construct
PHEGTY

SEQ ID NO: 17625 - protein, 6 aa, synthetic construct
PHEGWD

SEQ ID NO: 17626 - protein, 6 aa, synthetic construct
PHEGWE

SEQ ID NO: 17627 - protein, 6 aa, synthetic construct
PHEGWF

SEQ ID NO: 17628 - protein, 6 aa, synthetic construct
PHEGWW

SEQ ID NO: 17629 - protein, 6 aa, synthetic construct
PHEGWY

SEQ ID NO: 17630 - protein, 6 aa, synthetic construct
PHEGYD

SEQ ID NO: 17631 - protein, 6 aa, synthetic construct
PHEGYE

SEQ ID NO: 17632 - protein, 6 aa, synthetic construct
PHEGYF

SEQ ID NO: 17633 - protein, 6 aa, synthetic construct
PHEGYW

SEQ ID NO: 17634 - protein, 6 aa, synthetic construct
PHEGYY

SEQ ID NO: 17635 - protein, 6 aa, synthetic construct
PHEGVD

SEQ ID NO: 17636 - protein, 6 aa, synthetic construct
PHEGVE

SEQ ID NO: 17637 - protein, 6 aa, synthetic construct
PHEGVF

SEQ ID NO: 17638 - protein, 6 aa, synthetic construct
PHEGVW

SEQ ID NO: 17639 - protein, 6 aa, synthetic construct
PHEGVY

SEQ ID NO: 17640 - protein, 6 aa, synthetic construct
PHEHAD

SEQ ID NO: 17641 - protein, 6 aa, synthetic construct
PHEHAE

SEQ ID NO: 17642 - protein, 6 aa, synthetic construct
PHEHAF

SEQ ID NO: 17643 - protein, 6 aa, synthetic construct
PHEHAW

SEQ ID NO: 17644 - protein, 6 aa, synthetic construct
PHEHAY

SEQ ID NO: 17645 - protein, 6 aa, synthetic construct
PHEHRD

SEQ ID NO: 17646 - protein, 6 aa, synthetic construct
PHEHRE

SEQ ID NO: 17647 - protein, 6 aa, synthetic construct
PHEHRF

SEQ ID NO: 17648 - protein, 6 aa, synthetic construct
PHEHRW

SEQ ID NO: 17649 - protein, 6 aa, synthetic construct
PHEHRY

SEQ ID NO: 17650 - protein, 6 aa, synthetic construct
PHEHND

SEQ ID NO: 17651 - protein, 6 aa, synthetic construct
PHEHNE

SEQ ID NO: 17652 - protein, 6 aa, synthetic construct
PHEHNF

SEQ ID NO: 17653 - protein, 6 aa, synthetic construct
PHEHNW

SEQ ID NO: 17654 - protein, 6 aa, synthetic construct
PHEHNY

SEQ ID NO: 17655 - protein, 6 aa, synthetic construct
PHEHDD

SEQ ID NO: 17656 - protein, 6 aa, synthetic construct
PHEHDE

SEQ ID NO: 17657 - protein, 6 aa, synthetic construct
PHEHDF

SEQ ID NO: 17658 - protein, 6 aa, synthetic construct
PHEHDW

SEQ ID NO: 17659 - protein, 6 aa, synthetic construct
PHEHDY

SEQ ID NO: 17660 - protein, 6 aa, synthetic construct
PHEHCD

SEQ ID NO: 17661 - protein, 6 aa, synthetic construct
PHEHCE

SEQ ID NO: 17662 - protein, 6 aa, synthetic construct
PHEHCF

SEQ ID NO: 17663 - protein, 6 aa, synthetic construct
PHEHCW

SEQ ID NO: 17664 - protein, 6 aa, synthetic construct
PHEHCY

SEQ ID NO: 17665 - protein, 6 aa, synthetic construct
PHEHQD

SEQ ID NO: 17666 - protein, 6 aa, synthetic construct
PHEHQE

SEQ ID NO: 17667 - protein, 6 aa, synthetic construct
PHEHQF

SEQ ID NO: 17668 - protein, 6 aa, synthetic construct
PHEHQW

SEQ ID NO: 17669 - protein, 6 aa, synthetic construct
PHEHQY

SEQ ID NO: 17670 - protein, 6 aa, synthetic construct
PHEHED

SEQ ID NO: 17671 - protein, 6 aa, synthetic construct
PHEHEE

SEQ ID NO: 17672 - protein, 6 aa, synthetic construct
PHEHEF

SEQ ID NO: 17673 - protein, 6 aa, synthetic construct
PHEHEW

SEQ ID NO: 17674 - protein, 6 aa, synthetic construct
PHEHEY

SEQ ID NO: 17675 - protein, 6 aa, synthetic construct
PHEHGD

SEQ ID NO: 17676 - protein, 6 aa, synthetic construct
PHEHGE

SEQ ID NO: 17677 - protein, 6 aa, synthetic construct
PHEHGF

SEQ ID NO: 17678 - protein, 6 aa, synthetic construct
PHEHGW

SEQ ID NO: 17679 - protein, 6 aa, synthetic construct
PHEHGY

SEQ ID NO: 17680 - protein, 6 aa, synthetic construct
PHEHHD

SEQ ID NO: 17681 - protein, 6 aa, synthetic construct
PHEHHE

SEQ ID NO: 17682 - protein, 6 aa, synthetic construct
PHEHHF

SEQ ID NO: 17683 - protein, 6 aa, synthetic construct
PHEHHW

SEQ ID NO: 17684 - protein, 6 aa, synthetic construct
PHEHHY

SEQ ID NO: 17685 - protein, 6 aa, synthetic construct
PHEHID

SEQ ID NO: 17686 - protein, 6 aa, synthetic construct
PHEHIE

SEQ ID NO: 17687 - protein, 6 aa, synthetic construct
PHEHIF

SEQ ID NO: 17688 - protein, 6 aa, synthetic construct
PHEHIW

SEQ ID NO: 17689 - protein, 6 aa, synthetic construct
PHEHIY

SEQ ID NO: 17690 - protein, 6 aa, synthetic construct
PHEHLD

SEQ ID NO: 17691 - protein, 6 aa, synthetic construct
PHEHLE

SEQ ID NO: 17692 - protein, 6 aa, synthetic construct
PHEHLF

SEQ ID NO: 17693 - protein, 6 aa, synthetic construct
PHEHLW

SEQ ID NO: 17694 - protein, 6 aa, synthetic construct
PHEHLY

SEQ ID NO: 17695 - protein, 6 aa, synthetic construct
PHEHKD

SEQ ID NO: 17696 - protein, 6 aa, synthetic construct
PHEHKE

SEQ ID NO: 17697 - protein, 6 aa, synthetic construct
PHEHKF

SEQ ID NO: 17698 - protein, 6 aa, synthetic construct
PHEHKW

SEQ ID NO: 17699 - protein, 6 aa, synthetic construct
PHEHKY

SEQ ID NO: 17700 - protein, 6 aa, synthetic construct
PHEHMD

SEQ ID NO: 17701 - protein, 6 aa, synthetic construct
PHEHME

SEQ ID NO: 17702 - protein, 6 aa, synthetic construct
PHEHMF

SEQ ID NO: 17703 - protein, 6 aa, synthetic construct
PHEHMW

SEQ ID NO: 17704 - protein, 6 aa, synthetic construct
PHEHMY

SEQ ID NO: 17705 - protein, 6 aa, synthetic construct
PHEHFD

SEQ ID NO: 17706 - protein, 6 aa, synthetic construct
PHEHFE

SEQ ID NO: 17707 - protein, 6 aa, synthetic construct
PHEHFF

SEQ ID NO: 17708 - protein, 6 aa, synthetic construct
PHEHFW

SEQ ID NO: 17709 - protein, 6 aa, synthetic construct
PHEHFY

SEQ ID NO: 17710 - protein, 6 aa, synthetic construct
PHEHPD

SEQ ID NO: 17711 - protein, 6 aa, synthetic construct
PHEHPE

SEQ ID NO: 17712 - protein, 6 aa, synthetic construct
PHEHPF

SEQ ID NO: 17713 - protein, 6 aa, synthetic construct
PHEHPW

SEQ ID NO: 17714 - protein, 6 aa, synthetic construct
PHEHPY

SEQ ID NO: 17715 - protein, 6 aa, synthetic construct
PHEHSD

SEQ ID NO: 17716 - protein, 6 aa, synthetic construct
PHEHSE

SEQ ID NO: 17717 - protein, 6 aa, synthetic construct
PHEHSF

SEQ ID NO: 17718 - protein, 6 aa, synthetic construct
PHEHSW

SEQ ID NO: 17719 - protein, 6 aa, synthetic construct
PHEHSY

SEQ ID NO: 17720 - protein, 6 aa, synthetic construct
PHEHTD

SEQ ID NO: 17721 - protein, 6 aa, synthetic construct
PHEHTE

SEQ ID NO: 17722 - protein, 6 aa, synthetic construct
PHEHTF

SEQ ID NO: 17723 - protein, 6 aa, synthetic construct
PHEHTW

SEQ ID NO: 17724 - protein, 6 aa, synthetic construct
PHEHTY

SEQ ID NO: 17725 - protein, 6 aa, synthetic construct
PHEHWD

SEQ ID NO: 17726 - protein, 6 aa, synthetic construct
PHEHWE

SEQ ID NO: 17727 - protein, 6 aa, synthetic construct
PHEHWF

SEQ ID NO: 17728 - protein, 6 aa, synthetic construct
PHEHWW

SEQ ID NO: 17729 - protein, 6 aa, synthetic construct
PHEHWY

SEQ ID NO: 17730 - protein, 6 aa, synthetic construct
PHEHYD

SEQ ID NO: 17731 - protein, 6 aa, synthetic construct
PHEHYE

SEQ ID NO: 17732 - protein, 6 aa, synthetic construct
PHEHYF

SEQ ID NO: 17733 - protein, 6 aa, synthetic construct
PHEHYW

SEQ ID NO: 17734 - protein, 6 aa, synthetic construct
PHEHYY

SEQ ID NO: 17735 - protein, 6 aa, synthetic construct
PHEHVD

SEQ ID NO: 17736 - protein, 6 aa, synthetic construct
PHEHVE

SEQ ID NO: 17737 - protein, 6 aa, synthetic construct
PHEHVF

SEQ ID NO: 17738 - protein, 6 aa, synthetic construct
PHEHVW

SEQ ID NO: 17739 - protein, 6 aa, synthetic construct
PHEHVY

SEQ ID NO: 17740 - protein, 6 aa, synthetic construct
PHEIAD

SEQ ID NO: 17741 - protein, 6 aa, synthetic construct
PHEIAE

SEQ ID NO: 17742 - protein, 6 aa, synthetic construct
PHEIAF

SEQ ID NO: 17743 - protein, 6 aa, synthetic construct
PHEIAW

SEQ ID NO: 17744 - protein, 6 aa, synthetic construct
PHEIAY

SEQ ID NO: 17745 - protein, 6 aa, synthetic construct
PHEIRD

SEQ ID NO: 17746 - protein, 6 aa, synthetic construct
PHEIRE

SEQ ID NO: 17747 - protein, 6 aa, synthetic construct
PHEIRF

SEQ ID NO: 17748 - protein, 6 aa, synthetic construct
PHEIRW

SEQ ID NO: 17749 - protein, 6 aa, synthetic construct
PHEIRY

SEQ ID NO: 17750 - protein, 6 aa, synthetic construct
PHEIND

SEQ ID NO: 17751 - protein, 6 aa, synthetic construct
PHEINE

SEQ ID NO: 17752 - protein, 6 aa, synthetic construct
PHEINF

SEQ ID NO: 17753 - protein, 6 aa, synthetic construct
PHEINW

SEQ ID NO: 17754 - protein, 6 aa, synthetic construct
PHEINY

SEQ ID NO: 17755 - protein, 6 aa, synthetic construct
PHEIDD

SEQ ID NO: 17756 - protein, 6 aa, synthetic construct
PHEIDE

SEQ ID NO: 17757 - protein, 6 aa, synthetic construct
PHEIDF

SEQ ID NO: 17758 - protein, 6 aa, synthetic construct
PHEIDW

SEQ ID NO: 17759 - protein, 6 aa, synthetic construct
PHEIDY

SEQ ID NO: 17760 - protein, 6 aa, synthetic construct
PHEICD

SEQ ID NO: 17761 - protein, 6 aa, synthetic construct
PHEICE

SEQ ID NO: 17762 - protein, 6 aa, synthetic construct
PHEICF

SEQ ID NO: 17763 - protein, 6 aa, synthetic construct
PHEICW

SEQ ID NO: 17764 - protein, 6 aa, synthetic construct
PHEICY

SEQ ID NO: 17765 - protein, 6 aa, synthetic construct
PHEIQD

SEQ ID NO: 17766 - protein, 6 aa, synthetic construct
PHEIQE

SEQ ID NO: 17767 - protein, 6 aa, synthetic construct
PHEIQF

SEQ ID NO: 17768 - protein, 6 aa, synthetic construct
PHEIQW

SEQ ID NO: 17769 - protein, 6 aa, synthetic construct
PHEIQY

SEQ ID NO: 17770 - protein, 6 aa, synthetic construct
PHEIED

SEQ ID NO: 17771 - protein, 6 aa, synthetic construct
PHEIEE

SEQ ID NO: 17772 - protein, 6 aa, synthetic construct
PHEIEF

SEQ ID NO: 17773 - protein, 6 aa, synthetic construct
PHEIEW

SEQ ID NO: 17774 - protein, 6 aa, synthetic construct
PHEIEY

SEQ ID NO: 17775 - protein, 6 aa, synthetic construct
PHEIGD

SEQ ID NO: 17776 - protein, 6 aa, synthetic construct
PHEIGE

SEQ ID NO: 17777 - protein, 6 aa, synthetic construct
PHEIGF

SEQ ID NO: 17778 - protein, 6 aa, synthetic construct
PHEIGW

SEQ ID NO: 17779 - protein, 6 aa, synthetic construct
PHEIGY

SEQ ID NO: 17780 - protein, 6 aa, synthetic construct
PHEIHD

SEQ ID NO: 17781 - protein, 6 aa, synthetic construct
PHEIHE

SEQ ID NO: 17782 - protein, 6 aa, synthetic construct
PHEIHF

SEQ ID NO: 17783 - protein, 6 aa, synthetic construct
PHEIHW

SEQ ID NO: 17784 - protein, 6 aa, synthetic construct
PHEIHY

SEQ ID NO: 17785 - protein, 6 aa, synthetic construct
PHEIID

SEQ ID NO: 17786 - protein, 6 aa, synthetic construct
PHEIIE

SEQ ID NO: 17787 - protein, 6 aa, synthetic construct
PHEIIF

SEQ ID NO: 17788 - protein, 6 aa, synthetic construct
PHEIIW

SEQ ID NO: 17789 - protein, 6 aa, synthetic construct
PHEIIY

SEQ ID NO: 17790 - protein, 6 aa, synthetic construct
PHEILD

SEQ ID NO: 17791 - protein, 6 aa, synthetic construct
PHEILE

SEQ ID NO: 17792 - protein, 6 aa, synthetic construct
PHEILF

SEQ ID NO: 17793 - protein, 6 aa, synthetic construct
PHEILW

SEQ ID NO: 17794 - protein, 6 aa, synthetic construct
PHEILY

SEQ ID NO: 17795 - protein, 6 aa, synthetic construct
PHEIKD

SEQ ID NO: 17796 - protein, 6 aa, synthetic construct
PHEIKE

SEQ ID NO: 17797 - protein, 6 aa, synthetic construct
PHEIKF

SEQ ID NO: 17798 - protein, 6 aa, synthetic construct
PHEIKW

SEQ ID NO: 17799 - protein, 6 aa, synthetic construct
PHEIKY

SEQ ID NO: 17800 - protein, 6 aa, synthetic construct
PHEIMD

SEQ ID NO: 17801 - protein, 6 aa, synthetic construct
PHEIME

SEQ ID NO: 17802 - protein, 6 aa, synthetic construct
PHEIMF

SEQ ID NO: 17803 - protein, 6 aa, synthetic construct
PHEIMW

SEQ ID NO: 17804 - protein, 6 aa, synthetic construct
PHEIMY

SEQ ID NO: 17805 - protein, 6 aa, synthetic construct
PHEIFD

SEQ ID NO: 17806 - protein, 6 aa, synthetic construct
PHEIFE

SEQ ID NO: 17807 - protein, 6 aa, synthetic construct
PHEIFF

SEQ ID NO: 17808 - protein, 6 aa, synthetic construct
PHEIFW

SEQ ID NO: 17809 - protein, 6 aa, synthetic construct
PHEIFY

SEQ ID NO: 17810 - protein, 6 aa, synthetic construct
PHEIPD

SEQ ID NO: 17811 - protein, 6 aa, synthetic construct
PHEIPE

SEQ ID NO: 17812 - protein, 6 aa, synthetic construct
PHEIPF

SEQ ID NO: 17813 - protein, 6 aa, synthetic construct
PHEIPW

SEQ ID NO: 17814 - protein, 6 aa, synthetic construct
PHEIPY

SEQ ID NO: 17815 - protein, 6 aa, synthetic construct
PHEISD

SEQ ID NO: 17816 - protein, 6 aa, synthetic construct
PHEISE

SEQ ID NO: 17817 - protein, 6 aa, synthetic construct
PHEISF

SEQ ID NO: 17818 - protein, 6 aa, synthetic construct
PHEISW

SEQ ID NO: 17819 - protein, 6 aa, synthetic construct
PHEISY

SEQ ID NO: 17820 - protein, 6 aa, synthetic construct
PHEITD

SEQ ID NO: 17821 - protein, 6 aa, synthetic construct
PHEITE

SEQ ID NO: 17822 - protein, 6 aa, synthetic construct
PHEITF

SEQ ID NO: 17823 - protein, 6 aa, synthetic construct
PHEITW

SEQ ID NO: 17824 - protein, 6 aa, synthetic construct
PHEITY

SEQ ID NO: 17825 - protein, 6 aa, synthetic construct
PHEIWD

SEQ ID NO: 17826 - protein, 6 aa, synthetic construct
PHEIWE

SEQ ID NO: 17827 - protein, 6 aa, synthetic construct
PHEIWF

SEQ ID NO: 17828 - protein, 6 aa, synthetic construct
PHEIWW

SEQ ID NO: 17829 - protein, 6 aa, synthetic construct
PHEIWY

SEQ ID NO: 17830 - protein, 6 aa, synthetic construct
PHEIYD

SEQ ID NO: 17831 - protein, 6 aa, synthetic construct
PHEIYE

SEQ ID NO: 17832 - protein, 6 aa, synthetic construct
PHEIYF

SEQ ID NO: 17833 - protein, 6 aa, synthetic construct
PHEIYW

SEQ ID NO: 17834 - protein, 6 aa, synthetic construct
PHEIYY

SEQ ID NO: 17835 - protein, 6 aa, synthetic construct
PHEIVD

SEQ ID NO: 17836 - protein, 6 aa, synthetic construct
PHEIVE

SEQ ID NO: 17837 - protein, 6 aa, synthetic construct
PHEIVF

SEQ ID NO: 17838 - protein, 6 aa, synthetic construct
PHEIVW

SEQ ID NO: 17839 - protein, 6 aa, synthetic construct
PHEIVY

SEQ ID NO: 17840 - protein, 6 aa, synthetic construct
PHELAD

SEQ ID NO: 17841 - protein, 6 aa, synthetic construct
PHELAE

SEQ ID NO: 17842 - protein, 6 aa, synthetic construct
PHELAF

SEQ ID NO: 17843 - protein, 6 aa, synthetic construct
PHELAW

SEQ ID NO: 17844 - protein, 6 aa, synthetic construct
PHELAY

SEQ ID NO: 17845 - protein, 6 aa, synthetic construct
PHELRD

SEQ ID NO: 17846 - protein, 6 aa, synthetic construct
PHELRE

SEQ ID NO: 17847 - protein, 6 aa, synthetic construct
PHELRF

SEQ ID NO: 17848 - protein, 6 aa, synthetic construct
PHELRW

SEQ ID NO: 17849 - protein, 6 aa, synthetic construct
PHELRY

SEQ ID NO: 17850 - protein, 6 aa, synthetic construct
PHELND

SEQ ID NO: 17851 - protein, 6 aa, synthetic construct
PHELNE

SEQ ID NO: 17852 - protein, 6 aa, synthetic construct
PHELNF

SEQ ID NO: 17853 - protein, 6 aa, synthetic construct
PHELNW

SEQ ID NO: 17854 - protein, 6 aa, synthetic construct
PHELNY

SEQ ID NO: 17855 - protein, 6 aa, synthetic construct
PHELDD

SEQ ID NO: 17856 - protein, 6 aa, synthetic construct
PHELDE

SEQ ID NO: 17857 - protein, 6 aa, synthetic construct
PHELDF

SEQ ID NO: 17858 - protein, 6 aa, synthetic construct
PHELDW

SEQ ID NO: 17859 - protein, 6 aa, synthetic construct
PHELDY

SEQ ID NO: 17860 - protein, 6 aa, synthetic construct
PHELCD

SEQ ID NO: 17861 - protein, 6 aa, synthetic construct
PHELCE

SEQ ID NO: 17862 - protein, 6 aa, synthetic construct
PHELCF

SEQ ID NO: 17863 - protein, 6 aa, synthetic construct
PHELCW

SEQ ID NO: 17864 - protein, 6 aa, synthetic construct
PHELCY

SEQ ID NO: 17865 - protein, 6 aa, synthetic construct
PHELQD

SEQ ID NO: 17866 - protein, 6 aa, synthetic construct
PHELQE

SEQ ID NO: 17867 - protein, 6 aa, synthetic construct
PHELQF

SEQ ID NO: 17868 - protein, 6 aa, synthetic construct
PHELQW

SEQ ID NO: 17869 - protein, 6 aa, synthetic construct
PHELQY

SEQ ID NO: 17870 - protein, 6 aa, synthetic construct
PHELED

SEQ ID NO: 17871 - protein, 6 aa, synthetic construct
PHELEE

SEQ ID NO: 17872 - protein, 6 aa, synthetic construct
PHELEF

SEQ ID NO: 17873 - protein, 6 aa, synthetic construct
PHELEW

SEQ ID NO: 17874 - protein, 6 aa, synthetic construct
PHELEY

SEQ ID NO: 17875 - protein, 6 aa, synthetic construct
PHELGD

SEQ ID NO: 17876 - protein, 6 aa, synthetic construct
PHELGE

SEQ ID NO: 17877 - protein, 6 aa, synthetic construct
PHELGF

SEQ ID NO: 17878 - protein, 6 aa, synthetic construct
PHELGW

SEQ ID NO: 17879 - protein, 6 aa, synthetic construct
PHELGY

SEQ ID NO: 17880 - protein, 6 aa, synthetic construct
PHELHD

SEQ ID NO: 17881 - protein, 6 aa, synthetic construct
PHELHE

SEQ ID NO: 17882 - protein, 6 aa, synthetic construct
PHELHF

SEQ ID NO: 17883 - protein, 6 aa, synthetic construct
PHELHW

SEQ ID NO: 17884 - protein, 6 aa, synthetic construct
PHELHY

SEQ ID NO: 17885 - protein, 6 aa, synthetic construct
PHELID

SEQ ID NO: 17886 - protein, 6 aa, synthetic construct
PHELIE

SEQ ID NO: 17887 - protein, 6 aa, synthetic construct
PHELIF

SEQ ID NO: 17888 - protein, 6 aa, synthetic construct
PHELIW

SEQ ID NO: 17889 - protein, 6 aa, synthetic construct
PHELIY

SEQ ID NO: 17890 - protein, 6 aa, synthetic construct
PHELLD

SEQ ID NO: 17891 - protein, 6 aa, synthetic construct
PHELLE

SEQ ID NO: 17892 - protein, 6 aa, synthetic construct
PHELLF

SEQ ID NO: 17893 - protein, 6 aa, synthetic construct
PHELLW

SEQ ID NO: 17894 - protein, 6 aa, synthetic construct
PHELLY

SEQ ID NO: 17895 - protein, 6 aa, synthetic construct
PHELKD

SEQ ID NO: 17896 - protein, 6 aa, synthetic construct
PHELKE

SEQ ID NO: 17897 - protein, 6 aa, synthetic construct
PHELKF

SEQ ID NO: 17898 - protein, 6 aa, synthetic construct
PHELKW

SEQ ID NO: 17899 - protein, 6 aa, synthetic construct
PHELKY

SEQ ID NO: 17900 - protein, 6 aa, synthetic construct
PHELMD

SEQ ID NO: 17901 - protein, 6 aa, synthetic construct
PHELME

SEQ ID NO: 17902 - protein, 6 aa, synthetic construct
PHELMF

SEQ ID NO: 17903 - protein, 6 aa, synthetic construct
PHELMW

SEQ ID NO: 17904 - protein, 6 aa, synthetic construct
PHELMY

SEQ ID NO: 17905 - protein, 6 aa, synthetic construct
PHELFD

SEQ ID NO: 17906 - protein, 6 aa, synthetic construct
PHELFE

SEQ ID NO: 17907 - protein, 6 aa, synthetic construct
PHELFF

SEQ ID NO: 17908 - protein, 6 aa, synthetic construct
PHELFW

SEQ ID NO: 17909 - protein, 6 aa, synthetic construct
PHELFY

SEQ ID NO: 17910 - protein, 6 aa, synthetic construct
PHELPD

SEQ ID NO: 17911 - protein, 6 aa, synthetic construct
PHELPE

SEQ ID NO: 17912 - protein, 6 aa, synthetic construct
PHELPF

SEQ ID NO: 17913 - protein, 6 aa, synthetic construct
PHELPW

SEQ ID NO: 17914 - protein, 6 aa, synthetic construct
PHELPY

SEQ ID NO: 17915 - protein, 6 aa, synthetic construct
PHELSD

SEQ ID NO: 17916 - protein, 6 aa, synthetic construct
PHELSE

SEQ ID NO: 17917 - protein, 6 aa, synthetic construct
PHELSF

SEQ ID NO: 17918 - protein, 6 aa, synthetic construct
PHELSW

SEQ ID NO: 17919 - protein, 6 aa, synthetic construct
PHELSY

SEQ ID NO: 17920 - protein, 6 aa, synthetic construct
PHELTD

SEQ ID NO: 17921 - protein, 6 aa, synthetic construct
PHELTE

SEQ ID NO: 17922 - protein, 6 aa, synthetic construct
PHELTF

SEQ ID NO: 17923 - protein, 6 aa, synthetic construct
PHELTW

SEQ ID NO: 17924 - protein, 6 aa, synthetic construct
PHELTY

SEQ ID NO: 17925 - protein, 6 aa, synthetic construct
PHELWD

SEQ ID NO: 17926 - protein, 6 aa, synthetic construct
PHELWE

SEQ ID NO: 17927 - protein, 6 aa, synthetic construct
PHELWF

SEQ ID NO: 17928 - protein, 6 aa, synthetic construct
PHELWW

SEQ ID NO: 17929 - protein, 6 aa, synthetic construct
PHELWY

SEQ ID NO: 17930 - protein, 6 aa, synthetic construct
PHELYD

SEQ ID NO: 17931 - protein, 6 aa, synthetic construct
PHELYE

SEQ ID NO: 17932 - protein, 6 aa, synthetic construct
PHELYF

SEQ ID NO: 17933 - protein, 6 aa, synthetic construct
PHELYW

SEQ ID NO: 17934 - protein, 6 aa, synthetic construct
PHELYY

SEQ ID NO: 17935 - protein, 6 aa, synthetic construct
PHELVD

SEQ ID NO: 17936 - protein, 6 aa, synthetic construct
PHELVE

SEQ ID NO: 17937 - protein, 6 aa, synthetic construct
PHELVF

SEQ ID NO: 17938 - protein, 6 aa, synthetic construct
PHELVW

SEQ ID NO: 17939 - protein, 6 aa, synthetic construct
PHELVY

SEQ ID NO: 17940 - protein, 6 aa, synthetic construct
PHEKAD

SEQ ID NO: 17941 - protein, 6 aa, synthetic construct
PHEKAE

SEQ ID NO: 17942 - protein, 6 aa, synthetic construct
PHEKAF

SEQ ID NO: 17943 - protein, 6 aa, synthetic construct
PHEKAW

SEQ ID NO: 17944 - protein, 6 aa, synthetic construct
PHEKAY

SEQ ID NO: 17945 - protein, 6 aa, synthetic construct
PHEKRD

SEQ ID NO: 17946 - protein, 6 aa, synthetic construct
PHEKRE

SEQ ID NO: 17947 - protein, 6 aa, synthetic construct
PHEKRF

SEQ ID NO: 17948 - protein, 6 aa, synthetic construct
PHEKRW

SEQ ID NO: 17949 - protein, 6 aa, synthetic construct
PHEKRY

SEQ ID NO: 17950 - protein, 6 aa, synthetic construct
PHEKND

SEQ ID NO: 17951 - protein, 6 aa, synthetic construct
PHEKNE

SEQ ID NO: 17952 - protein, 6 aa, synthetic construct
PHEKNF

SEQ ID NO: 17953 - protein, 6 aa, synthetic construct
PHEKNW

SEQ ID NO: 17954 - protein, 6 aa, synthetic construct
PHEKNY

SEQ ID NO: 17955 - protein, 6 aa, synthetic construct
PHEKDD

SEQ ID NO: 17956 - protein, 6 aa, synthetic construct
PHEKDE

SEQ ID NO: 17957 - protein, 6 aa, synthetic construct
PHEKDF

SEQ ID NO: 17958 - protein, 6 aa, synthetic construct
PHEKDW

SEQ ID NO: 17959 - protein, 6 aa, synthetic construct
PHEKDY

SEQ ID NO: 17960 - protein, 6 aa, synthetic construct
PHEKCD

SEQ ID NO: 17961 - protein, 6 aa, synthetic construct
PHEKCE

SEQ ID NO: 17962 - protein, 6 aa, synthetic construct
PHEKCF

SEQ ID NO: 17963 - protein, 6 aa, synthetic construct
PHEKCW

SEQ ID NO: 17964 - protein, 6 aa, synthetic construct
PHEKCY

SEQ ID NO: 17965 - protein, 6 aa, synthetic construct
PHEKQD

SEQ ID NO: 17966 - protein, 6 aa, synthetic construct
PHEKQE

SEQ ID NO: 17967 - protein, 6 aa, synthetic construct
PHEKQF

SEQ ID NO: 17968 - protein, 6 aa, synthetic construct
PHEKQW

SEQ ID NO: 17969 - protein, 6 aa, synthetic construct
PHEKQY

SEQ ID NO: 17970 - protein, 6 aa, synthetic construct
PHEKED

SEQ ID NO: 17971 - protein, 6 aa, synthetic construct
PHEKEE

SEQ ID NO: 17972 - protein, 6 aa, synthetic construct
PHEKEF

SEQ ID NO: 17973 - protein, 6 aa, synthetic construct
PHEKEW

SEQ ID NO: 17974 - protein, 6 aa, synthetic construct
PHEKEY

SEQ ID NO: 17975 - protein, 6 aa, synthetic construct
PHEKGD

SEQ ID NO: 17976 - protein, 6 aa, synthetic construct
PHEKGE

SEQ ID NO: 17977 - protein, 6 aa, synthetic construct
PHEKGF

SEQ ID NO: 17978 - protein, 6 aa, synthetic construct
PHEKGW

SEQ ID NO: 17979 - protein, 6 aa, synthetic construct
PHEKGY

SEQ ID NO: 17980 - protein, 6 aa, synthetic construct
PHEKHD

SEQ ID NO: 17981 - protein, 6 aa, synthetic construct
PHEKHE

SEQ ID NO: 17982 - protein, 6 aa, synthetic construct
PHEKHF

SEQ ID NO: 17983 - protein, 6 aa, synthetic construct
PHEKHW

SEQ ID NO: 17984 - protein, 6 aa, synthetic construct
PHEKHY

SEQ ID NO: 17985 - protein, 6 aa, synthetic construct
PHEKID

SEQ ID NO: 17986 - protein, 6 aa, synthetic construct
PHEKIE

SEQ ID NO: 17987 - protein, 6 aa, synthetic construct
PHEKIF

SEQ ID NO: 17988 - protein, 6 aa, synthetic construct
PHEKIW

SEQ ID NO: 17989 - protein, 6 aa, synthetic construct
PHEKIY

SEQ ID NO: 17990 - protein, 6 aa, synthetic construct
PHEKLD

SEQ ID NO: 17991 - protein, 6 aa, synthetic construct
PHEKLE

SEQ ID NO: 17992 - protein, 6 aa, synthetic construct
PHEKLF

SEQ ID NO: 17993 - protein, 6 aa, synthetic construct
PHEKLW

SEQ ID NO: 17994 - protein, 6 aa, synthetic construct
PHEKLY

SEQ ID NO: 17995 - protein, 6 aa, synthetic construct
PHEKKD

SEQ ID NO: 17996 - protein, 6 aa, synthetic construct
PHEKKE

SEQ ID NO: 17997 - protein, 6 aa, synthetic construct
PHEKKF

SEQ ID NO: 17998 - protein, 6 aa, synthetic construct
PHEKKW

SEQ ID NO: 17999 - protein, 6 aa, synthetic construct
PHEKKY

SEQ ID NO: 18000 - protein, 6 aa, synthetic construct
PHEKMD

SEQ ID NO: 18001 - protein, 6 aa, synthetic construct
PHEKME

SEQ ID NO: 18002 - protein, 6 aa, synthetic construct
PHEKMF

SEQ ID NO: 18003 - protein, 6 aa, synthetic construct
PHEKMW

SEQ ID NO: 18004 - protein, 6 aa, synthetic construct
PHEKMY

SEQ ID NO: 18005 - protein, 6 aa, synthetic construct
PHEKFD

SEQ ID NO: 18006 - protein, 6 aa, synthetic construct
PHEKFE

SEQ ID NO: 18007 - protein, 6 aa, synthetic construct
PHEKFF

SEQ ID NO: 18008 - protein, 6 aa, synthetic construct
PHEKFW

SEQ ID NO: 18009 - protein, 6 aa, synthetic construct
PHEKFY

SEQ ID NO: 18010 - protein, 6 aa, synthetic construct
PHEKPD

SEQ ID NO: 18011 - protein, 6 aa, synthetic construct
PHEKPE

SEQ ID NO: 18012 - protein, 6 aa, synthetic construct
PHEKPF

SEQ ID NO: 18013 - protein, 6 aa, synthetic construct
PHEKPW

SEQ ID NO: 18014 - protein, 6 aa, synthetic construct
PHEKPY

SEQ ID NO: 18015 - protein, 6 aa, synthetic construct
PHEKSD

SEQ ID NO: 18016 - protein, 6 aa, synthetic construct
PHEKSE

SEQ ID NO: 18017 - protein, 6 aa, synthetic construct
PHEKSF

SEQ ID NO: 18018 - protein, 6 aa, synthetic construct
PHEKSW

SEQ ID NO: 18019 - protein, 6 aa, synthetic construct
PHEKSY

SEQ ID NO: 18020 - protein, 6 aa, synthetic construct
PHEKTD

SEQ ID NO: 18021 - protein, 6 aa, synthetic construct
PHEKTE

SEQ ID NO: 18022 - protein, 6 aa, synthetic construct
PHEKTF

SEQ ID NO: 18023 - protein, 6 aa, synthetic construct
PHEKTW

SEQ ID NO: 18024 - protein, 6 aa, synthetic construct
PHEKTY

SEQ ID NO: 18025 - protein, 6 aa, synthetic construct
PHEKWD

SEQ ID NO: 18026 - protein, 6 aa, synthetic construct
PHEKWE

SEQ ID NO: 18027 - protein, 6 aa, synthetic construct
PHEKWF

SEQ ID NO: 18028 - protein, 6 aa, synthetic construct
PHEKWW

SEQ ID NO: 18029 - protein, 6 aa, synthetic construct
PHEKWY

SEQ ID NO: 18030 - protein, 6 aa, synthetic construct
PHEKYD

SEQ ID NO: 18031 - protein, 6 aa, synthetic construct
PHEKYE

SEQ ID NO: 18032 - protein, 6 aa, synthetic construct
PHEKYF

SEQ ID NO: 18033 - protein, 6 aa, synthetic construct
PHEKYW

SEQ ID NO: 18034 - protein, 6 aa, synthetic construct
PHEKYY

SEQ ID NO: 18035 - protein, 6 aa, synthetic construct
PHEKVD

SEQ ID NO: 18036 - protein, 6 aa, synthetic construct
PHEKVE

SEQ ID NO: 18037 - protein, 6 aa, synthetic construct
PHEKVF

SEQ ID NO: 18038 - protein, 6 aa, synthetic construct
PHEKVW

SEQ ID NO: 18039 - protein, 6 aa, synthetic construct
PHEKVY

SEQ ID NO: 18040 - protein, 6 aa, synthetic construct
PHEMAD

SEQ ID NO: 18041 - protein, 6 aa, synthetic construct
PHEMAE

SEQ ID NO: 18042 - protein, 6 aa, synthetic construct
PHEMAF

SEQ ID NO: 18043 - protein, 6 aa, synthetic construct
PHEMAW

SEQ ID NO: 18044 - protein, 6 aa, synthetic construct
PHEMAY

SEQ ID NO: 18045 - protein, 6 aa, synthetic construct
PHEMRD

SEQ ID NO: 18046 - protein, 6 aa, synthetic construct
PHEMRE

SEQ ID NO: 18047 - protein, 6 aa, synthetic construct
PHEMRF

SEQ ID NO: 18048 - protein, 6 aa, synthetic construct
PHEMRW

SEQ ID NO: 18049 - protein, 6 aa, synthetic construct
PHEMRY

SEQ ID NO: 18050 - protein, 6 aa, synthetic construct
PHEMND

SEQ ID NO: 18051 - protein, 6 aa, synthetic construct
PHEMNE

SEQ ID NO: 18052 - protein, 6 aa, synthetic construct
PHEMNF

SEQ ID NO: 18053 - protein, 6 aa, synthetic construct
PHEMNW

SEQ ID NO: 18054 - protein, 6 aa, synthetic construct
PHEMNY

SEQ ID NO: 18055 - protein, 6 aa, synthetic construct
PHEMDD

SEQ ID NO: 18056 - protein, 6 aa, synthetic construct
PHEMDE

SEQ ID NO: 18057 - protein, 6 aa, synthetic construct
PHEMDF

SEQ ID NO: 18058 - protein, 6 aa, synthetic construct
PHEMDW

SEQ ID NO: 18059 - protein, 6 aa, synthetic construct
PHEMDY

SEQ ID NO: 18060 - protein, 6 aa, synthetic construct
PHEMCD

SEQ ID NO: 18061 - protein, 6 aa, synthetic construct
PHEMCE

SEQ ID NO: 18062 - protein, 6 aa, synthetic construct
PHEMCF

SEQ ID NO: 18063 - protein, 6 aa, synthetic construct
PHEMCW

SEQ ID NO: 18064 - protein, 6 aa, synthetic construct
PHEMCY

SEQ ID NO: 18065 - protein, 6 aa, synthetic construct
PHEMQD

SEQ ID NO: 18066 - protein, 6 aa, synthetic construct
PHEMQE

SEQ ID NO: 18067 - protein, 6 aa, synthetic construct
PHEMQF

SEQ ID NO: 18068 - protein, 6 aa, synthetic construct
PHEMQW

SEQ ID NO: 18069 - protein, 6 aa, synthetic construct
PHEMQY

SEQ ID NO: 18070 - protein, 6 aa, synthetic construct
PHEMED

SEQ ID NO: 18071 - protein, 6 aa, synthetic construct
PHEMEE

SEQ ID NO: 18072 - protein, 6 aa, synthetic construct
PHEMEF

SEQ ID NO: 18073 - protein, 6 aa, synthetic construct
PHEMEW

SEQ ID NO: 18074 - protein, 6 aa, synthetic construct
PHEMEY

SEQ ID NO: 18075 - protein, 6 aa, synthetic construct
PHEMGD

SEQ ID NO: 18076 - protein, 6 aa, synthetic construct
PHEMGE

SEQ ID NO: 18077 - protein, 6 aa, synthetic construct
PHEMGF

SEQ ID NO: 18078 - protein, 6 aa, synthetic construct
PHEMGW

SEQ ID NO: 18079 - protein, 6 aa, synthetic construct
PHEMGY

SEQ ID NO: 18080 - protein, 6 aa, synthetic construct
PHEMHD

SEQ ID NO: 18081 - protein, 6 aa, synthetic construct
PHEMHE

SEQ ID NO: 18082 - protein, 6 aa, synthetic construct
PHEMHF

SEQ ID NO: 18083 - protein, 6 aa, synthetic construct
PHEMHW

SEQ ID NO: 18084 - protein, 6 aa, synthetic construct
PHEMHY

SEQ ID NO: 18085 - protein, 6 aa, synthetic construct
PHEMID

SEQ ID NO: 18086 - protein, 6 aa, synthetic construct
PHEMIE

SEQ ID NO: 18087 - protein, 6 aa, synthetic construct
PHEMIF

SEQ ID NO: 18088 - protein, 6 aa, synthetic construct
PHEMIW

SEQ ID NO: 18089 - protein, 6 aa, synthetic construct
PHEMIY

SEQ ID NO: 18090 - protein, 6 aa, synthetic construct
PHEMLD

SEQ ID NO: 18091 - protein, 6 aa, synthetic construct
PHEMLE

SEQ ID NO: 18092 - protein, 6 aa, synthetic construct
PHEMLF

SEQ ID NO: 18093 - protein, 6 aa, synthetic construct
PHEMLW

SEQ ID NO: 18094 - protein, 6 aa, synthetic construct
PHEMLY

SEQ ID NO: 18095 - protein, 6 aa, synthetic construct
PHEMKD

SEQ ID NO: 18096 - protein, 6 aa, synthetic construct
PHEMKE

SEQ ID NO: 18097 - protein, 6 aa, synthetic construct
PHEMKF

SEQ ID NO: 18098 - protein, 6 aa, synthetic construct
PHEMKW

SEQ ID NO: 18099 - protein, 6 aa, synthetic construct
PHEMKY

SEQ ID NO: 18100 - protein, 6 aa, synthetic construct
PHEMMD

SEQ ID NO: 18101 - protein, 6 aa, synthetic construct
PHEMME

SEQ ID NO: 18102 - protein, 6 aa, synthetic construct
PHEMMF

SEQ ID NO: 18103 - protein, 6 aa, synthetic construct
PHEMMW

SEQ ID NO: 18104 - protein, 6 aa, synthetic construct
PHEMMY

SEQ ID NO: 18105 - protein, 6 aa, synthetic construct
PHEMFD

SEQ ID NO: 18106 - protein, 6 aa, synthetic construct
PHEMFE

SEQ ID NO: 18107 - protein, 6 aa, synthetic construct
PHEMFF

SEQ ID NO: 18108 - protein, 6 aa, synthetic construct
PHEMFW

SEQ ID NO: 18109 - protein, 6 aa, synthetic construct
PHEMFY

SEQ ID NO: 18110 - protein, 6 aa, synthetic construct
PHEMPD

SEQ ID NO: 18111 - protein, 6 aa, synthetic construct
PHEMPE

SEQ ID NO: 18112 - protein, 6 aa, synthetic construct
PHEMPF

SEQ ID NO: 18113 - protein, 6 aa, synthetic construct
PHEMPW

SEQ ID NO: 18114 - protein, 6 aa, synthetic construct
PHEMPY

SEQ ID NO: 18115 - protein, 6 aa, synthetic construct
PHEMSD

SEQ ID NO: 18116 - protein, 6 aa, synthetic construct
PHEMSE

SEQ ID NO: 18117 - protein, 6 aa, synthetic construct
PHEMSF

SEQ ID NO: 18118 - protein, 6 aa, synthetic construct
PHEMSW

SEQ ID NO: 18119 - protein, 6 aa, synthetic construct
PHEMSY

SEQ ID NO: 18120 - protein, 6 aa, synthetic construct
PHEMTD

SEQ ID NO: 18121 - protein, 6 aa, synthetic construct
PHEMTE

SEQ ID NO: 18122 - protein, 6 aa, synthetic construct
PHEMTF

SEQ ID NO: 18123 - protein, 6 aa, synthetic construct
PHEMTW

SEQ ID NO: 18124 - protein, 6 aa, synthetic construct
PHEMTY

SEQ ID NO: 18125 - protein, 6 aa, synthetic construct
PHEMWD

SEQ ID NO: 18126 - protein, 6 aa, synthetic construct
PHEMWE

SEQ ID NO: 18127 - protein, 6 aa, synthetic construct
PHEMWF

SEQ ID NO: 18128 - protein, 6 aa, synthetic construct
PHEMWW

SEQ ID NO: 18129 - protein, 6 aa, synthetic construct
PHEMWY

SEQ ID NO: 18130 - protein, 6 aa, synthetic construct
PHEMYD

SEQ ID NO: 18131 - protein, 6 aa, synthetic construct
PHEMYE

SEQ ID NO: 18132 - protein, 6 aa, synthetic construct
PHEMYF

SEQ ID NO: 18133 - protein, 6 aa, synthetic construct
PHEMYW

SEQ ID NO: 18134 - protein, 6 aa, synthetic construct
PHEMYY

SEQ ID NO: 18135 - protein, 6 aa, synthetic construct
PHEMVD

SEQ ID NO: 18136 - protein, 6 aa, synthetic construct
PHEMVE

SEQ ID NO: 18137 - protein, 6 aa, synthetic construct
PHEMVF

SEQ ID NO: 18138 - protein, 6 aa, synthetic construct
PHEMVW

SEQ ID NO: 18139 - protein, 6 aa, synthetic construct
PHEMVY

SEQ ID NO: 18140 - protein, 6 aa, synthetic construct
PHEFAD

SEQ ID NO: 18141 - protein, 6 aa, synthetic construct
PHEFAE

SEQ ID NO: 18142 - protein, 6 aa, synthetic construct
PHEFAF

SEQ ID NO: 18143 - protein, 6 aa, synthetic construct
PHEFAW

SEQ ID NO: 18144 - protein, 6 aa, synthetic construct
PHEFAY

SEQ ID NO: 18145 - protein, 6 aa, synthetic construct
PHEFRD

SEQ ID NO: 18146 - protein, 6 aa, synthetic construct
PHEFRE

SEQ ID NO: 18147 - protein, 6 aa, synthetic construct
PHEFRF

SEQ ID NO: 18148 - protein, 6 aa, synthetic construct
PHEFRW

SEQ ID NO: 18149 - protein, 6 aa, synthetic construct
PHEFRY

SEQ ID NO: 18150 - protein, 6 aa, synthetic construct
PHEFND

SEQ ID NO: 18151 - protein, 6 aa, synthetic construct
PHEFNE

SEQ ID NO: 18152 - protein, 6 aa, synthetic construct
PHEFNF

SEQ ID NO: 18153 - protein, 6 aa, synthetic construct
PHEFNW

SEQ ID NO: 18154 - protein, 6 aa, synthetic construct
PHEFNY

SEQ ID NO: 18155 - protein, 6 aa, synthetic construct
PHEFDD

SEQ ID NO: 18156 - protein, 6 aa, synthetic construct
PHEFDE

SEQ ID NO: 18157 - protein, 6 aa, synthetic construct
PHEFDF

SEQ ID NO: 18158 - protein, 6 aa, synthetic construct
PHEFDW

SEQ ID NO: 18159 - protein, 6 aa, synthetic construct
PHEFDY

SEQ ID NO: 18160 - protein, 6 aa, synthetic construct
PHEFCD

SEQ ID NO: 18161 - protein, 6 aa, synthetic construct
PHEFCE

SEQ ID NO: 18162 - protein, 6 aa, synthetic construct
PHEFCF

SEQ ID NO: 18163 - protein, 6 aa, synthetic construct
PHEFCW

SEQ ID NO: 18164 - protein, 6 aa, synthetic construct
PHEFCY

SEQ ID NO: 18165 - protein, 6 aa, synthetic construct
PHEFQD

SEQ ID NO: 18166 - protein, 6 aa, synthetic construct
PHEFQE

SEQ ID NO: 18167 - protein, 6 aa, synthetic construct
PHEFQF

SEQ ID NO: 18168 - protein, 6 aa, synthetic construct
PHEFQW

SEQ ID NO: 18169 - protein, 6 aa, synthetic construct
PHEFQY

SEQ ID NO: 18170 - protein, 6 aa, synthetic construct
PHEFED

SEQ ID NO: 18171 - protein, 6 aa, synthetic construct
PHEFEE

SEQ ID NO: 18172 - protein, 6 aa, synthetic construct
PHEFEF

SEQ ID NO: 18173 - protein, 6 aa, synthetic construct
PHEFEW

SEQ ID NO: 18174 - protein, 6 aa, synthetic construct
PHEFEY

SEQ ID NO: 18175 - protein, 6 aa, synthetic construct
PHEFGD

SEQ ID NO: 18176 - protein, 6 aa, synthetic construct
PHEFGE

SEQ ID NO: 18177 - protein, 6 aa, synthetic construct
PHEFGF

SEQ ID NO: 18178 - protein, 6 aa, synthetic construct
PHEFGW

SEQ ID NO: 18179 - protein, 6 aa, synthetic construct
PHEFGY

SEQ ID NO: 18180 - protein, 6 aa, synthetic construct
PHEFHD

SEQ ID NO: 18181 - protein, 6 aa, synthetic construct
PHEFHE

SEQ ID NO: 18182 - protein, 6 aa, synthetic construct
PHEFHF

SEQ ID NO: 18183 - protein, 6 aa, synthetic construct
PHEFHW

SEQ ID NO: 18184 - protein, 6 aa, synthetic construct
PHEFHY

SEQ ID NO: 18185 - protein, 6 aa, synthetic construct
PHEFID

SEQ ID NO: 18186 - protein, 6 aa, synthetic construct
PHEFIE

SEQ ID NO: 18187 - protein, 6 aa, synthetic construct
PHEFIF

SEQ ID NO: 18188 - protein, 6 aa, synthetic construct
PHEFIW

SEQ ID NO: 18189 - protein, 6 aa, synthetic construct
PHEFIY

SEQ ID NO: 18190 - protein, 6 aa, synthetic construct
PHEFLD

SEQ ID NO: 18191 - protein, 6 aa, synthetic construct
PHEFLE

SEQ ID NO: 18192 - protein, 6 aa, synthetic construct
PHEFLF

SEQ ID NO: 18193 - protein, 6 aa, synthetic construct
PHEFLW

SEQ ID NO: 18194 - protein, 6 aa, synthetic construct
PHEFLY

SEQ ID NO: 18195 - protein, 6 aa, synthetic construct
PHEFKD

SEQ ID NO: 18196 - protein, 6 aa, synthetic construct
PHEFKE

SEQ ID NO: 18197 - protein, 6 aa, synthetic construct
PHEFKF

SEQ ID NO: 18198 - protein, 6 aa, synthetic construct
PHEFKW

SEQ ID NO: 18199 - protein, 6 aa, synthetic construct
PHEFKY

SEQ ID NO: 18200 - protein, 6 aa, synthetic construct
PHEFMD

SEQ ID NO: 18201 - protein, 6 aa, synthetic construct
PHEFME

SEQ ID NO: 18202 - protein, 6 aa, synthetic construct
PHEFMF

SEQ ID NO: 18203 - protein, 6 aa, synthetic construct
PHEFMW

SEQ ID NO: 18204 - protein, 6 aa, synthetic construct
PHEFMY

SEQ ID NO: 18205 - protein, 6 aa, synthetic construct
PHEFFD

SEQ ID NO: 18206 - protein, 6 aa, synthetic construct
PHEFFE

SEQ ID NO: 18207 - protein, 6 aa, synthetic construct
PHEFFF

SEQ ID NO: 18208 - protein, 6 aa, synthetic construct
PHEFFW

SEQ ID NO: 18209 - protein, 6 aa, synthetic construct
PHEFFY

SEQ ID NO: 18210 - protein, 6 aa, synthetic construct
PHEFPD

SEQ ID NO: 18211 - protein, 6 aa, synthetic construct
PHEFPE

SEQ ID NO: 18212 - protein, 6 aa, synthetic construct
PHEFPF

SEQ ID NO: 18213 - protein, 6 aa, synthetic construct
PHEFPW

SEQ ID NO: 18214 - protein, 6 aa, synthetic construct
PHEFPY

SEQ ID NO: 18215 - protein, 6 aa, synthetic construct
PHEFSD

SEQ ID NO: 18216 - protein, 6 aa, synthetic construct
PHEFSE

SEQ ID NO: 18217 - protein, 6 aa, synthetic construct
PHEFSF

SEQ ID NO: 18218 - protein, 6 aa, synthetic construct
PHEFSW

SEQ ID NO: 18219 - protein, 6 aa, synthetic construct
PHEFSY

SEQ ID NO: 18220 - protein, 6 aa, synthetic construct
PHEFTD

SEQ ID NO: 18221 - protein, 6 aa, synthetic construct
PHEFTE

SEQ ID NO: 18222 - protein, 6 aa, synthetic construct
PHEFTF

SEQ ID NO: 18223 - protein, 6 aa, synthetic construct
PHEFTW

SEQ ID NO: 18224 - protein, 6 aa, synthetic construct
PHEFTY

SEQ ID NO: 18225 - protein, 6 aa, synthetic construct
PHEFWD

SEQ ID NO: 18226 - protein, 6 aa, synthetic construct
PHEFWE

SEQ ID NO: 18227 - protein, 6 aa, synthetic construct
PHEFWF

SEQ ID NO: 18228 - protein, 6 aa, synthetic construct
PHEFWW

SEQ ID NO: 18229 - protein, 6 aa, synthetic construct
PHEFWY

SEQ ID NO: 18230 - protein, 6 aa, synthetic construct
PHEFYD

SEQ ID NO: 18231 - protein, 6 aa, synthetic construct
PHEFYE

SEQ ID NO: 18232 - protein, 6 aa, synthetic construct
PHEFYF

SEQ ID NO: 18233 - protein, 6 aa, synthetic construct
PHEFYW

SEQ ID NO: 18234 - protein, 6 aa, synthetic construct
PHEFYY

SEQ ID NO: 18235 - protein, 6 aa, synthetic construct
PHEFVD

SEQ ID NO: 18236 - protein, 6 aa, synthetic construct
PHEFVE

SEQ ID NO: 18237 - protein, 6 aa, synthetic construct
PHEFVF

SEQ ID NO: 18238 - protein, 6 aa, synthetic construct
PHEFVW

SEQ ID NO: 18239 - protein, 6 aa, synthetic construct
PHEFVY

SEQ ID NO: 18240 - protein, 6 aa, synthetic construct
PHEPAD

SEQ ID NO: 18241 - protein, 6 aa, synthetic construct
PHEPAE

SEQ ID NO: 18242 - protein, 6 aa, synthetic construct
PHEPAF

SEQ ID NO: 18243 - protein, 6 aa, synthetic construct
PHEPAW

SEQ ID NO: 18244 - protein, 6 aa, synthetic construct
PHEPAY

SEQ ID NO: 18245 - protein, 6 aa, synthetic construct
PHEPRD

SEQ ID NO: 18246 - protein, 6 aa, synthetic construct
PHEPRE

SEQ ID NO: 18247 - protein, 6 aa, synthetic construct
PHEPRF

SEQ ID NO: 18248 - protein, 6 aa, synthetic construct
PHEPRW

SEQ ID NO: 18249 - protein, 6 aa, synthetic construct
PHEPRY

SEQ ID NO: 18250 - protein, 6 aa, synthetic construct
PHEPND

SEQ ID NO: 18251 - protein, 6 aa, synthetic construct
PHEPNE

SEQ ID NO: 18252 - protein, 6 aa, synthetic construct
PHEPNF

SEQ ID NO: 18253 - protein, 6 aa, synthetic construct
PHEPNW

SEQ ID NO: 18254 - protein, 6 aa, synthetic construct
PHEPNY

SEQ ID NO: 18255 - protein, 6 aa, synthetic construct
PHEPDD

SEQ ID NO: 18256 - protein, 6 aa, synthetic construct
PHEPDE

SEQ ID NO: 18257 - protein, 6 aa, synthetic construct
PHEPDF

SEQ ID NO: 18258 - protein, 6 aa, synthetic construct
PHEPDW

SEQ ID NO: 18259 - protein, 6 aa, synthetic construct
PHEPDY

SEQ ID NO: 18260 - protein, 6 aa, synthetic construct
PHEPCD

SEQ ID NO: 18261 - protein, 6 aa, synthetic construct
PHEPCE

SEQ ID NO: 18262 - protein, 6 aa, synthetic construct
PHEPCF

SEQ ID NO: 18263 - protein, 6 aa, synthetic construct
PHEPCW

SEQ ID NO: 18264 - protein, 6 aa, synthetic construct
PHEPCY

SEQ ID NO: 18265 - protein, 6 aa, synthetic construct
PHEPQD

SEQ ID NO: 18266 - protein, 6 aa, synthetic construct
PHEPQE

SEQ ID NO: 18267 - protein, 6 aa, synthetic construct
PHEPQF

SEQ ID NO: 18268 - protein, 6 aa, synthetic construct
PHEPQW

SEQ ID NO: 18269 - protein, 6 aa, synthetic construct
PHEPQY

SEQ ID NO: 18270 - protein, 6 aa, synthetic construct
PHEPED

SEQ ID NO: 18271 - protein, 6 aa, synthetic construct
PHEPEE

SEQ ID NO: 18272 - protein, 6 aa, synthetic construct
PHEPEF

SEQ ID NO: 18273 - protein, 6 aa, synthetic construct
PHEPEW

SEQ ID NO: 18274 - protein, 6 aa, synthetic construct
PHEPEY

SEQ ID NO: 18275 - protein, 6 aa, synthetic construct
PHEPGD

SEQ ID NO: 18276 - protein, 6 aa, synthetic construct
PHEPGE

SEQ ID NO: 18277 - protein, 6 aa, synthetic construct
PHEPGF

SEQ ID NO: 18278 - protein, 6 aa, synthetic construct
PHEPGW

SEQ ID NO: 18279 - protein, 6 aa, synthetic construct
PHEPGY

SEQ ID NO: 18280 - protein, 6 aa, synthetic construct
PHEPHD

SEQ ID NO: 18281 - protein, 6 aa, synthetic construct
PHEPHE

SEQ ID NO: 18282 - protein, 6 aa, synthetic construct
PHEPHF

SEQ ID NO: 18283 - protein, 6 aa, synthetic construct
PHEPHW

SEQ ID NO: 18284 - protein, 6 aa, synthetic construct
PHEPHY

SEQ ID NO: 18285 - protein, 6 aa, synthetic construct
PHEPID

SEQ ID NO: 18286 - protein, 6 aa, synthetic construct
PHEPIE

SEQ ID NO: 18287 - protein, 6 aa, synthetic construct
PHEPIF

SEQ ID NO: 18288 - protein, 6 aa, synthetic construct
PHEPIW

SEQ ID NO: 18289 - protein, 6 aa, synthetic construct
PHEPIY

SEQ ID NO: 18290 - protein, 6 aa, synthetic construct
PHEPLD

SEQ ID NO: 18291 - protein, 6 aa, synthetic construct
PHEPLE

SEQ ID NO: 18292 - protein, 6 aa, synthetic construct
PHEPLF

SEQ ID NO: 18293 - protein, 6 aa, synthetic construct
PHEPLW

SEQ ID NO: 18294 - protein, 6 aa, synthetic construct
PHEPLY

SEQ ID NO: 18295 - protein, 6 aa, synthetic construct
PHEPKD

SEQ ID NO: 18296 - protein, 6 aa, synthetic construct
PHEPKE

SEQ ID NO: 18297 - protein, 6 aa, synthetic construct
PHEPKF

SEQ ID NO: 18298 - protein, 6 aa, synthetic construct
PHEPKW

SEQ ID NO: 18299 - protein, 6 aa, synthetic construct
PHEPKY

SEQ ID NO: 18300 - protein, 6 aa, synthetic construct
PHEPMD

SEQ ID NO: 18301 - protein, 6 aa, synthetic construct
PHEPME

SEQ ID NO: 18302 - protein, 6 aa, synthetic construct
PHEPMF

SEQ ID NO: 18303 - protein, 6 aa, synthetic construct
PHEPMW

SEQ ID NO: 18304 - protein, 6 aa, synthetic construct
PHEPMY

SEQ ID NO: 18305 - protein, 6 aa, synthetic construct
PHEPFD

SEQ ID NO: 18306 - protein, 6 aa, synthetic construct
PHEPFE

SEQ ID NO: 18307 - protein, 6 aa, synthetic construct
PHEPFF

SEQ ID NO: 18308 - protein, 6 aa, synthetic construct
PHEPFW

SEQ ID NO: 18309 - protein, 6 aa, synthetic construct
PHEPFY

SEQ ID NO: 18310 - protein, 6 aa, synthetic construct
PHEPPD

SEQ ID NO: 18311 - protein, 6 aa, synthetic construct
PHEPPE

SEQ ID NO: 18312 - protein, 6 aa, synthetic construct
PHEPPF

SEQ ID NO: 18313 - protein, 6 aa, synthetic construct
PHEPPW

SEQ ID NO: 18314 - protein, 6 aa, synthetic construct
PHEPPY

SEQ ID NO: 18315 - protein, 6 aa, synthetic construct
PHEPSD

SEQ ID NO: 18316 - protein, 6 aa, synthetic construct
PHEPSE

SEQ ID NO: 18317 - protein, 6 aa, synthetic construct
PHEPSF

SEQ ID NO: 18318 - protein, 6 aa, synthetic construct
PHEPSW

SEQ ID NO: 18319 - protein, 6 aa, synthetic construct
PHEPSY

SEQ ID NO: 18320 - protein, 6 aa, synthetic construct
PHEPTD

SEQ ID NO: 18321 - protein, 6 aa, synthetic construct
PHEPTE

SEQ ID NO: 18322 - protein, 6 aa, synthetic construct
PHEPTF

SEQ ID NO: 18323 - protein, 6 aa, synthetic construct
PHEPTW

SEQ ID NO: 18324 - protein, 6 aa, synthetic construct
PHEPTY

SEQ ID NO: 18325 - protein, 6 aa, synthetic construct
PHEPWD

SEQ ID NO: 18326 - protein, 6 aa, synthetic construct
PHEPWE

SEQ ID NO: 18327 - protein, 6 aa, synthetic construct
PHEPWF

SEQ ID NO: 18328 - protein, 6 aa, synthetic construct
PHEPWW

SEQ ID NO: 18329 - protein, 6 aa, synthetic construct
PHEPWY

SEQ ID NO: 18330 - protein, 6 aa, synthetic construct
PHEPYD

SEQ ID NO: 18331 - protein, 6 aa, synthetic construct
PHEPYE

SEQ ID NO: 18332 - protein, 6 aa, synthetic construct
PHEPYF

SEQ ID NO: 18333 - protein, 6 aa, synthetic construct
PHEPYW

SEQ ID NO: 18334 - protein, 6 aa, synthetic construct
PHEPYY

SEQ ID NO: 18335 - protein, 6 aa, synthetic construct
PHEPVD

SEQ ID NO: 18336 - protein, 6 aa, synthetic construct
PHEPVE

SEQ ID NO: 18337 - protein, 6 aa, synthetic construct
PHEPVF

SEQ ID NO: 18338 - protein, 6 aa, synthetic construct
PHEPVW

SEQ ID NO: 18339 - protein, 6 aa, synthetic construct
PHEPVY

SEQ ID NO: 18340 - protein, 6 aa, synthetic construct
PHESAD

SEQ ID NO: 18341 - protein, 6 aa, synthetic construct
PHESAE

SEQ ID NO: 18342 - protein, 6 aa, synthetic construct
PHESAF

SEQ ID NO: 18343 - protein, 6 aa, synthetic construct
PHESAW

SEQ ID NO: 18344 - protein, 6 aa, synthetic construct
PHESAY

SEQ ID NO: 18345 - protein, 6 aa, synthetic construct
PHESRD

SEQ ID NO: 18346 - protein, 6 aa, synthetic construct
PHESRE

SEQ ID NO: 18347 - protein, 6 aa, synthetic construct
PHESRF

SEQ ID NO: 18348 - protein, 6 aa, synthetic construct
PHESRW

SEQ ID NO: 18349 - protein, 6 aa, synthetic construct
PHESRY

SEQ ID NO: 18350 - protein, 6 aa, synthetic construct
PHESND

SEQ ID NO: 18351 - protein, 6 aa, synthetic construct
PHESNE

SEQ ID NO: 18352 - protein, 6 aa, synthetic construct
PHESNF

SEQ ID NO: 18353 - protein, 6 aa, synthetic construct
PHESNW

SEQ ID NO: 18354 - protein, 6 aa, synthetic construct
PHESNY

SEQ ID NO: 18355 - protein, 6 aa, synthetic construct
PHESDD

SEQ ID NO: 18356 - protein, 6 aa, synthetic construct
PHESDE

SEQ ID NO: 18357 - protein, 6 aa, synthetic construct
PHESDF

SEQ ID NO: 18358 - protein, 6 aa, synthetic construct
PHESDW

SEQ ID NO: 18359 - protein, 6 aa, synthetic construct
PHESDY

SEQ ID NO: 18360 - protein, 6 aa, synthetic construct
PHESCD

SEQ ID NO: 18361 - protein, 6 aa, synthetic construct
PHESCE

SEQ ID NO: 18362 - protein, 6 aa, synthetic construct
PHESCF

SEQ ID NO: 18363 - protein, 6 aa, synthetic construct
PHESCW

SEQ ID NO: 18364 - protein, 6 aa, synthetic construct
PHESCY

SEQ ID NO: 18365 - protein, 6 aa, synthetic construct
PHESQD

SEQ ID NO: 18366 - protein, 6 aa, synthetic construct
PHESQE

SEQ ID NO: 18367 - protein, 6 aa, synthetic construct
PHESQF

SEQ ID NO: 18368 - protein, 6 aa, synthetic construct
PHESQW

SEQ ID NO: 18369 - protein, 6 aa, synthetic construct
PHESQY

SEQ ID NO: 18370 - protein, 6 aa, synthetic construct
PHESED

SEQ ID NO: 18371 - protein, 6 aa, synthetic construct
PHESEE

SEQ ID NO: 18372 - protein, 6 aa, synthetic construct
PHESEF

SEQ ID NO: 18373 - protein, 6 aa, synthetic construct
PHESEW

SEQ ID NO: 18374 - protein, 6 aa, synthetic construct
PHESEY

SEQ ID NO: 18375 - protein, 6 aa, synthetic construct
PHESGD

SEQ ID NO: 18376 - protein, 6 aa, synthetic construct
PHESGE

SEQ ID NO: 18377 - protein, 6 aa, synthetic construct
PHESGF

SEQ ID NO: 18378 - protein, 6 aa, synthetic construct
PHESGW

SEQ ID NO: 18379 - protein, 6 aa, synthetic construct
PHESGY

SEQ ID NO: 18380 - protein, 6 aa, synthetic construct
PHESHD

SEQ ID NO: 18381 - protein, 6 aa, synthetic construct
PHESHE

SEQ ID NO: 18382 - protein, 6 aa, synthetic construct
PHESHF

SEQ ID NO: 18383 - protein, 6 aa, synthetic construct
PHESHW

SEQ ID NO: 18384 - protein, 6 aa, synthetic construct
PHESHY

SEQ ID NO: 18385 - protein, 6 aa, synthetic construct
PHESID

SEQ ID NO: 18386 - protein, 6 aa, synthetic construct
PHESIE

SEQ ID NO: 18387 - protein, 6 aa, synthetic construct
PHESIF

SEQ ID NO: 18388 - protein, 6 aa, synthetic construct
PHESIW

SEQ ID NO: 18389 - protein, 6 aa, synthetic construct
PHESIY

SEQ ID NO: 18390 - protein, 6 aa, synthetic construct
PHESLD

SEQ ID NO: 18391 - protein, 6 aa, synthetic construct
PHESLE

SEQ ID NO: 18392 - protein, 6 aa, synthetic construct
PHESLF

SEQ ID NO: 18393 - protein, 6 aa, synthetic construct
PHESLW

SEQ ID NO: 18394 - protein, 6 aa, synthetic construct
PHESLY

SEQ ID NO: 18395 - protein, 6 aa, synthetic construct
PHESKD

SEQ ID NO: 18396 - protein, 6 aa, synthetic construct
PHESKE

SEQ ID NO: 18397 - protein, 6 aa, synthetic construct
PHESKF

SEQ ID NO: 18398 - protein, 6 aa, synthetic construct
PHESKW

SEQ ID NO: 18399 - protein, 6 aa, synthetic construct
PHESKY

SEQ ID NO: 18400 - protein, 6 aa, synthetic construct
PHESMD

SEQ ID NO: 18401 - protein, 6 aa, synthetic construct
PHESME

SEQ ID NO: 18402 - protein, 6 aa, synthetic construct
PHESMF

SEQ ID NO: 18403 - protein, 6 aa, synthetic construct
PHESMW

SEQ ID NO: 18404 - protein, 6 aa, synthetic construct
PHESMY

SEQ ID NO: 18405 - protein, 6 aa, synthetic construct
PHESFD

SEQ ID NO: 18406 - protein, 6 aa, synthetic construct
PHESFE

SEQ ID NO: 18407 - protein, 6 aa, synthetic construct
PHESFF

SEQ ID NO: 18408 - protein, 6 aa, synthetic construct
PHESFW

SEQ ID NO: 18409 - protein, 6 aa, synthetic construct
PHESFY

SEQ ID NO: 18410 - protein, 6 aa, synthetic construct
PHESPD

SEQ ID NO: 18411 - protein, 6 aa, synthetic construct
PHESPE

SEQ ID NO: 18412 - protein, 6 aa, synthetic construct
PHESPF

SEQ ID NO: 18413 - protein, 6 aa, synthetic construct
PHESPW

SEQ ID NO: 18414 - protein, 6 aa, synthetic construct
PHESPY

SEQ ID NO: 18415 - protein, 6 aa, synthetic construct
PHESSD

SEQ ID NO: 18416 - protein, 6 aa, synthetic construct
PHESSE

SEQ ID NO: 18417 - protein, 6 aa, synthetic construct
PHESSF

SEQ ID NO: 18418 - protein, 6 aa, synthetic construct
PHESSW

SEQ ID NO: 18419 - protein, 6 aa, synthetic construct
PHESSY

SEQ ID NO: 18420 - protein, 6 aa, synthetic construct
PHESTD

SEQ ID NO: 18421 - protein, 6 aa, synthetic construct
PHESTE

SEQ ID NO: 18422 - protein, 6 aa, synthetic construct
PHESTF

SEQ ID NO: 18423 - protein, 6 aa, synthetic construct
PHESTW

SEQ ID NO: 18424 - protein, 6 aa, synthetic construct
PHESTY

SEQ ID NO: 18425 - protein, 6 aa, synthetic construct
PHESWD

SEQ ID NO: 18426 - protein, 6 aa, synthetic construct
PHESWE

SEQ ID NO: 18427 - protein, 6 aa, synthetic construct
PHESWF

SEQ ID NO: 18428 - protein, 6 aa, synthetic construct
PHESWW

SEQ ID NO: 18429 - protein, 6 aa, synthetic construct
PHESWY

SEQ ID NO: 18430 - protein, 6 aa, synthetic construct
PHESYD

SEQ ID NO: 18431 - protein, 6 aa, synthetic construct
PHESYE

SEQ ID NO: 18432 - protein, 6 aa, synthetic construct
PHESYF

SEQ ID NO: 18433 - protein, 6 aa, synthetic construct
PHESYW

SEQ ID NO: 18434 - protein, 6 aa, synthetic construct
PHESYY

SEQ ID NO: 18435 - protein, 6 aa, synthetic construct
PHESVD

SEQ ID NO: 18436 - protein, 6 aa, synthetic construct
PHESVE

SEQ ID NO: 18437 - protein, 6 aa, synthetic construct
PHESVF

SEQ ID NO: 18438 - protein, 6 aa, synthetic construct
PHESVW

SEQ ID NO: 18439 - protein, 6 aa, synthetic construct
PHESVY

SEQ ID NO: 18440 - protein, 6 aa, synthetic construct
PHETAD

SEQ ID NO: 18441 - protein, 6 aa, synthetic construct
PHETAE

SEQ ID NO: 18442 - protein, 6 aa, synthetic construct
PHETAF

SEQ ID NO: 18443 - protein, 6 aa, synthetic construct
PHETAW

SEQ ID NO: 18444 - protein, 6 aa, synthetic construct
PHETAY

SEQ ID NO: 18445 - protein, 6 aa, synthetic construct
PHETRD

SEQ ID NO: 18446 - protein, 6 aa, synthetic construct
PHETRE

SEQ ID NO: 18447 - protein, 6 aa, synthetic construct
PHETRF

SEQ ID NO: 18448 - protein, 6 aa, synthetic construct
PHETRW

SEQ ID NO: 18449 - protein, 6 aa, synthetic construct
PHETRY

SEQ ID NO: 18450 - protein, 6 aa, synthetic construct
PHETND

SEQ ID NO: 18451 - protein, 6 aa, synthetic construct
PHETNE

SEQ ID NO: 18452 - protein, 6 aa, synthetic construct
PHETNF

SEQ ID NO: 18453 - protein, 6 aa, synthetic construct
PHETNW

SEQ ID NO: 18454 - protein, 6 aa, synthetic construct
PHETNY

SEQ ID NO: 18455 - protein, 6 aa, synthetic construct
PHETDD

SEQ ID NO: 18456 - protein, 6 aa, synthetic construct
PHETDE

SEQ ID NO: 18457 - protein, 6 aa, synthetic construct
PHETDF

SEQ ID NO: 18458 - protein, 6 aa, synthetic construct
PHETDW

SEQ ID NO: 18459 - protein, 6 aa, synthetic construct
PHETDY

SEQ ID NO: 18460 - protein, 6 aa, synthetic construct
PHETCD

SEQ ID NO: 18461 - protein, 6 aa, synthetic construct
PHETCE

SEQ ID NO: 18462 - protein, 6 aa, synthetic construct
PHETCF

SEQ ID NO: 18463 - protein, 6 aa, synthetic construct
PHETCW

SEQ ID NO: 18464 - protein, 6 aa, synthetic construct
PHETCY

SEQ ID NO: 18465 - protein, 6 aa, synthetic construct
PHETQD

SEQ ID NO: 18466 - protein, 6 aa, synthetic construct
PHETQE

SEQ ID NO: 18467 - protein, 6 aa, synthetic construct
PHETQF

SEQ ID NO: 18468 - protein, 6 aa, synthetic construct
PHETQW

SEQ ID NO: 18469 - protein, 6 aa, synthetic construct
PHETQY

SEQ ID NO: 18470 - protein, 6 aa, synthetic construct
PHETED

SEQ ID NO: 18471 - protein, 6 aa, synthetic construct
PHETEE

SEQ ID NO: 18472 - protein, 6 aa, synthetic construct
PHETEF

SEQ ID NO: 18473 - protein, 6 aa, synthetic construct
PHETEW

SEQ ID NO: 18474 - protein, 6 aa, synthetic construct
PHETEY

SEQ ID NO: 18475 - protein, 6 aa, synthetic construct
PHETGD

SEQ ID NO: 18476 - protein, 6 aa, synthetic construct
PHETGE

SEQ ID NO: 18477 - protein, 6 aa, synthetic construct
PHETGF

SEQ ID NO: 18478 - protein, 6 aa, synthetic construct
PHETGW

SEQ ID NO: 18479 - protein, 6 aa, synthetic construct
PHETGY

SEQ ID NO: 18480 - protein, 6 aa, synthetic construct
PHETHD

SEQ ID NO: 18481 - protein, 6 aa, synthetic construct
PHETHE

SEQ ID NO: 18482 - protein, 6 aa, synthetic construct
PHETHF

SEQ ID NO: 18483 - protein, 6 aa, synthetic construct
PHETHW

SEQ ID NO: 18484 - protein, 6 aa, synthetic construct
PHETHY

SEQ ID NO: 18485 - protein, 6 aa, synthetic construct
PHETID

SEQ ID NO: 18486 - protein, 6 aa, synthetic construct
PHETIE

SEQ ID NO: 18487 - protein, 6 aa, synthetic construct
PHETIF

SEQ ID NO: 18488 - protein, 6 aa, synthetic construct
PHETIW

SEQ ID NO: 18489 - protein, 6 aa, synthetic construct
PHETIY

SEQ ID NO: 18490 - protein, 6 aa, synthetic construct
PHETLD

SEQ ID NO: 18491 - protein, 6 aa, synthetic construct
PHETLE

SEQ ID NO: 18492 - protein, 6 aa, synthetic construct
PHETLF

SEQ ID NO: 18493 - protein, 6 aa, synthetic construct
PHETLW

SEQ ID NO: 18494 - protein, 6 aa, synthetic construct
PHETLY

SEQ ID NO: 18495 - protein, 6 aa, synthetic construct
PHETKD

SEQ ID NO: 18496 - protein, 6 aa, synthetic construct
PHETKE

SEQ ID NO: 18497 - protein, 6 aa, synthetic construct
PHETKF

SEQ ID NO: 18498 - protein, 6 aa, synthetic construct
PHETKW

SEQ ID NO: 18499 - protein, 6 aa, synthetic construct
PHETKY

SEQ ID NO: 18500 - protein, 6 aa, synthetic construct
PHETMD

SEQ ID NO: 18501 - protein, 6 aa, synthetic construct
PHETME

SEQ ID NO: 18502 - protein, 6 aa, synthetic construct
PHETMF

SEQ ID NO: 18503 - protein, 6 aa, synthetic construct
PHETMW

SEQ ID NO: 18504 - protein, 6 aa, synthetic construct
PHETMY

SEQ ID NO: 18505 - protein, 6 aa, synthetic construct
PHETFD

SEQ ID NO: 18506 - protein, 6 aa, synthetic construct
PHETFE

SEQ ID NO: 18507 - protein, 6 aa, synthetic construct
PHETFF

SEQ ID NO: 18508 - protein, 6 aa, synthetic construct
PHETFW

SEQ ID NO: 18509 - protein, 6 aa, synthetic construct
PHETFY

SEQ ID NO: 18510 - protein, 6 aa, synthetic construct
PHETPD

SEQ ID NO: 18511 - protein, 6 aa, synthetic construct
PHETPE

SEQ ID NO: 18512 - protein, 6 aa, synthetic construct
PHETPF

SEQ ID NO: 18513 - protein, 6 aa, synthetic construct
PHETPW

SEQ ID NO: 18514 - protein, 6 aa, synthetic construct
PHETPY

SEQ ID NO: 18515 - protein, 6 aa, synthetic construct
PHETSD

SEQ ID NO: 18516 - protein, 6 aa, synthetic construct
PHETSE

SEQ ID NO: 18517 - protein, 6 aa, synthetic construct
PHETSF

SEQ ID NO: 18518 - protein, 6 aa, synthetic construct
PHETSW

SEQ ID NO: 18519 - protein, 6 aa, synthetic construct
PHETSY

SEQ ID NO: 18520 - protein, 6 aa, synthetic construct
PHETTD

SEQ ID NO: 18521 - protein, 6 aa, synthetic construct
PHETTE

SEQ ID NO: 18522 - protein, 6 aa, synthetic construct
PHETTF

SEQ ID NO: 18523 - protein, 6 aa, synthetic construct
PHETTW

SEQ ID NO: 18524 - protein, 6 aa, synthetic construct
PHETTY

SEQ ID NO: 18525 - protein, 6 aa, synthetic construct
PHETWD

SEQ ID NO: 18526 - protein, 6 aa, synthetic construct
PHETWE

SEQ ID NO: 18527 - protein, 6 aa, synthetic construct
PHETWF

SEQ ID NO: 18528 - protein, 6 aa, synthetic construct
PHETWW

SEQ ID NO: 18529 - protein, 6 aa, synthetic construct
PHETWY

SEQ ID NO: 18530 - protein, 6 aa, synthetic construct
PHETYD

SEQ ID NO: 18531 - protein, 6 aa, synthetic construct
PHETYE

SEQ ID NO: 18532 - protein, 6 aa, synthetic construct
PHETYF

SEQ ID NO: 18533 - protein, 6 aa, synthetic construct
PHETYW

SEQ ID NO: 18534 - protein, 6 aa, synthetic construct
PHETYY

SEQ ID NO: 18535 - protein, 6 aa, synthetic construct
PHETVD

SEQ ID NO: 18536 - protein, 6 aa, synthetic construct
PHETVE

SEQ ID NO: 18537 - protein, 6 aa, synthetic construct
PHETVF

SEQ ID NO: 18538 - protein, 6 aa, synthetic construct
PHETVW

SEQ ID NO: 18539 - protein, 6 aa, synthetic construct
PHETVY

SEQ ID NO: 18540 - protein, 6 aa, synthetic construct
PHEWAD

SEQ ID NO: 18541 - protein, 6 aa, synthetic construct
PHEWAE

SEQ ID NO: 18542 - protein, 6 aa, synthetic construct
PHEWAF

SEQ ID NO: 18543 - protein, 6 aa, synthetic construct
PHEWAW

SEQ ID NO: 18544 - protein, 6 aa, synthetic construct
PHEWAY

SEQ ID NO: 18545 - protein, 6 aa, synthetic construct
PHEWRD

SEQ ID NO: 18546 - protein, 6 aa, synthetic construct
PHEWRE

SEQ ID NO: 18547 - protein, 6 aa, synthetic construct
PHEWRF

SEQ ID NO: 18548 - protein, 6 aa, synthetic construct
PHEWRW

SEQ ID NO: 18549 - protein, 6 aa, synthetic construct
PHEWRY

SEQ ID NO: 18550 - protein, 6 aa, synthetic construct
PHEWND

SEQ ID NO: 18551 - protein, 6 aa, synthetic construct
PHEWNE

SEQ ID NO: 18552 - protein, 6 aa, synthetic construct
PHEWNF

SEQ ID NO: 18553 - protein, 6 aa, synthetic construct
PHEWNW

SEQ ID NO: 18554 - protein, 6 aa, synthetic construct
PHEWNY

SEQ ID NO: 18555 - protein, 6 aa, synthetic construct
PHEWDD

SEQ ID NO: 18556 - protein, 6 aa, synthetic construct
PHEWDE

SEQ ID NO: 18557 - protein, 6 aa, synthetic construct
PHEWDF

SEQ ID NO: 18558 - protein, 6 aa, synthetic construct
PHEWDW

SEQ ID NO: 18559 - protein, 6 aa, synthetic construct
PHEWDY

SEQ ID NO: 18560 - protein, 6 aa, synthetic construct
PHEWCD

SEQ ID NO: 18561 - protein, 6 aa, synthetic construct
PHEWCE

SEQ ID NO: 18562 - protein, 6 aa, synthetic construct
PHEWCF

SEQ ID NO: 18563 - protein, 6 aa, synthetic construct
PHEWCW

SEQ ID NO: 18564 - protein, 6 aa, synthetic construct
PHEWCY

SEQ ID NO: 18565 - protein, 6 aa, synthetic construct
PHEWQD

SEQ ID NO: 18566 - protein, 6 aa, synthetic construct
PHEWQE

SEQ ID NO: 18567 - protein, 6 aa, synthetic construct
PHEWQF

SEQ ID NO: 18568 - protein, 6 aa, synthetic construct
PHEWQW

SEQ ID NO: 18569 - protein, 6 aa, synthetic construct
PHEWQY

SEQ ID NO: 18570 - protein, 6 aa, synthetic construct
PHEWED

SEQ ID NO: 18571 - protein, 6 aa, synthetic construct
PHEWEE

SEQ ID NO: 18572 - protein, 6 aa, synthetic construct
PHEWEF

SEQ ID NO: 18573 - protein, 6 aa, synthetic construct
PHEWEW

SEQ ID NO: 18574 - protein, 6 aa, synthetic construct
PHEWEY

SEQ ID NO: 18575 - protein, 6 aa, synthetic construct
PHEWGD

SEQ ID NO: 18576 - protein, 6 aa, synthetic construct
PHEWGE

SEQ ID NO: 18577 - protein, 6 aa, synthetic construct
PHEWGF

SEQ ID NO: 18578 - protein, 6 aa, synthetic construct
PHEWGW

SEQ ID NO: 18579 - protein, 6 aa, synthetic construct
PHEWGY

SEQ ID NO: 18580 - protein, 6 aa, synthetic construct
PHEWHD

SEQ ID NO: 18581 - protein, 6 aa, synthetic construct
PHEWHE

SEQ ID NO: 18582 - protein, 6 aa, synthetic construct
PHEWHF

SEQ ID NO: 18583 - protein, 6 aa, synthetic construct
PHEWHW

SEQ ID NO: 18584 - protein, 6 aa, synthetic construct
PHEWHY

SEQ ID NO: 18585 - protein, 6 aa, synthetic construct
PHEWID

SEQ ID NO: 18586 - protein, 6 aa, synthetic construct
PHEWIE

SEQ ID NO: 18587 - protein, 6 aa, synthetic construct
PHEWIF

SEQ ID NO: 18588 - protein, 6 aa, synthetic construct
PHEWIW

SEQ ID NO: 18589 - protein, 6 aa, synthetic construct
PHEWIY

SEQ ID NO: 18590 - protein, 6 aa, synthetic construct
PHEWLD

SEQ ID NO: 18591 - protein, 6 aa, synthetic construct
PHEWLE

SEQ ID NO: 18592 - protein, 6 aa, synthetic construct
PHEWLF

SEQ ID NO: 18593 - protein, 6 aa, synthetic construct
PHEWLW

SEQ ID NO: 18594 - protein, 6 aa, synthetic construct
PHEWLY

SEQ ID NO: 18595 - protein, 6 aa, synthetic construct
PHEWKD

SEQ ID NO: 18596 - protein, 6 aa, synthetic construct
PHEWKE

SEQ ID NO: 18597 - protein, 6 aa, synthetic construct
PHEWKF

SEQ ID NO: 18598 - protein, 6 aa, synthetic construct
PHEWKW

SEQ ID NO: 18599 - protein, 6 aa, synthetic construct
PHEWKY

SEQ ID NO: 18600 - protein, 6 aa, synthetic construct
PHEWMD

SEQ ID NO: 18601 - protein, 6 aa, synthetic construct
PHEWME

SEQ ID NO: 18602 - protein, 6 aa, synthetic construct
PHEWMF

SEQ ID NO: 18603 - protein, 6 aa, synthetic construct
PHEWMW

SEQ ID NO: 18604 - protein, 6 aa, synthetic construct
PHEWMY

SEQ ID NO: 18605 - protein, 6 aa, synthetic construct
PHEWFD

SEQ ID NO: 18606 - protein, 6 aa, synthetic construct
PHEWFE

SEQ ID NO: 18607 - protein, 6 aa, synthetic construct
PHEWFF

SEQ ID NO: 18608 - protein, 6 aa, synthetic construct
PHEWFW

SEQ ID NO: 18609 - protein, 6 aa, synthetic construct
PHEWFY

SEQ ID NO: 18610 - protein, 6 aa, synthetic construct
PHEWPD

SEQ ID NO: 18611 - protein, 6 aa, synthetic construct
PHEWPE

SEQ ID NO: 18612 - protein, 6 aa, synthetic construct
PHEWPF

SEQ ID NO: 18613 - protein, 6 aa, synthetic construct
PHEWPW

SEQ ID NO: 18614 - protein, 6 aa, synthetic construct
PHEWPY

SEQ ID NO: 18615 - protein, 6 aa, synthetic construct
PHEWSD

SEQ ID NO: 18616 - protein, 6 aa, synthetic construct
PHEWSE

SEQ ID NO: 18617 - protein, 6 aa, synthetic construct
PHEWSF

SEQ ID NO: 18618 - protein, 6 aa, synthetic construct
PHEWSW

SEQ ID NO: 18619 - protein, 6 aa, synthetic construct
PHEWSY

SEQ ID NO: 18620 - protein, 6 aa, synthetic construct
PHEWTD

SEQ ID NO: 18621 - protein, 6 aa, synthetic construct
PHEWTE

SEQ ID NO: 18622 - protein, 6 aa, synthetic construct
PHEWTF

SEQ ID NO: 18623 - protein, 6 aa, synthetic construct
PHEWTW

SEQ ID NO: 18624 - protein, 6 aa, synthetic construct
PHEWTY

SEQ ID NO: 18625 - protein, 6 aa, synthetic construct
PHEWWD

SEQ ID NO: 18626 - protein, 6 aa, synthetic construct
PHEWWE

SEQ ID NO: 18627 - protein, 6 aa, synthetic construct
PHEWWF

SEQ ID NO: 18628 - protein, 6 aa, synthetic construct
PHEWWW

SEQ ID NO: 18629 - protein, 6 aa, synthetic construct
PHEWWY

SEQ ID NO: 18630 - protein, 6 aa, synthetic construct
PHEWYD

SEQ ID NO: 18631 - protein, 6 aa, synthetic construct
PHEWYE

SEQ ID NO: 18632 - protein, 6 aa, synthetic construct
PHEWYF

SEQ ID NO: 18633 - protein, 6 aa, synthetic construct
PHEWYW

SEQ ID NO: 18634 - protein, 6 aa, synthetic construct
PHEWYY

SEQ ID NO: 18635 - protein, 6 aa, synthetic construct
PHEWVD

SEQ ID NO: 18636 - protein, 6 aa, synthetic construct
PHEWVE

SEQ ID NO: 18637 - protein, 6 aa, synthetic construct
PHEWVF

SEQ ID NO: 18638 - protein, 6 aa, synthetic construct
PHEWVW

SEQ ID NO: 18639 - protein, 6 aa, synthetic construct
PHEWVY

SEQ ID NO: 18640 - protein, 6 aa, synthetic construct
PHEYAD

SEQ ID NO: 18641 - protein, 6 aa, synthetic construct
PHEYAE

SEQ ID NO: 18642 - protein, 6 aa, synthetic construct
PHEYAF

SEQ ID NO: 18643 - protein, 6 aa, synthetic construct
PHEYAW

SEQ ID NO: 18644 - protein, 6 aa, synthetic construct
PHEYAY

SEQ ID NO: 18645 - protein, 6 aa, synthetic construct
PHEYRD

SEQ ID NO: 18646 - protein, 6 aa, synthetic construct
PHEYRE

SEQ ID NO: 18647 - protein, 6 aa, synthetic construct
PHEYRF

SEQ ID NO: 18648 - protein, 6 aa, synthetic construct
PHEYRW

SEQ ID NO: 18649 - protein, 6 aa, synthetic construct
PHEYRY

SEQ ID NO: 18650 - protein, 6 aa, synthetic construct
PHEYND

SEQ ID NO: 18651 - protein, 6 aa, synthetic construct
PHEYNE

SEQ ID NO: 18652 - protein, 6 aa, synthetic construct
PHEYNF

SEQ ID NO: 18653 - protein, 6 aa, synthetic construct
PHEYNW

SEQ ID NO: 18654 - protein, 6 aa, synthetic construct
PHEYNY

SEQ ID NO: 18655 - protein, 6 aa, synthetic construct
PHEYDD

SEQ ID NO: 18656 - protein, 6 aa, synthetic construct
PHEYDE

SEQ ID NO: 18657 - protein, 6 aa, synthetic construct
PHEYDF

SEQ ID NO: 18658 - protein, 6 aa, synthetic construct
PHEYDW

SEQ ID NO: 18659 - protein, 6 aa, synthetic construct
PHEYDY

SEQ ID NO: 18660 - protein, 6 aa, synthetic construct
PHEYCD

SEQ ID NO: 18661 - protein, 6 aa, synthetic construct
PHEYCE

SEQ ID NO: 18662 - protein, 6 aa, synthetic construct
PHEYCF

SEQ ID NO: 18663 - protein, 6 aa, synthetic construct
PHEYCW

SEQ ID NO: 18664 - protein, 6 aa, synthetic construct
PHEYCY

SEQ ID NO: 18665 - protein, 6 aa, synthetic construct
PHEYQD

SEQ ID NO: 18666 - protein, 6 aa, synthetic construct
PHEYQE

SEQ ID NO: 18667 - protein, 6 aa, synthetic construct
PHEYQF

SEQ ID NO: 18668 - protein, 6 aa, synthetic construct
PHEYQW

SEQ ID NO: 18669 - protein, 6 aa, synthetic construct
PHEYQY

SEQ ID NO: 18670 - protein, 6 aa, synthetic construct
PHEYED

SEQ ID NO: 18671 - protein, 6 aa, synthetic construct
PHEYEE

SEQ ID NO: 18672 - protein, 6 aa, synthetic construct
PHEYEF

SEQ ID NO: 18673 - protein, 6 aa, synthetic construct
PHEYEW

SEQ ID NO: 18674 - protein, 6 aa, synthetic construct
PHEYEY

SEQ ID NO: 18675 - protein, 6 aa, synthetic construct
PHEYGD

SEQ ID NO: 18676 - protein, 6 aa, synthetic construct
PHEYGE

SEQ ID NO: 18677 - protein, 6 aa, synthetic construct
PHEYGF

SEQ ID NO: 18678 - protein, 6 aa, synthetic construct
PHEYGW

SEQ ID NO: 18679 - protein, 6 aa, synthetic construct
PHEYGY

SEQ ID NO: 18680 - protein, 6 aa, synthetic construct
PHEYHD

SEQ ID NO: 18681 - protein, 6 aa, synthetic construct
PHEYHE

SEQ ID NO: 18682 - protein, 6 aa, synthetic construct
PHEYHF

SEQ ID NO: 18683 - protein, 6 aa, synthetic construct
PHEYHW

SEQ ID NO: 18684 - protein, 6 aa, synthetic construct
PHEYHY

SEQ ID NO: 18685 - protein, 6 aa, synthetic construct
PHEYID

SEQ ID NO: 18686 - protein, 6 aa, synthetic construct
PHEYIE

SEQ ID NO: 18687 - protein, 6 aa, synthetic construct
PHEYIF

SEQ ID NO: 18688 - protein, 6 aa, synthetic construct
PHEYIW

SEQ ID NO: 18689 - protein, 6 aa, synthetic construct
PHEYIY

SEQ ID NO: 18690 - protein, 6 aa, synthetic construct
PHEYLD

SEQ ID NO: 18691 - protein, 6 aa, synthetic construct
PHEYLE

SEQ ID NO: 18692 - protein, 6 aa, synthetic construct
PHEYLF

SEQ ID NO: 18693 - protein, 6 aa, synthetic construct
PHEYLW

SEQ ID NO: 18694 - protein, 6 aa, synthetic construct
PHEYLY

SEQ ID NO: 18695 - protein, 6 aa, synthetic construct
PHEYKD

SEQ ID NO: 18696 - protein, 6 aa, synthetic construct
PHEYKE

SEQ ID NO: 18697 - protein, 6 aa, synthetic construct
PHEYKF

SEQ ID NO: 18698 - protein, 6 aa, synthetic construct
PHEYKW

SEQ ID NO: 18699 - protein, 6 aa, synthetic construct
PHEYKY

SEQ ID NO: 18700 - protein, 6 aa, synthetic construct
PHEYMD

SEQ ID NO: 18701 - protein, 6 aa, synthetic construct
PHEYME

SEQ ID NO: 18702 - protein, 6 aa, synthetic construct
PHEYMF

SEQ ID NO: 18703 - protein, 6 aa, synthetic construct
PHEYMW

SEQ ID NO: 18704 - protein, 6 aa, synthetic construct
PHEYMY

SEQ ID NO: 18705 - protein, 6 aa, synthetic construct
PHEYFD

SEQ ID NO: 18706 - protein, 6 aa, synthetic construct
PHEYFE

SEQ ID NO: 18707 - protein, 6 aa, synthetic construct
PHEYFF

SEQ ID NO: 18708 - protein, 6 aa, synthetic construct
PHEYFW

SEQ ID NO: 18709 - protein, 6 aa, synthetic construct
PHEYFY

SEQ ID NO: 18710 - protein, 6 aa, synthetic construct
PHEYPD

SEQ ID NO: 18711 - protein, 6 aa, synthetic construct
PHEYPE

SEQ ID NO: 18712 - protein, 6 aa, synthetic construct
PHEYPF

SEQ ID NO: 18713 - protein, 6 aa, synthetic construct
PHEYPW

SEQ ID NO: 18714 - protein, 6 aa, synthetic construct
PHEYPY

SEQ ID NO: 18715 - protein, 6 aa, synthetic construct
PHEYSD

SEQ ID NO: 18716 - protein, 6 aa, synthetic construct
PHEYSE

SEQ ID NO: 18717 - protein, 6 aa, synthetic construct
PHEYSF

SEQ ID NO: 18718 - protein, 6 aa, synthetic construct
PHEYSW

SEQ ID NO: 18719 - protein, 6 aa, synthetic construct
PHEYSY

SEQ ID NO: 18720 - protein, 6 aa, synthetic construct
PHEYTD

SEQ ID NO: 18721 - protein, 6 aa, synthetic construct
PHEYTE

SEQ ID NO: 18722 - protein, 6 aa, synthetic construct
PHEYTF

SEQ ID NO: 18723 - protein, 6 aa, synthetic construct
PHEYTW

SEQ ID NO: 18724 - protein, 6 aa, synthetic construct
PHEYTY

SEQ ID NO: 18725 - protein, 6 aa, synthetic construct
PHEYWD

SEQ ID NO: 18726 - protein, 6 aa, synthetic construct
PHEYWE

SEQ ID NO: 18727 - protein, 6 aa, synthetic construct
PHEYWF

SEQ ID NO: 18728 - protein, 6 aa, synthetic construct
PHEYWW

SEQ ID NO: 18729 - protein, 6 aa, synthetic construct
PHEYWY

SEQ ID NO: 18730 - protein, 6 aa, synthetic construct
PHEYYD

SEQ ID NO: 18731 - protein, 6 aa, synthetic construct
PHEYYE

SEQ ID NO: 18732 - protein, 6 aa, synthetic construct
PHEYYF

SEQ ID NO: 18733 - protein, 6 aa, synthetic construct
PHEYYW

SEQ ID NO: 18734 - protein, 6 aa, synthetic construct
PHEYYY

SEQ ID NO: 18735 - protein, 6 aa, synthetic construct
PHEYVD

SEQ ID NO: 18736 - protein, 6 aa, synthetic construct
PHEYVE

SEQ ID NO: 18737 - protein, 6 aa, synthetic construct
PHEYVF

SEQ ID NO: 18738 - protein, 6 aa, synthetic construct
PHEYVW

SEQ ID NO: 18739 - protein, 6 aa, synthetic construct
PHEYVY

SEQ ID NO: 18740 - protein, 6 aa, synthetic construct
PHEVAD

SEQ ID NO: 18741 - protein, 6 aa, synthetic construct
PHEVAE

SEQ ID NO: 18742 - protein, 6 aa, synthetic construct
PHEVAF

SEQ ID NO: 18743 - protein, 6 aa, synthetic construct
PHEVAW

SEQ ID NO: 18744 - protein, 6 aa, synthetic construct
PHEVAY

SEQ ID NO: 18745 - protein, 6 aa, synthetic construct
PHEVRD

SEQ ID NO: 18746 - protein, 6 aa, synthetic construct
PHEVRE

SEQ ID NO: 18747 - protein, 6 aa, synthetic construct
PHEVRF

SEQ ID NO: 18748 - protein, 6 aa, synthetic construct
PHEVRW

SEQ ID NO: 18749 - protein, 6 aa, synthetic construct
PHEVRY

SEQ ID NO: 18750 - protein, 6 aa, synthetic construct
PHEVND

SEQ ID NO: 18751 - protein, 6 aa, synthetic construct
PHEVNE

SEQ ID NO: 18752 - protein, 6 aa, synthetic construct
PHEVNF

SEQ ID NO: 18753 - protein, 6 aa, synthetic construct
PHEVNW

SEQ ID NO: 18754 - protein, 6 aa, synthetic construct
PHEVNY

SEQ ID NO: 18755 - protein, 6 aa, synthetic construct
PHEVDD

SEQ ID NO: 18756 - protein, 6 aa, synthetic construct
PHEVDE

SEQ ID NO: 18757 - protein, 6 aa, synthetic construct
PHEVDF

SEQ ID NO: 18758 - protein, 6 aa, synthetic construct
PHEVDW

SEQ ID NO: 18759 - protein, 6 aa, synthetic construct
PHEVDY

SEQ ID NO: 18760 - protein, 6 aa, synthetic construct
PHEVCD

SEQ ID NO: 18761 - protein, 6 aa, synthetic construct
PHEVCE

SEQ ID NO: 18762 - protein, 6 aa, synthetic construct
PHEVCF

SEQ ID NO: 18763 - protein, 6 aa, synthetic construct
PHEVCW

SEQ ID NO: 18764 - protein, 6 aa, synthetic construct
PHEVCY

SEQ ID NO: 18765 - protein, 6 aa, synthetic construct
PHEVQD

SEQ ID NO: 18766 - protein, 6 aa, synthetic construct
PHEVQE

SEQ ID NO: 18767 - protein, 6 aa, synthetic construct
PHEVQF

SEQ ID NO: 18768 - protein, 6 aa, synthetic construct
PHEVQW

SEQ ID NO: 18769 - protein, 6 aa, synthetic construct
PHEVQY

SEQ ID NO: 18770 - protein, 6 aa, synthetic construct
PHEVED

SEQ ID NO: 18771 - protein, 6 aa, synthetic construct
PHEVEE

SEQ ID NO: 18772 - protein, 6 aa, synthetic construct
PHEVEF

SEQ ID NO: 18773 - protein, 6 aa, synthetic construct
PHEVEW

SEQ ID NO: 18774 - protein, 6 aa, synthetic construct
PHEVEY

SEQ ID NO: 18775 - protein, 6 aa, synthetic construct
PHEVGD

SEQ ID NO: 18776 - protein, 6 aa, synthetic construct
PHEVGE

SEQ ID NO: 18777 - protein, 6 aa, synthetic construct
PHEVGF

SEQ ID NO: 18778 - protein, 6 aa, synthetic construct
PHEVGW

SEQ ID NO: 18779 - protein, 6 aa, synthetic construct
PHEVGY

SEQ ID NO: 18780 - protein, 6 aa, synthetic construct
PHEVHD

SEQ ID NO: 18781 - protein, 6 aa, synthetic construct
PHEVHE

SEQ ID NO: 18782 - protein, 6 aa, synthetic construct
PHEVHF

SEQ ID NO: 18783 - protein, 6 aa, synthetic construct
PHEVHW

SEQ ID NO: 18784 - protein, 6 aa, synthetic construct
PHEVHY

SEQ ID NO: 18785 - protein, 6 aa, synthetic construct
PHEVID

SEQ ID NO: 18786 - protein, 6 aa, synthetic construct
PHEVIE

SEQ ID NO: 18787 - protein, 6 aa, synthetic construct
PHEVIF

SEQ ID NO: 18788 - protein, 6 aa, synthetic construct
PHEVIW

SEQ ID NO: 18789 - protein, 6 aa, synthetic construct
PHEVIY

SEQ ID NO: 18790 - protein, 6 aa, synthetic construct
PHEVLD

SEQ ID NO: 18791 - protein, 6 aa, synthetic construct
PHEVLE

SEQ ID NO: 18792 - protein, 6 aa, synthetic construct
PHEVLF

SEQ ID NO: 18793 - protein, 6 aa, synthetic construct
PHEVLW

SEQ ID NO: 18794 - protein, 6 aa, synthetic construct
PHEVLY

SEQ ID NO: 18795 - protein, 6 aa, synthetic construct
PHEVKD

SEQ ID NO: 18796 - protein, 6 aa, synthetic construct
PHEVKE

SEQ ID NO: 18797 - protein, 6 aa, synthetic construct
PHEVKF

SEQ ID NO: 18798 - protein, 6 aa, synthetic construct
PHEVKW

SEQ ID NO: 18799 - protein, 6 aa, synthetic construct
PHEVKY

SEQ ID NO: 18800 - protein, 6 aa, synthetic construct
PHEVMD

SEQ ID NO: 18801 - protein, 6 aa, synthetic construct
PHEVME

SEQ ID NO: 18802 - protein, 6 aa, synthetic construct
PHEVMF

SEQ ID NO: 18803 - protein, 6 aa, synthetic construct
PHEVMW

SEQ ID NO: 18804 - protein, 6 aa, synthetic construct
PHEVMY

SEQ ID NO: 18805 - protein, 6 aa, synthetic construct
PHEVFD

SEQ ID NO: 18806 - protein, 6 aa, synthetic construct
PHEVFE

SEQ ID NO: 18807 - protein, 6 aa, synthetic construct
PHEVFF

SEQ ID NO: 18808 - protein, 6 aa, synthetic construct
PHEVFW

SEQ ID NO: 18809 - protein, 6 aa, synthetic construct
PHEVFY

SEQ ID NO: 18810 - protein, 6 aa, synthetic construct
PHEVPD

SEQ ID NO: 18811 - protein, 6 aa, synthetic construct
PHEVPE

SEQ ID NO: 18812 - protein, 6 aa, synthetic construct
PHEVPF

SEQ ID NO: 18813 - protein, 6 aa, synthetic construct
PHEVPW

SEQ ID NO: 18814 - protein, 6 aa, synthetic construct
PHEVPY

SEQ ID NO: 18815 - protein, 6 aa, synthetic construct
PHEVSD

SEQ ID NO: 18816 - protein, 6 aa, synthetic construct
PHEVSE

SEQ ID NO: 18817 - protein, 6 aa, synthetic construct
PHEVSF

SEQ ID NO: 18818 - protein, 6 aa, synthetic construct
PHEVSW

SEQ ID NO: 18819 - protein, 6 aa, synthetic construct
PHEVSY

SEQ ID NO: 18820 - protein, 6 aa, synthetic construct
PHEVTD

SEQ ID NO: 18821 - protein, 6 aa, synthetic construct
PHEVTE

SEQ ID NO: 18822 - protein, 6 aa, synthetic construct
PHEVTF

SEQ ID NO: 18823 - protein, 6 aa, synthetic construct
PHEVTW

SEQ ID NO: 18824 - protein, 6 aa, synthetic construct
PHEVTY

SEQ ID NO: 18825 - protein, 6 aa, synthetic construct
PHEVWD

SEQ ID NO: 18826 - protein, 6 aa, synthetic construct
PHEVWE

SEQ ID NO: 18827 - protein, 6 aa, synthetic construct
PHEVWF

SEQ ID NO: 18828 - protein, 6 aa, synthetic construct
PHEVWW

SEQ ID NO: 18829 - protein, 6 aa, synthetic construct
PHEVWY

SEQ ID NO: 18830 - protein, 6 aa, synthetic construct
PHEVYD

SEQ ID NO: 18831 - protein, 6 aa, synthetic construct
PHEVYE

SEQ ID NO: 18832 - protein, 6 aa, synthetic construct
PHEVYF

SEQ ID NO: 18833 - protein, 6 aa, synthetic construct
PHEVYW

SEQ ID NO: 18834 - protein, 6 aa, synthetic construct
PHEVYY

SEQ ID NO: 18835 - protein, 6 aa, synthetic construct
PHEVVD

SEQ ID NO: 18836 - protein, 6 aa, synthetic construct
PHEVVE

SEQ ID NO: 18837 - protein, 6 aa, synthetic construct
PHEVVF

SEQ ID NO: 18838 - protein, 6 aa, synthetic construct
PHEVVW

SEQ ID NO: 18839 - protein, 6 aa, synthetic construct
PHEVVY

SEQ ID NO: 18840 - protein, 6 aa, synthetic construct
PIEAAD

SEQ ID NO: 18841 - protein, 6 aa, synthetic construct
PIEAAE

SEQ ID NO: 18842 - protein, 6 aa, synthetic construct
PIEAAF

SEQ ID NO: 18843 - protein, 6 aa, synthetic construct
PIEAAW

SEQ ID NO: 18844 - protein, 6 aa, synthetic construct
PIEAAY

SEQ ID NO: 18845 - protein, 6 aa, synthetic construct
PIEARD

SEQ ID NO: 18846 - protein, 6 aa, synthetic construct
PIEARE

SEQ ID NO: 18847 - protein, 6 aa, synthetic construct
PIEARF

SEQ ID NO: 18848 - protein, 6 aa, synthetic construct
PIEARW

SEQ ID NO: 18849 - protein, 6 aa, synthetic construct
PIEARY

SEQ ID NO: 18850 - protein, 6 aa, synthetic construct
PIEAND

SEQ ID NO: 18851 - protein, 6 aa, synthetic construct
PIEANE

SEQ ID NO: 18852 - protein, 6 aa, synthetic construct
PIEANF

SEQ ID NO: 18853 - protein, 6 aa, synthetic construct
PIEANW

SEQ ID NO: 18854 - protein, 6 aa, synthetic construct
PIEANY

SEQ ID NO: 18855 - protein, 6 aa, synthetic construct
PIEADD

SEQ ID NO: 18856 - protein, 6 aa, synthetic construct
PIEADE

SEQ ID NO: 18857 - protein, 6 aa, synthetic construct
PIEADF

SEQ ID NO: 18858 - protein, 6 aa, synthetic construct
PIEADW

SEQ ID NO: 18859 - protein, 6 aa, synthetic construct
PIEADY

SEQ ID NO: 18860 - protein, 6 aa, synthetic construct
PIEACD

SEQ ID NO: 18861 - protein, 6 aa, synthetic construct
PIEACE

SEQ ID NO: 18862 - protein, 6 aa, synthetic construct
PIEACF

SEQ ID NO: 18863 - protein, 6 aa, synthetic construct
PIEACW

SEQ ID NO: 18864 - protein, 6 aa, synthetic construct
PIEACY

SEQ ID NO: 18865 - protein, 6 aa, synthetic construct
PIEAQD

SEQ ID NO: 18866 - protein, 6 aa, synthetic construct
PIEAQE

SEQ ID NO: 18867 - protein, 6 aa, synthetic construct
PIEAQF

SEQ ID NO: 18868 - protein, 6 aa, synthetic construct
PIEAQW

SEQ ID NO: 18869 - protein, 6 aa, synthetic construct
PIEAQY

SEQ ID NO: 18870 - protein, 6 aa, synthetic construct
PIEAED

SEQ ID NO: 18871 - protein, 6 aa, synthetic construct
PIEAEE

SEQ ID NO: 18872 - protein, 6 aa, synthetic construct
PIEAEF

SEQ ID NO: 18873 - protein, 6 aa, synthetic construct
PIEAEW

SEQ ID NO: 18874 - protein, 6 aa, synthetic construct
PIEAEY

SEQ ID NO: 18875 - protein, 6 aa, synthetic construct
PIEAGD

SEQ ID NO: 18876 - protein, 6 aa, synthetic construct
PIEAGE

SEQ ID NO: 18877 - protein, 6 aa, synthetic construct
PIEAGF

SEQ ID NO: 18878 - protein, 6 aa, synthetic construct
PIEAGW

SEQ ID NO: 18879 - protein, 6 aa, synthetic construct
PIEAGY

SEQ ID NO: 18880 - protein, 6 aa, synthetic construct
PIEAHD

SEQ ID NO: 18881 - protein, 6 aa, synthetic construct
PIEAHE

SEQ ID NO: 18882 - protein, 6 aa, synthetic construct
PIEAHF

SEQ ID NO: 18883 - protein, 6 aa, synthetic construct
PIEAHW

SEQ ID NO: 18884 - protein, 6 aa, synthetic construct
PIEAHY

SEQ ID NO: 18885 - protein, 6 aa, synthetic construct
PIEAID

SEQ ID NO: 18886 - protein, 6 aa, synthetic construct
PIEAIE

SEQ ID NO: 18887 - protein, 6 aa, synthetic construct
PIEAIF

SEQ ID NO: 18888 - protein, 6 aa, synthetic construct
PIEAIW

SEQ ID NO: 18889 - protein, 6 aa, synthetic construct
PIEAIY

SEQ ID NO: 18890 - protein, 6 aa, synthetic construct
PIEALD

SEQ ID NO: 18891 - protein, 6 aa, synthetic construct
PIEALE

SEQ ID NO: 18892 - protein, 6 aa, synthetic construct
PIEALF

SEQ ID NO: 18893 - protein, 6 aa, synthetic construct
PIEALW

SEQ ID NO: 18894 - protein, 6 aa, synthetic construct
PIEALY

SEQ ID NO: 18895 - protein, 6 aa, synthetic construct
PIEAKD

SEQ ID NO: 18896 - protein, 6 aa, synthetic construct
PIEAKE

SEQ ID NO: 18897 - protein, 6 aa, synthetic construct
PIEAKF

SEQ ID NO: 18898 - protein, 6 aa, synthetic construct
PIEAKW

SEQ ID NO: 18899 - protein, 6 aa, synthetic construct
PIEAKY

SEQ ID NO: 18900 - protein, 6 aa, synthetic construct
PIEAMD

SEQ ID NO: 18901 - protein, 6 aa, synthetic construct
PIEAME

SEQ ID NO: 18902 - protein, 6 aa, synthetic construct
PIEAMF

SEQ ID NO: 18903 - protein, 6 aa, synthetic construct
PIEAMW

SEQ ID NO: 18904 - protein, 6 aa, synthetic construct
PIEAMY

SEQ ID NO: 18905 - protein, 6 aa, synthetic construct
PIEAFD

SEQ ID NO: 18906 - protein, 6 aa, synthetic construct
PIEAFE

SEQ ID NO: 18907 - protein, 6 aa, synthetic construct
PIEAFF

SEQ ID NO: 18908 - protein, 6 aa, synthetic construct
PIEAFW

SEQ ID NO: 18909 - protein, 6 aa, synthetic construct
PIEAFY

SEQ ID NO: 18910 - protein, 6 aa, synthetic construct
PIEAPD

SEQ ID NO: 18911 - protein, 6 aa, synthetic construct
PIEAPE

SEQ ID NO: 18912 - protein, 6 aa, synthetic construct
PIEAPF

SEQ ID NO: 18913 - protein, 6 aa, synthetic construct
PIEAPW

SEQ ID NO: 18914 - protein, 6 aa, synthetic construct
PIEAPY

SEQ ID NO: 18915 - protein, 6 aa, synthetic construct
PIEASD

SEQ ID NO: 18916 - protein, 6 aa, synthetic construct
PIEASE

SEQ ID NO: 18917 - protein, 6 aa, synthetic construct
PIEASF

SEQ ID NO: 18918 - protein, 6 aa, synthetic construct
PIEASW

SEQ ID NO: 18919 - protein, 6 aa, synthetic construct
PIEASY

SEQ ID NO: 18920 - protein, 6 aa, synthetic construct
PIEATD

SEQ ID NO: 18921 - protein, 6 aa, synthetic construct
PIEATE

SEQ ID NO: 18922 - protein, 6 aa, synthetic construct
PIEATF

SEQ ID NO: 18923 - protein, 6 aa, synthetic construct
PIEATW

SEQ ID NO: 18924 - protein, 6 aa, synthetic construct
PIEATY

SEQ ID NO: 18925 - protein, 6 aa, synthetic construct
PIEAWD

SEQ ID NO: 18926 - protein, 6 aa, synthetic construct
PIEAWE

SEQ ID NO: 18927 - protein, 6 aa, synthetic construct
PIEAWF

SEQ ID NO: 18928 - protein, 6 aa, synthetic construct
PIEAWW

SEQ ID NO: 18929 - protein, 6 aa, synthetic construct
PIEAWY

SEQ ID NO: 18930 - protein, 6 aa, synthetic construct
PIEAYD

SEQ ID NO: 18931 - protein, 6 aa, synthetic construct
PIEAYE

SEQ ID NO: 18932 - protein, 6 aa, synthetic construct
PIEAYF

SEQ ID NO: 18933 - protein, 6 aa, synthetic construct
PIEAYW

SEQ ID NO: 18934 - protein, 6 aa, synthetic construct
PIEAYY

SEQ ID NO: 18935 - protein, 6 aa, synthetic construct
PIEAVD

SEQ ID NO: 18936 - protein, 6 aa, synthetic construct
PIEAVE

SEQ ID NO: 18937 - protein, 6 aa, synthetic construct
PIEAVF

SEQ ID NO: 18938 - protein, 6 aa, synthetic construct
PIEAVW

SEQ ID NO: 18939 - protein, 6 aa, synthetic construct
PIEAVY

SEQ ID NO: 18940 - protein, 6 aa, synthetic construct
PIERAD

SEQ ID NO: 18941 - protein, 6 aa, synthetic construct
PIERAE

SEQ ID NO: 18942 - protein, 6 aa, synthetic construct
PIERAF

SEQ ID NO: 18943 - protein, 6 aa, synthetic construct
PIERAW

SEQ ID NO: 18944 - protein, 6 aa, synthetic construct
PIERAY

SEQ ID NO: 18945 - protein, 6 aa, synthetic construct
PIERRD

SEQ ID NO: 18946 - protein, 6 aa, synthetic construct
PIERRE

SEQ ID NO: 18947 - protein, 6 aa, synthetic construct
PIERRF

SEQ ID NO: 18948 - protein, 6 aa, synthetic construct
PIERRW

SEQ ID NO: 18949 - protein, 6 aa, synthetic construct
PIERRY

SEQ ID NO: 18950 - protein, 6 aa, synthetic construct
PIERND

SEQ ID NO: 18951 - protein, 6 aa, synthetic construct
PIERNE

SEQ ID NO: 18952 - protein, 6 aa, synthetic construct
PIERNF

SEQ ID NO: 18953 - protein, 6 aa, synthetic construct
PIERNW

SEQ ID NO: 18954 - protein, 6 aa, synthetic construct
PIERNY

SEQ ID NO: 18955 - protein, 6 aa, synthetic construct
PIERDD

SEQ ID NO: 18956 - protein, 6 aa, synthetic construct
PIERDE

SEQ ID NO: 18957 - protein, 6 aa, synthetic construct
PIERDF

SEQ ID NO: 18958 - protein, 6 aa, synthetic construct
PIERDW

SEQ ID NO: 18959 - protein, 6 aa, synthetic construct
PIERDY

SEQ ID NO: 18960 - protein, 6 aa, synthetic construct
PIERCD

SEQ ID NO: 18961 - protein, 6 aa, synthetic construct
PIERCE

SEQ ID NO: 18962 - protein, 6 aa, synthetic construct
PIERCF

SEQ ID NO: 18963 - protein, 6 aa, synthetic construct
PIERCW

SEQ ID NO: 18964 - protein, 6 aa, synthetic construct
PIERCY

SEQ ID NO: 18965 - protein, 6 aa, synthetic construct
PIERQD

SEQ ID NO: 18966 - protein, 6 aa, synthetic construct
PIERQE

SEQ ID NO: 18967 - protein, 6 aa, synthetic construct
PIERQF

SEQ ID NO: 18968 - protein, 6 aa, synthetic construct
PIERQW

SEQ ID NO: 18969 - protein, 6 aa, synthetic construct
PIERQY

SEQ ID NO: 18970 - protein, 6 aa, synthetic construct
PIERED

SEQ ID NO: 18971 - protein, 6 aa, synthetic construct
PIEREE

SEQ ID NO: 18972 - protein, 6 aa, synthetic construct
PIEREF

SEQ ID NO: 18973 - protein, 6 aa, synthetic construct
PIEREW

SEQ ID NO: 18974 - protein, 6 aa, synthetic construct
PIEREY

SEQ ID NO: 18975 - protein, 6 aa, synthetic construct
PIERGD

SEQ ID NO: 18976 - protein, 6 aa, synthetic construct
PIERGE

SEQ ID NO: 18977 - protein, 6 aa, synthetic construct
PIERGF

SEQ ID NO: 18978 - protein, 6 aa, synthetic construct
PIERGW

SEQ ID NO: 18979 - protein, 6 aa, synthetic construct
PIERGY

SEQ ID NO: 18980 - protein, 6 aa, synthetic construct
PIERHD

SEQ ID NO: 18981 - protein, 6 aa, synthetic construct
PIERHE

SEQ ID NO: 18982 - protein, 6 aa, synthetic construct
PIERHF

SEQ ID NO: 18983 - protein, 6 aa, synthetic construct
PIERHW

SEQ ID NO: 18984 - protein, 6 aa, synthetic construct
PIERHY

SEQ ID NO: 18985 - protein, 6 aa, synthetic construct
PIERID

SEQ ID NO: 18986 - protein, 6 aa, synthetic construct
PIERIE

SEQ ID NO: 18987 - protein, 6 aa, synthetic construct
PIERIF

SEQ ID NO: 18988 - protein, 6 aa, synthetic construct
PIERIW

SEQ ID NO: 18989 - protein, 6 aa, synthetic construct
PIERIY

SEQ ID NO: 18990 - protein, 6 aa, synthetic construct
PIERLD

SEQ ID NO: 18991 - protein, 6 aa, synthetic construct
PIERLE

SEQ ID NO: 18992 - protein, 6 aa, synthetic construct
PIERLF

SEQ ID NO: 18993 - protein, 6 aa, synthetic construct
PIERLW

SEQ ID NO: 18994 - protein, 6 aa, synthetic construct
PIERLY

SEQ ID NO: 18995 - protein, 6 aa, synthetic construct
PIERKD

SEQ ID NO: 18996 - protein, 6 aa, synthetic construct
PIERKE

SEQ ID NO: 18997 - protein, 6 aa, synthetic construct
PIERKF

SEQ ID NO: 18998 - protein, 6 aa, synthetic construct
PIERKW

SEQ ID NO: 18999 - protein, 6 aa, synthetic construct
PIERKY

SEQ ID NO: 19000 - protein, 6 aa, synthetic construct
PIERMD

SEQ ID NO: 19001 - protein, 6 aa, synthetic construct
PIERME

SEQ ID NO: 19002 - protein, 6 aa, synthetic construct
PIERMF

SEQ ID NO: 19003 - protein, 6 aa, synthetic construct
PIERMW

SEQ ID NO: 19004 - protein, 6 aa, synthetic construct
PIERMY

SEQ ID NO: 19005 - protein, 6 aa, synthetic construct
PIERFD

SEQ ID NO: 19006 - protein, 6 aa, synthetic construct
PIERFE

SEQ ID NO: 19007 - protein, 6 aa, synthetic construct
PIERFF

SEQ ID NO: 19008 - protein, 6 aa, synthetic construct
PIERFW

SEQ ID NO: 19009 - protein, 6 aa, synthetic construct
PIERFY

SEQ ID NO: 19010 - protein, 6 aa, synthetic construct
PIERPD

SEQ ID NO: 19011 - protein, 6 aa, synthetic construct
PIERPE

SEQ ID NO: 19012 - protein, 6 aa, synthetic construct
PIERPF

SEQ ID NO: 19013 - protein, 6 aa, synthetic construct
PIERPW

SEQ ID NO: 19014 - protein, 6 aa, synthetic construct
PIERPY

SEQ ID NO: 19015 - protein, 6 aa, synthetic construct
PIERSD

SEQ ID NO: 19016 - protein, 6 aa, synthetic construct
PIERSE

SEQ ID NO: 19017 - protein, 6 aa, synthetic construct
PIERSF

SEQ ID NO: 19018 - protein, 6 aa, synthetic construct
PIERSW

SEQ ID NO: 19019 - protein, 6 aa, synthetic construct
PIERSY

SEQ ID NO: 19020 - protein, 6 aa, synthetic construct
PIERTD

SEQ ID NO: 19021 - protein, 6 aa, synthetic construct
PIERTE

SEQ ID NO: 19022 - protein, 6 aa, synthetic construct
PIERTF

SEQ ID NO: 19023 - protein, 6 aa, synthetic construct
PIERTW

SEQ ID NO: 19024 - protein, 6 aa, synthetic construct
PIERTY

SEQ ID NO: 19025 - protein, 6 aa, synthetic construct
PIERWD

SEQ ID NO: 19026 - protein, 6 aa, synthetic construct
PIERWE

SEQ ID NO: 19027 - protein, 6 aa, synthetic construct
PIERWF

SEQ ID NO: 19028 - protein, 6 aa, synthetic construct
PIERWW

SEQ ID NO: 19029 - protein, 6 aa, synthetic construct
PIERWY

SEQ ID NO: 19030 - protein, 6 aa, synthetic construct
PIERYD

SEQ ID NO: 19031 - protein, 6 aa, synthetic construct
PIERYE

SEQ ID NO: 19032 - protein, 6 aa, synthetic construct
PIERYF

SEQ ID NO: 19033 - protein, 6 aa, synthetic construct
PIERYW

SEQ ID NO: 19034 - protein, 6 aa, synthetic construct
PIERYY

SEQ ID NO: 19035 - protein, 6 aa, synthetic construct
PIERVD

SEQ ID NO: 19036 - protein, 6 aa, synthetic construct
PIERVE

SEQ ID NO: 19037 - protein, 6 aa, synthetic construct
PIERVF

SEQ ID NO: 19038 - protein, 6 aa, synthetic construct
PIERVW

SEQ ID NO: 19039 - protein, 6 aa, synthetic construct
PIERVY

SEQ ID NO: 19040 - protein, 6 aa, synthetic construct
PIENAD

SEQ ID NO: 19041 - protein, 6 aa, synthetic construct
PIENAE

SEQ ID NO: 19042 - protein, 6 aa, synthetic construct
PIENAF

SEQ ID NO: 19043 - protein, 6 aa, synthetic construct
PIENAW

SEQ ID NO: 19044 - protein, 6 aa, synthetic construct
PIENAY

SEQ ID NO: 19045 - protein, 6 aa, synthetic construct
PIENRD

SEQ ID NO: 19046 - protein, 6 aa, synthetic construct
PIENRE

SEQ ID NO: 19047 - protein, 6 aa, synthetic construct
PIENRF

SEQ ID NO: 19048 - protein, 6 aa, synthetic construct
PIENRW

SEQ ID NO: 19049 - protein, 6 aa, synthetic construct
PIENRY

SEQ ID NO: 19050 - protein, 6 aa, synthetic construct
PIENND

SEQ ID NO: 19051 - protein, 6 aa, synthetic construct
PIENNE

SEQ ID NO: 19052 - protein, 6 aa, synthetic construct
PIENNF

SEQ ID NO: 19053 - protein, 6 aa, synthetic construct
PIENNW

SEQ ID NO: 19054 - protein, 6 aa, synthetic construct
PIENNY

SEQ ID NO: 19055 - protein, 6 aa, synthetic construct
PIENDD

SEQ ID NO: 19056 - protein, 6 aa, synthetic construct
PIENDE

SEQ ID NO: 19057 - protein, 6 aa, synthetic construct
PIENDF

SEQ ID NO: 19058 - protein, 6 aa, synthetic construct
PIENDW

SEQ ID NO: 19059 - protein, 6 aa, synthetic construct
PIENDY

SEQ ID NO: 19060 - protein, 6 aa, synthetic construct
PIENCD

SEQ ID NO: 19061 - protein, 6 aa, synthetic construct
PIENCE

SEQ ID NO: 19062 - protein, 6 aa, synthetic construct
PIENCF

SEQ ID NO: 19063 - protein, 6 aa, synthetic construct
PIENCW

SEQ ID NO: 19064 - protein, 6 aa, synthetic construct
PIENCY

SEQ ID NO: 19065 - protein, 6 aa, synthetic construct
PIENQD

SEQ ID NO: 19066 - protein, 6 aa, synthetic construct
PIENQE

SEQ ID NO: 19067 - protein, 6 aa, synthetic construct
PIENQF

SEQ ID NO: 19068 - protein, 6 aa, synthetic construct
PIENQW

SEQ ID NO: 19069 - protein, 6 aa, synthetic construct
PIENQY

SEQ ID NO: 19070 - protein, 6 aa, synthetic construct
PIENED

SEQ ID NO: 19071 - protein, 6 aa, synthetic construct
PIENEE

SEQ ID NO: 19072 - protein, 6 aa, synthetic construct
PIENEF

SEQ ID NO: 19073 - protein, 6 aa, synthetic construct
PIENEW

SEQ ID NO: 19074 - protein, 6 aa, synthetic construct
PIENEY

SEQ ID NO: 19075 - protein, 6 aa, synthetic construct
PIENGD

SEQ ID NO: 19076 - protein, 6 aa, synthetic construct
PIENGE

SEQ ID NO: 19077 - protein, 6 aa, synthetic construct
PIENGF

SEQ ID NO: 19078 - protein, 6 aa, synthetic construct
PIENGW

SEQ ID NO: 19079 - protein, 6 aa, synthetic construct
PIENGY

SEQ ID NO: 19080 - protein, 6 aa, synthetic construct
PIENHD

SEQ ID NO: 19081 - protein, 6 aa, synthetic construct
PIENHE

SEQ ID NO: 19082 - protein, 6 aa, synthetic construct
PIENHF

SEQ ID NO: 19083 - protein, 6 aa, synthetic construct
PIENHW

SEQ ID NO: 19084 - protein, 6 aa, synthetic construct
PIENHY

SEQ ID NO: 19085 - protein, 6 aa, synthetic construct
PIENID

SEQ ID NO: 19086 - protein, 6 aa, synthetic construct
PIENIE

SEQ ID NO: 19087 - protein, 6 aa, synthetic construct
PIENIF

SEQ ID NO: 19088 - protein, 6 aa, synthetic construct
PIENIW

SEQ ID NO: 19089 - protein, 6 aa, synthetic construct
PIENIY

SEQ ID NO: 19090 - protein, 6 aa, synthetic construct
PIENLD

SEQ ID NO: 19091 - protein, 6 aa, synthetic construct
PIENLE

SEQ ID NO: 19092 - protein, 6 aa, synthetic construct
PIENLF

SEQ ID NO: 19093 - protein, 6 aa, synthetic construct
PIENLW

SEQ ID NO: 19094 - protein, 6 aa, synthetic construct
PIENLY

SEQ ID NO: 19095 - protein, 6 aa, synthetic construct
PIENKD

SEQ ID NO: 19096 - protein, 6 aa, synthetic construct
PIENKE

SEQ ID NO: 19097 - protein, 6 aa, synthetic construct
PIENKF

SEQ ID NO: 19098 - protein, 6 aa, synthetic construct
PIENKW

SEQ ID NO: 19099 - protein, 6 aa, synthetic construct
PIENKY

SEQ ID NO: 19100 - protein, 6 aa, synthetic construct
PIENMD

SEQ ID NO: 19101 - protein, 6 aa, synthetic construct
PIENME

SEQ ID NO: 19102 - protein, 6 aa, synthetic construct
PIENMF

SEQ ID NO: 19103 - protein, 6 aa, synthetic construct
PIENMW

SEQ ID NO: 19104 - protein, 6 aa, synthetic construct
PIENMY

SEQ ID NO: 19105 - protein, 6 aa, synthetic construct
PIENFD

SEQ ID NO: 19106 - protein, 6 aa, synthetic construct
PIENFE

SEQ ID NO: 19107 - protein, 6 aa, synthetic construct
PIENFF

SEQ ID NO: 19108 - protein, 6 aa, synthetic construct
PIENFW

SEQ ID NO: 19109 - protein, 6 aa, synthetic construct
PIENFY

SEQ ID NO: 19110 - protein, 6 aa, synthetic construct
PIENPD

SEQ ID NO: 19111 - protein, 6 aa, synthetic construct
PIENPE

SEQ ID NO: 19112 - protein, 6 aa, synthetic construct
PIENPF

SEQ ID NO: 19113 - protein, 6 aa, synthetic construct
PIENPW

SEQ ID NO: 19114 - protein, 6 aa, synthetic construct
PIENPY

SEQ ID NO: 19115 - protein, 6 aa, synthetic construct
PIENSD

SEQ ID NO: 19116 - protein, 6 aa, synthetic construct
PIENSE

SEQ ID NO: 19117 - protein, 6 aa, synthetic construct
PIENSF

SEQ ID NO: 19118 - protein, 6 aa, synthetic construct
PIENSW

SEQ ID NO: 19119 - protein, 6 aa, synthetic construct
PIENSY

SEQ ID NO: 19120 - protein, 6 aa, synthetic construct
PIENTD

SEQ ID NO: 19121 - protein, 6 aa, synthetic construct
PIENTE

SEQ ID NO: 19122 - protein, 6 aa, synthetic construct
PIENTF

SEQ ID NO: 19123 - protein, 6 aa, synthetic construct
PIENTW

SEQ ID NO: 19124 - protein, 6 aa, synthetic construct
PIENTY

SEQ ID NO: 19125 - protein, 6 aa, synthetic construct
PIENWD

SEQ ID NO: 19126 - protein, 6 aa, synthetic construct
PIENWE

SEQ ID NO: 19127 - protein, 6 aa, synthetic construct
PIENWF

SEQ ID NO: 19128 - protein, 6 aa, synthetic construct
PIENWW

SEQ ID NO: 19129 - protein, 6 aa, synthetic construct
PIENWY

SEQ ID NO: 19130 - protein, 6 aa, synthetic construct
PIENYD

SEQ ID NO: 19131 - protein, 6 aa, synthetic construct
PIENYE

SEQ ID NO: 19132 - protein, 6 aa, synthetic construct
PIENYF

SEQ ID NO: 19133 - protein, 6 aa, synthetic construct
PIENYW

SEQ ID NO: 19134 - protein, 6 aa, synthetic construct
PIENYY

SEQ ID NO: 19135 - protein, 6 aa, synthetic construct
PIENVD

SEQ ID NO: 19136 - protein, 6 aa, synthetic construct
PIENVE

SEQ ID NO: 19137 - protein, 6 aa, synthetic construct
PIENVF

SEQ ID NO: 19138 - protein, 6 aa, synthetic construct
PIENVW

SEQ ID NO: 19139 - protein, 6 aa, synthetic construct
PIENVY

SEQ ID NO: 19140 - protein, 6 aa, synthetic construct
PIEDAD

SEQ ID NO: 19141 - protein, 6 aa, synthetic construct
PIEDAE

SEQ ID NO: 19142 - protein, 6 aa, synthetic construct
PIEDAF

SEQ ID NO: 19143 - protein, 6 aa, synthetic construct
PIEDAW

SEQ ID NO: 19144 - protein, 6 aa, synthetic construct
PIEDAY

SEQ ID NO: 19145 - protein, 6 aa, synthetic construct
PIEDRD

SEQ ID NO: 19146 - protein, 6 aa, synthetic construct
PIEDRE

SEQ ID NO: 19147 - protein, 6 aa, synthetic construct
PIEDRF

SEQ ID NO: 19148 - protein, 6 aa, synthetic construct
PIEDRW

SEQ ID NO: 19149 - protein, 6 aa, synthetic construct
PIEDRY

SEQ ID NO: 19150 - protein, 6 aa, synthetic construct
PIEDND

SEQ ID NO: 19151 - protein, 6 aa, synthetic construct
PIEDNE

SEQ ID NO: 19152 - protein, 6 aa, synthetic construct
PIEDNF

SEQ ID NO: 19153 - protein, 6 aa, synthetic construct
PIEDNW

SEQ ID NO: 19154 - protein, 6 aa, synthetic construct
PIEDNY

SEQ ID NO: 19155 - protein, 6 aa, synthetic construct
PIEDDD

SEQ ID NO: 19156 - protein, 6 aa, synthetic construct
PIEDDE

SEQ ID NO: 19157 - protein, 6 aa, synthetic construct
PIEDDF

SEQ ID NO: 19158 - protein, 6 aa, synthetic construct
PIEDDW

SEQ ID NO: 19159 - protein, 6 aa, synthetic construct
PIEDDY

SEQ ID NO: 19160 - protein, 6 aa, synthetic construct
PIEDCD

SEQ ID NO: 19161 - protein, 6 aa, synthetic construct
PIEDCE

SEQ ID NO: 19162 - protein, 6 aa, synthetic construct
PIEDCF

SEQ ID NO: 19163 - protein, 6 aa, synthetic construct
PIEDCW

SEQ ID NO: 19164 - protein, 6 aa, synthetic construct
PIEDCY

SEQ ID NO: 19165 - protein, 6 aa, synthetic construct
PIEDQD

SEQ ID NO: 19166 - protein, 6 aa, synthetic construct
PIEDQE

SEQ ID NO: 19167 - protein, 6 aa, synthetic construct
PIEDQF

SEQ ID NO: 19168 - protein, 6 aa, synthetic construct
PIEDQW

SEQ ID NO: 19169 - protein, 6 aa, synthetic construct
PIEDQY

SEQ ID NO: 19170 - protein, 6 aa, synthetic construct
PIEDED

SEQ ID NO: 19171 - protein, 6 aa, synthetic construct
PIEDEE

SEQ ID NO: 19172 - protein, 6 aa, synthetic construct
PIEDEF

SEQ ID NO: 19173 - protein, 6 aa, synthetic construct
PIEDEW

SEQ ID NO: 19174 - protein, 6 aa, synthetic construct
PIEDEY

SEQ ID NO: 19175 - protein, 6 aa, synthetic construct
PIEDGD

SEQ ID NO: 19176 - protein, 6 aa, synthetic construct
PIEDGE

SEQ ID NO: 19177 - protein, 6 aa, synthetic construct
PIEDGF

SEQ ID NO: 19178 - protein, 6 aa, synthetic construct
PIEDGW

SEQ ID NO: 19179 - protein, 6 aa, synthetic construct
PIEDGY

SEQ ID NO: 19180 - protein, 6 aa, synthetic construct
PIEDHD

SEQ ID NO: 19181 - protein, 6 aa, synthetic construct
PIEDHE

SEQ ID NO: 19182 - protein, 6 aa, synthetic construct
PIEDHF

SEQ ID NO: 19183 - protein, 6 aa, synthetic construct
PIEDHW

SEQ ID NO: 19184 - protein, 6 aa, synthetic construct
PIEDHY

SEQ ID NO: 19185 - protein, 6 aa, synthetic construct
PIEDID

SEQ ID NO: 19186 - protein, 6 aa, synthetic construct
PIEDIE

SEQ ID NO: 19187 - protein, 6 aa, synthetic construct
PIEDIF

SEQ ID NO: 19188 - protein, 6 aa, synthetic construct
PIEDIW

SEQ ID NO: 19189 - protein, 6 aa, synthetic construct
PIEDIY

SEQ ID NO: 19190 - protein, 6 aa, synthetic construct
PIEDLD

SEQ ID NO: 19191 - protein, 6 aa, synthetic construct
PIEDLE

SEQ ID NO: 19192 - protein, 6 aa, synthetic construct
PIEDLF

SEQ ID NO: 19193 - protein, 6 aa, synthetic construct
PIEDLW

SEQ ID NO: 19194 - protein, 6 aa, synthetic construct
PIEDLY

SEQ ID NO: 19195 - protein, 6 aa, synthetic construct
PIEDKD

SEQ ID NO: 19196 - protein, 6 aa, synthetic construct
PIEDKE

SEQ ID NO: 19197 - protein, 6 aa, synthetic construct
PIEDKF

SEQ ID NO: 19198 - protein, 6 aa, synthetic construct
PIEDKW

SEQ ID NO: 19199 - protein, 6 aa, synthetic construct
PIEDKY

SEQ ID NO: 19200 - protein, 6 aa, synthetic construct
PIEDMD

SEQ ID NO: 19201 - protein, 6 aa, synthetic construct
PIEDME

SEQ ID NO: 19202 - protein, 6 aa, synthetic construct
PIEDMF

SEQ ID NO: 19203 - protein, 6 aa, synthetic construct
PIEDMW

SEQ ID NO: 19204 - protein, 6 aa, synthetic construct
PIEDMY

SEQ ID NO: 19205 - protein, 6 aa, synthetic construct
PIEDFD

SEQ ID NO: 19206 - protein, 6 aa, synthetic construct
PIEDFE

SEQ ID NO: 19207 - protein, 6 aa, synthetic construct
PIEDFF

SEQ ID NO: 19208 - protein, 6 aa, synthetic construct
PIEDFW

SEQ ID NO: 19209 - protein, 6 aa, synthetic construct
PIEDFY

SEQ ID NO: 19210 - protein, 6 aa, synthetic construct
PIEDPD

SEQ ID NO: 19211 - protein, 6 aa, synthetic construct
PIEDPE

SEQ ID NO: 19212 - protein, 6 aa, synthetic construct
PIEDPF

SEQ ID NO: 19213 - protein, 6 aa, synthetic construct
PIEDPW

SEQ ID NO: 19214 - protein, 6 aa, synthetic construct
PIEDPY

SEQ ID NO: 19215 - protein, 6 aa, synthetic construct
PIEDSD

SEQ ID NO: 19216 - protein, 6 aa, synthetic construct
PIEDSE

SEQ ID NO: 19217 - protein, 6 aa, synthetic construct
PIEDSF

SEQ ID NO: 19218 - protein, 6 aa, synthetic construct
PIEDSW

SEQ ID NO: 19219 - protein, 6 aa, synthetic construct
PIEDSY

SEQ ID NO: 19220 - protein, 6 aa, synthetic construct
PIEDTD

SEQ ID NO: 19221 - protein, 6 aa, synthetic construct
PIEDTE

SEQ ID NO: 19222 - protein, 6 aa, synthetic construct
PIEDTF

SEQ ID NO: 19223 - protein, 6 aa, synthetic construct
PIEDTW

SEQ ID NO: 19224 - protein, 6 aa, synthetic construct
PIEDTY

SEQ ID NO: 19225 - protein, 6 aa, synthetic construct
PIEDWD

SEQ ID NO: 19226 - protein, 6 aa, synthetic construct
PIEDWE

SEQ ID NO: 19227 - protein, 6 aa, synthetic construct
PIEDWF

SEQ ID NO: 19228 - protein, 6 aa, synthetic construct
PIEDWW

SEQ ID NO: 19229 - protein, 6 aa, synthetic construct
PIEDWY

SEQ ID NO: 19230 - protein, 6 aa, synthetic construct
PIEDYD

SEQ ID NO: 19231 - protein, 6 aa, synthetic construct
PIEDYE

SEQ ID NO: 19232 - protein, 6 aa, synthetic construct
PIEDYF

SEQ ID NO: 19233 - protein, 6 aa, synthetic construct
PIEDYW

SEQ ID NO: 19234 - protein, 6 aa, synthetic construct
PIEDYY

SEQ ID NO: 19235 - protein, 6 aa, synthetic construct
PIEDVD

SEQ ID NO: 19236 - protein, 6 aa, synthetic construct
PIEDVE

SEQ ID NO: 19237 - protein, 6 aa, synthetic construct
PIEDVF

SEQ ID NO: 19238 - protein, 6 aa, synthetic construct
PIEDVW

SEQ ID NO: 19239 - protein, 6 aa, synthetic construct
PIEDVY

SEQ ID NO: 19240 - protein, 6 aa, synthetic construct
PIECAD

SEQ ID NO: 19241 - protein, 6 aa, synthetic construct
PIECAE

SEQ ID NO: 19242 - protein, 6 aa, synthetic construct
PIECAF

SEQ ID NO: 19243 - protein, 6 aa, synthetic construct
PIECAW

SEQ ID NO: 19244 - protein, 6 aa, synthetic construct
PIECAY

SEQ ID NO: 19245 - protein, 6 aa, synthetic construct
PIECRD

SEQ ID NO: 19246 - protein, 6 aa, synthetic construct
PIECRE

SEQ ID NO: 19247 - protein, 6 aa, synthetic construct
PIECRF

SEQ ID NO: 19248 - protein, 6 aa, synthetic construct
PIECRW

SEQ ID NO: 19249 - protein, 6 aa, synthetic construct
PIECRY

SEQ ID NO: 19250 - protein, 6 aa, synthetic construct
PIECND

SEQ ID NO: 19251 - protein, 6 aa, synthetic construct
PIECNE

SEQ ID NO: 19252 - protein, 6 aa, synthetic construct
PIECNF

SEQ ID NO: 19253 - protein, 6 aa, synthetic construct
PIECNW

SEQ ID NO: 19254 - protein, 6 aa, synthetic construct
PIECNY

SEQ ID NO: 19255 - protein, 6 aa, synthetic construct
PIECDD

SEQ ID NO: 19256 - protein, 6 aa, synthetic construct
PIECDE

SEQ ID NO: 19257 - protein, 6 aa, synthetic construct
PIECDF

SEQ ID NO: 19258 - protein, 6 aa, synthetic construct
PIECDW

SEQ ID NO: 19259 - protein, 6 aa, synthetic construct
PIECDY

SEQ ID NO: 19260 - protein, 6 aa, synthetic construct
PIECCD

SEQ ID NO: 19261 - protein, 6 aa, synthetic construct
PIECCE

SEQ ID NO: 19262 - protein, 6 aa, synthetic construct
PIECCF

SEQ ID NO: 19263 - protein, 6 aa, synthetic construct
PIECCW

SEQ ID NO: 19264 - protein, 6 aa, synthetic construct
PIECCY

SEQ ID NO: 19265 - protein, 6 aa, synthetic construct
PIECQD

SEQ ID NO: 19266 - protein, 6 aa, synthetic construct
PIECQE

SEQ ID NO: 19267 - protein, 6 aa, synthetic construct
PIECQF

SEQ ID NO: 19268 - protein, 6 aa, synthetic construct
PIECQW

SEQ ID NO: 19269 - protein, 6 aa, synthetic construct
PIECQY

SEQ ID NO: 19270 - protein, 6 aa, synthetic construct
PIECED

SEQ ID NO: 19271 - protein, 6 aa, synthetic construct
PIECEE

SEQ ID NO: 19272 - protein, 6 aa, synthetic construct
PIECEF

SEQ ID NO: 19273 - protein, 6 aa, synthetic construct
PIECEW

SEQ ID NO: 19274 - protein, 6 aa, synthetic construct
PIECEY

SEQ ID NO: 19275 - protein, 6 aa, synthetic construct
PIECGD

SEQ ID NO: 19276 - protein, 6 aa, synthetic construct
PIECGE

SEQ ID NO: 19277 - protein, 6 aa, synthetic construct
PIECGF

SEQ ID NO: 19278 - protein, 6 aa, synthetic construct
PIECGW

SEQ ID NO: 19279 - protein, 6 aa, synthetic construct
PIECGY

SEQ ID NO: 19280 - protein, 6 aa, synthetic construct
PIECHD

SEQ ID NO: 19281 - protein, 6 aa, synthetic construct
PIECHE

SEQ ID NO: 19282 - protein, 6 aa, synthetic construct
PIECHF

SEQ ID NO: 19283 - protein, 6 aa, synthetic construct
PIECHW

SEQ ID NO: 19284 - protein, 6 aa, synthetic construct
PIECHY

SEQ ID NO: 19285 - protein, 6 aa, synthetic construct
PIECID

SEQ ID NO: 19286 - protein, 6 aa, synthetic construct
PIECIE

SEQ ID NO: 19287 - protein, 6 aa, synthetic construct
PIECIF

SEQ ID NO: 19288 - protein, 6 aa, synthetic construct
PIECIW

SEQ ID NO: 19289 - protein, 6 aa, synthetic construct
PIECIY

SEQ ID NO: 19290 - protein, 6 aa, synthetic construct
PIECLD

SEQ ID NO: 19291 - protein, 6 aa, synthetic construct
PIECLE

SEQ ID NO: 19292 - protein, 6 aa, synthetic construct
PIECLF

SEQ ID NO: 19293 - protein, 6 aa, synthetic construct
PIECLW

SEQ ID NO: 19294 - protein, 6 aa, synthetic construct
PIECLY

SEQ ID NO: 19295 - protein, 6 aa, synthetic construct
PIECKD

SEQ ID NO: 19296 - protein, 6 aa, synthetic construct
PIECKE

SEQ ID NO: 19297 - protein, 6 aa, synthetic construct
PIECKF

SEQ ID NO: 19298 - protein, 6 aa, synthetic construct
PIECKW

SEQ ID NO: 19299 - protein, 6 aa, synthetic construct
PIECKY

SEQ ID NO: 19300 - protein, 6 aa, synthetic construct
PIECMD

SEQ ID NO: 19301 - protein, 6 aa, synthetic construct
PIECME

SEQ ID NO: 19302 - protein, 6 aa, synthetic construct
PIECMF

SEQ ID NO: 19303 - protein, 6 aa, synthetic construct
PIECMW

SEQ ID NO: 19304 - protein, 6 aa, synthetic construct
PIECMY

SEQ ID NO: 19305 - protein, 6 aa, synthetic construct
PIECFD

SEQ ID NO: 19306 - protein, 6 aa, synthetic construct
PIECFE

SEQ ID NO: 19307 - protein, 6 aa, synthetic construct
PIECFF

SEQ ID NO: 19308 - protein, 6 aa, synthetic construct
PIECFW

SEQ ID NO: 19309 - protein, 6 aa, synthetic construct
PIECFY

SEQ ID NO: 19310 - protein, 6 aa, synthetic construct
PIECPD

SEQ ID NO: 19311 - protein, 6 aa, synthetic construct
PIECPE

SEQ ID NO: 19312 - protein, 6 aa, synthetic construct
PIECPF

SEQ ID NO: 19313 - protein, 6 aa, synthetic construct
PIECPW

SEQ ID NO: 19314 - protein, 6 aa, synthetic construct
PIECPY

SEQ ID NO: 19315 - protein, 6 aa, synthetic construct
PIECSD

SEQ ID NO: 19316 - protein, 6 aa, synthetic construct
PIECSE

SEQ ID NO: 19317 - protein, 6 aa, synthetic construct
PIECSF

SEQ ID NO: 19318 - protein, 6 aa, synthetic construct
PIECSW

SEQ ID NO: 19319 - protein, 6 aa, synthetic construct
PIECSY

SEQ ID NO: 19320 - protein, 6 aa, synthetic construct
PIECTD

SEQ ID NO: 19321 - protein, 6 aa, synthetic construct
PIECTE

SEQ ID NO: 19322 - protein, 6 aa, synthetic construct
PIECTF

SEQ ID NO: 19323 - protein, 6 aa, synthetic construct
PIECTW

SEQ ID NO: 19324 - protein, 6 aa, synthetic construct
PIECTY

SEQ ID NO: 19325 - protein, 6 aa, synthetic construct
PIECWD

SEQ ID NO: 19326 - protein, 6 aa, synthetic construct
PIECWE

SEQ ID NO: 19327 - protein, 6 aa, synthetic construct
PIECWF

SEQ ID NO: 19328 - protein, 6 aa, synthetic construct
PIECWW

SEQ ID NO: 19329 - protein, 6 aa, synthetic construct
PIECWY

SEQ ID NO: 19330 - protein, 6 aa, synthetic construct
PIECYD

SEQ ID NO: 19331 - protein, 6 aa, synthetic construct
PIECYE

SEQ ID NO: 19332 - protein, 6 aa, synthetic construct
PIECYF

SEQ ID NO: 19333 - protein, 6 aa, synthetic construct
PIECYW

SEQ ID NO: 19334 - protein, 6 aa, synthetic construct
PIECYY

SEQ ID NO: 19335 - protein, 6 aa, synthetic construct
PIECVD

SEQ ID NO: 19336 - protein, 6 aa, synthetic construct
PIECVE

SEQ ID NO: 19337 - protein, 6 aa, synthetic construct
PIECVF

SEQ ID NO: 19338 - protein, 6 aa, synthetic construct
PIECVW

SEQ ID NO: 19339 - protein, 6 aa, synthetic construct
PIECVY

SEQ ID NO: 19340 - protein, 6 aa, synthetic construct
PIEQAD

SEQ ID NO: 19341 - protein, 6 aa, synthetic construct
PIEQAE

SEQ ID NO: 19342 - protein, 6 aa, synthetic construct
PIEQAF

SEQ ID NO: 19343 - protein, 6 aa, synthetic construct
PIEQAW

SEQ ID NO: 19344 - protein, 6 aa, synthetic construct
PIEQAY

SEQ ID NO: 19345 - protein, 6 aa, synthetic construct
PIEQRD

SEQ ID NO: 19346 - protein, 6 aa, synthetic construct
PIEQRE

SEQ ID NO: 19347 - protein, 6 aa, synthetic construct
PIEQRF

SEQ ID NO: 19348 - protein, 6 aa, synthetic construct
PIEQRW

SEQ ID NO: 19349 - protein, 6 aa, synthetic construct
PIEQRY

SEQ ID NO: 19350 - protein, 6 aa, synthetic construct
PIEQND

SEQ ID NO: 19351 - protein, 6 aa, synthetic construct
PIEQNE

SEQ ID NO: 19352 - protein, 6 aa, synthetic construct
PIEQNF

SEQ ID NO: 19353 - protein, 6 aa, synthetic construct
PIEQNW

SEQ ID NO: 19354 - protein, 6 aa, synthetic construct
PIEQNY

SEQ ID NO: 19355 - protein, 6 aa, synthetic construct
PIEQDD

SEQ ID NO: 19356 - protein, 6 aa, synthetic construct
PIEQDE

SEQ ID NO: 19357 - protein, 6 aa, synthetic construct
PIEQDF

SEQ ID NO: 19358 - protein, 6 aa, synthetic construct
PIEQDW

SEQ ID NO: 19359 - protein, 6 aa, synthetic construct
PIEQDY

SEQ ID NO: 19360 - protein, 6 aa, synthetic construct
PIEQCD

SEQ ID NO: 19361 - protein, 6 aa, synthetic construct
PIEQCE

SEQ ID NO: 19362 - protein, 6 aa, synthetic construct
PIEQCF

SEQ ID NO: 19363 - protein, 6 aa, synthetic construct
PIEQCW

SEQ ID NO: 19364 - protein, 6 aa, synthetic construct
PIEQCY

SEQ ID NO: 19365 - protein, 6 aa, synthetic construct
PIEQQD

SEQ ID NO: 19366 - protein, 6 aa, synthetic construct
PIEQQE

SEQ ID NO: 19367 - protein, 6 aa, synthetic construct
PIEQQF

SEQ ID NO: 19368 - protein, 6 aa, synthetic construct
PIEQQW

SEQ ID NO: 19369 - protein, 6 aa, synthetic construct
PIEQQY

SEQ ID NO: 19370 - protein, 6 aa, synthetic construct
PIEQED

SEQ ID NO: 19371 - protein, 6 aa, synthetic construct
PIEQEE

SEQ ID NO: 19372 - protein, 6 aa, synthetic construct
PIEQEF

SEQ ID NO: 19373 - protein, 6 aa, synthetic construct
PIEQEW

SEQ ID NO: 19374 - protein, 6 aa, synthetic construct
PIEQEY

SEQ ID NO: 19375 - protein, 6 aa, synthetic construct
PIEQGD

SEQ ID NO: 19376 - protein, 6 aa, synthetic construct
PIEQGE

SEQ ID NO: 19377 - protein, 6 aa, synthetic construct
PIEQGF

SEQ ID NO: 19378 - protein, 6 aa, synthetic construct
PIEQGW

SEQ ID NO: 19379 - protein, 6 aa, synthetic construct
PIEQGY

SEQ ID NO: 19380 - protein, 6 aa, synthetic construct
PIEQHD

SEQ ID NO: 19381 - protein, 6 aa, synthetic construct
PIEQHE

SEQ ID NO: 19382 - protein, 6 aa, synthetic construct
PIEQHF

SEQ ID NO: 19383 - protein, 6 aa, synthetic construct
PIEQHW

SEQ ID NO: 19384 - protein, 6 aa, synthetic construct
PIEQHY

SEQ ID NO: 19385 - protein, 6 aa, synthetic construct
PIEQID

SEQ ID NO: 19386 - protein, 6 aa, synthetic construct
PIEQIE

SEQ ID NO: 19387 - protein, 6 aa, synthetic construct
PIEQIF

SEQ ID NO: 19388 - protein, 6 aa, synthetic construct
PIEQIW

SEQ ID NO: 19389 - protein, 6 aa, synthetic construct
PIEQIY

SEQ ID NO: 19390 - protein, 6 aa, synthetic construct
PIEQLD

SEQ ID NO: 19391 - protein, 6 aa, synthetic construct
PIEQLE

SEQ ID NO: 19392 - protein, 6 aa, synthetic construct
PIEQLF

SEQ ID NO: 19393 - protein, 6 aa, synthetic construct
PIEQLW

SEQ ID NO: 19394 - protein, 6 aa, synthetic construct
PIEQLY

SEQ ID NO: 19395 - protein, 6 aa, synthetic construct
PIEQKD

SEQ ID NO: 19396 - protein, 6 aa, synthetic construct
PIEQKE

SEQ ID NO: 19397 - protein, 6 aa, synthetic construct
PIEQKF

SEQ ID NO: 19398 - protein, 6 aa, synthetic construct
PIEQKW

SEQ ID NO: 19399 - protein, 6 aa, synthetic construct
PIEQKY

SEQ ID NO: 19400 - protein, 6 aa, synthetic construct
PIEQMD

SEQ ID NO: 19401 - protein, 6 aa, synthetic construct
PIEQME

SEQ ID NO: 19402 - protein, 6 aa, synthetic construct
PIEQMF

SEQ ID NO: 19403 - protein, 6 aa, synthetic construct
PIEQMW

SEQ ID NO: 19404 - protein, 6 aa, synthetic construct
PIEQMY

SEQ ID NO: 19405 - protein, 6 aa, synthetic construct
PIEQFD

SEQ ID NO: 19406 - protein, 6 aa, synthetic construct
PIEQFE

SEQ ID NO: 19407 - protein, 6 aa, synthetic construct
PIEQFF

SEQ ID NO: 19408 - protein, 6 aa, synthetic construct
PIEQFW

SEQ ID NO: 19409 - protein, 6 aa, synthetic construct
PIEQFY

SEQ ID NO: 19410 - protein, 6 aa, synthetic construct
PIEQPD

SEQ ID NO: 19411 - protein, 6 aa, synthetic construct
PIEQPE

SEQ ID NO: 19412 - protein, 6 aa, synthetic construct
PIEQPF

SEQ ID NO: 19413 - protein, 6 aa, synthetic construct
PIEQPW

SEQ ID NO: 19414 - protein, 6 aa, synthetic construct
PIEQPY

SEQ ID NO: 19415 - protein, 6 aa, synthetic construct
PIEQSD

SEQ ID NO: 19416 - protein, 6 aa, synthetic construct
PIEQSE

SEQ ID NO: 19417 - protein, 6 aa, synthetic construct
PIEQSF

SEQ ID NO: 19418 - protein, 6 aa, synthetic construct
PIEQSW

SEQ ID NO: 19419 - protein, 6 aa, synthetic construct
PIEQSY

SEQ ID NO: 19420 - protein, 6 aa, synthetic construct
PIEQTD

SEQ ID NO: 19421 - protein, 6 aa, synthetic construct
PIEQTE

SEQ ID NO: 19422 - protein, 6 aa, synthetic construct
PIEQTF

SEQ ID NO: 19423 - protein, 6 aa, synthetic construct
PIEQTW

SEQ ID NO: 19424 - protein, 6 aa, synthetic construct
PIEQTY

SEQ ID NO: 19425 - protein, 6 aa, synthetic construct
PIEQWD

SEQ ID NO: 19426 - protein, 6 aa, synthetic construct
PIEQWE

SEQ ID NO: 19427 - protein, 6 aa, synthetic construct
PIEQWF

SEQ ID NO: 19428 - protein, 6 aa, synthetic construct
PIEQWW

SEQ ID NO: 19429 - protein, 6 aa, synthetic construct
PIEQWY

SEQ ID NO: 19430 - protein, 6 aa, synthetic construct
PIEQYD

SEQ ID NO: 19431 - protein, 6 aa, synthetic construct
PIEQYE

SEQ ID NO: 19432 - protein, 6 aa, synthetic construct
PIEQYF

SEQ ID NO: 19433 - protein, 6 aa, synthetic construct
PIEQYW

SEQ ID NO: 19434 - protein, 6 aa, synthetic construct
PIEQYY

SEQ ID NO: 19435 - protein, 6 aa, synthetic construct
PIEQVD

SEQ ID NO: 19436 - protein, 6 aa, synthetic construct
PIEQVE

SEQ ID NO: 19437 - protein, 6 aa, synthetic construct
PIEQVF

SEQ ID NO: 19438 - protein, 6 aa, synthetic construct
PIEQVW

SEQ ID NO: 19439 - protein, 6 aa, synthetic construct
PIEQVY

SEQ ID NO: 19440 - protein, 6 aa, synthetic construct
PIEEAD

SEQ ID NO: 19441 - protein, 6 aa, synthetic construct
PIEEAE

SEQ ID NO: 19442 - protein, 6 aa, synthetic construct
PIEEAF

SEQ ID NO: 19443 - protein, 6 aa, synthetic construct
PIEEAW

SEQ ID NO: 19444 - protein, 6 aa, synthetic construct
PIEEAY

SEQ ID NO: 19445 - protein, 6 aa, synthetic construct
PIEERD

SEQ ID NO: 19446 - protein, 6 aa, synthetic construct
PIEERE

SEQ ID NO: 19447 - protein, 6 aa, synthetic construct
PIEERF

SEQ ID NO: 19448 - protein, 6 aa, synthetic construct
PIEERW

SEQ ID NO: 19449 - protein, 6 aa, synthetic construct
PIEERY

SEQ ID NO: 19450 - protein, 6 aa, synthetic construct
PIEEND

SEQ ID NO: 19451 - protein, 6 aa, synthetic construct
PIEENE

SEQ ID NO: 19452 - protein, 6 aa, synthetic construct
PIEENF

SEQ ID NO: 19453 - protein, 6 aa, synthetic construct
PIEENW

SEQ ID NO: 19454 - protein, 6 aa, synthetic construct
PIEENY

SEQ ID NO: 19455 - protein, 6 aa, synthetic construct
PIEEDD

SEQ ID NO: 19456 - protein, 6 aa, synthetic construct
PIEEDE

SEQ ID NO: 19457 - protein, 6 aa, synthetic construct
PIEEDF

SEQ ID NO: 19458 - protein, 6 aa, synthetic construct
PIEEDW

SEQ ID NO: 19459 - protein, 6 aa, synthetic construct
PIEEDY

SEQ ID NO: 19460 - protein, 6 aa, synthetic construct
PIEECD

SEQ ID NO: 19461 - protein, 6 aa, synthetic construct
PIEECE

SEQ ID NO: 19462 - protein, 6 aa, synthetic construct
PIEECF

SEQ ID NO: 19463 - protein, 6 aa, synthetic construct
PIEECW

SEQ ID NO: 19464 - protein, 6 aa, synthetic construct
PIEECY

SEQ ID NO: 19465 - protein, 6 aa, synthetic construct
PIEEQD

SEQ ID NO: 19466 - protein, 6 aa, synthetic construct
PIEEQE

SEQ ID NO: 19467 - protein, 6 aa, synthetic construct
PIEEQF

SEQ ID NO: 19468 - protein, 6 aa, synthetic construct
PIEEQW

SEQ ID NO: 19469 - protein, 6 aa, synthetic construct
PIEEQY

SEQ ID NO: 19470 - protein, 6 aa, synthetic construct
PIEEED

SEQ ID NO: 19471 - protein, 6 aa, synthetic construct
PIEEEE

SEQ ID NO: 19472 - protein, 6 aa, synthetic construct
PIEEEF

SEQ ID NO: 19473 - protein, 6 aa, synthetic construct
PIEEEW

SEQ ID NO: 19474 - protein, 6 aa, synthetic construct
PIEEEY

SEQ ID NO: 19475 - protein, 6 aa, synthetic construct
PIEEGD

SEQ ID NO: 19476 - protein, 6 aa, synthetic construct
PIEEGE

SEQ ID NO: 19477 - protein, 6 aa, synthetic construct
PIEEGF

SEQ ID NO: 19478 - protein, 6 aa, synthetic construct
PIEEGW

SEQ ID NO: 19479 - protein, 6 aa, synthetic construct
PIEEGY

SEQ ID NO: 19480 - protein, 6 aa, synthetic construct
PIEEHD

SEQ ID NO: 19481 - protein, 6 aa, synthetic construct
PIEEHE

SEQ ID NO: 19482 - protein, 6 aa, synthetic construct
PIEEHF

SEQ ID NO: 19483 - protein, 6 aa, synthetic construct
PIEEHW

SEQ ID NO: 19484 - protein, 6 aa, synthetic construct
PIEEHY

SEQ ID NO: 19485 - protein, 6 aa, synthetic construct
PIEEID

SEQ ID NO: 19486 - protein, 6 aa, synthetic construct
PIEEIE

SEQ ID NO: 19487 - protein, 6 aa, synthetic construct
PIEEIF

SEQ ID NO: 19488 - protein, 6 aa, synthetic construct
PIEEIW

SEQ ID NO: 19489 - protein, 6 aa, synthetic construct
PIEEIY

SEQ ID NO: 19490 - protein, 6 aa, synthetic construct
PIEELD

SEQ ID NO: 19491 - protein, 6 aa, synthetic construct
PIEELE

SEQ ID NO: 19492 - protein, 6 aa, synthetic construct
PIEELF

SEQ ID NO: 19493 - protein, 6 aa, synthetic construct
PIEELW

SEQ ID NO: 19494 - protein, 6 aa, synthetic construct
PIEELY

SEQ ID NO: 19495 - protein, 6 aa, synthetic construct
PIEEKD

SEQ ID NO: 19496 - protein, 6 aa, synthetic construct
PIEEKE

SEQ ID NO: 19497 - protein, 6 aa, synthetic construct
PIEEKF

SEQ ID NO: 19498 - protein, 6 aa, synthetic construct
PIEEKW

SEQ ID NO: 19499 - protein, 6 aa, synthetic construct
PIEEKY

SEQ ID NO: 19500 - protein, 6 aa, synthetic construct
PIEEMD

SEQ ID NO: 19501 - protein, 6 aa, synthetic construct
PIEEME

SEQ ID NO: 19502 - protein, 6 aa, synthetic construct
PIEEMF

SEQ ID NO: 19503 - protein, 6 aa, synthetic construct
PIEEMW

SEQ ID NO: 19504 - protein, 6 aa, synthetic construct
PIEEMY

SEQ ID NO: 19505 - protein, 6 aa, synthetic construct
PIEEFD

SEQ ID NO: 19506 - protein, 6 aa, synthetic construct
PIEEFE

SEQ ID NO: 19507 - protein, 6 aa, synthetic construct
PIEEFF

SEQ ID NO: 19508 - protein, 6 aa, synthetic construct
PIEEFW

SEQ ID NO: 19509 - protein, 6 aa, synthetic construct
PIEEFY

SEQ ID NO: 19510 - protein, 6 aa, synthetic construct
PIEEPD

SEQ ID NO: 19511 - protein, 6 aa, synthetic construct
PIEEPE

SEQ ID NO: 19512 - protein, 6 aa, synthetic construct
PIEEPF

SEQ ID NO: 19513 - protein, 6 aa, synthetic construct
PIEEPW

SEQ ID NO: 19514 - protein, 6 aa, synthetic construct
PIEEPY

SEQ ID NO: 19515 - protein, 6 aa, synthetic construct
PIEESD

SEQ ID NO: 19516 - protein, 6 aa, synthetic construct
PIEESE

SEQ ID NO: 19517 - protein, 6 aa, synthetic construct
PIEESF

SEQ ID NO: 19518 - protein, 6 aa, synthetic construct
PIEESW

SEQ ID NO: 19519 - protein, 6 aa, synthetic construct
PIEESY

SEQ ID NO: 19520 - protein, 6 aa, synthetic construct
PIEETD

SEQ ID NO: 19521 - protein, 6 aa, synthetic construct
PIEETE

SEQ ID NO: 19522 - protein, 6 aa, synthetic construct
PIEETF

SEQ ID NO: 19523 - protein, 6 aa, synthetic construct
PIEETW

SEQ ID NO: 19524 - protein, 6 aa, synthetic construct
PIEETY

SEQ ID NO: 19525 - protein, 6 aa, synthetic construct
PIEEWD

SEQ ID NO: 19526 - protein, 6 aa, synthetic construct
PIEEWE

SEQ ID NO: 19527 - protein, 6 aa, synthetic construct
PIEEWF

SEQ ID NO: 19528 - protein, 6 aa, synthetic construct
PIEEWW

SEQ ID NO: 19529 - protein, 6 aa, synthetic construct
PIEEWY

SEQ ID NO: 19530 - protein, 6 aa, synthetic construct
PIEEYD

SEQ ID NO: 19531 - protein, 6 aa, synthetic construct
PIEEYE

SEQ ID NO: 19532 - protein, 6 aa, synthetic construct
PIEEYF

SEQ ID NO: 19533 - protein, 6 aa, synthetic construct
PIEEYW

SEQ ID NO: 19534 - protein, 6 aa, synthetic construct
PIEEYY

SEQ ID NO: 19535 - protein, 6 aa, synthetic construct
PIEEVD

SEQ ID NO: 19536 - protein, 6 aa, synthetic construct
PIEEVE

SEQ ID NO: 19537 - protein, 6 aa, synthetic construct
PIEEVF

SEQ ID NO: 19538 - protein, 6 aa, synthetic construct
PIEEVW

SEQ ID NO: 19539 - protein, 6 aa, synthetic construct
PIEEVY

SEQ ID NO: 19540 - protein, 6 aa, synthetic construct
PIEGAD

SEQ ID NO: 19541 - protein, 6 aa, synthetic construct
PIEGAE

SEQ ID NO: 19542 - protein, 6 aa, synthetic construct
PIEGAF

SEQ ID NO: 19543 - protein, 6 aa, synthetic construct
PIEGAW

SEQ ID NO: 19544 - protein, 6 aa, synthetic construct
PIEGAY

SEQ ID NO: 19545 - protein, 6 aa, synthetic construct
PIEGRD

SEQ ID NO: 19546 - protein, 6 aa, synthetic construct
PIEGRE

SEQ ID NO: 19547 - protein, 6 aa, synthetic construct
PIEGRF

SEQ ID NO: 19548 - protein, 6 aa, synthetic construct
PIEGRW

SEQ ID NO: 19549 - protein, 6 aa, synthetic construct
PIEGRY

SEQ ID NO: 19550 - protein, 6 aa, synthetic construct
PIEGND

SEQ ID NO: 19551 - protein, 6 aa, synthetic construct
PIEGNE

SEQ ID NO: 19552 - protein, 6 aa, synthetic construct
PIEGNF

SEQ ID NO: 19553 - protein, 6 aa, synthetic construct
PIEGNW

SEQ ID NO: 19554 - protein, 6 aa, synthetic construct
PIEGNY

SEQ ID NO: 19555 - protein, 6 aa, synthetic construct
PIEGDD

SEQ ID NO: 19556 - protein, 6 aa, synthetic construct
PIEGDE

SEQ ID NO: 19557 - protein, 6 aa, synthetic construct
PIEGDF

SEQ ID NO: 19558 - protein, 6 aa, synthetic construct
PIEGDW

SEQ ID NO: 19559 - protein, 6 aa, synthetic construct
PIEGDY

SEQ ID NO: 19560 - protein, 6 aa, synthetic construct
PIEGCD

SEQ ID NO: 19561 - protein, 6 aa, synthetic construct
PIEGCE

SEQ ID NO: 19562 - protein, 6 aa, synthetic construct
PIEGCF

SEQ ID NO: 19563 - protein, 6 aa, synthetic construct
PIEGCW

SEQ ID NO: 19564 - protein, 6 aa, synthetic construct
PIEGCY

SEQ ID NO: 19565 - protein, 6 aa, synthetic construct
PIEGQD

SEQ ID NO: 19566 - protein, 6 aa, synthetic construct
PIEGQE

SEQ ID NO: 19567 - protein, 6 aa, synthetic construct
PIEGQF

SEQ ID NO: 19568 - protein, 6 aa, synthetic construct
PIEGQW

SEQ ID NO: 19569 - protein, 6 aa, synthetic construct
PIEGQY

SEQ ID NO: 19570 - protein, 6 aa, synthetic construct
PIEGED

SEQ ID NO: 19571 - protein, 6 aa, synthetic construct
PIEGEE

SEQ ID NO: 19572 - protein, 6 aa, synthetic construct
PIEGEF

SEQ ID NO: 19573 - protein, 6 aa, synthetic construct
PIEGEW

SEQ ID NO: 19574 - protein, 6 aa, synthetic construct
PIEGEY

SEQ ID NO: 19575 - protein, 6 aa, synthetic construct
PIEGGD

SEQ ID NO: 19576 - protein, 6 aa, synthetic construct
PIEGGE

SEQ ID NO: 19577 - protein, 6 aa, synthetic construct
PIEGGF

SEQ ID NO: 19578 - protein, 6 aa, synthetic construct
PIEGGW

SEQ ID NO: 19579 - protein, 6 aa, synthetic construct
PIEGGY

SEQ ID NO: 19580 - protein, 6 aa, synthetic construct
PIEGHD

SEQ ID NO: 19581 - protein, 6 aa, synthetic construct
PIEGHE

SEQ ID NO: 19582 - protein, 6 aa, synthetic construct
PIEGHF

SEQ ID NO: 19583 - protein, 6 aa, synthetic construct
PIEGHW

SEQ ID NO: 19584 - protein, 6 aa, synthetic construct
PIEGHY

SEQ ID NO: 19585 - protein, 6 aa, synthetic construct
PIEGID

SEQ ID NO: 19586 - protein, 6 aa, synthetic construct
PIEGIE

SEQ ID NO: 19587 - protein, 6 aa, synthetic construct
PIEGIF

SEQ ID NO: 19588 - protein, 6 aa, synthetic construct
PIEGIW

SEQ ID NO: 19589 - protein, 6 aa, synthetic construct
PIEGIY

SEQ ID NO: 19590 - protein, 6 aa, synthetic construct
PIEGLD

SEQ ID NO: 19591 - protein, 6 aa, synthetic construct
PIEGLE

SEQ ID NO: 19592 - protein, 6 aa, synthetic construct
PIEGLF

SEQ ID NO: 19593 - protein, 6 aa, synthetic construct
PIEGLW

SEQ ID NO: 19594 - protein, 6 aa, synthetic construct
PIEGLY

SEQ ID NO: 19595 - protein, 6 aa, synthetic construct
PIEGKD

SEQ ID NO: 19596 - protein, 6 aa, synthetic construct
PIEGKE

SEQ ID NO: 19597 - protein, 6 aa, synthetic construct
PIEGKF

SEQ ID NO: 19598 - protein, 6 aa, synthetic construct
PIEGKW

SEQ ID NO: 19599 - protein, 6 aa, synthetic construct
PIEGKY

SEQ ID NO: 19600 - protein, 6 aa, synthetic construct
PIEGMD

SEQ ID NO: 19601 - protein, 6 aa, synthetic construct
PIEGME

SEQ ID NO: 19602 - protein, 6 aa, synthetic construct
PIEGMF

SEQ ID NO: 19603 - protein, 6 aa, synthetic construct
PIEGMW

SEQ ID NO: 19604 - protein, 6 aa, synthetic construct
PIEGMY

SEQ ID NO: 19605 - protein, 6 aa, synthetic construct
PIEGFD

SEQ ID NO: 19606 - protein, 6 aa, synthetic construct
PIEGFE

SEQ ID NO: 19607 - protein, 6 aa, synthetic construct
PIEGFF

SEQ ID NO: 19608 - protein, 6 aa, synthetic construct
PIEGFW

SEQ ID NO: 19609 - protein, 6 aa, synthetic construct
PIEGFY

SEQ ID NO: 19610 - protein, 6 aa, synthetic construct
PIEGPD

SEQ ID NO: 19611 - protein, 6 aa, synthetic construct
PIEGPE

SEQ ID NO: 19612 - protein, 6 aa, synthetic construct
PIEGPF

SEQ ID NO: 19613 - protein, 6 aa, synthetic construct
PIEGPW

SEQ ID NO: 19614 - protein, 6 aa, synthetic construct
PIEGPY

SEQ ID NO: 19615 - protein, 6 aa, synthetic construct
PIEGSD

SEQ ID NO: 19616 - protein, 6 aa, synthetic construct
PIEGSE

SEQ ID NO: 19617 - protein, 6 aa, synthetic construct
PIEGSF

SEQ ID NO: 19618 - protein, 6 aa, synthetic construct
PIEGSW

SEQ ID NO: 19619 - protein, 6 aa, synthetic construct
PIEGSY

SEQ ID NO: 19620 - protein, 6 aa, synthetic construct
PIEGTD

SEQ ID NO: 19621 - protein, 6 aa, synthetic construct
PIEGTE

SEQ ID NO: 19622 - protein, 6 aa, synthetic construct
PIEGTF

SEQ ID NO: 19623 - protein, 6 aa, synthetic construct
PIEGTW

SEQ ID NO: 19624 - protein, 6 aa, synthetic construct
PIEGTY

SEQ ID NO: 19625 - protein, 6 aa, synthetic construct
PIEGWD

SEQ ID NO: 19626 - protein, 6 aa, synthetic construct
PIEGWE

SEQ ID NO: 19627 - protein, 6 aa, synthetic construct
PIEGWF

SEQ ID NO: 19628 - protein, 6 aa, synthetic construct
PIEGWW

SEQ ID NO: 19629 - protein, 6 aa, synthetic construct
PIEGWY

SEQ ID NO: 19630 - protein, 6 aa, synthetic construct
PIEGYD

SEQ ID NO: 19631 - protein, 6 aa, synthetic construct
PIEGYE

SEQ ID NO: 19632 - protein, 6 aa, synthetic construct
PIEGYF

SEQ ID NO: 19633 - protein, 6 aa, synthetic construct
PIEGYW

SEQ ID NO: 19634 - protein, 6 aa, synthetic construct
PIEGYY

SEQ ID NO: 19635 - protein, 6 aa, synthetic construct
PIEGVD

SEQ ID NO: 19636 - protein, 6 aa, synthetic construct
PIEGVE

SEQ ID NO: 19637 - protein, 6 aa, synthetic construct
PIEGVF

SEQ ID NO: 19638 - protein, 6 aa, synthetic construct
PIEGVW

SEQ ID NO: 19639 - protein, 6 aa, synthetic construct
PIEGVY

SEQ ID NO: 19640 - protein, 6 aa, synthetic construct
PIEHAD

SEQ ID NO: 19641 - protein, 6 aa, synthetic construct
PIEHAE

SEQ ID NO: 19642 - protein, 6 aa, synthetic construct
PIEHAF

SEQ ID NO: 19643 - protein, 6 aa, synthetic construct
PIEHAW

SEQ ID NO: 19644 - protein, 6 aa, synthetic construct
PIEHAY

SEQ ID NO: 19645 - protein, 6 aa, synthetic construct
PIEHRD

SEQ ID NO: 19646 - protein, 6 aa, synthetic construct
PIEHRE

SEQ ID NO: 19647 - protein, 6 aa, synthetic construct
PIEHRF

SEQ ID NO: 19648 - protein, 6 aa, synthetic construct
PIEHRW

SEQ ID NO: 19649 - protein, 6 aa, synthetic construct
PIEHRY

SEQ ID NO: 19650 - protein, 6 aa, synthetic construct
PIEHND

SEQ ID NO: 19651 - protein, 6 aa, synthetic construct
PIEHNE

SEQ ID NO: 19652 - protein, 6 aa, synthetic construct
PIEHNF

SEQ ID NO: 19653 - protein, 6 aa, synthetic construct
PIEHNW

SEQ ID NO: 19654 - protein, 6 aa, synthetic construct
PIEHNY

SEQ ID NO: 19655 - protein, 6 aa, synthetic construct
PIEHDD

SEQ ID NO: 19656 - protein, 6 aa, synthetic construct
PIEHDE

SEQ ID NO: 19657 - protein, 6 aa, synthetic construct
PIEHDF

SEQ ID NO: 19658 - protein, 6 aa, synthetic construct
PIEHDW

SEQ ID NO: 19659 - protein, 6 aa, synthetic construct
PIEHDY

SEQ ID NO: 19660 - protein, 6 aa, synthetic construct
PIEHCD

SEQ ID NO: 19661 - protein, 6 aa, synthetic construct
PIEHCE

SEQ ID NO: 19662 - protein, 6 aa, synthetic construct
PIEHCF

SEQ ID NO: 19663 - protein, 6 aa, synthetic construct
PIEHCW

SEQ ID NO: 19664 - protein, 6 aa, synthetic construct
PIEHCY

SEQ ID NO: 19665 - protein, 6 aa, synthetic construct
PIEHQD

SEQ ID NO: 19666 - protein, 6 aa, synthetic construct
PIEHQE

SEQ ID NO: 19667 - protein, 6 aa, synthetic construct
PIEHQF

SEQ ID NO: 19668 - protein, 6 aa, synthetic construct
PIEHQW

SEQ ID NO: 19669 - protein, 6 aa, synthetic construct
PIEHQY

SEQ ID NO: 19670 - protein, 6 aa, synthetic construct
PIEHED

SEQ ID NO: 19671 - protein, 6 aa, synthetic construct
PIEHEE

SEQ ID NO: 19672 - protein, 6 aa, synthetic construct
PIEHEF

SEQ ID NO: 19673 - protein, 6 aa, synthetic construct
PIEHEW

SEQ ID NO: 19674 - protein, 6 aa, synthetic construct
PIEHEY

SEQ ID NO: 19675 - protein, 6 aa, synthetic construct
PIEHGD

SEQ ID NO: 19676 - protein, 6 aa, synthetic construct
PIEHGE

SEQ ID NO: 19677 - protein, 6 aa, synthetic construct
PIEHGF

SEQ ID NO: 19678 - protein, 6 aa, synthetic construct
PIEHGW

SEQ ID NO: 19679 - protein, 6 aa, synthetic construct
PIEHGY

SEQ ID NO: 19680 - protein, 6 aa, synthetic construct
PIEHHD

SEQ ID NO: 19681 - protein, 6 aa, synthetic construct
PIEHHE

SEQ ID NO: 19682 - protein, 6 aa, synthetic construct
PIEHHF

SEQ ID NO: 19683 - protein, 6 aa, synthetic construct
PIEHHW

SEQ ID NO: 19684 - protein, 6 aa, synthetic construct
PIEHHY

SEQ ID NO: 19685 - protein, 6 aa, synthetic construct
PIEHID

SEQ ID NO: 19686 - protein, 6 aa, synthetic construct
PIEHIE

SEQ ID NO: 19687 - protein, 6 aa, synthetic construct
PIEHIF

SEQ ID NO: 19688 - protein, 6 aa, synthetic construct
PIEHIW

SEQ ID NO: 19689 - protein, 6 aa, synthetic construct
PIEHIY

SEQ ID NO: 19690 - protein, 6 aa, synthetic construct
PIEHLD

SEQ ID NO: 19691 - protein, 6 aa, synthetic construct
PIEHLE

SEQ ID NO: 19692 - protein, 6 aa, synthetic construct
PIEHLF

SEQ ID NO: 19693 - protein, 6 aa, synthetic construct
PIEHLW

SEQ ID NO: 19694 - protein, 6 aa, synthetic construct
PIEHLY

SEQ ID NO: 19695 - protein, 6 aa, synthetic construct
PIEHKD

SEQ ID NO: 19696 - protein, 6 aa, synthetic construct
PIEHKE

SEQ ID NO: 19697 - protein, 6 aa, synthetic construct
PIEHKF

SEQ ID NO: 19698 - protein, 6 aa, synthetic construct
PIEHKW

SEQ ID NO: 19699 - protein, 6 aa, synthetic construct
PIEHKY

SEQ ID NO: 19700 - protein, 6 aa, synthetic construct
PIEHMD

SEQ ID NO: 19701 - protein, 6 aa, synthetic construct
PIEHME

SEQ ID NO: 19702 - protein, 6 aa, synthetic construct
PIEHMF

SEQ ID NO: 19703 - protein, 6 aa, synthetic construct
PIEHMW

SEQ ID NO: 19704 - protein, 6 aa, synthetic construct
PIEHMY

SEQ ID NO: 19705 - protein, 6 aa, synthetic construct
PIEHFD

SEQ ID NO: 19706 - protein, 6 aa, synthetic construct
PIEHFE

SEQ ID NO: 19707 - protein, 6 aa, synthetic construct
PIEHFF

SEQ ID NO: 19708 - protein, 6 aa, synthetic construct
PIEHFW

SEQ ID NO: 19709 - protein, 6 aa, synthetic construct
PIEHFY

SEQ ID NO: 19710 - protein, 6 aa, synthetic construct
PIEHPD

SEQ ID NO: 19711 - protein, 6 aa, synthetic construct
PIEHPE

SEQ ID NO: 19712 - protein, 6 aa, synthetic construct
PIEHPF

SEQ ID NO: 19713 - protein, 6 aa, synthetic construct
PIEHPW

SEQ ID NO: 19714 - protein, 6 aa, synthetic construct
PIEHPY

SEQ ID NO: 19715 - protein, 6 aa, synthetic construct
PIEHSD

SEQ ID NO: 19716 - protein, 6 aa, synthetic construct
PIEHSE

SEQ ID NO: 19717 - protein, 6 aa, synthetic construct
PIEHSF

SEQ ID NO: 19718 - protein, 6 aa, synthetic construct
PIEHSW

SEQ ID NO: 19719 - protein, 6 aa, synthetic construct
PIEHSY

SEQ ID NO: 19720 - protein, 6 aa, synthetic construct
PIEHTD

SEQ ID NO: 19721 - protein, 6 aa, synthetic construct
PIEHTE

SEQ ID NO: 19722 - protein, 6 aa, synthetic construct
PIEHTF

SEQ ID NO: 19723 - protein, 6 aa, synthetic construct
PIEHTW

SEQ ID NO: 19724 - protein, 6 aa, synthetic construct
PIEHTY

SEQ ID NO: 19725 - protein, 6 aa, synthetic construct
PIEHWD

SEQ ID NO: 19726 - protein, 6 aa, synthetic construct
PIEHWE

SEQ ID NO: 19727 - protein, 6 aa, synthetic construct
PIEHWF

SEQ ID NO: 19728 - protein, 6 aa, synthetic construct
PIEHWW

SEQ ID NO: 19729 - protein, 6 aa, synthetic construct
PIEHWY

SEQ ID NO: 19730 - protein, 6 aa, synthetic construct
PIEHYD

SEQ ID NO: 19731 - protein, 6 aa, synthetic construct
PIEHYE

SEQ ID NO: 19732 - protein, 6 aa, synthetic construct
PIEHYF

SEQ ID NO: 19733 - protein, 6 aa, synthetic construct
PIEHYW

SEQ ID NO: 19734 - protein, 6 aa, synthetic construct
PIEHYY

SEQ ID NO: 19735 - protein, 6 aa, synthetic construct
PIEHVD

SEQ ID NO: 19736 - protein, 6 aa, synthetic construct
PIEHVE

SEQ ID NO: 19737 - protein, 6 aa, synthetic construct
PIEHVF

SEQ ID NO: 19738 - protein, 6 aa, synthetic construct
PIEHVW

SEQ ID NO: 19739 - protein, 6 aa, synthetic construct
PIEHVY

SEQ ID NO: 19740 - protein, 6 aa, synthetic construct
PIEIAD

SEQ ID NO: 19741 - protein, 6 aa, synthetic construct
PIEIAE

SEQ ID NO: 19742 - protein, 6 aa, synthetic construct
PIEIAF

SEQ ID NO: 19743 - protein, 6 aa, synthetic construct
PIEIAW

SEQ ID NO: 19744 - protein, 6 aa, synthetic construct
PIEIAY

SEQ ID NO: 19745 - protein, 6 aa, synthetic construct
PIEIRD

SEQ ID NO: 19746 - protein, 6 aa, synthetic construct
PIEIRE

SEQ ID NO: 19747 - protein, 6 aa, synthetic construct
PIEIRF

SEQ ID NO: 19748 - protein, 6 aa, synthetic construct
PIEIRW

SEQ ID NO: 19749 - protein, 6 aa, synthetic construct
PIEIRY

SEQ ID NO: 19750 - protein, 6 aa, synthetic construct
PIEIND

SEQ ID NO: 19751 - protein, 6 aa, synthetic construct
PIEINE

SEQ ID NO: 19752 - protein, 6 aa, synthetic construct
PIEINF

SEQ ID NO: 19753 - protein, 6 aa, synthetic construct
PIEINW

SEQ ID NO: 19754 - protein, 6 aa, synthetic construct
PIEINY

SEQ ID NO: 19755 - protein, 6 aa, synthetic construct
PIEIDD

SEQ ID NO: 19756 - protein, 6 aa, synthetic construct
PIEIDE

SEQ ID NO: 19757 - protein, 6 aa, synthetic construct
PIEIDF

SEQ ID NO: 19758 - protein, 6 aa, synthetic construct
PIEIDW

SEQ ID NO: 19759 - protein, 6 aa, synthetic construct
PIEIDY

SEQ ID NO: 19760 - protein, 6 aa, synthetic construct
PIEICD

SEQ ID NO: 19761 - protein, 6 aa, synthetic construct
PIEICE

SEQ ID NO: 19762 - protein, 6 aa, synthetic construct
PIEICF

SEQ ID NO: 19763 - protein, 6 aa, synthetic construct
PIEICW

SEQ ID NO: 19764 - protein, 6 aa, synthetic construct
PIEICY

SEQ ID NO: 19765 - protein, 6 aa, synthetic construct
PIEIQD

SEQ ID NO: 19766 - protein, 6 aa, synthetic construct
PIEIQE

SEQ ID NO: 19767 - protein, 6 aa, synthetic construct
PIEIQF

SEQ ID NO: 19768 - protein, 6 aa, synthetic construct
PIEIQW

SEQ ID NO: 19769 - protein, 6 aa, synthetic construct
PIEIQY

SEQ ID NO: 19770 - protein, 6 aa, synthetic construct
PIEIED

SEQ ID NO: 19771 - protein, 6 aa, synthetic construct
PIEIEE

SEQ ID NO: 19772 - protein, 6 aa, synthetic construct
PIEIEF

SEQ ID NO: 19773 - protein, 6 aa, synthetic construct
PIEIEW

SEQ ID NO: 19774 - protein, 6 aa, synthetic construct
PIEIEY

SEQ ID NO: 19775 - protein, 6 aa, synthetic construct
PIEIGD

SEQ ID NO: 19776 - protein, 6 aa, synthetic construct
PIEIGE

SEQ ID NO: 19777 - protein, 6 aa, synthetic construct
PIEIGF

SEQ ID NO: 19778 - protein, 6 aa, synthetic construct
PIEIGW

SEQ ID NO: 19779 - protein, 6 aa, synthetic construct
PIEIGY

SEQ ID NO: 19780 - protein, 6 aa, synthetic construct
PIEIHD

SEQ ID NO: 19781 - protein, 6 aa, synthetic construct
PIEIHE

SEQ ID NO: 19782 - protein, 6 aa, synthetic construct
PIEIHF

SEQ ID NO: 19783 - protein, 6 aa, synthetic construct
PIEIHW

SEQ ID NO: 19784 - protein, 6 aa, synthetic construct
PIEIHY

SEQ ID NO: 19785 - protein, 6 aa, synthetic construct
PIEIID

SEQ ID NO: 19786 - protein, 6 aa, synthetic construct
PIEIIE

SEQ ID NO: 19787 - protein, 6 aa, synthetic construct
PIEIIF

SEQ ID NO: 19788 - protein, 6 aa, synthetic construct
PIEIIW

SEQ ID NO: 19789 - protein, 6 aa, synthetic construct
PIEIIY

SEQ ID NO: 19790 - protein, 6 aa, synthetic construct
PIEILD

SEQ ID NO: 19791 - protein, 6 aa, synthetic construct
PIEILE

SEQ ID NO: 19792 - protein, 6 aa, synthetic construct
PIEILF

SEQ ID NO: 19793 - protein, 6 aa, synthetic construct
PIEILW

SEQ ID NO: 19794 - protein, 6 aa, synthetic construct
PIEILY

SEQ ID NO: 19795 - protein, 6 aa, synthetic construct
PIEIKD

SEQ ID NO: 19796 - protein, 6 aa, synthetic construct
PIEIKE

SEQ ID NO: 19797 - protein, 6 aa, synthetic construct
PIEIKF

SEQ ID NO: 19798 - protein, 6 aa, synthetic construct
PIEIKW

SEQ ID NO: 19799 - protein, 6 aa, synthetic construct
PIEIKY

SEQ ID NO: 19800 - protein, 6 aa, synthetic construct
PIEIMD

SEQ ID NO: 19801 - protein, 6 aa, synthetic construct
PIEIME

SEQ ID NO: 19802 - protein, 6 aa, synthetic construct
PIEIMF

SEQ ID NO: 19803 - protein, 6 aa, synthetic construct
PIEIMW

SEQ ID NO: 19804 - protein, 6 aa, synthetic construct
PIEIMY

SEQ ID NO: 19805 - protein, 6 aa, synthetic construct
PIEIFD

SEQ ID NO: 19806 - protein, 6 aa, synthetic construct
PIEIFE

SEQ ID NO: 19807 - protein, 6 aa, synthetic construct
PIEIFF

SEQ ID NO: 19808 - protein, 6 aa, synthetic construct
PIEIFW

SEQ ID NO: 19809 - protein, 6 aa, synthetic construct
PIEIFY

SEQ ID NO: 19810 - protein, 6 aa, synthetic construct
PIEIPD

SEQ ID NO: 19811 - protein, 6 aa, synthetic construct
PIEIPE

SEQ ID NO: 19812 - protein, 6 aa, synthetic construct
PIEIPF

SEQ ID NO: 19813 - protein, 6 aa, synthetic construct
PIEIPW

SEQ ID NO: 19814 - protein, 6 aa, synthetic construct
PIEIPY

SEQ ID NO: 19815 - protein, 6 aa, synthetic construct
PIEISD

SEQ ID NO: 19816 - protein, 6 aa, synthetic construct
PIEISE

SEQ ID NO: 19817 - protein, 6 aa, synthetic construct
PIEISF

SEQ ID NO: 19818 - protein, 6 aa, synthetic construct
PIEISW

SEQ ID NO: 19819 - protein, 6 aa, synthetic construct
PIEISY

SEQ ID NO: 19820 - protein, 6 aa, synthetic construct
PIEITD

SEQ ID NO: 19821 - protein, 6 aa, synthetic construct
PIEITE

SEQ ID NO: 19822 - protein, 6 aa, synthetic construct
PIEITF

SEQ ID NO: 19823 - protein, 6 aa, synthetic construct
PIEITW

SEQ ID NO: 19824 - protein, 6 aa, synthetic construct
PIEITY

SEQ ID NO: 19825 - protein, 6 aa, synthetic construct
PIEIWD

SEQ ID NO: 19826 - protein, 6 aa, synthetic construct
PIEIWE

SEQ ID NO: 19827 - protein, 6 aa, synthetic construct
PIEIWF

SEQ ID NO: 19828 - protein, 6 aa, synthetic construct
PIEIWW

SEQ ID NO: 19829 - protein, 6 aa, synthetic construct
PIEIWY

SEQ ID NO: 19830 - protein, 6 aa, synthetic construct
PIEIYD

SEQ ID NO: 19831 - protein, 6 aa, synthetic construct
PIEIYE

SEQ ID NO: 19832 - protein, 6 aa, synthetic construct
PIEIYF

SEQ ID NO: 19833 - protein, 6 aa, synthetic construct
PIEIYW

SEQ ID NO: 19834 - protein, 6 aa, synthetic construct
PIEIYY

SEQ ID NO: 19835 - protein, 6 aa, synthetic construct
PIEIVD

SEQ ID NO: 19836 - protein, 6 aa, synthetic construct
PIEIVE

SEQ ID NO: 19837 - protein, 6 aa, synthetic construct
PIEIVF

SEQ ID NO: 19838 - protein, 6 aa, synthetic construct
PIEIVW

SEQ ID NO: 19839 - protein, 6 aa, synthetic construct
PIEIVY

SEQ ID NO: 19840 - protein, 6 aa, synthetic construct
PIELAD

SEQ ID NO: 19841 - protein, 6 aa, synthetic construct
PIELAE

SEQ ID NO: 19842 - protein, 6 aa, synthetic construct
PIELAF

SEQ ID NO: 19843 - protein, 6 aa, synthetic construct
PIELAW

SEQ ID NO: 19844 - protein, 6 aa, synthetic construct
PIELAY

SEQ ID NO: 19845 - protein, 6 aa, synthetic construct
PIELRD

SEQ ID NO: 19846 - protein, 6 aa, synthetic construct
PIELRE

SEQ ID NO: 19847 - protein, 6 aa, synthetic construct
PIELRF

SEQ ID NO: 19848 - protein, 6 aa, synthetic construct
PIELRW

SEQ ID NO: 19849 - protein, 6 aa, synthetic construct
PIELRY

SEQ ID NO: 19850 - protein, 6 aa, synthetic construct
PIELND

SEQ ID NO: 19851 - protein, 6 aa, synthetic construct
PIELNE

SEQ ID NO: 19852 - protein, 6 aa, synthetic construct
PIELNF

SEQ ID NO: 19853 - protein, 6 aa, synthetic construct
PIELNW

SEQ ID NO: 19854 - protein, 6 aa, synthetic construct
PIELNY

SEQ ID NO: 19855 - protein, 6 aa, synthetic construct
PIELDD

SEQ ID NO: 19856 - protein, 6 aa, synthetic construct
PIELDE

SEQ ID NO: 19857 - protein, 6 aa, synthetic construct
PIELDF

SEQ ID NO: 19858 - protein, 6 aa, synthetic construct
PIELDW

SEQ ID NO: 19859 - protein, 6 aa, synthetic construct
PIELDY

SEQ ID NO: 19860 - protein, 6 aa, synthetic construct
PIELCD

SEQ ID NO: 19861 - protein, 6 aa, synthetic construct
PIELCE

SEQ ID NO: 19862 - protein, 6 aa, synthetic construct
PIELCF

SEQ ID NO: 19863 - protein, 6 aa, synthetic construct
PIELCW

SEQ ID NO: 19864 - protein, 6 aa, synthetic construct
PIELCY

SEQ ID NO: 19865 - protein, 6 aa, synthetic construct
PIELQD

SEQ ID NO: 19866 - protein, 6 aa, synthetic construct
PIELQE

SEQ ID NO: 19867 - protein, 6 aa, synthetic construct
PIELQF

SEQ ID NO: 19868 - protein, 6 aa, synthetic construct
PIELQW

SEQ ID NO: 19869 - protein, 6 aa, synthetic construct
PIELQY

SEQ ID NO: 19870 - protein, 6 aa, synthetic construct
PIELED

SEQ ID NO: 19871 - protein, 6 aa, synthetic construct
PIELEE

SEQ ID NO: 19872 - protein, 6 aa, synthetic construct
PIELEF

SEQ ID NO: 19873 - protein, 6 aa, synthetic construct
PIELEW

SEQ ID NO: 19874 - protein, 6 aa, synthetic construct
PIELEY

SEQ ID NO: 19875 - protein, 6 aa, synthetic construct
PIELGD

SEQ ID NO: 19876 - protein, 6 aa, synthetic construct
PIELGE

SEQ ID NO: 19877 - protein, 6 aa, synthetic construct
PIELGF

SEQ ID NO: 19878 - protein, 6 aa, synthetic construct
PIELGW

SEQ ID NO: 19879 - protein, 6 aa, synthetic construct
PIELGY

SEQ ID NO: 19880 - protein, 6 aa, synthetic construct
PIELHD

SEQ ID NO: 19881 - protein, 6 aa, synthetic construct
PIELHE

SEQ ID NO: 19882 - protein, 6 aa, synthetic construct
PIELHF

SEQ ID NO: 19883 - protein, 6 aa, synthetic construct
PIELHW

SEQ ID NO: 19884 - protein, 6 aa, synthetic construct
PIELHY

SEQ ID NO: 19885 - protein, 6 aa, synthetic construct
PIELID

SEQ ID NO: 19886 - protein, 6 aa, synthetic construct
PIELIE

SEQ ID NO: 19887 - protein, 6 aa, synthetic construct
PIELIF

SEQ ID NO: 19888 - protein, 6 aa, synthetic construct
PIELIW

SEQ ID NO: 19889 - protein, 6 aa, synthetic construct
PIELIY

SEQ ID NO: 19890 - protein, 6 aa, synthetic construct
PIELLD

SEQ ID NO: 19891 - protein, 6 aa, synthetic construct
PIELLE

SEQ ID NO: 19892 - protein, 6 aa, synthetic construct
PIELLF

SEQ ID NO: 19893 - protein, 6 aa, synthetic construct
PIELLW

SEQ ID NO: 19894 - protein, 6 aa, synthetic construct
PIELLY

SEQ ID NO: 19895 - protein, 6 aa, synthetic construct
PIELKD

SEQ ID NO: 19896 - protein, 6 aa, synthetic construct
PIELKE

SEQ ID NO: 19897 - protein, 6 aa, synthetic construct
PIELKF

SEQ ID NO: 19898 - protein, 6 aa, synthetic construct
PIELKW

SEQ ID NO: 19899 - protein, 6 aa, synthetic construct
PIELKY

SEQ ID NO: 19900 - protein, 6 aa, synthetic construct
PIELMD

SEQ ID NO: 19901 - protein, 6 aa, synthetic construct
PIELME

SEQ ID NO: 19902 - protein, 6 aa, synthetic construct
PIELMF

SEQ ID NO: 19903 - protein, 6 aa, synthetic construct
PIELMW

SEQ ID NO: 19904 - protein, 6 aa, synthetic construct
PIELMY

SEQ ID NO: 19905 - protein, 6 aa, synthetic construct
PIELFD

SEQ ID NO: 19906 - protein, 6 aa, synthetic construct
PIELFE

SEQ ID NO: 19907 - protein, 6 aa, synthetic construct
PIELFF

SEQ ID NO: 19908 - protein, 6 aa, synthetic construct
PIELFW

SEQ ID NO: 19909 - protein, 6 aa, synthetic construct
PIELFY

SEQ ID NO: 19910 - protein, 6 aa, synthetic construct
PIELPD

SEQ ID NO: 19911 - protein, 6 aa, synthetic construct
PIELPE

SEQ ID NO: 19912 - protein, 6 aa, synthetic construct
PIELPF

SEQ ID NO: 19913 - protein, 6 aa, synthetic construct
PIELPW

SEQ ID NO: 19914 - protein, 6 aa, synthetic construct
PIELPY

SEQ ID NO: 19915 - protein, 6 aa, synthetic construct
PIELSD

SEQ ID NO: 19916 - protein, 6 aa, synthetic construct
PIELSE

SEQ ID NO: 19917 - protein, 6 aa, synthetic construct
PIELSF

SEQ ID NO: 19918 - protein, 6 aa, synthetic construct
PIELSW

SEQ ID NO: 19919 - protein, 6 aa, synthetic construct
PIELSY

SEQ ID NO: 19920 - protein, 6 aa, synthetic construct
PIELTD

SEQ ID NO: 19921 - protein, 6 aa, synthetic construct
PIELTE

SEQ ID NO: 19922 - protein, 6 aa, synthetic construct
PIELTF

SEQ ID NO: 19923 - protein, 6 aa, synthetic construct
PIELTW

SEQ ID NO: 19924 - protein, 6 aa, synthetic construct
PIELTY

SEQ ID NO: 19925 - protein, 6 aa, synthetic construct
PIELWD

SEQ ID NO: 19926 - protein, 6 aa, synthetic construct
PIELWE

SEQ ID NO: 19927 - protein, 6 aa, synthetic construct
PIELWF

SEQ ID NO: 19928 - protein, 6 aa, synthetic construct
PIELWW

SEQ ID NO: 19929 - protein, 6 aa, synthetic construct
PIELWY

SEQ ID NO: 19930 - protein, 6 aa, synthetic construct
PIELYD

SEQ ID NO: 19931 - protein, 6 aa, synthetic construct
PIELYE

SEQ ID NO: 19932 - protein, 6 aa, synthetic construct
PIELYF

SEQ ID NO: 19933 - protein, 6 aa, synthetic construct
PIELYW

SEQ ID NO: 19934 - protein, 6 aa, synthetic construct
PIELYY

SEQ ID NO: 19935 - protein, 6 aa, synthetic construct
PIELVD

SEQ ID NO: 19936 - protein, 6 aa, synthetic construct
PIELVE

SEQ ID NO: 19937 - protein, 6 aa, synthetic construct
PIELVF

SEQ ID NO: 19938 - protein, 6 aa, synthetic construct
PIELVW

SEQ ID NO: 19939 - protein, 6 aa, synthetic construct
PIELVY

SEQ ID NO: 19940 - protein, 6 aa, synthetic construct
PIEKAD

SEQ ID NO: 19941 - protein, 6 aa, synthetic construct
PIEKAE

SEQ ID NO: 19942 - protein, 6 aa, synthetic construct
PIEKAF

SEQ ID NO: 19943 - protein, 6 aa, synthetic construct
PIEKAW

SEQ ID NO: 19944 - protein, 6 aa, synthetic construct
PIEKAY

SEQ ID NO: 19945 - protein, 6 aa, synthetic construct
PIEKRD

SEQ ID NO: 19946 - protein, 6 aa, synthetic construct
PIEKRE

SEQ ID NO: 19947 - protein, 6 aa, synthetic construct
PIEKRF

SEQ ID NO: 19948 - protein, 6 aa, synthetic construct
PIEKRW

SEQ ID NO: 19949 - protein, 6 aa, synthetic construct
PIEKRY

SEQ ID NO: 19950 - protein, 6 aa, synthetic construct
PIEKND

SEQ ID NO: 19951 - protein, 6 aa, synthetic construct
PIEKNE

SEQ ID NO: 19952 - protein, 6 aa, synthetic construct
PIEKNF

SEQ ID NO: 19953 - protein, 6 aa, synthetic construct
PIEKNW

SEQ ID NO: 19954 - protein, 6 aa, synthetic construct
PIEKNY

SEQ ID NO: 19955 - protein, 6 aa, synthetic construct
PIEKDD

SEQ ID NO: 19956 - protein, 6 aa, synthetic construct
PIEKDE

SEQ ID NO: 19957 - protein, 6 aa, synthetic construct
PIEKDF

SEQ ID NO: 19958 - protein, 6 aa, synthetic construct
PIEKDW

SEQ ID NO: 19959 - protein, 6 aa, synthetic construct
PIEKDY

SEQ ID NO: 19960 - protein, 6 aa, synthetic construct
PIEKCD

SEQ ID NO: 19961 - protein, 6 aa, synthetic construct
PIEKCE

SEQ ID NO: 19962 - protein, 6 aa, synthetic construct
PIEKCF

SEQ ID NO: 19963 - protein, 6 aa, synthetic construct
PIEKCW

SEQ ID NO: 19964 - protein, 6 aa, synthetic construct
PIEKCY

SEQ ID NO: 19965 - protein, 6 aa, synthetic construct
PIEKQD

SEQ ID NO: 19966 - protein, 6 aa, synthetic construct
PIEKQE

SEQ ID NO: 19967 - protein, 6 aa, synthetic construct
PIEKQF

SEQ ID NO: 19968 - protein, 6 aa, synthetic construct
PIEKQW

SEQ ID NO: 19969 - protein, 6 aa, synthetic construct
PIEKQY

SEQ ID NO: 19970 - protein, 6 aa, synthetic construct
PIEKED

SEQ ID NO: 19971 - protein, 6 aa, synthetic construct
PIEKEE

SEQ ID NO: 19972 - protein, 6 aa, synthetic construct
PIEKEF

SEQ ID NO: 19973 - protein, 6 aa, synthetic construct
PIEKEW

SEQ ID NO: 19974 - protein, 6 aa, synthetic construct
PIEKEY

SEQ ID NO: 19975 - protein, 6 aa, synthetic construct
PIEKGD

SEQ ID NO: 19976 - protein, 6 aa, synthetic construct
PIEKGE

SEQ ID NO: 19977 - protein, 6 aa, synthetic construct
PIEKGF

SEQ ID NO: 19978 - protein, 6 aa, synthetic construct
PIEKGW

SEQ ID NO: 19979 - protein, 6 aa, synthetic construct
PIEKGY

SEQ ID NO: 19980 - protein, 6 aa, synthetic construct
PIEKHD

SEQ ID NO: 19981 - protein, 6 aa, synthetic construct
PIEKHE

SEQ ID NO: 19982 - protein, 6 aa, synthetic construct
PIEKHF

SEQ ID NO: 19983 - protein, 6 aa, synthetic construct
PIEKHW

SEQ ID NO: 19984 - protein, 6 aa, synthetic construct
PIEKHY

SEQ ID NO: 19985 - protein, 6 aa, synthetic construct
PIEKID

SEQ ID NO: 19986 - protein, 6 aa, synthetic construct
PIEKIE

SEQ ID NO: 19987 - protein, 6 aa, synthetic construct
PIEKIF

SEQ ID NO: 19988 - protein, 6 aa, synthetic construct
PIEKIW

SEQ ID NO: 19989 - protein, 6 aa, synthetic construct
PIEKIY

SEQ ID NO: 19990 - protein, 6 aa, synthetic construct
PIEKLD

SEQ ID NO: 19991 - protein, 6 aa, synthetic construct
PIEKLE

SEQ ID NO: 19992 - protein, 6 aa, synthetic construct
PIEKLF

SEQ ID NO: 19993 - protein, 6 aa, synthetic construct
PIEKLW

SEQ ID NO: 19994 - protein, 6 aa, synthetic construct
PIEKLY

SEQ ID NO: 19995 - protein, 6 aa, synthetic construct
PIEKKD

SEQ ID NO: 19996 - protein, 6 aa, synthetic construct
PIEKKE

SEQ ID NO: 19997 - protein, 6 aa, synthetic construct
PIEKKF

SEQ ID NO: 19998 - protein, 6 aa, synthetic construct
PIEKKW

SEQ ID NO: 19999 - protein, 6 aa, synthetic construct
PIEKKY

SEQ ID NO: 20000 - protein, 6 aa, synthetic construct
PIEKMD

SEQ ID NO: 20001 - protein, 6 aa, synthetic construct
PIEKME

SEQ ID NO: 20002 - protein, 6 aa, synthetic construct
PIEKMF

SEQ ID NO: 20003 - protein, 6 aa, synthetic construct
PIEKMW

SEQ ID NO: 20004 - protein, 6 aa, synthetic construct
PIEKMY

SEQ ID NO: 20005 - protein, 6 aa, synthetic construct
PIEKFD

SEQ ID NO: 20006 - protein, 6 aa, synthetic construct
PIEKFE

SEQ ID NO: 20007 - protein, 6 aa, synthetic construct
PIEKFF

SEQ ID NO: 20008 - protein, 6 aa, synthetic construct
PIEKFW

SEQ ID NO: 20009 - protein, 6 aa, synthetic construct
PIEKFY

SEQ ID NO: 20010 - protein, 6 aa, synthetic construct
PIEKPD

SEQ ID NO: 20011 - protein, 6 aa, synthetic construct
PIEKPE

SEQ ID NO: 20012 - protein, 6 aa, synthetic construct
PIEKPF

SEQ ID NO: 20013 - protein, 6 aa, synthetic construct
PIEKPW

SEQ ID NO: 20014 - protein, 6 aa, synthetic construct
PIEKPY

SEQ ID NO: 20015 - protein, 6 aa, synthetic construct
PIEKSD

SEQ ID NO: 20016 - protein, 6 aa, synthetic construct
PIEKSE

SEQ ID NO: 20017 - protein, 6 aa, synthetic construct
PIEKSF

SEQ ID NO: 20018 - protein, 6 aa, synthetic construct
PIEKSW

SEQ ID NO: 20019 - protein, 6 aa, synthetic construct
PIEKSY

SEQ ID NO: 20020 - protein, 6 aa, synthetic construct
PIEKTD

SEQ ID NO: 20021 - protein, 6 aa, synthetic construct
PIEKTE

SEQ ID NO: 20022 - protein, 6 aa, synthetic construct
PIEKTF

SEQ ID NO: 20023 - protein, 6 aa, synthetic construct
PIEKTW

SEQ ID NO: 20024 - protein, 6 aa, synthetic construct
PIEKTY

SEQ ID NO: 20025 - protein, 6 aa, synthetic construct
PIEKWD

SEQ ID NO: 20026 - protein, 6 aa, synthetic construct
PIEKWE

SEQ ID NO: 20027 - protein, 6 aa, synthetic construct
PIEKWF

SEQ ID NO: 20028 - protein, 6 aa, synthetic construct
PIEKWW

SEQ ID NO: 20029 - protein, 6 aa, synthetic construct
PIEKWY

SEQ ID NO: 20030 - protein, 6 aa, synthetic construct
PIEKYD

SEQ ID NO: 20031 - protein, 6 aa, synthetic construct
PIEKYE

SEQ ID NO: 20032 - protein, 6 aa, synthetic construct
PIEKYF

SEQ ID NO: 20033 - protein, 6 aa, synthetic construct
PIEKYW

SEQ ID NO: 20034 - protein, 6 aa, synthetic construct
PIEKYY

SEQ ID NO: 20035 - protein, 6 aa, synthetic construct
PIEKVD

SEQ ID NO: 20036 - protein, 6 aa, synthetic construct
PIEKVE

SEQ ID NO: 20037 - protein, 6 aa, synthetic construct
PIEKVF

SEQ ID NO: 20038 - protein, 6 aa, synthetic construct
PIEKVW

SEQ ID NO: 20039 - protein, 6 aa, synthetic construct
PIEKVY

SEQ ID NO: 20040 - protein, 6 aa, synthetic construct
PIEMAD

SEQ ID NO: 20041 - protein, 6 aa, synthetic construct
PIEMAE

SEQ ID NO: 20042 - protein, 6 aa, synthetic construct
PIEMAF

SEQ ID NO: 20043 - protein, 6 aa, synthetic construct
PIEMAW

SEQ ID NO: 20044 - protein, 6 aa, synthetic construct
PIEMAY

SEQ ID NO: 20045 - protein, 6 aa, synthetic construct
PIEMRD

SEQ ID NO: 20046 - protein, 6 aa, synthetic construct
PIEMRE

SEQ ID NO: 20047 - protein, 6 aa, synthetic construct
PIEMRF

SEQ ID NO: 20048 - protein, 6 aa, synthetic construct
PIEMRW

SEQ ID NO: 20049 - protein, 6 aa, synthetic construct
PIEMRY

SEQ ID NO: 20050 - protein, 6 aa, synthetic construct
PIEMND

SEQ ID NO: 20051 - protein, 6 aa, synthetic construct
PIEMNE

SEQ ID NO: 20052 - protein, 6 aa, synthetic construct
PIEMNF

SEQ ID NO: 20053 - protein, 6 aa, synthetic construct
PIEMNW

SEQ ID NO: 20054 - protein, 6 aa, synthetic construct
PIEMNY

SEQ ID NO: 20055 - protein, 6 aa, synthetic construct
PIEMDD

SEQ ID NO: 20056 - protein, 6 aa, synthetic construct
PIEMDE

SEQ ID NO: 20057 - protein, 6 aa, synthetic construct
PIEMDF

SEQ ID NO: 20058 - protein, 6 aa, synthetic construct
PIEMDW

SEQ ID NO: 20059 - protein, 6 aa, synthetic construct
PIEMDY

SEQ ID NO: 20060 - protein, 6 aa, synthetic construct
PIEMCD

SEQ ID NO: 20061 - protein, 6 aa, synthetic construct
PIEMCE

SEQ ID NO: 20062 - protein, 6 aa, synthetic construct
PIEMCF

SEQ ID NO: 20063 - protein, 6 aa, synthetic construct
PIEMCW

SEQ ID NO: 20064 - protein, 6 aa, synthetic construct
PIEMCY

SEQ ID NO: 20065 - protein, 6 aa, synthetic construct
PIEMQD

SEQ ID NO: 20066 - protein, 6 aa, synthetic construct
PIEMQE

SEQ ID NO: 20067 - protein, 6 aa, synthetic construct
PIEMQF

SEQ ID NO: 20068 - protein, 6 aa, synthetic construct
PIEMQW

SEQ ID NO: 20069 - protein, 6 aa, synthetic construct
PIEMQY

SEQ ID NO: 20070 - protein, 6 aa, synthetic construct
PIEMED

SEQ ID NO: 20071 - protein, 6 aa, synthetic construct
PIEMEE

SEQ ID NO: 20072 - protein, 6 aa, synthetic construct
PIEMEF

SEQ ID NO: 20073 - protein, 6 aa, synthetic construct
PIEMEW

SEQ ID NO: 20074 - protein, 6 aa, synthetic construct
PIEMEY

SEQ ID NO: 20075 - protein, 6 aa, synthetic construct
PIEMGD

SEQ ID NO: 20076 - protein, 6 aa, synthetic construct
PIEMGE

SEQ ID NO: 20077 - protein, 6 aa, synthetic construct
PIEMGF

SEQ ID NO: 20078 - protein, 6 aa, synthetic construct
PIEMGW

SEQ ID NO: 20079 - protein, 6 aa, synthetic construct
PIEMGY

SEQ ID NO: 20080 - protein, 6 aa, synthetic construct
PIEMHD

SEQ ID NO: 20081 - protein, 6 aa, synthetic construct
PIEMHE

SEQ ID NO: 20082 - protein, 6 aa, synthetic construct
PIEMHF

SEQ ID NO: 20083 - protein, 6 aa, synthetic construct
PIEMHW

SEQ ID NO: 20084 - protein, 6 aa, synthetic construct
PIEMHY

SEQ ID NO: 20085 - protein, 6 aa, synthetic construct
PIEMID

SEQ ID NO: 20086 - protein, 6 aa, synthetic construct
PIEMIE

SEQ ID NO: 20087 - protein, 6 aa, synthetic construct
PIEMIF

SEQ ID NO: 20088 - protein, 6 aa, synthetic construct
PIEMIW

SEQ ID NO: 20089 - protein, 6 aa, synthetic construct
PIEMIY

SEQ ID NO: 20090 - protein, 6 aa, synthetic construct
PIEMLD

SEQ ID NO: 20091 - protein, 6 aa, synthetic construct
PIEMLE

SEQ ID NO: 20092 - protein, 6 aa, synthetic construct
PIEMLF

SEQ ID NO: 20093 - protein, 6 aa, synthetic construct
PIEMLW

SEQ ID NO: 20094 - protein, 6 aa, synthetic construct
PIEMLY

SEQ ID NO: 20095 - protein, 6 aa, synthetic construct
PIEMKD

SEQ ID NO: 20096 - protein, 6 aa, synthetic construct
PIEMKE

SEQ ID NO: 20097 - protein, 6 aa, synthetic construct
PIEMKF

SEQ ID NO: 20098 - protein, 6 aa, synthetic construct
PIEMKW

SEQ ID NO: 20099 - protein, 6 aa, synthetic construct
PIEMKY

SEQ ID NO: 20100 - protein, 6 aa, synthetic construct
PIEMMD

SEQ ID NO: 20101 - protein, 6 aa, synthetic construct
PIEMME

SEQ ID NO: 20102 - protein, 6 aa, synthetic construct
PIEMMF

SEQ ID NO: 20103 - protein, 6 aa, synthetic construct
PIEMMW

SEQ ID NO: 20104 - protein, 6 aa, synthetic construct
PIEMMY

SEQ ID NO: 20105 - protein, 6 aa, synthetic construct
PIEMFD

SEQ ID NO: 20106 - protein, 6 aa, synthetic construct
PIEMFE

SEQ ID NO: 20107 - protein, 6 aa, synthetic construct
PIEMFF

SEQ ID NO: 20108 - protein, 6 aa, synthetic construct
PIEMFW

SEQ ID NO: 20109 - protein, 6 aa, synthetic construct
PIEMFY

SEQ ID NO: 20110 - protein, 6 aa, synthetic construct
PIEMPD

SEQ ID NO: 20111 - protein, 6 aa, synthetic construct
PIEMPE

SEQ ID NO: 20112 - protein, 6 aa, synthetic construct
PIEMPF

SEQ ID NO: 20113 - protein, 6 aa, synthetic construct
PIEMPW

SEQ ID NO: 20114 - protein, 6 aa, synthetic construct
PIEMPY

SEQ ID NO: 20115 - protein, 6 aa, synthetic construct
PIEMSD

SEQ ID NO: 20116 - protein, 6 aa, synthetic construct
PIEMSE

SEQ ID NO: 20117 - protein, 6 aa, synthetic construct
PIEMSF

SEQ ID NO: 20118 - protein, 6 aa, synthetic construct
PIEMSW

SEQ ID NO: 20119 - protein, 6 aa, synthetic construct
PIEMSY

SEQ ID NO: 20120 - protein, 6 aa, synthetic construct
PIEMTD

SEQ ID NO: 20121 - protein, 6 aa, synthetic construct
PIEMTE

SEQ ID NO: 20122 - protein, 6 aa, synthetic construct
PIEMTF

SEQ ID NO: 20123 - protein, 6 aa, synthetic construct
PIEMTW

SEQ ID NO: 20124 - protein, 6 aa, synthetic construct
PIEMTY

SEQ ID NO: 20125 - protein, 6 aa, synthetic construct
PIEMWD

SEQ ID NO: 20126 - protein, 6 aa, synthetic construct
PIEMWE

SEQ ID NO: 20127 - protein, 6 aa, synthetic construct
PIEMWF

SEQ ID NO: 20128 - protein, 6 aa, synthetic construct
PIEMWW

SEQ ID NO: 20129 - protein, 6 aa, synthetic construct
PIEMWY

SEQ ID NO: 20130 - protein, 6 aa, synthetic construct
PIEMYD

SEQ ID NO: 20131 - protein, 6 aa, synthetic construct
PIEMYE

SEQ ID NO: 20132 - protein, 6 aa, synthetic construct
PIEMYF

SEQ ID NO: 20133 - protein, 6 aa, synthetic construct
PIEMYW

SEQ ID NO: 20134 - protein, 6 aa, synthetic construct
PIEMYY

SEQ ID NO: 20135 - protein, 6 aa, synthetic construct
PIEMVD

SEQ ID NO: 20136 - protein, 6 aa, synthetic construct
PIEMVE

SEQ ID NO: 20137 - protein, 6 aa, synthetic construct
PIEMVF

SEQ ID NO: 20138 - protein, 6 aa, synthetic construct
PIEMVW

SEQ ID NO: 20139 - protein, 6 aa, synthetic construct
PIEMVY

SEQ ID NO: 20140 - protein, 6 aa, synthetic construct
PIEFAD

SEQ ID NO: 20141 - protein, 6 aa, synthetic construct
PIEFAE

SEQ ID NO: 20142 - protein, 6 aa, synthetic construct
PIEFAF

SEQ ID NO: 20143 - protein, 6 aa, synthetic construct
PIEFAW

SEQ ID NO: 20144 - protein, 6 aa, synthetic construct
PIEFAY

SEQ ID NO: 20145 - protein, 6 aa, synthetic construct
PIEFRD

SEQ ID NO: 20146 - protein, 6 aa, synthetic construct
PIEFRE

SEQ ID NO: 20147 - protein, 6 aa, synthetic construct
PIEFRF

SEQ ID NO: 20148 - protein, 6 aa, synthetic construct
PIEFRW

SEQ ID NO: 20149 - protein, 6 aa, synthetic construct
PIEFRY

SEQ ID NO: 20150 - protein, 6 aa, synthetic construct
PIEFND

SEQ ID NO: 20151 - protein, 6 aa, synthetic construct
PIEFNE

SEQ ID NO: 20152 - protein, 6 aa, synthetic construct
PIEFNF

SEQ ID NO: 20153 - protein, 6 aa, synthetic construct
PIEFNW

SEQ ID NO: 20154 - protein, 6 aa, synthetic construct
PIEFNY

SEQ ID NO: 20155 - protein, 6 aa, synthetic construct
PIEFDD

SEQ ID NO: 20156 - protein, 6 aa, synthetic construct
PIEFDE

SEQ ID NO: 20157 - protein, 6 aa, synthetic construct
PIEFDF

SEQ ID NO: 20158 - protein, 6 aa, synthetic construct
PIEFDW

SEQ ID NO: 20159 - protein, 6 aa, synthetic construct
PIEFDY

SEQ ID NO: 20160 - protein, 6 aa, synthetic construct
PIEFCD

SEQ ID NO: 20161 - protein, 6 aa, synthetic construct
PIEFCE

SEQ ID NO: 20162 - protein, 6 aa, synthetic construct
PIEFCF

SEQ ID NO: 20163 - protein, 6 aa, synthetic construct
PIEFCW

SEQ ID NO: 20164 - protein, 6 aa, synthetic construct
PIEFCY

SEQ ID NO: 20165 - protein, 6 aa, synthetic construct
PIEFQD

SEQ ID NO: 20166 - protein, 6 aa, synthetic construct
PIEFQE

SEQ ID NO: 20167 - protein, 6 aa, synthetic construct
PIEFQF

SEQ ID NO: 20168 - protein, 6 aa, synthetic construct
PIEFQW

SEQ ID NO: 20169 - protein, 6 aa, synthetic construct
PIEFQY

SEQ ID NO: 20170 - protein, 6 aa, synthetic construct
PIEFED

SEQ ID NO: 20171 - protein, 6 aa, synthetic construct
PIEFEE

SEQ ID NO: 20172 - protein, 6 aa, synthetic construct
PIEFEF

SEQ ID NO: 20173 - protein, 6 aa, synthetic construct
PIEFEW

SEQ ID NO: 20174 - protein, 6 aa, synthetic construct
PIEFEY

SEQ ID NO: 20175 - protein, 6 aa, synthetic construct
PIEFGD

SEQ ID NO: 20176 - protein, 6 aa, synthetic construct
PIEFGE

SEQ ID NO: 20177 - protein, 6 aa, synthetic construct
PIEFGF

SEQ ID NO: 20178 - protein, 6 aa, synthetic construct
PIEFGW

SEQ ID NO: 20179 - protein, 6 aa, synthetic construct
PIEFGY

SEQ ID NO: 20180 - protein, 6 aa, synthetic construct
PIEFHD

SEQ ID NO: 20181 - protein, 6 aa, synthetic construct
PIEFHE

SEQ ID NO: 20182 - protein, 6 aa, synthetic construct
PIEFHF

SEQ ID NO: 20183 - protein, 6 aa, synthetic construct
PIEFHW

SEQ ID NO: 20184 - protein, 6 aa, synthetic construct
PIEFHY

SEQ ID NO: 20185 - protein, 6 aa, synthetic construct
PIEFID

SEQ ID NO: 20186 - protein, 6 aa, synthetic construct
PIEFIE

SEQ ID NO: 20187 - protein, 6 aa, synthetic construct
PIEFIF

SEQ ID NO: 20188 - protein, 6 aa, synthetic construct
PIEFIW

SEQ ID NO: 20189 - protein, 6 aa, synthetic construct
PIEFIY

SEQ ID NO: 20190 - protein, 6 aa, synthetic construct
PIEFLD

SEQ ID NO: 20191 - protein, 6 aa, synthetic construct
PIEFLE

SEQ ID NO: 20192 - protein, 6 aa, synthetic construct
PIEFLF

SEQ ID NO: 20193 - protein, 6 aa, synthetic construct
PIEFLW

SEQ ID NO: 20194 - protein, 6 aa, synthetic construct
PIEFLY

SEQ ID NO: 20195 - protein, 6 aa, synthetic construct
PIEFKD

SEQ ID NO: 20196 - protein, 6 aa, synthetic construct
PIEFKE

SEQ ID NO: 20197 - protein, 6 aa, synthetic construct
PIEFKF

SEQ ID NO: 20198 - protein, 6 aa, synthetic construct
PIEFKW

SEQ ID NO: 20199 - protein, 6 aa, synthetic construct
PIEFKY

SEQ ID NO: 20200 - protein, 6 aa, synthetic construct
PIEFMD

SEQ ID NO: 20201 - protein, 6 aa, synthetic construct
PIEFME

SEQ ID NO: 20202 - protein, 6 aa, synthetic construct
PIEFMF

SEQ ID NO: 20203 - protein, 6 aa, synthetic construct
PIEFMW

SEQ ID NO: 20204 - protein, 6 aa, synthetic construct
PIEFMY

SEQ ID NO: 20205 - protein, 6 aa, synthetic construct
PIEFFD

SEQ ID NO: 20206 - protein, 6 aa, synthetic construct
PIEFFE

SEQ ID NO: 20207 - protein, 6 aa, synthetic construct
PIEFFF

SEQ ID NO: 20208 - protein, 6 aa, synthetic construct
PIEFFW

SEQ ID NO: 20209 - protein, 6 aa, synthetic construct
PIEFFY

SEQ ID NO: 20210 - protein, 6 aa, synthetic construct
PIEFPD

SEQ ID NO: 20211 - protein, 6 aa, synthetic construct
PIEFPE

SEQ ID NO: 20212 - protein, 6 aa, synthetic construct
PIEFPF

SEQ ID NO: 20213 - protein, 6 aa, synthetic construct
PIEFPW

SEQ ID NO: 20214 - protein, 6 aa, synthetic construct
PIEFPY

SEQ ID NO: 20215 - protein, 6 aa, synthetic construct
PIEFSD

SEQ ID NO: 20216 - protein, 6 aa, synthetic construct
PIEFSE

SEQ ID NO: 20217 - protein, 6 aa, synthetic construct
PIEFSF

SEQ ID NO: 20218 - protein, 6 aa, synthetic construct
PIEFSW

SEQ ID NO: 20219 - protein, 6 aa, synthetic construct
PIEFSY

SEQ ID NO: 20220 - protein, 6 aa, synthetic construct
PIEFTD

SEQ ID NO: 20221 - protein, 6 aa, synthetic construct
PIEFTE

SEQ ID NO: 20222 - protein, 6 aa, synthetic construct
PIEFTF

SEQ ID NO: 20223 - protein, 6 aa, synthetic construct
PIEFTW

SEQ ID NO: 20224 - protein, 6 aa, synthetic construct
PIEFTY

SEQ ID NO: 20225 - protein, 6 aa, synthetic construct
PIEFWD

SEQ ID NO: 20226 - protein, 6 aa, synthetic construct
PIEFWE

SEQ ID NO: 20227 - protein, 6 aa, synthetic construct
PIEFWF

SEQ ID NO: 20228 - protein, 6 aa, synthetic construct
PIEFWW

SEQ ID NO: 20229 - protein, 6 aa, synthetic construct
PIEFWY

SEQ ID NO: 20230 - protein, 6 aa, synthetic construct
PIEFYD

SEQ ID NO: 20231 - protein, 6 aa, synthetic construct
PIEFYE

SEQ ID NO: 20232 - protein, 6 aa, synthetic construct
PIEFYF

SEQ ID NO: 20233 - protein, 6 aa, synthetic construct
PIEFYW

SEQ ID NO: 20234 - protein, 6 aa, synthetic construct
PIEFYY

SEQ ID NO: 20235 - protein, 6 aa, synthetic construct
PIEFVD

SEQ ID NO: 20236 - protein, 6 aa, synthetic construct
PIEFVE

SEQ ID NO: 20237 - protein, 6 aa, synthetic construct
PIEFVF

SEQ ID NO: 20238 - protein, 6 aa, synthetic construct
PIEFVW

SEQ ID NO: 20239 - protein, 6 aa, synthetic construct
PIEFVY

SEQ ID NO: 20240 - protein, 6 aa, synthetic construct
PIEPAD

SEQ ID NO: 20241 - protein, 6 aa, synthetic construct
PIEPAE

SEQ ID NO: 20242 - protein, 6 aa, synthetic construct
PIEPAF

SEQ ID NO: 20243 - protein, 6 aa, synthetic construct
PIEPAW

SEQ ID NO: 20244 - protein, 6 aa, synthetic construct
PIEPAY

SEQ ID NO: 20245 - protein, 6 aa, synthetic construct
PIEPRD

SEQ ID NO: 20246 - protein, 6 aa, synthetic construct
PIEPRE

SEQ ID NO: 20247 - protein, 6 aa, synthetic construct
PIEPRF

SEQ ID NO: 20248 - protein, 6 aa, synthetic construct
PIEPRW

SEQ ID NO: 20249 - protein, 6 aa, synthetic construct
PIEPRY

SEQ ID NO: 20250 - protein, 6 aa, synthetic construct
PIEPND

SEQ ID NO: 20251 - protein, 6 aa, synthetic construct
PIEPNE

SEQ ID NO: 20252 - protein, 6 aa, synthetic construct
PIEPNF

SEQ ID NO: 20253 - protein, 6 aa, synthetic construct
PIEPNW

SEQ ID NO: 20254 - protein, 6 aa, synthetic construct
PIEPNY

SEQ ID NO: 20255 - protein, 6 aa, synthetic construct
PIEPDD

SEQ ID NO: 20256 - protein, 6 aa, synthetic construct
PIEPDE

SEQ ID NO: 20257 - protein, 6 aa, synthetic construct
PIEPDF

SEQ ID NO: 20258 - protein, 6 aa, synthetic construct
PIEPDW

SEQ ID NO: 20259 - protein, 6 aa, synthetic construct
PIEPDY

SEQ ID NO: 20260 - protein, 6 aa, synthetic construct
PIEPCD

SEQ ID NO: 20261 - protein, 6 aa, synthetic construct
PIEPCE

SEQ ID NO: 20262 - protein, 6 aa, synthetic construct
PIEPCF

SEQ ID NO: 20263 - protein, 6 aa, synthetic construct
PIEPCW

SEQ ID NO: 20264 - protein, 6 aa, synthetic construct
PIEPCY

SEQ ID NO: 20265 - protein, 6 aa, synthetic construct
PIEPQD

SEQ ID NO: 20266 - protein, 6 aa, synthetic construct
PIEPQE

SEQ ID NO: 20267 - protein, 6 aa, synthetic construct
PIEPQF

SEQ ID NO: 20268 - protein, 6 aa, synthetic construct
PIEPQW

SEQ ID NO: 20269 - protein, 6 aa, synthetic construct
PIEPQY

SEQ ID NO: 20270 - protein, 6 aa, synthetic construct
PIEPED

SEQ ID NO: 20271 - protein, 6 aa, synthetic construct
PIEPEE

SEQ ID NO: 20272 - protein, 6 aa, synthetic construct
PIEPEF

SEQ ID NO: 20273 - protein, 6 aa, synthetic construct
PIEPEW

SEQ ID NO: 20274 - protein, 6 aa, synthetic construct
PIEPEY

SEQ ID NO: 20275 - protein, 6 aa, synthetic construct
PIEPGD

SEQ ID NO: 20276 - protein, 6 aa, synthetic construct
PIEPGE

SEQ ID NO: 20277 - protein, 6 aa, synthetic construct
PIEPGF

SEQ ID NO: 20278 - protein, 6 aa, synthetic construct
PIEPGW

SEQ ID NO: 20279 - protein, 6 aa, synthetic construct
PIEPGY

SEQ ID NO: 20280 - protein, 6 aa, synthetic construct
PIEPHD

SEQ ID NO: 20281 - protein, 6 aa, synthetic construct
PIEPHE

SEQ ID NO: 20282 - protein, 6 aa, synthetic construct
PIEPHF

SEQ ID NO: 20283 - protein, 6 aa, synthetic construct
PIEPHW

SEQ ID NO: 20284 - protein, 6 aa, synthetic construct
PIEPHY

SEQ ID NO: 20285 - protein, 6 aa, synthetic construct
PIEPID

SEQ ID NO: 20286 - protein, 6 aa, synthetic construct
PIEPIE

SEQ ID NO: 20287 - protein, 6 aa, synthetic construct
PIEPIF

SEQ ID NO: 20288 - protein, 6 aa, synthetic construct
PIEPIW

SEQ ID NO: 20289 - protein, 6 aa, synthetic construct
PIEPIY

SEQ ID NO: 20290 - protein, 6 aa, synthetic construct
PIEPLD

SEQ ID NO: 20291 - protein, 6 aa, synthetic construct
PIEPLE

SEQ ID NO: 20292 - protein, 6 aa, synthetic construct
PIEPLF

SEQ ID NO: 20293 - protein, 6 aa, synthetic construct
PIEPLW

SEQ ID NO: 20294 - protein, 6 aa, synthetic construct
PIEPLY

SEQ ID NO: 20295 - protein, 6 aa, synthetic construct
PIEPKD

SEQ ID NO: 20296 - protein, 6 aa, synthetic construct
PIEPKE

SEQ ID NO: 20297 - protein, 6 aa, synthetic construct
PIEPKF

SEQ ID NO: 20298 - protein, 6 aa, synthetic construct
PIEPKW

SEQ ID NO: 20299 - protein, 6 aa, synthetic construct
PIEPKY

SEQ ID NO: 20300 - protein, 6 aa, synthetic construct
PIEPMD

SEQ ID NO: 20301 - protein, 6 aa, synthetic construct
PIEPME

SEQ ID NO: 20302 - protein, 6 aa, synthetic construct
PIEPMF

SEQ ID NO: 20303 - protein, 6 aa, synthetic construct
PIEPMW

SEQ ID NO: 20304 - protein, 6 aa, synthetic construct
PIEPMY

SEQ ID NO: 20305 - protein, 6 aa, synthetic construct
PIEPFD

SEQ ID NO: 20306 - protein, 6 aa, synthetic construct
PIEPFE

SEQ ID NO: 20307 - protein, 6 aa, synthetic construct
PIEPFF

SEQ ID NO: 20308 - protein, 6 aa, synthetic construct
PIEPFW

SEQ ID NO: 20309 - protein, 6 aa, synthetic construct
PIEPFY

SEQ ID NO: 20310 - protein, 6 aa, synthetic construct
PIEPPD

SEQ ID NO: 20311 - protein, 6 aa, synthetic construct
PIEPPE

SEQ ID NO: 20312 - protein, 6 aa, synthetic construct
PIEPPF

SEQ ID NO: 20313 - protein, 6 aa, synthetic construct
PIEPPW

SEQ ID NO: 20314 - protein, 6 aa, synthetic construct
PIEPPY

SEQ ID NO: 20315 - protein, 6 aa, synthetic construct
PIEPSD

SEQ ID NO: 20316 - protein, 6 aa, synthetic construct
PIEPSE

SEQ ID NO: 20317 - protein, 6 aa, synthetic construct
PIEPSF

SEQ ID NO: 20318 - protein, 6 aa, synthetic construct
PIEPSW

SEQ ID NO: 20319 - protein, 6 aa, synthetic construct
PIEPSY

SEQ ID NO: 20320 - protein, 6 aa, synthetic construct
PIEPTD

SEQ ID NO: 20321 - protein, 6 aa, synthetic construct
PIEPTE

SEQ ID NO: 20322 - protein, 6 aa, synthetic construct
PIEPTF

SEQ ID NO: 20323 - protein, 6 aa, synthetic construct
PIEPTW

SEQ ID NO: 20324 - protein, 6 aa, synthetic construct
PIEPTY

SEQ ID NO: 20325 - protein, 6 aa, synthetic construct
PIEPWD

SEQ ID NO: 20326 - protein, 6 aa, synthetic construct
PIEPWE

SEQ ID NO: 20327 - protein, 6 aa, synthetic construct
PIEPWF

SEQ ID NO: 20328 - protein, 6 aa, synthetic construct
PIEPWW

SEQ ID NO: 20329 - protein, 6 aa, synthetic construct
PIEPWY

SEQ ID NO: 20330 - protein, 6 aa, synthetic construct
PIEPYD

SEQ ID NO: 20331 - protein, 6 aa, synthetic construct
PIEPYE

SEQ ID NO: 20332 - protein, 6 aa, synthetic construct
PIEPYF

SEQ ID NO: 20333 - protein, 6 aa, synthetic construct
PIEPYW

SEQ ID NO: 20334 - protein, 6 aa, synthetic construct
PIEPYY

SEQ ID NO: 20335 - protein, 6 aa, synthetic construct
PIEPVD

SEQ ID NO: 20336 - protein, 6 aa, synthetic construct
PIEPVE

SEQ ID NO: 20337 - protein, 6 aa, synthetic construct
PIEPVF

SEQ ID NO: 20338 - protein, 6 aa, synthetic construct
PIEPVW

SEQ ID NO: 20339 - protein, 6 aa, synthetic construct
PIEPVY

SEQ ID NO: 20340 - protein, 6 aa, synthetic construct
PIESAD

SEQ ID NO: 20341 - protein, 6 aa, synthetic construct
PIESAE

SEQ ID NO: 20342 - protein, 6 aa, synthetic construct
PIESAF

SEQ ID NO: 20343 - protein, 6 aa, synthetic construct
PIESAW

SEQ ID NO: 20344 - protein, 6 aa, synthetic construct
PIESAY

SEQ ID NO: 20345 - protein, 6 aa, synthetic construct
PIESRD

SEQ ID NO: 20346 - protein, 6 aa, synthetic construct
PIESRE

SEQ ID NO: 20347 - protein, 6 aa, synthetic construct
PIESRF

SEQ ID NO: 20348 - protein, 6 aa, synthetic construct
PIESRW

SEQ ID NO: 20349 - protein, 6 aa, synthetic construct
PIESRY

SEQ ID NO: 20350 - protein, 6 aa, synthetic construct
PIESND

SEQ ID NO: 20351 - protein, 6 aa, synthetic construct
PIESNE

SEQ ID NO: 20352 - protein, 6 aa, synthetic construct
PIESNF

SEQ ID NO: 20353 - protein, 6 aa, synthetic construct
PIESNW

SEQ ID NO: 20354 - protein, 6 aa, synthetic construct
PIESNY

SEQ ID NO: 20355 - protein, 6 aa, synthetic construct
PIESDD

SEQ ID NO: 20356 - protein, 6 aa, synthetic construct
PIESDE

SEQ ID NO: 20357 - protein, 6 aa, synthetic construct
PIESDF

SEQ ID NO: 20358 - protein, 6 aa, synthetic construct
PIESDW

SEQ ID NO: 20359 - protein, 6 aa, synthetic construct
PIESDY

SEQ ID NO: 20360 - protein, 6 aa, synthetic construct
PIESCD

SEQ ID NO: 20361 - protein, 6 aa, synthetic construct
PIESCE

SEQ ID NO: 20362 - protein, 6 aa, synthetic construct
PIESCF

SEQ ID NO: 20363 - protein, 6 aa, synthetic construct
PIESCW

SEQ ID NO: 20364 - protein, 6 aa, synthetic construct
PIESCY

SEQ ID NO: 20365 - protein, 6 aa, synthetic construct
PIESQD

SEQ ID NO: 20366 - protein, 6 aa, synthetic construct
PIESQE

SEQ ID NO: 20367 - protein, 6 aa, synthetic construct
PIESQF

SEQ ID NO: 20368 - protein, 6 aa, synthetic construct
PIESQW

SEQ ID NO: 20369 - protein, 6 aa, synthetic construct
PIESQY

SEQ ID NO: 20370 - protein, 6 aa, synthetic construct
PIESED

SEQ ID NO: 20371 - protein, 6 aa, synthetic construct
PIESEE

SEQ ID NO: 20372 - protein, 6 aa, synthetic construct
PIESEF

SEQ ID NO: 20373 - protein, 6 aa, synthetic construct
PIESEW

SEQ ID NO: 20374 - protein, 6 aa, synthetic construct
PIESEY

SEQ ID NO: 20375 - protein, 6 aa, synthetic construct
PIESGD

SEQ ID NO: 20376 - protein, 6 aa, synthetic construct
PIESGE

SEQ ID NO: 20377 - protein, 6 aa, synthetic construct
PIESGF

SEQ ID NO: 20378 - protein, 6 aa, synthetic construct
PIESGW

SEQ ID NO: 20379 - protein, 6 aa, synthetic construct
PIESGY

SEQ ID NO: 20380 - protein, 6 aa, synthetic construct
PIESHD

SEQ ID NO: 20381 - protein, 6 aa, synthetic construct
PIESHE

SEQ ID NO: 20382 - protein, 6 aa, synthetic construct
PIESHF

SEQ ID NO: 20383 - protein, 6 aa, synthetic construct
PIESHW

SEQ ID NO: 20384 - protein, 6 aa, synthetic construct
PIESHY

SEQ ID NO: 20385 - protein, 6 aa, synthetic construct
PIESID

SEQ ID NO: 20386 - protein, 6 aa, synthetic construct
PIESIE

SEQ ID NO: 20387 - protein, 6 aa, synthetic construct
PIESIF

SEQ ID NO: 20388 - protein, 6 aa, synthetic construct
PIESIW

SEQ ID NO: 20389 - protein, 6 aa, synthetic construct
PIESIY

SEQ ID NO: 20390 - protein, 6 aa, synthetic construct
PIESLD

SEQ ID NO: 20391 - protein, 6 aa, synthetic construct
PIESLE

SEQ ID NO: 20392 - protein, 6 aa, synthetic construct
PIESLF

SEQ ID NO: 20393 - protein, 6 aa, synthetic construct
PIESLW

SEQ ID NO: 20394 - protein, 6 aa, synthetic construct
PIESLY

SEQ ID NO: 20395 - protein, 6 aa, synthetic construct
PIESKD

SEQ ID NO: 20396 - protein, 6 aa, synthetic construct
PIESKE

SEQ ID NO: 20397 - protein, 6 aa, synthetic construct
PIESKF

SEQ ID NO: 20398 - protein, 6 aa, synthetic construct
PIESKW

SEQ ID NO: 20399 - protein, 6 aa, synthetic construct
PIESKY

SEQ ID NO: 20400 - protein, 6 aa, synthetic construct
PIESMD

SEQ ID NO: 20401 - protein, 6 aa, synthetic construct
PIESME

SEQ ID NO: 20402 - protein, 6 aa, synthetic construct
PIESMF

SEQ ID NO: 20403 - protein, 6 aa, synthetic construct
PIESMW

SEQ ID NO: 20404 - protein, 6 aa, synthetic construct
PIESMY

SEQ ID NO: 20405 - protein, 6 aa, synthetic construct
PIESFD

SEQ ID NO: 20406 - protein, 6 aa, synthetic construct
PIESFE

SEQ ID NO: 20407 - protein, 6 aa, synthetic construct
PIESFF

SEQ ID NO: 20408 - protein, 6 aa, synthetic construct
PIESFW

SEQ ID NO: 20409 - protein, 6 aa, synthetic construct
PIESFY

SEQ ID NO: 20410 - protein, 6 aa, synthetic construct
PIESPD

SEQ ID NO: 20411 - protein, 6 aa, synthetic construct
PIESPE

SEQ ID NO: 20412 - protein, 6 aa, synthetic construct
PIESPF

SEQ ID NO: 20413 - protein, 6 aa, synthetic construct
PIESPW

SEQ ID NO: 20414 - protein, 6 aa, synthetic construct
PIESPY

SEQ ID NO: 20415 - protein, 6 aa, synthetic construct
PIESSD

SEQ ID NO: 20416 - protein, 6 aa, synthetic construct
PIESSE

SEQ ID NO: 20417 - protein, 6 aa, synthetic construct
PIESSF

SEQ ID NO: 20418 - protein, 6 aa, synthetic construct
PIESSW

SEQ ID NO: 20419 - protein, 6 aa, synthetic construct
PIESSY

SEQ ID NO: 20420 - protein, 6 aa, synthetic construct
PIESTD

SEQ ID NO: 20421 - protein, 6 aa, synthetic construct
PIESTE

SEQ ID NO: 20422 - protein, 6 aa, synthetic construct
PIESTF

SEQ ID NO: 20423 - protein, 6 aa, synthetic construct
PIESTW

SEQ ID NO: 20424 - protein, 6 aa, synthetic construct
PIESTY

SEQ ID NO: 20425 - protein, 6 aa, synthetic construct
PIESWD

SEQ ID NO: 20426 - protein, 6 aa, synthetic construct
PIESWE

SEQ ID NO: 20427 - protein, 6 aa, synthetic construct
PIESWF

SEQ ID NO: 20428 - protein, 6 aa, synthetic construct
PIESWW

SEQ ID NO: 20429 - protein, 6 aa, synthetic construct
PIESWY

SEQ ID NO: 20430 - protein, 6 aa, synthetic construct
PIESYD

SEQ ID NO: 20431 - protein, 6 aa, synthetic construct
PIESYE

SEQ ID NO: 20432 - protein, 6 aa, synthetic construct
PIESYF

SEQ ID NO: 20433 - protein, 6 aa, synthetic construct
PIESYW

SEQ ID NO: 20434 - protein, 6 aa, synthetic construct
PIESYY

SEQ ID NO: 20435 - protein, 6 aa, synthetic construct
PIESVD

SEQ ID NO: 20436 - protein, 6 aa, synthetic construct
PIESVE

SEQ ID NO: 20437 - protein, 6 aa, synthetic construct
PIESVF

SEQ ID NO: 20438 - protein, 6 aa, synthetic construct
PIESVW

SEQ ID NO: 20439 - protein, 6 aa, synthetic construct
PIESVY

SEQ ID NO: 20440 - protein, 6 aa, synthetic construct
PIETAD

SEQ ID NO: 20441 - protein, 6 aa, synthetic construct
PIETAE

SEQ ID NO: 20442 - protein, 6 aa, synthetic construct
PIETAF

SEQ ID NO: 20443 - protein, 6 aa, synthetic construct
PIETAW

SEQ ID NO: 20444 - protein, 6 aa, synthetic construct
PIETAY

SEQ ID NO: 20445 - protein, 6 aa, synthetic construct
PIETRD

SEQ ID NO: 20446 - protein, 6 aa, synthetic construct
PIETRE

SEQ ID NO: 20447 - protein, 6 aa, synthetic construct
PIETRF

SEQ ID NO: 20448 - protein, 6 aa, synthetic construct
PIETRW

SEQ ID NO: 20449 - protein, 6 aa, synthetic construct
PIETRY

SEQ ID NO: 20450 - protein, 6 aa, synthetic construct
PIETND

SEQ ID NO: 20451 - protein, 6 aa, synthetic construct
PIETNE

SEQ ID NO: 20452 - protein, 6 aa, synthetic construct
PIETNF

SEQ ID NO: 20453 - protein, 6 aa, synthetic construct
PIETNW

SEQ ID NO: 20454 - protein, 6 aa, synthetic construct
PIETNY

SEQ ID NO: 20455 - protein, 6 aa, synthetic construct
PIETDD

SEQ ID NO: 20456 - protein, 6 aa, synthetic construct
PIETDE

SEQ ID NO: 20457 - protein, 6 aa, synthetic construct
PIETDF

SEQ ID NO: 20458 - protein, 6 aa, synthetic construct
PIETDW

SEQ ID NO: 20459 - protein, 6 aa, synthetic construct
PIETDY

SEQ ID NO: 20460 - protein, 6 aa, synthetic construct
PIETCD

SEQ ID NO: 20461 - protein, 6 aa, synthetic construct
PIETCE

SEQ ID NO: 20462 - protein, 6 aa, synthetic construct
PIETCF

SEQ ID NO: 20463 - protein, 6 aa, synthetic construct
PIETCW

SEQ ID NO: 20464 - protein, 6 aa, synthetic construct
PIETCY

SEQ ID NO: 20465 - protein, 6 aa, synthetic construct
PIETQD

SEQ ID NO: 20466 - protein, 6 aa, synthetic construct
PIETQE

SEQ ID NO: 20467 - protein, 6 aa, synthetic construct
PIETQF

SEQ ID NO: 20468 - protein, 6 aa, synthetic construct
PIETQW

SEQ ID NO: 20469 - protein, 6 aa, synthetic construct
PIETQY

SEQ ID NO: 20470 - protein, 6 aa, synthetic construct
PIETED

SEQ ID NO: 20471 - protein, 6 aa, synthetic construct
PIETEE

SEQ ID NO: 20472 - protein, 6 aa, synthetic construct
PIETEF

SEQ ID NO: 20473 - protein, 6 aa, synthetic construct
PIETEW

SEQ ID NO: 20474 - protein, 6 aa, synthetic construct
PIETEY

SEQ ID NO: 20475 - protein, 6 aa, synthetic construct
PIETGD

SEQ ID NO: 20476 - protein, 6 aa, synthetic construct
PIETGE

SEQ ID NO: 20477 - protein, 6 aa, synthetic construct
PIETGF

SEQ ID NO: 20478 - protein, 6 aa, synthetic construct
PIETGW

SEQ ID NO: 20479 - protein, 6 aa, synthetic construct
PIETGY

SEQ ID NO: 20480 - protein, 6 aa, synthetic construct
PIETHD

SEQ ID NO: 20481 - protein, 6 aa, synthetic construct
PIETHE

SEQ ID NO: 20482 - protein, 6 aa, synthetic construct
PIETHF

SEQ ID NO: 20483 - protein, 6 aa, synthetic construct
PIETHW

SEQ ID NO: 20484 - protein, 6 aa, synthetic construct
PIETHY

SEQ ID NO: 20485 - protein, 6 aa, synthetic construct
PIETID

SEQ ID NO: 20486 - protein, 6 aa, synthetic construct
PIETIE

SEQ ID NO: 20487 - protein, 6 aa, synthetic construct
PIETIF

SEQ ID NO: 20488 - protein, 6 aa, synthetic construct
PIETIW

SEQ ID NO: 20489 - protein, 6 aa, synthetic construct
PIETIY

SEQ ID NO: 20490 - protein, 6 aa, synthetic construct
PIETLD

SEQ ID NO: 20491 - protein, 6 aa, synthetic construct
PIETLE

SEQ ID NO: 20492 - protein, 6 aa, synthetic construct
PIETLF

SEQ ID NO: 20493 - protein, 6 aa, synthetic construct
PIETLW

SEQ ID NO: 20494 - protein, 6 aa, synthetic construct
PIETLY

SEQ ID NO: 20495 - protein, 6 aa, synthetic construct
PIETKD

SEQ ID NO: 20496 - protein, 6 aa, synthetic construct
PIETKE

SEQ ID NO: 20497 - protein, 6 aa, synthetic construct
PIETKF

SEQ ID NO: 20498 - protein, 6 aa, synthetic construct
PIETKW

SEQ ID NO: 20499 - protein, 6 aa, synthetic construct
PIETKY

SEQ ID NO: 20500 - protein, 6 aa, synthetic construct
PIETMD

SEQ ID NO: 20501 - protein, 6 aa, synthetic construct
PIETME

SEQ ID NO: 20502 - protein, 6 aa, synthetic construct
PIETMF

SEQ ID NO: 20503 - protein, 6 aa, synthetic construct
PIETMW

SEQ ID NO: 20504 - protein, 6 aa, synthetic construct
PIETMY

SEQ ID NO: 20505 - protein, 6 aa, synthetic construct
PIETFD

SEQ ID NO: 20506 - protein, 6 aa, synthetic construct
PIETFE

SEQ ID NO: 20507 - protein, 6 aa, synthetic construct
PIETFF

SEQ ID NO: 20508 - protein, 6 aa, synthetic construct
PIETFW

SEQ ID NO: 20509 - protein, 6 aa, synthetic construct
PIETFY

SEQ ID NO: 20510 - protein, 6 aa, synthetic construct
PIETPD

SEQ ID NO: 20511 - protein, 6 aa, synthetic construct
PIETPE

SEQ ID NO: 20512 - protein, 6 aa, synthetic construct
PIETPF

SEQ ID NO: 20513 - protein, 6 aa, synthetic construct
PIETPW

SEQ ID NO: 20514 - protein, 6 aa, synthetic construct
PIETPY

SEQ ID NO: 20515 - protein, 6 aa, synthetic construct
PIETSD

SEQ ID NO: 20516 - protein, 6 aa, synthetic construct
PIETSE

SEQ ID NO: 20517 - protein, 6 aa, synthetic construct
PIETSF

SEQ ID NO: 20518 - protein, 6 aa, synthetic construct
PIETSW

SEQ ID NO: 20519 - protein, 6 aa, synthetic construct
PIETSY

SEQ ID NO: 20520 - protein, 6 aa, synthetic construct
PIETTD

SEQ ID NO: 20521 - protein, 6 aa, synthetic construct
PIETTE

SEQ ID NO: 20522 - protein, 6 aa, synthetic construct
PIETTF

SEQ ID NO: 20523 - protein, 6 aa, synthetic construct
PIETTW

SEQ ID NO: 20524 - protein, 6 aa, synthetic construct
PIETTY

SEQ ID NO: 20525 - protein, 6 aa, synthetic construct
PIETWD

SEQ ID NO: 20526 - protein, 6 aa, synthetic construct
PIETWE

SEQ ID NO: 20527 - protein, 6 aa, synthetic construct
PIETWF

SEQ ID NO: 20528 - protein, 6 aa, synthetic construct
PIETWW

SEQ ID NO: 20529 - protein, 6 aa, synthetic construct
PIETWY

SEQ ID NO: 20530 - protein, 6 aa, synthetic construct
PIETYD

SEQ ID NO: 20531 - protein, 6 aa, synthetic construct
PIETYE

SEQ ID NO: 20532 - protein, 6 aa, synthetic construct
PIETYF

SEQ ID NO: 20533 - protein, 6 aa, synthetic construct
PIETYW

SEQ ID NO: 20534 - protein, 6 aa, synthetic construct
PIETYY

SEQ ID NO: 20535 - protein, 6 aa, synthetic construct
PIETVD

SEQ ID NO: 20536 - protein, 6 aa, synthetic construct
PIETVE

SEQ ID NO: 20537 - protein, 6 aa, synthetic construct
PIETVF

SEQ ID NO: 20538 - protein, 6 aa, synthetic construct
PIETVW

SEQ ID NO: 20539 - protein, 6 aa, synthetic construct
PIETVY

SEQ ID NO: 20540 - protein, 6 aa, synthetic construct
PIEWAD

SEQ ID NO: 20541 - protein, 6 aa, synthetic construct
PIEWAE

SEQ ID NO: 20542 - protein, 6 aa, synthetic construct
PIEWAF

SEQ ID NO: 20543 - protein, 6 aa, synthetic construct
PIEWAW

SEQ ID NO: 20544 - protein, 6 aa, synthetic construct
PIEWAY

SEQ ID NO: 20545 - protein, 6 aa, synthetic construct
PIEWRD

SEQ ID NO: 20546 - protein, 6 aa, synthetic construct
PIEWRE

SEQ ID NO: 20547 - protein, 6 aa, synthetic construct
PIEWRF

SEQ ID NO: 20548 - protein, 6 aa, synthetic construct
PIEWRW

SEQ ID NO: 20549 - protein, 6 aa, synthetic construct
PIEWRY

SEQ ID NO: 20550 - protein, 6 aa, synthetic construct
PIEWND

SEQ ID NO: 20551 - protein, 6 aa, synthetic construct
PIEWNE

SEQ ID NO: 20552 - protein, 6 aa, synthetic construct
PIEWNF

SEQ ID NO: 20553 - protein, 6 aa, synthetic construct
PIEWNW

SEQ ID NO: 20554 - protein, 6 aa, synthetic construct
PIEWNY

SEQ ID NO: 20555 - protein, 6 aa, synthetic construct
PIEWDD

SEQ ID NO: 20556 - protein, 6 aa, synthetic construct
PIEWDE

SEQ ID NO: 20557 - protein, 6 aa, synthetic construct
PIEWDF

SEQ ID NO: 20558 - protein, 6 aa, synthetic construct
PIEWDW

SEQ ID NO: 20559 - protein, 6 aa, synthetic construct
PIEWDY

SEQ ID NO: 20560 - protein, 6 aa, synthetic construct
PIEWCD

SEQ ID NO: 20561 - protein, 6 aa, synthetic construct
PIEWCE

SEQ ID NO: 20562 - protein, 6 aa, synthetic construct
PIEWCF

SEQ ID NO: 20563 - protein, 6 aa, synthetic construct
PIEWCW

SEQ ID NO: 20564 - protein, 6 aa, synthetic construct
PIEWCY

SEQ ID NO: 20565 - protein, 6 aa, synthetic construct
PIEWQD

SEQ ID NO: 20566 - protein, 6 aa, synthetic construct
PIEWQE

SEQ ID NO: 20567 - protein, 6 aa, synthetic construct
PIEWQF

SEQ ID NO: 20568 - protein, 6 aa, synthetic construct
PIEWQW

SEQ ID NO: 20569 - protein, 6 aa, synthetic construct
PIEWQY

SEQ ID NO: 20570 - protein, 6 aa, synthetic construct
PIEWED

SEQ ID NO: 20571 - protein, 6 aa, synthetic construct
PIEWEE

SEQ ID NO: 20572 - protein, 6 aa, synthetic construct
PIEWEF

SEQ ID NO: 20573 - protein, 6 aa, synthetic construct
PIEWEW

SEQ ID NO: 20574 - protein, 6 aa, synthetic construct
PIEWEY

SEQ ID NO: 20575 - protein, 6 aa, synthetic construct
PIEWGD

SEQ ID NO: 20576 - protein, 6 aa, synthetic construct
PIEWGE

SEQ ID NO: 20577 - protein, 6 aa, synthetic construct
PIEWGF

SEQ ID NO: 20578 - protein, 6 aa, synthetic construct
PIEWGW

SEQ ID NO: 20579 - protein, 6 aa, synthetic construct
PIEWGY

SEQ ID NO: 20580 - protein, 6 aa, synthetic construct
PIEWHD

SEQ ID NO: 20581 - protein, 6 aa, synthetic construct
PIEWHE

SEQ ID NO: 20582 - protein, 6 aa, synthetic construct
PIEWHF

SEQ ID NO: 20583 - protein, 6 aa, synthetic construct
PIEWHW

SEQ ID NO: 20584 - protein, 6 aa, synthetic construct
PIEWHY

SEQ ID NO: 20585 - protein, 6 aa, synthetic construct
PIEWID

SEQ ID NO: 20586 - protein, 6 aa, synthetic construct
PIEWIE

SEQ ID NO: 20587 - protein, 6 aa, synthetic construct
PIEWIF

SEQ ID NO: 20588 - protein, 6 aa, synthetic construct
PIEWIW

SEQ ID NO: 20589 - protein, 6 aa, synthetic construct
PIEWIY

SEQ ID NO: 20590 - protein, 6 aa, synthetic construct
PIEWLD

SEQ ID NO: 20591 - protein, 6 aa, synthetic construct
PIEWLE

SEQ ID NO: 20592 - protein, 6 aa, synthetic construct
PIEWLF

SEQ ID NO: 20593 - protein, 6 aa, synthetic construct
PIEWLW

SEQ ID NO: 20594 - protein, 6 aa, synthetic construct
PIEWLY

SEQ ID NO: 20595 - protein, 6 aa, synthetic construct
PIEWKD

SEQ ID NO: 20596 - protein, 6 aa, synthetic construct
PIEWKE

SEQ ID NO: 20597 - protein, 6 aa, synthetic construct
PIEWKF

SEQ ID NO: 20598 - protein, 6 aa, synthetic construct
PIEWKW

SEQ ID NO: 20599 - protein, 6 aa, synthetic construct
PIEWKY

SEQ ID NO: 20600 - protein, 6 aa, synthetic construct
PIEWMD

SEQ ID NO: 20601 - protein, 6 aa, synthetic construct
PIEWME

SEQ ID NO: 20602 - protein, 6 aa, synthetic construct
PIEWMF

SEQ ID NO: 20603 - protein, 6 aa, synthetic construct
PIEWMW

SEQ ID NO: 20604 - protein, 6 aa, synthetic construct
PIEWMY

SEQ ID NO: 20605 - protein, 6 aa, synthetic construct
PIEWFD

SEQ ID NO: 20606 - protein, 6 aa, synthetic construct
PIEWFE

SEQ ID NO: 20607 - protein, 6 aa, synthetic construct
PIEWFF

SEQ ID NO: 20608 - protein, 6 aa, synthetic construct
PIEWFW

SEQ ID NO: 20609 - protein, 6 aa, synthetic construct
PIEWFY

SEQ ID NO: 20610 - protein, 6 aa, synthetic construct
PIEWPD

SEQ ID NO: 20611 - protein, 6 aa, synthetic construct
PIEWPE

SEQ ID NO: 20612 - protein, 6 aa, synthetic construct
PIEWPF

SEQ ID NO: 20613 - protein, 6 aa, synthetic construct
PIEWPW

SEQ ID NO: 20614 - protein, 6 aa, synthetic construct
PIEWPY

SEQ ID NO: 20615 - protein, 6 aa, synthetic construct
PIEWSD

SEQ ID NO: 20616 - protein, 6 aa, synthetic construct
PIEWSE

SEQ ID NO: 20617 - protein, 6 aa, synthetic construct
PIEWSF

SEQ ID NO: 20618 - protein, 6 aa, synthetic construct
PIEWSW

SEQ ID NO: 20619 - protein, 6 aa, synthetic construct
PIEWSY

SEQ ID NO: 20620 - protein, 6 aa, synthetic construct
PIEWTD

SEQ ID NO: 20621 - protein, 6 aa, synthetic construct
PIEWTE

SEQ ID NO: 20622 - protein, 6 aa, synthetic construct
PIEWTF

SEQ ID NO: 20623 - protein, 6 aa, synthetic construct
PIEWTW

SEQ ID NO: 20624 - protein, 6 aa, synthetic construct
PIEWTY

SEQ ID NO: 20625 - protein, 6 aa, synthetic construct
PIEWWD

SEQ ID NO: 20626 - protein, 6 aa, synthetic construct
PIEWWE

SEQ ID NO: 20627 - protein, 6 aa, synthetic construct
PIEWWF

SEQ ID NO: 20628 - protein, 6 aa, synthetic construct
PIEWWW

SEQ ID NO: 20629 - protein, 6 aa, synthetic construct
PIEWWY

SEQ ID NO: 20630 - protein, 6 aa, synthetic construct
PIEWYD

SEQ ID NO: 20631 - protein, 6 aa, synthetic construct
PIEWYE

SEQ ID NO: 20632 - protein, 6 aa, synthetic construct
PIEWYF

SEQ ID NO: 20633 - protein, 6 aa, synthetic construct
PIEWYW

SEQ ID NO: 20634 - protein, 6 aa, synthetic construct
PIEWYY

SEQ ID NO: 20635 - protein, 6 aa, synthetic construct
PIEWVD

SEQ ID NO: 20636 - protein, 6 aa, synthetic construct
PIEWVE

SEQ ID NO: 20637 - protein, 6 aa, synthetic construct
PIEWVF

SEQ ID NO: 20638 - protein, 6 aa, synthetic construct
PIEWVW

SEQ ID NO: 20639 - protein, 6 aa, synthetic construct
PIEWVY

SEQ ID NO: 20640 - protein, 6 aa, synthetic construct
PIEYAD

SEQ ID NO: 20641 - protein, 6 aa, synthetic construct
PIEYAE

SEQ ID NO: 20642 - protein, 6 aa, synthetic construct
PIEYAF

SEQ ID NO: 20643 - protein, 6 aa, synthetic construct
PIEYAW

SEQ ID NO: 20644 - protein, 6 aa, synthetic construct
PIEYAY

SEQ ID NO: 20645 - protein, 6 aa, synthetic construct
PIEYRD

SEQ ID NO: 20646 - protein, 6 aa, synthetic construct
PIEYRE

SEQ ID NO: 20647 - protein, 6 aa, synthetic construct
PIEYRF

SEQ ID NO: 20648 - protein, 6 aa, synthetic construct
PIEYRW

SEQ ID NO: 20649 - protein, 6 aa, synthetic construct
PIEYRY

SEQ ID NO: 20650 - protein, 6 aa, synthetic construct
PIEYND

SEQ ID NO: 20651 - protein, 6 aa, synthetic construct
PIEYNE

SEQ ID NO: 20652 - protein, 6 aa, synthetic construct
PIEYNF

SEQ ID NO: 20653 - protein, 6 aa, synthetic construct
PIEYNW

SEQ ID NO: 20654 - protein, 6 aa, synthetic construct
PIEYNY

SEQ ID NO: 20655 - protein, 6 aa, synthetic construct
PIEYDD

SEQ ID NO: 20656 - protein, 6 aa, synthetic construct
PIEYDE

SEQ ID NO: 20657 - protein, 6 aa, synthetic construct
PIEYDF

SEQ ID NO: 20658 - protein, 6 aa, synthetic construct
PIEYDW

SEQ ID NO: 20659 - protein, 6 aa, synthetic construct
PIEYDY

SEQ ID NO: 20660 - protein, 6 aa, synthetic construct
PIEYCD

SEQ ID NO: 20661 - protein, 6 aa, synthetic construct
PIEYCE

SEQ ID NO: 20662 - protein, 6 aa, synthetic construct
PIEYCF

SEQ ID NO: 20663 - protein, 6 aa, synthetic construct
PIEYCW

SEQ ID NO: 20664 - protein, 6 aa, synthetic construct
PIEYCY

SEQ ID NO: 20665 - protein, 6 aa, synthetic construct
PIEYQD

SEQ ID NO: 20666 - protein, 6 aa, synthetic construct
PIEYQE

SEQ ID NO: 20667 - protein, 6 aa, synthetic construct
PIEYQF

SEQ ID NO: 20668 - protein, 6 aa, synthetic construct
PIEYQW

SEQ ID NO: 20669 - protein, 6 aa, synthetic construct
PIEYQY

SEQ ID NO: 20670 - protein, 6 aa, synthetic construct
PIEYED

SEQ ID NO: 20671 - protein, 6 aa, synthetic construct
PIEYEE

SEQ ID NO: 20672 - protein, 6 aa, synthetic construct
PIEYEF

SEQ ID NO: 20673 - protein, 6 aa, synthetic construct
PIEYEW

SEQ ID NO: 20674 - protein, 6 aa, synthetic construct
PIEYEY

SEQ ID NO: 20675 - protein, 6 aa, synthetic construct
PIEYGD

SEQ ID NO: 20676 - protein, 6 aa, synthetic construct
PIEYGE

SEQ ID NO: 20677 - protein, 6 aa, synthetic construct
PIEYGF

SEQ ID NO: 20678 - protein, 6 aa, synthetic construct
PIEYGW

SEQ ID NO: 20679 - protein, 6 aa, synthetic construct
PIEYGY

SEQ ID NO: 20680 - protein, 6 aa, synthetic construct
PIEYHD

SEQ ID NO: 20681 - protein, 6 aa, synthetic construct
PIEYHE

SEQ ID NO: 20682 - protein, 6 aa, synthetic construct
PIEYHF

SEQ ID NO: 20683 - protein, 6 aa, synthetic construct
PIEYHW

SEQ ID NO: 20684 - protein, 6 aa, synthetic construct
PIEYHY

SEQ ID NO: 20685 - protein, 6 aa, synthetic construct
PIEYID

SEQ ID NO: 20686 - protein, 6 aa, synthetic construct
PIEYIE

SEQ ID NO: 20687 - protein, 6 aa, synthetic construct
PIEYIF

SEQ ID NO: 20688 - protein, 6 aa, synthetic construct
PIEYIW

SEQ ID NO: 20689 - protein, 6 aa, synthetic construct
PIEYIY

SEQ ID NO: 20690 - protein, 6 aa, synthetic construct
PIEYLD

SEQ ID NO: 20691 - protein, 6 aa, synthetic construct
PIEYLE

SEQ ID NO: 20692 - protein, 6 aa, synthetic construct
PIEYLF

SEQ ID NO: 20693 - protein, 6 aa, synthetic construct
PIEYLW

SEQ ID NO: 20694 - protein, 6 aa, synthetic construct
PIEYLY

SEQ ID NO: 20695 - protein, 6 aa, synthetic construct
PIEYKD

SEQ ID NO: 20696 - protein, 6 aa, synthetic construct
PIEYKE

SEQ ID NO: 20697 - protein, 6 aa, synthetic construct
PIEYKF

SEQ ID NO: 20698 - protein, 6 aa, synthetic construct
PIEYKW

SEQ ID NO: 20699 - protein, 6 aa, synthetic construct
PIEYKY

SEQ ID NO: 20700 - protein, 6 aa, synthetic construct
PIEYMD

SEQ ID NO: 20701 - protein, 6 aa, synthetic construct
PIEYME

SEQ ID NO: 20702 - protein, 6 aa, synthetic construct
PIEYMF

SEQ ID NO: 20703 - protein, 6 aa, synthetic construct
PIEYMW

SEQ ID NO: 20704 - protein, 6 aa, synthetic construct
PIEYMY

SEQ ID NO: 20705 - protein, 6 aa, synthetic construct
PIEYFD

SEQ ID NO: 20706 - protein, 6 aa, synthetic construct
PIEYFE

SEQ ID NO: 20707 - protein, 6 aa, synthetic construct
PIEYFF

SEQ ID NO: 20708 - protein, 6 aa, synthetic construct
PIEYFW

SEQ ID NO: 20709 - protein, 6 aa, synthetic construct
PIEYFY

SEQ ID NO: 20710 - protein, 6 aa, synthetic construct
PIEYPD

SEQ ID NO: 20711 - protein, 6 aa, synthetic construct
PIEYPE

SEQ ID NO: 20712 - protein, 6 aa, synthetic construct
PIEYPF

SEQ ID NO: 20713 - protein, 6 aa, synthetic construct
PIEYPW

SEQ ID NO: 20714 - protein, 6 aa, synthetic construct
PIEYPY

SEQ ID NO: 20715 - protein, 6 aa, synthetic construct
PIEYSD

SEQ ID NO: 20716 - protein, 6 aa, synthetic construct
PIEYSE

SEQ ID NO: 20717 - protein, 6 aa, synthetic construct
PIEYSF

SEQ ID NO: 20718 - protein, 6 aa, synthetic construct
PIEYSW

SEQ ID NO: 20719 - protein, 6 aa, synthetic construct
PIEYSY

SEQ ID NO: 20720 - protein, 6 aa, synthetic construct
PIEYTD

SEQ ID NO: 20721 - protein, 6 aa, synthetic construct
PIEYTE

SEQ ID NO: 20722 - protein, 6 aa, synthetic construct
PIEYTF

SEQ ID NO: 20723 - protein, 6 aa, synthetic construct
PIEYTW

SEQ ID NO: 20724 - protein, 6 aa, synthetic construct
PIEYTY

SEQ ID NO: 20725 - protein, 6 aa, synthetic construct
PIEYWD

SEQ ID NO: 20726 - protein, 6 aa, synthetic construct
PIEYWE

SEQ ID NO: 20727 - protein, 6 aa, synthetic construct
PIEYWF

SEQ ID NO: 20728 - protein, 6 aa, synthetic construct
PIEYWW

SEQ ID NO: 20729 - protein, 6 aa, synthetic construct
PIEYWY

SEQ ID NO: 20730 - protein, 6 aa, synthetic construct
PIEYYD

SEQ ID NO: 20731 - protein, 6 aa, synthetic construct
PIEYYE

SEQ ID NO: 20732 - protein, 6 aa, synthetic construct
PIEYYF

SEQ ID NO: 20733 - protein, 6 aa, synthetic construct
PIEYYW

SEQ ID NO: 20734 - protein, 6 aa, synthetic construct
PIEYYY

SEQ ID NO: 20735 - protein, 6 aa, synthetic construct
PIEYVD

SEQ ID NO: 20736 - protein, 6 aa, synthetic construct
PIEYVE

SEQ ID NO: 20737 - protein, 6 aa, synthetic construct
PIEYVF

SEQ ID NO: 20738 - protein, 6 aa, synthetic construct
PIEYVW

SEQ ID NO: 20739 - protein, 6 aa, synthetic construct
PIEYVY

SEQ ID NO: 20740 - protein, 6 aa, synthetic construct
PIEVAD

SEQ ID NO: 20741 - protein, 6 aa, synthetic construct
PIEVAE

SEQ ID NO: 20742 - protein, 6 aa, synthetic construct
PIEVAF

SEQ ID NO: 20743 - protein, 6 aa, synthetic construct
PIEVAW

SEQ ID NO: 20744 - protein, 6 aa, synthetic construct
PIEVAY

SEQ ID NO: 20745 - protein, 6 aa, synthetic construct
PIEVRD

SEQ ID NO: 20746 - protein, 6 aa, synthetic construct
PIEVRE

SEQ ID NO: 20747 - protein, 6 aa, synthetic construct
PIEVRF

SEQ ID NO: 20748 - protein, 6 aa, synthetic construct
PIEVRW

SEQ ID NO: 20749 - protein, 6 aa, synthetic construct
PIEVRY

SEQ ID NO: 20750 - protein, 6 aa, synthetic construct
PIEVND

SEQ ID NO: 20751 - protein, 6 aa, synthetic construct
PIEVNE

SEQ ID NO: 20752 - protein, 6 aa, synthetic construct
PIEVNF

SEQ ID NO: 20753 - protein, 6 aa, synthetic construct
PIEVNW

SEQ ID NO: 20754 - protein, 6 aa, synthetic construct
PIEVNY

SEQ ID NO: 20755 - protein, 6 aa, synthetic construct
PIEVDD

SEQ ID NO: 20756 - protein, 6 aa, synthetic construct
PIEVDE

SEQ ID NO: 20757 - protein, 6 aa, synthetic construct
PIEVDF

SEQ ID NO: 20758 - protein, 6 aa, synthetic construct
PIEVDW

SEQ ID NO: 20759 - protein, 6 aa, synthetic construct
PIEVDY

SEQ ID NO: 20760 - protein, 6 aa, synthetic construct
PIEVCD

SEQ ID NO: 20761 - protein, 6 aa, synthetic construct
PIEVCE

SEQ ID NO: 20762 - protein, 6 aa, synthetic construct
PIEVCF

SEQ ID NO: 20763 - protein, 6 aa, synthetic construct
PIEVCW

SEQ ID NO: 20764 - protein, 6 aa, synthetic construct
PIEVCY

SEQ ID NO: 20765 - protein, 6 aa, synthetic construct
PIEVQD

SEQ ID NO: 20766 - protein, 6 aa, synthetic construct
PIEVQE

SEQ ID NO: 20767 - protein, 6 aa, synthetic construct
PIEVQF

SEQ ID NO: 20768 - protein, 6 aa, synthetic construct
PIEVQW

SEQ ID NO: 20769 - protein, 6 aa, synthetic construct
PIEVQY

SEQ ID NO: 20770 - protein, 6 aa, synthetic construct
PIEVED

SEQ ID NO: 20771 - protein, 6 aa, synthetic construct
PIEVEE

SEQ ID NO: 20772 - protein, 6 aa, synthetic construct
PIEVEF

SEQ ID NO: 20773 - protein, 6 aa, synthetic construct
PIEVEW

SEQ ID NO: 20774 - protein, 6 aa, synthetic construct
PIEVEY

SEQ ID NO: 20775 - protein, 6 aa, synthetic construct
PIEVGD

SEQ ID NO: 20776 - protein, 6 aa, synthetic construct
PIEVGE

SEQ ID NO: 20777 - protein, 6 aa, synthetic construct
PIEVGF

SEQ ID NO: 20778 - protein, 6 aa, synthetic construct
PIEVGW

SEQ ID NO: 20779 - protein, 6 aa, synthetic construct
PIEVGY

SEQ ID NO: 20780 - protein, 6 aa, synthetic construct
PIEVHD

SEQ ID NO: 20781 - protein, 6 aa, synthetic construct
PIEVHE

SEQ ID NO: 20782 - protein, 6 aa, synthetic construct
PIEVHF

SEQ ID NO: 20783 - protein, 6 aa, synthetic construct
PIEVHW

SEQ ID NO: 20784 - protein, 6 aa, synthetic construct
PIEVHY

SEQ ID NO: 20785 - protein, 6 aa, synthetic construct
PIEVID

SEQ ID NO: 20786 - protein, 6 aa, synthetic construct
PIEVIE

SEQ ID NO: 20787 - protein, 6 aa, synthetic construct
PIEVIF

SEQ ID NO: 20788 - protein, 6 aa, synthetic construct
PIEVIW

SEQ ID NO: 20789 - protein, 6 aa, synthetic construct
PIEVIY

SEQ ID NO: 20790 - protein, 6 aa, synthetic construct
PIEVLD

SEQ ID NO: 20791 - protein, 6 aa, synthetic construct
PIEVLE

SEQ ID NO: 20792 - protein, 6 aa, synthetic construct
PIEVLF

SEQ ID NO: 20793 - protein, 6 aa, synthetic construct
PIEVLW

SEQ ID NO: 20794 - protein, 6 aa, synthetic construct
PIEVLY

SEQ ID NO: 20795 - protein, 6 aa, synthetic construct
PIEVKD

SEQ ID NO: 20796 - protein, 6 aa, synthetic construct
PIEVKE

SEQ ID NO: 20797 - protein, 6 aa, synthetic construct
PIEVKF

SEQ ID NO: 20798 - protein, 6 aa, synthetic construct
PIEVKW

SEQ ID NO: 20799 - protein, 6 aa, synthetic construct
PIEVKY

SEQ ID NO: 20800 - protein, 6 aa, synthetic construct
PIEVMD

SEQ ID NO: 20801 - protein, 6 aa, synthetic construct
PIEVME

SEQ ID NO: 20802 - protein, 6 aa, synthetic construct
PIEVMF

SEQ ID NO: 20803 - protein, 6 aa, synthetic construct
PIEVMW

SEQ ID NO: 20804 - protein, 6 aa, synthetic construct
PIEVMY

SEQ ID NO: 20805 - protein, 6 aa, synthetic construct
PIEVFD

SEQ ID NO: 20806 - protein, 6 aa, synthetic construct
PIEVFE

SEQ ID NO: 20807 - protein, 6 aa, synthetic construct
PIEVFF

SEQ ID NO: 20808 - protein, 6 aa, synthetic construct
PIEVFW

SEQ ID NO: 20809 - protein, 6 aa, synthetic construct
PIEVFY

SEQ ID NO: 20810 - protein, 6 aa, synthetic construct
PIEVPD

SEQ ID NO: 20811 - protein, 6 aa, synthetic construct
PIEVPE

SEQ ID NO: 20812 - protein, 6 aa, synthetic construct
PIEVPF

SEQ ID NO: 20813 - protein, 6 aa, synthetic construct
PIEVPW

SEQ ID NO: 20814 - protein, 6 aa, synthetic construct
PIEVPY

SEQ ID NO: 20815 - protein, 6 aa, synthetic construct
PIEVSD

SEQ ID NO: 20816 - protein, 6 aa, synthetic construct
PIEVSE

SEQ ID NO: 20817 - protein, 6 aa, synthetic construct
PIEVSF

SEQ ID NO: 20818 - protein, 6 aa, synthetic construct
PIEVSW

SEQ ID NO: 20819 - protein, 6 aa, synthetic construct
PIEVSY

SEQ ID NO: 20820 - protein, 6 aa, synthetic construct
PIEVTD

SEQ ID NO: 20821 - protein, 6 aa, synthetic construct
PIEVTE

SEQ ID NO: 20822 - protein, 6 aa, synthetic construct
PIEVTF

SEQ ID NO: 20823 - protein, 6 aa, synthetic construct
PIEVTW

SEQ ID NO: 20824 - protein, 6 aa, synthetic construct
PIEVTY

SEQ ID NO: 20825 - protein, 6 aa, synthetic construct
PIEVWD

SEQ ID NO: 20826 - protein, 6 aa, synthetic construct
PIEVWE

SEQ ID NO: 20827 - protein, 6 aa, synthetic construct
PIEVWF

SEQ ID NO: 20828 - protein, 6 aa, synthetic construct
PIEVWW

SEQ ID NO: 20829 - protein, 6 aa, synthetic construct
PIEVWY

SEQ ID NO: 20830 - protein, 6 aa, synthetic construct
PIEVYD

SEQ ID NO: 20831 - protein, 6 aa, synthetic construct
PIEVYE

SEQ ID NO: 20832 - protein, 6 aa, synthetic construct
PIEVYF

SEQ ID NO: 20833 - protein, 6 aa, synthetic construct
PIEVYW

SEQ ID NO: 20834 - protein, 6 aa, synthetic construct
PIEVYY

SEQ ID NO: 20835 - protein, 6 aa, synthetic construct
PIEVVD

SEQ ID NO: 20836 - protein, 6 aa, synthetic construct
PIEVVE

SEQ ID NO: 20837 - protein, 6 aa, synthetic construct
PIEVVF

SEQ ID NO: 20838 - protein, 6 aa, synthetic construct
PIEVVW

SEQ ID NO: 20839 - protein, 6 aa, synthetic construct
PIEVVY

SEQ ID NO: 20840 - protein, 6 aa, synthetic construct
PLEAAD

SEQ ID NO: 20841 - protein, 6 aa, synthetic construct
PLEAAE

SEQ ID NO: 20842 - protein, 6 aa, synthetic construct
PLEAAF

SEQ ID NO: 20843 - protein, 6 aa, synthetic construct
PLEAAW

SEQ ID NO: 20844 - protein, 6 aa, synthetic construct
PLEAAY

SEQ ID NO: 20845 - protein, 6 aa, synthetic construct
PLEARD

SEQ ID NO: 20846 - protein, 6 aa, synthetic construct
PLEARE

SEQ ID NO: 20847 - protein, 6 aa, synthetic construct
PLEARF

SEQ ID NO: 20848 - protein, 6 aa, synthetic construct
PLEARW

SEQ ID NO: 20849 - protein, 6 aa, synthetic construct
PLEARY

SEQ ID NO: 20850 - protein, 6 aa, synthetic construct
PLEAND

SEQ ID NO: 20851 - protein, 6 aa, synthetic construct
PLEANE

SEQ ID NO: 20852 - protein, 6 aa, synthetic construct
PLEANF

SEQ ID NO: 20853 - protein, 6 aa, synthetic construct
PLEANW

SEQ ID NO: 20854 - protein, 6 aa, synthetic construct
PLEANY

SEQ ID NO: 20855 - protein, 6 aa, synthetic construct
PLEADD

SEQ ID NO: 20856 - protein, 6 aa, synthetic construct
PLEADE

SEQ ID NO: 20857 - protein, 6 aa, synthetic construct
PLEADF

SEQ ID NO: 20858 - protein, 6 aa, synthetic construct
PLEADW

SEQ ID NO: 20859 - protein, 6 aa, synthetic construct
PLEADY

SEQ ID NO: 20860 - protein, 6 aa, synthetic construct
PLEACD

SEQ ID NO: 20861 - protein, 6 aa, synthetic construct
PLEACE

SEQ ID NO: 20862 - protein, 6 aa, synthetic construct
PLEACF

SEQ ID NO: 20863 - protein, 6 aa, synthetic construct
PLEACW

SEQ ID NO: 20864 - protein, 6 aa, synthetic construct
PLEACY

SEQ ID NO: 20865 - protein, 6 aa, synthetic construct
PLEAQD

SEQ ID NO: 20866 - protein, 6 aa, synthetic construct
PLEAQE

SEQ ID NO: 20867 - protein, 6 aa, synthetic construct
PLEAQF

SEQ ID NO: 20868 - protein, 6 aa, synthetic construct
PLEAQW

SEQ ID NO: 20869 - protein, 6 aa, synthetic construct
PLEAQY

SEQ ID NO: 20870 - protein, 6 aa, synthetic construct
PLEAED

SEQ ID NO: 20871 - protein, 6 aa, synthetic construct
PLEAEE

SEQ ID NO: 20872 - protein, 6 aa, synthetic construct
PLEAEF

SEQ ID NO: 20873 - protein, 6 aa, synthetic construct
PLEAEW

SEQ ID NO: 20874 - protein, 6 aa, synthetic construct
PLEAEY

SEQ ID NO: 20875 - protein, 6 aa, synthetic construct
PLEAGD

SEQ ID NO: 20876 - protein, 6 aa, synthetic construct
PLEAGE

SEQ ID NO: 20877 - protein, 6 aa, synthetic construct
PLEAGF

SEQ ID NO: 20878 - protein, 6 aa, synthetic construct
PLEAGW

SEQ ID NO: 20879 - protein, 6 aa, synthetic construct
PLEAGY

SEQ ID NO: 20880 - protein, 6 aa, synthetic construct
PLEAHD

SEQ ID NO: 20881 - protein, 6 aa, synthetic construct
PLEAHE

SEQ ID NO: 20882 - protein, 6 aa, synthetic construct
PLEAHF

SEQ ID NO: 20883 - protein, 6 aa, synthetic construct
PLEAHW

SEQ ID NO: 20884 - protein, 6 aa, synthetic construct
PLEAHY

SEQ ID NO: 20885 - protein, 6 aa, synthetic construct
PLEAID

SEQ ID NO: 20886 - protein, 6 aa, synthetic construct
PLEAIE

SEQ ID NO: 20887 - protein, 6 aa, synthetic construct
PLEAIF

SEQ ID NO: 20888 - protein, 6 aa, synthetic construct
PLEAIW

SEQ ID NO: 20889 - protein, 6 aa, synthetic construct
PLEAIY

SEQ ID NO: 20890 - protein, 6 aa, synthetic construct
PLEALD

SEQ ID NO: 20891 - protein, 6 aa, synthetic construct
PLEALE

SEQ ID NO: 20892 - protein, 6 aa, synthetic construct
PLEALF

SEQ ID NO: 20893 - protein, 6 aa, synthetic construct
PLEALW

SEQ ID NO: 20894 - protein, 6 aa, synthetic construct
PLEALY

SEQ ID NO: 20895 - protein, 6 aa, synthetic construct
PLEAKD

SEQ ID NO: 20896 - protein, 6 aa, synthetic construct
PLEAKE

SEQ ID NO: 20897 - protein, 6 aa, synthetic construct
PLEAKF

SEQ ID NO: 20898 - protein, 6 aa, synthetic construct
PLEAKW

SEQ ID NO: 20899 - protein, 6 aa, synthetic construct
PLEAKY

SEQ ID NO: 20900 - protein, 6 aa, synthetic construct
PLEAMD

SEQ ID NO: 20901 - protein, 6 aa, synthetic construct
PLEAME

SEQ ID NO: 20902 - protein, 6 aa, synthetic construct
PLEAMF

SEQ ID NO: 20903 - protein, 6 aa, synthetic construct
PLEAMW

SEQ ID NO: 20904 - protein, 6 aa, synthetic construct
PLEAMY

SEQ ID NO: 20905 - protein, 6 aa, synthetic construct
PLEAFD

SEQ ID NO: 20906 - protein, 6 aa, synthetic construct
PLEAFE

SEQ ID NO: 20907 - protein, 6 aa, synthetic construct
PLEAFF

SEQ ID NO: 20908 - protein, 6 aa, synthetic construct
PLEAFW

SEQ ID NO: 20909 - protein, 6 aa, synthetic construct
PLEAFY

SEQ ID NO: 20910 - protein, 6 aa, synthetic construct
PLEAPD

SEQ ID NO: 20911 - protein, 6 aa, synthetic construct
PLEAPE

SEQ ID NO: 20912 - protein, 6 aa, synthetic construct
PLEAPF

SEQ ID NO: 20913 - protein, 6 aa, synthetic construct
PLEAPW

SEQ ID NO: 20914 - protein, 6 aa, synthetic construct
PLEAPY

SEQ ID NO: 20915 - protein, 6 aa, synthetic construct
PLEASD

SEQ ID NO: 20916 - protein, 6 aa, synthetic construct
PLEASE

SEQ ID NO: 20917 - protein, 6 aa, synthetic construct
PLEASF

SEQ ID NO: 20918 - protein, 6 aa, synthetic construct
PLEASW

SEQ ID NO: 20919 - protein, 6 aa, synthetic construct
PLEASY

SEQ ID NO: 20920 - protein, 6 aa, synthetic construct
PLEATD

SEQ ID NO: 20921 - protein, 6 aa, synthetic construct
PLEATE

SEQ ID NO: 20922 - protein, 6 aa, synthetic construct
PLEATF

SEQ ID NO: 20923 - protein, 6 aa, synthetic construct
PLEATW

SEQ ID NO: 20924 - protein, 6 aa, synthetic construct
PLEATY

SEQ ID NO: 20925 - protein, 6 aa, synthetic construct
PLEAWD

SEQ ID NO: 20926 - protein, 6 aa, synthetic construct
PLEAWE

SEQ ID NO: 20927 - protein, 6 aa, synthetic construct
PLEAWF

SEQ ID NO: 20928 - protein, 6 aa, synthetic construct
PLEAWW

SEQ ID NO: 20929 - protein, 6 aa, synthetic construct
PLEAWY

SEQ ID NO: 20930 - protein, 6 aa, synthetic construct
PLEAYD

SEQ ID NO: 20931 - protein, 6 aa, synthetic construct
PLEAYE

SEQ ID NO: 20932 - protein, 6 aa, synthetic construct
PLEAYF

SEQ ID NO: 20933 - protein, 6 aa, synthetic construct
PLEAYW

SEQ ID NO: 20934 - protein, 6 aa, synthetic construct
PLEAYY

SEQ ID NO: 20935 - protein, 6 aa, synthetic construct
PLEAVD

SEQ ID NO: 20936 - protein, 6 aa, synthetic construct
PLEAVE

SEQ ID NO: 20937 - protein, 6 aa, synthetic construct
PLEAVF

SEQ ID NO: 20938 - protein, 6 aa, synthetic construct
PLEAVW

SEQ ID NO: 20939 - protein, 6 aa, synthetic construct
PLEAVY

SEQ ID NO: 20940 - protein, 6 aa, synthetic construct
PLERAD

SEQ ID NO: 20941 - protein, 6 aa, synthetic construct
PLERAE

SEQ ID NO: 20942 - protein, 6 aa, synthetic construct
PLERAF

SEQ ID NO: 20943 - protein, 6 aa, synthetic construct
PLERAW

SEQ ID NO: 20944 - protein, 6 aa, synthetic construct
PLERAY

SEQ ID NO: 20945 - protein, 6 aa, synthetic construct
PLERRD

SEQ ID NO: 20946 - protein, 6 aa, synthetic construct
PLERRE

SEQ ID NO: 20947 - protein, 6 aa, synthetic construct
PLERRF

SEQ ID NO: 20948 - protein, 6 aa, synthetic construct
PLERRW

SEQ ID NO: 20949 - protein, 6 aa, synthetic construct
PLERRY

SEQ ID NO: 20950 - protein, 6 aa, synthetic construct
PLERND

SEQ ID NO: 20951 - protein, 6 aa, synthetic construct
PLERNE

SEQ ID NO: 20952 - protein, 6 aa, synthetic construct
PLERNF

SEQ ID NO: 20953 - protein, 6 aa, synthetic construct
PLERNW

SEQ ID NO: 20954 - protein, 6 aa, synthetic construct
PLERNY

SEQ ID NO: 20955 - protein, 6 aa, synthetic construct
PLERDD

SEQ ID NO: 20956 - protein, 6 aa, synthetic construct
PLERDE

SEQ ID NO: 20957 - protein, 6 aa, synthetic construct
PLERDF

SEQ ID NO: 20958 - protein, 6 aa, synthetic construct
PLERDW

SEQ ID NO: 20959 - protein, 6 aa, synthetic construct
PLERDY

SEQ ID NO: 20960 - protein, 6 aa, synthetic construct
PLERCD

SEQ ID NO: 20961 - protein, 6 aa, synthetic construct
PLERCE

SEQ ID NO: 20962 - protein, 6 aa, synthetic construct
PLERCF

SEQ ID NO: 20963 - protein, 6 aa, synthetic construct
PLERCW

SEQ ID NO: 20964 - protein, 6 aa, synthetic construct
PLERCY

SEQ ID NO: 20965 - protein, 6 aa, synthetic construct
PLERQD

SEQ ID NO: 20966 - protein, 6 aa, synthetic construct
PLERQE

SEQ ID NO: 20967 - protein, 6 aa, synthetic construct
PLERQF

SEQ ID NO: 20968 - protein, 6 aa, synthetic construct
PLERQW

SEQ ID NO: 20969 - protein, 6 aa, synthetic construct
PLERQY

SEQ ID NO: 20970 - protein, 6 aa, synthetic construct
PLERED

SEQ ID NO: 20971 - protein, 6 aa, synthetic construct
PLEREE

SEQ ID NO: 20972 - protein, 6 aa, synthetic construct
PLEREF

SEQ ID NO: 20973 - protein, 6 aa, synthetic construct
PLEREW

SEQ ID NO: 20974 - protein, 6 aa, synthetic construct
PLEREY

SEQ ID NO: 20975 - protein, 6 aa, synthetic construct
PLERGD

SEQ ID NO: 20976 - protein, 6 aa, synthetic construct
PLERGE

SEQ ID NO: 20977 - protein, 6 aa, synthetic construct
PLERGF

SEQ ID NO: 20978 - protein, 6 aa, synthetic construct
PLERGW

SEQ ID NO: 20979 - protein, 6 aa, synthetic construct
PLERGY

SEQ ID NO: 20980 - protein, 6 aa, synthetic construct
PLERHD

SEQ ID NO: 20981 - protein, 6 aa, synthetic construct
PLERHE

SEQ ID NO: 20982 - protein, 6 aa, synthetic construct
PLERHF

SEQ ID NO: 20983 - protein, 6 aa, synthetic construct
PLERHW

SEQ ID NO: 20984 - protein, 6 aa, synthetic construct
PLERHY

SEQ ID NO: 20985 - protein, 6 aa, synthetic construct
PLERID

SEQ ID NO: 20986 - protein, 6 aa, synthetic construct
PLERIE

SEQ ID NO: 20987 - protein, 6 aa, synthetic construct
PLERIF

SEQ ID NO: 20988 - protein, 6 aa, synthetic construct
PLERIW

SEQ ID NO: 20989 - protein, 6 aa, synthetic construct
PLERIY

SEQ ID NO: 20990 - protein, 6 aa, synthetic construct
PLERLD

SEQ ID NO: 20991 - protein, 6 aa, synthetic construct
PLERLE

SEQ ID NO: 20992 - protein, 6 aa, synthetic construct
PLERLF

SEQ ID NO: 20993 - protein, 6 aa, synthetic construct
PLERLW

SEQ ID NO: 20994 - protein, 6 aa, synthetic construct
PLERLY

SEQ ID NO: 20995 - protein, 6 aa, synthetic construct
PLERKD

SEQ ID NO: 20996 - protein, 6 aa, synthetic construct
PLERKE

SEQ ID NO: 20997 - protein, 6 aa, synthetic construct
PLERKF

SEQ ID NO: 20998 - protein, 6 aa, synthetic construct
PLERKW

SEQ ID NO: 20999 - protein, 6 aa, synthetic construct
PLERKY

SEQ ID NO: 21000 - protein, 6 aa, synthetic construct
PLERMD

SEQ ID NO: 21001 - protein, 6 aa, synthetic construct
PLERME

SEQ ID NO: 21002 - protein, 6 aa, synthetic construct
PLERMF

SEQ ID NO: 21003 - protein, 6 aa, synthetic construct
PLERMW

SEQ ID NO: 21004 - protein, 6 aa, synthetic construct
PLERMY

SEQ ID NO: 21005 - protein, 6 aa, synthetic construct
PLERFD

SEQ ID NO: 21006 - protein, 6 aa, synthetic construct
PLERFE

SEQ ID NO: 21007 - protein, 6 aa, synthetic construct
PLERFF

SEQ ID NO: 21008 - protein, 6 aa, synthetic construct
PLERFW

SEQ ID NO: 21009 - protein, 6 aa, synthetic construct
PLERFY

SEQ ID NO: 21010 - protein, 6 aa, synthetic construct
PLERPD

SEQ ID NO: 21011 - protein, 6 aa, synthetic construct
PLERPE

SEQ ID NO: 21012 - protein, 6 aa, synthetic construct
PLERPF

SEQ ID NO: 21013 - protein, 6 aa, synthetic construct
PLERPW

SEQ ID NO: 21014 - protein, 6 aa, synthetic construct
PLERPY

SEQ ID NO: 21015 - protein, 6 aa, synthetic construct
PLERSD

SEQ ID NO: 21016 - protein, 6 aa, synthetic construct
PLERSE

SEQ ID NO: 21017 - protein, 6 aa, synthetic construct
PLERSF

SEQ ID NO: 21018 - protein, 6 aa, synthetic construct
PLERSW

SEQ ID NO: 21019 - protein, 6 aa, synthetic construct
PLERSY

SEQ ID NO: 21020 - protein, 6 aa, synthetic construct
PLERTD

SEQ ID NO: 21021 - protein, 6 aa, synthetic construct
PLERTE

SEQ ID NO: 21022 - protein, 6 aa, synthetic construct
PLERTF

SEQ ID NO: 21023 - protein, 6 aa, synthetic construct
PLERTW

SEQ ID NO: 21024 - protein, 6 aa, synthetic construct
PLERTY

SEQ ID NO: 21025 - protein, 6 aa, synthetic construct
PLERWD

SEQ ID NO: 21026 - protein, 6 aa, synthetic construct
PLERWE

SEQ ID NO: 21027 - protein, 6 aa, synthetic construct
PLERWF

SEQ ID NO: 21028 - protein, 6 aa, synthetic construct
PLERWW

SEQ ID NO: 21029 - protein, 6 aa, synthetic construct
PLERWY

SEQ ID NO: 21030 - protein, 6 aa, synthetic construct
PLERYD

SEQ ID NO: 21031 - protein, 6 aa, synthetic construct
PLERYE

SEQ ID NO: 21032 - protein, 6 aa, synthetic construct
PLERYF

SEQ ID NO: 21033 - protein, 6 aa, synthetic construct
PLERYW

SEQ ID NO: 21034 - protein, 6 aa, synthetic construct
PLERYY

SEQ ID NO: 21035 - protein, 6 aa, synthetic construct
PLERVD

SEQ ID NO: 21036 - protein, 6 aa, synthetic construct
PLERVE

SEQ ID NO: 21037 - protein, 6 aa, synthetic construct
PLERVF

SEQ ID NO: 21038 - protein, 6 aa, synthetic construct
PLERVW

SEQ ID NO: 21039 - protein, 6 aa, synthetic construct
PLERVY

SEQ ID NO: 21040 - protein, 6 aa, synthetic construct
PLENAD

SEQ ID NO: 21041 - protein, 6 aa, synthetic construct
PLENAE

SEQ ID NO: 21042 - protein, 6 aa, synthetic construct
PLENAF

SEQ ID NO: 21043 - protein, 6 aa, synthetic construct
PLENAW

SEQ ID NO: 21044 - protein, 6 aa, synthetic construct
PLENAY

SEQ ID NO: 21045 - protein, 6 aa, synthetic construct
PLENRD

SEQ ID NO: 21046 - protein, 6 aa, synthetic construct
PLENRE

SEQ ID NO: 21047 - protein, 6 aa, synthetic construct
PLENRF

SEQ ID NO: 21048 - protein, 6 aa, synthetic construct
PLENRW

SEQ ID NO: 21049 - protein, 6 aa, synthetic construct
PLENRY

SEQ ID NO: 21050 - protein, 6 aa, synthetic construct
PLENND

SEQ ID NO: 21051 - protein, 6 aa, synthetic construct
PLENNE

SEQ ID NO: 21052 - protein, 6 aa, synthetic construct
PLENNF

SEQ ID NO: 21053 - protein, 6 aa, synthetic construct
PLENNW

SEQ ID NO: 21054 - protein, 6 aa, synthetic construct
PLENNY

SEQ ID NO: 21055 - protein, 6 aa, synthetic construct
PLENDD

SEQ ID NO: 21056 - protein, 6 aa, synthetic construct
PLENDE

SEQ ID NO: 21057 - protein, 6 aa, synthetic construct
PLENDF

SEQ ID NO: 21058 - protein, 6 aa, synthetic construct
PLENDW

SEQ ID NO: 21059 - protein, 6 aa, synthetic construct
PLENDY

SEQ ID NO: 21060 - protein, 6 aa, synthetic construct
PLENCD

SEQ ID NO: 21061 - protein, 6 aa, synthetic construct
PLENCE

SEQ ID NO: 21062 - protein, 6 aa, synthetic construct
PLENCF

SEQ ID NO: 21063 - protein, 6 aa, synthetic construct
PLENCW

SEQ ID NO: 21064 - protein, 6 aa, synthetic construct
PLENCY

SEQ ID NO: 21065 - protein, 6 aa, synthetic construct
PLENQD

SEQ ID NO: 21066 - protein, 6 aa, synthetic construct
PLENQE

SEQ ID NO: 21067 - protein, 6 aa, synthetic construct
PLENQF

SEQ ID NO: 21068 - protein, 6 aa, synthetic construct
PLENQW

SEQ ID NO: 21069 - protein, 6 aa, synthetic construct
PLENQY

SEQ ID NO: 21070 - protein, 6 aa, synthetic construct
PLENED

SEQ ID NO: 21071 - protein, 6 aa, synthetic construct
PLENEE

SEQ ID NO: 21072 - protein, 6 aa, synthetic construct
PLENEF

SEQ ID NO: 21073 - protein, 6 aa, synthetic construct
PLENEW

SEQ ID NO: 21074 - protein, 6 aa, synthetic construct
PLENEY

SEQ ID NO: 21075 - protein, 6 aa, synthetic construct
PLENGD

SEQ ID NO: 21076 - protein, 6 aa, synthetic construct
PLENGE

SEQ ID NO: 21077 - protein, 6 aa, synthetic construct
PLENGF

SEQ ID NO: 21078 - protein, 6 aa, synthetic construct
PLENGW

SEQ ID NO: 21079 - protein, 6 aa, synthetic construct
PLENGY

SEQ ID NO: 21080 - protein, 6 aa, synthetic construct
PLENHD

SEQ ID NO: 21081 - protein, 6 aa, synthetic construct
PLENHE

SEQ ID NO: 21082 - protein, 6 aa, synthetic construct
PLENHF

SEQ ID NO: 21083 - protein, 6 aa, synthetic construct
PLENHW

SEQ ID NO: 21084 - protein, 6 aa, synthetic construct
PLENHY

SEQ ID NO: 21085 - protein, 6 aa, synthetic construct
PLENID

SEQ ID NO: 21086 - protein, 6 aa, synthetic construct
PLENIE

SEQ ID NO: 21087 - protein, 6 aa, synthetic construct
PLENIF

SEQ ID NO: 21088 - protein, 6 aa, synthetic construct
PLENIW

SEQ ID NO: 21089 - protein, 6 aa, synthetic construct
PLENIY

SEQ ID NO: 21090 - protein, 6 aa, synthetic construct
PLENLD

SEQ ID NO: 21091 - protein, 6 aa, synthetic construct
PLENLE

SEQ ID NO: 21092 - protein, 6 aa, synthetic construct
PLENLF

SEQ ID NO: 21093 - protein, 6 aa, synthetic construct
PLENLW

SEQ ID NO: 21094 - protein, 6 aa, synthetic construct
PLENLY

SEQ ID NO: 21095 - protein, 6 aa, synthetic construct
PLENKD

SEQ ID NO: 21096 - protein, 6 aa, synthetic construct
PLENKE

SEQ ID NO: 21097 - protein, 6 aa, synthetic construct
PLENKF

SEQ ID NO: 21098 - protein, 6 aa, synthetic construct
PLENKW

SEQ ID NO: 21099 - protein, 6 aa, synthetic construct
PLENKY

SEQ ID NO: 21100 - protein, 6 aa, synthetic construct
PLENMD

SEQ ID NO: 21101 - protein, 6 aa, synthetic construct
PLENME

SEQ ID NO: 21102 - protein, 6 aa, synthetic construct
PLENMF

SEQ ID NO: 21103 - protein, 6 aa, synthetic construct
PLENMW

SEQ ID NO: 21104 - protein, 6 aa, synthetic construct
PLENMY

SEQ ID NO: 21105 - protein, 6 aa, synthetic construct
PLENFD

SEQ ID NO: 21106 - protein, 6 aa, synthetic construct
PLENFE

SEQ ID NO: 21107 - protein, 6 aa, synthetic construct
PLENFF

SEQ ID NO: 21108 - protein, 6 aa, synthetic construct
PLENFW

SEQ ID NO: 21109 - protein, 6 aa, synthetic construct
PLENFY

SEQ ID NO: 21110 - protein, 6 aa, synthetic construct
PLENPD

SEQ ID NO: 21111 - protein, 6 aa, synthetic construct
PLENPE

SEQ ID NO: 21112 - protein, 6 aa, synthetic construct
PLENPF

SEQ ID NO: 21113 - protein, 6 aa, synthetic construct
PLENPW

SEQ ID NO: 21114 - protein, 6 aa, synthetic construct
PLENPY

SEQ ID NO: 21115 - protein, 6 aa, synthetic construct
PLENSD

SEQ ID NO: 21116 - protein, 6 aa, synthetic construct
PLENSE

SEQ ID NO: 21117 - protein, 6 aa, synthetic construct
PLENSF

SEQ ID NO: 21118 - protein, 6 aa, synthetic construct
PLENSW

SEQ ID NO: 21119 - protein, 6 aa, synthetic construct
PLENSY

SEQ ID NO: 21120 - protein, 6 aa, synthetic construct
PLENTD

SEQ ID NO: 21121 - protein, 6 aa, synthetic construct
PLENTE

SEQ ID NO: 21122 - protein, 6 aa, synthetic construct
PLENTF

SEQ ID NO: 21123 - protein, 6 aa, synthetic construct
PLENTW

SEQ ID NO: 21124 - protein, 6 aa, synthetic construct
PLENTY

SEQ ID NO: 21125 - protein, 6 aa, synthetic construct
PLENWD

SEQ ID NO: 21126 - protein, 6 aa, synthetic construct
PLENWE

SEQ ID NO: 21127 - protein, 6 aa, synthetic construct
PLENWF

SEQ ID NO: 21128 - protein, 6 aa, synthetic construct
PLENWW

SEQ ID NO: 21129 - protein, 6 aa, synthetic construct
PLENWY

SEQ ID NO: 21130 - protein, 6 aa, synthetic construct
PLENYD

SEQ ID NO: 21131 - protein, 6 aa, synthetic construct
PLENYE

SEQ ID NO: 21132 - protein, 6 aa, synthetic construct
PLENYF

SEQ ID NO: 21133 - protein, 6 aa, synthetic construct
PLENYW

SEQ ID NO: 21134 - protein, 6 aa, synthetic construct
PLENYY

SEQ ID NO: 21135 - protein, 6 aa, synthetic construct
PLENVD

SEQ ID NO: 21136 - protein, 6 aa, synthetic construct
PLENVE

SEQ ID NO: 21137 - protein, 6 aa, synthetic construct
PLENVF

SEQ ID NO: 21138 - protein, 6 aa, synthetic construct
PLENVW

SEQ ID NO: 21139 - protein, 6 aa, synthetic construct
PLENVY

SEQ ID NO: 21140 - protein, 6 aa, synthetic construct
PLEDAD

SEQ ID NO: 21141 - protein, 6 aa, synthetic construct
PLEDAE

SEQ ID NO: 21142 - protein, 6 aa, synthetic construct
PLEDAF

SEQ ID NO: 21143 - protein, 6 aa, synthetic construct
PLEDAW

SEQ ID NO: 21144 - protein, 6 aa, synthetic construct
PLEDAY

SEQ ID NO: 21145 - protein, 6 aa, synthetic construct
PLEDRD

SEQ ID NO: 21146 - protein, 6 aa, synthetic construct
PLEDRE

SEQ ID NO: 21147 - protein, 6 aa, synthetic construct
PLEDRF

SEQ ID NO: 21148 - protein, 6 aa, synthetic construct
PLEDRW

SEQ ID NO: 21149 - protein, 6 aa, synthetic construct
PLEDRY

SEQ ID NO: 21150 - protein, 6 aa, synthetic construct
PLEDND

SEQ ID NO: 21151 - protein, 6 aa, synthetic construct
PLEDNE

SEQ ID NO: 21152 - protein, 6 aa, synthetic construct
PLEDNF

SEQ ID NO: 21153 - protein, 6 aa, synthetic construct
PLEDNW

SEQ ID NO: 21154 - protein, 6 aa, synthetic construct
PLEDNY

SEQ ID NO: 21155 - protein, 6 aa, synthetic construct
PLEDDD

SEQ ID NO: 21156 - protein, 6 aa, synthetic construct
PLEDDE

SEQ ID NO: 21157 - protein, 6 aa, synthetic construct
PLEDDF

SEQ ID NO: 21158 - protein, 6 aa, synthetic construct
PLEDDW

SEQ ID NO: 21159 - protein, 6 aa, synthetic construct
PLEDDY

SEQ ID NO: 21160 - protein, 6 aa, synthetic construct
PLEDCD

SEQ ID NO: 21161 - protein, 6 aa, synthetic construct
PLEDCE

SEQ ID NO: 21162 - protein, 6 aa, synthetic construct
PLEDCF

SEQ ID NO: 21163 - protein, 6 aa, synthetic construct
PLEDCW

SEQ ID NO: 21164 - protein, 6 aa, synthetic construct
PLEDCY

SEQ ID NO: 21165 - protein, 6 aa, synthetic construct
PLEDQD

SEQ ID NO: 21166 - protein, 6 aa, synthetic construct
PLEDQE

SEQ ID NO: 21167 - protein, 6 aa, synthetic construct
PLEDQF

SEQ ID NO: 21168 - protein, 6 aa, synthetic construct
PLEDQW

SEQ ID NO: 21169 - protein, 6 aa, synthetic construct
PLEDQY

SEQ ID NO: 21170 - protein, 6 aa, synthetic construct
PLEDED

SEQ ID NO: 21171 - protein, 6 aa, synthetic construct
PLEDEE

SEQ ID NO: 21172 - protein, 6 aa, synthetic construct
PLEDEF

SEQ ID NO: 21173 - protein, 6 aa, synthetic construct
PLEDEW

SEQ ID NO: 21174 - protein, 6 aa, synthetic construct
PLEDEY

SEQ ID NO: 21175 - protein, 6 aa, synthetic construct
PLEDGD

SEQ ID NO: 21176 - protein, 6 aa, synthetic construct
PLEDGE

SEQ ID NO: 21177 - protein, 6 aa, synthetic construct
PLEDGF

SEQ ID NO: 21178 - protein, 6 aa, synthetic construct
PLEDGW

SEQ ID NO: 21179 - protein, 6 aa, synthetic construct
PLEDGY

SEQ ID NO: 21180 - protein, 6 aa, synthetic construct
PLEDHD

SEQ ID NO: 21181 - protein, 6 aa, synthetic construct
PLEDHE

SEQ ID NO: 21182 - protein, 6 aa, synthetic construct
PLEDHF

SEQ ID NO: 21183 - protein, 6 aa, synthetic construct
PLEDHW

SEQ ID NO: 21184 - protein, 6 aa, synthetic construct
PLEDHY

SEQ ID NO: 21185 - protein, 6 aa, synthetic construct
PLEDID

SEQ ID NO: 21186 - protein, 6 aa, synthetic construct
PLEDIE

SEQ ID NO: 21187 - protein, 6 aa, synthetic construct
PLEDIF

SEQ ID NO: 21188 - protein, 6 aa, synthetic construct
PLEDIW

SEQ ID NO: 21189 - protein, 6 aa, synthetic construct
PLEDIY

SEQ ID NO: 21190 - protein, 6 aa, synthetic construct
PLEDLD

SEQ ID NO: 21191 - protein, 6 aa, synthetic construct
PLEDLE

SEQ ID NO: 21192 - protein, 6 aa, synthetic construct
PLEDLF

SEQ ID NO: 21193 - protein, 6 aa, synthetic construct
PLEDLW

SEQ ID NO: 21194 - protein, 6 aa, synthetic construct
PLEDLY

SEQ ID NO: 21195 - protein, 6 aa, synthetic construct
PLEDKD

SEQ ID NO: 21196 - protein, 6 aa, synthetic construct
PLEDKE

SEQ ID NO: 21197 - protein, 6 aa, synthetic construct
PLEDKF

SEQ ID NO: 21198 - protein, 6 aa, synthetic construct
PLEDKW

SEQ ID NO: 21199 - protein, 6 aa, synthetic construct
PLEDKY

SEQ ID NO: 21200 - protein, 6 aa, synthetic construct
PLEDMD

SEQ ID NO: 21201 - protein, 6 aa, synthetic construct
PLEDME

SEQ ID NO: 21202 - protein, 6 aa, synthetic construct
PLEDMF

SEQ ID NO: 21203 - protein, 6 aa, synthetic construct
PLEDMW

SEQ ID NO: 21204 - protein, 6 aa, synthetic construct
PLEDMY

SEQ ID NO: 21205 - protein, 6 aa, synthetic construct
PLEDFD

SEQ ID NO: 21206 - protein, 6 aa, synthetic construct
PLEDFE

SEQ ID NO: 21207 - protein, 6 aa, synthetic construct
PLEDFF

SEQ ID NO: 21208 - protein, 6 aa, synthetic construct
PLEDFW

SEQ ID NO: 21209 - protein, 6 aa, synthetic construct
PLEDFY

SEQ ID NO: 21210 - protein, 6 aa, synthetic construct
PLEDPD

SEQ ID NO: 21211 - protein, 6 aa, synthetic construct
PLEDPE

SEQ ID NO: 21212 - protein, 6 aa, synthetic construct
PLEDPF

SEQ ID NO: 21213 - protein, 6 aa, synthetic construct
PLEDPW

SEQ ID NO: 21214 - protein, 6 aa, synthetic construct
PLEDPY

SEQ ID NO: 21215 - protein, 6 aa, synthetic construct
PLEDSD

SEQ ID NO: 21216 - protein, 6 aa, synthetic construct
PLEDSE

SEQ ID NO: 21217 - protein, 6 aa, synthetic construct
PLEDSF

SEQ ID NO: 21218 - protein, 6 aa, synthetic construct
PLEDSW

SEQ ID NO: 21219 - protein, 6 aa, synthetic construct
PLEDSY

SEQ ID NO: 21220 - protein, 6 aa, synthetic construct
PLEDTD

SEQ ID NO: 21221 - protein, 6 aa, synthetic construct
PLEDTE

SEQ ID NO: 21222 - protein, 6 aa, synthetic construct
PLEDTF

SEQ ID NO: 21223 - protein, 6 aa, synthetic construct
PLEDTW

SEQ ID NO: 21224 - protein, 6 aa, synthetic construct
PLEDTY

SEQ ID NO: 21225 - protein, 6 aa, synthetic construct
PLEDWD

SEQ ID NO: 21226 - protein, 6 aa, synthetic construct
PLEDWE

SEQ ID NO: 21227 - protein, 6 aa, synthetic construct
PLEDWF

SEQ ID NO: 21228 - protein, 6 aa, synthetic construct
PLEDWW

SEQ ID NO: 21229 - protein, 6 aa, synthetic construct
PLEDWY

SEQ ID NO: 21230 - protein, 6 aa, synthetic construct
PLEDYD

SEQ ID NO: 21231 - protein, 6 aa, synthetic construct
PLEDYE

SEQ ID NO: 21232 - protein, 6 aa, synthetic construct
PLEDYF

SEQ ID NO: 21233 - protein, 6 aa, synthetic construct
PLEDYW

SEQ ID NO: 21234 - protein, 6 aa, synthetic construct
PLEDYY

SEQ ID NO: 21235 - protein, 6 aa, synthetic construct
PLEDVD

SEQ ID NO: 21236 - protein, 6 aa, synthetic construct
PLEDVE

SEQ ID NO: 21237 - protein, 6 aa, synthetic construct
PLEDVF

SEQ ID NO: 21238 - protein, 6 aa, synthetic construct
PLEDVW

SEQ ID NO: 21239 - protein, 6 aa, synthetic construct
PLEDVY

SEQ ID NO: 21240 - protein, 6 aa, synthetic construct
PLECAD

SEQ ID NO: 21241 - protein, 6 aa, synthetic construct
PLECAE

SEQ ID NO: 21242 - protein, 6 aa, synthetic construct
PLECAF

SEQ ID NO: 21243 - protein, 6 aa, synthetic construct
PLECAW

SEQ ID NO: 21244 - protein, 6 aa, synthetic construct
PLECAY

SEQ ID NO: 21245 - protein, 6 aa, synthetic construct
PLECRD

SEQ ID NO: 21246 - protein, 6 aa, synthetic construct
PLECRE

SEQ ID NO: 21247 - protein, 6 aa, synthetic construct
PLECRF

SEQ ID NO: 21248 - protein, 6 aa, synthetic construct
PLECRW

SEQ ID NO: 21249 - protein, 6 aa, synthetic construct
PLECRY

SEQ ID NO: 21250 - protein, 6 aa, synthetic construct
PLECND

SEQ ID NO: 21251 - protein, 6 aa, synthetic construct
PLECNE

SEQ ID NO: 21252 - protein, 6 aa, synthetic construct
PLECNF

SEQ ID NO: 21253 - protein, 6 aa, synthetic construct
PLECNW

SEQ ID NO: 21254 - protein, 6 aa, synthetic construct
PLECNY

SEQ ID NO: 21255 - protein, 6 aa, synthetic construct
PLECDD

SEQ ID NO: 21256 - protein, 6 aa, synthetic construct
PLECDE

SEQ ID NO: 21257 - protein, 6 aa, synthetic construct
PLECDF

SEQ ID NO: 21258 - protein, 6 aa, synthetic construct
PLECDW

SEQ ID NO: 21259 - protein, 6 aa, synthetic construct
PLECDY

SEQ ID NO: 21260 - protein, 6 aa, synthetic construct
PLECCD

SEQ ID NO: 21261 - protein, 6 aa, synthetic construct
PLECCE

SEQ ID NO: 21262 - protein, 6 aa, synthetic construct
PLECCF

SEQ ID NO: 21263 - protein, 6 aa, synthetic construct
PLECCW

SEQ ID NO: 21264 - protein, 6 aa, synthetic construct
PLECCY

SEQ ID NO: 21265 - protein, 6 aa, synthetic construct
PLECQD

SEQ ID NO: 21266 - protein, 6 aa, synthetic construct
PLECQE

SEQ ID NO: 21267 - protein, 6 aa, synthetic construct
PLECQF

SEQ ID NO: 21268 - protein, 6 aa, synthetic construct
PLECQW

SEQ ID NO: 21269 - protein, 6 aa, synthetic construct
PLECQY

SEQ ID NO: 21270 - protein, 6 aa, synthetic construct
PLECED

SEQ ID NO: 21271 - protein, 6 aa, synthetic construct
PLECEE

SEQ ID NO: 21272 - protein, 6 aa, synthetic construct
PLECEF

SEQ ID NO: 21273 - protein, 6 aa, synthetic construct
PLECEW

SEQ ID NO: 21274 - protein, 6 aa, synthetic construct
PLECEY

SEQ ID NO: 21275 - protein, 6 aa, synthetic construct
PLECGD

SEQ ID NO: 21276 - protein, 6 aa, synthetic construct
PLECGE

SEQ ID NO: 21277 - protein, 6 aa, synthetic construct
PLECGF

SEQ ID NO: 21278 - protein, 6 aa, synthetic construct
PLECGW

SEQ ID NO: 21279 - protein, 6 aa, synthetic construct
PLECGY

SEQ ID NO: 21280 - protein, 6 aa, synthetic construct
PLECHD

SEQ ID NO: 21281 - protein, 6 aa, synthetic construct
PLECHE

SEQ ID NO: 21282 - protein, 6 aa, synthetic construct
PLECHF

SEQ ID NO: 21283 - protein, 6 aa, synthetic construct
PLECHW

SEQ ID NO: 21284 - protein, 6 aa, synthetic construct
PLECHY

SEQ ID NO: 21285 - protein, 6 aa, synthetic construct
PLECID

SEQ ID NO: 21286 - protein, 6 aa, synthetic construct
PLECIE

SEQ ID NO: 21287 - protein, 6 aa, synthetic construct
PLECIF

SEQ ID NO: 21288 - protein, 6 aa, synthetic construct
PLECIW

SEQ ID NO: 21289 - protein, 6 aa, synthetic construct
PLECIY

SEQ ID NO: 21290 - protein, 6 aa, synthetic construct
PLECLD

SEQ ID NO: 21291 - protein, 6 aa, synthetic construct
PLECLE

SEQ ID NO: 21292 - protein, 6 aa, synthetic construct
PLECLF

SEQ ID NO: 21293 - protein, 6 aa, synthetic construct
PLECLW

SEQ ID NO: 21294 - protein, 6 aa, synthetic construct
PLECLY

SEQ ID NO: 21295 - protein, 6 aa, synthetic construct
PLECKD

SEQ ID NO: 21296 - protein, 6 aa, synthetic construct
PLECKE

SEQ ID NO: 21297 - protein, 6 aa, synthetic construct
PLECKF

SEQ ID NO: 21298 - protein, 6 aa, synthetic construct
PLECKW

SEQ ID NO: 21299 - protein, 6 aa, synthetic construct
PLECKY

SEQ ID NO: 21300 - protein, 6 aa, synthetic construct
PLECMD

SEQ ID NO: 21301 - protein, 6 aa, synthetic construct
PLECME

SEQ ID NO: 21302 - protein, 6 aa, synthetic construct
PLECMF

SEQ ID NO: 21303 - protein, 6 aa, synthetic construct
PLECMW

SEQ ID NO: 21304 - protein, 6 aa, synthetic construct
PLECMY

SEQ ID NO: 21305 - protein, 6 aa, synthetic construct
PLECFD

SEQ ID NO: 21306 - protein, 6 aa, synthetic construct
PLECFE

SEQ ID NO: 21307 - protein, 6 aa, synthetic construct
PLECFF

SEQ ID NO: 21308 - protein, 6 aa, synthetic construct
PLECFW

SEQ ID NO: 21309 - protein, 6 aa, synthetic construct
PLECFY

SEQ ID NO: 21310 - protein, 6 aa, synthetic construct
PLECPD

SEQ ID NO: 21311 - protein, 6 aa, synthetic construct
PLECPE

SEQ ID NO: 21312 - protein, 6 aa, synthetic construct
PLECPF

SEQ ID NO: 21313 - protein, 6 aa, synthetic construct
PLECPW

SEQ ID NO: 21314 - protein, 6 aa, synthetic construct
PLECPY

SEQ ID NO: 21315 - protein, 6 aa, synthetic construct
PLECSD

SEQ ID NO: 21316 - protein, 6 aa, synthetic construct
PLECSE

SEQ ID NO: 21317 - protein, 6 aa, synthetic construct
PLECSF

SEQ ID NO: 21318 - protein, 6 aa, synthetic construct
PLECSW

SEQ ID NO: 21319 - protein, 6 aa, synthetic construct
PLECSY

SEQ ID NO: 21320 - protein, 6 aa, synthetic construct
PLECTD

SEQ ID NO: 21321 - protein, 6 aa, synthetic construct
PLECTE

SEQ ID NO: 21322 - protein, 6 aa, synthetic construct
PLECTF

SEQ ID NO: 21323 - protein, 6 aa, synthetic construct
PLECTW

SEQ ID NO: 21324 - protein, 6 aa, synthetic construct
PLECTY

SEQ ID NO: 21325 - protein, 6 aa, synthetic construct
PLECWD

SEQ ID NO: 21326 - protein, 6 aa, synthetic construct
PLECWE

SEQ ID NO: 21327 - protein, 6 aa, synthetic construct
PLECWF

SEQ ID NO: 21328 - protein, 6 aa, synthetic construct
PLECWW

SEQ ID NO: 21329 - protein, 6 aa, synthetic construct
PLECWY

SEQ ID NO: 21330 - protein, 6 aa, synthetic construct
PLECYD

SEQ ID NO: 21331 - protein, 6 aa, synthetic construct
PLECYE

SEQ ID NO: 21332 - protein, 6 aa, synthetic construct
PLECYF

SEQ ID NO: 21333 - protein, 6 aa, synthetic construct
PLECYW

SEQ ID NO: 21334 - protein, 6 aa, synthetic construct
PLECYY

SEQ ID NO: 21335 - protein, 6 aa, synthetic construct
PLECVD

SEQ ID NO: 21336 - protein, 6 aa, synthetic construct
PLECVE

SEQ ID NO: 21337 - protein, 6 aa, synthetic construct
PLECVF

SEQ ID NO: 21338 - protein, 6 aa, synthetic construct
PLECVW

SEQ ID NO: 21339 - protein, 6 aa, synthetic construct
PLECVY

SEQ ID NO: 21340 - protein, 6 aa, synthetic construct
PLEQAD

SEQ ID NO: 21341 - protein, 6 aa, synthetic construct
PLEQAE

SEQ ID NO: 21342 - protein, 6 aa, synthetic construct
PLEQAF

SEQ ID NO: 21343 - protein, 6 aa, synthetic construct
PLEQAW

SEQ ID NO: 21344 - protein, 6 aa, synthetic construct
PLEQAY

SEQ ID NO: 21345 - protein, 6 aa, synthetic construct
PLEQRD

SEQ ID NO: 21346 - protein, 6 aa, synthetic construct
PLEQRE

SEQ ID NO: 21347 - protein, 6 aa, synthetic construct
PLEQRF

SEQ ID NO: 21348 - protein, 6 aa, synthetic construct
PLEQRW

SEQ ID NO: 21349 - protein, 6 aa, synthetic construct
PLEQRY

SEQ ID NO: 21350 - protein, 6 aa, synthetic construct
PLEQND

SEQ ID NO: 21351 - protein, 6 aa, synthetic construct
PLEQNE

SEQ ID NO: 21352 - protein, 6 aa, synthetic construct
PLEQNF

SEQ ID NO: 21353 - protein, 6 aa, synthetic construct
PLEQNW

SEQ ID NO: 21354 - protein, 6 aa, synthetic construct
PLEQNY

SEQ ID NO: 21355 - protein, 6 aa, synthetic construct
PLEQDD

SEQ ID NO: 21356 - protein, 6 aa, synthetic construct
PLEQDE

SEQ ID NO: 21357 - protein, 6 aa, synthetic construct
PLEQDF

SEQ ID NO: 21358 - protein, 6 aa, synthetic construct
PLEQDW

SEQ ID NO: 21359 - protein, 6 aa, synthetic construct
PLEQDY

SEQ ID NO: 21360 - protein, 6 aa, synthetic construct
PLEQCD

SEQ ID NO: 21361 - protein, 6 aa, synthetic construct
PLEQCE

SEQ ID NO: 21362 - protein, 6 aa, synthetic construct
PLEQCF

SEQ ID NO: 21363 - protein, 6 aa, synthetic construct
PLEQCW

SEQ ID NO: 21364 - protein, 6 aa, synthetic construct
PLEQCY

SEQ ID NO: 21365 - protein, 6 aa, synthetic construct
PLEQQD

SEQ ID NO: 21366 - protein, 6 aa, synthetic construct
PLEQQE

SEQ ID NO: 21367 - protein, 6 aa, synthetic construct
PLEQQF

SEQ ID NO: 21368 - protein, 6 aa, synthetic construct
PLEQQW

SEQ ID NO: 21369 - protein, 6 aa, synthetic construct
PLEQQY

SEQ ID NO: 21370 - protein, 6 aa, synthetic construct
PLEQED

SEQ ID NO: 21371 - protein, 6 aa, synthetic construct
PLEQEE

SEQ ID NO: 21372 - protein, 6 aa, synthetic construct
PLEQEF

SEQ ID NO: 21373 - protein, 6 aa, synthetic construct
PLEQEW

SEQ ID NO: 21374 - protein, 6 aa, synthetic construct
PLEQEY

SEQ ID NO: 21375 - protein, 6 aa, synthetic construct
PLEQGD

SEQ ID NO: 21376 - protein, 6 aa, synthetic construct
PLEQGE

SEQ ID NO: 21377 - protein, 6 aa, synthetic construct
PLEQGF

SEQ ID NO: 21378 - protein, 6 aa, synthetic construct
PLEQGW

SEQ ID NO: 21379 - protein, 6 aa, synthetic construct
PLEQGY

SEQ ID NO: 21380 - protein, 6 aa, synthetic construct
PLEQHD

SEQ ID NO: 21381 - protein, 6 aa, synthetic construct
PLEQHE

SEQ ID NO: 21382 - protein, 6 aa, synthetic construct
PLEQHF

SEQ ID NO: 21383 - protein, 6 aa, synthetic construct
PLEQHW

SEQ ID NO: 21384 - protein, 6 aa, synthetic construct
PLEQHY

SEQ ID NO: 21385 - protein, 6 aa, synthetic construct
PLEQID

SEQ ID NO: 21386 - protein, 6 aa, synthetic construct
PLEQIE

SEQ ID NO: 21387 - protein, 6 aa, synthetic construct
PLEQIF

SEQ ID NO: 21388 - protein, 6 aa, synthetic construct
PLEQIW

SEQ ID NO: 21389 - protein, 6 aa, synthetic construct
PLEQIY

SEQ ID NO: 21390 - protein, 6 aa, synthetic construct
PLEQLD

SEQ ID NO: 21391 - protein, 6 aa, synthetic construct
PLEQLE

SEQ ID NO: 21392 - protein, 6 aa, synthetic construct
PLEQLF

SEQ ID NO: 21393 - protein, 6 aa, synthetic construct
PLEQLW

SEQ ID NO: 21394 - protein, 6 aa, synthetic construct
PLEQLY

SEQ ID NO: 21395 - protein, 6 aa, synthetic construct
PLEQKD

SEQ ID NO: 21396 - protein, 6 aa, synthetic construct
PLEQKE

SEQ ID NO: 21397 - protein, 6 aa, synthetic construct
PLEQKF

SEQ ID NO: 21398 - protein, 6 aa, synthetic construct
PLEQKW

SEQ ID NO: 21399 - protein, 6 aa, synthetic construct
PLEQKY

SEQ ID NO: 21400 - protein, 6 aa, synthetic construct
PLEQMD

SEQ ID NO: 21401 - protein, 6 aa, synthetic construct
PLEQME

SEQ ID NO: 21402 - protein, 6 aa, synthetic construct
PLEQMF

SEQ ID NO: 21403 - protein, 6 aa, synthetic construct
PLEQMW

SEQ ID NO: 21404 - protein, 6 aa, synthetic construct
PLEQMY

SEQ ID NO: 21405 - protein, 6 aa, synthetic construct
PLEQFD

SEQ ID NO: 21406 - protein, 6 aa, synthetic construct
PLEQFE

SEQ ID NO: 21407 - protein, 6 aa, synthetic construct
PLEQFF

SEQ ID NO: 21408 - protein, 6 aa, synthetic construct
PLEQFW

SEQ ID NO: 21409 - protein, 6 aa, synthetic construct
PLEQFY

SEQ ID NO: 21410 - protein, 6 aa, synthetic construct
PLEQPD

SEQ ID NO: 21411 - protein, 6 aa, synthetic construct
PLEQPE

SEQ ID NO: 21412 - protein, 6 aa, synthetic construct
PLEQPF

SEQ ID NO: 21413 - protein, 6 aa, synthetic construct
PLEQPW

SEQ ID NO: 21414 - protein, 6 aa, synthetic construct
PLEQPY

SEQ ID NO: 21415 - protein, 6 aa, synthetic construct
PLEQSD

SEQ ID NO: 21416 - protein, 6 aa, synthetic construct
PLEQSE

SEQ ID NO: 21417 - protein, 6 aa, synthetic construct
PLEQSF

SEQ ID NO: 21418 - protein, 6 aa, synthetic construct
PLEQSW

SEQ ID NO: 21419 - protein, 6 aa, synthetic construct
PLEQSY

SEQ ID NO: 21420 - protein, 6 aa, synthetic construct
PLEQTD

SEQ ID NO: 21421 - protein, 6 aa, synthetic construct
PLEQTE

SEQ ID NO: 21422 - protein, 6 aa, synthetic construct
PLEQTF

SEQ ID NO: 21423 - protein, 6 aa, synthetic construct
PLEQTW

SEQ ID NO: 21424 - protein, 6 aa, synthetic construct
PLEQTY

SEQ ID NO: 21425 - protein, 6 aa, synthetic construct
PLEQWD

SEQ ID NO: 21426 - protein, 6 aa, synthetic construct
PLEQWE

SEQ ID NO: 21427 - protein, 6 aa, synthetic construct
PLEQWF

SEQ ID NO: 21428 - protein, 6 aa, synthetic construct
PLEQWW

SEQ ID NO: 21429 - protein, 6 aa, synthetic construct
PLEQWY

SEQ ID NO: 21430 - protein, 6 aa, synthetic construct
PLEQYD

SEQ ID NO: 21431 - protein, 6 aa, synthetic construct
PLEQYE

SEQ ID NO: 21432 - protein, 6 aa, synthetic construct
PLEQYF

SEQ ID NO: 21433 - protein, 6 aa, synthetic construct
PLEQYW

SEQ ID NO: 21434 - protein, 6 aa, synthetic construct
PLEQYY

SEQ ID NO: 21435 - protein, 6 aa, synthetic construct
PLEQVD

SEQ ID NO: 21436 - protein, 6 aa, synthetic construct
PLEQVE

SEQ ID NO: 21437 - protein, 6 aa, synthetic construct
PLEQVF

SEQ ID NO: 21438 - protein, 6 aa, synthetic construct
PLEQVW

SEQ ID NO: 21439 - protein, 6 aa, synthetic construct
PLEQVY

SEQ ID NO: 21440 - protein, 6 aa, synthetic construct
PLEEAD

SEQ ID NO: 21441 - protein, 6 aa, synthetic construct
PLEEAE

SEQ ID NO: 21442 - protein, 6 aa, synthetic construct
PLEEAF

SEQ ID NO: 21443 - protein, 6 aa, synthetic construct
PLEEAW

SEQ ID NO: 21444 - protein, 6 aa, synthetic construct
PLEEAY

SEQ ID NO: 21445 - protein, 6 aa, synthetic construct
PLEERD

SEQ ID NO: 21446 - protein, 6 aa, synthetic construct
PLEERE

SEQ ID NO: 21447 - protein, 6 aa, synthetic construct
PLEERF

SEQ ID NO: 21448 - protein, 6 aa, synthetic construct
PLEERW

SEQ ID NO: 21449 - protein, 6 aa, synthetic construct
PLEERY

SEQ ID NO: 21450 - protein, 6 aa, synthetic construct
PLEEND

SEQ ID NO: 21451 - protein, 6 aa, synthetic construct
PLEENE

SEQ ID NO: 21452 - protein, 6 aa, synthetic construct
PLEENF

SEQ ID NO: 21453 - protein, 6 aa, synthetic construct
PLEENW

SEQ ID NO: 21454 - protein, 6 aa, synthetic construct
PLEENY

SEQ ID NO: 21455 - protein, 6 aa, synthetic construct
PLEEDD

SEQ ID NO: 21456 - protein, 6 aa, synthetic construct
PLEEDE

SEQ ID NO: 21457 - protein, 6 aa, synthetic construct
PLEEDF

SEQ ID NO: 21458 - protein, 6 aa, synthetic construct
PLEEDW

SEQ ID NO: 21459 - protein, 6 aa, synthetic construct
PLEEDY

SEQ ID NO: 21460 - protein, 6 aa, synthetic construct
PLEECD

SEQ ID NO: 21461 - protein, 6 aa, synthetic construct
PLEECE

SEQ ID NO: 21462 - protein, 6 aa, synthetic construct
PLEECF

SEQ ID NO: 21463 - protein, 6 aa, synthetic construct
PLEECW

SEQ ID NO: 21464 - protein, 6 aa, synthetic construct
PLEECY

SEQ ID NO: 21465 - protein, 6 aa, synthetic construct
PLEEQD

SEQ ID NO: 21466 - protein, 6 aa, synthetic construct
PLEEQE

SEQ ID NO: 21467 - protein, 6 aa, synthetic construct
PLEEQF

SEQ ID NO: 21468 - protein, 6 aa, synthetic construct
PLEEQW

SEQ ID NO: 21469 - protein, 6 aa, synthetic construct
PLEEQY

SEQ ID NO: 21470 - protein, 6 aa, synthetic construct
PLEEED

SEQ ID NO: 21471 - protein, 6 aa, synthetic construct
PLEEEE

SEQ ID NO: 21472 - protein, 6 aa, synthetic construct
PLEEEF

SEQ ID NO: 21473 - protein, 6 aa, synthetic construct
PLEEEW

SEQ ID NO: 21474 - protein, 6 aa, synthetic construct
PLEEEY

SEQ ID NO: 21475 - protein, 6 aa, synthetic construct
PLEEGD

SEQ ID NO: 21476 - protein, 6 aa, synthetic construct
PLEEGE

SEQ ID NO: 21477 - protein, 6 aa, synthetic construct
PLEEGF

SEQ ID NO: 21478 - protein, 6 aa, synthetic construct
PLEEGW

SEQ ID NO: 21479 - protein, 6 aa, synthetic construct
PLEEGY

SEQ ID NO: 21480 - protein, 6 aa, synthetic construct
PLEEHD

SEQ ID NO: 21481 - protein, 6 aa, synthetic construct
PLEEHE

SEQ ID NO: 21482 - protein, 6 aa, synthetic construct
PLEEHF

SEQ ID NO: 21483 - protein, 6 aa, synthetic construct
PLEEHW

SEQ ID NO: 21484 - protein, 6 aa, synthetic construct
PLEEHY

SEQ ID NO: 21485 - protein, 6 aa, synthetic construct
PLEEID

SEQ ID NO: 21486 - protein, 6 aa, synthetic construct
PLEEIE

SEQ ID NO: 21487 - protein, 6 aa, synthetic construct
PLEEIF

SEQ ID NO: 21488 - protein, 6 aa, synthetic construct
PLEEIW

SEQ ID NO: 21489 - protein, 6 aa, synthetic construct
PLEEIY

SEQ ID NO: 21490 - protein, 6 aa, synthetic construct
PLEELD

SEQ ID NO: 21491 - protein, 6 aa, synthetic construct
PLEELE

SEQ ID NO: 21492 - protein, 6 aa, synthetic construct
PLEELF

SEQ ID NO: 21493 - protein, 6 aa, synthetic construct
PLEELW

SEQ ID NO: 21494 - protein, 6 aa, synthetic construct
PLEELY

SEQ ID NO: 21495 - protein, 6 aa, synthetic construct
PLEEKD

SEQ ID NO: 21496 - protein, 6 aa, synthetic construct
PLEEKE

SEQ ID NO: 21497 - protein, 6 aa, synthetic construct
PLEEKF

SEQ ID NO: 21498 - protein, 6 aa, synthetic construct
PLEEKW

SEQ ID NO: 21499 - protein, 6 aa, synthetic construct
PLEEKY

SEQ ID NO: 21500 - protein, 6 aa, synthetic construct
PLEEMD

SEQ ID NO: 21501 - protein, 6 aa, synthetic construct
PLEEME

SEQ ID NO: 21502 - protein, 6 aa, synthetic construct
PLEEMF

SEQ ID NO: 21503 - protein, 6 aa, synthetic construct
PLEEMW

SEQ ID NO: 21504 - protein, 6 aa, synthetic construct
PLEEMY

SEQ ID NO: 21505 - protein, 6 aa, synthetic construct
PLEEFD

SEQ ID NO: 21506 - protein, 6 aa, synthetic construct
PLEEFE

SEQ ID NO: 21507 - protein, 6 aa, synthetic construct
PLEEFF

SEQ ID NO: 21508 - protein, 6 aa, synthetic construct
PLEEFW

SEQ ID NO: 21509 - protein, 6 aa, synthetic construct
PLEEFY

SEQ ID NO: 21510 - protein, 6 aa, synthetic construct
PLEEPD

SEQ ID NO: 21511 - protein, 6 aa, synthetic construct
PLEEPE

SEQ ID NO: 21512 - protein, 6 aa, synthetic construct
PLEEPF

SEQ ID NO: 21513 - protein, 6 aa, synthetic construct
PLEEPW

SEQ ID NO: 21514 - protein, 6 aa, synthetic construct
PLEEPY

SEQ ID NO: 21515 - protein, 6 aa, synthetic construct
PLEESD

SEQ ID NO: 21516 - protein, 6 aa, synthetic construct
PLEESE

SEQ ID NO: 21517 - protein, 6 aa, synthetic construct
PLEESF

SEQ ID NO: 21518 - protein, 6 aa, synthetic construct
PLEESW

SEQ ID NO: 21519 - protein, 6 aa, synthetic construct
PLEESY

SEQ ID NO: 21520 - protein, 6 aa, synthetic construct
PLEETD

SEQ ID NO: 21521 - protein, 6 aa, synthetic construct
PLEETE

SEQ ID NO: 21522 - protein, 6 aa, synthetic construct
PLEETF

SEQ ID NO: 21523 - protein, 6 aa, synthetic construct
PLEETW

SEQ ID NO: 21524 - protein, 6 aa, synthetic construct
PLEETY

SEQ ID NO: 21525 - protein, 6 aa, synthetic construct
PLEEWD

SEQ ID NO: 21526 - protein, 6 aa, synthetic construct
PLEEWE

SEQ ID NO: 21527 - protein, 6 aa, synthetic construct
PLEEWF

SEQ ID NO: 21528 - protein, 6 aa, synthetic construct
PLEEWW

SEQ ID NO: 21529 - protein, 6 aa, synthetic construct
PLEEWY

SEQ ID NO: 21530 - protein, 6 aa, synthetic construct
PLEEYD

SEQ ID NO: 21531 - protein, 6 aa, synthetic construct
PLEEYE

SEQ ID NO: 21532 - protein, 6 aa, synthetic construct
PLEEYF

SEQ ID NO: 21533 - protein, 6 aa, synthetic construct
PLEEYW

SEQ ID NO: 21534 - protein, 6 aa, synthetic construct
PLEEYY

SEQ ID NO: 21535 - protein, 6 aa, synthetic construct
PLEEVD

SEQ ID NO: 21536 - protein, 6 aa, synthetic construct
PLEEVE

SEQ ID NO: 21537 - protein, 6 aa, synthetic construct
PLEEVF

SEQ ID NO: 21538 - protein, 6 aa, synthetic construct
PLEEVW

SEQ ID NO: 21539 - protein, 6 aa, synthetic construct
PLEEVY

SEQ ID NO: 21540 - protein, 6 aa, synthetic construct
PLEGAD

SEQ ID NO: 21541 - protein, 6 aa, synthetic construct
PLEGAE

SEQ ID NO: 21542 - protein, 6 aa, synthetic construct
PLEGAF

SEQ ID NO: 21543 - protein, 6 aa, synthetic construct
PLEGAW

SEQ ID NO: 21544 - protein, 6 aa, synthetic construct
PLEGAY

SEQ ID NO: 21545 - protein, 6 aa, synthetic construct
PLEGRD

SEQ ID NO: 21546 - protein, 6 aa, synthetic construct
PLEGRE

SEQ ID NO: 21547 - protein, 6 aa, synthetic construct
PLEGRF

SEQ ID NO: 21548 - protein, 6 aa, synthetic construct
PLEGRW

SEQ ID NO: 21549 - protein, 6 aa, synthetic construct
PLEGRY

SEQ ID NO: 21550 - protein, 6 aa, synthetic construct
PLEGND

SEQ ID NO: 21551 - protein, 6 aa, synthetic construct
PLEGNE

SEQ ID NO: 21552 - protein, 6 aa, synthetic construct
PLEGNF

SEQ ID NO: 21553 - protein, 6 aa, synthetic construct
PLEGNW

SEQ ID NO: 21554 - protein, 6 aa, synthetic construct
PLEGNY

SEQ ID NO: 21555 - protein, 6 aa, synthetic construct
PLEGDD

SEQ ID NO: 21556 - protein, 6 aa, synthetic construct
PLEGDE

SEQ ID NO: 21557 - protein, 6 aa, synthetic construct
PLEGDF

SEQ ID NO: 21558 - protein, 6 aa, synthetic construct
PLEGDW

SEQ ID NO: 21559 - protein, 6 aa, synthetic construct
PLEGDY

SEQ ID NO: 21560 - protein, 6 aa, synthetic construct
PLEGCD

SEQ ID NO: 21561 - protein, 6 aa, synthetic construct
PLEGCE

SEQ ID NO: 21562 - protein, 6 aa, synthetic construct
PLEGCF

SEQ ID NO: 21563 - protein, 6 aa, synthetic construct
PLEGCW

SEQ ID NO: 21564 - protein, 6 aa, synthetic construct
PLEGCY

SEQ ID NO: 21565 - protein, 6 aa, synthetic construct
PLEGQD

SEQ ID NO: 21566 - protein, 6 aa, synthetic construct
PLEGQE

SEQ ID NO: 21567 - protein, 6 aa, synthetic construct
PLEGQF

SEQ ID NO: 21568 - protein, 6 aa, synthetic construct
PLEGQW

SEQ ID NO: 21569 - protein, 6 aa, synthetic construct
PLEGQY

SEQ ID NO: 21570 - protein, 6 aa, synthetic construct
PLEGED

SEQ ID NO: 21571 - protein, 6 aa, synthetic construct
PLEGEE

SEQ ID NO: 21572 - protein, 6 aa, synthetic construct
PLEGEF

SEQ ID NO: 21573 - protein, 6 aa, synthetic construct
PLEGEW

SEQ ID NO: 21574 - protein, 6 aa, synthetic construct
PLEGEY

SEQ ID NO: 21575 - protein, 6 aa, synthetic construct
PLEGGD

SEQ ID NO: 21576 - protein, 6 aa, synthetic construct
PLEGGE

SEQ ID NO: 21577 - protein, 6 aa, synthetic construct
PLEGGF

SEQ ID NO: 21578 - protein, 6 aa, synthetic construct
PLEGGW

SEQ ID NO: 21579 - protein, 6 aa, synthetic construct
PLEGGY

SEQ ID NO: 21580 - protein, 6 aa, synthetic construct
PLEGHD

SEQ ID NO: 21581 - protein, 6 aa, synthetic construct
PLEGHE

SEQ ID NO: 21582 - protein, 6 aa, synthetic construct
PLEGHF

SEQ ID NO: 21583 - protein, 6 aa, synthetic construct
PLEGHW

SEQ ID NO: 21584 - protein, 6 aa, synthetic construct
PLEGHY

SEQ ID NO: 21585 - protein, 6 aa, synthetic construct
PLEGID

SEQ ID NO: 21586 - protein, 6 aa, synthetic construct
PLEGIE

SEQ ID NO: 21587 - protein, 6 aa, synthetic construct
PLEGIF

SEQ ID NO: 21588 - protein, 6 aa, synthetic construct
PLEGIW

SEQ ID NO: 21589 - protein, 6 aa, synthetic construct
PLEGIY

SEQ ID NO: 21590 - protein, 6 aa, synthetic construct
PLEGLD

SEQ ID NO: 21591 - protein, 6 aa, synthetic construct
PLEGLE

SEQ ID NO: 21592 - protein, 6 aa, synthetic construct
PLEGLF

SEQ ID NO: 21593 - protein, 6 aa, synthetic construct
PLEGLW

SEQ ID NO: 21594 - protein, 6 aa, synthetic construct
PLEGLY

SEQ ID NO: 21595 - protein, 6 aa, synthetic construct
PLEGKD

SEQ ID NO: 21596 - protein, 6 aa, synthetic construct
PLEGKE

SEQ ID NO: 21597 - protein, 6 aa, synthetic construct
PLEGKF

SEQ ID NO: 21598 - protein, 6 aa, synthetic construct
PLEGKW

SEQ ID NO: 21599 - protein, 6 aa, synthetic construct
PLEGKY

SEQ ID NO: 21600 - protein, 6 aa, synthetic construct
PLEGMD

SEQ ID NO: 21601 - protein, 6 aa, synthetic construct
PLEGME

SEQ ID NO: 21602 - protein, 6 aa, synthetic construct
PLEGMF

SEQ ID NO: 21603 - protein, 6 aa, synthetic construct
PLEGMW

SEQ ID NO: 21604 - protein, 6 aa, synthetic construct
PLEGMY

SEQ ID NO: 21605 - protein, 6 aa, synthetic construct
PLEGFD

SEQ ID NO: 21606 - protein, 6 aa, synthetic construct
PLEGFE

SEQ ID NO: 21607 - protein, 6 aa, synthetic construct
PLEGFF

SEQ ID NO: 21608 - protein, 6 aa, synthetic construct
PLEGFW

SEQ ID NO: 21609 - protein, 6 aa, synthetic construct
PLEGFY

SEQ ID NO: 21610 - protein, 6 aa, synthetic construct
PLEGPD

SEQ ID NO: 21611 - protein, 6 aa, synthetic construct
PLEGPE

SEQ ID NO: 21612 - protein, 6 aa, synthetic construct
PLEGPF

SEQ ID NO: 21613 - protein, 6 aa, synthetic construct
PLEGPW

SEQ ID NO: 21614 - protein, 6 aa, synthetic construct
PLEGPY

SEQ ID NO: 21615 - protein, 6 aa, synthetic construct
PLEGSD

SEQ ID NO: 21616 - protein, 6 aa, synthetic construct
PLEGSE

SEQ ID NO: 21617 - protein, 6 aa, synthetic construct
PLEGSF

SEQ ID NO: 21618 - protein, 6 aa, synthetic construct
PLEGSW

SEQ ID NO: 21619 - protein, 6 aa, synthetic construct
PLEGSY

SEQ ID NO: 21620 - protein, 6 aa, synthetic construct
PLEGTD

SEQ ID NO: 21621 - protein, 6 aa, synthetic construct
PLEGTE

SEQ ID NO: 21622 - protein, 6 aa, synthetic construct
PLEGTF

SEQ ID NO: 21623 - protein, 6 aa, synthetic construct
PLEGTW

SEQ ID NO: 21624 - protein, 6 aa, synthetic construct
PLEGTY

SEQ ID NO: 21625 - protein, 6 aa, synthetic construct
PLEGWD

SEQ ID NO: 21626 - protein, 6 aa, synthetic construct
PLEGWE

SEQ ID NO: 21627 - protein, 6 aa, synthetic construct
PLEGWF

SEQ ID NO: 21628 - protein, 6 aa, synthetic construct
PLEGWW

SEQ ID NO: 21629 - protein, 6 aa, synthetic construct
PLEGWY

SEQ ID NO: 21630 - protein, 6 aa, synthetic construct
PLEGYD

SEQ ID NO: 21631 - protein, 6 aa, synthetic construct
PLEGYE

SEQ ID NO: 21632 - protein, 6 aa, synthetic construct
PLEGYF

SEQ ID NO: 21633 - protein, 6 aa, synthetic construct
PLEGYW

SEQ ID NO: 21634 - protein, 6 aa, synthetic construct
PLEGYY

SEQ ID NO: 21635 - protein, 6 aa, synthetic construct
PLEGVD

SEQ ID NO: 21636 - protein, 6 aa, synthetic construct
PLEGVE

SEQ ID NO: 21637 - protein, 6 aa, synthetic construct
PLEGVF

SEQ ID NO: 21638 - protein, 6 aa, synthetic construct
PLEGVW

SEQ ID NO: 21639 - protein, 6 aa, synthetic construct
PLEGVY

SEQ ID NO: 21640 - protein, 6 aa, synthetic construct
PLEHAD

SEQ ID NO: 21641 - protein, 6 aa, synthetic construct
PLEHAE

SEQ ID NO: 21642 - protein, 6 aa, synthetic construct
PLEHAF

SEQ ID NO: 21643 - protein, 6 aa, synthetic construct
PLEHAW

SEQ ID NO: 21644 - protein, 6 aa, synthetic construct
PLEHAY

SEQ ID NO: 21645 - protein, 6 aa, synthetic construct
PLEHRD

SEQ ID NO: 21646 - protein, 6 aa, synthetic construct
PLEHRE

SEQ ID NO: 21647 - protein, 6 aa, synthetic construct
PLEHRF

SEQ ID NO: 21648 - protein, 6 aa, synthetic construct
PLEHRW

SEQ ID NO: 21649 - protein, 6 aa, synthetic construct
PLEHRY

SEQ ID NO: 21650 - protein, 6 aa, synthetic construct
PLEHND

SEQ ID NO: 21651 - protein, 6 aa, synthetic construct
PLEHNE

SEQ ID NO: 21652 - protein, 6 aa, synthetic construct
PLEHNF

SEQ ID NO: 21653 - protein, 6 aa, synthetic construct
PLEHNW

SEQ ID NO: 21654 - protein, 6 aa, synthetic construct
PLEHNY

SEQ ID NO: 21655 - protein, 6 aa, synthetic construct
PLEHDD

SEQ ID NO: 21656 - protein, 6 aa, synthetic construct
PLEHDE

SEQ ID NO: 21657 - protein, 6 aa, synthetic construct
PLEHDF

SEQ ID NO: 21658 - protein, 6 aa, synthetic construct
PLEHDW

SEQ ID NO: 21659 - protein, 6 aa, synthetic construct
PLEHDY

SEQ ID NO: 21660 - protein, 6 aa, synthetic construct
PLEHCD

SEQ ID NO: 21661 - protein, 6 aa, synthetic construct
PLEHCE

SEQ ID NO: 21662 - protein, 6 aa, synthetic construct
PLEHCF

SEQ ID NO: 21663 - protein, 6 aa, synthetic construct
PLEHCW

SEQ ID NO: 21664 - protein, 6 aa, synthetic construct
PLEHCY

SEQ ID NO: 21665 - protein, 6 aa, synthetic construct
PLEHQD

SEQ ID NO: 21666 - protein, 6 aa, synthetic construct
PLEHQE

SEQ ID NO: 21667 - protein, 6 aa, synthetic construct
PLEHQF

SEQ ID NO: 21668 - protein, 6 aa, synthetic construct
PLEHQW

SEQ ID NO: 21669 - protein, 6 aa, synthetic construct
PLEHQY

SEQ ID NO: 21670 - protein, 6 aa, synthetic construct
PLEHED

SEQ ID NO: 21671 - protein, 6 aa, synthetic construct
PLEHEE

SEQ ID NO: 21672 - protein, 6 aa, synthetic construct
PLEHEF

SEQ ID NO: 21673 - protein, 6 aa, synthetic construct
PLEHEW

SEQ ID NO: 21674 - protein, 6 aa, synthetic construct
PLEHEY

SEQ ID NO: 21675 - protein, 6 aa, synthetic construct
PLEHGD

SEQ ID NO: 21676 - protein, 6 aa, synthetic construct
PLEHGE

SEQ ID NO: 21677 - protein, 6 aa, synthetic construct
PLEHGF

SEQ ID NO: 21678 - protein, 6 aa, synthetic construct
PLEHGW

SEQ ID NO: 21679 - protein, 6 aa, synthetic construct
PLEHGY

SEQ ID NO: 21680 - protein, 6 aa, synthetic construct
PLEHHD

SEQ ID NO: 21681 - protein, 6 aa, synthetic construct
PLEHHE

SEQ ID NO: 21682 - protein, 6 aa, synthetic construct
PLEHHF

SEQ ID NO: 21683 - protein, 6 aa, synthetic construct
PLEHHW

SEQ ID NO: 21684 - protein, 6 aa, synthetic construct
PLEHHY

SEQ ID NO: 21685 - protein, 6 aa, synthetic construct
PLEHID

SEQ ID NO: 21686 - protein, 6 aa, synthetic construct
PLEHIE

SEQ ID NO: 21687 - protein, 6 aa, synthetic construct
PLEHIF

SEQ ID NO: 21688 - protein, 6 aa, synthetic construct
PLEHIW

SEQ ID NO: 21689 - protein, 6 aa, synthetic construct
PLEHIY

SEQ ID NO: 21690 - protein, 6 aa, synthetic construct
PLEHLD

SEQ ID NO: 21691 - protein, 6 aa, synthetic construct
PLEHLE

SEQ ID NO: 21692 - protein, 6 aa, synthetic construct
PLEHLF

SEQ ID NO: 21693 - protein, 6 aa, synthetic construct
PLEHLW

SEQ ID NO: 21694 - protein, 6 aa, synthetic construct
PLEHLY

SEQ ID NO: 21695 - protein, 6 aa, synthetic construct
PLEHKD

SEQ ID NO: 21696 - protein, 6 aa, synthetic construct
PLEHKE

SEQ ID NO: 21697 - protein, 6 aa, synthetic construct
PLEHKF

SEQ ID NO: 21698 - protein, 6 aa, synthetic construct
PLEHKW

SEQ ID NO: 21699 - protein, 6 aa, synthetic construct
PLEHKY

SEQ ID NO: 21700 - protein, 6 aa, synthetic construct
PLEHMD

SEQ ID NO: 21701 - protein, 6 aa, synthetic construct
PLEHME

SEQ ID NO: 21702 - protein, 6 aa, synthetic construct
PLEHMF

SEQ ID NO: 21703 - protein, 6 aa, synthetic construct
PLEHMW

SEQ ID NO: 21704 - protein, 6 aa, synthetic construct
PLEHMY

SEQ ID NO: 21705 - protein, 6 aa, synthetic construct
PLEHFD

SEQ ID NO: 21706 - protein, 6 aa, synthetic construct
PLEHFE

SEQ ID NO: 21707 - protein, 6 aa, synthetic construct
PLEHFF

SEQ ID NO: 21708 - protein, 6 aa, synthetic construct
PLEHFW

SEQ ID NO: 21709 - protein, 6 aa, synthetic construct
PLEHFY

SEQ ID NO: 21710 - protein, 6 aa, synthetic construct
PLEHPD

SEQ ID NO: 21711 - protein, 6 aa, synthetic construct
PLEHPE

SEQ ID NO: 21712 - protein, 6 aa, synthetic construct
PLEHPF

SEQ ID NO: 21713 - protein, 6 aa, synthetic construct
PLEHPW

SEQ ID NO: 21714 - protein, 6 aa, synthetic construct
PLEHPY

SEQ ID NO: 21715 - protein, 6 aa, synthetic construct
PLEHSD

SEQ ID NO: 21716 - protein, 6 aa, synthetic construct
PLEHSE

SEQ ID NO: 21717 - protein, 6 aa, synthetic construct
PLEHSF

SEQ ID NO: 21718 - protein, 6 aa, synthetic construct
PLEHSW

SEQ ID NO: 21719 - protein, 6 aa, synthetic construct
PLEHSY

SEQ ID NO: 21720 - protein, 6 aa, synthetic construct
PLEHTD

SEQ ID NO: 21721 - protein, 6 aa, synthetic construct
PLEHTE

SEQ ID NO: 21722 - protein, 6 aa, synthetic construct
PLEHTF

SEQ ID NO: 21723 - protein, 6 aa, synthetic construct
PLEHTW

SEQ ID NO: 21724 - protein, 6 aa, synthetic construct
PLEHTY

SEQ ID NO: 21725 - protein, 6 aa, synthetic construct
PLEHWD

SEQ ID NO: 21726 - protein, 6 aa, synthetic construct
PLEHWE

SEQ ID NO: 21727 - protein, 6 aa, synthetic construct
PLEHWF

SEQ ID NO: 21728 - protein, 6 aa, synthetic construct
PLEHWW

SEQ ID NO: 21729 - protein, 6 aa, synthetic construct
PLEHWY

SEQ ID NO: 21730 - protein, 6 aa, synthetic construct
PLEHYD

SEQ ID NO: 21731 - protein, 6 aa, synthetic construct
PLEHYE

SEQ ID NO: 21732 - protein, 6 aa, synthetic construct
PLEHYF

SEQ ID NO: 21733 - protein, 6 aa, synthetic construct
PLEHYW

SEQ ID NO: 21734 - protein, 6 aa, synthetic construct
PLEHYY

SEQ ID NO: 21735 - protein, 6 aa, synthetic construct
PLEHVD

SEQ ID NO: 21736 - protein, 6 aa, synthetic construct
PLEHVE

SEQ ID NO: 21737 - protein, 6 aa, synthetic construct
PLEHVF

SEQ ID NO: 21738 - protein, 6 aa, synthetic construct
PLEHVW

SEQ ID NO: 21739 - protein, 6 aa, synthetic construct
PLEHVY

SEQ ID NO: 21740 - protein, 6 aa, synthetic construct
PLEIAD

SEQ ID NO: 21741 - protein, 6 aa, synthetic construct
PLEIAE

SEQ ID NO: 21742 - protein, 6 aa, synthetic construct
PLEIAF

SEQ ID NO: 21743 - protein, 6 aa, synthetic construct
PLEIAW

SEQ ID NO: 21744 - protein, 6 aa, synthetic construct
PLEIAY

SEQ ID NO: 21745 - protein, 6 aa, synthetic construct
PLEIRD

SEQ ID NO: 21746 - protein, 6 aa, synthetic construct
PLEIRE

SEQ ID NO: 21747 - protein, 6 aa, synthetic construct
PLEIRF

SEQ ID NO: 21748 - protein, 6 aa, synthetic construct
PLEIRW

SEQ ID NO: 21749 - protein, 6 aa, synthetic construct
PLEIRY

SEQ ID NO: 21750 - protein, 6 aa, synthetic construct
PLEIND

SEQ ID NO: 21751 - protein, 6 aa, synthetic construct
PLEINE

SEQ ID NO: 21752 - protein, 6 aa, synthetic construct
PLEINF

SEQ ID NO: 21753 - protein, 6 aa, synthetic construct
PLEINW

SEQ ID NO: 21754 - protein, 6 aa, synthetic construct
PLEINY

SEQ ID NO: 21755 - protein, 6 aa, synthetic construct
PLEIDD

SEQ ID NO: 21756 - protein, 6 aa, synthetic construct
PLEIDE

SEQ ID NO: 21757 - protein, 6 aa, synthetic construct
PLEIDF

SEQ ID NO: 21758 - protein, 6 aa, synthetic construct
PLEIDW

SEQ ID NO: 21759 - protein, 6 aa, synthetic construct
PLEIDY

SEQ ID NO: 21760 - protein, 6 aa, synthetic construct
PLEICD

SEQ ID NO: 21761 - protein, 6 aa, synthetic construct
PLEICE

SEQ ID NO: 21762 - protein, 6 aa, synthetic construct
PLEICF

SEQ ID NO: 21763 - protein, 6 aa, synthetic construct
PLEICW

SEQ ID NO: 21764 - protein, 6 aa, synthetic construct
PLEICY

SEQ ID NO: 21765 - protein, 6 aa, synthetic construct
PLEIQD

SEQ ID NO: 21766 - protein, 6 aa, synthetic construct
PLEIQE

SEQ ID NO: 21767 - protein, 6 aa, synthetic construct
PLEIQF

SEQ ID NO: 21768 - protein, 6 aa, synthetic construct
PLEIQW

SEQ ID NO: 21769 - protein, 6 aa, synthetic construct
PLEIQY

SEQ ID NO: 21770 - protein, 6 aa, synthetic construct
PLEIED

SEQ ID NO: 21771 - protein, 6 aa, synthetic construct
PLEIEE

SEQ ID NO: 21772 - protein, 6 aa, synthetic construct
PLEIEF

SEQ ID NO: 21773 - protein, 6 aa, synthetic construct
PLEIEW

SEQ ID NO: 21774 - protein, 6 aa, synthetic construct
PLEIEY

SEQ ID NO: 21775 - protein, 6 aa, synthetic construct
PLEIGD

SEQ ID NO: 21776 - protein, 6 aa, synthetic construct
PLEIGE

SEQ ID NO: 21777 - protein, 6 aa, synthetic construct
PLEIGF

SEQ ID NO: 21778 - protein, 6 aa, synthetic construct
PLEIGW

SEQ ID NO: 21779 - protein, 6 aa, synthetic construct
PLEIGY

SEQ ID NO: 21780 - protein, 6 aa, synthetic construct
PLEIHD

SEQ ID NO: 21781 - protein, 6 aa, synthetic construct
PLEIHE

SEQ ID NO: 21782 - protein, 6 aa, synthetic construct
PLEIHF

SEQ ID NO: 21783 - protein, 6 aa, synthetic construct
PLEIHW

SEQ ID NO: 21784 - protein, 6 aa, synthetic construct
PLEIHY

SEQ ID NO: 21785 - protein, 6 aa, synthetic construct
PLEIID

SEQ ID NO: 21786 - protein, 6 aa, synthetic construct
PLEIIE

SEQ ID NO: 21787 - protein, 6 aa, synthetic construct
PLEIIF

SEQ ID NO: 21788 - protein, 6 aa, synthetic construct
PLEIIW

SEQ ID NO: 21789 - protein, 6 aa, synthetic construct
PLEIIY

SEQ ID NO: 21790 - protein, 6 aa, synthetic construct
PLEILD

SEQ ID NO: 21791 - protein, 6 aa, synthetic construct
PLEILE

SEQ ID NO: 21792 - protein, 6 aa, synthetic construct
PLEILF

SEQ ID NO: 21793 - protein, 6 aa, synthetic construct
PLEILW

SEQ ID NO: 21794 - protein, 6 aa, synthetic construct
PLEILY

SEQ ID NO: 21795 - protein, 6 aa, synthetic construct
PLEIKD

SEQ ID NO: 21796 - protein, 6 aa, synthetic construct
PLEIKE

SEQ ID NO: 21797 - protein, 6 aa, synthetic construct
PLEIKF

SEQ ID NO: 21798 - protein, 6 aa, synthetic construct
PLEIKW

SEQ ID NO: 21799 - protein, 6 aa, synthetic construct
PLEIKY

SEQ ID NO: 21800 - protein, 6 aa, synthetic construct
PLEIMD

SEQ ID NO: 21801 - protein, 6 aa, synthetic construct
PLEIME

SEQ ID NO: 21802 - protein, 6 aa, synthetic construct
PLEIMF

SEQ ID NO: 21803 - protein, 6 aa, synthetic construct
PLEIMW

SEQ ID NO: 21804 - protein, 6 aa, synthetic construct
PLEIMY

SEQ ID NO: 21805 - protein, 6 aa, synthetic construct
PLEIFD

SEQ ID NO: 21806 - protein, 6 aa, synthetic construct
PLEIFE

SEQ ID NO: 21807 - protein, 6 aa, synthetic construct
PLEIFF

SEQ ID NO: 21808 - protein, 6 aa, synthetic construct
PLEIFW

SEQ ID NO: 21809 - protein, 6 aa, synthetic construct
PLEIFY

SEQ ID NO: 21810 - protein, 6 aa, synthetic construct
PLEIPD

SEQ ID NO: 21811 - protein, 6 aa, synthetic construct
PLEIPE

SEQ ID NO: 21812 - protein, 6 aa, synthetic construct
PLEIPF

SEQ ID NO: 21813 - protein, 6 aa, synthetic construct
PLEIPW

SEQ ID NO: 21814 - protein, 6 aa, synthetic construct
PLEIPY

SEQ ID NO: 21815 - protein, 6 aa, synthetic construct
PLEISD

SEQ ID NO: 21816 - protein, 6 aa, synthetic construct
PLEISE

SEQ ID NO: 21817 - protein, 6 aa, synthetic construct
PLEISF

SEQ ID NO: 21818 - protein, 6 aa, synthetic construct
PLEISW

SEQ ID NO: 21819 - protein, 6 aa, synthetic construct
PLEISY

SEQ ID NO: 21820 - protein, 6 aa, synthetic construct
PLEITD

SEQ ID NO: 21821 - protein, 6 aa, synthetic construct
PLEITE

SEQ ID NO: 21822 - protein, 6 aa, synthetic construct
PLEITF

SEQ ID NO: 21823 - protein, 6 aa, synthetic construct
PLEITW

SEQ ID NO: 21824 - protein, 6 aa, synthetic construct
PLEITY

SEQ ID NO: 21825 - protein, 6 aa, synthetic construct
PLEIWD

SEQ ID NO: 21826 - protein, 6 aa, synthetic construct
PLEIWE

SEQ ID NO: 21827 - protein, 6 aa, synthetic construct
PLEIWF

SEQ ID NO: 21828 - protein, 6 aa, synthetic construct
PLEIWW

SEQ ID NO: 21829 - protein, 6 aa, synthetic construct
PLEIWY

SEQ ID NO: 21830 - protein, 6 aa, synthetic construct
PLEIYD

SEQ ID NO: 21831 - protein, 6 aa, synthetic construct
PLEIYE

SEQ ID NO: 21832 - protein, 6 aa, synthetic construct
PLEIYF

SEQ ID NO: 21833 - protein, 6 aa, synthetic construct
PLEIYW

SEQ ID NO: 21834 - protein, 6 aa, synthetic construct
PLEIYY

SEQ ID NO: 21835 - protein, 6 aa, synthetic construct
PLEIVD

SEQ ID NO: 21836 - protein, 6 aa, synthetic construct
PLEIVE

SEQ ID NO: 21837 - protein, 6 aa, synthetic construct
PLEIVF

SEQ ID NO: 21838 - protein, 6 aa, synthetic construct
PLEIVW

SEQ ID NO: 21839 - protein, 6 aa, synthetic construct
PLEIVY

SEQ ID NO: 21840 - protein, 6 aa, synthetic construct
PLELAD

SEQ ID NO: 21841 - protein, 6 aa, synthetic construct
PLELAE

SEQ ID NO: 21842 - protein, 6 aa, synthetic construct
PLELAF

SEQ ID NO: 21843 - protein, 6 aa, synthetic construct
PLELAW

SEQ ID NO: 21844 - protein, 6 aa, synthetic construct
PLELAY

SEQ ID NO: 21845 - protein, 6 aa, synthetic construct
PLELRD

SEQ ID NO: 21846 - protein, 6 aa, synthetic construct
PLELRE

SEQ ID NO: 21847 - protein, 6 aa, synthetic construct
PLELRF

SEQ ID NO: 21848 - protein, 6 aa, synthetic construct
PLELRW

SEQ ID NO: 21849 - protein, 6 aa, synthetic construct
PLELRY

SEQ ID NO: 21850 - protein, 6 aa, synthetic construct
PLELND

SEQ ID NO: 21851 - protein, 6 aa, synthetic construct
PLELNE

SEQ ID NO: 21852 - protein, 6 aa, synthetic construct
PLELNF

SEQ ID NO: 21853 - protein, 6 aa, synthetic construct
PLELNW

SEQ ID NO: 21854 - protein, 6 aa, synthetic construct
PLELNY

SEQ ID NO: 21855 - protein, 6 aa, synthetic construct
PLELDD

SEQ ID NO: 21856 - protein, 6 aa, synthetic construct
PLELDE

SEQ ID NO: 21857 - protein, 6 aa, synthetic construct
PLELDF

SEQ ID NO: 21858 - protein, 6 aa, synthetic construct
PLELDW

SEQ ID NO: 21859 - protein, 6 aa, synthetic construct
PLELDY

SEQ ID NO: 21860 - protein, 6 aa, synthetic construct
PLELCD

SEQ ID NO: 21861 - protein, 6 aa, synthetic construct
PLELCE

SEQ ID NO: 21862 - protein, 6 aa, synthetic construct
PLELCF

SEQ ID NO: 21863 - protein, 6 aa, synthetic construct
PLELCW

SEQ ID NO: 21864 - protein, 6 aa, synthetic construct
PLELCY

SEQ ID NO: 21865 - protein, 6 aa, synthetic construct
PLELQD

SEQ ID NO: 21866 - protein, 6 aa, synthetic construct
PLELQE

SEQ ID NO: 21867 - protein, 6 aa, synthetic construct
PLELQF

SEQ ID NO: 21868 - protein, 6 aa, synthetic construct
PLELQW

SEQ ID NO: 21869 - protein, 6 aa, synthetic construct
PLELQY

SEQ ID NO: 21870 - protein, 6 aa, synthetic construct
PLELED

SEQ ID NO: 21871 - protein, 6 aa, synthetic construct
PLELEE

SEQ ID NO: 21872 - protein, 6 aa, synthetic construct
PLELEF

SEQ ID NO: 21873 - protein, 6 aa, synthetic construct
PLELEW

SEQ ID NO: 21874 - protein, 6 aa, synthetic construct
PLELEY

SEQ ID NO: 21875 - protein, 6 aa, synthetic construct
PLELGD

SEQ ID NO: 21876 - protein, 6 aa, synthetic construct
PLELGE

SEQ ID NO: 21877 - protein, 6 aa, synthetic construct
PLELGF

SEQ ID NO: 21878 - protein, 6 aa, synthetic construct
PLELGW

SEQ ID NO: 21879 - protein, 6 aa, synthetic construct
PLELGY

SEQ ID NO: 21880 - protein, 6 aa, synthetic construct
PLELHD

SEQ ID NO: 21881 - protein, 6 aa, synthetic construct
PLELHE

SEQ ID NO: 21882 - protein, 6 aa, synthetic construct
PLELHF

SEQ ID NO: 21883 - protein, 6 aa, synthetic construct
PLELHW

SEQ ID NO: 21884 - protein, 6 aa, synthetic construct
PLELHY

SEQ ID NO: 21885 - protein, 6 aa, synthetic construct
PLELID

SEQ ID NO: 21886 - protein, 6 aa, synthetic construct
PLELIE

SEQ ID NO: 21887 - protein, 6 aa, synthetic construct
PLELIF

SEQ ID NO: 21888 - protein, 6 aa, synthetic construct
PLELIW

SEQ ID NO: 21889 - protein, 6 aa, synthetic construct
PLELIY

SEQ ID NO: 21890 - protein, 6 aa, synthetic construct
PLELLD

SEQ ID NO: 21891 - protein, 6 aa, synthetic construct
PLELLE

SEQ ID NO: 21892 - protein, 6 aa, synthetic construct
PLELLF

SEQ ID NO: 21893 - protein, 6 aa, synthetic construct
PLELLW

SEQ ID NO: 21894 - protein, 6 aa, synthetic construct
PLELLY

SEQ ID NO: 21895 - protein, 6 aa, synthetic construct
PLELKD

SEQ ID NO: 21896 - protein, 6 aa, synthetic construct
PLELKE

SEQ ID NO: 21897 - protein, 6 aa, synthetic construct
PLELKF

SEQ ID NO: 21898 - protein, 6 aa, synthetic construct
PLELKW

SEQ ID NO: 21899 - protein, 6 aa, synthetic construct
PLELKY

SEQ ID NO: 21900 - protein, 6 aa, synthetic construct
PLELMD

SEQ ID NO: 21901 - protein, 6 aa, synthetic construct
PLELME

SEQ ID NO: 21902 - protein, 6 aa, synthetic construct
PLELMF

SEQ ID NO: 21903 - protein, 6 aa, synthetic construct
PLELMW

SEQ ID NO: 21904 - protein, 6 aa, synthetic construct
PLELMY

SEQ ID NO: 21905 - protein, 6 aa, synthetic construct
PLELFD

SEQ ID NO: 21906 - protein, 6 aa, synthetic construct
PLELFE

SEQ ID NO: 21907 - protein, 6 aa, synthetic construct
PLELFF

SEQ ID NO: 21908 - protein, 6 aa, synthetic construct
PLELFW

SEQ ID NO: 21909 - protein, 6 aa, synthetic construct
PLELFY

SEQ ID NO: 21910 - protein, 6 aa, synthetic construct
PLELPD

SEQ ID NO: 21911 - protein, 6 aa, synthetic construct
PLELPE

SEQ ID NO: 21912 - protein, 6 aa, synthetic construct
PLELPF

SEQ ID NO: 21913 - protein, 6 aa, synthetic construct
PLELPW

SEQ ID NO: 21914 - protein, 6 aa, synthetic construct
PLELPY

SEQ ID NO: 21915 - protein, 6 aa, synthetic construct
PLELSD

SEQ ID NO: 21916 - protein, 6 aa, synthetic construct
PLELSE

SEQ ID NO: 21917 - protein, 6 aa, synthetic construct
PLELSF

SEQ ID NO: 21918 - protein, 6 aa, synthetic construct
PLELSW

SEQ ID NO: 21919 - protein, 6 aa, synthetic construct
PLELSY

SEQ ID NO: 21920 - protein, 6 aa, synthetic construct
PLELTD

SEQ ID NO: 21921 - protein, 6 aa, synthetic construct
PLELTE

SEQ ID NO: 21922 - protein, 6 aa, synthetic construct
PLELTF

SEQ ID NO: 21923 - protein, 6 aa, synthetic construct
PLELTW

SEQ ID NO: 21924 - protein, 6 aa, synthetic construct
PLELTY

SEQ ID NO: 21925 - protein, 6 aa, synthetic construct
PLELWD

SEQ ID NO: 21926 - protein, 6 aa, synthetic construct
PLELWE

SEQ ID NO: 21927 - protein, 6 aa, synthetic construct
PLELWF

SEQ ID NO: 21928 - protein, 6 aa, synthetic construct
PLELWW

SEQ ID NO: 21929 - protein, 6 aa, synthetic construct
PLELWY

SEQ ID NO: 21930 - protein, 6 aa, synthetic construct
PLELYD

SEQ ID NO: 21931 - protein, 6 aa, synthetic construct
PLELYE

SEQ ID NO: 21932 - protein, 6 aa, synthetic construct
PLELYF

SEQ ID NO: 21933 - protein, 6 aa, synthetic construct
PLELYW

SEQ ID NO: 21934 - protein, 6 aa, synthetic construct
PLELYY

SEQ ID NO: 21935 - protein, 6 aa, synthetic construct
PLELVD

SEQ ID NO: 21936 - protein, 6 aa, synthetic construct
PLELVE

SEQ ID NO: 21937 - protein, 6 aa, synthetic construct
PLELVF

SEQ ID NO: 21938 - protein, 6 aa, synthetic construct
PLELVW

SEQ ID NO: 21939 - protein, 6 aa, synthetic construct
PLELVY

SEQ ID NO: 21940 - protein, 6 aa, synthetic construct
PLEKAD

SEQ ID NO: 21941 - protein, 6 aa, synthetic construct
PLEKAE

SEQ ID NO: 21942 - protein, 6 aa, synthetic construct
PLEKAF

SEQ ID NO: 21943 - protein, 6 aa, synthetic construct
PLEKAW

SEQ ID NO: 21944 - protein, 6 aa, synthetic construct
PLEKAY

SEQ ID NO: 21945 - protein, 6 aa, synthetic construct
PLEKRD

SEQ ID NO: 21946 - protein, 6 aa, synthetic construct
PLEKRE

SEQ ID NO: 21947 - protein, 6 aa, synthetic construct
PLEKRF

SEQ ID NO: 21948 - protein, 6 aa, synthetic construct
PLEKRW

SEQ ID NO: 21949 - protein, 6 aa, synthetic construct
PLEKRY

SEQ ID NO: 21950 - protein, 6 aa, synthetic construct
PLEKND

SEQ ID NO: 21951 - protein, 6 aa, synthetic construct
PLEKNE

SEQ ID NO: 21952 - protein, 6 aa, synthetic construct
PLEKNF

SEQ ID NO: 21953 - protein, 6 aa, synthetic construct
PLEKNW

SEQ ID NO: 21954 - protein, 6 aa, synthetic construct
PLEKNY

SEQ ID NO: 21955 - protein, 6 aa, synthetic construct
PLEKDD

SEQ ID NO: 21956 - protein, 6 aa, synthetic construct
PLEKDE

SEQ ID NO: 21957 - protein, 6 aa, synthetic construct
PLEKDF

SEQ ID NO: 21958 - protein, 6 aa, synthetic construct
PLEKDW

SEQ ID NO: 21959 - protein, 6 aa, synthetic construct
PLEKDY

SEQ ID NO: 21960 - protein, 6 aa, synthetic construct
PLEKCD

SEQ ID NO: 21961 - protein, 6 aa, synthetic construct
PLEKCE

SEQ ID NO: 21962 - protein, 6 aa, synthetic construct
PLEKCF

SEQ ID NO: 21963 - protein, 6 aa, synthetic construct
PLEKCW

SEQ ID NO: 21964 - protein, 6 aa, synthetic construct
PLEKCY

SEQ ID NO: 21965 - protein, 6 aa, synthetic construct
PLEKQD

SEQ ID NO: 21966 - protein, 6 aa, synthetic construct
PLEKQE

SEQ ID NO: 21967 - protein, 6 aa, synthetic construct
PLEKQF

SEQ ID NO: 21968 - protein, 6 aa, synthetic construct
PLEKQW

SEQ ID NO: 21969 - protein, 6 aa, synthetic construct
PLEKQY

SEQ ID NO: 21970 - protein, 6 aa, synthetic construct
PLEKED

SEQ ID NO: 21971 - protein, 6 aa, synthetic construct
PLEKEE

SEQ ID NO: 21972 - protein, 6 aa, synthetic construct
PLEKEF

SEQ ID NO: 21973 - protein, 6 aa, synthetic construct
PLEKEW

SEQ ID NO: 21974 - protein, 6 aa, synthetic construct
PLEKEY

SEQ ID NO: 21975 - protein, 6 aa, synthetic construct
PLEKGD

SEQ ID NO: 21976 - protein, 6 aa, synthetic construct
PLEKGE

SEQ ID NO: 21977 - protein, 6 aa, synthetic construct
PLEKGF

SEQ ID NO: 21978 - protein, 6 aa, synthetic construct
PLEKGW

SEQ ID NO: 21979 - protein, 6 aa, synthetic construct
PLEKGY

SEQ ID NO: 21980 - protein, 6 aa, synthetic construct
PLEKHD

SEQ ID NO: 21981 - protein, 6 aa, synthetic construct
PLEKHE

SEQ ID NO: 21982 - protein, 6 aa, synthetic construct
PLEKHF

SEQ ID NO: 21983 - protein, 6 aa, synthetic construct
PLEKHW

SEQ ID NO: 21984 - protein, 6 aa, synthetic construct
PLEKHY

SEQ ID NO: 21985 - protein, 6 aa, synthetic construct
PLEKID

SEQ ID NO: 21986 - protein, 6 aa, synthetic construct
PLEKIE

SEQ ID NO: 21987 - protein, 6 aa, synthetic construct
PLEKIF

SEQ ID NO: 21988 - protein, 6 aa, synthetic construct
PLEKIW

SEQ ID NO: 21989 - protein, 6 aa, synthetic construct
PLEKIY

SEQ ID NO: 21990 - protein, 6 aa, synthetic construct
PLEKLD

SEQ ID NO: 21991 - protein, 6 aa, synthetic construct
PLEKLE

SEQ ID NO: 21992 - protein, 6 aa, synthetic construct
PLEKLF

SEQ ID NO: 21993 - protein, 6 aa, synthetic construct
PLEKLW

SEQ ID NO: 21994 - protein, 6 aa, synthetic construct
PLEKLY

SEQ ID NO: 21995 - protein, 6 aa, synthetic construct
PLEKKD

SEQ ID NO: 21996 - protein, 6 aa, synthetic construct
PLEKKE

SEQ ID NO: 21997 - protein, 6 aa, synthetic construct
PLEKKF

SEQ ID NO: 21998 - protein, 6 aa, synthetic construct
PLEKKW

SEQ ID NO: 21999 - protein, 6 aa, synthetic construct
PLEKKY

SEQ ID NO: 22000 - protein, 6 aa, synthetic construct
PLEKMD

SEQ ID NO: 22001 - protein, 6 aa, synthetic construct
PLEKME

SEQ ID NO: 22002 - protein, 6 aa, synthetic construct
PLEKMF

SEQ ID NO: 22003 - protein, 6 aa, synthetic construct
PLEKMW

SEQ ID NO: 22004 - protein, 6 aa, synthetic construct
PLEKMY

SEQ ID NO: 22005 - protein, 6 aa, synthetic construct
PLEKFD

SEQ ID NO: 22006 - protein, 6 aa, synthetic construct
PLEKFE

SEQ ID NO: 22007 - protein, 6 aa, synthetic construct
PLEKFF

SEQ ID NO: 22008 - protein, 6 aa, synthetic construct
PLEKFW

SEQ ID NO: 22009 - protein, 6 aa, synthetic construct
PLEKFY

SEQ ID NO: 22010 - protein, 6 aa, synthetic construct
PLEKPD

SEQ ID NO: 22011 - protein, 6 aa, synthetic construct
PLEKPE

SEQ ID NO: 22012 - protein, 6 aa, synthetic construct
PLEKPF

SEQ ID NO: 22013 - protein, 6 aa, synthetic construct
PLEKPW

SEQ ID NO: 22014 - protein, 6 aa, synthetic construct
PLEKPY

SEQ ID NO: 22015 - protein, 6 aa, synthetic construct
PLEKSD

SEQ ID NO: 22016 - protein, 6 aa, synthetic construct
PLEKSE

SEQ ID NO: 22017 - protein, 6 aa, synthetic construct
PLEKSF

SEQ ID NO: 22018 - protein, 6 aa, synthetic construct
PLEKSW

SEQ ID NO: 22019 - protein, 6 aa, synthetic construct
PLEKSY

SEQ ID NO: 22020 - protein, 6 aa, synthetic construct
PLEKTD

SEQ ID NO: 22021 - protein, 6 aa, synthetic construct
PLEKTE

SEQ ID NO: 22022 - protein, 6 aa, synthetic construct
PLEKTF

SEQ ID NO: 22023 - protein, 6 aa, synthetic construct
PLEKTW

SEQ ID NO: 22024 - protein, 6 aa, synthetic construct
PLEKTY

SEQ ID NO: 22025 - protein, 6 aa, synthetic construct
PLEKWD

SEQ ID NO: 22026 - protein, 6 aa, synthetic construct
PLEKWE

SEQ ID NO: 22027 - protein, 6 aa, synthetic construct
PLEKWF

SEQ ID NO: 22028 - protein, 6 aa, synthetic construct
PLEKWW

SEQ ID NO: 22029 - protein, 6 aa, synthetic construct
PLEKWY

SEQ ID NO: 22030 - protein, 6 aa, synthetic construct
PLEKYD

SEQ ID NO: 22031 - protein, 6 aa, synthetic construct
PLEKYE

SEQ ID NO: 22032 - protein, 6 aa, synthetic construct
PLEKYF

SEQ ID NO: 22033 - protein, 6 aa, synthetic construct
PLEKYW

SEQ ID NO: 22034 - protein, 6 aa, synthetic construct
PLEKYY

SEQ ID NO: 22035 - protein, 6 aa, synthetic construct
PLEKVD

SEQ ID NO: 22036 - protein, 6 aa, synthetic construct
PLEKVE

SEQ ID NO: 22037 - protein, 6 aa, synthetic construct
PLEKVF

SEQ ID NO: 22038 - protein, 6 aa, synthetic construct
PLEKVW

SEQ ID NO: 22039 - protein, 6 aa, synthetic construct
PLEKVY

SEQ ID NO: 22040 - protein, 6 aa, synthetic construct
PLEMAD

SEQ ID NO: 22041 - protein, 6 aa, synthetic construct
PLEMAE

SEQ ID NO: 22042 - protein, 6 aa, synthetic construct
PLEMAF

SEQ ID NO: 22043 - protein, 6 aa, synthetic construct
PLEMAW

SEQ ID NO: 22044 - protein, 6 aa, synthetic construct
PLEMAY

SEQ ID NO: 22045 - protein, 6 aa, synthetic construct
PLEMRD

SEQ ID NO: 22046 - protein, 6 aa, synthetic construct
PLEMRE

SEQ ID NO: 22047 - protein, 6 aa, synthetic construct
PLEMRF

SEQ ID NO: 22048 - protein, 6 aa, synthetic construct
PLEMRW

SEQ ID NO: 22049 - protein, 6 aa, synthetic construct
PLEMRY

SEQ ID NO: 22050 - protein, 6 aa, synthetic construct
PLEMND

SEQ ID NO: 22051 - protein, 6 aa, synthetic construct
PLEMNE

SEQ ID NO: 22052 - protein, 6 aa, synthetic construct
PLEMNF

SEQ ID NO: 22053 - protein, 6 aa, synthetic construct
PLEMNW

SEQ ID NO: 22054 - protein, 6 aa, synthetic construct
PLEMNY

SEQ ID NO: 22055 - protein, 6 aa, synthetic construct
PLEMDD

SEQ ID NO: 22056 - protein, 6 aa, synthetic construct
PLEMDE

SEQ ID NO: 22057 - protein, 6 aa, synthetic construct
PLEMDF

SEQ ID NO: 22058 - protein, 6 aa, synthetic construct
PLEMDW

SEQ ID NO: 22059 - protein, 6 aa, synthetic construct
PLEMDY

SEQ ID NO: 22060 - protein, 6 aa, synthetic construct
PLEMCD

SEQ ID NO: 22061 - protein, 6 aa, synthetic construct
PLEMCE

SEQ ID NO: 22062 - protein, 6 aa, synthetic construct
PLEMCF

SEQ ID NO: 22063 - protein, 6 aa, synthetic construct
PLEMCW

SEQ ID NO: 22064 - protein, 6 aa, synthetic construct
PLEMCY

SEQ ID NO: 22065 - protein, 6 aa, synthetic construct
PLEMQD

SEQ ID NO: 22066 - protein, 6 aa, synthetic construct
PLEMQE

SEQ ID NO: 22067 - protein, 6 aa, synthetic construct
PLEMQF

SEQ ID NO: 22068 - protein, 6 aa, synthetic construct
PLEMQW

SEQ ID NO: 22069 - protein, 6 aa, synthetic construct
PLEMQY

SEQ ID NO: 22070 - protein, 6 aa, synthetic construct
PLEMED

SEQ ID NO: 22071 - protein, 6 aa, synthetic construct
PLEMEE

SEQ ID NO: 22072 - protein, 6 aa, synthetic construct
PLEMEF

SEQ ID NO: 22073 - protein, 6 aa, synthetic construct
PLEMEW

SEQ ID NO: 22074 - protein, 6 aa, synthetic construct
PLEMEY

SEQ ID NO: 22075 - protein, 6 aa, synthetic construct
PLEMGD

SEQ ID NO: 22076 - protein, 6 aa, synthetic construct
PLEMGE

SEQ ID NO: 22077 - protein, 6 aa, synthetic construct
PLEMGF

SEQ ID NO: 22078 - protein, 6 aa, synthetic construct
PLEMGW

SEQ ID NO: 22079 - protein, 6 aa, synthetic construct
PLEMGY

SEQ ID NO: 22080 - protein, 6 aa, synthetic construct
PLEMHD

SEQ ID NO: 22081 - protein, 6 aa, synthetic construct
PLEMHE

SEQ ID NO: 22082 - protein, 6 aa, synthetic construct
PLEMHF

SEQ ID NO: 22083 - protein, 6 aa, synthetic construct
PLEMHW

SEQ ID NO: 22084 - protein, 6 aa, synthetic construct
PLEMHY

SEQ ID NO: 22085 - protein, 6 aa, synthetic construct
PLEMID

SEQ ID NO: 22086 - protein, 6 aa, synthetic construct
PLEMIE

SEQ ID NO: 22087 - protein, 6 aa, synthetic construct
PLEMIF

SEQ ID NO: 22088 - protein, 6 aa, synthetic construct
PLEMIW

SEQ ID NO: 22089 - protein, 6 aa, synthetic construct
PLEMIY

SEQ ID NO: 22090 - protein, 6 aa, synthetic construct
PLEMLD

SEQ ID NO: 22091 - protein, 6 aa, synthetic construct
PLEMLE

SEQ ID NO: 22092 - protein, 6 aa, synthetic construct
PLEMLF

SEQ ID NO: 22093 - protein, 6 aa, synthetic construct
PLEMLW

SEQ ID NO: 22094 - protein, 6 aa, synthetic construct
PLEMLY

SEQ ID NO: 22095 - protein, 6 aa, synthetic construct
PLEMKD

SEQ ID NO: 22096 - protein, 6 aa, synthetic construct
PLEMKE

SEQ ID NO: 22097 - protein, 6 aa, synthetic construct
PLEMKF

SEQ ID NO: 22098 - protein, 6 aa, synthetic construct
PLEMKW

SEQ ID NO: 22099 - protein, 6 aa, synthetic construct
PLEMKY

SEQ ID NO: 22100 - protein, 6 aa, synthetic construct
PLEMMD

SEQ ID NO: 22101 - protein, 6 aa, synthetic construct
PLEMME

SEQ ID NO: 22102 - protein, 6 aa, synthetic construct
PLEMMF

SEQ ID NO: 22103 - protein, 6 aa, synthetic construct
PLEMMW

SEQ ID NO: 22104 - protein, 6 aa, synthetic construct
PLEMMY

SEQ ID NO: 22105 - protein, 6 aa, synthetic construct
PLEMFD

SEQ ID NO: 22106 - protein, 6 aa, synthetic construct
PLEMFE

SEQ ID NO: 22107 - protein, 6 aa, synthetic construct
PLEMFF

SEQ ID NO: 22108 - protein, 6 aa, synthetic construct
PLEMFW

SEQ ID NO: 22109 - protein, 6 aa, synthetic construct
PLEMFY

SEQ ID NO: 22110 - protein, 6 aa, synthetic construct
PLEMPD

SEQ ID NO: 22111 - protein, 6 aa, synthetic construct
PLEMPE

SEQ ID NO: 22112 - protein, 6 aa, synthetic construct
PLEMPF

SEQ ID NO: 22113 - protein, 6 aa, synthetic construct
PLEMPW

SEQ ID NO: 22114 - protein, 6 aa, synthetic construct
PLEMPY

SEQ ID NO: 22115 - protein, 6 aa, synthetic construct
PLEMSD

SEQ ID NO: 22116 - protein, 6 aa, synthetic construct
PLEMSE

SEQ ID NO: 22117 - protein, 6 aa, synthetic construct
PLEMSF

SEQ ID NO: 22118 - protein, 6 aa, synthetic construct
PLEMSW

SEQ ID NO: 22119 - protein, 6 aa, synthetic construct
PLEMSY

SEQ ID NO: 22120 - protein, 6 aa, synthetic construct
PLEMTD

SEQ ID NO: 22121 - protein, 6 aa, synthetic construct
PLEMTE

SEQ ID NO: 22122 - protein, 6 aa, synthetic construct
PLEMTF

SEQ ID NO: 22123 - protein, 6 aa, synthetic construct
PLEMTW

SEQ ID NO: 22124 - protein, 6 aa, synthetic construct
PLEMTY

SEQ ID NO: 22125 - protein, 6 aa, synthetic construct
PLEMWD

SEQ ID NO: 22126 - protein, 6 aa, synthetic construct
PLEMWE

SEQ ID NO: 22127 - protein, 6 aa, synthetic construct
PLEMWF

SEQ ID NO: 22128 - protein, 6 aa, synthetic construct
PLEMWW

SEQ ID NO: 22129 - protein, 6 aa, synthetic construct
PLEMWY

SEQ ID NO: 22130 - protein, 6 aa, synthetic construct
PLEMYD

SEQ ID NO: 22131 - protein, 6 aa, synthetic construct
PLEMYE

SEQ ID NO: 22132 - protein, 6 aa, synthetic construct
PLEMYF

SEQ ID NO: 22133 - protein, 6 aa, synthetic construct
PLEMYW

SEQ ID NO: 22134 - protein, 6 aa, synthetic construct
PLEMYY

SEQ ID NO: 22135 - protein, 6 aa, synthetic construct
PLEMVD

SEQ ID NO: 22136 - protein, 6 aa, synthetic construct
PLEMVE

SEQ ID NO: 22137 - protein, 6 aa, synthetic construct
PLEMVF

SEQ ID NO: 22138 - protein, 6 aa, synthetic construct
PLEMVW

SEQ ID NO: 22139 - protein, 6 aa, synthetic construct
PLEMVY

SEQ ID NO: 22140 - protein, 6 aa, synthetic construct
PLEFAD

SEQ ID NO: 22141 - protein, 6 aa, synthetic construct
PLEFAE

SEQ ID NO: 22142 - protein, 6 aa, synthetic construct
PLEFAF

SEQ ID NO: 22143 - protein, 6 aa, synthetic construct
PLEFAW

SEQ ID NO: 22144 - protein, 6 aa, synthetic construct
PLEFAY

SEQ ID NO: 22145 - protein, 6 aa, synthetic construct
PLEFRD

SEQ ID NO: 22146 - protein, 6 aa, synthetic construct
PLEFRE

SEQ ID NO: 22147 - protein, 6 aa, synthetic construct
PLEFRF

SEQ ID NO: 22148 - protein, 6 aa, synthetic construct
PLEFRW

SEQ ID NO: 22149 - protein, 6 aa, synthetic construct
PLEFRY

SEQ ID NO: 22150 - protein, 6 aa, synthetic construct
PLEFND

SEQ ID NO: 22151 - protein, 6 aa, synthetic construct
PLEFNE

SEQ ID NO: 22152 - protein, 6 aa, synthetic construct
PLEFNF

SEQ ID NO: 22153 - protein, 6 aa, synthetic construct
PLEFNW

SEQ ID NO: 22154 - protein, 6 aa, synthetic construct
PLEFNY

SEQ ID NO: 22155 - protein, 6 aa, synthetic construct
PLEFDD

SEQ ID NO: 22156 - protein, 6 aa, synthetic construct
PLEFDE

SEQ ID NO: 22157 - protein, 6 aa, synthetic construct
PLEFDF

SEQ ID NO: 22158 - protein, 6 aa, synthetic construct
PLEFDW

SEQ ID NO: 22159 - protein, 6 aa, synthetic construct
PLEFDY

SEQ ID NO: 22160 - protein, 6 aa, synthetic construct
PLEFCD

SEQ ID NO: 22161 - protein, 6 aa, synthetic construct
PLEFCE

SEQ ID NO: 22162 - protein, 6 aa, synthetic construct
PLEFCF

SEQ ID NO: 22163 - protein, 6 aa, synthetic construct
PLEFCW

SEQ ID NO: 22164 - protein, 6 aa, synthetic construct
PLEFCY

SEQ ID NO: 22165 - protein, 6 aa, synthetic construct
PLEFQD

SEQ ID NO: 22166 - protein, 6 aa, synthetic construct
PLEFQE

SEQ ID NO: 22167 - protein, 6 aa, synthetic construct
PLEFQF

SEQ ID NO: 22168 - protein, 6 aa, synthetic construct
PLEFQW

SEQ ID NO: 22169 - protein, 6 aa, synthetic construct
PLEFQY

SEQ ID NO: 22170 - protein, 6 aa, synthetic construct
PLEFED

SEQ ID NO: 22171 - protein, 6 aa, synthetic construct
PLEFEE

SEQ ID NO: 22172 - protein, 6 aa, synthetic construct
PLEFEF

SEQ ID NO: 22173 - protein, 6 aa, synthetic construct
PLEFEW

SEQ ID NO: 22174 - protein, 6 aa, synthetic construct
PLEFEY

SEQ ID NO: 22175 - protein, 6 aa, synthetic construct
PLEFGD

SEQ ID NO: 22176 - protein, 6 aa, synthetic construct
PLEFGE

SEQ ID NO: 22177 - protein, 6 aa, synthetic construct
PLEFGF

SEQ ID NO: 22178 - protein, 6 aa, synthetic construct
PLEFGW

SEQ ID NO: 22179 - protein, 6 aa, synthetic construct
PLEFGY

SEQ ID NO: 22180 - protein, 6 aa, synthetic construct
PLEFHD

SEQ ID NO: 22181 - protein, 6 aa, synthetic construct
PLEFHE

SEQ ID NO: 22182 - protein, 6 aa, synthetic construct
PLEFHF

SEQ ID NO: 22183 - protein, 6 aa, synthetic construct
PLEFHW

SEQ ID NO: 22184 - protein, 6 aa, synthetic construct
PLEFHY

SEQ ID NO: 22185 - protein, 6 aa, synthetic construct
PLEFID

SEQ ID NO: 22186 - protein, 6 aa, synthetic construct
PLEFIE

SEQ ID NO: 22187 - protein, 6 aa, synthetic construct
PLEFIF

SEQ ID NO: 22188 - protein, 6 aa, synthetic construct
PLEFIW

SEQ ID NO: 22189 - protein, 6 aa, synthetic construct
PLEFIY

SEQ ID NO: 22190 - protein, 6 aa, synthetic construct
PLEFLD

SEQ ID NO: 22191 - protein, 6 aa, synthetic construct
PLEFLE

SEQ ID NO: 22192 - protein, 6 aa, synthetic construct
PLEFLF

SEQ ID NO: 22193 - protein, 6 aa, synthetic construct
PLEFLW

SEQ ID NO: 22194 - protein, 6 aa, synthetic construct
PLEFLY

SEQ ID NO: 22195 - protein, 6 aa, synthetic construct
PLEFKD

SEQ ID NO: 22196 - protein, 6 aa, synthetic construct
PLEFKE

SEQ ID NO: 22197 - protein, 6 aa, synthetic construct
PLEFKF

SEQ ID NO: 22198 - protein, 6 aa, synthetic construct
PLEFKW

SEQ ID NO: 22199 - protein, 6 aa, synthetic construct
PLEFKY

SEQ ID NO: 22200 - protein, 6 aa, synthetic construct
PLEFMD

SEQ ID NO: 22201 - protein, 6 aa, synthetic construct
PLEFME

SEQ ID NO: 22202 - protein, 6 aa, synthetic construct
PLEFMF

SEQ ID NO: 22203 - protein, 6 aa, synthetic construct
PLEFMW

SEQ ID NO: 22204 - protein, 6 aa, synthetic construct
PLEFMY

SEQ ID NO: 22205 - protein, 6 aa, synthetic construct
PLEFFD

SEQ ID NO: 22206 - protein, 6 aa, synthetic construct
PLEFFE

SEQ ID NO: 22207 - protein, 6 aa, synthetic construct
PLEFFF

SEQ ID NO: 22208 - protein, 6 aa, synthetic construct
PLEFFW

SEQ ID NO: 22209 - protein, 6 aa, synthetic construct
PLEFFY

SEQ ID NO: 22210 - protein, 6 aa, synthetic construct
PLEFPD

SEQ ID NO: 22211 - protein, 6 aa, synthetic construct
PLEFPE

SEQ ID NO: 22212 - protein, 6 aa, synthetic construct
PLEFPF

SEQ ID NO: 22213 - protein, 6 aa, synthetic construct
PLEFPW

SEQ ID NO: 22214 - protein, 6 aa, synthetic construct
PLEFPY

SEQ ID NO: 22215 - protein, 6 aa, synthetic construct
PLEFSD

SEQ ID NO: 22216 - protein, 6 aa, synthetic construct
PLEFSE

SEQ ID NO: 22217 - protein, 6 aa, synthetic construct
PLEFSF

SEQ ID NO: 22218 - protein, 6 aa, synthetic construct
PLEFSW

SEQ ID NO: 22219 - protein, 6 aa, synthetic construct
PLEFSY

SEQ ID NO: 22220 - protein, 6 aa, synthetic construct
PLEFTD

SEQ ID NO: 22221 - protein, 6 aa, synthetic construct
PLEFTE

SEQ ID NO: 22222 - protein, 6 aa, synthetic construct
PLEFTF

SEQ ID NO: 22223 - protein, 6 aa, synthetic construct
PLEFTW

SEQ ID NO: 22224 - protein, 6 aa, synthetic construct
PLEFTY

SEQ ID NO: 22225 - protein, 6 aa, synthetic construct
PLEFWD

SEQ ID NO: 22226 - protein, 6 aa, synthetic construct
PLEFWE

SEQ ID NO: 22227 - protein, 6 aa, synthetic construct
PLEFWF

SEQ ID NO: 22228 - protein, 6 aa, synthetic construct
PLEFWW

SEQ ID NO: 22229 - protein, 6 aa, synthetic construct
PLEFWY

SEQ ID NO: 22230 - protein, 6 aa, synthetic construct
PLEFYD

SEQ ID NO: 22231 - protein, 6 aa, synthetic construct
PLEFYE

SEQ ID NO: 22232 - protein, 6 aa, synthetic construct
PLEFYF

SEQ ID NO: 22233 - protein, 6 aa, synthetic construct
PLEFYW

SEQ ID NO: 22234 - protein, 6 aa, synthetic construct
PLEFYY

SEQ ID NO: 22235 - protein, 6 aa, synthetic construct
PLEFVD

SEQ ID NO: 22236 - protein, 6 aa, synthetic construct
PLEFVE

SEQ ID NO: 22237 - protein, 6 aa, synthetic construct
PLEFVF

SEQ ID NO: 22238 - protein, 6 aa, synthetic construct
PLEFVW

SEQ ID NO: 22239 - protein, 6 aa, synthetic construct
PLEFVY

SEQ ID NO: 22240 - protein, 6 aa, synthetic construct
PLEPAD

SEQ ID NO: 22241 - protein, 6 aa, synthetic construct
PLEPAE

SEQ ID NO: 22242 - protein, 6 aa, synthetic construct
PLEPAF

SEQ ID NO: 22243 - protein, 6 aa, synthetic construct
PLEPAW

SEQ ID NO: 22244 - protein, 6 aa, synthetic construct
PLEPAY

SEQ ID NO: 22245 - protein, 6 aa, synthetic construct
PLEPRD

SEQ ID NO: 22246 - protein, 6 aa, synthetic construct
PLEPRE

SEQ ID NO: 22247 - protein, 6 aa, synthetic construct
PLEPRF

SEQ ID NO: 22248 - protein, 6 aa, synthetic construct
PLEPRW

SEQ ID NO: 22249 - protein, 6 aa, synthetic construct
PLEPRY

SEQ ID NO: 22250 - protein, 6 aa, synthetic construct
PLEPND

SEQ ID NO: 22251 - protein, 6 aa, synthetic construct
PLEPNE

SEQ ID NO: 22252 - protein, 6 aa, synthetic construct
PLEPNF

SEQ ID NO: 22253 - protein, 6 aa, synthetic construct
PLEPNW

SEQ ID NO: 22254 - protein, 6 aa, synthetic construct
PLEPNY

SEQ ID NO: 22255 - protein, 6 aa, synthetic construct
PLEPDD

SEQ ID NO: 22256 - protein, 6 aa, synthetic construct
PLEPDE

SEQ ID NO: 22257 - protein, 6 aa, synthetic construct
PLEPDF

SEQ ID NO: 22258 - protein, 6 aa, synthetic construct
PLEPDW

SEQ ID NO: 22259 - protein, 6 aa, synthetic construct
PLEPDY

SEQ ID NO: 22260 - protein, 6 aa, synthetic construct
PLEPCD

SEQ ID NO: 22261 - protein, 6 aa, synthetic construct
PLEPCE

SEQ ID NO: 22262 - protein, 6 aa, synthetic construct
PLEPCF

SEQ ID NO: 22263 - protein, 6 aa, synthetic construct
PLEPCW

SEQ ID NO: 22264 - protein, 6 aa, synthetic construct
PLEPCY

SEQ ID NO: 22265 - protein, 6 aa, synthetic construct
PLEPQD

SEQ ID NO: 22266 - protein, 6 aa, synthetic construct
PLEPQE

SEQ ID NO: 22267 - protein, 6 aa, synthetic construct
PLEPQF

SEQ ID NO: 22268 - protein, 6 aa, synthetic construct
PLEPQW

SEQ ID NO: 22269 - protein, 6 aa, synthetic construct
PLEPQY

SEQ ID NO: 22270 - protein, 6 aa, synthetic construct
PLEPED

SEQ ID NO: 22271 - protein, 6 aa, synthetic construct
PLEPEE

SEQ ID NO: 22272 - protein, 6 aa, synthetic construct
PLEPEF

SEQ ID NO: 22273 - protein, 6 aa, synthetic construct
PLEPEW

SEQ ID NO: 22274 - protein, 6 aa, synthetic construct
PLEPEY

SEQ ID NO: 22275 - protein, 6 aa, synthetic construct
PLEPGD

SEQ ID NO: 22276 - protein, 6 aa, synthetic construct
PLEPGE

SEQ ID NO: 22277 - protein, 6 aa, synthetic construct
PLEPGF

SEQ ID NO: 22278 - protein, 6 aa, synthetic construct
PLEPGW

SEQ ID NO: 22279 - protein, 6 aa, synthetic construct
PLEPGY

SEQ ID NO: 22280 - protein, 6 aa, synthetic construct
PLEPHD

SEQ ID NO: 22281 - protein, 6 aa, synthetic construct
PLEPHE

SEQ ID NO: 22282 - protein, 6 aa, synthetic construct
PLEPHF

SEQ ID NO: 22283 - protein, 6 aa, synthetic construct
PLEPHW

SEQ ID NO: 22284 - protein, 6 aa, synthetic construct
PLEPHY

SEQ ID NO: 22285 - protein, 6 aa, synthetic construct
PLEPID

SEQ ID NO: 22286 - protein, 6 aa, synthetic construct
PLEPIE

SEQ ID NO: 22287 - protein, 6 aa, synthetic construct
PLEPIF

SEQ ID NO: 22288 - protein, 6 aa, synthetic construct
PLEPIW

SEQ ID NO: 22289 - protein, 6 aa, synthetic construct
PLEPIY

SEQ ID NO: 22290 - protein, 6 aa, synthetic construct
PLEPLD

SEQ ID NO: 22291 - protein, 6 aa, synthetic construct
PLEPLE

SEQ ID NO: 22292 - protein, 6 aa, synthetic construct
PLEPLF

SEQ ID NO: 22293 - protein, 6 aa, synthetic construct
PLEPLW

SEQ ID NO: 22294 - protein, 6 aa, synthetic construct
PLEPLY

SEQ ID NO: 22295 - protein, 6 aa, synthetic construct
PLEPKD

SEQ ID NO: 22296 - protein, 6 aa, synthetic construct
PLEPKE

SEQ ID NO: 22297 - protein, 6 aa, synthetic construct
PLEPKF

SEQ ID NO: 22298 - protein, 6 aa, synthetic construct
PLEPKW

SEQ ID NO: 22299 - protein, 6 aa, synthetic construct
PLEPKY

SEQ ID NO: 22300 - protein, 6 aa, synthetic construct
PLEPMD

SEQ ID NO: 22301 - protein, 6 aa, synthetic construct
PLEPME

SEQ ID NO: 22302 - protein, 6 aa, synthetic construct
PLEPMF

SEQ ID NO: 22303 - protein, 6 aa, synthetic construct
PLEPMW

SEQ ID NO: 22304 - protein, 6 aa, synthetic construct
PLEPMY

SEQ ID NO: 22305 - protein, 6 aa, synthetic construct
PLEPFD

SEQ ID NO: 22306 - protein, 6 aa, synthetic construct
PLEPFE

SEQ ID NO: 22307 - protein, 6 aa, synthetic construct
PLEPFF

SEQ ID NO: 22308 - protein, 6 aa, synthetic construct
PLEPFW

SEQ ID NO: 22309 - protein, 6 aa, synthetic construct
PLEPFY

SEQ ID NO: 22310 - protein, 6 aa, synthetic construct
PLEPPD

SEQ ID NO: 22311 - protein, 6 aa, synthetic construct
PLEPPE

SEQ ID NO: 22312 - protein, 6 aa, synthetic construct
PLEPPF

SEQ ID NO: 22313 - protein, 6 aa, synthetic construct
PLEPPW

SEQ ID NO: 22314 - protein, 6 aa, synthetic construct
PLEPPY

SEQ ID NO: 22315 - protein, 6 aa, synthetic construct
PLEPSD

SEQ ID NO: 22316 - protein, 6 aa, synthetic construct
PLEPSE

SEQ ID NO: 22317 - protein, 6 aa, synthetic construct
PLEPSF

SEQ ID NO: 22318 - protein, 6 aa, synthetic construct
PLEPSW

SEQ ID NO: 22319 - protein, 6 aa, synthetic construct
PLEPSY

SEQ ID NO: 22320 - protein, 6 aa, synthetic construct
PLEPTD

SEQ ID NO: 22321 - protein, 6 aa, synthetic construct
PLEPTE

SEQ ID NO: 22322 - protein, 6 aa, synthetic construct
PLEPTF

SEQ ID NO: 22323 - protein, 6 aa, synthetic construct
PLEPTW

SEQ ID NO: 22324 - protein, 6 aa, synthetic construct
PLEPTY

SEQ ID NO: 22325 - protein, 6 aa, synthetic construct
PLEPWD

SEQ ID NO: 22326 - protein, 6 aa, synthetic construct
PLEPWE

SEQ ID NO: 22327 - protein, 6 aa, synthetic construct
PLEPWF

SEQ ID NO: 22328 - protein, 6 aa, synthetic construct
PLEPWW

SEQ ID NO: 22329 - protein, 6 aa, synthetic construct
PLEPWY

SEQ ID NO: 22330 - protein, 6 aa, synthetic construct
PLEPYD

SEQ ID NO: 22331 - protein, 6 aa, synthetic construct
PLEPYE

SEQ ID NO: 22332 - protein, 6 aa, synthetic construct
PLEPYF

SEQ ID NO: 22333 - protein, 6 aa, synthetic construct
PLEPYW

SEQ ID NO: 22334 - protein, 6 aa, synthetic construct
PLEPYY

SEQ ID NO: 22335 - protein, 6 aa, synthetic construct
PLEPVD

SEQ ID NO: 22336 - protein, 6 aa, synthetic construct
PLEPVE

SEQ ID NO: 22337 - protein, 6 aa, synthetic construct
PLEPVF

SEQ ID NO: 22338 - protein, 6 aa, synthetic construct
PLEPVW

SEQ ID NO: 22339 - protein, 6 aa, synthetic construct
PLEPVY

SEQ ID NO: 22340 - protein, 6 aa, synthetic construct
PLESAD

SEQ ID NO: 22341 - protein, 6 aa, synthetic construct
PLESAE

SEQ ID NO: 22342 - protein, 6 aa, synthetic construct
PLESAF

SEQ ID NO: 22343 - protein, 6 aa, synthetic construct
PLESAW

SEQ ID NO: 22344 - protein, 6 aa, synthetic construct
PLESAY

SEQ ID NO: 22345 - protein, 6 aa, synthetic construct
PLESRD

SEQ ID NO: 22346 - protein, 6 aa, synthetic construct
PLESRE

SEQ ID NO: 22347 - protein, 6 aa, synthetic construct
PLESRF

SEQ ID NO: 22348 - protein, 6 aa, synthetic construct
PLESRW

SEQ ID NO: 22349 - protein, 6 aa, synthetic construct
PLESRY

SEQ ID NO: 22350 - protein, 6 aa, synthetic construct
PLESND

SEQ ID NO: 22351 - protein, 6 aa, synthetic construct
PLESNE

SEQ ID NO: 22352 - protein, 6 aa, synthetic construct
PLESNF

SEQ ID NO: 22353 - protein, 6 aa, synthetic construct
PLESNW

SEQ ID NO: 22354 - protein, 6 aa, synthetic construct
PLESNY

SEQ ID NO: 22355 - protein, 6 aa, synthetic construct
PLESDD

SEQ ID NO: 22356 - protein, 6 aa, synthetic construct
PLESDE

SEQ ID NO: 22357 - protein, 6 aa, synthetic construct
PLESDF

SEQ ID NO: 22358 - protein, 6 aa, synthetic construct
PLESDW

SEQ ID NO: 22359 - protein, 6 aa, synthetic construct
PLESDY

SEQ ID NO: 22360 - protein, 6 aa, synthetic construct
PLESCD

SEQ ID NO: 22361 - protein, 6 aa, synthetic construct
PLESCE

SEQ ID NO: 22362 - protein, 6 aa, synthetic construct
PLESCF

SEQ ID NO: 22363 - protein, 6 aa, synthetic construct
PLESCW

SEQ ID NO: 22364 - protein, 6 aa, synthetic construct
PLESCY

SEQ ID NO: 22365 - protein, 6 aa, synthetic construct
PLESQD

SEQ ID NO: 22366 - protein, 6 aa, synthetic construct
PLESQE

SEQ ID NO: 22367 - protein, 6 aa, synthetic construct
PLESQF

SEQ ID NO: 22368 - protein, 6 aa, synthetic construct
PLESQW

SEQ ID NO: 22369 - protein, 6 aa, synthetic construct
PLESQY

SEQ ID NO: 22370 - protein, 6 aa, synthetic construct
PLESED

SEQ ID NO: 22371 - protein, 6 aa, synthetic construct
PLESEE

SEQ ID NO: 22372 - protein, 6 aa, synthetic construct
PLESEF

SEQ ID NO: 22373 - protein, 6 aa, synthetic construct
PLESEW

SEQ ID NO: 22374 - protein, 6 aa, synthetic construct
PLESEY

SEQ ID NO: 22375 - protein, 6 aa, synthetic construct
PLESGD

SEQ ID NO: 22376 - protein, 6 aa, synthetic construct
PLESGE

SEQ ID NO: 22377 - protein, 6 aa, synthetic construct
PLESGF

SEQ ID NO: 22378 - protein, 6 aa, synthetic construct
PLESGW

SEQ ID NO: 22379 - protein, 6 aa, synthetic construct
PLESGY

SEQ ID NO: 22380 - protein, 6 aa, synthetic construct
PLESHD

SEQ ID NO: 22381 - protein, 6 aa, synthetic construct
PLESHE

SEQ ID NO: 22382 - protein, 6 aa, synthetic construct
PLESHF

SEQ ID NO: 22383 - protein, 6 aa, synthetic construct
PLESHW

SEQ ID NO: 22384 - protein, 6 aa, synthetic construct
PLESHY

SEQ ID NO: 22385 - protein, 6 aa, synthetic construct
PLESID

SEQ ID NO: 22386 - protein, 6 aa, synthetic construct
PLESIE

SEQ ID NO: 22387 - protein, 6 aa, synthetic construct
PLESIF

SEQ ID NO: 22388 - protein, 6 aa, synthetic construct
PLESIW

SEQ ID NO: 22389 - protein, 6 aa, synthetic construct
PLESIY

SEQ ID NO: 22390 - protein, 6 aa, synthetic construct
PLESLD

SEQ ID NO: 22391 - protein, 6 aa, synthetic construct
PLESLE

SEQ ID NO: 22392 - protein, 6 aa, synthetic construct
PLESLF

SEQ ID NO: 22393 - protein, 6 aa, synthetic construct
PLESLW

SEQ ID NO: 22394 - protein, 6 aa, synthetic construct
PLESLY

SEQ ID NO: 22395 - protein, 6 aa, synthetic construct
PLESKD

SEQ ID NO: 22396 - protein, 6 aa, synthetic construct
PLESKE

SEQ ID NO: 22397 - protein, 6 aa, synthetic construct
PLESKF

SEQ ID NO: 22398 - protein, 6 aa, synthetic construct
PLESKW

SEQ ID NO: 22399 - protein, 6 aa, synthetic construct
PLESKY

SEQ ID NO: 22400 - protein, 6 aa, synthetic construct
PLESMD

SEQ ID NO: 22401 - protein, 6 aa, synthetic construct
PLESME

SEQ ID NO: 22402 - protein, 6 aa, synthetic construct
PLESMF

SEQ ID NO: 22403 - protein, 6 aa, synthetic construct
PLESMW

SEQ ID NO: 22404 - protein, 6 aa, synthetic construct
PLESMY

SEQ ID NO: 22405 - protein, 6 aa, synthetic construct
PLESFD

SEQ ID NO: 22406 - protein, 6 aa, synthetic construct
PLESFE

SEQ ID NO: 22407 - protein, 6 aa, synthetic construct
PLESFF

SEQ ID NO: 22408 - protein, 6 aa, synthetic construct
PLESFW

SEQ ID NO: 22409 - protein, 6 aa, synthetic construct
PLESFY

SEQ ID NO: 22410 - protein, 6 aa, synthetic construct
PLESPD

SEQ ID NO: 22411 - protein, 6 aa, synthetic construct
PLESPE

SEQ ID NO: 22412 - protein, 6 aa, synthetic construct
PLESPF

SEQ ID NO: 22413 - protein, 6 aa, synthetic construct
PLESPW

SEQ ID NO: 22414 - protein, 6 aa, synthetic construct
PLESPY

SEQ ID NO: 22415 - protein, 6 aa, synthetic construct
PLESSD

SEQ ID NO: 22416 - protein, 6 aa, synthetic construct
PLESSE

SEQ ID NO: 22417 - protein, 6 aa, synthetic construct
PLESSF

SEQ ID NO: 22418 - protein, 6 aa, synthetic construct
PLESSW

SEQ ID NO: 22419 - protein, 6 aa, synthetic construct
PLESSY

SEQ ID NO: 22420 - protein, 6 aa, synthetic construct
PLESTD

SEQ ID NO: 22421 - protein, 6 aa, synthetic construct
PLESTE

SEQ ID NO: 22422 - protein, 6 aa, synthetic construct
PLESTF

SEQ ID NO: 22423 - protein, 6 aa, synthetic construct
PLESTW

SEQ ID NO: 22424 - protein, 6 aa, synthetic construct
PLESTY

SEQ ID NO: 22425 - protein, 6 aa, synthetic construct
PLESWD

SEQ ID NO: 22426 - protein, 6 aa, synthetic construct
PLESWE

SEQ ID NO: 22427 - protein, 6 aa, synthetic construct
PLESWF

SEQ ID NO: 22428 - protein, 6 aa, synthetic construct
PLESWW

SEQ ID NO: 22429 - protein, 6 aa, synthetic construct
PLESWY

SEQ ID NO: 22430 - protein, 6 aa, synthetic construct
PLESYD

SEQ ID NO: 22431 - protein, 6 aa, synthetic construct
PLESYE

SEQ ID NO: 22432 - protein, 6 aa, synthetic construct
PLESYF

SEQ ID NO: 22433 - protein, 6 aa, synthetic construct
PLESYW

SEQ ID NO: 22434 - protein, 6 aa, synthetic construct
PLESYY

SEQ ID NO: 22435 - protein, 6 aa, synthetic construct
PLESVD

SEQ ID NO: 22436 - protein, 6 aa, synthetic construct
PLESVE

SEQ ID NO: 22437 - protein, 6 aa, synthetic construct
PLESVF

SEQ ID NO: 22438 - protein, 6 aa, synthetic construct
PLESVW

SEQ ID NO: 22439 - protein, 6 aa, synthetic construct
PLESVY

SEQ ID NO: 22440 - protein, 6 aa, synthetic construct
PLETAD

SEQ ID NO: 22441 - protein, 6 aa, synthetic construct
PLETAE

SEQ ID NO: 22442 - protein, 6 aa, synthetic construct
PLETAF

SEQ ID NO: 22443 - protein, 6 aa, synthetic construct
PLETAW

SEQ ID NO: 22444 - protein, 6 aa, synthetic construct
PLETAY

SEQ ID NO: 22445 - protein, 6 aa, synthetic construct
PLETRD

SEQ ID NO: 22446 - protein, 6 aa, synthetic construct
PLETRE

SEQ ID NO: 22447 - protein, 6 aa, synthetic construct
PLETRF

SEQ ID NO: 22448 - protein, 6 aa, synthetic construct
PLETRW

SEQ ID NO: 22449 - protein, 6 aa, synthetic construct
PLETRY

SEQ ID NO: 22450 - protein, 6 aa, synthetic construct
PLETND

SEQ ID NO: 22451 - protein, 6 aa, synthetic construct
PLETNE

SEQ ID NO: 22452 - protein, 6 aa, synthetic construct
PLETNF

SEQ ID NO: 22453 - protein, 6 aa, synthetic construct
PLETNW

SEQ ID NO: 22454 - protein, 6 aa, synthetic construct
PLETNY

SEQ ID NO: 22455 - protein, 6 aa, synthetic construct
PLETDD

SEQ ID NO: 22456 - protein, 6 aa, synthetic construct
PLETDE

SEQ ID NO: 22457 - protein, 6 aa, synthetic construct
PLETDF

SEQ ID NO: 22458 - protein, 6 aa, synthetic construct
PLETDW

SEQ ID NO: 22459 - protein, 6 aa, synthetic construct
PLETDY

SEQ ID NO: 22460 - protein, 6 aa, synthetic construct
PLETCD

SEQ ID NO: 22461 - protein, 6 aa, synthetic construct
PLETCE

SEQ ID NO: 22462 - protein, 6 aa, synthetic construct
PLETCF

SEQ ID NO: 22463 - protein, 6 aa, synthetic construct
PLETCW

SEQ ID NO: 22464 - protein, 6 aa, synthetic construct
PLETCY

SEQ ID NO: 22465 - protein, 6 aa, synthetic construct
PLETQD

SEQ ID NO: 22466 - protein, 6 aa, synthetic construct
PLETQE

SEQ ID NO: 22467 - protein, 6 aa, synthetic construct
PLETQF

SEQ ID NO: 22468 - protein, 6 aa, synthetic construct
PLETQW

SEQ ID NO: 22469 - protein, 6 aa, synthetic construct
PLETQY

SEQ ID NO: 22470 - protein, 6 aa, synthetic construct
PLETED

SEQ ID NO: 22471 - protein, 6 aa, synthetic construct
PLETEE

SEQ ID NO: 22472 - protein, 6 aa, synthetic construct
PLETEF

SEQ ID NO: 22473 - protein, 6 aa, synthetic construct
PLETEW

SEQ ID NO: 22474 - protein, 6 aa, synthetic construct
PLETEY

SEQ ID NO: 22475 - protein, 6 aa, synthetic construct
PLETGD

SEQ ID NO: 22476 - protein, 6 aa, synthetic construct
PLETGE

SEQ ID NO: 22477 - protein, 6 aa, synthetic construct
PLETGF

SEQ ID NO: 22478 - protein, 6 aa, synthetic construct
PLETGW

SEQ ID NO: 22479 - protein, 6 aa, synthetic construct
PLETGY

SEQ ID NO: 22480 - protein, 6 aa, synthetic construct
PLETHD

SEQ ID NO: 22481 - protein, 6 aa, synthetic construct
PLETHE

SEQ ID NO: 22482 - protein, 6 aa, synthetic construct
PLETHF

SEQ ID NO: 22483 - protein, 6 aa, synthetic construct
PLETHW

SEQ ID NO: 22484 - protein, 6 aa, synthetic construct
PLETHY

SEQ ID NO: 22485 - protein, 6 aa, synthetic construct
PLETID

SEQ ID NO: 22486 - protein, 6 aa, synthetic construct
PLETIE

SEQ ID NO: 22487 - protein, 6 aa, synthetic construct
PLETIF

SEQ ID NO: 22488 - protein, 6 aa, synthetic construct
PLETIW

SEQ ID NO: 22489 - protein, 6 aa, synthetic construct
PLETIY

SEQ ID NO: 22490 - protein, 6 aa, synthetic construct
PLETLD

SEQ ID NO: 22491 - protein, 6 aa, synthetic construct
PLETLE

SEQ ID NO: 22492 - protein, 6 aa, synthetic construct
PLETLF

SEQ ID NO: 22493 - protein, 6 aa, synthetic construct
PLETLW

SEQ ID NO: 22494 - protein, 6 aa, synthetic construct
PLETLY

SEQ ID NO: 22495 - protein, 6 aa, synthetic construct
PLETKD

SEQ ID NO: 22496 - protein, 6 aa, synthetic construct
PLETKE

SEQ ID NO: 22497 - protein, 6 aa, synthetic construct
PLETKF

SEQ ID NO: 22498 - protein, 6 aa, synthetic construct
PLETKW

SEQ ID NO: 22499 - protein, 6 aa, synthetic construct
PLETKY

SEQ ID NO: 22500 - protein, 6 aa, synthetic construct
PLETMD

SEQ ID NO: 22501 - protein, 6 aa, synthetic construct
PLETME

SEQ ID NO: 22502 - protein, 6 aa, synthetic construct
PLETMF

SEQ ID NO: 22503 - protein, 6 aa, synthetic construct
PLETMW

SEQ ID NO: 22504 - protein, 6 aa, synthetic construct
PLETMY

SEQ ID NO: 22505 - protein, 6 aa, synthetic construct
PLETFD

SEQ ID NO: 22506 - protein, 6 aa, synthetic construct
PLETFE

SEQ ID NO: 22507 - protein, 6 aa, synthetic construct
PLETFF

SEQ ID NO: 22508 - protein, 6 aa, synthetic construct
PLETFW

SEQ ID NO: 22509 - protein, 6 aa, synthetic construct
PLETFY

SEQ ID NO: 22510 - protein, 6 aa, synthetic construct
PLETPD

SEQ ID NO: 22511 - protein, 6 aa, synthetic construct
PLETPE

SEQ ID NO: 22512 - protein, 6 aa, synthetic construct
PLETPF

SEQ ID NO: 22513 - protein, 6 aa, synthetic construct
PLETPW

SEQ ID NO: 22514 - protein, 6 aa, synthetic construct
PLETPY

SEQ ID NO: 22515 - protein, 6 aa, synthetic construct
PLETSD

SEQ ID NO: 22516 - protein, 6 aa, synthetic construct
PLETSE

SEQ ID NO: 22517 - protein, 6 aa, synthetic construct
PLETSF

SEQ ID NO: 22518 - protein, 6 aa, synthetic construct
PLETSW

SEQ ID NO: 22519 - protein, 6 aa, synthetic construct
PLETSY

SEQ ID NO: 22520 - protein, 6 aa, synthetic construct
PLETTD

SEQ ID NO: 22521 - protein, 6 aa, synthetic construct
PLETTE

SEQ ID NO: 22522 - protein, 6 aa, synthetic construct
PLETTF

SEQ ID NO: 22523 - protein, 6 aa, synthetic construct
PLETTW

SEQ ID NO: 22524 - protein, 6 aa, synthetic construct
PLETTY

SEQ ID NO: 22525 - protein, 6 aa, synthetic construct
PLETWD

SEQ ID NO: 22526 - protein, 6 aa, synthetic construct
PLETWE

SEQ ID NO: 22527 - protein, 6 aa, synthetic construct
PLETWF

SEQ ID NO: 22528 - protein, 6 aa, synthetic construct
PLETWW

SEQ ID NO: 22529 - protein, 6 aa, synthetic construct
PLETWY

SEQ ID NO: 22530 - protein, 6 aa, synthetic construct
PLETYD

SEQ ID NO: 22531 - protein, 6 aa, synthetic construct
PLETYE

SEQ ID NO: 22532 - protein, 6 aa, synthetic construct
PLETYF

SEQ ID NO: 22533 - protein, 6 aa, synthetic construct
PLETYW

SEQ ID NO: 22534 - protein, 6 aa, synthetic construct
PLETYY

SEQ ID NO: 22535 - protein, 6 aa, synthetic construct
PLETVD

SEQ ID NO: 22536 - protein, 6 aa, synthetic construct
PLETVE

SEQ ID NO: 22537 - protein, 6 aa, synthetic construct
PLETVF

SEQ ID NO: 22538 - protein, 6 aa, synthetic construct
PLETVW

SEQ ID NO: 22539 - protein, 6 aa, synthetic construct
PLETVY

SEQ ID NO: 22540 - protein, 6 aa, synthetic construct
PLEWAD

SEQ ID NO: 22541 - protein, 6 aa, synthetic construct
PLEWAE

SEQ ID NO: 22542 - protein, 6 aa, synthetic construct
PLEWAF

SEQ ID NO: 22543 - protein, 6 aa, synthetic construct
PLEWAW

SEQ ID NO: 22544 - protein, 6 aa, synthetic construct
PLEWAY

SEQ ID NO: 22545 - protein, 6 aa, synthetic construct
PLEWRD

SEQ ID NO: 22546 - protein, 6 aa, synthetic construct
PLEWRE

SEQ ID NO: 22547 - protein, 6 aa, synthetic construct
PLEWRF

SEQ ID NO: 22548 - protein, 6 aa, synthetic construct
PLEWRW

SEQ ID NO: 22549 - protein, 6 aa, synthetic construct
PLEWRY

SEQ ID NO: 22550 - protein, 6 aa, synthetic construct
PLEWND

SEQ ID NO: 22551 - protein, 6 aa, synthetic construct
PLEWNE

SEQ ID NO: 22552 - protein, 6 aa, synthetic construct
PLEWNF

SEQ ID NO: 22553 - protein, 6 aa, synthetic construct
PLEWNW

SEQ ID NO: 22554 - protein, 6 aa, synthetic construct
PLEWNY

SEQ ID NO: 22555 - protein, 6 aa, synthetic construct
PLEWDD

SEQ ID NO: 22556 - protein, 6 aa, synthetic construct
PLEWDE

SEQ ID NO: 22557 - protein, 6 aa, synthetic construct
PLEWDF

SEQ ID NO: 22558 - protein, 6 aa, synthetic construct
PLEWDW

SEQ ID NO: 22559 - protein, 6 aa, synthetic construct
PLEWDY

SEQ ID NO: 22560 - protein, 6 aa, synthetic construct
PLEWCD

SEQ ID NO: 22561 - protein, 6 aa, synthetic construct
PLEWCE

SEQ ID NO: 22562 - protein, 6 aa, synthetic construct
PLEWCF

SEQ ID NO: 22563 - protein, 6 aa, synthetic construct
PLEWCW

SEQ ID NO: 22564 - protein, 6 aa, synthetic construct
PLEWCY

SEQ ID NO: 22565 - protein, 6 aa, synthetic construct
PLEWQD

SEQ ID NO: 22566 - protein, 6 aa, synthetic construct
PLEWQE

SEQ ID NO: 22567 - protein, 6 aa, synthetic construct
PLEWQF

SEQ ID NO: 22568 - protein, 6 aa, synthetic construct
PLEWQW

SEQ ID NO: 22569 - protein, 6 aa, synthetic construct
PLEWQY

SEQ ID NO: 22570 - protein, 6 aa, synthetic construct
PLEWED

SEQ ID NO: 22571 - protein, 6 aa, synthetic construct
PLEWEE

SEQ ID NO: 22572 - protein, 6 aa, synthetic construct
PLEWEF

SEQ ID NO: 22573 - protein, 6 aa, synthetic construct
PLEWEW

SEQ ID NO: 22574 - protein, 6 aa, synthetic construct
PLEWEY

SEQ ID NO: 22575 - protein, 6 aa, synthetic construct
PLEWGD

SEQ ID NO: 22576 - protein, 6 aa, synthetic construct
PLEWGE

SEQ ID NO: 22577 - protein, 6 aa, synthetic construct
PLEWGF

SEQ ID NO: 22578 - protein, 6 aa, synthetic construct
PLEWGW

SEQ ID NO: 22579 - protein, 6 aa, synthetic construct
PLEWGY

SEQ ID NO: 22580 - protein, 6 aa, synthetic construct
PLEWHD

SEQ ID NO: 22581 - protein, 6 aa, synthetic construct
PLEWHE

SEQ ID NO: 22582 - protein, 6 aa, synthetic construct
PLEWHF

SEQ ID NO: 22583 - protein, 6 aa, synthetic construct
PLEWHW

SEQ ID NO: 22584 - protein, 6 aa, synthetic construct
PLEWHY

SEQ ID NO: 22585 - protein, 6 aa, synthetic construct
PLEWID

SEQ ID NO: 22586 - protein, 6 aa, synthetic construct
PLEWIE

SEQ ID NO: 22587 - protein, 6 aa, synthetic construct
PLEWIF

SEQ ID NO: 22588 - protein, 6 aa, synthetic construct
PLEWIW

SEQ ID NO: 22589 - protein, 6 aa, synthetic construct
PLEWIY

SEQ ID NO: 22590 - protein, 6 aa, synthetic construct
PLEWLD

SEQ ID NO: 22591 - protein, 6 aa, synthetic construct
PLEWLE

SEQ ID NO: 22592 - protein, 6 aa, synthetic construct
PLEWLF

SEQ ID NO: 22593 - protein, 6 aa, synthetic construct
PLEWLW

SEQ ID NO: 22594 - protein, 6 aa, synthetic construct
PLEWLY

SEQ ID NO: 22595 - protein, 6 aa, synthetic construct
PLEWKD

SEQ ID NO: 22596 - protein, 6 aa, synthetic construct
PLEWKE

SEQ ID NO: 22597 - protein, 6 aa, synthetic construct
PLEWKF

SEQ ID NO: 22598 - protein, 6 aa, synthetic construct
PLEWKW

SEQ ID NO: 22599 - protein, 6 aa, synthetic construct
PLEWKY

SEQ ID NO: 22600 - protein, 6 aa, synthetic construct
PLEWMD

SEQ ID NO: 22601 - protein, 6 aa, synthetic construct
PLEWME

SEQ ID NO: 22602 - protein, 6 aa, synthetic construct
PLEWMF

SEQ ID NO: 22603 - protein, 6 aa, synthetic construct
PLEWMW

SEQ ID NO: 22604 - protein, 6 aa, synthetic construct
PLEWMY

SEQ ID NO: 22605 - protein, 6 aa, synthetic construct
PLEWFD

SEQ ID NO: 22606 - protein, 6 aa, synthetic construct
PLEWFE

SEQ ID NO: 22607 - protein, 6 aa, synthetic construct
PLEWFF

SEQ ID NO: 22608 - protein, 6 aa, synthetic construct
PLEWFW

SEQ ID NO: 22609 - protein, 6 aa, synthetic construct
PLEWFY

SEQ ID NO: 22610 - protein, 6 aa, synthetic construct
PLEWPD

SEQ ID NO: 22611 - protein, 6 aa, synthetic construct
PLEWPE

SEQ ID NO: 22612 - protein, 6 aa, synthetic construct
PLEWPF

SEQ ID NO: 22613 - protein, 6 aa, synthetic construct
PLEWPW

SEQ ID NO: 22614 - protein, 6 aa, synthetic construct
PLEWPY

SEQ ID NO: 22615 - protein, 6 aa, synthetic construct
PLEWSD

SEQ ID NO: 22616 - protein, 6 aa, synthetic construct
PLEWSE

SEQ ID NO: 22617 - protein, 6 aa, synthetic construct
PLEWSF

SEQ ID NO: 22618 - protein, 6 aa, synthetic construct
PLEWSW

SEQ ID NO: 22619 - protein, 6 aa, synthetic construct
PLEWSY

SEQ ID NO: 22620 - protein, 6 aa, synthetic construct
PLEWTD

SEQ ID NO: 22621 - protein, 6 aa, synthetic construct
PLEWTE

SEQ ID NO: 22622 - protein, 6 aa, synthetic construct
PLEWTF

SEQ ID NO: 22623 - protein, 6 aa, synthetic construct
PLEWTW

SEQ ID NO: 22624 - protein, 6 aa, synthetic construct
PLEWTY

SEQ ID NO: 22625 - protein, 6 aa, synthetic construct
PLEWWD

SEQ ID NO: 22626 - protein, 6 aa, synthetic construct
PLEWWE

SEQ ID NO: 22627 - protein, 6 aa, synthetic construct
PLEWWF

SEQ ID NO: 22628 - protein, 6 aa, synthetic construct
PLEWWW

SEQ ID NO: 22629 - protein, 6 aa, synthetic construct
PLEWWY

SEQ ID NO: 22630 - protein, 6 aa, synthetic construct
PLEWYD

SEQ ID NO: 22631 - protein, 6 aa, synthetic construct
PLEWYE

SEQ ID NO: 22632 - protein, 6 aa, synthetic construct
PLEWYF

SEQ ID NO: 22633 - protein, 6 aa, synthetic construct
PLEWYW

SEQ ID NO: 22634 - protein, 6 aa, synthetic construct
PLEWYY

SEQ ID NO: 22635 - protein, 6 aa, synthetic construct
PLEWVD

SEQ ID NO: 22636 - protein, 6 aa, synthetic construct
PLEWVE

SEQ ID NO: 22637 - protein, 6 aa, synthetic construct
PLEWVF

SEQ ID NO: 22638 - protein, 6 aa, synthetic construct
PLEWVW

SEQ ID NO: 22639 - protein, 6 aa, synthetic construct
PLEWVY

SEQ ID NO: 22640 - protein, 6 aa, synthetic construct
PLEYAD

SEQ ID NO: 22641 - protein, 6 aa, synthetic construct
PLEYAE

SEQ ID NO: 22642 - protein, 6 aa, synthetic construct
PLEYAF

SEQ ID NO: 22643 - protein, 6 aa, synthetic construct
PLEYAW

SEQ ID NO: 22644 - protein, 6 aa, synthetic construct
PLEYAY

SEQ ID NO: 22645 - protein, 6 aa, synthetic construct
PLEYRD

SEQ ID NO: 22646 - protein, 6 aa, synthetic construct
PLEYRE

SEQ ID NO: 22647 - protein, 6 aa, synthetic construct
PLEYRF

SEQ ID NO: 22648 - protein, 6 aa, synthetic construct
PLEYRW

SEQ ID NO: 22649 - protein, 6 aa, synthetic construct
PLEYRY

SEQ ID NO: 22650 - protein, 6 aa, synthetic construct
PLEYND

SEQ ID NO: 22651 - protein, 6 aa, synthetic construct
PLEYNE

SEQ ID NO: 22652 - protein, 6 aa, synthetic construct
PLEYNF

SEQ ID NO: 22653 - protein, 6 aa, synthetic construct
PLEYNW

SEQ ID NO: 22654 - protein, 6 aa, synthetic construct
PLEYNY

SEQ ID NO: 22655 - protein, 6 aa, synthetic construct
PLEYDD

SEQ ID NO: 22656 - protein, 6 aa, synthetic construct
PLEYDE

SEQ ID NO: 22657 - protein, 6 aa, synthetic construct
PLEYDF

SEQ ID NO: 22658 - protein, 6 aa, synthetic construct
PLEYDW

SEQ ID NO: 22659 - protein, 6 aa, synthetic construct
PLEYDY

SEQ ID NO: 22660 - protein, 6 aa, synthetic construct
PLEYCD

SEQ ID NO: 22661 - protein, 6 aa, synthetic construct
PLEYCE

SEQ ID NO: 22662 - protein, 6 aa, synthetic construct
PLEYCF

SEQ ID NO: 22663 - protein, 6 aa, synthetic construct
PLEYCW

SEQ ID NO: 22664 - protein, 6 aa, synthetic construct
PLEYCY

SEQ ID NO: 22665 - protein, 6 aa, synthetic construct
PLEYQD

SEQ ID NO: 22666 - protein, 6 aa, synthetic construct
PLEYQE

SEQ ID NO: 22667 - protein, 6 aa, synthetic construct
PLEYQF

SEQ ID NO: 22668 - protein, 6 aa, synthetic construct
PLEYQW

SEQ ID NO: 22669 - protein, 6 aa, synthetic construct
PLEYQY

SEQ ID NO: 22670 - protein, 6 aa, synthetic construct
PLEYED

SEQ ID NO: 22671 - protein, 6 aa, synthetic construct
PLEYEE

SEQ ID NO: 22672 - protein, 6 aa, synthetic construct
PLEYEF

SEQ ID NO: 22673 - protein, 6 aa, synthetic construct
PLEYEW

SEQ ID NO: 22674 - protein, 6 aa, synthetic construct
PLEYEY

SEQ ID NO: 22675 - protein, 6 aa, synthetic construct
PLEYGD

SEQ ID NO: 22676 - protein, 6 aa, synthetic construct
PLEYGE

SEQ ID NO: 22677 - protein, 6 aa, synthetic construct
PLEYGF

SEQ ID NO: 22678 - protein, 6 aa, synthetic construct
PLEYGW

SEQ ID NO: 22679 - protein, 6 aa, synthetic construct
PLEYGY

SEQ ID NO: 22680 - protein, 6 aa, synthetic construct
PLEYHD

SEQ ID NO: 22681 - protein, 6 aa, synthetic construct
PLEYHE

SEQ ID NO: 22682 - protein, 6 aa, synthetic construct
PLEYHF

SEQ ID NO: 22683 - protein, 6 aa, synthetic construct
PLEYHW

SEQ ID NO: 22684 - protein, 6 aa, synthetic construct
PLEYHY

SEQ ID NO: 22685 - protein, 6 aa, synthetic construct
PLEYID

SEQ ID NO: 22686 - protein, 6 aa, synthetic construct
PLEYIE

SEQ ID NO: 22687 - protein, 6 aa, synthetic construct
PLEYIF

SEQ ID NO: 22688 - protein, 6 aa, synthetic construct
PLEYIW

SEQ ID NO: 22689 - protein, 6 aa, synthetic construct
PLEYIY

SEQ ID NO: 22690 - protein, 6 aa, synthetic construct
PLEYLD

SEQ ID NO: 22691 - protein, 6 aa, synthetic construct
PLEYLE

SEQ ID NO: 22692 - protein, 6 aa, synthetic construct
PLEYLF

SEQ ID NO: 22693 - protein, 6 aa, synthetic construct
PLEYLW

SEQ ID NO: 22694 - protein, 6 aa, synthetic construct
PLEYLY

SEQ ID NO: 22695 - protein, 6 aa, synthetic construct
PLEYKD

SEQ ID NO: 22696 - protein, 6 aa, synthetic construct
PLEYKE

SEQ ID NO: 22697 - protein, 6 aa, synthetic construct
PLEYKF

SEQ ID NO: 22698 - protein, 6 aa, synthetic construct
PLEYKW

SEQ ID NO: 22699 - protein, 6 aa, synthetic construct
PLEYKY

SEQ ID NO: 22700 - protein, 6 aa, synthetic construct
PLEYMD

SEQ ID NO: 22701 - protein, 6 aa, synthetic construct
PLEYME

SEQ ID NO: 22702 - protein, 6 aa, synthetic construct
PLEYMF

SEQ ID NO: 22703 - protein, 6 aa, synthetic construct
PLEYMW

SEQ ID NO: 22704 - protein, 6 aa, synthetic construct
PLEYMY

SEQ ID NO: 22705 - protein, 6 aa, synthetic construct
PLEYFD

SEQ ID NO: 22706 - protein, 6 aa, synthetic construct
PLEYFE

SEQ ID NO: 22707 - protein, 6 aa, synthetic construct
PLEYFF

SEQ ID NO: 22708 - protein, 6 aa, synthetic construct
PLEYFW

SEQ ID NO: 22709 - protein, 6 aa, synthetic construct
PLEYFY

SEQ ID NO: 22710 - protein, 6 aa, synthetic construct
PLEYPD

SEQ ID NO: 22711 - protein, 6 aa, synthetic construct
PLEYPE

SEQ ID NO: 22712 - protein, 6 aa, synthetic construct
PLEYPF

SEQ ID NO: 22713 - protein, 6 aa, synthetic construct
PLEYPW

SEQ ID NO: 22714 - protein, 6 aa, synthetic construct
PLEYPY

SEQ ID NO: 22715 - protein, 6 aa, synthetic construct
PLEYSD

SEQ ID NO: 22716 - protein, 6 aa, synthetic construct
PLEYSE

SEQ ID NO: 22717 - protein, 6 aa, synthetic construct
PLEYSF

SEQ ID NO: 22718 - protein, 6 aa, synthetic construct
PLEYSW

SEQ ID NO: 22719 - protein, 6 aa, synthetic construct
PLEYSY

SEQ ID NO: 22720 - protein, 6 aa, synthetic construct
PLEYTD

SEQ ID NO: 22721 - protein, 6 aa, synthetic construct
PLEYTE

SEQ ID NO: 22722 - protein, 6 aa, synthetic construct
PLEYTF

SEQ ID NO: 22723 - protein, 6 aa, synthetic construct
PLEYTW

SEQ ID NO: 22724 - protein, 6 aa, synthetic construct
PLEYTY

SEQ ID NO: 22725 - protein, 6 aa, synthetic construct
PLEYWD

SEQ ID NO: 22726 - protein, 6 aa, synthetic construct
PLEYWE

SEQ ID NO: 22727 - protein, 6 aa, synthetic construct
PLEYWF

SEQ ID NO: 22728 - protein, 6 aa, synthetic construct
PLEYWW

SEQ ID NO: 22729 - protein, 6 aa, synthetic construct
PLEYWY

SEQ ID NO: 22730 - protein, 6 aa, synthetic construct
PLEYYD

SEQ ID NO: 22731 - protein, 6 aa, synthetic construct
PLEYYE

SEQ ID NO: 22732 - protein, 6 aa, synthetic construct
PLEYYF

SEQ ID NO: 22733 - protein, 6 aa, synthetic construct
PLEYYW

SEQ ID NO: 22734 - protein, 6 aa, synthetic construct
PLEYYY

SEQ ID NO: 22735 - protein, 6 aa, synthetic construct
PLEYVD

SEQ ID NO: 22736 - protein, 6 aa, synthetic construct
PLEYVE

SEQ ID NO: 22737 - protein, 6 aa, synthetic construct
PLEYVF

SEQ ID NO: 22738 - protein, 6 aa, synthetic construct
PLEYVW

SEQ ID NO: 22739 - protein, 6 aa, synthetic construct
PLEYVY

SEQ ID NO: 22740 - protein, 6 aa, synthetic construct
PLEVAD

SEQ ID NO: 22741 - protein, 6 aa, synthetic construct
PLEVAE

SEQ ID NO: 22742 - protein, 6 aa, synthetic construct
PLEVAF

SEQ ID NO: 22743 - protein, 6 aa, synthetic construct
PLEVAW

SEQ ID NO: 22744 - protein, 6 aa, synthetic construct
PLEVAY

SEQ ID NO: 22745 - protein, 6 aa, synthetic construct
PLEVRD

SEQ ID NO: 22746 - protein, 6 aa, synthetic construct
PLEVRE

SEQ ID NO: 22747 - protein, 6 aa, synthetic construct
PLEVRF

SEQ ID NO: 22748 - protein, 6 aa, synthetic construct
PLEVRW

SEQ ID NO: 22749 - protein, 6 aa, synthetic construct
PLEVRY

SEQ ID NO: 22750 - protein, 6 aa, synthetic construct
PLEVND

SEQ ID NO: 22751 - protein, 6 aa, synthetic construct
PLEVNE

SEQ ID NO: 22752 - protein, 6 aa, synthetic construct
PLEVNF

SEQ ID NO: 22753 - protein, 6 aa, synthetic construct
PLEVNW

SEQ ID NO: 22754 - protein, 6 aa, synthetic construct
PLEVNY

SEQ ID NO: 22755 - protein, 6 aa, synthetic construct
PLEVDD

SEQ ID NO: 22756 - protein, 6 aa, synthetic construct
PLEVDE

SEQ ID NO: 22757 - protein, 6 aa, synthetic construct
PLEVDF

SEQ ID NO: 22758 - protein, 6 aa, synthetic construct
PLEVDW

SEQ ID NO: 22759 - protein, 6 aa, synthetic construct
PLEVDY

SEQ ID NO: 22760 - protein, 6 aa, synthetic construct
PLEVCD

SEQ ID NO: 22761 - protein, 6 aa, synthetic construct
PLEVCE

SEQ ID NO: 22762 - protein, 6 aa, synthetic construct
PLEVCF

SEQ ID NO: 22763 - protein, 6 aa, synthetic construct
PLEVCW

SEQ ID NO: 22764 - protein, 6 aa, synthetic construct
PLEVCY

SEQ ID NO: 22765 - protein, 6 aa, synthetic construct
PLEVQD

SEQ ID NO: 22766 - protein, 6 aa, synthetic construct
PLEVQE

SEQ ID NO: 22767 - protein, 6 aa, synthetic construct
PLEVQF

SEQ ID NO: 22768 - protein, 6 aa, synthetic construct
PLEVQW

SEQ ID NO: 22769 - protein, 6 aa, synthetic construct
PLEVQY

SEQ ID NO: 22770 - protein, 6 aa, synthetic construct
PLEVED

SEQ ID NO: 22771 - protein, 6 aa, synthetic construct
PLEVEE

SEQ ID NO: 22772 - protein, 6 aa, synthetic construct
PLEVEF

SEQ ID NO: 22773 - protein, 6 aa, synthetic construct
PLEVEW

SEQ ID NO: 22774 - protein, 6 aa, synthetic construct
PLEVEY

SEQ ID NO: 22775 - protein, 6 aa, synthetic construct
PLEVGD

SEQ ID NO: 22776 - protein, 6 aa, synthetic construct
PLEVGE

SEQ ID NO: 22777 - protein, 6 aa, synthetic construct
PLEVGF

SEQ ID NO: 22778 - protein, 6 aa, synthetic construct
PLEVGW

SEQ ID NO: 22779 - protein, 6 aa, synthetic construct
PLEVGY

SEQ ID NO: 22780 - protein, 6 aa, synthetic construct
PLEVHD

SEQ ID NO: 22781 - protein, 6 aa, synthetic construct
PLEVHE

SEQ ID NO: 22782 - protein, 6 aa, synthetic construct
PLEVHF

SEQ ID NO: 22783 - protein, 6 aa, synthetic construct
PLEVHW

SEQ ID NO: 22784 - protein, 6 aa, synthetic construct
PLEVHY

SEQ ID NO: 22785 - protein, 6 aa, synthetic construct
PLEVID

SEQ ID NO: 22786 - protein, 6 aa, synthetic construct
PLEVIE

SEQ ID NO: 22787 - protein, 6 aa, synthetic construct
PLEVIF

SEQ ID NO: 22788 - protein, 6 aa, synthetic construct
PLEVIW

SEQ ID NO: 22789 - protein, 6 aa, synthetic construct
PLEVIY

SEQ ID NO: 22790 - protein, 6 aa, synthetic construct
PLEVLD

SEQ ID NO: 22791 - protein, 6 aa, synthetic construct
PLEVLE

SEQ ID NO: 22792 - protein, 6 aa, synthetic construct
PLEVLF

SEQ ID NO: 22793 - protein, 6 aa, synthetic construct
PLEVLW

SEQ ID NO: 22794 - protein, 6 aa, synthetic construct
PLEVLY

SEQ ID NO: 22795 - protein, 6 aa, synthetic construct
PLEVKD

SEQ ID NO: 22796 - protein, 6 aa, synthetic construct
PLEVKE

SEQ ID NO: 22797 - protein, 6 aa, synthetic construct
PLEVKF

SEQ ID NO: 22798 - protein, 6 aa, synthetic construct
PLEVKW

SEQ ID NO: 22799 - protein, 6 aa, synthetic construct
PLEVKY

SEQ ID NO: 22800 - protein, 6 aa, synthetic construct
PLEVMD

SEQ ID NO: 22801 - protein, 6 aa, synthetic construct
PLEVME

SEQ ID NO: 22802 - protein, 6 aa, synthetic construct
PLEVMF

SEQ ID NO: 22803 - protein, 6 aa, synthetic construct
PLEVMW

SEQ ID NO: 22804 - protein, 6 aa, synthetic construct
PLEVMY

SEQ ID NO: 22805 - protein, 6 aa, synthetic construct
PLEVFD

SEQ ID NO: 22806 - protein, 6 aa, synthetic construct
PLEVFE

SEQ ID NO: 22807 - protein, 6 aa, synthetic construct
PLEVFF

SEQ ID NO: 22808 - protein, 6 aa, synthetic construct
PLEVFW

SEQ ID NO: 22809 - protein, 6 aa, synthetic construct
PLEVFY

SEQ ID NO: 22810 - protein, 6 aa, synthetic construct
PLEVPD

SEQ ID NO: 22811 - protein, 6 aa, synthetic construct
PLEVPE

SEQ ID NO: 22812 - protein, 6 aa, synthetic construct
PLEVPF

SEQ ID NO: 22813 - protein, 6 aa, synthetic construct
PLEVPW

SEQ ID NO: 22814 - protein, 6 aa, synthetic construct
PLEVPY

SEQ ID NO: 22815 - protein, 6 aa, synthetic construct
PLEVSD

SEQ ID NO: 22816 - protein, 6 aa, synthetic construct
PLEVSE

SEQ ID NO: 22817 - protein, 6 aa, synthetic construct
PLEVSF

SEQ ID NO: 22818 - protein, 6 aa, synthetic construct
PLEVSW

SEQ ID NO: 22819 - protein, 6 aa, synthetic construct
PLEVSY

SEQ ID NO: 22820 - protein, 6 aa, synthetic construct
PLEVTD

SEQ ID NO: 22821 - protein, 6 aa, synthetic construct
PLEVTE

SEQ ID NO: 22822 - protein, 6 aa, synthetic construct
PLEVTF

SEQ ID NO: 22823 - protein, 6 aa, synthetic construct
PLEVTW

SEQ ID NO: 22824 - protein, 6 aa, synthetic construct
PLEVTY

SEQ ID NO: 22825 - protein, 6 aa, synthetic construct
PLEVWD

SEQ ID NO: 22826 - protein, 6 aa, synthetic construct
PLEVWE

SEQ ID NO: 22827 - protein, 6 aa, synthetic construct
PLEVWF

SEQ ID NO: 22828 - protein, 6 aa, synthetic construct
PLEVWW

SEQ ID NO: 22829 - protein, 6 aa, synthetic construct
PLEVWY

SEQ ID NO: 22830 - protein, 6 aa, synthetic construct
PLEVYD

SEQ ID NO: 22831 - protein, 6 aa, synthetic construct
PLEVYE

SEQ ID NO: 22832 - protein, 6 aa, synthetic construct
PLEVYF

SEQ ID NO: 22833 - protein, 6 aa, synthetic construct
PLEVYW

SEQ ID NO: 22834 - protein, 6 aa, synthetic construct
PLEVYY

SEQ ID NO: 22835 - protein, 6 aa, synthetic construct
PLEVVD

SEQ ID NO: 22836 - protein, 6 aa, synthetic construct
PLEVVE

SEQ ID NO: 22837 - protein, 6 aa, synthetic construct
PLEVVF

SEQ ID NO: 22838 - protein, 6 aa, synthetic construct
PLEVVW

SEQ ID NO: 22839 - protein, 6 aa, synthetic construct
PLEVVY

SEQ ID NO: 22840 - protein, 6 aa, synthetic construct
PKEAAD

SEQ ID NO: 22841 - protein, 6 aa, synthetic construct
PKEAAE

SEQ ID NO: 22842 - protein, 6 aa, synthetic construct
PKEAAF

SEQ ID NO: 22843 - protein, 6 aa, synthetic construct
PKEAAW

SEQ ID NO: 22844 - protein, 6 aa, synthetic construct
PKEAAY

SEQ ID NO: 22845 - protein, 6 aa, synthetic construct
PKEARD

SEQ ID NO: 22846 - protein, 6 aa, synthetic construct
PKEARE

SEQ ID NO: 22847 - protein, 6 aa, synthetic construct
PKEARF

SEQ ID NO: 22848 - protein, 6 aa, synthetic construct
PKEARW

SEQ ID NO: 22849 - protein, 6 aa, synthetic construct
PKEARY

SEQ ID NO: 22850 - protein, 6 aa, synthetic construct
PKEAND

SEQ ID NO: 22851 - protein, 6 aa, synthetic construct
PKEANE

SEQ ID NO: 22852 - protein, 6 aa, synthetic construct
PKEANF

SEQ ID NO: 22853 - protein, 6 aa, synthetic construct
PKEANW

SEQ ID NO: 22854 - protein, 6 aa, synthetic construct
PKEANY

SEQ ID NO: 22855 - protein, 6 aa, synthetic construct
PKEADD

SEQ ID NO: 22856 - protein, 6 aa, synthetic construct
PKEADE

SEQ ID NO: 22857 - protein, 6 aa, synthetic construct
PKEADF

SEQ ID NO: 22858 - protein, 6 aa, synthetic construct
PKEADW

SEQ ID NO: 22859 - protein, 6 aa, synthetic construct
PKEADY

SEQ ID NO: 22860 - protein, 6 aa, synthetic construct
PKEACD

SEQ ID NO: 22861 - protein, 6 aa, synthetic construct
PKEACE

SEQ ID NO: 22862 - protein, 6 aa, synthetic construct
PKEACF

SEQ ID NO: 22863 - protein, 6 aa, synthetic construct
PKEACW

SEQ ID NO: 22864 - protein, 6 aa, synthetic construct
PKEACY

SEQ ID NO: 22865 - protein, 6 aa, synthetic construct
PKEAQD

SEQ ID NO: 22866 - protein, 6 aa, synthetic construct
PKEAQE

SEQ ID NO: 22867 - protein, 6 aa, synthetic construct
PKEAQF

SEQ ID NO: 22868 - protein, 6 aa, synthetic construct
PKEAQW

SEQ ID NO: 22869 - protein, 6 aa, synthetic construct
PKEAQY

SEQ ID NO: 22870 - protein, 6 aa, synthetic construct
PKEAED

SEQ ID NO: 22871 - protein, 6 aa, synthetic construct
PKEAEE

SEQ ID NO: 22872 - protein, 6 aa, synthetic construct
PKEAEF

SEQ ID NO: 22873 - protein, 6 aa, synthetic construct
PKEAEW

SEQ ID NO: 22874 - protein, 6 aa, synthetic construct
PKEAEY

SEQ ID NO: 22875 - protein, 6 aa, synthetic construct
PKEAGD

SEQ ID NO: 22876 - protein, 6 aa, synthetic construct
PKEAGE

SEQ ID NO: 22877 - protein, 6 aa, synthetic construct
PKEAGF

SEQ ID NO: 22878 - protein, 6 aa, synthetic construct
PKEAGW

SEQ ID NO: 22879 - protein, 6 aa, synthetic construct
PKEAGY

SEQ ID NO: 22880 - protein, 6 aa, synthetic construct
PKEAHD

SEQ ID NO: 22881 - protein, 6 aa, synthetic construct
PKEAHE

SEQ ID NO: 22882 - protein, 6 aa, synthetic construct
PKEAHF

SEQ ID NO: 22883 - protein, 6 aa, synthetic construct
PKEAHW

SEQ ID NO: 22884 - protein, 6 aa, synthetic construct
PKEAHY

SEQ ID NO: 22885 - protein, 6 aa, synthetic construct
PKEAID

SEQ ID NO: 22886 - protein, 6 aa, synthetic construct
PKEAIE

SEQ ID NO: 22887 - protein, 6 aa, synthetic construct
PKEAIF

SEQ ID NO: 22888 - protein, 6 aa, synthetic construct
PKEAIW

SEQ ID NO: 22889 - protein, 6 aa, synthetic construct
PKEAIY

SEQ ID NO: 22890 - protein, 6 aa, synthetic construct
PKEALD

SEQ ID NO: 22891 - protein, 6 aa, synthetic construct
PKEALE

SEQ ID NO: 22892 - protein, 6 aa, synthetic construct
PKEALF

SEQ ID NO: 22893 - protein, 6 aa, synthetic construct
PKEALW

SEQ ID NO: 22894 - protein, 6 aa, synthetic construct
PKEALY

SEQ ID NO: 22895 - protein, 6 aa, synthetic construct
PKEAKD

SEQ ID NO: 22896 - protein, 6 aa, synthetic construct
PKEAKE

SEQ ID NO: 22897 - protein, 6 aa, synthetic construct
PKEAKF

SEQ ID NO: 22898 - protein, 6 aa, synthetic construct
PKEAKW

SEQ ID NO: 22899 - protein, 6 aa, synthetic construct
PKEAKY

SEQ ID NO: 22900 - protein, 6 aa, synthetic construct
PKEAMD

SEQ ID NO: 22901 - protein, 6 aa, synthetic construct
PKEAME

SEQ ID NO: 22902 - protein, 6 aa, synthetic construct
PKEAMF

SEQ ID NO: 22903 - protein, 6 aa, synthetic construct
PKEAMW

SEQ ID NO: 22904 - protein, 6 aa, synthetic construct
PKEAMY

SEQ ID NO: 22905 - protein, 6 aa, synthetic construct
PKEAFD

SEQ ID NO: 22906 - protein, 6 aa, synthetic construct
PKEAFE

SEQ ID NO: 22907 - protein, 6 aa, synthetic construct
PKEAFF

SEQ ID NO: 22908 - protein, 6 aa, synthetic construct
PKEAFW

SEQ ID NO: 22909 - protein, 6 aa, synthetic construct
PKEAFY

SEQ ID NO: 22910 - protein, 6 aa, synthetic construct
PKEAPD

SEQ ID NO: 22911 - protein, 6 aa, synthetic construct
PKEAPE

SEQ ID NO: 22912 - protein, 6 aa, synthetic construct
PKEAPF

SEQ ID NO: 22913 - protein, 6 aa, synthetic construct
PKEAPW

SEQ ID NO: 22914 - protein, 6 aa, synthetic construct
PKEAPY

SEQ ID NO: 22915 - protein, 6 aa, synthetic construct
PKEASD

SEQ ID NO: 22916 - protein, 6 aa, synthetic construct
PKEASE

SEQ ID NO: 22917 - protein, 6 aa, synthetic construct
PKEASF

SEQ ID NO: 22918 - protein, 6 aa, synthetic construct
PKEASW

SEQ ID NO: 22919 - protein, 6 aa, synthetic construct
PKEASY

SEQ ID NO: 22920 - protein, 6 aa, synthetic construct
PKEATD

SEQ ID NO: 22921 - protein, 6 aa, synthetic construct
PKEATE

SEQ ID NO: 22922 - protein, 6 aa, synthetic construct
PKEATF

SEQ ID NO: 22923 - protein, 6 aa, synthetic construct
PKEATW

SEQ ID NO: 22924 - protein, 6 aa, synthetic construct
PKEATY

SEQ ID NO: 22925 - protein, 6 aa, synthetic construct
PKEAWD

SEQ ID NO: 22926 - protein, 6 aa, synthetic construct
PKEAWE

SEQ ID NO: 22927 - protein, 6 aa, synthetic construct
PKEAWF

SEQ ID NO: 22928 - protein, 6 aa, synthetic construct
PKEAWW

SEQ ID NO: 22929 - protein, 6 aa, synthetic construct
PKEAWY

SEQ ID NO: 22930 - protein, 6 aa, synthetic construct
PKEAYD

SEQ ID NO: 22931 - protein, 6 aa, synthetic construct
PKEAYE

SEQ ID NO: 22932 - protein, 6 aa, synthetic construct
PKEAYF

SEQ ID NO: 22933 - protein, 6 aa, synthetic construct
PKEAYW

SEQ ID NO: 22934 - protein, 6 aa, synthetic construct
PKEAYY

SEQ ID NO: 22935 - protein, 6 aa, synthetic construct
PKEAVD

SEQ ID NO: 22936 - protein, 6 aa, synthetic construct
PKEAVE

SEQ ID NO: 22937 - protein, 6 aa, synthetic construct
PKEAVF

SEQ ID NO: 22938 - protein, 6 aa, synthetic construct
PKEAVW

SEQ ID NO: 22939 - protein, 6 aa, synthetic construct
PKEAVY

SEQ ID NO: 22940 - protein, 6 aa, synthetic construct
PKERAD

SEQ ID NO: 22941 - protein, 6 aa, synthetic construct
PKERAE

SEQ ID NO: 22942 - protein, 6 aa, synthetic construct
PKERAF

SEQ ID NO: 22943 - protein, 6 aa, synthetic construct
PKERAW

SEQ ID NO: 22944 - protein, 6 aa, synthetic construct
PKERAY

SEQ ID NO: 22945 - protein, 6 aa, synthetic construct
PKERRD

SEQ ID NO: 22946 - protein, 6 aa, synthetic construct
PKERRE

SEQ ID NO: 22947 - protein, 6 aa, synthetic construct
PKERRF

SEQ ID NO: 22948 - protein, 6 aa, synthetic construct
PKERRW

SEQ ID NO: 22949 - protein, 6 aa, synthetic construct
PKERRY

SEQ ID NO: 22950 - protein, 6 aa, synthetic construct
PKERND

SEQ ID NO: 22951 - protein, 6 aa, synthetic construct
PKERNE

SEQ ID NO: 22952 - protein, 6 aa, synthetic construct
PKERNF

SEQ ID NO: 22953 - protein, 6 aa, synthetic construct
PKERNW

SEQ ID NO: 22954 - protein, 6 aa, synthetic construct
PKERNY

SEQ ID NO: 22955 - protein, 6 aa, synthetic construct
PKERDD

SEQ ID NO: 22956 - protein, 6 aa, synthetic construct
PKERDE

SEQ ID NO: 22957 - protein, 6 aa, synthetic construct
PKERDF

SEQ ID NO: 22958 - protein, 6 aa, synthetic construct
PKERDW

SEQ ID NO: 22959 - protein, 6 aa, synthetic construct
PKERDY

SEQ ID NO: 22960 - protein, 6 aa, synthetic construct
PKERCD

SEQ ID NO: 22961 - protein, 6 aa, synthetic construct
PKERCE

SEQ ID NO: 22962 - protein, 6 aa, synthetic construct
PKERCF

SEQ ID NO: 22963 - protein, 6 aa, synthetic construct
PKERCW

SEQ ID NO: 22964 - protein, 6 aa, synthetic construct
PKERCY

SEQ ID NO: 22965 - protein, 6 aa, synthetic construct
PKERQD

SEQ ID NO: 22966 - protein, 6 aa, synthetic construct
PKERQE

SEQ ID NO: 22967 - protein, 6 aa, synthetic construct
PKERQF

SEQ ID NO: 22968 - protein, 6 aa, synthetic construct
PKERQW

SEQ ID NO: 22969 - protein, 6 aa, synthetic construct
PKERQY

SEQ ID NO: 22970 - protein, 6 aa, synthetic construct
PKERED

SEQ ID NO: 22971 - protein, 6 aa, synthetic construct
PKEREE

SEQ ID NO: 22972 - protein, 6 aa, synthetic construct
PKEREF

SEQ ID NO: 22973 - protein, 6 aa, synthetic construct
PKEREW

SEQ ID NO: 22974 - protein, 6 aa, synthetic construct
PKEREY

SEQ ID NO: 22975 - protein, 6 aa, synthetic construct
PKERGD

SEQ ID NO: 22976 - protein, 6 aa, synthetic construct
PKERGE

SEQ ID NO: 22977 - protein, 6 aa, synthetic construct
PKERGF

SEQ ID NO: 22978 - protein, 6 aa, synthetic construct
PKERGW

SEQ ID NO: 22979 - protein, 6 aa, synthetic construct
PKERGY

SEQ ID NO: 22980 - protein, 6 aa, synthetic construct
PKERHD

SEQ ID NO: 22981 - protein, 6 aa, synthetic construct
PKERHE

SEQ ID NO: 22982 - protein, 6 aa, synthetic construct
PKERHF

SEQ ID NO: 22983 - protein, 6 aa, synthetic construct
PKERHW

SEQ ID NO: 22984 - protein, 6 aa, synthetic construct
PKERHY

SEQ ID NO: 22985 - protein, 6 aa, synthetic construct
PKERID

SEQ ID NO: 22986 - protein, 6 aa, synthetic construct
PKERIE

SEQ ID NO: 22987 - protein, 6 aa, synthetic construct
PKERIF

SEQ ID NO: 22988 - protein, 6 aa, synthetic construct
PKERIW

SEQ ID NO: 22989 - protein, 6 aa, synthetic construct
PKERIY

SEQ ID NO: 22990 - protein, 6 aa, synthetic construct
PKERLD

SEQ ID NO: 22991 - protein, 6 aa, synthetic construct
PKERLE

SEQ ID NO: 22992 - protein, 6 aa, synthetic construct
PKERLF

SEQ ID NO: 22993 - protein, 6 aa, synthetic construct
PKERLW

SEQ ID NO: 22994 - protein, 6 aa, synthetic construct
PKERLY

SEQ ID NO: 22995 - protein, 6 aa, synthetic construct
PKERKD

SEQ ID NO: 22996 - protein, 6 aa, synthetic construct
PKERKE

SEQ ID NO: 22997 - protein, 6 aa, synthetic construct
PKERKF

SEQ ID NO: 22998 - protein, 6 aa, synthetic construct
PKERKW

SEQ ID NO: 22999 - protein, 6 aa, synthetic construct
PKERKY

SEQ ID NO: 23000 - protein, 6 aa, synthetic construct
PKERMD

SEQ ID NO: 23001 - protein, 6 aa, synthetic construct
PKERME

SEQ ID NO: 23002 - protein, 6 aa, synthetic construct
PKERMF

SEQ ID NO: 23003 - protein, 6 aa, synthetic construct
PKERMW

SEQ ID NO: 23004 - protein, 6 aa, synthetic construct
PKERMY

SEQ ID NO: 23005 - protein, 6 aa, synthetic construct
PKERFD

SEQ ID NO: 23006 - protein, 6 aa, synthetic construct
PKERFE

SEQ ID NO: 23007 - protein, 6 aa, synthetic construct
PKERFF

SEQ ID NO: 23008 - protein, 6 aa, synthetic construct
PKERFW

SEQ ID NO: 23009 - protein, 6 aa, synthetic construct
PKERFY

SEQ ID NO: 23010 - protein, 6 aa, synthetic construct
PKERPD

SEQ ID NO: 23011 - protein, 6 aa, synthetic construct
PKERPE

SEQ ID NO: 23012 - protein, 6 aa, synthetic construct
PKERPF

SEQ ID NO: 23013 - protein, 6 aa, synthetic construct
PKERPW

SEQ ID NO: 23014 - protein, 6 aa, synthetic construct
PKERPY

SEQ ID NO: 23015 - protein, 6 aa, synthetic construct
PKERSD

SEQ ID NO: 23016 - protein, 6 aa, synthetic construct
PKERSE

SEQ ID NO: 23017 - protein, 6 aa, synthetic construct
PKERSF

SEQ ID NO: 23018 - protein, 6 aa, synthetic construct
PKERSW

SEQ ID NO: 23019 - protein, 6 aa, synthetic construct
PKERSY

SEQ ID NO: 23020 - protein, 6 aa, synthetic construct
PKERTD

SEQ ID NO: 23021 - protein, 6 aa, synthetic construct
PKERTE

SEQ ID NO: 23022 - protein, 6 aa, synthetic construct
PKERTF

SEQ ID NO: 23023 - protein, 6 aa, synthetic construct
PKERTW

SEQ ID NO: 23024 - protein, 6 aa, synthetic construct
PKERTY

SEQ ID NO: 23025 - protein, 6 aa, synthetic construct
PKERWD

SEQ ID NO: 23026 - protein, 6 aa, synthetic construct
PKERWE

SEQ ID NO: 23027 - protein, 6 aa, synthetic construct
PKERWF

SEQ ID NO: 23028 - protein, 6 aa, synthetic construct
PKERWW

SEQ ID NO: 23029 - protein, 6 aa, synthetic construct
PKERWY

SEQ ID NO: 23030 - protein, 6 aa, synthetic construct
PKERYD

SEQ ID NO: 23031 - protein, 6 aa, synthetic construct
PKERYE

SEQ ID NO: 23032 - protein, 6 aa, synthetic construct
PKERYF

SEQ ID NO: 23033 - protein, 6 aa, synthetic construct
PKERYW

SEQ ID NO: 23034 - protein, 6 aa, synthetic construct
PKERYY

SEQ ID NO: 23035 - protein, 6 aa, synthetic construct
PKERVD

SEQ ID NO: 23036 - protein, 6 aa, synthetic construct
PKERVE

SEQ ID NO: 23037 - protein, 6 aa, synthetic construct
PKERVF

SEQ ID NO: 23038 - protein, 6 aa, synthetic construct
PKERVW

SEQ ID NO: 23039 - protein, 6 aa, synthetic construct
PKERVY

SEQ ID NO: 23040 - protein, 6 aa, synthetic construct
PKENAD

SEQ ID NO: 23041 - protein, 6 aa, synthetic construct
PKENAE

SEQ ID NO: 23042 - protein, 6 aa, synthetic construct
PKENAF

SEQ ID NO: 23043 - protein, 6 aa, synthetic construct
PKENAW

SEQ ID NO: 23044 - protein, 6 aa, synthetic construct
PKENAY

SEQ ID NO: 23045 - protein, 6 aa, synthetic construct
PKENRD

SEQ ID NO: 23046 - protein, 6 aa, synthetic construct
PKENRE

SEQ ID NO: 23047 - protein, 6 aa, synthetic construct
PKENRF

SEQ ID NO: 23048 - protein, 6 aa, synthetic construct
PKENRW

SEQ ID NO: 23049 - protein, 6 aa, synthetic construct
PKENRY

SEQ ID NO: 23050 - protein, 6 aa, synthetic construct
PKENND

SEQ ID NO: 23051 - protein, 6 aa, synthetic construct
PKENNE

SEQ ID NO: 23052 - protein, 6 aa, synthetic construct
PKENNF

SEQ ID NO: 23053 - protein, 6 aa, synthetic construct
PKENNW

SEQ ID NO: 23054 - protein, 6 aa, synthetic construct
PKENNY

SEQ ID NO: 23055 - protein, 6 aa, synthetic construct
PKENDD

SEQ ID NO: 23056 - protein, 6 aa, synthetic construct
PKENDE

SEQ ID NO: 23057 - protein, 6 aa, synthetic construct
PKENDF

SEQ ID NO: 23058 - protein, 6 aa, synthetic construct
PKENDW

SEQ ID NO: 23059 - protein, 6 aa, synthetic construct
PKENDY

SEQ ID NO: 23060 - protein, 6 aa, synthetic construct
PKENCD

SEQ ID NO: 23061 - protein, 6 aa, synthetic construct
PKENCE

SEQ ID NO: 23062 - protein, 6 aa, synthetic construct
PKENCF

SEQ ID NO: 23063 - protein, 6 aa, synthetic construct
PKENCW

SEQ ID NO: 23064 - protein, 6 aa, synthetic construct
PKENCY

SEQ ID NO: 23065 - protein, 6 aa, synthetic construct
PKENQD

SEQ ID NO: 23066 - protein, 6 aa, synthetic construct
PKENQE

SEQ ID NO: 23067 - protein, 6 aa, synthetic construct
PKENQF

SEQ ID NO: 23068 - protein, 6 aa, synthetic construct
PKENQW

SEQ ID NO: 23069 - protein, 6 aa, synthetic construct
PKENQY

SEQ ID NO: 23070 - protein, 6 aa, synthetic construct
PKENED

SEQ ID NO: 23071 - protein, 6 aa, synthetic construct
PKENEE

SEQ ID NO: 23072 - protein, 6 aa, synthetic construct
PKENEF

SEQ ID NO: 23073 - protein, 6 aa, synthetic construct
PKENEW

SEQ ID NO: 23074 - protein, 6 aa, synthetic construct
PKENEY

SEQ ID NO: 23075 - protein, 6 aa, synthetic construct
PKENGD

SEQ ID NO: 23076 - protein, 6 aa, synthetic construct
PKENGE

SEQ ID NO: 23077 - protein, 6 aa, synthetic construct
PKENGF

SEQ ID NO: 23078 - protein, 6 aa, synthetic construct
PKENGW

SEQ ID NO: 23079 - protein, 6 aa, synthetic construct
PKENGY

SEQ ID NO: 23080 - protein, 6 aa, synthetic construct
PKENHD

SEQ ID NO: 23081 - protein, 6 aa, synthetic construct
PKENHE

SEQ ID NO: 23082 - protein, 6 aa, synthetic construct
PKENHF

SEQ ID NO: 23083 - protein, 6 aa, synthetic construct
PKENHW

SEQ ID NO: 23084 - protein, 6 aa, synthetic construct
PKENHY

SEQ ID NO: 23085 - protein, 6 aa, synthetic construct
PKENID

SEQ ID NO: 23086 - protein, 6 aa, synthetic construct
PKENIE

SEQ ID NO: 23087 - protein, 6 aa, synthetic construct
PKENIF

SEQ ID NO: 23088 - protein, 6 aa, synthetic construct
PKENIW

SEQ ID NO: 23089 - protein, 6 aa, synthetic construct
PKENIY

SEQ ID NO: 23090 - protein, 6 aa, synthetic construct
PKENLD

SEQ ID NO: 23091 - protein, 6 aa, synthetic construct
PKENLE

SEQ ID NO: 23092 - protein, 6 aa, synthetic construct
PKENLF

SEQ ID NO: 23093 - protein, 6 aa, synthetic construct
PKENLW

SEQ ID NO: 23094 - protein, 6 aa, synthetic construct
PKENLY

SEQ ID NO: 23095 - protein, 6 aa, synthetic construct
PKENKD

SEQ ID NO: 23096 - protein, 6 aa, synthetic construct
PKENKE

SEQ ID NO: 23097 - protein, 6 aa, synthetic construct
PKENKF

SEQ ID NO: 23098 - protein, 6 aa, synthetic construct
PKENKW

SEQ ID NO: 23099 - protein, 6 aa, synthetic construct
PKENKY

SEQ ID NO: 23100 - protein, 6 aa, synthetic construct
PKENMD

SEQ ID NO: 23101 - protein, 6 aa, synthetic construct
PKENME

SEQ ID NO: 23102 - protein, 6 aa, synthetic construct
PKENMF

SEQ ID NO: 23103 - protein, 6 aa, synthetic construct
PKENMW

SEQ ID NO: 23104 - protein, 6 aa, synthetic construct
PKENMY

SEQ ID NO: 23105 - protein, 6 aa, synthetic construct
PKENFD

SEQ ID NO: 23106 - protein, 6 aa, synthetic construct
PKENFE

SEQ ID NO: 23107 - protein, 6 aa, synthetic construct
PKENFF

SEQ ID NO: 23108 - protein, 6 aa, synthetic construct
PKENFW

SEQ ID NO: 23109 - protein, 6 aa, synthetic construct
PKENFY

SEQ ID NO: 23110 - protein, 6 aa, synthetic construct
PKENPD

SEQ ID NO: 23111 - protein, 6 aa, synthetic construct
PKENPE

SEQ ID NO: 23112 - protein, 6 aa, synthetic construct
PKENPF

SEQ ID NO: 23113 - protein, 6 aa, synthetic construct
PKENPW

SEQ ID NO: 23114 - protein, 6 aa, synthetic construct
PKENPY

SEQ ID NO: 23115 - protein, 6 aa, synthetic construct
PKENSD

SEQ ID NO: 23116 - protein, 6 aa, synthetic construct
PKENSE

SEQ ID NO: 23117 - protein, 6 aa, synthetic construct
PKENSF

SEQ ID NO: 23118 - protein, 6 aa, synthetic construct
PKENSW

SEQ ID NO: 23119 - protein, 6 aa, synthetic construct
PKENSY

SEQ ID NO: 23120 - protein, 6 aa, synthetic construct
PKENTD

SEQ ID NO: 23121 - protein, 6 aa, synthetic construct
PKENTE

SEQ ID NO: 23122 - protein, 6 aa, synthetic construct
PKENTF

SEQ ID NO: 23123 - protein, 6 aa, synthetic construct
PKENTW

SEQ ID NO: 23124 - protein, 6 aa, synthetic construct
PKENTY

SEQ ID NO: 23125 - protein, 6 aa, synthetic construct
PKENWD

SEQ ID NO: 23126 - protein, 6 aa, synthetic construct
PKENWE

SEQ ID NO: 23127 - protein, 6 aa, synthetic construct
PKENWF

SEQ ID NO: 23128 - protein, 6 aa, synthetic construct
PKENWW

SEQ ID NO: 23129 - protein, 6 aa, synthetic construct
PKENWY

SEQ ID NO: 23130 - protein, 6 aa, synthetic construct
PKENYD

SEQ ID NO: 23131 - protein, 6 aa, synthetic construct
PKENYE

SEQ ID NO: 23132 - protein, 6 aa, synthetic construct
PKENYF

SEQ ID NO: 23133 - protein, 6 aa, synthetic construct
PKENYW

SEQ ID NO: 23134 - protein, 6 aa, synthetic construct
PKENYY

SEQ ID NO: 23135 - protein, 6 aa, synthetic construct
PKENVD

SEQ ID NO: 23136 - protein, 6 aa, synthetic construct
PKENVE

SEQ ID NO: 23137 - protein, 6 aa, synthetic construct
PKENVF

SEQ ID NO: 23138 - protein, 6 aa, synthetic construct
PKENVW

SEQ ID NO: 23139 - protein, 6 aa, synthetic construct
PKENVY

SEQ ID NO: 23140 - protein, 6 aa, synthetic construct
PKEDAD

SEQ ID NO: 23141 - protein, 6 aa, synthetic construct
PKEDAE

SEQ ID NO: 23142 - protein, 6 aa, synthetic construct
PKEDAF

SEQ ID NO: 23143 - protein, 6 aa, synthetic construct
PKEDAW

SEQ ID NO: 23144 - protein, 6 aa, synthetic construct
PKEDAY

SEQ ID NO: 23145 - protein, 6 aa, synthetic construct
PKEDRD

SEQ ID NO: 23146 - protein, 6 aa, synthetic construct
PKEDRE

SEQ ID NO: 23147 - protein, 6 aa, synthetic construct
PKEDRF

SEQ ID NO: 23148 - protein, 6 aa, synthetic construct
PKEDRW

SEQ ID NO: 23149 - protein, 6 aa, synthetic construct
PKEDRY

SEQ ID NO: 23150 - protein, 6 aa, synthetic construct
PKEDND

SEQ ID NO: 23151 - protein, 6 aa, synthetic construct
PKEDNE

SEQ ID NO: 23152 - protein, 6 aa, synthetic construct
PKEDNF

SEQ ID NO: 23153 - protein, 6 aa, synthetic construct
PKEDNW

SEQ ID NO: 23154 - protein, 6 aa, synthetic construct
PKEDNY

SEQ ID NO: 23155 - protein, 6 aa, synthetic construct
PKEDDD

SEQ ID NO: 23156 - protein, 6 aa, synthetic construct
PKEDDE

SEQ ID NO: 23157 - protein, 6 aa, synthetic construct
PKEDDF

SEQ ID NO: 23158 - protein, 6 aa, synthetic construct
PKEDDW

SEQ ID NO: 23159 - protein, 6 aa, synthetic construct
PKEDDY

SEQ ID NO: 23160 - protein, 6 aa, synthetic construct
PKEDCD

SEQ ID NO: 23161 - protein, 6 aa, synthetic construct
PKEDCE

SEQ ID NO: 23162 - protein, 6 aa, synthetic construct
PKEDCF

SEQ ID NO: 23163 - protein, 6 aa, synthetic construct
PKEDCW

SEQ ID NO: 23164 - protein, 6 aa, synthetic construct
PKEDCY

SEQ ID NO: 23165 - protein, 6 aa, synthetic construct
PKEDQD

SEQ ID NO: 23166 - protein, 6 aa, synthetic construct
PKEDQE

SEQ ID NO: 23167 - protein, 6 aa, synthetic construct
PKEDQF

SEQ ID NO: 23168 - protein, 6 aa, synthetic construct
PKEDQW

SEQ ID NO: 23169 - protein, 6 aa, synthetic construct
PKEDQY

SEQ ID NO: 23170 - protein, 6 aa, synthetic construct
PKEDED

SEQ ID NO: 23171 - protein, 6 aa, synthetic construct
PKEDEE

SEQ ID NO: 23172 - protein, 6 aa, synthetic construct
PKEDEF

SEQ ID NO: 23173 - protein, 6 aa, synthetic construct
PKEDEW

SEQ ID NO: 23174 - protein, 6 aa, synthetic construct
PKEDEY

SEQ ID NO: 23175 - protein, 6 aa, synthetic construct
PKEDGD

SEQ ID NO: 23176 - protein, 6 aa, synthetic construct
PKEDGE

SEQ ID NO: 23177 - protein, 6 aa, synthetic construct
PKEDGF

SEQ ID NO: 23178 - protein, 6 aa, synthetic construct
PKEDGW

SEQ ID NO: 23179 - protein, 6 aa, synthetic construct
PKEDGY

SEQ ID NO: 23180 - protein, 6 aa, synthetic construct
PKEDHD

SEQ ID NO: 23181 - protein, 6 aa, synthetic construct
PKEDHE

SEQ ID NO: 23182 - protein, 6 aa, synthetic construct
PKEDHF

SEQ ID NO: 23183 - protein, 6 aa, synthetic construct
PKEDHW

SEQ ID NO: 23184 - protein, 6 aa, synthetic construct
PKEDHY

SEQ ID NO: 23185 - protein, 6 aa, synthetic construct
PKEDID

SEQ ID NO: 23186 - protein, 6 aa, synthetic construct
PKEDIE

SEQ ID NO: 23187 - protein, 6 aa, synthetic construct
PKEDIF

SEQ ID NO: 23188 - protein, 6 aa, synthetic construct
PKEDIW

SEQ ID NO: 23189 - protein, 6 aa, synthetic construct
PKEDIY

SEQ ID NO: 23190 - protein, 6 aa, synthetic construct
PKEDLD

SEQ ID NO: 23191 - protein, 6 aa, synthetic construct
PKEDLE

SEQ ID NO: 23192 - protein, 6 aa, synthetic construct
PKEDLF

SEQ ID NO: 23193 - protein, 6 aa, synthetic construct
PKEDLW

SEQ ID NO: 23194 - protein, 6 aa, synthetic construct
PKEDLY

SEQ ID NO: 23195 - protein, 6 aa, synthetic construct
PKEDKD

SEQ ID NO: 23196 - protein, 6 aa, synthetic construct
PKEDKE

SEQ ID NO: 23197 - protein, 6 aa, synthetic construct
PKEDKF

SEQ ID NO: 23198 - protein, 6 aa, synthetic construct
PKEDKW

SEQ ID NO: 23199 - protein, 6 aa, synthetic construct
PKEDKY

SEQ ID NO: 23200 - protein, 6 aa, synthetic construct
PKEDMD

SEQ ID NO: 23201 - protein, 6 aa, synthetic construct
PKEDME

SEQ ID NO: 23202 - protein, 6 aa, synthetic construct
PKEDMF

SEQ ID NO: 23203 - protein, 6 aa, synthetic construct
PKEDMW

SEQ ID NO: 23204 - protein, 6 aa, synthetic construct
PKEDMY

SEQ ID NO: 23205 - protein, 6 aa, synthetic construct
PKEDFD

SEQ ID NO: 23206 - protein, 6 aa, synthetic construct
PKEDFE

SEQ ID NO: 23207 - protein, 6 aa, synthetic construct
PKEDFF

SEQ ID NO: 23208 - protein, 6 aa, synthetic construct
PKEDFW

SEQ ID NO: 23209 - protein, 6 aa, synthetic construct
PKEDFY

SEQ ID NO: 23210 - protein, 6 aa, synthetic construct
PKEDPD

SEQ ID NO: 23211 - protein, 6 aa, synthetic construct
PKEDPE

SEQ ID NO: 23212 - protein, 6 aa, synthetic construct
PKEDPF

SEQ ID NO: 23213 - protein, 6 aa, synthetic construct
PKEDPW

SEQ ID NO: 23214 - protein, 6 aa, synthetic construct
PKEDPY

SEQ ID NO: 23215 - protein, 6 aa, synthetic construct
PKEDSD

SEQ ID NO: 23216 - protein, 6 aa, synthetic construct
PKEDSE

SEQ ID NO: 23217 - protein, 6 aa, synthetic construct
PKEDSF

SEQ ID NO: 23218 - protein, 6 aa, synthetic construct
PKEDSW

SEQ ID NO: 23219 - protein, 6 aa, synthetic construct
PKEDSY

SEQ ID NO: 23220 - protein, 6 aa, synthetic construct
PKEDTD

SEQ ID NO: 23221 - protein, 6 aa, synthetic construct
PKEDTE

SEQ ID NO: 23222 - protein, 6 aa, synthetic construct
PKEDTF

SEQ ID NO: 23223 - protein, 6 aa, synthetic construct
PKEDTW

SEQ ID NO: 23224 - protein, 6 aa, synthetic construct
PKEDTY

SEQ ID NO: 23225 - protein, 6 aa, synthetic construct
PKEDWD

SEQ ID NO: 23226 - protein, 6 aa, synthetic construct
PKEDWE

SEQ ID NO: 23227 - protein, 6 aa, synthetic construct
PKEDWF

SEQ ID NO: 23228 - protein, 6 aa, synthetic construct
PKEDWW

SEQ ID NO: 23229 - protein, 6 aa, synthetic construct
PKEDWY

SEQ ID NO: 23230 - protein, 6 aa, synthetic construct
PKEDYD

SEQ ID NO: 23231 - protein, 6 aa, synthetic construct
PKEDYE

SEQ ID NO: 23232 - protein, 6 aa, synthetic construct
PKEDYF

SEQ ID NO: 23233 - protein, 6 aa, synthetic construct
PKEDYW

SEQ ID NO: 23234 - protein, 6 aa, synthetic construct
PKEDYY

SEQ ID NO: 23235 - protein, 6 aa, synthetic construct
PKEDVD

SEQ ID NO: 23236 - protein, 6 aa, synthetic construct
PKEDVE

SEQ ID NO: 23237 - protein, 6 aa, synthetic construct
PKEDVF

SEQ ID NO: 23238 - protein, 6 aa, synthetic construct
PKEDVW

SEQ ID NO: 23239 - protein, 6 aa, synthetic construct
PKEDVY

SEQ ID NO: 23240 - protein, 6 aa, synthetic construct
PKECAD

SEQ ID NO: 23241 - protein, 6 aa, synthetic construct
PKECAE

SEQ ID NO: 23242 - protein, 6 aa, synthetic construct
PKECAF

SEQ ID NO: 23243 - protein, 6 aa, synthetic construct
PKECAW

SEQ ID NO: 23244 - protein, 6 aa, synthetic construct
PKECAY

SEQ ID NO: 23245 - protein, 6 aa, synthetic construct
PKECRD

SEQ ID NO: 23246 - protein, 6 aa, synthetic construct
PKECRE

SEQ ID NO: 23247 - protein, 6 aa, synthetic construct
PKECRF

SEQ ID NO: 23248 - protein, 6 aa, synthetic construct
PKECRW

SEQ ID NO: 23249 - protein, 6 aa, synthetic construct
PKECRY

SEQ ID NO: 23250 - protein, 6 aa, synthetic construct
PKECND

SEQ ID NO: 23251 - protein, 6 aa, synthetic construct
PKECNE

SEQ ID NO: 23252 - protein, 6 aa, synthetic construct
PKECNF

SEQ ID NO: 23253 - protein, 6 aa, synthetic construct
PKECNW

SEQ ID NO: 23254 - protein, 6 aa, synthetic construct
PKECNY

SEQ ID NO: 23255 - protein, 6 aa, synthetic construct
PKECDD

SEQ ID NO: 23256 - protein, 6 aa, synthetic construct
PKECDE

SEQ ID NO: 23257 - protein, 6 aa, synthetic construct
PKECDF

SEQ ID NO: 23258 - protein, 6 aa, synthetic construct
PKECDW

SEQ ID NO: 23259 - protein, 6 aa, synthetic construct
PKECDY

SEQ ID NO: 23260 - protein, 6 aa, synthetic construct
PKECCD

SEQ ID NO: 23261 - protein, 6 aa, synthetic construct
PKECCE

SEQ ID NO: 23262 - protein, 6 aa, synthetic construct
PKECCF

SEQ ID NO: 23263 - protein, 6 aa, synthetic construct
PKECCW

SEQ ID NO: 23264 - protein, 6 aa, synthetic construct
PKECCY

SEQ ID NO: 23265 - protein, 6 aa, synthetic construct
PKECQD

SEQ ID NO: 23266 - protein, 6 aa, synthetic construct
PKECQE

SEQ ID NO: 23267 - protein, 6 aa, synthetic construct
PKECQF

SEQ ID NO: 23268 - protein, 6 aa, synthetic construct
PKECQW

SEQ ID NO: 23269 - protein, 6 aa, synthetic construct
PKECQY

SEQ ID NO: 23270 - protein, 6 aa, synthetic construct
PKECED

SEQ ID NO: 23271 - protein, 6 aa, synthetic construct
PKECEE

SEQ ID NO: 23272 - protein, 6 aa, synthetic construct
PKECEF

SEQ ID NO: 23273 - protein, 6 aa, synthetic construct
PKECEW

SEQ ID NO: 23274 - protein, 6 aa, synthetic construct
PKECEY

SEQ ID NO: 23275 - protein, 6 aa, synthetic construct
PKECGD

SEQ ID NO: 23276 - protein, 6 aa, synthetic construct
PKECGE

SEQ ID NO: 23277 - protein, 6 aa, synthetic construct
PKECGF

SEQ ID NO: 23278 - protein, 6 aa, synthetic construct
PKECGW

SEQ ID NO: 23279 - protein, 6 aa, synthetic construct
PKECGY

SEQ ID NO: 23280 - protein, 6 aa, synthetic construct
PKECHD

SEQ ID NO: 23281 - protein, 6 aa, synthetic construct
PKECHE

SEQ ID NO: 23282 - protein, 6 aa, synthetic construct
PKECHF

SEQ ID NO: 23283 - protein, 6 aa, synthetic construct
PKECHW

SEQ ID NO: 23284 - protein, 6 aa, synthetic construct
PKECHY

SEQ ID NO: 23285 - protein, 6 aa, synthetic construct
PKECID

SEQ ID NO: 23286 - protein, 6 aa, synthetic construct
PKECIE

SEQ ID NO: 23287 - protein, 6 aa, synthetic construct
PKECIF

SEQ ID NO: 23288 - protein, 6 aa, synthetic construct
PKECIW

SEQ ID NO: 23289 - protein, 6 aa, synthetic construct
PKECIY

SEQ ID NO: 23290 - protein, 6 aa, synthetic construct
PKECLD

SEQ ID NO: 23291 - protein, 6 aa, synthetic construct
PKECLE

SEQ ID NO: 23292 - protein, 6 aa, synthetic construct
PKECLF

SEQ ID NO: 23293 - protein, 6 aa, synthetic construct
PKECLW

SEQ ID NO: 23294 - protein, 6 aa, synthetic construct
PKECLY

SEQ ID NO: 23295 - protein, 6 aa, synthetic construct
PKECKD

SEQ ID NO: 23296 - protein, 6 aa, synthetic construct
PKECKE

SEQ ID NO: 23297 - protein, 6 aa, synthetic construct
PKECKF

SEQ ID NO: 23298 - protein, 6 aa, synthetic construct
PKECKW

SEQ ID NO: 23299 - protein, 6 aa, synthetic construct
PKECKY

SEQ ID NO: 23300 - protein, 6 aa, synthetic construct
PKECMD

SEQ ID NO: 23301 - protein, 6 aa, synthetic construct
PKECME

SEQ ID NO: 23302 - protein, 6 aa, synthetic construct
PKECMF

SEQ ID NO: 23303 - protein, 6 aa, synthetic construct
PKECMW

SEQ ID NO: 23304 - protein, 6 aa, synthetic construct
PKECMY

SEQ ID NO: 23305 - protein, 6 aa, synthetic construct
PKECFD

SEQ ID NO: 23306 - protein, 6 aa, synthetic construct
PKECFE

SEQ ID NO: 23307 - protein, 6 aa, synthetic construct
PKECFF

SEQ ID NO: 23308 - protein, 6 aa, synthetic construct
PKECFW

SEQ ID NO: 23309 - protein, 6 aa, synthetic construct
PKECFY

SEQ ID NO: 23310 - protein, 6 aa, synthetic construct
PKECPD

SEQ ID NO: 23311 - protein, 6 aa, synthetic construct
PKECPE

SEQ ID NO: 23312 - protein, 6 aa, synthetic construct
PKECPF

SEQ ID NO: 23313 - protein, 6 aa, synthetic construct
PKECPW

SEQ ID NO: 23314 - protein, 6 aa, synthetic construct
PKECPY

SEQ ID NO: 23315 - protein, 6 aa, synthetic construct
PKECSD

SEQ ID NO: 23316 - protein, 6 aa, synthetic construct
PKECSE

SEQ ID NO: 23317 - protein, 6 aa, synthetic construct
PKECSF

SEQ ID NO: 23318 - protein, 6 aa, synthetic construct
PKECSW

SEQ ID NO: 23319 - protein, 6 aa, synthetic construct
PKECSY

SEQ ID NO: 23320 - protein, 6 aa, synthetic construct
PKECTD

SEQ ID NO: 23321 - protein, 6 aa, synthetic construct
PKECTE

SEQ ID NO: 23322 - protein, 6 aa, synthetic construct
PKECTF

SEQ ID NO: 23323 - protein, 6 aa, synthetic construct
PKECTW

SEQ ID NO: 23324 - protein, 6 aa, synthetic construct
PKECTY

SEQ ID NO: 23325 - protein, 6 aa, synthetic construct
PKECWD

SEQ ID NO: 23326 - protein, 6 aa, synthetic construct
PKECWE

SEQ ID NO: 23327 - protein, 6 aa, synthetic construct
PKECWF

SEQ ID NO: 23328 - protein, 6 aa, synthetic construct
PKECWW

SEQ ID NO: 23329 - protein, 6 aa, synthetic construct
PKECWY

SEQ ID NO: 23330 - protein, 6 aa, synthetic construct
PKECYD

SEQ ID NO: 23331 - protein, 6 aa, synthetic construct
PKECYE

SEQ ID NO: 23332 - protein, 6 aa, synthetic construct
PKECYF

SEQ ID NO: 23333 - protein, 6 aa, synthetic construct
PKECYW

SEQ ID NO: 23334 - protein, 6 aa, synthetic construct
PKECYY

SEQ ID NO: 23335 - protein, 6 aa, synthetic construct
PKECVD

SEQ ID NO: 23336 - protein, 6 aa, synthetic construct
PKECVE

SEQ ID NO: 23337 - protein, 6 aa, synthetic construct
PKECVF

SEQ ID NO: 23338 - protein, 6 aa, synthetic construct
PKECVW

SEQ ID NO: 23339 - protein, 6 aa, synthetic construct
PKECVY

SEQ ID NO: 23340 - protein, 6 aa, synthetic construct
PKEQAD

SEQ ID NO: 23341 - protein, 6 aa, synthetic construct
PKEQAE

SEQ ID NO: 23342 - protein, 6 aa, synthetic construct
PKEQAF

SEQ ID NO: 23343 - protein, 6 aa, synthetic construct
PKEQAW

SEQ ID NO: 23344 - protein, 6 aa, synthetic construct
PKEQAY

SEQ ID NO: 23345 - protein, 6 aa, synthetic construct
PKEQRD

SEQ ID NO: 23346 - protein, 6 aa, synthetic construct
PKEQRE

SEQ ID NO: 23347 - protein, 6 aa, synthetic construct
PKEQRF

SEQ ID NO: 23348 - protein, 6 aa, synthetic construct
PKEQRW

SEQ ID NO: 23349 - protein, 6 aa, synthetic construct
PKEQRY

SEQ ID NO: 23350 - protein, 6 aa, synthetic construct
PKEQND

SEQ ID NO: 23351 - protein, 6 aa, synthetic construct
PKEQNE

SEQ ID NO: 23352 - protein, 6 aa, synthetic construct
PKEQNF

SEQ ID NO: 23353 - protein, 6 aa, synthetic construct
PKEQNW

SEQ ID NO: 23354 - protein, 6 aa, synthetic construct
PKEQNY

SEQ ID NO: 23355 - protein, 6 aa, synthetic construct
PKEQDD

SEQ ID NO: 23356 - protein, 6 aa, synthetic construct
PKEQDE

SEQ ID NO: 23357 - protein, 6 aa, synthetic construct
PKEQDF

SEQ ID NO: 23358 - protein, 6 aa, synthetic construct
PKEQDW

SEQ ID NO: 23359 - protein, 6 aa, synthetic construct
PKEQDY

SEQ ID NO: 23360 - protein, 6 aa, synthetic construct
PKEQCD

SEQ ID NO: 23361 - protein, 6 aa, synthetic construct
PKEQCE

SEQ ID NO: 23362 - protein, 6 aa, synthetic construct
PKEQCF

SEQ ID NO: 23363 - protein, 6 aa, synthetic construct
PKEQCW

SEQ ID NO: 23364 - protein, 6 aa, synthetic construct
PKEQCY

SEQ ID NO: 23365 - protein, 6 aa, synthetic construct
PKEQQD

SEQ ID NO: 23366 - protein, 6 aa, synthetic construct
PKEQQE

SEQ ID NO: 23367 - protein, 6 aa, synthetic construct
PKEQQF

SEQ ID NO: 23368 - protein, 6 aa, synthetic construct
PKEQQW

SEQ ID NO: 23369 - protein, 6 aa, synthetic construct
PKEQQY

SEQ ID NO: 23370 - protein, 6 aa, synthetic construct
PKEQED

SEQ ID NO: 23371 - protein, 6 aa, synthetic construct
PKEQEE

SEQ ID NO: 23372 - protein, 6 aa, synthetic construct
PKEQEF

SEQ ID NO: 23373 - protein, 6 aa, synthetic construct
PKEQEW

SEQ ID NO: 23374 - protein, 6 aa, synthetic construct
PKEQEY

SEQ ID NO: 23375 - protein, 6 aa, synthetic construct
PKEQGD

SEQ ID NO: 23376 - protein, 6 aa, synthetic construct
PKEQGE

SEQ ID NO: 23377 - protein, 6 aa, synthetic construct
PKEQGF

SEQ ID NO: 23378 - protein, 6 aa, synthetic construct
PKEQGW

SEQ ID NO: 23379 - protein, 6 aa, synthetic construct
PKEQGY

SEQ ID NO: 23380 - protein, 6 aa, synthetic construct
PKEQHD

SEQ ID NO: 23381 - protein, 6 aa, synthetic construct
PKEQHE

SEQ ID NO: 23382 - protein, 6 aa, synthetic construct
PKEQHF

SEQ ID NO: 23383 - protein, 6 aa, synthetic construct
PKEQHW

SEQ ID NO: 23384 - protein, 6 aa, synthetic construct
PKEQHY

SEQ ID NO: 23385 - protein, 6 aa, synthetic construct
PKEQID

SEQ ID NO: 23386 - protein, 6 aa, synthetic construct
PKEQIE

SEQ ID NO: 23387 - protein, 6 aa, synthetic construct
PKEQIF

SEQ ID NO: 23388 - protein, 6 aa, synthetic construct
PKEQIW

SEQ ID NO: 23389 - protein, 6 aa, synthetic construct
PKEQIY

SEQ ID NO: 23390 - protein, 6 aa, synthetic construct
PKEQLD

SEQ ID NO: 23391 - protein, 6 aa, synthetic construct
PKEQLE

SEQ ID NO: 23392 - protein, 6 aa, synthetic construct
PKEQLF

SEQ ID NO: 23393 - protein, 6 aa, synthetic construct
PKEQLW

SEQ ID NO: 23394 - protein, 6 aa, synthetic construct
PKEQLY

SEQ ID NO: 23395 - protein, 6 aa, synthetic construct
PKEQKD

SEQ ID NO: 23396 - protein, 6 aa, synthetic construct
PKEQKE

SEQ ID NO: 23397 - protein, 6 aa, synthetic construct
PKEQKF

SEQ ID NO: 23398 - protein, 6 aa, synthetic construct
PKEQKW

SEQ ID NO: 23399 - protein, 6 aa, synthetic construct
PKEQKY

SEQ ID NO: 23400 - protein, 6 aa, synthetic construct
PKEQMD

SEQ ID NO: 23401 - protein, 6 aa, synthetic construct
PKEQME

SEQ ID NO: 23402 - protein, 6 aa, synthetic construct
PKEQMF

SEQ ID NO: 23403 - protein, 6 aa, synthetic construct
PKEQMW

SEQ ID NO: 23404 - protein, 6 aa, synthetic construct
PKEQMY

SEQ ID NO: 23405 - protein, 6 aa, synthetic construct
PKEQFD

SEQ ID NO: 23406 - protein, 6 aa, synthetic construct
PKEQFE

SEQ ID NO: 23407 - protein, 6 aa, synthetic construct
PKEQFF

SEQ ID NO: 23408 - protein, 6 aa, synthetic construct
PKEQFW

SEQ ID NO: 23409 - protein, 6 aa, synthetic construct
PKEQFY

SEQ ID NO: 23410 - protein, 6 aa, synthetic construct
PKEQPD

SEQ ID NO: 23411 - protein, 6 aa, synthetic construct
PKEQPE

SEQ ID NO: 23412 - protein, 6 aa, synthetic construct
PKEQPF

SEQ ID NO: 23413 - protein, 6 aa, synthetic construct
PKEQPW

SEQ ID NO: 23414 - protein, 6 aa, synthetic construct
PKEQPY

SEQ ID NO: 23415 - protein, 6 aa, synthetic construct
PKEQSD

SEQ ID NO: 23416 - protein, 6 aa, synthetic construct
PKEQSE

SEQ ID NO: 23417 - protein, 6 aa, synthetic construct
PKEQSF

SEQ ID NO: 23418 - protein, 6 aa, synthetic construct
PKEQSW

SEQ ID NO: 23419 - protein, 6 aa, synthetic construct
PKEQSY

SEQ ID NO: 23420 - protein, 6 aa, synthetic construct
PKEQTD

SEQ ID NO: 23421 - protein, 6 aa, synthetic construct
PKEQTE

SEQ ID NO: 23422 - protein, 6 aa, synthetic construct
PKEQTF

SEQ ID NO: 23423 - protein, 6 aa, synthetic construct
PKEQTW

SEQ ID NO: 23424 - protein, 6 aa, synthetic construct
PKEQTY

SEQ ID NO: 23425 - protein, 6 aa, synthetic construct
PKEQWD

SEQ ID NO: 23426 - protein, 6 aa, synthetic construct
PKEQWE

SEQ ID NO: 23427 - protein, 6 aa, synthetic construct
PKEQWF

SEQ ID NO: 23428 - protein, 6 aa, synthetic construct
PKEQWW

SEQ ID NO: 23429 - protein, 6 aa, synthetic construct
PKEQWY

SEQ ID NO: 23430 - protein, 6 aa, synthetic construct
PKEQYD

SEQ ID NO: 23431 - protein, 6 aa, synthetic construct
PKEQYE

SEQ ID NO: 23432 - protein, 6 aa, synthetic construct
PKEQYF

SEQ ID NO: 23433 - protein, 6 aa, synthetic construct
PKEQYW

SEQ ID NO: 23434 - protein, 6 aa, synthetic construct
PKEQYY

SEQ ID NO: 23435 - protein, 6 aa, synthetic construct
PKEQVD

SEQ ID NO: 23436 - protein, 6 aa, synthetic construct
PKEQVE

SEQ ID NO: 23437 - protein, 6 aa, synthetic construct
PKEQVF

SEQ ID NO: 23438 - protein, 6 aa, synthetic construct
PKEQVW

SEQ ID NO: 23439 - protein, 6 aa, synthetic construct
PKEQVY

SEQ ID NO: 23440 - protein, 6 aa, synthetic construct
PKEEAD

SEQ ID NO: 23441 - protein, 6 aa, synthetic construct
PKEEAE

SEQ ID NO: 23442 - protein, 6 aa, synthetic construct
PKEEAF

SEQ ID NO: 23443 - protein, 6 aa, synthetic construct
PKEEAW

SEQ ID NO: 23444 - protein, 6 aa, synthetic construct
PKEEAY

SEQ ID NO: 23445 - protein, 6 aa, synthetic construct
PKEERD

SEQ ID NO: 23446 - protein, 6 aa, synthetic construct
PKEERE

SEQ ID NO: 23447 - protein, 6 aa, synthetic construct
PKEERF

SEQ ID NO: 23448 - protein, 6 aa, synthetic construct
PKEERW

SEQ ID NO: 23449 - protein, 6 aa, synthetic construct
PKEERY

SEQ ID NO: 23450 - protein, 6 aa, synthetic construct
PKEEND

SEQ ID NO: 23451 - protein, 6 aa, synthetic construct
PKEENE

SEQ ID NO: 23452 - protein, 6 aa, synthetic construct
PKEENF

SEQ ID NO: 23453 - protein, 6 aa, synthetic construct
PKEENW

SEQ ID NO: 23454 - protein, 6 aa, synthetic construct
PKEENY

SEQ ID NO: 23455 - protein, 6 aa, synthetic construct
PKEEDD

SEQ ID NO: 23456 - protein, 6 aa, synthetic construct
PKEEDE

SEQ ID NO: 23457 - protein, 6 aa, synthetic construct
PKEEDF

SEQ ID NO: 23458 - protein, 6 aa, synthetic construct
PKEEDW

SEQ ID NO: 23459 - protein, 6 aa, synthetic construct
PKEEDY

SEQ ID NO: 23460 - protein, 6 aa, synthetic construct
PKEECD

SEQ ID NO: 23461 - protein, 6 aa, synthetic construct
PKEECE

SEQ ID NO: 23462 - protein, 6 aa, synthetic construct
PKEECF

SEQ ID NO: 23463 - protein, 6 aa, synthetic construct
PKEECW

SEQ ID NO: 23464 - protein, 6 aa, synthetic construct
PKEECY

SEQ ID NO: 23465 - protein, 6 aa, synthetic construct
PKEEQD

SEQ ID NO: 23466 - protein, 6 aa, synthetic construct
PKEEQE

SEQ ID NO: 23467 - protein, 6 aa, synthetic construct
PKEEQF

SEQ ID NO: 23468 - protein, 6 aa, synthetic construct
PKEEQW

SEQ ID NO: 23469 - protein, 6 aa, synthetic construct
PKEEQY

SEQ ID NO: 23470 - protein, 6 aa, synthetic construct
PKEEED

SEQ ID NO: 23471 - protein, 6 aa, synthetic construct
PKEEEE

SEQ ID NO: 23472 - protein, 6 aa, synthetic construct
PKEEEF

SEQ ID NO: 23473 - protein, 6 aa, synthetic construct
PKEEEW

SEQ ID NO: 23474 - protein, 6 aa, synthetic construct
PKEEEY

SEQ ID NO: 23475 - protein, 6 aa, synthetic construct
PKEEGD

SEQ ID NO: 23476 - protein, 6 aa, synthetic construct
PKEEGE

SEQ ID NO: 23477 - protein, 6 aa, synthetic construct
PKEEGF

SEQ ID NO: 23478 - protein, 6 aa, synthetic construct
PKEEGW

SEQ ID NO: 23479 - protein, 6 aa, synthetic construct
PKEEGY

SEQ ID NO: 23480 - protein, 6 aa, synthetic construct
PKEEHD

SEQ ID NO: 23481 - protein, 6 aa, synthetic construct
PKEEHE

SEQ ID NO: 23482 - protein, 6 aa, synthetic construct
PKEEHF

SEQ ID NO: 23483 - protein, 6 aa, synthetic construct
PKEEHW

SEQ ID NO: 23484 - protein, 6 aa, synthetic construct
PKEEHY

SEQ ID NO: 23485 - protein, 6 aa, synthetic construct
PKEEID

SEQ ID NO: 23486 - protein, 6 aa, synthetic construct
PKEEIE

SEQ ID NO: 23487 - protein, 6 aa, synthetic construct
PKEEIF

SEQ ID NO: 23488 - protein, 6 aa, synthetic construct
PKEEIW

SEQ ID NO: 23489 - protein, 6 aa, synthetic construct
PKEEIY

SEQ ID NO: 23490 - protein, 6 aa, synthetic construct
PKEELD

SEQ ID NO: 23491 - protein, 6 aa, synthetic construct
PKEELE

SEQ ID NO: 23492 - protein, 6 aa, synthetic construct
PKEELF

SEQ ID NO: 23493 - protein, 6 aa, synthetic construct
PKEELW

SEQ ID NO: 23494 - protein, 6 aa, synthetic construct
PKEELY

SEQ ID NO: 23495 - protein, 6 aa, synthetic construct
PKEEKD

SEQ ID NO: 23496 - protein, 6 aa, synthetic construct
PKEEKE

SEQ ID NO: 23497 - protein, 6 aa, synthetic construct
PKEEKF

SEQ ID NO: 23498 - protein, 6 aa, synthetic construct
PKEEKW

SEQ ID NO: 23499 - protein, 6 aa, synthetic construct
PKEEKY

SEQ ID NO: 23500 - protein, 6 aa, synthetic construct
PKEEMD

SEQ ID NO: 23501 - protein, 6 aa, synthetic construct
PKEEME

SEQ ID NO: 23502 - protein, 6 aa, synthetic construct
PKEEMF

SEQ ID NO: 23503 - protein, 6 aa, synthetic construct
PKEEMW

SEQ ID NO: 23504 - protein, 6 aa, synthetic construct
PKEEMY

SEQ ID NO: 23505 - protein, 6 aa, synthetic construct
PKEEFD

SEQ ID NO: 23506 - protein, 6 aa, synthetic construct
PKEEFE

SEQ ID NO: 23507 - protein, 6 aa, synthetic construct
PKEEFF

SEQ ID NO: 23508 - protein, 6 aa, synthetic construct
PKEEFW

SEQ ID NO: 23509 - protein, 6 aa, synthetic construct
PKEEFY

SEQ ID NO: 23510 - protein, 6 aa, synthetic construct
PKEEPD

SEQ ID NO: 23511 - protein, 6 aa, synthetic construct
PKEEPE

SEQ ID NO: 23512 - protein, 6 aa, synthetic construct
PKEEPF

SEQ ID NO: 23513 - protein, 6 aa, synthetic construct
PKEEPW

SEQ ID NO: 23514 - protein, 6 aa, synthetic construct
PKEEPY

SEQ ID NO: 23515 - protein, 6 aa, synthetic construct
PKEESD

SEQ ID NO: 23516 - protein, 6 aa, synthetic construct
PKEESE

SEQ ID NO: 23517 - protein, 6 aa, synthetic construct
PKEESF

SEQ ID NO: 23518 - protein, 6 aa, synthetic construct
PKEESW

SEQ ID NO: 23519 - protein, 6 aa, synthetic construct
PKEESY

SEQ ID NO: 23520 - protein, 6 aa, synthetic construct
PKEETD

SEQ ID NO: 23521 - protein, 6 aa, synthetic construct
PKEETE

SEQ ID NO: 23522 - protein, 6 aa, synthetic construct
PKEETF

SEQ ID NO: 23523 - protein, 6 aa, synthetic construct
PKEETW

SEQ ID NO: 23524 - protein, 6 aa, synthetic construct
PKEETY

SEQ ID NO: 23525 - protein, 6 aa, synthetic construct
PKEEWD

SEQ ID NO: 23526 - protein, 6 aa, synthetic construct
PKEEWE

SEQ ID NO: 23527 - protein, 6 aa, synthetic construct
PKEEWF

SEQ ID NO: 23528 - protein, 6 aa, synthetic construct
PKEEWW

SEQ ID NO: 23529 - protein, 6 aa, synthetic construct
PKEEWY

SEQ ID NO: 23530 - protein, 6 aa, synthetic construct
PKEEYD

SEQ ID NO: 23531 - protein, 6 aa, synthetic construct
PKEEYE

SEQ ID NO: 23532 - protein, 6 aa, synthetic construct
PKEEYF

SEQ ID NO: 23533 - protein, 6 aa, synthetic construct
PKEEYW

SEQ ID NO: 23534 - protein, 6 aa, synthetic construct
PKEEYY

SEQ ID NO: 23535 - protein, 6 aa, synthetic construct
PKEEVD

SEQ ID NO: 23536 - protein, 6 aa, synthetic construct
PKEEVE

SEQ ID NO: 23537 - protein, 6 aa, synthetic construct
PKEEVF

SEQ ID NO: 23538 - protein, 6 aa, synthetic construct
PKEEVW

SEQ ID NO: 23539 - protein, 6 aa, synthetic construct
PKEEVY

SEQ ID NO: 23540 - protein, 6 aa, synthetic construct
PKEGAD

SEQ ID NO: 23541 - protein, 6 aa, synthetic construct
PKEGAE

SEQ ID NO: 23542 - protein, 6 aa, synthetic construct
PKEGAF

SEQ ID NO: 23543 - protein, 6 aa, synthetic construct
PKEGAW

SEQ ID NO: 23544 - protein, 6 aa, synthetic construct
PKEGAY

SEQ ID NO: 23545 - protein, 6 aa, synthetic construct
PKEGRD

SEQ ID NO: 23546 - protein, 6 aa, synthetic construct
PKEGRE

SEQ ID NO: 23547 - protein, 6 aa, synthetic construct
PKEGRF

SEQ ID NO: 23548 - protein, 6 aa, synthetic construct
PKEGRW

SEQ ID NO: 23549 - protein, 6 aa, synthetic construct
PKEGRY

SEQ ID NO: 23550 - protein, 6 aa, synthetic construct
PKEGND

SEQ ID NO: 23551 - protein, 6 aa, synthetic construct
PKEGNE

SEQ ID NO: 23552 - protein, 6 aa, synthetic construct
PKEGNF

SEQ ID NO: 23553 - protein, 6 aa, synthetic construct
PKEGNW

SEQ ID NO: 23554 - protein, 6 aa, synthetic construct
PKEGNY

SEQ ID NO: 23555 - protein, 6 aa, synthetic construct
PKEGDD

SEQ ID NO: 23556 - protein, 6 aa, synthetic construct
PKEGDE

SEQ ID NO: 23557 - protein, 6 aa, synthetic construct
PKEGDF

SEQ ID NO: 23558 - protein, 6 aa, synthetic construct
PKEGDW

SEQ ID NO: 23559 - protein, 6 aa, synthetic construct
PKEGDY

SEQ ID NO: 23560 - protein, 6 aa, synthetic construct
PKEGCD

SEQ ID NO: 23561 - protein, 6 aa, synthetic construct
PKEGCE

SEQ ID NO: 23562 - protein, 6 aa, synthetic construct
PKEGCF

SEQ ID NO: 23563 - protein, 6 aa, synthetic construct
PKEGCW

SEQ ID NO: 23564 - protein, 6 aa, synthetic construct
PKEGCY

SEQ ID NO: 23565 - protein, 6 aa, synthetic construct
PKEGQD

SEQ ID NO: 23566 - protein, 6 aa, synthetic construct
PKEGQE

SEQ ID NO: 23567 - protein, 6 aa, synthetic construct
PKEGQF

SEQ ID NO: 23568 - protein, 6 aa, synthetic construct
PKEGQW

SEQ ID NO: 23569 - protein, 6 aa, synthetic construct
PKEGQY

SEQ ID NO: 23570 - protein, 6 aa, synthetic construct
PKEGED

SEQ ID NO: 23571 - protein, 6 aa, synthetic construct
PKEGEE

SEQ ID NO: 23572 - protein, 6 aa, synthetic construct
PKEGEF

SEQ ID NO: 23573 - protein, 6 aa, synthetic construct
PKEGEW

SEQ ID NO: 23574 - protein, 6 aa, synthetic construct
PKEGEY

SEQ ID NO: 23575 - protein, 6 aa, synthetic construct
PKEGGD

SEQ ID NO: 23576 - protein, 6 aa, synthetic construct
PKEGGE

SEQ ID NO: 23577 - protein, 6 aa, synthetic construct
PKEGGF

SEQ ID NO: 23578 - protein, 6 aa, synthetic construct
PKEGGW

SEQ ID NO: 23579 - protein, 6 aa, synthetic construct
PKEGGY

SEQ ID NO: 23580 - protein, 6 aa, synthetic construct
PKEGHD

SEQ ID NO: 23581 - protein, 6 aa, synthetic construct
PKEGHE

SEQ ID NO: 23582 - protein, 6 aa, synthetic construct
PKEGHF

SEQ ID NO: 23583 - protein, 6 aa, synthetic construct
PKEGHW

SEQ ID NO: 23584 - protein, 6 aa, synthetic construct
PKEGHY

SEQ ID NO: 23585 - protein, 6 aa, synthetic construct
PKEGID

SEQ ID NO: 23586 - protein, 6 aa, synthetic construct
PKEGIE

SEQ ID NO: 23587 - protein, 6 aa, synthetic construct
PKEGIF

SEQ ID NO: 23588 - protein, 6 aa, synthetic construct
PKEGIW

SEQ ID NO: 23589 - protein, 6 aa, synthetic construct
PKEGIY

SEQ ID NO: 23590 - protein, 6 aa, synthetic construct
PKEGLD

SEQ ID NO: 23591 - protein, 6 aa, synthetic construct
PKEGLE

SEQ ID NO: 23592 - protein, 6 aa, synthetic construct
PKEGLF

SEQ ID NO: 23593 - protein, 6 aa, synthetic construct
PKEGLW

SEQ ID NO: 23594 - protein, 6 aa, synthetic construct
PKEGLY

SEQ ID NO: 23595 - protein, 6 aa, synthetic construct
PKEGKD

SEQ ID NO: 23596 - protein, 6 aa, synthetic construct
PKEGKE

SEQ ID NO: 23597 - protein, 6 aa, synthetic construct
PKEGKF

SEQ ID NO: 23598 - protein, 6 aa, synthetic construct
PKEGKW

SEQ ID NO: 23599 - protein, 6 aa, synthetic construct
PKEGKY

SEQ ID NO: 23600 - protein, 6 aa, synthetic construct
PKEGMD

SEQ ID NO: 23601 - protein, 6 aa, synthetic construct
PKEGME

SEQ ID NO: 23602 - protein, 6 aa, synthetic construct
PKEGMF

SEQ ID NO: 23603 - protein, 6 aa, synthetic construct
PKEGMW

SEQ ID NO: 23604 - protein, 6 aa, synthetic construct
PKEGMY

SEQ ID NO: 23605 - protein, 6 aa, synthetic construct
PKEGFD

SEQ ID NO: 23606 - protein, 6 aa, synthetic construct
PKEGFE

SEQ ID NO: 23607 - protein, 6 aa, synthetic construct
PKEGFF

SEQ ID NO: 23608 - protein, 6 aa, synthetic construct
PKEGFW

SEQ ID NO: 23609 - protein, 6 aa, synthetic construct
PKEGFY

SEQ ID NO: 23610 - protein, 6 aa, synthetic construct
PKEGPD

SEQ ID NO: 23611 - protein, 6 aa, synthetic construct
PKEGPE

SEQ ID NO: 23612 - protein, 6 aa, synthetic construct
PKEGPF

SEQ ID NO: 23613 - protein, 6 aa, synthetic construct
PKEGPW

SEQ ID NO: 23614 - protein, 6 aa, synthetic construct
PKEGPY

SEQ ID NO: 23615 - protein, 6 aa, synthetic construct
PKEGSD

SEQ ID NO: 23616 - protein, 6 aa, synthetic construct
PKEGSE

SEQ ID NO: 23617 - protein, 6 aa, synthetic construct
PKEGSF

SEQ ID NO: 23618 - protein, 6 aa, synthetic construct
PKEGSW

SEQ ID NO: 23619 - protein, 6 aa, synthetic construct
PKEGSY

SEQ ID NO: 23620 - protein, 6 aa, synthetic construct
PKEGTD

SEQ ID NO: 23621 - protein, 6 aa, synthetic construct
PKEGTE

SEQ ID NO: 23622 - protein, 6 aa, synthetic construct
PKEGTF

SEQ ID NO: 23623 - protein, 6 aa, synthetic construct
PKEGTW

SEQ ID NO: 23624 - protein, 6 aa, synthetic construct
PKEGTY

SEQ ID NO: 23625 - protein, 6 aa, synthetic construct
PKEGWD

SEQ ID NO: 23626 - protein, 6 aa, synthetic construct
PKEGWE

SEQ ID NO: 23627 - protein, 6 aa, synthetic construct
PKEGWF

SEQ ID NO: 23628 - protein, 6 aa, synthetic construct
PKEGWW

SEQ ID NO: 23629 - protein, 6 aa, synthetic construct
PKEGWY

SEQ ID NO: 23630 - protein, 6 aa, synthetic construct
PKEGYD

SEQ ID NO: 23631 - protein, 6 aa, synthetic construct
PKEGYE

SEQ ID NO: 23632 - protein, 6 aa, synthetic construct
PKEGYF

SEQ ID NO: 23633 - protein, 6 aa, synthetic construct
PKEGYW

SEQ ID NO: 23634 - protein, 6 aa, synthetic construct
PKEGYY

SEQ ID NO: 23635 - protein, 6 aa, synthetic construct
PKEGVD

SEQ ID NO: 23636 - protein, 6 aa, synthetic construct
PKEGVE

SEQ ID NO: 23637 - protein, 6 aa, synthetic construct
PKEGVF

SEQ ID NO: 23638 - protein, 6 aa, synthetic construct
PKEGVW

SEQ ID NO: 23639 - protein, 6 aa, synthetic construct
PKEGVY

SEQ ID NO: 23640 - protein, 6 aa, synthetic construct
PKEHAD

SEQ ID NO: 23641 - protein, 6 aa, synthetic construct
PKEHAE

SEQ ID NO: 23642 - protein, 6 aa, synthetic construct
PKEHAF

SEQ ID NO: 23643 - protein, 6 aa, synthetic construct
PKEHAW

SEQ ID NO: 23644 - protein, 6 aa, synthetic construct
PKEHAY

SEQ ID NO: 23645 - protein, 6 aa, synthetic construct
PKEHRD

SEQ ID NO: 23646 - protein, 6 aa, synthetic construct
PKEHRE

SEQ ID NO: 23647 - protein, 6 aa, synthetic construct
PKEHRF

SEQ ID NO: 23648 - protein, 6 aa, synthetic construct
PKEHRW

SEQ ID NO: 23649 - protein, 6 aa, synthetic construct
PKEHRY

SEQ ID NO: 23650 - protein, 6 aa, synthetic construct
PKEHND

SEQ ID NO: 23651 - protein, 6 aa, synthetic construct
PKEHNE

SEQ ID NO: 23652 - protein, 6 aa, synthetic construct
PKEHNF

SEQ ID NO: 23653 - protein, 6 aa, synthetic construct
PKEHNW

SEQ ID NO: 23654 - protein, 6 aa, synthetic construct
PKEHNY

SEQ ID NO: 23655 - protein, 6 aa, synthetic construct
PKEHDD

SEQ ID NO: 23656 - protein, 6 aa, synthetic construct
PKEHDE

SEQ ID NO: 23657 - protein, 6 aa, synthetic construct
PKEHDF

SEQ ID NO: 23658 - protein, 6 aa, synthetic construct
PKEHDW

SEQ ID NO: 23659 - protein, 6 aa, synthetic construct
PKEHDY

SEQ ID NO: 23660 - protein, 6 aa, synthetic construct
PKEHCD

SEQ ID NO: 23661 - protein, 6 aa, synthetic construct
PKEHCE

SEQ ID NO: 23662 - protein, 6 aa, synthetic construct
PKEHCF

SEQ ID NO: 23663 - protein, 6 aa, synthetic construct
PKEHCW

SEQ ID NO: 23664 - protein, 6 aa, synthetic construct
PKEHCY

SEQ ID NO: 23665 - protein, 6 aa, synthetic construct
PKEHQD

SEQ ID NO: 23666 - protein, 6 aa, synthetic construct
PKEHQE

SEQ ID NO: 23667 - protein, 6 aa, synthetic construct
PKEHQF

SEQ ID NO: 23668 - protein, 6 aa, synthetic construct
PKEHQW

SEQ ID NO: 23669 - protein, 6 aa, synthetic construct
PKEHQY

SEQ ID NO: 23670 - protein, 6 aa, synthetic construct
PKEHED

SEQ ID NO: 23671 - protein, 6 aa, synthetic construct
PKEHEE

SEQ ID NO: 23672 - protein, 6 aa, synthetic construct
PKEHEF

SEQ ID NO: 23673 - protein, 6 aa, synthetic construct
PKEHEW

SEQ ID NO: 23674 - protein, 6 aa, synthetic construct
PKEHEY

SEQ ID NO: 23675 - protein, 6 aa, synthetic construct
PKEHGD

SEQ ID NO: 23676 - protein, 6 aa, synthetic construct
PKEHGE

SEQ ID NO: 23677 - protein, 6 aa, synthetic construct
PKEHGF

SEQ ID NO: 23678 - protein, 6 aa, synthetic construct
PKEHGW

SEQ ID NO: 23679 - protein, 6 aa, synthetic construct
PKEHGY

SEQ ID NO: 23680 - protein, 6 aa, synthetic construct
PKEHHD

SEQ ID NO: 23681 - protein, 6 aa, synthetic construct
PKEHHE

SEQ ID NO: 23682 - protein, 6 aa, synthetic construct
PKEHHF

SEQ ID NO: 23683 - protein, 6 aa, synthetic construct
PKEHHW

SEQ ID NO: 23684 - protein, 6 aa, synthetic construct
PKEHHY

SEQ ID NO: 23685 - protein, 6 aa, synthetic construct
PKEHID

SEQ ID NO: 23686 - protein, 6 aa, synthetic construct
PKEHIE

SEQ ID NO: 23687 - protein, 6 aa, synthetic construct
PKEHIF

SEQ ID NO: 23688 - protein, 6 aa, synthetic construct
PKEHIW

SEQ ID NO: 23689 - protein, 6 aa, synthetic construct
PKEHIY

SEQ ID NO: 23690 - protein, 6 aa, synthetic construct
PKEHLD

SEQ ID NO: 23691 - protein, 6 aa, synthetic construct
PKEHLE

SEQ ID NO: 23692 - protein, 6 aa, synthetic construct
PKEHLF

SEQ ID NO: 23693 - protein, 6 aa, synthetic construct
PKEHLW

SEQ ID NO: 23694 - protein, 6 aa, synthetic construct
PKEHLY

SEQ ID NO: 23695 - protein, 6 aa, synthetic construct
PKEHKD

SEQ ID NO: 23696 - protein, 6 aa, synthetic construct
PKEHKE

SEQ ID NO: 23697 - protein, 6 aa, synthetic construct
PKEHKF

SEQ ID NO: 23698 - protein, 6 aa, synthetic construct
PKEHKW

SEQ ID NO: 23699 - protein, 6 aa, synthetic construct
PKEHKY

SEQ ID NO: 23700 - protein, 6 aa, synthetic construct
PKEHMD

SEQ ID NO: 23701 - protein, 6 aa, synthetic construct
PKEHME

SEQ ID NO: 23702 - protein, 6 aa, synthetic construct
PKEHMF

SEQ ID NO: 23703 - protein, 6 aa, synthetic construct
PKEHMW

SEQ ID NO: 23704 - protein, 6 aa, synthetic construct
PKEHMY

SEQ ID NO: 23705 - protein, 6 aa, synthetic construct
PKEHFD

SEQ ID NO: 23706 - protein, 6 aa, synthetic construct
PKEHFE

SEQ ID NO: 23707 - protein, 6 aa, synthetic construct
PKEHFF

SEQ ID NO: 23708 - protein, 6 aa, synthetic construct
PKEHFW

SEQ ID NO: 23709 - protein, 6 aa, synthetic construct
PKEHFY

SEQ ID NO: 23710 - protein, 6 aa, synthetic construct
PKEHPD

SEQ ID NO: 23711 - protein, 6 aa, synthetic construct
PKEHPE

SEQ ID NO: 23712 - protein, 6 aa, synthetic construct
PKEHPF

SEQ ID NO: 23713 - protein, 6 aa, synthetic construct
PKEHPW

SEQ ID NO: 23714 - protein, 6 aa, synthetic construct
PKEHPY

SEQ ID NO: 23715 - protein, 6 aa, synthetic construct
PKEHSD

SEQ ID NO: 23716 - protein, 6 aa, synthetic construct
PKEHSE

SEQ ID NO: 23717 - protein, 6 aa, synthetic construct
PKEHSF

SEQ ID NO: 23718 - protein, 6 aa, synthetic construct
PKEHSW

SEQ ID NO: 23719 - protein, 6 aa, synthetic construct
PKEHSY

SEQ ID NO: 23720 - protein, 6 aa, synthetic construct
PKEHTD

SEQ ID NO: 23721 - protein, 6 aa, synthetic construct
PKEHTE

SEQ ID NO: 23722 - protein, 6 aa, synthetic construct
PKEHTF

SEQ ID NO: 23723 - protein, 6 aa, synthetic construct
PKEHTW

SEQ ID NO: 23724 - protein, 6 aa, synthetic construct
PKEHTY

SEQ ID NO: 23725 - protein, 6 aa, synthetic construct
PKEHWD

SEQ ID NO: 23726 - protein, 6 aa, synthetic construct
PKEHWE

SEQ ID NO: 23727 - protein, 6 aa, synthetic construct
PKEHWF

SEQ ID NO: 23728 - protein, 6 aa, synthetic construct
PKEHWW

SEQ ID NO: 23729 - protein, 6 aa, synthetic construct
PKEHWY

SEQ ID NO: 23730 - protein, 6 aa, synthetic construct
PKEHYD

SEQ ID NO: 23731 - protein, 6 aa, synthetic construct
PKEHYE

SEQ ID NO: 23732 - protein, 6 aa, synthetic construct
PKEHYF

SEQ ID NO: 23733 - protein, 6 aa, synthetic construct
PKEHYW

SEQ ID NO: 23734 - protein, 6 aa, synthetic construct
PKEHYY

SEQ ID NO: 23735 - protein, 6 aa, synthetic construct
PKEHVD

SEQ ID NO: 23736 - protein, 6 aa, synthetic construct
PKEHVE

SEQ ID NO: 23737 - protein, 6 aa, synthetic construct
PKEHVF

SEQ ID NO: 23738 - protein, 6 aa, synthetic construct
PKEHVW

SEQ ID NO: 23739 - protein, 6 aa, synthetic construct
PKEHVY

SEQ ID NO: 23740 - protein, 6 aa, synthetic construct
PKEIAD

SEQ ID NO: 23741 - protein, 6 aa, synthetic construct
PKEIAE

SEQ ID NO: 23742 - protein, 6 aa, synthetic construct
PKEIAF

SEQ ID NO: 23743 - protein, 6 aa, synthetic construct
PKEIAW

SEQ ID NO: 23744 - protein, 6 aa, synthetic construct
PKEIAY

SEQ ID NO: 23745 - protein, 6 aa, synthetic construct
PKEIRD

SEQ ID NO: 23746 - protein, 6 aa, synthetic construct
PKEIRE

SEQ ID NO: 23747 - protein, 6 aa, synthetic construct
PKEIRF

SEQ ID NO: 23748 - protein, 6 aa, synthetic construct
PKEIRW

SEQ ID NO: 23749 - protein, 6 aa, synthetic construct
PKEIRY

SEQ ID NO: 23750 - protein, 6 aa, synthetic construct
PKEIND

SEQ ID NO: 23751 - protein, 6 aa, synthetic construct
PKEINE

SEQ ID NO: 23752 - protein, 6 aa, synthetic construct
PKEINF

SEQ ID NO: 23753 - protein, 6 aa, synthetic construct
PKEINW

SEQ ID NO: 23754 - protein, 6 aa, synthetic construct
PKEINY

SEQ ID NO: 23755 - protein, 6 aa, synthetic construct
PKEIDD

SEQ ID NO: 23756 - protein, 6 aa, synthetic construct
PKEIDE

SEQ ID NO: 23757 - protein, 6 aa, synthetic construct
PKEIDF

SEQ ID NO: 23758 - protein, 6 aa, synthetic construct
PKEIDW

SEQ ID NO: 23759 - protein, 6 aa, synthetic construct
PKEIDY

SEQ ID NO: 23760 - protein, 6 aa, synthetic construct
PKEICD

SEQ ID NO: 23761 - protein, 6 aa, synthetic construct
PKEICE

SEQ ID NO: 23762 - protein, 6 aa, synthetic construct
PKEICF

SEQ ID NO: 23763 - protein, 6 aa, synthetic construct
PKEICW

SEQ ID NO: 23764 - protein, 6 aa, synthetic construct
PKEICY

SEQ ID NO: 23765 - protein, 6 aa, synthetic construct
PKEIQD

SEQ ID NO: 23766 - protein, 6 aa, synthetic construct
PKEIQE

SEQ ID NO: 23767 - protein, 6 aa, synthetic construct
PKEIQF

SEQ ID NO: 23768 - protein, 6 aa, synthetic construct
PKEIQW

SEQ ID NO: 23769 - protein, 6 aa, synthetic construct
PKEIQY

SEQ ID NO: 23770 - protein, 6 aa, synthetic construct
PKEIED

SEQ ID NO: 23771 - protein, 6 aa, synthetic construct
PKEIEE

SEQ ID NO: 23772 - protein, 6 aa, synthetic construct
PKEIEF

SEQ ID NO: 23773 - protein, 6 aa, synthetic construct
PKEIEW

SEQ ID NO: 23774 - protein, 6 aa, synthetic construct
PKEIEY

SEQ ID NO: 23775 - protein, 6 aa, synthetic construct
PKEIGD

SEQ ID NO: 23776 - protein, 6 aa, synthetic construct
PKEIGE

SEQ ID NO: 23777 - protein, 6 aa, synthetic construct
PKEIGF

SEQ ID NO: 23778 - protein, 6 aa, synthetic construct
PKEIGW

SEQ ID NO: 23779 - protein, 6 aa, synthetic construct
PKEIGY

SEQ ID NO: 23780 - protein, 6 aa, synthetic construct
PKEIHD

SEQ ID NO: 23781 - protein, 6 aa, synthetic construct
PKEIHE

SEQ ID NO: 23782 - protein, 6 aa, synthetic construct
PKEIHF

SEQ ID NO: 23783 - protein, 6 aa, synthetic construct
PKEIHW

SEQ ID NO: 23784 - protein, 6 aa, synthetic construct
PKEIHY

SEQ ID NO: 23785 - protein, 6 aa, synthetic construct
PKEIID

SEQ ID NO: 23786 - protein, 6 aa, synthetic construct
PKEIIE

SEQ ID NO: 23787 - protein, 6 aa, synthetic construct
PKEIIF

SEQ ID NO: 23788 - protein, 6 aa, synthetic construct
PKEIIW

SEQ ID NO: 23789 - protein, 6 aa, synthetic construct
PKEIIY

SEQ ID NO: 23790 - protein, 6 aa, synthetic construct
PKEILD

SEQ ID NO: 23791 - protein, 6 aa, synthetic construct
PKEILE

SEQ ID NO: 23792 - protein, 6 aa, synthetic construct
PKEILF

SEQ ID NO: 23793 - protein, 6 aa, synthetic construct
PKEILW

SEQ ID NO: 23794 - protein, 6 aa, synthetic construct
PKEILY

SEQ ID NO: 23795 - protein, 6 aa, synthetic construct
PKEIKD

SEQ ID NO: 23796 - protein, 6 aa, synthetic construct
PKEIKE

SEQ ID NO: 23797 - protein, 6 aa, synthetic construct
PKEIKF

SEQ ID NO: 23798 - protein, 6 aa, synthetic construct
PKEIKW

SEQ ID NO: 23799 - protein, 6 aa, synthetic construct
PKEIKY

SEQ ID NO: 23800 - protein, 6 aa, synthetic construct
PKEIMD

SEQ ID NO: 23801 - protein, 6 aa, synthetic construct
PKEIME

SEQ ID NO: 23802 - protein, 6 aa, synthetic construct
PKEIMF

SEQ ID NO: 23803 - protein, 6 aa, synthetic construct
PKEIMW

SEQ ID NO: 23804 - protein, 6 aa, synthetic construct
PKEIMY

SEQ ID NO: 23805 - protein, 6 aa, synthetic construct
PKEIFD

SEQ ID NO: 23806 - protein, 6 aa, synthetic construct
PKEIFE

SEQ ID NO: 23807 - protein, 6 aa, synthetic construct
PKEIFF

SEQ ID NO: 23808 - protein, 6 aa, synthetic construct
PKEIFW

SEQ ID NO: 23809 - protein, 6 aa, synthetic construct
PKEIFY

SEQ ID NO: 23810 - protein, 6 aa, synthetic construct
PKEIPD

SEQ ID NO: 23811 - protein, 6 aa, synthetic construct
PKEIPE

SEQ ID NO: 23812 - protein, 6 aa, synthetic construct
PKEIPF

SEQ ID NO: 23813 - protein, 6 aa, synthetic construct
PKEIPW

SEQ ID NO: 23814 - protein, 6 aa, synthetic construct
PKEIPY

SEQ ID NO: 23815 - protein, 6 aa, synthetic construct
PKEISD

SEQ ID NO: 23816 - protein, 6 aa, synthetic construct
PKEISE

SEQ ID NO: 23817 - protein, 6 aa, synthetic construct
PKEISF

SEQ ID NO: 23818 - protein, 6 aa, synthetic construct
PKEISW

SEQ ID NO: 23819 - protein, 6 aa, synthetic construct
PKEISY

SEQ ID NO: 23820 - protein, 6 aa, synthetic construct
PKEITD

SEQ ID NO: 23821 - protein, 6 aa, synthetic construct
PKEITE

SEQ ID NO: 23822 - protein, 6 aa, synthetic construct
PKEITF

SEQ ID NO: 23823 - protein, 6 aa, synthetic construct
PKEITW

SEQ ID NO: 23824 - protein, 6 aa, synthetic construct
PKEITY

SEQ ID NO: 23825 - protein, 6 aa, synthetic construct
PKEIWD

SEQ ID NO: 23826 - protein, 6 aa, synthetic construct
PKEIWE

SEQ ID NO: 23827 - protein, 6 aa, synthetic construct
PKEIWF

SEQ ID NO: 23828 - protein, 6 aa, synthetic construct
PKEIWW

SEQ ID NO: 23829 - protein, 6 aa, synthetic construct
PKEIWY

SEQ ID NO: 23830 - protein, 6 aa, synthetic construct
PKEIYD

SEQ ID NO: 23831 - protein, 6 aa, synthetic construct
PKEIYE

SEQ ID NO: 23832 - protein, 6 aa, synthetic construct
PKEIYF

SEQ ID NO: 23833 - protein, 6 aa, synthetic construct
PKEIYW

SEQ ID NO: 23834 - protein, 6 aa, synthetic construct
PKEIYY

SEQ ID NO: 23835 - protein, 6 aa, synthetic construct
PKEIVD

SEQ ID NO: 23836 - protein, 6 aa, synthetic construct
PKEIVE

SEQ ID NO: 23837 - protein, 6 aa, synthetic construct
PKEIVF

SEQ ID NO: 23838 - protein, 6 aa, synthetic construct
PKEIVW

SEQ ID NO: 23839 - protein, 6 aa, synthetic construct
PKEIVY

SEQ ID NO: 23840 - protein, 6 aa, synthetic construct
PKELAD

SEQ ID NO: 23841 - protein, 6 aa, synthetic construct
PKELAE

SEQ ID NO: 23842 - protein, 6 aa, synthetic construct
PKELAF

SEQ ID NO: 23843 - protein, 6 aa, synthetic construct
PKELAW

SEQ ID NO: 23844 - protein, 6 aa, synthetic construct
PKELAY

SEQ ID NO: 23845 - protein, 6 aa, synthetic construct
PKELRD

SEQ ID NO: 23846 - protein, 6 aa, synthetic construct
PKELRE

SEQ ID NO: 23847 - protein, 6 aa, synthetic construct
PKELRF

SEQ ID NO: 23848 - protein, 6 aa, synthetic construct
PKELRW

SEQ ID NO: 23849 - protein, 6 aa, synthetic construct
PKELRY

SEQ ID NO: 23850 - protein, 6 aa, synthetic construct
PKELND

SEQ ID NO: 23851 - protein, 6 aa, synthetic construct
PKELNE

SEQ ID NO: 23852 - protein, 6 aa, synthetic construct
PKELNF

SEQ ID NO: 23853 - protein, 6 aa, synthetic construct
PKELNW

SEQ ID NO: 23854 - protein, 6 aa, synthetic construct
PKELNY

SEQ ID NO: 23855 - protein, 6 aa, synthetic construct
PKELDD

SEQ ID NO: 23856 - protein, 6 aa, synthetic construct
PKELDE

SEQ ID NO: 23857 - protein, 6 aa, synthetic construct
PKELDF

SEQ ID NO: 23858 - protein, 6 aa, synthetic construct
PKELDW

SEQ ID NO: 23859 - protein, 6 aa, synthetic construct
PKELDY

SEQ ID NO: 23860 - protein, 6 aa, synthetic construct
PKELCD

SEQ ID NO: 23861 - protein, 6 aa, synthetic construct
PKELCE

SEQ ID NO: 23862 - protein, 6 aa, synthetic construct
PKELCF

SEQ ID NO: 23863 - protein, 6 aa, synthetic construct
PKELCW

SEQ ID NO: 23864 - protein, 6 aa, synthetic construct
PKELCY

SEQ ID NO: 23865 - protein, 6 aa, synthetic construct
PKELQD

SEQ ID NO: 23866 - protein, 6 aa, synthetic construct
PKELQE

SEQ ID NO: 23867 - protein, 6 aa, synthetic construct
PKELQF

SEQ ID NO: 23868 - protein, 6 aa, synthetic construct
PKELQW

SEQ ID NO: 23869 - protein, 6 aa, synthetic construct
PKELQY

SEQ ID NO: 23870 - protein, 6 aa, synthetic construct
PKELED

SEQ ID NO: 23871 - protein, 6 aa, synthetic construct
PKELEE

SEQ ID NO: 23872 - protein, 6 aa, synthetic construct
PKELEF

SEQ ID NO: 23873 - protein, 6 aa, synthetic construct
PKELEW

SEQ ID NO: 23874 - protein, 6 aa, synthetic construct
PKELEY

SEQ ID NO: 23875 - protein, 6 aa, synthetic construct
PKELGD

SEQ ID NO: 23876 - protein, 6 aa, synthetic construct
PKELGE

SEQ ID NO: 23877 - protein, 6 aa, synthetic construct
PKELGF

SEQ ID NO: 23878 - protein, 6 aa, synthetic construct
PKELGW

SEQ ID NO: 23879 - protein, 6 aa, synthetic construct
PKELGY

SEQ ID NO: 23880 - protein, 6 aa, synthetic construct
PKELHD

SEQ ID NO: 23881 - protein, 6 aa, synthetic construct
PKELHE

SEQ ID NO: 23882 - protein, 6 aa, synthetic construct
PKELHF

SEQ ID NO: 23883 - protein, 6 aa, synthetic construct
PKELHW

SEQ ID NO: 23884 - protein, 6 aa, synthetic construct
PKELHY

SEQ ID NO: 23885 - protein, 6 aa, synthetic construct
PKELID

SEQ ID NO: 23886 - protein, 6 aa, synthetic construct
PKELIE

SEQ ID NO: 23887 - protein, 6 aa, synthetic construct
PKELIF

SEQ ID NO: 23888 - protein, 6 aa, synthetic construct
PKELIW

SEQ ID NO: 23889 - protein, 6 aa, synthetic construct
PKELIY

SEQ ID NO: 23890 - protein, 6 aa, synthetic construct
PKELLD

SEQ ID NO: 23891 - protein, 6 aa, synthetic construct
PKELLE

SEQ ID NO: 23892 - protein, 6 aa, synthetic construct
PKELLF

SEQ ID NO: 23893 - protein, 6 aa, synthetic construct
PKELLW

SEQ ID NO: 23894 - protein, 6 aa, synthetic construct
PKELLY

SEQ ID NO: 23895 - protein, 6 aa, synthetic construct
PKELKD

SEQ ID NO: 23896 - protein, 6 aa, synthetic construct
PKELKE

SEQ ID NO: 23897 - protein, 6 aa, synthetic construct
PKELKF

SEQ ID NO: 23898 - protein, 6 aa, synthetic construct
PKELKW

SEQ ID NO: 23899 - protein, 6 aa, synthetic construct
PKELKY

SEQ ID NO: 23900 - protein, 6 aa, synthetic construct
PKELMD

SEQ ID NO: 23901 - protein, 6 aa, synthetic construct
PKELME

SEQ ID NO: 23902 - protein, 6 aa, synthetic construct
PKELMF

SEQ ID NO: 23903 - protein, 6 aa, synthetic construct
PKELMW

SEQ ID NO: 23904 - protein, 6 aa, synthetic construct
PKELMY

SEQ ID NO: 23905 - protein, 6 aa, synthetic construct
PKELFD

SEQ ID NO: 23906 - protein, 6 aa, synthetic construct
PKELFE

SEQ ID NO: 23907 - protein, 6 aa, synthetic construct
PKELFF

SEQ ID NO: 23908 - protein, 6 aa, synthetic construct
PKELFW

SEQ ID NO: 23909 - protein, 6 aa, synthetic construct
PKELFY

SEQ ID NO: 23910 - protein, 6 aa, synthetic construct
PKELPD

SEQ ID NO: 23911 - protein, 6 aa, synthetic construct
PKELPE

SEQ ID NO: 23912 - protein, 6 aa, synthetic construct
PKELPF

SEQ ID NO: 23913 - protein, 6 aa, synthetic construct
PKELPW

SEQ ID NO: 23914 - protein, 6 aa, synthetic construct
PKELPY

SEQ ID NO: 23915 - protein, 6 aa, synthetic construct
PKELSD

SEQ ID NO: 23916 - protein, 6 aa, synthetic construct
PKELSE

SEQ ID NO: 23917 - protein, 6 aa, synthetic construct
PKELSF

SEQ ID NO: 23918 - protein, 6 aa, synthetic construct
PKELSW

SEQ ID NO: 23919 - protein, 6 aa, synthetic construct
PKELSY

SEQ ID NO: 23920 - protein, 6 aa, synthetic construct
PKELTD

SEQ ID NO: 23921 - protein, 6 aa, synthetic construct
PKELTE

SEQ ID NO: 23922 - protein, 6 aa, synthetic construct
PKELTF

SEQ ID NO: 23923 - protein, 6 aa, synthetic construct
PKELTW

SEQ ID NO: 23924 - protein, 6 aa, synthetic construct
PKELTY

SEQ ID NO: 23925 - protein, 6 aa, synthetic construct
PKELWD

SEQ ID NO: 23926 - protein, 6 aa, synthetic construct
PKELWE

SEQ ID NO: 23927 - protein, 6 aa, synthetic construct
PKELWF

SEQ ID NO: 23928 - protein, 6 aa, synthetic construct
PKELWW

SEQ ID NO: 23929 - protein, 6 aa, synthetic construct
PKELWY

SEQ ID NO: 23930 - protein, 6 aa, synthetic construct
PKELYD

SEQ ID NO: 23931 - protein, 6 aa, synthetic construct
PKELYE

SEQ ID NO: 23932 - protein, 6 aa, synthetic construct
PKELYF

SEQ ID NO: 23933 - protein, 6 aa, synthetic construct
PKELYW

SEQ ID NO: 23934 - protein, 6 aa, synthetic construct
PKELYY

SEQ ID NO: 23935 - protein, 6 aa, synthetic construct
PKELVD

SEQ ID NO: 23936 - protein, 6 aa, synthetic construct
PKELVE

SEQ ID NO: 23937 - protein, 6 aa, synthetic construct
PKELVF

SEQ ID NO: 23938 - protein, 6 aa, synthetic construct
PKELVW

SEQ ID NO: 23939 - protein, 6 aa, synthetic construct
PKELVY

SEQ ID NO: 23940 - protein, 6 aa, synthetic construct
PKEKAD

SEQ ID NO: 23941 - protein, 6 aa, synthetic construct
PKEKAE

SEQ ID NO: 23942 - protein, 6 aa, synthetic construct
PKEKAF

SEQ ID NO: 23943 - protein, 6 aa, synthetic construct
PKEKAW

SEQ ID NO: 23944 - protein, 6 aa, synthetic construct
PKEKAY

SEQ ID NO: 23945 - protein, 6 aa, synthetic construct
PKEKRD

SEQ ID NO: 23946 - protein, 6 aa, synthetic construct
PKEKRE

SEQ ID NO: 23947 - protein, 6 aa, synthetic construct
PKEKRF

SEQ ID NO: 23948 - protein, 6 aa, synthetic construct
PKEKRW

SEQ ID NO: 23949 - protein, 6 aa, synthetic construct
PKEKRY

SEQ ID NO: 23950 - protein, 6 aa, synthetic construct
PKEKND

SEQ ID NO: 23951 - protein, 6 aa, synthetic construct
PKEKNE

SEQ ID NO: 23952 - protein, 6 aa, synthetic construct
PKEKNF

SEQ ID NO: 23953 - protein, 6 aa, synthetic construct
PKEKNW

SEQ ID NO: 23954 - protein, 6 aa, synthetic construct
PKEKNY

SEQ ID NO: 23955 - protein, 6 aa, synthetic construct
PKEKDD

SEQ ID NO: 23956 - protein, 6 aa, synthetic construct
PKEKDE

SEQ ID NO: 23957 - protein, 6 aa, synthetic construct
PKEKDF

SEQ ID NO: 23958 - protein, 6 aa, synthetic construct
PKEKDW

SEQ ID NO: 23959 - protein, 6 aa, synthetic construct
PKEKDY

SEQ ID NO: 23960 - protein, 6 aa, synthetic construct
PKEKCD

SEQ ID NO: 23961 - protein, 6 aa, synthetic construct
PKEKCE

SEQ ID NO: 23962 - protein, 6 aa, synthetic construct
PKEKCF

SEQ ID NO: 23963 - protein, 6 aa, synthetic construct
PKEKCW

SEQ ID NO: 23964 - protein, 6 aa, synthetic construct
PKEKCY

SEQ ID NO: 23965 - protein, 6 aa, synthetic construct
PKEKQD

SEQ ID NO: 23966 - protein, 6 aa, synthetic construct
PKEKQE

SEQ ID NO: 23967 - protein, 6 aa, synthetic construct
PKEKQF

SEQ ID NO: 23968 - protein, 6 aa, synthetic construct
PKEKQW

SEQ ID NO: 23969 - protein, 6 aa, synthetic construct
PKEKQY

SEQ ID NO: 23970 - protein, 6 aa, synthetic construct
PKEKED

SEQ ID NO: 23971 - protein, 6 aa, synthetic construct
PKEKEE

SEQ ID NO: 23972 - protein, 6 aa, synthetic construct
PKEKEF

SEQ ID NO: 23973 - protein, 6 aa, synthetic construct
PKEKEW

SEQ ID NO: 23974 - protein, 6 aa, synthetic construct
PKEKEY

SEQ ID NO: 23975 - protein, 6 aa, synthetic construct
PKEKGD

SEQ ID NO: 23976 - protein, 6 aa, synthetic construct
PKEKGE

SEQ ID NO: 23977 - protein, 6 aa, synthetic construct
PKEKGF

SEQ ID NO: 23978 - protein, 6 aa, synthetic construct
PKEKGW

SEQ ID NO: 23979 - protein, 6 aa, synthetic construct
PKEKGY

SEQ ID NO: 23980 - protein, 6 aa, synthetic construct
PKEKHD

SEQ ID NO: 23981 - protein, 6 aa, synthetic construct
PKEKHE

SEQ ID NO: 23982 - protein, 6 aa, synthetic construct
PKEKHF

SEQ ID NO: 23983 - protein, 6 aa, synthetic construct
PKEKHW

SEQ ID NO: 23984 - protein, 6 aa, synthetic construct
PKEKHY

SEQ ID NO: 23985 - protein, 6 aa, synthetic construct
PKEKID

SEQ ID NO: 23986 - protein, 6 aa, synthetic construct
PKEKIE

SEQ ID NO: 23987 - protein, 6 aa, synthetic construct
PKEKIF

SEQ ID NO: 23988 - protein, 6 aa, synthetic construct
PKEKIW

SEQ ID NO: 23989 - protein, 6 aa, synthetic construct
PKEKIY

SEQ ID NO: 23990 - protein, 6 aa, synthetic construct
PKEKLD

SEQ ID NO: 23991 - protein, 6 aa, synthetic construct
PKEKLE

SEQ ID NO: 23992 - protein, 6 aa, synthetic construct
PKEKLF

SEQ ID NO: 23993 - protein, 6 aa, synthetic construct
PKEKLW

SEQ ID NO: 23994 - protein, 6 aa, synthetic construct
PKEKLY

SEQ ID NO: 23995 - protein, 6 aa, synthetic construct
PKEKKD

SEQ ID NO: 23996 - protein, 6 aa, synthetic construct
PKEKKE

SEQ ID NO: 23997 - protein, 6 aa, synthetic construct
PKEKKF

SEQ ID NO: 23998 - protein, 6 aa, synthetic construct
PKEKKW

SEQ ID NO: 23999 - protein, 6 aa, synthetic construct
PKEKKY

SEQ ID NO: 24000 - protein, 6 aa, synthetic construct
PKEKMD

SEQ ID NO: 24001 - protein, 6 aa, synthetic construct
PKEKME

SEQ ID NO: 24002 - protein, 6 aa, synthetic construct
PKEKMF

SEQ ID NO: 24003 - protein, 6 aa, synthetic construct
PKEKMW

SEQ ID NO: 24004 - protein, 6 aa, synthetic construct
PKEKMY

SEQ ID NO: 24005 - protein, 6 aa, synthetic construct
PKEKFD

SEQ ID NO: 24006 - protein, 6 aa, synthetic construct
PKEKFE

SEQ ID NO: 24007 - protein, 6 aa, synthetic construct
PKEKFF

SEQ ID NO: 24008 - protein, 6 aa, synthetic construct
PKEKFW

SEQ ID NO: 24009 - protein, 6 aa, synthetic construct
PKEKFY

SEQ ID NO: 24010 - protein, 6 aa, synthetic construct
PKEKPD

SEQ ID NO: 24011 - protein, 6 aa, synthetic construct
PKEKPE

SEQ ID NO: 24012 - protein, 6 aa, synthetic construct
PKEKPF

SEQ ID NO: 24013 - protein, 6 aa, synthetic construct
PKEKPW

SEQ ID NO: 24014 - protein, 6 aa, synthetic construct
PKEKPY

SEQ ID NO: 24015 - protein, 6 aa, synthetic construct
PKEKSD

SEQ ID NO: 24016 - protein, 6 aa, synthetic construct
PKEKSE

SEQ ID NO: 24017 - protein, 6 aa, synthetic construct
PKEKSF

SEQ ID NO: 24018 - protein, 6 aa, synthetic construct
PKEKSW

SEQ ID NO: 24019 - protein, 6 aa, synthetic construct
PKEKSY

SEQ ID NO: 24020 - protein, 6 aa, synthetic construct
PKEKTD

SEQ ID NO: 24021 - protein, 6 aa, synthetic construct
PKEKTE

SEQ ID NO: 24022 - protein, 6 aa, synthetic construct
PKEKTF

SEQ ID NO: 24023 - protein, 6 aa, synthetic construct
PKEKTW

SEQ ID NO: 24024 - protein, 6 aa, synthetic construct
PKEKTY

SEQ ID NO: 24025 - protein, 6 aa, synthetic construct
PKEKWD

SEQ ID NO: 24026 - protein, 6 aa, synthetic construct
PKEKWE

SEQ ID NO: 24027 - protein, 6 aa, synthetic construct
PKEKWF

SEQ ID NO: 24028 - protein, 6 aa, synthetic construct
PKEKWW

SEQ ID NO: 24029 - protein, 6 aa, synthetic construct
PKEKWY

SEQ ID NO: 24030 - protein, 6 aa, synthetic construct
PKEKYD

SEQ ID NO: 24031 - protein, 6 aa, synthetic construct
PKEKYE

SEQ ID NO: 24032 - protein, 6 aa, synthetic construct
PKEKYF

SEQ ID NO: 24033 - protein, 6 aa, synthetic construct
PKEKYW

SEQ ID NO: 24034 - protein, 6 aa, synthetic construct
PKEKYY

SEQ ID NO: 24035 - protein, 6 aa, synthetic construct
PKEKVD

SEQ ID NO: 24036 - protein, 6 aa, synthetic construct
PKEKVE

SEQ ID NO: 24037 - protein, 6 aa, synthetic construct
PKEKVF

SEQ ID NO: 24038 - protein, 6 aa, synthetic construct
PKEKVW

SEQ ID NO: 24039 - protein, 6 aa, synthetic construct
PKEKVY

SEQ ID NO: 24040 - protein, 6 aa, synthetic construct
PKEMAD

SEQ ID NO: 24041 - protein, 6 aa, synthetic construct
PKEMAE

SEQ ID NO: 24042 - protein, 6 aa, synthetic construct
PKEMAF

SEQ ID NO: 24043 - protein, 6 aa, synthetic construct
PKEMAW

SEQ ID NO: 24044 - protein, 6 aa, synthetic construct
PKEMAY

SEQ ID NO: 24045 - protein, 6 aa, synthetic construct
PKEMRD

SEQ ID NO: 24046 - protein, 6 aa, synthetic construct
PKEMRE

SEQ ID NO: 24047 - protein, 6 aa, synthetic construct
PKEMRF

SEQ ID NO: 24048 - protein, 6 aa, synthetic construct
PKEMRW

SEQ ID NO: 24049 - protein, 6 aa, synthetic construct
PKEMRY

SEQ ID NO: 24050 - protein, 6 aa, synthetic construct
PKEMND

SEQ ID NO: 24051 - protein, 6 aa, synthetic construct
PKEMNE

SEQ ID NO: 24052 - protein, 6 aa, synthetic construct
PKEMNF

SEQ ID NO: 24053 - protein, 6 aa, synthetic construct
PKEMNW

SEQ ID NO: 24054 - protein, 6 aa, synthetic construct
PKEMNY

SEQ ID NO: 24055 - protein, 6 aa, synthetic construct
PKEMDD

SEQ ID NO: 24056 - protein, 6 aa, synthetic construct
PKEMDE

SEQ ID NO: 24057 - protein, 6 aa, synthetic construct
PKEMDF

SEQ ID NO: 24058 - protein, 6 aa, synthetic construct
PKEMDW

SEQ ID NO: 24059 - protein, 6 aa, synthetic construct
PKEMDY

SEQ ID NO: 24060 - protein, 6 aa, synthetic construct
PKEMCD

SEQ ID NO: 24061 - protein, 6 aa, synthetic construct
PKEMCE

SEQ ID NO: 24062 - protein, 6 aa, synthetic construct
PKEMCF

SEQ ID NO: 24063 - protein, 6 aa, synthetic construct
PKEMCW

SEQ ID NO: 24064 - protein, 6 aa, synthetic construct
PKEMCY

SEQ ID NO: 24065 - protein, 6 aa, synthetic construct
PKEMQD

SEQ ID NO: 24066 - protein, 6 aa, synthetic construct
PKEMQE

SEQ ID NO: 24067 - protein, 6 aa, synthetic construct
PKEMQF

SEQ ID NO: 24068 - protein, 6 aa, synthetic construct
PKEMQW

SEQ ID NO: 24069 - protein, 6 aa, synthetic construct
PKEMQY

SEQ ID NO: 24070 - protein, 6 aa, synthetic construct
PKEMED

SEQ ID NO: 24071 - protein, 6 aa, synthetic construct
PKEMEE

SEQ ID NO: 24072 - protein, 6 aa, synthetic construct
PKEMEF

SEQ ID NO: 24073 - protein, 6 aa, synthetic construct
PKEMEW

SEQ ID NO: 24074 - protein, 6 aa, synthetic construct
PKEMEY

SEQ ID NO: 24075 - protein, 6 aa, synthetic construct
PKEMGD

SEQ ID NO: 24076 - protein, 6 aa, synthetic construct
PKEMGE

SEQ ID NO: 24077 - protein, 6 aa, synthetic construct
PKEMGF

SEQ ID NO: 24078 - protein, 6 aa, synthetic construct
PKEMGW

SEQ ID NO: 24079 - protein, 6 aa, synthetic construct
PKEMGY

SEQ ID NO: 24080 - protein, 6 aa, synthetic construct
PKEMHD

SEQ ID NO: 24081 - protein, 6 aa, synthetic construct
PKEMHE

SEQ ID NO: 24082 - protein, 6 aa, synthetic construct
PKEMHF

SEQ ID NO: 24083 - protein, 6 aa, synthetic construct
PKEMHW

SEQ ID NO: 24084 - protein, 6 aa, synthetic construct
PKEMHY

SEQ ID NO: 24085 - protein, 6 aa, synthetic construct
PKEMID

SEQ ID NO: 24086 - protein, 6 aa, synthetic construct
PKEMIE

SEQ ID NO: 24087 - protein, 6 aa, synthetic construct
PKEMIF

SEQ ID NO: 24088 - protein, 6 aa, synthetic construct
PKEMIW

SEQ ID NO: 24089 - protein, 6 aa, synthetic construct
PKEMIY

SEQ ID NO: 24090 - protein, 6 aa, synthetic construct
PKEMLD

SEQ ID NO: 24091 - protein, 6 aa, synthetic construct
PKEMLE

SEQ ID NO: 24092 - protein, 6 aa, synthetic construct
PKEMLF

SEQ ID NO: 24093 - protein, 6 aa, synthetic construct
PKEMLW

SEQ ID NO: 24094 - protein, 6 aa, synthetic construct
PKEMLY

SEQ ID NO: 24095 - protein, 6 aa, synthetic construct
PKEMKD

SEQ ID NO: 24096 - protein, 6 aa, synthetic construct
PKEMKE

SEQ ID NO: 24097 - protein, 6 aa, synthetic construct
PKEMKF

SEQ ID NO: 24098 - protein, 6 aa, synthetic construct
PKEMKW

SEQ ID NO: 24099 - protein, 6 aa, synthetic construct
PKEMKY

SEQ ID NO: 24100 - protein, 6 aa, synthetic construct
PKEMMD

SEQ ID NO: 24101 - protein, 6 aa, synthetic construct
PKEMME

SEQ ID NO: 24102 - protein, 6 aa, synthetic construct
PKEMMF

SEQ ID NO: 24103 - protein, 6 aa, synthetic construct
PKEMMW

SEQ ID NO: 24104 - protein, 6 aa, synthetic construct
PKEMMY

SEQ ID NO: 24105 - protein, 6 aa, synthetic construct
PKEMFD

SEQ ID NO: 24106 - protein, 6 aa, synthetic construct
PKEMFE

SEQ ID NO: 24107 - protein, 6 aa, synthetic construct
PKEMFF

SEQ ID NO: 24108 - protein, 6 aa, synthetic construct
PKEMFW

SEQ ID NO: 24109 - protein, 6 aa, synthetic construct
PKEMFY

SEQ ID NO: 24110 - protein, 6 aa, synthetic construct
PKEMPD

SEQ ID NO: 24111 - protein, 6 aa, synthetic construct
PKEMPE

SEQ ID NO: 24112 - protein, 6 aa, synthetic construct
PKEMPF

SEQ ID NO: 24113 - protein, 6 aa, synthetic construct
PKEMPW

SEQ ID NO: 24114 - protein, 6 aa, synthetic construct
PKEMPY

SEQ ID NO: 24115 - protein, 6 aa, synthetic construct
PKEMSD

SEQ ID NO: 24116 - protein, 6 aa, synthetic construct
PKEMSE

SEQ ID NO: 24117 - protein, 6 aa, synthetic construct
PKEMSF

SEQ ID NO: 24118 - protein, 6 aa, synthetic construct
PKEMSW

SEQ ID NO: 24119 - protein, 6 aa, synthetic construct
PKEMSY

SEQ ID NO: 24120 - protein, 6 aa, synthetic construct
PKEMTD

SEQ ID NO: 24121 - protein, 6 aa, synthetic construct
PKEMTE

SEQ ID NO: 24122 - protein, 6 aa, synthetic construct
PKEMTF

SEQ ID NO: 24123 - protein, 6 aa, synthetic construct
PKEMTW

SEQ ID NO: 24124 - protein, 6 aa, synthetic construct
PKEMTY

SEQ ID NO: 24125 - protein, 6 aa, synthetic construct
PKEMWD

SEQ ID NO: 24126 - protein, 6 aa, synthetic construct
PKEMWE

SEQ ID NO: 24127 - protein, 6 aa, synthetic construct
PKEMWF

SEQ ID NO: 24128 - protein, 6 aa, synthetic construct
PKEMWW

SEQ ID NO: 24129 - protein, 6 aa, synthetic construct
PKEMWY

SEQ ID NO: 24130 - protein, 6 aa, synthetic construct
PKEMYD

SEQ ID NO: 24131 - protein, 6 aa, synthetic construct
PKEMYE

SEQ ID NO: 24132 - protein, 6 aa, synthetic construct
PKEMYF

SEQ ID NO: 24133 - protein, 6 aa, synthetic construct
PKEMYW

SEQ ID NO: 24134 - protein, 6 aa, synthetic construct
PKEMYY

SEQ ID NO: 24135 - protein, 6 aa, synthetic construct
PKEMVD

SEQ ID NO: 24136 - protein, 6 aa, synthetic construct
PKEMVE

SEQ ID NO: 24137 - protein, 6 aa, synthetic construct
PKEMVF

SEQ ID NO: 24138 - protein, 6 aa, synthetic construct
PKEMVW

SEQ ID NO: 24139 - protein, 6 aa, synthetic construct
PKEMVY

SEQ ID NO: 24140 - protein, 6 aa, synthetic construct
PKEFAD

SEQ ID NO: 24141 - protein, 6 aa, synthetic construct
PKEFAE

SEQ ID NO: 24142 - protein, 6 aa, synthetic construct
PKEFAF

SEQ ID NO: 24143 - protein, 6 aa, synthetic construct
PKEFAW

SEQ ID NO: 24144 - protein, 6 aa, synthetic construct
PKEFAY

SEQ ID NO: 24145 - protein, 6 aa, synthetic construct
PKEFRD

SEQ ID NO: 24146 - protein, 6 aa, synthetic construct
PKEFRE

SEQ ID NO: 24147 - protein, 6 aa, synthetic construct
PKEFRF

SEQ ID NO: 24148 - protein, 6 aa, synthetic construct
PKEFRW

SEQ ID NO: 24149 - protein, 6 aa, synthetic construct
PKEFRY

SEQ ID NO: 24150 - protein, 6 aa, synthetic construct
PKEFND

SEQ ID NO: 24151 - protein, 6 aa, synthetic construct
PKEFNE

SEQ ID NO: 24152 - protein, 6 aa, synthetic construct
PKEFNF

SEQ ID NO: 24153 - protein, 6 aa, synthetic construct
PKEFNW

SEQ ID NO: 24154 - protein, 6 aa, synthetic construct
PKEFNY

SEQ ID NO: 24155 - protein, 6 aa, synthetic construct
PKEFDD

SEQ ID NO: 24156 - protein, 6 aa, synthetic construct
PKEFDE

SEQ ID NO: 24157 - protein, 6 aa, synthetic construct
PKEFDF

SEQ ID NO: 24158 - protein, 6 aa, synthetic construct
PKEFDW

SEQ ID NO: 24159 - protein, 6 aa, synthetic construct
PKEFDY

SEQ ID NO: 24160 - protein, 6 aa, synthetic construct
PKEFCD

SEQ ID NO: 24161 - protein, 6 aa, synthetic construct
PKEFCE

SEQ ID NO: 24162 - protein, 6 aa, synthetic construct
PKEFCF

SEQ ID NO: 24163 - protein, 6 aa, synthetic construct
PKEFCW

SEQ ID NO: 24164 - protein, 6 aa, synthetic construct
PKEFCY

SEQ ID NO: 24165 - protein, 6 aa, synthetic construct
PKEFQD

SEQ ID NO: 24166 - protein, 6 aa, synthetic construct
PKEFQE

SEQ ID NO: 24167 - protein, 6 aa, synthetic construct
PKEFQF

SEQ ID NO: 24168 - protein, 6 aa, synthetic construct
PKEFQW

SEQ ID NO: 24169 - protein, 6 aa, synthetic construct
PKEFQY

SEQ ID NO: 24170 - protein, 6 aa, synthetic construct
PKEFED

SEQ ID NO: 24171 - protein, 6 aa, synthetic construct
PKEFEE

SEQ ID NO: 24172 - protein, 6 aa, synthetic construct
PKEFEF

SEQ ID NO: 24173 - protein, 6 aa, synthetic construct
PKEFEW

SEQ ID NO: 24174 - protein, 6 aa, synthetic construct
PKEFEY

SEQ ID NO: 24175 - protein, 6 aa, synthetic construct
PKEFGD

SEQ ID NO: 24176 - protein, 6 aa, synthetic construct
PKEFGE

SEQ ID NO: 24177 - protein, 6 aa, synthetic construct
PKEFGF

SEQ ID NO: 24178 - protein, 6 aa, synthetic construct
PKEFGW

SEQ ID NO: 24179 - protein, 6 aa, synthetic construct
PKEFGY

SEQ ID NO: 24180 - protein, 6 aa, synthetic construct
PKEFHD

SEQ ID NO: 24181 - protein, 6 aa, synthetic construct
PKEFHE

SEQ ID NO: 24182 - protein, 6 aa, synthetic construct
PKEFHF

SEQ ID NO: 24183 - protein, 6 aa, synthetic construct
PKEFHW

SEQ ID NO: 24184 - protein, 6 aa, synthetic construct
PKEFHY

SEQ ID NO: 24185 - protein, 6 aa, synthetic construct
PKEFID

SEQ ID NO: 24186 - protein, 6 aa, synthetic construct
PKEFIE

SEQ ID NO: 24187 - protein, 6 aa, synthetic construct
PKEFIF

SEQ ID NO: 24188 - protein, 6 aa, synthetic construct
PKEFIW

SEQ ID NO: 24189 - protein, 6 aa, synthetic construct
PKEFIY

SEQ ID NO: 24190 - protein, 6 aa, synthetic construct
PKEFLD

SEQ ID NO: 24191 - protein, 6 aa, synthetic construct
PKEFLE

SEQ ID NO: 24192 - protein, 6 aa, synthetic construct
PKEFLF

SEQ ID NO: 24193 - protein, 6 aa, synthetic construct
PKEFLW

SEQ ID NO: 24194 - protein, 6 aa, synthetic construct
PKEFLY

SEQ ID NO: 24195 - protein, 6 aa, synthetic construct
PKEFKD

SEQ ID NO: 24196 - protein, 6 aa, synthetic construct
PKEFKE

SEQ ID NO: 24197 - protein, 6 aa, synthetic construct
PKEFKF

SEQ ID NO: 24198 - protein, 6 aa, synthetic construct
PKEFKW

SEQ ID NO: 24199 - protein, 6 aa, synthetic construct
PKEFKY

SEQ ID NO: 24200 - protein, 6 aa, synthetic construct
PKEFMD

SEQ ID NO: 24201 - protein, 6 aa, synthetic construct
PKEFME

SEQ ID NO: 24202 - protein, 6 aa, synthetic construct
PKEFMF

SEQ ID NO: 24203 - protein, 6 aa, synthetic construct
PKEFMW

SEQ ID NO: 24204 - protein, 6 aa, synthetic construct
PKEFMY

SEQ ID NO: 24205 - protein, 6 aa, synthetic construct
PKEFFD

SEQ ID NO: 24206 - protein, 6 aa, synthetic construct
PKEFFE

SEQ ID NO: 24207 - protein, 6 aa, synthetic construct
PKEFFF

SEQ ID NO: 24208 - protein, 6 aa, synthetic construct
PKEFFW

SEQ ID NO: 24209 - protein, 6 aa, synthetic construct
PKEFFY

SEQ ID NO: 24210 - protein, 6 aa, synthetic construct
PKEFPD

SEQ ID NO: 24211 - protein, 6 aa, synthetic construct
PKEFPE

SEQ ID NO: 24212 - protein, 6 aa, synthetic construct
PKEFPF

SEQ ID NO: 24213 - protein, 6 aa, synthetic construct
PKEFPW

SEQ ID NO: 24214 - protein, 6 aa, synthetic construct
PKEFPY

SEQ ID NO: 24215 - protein, 6 aa, synthetic construct
PKEFSD

SEQ ID NO: 24216 - protein, 6 aa, synthetic construct
PKEFSE

SEQ ID NO: 24217 - protein, 6 aa, synthetic construct
PKEFSF

SEQ ID NO: 24218 - protein, 6 aa, synthetic construct
PKEFSW

SEQ ID NO: 24219 - protein, 6 aa, synthetic construct
PKEFSY

SEQ ID NO: 24220 - protein, 6 aa, synthetic construct
PKEFTD

SEQ ID NO: 24221 - protein, 6 aa, synthetic construct
PKEFTE

SEQ ID NO: 24222 - protein, 6 aa, synthetic construct
PKEFTF

SEQ ID NO: 24223 - protein, 6 aa, synthetic construct
PKEFTW

SEQ ID NO: 24224 - protein, 6 aa, synthetic construct
PKEFTY

SEQ ID NO: 24225 - protein, 6 aa, synthetic construct
PKEFWD

SEQ ID NO: 24226 - protein, 6 aa, synthetic construct
PKEFWE

SEQ ID NO: 24227 - protein, 6 aa, synthetic construct
PKEFWF

SEQ ID NO: 24228 - protein, 6 aa, synthetic construct
PKEFWW

SEQ ID NO: 24229 - protein, 6 aa, synthetic construct
PKEFWY

SEQ ID NO: 24230 - protein, 6 aa, synthetic construct
PKEFYD

SEQ ID NO: 24231 - protein, 6 aa, synthetic construct
PKEFYE

SEQ ID NO: 24232 - protein, 6 aa, synthetic construct
PKEFYF

SEQ ID NO: 24233 - protein, 6 aa, synthetic construct
PKEFYW

SEQ ID NO: 24234 - protein, 6 aa, synthetic construct
PKEFYY

SEQ ID NO: 24235 - protein, 6 aa, synthetic construct
PKEFVD

SEQ ID NO: 24236 - protein, 6 aa, synthetic construct
PKEFVE

SEQ ID NO: 24237 - protein, 6 aa, synthetic construct
PKEFVF

SEQ ID NO: 24238 - protein, 6 aa, synthetic construct
PKEFVW

SEQ ID NO: 24239 - protein, 6 aa, synthetic construct
PKEFVY

SEQ ID NO: 24240 - protein, 6 aa, synthetic construct
PKEPAD

SEQ ID NO: 24241 - protein, 6 aa, synthetic construct
PKEPAE

SEQ ID NO: 24242 - protein, 6 aa, synthetic construct
PKEPAF

SEQ ID NO: 24243 - protein, 6 aa, synthetic construct
PKEPAW

SEQ ID NO: 24244 - protein, 6 aa, synthetic construct
PKEPAY

SEQ ID NO: 24245 - protein, 6 aa, synthetic construct
PKEPRD

SEQ ID NO: 24246 - protein, 6 aa, synthetic construct
PKEPRE

SEQ ID NO: 24247 - protein, 6 aa, synthetic construct
PKEPRF

SEQ ID NO: 24248 - protein, 6 aa, synthetic construct
PKEPRW

SEQ ID NO: 24249 - protein, 6 aa, synthetic construct
PKEPRY

SEQ ID NO: 24250 - protein, 6 aa, synthetic construct
PKEPND

SEQ ID NO: 24251 - protein, 6 aa, synthetic construct
PKEPNE

SEQ ID NO: 24252 - protein, 6 aa, synthetic construct
PKEPNF

SEQ ID NO: 24253 - protein, 6 aa, synthetic construct
PKEPNW

SEQ ID NO: 24254 - protein, 6 aa, synthetic construct
PKEPNY

SEQ ID NO: 24255 - protein, 6 aa, synthetic construct
PKEPDD

SEQ ID NO: 24256 - protein, 6 aa, synthetic construct
PKEPDE

SEQ ID NO: 24257 - protein, 6 aa, synthetic construct
PKEPDF

SEQ ID NO: 24258 - protein, 6 aa, synthetic construct
PKEPDW

SEQ ID NO: 24259 - protein, 6 aa, synthetic construct
PKEPDY

SEQ ID NO: 24260 - protein, 6 aa, synthetic construct
PKEPCD

SEQ ID NO: 24261 - protein, 6 aa, synthetic construct
PKEPCE

SEQ ID NO: 24262 - protein, 6 aa, synthetic construct
PKEPCF

SEQ ID NO: 24263 - protein, 6 aa, synthetic construct
PKEPCW

SEQ ID NO: 24264 - protein, 6 aa, synthetic construct
PKEPCY

SEQ ID NO: 24265 - protein, 6 aa, synthetic construct
PKEPQD

SEQ ID NO: 24266 - protein, 6 aa, synthetic construct
PKEPQE

SEQ ID NO: 24267 - protein, 6 aa, synthetic construct
PKEPQF

SEQ ID NO: 24268 - protein, 6 aa, synthetic construct
PKEPQW

SEQ ID NO: 24269 - protein, 6 aa, synthetic construct
PKEPQY

SEQ ID NO: 24270 - protein, 6 aa, synthetic construct
PKEPED

SEQ ID NO: 24271 - protein, 6 aa, synthetic construct
PKEPEE

SEQ ID NO: 24272 - protein, 6 aa, synthetic construct
PKEPEF

SEQ ID NO: 24273 - protein, 6 aa, synthetic construct
PKEPEW

SEQ ID NO: 24274 - protein, 6 aa, synthetic construct
PKEPEY

SEQ ID NO: 24275 - protein, 6 aa, synthetic construct
PKEPGD

SEQ ID NO: 24276 - protein, 6 aa, synthetic construct
PKEPGE

SEQ ID NO: 24277 - protein, 6 aa, synthetic construct
PKEPGF

SEQ ID NO: 24278 - protein, 6 aa, synthetic construct
PKEPGW

SEQ ID NO: 24279 - protein, 6 aa, synthetic construct
PKEPGY

SEQ ID NO: 24280 - protein, 6 aa, synthetic construct
PKEPHD

SEQ ID NO: 24281 - protein, 6 aa, synthetic construct
PKEPHE

SEQ ID NO: 24282 - protein, 6 aa, synthetic construct
PKEPHF

SEQ ID NO: 24283 - protein, 6 aa, synthetic construct
PKEPHW

SEQ ID NO: 24284 - protein, 6 aa, synthetic construct
PKEPHY

SEQ ID NO: 24285 - protein, 6 aa, synthetic construct
PKEPID

SEQ ID NO: 24286 - protein, 6 aa, synthetic construct
PKEPIE

SEQ ID NO: 24287 - protein, 6 aa, synthetic construct
PKEPIF

SEQ ID NO: 24288 - protein, 6 aa, synthetic construct
PKEPIW

SEQ ID NO: 24289 - protein, 6 aa, synthetic construct
PKEPIY

SEQ ID NO: 24290 - protein, 6 aa, synthetic construct
PKEPLD

SEQ ID NO: 24291 - protein, 6 aa, synthetic construct
PKEPLE

SEQ ID NO: 24292 - protein, 6 aa, synthetic construct
PKEPLF

SEQ ID NO: 24293 - protein, 6 aa, synthetic construct
PKEPLW

SEQ ID NO: 24294 - protein, 6 aa, synthetic construct
PKEPLY

SEQ ID NO: 24295 - protein, 6 aa, synthetic construct
PKEPKD

SEQ ID NO: 24296 - protein, 6 aa, synthetic construct
PKEPKE

SEQ ID NO: 24297 - protein, 6 aa, synthetic construct
PKEPKF

SEQ ID NO: 24298 - protein, 6 aa, synthetic construct
PKEPKW

SEQ ID NO: 24299 - protein, 6 aa, synthetic construct
PKEPKY

SEQ ID NO: 24300 - protein, 6 aa, synthetic construct
PKEPMD

SEQ ID NO: 24301 - protein, 6 aa, synthetic construct
PKEPME

SEQ ID NO: 24302 - protein, 6 aa, synthetic construct
PKEPMF

SEQ ID NO: 24303 - protein, 6 aa, synthetic construct
PKEPMW

SEQ ID NO: 24304 - protein, 6 aa, synthetic construct
PKEPMY

SEQ ID NO: 24305 - protein, 6 aa, synthetic construct
PKEPFD

SEQ ID NO: 24306 - protein, 6 aa, synthetic construct
PKEPFE

SEQ ID NO: 24307 - protein, 6 aa, synthetic construct
PKEPFF

SEQ ID NO: 24308 - protein, 6 aa, synthetic construct
PKEPFW

SEQ ID NO: 24309 - protein, 6 aa, synthetic construct
PKEPFY

SEQ ID NO: 24310 - protein, 6 aa, synthetic construct
PKEPPD

SEQ ID NO: 24311 - protein, 6 aa, synthetic construct
PKEPPE

SEQ ID NO: 24312 - protein, 6 aa, synthetic construct
PKEPPF

SEQ ID NO: 24313 - protein, 6 aa, synthetic construct
PKEPPW

SEQ ID NO: 24314 - protein, 6 aa, synthetic construct
PKEPPY

SEQ ID NO: 24315 - protein, 6 aa, synthetic construct
PKEPSD

SEQ ID NO: 24316 - protein, 6 aa, synthetic construct
PKEPSE

SEQ ID NO: 24317 - protein, 6 aa, synthetic construct
PKEPSF

SEQ ID NO: 24318 - protein, 6 aa, synthetic construct
PKEPSW

SEQ ID NO: 24319 - protein, 6 aa, synthetic construct
PKEPSY

SEQ ID NO: 24320 - protein, 6 aa, synthetic construct
PKEPTD

SEQ ID NO: 24321 - protein, 6 aa, synthetic construct
PKEPTE

SEQ ID NO: 24322 - protein, 6 aa, synthetic construct
PKEPTF

SEQ ID NO: 24323 - protein, 6 aa, synthetic construct
PKEPTW

SEQ ID NO: 24324 - protein, 6 aa, synthetic construct
PKEPTY

SEQ ID NO: 24325 - protein, 6 aa, synthetic construct
PKEPWD

SEQ ID NO: 24326 - protein, 6 aa, synthetic construct
PKEPWE

SEQ ID NO: 24327 - protein, 6 aa, synthetic construct
PKEPWF

SEQ ID NO: 24328 - protein, 6 aa, synthetic construct
PKEPWW

SEQ ID NO: 24329 - protein, 6 aa, synthetic construct
PKEPWY

SEQ ID NO: 24330 - protein, 6 aa, synthetic construct
PKEPYD

SEQ ID NO: 24331 - protein, 6 aa, synthetic construct
PKEPYE

SEQ ID NO: 24332 - protein, 6 aa, synthetic construct
PKEPYF

SEQ ID NO: 24333 - protein, 6 aa, synthetic construct
PKEPYW

SEQ ID NO: 24334 - protein, 6 aa, synthetic construct
PKEPYY

SEQ ID NO: 24335 - protein, 6 aa, synthetic construct
PKEPVD

SEQ ID NO: 24336 - protein, 6 aa, synthetic construct
PKEPVE

SEQ ID NO: 24337 - protein, 6 aa, synthetic construct
PKEPVF

SEQ ID NO: 24338 - protein, 6 aa, synthetic construct
PKEPVW

SEQ ID NO: 24339 - protein, 6 aa, synthetic construct
PKEPVY

SEQ ID NO: 24340 - protein, 6 aa, synthetic construct
PKESAD

SEQ ID NO: 24341 - protein, 6 aa, synthetic construct
PKESAE

SEQ ID NO: 24342 - protein, 6 aa, synthetic construct
PKESAF

SEQ ID NO: 24343 - protein, 6 aa, synthetic construct
PKESAW

SEQ ID NO: 24344 - protein, 6 aa, synthetic construct
PKESAY

SEQ ID NO: 24345 - protein, 6 aa, synthetic construct
PKESRD

SEQ ID NO: 24346 - protein, 6 aa, synthetic construct
PKESRE

SEQ ID NO: 24347 - protein, 6 aa, synthetic construct
PKESRF

SEQ ID NO: 24348 - protein, 6 aa, synthetic construct
PKESRW

SEQ ID NO: 24349 - protein, 6 aa, synthetic construct
PKESRY

SEQ ID NO: 24350 - protein, 6 aa, synthetic construct
PKESND

SEQ ID NO: 24351 - protein, 6 aa, synthetic construct
PKESNE

SEQ ID NO: 24352 - protein, 6 aa, synthetic construct
PKESNF

SEQ ID NO: 24353 - protein, 6 aa, synthetic construct
PKESNW

SEQ ID NO: 24354 - protein, 6 aa, synthetic construct
PKESNY

SEQ ID NO: 24355 - protein, 6 aa, synthetic construct
PKESDD

SEQ ID NO: 24356 - protein, 6 aa, synthetic construct
PKESDE

SEQ ID NO: 24357 - protein, 6 aa, synthetic construct
PKESDF

SEQ ID NO: 24358 - protein, 6 aa, synthetic construct
PKESDW

SEQ ID NO: 24359 - protein, 6 aa, synthetic construct
PKESDY

SEQ ID NO: 24360 - protein, 6 aa, synthetic construct
PKESCD

SEQ ID NO: 24361 - protein, 6 aa, synthetic construct
PKESCE

SEQ ID NO: 24362 - protein, 6 aa, synthetic construct
PKESCF

SEQ ID NO: 24363 - protein, 6 aa, synthetic construct
PKESCW

SEQ ID NO: 24364 - protein, 6 aa, synthetic construct
PKESCY

SEQ ID NO: 24365 - protein, 6 aa, synthetic construct
PKESQD

SEQ ID NO: 24366 - protein, 6 aa, synthetic construct
PKESQE

SEQ ID NO: 24367 - protein, 6 aa, synthetic construct
PKESQF

SEQ ID NO: 24368 - protein, 6 aa, synthetic construct
PKESQW

SEQ ID NO: 24369 - protein, 6 aa, synthetic construct
PKESQY

SEQ ID NO: 24370 - protein, 6 aa, synthetic construct
PKESED

SEQ ID NO: 24371 - protein, 6 aa, synthetic construct
PKESEE

SEQ ID NO: 24372 - protein, 6 aa, synthetic construct
PKESEF

SEQ ID NO: 24373 - protein, 6 aa, synthetic construct
PKESEW

SEQ ID NO: 24374 - protein, 6 aa, synthetic construct
PKESEY

SEQ ID NO: 24375 - protein, 6 aa, synthetic construct
PKESGD

SEQ ID NO: 24376 - protein, 6 aa, synthetic construct
PKESGE

SEQ ID NO: 24377 - protein, 6 aa, synthetic construct
PKESGF

SEQ ID NO: 24378 - protein, 6 aa, synthetic construct
PKESGW

SEQ ID NO: 24379 - protein, 6 aa, synthetic construct
PKESGY

SEQ ID NO: 24380 - protein, 6 aa, synthetic construct
PKESHD

SEQ ID NO: 24381 - protein, 6 aa, synthetic construct
PKESHE

SEQ ID NO: 24382 - protein, 6 aa, synthetic construct
PKESHF

SEQ ID NO: 24383 - protein, 6 aa, synthetic construct
PKESHW

SEQ ID NO: 24384 - protein, 6 aa, synthetic construct
PKESHY

SEQ ID NO: 24385 - protein, 6 aa, synthetic construct
PKESID

SEQ ID NO: 24386 - protein, 6 aa, synthetic construct
PKESIE

SEQ ID NO: 24387 - protein, 6 aa, synthetic construct
PKESIF

SEQ ID NO: 24388 - protein, 6 aa, synthetic construct
PKESIW

SEQ ID NO: 24389 - protein, 6 aa, synthetic construct
PKESIY

SEQ ID NO: 24390 - protein, 6 aa, synthetic construct
PKESLD

SEQ ID NO: 24391 - protein, 6 aa, synthetic construct
PKESLE

SEQ ID NO: 24392 - protein, 6 aa, synthetic construct
PKESLF

SEQ ID NO: 24393 - protein, 6 aa, synthetic construct
PKESLW

SEQ ID NO: 24394 - protein, 6 aa, synthetic construct
PKESLY

SEQ ID NO: 24395 - protein, 6 aa, synthetic construct
PKESKD

SEQ ID NO: 24396 - protein, 6 aa, synthetic construct
PKESKE

SEQ ID NO: 24397 - protein, 6 aa, synthetic construct
PKESKF

SEQ ID NO: 24398 - protein, 6 aa, synthetic construct
PKESKW

SEQ ID NO: 24399 - protein, 6 aa, synthetic construct
PKESKY

SEQ ID NO: 24400 - protein, 6 aa, synthetic construct
PKESMD

SEQ ID NO: 24401 - protein, 6 aa, synthetic construct
PKESME

SEQ ID NO: 24402 - protein, 6 aa, synthetic construct
PKESMF

SEQ ID NO: 24403 - protein, 6 aa, synthetic construct
PKESMW

SEQ ID NO: 24404 - protein, 6 aa, synthetic construct
PKESMY

SEQ ID NO: 24405 - protein, 6 aa, synthetic construct
PKESFD

SEQ ID NO: 24406 - protein, 6 aa, synthetic construct
PKESFE

SEQ ID NO: 24407 - protein, 6 aa, synthetic construct
PKESFF

SEQ ID NO: 24408 - protein, 6 aa, synthetic construct
PKESFW

SEQ ID NO: 24409 - protein, 6 aa, synthetic construct
PKESFY

SEQ ID NO: 24410 - protein, 6 aa, synthetic construct
PKESPD

SEQ ID NO: 24411 - protein, 6 aa, synthetic construct
PKESPE

SEQ ID NO: 24412 - protein, 6 aa, synthetic construct
PKESPF

SEQ ID NO: 24413 - protein, 6 aa, synthetic construct
PKESPW

SEQ ID NO: 24414 - protein, 6 aa, synthetic construct
PKESPY

SEQ ID NO: 24415 - protein, 6 aa, synthetic construct
PKESSD

SEQ ID NO: 24416 - protein, 6 aa, synthetic construct
PKESSE

SEQ ID NO: 24417 - protein, 6 aa, synthetic construct
PKESSF

SEQ ID NO: 24418 - protein, 6 aa, synthetic construct
PKESSW

SEQ ID NO: 24419 - protein, 6 aa, synthetic construct
PKESSY

SEQ ID NO: 24420 - protein, 6 aa, synthetic construct
PKESTD

SEQ ID NO: 24421 - protein, 6 aa, synthetic construct
PKESTE

SEQ ID NO: 24422 - protein, 6 aa, synthetic construct
PKESTF

SEQ ID NO: 24423 - protein, 6 aa, synthetic construct
PKESTW

SEQ ID NO: 24424 - protein, 6 aa, synthetic construct
PKESTY

SEQ ID NO: 24425 - protein, 6 aa, synthetic construct
PKESWD

SEQ ID NO: 24426 - protein, 6 aa, synthetic construct
PKESWE

SEQ ID NO: 24427 - protein, 6 aa, synthetic construct
PKESWF

SEQ ID NO: 24428 - protein, 6 aa, synthetic construct
PKESWW

SEQ ID NO: 24429 - protein, 6 aa, synthetic construct
PKESWY

SEQ ID NO: 24430 - protein, 6 aa, synthetic construct
PKESYD

SEQ ID NO: 24431 - protein, 6 aa, synthetic construct
PKESYE

SEQ ID NO: 24432 - protein, 6 aa, synthetic construct
PKESYF

SEQ ID NO: 24433 - protein, 6 aa, synthetic construct
PKESYW

SEQ ID NO: 24434 - protein, 6 aa, synthetic construct
PKESYY

SEQ ID NO: 24435 - protein, 6 aa, synthetic construct
PKESVD

SEQ ID NO: 24436 - protein, 6 aa, synthetic construct
PKESVE

SEQ ID NO: 24437 - protein, 6 aa, synthetic construct
PKESVF

SEQ ID NO: 24438 - protein, 6 aa, synthetic construct
PKESVW

SEQ ID NO: 24439 - protein, 6 aa, synthetic construct
PKESVY

SEQ ID NO: 24440 - protein, 6 aa, synthetic construct
PKETAD

SEQ ID NO: 24441 - protein, 6 aa, synthetic construct
PKETAE

SEQ ID NO: 24442 - protein, 6 aa, synthetic construct
PKETAF

SEQ ID NO: 24443 - protein, 6 aa, synthetic construct
PKETAW

SEQ ID NO: 24444 - protein, 6 aa, synthetic construct
PKETAY

SEQ ID NO: 24445 - protein, 6 aa, synthetic construct
PKETRD

SEQ ID NO: 24446 - protein, 6 aa, synthetic construct
PKETRE

SEQ ID NO: 24447 - protein, 6 aa, synthetic construct
PKETRF

SEQ ID NO: 24448 - protein, 6 aa, synthetic construct
PKETRW

SEQ ID NO: 24449 - protein, 6 aa, synthetic construct
PKETRY

SEQ ID NO: 24450 - protein, 6 aa, synthetic construct
PKETND

SEQ ID NO: 24451 - protein, 6 aa, synthetic construct
PKETNE

SEQ ID NO: 24452 - protein, 6 aa, synthetic construct
PKETNF

SEQ ID NO: 24453 - protein, 6 aa, synthetic construct
PKETNW

SEQ ID NO: 24454 - protein, 6 aa, synthetic construct
PKETNY

SEQ ID NO: 24455 - protein, 6 aa, synthetic construct
PKETDD

SEQ ID NO: 24456 - protein, 6 aa, synthetic construct
PKETDE

SEQ ID NO: 24457 - protein, 6 aa, synthetic construct
PKETDF

SEQ ID NO: 24458 - protein, 6 aa, synthetic construct
PKETDW

SEQ ID NO: 24459 - protein, 6 aa, synthetic construct
PKETDY

SEQ ID NO: 24460 - protein, 6 aa, synthetic construct
PKETCD

SEQ ID NO: 24461 - protein, 6 aa, synthetic construct
PKETCE

SEQ ID NO: 24462 - protein, 6 aa, synthetic construct
PKETCF

SEQ ID NO: 24463 - protein, 6 aa, synthetic construct
PKETCW

SEQ ID NO: 24464 - protein, 6 aa, synthetic construct
PKETCY

SEQ ID NO: 24465 - protein, 6 aa, synthetic construct
PKETQD

SEQ ID NO: 24466 - protein, 6 aa, synthetic construct
PKETQE

SEQ ID NO: 24467 - protein, 6 aa, synthetic construct
PKETQF

SEQ ID NO: 24468 - protein, 6 aa, synthetic construct
PKETQW

SEQ ID NO: 24469 - protein, 6 aa, synthetic construct
PKETQY

SEQ ID NO: 24470 - protein, 6 aa, synthetic construct
PKETED

SEQ ID NO: 24471 - protein, 6 aa, synthetic construct
PKETEE

SEQ ID NO: 24472 - protein, 6 aa, synthetic construct
PKETEF

SEQ ID NO: 24473 - protein, 6 aa, synthetic construct
PKETEW

SEQ ID NO: 24474 - protein, 6 aa, synthetic construct
PKETEY

SEQ ID NO: 24475 - protein, 6 aa, synthetic construct
PKETGD

SEQ ID NO: 24476 - protein, 6 aa, synthetic construct
PKETGE

SEQ ID NO: 24477 - protein, 6 aa, synthetic construct
PKETGF

SEQ ID NO: 24478 - protein, 6 aa, synthetic construct
PKETGW

SEQ ID NO: 24479 - protein, 6 aa, synthetic construct
PKETGY

SEQ ID NO: 24480 - protein, 6 aa, synthetic construct
PKETHD

SEQ ID NO: 24481 - protein, 6 aa, synthetic construct
PKETHE

SEQ ID NO: 24482 - protein, 6 aa, synthetic construct
PKETHF

SEQ ID NO: 24483 - protein, 6 aa, synthetic construct
PKETHW

SEQ ID NO: 24484 - protein, 6 aa, synthetic construct
PKETHY

SEQ ID NO: 24485 - protein, 6 aa, synthetic construct
PKETID

SEQ ID NO: 24486 - protein, 6 aa, synthetic construct
PKETIE

SEQ ID NO: 24487 - protein, 6 aa, synthetic construct
PKETIF

SEQ ID NO: 24488 - protein, 6 aa, synthetic construct
PKETIW

SEQ ID NO: 24489 - protein, 6 aa, synthetic construct
PKETIY

SEQ ID NO: 24490 - protein, 6 aa, synthetic construct
PKETLD

SEQ ID NO: 24491 - protein, 6 aa, synthetic construct
PKETLE

SEQ ID NO: 24492 - protein, 6 aa, synthetic construct
PKETLF

SEQ ID NO: 24493 - protein, 6 aa, synthetic construct
PKETLW

SEQ ID NO: 24494 - protein, 6 aa, synthetic construct
PKETLY

SEQ ID NO: 24495 - protein, 6 aa, synthetic construct
PKETKD

SEQ ID NO: 24496 - protein, 6 aa, synthetic construct
PKETKE

SEQ ID NO: 24497 - protein, 6 aa, synthetic construct
PKETKF

SEQ ID NO: 24498 - protein, 6 aa, synthetic construct
PKETKW

SEQ ID NO: 24499 - protein, 6 aa, synthetic construct
PKETKY

SEQ ID NO: 24500 - protein, 6 aa, synthetic construct
PKETMD

SEQ ID NO: 24501 - protein, 6 aa, synthetic construct
PKETME

SEQ ID NO: 24502 - protein, 6 aa, synthetic construct
PKETMF

SEQ ID NO: 24503 - protein, 6 aa, synthetic construct
PKETMW

SEQ ID NO: 24504 - protein, 6 aa, synthetic construct
PKETMY

SEQ ID NO: 24505 - protein, 6 aa, synthetic construct
PKETFD

SEQ ID NO: 24506 - protein, 6 aa, synthetic construct
PKETFE

SEQ ID NO: 24507 - protein, 6 aa, synthetic construct
PKETFF

SEQ ID NO: 24508 - protein, 6 aa, synthetic construct
PKETFW

SEQ ID NO: 24509 - protein, 6 aa, synthetic construct
PKETFY

SEQ ID NO: 24510 - protein, 6 aa, synthetic construct
PKETPD

SEQ ID NO: 24511 - protein, 6 aa, synthetic construct
PKETPE

SEQ ID NO: 24512 - protein, 6 aa, synthetic construct
PKETPF

SEQ ID NO: 24513 - protein, 6 aa, synthetic construct
PKETPW

SEQ ID NO: 24514 - protein, 6 aa, synthetic construct
PKETPY

SEQ ID NO: 24515 - protein, 6 aa, synthetic construct
PKETSD

SEQ ID NO: 24516 - protein, 6 aa, synthetic construct
PKETSE

SEQ ID NO: 24517 - protein, 6 aa, synthetic construct
PKETSF

SEQ ID NO: 24518 - protein, 6 aa, synthetic construct
PKETSW

SEQ ID NO: 24519 - protein, 6 aa, synthetic construct
PKETSY

SEQ ID NO: 24520 - protein, 6 aa, synthetic construct
PKETTD

SEQ ID NO: 24521 - protein, 6 aa, synthetic construct
PKETTE

SEQ ID NO: 24522 - protein, 6 aa, synthetic construct
PKETTF

SEQ ID NO: 24523 - protein, 6 aa, synthetic construct
PKETTW

SEQ ID NO: 24524 - protein, 6 aa, synthetic construct
PKETTY

SEQ ID NO: 24525 - protein, 6 aa, synthetic construct
PKETWD

SEQ ID NO: 24526 - protein, 6 aa, synthetic construct
PKETWE

SEQ ID NO: 24527 - protein, 6 aa, synthetic construct
PKETWF

SEQ ID NO: 24528 - protein, 6 aa, synthetic construct
PKETWW

SEQ ID NO: 24529 - protein, 6 aa, synthetic construct
PKETWY

SEQ ID NO: 24530 - protein, 6 aa, synthetic construct
PKETYD

SEQ ID NO: 24531 - protein, 6 aa, synthetic construct
PKETYE

SEQ ID NO: 24532 - protein, 6 aa, synthetic construct
PKETYF

SEQ ID NO: 24533 - protein, 6 aa, synthetic construct
PKETYW

SEQ ID NO: 24534 - protein, 6 aa, synthetic construct
PKETYY

SEQ ID NO: 24535 - protein, 6 aa, synthetic construct
PKETVD

SEQ ID NO: 24536 - protein, 6 aa, synthetic construct
PKETVE

SEQ ID NO: 24537 - protein, 6 aa, synthetic construct
PKETVF

SEQ ID NO: 24538 - protein, 6 aa, synthetic construct
PKETVW

SEQ ID NO: 24539 - protein, 6 aa, synthetic construct
PKETVY

SEQ ID NO: 24540 - protein, 6 aa, synthetic construct
PKEWAD

SEQ ID NO: 24541 - protein, 6 aa, synthetic construct
PKEWAE

SEQ ID NO: 24542 - protein, 6 aa, synthetic construct
PKEWAF

SEQ ID NO: 24543 - protein, 6 aa, synthetic construct
PKEWAW

SEQ ID NO: 24544 - protein, 6 aa, synthetic construct
PKEWAY

SEQ ID NO: 24545 - protein, 6 aa, synthetic construct
PKEWRD

SEQ ID NO: 24546 - protein, 6 aa, synthetic construct
PKEWRE

SEQ ID NO: 24547 - protein, 6 aa, synthetic construct
PKEWRF

SEQ ID NO: 24548 - protein, 6 aa, synthetic construct
PKEWRW

SEQ ID NO: 24549 - protein, 6 aa, synthetic construct
PKEWRY

SEQ ID NO: 24550 - protein, 6 aa, synthetic construct
PKEWND

SEQ ID NO: 24551 - protein, 6 aa, synthetic construct
PKEWNE

SEQ ID NO: 24552 - protein, 6 aa, synthetic construct
PKEWNF

SEQ ID NO: 24553 - protein, 6 aa, synthetic construct
PKEWNW

SEQ ID NO: 24554 - protein, 6 aa, synthetic construct
PKEWNY

SEQ ID NO: 24555 - protein, 6 aa, synthetic construct
PKEWDD

SEQ ID NO: 24556 - protein, 6 aa, synthetic construct
PKEWDE

SEQ ID NO: 24557 - protein, 6 aa, synthetic construct
PKEWDF

SEQ ID NO: 24558 - protein, 6 aa, synthetic construct
PKEWDW

SEQ ID NO: 24559 - protein, 6 aa, synthetic construct
PKEWDY

SEQ ID NO: 24560 - protein, 6 aa, synthetic construct
PKEWCD

SEQ ID NO: 24561 - protein, 6 aa, synthetic construct
PKEWCE

SEQ ID NO: 24562 - protein, 6 aa, synthetic construct
PKEWCF

SEQ ID NO: 24563 - protein, 6 aa, synthetic construct
PKEWCW

SEQ ID NO: 24564 - protein, 6 aa, synthetic construct
PKEWCY

SEQ ID NO: 24565 - protein, 6 aa, synthetic construct
PKEWQD

SEQ ID NO: 24566 - protein, 6 aa, synthetic construct
PKEWQE

SEQ ID NO: 24567 - protein, 6 aa, synthetic construct
PKEWQF

SEQ ID NO: 24568 - protein, 6 aa, synthetic construct
PKEWQW

SEQ ID NO: 24569 - protein, 6 aa, synthetic construct
PKEWQY

SEQ ID NO: 24570 - protein, 6 aa, synthetic construct
PKEWED

SEQ ID NO: 24571 - protein, 6 aa, synthetic construct
PKEWEE

SEQ ID NO: 24572 - protein, 6 aa, synthetic construct
PKEWEF

SEQ ID NO: 24573 - protein, 6 aa, synthetic construct
PKEWEW

SEQ ID NO: 24574 - protein, 6 aa, synthetic construct
PKEWEY

SEQ ID NO: 24575 - protein, 6 aa, synthetic construct
PKEWGD

SEQ ID NO: 24576 - protein, 6 aa, synthetic construct
PKEWGE

SEQ ID NO: 24577 - protein, 6 aa, synthetic construct
PKEWGF

SEQ ID NO: 24578 - protein, 6 aa, synthetic construct
PKEWGW

SEQ ID NO: 24579 - protein, 6 aa, synthetic construct
PKEWGY

SEQ ID NO: 24580 - protein, 6 aa, synthetic construct
PKEWHD

SEQ ID NO: 24581 - protein, 6 aa, synthetic construct
PKEWHE

SEQ ID NO: 24582 - protein, 6 aa, synthetic construct
PKEWHF

SEQ ID NO: 24583 - protein, 6 aa, synthetic construct
PKEWHW

SEQ ID NO: 24584 - protein, 6 aa, synthetic construct
PKEWHY

SEQ ID NO: 24585 - protein, 6 aa, synthetic construct
PKEWID

SEQ ID NO: 24586 - protein, 6 aa, synthetic construct
PKEWIE

SEQ ID NO: 24587 - protein, 6 aa, synthetic construct
PKEWIF

SEQ ID NO: 24588 - protein, 6 aa, synthetic construct
PKEWIW

SEQ ID NO: 24589 - protein, 6 aa, synthetic construct
PKEWIY

SEQ ID NO: 24590 - protein, 6 aa, synthetic construct
PKEWLD

SEQ ID NO: 24591 - protein, 6 aa, synthetic construct
PKEWLE

SEQ ID NO: 24592 - protein, 6 aa, synthetic construct
PKEWLF

SEQ ID NO: 24593 - protein, 6 aa, synthetic construct
PKEWLW

SEQ ID NO: 24594 - protein, 6 aa, synthetic construct
PKEWLY

SEQ ID NO: 24595 - protein, 6 aa, synthetic construct
PKEWKD

SEQ ID NO: 24596 - protein, 6 aa, synthetic construct
PKEWKE

SEQ ID NO: 24597 - protein, 6 aa, synthetic construct
PKEWKF

SEQ ID NO: 24598 - protein, 6 aa, synthetic construct
PKEWKW

SEQ ID NO: 24599 - protein, 6 aa, synthetic construct
PKEWKY

SEQ ID NO: 24600 - protein, 6 aa, synthetic construct
PKEWMD

SEQ ID NO: 24601 - protein, 6 aa, synthetic construct
PKEWME

SEQ ID NO: 24602 - protein, 6 aa, synthetic construct
PKEWMF

SEQ ID NO: 24603 - protein, 6 aa, synthetic construct
PKEWMW

SEQ ID NO: 24604 - protein, 6 aa, synthetic construct
PKEWMY

SEQ ID NO: 24605 - protein, 6 aa, synthetic construct
PKEWFD

SEQ ID NO: 24606 - protein, 6 aa, synthetic construct
PKEWFE

SEQ ID NO: 24607 - protein, 6 aa, synthetic construct
PKEWFF

SEQ ID NO: 24608 - protein, 6 aa, synthetic construct
PKEWFW

SEQ ID NO: 24609 - protein, 6 aa, synthetic construct
PKEWFY

SEQ ID NO: 24610 - protein, 6 aa, synthetic construct
PKEWPD

SEQ ID NO: 24611 - protein, 6 aa, synthetic construct
PKEWPE

SEQ ID NO: 24612 - protein, 6 aa, synthetic construct
PKEWPF

SEQ ID NO: 24613 - protein, 6 aa, synthetic construct
PKEWPW

SEQ ID NO: 24614 - protein, 6 aa, synthetic construct
PKEWPY

SEQ ID NO: 24615 - protein, 6 aa, synthetic construct
PKEWSD

SEQ ID NO: 24616 - protein, 6 aa, synthetic construct
PKEWSE

SEQ ID NO: 24617 - protein, 6 aa, synthetic construct
PKEWSF

SEQ ID NO: 24618 - protein, 6 aa, synthetic construct
PKEWSW

SEQ ID NO: 24619 - protein, 6 aa, synthetic construct
PKEWSY

SEQ ID NO: 24620 - protein, 6 aa, synthetic construct
PKEWTD

SEQ ID NO: 24621 - protein, 6 aa, synthetic construct
PKEWTE

SEQ ID NO: 24622 - protein, 6 aa, synthetic construct
PKEWTF

SEQ ID NO: 24623 - protein, 6 aa, synthetic construct
PKEWTW

SEQ ID NO: 24624 - protein, 6 aa, synthetic construct
PKEWTY

SEQ ID NO: 24625 - protein, 6 aa, synthetic construct
PKEWWD

SEQ ID NO: 24626 - protein, 6 aa, synthetic construct
PKEWWE

SEQ ID NO: 24627 - protein, 6 aa, synthetic construct
PKEWWF

SEQ ID NO: 24628 - protein, 6 aa, synthetic construct
PKEWWW

SEQ ID NO: 24629 - protein, 6 aa, synthetic construct
PKEWWY

SEQ ID NO: 24630 - protein, 6 aa, synthetic construct
PKEWYD

SEQ ID NO: 24631 - protein, 6 aa, synthetic construct
PKEWYE

SEQ ID NO: 24632 - protein, 6 aa, synthetic construct
PKEWYF

SEQ ID NO: 24633 - protein, 6 aa, synthetic construct
PKEWYW

SEQ ID NO: 24634 - protein, 6 aa, synthetic construct
PKEWYY

SEQ ID NO: 24635 - protein, 6 aa, synthetic construct
PKEWVD

SEQ ID NO: 24636 - protein, 6 aa, synthetic construct
PKEWVE

SEQ ID NO: 24637 - protein, 6 aa, synthetic construct
PKEWVF

SEQ ID NO: 24638 - protein, 6 aa, synthetic construct
PKEWVW

SEQ ID NO: 24639 - protein, 6 aa, synthetic construct
PKEWVY

SEQ ID NO: 24640 - protein, 6 aa, synthetic construct
PKEYAD

SEQ ID NO: 24641 - protein, 6 aa, synthetic construct
PKEYAE

SEQ ID NO: 24642 - protein, 6 aa, synthetic construct
PKEYAF

SEQ ID NO: 24643 - protein, 6 aa, synthetic construct
PKEYAW

SEQ ID NO: 24644 - protein, 6 aa, synthetic construct
PKEYAY

SEQ ID NO: 24645 - protein, 6 aa, synthetic construct
PKEYRD

SEQ ID NO: 24646 - protein, 6 aa, synthetic construct
PKEYRE

SEQ ID NO: 24647 - protein, 6 aa, synthetic construct
PKEYRF

SEQ ID NO: 24648 - protein, 6 aa, synthetic construct
PKEYRW

SEQ ID NO: 24649 - protein, 6 aa, synthetic construct
PKEYRY

SEQ ID NO: 24650 - protein, 6 aa, synthetic construct
PKEYND

SEQ ID NO: 24651 - protein, 6 aa, synthetic construct
PKEYNE

SEQ ID NO: 24652 - protein, 6 aa, synthetic construct
PKEYNF

SEQ ID NO: 24653 - protein, 6 aa, synthetic construct
PKEYNW

SEQ ID NO: 24654 - protein, 6 aa, synthetic construct
PKEYNY

SEQ ID NO: 24655 - protein, 6 aa, synthetic construct
PKEYDD

SEQ ID NO: 24656 - protein, 6 aa, synthetic construct
PKEYDE

SEQ ID NO: 24657 - protein, 6 aa, synthetic construct
PKEYDF

SEQ ID NO: 24658 - protein, 6 aa, synthetic construct
PKEYDW

SEQ ID NO: 24659 - protein, 6 aa, synthetic construct
PKEYDY

SEQ ID NO: 24660 - protein, 6 aa, synthetic construct
PKEYCD

SEQ ID NO: 24661 - protein, 6 aa, synthetic construct
PKEYCE

SEQ ID NO: 24662 - protein, 6 aa, synthetic construct
PKEYCF

SEQ ID NO: 24663 - protein, 6 aa, synthetic construct
PKEYCW

SEQ ID NO: 24664 - protein, 6 aa, synthetic construct
PKEYCY

SEQ ID NO: 24665 - protein, 6 aa, synthetic construct
PKEYQD

SEQ ID NO: 24666 - protein, 6 aa, synthetic construct
PKEYQE

SEQ ID NO: 24667 - protein, 6 aa, synthetic construct
PKEYQF

SEQ ID NO: 24668 - protein, 6 aa, synthetic construct
PKEYQW

SEQ ID NO: 24669 - protein, 6 aa, synthetic construct
PKEYQY

SEQ ID NO: 24670 - protein, 6 aa, synthetic construct
PKEYED

SEQ ID NO: 24671 - protein, 6 aa, synthetic construct
PKEYEE

SEQ ID NO: 24672 - protein, 6 aa, synthetic construct
PKEYEF

SEQ ID NO: 24673 - protein, 6 aa, synthetic construct
PKEYEW

SEQ ID NO: 24674 - protein, 6 aa, synthetic construct
PKEYEY

SEQ ID NO: 24675 - protein, 6 aa, synthetic construct
PKEYGD

SEQ ID NO: 24676 - protein, 6 aa, synthetic construct
PKEYGE

SEQ ID NO: 24677 - protein, 6 aa, synthetic construct
PKEYGF

SEQ ID NO: 24678 - protein, 6 aa, synthetic construct
PKEYGW

SEQ ID NO: 24679 - protein, 6 aa, synthetic construct
PKEYGY

SEQ ID NO: 24680 - protein, 6 aa, synthetic construct
PKEYHD

SEQ ID NO: 24681 - protein, 6 aa, synthetic construct
PKEYHE

SEQ ID NO: 24682 - protein, 6 aa, synthetic construct
PKEYHF

SEQ ID NO: 24683 - protein, 6 aa, synthetic construct
PKEYHW

SEQ ID NO: 24684 - protein, 6 aa, synthetic construct
PKEYHY

SEQ ID NO: 24685 - protein, 6 aa, synthetic construct
PKEYID

SEQ ID NO: 24686 - protein, 6 aa, synthetic construct
PKEYIE

SEQ ID NO: 24687 - protein, 6 aa, synthetic construct
PKEYIF

SEQ ID NO: 24688 - protein, 6 aa, synthetic construct
PKEYIW

SEQ ID NO: 24689 - protein, 6 aa, synthetic construct
PKEYIY

SEQ ID NO: 24690 - protein, 6 aa, synthetic construct
PKEYLD

SEQ ID NO: 24691 - protein, 6 aa, synthetic construct
PKEYLE

SEQ ID NO: 24692 - protein, 6 aa, synthetic construct
PKEYLF

SEQ ID NO: 24693 - protein, 6 aa, synthetic construct
PKEYLW

SEQ ID NO: 24694 - protein, 6 aa, synthetic construct
PKEYLY

SEQ ID NO: 24695 - protein, 6 aa, synthetic construct
PKEYKD

SEQ ID NO: 24696 - protein, 6 aa, synthetic construct
PKEYKE

SEQ ID NO: 24697 - protein, 6 aa, synthetic construct
PKEYKF

SEQ ID NO: 24698 - protein, 6 aa, synthetic construct
PKEYKW

SEQ ID NO: 24699 - protein, 6 aa, synthetic construct
PKEYKY

SEQ ID NO: 24700 - protein, 6 aa, synthetic construct
PKEYMD

SEQ ID NO: 24701 - protein, 6 aa, synthetic construct
PKEYME

SEQ ID NO: 24702 - protein, 6 aa, synthetic construct
PKEYMF

SEQ ID NO: 24703 - protein, 6 aa, synthetic construct
PKEYMW

SEQ ID NO: 24704 - protein, 6 aa, synthetic construct
PKEYMY

SEQ ID NO: 24705 - protein, 6 aa, synthetic construct
PKEYFD

SEQ ID NO: 24706 - protein, 6 aa, synthetic construct
PKEYFE

SEQ ID NO: 24707 - protein, 6 aa, synthetic construct
PKEYFF

SEQ ID NO: 24708 - protein, 6 aa, synthetic construct
PKEYFW

SEQ ID NO: 24709 - protein, 6 aa, synthetic construct
PKEYFY

SEQ ID NO: 24710 - protein, 6 aa, synthetic construct
PKEYPD

SEQ ID NO: 24711 - protein, 6 aa, synthetic construct
PKEYPE

SEQ ID NO: 24712 - protein, 6 aa, synthetic construct
PKEYPF

SEQ ID NO: 24713 - protein, 6 aa, synthetic construct
PKEYPW

SEQ ID NO: 24714 - protein, 6 aa, synthetic construct
PKEYPY

SEQ ID NO: 24715 - protein, 6 aa, synthetic construct
PKEYSD

SEQ ID NO: 24716 - protein, 6 aa, synthetic construct
PKEYSE

SEQ ID NO: 24717 - protein, 6 aa, synthetic construct
PKEYSF

SEQ ID NO: 24718 - protein, 6 aa, synthetic construct
PKEYSW

SEQ ID NO: 24719 - protein, 6 aa, synthetic construct
PKEYSY

SEQ ID NO: 24720 - protein, 6 aa, synthetic construct
PKEYTD

SEQ ID NO: 24721 - protein, 6 aa, synthetic construct
PKEYTE

SEQ ID NO: 24722 - protein, 6 aa, synthetic construct
PKEYTF

SEQ ID NO: 24723 - protein, 6 aa, synthetic construct
PKEYTW

SEQ ID NO: 24724 - protein, 6 aa, synthetic construct
PKEYTY

SEQ ID NO: 24725 - protein, 6 aa, synthetic construct
PKEYWD

SEQ ID NO: 24726 - protein, 6 aa, synthetic construct
PKEYWE

SEQ ID NO: 24727 - protein, 6 aa, synthetic construct
PKEYWF

SEQ ID NO: 24728 - protein, 6 aa, synthetic construct
PKEYWW

SEQ ID NO: 24729 - protein, 6 aa, synthetic construct
PKEYWY

SEQ ID NO: 24730 - protein, 6 aa, synthetic construct
PKEYYD

SEQ ID NO: 24731 - protein, 6 aa, synthetic construct
PKEYYE

SEQ ID NO: 24732 - protein, 6 aa, synthetic construct
PKEYYF

SEQ ID NO: 24733 - protein, 6 aa, synthetic construct
PKEYYW

SEQ ID NO: 24734 - protein, 6 aa, synthetic construct
PKEYYY

SEQ ID NO: 24735 - protein, 6 aa, synthetic construct
PKEYVD

SEQ ID NO: 24736 - protein, 6 aa, synthetic construct
PKEYVE

SEQ ID NO: 24737 - protein, 6 aa, synthetic construct
PKEYVF

SEQ ID NO: 24738 - protein, 6 aa, synthetic construct
PKEYVW

SEQ ID NO: 24739 - protein, 6 aa, synthetic construct
PKEYVY

SEQ ID NO: 24740 - protein, 6 aa, synthetic construct
PKEVAD

SEQ ID NO: 24741 - protein, 6 aa, synthetic construct
PKEVAE

SEQ ID NO: 24742 - protein, 6 aa, synthetic construct
PKEVAF

SEQ ID NO: 24743 - protein, 6 aa, synthetic construct
PKEVAW

SEQ ID NO: 24744 - protein, 6 aa, synthetic construct
PKEVAY

SEQ ID NO: 24745 - protein, 6 aa, synthetic construct
PKEVRD

SEQ ID NO: 24746 - protein, 6 aa, synthetic construct
PKEVRE

SEQ ID NO: 24747 - protein, 6 aa, synthetic construct
PKEVRF

SEQ ID NO: 24748 - protein, 6 aa, synthetic construct
PKEVRW

SEQ ID NO: 24749 - protein, 6 aa, synthetic construct
PKEVRY

SEQ ID NO: 24750 - protein, 6 aa, synthetic construct
PKEVND

SEQ ID NO: 24751 - protein, 6 aa, synthetic construct
PKEVNE

SEQ ID NO: 24752 - protein, 6 aa, synthetic construct
PKEVNF

SEQ ID NO: 24753 - protein, 6 aa, synthetic construct
PKEVNW

SEQ ID NO: 24754 - protein, 6 aa, synthetic construct
PKEVNY

SEQ ID NO: 24755 - protein, 6 aa, synthetic construct
PKEVDD

SEQ ID NO: 24756 - protein, 6 aa, synthetic construct
PKEVDE

SEQ ID NO: 24757 - protein, 6 aa, synthetic construct
PKEVDF

SEQ ID NO: 24758 - protein, 6 aa, synthetic construct
PKEVDW

SEQ ID NO: 24759 - protein, 6 aa, synthetic construct
PKEVDY

SEQ ID NO: 24760 - protein, 6 aa, synthetic construct
PKEVCD

SEQ ID NO: 24761 - protein, 6 aa, synthetic construct
PKEVCE

SEQ ID NO: 24762 - protein, 6 aa, synthetic construct
PKEVCF

SEQ ID NO: 24763 - protein, 6 aa, synthetic construct
PKEVCW

SEQ ID NO: 24764 - protein, 6 aa, synthetic construct
PKEVCY

SEQ ID NO: 24765 - protein, 6 aa, synthetic construct
PKEVQD

SEQ ID NO: 24766 - protein, 6 aa, synthetic construct
PKEVQE

SEQ ID NO: 24767 - protein, 6 aa, synthetic construct
PKEVQF

SEQ ID NO: 24768 - protein, 6 aa, synthetic construct
PKEVQW

SEQ ID NO: 24769 - protein, 6 aa, synthetic construct
PKEVQY

SEQ ID NO: 24770 - protein, 6 aa, synthetic construct
PKEVED

SEQ ID NO: 24771 - protein, 6 aa, synthetic construct
PKEVEE

SEQ ID NO: 24772 - protein, 6 aa, synthetic construct
PKEVEF

SEQ ID NO: 24773 - protein, 6 aa, synthetic construct
PKEVEW

SEQ ID NO: 24774 - protein, 6 aa, synthetic construct
PKEVEY

SEQ ID NO: 24775 - protein, 6 aa, synthetic construct
PKEVGD

SEQ ID NO: 24776 - protein, 6 aa, synthetic construct
PKEVGE

SEQ ID NO: 24777 - protein, 6 aa, synthetic construct
PKEVGF

SEQ ID NO: 24778 - protein, 6 aa, synthetic construct
PKEVGW

SEQ ID NO: 24779 - protein, 6 aa, synthetic construct
PKEVGY

SEQ ID NO: 24780 - protein, 6 aa, synthetic construct
PKEVHD

SEQ ID NO: 24781 - protein, 6 aa, synthetic construct
PKEVHE

SEQ ID NO: 24782 - protein, 6 aa, synthetic construct
PKEVHF

SEQ ID NO: 24783 - protein, 6 aa, synthetic construct
PKEVHW

SEQ ID NO: 24784 - protein, 6 aa, synthetic construct
PKEVHY

SEQ ID NO: 24785 - protein, 6 aa, synthetic construct
PKEVID

SEQ ID NO: 24786 - protein, 6 aa, synthetic construct
PKEVIE

SEQ ID NO: 24787 - protein, 6 aa, synthetic construct
PKEVIF

SEQ ID NO: 24788 - protein, 6 aa, synthetic construct
PKEVIW

SEQ ID NO: 24789 - protein, 6 aa, synthetic construct
PKEVIY

SEQ ID NO: 24790 - protein, 6 aa, synthetic construct
PKEVLD

SEQ ID NO: 24791 - protein, 6 aa, synthetic construct
PKEVLE

SEQ ID NO: 24792 - protein, 6 aa, synthetic construct
PKEVLF

SEQ ID NO: 24793 - protein, 6 aa, synthetic construct
PKEVLW

SEQ ID NO: 24794 - protein, 6 aa, synthetic construct
PKEVLY

SEQ ID NO: 24795 - protein, 6 aa, synthetic construct
PKEVKD

SEQ ID NO: 24796 - protein, 6 aa, synthetic construct
PKEVKE

SEQ ID NO: 24797 - protein, 6 aa, synthetic construct
PKEVKF

SEQ ID NO: 24798 - protein, 6 aa, synthetic construct
PKEVKW

SEQ ID NO: 24799 - protein, 6 aa, synthetic construct
PKEVKY

SEQ ID NO: 24800 - protein, 6 aa, synthetic construct
PKEVMD

SEQ ID NO: 24801 - protein, 6 aa, synthetic construct
PKEVME

SEQ ID NO: 24802 - protein, 6 aa, synthetic construct
PKEVMF

SEQ ID NO: 24803 - protein, 6 aa, synthetic construct
PKEVMW

SEQ ID NO: 24804 - protein, 6 aa, synthetic construct
PKEVMY

SEQ ID NO: 24805 - protein, 6 aa, synthetic construct
PKEVFD

SEQ ID NO: 24806 - protein, 6 aa, synthetic construct
PKEVFE

SEQ ID NO: 24807 - protein, 6 aa, synthetic construct
PKEVFF

SEQ ID NO: 24808 - protein, 6 aa, synthetic construct
PKEVFW

SEQ ID NO: 24809 - protein, 6 aa, synthetic construct
PKEVFY

SEQ ID NO: 24810 - protein, 6 aa, synthetic construct
PKEVPD

SEQ ID NO: 24811 - protein, 6 aa, synthetic construct
PKEVPE

SEQ ID NO: 24812 - protein, 6 aa, synthetic construct
PKEVPF

SEQ ID NO: 24813 - protein, 6 aa, synthetic construct
PKEVPW

SEQ ID NO: 24814 - protein, 6 aa, synthetic construct
PKEVPY

SEQ ID NO: 24815 - protein, 6 aa, synthetic construct
PKEVSD

SEQ ID NO: 24816 - protein, 6 aa, synthetic construct
PKEVSE

SEQ ID NO: 24817 - protein, 6 aa, synthetic construct
PKEVSF

SEQ ID NO: 24818 - protein, 6 aa, synthetic construct
PKEVSW

SEQ ID NO: 24819 - protein, 6 aa, synthetic construct
PKEVSY

SEQ ID NO: 24820 - protein, 6 aa, synthetic construct
PKEVTD

SEQ ID NO: 24821 - protein, 6 aa, synthetic construct
PKEVTE

SEQ ID NO: 24822 - protein, 6 aa, synthetic construct
PKEVTF

SEQ ID NO: 24823 - protein, 6 aa, synthetic construct
PKEVTW

SEQ ID NO: 24824 - protein, 6 aa, synthetic construct
PKEVTY

SEQ ID NO: 24825 - protein, 6 aa, synthetic construct
PKEVWD

SEQ ID NO: 24826 - protein, 6 aa, synthetic construct
PKEVWE

SEQ ID NO: 24827 - protein, 6 aa, synthetic construct
PKEVWF

SEQ ID NO: 24828 - protein, 6 aa, synthetic construct
PKEVWW

SEQ ID NO: 24829 - protein, 6 aa, synthetic construct
PKEVWY

SEQ ID NO: 24830 - protein, 6 aa, synthetic construct
PKEVYD

SEQ ID NO: 24831 - protein, 6 aa, synthetic construct
PKEVYE

SEQ ID NO: 24832 - protein, 6 aa, synthetic construct
PKEVYF

SEQ ID NO: 24833 - protein, 6 aa, synthetic construct
PKEVYW

SEQ ID NO: 24834 - protein, 6 aa, synthetic construct
PKEVYY

SEQ ID NO: 24835 - protein, 6 aa, synthetic construct
PKEVVD

SEQ ID NO: 24836 - protein, 6 aa, synthetic construct
PKEVVE

SEQ ID NO: 24837 - protein, 6 aa, synthetic construct
PKEVVF

SEQ ID NO: 24838 - protein, 6 aa, synthetic construct
PKEVVW

SEQ ID NO: 24839 - protein, 6 aa, synthetic construct
PKEVVY

SEQ ID NO: 24840 - protein, 6 aa, synthetic construct
PMEAAD

SEQ ID NO: 24841 - protein, 6 aa, synthetic construct
PMEAAE

SEQ ID NO: 24842 - protein, 6 aa, synthetic construct
PMEAAF

SEQ ID NO: 24843 - protein, 6 aa, synthetic construct
PMEAAW

SEQ ID NO: 24844 - protein, 6 aa, synthetic construct
PMEAAY

SEQ ID NO: 24845 - protein, 6 aa, synthetic construct
PMEARD

SEQ ID NO: 24846 - protein, 6 aa, synthetic construct
PMEARE

SEQ ID NO: 24847 - protein, 6 aa, synthetic construct
PMEARF

SEQ ID NO: 24848 - protein, 6 aa, synthetic construct
PMEARW

SEQ ID NO: 24849 - protein, 6 aa, synthetic construct
PMEARY

SEQ ID NO: 24850 - protein, 6 aa, synthetic construct
PMEAND

SEQ ID NO: 24851 - protein, 6 aa, synthetic construct
PMEANE

SEQ ID NO: 24852 - protein, 6 aa, synthetic construct
PMEANF

SEQ ID NO: 24853 - protein, 6 aa, synthetic construct
PMEANW

SEQ ID NO: 24854 - protein, 6 aa, synthetic construct
PMEANY

SEQ ID NO: 24855 - protein, 6 aa, synthetic construct
PMEADD

SEQ ID NO: 24856 - protein, 6 aa, synthetic construct
PMEADE

SEQ ID NO: 24857 - protein, 6 aa, synthetic construct
PMEADF

SEQ ID NO: 24858 - protein, 6 aa, synthetic construct
PMEADW

SEQ ID NO: 24859 - protein, 6 aa, synthetic construct
PMEADY

SEQ ID NO: 24860 - protein, 6 aa, synthetic construct
PMEACD

SEQ ID NO: 24861 - protein, 6 aa, synthetic construct
PMEACE

SEQ ID NO: 24862 - protein, 6 aa, synthetic construct
PMEACF

SEQ ID NO: 24863 - protein, 6 aa, synthetic construct
PMEACW

SEQ ID NO: 24864 - protein, 6 aa, synthetic construct
PMEACY

SEQ ID NO: 24865 - protein, 6 aa, synthetic construct
PMEAQD

SEQ ID NO: 24866 - protein, 6 aa, synthetic construct
PMEAQE

SEQ ID NO: 24867 - protein, 6 aa, synthetic construct
PMEAQF

SEQ ID NO: 24868 - protein, 6 aa, synthetic construct
PMEAQW

SEQ ID NO: 24869 - protein, 6 aa, synthetic construct
PMEAQY

SEQ ID NO: 24870 - protein, 6 aa, synthetic construct
PMEAED

SEQ ID NO: 24871 - protein, 6 aa, synthetic construct
PMEAEE

SEQ ID NO: 24872 - protein, 6 aa, synthetic construct
PMEAEF

SEQ ID NO: 24873 - protein, 6 aa, synthetic construct
PMEAEW

SEQ ID NO: 24874 - protein, 6 aa, synthetic construct
PMEAEY

SEQ ID NO: 24875 - protein, 6 aa, synthetic construct
PMEAGD

SEQ ID NO: 24876 - protein, 6 aa, synthetic construct
PMEAGE

SEQ ID NO: 24877 - protein, 6 aa, synthetic construct
PMEAGF

SEQ ID NO: 24878 - protein, 6 aa, synthetic construct
PMEAGW

SEQ ID NO: 24879 - protein, 6 aa, synthetic construct
PMEAGY

SEQ ID NO: 24880 - protein, 6 aa, synthetic construct
PMEAHD

SEQ ID NO: 24881 - protein, 6 aa, synthetic construct
PMEAHE

SEQ ID NO: 24882 - protein, 6 aa, synthetic construct
PMEAHF

SEQ ID NO: 24883 - protein, 6 aa, synthetic construct
PMEAHW

SEQ ID NO: 24884 - protein, 6 aa, synthetic construct
PMEAHY

SEQ ID NO: 24885 - protein, 6 aa, synthetic construct
PMEAID

SEQ ID NO: 24886 - protein, 6 aa, synthetic construct
PMEAIE

SEQ ID NO: 24887 - protein, 6 aa, synthetic construct
PMEAIF

SEQ ID NO: 24888 - protein, 6 aa, synthetic construct
PMEAIW

SEQ ID NO: 24889 - protein, 6 aa, synthetic construct
PMEAIY

SEQ ID NO: 24890 - protein, 6 aa, synthetic construct
PMEALD

SEQ ID NO: 24891 - protein, 6 aa, synthetic construct
PMEALE

SEQ ID NO: 24892 - protein, 6 aa, synthetic construct
PMEALF

SEQ ID NO: 24893 - protein, 6 aa, synthetic construct
PMEALW

SEQ ID NO: 24894 - protein, 6 aa, synthetic construct
PMEALY

SEQ ID NO: 24895 - protein, 6 aa, synthetic construct
PMEAKD

SEQ ID NO: 24896 - protein, 6 aa, synthetic construct
PMEAKE

SEQ ID NO: 24897 - protein, 6 aa, synthetic construct
PMEAKF

SEQ ID NO: 24898 - protein, 6 aa, synthetic construct
PMEAKW

SEQ ID NO: 24899 - protein, 6 aa, synthetic construct
PMEAKY

SEQ ID NO: 24900 - protein, 6 aa, synthetic construct
PMEAMD

SEQ ID NO: 24901 - protein, 6 aa, synthetic construct
PMEAME

SEQ ID NO: 24902 - protein, 6 aa, synthetic construct
PMEAMF

SEQ ID NO: 24903 - protein, 6 aa, synthetic construct
PMEAMW

SEQ ID NO: 24904 - protein, 6 aa, synthetic construct
PMEAMY

SEQ ID NO: 24905 - protein, 6 aa, synthetic construct
PMEAFD

SEQ ID NO: 24906 - protein, 6 aa, synthetic construct
PMEAFE

SEQ ID NO: 24907 - protein, 6 aa, synthetic construct
PMEAFF

SEQ ID NO: 24908 - protein, 6 aa, synthetic construct
PMEAFW

SEQ ID NO: 24909 - protein, 6 aa, synthetic construct
PMEAFY

SEQ ID NO: 24910 - protein, 6 aa, synthetic construct
PMEAPD

SEQ ID NO: 24911 - protein, 6 aa, synthetic construct
PMEAPE

SEQ ID NO: 24912 - protein, 6 aa, synthetic construct
PMEAPF

SEQ ID NO: 24913 - protein, 6 aa, synthetic construct
PMEAPW

SEQ ID NO: 24914 - protein, 6 aa, synthetic construct
PMEAPY

SEQ ID NO: 24915 - protein, 6 aa, synthetic construct
PMEASD

SEQ ID NO: 24916 - protein, 6 aa, synthetic construct
PMEASE

SEQ ID NO: 24917 - protein, 6 aa, synthetic construct
PMEASF

SEQ ID NO: 24918 - protein, 6 aa, synthetic construct
PMEASW

SEQ ID NO: 24919 - protein, 6 aa, synthetic construct
PMEASY

SEQ ID NO: 24920 - protein, 6 aa, synthetic construct
PMEATD

SEQ ID NO: 24921 - protein, 6 aa, synthetic construct
PMEATE

SEQ ID NO: 24922 - protein, 6 aa, synthetic construct
PMEATF

SEQ ID NO: 24923 - protein, 6 aa, synthetic construct
PMEATW

SEQ ID NO: 24924 - protein, 6 aa, synthetic construct
PMEATY

SEQ ID NO: 24925 - protein, 6 aa, synthetic construct
PMEAWD

SEQ ID NO: 24926 - protein, 6 aa, synthetic construct
PMEAWE

SEQ ID NO: 24927 - protein, 6 aa, synthetic construct
PMEAWF

SEQ ID NO: 24928 - protein, 6 aa, synthetic construct
PMEAWW

SEQ ID NO: 24929 - protein, 6 aa, synthetic construct
PMEAWY

SEQ ID NO: 24930 - protein, 6 aa, synthetic construct
PMEAYD

SEQ ID NO: 24931 - protein, 6 aa, synthetic construct
PMEAYE

SEQ ID NO: 24932 - protein, 6 aa, synthetic construct
PMEAYF

SEQ ID NO: 24933 - protein, 6 aa, synthetic construct
PMEAYW

SEQ ID NO: 24934 - protein, 6 aa, synthetic construct
PMEAYY

SEQ ID NO: 24935 - protein, 6 aa, synthetic construct
PMEAVD

SEQ ID NO: 24936 - protein, 6 aa, synthetic construct
PMEAVE

SEQ ID NO: 24937 - protein, 6 aa, synthetic construct
PMEAVF

SEQ ID NO: 24938 - protein, 6 aa, synthetic construct
PMEAVW

SEQ ID NO: 24939 - protein, 6 aa, synthetic construct
PMEAVY

SEQ ID NO: 24940 - protein, 6 aa, synthetic construct
PMERAD

SEQ ID NO: 24941 - protein, 6 aa, synthetic construct
PMERAE

SEQ ID NO: 24942 - protein, 6 aa, synthetic construct
PMERAF

SEQ ID NO: 24943 - protein, 6 aa, synthetic construct
PMERAW

SEQ ID NO: 24944 - protein, 6 aa, synthetic construct
PMERAY

SEQ ID NO: 24945 - protein, 6 aa, synthetic construct
PMERRD

SEQ ID NO: 24946 - protein, 6 aa, synthetic construct
PMERRE

SEQ ID NO: 24947 - protein, 6 aa, synthetic construct
PMERRF

SEQ ID NO: 24948 - protein, 6 aa, synthetic construct
PMERRW

SEQ ID NO: 24949 - protein, 6 aa, synthetic construct
PMERRY

SEQ ID NO: 24950 - protein, 6 aa, synthetic construct
PMERND

SEQ ID NO: 24951 - protein, 6 aa, synthetic construct
PMERNE

SEQ ID NO: 24952 - protein, 6 aa, synthetic construct
PMERNF

SEQ ID NO: 24953 - protein, 6 aa, synthetic construct
PMERNW

SEQ ID NO: 24954 - protein, 6 aa, synthetic construct
PMERNY

SEQ ID NO: 24955 - protein, 6 aa, synthetic construct
PMERDD

SEQ ID NO: 24956 - protein, 6 aa, synthetic construct
PMERDE

SEQ ID NO: 24957 - protein, 6 aa, synthetic construct
PMERDF

SEQ ID NO: 24958 - protein, 6 aa, synthetic construct
PMERDW

SEQ ID NO: 24959 - protein, 6 aa, synthetic construct
PMERDY

SEQ ID NO: 24960 - protein, 6 aa, synthetic construct
PMERCD

SEQ ID NO: 24961 - protein, 6 aa, synthetic construct
PMERCE

SEQ ID NO: 24962 - protein, 6 aa, synthetic construct
PMERCF

SEQ ID NO: 24963 - protein, 6 aa, synthetic construct
PMERCW

SEQ ID NO: 24964 - protein, 6 aa, synthetic construct
PMERCY

SEQ ID NO: 24965 - protein, 6 aa, synthetic construct
PMERQD

SEQ ID NO: 24966 - protein, 6 aa, synthetic construct
PMERQE

SEQ ID NO: 24967 - protein, 6 aa, synthetic construct
PMERQF

SEQ ID NO: 24968 - protein, 6 aa, synthetic construct
PMERQW

SEQ ID NO: 24969 - protein, 6 aa, synthetic construct
PMERQY

SEQ ID NO: 24970 - protein, 6 aa, synthetic construct
PMERED

SEQ ID NO: 24971 - protein, 6 aa, synthetic construct
PMEREE

SEQ ID NO: 24972 - protein, 6 aa, synthetic construct
PMEREF

SEQ ID NO: 24973 - protein, 6 aa, synthetic construct
PMEREW

SEQ ID NO: 24974 - protein, 6 aa, synthetic construct
PMEREY

SEQ ID NO: 24975 - protein, 6 aa, synthetic construct
PMERGD

SEQ ID NO: 24976 - protein, 6 aa, synthetic construct
PMERGE

SEQ ID NO: 24977 - protein, 6 aa, synthetic construct
PMERGF

SEQ ID NO: 24978 - protein, 6 aa, synthetic construct
PMERGW

SEQ ID NO: 24979 - protein, 6 aa, synthetic construct
PMERGY

SEQ ID NO: 24980 - protein, 6 aa, synthetic construct
PMERHD

SEQ ID NO: 24981 - protein, 6 aa, synthetic construct
PMERHE

SEQ ID NO: 24982 - protein, 6 aa, synthetic construct
PMERHF

SEQ ID NO: 24983 - protein, 6 aa, synthetic construct
PMERHW

SEQ ID NO: 24984 - protein, 6 aa, synthetic construct
PMERHY

SEQ ID NO: 24985 - protein, 6 aa, synthetic construct
PMERID

SEQ ID NO: 24986 - protein, 6 aa, synthetic construct
PMERIE

SEQ ID NO: 24987 - protein, 6 aa, synthetic construct
PMERIF

SEQ ID NO: 24988 - protein, 6 aa, synthetic construct
PMERIW

SEQ ID NO: 24989 - protein, 6 aa, synthetic construct
PMERIY

SEQ ID NO: 24990 - protein, 6 aa, synthetic construct
PMERLD

SEQ ID NO: 24991 - protein, 6 aa, synthetic construct
PMERLE

SEQ ID NO: 24992 - protein, 6 aa, synthetic construct
PMERLF

SEQ ID NO: 24993 - protein, 6 aa, synthetic construct
PMERLW

SEQ ID NO: 24994 - protein, 6 aa, synthetic construct
PMERLY

SEQ ID NO: 24995 - protein, 6 aa, synthetic construct
PMERKD

SEQ ID NO: 24996 - protein, 6 aa, synthetic construct
PMERKE

SEQ ID NO: 24997 - protein, 6 aa, synthetic construct
PMERKF

SEQ ID NO: 24998 - protein, 6 aa, synthetic construct
PMERKW

SEQ ID NO: 24999 - protein, 6 aa, synthetic construct
PMERKY

SEQ ID NO: 25000 - protein, 6 aa, synthetic construct
PMERMD

SEQ ID NO: 25001 - protein, 6 aa, synthetic construct
PMERME

SEQ ID NO: 25002 - protein, 6 aa, synthetic construct
PMERMF

SEQ ID NO: 25003 - protein, 6 aa, synthetic construct
PMERMW

SEQ ID NO: 25004 - protein, 6 aa, synthetic construct
PMERMY

SEQ ID NO: 25005 - protein, 6 aa, synthetic construct
PMERFD

SEQ ID NO: 25006 - protein, 6 aa, synthetic construct
PMERFE

SEQ ID NO: 25007 - protein, 6 aa, synthetic construct
PMERFF

SEQ ID NO: 25008 - protein, 6 aa, synthetic construct
PMERFW

SEQ ID NO: 25009 - protein, 6 aa, synthetic construct
PMERFY

SEQ ID NO: 25010 - protein, 6 aa, synthetic construct
PMERPD

SEQ ID NO: 25011 - protein, 6 aa, synthetic construct
PMERPE

SEQ ID NO: 25012 - protein, 6 aa, synthetic construct
PMERPF

SEQ ID NO: 25013 - protein, 6 aa, synthetic construct
PMERPW

SEQ ID NO: 25014 - protein, 6 aa, synthetic construct
PMERPY

SEQ ID NO: 25015 - protein, 6 aa, synthetic construct
PMERSD

SEQ ID NO: 25016 - protein, 6 aa, synthetic construct
PMERSE

SEQ ID NO: 25017 - protein, 6 aa, synthetic construct
PMERSF

SEQ ID NO: 25018 - protein, 6 aa, synthetic construct
PMERSW

SEQ ID NO: 25019 - protein, 6 aa, synthetic construct
PMERSY

SEQ ID NO: 25020 - protein, 6 aa, synthetic construct
PMERTD

SEQ ID NO: 25021 - protein, 6 aa, synthetic construct
PMERTE

SEQ ID NO: 25022 - protein, 6 aa, synthetic construct
PMERTF

SEQ ID NO: 25023 - protein, 6 aa, synthetic construct
PMERTW

SEQ ID NO: 25024 - protein, 6 aa, synthetic construct
PMERTY

SEQ ID NO: 25025 - protein, 6 aa, synthetic construct
PMERWD

SEQ ID NO: 25026 - protein, 6 aa, synthetic construct
PMERWE

SEQ ID NO: 25027 - protein, 6 aa, synthetic construct
PMERWF

SEQ ID NO: 25028 - protein, 6 aa, synthetic construct
PMERWW

SEQ ID NO: 25029 - protein, 6 aa, synthetic construct
PMERWY

SEQ ID NO: 25030 - protein, 6 aa, synthetic construct
PMERYD

SEQ ID NO: 25031 - protein, 6 aa, synthetic construct
PMERYE

SEQ ID NO: 25032 - protein, 6 aa, synthetic construct
PMERYF

SEQ ID NO: 25033 - protein, 6 aa, synthetic construct
PMERYW

SEQ ID NO: 25034 - protein, 6 aa, synthetic construct
PMERYY

SEQ ID NO: 25035 - protein, 6 aa, synthetic construct
PMERVD

SEQ ID NO: 25036 - protein, 6 aa, synthetic construct
PMERVE

SEQ ID NO: 25037 - protein, 6 aa, synthetic construct
PMERVF

SEQ ID NO: 25038 - protein, 6 aa, synthetic construct
PMERVW

SEQ ID NO: 25039 - protein, 6 aa, synthetic construct
PMERVY

SEQ ID NO: 25040 - protein, 6 aa, synthetic construct
PMENAD

SEQ ID NO: 25041 - protein, 6 aa, synthetic construct
PMENAE

SEQ ID NO: 25042 - protein, 6 aa, synthetic construct
PMENAF

SEQ ID NO: 25043 - protein, 6 aa, synthetic construct
PMENAW

SEQ ID NO: 25044 - protein, 6 aa, synthetic construct
PMENAY

SEQ ID NO: 25045 - protein, 6 aa, synthetic construct
PMENRD

SEQ ID NO: 25046 - protein, 6 aa, synthetic construct
PMENRE

SEQ ID NO: 25047 - protein, 6 aa, synthetic construct
PMENRF

SEQ ID NO: 25048 - protein, 6 aa, synthetic construct
PMENRW

SEQ ID NO: 25049 - protein, 6 aa, synthetic construct
PMENRY

SEQ ID NO: 25050 - protein, 6 aa, synthetic construct
PMENND

SEQ ID NO: 25051 - protein, 6 aa, synthetic construct
PMENNE

SEQ ID NO: 25052 - protein, 6 aa, synthetic construct
PMENNF

SEQ ID NO: 25053 - protein, 6 aa, synthetic construct
PMENNW

SEQ ID NO: 25054 - protein, 6 aa, synthetic construct
PMENNY

SEQ ID NO: 25055 - protein, 6 aa, synthetic construct
PMENDD

SEQ ID NO: 25056 - protein, 6 aa, synthetic construct
PMENDE

SEQ ID NO: 25057 - protein, 6 aa, synthetic construct
PMENDF

SEQ ID NO: 25058 - protein, 6 aa, synthetic construct
PMENDW

SEQ ID NO: 25059 - protein, 6 aa, synthetic construct
PMENDY

SEQ ID NO: 25060 - protein, 6 aa, synthetic construct
PMENCD

SEQ ID NO: 25061 - protein, 6 aa, synthetic construct
PMENCE

SEQ ID NO: 25062 - protein, 6 aa, synthetic construct
PMENCF

SEQ ID NO: 25063 - protein, 6 aa, synthetic construct
PMENCW

SEQ ID NO: 25064 - protein, 6 aa, synthetic construct
PMENCY

SEQ ID NO: 25065 - protein, 6 aa, synthetic construct
PMENQD

SEQ ID NO: 25066 - protein, 6 aa, synthetic construct
PMENQE

SEQ ID NO: 25067 - protein, 6 aa, synthetic construct
PMENQF

SEQ ID NO: 25068 - protein, 6 aa, synthetic construct
PMENQW

SEQ ID NO: 25069 - protein, 6 aa, synthetic construct
PMENQY

SEQ ID NO: 25070 - protein, 6 aa, synthetic construct
PMENED

SEQ ID NO: 25071 - protein, 6 aa, synthetic construct
PMENEE

SEQ ID NO: 25072 - protein, 6 aa, synthetic construct
PMENEF

SEQ ID NO: 25073 - protein, 6 aa, synthetic construct
PMENEW

SEQ ID NO: 25074 - protein, 6 aa, synthetic construct
PMENEY

SEQ ID NO: 25075 - protein, 6 aa, synthetic construct
PMENGD

SEQ ID NO: 25076 - protein, 6 aa, synthetic construct
PMENGE

SEQ ID NO: 25077 - protein, 6 aa, synthetic construct
PMENGF

SEQ ID NO: 25078 - protein, 6 aa, synthetic construct
PMENGW

SEQ ID NO: 25079 - protein, 6 aa, synthetic construct
PMENGY

SEQ ID NO: 25080 - protein, 6 aa, synthetic construct
PMENHD

SEQ ID NO: 25081 - protein, 6 aa, synthetic construct
PMENHE

SEQ ID NO: 25082 - protein, 6 aa, synthetic construct
PMENHF

SEQ ID NO: 25083 - protein, 6 aa, synthetic construct
PMENHW

SEQ ID NO: 25084 - protein, 6 aa, synthetic construct
PMENHY

SEQ ID NO: 25085 - protein, 6 aa, synthetic construct
PMENID

SEQ ID NO: 25086 - protein, 6 aa, synthetic construct
PMENIE

SEQ ID NO: 25087 - protein, 6 aa, synthetic construct
PMENIF

SEQ ID NO: 25088 - protein, 6 aa, synthetic construct
PMENIW

SEQ ID NO: 25089 - protein, 6 aa, synthetic construct
PMENIY

SEQ ID NO: 25090 - protein, 6 aa, synthetic construct
PMENLD

SEQ ID NO: 25091 - protein, 6 aa, synthetic construct
PMENLE

SEQ ID NO: 25092 - protein, 6 aa, synthetic construct
PMENLF

SEQ ID NO: 25093 - protein, 6 aa, synthetic construct
PMENLW

SEQ ID NO: 25094 - protein, 6 aa, synthetic construct
PMENLY

SEQ ID NO: 25095 - protein, 6 aa, synthetic construct
PMENKD

SEQ ID NO: 25096 - protein, 6 aa, synthetic construct
PMENKE

SEQ ID NO: 25097 - protein, 6 aa, synthetic construct
PMENKF

SEQ ID NO: 25098 - protein, 6 aa, synthetic construct
PMENKW

SEQ ID NO: 25099 - protein, 6 aa, synthetic construct
PMENKY

SEQ ID NO: 25100 - protein, 6 aa, synthetic construct
PMENMD

SEQ ID NO: 25101 - protein, 6 aa, synthetic construct
PMENME

SEQ ID NO: 25102 - protein, 6 aa, synthetic construct
PMENMF

SEQ ID NO: 25103 - protein, 6 aa, synthetic construct
PMENMW

SEQ ID NO: 25104 - protein, 6 aa, synthetic construct
PMENMY

SEQ ID NO: 25105 - protein, 6 aa, synthetic construct
PMENFD

SEQ ID NO: 25106 - protein, 6 aa, synthetic construct
PMENFE

SEQ ID NO: 25107 - protein, 6 aa, synthetic construct
PMENFF

SEQ ID NO: 25108 - protein, 6 aa, synthetic construct
PMENFW

SEQ ID NO: 25109 - protein, 6 aa, synthetic construct
PMENFY

SEQ ID NO: 25110 - protein, 6 aa, synthetic construct
PMENPD

SEQ ID NO: 25111 - protein, 6 aa, synthetic construct
PMENPE

SEQ ID NO: 25112 - protein, 6 aa, synthetic construct
PMENPF

SEQ ID NO: 25113 - protein, 6 aa, synthetic construct
PMENPW

SEQ ID NO: 25114 - protein, 6 aa, synthetic construct
PMENPY

SEQ ID NO: 25115 - protein, 6 aa, synthetic construct
PMENSD

SEQ ID NO: 25116 - protein, 6 aa, synthetic construct
PMENSE

SEQ ID NO: 25117 - protein, 6 aa, synthetic construct
PMENSF

SEQ ID NO: 25118 - protein, 6 aa, synthetic construct
PMENSW

SEQ ID NO: 25119 - protein, 6 aa, synthetic construct
PMENSY

SEQ ID NO: 25120 - protein, 6 aa, synthetic construct
PMENTD

SEQ ID NO: 25121 - protein, 6 aa, synthetic construct
PMENTE

SEQ ID NO: 25122 - protein, 6 aa, synthetic construct
PMENTF

SEQ ID NO: 25123 - protein, 6 aa, synthetic construct
PMENTW

SEQ ID NO: 25124 - protein, 6 aa, synthetic construct
PMENTY

SEQ ID NO: 25125 - protein, 6 aa, synthetic construct
PMENWD

SEQ ID NO: 25126 - protein, 6 aa, synthetic construct
PMENWE

SEQ ID NO: 25127 - protein, 6 aa, synthetic construct
PMENWF

SEQ ID NO: 25128 - protein, 6 aa, synthetic construct
PMENWW

SEQ ID NO: 25129 - protein, 6 aa, synthetic construct
PMENWY

SEQ ID NO: 25130 - protein, 6 aa, synthetic construct
PMENYD

SEQ ID NO: 25131 - protein, 6 aa, synthetic construct
PMENYE

SEQ ID NO: 25132 - protein, 6 aa, synthetic construct
PMENYF

SEQ ID NO: 25133 - protein, 6 aa, synthetic construct
PMENYW

SEQ ID NO: 25134 - protein, 6 aa, synthetic construct
PMENYY

SEQ ID NO: 25135 - protein, 6 aa, synthetic construct
PMENVD

SEQ ID NO: 25136 - protein, 6 aa, synthetic construct
PMENVE

SEQ ID NO: 25137 - protein, 6 aa, synthetic construct
PMENVF

SEQ ID NO: 25138 - protein, 6 aa, synthetic construct
PMENVW

SEQ ID NO: 25139 - protein, 6 aa, synthetic construct
PMENVY

SEQ ID NO: 25140 - protein, 6 aa, synthetic construct
PMEDAD

SEQ ID NO: 25141 - protein, 6 aa, synthetic construct
PMEDAE

SEQ ID NO: 25142 - protein, 6 aa, synthetic construct
PMEDAF

SEQ ID NO: 25143 - protein, 6 aa, synthetic construct
PMEDAW

SEQ ID NO: 25144 - protein, 6 aa, synthetic construct
PMEDAY

SEQ ID NO: 25145 - protein, 6 aa, synthetic construct
PMEDRD

SEQ ID NO: 25146 - protein, 6 aa, synthetic construct
PMEDRE

SEQ ID NO: 25147 - protein, 6 aa, synthetic construct
PMEDRF

SEQ ID NO: 25148 - protein, 6 aa, synthetic construct
PMEDRW

SEQ ID NO: 25149 - protein, 6 aa, synthetic construct
PMEDRY

SEQ ID NO: 25150 - protein, 6 aa, synthetic construct
PMEDND

SEQ ID NO: 25151 - protein, 6 aa, synthetic construct
PMEDNE

SEQ ID NO: 25152 - protein, 6 aa, synthetic construct
PMEDNF

SEQ ID NO: 25153 - protein, 6 aa, synthetic construct
PMEDNW

SEQ ID NO: 25154 - protein, 6 aa, synthetic construct
PMEDNY

SEQ ID NO: 25155 - protein, 6 aa, synthetic construct
PMEDDD

SEQ ID NO: 25156 - protein, 6 aa, synthetic construct
PMEDDE

SEQ ID NO: 25157 - protein, 6 aa, synthetic construct
PMEDDF

SEQ ID NO: 25158 - protein, 6 aa, synthetic construct
PMEDDW

SEQ ID NO: 25159 - protein, 6 aa, synthetic construct
PMEDDY

SEQ ID NO: 25160 - protein, 6 aa, synthetic construct
PMEDCD

SEQ ID NO: 25161 - protein, 6 aa, synthetic construct
PMEDCE

SEQ ID NO: 25162 - protein, 6 aa, synthetic construct
PMEDCF

SEQ ID NO: 25163 - protein, 6 aa, synthetic construct
PMEDCW

SEQ ID NO: 25164 - protein, 6 aa, synthetic construct
PMEDCY

SEQ ID NO: 25165 - protein, 6 aa, synthetic construct
PMEDQD

SEQ ID NO: 25166 - protein, 6 aa, synthetic construct
PMEDQE

SEQ ID NO: 25167 - protein, 6 aa, synthetic construct
PMEDQF

SEQ ID NO: 25168 - protein, 6 aa, synthetic construct
PMEDQW

SEQ ID NO: 25169 - protein, 6 aa, synthetic construct
PMEDQY

SEQ ID NO: 25170 - protein, 6 aa, synthetic construct
PMEDED

SEQ ID NO: 25171 - protein, 6 aa, synthetic construct
PMEDEE

SEQ ID NO: 25172 - protein, 6 aa, synthetic construct
PMEDEF

SEQ ID NO: 25173 - protein, 6 aa, synthetic construct
PMEDEW

SEQ ID NO: 25174 - protein, 6 aa, synthetic construct
PMEDEY

SEQ ID NO: 25175 - protein, 6 aa, synthetic construct
PMEDGD

SEQ ID NO: 25176 - protein, 6 aa, synthetic construct
PMEDGE

SEQ ID NO: 25177 - protein, 6 aa, synthetic construct
PMEDGF

SEQ ID NO: 25178 - protein, 6 aa, synthetic construct
PMEDGW

SEQ ID NO: 25179 - protein, 6 aa, synthetic construct
PMEDGY

SEQ ID NO: 25180 - protein, 6 aa, synthetic construct
PMEDHD

SEQ ID NO: 25181 - protein, 6 aa, synthetic construct
PMEDHE

SEQ ID NO: 25182 - protein, 6 aa, synthetic construct
PMEDHF

SEQ ID NO: 25183 - protein, 6 aa, synthetic construct
PMEDHW

SEQ ID NO: 25184 - protein, 6 aa, synthetic construct
PMEDHY

SEQ ID NO: 25185 - protein, 6 aa, synthetic construct
PMEDID

SEQ ID NO: 25186 - protein, 6 aa, synthetic construct
PMEDIE

SEQ ID NO: 25187 - protein, 6 aa, synthetic construct
PMEDIF

SEQ ID NO: 25188 - protein, 6 aa, synthetic construct
PMEDIW

SEQ ID NO: 25189 - protein, 6 aa, synthetic construct
PMEDIY

SEQ ID NO: 25190 - protein, 6 aa, synthetic construct
PMEDLD

SEQ ID NO: 25191 - protein, 6 aa, synthetic construct
PMEDLE

SEQ ID NO: 25192 - protein, 6 aa, synthetic construct
PMEDLF

SEQ ID NO: 25193 - protein, 6 aa, synthetic construct
PMEDLW

SEQ ID NO: 25194 - protein, 6 aa, synthetic construct
PMEDLY

SEQ ID NO: 25195 - protein, 6 aa, synthetic construct
PMEDKD

SEQ ID NO: 25196 - protein, 6 aa, synthetic construct
PMEDKE

SEQ ID NO: 25197 - protein, 6 aa, synthetic construct
PMEDKF

SEQ ID NO: 25198 - protein, 6 aa, synthetic construct
PMEDKW

SEQ ID NO: 25199 - protein, 6 aa, synthetic construct
PMEDKY

SEQ ID NO: 25200 - protein, 6 aa, synthetic construct
PMEDMD

SEQ ID NO: 25201 - protein, 6 aa, synthetic construct
PMEDME

SEQ ID NO: 25202 - protein, 6 aa, synthetic construct
PMEDMF

SEQ ID NO: 25203 - protein, 6 aa, synthetic construct
PMEDMW

SEQ ID NO: 25204 - protein, 6 aa, synthetic construct
PMEDMY

SEQ ID NO: 25205 - protein, 6 aa, synthetic construct
PMEDFD

SEQ ID NO: 25206 - protein, 6 aa, synthetic construct
PMEDFE

SEQ ID NO: 25207 - protein, 6 aa, synthetic construct
PMEDFF

SEQ ID NO: 25208 - protein, 6 aa, synthetic construct
PMEDFW

SEQ ID NO: 25209 - protein, 6 aa, synthetic construct
PMEDFY

SEQ ID NO: 25210 - protein, 6 aa, synthetic construct
PMEDPD

SEQ ID NO: 25211 - protein, 6 aa, synthetic construct
PMEDPE

SEQ ID NO: 25212 - protein, 6 aa, synthetic construct
PMEDPF

SEQ ID NO: 25213 - protein, 6 aa, synthetic construct
PMEDPW

SEQ ID NO: 25214 - protein, 6 aa, synthetic construct
PMEDPY

SEQ ID NO: 25215 - protein, 6 aa, synthetic construct
PMEDSD

SEQ ID NO: 25216 - protein, 6 aa, synthetic construct
PMEDSE

SEQ ID NO: 25217 - protein, 6 aa, synthetic construct
PMEDSF

SEQ ID NO: 25218 - protein, 6 aa, synthetic construct
PMEDSW

SEQ ID NO: 25219 - protein, 6 aa, synthetic construct
PMEDSY

SEQ ID NO: 25220 - protein, 6 aa, synthetic construct
PMEDTD

SEQ ID NO: 25221 - protein, 6 aa, synthetic construct
PMEDTE

SEQ ID NO: 25222 - protein, 6 aa, synthetic construct
PMEDTF

SEQ ID NO: 25223 - protein, 6 aa, synthetic construct
PMEDTW

SEQ ID NO: 25224 - protein, 6 aa, synthetic construct
PMEDTY

SEQ ID NO: 25225 - protein, 6 aa, synthetic construct
PMEDWD

SEQ ID NO: 25226 - protein, 6 aa, synthetic construct
PMEDWE

SEQ ID NO: 25227 - protein, 6 aa, synthetic construct
PMEDWF

SEQ ID NO: 25228 - protein, 6 aa, synthetic construct
PMEDWW

SEQ ID NO: 25229 - protein, 6 aa, synthetic construct
PMEDWY

SEQ ID NO: 25230 - protein, 6 aa, synthetic construct
PMEDYD

SEQ ID NO: 25231 - protein, 6 aa, synthetic construct
PMEDYE

SEQ ID NO: 25232 - protein, 6 aa, synthetic construct
PMEDYF

SEQ ID NO: 25233 - protein, 6 aa, synthetic construct
PMEDYW

SEQ ID NO: 25234 - protein, 6 aa, synthetic construct
PMEDYY

SEQ ID NO: 25235 - protein, 6 aa, synthetic construct
PMEDVD

SEQ ID NO: 25236 - protein, 6 aa, synthetic construct
PMEDVE

SEQ ID NO: 25237 - protein, 6 aa, synthetic construct
PMEDVF

SEQ ID NO: 25238 - protein, 6 aa, synthetic construct
PMEDVW

SEQ ID NO: 25239 - protein, 6 aa, synthetic construct
PMEDVY

SEQ ID NO: 25240 - protein, 6 aa, synthetic construct
PMECAD

SEQ ID NO: 25241 - protein, 6 aa, synthetic construct
PMECAE

SEQ ID NO: 25242 - protein, 6 aa, synthetic construct
PMECAF

SEQ ID NO: 25243 - protein, 6 aa, synthetic construct
PMECAW

SEQ ID NO: 25244 - protein, 6 aa, synthetic construct
PMECAY

SEQ ID NO: 25245 - protein, 6 aa, synthetic construct
PMECRD

SEQ ID NO: 25246 - protein, 6 aa, synthetic construct
PMECRE

SEQ ID NO: 25247 - protein, 6 aa, synthetic construct
PMECRF

SEQ ID NO: 25248 - protein, 6 aa, synthetic construct
PMECRW

SEQ ID NO: 25249 - protein, 6 aa, synthetic construct
PMECRY

SEQ ID NO: 25250 - protein, 6 aa, synthetic construct
PMECND

SEQ ID NO: 25251 - protein, 6 aa, synthetic construct
PMECNE

SEQ ID NO: 25252 - protein, 6 aa, synthetic construct
PMECNF

SEQ ID NO: 25253 - protein, 6 aa, synthetic construct
PMECNW

SEQ ID NO: 25254 - protein, 6 aa, synthetic construct
PMECNY

SEQ ID NO: 25255 - protein, 6 aa, synthetic construct
PMECDD

SEQ ID NO: 25256 - protein, 6 aa, synthetic construct
PMECDE

SEQ ID NO: 25257 - protein, 6 aa, synthetic construct
PMECDF

SEQ ID NO: 25258 - protein, 6 aa, synthetic construct
PMECDW

SEQ ID NO: 25259 - protein, 6 aa, synthetic construct
PMECDY

SEQ ID NO: 25260 - protein, 6 aa, synthetic construct
PMECCD

SEQ ID NO: 25261 - protein, 6 aa, synthetic construct
PMECCE

SEQ ID NO: 25262 - protein, 6 aa, synthetic construct
PMECCF

SEQ ID NO: 25263 - protein, 6 aa, synthetic construct
PMECCW

SEQ ID NO: 25264 - protein, 6 aa, synthetic construct
PMECCY

SEQ ID NO: 25265 - protein, 6 aa, synthetic construct
PMECQD

SEQ ID NO: 25266 - protein, 6 aa, synthetic construct
PMECQE

SEQ ID NO: 25267 - protein, 6 aa, synthetic construct
PMECQF

SEQ ID NO: 25268 - protein, 6 aa, synthetic construct
PMECQW

SEQ ID NO: 25269 - protein, 6 aa, synthetic construct
PMECQY

SEQ ID NO: 25270 - protein, 6 aa, synthetic construct
PMECED

SEQ ID NO: 25271 - protein, 6 aa, synthetic construct
PMECEE

SEQ ID NO: 25272 - protein, 6 aa, synthetic construct
PMECEF

SEQ ID NO: 25273 - protein, 6 aa, synthetic construct
PMECEW

SEQ ID NO: 25274 - protein, 6 aa, synthetic construct
PMECEY

SEQ ID NO: 25275 - protein, 6 aa, synthetic construct
PMECGD

SEQ ID NO: 25276 - protein, 6 aa, synthetic construct
PMECGE

SEQ ID NO: 25277 - protein, 6 aa, synthetic construct
PMECGF

SEQ ID NO: 25278 - protein, 6 aa, synthetic construct
PMECGW

SEQ ID NO: 25279 - protein, 6 aa, synthetic construct
PMECGY

SEQ ID NO: 25280 - protein, 6 aa, synthetic construct
PMECHD

SEQ ID NO: 25281 - protein, 6 aa, synthetic construct
PMECHE

SEQ ID NO: 25282 - protein, 6 aa, synthetic construct
PMECHF

SEQ ID NO: 25283 - protein, 6 aa, synthetic construct
PMECHW

SEQ ID NO: 25284 - protein, 6 aa, synthetic construct
PMECHY

SEQ ID NO: 25285 - protein, 6 aa, synthetic construct
PMECID

SEQ ID NO: 25286 - protein, 6 aa, synthetic construct
PMECIE

SEQ ID NO: 25287 - protein, 6 aa, synthetic construct
PMECIF

SEQ ID NO: 25288 - protein, 6 aa, synthetic construct
PMECIW

SEQ ID NO: 25289 - protein, 6 aa, synthetic construct
PMECIY

SEQ ID NO: 25290 - protein, 6 aa, synthetic construct
PMECLD

SEQ ID NO: 25291 - protein, 6 aa, synthetic construct
PMECLE

SEQ ID NO: 25292 - protein, 6 aa, synthetic construct
PMECLF

SEQ ID NO: 25293 - protein, 6 aa, synthetic construct
PMECLW

SEQ ID NO: 25294 - protein, 6 aa, synthetic construct
PMECLY

SEQ ID NO: 25295 - protein, 6 aa, synthetic construct
PMECKD

SEQ ID NO: 25296 - protein, 6 aa, synthetic construct
PMECKE

SEQ ID NO: 25297 - protein, 6 aa, synthetic construct
PMECKF

SEQ ID NO: 25298 - protein, 6 aa, synthetic construct
PMECKW

SEQ ID NO: 25299 - protein, 6 aa, synthetic construct
PMECKY

SEQ ID NO: 25300 - protein, 6 aa, synthetic construct
PMECMD

SEQ ID NO: 25301 - protein, 6 aa, synthetic construct
PMECME

SEQ ID NO: 25302 - protein, 6 aa, synthetic construct
PMECMF

SEQ ID NO: 25303 - protein, 6 aa, synthetic construct
PMECMW

SEQ ID NO: 25304 - protein, 6 aa, synthetic construct
PMECMY

SEQ ID NO: 25305 - protein, 6 aa, synthetic construct
PMECFD

SEQ ID NO: 25306 - protein, 6 aa, synthetic construct
PMECFE

SEQ ID NO: 25307 - protein, 6 aa, synthetic construct
PMECFF

SEQ ID NO: 25308 - protein, 6 aa, synthetic construct
PMECFW

SEQ ID NO: 25309 - protein, 6 aa, synthetic construct
PMECFY

SEQ ID NO: 25310 - protein, 6 aa, synthetic construct
PMECPD

SEQ ID NO: 25311 - protein, 6 aa, synthetic construct
PMECPE

SEQ ID NO: 25312 - protein, 6 aa, synthetic construct
PMECPF

SEQ ID NO: 25313 - protein, 6 aa, synthetic construct
PMECPW

SEQ ID NO: 25314 - protein, 6 aa, synthetic construct
PMECPY

SEQ ID NO: 25315 - protein, 6 aa, synthetic construct
PMECSD

SEQ ID NO: 25316 - protein, 6 aa, synthetic construct
PMECSE

SEQ ID NO: 25317 - protein, 6 aa, synthetic construct
PMECSF

SEQ ID NO: 25318 - protein, 6 aa, synthetic construct
PMECSW

SEQ ID NO: 25319 - protein, 6 aa, synthetic construct
PMECSY

SEQ ID NO: 25320 - protein, 6 aa, synthetic construct
PMECTD

SEQ ID NO: 25321 - protein, 6 aa, synthetic construct
PMECTE

SEQ ID NO: 25322 - protein, 6 aa, synthetic construct
PMECTF

SEQ ID NO: 25323 - protein, 6 aa, synthetic construct
PMECTW

SEQ ID NO: 25324 - protein, 6 aa, synthetic construct
PMECTY

SEQ ID NO: 25325 - protein, 6 aa, synthetic construct
PMECWD

SEQ ID NO: 25326 - protein, 6 aa, synthetic construct
PMECWE

SEQ ID NO: 25327 - protein, 6 aa, synthetic construct
PMECWF

SEQ ID NO: 25328 - protein, 6 aa, synthetic construct
PMECWW

SEQ ID NO: 25329 - protein, 6 aa, synthetic construct
PMECWY

SEQ ID NO: 25330 - protein, 6 aa, synthetic construct
PMECYD

SEQ ID NO: 25331 - protein, 6 aa, synthetic construct
PMECYE

SEQ ID NO: 25332 - protein, 6 aa, synthetic construct
PMECYF

SEQ ID NO: 25333 - protein, 6 aa, synthetic construct
PMECYW

SEQ ID NO: 25334 - protein, 6 aa, synthetic construct
PMECYY

SEQ ID NO: 25335 - protein, 6 aa, synthetic construct
PMECVD

SEQ ID NO: 25336 - protein, 6 aa, synthetic construct
PMECVE

SEQ ID NO: 25337 - protein, 6 aa, synthetic construct
PMECVF

SEQ ID NO: 25338 - protein, 6 aa, synthetic construct
PMECVW

SEQ ID NO: 25339 - protein, 6 aa, synthetic construct
PMECVY

SEQ ID NO: 25340 - protein, 6 aa, synthetic construct
PMEQAD

SEQ ID NO: 25341 - protein, 6 aa, synthetic construct
PMEQAE

SEQ ID NO: 25342 - protein, 6 aa, synthetic construct
PMEQAF

SEQ ID NO: 25343 - protein, 6 aa, synthetic construct
PMEQAW

SEQ ID NO: 25344 - protein, 6 aa, synthetic construct
PMEQAY

SEQ ID NO: 25345 - protein, 6 aa, synthetic construct
PMEQRD

SEQ ID NO: 25346 - protein, 6 aa, synthetic construct
PMEQRE

SEQ ID NO: 25347 - protein, 6 aa, synthetic construct
PMEQRF

SEQ ID NO: 25348 - protein, 6 aa, synthetic construct
PMEQRW

SEQ ID NO: 25349 - protein, 6 aa, synthetic construct
PMEQRY

SEQ ID NO: 25350 - protein, 6 aa, synthetic construct
PMEQND

SEQ ID NO: 25351 - protein, 6 aa, synthetic construct
PMEQNE

SEQ ID NO: 25352 - protein, 6 aa, synthetic construct
PMEQNF

SEQ ID NO: 25353 - protein, 6 aa, synthetic construct
PMEQNW

SEQ ID NO: 25354 - protein, 6 aa, synthetic construct
PMEQNY

SEQ ID NO: 25355 - protein, 6 aa, synthetic construct
PMEQDD

SEQ ID NO: 25356 - protein, 6 aa, synthetic construct
PMEQDE

SEQ ID NO: 25357 - protein, 6 aa, synthetic construct
PMEQDF

SEQ ID NO: 25358 - protein, 6 aa, synthetic construct
PMEQDW

SEQ ID NO: 25359 - protein, 6 aa, synthetic construct
PMEQDY

SEQ ID NO: 25360 - protein, 6 aa, synthetic construct
PMEQCD

SEQ ID NO: 25361 - protein, 6 aa, synthetic construct
PMEQCE

SEQ ID NO: 25362 - protein, 6 aa, synthetic construct
PMEQCF

SEQ ID NO: 25363 - protein, 6 aa, synthetic construct
PMEQCW

SEQ ID NO: 25364 - protein, 6 aa, synthetic construct
PMEQCY

SEQ ID NO: 25365 - protein, 6 aa, synthetic construct
PMEQQD

SEQ ID NO: 25366 - protein, 6 aa, synthetic construct
PMEQQE

SEQ ID NO: 25367 - protein, 6 aa, synthetic construct
PMEQQF

SEQ ID NO: 25368 - protein, 6 aa, synthetic construct
PMEQQW

SEQ ID NO: 25369 - protein, 6 aa, synthetic construct
PMEQQY

SEQ ID NO: 25370 - protein, 6 aa, synthetic construct
PMEQED

SEQ ID NO: 25371 - protein, 6 aa, synthetic construct
PMEQEE

SEQ ID NO: 25372 - protein, 6 aa, synthetic construct
PMEQEF

SEQ ID NO: 25373 - protein, 6 aa, synthetic construct
PMEQEW

SEQ ID NO: 25374 - protein, 6 aa, synthetic construct
PMEQEY

SEQ ID NO: 25375 - protein, 6 aa, synthetic construct
PMEQGD

SEQ ID NO: 25376 - protein, 6 aa, synthetic construct
PMEQGE

SEQ ID NO: 25377 - protein, 6 aa, synthetic construct
PMEQGF

SEQ ID NO: 25378 - protein, 6 aa, synthetic construct
PMEQGW

SEQ ID NO: 25379 - protein, 6 aa, synthetic construct
PMEQGY

SEQ ID NO: 25380 - protein, 6 aa, synthetic construct
PMEQHD

SEQ ID NO: 25381 - protein, 6 aa, synthetic construct
PMEQHE

SEQ ID NO: 25382 - protein, 6 aa, synthetic construct
PMEQHF

SEQ ID NO: 25383 - protein, 6 aa, synthetic construct
PMEQHW

SEQ ID NO: 25384 - protein, 6 aa, synthetic construct
PMEQHY

SEQ ID NO: 25385 - protein, 6 aa, synthetic construct
PMEQID

SEQ ID NO: 25386 - protein, 6 aa, synthetic construct
PMEQIE

SEQ ID NO: 25387 - protein, 6 aa, synthetic construct
PMEQIF

SEQ ID NO: 25388 - protein, 6 aa, synthetic construct
PMEQIW

SEQ ID NO: 25389 - protein, 6 aa, synthetic construct
PMEQIY

SEQ ID NO: 25390 - protein, 6 aa, synthetic construct
PMEQLD

SEQ ID NO: 25391 - protein, 6 aa, synthetic construct
PMEQLE

SEQ ID NO: 25392 - protein, 6 aa, synthetic construct
PMEQLF

SEQ ID NO: 25393 - protein, 6 aa, synthetic construct
PMEQLW

SEQ ID NO: 25394 - protein, 6 aa, synthetic construct
PMEQLY

SEQ ID NO: 25395 - protein, 6 aa, synthetic construct
PMEQKD

SEQ ID NO: 25396 - protein, 6 aa, synthetic construct
PMEQKE

SEQ ID NO: 25397 - protein, 6 aa, synthetic construct
PMEQKF

SEQ ID NO: 25398 - protein, 6 aa, synthetic construct
PMEQKW

SEQ ID NO: 25399 - protein, 6 aa, synthetic construct
PMEQKY

SEQ ID NO: 25400 - protein, 6 aa, synthetic construct
PMEQMD

SEQ ID NO: 25401 - protein, 6 aa, synthetic construct
PMEQME

SEQ ID NO: 25402 - protein, 6 aa, synthetic construct
PMEQMF

SEQ ID NO: 25403 - protein, 6 aa, synthetic construct
PMEQMW

SEQ ID NO: 25404 - protein, 6 aa, synthetic construct
PMEQMY

SEQ ID NO: 25405 - protein, 6 aa, synthetic construct
PMEQFD

SEQ ID NO: 25406 - protein, 6 aa, synthetic construct
PMEQFE

SEQ ID NO: 25407 - protein, 6 aa, synthetic construct
PMEQFF

SEQ ID NO: 25408 - protein, 6 aa, synthetic construct
PMEQFW

SEQ ID NO: 25409 - protein, 6 aa, synthetic construct
PMEQFY

SEQ ID NO: 25410 - protein, 6 aa, synthetic construct
PMEQPD

SEQ ID NO: 25411 - protein, 6 aa, synthetic construct
PMEQPE

SEQ ID NO: 25412 - protein, 6 aa, synthetic construct
PMEQPF

SEQ ID NO: 25413 - protein, 6 aa, synthetic construct
PMEQPW

SEQ ID NO: 25414 - protein, 6 aa, synthetic construct
PMEQPY

SEQ ID NO: 25415 - protein, 6 aa, synthetic construct
PMEQSD

SEQ ID NO: 25416 - protein, 6 aa, synthetic construct
PMEQSE

SEQ ID NO: 25417 - protein, 6 aa, synthetic construct
PMEQSF

SEQ ID NO: 25418 - protein, 6 aa, synthetic construct
PMEQSW

SEQ ID NO: 25419 - protein, 6 aa, synthetic construct
PMEQSY

SEQ ID NO: 25420 - protein, 6 aa, synthetic construct
PMEQTD

SEQ ID NO: 25421 - protein, 6 aa, synthetic construct
PMEQTE

SEQ ID NO: 25422 - protein, 6 aa, synthetic construct
PMEQTF

SEQ ID NO: 25423 - protein, 6 aa, synthetic construct
PMEQTW

SEQ ID NO: 25424 - protein, 6 aa, synthetic construct
PMEQTY

SEQ ID NO: 25425 - protein, 6 aa, synthetic construct
PMEQWD

SEQ ID NO: 25426 - protein, 6 aa, synthetic construct
PMEQWE

SEQ ID NO: 25427 - protein, 6 aa, synthetic construct
PMEQWF

SEQ ID NO: 25428 - protein, 6 aa, synthetic construct
PMEQWW

SEQ ID NO: 25429 - protein, 6 aa, synthetic construct
PMEQWY

SEQ ID NO: 25430 - protein, 6 aa, synthetic construct
PMEQYD

SEQ ID NO: 25431 - protein, 6 aa, synthetic construct
PMEQYE

SEQ ID NO: 25432 - protein, 6 aa, synthetic construct
PMEQYF

SEQ ID NO: 25433 - protein, 6 aa, synthetic construct
PMEQYW

SEQ ID NO: 25434 - protein, 6 aa, synthetic construct
PMEQYY

SEQ ID NO: 25435 - protein, 6 aa, synthetic construct
PMEQVD

SEQ ID NO: 25436 - protein, 6 aa, synthetic construct
PMEQVE

SEQ ID NO: 25437 - protein, 6 aa, synthetic construct
PMEQVF

SEQ ID NO: 25438 - protein, 6 aa, synthetic construct
PMEQVW

SEQ ID NO: 25439 - protein, 6 aa, synthetic construct
PMEQVY

SEQ ID NO: 25440 - protein, 6 aa, synthetic construct
PMEEAD

SEQ ID NO: 25441 - protein, 6 aa, synthetic construct
PMEEAE

SEQ ID NO: 25442 - protein, 6 aa, synthetic construct
PMEEAF

SEQ ID NO: 25443 - protein, 6 aa, synthetic construct
PMEEAW

SEQ ID NO: 25444 - protein, 6 aa, synthetic construct
PMEEAY

SEQ ID NO: 25445 - protein, 6 aa, synthetic construct
PMEERD

SEQ ID NO: 25446 - protein, 6 aa, synthetic construct
PMEERE

SEQ ID NO: 25447 - protein, 6 aa, synthetic construct
PMEERF

SEQ ID NO: 25448 - protein, 6 aa, synthetic construct
PMEERW

SEQ ID NO: 25449 - protein, 6 aa, synthetic construct
PMEERY

SEQ ID NO: 25450 - protein, 6 aa, synthetic construct
PMEEND

SEQ ID NO: 25451 - protein, 6 aa, synthetic construct
PMEENE

SEQ ID NO: 25452 - protein, 6 aa, synthetic construct
PMEENF

SEQ ID NO: 25453 - protein, 6 aa, synthetic construct
PMEENW

SEQ ID NO: 25454 - protein, 6 aa, synthetic construct
PMEENY

SEQ ID NO: 25455 - protein, 6 aa, synthetic construct
PMEEDD

SEQ ID NO: 25456 - protein, 6 aa, synthetic construct
PMEEDE

SEQ ID NO: 25457 - protein, 6 aa, synthetic construct
PMEEDF

SEQ ID NO: 25458 - protein, 6 aa, synthetic construct
PMEEDW

SEQ ID NO: 25459 - protein, 6 aa, synthetic construct
PMEEDY

SEQ ID NO: 25460 - protein, 6 aa, synthetic construct
PMEECD

SEQ ID NO: 25461 - protein, 6 aa, synthetic construct
PMEECE

SEQ ID NO: 25462 - protein, 6 aa, synthetic construct
PMEECF

SEQ ID NO: 25463 - protein, 6 aa, synthetic construct
PMEECW

SEQ ID NO: 25464 - protein, 6 aa, synthetic construct
PMEECY

SEQ ID NO: 25465 - protein, 6 aa, synthetic construct
PMEEQD

SEQ ID NO: 25466 - protein, 6 aa, synthetic construct
PMEEQE

SEQ ID NO: 25467 - protein, 6 aa, synthetic construct
PMEEQF

SEQ ID NO: 25468 - protein, 6 aa, synthetic construct
PMEEQW

SEQ ID NO: 25469 - protein, 6 aa, synthetic construct
PMEEQY

SEQ ID NO: 25470 - protein, 6 aa, synthetic construct
PMEEED

SEQ ID NO: 25471 - protein, 6 aa, synthetic construct
PMEEEE

SEQ ID NO: 25472 - protein, 6 aa, synthetic construct
PMEEEF

SEQ ID NO: 25473 - protein, 6 aa, synthetic construct
PMEEEW

SEQ ID NO: 25474 - protein, 6 aa, synthetic construct
PMEEEY

SEQ ID NO: 25475 - protein, 6 aa, synthetic construct
PMEEGD

SEQ ID NO: 25476 - protein, 6 aa, synthetic construct
PMEEGE

SEQ ID NO: 25477 - protein, 6 aa, synthetic construct
PMEEGF

SEQ ID NO: 25478 - protein, 6 aa, synthetic construct
PMEEGW

SEQ ID NO: 25479 - protein, 6 aa, synthetic construct
PMEEGY

SEQ ID NO: 25480 - protein, 6 aa, synthetic construct
PMEEHD

SEQ ID NO: 25481 - protein, 6 aa, synthetic construct
PMEEHE

SEQ ID NO: 25482 - protein, 6 aa, synthetic construct
PMEEHF

SEQ ID NO: 25483 - protein, 6 aa, synthetic construct
PMEEHW

SEQ ID NO: 25484 - protein, 6 aa, synthetic construct
PMEEHY

SEQ ID NO: 25485 - protein, 6 aa, synthetic construct
PMEEID

SEQ ID NO: 25486 - protein, 6 aa, synthetic construct
PMEEIE

SEQ ID NO: 25487 - protein, 6 aa, synthetic construct
PMEEIF

SEQ ID NO: 25488 - protein, 6 aa, synthetic construct
PMEEIW

SEQ ID NO: 25489 - protein, 6 aa, synthetic construct
PMEEIY

SEQ ID NO: 25490 - protein, 6 aa, synthetic construct
PMEELD

SEQ ID NO: 25491 - protein, 6 aa, synthetic construct
PMEELE

SEQ ID NO: 25492 - protein, 6 aa, synthetic construct
PMEELF

SEQ ID NO: 25493 - protein, 6 aa, synthetic construct
PMEELW

SEQ ID NO: 25494 - protein, 6 aa, synthetic construct
PMEELY

SEQ ID NO: 25495 - protein, 6 aa, synthetic construct
PMEEKD

SEQ ID NO: 25496 - protein, 6 aa, synthetic construct
PMEEKE

SEQ ID NO: 25497 - protein, 6 aa, synthetic construct
PMEEKF

SEQ ID NO: 25498 - protein, 6 aa, synthetic construct
PMEEKW

SEQ ID NO: 25499 - protein, 6 aa, synthetic construct
PMEEKY

SEQ ID NO: 25500 - protein, 6 aa, synthetic construct
PMEEMD

SEQ ID NO: 25501 - protein, 6 aa, synthetic construct
PMEEME

SEQ ID NO: 25502 - protein, 6 aa, synthetic construct
PMEEMF

SEQ ID NO: 25503 - protein, 6 aa, synthetic construct
PMEEMW

SEQ ID NO: 25504 - protein, 6 aa, synthetic construct
PMEEMY

SEQ ID NO: 25505 - protein, 6 aa, synthetic construct
PMEEFD

SEQ ID NO: 25506 - protein, 6 aa, synthetic construct
PMEEFE

SEQ ID NO: 25507 - protein, 6 aa, synthetic construct
PMEEFF

SEQ ID NO: 25508 - protein, 6 aa, synthetic construct
PMEEFW

SEQ ID NO: 25509 - protein, 6 aa, synthetic construct
PMEEFY

SEQ ID NO: 25510 - protein, 6 aa, synthetic construct
PMEEPD

SEQ ID NO: 25511 - protein, 6 aa, synthetic construct
PMEEPE

SEQ ID NO: 25512 - protein, 6 aa, synthetic construct
PMEEPF

SEQ ID NO: 25513 - protein, 6 aa, synthetic construct
PMEEPW

SEQ ID NO: 25514 - protein, 6 aa, synthetic construct
PMEEPY

SEQ ID NO: 25515 - protein, 6 aa, synthetic construct
PMEESD

SEQ ID NO: 25516 - protein, 6 aa, synthetic construct
PMEESE

SEQ ID NO: 25517 - protein, 6 aa, synthetic construct
PMEESF

SEQ ID NO: 25518 - protein, 6 aa, synthetic construct
PMEESW

SEQ ID NO: 25519 - protein, 6 aa, synthetic construct
PMEESY

SEQ ID NO: 25520 - protein, 6 aa, synthetic construct
PMEETD

SEQ ID NO: 25521 - protein, 6 aa, synthetic construct
PMEETE

SEQ ID NO: 25522 - protein, 6 aa, synthetic construct
PMEETF

SEQ ID NO: 25523 - protein, 6 aa, synthetic construct
PMEETW

SEQ ID NO: 25524 - protein, 6 aa, synthetic construct
PMEETY

SEQ ID NO: 25525 - protein, 6 aa, synthetic construct
PMEEWD

SEQ ID NO: 25526 - protein, 6 aa, synthetic construct
PMEEWE

SEQ ID NO: 25527 - protein, 6 aa, synthetic construct
PMEEWF

SEQ ID NO: 25528 - protein, 6 aa, synthetic construct
PMEEWW

SEQ ID NO: 25529 - protein, 6 aa, synthetic construct
PMEEWY

SEQ ID NO: 25530 - protein, 6 aa, synthetic construct
PMEEYD

SEQ ID NO: 25531 - protein, 6 aa, synthetic construct
PMEEYE

SEQ ID NO: 25532 - protein, 6 aa, synthetic construct
PMEEYF

SEQ ID NO: 25533 - protein, 6 aa, synthetic construct
PMEEYW

SEQ ID NO: 25534 - protein, 6 aa, synthetic construct
PMEEYY

SEQ ID NO: 25535 - protein, 6 aa, synthetic construct
PMEEVD

SEQ ID NO: 25536 - protein, 6 aa, synthetic construct
PMEEVE

SEQ ID NO: 25537 - protein, 6 aa, synthetic construct
PMEEVF

SEQ ID NO: 25538 - protein, 6 aa, synthetic construct
PMEEVW

SEQ ID NO: 25539 - protein, 6 aa, synthetic construct
PMEEVY

SEQ ID NO: 25540 - protein, 6 aa, synthetic construct
PMEGAD

SEQ ID NO: 25541 - protein, 6 aa, synthetic construct
PMEGAE

SEQ ID NO: 25542 - protein, 6 aa, synthetic construct
PMEGAF

SEQ ID NO: 25543 - protein, 6 aa, synthetic construct
PMEGAW

SEQ ID NO: 25544 - protein, 6 aa, synthetic construct
PMEGAY

SEQ ID NO: 25545 - protein, 6 aa, synthetic construct
PMEGRD

SEQ ID NO: 25546 - protein, 6 aa, synthetic construct
PMEGRE

SEQ ID NO: 25547 - protein, 6 aa, synthetic construct
PMEGRF

SEQ ID NO: 25548 - protein, 6 aa, synthetic construct
PMEGRW

SEQ ID NO: 25549 - protein, 6 aa, synthetic construct
PMEGRY

SEQ ID NO: 25550 - protein, 6 aa, synthetic construct
PMEGND

SEQ ID NO: 25551 - protein, 6 aa, synthetic construct
PMEGNE

SEQ ID NO: 25552 - protein, 6 aa, synthetic construct
PMEGNF

SEQ ID NO: 25553 - protein, 6 aa, synthetic construct
PMEGNW

SEQ ID NO: 25554 - protein, 6 aa, synthetic construct
PMEGNY

SEQ ID NO: 25555 - protein, 6 aa, synthetic construct
PMEGDD

SEQ ID NO: 25556 - protein, 6 aa, synthetic construct
PMEGDE

SEQ ID NO: 25557 - protein, 6 aa, synthetic construct
PMEGDF

SEQ ID NO: 25558 - protein, 6 aa, synthetic construct
PMEGDW

SEQ ID NO: 25559 - protein, 6 aa, synthetic construct
PMEGDY

SEQ ID NO: 25560 - protein, 6 aa, synthetic construct
PMEGCD

SEQ ID NO: 25561 - protein, 6 aa, synthetic construct
PMEGCE

SEQ ID NO: 25562 - protein, 6 aa, synthetic construct
PMEGCF

SEQ ID NO: 25563 - protein, 6 aa, synthetic construct
PMEGCW

SEQ ID NO: 25564 - protein, 6 aa, synthetic construct
PMEGCY

SEQ ID NO: 25565 - protein, 6 aa, synthetic construct
PMEGQD

SEQ ID NO: 25566 - protein, 6 aa, synthetic construct
PMEGQE

SEQ ID NO: 25567 - protein, 6 aa, synthetic construct
PMEGQF

SEQ ID NO: 25568 - protein, 6 aa, synthetic construct
PMEGQW

SEQ ID NO: 25569 - protein, 6 aa, synthetic construct
PMEGQY

SEQ ID NO: 25570 - protein, 6 aa, synthetic construct
PMEGED

SEQ ID NO: 25571 - protein, 6 aa, synthetic construct
PMEGEE

SEQ ID NO: 25572 - protein, 6 aa, synthetic construct
PMEGEF

SEQ ID NO: 25573 - protein, 6 aa, synthetic construct
PMEGEW

SEQ ID NO: 25574 - protein, 6 aa, synthetic construct
PMEGEY

SEQ ID NO: 25575 - protein, 6 aa, synthetic construct
PMEGGD

SEQ ID NO: 25576 - protein, 6 aa, synthetic construct
PMEGGE

SEQ ID NO: 25577 - protein, 6 aa, synthetic construct
PMEGGF

SEQ ID NO: 25578 - protein, 6 aa, synthetic construct
PMEGGW

SEQ ID NO: 25579 - protein, 6 aa, synthetic construct
PMEGGY

SEQ ID NO: 25580 - protein, 6 aa, synthetic construct
PMEGHD

SEQ ID NO: 25581 - protein, 6 aa, synthetic construct
PMEGHE

SEQ ID NO: 25582 - protein, 6 aa, synthetic construct
PMEGHF

SEQ ID NO: 25583 - protein, 6 aa, synthetic construct
PMEGHW

SEQ ID NO: 25584 - protein, 6 aa, synthetic construct
PMEGHY

SEQ ID NO: 25585 - protein, 6 aa, synthetic construct
PMEGID

SEQ ID NO: 25586 - protein, 6 aa, synthetic construct
PMEGIE

SEQ ID NO: 25587 - protein, 6 aa, synthetic construct
PMEGIF

SEQ ID NO: 25588 - protein, 6 aa, synthetic construct
PMEGIW

SEQ ID NO: 25589 - protein, 6 aa, synthetic construct
PMEGIY

SEQ ID NO: 25590 - protein, 6 aa, synthetic construct
PMEGLD

SEQ ID NO: 25591 - protein, 6 aa, synthetic construct
PMEGLE

SEQ ID NO: 25592 - protein, 6 aa, synthetic construct
PMEGLF

SEQ ID NO: 25593 - protein, 6 aa, synthetic construct
PMEGLW

SEQ ID NO: 25594 - protein, 6 aa, synthetic construct
PMEGLY

SEQ ID NO: 25595 - protein, 6 aa, synthetic construct
PMEGKD

SEQ ID NO: 25596 - protein, 6 aa, synthetic construct
PMEGKE

SEQ ID NO: 25597 - protein, 6 aa, synthetic construct
PMEGKF

SEQ ID NO: 25598 - protein, 6 aa, synthetic construct
PMEGKW

SEQ ID NO: 25599 - protein, 6 aa, synthetic construct
PMEGKY

SEQ ID NO: 25600 - protein, 6 aa, synthetic construct
PMEGMD

SEQ ID NO: 25601 - protein, 6 aa, synthetic construct
PMEGME

SEQ ID NO: 25602 - protein, 6 aa, synthetic construct
PMEGMF

SEQ ID NO: 25603 - protein, 6 aa, synthetic construct
PMEGMW

SEQ ID NO: 25604 - protein, 6 aa, synthetic construct
PMEGMY

SEQ ID NO: 25605 - protein, 6 aa, synthetic construct
PMEGFD

SEQ ID NO: 25606 - protein, 6 aa, synthetic construct
PMEGFE

SEQ ID NO: 25607 - protein, 6 aa, synthetic construct
PMEGFF

SEQ ID NO: 25608 - protein, 6 aa, synthetic construct
PMEGFW

SEQ ID NO: 25609 - protein, 6 aa, synthetic construct
PMEGFY

SEQ ID NO: 25610 - protein, 6 aa, synthetic construct
PMEGPD

SEQ ID NO: 25611 - protein, 6 aa, synthetic construct
PMEGPE

SEQ ID NO: 25612 - protein, 6 aa, synthetic construct
PMEGPF

SEQ ID NO: 25613 - protein, 6 aa, synthetic construct
PMEGPW

SEQ ID NO: 25614 - protein, 6 aa, synthetic construct
PMEGPY

SEQ ID NO: 25615 - protein, 6 aa, synthetic construct
PMEGSD

SEQ ID NO: 25616 - protein, 6 aa, synthetic construct
PMEGSE

SEQ ID NO: 25617 - protein, 6 aa, synthetic construct
PMEGSF

SEQ ID NO: 25618 - protein, 6 aa, synthetic construct
PMEGSW

SEQ ID NO: 25619 - protein, 6 aa, synthetic construct
PMEGSY

SEQ ID NO: 25620 - protein, 6 aa, synthetic construct
PMEGTD

SEQ ID NO: 25621 - protein, 6 aa, synthetic construct
PMEGTE

SEQ ID NO: 25622 - protein, 6 aa, synthetic construct
PMEGTF

SEQ ID NO: 25623 - protein, 6 aa, synthetic construct
PMEGTW

SEQ ID NO: 25624 - protein, 6 aa, synthetic construct
PMEGTY

SEQ ID NO: 25625 - protein, 6 aa, synthetic construct
PMEGWD

SEQ ID NO: 25626 - protein, 6 aa, synthetic construct
PMEGWE

SEQ ID NO: 25627 - protein, 6 aa, synthetic construct
PMEGWF

SEQ ID NO: 25628 - protein, 6 aa, synthetic construct
PMEGWW

SEQ ID NO: 25629 - protein, 6 aa, synthetic construct
PMEGWY

SEQ ID NO: 25630 - protein, 6 aa, synthetic construct
PMEGYD

SEQ ID NO: 25631 - protein, 6 aa, synthetic construct
PMEGYE

SEQ ID NO: 25632 - protein, 6 aa, synthetic construct
PMEGYF

SEQ ID NO: 25633 - protein, 6 aa, synthetic construct
PMEGYW

SEQ ID NO: 25634 - protein, 6 aa, synthetic construct
PMEGYY

SEQ ID NO: 25635 - protein, 6 aa, synthetic construct
PMEGVD

SEQ ID NO: 25636 - protein, 6 aa, synthetic construct
PMEGVE

SEQ ID NO: 25637 - protein, 6 aa, synthetic construct
PMEGVF

SEQ ID NO: 25638 - protein, 6 aa, synthetic construct
PMEGVW

SEQ ID NO: 25639 - protein, 6 aa, synthetic construct
PMEGVY

SEQ ID NO: 25640 - protein, 6 aa, synthetic construct
PMEHAD

SEQ ID NO: 25641 - protein, 6 aa, synthetic construct
PMEHAE

SEQ ID NO: 25642 - protein, 6 aa, synthetic construct
PMEHAF

SEQ ID NO: 25643 - protein, 6 aa, synthetic construct
PMEHAW

SEQ ID NO: 25644 - protein, 6 aa, synthetic construct
PMEHAY

SEQ ID NO: 25645 - protein, 6 aa, synthetic construct
PMEHRD

SEQ ID NO: 25646 - protein, 6 aa, synthetic construct
PMEHRE

SEQ ID NO: 25647 - protein, 6 aa, synthetic construct
PMEHRF

SEQ ID NO: 25648 - protein, 6 aa, synthetic construct
PMEHRW

SEQ ID NO: 25649 - protein, 6 aa, synthetic construct
PMEHRY

SEQ ID NO: 25650 - protein, 6 aa, synthetic construct
PMEHND

SEQ ID NO: 25651 - protein, 6 aa, synthetic construct
PMEHNE

SEQ ID NO: 25652 - protein, 6 aa, synthetic construct
PMEHNF

SEQ ID NO: 25653 - protein, 6 aa, synthetic construct
PMEHNW

SEQ ID NO: 25654 - protein, 6 aa, synthetic construct
PMEHNY

SEQ ID NO: 25655 - protein, 6 aa, synthetic construct
PMEHDD

SEQ ID NO: 25656 - protein, 6 aa, synthetic construct
PMEHDE

SEQ ID NO: 25657 - protein, 6 aa, synthetic construct
PMEHDF

SEQ ID NO: 25658 - protein, 6 aa, synthetic construct
PMEHDW

SEQ ID NO: 25659 - protein, 6 aa, synthetic construct
PMEHDY

SEQ ID NO: 25660 - protein, 6 aa, synthetic construct
PMEHCD

SEQ ID NO: 25661 - protein, 6 aa, synthetic construct
PMEHCE

SEQ ID NO: 25662 - protein, 6 aa, synthetic construct
PMEHCF

SEQ ID NO: 25663 - protein, 6 aa, synthetic construct
PMEHCW

SEQ ID NO: 25664 - protein, 6 aa, synthetic construct
PMEHCY

SEQ ID NO: 25665 - protein, 6 aa, synthetic construct
PMEHQD

SEQ ID NO: 25666 - protein, 6 aa, synthetic construct
PMEHQE

SEQ ID NO: 25667 - protein, 6 aa, synthetic construct
PMEHQF

SEQ ID NO: 25668 - protein, 6 aa, synthetic construct
PMEHQW

SEQ ID NO: 25669 - protein, 6 aa, synthetic construct
PMEHQY

SEQ ID NO: 25670 - protein, 6 aa, synthetic construct
PMEHED

SEQ ID NO: 25671 - protein, 6 aa, synthetic construct
PMEHEE

SEQ ID NO: 25672 - protein, 6 aa, synthetic construct
PMEHEF

SEQ ID NO: 25673 - protein, 6 aa, synthetic construct
PMEHEW

SEQ ID NO: 25674 - protein, 6 aa, synthetic construct
PMEHEY

SEQ ID NO: 25675 - protein, 6 aa, synthetic construct
PMEHGD

SEQ ID NO: 25676 - protein, 6 aa, synthetic construct
PMEHGE

SEQ ID NO: 25677 - protein, 6 aa, synthetic construct
PMEHGF

SEQ ID NO: 25678 - protein, 6 aa, synthetic construct
PMEHGW

SEQ ID NO: 25679 - protein, 6 aa, synthetic construct
PMEHGY

SEQ ID NO: 25680 - protein, 6 aa, synthetic construct
PMEHHD

SEQ ID NO: 25681 - protein, 6 aa, synthetic construct
PMEHHE

SEQ ID NO: 25682 - protein, 6 aa, synthetic construct
PMEHHF

SEQ ID NO: 25683 - protein, 6 aa, synthetic construct
PMEHHW

SEQ ID NO: 25684 - protein, 6 aa, synthetic construct
PMEHHY

SEQ ID NO: 25685 - protein, 6 aa, synthetic construct
PMEHID

SEQ ID NO: 25686 - protein, 6 aa, synthetic construct
PMEHIE

SEQ ID NO: 25687 - protein, 6 aa, synthetic construct
PMEHIF

SEQ ID NO: 25688 - protein, 6 aa, synthetic construct
PMEHIW

SEQ ID NO: 25689 - protein, 6 aa, synthetic construct
PMEHIY

SEQ ID NO: 25690 - protein, 6 aa, synthetic construct
PMEHLD

SEQ ID NO: 25691 - protein, 6 aa, synthetic construct
PMEHLE

SEQ ID NO: 25692 - protein, 6 aa, synthetic construct
PMEHLF

SEQ ID NO: 25693 - protein, 6 aa, synthetic construct
PMEHLW

SEQ ID NO: 25694 - protein, 6 aa, synthetic construct
PMEHLY

SEQ ID NO: 25695 - protein, 6 aa, synthetic construct
PMEHKD

SEQ ID NO: 25696 - protein, 6 aa, synthetic construct
PMEHKE

SEQ ID NO: 25697 - protein, 6 aa, synthetic construct
PMEHKF

SEQ ID NO: 25698 - protein, 6 aa, synthetic construct
PMEHKW

SEQ ID NO: 25699 - protein, 6 aa, synthetic construct
PMEHKY

SEQ ID NO: 25700 - protein, 6 aa, synthetic construct
PMEHMD

SEQ ID NO: 25701 - protein, 6 aa, synthetic construct
PMEHME

SEQ ID NO: 25702 - protein, 6 aa, synthetic construct
PMEHMF

SEQ ID NO: 25703 - protein, 6 aa, synthetic construct
PMEHMW

SEQ ID NO: 25704 - protein, 6 aa, synthetic construct
PMEHMY

SEQ ID NO: 25705 - protein, 6 aa, synthetic construct
PMEHFD

SEQ ID NO: 25706 - protein, 6 aa, synthetic construct
PMEHFE

SEQ ID NO: 25707 - protein, 6 aa, synthetic construct
PMEHFF

SEQ ID NO: 25708 - protein, 6 aa, synthetic construct
PMEHFW

SEQ ID NO: 25709 - protein, 6 aa, synthetic construct
PMEHFY

SEQ ID NO: 25710 - protein, 6 aa, synthetic construct
PMEHPD

SEQ ID NO: 25711 - protein, 6 aa, synthetic construct
PMEHPE

SEQ ID NO: 25712 - protein, 6 aa, synthetic construct
PMEHPF

SEQ ID NO: 25713 - protein, 6 aa, synthetic construct
PMEHPW

SEQ ID NO: 25714 - protein, 6 aa, synthetic construct
PMEHPY

SEQ ID NO: 25715 - protein, 6 aa, synthetic construct
PMEHSD

SEQ ID NO: 25716 - protein, 6 aa, synthetic construct
PMEHSE

SEQ ID NO: 25717 - protein, 6 aa, synthetic construct
PMEHSF

SEQ ID NO: 25718 - protein, 6 aa, synthetic construct
PMEHSW

SEQ ID NO: 25719 - protein, 6 aa, synthetic construct
PMEHSY

SEQ ID NO: 25720 - protein, 6 aa, synthetic construct
PMEHTD

SEQ ID NO: 25721 - protein, 6 aa, synthetic construct
PMEHTE

SEQ ID NO: 25722 - protein, 6 aa, synthetic construct
PMEHTF

SEQ ID NO: 25723 - protein, 6 aa, synthetic construct
PMEHTW

SEQ ID NO: 25724 - protein, 6 aa, synthetic construct
PMEHTY

SEQ ID NO: 25725 - protein, 6 aa, synthetic construct
PMEHWD

SEQ ID NO: 25726 - protein, 6 aa, synthetic construct
PMEHWE

SEQ ID NO: 25727 - protein, 6 aa, synthetic construct
PMEHWF

SEQ ID NO: 25728 - protein, 6 aa, synthetic construct
PMEHWW

SEQ ID NO: 25729 - protein, 6 aa, synthetic construct
PMEHWY

SEQ ID NO: 25730 - protein, 6 aa, synthetic construct
PMEHYD

SEQ ID NO: 25731 - protein, 6 aa, synthetic construct
PMEHYE

SEQ ID NO: 25732 - protein, 6 aa, synthetic construct
PMEHYF

SEQ ID NO: 25733 - protein, 6 aa, synthetic construct
PMEHYW

SEQ ID NO: 25734 - protein, 6 aa, synthetic construct
PMEHYY

SEQ ID NO: 25735 - protein, 6 aa, synthetic construct
PMEHVD

SEQ ID NO: 25736 - protein, 6 aa, synthetic construct
PMEHVE

SEQ ID NO: 25737 - protein, 6 aa, synthetic construct
PMEHVF

SEQ ID NO: 25738 - protein, 6 aa, synthetic construct
PMEHVW

SEQ ID NO: 25739 - protein, 6 aa, synthetic construct
PMEHVY

SEQ ID NO: 25740 - protein, 6 aa, synthetic construct
PMEIAD

SEQ ID NO: 25741 - protein, 6 aa, synthetic construct
PMEIAE

SEQ ID NO: 25742 - protein, 6 aa, synthetic construct
PMEIAF

SEQ ID NO: 25743 - protein, 6 aa, synthetic construct
PMEIAW

SEQ ID NO: 25744 - protein, 6 aa, synthetic construct
PMEIAY

SEQ ID NO: 25745 - protein, 6 aa, synthetic construct
PMEIRD

SEQ ID NO: 25746 - protein, 6 aa, synthetic construct
PMEIRE

SEQ ID NO: 25747 - protein, 6 aa, synthetic construct
PMEIRF

SEQ ID NO: 25748 - protein, 6 aa, synthetic construct
PMEIRW

SEQ ID NO: 25749 - protein, 6 aa, synthetic construct
PMEIRY

SEQ ID NO: 25750 - protein, 6 aa, synthetic construct
PMEIND

SEQ ID NO: 25751 - protein, 6 aa, synthetic construct
PMEINE

SEQ ID NO: 25752 - protein, 6 aa, synthetic construct
PMEINF

SEQ ID NO: 25753 - protein, 6 aa, synthetic construct
PMEINW

SEQ ID NO: 25754 - protein, 6 aa, synthetic construct
PMEINY

SEQ ID NO: 25755 - protein, 6 aa, synthetic construct
PMEIDD

SEQ ID NO: 25756 - protein, 6 aa, synthetic construct
PMEIDE

SEQ ID NO: 25757 - protein, 6 aa, synthetic construct
PMEIDF

SEQ ID NO: 25758 - protein, 6 aa, synthetic construct
PMEIDW

SEQ ID NO: 25759 - protein, 6 aa, synthetic construct
PMEIDY

SEQ ID NO: 25760 - protein, 6 aa, synthetic construct
PMEICD

SEQ ID NO: 25761 - protein, 6 aa, synthetic construct
PMEICE

SEQ ID NO: 25762 - protein, 6 aa, synthetic construct
PMEICF

SEQ ID NO: 25763 - protein, 6 aa, synthetic construct
PMEICW

SEQ ID NO: 25764 - protein, 6 aa, synthetic construct
PMEICY

SEQ ID NO: 25765 - protein, 6 aa, synthetic construct
PMEIQD

SEQ ID NO: 25766 - protein, 6 aa, synthetic construct
PMEIQE

SEQ ID NO: 25767 - protein, 6 aa, synthetic construct
PMEIQF

SEQ ID NO: 25768 - protein, 6 aa, synthetic construct
PMEIQW

SEQ ID NO: 25769 - protein, 6 aa, synthetic construct
PMEIQY

SEQ ID NO: 25770 - protein, 6 aa, synthetic construct
PMEIED

SEQ ID NO: 25771 - protein, 6 aa, synthetic construct
PMEIEE

SEQ ID NO: 25772 - protein, 6 aa, synthetic construct
PMEIEF

SEQ ID NO: 25773 - protein, 6 aa, synthetic construct
PMEIEW

SEQ ID NO: 25774 - protein, 6 aa, synthetic construct
PMEIEY

SEQ ID NO: 25775 - protein, 6 aa, synthetic construct
PMEIGD

SEQ ID NO: 25776 - protein, 6 aa, synthetic construct
PMEIGE

SEQ ID NO: 25777 - protein, 6 aa, synthetic construct
PMEIGF

SEQ ID NO: 25778 - protein, 6 aa, synthetic construct
PMEIGW

SEQ ID NO: 25779 - protein, 6 aa, synthetic construct
PMEIGY

SEQ ID NO: 25780 - protein, 6 aa, synthetic construct
PMEIHD

SEQ ID NO: 25781 - protein, 6 aa, synthetic construct
PMEIHE

SEQ ID NO: 25782 - protein, 6 aa, synthetic construct
PMEIHF

SEQ ID NO: 25783 - protein, 6 aa, synthetic construct
PMEIHW

SEQ ID NO: 25784 - protein, 6 aa, synthetic construct
PMEIHY

SEQ ID NO: 25785 - protein, 6 aa, synthetic construct
PMEIID

SEQ ID NO: 25786 - protein, 6 aa, synthetic construct
PMEIIE

SEQ ID NO: 25787 - protein, 6 aa, synthetic construct
PMEIIF

SEQ ID NO: 25788 - protein, 6 aa, synthetic construct
PMEIIW

SEQ ID NO: 25789 - protein, 6 aa, synthetic construct
PMEIIY

SEQ ID NO: 25790 - protein, 6 aa, synthetic construct
PMEILD

SEQ ID NO: 25791 - protein, 6 aa, synthetic construct
PMEILE

SEQ ID NO: 25792 - protein, 6 aa, synthetic construct
PMEILF

SEQ ID NO: 25793 - protein, 6 aa, synthetic construct
PMEILW

SEQ ID NO: 25794 - protein, 6 aa, synthetic construct
PMEILY

SEQ ID NO: 25795 - protein, 6 aa, synthetic construct
PMEIKD

SEQ ID NO: 25796 - protein, 6 aa, synthetic construct
PMEIKE

SEQ ID NO: 25797 - protein, 6 aa, synthetic construct
PMEIKF

SEQ ID NO: 25798 - protein, 6 aa, synthetic construct
PMEIKW

SEQ ID NO: 25799 - protein, 6 aa, synthetic construct
PMEIKY

SEQ ID NO: 25800 - protein, 6 aa, synthetic construct
PMEIMD

SEQ ID NO: 25801 - protein, 6 aa, synthetic construct
PMEIME

SEQ ID NO: 25802 - protein, 6 aa, synthetic construct
PMEIMF

SEQ ID NO: 25803 - protein, 6 aa, synthetic construct
PMEIMW

SEQ ID NO: 25804 - protein, 6 aa, synthetic construct
PMEIMY

SEQ ID NO: 25805 - protein, 6 aa, synthetic construct
PMEIFD

SEQ ID NO: 25806 - protein, 6 aa, synthetic construct
PMEIFE

SEQ ID NO: 25807 - protein, 6 aa, synthetic construct
PMEIFF

SEQ ID NO: 25808 - protein, 6 aa, synthetic construct
PMEIFW

SEQ ID NO: 25809 - protein, 6 aa, synthetic construct
PMEIFY

SEQ ID NO: 25810 - protein, 6 aa, synthetic construct
PMEIPD

SEQ ID NO: 25811 - protein, 6 aa, synthetic construct
PMEIPE

SEQ ID NO: 25812 - protein, 6 aa, synthetic construct
PMEIPF

SEQ ID NO: 25813 - protein, 6 aa, synthetic construct
PMEIPW

SEQ ID NO: 25814 - protein, 6 aa, synthetic construct
PMEIPY

SEQ ID NO: 25815 - protein, 6 aa, synthetic construct
PMEISD

SEQ ID NO: 25816 - protein, 6 aa, synthetic construct
PMEISE

SEQ ID NO: 25817 - protein, 6 aa, synthetic construct
PMEISF

SEQ ID NO: 25818 - protein, 6 aa, synthetic construct
PMEISW

SEQ ID NO: 25819 - protein, 6 aa, synthetic construct
PMEISY

SEQ ID NO: 25820 - protein, 6 aa, synthetic construct
PMEITD

SEQ ID NO: 25821 - protein, 6 aa, synthetic construct
PMEITE

SEQ ID NO: 25822 - protein, 6 aa, synthetic construct
PMEITF

SEQ ID NO: 25823 - protein, 6 aa, synthetic construct
PMEITW

SEQ ID NO: 25824 - protein, 6 aa, synthetic construct
PMEITY

SEQ ID NO: 25825 - protein, 6 aa, synthetic construct
PMEIWD

SEQ ID NO: 25826 - protein, 6 aa, synthetic construct
PMEIWE

SEQ ID NO: 25827 - protein, 6 aa, synthetic construct
PMEIWF

SEQ ID NO: 25828 - protein, 6 aa, synthetic construct
PMEIWW

SEQ ID NO: 25829 - protein, 6 aa, synthetic construct
PMEIWY

SEQ ID NO: 25830 - protein, 6 aa, synthetic construct
PMEIYD

SEQ ID NO: 25831 - protein, 6 aa, synthetic construct
PMEIYE

SEQ ID NO: 25832 - protein, 6 aa, synthetic construct
PMEIYF

SEQ ID NO: 25833 - protein, 6 aa, synthetic construct
PMEIYW

SEQ ID NO: 25834 - protein, 6 aa, synthetic construct
PMEIYY

SEQ ID NO: 25835 - protein, 6 aa, synthetic construct
PMEIVD

SEQ ID NO: 25836 - protein, 6 aa, synthetic construct
PMEIVE

SEQ ID NO: 25837 - protein, 6 aa, synthetic construct
PMEIVF

SEQ ID NO: 25838 - protein, 6 aa, synthetic construct
PMEIVW

SEQ ID NO: 25839 - protein, 6 aa, synthetic construct
PMEIVY

SEQ ID NO: 25840 - protein, 6 aa, synthetic construct
PMELAD

SEQ ID NO: 25841 - protein, 6 aa, synthetic construct
PMELAE

SEQ ID NO: 25842 - protein, 6 aa, synthetic construct
PMELAF

SEQ ID NO: 25843 - protein, 6 aa, synthetic construct
PMELAW

SEQ ID NO: 25844 - protein, 6 aa, synthetic construct
PMELAY

SEQ ID NO: 25845 - protein, 6 aa, synthetic construct
PMELRD

SEQ ID NO: 25846 - protein, 6 aa, synthetic construct
PMELRE

SEQ ID NO: 25847 - protein, 6 aa, synthetic construct
PMELRF

SEQ ID NO: 25848 - protein, 6 aa, synthetic construct
PMELRW

SEQ ID NO: 25849 - protein, 6 aa, synthetic construct
PMELRY

SEQ ID NO: 25850 - protein, 6 aa, synthetic construct
PMELND

SEQ ID NO: 25851 - protein, 6 aa, synthetic construct
PMELNE

SEQ ID NO: 25852 - protein, 6 aa, synthetic construct
PMELNF

SEQ ID NO: 25853 - protein, 6 aa, synthetic construct
PMELNW

SEQ ID NO: 25854 - protein, 6 aa, synthetic construct
PMELNY

SEQ ID NO: 25855 - protein, 6 aa, synthetic construct
PMELDD

SEQ ID NO: 25856 - protein, 6 aa, synthetic construct
PMELDE

SEQ ID NO: 25857 - protein, 6 aa, synthetic construct
PMELDF

SEQ ID NO: 25858 - protein, 6 aa, synthetic construct
PMELDW

SEQ ID NO: 25859 - protein, 6 aa, synthetic construct
PMELDY

SEQ ID NO: 25860 - protein, 6 aa, synthetic construct
PMELCD

SEQ ID NO: 25861 - protein, 6 aa, synthetic construct
PMELCE

SEQ ID NO: 25862 - protein, 6 aa, synthetic construct
PMELCF

SEQ ID NO: 25863 - protein, 6 aa, synthetic construct
PMELCW

SEQ ID NO: 25864 - protein, 6 aa, synthetic construct
PMELCY

SEQ ID NO: 25865 - protein, 6 aa, synthetic construct
PMELQD

SEQ ID NO: 25866 - protein, 6 aa, synthetic construct
PMELQE

SEQ ID NO: 25867 - protein, 6 aa, synthetic construct
PMELQF

SEQ ID NO: 25868 - protein, 6 aa, synthetic construct
PMELQW

SEQ ID NO: 25869 - protein, 6 aa, synthetic construct
PMELQY

SEQ ID NO: 25870 - protein, 6 aa, synthetic construct
PMELED

SEQ ID NO: 25871 - protein, 6 aa, synthetic construct
PMELEE

SEQ ID NO: 25872 - protein, 6 aa, synthetic construct
PMELEF

SEQ ID NO: 25873 - protein, 6 aa, synthetic construct
PMELEW

SEQ ID NO: 25874 - protein, 6 aa, synthetic construct
PMELEY

SEQ ID NO: 25875 - protein, 6 aa, synthetic construct
PMELGD

SEQ ID NO: 25876 - protein, 6 aa, synthetic construct
PMELGE

SEQ ID NO: 25877 - protein, 6 aa, synthetic construct
PMELGF

SEQ ID NO: 25878 - protein, 6 aa, synthetic construct
PMELGW

SEQ ID NO: 25879 - protein, 6 aa, synthetic construct
PMELGY

SEQ ID NO: 25880 - protein, 6 aa, synthetic construct
PMELHD

SEQ ID NO: 25881 - protein, 6 aa, synthetic construct
PMELHE

SEQ ID NO: 25882 - protein, 6 aa, synthetic construct
PMELHF

SEQ ID NO: 25883 - protein, 6 aa, synthetic construct
PMELHW

SEQ ID NO: 25884 - protein, 6 aa, synthetic construct
PMELHY

SEQ ID NO: 25885 - protein, 6 aa, synthetic construct
PMELID

SEQ ID NO: 25886 - protein, 6 aa, synthetic construct
PMELIE

SEQ ID NO: 25887 - protein, 6 aa, synthetic construct
PMELIF

SEQ ID NO: 25888 - protein, 6 aa, synthetic construct
PMELIW

SEQ ID NO: 25889 - protein, 6 aa, synthetic construct
PMELIY

SEQ ID NO: 25890 - protein, 6 aa, synthetic construct
PMELLD

SEQ ID NO: 25891 - protein, 6 aa, synthetic construct
PMELLE

SEQ ID NO: 25892 - protein, 6 aa, synthetic construct
PMELLF

SEQ ID NO: 25893 - protein, 6 aa, synthetic construct
PMELLW

SEQ ID NO: 25894 - protein, 6 aa, synthetic construct
PMELLY

SEQ ID NO: 25895 - protein, 6 aa, synthetic construct
PMELKD

SEQ ID NO: 25896 - protein, 6 aa, synthetic construct
PMELKE

SEQ ID NO: 25897 - protein, 6 aa, synthetic construct
PMELKF

SEQ ID NO: 25898 - protein, 6 aa, synthetic construct
PMELKW

SEQ ID NO: 25899 - protein, 6 aa, synthetic construct
PMELKY

SEQ ID NO: 25900 - protein, 6 aa, synthetic construct
PMELMD

SEQ ID NO: 25901 - protein, 6 aa, synthetic construct
PMELME

SEQ ID NO: 25902 - protein, 6 aa, synthetic construct
PMELMF

SEQ ID NO: 25903 - protein, 6 aa, synthetic construct
PMELMW

SEQ ID NO: 25904 - protein, 6 aa, synthetic construct
PMELMY

SEQ ID NO: 25905 - protein, 6 aa, synthetic construct
PMELFD

SEQ ID NO: 25906 - protein, 6 aa, synthetic construct
PMELFE

SEQ ID NO: 25907 - protein, 6 aa, synthetic construct
PMELFF

SEQ ID NO: 25908 - protein, 6 aa, synthetic construct
PMELFW

SEQ ID NO: 25909 - protein, 6 aa, synthetic construct
PMELFY

SEQ ID NO: 25910 - protein, 6 aa, synthetic construct
PMELPD

SEQ ID NO: 25911 - protein, 6 aa, synthetic construct
PMELPE

SEQ ID NO: 25912 - protein, 6 aa, synthetic construct
PMELPF

SEQ ID NO: 25913 - protein, 6 aa, synthetic construct
PMELPW

SEQ ID NO: 25914 - protein, 6 aa, synthetic construct
PMELPY

SEQ ID NO: 25915 - protein, 6 aa, synthetic construct
PMELSD

SEQ ID NO: 25916 - protein, 6 aa, synthetic construct
PMELSE

SEQ ID NO: 25917 - protein, 6 aa, synthetic construct
PMELSF

SEQ ID NO: 25918 - protein, 6 aa, synthetic construct
PMELSW

SEQ ID NO: 25919 - protein, 6 aa, synthetic construct
PMELSY

SEQ ID NO: 25920 - protein, 6 aa, synthetic construct
PMELTD

SEQ ID NO: 25921 - protein, 6 aa, synthetic construct
PMELTE

SEQ ID NO: 25922 - protein, 6 aa, synthetic construct
PMELTF

SEQ ID NO: 25923 - protein, 6 aa, synthetic construct
PMELTW

SEQ ID NO: 25924 - protein, 6 aa, synthetic construct
PMELTY

SEQ ID NO: 25925 - protein, 6 aa, synthetic construct
PMELWD

SEQ ID NO: 25926 - protein, 6 aa, synthetic construct
PMELWE

SEQ ID NO: 25927 - protein, 6 aa, synthetic construct
PMELWF

SEQ ID NO: 25928 - protein, 6 aa, synthetic construct
PMELWW

SEQ ID NO: 25929 - protein, 6 aa, synthetic construct
PMELWY

SEQ ID NO: 25930 - protein, 6 aa, synthetic construct
PMELYD

SEQ ID NO: 25931 - protein, 6 aa, synthetic construct
PMELYE

SEQ ID NO: 25932 - protein, 6 aa, synthetic construct
PMELYF

SEQ ID NO: 25933 - protein, 6 aa, synthetic construct
PMELYW

SEQ ID NO: 25934 - protein, 6 aa, synthetic construct
PMELYY

SEQ ID NO: 25935 - protein, 6 aa, synthetic construct
PMELVD

SEQ ID NO: 25936 - protein, 6 aa, synthetic construct
PMELVE

SEQ ID NO: 25937 - protein, 6 aa, synthetic construct
PMELVF

SEQ ID NO: 25938 - protein, 6 aa, synthetic construct
PMELVW

SEQ ID NO: 25939 - protein, 6 aa, synthetic construct
PMELVY

SEQ ID NO: 25940 - protein, 6 aa, synthetic construct
PMEKAD

SEQ ID NO: 25941 - protein, 6 aa, synthetic construct
PMEKAE

SEQ ID NO: 25942 - protein, 6 aa, synthetic construct
PMEKAF

SEQ ID NO: 25943 - protein, 6 aa, synthetic construct
PMEKAW

SEQ ID NO: 25944 - protein, 6 aa, synthetic construct
PMEKAY

SEQ ID NO: 25945 - protein, 6 aa, synthetic construct
PMEKRD

SEQ ID NO: 25946 - protein, 6 aa, synthetic construct
PMEKRE

SEQ ID NO: 25947 - protein, 6 aa, synthetic construct
PMEKRF

SEQ ID NO: 25948 - protein, 6 aa, synthetic construct
PMEKRW

SEQ ID NO: 25949 - protein, 6 aa, synthetic construct
PMEKRY

SEQ ID NO: 25950 - protein, 6 aa, synthetic construct
PMEKND

SEQ ID NO: 25951 - protein, 6 aa, synthetic construct
PMEKNE

SEQ ID NO: 25952 - protein, 6 aa, synthetic construct
PMEKNF

SEQ ID NO: 25953 - protein, 6 aa, synthetic construct
PMEKNW

SEQ ID NO: 25954 - protein, 6 aa, synthetic construct
PMEKNY

SEQ ID NO: 25955 - protein, 6 aa, synthetic construct
PMEKDD

SEQ ID NO: 25956 - protein, 6 aa, synthetic construct
PMEKDE

SEQ ID NO: 25957 - protein, 6 aa, synthetic construct
PMEKDF

SEQ ID NO: 25958 - protein, 6 aa, synthetic construct
PMEKDW

SEQ ID NO: 25959 - protein, 6 aa, synthetic construct
PMEKDY

SEQ ID NO: 25960 - protein, 6 aa, synthetic construct
PMEKCD

SEQ ID NO: 25961 - protein, 6 aa, synthetic construct
PMEKCE

SEQ ID NO: 25962 - protein, 6 aa, synthetic construct
PMEKCF

SEQ ID NO: 25963 - protein, 6 aa, synthetic construct
PMEKCW

SEQ ID NO: 25964 - protein, 6 aa, synthetic construct
PMEKCY

SEQ ID NO: 25965 - protein, 6 aa, synthetic construct
PMEKQD

SEQ ID NO: 25966 - protein, 6 aa, synthetic construct
PMEKQE

SEQ ID NO: 25967 - protein, 6 aa, synthetic construct
PMEKQF

SEQ ID NO: 25968 - protein, 6 aa, synthetic construct
PMEKQW

SEQ ID NO: 25969 - protein, 6 aa, synthetic construct
PMEKQY

SEQ ID NO: 25970 - protein, 6 aa, synthetic construct
PMEKED

SEQ ID NO: 25971 - protein, 6 aa, synthetic construct
PMEKEE

SEQ ID NO: 25972 - protein, 6 aa, synthetic construct
PMEKEF

SEQ ID NO: 25973 - protein, 6 aa, synthetic construct
PMEKEW

SEQ ID NO: 25974 - protein, 6 aa, synthetic construct
PMEKEY

SEQ ID NO: 25975 - protein, 6 aa, synthetic construct
PMEKGD

SEQ ID NO: 25976 - protein, 6 aa, synthetic construct
PMEKGE

SEQ ID NO: 25977 - protein, 6 aa, synthetic construct
PMEKGF

SEQ ID NO: 25978 - protein, 6 aa, synthetic construct
PMEKGW

SEQ ID NO: 25979 - protein, 6 aa, synthetic construct
PMEKGY

SEQ ID NO: 25980 - protein, 6 aa, synthetic construct
PMEKHD

SEQ ID NO: 25981 - protein, 6 aa, synthetic construct
PMEKHE

SEQ ID NO: 25982 - protein, 6 aa, synthetic construct
PMEKHF

SEQ ID NO: 25983 - protein, 6 aa, synthetic construct
PMEKHW

SEQ ID NO: 25984 - protein, 6 aa, synthetic construct
PMEKHY

SEQ ID NO: 25985 - protein, 6 aa, synthetic construct
PMEKID

SEQ ID NO: 25986 - protein, 6 aa, synthetic construct
PMEKIE

SEQ ID NO: 25987 - protein, 6 aa, synthetic construct
PMEKIF

SEQ ID NO: 25988 - protein, 6 aa, synthetic construct
PMEKIW

SEQ ID NO: 25989 - protein, 6 aa, synthetic construct
PMEKIY

SEQ ID NO: 25990 - protein, 6 aa, synthetic construct
PMEKLD

SEQ ID NO: 25991 - protein, 6 aa, synthetic construct
PMEKLE

SEQ ID NO: 25992 - protein, 6 aa, synthetic construct
PMEKLF

SEQ ID NO: 25993 - protein, 6 aa, synthetic construct
PMEKLW

SEQ ID NO: 25994 - protein, 6 aa, synthetic construct
PMEKLY

SEQ ID NO: 25995 - protein, 6 aa, synthetic construct
PMEKKD

SEQ ID NO: 25996 - protein, 6 aa, synthetic construct
PMEKKE

SEQ ID NO: 25997 - protein, 6 aa, synthetic construct
PMEKKF

SEQ ID NO: 25998 - protein, 6 aa, synthetic construct
PMEKKW

SEQ ID NO: 25999 - protein, 6 aa, synthetic construct
PMEKKY

SEQ ID NO: 26000 - protein, 6 aa, synthetic construct
PMEKMD

SEQ ID NO: 26001 - protein, 6 aa, synthetic construct
PMEKME

SEQ ID NO: 26002 - protein, 6 aa, synthetic construct
PMEKMF

SEQ ID NO: 26003 - protein, 6 aa, synthetic construct
PMEKMW

SEQ ID NO: 26004 - protein, 6 aa, synthetic construct
PMEKMY

SEQ ID NO: 26005 - protein, 6 aa, synthetic construct
PMEKFD

SEQ ID NO: 26006 - protein, 6 aa, synthetic construct
PMEKFE

SEQ ID NO: 26007 - protein, 6 aa, synthetic construct
PMEKFF

SEQ ID NO: 26008 - protein, 6 aa, synthetic construct
PMEKFW

SEQ ID NO: 26009 - protein, 6 aa, synthetic construct
PMEKFY

SEQ ID NO: 26010 - protein, 6 aa, synthetic construct
PMEKPD

SEQ ID NO: 26011 - protein, 6 aa, synthetic construct
PMEKPE

SEQ ID NO: 26012 - protein, 6 aa, synthetic construct
PMEKPF

SEQ ID NO: 26013 - protein, 6 aa, synthetic construct
PMEKPW

SEQ ID NO: 26014 - protein, 6 aa, synthetic construct
PMEKPY

SEQ ID NO: 26015 - protein, 6 aa, synthetic construct
PMEKSD

SEQ ID NO: 26016 - protein, 6 aa, synthetic construct
PMEKSE

SEQ ID NO: 26017 - protein, 6 aa, synthetic construct
PMEKSF

SEQ ID NO: 26018 - protein, 6 aa, synthetic construct
PMEKSW

SEQ ID NO: 26019 - protein, 6 aa, synthetic construct
PMEKSY

SEQ ID NO: 26020 - protein, 6 aa, synthetic construct
PMEKTD

SEQ ID NO: 26021 - protein, 6 aa, synthetic construct
PMEKTE

SEQ ID NO: 26022 - protein, 6 aa, synthetic construct
PMEKTF

SEQ ID NO: 26023 - protein, 6 aa, synthetic construct
PMEKTW

SEQ ID NO: 26024 - protein, 6 aa, synthetic construct
PMEKTY

SEQ ID NO: 26025 - protein, 6 aa, synthetic construct
PMEKWD

SEQ ID NO: 26026 - protein, 6 aa, synthetic construct
PMEKWE

SEQ ID NO: 26027 - protein, 6 aa, synthetic construct
PMEKWF

SEQ ID NO: 26028 - protein, 6 aa, synthetic construct
PMEKWW

SEQ ID NO: 26029 - protein, 6 aa, synthetic construct
PMEKWY

SEQ ID NO: 26030 - protein, 6 aa, synthetic construct
PMEKYD

SEQ ID NO: 26031 - protein, 6 aa, synthetic construct
PMEKYE

SEQ ID NO: 26032 - protein, 6 aa, synthetic construct
PMEKYF

SEQ ID NO: 26033 - protein, 6 aa, synthetic construct
PMEKYW

SEQ ID NO: 26034 - protein, 6 aa, synthetic construct
PMEKYY

SEQ ID NO: 26035 - protein, 6 aa, synthetic construct
PMEKVD

SEQ ID NO: 26036 - protein, 6 aa, synthetic construct
PMEKVE

SEQ ID NO: 26037 - protein, 6 aa, synthetic construct
PMEKVF

SEQ ID NO: 26038 - protein, 6 aa, synthetic construct
PMEKVW

SEQ ID NO: 26039 - protein, 6 aa, synthetic construct
PMEKVY

SEQ ID NO: 26040 - protein, 6 aa, synthetic construct
PMEMAD

SEQ ID NO: 26041 - protein, 6 aa, synthetic construct
PMEMAE

SEQ ID NO: 26042 - protein, 6 aa, synthetic construct
PMEMAF

SEQ ID NO: 26043 - protein, 6 aa, synthetic construct
PMEMAW

SEQ ID NO: 26044 - protein, 6 aa, synthetic construct
PMEMAY

SEQ ID NO: 26045 - protein, 6 aa, synthetic construct
PMEMRD

SEQ ID NO: 26046 - protein, 6 aa, synthetic construct
PMEMRE

SEQ ID NO: 26047 - protein, 6 aa, synthetic construct
PMEMRF

SEQ ID NO: 26048 - protein, 6 aa, synthetic construct
PMEMRW

SEQ ID NO: 26049 - protein, 6 aa, synthetic construct
PMEMRY

SEQ ID NO: 26050 - protein, 6 aa, synthetic construct
PMEMND

SEQ ID NO: 26051 - protein, 6 aa, synthetic construct
PMEMNE

SEQ ID NO: 26052 - protein, 6 aa, synthetic construct
PMEMNF

SEQ ID NO: 26053 - protein, 6 aa, synthetic construct
PMEMNW

SEQ ID NO: 26054 - protein, 6 aa, synthetic construct
PMEMNY

SEQ ID NO: 26055 - protein, 6 aa, synthetic construct
PMEMDD

SEQ ID NO: 26056 - protein, 6 aa, synthetic construct
PMEMDE

SEQ ID NO: 26057 - protein, 6 aa, synthetic construct
PMEMDF

SEQ ID NO: 26058 - protein, 6 aa, synthetic construct
PMEMDW

SEQ ID NO: 26059 - protein, 6 aa, synthetic construct
PMEMDY

SEQ ID NO: 26060 - protein, 6 aa, synthetic construct
PMEMCD

SEQ ID NO: 26061 - protein, 6 aa, synthetic construct
PMEMCE

SEQ ID NO: 26062 - protein, 6 aa, synthetic construct
PMEMCF

SEQ ID NO: 26063 - protein, 6 aa, synthetic construct
PMEMCW

SEQ ID NO: 26064 - protein, 6 aa, synthetic construct
PMEMCY

SEQ ID NO: 26065 - protein, 6 aa, synthetic construct
PMEMQD

SEQ ID NO: 26066 - protein, 6 aa, synthetic construct
PMEMQE

SEQ ID NO: 26067 - protein, 6 aa, synthetic construct
PMEMQF

SEQ ID NO: 26068 - protein, 6 aa, synthetic construct
PMEMQW

SEQ ID NO: 26069 - protein, 6 aa, synthetic construct
PMEMQY

SEQ ID NO: 26070 - protein, 6 aa, synthetic construct
PMEMED

SEQ ID NO: 26071 - protein, 6 aa, synthetic construct
PMEMEE

SEQ ID NO: 26072 - protein, 6 aa, synthetic construct
PMEMEF

SEQ ID NO: 26073 - protein, 6 aa, synthetic construct
PMEMEW

SEQ ID NO: 26074 - protein, 6 aa, synthetic construct
PMEMEY

SEQ ID NO: 26075 - protein, 6 aa, synthetic construct
PMEMGD

SEQ ID NO: 26076 - protein, 6 aa, synthetic construct
PMEMGE

SEQ ID NO: 26077 - protein, 6 aa, synthetic construct
PMEMGF

SEQ ID NO: 26078 - protein, 6 aa, synthetic construct
PMEMGW

SEQ ID NO: 26079 - protein, 6 aa, synthetic construct
PMEMGY

SEQ ID NO: 26080 - protein, 6 aa, synthetic construct
PMEMHD

SEQ ID NO: 26081 - protein, 6 aa, synthetic construct
PMEMHE

SEQ ID NO: 26082 - protein, 6 aa, synthetic construct
PMEMHF

SEQ ID NO: 26083 - protein, 6 aa, synthetic construct
PMEMHW

SEQ ID NO: 26084 - protein, 6 aa, synthetic construct
PMEMHY

SEQ ID NO: 26085 - protein, 6 aa, synthetic construct
PMEMID

SEQ ID NO: 26086 - protein, 6 aa, synthetic construct
PMEMIE

SEQ ID NO: 26087 - protein, 6 aa, synthetic construct
PMEMIF

SEQ ID NO: 26088 - protein, 6 aa, synthetic construct
PMEMIW

SEQ ID NO: 26089 - protein, 6 aa, synthetic construct
PMEMIY

SEQ ID NO: 26090 - protein, 6 aa, synthetic construct
PMEMLD

SEQ ID NO: 26091 - protein, 6 aa, synthetic construct
PMEMLE

SEQ ID NO: 26092 - protein, 6 aa, synthetic construct
PMEMLF

SEQ ID NO: 26093 - protein, 6 aa, synthetic construct
PMEMLW

SEQ ID NO: 26094 - protein, 6 aa, synthetic construct
PMEMLY

SEQ ID NO: 26095 - protein, 6 aa, synthetic construct
PMEMKD

SEQ ID NO: 26096 - protein, 6 aa, synthetic construct
PMEMKE

SEQ ID NO: 26097 - protein, 6 aa, synthetic construct
PMEMKF

SEQ ID NO: 26098 - protein, 6 aa, synthetic construct
PMEMKW

SEQ ID NO: 26099 - protein, 6 aa, synthetic construct
PMEMKY

SEQ ID NO: 26100 - protein, 6 aa, synthetic construct
PMEMMD

SEQ ID NO: 26101 - protein, 6 aa, synthetic construct
PMEMME

SEQ ID NO: 26102 - protein, 6 aa, synthetic construct
PMEMMF

SEQ ID NO: 26103 - protein, 6 aa, synthetic construct
PMEMMW

SEQ ID NO: 26104 - protein, 6 aa, synthetic construct
PMEMMY

SEQ ID NO: 26105 - protein, 6 aa, synthetic construct
PMEMFD

SEQ ID NO: 26106 - protein, 6 aa, synthetic construct
PMEMFE

SEQ ID NO: 26107 - protein, 6 aa, synthetic construct
PMEMFF

SEQ ID NO: 26108 - protein, 6 aa, synthetic construct
PMEMFW

SEQ ID NO: 26109 - protein, 6 aa, synthetic construct
PMEMFY

SEQ ID NO: 26110 - protein, 6 aa, synthetic construct
PMEMPD

SEQ ID NO: 26111 - protein, 6 aa, synthetic construct
PMEMPE

SEQ ID NO: 26112 - protein, 6 aa, synthetic construct
PMEMPF

SEQ ID NO: 26113 - protein, 6 aa, synthetic construct
PMEMPW

SEQ ID NO: 26114 - protein, 6 aa, synthetic construct
PMEMPY

SEQ ID NO: 26115 - protein, 6 aa, synthetic construct
PMEMSD

SEQ ID NO: 26116 - protein, 6 aa, synthetic construct
PMEMSE

SEQ ID NO: 26117 - protein, 6 aa, synthetic construct
PMEMSF

SEQ ID NO: 26118 - protein, 6 aa, synthetic construct
PMEMSW

SEQ ID NO: 26119 - protein, 6 aa, synthetic construct
PMEMSY

SEQ ID NO: 26120 - protein, 6 aa, synthetic construct
PMEMTD

SEQ ID NO: 26121 - protein, 6 aa, synthetic construct
PMEMTE

SEQ ID NO: 26122 - protein, 6 aa, synthetic construct
PMEMTF

SEQ ID NO: 26123 - protein, 6 aa, synthetic construct
PMEMTW

SEQ ID NO: 26124 - protein, 6 aa, synthetic construct
PMEMTY

SEQ ID NO: 26125 - protein, 6 aa, synthetic construct
PMEMWD

SEQ ID NO: 26126 - protein, 6 aa, synthetic construct
PMEMWE

SEQ ID NO: 26127 - protein, 6 aa, synthetic construct
PMEMWF

SEQ ID NO: 26128 - protein, 6 aa, synthetic construct
PMEMWW

SEQ ID NO: 26129 - protein, 6 aa, synthetic construct
PMEMWY

SEQ ID NO: 26130 - protein, 6 aa, synthetic construct
PMEMYD

SEQ ID NO: 26131 - protein, 6 aa, synthetic construct
PMEMYE

SEQ ID NO: 26132 - protein, 6 aa, synthetic construct
PMEMYF

SEQ ID NO: 26133 - protein, 6 aa, synthetic construct
PMEMYW

SEQ ID NO: 26134 - protein, 6 aa, synthetic construct
PMEMYY

SEQ ID NO: 26135 - protein, 6 aa, synthetic construct
PMEMVD

SEQ ID NO: 26136 - protein, 6 aa, synthetic construct
PMEMVE

SEQ ID NO: 26137 - protein, 6 aa, synthetic construct
PMEMVF

SEQ ID NO: 26138 - protein, 6 aa, synthetic construct
PMEMVW

SEQ ID NO: 26139 - protein, 6 aa, synthetic construct
PMEMVY

SEQ ID NO: 26140 - protein, 6 aa, synthetic construct
PMEFAD

SEQ ID NO: 26141 - protein, 6 aa, synthetic construct
PMEFAE

SEQ ID NO: 26142 - protein, 6 aa, synthetic construct
PMEFAF

SEQ ID NO: 26143 - protein, 6 aa, synthetic construct
PMEFAW

SEQ ID NO: 26144 - protein, 6 aa, synthetic construct
PMEFAY

SEQ ID NO: 26145 - protein, 6 aa, synthetic construct
PMEFRD

SEQ ID NO: 26146 - protein, 6 aa, synthetic construct
PMEFRE

SEQ ID NO: 26147 - protein, 6 aa, synthetic construct
PMEFRF

SEQ ID NO: 26148 - protein, 6 aa, synthetic construct
PMEFRW

SEQ ID NO: 26149 - protein, 6 aa, synthetic construct
PMEFRY

SEQ ID NO: 26150 - protein, 6 aa, synthetic construct
PMEFND

SEQ ID NO: 26151 - protein, 6 aa, synthetic construct
PMEFNE

SEQ ID NO: 26152 - protein, 6 aa, synthetic construct
PMEFNF

SEQ ID NO: 26153 - protein, 6 aa, synthetic construct
PMEFNW

SEQ ID NO: 26154 - protein, 6 aa, synthetic construct
PMEFNY

SEQ ID NO: 26155 - protein, 6 aa, synthetic construct
PMEFDD

SEQ ID NO: 26156 - protein, 6 aa, synthetic construct
PMEFDE

SEQ ID NO: 26157 - protein, 6 aa, synthetic construct
PMEFDF

SEQ ID NO: 26158 - protein, 6 aa, synthetic construct
PMEFDW

SEQ ID NO: 26159 - protein, 6 aa, synthetic construct
PMEFDY

SEQ ID NO: 26160 - protein, 6 aa, synthetic construct
PMEFCD

SEQ ID NO: 26161 - protein, 6 aa, synthetic construct
PMEFCE

SEQ ID NO: 26162 - protein, 6 aa, synthetic construct
PMEFCF

SEQ ID NO: 26163 - protein, 6 aa, synthetic construct
PMEFCW

SEQ ID NO: 26164 - protein, 6 aa, synthetic construct
PMEFCY

SEQ ID NO: 26165 - protein, 6 aa, synthetic construct
PMEFQD

SEQ ID NO: 26166 - protein, 6 aa, synthetic construct
PMEFQE

SEQ ID NO: 26167 - protein, 6 aa, synthetic construct
PMEFQF

SEQ ID NO: 26168 - protein, 6 aa, synthetic construct
PMEFQW

SEQ ID NO: 26169 - protein, 6 aa, synthetic construct
PMEFQY

SEQ ID NO: 26170 - protein, 6 aa, synthetic construct
PMEFED

SEQ ID NO: 26171 - protein, 6 aa, synthetic construct
PMEFEE

SEQ ID NO: 26172 - protein, 6 aa, synthetic construct
PMEFEF

SEQ ID NO: 26173 - protein, 6 aa, synthetic construct
PMEFEW

SEQ ID NO: 26174 - protein, 6 aa, synthetic construct
PMEFEY

SEQ ID NO: 26175 - protein, 6 aa, synthetic construct
PMEFGD

SEQ ID NO: 26176 - protein, 6 aa, synthetic construct
PMEFGE

SEQ ID NO: 26177 - protein, 6 aa, synthetic construct
PMEFGF

SEQ ID NO: 26178 - protein, 6 aa, synthetic construct
PMEFGW

SEQ ID NO: 26179 - protein, 6 aa, synthetic construct
PMEFGY

SEQ ID NO: 26180 - protein, 6 aa, synthetic construct
PMEFHD

SEQ ID NO: 26181 - protein, 6 aa, synthetic construct
PMEFHE

SEQ ID NO: 26182 - protein, 6 aa, synthetic construct
PMEFHF

SEQ ID NO: 26183 - protein, 6 aa, synthetic construct
PMEFHW

SEQ ID NO: 26184 - protein, 6 aa, synthetic construct
PMEFHY

SEQ ID NO: 26185 - protein, 6 aa, synthetic construct
PMEFID

SEQ ID NO: 26186 - protein, 6 aa, synthetic construct
PMEFIE

SEQ ID NO: 26187 - protein, 6 aa, synthetic construct
PMEFIF

SEQ ID NO: 26188 - protein, 6 aa, synthetic construct
PMEFIW

SEQ ID NO: 26189 - protein, 6 aa, synthetic construct
PMEFIY

SEQ ID NO: 26190 - protein, 6 aa, synthetic construct
PMEFLD

SEQ ID NO: 26191 - protein, 6 aa, synthetic construct
PMEFLE

SEQ ID NO: 26192 - protein, 6 aa, synthetic construct
PMEFLF

SEQ ID NO: 26193 - protein, 6 aa, synthetic construct
PMEFLW

SEQ ID NO: 26194 - protein, 6 aa, synthetic construct
PMEFLY

SEQ ID NO: 26195 - protein, 6 aa, synthetic construct
PMEFKD

SEQ ID NO: 26196 - protein, 6 aa, synthetic construct
PMEFKE

SEQ ID NO: 26197 - protein, 6 aa, synthetic construct
PMEFKF

SEQ ID NO: 26198 - protein, 6 aa, synthetic construct
PMEFKW

SEQ ID NO: 26199 - protein, 6 aa, synthetic construct
PMEFKY

SEQ ID NO: 26200 - protein, 6 aa, synthetic construct
PMEFMD

SEQ ID NO: 26201 - protein, 6 aa, synthetic construct
PMEFME

SEQ ID NO: 26202 - protein, 6 aa, synthetic construct
PMEFMF

SEQ ID NO: 26203 - protein, 6 aa, synthetic construct
PMEFMW

SEQ ID NO: 26204 - protein, 6 aa, synthetic construct
PMEFMY

SEQ ID NO: 26205 - protein, 6 aa, synthetic construct
PMEFFD

SEQ ID NO: 26206 - protein, 6 aa, synthetic construct
PMEFFE

SEQ ID NO: 26207 - protein, 6 aa, synthetic construct
PMEFFF

SEQ ID NO: 26208 - protein, 6 aa, synthetic construct
PMEFFW

SEQ ID NO: 26209 - protein, 6 aa, synthetic construct
PMEFFY

SEQ ID NO: 26210 - protein, 6 aa, synthetic construct
PMEFPD

SEQ ID NO: 26211 - protein, 6 aa, synthetic construct
PMEFPE

SEQ ID NO: 26212 - protein, 6 aa, synthetic construct
PMEFPF

SEQ ID NO: 26213 - protein, 6 aa, synthetic construct
PMEFPW

SEQ ID NO: 26214 - protein, 6 aa, synthetic construct
PMEFPY

SEQ ID NO: 26215 - protein, 6 aa, synthetic construct
PMEFSD

SEQ ID NO: 26216 - protein, 6 aa, synthetic construct
PMEFSE

SEQ ID NO: 26217 - protein, 6 aa, synthetic construct
PMEFSF

SEQ ID NO: 26218 - protein, 6 aa, synthetic construct
PMEFSW

SEQ ID NO: 26219 - protein, 6 aa, synthetic construct
PMEFSY

SEQ ID NO: 26220 - protein, 6 aa, synthetic construct
PMEFTD

SEQ ID NO: 26221 - protein, 6 aa, synthetic construct
PMEFTE

SEQ ID NO: 26222 - protein, 6 aa, synthetic construct
PMEFTF

SEQ ID NO: 26223 - protein, 6 aa, synthetic construct
PMEFTW

SEQ ID NO: 26224 - protein, 6 aa, synthetic construct
PMEFTY

SEQ ID NO: 26225 - protein, 6 aa, synthetic construct
PMEFWD

SEQ ID NO: 26226 - protein, 6 aa, synthetic construct
PMEFWE

SEQ ID NO: 26227 - protein, 6 aa, synthetic construct
PMEFWF

SEQ ID NO: 26228 - protein, 6 aa, synthetic construct
PMEFWW

SEQ ID NO: 26229 - protein, 6 aa, synthetic construct
PMEFWY

SEQ ID NO: 26230 - protein, 6 aa, synthetic construct
PMEFYD

SEQ ID NO: 26231 - protein, 6 aa, synthetic construct
PMEFYE

SEQ ID NO: 26232 - protein, 6 aa, synthetic construct
PMEFYF

SEQ ID NO: 26233 - protein, 6 aa, synthetic construct
PMEFYW

SEQ ID NO: 26234 - protein, 6 aa, synthetic construct
PMEFYY

SEQ ID NO: 26235 - protein, 6 aa, synthetic construct
PMEFVD

SEQ ID NO: 26236 - protein, 6 aa, synthetic construct
PMEFVE

SEQ ID NO: 26237 - protein, 6 aa, synthetic construct
PMEFVF

SEQ ID NO: 26238 - protein, 6 aa, synthetic construct
PMEFVW

SEQ ID NO: 26239 - protein, 6 aa, synthetic construct
PMEFVY

SEQ ID NO: 26240 - protein, 6 aa, synthetic construct
PMEPAD

SEQ ID NO: 26241 - protein, 6 aa, synthetic construct
PMEPAE

SEQ ID NO: 26242 - protein, 6 aa, synthetic construct
PMEPAF

SEQ ID NO: 26243 - protein, 6 aa, synthetic construct
PMEPAW

SEQ ID NO: 26244 - protein, 6 aa, synthetic construct
PMEPAY

SEQ ID NO: 26245 - protein, 6 aa, synthetic construct
PMEPRD

SEQ ID NO: 26246 - protein, 6 aa, synthetic construct
PMEPRE

SEQ ID NO: 26247 - protein, 6 aa, synthetic construct
PMEPRF

SEQ ID NO: 26248 - protein, 6 aa, synthetic construct
PMEPRW

SEQ ID NO: 26249 - protein, 6 aa, synthetic construct
PMEPRY

SEQ ID NO: 26250 - protein, 6 aa, synthetic construct
PMEPND

SEQ ID NO: 26251 - protein, 6 aa, synthetic construct
PMEPNE

SEQ ID NO: 26252 - protein, 6 aa, synthetic construct
PMEPNF

SEQ ID NO: 26253 - protein, 6 aa, synthetic construct
PMEPNW

SEQ ID NO: 26254 - protein, 6 aa, synthetic construct
PMEPNY

SEQ ID NO: 26255 - protein, 6 aa, synthetic construct
PMEPDD

SEQ ID NO: 26256 - protein, 6 aa, synthetic construct
PMEPDE

SEQ ID NO: 26257 - protein, 6 aa, synthetic construct
PMEPDF

SEQ ID NO: 26258 - protein, 6 aa, synthetic construct
PMEPDW

SEQ ID NO: 26259 - protein, 6 aa, synthetic construct
PMEPDY

SEQ ID NO: 26260 - protein, 6 aa, synthetic construct
PMEPCD

SEQ ID NO: 26261 - protein, 6 aa, synthetic construct
PMEPCE

SEQ ID NO: 26262 - protein, 6 aa, synthetic construct
PMEPCF

SEQ ID NO: 26263 - protein, 6 aa, synthetic construct
PMEPCW

SEQ ID NO: 26264 - protein, 6 aa, synthetic construct
PMEPCY

SEQ ID NO: 26265 - protein, 6 aa, synthetic construct
PMEPQD

SEQ ID NO: 26266 - protein, 6 aa, synthetic construct
PMEPQE

SEQ ID NO: 26267 - protein, 6 aa, synthetic construct
PMEPQF

SEQ ID NO: 26268 - protein, 6 aa, synthetic construct
PMEPQW

SEQ ID NO: 26269 - protein, 6 aa, synthetic construct
PMEPQY

SEQ ID NO: 26270 - protein, 6 aa, synthetic construct
PMEPED

SEQ ID NO: 26271 - protein, 6 aa, synthetic construct
PMEPEE

SEQ ID NO: 26272 - protein, 6 aa, synthetic construct
PMEPEF

SEQ ID NO: 26273 - protein, 6 aa, synthetic construct
PMEPEW

SEQ ID NO: 26274 - protein, 6 aa, synthetic construct
PMEPEY

SEQ ID NO: 26275 - protein, 6 aa, synthetic construct
PMEPGD

SEQ ID NO: 26276 - protein, 6 aa, synthetic construct
PMEPGE

SEQ ID NO: 26277 - protein, 6 aa, synthetic construct
PMEPGF

SEQ ID NO: 26278 - protein, 6 aa, synthetic construct
PMEPGW

SEQ ID NO: 26279 - protein, 6 aa, synthetic construct
PMEPGY

SEQ ID NO: 26280 - protein, 6 aa, synthetic construct
PMEPHD

SEQ ID NO: 26281 - protein, 6 aa, synthetic construct
PMEPHE

SEQ ID NO: 26282 - protein, 6 aa, synthetic construct
PMEPHF

SEQ ID NO: 26283 - protein, 6 aa, synthetic construct
PMEPHW

SEQ ID NO: 26284 - protein, 6 aa, synthetic construct
PMEPHY

SEQ ID NO: 26285 - protein, 6 aa, synthetic construct
PMEPID

SEQ ID NO: 26286 - protein, 6 aa, synthetic construct
PMEPIE

SEQ ID NO: 26287 - protein, 6 aa, synthetic construct
PMEPIF

SEQ ID NO: 26288 - protein, 6 aa, synthetic construct
PMEPIW

SEQ ID NO: 26289 - protein, 6 aa, synthetic construct
PMEPIY

SEQ ID NO: 26290 - protein, 6 aa, synthetic construct
PMEPLD

SEQ ID NO: 26291 - protein, 6 aa, synthetic construct
PMEPLE

SEQ ID NO: 26292 - protein, 6 aa, synthetic construct
PMEPLF

SEQ ID NO: 26293 - protein, 6 aa, synthetic construct
PMEPLW

SEQ ID NO: 26294 - protein, 6 aa, synthetic construct
PMEPLY

SEQ ID NO: 26295 - protein, 6 aa, synthetic construct
PMEPKD

SEQ ID NO: 26296 - protein, 6 aa, synthetic construct
PMEPKE

SEQ ID NO: 26297 - protein, 6 aa, synthetic construct
PMEPKF

SEQ ID NO: 26298 - protein, 6 aa, synthetic construct
PMEPKW

SEQ ID NO: 26299 - protein, 6 aa, synthetic construct
PMEPKY

SEQ ID NO: 26300 - protein, 6 aa, synthetic construct
PMEPMD

SEQ ID NO: 26301 - protein, 6 aa, synthetic construct
PMEPME

SEQ ID NO: 26302 - protein, 6 aa, synthetic construct
PMEPMF

SEQ ID NO: 26303 - protein, 6 aa, synthetic construct
PMEPMW

SEQ ID NO: 26304 - protein, 6 aa, synthetic construct
PMEPMY

SEQ ID NO: 26305 - protein, 6 aa, synthetic construct
PMEPFD

SEQ ID NO: 26306 - protein, 6 aa, synthetic construct
PMEPFE

SEQ ID NO: 26307 - protein, 6 aa, synthetic construct
PMEPFF

SEQ ID NO: 26308 - protein, 6 aa, synthetic construct
PMEPFW

SEQ ID NO: 26309 - protein, 6 aa, synthetic construct
PMEPFY

SEQ ID NO: 26310 - protein, 6 aa, synthetic construct
PMEPPD

SEQ ID NO: 26311 - protein, 6 aa, synthetic construct
PMEPPE

SEQ ID NO: 26312 - protein, 6 aa, synthetic construct
PMEPPF

SEQ ID NO: 26313 - protein, 6 aa, synthetic construct
PMEPPW

SEQ ID NO: 26314 - protein, 6 aa, synthetic construct
PMEPPY

SEQ ID NO: 26315 - protein, 6 aa, synthetic construct
PMEPSD

SEQ ID NO: 26316 - protein, 6 aa, synthetic construct
PMEPSE

SEQ ID NO: 26317 - protein, 6 aa, synthetic construct
PMEPSF

SEQ ID NO: 26318 - protein, 6 aa, synthetic construct
PMEPSW

SEQ ID NO: 26319 - protein, 6 aa, synthetic construct
PMEPSY

SEQ ID NO: 26320 - protein, 6 aa, synthetic construct
PMEPTD

SEQ ID NO: 26321 - protein, 6 aa, synthetic construct
PMEPTE

SEQ ID NO: 26322 - protein, 6 aa, synthetic construct
PMEPTF

SEQ ID NO: 26323 - protein, 6 aa, synthetic construct
PMEPTW

SEQ ID NO: 26324 - protein, 6 aa, synthetic construct
PMEPTY

SEQ ID NO: 26325 - protein, 6 aa, synthetic construct
PMEPWD

SEQ ID NO: 26326 - protein, 6 aa, synthetic construct
PMEPWE

SEQ ID NO: 26327 - protein, 6 aa, synthetic construct
PMEPWF

SEQ ID NO: 26328 - protein, 6 aa, synthetic construct
PMEPWW

SEQ ID NO: 26329 - protein, 6 aa, synthetic construct
PMEPWY

SEQ ID NO: 26330 - protein, 6 aa, synthetic construct
PMEPYD

SEQ ID NO: 26331 - protein, 6 aa, synthetic construct
PMEPYE

SEQ ID NO: 26332 - protein, 6 aa, synthetic construct
PMEPYF

SEQ ID NO: 26333 - protein, 6 aa, synthetic construct
PMEPYW

SEQ ID NO: 26334 - protein, 6 aa, synthetic construct
PMEPYY

SEQ ID NO: 26335 - protein, 6 aa, synthetic construct
PMEPVD

SEQ ID NO: 26336 - protein, 6 aa, synthetic construct
PMEPVE

SEQ ID NO: 26337 - protein, 6 aa, synthetic construct
PMEPVF

SEQ ID NO: 26338 - protein, 6 aa, synthetic construct
PMEPVW

SEQ ID NO: 26339 - protein, 6 aa, synthetic construct
PMEPVY

SEQ ID NO: 26340 - protein, 6 aa, synthetic construct
PMESAD

SEQ ID NO: 26341 - protein, 6 aa, synthetic construct
PMESAE

SEQ ID NO: 26342 - protein, 6 aa, synthetic construct
PMESAF

SEQ ID NO: 26343 - protein, 6 aa, synthetic construct
PMESAW

SEQ ID NO: 26344 - protein, 6 aa, synthetic construct
PMESAY

SEQ ID NO: 26345 - protein, 6 aa, synthetic construct
PMESRD

SEQ ID NO: 26346 - protein, 6 aa, synthetic construct
PMESRE

SEQ ID NO: 26347 - protein, 6 aa, synthetic construct
PMESRF

SEQ ID NO: 26348 - protein, 6 aa, synthetic construct
PMESRW

SEQ ID NO: 26349 - protein, 6 aa, synthetic construct
PMESRY

SEQ ID NO: 26350 - protein, 6 aa, synthetic construct
PMESND

SEQ ID NO: 26351 - protein, 6 aa, synthetic construct
PMESNE

SEQ ID NO: 26352 - protein, 6 aa, synthetic construct
PMESNF

SEQ ID NO: 26353 - protein, 6 aa, synthetic construct
PMESNW

SEQ ID NO: 26354 - protein, 6 aa, synthetic construct
PMESNY

SEQ ID NO: 26355 - protein, 6 aa, synthetic construct
PMESDD

SEQ ID NO: 26356 - protein, 6 aa, synthetic construct
PMESDE

SEQ ID NO: 26357 - protein, 6 aa, synthetic construct
PMESDF

SEQ ID NO: 26358 - protein, 6 aa, synthetic construct
PMESDW

SEQ ID NO: 26359 - protein, 6 aa, synthetic construct
PMESDY

SEQ ID NO: 26360 - protein, 6 aa, synthetic construct
PMESCD

SEQ ID NO: 26361 - protein, 6 aa, synthetic construct
PMESCE

SEQ ID NO: 26362 - protein, 6 aa, synthetic construct
PMESCF

SEQ ID NO: 26363 - protein, 6 aa, synthetic construct
PMESCW

SEQ ID NO: 26364 - protein, 6 aa, synthetic construct
PMESCY

SEQ ID NO: 26365 - protein, 6 aa, synthetic construct
PMESQD

SEQ ID NO: 26366 - protein, 6 aa, synthetic construct
PMESQE

SEQ ID NO: 26367 - protein, 6 aa, synthetic construct
PMESQF

SEQ ID NO: 26368 - protein, 6 aa, synthetic construct
PMESQW

SEQ ID NO: 26369 - protein, 6 aa, synthetic construct
PMESQY

SEQ ID NO: 26370 - protein, 6 aa, synthetic construct
PMESED

SEQ ID NO: 26371 - protein, 6 aa, synthetic construct
PMESEE

SEQ ID NO: 26372 - protein, 6 aa, synthetic construct
PMESEF

SEQ ID NO: 26373 - protein, 6 aa, synthetic construct
PMESEW

SEQ ID NO: 26374 - protein, 6 aa, synthetic construct
PMESEY

SEQ ID NO: 26375 - protein, 6 aa, synthetic construct
PMESGD

SEQ ID NO: 26376 - protein, 6 aa, synthetic construct
PMESGE

SEQ ID NO: 26377 - protein, 6 aa, synthetic construct
PMESGF

SEQ ID NO: 26378 - protein, 6 aa, synthetic construct
PMESGW

SEQ ID NO: 26379 - protein, 6 aa, synthetic construct
PMESGY

SEQ ID NO: 26380 - protein, 6 aa, synthetic construct
PMESHD

SEQ ID NO: 26381 - protein, 6 aa, synthetic construct
PMESHE

SEQ ID NO: 26382 - protein, 6 aa, synthetic construct
PMESHF

SEQ ID NO: 26383 - protein, 6 aa, synthetic construct
PMESHW

SEQ ID NO: 26384 - protein, 6 aa, synthetic construct
PMESHY

SEQ ID NO: 26385 - protein, 6 aa, synthetic construct
PMESID

SEQ ID NO: 26386 - protein, 6 aa, synthetic construct
PMESIE

SEQ ID NO: 26387 - protein, 6 aa, synthetic construct
PMESIF

SEQ ID NO: 26388 - protein, 6 aa, synthetic construct
PMESIW

SEQ ID NO: 26389 - protein, 6 aa, synthetic construct
PMESIY

SEQ ID NO: 26390 - protein, 6 aa, synthetic construct
PMESLD

SEQ ID NO: 26391 - protein, 6 aa, synthetic construct
PMESLE

SEQ ID NO: 26392 - protein, 6 aa, synthetic construct
PMESLF

SEQ ID NO: 26393 - protein, 6 aa, synthetic construct
PMESLW

SEQ ID NO: 26394 - protein, 6 aa, synthetic construct
PMESLY

SEQ ID NO: 26395 - protein, 6 aa, synthetic construct
PMESKD

SEQ ID NO: 26396 - protein, 6 aa, synthetic construct
PMESKE

SEQ ID NO: 26397 - protein, 6 aa, synthetic construct
PMESKF

SEQ ID NO: 26398 - protein, 6 aa, synthetic construct
PMESKW

SEQ ID NO: 26399 - protein, 6 aa, synthetic construct
PMESKY

SEQ ID NO: 26400 - protein, 6 aa, synthetic construct
PMESMD

SEQ ID NO: 26401 - protein, 6 aa, synthetic construct
PMESME

SEQ ID NO: 26402 - protein, 6 aa, synthetic construct
PMESMF

SEQ ID NO: 26403 - protein, 6 aa, synthetic construct
PMESMW

SEQ ID NO: 26404 - protein, 6 aa, synthetic construct
PMESMY

SEQ ID NO: 26405 - protein, 6 aa, synthetic construct
PMESFD

SEQ ID NO: 26406 - protein, 6 aa, synthetic construct
PMESFE

SEQ ID NO: 26407 - protein, 6 aa, synthetic construct
PMESFF

SEQ ID NO: 26408 - protein, 6 aa, synthetic construct
PMESFW

SEQ ID NO: 26409 - protein, 6 aa, synthetic construct
PMESFY

SEQ ID NO: 26410 - protein, 6 aa, synthetic construct
PMESPD

SEQ ID NO: 26411 - protein, 6 aa, synthetic construct
PMESPE

SEQ ID NO: 26412 - protein, 6 aa, synthetic construct
PMESPF

SEQ ID NO: 26413 - protein, 6 aa, synthetic construct
PMESPW

SEQ ID NO: 26414 - protein, 6 aa, synthetic construct
PMESPY

SEQ ID NO: 26415 - protein, 6 aa, synthetic construct
PMESSD

SEQ ID NO: 26416 - protein, 6 aa, synthetic construct
PMESSE

SEQ ID NO: 26417 - protein, 6 aa, synthetic construct
PMESSF

SEQ ID NO: 26418 - protein, 6 aa, synthetic construct
PMESSW

SEQ ID NO: 26419 - protein, 6 aa, synthetic construct
PMESSY

SEQ ID NO: 26420 - protein, 6 aa, synthetic construct
PMESTD

SEQ ID NO: 26421 - protein, 6 aa, synthetic construct
PMESTE

SEQ ID NO: 26422 - protein, 6 aa, synthetic construct
PMESTF

SEQ ID NO: 26423 - protein, 6 aa, synthetic construct
PMESTW

SEQ ID NO: 26424 - protein, 6 aa, synthetic construct
PMESTY

SEQ ID NO: 26425 - protein, 6 aa, synthetic construct
PMESWD

SEQ ID NO: 26426 - protein, 6 aa, synthetic construct
PMESWE

SEQ ID NO: 26427 - protein, 6 aa, synthetic construct
PMESWF

SEQ ID NO: 26428 - protein, 6 aa, synthetic construct
PMESWW

SEQ ID NO: 26429 - protein, 6 aa, synthetic construct
PMESWY

SEQ ID NO: 26430 - protein, 6 aa, synthetic construct
PMESYD

SEQ ID NO: 26431 - protein, 6 aa, synthetic construct
PMESYE

SEQ ID NO: 26432 - protein, 6 aa, synthetic construct
PMESYF

SEQ ID NO: 26433 - protein, 6 aa, synthetic construct
PMESYW

SEQ ID NO: 26434 - protein, 6 aa, synthetic construct
PMESYY

SEQ ID NO: 26435 - protein, 6 aa, synthetic construct
PMESVD

SEQ ID NO: 26436 - protein, 6 aa, synthetic construct
PMESVE

SEQ ID NO: 26437 - protein, 6 aa, synthetic construct
PMESVF

SEQ ID NO: 26438 - protein, 6 aa, synthetic construct
PMESVW

SEQ ID NO: 26439 - protein, 6 aa, synthetic construct
PMESVY

SEQ ID NO: 26440 - protein, 6 aa, synthetic construct
PMETAD

SEQ ID NO: 26441 - protein, 6 aa, synthetic construct
PMETAE

SEQ ID NO: 26442 - protein, 6 aa, synthetic construct
PMETAF

SEQ ID NO: 26443 - protein, 6 aa, synthetic construct
PMETAW

SEQ ID NO: 26444 - protein, 6 aa, synthetic construct
PMETAY

SEQ ID NO: 26445 - protein, 6 aa, synthetic construct
PMETRD

SEQ ID NO: 26446 - protein, 6 aa, synthetic construct
PMETRE

SEQ ID NO: 26447 - protein, 6 aa, synthetic construct
PMETRF

SEQ ID NO: 26448 - protein, 6 aa, synthetic construct
PMETRW

SEQ ID NO: 26449 - protein, 6 aa, synthetic construct
PMETRY

SEQ ID NO: 26450 - protein, 6 aa, synthetic construct
PMETND

SEQ ID NO: 26451 - protein, 6 aa, synthetic construct
PMETNE

SEQ ID NO: 26452 - protein, 6 aa, synthetic construct
PMETNF

SEQ ID NO: 26453 - protein, 6 aa, synthetic construct
PMETNW

SEQ ID NO: 26454 - protein, 6 aa, synthetic construct
PMETNY

SEQ ID NO: 26455 - protein, 6 aa, synthetic construct
PMETDD

SEQ ID NO: 26456 - protein, 6 aa, synthetic construct
PMETDE

SEQ ID NO: 26457 - protein, 6 aa, synthetic construct
PMETDF

SEQ ID NO: 26458 - protein, 6 aa, synthetic construct
PMETDW

SEQ ID NO: 26459 - protein, 6 aa, synthetic construct
PMETDY

SEQ ID NO: 26460 - protein, 6 aa, synthetic construct
PMETCD

SEQ ID NO: 26461 - protein, 6 aa, synthetic construct
PMETCE

SEQ ID NO: 26462 - protein, 6 aa, synthetic construct
PMETCF

SEQ ID NO: 26463 - protein, 6 aa, synthetic construct
PMETCW

SEQ ID NO: 26464 - protein, 6 aa, synthetic construct
PMETCY

SEQ ID NO: 26465 - protein, 6 aa, synthetic construct
PMETQD

SEQ ID NO: 26466 - protein, 6 aa, synthetic construct
PMETQE

SEQ ID NO: 26467 - protein, 6 aa, synthetic construct
PMETQF

SEQ ID NO: 26468 - protein, 6 aa, synthetic construct
PMETQW

SEQ ID NO: 26469 - protein, 6 aa, synthetic construct
PMETQY

SEQ ID NO: 26470 - protein, 6 aa, synthetic construct
PMETED

SEQ ID NO: 26471 - protein, 6 aa, synthetic construct
PMETEE

SEQ ID NO: 26472 - protein, 6 aa, synthetic construct
PMETEF

SEQ ID NO: 26473 - protein, 6 aa, synthetic construct
PMETEW

SEQ ID NO: 26474 - protein, 6 aa, synthetic construct
PMETEY

SEQ ID NO: 26475 - protein, 6 aa, synthetic construct
PMETGD

SEQ ID NO: 26476 - protein, 6 aa, synthetic construct
PMETGE

SEQ ID NO: 26477 - protein, 6 aa, synthetic construct
PMETGF

SEQ ID NO: 26478 - protein, 6 aa, synthetic construct
PMETGW

SEQ ID NO: 26479 - protein, 6 aa, synthetic construct
PMETGY

SEQ ID NO: 26480 - protein, 6 aa, synthetic construct
PMETHD

SEQ ID NO: 26481 - protein, 6 aa, synthetic construct
PMETHE

SEQ ID NO: 26482 - protein, 6 aa, synthetic construct
PMETHF

SEQ ID NO: 26483 - protein, 6 aa, synthetic construct
PMETHW

SEQ ID NO: 26484 - protein, 6 aa, synthetic construct
PMETHY

SEQ ID NO: 26485 - protein, 6 aa, synthetic construct
PMETID

SEQ ID NO: 26486 - protein, 6 aa, synthetic construct
PMETIE

SEQ ID NO: 26487 - protein, 6 aa, synthetic construct
PMETIF

SEQ ID NO: 26488 - protein, 6 aa, synthetic construct
PMETIW

SEQ ID NO: 26489 - protein, 6 aa, synthetic construct
PMETIY

SEQ ID NO: 26490 - protein, 6 aa, synthetic construct
PMETLD

SEQ ID NO: 26491 - protein, 6 aa, synthetic construct
PMETLE

SEQ ID NO: 26492 - protein, 6 aa, synthetic construct
PMETLF

SEQ ID NO: 26493 - protein, 6 aa, synthetic construct
PMETLW

SEQ ID NO: 26494 - protein, 6 aa, synthetic construct
PMETLY

SEQ ID NO: 26495 - protein, 6 aa, synthetic construct
PMETKD

SEQ ID NO: 26496 - protein, 6 aa, synthetic construct
PMETKE

SEQ ID NO: 26497 - protein, 6 aa, synthetic construct
PMETKF

SEQ ID NO: 26498 - protein, 6 aa, synthetic construct
PMETKW

SEQ ID NO: 26499 - protein, 6 aa, synthetic construct
PMETKY

SEQ ID NO: 26500 - protein, 6 aa, synthetic construct
PMETMD

SEQ ID NO: 26501 - protein, 6 aa, synthetic construct
PMETME

SEQ ID NO: 26502 - protein, 6 aa, synthetic construct
PMETMF

SEQ ID NO: 26503 - protein, 6 aa, synthetic construct
PMETMW

SEQ ID NO: 26504 - protein, 6 aa, synthetic construct
PMETMY

SEQ ID NO: 26505 - protein, 6 aa, synthetic construct
PMETFD

SEQ ID NO: 26506 - protein, 6 aa, synthetic construct
PMETFE

SEQ ID NO: 26507 - protein, 6 aa, synthetic construct
PMETFF

SEQ ID NO: 26508 - protein, 6 aa, synthetic construct
PMETFW

SEQ ID NO: 26509 - protein, 6 aa, synthetic construct
PMETFY

SEQ ID NO: 26510 - protein, 6 aa, synthetic construct
PMETPD

SEQ ID NO: 26511 - protein, 6 aa, synthetic construct
PMETPE

SEQ ID NO: 26512 - protein, 6 aa, synthetic construct
PMETPF

SEQ ID NO: 26513 - protein, 6 aa, synthetic construct
PMETPW

SEQ ID NO: 26514 - protein, 6 aa, synthetic construct
PMETPY

SEQ ID NO: 26515 - protein, 6 aa, synthetic construct
PMETSD

SEQ ID NO: 26516 - protein, 6 aa, synthetic construct
PMETSE

SEQ ID NO: 26517 - protein, 6 aa, synthetic construct
PMETSF

SEQ ID NO: 26518 - protein, 6 aa, synthetic construct
PMETSW

SEQ ID NO: 26519 - protein, 6 aa, synthetic construct
PMETSY

SEQ ID NO: 26520 - protein, 6 aa, synthetic construct
PMETTD

SEQ ID NO: 26521 - protein, 6 aa, synthetic construct
PMETTE

SEQ ID NO: 26522 - protein, 6 aa, synthetic construct
PMETTF

SEQ ID NO: 26523 - protein, 6 aa, synthetic construct
PMETTW

SEQ ID NO: 26524 - protein, 6 aa, synthetic construct
PMETTY

SEQ ID NO: 26525 - protein, 6 aa, synthetic construct
PMETWD

SEQ ID NO: 26526 - protein, 6 aa, synthetic construct
PMETWE

SEQ ID NO: 26527 - protein, 6 aa, synthetic construct
PMETWF

SEQ ID NO: 26528 - protein, 6 aa, synthetic construct
PMETWW

SEQ ID NO: 26529 - protein, 6 aa, synthetic construct
PMETWY

SEQ ID NO: 26530 - protein, 6 aa, synthetic construct
PMETYD

SEQ ID NO: 26531 - protein, 6 aa, synthetic construct
PMETYE

SEQ ID NO: 26532 - protein, 6 aa, synthetic construct
PMETYF

SEQ ID NO: 26533 - protein, 6 aa, synthetic construct
PMETYW

SEQ ID NO: 26534 - protein, 6 aa, synthetic construct
PMETYY

SEQ ID NO: 26535 - protein, 6 aa, synthetic construct
PMETVD

SEQ ID NO: 26536 - protein, 6 aa, synthetic construct
PMETVE

SEQ ID NO: 26537 - protein, 6 aa, synthetic construct
PMETVF

SEQ ID NO: 26538 - protein, 6 aa, synthetic construct
PMETVW

SEQ ID NO: 26539 - protein, 6 aa, synthetic construct
PMETVY

SEQ ID NO: 26540 - protein, 6 aa, synthetic construct
PMEWAD

SEQ ID NO: 26541 - protein, 6 aa, synthetic construct
PMEWAE

SEQ ID NO: 26542 - protein, 6 aa, synthetic construct
PMEWAF

SEQ ID NO: 26543 - protein, 6 aa, synthetic construct
PMEWAW

SEQ ID NO: 26544 - protein, 6 aa, synthetic construct
PMEWAY

SEQ ID NO: 26545 - protein, 6 aa, synthetic construct
PMEWRD

SEQ ID NO: 26546 - protein, 6 aa, synthetic construct
PMEWRE

SEQ ID NO: 26547 - protein, 6 aa, synthetic construct
PMEWRF

SEQ ID NO: 26548 - protein, 6 aa, synthetic construct
PMEWRW

SEQ ID NO: 26549 - protein, 6 aa, synthetic construct
PMEWRY

SEQ ID NO: 26550 - protein, 6 aa, synthetic construct
PMEWND

SEQ ID NO: 26551 - protein, 6 aa, synthetic construct
PMEWNE

SEQ ID NO: 26552 - protein, 6 aa, synthetic construct
PMEWNF

SEQ ID NO: 26553 - protein, 6 aa, synthetic construct
PMEWNW

SEQ ID NO: 26554 - protein, 6 aa, synthetic construct
PMEWNY

SEQ ID NO: 26555 - protein, 6 aa, synthetic construct
PMEWDD

SEQ ID NO: 26556 - protein, 6 aa, synthetic construct
PMEWDE

SEQ ID NO: 26557 - protein, 6 aa, synthetic construct
PMEWDF

SEQ ID NO: 26558 - protein, 6 aa, synthetic construct
PMEWDW

SEQ ID NO: 26559 - protein, 6 aa, synthetic construct
PMEWDY

SEQ ID NO: 26560 - protein, 6 aa, synthetic construct
PMEWCD

SEQ ID NO: 26561 - protein, 6 aa, synthetic construct
PMEWCE

SEQ ID NO: 26562 - protein, 6 aa, synthetic construct
PMEWCF

SEQ ID NO: 26563 - protein, 6 aa, synthetic construct
PMEWCW

SEQ ID NO: 26564 - protein, 6 aa, synthetic construct
PMEWCY

SEQ ID NO: 26565 - protein, 6 aa, synthetic construct
PMEWQD

SEQ ID NO: 26566 - protein, 6 aa, synthetic construct
PMEWQE

SEQ ID NO: 26567 - protein, 6 aa, synthetic construct
PMEWQF

SEQ ID NO: 26568 - protein, 6 aa, synthetic construct
PMEWQW

SEQ ID NO: 26569 - protein, 6 aa, synthetic construct
PMEWQY

SEQ ID NO: 26570 - protein, 6 aa, synthetic construct
PMEWED

SEQ ID NO: 26571 - protein, 6 aa, synthetic construct
PMEWEE

SEQ ID NO: 26572 - protein, 6 aa, synthetic construct
PMEWEF

SEQ ID NO: 26573 - protein, 6 aa, synthetic construct
PMEWEW

SEQ ID NO: 26574 - protein, 6 aa, synthetic construct
PMEWEY

SEQ ID NO: 26575 - protein, 6 aa, synthetic construct
PMEWGD

SEQ ID NO: 26576 - protein, 6 aa, synthetic construct
PMEWGE

SEQ ID NO: 26577 - protein, 6 aa, synthetic construct
PMEWGF

SEQ ID NO: 26578 - protein, 6 aa, synthetic construct
PMEWGW

SEQ ID NO: 26579 - protein, 6 aa, synthetic construct
PMEWGY

SEQ ID NO: 26580 - protein, 6 aa, synthetic construct
PMEWHD

SEQ ID NO: 26581 - protein, 6 aa, synthetic construct
PMEWHE

SEQ ID NO: 26582 - protein, 6 aa, synthetic construct
PMEWHF

SEQ ID NO: 26583 - protein, 6 aa, synthetic construct
PMEWHW

SEQ ID NO: 26584 - protein, 6 aa, synthetic construct
PMEWHY

SEQ ID NO: 26585 - protein, 6 aa, synthetic construct
PMEWID

SEQ ID NO: 26586 - protein, 6 aa, synthetic construct
PMEWIE

SEQ ID NO: 26587 - protein, 6 aa, synthetic construct
PMEWIF

SEQ ID NO: 26588 - protein, 6 aa, synthetic construct
PMEWIW

SEQ ID NO: 26589 - protein, 6 aa, synthetic construct
PMEWIY

SEQ ID NO: 26590 - protein, 6 aa, synthetic construct
PMEWLD

SEQ ID NO: 26591 - protein, 6 aa, synthetic construct
PMEWLE

SEQ ID NO: 26592 - protein, 6 aa, synthetic construct
PMEWLF

SEQ ID NO: 26593 - protein, 6 aa, synthetic construct
PMEWLW

SEQ ID NO: 26594 - protein, 6 aa, synthetic construct
PMEWLY

SEQ ID NO: 26595 - protein, 6 aa, synthetic construct
PMEWKD

SEQ ID NO: 26596 - protein, 6 aa, synthetic construct
PMEWKE

SEQ ID NO: 26597 - protein, 6 aa, synthetic construct
PMEWKF

SEQ ID NO: 26598 - protein, 6 aa, synthetic construct
PMEWKW

SEQ ID NO: 26599 - protein, 6 aa, synthetic construct
PMEWKY

SEQ ID NO: 26600 - protein, 6 aa, synthetic construct
PMEWMD

SEQ ID NO: 26601 - protein, 6 aa, synthetic construct
PMEWME

SEQ ID NO: 26602 - protein, 6 aa, synthetic construct
PMEWMF

SEQ ID NO: 26603 - protein, 6 aa, synthetic construct
PMEWMW

SEQ ID NO: 26604 - protein, 6 aa, synthetic construct
PMEWMY

SEQ ID NO: 26605 - protein, 6 aa, synthetic construct
PMEWFD

SEQ ID NO: 26606 - protein, 6 aa, synthetic construct
PMEWFE

SEQ ID NO: 26607 - protein, 6 aa, synthetic construct
PMEWFF

SEQ ID NO: 26608 - protein, 6 aa, synthetic construct
PMEWFW

SEQ ID NO: 26609 - protein, 6 aa, synthetic construct
PMEWFY

SEQ ID NO: 26610 - protein, 6 aa, synthetic construct
PMEWPD

SEQ ID NO: 26611 - protein, 6 aa, synthetic construct
PMEWPE

SEQ ID NO: 26612 - protein, 6 aa, synthetic construct
PMEWPF

SEQ ID NO: 26613 - protein, 6 aa, synthetic construct
PMEWPW

SEQ ID NO: 26614 - protein, 6 aa, synthetic construct
PMEWPY

SEQ ID NO: 26615 - protein, 6 aa, synthetic construct
PMEWSD

SEQ ID NO: 26616 - protein, 6 aa, synthetic construct
PMEWSE

SEQ ID NO: 26617 - protein, 6 aa, synthetic construct
PMEWSF

SEQ ID NO: 26618 - protein, 6 aa, synthetic construct
PMEWSW

SEQ ID NO: 26619 - protein, 6 aa, synthetic construct
PMEWSY

SEQ ID NO: 26620 - protein, 6 aa, synthetic construct
PMEWTD

SEQ ID NO: 26621 - protein, 6 aa, synthetic construct
PMEWTE

SEQ ID NO: 26622 - protein, 6 aa, synthetic construct
PMEWTF

SEQ ID NO: 26623 - protein, 6 aa, synthetic construct
PMEWTW

SEQ ID NO: 26624 - protein, 6 aa, synthetic construct
PMEWTY

SEQ ID NO: 26625 - protein, 6 aa, synthetic construct
PMEWWD

SEQ ID NO: 26626 - protein, 6 aa, synthetic construct
PMEWWE

SEQ ID NO: 26627 - protein, 6 aa, synthetic construct
PMEWWF

SEQ ID NO: 26628 - protein, 6 aa, synthetic construct
PMEWWW

SEQ ID NO: 26629 - protein, 6 aa, synthetic construct
PMEWWY

SEQ ID NO: 26630 - protein, 6 aa, synthetic construct
PMEWYD

SEQ ID NO: 26631 - protein, 6 aa, synthetic construct
PMEWYE

SEQ ID NO: 26632 - protein, 6 aa, synthetic construct
PMEWYF

SEQ ID NO: 26633 - protein, 6 aa, synthetic construct
PMEWYW

SEQ ID NO: 26634 - protein, 6 aa, synthetic construct
PMEWYY

SEQ ID NO: 26635 - protein, 6 aa, synthetic construct
PMEWVD

SEQ ID NO: 26636 - protein, 6 aa, synthetic construct
PMEWVE

SEQ ID NO: 26637 - protein, 6 aa, synthetic construct
PMEWVF

SEQ ID NO: 26638 - protein, 6 aa, synthetic construct
PMEWVW

SEQ ID NO: 26639 - protein, 6 aa, synthetic construct
PMEWVY

SEQ ID NO: 26640 - protein, 6 aa, synthetic construct
PMEYAD

SEQ ID NO: 26641 - protein, 6 aa, synthetic construct
PMEYAE

SEQ ID NO: 26642 - protein, 6 aa, synthetic construct
PMEYAF

SEQ ID NO: 26643 - protein, 6 aa, synthetic construct
PMEYAW

SEQ ID NO: 26644 - protein, 6 aa, synthetic construct
PMEYAY

SEQ ID NO: 26645 - protein, 6 aa, synthetic construct
PMEYRD

SEQ ID NO: 26646 - protein, 6 aa, synthetic construct
PMEYRE

SEQ ID NO: 26647 - protein, 6 aa, synthetic construct
PMEYRF

SEQ ID NO: 26648 - protein, 6 aa, synthetic construct
PMEYRW

SEQ ID NO: 26649 - protein, 6 aa, synthetic construct
PMEYRY

SEQ ID NO: 26650 - protein, 6 aa, synthetic construct
PMEYND

SEQ ID NO: 26651 - protein, 6 aa, synthetic construct
PMEYNE

SEQ ID NO: 26652 - protein, 6 aa, synthetic construct
PMEYNF

SEQ ID NO: 26653 - protein, 6 aa, synthetic construct
PMEYNW

SEQ ID NO: 26654 - protein, 6 aa, synthetic construct
PMEYNY

SEQ ID NO: 26655 - protein, 6 aa, synthetic construct
PMEYDD

SEQ ID NO: 26656 - protein, 6 aa, synthetic construct
PMEYDE

SEQ ID NO: 26657 - protein, 6 aa, synthetic construct
PMEYDF

SEQ ID NO: 26658 - protein, 6 aa, synthetic construct
PMEYDW

SEQ ID NO: 26659 - protein, 6 aa, synthetic construct
PMEYDY

SEQ ID NO: 26660 - protein, 6 aa, synthetic construct
PMEYCD

SEQ ID NO: 26661 - protein, 6 aa, synthetic construct
PMEYCE

SEQ ID NO: 26662 - protein, 6 aa, synthetic construct
PMEYCF

SEQ ID NO: 26663 - protein, 6 aa, synthetic construct
PMEYCW

SEQ ID NO: 26664 - protein, 6 aa, synthetic construct
PMEYCY

SEQ ID NO: 26665 - protein, 6 aa, synthetic construct
PMEYQD

SEQ ID NO: 26666 - protein, 6 aa, synthetic construct
PMEYQE

SEQ ID NO: 26667 - protein, 6 aa, synthetic construct
PMEYQF

SEQ ID NO: 26668 - protein, 6 aa, synthetic construct
PMEYQW

SEQ ID NO: 26669 - protein, 6 aa, synthetic construct
PMEYQY

SEQ ID NO: 26670 - protein, 6 aa, synthetic construct
PMEYED

SEQ ID NO: 26671 - protein, 6 aa, synthetic construct
PMEYEE

SEQ ID NO: 26672 - protein, 6 aa, synthetic construct
PMEYEF

SEQ ID NO: 26673 - protein, 6 aa, synthetic construct
PMEYEW

SEQ ID NO: 26674 - protein, 6 aa, synthetic construct
PMEYEY

SEQ ID NO: 26675 - protein, 6 aa, synthetic construct
PMEYGD

SEQ ID NO: 26676 - protein, 6 aa, synthetic construct
PMEYGE

SEQ ID NO: 26677 - protein, 6 aa, synthetic construct
PMEYGF

SEQ ID NO: 26678 - protein, 6 aa, synthetic construct
PMEYGW

SEQ ID NO: 26679 - protein, 6 aa, synthetic construct
PMEYGY

SEQ ID NO: 26680 - protein, 6 aa, synthetic construct
PMEYHD

SEQ ID NO: 26681 - protein, 6 aa, synthetic construct
PMEYHE

SEQ ID NO: 26682 - protein, 6 aa, synthetic construct
PMEYHF

SEQ ID NO: 26683 - protein, 6 aa, synthetic construct
PMEYHW

SEQ ID NO: 26684 - protein, 6 aa, synthetic construct
PMEYHY

SEQ ID NO: 26685 - protein, 6 aa, synthetic construct
PMEYID

SEQ ID NO: 26686 - protein, 6 aa, synthetic construct
PMEYIE

SEQ ID NO: 26687 - protein, 6 aa, synthetic construct
PMEYIF

SEQ ID NO: 26688 - protein, 6 aa, synthetic construct
PMEYIW

SEQ ID NO: 26689 - protein, 6 aa, synthetic construct
PMEYIY

SEQ ID NO: 26690 - protein, 6 aa, synthetic construct
PMEYLD

SEQ ID NO: 26691 - protein, 6 aa, synthetic construct
PMEYLE

SEQ ID NO: 26692 - protein, 6 aa, synthetic construct
PMEYLF

SEQ ID NO: 26693 - protein, 6 aa, synthetic construct
PMEYLW

SEQ ID NO: 26694 - protein, 6 aa, synthetic construct
PMEYLY

SEQ ID NO: 26695 - protein, 6 aa, synthetic construct
PMEYKD

SEQ ID NO: 26696 - protein, 6 aa, synthetic construct
PMEYKE

SEQ ID NO: 26697 - protein, 6 aa, synthetic construct
PMEYKF

SEQ ID NO: 26698 - protein, 6 aa, synthetic construct
PMEYKW

SEQ ID NO: 26699 - protein, 6 aa, synthetic construct
PMEYKY

SEQ ID NO: 26700 - protein, 6 aa, synthetic construct
PMEYMD

SEQ ID NO: 26701 - protein, 6 aa, synthetic construct
PMEYME

SEQ ID NO: 26702 - protein, 6 aa, synthetic construct
PMEYMF

SEQ ID NO: 26703 - protein, 6 aa, synthetic construct
PMEYMW

SEQ ID NO: 26704 - protein, 6 aa, synthetic construct
PMEYMY

SEQ ID NO: 26705 - protein, 6 aa, synthetic construct
PMEYFD

SEQ ID NO: 26706 - protein, 6 aa, synthetic construct
PMEYFE

SEQ ID NO: 26707 - protein, 6 aa, synthetic construct
PMEYFF

SEQ ID NO: 26708 - protein, 6 aa, synthetic construct
PMEYFW

SEQ ID NO: 26709 - protein, 6 aa, synthetic construct
PMEYFY

SEQ ID NO: 26710 - protein, 6 aa, synthetic construct
PMEYPD

SEQ ID NO: 26711 - protein, 6 aa, synthetic construct
PMEYPE

SEQ ID NO: 26712 - protein, 6 aa, synthetic construct
PMEYPF

SEQ ID NO: 26713 - protein, 6 aa, synthetic construct
PMEYPW

SEQ ID NO: 26714 - protein, 6 aa, synthetic construct
PMEYPY

SEQ ID NO: 26715 - protein, 6 aa, synthetic construct
PMEYSD

SEQ ID NO: 26716 - protein, 6 aa, synthetic construct
PMEYSE

SEQ ID NO: 26717 - protein, 6 aa, synthetic construct
PMEYSF

SEQ ID NO: 26718 - protein, 6 aa, synthetic construct
PMEYSW

SEQ ID NO: 26719 - protein, 6 aa, synthetic construct
PMEYSY

SEQ ID NO: 26720 - protein, 6 aa, synthetic construct
PMEYTD

SEQ ID NO: 26721 - protein, 6 aa, synthetic construct
PMEYTE

SEQ ID NO: 26722 - protein, 6 aa, synthetic construct
PMEYTF

SEQ ID NO: 26723 - protein, 6 aa, synthetic construct
PMEYTW

SEQ ID NO: 26724 - protein, 6 aa, synthetic construct
PMEYTY

SEQ ID NO: 26725 - protein, 6 aa, synthetic construct
PMEYWD

SEQ ID NO: 26726 - protein, 6 aa, synthetic construct
PMEYWE

SEQ ID NO: 26727 - protein, 6 aa, synthetic construct
PMEYWF

SEQ ID NO: 26728 - protein, 6 aa, synthetic construct
PMEYWW

SEQ ID NO: 26729 - protein, 6 aa, synthetic construct
PMEYWY

SEQ ID NO: 26730 - protein, 6 aa, synthetic construct
PMEYYD

SEQ ID NO: 26731 - protein, 6 aa, synthetic construct
PMEYYE

SEQ ID NO: 26732 - protein, 6 aa, synthetic construct
PMEYYF

SEQ ID NO: 26733 - protein, 6 aa, synthetic construct
PMEYYW

SEQ ID NO: 26734 - protein, 6 aa, synthetic construct
PMEYYY

SEQ ID NO: 26735 - protein, 6 aa, synthetic construct
PMEYVD

SEQ ID NO: 26736 - protein, 6 aa, synthetic construct
PMEYVE

SEQ ID NO: 26737 - protein, 6 aa, synthetic construct
PMEYVF

SEQ ID NO: 26738 - protein, 6 aa, synthetic construct
PMEYVW

SEQ ID NO: 26739 - protein, 6 aa, synthetic construct
PMEYVY

SEQ ID NO: 26740 - protein, 6 aa, synthetic construct
PMEVAD

SEQ ID NO: 26741 - protein, 6 aa, synthetic construct
PMEVAE

SEQ ID NO: 26742 - protein, 6 aa, synthetic construct
PMEVAF

SEQ ID NO: 26743 - protein, 6 aa, synthetic construct
PMEVAW

SEQ ID NO: 26744 - protein, 6 aa, synthetic construct
PMEVAY

SEQ ID NO: 26745 - protein, 6 aa, synthetic construct
PMEVRD

SEQ ID NO: 26746 - protein, 6 aa, synthetic construct
PMEVRE

SEQ ID NO: 26747 - protein, 6 aa, synthetic construct
PMEVRF

SEQ ID NO: 26748 - protein, 6 aa, synthetic construct
PMEVRW

SEQ ID NO: 26749 - protein, 6 aa, synthetic construct
PMEVRY

SEQ ID NO: 26750 - protein, 6 aa, synthetic construct
PMEVND

SEQ ID NO: 26751 - protein, 6 aa, synthetic construct
PMEVNE

SEQ ID NO: 26752 - protein, 6 aa, synthetic construct
PMEVNF

SEQ ID NO: 26753 - protein, 6 aa, synthetic construct
PMEVNW

SEQ ID NO: 26754 - protein, 6 aa, synthetic construct
PMEVNY

SEQ ID NO: 26755 - protein, 6 aa, synthetic construct
PMEVDD

SEQ ID NO: 26756 - protein, 6 aa, synthetic construct
PMEVDE

SEQ ID NO: 26757 - protein, 6 aa, synthetic construct
PMEVDF

SEQ ID NO: 26758 - protein, 6 aa, synthetic construct
PMEVDW

SEQ ID NO: 26759 - protein, 6 aa, synthetic construct
PMEVDY

SEQ ID NO: 26760 - protein, 6 aa, synthetic construct
PMEVCD

SEQ ID NO: 26761 - protein, 6 aa, synthetic construct
PMEVCE

SEQ ID NO: 26762 - protein, 6 aa, synthetic construct
PMEVCF

SEQ ID NO: 26763 - protein, 6 aa, synthetic construct
PMEVCW

SEQ ID NO: 26764 - protein, 6 aa, synthetic construct
PMEVCY

SEQ ID NO: 26765 - protein, 6 aa, synthetic construct
PMEVQD

SEQ ID NO: 26766 - protein, 6 aa, synthetic construct
PMEVQE

SEQ ID NO: 26767 - protein, 6 aa, synthetic construct
PMEVQF

SEQ ID NO: 26768 - protein, 6 aa, synthetic construct
PMEVQW

SEQ ID NO: 26769 - protein, 6 aa, synthetic construct
PMEVQY

SEQ ID NO: 26770 - protein, 6 aa, synthetic construct
PMEVED

SEQ ID NO: 26771 - protein, 6 aa, synthetic construct
PMEVEE

SEQ ID NO: 26772 - protein, 6 aa, synthetic construct
PMEVEF

SEQ ID NO: 26773 - protein, 6 aa, synthetic construct
PMEVEW

SEQ ID NO: 26774 - protein, 6 aa, synthetic construct
PMEVEY

SEQ ID NO: 26775 - protein, 6 aa, synthetic construct
PMEVGD

SEQ ID NO: 26776 - protein, 6 aa, synthetic construct
PMEVGE

SEQ ID NO: 26777 - protein, 6 aa, synthetic construct
PMEVGF

SEQ ID NO: 26778 - protein, 6 aa, synthetic construct
PMEVGW

SEQ ID NO: 26779 - protein, 6 aa, synthetic construct
PMEVGY

SEQ ID NO: 26780 - protein, 6 aa, synthetic construct
PMEVHD

SEQ ID NO: 26781 - protein, 6 aa, synthetic construct
PMEVHE

SEQ ID NO: 26782 - protein, 6 aa, synthetic construct
PMEVHF

SEQ ID NO: 26783 - protein, 6 aa, synthetic construct
PMEVHW

SEQ ID NO: 26784 - protein, 6 aa, synthetic construct
PMEVHY

SEQ ID NO: 26785 - protein, 6 aa, synthetic construct
PMEVID

SEQ ID NO: 26786 - protein, 6 aa, synthetic construct
PMEVIE

SEQ ID NO: 26787 - protein, 6 aa, synthetic construct
PMEVIF

SEQ ID NO: 26788 - protein, 6 aa, synthetic construct
PMEVIW

SEQ ID NO: 26789 - protein, 6 aa, synthetic construct
PMEVIY

SEQ ID NO: 26790 - protein, 6 aa, synthetic construct
PMEVLD

SEQ ID NO: 26791 - protein, 6 aa, synthetic construct
PMEVLE

SEQ ID NO: 26792 - protein, 6 aa, synthetic construct
PMEVLF

SEQ ID NO: 26793 - protein, 6 aa, synthetic construct
PMEVLW

SEQ ID NO: 26794 - protein, 6 aa, synthetic construct
PMEVLY

SEQ ID NO: 26795 - protein, 6 aa, synthetic construct
PMEVKD

SEQ ID NO: 26796 - protein, 6 aa, synthetic construct
PMEVKE

SEQ ID NO: 26797 - protein, 6 aa, synthetic construct
PMEVKF

SEQ ID NO: 26798 - protein, 6 aa, synthetic construct
PMEVKW

SEQ ID NO: 26799 - protein, 6 aa, synthetic construct
PMEVKY

SEQ ID NO: 26800 - protein, 6 aa, synthetic construct
PMEVMD

SEQ ID NO: 26801 - protein, 6 aa, synthetic construct
PMEVME

SEQ ID NO: 26802 - protein, 6 aa, synthetic construct
PMEVMF

SEQ ID NO: 26803 - protein, 6 aa, synthetic construct
PMEVMW

SEQ ID NO: 26804 - protein, 6 aa, synthetic construct
PMEVMY

SEQ ID NO: 26805 - protein, 6 aa, synthetic construct
PMEVFD

SEQ ID NO: 26806 - protein, 6 aa, synthetic construct
PMEVFE

SEQ ID NO: 26807 - protein, 6 aa, synthetic construct
PMEVFF

SEQ ID NO: 26808 - protein, 6 aa, synthetic construct
PMEVFW

SEQ ID NO: 26809 - protein, 6 aa, synthetic construct
PMEVFY

SEQ ID NO: 26810 - protein, 6 aa, synthetic construct
PMEVPD

SEQ ID NO: 26811 - protein, 6 aa, synthetic construct
PMEVPE

SEQ ID NO: 26812 - protein, 6 aa, synthetic construct
PMEVPF

SEQ ID NO: 26813 - protein, 6 aa, synthetic construct
PMEVPW

SEQ ID NO: 26814 - protein, 6 aa, synthetic construct
PMEVPY

SEQ ID NO: 26815 - protein, 6 aa, synthetic construct
PMEVSD

SEQ ID NO: 26816 - protein, 6 aa, synthetic construct
PMEVSE

SEQ ID NO: 26817 - protein, 6 aa, synthetic construct
PMEVSF

SEQ ID NO: 26818 - protein, 6 aa, synthetic construct
PMEVSW

SEQ ID NO: 26819 - protein, 6 aa, synthetic construct
PMEVSY

SEQ ID NO: 26820 - protein, 6 aa, synthetic construct
PMEVTD

SEQ ID NO: 26821 - protein, 6 aa, synthetic construct
PMEVTE

SEQ ID NO: 26822 - protein, 6 aa, synthetic construct
PMEVTF

SEQ ID NO: 26823 - protein, 6 aa, synthetic construct
PMEVTW

SEQ ID NO: 26824 - protein, 6 aa, synthetic construct
PMEVTY

SEQ ID NO: 26825 - protein, 6 aa, synthetic construct
PMEVWD

SEQ ID NO: 26826 - protein, 6 aa, synthetic construct
PMEVWE

SEQ ID NO: 26827 - protein, 6 aa, synthetic construct
PMEVWF

SEQ ID NO: 26828 - protein, 6 aa, synthetic construct
PMEVWW

SEQ ID NO: 26829 - protein, 6 aa, synthetic construct
PMEVWY

SEQ ID NO: 26830 - protein, 6 aa, synthetic construct
PMEVYD

SEQ ID NO: 26831 - protein, 6 aa, synthetic construct
PMEVYE

SEQ ID NO: 26832 - protein, 6 aa, synthetic construct
PMEVYF

SEQ ID NO: 26833 - protein, 6 aa, synthetic construct
PMEVYW

SEQ ID NO: 26834 - protein, 6 aa, synthetic construct
PMEVYY

SEQ ID NO: 26835 - protein, 6 aa, synthetic construct
PMEVVD

SEQ ID NO: 26836 - protein, 6 aa, synthetic construct
PMEVVE

SEQ ID NO: 26837 - protein, 6 aa, synthetic construct
PMEVVF

SEQ ID NO: 26838 - protein, 6 aa, synthetic construct
PMEVVW

SEQ ID NO: 26839 - protein, 6 aa, synthetic construct
PMEVVY

SEQ ID NO: 26840 - protein, 6 aa, synthetic construct
PFEAAD

SEQ ID NO: 26841 - protein, 6 aa, synthetic construct
PFEAAE

SEQ ID NO: 26842 - protein, 6 aa, synthetic construct
PFEAAF

SEQ ID NO: 26843 - protein, 6 aa, synthetic construct
PFEAAW

SEQ ID NO: 26844 - protein, 6 aa, synthetic construct
PFEAAY

SEQ ID NO: 26845 - protein, 6 aa, synthetic construct
PFEARD

SEQ ID NO: 26846 - protein, 6 aa, synthetic construct
PFEARE

SEQ ID NO: 26847 - protein, 6 aa, synthetic construct
PFEARF

SEQ ID NO: 26848 - protein, 6 aa, synthetic construct
PFEARW

SEQ ID NO: 26849 - protein, 6 aa, synthetic construct
PFEARY

SEQ ID NO: 26850 - protein, 6 aa, synthetic construct
PFEAND

SEQ ID NO: 26851 - protein, 6 aa, synthetic construct
PFEANE

SEQ ID NO: 26852 - protein, 6 aa, synthetic construct
PFEANF

SEQ ID NO: 26853 - protein, 6 aa, synthetic construct
PFEANW

SEQ ID NO: 26854 - protein, 6 aa, synthetic construct
PFEANY

SEQ ID NO: 26855 - protein, 6 aa, synthetic construct
PFEADD

SEQ ID NO: 26856 - protein, 6 aa, synthetic construct
PFEADE

SEQ ID NO: 26857 - protein, 6 aa, synthetic construct
PFEADF

SEQ ID NO: 26858 - protein, 6 aa, synthetic construct
PFEADW

SEQ ID NO: 26859 - protein, 6 aa, synthetic construct
PFEADY

SEQ ID NO: 26860 - protein, 6 aa, synthetic construct
PFEACD

SEQ ID NO: 26861 - protein, 6 aa, synthetic construct
PFEACE

SEQ ID NO: 26862 - protein, 6 aa, synthetic construct
PFEACF

SEQ ID NO: 26863 - protein, 6 aa, synthetic construct
PFEACW

SEQ ID NO: 26864 - protein, 6 aa, synthetic construct
PFEACY

SEQ ID NO: 26865 - protein, 6 aa, synthetic construct
PFEAQD

SEQ ID NO: 26866 - protein, 6 aa, synthetic construct
PFEAQE

SEQ ID NO: 26867 - protein, 6 aa, synthetic construct
PFEAQF

SEQ ID NO: 26868 - protein, 6 aa, synthetic construct
PFEAQW

SEQ ID NO: 26869 - protein, 6 aa, synthetic construct
PFEAQY

SEQ ID NO: 26870 - protein, 6 aa, synthetic construct
PFEAED

SEQ ID NO: 26871 - protein, 6 aa, synthetic construct
PFEAEE

SEQ ID NO: 26872 - protein, 6 aa, synthetic construct
PFEAEF

SEQ ID NO: 26873 - protein, 6 aa, synthetic construct
PFEAEW

SEQ ID NO: 26874 - protein, 6 aa, synthetic construct
PFEAEY

SEQ ID NO: 26875 - protein, 6 aa, synthetic construct
PFEAGD

SEQ ID NO: 26876 - protein, 6 aa, synthetic construct
PFEAGE

SEQ ID NO: 26877 - protein, 6 aa, synthetic construct
PFEAGF

SEQ ID NO: 26878 - protein, 6 aa, synthetic construct
PFEAGW

SEQ ID NO: 26879 - protein, 6 aa, synthetic construct
PFEAGY

SEQ ID NO: 26880 - protein, 6 aa, synthetic construct
PFEAHD

SEQ ID NO: 26881 - protein, 6 aa, synthetic construct
PFEAHE

SEQ ID NO: 26882 - protein, 6 aa, synthetic construct
PFEAHF

SEQ ID NO: 26883 - protein, 6 aa, synthetic construct
PFEAHW

SEQ ID NO: 26884 - protein, 6 aa, synthetic construct
PFEAHY

SEQ ID NO: 26885 - protein, 6 aa, synthetic construct
PFEAID

SEQ ID NO: 26886 - protein, 6 aa, synthetic construct
PFEAIE

SEQ ID NO: 26887 - protein, 6 aa, synthetic construct
PFEAIF

SEQ ID NO: 26888 - protein, 6 aa, synthetic construct
PFEAIW

SEQ ID NO: 26889 - protein, 6 aa, synthetic construct
PFEAIY

SEQ ID NO: 26890 - protein, 6 aa, synthetic construct
PFEALD

SEQ ID NO: 26891 - protein, 6 aa, synthetic construct
PFEALE

SEQ ID NO: 26892 - protein, 6 aa, synthetic construct
PFEALF

SEQ ID NO: 26893 - protein, 6 aa, synthetic construct
PFEALW

SEQ ID NO: 26894 - protein, 6 aa, synthetic construct
PFEALY

SEQ ID NO: 26895 - protein, 6 aa, synthetic construct
PFEAKD

SEQ ID NO: 26896 - protein, 6 aa, synthetic construct
PFEAKE

SEQ ID NO: 26897 - protein, 6 aa, synthetic construct
PFEAKF

SEQ ID NO: 26898 - protein, 6 aa, synthetic construct
PFEAKW

SEQ ID NO: 26899 - protein, 6 aa, synthetic construct
PFEAKY

SEQ ID NO: 26900 - protein, 6 aa, synthetic construct
PFEAMD

SEQ ID NO: 26901 - protein, 6 aa, synthetic construct
PFEAME

SEQ ID NO: 26902 - protein, 6 aa, synthetic construct
PFEAMF

SEQ ID NO: 26903 - protein, 6 aa, synthetic construct
PFEAMW

SEQ ID NO: 26904 - protein, 6 aa, synthetic construct
PFEAMY

SEQ ID NO: 26905 - protein, 6 aa, synthetic construct
PFEAFD

SEQ ID NO: 26906 - protein, 6 aa, synthetic construct
PFEAFE

SEQ ID NO: 26907 - protein, 6 aa, synthetic construct
PFEAFF

SEQ ID NO: 26908 - protein, 6 aa, synthetic construct
PFEAFW

SEQ ID NO: 26909 - protein, 6 aa, synthetic construct
PFEAFY

SEQ ID NO: 26910 - protein, 6 aa, synthetic construct
PFEAPD

SEQ ID NO: 26911 - protein, 6 aa, synthetic construct
PFEAPE

SEQ ID NO: 26912 - protein, 6 aa, synthetic construct
PFEAPF

SEQ ID NO: 26913 - protein, 6 aa, synthetic construct
PFEAPW

SEQ ID NO: 26914 - protein, 6 aa, synthetic construct
PFEAPY

SEQ ID NO: 26915 - protein, 6 aa, synthetic construct
PFEASD

SEQ ID NO: 26916 - protein, 6 aa, synthetic construct
PFEASE

SEQ ID NO: 26917 - protein, 6 aa, synthetic construct
PFEASF

SEQ ID NO: 26918 - protein, 6 aa, synthetic construct
PFEASW

SEQ ID NO: 26919 - protein, 6 aa, synthetic construct
PFEASY

SEQ ID NO: 26920 - protein, 6 aa, synthetic construct
PFEATD

SEQ ID NO: 26921 - protein, 6 aa, synthetic construct
PFEATE

SEQ ID NO: 26922 - protein, 6 aa, synthetic construct
PFEATF

SEQ ID NO: 26923 - protein, 6 aa, synthetic construct
PFEATW

SEQ ID NO: 26924 - protein, 6 aa, synthetic construct
PFEATY

SEQ ID NO: 26925 - protein, 6 aa, synthetic construct
PFEAWD

SEQ ID NO: 26926 - protein, 6 aa, synthetic construct
PFEAWE

SEQ ID NO: 26927 - protein, 6 aa, synthetic construct
PFEAWF

SEQ ID NO: 26928 - protein, 6 aa, synthetic construct
PFEAWW

SEQ ID NO: 26929 - protein, 6 aa, synthetic construct
PFEAWY

SEQ ID NO: 26930 - protein, 6 aa, synthetic construct
PFEAYD

SEQ ID NO: 26931 - protein, 6 aa, synthetic construct
PFEAYE

SEQ ID NO: 26932 - protein, 6 aa, synthetic construct
PFEAYF

SEQ ID NO: 26933 - protein, 6 aa, synthetic construct
PFEAYW

SEQ ID NO: 26934 - protein, 6 aa, synthetic construct
PFEAYY

SEQ ID NO: 26935 - protein, 6 aa, synthetic construct
PFEAVD

SEQ ID NO: 26936 - protein, 6 aa, synthetic construct
PFEAVE

SEQ ID NO: 26937 - protein, 6 aa, synthetic construct
PFEAVF

SEQ ID NO: 26938 - protein, 6 aa, synthetic construct
PFEAVW

SEQ ID NO: 26939 - protein, 6 aa, synthetic construct
PFEAVY

SEQ ID NO: 26940 - protein, 6 aa, synthetic construct
PFERAD

SEQ ID NO: 26941 - protein, 6 aa, synthetic construct
PFERAE

SEQ ID NO: 26942 - protein, 6 aa, synthetic construct
PFERAF

SEQ ID NO: 26943 - protein, 6 aa, synthetic construct
PFERAW

SEQ ID NO: 26944 - protein, 6 aa, synthetic construct
PFERAY

SEQ ID NO: 26945 - protein, 6 aa, synthetic construct
PFERRD

SEQ ID NO: 26946 - protein, 6 aa, synthetic construct
PFERRE

SEQ ID NO: 26947 - protein, 6 aa, synthetic construct
PFERRF

SEQ ID NO: 26948 - protein, 6 aa, synthetic construct
PFERRW

SEQ ID NO: 26949 - protein, 6 aa, synthetic construct
PFERRY

SEQ ID NO: 26950 - protein, 6 aa, synthetic construct
PFERND

SEQ ID NO: 26951 - protein, 6 aa, synthetic construct
PFERNE

SEQ ID NO: 26952 - protein, 6 aa, synthetic construct
PFERNF

SEQ ID NO: 26953 - protein, 6 aa, synthetic construct
PFERNW

SEQ ID NO: 26954 - protein, 6 aa, synthetic construct
PFERNY

SEQ ID NO: 26955 - protein, 6 aa, synthetic construct
PFERDD

SEQ ID NO: 26956 - protein, 6 aa, synthetic construct
PFERDE

SEQ ID NO: 26957 - protein, 6 aa, synthetic construct
PFERDF

SEQ ID NO: 26958 - protein, 6 aa, synthetic construct
PFERDW

SEQ ID NO: 26959 - protein, 6 aa, synthetic construct
PFERDY

SEQ ID NO: 26960 - protein, 6 aa, synthetic construct
PFERCD

SEQ ID NO: 26961 - protein, 6 aa, synthetic construct
PFERCE

SEQ ID NO: 26962 - protein, 6 aa, synthetic construct
PFERCF

SEQ ID NO: 26963 - protein, 6 aa, synthetic construct
PFERCW

SEQ ID NO: 26964 - protein, 6 aa, synthetic construct
PFERCY

SEQ ID NO: 26965 - protein, 6 aa, synthetic construct
PFERQD

SEQ ID NO: 26966 - protein, 6 aa, synthetic construct
PFERQE

SEQ ID NO: 26967 - protein, 6 aa, synthetic construct
PFERQF

SEQ ID NO: 26968 - protein, 6 aa, synthetic construct
PFERQW

SEQ ID NO: 26969 - protein, 6 aa, synthetic construct
PFERQY

SEQ ID NO: 26970 - protein, 6 aa, synthetic construct
PFERED

SEQ ID NO: 26971 - protein, 6 aa, synthetic construct
PFEREE

SEQ ID NO: 26972 - protein, 6 aa, synthetic construct
PFEREF

SEQ ID NO: 26973 - protein, 6 aa, synthetic construct
PFEREW

SEQ ID NO: 26974 - protein, 6 aa, synthetic construct
PFEREY

SEQ ID NO: 26975 - protein, 6 aa, synthetic construct
PFERGD

SEQ ID NO: 26976 - protein, 6 aa, synthetic construct
PFERGE

SEQ ID NO: 26977 - protein, 6 aa, synthetic construct
PFERGF

SEQ ID NO: 26978 - protein, 6 aa, synthetic construct
PFERGW

SEQ ID NO: 26979 - protein, 6 aa, synthetic construct
PFERGY

SEQ ID NO: 26980 - protein, 6 aa, synthetic construct
PFERHD

SEQ ID NO: 26981 - protein, 6 aa, synthetic construct
PFERHE

SEQ ID NO: 26982 - protein, 6 aa, synthetic construct
PFERHF

SEQ ID NO: 26983 - protein, 6 aa, synthetic construct
PFERHW

SEQ ID NO: 26984 - protein, 6 aa, synthetic construct
PFERHY

SEQ ID NO: 26985 - protein, 6 aa, synthetic construct
PFERID

SEQ ID NO: 26986 - protein, 6 aa, synthetic construct
PFERIE

SEQ ID NO: 26987 - protein, 6 aa, synthetic construct
PFERIF

SEQ ID NO: 26988 - protein, 6 aa, synthetic construct
PFERIW

SEQ ID NO: 26989 - protein, 6 aa, synthetic construct
PFERIY

SEQ ID NO: 26990 - protein, 6 aa, synthetic construct
PFERLD

SEQ ID NO: 26991 - protein, 6 aa, synthetic construct
PFERLE

SEQ ID NO: 26992 - protein, 6 aa, synthetic construct
PFERLF

SEQ ID NO: 26993 - protein, 6 aa, synthetic construct
PFERLW

SEQ ID NO: 26994 - protein, 6 aa, synthetic construct
PFERLY

SEQ ID NO: 26995 - protein, 6 aa, synthetic construct
PFERKD

SEQ ID NO: 26996 - protein, 6 aa, synthetic construct
PFERKE

SEQ ID NO: 26997 - protein, 6 aa, synthetic construct
PFERKF

SEQ ID NO: 26998 - protein, 6 aa, synthetic construct
PFERKW

SEQ ID NO: 26999 - protein, 6 aa, synthetic construct
PFERKY

SEQ ID NO: 27000 - protein, 6 aa, synthetic construct
PFERMD

SEQ ID NO: 27001 - protein, 6 aa, synthetic construct
PFERME

SEQ ID NO: 27002 - protein, 6 aa, synthetic construct
PFERMF

SEQ ID NO: 27003 - protein, 6 aa, synthetic construct
PFERMW

SEQ ID NO: 27004 - protein, 6 aa, synthetic construct
PFERMY

SEQ ID NO: 27005 - protein, 6 aa, synthetic construct
PFERFD

SEQ ID NO: 27006 - protein, 6 aa, synthetic construct
PFERFE

SEQ ID NO: 27007 - protein, 6 aa, synthetic construct
PFERFF

SEQ ID NO: 27008 - protein, 6 aa, synthetic construct
PFERFW

SEQ ID NO: 27009 - protein, 6 aa, synthetic construct
PFERFY

SEQ ID NO: 27010 - protein, 6 aa, synthetic construct
PFERPD

SEQ ID NO: 27011 - protein, 6 aa, synthetic construct
PFERPE

SEQ ID NO: 27012 - protein, 6 aa, synthetic construct
PFERPF

SEQ ID NO: 27013 - protein, 6 aa, synthetic construct
PFERPW

SEQ ID NO: 27014 - protein, 6 aa, synthetic construct
PFERPY

SEQ ID NO: 27015 - protein, 6 aa, synthetic construct
PFERSD

SEQ ID NO: 27016 - protein, 6 aa, synthetic construct
PFERSE

SEQ ID NO: 27017 - protein, 6 aa, synthetic construct
PFERSF

SEQ ID NO: 27018 - protein, 6 aa, synthetic construct
PFERSW

SEQ ID NO: 27019 - protein, 6 aa, synthetic construct
PFERSY

SEQ ID NO: 27020 - protein, 6 aa, synthetic construct
PFERTD

SEQ ID NO: 27021 - protein, 6 aa, synthetic construct
PFERTE

SEQ ID NO: 27022 - protein, 6 aa, synthetic construct
PFERTF

SEQ ID NO: 27023 - protein, 6 aa, synthetic construct
PFERTW

SEQ ID NO: 27024 - protein, 6 aa, synthetic construct
PFERTY

SEQ ID NO: 27025 - protein, 6 aa, synthetic construct
PFERWD

SEQ ID NO: 27026 - protein, 6 aa, synthetic construct
PFERWE

SEQ ID NO: 27027 - protein, 6 aa, synthetic construct
PFERWF

SEQ ID NO: 27028 - protein, 6 aa, synthetic construct
PFERWW

SEQ ID NO: 27029 - protein, 6 aa, synthetic construct
PFERWY

SEQ ID NO: 27030 - protein, 6 aa, synthetic construct
PFERYD

SEQ ID NO: 27031 - protein, 6 aa, synthetic construct
PFERYE

SEQ ID NO: 27032 - protein, 6 aa, synthetic construct
PFERYF

SEQ ID NO: 27033 - protein, 6 aa, synthetic construct
PFERYW

SEQ ID NO: 27034 - protein, 6 aa, synthetic construct
PFERYY

SEQ ID NO: 27035 - protein, 6 aa, synthetic construct
PFERVD

SEQ ID NO: 27036 - protein, 6 aa, synthetic construct
PFERVE

SEQ ID NO: 27037 - protein, 6 aa, synthetic construct
PFERVF

SEQ ID NO: 27038 - protein, 6 aa, synthetic construct
PFERVW

SEQ ID NO: 27039 - protein, 6 aa, synthetic construct
PFERVY

SEQ ID NO: 27040 - protein, 6 aa, synthetic construct
PFENAD

SEQ ID NO: 27041 - protein, 6 aa, synthetic construct
PFENAE

SEQ ID NO: 27042 - protein, 6 aa, synthetic construct
PFENAF

SEQ ID NO: 27043 - protein, 6 aa, synthetic construct
PFENAW

SEQ ID NO: 27044 - protein, 6 aa, synthetic construct
PFENAY

SEQ ID NO: 27045 - protein, 6 aa, synthetic construct
PFENRD

SEQ ID NO: 27046 - protein, 6 aa, synthetic construct
PFENRE

SEQ ID NO: 27047 - protein, 6 aa, synthetic construct
PFENRF

SEQ ID NO: 27048 - protein, 6 aa, synthetic construct
PFENRW

SEQ ID NO: 27049 - protein, 6 aa, synthetic construct
PFENRY

SEQ ID NO: 27050 - protein, 6 aa, synthetic construct
PFENND

SEQ ID NO: 27051 - protein, 6 aa, synthetic construct
PFENNE

SEQ ID NO: 27052 - protein, 6 aa, synthetic construct
PFENNF

SEQ ID NO: 27053 - protein, 6 aa, synthetic construct
PFENNW

SEQ ID NO: 27054 - protein, 6 aa, synthetic construct
PFENNY

SEQ ID NO: 27055 - protein, 6 aa, synthetic construct
PFENDD

SEQ ID NO: 27056 - protein, 6 aa, synthetic construct
PFENDE

SEQ ID NO: 27057 - protein, 6 aa, synthetic construct
PFENDF

SEQ ID NO: 27058 - protein, 6 aa, synthetic construct
PFENDW

SEQ ID NO: 27059 - protein, 6 aa, synthetic construct
PFENDY

SEQ ID NO: 27060 - protein, 6 aa, synthetic construct
PFENCD

SEQ ID NO: 27061 - protein, 6 aa, synthetic construct
PFENCE

SEQ ID NO: 27062 - protein, 6 aa, synthetic construct
PFENCF

SEQ ID NO: 27063 - protein, 6 aa, synthetic construct
PFENCW

SEQ ID NO: 27064 - protein, 6 aa, synthetic construct
PFENCY

SEQ ID NO: 27065 - protein, 6 aa, synthetic construct
PFENQD

SEQ ID NO: 27066 - protein, 6 aa, synthetic construct
PFENQE

SEQ ID NO: 27067 - protein, 6 aa, synthetic construct
PFENQF

SEQ ID NO: 27068 - protein, 6 aa, synthetic construct
PFENQW

SEQ ID NO: 27069 - protein, 6 aa, synthetic construct
PFENQY

SEQ ID NO: 27070 - protein, 6 aa, synthetic construct
PFENED

SEQ ID NO: 27071 - protein, 6 aa, synthetic construct
PFENEE

SEQ ID NO: 27072 - protein, 6 aa, synthetic construct
PFENEF

SEQ ID NO: 27073 - protein, 6 aa, synthetic construct
PFENEW

SEQ ID NO: 27074 - protein, 6 aa, synthetic construct
PFENEY

SEQ ID NO: 27075 - protein, 6 aa, synthetic construct
PFENGD

SEQ ID NO: 27076 - protein, 6 aa, synthetic construct
PFENGE

SEQ ID NO: 27077 - protein, 6 aa, synthetic construct
PFENGF

SEQ ID NO: 27078 - protein, 6 aa, synthetic construct
PFENGW

SEQ ID NO: 27079 - protein, 6 aa, synthetic construct
PFENGY

SEQ ID NO: 27080 - protein, 6 aa, synthetic construct
PFENHD

SEQ ID NO: 27081 - protein, 6 aa, synthetic construct
PFENHE

SEQ ID NO: 27082 - protein, 6 aa, synthetic construct
PFENHF

SEQ ID NO: 27083 - protein, 6 aa, synthetic construct
PFENHW

SEQ ID NO: 27084 - protein, 6 aa, synthetic construct
PFENHY

SEQ ID NO: 27085 - protein, 6 aa, synthetic construct
PFENID

SEQ ID NO: 27086 - protein, 6 aa, synthetic construct
PFENIE

SEQ ID NO: 27087 - protein, 6 aa, synthetic construct
PFENIF

SEQ ID NO: 27088 - protein, 6 aa, synthetic construct
PFENIW

SEQ ID NO: 27089 - protein, 6 aa, synthetic construct
PFENIY

SEQ ID NO: 27090 - protein, 6 aa, synthetic construct
PFENLD

SEQ ID NO: 27091 - protein, 6 aa, synthetic construct
PFENLE

SEQ ID NO: 27092 - protein, 6 aa, synthetic construct
PFENLF

SEQ ID NO: 27093 - protein, 6 aa, synthetic construct
PFENLW

SEQ ID NO: 27094 - protein, 6 aa, synthetic construct
PFENLY

SEQ ID NO: 27095 - protein, 6 aa, synthetic construct
PFENKD

SEQ ID NO: 27096 - protein, 6 aa, synthetic construct
PFENKE

SEQ ID NO: 27097 - protein, 6 aa, synthetic construct
PFENKF

SEQ ID NO: 27098 - protein, 6 aa, synthetic construct
PFENKW

SEQ ID NO: 27099 - protein, 6 aa, synthetic construct
PFENKY

SEQ ID NO: 27100 - protein, 6 aa, synthetic construct
PFENMD

SEQ ID NO: 27101 - protein, 6 aa, synthetic construct
PFENME

SEQ ID NO: 27102 - protein, 6 aa, synthetic construct
PFENMF

SEQ ID NO: 27103 - protein, 6 aa, synthetic construct
PFENMW

SEQ ID NO: 27104 - protein, 6 aa, synthetic construct
PFENMY

SEQ ID NO: 27105 - protein, 6 aa, synthetic construct
PFENFD

SEQ ID NO: 27106 - protein, 6 aa, synthetic construct
PFENFE

SEQ ID NO: 27107 - protein, 6 aa, synthetic construct
PFENFF

SEQ ID NO: 27108 - protein, 6 aa, synthetic construct
PFENFW

SEQ ID NO: 27109 - protein, 6 aa, synthetic construct
PFENFY

SEQ ID NO: 27110 - protein, 6 aa, synthetic construct
PFENPD

SEQ ID NO: 27111 - protein, 6 aa, synthetic construct
PFENPE

SEQ ID NO: 27112 - protein, 6 aa, synthetic construct
PFENPF

SEQ ID NO: 27113 - protein, 6 aa, synthetic construct
PFENPW

SEQ ID NO: 27114 - protein, 6 aa, synthetic construct
PFENPY

SEQ ID NO: 27115 - protein, 6 aa, synthetic construct
PFENSD

SEQ ID NO: 27116 - protein, 6 aa, synthetic construct
PFENSE

SEQ ID NO: 27117 - protein, 6 aa, synthetic construct
PFENSF

SEQ ID NO: 27118 - protein, 6 aa, synthetic construct
PFENSW

SEQ ID NO: 27119 - protein, 6 aa, synthetic construct
PFENSY

SEQ ID NO: 27120 - protein, 6 aa, synthetic construct
PFENTD

SEQ ID NO: 27121 - protein, 6 aa, synthetic construct
PFENTE

SEQ ID NO: 27122 - protein, 6 aa, synthetic construct
PFENTF

SEQ ID NO: 27123 - protein, 6 aa, synthetic construct
PFENTW

SEQ ID NO: 27124 - protein, 6 aa, synthetic construct
PFENTY

SEQ ID NO: 27125 - protein, 6 aa, synthetic construct
PFENWD

SEQ ID NO: 27126 - protein, 6 aa, synthetic construct
PFENWE

SEQ ID NO: 27127 - protein, 6 aa, synthetic construct
PFENWF

SEQ ID NO: 27128 - protein, 6 aa, synthetic construct
PFENWW

SEQ ID NO: 27129 - protein, 6 aa, synthetic construct
PFENWY

SEQ ID NO: 27130 - protein, 6 aa, synthetic construct
PFENYD

SEQ ID NO: 27131 - protein, 6 aa, synthetic construct
PFENYE

SEQ ID NO: 27132 - protein, 6 aa, synthetic construct
PFENYF

SEQ ID NO: 27133 - protein, 6 aa, synthetic construct
PFENYW

SEQ ID NO: 27134 - protein, 6 aa, synthetic construct
PFENYY

SEQ ID NO: 27135 - protein, 6 aa, synthetic construct
PFENVD

SEQ ID NO: 27136 - protein, 6 aa, synthetic construct
PFENVE

SEQ ID NO: 27137 - protein, 6 aa, synthetic construct
PFENVF

SEQ ID NO: 27138 - protein, 6 aa, synthetic construct
PFENVW

SEQ ID NO: 27139 - protein, 6 aa, synthetic construct
PFENVY

SEQ ID NO: 27140 - protein, 6 aa, synthetic construct
PFEDAD

SEQ ID NO: 27141 - protein, 6 aa, synthetic construct
PFEDAE

SEQ ID NO: 27142 - protein, 6 aa, synthetic construct
PFEDAF

SEQ ID NO: 27143 - protein, 6 aa, synthetic construct
PFEDAW

SEQ ID NO: 27144 - protein, 6 aa, synthetic construct
PFEDAY

SEQ ID NO: 27145 - protein, 6 aa, synthetic construct
PFEDRD

SEQ ID NO: 27146 - protein, 6 aa, synthetic construct
PFEDRE

SEQ ID NO: 27147 - protein, 6 aa, synthetic construct
PFEDRF

SEQ ID NO: 27148 - protein, 6 aa, synthetic construct
PFEDRW

SEQ ID NO: 27149 - protein, 6 aa, synthetic construct
PFEDRY

SEQ ID NO: 27150 - protein, 6 aa, synthetic construct
PFEDND

SEQ ID NO: 27151 - protein, 6 aa, synthetic construct
PFEDNE

SEQ ID NO: 27152 - protein, 6 aa, synthetic construct
PFEDNF

SEQ ID NO: 27153 - protein, 6 aa, synthetic construct
PFEDNW

SEQ ID NO: 27154 - protein, 6 aa, synthetic construct
PFEDNY

SEQ ID NO: 27155 - protein, 6 aa, synthetic construct
PFEDDD

SEQ ID NO: 27156 - protein, 6 aa, synthetic construct
PFEDDE

SEQ ID NO: 27157 - protein, 6 aa, synthetic construct
PFEDDF

SEQ ID NO: 27158 - protein, 6 aa, synthetic construct
PFEDDW

SEQ ID NO: 27159 - protein, 6 aa, synthetic construct
PFEDDY

SEQ ID NO: 27160 - protein, 6 aa, synthetic construct
PFEDCD

SEQ ID NO: 27161 - protein, 6 aa, synthetic construct
PFEDCE

SEQ ID NO: 27162 - protein, 6 aa, synthetic construct
PFEDCF

SEQ ID NO: 27163 - protein, 6 aa, synthetic construct
PFEDCW

SEQ ID NO: 27164 - protein, 6 aa, synthetic construct
PFEDCY

SEQ ID NO: 27165 - protein, 6 aa, synthetic construct
PFEDQD

SEQ ID NO: 27166 - protein, 6 aa, synthetic construct
PFEDQE

SEQ ID NO: 27167 - protein, 6 aa, synthetic construct
PFEDQF

SEQ ID NO: 27168 - protein, 6 aa, synthetic construct
PFEDQW

SEQ ID NO: 27169 - protein, 6 aa, synthetic construct
PFEDQY

SEQ ID NO: 27170 - protein, 6 aa, synthetic construct
PFEDED

SEQ ID NO: 27171 - protein, 6 aa, synthetic construct
PFEDEE

SEQ ID NO: 27172 - protein, 6 aa, synthetic construct
PFEDEF

SEQ ID NO: 27173 - protein, 6 aa, synthetic construct
PFEDEW

SEQ ID NO: 27174 - protein, 6 aa, synthetic construct
PFEDEY

SEQ ID NO: 27175 - protein, 6 aa, synthetic construct
PFEDGD

SEQ ID NO: 27176 - protein, 6 aa, synthetic construct
PFEDGE

SEQ ID NO: 27177 - protein, 6 aa, synthetic construct
PFEDGF

SEQ ID NO: 27178 - protein, 6 aa, synthetic construct
PFEDGW

SEQ ID NO: 27179 - protein, 6 aa, synthetic construct
PFEDGY

SEQ ID NO: 27180 - protein, 6 aa, synthetic construct
PFEDHD

SEQ ID NO: 27181 - protein, 6 aa, synthetic construct
PFEDHE

SEQ ID NO: 27182 - protein, 6 aa, synthetic construct
PFEDHF

SEQ ID NO: 27183 - protein, 6 aa, synthetic construct
PFEDHW

SEQ ID NO: 27184 - protein, 6 aa, synthetic construct
PFEDHY

SEQ ID NO: 27185 - protein, 6 aa, synthetic construct
PFEDID

SEQ ID NO: 27186 - protein, 6 aa, synthetic construct
PFEDIE

SEQ ID NO: 27187 - protein, 6 aa, synthetic construct
PFEDIF

SEQ ID NO: 27188 - protein, 6 aa, synthetic construct
PFEDIW

SEQ ID NO: 27189 - protein, 6 aa, synthetic construct
PFEDIY

SEQ ID NO: 27190 - protein, 6 aa, synthetic construct
PFEDLD

SEQ ID NO: 27191 - protein, 6 aa, synthetic construct
PFEDLE

SEQ ID NO: 27192 - protein, 6 aa, synthetic construct
PFEDLF

SEQ ID NO: 27193 - protein, 6 aa, synthetic construct
PFEDLW

SEQ ID NO: 27194 - protein, 6 aa, synthetic construct
PFEDLY

SEQ ID NO: 27195 - protein, 6 aa, synthetic construct
PFEDKD

SEQ ID NO: 27196 - protein, 6 aa, synthetic construct
PFEDKE

SEQ ID NO: 27197 - protein, 6 aa, synthetic construct
PFEDKF

SEQ ID NO: 27198 - protein, 6 aa, synthetic construct
PFEDKW

SEQ ID NO: 27199 - protein, 6 aa, synthetic construct
PFEDKY

SEQ ID NO: 27200 - protein, 6 aa, synthetic construct
PFEDMD

SEQ ID NO: 27201 - protein, 6 aa, synthetic construct
PFEDME

SEQ ID NO: 27202 - protein, 6 aa, synthetic construct
PFEDMF

SEQ ID NO: 27203 - protein, 6 aa, synthetic construct
PFEDMW

SEQ ID NO: 27204 - protein, 6 aa, synthetic construct
PFEDMY

SEQ ID NO: 27205 - protein, 6 aa, synthetic construct
PFEDFD

SEQ ID NO: 27206 - protein, 6 aa, synthetic construct
PFEDFE

SEQ ID NO: 27207 - protein, 6 aa, synthetic construct
PFEDFF

SEQ ID NO: 27208 - protein, 6 aa, synthetic construct
PFEDFW

SEQ ID NO: 27209 - protein, 6 aa, synthetic construct
PFEDFY

SEQ ID NO: 27210 - protein, 6 aa, synthetic construct
PFEDPD

SEQ ID NO: 27211 - protein, 6 aa, synthetic construct
PFEDPE

SEQ ID NO: 27212 - protein, 6 aa, synthetic construct
PFEDPF

SEQ ID NO: 27213 - protein, 6 aa, synthetic construct
PFEDPW

SEQ ID NO: 27214 - protein, 6 aa, synthetic construct
PFEDPY

SEQ ID NO: 27215 - protein, 6 aa, synthetic construct
PFEDSD

SEQ ID NO: 27216 - protein, 6 aa, synthetic construct
PFEDSE

SEQ ID NO: 27217 - protein, 6 aa, synthetic construct
PFEDSF

SEQ ID NO: 27218 - protein, 6 aa, synthetic construct
PFEDSW

SEQ ID NO: 27219 - protein, 6 aa, synthetic construct
PFEDSY

SEQ ID NO: 27220 - protein, 6 aa, synthetic construct
PFEDTD

SEQ ID NO: 27221 - protein, 6 aa, synthetic construct
PFEDTE

SEQ ID NO: 27222 - protein, 6 aa, synthetic construct
PFEDTF

SEQ ID NO: 27223 - protein, 6 aa, synthetic construct
PFEDTW

SEQ ID NO: 27224 - protein, 6 aa, synthetic construct
PFEDTY

SEQ ID NO: 27225 - protein, 6 aa, synthetic construct
PFEDWD

SEQ ID NO: 27226 - protein, 6 aa, synthetic construct
PFEDWE

SEQ ID NO: 27227 - protein, 6 aa, synthetic construct
PFEDWF

SEQ ID NO: 27228 - protein, 6 aa, synthetic construct
PFEDWW

SEQ ID NO: 27229 - protein, 6 aa, synthetic construct
PFEDWY

SEQ ID NO: 27230 - protein, 6 aa, synthetic construct
PFEDYD

SEQ ID NO: 27231 - protein, 6 aa, synthetic construct
PFEDYE

SEQ ID NO: 27232 - protein, 6 aa, synthetic construct
PFEDYF

SEQ ID NO: 27233 - protein, 6 aa, synthetic construct
PFEDYW

SEQ ID NO: 27234 - protein, 6 aa, synthetic construct
PFEDYY

SEQ ID NO: 27235 - protein, 6 aa, synthetic construct
PFEDVD

SEQ ID NO: 27236 - protein, 6 aa, synthetic construct
PFEDVE

SEQ ID NO: 27237 - protein, 6 aa, synthetic construct
PFEDVF

SEQ ID NO: 27238 - protein, 6 aa, synthetic construct
PFEDVW

SEQ ID NO: 27239 - protein, 6 aa, synthetic construct
PFEDVY

SEQ ID NO: 27240 - protein, 6 aa, synthetic construct
PFECAD

SEQ ID NO: 27241 - protein, 6 aa, synthetic construct
PFECAE

SEQ ID NO: 27242 - protein, 6 aa, synthetic construct
PFECAF

SEQ ID NO: 27243 - protein, 6 aa, synthetic construct
PFECAW

SEQ ID NO: 27244 - protein, 6 aa, synthetic construct
PFECAY

SEQ ID NO: 27245 - protein, 6 aa, synthetic construct
PFECRD

SEQ ID NO: 27246 - protein, 6 aa, synthetic construct
PFECRE

SEQ ID NO: 27247 - protein, 6 aa, synthetic construct
PFECRF

SEQ ID NO: 27248 - protein, 6 aa, synthetic construct
PFECRW

SEQ ID NO: 27249 - protein, 6 aa, synthetic construct
PFECRY

SEQ ID NO: 27250 - protein, 6 aa, synthetic construct
PFECND

SEQ ID NO: 27251 - protein, 6 aa, synthetic construct
PFECNE

SEQ ID NO: 27252 - protein, 6 aa, synthetic construct
PFECNF

SEQ ID NO: 27253 - protein, 6 aa, synthetic construct
PFECNW

SEQ ID NO: 27254 - protein, 6 aa, synthetic construct
PFECNY

SEQ ID NO: 27255 - protein, 6 aa, synthetic construct
PFECDD

SEQ ID NO: 27256 - protein, 6 aa, synthetic construct
PFECDE

SEQ ID NO: 27257 - protein, 6 aa, synthetic construct
PFECDF

SEQ ID NO: 27258 - protein, 6 aa, synthetic construct
PFECDW

SEQ ID NO: 27259 - protein, 6 aa, synthetic construct
PFECDY

SEQ ID NO: 27260 - protein, 6 aa, synthetic construct
PFECCD

SEQ ID NO: 27261 - protein, 6 aa, synthetic construct
PFECCE

SEQ ID NO: 27262 - protein, 6 aa, synthetic construct
PFECCF

SEQ ID NO: 27263 - protein, 6 aa, synthetic construct
PFECCW

SEQ ID NO: 27264 - protein, 6 aa, synthetic construct
PFECCY

SEQ ID NO: 27265 - protein, 6 aa, synthetic construct
PFECQD

SEQ ID NO: 27266 - protein, 6 aa, synthetic construct
PFECQE

SEQ ID NO: 27267 - protein, 6 aa, synthetic construct
PFECQF

SEQ ID NO: 27268 - protein, 6 aa, synthetic construct
PFECQW

SEQ ID NO: 27269 - protein, 6 aa, synthetic construct
PFECQY

SEQ ID NO: 27270 - protein, 6 aa, synthetic construct
PFECED

SEQ ID NO: 27271 - protein, 6 aa, synthetic construct
PFECEE

SEQ ID NO: 27272 - protein, 6 aa, synthetic construct
PFECEF

SEQ ID NO: 27273 - protein, 6 aa, synthetic construct
PFECEW

SEQ ID NO: 27274 - protein, 6 aa, synthetic construct
PFECEY

SEQ ID NO: 27275 - protein, 6 aa, synthetic construct
PFECGD

SEQ ID NO: 27276 - protein, 6 aa, synthetic construct
PFECGE

SEQ ID NO: 27277 - protein, 6 aa, synthetic construct
PFECGF

SEQ ID NO: 27278 - protein, 6 aa, synthetic construct
PFECGW

SEQ ID NO: 27279 - protein, 6 aa, synthetic construct
PFECGY

SEQ ID NO: 27280 - protein, 6 aa, synthetic construct
PFECHD

SEQ ID NO: 27281 - protein, 6 aa, synthetic construct
PFECHE

SEQ ID NO: 27282 - protein, 6 aa, synthetic construct
PFECHF

SEQ ID NO: 27283 - protein, 6 aa, synthetic construct
PFECHW

SEQ ID NO: 27284 - protein, 6 aa, synthetic construct
PFECHY

SEQ ID NO: 27285 - protein, 6 aa, synthetic construct
PFECID

SEQ ID NO: 27286 - protein, 6 aa, synthetic construct
PFECIE

SEQ ID NO: 27287 - protein, 6 aa, synthetic construct
PFECIF

SEQ ID NO: 27288 - protein, 6 aa, synthetic construct
PFECIW

SEQ ID NO: 27289 - protein, 6 aa, synthetic construct
PFECIY

SEQ ID NO: 27290 - protein, 6 aa, synthetic construct
PFECLD

SEQ ID NO: 27291 - protein, 6 aa, synthetic construct
PFECLE

SEQ ID NO: 27292 - protein, 6 aa, synthetic construct
PFECLF

SEQ ID NO: 27293 - protein, 6 aa, synthetic construct
PFECLW

SEQ ID NO: 27294 - protein, 6 aa, synthetic construct
PFECLY

SEQ ID NO: 27295 - protein, 6 aa, synthetic construct
PFECKD

SEQ ID NO: 27296 - protein, 6 aa, synthetic construct
PFECKE

SEQ ID NO: 27297 - protein, 6 aa, synthetic construct
PFECKF

SEQ ID NO: 27298 - protein, 6 aa, synthetic construct
PFECKW

SEQ ID NO: 27299 - protein, 6 aa, synthetic construct
PFECKY

SEQ ID NO: 27300 - protein, 6 aa, synthetic construct
PFECMD

SEQ ID NO: 27301 - protein, 6 aa, synthetic construct
PFECME

SEQ ID NO: 27302 - protein, 6 aa, synthetic construct
PFECMF

SEQ ID NO: 27303 - protein, 6 aa, synthetic construct
PFECMW

SEQ ID NO: 27304 - protein, 6 aa, synthetic construct
PFECMY

SEQ ID NO: 27305 - protein, 6 aa, synthetic construct
PFECFD

SEQ ID NO: 27306 - protein, 6 aa, synthetic construct
PFECFE

SEQ ID NO: 27307 - protein, 6 aa, synthetic construct
PFECFF

SEQ ID NO: 27308 - protein, 6 aa, synthetic construct
PFECFW

SEQ ID NO: 27309 - protein, 6 aa, synthetic construct
PFECFY

SEQ ID NO: 27310 - protein, 6 aa, synthetic construct
PFECPD

SEQ ID NO: 27311 - protein, 6 aa, synthetic construct
PFECPE

SEQ ID NO: 27312 - protein, 6 aa, synthetic construct
PFECPF

SEQ ID NO: 27313 - protein, 6 aa, synthetic construct
PFECPW

SEQ ID NO: 27314 - protein, 6 aa, synthetic construct
PFECPY

SEQ ID NO: 27315 - protein, 6 aa, synthetic construct
PFECSD

SEQ ID NO: 27316 - protein, 6 aa, synthetic construct
PFECSE

SEQ ID NO: 27317 - protein, 6 aa, synthetic construct
PFECSF

SEQ ID NO: 27318 - protein, 6 aa, synthetic construct
PFECSW

SEQ ID NO: 27319 - protein, 6 aa, synthetic construct
PFECSY

SEQ ID NO: 27320 - protein, 6 aa, synthetic construct
PFECTD

SEQ ID NO: 27321 - protein, 6 aa, synthetic construct
PFECTE

SEQ ID NO: 27322 - protein, 6 aa, synthetic construct
PFECTF

SEQ ID NO: 27323 - protein, 6 aa, synthetic construct
PFECTW

SEQ ID NO: 27324 - protein, 6 aa, synthetic construct
PFECTY

SEQ ID NO: 27325 - protein, 6 aa, synthetic construct
PFECWD

SEQ ID NO: 27326 - protein, 6 aa, synthetic construct
PFECWE

SEQ ID NO: 27327 - protein, 6 aa, synthetic construct
PFECWF

SEQ ID NO: 27328 - protein, 6 aa, synthetic construct
PFECWW

SEQ ID NO: 27329 - protein, 6 aa, synthetic construct
PFECWY

SEQ ID NO: 27330 - protein, 6 aa, synthetic construct
PFECYD

SEQ ID NO: 27331 - protein, 6 aa, synthetic construct
PFECYE

SEQ ID NO: 27332 - protein, 6 aa, synthetic construct
PFECYF

SEQ ID NO: 27333 - protein, 6 aa, synthetic construct
PFECYW

SEQ ID NO: 27334 - protein, 6 aa, synthetic construct
PFECYY

SEQ ID NO: 27335 - protein, 6 aa, synthetic construct
PFECVD

SEQ ID NO: 27336 - protein, 6 aa, synthetic construct
PFECVE

SEQ ID NO: 27337 - protein, 6 aa, synthetic construct
PFECVF

SEQ ID NO: 27338 - protein, 6 aa, synthetic construct
PFECVW

SEQ ID NO: 27339 - protein, 6 aa, synthetic construct
PFECVY

SEQ ID NO: 27340 - protein, 6 aa, synthetic construct
PFEQAD

SEQ ID NO: 27341 - protein, 6 aa, synthetic construct
PFEQAE

SEQ ID NO: 27342 - protein, 6 aa, synthetic construct
PFEQAF

SEQ ID NO: 27343 - protein, 6 aa, synthetic construct
PFEQAW

SEQ ID NO: 27344 - protein, 6 aa, synthetic construct
PFEQAY

SEQ ID NO: 27345 - protein, 6 aa, synthetic construct
PFEQRD

SEQ ID NO: 27346 - protein, 6 aa, synthetic construct
PFEQRE

SEQ ID NO: 27347 - protein, 6 aa, synthetic construct
PFEQRF

SEQ ID NO: 27348 - protein, 6 aa, synthetic construct
PFEQRW

SEQ ID NO: 27349 - protein, 6 aa, synthetic construct
PFEQRY

SEQ ID NO: 27350 - protein, 6 aa, synthetic construct
PFEQND

SEQ ID NO: 27351 - protein, 6 aa, synthetic construct
PFEQNE

SEQ ID NO: 27352 - protein, 6 aa, synthetic construct
PFEQNF

SEQ ID NO: 27353 - protein, 6 aa, synthetic construct
PFEQNW

SEQ ID NO: 27354 - protein, 6 aa, synthetic construct
PFEQNY

SEQ ID NO: 27355 - protein, 6 aa, synthetic construct
PFEQDD

SEQ ID NO: 27356 - protein, 6 aa, synthetic construct
PFEQDE

SEQ ID NO: 27357 - protein, 6 aa, synthetic construct
PFEQDF

SEQ ID NO: 27358 - protein, 6 aa, synthetic construct
PFEQDW

SEQ ID NO: 27359 - protein, 6 aa, synthetic construct
PFEQDY

SEQ ID NO: 27360 - protein, 6 aa, synthetic construct
PFEQCD

SEQ ID NO: 27361 - protein, 6 aa, synthetic construct
PFEQCE

SEQ ID NO: 27362 - protein, 6 aa, synthetic construct
PFEQCF

SEQ ID NO: 27363 - protein, 6 aa, synthetic construct
PFEQCW

SEQ ID NO: 27364 - protein, 6 aa, synthetic construct
PFEQCY

SEQ ID NO: 27365 - protein, 6 aa, synthetic construct
PFEQQD

SEQ ID NO: 27366 - protein, 6 aa, synthetic construct
PFEQQE

SEQ ID NO: 27367 - protein, 6 aa, synthetic construct
PFEQQF

SEQ ID NO: 27368 - protein, 6 aa, synthetic construct
PFEQQW

SEQ ID NO: 27369 - protein, 6 aa, synthetic construct
PFEQQY

SEQ ID NO: 27370 - protein, 6 aa, synthetic construct
PFEQED

SEQ ID NO: 27371 - protein, 6 aa, synthetic construct
PFEQEE

SEQ ID NO: 27372 - protein, 6 aa, synthetic construct
PFEQEF

SEQ ID NO: 27373 - protein, 6 aa, synthetic construct
PFEQEW

SEQ ID NO: 27374 - protein, 6 aa, synthetic construct
PFEQEY

SEQ ID NO: 27375 - protein, 6 aa, synthetic construct
PFEQGD

SEQ ID NO: 27376 - protein, 6 aa, synthetic construct
PFEQGE

SEQ ID NO: 27377 - protein, 6 aa, synthetic construct
PFEQGF

SEQ ID NO: 27378 - protein, 6 aa, synthetic construct
PFEQGW

SEQ ID NO: 27379 - protein, 6 aa, synthetic construct
PFEQGY

SEQ ID NO: 27380 - protein, 6 aa, synthetic construct
PFEQHD

SEQ ID NO: 27381 - protein, 6 aa, synthetic construct
PFEQHE

SEQ ID NO: 27382 - protein, 6 aa, synthetic construct
PFEQHF

SEQ ID NO: 27383 - protein, 6 aa, synthetic construct
PFEQHW

SEQ ID NO: 27384 - protein, 6 aa, synthetic construct
PFEQHY

SEQ ID NO: 27385 - protein, 6 aa, synthetic construct
PFEQID

SEQ ID NO: 27386 - protein, 6 aa, synthetic construct
PFEQIE

SEQ ID NO: 27387 - protein, 6 aa, synthetic construct
PFEQIF

SEQ ID NO: 27388 - protein, 6 aa, synthetic construct
PFEQIW

SEQ ID NO: 27389 - protein, 6 aa, synthetic construct
PFEQIY

SEQ ID NO: 27390 - protein, 6 aa, synthetic construct
PFEQLD

SEQ ID NO: 27391 - protein, 6 aa, synthetic construct
PFEQLE

SEQ ID NO: 27392 - protein, 6 aa, synthetic construct
PFEQLF

SEQ ID NO: 27393 - protein, 6 aa, synthetic construct
PFEQLW

SEQ ID NO: 27394 - protein, 6 aa, synthetic construct
PFEQLY

SEQ ID NO: 27395 - protein, 6 aa, synthetic construct
PFEQKD

SEQ ID NO: 27396 - protein, 6 aa, synthetic construct
PFEQKE

SEQ ID NO: 27397 - protein, 6 aa, synthetic construct
PFEQKF

SEQ ID NO: 27398 - protein, 6 aa, synthetic construct
PFEQKW

SEQ ID NO: 27399 - protein, 6 aa, synthetic construct
PFEQKY

SEQ ID NO: 27400 - protein, 6 aa, synthetic construct
PFEQMD

SEQ ID NO: 27401 - protein, 6 aa, synthetic construct
PFEQME

SEQ ID NO: 27402 - protein, 6 aa, synthetic construct
PFEQMF

SEQ ID NO: 27403 - protein, 6 aa, synthetic construct
PFEQMW

SEQ ID NO: 27404 - protein, 6 aa, synthetic construct
PFEQMY

SEQ ID NO: 27405 - protein, 6 aa, synthetic construct
PFEQFD

SEQ ID NO: 27406 - protein, 6 aa, synthetic construct
PFEQFE

SEQ ID NO: 27407 - protein, 6 aa, synthetic construct
PFEQFF

SEQ ID NO: 27408 - protein, 6 aa, synthetic construct
PFEQFW

SEQ ID NO: 27409 - protein, 6 aa, synthetic construct
PFEQFY

SEQ ID NO: 27410 - protein, 6 aa, synthetic construct
PFEQPD

SEQ ID NO: 27411 - protein, 6 aa, synthetic construct
PFEQPE

SEQ ID NO: 27412 - protein, 6 aa, synthetic construct
PFEQPF

SEQ ID NO: 27413 - protein, 6 aa, synthetic construct
PFEQPW

SEQ ID NO: 27414 - protein, 6 aa, synthetic construct
PFEQPY

SEQ ID NO: 27415 - protein, 6 aa, synthetic construct
PFEQSD

SEQ ID NO: 27416 - protein, 6 aa, synthetic construct
PFEQSE

SEQ ID NO: 27417 - protein, 6 aa, synthetic construct
PFEQSF

SEQ ID NO: 27418 - protein, 6 aa, synthetic construct
PFEQSW

SEQ ID NO: 27419 - protein, 6 aa, synthetic construct
PFEQSY

SEQ ID NO: 27420 - protein, 6 aa, synthetic construct
PFEQTD

SEQ ID NO: 27421 - protein, 6 aa, synthetic construct
PFEQTE

SEQ ID NO: 27422 - protein, 6 aa, synthetic construct
PFEQTF

SEQ ID NO: 27423 - protein, 6 aa, synthetic construct
PFEQTW

SEQ ID NO: 27424 - protein, 6 aa, synthetic construct
PFEQTY

SEQ ID NO: 27425 - protein, 6 aa, synthetic construct
PFEQWD

SEQ ID NO: 27426 - protein, 6 aa, synthetic construct
PFEQWE

SEQ ID NO: 27427 - protein, 6 aa, synthetic construct
PFEQWF

SEQ ID NO: 27428 - protein, 6 aa, synthetic construct
PFEQWW

SEQ ID NO: 27429 - protein, 6 aa, synthetic construct
PFEQWY

SEQ ID NO: 27430 - protein, 6 aa, synthetic construct
PFEQYD

SEQ ID NO: 27431 - protein, 6 aa, synthetic construct
PFEQYE

SEQ ID NO: 27432 - protein, 6 aa, synthetic construct
PFEQYF

SEQ ID NO: 27433 - protein, 6 aa, synthetic construct
PFEQYW

SEQ ID NO: 27434 - protein, 6 aa, synthetic construct
PFEQYY

SEQ ID NO: 27435 - protein, 6 aa, synthetic construct
PFEQVD

SEQ ID NO: 27436 - protein, 6 aa, synthetic construct
PFEQVE

SEQ ID NO: 27437 - protein, 6 aa, synthetic construct
PFEQVF

SEQ ID NO: 27438 - protein, 6 aa, synthetic construct
PFEQVW

SEQ ID NO: 27439 - protein, 6 aa, synthetic construct
PFEQVY

SEQ ID NO: 27440 - protein, 6 aa, synthetic construct
PFEEAD

SEQ ID NO: 27441 - protein, 6 aa, synthetic construct
PFEEAE

SEQ ID NO: 27442 - protein, 6 aa, synthetic construct
PFEEAF

SEQ ID NO: 27443 - protein, 6 aa, synthetic construct
PFEEAW

SEQ ID NO: 27444 - protein, 6 aa, synthetic construct
PFEEAY

SEQ ID NO: 27445 - protein, 6 aa, synthetic construct
PFEERD

SEQ ID NO: 27446 - protein, 6 aa, synthetic construct
PFEERE

SEQ ID NO: 27447 - protein, 6 aa, synthetic construct
PFEERF

SEQ ID NO: 27448 - protein, 6 aa, synthetic construct
PFEERW

SEQ ID NO: 27449 - protein, 6 aa, synthetic construct
PFEERY

SEQ ID NO: 27450 - protein, 6 aa, synthetic construct
PFEEND

SEQ ID NO: 27451 - protein, 6 aa, synthetic construct
PFEENE

SEQ ID NO: 27452 - protein, 6 aa, synthetic construct
PFEENF

SEQ ID NO: 27453 - protein, 6 aa, synthetic construct
PFEENW

SEQ ID NO: 27454 - protein, 6 aa, synthetic construct
PFEENY

SEQ ID NO: 27455 - protein, 6 aa, synthetic construct
PFEEDD

SEQ ID NO: 27456 - protein, 6 aa, synthetic construct
PFEEDE

SEQ ID NO: 27457 - protein, 6 aa, synthetic construct
PFEEDF

SEQ ID NO: 27458 - protein, 6 aa, synthetic construct
PFEEDW

SEQ ID NO: 27459 - protein, 6 aa, synthetic construct
PFEEDY

SEQ ID NO: 27460 - protein, 6 aa, synthetic construct
PFEECD

SEQ ID NO: 27461 - protein, 6 aa, synthetic construct
PFEECE

SEQ ID NO: 27462 - protein, 6 aa, synthetic construct
PFEECF

SEQ ID NO: 27463 - protein, 6 aa, synthetic construct
PFEECW

SEQ ID NO: 27464 - protein, 6 aa, synthetic construct
PFEECY

SEQ ID NO: 27465 - protein, 6 aa, synthetic construct
PFEEQD

SEQ ID NO: 27466 - protein, 6 aa, synthetic construct
PFEEQE

SEQ ID NO: 27467 - protein, 6 aa, synthetic construct
PFEEQF

SEQ ID NO: 27468 - protein, 6 aa, synthetic construct
PFEEQW

SEQ ID NO: 27469 - protein, 6 aa, synthetic construct
PFEEQY

SEQ ID NO: 27470 - protein, 6 aa, synthetic construct
PFEEED

SEQ ID NO: 27471 - protein, 6 aa, synthetic construct
PFEEEE

SEQ ID NO: 27472 - protein, 6 aa, synthetic construct
PFEEEF

SEQ ID NO: 27473 - protein, 6 aa, synthetic construct
PFEEEW

SEQ ID NO: 27474 - protein, 6 aa, synthetic construct
PFEEEY

SEQ ID NO: 27475 - protein, 6 aa, synthetic construct
PFEEGD

SEQ ID NO: 27476 - protein, 6 aa, synthetic construct
PFEEGE

SEQ ID NO: 27477 - protein, 6 aa, synthetic construct
PFEEGF

SEQ ID NO: 27478 - protein, 6 aa, synthetic construct
PFEEGW

SEQ ID NO: 27479 - protein, 6 aa, synthetic construct
PFEEGY

SEQ ID NO: 27480 - protein, 6 aa, synthetic construct
PFEEHD

SEQ ID NO: 27481 - protein, 6 aa, synthetic construct
PFEEHE

SEQ ID NO: 27482 - protein, 6 aa, synthetic construct
PFEEHF

SEQ ID NO: 27483 - protein, 6 aa, synthetic construct
PFEEHW

SEQ ID NO: 27484 - protein, 6 aa, synthetic construct
PFEEHY

SEQ ID NO: 27485 - protein, 6 aa, synthetic construct
PFEEID

SEQ ID NO: 27486 - protein, 6 aa, synthetic construct
PFEEIE

SEQ ID NO: 27487 - protein, 6 aa, synthetic construct
PFEEIF

SEQ ID NO: 27488 - protein, 6 aa, synthetic construct
PFEEIW

SEQ ID NO: 27489 - protein, 6 aa, synthetic construct
PFEEIY

SEQ ID NO: 27490 - protein, 6 aa, synthetic construct
PFEELD

SEQ ID NO: 27491 - protein, 6 aa, synthetic construct
PFEELE

SEQ ID NO: 27492 - protein, 6 aa, synthetic construct
PFEELF

SEQ ID NO: 27493 - protein, 6 aa, synthetic construct
PFEELW

SEQ ID NO: 27494 - protein, 6 aa, synthetic construct
PFEELY

SEQ ID NO: 27495 - protein, 6 aa, synthetic construct
PFEEKD

SEQ ID NO: 27496 - protein, 6 aa, synthetic construct
PFEEKE

SEQ ID NO: 27497 - protein, 6 aa, synthetic construct
PFEEKF

SEQ ID NO: 27498 - protein, 6 aa, synthetic construct
PFEEKW

SEQ ID NO: 27499 - protein, 6 aa, synthetic construct
PFEEKY

SEQ ID NO: 27500 - protein, 6 aa, synthetic construct
PFEEMD

SEQ ID NO: 27501 - protein, 6 aa, synthetic construct
PFEEME

SEQ ID NO: 27502 - protein, 6 aa, synthetic construct
PFEEMF

SEQ ID NO: 27503 - protein, 6 aa, synthetic construct
PFEEMW

SEQ ID NO: 27504 - protein, 6 aa, synthetic construct
PFEEMY

SEQ ID NO: 27505 - protein, 6 aa, synthetic construct
PFEEFD

SEQ ID NO: 27506 - protein, 6 aa, synthetic construct
PFEEFE

SEQ ID NO: 27507 - protein, 6 aa, synthetic construct
PFEEFF

SEQ ID NO: 27508 - protein, 6 aa, synthetic construct
PFEEFW

SEQ ID NO: 27509 - protein, 6 aa, synthetic construct
PFEEFY

SEQ ID NO: 27510 - protein, 6 aa, synthetic construct
PFEEPD

SEQ ID NO: 27511 - protein, 6 aa, synthetic construct
PFEEPE

SEQ ID NO: 27512 - protein, 6 aa, synthetic construct
PFEEPF

SEQ ID NO: 27513 - protein, 6 aa, synthetic construct
PFEEPW

SEQ ID NO: 27514 - protein, 6 aa, synthetic construct
PFEEPY

SEQ ID NO: 27515 - protein, 6 aa, synthetic construct
PFEESD

SEQ ID NO: 27516 - protein, 6 aa, synthetic construct
PFEESE

SEQ ID NO: 27517 - protein, 6 aa, synthetic construct
PFEESF

SEQ ID NO: 27518 - protein, 6 aa, synthetic construct
PFEESW

SEQ ID NO: 27519 - protein, 6 aa, synthetic construct
PFEESY

SEQ ID NO: 27520 - protein, 6 aa, synthetic construct
PFEETD

SEQ ID NO: 27521 - protein, 6 aa, synthetic construct
PFEETE

SEQ ID NO: 27522 - protein, 6 aa, synthetic construct
PFEETF

SEQ ID NO: 27523 - protein, 6 aa, synthetic construct
PFEETW

SEQ ID NO: 27524 - protein, 6 aa, synthetic construct
PFEETY

SEQ ID NO: 27525 - protein, 6 aa, synthetic construct
PFEEWD

SEQ ID NO: 27526 - protein, 6 aa, synthetic construct
PFEEWE

SEQ ID NO: 27527 - protein, 6 aa, synthetic construct
PFEEWF

SEQ ID NO: 27528 - protein, 6 aa, synthetic construct
PFEEWW

SEQ ID NO: 27529 - protein, 6 aa, synthetic construct
PFEEWY

SEQ ID NO: 27530 - protein, 6 aa, synthetic construct
PFEEYD

SEQ ID NO: 27531 - protein, 6 aa, synthetic construct
PFEEYE

SEQ ID NO: 27532 - protein, 6 aa, synthetic construct
PFEEYF

SEQ ID NO: 27533 - protein, 6 aa, synthetic construct
PFEEYW

SEQ ID NO: 27534 - protein, 6 aa, synthetic construct
PFEEYY

SEQ ID NO: 27535 - protein, 6 aa, synthetic construct
PFEEVD

SEQ ID NO: 27536 - protein, 6 aa, synthetic construct
PFEEVE

SEQ ID NO: 27537 - protein, 6 aa, synthetic construct
PFEEVF

SEQ ID NO: 27538 - protein, 6 aa, synthetic construct
PFEEVW

SEQ ID NO: 27539 - protein, 6 aa, synthetic construct
PFEEVY

SEQ ID NO: 27540 - protein, 6 aa, synthetic construct
PFEGAD

SEQ ID NO: 27541 - protein, 6 aa, synthetic construct
PFEGAE

SEQ ID NO: 27542 - protein, 6 aa, synthetic construct
PFEGAF

SEQ ID NO: 27543 - protein, 6 aa, synthetic construct
PFEGAW

SEQ ID NO: 27544 - protein, 6 aa, synthetic construct
PFEGAY

SEQ ID NO: 27545 - protein, 6 aa, synthetic construct
PFEGRD

SEQ ID NO: 27546 - protein, 6 aa, synthetic construct
PFEGRE

SEQ ID NO: 27547 - protein, 6 aa, synthetic construct
PFEGRF

SEQ ID NO: 27548 - protein, 6 aa, synthetic construct
PFEGRW

SEQ ID NO: 27549 - protein, 6 aa, synthetic construct
PFEGRY

SEQ ID NO: 27550 - protein, 6 aa, synthetic construct
PFEGND

SEQ ID NO: 27551 - protein, 6 aa, synthetic construct
PFEGNE

SEQ ID NO: 27552 - protein, 6 aa, synthetic construct
PFEGNF

SEQ ID NO: 27553 - protein, 6 aa, synthetic construct
PFEGNW

SEQ ID NO: 27554 - protein, 6 aa, synthetic construct
PFEGNY

SEQ ID NO: 27555 - protein, 6 aa, synthetic construct
PFEGDD

SEQ ID NO: 27556 - protein, 6 aa, synthetic construct
PFEGDE

SEQ ID NO: 27557 - protein, 6 aa, synthetic construct
PFEGDF

SEQ ID NO: 27558 - protein, 6 aa, synthetic construct
PFEGDW

SEQ ID NO: 27559 - protein, 6 aa, synthetic construct
PFEGDY

SEQ ID NO: 27560 - protein, 6 aa, synthetic construct
PFEGCD

SEQ ID NO: 27561 - protein, 6 aa, synthetic construct
PFEGCE

SEQ ID NO: 27562 - protein, 6 aa, synthetic construct
PFEGCF

SEQ ID NO: 27563 - protein, 6 aa, synthetic construct
PFEGCW

SEQ ID NO: 27564 - protein, 6 aa, synthetic construct
PFEGCY

SEQ ID NO: 27565 - protein, 6 aa, synthetic construct
PFEGQD

SEQ ID NO: 27566 - protein, 6 aa, synthetic construct
PFEGQE

SEQ ID NO: 27567 - protein, 6 aa, synthetic construct
PFEGQF

SEQ ID NO: 27568 - protein, 6 aa, synthetic construct
PFEGQW

SEQ ID NO: 27569 - protein, 6 aa, synthetic construct
PFEGQY

SEQ ID NO: 27570 - protein, 6 aa, synthetic construct
PFEGED

SEQ ID NO: 27571 - protein, 6 aa, synthetic construct
PFEGEE

SEQ ID NO: 27572 - protein, 6 aa, synthetic construct
PFEGEF

SEQ ID NO: 27573 - protein, 6 aa, synthetic construct
PFEGEW

SEQ ID NO: 27574 - protein, 6 aa, synthetic construct
PFEGEY

SEQ ID NO: 27575 - protein, 6 aa, synthetic construct
PFEGGD

SEQ ID NO: 27576 - protein, 6 aa, synthetic construct
PFEGGE

SEQ ID NO: 27577 - protein, 6 aa, synthetic construct
PFEGGF

SEQ ID NO: 27578 - protein, 6 aa, synthetic construct
PFEGGW

SEQ ID NO: 27579 - protein, 6 aa, synthetic construct
PFEGGY

SEQ ID NO: 27580 - protein, 6 aa, synthetic construct
PFEGHD

SEQ ID NO: 27581 - protein, 6 aa, synthetic construct
PFEGHE

SEQ ID NO: 27582 - protein, 6 aa, synthetic construct
PFEGHF

SEQ ID NO: 27583 - protein, 6 aa, synthetic construct
PFEGHW

SEQ ID NO: 27584 - protein, 6 aa, synthetic construct
PFEGHY

SEQ ID NO: 27585 - protein, 6 aa, synthetic construct
PFEGID

SEQ ID NO: 27586 - protein, 6 aa, synthetic construct
PFEGIE

SEQ ID NO: 27587 - protein, 6 aa, synthetic construct
PFEGIF

SEQ ID NO: 27588 - protein, 6 aa, synthetic construct
PFEGIW

SEQ ID NO: 27589 - protein, 6 aa, synthetic construct
PFEGIY

SEQ ID NO: 27590 - protein, 6 aa, synthetic construct
PFEGLD

SEQ ID NO: 27591 - protein, 6 aa, synthetic construct
PFEGLE

SEQ ID NO: 27592 - protein, 6 aa, synthetic construct
PFEGLF

SEQ ID NO: 27593 - protein, 6 aa, synthetic construct
PFEGLW

SEQ ID NO: 27594 - protein, 6 aa, synthetic construct
PFEGLY

SEQ ID NO: 27595 - protein, 6 aa, synthetic construct
PFEGKD

SEQ ID NO: 27596 - protein, 6 aa, synthetic construct
PFEGKE

SEQ ID NO: 27597 - protein, 6 aa, synthetic construct
PFEGKF

SEQ ID NO: 27598 - protein, 6 aa, synthetic construct
PFEGKW

SEQ ID NO: 27599 - protein, 6 aa, synthetic construct
PFEGKY

SEQ ID NO: 27600 - protein, 6 aa, synthetic construct
PFEGMD

SEQ ID NO: 27601 - protein, 6 aa, synthetic construct
PFEGME

SEQ ID NO: 27602 - protein, 6 aa, synthetic construct
PFEGMF

SEQ ID NO: 27603 - protein, 6 aa, synthetic construct
PFEGMW

SEQ ID NO: 27604 - protein, 6 aa, synthetic construct
PFEGMY

SEQ ID NO: 27605 - protein, 6 aa, synthetic construct
PFEGFD

SEQ ID NO: 27606 - protein, 6 aa, synthetic construct
PFEGFE

SEQ ID NO: 27607 - protein, 6 aa, synthetic construct
PFEGFF

SEQ ID NO: 27608 - protein, 6 aa, synthetic construct
PFEGFW

SEQ ID NO: 27609 - protein, 6 aa, synthetic construct
PFEGFY

SEQ ID NO: 27610 - protein, 6 aa, synthetic construct
PFEGPD

SEQ ID NO: 27611 - protein, 6 aa, synthetic construct
PFEGPE

SEQ ID NO: 27612 - protein, 6 aa, synthetic construct
PFEGPF

SEQ ID NO: 27613 - protein, 6 aa, synthetic construct
PFEGPW

SEQ ID NO: 27614 - protein, 6 aa, synthetic construct
PFEGPY

SEQ ID NO: 27615 - protein, 6 aa, synthetic construct
PFEGSD

SEQ ID NO: 27616 - protein, 6 aa, synthetic construct
PFEGSE

SEQ ID NO: 27617 - protein, 6 aa, synthetic construct
PFEGSF

SEQ ID NO: 27618 - protein, 6 aa, synthetic construct
PFEGSW

SEQ ID NO: 27619 - protein, 6 aa, synthetic construct
PFEGSY

SEQ ID NO: 27620 - protein, 6 aa, synthetic construct
PFEGTD

SEQ ID NO: 27621 - protein, 6 aa, synthetic construct
PFEGTE

SEQ ID NO: 27622 - protein, 6 aa, synthetic construct
PFEGTF

SEQ ID NO: 27623 - protein, 6 aa, synthetic construct
PFEGTW

SEQ ID NO: 27624 - protein, 6 aa, synthetic construct
PFEGTY

SEQ ID NO: 27625 - protein, 6 aa, synthetic construct
PFEGWD

SEQ ID NO: 27626 - protein, 6 aa, synthetic construct
PFEGWE

SEQ ID NO: 27627 - protein, 6 aa, synthetic construct
PFEGWF

SEQ ID NO: 27628 - protein, 6 aa, synthetic construct
PFEGWW

SEQ ID NO: 27629 - protein, 6 aa, synthetic construct
PFEGWY

SEQ ID NO: 27630 - protein, 6 aa, synthetic construct
PFEGYD

SEQ ID NO: 27631 - protein, 6 aa, synthetic construct
PFEGYE

SEQ ID NO: 27632 - protein, 6 aa, synthetic construct
PFEGYF

SEQ ID NO: 27633 - protein, 6 aa, synthetic construct
PFEGYW

SEQ ID NO: 27634 - protein, 6 aa, synthetic construct
PFEGYY

SEQ ID NO: 27635 - protein, 6 aa, synthetic construct
PFEGVD

SEQ ID NO: 27636 - protein, 6 aa, synthetic construct
PFEGVE

SEQ ID NO: 27637 - protein, 6 aa, synthetic construct
PFEGVF

SEQ ID NO: 27638 - protein, 6 aa, synthetic construct
PFEGVW

SEQ ID NO: 27639 - protein, 6 aa, synthetic construct
PFEGVY

SEQ ID NO: 27640 - protein, 6 aa, synthetic construct
PFEHAD

SEQ ID NO: 27641 - protein, 6 aa, synthetic construct
PFEHAE

SEQ ID NO: 27642 - protein, 6 aa, synthetic construct
PFEHAF

SEQ ID NO: 27643 - protein, 6 aa, synthetic construct
PFEHAW

SEQ ID NO: 27644 - protein, 6 aa, synthetic construct
PFEHAY

SEQ ID NO: 27645 - protein, 6 aa, synthetic construct
PFEHRD

SEQ ID NO: 27646 - protein, 6 aa, synthetic construct
PFEHRE

SEQ ID NO: 27647 - protein, 6 aa, synthetic construct
PFEHRF

SEQ ID NO: 27648 - protein, 6 aa, synthetic construct
PFEHRW

SEQ ID NO: 27649 - protein, 6 aa, synthetic construct
PFEHRY

SEQ ID NO: 27650 - protein, 6 aa, synthetic construct
PFEHND

SEQ ID NO: 27651 - protein, 6 aa, synthetic construct
PFEHNE

SEQ ID NO: 27652 - protein, 6 aa, synthetic construct
PFEHNF

SEQ ID NO: 27653 - protein, 6 aa, synthetic construct
PFEHNW

SEQ ID NO: 27654 - protein, 6 aa, synthetic construct
PFEHNY

SEQ ID NO: 27655 - protein, 6 aa, synthetic construct
PFEHDD

SEQ ID NO: 27656 - protein, 6 aa, synthetic construct
PFEHDE

SEQ ID NO: 27657 - protein, 6 aa, synthetic construct
PFEHDF

SEQ ID NO: 27658 - protein, 6 aa, synthetic construct
PFEHDW

SEQ ID NO: 27659 - protein, 6 aa, synthetic construct
PFEHDY

SEQ ID NO: 27660 - protein, 6 aa, synthetic construct
PFEHCD

SEQ ID NO: 27661 - protein, 6 aa, synthetic construct
PFEHCE

SEQ ID NO: 27662 - protein, 6 aa, synthetic construct
PFEHCF

SEQ ID NO: 27663 - protein, 6 aa, synthetic construct
PFEHCW

SEQ ID NO: 27664 - protein, 6 aa, synthetic construct
PFEHCY

SEQ ID NO: 27665 - protein, 6 aa, synthetic construct
PFEHQD

SEQ ID NO: 27666 - protein, 6 aa, synthetic construct
PFEHQE

SEQ ID NO: 27667 - protein, 6 aa, synthetic construct
PFEHQF

SEQ ID NO: 27668 - protein, 6 aa, synthetic construct
PFEHQW

SEQ ID NO: 27669 - protein, 6 aa, synthetic construct
PFEHQY

SEQ ID NO: 27670 - protein, 6 aa, synthetic construct
PFEHED

SEQ ID NO: 27671 - protein, 6 aa, synthetic construct
PFEHEE

SEQ ID NO: 27672 - protein, 6 aa, synthetic construct
PFEHEF

SEQ ID NO: 27673 - protein, 6 aa, synthetic construct
PFEHEW

SEQ ID NO: 27674 - protein, 6 aa, synthetic construct
PFEHEY

SEQ ID NO: 27675 - protein, 6 aa, synthetic construct
PFEHGD

SEQ ID NO: 27676 - protein, 6 aa, synthetic construct
PFEHGE

SEQ ID NO: 27677 - protein, 6 aa, synthetic construct
PFEHGF

SEQ ID NO: 27678 - protein, 6 aa, synthetic construct
PFEHGW

SEQ ID NO: 27679 - protein, 6 aa, synthetic construct
PFEHGY

SEQ ID NO: 27680 - protein, 6 aa, synthetic construct
PFEHHD

SEQ ID NO: 27681 - protein, 6 aa, synthetic construct
PFEHHE

SEQ ID NO: 27682 - protein, 6 aa, synthetic construct
PFEHHF

SEQ ID NO: 27683 - protein, 6 aa, synthetic construct
PFEHHW

SEQ ID NO: 27684 - protein, 6 aa, synthetic construct
PFEHHY

SEQ ID NO: 27685 - protein, 6 aa, synthetic construct
PFEHID

SEQ ID NO: 27686 - protein, 6 aa, synthetic construct
PFEHIE

SEQ ID NO: 27687 - protein, 6 aa, synthetic construct
PFEHIF

SEQ ID NO: 27688 - protein, 6 aa, synthetic construct
PFEHIW

SEQ ID NO: 27689 - protein, 6 aa, synthetic construct
PFEHIY

SEQ ID NO: 27690 - protein, 6 aa, synthetic construct
PFEHLD

SEQ ID NO: 27691 - protein, 6 aa, synthetic construct
PFEHLE

SEQ ID NO: 27692 - protein, 6 aa, synthetic construct
PFEHLF

SEQ ID NO: 27693 - protein, 6 aa, synthetic construct
PFEHLW

SEQ ID NO: 27694 - protein, 6 aa, synthetic construct
PFEHLY

SEQ ID NO: 27695 - protein, 6 aa, synthetic construct
PFEHKD

SEQ ID NO: 27696 - protein, 6 aa, synthetic construct
PFEHKE

SEQ ID NO: 27697 - protein, 6 aa, synthetic construct
PFEHKF

SEQ ID NO: 27698 - protein, 6 aa, synthetic construct
PFEHKW

SEQ ID NO: 27699 - protein, 6 aa, synthetic construct
PFEHKY

SEQ ID NO: 27700 - protein, 6 aa, synthetic construct
PFEHMD

SEQ ID NO: 27701 - protein, 6 aa, synthetic construct
PFEHME

SEQ ID NO: 27702 - protein, 6 aa, synthetic construct
PFEHMF

SEQ ID NO: 27703 - protein, 6 aa, synthetic construct
PFEHMW

SEQ ID NO: 27704 - protein, 6 aa, synthetic construct
PFEHMY

SEQ ID NO: 27705 - protein, 6 aa, synthetic construct
PFEHFD

SEQ ID NO: 27706 - protein, 6 aa, synthetic construct
PFEHFE

SEQ ID NO: 27707 - protein, 6 aa, synthetic construct
PFEHFF

SEQ ID NO: 27708 - protein, 6 aa, synthetic construct
PFEHFW

SEQ ID NO: 27709 - protein, 6 aa, synthetic construct
PFEHFY

SEQ ID NO: 27710 - protein, 6 aa, synthetic construct
PFEHPD

SEQ ID NO: 27711 - protein, 6 aa, synthetic construct
PFEHPE

SEQ ID NO: 27712 - protein, 6 aa, synthetic construct
PFEHPF

SEQ ID NO: 27713 - protein, 6 aa, synthetic construct
PFEHPW

SEQ ID NO: 27714 - protein, 6 aa, synthetic construct
PFEHPY

SEQ ID NO: 27715 - protein, 6 aa, synthetic construct
PFEHSD

SEQ ID NO: 27716 - protein, 6 aa, synthetic construct
PFEHSE

SEQ ID NO: 27717 - protein, 6 aa, synthetic construct
PFEHSF

SEQ ID NO: 27718 - protein, 6 aa, synthetic construct
PFEHSW

SEQ ID NO: 27719 - protein, 6 aa, synthetic construct
PFEHSY

SEQ ID NO: 27720 - protein, 6 aa, synthetic construct
PFEHTD

SEQ ID NO: 27721 - protein, 6 aa, synthetic construct
PFEHTE

SEQ ID NO: 27722 - protein, 6 aa, synthetic construct
PFEHTF

SEQ ID NO: 27723 - protein, 6 aa, synthetic construct
PFEHTW

SEQ ID NO: 27724 - protein, 6 aa, synthetic construct
PFEHTY

SEQ ID NO: 27725 - protein, 6 aa, synthetic construct
PFEHWD

SEQ ID NO: 27726 - protein, 6 aa, synthetic construct
PFEHWE

SEQ ID NO: 27727 - protein, 6 aa, synthetic construct
PFEHWF

SEQ ID NO: 27728 - protein, 6 aa, synthetic construct
PFEHWW

SEQ ID NO: 27729 - protein, 6 aa, synthetic construct
PFEHWY

SEQ ID NO: 27730 - protein, 6 aa, synthetic construct
PFEHYD

SEQ ID NO: 27731 - protein, 6 aa, synthetic construct
PFEHYE

SEQ ID NO: 27732 - protein, 6 aa, synthetic construct
PFEHYF

SEQ ID NO: 27733 - protein, 6 aa, synthetic construct
PFEHYW

SEQ ID NO: 27734 - protein, 6 aa, synthetic construct
PFEHYY

SEQ ID NO: 27735 - protein, 6 aa, synthetic construct
PFEHVD

SEQ ID NO: 27736 - protein, 6 aa, synthetic construct
PFEHVE

SEQ ID NO: 27737 - protein, 6 aa, synthetic construct
PFEHVF

SEQ ID NO: 27738 - protein, 6 aa, synthetic construct
PFEHVW

SEQ ID NO: 27739 - protein, 6 aa, synthetic construct
PFEHVY

SEQ ID NO: 27740 - protein, 6 aa, synthetic construct
PFEIAD

SEQ ID NO: 27741 - protein, 6 aa, synthetic construct
PFEIAE

SEQ ID NO: 27742 - protein, 6 aa, synthetic construct
PFEIAF

SEQ ID NO: 27743 - protein, 6 aa, synthetic construct
PFEIAW

SEQ ID NO: 27744 - protein, 6 aa, synthetic construct
PFEIAY

SEQ ID NO: 27745 - protein, 6 aa, synthetic construct
PFEIRD

SEQ ID NO: 27746 - protein, 6 aa, synthetic construct
PFEIRE

SEQ ID NO: 27747 - protein, 6 aa, synthetic construct
PFEIRF

SEQ ID NO: 27748 - protein, 6 aa, synthetic construct
PFEIRW

SEQ ID NO: 27749 - protein, 6 aa, synthetic construct
PFEIRY

SEQ ID NO: 27750 - protein, 6 aa, synthetic construct
PFEIND

SEQ ID NO: 27751 - protein, 6 aa, synthetic construct
PFEINE

SEQ ID NO: 27752 - protein, 6 aa, synthetic construct
PFEINF

SEQ ID NO: 27753 - protein, 6 aa, synthetic construct
PFEINW

SEQ ID NO: 27754 - protein, 6 aa, synthetic construct
PFEINY

SEQ ID NO: 27755 - protein, 6 aa, synthetic construct
PFEIDD

SEQ ID NO: 27756 - protein, 6 aa, synthetic construct
PFEIDE

SEQ ID NO: 27757 - protein, 6 aa, synthetic construct
PFEIDF

SEQ ID NO: 27758 - protein, 6 aa, synthetic construct
PFEIDW

SEQ ID NO: 27759 - protein, 6 aa, synthetic construct
PFEIDY

SEQ ID NO: 27760 - protein, 6 aa, synthetic construct
PFEICD

SEQ ID NO: 27761 - protein, 6 aa, synthetic construct
PFEICE

SEQ ID NO: 27762 - protein, 6 aa, synthetic construct
PFEICF

SEQ ID NO: 27763 - protein, 6 aa, synthetic construct
PFEICW

SEQ ID NO: 27764 - protein, 6 aa, synthetic construct
PFEICY

SEQ ID NO: 27765 - protein, 6 aa, synthetic construct
PFEIQD

SEQ ID NO: 27766 - protein, 6 aa, synthetic construct
PFEIQE

SEQ ID NO: 27767 - protein, 6 aa, synthetic construct
PFEIQF

SEQ ID NO: 27768 - protein, 6 aa, synthetic construct
PFEIQW

SEQ ID NO: 27769 - protein, 6 aa, synthetic construct
PFEIQY

SEQ ID NO: 27770 - protein, 6 aa, synthetic construct
PFEIED

SEQ ID NO: 27771 - protein, 6 aa, synthetic construct
PFEIEE

SEQ ID NO: 27772 - protein, 6 aa, synthetic construct
PFEIEF

SEQ ID NO: 27773 - protein, 6 aa, synthetic construct
PFEIEW

SEQ ID NO: 27774 - protein, 6 aa, synthetic construct
PFEIEY

SEQ ID NO: 27775 - protein, 6 aa, synthetic construct
PFEIGD

SEQ ID NO: 27776 - protein, 6 aa, synthetic construct
PFEIGE

SEQ ID NO: 27777 - protein, 6 aa, synthetic construct
PFEIGF

SEQ ID NO: 27778 - protein, 6 aa, synthetic construct
PFEIGW

SEQ ID NO: 27779 - protein, 6 aa, synthetic construct
PFEIGY

SEQ ID NO: 27780 - protein, 6 aa, synthetic construct
PFEIHD

SEQ ID NO: 27781 - protein, 6 aa, synthetic construct
PFEIHE

SEQ ID NO: 27782 - protein, 6 aa, synthetic construct
PFEIHF

SEQ ID NO: 27783 - protein, 6 aa, synthetic construct
PFEIHW

SEQ ID NO: 27784 - protein, 6 aa, synthetic construct
PFEIHY

SEQ ID NO: 27785 - protein, 6 aa, synthetic construct
PFEIID

SEQ ID NO: 27786 - protein, 6 aa, synthetic construct
PFEIIE

SEQ ID NO: 27787 - protein, 6 aa, synthetic construct
PFEIIF

SEQ ID NO: 27788 - protein, 6 aa, synthetic construct
PFEIIW

SEQ ID NO: 27789 - protein, 6 aa, synthetic construct
PFEIIY

SEQ ID NO: 27790 - protein, 6 aa, synthetic construct
PFEILD

SEQ ID NO: 27791 - protein, 6 aa, synthetic construct
PFEILE

SEQ ID NO: 27792 - protein, 6 aa, synthetic construct
PFEILF

SEQ ID NO: 27793 - protein, 6 aa, synthetic construct
PFEILW

SEQ ID NO: 27794 - protein, 6 aa, synthetic construct
PFEILY

SEQ ID NO: 27795 - protein, 6 aa, synthetic construct
PFEIKD

SEQ ID NO: 27796 - protein, 6 aa, synthetic construct
PFEIKE

SEQ ID NO: 27797 - protein, 6 aa, synthetic construct
PFEIKF

SEQ ID NO: 27798 - protein, 6 aa, synthetic construct
PFEIKW

SEQ ID NO: 27799 - protein, 6 aa, synthetic construct
PFEIKY

SEQ ID NO: 27800 - protein, 6 aa, synthetic construct
PFEIMD

SEQ ID NO: 27801 - protein, 6 aa, synthetic construct
PFEIME

SEQ ID NO: 27802 - protein, 6 aa, synthetic construct
PFEIMF

SEQ ID NO: 27803 - protein, 6 aa, synthetic construct
PFEIMW

SEQ ID NO: 27804 - protein, 6 aa, synthetic construct
PFEIMY

SEQ ID NO: 27805 - protein, 6 aa, synthetic construct
PFEIFD

SEQ ID NO: 27806 - protein, 6 aa, synthetic construct
PFEIFE

SEQ ID NO: 27807 - protein, 6 aa, synthetic construct
PFEIFF

SEQ ID NO: 27808 - protein, 6 aa, synthetic construct
PFEIFW

SEQ ID NO: 27809 - protein, 6 aa, synthetic construct
PFEIFY

SEQ ID NO: 27810 - protein, 6 aa, synthetic construct
PFEIPD

SEQ ID NO: 27811 - protein, 6 aa, synthetic construct
PFEIPE

SEQ ID NO: 27812 - protein, 6 aa, synthetic construct
PFEIPF

SEQ ID NO: 27813 - protein, 6 aa, synthetic construct
PFEIPW

SEQ ID NO: 27814 - protein, 6 aa, synthetic construct
PFEIPY

SEQ ID NO: 27815 - protein, 6 aa, synthetic construct
PFEISD

SEQ ID NO: 27816 - protein, 6 aa, synthetic construct
PFEISE

SEQ ID NO: 27817 - protein, 6 aa, synthetic construct
PFEISF

SEQ ID NO: 27818 - protein, 6 aa, synthetic construct
PFEISW

SEQ ID NO: 27819 - protein, 6 aa, synthetic construct
PFEISY

SEQ ID NO: 27820 - protein, 6 aa, synthetic construct
PFEITD

SEQ ID NO: 27821 - protein, 6 aa, synthetic construct
PFEITE

SEQ ID NO: 27822 - protein, 6 aa, synthetic construct
PFEITF

SEQ ID NO: 27823 - protein, 6 aa, synthetic construct
PFEITW

SEQ ID NO: 27824 - protein, 6 aa, synthetic construct
PFEITY

SEQ ID NO: 27825 - protein, 6 aa, synthetic construct
PFEIWD

SEQ ID NO: 27826 - protein, 6 aa, synthetic construct
PFEIWE

SEQ ID NO: 27827 - protein, 6 aa, synthetic construct
PFEIWF

SEQ ID NO: 27828 - protein, 6 aa, synthetic construct
PFEIWW

SEQ ID NO: 27829 - protein, 6 aa, synthetic construct
PFEIWY

SEQ ID NO: 27830 - protein, 6 aa, synthetic construct
PFEIYD

SEQ ID NO: 27831 - protein, 6 aa, synthetic construct
PFEIYE

SEQ ID NO: 27832 - protein, 6 aa, synthetic construct
PFEIYF

SEQ ID NO: 27833 - protein, 6 aa, synthetic construct
PFEIYW

SEQ ID NO: 27834 - protein, 6 aa, synthetic construct
PFEIYY

SEQ ID NO: 27835 - protein, 6 aa, synthetic construct
PFEIVD

SEQ ID NO: 27836 - protein, 6 aa, synthetic construct
PFEIVE

SEQ ID NO: 27837 - protein, 6 aa, synthetic construct
PFEIVF

SEQ ID NO: 27838 - protein, 6 aa, synthetic construct
PFEIVW

SEQ ID NO: 27839 - protein, 6 aa, synthetic construct
PFEIVY

SEQ ID NO: 27840 - protein, 6 aa, synthetic construct
PFELAD

SEQ ID NO: 27841 - protein, 6 aa, synthetic construct
PFELAE

SEQ ID NO: 27842 - protein, 6 aa, synthetic construct
PFELAF

SEQ ID NO: 27843 - protein, 6 aa, synthetic construct
PFELAW

SEQ ID NO: 27844 - protein, 6 aa, synthetic construct
PFELAY

SEQ ID NO: 27845 - protein, 6 aa, synthetic construct
PFELRD

SEQ ID NO: 27846 - protein, 6 aa, synthetic construct
PFELRE

SEQ ID NO: 27847 - protein, 6 aa, synthetic construct
PFELRF

SEQ ID NO: 27848 - protein, 6 aa, synthetic construct
PFELRW

SEQ ID NO: 27849 - protein, 6 aa, synthetic construct
PFELRY

SEQ ID NO: 27850 - protein, 6 aa, synthetic construct
PFELND

SEQ ID NO: 27851 - protein, 6 aa, synthetic construct
PFELNE

SEQ ID NO: 27852 - protein, 6 aa, synthetic construct
PFELNF

SEQ ID NO: 27853 - protein, 6 aa, synthetic construct
PFELNW

SEQ ID NO: 27854 - protein, 6 aa, synthetic construct
PFELNY

SEQ ID NO: 27855 - protein, 6 aa, synthetic construct
PFELDD

SEQ ID NO: 27856 - protein, 6 aa, synthetic construct
PFELDE

SEQ ID NO: 27857 - protein, 6 aa, synthetic construct
PFELDF

SEQ ID NO: 27858 - protein, 6 aa, synthetic construct
PFELDW

SEQ ID NO: 27859 - protein, 6 aa, synthetic construct
PFELDY

SEQ ID NO: 27860 - protein, 6 aa, synthetic construct
PFELCD

SEQ ID NO: 27861 - protein, 6 aa, synthetic construct
PFELCE

SEQ ID NO: 27862 - protein, 6 aa, synthetic construct
PFELCF

SEQ ID NO: 27863 - protein, 6 aa, synthetic construct
PFELCW

SEQ ID NO: 27864 - protein, 6 aa, synthetic construct
PFELCY

SEQ ID NO: 27865 - protein, 6 aa, synthetic construct
PFELQD

SEQ ID NO: 27866 - protein, 6 aa, synthetic construct
PFELQE

SEQ ID NO: 27867 - protein, 6 aa, synthetic construct
PFELQF

SEQ ID NO: 27868 - protein, 6 aa, synthetic construct
PFELQW

SEQ ID NO: 27869 - protein, 6 aa, synthetic construct
PFELQY

SEQ ID NO: 27870 - protein, 6 aa, synthetic construct
PFELED

SEQ ID NO: 27871 - protein, 6 aa, synthetic construct
PFELEE

SEQ ID NO: 27872 - protein, 6 aa, synthetic construct
PFELEF

SEQ ID NO: 27873 - protein, 6 aa, synthetic construct
PFELEW

SEQ ID NO: 27874 - protein, 6 aa, synthetic construct
PFELEY

SEQ ID NO: 27875 - protein, 6 aa, synthetic construct
PFELGD

SEQ ID NO: 27876 - protein, 6 aa, synthetic construct
PFELGE

SEQ ID NO: 27877 - protein, 6 aa, synthetic construct
PFELGF

SEQ ID NO: 27878 - protein, 6 aa, synthetic construct
PFELGW

SEQ ID NO: 27879 - protein, 6 aa, synthetic construct
PFELGY

SEQ ID NO: 27880 - protein, 6 aa, synthetic construct
PFELHD

SEQ ID NO: 27881 - protein, 6 aa, synthetic construct
PFELHE

SEQ ID NO: 27882 - protein, 6 aa, synthetic construct
PFELHF

SEQ ID NO: 27883 - protein, 6 aa, synthetic construct
PFELHW

SEQ ID NO: 27884 - protein, 6 aa, synthetic construct
PFELHY

SEQ ID NO: 27885 - protein, 6 aa, synthetic construct
PFELID

SEQ ID NO: 27886 - protein, 6 aa, synthetic construct
PFELIE

SEQ ID NO: 27887 - protein, 6 aa, synthetic construct
PFELIF

SEQ ID NO: 27888 - protein, 6 aa, synthetic construct
PFELIW

SEQ ID NO: 27889 - protein, 6 aa, synthetic construct
PFELIY

SEQ ID NO: 27890 - protein, 6 aa, synthetic construct
PFELLD

SEQ ID NO: 27891 - protein, 6 aa, synthetic construct
PFELLE

SEQ ID NO: 27892 - protein, 6 aa, synthetic construct
PFELLF

SEQ ID NO: 27893 - protein, 6 aa, synthetic construct
PFELLW

SEQ ID NO: 27894 - protein, 6 aa, synthetic construct
PFELLY

SEQ ID NO: 27895 - protein, 6 aa, synthetic construct
PFELKD

SEQ ID NO: 27896 - protein, 6 aa, synthetic construct
PFELKE

SEQ ID NO: 27897 - protein, 6 aa, synthetic construct
PFELKF

SEQ ID NO: 27898 - protein, 6 aa, synthetic construct
PFELKW

SEQ ID NO: 27899 - protein, 6 aa, synthetic construct
PFELKY

SEQ ID NO: 27900 - protein, 6 aa, synthetic construct
PFELMD

SEQ ID NO: 27901 - protein, 6 aa, synthetic construct
PFELME

SEQ ID NO: 27902 - protein, 6 aa, synthetic construct
PFELMF

SEQ ID NO: 27903 - protein, 6 aa, synthetic construct
PFELMW

SEQ ID NO: 27904 - protein, 6 aa, synthetic construct
PFELMY

SEQ ID NO: 27905 - protein, 6 aa, synthetic construct
PFELFD

SEQ ID NO: 27906 - protein, 6 aa, synthetic construct
PFELFE

SEQ ID NO: 27907 - protein, 6 aa, synthetic construct
PFELFF

SEQ ID NO: 27908 - protein, 6 aa, synthetic construct
PFELFW

SEQ ID NO: 27909 - protein, 6 aa, synthetic construct
PFELFY

SEQ ID NO: 27910 - protein, 6 aa, synthetic construct
PFELPD

SEQ ID NO: 27911 - protein, 6 aa, synthetic construct
PFELPE

SEQ ID NO: 27912 - protein, 6 aa, synthetic construct
PFELPF

SEQ ID NO: 27913 - protein, 6 aa, synthetic construct
PFELPW

SEQ ID NO: 27914 - protein, 6 aa, synthetic construct
PFELPY

SEQ ID NO: 27915 - protein, 6 aa, synthetic construct
PFELSD

SEQ ID NO: 27916 - protein, 6 aa, synthetic construct
PFELSE

SEQ ID NO: 27917 - protein, 6 aa, synthetic construct
PFELSF

SEQ ID NO: 27918 - protein, 6 aa, synthetic construct
PFELSW

SEQ ID NO: 27919 - protein, 6 aa, synthetic construct
PFELSY

SEQ ID NO: 27920 - protein, 6 aa, synthetic construct
PFELTD

SEQ ID NO: 27921 - protein, 6 aa, synthetic construct
PFELTE

SEQ ID NO: 27922 - protein, 6 aa, synthetic construct
PFELTF

SEQ ID NO: 27923 - protein, 6 aa, synthetic construct
PFELTW

SEQ ID NO: 27924 - protein, 6 aa, synthetic construct
PFELTY

SEQ ID NO: 27925 - protein, 6 aa, synthetic construct
PFELWD

SEQ ID NO: 27926 - protein, 6 aa, synthetic construct
PFELWE

SEQ ID NO: 27927 - protein, 6 aa, synthetic construct
PFELWF

SEQ ID NO: 27928 - protein, 6 aa, synthetic construct
PFELWW

SEQ ID NO: 27929 - protein, 6 aa, synthetic construct
PFELWY

SEQ ID NO: 27930 - protein, 6 aa, synthetic construct
PFELYD

SEQ ID NO: 27931 - protein, 6 aa, synthetic construct
PFELYE

SEQ ID NO: 27932 - protein, 6 aa, synthetic construct
PFELYF

SEQ ID NO: 27933 - protein, 6 aa, synthetic construct
PFELYW

SEQ ID NO: 27934 - protein, 6 aa, synthetic construct
PFELYY

SEQ ID NO: 27935 - protein, 6 aa, synthetic construct
PFELVD

SEQ ID NO: 27936 - protein, 6 aa, synthetic construct
PFELVE

SEQ ID NO: 27937 - protein, 6 aa, synthetic construct
PFELVF

SEQ ID NO: 27938 - protein, 6 aa, synthetic construct
PFELVW

SEQ ID NO: 27939 - protein, 6 aa, synthetic construct
PFELVY

SEQ ID NO: 27940 - protein, 6 aa, synthetic construct
PFEKAD

SEQ ID NO: 27941 - protein, 6 aa, synthetic construct
PFEKAE

SEQ ID NO: 27942 - protein, 6 aa, synthetic construct
PFEKAF

SEQ ID NO: 27943 - protein, 6 aa, synthetic construct
PFEKAW

SEQ ID NO: 27944 - protein, 6 aa, synthetic construct
PFEKAY

SEQ ID NO: 27945 - protein, 6 aa, synthetic construct
PFEKRD

SEQ ID NO: 27946 - protein, 6 aa, synthetic construct
PFEKRE

SEQ ID NO: 27947 - protein, 6 aa, synthetic construct
PFEKRF

SEQ ID NO: 27948 - protein, 6 aa, synthetic construct
PFEKRW

SEQ ID NO: 27949 - protein, 6 aa, synthetic construct
PFEKRY

SEQ ID NO: 27950 - protein, 6 aa, synthetic construct
PFEKND

SEQ ID NO: 27951 - protein, 6 aa, synthetic construct
PFEKNE

SEQ ID NO: 27952 - protein, 6 aa, synthetic construct
PFEKNF

SEQ ID NO: 27953 - protein, 6 aa, synthetic construct
PFEKNW

SEQ ID NO: 27954 - protein, 6 aa, synthetic construct
PFEKNY

SEQ ID NO: 27955 - protein, 6 aa, synthetic construct
PFEKDD

SEQ ID NO: 27956 - protein, 6 aa, synthetic construct
PFEKDE

SEQ ID NO: 27957 - protein, 6 aa, synthetic construct
PFEKDF

SEQ ID NO: 27958 - protein, 6 aa, synthetic construct
PFEKDW

SEQ ID NO: 27959 - protein, 6 aa, synthetic construct
PFEKDY

SEQ ID NO: 27960 - protein, 6 aa, synthetic construct
PFEKCD

SEQ ID NO: 27961 - protein, 6 aa, synthetic construct
PFEKCE

SEQ ID NO: 27962 - protein, 6 aa, synthetic construct
PFEKCF

SEQ ID NO: 27963 - protein, 6 aa, synthetic construct
PFEKCW

SEQ ID NO: 27964 - protein, 6 aa, synthetic construct
PFEKCY

SEQ ID NO: 27965 - protein, 6 aa, synthetic construct
PFEKQD

SEQ ID NO: 27966 - protein, 6 aa, synthetic construct
PFEKQE

SEQ ID NO: 27967 - protein, 6 aa, synthetic construct
PFEKQF

SEQ ID NO: 27968 - protein, 6 aa, synthetic construct
PFEKQW

SEQ ID NO: 27969 - protein, 6 aa, synthetic construct
PFEKQY

SEQ ID NO: 27970 - protein, 6 aa, synthetic construct
PFEKED

SEQ ID NO: 27971 - protein, 6 aa, synthetic construct
PFEKEE

SEQ ID NO: 27972 - protein, 6 aa, synthetic construct
PFEKEF

SEQ ID NO: 27973 - protein, 6 aa, synthetic construct
PFEKEW

SEQ ID NO: 27974 - protein, 6 aa, synthetic construct
PFEKEY

SEQ ID NO: 27975 - protein, 6 aa, synthetic construct
PFEKGD

SEQ ID NO: 27976 - protein, 6 aa, synthetic construct
PFEKGE

SEQ ID NO: 27977 - protein, 6 aa, synthetic construct
PFEKGF

SEQ ID NO: 27978 - protein, 6 aa, synthetic construct
PFEKGW

SEQ ID NO: 27979 - protein, 6 aa, synthetic construct
PFEKGY

SEQ ID NO: 27980 - protein, 6 aa, synthetic construct
PFEKHD

SEQ ID NO: 27981 - protein, 6 aa, synthetic construct
PFEKHE

SEQ ID NO: 27982 - protein, 6 aa, synthetic construct
PFEKHF

SEQ ID NO: 27983 - protein, 6 aa, synthetic construct
PFEKHW

SEQ ID NO: 27984 - protein, 6 aa, synthetic construct
PFEKHY

SEQ ID NO: 27985 - protein, 6 aa, synthetic construct
PFEKID

SEQ ID NO: 27986 - protein, 6 aa, synthetic construct
PFEKIE

SEQ ID NO: 27987 - protein, 6 aa, synthetic construct
PFEKIF

SEQ ID NO: 27988 - protein, 6 aa, synthetic construct
PFEKIW

SEQ ID NO: 27989 - protein, 6 aa, synthetic construct
PFEKIY

SEQ ID NO: 27990 - protein, 6 aa, synthetic construct
PFEKLD

SEQ ID NO: 27991 - protein, 6 aa, synthetic construct
PFEKLE

SEQ ID NO: 27992 - protein, 6 aa, synthetic construct
PFEKLF

SEQ ID NO: 27993 - protein, 6 aa, synthetic construct
PFEKLW

SEQ ID NO: 27994 - protein, 6 aa, synthetic construct
PFEKLY

SEQ ID NO: 27995 - protein, 6 aa, synthetic construct
PFEKKD

SEQ ID NO: 27996 - protein, 6 aa, synthetic construct
PFEKKE

SEQ ID NO: 27997 - protein, 6 aa, synthetic construct
PFEKKF

SEQ ID NO: 27998 - protein, 6 aa, synthetic construct
PFEKKW

SEQ ID NO: 27999 - protein, 6 aa, synthetic construct
PFEKKY

SEQ ID NO: 28000 - protein, 6 aa, synthetic construct
PFEKMD

SEQ ID NO: 28001 - protein, 6 aa, synthetic construct
PFEKME

SEQ ID NO: 28002 - protein, 6 aa, synthetic construct
PFEKMF

SEQ ID NO: 28003 - protein, 6 aa, synthetic construct
PFEKMW

SEQ ID NO: 28004 - protein, 6 aa, synthetic construct
PFEKMY

SEQ ID NO: 28005 - protein, 6 aa, synthetic construct
PFEKFD

SEQ ID NO: 28006 - protein, 6 aa, synthetic construct
PFEKFE

SEQ ID NO: 28007 - protein, 6 aa, synthetic construct
PFEKFF

SEQ ID NO: 28008 - protein, 6 aa, synthetic construct
PFEKFW

SEQ ID NO: 28009 - protein, 6 aa, synthetic construct
PFEKFY

SEQ ID NO: 28010 - protein, 6 aa, synthetic construct
PFEKPD

SEQ ID NO: 28011 - protein, 6 aa, synthetic construct
PFEKPE

SEQ ID NO: 28012 - protein, 6 aa, synthetic construct
PFEKPF

SEQ ID NO: 28013 - protein, 6 aa, synthetic construct
PFEKPW

SEQ ID NO: 28014 - protein, 6 aa, synthetic construct
PFEKPY

SEQ ID NO: 28015 - protein, 6 aa, synthetic construct
PFEKSD

SEQ ID NO: 28016 - protein, 6 aa, synthetic construct
PFEKSE

SEQ ID NO: 28017 - protein, 6 aa, synthetic construct
PFEKSF

SEQ ID NO: 28018 - protein, 6 aa, synthetic construct
PFEKSW

SEQ ID NO: 28019 - protein, 6 aa, synthetic construct
PFEKSY

SEQ ID NO: 28020 - protein, 6 aa, synthetic construct
PFEKTD

SEQ ID NO: 28021 - protein, 6 aa, synthetic construct
PFEKTE

SEQ ID NO: 28022 - protein, 6 aa, synthetic construct
PFEKTF

SEQ ID NO: 28023 - protein, 6 aa, synthetic construct
PFEKTW

SEQ ID NO: 28024 - protein, 6 aa, synthetic construct
PFEKTY

SEQ ID NO: 28025 - protein, 6 aa, synthetic construct
PFEKWD

SEQ ID NO: 28026 - protein, 6 aa, synthetic construct
PFEKWE

SEQ ID NO: 28027 - protein, 6 aa, synthetic construct
PFEKWF

SEQ ID NO: 28028 - protein, 6 aa, synthetic construct
PFEKWW

SEQ ID NO: 28029 - protein, 6 aa, synthetic construct
PFEKWY

SEQ ID NO: 28030 - protein, 6 aa, synthetic construct
PFEKYD

SEQ ID NO: 28031 - protein, 6 aa, synthetic construct
PFEKYE

SEQ ID NO: 28032 - protein, 6 aa, synthetic construct
PFEKYF

SEQ ID NO: 28033 - protein, 6 aa, synthetic construct
PFEKYW

SEQ ID NO: 28034 - protein, 6 aa, synthetic construct
PFEKYY

SEQ ID NO: 28035 - protein, 6 aa, synthetic construct
PFEKVD

SEQ ID NO: 28036 - protein, 6 aa, synthetic construct
PFEKVE

SEQ ID NO: 28037 - protein, 6 aa, synthetic construct
PFEKVF

SEQ ID NO: 28038 - protein, 6 aa, synthetic construct
PFEKVW

SEQ ID NO: 28039 - protein, 6 aa, synthetic construct
PFEKVY

SEQ ID NO: 28040 - protein, 6 aa, synthetic construct
PFEMAD

SEQ ID NO: 28041 - protein, 6 aa, synthetic construct
PFEMAE

SEQ ID NO: 28042 - protein, 6 aa, synthetic construct
PFEMAF

SEQ ID NO: 28043 - protein, 6 aa, synthetic construct
PFEMAW

SEQ ID NO: 28044 - protein, 6 aa, synthetic construct
PFEMAY

SEQ ID NO: 28045 - protein, 6 aa, synthetic construct
PFEMRD

SEQ ID NO: 28046 - protein, 6 aa, synthetic construct
PFEMRE

SEQ ID NO: 28047 - protein, 6 aa, synthetic construct
PFEMRF

SEQ ID NO: 28048 - protein, 6 aa, synthetic construct
PFEMRW

SEQ ID NO: 28049 - protein, 6 aa, synthetic construct
PFEMRY

SEQ ID NO: 28050 - protein, 6 aa, synthetic construct
PFEMND

SEQ ID NO: 28051 - protein, 6 aa, synthetic construct
PFEMNE

SEQ ID NO: 28052 - protein, 6 aa, synthetic construct
PFEMNF

SEQ ID NO: 28053 - protein, 6 aa, synthetic construct
PFEMNW

SEQ ID NO: 28054 - protein, 6 aa, synthetic construct
PFEMNY

SEQ ID NO: 28055 - protein, 6 aa, synthetic construct
PFEMDD

SEQ ID NO: 28056 - protein, 6 aa, synthetic construct
PFEMDE

SEQ ID NO: 28057 - protein, 6 aa, synthetic construct
PFEMDF

SEQ ID NO: 28058 - protein, 6 aa, synthetic construct
PFEMDW

SEQ ID NO: 28059 - protein, 6 aa, synthetic construct
PFEMDY

SEQ ID NO: 28060 - protein, 6 aa, synthetic construct
PFEMCD

SEQ ID NO: 28061 - protein, 6 aa, synthetic construct
PFEMCE

SEQ ID NO: 28062 - protein, 6 aa, synthetic construct
PFEMCF

SEQ ID NO: 28063 - protein, 6 aa, synthetic construct
PFEMCW

SEQ ID NO: 28064 - protein, 6 aa, synthetic construct
PFEMCY

SEQ ID NO: 28065 - protein, 6 aa, synthetic construct
PFEMQD

SEQ ID NO: 28066 - protein, 6 aa, synthetic construct
PFEMQE

SEQ ID NO: 28067 - protein, 6 aa, synthetic construct
PFEMQF

SEQ ID NO: 28068 - protein, 6 aa, synthetic construct
PFEMQW

SEQ ID NO: 28069 - protein, 6 aa, synthetic construct
PFEMQY

SEQ ID NO: 28070 - protein, 6 aa, synthetic construct
PFEMED

SEQ ID NO: 28071 - protein, 6 aa, synthetic construct
PFEMEE

SEQ ID NO: 28072 - protein, 6 aa, synthetic construct
PFEMEF

SEQ ID NO: 28073 - protein, 6 aa, synthetic construct
PFEMEW

SEQ ID NO: 28074 - protein, 6 aa, synthetic construct
PFEMEY

SEQ ID NO: 28075 - protein, 6 aa, synthetic construct
PFEMGD

SEQ ID NO: 28076 - protein, 6 aa, synthetic construct
PFEMGE

SEQ ID NO: 28077 - protein, 6 aa, synthetic construct
PFEMGF

SEQ ID NO: 28078 - protein, 6 aa, synthetic construct
PFEMGW

SEQ ID NO: 28079 - protein, 6 aa, synthetic construct
PFEMGY

SEQ ID NO: 28080 - protein, 6 aa, synthetic construct
PFEMHD

SEQ ID NO: 28081 - protein, 6 aa, synthetic construct
PFEMHE

SEQ ID NO: 28082 - protein, 6 aa, synthetic construct
PFEMHF

SEQ ID NO: 28083 - protein, 6 aa, synthetic construct
PFEMHW

SEQ ID NO: 28084 - protein, 6 aa, synthetic construct
PFEMHY

SEQ ID NO: 28085 - protein, 6 aa, synthetic construct
PFEMID

SEQ ID NO: 28086 - protein, 6 aa, synthetic construct
PFEMIE

SEQ ID NO: 28087 - protein, 6 aa, synthetic construct
PFEMIF

SEQ ID NO: 28088 - protein, 6 aa, synthetic construct
PFEMIW

SEQ ID NO: 28089 - protein, 6 aa, synthetic construct
PFEMIY

SEQ ID NO: 28090 - protein, 6 aa, synthetic construct
PFEMLD

SEQ ID NO: 28091 - protein, 6 aa, synthetic construct
PFEMLE

SEQ ID NO: 28092 - protein, 6 aa, synthetic construct
PFEMLF

SEQ ID NO: 28093 - protein, 6 aa, synthetic construct
PFEMLW

SEQ ID NO: 28094 - protein, 6 aa, synthetic construct
PFEMLY

SEQ ID NO: 28095 - protein, 6 aa, synthetic construct
PFEMKD

SEQ ID NO: 28096 - protein, 6 aa, synthetic construct
PFEMKE

SEQ ID NO: 28097 - protein, 6 aa, synthetic construct
PFEMKF

SEQ ID NO: 28098 - protein, 6 aa, synthetic construct
PFEMKW

SEQ ID NO: 28099 - protein, 6 aa, synthetic construct
PFEMKY

SEQ ID NO: 28100 - protein, 6 aa, synthetic construct
PFEMMD

SEQ ID NO: 28101 - protein, 6 aa, synthetic construct
PFEMME

SEQ ID NO: 28102 - protein, 6 aa, synthetic construct
PFEMMF

SEQ ID NO: 28103 - protein, 6 aa, synthetic construct
PFEMMW

SEQ ID NO: 28104 - protein, 6 aa, synthetic construct
PFEMMY

SEQ ID NO: 28105 - protein, 6 aa, synthetic construct
PFEMFD

SEQ ID NO: 28106 - protein, 6 aa, synthetic construct
PFEMFE

SEQ ID NO: 28107 - protein, 6 aa, synthetic construct
PFEMFF

SEQ ID NO: 28108 - protein, 6 aa, synthetic construct
PFEMFW

SEQ ID NO: 28109 - protein, 6 aa, synthetic construct
PFEMFY

SEQ ID NO: 28110 - protein, 6 aa, synthetic construct
PFEMPD

SEQ ID NO: 28111 - protein, 6 aa, synthetic construct
PFEMPE

SEQ ID NO: 28112 - protein, 6 aa, synthetic construct
PFEMPF

SEQ ID NO: 28113 - protein, 6 aa, synthetic construct
PFEMPW

SEQ ID NO: 28114 - protein, 6 aa, synthetic construct
PFEMPY

SEQ ID NO: 28115 - protein, 6 aa, synthetic construct
PFEMSD

SEQ ID NO: 28116 - protein, 6 aa, synthetic construct
PFEMSE

SEQ ID NO: 28117 - protein, 6 aa, synthetic construct
PFEMSF

SEQ ID NO: 28118 - protein, 6 aa, synthetic construct
PFEMSW

SEQ ID NO: 28119 - protein, 6 aa, synthetic construct
PFEMSY

SEQ ID NO: 28120 - protein, 6 aa, synthetic construct
PFEMTD

SEQ ID NO: 28121 - protein, 6 aa, synthetic construct
PFEMTE

SEQ ID NO: 28122 - protein, 6 aa, synthetic construct
PFEMTF

SEQ ID NO: 28123 - protein, 6 aa, synthetic construct
PFEMTW

SEQ ID NO: 28124 - protein, 6 aa, synthetic construct
PFEMTY

SEQ ID NO: 28125 - protein, 6 aa, synthetic construct
PFEMWD

SEQ ID NO: 28126 - protein, 6 aa, synthetic construct
PFEMWE

SEQ ID NO: 28127 - protein, 6 aa, synthetic construct
PFEMWF

SEQ ID NO: 28128 - protein, 6 aa, synthetic construct
PFEMWW

SEQ ID NO: 28129 - protein, 6 aa, synthetic construct
PFEMWY

SEQ ID NO: 28130 - protein, 6 aa, synthetic construct
PFEMYD

SEQ ID NO: 28131 - protein, 6 aa, synthetic construct
PFEMYE

SEQ ID NO: 28132 - protein, 6 aa, synthetic construct
PFEMYF

SEQ ID NO: 28133 - protein, 6 aa, synthetic construct
PFEMYW

SEQ ID NO: 28134 - protein, 6 aa, synthetic construct
PFEMYY

SEQ ID NO: 28135 - protein, 6 aa, synthetic construct
PFEMVD

SEQ ID NO: 28136 - protein, 6 aa, synthetic construct
PFEMVE

SEQ ID NO: 28137 - protein, 6 aa, synthetic construct
PFEMVF

SEQ ID NO: 28138 - protein, 6 aa, synthetic construct
PFEMVW

SEQ ID NO: 28139 - protein, 6 aa, synthetic construct
PFEMVY

SEQ ID NO: 28140 - protein, 6 aa, synthetic construct
PFEFAD

SEQ ID NO: 28141 - protein, 6 aa, synthetic construct
PFEFAE

SEQ ID NO: 28142 - protein, 6 aa, synthetic construct
PFEFAF

SEQ ID NO: 28143 - protein, 6 aa, synthetic construct
PFEFAW

SEQ ID NO: 28144 - protein, 6 aa, synthetic construct
PFEFAY

SEQ ID NO: 28145 - protein, 6 aa, synthetic construct
PFEFRD

SEQ ID NO: 28146 - protein, 6 aa, synthetic construct
PFEFRE

SEQ ID NO: 28147 - protein, 6 aa, synthetic construct
PFEFRF

SEQ ID NO: 28148 - protein, 6 aa, synthetic construct
PFEFRW

SEQ ID NO: 28149 - protein, 6 aa, synthetic construct
PFEFRY

SEQ ID NO: 28150 - protein, 6 aa, synthetic construct
PFEFND

SEQ ID NO: 28151 - protein, 6 aa, synthetic construct
PFEFNE

SEQ ID NO: 28152 - protein, 6 aa, synthetic construct
PFEFNF

SEQ ID NO: 28153 - protein, 6 aa, synthetic construct
PFEFNW

SEQ ID NO: 28154 - protein, 6 aa, synthetic construct
PFEFNY

SEQ ID NO: 28155 - protein, 6 aa, synthetic construct
PFEFDD

SEQ ID NO: 28156 - protein, 6 aa, synthetic construct
PFEFDE

SEQ ID NO: 28157 - protein, 6 aa, synthetic construct
PFEFDF

SEQ ID NO: 28158 - protein, 6 aa, synthetic construct
PFEFDW

SEQ ID NO: 28159 - protein, 6 aa, synthetic construct
PFEFDY

SEQ ID NO: 28160 - protein, 6 aa, synthetic construct
PFEFCD

SEQ ID NO: 28161 - protein, 6 aa, synthetic construct
PFEFCE

SEQ ID NO: 28162 - protein, 6 aa, synthetic construct
PFEFCF

SEQ ID NO: 28163 - protein, 6 aa, synthetic construct
PFEFCW

SEQ ID NO: 28164 - protein, 6 aa, synthetic construct
PFEFCY

SEQ ID NO: 28165 - protein, 6 aa, synthetic construct
PFEFQD

SEQ ID NO: 28166 - protein, 6 aa, synthetic construct
PFEFQE

SEQ ID NO: 28167 - protein, 6 aa, synthetic construct
PFEFQF

SEQ ID NO: 28168 - protein, 6 aa, synthetic construct
PFEFQW

SEQ ID NO: 28169 - protein, 6 aa, synthetic construct
PFEFQY

SEQ ID NO: 28170 - protein, 6 aa, synthetic construct
PFEFED

SEQ ID NO: 28171 - protein, 6 aa, synthetic construct
PFEFEE

SEQ ID NO: 28172 - protein, 6 aa, synthetic construct
PFEFEF

SEQ ID NO: 28173 - protein, 6 aa, synthetic construct
PFEFEW

SEQ ID NO: 28174 - protein, 6 aa, synthetic construct
PFEFEY

SEQ ID NO: 28175 - protein, 6 aa, synthetic construct
PFEFGD

SEQ ID NO: 28176 - protein, 6 aa, synthetic construct
PFEFGE

SEQ ID NO: 28177 - protein, 6 aa, synthetic construct
PFEFGF

SEQ ID NO: 28178 - protein, 6 aa, synthetic construct
PFEFGW

SEQ ID NO: 28179 - protein, 6 aa, synthetic construct
PFEFGY

SEQ ID NO: 28180 - protein, 6 aa, synthetic construct
PFEFHD

SEQ ID NO: 28181 - protein, 6 aa, synthetic construct
PFEFHE

SEQ ID NO: 28182 - protein, 6 aa, synthetic construct
PFEFHF

SEQ ID NO: 28183 - protein, 6 aa, synthetic construct
PFEFHW

SEQ ID NO: 28184 - protein, 6 aa, synthetic construct
PFEFHY

SEQ ID NO: 28185 - protein, 6 aa, synthetic construct
PFEFID

SEQ ID NO: 28186 - protein, 6 aa, synthetic construct
PFEFIE

SEQ ID NO: 28187 - protein, 6 aa, synthetic construct
PFEFIF

SEQ ID NO: 28188 - protein, 6 aa, synthetic construct
PFEFIW

SEQ ID NO: 28189 - protein, 6 aa, synthetic construct
PFEFIY

SEQ ID NO: 28190 - protein, 6 aa, synthetic construct
PFEFLD

SEQ ID NO: 28191 - protein, 6 aa, synthetic construct
PFEFLE

SEQ ID NO: 28192 - protein, 6 aa, synthetic construct
PFEFLF

SEQ ID NO: 28193 - protein, 6 aa, synthetic construct
PFEFLW

SEQ ID NO: 28194 - protein, 6 aa, synthetic construct
PFEFLY

SEQ ID NO: 28195 - protein, 6 aa, synthetic construct
PFEFKD

SEQ ID NO: 28196 - protein, 6 aa, synthetic construct
PFEFKE

SEQ ID NO: 28197 - protein, 6 aa, synthetic construct
PFEFKF

SEQ ID NO: 28198 - protein, 6 aa, synthetic construct
PFEFKW

SEQ ID NO: 28199 - protein, 6 aa, synthetic construct
PFEFKY

SEQ ID NO: 28200 - protein, 6 aa, synthetic construct
PFEFMD

SEQ ID NO: 28201 - protein, 6 aa, synthetic construct
PFEFME

SEQ ID NO: 28202 - protein, 6 aa, synthetic construct
PFEFMF

SEQ ID NO: 28203 - protein, 6 aa, synthetic construct
PFEFMW

SEQ ID NO: 28204 - protein, 6 aa, synthetic construct
PFEFMY

SEQ ID NO: 28205 - protein, 6 aa, synthetic construct
PFEFFD

SEQ ID NO: 28206 - protein, 6 aa, synthetic construct
PFEFFE

SEQ ID NO: 28207 - protein, 6 aa, synthetic construct
PFEFFF

SEQ ID NO: 28208 - protein, 6 aa, synthetic construct
PFEFFW

SEQ ID NO: 28209 - protein, 6 aa, synthetic construct
PFEFFY

SEQ ID NO: 28210 - protein, 6 aa, synthetic construct
PFEFPD

SEQ ID NO: 28211 - protein, 6 aa, synthetic construct
PFEFPE

SEQ ID NO: 28212 - protein, 6 aa, synthetic construct
PFEFPF

SEQ ID NO: 28213 - protein, 6 aa, synthetic construct
PFEFPW

SEQ ID NO: 28214 - protein, 6 aa, synthetic construct
PFEFPY

SEQ ID NO: 28215 - protein, 6 aa, synthetic construct
PFEFSD

SEQ ID NO: 28216 - protein, 6 aa, synthetic construct
PFEFSE

SEQ ID NO: 28217 - protein, 6 aa, synthetic construct
PFEFSF

SEQ ID NO: 28218 - protein, 6 aa, synthetic construct
PFEFSW

SEQ ID NO: 28219 - protein, 6 aa, synthetic construct
PFEFSY

SEQ ID NO: 28220 - protein, 6 aa, synthetic construct
PFEFTD

SEQ ID NO: 28221 - protein, 6 aa, synthetic construct
PFEFTE

SEQ ID NO: 28222 - protein, 6 aa, synthetic construct
PFEFTF

SEQ ID NO: 28223 - protein, 6 aa, synthetic construct
PFEFTW

SEQ ID NO: 28224 - protein, 6 aa, synthetic construct
PFEFTY

SEQ ID NO: 28225 - protein, 6 aa, synthetic construct
PFEFWD

SEQ ID NO: 28226 - protein, 6 aa, synthetic construct
PFEFWE

SEQ ID NO: 28227 - protein, 6 aa, synthetic construct
PFEFWF

SEQ ID NO: 28228 - protein, 6 aa, synthetic construct
PFEFWW

SEQ ID NO: 28229 - protein, 6 aa, synthetic construct
PFEFWY

SEQ ID NO: 28230 - protein, 6 aa, synthetic construct
PFEFYD

SEQ ID NO: 28231 - protein, 6 aa, synthetic construct
PFEFYE

SEQ ID NO: 28232 - protein, 6 aa, synthetic construct
PFEFYF

SEQ ID NO: 28233 - protein, 6 aa, synthetic construct
PFEFYW

SEQ ID NO: 28234 - protein, 6 aa, synthetic construct
PFEFYY

SEQ ID NO: 28235 - protein, 6 aa, synthetic construct
PFEFVD

SEQ ID NO: 28236 - protein, 6 aa, synthetic construct
PFEFVE

SEQ ID NO: 28237 - protein, 6 aa, synthetic construct
PFEFVF

SEQ ID NO: 28238 - protein, 6 aa, synthetic construct
PFEFVW

SEQ ID NO: 28239 - protein, 6 aa, synthetic construct
PFEFVY

SEQ ID NO: 28240 - protein, 6 aa, synthetic construct
PFEPAD

SEQ ID NO: 28241 - protein, 6 aa, synthetic construct
PFEPAE

SEQ ID NO: 28242 - protein, 6 aa, synthetic construct
PFEPAF

SEQ ID NO: 28243 - protein, 6 aa, synthetic construct
PFEPAW

SEQ ID NO: 28244 - protein, 6 aa, synthetic construct
PFEPAY

SEQ ID NO: 28245 - protein, 6 aa, synthetic construct
PFEPRD

SEQ ID NO: 28246 - protein, 6 aa, synthetic construct
PFEPRE

SEQ ID NO: 28247 - protein, 6 aa, synthetic construct
PFEPRF

SEQ ID NO: 28248 - protein, 6 aa, synthetic construct
PFEPRW

SEQ ID NO: 28249 - protein, 6 aa, synthetic construct
PFEPRY

SEQ ID NO: 28250 - protein, 6 aa, synthetic construct
PFEPND

SEQ ID NO: 28251 - protein, 6 aa, synthetic construct
PFEPNE

SEQ ID NO: 28252 - protein, 6 aa, synthetic construct
PFEPNF

SEQ ID NO: 28253 - protein, 6 aa, synthetic construct
PFEPNW

SEQ ID NO: 28254 - protein, 6 aa, synthetic construct
PFEPNY

SEQ ID NO: 28255 - protein, 6 aa, synthetic construct
PFEPDD

SEQ ID NO: 28256 - protein, 6 aa, synthetic construct
PFEPDE

SEQ ID NO: 28257 - protein, 6 aa, synthetic construct
PFEPDF

SEQ ID NO: 28258 - protein, 6 aa, synthetic construct
PFEPDW

SEQ ID NO: 28259 - protein, 6 aa, synthetic construct
PFEPDY

SEQ ID NO: 28260 - protein, 6 aa, synthetic construct
PFEPCD

SEQ ID NO: 28261 - protein, 6 aa, synthetic construct
PFEPCE

SEQ ID NO: 28262 - protein, 6 aa, synthetic construct
PFEPCF

SEQ ID NO: 28263 - protein, 6 aa, synthetic construct
PFEPCW

SEQ ID NO: 28264 - protein, 6 aa, synthetic construct
PFEPCY

SEQ ID NO: 28265 - protein, 6 aa, synthetic construct
PFEPQD

SEQ ID NO: 28266 - protein, 6 aa, synthetic construct
PFEPQE

SEQ ID NO: 28267 - protein, 6 aa, synthetic construct
PFEPQF

SEQ ID NO: 28268 - protein, 6 aa, synthetic construct
PFEPQW

SEQ ID NO: 28269 - protein, 6 aa, synthetic construct
PFEPQY

SEQ ID NO: 28270 - protein, 6 aa, synthetic construct
PFEPED

SEQ ID NO: 28271 - protein, 6 aa, synthetic construct
PFEPEE

SEQ ID NO: 28272 - protein, 6 aa, synthetic construct
PFEPEF

SEQ ID NO: 28273 - protein, 6 aa, synthetic construct
PFEPEW

SEQ ID NO: 28274 - protein, 6 aa, synthetic construct
PFEPEY

SEQ ID NO: 28275 - protein, 6 aa, synthetic construct
PFEPGD

SEQ ID NO: 28276 - protein, 6 aa, synthetic construct
PFEPGE

SEQ ID NO: 28277 - protein, 6 aa, synthetic construct
PFEPGF

SEQ ID NO: 28278 - protein, 6 aa, synthetic construct
PFEPGW

SEQ ID NO: 28279 - protein, 6 aa, synthetic construct
PFEPGY

SEQ ID NO: 28280 - protein, 6 aa, synthetic construct
PFEPHD

SEQ ID NO: 28281 - protein, 6 aa, synthetic construct
PFEPHE

SEQ ID NO: 28282 - protein, 6 aa, synthetic construct
PFEPHF

SEQ ID NO: 28283 - protein, 6 aa, synthetic construct
PFEPHW

SEQ ID NO: 28284 - protein, 6 aa, synthetic construct
PFEPHY

SEQ ID NO: 28285 - protein, 6 aa, synthetic construct
PFEPID

SEQ ID NO: 28286 - protein, 6 aa, synthetic construct
PFEPIE

SEQ ID NO: 28287 - protein, 6 aa, synthetic construct
PFEPIF

SEQ ID NO: 28288 - protein, 6 aa, synthetic construct
PFEPIW

SEQ ID NO: 28289 - protein, 6 aa, synthetic construct
PFEPIY

SEQ ID NO: 28290 - protein, 6 aa, synthetic construct
PFEPLD

SEQ ID NO: 28291 - protein, 6 aa, synthetic construct
PFEPLE

SEQ ID NO: 28292 - protein, 6 aa, synthetic construct
PFEPLF

SEQ ID NO: 28293 - protein, 6 aa, synthetic construct
PFEPLW

SEQ ID NO: 28294 - protein, 6 aa, synthetic construct
PFEPLY

SEQ ID NO: 28295 - protein, 6 aa, synthetic construct
PFEPKD

SEQ ID NO: 28296 - protein, 6 aa, synthetic construct
PFEPKE

SEQ ID NO: 28297 - protein, 6 aa, synthetic construct
PFEPKF

SEQ ID NO: 28298 - protein, 6 aa, synthetic construct
PFEPKW

SEQ ID NO: 28299 - protein, 6 aa, synthetic construct
PFEPKY

SEQ ID NO: 28300 - protein, 6 aa, synthetic construct
PFEPMD

SEQ ID NO: 28301 - protein, 6 aa, synthetic construct
PFEPME

SEQ ID NO: 28302 - protein, 6 aa, synthetic construct
PFEPMF

SEQ ID NO: 28303 - protein, 6 aa, synthetic construct
PFEPMW

SEQ ID NO: 28304 - protein, 6 aa, synthetic construct
PFEPMY

SEQ ID NO: 28305 - protein, 6 aa, synthetic construct
PFEPFD

SEQ ID NO: 28306 - protein, 6 aa, synthetic construct
PFEPFE

SEQ ID NO: 28307 - protein, 6 aa, synthetic construct
PFEPFF

SEQ ID NO: 28308 - protein, 6 aa, synthetic construct
PFEPFW

SEQ ID NO: 28309 - protein, 6 aa, synthetic construct
PFEPFY

SEQ ID NO: 28310 - protein, 6 aa, synthetic construct
PFEPPD

SEQ ID NO: 28311 - protein, 6 aa, synthetic construct
PFEPPE

SEQ ID NO: 28312 - protein, 6 aa, synthetic construct
PFEPPF

SEQ ID NO: 28313 - protein, 6 aa, synthetic construct
PFEPPW

SEQ ID NO: 28314 - protein, 6 aa, synthetic construct
PFEPPY

SEQ ID NO: 28315 - protein, 6 aa, synthetic construct
PFEPSD

SEQ ID NO: 28316 - protein, 6 aa, synthetic construct
PFEPSE

SEQ ID NO: 28317 - protein, 6 aa, synthetic construct
PFEPSF

SEQ ID NO: 28318 - protein, 6 aa, synthetic construct
PFEPSW

SEQ ID NO: 28319 - protein, 6 aa, synthetic construct
PFEPSY

SEQ ID NO: 28320 - protein, 6 aa, synthetic construct
PFEPTD

SEQ ID NO: 28321 - protein, 6 aa, synthetic construct
PFEPTE

SEQ ID NO: 28322 - protein, 6 aa, synthetic construct
PFEPTF

SEQ ID NO: 28323 - protein, 6 aa, synthetic construct
PFEPTW

SEQ ID NO: 28324 - protein, 6 aa, synthetic construct
PFEPTY

SEQ ID NO: 28325 - protein, 6 aa, synthetic construct
PFEPWD

SEQ ID NO: 28326 - protein, 6 aa, synthetic construct
PFEPWE

SEQ ID NO: 28327 - protein, 6 aa, synthetic construct
PFEPWF

SEQ ID NO: 28328 - protein, 6 aa, synthetic construct
PFEPWW

SEQ ID NO: 28329 - protein, 6 aa, synthetic construct
PFEPWY

SEQ ID NO: 28330 - protein, 6 aa, synthetic construct
PFEPYD

SEQ ID NO: 28331 - protein, 6 aa, synthetic construct
PFEPYE

SEQ ID NO: 28332 - protein, 6 aa, synthetic construct
PFEPYF

SEQ ID NO: 28333 - protein, 6 aa, synthetic construct
PFEPYW

SEQ ID NO: 28334 - protein, 6 aa, synthetic construct
PFEPYY

SEQ ID NO: 28335 - protein, 6 aa, synthetic construct
PFEPVD

SEQ ID NO: 28336 - protein, 6 aa, synthetic construct
PFEPVE

SEQ ID NO: 28337 - protein, 6 aa, synthetic construct
PFEPVF

SEQ ID NO: 28338 - protein, 6 aa, synthetic construct
PFEPVW

SEQ ID NO: 28339 - protein, 6 aa, synthetic construct
PFEPVY

SEQ ID NO: 28340 - protein, 6 aa, synthetic construct
PFESAD

SEQ ID NO: 28341 - protein, 6 aa, synthetic construct
PFESAE

SEQ ID NO: 28342 - protein, 6 aa, synthetic construct
PFESAF

SEQ ID NO: 28343 - protein, 6 aa, synthetic construct
PFESAW

SEQ ID NO: 28344 - protein, 6 aa, synthetic construct
PFESAY

SEQ ID NO: 28345 - protein, 6 aa, synthetic construct
PFESRD

SEQ ID NO: 28346 - protein, 6 aa, synthetic construct
PFESRE

SEQ ID NO: 28347 - protein, 6 aa, synthetic construct
PFESRF

SEQ ID NO: 28348 - protein, 6 aa, synthetic construct
PFESRW

SEQ ID NO: 28349 - protein, 6 aa, synthetic construct
PFESRY

SEQ ID NO: 28350 - protein, 6 aa, synthetic construct
PFESND

SEQ ID NO: 28351 - protein, 6 aa, synthetic construct
PFESNE

SEQ ID NO: 28352 - protein, 6 aa, synthetic construct
PFESNF

SEQ ID NO: 28353 - protein, 6 aa, synthetic construct
PFESNW

SEQ ID NO: 28354 - protein, 6 aa, synthetic construct
PFESNY

SEQ ID NO: 28355 - protein, 6 aa, synthetic construct
PFESDD

SEQ ID NO: 28356 - protein, 6 aa, synthetic construct
PFESDE

SEQ ID NO: 28357 - protein, 6 aa, synthetic construct
PFESDF

SEQ ID NO: 28358 - protein, 6 aa, synthetic construct
PFESDW

SEQ ID NO: 28359 - protein, 6 aa, synthetic construct
PFESDY

SEQ ID NO: 28360 - protein, 6 aa, synthetic construct
PFESCD

SEQ ID NO: 28361 - protein, 6 aa, synthetic construct
PFESCE

SEQ ID NO: 28362 - protein, 6 aa, synthetic construct
PFESCF

SEQ ID NO: 28363 - protein, 6 aa, synthetic construct
PFESCW

SEQ ID NO: 28364 - protein, 6 aa, synthetic construct
PFESCY

SEQ ID NO: 28365 - protein, 6 aa, synthetic construct
PFESQD

SEQ ID NO: 28366 - protein, 6 aa, synthetic construct
PFESQE

SEQ ID NO: 28367 - protein, 6 aa, synthetic construct
PFESQF

SEQ ID NO: 28368 - protein, 6 aa, synthetic construct
PFESQW

SEQ ID NO: 28369 - protein, 6 aa, synthetic construct
PFESQY

SEQ ID NO: 28370 - protein, 6 aa, synthetic construct
PFESED

SEQ ID NO: 28371 - protein, 6 aa, synthetic construct
PFESEE

SEQ ID NO: 28372 - protein, 6 aa, synthetic construct
PFESEF

SEQ ID NO: 28373 - protein, 6 aa, synthetic construct
PFESEW

SEQ ID NO: 28374 - protein, 6 aa, synthetic construct
PFESEY

SEQ ID NO: 28375 - protein, 6 aa, synthetic construct
PFESGD

SEQ ID NO: 28376 - protein, 6 aa, synthetic construct
PFESGE

SEQ ID NO: 28377 - protein, 6 aa, synthetic construct
PFESGF

SEQ ID NO: 28378 - protein, 6 aa, synthetic construct
PFESGW

SEQ ID NO: 28379 - protein, 6 aa, synthetic construct
PFESGY

SEQ ID NO: 28380 - protein, 6 aa, synthetic construct
PFESHD

SEQ ID NO: 28381 - protein, 6 aa, synthetic construct
PFESHE

SEQ ID NO: 28382 - protein, 6 aa, synthetic construct
PFESHF

SEQ ID NO: 28383 - protein, 6 aa, synthetic construct
PFESHW

SEQ ID NO: 28384 - protein, 6 aa, synthetic construct
PFESHY

SEQ ID NO: 28385 - protein, 6 aa, synthetic construct
PFESID

SEQ ID NO: 28386 - protein, 6 aa, synthetic construct
PFESIE

SEQ ID NO: 28387 - protein, 6 aa, synthetic construct
PFESIF

SEQ ID NO: 28388 - protein, 6 aa, synthetic construct
PFESIW

SEQ ID NO: 28389 - protein, 6 aa, synthetic construct
PFESIY

SEQ ID NO: 28390 - protein, 6 aa, synthetic construct
PFESLD

SEQ ID NO: 28391 - protein, 6 aa, synthetic construct
PFESLE

SEQ ID NO: 28392 - protein, 6 aa, synthetic construct
PFESLF

SEQ ID NO: 28393 - protein, 6 aa, synthetic construct
PFESLW

SEQ ID NO: 28394 - protein, 6 aa, synthetic construct
PFESLY

SEQ ID NO: 28395 - protein, 6 aa, synthetic construct
PFESKD

SEQ ID NO: 28396 - protein, 6 aa, synthetic construct
PFESKE

SEQ ID NO: 28397 - protein, 6 aa, synthetic construct
PFESKF

SEQ ID NO: 28398 - protein, 6 aa, synthetic construct
PFESKW

SEQ ID NO: 28399 - protein, 6 aa, synthetic construct
PFESKY

SEQ ID NO: 28400 - protein, 6 aa, synthetic construct
PFESMD

SEQ ID NO: 28401 - protein, 6 aa, synthetic construct
PFESME

SEQ ID NO: 28402 - protein, 6 aa, synthetic construct
PFESMF

SEQ ID NO: 28403 - protein, 6 aa, synthetic construct
PFESMW

SEQ ID NO: 28404 - protein, 6 aa, synthetic construct
PFESMY

SEQ ID NO: 28405 - protein, 6 aa, synthetic construct
PFESFD

SEQ ID NO: 28406 - protein, 6 aa, synthetic construct
PFESFE

SEQ ID NO: 28407 - protein, 6 aa, synthetic construct
PFESFF

SEQ ID NO: 28408 - protein, 6 aa, synthetic construct
PFESFW

SEQ ID NO: 28409 - protein, 6 aa, synthetic construct
PFESFY

SEQ ID NO: 28410 - protein, 6 aa, synthetic construct
PFESPD

SEQ ID NO: 28411 - protein, 6 aa, synthetic construct
PFESPE

SEQ ID NO: 28412 - protein, 6 aa, synthetic construct
PFESPF

SEQ ID NO: 28413 - protein, 6 aa, synthetic construct
PFESPW

SEQ ID NO: 28414 - protein, 6 aa, synthetic construct
PFESPY

SEQ ID NO: 28415 - protein, 6 aa, synthetic construct
PFESSD

SEQ ID NO: 28416 - protein, 6 aa, synthetic construct
PFESSE

SEQ ID NO: 28417 - protein, 6 aa, synthetic construct
PFESSF

SEQ ID NO: 28418 - protein, 6 aa, synthetic construct
PFESSW

SEQ ID NO: 28419 - protein, 6 aa, synthetic construct
PFESSY

SEQ ID NO: 28420 - protein, 6 aa, synthetic construct
PFESTD

SEQ ID NO: 28421 - protein, 6 aa, synthetic construct
PFESTE

SEQ ID NO: 28422 - protein, 6 aa, synthetic construct
PFESTF

SEQ ID NO: 28423 - protein, 6 aa, synthetic construct
PFESTW

SEQ ID NO: 28424 - protein, 6 aa, synthetic construct
PFESTY

SEQ ID NO: 28425 - protein, 6 aa, synthetic construct
PFESWD

SEQ ID NO: 28426 - protein, 6 aa, synthetic construct
PFESWE

SEQ ID NO: 28427 - protein, 6 aa, synthetic construct
PFESWF

SEQ ID NO: 28428 - protein, 6 aa, synthetic construct
PFESWW

SEQ ID NO: 28429 - protein, 6 aa, synthetic construct
PFESWY

SEQ ID NO: 28430 - protein, 6 aa, synthetic construct
PFESYD

SEQ ID NO: 28431 - protein, 6 aa, synthetic construct
PFESYE

SEQ ID NO: 28432 - protein, 6 aa, synthetic construct
PFESYF

SEQ ID NO: 28433 - protein, 6 aa, synthetic construct
PFESYW

SEQ ID NO: 28434 - protein, 6 aa, synthetic construct
PFESYY

SEQ ID NO: 28435 - protein, 6 aa, synthetic construct
PFESVD

SEQ ID NO: 28436 - protein, 6 aa, synthetic construct
PFESVE

SEQ ID NO: 28437 - protein, 6 aa, synthetic construct
PFESVF

SEQ ID NO: 28438 - protein, 6 aa, synthetic construct
PFESVW

SEQ ID NO: 28439 - protein, 6 aa, synthetic construct
PFESVY

SEQ ID NO: 28440 - protein, 6 aa, synthetic construct
PFETAD

SEQ ID NO: 28441 - protein, 6 aa, synthetic construct
PFETAE

SEQ ID NO: 28442 - protein, 6 aa, synthetic construct
PFETAF

SEQ ID NO: 28443 - protein, 6 aa, synthetic construct
PFETAW

SEQ ID NO: 28444 - protein, 6 aa, synthetic construct
PFETAY

SEQ ID NO: 28445 - protein, 6 aa, synthetic construct
PFETRD

SEQ ID NO: 28446 - protein, 6 aa, synthetic construct
PFETRE

SEQ ID NO: 28447 - protein, 6 aa, synthetic construct
PFETRF

SEQ ID NO: 28448 - protein, 6 aa, synthetic construct
PFETRW

SEQ ID NO: 28449 - protein, 6 aa, synthetic construct
PFETRY

SEQ ID NO: 28450 - protein, 6 aa, synthetic construct
PFETND

SEQ ID NO: 28451 - protein, 6 aa, synthetic construct
PFETNE

SEQ ID NO: 28452 - protein, 6 aa, synthetic construct
PFETNF

SEQ ID NO: 28453 - protein, 6 aa, synthetic construct
PFETNW

SEQ ID NO: 28454 - protein, 6 aa, synthetic construct
PFETNY

SEQ ID NO: 28455 - protein, 6 aa, synthetic construct
PFETDD

SEQ ID NO: 28456 - protein, 6 aa, synthetic construct
PFETDE

SEQ ID NO: 28457 - protein, 6 aa, synthetic construct
PFETDF

SEQ ID NO: 28458 - protein, 6 aa, synthetic construct
PFETDW

SEQ ID NO: 28459 - protein, 6 aa, synthetic construct
PFETDY

SEQ ID NO: 28460 - protein, 6 aa, synthetic construct
PFETCD

SEQ ID NO: 28461 - protein, 6 aa, synthetic construct
PFETCE

SEQ ID NO: 28462 - protein, 6 aa, synthetic construct
PFETCF

SEQ ID NO: 28463 - protein, 6 aa, synthetic construct
PFETCW

SEQ ID NO: 28464 - protein, 6 aa, synthetic construct
PFETCY

SEQ ID NO: 28465 - protein, 6 aa, synthetic construct
PFETQD

SEQ ID NO: 28466 - protein, 6 aa, synthetic construct
PFETQE

SEQ ID NO: 28467 - protein, 6 aa, synthetic construct
PFETQF

SEQ ID NO: 28468 - protein, 6 aa, synthetic construct
PFETQW

SEQ ID NO: 28469 - protein, 6 aa, synthetic construct
PFETQY

SEQ ID NO: 28470 - protein, 6 aa, synthetic construct
PFETED

SEQ ID NO: 28471 - protein, 6 aa, synthetic construct
PFETEE

SEQ ID NO: 28472 - protein, 6 aa, synthetic construct
PFETEF

SEQ ID NO: 28473 - protein, 6 aa, synthetic construct
PFETEW

SEQ ID NO: 28474 - protein, 6 aa, synthetic construct
PFETEY

SEQ ID NO: 28475 - protein, 6 aa, synthetic construct
PFETGD

SEQ ID NO: 28476 - protein, 6 aa, synthetic construct
PFETGE

SEQ ID NO: 28477 - protein, 6 aa, synthetic construct
PFETGF

SEQ ID NO: 28478 - protein, 6 aa, synthetic construct
PFETGW

SEQ ID NO: 28479 - protein, 6 aa, synthetic construct
PFETGY

SEQ ID NO: 28480 - protein, 6 aa, synthetic construct
PFETHD

SEQ ID NO: 28481 - protein, 6 aa, synthetic construct
PFETHE

SEQ ID NO: 28482 - protein, 6 aa, synthetic construct
PFETHF

SEQ ID NO: 28483 - protein, 6 aa, synthetic construct
PFETHW

SEQ ID NO: 28484 - protein, 6 aa, synthetic construct
PFETHY

SEQ ID NO: 28485 - protein, 6 aa, synthetic construct
PFETID

SEQ ID NO: 28486 - protein, 6 aa, synthetic construct
PFETIE

SEQ ID NO: 28487 - protein, 6 aa, synthetic construct
PFETIF

SEQ ID NO: 28488 - protein, 6 aa, synthetic construct
PFETIW

SEQ ID NO: 28489 - protein, 6 aa, synthetic construct
PFETIY

SEQ ID NO: 28490 - protein, 6 aa, synthetic construct
PFETLD

SEQ ID NO: 28491 - protein, 6 aa, synthetic construct
PFETLE

SEQ ID NO: 28492 - protein, 6 aa, synthetic construct
PFETLF

SEQ ID NO: 28493 - protein, 6 aa, synthetic construct
PFETLW

SEQ ID NO: 28494 - protein, 6 aa, synthetic construct
PFETLY

SEQ ID NO: 28495 - protein, 6 aa, synthetic construct
PFETKD

SEQ ID NO: 28496 - protein, 6 aa, synthetic construct
PFETKE

SEQ ID NO: 28497 - protein, 6 aa, synthetic construct
PFETKF

SEQ ID NO: 28498 - protein, 6 aa, synthetic construct
PFETKW

SEQ ID NO: 28499 - protein, 6 aa, synthetic construct
PFETKY

SEQ ID NO: 28500 - protein, 6 aa, synthetic construct
PFETMD

SEQ ID NO: 28501 - protein, 6 aa, synthetic construct
PFETME

SEQ ID NO: 28502 - protein, 6 aa, synthetic construct
PFETMF

SEQ ID NO: 28503 - protein, 6 aa, synthetic construct
PFETMW

SEQ ID NO: 28504 - protein, 6 aa, synthetic construct
PFETMY

SEQ ID NO: 28505 - protein, 6 aa, synthetic construct
PFETFD

SEQ ID NO: 28506 - protein, 6 aa, synthetic construct
PFETFE

SEQ ID NO: 28507 - protein, 6 aa, synthetic construct
PFETFF

SEQ ID NO: 28508 - protein, 6 aa, synthetic construct
PFETFW

SEQ ID NO: 28509 - protein, 6 aa, synthetic construct
PFETFY

SEQ ID NO: 28510 - protein, 6 aa, synthetic construct
PFETPD

SEQ ID NO: 28511 - protein, 6 aa, synthetic construct
PFETPE

SEQ ID NO: 28512 - protein, 6 aa, synthetic construct
PFETPF

SEQ ID NO: 28513 - protein, 6 aa, synthetic construct
PFETPW

SEQ ID NO: 28514 - protein, 6 aa, synthetic construct
PFETPY

SEQ ID NO: 28515 - protein, 6 aa, synthetic construct
PFETSD

SEQ ID NO: 28516 - protein, 6 aa, synthetic construct
PFETSE

SEQ ID NO: 28517 - protein, 6 aa, synthetic construct
PFETSF

SEQ ID NO: 28518 - protein, 6 aa, synthetic construct
PFETSW

SEQ ID NO: 28519 - protein, 6 aa, synthetic construct
PFETSY

SEQ ID NO: 28520 - protein, 6 aa, synthetic construct
PFETTD

SEQ ID NO: 28521 - protein, 6 aa, synthetic construct
PFETTE

SEQ ID NO: 28522 - protein, 6 aa, synthetic construct
PFETTF

SEQ ID NO: 28523 - protein, 6 aa, synthetic construct
PFETTW

SEQ ID NO: 28524 - protein, 6 aa, synthetic construct
PFETTY

SEQ ID NO: 28525 - protein, 6 aa, synthetic construct
PFETWD

SEQ ID NO: 28526 - protein, 6 aa, synthetic construct
PFETWE

SEQ ID NO: 28527 - protein, 6 aa, synthetic construct
PFETWF

SEQ ID NO: 28528 - protein, 6 aa, synthetic construct
PFETWW

SEQ ID NO: 28529 - protein, 6 aa, synthetic construct
PFETWY

SEQ ID NO: 28530 - protein, 6 aa, synthetic construct
PFETYD

SEQ ID NO: 28531 - protein, 6 aa, synthetic construct
PFETYE

SEQ ID NO: 28532 - protein, 6 aa, synthetic construct
PFETYF

SEQ ID NO: 28533 - protein, 6 aa, synthetic construct
PFETYW

SEQ ID NO: 28534 - protein, 6 aa, synthetic construct
PFETYY

SEQ ID NO: 28535 - protein, 6 aa, synthetic construct
PFETVD

SEQ ID NO: 28536 - protein, 6 aa, synthetic construct
PFETVE

SEQ ID NO: 28537 - protein, 6 aa, synthetic construct
PFETVF

SEQ ID NO: 28538 - protein, 6 aa, synthetic construct
PFETVW

SEQ ID NO: 28539 - protein, 6 aa, synthetic construct
PFETVY

SEQ ID NO: 28540 - protein, 6 aa, synthetic construct
PFEWAD

SEQ ID NO: 28541 - protein, 6 aa, synthetic construct
PFEWAE

SEQ ID NO: 28542 - protein, 6 aa, synthetic construct
PFEWAF

SEQ ID NO: 28543 - protein, 6 aa, synthetic construct
PFEWAW

SEQ ID NO: 28544 - protein, 6 aa, synthetic construct
PFEWAY

SEQ ID NO: 28545 - protein, 6 aa, synthetic construct
PFEWRD

SEQ ID NO: 28546 - protein, 6 aa, synthetic construct
PFEWRE

SEQ ID NO: 28547 - protein, 6 aa, synthetic construct
PFEWRF

SEQ ID NO: 28548 - protein, 6 aa, synthetic construct
PFEWRW

SEQ ID NO: 28549 - protein, 6 aa, synthetic construct
PFEWRY

SEQ ID NO: 28550 - protein, 6 aa, synthetic construct
PFEWND

SEQ ID NO: 28551 - protein, 6 aa, synthetic construct
PFEWNE

SEQ ID NO: 28552 - protein, 6 aa, synthetic construct
PFEWNF

SEQ ID NO: 28553 - protein, 6 aa, synthetic construct
PFEWNW

SEQ ID NO: 28554 - protein, 6 aa, synthetic construct
PFEWNY

SEQ ID NO: 28555 - protein, 6 aa, synthetic construct
PFEWDD

SEQ ID NO: 28556 - protein, 6 aa, synthetic construct
PFEWDE

SEQ ID NO: 28557 - protein, 6 aa, synthetic construct
PFEWDF

SEQ ID NO: 28558 - protein, 6 aa, synthetic construct
PFEWDW

SEQ ID NO: 28559 - protein, 6 aa, synthetic construct
PFEWDY

SEQ ID NO: 28560 - protein, 6 aa, synthetic construct
PFEWCD

SEQ ID NO: 28561 - protein, 6 aa, synthetic construct
PFEWCE

SEQ ID NO: 28562 - protein, 6 aa, synthetic construct
PFEWCF

SEQ ID NO: 28563 - protein, 6 aa, synthetic construct
PFEWCW

SEQ ID NO: 28564 - protein, 6 aa, synthetic construct
PFEWCY

SEQ ID NO: 28565 - protein, 6 aa, synthetic construct
PFEWQD

SEQ ID NO: 28566 - protein, 6 aa, synthetic construct
PFEWQE

SEQ ID NO: 28567 - protein, 6 aa, synthetic construct
PFEWQF

SEQ ID NO: 28568 - protein, 6 aa, synthetic construct
PFEWQW

SEQ ID NO: 28569 - protein, 6 aa, synthetic construct
PFEWQY

SEQ ID NO: 28570 - protein, 6 aa, synthetic construct
PFEWED

SEQ ID NO: 28571 - protein, 6 aa, synthetic construct
PFEWEE

SEQ ID NO: 28572 - protein, 6 aa, synthetic construct
PFEWEF

SEQ ID NO: 28573 - protein, 6 aa, synthetic construct
PFEWEW

SEQ ID NO: 28574 - protein, 6 aa, synthetic construct
PFEWEY

SEQ ID NO: 28575 - protein, 6 aa, synthetic construct
PFEWGD

SEQ ID NO: 28576 - protein, 6 aa, synthetic construct
PFEWGE

SEQ ID NO: 28577 - protein, 6 aa, synthetic construct
PFEWGF

SEQ ID NO: 28578 - protein, 6 aa, synthetic construct
PFEWGW

SEQ ID NO: 28579 - protein, 6 aa, synthetic construct
PFEWGY

SEQ ID NO: 28580 - protein, 6 aa, synthetic construct
PFEWHD

SEQ ID NO: 28581 - protein, 6 aa, synthetic construct
PFEWHE

SEQ ID NO: 28582 - protein, 6 aa, synthetic construct
PFEWHF

SEQ ID NO: 28583 - protein, 6 aa, synthetic construct
PFEWHW

SEQ ID NO: 28584 - protein, 6 aa, synthetic construct
PFEWHY

SEQ ID NO: 28585 - protein, 6 aa, synthetic construct
PFEWID

SEQ ID NO: 28586 - protein, 6 aa, synthetic construct
PFEWIE

SEQ ID NO: 28587 - protein, 6 aa, synthetic construct
PFEWIF

SEQ ID NO: 28588 - protein, 6 aa, synthetic construct
PFEWIW

SEQ ID NO: 28589 - protein, 6 aa, synthetic construct
PFEWIY

SEQ ID NO: 28590 - protein, 6 aa, synthetic construct
PFEWLD

SEQ ID NO: 28591 - protein, 6 aa, synthetic construct
PFEWLE

SEQ ID NO: 28592 - protein, 6 aa, synthetic construct
PFEWLF

SEQ ID NO: 28593 - protein, 6 aa, synthetic construct
PFEWLW

SEQ ID NO: 28594 - protein, 6 aa, synthetic construct
PFEWLY

SEQ ID NO: 28595 - protein, 6 aa, synthetic construct
PFEWKD

SEQ ID NO: 28596 - protein, 6 aa, synthetic construct
PFEWKE

SEQ ID NO: 28597 - protein, 6 aa, synthetic construct
PFEWKF

SEQ ID NO: 28598 - protein, 6 aa, synthetic construct
PFEWKW

SEQ ID NO: 28599 - protein, 6 aa, synthetic construct
PFEWKY

SEQ ID NO: 28600 - protein, 6 aa, synthetic construct
PFEWMD

SEQ ID NO: 28601 - protein, 6 aa, synthetic construct
PFEWME

SEQ ID NO: 28602 - protein, 6 aa, synthetic construct
PFEWMF

SEQ ID NO: 28603 - protein, 6 aa, synthetic construct
PFEWMW

SEQ ID NO: 28604 - protein, 6 aa, synthetic construct
PFEWMY

SEQ ID NO: 28605 - protein, 6 aa, synthetic construct
PFEWFD

SEQ ID NO: 28606 - protein, 6 aa, synthetic construct
PFEWFE

SEQ ID NO: 28607 - protein, 6 aa, synthetic construct
PFEWFF

SEQ ID NO: 28608 - protein, 6 aa, synthetic construct
PFEWFW

SEQ ID NO: 28609 - protein, 6 aa, synthetic construct
PFEWFY

SEQ ID NO: 28610 - protein, 6 aa, synthetic construct
PFEWPD

SEQ ID NO: 28611 - protein, 6 aa, synthetic construct
PFEWPE

SEQ ID NO: 28612 - protein, 6 aa, synthetic construct
PFEWPF

SEQ ID NO: 28613 - protein, 6 aa, synthetic construct
PFEWPW

SEQ ID NO: 28614 - protein, 6 aa, synthetic construct
PFEWPY

SEQ ID NO: 28615 - protein, 6 aa, synthetic construct
PFEWSD

SEQ ID NO: 28616 - protein, 6 aa, synthetic construct
PFEWSE

SEQ ID NO: 28617 - protein, 6 aa, synthetic construct
PFEWSF

SEQ ID NO: 28618 - protein, 6 aa, synthetic construct
PFEWSW

SEQ ID NO: 28619 - protein, 6 aa, synthetic construct
PFEWSY

SEQ ID NO: 28620 - protein, 6 aa, synthetic construct
PFEWTD

SEQ ID NO: 28621 - protein, 6 aa, synthetic construct
PFEWTE

SEQ ID NO: 28622 - protein, 6 aa, synthetic construct
PFEWTF

SEQ ID NO: 28623 - protein, 6 aa, synthetic construct
PFEWTW

SEQ ID NO: 28624 - protein, 6 aa, synthetic construct
PFEWTY

SEQ ID NO: 28625 - protein, 6 aa, synthetic construct
PFEWWD

SEQ ID NO: 28626 - protein, 6 aa, synthetic construct
PFEWWE

SEQ ID NO: 28627 - protein, 6 aa, synthetic construct
PFEWWF

SEQ ID NO: 28628 - protein, 6 aa, synthetic construct
PFEWWW

SEQ ID NO: 28629 - protein, 6 aa, synthetic construct
PFEWWY

SEQ ID NO: 28630 - protein, 6 aa, synthetic construct
PFEWYD

SEQ ID NO: 28631 - protein, 6 aa, synthetic construct
PFEWYE

SEQ ID NO: 28632 - protein, 6 aa, synthetic construct
PFEWYF

SEQ ID NO: 28633 - protein, 6 aa, synthetic construct
PFEWYW

SEQ ID NO: 28634 - protein, 6 aa, synthetic construct
PFEWYY

SEQ ID NO: 28635 - protein, 6 aa, synthetic construct
PFEWVD

SEQ ID NO: 28636 - protein, 6 aa, synthetic construct
PFEWVE

SEQ ID NO: 28637 - protein, 6 aa, synthetic construct
PFEWVF

SEQ ID NO: 28638 - protein, 6 aa, synthetic construct
PFEWVW

SEQ ID NO: 28639 - protein, 6 aa, synthetic construct
PFEWVY

SEQ ID NO: 28640 - protein, 6 aa, synthetic construct
PFEYAD

SEQ ID NO: 28641 - protein, 6 aa, synthetic construct
PFEYAE

SEQ ID NO: 28642 - protein, 6 aa, synthetic construct
PFEYAF

SEQ ID NO: 28643 - protein, 6 aa, synthetic construct
PFEYAW

SEQ ID NO: 28644 - protein, 6 aa, synthetic construct
PFEYAY

SEQ ID NO: 28645 - protein, 6 aa, synthetic construct
PFEYRD

SEQ ID NO: 28646 - protein, 6 aa, synthetic construct
PFEYRE

SEQ ID NO: 28647 - protein, 6 aa, synthetic construct
PFEYRF

SEQ ID NO: 28648 - protein, 6 aa, synthetic construct
PFEYRW

SEQ ID NO: 28649 - protein, 6 aa, synthetic construct
PFEYRY

SEQ ID NO: 28650 - protein, 6 aa, synthetic construct
PFEYND

SEQ ID NO: 28651 - protein, 6 aa, synthetic construct
PFEYNE

SEQ ID NO: 28652 - protein, 6 aa, synthetic construct
PFEYNF

SEQ ID NO: 28653 - protein, 6 aa, synthetic construct
PFEYNW

SEQ ID NO: 28654 - protein, 6 aa, synthetic construct
PFEYNY

SEQ ID NO: 28655 - protein, 6 aa, synthetic construct
PFEYDD

SEQ ID NO: 28656 - protein, 6 aa, synthetic construct
PFEYDE

SEQ ID NO: 28657 - protein, 6 aa, synthetic construct
PFEYDF

SEQ ID NO: 28658 - protein, 6 aa, synthetic construct
PFEYDW

SEQ ID NO: 28659 - protein, 6 aa, synthetic construct
PFEYDY

SEQ ID NO: 28660 - protein, 6 aa, synthetic construct
PFEYCD

SEQ ID NO: 28661 - protein, 6 aa, synthetic construct
PFEYCE

SEQ ID NO: 28662 - protein, 6 aa, synthetic construct
PFEYCF

SEQ ID NO: 28663 - protein, 6 aa, synthetic construct
PFEYCW

SEQ ID NO: 28664 - protein, 6 aa, synthetic construct
PFEYCY

SEQ ID NO: 28665 - protein, 6 aa, synthetic construct
PFEYQD

SEQ ID NO: 28666 - protein, 6 aa, synthetic construct
PFEYQE

SEQ ID NO: 28667 - protein, 6 aa, synthetic construct
PFEYQF

SEQ ID NO: 28668 - protein, 6 aa, synthetic construct
PFEYQW

SEQ ID NO: 28669 - protein, 6 aa, synthetic construct
PFEYQY

SEQ ID NO: 28670 - protein, 6 aa, synthetic construct
PFEYED

SEQ ID NO: 28671 - protein, 6 aa, synthetic construct
PFEYEE

SEQ ID NO: 28672 - protein, 6 aa, synthetic construct
PFEYEF

SEQ ID NO: 28673 - protein, 6 aa, synthetic construct
PFEYEW

SEQ ID NO: 28674 - protein, 6 aa, synthetic construct
PFEYEY

SEQ ID NO: 28675 - protein, 6 aa, synthetic construct
PFEYGD

SEQ ID NO: 28676 - protein, 6 aa, synthetic construct
PFEYGE

SEQ ID NO: 28677 - protein, 6 aa, synthetic construct
PFEYGF

SEQ ID NO: 28678 - protein, 6 aa, synthetic construct
PFEYGW

SEQ ID NO: 28679 - protein, 6 aa, synthetic construct
PFEYGY

SEQ ID NO: 28680 - protein, 6 aa, synthetic construct
PFEYHD

SEQ ID NO: 28681 - protein, 6 aa, synthetic construct
PFEYHE

SEQ ID NO: 28682 - protein, 6 aa, synthetic construct
PFEYHF

SEQ ID NO: 28683 - protein, 6 aa, synthetic construct
PFEYHW

SEQ ID NO: 28684 - protein, 6 aa, synthetic construct
PFEYHY

SEQ ID NO: 28685 - protein, 6 aa, synthetic construct
PFEYID

SEQ ID NO: 28686 - protein, 6 aa, synthetic construct
PFEYIE

SEQ ID NO: 28687 - protein, 6 aa, synthetic construct
PFEYIF

SEQ ID NO: 28688 - protein, 6 aa, synthetic construct
PFEYIW

SEQ ID NO: 28689 - protein, 6 aa, synthetic construct
PFEYIY

SEQ ID NO: 28690 - protein, 6 aa, synthetic construct
PFEYLD

SEQ ID NO: 28691 - protein, 6 aa, synthetic construct
PFEYLE

SEQ ID NO: 28692 - protein, 6 aa, synthetic construct
PFEYLF

SEQ ID NO: 28693 - protein, 6 aa, synthetic construct
PFEYLW

SEQ ID NO: 28694 - protein, 6 aa, synthetic construct
PFEYLY

SEQ ID NO: 28695 - protein, 6 aa, synthetic construct
PFEYKD

SEQ ID NO: 28696 - protein, 6 aa, synthetic construct
PFEYKE

SEQ ID NO: 28697 - protein, 6 aa, synthetic construct
PFEYKF

SEQ ID NO: 28698 - protein, 6 aa, synthetic construct
PFEYKW

SEQ ID NO: 28699 - protein, 6 aa, synthetic construct
PFEYKY

SEQ ID NO: 28700 - protein, 6 aa, synthetic construct
PFEYMD

SEQ ID NO: 28701 - protein, 6 aa, synthetic construct
PFEYME

SEQ ID NO: 28702 - protein, 6 aa, synthetic construct
PFEYMF

SEQ ID NO: 28703 - protein, 6 aa, synthetic construct
PFEYMW

SEQ ID NO: 28704 - protein, 6 aa, synthetic construct
PFEYMY

SEQ ID NO: 28705 - protein, 6 aa, synthetic construct
PFEYFD

SEQ ID NO: 28706 - protein, 6 aa, synthetic construct
PFEYFE

SEQ ID NO: 28707 - protein, 6 aa, synthetic construct
PFEYFF

SEQ ID NO: 28708 - protein, 6 aa, synthetic construct
PFEYFW

SEQ ID NO: 28709 - protein, 6 aa, synthetic construct
PFEYFY

SEQ ID NO: 28710 - protein, 6 aa, synthetic construct
PFEYPD

SEQ ID NO: 28711 - protein, 6 aa, synthetic construct
PFEYPE

SEQ ID NO: 28712 - protein, 6 aa, synthetic construct
PFEYPF

SEQ ID NO: 28713 - protein, 6 aa, synthetic construct
PFEYPW

SEQ ID NO: 28714 - protein, 6 aa, synthetic construct
PFEYPY

SEQ ID NO: 28715 - protein, 6 aa, synthetic construct
PFEYSD

SEQ ID NO: 28716 - protein, 6 aa, synthetic construct
PFEYSE

SEQ ID NO: 28717 - protein, 6 aa, synthetic construct
PFEYSF

SEQ ID NO: 28718 - protein, 6 aa, synthetic construct
PFEYSW

SEQ ID NO: 28719 - protein, 6 aa, synthetic construct
PFEYSY

SEQ ID NO: 28720 - protein, 6 aa, synthetic construct
PFEYTD

SEQ ID NO: 28721 - protein, 6 aa, synthetic construct
PFEYTE

SEQ ID NO: 28722 - protein, 6 aa, synthetic construct
PFEYTF

SEQ ID NO: 28723 - protein, 6 aa, synthetic construct
PFEYTW

SEQ ID NO: 28724 - protein, 6 aa, synthetic construct
PFEYTY

SEQ ID NO: 28725 - protein, 6 aa, synthetic construct
PFEYWD

SEQ ID NO: 28726 - protein, 6 aa, synthetic construct
PFEYWE

SEQ ID NO: 28727 - protein, 6 aa, synthetic construct
PFEYWF

SEQ ID NO: 28728 - protein, 6 aa, synthetic construct
PFEYWW

SEQ ID NO: 28729 - protein, 6 aa, synthetic construct
PFEYWY

SEQ ID NO: 28730 - protein, 6 aa, synthetic construct
PFEYYD

SEQ ID NO: 28731 - protein, 6 aa, synthetic construct
PFEYYE

SEQ ID NO: 28732 - protein, 6 aa, synthetic construct
PFEYYF

SEQ ID NO: 28733 - protein, 6 aa, synthetic construct
PFEYYW

SEQ ID NO: 28734 - protein, 6 aa, synthetic construct
PFEYYY

SEQ ID NO: 28735 - protein, 6 aa, synthetic construct
PFEYVD

SEQ ID NO: 28736 - protein, 6 aa, synthetic construct
PFEYVE

SEQ ID NO: 28737 - protein, 6 aa, synthetic construct
PFEYVF

SEQ ID NO: 28738 - protein, 6 aa, synthetic construct
PFEYVW

SEQ ID NO: 28739 - protein, 6 aa, synthetic construct
PFEYVY

SEQ ID NO: 28740 - protein, 6 aa, synthetic construct
PFEVAD

SEQ ID NO: 28741 - protein, 6 aa, synthetic construct
PFEVAE

SEQ ID NO: 28742 - protein, 6 aa, synthetic construct
PFEVAF

SEQ ID NO: 28743 - protein, 6 aa, synthetic construct
PFEVAW

SEQ ID NO: 28744 - protein, 6 aa, synthetic construct
PFEVAY

SEQ ID NO: 28745 - protein, 6 aa, synthetic construct
PFEVRD

SEQ ID NO: 28746 - protein, 6 aa, synthetic construct
PFEVRE

SEQ ID NO: 28747 - protein, 6 aa, synthetic construct
PFEVRF

SEQ ID NO: 28748 - protein, 6 aa, synthetic construct
PFEVRW

SEQ ID NO: 28749 - protein, 6 aa, synthetic construct
PFEVRY

SEQ ID NO: 28750 - protein, 6 aa, synthetic construct
PFEVND

SEQ ID NO: 28751 - protein, 6 aa, synthetic construct
PFEVNE

SEQ ID NO: 28752 - protein, 6 aa, synthetic construct
PFEVNF

SEQ ID NO: 28753 - protein, 6 aa, synthetic construct
PFEVNW

SEQ ID NO: 28754 - protein, 6 aa, synthetic construct
PFEVNY

SEQ ID NO: 28755 - protein, 6 aa, synthetic construct
PFEVDD

SEQ ID NO: 28756 - protein, 6 aa, synthetic construct
PFEVDE

SEQ ID NO: 28757 - protein, 6 aa, synthetic construct
PFEVDF

SEQ ID NO: 28758 - protein, 6 aa, synthetic construct
PFEVDW

SEQ ID NO: 28759 - protein, 6 aa, synthetic construct
PFEVDY

SEQ ID NO: 28760 - protein, 6 aa, synthetic construct
PFEVCD

SEQ ID NO: 28761 - protein, 6 aa, synthetic construct
PFEVCE

SEQ ID NO: 28762 - protein, 6 aa, synthetic construct
PFEVCF

SEQ ID NO: 28763 - protein, 6 aa, synthetic construct
PFEVCW

SEQ ID NO: 28764 - protein, 6 aa, synthetic construct
PFEVCY

SEQ ID NO: 28765 - protein, 6 aa, synthetic construct
PFEVQD

SEQ ID NO: 28766 - protein, 6 aa, synthetic construct
PFEVQE

SEQ ID NO: 28767 - protein, 6 aa, synthetic construct
PFEVQF

SEQ ID NO: 28768 - protein, 6 aa, synthetic construct
PFEVQW

SEQ ID NO: 28769 - protein, 6 aa, synthetic construct
PFEVQY

SEQ ID NO: 28770 - protein, 6 aa, synthetic construct
PFEVED

SEQ ID NO: 28771 - protein, 6 aa, synthetic construct
PFEVEE

SEQ ID NO: 28772 - protein, 6 aa, synthetic construct
PFEVEF

SEQ ID NO: 28773 - protein, 6 aa, synthetic construct
PFEVEW

SEQ ID NO: 28774 - protein, 6 aa, synthetic construct
PFEVEY

SEQ ID NO: 28775 - protein, 6 aa, synthetic construct
PFEVGD

SEQ ID NO: 28776 - protein, 6 aa, synthetic construct
PFEVGE

SEQ ID NO: 28777 - protein, 6 aa, synthetic construct
PFEVGF

SEQ ID NO: 28778 - protein, 6 aa, synthetic construct
PFEVGW

SEQ ID NO: 28779 - protein, 6 aa, synthetic construct
PFEVGY

SEQ ID NO: 28780 - protein, 6 aa, synthetic construct
PFEVHD

SEQ ID NO: 28781 - protein, 6 aa, synthetic construct
PFEVHE

SEQ ID NO: 28782 - protein, 6 aa, synthetic construct
PFEVHF

SEQ ID NO: 28783 - protein, 6 aa, synthetic construct
PFEVHW

SEQ ID NO: 28784 - protein, 6 aa, synthetic construct
PFEVHY

SEQ ID NO: 28785 - protein, 6 aa, synthetic construct
PFEVID

SEQ ID NO: 28786 - protein, 6 aa, synthetic construct
PFEVIE

SEQ ID NO: 28787 - protein, 6 aa, synthetic construct
PFEVIF

SEQ ID NO: 28788 - protein, 6 aa, synthetic construct
PFEVIW

SEQ ID NO: 28789 - protein, 6 aa, synthetic construct
PFEVIY

SEQ ID NO: 28790 - protein, 6 aa, synthetic construct
PFEVLD

SEQ ID NO: 28791 - protein, 6 aa, synthetic construct
PFEVLE

SEQ ID NO: 28792 - protein, 6 aa, synthetic construct
PFEVLF

SEQ ID NO: 28793 - protein, 6 aa, synthetic construct
PFEVLW

SEQ ID NO: 28794 - protein, 6 aa, synthetic construct
PFEVLY

SEQ ID NO: 28795 - protein, 6 aa, synthetic construct
PFEVKD

SEQ ID NO: 28796 - protein, 6 aa, synthetic construct
PFEVKE

SEQ ID NO: 28797 - protein, 6 aa, synthetic construct
PFEVKF

SEQ ID NO: 28798 - protein, 6 aa, synthetic construct
PFEVKW

SEQ ID NO: 28799 - protein, 6 aa, synthetic construct
PFEVKY

SEQ ID NO: 28800 - protein, 6 aa, synthetic construct
PFEVMD

SEQ ID NO: 28801 - protein, 6 aa, synthetic construct
PFEVME

SEQ ID NO: 28802 - protein, 6 aa, synthetic construct
PFEVMF

SEQ ID NO: 28803 - protein, 6 aa, synthetic construct
PFEVMW

SEQ ID NO: 28804 - protein, 6 aa, synthetic construct
PFEVMY

SEQ ID NO: 28805 - protein, 6 aa, synthetic construct
PFEVFD

SEQ ID NO: 28806 - protein, 6 aa, synthetic construct
PFEVFE

SEQ ID NO: 28807 - protein, 6 aa, synthetic construct
PFEVFF

SEQ ID NO: 28808 - protein, 6 aa, synthetic construct
PFEVFW

SEQ ID NO: 28809 - protein, 6 aa, synthetic construct
PFEVFY

SEQ ID NO: 28810 - protein, 6 aa, synthetic construct
PFEVPD

SEQ ID NO: 28811 - protein, 6 aa, synthetic construct
PFEVPE

SEQ ID NO: 28812 - protein, 6 aa, synthetic construct
PFEVPF

SEQ ID NO: 28813 - protein, 6 aa, synthetic construct
PFEVPW

SEQ ID NO: 28814 - protein, 6 aa, synthetic construct
PFEVPY

SEQ ID NO: 28815 - protein, 6 aa, synthetic construct
PFEVSD

SEQ ID NO: 28816 - protein, 6 aa, synthetic construct
PFEVSE

SEQ ID NO: 28817 - protein, 6 aa, synthetic construct
PFEVSF

SEQ ID NO: 28818 - protein, 6 aa, synthetic construct
PFEVSW

SEQ ID NO: 28819 - protein, 6 aa, synthetic construct
PFEVSY

SEQ ID NO: 28820 - protein, 6 aa, synthetic construct
PFEVTD

SEQ ID NO: 28821 - protein, 6 aa, synthetic construct
PFEVTE

SEQ ID NO: 28822 - protein, 6 aa, synthetic construct
PFEVTF

SEQ ID NO: 28823 - protein, 6 aa, synthetic construct
PFEVTW

SEQ ID NO: 28824 - protein, 6 aa, synthetic construct
PFEVTY

SEQ ID NO: 28825 - protein, 6 aa, synthetic construct
PFEVWD

SEQ ID NO: 28826 - protein, 6 aa, synthetic construct
PFEVWE

SEQ ID NO: 28827 - protein, 6 aa, synthetic construct
PFEVWF

SEQ ID NO: 28828 - protein, 6 aa, synthetic construct
PFEVWW

SEQ ID NO: 28829 - protein, 6 aa, synthetic construct
PFEVWY

SEQ ID NO: 28830 - protein, 6 aa, synthetic construct
PFEVYD

SEQ ID NO: 28831 - protein, 6 aa, synthetic construct
PFEVYE

SEQ ID NO: 28832 - protein, 6 aa, synthetic construct
PFEVYF

SEQ ID NO: 28833 - protein, 6 aa, synthetic construct
PFEVYW

SEQ ID NO: 28834 - protein, 6 aa, synthetic construct
PFEVYY

SEQ ID NO: 28835 - protein, 6 aa, synthetic construct
PFEVVD

SEQ ID NO: 28836 - protein, 6 aa, synthetic construct
PFEVVE

SEQ ID NO: 28837 - protein, 6 aa, synthetic construct
PFEVVF

SEQ ID NO: 28838 - protein, 6 aa, synthetic construct
PFEVVW

SEQ ID NO: 28839 - protein, 6 aa, synthetic construct
PFEVVY

SEQ ID NO: 28840 - protein, 6 aa, synthetic construct
PPEAAD

SEQ ID NO: 28841 - protein, 6 aa, synthetic construct
PPEAAE

SEQ ID NO: 28842 - protein, 6 aa, synthetic construct
PPEAAF

SEQ ID NO: 28843 - protein, 6 aa, synthetic construct
PPEAAW

SEQ ID NO: 28844 - protein, 6 aa, synthetic construct
PPEAAY

SEQ ID NO: 28845 - protein, 6 aa, synthetic construct
PPEARD

SEQ ID NO: 28846 - protein, 6 aa, synthetic construct
PPEARE

SEQ ID NO: 28847 - protein, 6 aa, synthetic construct
PPEARF

SEQ ID NO: 28848 - protein, 6 aa, synthetic construct
PPEARW

SEQ ID NO: 28849 - protein, 6 aa, synthetic construct
PPEARY

SEQ ID NO: 28850 - protein, 6 aa, synthetic construct
PPEAND

SEQ ID NO: 28851 - protein, 6 aa, synthetic construct
PPEANE

SEQ ID NO: 28852 - protein, 6 aa, synthetic construct
PPEANF

SEQ ID NO: 28853 - protein, 6 aa, synthetic construct
PPEANW

SEQ ID NO: 28854 - protein, 6 aa, synthetic construct
PPEANY

SEQ ID NO: 28855 - protein, 6 aa, synthetic construct
PPEADD

SEQ ID NO: 28856 - protein, 6 aa, synthetic construct
PPEADE

SEQ ID NO: 28857 - protein, 6 aa, synthetic construct
PPEADF

SEQ ID NO: 28858 - protein, 6 aa, synthetic construct
PPEADW

SEQ ID NO: 28859 - protein, 6 aa, synthetic construct
PPEADY

SEQ ID NO: 28860 - protein, 6 aa, synthetic construct
PPEACD

SEQ ID NO: 28861 - protein, 6 aa, synthetic construct
PPEACE

SEQ ID NO: 28862 - protein, 6 aa, synthetic construct
PPEACF

SEQ ID NO: 28863 - protein, 6 aa, synthetic construct
PPEACW

SEQ ID NO: 28864 - protein, 6 aa, synthetic construct
PPEACY

SEQ ID NO: 28865 - protein, 6 aa, synthetic construct
PPEAQD

SEQ ID NO: 28866 - protein, 6 aa, synthetic construct
PPEAQE

SEQ ID NO: 28867 - protein, 6 aa, synthetic construct
PPEAQF

SEQ ID NO: 28868 - protein, 6 aa, synthetic construct
PPEAQW

SEQ ID NO: 28869 - protein, 6 aa, synthetic construct
PPEAQY

SEQ ID NO: 28870 - protein, 6 aa, synthetic construct
PPEAED

SEQ ID NO: 28871 - protein, 6 aa, synthetic construct
PPEAEE

SEQ ID NO: 28872 - protein, 6 aa, synthetic construct
PPEAEF

SEQ ID NO: 28873 - protein, 6 aa, synthetic construct
PPEAEW

SEQ ID NO: 28874 - protein, 6 aa, synthetic construct
PPEAEY

SEQ ID NO: 28875 - protein, 6 aa, synthetic construct
PPEAGD

SEQ ID NO: 28876 - protein, 6 aa, synthetic construct
PPEAGE

SEQ ID NO: 28877 - protein, 6 aa, synthetic construct
PPEAGF

SEQ ID NO: 28878 - protein, 6 aa, synthetic construct
PPEAGW

SEQ ID NO: 28879 - protein, 6 aa, synthetic construct
PPEAGY

SEQ ID NO: 28880 - protein, 6 aa, synthetic construct
PPEAHD

SEQ ID NO: 28881 - protein, 6 aa, synthetic construct
PPEAHE

SEQ ID NO: 28882 - protein, 6 aa, synthetic construct
PPEAHF

SEQ ID NO: 28883 - protein, 6 aa, synthetic construct
PPEAHW

SEQ ID NO: 28884 - protein, 6 aa, synthetic construct
PPEAHY

SEQ ID NO: 28885 - protein, 6 aa, synthetic construct
PPEAID

SEQ ID NO: 28886 - protein, 6 aa, synthetic construct
PPEAIE

SEQ ID NO: 28887 - protein, 6 aa, synthetic construct
PPEAIF

SEQ ID NO: 28888 - protein, 6 aa, synthetic construct
PPEAIW

SEQ ID NO: 28889 - protein, 6 aa, synthetic construct
PPEAIY

SEQ ID NO: 28890 - protein, 6 aa, synthetic construct
PPEALD

SEQ ID NO: 28891 - protein, 6 aa, synthetic construct
PPEALE

SEQ ID NO: 28892 - protein, 6 aa, synthetic construct
PPEALF

SEQ ID NO: 28893 - protein, 6 aa, synthetic construct
PPEALW

SEQ ID NO: 28894 - protein, 6 aa, synthetic construct
PPEALY

SEQ ID NO: 28895 - protein, 6 aa, synthetic construct
PPEAKD

SEQ ID NO: 28896 - protein, 6 aa, synthetic construct
PPEAKE

SEQ ID NO: 28897 - protein, 6 aa, synthetic construct
PPEAKF

SEQ ID NO: 28898 - protein, 6 aa, synthetic construct
PPEAKW

SEQ ID NO: 28899 - protein, 6 aa, synthetic construct
PPEAKY

SEQ ID NO: 28900 - protein, 6 aa, synthetic construct
PPEAMD

SEQ ID NO: 28901 - protein, 6 aa, synthetic construct
PPEAME

SEQ ID NO: 28902 - protein, 6 aa, synthetic construct
PPEAMF

SEQ ID NO: 28903 - protein, 6 aa, synthetic construct
PPEAMW

SEQ ID NO: 28904 - protein, 6 aa, synthetic construct
PPEAMY

SEQ ID NO: 28905 - protein, 6 aa, synthetic construct
PPEAFD

SEQ ID NO: 28906 - protein, 6 aa, synthetic construct
PPEAFE

SEQ ID NO: 28907 - protein, 6 aa, synthetic construct
PPEAFF

SEQ ID NO: 28908 - protein, 6 aa, synthetic construct
PPEAFW

SEQ ID NO: 28909 - protein, 6 aa, synthetic construct
PPEAFY

SEQ ID NO: 28910 - protein, 6 aa, synthetic construct
PPEAPD

SEQ ID NO: 28911 - protein, 6 aa, synthetic construct
PPEAPE

SEQ ID NO: 28912 - protein, 6 aa, synthetic construct
PPEAPF

SEQ ID NO: 28913 - protein, 6 aa, synthetic construct
PPEAPW

SEQ ID NO: 28914 - protein, 6 aa, synthetic construct
PPEAPY

SEQ ID NO: 28915 - protein, 6 aa, synthetic construct
PPEASD

SEQ ID NO: 28916 - protein, 6 aa, synthetic construct
PPEASE

SEQ ID NO: 28917 - protein, 6 aa, synthetic construct
PPEASF

SEQ ID NO: 28918 - protein, 6 aa, synthetic construct
PPEASW

SEQ ID NO: 28919 - protein, 6 aa, synthetic construct
PPEASY

SEQ ID NO: 28920 - protein, 6 aa, synthetic construct
PPEATD

SEQ ID NO: 28921 - protein, 6 aa, synthetic construct
PPEATE

SEQ ID NO: 28922 - protein, 6 aa, synthetic construct
PPEATF

SEQ ID NO: 28923 - protein, 6 aa, synthetic construct
PPEATW

SEQ ID NO: 28924 - protein, 6 aa, synthetic construct
PPEATY

SEQ ID NO: 28925 - protein, 6 aa, synthetic construct
PPEAWD

SEQ ID NO: 28926 - protein, 6 aa, synthetic construct
PPEAWE

SEQ ID NO: 28927 - protein, 6 aa, synthetic construct
PPEAWF

SEQ ID NO: 28928 - protein, 6 aa, synthetic construct
PPEAWW

SEQ ID NO: 28929 - protein, 6 aa, synthetic construct
PPEAWY

SEQ ID NO: 28930 - protein, 6 aa, synthetic construct
PPEAYD

SEQ ID NO: 28931 - protein, 6 aa, synthetic construct
PPEAYE

SEQ ID NO: 28932 - protein, 6 aa, synthetic construct
PPEAYF

SEQ ID NO: 28933 - protein, 6 aa, synthetic construct
PPEAYW

SEQ ID NO: 28934 - protein, 6 aa, synthetic construct
PPEAYY

SEQ ID NO: 28935 - protein, 6 aa, synthetic construct
PPEAVD

SEQ ID NO: 28936 - protein, 6 aa, synthetic construct
PPEAVE

SEQ ID NO: 28937 - protein, 6 aa, synthetic construct
PPEAVF

SEQ ID NO: 28938 - protein, 6 aa, synthetic construct
PPEAVW

SEQ ID NO: 28939 - protein, 6 aa, synthetic construct
PPEAVY

SEQ ID NO: 28940 - protein, 6 aa, synthetic construct
PPERAD

SEQ ID NO: 28941 - protein, 6 aa, synthetic construct
PPERAE

SEQ ID NO: 28942 - protein, 6 aa, synthetic construct
PPERAF

SEQ ID NO: 28943 - protein, 6 aa, synthetic construct
PPERAW

SEQ ID NO: 28944 - protein, 6 aa, synthetic construct
PPERAY

SEQ ID NO: 28945 - protein, 6 aa, synthetic construct
PPERRD

SEQ ID NO: 28946 - protein, 6 aa, synthetic construct
PPERRE

SEQ ID NO: 28947 - protein, 6 aa, synthetic construct
PPERRF

SEQ ID NO: 28948 - protein, 6 aa, synthetic construct
PPERRW

SEQ ID NO: 28949 - protein, 6 aa, synthetic construct
PPERRY

SEQ ID NO: 28950 - protein, 6 aa, synthetic construct
PPERND

SEQ ID NO: 28951 - protein, 6 aa, synthetic construct
PPERNE

SEQ ID NO: 28952 - protein, 6 aa, synthetic construct
PPERNF

SEQ ID NO: 28953 - protein, 6 aa, synthetic construct
PPERNW

SEQ ID NO: 28954 - protein, 6 aa, synthetic construct
PPERNY

SEQ ID NO: 28955 - protein, 6 aa, synthetic construct
PPERDD

SEQ ID NO: 28956 - protein, 6 aa, synthetic construct
PPERDE

SEQ ID NO: 28957 - protein, 6 aa, synthetic construct
PPERDF

SEQ ID NO: 28958 - protein, 6 aa, synthetic construct
PPERDW

SEQ ID NO: 28959 - protein, 6 aa, synthetic construct
PPERDY

SEQ ID NO: 28960 - protein, 6 aa, synthetic construct
PPERCD

SEQ ID NO: 28961 - protein, 6 aa, synthetic construct
PPERCE

SEQ ID NO: 28962 - protein, 6 aa, synthetic construct
PPERCF

SEQ ID NO: 28963 - protein, 6 aa, synthetic construct
PPERCW

SEQ ID NO: 28964 - protein, 6 aa, synthetic construct
PPERCY

SEQ ID NO: 28965 - protein, 6 aa, synthetic construct
PPERQD

SEQ ID NO: 28966 - protein, 6 aa, synthetic construct
PPERQE

SEQ ID NO: 28967 - protein, 6 aa, synthetic construct
PPERQF

SEQ ID NO: 28968 - protein, 6 aa, synthetic construct
PPERQW

SEQ ID NO: 28969 - protein, 6 aa, synthetic construct
PPERQY

SEQ ID NO: 28970 - protein, 6 aa, synthetic construct
PPERED

SEQ ID NO: 28971 - protein, 6 aa, synthetic construct
PPEREE

SEQ ID NO: 28972 - protein, 6 aa, synthetic construct
PPEREF

SEQ ID NO: 28973 - protein, 6 aa, synthetic construct
PPEREW

SEQ ID NO: 28974 - protein, 6 aa, synthetic construct
PPEREY

SEQ ID NO: 28975 - protein, 6 aa, synthetic construct
PPERGD

SEQ ID NO: 28976 - protein, 6 aa, synthetic construct
PPERGE

SEQ ID NO: 28977 - protein, 6 aa, synthetic construct
PPERGF

SEQ ID NO: 28978 - protein, 6 aa, synthetic construct
PPERGW

SEQ ID NO: 28979 - protein, 6 aa, synthetic construct
PPERGY

SEQ ID NO: 28980 - protein, 6 aa, synthetic construct
PPERHD

SEQ ID NO: 28981 - protein, 6 aa, synthetic construct
PPERHE

SEQ ID NO: 28982 - protein, 6 aa, synthetic construct
PPERHF

SEQ ID NO: 28983 - protein, 6 aa, synthetic construct
PPERHW

SEQ ID NO: 28984 - protein, 6 aa, synthetic construct
PPERHY

SEQ ID NO: 28985 - protein, 6 aa, synthetic construct
PPERID

SEQ ID NO: 28986 - protein, 6 aa, synthetic construct
PPERIE

SEQ ID NO: 28987 - protein, 6 aa, synthetic construct
PPERIF

SEQ ID NO: 28988 - protein, 6 aa, synthetic construct
PPERIW

SEQ ID NO: 28989 - protein, 6 aa, synthetic construct
PPERIY

SEQ ID NO: 28990 - protein, 6 aa, synthetic construct
PPERLD

SEQ ID NO: 28991 - protein, 6 aa, synthetic construct
PPERLE

SEQ ID NO: 28992 - protein, 6 aa, synthetic construct
PPERLF

SEQ ID NO: 28993 - protein, 6 aa, synthetic construct
PPERLW

SEQ ID NO: 28994 - protein, 6 aa, synthetic construct
PPERLY

SEQ ID NO: 28995 - protein, 6 aa, synthetic construct
PPERKD

SEQ ID NO: 28996 - protein, 6 aa, synthetic construct
PPERKE

SEQ ID NO: 28997 - protein, 6 aa, synthetic construct
PPERKF

SEQ ID NO: 28998 - protein, 6 aa, synthetic construct
PPERKW

SEQ ID NO: 28999 - protein, 6 aa, synthetic construct
PPERKY

SEQ ID NO: 29000 - protein, 6 aa, synthetic construct
PPERMD

SEQ ID NO: 29001 - protein, 6 aa, synthetic construct
PPERME

SEQ ID NO: 29002 - protein, 6 aa, synthetic construct
PPERMF

SEQ ID NO: 29003 - protein, 6 aa, synthetic construct
PPERMW

SEQ ID NO: 29004 - protein, 6 aa, synthetic construct
PPERMY

SEQ ID NO: 29005 - protein, 6 aa, synthetic construct
PPERFD

SEQ ID NO: 29006 - protein, 6 aa, synthetic construct
PPERFE

SEQ ID NO: 29007 - protein, 6 aa, synthetic construct
PPERFF

SEQ ID NO: 29008 - protein, 6 aa, synthetic construct
PPERFW

SEQ ID NO: 29009 - protein, 6 aa, synthetic construct
PPERFY

SEQ ID NO: 29010 - protein, 6 aa, synthetic construct
PPERPD

SEQ ID NO: 29011 - protein, 6 aa, synthetic construct
PPERPE

SEQ ID NO: 29012 - protein, 6 aa, synthetic construct
PPERPF

SEQ ID NO: 29013 - protein, 6 aa, synthetic construct
PPERPW

SEQ ID NO: 29014 - protein, 6 aa, synthetic construct
PPERPY

SEQ ID NO: 29015 - protein, 6 aa, synthetic construct
PPERSD

SEQ ID NO: 29016 - protein, 6 aa, synthetic construct
PPERSE

SEQ ID NO: 29017 - protein, 6 aa, synthetic construct
PPERSF

SEQ ID NO: 29018 - protein, 6 aa, synthetic construct
PPERSW

SEQ ID NO: 29019 - protein, 6 aa, synthetic construct
PPERSY

SEQ ID NO: 29020 - protein, 6 aa, synthetic construct
PPERTD

SEQ ID NO: 29021 - protein, 6 aa, synthetic construct
PPERTE

SEQ ID NO: 29022 - protein, 6 aa, synthetic construct
PPERTF

SEQ ID NO: 29023 - protein, 6 aa, synthetic construct
PPERTW

SEQ ID NO: 29024 - protein, 6 aa, synthetic construct
PPERTY

SEQ ID NO: 29025 - protein, 6 aa, synthetic construct
PPERWD

SEQ ID NO: 29026 - protein, 6 aa, synthetic construct
PPERWE

SEQ ID NO: 29027 - protein, 6 aa, synthetic construct
PPERWF

SEQ ID NO: 29028 - protein, 6 aa, synthetic construct
PPERWW

SEQ ID NO: 29029 - protein, 6 aa, synthetic construct
PPERWY

SEQ ID NO: 29030 - protein, 6 aa, synthetic construct
PPERYD

SEQ ID NO: 29031 - protein, 6 aa, synthetic construct
PPERYE

SEQ ID NO: 29032 - protein, 6 aa, synthetic construct
PPERYF

SEQ ID NO: 29033 - protein, 6 aa, synthetic construct
PPERYW

SEQ ID NO: 29034 - protein, 6 aa, synthetic construct
PPERYY

SEQ ID NO: 29035 - protein, 6 aa, synthetic construct
PPERVD

SEQ ID NO: 29036 - protein, 6 aa, synthetic construct
PPERVE

SEQ ID NO: 29037 - protein, 6 aa, synthetic construct
PPERVF

SEQ ID NO: 29038 - protein, 6 aa, synthetic construct
PPERVW

SEQ ID NO: 29039 - protein, 6 aa, synthetic construct
PPERVY

SEQ ID NO: 29040 - protein, 6 aa, synthetic construct
PPENAD

SEQ ID NO: 29041 - protein, 6 aa, synthetic construct
PPENAE

SEQ ID NO: 29042 - protein, 6 aa, synthetic construct
PPENAF

SEQ ID NO: 29043 - protein, 6 aa, synthetic construct
PPENAW

SEQ ID NO: 29044 - protein, 6 aa, synthetic construct
PPENAY

SEQ ID NO: 29045 - protein, 6 aa, synthetic construct
PPENRD

SEQ ID NO: 29046 - protein, 6 aa, synthetic construct
PPENRE

SEQ ID NO: 29047 - protein, 6 aa, synthetic construct
PPENRF

SEQ ID NO: 29048 - protein, 6 aa, synthetic construct
PPENRW

SEQ ID NO: 29049 - protein, 6 aa, synthetic construct
PPENRY

SEQ ID NO: 29050 - protein, 6 aa, synthetic construct
PPENND

SEQ ID NO: 29051 - protein, 6 aa, synthetic construct
PPENNE

SEQ ID NO: 29052 - protein, 6 aa, synthetic construct
PPENNF

SEQ ID NO: 29053 - protein, 6 aa, synthetic construct
PPENNW

SEQ ID NO: 29054 - protein, 6 aa, synthetic construct
PPENNY

SEQ ID NO: 29055 - protein, 6 aa, synthetic construct
PPENDD

SEQ ID NO: 29056 - protein, 6 aa, synthetic construct
PPENDE

SEQ ID NO: 29057 - protein, 6 aa, synthetic construct
PPENDF

SEQ ID NO: 29058 - protein, 6 aa, synthetic construct
PPENDW

SEQ ID NO: 29059 - protein, 6 aa, synthetic construct
PPENDY

SEQ ID NO: 29060 - protein, 6 aa, synthetic construct
PPENCD

SEQ ID NO: 29061 - protein, 6 aa, synthetic construct
PPENCE

SEQ ID NO: 29062 - protein, 6 aa, synthetic construct
PPENCF

SEQ ID NO: 29063 - protein, 6 aa, synthetic construct
PPENCW

SEQ ID NO: 29064 - protein, 6 aa, synthetic construct
PPENCY

SEQ ID NO: 29065 - protein, 6 aa, synthetic construct
PPENQD

SEQ ID NO: 29066 - protein, 6 aa, synthetic construct
PPENQE

SEQ ID NO: 29067 - protein, 6 aa, synthetic construct
PPENQF

SEQ ID NO: 29068 - protein, 6 aa, synthetic construct
PPENQW

SEQ ID NO: 29069 - protein, 6 aa, synthetic construct
PPENQY

SEQ ID NO: 29070 - protein, 6 aa, synthetic construct
PPENED

SEQ ID NO: 29071 - protein, 6 aa, synthetic construct
PPENEE

SEQ ID NO: 29072 - protein, 6 aa, synthetic construct
PPENEF

SEQ ID NO: 29073 - protein, 6 aa, synthetic construct
PPENEW

SEQ ID NO: 29074 - protein, 6 aa, synthetic construct
PPENEY

SEQ ID NO: 29075 - protein, 6 aa, synthetic construct
PPENGD

SEQ ID NO: 29076 - protein, 6 aa, synthetic construct
PPENGE

SEQ ID NO: 29077 - protein, 6 aa, synthetic construct
PPENGF

SEQ ID NO: 29078 - protein, 6 aa, synthetic construct
PPENGW

SEQ ID NO: 29079 - protein, 6 aa, synthetic construct
PPENGY

SEQ ID NO: 29080 - protein, 6 aa, synthetic construct
PPENHD

SEQ ID NO: 29081 - protein, 6 aa, synthetic construct
PPENHE

SEQ ID NO: 29082 - protein, 6 aa, synthetic construct
PPENHF

SEQ ID NO: 29083 - protein, 6 aa, synthetic construct
PPENHW

SEQ ID NO: 29084 - protein, 6 aa, synthetic construct
PPENHY

SEQ ID NO: 29085 - protein, 6 aa, synthetic construct
PPENID

SEQ ID NO: 29086 - protein, 6 aa, synthetic construct
PPENIE

SEQ ID NO: 29087 - protein, 6 aa, synthetic construct
PPENIF

SEQ ID NO: 29088 - protein, 6 aa, synthetic construct
PPENIW

SEQ ID NO: 29089 - protein, 6 aa, synthetic construct
PPENIY

SEQ ID NO: 29090 - protein, 6 aa, synthetic construct
PPENLD

SEQ ID NO: 29091 - protein, 6 aa, synthetic construct
PPENLE

SEQ ID NO: 29092 - protein, 6 aa, synthetic construct
PPENLF

SEQ ID NO: 29093 - protein, 6 aa, synthetic construct
PPENLW

SEQ ID NO: 29094 - protein, 6 aa, synthetic construct
PPENLY

SEQ ID NO: 29095 - protein, 6 aa, synthetic construct
PPENKD

SEQ ID NO: 29096 - protein, 6 aa, synthetic construct
PPENKE

SEQ ID NO: 29097 - protein, 6 aa, synthetic construct
PPENKF

SEQ ID NO: 29098 - protein, 6 aa, synthetic construct
PPENKW

SEQ ID NO: 29099 - protein, 6 aa, synthetic construct
PPENKY

SEQ ID NO: 29100 - protein, 6 aa, synthetic construct
PPENMD

SEQ ID NO: 29101 - protein, 6 aa, synthetic construct
PPENME

SEQ ID NO: 29102 - protein, 6 aa, synthetic construct
PPENMF

SEQ ID NO: 29103 - protein, 6 aa, synthetic construct
PPENMW

SEQ ID NO: 29104 - protein, 6 aa, synthetic construct
PPENMY

SEQ ID NO: 29105 - protein, 6 aa, synthetic construct
PPENFD

SEQ ID NO: 29106 - protein, 6 aa, synthetic construct
PPENFE

SEQ ID NO: 29107 - protein, 6 aa, synthetic construct
PPENFF

SEQ ID NO: 29108 - protein, 6 aa, synthetic construct
PPENFW

SEQ ID NO: 29109 - protein, 6 aa, synthetic construct
PPENFY

SEQ ID NO: 29110 - protein, 6 aa, synthetic construct
PPENPD

SEQ ID NO: 29111 - protein, 6 aa, synthetic construct
PPENPE

SEQ ID NO: 29112 - protein, 6 aa, synthetic construct
PPENPF

SEQ ID NO: 29113 - protein, 6 aa, synthetic construct
PPENPW

SEQ ID NO: 29114 - protein, 6 aa, synthetic construct
PPENPY

SEQ ID NO: 29115 - protein, 6 aa, synthetic construct
PPENSD

SEQ ID NO: 29116 - protein, 6 aa, synthetic construct
PPENSE

SEQ ID NO: 29117 - protein, 6 aa, synthetic construct
PPENSF

SEQ ID NO: 29118 - protein, 6 aa, synthetic construct
PPENSW

SEQ ID NO: 29119 - protein, 6 aa, synthetic construct
PPENSY

SEQ ID NO: 29120 - protein, 6 aa, synthetic construct
PPENTD

SEQ ID NO: 29121 - protein, 6 aa, synthetic construct
PPENTE

SEQ ID NO: 29122 - protein, 6 aa, synthetic construct
PPENTF

SEQ ID NO: 29123 - protein, 6 aa, synthetic construct
PPENTW

SEQ ID NO: 29124 - protein, 6 aa, synthetic construct
PPENTY

SEQ ID NO: 29125 - protein, 6 aa, synthetic construct
PPENWD

SEQ ID NO: 29126 - protein, 6 aa, synthetic construct
PPENWE

SEQ ID NO: 29127 - protein, 6 aa, synthetic construct
PPENWF

SEQ ID NO: 29128 - protein, 6 aa, synthetic construct
PPENWW

SEQ ID NO: 29129 - protein, 6 aa, synthetic construct
PPENWY

SEQ ID NO: 29130 - protein, 6 aa, synthetic construct
PPENYD

SEQ ID NO: 29131 - protein, 6 aa, synthetic construct
PPENYE

SEQ ID NO: 29132 - protein, 6 aa, synthetic construct
PPENYF

SEQ ID NO: 29133 - protein, 6 aa, synthetic construct
PPENYW

SEQ ID NO: 29134 - protein, 6 aa, synthetic construct
PPENYY

SEQ ID NO: 29135 - protein, 6 aa, synthetic construct
PPENVD

SEQ ID NO: 29136 - protein, 6 aa, synthetic construct
PPENVE

SEQ ID NO: 29137 - protein, 6 aa, synthetic construct
PPENVF

SEQ ID NO: 29138 - protein, 6 aa, synthetic construct
PPENVW

SEQ ID NO: 29139 - protein, 6 aa, synthetic construct
PPENVY

SEQ ID NO: 29140 - protein, 6 aa, synthetic construct
PPEDAD

SEQ ID NO: 29141 - protein, 6 aa, synthetic construct
PPEDAE

SEQ ID NO: 29142 - protein, 6 aa, synthetic construct
PPEDAF

SEQ ID NO: 29143 - protein, 6 aa, synthetic construct
PPEDAW

SEQ ID NO: 29144 - protein, 6 aa, synthetic construct
PPEDAY

SEQ ID NO: 29145 - protein, 6 aa, synthetic construct
PPEDRD

SEQ ID NO: 29146 - protein, 6 aa, synthetic construct
PPEDRE

SEQ ID NO: 29147 - protein, 6 aa, synthetic construct
PPEDRF

SEQ ID NO: 29148 - protein, 6 aa, synthetic construct
PPEDRW

SEQ ID NO: 29149 - protein, 6 aa, synthetic construct
PPEDRY

SEQ ID NO: 29150 - protein, 6 aa, synthetic construct
PPEDND

SEQ ID NO: 29151 - protein, 6 aa, synthetic construct
PPEDNE

SEQ ID NO: 29152 - protein, 6 aa, synthetic construct
PPEDNF

SEQ ID NO: 29153 - protein, 6 aa, synthetic construct
PPEDNW

SEQ ID NO: 29154 - protein, 6 aa, synthetic construct
PPEDNY

SEQ ID NO: 29155 - protein, 6 aa, synthetic construct
PPEDDD

SEQ ID NO: 29156 - protein, 6 aa, synthetic construct
PPEDDE

SEQ ID NO: 29157 - protein, 6 aa, synthetic construct
PPEDDF

SEQ ID NO: 29158 - protein, 6 aa, synthetic construct
PPEDDW

SEQ ID NO: 29159 - protein, 6 aa, synthetic construct
PPEDDY

SEQ ID NO: 29160 - protein, 6 aa, synthetic construct
PPEDCD

SEQ ID NO: 29161 - protein, 6 aa, synthetic construct
PPEDCE

SEQ ID NO: 29162 - protein, 6 aa, synthetic construct
PPEDCF

SEQ ID NO: 29163 - protein, 6 aa, synthetic construct
PPEDCW

SEQ ID NO: 29164 - protein, 6 aa, synthetic construct
PPEDCY

SEQ ID NO: 29165 - protein, 6 aa, synthetic construct
PPEDQD

SEQ ID NO: 29166 - protein, 6 aa, synthetic construct
PPEDQE

SEQ ID NO: 29167 - protein, 6 aa, synthetic construct
PPEDQF

SEQ ID NO: 29168 - protein, 6 aa, synthetic construct
PPEDQW

SEQ ID NO: 29169 - protein, 6 aa, synthetic construct
PPEDQY

SEQ ID NO: 29170 - protein, 6 aa, synthetic construct
PPEDED

SEQ ID NO: 29171 - protein, 6 aa, synthetic construct
PPEDEE

SEQ ID NO: 29172 - protein, 6 aa, synthetic construct
PPEDEF

SEQ ID NO: 29173 - protein, 6 aa, synthetic construct
PPEDEW

SEQ ID NO: 29174 - protein, 6 aa, synthetic construct
PPEDEY

SEQ ID NO: 29175 - protein, 6 aa, synthetic construct
PPEDGD

SEQ ID NO: 29176 - protein, 6 aa, synthetic construct
PPEDGE

SEQ ID NO: 29177 - protein, 6 aa, synthetic construct
PPEDGF

SEQ ID NO: 29178 - protein, 6 aa, synthetic construct
PPEDGW

SEQ ID NO: 29179 - protein, 6 aa, synthetic construct
PPEDGY

SEQ ID NO: 29180 - protein, 6 aa, synthetic construct
PPEDHD

SEQ ID NO: 29181 - protein, 6 aa, synthetic construct
PPEDHE

SEQ ID NO: 29182 - protein, 6 aa, synthetic construct
PPEDHF

SEQ ID NO: 29183 - protein, 6 aa, synthetic construct
PPEDHW

SEQ ID NO: 29184 - protein, 6 aa, synthetic construct
PPEDHY

SEQ ID NO: 29185 - protein, 6 aa, synthetic construct
PPEDID

SEQ ID NO: 29186 - protein, 6 aa, synthetic construct
PPEDIE

SEQ ID NO: 29187 - protein, 6 aa, synthetic construct
PPEDIF

SEQ ID NO: 29188 - protein, 6 aa, synthetic construct
PPEDIW

SEQ ID NO: 29189 - protein, 6 aa, synthetic construct
PPEDIY

SEQ ID NO: 29190 - protein, 6 aa, synthetic construct
PPEDLD

SEQ ID NO: 29191 - protein, 6 aa, synthetic construct
PPEDLE

SEQ ID NO: 29192 - protein, 6 aa, synthetic construct
PPEDLF

SEQ ID NO: 29193 - protein, 6 aa, synthetic construct
PPEDLW

SEQ ID NO: 29194 - protein, 6 aa, synthetic construct
PPEDLY

SEQ ID NO: 29195 - protein, 6 aa, synthetic construct
PPEDKD

SEQ ID NO: 29196 - protein, 6 aa, synthetic construct
PPEDKE

SEQ ID NO: 29197 - protein, 6 aa, synthetic construct
PPEDKF

SEQ ID NO: 29198 - protein, 6 aa, synthetic construct
PPEDKW

SEQ ID NO: 29199 - protein, 6 aa, synthetic construct
PPEDKY

SEQ ID NO: 29200 - protein, 6 aa, synthetic construct
PPEDMD

SEQ ID NO: 29201 - protein, 6 aa, synthetic construct
PPEDME

SEQ ID NO: 29202 - protein, 6 aa, synthetic construct
PPEDMF

SEQ ID NO: 29203 - protein, 6 aa, synthetic construct
PPEDMW

SEQ ID NO: 29204 - protein, 6 aa, synthetic construct
PPEDMY

SEQ ID NO: 29205 - protein, 6 aa, synthetic construct
PPEDFD

SEQ ID NO: 29206 - protein, 6 aa, synthetic construct
PPEDFE

SEQ ID NO: 29207 - protein, 6 aa, synthetic construct
PPEDFF

SEQ ID NO: 29208 - protein, 6 aa, synthetic construct
PPEDFW

SEQ ID NO: 29209 - protein, 6 aa, synthetic construct
PPEDFY

SEQ ID NO: 29210 - protein, 6 aa, synthetic construct
PPEDPD

SEQ ID NO: 29211 - protein, 6 aa, synthetic construct
PPEDPE

SEQ ID NO: 29212 - protein, 6 aa, synthetic construct
PPEDPF

SEQ ID NO: 29213 - protein, 6 aa, synthetic construct
PPEDPW

SEQ ID NO: 29214 - protein, 6 aa, synthetic construct
PPEDPY

SEQ ID NO: 29215 - protein, 6 aa, synthetic construct
PPEDSD

SEQ ID NO: 29216 - protein, 6 aa, synthetic construct
PPEDSE

SEQ ID NO: 29217 - protein, 6 aa, synthetic construct
PPEDSF

SEQ ID NO: 29218 - protein, 6 aa, synthetic construct
PPEDSW

SEQ ID NO: 29219 - protein, 6 aa, synthetic construct
PPEDSY

SEQ ID NO: 29220 - protein, 6 aa, synthetic construct
PPEDTD

SEQ ID NO: 29221 - protein, 6 aa, synthetic construct
PPEDTE

SEQ ID NO: 29222 - protein, 6 aa, synthetic construct
PPEDTF

SEQ ID NO: 29223 - protein, 6 aa, synthetic construct
PPEDTW

SEQ ID NO: 29224 - protein, 6 aa, synthetic construct
PPEDTY

SEQ ID NO: 29225 - protein, 6 aa, synthetic construct
PPEDWD

SEQ ID NO: 29226 - protein, 6 aa, synthetic construct
PPEDWE

SEQ ID NO: 29227 - protein, 6 aa, synthetic construct
PPEDWF

SEQ ID NO: 29228 - protein, 6 aa, synthetic construct
PPEDWW

SEQ ID NO: 29229 - protein, 6 aa, synthetic construct
PPEDWY

SEQ ID NO: 29230 - protein, 6 aa, synthetic construct
PPEDYD

SEQ ID NO: 29231 - protein, 6 aa, synthetic construct
PPEDYE

SEQ ID NO: 29232 - protein, 6 aa, synthetic construct
PPEDYF

SEQ ID NO: 29233 - protein, 6 aa, synthetic construct
PPEDYW

SEQ ID NO: 29234 - protein, 6 aa, synthetic construct
PPEDYY

SEQ ID NO: 29235 - protein, 6 aa, synthetic construct
PPEDVD

SEQ ID NO: 29236 - protein, 6 aa, synthetic construct
PPEDVE

SEQ ID NO: 29237 - protein, 6 aa, synthetic construct
PPEDVF

SEQ ID NO: 29238 - protein, 6 aa, synthetic construct
PPEDVW

SEQ ID NO: 29239 - protein, 6 aa, synthetic construct
PPEDVY

SEQ ID NO: 29240 - protein, 6 aa, synthetic construct
PPECAD

SEQ ID NO: 29241 - protein, 6 aa, synthetic construct
PPECAE

SEQ ID NO: 29242 - protein, 6 aa, synthetic construct
PPECAF

SEQ ID NO: 29243 - protein, 6 aa, synthetic construct
PPECAW

SEQ ID NO: 29244 - protein, 6 aa, synthetic construct
PPECAY

SEQ ID NO: 29245 - protein, 6 aa, synthetic construct
PPECRD

SEQ ID NO: 29246 - protein, 6 aa, synthetic construct
PPECRE

SEQ ID NO: 29247 - protein, 6 aa, synthetic construct
PPECRF

SEQ ID NO: 29248 - protein, 6 aa, synthetic construct
PPECRW

SEQ ID NO: 29249 - protein, 6 aa, synthetic construct
PPECRY

SEQ ID NO: 29250 - protein, 6 aa, synthetic construct
PPECND

SEQ ID NO: 29251 - protein, 6 aa, synthetic construct
PPECNE

SEQ ID NO: 29252 - protein, 6 aa, synthetic construct
PPECNF

SEQ ID NO: 29253 - protein, 6 aa, synthetic construct
PPECNW

SEQ ID NO: 29254 - protein, 6 aa, synthetic construct
PPECNY

SEQ ID NO: 29255 - protein, 6 aa, synthetic construct
PPECDD

SEQ ID NO: 29256 - protein, 6 aa, synthetic construct
PPECDE

SEQ ID NO: 29257 - protein, 6 aa, synthetic construct
PPECDF

SEQ ID NO: 29258 - protein, 6 aa, synthetic construct
PPECDW

SEQ ID NO: 29259 - protein, 6 aa, synthetic construct
PPECDY

SEQ ID NO: 29260 - protein, 6 aa, synthetic construct
PPECCD

SEQ ID NO: 29261 - protein, 6 aa, synthetic construct
PPECCE

SEQ ID NO: 29262 - protein, 6 aa, synthetic construct
PPECCF

SEQ ID NO: 29263 - protein, 6 aa, synthetic construct
PPECCW

SEQ ID NO: 29264 - protein, 6 aa, synthetic construct
PPECCY

SEQ ID NO: 29265 - protein, 6 aa, synthetic construct
PPECQD

SEQ ID NO: 29266 - protein, 6 aa, synthetic construct
PPECQE

SEQ ID NO: 29267 - protein, 6 aa, synthetic construct
PPECQF

SEQ ID NO: 29268 - protein, 6 aa, synthetic construct
PPECQW

SEQ ID NO: 29269 - protein, 6 aa, synthetic construct
PPECQY

SEQ ID NO: 29270 - protein, 6 aa, synthetic construct
PPECED

SEQ ID NO: 29271 - protein, 6 aa, synthetic construct
PPECEE

SEQ ID NO: 29272 - protein, 6 aa, synthetic construct
PPECEF

SEQ ID NO: 29273 - protein, 6 aa, synthetic construct
PPECEW

SEQ ID NO: 29274 - protein, 6 aa, synthetic construct
PPECEY

SEQ ID NO: 29275 - protein, 6 aa, synthetic construct
PPECGD

SEQ ID NO: 29276 - protein, 6 aa, synthetic construct
PPECGE

SEQ ID NO: 29277 - protein, 6 aa, synthetic construct
PPECGF

SEQ ID NO: 29278 - protein, 6 aa, synthetic construct
PPECGW

SEQ ID NO: 29279 - protein, 6 aa, synthetic construct
PPECGY

SEQ ID NO: 29280 - protein, 6 aa, synthetic construct
PPECHD

SEQ ID NO: 29281 - protein, 6 aa, synthetic construct
PPECHE

SEQ ID NO: 29282 - protein, 6 aa, synthetic construct
PPECHF

SEQ ID NO: 29283 - protein, 6 aa, synthetic construct
PPECHW

SEQ ID NO: 29284 - protein, 6 aa, synthetic construct
PPECHY

SEQ ID NO: 29285 - protein, 6 aa, synthetic construct
PPECID

SEQ ID NO: 29286 - protein, 6 aa, synthetic construct
PPECIE

SEQ ID NO: 29287 - protein, 6 aa, synthetic construct
PPECIF

SEQ ID NO: 29288 - protein, 6 aa, synthetic construct
PPECIW

SEQ ID NO: 29289 - protein, 6 aa, synthetic construct
PPECIY

SEQ ID NO: 29290 - protein, 6 aa, synthetic construct
PPECLD

SEQ ID NO: 29291 - protein, 6 aa, synthetic construct
PPECLE

SEQ ID NO: 29292 - protein, 6 aa, synthetic construct
PPECLF

SEQ ID NO: 29293 - protein, 6 aa, synthetic construct
PPECLW

SEQ ID NO: 29294 - protein, 6 aa, synthetic construct
PPECLY

SEQ ID NO: 29295 - protein, 6 aa, synthetic construct
PPECKD

SEQ ID NO: 29296 - protein, 6 aa, synthetic construct
PPECKE

SEQ ID NO: 29297 - protein, 6 aa, synthetic construct
PPECKF

SEQ ID NO: 29298 - protein, 6 aa, synthetic construct
PPECKW

SEQ ID NO: 29299 - protein, 6 aa, synthetic construct
PPECKY

SEQ ID NO: 29300 - protein, 6 aa, synthetic construct
PPECMD

SEQ ID NO: 29301 - protein, 6 aa, synthetic construct
PPECME

SEQ ID NO: 29302 - protein, 6 aa, synthetic construct
PPECMF

SEQ ID NO: 29303 - protein, 6 aa, synthetic construct
PPECMW

SEQ ID NO: 29304 - protein, 6 aa, synthetic construct
PPECMY

SEQ ID NO: 29305 - protein, 6 aa, synthetic construct
PPECFD

SEQ ID NO: 29306 - protein, 6 aa, synthetic construct
PPECFE

SEQ ID NO: 29307 - protein, 6 aa, synthetic construct
PPECFF

SEQ ID NO: 29308 - protein, 6 aa, synthetic construct
PPECFW

SEQ ID NO: 29309 - protein, 6 aa, synthetic construct
PPECFY

SEQ ID NO: 29310 - protein, 6 aa, synthetic construct
PPECPD

SEQ ID NO: 29311 - protein, 6 aa, synthetic construct
PPECPE

SEQ ID NO: 29312 - protein, 6 aa, synthetic construct
PPECPF

SEQ ID NO: 29313 - protein, 6 aa, synthetic construct
PPECPW

SEQ ID NO: 29314 - protein, 6 aa, synthetic construct
PPECPY

SEQ ID NO: 29315 - protein, 6 aa, synthetic construct
PPECSD

SEQ ID NO: 29316 - protein, 6 aa, synthetic construct
PPECSE

SEQ ID NO: 29317 - protein, 6 aa, synthetic construct
PPECSF

SEQ ID NO: 29318 - protein, 6 aa, synthetic construct
PPECSW

SEQ ID NO: 29319 - protein, 6 aa, synthetic construct
PPECSY

SEQ ID NO: 29320 - protein, 6 aa, synthetic construct
PPECTD

SEQ ID NO: 29321 - protein, 6 aa, synthetic construct
PPECTE

SEQ ID NO: 29322 - protein, 6 aa, synthetic construct
PPECTF

SEQ ID NO: 29323 - protein, 6 aa, synthetic construct
PPECTW

SEQ ID NO: 29324 - protein, 6 aa, synthetic construct
PPECTY

SEQ ID NO: 29325 - protein, 6 aa, synthetic construct
PPECWD

SEQ ID NO: 29326 - protein, 6 aa, synthetic construct
PPECWE

SEQ ID NO: 29327 - protein, 6 aa, synthetic construct
PPECWF

SEQ ID NO: 29328 - protein, 6 aa, synthetic construct
PPECWW

SEQ ID NO: 29329 - protein, 6 aa, synthetic construct
PPECWY

SEQ ID NO: 29330 - protein, 6 aa, synthetic construct
PPECYD

SEQ ID NO: 29331 - protein, 6 aa, synthetic construct
PPECYE

SEQ ID NO: 29332 - protein, 6 aa, synthetic construct
PPECYF

SEQ ID NO: 29333 - protein, 6 aa, synthetic construct
PPECYW

SEQ ID NO: 29334 - protein, 6 aa, synthetic construct
PPECYY

SEQ ID NO: 29335 - protein, 6 aa, synthetic construct
PPECVD

SEQ ID NO: 29336 - protein, 6 aa, synthetic construct
PPECVE

SEQ ID NO: 29337 - protein, 6 aa, synthetic construct
PPECVF

SEQ ID NO: 29338 - protein, 6 aa, synthetic construct
PPECVW

SEQ ID NO: 29339 - protein, 6 aa, synthetic construct
PPECVY

SEQ ID NO: 29340 - protein, 6 aa, synthetic construct
PPEQAD

SEQ ID NO: 29341 - protein, 6 aa, synthetic construct
PPEQAE

SEQ ID NO: 29342 - protein, 6 aa, synthetic construct
PPEQAF

SEQ ID NO: 29343 - protein, 6 aa, synthetic construct
PPEQAW

SEQ ID NO: 29344 - protein, 6 aa, synthetic construct
PPEQAY

SEQ ID NO: 29345 - protein, 6 aa, synthetic construct
PPEQRD

SEQ ID NO: 29346 - protein, 6 aa, synthetic construct
PPEQRE

SEQ ID NO: 29347 - protein, 6 aa, synthetic construct
PPEQRF

SEQ ID NO: 29348 - protein, 6 aa, synthetic construct
PPEQRW

SEQ ID NO: 29349 - protein, 6 aa, synthetic construct
PPEQRY

SEQ ID NO: 29350 - protein, 6 aa, synthetic construct
PPEQND

SEQ ID NO: 29351 - protein, 6 aa, synthetic construct
PPEQNE

SEQ ID NO: 29352 - protein, 6 aa, synthetic construct
PPEQNF

SEQ ID NO: 29353 - protein, 6 aa, synthetic construct
PPEQNW

SEQ ID NO: 29354 - protein, 6 aa, synthetic construct
PPEQNY

SEQ ID NO: 29355 - protein, 6 aa, synthetic construct
PPEQDD

SEQ ID NO: 29356 - protein, 6 aa, synthetic construct
PPEQDE

SEQ ID NO: 29357 - protein, 6 aa, synthetic construct
PPEQDF

SEQ ID NO: 29358 - protein, 6 aa, synthetic construct
PPEQDW

SEQ ID NO: 29359 - protein, 6 aa, synthetic construct
PPEQDY

SEQ ID NO: 29360 - protein, 6 aa, synthetic construct
PPEQCD

SEQ ID NO: 29361 - protein, 6 aa, synthetic construct
PPEQCE

SEQ ID NO: 29362 - protein, 6 aa, synthetic construct
PPEQCF

SEQ ID NO: 29363 - protein, 6 aa, synthetic construct
PPEQCW

SEQ ID NO: 29364 - protein, 6 aa, synthetic construct
PPEQCY

SEQ ID NO: 29365 - protein, 6 aa, synthetic construct
PPEQQD

SEQ ID NO: 29366 - protein, 6 aa, synthetic construct
PPEQQE

SEQ ID NO: 29367 - protein, 6 aa, synthetic construct
PPEQQF

SEQ ID NO: 29368 - protein, 6 aa, synthetic construct
PPEQQW

SEQ ID NO: 29369 - protein, 6 aa, synthetic construct
PPEQQY

SEQ ID NO: 29370 - protein, 6 aa, synthetic construct
PPEQED

SEQ ID NO: 29371 - protein, 6 aa, synthetic construct
PPEQEE

SEQ ID NO: 29372 - protein, 6 aa, synthetic construct
PPEQEF

SEQ ID NO: 29373 - protein, 6 aa, synthetic construct
PPEQEW

SEQ ID NO: 29374 - protein, 6 aa, synthetic construct
PPEQEY

SEQ ID NO: 29375 - protein, 6 aa, synthetic construct
PPEQGD

SEQ ID NO: 29376 - protein, 6 aa, synthetic construct
PPEQGE

SEQ ID NO: 29377 - protein, 6 aa, synthetic construct
PPEQGF

SEQ ID NO: 29378 - protein, 6 aa, synthetic construct
PPEQGW

SEQ ID NO: 29379 - protein, 6 aa, synthetic construct
PPEQGY

SEQ ID NO: 29380 - protein, 6 aa, synthetic construct
PPEQHD

SEQ ID NO: 29381 - protein, 6 aa, synthetic construct
PPEQHE

SEQ ID NO: 29382 - protein, 6 aa, synthetic construct
PPEQHF

SEQ ID NO: 29383 - protein, 6 aa, synthetic construct
PPEQHW

SEQ ID NO: 29384 - protein, 6 aa, synthetic construct
PPEQHY

SEQ ID NO: 29385 - protein, 6 aa, synthetic construct
PPEQID

SEQ ID NO: 29386 - protein, 6 aa, synthetic construct
PPEQIE

SEQ ID NO: 29387 - protein, 6 aa, synthetic construct
PPEQIF

SEQ ID NO: 29388 - protein, 6 aa, synthetic construct
PPEQIW

SEQ ID NO: 29389 - protein, 6 aa, synthetic construct
PPEQIY

SEQ ID NO: 29390 - protein, 6 aa, synthetic construct
PPEQLD

SEQ ID NO: 29391 - protein, 6 aa, synthetic construct
PPEQLE

SEQ ID NO: 29392 - protein, 6 aa, synthetic construct
PPEQLF

SEQ ID NO: 29393 - protein, 6 aa, synthetic construct
PPEQLW

SEQ ID NO: 29394 - protein, 6 aa, synthetic construct
PPEQLY

SEQ ID NO: 29395 - protein, 6 aa, synthetic construct
PPEQKD

SEQ ID NO: 29396 - protein, 6 aa, synthetic construct
PPEQKE

SEQ ID NO: 29397 - protein, 6 aa, synthetic construct
PPEQKF

SEQ ID NO: 29398 - protein, 6 aa, synthetic construct
PPEQKW

SEQ ID NO: 29399 - protein, 6 aa, synthetic construct
PPEQKY

SEQ ID NO: 29400 - protein, 6 aa, synthetic construct
PPEQMD

SEQ ID NO: 29401 - protein, 6 aa, synthetic construct
PPEQME

SEQ ID NO: 29402 - protein, 6 aa, synthetic construct
PPEQMF

SEQ ID NO: 29403 - protein, 6 aa, synthetic construct
PPEQMW

SEQ ID NO: 29404 - protein, 6 aa, synthetic construct
PPEQMY

SEQ ID NO: 29405 - protein, 6 aa, synthetic construct
PPEQFD

SEQ ID NO: 29406 - protein, 6 aa, synthetic construct
PPEQFE

SEQ ID NO: 29407 - protein, 6 aa, synthetic construct
PPEQFF

SEQ ID NO: 29408 - protein, 6 aa, synthetic construct
PPEQFW

SEQ ID NO: 29409 - protein, 6 aa, synthetic construct
PPEQFY

SEQ ID NO: 29410 - protein, 6 aa, synthetic construct
PPEQPD

SEQ ID NO: 29411 - protein, 6 aa, synthetic construct
PPEQPE

SEQ ID NO: 29412 - protein, 6 aa, synthetic construct
PPEQPF

SEQ ID NO: 29413 - protein, 6 aa, synthetic construct
PPEQPW

SEQ ID NO: 29414 - protein, 6 aa, synthetic construct
PPEQPY

SEQ ID NO: 29415 - protein, 6 aa, synthetic construct
PPEQSD

SEQ ID NO: 29416 - protein, 6 aa, synthetic construct
PPEQSE

SEQ ID NO: 29417 - protein, 6 aa, synthetic construct
PPEQSF

SEQ ID NO: 29418 - protein, 6 aa, synthetic construct
PPEQSW

SEQ ID NO: 29419 - protein, 6 aa, synthetic construct
PPEQSY

SEQ ID NO: 29420 - protein, 6 aa, synthetic construct
PPEQTD

SEQ ID NO: 29421 - protein, 6 aa, synthetic construct
PPEQTE

SEQ ID NO: 29422 - protein, 6 aa, synthetic construct
PPEQTF

SEQ ID NO: 29423 - protein, 6 aa, synthetic construct
PPEQTW

SEQ ID NO: 29424 - protein, 6 aa, synthetic construct
PPEQTY

SEQ ID NO: 29425 - protein, 6 aa, synthetic construct
PPEQWD

SEQ ID NO: 29426 - protein, 6 aa, synthetic construct
PPEQWE

SEQ ID NO: 29427 - protein, 6 aa, synthetic construct
PPEQWF

SEQ ID NO: 29428 - protein, 6 aa, synthetic construct
PPEQWW

SEQ ID NO: 29429 - protein, 6 aa, synthetic construct
PPEQWY

SEQ ID NO: 29430 - protein, 6 aa, synthetic construct
PPEQYD

SEQ ID NO: 29431 - protein, 6 aa, synthetic construct
PPEQYE

SEQ ID NO: 29432 - protein, 6 aa, synthetic construct
PPEQYF

SEQ ID NO: 29433 - protein, 6 aa, synthetic construct
PPEQYW

SEQ ID NO: 29434 - protein, 6 aa, synthetic construct
PPEQYY

SEQ ID NO: 29435 - protein, 6 aa, synthetic construct
PPEQVD

SEQ ID NO: 29436 - protein, 6 aa, synthetic construct
PPEQVE

SEQ ID NO: 29437 - protein, 6 aa, synthetic construct
PPEQVF

SEQ ID NO: 29438 - protein, 6 aa, synthetic construct
PPEQVW

SEQ ID NO: 29439 - protein, 6 aa, synthetic construct
PPEQVY

SEQ ID NO: 29440 - protein, 6 aa, synthetic construct
PPEEAD

SEQ ID NO: 29441 - protein, 6 aa, synthetic construct
PPEEAE

SEQ ID NO: 29442 - protein, 6 aa, synthetic construct
PPEEAF

SEQ ID NO: 29443 - protein, 6 aa, synthetic construct
PPEEAW

SEQ ID NO: 29444 - protein, 6 aa, synthetic construct
PPEEAY

SEQ ID NO: 29445 - protein, 6 aa, synthetic construct
PPEERD

SEQ ID NO: 29446 - protein, 6 aa, synthetic construct
PPEERE

SEQ ID NO: 29447 - protein, 6 aa, synthetic construct
PPEERF

SEQ ID NO: 29448 - protein, 6 aa, synthetic construct
PPEERW

SEQ ID NO: 29449 - protein, 6 aa, synthetic construct
PPEERY

SEQ ID NO: 29450 - protein, 6 aa, synthetic construct
PPEEND

SEQ ID NO: 29451 - protein, 6 aa, synthetic construct
PPEENE

SEQ ID NO: 29452 - protein, 6 aa, synthetic construct
PPEENF

SEQ ID NO: 29453 - protein, 6 aa, synthetic construct
PPEENW

SEQ ID NO: 29454 - protein, 6 aa, synthetic construct
PPEENY

SEQ ID NO: 29455 - protein, 6 aa, synthetic construct
PPEEDD

SEQ ID NO: 29456 - protein, 6 aa, synthetic construct
PPEEDE

SEQ ID NO: 29457 - protein, 6 aa, synthetic construct
PPEEDF

SEQ ID NO: 29458 - protein, 6 aa, synthetic construct
PPEEDW

SEQ ID NO: 29459 - protein, 6 aa, synthetic construct
PPEEDY

SEQ ID NO: 29460 - protein, 6 aa, synthetic construct
PPEECD

SEQ ID NO: 29461 - protein, 6 aa, synthetic construct
PPEECE

SEQ ID NO: 29462 - protein, 6 aa, synthetic construct
PPEECF

SEQ ID NO: 29463 - protein, 6 aa, synthetic construct
PPEECW

SEQ ID NO: 29464 - protein, 6 aa, synthetic construct
PPEECY

SEQ ID NO: 29465 - protein, 6 aa, synthetic construct
PPEEQD

SEQ ID NO: 29466 - protein, 6 aa, synthetic construct
PPEEQE

SEQ ID NO: 29467 - protein, 6 aa, synthetic construct
PPEEQF

SEQ ID NO: 29468 - protein, 6 aa, synthetic construct
PPEEQW

SEQ ID NO: 29469 - protein, 6 aa, synthetic construct
PPEEQY

SEQ ID NO: 29470 - protein, 6 aa, synthetic construct
PPEEED

SEQ ID NO: 29471 - protein, 6 aa, synthetic construct
PPEEEE

SEQ ID NO: 29472 - protein, 6 aa, synthetic construct
PPEEEF

SEQ ID NO: 29473 - protein, 6 aa, synthetic construct
PPEEEW

SEQ ID NO: 29474 - protein, 6 aa, synthetic construct
PPEEEY

SEQ ID NO: 29475 - protein, 6 aa, synthetic construct
PPEEGD

SEQ ID NO: 29476 - protein, 6 aa, synthetic construct
PPEEGE

SEQ ID NO: 29477 - protein, 6 aa, synthetic construct
PPEEGF

SEQ ID NO: 29478 - protein, 6 aa, synthetic construct
PPEEGW

SEQ ID NO: 29479 - protein, 6 aa, synthetic construct
PPEEGY

SEQ ID NO: 29480 - protein, 6 aa, synthetic construct
PPEEHD

SEQ ID NO: 29481 - protein, 6 aa, synthetic construct
PPEEHE

SEQ ID NO: 29482 - protein, 6 aa, synthetic construct
PPEEHF

SEQ ID NO: 29483 - protein, 6 aa, synthetic construct
PPEEHW

SEQ ID NO: 29484 - protein, 6 aa, synthetic construct
PPEEHY

SEQ ID NO: 29485 - protein, 6 aa, synthetic construct
PPEEID

SEQ ID NO: 29486 - protein, 6 aa, synthetic construct
PPEEIE

SEQ ID NO: 29487 - protein, 6 aa, synthetic construct
PPEEIF

SEQ ID NO: 29488 - protein, 6 aa, synthetic construct
PPEEIW

SEQ ID NO: 29489 - protein, 6 aa, synthetic construct
PPEEIY

SEQ ID NO: 29490 - protein, 6 aa, synthetic construct
PPEELD

SEQ ID NO: 29491 - protein, 6 aa, synthetic construct
PPEELE

SEQ ID NO: 29492 - protein, 6 aa, synthetic construct
PPEELF

SEQ ID NO: 29493 - protein, 6 aa, synthetic construct
PPEELW

SEQ ID NO: 29494 - protein, 6 aa, synthetic construct
PPEELY

SEQ ID NO: 29495 - protein, 6 aa, synthetic construct
PPEEKD

SEQ ID NO: 29496 - protein, 6 aa, synthetic construct
PPEEKE

SEQ ID NO: 29497 - protein, 6 aa, synthetic construct
PPEEKF

SEQ ID NO: 29498 - protein, 6 aa, synthetic construct
PPEEKW

SEQ ID NO: 29499 - protein, 6 aa, synthetic construct
PPEEKY

SEQ ID NO: 29500 - protein, 6 aa, synthetic construct
PPEEMD

SEQ ID NO: 29501 - protein, 6 aa, synthetic construct
PPEEME

SEQ ID NO: 29502 - protein, 6 aa, synthetic construct
PPEEMF

SEQ ID NO: 29503 - protein, 6 aa, synthetic construct
PPEEMW

SEQ ID NO: 29504 - protein, 6 aa, synthetic construct
PPEEMY

SEQ ID NO: 29505 - protein, 6 aa, synthetic construct
PPEEFD

SEQ ID NO: 29506 - protein, 6 aa, synthetic construct
PPEEFE

SEQ ID NO: 29507 - protein, 6 aa, synthetic construct
PPEEFF

SEQ ID NO: 29508 - protein, 6 aa, synthetic construct
PPEEFW

SEQ ID NO: 29509 - protein, 6 aa, synthetic construct
PPEEFY

SEQ ID NO: 29510 - protein, 6 aa, synthetic construct
PPEEPD

SEQ ID NO: 29511 - protein, 6 aa, synthetic construct
PPEEPE

SEQ ID NO: 29512 - protein, 6 aa, synthetic construct
PPEEPF

SEQ ID NO: 29513 - protein, 6 aa, synthetic construct
PPEEPW

SEQ ID NO: 29514 - protein, 6 aa, synthetic construct
PPEEPY

SEQ ID NO: 29515 - protein, 6 aa, synthetic construct
PPEESD

SEQ ID NO: 29516 - protein, 6 aa, synthetic construct
PPEESE

SEQ ID NO: 29517 - protein, 6 aa, synthetic construct
PPEESF

SEQ ID NO: 29518 - protein, 6 aa, synthetic construct
PPEESW

SEQ ID NO: 29519 - protein, 6 aa, synthetic construct
PPEESY

SEQ ID NO: 29520 - protein, 6 aa, synthetic construct
PPEETD

SEQ ID NO: 29521 - protein, 6 aa, synthetic construct
PPEETE

SEQ ID NO: 29522 - protein, 6 aa, synthetic construct
PPEETF

SEQ ID NO: 29523 - protein, 6 aa, synthetic construct
PPEETW

SEQ ID NO: 29524 - protein, 6 aa, synthetic construct
PPEETY

SEQ ID NO: 29525 - protein, 6 aa, synthetic construct
PPEEWD

SEQ ID NO: 29526 - protein, 6 aa, synthetic construct
PPEEWE

SEQ ID NO: 29527 - protein, 6 aa, synthetic construct
PPEEWF

SEQ ID NO: 29528 - protein, 6 aa, synthetic construct
PPEEWW

SEQ ID NO: 29529 - protein, 6 aa, synthetic construct
PPEEWY

SEQ ID NO: 29530 - protein, 6 aa, synthetic construct
PPEEYD

SEQ ID NO: 29531 - protein, 6 aa, synthetic construct
PPEEYE

SEQ ID NO: 29532 - protein, 6 aa, synthetic construct
PPEEYF

SEQ ID NO: 29533 - protein, 6 aa, synthetic construct
PPEEYW

SEQ ID NO: 29534 - protein, 6 aa, synthetic construct
PPEEYY

SEQ ID NO: 29535 - protein, 6 aa, synthetic construct
PPEEVD

SEQ ID NO: 29536 - protein, 6 aa, synthetic construct
PPEEVE

SEQ ID NO: 29537 - protein, 6 aa, synthetic construct
PPEEVF

SEQ ID NO: 29538 - protein, 6 aa, synthetic construct
PPEEVW

SEQ ID NO: 29539 - protein, 6 aa, synthetic construct
PPEEVY

SEQ ID NO: 29540 - protein, 6 aa, synthetic construct
PPEGAD

SEQ ID NO: 29541 - protein, 6 aa, synthetic construct
PPEGAE

SEQ ID NO: 29542 - protein, 6 aa, synthetic construct
PPEGAF

SEQ ID NO: 29543 - protein, 6 aa, synthetic construct
PPEGAW

SEQ ID NO: 29544 - protein, 6 aa, synthetic construct
PPEGAY

SEQ ID NO: 29545 - protein, 6 aa, synthetic construct
PPEGRD

SEQ ID NO: 29546 - protein, 6 aa, synthetic construct
PPEGRE

SEQ ID NO: 29547 - protein, 6 aa, synthetic construct
PPEGRF

SEQ ID NO: 29548 - protein, 6 aa, synthetic construct
PPEGRW

SEQ ID NO: 29549 - protein, 6 aa, synthetic construct
PPEGRY

SEQ ID NO: 29550 - protein, 6 aa, synthetic construct
PPEGND

SEQ ID NO: 29551 - protein, 6 aa, synthetic construct
PPEGNE

SEQ ID NO: 29552 - protein, 6 aa, synthetic construct
PPEGNF

SEQ ID NO: 29553 - protein, 6 aa, synthetic construct
PPEGNW

SEQ ID NO: 29554 - protein, 6 aa, synthetic construct
PPEGNY

SEQ ID NO: 29555 - protein, 6 aa, synthetic construct
PPEGDD

SEQ ID NO: 29556 - protein, 6 aa, synthetic construct
PPEGDE

SEQ ID NO: 29557 - protein, 6 aa, synthetic construct
PPEGDF

SEQ ID NO: 29558 - protein, 6 aa, synthetic construct
PPEGDW

SEQ ID NO: 29559 - protein, 6 aa, synthetic construct
PPEGDY

SEQ ID NO: 29560 - protein, 6 aa, synthetic construct
PPEGCD

SEQ ID NO: 29561 - protein, 6 aa, synthetic construct
PPEGCE

SEQ ID NO: 29562 - protein, 6 aa, synthetic construct
PPEGCF

SEQ ID NO: 29563 - protein, 6 aa, synthetic construct
PPEGCW

SEQ ID NO: 29564 - protein, 6 aa, synthetic construct
PPEGCY

SEQ ID NO: 29565 - protein, 6 aa, synthetic construct
PPEGQD

SEQ ID NO: 29566 - protein, 6 aa, synthetic construct
PPEGQE

SEQ ID NO: 29567 - protein, 6 aa, synthetic construct
PPEGQF

SEQ ID NO: 29568 - protein, 6 aa, synthetic construct
PPEGQW

SEQ ID NO: 29569 - protein, 6 aa, synthetic construct
PPEGQY

SEQ ID NO: 29570 - protein, 6 aa, synthetic construct
PPEGED

SEQ ID NO: 29571 - protein, 6 aa, synthetic construct
PPEGEE

SEQ ID NO: 29572 - protein, 6 aa, synthetic construct
PPEGEF

SEQ ID NO: 29573 - protein, 6 aa, synthetic construct
PPEGEW

SEQ ID NO: 29574 - protein, 6 aa, synthetic construct
PPEGEY

SEQ ID NO: 29575 - protein, 6 aa, synthetic construct
PPEGGD

SEQ ID NO: 29576 - protein, 6 aa, synthetic construct
PPEGGE

SEQ ID NO: 29577 - protein, 6 aa, synthetic construct
PPEGGF

SEQ ID NO: 29578 - protein, 6 aa, synthetic construct
PPEGGW

SEQ ID NO: 29579 - protein, 6 aa, synthetic construct
PPEGGY

SEQ ID NO: 29580 - protein, 6 aa, synthetic construct
PPEGHD

SEQ ID NO: 29581 - protein, 6 aa, synthetic construct
PPEGHE

SEQ ID NO: 29582 - protein, 6 aa, synthetic construct
PPEGHF

SEQ ID NO: 29583 - protein, 6 aa, synthetic construct
PPEGHW

SEQ ID NO: 29584 - protein, 6 aa, synthetic construct
PPEGHY

SEQ ID NO: 29585 - protein, 6 aa, synthetic construct
PPEGID

SEQ ID NO: 29586 - protein, 6 aa, synthetic construct
PPEGIE

SEQ ID NO: 29587 - protein, 6 aa, synthetic construct
PPEGIF

SEQ ID NO: 29588 - protein, 6 aa, synthetic construct
PPEGIW

SEQ ID NO: 29589 - protein, 6 aa, synthetic construct
PPEGIY

SEQ ID NO: 29590 - protein, 6 aa, synthetic construct
PPEGLD

SEQ ID NO: 29591 - protein, 6 aa, synthetic construct
PPEGLE

SEQ ID NO: 29592 - protein, 6 aa, synthetic construct
PPEGLF

SEQ ID NO: 29593 - protein, 6 aa, synthetic construct
PPEGLW

SEQ ID NO: 29594 - protein, 6 aa, synthetic construct
PPEGLY

SEQ ID NO: 29595 - protein, 6 aa, synthetic construct
PPEGKD

SEQ ID NO: 29596 - protein, 6 aa, synthetic construct
PPEGKE

SEQ ID NO: 29597 - protein, 6 aa, synthetic construct
PPEGKF

SEQ ID NO: 29598 - protein, 6 aa, synthetic construct
PPEGKW

SEQ ID NO: 29599 - protein, 6 aa, synthetic construct
PPEGKY

SEQ ID NO: 29600 - protein, 6 aa, synthetic construct
PPEGMD

SEQ ID NO: 29601 - protein, 6 aa, synthetic construct
PPEGME

SEQ ID NO: 29602 - protein, 6 aa, synthetic construct
PPEGMF

SEQ ID NO: 29603 - protein, 6 aa, synthetic construct
PPEGMW

SEQ ID NO: 29604 - protein, 6 aa, synthetic construct
PPEGMY

SEQ ID NO: 29605 - protein, 6 aa, synthetic construct
PPEGFD

SEQ ID NO: 29606 - protein, 6 aa, synthetic construct
PPEGFE

SEQ ID NO: 29607 - protein, 6 aa, synthetic construct
PPEGFF

SEQ ID NO: 29608 - protein, 6 aa, synthetic construct
PPEGFW

SEQ ID NO: 29609 - protein, 6 aa, synthetic construct
PPEGFY

SEQ ID NO: 29610 - protein, 6 aa, synthetic construct
PPEGPD

SEQ ID NO: 29611 - protein, 6 aa, synthetic construct
PPEGPE

SEQ ID NO: 29612 - protein, 6 aa, synthetic construct
PPEGPF

SEQ ID NO: 29613 - protein, 6 aa, synthetic construct
PPEGPW

SEQ ID NO: 29614 - protein, 6 aa, synthetic construct
PPEGPY

SEQ ID NO: 29615 - protein, 6 aa, synthetic construct
PPEGSD

SEQ ID NO: 29616 - protein, 6 aa, synthetic construct
PPEGSE

SEQ ID NO: 29617 - protein, 6 aa, synthetic construct
PPEGSF

SEQ ID NO: 29618 - protein, 6 aa, synthetic construct
PPEGSW

SEQ ID NO: 29619 - protein, 6 aa, synthetic construct
PPEGSY

SEQ ID NO: 29620 - protein, 6 aa, synthetic construct
PPEGTD

SEQ ID NO: 29621 - protein, 6 aa, synthetic construct
PPEGTE

SEQ ID NO: 29622 - protein, 6 aa, synthetic construct
PPEGTF

SEQ ID NO: 29623 - protein, 6 aa, synthetic construct
PPEGTW

SEQ ID NO: 29624 - protein, 6 aa, synthetic construct
PPEGTY

SEQ ID NO: 29625 - protein, 6 aa, synthetic construct
PPEGWD

SEQ ID NO: 29626 - protein, 6 aa, synthetic construct
PPEGWE

SEQ ID NO: 29627 - protein, 6 aa, synthetic construct
PPEGWF

SEQ ID NO: 29628 - protein, 6 aa, synthetic construct
PPEGWW

SEQ ID NO: 29629 - protein, 6 aa, synthetic construct
PPEGWY

SEQ ID NO: 29630 - protein, 6 aa, synthetic construct
PPEGYD

SEQ ID NO: 29631 - protein, 6 aa, synthetic construct
PPEGYE

SEQ ID NO: 29632 - protein, 6 aa, synthetic construct
PPEGYF

SEQ ID NO: 29633 - protein, 6 aa, synthetic construct
PPEGYW

SEQ ID NO: 29634 - protein, 6 aa, synthetic construct
PPEGYY

SEQ ID NO: 29635 - protein, 6 aa, synthetic construct
PPEGVD

SEQ ID NO: 29636 - protein, 6 aa, synthetic construct
PPEGVE

SEQ ID NO: 29637 - protein, 6 aa, synthetic construct
PPEGVF

SEQ ID NO: 29638 - protein, 6 aa, synthetic construct
PPEGVW

SEQ ID NO: 29639 - protein, 6 aa, synthetic construct
PPEGVY

SEQ ID NO: 29640 - protein, 6 aa, synthetic construct
PPEHAD

SEQ ID NO: 29641 - protein, 6 aa, synthetic construct
PPEHAE

SEQ ID NO: 29642 - protein, 6 aa, synthetic construct
PPEHAF

SEQ ID NO: 29643 - protein, 6 aa, synthetic construct
PPEHAW

SEQ ID NO: 29644 - protein, 6 aa, synthetic construct
PPEHAY

SEQ ID NO: 29645 - protein, 6 aa, synthetic construct
PPEHRD

SEQ ID NO: 29646 - protein, 6 aa, synthetic construct
PPEHRE

SEQ ID NO: 29647 - protein, 6 aa, synthetic construct
PPEHRF

SEQ ID NO: 29648 - protein, 6 aa, synthetic construct
PPEHRW

SEQ ID NO: 29649 - protein, 6 aa, synthetic construct
PPEHRY

SEQ ID NO: 29650 - protein, 6 aa, synthetic construct
PPEHND

SEQ ID NO: 29651 - protein, 6 aa, synthetic construct
PPEHNE

SEQ ID NO: 29652 - protein, 6 aa, synthetic construct
PPEHNF

SEQ ID NO: 29653 - protein, 6 aa, synthetic construct
PPEHNW

SEQ ID NO: 29654 - protein, 6 aa, synthetic construct
PPEHNY

SEQ ID NO: 29655 - protein, 6 aa, synthetic construct
PPEHDD

SEQ ID NO: 29656 - protein, 6 aa, synthetic construct
PPEHDE

SEQ ID NO: 29657 - protein, 6 aa, synthetic construct
PPEHDF

SEQ ID NO: 29658 - protein, 6 aa, synthetic construct
PPEHDW

SEQ ID NO: 29659 - protein, 6 aa, synthetic construct
PPEHDY

SEQ ID NO: 29660 - protein, 6 aa, synthetic construct
PPEHCD

SEQ ID NO: 29661 - protein, 6 aa, synthetic construct
PPEHCE

SEQ ID NO: 29662 - protein, 6 aa, synthetic construct
PPEHCF

SEQ ID NO: 29663 - protein, 6 aa, synthetic construct
PPEHCW

SEQ ID NO: 29664 - protein, 6 aa, synthetic construct
PPEHCY

SEQ ID NO: 29665 - protein, 6 aa, synthetic construct
PPEHQD

SEQ ID NO: 29666 - protein, 6 aa, synthetic construct
PPEHQE

SEQ ID NO: 29667 - protein, 6 aa, synthetic construct
PPEHQF

SEQ ID NO: 29668 - protein, 6 aa, synthetic construct
PPEHQW

SEQ ID NO: 29669 - protein, 6 aa, synthetic construct
PPEHQY

SEQ ID NO: 29670 - protein, 6 aa, synthetic construct
PPEHED

SEQ ID NO: 29671 - protein, 6 aa, synthetic construct
PPEHEE

SEQ ID NO: 29672 - protein, 6 aa, synthetic construct
PPEHEF

SEQ ID NO: 29673 - protein, 6 aa, synthetic construct
PPEHEW

SEQ ID NO: 29674 - protein, 6 aa, synthetic construct
PPEHEY

SEQ ID NO: 29675 - protein, 6 aa, synthetic construct
PPEHGD

SEQ ID NO: 29676 - protein, 6 aa, synthetic construct
PPEHGE

SEQ ID NO: 29677 - protein, 6 aa, synthetic construct
PPEHGF

SEQ ID NO: 29678 - protein, 6 aa, synthetic construct
PPEHGW

SEQ ID NO: 29679 - protein, 6 aa, synthetic construct
PPEHGY

SEQ ID NO: 29680 - protein, 6 aa, synthetic construct
PPEHHD

SEQ ID NO: 29681 - protein, 6 aa, synthetic construct
PPEHHE

SEQ ID NO: 29682 - protein, 6 aa, synthetic construct
PPEHHF

SEQ ID NO: 29683 - protein, 6 aa, synthetic construct
PPEHHW

SEQ ID NO: 29684 - protein, 6 aa, synthetic construct
PPEHHY

SEQ ID NO: 29685 - protein, 6 aa, synthetic construct
PPEHID

SEQ ID NO: 29686 - protein, 6 aa, synthetic construct
PPEHIE

SEQ ID NO: 29687 - protein, 6 aa, synthetic construct
PPEHIF

SEQ ID NO: 29688 - protein, 6 aa, synthetic construct
PPEHIW

SEQ ID NO: 29689 - protein, 6 aa, synthetic construct
PPEHIY

SEQ ID NO: 29690 - protein, 6 aa, synthetic construct
PPEHLD

SEQ ID NO: 29691 - protein, 6 aa, synthetic construct
PPEHLE

SEQ ID NO: 29692 - protein, 6 aa, synthetic construct
PPEHLF

SEQ ID NO: 29693 - protein, 6 aa, synthetic construct
PPEHLW

SEQ ID NO: 29694 - protein, 6 aa, synthetic construct
PPEHLY

SEQ ID NO: 29695 - protein, 6 aa, synthetic construct
PPEHKD

SEQ ID NO: 29696 - protein, 6 aa, synthetic construct
PPEHKE

SEQ ID NO: 29697 - protein, 6 aa, synthetic construct
PPEHKF

SEQ ID NO: 29698 - protein, 6 aa, synthetic construct
PPEHKW

SEQ ID NO: 29699 - protein, 6 aa, synthetic construct
PPEHKY

SEQ ID NO: 29700 - protein, 6 aa, synthetic construct
PPEHMD

SEQ ID NO: 29701 - protein, 6 aa, synthetic construct
PPEHME

SEQ ID NO: 29702 - protein, 6 aa, synthetic construct
PPEHMF

SEQ ID NO: 29703 - protein, 6 aa, synthetic construct
PPEHMW

SEQ ID NO: 29704 - protein, 6 aa, synthetic construct
PPEHMY

SEQ ID NO: 29705 - protein, 6 aa, synthetic construct
PPEHFD

SEQ ID NO: 29706 - protein, 6 aa, synthetic construct
PPEHFE

SEQ ID NO: 29707 - protein, 6 aa, synthetic construct
PPEHFF

SEQ ID NO: 29708 - protein, 6 aa, synthetic construct
PPEHFW

SEQ ID NO: 29709 - protein, 6 aa, synthetic construct
PPEHFY

SEQ ID NO: 29710 - protein, 6 aa, synthetic construct
PPEHPD

SEQ ID NO: 29711 - protein, 6 aa, synthetic construct
PPEHPE

SEQ ID NO: 29712 - protein, 6 aa, synthetic construct
PPEHPF

SEQ ID NO: 29713 - protein, 6 aa, synthetic construct
PPEHPW

SEQ ID NO: 29714 - protein, 6 aa, synthetic construct
PPEHPY

SEQ ID NO: 29715 - protein, 6 aa, synthetic construct
PPEHSD

SEQ ID NO: 29716 - protein, 6 aa, synthetic construct
PPEHSE

SEQ ID NO: 29717 - protein, 6 aa, synthetic construct
PPEHSF

SEQ ID NO: 29718 - protein, 6 aa, synthetic construct
PPEHSW

SEQ ID NO: 29719 - protein, 6 aa, synthetic construct
PPEHSY

SEQ ID NO: 29720 - protein, 6 aa, synthetic construct
PPEHTD

SEQ ID NO: 29721 - protein, 6 aa, synthetic construct
PPEHTE

SEQ ID NO: 29722 - protein, 6 aa, synthetic construct
PPEHTF

SEQ ID NO: 29723 - protein, 6 aa, synthetic construct
PPEHTW

SEQ ID NO: 29724 - protein, 6 aa, synthetic construct
PPEHTY

SEQ ID NO: 29725 - protein, 6 aa, synthetic construct
PPEHWD

SEQ ID NO: 29726 - protein, 6 aa, synthetic construct
PPEHWE

SEQ ID NO: 29727 - protein, 6 aa, synthetic construct
PPEHWF

SEQ ID NO: 29728 - protein, 6 aa, synthetic construct
PPEHWW

SEQ ID NO: 29729 - protein, 6 aa, synthetic construct
PPEHWY

SEQ ID NO: 29730 - protein, 6 aa, synthetic construct
PPEHYD

SEQ ID NO: 29731 - protein, 6 aa, synthetic construct
PPEHYE

SEQ ID NO: 29732 - protein, 6 aa, synthetic construct
PPEHYF

SEQ ID NO: 29733 - protein, 6 aa, synthetic construct
PPEHYW

SEQ ID NO: 29734 - protein, 6 aa, synthetic construct
PPEHYY

SEQ ID NO: 29735 - protein, 6 aa, synthetic construct
PPEHVD

SEQ ID NO: 29736 - protein, 6 aa, synthetic construct
PPEHVE

SEQ ID NO: 29737 - protein, 6 aa, synthetic construct
PPEHVF

SEQ ID NO: 29738 - protein, 6 aa, synthetic construct
PPEHVW

SEQ ID NO: 29739 - protein, 6 aa, synthetic construct
PPEHVY

SEQ ID NO: 29740 - protein, 6 aa, synthetic construct
PPEIAD

SEQ ID NO: 29741 - protein, 6 aa, synthetic construct
PPEIAE

SEQ ID NO: 29742 - protein, 6 aa, synthetic construct
PPEIAF

SEQ ID NO: 29743 - protein, 6 aa, synthetic construct
PPEIAW

SEQ ID NO: 29744 - protein, 6 aa, synthetic construct
PPEIAY

SEQ ID NO: 29745 - protein, 6 aa, synthetic construct
PPEIRD

SEQ ID NO: 29746 - protein, 6 aa, synthetic construct
PPEIRE

SEQ ID NO: 29747 - protein, 6 aa, synthetic construct
PPEIRF

SEQ ID NO: 29748 - protein, 6 aa, synthetic construct
PPEIRW

SEQ ID NO: 29749 - protein, 6 aa, synthetic construct
PPEIRY

SEQ ID NO: 29750 - protein, 6 aa, synthetic construct
PPEIND

SEQ ID NO: 29751 - protein, 6 aa, synthetic construct
PPEINE

SEQ ID NO: 29752 - protein, 6 aa, synthetic construct
PPEINF

SEQ ID NO: 29753 - protein, 6 aa, synthetic construct
PPEINW

SEQ ID NO: 29754 - protein, 6 aa, synthetic construct
PPEINY

SEQ ID NO: 29755 - protein, 6 aa, synthetic construct
PPEIDD

SEQ ID NO: 29756 - protein, 6 aa, synthetic construct
PPEIDE

SEQ ID NO: 29757 - protein, 6 aa, synthetic construct
PPEIDF

SEQ ID NO: 29758 - protein, 6 aa, synthetic construct
PPEIDW

SEQ ID NO: 29759 - protein, 6 aa, synthetic construct
PPEIDY

SEQ ID NO: 29760 - protein, 6 aa, synthetic construct
PPEICD

SEQ ID NO: 29761 - protein, 6 aa, synthetic construct
PPEICE

SEQ ID NO: 29762 - protein, 6 aa, synthetic construct
PPEICF

SEQ ID NO: 29763 - protein, 6 aa, synthetic construct
PPEICW

SEQ ID NO: 29764 - protein, 6 aa, synthetic construct
PPEICY

SEQ ID NO: 29765 - protein, 6 aa, synthetic construct
PPEIQD

SEQ ID NO: 29766 - protein, 6 aa, synthetic construct
PPEIQE

SEQ ID NO: 29767 - protein, 6 aa, synthetic construct
PPEIQF

SEQ ID NO: 29768 - protein, 6 aa, synthetic construct
PPEIQW

SEQ ID NO: 29769 - protein, 6 aa, synthetic construct
PPEIQY

SEQ ID NO: 29770 - protein, 6 aa, synthetic construct
PPEIED

SEQ ID NO: 29771 - protein, 6 aa, synthetic construct
PPEIEE

SEQ ID NO: 29772 - protein, 6 aa, synthetic construct
PPEIEF

SEQ ID NO: 29773 - protein, 6 aa, synthetic construct
PPEIEW

SEQ ID NO: 29774 - protein, 6 aa, synthetic construct
PPEIEY

SEQ ID NO: 29775 - protein, 6 aa, synthetic construct
PPEIGD

SEQ ID NO: 29776 - protein, 6 aa, synthetic construct
PPEIGE

SEQ ID NO: 29777 - protein, 6 aa, synthetic construct
PPEIGF

SEQ ID NO: 29778 - protein, 6 aa, synthetic construct
PPEIGW

SEQ ID NO: 29779 - protein, 6 aa, synthetic construct
PPEIGY

SEQ ID NO: 29780 - protein, 6 aa, synthetic construct
PPEIHD

SEQ ID NO: 29781 - protein, 6 aa, synthetic construct
PPEIHE

SEQ ID NO: 29782 - protein, 6 aa, synthetic construct
PPEIHF

SEQ ID NO: 29783 - protein, 6 aa, synthetic construct
PPEIHW

SEQ ID NO: 29784 - protein, 6 aa, synthetic construct
PPEIHY

SEQ ID NO: 29785 - protein, 6 aa, synthetic construct
PPEIID

SEQ ID NO: 29786 - protein, 6 aa, synthetic construct
PPEIIE

SEQ ID NO: 29787 - protein, 6 aa, synthetic construct
PPEIIF

SEQ ID NO: 29788 - protein, 6 aa, synthetic construct
PPEIIW

SEQ ID NO: 29789 - protein, 6 aa, synthetic construct
PPEIIY

SEQ ID NO: 29790 - protein, 6 aa, synthetic construct
PPEILD

SEQ ID NO: 29791 - protein, 6 aa, synthetic construct
PPEILE

SEQ ID NO: 29792 - protein, 6 aa, synthetic construct
PPEILF

SEQ ID NO: 29793 - protein, 6 aa, synthetic construct
PPEILW

SEQ ID NO: 29794 - protein, 6 aa, synthetic construct
PPEILY

SEQ ID NO: 29795 - protein, 6 aa, synthetic construct
PPEIKD

SEQ ID NO: 29796 - protein, 6 aa, synthetic construct
PPEIKE

SEQ ID NO: 29797 - protein, 6 aa, synthetic construct
PPEIKF

SEQ ID NO: 29798 - protein, 6 aa, synthetic construct
PPEIKW

SEQ ID NO: 29799 - protein, 6 aa, synthetic construct
PPEIKY

SEQ ID NO: 29800 - protein, 6 aa, synthetic construct
PPEIMD

SEQ ID NO: 29801 - protein, 6 aa, synthetic construct
PPEIME

SEQ ID NO: 29802 - protein, 6 aa, synthetic construct
PPEIMF

SEQ ID NO: 29803 - protein, 6 aa, synthetic construct
PPEIMW

SEQ ID NO: 29804 - protein, 6 aa, synthetic construct
PPEIMY

SEQ ID NO: 29805 - protein, 6 aa, synthetic construct
PPEIFD

SEQ ID NO: 29806 - protein, 6 aa, synthetic construct
PPEIFE

SEQ ID NO: 29807 - protein, 6 aa, synthetic construct
PPEIFF

SEQ ID NO: 29808 - protein, 6 aa, synthetic construct
PPEIFW

SEQ ID NO: 29809 - protein, 6 aa, synthetic construct
PPEIFY

SEQ ID NO: 29810 - protein, 6 aa, synthetic construct
PPEIPD

SEQ ID NO: 29811 - protein, 6 aa, synthetic construct
PPEIPE

SEQ ID NO: 29812 - protein, 6 aa, synthetic construct
PPEIPF

SEQ ID NO: 29813 - protein, 6 aa, synthetic construct
PPEIPW

SEQ ID NO: 29814 - protein, 6 aa, synthetic construct
PPEIPY

SEQ ID NO: 29815 - protein, 6 aa, synthetic construct
PPEISD

SEQ ID NO: 29816 - protein, 6 aa, synthetic construct
PPEISE

SEQ ID NO: 29817 - protein, 6 aa, synthetic construct
PPEISF

SEQ ID NO: 29818 - protein, 6 aa, synthetic construct
PPEISW

SEQ ID NO: 29819 - protein, 6 aa, synthetic construct
PPEISY

SEQ ID NO: 29820 - protein, 6 aa, synthetic construct
PPEITD

SEQ ID NO: 29821 - protein, 6 aa, synthetic construct
PPEITE

SEQ ID NO: 29822 - protein, 6 aa, synthetic construct
PPEITF

SEQ ID NO: 29823 - protein, 6 aa, synthetic construct
PPEITW

SEQ ID NO: 29824 - protein, 6 aa, synthetic construct
PPEITY

SEQ ID NO: 29825 - protein, 6 aa, synthetic construct
PPEIWD

SEQ ID NO: 29826 - protein, 6 aa, synthetic construct
PPEIWE

SEQ ID NO: 29827 - protein, 6 aa, synthetic construct
PPEIWF

SEQ ID NO: 29828 - protein, 6 aa, synthetic construct
PPEIWW

SEQ ID NO: 29829 - protein, 6 aa, synthetic construct
PPEIWY

SEQ ID NO: 29830 - protein, 6 aa, synthetic construct
PPEIYD

SEQ ID NO: 29831 - protein, 6 aa, synthetic construct
PPEIYE

SEQ ID NO: 29832 - protein, 6 aa, synthetic construct
PPEIYF

SEQ ID NO: 29833 - protein, 6 aa, synthetic construct
PPEIYW

SEQ ID NO: 29834 - protein, 6 aa, synthetic construct
PPEIYY

SEQ ID NO: 29835 - protein, 6 aa, synthetic construct
PPEIVD

SEQ ID NO: 29836 - protein, 6 aa, synthetic construct
PPEIVE

SEQ ID NO: 29837 - protein, 6 aa, synthetic construct
PPEIVF

SEQ ID NO: 29838 - protein, 6 aa, synthetic construct
PPEIVW

SEQ ID NO: 29839 - protein, 6 aa, synthetic construct
PPEIVY

SEQ ID NO: 29840 - protein, 6 aa, synthetic construct
PPELAD

SEQ ID NO: 29841 - protein, 6 aa, synthetic construct
PPELAE

SEQ ID NO: 29842 - protein, 6 aa, synthetic construct
PPELAF

SEQ ID NO: 29843 - protein, 6 aa, synthetic construct
PPELAW

SEQ ID NO: 29844 - protein, 6 aa, synthetic construct
PPELAY

SEQ ID NO: 29845 - protein, 6 aa, synthetic construct
PPELRD

SEQ ID NO: 29846 - protein, 6 aa, synthetic construct
PPELRE

SEQ ID NO: 29847 - protein, 6 aa, synthetic construct
PPELRF

SEQ ID NO: 29848 - protein, 6 aa, synthetic construct
PPELRW

SEQ ID NO: 29849 - protein, 6 aa, synthetic construct
PPELRY

SEQ ID NO: 29850 - protein, 6 aa, synthetic construct
PPELND

SEQ ID NO: 29851 - protein, 6 aa, synthetic construct
PPELNE

SEQ ID NO: 29852 - protein, 6 aa, synthetic construct
PPELNF

SEQ ID NO: 29853 - protein, 6 aa, synthetic construct
PPELNW

SEQ ID NO: 29854 - protein, 6 aa, synthetic construct
PPELNY

SEQ ID NO: 29855 - protein, 6 aa, synthetic construct
PPELDD

SEQ ID NO: 29856 - protein, 6 aa, synthetic construct
PPELDE

SEQ ID NO: 29857 - protein, 6 aa, synthetic construct
PPELDF

SEQ ID NO: 29858 - protein, 6 aa, synthetic construct
PPELDW

SEQ ID NO: 29859 - protein, 6 aa, synthetic construct
PPELDY

SEQ ID NO: 29860 - protein, 6 aa, synthetic construct
PPELCD

SEQ ID NO: 29861 - protein, 6 aa, synthetic construct
PPELCE

SEQ ID NO: 29862 - protein, 6 aa, synthetic construct
PPELCF

SEQ ID NO: 29863 - protein, 6 aa, synthetic construct
PPELCW

SEQ ID NO: 29864 - protein, 6 aa, synthetic construct
PPELCY

SEQ ID NO: 29865 - protein, 6 aa, synthetic construct
PPELQD

SEQ ID NO: 29866 - protein, 6 aa, synthetic construct
PPELQE

SEQ ID NO: 29867 - protein, 6 aa, synthetic construct
PPELQF

SEQ ID NO: 29868 - protein, 6 aa, synthetic construct
PPELQW

SEQ ID NO: 29869 - protein, 6 aa, synthetic construct
PPELQY

SEQ ID NO: 29870 - protein, 6 aa, synthetic construct
PPELED

SEQ ID NO: 29871 - protein, 6 aa, synthetic construct
PPELEE

SEQ ID NO: 29872 - protein, 6 aa, synthetic construct
PPELEF

SEQ ID NO: 29873 - protein, 6 aa, synthetic construct
PPELEW

SEQ ID NO: 29874 - protein, 6 aa, synthetic construct
PPELEY

SEQ ID NO: 29875 - protein, 6 aa, synthetic construct
PPELGD

SEQ ID NO: 29876 - protein, 6 aa, synthetic construct
PPELGE

SEQ ID NO: 29877 - protein, 6 aa, synthetic construct
PPELGF

SEQ ID NO: 29878 - protein, 6 aa, synthetic construct
PPELGW

SEQ ID NO: 29879 - protein, 6 aa, synthetic construct
PPELGY

SEQ ID NO: 29880 - protein, 6 aa, synthetic construct
PPELHD

SEQ ID NO: 29881 - protein, 6 aa, synthetic construct
PPELHE

SEQ ID NO: 29882 - protein, 6 aa, synthetic construct
PPELHF

SEQ ID NO: 29883 - protein, 6 aa, synthetic construct
PPELHW

SEQ ID NO: 29884 - protein, 6 aa, synthetic construct
PPELHY

SEQ ID NO: 29885 - protein, 6 aa, synthetic construct
PPELID

SEQ ID NO: 29886 - protein, 6 aa, synthetic construct
PPELIE

SEQ ID NO: 29887 - protein, 6 aa, synthetic construct
PPELIF

SEQ ID NO: 29888 - protein, 6 aa, synthetic construct
PPELIW

SEQ ID NO: 29889 - protein, 6 aa, synthetic construct
PPELIY

SEQ ID NO: 29890 - protein, 6 aa, synthetic construct
PPELLD

SEQ ID NO: 29891 - protein, 6 aa, synthetic construct
PPELLE

SEQ ID NO: 29892 - protein, 6 aa, synthetic construct
PPELLF

SEQ ID NO: 29893 - protein, 6 aa, synthetic construct
PPELLW

SEQ ID NO: 29894 - protein, 6 aa, synthetic construct
PPELLY

SEQ ID NO: 29895 - protein, 6 aa, synthetic construct
PPELKD

SEQ ID NO: 29896 - protein, 6 aa, synthetic construct
PPELKE

SEQ ID NO: 29897 - protein, 6 aa, synthetic construct
PPELKF

SEQ ID NO: 29898 - protein, 6 aa, synthetic construct
PPELKW

SEQ ID NO: 29899 - protein, 6 aa, synthetic construct
PPELKY

SEQ ID NO: 29900 - protein, 6 aa, synthetic construct
PPELMD

SEQ ID NO: 29901 - protein, 6 aa, synthetic construct
PPELME

SEQ ID NO: 29902 - protein, 6 aa, synthetic construct
PPELMF

SEQ ID NO: 29903 - protein, 6 aa, synthetic construct
PPELMW

SEQ ID NO: 29904 - protein, 6 aa, synthetic construct
PPELMY

SEQ ID NO: 29905 - protein, 6 aa, synthetic construct
PPELFD

SEQ ID NO: 29906 - protein, 6 aa, synthetic construct
PPELFE

SEQ ID NO: 29907 - protein, 6 aa, synthetic construct
PPELFF

SEQ ID NO: 29908 - protein, 6 aa, synthetic construct
PPELFW

SEQ ID NO: 29909 - protein, 6 aa, synthetic construct
PPELFY

SEQ ID NO: 29910 - protein, 6 aa, synthetic construct
PPELPD

SEQ ID NO: 29911 - protein, 6 aa, synthetic construct
PPELPE

SEQ ID NO: 29912 - protein, 6 aa, synthetic construct
PPELPF

SEQ ID NO: 29913 - protein, 6 aa, synthetic construct
PPELPW

SEQ ID NO: 29914 - protein, 6 aa, synthetic construct
PPELPY

SEQ ID NO: 29915 - protein, 6 aa, synthetic construct
PPELSD

SEQ ID NO: 29916 - protein, 6 aa, synthetic construct
PPELSE

SEQ ID NO: 29917 - protein, 6 aa, synthetic construct
PPELSF

SEQ ID NO: 29918 - protein, 6 aa, synthetic construct
PPELSW

SEQ ID NO: 29919 - protein, 6 aa, synthetic construct
PPELSY

SEQ ID NO: 29920 - protein, 6 aa, synthetic construct
PPELTD

SEQ ID NO: 29921 - protein, 6 aa, synthetic construct
PPELTE

SEQ ID NO: 29922 - protein, 6 aa, synthetic construct
PPELTF

SEQ ID NO: 29923 - protein, 6 aa, synthetic construct
PPELTW

SEQ ID NO: 29924 - protein, 6 aa, synthetic construct
PPELTY

SEQ ID NO: 29925 - protein, 6 aa, synthetic construct
PPELWD

SEQ ID NO: 29926 - protein, 6 aa, synthetic construct
PPELWE

SEQ ID NO: 29927 - protein, 6 aa, synthetic construct
PPELWF

SEQ ID NO: 29928 - protein, 6 aa, synthetic construct
PPELWW

SEQ ID NO: 29929 - protein, 6 aa, synthetic construct
PPELWY

SEQ ID NO: 29930 - protein, 6 aa, synthetic construct
PPELYD

SEQ ID NO: 29931 - protein, 6 aa, synthetic construct
PPELYE

SEQ ID NO: 29932 - protein, 6 aa, synthetic construct
PPELYF

SEQ ID NO: 29933 - protein, 6 aa, synthetic construct
PPELYW

SEQ ID NO: 29934 - protein, 6 aa, synthetic construct
PPELYY

SEQ ID NO: 29935 - protein, 6 aa, synthetic construct
PPELVD

SEQ ID NO: 29936 - protein, 6 aa, synthetic construct
PPELVE

SEQ ID NO: 29937 - protein, 6 aa, synthetic construct
PPELVF

SEQ ID NO: 29938 - protein, 6 aa, synthetic construct
PPELVW

SEQ ID NO: 29939 - protein, 6 aa, synthetic construct
PPELVY

SEQ ID NO: 29940 - protein, 6 aa, synthetic construct
PPEKAD

SEQ ID NO: 29941 - protein, 6 aa, synthetic construct
PPEKAE

SEQ ID NO: 29942 - protein, 6 aa, synthetic construct
PPEKAF

SEQ ID NO: 29943 - protein, 6 aa, synthetic construct
PPEKAW

SEQ ID NO: 29944 - protein, 6 aa, synthetic construct
PPEKAY

SEQ ID NO: 29945 - protein, 6 aa, synthetic construct
PPEKRD

SEQ ID NO: 29946 - protein, 6 aa, synthetic construct
PPEKRE

SEQ ID NO: 29947 - protein, 6 aa, synthetic construct
PPEKRF

SEQ ID NO: 29948 - protein, 6 aa, synthetic construct
PPEKRW

SEQ ID NO: 29949 - protein, 6 aa, synthetic construct
PPEKRY

SEQ ID NO: 29950 - protein, 6 aa, synthetic construct
PPEKND

SEQ ID NO: 29951 - protein, 6 aa, synthetic construct
PPEKNE

SEQ ID NO: 29952 - protein, 6 aa, synthetic construct
PPEKNF

SEQ ID NO: 29953 - protein, 6 aa, synthetic construct
PPEKNW

SEQ ID NO: 29954 - protein, 6 aa, synthetic construct
PPEKNY

SEQ ID NO: 29955 - protein, 6 aa, synthetic construct
PPEKDD

SEQ ID NO: 29956 - protein, 6 aa, synthetic construct
PPEKDE

SEQ ID NO: 29957 - protein, 6 aa, synthetic construct
PPEKDF

SEQ ID NO: 29958 - protein, 6 aa, synthetic construct
PPEKDW

SEQ ID NO: 29959 - protein, 6 aa, synthetic construct
PPEKDY

SEQ ID NO: 29960 - protein, 6 aa, synthetic construct
PPEKCD

SEQ ID NO: 29961 - protein, 6 aa, synthetic construct
PPEKCE

SEQ ID NO: 29962 - protein, 6 aa, synthetic construct
PPEKCF

SEQ ID NO: 29963 - protein, 6 aa, synthetic construct
PPEKCW

SEQ ID NO: 29964 - protein, 6 aa, synthetic construct
PPEKCY

SEQ ID NO: 29965 - protein, 6 aa, synthetic construct
PPEKQD

SEQ ID NO: 29966 - protein, 6 aa, synthetic construct
PPEKQE

SEQ ID NO: 29967 - protein, 6 aa, synthetic construct
PPEKQF

SEQ ID NO: 29968 - protein, 6 aa, synthetic construct
PPEKQW

SEQ ID NO: 29969 - protein, 6 aa, synthetic construct
PPEKQY

SEQ ID NO: 29970 - protein, 6 aa, synthetic construct
PPEKED

SEQ ID NO: 29971 - protein, 6 aa, synthetic construct
PPEKEE

SEQ ID NO: 29972 - protein, 6 aa, synthetic construct
PPEKEF

SEQ ID NO: 29973 - protein, 6 aa, synthetic construct
PPEKEW

SEQ ID NO: 29974 - protein, 6 aa, synthetic construct
PPEKEY

SEQ ID NO: 29975 - protein, 6 aa, synthetic construct
PPEKGD

SEQ ID NO: 29976 - protein, 6 aa, synthetic construct
PPEKGE

SEQ ID NO: 29977 - protein, 6 aa, synthetic construct
PPEKGF

SEQ ID NO: 29978 - protein, 6 aa, synthetic construct
PPEKGW

SEQ ID NO: 29979 - protein, 6 aa, synthetic construct
PPEKGY

SEQ ID NO: 29980 - protein, 6 aa, synthetic construct
PPEKHD

SEQ ID NO: 29981 - protein, 6 aa, synthetic construct
PPEKHE

SEQ ID NO: 29982 - protein, 6 aa, synthetic construct
PPEKHF

SEQ ID NO: 29983 - protein, 6 aa, synthetic construct
PPEKHW

SEQ ID NO: 29984 - protein, 6 aa, synthetic construct
PPEKHY

SEQ ID NO: 29985 - protein, 6 aa, synthetic construct
PPEKID

SEQ ID NO: 29986 - protein, 6 aa, synthetic construct
PPEKIE

SEQ ID NO: 29987 - protein, 6 aa, synthetic construct
PPEKIF

SEQ ID NO: 29988 - protein, 6 aa, synthetic construct
PPEKIW

SEQ ID NO: 29989 - protein, 6 aa, synthetic construct
PPEKIY

SEQ ID NO: 29990 - protein, 6 aa, synthetic construct
PPEKLD

SEQ ID NO: 29991 - protein, 6 aa, synthetic construct
PPEKLE

SEQ ID NO: 29992 - protein, 6 aa, synthetic construct
PPEKLF

SEQ ID NO: 29993 - protein, 6 aa, synthetic construct
PPEKLW

SEQ ID NO: 29994 - protein, 6 aa, synthetic construct
PPEKLY

SEQ ID NO: 29995 - protein, 6 aa, synthetic construct
PPEKKD

SEQ ID NO: 29996 - protein, 6 aa, synthetic construct
PPEKKE

SEQ ID NO: 29997 - protein, 6 aa, synthetic construct
PPEKKF

SEQ ID NO: 29998 - protein, 6 aa, synthetic construct
PPEKKW

SEQ ID NO: 29999 - protein, 6 aa, synthetic construct
PPEKKY

SEQ ID NO: 30000 - protein, 6 aa, synthetic construct
PPEKMD

SEQ ID NO: 30001 - protein, 6 aa, synthetic construct
PPEKME

SEQ ID NO: 30002 - protein, 6 aa, synthetic construct
PPEKMF

SEQ ID NO: 30003 - protein, 6 aa, synthetic construct
PPEKMW

SEQ ID NO: 30004 - protein, 6 aa, synthetic construct
PPEKMY

SEQ ID NO: 30005 - protein, 6 aa, synthetic construct
PPEKFD

SEQ ID NO: 30006 - protein, 6 aa, synthetic construct
PPEKFE

SEQ ID NO: 30007 - protein, 6 aa, synthetic construct
PPEKFF

SEQ ID NO: 30008 - protein, 6 aa, synthetic construct
PPEKFW

SEQ ID NO: 30009 - protein, 6 aa, synthetic construct
PPEKFY

SEQ ID NO: 30010 - protein, 6 aa, synthetic construct
PPEKPD

SEQ ID NO: 30011 - protein, 6 aa, synthetic construct
PPEKPE

SEQ ID NO: 30012 - protein, 6 aa, synthetic construct
PPEKPF

SEQ ID NO: 30013 - protein, 6 aa, synthetic construct
PPEKPW

SEQ ID NO: 30014 - protein, 6 aa, synthetic construct
PPEKPY

SEQ ID NO: 30015 - protein, 6 aa, synthetic construct
PPEKSD

SEQ ID NO: 30016 - protein, 6 aa, synthetic construct
PPEKSE

SEQ ID NO: 30017 - protein, 6 aa, synthetic construct
PPEKSF

SEQ ID NO: 30018 - protein, 6 aa, synthetic construct
PPEKSW

SEQ ID NO: 30019 - protein, 6 aa, synthetic construct
PPEKSY

SEQ ID NO: 30020 - protein, 6 aa, synthetic construct
PPEKTD

SEQ ID NO: 30021 - protein, 6 aa, synthetic construct
PPEKTE

SEQ ID NO: 30022 - protein, 6 aa, synthetic construct
PPEKTF

SEQ ID NO: 30023 - protein, 6 aa, synthetic construct
PPEKTW

SEQ ID NO: 30024 - protein, 6 aa, synthetic construct
PPEKTY

SEQ ID NO: 30025 - protein, 6 aa, synthetic construct
PPEKWD

SEQ ID NO: 30026 - protein, 6 aa, synthetic construct
PPEKWE

SEQ ID NO: 30027 - protein, 6 aa, synthetic construct
PPEKWF

SEQ ID NO: 30028 - protein, 6 aa, synthetic construct
PPEKWW

SEQ ID NO: 30029 - protein, 6 aa, synthetic construct
PPEKWY

SEQ ID NO: 30030 - protein, 6 aa, synthetic construct
PPEKYD

SEQ ID NO: 30031 - protein, 6 aa, synthetic construct
PPEKYE

SEQ ID NO: 30032 - protein, 6 aa, synthetic construct
PPEKYF

SEQ ID NO: 30033 - protein, 6 aa, synthetic construct
PPEKYW

SEQ ID NO: 30034 - protein, 6 aa, synthetic construct
PPEKYY

SEQ ID NO: 30035 - protein, 6 aa, synthetic construct
PPEKVD

SEQ ID NO: 30036 - protein, 6 aa, synthetic construct
PPEKVE

SEQ ID NO: 30037 - protein, 6 aa, synthetic construct
PPEKVF

SEQ ID NO: 30038 - protein, 6 aa, synthetic construct
PPEKVW

SEQ ID NO: 30039 - protein, 6 aa, synthetic construct
PPEKVY

SEQ ID NO: 30040 - protein, 6 aa, synthetic construct
PPEMAD

SEQ ID NO: 30041 - protein, 6 aa, synthetic construct
PPEMAE

SEQ ID NO: 30042 - protein, 6 aa, synthetic construct
PPEMAF

SEQ ID NO: 30043 - protein, 6 aa, synthetic construct
PPEMAW

SEQ ID NO: 30044 - protein, 6 aa, synthetic construct
PPEMAY

SEQ ID NO: 30045 - protein, 6 aa, synthetic construct
PPEMRD

SEQ ID NO: 30046 - protein, 6 aa, synthetic construct
PPEMRE

SEQ ID NO: 30047 - protein, 6 aa, synthetic construct
PPEMRF

SEQ ID NO: 30048 - protein, 6 aa, synthetic construct
PPEMRW

SEQ ID NO: 30049 - protein, 6 aa, synthetic construct
PPEMRY

SEQ ID NO: 30050 - protein, 6 aa, synthetic construct
PPEMND

SEQ ID NO: 30051 - protein, 6 aa, synthetic construct
PPEMNE

SEQ ID NO: 30052 - protein, 6 aa, synthetic construct
PPEMNF

SEQ ID NO: 30053 - protein, 6 aa, synthetic construct
PPEMNW

SEQ ID NO: 30054 - protein, 6 aa, synthetic construct
PPEMNY

SEQ ID NO: 30055 - protein, 6 aa, synthetic construct
PPEMDD

SEQ ID NO: 30056 - protein, 6 aa, synthetic construct
PPEMDE

SEQ ID NO: 30057 - protein, 6 aa, synthetic construct
PPEMDF

SEQ ID NO: 30058 - protein, 6 aa, synthetic construct
PPEMDW

SEQ ID NO: 30059 - protein, 6 aa, synthetic construct
PPEMDY

SEQ ID NO: 30060 - protein, 6 aa, synthetic construct
PPEMCD

SEQ ID NO: 30061 - protein, 6 aa, synthetic construct
PPEMCE

SEQ ID NO: 30062 - protein, 6 aa, synthetic construct
PPEMCF

SEQ ID NO: 30063 - protein, 6 aa, synthetic construct
PPEMCW

SEQ ID NO: 30064 - protein, 6 aa, synthetic construct
PPEMCY

SEQ ID NO: 30065 - protein, 6 aa, synthetic construct
PPEMQD

SEQ ID NO: 30066 - protein, 6 aa, synthetic construct
PPEMQE

SEQ ID NO: 30067 - protein, 6 aa, synthetic construct
PPEMQF

SEQ ID NO: 30068 - protein, 6 aa, synthetic construct
PPEMQW

SEQ ID NO: 30069 - protein, 6 aa, synthetic construct
PPEMQY

SEQ ID NO: 30070 - protein, 6 aa, synthetic construct
PPEMED

SEQ ID NO: 30071 - protein, 6 aa, synthetic construct
PPEMEE

SEQ ID NO: 30072 - protein, 6 aa, synthetic construct
PPEMEF

SEQ ID NO: 30073 - protein, 6 aa, synthetic construct
PPEMEW

SEQ ID NO: 30074 - protein, 6 aa, synthetic construct
PPEMEY

SEQ ID NO: 30075 - protein, 6 aa, synthetic construct
PPEMGD

SEQ ID NO: 30076 - protein, 6 aa, synthetic construct
PPEMGE

SEQ ID NO: 30077 - protein, 6 aa, synthetic construct
PPEMGF

SEQ ID NO: 30078 - protein, 6 aa, synthetic construct
PPEMGW

SEQ ID NO: 30079 - protein, 6 aa, synthetic construct
PPEMGY

SEQ ID NO: 30080 - protein, 6 aa, synthetic construct
PPEMHD

SEQ ID NO: 30081 - protein, 6 aa, synthetic construct
PPEMHE

SEQ ID NO: 30082 - protein, 6 aa, synthetic construct
PPEMHF

SEQ ID NO: 30083 - protein, 6 aa, synthetic construct
PPEMHW

SEQ ID NO: 30084 - protein, 6 aa, synthetic construct
PPEMHY

SEQ ID NO: 30085 - protein, 6 aa, synthetic construct
PPEMID

SEQ ID NO: 30086 - protein, 6 aa, synthetic construct
PPEMIE

SEQ ID NO: 30087 - protein, 6 aa, synthetic construct
PPEMIF

SEQ ID NO: 30088 - protein, 6 aa, synthetic construct
PPEMIW

SEQ ID NO: 30089 - protein, 6 aa, synthetic construct
PPEMIY

SEQ ID NO: 30090 - protein, 6 aa, synthetic construct
PPEMLD

SEQ ID NO: 30091 - protein, 6 aa, synthetic construct
PPEMLE

SEQ ID NO: 30092 - protein, 6 aa, synthetic construct
PPEMLF

SEQ ID NO: 30093 - protein, 6 aa, synthetic construct
PPEMLW

SEQ ID NO: 30094 - protein, 6 aa, synthetic construct
PPEMLY

SEQ ID NO: 30095 - protein, 6 aa, synthetic construct
PPEMKD

SEQ ID NO: 30096 - protein, 6 aa, synthetic construct
PPEMKE

SEQ ID NO: 30097 - protein, 6 aa, synthetic construct
PPEMKF

SEQ ID NO: 30098 - protein, 6 aa, synthetic construct
PPEMKW

SEQ ID NO: 30099 - protein, 6 aa, synthetic construct
PPEMKY

SEQ ID NO: 30100 - protein, 6 aa, synthetic construct
PPEMMD

SEQ ID NO: 30101 - protein, 6 aa, synthetic construct
PPEMME

SEQ ID NO: 30102 - protein, 6 aa, synthetic construct
PPEMMF

SEQ ID NO: 30103 - protein, 6 aa, synthetic construct
PPEMMW

SEQ ID NO: 30104 - protein, 6 aa, synthetic construct
PPEMMY

SEQ ID NO: 30105 - protein, 6 aa, synthetic construct
PPEMFD

SEQ ID NO: 30106 - protein, 6 aa, synthetic construct
PPEMFE

SEQ ID NO: 30107 - protein, 6 aa, synthetic construct
PPEMFF

SEQ ID NO: 30108 - protein, 6 aa, synthetic construct
PPEMFW

SEQ ID NO: 30109 - protein, 6 aa, synthetic construct
PPEMFY

SEQ ID NO: 30110 - protein, 6 aa, synthetic construct
PPEMPD

SEQ ID NO: 30111 - protein, 6 aa, synthetic construct
PPEMPE

SEQ ID NO: 30112 - protein, 6 aa, synthetic construct
PPEMPF

SEQ ID NO: 30113 - protein, 6 aa, synthetic construct
PPEMPW

SEQ ID NO: 30114 - protein, 6 aa, synthetic construct
PPEMPY

SEQ ID NO: 30115 - protein, 6 aa, synthetic construct
PPEMSD

SEQ ID NO: 30116 - protein, 6 aa, synthetic construct
PPEMSE

SEQ ID NO: 30117 - protein, 6 aa, synthetic construct
PPEMSF

SEQ ID NO: 30118 - protein, 6 aa, synthetic construct
PPEMSW

SEQ ID NO: 30119 - protein, 6 aa, synthetic construct
PPEMSY

SEQ ID NO: 30120 - protein, 6 aa, synthetic construct
PPEMTD

SEQ ID NO: 30121 - protein, 6 aa, synthetic construct
PPEMTE

SEQ ID NO: 30122 - protein, 6 aa, synthetic construct
PPEMTF

SEQ ID NO: 30123 - protein, 6 aa, synthetic construct
PPEMTW

SEQ ID NO: 30124 - protein, 6 aa, synthetic construct
PPEMTY

SEQ ID NO: 30125 - protein, 6 aa, synthetic construct
PPEMWD

SEQ ID NO: 30126 - protein, 6 aa, synthetic construct
PPEMWE

SEQ ID NO: 30127 - protein, 6 aa, synthetic construct
PPEMWF

SEQ ID NO: 30128 - protein, 6 aa, synthetic construct
PPEMWW

SEQ ID NO: 30129 - protein, 6 aa, synthetic construct
PPEMWY

SEQ ID NO: 30130 - protein, 6 aa, synthetic construct
PPEMYD

SEQ ID NO: 30131 - protein, 6 aa, synthetic construct
PPEMYE

SEQ ID NO: 30132 - protein, 6 aa, synthetic construct
PPEMYF

SEQ ID NO: 30133 - protein, 6 aa, synthetic construct
PPEMYW

SEQ ID NO: 30134 - protein, 6 aa, synthetic construct
PPEMYY

SEQ ID NO: 30135 - protein, 6 aa, synthetic construct
PPEMVD

SEQ ID NO: 30136 - protein, 6 aa, synthetic construct
PPEMVE

SEQ ID NO: 30137 - protein, 6 aa, synthetic construct
PPEMVF

SEQ ID NO: 30138 - protein, 6 aa, synthetic construct
PPEMVW

SEQ ID NO: 30139 - protein, 6 aa, synthetic construct
PPEMVY

SEQ ID NO: 30140 - protein, 6 aa, synthetic construct
PPEFAD

SEQ ID NO: 30141 - protein, 6 aa, synthetic construct
PPEFAE

SEQ ID NO: 30142 - protein, 6 aa, synthetic construct
PPEFAF

SEQ ID NO: 30143 - protein, 6 aa, synthetic construct
PPEFAW

SEQ ID NO: 30144 - protein, 6 aa, synthetic construct
PPEFAY

SEQ ID NO: 30145 - protein, 6 aa, synthetic construct
PPEFRD

SEQ ID NO: 30146 - protein, 6 aa, synthetic construct
PPEFRE

SEQ ID NO: 30147 - protein, 6 aa, synthetic construct
PPEFRF

SEQ ID NO: 30148 - protein, 6 aa, synthetic construct
PPEFRW

SEQ ID NO: 30149 - protein, 6 aa, synthetic construct
PPEFRY

SEQ ID NO: 30150 - protein, 6 aa, synthetic construct
PPEFND

SEQ ID NO: 30151 - protein, 6 aa, synthetic construct
PPEFNE

SEQ ID NO: 30152 - protein, 6 aa, synthetic construct
PPEFNF

SEQ ID NO: 30153 - protein, 6 aa, synthetic construct
PPEFNW

SEQ ID NO: 30154 - protein, 6 aa, synthetic construct
PPEFNY

SEQ ID NO: 30155 - protein, 6 aa, synthetic construct
PPEFDD

SEQ ID NO: 30156 - protein, 6 aa, synthetic construct
PPEFDE

SEQ ID NO: 30157 - protein, 6 aa, synthetic construct
PPEFDF

SEQ ID NO: 30158 - protein, 6 aa, synthetic construct
PPEFDW

SEQ ID NO: 30159 - protein, 6 aa, synthetic construct
PPEFDY

SEQ ID NO: 30160 - protein, 6 aa, synthetic construct
PPEFCD

SEQ ID NO: 30161 - protein, 6 aa, synthetic construct
PPEFCE

SEQ ID NO: 30162 - protein, 6 aa, synthetic construct
PPEFCF

SEQ ID NO: 30163 - protein, 6 aa, synthetic construct
PPEFCW

SEQ ID NO: 30164 - protein, 6 aa, synthetic construct
PPEFCY

SEQ ID NO: 30165 - protein, 6 aa, synthetic construct
PPEFQD

SEQ ID NO: 30166 - protein, 6 aa, synthetic construct
PPEFQE

SEQ ID NO: 30167 - protein, 6 aa, synthetic construct
PPEFQF

SEQ ID NO: 30168 - protein, 6 aa, synthetic construct
PPEFQW

SEQ ID NO: 30169 - protein, 6 aa, synthetic construct
PPEFQY

SEQ ID NO: 30170 - protein, 6 aa, synthetic construct
PPEFED

SEQ ID NO: 30171 - protein, 6 aa, synthetic construct
PPEFEE

SEQ ID NO: 30172 - protein, 6 aa, synthetic construct
PPEFEF

SEQ ID NO: 30173 - protein, 6 aa, synthetic construct
PPEFEW

SEQ ID NO: 30174 - protein, 6 aa, synthetic construct
PPEFEY

SEQ ID NO: 30175 - protein, 6 aa, synthetic construct
PPEFGD

SEQ ID NO: 30176 - protein, 6 aa, synthetic construct
PPEFGE

SEQ ID NO: 30177 - protein, 6 aa, synthetic construct
PPEFGF

SEQ ID NO: 30178 - protein, 6 aa, synthetic construct
PPEFGW

SEQ ID NO: 30179 - protein, 6 aa, synthetic construct
PPEFGY

SEQ ID NO: 30180 - protein, 6 aa, synthetic construct
PPEFHD

SEQ ID NO: 30181 - protein, 6 aa, synthetic construct
PPEFHE

SEQ ID NO: 30182 - protein, 6 aa, synthetic construct
PPEFHF

SEQ ID NO: 30183 - protein, 6 aa, synthetic construct
PPEFHW

SEQ ID NO: 30184 - protein, 6 aa, synthetic construct
PPEFHY

SEQ ID NO: 30185 - protein, 6 aa, synthetic construct
PPEFID

SEQ ID NO: 30186 - protein, 6 aa, synthetic construct
PPEFIE

SEQ ID NO: 30187 - protein, 6 aa, synthetic construct
PPEFIF

SEQ ID NO: 30188 - protein, 6 aa, synthetic construct
PPEFIW

SEQ ID NO: 30189 - protein, 6 aa, synthetic construct
PPEFIY

SEQ ID NO: 30190 - protein, 6 aa, synthetic construct
PPEFLD

SEQ ID NO: 30191 - protein, 6 aa, synthetic construct
PPEFLE

SEQ ID NO: 30192 - protein, 6 aa, synthetic construct
PPEFLF

SEQ ID NO: 30193 - protein, 6 aa, synthetic construct
PPEFLW

SEQ ID NO: 30194 - protein, 6 aa, synthetic construct
PPEFLY

SEQ ID NO: 30195 - protein, 6 aa, synthetic construct
PPEFKD

SEQ ID NO: 30196 - protein, 6 aa, synthetic construct
PPEFKE

SEQ ID NO: 30197 - protein, 6 aa, synthetic construct
PPEFKF

SEQ ID NO: 30198 - protein, 6 aa, synthetic construct
PPEFKW

SEQ ID NO: 30199 - protein, 6 aa, synthetic construct
PPEFKY

SEQ ID NO: 30200 - protein, 6 aa, synthetic construct
PPEFMD

SEQ ID NO: 30201 - protein, 6 aa, synthetic construct
PPEFME

SEQ ID NO: 30202 - protein, 6 aa, synthetic construct
PPEFMF

SEQ ID NO: 30203 - protein, 6 aa, synthetic construct
PPEFMW

SEQ ID NO: 30204 - protein, 6 aa, synthetic construct
PPEFMY

SEQ ID NO: 30205 - protein, 6 aa, synthetic construct
PPEFFD

SEQ ID NO: 30206 - protein, 6 aa, synthetic construct
PPEFFE

SEQ ID NO: 30207 - protein, 6 aa, synthetic construct
PPEFFF

SEQ ID NO: 30208 - protein, 6 aa, synthetic construct
PPEFFW

SEQ ID NO: 30209 - protein, 6 aa, synthetic construct
PPEFFY

SEQ ID NO: 30210 - protein, 6 aa, synthetic construct
PPEFPD

SEQ ID NO: 30211 - protein, 6 aa, synthetic construct
PPEFPE

SEQ ID NO: 30212 - protein, 6 aa, synthetic construct
PPEFPF

SEQ ID NO: 30213 - protein, 6 aa, synthetic construct
PPEFPW

SEQ ID NO: 30214 - protein, 6 aa, synthetic construct
PPEFPY

SEQ ID NO: 30215 - protein, 6 aa, synthetic construct
PPEFSD

SEQ ID NO: 30216 - protein, 6 aa, synthetic construct
PPEFSE

SEQ ID NO: 30217 - protein, 6 aa, synthetic construct
PPEFSF

SEQ ID NO: 30218 - protein, 6 aa, synthetic construct
PPEFSW

SEQ ID NO: 30219 - protein, 6 aa, synthetic construct
PPEFSY

SEQ ID NO: 30220 - protein, 6 aa, synthetic construct
PPEFTD

SEQ ID NO: 30221 - protein, 6 aa, synthetic construct
PPEFTE

SEQ ID NO: 30222 - protein, 6 aa, synthetic construct
PPEFTF

SEQ ID NO: 30223 - protein, 6 aa, synthetic construct
PPEFTW

SEQ ID NO: 30224 - protein, 6 aa, synthetic construct
PPEFTY

SEQ ID NO: 30225 - protein, 6 aa, synthetic construct
PPEFWD

SEQ ID NO: 30226 - protein, 6 aa, synthetic construct
PPEFWE

SEQ ID NO: 30227 - protein, 6 aa, synthetic construct
PPEFWF

SEQ ID NO: 30228 - protein, 6 aa, synthetic construct
PPEFWW

SEQ ID NO: 30229 - protein, 6 aa, synthetic construct
PPEFWY

SEQ ID NO: 30230 - protein, 6 aa, synthetic construct
PPEFYD

SEQ ID NO: 30231 - protein, 6 aa, synthetic construct
PPEFYE

SEQ ID NO: 30232 - protein, 6 aa, synthetic construct
PPEFYF

SEQ ID NO: 30233 - protein, 6 aa, synthetic construct
PPEFYW

SEQ ID NO: 30234 - protein, 6 aa, synthetic construct
PPEFYY

SEQ ID NO: 30235 - protein, 6 aa, synthetic construct
PPEFVD

SEQ ID NO: 30236 - protein, 6 aa, synthetic construct
PPEFVE

SEQ ID NO: 30237 - protein, 6 aa, synthetic construct
PPEFVF

SEQ ID NO: 30238 - protein, 6 aa, synthetic construct
PPEFVW

SEQ ID NO: 30239 - protein, 6 aa, synthetic construct
PPEFVY

SEQ ID NO: 30240 - protein, 6 aa, synthetic construct
PPEPAD

SEQ ID NO: 30241 - protein, 6 aa, synthetic construct
PPEPAE

SEQ ID NO: 30242 - protein, 6 aa, synthetic construct
PPEPAF

SEQ ID NO: 30243 - protein, 6 aa, synthetic construct
PPEPAW

SEQ ID NO: 30244 - protein, 6 aa, synthetic construct
PPEPAY

SEQ ID NO: 30245 - protein, 6 aa, synthetic construct
PPEPRD

SEQ ID NO: 30246 - protein, 6 aa, synthetic construct
PPEPRE

SEQ ID NO: 30247 - protein, 6 aa, synthetic construct
PPEPRF

SEQ ID NO: 30248 - protein, 6 aa, synthetic construct
PPEPRW

SEQ ID NO: 30249 - protein, 6 aa, synthetic construct
PPEPRY

SEQ ID NO: 30250 - protein, 6 aa, synthetic construct
PPEPND

SEQ ID NO: 30251 - protein, 6 aa, synthetic construct
PPEPNE

SEQ ID NO: 30252 - protein, 6 aa, synthetic construct
PPEPNF

SEQ ID NO: 30253 - protein, 6 aa, synthetic construct
PPEPNW

SEQ ID NO: 30254 - protein, 6 aa, synthetic construct
PPEPNY

SEQ ID NO: 30255 - protein, 6 aa, synthetic construct
PPEPDD

SEQ ID NO: 30256 - protein, 6 aa, synthetic construct
PPEPDE

SEQ ID NO: 30257 - protein, 6 aa, synthetic construct
PPEPDF

SEQ ID NO: 30258 - protein, 6 aa, synthetic construct
PPEPDW

SEQ ID NO: 30259 - protein, 6 aa, synthetic construct
PPEPDY

SEQ ID NO: 30260 - protein, 6 aa, synthetic construct
PPEPCD

SEQ ID NO: 30261 - protein, 6 aa, synthetic construct
PPEPCE

SEQ ID NO: 30262 - protein, 6 aa, synthetic construct
PPEPCF

SEQ ID NO: 30263 - protein, 6 aa, synthetic construct
PPEPCW

SEQ ID NO: 30264 - protein, 6 aa, synthetic construct
PPEPCY

SEQ ID NO: 30265 - protein, 6 aa, synthetic construct
PPEPQD

SEQ ID NO: 30266 - protein, 6 aa, synthetic construct
PPEPQE

SEQ ID NO: 30267 - protein, 6 aa, synthetic construct
PPEPQF

SEQ ID NO: 30268 - protein, 6 aa, synthetic construct
PPEPQW

SEQ ID NO: 30269 - protein, 6 aa, synthetic construct
PPEPQY

SEQ ID NO: 30270 - protein, 6 aa, synthetic construct
PPEPED

SEQ ID NO: 30271 - protein, 6 aa, synthetic construct
PPEPEE

SEQ ID NO: 30272 - protein, 6 aa, synthetic construct
PPEPEF

SEQ ID NO: 30273 - protein, 6 aa, synthetic construct
PPEPEW

SEQ ID NO: 30274 - protein, 6 aa, synthetic construct
PPEPEY

SEQ ID NO: 30275 - protein, 6 aa, synthetic construct
PPEPGD

SEQ ID NO: 30276 - protein, 6 aa, synthetic construct
PPEPGE

SEQ ID NO: 30277 - protein, 6 aa, synthetic construct
PPEPGF

SEQ ID NO: 30278 - protein, 6 aa, synthetic construct
PPEPGW

SEQ ID NO: 30279 - protein, 6 aa, synthetic construct
PPEPGY

SEQ ID NO: 30280 - protein, 6 aa, synthetic construct
PPEPHD

SEQ ID NO: 30281 - protein, 6 aa, synthetic construct
PPEPHE

SEQ ID NO: 30282 - protein, 6 aa, synthetic construct
PPEPHF

SEQ ID NO: 30283 - protein, 6 aa, synthetic construct
PPEPHW

SEQ ID NO: 30284 - protein, 6 aa, synthetic construct
PPEPHY

SEQ ID NO: 30285 - protein, 6 aa, synthetic construct
PPEPID

SEQ ID NO: 30286 - protein, 6 aa, synthetic construct
PPEPIE

SEQ ID NO: 30287 - protein, 6 aa, synthetic construct
PPEPIF

SEQ ID NO: 30288 - protein, 6 aa, synthetic construct
PPEPIW

SEQ ID NO: 30289 - protein, 6 aa, synthetic construct
PPEPIY

SEQ ID NO: 30290 - protein, 6 aa, synthetic construct
PPEPLD

SEQ ID NO: 30291 - protein, 6 aa, synthetic construct
PPEPLE

SEQ ID NO: 30292 - protein, 6 aa, synthetic construct
PPEPLF

SEQ ID NO: 30293 - protein, 6 aa, synthetic construct
PPEPLW

SEQ ID NO: 30294 - protein, 6 aa, synthetic construct
PPEPLY

SEQ ID NO: 30295 - protein, 6 aa, synthetic construct
PPEPKD

SEQ ID NO: 30296 - protein, 6 aa, synthetic construct
PPEPKE

SEQ ID NO: 30297 - protein, 6 aa, synthetic construct
PPEPKF

SEQ ID NO: 30298 - protein, 6 aa, synthetic construct
PPEPKW

SEQ ID NO: 30299 - protein, 6 aa, synthetic construct
PPEPKY

SEQ ID NO: 30300 - protein, 6 aa, synthetic construct
PPEPMD

SEQ ID NO: 30301 - protein, 6 aa, synthetic construct
PPEPME

SEQ ID NO: 30302 - protein, 6 aa, synthetic construct
PPEPMF

SEQ ID NO: 30303 - protein, 6 aa, synthetic construct
PPEPMW

SEQ ID NO: 30304 - protein, 6 aa, synthetic construct
PPEPMY

SEQ ID NO: 30305 - protein, 6 aa, synthetic construct
PPEPFD

SEQ ID NO: 30306 - protein, 6 aa, synthetic construct
PPEPFE

SEQ ID NO: 30307 - protein, 6 aa, synthetic construct
PPEPFF

SEQ ID NO: 30308 - protein, 6 aa, synthetic construct
PPEPFW

SEQ ID NO: 30309 - protein, 6 aa, synthetic construct
PPEPFY

SEQ ID NO: 30310 - protein, 6 aa, synthetic construct
PPEPPD

SEQ ID NO: 30311 - protein, 6 aa, synthetic construct
PPEPPE

SEQ ID NO: 30312 - protein, 6 aa, synthetic construct
PPEPPF

SEQ ID NO: 30313 - protein, 6 aa, synthetic construct
PPEPPW

SEQ ID NO: 30314 - protein, 6 aa, synthetic construct
PPEPPY

SEQ ID NO: 30315 - protein, 6 aa, synthetic construct
PPEPSD

SEQ ID NO: 30316 - protein, 6 aa, synthetic construct
PPEPSE

SEQ ID NO: 30317 - protein, 6 aa, synthetic construct
PPEPSF

SEQ ID NO: 30318 - protein, 6 aa, synthetic construct
PPEPSW

SEQ ID NO: 30319 - protein, 6 aa, synthetic construct
PPEPSY

SEQ ID NO: 30320 - protein, 6 aa, synthetic construct
PPEPTD

SEQ ID NO: 30321 - protein, 6 aa, synthetic construct
PPEPTE

SEQ ID NO: 30322 - protein, 6 aa, synthetic construct
PPEPTF

SEQ ID NO: 30323 - protein, 6 aa, synthetic construct
PPEPTW

SEQ ID NO: 30324 - protein, 6 aa, synthetic construct
PPEPTY

SEQ ID NO: 30325 - protein, 6 aa, synthetic construct
PPEPWD

SEQ ID NO: 30326 - protein, 6 aa, synthetic construct
PPEPWE

SEQ ID NO: 30327 - protein, 6 aa, synthetic construct
PPEPWF

SEQ ID NO: 30328 - protein, 6 aa, synthetic construct
PPEPWW

SEQ ID NO: 30329 - protein, 6 aa, synthetic construct
PPEPWY

SEQ ID NO: 30330 - protein, 6 aa, synthetic construct
PPEPYD

SEQ ID NO: 30331 - protein, 6 aa, synthetic construct
PPEPYE

SEQ ID NO: 30332 - protein, 6 aa, synthetic construct
PPEPYF

SEQ ID NO: 30333 - protein, 6 aa, synthetic construct
PPEPYW

SEQ ID NO: 30334 - protein, 6 aa, synthetic construct
PPEPYY

SEQ ID NO: 30335 - protein, 6 aa, synthetic construct
PPEPVD

SEQ ID NO: 30336 - protein, 6 aa, synthetic construct
PPEPVE

SEQ ID NO: 30337 - protein, 6 aa, synthetic construct
PPEPVF

SEQ ID NO: 30338 - protein, 6 aa, synthetic construct
PPEPVW

SEQ ID NO: 30339 - protein, 6 aa, synthetic construct
PPEPVY

SEQ ID NO: 30340 - protein, 6 aa, synthetic construct
PPESAD

SEQ ID NO: 30341 - protein, 6 aa, synthetic construct
PPESAE

SEQ ID NO: 30342 - protein, 6 aa, synthetic construct
PPESAF

SEQ ID NO: 30343 - protein, 6 aa, synthetic construct
PPESAW

SEQ ID NO: 30344 - protein, 6 aa, synthetic construct
PPESAY

SEQ ID NO: 30345 - protein, 6 aa, synthetic construct
PPESRD

SEQ ID NO: 30346 - protein, 6 aa, synthetic construct
PPESRE

SEQ ID NO: 30347 - protein, 6 aa, synthetic construct
PPESRF

SEQ ID NO: 30348 - protein, 6 aa, synthetic construct
PPESRW

SEQ ID NO: 30349 - protein, 6 aa, synthetic construct
PPESRY

SEQ ID NO: 30350 - protein, 6 aa, synthetic construct
PPESND

SEQ ID NO: 30351 - protein, 6 aa, synthetic construct
PPESNE

SEQ ID NO: 30352 - protein, 6 aa, synthetic construct
PPESNF

SEQ ID NO: 30353 - protein, 6 aa, synthetic construct
PPESNW

SEQ ID NO: 30354 - protein, 6 aa, synthetic construct
PPESNY

SEQ ID NO: 30355 - protein, 6 aa, synthetic construct
PPESDD

SEQ ID NO: 30356 - protein, 6 aa, synthetic construct
PPESDE

SEQ ID NO: 30357 - protein, 6 aa, synthetic construct
PPESDF

SEQ ID NO: 30358 - protein, 6 aa, synthetic construct
PPESDW

SEQ ID NO: 30359 - protein, 6 aa, synthetic construct
PPESDY

SEQ ID NO: 30360 - protein, 6 aa, synthetic construct
PPESCD

SEQ ID NO: 30361 - protein, 6 aa, synthetic construct
PPESCE

SEQ ID NO: 30362 - protein, 6 aa, synthetic construct
PPESCF

SEQ ID NO: 30363 - protein, 6 aa, synthetic construct
PPESCW

SEQ ID NO: 30364 - protein, 6 aa, synthetic construct
PPESCY

SEQ ID NO: 30365 - protein, 6 aa, synthetic construct
PPESQD

SEQ ID NO: 30366 - protein, 6 aa, synthetic construct
PPESQE

SEQ ID NO: 30367 - protein, 6 aa, synthetic construct
PPESQF

SEQ ID NO: 30368 - protein, 6 aa, synthetic construct
PPESQW

SEQ ID NO: 30369 - protein, 6 aa, synthetic construct
PPESQY

SEQ ID NO: 30370 - protein, 6 aa, synthetic construct
PPESED

SEQ ID NO: 30371 - protein, 6 aa, synthetic construct
PPESEE

SEQ ID NO: 30372 - protein, 6 aa, synthetic construct
PPESEF

SEQ ID NO: 30373 - protein, 6 aa, synthetic construct
PPESEW

SEQ ID NO: 30374 - protein, 6 aa, synthetic construct
PPESEY

SEQ ID NO: 30375 - protein, 6 aa, synthetic construct
PPESGD

SEQ ID NO: 30376 - protein, 6 aa, synthetic construct
PPESGE

SEQ ID NO: 30377 - protein, 6 aa, synthetic construct
PPESGF

SEQ ID NO: 30378 - protein, 6 aa, synthetic construct
PPESGW

SEQ ID NO: 30379 - protein, 6 aa, synthetic construct
PPESGY

SEQ ID NO: 30380 - protein, 6 aa, synthetic construct
PPESHD

SEQ ID NO: 30381 - protein, 6 aa, synthetic construct
PPESHE

SEQ ID NO: 30382 - protein, 6 aa, synthetic construct
PPESHF

SEQ ID NO: 30383 - protein, 6 aa, synthetic construct
PPESHW

SEQ ID NO: 30384 - protein, 6 aa, synthetic construct
PPESHY

SEQ ID NO: 30385 - protein, 6 aa, synthetic construct
PPESID

SEQ ID NO: 30386 - protein, 6 aa, synthetic construct
PPESIE

SEQ ID NO: 30387 - protein, 6 aa, synthetic construct
PPESIF

SEQ ID NO: 30388 - protein, 6 aa, synthetic construct
PPESIW

SEQ ID NO: 30389 - protein, 6 aa, synthetic construct
PPESIY

SEQ ID NO: 30390 - protein, 6 aa, synthetic construct
PPESLD

SEQ ID NO: 30391 - protein, 6 aa, synthetic construct
PPESLE

SEQ ID NO: 30392 - protein, 6 aa, synthetic construct
PPESLF

SEQ ID NO: 30393 - protein, 6 aa, synthetic construct
PPESLW

SEQ ID NO: 30394 - protein, 6 aa, synthetic construct
PPESLY

SEQ ID NO: 30395 - protein, 6 aa, synthetic construct
PPESKD

SEQ ID NO: 30396 - protein, 6 aa, synthetic construct
PPESKE

SEQ ID NO: 30397 - protein, 6 aa, synthetic construct
PPESKF

SEQ ID NO: 30398 - protein, 6 aa, synthetic construct
PPESKW

SEQ ID NO: 30399 - protein, 6 aa, synthetic construct
PPESKY

SEQ ID NO: 30400 - protein, 6 aa, synthetic construct
PPESMD

SEQ ID NO: 30401 - protein, 6 aa, synthetic construct
PPESME

SEQ ID NO: 30402 - protein, 6 aa, synthetic construct
PPESMF

SEQ ID NO: 30403 - protein, 6 aa, synthetic construct
PPESMW

SEQ ID NO: 30404 - protein, 6 aa, synthetic construct
PPESMY

SEQ ID NO: 30405 - protein, 6 aa, synthetic construct
PPESFD

SEQ ID NO: 30406 - protein, 6 aa, synthetic construct
PPESFE

SEQ ID NO: 30407 - protein, 6 aa, synthetic construct
PPESFF

SEQ ID NO: 30408 - protein, 6 aa, synthetic construct
PPESFW

SEQ ID NO: 30409 - protein, 6 aa, synthetic construct
PPESFY

SEQ ID NO: 30410 - protein, 6 aa, synthetic construct
PPESPD

SEQ ID NO: 30411 - protein, 6 aa, synthetic construct
PPESPE

SEQ ID NO: 30412 - protein, 6 aa, synthetic construct
PPESPF

SEQ ID NO: 30413 - protein, 6 aa, synthetic construct
PPESPW

SEQ ID NO: 30414 - protein, 6 aa, synthetic construct
PPESPY

SEQ ID NO: 30415 - protein, 6 aa, synthetic construct
PPESSD

SEQ ID NO: 30416 - protein, 6 aa, synthetic construct
PPESSE

SEQ ID NO: 30417 - protein, 6 aa, synthetic construct
PPESSF

SEQ ID NO: 30418 - protein, 6 aa, synthetic construct
PPESSW

SEQ ID NO: 30419 - protein, 6 aa, synthetic construct
PPESSY

SEQ ID NO: 30420 - protein, 6 aa, synthetic construct
PPESTD

SEQ ID NO: 30421 - protein, 6 aa, synthetic construct
PPESTE

SEQ ID NO: 30422 - protein, 6 aa, synthetic construct
PPESTF

SEQ ID NO: 30423 - protein, 6 aa, synthetic construct
PPESTW

SEQ ID NO: 30424 - protein, 6 aa, synthetic construct
PPESTY

SEQ ID NO: 30425 - protein, 6 aa, synthetic construct
PPESWD

SEQ ID NO: 30426 - protein, 6 aa, synthetic construct
PPESWE

SEQ ID NO: 30427 - protein, 6 aa, synthetic construct
PPESWF

SEQ ID NO: 30428 - protein, 6 aa, synthetic construct
PPESWW

SEQ ID NO: 30429 - protein, 6 aa, synthetic construct
PPESWY

SEQ ID NO: 30430 - protein, 6 aa, synthetic construct
PPESYD

SEQ ID NO: 30431 - protein, 6 aa, synthetic construct
PPESYE

SEQ ID NO: 30432 - protein, 6 aa, synthetic construct
PPESYF

SEQ ID NO: 30433 - protein, 6 aa, synthetic construct
PPESYW

SEQ ID NO: 30434 - protein, 6 aa, synthetic construct
PPESYY

SEQ ID NO: 30435 - protein, 6 aa, synthetic construct
PPESVD

SEQ ID NO: 30436 - protein, 6 aa, synthetic construct
PPESVE

SEQ ID NO: 30437 - protein, 6 aa, synthetic construct
PPESVF

SEQ ID NO: 30438 - protein, 6 aa, synthetic construct
PPESVW

SEQ ID NO: 30439 - protein, 6 aa, synthetic construct
PPESVY

SEQ ID NO: 30440 - protein, 6 aa, synthetic construct
PPETAD

SEQ ID NO: 30441 - protein, 6 aa, synthetic construct
PPETAE

SEQ ID NO: 30442 - protein, 6 aa, synthetic construct
PPETAF

SEQ ID NO: 30443 - protein, 6 aa, synthetic construct
PPETAW

SEQ ID NO: 30444 - protein, 6 aa, synthetic construct
PPETAY

SEQ ID NO: 30445 - protein, 6 aa, synthetic construct
PPETRD

SEQ ID NO: 30446 - protein, 6 aa, synthetic construct
PPETRE

SEQ ID NO: 30447 - protein, 6 aa, synthetic construct
PPETRF

SEQ ID NO: 30448 - protein, 6 aa, synthetic construct
PPETRW

SEQ ID NO: 30449 - protein, 6 aa, synthetic construct
PPETRY

SEQ ID NO: 30450 - protein, 6 aa, synthetic construct
PPETND

SEQ ID NO: 30451 - protein, 6 aa, synthetic construct
PPETNE

SEQ ID NO: 30452 - protein, 6 aa, synthetic construct
PPETNF

SEQ ID NO: 30453 - protein, 6 aa, synthetic construct
PPETNW

SEQ ID NO: 30454 - protein, 6 aa, synthetic construct
PPETNY

SEQ ID NO: 30455 - protein, 6 aa, synthetic construct
PPETDD

SEQ ID NO: 30456 - protein, 6 aa, synthetic construct
PPETDE

SEQ ID NO: 30457 - protein, 6 aa, synthetic construct
PPETDF

SEQ ID NO: 30458 - protein, 6 aa, synthetic construct
PPETDW

SEQ ID NO: 30459 - protein, 6 aa, synthetic construct
PPETDY

SEQ ID NO: 30460 - protein, 6 aa, synthetic construct
PPETCD

SEQ ID NO: 30461 - protein, 6 aa, synthetic construct
PPETCE

SEQ ID NO: 30462 - protein, 6 aa, synthetic construct
PPETCF

SEQ ID NO: 30463 - protein, 6 aa, synthetic construct
PPETCW

SEQ ID NO: 30464 - protein, 6 aa, synthetic construct
PPETCY

SEQ ID NO: 30465 - protein, 6 aa, synthetic construct
PPETQD

SEQ ID NO: 30466 - protein, 6 aa, synthetic construct
PPETQE

SEQ ID NO: 30467 - protein, 6 aa, synthetic construct
PPETQF

SEQ ID NO: 30468 - protein, 6 aa, synthetic construct
PPETQW

SEQ ID NO: 30469 - protein, 6 aa, synthetic construct
PPETQY

SEQ ID NO: 30470 - protein, 6 aa, synthetic construct
PPETED

SEQ ID NO: 30471 - protein, 6 aa, synthetic construct
PPETEE

SEQ ID NO: 30472 - protein, 6 aa, synthetic construct
PPETEF

SEQ ID NO: 30473 - protein, 6 aa, synthetic construct
PPETEW

SEQ ID NO: 30474 - protein, 6 aa, synthetic construct
PPETEY

SEQ ID NO: 30475 - protein, 6 aa, synthetic construct
PPETGD

SEQ ID NO: 30476 - protein, 6 aa, synthetic construct
PPETGE

SEQ ID NO: 30477 - protein, 6 aa, synthetic construct
PPETGF

SEQ ID NO: 30478 - protein, 6 aa, synthetic construct
PPETGW

SEQ ID NO: 30479 - protein, 6 aa, synthetic construct
PPETGY

SEQ ID NO: 30480 - protein, 6 aa, synthetic construct
PPETHD

SEQ ID NO: 30481 - protein, 6 aa, synthetic construct
PPETHE

SEQ ID NO: 30482 - protein, 6 aa, synthetic construct
PPETHF

SEQ ID NO: 30483 - protein, 6 aa, synthetic construct
PPETHW

SEQ ID NO: 30484 - protein, 6 aa, synthetic construct
PPETHY

SEQ ID NO: 30485 - protein, 6 aa, synthetic construct
PPETID

SEQ ID NO: 30486 - protein, 6 aa, synthetic construct
PPETIE

SEQ ID NO: 30487 - protein, 6 aa, synthetic construct
PPETIF

SEQ ID NO: 30488 - protein, 6 aa, synthetic construct
PPETIW

SEQ ID NO: 30489 - protein, 6 aa, synthetic construct
PPETIY

SEQ ID NO: 30490 - protein, 6 aa, synthetic construct
PPETLD

SEQ ID NO: 30491 - protein, 6 aa, synthetic construct
PPETLE

SEQ ID NO: 30492 - protein, 6 aa, synthetic construct
PPETLF

SEQ ID NO: 30493 - protein, 6 aa, synthetic construct
PPETLW

SEQ ID NO: 30494 - protein, 6 aa, synthetic construct
PPETLY

SEQ ID NO: 30495 - protein, 6 aa, synthetic construct
PPETKD

SEQ ID NO: 30496 - protein, 6 aa, synthetic construct
PPETKE

SEQ ID NO: 30497 - protein, 6 aa, synthetic construct
PPETKF

SEQ ID NO: 30498 - protein, 6 aa, synthetic construct
PPETKW

SEQ ID NO: 30499 - protein, 6 aa, synthetic construct
PPETKY

SEQ ID NO: 30500 - protein, 6 aa, synthetic construct
PPETMD

SEQ ID NO: 30501 - protein, 6 aa, synthetic construct
PPETME

SEQ ID NO: 30502 - protein, 6 aa, synthetic construct
PPETMF

SEQ ID NO: 30503 - protein, 6 aa, synthetic construct
PPETMW

SEQ ID NO: 30504 - protein, 6 aa, synthetic construct
PPETMY

SEQ ID NO: 30505 - protein, 6 aa, synthetic construct
PPETFD

SEQ ID NO: 30506 - protein, 6 aa, synthetic construct
PPETFE

SEQ ID NO: 30507 - protein, 6 aa, synthetic construct
PPETFF

SEQ ID NO: 30508 - protein, 6 aa, synthetic construct
PPETFW

SEQ ID NO: 30509 - protein, 6 aa, synthetic construct
PPETFY

SEQ ID NO: 30510 - protein, 6 aa, synthetic construct
PPETPD

SEQ ID NO: 30511 - protein, 6 aa, synthetic construct
PPETPE

SEQ ID NO: 30512 - protein, 6 aa, synthetic construct
PPETPF

SEQ ID NO: 30513 - protein, 6 aa, synthetic construct
PPETPW

SEQ ID NO: 30514 - protein, 6 aa, synthetic construct
PPETPY

SEQ ID NO: 30515 - protein, 6 aa, synthetic construct
PPETSD

SEQ ID NO: 30516 - protein, 6 aa, synthetic construct
PPETSE

SEQ ID NO: 30517 - protein, 6 aa, synthetic construct
PPETSF

SEQ ID NO: 30518 - protein, 6 aa, synthetic construct
PPETSW

SEQ ID NO: 30519 - protein, 6 aa, synthetic construct
PPETSY

SEQ ID NO: 30520 - protein, 6 aa, synthetic construct
PPETTD

SEQ ID NO: 30521 - protein, 6 aa, synthetic construct
PPETTE

SEQ ID NO: 30522 - protein, 6 aa, synthetic construct
PPETTF

SEQ ID NO: 30523 - protein, 6 aa, synthetic construct
PPETTW

SEQ ID NO: 30524 - protein, 6 aa, synthetic construct
PPETTY

SEQ ID NO: 30525 - protein, 6 aa, synthetic construct
PPETWD

SEQ ID NO: 30526 - protein, 6 aa, synthetic construct
PPETWE

SEQ ID NO: 30527 - protein, 6 aa, synthetic construct
PPETWF

SEQ ID NO: 30528 - protein, 6 aa, synthetic construct
PPETWW

SEQ ID NO: 30529 - protein, 6 aa, synthetic construct
PPETWY

SEQ ID NO: 30530 - protein, 6 aa, synthetic construct
PPETYD

SEQ ID NO: 30531 - protein, 6 aa, synthetic construct
PPETYE

SEQ ID NO: 30532 - protein, 6 aa, synthetic construct
PPETYF

SEQ ID NO: 30533 - protein, 6 aa, synthetic construct
PPETYW

SEQ ID NO: 30534 - protein, 6 aa, synthetic construct
PPETYY

SEQ ID NO: 30535 - protein, 6 aa, synthetic construct
PPETVD

SEQ ID NO: 30536 - protein, 6 aa, synthetic construct
PPETVE

SEQ ID NO: 30537 - protein, 6 aa, synthetic construct
PPETVF

SEQ ID NO: 30538 - protein, 6 aa, synthetic construct
PPETVW

SEQ ID NO: 30539 - protein, 6 aa, synthetic construct
PPETVY

SEQ ID NO: 30540 - protein, 6 aa, synthetic construct
PPEWAD

SEQ ID NO: 30541 - protein, 6 aa, synthetic construct
PPEWAE

SEQ ID NO: 30542 - protein, 6 aa, synthetic construct
PPEWAF

SEQ ID NO: 30543 - protein, 6 aa, synthetic construct
PPEWAW

SEQ ID NO: 30544 - protein, 6 aa, synthetic construct
PPEWAY

SEQ ID NO: 30545 - protein, 6 aa, synthetic construct
PPEWRD

SEQ ID NO: 30546 - protein, 6 aa, synthetic construct
PPEWRE

SEQ ID NO: 30547 - protein, 6 aa, synthetic construct
PPEWRF

SEQ ID NO: 30548 - protein, 6 aa, synthetic construct
PPEWRW

SEQ ID NO: 30549 - protein, 6 aa, synthetic construct
PPEWRY

SEQ ID NO: 30550 - protein, 6 aa, synthetic construct
PPEWND

SEQ ID NO: 30551 - protein, 6 aa, synthetic construct
PPEWNE

SEQ ID NO: 30552 - protein, 6 aa, synthetic construct
PPEWNF

SEQ ID NO: 30553 - protein, 6 aa, synthetic construct
PPEWNW

SEQ ID NO: 30554 - protein, 6 aa, synthetic construct
PPEWNY

SEQ ID NO: 30555 - protein, 6 aa, synthetic construct
PPEWDD

SEQ ID NO: 30556 - protein, 6 aa, synthetic construct
PPEWDE

SEQ ID NO: 30557 - protein, 6 aa, synthetic construct
PPEWDF

SEQ ID NO: 30558 - protein, 6 aa, synthetic construct
PPEWDW

SEQ ID NO: 30559 - protein, 6 aa, synthetic construct
PPEWDY

SEQ ID NO: 30560 - protein, 6 aa, synthetic construct
PPEWCD

SEQ ID NO: 30561 - protein, 6 aa, synthetic construct
PPEWCE

SEQ ID NO: 30562 - protein, 6 aa, synthetic construct
PPEWCF

SEQ ID NO: 30563 - protein, 6 aa, synthetic construct
PPEWCW

SEQ ID NO: 30564 - protein, 6 aa, synthetic construct
PPEWCY

SEQ ID NO: 30565 - protein, 6 aa, synthetic construct
PPEWQD

SEQ ID NO: 30566 - protein, 6 aa, synthetic construct
PPEWQE

SEQ ID NO: 30567 - protein, 6 aa, synthetic construct
PPEWQF

SEQ ID NO: 30568 - protein, 6 aa, synthetic construct
PPEWQW

SEQ ID NO: 30569 - protein, 6 aa, synthetic construct
PPEWQY

SEQ ID NO: 30570 - protein, 6 aa, synthetic construct
PPEWED

SEQ ID NO: 30571 - protein, 6 aa, synthetic construct
PPEWEE

SEQ ID NO: 30572 - protein, 6 aa, synthetic construct
PPEWEF

SEQ ID NO: 30573 - protein, 6 aa, synthetic construct
PPEWEW

SEQ ID NO: 30574 - protein, 6 aa, synthetic construct
PPEWEY

SEQ ID NO: 30575 - protein, 6 aa, synthetic construct
PPEWGD

SEQ ID NO: 30576 - protein, 6 aa, synthetic construct
PPEWGE

SEQ ID NO: 30577 - protein, 6 aa, synthetic construct
PPEWGF

SEQ ID NO: 30578 - protein, 6 aa, synthetic construct
PPEWGW

SEQ ID NO: 30579 - protein, 6 aa, synthetic construct
PPEWGY

SEQ ID NO: 30580 - protein, 6 aa, synthetic construct
PPEWHD

SEQ ID NO: 30581 - protein, 6 aa, synthetic construct
PPEWHE

SEQ ID NO: 30582 - protein, 6 aa, synthetic construct
PPEWHF

SEQ ID NO: 30583 - protein, 6 aa, synthetic construct
PPEWHW

SEQ ID NO: 30584 - protein, 6 aa, synthetic construct
PPEWHY

SEQ ID NO: 30585 - protein, 6 aa, synthetic construct
PPEWID

SEQ ID NO: 30586 - protein, 6 aa, synthetic construct
PPEWIE

SEQ ID NO: 30587 - protein, 6 aa, synthetic construct
PPEWIF

SEQ ID NO: 30588 - protein, 6 aa, synthetic construct
PPEWIW

SEQ ID NO: 30589 - protein, 6 aa, synthetic construct
PPEWIY

SEQ ID NO: 30590 - protein, 6 aa, synthetic construct
PPEWLD

SEQ ID NO: 30591 - protein, 6 aa, synthetic construct
PPEWLE

SEQ ID NO: 30592 - protein, 6 aa, synthetic construct
PPEWLF

SEQ ID NO: 30593 - protein, 6 aa, synthetic construct
PPEWLW

SEQ ID NO: 30594 - protein, 6 aa, synthetic construct
PPEWLY

SEQ ID NO: 30595 - protein, 6 aa, synthetic construct
PPEWKD

SEQ ID NO: 30596 - protein, 6 aa, synthetic construct
PPEWKE

SEQ ID NO: 30597 - protein, 6 aa, synthetic construct
PPEWKF

SEQ ID NO: 30598 - protein, 6 aa, synthetic construct
PPEWKW

SEQ ID NO: 30599 - protein, 6 aa, synthetic construct
PPEWKY

SEQ ID NO: 30600 - protein, 6 aa, synthetic construct
PPEWMD

SEQ ID NO: 30601 - protein, 6 aa, synthetic construct
PPEWME

SEQ ID NO: 30602 - protein, 6 aa, synthetic construct
PPEWMF

SEQ ID NO: 30603 - protein, 6 aa, synthetic construct
PPEWMW

SEQ ID NO: 30604 - protein, 6 aa, synthetic construct
PPEWMY

SEQ ID NO: 30605 - protein, 6 aa, synthetic construct
PPEWFD

SEQ ID NO: 30606 - protein, 6 aa, synthetic construct
PPEWFE

SEQ ID NO: 30607 - protein, 6 aa, synthetic construct
PPEWFF

SEQ ID NO: 30608 - protein, 6 aa, synthetic construct
PPEWFW

SEQ ID NO: 30609 - protein, 6 aa, synthetic construct
PPEWFY

SEQ ID NO: 30610 - protein, 6 aa, synthetic construct
PPEWPD

SEQ ID NO: 30611 - protein, 6 aa, synthetic construct
PPEWPE

SEQ ID NO: 30612 - protein, 6 aa, synthetic construct
PPEWPF

SEQ ID NO: 30613 - protein, 6 aa, synthetic construct
PPEWPW

SEQ ID NO: 30614 - protein, 6 aa, synthetic construct
PPEWPY

SEQ ID NO: 30615 - protein, 6 aa, synthetic construct
PPEWSD

SEQ ID NO: 30616 - protein, 6 aa, synthetic construct
PPEWSE

SEQ ID NO: 30617 - protein, 6 aa, synthetic construct
PPEWSF

SEQ ID NO: 30618 - protein, 6 aa, synthetic construct
PPEWSW

SEQ ID NO: 30619 - protein, 6 aa, synthetic construct
PPEWSY

SEQ ID NO: 30620 - protein, 6 aa, synthetic construct
PPEWTD

SEQ ID NO: 30621 - protein, 6 aa, synthetic construct
PPEWTE

SEQ ID NO: 30622 - protein, 6 aa, synthetic construct
PPEWTF

SEQ ID NO: 30623 - protein, 6 aa, synthetic construct
PPEWTW

SEQ ID NO: 30624 - protein, 6 aa, synthetic construct
PPEWTY

SEQ ID NO: 30625 - protein, 6 aa, synthetic construct
PPEWWD

SEQ ID NO: 30626 - protein, 6 aa, synthetic construct
PPEWWE

SEQ ID NO: 30627 - protein, 6 aa, synthetic construct
PPEWWF

SEQ ID NO: 30628 - protein, 6 aa, synthetic construct
PPEWWW

SEQ ID NO: 30629 - protein, 6 aa, synthetic construct
PPEWWY

SEQ ID NO: 30630 - protein, 6 aa, synthetic construct
PPEWYD

SEQ ID NO: 30631 - protein, 6 aa, synthetic construct
PPEWYE

SEQ ID NO: 30632 - protein, 6 aa, synthetic construct
PPEWYF

SEQ ID NO: 30633 - protein, 6 aa, synthetic construct
PPEWYW

SEQ ID NO: 30634 - protein, 6 aa, synthetic construct
PPEWYY

SEQ ID NO: 30635 - protein, 6 aa, synthetic construct
PPEWVD

SEQ ID NO: 30636 - protein, 6 aa, synthetic construct
PPEWVE

SEQ ID NO: 30637 - protein, 6 aa, synthetic construct
PPEWVF

SEQ ID NO: 30638 - protein, 6 aa, synthetic construct
PPEWVW

SEQ ID NO: 30639 - protein, 6 aa, synthetic construct
PPEWVY

SEQ ID NO: 30640 - protein, 6 aa, synthetic construct
PPEYAD

SEQ ID NO: 30641 - protein, 6 aa, synthetic construct
PPEYAE

SEQ ID NO: 30642 - protein, 6 aa, synthetic construct
PPEYAF

SEQ ID NO: 30643 - protein, 6 aa, synthetic construct
PPEYAW

SEQ ID NO: 30644 - protein, 6 aa, synthetic construct
PPEYAY

SEQ ID NO: 30645 - protein, 6 aa, synthetic construct
PPEYRD

SEQ ID NO: 30646 - protein, 6 aa, synthetic construct
PPEYRE

SEQ ID NO: 30647 - protein, 6 aa, synthetic construct
PPEYRF

SEQ ID NO: 30648 - protein, 6 aa, synthetic construct
PPEYRW

SEQ ID NO: 30649 - protein, 6 aa, synthetic construct
PPEYRY

SEQ ID NO: 30650 - protein, 6 aa, synthetic construct
PPEYND

SEQ ID NO: 30651 - protein, 6 aa, synthetic construct
PPEYNE

SEQ ID NO: 30652 - protein, 6 aa, synthetic construct
PPEYNF

SEQ ID NO: 30653 - protein, 6 aa, synthetic construct
PPEYNW

SEQ ID NO: 30654 - protein, 6 aa, synthetic construct
PPEYNY

SEQ ID NO: 30655 - protein, 6 aa, synthetic construct
PPEYDD

SEQ ID NO: 30656 - protein, 6 aa, synthetic construct
PPEYDE

SEQ ID NO: 30657 - protein, 6 aa, synthetic construct
PPEYDF

SEQ ID NO: 30658 - protein, 6 aa, synthetic construct
PPEYDW

SEQ ID NO: 30659 - protein, 6 aa, synthetic construct
PPEYDY

SEQ ID NO: 30660 - protein, 6 aa, synthetic construct
PPEYCD

SEQ ID NO: 30661 - protein, 6 aa, synthetic construct
PPEYCE

SEQ ID NO: 30662 - protein, 6 aa, synthetic construct
PPEYCF

SEQ ID NO: 30663 - protein, 6 aa, synthetic construct
PPEYCW

SEQ ID NO: 30664 - protein, 6 aa, synthetic construct
PPEYCY

SEQ ID NO: 30665 - protein, 6 aa, synthetic construct
PPEYQD

SEQ ID NO: 30666 - protein, 6 aa, synthetic construct
PPEYQE

SEQ ID NO: 30667 - protein, 6 aa, synthetic construct
PPEYQF

SEQ ID NO: 30668 - protein, 6 aa, synthetic construct
PPEYQW

SEQ ID NO: 30669 - protein, 6 aa, synthetic construct
PPEYQY

SEQ ID NO: 30670 - protein, 6 aa, synthetic construct
PPEYED

SEQ ID NO: 30671 - protein, 6 aa, synthetic construct
PPEYEE

SEQ ID NO: 30672 - protein, 6 aa, synthetic construct
PPEYEF

SEQ ID NO: 30673 - protein, 6 aa, synthetic construct
PPEYEW

SEQ ID NO: 30674 - protein, 6 aa, synthetic construct
PPEYEY

SEQ ID NO: 30675 - protein, 6 aa, synthetic construct
PPEYGD

SEQ ID NO: 30676 - protein, 6 aa, synthetic construct
PPEYGE

SEQ ID NO: 30677 - protein, 6 aa, synthetic construct
PPEYGF

SEQ ID NO: 30678 - protein, 6 aa, synthetic construct
PPEYGW

SEQ ID NO: 30679 - protein, 6 aa, synthetic construct
PPEYGY

SEQ ID NO: 30680 - protein, 6 aa, synthetic construct
PPEYHD

SEQ ID NO: 30681 - protein, 6 aa, synthetic construct
PPEYHE

SEQ ID NO: 30682 - protein, 6 aa, synthetic construct
PPEYHF

SEQ ID NO: 30683 - protein, 6 aa, synthetic construct
PPEYHW

SEQ ID NO: 30684 - protein, 6 aa, synthetic construct
PPEYHY

SEQ ID NO: 30685 - protein, 6 aa, synthetic construct
PPEYID

SEQ ID NO: 30686 - protein, 6 aa, synthetic construct
PPEYIE

SEQ ID NO: 30687 - protein, 6 aa, synthetic construct
PPEYIF

SEQ ID NO: 30688 - protein, 6 aa, synthetic construct
PPEYIW

SEQ ID NO: 30689 - protein, 6 aa, synthetic construct
PPEYIY

SEQ ID NO: 30690 - protein, 6 aa, synthetic construct
PPEYLD

SEQ ID NO: 30691 - protein, 6 aa, synthetic construct
PPEYLE

SEQ ID NO: 30692 - protein, 6 aa, synthetic construct
PPEYLF

SEQ ID NO: 30693 - protein, 6 aa, synthetic construct
PPEYLW

SEQ ID NO: 30694 - protein, 6 aa, synthetic construct
PPEYLY

SEQ ID NO: 30695 - protein, 6 aa, synthetic construct
PPEYKD

SEQ ID NO: 30696 - protein, 6 aa, synthetic construct
PPEYKE

SEQ ID NO: 30697 - protein, 6 aa, synthetic construct
PPEYKF

SEQ ID NO: 30698 - protein, 6 aa, synthetic construct
PPEYKW

SEQ ID NO: 30699 - protein, 6 aa, synthetic construct
PPEYKY

SEQ ID NO: 30700 - protein, 6 aa, synthetic construct
PPEYMD

SEQ ID NO: 30701 - protein, 6 aa, synthetic construct
PPEYME

SEQ ID NO: 30702 - protein, 6 aa, synthetic construct
PPEYMF

SEQ ID NO: 30703 - protein, 6 aa, synthetic construct
PPEYMW

SEQ ID NO: 30704 - protein, 6 aa, synthetic construct
PPEYMY

SEQ ID NO: 30705 - protein, 6 aa, synthetic construct
PPEYFD

SEQ ID NO: 30706 - protein, 6 aa, synthetic construct
PPEYFE

SEQ ID NO: 30707 - protein, 6 aa, synthetic construct
PPEYFF

SEQ ID NO: 30708 - protein, 6 aa, synthetic construct
PPEYFW

SEQ ID NO: 30709 - protein, 6 aa, synthetic construct
PPEYFY

SEQ ID NO: 30710 - protein, 6 aa, synthetic construct
PPEYPD

SEQ ID NO: 30711 - protein, 6 aa, synthetic construct
PPEYPE

SEQ ID NO: 30712 - protein, 6 aa, synthetic construct
PPEYPF

SEQ ID NO: 30713 - protein, 6 aa, synthetic construct
PPEYPW

SEQ ID NO: 30714 - protein, 6 aa, synthetic construct
PPEYPY

SEQ ID NO: 30715 - protein, 6 aa, synthetic construct
PPEYSD

SEQ ID NO: 30716 - protein, 6 aa, synthetic construct
PPEYSE

SEQ ID NO: 30717 - protein, 6 aa, synthetic construct
PPEYSF

SEQ ID NO: 30718 - protein, 6 aa, synthetic construct
PPEYSW

SEQ ID NO: 30719 - protein, 6 aa, synthetic construct
PPEYSY

SEQ ID NO: 30720 - protein, 6 aa, synthetic construct
PPEYTD

SEQ ID NO: 30721 - protein, 6 aa, synthetic construct
PPEYTE

SEQ ID NO: 30722 - protein, 6 aa, synthetic construct
PPEYTF

SEQ ID NO: 30723 - protein, 6 aa, synthetic construct
PPEYTW

SEQ ID NO: 30724 - protein, 6 aa, synthetic construct
PPEYTY

SEQ ID NO: 30725 - protein, 6 aa, synthetic construct
PPEYWD

SEQ ID NO: 30726 - protein, 6 aa, synthetic construct
PPEYWE

SEQ ID NO: 30727 - protein, 6 aa, synthetic construct
PPEYWF

SEQ ID NO: 30728 - protein, 6 aa, synthetic construct
PPEYWW

SEQ ID NO: 30729 - protein, 6 aa, synthetic construct
PPEYWY

SEQ ID NO: 30730 - protein, 6 aa, synthetic construct
PPEYYD

SEQ ID NO: 30731 - protein, 6 aa, synthetic construct
PPEYYE

SEQ ID NO: 30732 - protein, 6 aa, synthetic construct
PPEYYF

SEQ ID NO: 30733 - protein, 6 aa, synthetic construct
PPEYYW

SEQ ID NO: 30734 - protein, 6 aa, synthetic construct
PPEYYY

SEQ ID NO: 30735 - protein, 6 aa, synthetic construct
PPEYVD

SEQ ID NO: 30736 - protein, 6 aa, synthetic construct
PPEYVE

SEQ ID NO: 30737 - protein, 6 aa, synthetic construct
PPEYVF

SEQ ID NO: 30738 - protein, 6 aa, synthetic construct
PPEYVW

SEQ ID NO: 30739 - protein, 6 aa, synthetic construct
PPEYVY

SEQ ID NO: 30740 - protein, 6 aa, synthetic construct
PPEVAD

SEQ ID NO: 30741 - protein, 6 aa, synthetic construct
PPEVAE

SEQ ID NO: 30742 - protein, 6 aa, synthetic construct
PPEVAF

SEQ ID NO: 30743 - protein, 6 aa, synthetic construct
PPEVAW

SEQ ID NO: 30744 - protein, 6 aa, synthetic construct
PPEVAY

SEQ ID NO: 30745 - protein, 6 aa, synthetic construct
PPEVRD

SEQ ID NO: 30746 - protein, 6 aa, synthetic construct
PPEVRE

SEQ ID NO: 30747 - protein, 6 aa, synthetic construct
PPEVRF

SEQ ID NO: 30748 - protein, 6 aa, synthetic construct
PPEVRW

SEQ ID NO: 30749 - protein, 6 aa, synthetic construct
PPEVRY

SEQ ID NO: 30750 - protein, 6 aa, synthetic construct
PPEVND

SEQ ID NO: 30751 - protein, 6 aa, synthetic construct
PPEVNE

SEQ ID NO: 30752 - protein, 6 aa, synthetic construct
PPEVNF

SEQ ID NO: 30753 - protein, 6 aa, synthetic construct
PPEVNW

SEQ ID NO: 30754 - protein, 6 aa, synthetic construct
PPEVNY

SEQ ID NO: 30755 - protein, 6 aa, synthetic construct
PPEVDD

SEQ ID NO: 30756 - protein, 6 aa, synthetic construct
PPEVDE

SEQ ID NO: 30757 - protein, 6 aa, synthetic construct
PPEVDF

SEQ ID NO: 30758 - protein, 6 aa, synthetic construct
PPEVDW

SEQ ID NO: 30759 - protein, 6 aa, synthetic construct
PPEVDY

SEQ ID NO: 30760 - protein, 6 aa, synthetic construct
PPEVCD

SEQ ID NO: 30761 - protein, 6 aa, synthetic construct
PPEVCE

SEQ ID NO: 30762 - protein, 6 aa, synthetic construct
PPEVCF

SEQ ID NO: 30763 - protein, 6 aa, synthetic construct
PPEVCW

SEQ ID NO: 30764 - protein, 6 aa, synthetic construct
PPEVCY

SEQ ID NO: 30765 - protein, 6 aa, synthetic construct
PPEVQD

SEQ ID NO: 30766 - protein, 6 aa, synthetic construct
PPEVQE

SEQ ID NO: 30767 - protein, 6 aa, synthetic construct
PPEVQF

SEQ ID NO: 30768 - protein, 6 aa, synthetic construct
PPEVQW

SEQ ID NO: 30769 - protein, 6 aa, synthetic construct
PPEVQY

SEQ ID NO: 30770 - protein, 6 aa, synthetic construct
PPEVED

SEQ ID NO: 30771 - protein, 6 aa, synthetic construct
PPEVEE

SEQ ID NO: 30772 - protein, 6 aa, synthetic construct
PPEVEF

SEQ ID NO: 30773 - protein, 6 aa, synthetic construct
PPEVEW

SEQ ID NO: 30774 - protein, 6 aa, synthetic construct
PPEVEY

SEQ ID NO: 30775 - protein, 6 aa, synthetic construct
PPEVGD

SEQ ID NO: 30776 - protein, 6 aa, synthetic construct
PPEVGE

SEQ ID NO: 30777 - protein, 6 aa, synthetic construct
PPEVGF

SEQ ID NO: 30778 - protein, 6 aa, synthetic construct
PPEVGW

SEQ ID NO: 30779 - protein, 6 aa, synthetic construct
PPEVGY

SEQ ID NO: 30780 - protein, 6 aa, synthetic construct
PPEVHD

SEQ ID NO: 30781 - protein, 6 aa, synthetic construct
PPEVHE

SEQ ID NO: 30782 - protein, 6 aa, synthetic construct
PPEVHF

SEQ ID NO: 30783 - protein, 6 aa, synthetic construct
PPEVHW

SEQ ID NO: 30784 - protein, 6 aa, synthetic construct
PPEVHY

SEQ ID NO: 30785 - protein, 6 aa, synthetic construct
PPEVID

SEQ ID NO: 30786 - protein, 6 aa, synthetic construct
PPEVIE

SEQ ID NO: 30787 - protein, 6 aa, synthetic construct
PPEVIF

SEQ ID NO: 30788 - protein, 6 aa, synthetic construct
PPEVIW

SEQ ID NO: 30789 - protein, 6 aa, synthetic construct
PPEVIY

SEQ ID NO: 30790 - protein, 6 aa, synthetic construct
PPEVLD

SEQ ID NO: 30791 - protein, 6 aa, synthetic construct
PPEVLE

SEQ ID NO: 30792 - protein, 6 aa, synthetic construct
PPEVLF

SEQ ID NO: 30793 - protein, 6 aa, synthetic construct
PPEVLW

SEQ ID NO: 30794 - protein, 6 aa, synthetic construct
PPEVLY

SEQ ID NO: 30795 - protein, 6 aa, synthetic construct
PPEVKD

SEQ ID NO: 30796 - protein, 6 aa, synthetic construct
PPEVKE

SEQ ID NO: 30797 - protein, 6 aa, synthetic construct
PPEVKF

SEQ ID NO: 30798 - protein, 6 aa, synthetic construct
PPEVKW

SEQ ID NO: 30799 - protein, 6 aa, synthetic construct
PPEVKY

SEQ ID NO: 30800 - protein, 6 aa, synthetic construct
PPEVMD

SEQ ID NO: 30801 - protein, 6 aa, synthetic construct
PPEVME

SEQ ID NO: 30802 - protein, 6 aa, synthetic construct
PPEVMF

SEQ ID NO: 30803 - protein, 6 aa, synthetic construct
PPEVMW

SEQ ID NO: 30804 - protein, 6 aa, synthetic construct
PPEVMY

SEQ ID NO: 30805 - protein, 6 aa, synthetic construct
PPEVFD

SEQ ID NO: 30806 - protein, 6 aa, synthetic construct
PPEVFE

SEQ ID NO: 30807 - protein, 6 aa, synthetic construct
PPEVFF

SEQ ID NO: 30808 - protein, 6 aa, synthetic construct
PPEVFW

SEQ ID NO: 30809 - protein, 6 aa, synthetic construct
PPEVFY

SEQ ID NO: 30810 - protein, 6 aa, synthetic construct
PPEVPD

SEQ ID NO: 30811 - protein, 6 aa, synthetic construct
PPEVPE

SEQ ID NO: 30812 - protein, 6 aa, synthetic construct
PPEVPF

SEQ ID NO: 30813 - protein, 6 aa, synthetic construct
PPEVPW

SEQ ID NO: 30814 - protein, 6 aa, synthetic construct
PPEVPY

SEQ ID NO: 30815 - protein, 6 aa, synthetic construct
PPEVSD

SEQ ID NO: 30816 - protein, 6 aa, synthetic construct
PPEVSE

SEQ ID NO: 30817 - protein, 6 aa, synthetic construct
PPEVSF

SEQ ID NO: 30818 - protein, 6 aa, synthetic construct
PPEVSW

SEQ ID NO: 30819 - protein, 6 aa, synthetic construct
PPEVSY

SEQ ID NO: 30820 - protein, 6 aa, synthetic construct
PPEVTD

SEQ ID NO: 30821 - protein, 6 aa, synthetic construct
PPEVTE

SEQ ID NO: 30822 - protein, 6 aa, synthetic construct
PPEVTF

SEQ ID NO: 30823 - protein, 6 aa, synthetic construct
PPEVTW

SEQ ID NO: 30824 - protein, 6 aa, synthetic construct
PPEVTY

SEQ ID NO: 30825 - protein, 6 aa, synthetic construct
PPEVWD

SEQ ID NO: 30826 - protein, 6 aa, synthetic construct
PPEVWE

SEQ ID NO: 30827 - protein, 6 aa, synthetic construct
PPEVWF

SEQ ID NO: 30828 - protein, 6 aa, synthetic construct
PPEVWW

SEQ ID NO: 30829 - protein, 6 aa, synthetic construct
PPEVWY

SEQ ID NO: 30830 - protein, 6 aa, synthetic construct
PPEVYD

SEQ ID NO: 30831 - protein, 6 aa, synthetic construct
PPEVYE

SEQ ID NO: 30832 - protein, 6 aa, synthetic construct
PPEVYF

SEQ ID NO: 30833 - protein, 6 aa, synthetic construct
PPEVYW

SEQ ID NO: 30834 - protein, 6 aa, synthetic construct
PPEVYY

SEQ ID NO: 30835 - protein, 6 aa, synthetic construct
PPEVVD

SEQ ID NO: 30836 - protein, 6 aa, synthetic construct
PPEVVE

SEQ ID NO: 30837 - protein, 6 aa, synthetic construct
PPEVVF

SEQ ID NO: 30838 - protein, 6 aa, synthetic construct
PPEVVW

SEQ ID NO: 30839 - protein, 6 aa, synthetic construct
PPEVVY

SEQ ID NO: 30840 - protein, 6 aa, synthetic construct
PSEAAD

SEQ ID NO: 30841 - protein, 6 aa, synthetic construct
PSEAAE

SEQ ID NO: 30842 - protein, 6 aa, synthetic construct
PSEAAF

SEQ ID NO: 30843 - protein, 6 aa, synthetic construct
PSEAAW

SEQ ID NO: 30844 - protein, 6 aa, synthetic construct
PSEAAY

SEQ ID NO: 30845 - protein, 6 aa, synthetic construct
PSEARD

SEQ ID NO: 30846 - protein, 6 aa, synthetic construct
PSEARE

SEQ ID NO: 30847 - protein, 6 aa, synthetic construct
PSEARF

SEQ ID NO: 30848 - protein, 6 aa, synthetic construct
PSEARW

SEQ ID NO: 30849 - protein, 6 aa, synthetic construct
PSEARY

SEQ ID NO: 30850 - protein, 6 aa, synthetic construct
PSEAND

SEQ ID NO: 30851 - protein, 6 aa, synthetic construct
PSEANE

SEQ ID NO: 30852 - protein, 6 aa, synthetic construct
PSEANF

SEQ ID NO: 30853 - protein, 6 aa, synthetic construct
PSEANW

SEQ ID NO: 30854 - protein, 6 aa, synthetic construct
PSEANY

SEQ ID NO: 30855 - protein, 6 aa, synthetic construct
PSEADD

SEQ ID NO: 30856 - protein, 6 aa, synthetic construct
PSEADE

SEQ ID NO: 30857 - protein, 6 aa, synthetic construct
PSEADF

SEQ ID NO: 30858 - protein, 6 aa, synthetic construct
PSEADW

SEQ ID NO: 30859 - protein, 6 aa, synthetic construct
PSEADY

SEQ ID NO: 30860 - protein, 6 aa, synthetic construct
PSEACD

SEQ ID NO: 30861 - protein, 6 aa, synthetic construct
PSEACE

SEQ ID NO: 30862 - protein, 6 aa, synthetic construct
PSEACF

SEQ ID NO: 30863 - protein, 6 aa, synthetic construct
PSEACW

SEQ ID NO: 30864 - protein, 6 aa, synthetic construct
PSEACY

SEQ ID NO: 30865 - protein, 6 aa, synthetic construct
PSEAQD

SEQ ID NO: 30866 - protein, 6 aa, synthetic construct
PSEAQE

SEQ ID NO: 30867 - protein, 6 aa, synthetic construct
PSEAQF

SEQ ID NO: 30868 - protein, 6 aa, synthetic construct
PSEAQW

SEQ ID NO: 30869 - protein, 6 aa, synthetic construct
PSEAQY

SEQ ID NO: 30870 - protein, 6 aa, synthetic construct
PSEAED

SEQ ID NO: 30871 - protein, 6 aa, synthetic construct
PSEAEE

SEQ ID NO: 30872 - protein, 6 aa, synthetic construct
PSEAEF

SEQ ID NO: 30873 - protein, 6 aa, synthetic construct
PSEAEW

SEQ ID NO: 30874 - protein, 6 aa, synthetic construct
PSEAEY

SEQ ID NO: 30875 - protein, 6 aa, synthetic construct
PSEAGD

SEQ ID NO: 30876 - protein, 6 aa, synthetic construct
PSEAGE

SEQ ID NO: 30877 - protein, 6 aa, synthetic construct
PSEAGF

SEQ ID NO: 30878 - protein, 6 aa, synthetic construct
PSEAGW

SEQ ID NO: 30879 - protein, 6 aa, synthetic construct
PSEAGY

SEQ ID NO: 30880 - protein, 6 aa, synthetic construct
PSEAHD

SEQ ID NO: 30881 - protein, 6 aa, synthetic construct
PSEAHE

SEQ ID NO: 30882 - protein, 6 aa, synthetic construct
PSEAHF

SEQ ID NO: 30883 - protein, 6 aa, synthetic construct
PSEAHW

SEQ ID NO: 30884 - protein, 6 aa, synthetic construct
PSEAHY

SEQ ID NO: 30885 - protein, 6 aa, synthetic construct
PSEAID

SEQ ID NO: 30886 - protein, 6 aa, synthetic construct
PSEAIE

SEQ ID NO: 30887 - protein, 6 aa, synthetic construct
PSEAIF

SEQ ID NO: 30888 - protein, 6 aa, synthetic construct
PSEAIW

SEQ ID NO: 30889 - protein, 6 aa, synthetic construct
PSEAIY

SEQ ID NO: 30890 - protein, 6 aa, synthetic construct
PSEALD

SEQ ID NO: 30891 - protein, 6 aa, synthetic construct
PSEALE

SEQ ID NO: 30892 - protein, 6 aa, synthetic construct
PSEALF

SEQ ID NO: 30893 - protein, 6 aa, synthetic construct
PSEALW

SEQ ID NO: 30894 - protein, 6 aa, synthetic construct
PSEALY

SEQ ID NO: 30895 - protein, 6 aa, synthetic construct
PSEAKD

SEQ ID NO: 30896 - protein, 6 aa, synthetic construct
PSEAKE

SEQ ID NO: 30897 - protein, 6 aa, synthetic construct
PSEAKF

SEQ ID NO: 30898 - protein, 6 aa, synthetic construct
PSEAKW

SEQ ID NO: 30899 - protein, 6 aa, synthetic construct
PSEAKY

SEQ ID NO: 30900 - protein, 6 aa, synthetic construct
PSEAMD

SEQ ID NO: 30901 - protein, 6 aa, synthetic construct
PSEAME

SEQ ID NO: 30902 - protein, 6 aa, synthetic construct
PSEAMF

SEQ ID NO: 30903 - protein, 6 aa, synthetic construct
PSEAMW

SEQ ID NO: 30904 - protein, 6 aa, synthetic construct
PSEAMY

SEQ ID NO: 30905 - protein, 6 aa, synthetic construct
PSEAFD

SEQ ID NO: 30906 - protein, 6 aa, synthetic construct
PSEAFE

SEQ ID NO: 30907 - protein, 6 aa, synthetic construct
PSEAFF

SEQ ID NO: 30908 - protein, 6 aa, synthetic construct
PSEAFW

SEQ ID NO: 30909 - protein, 6 aa, synthetic construct
PSEAFY

SEQ ID NO: 30910 - protein, 6 aa, synthetic construct
PSEAPD

SEQ ID NO: 30911 - protein, 6 aa, synthetic construct
PSEAPE

SEQ ID NO: 30912 - protein, 6 aa, synthetic construct
PSEAPF

SEQ ID NO: 30913 - protein, 6 aa, synthetic construct
PSEAPW

SEQ ID NO: 30914 - protein, 6 aa, synthetic construct
PSEAPY

SEQ ID NO: 30915 - protein, 6 aa, synthetic construct
PSEASD

SEQ ID NO: 30916 - protein, 6 aa, synthetic construct
PSEASE

SEQ ID NO: 30917 - protein, 6 aa, synthetic construct
PSEASF

SEQ ID NO: 30918 - protein, 6 aa, synthetic construct
PSEASW

SEQ ID NO: 30919 - protein, 6 aa, synthetic construct
PSEASY

SEQ ID NO: 30920 - protein, 6 aa, synthetic construct
PSEATD

SEQ ID NO: 30921 - protein, 6 aa, synthetic construct
PSEATE

SEQ ID NO: 30922 - protein, 6 aa, synthetic construct
PSEATF

SEQ ID NO: 30923 - protein, 6 aa, synthetic construct
PSEATW

SEQ ID NO: 30924 - protein, 6 aa, synthetic construct
PSEATY

SEQ ID NO: 30925 - protein, 6 aa, synthetic construct
PSEAWD

SEQ ID NO: 30926 - protein, 6 aa, synthetic construct
PSEAWE

SEQ ID NO: 30927 - protein, 6 aa, synthetic construct
PSEAWF

SEQ ID NO: 30928 - protein, 6 aa, synthetic construct
PSEAWW

SEQ ID NO: 30929 - protein, 6 aa, synthetic construct
PSEAWY

SEQ ID NO: 30930 - protein, 6 aa, synthetic construct
PSEAYD

SEQ ID NO: 30931 - protein, 6 aa, synthetic construct
PSEAYE

SEQ ID NO: 30932 - protein, 6 aa, synthetic construct
PSEAYF

SEQ ID NO: 30933 - protein, 6 aa, synthetic construct
PSEAYW

SEQ ID NO: 30934 - protein, 6 aa, synthetic construct
PSEAYY

SEQ ID NO: 30935 - protein, 6 aa, synthetic construct
PSEAVD

SEQ ID NO: 30936 - protein, 6 aa, synthetic construct
PSEAVE

SEQ ID NO: 30937 - protein, 6 aa, synthetic construct
PSEAVF

SEQ ID NO: 30938 - protein, 6 aa, synthetic construct
PSEAVW

SEQ ID NO: 30939 - protein, 6 aa, synthetic construct
PSEAVY

SEQ ID NO: 30940 - protein, 6 aa, synthetic construct
PSERAD

SEQ ID NO: 30941 - protein, 6 aa, synthetic construct
PSERAE

SEQ ID NO: 30942 - protein, 6 aa, synthetic construct
PSERAF

SEQ ID NO: 30943 - protein, 6 aa, synthetic construct
PSERAW

SEQ ID NO: 30944 - protein, 6 aa, synthetic construct
PSERAY

SEQ ID NO: 30945 - protein, 6 aa, synthetic construct
PSERRD

SEQ ID NO: 30946 - protein, 6 aa, synthetic construct
PSERRE

SEQ ID NO: 30947 - protein, 6 aa, synthetic construct
PSERRF

SEQ ID NO: 30948 - protein, 6 aa, synthetic construct
PSERRW

SEQ ID NO: 30949 - protein, 6 aa, synthetic construct
PSERRY

SEQ ID NO: 30950 - protein, 6 aa, synthetic construct
PSERND

SEQ ID NO: 30951 - protein, 6 aa, synthetic construct
PSERNE

SEQ ID NO: 30952 - protein, 6 aa, synthetic construct
PSERNF

SEQ ID NO: 30953 - protein, 6 aa, synthetic construct
PSERNW

SEQ ID NO: 30954 - protein, 6 aa, synthetic construct
PSERNY

SEQ ID NO: 30955 - protein, 6 aa, synthetic construct
PSERDD

SEQ ID NO: 30956 - protein, 6 aa, synthetic construct
PSERDE

SEQ ID NO: 30957 - protein, 6 aa, synthetic construct
PSERDF

SEQ ID NO: 30958 - protein, 6 aa, synthetic construct
PSERDW

SEQ ID NO: 30959 - protein, 6 aa, synthetic construct
PSERDY

SEQ ID NO: 30960 - protein, 6 aa, synthetic construct
PSERCD

SEQ ID NO: 30961 - protein, 6 aa, synthetic construct
PSERCE

SEQ ID NO: 30962 - protein, 6 aa, synthetic construct
PSERCF

SEQ ID NO: 30963 - protein, 6 aa, synthetic construct
PSERCW

SEQ ID NO: 30964 - protein, 6 aa, synthetic construct
PSERCY

SEQ ID NO: 30965 - protein, 6 aa, synthetic construct
PSERQD

SEQ ID NO: 30966 - protein, 6 aa, synthetic construct
PSERQE

SEQ ID NO: 30967 - protein, 6 aa, synthetic construct
PSERQF

SEQ ID NO: 30968 - protein, 6 aa, synthetic construct
PSERQW

SEQ ID NO: 30969 - protein, 6 aa, synthetic construct
PSERQY

SEQ ID NO: 30970 - protein, 6 aa, synthetic construct
PSERED

SEQ ID NO: 30971 - protein, 6 aa, synthetic construct
PSEREE

SEQ ID NO: 30972 - protein, 6 aa, synthetic construct
PSEREF

SEQ ID NO: 30973 - protein, 6 aa, synthetic construct
PSEREW

SEQ ID NO: 30974 - protein, 6 aa, synthetic construct
PSEREY

SEQ ID NO: 30975 - protein, 6 aa, synthetic construct
PSERGD

SEQ ID NO: 30976 - protein, 6 aa, synthetic construct
PSERGE

SEQ ID NO: 30977 - protein, 6 aa, synthetic construct
PSERGF

SEQ ID NO: 30978 - protein, 6 aa, synthetic construct
PSERGW

SEQ ID NO: 30979 - protein, 6 aa, synthetic construct
PSERGY

SEQ ID NO: 30980 - protein, 6 aa, synthetic construct
PSERHD

SEQ ID NO: 30981 - protein, 6 aa, synthetic construct
PSERHE

SEQ ID NO: 30982 - protein, 6 aa, synthetic construct
PSERHF

SEQ ID NO: 30983 - protein, 6 aa, synthetic construct
PSERHW

SEQ ID NO: 30984 - protein, 6 aa, synthetic construct
PSERHY

SEQ ID NO: 30985 - protein, 6 aa, synthetic construct
PSERID

SEQ ID NO: 30986 - protein, 6 aa, synthetic construct
PSERIE

SEQ ID NO: 30987 - protein, 6 aa, synthetic construct
PSERIF

SEQ ID NO: 30988 - protein, 6 aa, synthetic construct
PSERIW

SEQ ID NO: 30989 - protein, 6 aa, synthetic construct
PSERIY

SEQ ID NO: 30990 - protein, 6 aa, synthetic construct
PSERLD

SEQ ID NO: 30991 - protein, 6 aa, synthetic construct
PSERLE

SEQ ID NO: 30992 - protein, 6 aa, synthetic construct
PSERLF

SEQ ID NO: 30993 - protein, 6 aa, synthetic construct
PSERLW

SEQ ID NO: 30994 - protein, 6 aa, synthetic construct
PSERLY

SEQ ID NO: 30995 - protein, 6 aa, synthetic construct
PSERKD

SEQ ID NO: 30996 - protein, 6 aa, synthetic construct
PSERKE

SEQ ID NO: 30997 - protein, 6 aa, synthetic construct
PSERKF

SEQ ID NO: 30998 - protein, 6 aa, synthetic construct
PSERKW

SEQ ID NO: 30999 - protein, 6 aa, synthetic construct
PSERKY

SEQ ID NO: 31000 - protein, 6 aa, synthetic construct
PSERMD

SEQ ID NO: 31001 - protein, 6 aa, synthetic construct
PSERME

SEQ ID NO: 31002 - protein, 6 aa, synthetic construct
PSERMF

SEQ ID NO: 31003 - protein, 6 aa, synthetic construct
PSERMW

SEQ ID NO: 31004 - protein, 6 aa, synthetic construct
PSERMY

SEQ ID NO: 31005 - protein, 6 aa, synthetic construct
PSERFD

SEQ ID NO: 31006 - protein, 6 aa, synthetic construct
PSERFE

SEQ ID NO: 31007 - protein, 6 aa, synthetic construct
PSERFF

SEQ ID NO: 31008 - protein, 6 aa, synthetic construct
PSERFW

SEQ ID NO: 31009 - protein, 6 aa, synthetic construct
PSERFY

SEQ ID NO: 31010 - protein, 6 aa, synthetic construct
PSERPD

SEQ ID NO: 31011 - protein, 6 aa, synthetic construct
PSERPE

SEQ ID NO: 31012 - protein, 6 aa, synthetic construct
PSERPF

SEQ ID NO: 31013 - protein, 6 aa, synthetic construct
PSERPW

SEQ ID NO: 31014 - protein, 6 aa, synthetic construct
PSERPY

SEQ ID NO: 31015 - protein, 6 aa, synthetic construct
PSERSD

SEQ ID NO: 31016 - protein, 6 aa, synthetic construct
PSERSE

SEQ ID NO: 31017 - protein, 6 aa, synthetic construct
PSERSF

SEQ ID NO: 31018 - protein, 6 aa, synthetic construct
PSERSW

SEQ ID NO: 31019 - protein, 6 aa, synthetic construct
PSERSY

SEQ ID NO: 31020 - protein, 6 aa, synthetic construct
PSERTD

SEQ ID NO: 31021 - protein, 6 aa, synthetic construct
PSERTE

SEQ ID NO: 31022 - protein, 6 aa, synthetic construct
PSERTF

SEQ ID NO: 31023 - protein, 6 aa, synthetic construct
PSERTW

SEQ ID NO: 31024 - protein, 6 aa, synthetic construct
PSERTY

SEQ ID NO: 31025 - protein, 6 aa, synthetic construct
PSERWD

SEQ ID NO: 31026 - protein, 6 aa, synthetic construct
PSERWE

SEQ ID NO: 31027 - protein, 6 aa, synthetic construct
PSERWF

SEQ ID NO: 31028 - protein, 6 aa, synthetic construct
PSERWW

SEQ ID NO: 31029 - protein, 6 aa, synthetic construct
PSERWY

SEQ ID NO: 31030 - protein, 6 aa, synthetic construct
PSERYD

SEQ ID NO: 31031 - protein, 6 aa, synthetic construct
PSERYE

SEQ ID NO: 31032 - protein, 6 aa, synthetic construct
PSERYF

SEQ ID NO: 31033 - protein, 6 aa, synthetic construct
PSERYW

SEQ ID NO: 31034 - protein, 6 aa, synthetic construct
PSERYY

SEQ ID NO: 31035 - protein, 6 aa, synthetic construct
PSERVD

SEQ ID NO: 31036 - protein, 6 aa, synthetic construct
PSERVE

SEQ ID NO: 31037 - protein, 6 aa, synthetic construct
PSERVF

SEQ ID NO: 31038 - protein, 6 aa, synthetic construct
PSERVW

SEQ ID NO: 31039 - protein, 6 aa, synthetic construct
PSERVY

SEQ ID NO: 31040 - protein, 6 aa, synthetic construct
PSENAD

SEQ ID NO: 31041 - protein, 6 aa, synthetic construct
PSENAE

SEQ ID NO: 31042 - protein, 6 aa, synthetic construct
PSENAF

SEQ ID NO: 31043 - protein, 6 aa, synthetic construct
PSENAW

SEQ ID NO: 31044 - protein, 6 aa, synthetic construct
PSENAY

SEQ ID NO: 31045 - protein, 6 aa, synthetic construct
PSENRD

SEQ ID NO: 31046 - protein, 6 aa, synthetic construct
PSENRE

SEQ ID NO: 31047 - protein, 6 aa, synthetic construct
PSENRF

SEQ ID NO: 31048 - protein, 6 aa, synthetic construct
PSENRW

SEQ ID NO: 31049 - protein, 6 aa, synthetic construct
PSENRY

SEQ ID NO: 31050 - protein, 6 aa, synthetic construct
PSENND

SEQ ID NO: 31051 - protein, 6 aa, synthetic construct
PSENNE

SEQ ID NO: 31052 - protein, 6 aa, synthetic construct
PSENNF

SEQ ID NO: 31053 - protein, 6 aa, synthetic construct
PSENNW

SEQ ID NO: 31054 - protein, 6 aa, synthetic construct
PSENNY

SEQ ID NO: 31055 - protein, 6 aa, synthetic construct
PSENDD

SEQ ID NO: 31056 - protein, 6 aa, synthetic construct
PSENDE

SEQ ID NO: 31057 - protein, 6 aa, synthetic construct
PSENDF

SEQ ID NO: 31058 - protein, 6 aa, synthetic construct
PSENDW

SEQ ID NO: 31059 - protein, 6 aa, synthetic construct
PSENDY

SEQ ID NO: 31060 - protein, 6 aa, synthetic construct
PSENCD

SEQ ID NO: 31061 - protein, 6 aa, synthetic construct
PSENCE

SEQ ID NO: 31062 - protein, 6 aa, synthetic construct
PSENCF

SEQ ID NO: 31063 - protein, 6 aa, synthetic construct
PSENCW

SEQ ID NO: 31064 - protein, 6 aa, synthetic construct
PSENCY

SEQ ID NO: 31065 - protein, 6 aa, synthetic construct
PSENQD

SEQ ID NO: 31066 - protein, 6 aa, synthetic construct
PSENQE

SEQ ID NO: 31067 - protein, 6 aa, synthetic construct
PSENQF

SEQ ID NO: 31068 - protein, 6 aa, synthetic construct
PSENQW

SEQ ID NO: 31069 - protein, 6 aa, synthetic construct
PSENQY

SEQ ID NO: 31070 - protein, 6 aa, synthetic construct
PSENED

SEQ ID NO: 31071 - protein, 6 aa, synthetic construct
PSENEE

SEQ ID NO: 31072 - protein, 6 aa, synthetic construct
PSENEF

SEQ ID NO: 31073 - protein, 6 aa, synthetic construct
PSENEW

SEQ ID NO: 31074 - protein, 6 aa, synthetic construct
PSENEY

SEQ ID NO: 31075 - protein, 6 aa, synthetic construct
PSENGD

SEQ ID NO: 31076 - protein, 6 aa, synthetic construct
PSENGE

SEQ ID NO: 31077 - protein, 6 aa, synthetic construct
PSENGF

SEQ ID NO: 31078 - protein, 6 aa, synthetic construct
PSENGW

SEQ ID NO: 31079 - protein, 6 aa, synthetic construct
PSENGY

SEQ ID NO: 31080 - protein, 6 aa, synthetic construct
PSENHD

SEQ ID NO: 31081 - protein, 6 aa, synthetic construct
PSENHE

SEQ ID NO: 31082 - protein, 6 aa, synthetic construct
PSENHF

SEQ ID NO: 31083 - protein, 6 aa, synthetic construct
PSENHW

SEQ ID NO: 31084 - protein, 6 aa, synthetic construct
PSENHY

SEQ ID NO: 31085 - protein, 6 aa, synthetic construct
PSENID

SEQ ID NO: 31086 - protein, 6 aa, synthetic construct
PSENIE

SEQ ID NO: 31087 - protein, 6 aa, synthetic construct
PSENIF

SEQ ID NO: 31088 - protein, 6 aa, synthetic construct
PSENIW

SEQ ID NO: 31089 - protein, 6 aa, synthetic construct
PSENIY

SEQ ID NO: 31090 - protein, 6 aa, synthetic construct
PSENLD

SEQ ID NO: 31091 - protein, 6 aa, synthetic construct
PSENLE

SEQ ID NO: 31092 - protein, 6 aa, synthetic construct
PSENLF

SEQ ID NO: 31093 - protein, 6 aa, synthetic construct
PSENLW

SEQ ID NO: 31094 - protein, 6 aa, synthetic construct
PSENLY

SEQ ID NO: 31095 - protein, 6 aa, synthetic construct
PSENKD

SEQ ID NO: 31096 - protein, 6 aa, synthetic construct
PSENKE

SEQ ID NO: 31097 - protein, 6 aa, synthetic construct
PSENKF

SEQ ID NO: 31098 - protein, 6 aa, synthetic construct
PSENKW

SEQ ID NO: 31099 - protein, 6 aa, synthetic construct
PSENKY

SEQ ID NO: 31100 - protein, 6 aa, synthetic construct
PSENMD

SEQ ID NO: 31101 - protein, 6 aa, synthetic construct
PSENME

SEQ ID NO: 31102 - protein, 6 aa, synthetic construct
PSENMF

SEQ ID NO: 31103 - protein, 6 aa, synthetic construct
PSENMW

SEQ ID NO: 31104 - protein, 6 aa, synthetic construct
PSENMY

SEQ ID NO: 31105 - protein, 6 aa, synthetic construct
PSENFD

SEQ ID NO: 31106 - protein, 6 aa, synthetic construct
PSENFE

SEQ ID NO: 31107 - protein, 6 aa, synthetic construct
PSENFF

SEQ ID NO: 31108 - protein, 6 aa, synthetic construct
PSENFW

SEQ ID NO: 31109 - protein, 6 aa, synthetic construct
PSENFY

SEQ ID NO: 31110 - protein, 6 aa, synthetic construct
PSENPD

SEQ ID NO: 31111 - protein, 6 aa, synthetic construct
PSENPE

SEQ ID NO: 31112 - protein, 6 aa, synthetic construct
PSENPF

SEQ ID NO: 31113 - protein, 6 aa, synthetic construct
PSENPW

SEQ ID NO: 31114 - protein, 6 aa, synthetic construct
PSENPY

SEQ ID NO: 31115 - protein, 6 aa, synthetic construct
PSENSD

SEQ ID NO: 31116 - protein, 6 aa, synthetic construct
PSENSE

SEQ ID NO: 31117 - protein, 6 aa, synthetic construct
PSENSF

SEQ ID NO: 31118 - protein, 6 aa, synthetic construct
PSENSW

SEQ ID NO: 31119 - protein, 6 aa, synthetic construct
PSENSY

SEQ ID NO: 31120 - protein, 6 aa, synthetic construct
PSENTD

SEQ ID NO: 31121 - protein, 6 aa, synthetic construct
PSENTE

SEQ ID NO: 31122 - protein, 6 aa, synthetic construct
PSENTF

SEQ ID NO: 31123 - protein, 6 aa, synthetic construct
PSENTW

SEQ ID NO: 31124 - protein, 6 aa, synthetic construct
PSENTY

SEQ ID NO: 31125 - protein, 6 aa, synthetic construct
PSENWD

SEQ ID NO: 31126 - protein, 6 aa, synthetic construct
PSENWE

SEQ ID NO: 31127 - protein, 6 aa, synthetic construct
PSENWF

SEQ ID NO: 31128 - protein, 6 aa, synthetic construct
PSENWW

SEQ ID NO: 31129 - protein, 6 aa, synthetic construct
PSENWY

SEQ ID NO: 31130 - protein, 6 aa, synthetic construct
PSENYD

SEQ ID NO: 31131 - protein, 6 aa, synthetic construct
PSENYE

SEQ ID NO: 31132 - protein, 6 aa, synthetic construct
PSENYF

SEQ ID NO: 31133 - protein, 6 aa, synthetic construct
PSENYW

SEQ ID NO: 31134 - protein, 6 aa, synthetic construct
PSENYY

SEQ ID NO: 31135 - protein, 6 aa, synthetic construct
PSENVD

SEQ ID NO: 31136 - protein, 6 aa, synthetic construct
PSENVE

SEQ ID NO: 31137 - protein, 6 aa, synthetic construct
PSENVF

SEQ ID NO: 31138 - protein, 6 aa, synthetic construct
PSENVW

SEQ ID NO: 31139 - protein, 6 aa, synthetic construct
PSENVY

SEQ ID NO: 31140 - protein, 6 aa, synthetic construct
PSEDAD

SEQ ID NO: 31141 - protein, 6 aa, synthetic construct
PSEDAE

SEQ ID NO: 31142 - protein, 6 aa, synthetic construct
PSEDAF

SEQ ID NO: 31143 - protein, 6 aa, synthetic construct
PSEDAW

SEQ ID NO: 31144 - protein, 6 aa, synthetic construct
PSEDAY

SEQ ID NO: 31145 - protein, 6 aa, synthetic construct
PSEDRD

SEQ ID NO: 31146 - protein, 6 aa, synthetic construct
PSEDRE

SEQ ID NO: 31147 - protein, 6 aa, synthetic construct
PSEDRF

SEQ ID NO: 31148 - protein, 6 aa, synthetic construct
PSEDRW

SEQ ID NO: 31149 - protein, 6 aa, synthetic construct
PSEDRY

SEQ ID NO: 31150 - protein, 6 aa, synthetic construct
PSEDND

SEQ ID NO: 31151 - protein, 6 aa, synthetic construct
PSEDNE

SEQ ID NO: 31152 - protein, 6 aa, synthetic construct
PSEDNF

SEQ ID NO: 31153 - protein, 6 aa, synthetic construct
PSEDNW

SEQ ID NO: 31154 - protein, 6 aa, synthetic construct
PSEDNY

SEQ ID NO: 31155 - protein, 6 aa, synthetic construct
PSEDDD

SEQ ID NO: 31156 - protein, 6 aa, synthetic construct
PSEDDE

SEQ ID NO: 31157 - protein, 6 aa, synthetic construct
PSEDDF

SEQ ID NO: 31158 - protein, 6 aa, synthetic construct
PSEDDW

SEQ ID NO: 31159 - protein, 6 aa, synthetic construct
PSEDDY

SEQ ID NO: 31160 - protein, 6 aa, synthetic construct
PSEDCD

SEQ ID NO: 31161 - protein, 6 aa, synthetic construct
PSEDCE

SEQ ID NO: 31162 - protein, 6 aa, synthetic construct
PSEDCF

SEQ ID NO: 31163 - protein, 6 aa, synthetic construct
PSEDCW

SEQ ID NO: 31164 - protein, 6 aa, synthetic construct
PSEDCY

SEQ ID NO: 31165 - protein, 6 aa, synthetic construct
PSEDQD

SEQ ID NO: 31166 - protein, 6 aa, synthetic construct
PSEDQE

SEQ ID NO: 31167 - protein, 6 aa, synthetic construct
PSEDQF

SEQ ID NO: 31168 - protein, 6 aa, synthetic construct
PSEDQW

SEQ ID NO: 31169 - protein, 6 aa, synthetic construct
PSEDQY

SEQ ID NO: 31170 - protein, 6 aa, synthetic construct
PSEDED

SEQ ID NO: 31171 - protein, 6 aa, synthetic construct
PSEDEE

SEQ ID NO: 31172 - protein, 6 aa, synthetic construct
PSEDEF

SEQ ID NO: 31173 - protein, 6 aa, synthetic construct
PSEDEW

SEQ ID NO: 31174 - protein, 6 aa, synthetic construct
PSEDEY

SEQ ID NO: 31175 - protein, 6 aa, synthetic construct
PSEDGD

SEQ ID NO: 31176 - protein, 6 aa, synthetic construct
PSEDGE

SEQ ID NO: 31177 - protein, 6 aa, synthetic construct
PSEDGF

SEQ ID NO: 31178 - protein, 6 aa, synthetic construct
PSEDGW

SEQ ID NO: 31179 - protein, 6 aa, synthetic construct
PSEDGY

SEQ ID NO: 31180 - protein, 6 aa, synthetic construct
PSEDHD

SEQ ID NO: 31181 - protein, 6 aa, synthetic construct
PSEDHE

SEQ ID NO: 31182 - protein, 6 aa, synthetic construct
PSEDHF

SEQ ID NO: 31183 - protein, 6 aa, synthetic construct
PSEDHW

SEQ ID NO: 31184 - protein, 6 aa, synthetic construct
PSEDHY

SEQ ID NO: 31185 - protein, 6 aa, synthetic construct
PSEDID

SEQ ID NO: 31186 - protein, 6 aa, synthetic construct
PSEDIE

SEQ ID NO: 31187 - protein, 6 aa, synthetic construct
PSEDIF

SEQ ID NO: 31188 - protein, 6 aa, synthetic construct
PSEDIW

SEQ ID NO: 31189 - protein, 6 aa, synthetic construct
PSEDIY

SEQ ID NO: 31190 - protein, 6 aa, synthetic construct
PSEDLD

SEQ ID NO: 31191 - protein, 6 aa, synthetic construct
PSEDLE

SEQ ID NO: 31192 - protein, 6 aa, synthetic construct
PSEDLF

SEQ ID NO: 31193 - protein, 6 aa, synthetic construct
PSEDLW

SEQ ID NO: 31194 - protein, 6 aa, synthetic construct
PSEDLY

SEQ ID NO: 31195 - protein, 6 aa, synthetic construct
PSEDKD

SEQ ID NO: 31196 - protein, 6 aa, synthetic construct
PSEDKE

SEQ ID NO: 31197 - protein, 6 aa, synthetic construct
PSEDKF

SEQ ID NO: 31198 - protein, 6 aa, synthetic construct
PSEDKW

SEQ ID NO: 31199 - protein, 6 aa, synthetic construct
PSEDKY

SEQ ID NO: 31200 - protein, 6 aa, synthetic construct
PSEDMD

SEQ ID NO: 31201 - protein, 6 aa, synthetic construct
PSEDME

SEQ ID NO: 31202 - protein, 6 aa, synthetic construct
PSEDMF

SEQ ID NO: 31203 - protein, 6 aa, synthetic construct
PSEDMW

SEQ ID NO: 31204 - protein, 6 aa, synthetic construct
PSEDMY

SEQ ID NO: 31205 - protein, 6 aa, synthetic construct
PSEDFD

SEQ ID NO: 31206 - protein, 6 aa, synthetic construct
PSEDFE

SEQ ID NO: 31207 - protein, 6 aa, synthetic construct
PSEDFF

SEQ ID NO: 31208 - protein, 6 aa, synthetic construct
PSEDFW

SEQ ID NO: 31209 - protein, 6 aa, synthetic construct
PSEDFY

SEQ ID NO: 31210 - protein, 6 aa, synthetic construct
PSEDPD

SEQ ID NO: 31211 - protein, 6 aa, synthetic construct
PSEDPE

SEQ ID NO: 31212 - protein, 6 aa, synthetic construct
PSEDPF

SEQ ID NO: 31213 - protein, 6 aa, synthetic construct
PSEDPW

SEQ ID NO: 31214 - protein, 6 aa, synthetic construct
PSEDPY

SEQ ID NO: 31215 - protein, 6 aa, synthetic construct
PSEDSD

SEQ ID NO: 31216 - protein, 6 aa, synthetic construct
PSEDSE

SEQ ID NO: 31217 - protein, 6 aa, synthetic construct
PSEDSF

SEQ ID NO: 31218 - protein, 6 aa, synthetic construct
PSEDSW

SEQ ID NO: 31219 - protein, 6 aa, synthetic construct
PSEDSY

SEQ ID NO: 31220 - protein, 6 aa, synthetic construct
PSEDTD

SEQ ID NO: 31221 - protein, 6 aa, synthetic construct
PSEDTE

SEQ ID NO: 31222 - protein, 6 aa, synthetic construct
PSEDTF

SEQ ID NO: 31223 - protein, 6 aa, synthetic construct
PSEDTW

SEQ ID NO: 31224 - protein, 6 aa, synthetic construct
PSEDTY

SEQ ID NO: 31225 - protein, 6 aa, synthetic construct
PSEDWD

SEQ ID NO: 31226 - protein, 6 aa, synthetic construct
PSEDWE

SEQ ID NO: 31227 - protein, 6 aa, synthetic construct
PSEDWF

SEQ ID NO: 31228 - protein, 6 aa, synthetic construct
PSEDWW

SEQ ID NO: 31229 - protein, 6 aa, synthetic construct
PSEDWY

SEQ ID NO: 31230 - protein, 6 aa, synthetic construct
PSEDYD

SEQ ID NO: 31231 - protein, 6 aa, synthetic construct
PSEDYE

SEQ ID NO: 31232 - protein, 6 aa, synthetic construct
PSEDYF

SEQ ID NO: 31233 - protein, 6 aa, synthetic construct
PSEDYW

SEQ ID NO: 31234 - protein, 6 aa, synthetic construct
PSEDYY

SEQ ID NO: 31235 - protein, 6 aa, synthetic construct
PSEDVD

SEQ ID NO: 31236 - protein, 6 aa, synthetic construct
PSEDVE

SEQ ID NO: 31237 - protein, 6 aa, synthetic construct
PSEDVF

SEQ ID NO: 31238 - protein, 6 aa, synthetic construct
PSEDVW

SEQ ID NO: 31239 - protein, 6 aa, synthetic construct
PSEDVY

SEQ ID NO: 31240 - protein, 6 aa, synthetic construct
PSECAD

SEQ ID NO: 31241 - protein, 6 aa, synthetic construct
PSECAE

SEQ ID NO: 31242 - protein, 6 aa, synthetic construct
PSECAF

SEQ ID NO: 31243 - protein, 6 aa, synthetic construct
PSECAW

SEQ ID NO: 31244 - protein, 6 aa, synthetic construct
PSECAY

SEQ ID NO: 31245 - protein, 6 aa, synthetic construct
PSECRD

SEQ ID NO: 31246 - protein, 6 aa, synthetic construct
PSECRE

SEQ ID NO: 31247 - protein, 6 aa, synthetic construct
PSECRF

SEQ ID NO: 31248 - protein, 6 aa, synthetic construct
PSECRW

SEQ ID NO: 31249 - protein, 6 aa, synthetic construct
PSECRY

SEQ ID NO: 31250 - protein, 6 aa, synthetic construct
PSECND

SEQ ID NO: 31251 - protein, 6 aa, synthetic construct
PSECNE

SEQ ID NO: 31252 - protein, 6 aa, synthetic construct
PSECNF

SEQ ID NO: 31253 - protein, 6 aa, synthetic construct
PSECNW

SEQ ID NO: 31254 - protein, 6 aa, synthetic construct
PSECNY

SEQ ID NO: 31255 - protein, 6 aa, synthetic construct
PSECDD

SEQ ID NO: 31256 - protein, 6 aa, synthetic construct
PSECDE

SEQ ID NO: 31257 - protein, 6 aa, synthetic construct
PSECDF

SEQ ID NO: 31258 - protein, 6 aa, synthetic construct
PSECDW

SEQ ID NO: 31259 - protein, 6 aa, synthetic construct
PSECDY

SEQ ID NO: 31260 - protein, 6 aa, synthetic construct
PSECCD

SEQ ID NO: 31261 - protein, 6 aa, synthetic construct
PSECCE

SEQ ID NO: 31262 - protein, 6 aa, synthetic construct
PSECCF

SEQ ID NO: 31263 - protein, 6 aa, synthetic construct
PSECCW

SEQ ID NO: 31264 - protein, 6 aa, synthetic construct
PSECCY

SEQ ID NO: 31265 - protein, 6 aa, synthetic construct
PSECQD

SEQ ID NO: 31266 - protein, 6 aa, synthetic construct
PSECQE

SEQ ID NO: 31267 - protein, 6 aa, synthetic construct
PSECQF

SEQ ID NO: 31268 - protein, 6 aa, synthetic construct
PSECQW

SEQ ID NO: 31269 - protein, 6 aa, synthetic construct
PSECQY

SEQ ID NO: 31270 - protein, 6 aa, synthetic construct
PSECED

SEQ ID NO: 31271 - protein, 6 aa, synthetic construct
PSECEE

SEQ ID NO: 31272 - protein, 6 aa, synthetic construct
PSECEF

SEQ ID NO: 31273 - protein, 6 aa, synthetic construct
PSECEW

SEQ ID NO: 31274 - protein, 6 aa, synthetic construct
PSECEY

SEQ ID NO: 31275 - protein, 6 aa, synthetic construct
PSECGD

SEQ ID NO: 31276 - protein, 6 aa, synthetic construct
PSECGE

SEQ ID NO: 31277 - protein, 6 aa, synthetic construct
PSECGF

SEQ ID NO: 31278 - protein, 6 aa, synthetic construct
PSECGW

SEQ ID NO: 31279 - protein, 6 aa, synthetic construct
PSECGY

SEQ ID NO: 31280 - protein, 6 aa, synthetic construct
PSECHD

SEQ ID NO: 31281 - protein, 6 aa, synthetic construct
PSECHE

SEQ ID NO: 31282 - protein, 6 aa, synthetic construct
PSECHF

SEQ ID NO: 31283 - protein, 6 aa, synthetic construct
PSECHW

SEQ ID NO: 31284 - protein, 6 aa, synthetic construct
PSECHY

SEQ ID NO: 31285 - protein, 6 aa, synthetic construct
PSECID

SEQ ID NO: 31286 - protein, 6 aa, synthetic construct
PSECIE

SEQ ID NO: 31287 - protein, 6 aa, synthetic construct
PSECIF

SEQ ID NO: 31288 - protein, 6 aa, synthetic construct
PSECIW

SEQ ID NO: 31289 - protein, 6 aa, synthetic construct
PSECIY

SEQ ID NO: 31290 - protein, 6 aa, synthetic construct
PSECLD

SEQ ID NO: 31291 - protein, 6 aa, synthetic construct
PSECLE

SEQ ID NO: 31292 - protein, 6 aa, synthetic construct
PSECLF

SEQ ID NO: 31293 - protein, 6 aa, synthetic construct
PSECLW

SEQ ID NO: 31294 - protein, 6 aa, synthetic construct
PSECLY

SEQ ID NO: 31295 - protein, 6 aa, synthetic construct
PSECKD

SEQ ID NO: 31296 - protein, 6 aa, synthetic construct
PSECKE

SEQ ID NO: 31297 - protein, 6 aa, synthetic construct
PSECKF

SEQ ID NO: 31298 - protein, 6 aa, synthetic construct
PSECKW

SEQ ID NO: 31299 - protein, 6 aa, synthetic construct
PSECKY

SEQ ID NO: 31300 - protein, 6 aa, synthetic construct
PSECMD

SEQ ID NO: 31301 - protein, 6 aa, synthetic construct
PSECME

SEQ ID NO: 31302 - protein, 6 aa, synthetic construct
PSECMF

SEQ ID NO: 31303 - protein, 6 aa, synthetic construct
PSECMW

SEQ ID NO: 31304 - protein, 6 aa, synthetic construct
PSECMY

SEQ ID NO: 31305 - protein, 6 aa, synthetic construct
PSECFD

SEQ ID NO: 31306 - protein, 6 aa, synthetic construct
PSECFE

SEQ ID NO: 31307 - protein, 6 aa, synthetic construct
PSECFF

SEQ ID NO: 31308 - protein, 6 aa, synthetic construct
PSECFW

SEQ ID NO: 31309 - protein, 6 aa, synthetic construct
PSECFY

SEQ ID NO: 31310 - protein, 6 aa, synthetic construct
PSECPD

SEQ ID NO: 31311 - protein, 6 aa, synthetic construct
PSECPE

SEQ ID NO: 31312 - protein, 6 aa, synthetic construct
PSECPF

SEQ ID NO: 31313 - protein, 6 aa, synthetic construct
PSECPW

SEQ ID NO: 31314 - protein, 6 aa, synthetic construct
PSECPY

SEQ ID NO: 31315 - protein, 6 aa, synthetic construct
PSECSD

SEQ ID NO: 31316 - protein, 6 aa, synthetic construct
PSECSE

SEQ ID NO: 31317 - protein, 6 aa, synthetic construct
PSECSF

SEQ ID NO: 31318 - protein, 6 aa, synthetic construct
PSECSW

SEQ ID NO: 31319 - protein, 6 aa, synthetic construct
PSECSY

SEQ ID NO: 31320 - protein, 6 aa, synthetic construct
PSECTD

SEQ ID NO: 31321 - protein, 6 aa, synthetic construct
PSECTE

SEQ ID NO: 31322 - protein, 6 aa, synthetic construct
PSECTF

SEQ ID NO: 31323 - protein, 6 aa, synthetic construct
PSECTW

SEQ ID NO: 31324 - protein, 6 aa, synthetic construct
PSECTY

SEQ ID NO: 31325 - protein, 6 aa, synthetic construct
PSECWD

SEQ ID NO: 31326 - protein, 6 aa, synthetic construct
PSECWE

SEQ ID NO: 31327 - protein, 6 aa, synthetic construct
PSECWF

SEQ ID NO: 31328 - protein, 6 aa, synthetic construct
PSECWW

SEQ ID NO: 31329 - protein, 6 aa, synthetic construct
PSECWY

SEQ ID NO: 31330 - protein, 6 aa, synthetic construct
PSECYD

SEQ ID NO: 31331 - protein, 6 aa, synthetic construct
PSECYE

SEQ ID NO: 31332 - protein, 6 aa, synthetic construct
PSECYF

SEQ ID NO: 31333 - protein, 6 aa, synthetic construct
PSECYW

SEQ ID NO: 31334 - protein, 6 aa, synthetic construct
PSECYY

SEQ ID NO: 31335 - protein, 6 aa, synthetic construct
PSECVD

SEQ ID NO: 31336 - protein, 6 aa, synthetic construct
PSECVE

SEQ ID NO: 31337 - protein, 6 aa, synthetic construct
PSECVF

SEQ ID NO: 31338 - protein, 6 aa, synthetic construct
PSECVW

SEQ ID NO: 31339 - protein, 6 aa, synthetic construct
PSECVY

SEQ ID NO: 31340 - protein, 6 aa, synthetic construct
PSEQAD

SEQ ID NO: 31341 - protein, 6 aa, synthetic construct
PSEQAE

SEQ ID NO: 31342 - protein, 6 aa, synthetic construct
PSEQAF

SEQ ID NO: 31343 - protein, 6 aa, synthetic construct
PSEQAW

SEQ ID NO: 31344 - protein, 6 aa, synthetic construct
PSEQAY

SEQ ID NO: 31345 - protein, 6 aa, synthetic construct
PSEQRD

SEQ ID NO: 31346 - protein, 6 aa, synthetic construct
PSEQRE

SEQ ID NO: 31347 - protein, 6 aa, synthetic construct
PSEQRF

SEQ ID NO: 31348 - protein, 6 aa, synthetic construct
PSEQRW

SEQ ID NO: 31349 - protein, 6 aa, synthetic construct
PSEQRY

SEQ ID NO: 31350 - protein, 6 aa, synthetic construct
PSEQND

SEQ ID NO: 31351 - protein, 6 aa, synthetic construct
PSEQNE

SEQ ID NO: 31352 - protein, 6 aa, synthetic construct
PSEQNF

SEQ ID NO: 31353 - protein, 6 aa, synthetic construct
PSEQNW

SEQ ID NO: 31354 - protein, 6 aa, synthetic construct
PSEQNY

SEQ ID NO: 31355 - protein, 6 aa, synthetic construct
PSEQDD

SEQ ID NO: 31356 - protein, 6 aa, synthetic construct
PSEQDE

SEQ ID NO: 31357 - protein, 6 aa, synthetic construct
PSEQDF

SEQ ID NO: 31358 - protein, 6 aa, synthetic construct
PSEQDW

SEQ ID NO: 31359 - protein, 6 aa, synthetic construct
PSEQDY

SEQ ID NO: 31360 - protein, 6 aa, synthetic construct
PSEQCD

SEQ ID NO: 31361 - protein, 6 aa, synthetic construct
PSEQCE

SEQ ID NO: 31362 - protein, 6 aa, synthetic construct
PSEQCF

SEQ ID NO: 31363 - protein, 6 aa, synthetic construct
PSEQCW

SEQ ID NO: 31364 - protein, 6 aa, synthetic construct
PSEQCY

SEQ ID NO: 31365 - protein, 6 aa, synthetic construct
PSEQQD

SEQ ID NO: 31366 - protein, 6 aa, synthetic construct
PSEQQE

SEQ ID NO: 31367 - protein, 6 aa, synthetic construct
PSEQQF

SEQ ID NO: 31368 - protein, 6 aa, synthetic construct
PSEQQW

SEQ ID NO: 31369 - protein, 6 aa, synthetic construct
PSEQQY

SEQ ID NO: 31370 - protein, 6 aa, synthetic construct
PSEQED

SEQ ID NO: 31371 - protein, 6 aa, synthetic construct
PSEQEE

SEQ ID NO: 31372 - protein, 6 aa, synthetic construct
PSEQEF

SEQ ID NO: 31373 - protein, 6 aa, synthetic construct
PSEQEW

SEQ ID NO: 31374 - protein, 6 aa, synthetic construct
PSEQEY

SEQ ID NO: 31375 - protein, 6 aa, synthetic construct
PSEQGD

SEQ ID NO: 31376 - protein, 6 aa, synthetic construct
PSEQGE

SEQ ID NO: 31377 - protein, 6 aa, synthetic construct
PSEQGF

SEQ ID NO: 31378 - protein, 6 aa, synthetic construct
PSEQGW

SEQ ID NO: 31379 - protein, 6 aa, synthetic construct
PSEQGY

SEQ ID NO: 31380 - protein, 6 aa, synthetic construct
PSEQHD

SEQ ID NO: 31381 - protein, 6 aa, synthetic construct
PSEQHE

SEQ ID NO: 31382 - protein, 6 aa, synthetic construct
PSEQHF

SEQ ID NO: 31383 - protein, 6 aa, synthetic construct
PSEQHW

SEQ ID NO: 31384 - protein, 6 aa, synthetic construct
PSEQHY

SEQ ID NO: 31385 - protein, 6 aa, synthetic construct
PSEQID

SEQ ID NO: 31386 - protein, 6 aa, synthetic construct
PSEQIE

SEQ ID NO: 31387 - protein, 6 aa, synthetic construct
PSEQIF

SEQ ID NO: 31388 - protein, 6 aa, synthetic construct
PSEQIW

SEQ ID NO: 31389 - protein, 6 aa, synthetic construct
PSEQIY

SEQ ID NO: 31390 - protein, 6 aa, synthetic construct
PSEQLD

SEQ ID NO: 31391 - protein, 6 aa, synthetic construct
PSEQLE

SEQ ID NO: 31392 - protein, 6 aa, synthetic construct
PSEQLF

SEQ ID NO: 31393 - protein, 6 aa, synthetic construct
PSEQLW

SEQ ID NO: 31394 - protein, 6 aa, synthetic construct
PSEQLY

SEQ ID NO: 31395 - protein, 6 aa, synthetic construct
PSEQKD

SEQ ID NO: 31396 - protein, 6 aa, synthetic construct
PSEQKE

SEQ ID NO: 31397 - protein, 6 aa, synthetic construct
PSEQKF

SEQ ID NO: 31398 - protein, 6 aa, synthetic construct
PSEQKW

SEQ ID NO: 31399 - protein, 6 aa, synthetic construct
PSEQKY

SEQ ID NO: 31400 - protein, 6 aa, synthetic construct
PSEQMD

SEQ ID NO: 31401 - protein, 6 aa, synthetic construct
PSEQME

SEQ ID NO: 31402 - protein, 6 aa, synthetic construct
PSEQMF

SEQ ID NO: 31403 - protein, 6 aa, synthetic construct
PSEQMW

SEQ ID NO: 31404 - protein, 6 aa, synthetic construct
PSEQMY

SEQ ID NO: 31405 - protein, 6 aa, synthetic construct
PSEQFD

SEQ ID NO: 31406 - protein, 6 aa, synthetic construct
PSEQFE

SEQ ID NO: 31407 - protein, 6 aa, synthetic construct
PSEQFF

SEQ ID NO: 31408 - protein, 6 aa, synthetic construct
PSEQFW

SEQ ID NO: 31409 - protein, 6 aa, synthetic construct
PSEQFY

SEQ ID NO: 31410 - protein, 6 aa, synthetic construct
PSEQPD

SEQ ID NO: 31411 - protein, 6 aa, synthetic construct
PSEQPE

SEQ ID NO: 31412 - protein, 6 aa, synthetic construct
PSEQPF

SEQ ID NO: 31413 - protein, 6 aa, synthetic construct
PSEQPW

SEQ ID NO: 31414 - protein, 6 aa, synthetic construct
PSEQPY

SEQ ID NO: 31415 - protein, 6 aa, synthetic construct
PSEQSD

SEQ ID NO: 31416 - protein, 6 aa, synthetic construct
PSEQSE

SEQ ID NO: 31417 - protein, 6 aa, synthetic construct
PSEQSF

SEQ ID NO: 31418 - protein, 6 aa, synthetic construct
PSEQSW

SEQ ID NO: 31419 - protein, 6 aa, synthetic construct
PSEQSY

SEQ ID NO: 31420 - protein, 6 aa, synthetic construct
PSEQTD

SEQ ID NO: 31421 - protein, 6 aa, synthetic construct
PSEQTE

SEQ ID NO: 31422 - protein, 6 aa, synthetic construct
PSEQTF

SEQ ID NO: 31423 - protein, 6 aa, synthetic construct
PSEQTW

SEQ ID NO: 31424 - protein, 6 aa, synthetic construct
PSEQTY

SEQ ID NO: 31425 - protein, 6 aa, synthetic construct
PSEQWD

SEQ ID NO: 31426 - protein, 6 aa, synthetic construct
PSEQWE

SEQ ID NO: 31427 - protein, 6 aa, synthetic construct
PSEQWF

SEQ ID NO: 31428 - protein, 6 aa, synthetic construct
PSEQWW

SEQ ID NO: 31429 - protein, 6 aa, synthetic construct
PSEQWY

SEQ ID NO: 31430 - protein, 6 aa, synthetic construct
PSEQYD

SEQ ID NO: 31431 - protein, 6 aa, synthetic construct
PSEQYE

SEQ ID NO: 31432 - protein, 6 aa, synthetic construct
PSEQYF

SEQ ID NO: 31433 - protein, 6 aa, synthetic construct
PSEQYW

SEQ ID NO: 31434 - protein, 6 aa, synthetic construct
PSEQYY

SEQ ID NO: 31435 - protein, 6 aa, synthetic construct
PSEQVD

SEQ ID NO: 31436 - protein, 6 aa, synthetic construct
PSEQVE

SEQ ID NO: 31437 - protein, 6 aa, synthetic construct
PSEQVF

SEQ ID NO: 31438 - protein, 6 aa, synthetic construct
PSEQVW

SEQ ID NO: 31439 - protein, 6 aa, synthetic construct
PSEQVY

SEQ ID NO: 31440 - protein, 6 aa, synthetic construct
PSEEAD

SEQ ID NO: 31441 - protein, 6 aa, synthetic construct
PSEEAE

SEQ ID NO: 31442 - protein, 6 aa, synthetic construct
PSEEAF

SEQ ID NO: 31443 - protein, 6 aa, synthetic construct
PSEEAW

SEQ ID NO: 31444 - protein, 6 aa, synthetic construct
PSEEAY

SEQ ID NO: 31445 - protein, 6 aa, synthetic construct
PSEERD

SEQ ID NO: 31446 - protein, 6 aa, synthetic construct
PSEERE

SEQ ID NO: 31447 - protein, 6 aa, synthetic construct
PSEERF

SEQ ID NO: 31448 - protein, 6 aa, synthetic construct
PSEERW

SEQ ID NO: 31449 - protein, 6 aa, synthetic construct
PSEERY

SEQ ID NO: 31450 - protein, 6 aa, synthetic construct
PSEEND

SEQ ID NO: 31451 - protein, 6 aa, synthetic construct
PSEENE

SEQ ID NO: 31452 - protein, 6 aa, synthetic construct
PSEENF

SEQ ID NO: 31453 - protein, 6 aa, synthetic construct
PSEENW

SEQ ID NO: 31454 - protein, 6 aa, synthetic construct
PSEENY

SEQ ID NO: 31455 - protein, 6 aa, synthetic construct
PSEEDD

SEQ ID NO: 31456 - protein, 6 aa, synthetic construct
PSEEDE

SEQ ID NO: 31457 - protein, 6 aa, synthetic construct
PSEEDF

SEQ ID NO: 31458 - protein, 6 aa, synthetic construct
PSEEDW

SEQ ID NO: 31459 - protein, 6 aa, synthetic construct
PSEEDY

SEQ ID NO: 31460 - protein, 6 aa, synthetic construct
PSEECD

SEQ ID NO: 31461 - protein, 6 aa, synthetic construct
PSEECE

SEQ ID NO: 31462 - protein, 6 aa, synthetic construct
PSEECF

SEQ ID NO: 31463 - protein, 6 aa, synthetic construct
PSEECW

SEQ ID NO: 31464 - protein, 6 aa, synthetic construct
PSEECY

SEQ ID NO: 31465 - protein, 6 aa, synthetic construct
PSEEQD

SEQ ID NO: 31466 - protein, 6 aa, synthetic construct
PSEEQE

SEQ ID NO: 31467 - protein, 6 aa, synthetic construct
PSEEQF

SEQ ID NO: 31468 - protein, 6 aa, synthetic construct
PSEEQW

SEQ ID NO: 31469 - protein, 6 aa, synthetic construct
PSEEQY

SEQ ID NO: 31470 - protein, 6 aa, synthetic construct
PSEEED

SEQ ID NO: 31471 - protein, 6 aa, synthetic construct
PSEEEE

SEQ ID NO: 31472 - protein, 6 aa, synthetic construct
PSEEEF

SEQ ID NO: 31473 - protein, 6 aa, synthetic construct
PSEEEW

SEQ ID NO: 31474 - protein, 6 aa, synthetic construct
PSEEEY

SEQ ID NO: 31475 - protein, 6 aa, synthetic construct
PSEEGD

SEQ ID NO: 31476 - protein, 6 aa, synthetic construct
PSEEGE

SEQ ID NO: 31477 - protein, 6 aa, synthetic construct
PSEEGF

SEQ ID NO: 31478 - protein, 6 aa, synthetic construct
PSEEGW

SEQ ID NO: 31479 - protein, 6 aa, synthetic construct
PSEEGY

SEQ ID NO: 31480 - protein, 6 aa, synthetic construct
PSEEHD

SEQ ID NO: 31481 - protein, 6 aa, synthetic construct
PSEEHE

SEQ ID NO: 31482 - protein, 6 aa, synthetic construct
PSEEHF

SEQ ID NO: 31483 - protein, 6 aa, synthetic construct
PSEEHW

SEQ ID NO: 31484 - protein, 6 aa, synthetic construct
PSEEHY

SEQ ID NO: 31485 - protein, 6 aa, synthetic construct
PSEEID

SEQ ID NO: 31486 - protein, 6 aa, synthetic construct
PSEEIE

SEQ ID NO: 31487 - protein, 6 aa, synthetic construct
PSEEIF

SEQ ID NO: 31488 - protein, 6 aa, synthetic construct
PSEEIW

SEQ ID NO: 31489 - protein, 6 aa, synthetic construct
PSEEIY

SEQ ID NO: 31490 - protein, 6 aa, synthetic construct
PSEELD

SEQ ID NO: 31491 - protein, 6 aa, synthetic construct
PSEELE

SEQ ID NO: 31492 - protein, 6 aa, synthetic construct
PSEELF

SEQ ID NO: 31493 - protein, 6 aa, synthetic construct
PSEELW

SEQ ID NO: 31494 - protein, 6 aa, synthetic construct
PSEELY

SEQ ID NO: 31495 - protein, 6 aa, synthetic construct
PSEEKD

SEQ ID NO: 31496 - protein, 6 aa, synthetic construct
PSEEKE

SEQ ID NO: 31497 - protein, 6 aa, synthetic construct
PSEEKF

SEQ ID NO: 31498 - protein, 6 aa, synthetic construct
PSEEKW

SEQ ID NO: 31499 - protein, 6 aa, synthetic construct
PSEEKY

SEQ ID NO: 31500 - protein, 6 aa, synthetic construct
PSEEMD

SEQ ID NO: 31501 - protein, 6 aa, synthetic construct
PSEEME

SEQ ID NO: 31502 - protein, 6 aa, synthetic construct
PSEEMF

SEQ ID NO: 31503 - protein, 6 aa, synthetic construct
PSEEMW

SEQ ID NO: 31504 - protein, 6 aa, synthetic construct
PSEEMY

SEQ ID NO: 31505 - protein, 6 aa, synthetic construct
PSEEFD

SEQ ID NO: 31506 - protein, 6 aa, synthetic construct
PSEEFE

SEQ ID NO: 31507 - protein, 6 aa, synthetic construct
PSEEFF

SEQ ID NO: 31508 - protein, 6 aa, synthetic construct
PSEEFW

SEQ ID NO: 31509 - protein, 6 aa, synthetic construct
PSEEFY

SEQ ID NO: 31510 - protein, 6 aa, synthetic construct
PSEEPD

SEQ ID NO: 31511 - protein, 6 aa, synthetic construct
PSEEPE

SEQ ID NO: 31512 - protein, 6 aa, synthetic construct
PSEEPF

SEQ ID NO: 31513 - protein, 6 aa, synthetic construct
PSEEPW

SEQ ID NO: 31514 - protein, 6 aa, synthetic construct
PSEEPY

SEQ ID NO: 31515 - protein, 6 aa, synthetic construct
PSEESD

SEQ ID NO: 31516 - protein, 6 aa, synthetic construct
PSEESE

SEQ ID NO: 31517 - protein, 6 aa, synthetic construct
PSEESF

SEQ ID NO: 31518 - protein, 6 aa, synthetic construct
PSEESW

SEQ ID NO: 31519 - protein, 6 aa, synthetic construct
PSEESY

SEQ ID NO: 31520 - protein, 6 aa, synthetic construct
PSEETD

SEQ ID NO: 31521 - protein, 6 aa, synthetic construct
PSEETE

SEQ ID NO: 31522 - protein, 6 aa, synthetic construct
PSEETF

SEQ ID NO: 31523 - protein, 6 aa, synthetic construct
PSEETW

SEQ ID NO: 31524 - protein, 6 aa, synthetic construct
PSEETY

SEQ ID NO: 31525 - protein, 6 aa, synthetic construct
PSEEWD

SEQ ID NO: 31526 - protein, 6 aa, synthetic construct
PSEEWE

SEQ ID NO: 31527 - protein, 6 aa, synthetic construct
PSEEWF

SEQ ID NO: 31528 - protein, 6 aa, synthetic construct
PSEEWW

SEQ ID NO: 31529 - protein, 6 aa, synthetic construct
PSEEWY

SEQ ID NO: 31530 - protein, 6 aa, synthetic construct
PSEEYD

SEQ ID NO: 31531 - protein, 6 aa, synthetic construct
PSEEYE

SEQ ID NO: 31532 - protein, 6 aa, synthetic construct
PSEEYF

SEQ ID NO: 31533 - protein, 6 aa, synthetic construct
PSEEYW

SEQ ID NO: 31534 - protein, 6 aa, synthetic construct
PSEEYY

SEQ ID NO: 31535 - protein, 6 aa, synthetic construct
PSEEVD

SEQ ID NO: 31536 - protein, 6 aa, synthetic construct
PSEEVE

SEQ ID NO: 31537 - protein, 6 aa, synthetic construct
PSEEVF

SEQ ID NO: 31538 - protein, 6 aa, synthetic construct
PSEEVW

SEQ ID NO: 31539 - protein, 6 aa, synthetic construct
PSEEVY

SEQ ID NO: 31540 - protein, 6 aa, synthetic construct
PSEGAD

SEQ ID NO: 31541 - protein, 6 aa, synthetic construct
PSEGAE

SEQ ID NO: 31542 - protein, 6 aa, synthetic construct
PSEGAF

SEQ ID NO: 31543 - protein, 6 aa, synthetic construct
PSEGAW

SEQ ID NO: 31544 - protein, 6 aa, synthetic construct
PSEGAY

SEQ ID NO: 31545 - protein, 6 aa, synthetic construct
PSEGRD

SEQ ID NO: 31546 - protein, 6 aa, synthetic construct
PSEGRE

SEQ ID NO: 31547 - protein, 6 aa, synthetic construct
PSEGRF

SEQ ID NO: 31548 - protein, 6 aa, synthetic construct
PSEGRW

SEQ ID NO: 31549 - protein, 6 aa, synthetic construct
PSEGRY

SEQ ID NO: 31550 - protein, 6 aa, synthetic construct
PSEGND

SEQ ID NO: 31551 - protein, 6 aa, synthetic construct
PSEGNE

SEQ ID NO: 31552 - protein, 6 aa, synthetic construct
PSEGNF

SEQ ID NO: 31553 - protein, 6 aa, synthetic construct
PSEGNW

SEQ ID NO: 31554 - protein, 6 aa, synthetic construct
PSEGNY

SEQ ID NO: 31555 - protein, 6 aa, synthetic construct
PSEGDD

SEQ ID NO: 31556 - protein, 6 aa, synthetic construct
PSEGDE

SEQ ID NO: 31557 - protein, 6 aa, synthetic construct
PSEGDF

SEQ ID NO: 31558 - protein, 6 aa, synthetic construct
PSEGDW

SEQ ID NO: 31559 - protein, 6 aa, synthetic construct
PSEGDY

SEQ ID NO: 31560 - protein, 6 aa, synthetic construct
PSEGCD

SEQ ID NO: 31561 - protein, 6 aa, synthetic construct
PSEGCE

SEQ ID NO: 31562 - protein, 6 aa, synthetic construct
PSEGCF

SEQ ID NO: 31563 - protein, 6 aa, synthetic construct
PSEGCW

SEQ ID NO: 31564 - protein, 6 aa, synthetic construct
PSEGCY

SEQ ID NO: 31565 - protein, 6 aa, synthetic construct
PSEGQD

SEQ ID NO: 31566 - protein, 6 aa, synthetic construct
PSEGQE

SEQ ID NO: 31567 - protein, 6 aa, synthetic construct
PSEGQF

SEQ ID NO: 31568 - protein, 6 aa, synthetic construct
PSEGQW

SEQ ID NO: 31569 - protein, 6 aa, synthetic construct
PSEGQY

SEQ ID NO: 31570 - protein, 6 aa, synthetic construct
PSEGED

SEQ ID NO: 31571 - protein, 6 aa, synthetic construct
PSEGEE

SEQ ID NO: 31572 - protein, 6 aa, synthetic construct
PSEGEF

SEQ ID NO: 31573 - protein, 6 aa, synthetic construct
PSEGEW

SEQ ID NO: 31574 - protein, 6 aa, synthetic construct
PSEGEY

SEQ ID NO: 31575 - protein, 6 aa, synthetic construct
PSEGGD

SEQ ID NO: 31576 - protein, 6 aa, synthetic construct
PSEGGE

SEQ ID NO: 31577 - protein, 6 aa, synthetic construct
PSEGGF

SEQ ID NO: 31578 - protein, 6 aa, synthetic construct
PSEGGW

SEQ ID NO: 31579 - protein, 6 aa, synthetic construct
PSEGGY

SEQ ID NO: 31580 - protein, 6 aa, synthetic construct
PSEGHD

SEQ ID NO: 31581 - protein, 6 aa, synthetic construct
PSEGHE

SEQ ID NO: 31582 - protein, 6 aa, synthetic construct
PSEGHF

SEQ ID NO: 31583 - protein, 6 aa, synthetic construct
PSEGHW

SEQ ID NO: 31584 - protein, 6 aa, synthetic construct
PSEGHY

SEQ ID NO: 31585 - protein, 6 aa, synthetic construct
PSEGID

SEQ ID NO: 31586 - protein, 6 aa, synthetic construct
PSEGIE

SEQ ID NO: 31587 - protein, 6 aa, synthetic construct
PSEGIF

SEQ ID NO: 31588 - protein, 6 aa, synthetic construct
PSEGIW

SEQ ID NO: 31589 - protein, 6 aa, synthetic construct
PSEGIY

SEQ ID NO: 31590 - protein, 6 aa, synthetic construct
PSEGLD

SEQ ID NO: 31591 - protein, 6 aa, synthetic construct
PSEGLE

SEQ ID NO: 31592 - protein, 6 aa, synthetic construct
PSEGLF

SEQ ID NO: 31593 - protein, 6 aa, synthetic construct
PSEGLW

SEQ ID NO: 31594 - protein, 6 aa, synthetic construct
PSEGLY

SEQ ID NO: 31595 - protein, 6 aa, synthetic construct
PSEGKD

SEQ ID NO: 31596 - protein, 6 aa, synthetic construct
PSEGKE

SEQ ID NO: 31597 - protein, 6 aa, synthetic construct
PSEGKF

SEQ ID NO: 31598 - protein, 6 aa, synthetic construct
PSEGKW

SEQ ID NO: 31599 - protein, 6 aa, synthetic construct
PSEGKY

SEQ ID NO: 31600 - protein, 6 aa, synthetic construct
PSEGMD

SEQ ID NO: 31601 - protein, 6 aa, synthetic construct
PSEGME

SEQ ID NO: 31602 - protein, 6 aa, synthetic construct
PSEGMF

SEQ ID NO: 31603 - protein, 6 aa, synthetic construct
PSEGMW

SEQ ID NO: 31604 - protein, 6 aa, synthetic construct
PSEGMY

SEQ ID NO: 31605 - protein, 6 aa, synthetic construct
PSEGFD

SEQ ID NO: 31606 - protein, 6 aa, synthetic construct
PSEGFE

SEQ ID NO: 31607 - protein, 6 aa, synthetic construct
PSEGFF

SEQ ID NO: 31608 - protein, 6 aa, synthetic construct
PSEGFW

SEQ ID NO: 31609 - protein, 6 aa, synthetic construct
PSEGFY

SEQ ID NO: 31610 - protein, 6 aa, synthetic construct
PSEGPD

SEQ ID NO: 31611 - protein, 6 aa, synthetic construct
PSEGPE

SEQ ID NO: 31612 - protein, 6 aa, synthetic construct
PSEGPF

SEQ ID NO: 31613 - protein, 6 aa, synthetic construct
PSEGPW

SEQ ID NO: 31614 - protein, 6 aa, synthetic construct
PSEGPY

SEQ ID NO: 31615 - protein, 6 aa, synthetic construct
PSEGSD

SEQ ID NO: 31616 - protein, 6 aa, synthetic construct
PSEGSE

SEQ ID NO: 31617 - protein, 6 aa, synthetic construct
PSEGSF

SEQ ID NO: 31618 - protein, 6 aa, synthetic construct
PSEGSW

SEQ ID NO: 31619 - protein, 6 aa, synthetic construct
PSEGSY

SEQ ID NO: 31620 - protein, 6 aa, synthetic construct
PSEGTD

SEQ ID NO: 31621 - protein, 6 aa, synthetic construct
PSEGTE

SEQ ID NO: 31622 - protein, 6 aa, synthetic construct
PSEGTF

SEQ ID NO: 31623 - protein, 6 aa, synthetic construct
PSEGTW

SEQ ID NO: 31624 - protein, 6 aa, synthetic construct
PSEGTY

SEQ ID NO: 31625 - protein, 6 aa, synthetic construct
PSEGWD

SEQ ID NO: 31626 - protein, 6 aa, synthetic construct
PSEGWE

SEQ ID NO: 31627 - protein, 6 aa, synthetic construct
PSEGWF

SEQ ID NO: 31628 - protein, 6 aa, synthetic construct
PSEGWW

SEQ ID NO: 31629 - protein, 6 aa, synthetic construct
PSEGWY

SEQ ID NO: 31630 - protein, 6 aa, synthetic construct
PSEGYD

SEQ ID NO: 31631 - protein, 6 aa, synthetic construct
PSEGYE

SEQ ID NO: 31632 - protein, 6 aa, synthetic construct
PSEGYF

SEQ ID NO: 31633 - protein, 6 aa, synthetic construct
PSEGYW

SEQ ID NO: 31634 - protein, 6 aa, synthetic construct
PSEGYY

SEQ ID NO: 31635 - protein, 6 aa, synthetic construct
PSEGVD

SEQ ID NO: 31636 - protein, 6 aa, synthetic construct
PSEGVE

SEQ ID NO: 31637 - protein, 6 aa, synthetic construct
PSEGVF

SEQ ID NO: 31638 - protein, 6 aa, synthetic construct
PSEGVW

SEQ ID NO: 31639 - protein, 6 aa, synthetic construct
PSEGVY

SEQ ID NO: 31640 - protein, 6 aa, synthetic construct
PSEHAD

SEQ ID NO: 31641 - protein, 6 aa, synthetic construct
PSEHAE

SEQ ID NO: 31642 - protein, 6 aa, synthetic construct
PSEHAF

SEQ ID NO: 31643 - protein, 6 aa, synthetic construct
PSEHAW

SEQ ID NO: 31644 - protein, 6 aa, synthetic construct
PSEHAY

SEQ ID NO: 31645 - protein, 6 aa, synthetic construct
PSEHRD

SEQ ID NO: 31646 - protein, 6 aa, synthetic construct
PSEHRE

SEQ ID NO: 31647 - protein, 6 aa, synthetic construct
PSEHRF

SEQ ID NO: 31648 - protein, 6 aa, synthetic construct
PSEHRW

SEQ ID NO: 31649 - protein, 6 aa, synthetic construct
PSEHRY

SEQ ID NO: 31650 - protein, 6 aa, synthetic construct
PSEHND

SEQ ID NO: 31651 - protein, 6 aa, synthetic construct
PSEHNE

SEQ ID NO: 31652 - protein, 6 aa, synthetic construct
PSEHNF

SEQ ID NO: 31653 - protein, 6 aa, synthetic construct
PSEHNW

SEQ ID NO: 31654 - protein, 6 aa, synthetic construct
PSEHNY

SEQ ID NO: 31655 - protein, 6 aa, synthetic construct
PSEHDD

SEQ ID NO: 31656 - protein, 6 aa, synthetic construct
PSEHDE

SEQ ID NO: 31657 - protein, 6 aa, synthetic construct
PSEHDF

SEQ ID NO: 31658 - protein, 6 aa, synthetic construct
PSEHDW

SEQ ID NO: 31659 - protein, 6 aa, synthetic construct
PSEHDY

SEQ ID NO: 31660 - protein, 6 aa, synthetic construct
PSEHCD

SEQ ID NO: 31661 - protein, 6 aa, synthetic construct
PSEHCE

SEQ ID NO: 31662 - protein, 6 aa, synthetic construct
PSEHCF

SEQ ID NO: 31663 - protein, 6 aa, synthetic construct
PSEHCW

SEQ ID NO: 31664 - protein, 6 aa, synthetic construct
PSEHCY

SEQ ID NO: 31665 - protein, 6 aa, synthetic construct
PSEHQD

SEQ ID NO: 31666 - protein, 6 aa, synthetic construct
PSEHQE

SEQ ID NO: 31667 - protein, 6 aa, synthetic construct
PSEHQF

SEQ ID NO: 31668 - protein, 6 aa, synthetic construct
PSEHQW

SEQ ID NO: 31669 - protein, 6 aa, synthetic construct
PSEHQY

SEQ ID NO: 31670 - protein, 6 aa, synthetic construct
PSEHED

SEQ ID NO: 31671 - protein, 6 aa, synthetic construct
PSEHEE

SEQ ID NO: 31672 - protein, 6 aa, synthetic construct
PSEHEF

SEQ ID NO: 31673 - protein, 6 aa, synthetic construct
PSEHEW

SEQ ID NO: 31674 - protein, 6 aa, synthetic construct
PSEHEY

SEQ ID NO: 31675 - protein, 6 aa, synthetic construct
PSEHGD

SEQ ID NO: 31676 - protein, 6 aa, synthetic construct
PSEHGE

SEQ ID NO: 31677 - protein, 6 aa, synthetic construct
PSEHGF

SEQ ID NO: 31678 - protein, 6 aa, synthetic construct
PSEHGW

SEQ ID NO: 31679 - protein, 6 aa, synthetic construct
PSEHGY

SEQ ID NO: 31680 - protein, 6 aa, synthetic construct
PSEHHD

SEQ ID NO: 31681 - protein, 6 aa, synthetic construct
PSEHHE

SEQ ID NO: 31682 - protein, 6 aa, synthetic construct
PSEHHF

SEQ ID NO: 31683 - protein, 6 aa, synthetic construct
PSEHHW

SEQ ID NO: 31684 - protein, 6 aa, synthetic construct
PSEHHY

SEQ ID NO: 31685 - protein, 6 aa, synthetic construct
PSEHID

SEQ ID NO: 31686 - protein, 6 aa, synthetic construct
PSEHIE

SEQ ID NO: 31687 - protein, 6 aa, synthetic construct
PSEHIF

SEQ ID NO: 31688 - protein, 6 aa, synthetic construct
PSEHIW

SEQ ID NO: 31689 - protein, 6 aa, synthetic construct
PSEHIY

SEQ ID NO: 31690 - protein, 6 aa, synthetic construct
PSEHLD

SEQ ID NO: 31691 - protein, 6 aa, synthetic construct
PSEHLE

SEQ ID NO: 31692 - protein, 6 aa, synthetic construct
PSEHLF

SEQ ID NO: 31693 - protein, 6 aa, synthetic construct
PSEHLW

SEQ ID NO: 31694 - protein, 6 aa, synthetic construct
PSEHLY

SEQ ID NO: 31695 - protein, 6 aa, synthetic construct
PSEHKD

SEQ ID NO: 31696 - protein, 6 aa, synthetic construct
PSEHKE

SEQ ID NO: 31697 - protein, 6 aa, synthetic construct
PSEHKF

SEQ ID NO: 31698 - protein, 6 aa, synthetic construct
PSEHKW

SEQ ID NO: 31699 - protein, 6 aa, synthetic construct
PSEHKY

SEQ ID NO: 31700 - protein, 6 aa, synthetic construct
PSEHMD

SEQ ID NO: 31701 - protein, 6 aa, synthetic construct
PSEHME

SEQ ID NO: 31702 - protein, 6 aa, synthetic construct
PSEHMF

SEQ ID NO: 31703 - protein, 6 aa, synthetic construct
PSEHMW

SEQ ID NO: 31704 - protein, 6 aa, synthetic construct
PSEHMY

SEQ ID NO: 31705 - protein, 6 aa, synthetic construct
PSEHFD

SEQ ID NO: 31706 - protein, 6 aa, synthetic construct
PSEHFE

SEQ ID NO: 31707 - protein, 6 aa, synthetic construct
PSEHFF

SEQ ID NO: 31708 - protein, 6 aa, synthetic construct
PSEHFW

SEQ ID NO: 31709 - protein, 6 aa, synthetic construct
PSEHFY

SEQ ID NO: 31710 - protein, 6 aa, synthetic construct
PSEHPD

SEQ ID NO: 31711 - protein, 6 aa, synthetic construct
PSEHPE

SEQ ID NO: 31712 - protein, 6 aa, synthetic construct
PSEHPF

SEQ ID NO: 31713 - protein, 6 aa, synthetic construct
PSEHPW

SEQ ID NO: 31714 - protein, 6 aa, synthetic construct
PSEHPY

SEQ ID NO: 31715 - protein, 6 aa, synthetic construct
PSEHSD

SEQ ID NO: 31716 - protein, 6 aa, synthetic construct
PSEHSE

SEQ ID NO: 31717 - protein, 6 aa, synthetic construct
PSEHSF

SEQ ID NO: 31718 - protein, 6 aa, synthetic construct
PSEHSW

SEQ ID NO: 31719 - protein, 6 aa, synthetic construct
PSEHSY

SEQ ID NO: 31720 - protein, 6 aa, synthetic construct
PSEHTD

SEQ ID NO: 31721 - protein, 6 aa, synthetic construct
PSEHTE

SEQ ID NO: 31722 - protein, 6 aa, synthetic construct
PSEHTF

SEQ ID NO: 31723 - protein, 6 aa, synthetic construct
PSEHTW

SEQ ID NO: 31724 - protein, 6 aa, synthetic construct
PSEHTY

SEQ ID NO: 31725 - protein, 6 aa, synthetic construct
PSEHWD

SEQ ID NO: 31726 - protein, 6 aa, synthetic construct
PSEHWE

SEQ ID NO: 31727 - protein, 6 aa, synthetic construct
PSEHWF

SEQ ID NO: 31728 - protein, 6 aa, synthetic construct
PSEHWW

SEQ ID NO: 31729 - protein, 6 aa, synthetic construct
PSEHWY

SEQ ID NO: 31730 - protein, 6 aa, synthetic construct
PSEHYD

SEQ ID NO: 31731 - protein, 6 aa, synthetic construct
PSEHYE

SEQ ID NO: 31732 - protein, 6 aa, synthetic construct
PSEHYF

SEQ ID NO: 31733 - protein, 6 aa, synthetic construct
PSEHYW

SEQ ID NO: 31734 - protein, 6 aa, synthetic construct
PSEHYY

SEQ ID NO: 31735 - protein, 6 aa, synthetic construct
PSEHVD

SEQ ID NO: 31736 - protein, 6 aa, synthetic construct
PSEHVE

SEQ ID NO: 31737 - protein, 6 aa, synthetic construct
PSEHVF

SEQ ID NO: 31738 - protein, 6 aa, synthetic construct
PSEHVW

SEQ ID NO: 31739 - protein, 6 aa, synthetic construct
PSEHVY

SEQ ID NO: 31740 - protein, 6 aa, synthetic construct
PSEIAD

SEQ ID NO: 31741 - protein, 6 aa, synthetic construct
PSEIAE

SEQ ID NO: 31742 - protein, 6 aa, synthetic construct
PSEIAF

SEQ ID NO: 31743 - protein, 6 aa, synthetic construct
PSEIAW

SEQ ID NO: 31744 - protein, 6 aa, synthetic construct
PSEIAY

SEQ ID NO: 31745 - protein, 6 aa, synthetic construct
PSEIRD

SEQ ID NO: 31746 - protein, 6 aa, synthetic construct
PSEIRE

SEQ ID NO: 31747 - protein, 6 aa, synthetic construct
PSEIRF

SEQ ID NO: 31748 - protein, 6 aa, synthetic construct
PSEIRW

SEQ ID NO: 31749 - protein, 6 aa, synthetic construct
PSEIRY

SEQ ID NO: 31750 - protein, 6 aa, synthetic construct
PSEIND

SEQ ID NO: 31751 - protein, 6 aa, synthetic construct
PSEINE

SEQ ID NO: 31752 - protein, 6 aa, synthetic construct
PSEINF

SEQ ID NO: 31753 - protein, 6 aa, synthetic construct
PSEINW

SEQ ID NO: 31754 - protein, 6 aa, synthetic construct
PSEINY

SEQ ID NO: 31755 - protein, 6 aa, synthetic construct
PSEIDD

SEQ ID NO: 31756 - protein, 6 aa, synthetic construct
PSEIDE

SEQ ID NO: 31757 - protein, 6 aa, synthetic construct
PSEIDF

SEQ ID NO: 31758 - protein, 6 aa, synthetic construct
PSEIDW

SEQ ID NO: 31759 - protein, 6 aa, synthetic construct
PSEIDY

SEQ ID NO: 31760 - protein, 6 aa, synthetic construct
PSEICD

SEQ ID NO: 31761 - protein, 6 aa, synthetic construct
PSEICE

SEQ ID NO: 31762 - protein, 6 aa, synthetic construct
PSEICF

SEQ ID NO: 31763 - protein, 6 aa, synthetic construct
PSEICW

SEQ ID NO: 31764 - protein, 6 aa, synthetic construct
PSEICY

SEQ ID NO: 31765 - protein, 6 aa, synthetic construct
PSEIQD

SEQ ID NO: 31766 - protein, 6 aa, synthetic construct
PSEIQE

SEQ ID NO: 31767 - protein, 6 aa, synthetic construct
PSEIQF

SEQ ID NO: 31768 - protein, 6 aa, synthetic construct
PSEIQW

SEQ ID NO: 31769 - protein, 6 aa, synthetic construct
PSEIQY

SEQ ID NO: 31770 - protein, 6 aa, synthetic construct
PSEIED

SEQ ID NO: 31771 - protein, 6 aa, synthetic construct
PSEIEE

SEQ ID NO: 31772 - protein, 6 aa, synthetic construct
PSEIEF

SEQ ID NO: 31773 - protein, 6 aa, synthetic construct
PSEIEW

SEQ ID NO: 31774 - protein, 6 aa, synthetic construct
PSEIEY

SEQ ID NO: 31775 - protein, 6 aa, synthetic construct
PSEIGD

SEQ ID NO: 31776 - protein, 6 aa, synthetic construct
PSEIGE

SEQ ID NO: 31777 - protein, 6 aa, synthetic construct
PSEIGF

SEQ ID NO: 31778 - protein, 6 aa, synthetic construct
PSEIGW

SEQ ID NO: 31779 - protein, 6 aa, synthetic construct
PSEIGY

SEQ ID NO: 31780 - protein, 6 aa, synthetic construct
PSEIHD

SEQ ID NO: 31781 - protein, 6 aa, synthetic construct
PSEIHE

SEQ ID NO: 31782 - protein, 6 aa, synthetic construct
PSEIHF

SEQ ID NO: 31783 - protein, 6 aa, synthetic construct
PSEIHW

SEQ ID NO: 31784 - protein, 6 aa, synthetic construct
PSEIHY

SEQ ID NO: 31785 - protein, 6 aa, synthetic construct
PSEIID

SEQ ID NO: 31786 - protein, 6 aa, synthetic construct
PSEIIE

SEQ ID NO: 31787 - protein, 6 aa, synthetic construct
PSEIIF

SEQ ID NO: 31788 - protein, 6 aa, synthetic construct
PSEIIW

SEQ ID NO: 31789 - protein, 6 aa, synthetic construct
PSEIIY

SEQ ID NO: 31790 - protein, 6 aa, synthetic construct
PSEILD

SEQ ID NO: 31791 - protein, 6 aa, synthetic construct
PSEILE

SEQ ID NO: 31792 - protein, 6 aa, synthetic construct
PSEILF

SEQ ID NO: 31793 - protein, 6 aa, synthetic construct
PSEILW

SEQ ID NO: 31794 - protein, 6 aa, synthetic construct
PSEILY

SEQ ID NO: 31795 - protein, 6 aa, synthetic construct
PSEIKD

SEQ ID NO: 31796 - protein, 6 aa, synthetic construct
PSEIKE

SEQ ID NO: 31797 - protein, 6 aa, synthetic construct
PSEIKF

SEQ ID NO: 31798 - protein, 6 aa, synthetic construct
PSEIKW

SEQ ID NO: 31799 - protein, 6 aa, synthetic construct
PSEIKY

SEQ ID NO: 31800 - protein, 6 aa, synthetic construct
PSEIMD

SEQ ID NO: 31801 - protein, 6 aa, synthetic construct
PSEIME

SEQ ID NO: 31802 - protein, 6 aa, synthetic construct
PSEIMF

SEQ ID NO: 31803 - protein, 6 aa, synthetic construct
PSEIMW

SEQ ID NO: 31804 - protein, 6 aa, synthetic construct
PSEIMY

SEQ ID NO: 31805 - protein, 6 aa, synthetic construct
PSEIFD

SEQ ID NO: 31806 - protein, 6 aa, synthetic construct
PSEIFE

SEQ ID NO: 31807 - protein, 6 aa, synthetic construct
PSEIFF

SEQ ID NO: 31808 - protein, 6 aa, synthetic construct
PSEIFW

SEQ ID NO: 31809 - protein, 6 aa, synthetic construct
PSEIFY

SEQ ID NO: 31810 - protein, 6 aa, synthetic construct
PSEIPD

SEQ ID NO: 31811 - protein, 6 aa, synthetic construct
PSEIPE

SEQ ID NO: 31812 - protein, 6 aa, synthetic construct
PSEIPF

SEQ ID NO: 31813 - protein, 6 aa, synthetic construct
PSEIPW

SEQ ID NO: 31814 - protein, 6 aa, synthetic construct
PSEIPY

SEQ ID NO: 31815 - protein, 6 aa, synthetic construct
PSEISD

SEQ ID NO: 31816 - protein, 6 aa, synthetic construct
PSEISE

SEQ ID NO: 31817 - protein, 6 aa, synthetic construct
PSEISF

SEQ ID NO: 31818 - protein, 6 aa, synthetic construct
PSEISW

SEQ ID NO: 31819 - protein, 6 aa, synthetic construct
PSEISY

SEQ ID NO: 31820 - protein, 6 aa, synthetic construct
PSEITD

SEQ ID NO: 31821 - protein, 6 aa, synthetic construct
PSEITE

SEQ ID NO: 31822 - protein, 6 aa, synthetic construct
PSEITF

SEQ ID NO: 31823 - protein, 6 aa, synthetic construct
PSEITW

SEQ ID NO: 31824 - protein, 6 aa, synthetic construct
PSEITY

SEQ ID NO: 31825 - protein, 6 aa, synthetic construct
PSEIWD

SEQ ID NO: 31826 - protein, 6 aa, synthetic construct
PSEIWE

SEQ ID NO: 31827 - protein, 6 aa, synthetic construct
PSEIWF

SEQ ID NO: 31828 - protein, 6 aa, synthetic construct
PSEIWW

SEQ ID NO: 31829 - protein, 6 aa, synthetic construct
PSEIWY

SEQ ID NO: 31830 - protein, 6 aa, synthetic construct
PSEIYD

SEQ ID NO: 31831 - protein, 6 aa, synthetic construct
PSEIYE

SEQ ID NO: 31832 - protein, 6 aa, synthetic construct
PSEIYF

SEQ ID NO: 31833 - protein, 6 aa, synthetic construct
PSEIYW

SEQ ID NO: 31834 - protein, 6 aa, synthetic construct
PSEIYY

SEQ ID NO: 31835 - protein, 6 aa, synthetic construct
PSEIVD

SEQ ID NO: 31836 - protein, 6 aa, synthetic construct
PSEIVE

SEQ ID NO: 31837 - protein, 6 aa, synthetic construct
PSEIVF

SEQ ID NO: 31838 - protein, 6 aa, synthetic construct
PSEIVW

SEQ ID NO: 31839 - protein, 6 aa, synthetic construct
PSEIVY

SEQ ID NO: 31840 - protein, 6 aa, synthetic construct
PSELAD

SEQ ID NO: 31841 - protein, 6 aa, synthetic construct
PSELAE

SEQ ID NO: 31842 - protein, 6 aa, synthetic construct
PSELAF

SEQ ID NO: 31843 - protein, 6 aa, synthetic construct
PSELAW

SEQ ID NO: 31844 - protein, 6 aa, synthetic construct
PSELAY

SEQ ID NO: 31845 - protein, 6 aa, synthetic construct
PSELRD

SEQ ID NO: 31846 - protein, 6 aa, synthetic construct
PSELRE

SEQ ID NO: 31847 - protein, 6 aa, synthetic construct
PSELRF

SEQ ID NO: 31848 - protein, 6 aa, synthetic construct
PSELRW

SEQ ID NO: 31849 - protein, 6 aa, synthetic construct
PSELRY

SEQ ID NO: 31850 - protein, 6 aa, synthetic construct
PSELND

SEQ ID NO: 31851 - protein, 6 aa, synthetic construct
PSELNE

SEQ ID NO: 31852 - protein, 6 aa, synthetic construct
PSELNF

SEQ ID NO: 31853 - protein, 6 aa, synthetic construct
PSELNW

SEQ ID NO: 31854 - protein, 6 aa, synthetic construct
PSELNY

SEQ ID NO: 31855 - protein, 6 aa, synthetic construct
PSELDD

SEQ ID NO: 31856 - protein, 6 aa, synthetic construct
PSELDE

SEQ ID NO: 31857 - protein, 6 aa, synthetic construct
PSELDF

SEQ ID NO: 31858 - protein, 6 aa, synthetic construct
PSELDW

SEQ ID NO: 31859 - protein, 6 aa, synthetic construct
PSELDY

SEQ ID NO: 31860 - protein, 6 aa, synthetic construct
PSELCD

SEQ ID NO: 31861 - protein, 6 aa, synthetic construct
PSELCE

SEQ ID NO: 31862 - protein, 6 aa, synthetic construct
PSELCF

SEQ ID NO: 31863 - protein, 6 aa, synthetic construct
PSELCW

SEQ ID NO: 31864 - protein, 6 aa, synthetic construct
PSELCY

SEQ ID NO: 31865 - protein, 6 aa, synthetic construct
PSELQD

SEQ ID NO: 31866 - protein, 6 aa, synthetic construct
PSELQE

SEQ ID NO: 31867 - protein, 6 aa, synthetic construct
PSELQF

SEQ ID NO: 31868 - protein, 6 aa, synthetic construct
PSELQW

SEQ ID NO: 31869 - protein, 6 aa, synthetic construct
PSELQY

SEQ ID NO: 31870 - protein, 6 aa, synthetic construct
PSELED

SEQ ID NO: 31871 - protein, 6 aa, synthetic construct
PSELEE

SEQ ID NO: 31872 - protein, 6 aa, synthetic construct
PSELEF

SEQ ID NO: 31873 - protein, 6 aa, synthetic construct
PSELEW

SEQ ID NO: 31874 - protein, 6 aa, synthetic construct
PSELEY

SEQ ID NO: 31875 - protein, 6 aa, synthetic construct
PSELGD

SEQ ID NO: 31876 - protein, 6 aa, synthetic construct
PSELGE

SEQ ID NO: 31877 - protein, 6 aa, synthetic construct
PSELGF

SEQ ID NO: 31878 - protein, 6 aa, synthetic construct
PSELGW

SEQ ID NO: 31879 - protein, 6 aa, synthetic construct
PSELGY

SEQ ID NO: 31880 - protein, 6 aa, synthetic construct
PSELHD

SEQ ID NO: 31881 - protein, 6 aa, synthetic construct
PSELHE

SEQ ID NO: 31882 - protein, 6 aa, synthetic construct
PSELHF

SEQ ID NO: 31883 - protein, 6 aa, synthetic construct
PSELHW

SEQ ID NO: 31884 - protein, 6 aa, synthetic construct
PSELHY

SEQ ID NO: 31885 - protein, 6 aa, synthetic construct
PSELID

SEQ ID NO: 31886 - protein, 6 aa, synthetic construct
PSELIE

SEQ ID NO: 31887 - protein, 6 aa, synthetic construct
PSELIF

SEQ ID NO: 31888 - protein, 6 aa, synthetic construct
PSELIW

SEQ ID NO: 31889 - protein, 6 aa, synthetic construct
PSELIY

SEQ ID NO: 31890 - protein, 6 aa, synthetic construct
PSELLD

SEQ ID NO: 31891 - protein, 6 aa, synthetic construct
PSELLE

SEQ ID NO: 31892 - protein, 6 aa, synthetic construct
PSELLF

SEQ ID NO: 31893 - protein, 6 aa, synthetic construct
PSELLW

SEQ ID NO: 31894 - protein, 6 aa, synthetic construct
PSELLY

SEQ ID NO: 31895 - protein, 6 aa, synthetic construct
PSELKD

SEQ ID NO: 31896 - protein, 6 aa, synthetic construct
PSELKE

SEQ ID NO: 31897 - protein, 6 aa, synthetic construct
PSELKF

SEQ ID NO: 31898 - protein, 6 aa, synthetic construct
PSELKW

SEQ ID NO: 31899 - protein, 6 aa, synthetic construct
PSELKY

SEQ ID NO: 31900 - protein, 6 aa, synthetic construct
PSELMD

SEQ ID NO: 31901 - protein, 6 aa, synthetic construct
PSELME

SEQ ID NO: 31902 - protein, 6 aa, synthetic construct
PSELMF

SEQ ID NO: 31903 - protein, 6 aa, synthetic construct
PSELMW

SEQ ID NO: 31904 - protein, 6 aa, synthetic construct
PSELMY

SEQ ID NO: 31905 - protein, 6 aa, synthetic construct
PSELFD

SEQ ID NO: 31906 - protein, 6 aa, synthetic construct
PSELFE

SEQ ID NO: 31907 - protein, 6 aa, synthetic construct
PSELFF

SEQ ID NO: 31908 - protein, 6 aa, synthetic construct
PSELFW

SEQ ID NO: 31909 - protein, 6 aa, synthetic construct
PSELFY

SEQ ID NO: 31910 - protein, 6 aa, synthetic construct
PSELPD

SEQ ID NO: 31911 - protein, 6 aa, synthetic construct
PSELPE

SEQ ID NO: 31912 - protein, 6 aa, synthetic construct
PSELPF

SEQ ID NO: 31913 - protein, 6 aa, synthetic construct
PSELPW

SEQ ID NO: 31914 - protein, 6 aa, synthetic construct
PSELPY

SEQ ID NO: 31915 - protein, 6 aa, synthetic construct
PSELSD

SEQ ID NO: 31916 - protein, 6 aa, synthetic construct
PSELSE

SEQ ID NO: 31917 - protein, 6 aa, synthetic construct
PSELSF

SEQ ID NO: 31918 - protein, 6 aa, synthetic construct
PSELSW

SEQ ID NO: 31919 - protein, 6 aa, synthetic construct
PSELSY

SEQ ID NO: 31920 - protein, 6 aa, synthetic construct
PSELTD

SEQ ID NO: 31921 - protein, 6 aa, synthetic construct
PSELTE

SEQ ID NO: 31922 - protein, 6 aa, synthetic construct
PSELTF

SEQ ID NO: 31923 - protein, 6 aa, synthetic construct
PSELTW

SEQ ID NO: 31924 - protein, 6 aa, synthetic construct
PSELTY

SEQ ID NO: 31925 - protein, 6 aa, synthetic construct
PSELWD

SEQ ID NO: 31926 - protein, 6 aa, synthetic construct
PSELWE

SEQ ID NO: 31927 - protein, 6 aa, synthetic construct
PSELWF

SEQ ID NO: 31928 - protein, 6 aa, synthetic construct
PSELWW

SEQ ID NO: 31929 - protein, 6 aa, synthetic construct
PSELWY

SEQ ID NO: 31930 - protein, 6 aa, synthetic construct
PSELYD

SEQ ID NO: 31931 - protein, 6 aa, synthetic construct
PSELYE

SEQ ID NO: 31932 - protein, 6 aa, synthetic construct
PSELYF

SEQ ID NO: 31933 - protein, 6 aa, synthetic construct
PSELYW

SEQ ID NO: 31934 - protein, 6 aa, synthetic construct
PSELYY

SEQ ID NO: 31935 - protein, 6 aa, synthetic construct
PSELVD

SEQ ID NO: 31936 - protein, 6 aa, synthetic construct
PSELVE

SEQ ID NO: 31937 - protein, 6 aa, synthetic construct
PSELVF

SEQ ID NO: 31938 - protein, 6 aa, synthetic construct
PSELVW

SEQ ID NO: 31939 - protein, 6 aa, synthetic construct
PSELVY

SEQ ID NO: 31940 - protein, 6 aa, synthetic construct
PSEKAD

SEQ ID NO: 31941 - protein, 6 aa, synthetic construct
PSEKAE

SEQ ID NO: 31942 - protein, 6 aa, synthetic construct
PSEKAF

SEQ ID NO: 31943 - protein, 6 aa, synthetic construct
PSEKAW

SEQ ID NO: 31944 - protein, 6 aa, synthetic construct
PSEKAY

SEQ ID NO: 31945 - protein, 6 aa, synthetic construct
PSEKRD

SEQ ID NO: 31946 - protein, 6 aa, synthetic construct
PSEKRE

SEQ ID NO: 31947 - protein, 6 aa, synthetic construct
PSEKRF

SEQ ID NO: 31948 - protein, 6 aa, synthetic construct
PSEKRW

SEQ ID NO: 31949 - protein, 6 aa, synthetic construct
PSEKRY

SEQ ID NO: 31950 - protein, 6 aa, synthetic construct
PSEKND

SEQ ID NO: 31951 - protein, 6 aa, synthetic construct
PSEKNE

SEQ ID NO: 31952 - protein, 6 aa, synthetic construct
PSEKNF

SEQ ID NO: 31953 - protein, 6 aa, synthetic construct
PSEKNW

SEQ ID NO: 31954 - protein, 6 aa, synthetic construct
PSEKNY

SEQ ID NO: 31955 - protein, 6 aa, synthetic construct
PSEKDD

SEQ ID NO: 31956 - protein, 6 aa, synthetic construct
PSEKDE

SEQ ID NO: 31957 - protein, 6 aa, synthetic construct
PSEKDF

SEQ ID NO: 31958 - protein, 6 aa, synthetic construct
PSEKDW

SEQ ID NO: 31959 - protein, 6 aa, synthetic construct
PSEKDY

SEQ ID NO: 31960 - protein, 6 aa, synthetic construct
PSEKCD

SEQ ID NO: 31961 - protein, 6 aa, synthetic construct
PSEKCE

SEQ ID NO: 31962 - protein, 6 aa, synthetic construct
PSEKCF

SEQ ID NO: 31963 - protein, 6 aa, synthetic construct
PSEKCW

SEQ ID NO: 31964 - protein, 6 aa, synthetic construct
PSEKCY

SEQ ID NO: 31965 - protein, 6 aa, synthetic construct
PSEKQD

SEQ ID NO: 31966 - protein, 6 aa, synthetic construct
PSEKQE

SEQ ID NO: 31967 - protein, 6 aa, synthetic construct
PSEKQF

SEQ ID NO: 31968 - protein, 6 aa, synthetic construct
PSEKQW

SEQ ID NO: 31969 - protein, 6 aa, synthetic construct
PSEKQY

SEQ ID NO: 31970 - protein, 6 aa, synthetic construct
PSEKED

SEQ ID NO: 31971 - protein, 6 aa, synthetic construct
PSEKEE

SEQ ID NO: 31972 - protein, 6 aa, synthetic construct
PSEKEF

SEQ ID NO: 31973 - protein, 6 aa, synthetic construct
PSEKEW

SEQ ID NO: 31974 - protein, 6 aa, synthetic construct
PSEKEY

SEQ ID NO: 31975 - protein, 6 aa, synthetic construct
PSEKGD

SEQ ID NO: 31976 - protein, 6 aa, synthetic construct
PSEKGE

SEQ ID NO: 31977 - protein, 6 aa, synthetic construct
PSEKGF

SEQ ID NO: 31978 - protein, 6 aa, synthetic construct
PSEKGW

SEQ ID NO: 31979 - protein, 6 aa, synthetic construct
PSEKGY

SEQ ID NO: 31980 - protein, 6 aa, synthetic construct
PSEKHD

SEQ ID NO: 31981 - protein, 6 aa, synthetic construct
PSEKHE

SEQ ID NO: 31982 - protein, 6 aa, synthetic construct
PSEKHF

SEQ ID NO: 31983 - protein, 6 aa, synthetic construct
PSEKHW

SEQ ID NO: 31984 - protein, 6 aa, synthetic construct
PSEKHY

SEQ ID NO: 31985 - protein, 6 aa, synthetic construct
PSEKID

SEQ ID NO: 31986 - protein, 6 aa, synthetic construct
PSEKIE

SEQ ID NO: 31987 - protein, 6 aa, synthetic construct
PSEKIF

SEQ ID NO: 31988 - protein, 6 aa, synthetic construct
PSEKIW

SEQ ID NO: 31989 - protein, 6 aa, synthetic construct
PSEKIY

SEQ ID NO: 31990 - protein, 6 aa, synthetic construct
PSEKLD

SEQ ID NO: 31991 - protein, 6 aa, synthetic construct
PSEKLE

SEQ ID NO: 31992 - protein, 6 aa, synthetic construct
PSEKLF

SEQ ID NO: 31993 - protein, 6 aa, synthetic construct
PSEKLW

SEQ ID NO: 31994 - protein, 6 aa, synthetic construct
PSEKLY

SEQ ID NO: 31995 - protein, 6 aa, synthetic construct
PSEKKD

SEQ ID NO: 31996 - protein, 6 aa, synthetic construct
PSEKKE

SEQ ID NO: 31997 - protein, 6 aa, synthetic construct
PSEKKF

SEQ ID NO: 31998 - protein, 6 aa, synthetic construct
PSEKKW

SEQ ID NO: 31999 - protein, 6 aa, synthetic construct
PSEKKY

SEQ ID NO: 32000 - protein, 6 aa, synthetic construct
PSEKMD

SEQ ID NO: 32001 - protein, 6 aa, synthetic construct
PSEKME

SEQ ID NO: 32002 - protein, 6 aa, synthetic construct
PSEKMF

SEQ ID NO: 32003 - protein, 6 aa, synthetic construct
PSEKMW

SEQ ID NO: 32004 - protein, 6 aa, synthetic construct
PSEKMY

SEQ ID NO: 32005 - protein, 6 aa, synthetic construct
PSEKFD

SEQ ID NO: 32006 - protein, 6 aa, synthetic construct
PSEKFE

SEQ ID NO: 32007 - protein, 6 aa, synthetic construct
PSEKFF

SEQ ID NO: 32008 - protein, 6 aa, synthetic construct
PSEKFW

SEQ ID NO: 32009 - protein, 6 aa, synthetic construct
PSEKFY

SEQ ID NO: 32010 - protein, 6 aa, synthetic construct
PSEKPD

SEQ ID NO: 32011 - protein, 6 aa, synthetic construct
PSEKPE

SEQ ID NO: 32012 - protein, 6 aa, synthetic construct
PSEKPF

SEQ ID NO: 32013 - protein, 6 aa, synthetic construct
PSEKPW

SEQ ID NO: 32014 - protein, 6 aa, synthetic construct
PSEKPY

SEQ ID NO: 32015 - protein, 6 aa, synthetic construct
PSEKSD

SEQ ID NO: 32016 - protein, 6 aa, synthetic construct
PSEKSE

SEQ ID NO: 32017 - protein, 6 aa, synthetic construct
PSEKSF

SEQ ID NO: 32018 - protein, 6 aa, synthetic construct
PSEKSW

SEQ ID NO: 32019 - protein, 6 aa, synthetic construct
PSEKSY

SEQ ID NO: 32020 - protein, 6 aa, synthetic construct
PSEKTD

SEQ ID NO: 32021 - protein, 6 aa, synthetic construct
PSEKTE

SEQ ID NO: 32022 - protein, 6 aa, synthetic construct
PSEKTF

SEQ ID NO: 32023 - protein, 6 aa, synthetic construct
PSEKTW

SEQ ID NO: 32024 - protein, 6 aa, synthetic construct
PSEKTY

SEQ ID NO: 32025 - protein, 6 aa, synthetic construct
PSEKWD

SEQ ID NO: 32026 - protein, 6 aa, synthetic construct
PSEKWE

SEQ ID NO: 32027 - protein, 6 aa, synthetic construct
PSEKWF

SEQ ID NO: 32028 - protein, 6 aa, synthetic construct
PSEKWW

SEQ ID NO: 32029 - protein, 6 aa, synthetic construct
PSEKWY

SEQ ID NO: 32030 - protein, 6 aa, synthetic construct
PSEKYD

SEQ ID NO: 32031 - protein, 6 aa, synthetic construct
PSEKYE

SEQ ID NO: 32032 - protein, 6 aa, synthetic construct
PSEKYF

SEQ ID NO: 32033 - protein, 6 aa, synthetic construct
PSEKYW

SEQ ID NO: 32034 - protein, 6 aa, synthetic construct
PSEKYY

SEQ ID NO: 32035 - protein, 6 aa, synthetic construct
PSEKVD

SEQ ID NO: 32036 - protein, 6 aa, synthetic construct
PSEKVE

SEQ ID NO: 32037 - protein, 6 aa, synthetic construct
PSEKVF

SEQ ID NO: 32038 - protein, 6 aa, synthetic construct
PSEKVW

SEQ ID NO: 32039 - protein, 6 aa, synthetic construct
PSEKVY

SEQ ID NO: 32040 - protein, 6 aa, synthetic construct
PSEMAD

SEQ ID NO: 32041 - protein, 6 aa, synthetic construct
PSEMAE

SEQ ID NO: 32042 - protein, 6 aa, synthetic construct
PSEMAF

SEQ ID NO: 32043 - protein, 6 aa, synthetic construct
PSEMAW

SEQ ID NO: 32044 - protein, 6 aa, synthetic construct
PSEMAY

SEQ ID NO: 32045 - protein, 6 aa, synthetic construct
PSEMRD

SEQ ID NO: 32046 - protein, 6 aa, synthetic construct
PSEMRE

SEQ ID NO: 32047 - protein, 6 aa, synthetic construct
PSEMRF

SEQ ID NO: 32048 - protein, 6 aa, synthetic construct
PSEMRW

SEQ ID NO: 32049 - protein, 6 aa, synthetic construct
PSEMRY

SEQ ID NO: 32050 - protein, 6 aa, synthetic construct
PSEMND

SEQ ID NO: 32051 - protein, 6 aa, synthetic construct
PSEMNE

SEQ ID NO: 32052 - protein, 6 aa, synthetic construct
PSEMNF

SEQ ID NO: 32053 - protein, 6 aa, synthetic construct
PSEMNW

SEQ ID NO: 32054 - protein, 6 aa, synthetic construct
PSEMNY

SEQ ID NO: 32055 - protein, 6 aa, synthetic construct
PSEMDD

SEQ ID NO: 32056 - protein, 6 aa, synthetic construct
PSEMDE

SEQ ID NO: 32057 - protein, 6 aa, synthetic construct
PSEMDF

SEQ ID NO: 32058 - protein, 6 aa, synthetic construct
PSEMDW

SEQ ID NO: 32059 - protein, 6 aa, synthetic construct
PSEMDY

SEQ ID NO: 32060 - protein, 6 aa, synthetic construct
PSEMCD

SEQ ID NO: 32061 - protein, 6 aa, synthetic construct
PSEMCE

SEQ ID NO: 32062 - protein, 6 aa, synthetic construct
PSEMCF

SEQ ID NO: 32063 - protein, 6 aa, synthetic construct
PSEMCW

SEQ ID NO: 32064 - protein, 6 aa, synthetic construct
PSEMCY

SEQ ID NO: 32065 - protein, 6 aa, synthetic construct
PSEMQD

SEQ ID NO: 32066 - protein, 6 aa, synthetic construct
PSEMQE

SEQ ID NO: 32067 - protein, 6 aa, synthetic construct
PSEMQF

SEQ ID NO: 32068 - protein, 6 aa, synthetic construct
PSEMQW

SEQ ID NO: 32069 - protein, 6 aa, synthetic construct
PSEMQY

SEQ ID NO: 32070 - protein, 6 aa, synthetic construct
PSEMED

SEQ ID NO: 32071 - protein, 6 aa, synthetic construct
PSEMEE

SEQ ID NO: 32072 - protein, 6 aa, synthetic construct
PSEMEF

SEQ ID NO: 32073 - protein, 6 aa, synthetic construct
PSEMEW

SEQ ID NO: 32074 - protein, 6 aa, synthetic construct
PSEMEY

SEQ ID NO: 32075 - protein, 6 aa, synthetic construct
PSEMGD

SEQ ID NO: 32076 - protein, 6 aa, synthetic construct
PSEMGE

SEQ ID NO: 32077 - protein, 6 aa, synthetic construct
PSEMGF

SEQ ID NO: 32078 - protein, 6 aa, synthetic construct
PSEMGW

SEQ ID NO: 32079 - protein, 6 aa, synthetic construct
PSEMGY

SEQ ID NO: 32080 - protein, 6 aa, synthetic construct
PSEMHD

SEQ ID NO: 32081 - protein, 6 aa, synthetic construct
PSEMHE

SEQ ID NO: 32082 - protein, 6 aa, synthetic construct
PSEMHF

SEQ ID NO: 32083 - protein, 6 aa, synthetic construct
PSEMHW

SEQ ID NO: 32084 - protein, 6 aa, synthetic construct
PSEMHY

SEQ ID NO: 32085 - protein, 6 aa, synthetic construct
PSEMID

SEQ ID NO: 32086 - protein, 6 aa, synthetic construct
PSEMIE

SEQ ID NO: 32087 - protein, 6 aa, synthetic construct
PSEMIF

SEQ ID NO: 32088 - protein, 6 aa, synthetic construct
PSEMIW

SEQ ID NO: 32089 - protein, 6 aa, synthetic construct
PSEMIY

SEQ ID NO: 32090 - protein, 6 aa, synthetic construct
PSEMLD

SEQ ID NO: 32091 - protein, 6 aa, synthetic construct
PSEMLE

SEQ ID NO: 32092 - protein, 6 aa, synthetic construct
PSEMLF

SEQ ID NO: 32093 - protein, 6 aa, synthetic construct
PSEMLW

SEQ ID NO: 32094 - protein, 6 aa, synthetic construct
PSEMLY

SEQ ID NO: 32095 - protein, 6 aa, synthetic construct
PSEMKD

SEQ ID NO: 32096 - protein, 6 aa, synthetic construct
PSEMKE

SEQ ID NO: 32097 - protein, 6 aa, synthetic construct
PSEMKF

SEQ ID NO: 32098 - protein, 6 aa, synthetic construct
PSEMKW

SEQ ID NO: 32099 - protein, 6 aa, synthetic construct
PSEMKY

SEQ ID NO: 32100 - protein, 6 aa, synthetic construct
PSEMMD

SEQ ID NO: 32101 - protein, 6 aa, synthetic construct
PSEMME

SEQ ID NO: 32102 - protein, 6 aa, synthetic construct
PSEMMF

SEQ ID NO: 32103 - protein, 6 aa, synthetic construct
PSEMMW

SEQ ID NO: 32104 - protein, 6 aa, synthetic construct
PSEMMY

SEQ ID NO: 32105 - protein, 6 aa, synthetic construct
PSEMFD

SEQ ID NO: 32106 - protein, 6 aa, synthetic construct
PSEMFE

SEQ ID NO: 32107 - protein, 6 aa, synthetic construct
PSEMFF

SEQ ID NO: 32108 - protein, 6 aa, synthetic construct
PSEMFW

SEQ ID NO: 32109 - protein, 6 aa, synthetic construct
PSEMFY

SEQ ID NO: 32110 - protein, 6 aa, synthetic construct
PSEMPD

SEQ ID NO: 32111 - protein, 6 aa, synthetic construct
PSEMPE

SEQ ID NO: 32112 - protein, 6 aa, synthetic construct
PSEMPF

SEQ ID NO: 32113 - protein, 6 aa, synthetic construct
PSEMPW

SEQ ID NO: 32114 - protein, 6 aa, synthetic construct
PSEMPY

SEQ ID NO: 32115 - protein, 6 aa, synthetic construct
PSEMSD

SEQ ID NO: 32116 - protein, 6 aa, synthetic construct
PSEMSE

SEQ ID NO: 32117 - protein, 6 aa, synthetic construct
PSEMSF

SEQ ID NO: 32118 - protein, 6 aa, synthetic construct
PSEMSW

SEQ ID NO: 32119 - protein, 6 aa, synthetic construct
PSEMSY

SEQ ID NO: 32120 - protein, 6 aa, synthetic construct
PSEMTD

SEQ ID NO: 32121 - protein, 6 aa, synthetic construct
PSEMTE

SEQ ID NO: 32122 - protein, 6 aa, synthetic construct
PSEMTF

SEQ ID NO: 32123 - protein, 6 aa, synthetic construct
PSEMTW

SEQ ID NO: 32124 - protein, 6 aa, synthetic construct
PSEMTY

SEQ ID NO: 32125 - protein, 6 aa, synthetic construct
PSEMWD

SEQ ID NO: 32126 - protein, 6 aa, synthetic construct
PSEMWE

SEQ ID NO: 32127 - protein, 6 aa, synthetic construct
PSEMWF

SEQ ID NO: 32128 - protein, 6 aa, synthetic construct
PSEMWW

SEQ ID NO: 32129 - protein, 6 aa, synthetic construct
PSEMWY

SEQ ID NO: 32130 - protein, 6 aa, synthetic construct
PSEMYD

SEQ ID NO: 32131 - protein, 6 aa, synthetic construct
PSEMYE

SEQ ID NO: 32132 - protein, 6 aa, synthetic construct
PSEMYF

SEQ ID NO: 32133 - protein, 6 aa, synthetic construct
PSEMYW

SEQ ID NO: 32134 - protein, 6 aa, synthetic construct
PSEMYY

SEQ ID NO: 32135 - protein, 6 aa, synthetic construct
PSEMVD

SEQ ID NO: 32136 - protein, 6 aa, synthetic construct
PSEMVE

SEQ ID NO: 32137 - protein, 6 aa, synthetic construct
PSEMVF

SEQ ID NO: 32138 - protein, 6 aa, synthetic construct
PSEMVW

SEQ ID NO: 32139 - protein, 6 aa, synthetic construct
PSEMVY

SEQ ID NO: 32140 - protein, 6 aa, synthetic construct
PSEFAD

SEQ ID NO: 32141 - protein, 6 aa, synthetic construct
PSEFAE

SEQ ID NO: 32142 - protein, 6 aa, synthetic construct
PSEFAF

SEQ ID NO: 32143 - protein, 6 aa, synthetic construct
PSEFAW

SEQ ID NO: 32144 - protein, 6 aa, synthetic construct
PSEFAY

SEQ ID NO: 32145 - protein, 6 aa, synthetic construct
PSEFRD

SEQ ID NO: 32146 - protein, 6 aa, synthetic construct
PSEFRE

SEQ ID NO: 32147 - protein, 6 aa, synthetic construct
PSEFRF

SEQ ID NO: 32148 - protein, 6 aa, synthetic construct
PSEFRW

SEQ ID NO: 32149 - protein, 6 aa, synthetic construct
PSEFRY

SEQ ID NO: 32150 - protein, 6 aa, synthetic construct
PSEFND

SEQ ID NO: 32151 - protein, 6 aa, synthetic construct
PSEFNE

SEQ ID NO: 32152 - protein, 6 aa, synthetic construct
PSEFNF

SEQ ID NO: 32153 - protein, 6 aa, synthetic construct
PSEFNW

SEQ ID NO: 32154 - protein, 6 aa, synthetic construct
PSEFNY

SEQ ID NO: 32155 - protein, 6 aa, synthetic construct
PSEFDD

SEQ ID NO: 32156 - protein, 6 aa, synthetic construct
PSEFDE

SEQ ID NO: 32157 - protein, 6 aa, synthetic construct
PSEFDF

SEQ ID NO: 32158 - protein, 6 aa, synthetic construct
PSEFDW

SEQ ID NO: 32159 - protein, 6 aa, synthetic construct
PSEFDY

SEQ ID NO: 32160 - protein, 6 aa, synthetic construct
PSEFCD

SEQ ID NO: 32161 - protein, 6 aa, synthetic construct
PSEFCE

SEQ ID NO: 32162 - protein, 6 aa, synthetic construct
PSEFCF

SEQ ID NO: 32163 - protein, 6 aa, synthetic construct
PSEFCW

SEQ ID NO: 32164 - protein, 6 aa, synthetic construct
PSEFCY

SEQ ID NO: 32165 - protein, 6 aa, synthetic construct
PSEFQD

SEQ ID NO: 32166 - protein, 6 aa, synthetic construct
PSEFQE

SEQ ID NO: 32167 - protein, 6 aa, synthetic construct
PSEFQF

SEQ ID NO: 32168 - protein, 6 aa, synthetic construct
PSEFQW

SEQ ID NO: 32169 - protein, 6 aa, synthetic construct
PSEFQY

SEQ ID NO: 32170 - protein, 6 aa, synthetic construct
PSEFED

SEQ ID NO: 32171 - protein, 6 aa, synthetic construct
PSEFEE

SEQ ID NO: 32172 - protein, 6 aa, synthetic construct
PSEFEF

SEQ ID NO: 32173 - protein, 6 aa, synthetic construct
PSEFEW

SEQ ID NO: 32174 - protein, 6 aa, synthetic construct
PSEFEY

SEQ ID NO: 32175 - protein, 6 aa, synthetic construct
PSEFGD

SEQ ID NO: 32176 - protein, 6 aa, synthetic construct
PSEFGE

SEQ ID NO: 32177 - protein, 6 aa, synthetic construct
PSEFGF

SEQ ID NO: 32178 - protein, 6 aa, synthetic construct
PSEFGW

SEQ ID NO: 32179 - protein, 6 aa, synthetic construct
PSEFGY

SEQ ID NO: 32180 - protein, 6 aa, synthetic construct
PSEFHD

SEQ ID NO: 32181 - protein, 6 aa, synthetic construct
PSEFHE

SEQ ID NO: 32182 - protein, 6 aa, synthetic construct
PSEFHF

SEQ ID NO: 32183 - protein, 6 aa, synthetic construct
PSEFHW

SEQ ID NO: 32184 - protein, 6 aa, synthetic construct
PSEFHY

SEQ ID NO: 32185 - protein, 6 aa, synthetic construct
PSEFID

SEQ ID NO: 32186 - protein, 6 aa, synthetic construct
PSEFIE

SEQ ID NO: 32187 - protein, 6 aa, synthetic construct
PSEFIF

SEQ ID NO: 32188 - protein, 6 aa, synthetic construct
PSEFIW

SEQ ID NO: 32189 - protein, 6 aa, synthetic construct
PSEFIY

SEQ ID NO: 32190 - protein, 6 aa, synthetic construct
PSEFLD

SEQ ID NO: 32191 - protein, 6 aa, synthetic construct
PSEFLE

SEQ ID NO: 32192 - protein, 6 aa, synthetic construct
PSEFLF

SEQ ID NO: 32193 - protein, 6 aa, synthetic construct
PSEFLW

SEQ ID NO: 32194 - protein, 6 aa, synthetic construct
PSEFLY

SEQ ID NO: 32195 - protein, 6 aa, synthetic construct
PSEFKD

SEQ ID NO: 32196 - protein, 6 aa, synthetic construct
PSEFKE

SEQ ID NO: 32197 - protein, 6 aa, synthetic construct
PSEFKF

SEQ ID NO: 32198 - protein, 6 aa, synthetic construct
PSEFKW

SEQ ID NO: 32199 - protein, 6 aa, synthetic construct
PSEFKY

SEQ ID NO: 32200 - protein, 6 aa, synthetic construct
PSEFMD

SEQ ID NO: 32201 - protein, 6 aa, synthetic construct
PSEFME

SEQ ID NO: 32202 - protein, 6 aa, synthetic construct
PSEFMF

SEQ ID NO: 32203 - protein, 6 aa, synthetic construct
PSEFMW

SEQ ID NO: 32204 - protein, 6 aa, synthetic construct
PSEFMY

SEQ ID NO: 32205 - protein, 6 aa, synthetic construct
PSEFFD

SEQ ID NO: 32206 - protein, 6 aa, synthetic construct
PSEFFE

SEQ ID NO: 32207 - protein, 6 aa, synthetic construct
PSEFFF

SEQ ID NO: 32208 - protein, 6 aa, synthetic construct
PSEFFW

SEQ ID NO: 32209 - protein, 6 aa, synthetic construct
PSEFFY

SEQ ID NO: 32210 - protein, 6 aa, synthetic construct
PSEFPD

SEQ ID NO: 32211 - protein, 6 aa, synthetic construct
PSEFPE

SEQ ID NO: 32212 - protein, 6 aa, synthetic construct
PSEFPF

SEQ ID NO: 32213 - protein, 6 aa, synthetic construct
PSEFPW

SEQ ID NO: 32214 - protein, 6 aa, synthetic construct
PSEFPY

SEQ ID NO: 32215 - protein, 6 aa, synthetic construct
PSEFSD

SEQ ID NO: 32216 - protein, 6 aa, synthetic construct
PSEFSE

SEQ ID NO: 32217 - protein, 6 aa, synthetic construct
PSEFSF

SEQ ID NO: 32218 - protein, 6 aa, synthetic construct
PSEFSW

SEQ ID NO: 32219 - protein, 6 aa, synthetic construct
PSEFSY

SEQ ID NO: 32220 - protein, 6 aa, synthetic construct
PSEFTD

SEQ ID NO: 32221 - protein, 6 aa, synthetic construct
PSEFTE

SEQ ID NO: 32222 - protein, 6 aa, synthetic construct
PSEFTF

SEQ ID NO: 32223 - protein, 6 aa, synthetic construct
PSEFTW

SEQ ID NO: 32224 - protein, 6 aa, synthetic construct
PSEFTY

SEQ ID NO: 32225 - protein, 6 aa, synthetic construct
PSEFWD

SEQ ID NO: 32226 - protein, 6 aa, synthetic construct
PSEFWE

SEQ ID NO: 32227 - protein, 6 aa, synthetic construct
PSEFWF

SEQ ID NO: 32228 - protein, 6 aa, synthetic construct
PSEFWW

SEQ ID NO: 32229 - protein, 6 aa, synthetic construct
PSEFWY

SEQ ID NO: 32230 - protein, 6 aa, synthetic construct
PSEFYD

SEQ ID NO: 32231 - protein, 6 aa, synthetic construct
PSEFYE

SEQ ID NO: 32232 - protein, 6 aa, synthetic construct
PSEFYF

SEQ ID NO: 32233 - protein, 6 aa, synthetic construct
PSEFYW

SEQ ID NO: 32234 - protein, 6 aa, synthetic construct
PSEFYY

SEQ ID NO: 32235 - protein, 6 aa, synthetic construct
PSEFVD

SEQ ID NO: 32236 - protein, 6 aa, synthetic construct
PSEFVE

SEQ ID NO: 32237 - protein, 6 aa, synthetic construct
PSEFVF

SEQ ID NO: 32238 - protein, 6 aa, synthetic construct
PSEFVW

SEQ ID NO: 32239 - protein, 6 aa, synthetic construct
PSEFVY

SEQ ID NO: 32240 - protein, 6 aa, synthetic construct
PSEPAD

SEQ ID NO: 32241 - protein, 6 aa, synthetic construct
PSEPAE

SEQ ID NO: 32242 - protein, 6 aa, synthetic construct
PSEPAF

SEQ ID NO: 32243 - protein, 6 aa, synthetic construct
PSEPAW

SEQ ID NO: 32244 - protein, 6 aa, synthetic construct
PSEPAY

SEQ ID NO: 32245 - protein, 6 aa, synthetic construct
PSEPRD

SEQ ID NO: 32246 - protein, 6 aa, synthetic construct
PSEPRE

SEQ ID NO: 32247 - protein, 6 aa, synthetic construct
PSEPRF

SEQ ID NO: 32248 - protein, 6 aa, synthetic construct
PSEPRW

SEQ ID NO: 32249 - protein, 6 aa, synthetic construct
PSEPRY

SEQ ID NO: 32250 - protein, 6 aa, synthetic construct
PSEPND

SEQ ID NO: 32251 - protein, 6 aa, synthetic construct
PSEPNE

SEQ ID NO: 32252 - protein, 6 aa, synthetic construct
PSEPNF

SEQ ID NO: 32253 - protein, 6 aa, synthetic construct
PSEPNW

SEQ ID NO: 32254 - protein, 6 aa, synthetic construct
PSEPNY

SEQ ID NO: 32255 - protein, 6 aa, synthetic construct
PSEPDD

SEQ ID NO: 32256 - protein, 6 aa, synthetic construct
PSEPDE

SEQ ID NO: 32257 - protein, 6 aa, synthetic construct
PSEPDF

SEQ ID NO: 32258 - protein, 6 aa, synthetic construct
PSEPDW

SEQ ID NO: 32259 - protein, 6 aa, synthetic construct
PSEPDY

SEQ ID NO: 32260 - protein, 6 aa, synthetic construct
PSEPCD

SEQ ID NO: 32261 - protein, 6 aa, synthetic construct
PSEPCE

SEQ ID NO: 32262 - protein, 6 aa, synthetic construct
PSEPCF

SEQ ID NO: 32263 - protein, 6 aa, synthetic construct
PSEPCW

SEQ ID NO: 32264 - protein, 6 aa, synthetic construct
PSEPCY

SEQ ID NO: 32265 - protein, 6 aa, synthetic construct
PSEPQD

SEQ ID NO: 32266 - protein, 6 aa, synthetic construct
PSEPQE

SEQ ID NO: 32267 - protein, 6 aa, synthetic construct
PSEPQF

SEQ ID NO: 32268 - protein, 6 aa, synthetic construct
PSEPQW

SEQ ID NO: 32269 - protein, 6 aa, synthetic construct
PSEPQY

SEQ ID NO: 32270 - protein, 6 aa, synthetic construct
PSEPED

SEQ ID NO: 32271 - protein, 6 aa, synthetic construct
PSEPEE

SEQ ID NO: 32272 - protein, 6 aa, synthetic construct
PSEPEF

SEQ ID NO: 32273 - protein, 6 aa, synthetic construct
PSEPEW

SEQ ID NO: 32274 - protein, 6 aa, synthetic construct
PSEPEY

SEQ ID NO: 32275 - protein, 6 aa, synthetic construct
PSEPGD

SEQ ID NO: 32276 - protein, 6 aa, synthetic construct
PSEPGE

SEQ ID NO: 32277 - protein, 6 aa, synthetic construct
PSEPGF

SEQ ID NO: 32278 - protein, 6 aa, synthetic construct
PSEPGW

SEQ ID NO: 32279 - protein, 6 aa, synthetic construct
PSEPGY

SEQ ID NO: 32280 - protein, 6 aa, synthetic construct
PSEPHD

SEQ ID NO: 32281 - protein, 6 aa, synthetic construct
PSEPHE

SEQ ID NO: 32282 - protein, 6 aa, synthetic construct
PSEPHF

SEQ ID NO: 32283 - protein, 6 aa, synthetic construct
PSEPHW

SEQ ID NO: 32284 - protein, 6 aa, synthetic construct
PSEPHY

SEQ ID NO: 32285 - protein, 6 aa, synthetic construct
PSEPID

SEQ ID NO: 32286 - protein, 6 aa, synthetic construct
PSEPIE

SEQ ID NO: 32287 - protein, 6 aa, synthetic construct
PSEPIF

SEQ ID NO: 32288 - protein, 6 aa, synthetic construct
PSEPIW

SEQ ID NO: 32289 - protein, 6 aa, synthetic construct
PSEPIY

SEQ ID NO: 32290 - protein, 6 aa, synthetic construct
PSEPLD

SEQ ID NO: 32291 - protein, 6 aa, synthetic construct
PSEPLE

SEQ ID NO: 32292 - protein, 6 aa, synthetic construct
PSEPLF

SEQ ID NO: 32293 - protein, 6 aa, synthetic construct
PSEPLW

SEQ ID NO: 32294 - protein, 6 aa, synthetic construct
PSEPLY

SEQ ID NO: 32295 - protein, 6 aa, synthetic construct
PSEPKD

SEQ ID NO: 32296 - protein, 6 aa, synthetic construct
PSEPKE

SEQ ID NO: 32297 - protein, 6 aa, synthetic construct
PSEPKF

SEQ ID NO: 32298 - protein, 6 aa, synthetic construct
PSEPKW

SEQ ID NO: 32299 - protein, 6 aa, synthetic construct
PSEPKY

SEQ ID NO: 32300 - protein, 6 aa, synthetic construct
PSEPMD

SEQ ID NO: 32301 - protein, 6 aa, synthetic construct
PSEPME

SEQ ID NO: 32302 - protein, 6 aa, synthetic construct
PSEPMF

SEQ ID NO: 32303 - protein, 6 aa, synthetic construct
PSEPMW

SEQ ID NO: 32304 - protein, 6 aa, synthetic construct
PSEPMY

SEQ ID NO: 32305 - protein, 6 aa, synthetic construct
PSEPFD

SEQ ID NO: 32306 - protein, 6 aa, synthetic construct
PSEPFE

SEQ ID NO: 32307 - protein, 6 aa, synthetic construct
PSEPFF

SEQ ID NO: 32308 - protein, 6 aa, synthetic construct
PSEPFW

SEQ ID NO: 32309 - protein, 6 aa, synthetic construct
PSEPFY

SEQ ID NO: 32310 - protein, 6 aa, synthetic construct
PSEPPD

SEQ ID NO: 32311 - protein, 6 aa, synthetic construct
PSEPPE

SEQ ID NO: 32312 - protein, 6 aa, synthetic construct
PSEPPF

SEQ ID NO: 32313 - protein, 6 aa, synthetic construct
PSEPPW

SEQ ID NO: 32314 - protein, 6 aa, synthetic construct
PSEPPY

SEQ ID NO: 32315 - protein, 6 aa, synthetic construct
PSEPSD

SEQ ID NO: 32316 - protein, 6 aa, synthetic construct
PSEPSE

SEQ ID NO: 32317 - protein, 6 aa, synthetic construct
PSEPSF

SEQ ID NO: 32318 - protein, 6 aa, synthetic construct
PSEPSW

SEQ ID NO: 32319 - protein, 6 aa, synthetic construct
PSEPSY

SEQ ID NO: 32320 - protein, 6 aa, synthetic construct
PSEPTD

SEQ ID NO: 32321 - protein, 6 aa, synthetic construct
PSEPTE

SEQ ID NO: 32322 - protein, 6 aa, synthetic construct
PSEPTF

SEQ ID NO: 32323 - protein, 6 aa, synthetic construct
PSEPTW

SEQ ID NO: 32324 - protein, 6 aa, synthetic construct
PSEPTY

SEQ ID NO: 32325 - protein, 6 aa, synthetic construct
PSEPWD

SEQ ID NO: 32326 - protein, 6 aa, synthetic construct
PSEPWE

SEQ ID NO: 32327 - protein, 6 aa, synthetic construct
PSEPWF

SEQ ID NO: 32328 - protein, 6 aa, synthetic construct
PSEPWW

SEQ ID NO: 32329 - protein, 6 aa, synthetic construct
PSEPWY

SEQ ID NO: 32330 - protein, 6 aa, synthetic construct
PSEPYD

SEQ ID NO: 32331 - protein, 6 aa, synthetic construct
PSEPYE

SEQ ID NO: 32332 - protein, 6 aa, synthetic construct
PSEPYF

SEQ ID NO: 32333 - protein, 6 aa, synthetic construct
PSEPYW

SEQ ID NO: 32334 - protein, 6 aa, synthetic construct
PSEPYY

SEQ ID NO: 32335 - protein, 6 aa, synthetic construct
PSEPVD

SEQ ID NO: 32336 - protein, 6 aa, synthetic construct
PSEPVE

SEQ ID NO: 32337 - protein, 6 aa, synthetic construct
PSEPVF

SEQ ID NO: 32338 - protein, 6 aa, synthetic construct
PSEPVW

SEQ ID NO: 32339 - protein, 6 aa, synthetic construct
PSEPVY

SEQ ID NO: 32340 - protein, 6 aa, synthetic construct
PSESAD

SEQ ID NO: 32341 - protein, 6 aa, synthetic construct
PSESAE

SEQ ID NO: 32342 - protein, 6 aa, synthetic construct
PSESAF

SEQ ID NO: 32343 - protein, 6 aa, synthetic construct
PSESAW

SEQ ID NO: 32344 - protein, 6 aa, synthetic construct
PSESAY

SEQ ID NO: 32345 - protein, 6 aa, synthetic construct
PSESRD

SEQ ID NO: 32346 - protein, 6 aa, synthetic construct
PSESRE

SEQ ID NO: 32347 - protein, 6 aa, synthetic construct
PSESRF

SEQ ID NO: 32348 - protein, 6 aa, synthetic construct
PSESRW

SEQ ID NO: 32349 - protein, 6 aa, synthetic construct
PSESRY

SEQ ID NO: 32350 - protein, 6 aa, synthetic construct
PSESND

SEQ ID NO: 32351 - protein, 6 aa, synthetic construct
PSESNE

SEQ ID NO: 32352 - protein, 6 aa, synthetic construct
PSESNF

SEQ ID NO: 32353 - protein, 6 aa, synthetic construct
PSESNW

SEQ ID NO: 32354 - protein, 6 aa, synthetic construct
PSESNY

SEQ ID NO: 32355 - protein, 6 aa, synthetic construct
PSESDD

SEQ ID NO: 32356 - protein, 6 aa, synthetic construct
PSESDE

SEQ ID NO: 32357 - protein, 6 aa, synthetic construct
PSESDF

SEQ ID NO: 32358 - protein, 6 aa, synthetic construct
PSESDW

SEQ ID NO: 32359 - protein, 6 aa, synthetic construct
PSESDY

SEQ ID NO: 32360 - protein, 6 aa, synthetic construct
PSESCD

SEQ ID NO: 32361 - protein, 6 aa, synthetic construct
PSESCE

SEQ ID NO: 32362 - protein, 6 aa, synthetic construct
PSESCF

SEQ ID NO: 32363 - protein, 6 aa, synthetic construct
PSESCW

SEQ ID NO: 32364 - protein, 6 aa, synthetic construct
PSESCY

SEQ ID NO: 32365 - protein, 6 aa, synthetic construct
PSESQD

SEQ ID NO: 32366 - protein, 6 aa, synthetic construct
PSESQE

SEQ ID NO: 32367 - protein, 6 aa, synthetic construct
PSESQF

SEQ ID NO: 32368 - protein, 6 aa, synthetic construct
PSESQW

SEQ ID NO: 32369 - protein, 6 aa, synthetic construct
PSESQY

SEQ ID NO: 32370 - protein, 6 aa, synthetic construct
PSESED

SEQ ID NO: 32371 - protein, 6 aa, synthetic construct
PSESEE

SEQ ID NO: 32372 - protein, 6 aa, synthetic construct
PSESEF

SEQ ID NO: 32373 - protein, 6 aa, synthetic construct
PSESEW

SEQ ID NO: 32374 - protein, 6 aa, synthetic construct
PSESEY

SEQ ID NO: 32375 - protein, 6 aa, synthetic construct
PSESGD

SEQ ID NO: 32376 - protein, 6 aa, synthetic construct
PSESGE

SEQ ID NO: 32377 - protein, 6 aa, synthetic construct
PSESGF

SEQ ID NO: 32378 - protein, 6 aa, synthetic construct
PSESGW

SEQ ID NO: 32379 - protein, 6 aa, synthetic construct
PSESGY

SEQ ID NO: 32380 - protein, 6 aa, synthetic construct
PSESHD

SEQ ID NO: 32381 - protein, 6 aa, synthetic construct
PSESHE

SEQ ID NO: 32382 - protein, 6 aa, synthetic construct
PSESHF

SEQ ID NO: 32383 - protein, 6 aa, synthetic construct
PSESHW

SEQ ID NO: 32384 - protein, 6 aa, synthetic construct
PSESHY

SEQ ID NO: 32385 - protein, 6 aa, synthetic construct
PSESID

SEQ ID NO: 32386 - protein, 6 aa, synthetic construct
PSESIE

SEQ ID NO: 32387 - protein, 6 aa, synthetic construct
PSESIF

SEQ ID NO: 32388 - protein, 6 aa, synthetic construct
PSESIW

SEQ ID NO: 32389 - protein, 6 aa, synthetic construct
PSESIY

SEQ ID NO: 32390 - protein, 6 aa, synthetic construct
PSESLD

SEQ ID NO: 32391 - protein, 6 aa, synthetic construct
PSESLE

SEQ ID NO: 32392 - protein, 6 aa, synthetic construct
PSESLF

SEQ ID NO: 32393 - protein, 6 aa, synthetic construct
PSESLW

SEQ ID NO: 32394 - protein, 6 aa, synthetic construct
PSESLY

SEQ ID NO: 32395 - protein, 6 aa, synthetic construct
PSESKD

SEQ ID NO: 32396 - protein, 6 aa, synthetic construct
PSESKE

SEQ ID NO: 32397 - protein, 6 aa, synthetic construct
PSESKF

SEQ ID NO: 32398 - protein, 6 aa, synthetic construct
PSESKW

SEQ ID NO: 32399 - protein, 6 aa, synthetic construct
PSESKY

SEQ ID NO: 32400 - protein, 6 aa, synthetic construct
PSESMD

SEQ ID NO: 32401 - protein, 6 aa, synthetic construct
PSESME

SEQ ID NO: 32402 - protein, 6 aa, synthetic construct
PSESMF

SEQ ID NO: 32403 - protein, 6 aa, synthetic construct
PSESMW

SEQ ID NO: 32404 - protein, 6 aa, synthetic construct
PSESMY

SEQ ID NO: 32405 - protein, 6 aa, synthetic construct
PSESFD

SEQ ID NO: 32406 - protein, 6 aa, synthetic construct
PSESFE

SEQ ID NO: 32407 - protein, 6 aa, synthetic construct
PSESFF

SEQ ID NO: 32408 - protein, 6 aa, synthetic construct
PSESFW

SEQ ID NO: 32409 - protein, 6 aa, synthetic construct
PSESFY

SEQ ID NO: 32410 - protein, 6 aa, synthetic construct
PSESPD

SEQ ID NO: 32411 - protein, 6 aa, synthetic construct
PSESPE

SEQ ID NO: 32412 - protein, 6 aa, synthetic construct
PSESPF

SEQ ID NO: 32413 - protein, 6 aa, synthetic construct
PSESPW

SEQ ID NO: 32414 - protein, 6 aa, synthetic construct
PSESPY

SEQ ID NO: 32415 - protein, 6 aa, synthetic construct
PSESSD

SEQ ID NO: 32416 - protein, 6 aa, synthetic construct
PSESSE

SEQ ID NO: 32417 - protein, 6 aa, synthetic construct
PSESSF

SEQ ID NO: 32418 - protein, 6 aa, synthetic construct
PSESSW

SEQ ID NO: 32419 - protein, 6 aa, synthetic construct
PSESSY

SEQ ID NO: 32420 - protein, 6 aa, synthetic construct
PSESTD

SEQ ID NO: 32421 - protein, 6 aa, synthetic construct
PSESTE

SEQ ID NO: 32422 - protein, 6 aa, synthetic construct
PSESTF

SEQ ID NO: 32423 - protein, 6 aa, synthetic construct
PSESTW

SEQ ID NO: 32424 - protein, 6 aa, synthetic construct
PSESTY

SEQ ID NO: 32425 - protein, 6 aa, synthetic construct
PSESWD

SEQ ID NO: 32426 - protein, 6 aa, synthetic construct
PSESWE

SEQ ID NO: 32427 - protein, 6 aa, synthetic construct
PSESWF

SEQ ID NO: 32428 - protein, 6 aa, synthetic construct
PSESWW

SEQ ID NO: 32429 - protein, 6 aa, synthetic construct
PSESWY

SEQ ID NO: 32430 - protein, 6 aa, synthetic construct
PSESYD

SEQ ID NO: 32431 - protein, 6 aa, synthetic construct
PSESYE

SEQ ID NO: 32432 - protein, 6 aa, synthetic construct
PSESYF

SEQ ID NO: 32433 - protein, 6 aa, synthetic construct
PSESYW

SEQ ID NO: 32434 - protein, 6 aa, synthetic construct
PSESYY

SEQ ID NO: 32435 - protein, 6 aa, synthetic construct
PSESVD

SEQ ID NO: 32436 - protein, 6 aa, synthetic construct
PSESVE

SEQ ID NO: 32437 - protein, 6 aa, synthetic construct
PSESVF

SEQ ID NO: 32438 - protein, 6 aa, synthetic construct
PSESVW

SEQ ID NO: 32439 - protein, 6 aa, synthetic construct
PSESVY

SEQ ID NO: 32440 - protein, 6 aa, synthetic construct
PSETAD

SEQ ID NO: 32441 - protein, 6 aa, synthetic construct
PSETAE

SEQ ID NO: 32442 - protein, 6 aa, synthetic construct
PSETAF

SEQ ID NO: 32443 - protein, 6 aa, synthetic construct
PSETAW

SEQ ID NO: 32444 - protein, 6 aa, synthetic construct
PSETAY

SEQ ID NO: 32445 - protein, 6 aa, synthetic construct
PSETRD

SEQ ID NO: 32446 - protein, 6 aa, synthetic construct
PSETRE

SEQ ID NO: 32447 - protein, 6 aa, synthetic construct
PSETRF

SEQ ID NO: 32448 - protein, 6 aa, synthetic construct
PSETRW

SEQ ID NO: 32449 - protein, 6 aa, synthetic construct
PSETRY

SEQ ID NO: 32450 - protein, 6 aa, synthetic construct
PSETND

SEQ ID NO: 32451 - protein, 6 aa, synthetic construct
PSETNE

SEQ ID NO: 32452 - protein, 6 aa, synthetic construct
PSETNF

SEQ ID NO: 32453 - protein, 6 aa, synthetic construct
PSETNW

SEQ ID NO: 32454 - protein, 6 aa, synthetic construct
PSETNY

SEQ ID NO: 32455 - protein, 6 aa, synthetic construct
PSETDD

SEQ ID NO: 32456 - protein, 6 aa, synthetic construct
PSETDE

SEQ ID NO: 32457 - protein, 6 aa, synthetic construct
PSETDF

SEQ ID NO: 32458 - protein, 6 aa, synthetic construct
PSETDW

SEQ ID NO: 32459 - protein, 6 aa, synthetic construct
PSETDY

SEQ ID NO: 32460 - protein, 6 aa, synthetic construct
PSETCD

SEQ ID NO: 32461 - protein, 6 aa, synthetic construct
PSETCE

SEQ ID NO: 32462 - protein, 6 aa, synthetic construct
PSETCF

SEQ ID NO: 32463 - protein, 6 aa, synthetic construct
PSETCW

SEQ ID NO: 32464 - protein, 6 aa, synthetic construct
PSETCY

SEQ ID NO: 32465 - protein, 6 aa, synthetic construct
PSETQD

SEQ ID NO: 32466 - protein, 6 aa, synthetic construct
PSETQE

SEQ ID NO: 32467 - protein, 6 aa, synthetic construct
PSETQF

SEQ ID NO: 32468 - protein, 6 aa, synthetic construct
PSETQW

SEQ ID NO: 32469 - protein, 6 aa, synthetic construct
PSETQY

SEQ ID NO: 32470 - protein, 6 aa, synthetic construct
PSETED

SEQ ID NO: 32471 - protein, 6 aa, synthetic construct
PSETEE

SEQ ID NO: 32472 - protein, 6 aa, synthetic construct
PSETEF

SEQ ID NO: 32473 - protein, 6 aa, synthetic construct
PSETEW

SEQ ID NO: 32474 - protein, 6 aa, synthetic construct
PSETEY

SEQ ID NO: 32475 - protein, 6 aa, synthetic construct
PSETGD

SEQ ID NO: 32476 - protein, 6 aa, synthetic construct
PSETGE

SEQ ID NO: 32477 - protein, 6 aa, synthetic construct
PSETGF

SEQ ID NO: 32478 - protein, 6 aa, synthetic construct
PSETGW

SEQ ID NO: 32479 - protein, 6 aa, synthetic construct
PSETGY

SEQ ID NO: 32480 - protein, 6 aa, synthetic construct
PSETHD

SEQ ID NO: 32481 - protein, 6 aa, synthetic construct
PSETHE

SEQ ID NO: 32482 - protein, 6 aa, synthetic construct
PSETHF

SEQ ID NO: 32483 - protein, 6 aa, synthetic construct
PSETHW

SEQ ID NO: 32484 - protein, 6 aa, synthetic construct
PSETHY

SEQ ID NO: 32485 - protein, 6 aa, synthetic construct
PSETID

SEQ ID NO: 32486 - protein, 6 aa, synthetic construct
PSETIE

SEQ ID NO: 32487 - protein, 6 aa, synthetic construct
PSETIF

SEQ ID NO: 32488 - protein, 6 aa, synthetic construct
PSETIW

SEQ ID NO: 32489 - protein, 6 aa, synthetic construct
PSETIY

SEQ ID NO: 32490 - protein, 6 aa, synthetic construct
PSETLD

SEQ ID NO: 32491 - protein, 6 aa, synthetic construct
PSETLE

SEQ ID NO: 32492 - protein, 6 aa, synthetic construct
PSETLF

SEQ ID NO: 32493 - protein, 6 aa, synthetic construct
PSETLW

SEQ ID NO: 32494 - protein, 6 aa, synthetic construct
PSETLY

SEQ ID NO: 32495 - protein, 6 aa, synthetic construct
PSETKD

SEQ ID NO: 32496 - protein, 6 aa, synthetic construct
PSETKE

SEQ ID NO: 32497 - protein, 6 aa, synthetic construct
PSETKF

SEQ ID NO: 32498 - protein, 6 aa, synthetic construct
PSETKW

SEQ ID NO: 32499 - protein, 6 aa, synthetic construct
PSETKY

SEQ ID NO: 32500 - protein, 6 aa, synthetic construct
PSETMD

SEQ ID NO: 32501 - protein, 6 aa, synthetic construct
PSETME

SEQ ID NO: 32502 - protein, 6 aa, synthetic construct
PSETMF

SEQ ID NO: 32503 - protein, 6 aa, synthetic construct
PSETMW

SEQ ID NO: 32504 - protein, 6 aa, synthetic construct
PSETMY

SEQ ID NO: 32505 - protein, 6 aa, synthetic construct
PSETFD

SEQ ID NO: 32506 - protein, 6 aa, synthetic construct
PSETFE

SEQ ID NO: 32507 - protein, 6 aa, synthetic construct
PSETFF

SEQ ID NO: 32508 - protein, 6 aa, synthetic construct
PSETFW

SEQ ID NO: 32509 - protein, 6 aa, synthetic construct
PSETFY

SEQ ID NO: 32510 - protein, 6 aa, synthetic construct
PSETPD

SEQ ID NO: 32511 - protein, 6 aa, synthetic construct
PSETPE

SEQ ID NO: 32512 - protein, 6 aa, synthetic construct
PSETPF

SEQ ID NO: 32513 - protein, 6 aa, synthetic construct
PSETPW

SEQ ID NO: 32514 - protein, 6 aa, synthetic construct
PSETPY

SEQ ID NO: 32515 - protein, 6 aa, synthetic construct
PSETSD

SEQ ID NO: 32516 - protein, 6 aa, synthetic construct
PSETSE

SEQ ID NO: 32517 - protein, 6 aa, synthetic construct
PSETSF

SEQ ID NO: 32518 - protein, 6 aa, synthetic construct
PSETSW

SEQ ID NO: 32519 - protein, 6 aa, synthetic construct
PSETSY

SEQ ID NO: 32520 - protein, 6 aa, synthetic construct
PSETTD

SEQ ID NO: 32521 - protein, 6 aa, synthetic construct
PSETTE

SEQ ID NO: 32522 - protein, 6 aa, synthetic construct
PSETTF

SEQ ID NO: 32523 - protein, 6 aa, synthetic construct
PSETTW

SEQ ID NO: 32524 - protein, 6 aa, synthetic construct
PSETTY

SEQ ID NO: 32525 - protein, 6 aa, synthetic construct
PSETWD

SEQ ID NO: 32526 - protein, 6 aa, synthetic construct
PSETWE

SEQ ID NO: 32527 - protein, 6 aa, synthetic construct
PSETWF

SEQ ID NO: 32528 - protein, 6 aa, synthetic construct
PSETWW

SEQ ID NO: 32529 - protein, 6 aa, synthetic construct
PSETWY

SEQ ID NO: 32530 - protein, 6 aa, synthetic construct
PSETYD

SEQ ID NO: 32531 - protein, 6 aa, synthetic construct
PSETYE

SEQ ID NO: 32532 - protein, 6 aa, synthetic construct
PSETYF

SEQ ID NO: 32533 - protein, 6 aa, synthetic construct
PSETYW

SEQ ID NO: 32534 - protein, 6 aa, synthetic construct
PSETYY

SEQ ID NO: 32535 - protein, 6 aa, synthetic construct
PSETVD

SEQ ID NO: 32536 - protein, 6 aa, synthetic construct
PSETVE

SEQ ID NO: 32537 - protein, 6 aa, synthetic construct
PSETVF

SEQ ID NO: 32538 - protein, 6 aa, synthetic construct
PSETVW

SEQ ID NO: 32539 - protein, 6 aa, synthetic construct
PSETVY

SEQ ID NO: 32540 - protein, 6 aa, synthetic construct
PSEWAD

SEQ ID NO: 32541 - protein, 6 aa, synthetic construct
PSEWAE

SEQ ID NO: 32542 - protein, 6 aa, synthetic construct
PSEWAF

SEQ ID NO: 32543 - protein, 6 aa, synthetic construct
PSEWAW

SEQ ID NO: 32544 - protein, 6 aa, synthetic construct
PSEWAY

SEQ ID NO: 32545 - protein, 6 aa, synthetic construct
PSEWRD

SEQ ID NO: 32546 - protein, 6 aa, synthetic construct
PSEWRE

SEQ ID NO: 32547 - protein, 6 aa, synthetic construct
PSEWRF

SEQ ID NO: 32548 - protein, 6 aa, synthetic construct
PSEWRW

SEQ ID NO: 32549 - protein, 6 aa, synthetic construct
PSEWRY

SEQ ID NO: 32550 - protein, 6 aa, synthetic construct
PSEWND

SEQ ID NO: 32551 - protein, 6 aa, synthetic construct
PSEWNE

SEQ ID NO: 32552 - protein, 6 aa, synthetic construct
PSEWNF

SEQ ID NO: 32553 - protein, 6 aa, synthetic construct
PSEWNW

SEQ ID NO: 32554 - protein, 6 aa, synthetic construct
PSEWNY

SEQ ID NO: 32555 - protein, 6 aa, synthetic construct
PSEWDD

SEQ ID NO: 32556 - protein, 6 aa, synthetic construct
PSEWDE

SEQ ID NO: 32557 - protein, 6 aa, synthetic construct
PSEWDF

SEQ ID NO: 32558 - protein, 6 aa, synthetic construct
PSEWDW

SEQ ID NO: 32559 - protein, 6 aa, synthetic construct
PSEWDY

SEQ ID NO: 32560 - protein, 6 aa, synthetic construct
PSEWCD

SEQ ID NO: 32561 - protein, 6 aa, synthetic construct
PSEWCE

SEQ ID NO: 32562 - protein, 6 aa, synthetic construct
PSEWCF

SEQ ID NO: 32563 - protein, 6 aa, synthetic construct
PSEWCW

SEQ ID NO: 32564 - protein, 6 aa, synthetic construct
PSEWCY

SEQ ID NO: 32565 - protein, 6 aa, synthetic construct
PSEWQD

SEQ ID NO: 32566 - protein, 6 aa, synthetic construct
PSEWQE

SEQ ID NO: 32567 - protein, 6 aa, synthetic construct
PSEWQF

SEQ ID NO: 32568 - protein, 6 aa, synthetic construct
PSEWQW

SEQ ID NO: 32569 - protein, 6 aa, synthetic construct
PSEWQY

SEQ ID NO: 32570 - protein, 6 aa, synthetic construct
PSEWED

SEQ ID NO: 32571 - protein, 6 aa, synthetic construct
PSEWEE

SEQ ID NO: 32572 - protein, 6 aa, synthetic construct
PSEWEF

SEQ ID NO: 32573 - protein, 6 aa, synthetic construct
PSEWEW

SEQ ID NO: 32574 - protein, 6 aa, synthetic construct
PSEWEY

SEQ ID NO: 32575 - protein, 6 aa, synthetic construct
PSEWGD

SEQ ID NO: 32576 - protein, 6 aa, synthetic construct
PSEWGE

SEQ ID NO: 32577 - protein, 6 aa, synthetic construct
PSEWGF

SEQ ID NO: 32578 - protein, 6 aa, synthetic construct
PSEWGW

SEQ ID NO: 32579 - protein, 6 aa, synthetic construct
PSEWGY

SEQ ID NO: 32580 - protein, 6 aa, synthetic construct
PSEWHD

SEQ ID NO: 32581 - protein, 6 aa, synthetic construct
PSEWHE

SEQ ID NO: 32582 - protein, 6 aa, synthetic construct
PSEWHF

SEQ ID NO: 32583 - protein, 6 aa, synthetic construct
PSEWHW

SEQ ID NO: 32584 - protein, 6 aa, synthetic construct
PSEWHY

SEQ ID NO: 32585 - protein, 6 aa, synthetic construct
PSEWID

SEQ ID NO: 32586 - protein, 6 aa, synthetic construct
PSEWIE

SEQ ID NO: 32587 - protein, 6 aa, synthetic construct
PSEWIF

SEQ ID NO: 32588 - protein, 6 aa, synthetic construct
PSEWIW

SEQ ID NO: 32589 - protein, 6 aa, synthetic construct
PSEWIY

SEQ ID NO: 32590 - protein, 6 aa, synthetic construct
PSEWLD

SEQ ID NO: 32591 - protein, 6 aa, synthetic construct
PSEWLE

SEQ ID NO: 32592 - protein, 6 aa, synthetic construct
PSEWLF

SEQ ID NO: 32593 - protein, 6 aa, synthetic construct
PSEWLW

SEQ ID NO: 32594 - protein, 6 aa, synthetic construct
PSEWLY

SEQ ID NO: 32595 - protein, 6 aa, synthetic construct
PSEWKD

SEQ ID NO: 32596 - protein, 6 aa, synthetic construct
PSEWKE

SEQ ID NO: 32597 - protein, 6 aa, synthetic construct
PSEWKF

SEQ ID NO: 32598 - protein, 6 aa, synthetic construct
PSEWKW

SEQ ID NO: 32599 - protein, 6 aa, synthetic construct
PSEWKY

SEQ ID NO: 32600 - protein, 6 aa, synthetic construct
PSEWMD

SEQ ID NO: 32601 - protein, 6 aa, synthetic construct
PSEWME

SEQ ID NO: 32602 - protein, 6 aa, synthetic construct
PSEWMF

SEQ ID NO: 32603 - protein, 6 aa, synthetic construct
PSEWMW

SEQ ID NO: 32604 - protein, 6 aa, synthetic construct
PSEWMY

SEQ ID NO: 32605 - protein, 6 aa, synthetic construct
PSEWFD

SEQ ID NO: 32606 - protein, 6 aa, synthetic construct
PSEWFE

SEQ ID NO: 32607 - protein, 6 aa, synthetic construct
PSEWFF

SEQ ID NO: 32608 - protein, 6 aa, synthetic construct
PSEWFW

SEQ ID NO: 32609 - protein, 6 aa, synthetic construct
PSEWFY

SEQ ID NO: 32610 - protein, 6 aa, synthetic construct
PSEWPD

SEQ ID NO: 32611 - protein, 6 aa, synthetic construct
PSEWPE

SEQ ID NO: 32612 - protein, 6 aa, synthetic construct
PSEWPF

SEQ ID NO: 32613 - protein, 6 aa, synthetic construct
PSEWPW

SEQ ID NO: 32614 - protein, 6 aa, synthetic construct
PSEWPY

SEQ ID NO: 32615 - protein, 6 aa, synthetic construct
PSEWSD

SEQ ID NO: 32616 - protein, 6 aa, synthetic construct
PSEWSE

SEQ ID NO: 32617 - protein, 6 aa, synthetic construct
PSEWSF

SEQ ID NO: 32618 - protein, 6 aa, synthetic construct
PSEWSW

SEQ ID NO: 32619 - protein, 6 aa, synthetic construct
PSEWSY

SEQ ID NO: 32620 - protein, 6 aa, synthetic construct
PSEWTD

SEQ ID NO: 32621 - protein, 6 aa, synthetic construct
PSEWTE

SEQ ID NO: 32622 - protein, 6 aa, synthetic construct
PSEWTF

SEQ ID NO: 32623 - protein, 6 aa, synthetic construct
PSEWTW

SEQ ID NO: 32624 - protein, 6 aa, synthetic construct
PSEWTY

SEQ ID NO: 32625 - protein, 6 aa, synthetic construct
PSEWWD

SEQ ID NO: 32626 - protein, 6 aa, synthetic construct
PSEWWE

SEQ ID NO: 32627 - protein, 6 aa, synthetic construct
PSEWWF

SEQ ID NO: 32628 - protein, 6 aa, synthetic construct
PSEWWW

SEQ ID NO: 32629 - protein, 6 aa, synthetic construct
PSEWWY

SEQ ID NO: 32630 - protein, 6 aa, synthetic construct
PSEWYD

SEQ ID NO: 32631 - protein, 6 aa, synthetic construct
PSEWYE

SEQ ID NO: 32632 - protein, 6 aa, synthetic construct
PSEWYF

SEQ ID NO: 32633 - protein, 6 aa, synthetic construct
PSEWYW

SEQ ID NO: 32634 - protein, 6 aa, synthetic construct
PSEWYY

SEQ ID NO: 32635 - protein, 6 aa, synthetic construct
PSEWVD

SEQ ID NO: 32636 - protein, 6 aa, synthetic construct
PSEWVE

SEQ ID NO: 32637 - protein, 6 aa, synthetic construct
PSEWVF

SEQ ID NO: 32638 - protein, 6 aa, synthetic construct
PSEWVW

SEQ ID NO: 32639 - protein, 6 aa, synthetic construct
PSEWVY

SEQ ID NO: 32640 - protein, 6 aa, synthetic construct
PSEYAD

SEQ ID NO: 32641 - protein, 6 aa, synthetic construct
PSEYAE

SEQ ID NO: 32642 - protein, 6 aa, synthetic construct
PSEYAF

SEQ ID NO: 32643 - protein, 6 aa, synthetic construct
PSEYAW

SEQ ID NO: 32644 - protein, 6 aa, synthetic construct
PSEYAY

SEQ ID NO: 32645 - protein, 6 aa, synthetic construct
PSEYRD

SEQ ID NO: 32646 - protein, 6 aa, synthetic construct
PSEYRE

SEQ ID NO: 32647 - protein, 6 aa, synthetic construct
PSEYRF

SEQ ID NO: 32648 - protein, 6 aa, synthetic construct
PSEYRW

SEQ ID NO: 32649 - protein, 6 aa, synthetic construct
PSEYRY

SEQ ID NO: 32650 - protein, 6 aa, synthetic construct
PSEYND

SEQ ID NO: 32651 - protein, 6 aa, synthetic construct
PSEYNE

SEQ ID NO: 32652 - protein, 6 aa, synthetic construct
PSEYNF

SEQ ID NO: 32653 - protein, 6 aa, synthetic construct
PSEYNW

SEQ ID NO: 32654 - protein, 6 aa, synthetic construct
PSEYNY

SEQ ID NO: 32655 - protein, 6 aa, synthetic construct
PSEYDD

SEQ ID NO: 32656 - protein, 6 aa, synthetic construct
PSEYDE

SEQ ID NO: 32657 - protein, 6 aa, synthetic construct
PSEYDF

SEQ ID NO: 32658 - protein, 6 aa, synthetic construct
PSEYDW

SEQ ID NO: 32659 - protein, 6 aa, synthetic construct
PSEYDY

SEQ ID NO: 32660 - protein, 6 aa, synthetic construct
PSEYCD

SEQ ID NO: 32661 - protein, 6 aa, synthetic construct
PSEYCE

SEQ ID NO: 32662 - protein, 6 aa, synthetic construct
PSEYCF

SEQ ID NO: 32663 - protein, 6 aa, synthetic construct
PSEYCW

SEQ ID NO: 32664 - protein, 6 aa, synthetic construct
PSEYCY

SEQ ID NO: 32665 - protein, 6 aa, synthetic construct
PSEYQD

SEQ ID NO: 32666 - protein, 6 aa, synthetic construct
PSEYQE

SEQ ID NO: 32667 - protein, 6 aa, synthetic construct
PSEYQF

SEQ ID NO: 32668 - protein, 6 aa, synthetic construct
PSEYQW

SEQ ID NO: 32669 - protein, 6 aa, synthetic construct
PSEYQY

SEQ ID NO: 32670 - protein, 6 aa, synthetic construct
PSEYED

SEQ ID NO: 32671 - protein, 6 aa, synthetic construct
PSEYEE

SEQ ID NO: 32672 - protein, 6 aa, synthetic construct
PSEYEF

SEQ ID NO: 32673 - protein, 6 aa, synthetic construct
PSEYEW

SEQ ID NO: 32674 - protein, 6 aa, synthetic construct
PSEYEY

SEQ ID NO: 32675 - protein, 6 aa, synthetic construct
PSEYGD

SEQ ID NO: 32676 - protein, 6 aa, synthetic construct
PSEYGE

SEQ ID NO: 32677 - protein, 6 aa, synthetic construct
PSEYGF

SEQ ID NO: 32678 - protein, 6 aa, synthetic construct
PSEYGW

SEQ ID NO: 32679 - protein, 6 aa, synthetic construct
PSEYGY

SEQ ID NO: 32680 - protein, 6 aa, synthetic construct
PSEYHD

SEQ ID NO: 32681 - protein, 6 aa, synthetic construct
PSEYHE

SEQ ID NO: 32682 - protein, 6 aa, synthetic construct
PSEYHF

SEQ ID NO: 32683 - protein, 6 aa, synthetic construct
PSEYHW

SEQ ID NO: 32684 - protein, 6 aa, synthetic construct
PSEYHY

SEQ ID NO: 32685 - protein, 6 aa, synthetic construct
PSEYID

SEQ ID NO: 32686 - protein, 6 aa, synthetic construct
PSEYIE

SEQ ID NO: 32687 - protein, 6 aa, synthetic construct
PSEYIF

SEQ ID NO: 32688 - protein, 6 aa, synthetic construct
PSEYIW

SEQ ID NO: 32689 - protein, 6 aa, synthetic construct
PSEYIY

SEQ ID NO: 32690 - protein, 6 aa, synthetic construct
PSEYLD

SEQ ID NO: 32691 - protein, 6 aa, synthetic construct
PSEYLE

SEQ ID NO: 32692 - protein, 6 aa, synthetic construct
PSEYLF

SEQ ID NO: 32693 - protein, 6 aa, synthetic construct
PSEYLW

SEQ ID NO: 32694 - protein, 6 aa, synthetic construct
PSEYLY

SEQ ID NO: 32695 - protein, 6 aa, synthetic construct
PSEYKD

SEQ ID NO: 32696 - protein, 6 aa, synthetic construct
PSEYKE

SEQ ID NO: 32697 - protein, 6 aa, synthetic construct
PSEYKF

SEQ ID NO: 32698 - protein, 6 aa, synthetic construct
PSEYKW

SEQ ID NO: 32699 - protein, 6 aa, synthetic construct
PSEYKY

SEQ ID NO: 32700 - protein, 6 aa, synthetic construct
PSEYMD

SEQ ID NO: 32701 - protein, 6 aa, synthetic construct
PSEYME

SEQ ID NO: 32702 - protein, 6 aa, synthetic construct
PSEYMF

SEQ ID NO: 32703 - protein, 6 aa, synthetic construct
PSEYMW

SEQ ID NO: 32704 - protein, 6 aa, synthetic construct
PSEYMY

SEQ ID NO: 32705 - protein, 6 aa, synthetic construct
PSEYFD

SEQ ID NO: 32706 - protein, 6 aa, synthetic construct
PSEYFE

SEQ ID NO: 32707 - protein, 6 aa, synthetic construct
PSEYFF

SEQ ID NO: 32708 - protein, 6 aa, synthetic construct
PSEYFW

SEQ ID NO: 32709 - protein, 6 aa, synthetic construct
PSEYFY

SEQ ID NO: 32710 - protein, 6 aa, synthetic construct
PSEYPD

SEQ ID NO: 32711 - protein, 6 aa, synthetic construct
PSEYPE

SEQ ID NO: 32712 - protein, 6 aa, synthetic construct
PSEYPF

SEQ ID NO: 32713 - protein, 6 aa, synthetic construct
PSEYPW

SEQ ID NO: 32714 - protein, 6 aa, synthetic construct
PSEYPY

SEQ ID NO: 32715 - protein, 6 aa, synthetic construct
PSEYSD

SEQ ID NO: 32716 - protein, 6 aa, synthetic construct
PSEYSE

SEQ ID NO: 32717 - protein, 6 aa, synthetic construct
PSEYSF

SEQ ID NO: 32718 - protein, 6 aa, synthetic construct
PSEYSW

SEQ ID NO: 32719 - protein, 6 aa, synthetic construct
PSEYSY

SEQ ID NO: 32720 - protein, 6 aa, synthetic construct
PSEYTD

SEQ ID NO: 32721 - protein, 6 aa, synthetic construct
PSEYTE

SEQ ID NO: 32722 - protein, 6 aa, synthetic construct
PSEYTF

SEQ ID NO: 32723 - protein, 6 aa, synthetic construct
PSEYTW

SEQ ID NO: 32724 - protein, 6 aa, synthetic construct
PSEYTY

SEQ ID NO: 32725 - protein, 6 aa, synthetic construct
PSEYWD

SEQ ID NO: 32726 - protein, 6 aa, synthetic construct
PSEYWE

SEQ ID NO: 32727 - protein, 6 aa, synthetic construct
PSEYWF

SEQ ID NO: 32728 - protein, 6 aa, synthetic construct
PSEYWW

SEQ ID NO: 32729 - protein, 6 aa, synthetic construct
PSEYWY

SEQ ID NO: 32730 - protein, 6 aa, synthetic construct
PSEYYD

SEQ ID NO: 32731 - protein, 6 aa, synthetic construct
PSEYYE

SEQ ID NO: 32732 - protein, 6 aa, synthetic construct
PSEYYF

SEQ ID NO: 32733 - protein, 6 aa, synthetic construct
PSEYYW

SEQ ID NO: 32734 - protein, 6 aa, synthetic construct
PSEYYY

SEQ ID NO: 32735 - protein, 6 aa, synthetic construct
PSEYVD

SEQ ID NO: 32736 - protein, 6 aa, synthetic construct
PSEYVE

SEQ ID NO: 32737 - protein, 6 aa, synthetic construct
PSEYVF

SEQ ID NO: 32738 - protein, 6 aa, synthetic construct
PSEYVW

SEQ ID NO: 32739 - protein, 6 aa, synthetic construct
PSEYVY

SEQ ID NO: 32740 - protein, 6 aa, synthetic construct
PSEVAD

SEQ ID NO: 32741 - protein, 6 aa, synthetic construct
PSEVAE

SEQ ID NO: 32742 - protein, 6 aa, synthetic construct
PSEVAF

SEQ ID NO: 32743 - protein, 6 aa, synthetic construct
PSEVAW

SEQ ID NO: 32744 - protein, 6 aa, synthetic construct
PSEVAY

SEQ ID NO: 32745 - protein, 6 aa, synthetic construct
PSEVRD

SEQ ID NO: 32746 - protein, 6 aa, synthetic construct
PSEVRE

SEQ ID NO: 32747 - protein, 6 aa, synthetic construct
PSEVRF

SEQ ID NO: 32748 - protein, 6 aa, synthetic construct
PSEVRW

SEQ ID NO: 32749 - protein, 6 aa, synthetic construct
PSEVRY

SEQ ID NO: 32750 - protein, 6 aa, synthetic construct
PSEVND

SEQ ID NO: 32751 - protein, 6 aa, synthetic construct
PSEVNE

SEQ ID NO: 32752 - protein, 6 aa, synthetic construct
PSEVNF

SEQ ID NO: 32753 - protein, 6 aa, synthetic construct
PSEVNW

SEQ ID NO: 32754 - protein, 6 aa, synthetic construct
PSEVNY

SEQ ID NO: 32755 - protein, 6 aa, synthetic construct
PSEVDD

SEQ ID NO: 32756 - protein, 6 aa, synthetic construct
PSEVDE

SEQ ID NO: 32757 - protein, 6 aa, synthetic construct
PSEVDF

SEQ ID NO: 32758 - protein, 6 aa, synthetic construct
PSEVDW

SEQ ID NO: 32759 - protein, 6 aa, synthetic construct
PSEVDY

SEQ ID NO: 32760 - protein, 6 aa, synthetic construct
PSEVCD

SEQ ID NO: 32761 - protein, 6 aa, synthetic construct
PSEVCE

SEQ ID NO: 32762 - protein, 6 aa, synthetic construct
PSEVCF

SEQ ID NO: 32763 - protein, 6 aa, synthetic construct
PSEVCW

SEQ ID NO: 32764 - protein, 6 aa, synthetic construct
PSEVCY

SEQ ID NO: 32765 - protein, 6 aa, synthetic construct
PSEVQD

SEQ ID NO: 32766 - protein, 6 aa, synthetic construct
PSEVQE

SEQ ID NO: 32767 - protein, 6 aa, synthetic construct
PSEVQF

SEQ ID NO: 32768 - protein, 6 aa, synthetic construct
PSEVQW

SEQ ID NO: 32769 - protein, 6 aa, synthetic construct
PSEVQY

SEQ ID NO: 32770 - protein, 6 aa, synthetic construct
PSEVED

SEQ ID NO: 32771 - protein, 6 aa, synthetic construct
PSEVEE

SEQ ID NO: 32772 - protein, 6 aa, synthetic construct
PSEVEF

SEQ ID NO: 32773 - protein, 6 aa, synthetic construct
PSEVEW

SEQ ID NO: 32774 - protein, 6 aa, synthetic construct
PSEVEY

SEQ ID NO: 32775 - protein, 6 aa, synthetic construct
PSEVGD

SEQ ID NO: 32776 - protein, 6 aa, synthetic construct
PSEVGE

SEQ ID NO: 32777 - protein, 6 aa, synthetic construct
PSEVGF

SEQ ID NO: 32778 - protein, 6 aa, synthetic construct
PSEVGW

SEQ ID NO: 32779 - protein, 6 aa, synthetic construct
PSEVGY

SEQ ID NO: 32780 - protein, 6 aa, synthetic construct
PSEVHD

SEQ ID NO: 32781 - protein, 6 aa, synthetic construct
PSEVHE

SEQ ID NO: 32782 - protein, 6 aa, synthetic construct
PSEVHF

SEQ ID NO: 32783 - protein, 6 aa, synthetic construct
PSEVHW

SEQ ID NO: 32784 - protein, 6 aa, synthetic construct
PSEVHY

SEQ ID NO: 32785 - protein, 6 aa, synthetic construct
PSEVID

SEQ ID NO: 32786 - protein, 6 aa, synthetic construct
PSEVIE

SEQ ID NO: 32787 - protein, 6 aa, synthetic construct
PSEVIF

SEQ ID NO: 32788 - protein, 6 aa, synthetic construct
PSEVIW

SEQ ID NO: 32789 - protein, 6 aa, synthetic construct
PSEVIY

SEQ ID NO: 32790 - protein, 6 aa, synthetic construct
PSEVLD

SEQ ID NO: 32791 - protein, 6 aa, synthetic construct
PSEVLE

SEQ ID NO: 32792 - protein, 6 aa, synthetic construct
PSEVLF

SEQ ID NO: 32793 - protein, 6 aa, synthetic construct
PSEVLW

SEQ ID NO: 32794 - protein, 6 aa, synthetic construct
PSEVLY

SEQ ID NO: 32795 - protein, 6 aa, synthetic construct
PSEVKD

SEQ ID NO: 32796 - protein, 6 aa, synthetic construct
PSEVKE

SEQ ID NO: 32797 - protein, 6 aa, synthetic construct
PSEVKF

SEQ ID NO: 32798 - protein, 6 aa, synthetic construct
PSEVKW

SEQ ID NO: 32799 - protein, 6 aa, synthetic construct
PSEVKY

SEQ ID NO: 32800 - protein, 6 aa, synthetic construct
PSEVMD

SEQ ID NO: 32801 - protein, 6 aa, synthetic construct
PSEVME

SEQ ID NO: 32802 - protein, 6 aa, synthetic construct
PSEVMF

SEQ ID NO: 32803 - protein, 6 aa, synthetic construct
PSEVMW

SEQ ID NO: 32804 - protein, 6 aa, synthetic construct
PSEVMY

SEQ ID NO: 32805 - protein, 6 aa, synthetic construct
PSEVFD

SEQ ID NO: 32806 - protein, 6 aa, synthetic construct
PSEVFE

SEQ ID NO: 32807 - protein, 6 aa, synthetic construct
PSEVFF

SEQ ID NO: 32808 - protein, 6 aa, synthetic construct
PSEVFW

SEQ ID NO: 32809 - protein, 6 aa, synthetic construct
PSEVFY

SEQ ID NO: 32810 - protein, 6 aa, synthetic construct
PSEVPD

SEQ ID NO: 32811 - protein, 6 aa, synthetic construct
PSEVPE

SEQ ID NO: 32812 - protein, 6 aa, synthetic construct
PSEVPF

SEQ ID NO: 32813 - protein, 6 aa, synthetic construct
PSEVPW

SEQ ID NO: 32814 - protein, 6 aa, synthetic construct
PSEVPY

SEQ ID NO: 32815 - protein, 6 aa, synthetic construct
PSEVSD

SEQ ID NO: 32816 - protein, 6 aa, synthetic construct
PSEVSE

SEQ ID NO: 32817 - protein, 6 aa, synthetic construct
PSEVSF

SEQ ID NO: 32818 - protein, 6 aa, synthetic construct
PSEVSW

SEQ ID NO: 32819 - protein, 6 aa, synthetic construct
PSEVSY

SEQ ID NO: 32820 - protein, 6 aa, synthetic construct
PSEVTD

SEQ ID NO: 32821 - protein, 6 aa, synthetic construct
PSEVTE

SEQ ID NO: 32822 - protein, 6 aa, synthetic construct
PSEVTF

SEQ ID NO: 32823 - protein, 6 aa, synthetic construct
PSEVTW

SEQ ID NO: 32824 - protein, 6 aa, synthetic construct
PSEVTY

SEQ ID NO: 32825 - protein, 6 aa, synthetic construct
PSEVWD

SEQ ID NO: 32826 - protein, 6 aa, synthetic construct
PSEVWE

SEQ ID NO: 32827 - protein, 6 aa, synthetic construct
PSEVWF

SEQ ID NO: 32828 - protein, 6 aa, synthetic construct
PSEVWW

SEQ ID NO: 32829 - protein, 6 aa, synthetic construct
PSEVWY

SEQ ID NO: 32830 - protein, 6 aa, synthetic construct
PSEVYD

SEQ ID NO: 32831 - protein, 6 aa, synthetic construct
PSEVYE

SEQ ID NO: 32832 - protein, 6 aa, synthetic construct
PSEVYF

SEQ ID NO: 32833 - protein, 6 aa, synthetic construct
PSEVYW

SEQ ID NO: 32834 - protein, 6 aa, synthetic construct
PSEVYY

SEQ ID NO: 32835 - protein, 6 aa, synthetic construct
PSEVVD

SEQ ID NO: 32836 - protein, 6 aa, synthetic construct
PSEVVE

SEQ ID NO: 32837 - protein, 6 aa, synthetic construct
PSEVVF

SEQ ID NO: 32838 - protein, 6 aa, synthetic construct
PSEVVW

SEQ ID NO: 32839 - protein, 6 aa, synthetic construct
PSEVVY

SEQ ID NO: 32840 - protein, 6 aa, synthetic construct
PTEAAD

SEQ ID NO: 32841 - protein, 6 aa, synthetic construct
PTEAAE

SEQ ID NO: 32842 - protein, 6 aa, synthetic construct
PTEAAF

SEQ ID NO: 32843 - protein, 6 aa, synthetic construct
PTEAAW

SEQ ID NO: 32844 - protein, 6 aa, synthetic construct
PTEAAY

SEQ ID NO: 32845 - protein, 6 aa, synthetic construct
PTEARD

SEQ ID NO: 32846 - protein, 6 aa, synthetic construct
PTEARE

SEQ ID NO: 32847 - protein, 6 aa, synthetic construct
PTEARF

SEQ ID NO: 32848 - protein, 6 aa, synthetic construct
PTEARW

SEQ ID NO: 32849 - protein, 6 aa, synthetic construct
PTEARY

SEQ ID NO: 32850 - protein, 6 aa, synthetic construct
PTEAND

SEQ ID NO: 32851 - protein, 6 aa, synthetic construct
PTEANE

SEQ ID NO: 32852 - protein, 6 aa, synthetic construct
PTEANF

SEQ ID NO: 32853 - protein, 6 aa, synthetic construct
PTEANW

SEQ ID NO: 32854 - protein, 6 aa, synthetic construct
PTEANY

SEQ ID NO: 32855 - protein, 6 aa, synthetic construct
PTEADD

SEQ ID NO: 32856 - protein, 6 aa, synthetic construct
PTEADE

SEQ ID NO: 32857 - protein, 6 aa, synthetic construct
PTEADF

SEQ ID NO: 32858 - protein, 6 aa, synthetic construct
PTEADW

SEQ ID NO: 32859 - protein, 6 aa, synthetic construct
PTEADY

SEQ ID NO: 32860 - protein, 6 aa, synthetic construct
PTEACD

SEQ ID NO: 32861 - protein, 6 aa, synthetic construct
PTEACE

SEQ ID NO: 32862 - protein, 6 aa, synthetic construct
PTEACF

SEQ ID NO: 32863 - protein, 6 aa, synthetic construct
PTEACW

SEQ ID NO: 32864 - protein, 6 aa, synthetic construct
PTEACY

SEQ ID NO: 32865 - protein, 6 aa, synthetic construct
PTEAQD

SEQ ID NO: 32866 - protein, 6 aa, synthetic construct
PTEAQE

SEQ ID NO: 32867 - protein, 6 aa, synthetic construct
PTEAQF

SEQ ID NO: 32868 - protein, 6 aa, synthetic construct
PTEAQW

SEQ ID NO: 32869 - protein, 6 aa, synthetic construct
PTEAQY

SEQ ID NO: 32870 - protein, 6 aa, synthetic construct
PTEAED

SEQ ID NO: 32871 - protein, 6 aa, synthetic construct
PTEAEE

SEQ ID NO: 32872 - protein, 6 aa, synthetic construct
PTEAEF

SEQ ID NO: 32873 - protein, 6 aa, synthetic construct
PTEAEW

SEQ ID NO: 32874 - protein, 6 aa, synthetic construct
PTEAEY

SEQ ID NO: 32875 - protein, 6 aa, synthetic construct
PTEAGD

SEQ ID NO: 32876 - protein, 6 aa, synthetic construct
PTEAGE

SEQ ID NO: 32877 - protein, 6 aa, synthetic construct
PTEAGF

SEQ ID NO: 32878 - protein, 6 aa, synthetic construct
PTEAGW

SEQ ID NO: 32879 - protein, 6 aa, synthetic construct
PTEAGY

SEQ ID NO: 32880 - protein, 6 aa, synthetic construct
PTEAHD

SEQ ID NO: 32881 - protein, 6 aa, synthetic construct
PTEAHE

SEQ ID NO: 32882 - protein, 6 aa, synthetic construct
PTEAHF

SEQ ID NO: 32883 - protein, 6 aa, synthetic construct
PTEAHW

SEQ ID NO: 32884 - protein, 6 aa, synthetic construct
PTEAHY

SEQ ID NO: 32885 - protein, 6 aa, synthetic construct
PTEAID

SEQ ID NO: 32886 - protein, 6 aa, synthetic construct
PTEAIE

SEQ ID NO: 32887 - protein, 6 aa, synthetic construct
PTEAIF

SEQ ID NO: 32888 - protein, 6 aa, synthetic construct
PTEAIW

SEQ ID NO: 32889 - protein, 6 aa, synthetic construct
PTEAIY

SEQ ID NO: 32890 - protein, 6 aa, synthetic construct
PTEALD

SEQ ID NO: 32891 - protein, 6 aa, synthetic construct
PTEALE

SEQ ID NO: 32892 - protein, 6 aa, synthetic construct
PTEALF

SEQ ID NO: 32893 - protein, 6 aa, synthetic construct
PTEALW

SEQ ID NO: 32894 - protein, 6 aa, synthetic construct
PTEALY

SEQ ID NO: 32895 - protein, 6 aa, synthetic construct
PTEAKD

SEQ ID NO: 32896 - protein, 6 aa, synthetic construct
PTEAKE

SEQ ID NO: 32897 - protein, 6 aa, synthetic construct
PTEAKF

SEQ ID NO: 32898 - protein, 6 aa, synthetic construct
PTEAKW

SEQ ID NO: 32899 - protein, 6 aa, synthetic construct
PTEAKY

SEQ ID NO: 32900 - protein, 6 aa, synthetic construct
PTEAMD

SEQ ID NO: 32901 - protein, 6 aa, synthetic construct
PTEAME

SEQ ID NO: 32902 - protein, 6 aa, synthetic construct
PTEAMF

SEQ ID NO: 32903 - protein, 6 aa, synthetic construct
PTEAMW

SEQ ID NO: 32904 - protein, 6 aa, synthetic construct
PTEAMY

SEQ ID NO: 32905 - protein, 6 aa, synthetic construct
PTEAFD

SEQ ID NO: 32906 - protein, 6 aa, synthetic construct
PTEAFE

SEQ ID NO: 32907 - protein, 6 aa, synthetic construct
PTEAFF

SEQ ID NO: 32908 - protein, 6 aa, synthetic construct
PTEAFW

SEQ ID NO: 32909 - protein, 6 aa, synthetic construct
PTEAFY

SEQ ID NO: 32910 - protein, 6 aa, synthetic construct
PTEAPD

SEQ ID NO: 32911 - protein, 6 aa, synthetic construct
PTEAPE

SEQ ID NO: 32912 - protein, 6 aa, synthetic construct
PTEAPF

SEQ ID NO: 32913 - protein, 6 aa, synthetic construct
PTEAPW

SEQ ID NO: 32914 - protein, 6 aa, synthetic construct
PTEAPY

SEQ ID NO: 32915 - protein, 6 aa, synthetic construct
PTEASD

SEQ ID NO: 32916 - protein, 6 aa, synthetic construct
PTEASE

SEQ ID NO: 32917 - protein, 6 aa, synthetic construct
PTEASF

SEQ ID NO: 32918 - protein, 6 aa, synthetic construct
PTEASW

SEQ ID NO: 32919 - protein, 6 aa, synthetic construct
PTEASY

SEQ ID NO: 32920 - protein, 6 aa, synthetic construct
PTEATD

SEQ ID NO: 32921 - protein, 6 aa, synthetic construct
PTEATE

SEQ ID NO: 32922 - protein, 6 aa, synthetic construct
PTEATF

SEQ ID NO: 32923 - protein, 6 aa, synthetic construct
PTEATW

SEQ ID NO: 32924 - protein, 6 aa, synthetic construct
PTEATY

SEQ ID NO: 32925 - protein, 6 aa, synthetic construct
PTEAWD

SEQ ID NO: 32926 - protein, 6 aa, synthetic construct
PTEAWE

SEQ ID NO: 32927 - protein, 6 aa, synthetic construct
PTEAWF

SEQ ID NO: 32928 - protein, 6 aa, synthetic construct
PTEAWW

SEQ ID NO: 32929 - protein, 6 aa, synthetic construct
PTEAWY

SEQ ID NO: 32930 - protein, 6 aa, synthetic construct
PTEAYD

SEQ ID NO: 32931 - protein, 6 aa, synthetic construct
PTEAYE

SEQ ID NO: 32932 - protein, 6 aa, synthetic construct
PTEAYF

SEQ ID NO: 32933 - protein, 6 aa, synthetic construct
PTEAYW

SEQ ID NO: 32934 - protein, 6 aa, synthetic construct
PTEAYY

SEQ ID NO: 32935 - protein, 6 aa, synthetic construct
PTEAVD

SEQ ID NO: 32936 - protein, 6 aa, synthetic construct
PTEAVE

SEQ ID NO: 32937 - protein, 6 aa, synthetic construct
PTEAVF

SEQ ID NO: 32938 - protein, 6 aa, synthetic construct
PTEAVW

SEQ ID NO: 32939 - protein, 6 aa, synthetic construct
PTEAVY

SEQ ID NO: 32940 - protein, 6 aa, synthetic construct
PTERAD

SEQ ID NO: 32941 - protein, 6 aa, synthetic construct
PTERAE

SEQ ID NO: 32942 - protein, 6 aa, synthetic construct
PTERAF

SEQ ID NO: 32943 - protein, 6 aa, synthetic construct
PTERAW

SEQ ID NO: 32944 - protein, 6 aa, synthetic construct
PTERAY

SEQ ID NO: 32945 - protein, 6 aa, synthetic construct
PTERRD

SEQ ID NO: 32946 - protein, 6 aa, synthetic construct
PTERRE

SEQ ID NO: 32947 - protein, 6 aa, synthetic construct
PTERRF

SEQ ID NO: 32948 - protein, 6 aa, synthetic construct
PTERRW

SEQ ID NO: 32949 - protein, 6 aa, synthetic construct
PTERRY

SEQ ID NO: 32950 - protein, 6 aa, synthetic construct
PTERND

SEQ ID NO: 32951 - protein, 6 aa, synthetic construct
PTERNE

SEQ ID NO: 32952 - protein, 6 aa, synthetic construct
PTERNF

SEQ ID NO: 32953 - protein, 6 aa, synthetic construct
PTERNW

SEQ ID NO: 32954 - protein, 6 aa, synthetic construct
PTERNY

SEQ ID NO: 32955 - protein, 6 aa, synthetic construct
PTERDD

SEQ ID NO: 32956 - protein, 6 aa, synthetic construct
PTERDE

SEQ ID NO: 32957 - protein, 6 aa, synthetic construct
PTERDF

SEQ ID NO: 32958 - protein, 6 aa, synthetic construct
PTERDW

SEQ ID NO: 32959 - protein, 6 aa, synthetic construct
PTERDY

SEQ ID NO: 32960 - protein, 6 aa, synthetic construct
PTERCD

SEQ ID NO: 32961 - protein, 6 aa, synthetic construct
PTERCE

SEQ ID NO: 32962 - protein, 6 aa, synthetic construct
PTERCF

SEQ ID NO: 32963 - protein, 6 aa, synthetic construct
PTERCW

SEQ ID NO: 32964 - protein, 6 aa, synthetic construct
PTERCY

SEQ ID NO: 32965 - protein, 6 aa, synthetic construct
PTERQD

SEQ ID NO: 32966 - protein, 6 aa, synthetic construct
PTERQE

SEQ ID NO: 32967 - protein, 6 aa, synthetic construct
PTERQF

SEQ ID NO: 32968 - protein, 6 aa, synthetic construct
PTERQW

SEQ ID NO: 32969 - protein, 6 aa, synthetic construct
PTERQY

SEQ ID NO: 32970 - protein, 6 aa, synthetic construct
PTERED

SEQ ID NO: 32971 - protein, 6 aa, synthetic construct
PTEREE

SEQ ID NO: 32972 - protein, 6 aa, synthetic construct
PTEREF

SEQ ID NO: 32973 - protein, 6 aa, synthetic construct
PTEREW

SEQ ID NO: 32974 - protein, 6 aa, synthetic construct
PTEREY

SEQ ID NO: 32975 - protein, 6 aa, synthetic construct
PTERGD

SEQ ID NO: 32976 - protein, 6 aa, synthetic construct
PTERGE

SEQ ID NO: 32977 - protein, 6 aa, synthetic construct
PTERGF

SEQ ID NO: 32978 - protein, 6 aa, synthetic construct
PTERGW

SEQ ID NO: 32979 - protein, 6 aa, synthetic construct
PTERGY

SEQ ID NO: 32980 - protein, 6 aa, synthetic construct
PTERHD

SEQ ID NO: 32981 - protein, 6 aa, synthetic construct
PTERHE

SEQ ID NO: 32982 - protein, 6 aa, synthetic construct
PTERHF

SEQ ID NO: 32983 - protein, 6 aa, synthetic construct
PTERHW

SEQ ID NO: 32984 - protein, 6 aa, synthetic construct
PTERHY

SEQ ID NO: 32985 - protein, 6 aa, synthetic construct
PTERID

SEQ ID NO: 32986 - protein, 6 aa, synthetic construct
PTERIE

SEQ ID NO: 32987 - protein, 6 aa, synthetic construct
PTERIF

SEQ ID NO: 32988 - protein, 6 aa, synthetic construct
PTERIW

SEQ ID NO: 32989 - protein, 6 aa, synthetic construct
PTERIY

SEQ ID NO: 32990 - protein, 6 aa, synthetic construct
PTERLD

SEQ ID NO: 32991 - protein, 6 aa, synthetic construct
PTERLE

SEQ ID NO: 32992 - protein, 6 aa, synthetic construct
PTERLF

SEQ ID NO: 32993 - protein, 6 aa, synthetic construct
PTERLW

SEQ ID NO: 32994 - protein, 6 aa, synthetic construct
PTERLY

SEQ ID NO: 32995 - protein, 6 aa, synthetic construct
PTERKD

SEQ ID NO: 32996 - protein, 6 aa, synthetic construct
PTERKE

SEQ ID NO: 32997 - protein, 6 aa, synthetic construct
PTERKF

SEQ ID NO: 32998 - protein, 6 aa, synthetic construct
PTERKW

SEQ ID NO: 32999 - protein, 6 aa, synthetic construct
PTERKY

SEQ ID NO: 33000 - protein, 6 aa, synthetic construct
PTERMD

SEQ ID NO: 33001 - protein, 6 aa, synthetic construct
PTERME

SEQ ID NO: 33002 - protein, 6 aa, synthetic construct
PTERMF

SEQ ID NO: 33003 - protein, 6 aa, synthetic construct
PTERMW

SEQ ID NO: 33004 - protein, 6 aa, synthetic construct
PTERMY

SEQ ID NO: 33005 - protein, 6 aa, synthetic construct
PTERFD

SEQ ID NO: 33006 - protein, 6 aa, synthetic construct
PTERFE

SEQ ID NO: 33007 - protein, 6 aa, synthetic construct
PTERFF

SEQ ID NO: 33008 - protein, 6 aa, synthetic construct
PTERFW

SEQ ID NO: 33009 - protein, 6 aa, synthetic construct
PTERFY

SEQ ID NO: 33010 - protein, 6 aa, synthetic construct
PTERPD

SEQ ID NO: 33011 - protein, 6 aa, synthetic construct
PTERPE

SEQ ID NO: 33012 - protein, 6 aa, synthetic construct
PTERPF

SEQ ID NO: 33013 - protein, 6 aa, synthetic construct
PTERPW

SEQ ID NO: 33014 - protein, 6 aa, synthetic construct
PTERPY

SEQ ID NO: 33015 - protein, 6 aa, synthetic construct
PTERSD

SEQ ID NO: 33016 - protein, 6 aa, synthetic construct
PTERSE

SEQ ID NO: 33017 - protein, 6 aa, synthetic construct
PTERSF

SEQ ID NO: 33018 - protein, 6 aa, synthetic construct
PTERSW

SEQ ID NO: 33019 - protein, 6 aa, synthetic construct
PTERSY

SEQ ID NO: 33020 - protein, 6 aa, synthetic construct
PTERTD

SEQ ID NO: 33021 - protein, 6 aa, synthetic construct
PTERTE

SEQ ID NO: 33022 - protein, 6 aa, synthetic construct
PTERTF

SEQ ID NO: 33023 - protein, 6 aa, synthetic construct
PTERTW

SEQ ID NO: 33024 - protein, 6 aa, synthetic construct
PTERTY

SEQ ID NO: 33025 - protein, 6 aa, synthetic construct
PTERWD

SEQ ID NO: 33026 - protein, 6 aa, synthetic construct
PTERWE

SEQ ID NO: 33027 - protein, 6 aa, synthetic construct
PTERWF

SEQ ID NO: 33028 - protein, 6 aa, synthetic construct
PTERWW

SEQ ID NO: 33029 - protein, 6 aa, synthetic construct
PTERWY

SEQ ID NO: 33030 - protein, 6 aa, synthetic construct
PTERYD

SEQ ID NO: 33031 - protein, 6 aa, synthetic construct
PTERYE

SEQ ID NO: 33032 - protein, 6 aa, synthetic construct
PTERYF

SEQ ID NO: 33033 - protein, 6 aa, synthetic construct
PTERYW

SEQ ID NO: 33034 - protein, 6 aa, synthetic construct
PTERYY

SEQ ID NO: 33035 - protein, 6 aa, synthetic construct
PTERVD

SEQ ID NO: 33036 - protein, 6 aa, synthetic construct
PTERVE

SEQ ID NO: 33037 - protein, 6 aa, synthetic construct
PTERVF

SEQ ID NO: 33038 - protein, 6 aa, synthetic construct
PTERVW

SEQ ID NO: 33039 - protein, 6 aa, synthetic construct
PTERVY

SEQ ID NO: 33040 - protein, 6 aa, synthetic construct
PTENAD

SEQ ID NO: 33041 - protein, 6 aa, synthetic construct
PTENAE

SEQ ID NO: 33042 - protein, 6 aa, synthetic construct
PTENAF

SEQ ID NO: 33043 - protein, 6 aa, synthetic construct
PTENAW

SEQ ID NO: 33044 - protein, 6 aa, synthetic construct
PTENAY

SEQ ID NO: 33045 - protein, 6 aa, synthetic construct
PTENRD

SEQ ID NO: 33046 - protein, 6 aa, synthetic construct
PTENRE

SEQ ID NO: 33047 - protein, 6 aa, synthetic construct
PTENRF

SEQ ID NO: 33048 - protein, 6 aa, synthetic construct
PTENRW

SEQ ID NO: 33049 - protein, 6 aa, synthetic construct
PTENRY

SEQ ID NO: 33050 - protein, 6 aa, synthetic construct
PTENND

SEQ ID NO: 33051 - protein, 6 aa, synthetic construct
PTENNE

SEQ ID NO: 33052 - protein, 6 aa, synthetic construct
PTENNF

SEQ ID NO: 33053 - protein, 6 aa, synthetic construct
PTENNW

SEQ ID NO: 33054 - protein, 6 aa, synthetic construct
PTENNY

SEQ ID NO: 33055 - protein, 6 aa, synthetic construct
PTENDD

SEQ ID NO: 33056 - protein, 6 aa, synthetic construct
PTENDE

SEQ ID NO: 33057 - protein, 6 aa, synthetic construct
PTENDF

SEQ ID NO: 33058 - protein, 6 aa, synthetic construct
PTENDW

SEQ ID NO: 33059 - protein, 6 aa, synthetic construct
PTENDY

SEQ ID NO: 33060 - protein, 6 aa, synthetic construct
PTENCD

SEQ ID NO: 33061 - protein, 6 aa, synthetic construct
PTENCE

SEQ ID NO: 33062 - protein, 6 aa, synthetic construct
PTENCF

SEQ ID NO: 33063 - protein, 6 aa, synthetic construct
PTENCW

SEQ ID NO: 33064 - protein, 6 aa, synthetic construct
PTENCY

SEQ ID NO: 33065 - protein, 6 aa, synthetic construct
PTENQD

SEQ ID NO: 33066 - protein, 6 aa, synthetic construct
PTENQE

SEQ ID NO: 33067 - protein, 6 aa, synthetic construct
PTENQF

SEQ ID NO: 33068 - protein, 6 aa, synthetic construct
PTENQW

SEQ ID NO: 33069 - protein, 6 aa, synthetic construct
PTENQY

SEQ ID NO: 33070 - protein, 6 aa, synthetic construct
PTENED

SEQ ID NO: 33071 - protein, 6 aa, synthetic construct
PTENEE

SEQ ID NO: 33072 - protein, 6 aa, synthetic construct
PTENEF

SEQ ID NO: 33073 - protein, 6 aa, synthetic construct
PTENEW

SEQ ID NO: 33074 - protein, 6 aa, synthetic construct
PTENEY

SEQ ID NO: 33075 - protein, 6 aa, synthetic construct
PTENGD

SEQ ID NO: 33076 - protein, 6 aa, synthetic construct
PTENGE

SEQ ID NO: 33077 - protein, 6 aa, synthetic construct
PTENGF

SEQ ID NO: 33078 - protein, 6 aa, synthetic construct
PTENGW

SEQ ID NO: 33079 - protein, 6 aa, synthetic construct
PTENGY

SEQ ID NO: 33080 - protein, 6 aa, synthetic construct
PTENHD

SEQ ID NO: 33081 - protein, 6 aa, synthetic construct
PTENHE

SEQ ID NO: 33082 - protein, 6 aa, synthetic construct
PTENHF

SEQ ID NO: 33083 - protein, 6 aa, synthetic construct
PTENHW

SEQ ID NO: 33084 - protein, 6 aa, synthetic construct
PTENHY

SEQ ID NO: 33085 - protein, 6 aa, synthetic construct
PTENID

SEQ ID NO: 33086 - protein, 6 aa, synthetic construct
PTENIE

SEQ ID NO: 33087 - protein, 6 aa, synthetic construct
PTENIF

SEQ ID NO: 33088 - protein, 6 aa, synthetic construct
PTENIW

SEQ ID NO: 33089 - protein, 6 aa, synthetic construct
PTENIY

SEQ ID NO: 33090 - protein, 6 aa, synthetic construct
PTENLD

SEQ ID NO: 33091 - protein, 6 aa, synthetic construct
PTENLE

SEQ ID NO: 33092 - protein, 6 aa, synthetic construct
PTENLF

SEQ ID NO: 33093 - protein, 6 aa, synthetic construct
PTENLW

SEQ ID NO: 33094 - protein, 6 aa, synthetic construct
PTENLY

SEQ ID NO: 33095 - protein, 6 aa, synthetic construct
PTENKD

SEQ ID NO: 33096 - protein, 6 aa, synthetic construct
PTENKE

SEQ ID NO: 33097 - protein, 6 aa, synthetic construct
PTENKF

SEQ ID NO: 33098 - protein, 6 aa, synthetic construct
PTENKW

SEQ ID NO: 33099 - protein, 6 aa, synthetic construct
PTENKY

SEQ ID NO: 33100 - protein, 6 aa, synthetic construct
PTENMD

SEQ ID NO: 33101 - protein, 6 aa, synthetic construct
PTENME

SEQ ID NO: 33102 - protein, 6 aa, synthetic construct
PTENMF

SEQ ID NO: 33103 - protein, 6 aa, synthetic construct
PTENMW

SEQ ID NO: 33104 - protein, 6 aa, synthetic construct
PTENMY

SEQ ID NO: 33105 - protein, 6 aa, synthetic construct
PTENFD

SEQ ID NO: 33106 - protein, 6 aa, synthetic construct
PTENFE

SEQ ID NO: 33107 - protein, 6 aa, synthetic construct
PTENFF

SEQ ID NO: 33108 - protein, 6 aa, synthetic construct
PTENFW

SEQ ID NO: 33109 - protein, 6 aa, synthetic construct
PTENFY

SEQ ID NO: 33110 - protein, 6 aa, synthetic construct
PTENPD

SEQ ID NO: 33111 - protein, 6 aa, synthetic construct
PTENPE

SEQ ID NO: 33112 - protein, 6 aa, synthetic construct
PTENPF

SEQ ID NO: 33113 - protein, 6 aa, synthetic construct
PTENPW

SEQ ID NO: 33114 - protein, 6 aa, synthetic construct
PTENPY

SEQ ID NO: 33115 - protein, 6 aa, synthetic construct
PTENSD

SEQ ID NO: 33116 - protein, 6 aa, synthetic construct
PTENSE

SEQ ID NO: 33117 - protein, 6 aa, synthetic construct
PTENSF

SEQ ID NO: 33118 - protein, 6 aa, synthetic construct
PTENSW

SEQ ID NO: 33119 - protein, 6 aa, synthetic construct
PTENSY

SEQ ID NO: 33120 - protein, 6 aa, synthetic construct
PTENTD

SEQ ID NO: 33121 - protein, 6 aa, synthetic construct
PTENTE

SEQ ID NO: 33122 - protein, 6 aa, synthetic construct
PTENTF

SEQ ID NO: 33123 - protein, 6 aa, synthetic construct
PTENTW

SEQ ID NO: 33124 - protein, 6 aa, synthetic construct
PTENTY

SEQ ID NO: 33125 - protein, 6 aa, synthetic construct
PTENWD

SEQ ID NO: 33126 - protein, 6 aa, synthetic construct
PTENWE

SEQ ID NO: 33127 - protein, 6 aa, synthetic construct
PTENWF

SEQ ID NO: 33128 - protein, 6 aa, synthetic construct
PTENWW

SEQ ID NO: 33129 - protein, 6 aa, synthetic construct
PTENWY

SEQ ID NO: 33130 - protein, 6 aa, synthetic construct
PTENYD

SEQ ID NO: 33131 - protein, 6 aa, synthetic construct
PTENYE

SEQ ID NO: 33132 - protein, 6 aa, synthetic construct
PTENYF

SEQ ID NO: 33133 - protein, 6 aa, synthetic construct
PTENYW

SEQ ID NO: 33134 - protein, 6 aa, synthetic construct
PTENYY

SEQ ID NO: 33135 - protein, 6 aa, synthetic construct
PTENVD

SEQ ID NO: 33136 - protein, 6 aa, synthetic construct
PTENVE

SEQ ID NO: 33137 - protein, 6 aa, synthetic construct
PTENVF

SEQ ID NO: 33138 - protein, 6 aa, synthetic construct
PTENVW

SEQ ID NO: 33139 - protein, 6 aa, synthetic construct
PTENVY

SEQ ID NO: 33140 - protein, 6 aa, synthetic construct
PTEDAD

SEQ ID NO: 33141 - protein, 6 aa, synthetic construct
PTEDAE

SEQ ID NO: 33142 - protein, 6 aa, synthetic construct
PTEDAF

SEQ ID NO: 33143 - protein, 6 aa, synthetic construct
PTEDAW

SEQ ID NO: 33144 - protein, 6 aa, synthetic construct
PTEDAY

SEQ ID NO: 33145 - protein, 6 aa, synthetic construct
PTEDRD

SEQ ID NO: 33146 - protein, 6 aa, synthetic construct
PTEDRE

SEQ ID NO: 33147 - protein, 6 aa, synthetic construct
PTEDRF

SEQ ID NO: 33148 - protein, 6 aa, synthetic construct
PTEDRW

SEQ ID NO: 33149 - protein, 6 aa, synthetic construct
PTEDRY

SEQ ID NO: 33150 - protein, 6 aa, synthetic construct
PTEDND

SEQ ID NO: 33151 - protein, 6 aa, synthetic construct
PTEDNE

SEQ ID NO: 33152 - protein, 6 aa, synthetic construct
PTEDNF

SEQ ID NO: 33153 - protein, 6 aa, synthetic construct
PTEDNW

SEQ ID NO: 33154 - protein, 6 aa, synthetic construct
PTEDNY

SEQ ID NO: 33155 - protein, 6 aa, synthetic construct
PTEDDD

SEQ ID NO: 33156 - protein, 6 aa, synthetic construct
PTEDDE

SEQ ID NO: 33157 - protein, 6 aa, synthetic construct
PTEDDF

SEQ ID NO: 33158 - protein, 6 aa, synthetic construct
PTEDDW

SEQ ID NO: 33159 - protein, 6 aa, synthetic construct
PTEDDY

SEQ ID NO: 33160 - protein, 6 aa, synthetic construct
PTEDCD

SEQ ID NO: 33161 - protein, 6 aa, synthetic construct
PTEDCE

SEQ ID NO: 33162 - protein, 6 aa, synthetic construct
PTEDCF

SEQ ID NO: 33163 - protein, 6 aa, synthetic construct
PTEDCW

SEQ ID NO: 33164 - protein, 6 aa, synthetic construct
PTEDCY

SEQ ID NO: 33165 - protein, 6 aa, synthetic construct
PTEDQD

SEQ ID NO: 33166 - protein, 6 aa, synthetic construct
PTEDQE

SEQ ID NO: 33167 - protein, 6 aa, synthetic construct
PTEDQF

SEQ ID NO: 33168 - protein, 6 aa, synthetic construct
PTEDQW

SEQ ID NO: 33169 - protein, 6 aa, synthetic construct
PTEDQY

SEQ ID NO: 33170 - protein, 6 aa, synthetic construct
PTEDED

SEQ ID NO: 33171 - protein, 6 aa, synthetic construct
PTEDEE

SEQ ID NO: 33172 - protein, 6 aa, synthetic construct
PTEDEF

SEQ ID NO: 33173 - protein, 6 aa, synthetic construct
PTEDEW

SEQ ID NO: 33174 - protein, 6 aa, synthetic construct
PTEDEY

SEQ ID NO: 33175 - protein, 6 aa, synthetic construct
PTEDGD

SEQ ID NO: 33176 - protein, 6 aa, synthetic construct
PTEDGE

SEQ ID NO: 33177 - protein, 6 aa, synthetic construct
PTEDGF

SEQ ID NO: 33178 - protein, 6 aa, synthetic construct
PTEDGW

SEQ ID NO: 33179 - protein, 6 aa, synthetic construct
PTEDGY

SEQ ID NO: 33180 - protein, 6 aa, synthetic construct
PTEDHD

SEQ ID NO: 33181 - protein, 6 aa, synthetic construct
PTEDHE

SEQ ID NO: 33182 - protein, 6 aa, synthetic construct
PTEDHF

SEQ ID NO: 33183 - protein, 6 aa, synthetic construct
PTEDHW

SEQ ID NO: 33184 - protein, 6 aa, synthetic construct
PTEDHY

SEQ ID NO: 33185 - protein, 6 aa, synthetic construct
PTEDID

SEQ ID NO: 33186 - protein, 6 aa, synthetic construct
PTEDIE

SEQ ID NO: 33187 - protein, 6 aa, synthetic construct
PTEDIF

SEQ ID NO: 33188 - protein, 6 aa, synthetic construct
PTEDIW

SEQ ID NO: 33189 - protein, 6 aa, synthetic construct
PTEDIY

SEQ ID NO: 33190 - protein, 6 aa, synthetic construct
PTEDLD

SEQ ID NO: 33191 - protein, 6 aa, synthetic construct
PTEDLE

SEQ ID NO: 33192 - protein, 6 aa, synthetic construct
PTEDLF

SEQ ID NO: 33193 - protein, 6 aa, synthetic construct
PTEDLW

SEQ ID NO: 33194 - protein, 6 aa, synthetic construct
PTEDLY

SEQ ID NO: 33195 - protein, 6 aa, synthetic construct
PTEDKD

SEQ ID NO: 33196 - protein, 6 aa, synthetic construct
PTEDKE

SEQ ID NO: 33197 - protein, 6 aa, synthetic construct
PTEDKF

SEQ ID NO: 33198 - protein, 6 aa, synthetic construct
PTEDKW

SEQ ID NO: 33199 - protein, 6 aa, synthetic construct
PTEDKY

SEQ ID NO: 33200 - protein, 6 aa, synthetic construct
PTEDMD

SEQ ID NO: 33201 - protein, 6 aa, synthetic construct
PTEDME

SEQ ID NO: 33202 - protein, 6 aa, synthetic construct
PTEDMF

SEQ ID NO: 33203 - protein, 6 aa, synthetic construct
PTEDMW

SEQ ID NO: 33204 - protein, 6 aa, synthetic construct
PTEDMY

SEQ ID NO: 33205 - protein, 6 aa, synthetic construct
PTEDFD

SEQ ID NO: 33206 - protein, 6 aa, synthetic construct
PTEDFE

SEQ ID NO: 33207 - protein, 6 aa, synthetic construct
PTEDFF

SEQ ID NO: 33208 - protein, 6 aa, synthetic construct
PTEDFW

SEQ ID NO: 33209 - protein, 6 aa, synthetic construct
PTEDFY

SEQ ID NO: 33210 - protein, 6 aa, synthetic construct
PTEDPD

SEQ ID NO: 33211 - protein, 6 aa, synthetic construct
PTEDPE

SEQ ID NO: 33212 - protein, 6 aa, synthetic construct
PTEDPF

SEQ ID NO: 33213 - protein, 6 aa, synthetic construct
PTEDPW

SEQ ID NO: 33214 - protein, 6 aa, synthetic construct
PTEDPY

SEQ ID NO: 33215 - protein, 6 aa, synthetic construct
PTEDSD

SEQ ID NO: 33216 - protein, 6 aa, synthetic construct
PTEDSE

SEQ ID NO: 33217 - protein, 6 aa, synthetic construct
PTEDSF

SEQ ID NO: 33218 - protein, 6 aa, synthetic construct
PTEDSW

SEQ ID NO: 33219 - protein, 6 aa, synthetic construct
PTEDSY

SEQ ID NO: 33220 - protein, 6 aa, synthetic construct
PTEDTD

SEQ ID NO: 33221 - protein, 6 aa, synthetic construct
PTEDTE

SEQ ID NO: 33222 - protein, 6 aa, synthetic construct
PTEDTF

SEQ ID NO: 33223 - protein, 6 aa, synthetic construct
PTEDTW

SEQ ID NO: 33224 - protein, 6 aa, synthetic construct
PTEDTY

SEQ ID NO: 33225 - protein, 6 aa, synthetic construct
PTEDWD

SEQ ID NO: 33226 - protein, 6 aa, synthetic construct
PTEDWE

SEQ ID NO: 33227 - protein, 6 aa, synthetic construct
PTEDWF

SEQ ID NO: 33228 - protein, 6 aa, synthetic construct
PTEDWW

SEQ ID NO: 33229 - protein, 6 aa, synthetic construct
PTEDWY

SEQ ID NO: 33230 - protein, 6 aa, synthetic construct
PTEDYD

SEQ ID NO: 33231 - protein, 6 aa, synthetic construct
PTEDYE

SEQ ID NO: 33232 - protein, 6 aa, synthetic construct
PTEDYF

SEQ ID NO: 33233 - protein, 6 aa, synthetic construct
PTEDYW

SEQ ID NO: 33234 - protein, 6 aa, synthetic construct
PTEDYY

SEQ ID NO: 33235 - protein, 6 aa, synthetic construct
PTEDVD

SEQ ID NO: 33236 - protein, 6 aa, synthetic construct
PTEDVE

SEQ ID NO: 33237 - protein, 6 aa, synthetic construct
PTEDVF

SEQ ID NO: 33238 - protein, 6 aa, synthetic construct
PTEDVW

SEQ ID NO: 33239 - protein, 6 aa, synthetic construct
PTEDVY

SEQ ID NO: 33240 - protein, 6 aa, synthetic construct
PTECAD

SEQ ID NO: 33241 - protein, 6 aa, synthetic construct
PTECAE

SEQ ID NO: 33242 - protein, 6 aa, synthetic construct
PTECAF

SEQ ID NO: 33243 - protein, 6 aa, synthetic construct
PTECAW

SEQ ID NO: 33244 - protein, 6 aa, synthetic construct
PTECAY

SEQ ID NO: 33245 - protein, 6 aa, synthetic construct
PTECRD

SEQ ID NO: 33246 - protein, 6 aa, synthetic construct
PTECRE

SEQ ID NO: 33247 - protein, 6 aa, synthetic construct
PTECRF

SEQ ID NO: 33248 - protein, 6 aa, synthetic construct
PTECRW

SEQ ID NO: 33249 - protein, 6 aa, synthetic construct
PTECRY

SEQ ID NO: 33250 - protein, 6 aa, synthetic construct
PTECND

SEQ ID NO: 33251 - protein, 6 aa, synthetic construct
PTECNE

SEQ ID NO: 33252 - protein, 6 aa, synthetic construct
PTECNF

SEQ ID NO: 33253 - protein, 6 aa, synthetic construct
PTECNW

SEQ ID NO: 33254 - protein, 6 aa, synthetic construct
PTECNY

SEQ ID NO: 33255 - protein, 6 aa, synthetic construct
PTECDD

SEQ ID NO: 33256 - protein, 6 aa, synthetic construct
PTECDE

SEQ ID NO: 33257 - protein, 6 aa, synthetic construct
PTECDF

SEQ ID NO: 33258 - protein, 6 aa, synthetic construct
PTECDW

SEQ ID NO: 33259 - protein, 6 aa, synthetic construct
PTECDY

SEQ ID NO: 33260 - protein, 6 aa, synthetic construct
PTECCD

SEQ ID NO: 33261 - protein, 6 aa, synthetic construct
PTECCE

SEQ ID NO: 33262 - protein, 6 aa, synthetic construct
PTECCF

SEQ ID NO: 33263 - protein, 6 aa, synthetic construct
PTECCW

SEQ ID NO: 33264 - protein, 6 aa, synthetic construct
PTECCY

SEQ ID NO: 33265 - protein, 6 aa, synthetic construct
PTECQD

SEQ ID NO: 33266 - protein, 6 aa, synthetic construct
PTECQE

SEQ ID NO: 33267 - protein, 6 aa, synthetic construct
PTECQF

SEQ ID NO: 33268 - protein, 6 aa, synthetic construct
PTECQW

SEQ ID NO: 33269 - protein, 6 aa, synthetic construct
PTECQY

SEQ ID NO: 33270 - protein, 6 aa, synthetic construct
PTECED

SEQ ID NO: 33271 - protein, 6 aa, synthetic construct
PTECEE

SEQ ID NO: 33272 - protein, 6 aa, synthetic construct
PTECEF

SEQ ID NO: 33273 - protein, 6 aa, synthetic construct
PTECEW

SEQ ID NO: 33274 - protein, 6 aa, synthetic construct
PTECEY

SEQ ID NO: 33275 - protein, 6 aa, synthetic construct
PTECGD

SEQ ID NO: 33276 - protein, 6 aa, synthetic construct
PTECGE

SEQ ID NO: 33277 - protein, 6 aa, synthetic construct
PTECGF

SEQ ID NO: 33278 - protein, 6 aa, synthetic construct
PTECGW

SEQ ID NO: 33279 - protein, 6 aa, synthetic construct
PTECGY

SEQ ID NO: 33280 - protein, 6 aa, synthetic construct
PTECHD

SEQ ID NO: 33281 - protein, 6 aa, synthetic construct
PTECHE

SEQ ID NO: 33282 - protein, 6 aa, synthetic construct
PTECHF

SEQ ID NO: 33283 - protein, 6 aa, synthetic construct
PTECHW

SEQ ID NO: 33284 - protein, 6 aa, synthetic construct
PTECHY

SEQ ID NO: 33285 - protein, 6 aa, synthetic construct
PTECID

SEQ ID NO: 33286 - protein, 6 aa, synthetic construct
PTECIE

SEQ ID NO: 33287 - protein, 6 aa, synthetic construct
PTECIF

SEQ ID NO: 33288 - protein, 6 aa, synthetic construct
PTECIW

SEQ ID NO: 33289 - protein, 6 aa, synthetic construct
PTECIY

SEQ ID NO: 33290 - protein, 6 aa, synthetic construct
PTECLD

SEQ ID NO: 33291 - protein, 6 aa, synthetic construct
PTECLE

SEQ ID NO: 33292 - protein, 6 aa, synthetic construct
PTECLF

SEQ ID NO: 33293 - protein, 6 aa, synthetic construct
PTECLW

SEQ ID NO: 33294 - protein, 6 aa, synthetic construct
PTECLY

SEQ ID NO: 33295 - protein, 6 aa, synthetic construct
PTECKD

SEQ ID NO: 33296 - protein, 6 aa, synthetic construct
PTECKE

SEQ ID NO: 33297 - protein, 6 aa, synthetic construct
PTECKF

SEQ ID NO: 33298 - protein, 6 aa, synthetic construct
PTECKW

SEQ ID NO: 33299 - protein, 6 aa, synthetic construct
PTECKY

SEQ ID NO: 33300 - protein, 6 aa, synthetic construct
PTECMD

SEQ ID NO: 33301 - protein, 6 aa, synthetic construct
PTECME

SEQ ID NO: 33302 - protein, 6 aa, synthetic construct
PTECMF

SEQ ID NO: 33303 - protein, 6 aa, synthetic construct
PTECMW

SEQ ID NO: 33304 - protein, 6 aa, synthetic construct
PTECMY

SEQ ID NO: 33305 - protein, 6 aa, synthetic construct
PTECFD

SEQ ID NO: 33306 - protein, 6 aa, synthetic construct
PTECFE

SEQ ID NO: 33307 - protein, 6 aa, synthetic construct
PTECFF

SEQ ID NO: 33308 - protein, 6 aa, synthetic construct
PTECFW

SEQ ID NO: 33309 - protein, 6 aa, synthetic construct
PTECFY

SEQ ID NO: 33310 - protein, 6 aa, synthetic construct
PTECPD

SEQ ID NO: 33311 - protein, 6 aa, synthetic construct
PTECPE

SEQ ID NO: 33312 - protein, 6 aa, synthetic construct
PTECPF

SEQ ID NO: 33313 - protein, 6 aa, synthetic construct
PTECPW

SEQ ID NO: 33314 - protein, 6 aa, synthetic construct
PTECPY

SEQ ID NO: 33315 - protein, 6 aa, synthetic construct
PTECSD

SEQ ID NO: 33316 - protein, 6 aa, synthetic construct
PTECSE

SEQ ID NO: 33317 - protein, 6 aa, synthetic construct
PTECSF

SEQ ID NO: 33318 - protein, 6 aa, synthetic construct
PTECSW

SEQ ID NO: 33319 - protein, 6 aa, synthetic construct
PTECSY

SEQ ID NO: 33320 - protein, 6 aa, synthetic construct
PTECTD

SEQ ID NO: 33321 - protein, 6 aa, synthetic construct
PTECTE

SEQ ID NO: 33322 - protein, 6 aa, synthetic construct
PTECTF

SEQ ID NO: 33323 - protein, 6 aa, synthetic construct
PTECTW

SEQ ID NO: 33324 - protein, 6 aa, synthetic construct
PTECTY

SEQ ID NO: 33325 - protein, 6 aa, synthetic construct
PTECWD

SEQ ID NO: 33326 - protein, 6 aa, synthetic construct
PTECWE

SEQ ID NO: 33327 - protein, 6 aa, synthetic construct
PTECWF

SEQ ID NO: 33328 - protein, 6 aa, synthetic construct
PTECWW

SEQ ID NO: 33329 - protein, 6 aa, synthetic construct
PTECWY

SEQ ID NO: 33330 - protein, 6 aa, synthetic construct
PTECYD

SEQ ID NO: 33331 - protein, 6 aa, synthetic construct
PTECYE

SEQ ID NO: 33332 - protein, 6 aa, synthetic construct
PTECYF

SEQ ID NO: 33333 - protein, 6 aa, synthetic construct
PTECYW

SEQ ID NO: 33334 - protein, 6 aa, synthetic construct
PTECYY

SEQ ID NO: 33335 - protein, 6 aa, synthetic construct
PTECVD

SEQ ID NO: 33336 - protein, 6 aa, synthetic construct
PTECVE

SEQ ID NO: 33337 - protein, 6 aa, synthetic construct
PTECVF

SEQ ID NO: 33338 - protein, 6 aa, synthetic construct
PTECVW

SEQ ID NO: 33339 - protein, 6 aa, synthetic construct
PTECVY

SEQ ID NO: 33340 - protein, 6 aa, synthetic construct
PTEQAD

SEQ ID NO: 33341 - protein, 6 aa, synthetic construct
PTEQAE

SEQ ID NO: 33342 - protein, 6 aa, synthetic construct
PTEQAF

SEQ ID NO: 33343 - protein, 6 aa, synthetic construct
PTEQAW

SEQ ID NO: 33344 - protein, 6 aa, synthetic construct
PTEQAY

SEQ ID NO: 33345 - protein, 6 aa, synthetic construct
PTEQRD

SEQ ID NO: 33346 - protein, 6 aa, synthetic construct
PTEQRE

SEQ ID NO: 33347 - protein, 6 aa, synthetic construct
PTEQRF

SEQ ID NO: 33348 - protein, 6 aa, synthetic construct
PTEQRW

SEQ ID NO: 33349 - protein, 6 aa, synthetic construct
PTEQRY

SEQ ID NO: 33350 - protein, 6 aa, synthetic construct
PTEQND

SEQ ID NO: 33351 - protein, 6 aa, synthetic construct
PTEQNE

SEQ ID NO: 33352 - protein, 6 aa, synthetic construct
PTEQNF

SEQ ID NO: 33353 - protein, 6 aa, synthetic construct
PTEQNW

SEQ ID NO: 33354 - protein, 6 aa, synthetic construct
PTEQNY

SEQ ID NO: 33355 - protein, 6 aa, synthetic construct
PTEQDD

SEQ ID NO: 33356 - protein, 6 aa, synthetic construct
PTEQDE

SEQ ID NO: 33357 - protein, 6 aa, synthetic construct
PTEQDF

SEQ ID NO: 33358 - protein, 6 aa, synthetic construct
PTEQDW

SEQ ID NO: 33359 - protein, 6 aa, synthetic construct
PTEQDY

SEQ ID NO: 33360 - protein, 6 aa, synthetic construct
PTEQCD

SEQ ID NO: 33361 - protein, 6 aa, synthetic construct
PTEQCE

SEQ ID NO: 33362 - protein, 6 aa, synthetic construct
PTEQCF

SEQ ID NO: 33363 - protein, 6 aa, synthetic construct
PTEQCW

SEQ ID NO: 33364 - protein, 6 aa, synthetic construct
PTEQCY

SEQ ID NO: 33365 - protein, 6 aa, synthetic construct
PTEQQD

SEQ ID NO: 33366 - protein, 6 aa, synthetic construct
PTEQQE

SEQ ID NO: 33367 - protein, 6 aa, synthetic construct
PTEQQF

SEQ ID NO: 33368 - protein, 6 aa, synthetic construct
PTEQQW

SEQ ID NO: 33369 - protein, 6 aa, synthetic construct
PTEQQY

SEQ ID NO: 33370 - protein, 6 aa, synthetic construct
PTEQED

SEQ ID NO: 33371 - protein, 6 aa, synthetic construct
PTEQEE

SEQ ID NO: 33372 - protein, 6 aa, synthetic construct
PTEQEF

SEQ ID NO: 33373 - protein, 6 aa, synthetic construct
PTEQEW

SEQ ID NO: 33374 - protein, 6 aa, synthetic construct
PTEQEY

SEQ ID NO: 33375 - protein, 6 aa, synthetic construct
PTEQGD

SEQ ID NO: 33376 - protein, 6 aa, synthetic construct
PTEQGE

SEQ ID NO: 33377 - protein, 6 aa, synthetic construct
PTEQGF

SEQ ID NO: 33378 - protein, 6 aa, synthetic construct
PTEQGW

SEQ ID NO: 33379 - protein, 6 aa, synthetic construct
PTEQGY

SEQ ID NO: 33380 - protein, 6 aa, synthetic construct
PTEQHD

SEQ ID NO: 33381 - protein, 6 aa, synthetic construct
PTEQHE

SEQ ID NO: 33382 - protein, 6 aa, synthetic construct
PTEQHF

SEQ ID NO: 33383 - protein, 6 aa, synthetic construct
PTEQHW

SEQ ID NO: 33384 - protein, 6 aa, synthetic construct
PTEQHY

SEQ ID NO: 33385 - protein, 6 aa, synthetic construct
PTEQID

SEQ ID NO: 33386 - protein, 6 aa, synthetic construct
PTEQIE

SEQ ID NO: 33387 - protein, 6 aa, synthetic construct
PTEQIF

SEQ ID NO: 33388 - protein, 6 aa, synthetic construct
PTEQIW

SEQ ID NO: 33389 - protein, 6 aa, synthetic construct
PTEQIY

SEQ ID NO: 33390 - protein, 6 aa, synthetic construct
PTEQLD

SEQ ID NO: 33391 - protein, 6 aa, synthetic construct
PTEQLE

SEQ ID NO: 33392 - protein, 6 aa, synthetic construct
PTEQLF

SEQ ID NO: 33393 - protein, 6 aa, synthetic construct
PTEQLW

SEQ ID NO: 33394 - protein, 6 aa, synthetic construct
PTEQLY

SEQ ID NO: 33395 - protein, 6 aa, synthetic construct
PTEQKD

SEQ ID NO: 33396 - protein, 6 aa, synthetic construct
PTEQKE

SEQ ID NO: 33397 - protein, 6 aa, synthetic construct
PTEQKF

SEQ ID NO: 33398 - protein, 6 aa, synthetic construct
PTEQKW

SEQ ID NO: 33399 - protein, 6 aa, synthetic construct
PTEQKY

SEQ ID NO: 33400 - protein, 6 aa, synthetic construct
PTEQMD

SEQ ID NO: 33401 - protein, 6 aa, synthetic construct
PTEQME

SEQ ID NO: 33402 - protein, 6 aa, synthetic construct
PTEQMF

SEQ ID NO: 33403 - protein, 6 aa, synthetic construct
PTEQMW

SEQ ID NO: 33404 - protein, 6 aa, synthetic construct
PTEQMY

SEQ ID NO: 33405 - protein, 6 aa, synthetic construct
PTEQFD

SEQ ID NO: 33406 - protein, 6 aa, synthetic construct
PTEQFE

SEQ ID NO: 33407 - protein, 6 aa, synthetic construct
PTEQFF

SEQ ID NO: 33408 - protein, 6 aa, synthetic construct
PTEQFW

SEQ ID NO: 33409 - protein, 6 aa, synthetic construct
PTEQFY

SEQ ID NO: 33410 - protein, 6 aa, synthetic construct
PTEQPD

SEQ ID NO: 33411 - protein, 6 aa, synthetic construct
PTEQPE

SEQ ID NO: 33412 - protein, 6 aa, synthetic construct
PTEQPF

SEQ ID NO: 33413 - protein, 6 aa, synthetic construct
PTEQPW

SEQ ID NO: 33414 - protein, 6 aa, synthetic construct
PTEQPY

SEQ ID NO: 33415 - protein, 6 aa, synthetic construct
PTEQSD

SEQ ID NO: 33416 - protein, 6 aa, synthetic construct
PTEQSE

SEQ ID NO: 33417 - protein, 6 aa, synthetic construct
PTEQSF

SEQ ID NO: 33418 - protein, 6 aa, synthetic construct
PTEQSW

SEQ ID NO: 33419 - protein, 6 aa, synthetic construct
PTEQSY

SEQ ID NO: 33420 - protein, 6 aa, synthetic construct
PTEQTD

SEQ ID NO: 33421 - protein, 6 aa, synthetic construct
PTEQTE

SEQ ID NO: 33422 - protein, 6 aa, synthetic construct
PTEQTF

SEQ ID NO: 33423 - protein, 6 aa, synthetic construct
PTEQTW

SEQ ID NO: 33424 - protein, 6 aa, synthetic construct
PTEQTY

SEQ ID NO: 33425 - protein, 6 aa, synthetic construct
PTEQWD

SEQ ID NO: 33426 - protein, 6 aa, synthetic construct
PTEQWE

SEQ ID NO: 33427 - protein, 6 aa, synthetic construct
PTEQWF

SEQ ID NO: 33428 - protein, 6 aa, synthetic construct
PTEQWW

SEQ ID NO: 33429 - protein, 6 aa, synthetic construct
PTEQWY

SEQ ID NO: 33430 - protein, 6 aa, synthetic construct
PTEQYD

SEQ ID NO: 33431 - protein, 6 aa, synthetic construct
PTEQYE

SEQ ID NO: 33432 - protein, 6 aa, synthetic construct
PTEQYF

SEQ ID NO: 33433 - protein, 6 aa, synthetic construct
PTEQYW

SEQ ID NO: 33434 - protein, 6 aa, synthetic construct
PTEQYY

SEQ ID NO: 33435 - protein, 6 aa, synthetic construct
PTEQVD

SEQ ID NO: 33436 - protein, 6 aa, synthetic construct
PTEQVE

SEQ ID NO: 33437 - protein, 6 aa, synthetic construct
PTEQVF

SEQ ID NO: 33438 - protein, 6 aa, synthetic construct
PTEQVW

SEQ ID NO: 33439 - protein, 6 aa, synthetic construct
PTEQVY

SEQ ID NO: 33440 - protein, 6 aa, synthetic construct
PTEEAD

SEQ ID NO: 33441 - protein, 6 aa, synthetic construct
PTEEAE

SEQ ID NO: 33442 - protein, 6 aa, synthetic construct
PTEEAF

SEQ ID NO: 33443 - protein, 6 aa, synthetic construct
PTEEAW

SEQ ID NO: 33444 - protein, 6 aa, synthetic construct
PTEEAY

SEQ ID NO: 33445 - protein, 6 aa, synthetic construct
PTEERD

SEQ ID NO: 33446 - protein, 6 aa, synthetic construct
PTEERE

SEQ ID NO: 33447 - protein, 6 aa, synthetic construct
PTEERF

SEQ ID NO: 33448 - protein, 6 aa, synthetic construct
PTEERW

SEQ ID NO: 33449 - protein, 6 aa, synthetic construct
PTEERY

SEQ ID NO: 33450 - protein, 6 aa, synthetic construct
PTEEND

SEQ ID NO: 33451 - protein, 6 aa, synthetic construct
PTEENE

SEQ ID NO: 33452 - protein, 6 aa, synthetic construct
PTEENF

SEQ ID NO: 33453 - protein, 6 aa, synthetic construct
PTEENW

SEQ ID NO: 33454 - protein, 6 aa, synthetic construct
PTEENY

SEQ ID NO: 33455 - protein, 6 aa, synthetic construct
PTEEDD

SEQ ID NO: 33456 - protein, 6 aa, synthetic construct
PTEEDE

SEQ ID NO: 33457 - protein, 6 aa, synthetic construct
PTEEDF

SEQ ID NO: 33458 - protein, 6 aa, synthetic construct
PTEEDW

SEQ ID NO: 33459 - protein, 6 aa, synthetic construct
PTEEDY

SEQ ID NO: 33460 - protein, 6 aa, synthetic construct
PTEECD

SEQ ID NO: 33461 - protein, 6 aa, synthetic construct
PTEECE

SEQ ID NO: 33462 - protein, 6 aa, synthetic construct
PTEECF

SEQ ID NO: 33463 - protein, 6 aa, synthetic construct
PTEECW

SEQ ID NO: 33464 - protein, 6 aa, synthetic construct
PTEECY

SEQ ID NO: 33465 - protein, 6 aa, synthetic construct
PTEEQD

SEQ ID NO: 33466 - protein, 6 aa, synthetic construct
PTEEQE

SEQ ID NO: 33467 - protein, 6 aa, synthetic construct
PTEEQF

SEQ ID NO: 33468 - protein, 6 aa, synthetic construct
PTEEQW

SEQ ID NO: 33469 - protein, 6 aa, synthetic construct
PTEEQY

SEQ ID NO: 33470 - protein, 6 aa, synthetic construct
PTEEED

SEQ ID NO: 33471 - protein, 6 aa, synthetic construct
PTEEEE

SEQ ID NO: 33472 - protein, 6 aa, synthetic construct
PTEEEF

SEQ ID NO: 33473 - protein, 6 aa, synthetic construct
PTEEEW

SEQ ID NO: 33474 - protein, 6 aa, synthetic construct
PTEEEY

SEQ ID NO: 33475 - protein, 6 aa, synthetic construct
PTEEGD

SEQ ID NO: 33476 - protein, 6 aa, synthetic construct
PTEEGE

SEQ ID NO: 33477 - protein, 6 aa, synthetic construct
PTEEGF

SEQ ID NO: 33478 - protein, 6 aa, synthetic construct
PTEEGW

SEQ ID NO: 33479 - protein, 6 aa, synthetic construct
PTEEGY

SEQ ID NO: 33480 - protein, 6 aa, synthetic construct
PTEEHD

SEQ ID NO: 33481 - protein, 6 aa, synthetic construct
PTEEHE

SEQ ID NO: 33482 - protein, 6 aa, synthetic construct
PTEEHF

SEQ ID NO: 33483 - protein, 6 aa, synthetic construct
PTEEHW

SEQ ID NO: 33484 - protein, 6 aa, synthetic construct
PTEEHY

SEQ ID NO: 33485 - protein, 6 aa, synthetic construct
PTEEID

SEQ ID NO: 33486 - protein, 6 aa, synthetic construct
PTEEIE

SEQ ID NO: 33487 - protein, 6 aa, synthetic construct
PTEEIF

SEQ ID NO: 33488 - protein, 6 aa, synthetic construct
PTEEIW

SEQ ID NO: 33489 - protein, 6 aa, synthetic construct
PTEEIY

SEQ ID NO: 33490 - protein, 6 aa, synthetic construct
PTEELD

SEQ ID NO: 33491 - protein, 6 aa, synthetic construct
PTEELE

SEQ ID NO: 33492 - protein, 6 aa, synthetic construct
PTEELF

SEQ ID NO: 33493 - protein, 6 aa, synthetic construct
PTEELW

SEQ ID NO: 33494 - protein, 6 aa, synthetic construct
PTEELY

SEQ ID NO: 33495 - protein, 6 aa, synthetic construct
PTEEKD

SEQ ID NO: 33496 - protein, 6 aa, synthetic construct
PTEEKE

SEQ ID NO: 33497 - protein, 6 aa, synthetic construct
PTEEKF

SEQ ID NO: 33498 - protein, 6 aa, synthetic construct
PTEEKW

SEQ ID NO: 33499 - protein, 6 aa, synthetic construct
PTEEKY

SEQ ID NO: 33500 - protein, 6 aa, synthetic construct
PTEEMD

SEQ ID NO: 33501 - protein, 6 aa, synthetic construct
PTEEME

SEQ ID NO: 33502 - protein, 6 aa, synthetic construct
PTEEMF

SEQ ID NO: 33503 - protein, 6 aa, synthetic construct
PTEEMW

SEQ ID NO: 33504 - protein, 6 aa, synthetic construct
PTEEMY

SEQ ID NO: 33505 - protein, 6 aa, synthetic construct
PTEEFD

SEQ ID NO: 33506 - protein, 6 aa, synthetic construct
PTEEFE

SEQ ID NO: 33507 - protein, 6 aa, synthetic construct
PTEEFF

SEQ ID NO: 33508 - protein, 6 aa, synthetic construct
PTEEFW

SEQ ID NO: 33509 - protein, 6 aa, synthetic construct
PTEEFY

SEQ ID NO: 33510 - protein, 6 aa, synthetic construct
PTEEPD

SEQ ID NO: 33511 - protein, 6 aa, synthetic construct
PTEEPE

SEQ ID NO: 33512 - protein, 6 aa, synthetic construct
PTEEPF

SEQ ID NO: 33513 - protein, 6 aa, synthetic construct
PTEEPW

SEQ ID NO: 33514 - protein, 6 aa, synthetic construct
PTEEPY

SEQ ID NO: 33515 - protein, 6 aa, synthetic construct
PTEESD

SEQ ID NO: 33516 - protein, 6 aa, synthetic construct
PTEESE

SEQ ID NO: 33517 - protein, 6 aa, synthetic construct
PTEESF

SEQ ID NO: 33518 - protein, 6 aa, synthetic construct
PTEESW

SEQ ID NO: 33519 - protein, 6 aa, synthetic construct
PTEESY

SEQ ID NO: 33520 - protein, 6 aa, synthetic construct
PTEETD

SEQ ID NO: 33521 - protein, 6 aa, synthetic construct
PTEETE

SEQ ID NO: 33522 - protein, 6 aa, synthetic construct
PTEETF

SEQ ID NO: 33523 - protein, 6 aa, synthetic construct
PTEETW

SEQ ID NO: 33524 - protein, 6 aa, synthetic construct
PTEETY

SEQ ID NO: 33525 - protein, 6 aa, synthetic construct
PTEEWD

SEQ ID NO: 33526 - protein, 6 aa, synthetic construct
PTEEWE

SEQ ID NO: 33527 - protein, 6 aa, synthetic construct
PTEEWF

SEQ ID NO: 33528 - protein, 6 aa, synthetic construct
PTEEWW

SEQ ID NO: 33529 - protein, 6 aa, synthetic construct
PTEEWY

SEQ ID NO: 33530 - protein, 6 aa, synthetic construct
PTEEYD

SEQ ID NO: 33531 - protein, 6 aa, synthetic construct
PTEEYE

SEQ ID NO: 33532 - protein, 6 aa, synthetic construct
PTEEYF

SEQ ID NO: 33533 - protein, 6 aa, synthetic construct
PTEEYW

SEQ ID NO: 33534 - protein, 6 aa, synthetic construct
PTEEYY

SEQ ID NO: 33535 - protein, 6 aa, synthetic construct
PTEEVD

SEQ ID NO: 33536 - protein, 6 aa, synthetic construct
PTEEVE

SEQ ID NO: 33537 - protein, 6 aa, synthetic construct
PTEEVF

SEQ ID NO: 33538 - protein, 6 aa, synthetic construct
PTEEVW

SEQ ID NO: 33539 - protein, 6 aa, synthetic construct
PTEEVY

SEQ ID NO: 33540 - protein, 6 aa, synthetic construct
PTEGAD

SEQ ID NO: 33541 - protein, 6 aa, synthetic construct
PTEGAE

SEQ ID NO: 33542 - protein, 6 aa, synthetic construct
PTEGAF

SEQ ID NO: 33543 - protein, 6 aa, synthetic construct
PTEGAW

SEQ ID NO: 33544 - protein, 6 aa, synthetic construct
PTEGAY

SEQ ID NO: 33545 - protein, 6 aa, synthetic construct
PTEGRD

SEQ ID NO: 33546 - protein, 6 aa, synthetic construct
PTEGRE

SEQ ID NO: 33547 - protein, 6 aa, synthetic construct
PTEGRF

SEQ ID NO: 33548 - protein, 6 aa, synthetic construct
PTEGRW

SEQ ID NO: 33549 - protein, 6 aa, synthetic construct
PTEGRY

SEQ ID NO: 33550 - protein, 6 aa, synthetic construct
PTEGND

SEQ ID NO: 33551 - protein, 6 aa, synthetic construct
PTEGNE

SEQ ID NO: 33552 - protein, 6 aa, synthetic construct
PTEGNF

SEQ ID NO: 33553 - protein, 6 aa, synthetic construct
PTEGNW

SEQ ID NO: 33554 - protein, 6 aa, synthetic construct
PTEGNY

SEQ ID NO: 33555 - protein, 6 aa, synthetic construct
PTEGDD

SEQ ID NO: 33556 - protein, 6 aa, synthetic construct
PTEGDE

SEQ ID NO: 33557 - protein, 6 aa, synthetic construct
PTEGDF

SEQ ID NO: 33558 - protein, 6 aa, synthetic construct
PTEGDW

SEQ ID NO: 33559 - protein, 6 aa, synthetic construct
PTEGDY

SEQ ID NO: 33560 - protein, 6 aa, synthetic construct
PTEGCD

SEQ ID NO: 33561 - protein, 6 aa, synthetic construct
PTEGCE

SEQ ID NO: 33562 - protein, 6 aa, synthetic construct
PTEGCF

SEQ ID NO: 33563 - protein, 6 aa, synthetic construct
PTEGCW

SEQ ID NO: 33564 - protein, 6 aa, synthetic construct
PTEGCY

SEQ ID NO: 33565 - protein, 6 aa, synthetic construct
PTEGQD

SEQ ID NO: 33566 - protein, 6 aa, synthetic construct
PTEGQE

SEQ ID NO: 33567 - protein, 6 aa, synthetic construct
PTEGQF

SEQ ID NO: 33568 - protein, 6 aa, synthetic construct
PTEGQW

SEQ ID NO: 33569 - protein, 6 aa, synthetic construct
PTEGQY

SEQ ID NO: 33570 - protein, 6 aa, synthetic construct
PTEGED

SEQ ID NO: 33571 - protein, 6 aa, synthetic construct
PTEGEE

SEQ ID NO: 33572 - protein, 6 aa, synthetic construct
PTEGEF

SEQ ID NO: 33573 - protein, 6 aa, synthetic construct
PTEGEW

SEQ ID NO: 33574 - protein, 6 aa, synthetic construct
PTEGEY

SEQ ID NO: 33575 - protein, 6 aa, synthetic construct
PTEGGD

SEQ ID NO: 33576 - protein, 6 aa, synthetic construct
PTEGGE

SEQ ID NO: 33577 - protein, 6 aa, synthetic construct
PTEGGF

SEQ ID NO: 33578 - protein, 6 aa, synthetic construct
PTEGGW

SEQ ID NO: 33579 - protein, 6 aa, synthetic construct
PTEGGY

SEQ ID NO: 33580 - protein, 6 aa, synthetic construct
PTEGHD

SEQ ID NO: 33581 - protein, 6 aa, synthetic construct
PTEGHE

SEQ ID NO: 33582 - protein, 6 aa, synthetic construct
PTEGHF

SEQ ID NO: 33583 - protein, 6 aa, synthetic construct
PTEGHW

SEQ ID NO: 33584 - protein, 6 aa, synthetic construct
PTEGHY

SEQ ID NO: 33585 - protein, 6 aa, synthetic construct
PTEGID

SEQ ID NO: 33586 - protein, 6 aa, synthetic construct
PTEGIE

SEQ ID NO: 33587 - protein, 6 aa, synthetic construct
PTEGIF

SEQ ID NO: 33588 - protein, 6 aa, synthetic construct
PTEGIW

SEQ ID NO: 33589 - protein, 6 aa, synthetic construct
PTEGIY

SEQ ID NO: 33590 - protein, 6 aa, synthetic construct
PTEGLD

SEQ ID NO: 33591 - protein, 6 aa, synthetic construct
PTEGLE

SEQ ID NO: 33592 - protein, 6 aa, synthetic construct
PTEGLF

SEQ ID NO: 33593 - protein, 6 aa, synthetic construct
PTEGLW

SEQ ID NO: 33594 - protein, 6 aa, synthetic construct
PTEGLY

SEQ ID NO: 33595 - protein, 6 aa, synthetic construct
PTEGKD

SEQ ID NO: 33596 - protein, 6 aa, synthetic construct
PTEGKE

SEQ ID NO: 33597 - protein, 6 aa, synthetic construct
PTEGKF

SEQ ID NO: 33598 - protein, 6 aa, synthetic construct
PTEGKW

SEQ ID NO: 33599 - protein, 6 aa, synthetic construct
PTEGKY

SEQ ID NO: 33600 - protein, 6 aa, synthetic construct
PTEGMD

SEQ ID NO: 33601 - protein, 6 aa, synthetic construct
PTEGME

SEQ ID NO: 33602 - protein, 6 aa, synthetic construct
PTEGMF

SEQ ID NO: 33603 - protein, 6 aa, synthetic construct
PTEGMW

SEQ ID NO: 33604 - protein, 6 aa, synthetic construct
PTEGMY

SEQ ID NO: 33605 - protein, 6 aa, synthetic construct
PTEGFD

SEQ ID NO: 33606 - protein, 6 aa, synthetic construct
PTEGFE

SEQ ID NO: 33607 - protein, 6 aa, synthetic construct
PTEGFF

SEQ ID NO: 33608 - protein, 6 aa, synthetic construct
PTEGFW

SEQ ID NO: 33609 - protein, 6 aa, synthetic construct
PTEGFY

SEQ ID NO: 33610 - protein, 6 aa, synthetic construct
PTEGPD

SEQ ID NO: 33611 - protein, 6 aa, synthetic construct
PTEGPE

SEQ ID NO: 33612 - protein, 6 aa, synthetic construct
PTEGPF

SEQ ID NO: 33613 - protein, 6 aa, synthetic construct
PTEGPW

SEQ ID NO: 33614 - protein, 6 aa, synthetic construct
PTEGPY

SEQ ID NO: 33615 - protein, 6 aa, synthetic construct
PTEGSD

SEQ ID NO: 33616 - protein, 6 aa, synthetic construct
PTEGSE

SEQ ID NO: 33617 - protein, 6 aa, synthetic construct
PTEGSF

SEQ ID NO: 33618 - protein, 6 aa, synthetic construct
PTEGSW

SEQ ID NO: 33619 - protein, 6 aa, synthetic construct
PTEGSY

SEQ ID NO: 33620 - protein, 6 aa, synthetic construct
PTEGTD

SEQ ID NO: 33621 - protein, 6 aa, synthetic construct
PTEGTE

SEQ ID NO: 33622 - protein, 6 aa, synthetic construct
PTEGTF

SEQ ID NO: 33623 - protein, 6 aa, synthetic construct
PTEGTW

SEQ ID NO: 33624 - protein, 6 aa, synthetic construct
PTEGTY

SEQ ID NO: 33625 - protein, 6 aa, synthetic construct
PTEGWD

SEQ ID NO: 33626 - protein, 6 aa, synthetic construct
PTEGWE

SEQ ID NO: 33627 - protein, 6 aa, synthetic construct
PTEGWF

SEQ ID NO: 33628 - protein, 6 aa, synthetic construct
PTEGWW

SEQ ID NO: 33629 - protein, 6 aa, synthetic construct
PTEGWY

SEQ ID NO: 33630 - protein, 6 aa, synthetic construct
PTEGYD

SEQ ID NO: 33631 - protein, 6 aa, synthetic construct
PTEGYE

SEQ ID NO: 33632 - protein, 6 aa, synthetic construct
PTEGYF

SEQ ID NO: 33633 - protein, 6 aa, synthetic construct
PTEGYW

SEQ ID NO: 33634 - protein, 6 aa, synthetic construct
PTEGYY

SEQ ID NO: 33635 - protein, 6 aa, synthetic construct
PTEGVD

SEQ ID NO: 33636 - protein, 6 aa, synthetic construct
PTEGVE

SEQ ID NO: 33637 - protein, 6 aa, synthetic construct
PTEGVF

SEQ ID NO: 33638 - protein, 6 aa, synthetic construct
PTEGVW

SEQ ID NO: 33639 - protein, 6 aa, synthetic construct
PTEGVY

SEQ ID NO: 33640 - protein, 6 aa, synthetic construct
PTEHAD

SEQ ID NO: 33641 - protein, 6 aa, synthetic construct
PTEHAE

SEQ ID NO: 33642 - protein, 6 aa, synthetic construct
PTEHAF

SEQ ID NO: 33643 - protein, 6 aa, synthetic construct
PTEHAW

SEQ ID NO: 33644 - protein, 6 aa, synthetic construct
PTEHAY

SEQ ID NO: 33645 - protein, 6 aa, synthetic construct
PTEHRD

SEQ ID NO: 33646 - protein, 6 aa, synthetic construct
PTEHRE

SEQ ID NO: 33647 - protein, 6 aa, synthetic construct
PTEHRF

SEQ ID NO: 33648 - protein, 6 aa, synthetic construct
PTEHRW

SEQ ID NO: 33649 - protein, 6 aa, synthetic construct
PTEHRY

SEQ ID NO: 33650 - protein, 6 aa, synthetic construct
PTEHND

SEQ ID NO: 33651 - protein, 6 aa, synthetic construct
PTEHNE

SEQ ID NO: 33652 - protein, 6 aa, synthetic construct
PTEHNF

SEQ ID NO: 33653 - protein, 6 aa, synthetic construct
PTEHNW

SEQ ID NO: 33654 - protein, 6 aa, synthetic construct
PTEHNY

SEQ ID NO: 33655 - protein, 6 aa, synthetic construct
PTEHDD

SEQ ID NO: 33656 - protein, 6 aa, synthetic construct
PTEHDE

SEQ ID NO: 33657 - protein, 6 aa, synthetic construct
PTEHDF

SEQ ID NO: 33658 - protein, 6 aa, synthetic construct
PTEHDW

SEQ ID NO: 33659 - protein, 6 aa, synthetic construct
PTEHDY

SEQ ID NO: 33660 - protein, 6 aa, synthetic construct
PTEHCD

SEQ ID NO: 33661 - protein, 6 aa, synthetic construct
PTEHCE

SEQ ID NO: 33662 - protein, 6 aa, synthetic construct
PTEHCF

SEQ ID NO: 33663 - protein, 6 aa, synthetic construct
PTEHCW

SEQ ID NO: 33664 - protein, 6 aa, synthetic construct
PTEHCY

SEQ ID NO: 33665 - protein, 6 aa, synthetic construct
PTEHQD

SEQ ID NO: 33666 - protein, 6 aa, synthetic construct
PTEHQE

SEQ ID NO: 33667 - protein, 6 aa, synthetic construct
PTEHQF

SEQ ID NO: 33668 - protein, 6 aa, synthetic construct
PTEHQW

SEQ ID NO: 33669 - protein, 6 aa, synthetic construct
PTEHQY

SEQ ID NO: 33670 - protein, 6 aa, synthetic construct
PTEHED

SEQ ID NO: 33671 - protein, 6 aa, synthetic construct
PTEHEE

SEQ ID NO: 33672 - protein, 6 aa, synthetic construct
PTEHEF

SEQ ID NO: 33673 - protein, 6 aa, synthetic construct
PTEHEW

SEQ ID NO: 33674 - protein, 6 aa, synthetic construct
PTEHEY

SEQ ID NO: 33675 - protein, 6 aa, synthetic construct
PTEHGD

SEQ ID NO: 33676 - protein, 6 aa, synthetic construct
PTEHGE

SEQ ID NO: 33677 - protein, 6 aa, synthetic construct
PTEHGF

SEQ ID NO: 33678 - protein, 6 aa, synthetic construct
PTEHGW

SEQ ID NO: 33679 - protein, 6 aa, synthetic construct
PTEHGY

SEQ ID NO: 33680 - protein, 6 aa, synthetic construct
PTEHHD

SEQ ID NO: 33681 - protein, 6 aa, synthetic construct
PTEHHE

SEQ ID NO: 33682 - protein, 6 aa, synthetic construct
PTEHHF

SEQ ID NO: 33683 - protein, 6 aa, synthetic construct
PTEHHW

SEQ ID NO: 33684 - protein, 6 aa, synthetic construct
PTEHHY

SEQ ID NO: 33685 - protein, 6 aa, synthetic construct
PTEHID

SEQ ID NO: 33686 - protein, 6 aa, synthetic construct
PTEHIE

SEQ ID NO: 33687 - protein, 6 aa, synthetic construct
PTEHIF

SEQ ID NO: 33688 - protein, 6 aa, synthetic construct
PTEHIW

SEQ ID NO: 33689 - protein, 6 aa, synthetic construct
PTEHIY

SEQ ID NO: 33690 - protein, 6 aa, synthetic construct
PTEHLD

SEQ ID NO: 33691 - protein, 6 aa, synthetic construct
PTEHLE

SEQ ID NO: 33692 - protein, 6 aa, synthetic construct
PTEHLF

SEQ ID NO: 33693 - protein, 6 aa, synthetic construct
PTEHLW

SEQ ID NO: 33694 - protein, 6 aa, synthetic construct
PTEHLY

SEQ ID NO: 33695 - protein, 6 aa, synthetic construct
PTEHKD

SEQ ID NO: 33696 - protein, 6 aa, synthetic construct
PTEHKE

SEQ ID NO: 33697 - protein, 6 aa, synthetic construct
PTEHKF

SEQ ID NO: 33698 - protein, 6 aa, synthetic construct
PTEHKW

SEQ ID NO: 33699 - protein, 6 aa, synthetic construct
PTEHKY

SEQ ID NO: 33700 - protein, 6 aa, synthetic construct
PTEHMD

SEQ ID NO: 33701 - protein, 6 aa, synthetic construct
PTEHME

SEQ ID NO: 33702 - protein, 6 aa, synthetic construct
PTEHMF

SEQ ID NO: 33703 - protein, 6 aa, synthetic construct
PTEHMW

SEQ ID NO: 33704 - protein, 6 aa, synthetic construct
PTEHMY

SEQ ID NO: 33705 - protein, 6 aa, synthetic construct
PTEHFD

SEQ ID NO: 33706 - protein, 6 aa, synthetic construct
PTEHFE

SEQ ID NO: 33707 - protein, 6 aa, synthetic construct
PTEHFF

SEQ ID NO: 33708 - protein, 6 aa, synthetic construct
PTEHFW

SEQ ID NO: 33709 - protein, 6 aa, synthetic construct
PTEHFY

SEQ ID NO: 33710 - protein, 6 aa, synthetic construct
PTEHPD

SEQ ID NO: 33711 - protein, 6 aa, synthetic construct
PTEHPE

SEQ ID NO: 33712 - protein, 6 aa, synthetic construct
PTEHPF

SEQ ID NO: 33713 - protein, 6 aa, synthetic construct
PTEHPW

SEQ ID NO: 33714 - protein, 6 aa, synthetic construct
PTEHPY

SEQ ID NO: 33715 - protein, 6 aa, synthetic construct
PTEHSD

SEQ ID NO: 33716 - protein, 6 aa, synthetic construct
PTEHSE

SEQ ID NO: 33717 - protein, 6 aa, synthetic construct
PTEHSF

SEQ ID NO: 33718 - protein, 6 aa, synthetic construct
PTEHSW

SEQ ID NO: 33719 - protein, 6 aa, synthetic construct
PTEHSY

SEQ ID NO: 33720 - protein, 6 aa, synthetic construct
PTEHTD

SEQ ID NO: 33721 - protein, 6 aa, synthetic construct
PTEHTE

SEQ ID NO: 33722 - protein, 6 aa, synthetic construct
PTEHTF

SEQ ID NO: 33723 - protein, 6 aa, synthetic construct
PTEHTW

SEQ ID NO: 33724 - protein, 6 aa, synthetic construct
PTEHTY

SEQ ID NO: 33725 - protein, 6 aa, synthetic construct
PTEHWD

SEQ ID NO: 33726 - protein, 6 aa, synthetic construct
PTEHWE

SEQ ID NO: 33727 - protein, 6 aa, synthetic construct
PTEHWF

SEQ ID NO: 33728 - protein, 6 aa, synthetic construct
PTEHWW

SEQ ID NO: 33729 - protein, 6 aa, synthetic construct
PTEHWY

SEQ ID NO: 33730 - protein, 6 aa, synthetic construct
PTEHYD

SEQ ID NO: 33731 - protein, 6 aa, synthetic construct
PTEHYE

SEQ ID NO: 33732 - protein, 6 aa, synthetic construct
PTEHYF

SEQ ID NO: 33733 - protein, 6 aa, synthetic construct
PTEHYW

SEQ ID NO: 33734 - protein, 6 aa, synthetic construct
PTEHYY

SEQ ID NO: 33735 - protein, 6 aa, synthetic construct
PTEHVD

SEQ ID NO: 33736 - protein, 6 aa, synthetic construct
PTEHVE

SEQ ID NO: 33737 - protein, 6 aa, synthetic construct
PTEHVF

SEQ ID NO: 33738 - protein, 6 aa, synthetic construct
PTEHVW

SEQ ID NO: 33739 - protein, 6 aa, synthetic construct
PTEHVY

SEQ ID NO: 33740 - protein, 6 aa, synthetic construct
PTEIAD

SEQ ID NO: 33741 - protein, 6 aa, synthetic construct
PTEIAE

SEQ ID NO: 33742 - protein, 6 aa, synthetic construct
PTEIAF

SEQ ID NO: 33743 - protein, 6 aa, synthetic construct
PTEIAW

SEQ ID NO: 33744 - protein, 6 aa, synthetic construct
PTEIAY

SEQ ID NO: 33745 - protein, 6 aa, synthetic construct
PTEIRD

SEQ ID NO: 33746 - protein, 6 aa, synthetic construct
PTEIRE

SEQ ID NO: 33747 - protein, 6 aa, synthetic construct
PTEIRF

SEQ ID NO: 33748 - protein, 6 aa, synthetic construct
PTEIRW

SEQ ID NO: 33749 - protein, 6 aa, synthetic construct
PTEIRY

SEQ ID NO: 33750 - protein, 6 aa, synthetic construct
PTEIND

SEQ ID NO: 33751 - protein, 6 aa, synthetic construct
PTEINE

SEQ ID NO: 33752 - protein, 6 aa, synthetic construct
PTEINF

SEQ ID NO: 33753 - protein, 6 aa, synthetic construct
PTEINW

SEQ ID NO: 33754 - protein, 6 aa, synthetic construct
PTEINY

SEQ ID NO: 33755 - protein, 6 aa, synthetic construct
PTEIDD

SEQ ID NO: 33756 - protein, 6 aa, synthetic construct
PTEIDE

SEQ ID NO: 33757 - protein, 6 aa, synthetic construct
PTEIDF

SEQ ID NO: 33758 - protein, 6 aa, synthetic construct
PTEIDW

SEQ ID NO: 33759 - protein, 6 aa, synthetic construct
PTEIDY

SEQ ID NO: 33760 - protein, 6 aa, synthetic construct
PTEICD

SEQ ID NO: 33761 - protein, 6 aa, synthetic construct
PTEICE

SEQ ID NO: 33762 - protein, 6 aa, synthetic construct
PTEICF

SEQ ID NO: 33763 - protein, 6 aa, synthetic construct
PTEICW

SEQ ID NO: 33764 - protein, 6 aa, synthetic construct
PTEICY

SEQ ID NO: 33765 - protein, 6 aa, synthetic construct
PTEIQD

SEQ ID NO: 33766 - protein, 6 aa, synthetic construct
PTEIQE

SEQ ID NO: 33767 - protein, 6 aa, synthetic construct
PTEIQF

SEQ ID NO: 33768 - protein, 6 aa, synthetic construct
PTEIQW

SEQ ID NO: 33769 - protein, 6 aa, synthetic construct
PTEIQY

SEQ ID NO: 33770 - protein, 6 aa, synthetic construct
PTEIED

SEQ ID NO: 33771 - protein, 6 aa, synthetic construct
PTEIEE

SEQ ID NO: 33772 - protein, 6 aa, synthetic construct
PTEIEF

SEQ ID NO: 33773 - protein, 6 aa, synthetic construct
PTEIEW

SEQ ID NO: 33774 - protein, 6 aa, synthetic construct
PTEIEY

SEQ ID NO: 33775 - protein, 6 aa, synthetic construct
PTEIGD

SEQ ID NO: 33776 - protein, 6 aa, synthetic construct
PTEIGE

SEQ ID NO: 33777 - protein, 6 aa, synthetic construct
PTEIGF

SEQ ID NO: 33778 - protein, 6 aa, synthetic construct
PTEIGW

SEQ ID NO: 33779 - protein, 6 aa, synthetic construct
PTEIGY

SEQ ID NO: 33780 - protein, 6 aa, synthetic construct
PTEIHD

SEQ ID NO: 33781 - protein, 6 aa, synthetic construct
PTEIHE

SEQ ID NO: 33782 - protein, 6 aa, synthetic construct
PTEIHF

SEQ ID NO: 33783 - protein, 6 aa, synthetic construct
PTEIHW

SEQ ID NO: 33784 - protein, 6 aa, synthetic construct
PTEIHY

SEQ ID NO: 33785 - protein, 6 aa, synthetic construct
PTEIID

SEQ ID NO: 33786 - protein, 6 aa, synthetic construct
PTEIIE

SEQ ID NO: 33787 - protein, 6 aa, synthetic construct
PTEIIF

SEQ ID NO: 33788 - protein, 6 aa, synthetic construct
PTEIIW

SEQ ID NO: 33789 - protein, 6 aa, synthetic construct
PTEIIY

SEQ ID NO: 33790 - protein, 6 aa, synthetic construct
PTEILD

SEQ ID NO: 33791 - protein, 6 aa, synthetic construct
PTEILE

SEQ ID NO: 33792 - protein, 6 aa, synthetic construct
PTEILF

SEQ ID NO: 33793 - protein, 6 aa, synthetic construct
PTEILW

SEQ ID NO: 33794 - protein, 6 aa, synthetic construct
PTEILY

SEQ ID NO: 33795 - protein, 6 aa, synthetic construct
PTEIKD

SEQ ID NO: 33796 - protein, 6 aa, synthetic construct
PTEIKE

SEQ ID NO: 33797 - protein, 6 aa, synthetic construct
PTEIKF

SEQ ID NO: 33798 - protein, 6 aa, synthetic construct
PTEIKW

SEQ ID NO: 33799 - protein, 6 aa, synthetic construct
PTEIKY

SEQ ID NO: 33800 - protein, 6 aa, synthetic construct
PTEIMD

SEQ ID NO: 33801 - protein, 6 aa, synthetic construct
PTEIME

SEQ ID NO: 33802 - protein, 6 aa, synthetic construct
PTEIMF

SEQ ID NO: 33803 - protein, 6 aa, synthetic construct
PTEIMW

SEQ ID NO: 33804 - protein, 6 aa, synthetic construct
PTEIMY

SEQ ID NO: 33805 - protein, 6 aa, synthetic construct
PTEIFD

SEQ ID NO: 33806 - protein, 6 aa, synthetic construct
PTEIFE

SEQ ID NO: 33807 - protein, 6 aa, synthetic construct
PTEIFF

SEQ ID NO: 33808 - protein, 6 aa, synthetic construct
PTEIFW

SEQ ID NO: 33809 - protein, 6 aa, synthetic construct
PTEIFY

SEQ ID NO: 33810 - protein, 6 aa, synthetic construct
PTEIPD

SEQ ID NO: 33811 - protein, 6 aa, synthetic construct
PTEIPE

SEQ ID NO: 33812 - protein, 6 aa, synthetic construct
PTEIPF

SEQ ID NO: 33813 - protein, 6 aa, synthetic construct
PTEIPW

SEQ ID NO: 33814 - protein, 6 aa, synthetic construct
PTEIPY

SEQ ID NO: 33815 - protein, 6 aa, synthetic construct
PTEISD

SEQ ID NO: 33816 - protein, 6 aa, synthetic construct
PTEISE

SEQ ID NO: 33817 - protein, 6 aa, synthetic construct
PTEISF

SEQ ID NO: 33818 - protein, 6 aa, synthetic construct
PTEISW

SEQ ID NO: 33819 - protein, 6 aa, synthetic construct
PTEISY

SEQ ID NO: 33820 - protein, 6 aa, synthetic construct
PTEITD

SEQ ID NO: 33821 - protein, 6 aa, synthetic construct
PTEITE

SEQ ID NO: 33822 - protein, 6 aa, synthetic construct
PTEITF

SEQ ID NO: 33823 - protein, 6 aa, synthetic construct
PTEITW

SEQ ID NO: 33824 - protein, 6 aa, synthetic construct
PTEITY

SEQ ID NO: 33825 - protein, 6 aa, synthetic construct
PTEIWD

SEQ ID NO: 33826 - protein, 6 aa, synthetic construct
PTEIWE

SEQ ID NO: 33827 - protein, 6 aa, synthetic construct
PTEIWF

SEQ ID NO: 33828 - protein, 6 aa, synthetic construct
PTEIWW

SEQ ID NO: 33829 - protein, 6 aa, synthetic construct
PTEIWY

SEQ ID NO: 33830 - protein, 6 aa, synthetic construct
PTEIYD

SEQ ID NO: 33831 - protein, 6 aa, synthetic construct
PTEIYE

SEQ ID NO: 33832 - protein, 6 aa, synthetic construct
PTEIYF

SEQ ID NO: 33833 - protein, 6 aa, synthetic construct
PTEIYW

SEQ ID NO: 33834 - protein, 6 aa, synthetic construct
PTEIYY

SEQ ID NO: 33835 - protein, 6 aa, synthetic construct
PTEIVD

SEQ ID NO: 33836 - protein, 6 aa, synthetic construct
PTEIVE

SEQ ID NO: 33837 - protein, 6 aa, synthetic construct
PTEIVF

SEQ ID NO: 33838 - protein, 6 aa, synthetic construct
PTEIVW

SEQ ID NO: 33839 - protein, 6 aa, synthetic construct
PTEIVY

SEQ ID NO: 33840 - protein, 6 aa, synthetic construct
PTELAD

SEQ ID NO: 33841 - protein, 6 aa, synthetic construct
PTELAE

SEQ ID NO: 33842 - protein, 6 aa, synthetic construct
PTELAF

SEQ ID NO: 33843 - protein, 6 aa, synthetic construct
PTELAW

SEQ ID NO: 33844 - protein, 6 aa, synthetic construct
PTELAY

SEQ ID NO: 33845 - protein, 6 aa, synthetic construct
PTELRD

SEQ ID NO: 33846 - protein, 6 aa, synthetic construct
PTELRE

SEQ ID NO: 33847 - protein, 6 aa, synthetic construct
PTELRF

SEQ ID NO: 33848 - protein, 6 aa, synthetic construct
PTELRW

SEQ ID NO: 33849 - protein, 6 aa, synthetic construct
PTELRY

SEQ ID NO: 33850 - protein, 6 aa, synthetic construct
PTELND

SEQ ID NO: 33851 - protein, 6 aa, synthetic construct
PTELNE

SEQ ID NO: 33852 - protein, 6 aa, synthetic construct
PTELNF

SEQ ID NO: 33853 - protein, 6 aa, synthetic construct
PTELNW

SEQ ID NO: 33854 - protein, 6 aa, synthetic construct
PTELNY

SEQ ID NO: 33855 - protein, 6 aa, synthetic construct
PTELDD

SEQ ID NO: 33856 - protein, 6 aa, synthetic construct
PTELDE

SEQ ID NO: 33857 - protein, 6 aa, synthetic construct
PTELDF

SEQ ID NO: 33858 - protein, 6 aa, synthetic construct
PTELDW

SEQ ID NO: 33859 - protein, 6 aa, synthetic construct
PTELDY

SEQ ID NO: 33860 - protein, 6 aa, synthetic construct
PTELCD

SEQ ID NO: 33861 - protein, 6 aa, synthetic construct
PTELCE

SEQ ID NO: 33862 - protein, 6 aa, synthetic construct
PTELCF

SEQ ID NO: 33863 - protein, 6 aa, synthetic construct
PTELCW

SEQ ID NO: 33864 - protein, 6 aa, synthetic construct
PTELCY

SEQ ID NO: 33865 - protein, 6 aa, synthetic construct
PTELQD

SEQ ID NO: 33866 - protein, 6 aa, synthetic construct
PTELQE

SEQ ID NO: 33867 - protein, 6 aa, synthetic construct
PTELQF

SEQ ID NO: 33868 - protein, 6 aa, synthetic construct
PTELQW

SEQ ID NO: 33869 - protein, 6 aa, synthetic construct
PTELQY

SEQ ID NO: 33870 - protein, 6 aa, synthetic construct
PTELED

SEQ ID NO: 33871 - protein, 6 aa, synthetic construct
PTELEE

SEQ ID NO: 33872 - protein, 6 aa, synthetic construct
PTELEF

SEQ ID NO: 33873 - protein, 6 aa, synthetic construct
PTELEW

SEQ ID NO: 33874 - protein, 6 aa, synthetic construct
PTELEY

SEQ ID NO: 33875 - protein, 6 aa, synthetic construct
PTELGD

SEQ ID NO: 33876 - protein, 6 aa, synthetic construct
PTELGE

SEQ ID NO: 33877 - protein, 6 aa, synthetic construct
PTELGF

SEQ ID NO: 33878 - protein, 6 aa, synthetic construct
PTELGW

SEQ ID NO: 33879 - protein, 6 aa, synthetic construct
PTELGY

SEQ ID NO: 33880 - protein, 6 aa, synthetic construct
PTELHD

SEQ ID NO: 33881 - protein, 6 aa, synthetic construct
PTELHE

SEQ ID NO: 33882 - protein, 6 aa, synthetic construct
PTELHF

SEQ ID NO: 33883 - protein, 6 aa, synthetic construct
PTELHW

SEQ ID NO: 33884 - protein, 6 aa, synthetic construct
PTELHY

SEQ ID NO: 33885 - protein, 6 aa, synthetic construct
PTELID

SEQ ID NO: 33886 - protein, 6 aa, synthetic construct
PTELIE

SEQ ID NO: 33887 - protein, 6 aa, synthetic construct
PTELIF

SEQ ID NO: 33888 - protein, 6 aa, synthetic construct
PTELIW

SEQ ID NO: 33889 - protein, 6 aa, synthetic construct
PTELIY

SEQ ID NO: 33890 - protein, 6 aa, synthetic construct
PTELLD

SEQ ID NO: 33891 - protein, 6 aa, synthetic construct
PTELLE

SEQ ID NO: 33892 - protein, 6 aa, synthetic construct
PTELLF

SEQ ID NO: 33893 - protein, 6 aa, synthetic construct
PTELLW

SEQ ID NO: 33894 - protein, 6 aa, synthetic construct
PTELLY

SEQ ID NO: 33895 - protein, 6 aa, synthetic construct
PTELKD

SEQ ID NO: 33896 - protein, 6 aa, synthetic construct
PTELKE

SEQ ID NO: 33897 - protein, 6 aa, synthetic construct
PTELKF

SEQ ID NO: 33898 - protein, 6 aa, synthetic construct
PTELKW

SEQ ID NO: 33899 - protein, 6 aa, synthetic construct
PTELKY

SEQ ID NO: 33900 - protein, 6 aa, synthetic construct
PTELMD

SEQ ID NO: 33901 - protein, 6 aa, synthetic construct
PTELME

SEQ ID NO: 33902 - protein, 6 aa, synthetic construct
PTELMF

SEQ ID NO: 33903 - protein, 6 aa, synthetic construct
PTELMW

SEQ ID NO: 33904 - protein, 6 aa, synthetic construct
PTELMY

SEQ ID NO: 33905 - protein, 6 aa, synthetic construct
PTELFD

SEQ ID NO: 33906 - protein, 6 aa, synthetic construct
PTELFE

SEQ ID NO: 33907 - protein, 6 aa, synthetic construct
PTELFF

SEQ ID NO: 33908 - protein, 6 aa, synthetic construct
PTELFW

SEQ ID NO: 33909 - protein, 6 aa, synthetic construct
PTELFY

SEQ ID NO: 33910 - protein, 6 aa, synthetic construct
PTELPD

SEQ ID NO: 33911 - protein, 6 aa, synthetic construct
PTELPE

SEQ ID NO: 33912 - protein, 6 aa, synthetic construct
PTELPF

SEQ ID NO: 33913 - protein, 6 aa, synthetic construct
PTELPW

SEQ ID NO: 33914 - protein, 6 aa, synthetic construct
PTELPY

SEQ ID NO: 33915 - protein, 6 aa, synthetic construct
PTELSD

SEQ ID NO: 33916 - protein, 6 aa, synthetic construct
PTELSE

SEQ ID NO: 33917 - protein, 6 aa, synthetic construct
PTELSF

SEQ ID NO: 33918 - protein, 6 aa, synthetic construct
PTELSW

SEQ ID NO: 33919 - protein, 6 aa, synthetic construct
PTELSY

SEQ ID NO: 33920 - protein, 6 aa, synthetic construct
PTELTD

SEQ ID NO: 33921 - protein, 6 aa, synthetic construct
PTELTE

SEQ ID NO: 33922 - protein, 6 aa, synthetic construct
PTELTF

SEQ ID NO: 33923 - protein, 6 aa, synthetic construct
PTELTW

SEQ ID NO: 33924 - protein, 6 aa, synthetic construct
PTELTY

SEQ ID NO: 33925 - protein, 6 aa, synthetic construct
PTELWD

SEQ ID NO: 33926 - protein, 6 aa, synthetic construct
PTELWE

SEQ ID NO: 33927 - protein, 6 aa, synthetic construct
PTELWF

SEQ ID NO: 33928 - protein, 6 aa, synthetic construct
PTELWW

SEQ ID NO: 33929 - protein, 6 aa, synthetic construct
PTELWY

SEQ ID NO: 33930 - protein, 6 aa, synthetic construct
PTELYD

SEQ ID NO: 33931 - protein, 6 aa, synthetic construct
PTELYE

SEQ ID NO: 33932 - protein, 6 aa, synthetic construct
PTELYF

SEQ ID NO: 33933 - protein, 6 aa, synthetic construct
PTELYW

SEQ ID NO: 33934 - protein, 6 aa, synthetic construct
PTELYY

SEQ ID NO: 33935 - protein, 6 aa, synthetic construct
PTELVD

SEQ ID NO: 33936 - protein, 6 aa, synthetic construct
PTELVE

SEQ ID NO: 33937 - protein, 6 aa, synthetic construct
PTELVF

SEQ ID NO: 33938 - protein, 6 aa, synthetic construct
PTELVW

SEQ ID NO: 33939 - protein, 6 aa, synthetic construct
PTELVY

SEQ ID NO: 33940 - protein, 6 aa, synthetic construct
PTEKAD

SEQ ID NO: 33941 - protein, 6 aa, synthetic construct
PTEKAE

SEQ ID NO: 33942 - protein, 6 aa, synthetic construct
PTEKAF

SEQ ID NO: 33943 - protein, 6 aa, synthetic construct
PTEKAW

SEQ ID NO: 33944 - protein, 6 aa, synthetic construct
PTEKAY

SEQ ID NO: 33945 - protein, 6 aa, synthetic construct
PTEKRD

SEQ ID NO: 33946 - protein, 6 aa, synthetic construct
PTEKRE

SEQ ID NO: 33947 - protein, 6 aa, synthetic construct
PTEKRF

SEQ ID NO: 33948 - protein, 6 aa, synthetic construct
PTEKRW

SEQ ID NO: 33949 - protein, 6 aa, synthetic construct
PTEKRY

SEQ ID NO: 33950 - protein, 6 aa, synthetic construct
PTEKND

SEQ ID NO: 33951 - protein, 6 aa, synthetic construct
PTEKNE

SEQ ID NO: 33952 - protein, 6 aa, synthetic construct
PTEKNF

SEQ ID NO: 33953 - protein, 6 aa, synthetic construct
PTEKNW

SEQ ID NO: 33954 - protein, 6 aa, synthetic construct
PTEKNY

SEQ ID NO: 33955 - protein, 6 aa, synthetic construct
PTEKDD

SEQ ID NO: 33956 - protein, 6 aa, synthetic construct
PTEKDE

SEQ ID NO: 33957 - protein, 6 aa, synthetic construct
PTEKDF

SEQ ID NO: 33958 - protein, 6 aa, synthetic construct
PTEKDW

SEQ ID NO: 33959 - protein, 6 aa, synthetic construct
PTEKDY

SEQ ID NO: 33960 - protein, 6 aa, synthetic construct
PTEKCD

SEQ ID NO: 33961 - protein, 6 aa, synthetic construct
PTEKCE

SEQ ID NO: 33962 - protein, 6 aa, synthetic construct
PTEKCF

SEQ ID NO: 33963 - protein, 6 aa, synthetic construct
PTEKCW

SEQ ID NO: 33964 - protein, 6 aa, synthetic construct
PTEKCY

SEQ ID NO: 33965 - protein, 6 aa, synthetic construct
PTEKQD

SEQ ID NO: 33966 - protein, 6 aa, synthetic construct
PTEKQE

SEQ ID NO: 33967 - protein, 6 aa, synthetic construct
PTEKQF

SEQ ID NO: 33968 - protein, 6 aa, synthetic construct
PTEKQW

SEQ ID NO: 33969 - protein, 6 aa, synthetic construct
PTEKQY

SEQ ID NO: 33970 - protein, 6 aa, synthetic construct
PTEKED

SEQ ID NO: 33971 - protein, 6 aa, synthetic construct
PTEKEE

SEQ ID NO: 33972 - protein, 6 aa, synthetic construct
PTEKEF

SEQ ID NO: 33973 - protein, 6 aa, synthetic construct
PTEKEW

SEQ ID NO: 33974 - protein, 6 aa, synthetic construct
PTEKEY

SEQ ID NO: 33975 - protein, 6 aa, synthetic construct
PTEKGD

SEQ ID NO: 33976 - protein, 6 aa, synthetic construct
PTEKGE

SEQ ID NO: 33977 - protein, 6 aa, synthetic construct
PTEKGF

SEQ ID NO: 33978 - protein, 6 aa, synthetic construct
PTEKGW

SEQ ID NO: 33979 - protein, 6 aa, synthetic construct
PTEKGY

SEQ ID NO: 33980 - protein, 6 aa, synthetic construct
PTEKHD

SEQ ID NO: 33981 - protein, 6 aa, synthetic construct
PTEKHE

SEQ ID NO: 33982 - protein, 6 aa, synthetic construct
PTEKHF

SEQ ID NO: 33983 - protein, 6 aa, synthetic construct
PTEKHW

SEQ ID NO: 33984 - protein, 6 aa, synthetic construct
PTEKHY

SEQ ID NO: 33985 - protein, 6 aa, synthetic construct
PTEKID

SEQ ID NO: 33986 - protein, 6 aa, synthetic construct
PTEKIE

SEQ ID NO: 33987 - protein, 6 aa, synthetic construct
PTEKIF

SEQ ID NO: 33988 - protein, 6 aa, synthetic construct
PTEKIW

SEQ ID NO: 33989 - protein, 6 aa, synthetic construct
PTEKIY

SEQ ID NO: 33990 - protein, 6 aa, synthetic construct
PTEKLD

SEQ ID NO: 33991 - protein, 6 aa, synthetic construct
PTEKLE

SEQ ID NO: 33992 - protein, 6 aa, synthetic construct
PTEKLF

SEQ ID NO: 33993 - protein, 6 aa, synthetic construct
PTEKLW

SEQ ID NO: 33994 - protein, 6 aa, synthetic construct
PTEKLY

SEQ ID NO: 33995 - protein, 6 aa, synthetic construct
PTEKKD

SEQ ID NO: 33996 - protein, 6 aa, synthetic construct
PTEKKE

SEQ ID NO: 33997 - protein, 6 aa, synthetic construct
PTEKKF

SEQ ID NO: 33998 - protein, 6 aa, synthetic construct
PTEKKW

SEQ ID NO: 33999 - protein, 6 aa, synthetic construct
PTEKKY

SEQ ID NO: 34000 - protein, 6 aa, synthetic construct
PTEKMD

SEQ ID NO: 34001 - protein, 6 aa, synthetic construct
PTEKME

SEQ ID NO: 34002 - protein, 6 aa, synthetic construct
PTEKMF

SEQ ID NO: 34003 - protein, 6 aa, synthetic construct
PTEKMW

SEQ ID NO: 34004 - protein, 6 aa, synthetic construct
PTEKMY

SEQ ID NO: 34005 - protein, 6 aa, synthetic construct
PTEKFD

SEQ ID NO: 34006 - protein, 6 aa, synthetic construct
PTEKFE

SEQ ID NO: 34007 - protein, 6 aa, synthetic construct
PTEKFF

SEQ ID NO: 34008 - protein, 6 aa, synthetic construct
PTEKFW

SEQ ID NO: 34009 - protein, 6 aa, synthetic construct
PTEKFY

SEQ ID NO: 34010 - protein, 6 aa, synthetic construct
PTEKPD

SEQ ID NO: 34011 - protein, 6 aa, synthetic construct
PTEKPE

SEQ ID NO: 34012 - protein, 6 aa, synthetic construct
PTEKPF

SEQ ID NO: 34013 - protein, 6 aa, synthetic construct
PTEKPW

SEQ ID NO: 34014 - protein, 6 aa, synthetic construct
PTEKPY

SEQ ID NO: 34015 - protein, 6 aa, synthetic construct
PTEKSD

SEQ ID NO: 34016 - protein, 6 aa, synthetic construct
PTEKSE

SEQ ID NO: 34017 - protein, 6 aa, synthetic construct
PTEKSF

SEQ ID NO: 34018 - protein, 6 aa, synthetic construct
PTEKSW

SEQ ID NO: 34019 - protein, 6 aa, synthetic construct
PTEKSY

SEQ ID NO: 34020 - protein, 6 aa, synthetic construct
PTEKTD

SEQ ID NO: 34021 - protein, 6 aa, synthetic construct
PTEKTE

SEQ ID NO: 34022 - protein, 6 aa, synthetic construct
PTEKTF

SEQ ID NO: 34023 - protein, 6 aa, synthetic construct
PTEKTW

SEQ ID NO: 34024 - protein, 6 aa, synthetic construct
PTEKTY

SEQ ID NO: 34025 - protein, 6 aa, synthetic construct
PTEKWD

SEQ ID NO: 34026 - protein, 6 aa, synthetic construct
PTEKWE

SEQ ID NO: 34027 - protein, 6 aa, synthetic construct
PTEKWF

SEQ ID NO: 34028 - protein, 6 aa, synthetic construct
PTEKWW

SEQ ID NO: 34029 - protein, 6 aa, synthetic construct
PTEKWY

SEQ ID NO: 34030 - protein, 6 aa, synthetic construct
PTEKYD

SEQ ID NO: 34031 - protein, 6 aa, synthetic construct
PTEKYE

SEQ ID NO: 34032 - protein, 6 aa, synthetic construct
PTEKYF

SEQ ID NO: 34033 - protein, 6 aa, synthetic construct
PTEKYW

SEQ ID NO: 34034 - protein, 6 aa, synthetic construct
PTEKYY

SEQ ID NO: 34035 - protein, 6 aa, synthetic construct
PTEKVD

SEQ ID NO: 34036 - protein, 6 aa, synthetic construct
PTEKVE

SEQ ID NO: 34037 - protein, 6 aa, synthetic construct
PTEKVF

SEQ ID NO: 34038 - protein, 6 aa, synthetic construct
PTEKVW

SEQ ID NO: 34039 - protein, 6 aa, synthetic construct
PTEKVY

SEQ ID NO: 34040 - protein, 6 aa, synthetic construct
PTEMAD

SEQ ID NO: 34041 - protein, 6 aa, synthetic construct
PTEMAE

SEQ ID NO: 34042 - protein, 6 aa, synthetic construct
PTEMAF

SEQ ID NO: 34043 - protein, 6 aa, synthetic construct
PTEMAW

SEQ ID NO: 34044 - protein, 6 aa, synthetic construct
PTEMAY

SEQ ID NO: 34045 - protein, 6 aa, synthetic construct
PTEMRD

SEQ ID NO: 34046 - protein, 6 aa, synthetic construct
PTEMRE

SEQ ID NO: 34047 - protein, 6 aa, synthetic construct
PTEMRF

SEQ ID NO: 34048 - protein, 6 aa, synthetic construct
PTEMRW

SEQ ID NO: 34049 - protein, 6 aa, synthetic construct
PTEMRY

SEQ ID NO: 34050 - protein, 6 aa, synthetic construct
PTEMND

SEQ ID NO: 34051 - protein, 6 aa, synthetic construct
PTEMNE

SEQ ID NO: 34052 - protein, 6 aa, synthetic construct
PTEMNF

SEQ ID NO: 34053 - protein, 6 aa, synthetic construct
PTEMNW

SEQ ID NO: 34054 - protein, 6 aa, synthetic construct
PTEMNY

SEQ ID NO: 34055 - protein, 6 aa, synthetic construct
PTEMDD

SEQ ID NO: 34056 - protein, 6 aa, synthetic construct
PTEMDE

SEQ ID NO: 34057 - protein, 6 aa, synthetic construct
PTEMDF

SEQ ID NO: 34058 - protein, 6 aa, synthetic construct
PTEMDW

SEQ ID NO: 34059 - protein, 6 aa, synthetic construct
PTEMDY

SEQ ID NO: 34060 - protein, 6 aa, synthetic construct
PTEMCD

SEQ ID NO: 34061 - protein, 6 aa, synthetic construct
PTEMCE

SEQ ID NO: 34062 - protein, 6 aa, synthetic construct
PTEMCF

SEQ ID NO: 34063 - protein, 6 aa, synthetic construct
PTEMCW

SEQ ID NO: 34064 - protein, 6 aa, synthetic construct
PTEMCY

SEQ ID NO: 34065 - protein, 6 aa, synthetic construct
PTEMQD

SEQ ID NO: 34066 - protein, 6 aa, synthetic construct
PTEMQE

SEQ ID NO: 34067 - protein, 6 aa, synthetic construct
PTEMQF

SEQ ID NO: 34068 - protein, 6 aa, synthetic construct
PTEMQW

SEQ ID NO: 34069 - protein, 6 aa, synthetic construct
PTEMQY

SEQ ID NO: 34070 - protein, 6 aa, synthetic construct
PTEMED

SEQ ID NO: 34071 - protein, 6 aa, synthetic construct
PTEMEE

SEQ ID NO: 34072 - protein, 6 aa, synthetic construct
PTEMEF

SEQ ID NO: 34073 - protein, 6 aa, synthetic construct
PTEMEW

SEQ ID NO: 34074 - protein, 6 aa, synthetic construct
PTEMEY

SEQ ID NO: 34075 - protein, 6 aa, synthetic construct
PTEMGD

SEQ ID NO: 34076 - protein, 6 aa, synthetic construct
PTEMGE

SEQ ID NO: 34077 - protein, 6 aa, synthetic construct
PTEMGF

SEQ ID NO: 34078 - protein, 6 aa, synthetic construct
PTEMGW

SEQ ID NO: 34079 - protein, 6 aa, synthetic construct
PTEMGY

SEQ ID NO: 34080 - protein, 6 aa, synthetic construct
PTEMHD

SEQ ID NO: 34081 - protein, 6 aa, synthetic construct
PTEMHE

SEQ ID NO: 34082 - protein, 6 aa, synthetic construct
PTEMHF

SEQ ID NO: 34083 - protein, 6 aa, synthetic construct
PTEMHW

SEQ ID NO: 34084 - protein, 6 aa, synthetic construct
PTEMHY

SEQ ID NO: 34085 - protein, 6 aa, synthetic construct
PTEMID

SEQ ID NO: 34086 - protein, 6 aa, synthetic construct
PTEMIE

SEQ ID NO: 34087 - protein, 6 aa, synthetic construct
PTEMIF

SEQ ID NO: 34088 - protein, 6 aa, synthetic construct
PTEMIW

SEQ ID NO: 34089 - protein, 6 aa, synthetic construct
PTEMIY

SEQ ID NO: 34090 - protein, 6 aa, synthetic construct
PTEMLD

SEQ ID NO: 34091 - protein, 6 aa, synthetic construct
PTEMLE

SEQ ID NO: 34092 - protein, 6 aa, synthetic construct
PTEMLF

SEQ ID NO: 34093 - protein, 6 aa, synthetic construct
PTEMLW

SEQ ID NO: 34094 - protein, 6 aa, synthetic construct
PTEMLY

SEQ ID NO: 34095 - protein, 6 aa, synthetic construct
PTEMKD

SEQ ID NO: 34096 - protein, 6 aa, synthetic construct
PTEMKE

SEQ ID NO: 34097 - protein, 6 aa, synthetic construct
PTEMKF

SEQ ID NO: 34098 - protein, 6 aa, synthetic construct
PTEMKW

SEQ ID NO: 34099 - protein, 6 aa, synthetic construct
PTEMKY

SEQ ID NO: 34100 - protein, 6 aa, synthetic construct
PTEMMD

SEQ ID NO: 34101 - protein, 6 aa, synthetic construct
PTEMME

SEQ ID NO: 34102 - protein, 6 aa, synthetic construct
PTEMMF

SEQ ID NO: 34103 - protein, 6 aa, synthetic construct
PTEMMW

SEQ ID NO: 34104 - protein, 6 aa, synthetic construct
PTEMMY

SEQ ID NO: 34105 - protein, 6 aa, synthetic construct
PTEMFD

SEQ ID NO: 34106 - protein, 6 aa, synthetic construct
PTEMFE

SEQ ID NO: 34107 - protein, 6 aa, synthetic construct
PTEMFF

SEQ ID NO: 34108 - protein, 6 aa, synthetic construct
PTEMFW

SEQ ID NO: 34109 - protein, 6 aa, synthetic construct
PTEMFY

SEQ ID NO: 34110 - protein, 6 aa, synthetic construct
PTEMPD

SEQ ID NO: 34111 - protein, 6 aa, synthetic construct
PTEMPE

SEQ ID NO: 34112 - protein, 6 aa, synthetic construct
PTEMPF

SEQ ID NO: 34113 - protein, 6 aa, synthetic construct
PTEMPW

SEQ ID NO: 34114 - protein, 6 aa, synthetic construct
PTEMPY

SEQ ID NO: 34115 - protein, 6 aa, synthetic construct
PTEMSD

SEQ ID NO: 34116 - protein, 6 aa, synthetic construct
PTEMSE

SEQ ID NO: 34117 - protein, 6 aa, synthetic construct
PTEMSF

SEQ ID NO: 34118 - protein, 6 aa, synthetic construct
PTEMSW

SEQ ID NO: 34119 - protein, 6 aa, synthetic construct
PTEMSY

SEQ ID NO: 34120 - protein, 6 aa, synthetic construct
PTEMTD

SEQ ID NO: 34121 - protein, 6 aa, synthetic construct
PTEMTE

SEQ ID NO: 34122 - protein, 6 aa, synthetic construct
PTEMTF

SEQ ID NO: 34123 - protein, 6 aa, synthetic construct
PTEMTW

SEQ ID NO: 34124 - protein, 6 aa, synthetic construct
PTEMTY

SEQ ID NO: 34125 - protein, 6 aa, synthetic construct
PTEMWD

SEQ ID NO: 34126 - protein, 6 aa, synthetic construct
PTEMWE

SEQ ID NO: 34127 - protein, 6 aa, synthetic construct
PTEMWF

SEQ ID NO: 34128 - protein, 6 aa, synthetic construct
PTEMWW

SEQ ID NO: 34129 - protein, 6 aa, synthetic construct
PTEMWY

SEQ ID NO: 34130 - protein, 6 aa, synthetic construct
PTEMYD

SEQ ID NO: 34131 - protein, 6 aa, synthetic construct
PTEMYE

SEQ ID NO: 34132 - protein, 6 aa, synthetic construct
PTEMYF

SEQ ID NO: 34133 - protein, 6 aa, synthetic construct
PTEMYW

SEQ ID NO: 34134 - protein, 6 aa, synthetic construct
PTEMYY

SEQ ID NO: 34135 - protein, 6 aa, synthetic construct
PTEMVD

SEQ ID NO: 34136 - protein, 6 aa, synthetic construct
PTEMVE

SEQ ID NO: 34137 - protein, 6 aa, synthetic construct
PTEMVF

SEQ ID NO: 34138 - protein, 6 aa, synthetic construct
PTEMVW

SEQ ID NO: 34139 - protein, 6 aa, synthetic construct
PTEMVY

SEQ ID NO: 34140 - protein, 6 aa, synthetic construct
PTEFAD

SEQ ID NO: 34141 - protein, 6 aa, synthetic construct
PTEFAE

SEQ ID NO: 34142 - protein, 6 aa, synthetic construct
PTEFAF

SEQ ID NO: 34143 - protein, 6 aa, synthetic construct
PTEFAW

SEQ ID NO: 34144 - protein, 6 aa, synthetic construct
PTEFAY

SEQ ID NO: 34145 - protein, 6 aa, synthetic construct
PTEFRD

SEQ ID NO: 34146 - protein, 6 aa, synthetic construct
PTEFRE

SEQ ID NO: 34147 - protein, 6 aa, synthetic construct
PTEFRF

SEQ ID NO: 34148 - protein, 6 aa, synthetic construct
PTEFRW

SEQ ID NO: 34149 - protein, 6 aa, synthetic construct
PTEFRY

SEQ ID NO: 34150 - protein, 6 aa, synthetic construct
PTEFND

SEQ ID NO: 34151 - protein, 6 aa, synthetic construct
PTEFNE

SEQ ID NO: 34152 - protein, 6 aa, synthetic construct
PTEFNF

SEQ ID NO: 34153 - protein, 6 aa, synthetic construct
PTEFNW

SEQ ID NO: 34154 - protein, 6 aa, synthetic construct
PTEFNY

SEQ ID NO: 34155 - protein, 6 aa, synthetic construct
PTEFDD

SEQ ID NO: 34156 - protein, 6 aa, synthetic construct
PTEFDE

SEQ ID NO: 34157 - protein, 6 aa, synthetic construct
PTEFDF

SEQ ID NO: 34158 - protein, 6 aa, synthetic construct
PTEFDW

SEQ ID NO: 34159 - protein, 6 aa, synthetic construct
PTEFDY

SEQ ID NO: 34160 - protein, 6 aa, synthetic construct
PTEFCD

SEQ ID NO: 34161 - protein, 6 aa, synthetic construct
PTEFCE

SEQ ID NO: 34162 - protein, 6 aa, synthetic construct
PTEFCF

SEQ ID NO: 34163 - protein, 6 aa, synthetic construct
PTEFCW

SEQ ID NO: 34164 - protein, 6 aa, synthetic construct
PTEFCY

SEQ ID NO: 34165 - protein, 6 aa, synthetic construct
PTEFQD

SEQ ID NO: 34166 - protein, 6 aa, synthetic construct
PTEFQE

SEQ ID NO: 34167 - protein, 6 aa, synthetic construct
PTEFQF

SEQ ID NO: 34168 - protein, 6 aa, synthetic construct
PTEFQW

SEQ ID NO: 34169 - protein, 6 aa, synthetic construct
PTEFQY

SEQ ID NO: 34170 - protein, 6 aa, synthetic construct
PTEFED

SEQ ID NO: 34171 - protein, 6 aa, synthetic construct
PTEFEE

SEQ ID NO: 34172 - protein, 6 aa, synthetic construct
PTEFEF

SEQ ID NO: 34173 - protein, 6 aa, synthetic construct
PTEFEW

SEQ ID NO: 34174 - protein, 6 aa, synthetic construct
PTEFEY

SEQ ID NO: 34175 - protein, 6 aa, synthetic construct
PTEFGD

SEQ ID NO: 34176 - protein, 6 aa, synthetic construct
PTEFGE

SEQ ID NO: 34177 - protein, 6 aa, synthetic construct
PTEFGF

SEQ ID NO: 34178 - protein, 6 aa, synthetic construct
PTEFGW

SEQ ID NO: 34179 - protein, 6 aa, synthetic construct
PTEFGY

SEQ ID NO: 34180 - protein, 6 aa, synthetic construct
PTEFHD

SEQ ID NO: 34181 - protein, 6 aa, synthetic construct
PTEFHE

SEQ ID NO: 34182 - protein, 6 aa, synthetic construct
PTEFHF

SEQ ID NO: 34183 - protein, 6 aa, synthetic construct
PTEFHW

SEQ ID NO: 34184 - protein, 6 aa, synthetic construct
PTEFHY

SEQ ID NO: 34185 - protein, 6 aa, synthetic construct
PTEFID

SEQ ID NO: 34186 - protein, 6 aa, synthetic construct
PTEFIE

SEQ ID NO: 34187 - protein, 6 aa, synthetic construct
PTEFIF

SEQ ID NO: 34188 - protein, 6 aa, synthetic construct
PTEFIW

SEQ ID NO: 34189 - protein, 6 aa, synthetic construct
PTEFIY

SEQ ID NO: 34190 - protein, 6 aa, synthetic construct
PTEFLD

SEQ ID NO: 34191 - protein, 6 aa, synthetic construct
PTEFLE

SEQ ID NO: 34192 - protein, 6 aa, synthetic construct
PTEFLF

SEQ ID NO: 34193 - protein, 6 aa, synthetic construct
PTEFLW

SEQ ID NO: 34194 - protein, 6 aa, synthetic construct
PTEFLY

SEQ ID NO: 34195 - protein, 6 aa, synthetic construct
PTEFKD

SEQ ID NO: 34196 - protein, 6 aa, synthetic construct
PTEFKE

SEQ ID NO: 34197 - protein, 6 aa, synthetic construct
PTEFKF

SEQ ID NO: 34198 - protein, 6 aa, synthetic construct
PTEFKW

SEQ ID NO: 34199 - protein, 6 aa, synthetic construct
PTEFKY

SEQ ID NO: 34200 - protein, 6 aa, synthetic construct
PTEFMD

SEQ ID NO: 34201 - protein, 6 aa, synthetic construct
PTEFME

SEQ ID NO: 34202 - protein, 6 aa, synthetic construct
PTEFMF

SEQ ID NO: 34203 - protein, 6 aa, synthetic construct
PTEFMW

SEQ ID NO: 34204 - protein, 6 aa, synthetic construct
PTEFMY

SEQ ID NO: 34205 - protein, 6 aa, synthetic construct
PTEFFD

SEQ ID NO: 34206 - protein, 6 aa, synthetic construct
PTEFFE

SEQ ID NO: 34207 - protein, 6 aa, synthetic construct
PTEFFF

SEQ ID NO: 34208 - protein, 6 aa, synthetic construct
PTEFFW

SEQ ID NO: 34209 - protein, 6 aa, synthetic construct
PTEFFY

SEQ ID NO: 34210 - protein, 6 aa, synthetic construct
PTEFPD

SEQ ID NO: 34211 - protein, 6 aa, synthetic construct
PTEFPE

SEQ ID NO: 34212 - protein, 6 aa, synthetic construct
PTEFPF

SEQ ID NO: 34213 - protein, 6 aa, synthetic construct
PTEFPW

SEQ ID NO: 34214 - protein, 6 aa, synthetic construct
PTEFPY

SEQ ID NO: 34215 - protein, 6 aa, synthetic construct
PTEFSD

SEQ ID NO: 34216 - protein, 6 aa, synthetic construct
PTEFSE

SEQ ID NO: 34217 - protein, 6 aa, synthetic construct
PTEFSF

SEQ ID NO: 34218 - protein, 6 aa, synthetic construct
PTEFSW

SEQ ID NO: 34219 - protein, 6 aa, synthetic construct
PTEFSY

SEQ ID NO: 34220 - protein, 6 aa, synthetic construct
PTEFTD

SEQ ID NO: 34221 - protein, 6 aa, synthetic construct
PTEFTE

SEQ ID NO: 34222 - protein, 6 aa, synthetic construct
PTEFTF

SEQ ID NO: 34223 - protein, 6 aa, synthetic construct
PTEFTW

SEQ ID NO: 34224 - protein, 6 aa, synthetic construct
PTEFTY

SEQ ID NO: 34225 - protein, 6 aa, synthetic construct
PTEFWD

SEQ ID NO: 34226 - protein, 6 aa, synthetic construct
PTEFWE

SEQ ID NO: 34227 - protein, 6 aa, synthetic construct
PTEFWF

SEQ ID NO: 34228 - protein, 6 aa, synthetic construct
PTEFWW

SEQ ID NO: 34229 - protein, 6 aa, synthetic construct
PTEFWY

SEQ ID NO: 34230 - protein, 6 aa, synthetic construct
PTEFYD

SEQ ID NO: 34231 - protein, 6 aa, synthetic construct
PTEFYE

SEQ ID NO: 34232 - protein, 6 aa, synthetic construct
PTEFYF

SEQ ID NO: 34233 - protein, 6 aa, synthetic construct
PTEFYW

SEQ ID NO: 34234 - protein, 6 aa, synthetic construct
PTEFYY

SEQ ID NO: 34235 - protein, 6 aa, synthetic construct
PTEFVD

SEQ ID NO: 34236 - protein, 6 aa, synthetic construct
PTEFVE

SEQ ID NO: 34237 - protein, 6 aa, synthetic construct
PTEFVF

SEQ ID NO: 34238 - protein, 6 aa, synthetic construct
PTEFVW

SEQ ID NO: 34239 - protein, 6 aa, synthetic construct
PTEFVY

SEQ ID NO: 34240 - protein, 6 aa, synthetic construct
PTEPAD

SEQ ID NO: 34241 - protein, 6 aa, synthetic construct
PTEPAE

SEQ ID NO: 34242 - protein, 6 aa, synthetic construct
PTEPAF

SEQ ID NO: 34243 - protein, 6 aa, synthetic construct
PTEPAW

SEQ ID NO: 34244 - protein, 6 aa, synthetic construct
PTEPAY

SEQ ID NO: 34245 - protein, 6 aa, synthetic construct
PTEPRD

SEQ ID NO: 34246 - protein, 6 aa, synthetic construct
PTEPRE

SEQ ID NO: 34247 - protein, 6 aa, synthetic construct
PTEPRF

SEQ ID NO: 34248 - protein, 6 aa, synthetic construct
PTEPRW

SEQ ID NO: 34249 - protein, 6 aa, synthetic construct
PTEPRY

SEQ ID NO: 34250 - protein, 6 aa, synthetic construct
PTEPND

SEQ ID NO: 34251 - protein, 6 aa, synthetic construct
PTEPNE

SEQ ID NO: 34252 - protein, 6 aa, synthetic construct
PTEPNF

SEQ ID NO: 34253 - protein, 6 aa, synthetic construct
PTEPNW

SEQ ID NO: 34254 - protein, 6 aa, synthetic construct
PTEPNY

SEQ ID NO: 34255 - protein, 6 aa, synthetic construct
PTEPDD

SEQ ID NO: 34256 - protein, 6 aa, synthetic construct
PTEPDE

SEQ ID NO: 34257 - protein, 6 aa, synthetic construct
PTEPDF

SEQ ID NO: 34258 - protein, 6 aa, synthetic construct
PTEPDW

SEQ ID NO: 34259 - protein, 6 aa, synthetic construct
PTEPDY

SEQ ID NO: 34260 - protein, 6 aa, synthetic construct
PTEPCD

SEQ ID NO: 34261 - protein, 6 aa, synthetic construct
PTEPCE

SEQ ID NO: 34262 - protein, 6 aa, synthetic construct
PTEPCF

SEQ ID NO: 34263 - protein, 6 aa, synthetic construct
PTEPCW

SEQ ID NO: 34264 - protein, 6 aa, synthetic construct
PTEPCY

SEQ ID NO: 34265 - protein, 6 aa, synthetic construct
PTEPQD

SEQ ID NO: 34266 - protein, 6 aa, synthetic construct
PTEPQE

SEQ ID NO: 34267 - protein, 6 aa, synthetic construct
PTEPQF

SEQ ID NO: 34268 - protein, 6 aa, synthetic construct
PTEPQW

SEQ ID NO: 34269 - protein, 6 aa, synthetic construct
PTEPQY

SEQ ID NO: 34270 - protein, 6 aa, synthetic construct
PTEPED

SEQ ID NO: 34271 - protein, 6 aa, synthetic construct
PTEPEE

SEQ ID NO: 34272 - protein, 6 aa, synthetic construct
PTEPEF

SEQ ID NO: 34273 - protein, 6 aa, synthetic construct
PTEPEW

SEQ ID NO: 34274 - protein, 6 aa, synthetic construct
PTEPEY

SEQ ID NO: 34275 - protein, 6 aa, synthetic construct
PTEPGD

SEQ ID NO: 34276 - protein, 6 aa, synthetic construct
PTEPGE

SEQ ID NO: 34277 - protein, 6 aa, synthetic construct
PTEPGF

SEQ ID NO: 34278 - protein, 6 aa, synthetic construct
PTEPGW

SEQ ID NO: 34279 - protein, 6 aa, synthetic construct
PTEPGY

SEQ ID NO: 34280 - protein, 6 aa, synthetic construct
PTEPHD

SEQ ID NO: 34281 - protein, 6 aa, synthetic construct
PTEPHE

SEQ ID NO: 34282 - protein, 6 aa, synthetic construct
PTEPHF

SEQ ID NO: 34283 - protein, 6 aa, synthetic construct
PTEPHW

SEQ ID NO: 34284 - protein, 6 aa, synthetic construct
PTEPHY

SEQ ID NO: 34285 - protein, 6 aa, synthetic construct
PTEPID

SEQ ID NO: 34286 - protein, 6 aa, synthetic construct
PTEPIE

SEQ ID NO: 34287 - protein, 6 aa, synthetic construct
PTEPIF

SEQ ID NO: 34288 - protein, 6 aa, synthetic construct
PTEPIW

SEQ ID NO: 34289 - protein, 6 aa, synthetic construct
PTEPIY

SEQ ID NO: 34290 - protein, 6 aa, synthetic construct
PTEPLD

SEQ ID NO: 34291 - protein, 6 aa, synthetic construct
PTEPLE

SEQ ID NO: 34292 - protein, 6 aa, synthetic construct
PTEPLF

SEQ ID NO: 34293 - protein, 6 aa, synthetic construct
PTEPLW

SEQ ID NO: 34294 - protein, 6 aa, synthetic construct
PTEPLY

SEQ ID NO: 34295 - protein, 6 aa, synthetic construct
PTEPKD

SEQ ID NO: 34296 - protein, 6 aa, synthetic construct
PTEPKE

SEQ ID NO: 34297 - protein, 6 aa, synthetic construct
PTEPKF

SEQ ID NO: 34298 - protein, 6 aa, synthetic construct
PTEPKW

SEQ ID NO: 34299 - protein, 6 aa, synthetic construct
PTEPKY

SEQ ID NO: 34300 - protein, 6 aa, synthetic construct
PTEPMD

SEQ ID NO: 34301 - protein, 6 aa, synthetic construct
PTEPME

SEQ ID NO: 34302 - protein, 6 aa, synthetic construct
PTEPMF

SEQ ID NO: 34303 - protein, 6 aa, synthetic construct
PTEPMW

SEQ ID NO: 34304 - protein, 6 aa, synthetic construct
PTEPMY

SEQ ID NO: 34305 - protein, 6 aa, synthetic construct
PTEPFD

SEQ ID NO: 34306 - protein, 6 aa, synthetic construct
PTEPFE

SEQ ID NO: 34307 - protein, 6 aa, synthetic construct
PTEPFF

SEQ ID NO: 34308 - protein, 6 aa, synthetic construct
PTEPFW

SEQ ID NO: 34309 - protein, 6 aa, synthetic construct
PTEPFY

SEQ ID NO: 34310 - protein, 6 aa, synthetic construct
PTEPPD

SEQ ID NO: 34311 - protein, 6 aa, synthetic construct
PTEPPE

SEQ ID NO: 34312 - protein, 6 aa, synthetic construct
PTEPPF

SEQ ID NO: 34313 - protein, 6 aa, synthetic construct
PTEPPW

SEQ ID NO: 34314 - protein, 6 aa, synthetic construct
PTEPPY

SEQ ID NO: 34315 - protein, 6 aa, synthetic construct
PTEPSD

SEQ ID NO: 34316 - protein, 6 aa, synthetic construct
PTEPSE

SEQ ID NO: 34317 - protein, 6 aa, synthetic construct
PTEPSF

SEQ ID NO: 34318 - protein, 6 aa, synthetic construct
PTEPSW

SEQ ID NO: 34319 - protein, 6 aa, synthetic construct
PTEPSY

SEQ ID NO: 34320 - protein, 6 aa, synthetic construct
PTEPTD

SEQ ID NO: 34321 - protein, 6 aa, synthetic construct
PTEPTE

SEQ ID NO: 34322 - protein, 6 aa, synthetic construct
PTEPTF

SEQ ID NO: 34323 - protein, 6 aa, synthetic construct
PTEPTW

SEQ ID NO: 34324 - protein, 6 aa, synthetic construct
PTEPTY

SEQ ID NO: 34325 - protein, 6 aa, synthetic construct
PTEPWD

SEQ ID NO: 34326 - protein, 6 aa, synthetic construct
PTEPWE

SEQ ID NO: 34327 - protein, 6 aa, synthetic construct
PTEPWF

SEQ ID NO: 34328 - protein, 6 aa, synthetic construct
PTEPWW

SEQ ID NO: 34329 - protein, 6 aa, synthetic construct
PTEPWY

SEQ ID NO: 34330 - protein, 6 aa, synthetic construct
PTEPYD

SEQ ID NO: 34331 - protein, 6 aa, synthetic construct
PTEPYE

SEQ ID NO: 34332 - protein, 6 aa, synthetic construct
PTEPYF

SEQ ID NO: 34333 - protein, 6 aa, synthetic construct
PTEPYW

SEQ ID NO: 34334 - protein, 6 aa, synthetic construct
PTEPYY

SEQ ID NO: 34335 - protein, 6 aa, synthetic construct
PTEPVD

SEQ ID NO: 34336 - protein, 6 aa, synthetic construct
PTEPVE

SEQ ID NO: 34337 - protein, 6 aa, synthetic construct
PTEPVF

SEQ ID NO: 34338 - protein, 6 aa, synthetic construct
PTEPVW

SEQ ID NO: 34339 - protein, 6 aa, synthetic construct
PTEPVY

SEQ ID NO: 34340 - protein, 6 aa, synthetic construct
PTESAD

SEQ ID NO: 34341 - protein, 6 aa, synthetic construct
PTESAE

SEQ ID NO: 34342 - protein, 6 aa, synthetic construct
PTESAF

SEQ ID NO: 34343 - protein, 6 aa, synthetic construct
PTESAW

SEQ ID NO: 34344 - protein, 6 aa, synthetic construct
PTESAY

SEQ ID NO: 34345 - protein, 6 aa, synthetic construct
PTESRD

SEQ ID NO: 34346 - protein, 6 aa, synthetic construct
PTESRE

SEQ ID NO: 34347 - protein, 6 aa, synthetic construct
PTESRF

SEQ ID NO: 34348 - protein, 6 aa, synthetic construct
PTESRW

SEQ ID NO: 34349 - protein, 6 aa, synthetic construct
PTESRY

SEQ ID NO: 34350 - protein, 6 aa, synthetic construct
PTESND

SEQ ID NO: 34351 - protein, 6 aa, synthetic construct
PTESNE

SEQ ID NO: 34352 - protein, 6 aa, synthetic construct
PTESNF

SEQ ID NO: 34353 - protein, 6 aa, synthetic construct
PTESNW

SEQ ID NO: 34354 - protein, 6 aa, synthetic construct
PTESNY

SEQ ID NO: 34355 - protein, 6 aa, synthetic construct
PTESDD

SEQ ID NO: 34356 - protein, 6 aa, synthetic construct
PTESDE

SEQ ID NO: 34357 - protein, 6 aa, synthetic construct
PTESDF

SEQ ID NO: 34358 - protein, 6 aa, synthetic construct
PTESDW

SEQ ID NO: 34359 - protein, 6 aa, synthetic construct
PTESDY

SEQ ID NO: 34360 - protein, 6 aa, synthetic construct
PTESCD

SEQ ID NO: 34361 - protein, 6 aa, synthetic construct
PTESCE

SEQ ID NO: 34362 - protein, 6 aa, synthetic construct
PTESCF

SEQ ID NO: 34363 - protein, 6 aa, synthetic construct
PTESCW

SEQ ID NO: 34364 - protein, 6 aa, synthetic construct
PTESCY

SEQ ID NO: 34365 - protein, 6 aa, synthetic construct
PTESQD

SEQ ID NO: 34366 - protein, 6 aa, synthetic construct
PTESQE

SEQ ID NO: 34367 - protein, 6 aa, synthetic construct
PTESQF

SEQ ID NO: 34368 - protein, 6 aa, synthetic construct
PTESQW

SEQ ID NO: 34369 - protein, 6 aa, synthetic construct
PTESQY

SEQ ID NO: 34370 - protein, 6 aa, synthetic construct
PTESED

SEQ ID NO: 34371 - protein, 6 aa, synthetic construct
PTESEE

SEQ ID NO: 34372 - protein, 6 aa, synthetic construct
PTESEF

SEQ ID NO: 34373 - protein, 6 aa, synthetic construct
PTESEW

SEQ ID NO: 34374 - protein, 6 aa, synthetic construct
PTESEY

SEQ ID NO: 34375 - protein, 6 aa, synthetic construct
PTESGD

SEQ ID NO: 34376 - protein, 6 aa, synthetic construct
PTESGE

SEQ ID NO: 34377 - protein, 6 aa, synthetic construct
PTESGF

SEQ ID NO: 34378 - protein, 6 aa, synthetic construct
PTESGW

SEQ ID NO: 34379 - protein, 6 aa, synthetic construct
PTESGY

SEQ ID NO: 34380 - protein, 6 aa, synthetic construct
PTESHD

SEQ ID NO: 34381 - protein, 6 aa, synthetic construct
PTESHE

SEQ ID NO: 34382 - protein, 6 aa, synthetic construct
PTESHF

SEQ ID NO: 34383 - protein, 6 aa, synthetic construct
PTESHW

SEQ ID NO: 34384 - protein, 6 aa, synthetic construct
PTESHY

SEQ ID NO: 34385 - protein, 6 aa, synthetic construct
PTESID

SEQ ID NO: 34386 - protein, 6 aa, synthetic construct
PTESIE

SEQ ID NO: 34387 - protein, 6 aa, synthetic construct
PTESIF

SEQ ID NO: 34388 - protein, 6 aa, synthetic construct
PTESIW

SEQ ID NO: 34389 - protein, 6 aa, synthetic construct
PTESIY

SEQ ID NO: 34390 - protein, 6 aa, synthetic construct
PTESLD

SEQ ID NO: 34391 - protein, 6 aa, synthetic construct
PTESLE

SEQ ID NO: 34392 - protein, 6 aa, synthetic construct
PTESLF

SEQ ID NO: 34393 - protein, 6 aa, synthetic construct
PTESLW

SEQ ID NO: 34394 - protein, 6 aa, synthetic construct
PTESLY

SEQ ID NO: 34395 - protein, 6 aa, synthetic construct
PTESKD

SEQ ID NO: 34396 - protein, 6 aa, synthetic construct
PTESKE

SEQ ID NO: 34397 - protein, 6 aa, synthetic construct
PTESKF

SEQ ID NO: 34398 - protein, 6 aa, synthetic construct
PTESKW

SEQ ID NO: 34399 - protein, 6 aa, synthetic construct
PTESKY

SEQ ID NO: 34400 - protein, 6 aa, synthetic construct
PTESMD

SEQ ID NO: 34401 - protein, 6 aa, synthetic construct
PTESME

SEQ ID NO: 34402 - protein, 6 aa, synthetic construct
PTESMF

SEQ ID NO: 34403 - protein, 6 aa, synthetic construct
PTESMW

SEQ ID NO: 34404 - protein, 6 aa, synthetic construct
PTESMY

SEQ ID NO: 34405 - protein, 6 aa, synthetic construct
PTESFD

SEQ ID NO: 34406 - protein, 6 aa, synthetic construct
PTESFE

SEQ ID NO: 34407 - protein, 6 aa, synthetic construct
PTESFF

SEQ ID NO: 34408 - protein, 6 aa, synthetic construct
PTESFW

SEQ ID NO: 34409 - protein, 6 aa, synthetic construct
PTESFY

SEQ ID NO: 34410 - protein, 6 aa, synthetic construct
PTESPD

SEQ ID NO: 34411 - protein, 6 aa, synthetic construct
PTESPE

SEQ ID NO: 34412 - protein, 6 aa, synthetic construct
PTESPF

SEQ ID NO: 34413 - protein, 6 aa, synthetic construct
PTESPW

SEQ ID NO: 34414 - protein, 6 aa, synthetic construct
PTESPY

SEQ ID NO: 34415 - protein, 6 aa, synthetic construct
PTESSD

SEQ ID NO: 34416 - protein, 6 aa, synthetic construct
PTESSE

SEQ ID NO: 34417 - protein, 6 aa, synthetic construct
PTESSF

SEQ ID NO: 34418 - protein, 6 aa, synthetic construct
PTESSW

SEQ ID NO: 34419 - protein, 6 aa, synthetic construct
PTESSY

SEQ ID NO: 34420 - protein, 6 aa, synthetic construct
PTESTD

SEQ ID NO: 34421 - protein, 6 aa, synthetic construct
PTESTE

SEQ ID NO: 34422 - protein, 6 aa, synthetic construct
PTESTF

SEQ ID NO: 34423 - protein, 6 aa, synthetic construct
PTESTW

SEQ ID NO: 34424 - protein, 6 aa, synthetic construct
PTESTY

SEQ ID NO: 34425 - protein, 6 aa, synthetic construct
PTESWD

SEQ ID NO: 34426 - protein, 6 aa, synthetic construct
PTESWE

SEQ ID NO: 34427 - protein, 6 aa, synthetic construct
PTESWF

SEQ ID NO: 34428 - protein, 6 aa, synthetic construct
PTESWW

SEQ ID NO: 34429 - protein, 6 aa, synthetic construct
PTESWY

SEQ ID NO: 34430 - protein, 6 aa, synthetic construct
PTESYD

SEQ ID NO: 34431 - protein, 6 aa, synthetic construct
PTESYE

SEQ ID NO: 34432 - protein, 6 aa, synthetic construct
PTESYF

SEQ ID NO: 34433 - protein, 6 aa, synthetic construct
PTESYW

SEQ ID NO: 34434 - protein, 6 aa, synthetic construct
PTESYY

SEQ ID NO: 34435 - protein, 6 aa, synthetic construct
PTESVD

SEQ ID NO: 34436 - protein, 6 aa, synthetic construct
PTESVE

SEQ ID NO: 34437 - protein, 6 aa, synthetic construct
PTESVF

SEQ ID NO: 34438 - protein, 6 aa, synthetic construct
PTESVW

SEQ ID NO: 34439 - protein, 6 aa, synthetic construct
PTESVY

SEQ ID NO: 34440 - protein, 6 aa, synthetic construct
PTETAD

SEQ ID NO: 34441 - protein, 6 aa, synthetic construct
PTETAE

SEQ ID NO: 34442 - protein, 6 aa, synthetic construct
PTETAF

SEQ ID NO: 34443 - protein, 6 aa, synthetic construct
PTETAW

SEQ ID NO: 34444 - protein, 6 aa, synthetic construct
PTETAY

SEQ ID NO: 34445 - protein, 6 aa, synthetic construct
PTETRD

SEQ ID NO: 34446 - protein, 6 aa, synthetic construct
PTETRE

SEQ ID NO: 34447 - protein, 6 aa, synthetic construct
PTETRF

SEQ ID NO: 34448 - protein, 6 aa, synthetic construct
PTETRW

SEQ ID NO: 34449 - protein, 6 aa, synthetic construct
PTETRY

SEQ ID NO: 34450 - protein, 6 aa, synthetic construct
PTETND

SEQ ID NO: 34451 - protein, 6 aa, synthetic construct
PTETNE

SEQ ID NO: 34452 - protein, 6 aa, synthetic construct
PTETNF

SEQ ID NO: 34453 - protein, 6 aa, synthetic construct
PTETNW

SEQ ID NO: 34454 - protein, 6 aa, synthetic construct
PTETNY

SEQ ID NO: 34455 - protein, 6 aa, synthetic construct
PTETDD

SEQ ID NO: 34456 - protein, 6 aa, synthetic construct
PTETDE

SEQ ID NO: 34457 - protein, 6 aa, synthetic construct
PTETDF

SEQ ID NO: 34458 - protein, 6 aa, synthetic construct
PTETDW

SEQ ID NO: 34459 - protein, 6 aa, synthetic construct
PTETDY

SEQ ID NO: 34460 - protein, 6 aa, synthetic construct
PTETCD

SEQ ID NO: 34461 - protein, 6 aa, synthetic construct
PTETCE

SEQ ID NO: 34462 - protein, 6 aa, synthetic construct
PTETCF

SEQ ID NO: 34463 - protein, 6 aa, synthetic construct
PTETCW

SEQ ID NO: 34464 - protein, 6 aa, synthetic construct
PTETCY

SEQ ID NO: 34465 - protein, 6 aa, synthetic construct
PTETQD

SEQ ID NO: 34466 - protein, 6 aa, synthetic construct
PTETQE

SEQ ID NO: 34467 - protein, 6 aa, synthetic construct
PTETQF

SEQ ID NO: 34468 - protein, 6 aa, synthetic construct
PTETQW

SEQ ID NO: 34469 - protein, 6 aa, synthetic construct
PTETQY

SEQ ID NO: 34470 - protein, 6 aa, synthetic construct
PTETED

SEQ ID NO: 34471 - protein, 6 aa, synthetic construct
PTETEE

SEQ ID NO: 34472 - protein, 6 aa, synthetic construct
PTETEF

SEQ ID NO: 34473 - protein, 6 aa, synthetic construct
PTETEW

SEQ ID NO: 34474 - protein, 6 aa, synthetic construct
PTETEY

SEQ ID NO: 34475 - protein, 6 aa, synthetic construct
PTETGD

SEQ ID NO: 34476 - protein, 6 aa, synthetic construct
PTETGE

SEQ ID NO: 34477 - protein, 6 aa, synthetic construct
PTETGF

SEQ ID NO: 34478 - protein, 6 aa, synthetic construct
PTETGW

SEQ ID NO: 34479 - protein, 6 aa, synthetic construct
PTETGY

SEQ ID NO: 34480 - protein, 6 aa, synthetic construct
PTETHD

SEQ ID NO: 34481 - protein, 6 aa, synthetic construct
PTETHE

SEQ ID NO: 34482 - protein, 6 aa, synthetic construct
PTETHF

SEQ ID NO: 34483 - protein, 6 aa, synthetic construct
PTETHW

SEQ ID NO: 34484 - protein, 6 aa, synthetic construct
PTETHY

SEQ ID NO: 34485 - protein, 6 aa, synthetic construct
PTETID

SEQ ID NO: 34486 - protein, 6 aa, synthetic construct
PTETIE

SEQ ID NO: 34487 - protein, 6 aa, synthetic construct
PTETIF

SEQ ID NO: 34488 - protein, 6 aa, synthetic construct
PTETIW

SEQ ID NO: 34489 - protein, 6 aa, synthetic construct
PTETIY

SEQ ID NO: 34490 - protein, 6 aa, synthetic construct
PTETLD

SEQ ID NO: 34491 - protein, 6 aa, synthetic construct
PTETLE

SEQ ID NO: 34492 - protein, 6 aa, synthetic construct
PTETLF

SEQ ID NO: 34493 - protein, 6 aa, synthetic construct
PTETLW

SEQ ID NO: 34494 - protein, 6 aa, synthetic construct
PTETLY

SEQ ID NO: 34495 - protein, 6 aa, synthetic construct
PTETKD

SEQ ID NO: 34496 - protein, 6 aa, synthetic construct
PTETKE

SEQ ID NO: 34497 - protein, 6 aa, synthetic construct
PTETKF

SEQ ID NO: 34498 - protein, 6 aa, synthetic construct
PTETKW

SEQ ID NO: 34499 - protein, 6 aa, synthetic construct
PTETKY

SEQ ID NO: 34500 - protein, 6 aa, synthetic construct
PTETMD

SEQ ID NO: 34501 - protein, 6 aa, synthetic construct
PTETME

SEQ ID NO: 34502 - protein, 6 aa, synthetic construct
PTETMF

SEQ ID NO: 34503 - protein, 6 aa, synthetic construct
PTETMW

SEQ ID NO: 34504 - protein, 6 aa, synthetic construct
PTETMY

SEQ ID NO: 34505 - protein, 6 aa, synthetic construct
PTETFD

SEQ ID NO: 34506 - protein, 6 aa, synthetic construct
PTETFE

SEQ ID NO: 34507 - protein, 6 aa, synthetic construct
PTETFF

SEQ ID NO: 34508 - protein, 6 aa, synthetic construct
PTETFW

SEQ ID NO: 34509 - protein, 6 aa, synthetic construct
PTETFY

SEQ ID NO: 34510 - protein, 6 aa, synthetic construct
PTETPD

SEQ ID NO: 34511 - protein, 6 aa, synthetic construct
PTETPE

SEQ ID NO: 34512 - protein, 6 aa, synthetic construct
PTETPF

SEQ ID NO: 34513 - protein, 6 aa, synthetic construct
PTETPW

SEQ ID NO: 34514 - protein, 6 aa, synthetic construct
PTETPY

SEQ ID NO: 34515 - protein, 6 aa, synthetic construct
PTETSD

SEQ ID NO: 34516 - protein, 6 aa, synthetic construct
PTETSE

SEQ ID NO: 34517 - protein, 6 aa, synthetic construct
PTETSF

SEQ ID NO: 34518 - protein, 6 aa, synthetic construct
PTETSW

SEQ ID NO: 34519 - protein, 6 aa, synthetic construct
PTETSY

SEQ ID NO: 34520 - protein, 6 aa, synthetic construct
PTETTD

SEQ ID NO: 34521 - protein, 6 aa, synthetic construct
PTETTE

SEQ ID NO: 34522 - protein, 6 aa, synthetic construct
PTETTF

SEQ ID NO: 34523 - protein, 6 aa, synthetic construct
PTETTW

SEQ ID NO: 34524 - protein, 6 aa, synthetic construct
PTETTY

SEQ ID NO: 34525 - protein, 6 aa, synthetic construct
PTETWD

SEQ ID NO: 34526 - protein, 6 aa, synthetic construct
PTETWE

SEQ ID NO: 34527 - protein, 6 aa, synthetic construct
PTETWF

SEQ ID NO: 34528 - protein, 6 aa, synthetic construct
PTETWW

SEQ ID NO: 34529 - protein, 6 aa, synthetic construct
PTETWY

SEQ ID NO: 34530 - protein, 6 aa, synthetic construct
PTETYD

SEQ ID NO: 34531 - protein, 6 aa, synthetic construct
PTETYE

SEQ ID NO: 34532 - protein, 6 aa, synthetic construct
PTETYF

SEQ ID NO: 34533 - protein, 6 aa, synthetic construct
PTETYW

SEQ ID NO: 34534 - protein, 6 aa, synthetic construct
PTETYY

SEQ ID NO: 34535 - protein, 6 aa, synthetic construct
PTETVD

SEQ ID NO: 34536 - protein, 6 aa, synthetic construct
PTETVE

SEQ ID NO: 34537 - protein, 6 aa, synthetic construct
PTETVF

SEQ ID NO: 34538 - protein, 6 aa, synthetic construct
PTETVW

SEQ ID NO: 34539 - protein, 6 aa, synthetic construct
PTETVY

SEQ ID NO: 34540 - protein, 6 aa, synthetic construct
PTEWAD

SEQ ID NO: 34541 - protein, 6 aa, synthetic construct
PTEWAE

SEQ ID NO: 34542 - protein, 6 aa, synthetic construct
PTEWAF

SEQ ID NO: 34543 - protein, 6 aa, synthetic construct
PTEWAW

SEQ ID NO: 34544 - protein, 6 aa, synthetic construct
PTEWAY

SEQ ID NO: 34545 - protein, 6 aa, synthetic construct
PTEWRD

SEQ ID NO: 34546 - protein, 6 aa, synthetic construct
PTEWRE

SEQ ID NO: 34547 - protein, 6 aa, synthetic construct
PTEWRF

SEQ ID NO: 34548 - protein, 6 aa, synthetic construct
PTEWRW

SEQ ID NO: 34549 - protein, 6 aa, synthetic construct
PTEWRY

SEQ ID NO: 34550 - protein, 6 aa, synthetic construct
PTEWND

SEQ ID NO: 34551 - protein, 6 aa, synthetic construct
PTEWNE

SEQ ID NO: 34552 - protein, 6 aa, synthetic construct
PTEWNF

SEQ ID NO: 34553 - protein, 6 aa, synthetic construct
PTEWNW

SEQ ID NO: 34554 - protein, 6 aa, synthetic construct
PTEWNY

SEQ ID NO: 34555 - protein, 6 aa, synthetic construct
PTEWDD

SEQ ID NO: 34556 - protein, 6 aa, synthetic construct
PTEWDE

SEQ ID NO: 34557 - protein, 6 aa, synthetic construct
PTEWDF

SEQ ID NO: 34558 - protein, 6 aa, synthetic construct
PTEWDW

SEQ ID NO: 34559 - protein, 6 aa, synthetic construct
PTEWDY

SEQ ID NO: 34560 - protein, 6 aa, synthetic construct
PTEWCD

SEQ ID NO: 34561 - protein, 6 aa, synthetic construct
PTEWCE

SEQ ID NO: 34562 - protein, 6 aa, synthetic construct
PTEWCF

SEQ ID NO: 34563 - protein, 6 aa, synthetic construct
PTEWCW

SEQ ID NO: 34564 - protein, 6 aa, synthetic construct
PTEWCY

SEQ ID NO: 34565 - protein, 6 aa, synthetic construct
PTEWQD

SEQ ID NO: 34566 - protein, 6 aa, synthetic construct
PTEWQE

SEQ ID NO: 34567 - protein, 6 aa, synthetic construct
PTEWQF

SEQ ID NO: 34568 - protein, 6 aa, synthetic construct
PTEWQW

SEQ ID NO: 34569 - protein, 6 aa, synthetic construct
PTEWQY

SEQ ID NO: 34570 - protein, 6 aa, synthetic construct
PTEWED

SEQ ID NO: 34571 - protein, 6 aa, synthetic construct
PTEWEE

SEQ ID NO: 34572 - protein, 6 aa, synthetic construct
PTEWEF

SEQ ID NO: 34573 - protein, 6 aa, synthetic construct
PTEWEW

SEQ ID NO: 34574 - protein, 6 aa, synthetic construct
PTEWEY

SEQ ID NO: 34575 - protein, 6 aa, synthetic construct
PTEWGD

SEQ ID NO: 34576 - protein, 6 aa, synthetic construct
PTEWGE

SEQ ID NO: 34577 - protein, 6 aa, synthetic construct
PTEWGF

SEQ ID NO: 34578 - protein, 6 aa, synthetic construct
PTEWGW

SEQ ID NO: 34579 - protein, 6 aa, synthetic construct
PTEWGY

SEQ ID NO: 34580 - protein, 6 aa, synthetic construct
PTEWHD

SEQ ID NO: 34581 - protein, 6 aa, synthetic construct
PTEWHE

SEQ ID NO: 34582 - protein, 6 aa, synthetic construct
PTEWHF

SEQ ID NO: 34583 - protein, 6 aa, synthetic construct
PTEWHW

SEQ ID NO: 34584 - protein, 6 aa, synthetic construct
PTEWHY

SEQ ID NO: 34585 - protein, 6 aa, synthetic construct
PTEWID

SEQ ID NO: 34586 - protein, 6 aa, synthetic construct
PTEWIE

SEQ ID NO: 34587 - protein, 6 aa, synthetic construct
PTEWIF

SEQ ID NO: 34588 - protein, 6 aa, synthetic construct
PTEWIW

SEQ ID NO: 34589 - protein, 6 aa, synthetic construct
PTEWIY

SEQ ID NO: 34590 - protein, 6 aa, synthetic construct
PTEWLD

SEQ ID NO: 34591 - protein, 6 aa, synthetic construct
PTEWLE

SEQ ID NO: 34592 - protein, 6 aa, synthetic construct
PTEWLF

SEQ ID NO: 34593 - protein, 6 aa, synthetic construct
PTEWLW

SEQ ID NO: 34594 - protein, 6 aa, synthetic construct
PTEWLY

SEQ ID NO: 34595 - protein, 6 aa, synthetic construct
PTEWKD

SEQ ID NO: 34596 - protein, 6 aa, synthetic construct
PTEWKE

SEQ ID NO: 34597 - protein, 6 aa, synthetic construct
PTEWKF

SEQ ID NO: 34598 - protein, 6 aa, synthetic construct
PTEWKW

SEQ ID NO: 34599 - protein, 6 aa, synthetic construct
PTEWKY

SEQ ID NO: 34600 - protein, 6 aa, synthetic construct
PTEWMD

SEQ ID NO: 34601 - protein, 6 aa, synthetic construct
PTEWME

SEQ ID NO: 34602 - protein, 6 aa, synthetic construct
PTEWMF

SEQ ID NO: 34603 - protein, 6 aa, synthetic construct
PTEWMW

SEQ ID NO: 34604 - protein, 6 aa, synthetic construct
PTEWMY

SEQ ID NO: 34605 - protein, 6 aa, synthetic construct
PTEWFD

SEQ ID NO: 34606 - protein, 6 aa, synthetic construct
PTEWFE

SEQ ID NO: 34607 - protein, 6 aa, synthetic construct
PTEWFF

SEQ ID NO: 34608 - protein, 6 aa, synthetic construct
PTEWFW

SEQ ID NO: 34609 - protein, 6 aa, synthetic construct
PTEWFY

SEQ ID NO: 34610 - protein, 6 aa, synthetic construct
PTEWPD

SEQ ID NO: 34611 - protein, 6 aa, synthetic construct
PTEWPE

SEQ ID NO: 34612 - protein, 6 aa, synthetic construct
PTEWPF

SEQ ID NO: 34613 - protein, 6 aa, synthetic construct
PTEWPW

SEQ ID NO: 34614 - protein, 6 aa, synthetic construct
PTEWPY

SEQ ID NO: 34615 - protein, 6 aa, synthetic construct
PTEWSD

SEQ ID NO: 34616 - protein, 6 aa, synthetic construct
PTEWSE

SEQ ID NO: 34617 - protein, 6 aa, synthetic construct
PTEWSF

SEQ ID NO: 34618 - protein, 6 aa, synthetic construct
PTEWSW

SEQ ID NO: 34619 - protein, 6 aa, synthetic construct
PTEWSY

SEQ ID NO: 34620 - protein, 6 aa, synthetic construct
PTEWTD

SEQ ID NO: 34621 - protein, 6 aa, synthetic construct
PTEWTE

SEQ ID NO: 34622 - protein, 6 aa, synthetic construct
PTEWTF

SEQ ID NO: 34623 - protein, 6 aa, synthetic construct
PTEWTW

SEQ ID NO: 34624 - protein, 6 aa, synthetic construct
PTEWTY

SEQ ID NO: 34625 - protein, 6 aa, synthetic construct
PTEWWD

SEQ ID NO: 34626 - protein, 6 aa, synthetic construct
PTEWWE

SEQ ID NO: 34627 - protein, 6 aa, synthetic construct
PTEWWF

SEQ ID NO: 34628 - protein, 6 aa, synthetic construct
PTEWWW

SEQ ID NO: 34629 - protein, 6 aa, synthetic construct
PTEWWY

SEQ ID NO: 34630 - protein, 6 aa, synthetic construct
PTEWYD

SEQ ID NO: 34631 - protein, 6 aa, synthetic construct
PTEWYE

SEQ ID NO: 34632 - protein, 6 aa, synthetic construct
PTEWYF

SEQ ID NO: 34633 - protein, 6 aa, synthetic construct
PTEWYW

SEQ ID NO: 34634 - protein, 6 aa, synthetic construct
PTEWYY

SEQ ID NO: 34635 - protein, 6 aa, synthetic construct
PTEWVD

SEQ ID NO: 34636 - protein, 6 aa, synthetic construct
PTEWVE

SEQ ID NO: 34637 - protein, 6 aa, synthetic construct
PTEWVF

SEQ ID NO: 34638 - protein, 6 aa, synthetic construct
PTEWVW

SEQ ID NO: 34639 - protein, 6 aa, synthetic construct
PTEWVY

SEQ ID NO: 34640 - protein, 6 aa, synthetic construct
PTEYAD

SEQ ID NO: 34641 - protein, 6 aa, synthetic construct
PTEYAE

SEQ ID NO: 34642 - protein, 6 aa, synthetic construct
PTEYAF

SEQ ID NO: 34643 - protein, 6 aa, synthetic construct
PTEYAW

SEQ ID NO: 34644 - protein, 6 aa, synthetic construct
PTEYAY

SEQ ID NO: 34645 - protein, 6 aa, synthetic construct
PTEYRD

SEQ ID NO: 34646 - protein, 6 aa, synthetic construct
PTEYRE

SEQ ID NO: 34647 - protein, 6 aa, synthetic construct
PTEYRF

SEQ ID NO: 34648 - protein, 6 aa, synthetic construct
PTEYRW

SEQ ID NO: 34649 - protein, 6 aa, synthetic construct
PTEYRY

SEQ ID NO: 34650 - protein, 6 aa, synthetic construct
PTEYND

SEQ ID NO: 34651 - protein, 6 aa, synthetic construct
PTEYNE

SEQ ID NO: 34652 - protein, 6 aa, synthetic construct
PTEYNF

SEQ ID NO: 34653 - protein, 6 aa, synthetic construct
PTEYNW

SEQ ID NO: 34654 - protein, 6 aa, synthetic construct
PTEYNY

SEQ ID NO: 34655 - protein, 6 aa, synthetic construct
PTEYDD

SEQ ID NO: 34656 - protein, 6 aa, synthetic construct
PTEYDE

SEQ ID NO: 34657 - protein, 6 aa, synthetic construct
PTEYDF

SEQ ID NO: 34658 - protein, 6 aa, synthetic construct
PTEYDW

SEQ ID NO: 34659 - protein, 6 aa, synthetic construct
PTEYDY

SEQ ID NO: 34660 - protein, 6 aa, synthetic construct
PTEYCD

SEQ ID NO: 34661 - protein, 6 aa, synthetic construct
PTEYCE

SEQ ID NO: 34662 - protein, 6 aa, synthetic construct
PTEYCF

SEQ ID NO: 34663 - protein, 6 aa, synthetic construct
PTEYCW

SEQ ID NO: 34664 - protein, 6 aa, synthetic construct
PTEYCY

SEQ ID NO: 34665 - protein, 6 aa, synthetic construct
PTEYQD

SEQ ID NO: 34666 - protein, 6 aa, synthetic construct
PTEYQE

SEQ ID NO: 34667 - protein, 6 aa, synthetic construct
PTEYQF

SEQ ID NO: 34668 - protein, 6 aa, synthetic construct
PTEYQW

SEQ ID NO: 34669 - protein, 6 aa, synthetic construct
PTEYQY

SEQ ID NO: 34670 - protein, 6 aa, synthetic construct
PTEYED

SEQ ID NO: 34671 - protein, 6 aa, synthetic construct
PTEYEE

SEQ ID NO: 34672 - protein, 6 aa, synthetic construct
PTEYEF

SEQ ID NO: 34673 - protein, 6 aa, synthetic construct
PTEYEW

SEQ ID NO: 34674 - protein, 6 aa, synthetic construct
PTEYEY

SEQ ID NO: 34675 - protein, 6 aa, synthetic construct
PTEYGD

SEQ ID NO: 34676 - protein, 6 aa, synthetic construct
PTEYGE

SEQ ID NO: 34677 - protein, 6 aa, synthetic construct
PTEYGF

SEQ ID NO: 34678 - protein, 6 aa, synthetic construct
PTEYGW

SEQ ID NO: 34679 - protein, 6 aa, synthetic construct
PTEYGY

SEQ ID NO: 34680 - protein, 6 aa, synthetic construct
PTEYHD

SEQ ID NO: 34681 - protein, 6 aa, synthetic construct
PTEYHE

SEQ ID NO: 34682 - protein, 6 aa, synthetic construct
PTEYHF

SEQ ID NO: 34683 - protein, 6 aa, synthetic construct
PTEYHW

SEQ ID NO: 34684 - protein, 6 aa, synthetic construct
PTEYHY

SEQ ID NO: 34685 - protein, 6 aa, synthetic construct
PTEYID

SEQ ID NO: 34686 - protein, 6 aa, synthetic construct
PTEYIE

SEQ ID NO: 34687 - protein, 6 aa, synthetic construct
PTEYIF

SEQ ID NO: 34688 - protein, 6 aa, synthetic construct
PTEYIW

SEQ ID NO: 34689 - protein, 6 aa, synthetic construct
PTEYIY

SEQ ID NO: 34690 - protein, 6 aa, synthetic construct
PTEYLD

SEQ ID NO: 34691 - protein, 6 aa, synthetic construct
PTEYLE

SEQ ID NO: 34692 - protein, 6 aa, synthetic construct
PTEYLF

SEQ ID NO: 34693 - protein, 6 aa, synthetic construct
PTEYLW

SEQ ID NO: 34694 - protein, 6 aa, synthetic construct
PTEYLY

SEQ ID NO: 34695 - protein, 6 aa, synthetic construct
PTEYKD

SEQ ID NO: 34696 - protein, 6 aa, synthetic construct
PTEYKE

SEQ ID NO: 34697 - protein, 6 aa, synthetic construct
PTEYKF

SEQ ID NO: 34698 - protein, 6 aa, synthetic construct
PTEYKW

SEQ ID NO: 34699 - protein, 6 aa, synthetic construct
PTEYKY

SEQ ID NO: 34700 - protein, 6 aa, synthetic construct
PTEYMD

SEQ ID NO: 34701 - protein, 6 aa, synthetic construct
PTEYME

SEQ ID NO: 34702 - protein, 6 aa, synthetic construct
PTEYMF

SEQ ID NO: 34703 - protein, 6 aa, synthetic construct
PTEYMW

SEQ ID NO: 34704 - protein, 6 aa, synthetic construct
PTEYMY

SEQ ID NO: 34705 - protein, 6 aa, synthetic construct
PTEYFD

SEQ ID NO: 34706 - protein, 6 aa, synthetic construct
PTEYFE

SEQ ID NO: 34707 - protein, 6 aa, synthetic construct
PTEYFF

SEQ ID NO: 34708 - protein, 6 aa, synthetic construct
PTEYFW

SEQ ID NO: 34709 - protein, 6 aa, synthetic construct
PTEYFY

SEQ ID NO: 34710 - protein, 6 aa, synthetic construct
PTEYPD

SEQ ID NO: 34711 - protein, 6 aa, synthetic construct
PTEYPE

SEQ ID NO: 34712 - protein, 6 aa, synthetic construct
PTEYPF

SEQ ID NO: 34713 - protein, 6 aa, synthetic construct
PTEYPW

SEQ ID NO: 34714 - protein, 6 aa, synthetic construct
PTEYPY

SEQ ID NO: 34715 - protein, 6 aa, synthetic construct
PTEYSD

SEQ ID NO: 34716 - protein, 6 aa, synthetic construct
PTEYSE

SEQ ID NO: 34717 - protein, 6 aa, synthetic construct
PTEYSF

SEQ ID NO: 34718 - protein, 6 aa, synthetic construct
PTEYSW

SEQ ID NO: 34719 - protein, 6 aa, synthetic construct
PTEYSY

SEQ ID NO: 34720 - protein, 6 aa, synthetic construct
PTEYTD

SEQ ID NO: 34721 - protein, 6 aa, synthetic construct
PTEYTE

SEQ ID NO: 34722 - protein, 6 aa, synthetic construct
PTEYTF

SEQ ID NO: 34723 - protein, 6 aa, synthetic construct
PTEYTW

SEQ ID NO: 34724 - protein, 6 aa, synthetic construct
PTEYTY

SEQ ID NO: 34725 - protein, 6 aa, synthetic construct
PTEYWD

SEQ ID NO: 34726 - protein, 6 aa, synthetic construct
PTEYWE

SEQ ID NO: 34727 - protein, 6 aa, synthetic construct
PTEYWF

SEQ ID NO: 34728 - protein, 6 aa, synthetic construct
PTEYWW

SEQ ID NO: 34729 - protein, 6 aa, synthetic construct
PTEYWY

SEQ ID NO: 34730 - protein, 6 aa, synthetic construct
PTEYYD

SEQ ID NO: 34731 - protein, 6 aa, synthetic construct
PTEYYE

SEQ ID NO: 34732 - protein, 6 aa, synthetic construct
PTEYYF

SEQ ID NO: 34733 - protein, 6 aa, synthetic construct
PTEYYW

SEQ ID NO: 34734 - protein, 6 aa, synthetic construct
PTEYYY

SEQ ID NO: 34735 - protein, 6 aa, synthetic construct
PTEYVD

SEQ ID NO: 34736 - protein, 6 aa, synthetic construct
PTEYVE

SEQ ID NO: 34737 - protein, 6 aa, synthetic construct
PTEYVF

SEQ ID NO: 34738 - protein, 6 aa, synthetic construct
PTEYVW

SEQ ID NO: 34739 - protein, 6 aa, synthetic construct
PTEYVY

SEQ ID NO: 34740 - protein, 6 aa, synthetic construct
PTEVAD

SEQ ID NO: 34741 - protein, 6 aa, synthetic construct
PTEVAE

SEQ ID NO: 34742 - protein, 6 aa, synthetic construct
PTEVAF

SEQ ID NO: 34743 - protein, 6 aa, synthetic construct
PTEVAW

SEQ ID NO: 34744 - protein, 6 aa, synthetic construct
PTEVAY

SEQ ID NO: 34745 - protein, 6 aa, synthetic construct
PTEVRD

SEQ ID NO: 34746 - protein, 6 aa, synthetic construct
PTEVRE

SEQ ID NO: 34747 - protein, 6 aa, synthetic construct
PTEVRF

SEQ ID NO: 34748 - protein, 6 aa, synthetic construct
PTEVRW

SEQ ID NO: 34749 - protein, 6 aa, synthetic construct
PTEVRY

SEQ ID NO: 34750 - protein, 6 aa, synthetic construct
PTEVND

SEQ ID NO: 34751 - protein, 6 aa, synthetic construct
PTEVNE

SEQ ID NO: 34752 - protein, 6 aa, synthetic construct
PTEVNF

SEQ ID NO: 34753 - protein, 6 aa, synthetic construct
PTEVNW

SEQ ID NO: 34754 - protein, 6 aa, synthetic construct
PTEVNY

SEQ ID NO: 34755 - protein, 6 aa, synthetic construct
PTEVDD

SEQ ID NO: 34756 - protein, 6 aa, synthetic construct
PTEVDE

SEQ ID NO: 34757 - protein, 6 aa, synthetic construct
PTEVDF

SEQ ID NO: 34758 - protein, 6 aa, synthetic construct
PTEVDW

SEQ ID NO: 34759 - protein, 6 aa, synthetic construct
PTEVDY

SEQ ID NO: 34760 - protein, 6 aa, synthetic construct
PTEVCD

SEQ ID NO: 34761 - protein, 6 aa, synthetic construct
PTEVCE

SEQ ID NO: 34762 - protein, 6 aa, synthetic construct
PTEVCF

SEQ ID NO: 34763 - protein, 6 aa, synthetic construct
PTEVCW

SEQ ID NO: 34764 - protein, 6 aa, synthetic construct
PTEVCY

SEQ ID NO: 34765 - protein, 6 aa, synthetic construct
PTEVQD

SEQ ID NO: 34766 - protein, 6 aa, synthetic construct
PTEVQE

SEQ ID NO: 34767 - protein, 6 aa, synthetic construct
PTEVQF

SEQ ID NO: 34768 - protein, 6 aa, synthetic construct
PTEVQW

SEQ ID NO: 34769 - protein, 6 aa, synthetic construct
PTEVQY

SEQ ID NO: 34770 - protein, 6 aa, synthetic construct
PTEVED

SEQ ID NO: 34771 - protein, 6 aa, synthetic construct
PTEVEE

SEQ ID NO: 34772 - protein, 6 aa, synthetic construct
PTEVEF

SEQ ID NO: 34773 - protein, 6 aa, synthetic construct
PTEVEW

SEQ ID NO: 34774 - protein, 6 aa, synthetic construct
PTEVEY

SEQ ID NO: 34775 - protein, 6 aa, synthetic construct
PTEVGD

SEQ ID NO: 34776 - protein, 6 aa, synthetic construct
PTEVGE

SEQ ID NO: 34777 - protein, 6 aa, synthetic construct
PTEVGF

SEQ ID NO: 34778 - protein, 6 aa, synthetic construct
PTEVGW

SEQ ID NO: 34779 - protein, 6 aa, synthetic construct
PTEVGY

SEQ ID NO: 34780 - protein, 6 aa, synthetic construct
PTEVHD

SEQ ID NO: 34781 - protein, 6 aa, synthetic construct
PTEVHE

SEQ ID NO: 34782 - protein, 6 aa, synthetic construct
PTEVHF

SEQ ID NO: 34783 - protein, 6 aa, synthetic construct
PTEVHW

SEQ ID NO: 34784 - protein, 6 aa, synthetic construct
PTEVHY

SEQ ID NO: 34785 - protein, 6 aa, synthetic construct
PTEVID

SEQ ID NO: 34786 - protein, 6 aa, synthetic construct
PTEVIE

SEQ ID NO: 34787 - protein, 6 aa, synthetic construct
PTEVIF

SEQ ID NO: 34788 - protein, 6 aa, synthetic construct
PTEVIW

SEQ ID NO: 34789 - protein, 6 aa, synthetic construct
PTEVIY

SEQ ID NO: 34790 - protein, 6 aa, synthetic construct
PTEVLD

SEQ ID NO: 34791 - protein, 6 aa, synthetic construct
PTEVLE

SEQ ID NO: 34792 - protein, 6 aa, synthetic construct
PTEVLF

SEQ ID NO: 34793 - protein, 6 aa, synthetic construct
PTEVLW

SEQ ID NO: 34794 - protein, 6 aa, synthetic construct
PTEVLY

SEQ ID NO: 34795 - protein, 6 aa, synthetic construct
PTEVKD

SEQ ID NO: 34796 - protein, 6 aa, synthetic construct
PTEVKE

SEQ ID NO: 34797 - protein, 6 aa, synthetic construct
PTEVKF

SEQ ID NO: 34798 - protein, 6 aa, synthetic construct
PTEVKW

SEQ ID NO: 34799 - protein, 6 aa, synthetic construct
PTEVKY

SEQ ID NO: 34800 - protein, 6 aa, synthetic construct
PTEVMD

SEQ ID NO: 34801 - protein, 6 aa, synthetic construct
PTEVME

SEQ ID NO: 34802 - protein, 6 aa, synthetic construct
PTEVMF

SEQ ID NO: 34803 - protein, 6 aa, synthetic construct
PTEVMW

SEQ ID NO: 34804 - protein, 6 aa, synthetic construct
PTEVMY

SEQ ID NO: 34805 - protein, 6 aa, synthetic construct
PTEVFD

SEQ ID NO: 34806 - protein, 6 aa, synthetic construct
PTEVFE

SEQ ID NO: 34807 - protein, 6 aa, synthetic construct
PTEVFF

SEQ ID NO: 34808 - protein, 6 aa, synthetic construct
PTEVFW

SEQ ID NO: 34809 - protein, 6 aa, synthetic construct
PTEVFY

SEQ ID NO: 34810 - protein, 6 aa, synthetic construct
PTEVPD

SEQ ID NO: 34811 - protein, 6 aa, synthetic construct
PTEVPE

SEQ ID NO: 34812 - protein, 6 aa, synthetic construct
PTEVPF

SEQ ID NO: 34813 - protein, 6 aa, synthetic construct
PTEVPW

SEQ ID NO: 34814 - protein, 6 aa, synthetic construct
PTEVPY

SEQ ID NO: 34815 - protein, 6 aa, synthetic construct
PTEVSD

SEQ ID NO: 34816 - protein, 6 aa, synthetic construct
PTEVSE

SEQ ID NO: 34817 - protein, 6 aa, synthetic construct
PTEVSF

SEQ ID NO: 34818 - protein, 6 aa, synthetic construct
PTEVSW

SEQ ID NO: 34819 - protein, 6 aa, synthetic construct
PTEVSY

SEQ ID NO: 34820 - protein, 6 aa, synthetic construct
PTEVTD

SEQ ID NO: 34821 - protein, 6 aa, synthetic construct
PTEVTE

SEQ ID NO: 34822 - protein, 6 aa, synthetic construct
PTEVTF

SEQ ID NO: 34823 - protein, 6 aa, synthetic construct
PTEVTW

SEQ ID NO: 34824 - protein, 6 aa, synthetic construct
PTEVTY

SEQ ID NO: 34825 - protein, 6 aa, synthetic construct
PTEVWD

SEQ ID NO: 34826 - protein, 6 aa, synthetic construct
PTEVWE

SEQ ID NO: 34827 - protein, 6 aa, synthetic construct
PTEVWF

SEQ ID NO: 34828 - protein, 6 aa, synthetic construct
PTEVWW

SEQ ID NO: 34829 - protein, 6 aa, synthetic construct
PTEVWY

SEQ ID NO: 34830 - protein, 6 aa, synthetic construct
PTEVYD

SEQ ID NO: 34831 - protein, 6 aa, synthetic construct
PTEVYE

SEQ ID NO: 34832 - protein, 6 aa, synthetic construct
PTEVYF

SEQ ID NO: 34833 - protein, 6 aa, synthetic construct
PTEVYW

SEQ ID NO: 34834 - protein, 6 aa, synthetic construct
PTEVYY

SEQ ID NO: 34835 - protein, 6 aa, synthetic construct
PTEVVD

SEQ ID NO: 34836 - protein, 6 aa, synthetic construct
PTEVVE

SEQ ID NO: 34837 - protein, 6 aa, synthetic construct
PTEVVF

SEQ ID NO: 34838 - protein, 6 aa, synthetic construct
PTEVVW

SEQ ID NO: 34839 - protein, 6 aa, synthetic construct
PTEVVY

SEQ ID NO: 34840 - protein, 6 aa, synthetic construct
PWEAAD

SEQ ID NO: 34841 - protein, 6 aa, synthetic construct
PWEAAE

SEQ ID NO: 34842 - protein, 6 aa, synthetic construct
PWEAAF

SEQ ID NO: 34843 - protein, 6 aa, synthetic construct
PWEAAW

SEQ ID NO: 34844 - protein, 6 aa, synthetic construct
PWEAAY

SEQ ID NO: 34845 - protein, 6 aa, synthetic construct
PWEARD

SEQ ID NO: 34846 - protein, 6 aa, synthetic construct
PWEARE

SEQ ID NO: 34847 - protein, 6 aa, synthetic construct
PWEARF

SEQ ID NO: 34848 - protein, 6 aa, synthetic construct
PWEARW

SEQ ID NO: 34849 - protein, 6 aa, synthetic construct
PWEARY

SEQ ID NO: 34850 - protein, 6 aa, synthetic construct
PWEAND

SEQ ID NO: 34851 - protein, 6 aa, synthetic construct
PWEANE

SEQ ID NO: 34852 - protein, 6 aa, synthetic construct
PWEANF

SEQ ID NO: 34853 - protein, 6 aa, synthetic construct
PWEANW

SEQ ID NO: 34854 - protein, 6 aa, synthetic construct
PWEANY

SEQ ID NO: 34855 - protein, 6 aa, synthetic construct
PWEADD

SEQ ID NO: 34856 - protein, 6 aa, synthetic construct
PWEADE

SEQ ID NO: 34857 - protein, 6 aa, synthetic construct
PWEADF

SEQ ID NO: 34858 - protein, 6 aa, synthetic construct
PWEADW

SEQ ID NO: 34859 - protein, 6 aa, synthetic construct
PWEADY

SEQ ID NO: 34860 - protein, 6 aa, synthetic construct
PWEACD

SEQ ID NO: 34861 - protein, 6 aa, synthetic construct
PWEACE

SEQ ID NO: 34862 - protein, 6 aa, synthetic construct
PWEACF

SEQ ID NO: 34863 - protein, 6 aa, synthetic construct
PWEACW

SEQ ID NO: 34864 - protein, 6 aa, synthetic construct
PWEACY

SEQ ID NO: 34865 - protein, 6 aa, synthetic construct
PWEAQD

SEQ ID NO: 34866 - protein, 6 aa, synthetic construct
PWEAQE

SEQ ID NO: 34867 - protein, 6 aa, synthetic construct
PWEAQF

SEQ ID NO: 34868 - protein, 6 aa, synthetic construct
PWEAQW

SEQ ID NO: 34869 - protein, 6 aa, synthetic construct
PWEAQY

SEQ ID NO: 34870 - protein, 6 aa, synthetic construct
PWEAED

SEQ ID NO: 34871 - protein, 6 aa, synthetic construct
PWEAEE

SEQ ID NO: 34872 - protein, 6 aa, synthetic construct
PWEAEF

SEQ ID NO: 34873 - protein, 6 aa, synthetic construct
PWEAEW

SEQ ID NO: 34874 - protein, 6 aa, synthetic construct
PWEAEY

SEQ ID NO: 34875 - protein, 6 aa, synthetic construct
PWEAGD

SEQ ID NO: 34876 - protein, 6 aa, synthetic construct
PWEAGE

SEQ ID NO: 34877 - protein, 6 aa, synthetic construct
PWEAGF

SEQ ID NO: 34878 - protein, 6 aa, synthetic construct
PWEAGW

SEQ ID NO: 34879 - protein, 6 aa, synthetic construct
PWEAGY

SEQ ID NO: 34880 - protein, 6 aa, synthetic construct
PWEAHD

SEQ ID NO: 34881 - protein, 6 aa, synthetic construct
PWEAHE

SEQ ID NO: 34882 - protein, 6 aa, synthetic construct
PWEAHF

SEQ ID NO: 34883 - protein, 6 aa, synthetic construct
PWEAHW

SEQ ID NO: 34884 - protein, 6 aa, synthetic construct
PWEAHY

SEQ ID NO: 34885 - protein, 6 aa, synthetic construct
PWEAID

SEQ ID NO: 34886 - protein, 6 aa, synthetic construct
PWEAIE

SEQ ID NO: 34887 - protein, 6 aa, synthetic construct
PWEAIF

SEQ ID NO: 34888 - protein, 6 aa, synthetic construct
PWEAIW

SEQ ID NO: 34889 - protein, 6 aa, synthetic construct
PWEAIY

SEQ ID NO: 34890 - protein, 6 aa, synthetic construct
PWEALD

SEQ ID NO: 34891 - protein, 6 aa, synthetic construct
PWEALE

SEQ ID NO: 34892 - protein, 6 aa, synthetic construct
PWEALF

SEQ ID NO: 34893 - protein, 6 aa, synthetic construct
PWEALW

SEQ ID NO: 34894 - protein, 6 aa, synthetic construct
PWEALY

SEQ ID NO: 34895 - protein, 6 aa, synthetic construct
PWEAKD

SEQ ID NO: 34896 - protein, 6 aa, synthetic construct
PWEAKE

SEQ ID NO: 34897 - protein, 6 aa, synthetic construct
PWEAKF

SEQ ID NO: 34898 - protein, 6 aa, synthetic construct
PWEAKW

SEQ ID NO: 34899 - protein, 6 aa, synthetic construct
PWEAKY

SEQ ID NO: 34900 - protein, 6 aa, synthetic construct
PWEAMD

SEQ ID NO: 34901 - protein, 6 aa, synthetic construct
PWEAME

SEQ ID NO: 34902 - protein, 6 aa, synthetic construct
PWEAMF

SEQ ID NO: 34903 - protein, 6 aa, synthetic construct
PWEAMW

SEQ ID NO: 34904 - protein, 6 aa, synthetic construct
PWEAMY

SEQ ID NO: 34905 - protein, 6 aa, synthetic construct
PWEAFD

SEQ ID NO: 34906 - protein, 6 aa, synthetic construct
PWEAFE

SEQ ID NO: 34907 - protein, 6 aa, synthetic construct
PWEAFF

SEQ ID NO: 34908 - protein, 6 aa, synthetic construct
PWEAFW

SEQ ID NO: 34909 - protein, 6 aa, synthetic construct
PWEAFY

SEQ ID NO: 34910 - protein, 6 aa, synthetic construct
PWEAPD

SEQ ID NO: 34911 - protein, 6 aa, synthetic construct
PWEAPE

SEQ ID NO: 34912 - protein, 6 aa, synthetic construct
PWEAPF

SEQ ID NO: 34913 - protein, 6 aa, synthetic construct
PWEAPW

SEQ ID NO: 34914 - protein, 6 aa, synthetic construct
PWEAPY

SEQ ID NO: 34915 - protein, 6 aa, synthetic construct
PWEASD

SEQ ID NO: 34916 - protein, 6 aa, synthetic construct
PWEASE

SEQ ID NO: 34917 - protein, 6 aa, synthetic construct
PWEASF

SEQ ID NO: 34918 - protein, 6 aa, synthetic construct
PWEASW

SEQ ID NO: 34919 - protein, 6 aa, synthetic construct
PWEASY

SEQ ID NO: 34920 - protein, 6 aa, synthetic construct
PWEATD

SEQ ID NO: 34921 - protein, 6 aa, synthetic construct
PWEATE

SEQ ID NO: 34922 - protein, 6 aa, synthetic construct
PWEATF

SEQ ID NO: 34923 - protein, 6 aa, synthetic construct
PWEATW

SEQ ID NO: 34924 - protein, 6 aa, synthetic construct
PWEATY

SEQ ID NO: 34925 - protein, 6 aa, synthetic construct
PWEAWD

SEQ ID NO: 34926 - protein, 6 aa, synthetic construct
PWEAWE

SEQ ID NO: 34927 - protein, 6 aa, synthetic construct
PWEAWF

SEQ ID NO: 34928 - protein, 6 aa, synthetic construct
PWEAWW

SEQ ID NO: 34929 - protein, 6 aa, synthetic construct
PWEAWY

SEQ ID NO: 34930 - protein, 6 aa, synthetic construct
PWEAYD

SEQ ID NO: 34931 - protein, 6 aa, synthetic construct
PWEAYE

SEQ ID NO: 34932 - protein, 6 aa, synthetic construct
PWEAYF

SEQ ID NO: 34933 - protein, 6 aa, synthetic construct
PWEAYW

SEQ ID NO: 34934 - protein, 6 aa, synthetic construct
PWEAYY

SEQ ID NO: 34935 - protein, 6 aa, synthetic construct
PWEAVD

SEQ ID NO: 34936 - protein, 6 aa, synthetic construct
PWEAVE

SEQ ID NO: 34937 - protein, 6 aa, synthetic construct
PWEAVF

SEQ ID NO: 34938 - protein, 6 aa, synthetic construct
PWEAVW

SEQ ID NO: 34939 - protein, 6 aa, synthetic construct
PWEAVY

SEQ ID NO: 34940 - protein, 6 aa, synthetic construct
PWERAD

SEQ ID NO: 34941 - protein, 6 aa, synthetic construct
PWERAE

SEQ ID NO: 34942 - protein, 6 aa, synthetic construct
PWERAF

SEQ ID NO: 34943 - protein, 6 aa, synthetic construct
PWERAW

SEQ ID NO: 34944 - protein, 6 aa, synthetic construct
PWERAY

SEQ ID NO: 34945 - protein, 6 aa, synthetic construct
PWERRD

SEQ ID NO: 34946 - protein, 6 aa, synthetic construct
PWERRE

SEQ ID NO: 34947 - protein, 6 aa, synthetic construct
PWERRF

SEQ ID NO: 34948 - protein, 6 aa, synthetic construct
PWERRW

SEQ ID NO: 34949 - protein, 6 aa, synthetic construct
PWERRY

SEQ ID NO: 34950 - protein, 6 aa, synthetic construct
PWERND

SEQ ID NO: 34951 - protein, 6 aa, synthetic construct
PWERNE

SEQ ID NO: 34952 - protein, 6 aa, synthetic construct
PWERNF

SEQ ID NO: 34953 - protein, 6 aa, synthetic construct
PWERNW

SEQ ID NO: 34954 - protein, 6 aa, synthetic construct
PWERNY

SEQ ID NO: 34955 - protein, 6 aa, synthetic construct
PWERDD

SEQ ID NO: 34956 - protein, 6 aa, synthetic construct
PWERDE

SEQ ID NO: 34957 - protein, 6 aa, synthetic construct
PWERDF

SEQ ID NO: 34958 - protein, 6 aa, synthetic construct
PWERDW

SEQ ID NO: 34959 - protein, 6 aa, synthetic construct
PWERDY

SEQ ID NO: 34960 - protein, 6 aa, synthetic construct
PWERCD

SEQ ID NO: 34961 - protein, 6 aa, synthetic construct
PWERCE

SEQ ID NO: 34962 - protein, 6 aa, synthetic construct
PWERCF

SEQ ID NO: 34963 - protein, 6 aa, synthetic construct
PWERCW

SEQ ID NO: 34964 - protein, 6 aa, synthetic construct
PWERCY

SEQ ID NO: 34965 - protein, 6 aa, synthetic construct
PWERQD

SEQ ID NO: 34966 - protein, 6 aa, synthetic construct
PWERQE

SEQ ID NO: 34967 - protein, 6 aa, synthetic construct
PWERQF

SEQ ID NO: 34968 - protein, 6 aa, synthetic construct
PWERQW

SEQ ID NO: 34969 - protein, 6 aa, synthetic construct
PWERQY

SEQ ID NO: 34970 - protein, 6 aa, synthetic construct
PWERED

SEQ ID NO: 34971 - protein, 6 aa, synthetic construct
PWEREE

SEQ ID NO: 34972 - protein, 6 aa, synthetic construct
PWEREF

SEQ ID NO: 34973 - protein, 6 aa, synthetic construct
PWEREW

SEQ ID NO: 34974 - protein, 6 aa, synthetic construct
PWEREY

SEQ ID NO: 34975 - protein, 6 aa, synthetic construct
PWERGD

SEQ ID NO: 34976 - protein, 6 aa, synthetic construct
PWERGE

SEQ ID NO: 34977 - protein, 6 aa, synthetic construct
PWERGF

SEQ ID NO: 34978 - protein, 6 aa, synthetic construct
PWERGW

SEQ ID NO: 34979 - protein, 6 aa, synthetic construct
PWERGY

SEQ ID NO: 34980 - protein, 6 aa, synthetic construct
PWERHD

SEQ ID NO: 34981 - protein, 6 aa, synthetic construct
PWERHE

SEQ ID NO: 34982 - protein, 6 aa, synthetic construct
PWERHF

SEQ ID NO: 34983 - protein, 6 aa, synthetic construct
PWERHW

SEQ ID NO: 34984 - protein, 6 aa, synthetic construct
PWERHY

SEQ ID NO: 34985 - protein, 6 aa, synthetic construct
PWERID

SEQ ID NO: 34986 - protein, 6 aa, synthetic construct
PWERIE

SEQ ID NO: 34987 - protein, 6 aa, synthetic construct
PWERIF

SEQ ID NO: 34988 - protein, 6 aa, synthetic construct
PWERIW

SEQ ID NO: 34989 - protein, 6 aa, synthetic construct
PWERIY

SEQ ID NO: 34990 - protein, 6 aa, synthetic construct
PWERLD

SEQ ID NO: 34991 - protein, 6 aa, synthetic construct
PWERLE

SEQ ID NO: 34992 - protein, 6 aa, synthetic construct
PWERLF

SEQ ID NO: 34993 - protein, 6 aa, synthetic construct
PWERLW

SEQ ID NO: 34994 - protein, 6 aa, synthetic construct
PWERLY

SEQ ID NO: 34995 - protein, 6 aa, synthetic construct
PWERKD

SEQ ID NO: 34996 - protein, 6 aa, synthetic construct
PWERKE

SEQ ID NO: 34997 - protein, 6 aa, synthetic construct
PWERKF

SEQ ID NO: 34998 - protein, 6 aa, synthetic construct
PWERKW

SEQ ID NO: 34999 - protein, 6 aa, synthetic construct
PWERKY

SEQ ID NO: 35000 - protein, 6 aa, synthetic construct
PWERMD

SEQ ID NO: 35001 - protein, 6 aa, synthetic construct
PWERME

SEQ ID NO: 35002 - protein, 6 aa, synthetic construct
PWERMF

SEQ ID NO: 35003 - protein, 6 aa, synthetic construct
PWERMW

SEQ ID NO: 35004 - protein, 6 aa, synthetic construct
PWERMY

SEQ ID NO: 35005 - protein, 6 aa, synthetic construct
PWERFD

SEQ ID NO: 35006 - protein, 6 aa, synthetic construct
PWERFE

SEQ ID NO: 35007 - protein, 6 aa, synthetic construct
PWERFF

SEQ ID NO: 35008 - protein, 6 aa, synthetic construct
PWERFW

SEQ ID NO: 35009 - protein, 6 aa, synthetic construct
PWERFY

SEQ ID NO: 35010 - protein, 6 aa, synthetic construct
PWERPD

SEQ ID NO: 35011 - protein, 6 aa, synthetic construct
PWERPE

SEQ ID NO: 35012 - protein, 6 aa, synthetic construct
PWERPF

SEQ ID NO: 35013 - protein, 6 aa, synthetic construct
PWERPW

SEQ ID NO: 35014 - protein, 6 aa, synthetic construct
PWERPY

SEQ ID NO: 35015 - protein, 6 aa, synthetic construct
PWERSD

SEQ ID NO: 35016 - protein, 6 aa, synthetic construct
PWERSE

SEQ ID NO: 35017 - protein, 6 aa, synthetic construct
PWERSF

SEQ ID NO: 35018 - protein, 6 aa, synthetic construct
PWERSW

SEQ ID NO: 35019 - protein, 6 aa, synthetic construct
PWERSY

SEQ ID NO: 35020 - protein, 6 aa, synthetic construct
PWERTD

SEQ ID NO: 35021 - protein, 6 aa, synthetic construct
PWERTE

SEQ ID NO: 35022 - protein, 6 aa, synthetic construct
PWERTF

SEQ ID NO: 35023 - protein, 6 aa, synthetic construct
PWERTW

SEQ ID NO: 35024 - protein, 6 aa, synthetic construct
PWERTY

SEQ ID NO: 35025 - protein, 6 aa, synthetic construct
PWERWD

SEQ ID NO: 35026 - protein, 6 aa, synthetic construct
PWERWE

SEQ ID NO: 35027 - protein, 6 aa, synthetic construct
PWERWF

SEQ ID NO: 35028 - protein, 6 aa, synthetic construct
PWERWW

SEQ ID NO: 35029 - protein, 6 aa, synthetic construct
PWERWY

SEQ ID NO: 35030 - protein, 6 aa, synthetic construct
PWERYD

SEQ ID NO: 35031 - protein, 6 aa, synthetic construct
PWERYE

SEQ ID NO: 35032 - protein, 6 aa, synthetic construct
PWERYF

SEQ ID NO: 35033 - protein, 6 aa, synthetic construct
PWERYW

SEQ ID NO: 35034 - protein, 6 aa, synthetic construct
PWERYY

SEQ ID NO: 35035 - protein, 6 aa, synthetic construct
PWERVD

SEQ ID NO: 35036 - protein, 6 aa, synthetic construct
PWERVE

SEQ ID NO: 35037 - protein, 6 aa, synthetic construct
PWERVF

SEQ ID NO: 35038 - protein, 6 aa, synthetic construct
PWERVW

SEQ ID NO: 35039 - protein, 6 aa, synthetic construct
PWERVY

SEQ ID NO: 35040 - protein, 6 aa, synthetic construct
PWENAD

SEQ ID NO: 35041 - protein, 6 aa, synthetic construct
PWENAE

SEQ ID NO: 35042 - protein, 6 aa, synthetic construct
PWENAF

SEQ ID NO: 35043 - protein, 6 aa, synthetic construct
PWENAW

SEQ ID NO: 35044 - protein, 6 aa, synthetic construct
PWENAY

SEQ ID NO: 35045 - protein, 6 aa, synthetic construct
PWENRD

SEQ ID NO: 35046 - protein, 6 aa, synthetic construct
PWENRE

SEQ ID NO: 35047 - protein, 6 aa, synthetic construct
PWENRF

SEQ ID NO: 35048 - protein, 6 aa, synthetic construct
PWENRW

SEQ ID NO: 35049 - protein, 6 aa, synthetic construct
PWENRY

SEQ ID NO: 35050 - protein, 6 aa, synthetic construct
PWENND

SEQ ID NO: 35051 - protein, 6 aa, synthetic construct
PWENNE

SEQ ID NO: 35052 - protein, 6 aa, synthetic construct
PWENNF

SEQ ID NO: 35053 - protein, 6 aa, synthetic construct
PWENNW

SEQ ID NO: 35054 - protein, 6 aa, synthetic construct
PWENNY

SEQ ID NO: 35055 - protein, 6 aa, synthetic construct
PWENDD

SEQ ID NO: 35056 - protein, 6 aa, synthetic construct
PWENDE

SEQ ID NO: 35057 - protein, 6 aa, synthetic construct
PWENDF

SEQ ID NO: 35058 - protein, 6 aa, synthetic construct
PWENDW

SEQ ID NO: 35059 - protein, 6 aa, synthetic construct
PWENDY

SEQ ID NO: 35060 - protein, 6 aa, synthetic construct
PWENCD

SEQ ID NO: 35061 - protein, 6 aa, synthetic construct
PWENCE

SEQ ID NO: 35062 - protein, 6 aa, synthetic construct
PWENCF

SEQ ID NO: 35063 - protein, 6 aa, synthetic construct
PWENCW

SEQ ID NO: 35064 - protein, 6 aa, synthetic construct
PWENCY

SEQ ID NO: 35065 - protein, 6 aa, synthetic construct
PWENQD

SEQ ID NO: 35066 - protein, 6 aa, synthetic construct
PWENQE

SEQ ID NO: 35067 - protein, 6 aa, synthetic construct
PWENQF

SEQ ID NO: 35068 - protein, 6 aa, synthetic construct
PWENQW

SEQ ID NO: 35069 - protein, 6 aa, synthetic construct
PWENQY

SEQ ID NO: 35070 - protein, 6 aa, synthetic construct
PWENED

SEQ ID NO: 35071 - protein, 6 aa, synthetic construct
PWENEE

SEQ ID NO: 35072 - protein, 6 aa, synthetic construct
PWENEF

SEQ ID NO: 35073 - protein, 6 aa, synthetic construct
PWENEW

SEQ ID NO: 35074 - protein, 6 aa, synthetic construct
PWENEY

SEQ ID NO: 35075 - protein, 6 aa, synthetic construct
PWENGD

SEQ ID NO: 35076 - protein, 6 aa, synthetic construct
PWENGE

SEQ ID NO: 35077 - protein, 6 aa, synthetic construct
PWENGF

SEQ ID NO: 35078 - protein, 6 aa, synthetic construct
PWENGW

SEQ ID NO: 35079 - protein, 6 aa, synthetic construct
PWENGY

SEQ ID NO: 35080 - protein, 6 aa, synthetic construct
PWENHD

SEQ ID NO: 35081 - protein, 6 aa, synthetic construct
PWENHE

SEQ ID NO: 35082 - protein, 6 aa, synthetic construct
PWENHF

SEQ ID NO: 35083 - protein, 6 aa, synthetic construct
PWENHW

SEQ ID NO: 35084 - protein, 6 aa, synthetic construct
PWENHY

SEQ ID NO: 35085 - protein, 6 aa, synthetic construct
PWENID

SEQ ID NO: 35086 - protein, 6 aa, synthetic construct
PWENIE

SEQ ID NO: 35087 - protein, 6 aa, synthetic construct
PWENIF

SEQ ID NO: 35088 - protein, 6 aa, synthetic construct
PWENIW

SEQ ID NO: 35089 - protein, 6 aa, synthetic construct
PWENIY

SEQ ID NO: 35090 - protein, 6 aa, synthetic construct
PWENLD

SEQ ID NO: 35091 - protein, 6 aa, synthetic construct
PWENLE

SEQ ID NO: 35092 - protein, 6 aa, synthetic construct
PWENLF

SEQ ID NO: 35093 - protein, 6 aa, synthetic construct
PWENLW

SEQ ID NO: 35094 - protein, 6 aa, synthetic construct
PWENLY

SEQ ID NO: 35095 - protein, 6 aa, synthetic construct
PWENKD

SEQ ID NO: 35096 - protein, 6 aa, synthetic construct
PWENKE

SEQ ID NO: 35097 - protein, 6 aa, synthetic construct
PWENKF

SEQ ID NO: 35098 - protein, 6 aa, synthetic construct
PWENKW

SEQ ID NO: 35099 - protein, 6 aa, synthetic construct
PWENKY

SEQ ID NO: 35100 - protein, 6 aa, synthetic construct
PWENMD

SEQ ID NO: 35101 - protein, 6 aa, synthetic construct
PWENME

SEQ ID NO: 35102 - protein, 6 aa, synthetic construct
PWENMF

SEQ ID NO: 35103 - protein, 6 aa, synthetic construct
PWENMW

SEQ ID NO: 35104 - protein, 6 aa, synthetic construct
PWENMY

SEQ ID NO: 35105 - protein, 6 aa, synthetic construct
PWENFD

SEQ ID NO: 35106 - protein, 6 aa, synthetic construct
PWENFE

SEQ ID NO: 35107 - protein, 6 aa, synthetic construct
PWENFF

SEQ ID NO: 35108 - protein, 6 aa, synthetic construct
PWENFW

SEQ ID NO: 35109 - protein, 6 aa, synthetic construct
PWENFY

SEQ ID NO: 35110 - protein, 6 aa, synthetic construct
PWENPD

SEQ ID NO: 35111 - protein, 6 aa, synthetic construct
PWENPE

SEQ ID NO: 35112 - protein, 6 aa, synthetic construct
PWENPF

SEQ ID NO: 35113 - protein, 6 aa, synthetic construct
PWENPW

SEQ ID NO: 35114 - protein, 6 aa, synthetic construct
PWENPY

SEQ ID NO: 35115 - protein, 6 aa, synthetic construct
PWENSD

SEQ ID NO: 35116 - protein, 6 aa, synthetic construct
PWENSE

SEQ ID NO: 35117 - protein, 6 aa, synthetic construct
PWENSF

SEQ ID NO: 35118 - protein, 6 aa, synthetic construct
PWENSW

SEQ ID NO: 35119 - protein, 6 aa, synthetic construct
PWENSY

SEQ ID NO: 35120 - protein, 6 aa, synthetic construct
PWENTD

SEQ ID NO: 35121 - protein, 6 aa, synthetic construct
PWENTE

SEQ ID NO: 35122 - protein, 6 aa, synthetic construct
PWENTF

SEQ ID NO: 35123 - protein, 6 aa, synthetic construct
PWENTW

SEQ ID NO: 35124 - protein, 6 aa, synthetic construct
PWENTY

SEQ ID NO: 35125 - protein, 6 aa, synthetic construct
PWENWD

SEQ ID NO: 35126 - protein, 6 aa, synthetic construct
PWENWE

SEQ ID NO: 35127 - protein, 6 aa, synthetic construct
PWENWF

SEQ ID NO: 35128 - protein, 6 aa, synthetic construct
PWENWW

SEQ ID NO: 35129 - protein, 6 aa, synthetic construct
PWENWY

SEQ ID NO: 35130 - protein, 6 aa, synthetic construct
PWENYD

SEQ ID NO: 35131 - protein, 6 aa, synthetic construct
PWENYE

SEQ ID NO: 35132 - protein, 6 aa, synthetic construct
PWENYF

SEQ ID NO: 35133 - protein, 6 aa, synthetic construct
PWENYW

SEQ ID NO: 35134 - protein, 6 aa, synthetic construct
PWENYY

SEQ ID NO: 35135 - protein, 6 aa, synthetic construct
PWENVD

SEQ ID NO: 35136 - protein, 6 aa, synthetic construct
PWENVE

SEQ ID NO: 35137 - protein, 6 aa, synthetic construct
PWENVF

SEQ ID NO: 35138 - protein, 6 aa, synthetic construct
PWENVW

SEQ ID NO: 35139 - protein, 6 aa, synthetic construct
PWENVY

SEQ ID NO: 35140 - protein, 6 aa, synthetic construct
PWEDAD

SEQ ID NO: 35141 - protein, 6 aa, synthetic construct
PWEDAE

SEQ ID NO: 35142 - protein, 6 aa, synthetic construct
PWEDAF

SEQ ID NO: 35143 - protein, 6 aa, synthetic construct
PWEDAW

SEQ ID NO: 35144 - protein, 6 aa, synthetic construct
PWEDAY

SEQ ID NO: 35145 - protein, 6 aa, synthetic construct
PWEDRD

SEQ ID NO: 35146 - protein, 6 aa, synthetic construct
PWEDRE

SEQ ID NO: 35147 - protein, 6 aa, synthetic construct
PWEDRF

SEQ ID NO: 35148 - protein, 6 aa, synthetic construct
PWEDRW

SEQ ID NO: 35149 - protein, 6 aa, synthetic construct
PWEDRY

SEQ ID NO: 35150 - protein, 6 aa, synthetic construct
PWEDND

SEQ ID NO: 35151 - protein, 6 aa, synthetic construct
PWEDNE

SEQ ID NO: 35152 - protein, 6 aa, synthetic construct
PWEDNF

SEQ ID NO: 35153 - protein, 6 aa, synthetic construct
PWEDNW

SEQ ID NO: 35154 - protein, 6 aa, synthetic construct
PWEDNY

SEQ ID NO: 35155 - protein, 6 aa, synthetic construct
PWEDDD

SEQ ID NO: 35156 - protein, 6 aa, synthetic construct
PWEDDE

SEQ ID NO: 35157 - protein, 6 aa, synthetic construct
PWEDDF

SEQ ID NO: 35158 - protein, 6 aa, synthetic construct
PWEDDW

SEQ ID NO: 35159 - protein, 6 aa, synthetic construct
PWEDDY

SEQ ID NO: 35160 - protein, 6 aa, synthetic construct
PWEDCD

SEQ ID NO: 35161 - protein, 6 aa, synthetic construct
PWEDCE

SEQ ID NO: 35162 - protein, 6 aa, synthetic construct
PWEDCF

SEQ ID NO: 35163 - protein, 6 aa, synthetic construct
PWEDCW

SEQ ID NO: 35164 - protein, 6 aa, synthetic construct
PWEDCY

SEQ ID NO: 35165 - protein, 6 aa, synthetic construct
PWEDQD

SEQ ID NO: 35166 - protein, 6 aa, synthetic construct
PWEDQE

SEQ ID NO: 35167 - protein, 6 aa, synthetic construct
PWEDQF

SEQ ID NO: 35168 - protein, 6 aa, synthetic construct
PWEDQW

SEQ ID NO: 35169 - protein, 6 aa, synthetic construct
PWEDQY

SEQ ID NO: 35170 - protein, 6 aa, synthetic construct
PWEDED

SEQ ID NO: 35171 - protein, 6 aa, synthetic construct
PWEDEE

SEQ ID NO: 35172 - protein, 6 aa, synthetic construct
PWEDEF

SEQ ID NO: 35173 - protein, 6 aa, synthetic construct
PWEDEW

SEQ ID NO: 35174 - protein, 6 aa, synthetic construct
PWEDEY

SEQ ID NO: 35175 - protein, 6 aa, synthetic construct
PWEDGD

SEQ ID NO: 35176 - protein, 6 aa, synthetic construct
PWEDGE

SEQ ID NO: 35177 - protein, 6 aa, synthetic construct
PWEDGF

SEQ ID NO: 35178 - protein, 6 aa, synthetic construct
PWEDGW

SEQ ID NO: 35179 - protein, 6 aa, synthetic construct
PWEDGY

SEQ ID NO: 35180 - protein, 6 aa, synthetic construct
PWEDHD

SEQ ID NO: 35181 - protein, 6 aa, synthetic construct
PWEDHE

SEQ ID NO: 35182 - protein, 6 aa, synthetic construct
PWEDHF

SEQ ID NO: 35183 - protein, 6 aa, synthetic construct
PWEDHW

SEQ ID NO: 35184 - protein, 6 aa, synthetic construct
PWEDHY

SEQ ID NO: 35185 - protein, 6 aa, synthetic construct
PWEDID

SEQ ID NO: 35186 - protein, 6 aa, synthetic construct
PWEDIE

SEQ ID NO: 35187 - protein, 6 aa, synthetic construct
PWEDIF

SEQ ID NO: 35188 - protein, 6 aa, synthetic construct
PWEDIW

SEQ ID NO: 35189 - protein, 6 aa, synthetic construct
PWEDIY

SEQ ID NO: 35190 - protein, 6 aa, synthetic construct
PWEDLD

SEQ ID NO: 35191 - protein, 6 aa, synthetic construct
PWEDLE

SEQ ID NO: 35192 - protein, 6 aa, synthetic construct
PWEDLF

SEQ ID NO: 35193 - protein, 6 aa, synthetic construct
PWEDLW

SEQ ID NO: 35194 - protein, 6 aa, synthetic construct
PWEDLY

SEQ ID NO: 35195 - protein, 6 aa, synthetic construct
PWEDKD

SEQ ID NO: 35196 - protein, 6 aa, synthetic construct
PWEDKE

SEQ ID NO: 35197 - protein, 6 aa, synthetic construct
PWEDKF

SEQ ID NO: 35198 - protein, 6 aa, synthetic construct
PWEDKW

SEQ ID NO: 35199 - protein, 6 aa, synthetic construct
PWEDKY

SEQ ID NO: 35200 - protein, 6 aa, synthetic construct
PWEDMD

SEQ ID NO: 35201 - protein, 6 aa, synthetic construct
PWEDME

SEQ ID NO: 35202 - protein, 6 aa, synthetic construct
PWEDMF

SEQ ID NO: 35203 - protein, 6 aa, synthetic construct
PWEDMW

SEQ ID NO: 35204 - protein, 6 aa, synthetic construct
PWEDMY

SEQ ID NO: 35205 - protein, 6 aa, synthetic construct
PWEDFD

SEQ ID NO: 35206 - protein, 6 aa, synthetic construct
PWEDFE

SEQ ID NO: 35207 - protein, 6 aa, synthetic construct
PWEDFF

SEQ ID NO: 35208 - protein, 6 aa, synthetic construct
PWEDFW

SEQ ID NO: 35209 - protein, 6 aa, synthetic construct
PWEDFY

SEQ ID NO: 35210 - protein, 6 aa, synthetic construct
PWEDPD

SEQ ID NO: 35211 - protein, 6 aa, synthetic construct
PWEDPE

SEQ ID NO: 35212 - protein, 6 aa, synthetic construct
PWEDPF

SEQ ID NO: 35213 - protein, 6 aa, synthetic construct
PWEDPW

SEQ ID NO: 35214 - protein, 6 aa, synthetic construct
PWEDPY

SEQ ID NO: 35215 - protein, 6 aa, synthetic construct
PWEDSD

SEQ ID NO: 35216 - protein, 6 aa, synthetic construct
PWEDSE

SEQ ID NO: 35217 - protein, 6 aa, synthetic construct
PWEDSF

SEQ ID NO: 35218 - protein, 6 aa, synthetic construct
PWEDSW

SEQ ID NO: 35219 - protein, 6 aa, synthetic construct
PWEDSY

SEQ ID NO: 35220 - protein, 6 aa, synthetic construct
PWEDTD

SEQ ID NO: 35221 - protein, 6 aa, synthetic construct
PWEDTE

SEQ ID NO: 35222 - protein, 6 aa, synthetic construct
PWEDTF

SEQ ID NO: 35223 - protein, 6 aa, synthetic construct
PWEDTW

SEQ ID NO: 35224 - protein, 6 aa, synthetic construct
PWEDTY

SEQ ID NO: 35225 - protein, 6 aa, synthetic construct
PWEDWD

SEQ ID NO: 35226 - protein, 6 aa, synthetic construct
PWEDWE

SEQ ID NO: 35227 - protein, 6 aa, synthetic construct
PWEDWF

SEQ ID NO: 35228 - protein, 6 aa, synthetic construct
PWEDWW

SEQ ID NO: 35229 - protein, 6 aa, synthetic construct
PWEDWY

SEQ ID NO: 35230 - protein, 6 aa, synthetic construct
PWEDYD

SEQ ID NO: 35231 - protein, 6 aa, synthetic construct
PWEDYE

SEQ ID NO: 35232 - protein, 6 aa, synthetic construct
PWEDYF

SEQ ID NO: 35233 - protein, 6 aa, synthetic construct
PWEDYW

SEQ ID NO: 35234 - protein, 6 aa, synthetic construct
PWEDYY

SEQ ID NO: 35235 - protein, 6 aa, synthetic construct
PWEDVD

SEQ ID NO: 35236 - protein, 6 aa, synthetic construct
PWEDVE

SEQ ID NO: 35237 - protein, 6 aa, synthetic construct
PWEDVF

SEQ ID NO: 35238 - protein, 6 aa, synthetic construct
PWEDVW

SEQ ID NO: 35239 - protein, 6 aa, synthetic construct
PWEDVY

SEQ ID NO: 35240 - protein, 6 aa, synthetic construct
PWECAD

SEQ ID NO: 35241 - protein, 6 aa, synthetic construct
PWECAE

SEQ ID NO: 35242 - protein, 6 aa, synthetic construct
PWECAF

SEQ ID NO: 35243 - protein, 6 aa, synthetic construct
PWECAW

SEQ ID NO: 35244 - protein, 6 aa, synthetic construct
PWECAY

SEQ ID NO: 35245 - protein, 6 aa, synthetic construct
PWECRD

SEQ ID NO: 35246 - protein, 6 aa, synthetic construct
PWECRE

SEQ ID NO: 35247 - protein, 6 aa, synthetic construct
PWECRF

SEQ ID NO: 35248 - protein, 6 aa, synthetic construct
PWECRW

SEQ ID NO: 35249 - protein, 6 aa, synthetic construct
PWECRY

SEQ ID NO: 35250 - protein, 6 aa, synthetic construct
PWECND

SEQ ID NO: 35251 - protein, 6 aa, synthetic construct
PWECNE

SEQ ID NO: 35252 - protein, 6 aa, synthetic construct
PWECNF

SEQ ID NO: 35253 - protein, 6 aa, synthetic construct
PWECNW

SEQ ID NO: 35254 - protein, 6 aa, synthetic construct
PWECNY

SEQ ID NO: 35255 - protein, 6 aa, synthetic construct
PWECDD

SEQ ID NO: 35256 - protein, 6 aa, synthetic construct
PWECDE

SEQ ID NO: 35257 - protein, 6 aa, synthetic construct
PWECDF

SEQ ID NO: 35258 - protein, 6 aa, synthetic construct
PWECDW

SEQ ID NO: 35259 - protein, 6 aa, synthetic construct
PWECDY

SEQ ID NO: 35260 - protein, 6 aa, synthetic construct
PWECCD

SEQ ID NO: 35261 - protein, 6 aa, synthetic construct
PWECCE

SEQ ID NO: 35262 - protein, 6 aa, synthetic construct
PWECCF

SEQ ID NO: 35263 - protein, 6 aa, synthetic construct
PWECCW

SEQ ID NO: 35264 - protein, 6 aa, synthetic construct
PWECCY

SEQ ID NO: 35265 - protein, 6 aa, synthetic construct
PWECQD

SEQ ID NO: 35266 - protein, 6 aa, synthetic construct
PWECQE

SEQ ID NO: 35267 - protein, 6 aa, synthetic construct
PWECQF

SEQ ID NO: 35268 - protein, 6 aa, synthetic construct
PWECQW

SEQ ID NO: 35269 - protein, 6 aa, synthetic construct
PWECQY

SEQ ID NO: 35270 - protein, 6 aa, synthetic construct
PWECED

SEQ ID NO: 35271 - protein, 6 aa, synthetic construct
PWECEE

SEQ ID NO: 35272 - protein, 6 aa, synthetic construct
PWECEF

SEQ ID NO: 35273 - protein, 6 aa, synthetic construct
PWECEW

SEQ ID NO: 35274 - protein, 6 aa, synthetic construct
PWECEY

SEQ ID NO: 35275 - protein, 6 aa, synthetic construct
PWECGD

SEQ ID NO: 35276 - protein, 6 aa, synthetic construct
PWECGE

SEQ ID NO: 35277 - protein, 6 aa, synthetic construct
PWECGF

SEQ ID NO: 35278 - protein, 6 aa, synthetic construct
PWECGW

SEQ ID NO: 35279 - protein, 6 aa, synthetic construct
PWECGY

SEQ ID NO: 35280 - protein, 6 aa, synthetic construct
PWECHD

SEQ ID NO: 35281 - protein, 6 aa, synthetic construct
PWECHE

SEQ ID NO: 35282 - protein, 6 aa, synthetic construct
PWECHF

SEQ ID NO: 35283 - protein, 6 aa, synthetic construct
PWECHW

SEQ ID NO: 35284 - protein, 6 aa, synthetic construct
PWECHY

SEQ ID NO: 35285 - protein, 6 aa, synthetic construct
PWECID

SEQ ID NO: 35286 - protein, 6 aa, synthetic construct
PWECIE

SEQ ID NO: 35287 - protein, 6 aa, synthetic construct
PWECIF

SEQ ID NO: 35288 - protein, 6 aa, synthetic construct
PWECIW

SEQ ID NO: 35289 - protein, 6 aa, synthetic construct
PWECIY

SEQ ID NO: 35290 - protein, 6 aa, synthetic construct
PWECLD

SEQ ID NO: 35291 - protein, 6 aa, synthetic construct
PWECLE

SEQ ID NO: 35292 - protein, 6 aa, synthetic construct
PWECLF

SEQ ID NO: 35293 - protein, 6 aa, synthetic construct
PWECLW

SEQ ID NO: 35294 - protein, 6 aa, synthetic construct
PWECLY

SEQ ID NO: 35295 - protein, 6 aa, synthetic construct
PWECKD

SEQ ID NO: 35296 - protein, 6 aa, synthetic construct
PWECKE

SEQ ID NO: 35297 - protein, 6 aa, synthetic construct
PWECKF

SEQ ID NO: 35298 - protein, 6 aa, synthetic construct
PWECKW

SEQ ID NO: 35299 - protein, 6 aa, synthetic construct
PWECKY

SEQ ID NO: 35300 - protein, 6 aa, synthetic construct
PWECMD

SEQ ID NO: 35301 - protein, 6 aa, synthetic construct
PWECME

SEQ ID NO: 35302 - protein, 6 aa, synthetic construct
PWECMF

SEQ ID NO: 35303 - protein, 6 aa, synthetic construct
PWECMW

SEQ ID NO: 35304 - protein, 6 aa, synthetic construct
PWECMY

SEQ ID NO: 35305 - protein, 6 aa, synthetic construct
PWECFD

SEQ ID NO: 35306 - protein, 6 aa, synthetic construct
PWECFE

SEQ ID NO: 35307 - protein, 6 aa, synthetic construct
PWECFF

SEQ ID NO: 35308 - protein, 6 aa, synthetic construct
PWECFW

SEQ ID NO: 35309 - protein, 6 aa, synthetic construct
PWECFY

SEQ ID NO: 35310 - protein, 6 aa, synthetic construct
PWECPD

SEQ ID NO: 35311 - protein, 6 aa, synthetic construct
PWECPE

SEQ ID NO: 35312 - protein, 6 aa, synthetic construct
PWECPF

SEQ ID NO: 35313 - protein, 6 aa, synthetic construct
PWECPW

SEQ ID NO: 35314 - protein, 6 aa, synthetic construct
PWECPY

SEQ ID NO: 35315 - protein, 6 aa, synthetic construct
PWECSD

SEQ ID NO: 35316 - protein, 6 aa, synthetic construct
PWECSE

SEQ ID NO: 35317 - protein, 6 aa, synthetic construct
PWECSF

SEQ ID NO: 35318 - protein, 6 aa, synthetic construct
PWECSW

SEQ ID NO: 35319 - protein, 6 aa, synthetic construct
PWECSY

SEQ ID NO: 35320 - protein, 6 aa, synthetic construct
PWECTD

SEQ ID NO: 35321 - protein, 6 aa, synthetic construct
PWECTE

SEQ ID NO: 35322 - protein, 6 aa, synthetic construct
PWECTF

SEQ ID NO: 35323 - protein, 6 aa, synthetic construct
PWECTW

SEQ ID NO: 35324 - protein, 6 aa, synthetic construct
PWECTY

SEQ ID NO: 35325 - protein, 6 aa, synthetic construct
PWECWD

SEQ ID NO: 35326 - protein, 6 aa, synthetic construct
PWECWE

SEQ ID NO: 35327 - protein, 6 aa, synthetic construct
PWECWF

SEQ ID NO: 35328 - protein, 6 aa, synthetic construct
PWECWW

SEQ ID NO: 35329 - protein, 6 aa, synthetic construct
PWECWY

SEQ ID NO: 35330 - protein, 6 aa, synthetic construct
PWECYD

SEQ ID NO: 35331 - protein, 6 aa, synthetic construct
PWECYE

SEQ ID NO: 35332 - protein, 6 aa, synthetic construct
PWECYF

SEQ ID NO: 35333 - protein, 6 aa, synthetic construct
PWECYW

SEQ ID NO: 35334 - protein, 6 aa, synthetic construct
PWECYY

SEQ ID NO: 35335 - protein, 6 aa, synthetic construct
PWECVD

SEQ ID NO: 35336 - protein, 6 aa, synthetic construct
PWECVE

SEQ ID NO: 35337 - protein, 6 aa, synthetic construct
PWECVF

SEQ ID NO: 35338 - protein, 6 aa, synthetic construct
PWECVW

SEQ ID NO: 35339 - protein, 6 aa, synthetic construct
PWECVY

SEQ ID NO: 35340 - protein, 6 aa, synthetic construct
PWEQAD

SEQ ID NO: 35341 - protein, 6 aa, synthetic construct
PWEQAE

SEQ ID NO: 35342 - protein, 6 aa, synthetic construct
PWEQAF

SEQ ID NO: 35343 - protein, 6 aa, synthetic construct
PWEQAW

SEQ ID NO: 35344 - protein, 6 aa, synthetic construct
PWEQAY

SEQ ID NO: 35345 - protein, 6 aa, synthetic construct
PWEQRD

SEQ ID NO: 35346 - protein, 6 aa, synthetic construct
PWEQRE

SEQ ID NO: 35347 - protein, 6 aa, synthetic construct
PWEQRF

SEQ ID NO: 35348 - protein, 6 aa, synthetic construct
PWEQRW

SEQ ID NO: 35349 - protein, 6 aa, synthetic construct
PWEQRY

SEQ ID NO: 35350 - protein, 6 aa, synthetic construct
PWEQND

SEQ ID NO: 35351 - protein, 6 aa, synthetic construct
PWEQNE

SEQ ID NO: 35352 - protein, 6 aa, synthetic construct
PWEQNF

SEQ ID NO: 35353 - protein, 6 aa, synthetic construct
PWEQNW

SEQ ID NO: 35354 - protein, 6 aa, synthetic construct
PWEQNY

SEQ ID NO: 35355 - protein, 6 aa, synthetic construct
PWEQDD

SEQ ID NO: 35356 - protein, 6 aa, synthetic construct
PWEQDE

SEQ ID NO: 35357 - protein, 6 aa, synthetic construct
PWEQDF

SEQ ID NO: 35358 - protein, 6 aa, synthetic construct
PWEQDW

SEQ ID NO: 35359 - protein, 6 aa, synthetic construct
PWEQDY

SEQ ID NO: 35360 - protein, 6 aa, synthetic construct
PWEQCD

SEQ ID NO: 35361 - protein, 6 aa, synthetic construct
PWEQCE

SEQ ID NO: 35362 - protein, 6 aa, synthetic construct
PWEQCF

SEQ ID NO: 35363 - protein, 6 aa, synthetic construct
PWEQCW

SEQ ID NO: 35364 - protein, 6 aa, synthetic construct
PWEQCY

SEQ ID NO: 35365 - protein, 6 aa, synthetic construct
PWEQQD

SEQ ID NO: 35366 - protein, 6 aa, synthetic construct
PWEQQE

SEQ ID NO: 35367 - protein, 6 aa, synthetic construct
PWEQQF

SEQ ID NO: 35368 - protein, 6 aa, synthetic construct
PWEQQW

SEQ ID NO: 35369 - protein, 6 aa, synthetic construct
PWEQQY

SEQ ID NO: 35370 - protein, 6 aa, synthetic construct
PWEQED

SEQ ID NO: 35371 - protein, 6 aa, synthetic construct
PWEQEE

SEQ ID NO: 35372 - protein, 6 aa, synthetic construct
PWEQEF

SEQ ID NO: 35373 - protein, 6 aa, synthetic construct
PWEQEW

SEQ ID NO: 35374 - protein, 6 aa, synthetic construct
PWEQEY

SEQ ID NO: 35375 - protein, 6 aa, synthetic construct
PWEQGD

SEQ ID NO: 35376 - protein, 6 aa, synthetic construct
PWEQGE

SEQ ID NO: 35377 - protein, 6 aa, synthetic construct
PWEQGF

SEQ ID NO: 35378 - protein, 6 aa, synthetic construct
PWEQGW

SEQ ID NO: 35379 - protein, 6 aa, synthetic construct
PWEQGY

SEQ ID NO: 35380 - protein, 6 aa, synthetic construct
PWEQHD

SEQ ID NO: 35381 - protein, 6 aa, synthetic construct
PWEQHE

SEQ ID NO: 35382 - protein, 6 aa, synthetic construct
PWEQHF

SEQ ID NO: 35383 - protein, 6 aa, synthetic construct
PWEQHW

SEQ ID NO: 35384 - protein, 6 aa, synthetic construct
PWEQHY

SEQ ID NO: 35385 - protein, 6 aa, synthetic construct
PWEQID

SEQ ID NO: 35386 - protein, 6 aa, synthetic construct
PWEQIE

SEQ ID NO: 35387 - protein, 6 aa, synthetic construct
PWEQIF

SEQ ID NO: 35388 - protein, 6 aa, synthetic construct
PWEQIW

SEQ ID NO: 35389 - protein, 6 aa, synthetic construct
PWEQIY

SEQ ID NO: 35390 - protein, 6 aa, synthetic construct
PWEQLD

SEQ ID NO: 35391 - protein, 6 aa, synthetic construct
PWEQLE

SEQ ID NO: 35392 - protein, 6 aa, synthetic construct
PWEQLF

SEQ ID NO: 35393 - protein, 6 aa, synthetic construct
PWEQLW

SEQ ID NO: 35394 - protein, 6 aa, synthetic construct
PWEQLY

SEQ ID NO: 35395 - protein, 6 aa, synthetic construct
PWEQKD

SEQ ID NO: 35396 - protein, 6 aa, synthetic construct
PWEQKE

SEQ ID NO: 35397 - protein, 6 aa, synthetic construct
PWEQKF

SEQ ID NO: 35398 - protein, 6 aa, synthetic construct
PWEQKW

SEQ ID NO: 35399 - protein, 6 aa, synthetic construct
PWEQKY

SEQ ID NO: 35400 - protein, 6 aa, synthetic construct
PWEQMD

SEQ ID NO: 35401 - protein, 6 aa, synthetic construct
PWEQME

SEQ ID NO: 35402 - protein, 6 aa, synthetic construct
PWEQMF

SEQ ID NO: 35403 - protein, 6 aa, synthetic construct
PWEQMW

SEQ ID NO: 35404 - protein, 6 aa, synthetic construct
PWEQMY

SEQ ID NO: 35405 - protein, 6 aa, synthetic construct
PWEQFD

SEQ ID NO: 35406 - protein, 6 aa, synthetic construct
PWEQFE

SEQ ID NO: 35407 - protein, 6 aa, synthetic construct
PWEQFF

SEQ ID NO: 35408 - protein, 6 aa, synthetic construct
PWEQFW

SEQ ID NO: 35409 - protein, 6 aa, synthetic construct
PWEQFY

SEQ ID NO: 35410 - protein, 6 aa, synthetic construct
PWEQPD

SEQ ID NO: 35411 - protein, 6 aa, synthetic construct
PWEQPE

SEQ ID NO: 35412 - protein, 6 aa, synthetic construct
PWEQPF

SEQ ID NO: 35413 - protein, 6 aa, synthetic construct
PWEQPW

SEQ ID NO: 35414 - protein, 6 aa, synthetic construct
PWEQPY

SEQ ID NO: 35415 - protein, 6 aa, synthetic construct
PWEQSD

SEQ ID NO: 35416 - protein, 6 aa, synthetic construct
PWEQSE

SEQ ID NO: 35417 - protein, 6 aa, synthetic construct
PWEQSF

SEQ ID NO: 35418 - protein, 6 aa, synthetic construct
PWEQSW

SEQ ID NO: 35419 - protein, 6 aa, synthetic construct
PWEQSY

SEQ ID NO: 35420 - protein, 6 aa, synthetic construct
PWEQTD

SEQ ID NO: 35421 - protein, 6 aa, synthetic construct
PWEQTE

SEQ ID NO: 35422 - protein, 6 aa, synthetic construct
PWEQTF

SEQ ID NO: 35423 - protein, 6 aa, synthetic construct
PWEQTW

SEQ ID NO: 35424 - protein, 6 aa, synthetic construct
PWEQTY

SEQ ID NO: 35425 - protein, 6 aa, synthetic construct
PWEQWD

SEQ ID NO: 35426 - protein, 6 aa, synthetic construct
PWEQWE

SEQ ID NO: 35427 - protein, 6 aa, synthetic construct
PWEQWF

SEQ ID NO: 35428 - protein, 6 aa, synthetic construct
PWEQWW

SEQ ID NO: 35429 - protein, 6 aa, synthetic construct
PWEQWY

SEQ ID NO: 35430 - protein, 6 aa, synthetic construct
PWEQYD

SEQ ID NO: 35431 - protein, 6 aa, synthetic construct
PWEQYE

SEQ ID NO: 35432 - protein, 6 aa, synthetic construct
PWEQYF

SEQ ID NO: 35433 - protein, 6 aa, synthetic construct
PWEQYW

SEQ ID NO: 35434 - protein, 6 aa, synthetic construct
PWEQYY

SEQ ID NO: 35435 - protein, 6 aa, synthetic construct
PWEQVD

SEQ ID NO: 35436 - protein, 6 aa, synthetic construct
PWEQVE

SEQ ID NO: 35437 - protein, 6 aa, synthetic construct
PWEQVF

SEQ ID NO: 35438 - protein, 6 aa, synthetic construct
PWEQVW

SEQ ID NO: 35439 - protein, 6 aa, synthetic construct
PWEQVY

SEQ ID NO: 35440 - protein, 6 aa, synthetic construct
PWEEAD

SEQ ID NO: 35441 - protein, 6 aa, synthetic construct
PWEEAE

SEQ ID NO: 35442 - protein, 6 aa, synthetic construct
PWEEAF

SEQ ID NO: 35443 - protein, 6 aa, synthetic construct
PWEEAW

SEQ ID NO: 35444 - protein, 6 aa, synthetic construct
PWEEAY

SEQ ID NO: 35445 - protein, 6 aa, synthetic construct
PWEERD

SEQ ID NO: 35446 - protein, 6 aa, synthetic construct
PWEERE

SEQ ID NO: 35447 - protein, 6 aa, synthetic construct
PWEERF

SEQ ID NO: 35448 - protein, 6 aa, synthetic construct
PWEERW

SEQ ID NO: 35449 - protein, 6 aa, synthetic construct
PWEERY

SEQ ID NO: 35450 - protein, 6 aa, synthetic construct
PWEEND

SEQ ID NO: 35451 - protein, 6 aa, synthetic construct
PWEENE

SEQ ID NO: 35452 - protein, 6 aa, synthetic construct
PWEENF

SEQ ID NO: 35453 - protein, 6 aa, synthetic construct
PWEENW

SEQ ID NO: 35454 - protein, 6 aa, synthetic construct
PWEENY

SEQ ID NO: 35455 - protein, 6 aa, synthetic construct
PWEEDD

SEQ ID NO: 35456 - protein, 6 aa, synthetic construct
PWEEDE

SEQ ID NO: 35457 - protein, 6 aa, synthetic construct
PWEEDF

SEQ ID NO: 35458 - protein, 6 aa, synthetic construct
PWEEDW

SEQ ID NO: 35459 - protein, 6 aa, synthetic construct
PWEEDY

SEQ ID NO: 35460 - protein, 6 aa, synthetic construct
PWEECD

SEQ ID NO: 35461 - protein, 6 aa, synthetic construct
PWEECE

SEQ ID NO: 35462 - protein, 6 aa, synthetic construct
PWEECF

SEQ ID NO: 35463 - protein, 6 aa, synthetic construct
PWEECW

SEQ ID NO: 35464 - protein, 6 aa, synthetic construct
PWEECY

SEQ ID NO: 35465 - protein, 6 aa, synthetic construct
PWEEQD

SEQ ID NO: 35466 - protein, 6 aa, synthetic construct
PWEEQE

SEQ ID NO: 35467 - protein, 6 aa, synthetic construct
PWEEQF

SEQ ID NO: 35468 - protein, 6 aa, synthetic construct
PWEEQW

SEQ ID NO: 35469 - protein, 6 aa, synthetic construct
PWEEQY

SEQ ID NO: 35470 - protein, 6 aa, synthetic construct
PWEEED

SEQ ID NO: 35471 - protein, 6 aa, synthetic construct
PWEEEE

SEQ ID NO: 35472 - protein, 6 aa, synthetic construct
PWEEEF

SEQ ID NO: 35473 - protein, 6 aa, synthetic construct
PWEEEW

SEQ ID NO: 35474 - protein, 6 aa, synthetic construct
PWEEEY

SEQ ID NO: 35475 - protein, 6 aa, synthetic construct
PWEEGD

SEQ ID NO: 35476 - protein, 6 aa, synthetic construct
PWEEGE

SEQ ID NO: 35477 - protein, 6 aa, synthetic construct
PWEEGF

SEQ ID NO: 35478 - protein, 6 aa, synthetic construct
PWEEGW

SEQ ID NO: 35479 - protein, 6 aa, synthetic construct
PWEEGY

SEQ ID NO: 35480 - protein, 6 aa, synthetic construct
PWEEHD

SEQ ID NO: 35481 - protein, 6 aa, synthetic construct
PWEEHE

SEQ ID NO: 35482 - protein, 6 aa, synthetic construct
PWEEHF

SEQ ID NO: 35483 - protein, 6 aa, synthetic construct
PWEEHW

SEQ ID NO: 35484 - protein, 6 aa, synthetic construct
PWEEHY

SEQ ID NO: 35485 - protein, 6 aa, synthetic construct
PWEEID

SEQ ID NO: 35486 - protein, 6 aa, synthetic construct
PWEEIE

SEQ ID NO: 35487 - protein, 6 aa, synthetic construct
PWEEIF

SEQ ID NO: 35488 - protein, 6 aa, synthetic construct
PWEEIW

SEQ ID NO: 35489 - protein, 6 aa, synthetic construct
PWEEIY

SEQ ID NO: 35490 - protein, 6 aa, synthetic construct
PWEELD

SEQ ID NO: 35491 - protein, 6 aa, synthetic construct
PWEELE

SEQ ID NO: 35492 - protein, 6 aa, synthetic construct
PWEELF

SEQ ID NO: 35493 - protein, 6 aa, synthetic construct
PWEELW

SEQ ID NO: 35494 - protein, 6 aa, synthetic construct
PWEELY

SEQ ID NO: 35495 - protein, 6 aa, synthetic construct
PWEEKD

SEQ ID NO: 35496 - protein, 6 aa, synthetic construct
PWEEKE

SEQ ID NO: 35497 - protein, 6 aa, synthetic construct
PWEEKF

SEQ ID NO: 35498 - protein, 6 aa, synthetic construct
PWEEKW

SEQ ID NO: 35499 - protein, 6 aa, synthetic construct
PWEEKY

SEQ ID NO: 35500 - protein, 6 aa, synthetic construct
PWEEMD

SEQ ID NO: 35501 - protein, 6 aa, synthetic construct
PWEEME

SEQ ID NO: 35502 - protein, 6 aa, synthetic construct
PWEEMF

SEQ ID NO: 35503 - protein, 6 aa, synthetic construct
PWEEMW

SEQ ID NO: 35504 - protein, 6 aa, synthetic construct
PWEEMY

SEQ ID NO: 35505 - protein, 6 aa, synthetic construct
PWEEFD

SEQ ID NO: 35506 - protein, 6 aa, synthetic construct
PWEEFE

SEQ ID NO: 35507 - protein, 6 aa, synthetic construct
PWEEFF

SEQ ID NO: 35508 - protein, 6 aa, synthetic construct
PWEEFW

SEQ ID NO: 35509 - protein, 6 aa, synthetic construct
PWEEFY

SEQ ID NO: 35510 - protein, 6 aa, synthetic construct
PWEEPD

SEQ ID NO: 35511 - protein, 6 aa, synthetic construct
PWEEPE

SEQ ID NO: 35512 - protein, 6 aa, synthetic construct
PWEEPF

SEQ ID NO: 35513 - protein, 6 aa, synthetic construct
PWEEPW

SEQ ID NO: 35514 - protein, 6 aa, synthetic construct
PWEEPY

SEQ ID NO: 35515 - protein, 6 aa, synthetic construct
PWEESD

SEQ ID NO: 35516 - protein, 6 aa, synthetic construct
PWEESE

SEQ ID NO: 35517 - protein, 6 aa, synthetic construct
PWEESF

SEQ ID NO: 35518 - protein, 6 aa, synthetic construct
PWEESW

SEQ ID NO: 35519 - protein, 6 aa, synthetic construct
PWEESY

SEQ ID NO: 35520 - protein, 6 aa, synthetic construct
PWEETD

SEQ ID NO: 35521 - protein, 6 aa, synthetic construct
PWEETE

SEQ ID NO: 35522 - protein, 6 aa, synthetic construct
PWEETF

SEQ ID NO: 35523 - protein, 6 aa, synthetic construct
PWEETW

SEQ ID NO: 35524 - protein, 6 aa, synthetic construct
PWEETY

SEQ ID NO: 35525 - protein, 6 aa, synthetic construct
PWEEWD

SEQ ID NO: 35526 - protein, 6 aa, synthetic construct
PWEEWE

SEQ ID NO: 35527 - protein, 6 aa, synthetic construct
PWEEWF

SEQ ID NO: 35528 - protein, 6 aa, synthetic construct
PWEEWW

SEQ ID NO: 35529 - protein, 6 aa, synthetic construct
PWEEWY

SEQ ID NO: 35530 - protein, 6 aa, synthetic construct
PWEEYD

SEQ ID NO: 35531 - protein, 6 aa, synthetic construct
PWEEYE

SEQ ID NO: 35532 - protein, 6 aa, synthetic construct
PWEEYF

SEQ ID NO: 35533 - protein, 6 aa, synthetic construct
PWEEYW

SEQ ID NO: 35534 - protein, 6 aa, synthetic construct
PWEEYY

SEQ ID NO: 35535 - protein, 6 aa, synthetic construct
PWEEVD

SEQ ID NO: 35536 - protein, 6 aa, synthetic construct
PWEEVE

SEQ ID NO: 35537 - protein, 6 aa, synthetic construct
PWEEVF

SEQ ID NO: 35538 - protein, 6 aa, synthetic construct
PWEEVW

SEQ ID NO: 35539 - protein, 6 aa, synthetic construct
PWEEVY

SEQ ID NO: 35540 - protein, 6 aa, synthetic construct
PWEGAD

SEQ ID NO: 35541 - protein, 6 aa, synthetic construct
PWEGAE

SEQ ID NO: 35542 - protein, 6 aa, synthetic construct
PWEGAF

SEQ ID NO: 35543 - protein, 6 aa, synthetic construct
PWEGAW

SEQ ID NO: 35544 - protein, 6 aa, synthetic construct
PWEGAY

SEQ ID NO: 35545 - protein, 6 aa, synthetic construct
PWEGRD

SEQ ID NO: 35546 - protein, 6 aa, synthetic construct
PWEGRE

SEQ ID NO: 35547 - protein, 6 aa, synthetic construct
PWEGRF

SEQ ID NO: 35548 - protein, 6 aa, synthetic construct
PWEGRW

SEQ ID NO: 35549 - protein, 6 aa, synthetic construct
PWEGRY

SEQ ID NO: 35550 - protein, 6 aa, synthetic construct
PWEGND

SEQ ID NO: 35551 - protein, 6 aa, synthetic construct
PWEGNE

SEQ ID NO: 35552 - protein, 6 aa, synthetic construct
PWEGNF

SEQ ID NO: 35553 - protein, 6 aa, synthetic construct
PWEGNW

SEQ ID NO: 35554 - protein, 6 aa, synthetic construct
PWEGNY

SEQ ID NO: 35555 - protein, 6 aa, synthetic construct
PWEGDD

SEQ ID NO: 35556 - protein, 6 aa, synthetic construct
PWEGDE

SEQ ID NO: 35557 - protein, 6 aa, synthetic construct
PWEGDF

SEQ ID NO: 35558 - protein, 6 aa, synthetic construct
PWEGDW

SEQ ID NO: 35559 - protein, 6 aa, synthetic construct
PWEGDY

SEQ ID NO: 35560 - protein, 6 aa, synthetic construct
PWEGCD

SEQ ID NO: 35561 - protein, 6 aa, synthetic construct
PWEGCE

SEQ ID NO: 35562 - protein, 6 aa, synthetic construct
PWEGCF

SEQ ID NO: 35563 - protein, 6 aa, synthetic construct
PWEGCW

SEQ ID NO: 35564 - protein, 6 aa, synthetic construct
PWEGCY

SEQ ID NO: 35565 - protein, 6 aa, synthetic construct
PWEGQD

SEQ ID NO: 35566 - protein, 6 aa, synthetic construct
PWEGQE

SEQ ID NO: 35567 - protein, 6 aa, synthetic construct
PWEGQF

SEQ ID NO: 35568 - protein, 6 aa, synthetic construct
PWEGQW

SEQ ID NO: 35569 - protein, 6 aa, synthetic construct
PWEGQY

SEQ ID NO: 35570 - protein, 6 aa, synthetic construct
PWEGED

SEQ ID NO: 35571 - protein, 6 aa, synthetic construct
PWEGEE

SEQ ID NO: 35572 - protein, 6 aa, synthetic construct
PWEGEF

SEQ ID NO: 35573 - protein, 6 aa, synthetic construct
PWEGEW

SEQ ID NO: 35574 - protein, 6 aa, synthetic construct
PWEGEY

SEQ ID NO: 35575 - protein, 6 aa, synthetic construct
PWEGGD

SEQ ID NO: 35576 - protein, 6 aa, synthetic construct
PWEGGE

SEQ ID NO: 35577 - protein, 6 aa, synthetic construct
PWEGGF

SEQ ID NO: 35578 - protein, 6 aa, synthetic construct
PWEGGW

SEQ ID NO: 35579 - protein, 6 aa, synthetic construct
PWEGGY

SEQ ID NO: 35580 - protein, 6 aa, synthetic construct
PWEGHD

SEQ ID NO: 35581 - protein, 6 aa, synthetic construct
PWEGHE

SEQ ID NO: 35582 - protein, 6 aa, synthetic construct
PWEGHF

SEQ ID NO: 35583 - protein, 6 aa, synthetic construct
PWEGHW

SEQ ID NO: 35584 - protein, 6 aa, synthetic construct
PWEGHY

SEQ ID NO: 35585 - protein, 6 aa, synthetic construct
PWEGID

SEQ ID NO: 35586 - protein, 6 aa, synthetic construct
PWEGIE

SEQ ID NO: 35587 - protein, 6 aa, synthetic construct
PWEGIF

SEQ ID NO: 35588 - protein, 6 aa, synthetic construct
PWEGIW

SEQ ID NO: 35589 - protein, 6 aa, synthetic construct
PWEGIY

SEQ ID NO: 35590 - protein, 6 aa, synthetic construct
PWEGLD

SEQ ID NO: 35591 - protein, 6 aa, synthetic construct
PWEGLE

SEQ ID NO: 35592 - protein, 6 aa, synthetic construct
PWEGLF

SEQ ID NO: 35593 - protein, 6 aa, synthetic construct
PWEGLW

SEQ ID NO: 35594 - protein, 6 aa, synthetic construct
PWEGLY

SEQ ID NO: 35595 - protein, 6 aa, synthetic construct
PWEGKD

SEQ ID NO: 35596 - protein, 6 aa, synthetic construct
PWEGKE

SEQ ID NO: 35597 - protein, 6 aa, synthetic construct
PWEGKF

SEQ ID NO: 35598 - protein, 6 aa, synthetic construct
PWEGKW

SEQ ID NO: 35599 - protein, 6 aa, synthetic construct
PWEGKY

SEQ ID NO: 35600 - protein, 6 aa, synthetic construct
PWEGMD

SEQ ID NO: 35601 - protein, 6 aa, synthetic construct
PWEGME

SEQ ID NO: 35602 - protein, 6 aa, synthetic construct
PWEGMF

SEQ ID NO: 35603 - protein, 6 aa, synthetic construct
PWEGMW

SEQ ID NO: 35604 - protein, 6 aa, synthetic construct
PWEGMY

SEQ ID NO: 35605 - protein, 6 aa, synthetic construct
PWEGFD

SEQ ID NO: 35606 - protein, 6 aa, synthetic construct
PWEGFE

SEQ ID NO: 35607 - protein, 6 aa, synthetic construct
PWEGFF

SEQ ID NO: 35608 - protein, 6 aa, synthetic construct
PWEGFW

SEQ ID NO: 35609 - protein, 6 aa, synthetic construct
PWEGFY

SEQ ID NO: 35610 - protein, 6 aa, synthetic construct
PWEGPD

SEQ ID NO: 35611 - protein, 6 aa, synthetic construct
PWEGPE

SEQ ID NO: 35612 - protein, 6 aa, synthetic construct
PWEGPF

SEQ ID NO: 35613 - protein, 6 aa, synthetic construct
PWEGPW

SEQ ID NO: 35614 - protein, 6 aa, synthetic construct
PWEGPY

SEQ ID NO: 35615 - protein, 6 aa, synthetic construct
PWEGSD

SEQ ID NO: 35616 - protein, 6 aa, synthetic construct
PWEGSE

SEQ ID NO: 35617 - protein, 6 aa, synthetic construct
PWEGSF

SEQ ID NO: 35618 - protein, 6 aa, synthetic construct
PWEGSW

SEQ ID NO: 35619 - protein, 6 aa, synthetic construct
PWEGSY

SEQ ID NO: 35620 - protein, 6 aa, synthetic construct
PWEGTD

SEQ ID NO: 35621 - protein, 6 aa, synthetic construct
PWEGTE

SEQ ID NO: 35622 - protein, 6 aa, synthetic construct
PWEGTF

SEQ ID NO: 35623 - protein, 6 aa, synthetic construct
PWEGTW

SEQ ID NO: 35624 - protein, 6 aa, synthetic construct
PWEGTY

SEQ ID NO: 35625 - protein, 6 aa, synthetic construct
PWEGWD

SEQ ID NO: 35626 - protein, 6 aa, synthetic construct
PWEGWE

SEQ ID NO: 35627 - protein, 6 aa, synthetic construct
PWEGWF

SEQ ID NO: 35628 - protein, 6 aa, synthetic construct
PWEGWW

SEQ ID NO: 35629 - protein, 6 aa, synthetic construct
PWEGWY

SEQ ID NO: 35630 - protein, 6 aa, synthetic construct
PWEGYD

SEQ ID NO: 35631 - protein, 6 aa, synthetic construct
PWEGYE

SEQ ID NO: 35632 - protein, 6 aa, synthetic construct
PWEGYF

SEQ ID NO: 35633 - protein, 6 aa, synthetic construct
PWEGYW

SEQ ID NO: 35634 - protein, 6 aa, synthetic construct
PWEGYY

SEQ ID NO: 35635 - protein, 6 aa, synthetic construct
PWEGVD

SEQ ID NO: 35636 - protein, 6 aa, synthetic construct
PWEGVE

SEQ ID NO: 35637 - protein, 6 aa, synthetic construct
PWEGVF

SEQ ID NO: 35638 - protein, 6 aa, synthetic construct
PWEGVW

SEQ ID NO: 35639 - protein, 6 aa, synthetic construct
PWEGVY

SEQ ID NO: 35640 - protein, 6 aa, synthetic construct
PWEHAD

SEQ ID NO: 35641 - protein, 6 aa, synthetic construct
PWEHAE

SEQ ID NO: 35642 - protein, 6 aa, synthetic construct
PWEHAF

SEQ ID NO: 35643 - protein, 6 aa, synthetic construct
PWEHAW

SEQ ID NO: 35644 - protein, 6 aa, synthetic construct
PWEHAY

SEQ ID NO: 35645 - protein, 6 aa, synthetic construct
PWEHRD

SEQ ID NO: 35646 - protein, 6 aa, synthetic construct
PWEHRE

SEQ ID NO: 35647 - protein, 6 aa, synthetic construct
PWEHRF

SEQ ID NO: 35648 - protein, 6 aa, synthetic construct
PWEHRW

SEQ ID NO: 35649 - protein, 6 aa, synthetic construct
PWEHRY

SEQ ID NO: 35650 - protein, 6 aa, synthetic construct
PWEHND

SEQ ID NO: 35651 - protein, 6 aa, synthetic construct
PWEHNE

SEQ ID NO: 35652 - protein, 6 aa, synthetic construct
PWEHNF

SEQ ID NO: 35653 - protein, 6 aa, synthetic construct
PWEHNW

SEQ ID NO: 35654 - protein, 6 aa, synthetic construct
PWEHNY

SEQ ID NO: 35655 - protein, 6 aa, synthetic construct
PWEHDD

SEQ ID NO: 35656 - protein, 6 aa, synthetic construct
PWEHDE

SEQ ID NO: 35657 - protein, 6 aa, synthetic construct
PWEHDF

SEQ ID NO: 35658 - protein, 6 aa, synthetic construct
PWEHDW

SEQ ID NO: 35659 - protein, 6 aa, synthetic construct
PWEHDY

SEQ ID NO: 35660 - protein, 6 aa, synthetic construct
PWEHCD

SEQ ID NO: 35661 - protein, 6 aa, synthetic construct
PWEHCE

SEQ ID NO: 35662 - protein, 6 aa, synthetic construct
PWEHCF

SEQ ID NO: 35663 - protein, 6 aa, synthetic construct
PWEHCW

SEQ ID NO: 35664 - protein, 6 aa, synthetic construct
PWEHCY

SEQ ID NO: 35665 - protein, 6 aa, synthetic construct
PWEHQD

SEQ ID NO: 35666 - protein, 6 aa, synthetic construct
PWEHQE

SEQ ID NO: 35667 - protein, 6 aa, synthetic construct
PWEHQF

SEQ ID NO: 35668 - protein, 6 aa, synthetic construct
PWEHQW

SEQ ID NO: 35669 - protein, 6 aa, synthetic construct
PWEHQY

SEQ ID NO: 35670 - protein, 6 aa, synthetic construct
PWEHED

SEQ ID NO: 35671 - protein, 6 aa, synthetic construct
PWEHEE

SEQ ID NO: 35672 - protein, 6 aa, synthetic construct
PWEHEF

SEQ ID NO: 35673 - protein, 6 aa, synthetic construct
PWEHEW

SEQ ID NO: 35674 - protein, 6 aa, synthetic construct
PWEHEY

SEQ ID NO: 35675 - protein, 6 aa, synthetic construct
PWEHGD

SEQ ID NO: 35676 - protein, 6 aa, synthetic construct
PWEHGE

SEQ ID NO: 35677 - protein, 6 aa, synthetic construct
PWEHGF

SEQ ID NO: 35678 - protein, 6 aa, synthetic construct
PWEHGW

SEQ ID NO: 35679 - protein, 6 aa, synthetic construct
PWEHGY

SEQ ID NO: 35680 - protein, 6 aa, synthetic construct
PWEHHD

SEQ ID NO: 35681 - protein, 6 aa, synthetic construct
PWEHHE

SEQ ID NO: 35682 - protein, 6 aa, synthetic construct
PWEHHF

SEQ ID NO: 35683 - protein, 6 aa, synthetic construct
PWEHHW

SEQ ID NO: 35684 - protein, 6 aa, synthetic construct
PWEHHY

SEQ ID NO: 35685 - protein, 6 aa, synthetic construct
PWEHID

SEQ ID NO: 35686 - protein, 6 aa, synthetic construct
PWEHIE

SEQ ID NO: 35687 - protein, 6 aa, synthetic construct
PWEHIF

SEQ ID NO: 35688 - protein, 6 aa, synthetic construct
PWEHIW

SEQ ID NO: 35689 - protein, 6 aa, synthetic construct
PWEHIY

SEQ ID NO: 35690 - protein, 6 aa, synthetic construct
PWEHLD

SEQ ID NO: 35691 - protein, 6 aa, synthetic construct
PWEHLE

SEQ ID NO: 35692 - protein, 6 aa, synthetic construct
PWEHLF

SEQ ID NO: 35693 - protein, 6 aa, synthetic construct
PWEHLW

SEQ ID NO: 35694 - protein, 6 aa, synthetic construct
PWEHLY

SEQ ID NO: 35695 - protein, 6 aa, synthetic construct
PWEHKD

SEQ ID NO: 35696 - protein, 6 aa, synthetic construct
PWEHKE

SEQ ID NO: 35697 - protein, 6 aa, synthetic construct
PWEHKF

SEQ ID NO: 35698 - protein, 6 aa, synthetic construct
PWEHKW

SEQ ID NO: 35699 - protein, 6 aa, synthetic construct
PWEHKY

SEQ ID NO: 35700 - protein, 6 aa, synthetic construct
PWEHMD

SEQ ID NO: 35701 - protein, 6 aa, synthetic construct
PWEHME

SEQ ID NO: 35702 - protein, 6 aa, synthetic construct
PWEHMF

SEQ ID NO: 35703 - protein, 6 aa, synthetic construct
PWEHMW

SEQ ID NO: 35704 - protein, 6 aa, synthetic construct
PWEHMY

SEQ ID NO: 35705 - protein, 6 aa, synthetic construct
PWEHFD

SEQ ID NO: 35706 - protein, 6 aa, synthetic construct
PWEHFE

SEQ ID NO: 35707 - protein, 6 aa, synthetic construct
PWEHFF

SEQ ID NO: 35708 - protein, 6 aa, synthetic construct
PWEHFW

SEQ ID NO: 35709 - protein, 6 aa, synthetic construct
PWEHFY

SEQ ID NO: 35710 - protein, 6 aa, synthetic construct
PWEHPD

SEQ ID NO: 35711 - protein, 6 aa, synthetic construct
PWEHPE

SEQ ID NO: 35712 - protein, 6 aa, synthetic construct
PWEHPF

SEQ ID NO: 35713 - protein, 6 aa, synthetic construct
PWEHPW

SEQ ID NO: 35714 - protein, 6 aa, synthetic construct
PWEHPY

SEQ ID NO: 35715 - protein, 6 aa, synthetic construct
PWEHSD

SEQ ID NO: 35716 - protein, 6 aa, synthetic construct
PWEHSE

SEQ ID NO: 35717 - protein, 6 aa, synthetic construct
PWEHSF

SEQ ID NO: 35718 - protein, 6 aa, synthetic construct
PWEHSW

SEQ ID NO: 35719 - protein, 6 aa, synthetic construct
PWEHSY

SEQ ID NO: 35720 - protein, 6 aa, synthetic construct
PWEHTD

SEQ ID NO: 35721 - protein, 6 aa, synthetic construct
PWEHTE

SEQ ID NO: 35722 - protein, 6 aa, synthetic construct
PWEHTF

SEQ ID NO: 35723 - protein, 6 aa, synthetic construct
PWEHTW

SEQ ID NO: 35724 - protein, 6 aa, synthetic construct
PWEHTY

SEQ ID NO: 35725 - protein, 6 aa, synthetic construct
PWEHWD

SEQ ID NO: 35726 - protein, 6 aa, synthetic construct
PWEHWE

SEQ ID NO: 35727 - protein, 6 aa, synthetic construct
PWEHWF

SEQ ID NO: 35728 - protein, 6 aa, synthetic construct
PWEHWW

SEQ ID NO: 35729 - protein, 6 aa, synthetic construct
PWEHWY

SEQ ID NO: 35730 - protein, 6 aa, synthetic construct
PWEHYD

SEQ ID NO: 35731 - protein, 6 aa, synthetic construct
PWEHYE

SEQ ID NO: 35732 - protein, 6 aa, synthetic construct
PWEHYF

SEQ ID NO: 35733 - protein, 6 aa, synthetic construct
PWEHYW

SEQ ID NO: 35734 - protein, 6 aa, synthetic construct
PWEHYY

SEQ ID NO: 35735 - protein, 6 aa, synthetic construct
PWEHVD

SEQ ID NO: 35736 - protein, 6 aa, synthetic construct
PWEHVE

SEQ ID NO: 35737 - protein, 6 aa, synthetic construct
PWEHVF

SEQ ID NO: 35738 - protein, 6 aa, synthetic construct
PWEHVW

SEQ ID NO: 35739 - protein, 6 aa, synthetic construct
PWEHVY

SEQ ID NO: 35740 - protein, 6 aa, synthetic construct
PWEIAD

SEQ ID NO: 35741 - protein, 6 aa, synthetic construct
PWEIAE

SEQ ID NO: 35742 - protein, 6 aa, synthetic construct
PWEIAF

SEQ ID NO: 35743 - protein, 6 aa, synthetic construct
PWEIAW

SEQ ID NO: 35744 - protein, 6 aa, synthetic construct
PWEIAY

SEQ ID NO: 35745 - protein, 6 aa, synthetic construct
PWEIRD

SEQ ID NO: 35746 - protein, 6 aa, synthetic construct
PWEIRE

SEQ ID NO: 35747 - protein, 6 aa, synthetic construct
PWEIRF

SEQ ID NO: 35748 - protein, 6 aa, synthetic construct
PWEIRW

SEQ ID NO: 35749 - protein, 6 aa, synthetic construct
PWEIRY

SEQ ID NO: 35750 - protein, 6 aa, synthetic construct
PWEIND

SEQ ID NO: 35751 - protein, 6 aa, synthetic construct
PWEINE

SEQ ID NO: 35752 - protein, 6 aa, synthetic construct
PWEINF

SEQ ID NO: 35753 - protein, 6 aa, synthetic construct
PWEINW

SEQ ID NO: 35754 - protein, 6 aa, synthetic construct
PWEINY

SEQ ID NO: 35755 - protein, 6 aa, synthetic construct
PWEIDD

SEQ ID NO: 35756 - protein, 6 aa, synthetic construct
PWEIDE

SEQ ID NO: 35757 - protein, 6 aa, synthetic construct
PWEIDF

SEQ ID NO: 35758 - protein, 6 aa, synthetic construct
PWEIDW

SEQ ID NO: 35759 - protein, 6 aa, synthetic construct
PWEIDY

SEQ ID NO: 35760 - protein, 6 aa, synthetic construct
PWEICD

SEQ ID NO: 35761 - protein, 6 aa, synthetic construct
PWEICE

SEQ ID NO: 35762 - protein, 6 aa, synthetic construct
PWEICF

SEQ ID NO: 35763 - protein, 6 aa, synthetic construct
PWEICW

SEQ ID NO: 35764 - protein, 6 aa, synthetic construct
PWEICY

SEQ ID NO: 35765 - protein, 6 aa, synthetic construct
PWEIQD

SEQ ID NO: 35766 - protein, 6 aa, synthetic construct
PWEIQE

SEQ ID NO: 35767 - protein, 6 aa, synthetic construct
PWEIQF

SEQ ID NO: 35768 - protein, 6 aa, synthetic construct
PWEIQW

SEQ ID NO: 35769 - protein, 6 aa, synthetic construct
PWEIQY

SEQ ID NO: 35770 - protein, 6 aa, synthetic construct
PWEIED

SEQ ID NO: 35771 - protein, 6 aa, synthetic construct
PWEIEE

SEQ ID NO: 35772 - protein, 6 aa, synthetic construct
PWEIEF

SEQ ID NO: 35773 - protein, 6 aa, synthetic construct
PWEIEW

SEQ ID NO: 35774 - protein, 6 aa, synthetic construct
PWEIEY

SEQ ID NO: 35775 - protein, 6 aa, synthetic construct
PWEIGD

SEQ ID NO: 35776 - protein, 6 aa, synthetic construct
PWEIGE

SEQ ID NO: 35777 - protein, 6 aa, synthetic construct
PWEIGF

SEQ ID NO: 35778 - protein, 6 aa, synthetic construct
PWEIGW

SEQ ID NO: 35779 - protein, 6 aa, synthetic construct
PWEIGY

SEQ ID NO: 35780 - protein, 6 aa, synthetic construct
PWEIHD

SEQ ID NO: 35781 - protein, 6 aa, synthetic construct
PWEIHE

SEQ ID NO: 35782 - protein, 6 aa, synthetic construct
PWEIHF

SEQ ID NO: 35783 - protein, 6 aa, synthetic construct
PWEIHW

SEQ ID NO: 35784 - protein, 6 aa, synthetic construct
PWEIHY

SEQ ID NO: 35785 - protein, 6 aa, synthetic construct
PWEIID

SEQ ID NO: 35786 - protein, 6 aa, synthetic construct
PWEIIE

SEQ ID NO: 35787 - protein, 6 aa, synthetic construct
PWEIIF

SEQ ID NO: 35788 - protein, 6 aa, synthetic construct
PWEIIW

SEQ ID NO: 35789 - protein, 6 aa, synthetic construct
PWEIIY

SEQ ID NO: 35790 - protein, 6 aa, synthetic construct
PWEILD

SEQ ID NO: 35791 - protein, 6 aa, synthetic construct
PWEILE

SEQ ID NO: 35792 - protein, 6 aa, synthetic construct
PWEILF

SEQ ID NO: 35793 - protein, 6 aa, synthetic construct
PWEILW

SEQ ID NO: 35794 - protein, 6 aa, synthetic construct
PWEILY

SEQ ID NO: 35795 - protein, 6 aa, synthetic construct
PWEIKD

SEQ ID NO: 35796 - protein, 6 aa, synthetic construct
PWEIKE

SEQ ID NO: 35797 - protein, 6 aa, synthetic construct
PWEIKF

SEQ ID NO: 35798 - protein, 6 aa, synthetic construct
PWEIKW

SEQ ID NO: 35799 - protein, 6 aa, synthetic construct
PWEIKY

SEQ ID NO: 35800 - protein, 6 aa, synthetic construct
PWEIMD

SEQ ID NO: 35801 - protein, 6 aa, synthetic construct
PWEIME

SEQ ID NO: 35802 - protein, 6 aa, synthetic construct
PWEIMF

SEQ ID NO: 35803 - protein, 6 aa, synthetic construct
PWEIMW

SEQ ID NO: 35804 - protein, 6 aa, synthetic construct
PWEIMY

SEQ ID NO: 35805 - protein, 6 aa, synthetic construct
PWEIFD

SEQ ID NO: 35806 - protein, 6 aa, synthetic construct
PWEIFE

SEQ ID NO: 35807 - protein, 6 aa, synthetic construct
PWEIFF

SEQ ID NO: 35808 - protein, 6 aa, synthetic construct
PWEIFW

SEQ ID NO: 35809 - protein, 6 aa, synthetic construct
PWEIFY

SEQ ID NO: 35810 - protein, 6 aa, synthetic construct
PWEIPD

SEQ ID NO: 35811 - protein, 6 aa, synthetic construct
PWEIPE

SEQ ID NO: 35812 - protein, 6 aa, synthetic construct
PWEIPF

SEQ ID NO: 35813 - protein, 6 aa, synthetic construct
PWEIPW

SEQ ID NO: 35814 - protein, 6 aa, synthetic construct
PWEIPY

SEQ ID NO: 35815 - protein, 6 aa, synthetic construct
PWEISD

SEQ ID NO: 35816 - protein, 6 aa, synthetic construct
PWEISE

SEQ ID NO: 35817 - protein, 6 aa, synthetic construct
PWEISF

SEQ ID NO: 35818 - protein, 6 aa, synthetic construct
PWEISW

SEQ ID NO: 35819 - protein, 6 aa, synthetic construct
PWEISY

SEQ ID NO: 35820 - protein, 6 aa, synthetic construct
PWEITD

SEQ ID NO: 35821 - protein, 6 aa, synthetic construct
PWEITE

SEQ ID NO: 35822 - protein, 6 aa, synthetic construct
PWEITF

SEQ ID NO: 35823 - protein, 6 aa, synthetic construct
PWEITW

SEQ ID NO: 35824 - protein, 6 aa, synthetic construct
PWEITY

SEQ ID NO: 35825 - protein, 6 aa, synthetic construct
PWEIWD

SEQ ID NO: 35826 - protein, 6 aa, synthetic construct
PWEIWE

SEQ ID NO: 35827 - protein, 6 aa, synthetic construct
PWEIWF

SEQ ID NO: 35828 - protein, 6 aa, synthetic construct
PWEIWW

SEQ ID NO: 35829 - protein, 6 aa, synthetic construct
PWEIWY

SEQ ID NO: 35830 - protein, 6 aa, synthetic construct
PWEIYD

SEQ ID NO: 35831 - protein, 6 aa, synthetic construct
PWEIYE

SEQ ID NO: 35832 - protein, 6 aa, synthetic construct
PWEIYF

SEQ ID NO: 35833 - protein, 6 aa, synthetic construct
PWEIYW

SEQ ID NO: 35834 - protein, 6 aa, synthetic construct
PWEIYY

SEQ ID NO: 35835 - protein, 6 aa, synthetic construct
PWEIVD

SEQ ID NO: 35836 - protein, 6 aa, synthetic construct
PWEIVE

SEQ ID NO: 35837 - protein, 6 aa, synthetic construct
PWEIVF

SEQ ID NO: 35838 - protein, 6 aa, synthetic construct
PWEIVW

SEQ ID NO: 35839 - protein, 6 aa, synthetic construct
PWEIVY

SEQ ID NO: 35840 - protein, 6 aa, synthetic construct
PWELAD

SEQ ID NO: 35841 - protein, 6 aa, synthetic construct
PWELAE

SEQ ID NO: 35842 - protein, 6 aa, synthetic construct
PWELAF

SEQ ID NO: 35843 - protein, 6 aa, synthetic construct
PWELAW

SEQ ID NO: 35844 - protein, 6 aa, synthetic construct
PWELAY

SEQ ID NO: 35845 - protein, 6 aa, synthetic construct
PWELRD

SEQ ID NO: 35846 - protein, 6 aa, synthetic construct
PWELRE

SEQ ID NO: 35847 - protein, 6 aa, synthetic construct
PWELRF

SEQ ID NO: 35848 - protein, 6 aa, synthetic construct
PWELRW

SEQ ID NO: 35849 - protein, 6 aa, synthetic construct
PWELRY

SEQ ID NO: 35850 - protein, 6 aa, synthetic construct
PWELND

SEQ ID NO: 35851 - protein, 6 aa, synthetic construct
PWELNE

SEQ ID NO: 35852 - protein, 6 aa, synthetic construct
PWELNF

SEQ ID NO: 35853 - protein, 6 aa, synthetic construct
PWELNW

SEQ ID NO: 35854 - protein, 6 aa, synthetic construct
PWELNY

SEQ ID NO: 35855 - protein, 6 aa, synthetic construct
PWELDD

SEQ ID NO: 35856 - protein, 6 aa, synthetic construct
PWELDE

SEQ ID NO: 35857 - protein, 6 aa, synthetic construct
PWELDF

SEQ ID NO: 35858 - protein, 6 aa, synthetic construct
PWELDW

SEQ ID NO: 35859 - protein, 6 aa, synthetic construct
PWELDY

SEQ ID NO: 35860 - protein, 6 aa, synthetic construct
PWELCD

SEQ ID NO: 35861 - protein, 6 aa, synthetic construct
PWELCE

SEQ ID NO: 35862 - protein, 6 aa, synthetic construct
PWELCF

SEQ ID NO: 35863 - protein, 6 aa, synthetic construct
PWELCW

SEQ ID NO: 35864 - protein, 6 aa, synthetic construct
PWELCY

SEQ ID NO: 35865 - protein, 6 aa, synthetic construct
PWELQD

SEQ ID NO: 35866 - protein, 6 aa, synthetic construct
PWELQE

SEQ ID NO: 35867 - protein, 6 aa, synthetic construct
PWELQF

SEQ ID NO: 35868 - protein, 6 aa, synthetic construct
PWELQW

SEQ ID NO: 35869 - protein, 6 aa, synthetic construct
PWELQY

SEQ ID NO: 35870 - protein, 6 aa, synthetic construct
PWELED

SEQ ID NO: 35871 - protein, 6 aa, synthetic construct
PWELEE

SEQ ID NO: 35872 - protein, 6 aa, synthetic construct
PWELEF

SEQ ID NO: 35873 - protein, 6 aa, synthetic construct
PWELEW

SEQ ID NO: 35874 - protein, 6 aa, synthetic construct
PWELEY

SEQ ID NO: 35875 - protein, 6 aa, synthetic construct
PWELGD

SEQ ID NO: 35876 - protein, 6 aa, synthetic construct
PWELGE

SEQ ID NO: 35877 - protein, 6 aa, synthetic construct
PWELGF

SEQ ID NO: 35878 - protein, 6 aa, synthetic construct
PWELGW

SEQ ID NO: 35879 - protein, 6 aa, synthetic construct
PWELGY

SEQ ID NO: 35880 - protein, 6 aa, synthetic construct
PWELHD

SEQ ID NO: 35881 - protein, 6 aa, synthetic construct
PWELHE

SEQ ID NO: 35882 - protein, 6 aa, synthetic construct
PWELHF

SEQ ID NO: 35883 - protein, 6 aa, synthetic construct
PWELHW

SEQ ID NO: 35884 - protein, 6 aa, synthetic construct
PWELHY

SEQ ID NO: 35885 - protein, 6 aa, synthetic construct
PWELID

SEQ ID NO: 35886 - protein, 6 aa, synthetic construct
PWELIE

SEQ ID NO: 35887 - protein, 6 aa, synthetic construct
PWELIF

SEQ ID NO: 35888 - protein, 6 aa, synthetic construct
PWELIW

SEQ ID NO: 35889 - protein, 6 aa, synthetic construct
PWELIY

SEQ ID NO: 35890 - protein, 6 aa, synthetic construct
PWELLD

SEQ ID NO: 35891 - protein, 6 aa, synthetic construct
PWELLE

SEQ ID NO: 35892 - protein, 6 aa, synthetic construct
PWELLF

SEQ ID NO: 35893 - protein, 6 aa, synthetic construct
PWELLW

SEQ ID NO: 35894 - protein, 6 aa, synthetic construct
PWELLY

SEQ ID NO: 35895 - protein, 6 aa, synthetic construct
PWELKD

SEQ ID NO: 35896 - protein, 6 aa, synthetic construct
PWELKE

SEQ ID NO: 35897 - protein, 6 aa, synthetic construct
PWELKF

SEQ ID NO: 35898 - protein, 6 aa, synthetic construct
PWELKW

SEQ ID NO: 35899 - protein, 6 aa, synthetic construct
PWELKY

SEQ ID NO: 35900 - protein, 6 aa, synthetic construct
PWELMD

SEQ ID NO: 35901 - protein, 6 aa, synthetic construct
PWELME

SEQ ID NO: 35902 - protein, 6 aa, synthetic construct
PWELMF

SEQ ID NO: 35903 - protein, 6 aa, synthetic construct
PWELMW

SEQ ID NO: 35904 - protein, 6 aa, synthetic construct
PWELMY

SEQ ID NO: 35905 - protein, 6 aa, synthetic construct
PWELFD

SEQ ID NO: 35906 - protein, 6 aa, synthetic construct
PWELFE

SEQ ID NO: 35907 - protein, 6 aa, synthetic construct
PWELFF

SEQ ID NO: 35908 - protein, 6 aa, synthetic construct
PWELFW

SEQ ID NO: 35909 - protein, 6 aa, synthetic construct
PWELFY

SEQ ID NO: 35910 - protein, 6 aa, synthetic construct
PWELPD

SEQ ID NO: 35911 - protein, 6 aa, synthetic construct
PWELPE

SEQ ID NO: 35912 - protein, 6 aa, synthetic construct
PWELPF

SEQ ID NO: 35913 - protein, 6 aa, synthetic construct
PWELPW

SEQ ID NO: 35914 - protein, 6 aa, synthetic construct
PWELPY

SEQ ID NO: 35915 - protein, 6 aa, synthetic construct
PWELSD

SEQ ID NO: 35916 - protein, 6 aa, synthetic construct
PWELSE

SEQ ID NO: 35917 - protein, 6 aa, synthetic construct
PWELSF

SEQ ID NO: 35918 - protein, 6 aa, synthetic construct
PWELSW

SEQ ID NO: 35919 - protein, 6 aa, synthetic construct
PWELSY

SEQ ID NO: 35920 - protein, 6 aa, synthetic construct
PWELTD

SEQ ID NO: 35921 - protein, 6 aa, synthetic construct
PWELTE

SEQ ID NO: 35922 - protein, 6 aa, synthetic construct
PWELTF

SEQ ID NO: 35923 - protein, 6 aa, synthetic construct
PWELTW

SEQ ID NO: 35924 - protein, 6 aa, synthetic construct
PWELTY

SEQ ID NO: 35925 - protein, 6 aa, synthetic construct
PWELWD

SEQ ID NO: 35926 - protein, 6 aa, synthetic construct
PWELWE

SEQ ID NO: 35927 - protein, 6 aa, synthetic construct
PWELWF

SEQ ID NO: 35928 - protein, 6 aa, synthetic construct
PWELWW

SEQ ID NO: 35929 - protein, 6 aa, synthetic construct
PWELWY

SEQ ID NO: 35930 - protein, 6 aa, synthetic construct
PWELYD

SEQ ID NO: 35931 - protein, 6 aa, synthetic construct
PWELYE

SEQ ID NO: 35932 - protein, 6 aa, synthetic construct
PWELYF

SEQ ID NO: 35933 - protein, 6 aa, synthetic construct
PWELYW

SEQ ID NO: 35934 - protein, 6 aa, synthetic construct
PWELYY

SEQ ID NO: 35935 - protein, 6 aa, synthetic construct
PWELVD

SEQ ID NO: 35936 - protein, 6 aa, synthetic construct
PWELVE

SEQ ID NO: 35937 - protein, 6 aa, synthetic construct
PWELVF

SEQ ID NO: 35938 - protein, 6 aa, synthetic construct
PWELVW

SEQ ID NO: 35939 - protein, 6 aa, synthetic construct
PWELVY

SEQ ID NO: 35940 - protein, 6 aa, synthetic construct
PWEKAD

SEQ ID NO: 35941 - protein, 6 aa, synthetic construct
PWEKAE

SEQ ID NO: 35942 - protein, 6 aa, synthetic construct
PWEKAF

SEQ ID NO: 35943 - protein, 6 aa, synthetic construct
PWEKAW

SEQ ID NO: 35944 - protein, 6 aa, synthetic construct
PWEKAY

SEQ ID NO: 35945 - protein, 6 aa, synthetic construct
PWEKRD

SEQ ID NO: 35946 - protein, 6 aa, synthetic construct
PWEKRE

SEQ ID NO: 35947 - protein, 6 aa, synthetic construct
PWEKRF

SEQ ID NO: 35948 - protein, 6 aa, synthetic construct
PWEKRW

SEQ ID NO: 35949 - protein, 6 aa, synthetic construct
PWEKRY

SEQ ID NO: 35950 - protein, 6 aa, synthetic construct
PWEKND

SEQ ID NO: 35951 - protein, 6 aa, synthetic construct
PWEKNE

SEQ ID NO: 35952 - protein, 6 aa, synthetic construct
PWEKNF

SEQ ID NO: 35953 - protein, 6 aa, synthetic construct
PWEKNW

SEQ ID NO: 35954 - protein, 6 aa, synthetic construct
PWEKNY

SEQ ID NO: 35955 - protein, 6 aa, synthetic construct
PWEKDD

SEQ ID NO: 35956 - protein, 6 aa, synthetic construct
PWEKDE

SEQ ID NO: 35957 - protein, 6 aa, synthetic construct
PWEKDF

SEQ ID NO: 35958 - protein, 6 aa, synthetic construct
PWEKDW

SEQ ID NO: 35959 - protein, 6 aa, synthetic construct
PWEKDY

SEQ ID NO: 35960 - protein, 6 aa, synthetic construct
PWEKCD

SEQ ID NO: 35961 - protein, 6 aa, synthetic construct
PWEKCE

SEQ ID NO: 35962 - protein, 6 aa, synthetic construct
PWEKCF

SEQ ID NO: 35963 - protein, 6 aa, synthetic construct
PWEKCW

SEQ ID NO: 35964 - protein, 6 aa, synthetic construct
PWEKCY

SEQ ID NO: 35965 - protein, 6 aa, synthetic construct
PWEKQD

SEQ ID NO: 35966 - protein, 6 aa, synthetic construct
PWEKQE

SEQ ID NO: 35967 - protein, 6 aa, synthetic construct
PWEKQF

SEQ ID NO: 35968 - protein, 6 aa, synthetic construct
PWEKQW

SEQ ID NO: 35969 - protein, 6 aa, synthetic construct
PWEKQY

SEQ ID NO: 35970 - protein, 6 aa, synthetic construct
PWEKED

SEQ ID NO: 35971 - protein, 6 aa, synthetic construct
PWEKEE

SEQ ID NO: 35972 - protein, 6 aa, synthetic construct
PWEKEF

SEQ ID NO: 35973 - protein, 6 aa, synthetic construct
PWEKEW

SEQ ID NO: 35974 - protein, 6 aa, synthetic construct
PWEKEY

SEQ ID NO: 35975 - protein, 6 aa, synthetic construct
PWEKGD

SEQ ID NO: 35976 - protein, 6 aa, synthetic construct
PWEKGE

SEQ ID NO: 35977 - protein, 6 aa, synthetic construct
PWEKGF

SEQ ID NO: 35978 - protein, 6 aa, synthetic construct
PWEKGW

SEQ ID NO: 35979 - protein, 6 aa, synthetic construct
PWEKGY

SEQ ID NO: 35980 - protein, 6 aa, synthetic construct
PWEKHD

SEQ ID NO: 35981 - protein, 6 aa, synthetic construct
PWEKHE

SEQ ID NO: 35982 - protein, 6 aa, synthetic construct
PWEKHF

SEQ ID NO: 35983 - protein, 6 aa, synthetic construct
PWEKHW

SEQ ID NO: 35984 - protein, 6 aa, synthetic construct
PWEKHY

SEQ ID NO: 35985 - protein, 6 aa, synthetic construct
PWEKID

SEQ ID NO: 35986 - protein, 6 aa, synthetic construct
PWEKIE

SEQ ID NO: 35987 - protein, 6 aa, synthetic construct
PWEKIF

SEQ ID NO: 35988 - protein, 6 aa, synthetic construct
PWEKIW

SEQ ID NO: 35989 - protein, 6 aa, synthetic construct
PWEKIY

SEQ ID NO: 35990 - protein, 6 aa, synthetic construct
PWEKLD

SEQ ID NO: 35991 - protein, 6 aa, synthetic construct
PWEKLE

SEQ ID NO: 35992 - protein, 6 aa, synthetic construct
PWEKLF

SEQ ID NO: 35993 - protein, 6 aa, synthetic construct
PWEKLW

SEQ ID NO: 35994 - protein, 6 aa, synthetic construct
PWEKLY

SEQ ID NO: 35995 - protein, 6 aa, synthetic construct
PWEKKD

SEQ ID NO: 35996 - protein, 6 aa, synthetic construct
PWEKKE

SEQ ID NO: 35997 - protein, 6 aa, synthetic construct
PWEKKF

SEQ ID NO: 35998 - protein, 6 aa, synthetic construct
PWEKKW

SEQ ID NO: 35999 - protein, 6 aa, synthetic construct
PWEKKY

SEQ ID NO: 36000 - protein, 6 aa, synthetic construct
PWEKMD

SEQ ID NO: 36001 - protein, 6 aa, synthetic construct
PWEKME

SEQ ID NO: 36002 - protein, 6 aa, synthetic construct
PWEKMF

SEQ ID NO: 36003 - protein, 6 aa, synthetic construct
PWEKMW

SEQ ID NO: 36004 - protein, 6 aa, synthetic construct
PWEKMY

SEQ ID NO: 36005 - protein, 6 aa, synthetic construct
PWEKFD

SEQ ID NO: 36006 - protein, 6 aa, synthetic construct
PWEKFE

SEQ ID NO: 36007 - protein, 6 aa, synthetic construct
PWEKFF

SEQ ID NO: 36008 - protein, 6 aa, synthetic construct
PWEKFW

SEQ ID NO: 36009 - protein, 6 aa, synthetic construct
PWEKFY

SEQ ID NO: 36010 - protein, 6 aa, synthetic construct
PWEKPD

SEQ ID NO: 36011 - protein, 6 aa, synthetic construct
PWEKPE

SEQ ID NO: 36012 - protein, 6 aa, synthetic construct
PWEKPF

SEQ ID NO: 36013 - protein, 6 aa, synthetic construct
PWEKPW

SEQ ID NO: 36014 - protein, 6 aa, synthetic construct
PWEKPY

SEQ ID NO: 36015 - protein, 6 aa, synthetic construct
PWEKSD

SEQ ID NO: 36016 - protein, 6 aa, synthetic construct
PWEKSE

SEQ ID NO: 36017 - protein, 6 aa, synthetic construct
PWEKSF

SEQ ID NO: 36018 - protein, 6 aa, synthetic construct
PWEKSW

SEQ ID NO: 36019 - protein, 6 aa, synthetic construct
PWEKSY

SEQ ID NO: 36020 - protein, 6 aa, synthetic construct
PWEKTD

SEQ ID NO: 36021 - protein, 6 aa, synthetic construct
PWEKTE

SEQ ID NO: 36022 - protein, 6 aa, synthetic construct
PWEKTF

SEQ ID NO: 36023 - protein, 6 aa, synthetic construct
PWEKTW

SEQ ID NO: 36024 - protein, 6 aa, synthetic construct
PWEKTY

SEQ ID NO: 36025 - protein, 6 aa, synthetic construct
PWEKWD

SEQ ID NO: 36026 - protein, 6 aa, synthetic construct
PWEKWE

SEQ ID NO: 36027 - protein, 6 aa, synthetic construct
PWEKWF

SEQ ID NO: 36028 - protein, 6 aa, synthetic construct
PWEKWW

SEQ ID NO: 36029 - protein, 6 aa, synthetic construct
PWEKWY

SEQ ID NO: 36030 - protein, 6 aa, synthetic construct
PWEKYD

SEQ ID NO: 36031 - protein, 6 aa, synthetic construct
PWEKYE

SEQ ID NO: 36032 - protein, 6 aa, synthetic construct
PWEKYF

SEQ ID NO: 36033 - protein, 6 aa, synthetic construct
PWEKYW

SEQ ID NO: 36034 - protein, 6 aa, synthetic construct
PWEKYY

SEQ ID NO: 36035 - protein, 6 aa, synthetic construct
PWEKVD

SEQ ID NO: 36036 - protein, 6 aa, synthetic construct
PWEKVE

SEQ ID NO: 36037 - protein, 6 aa, synthetic construct
PWEKVF

SEQ ID NO: 36038 - protein, 6 aa, synthetic construct
PWEKVW

SEQ ID NO: 36039 - protein, 6 aa, synthetic construct
PWEKVY

SEQ ID NO: 36040 - protein, 6 aa, synthetic construct
PWEMAD

SEQ ID NO: 36041 - protein, 6 aa, synthetic construct
PWEMAE

SEQ ID NO: 36042 - protein, 6 aa, synthetic construct
PWEMAF

SEQ ID NO: 36043 - protein, 6 aa, synthetic construct
PWEMAW

SEQ ID NO: 36044 - protein, 6 aa, synthetic construct
PWEMAY

SEQ ID NO: 36045 - protein, 6 aa, synthetic construct
PWEMRD

SEQ ID NO: 36046 - protein, 6 aa, synthetic construct
PWEMRE

SEQ ID NO: 36047 - protein, 6 aa, synthetic construct
PWEMRF

SEQ ID NO: 36048 - protein, 6 aa, synthetic construct
PWEMRW

SEQ ID NO: 36049 - protein, 6 aa, synthetic construct
PWEMRY

SEQ ID NO: 36050 - protein, 6 aa, synthetic construct
PWEMND

SEQ ID NO: 36051 - protein, 6 aa, synthetic construct
PWEMNE

SEQ ID NO: 36052 - protein, 6 aa, synthetic construct
PWEMNF

SEQ ID NO: 36053 - protein, 6 aa, synthetic construct
PWEMNW

SEQ ID NO: 36054 - protein, 6 aa, synthetic construct
PWEMNY

SEQ ID NO: 36055 - protein, 6 aa, synthetic construct
PWEMDD

SEQ ID NO: 36056 - protein, 6 aa, synthetic construct
PWEMDE

SEQ ID NO: 36057 - protein, 6 aa, synthetic construct
PWEMDF

SEQ ID NO: 36058 - protein, 6 aa, synthetic construct
PWEMDW

SEQ ID NO: 36059 - protein, 6 aa, synthetic construct
PWEMDY

SEQ ID NO: 36060 - protein, 6 aa, synthetic construct
PWEMCD

SEQ ID NO: 36061 - protein, 6 aa, synthetic construct
PWEMCE

SEQ ID NO: 36062 - protein, 6 aa, synthetic construct
PWEMCF

SEQ ID NO: 36063 - protein, 6 aa, synthetic construct
PWEMCW

SEQ ID NO: 36064 - protein, 6 aa, synthetic construct
PWEMCY

SEQ ID NO: 36065 - protein, 6 aa, synthetic construct
PWEMQD

SEQ ID NO: 36066 - protein, 6 aa, synthetic construct
PWEMQE

SEQ ID NO: 36067 - protein, 6 aa, synthetic construct
PWEMQF

SEQ ID NO: 36068 - protein, 6 aa, synthetic construct
PWEMQW

SEQ ID NO: 36069 - protein, 6 aa, synthetic construct
PWEMQY

SEQ ID NO: 36070 - protein, 6 aa, synthetic construct
PWEMED

SEQ ID NO: 36071 - protein, 6 aa, synthetic construct
PWEMEE

SEQ ID NO: 36072 - protein, 6 aa, synthetic construct
PWEMEF

SEQ ID NO: 36073 - protein, 6 aa, synthetic construct
PWEMEW

SEQ ID NO: 36074 - protein, 6 aa, synthetic construct
PWEMEY

SEQ ID NO: 36075 - protein, 6 aa, synthetic construct
PWEMGD

SEQ ID NO: 36076 - protein, 6 aa, synthetic construct
PWEMGE

SEQ ID NO: 36077 - protein, 6 aa, synthetic construct
PWEMGF

SEQ ID NO: 36078 - protein, 6 aa, synthetic construct
PWEMGW

SEQ ID NO: 36079 - protein, 6 aa, synthetic construct
PWEMGY

SEQ ID NO: 36080 - protein, 6 aa, synthetic construct
PWEMHD

SEQ ID NO: 36081 - protein, 6 aa, synthetic construct
PWEMHE

SEQ ID NO: 36082 - protein, 6 aa, synthetic construct
PWEMHF

SEQ ID NO: 36083 - protein, 6 aa, synthetic construct
PWEMHW

SEQ ID NO: 36084 - protein, 6 aa, synthetic construct
PWEMHY

SEQ ID NO: 36085 - protein, 6 aa, synthetic construct
PWEMID

SEQ ID NO: 36086 - protein, 6 aa, synthetic construct
PWEMIE

SEQ ID NO: 36087 - protein, 6 aa, synthetic construct
PWEMIF

SEQ ID NO: 36088 - protein, 6 aa, synthetic construct
PWEMIW

SEQ ID NO: 36089 - protein, 6 aa, synthetic construct
PWEMIY

SEQ ID NO: 36090 - protein, 6 aa, synthetic construct
PWEMLD

SEQ ID NO: 36091 - protein, 6 aa, synthetic construct
PWEMLE

SEQ ID NO: 36092 - protein, 6 aa, synthetic construct
PWEMLF

SEQ ID NO: 36093 - protein, 6 aa, synthetic construct
PWEMLW

SEQ ID NO: 36094 - protein, 6 aa, synthetic construct
PWEMLY

SEQ ID NO: 36095 - protein, 6 aa, synthetic construct
PWEMKD

SEQ ID NO: 36096 - protein, 6 aa, synthetic construct
PWEMKE

SEQ ID NO: 36097 - protein, 6 aa, synthetic construct
PWEMKF

SEQ ID NO: 36098 - protein, 6 aa, synthetic construct
PWEMKW

SEQ ID NO: 36099 - protein, 6 aa, synthetic construct
PWEMKY

SEQ ID NO: 36100 - protein, 6 aa, synthetic construct
PWEMMD

SEQ ID NO: 36101 - protein, 6 aa, synthetic construct
PWEMME

SEQ ID NO: 36102 - protein, 6 aa, synthetic construct
PWEMMF

SEQ ID NO: 36103 - protein, 6 aa, synthetic construct
PWEMMW

SEQ ID NO: 36104 - protein, 6 aa, synthetic construct
PWEMMY

SEQ ID NO: 36105 - protein, 6 aa, synthetic construct
PWEMFD

SEQ ID NO: 36106 - protein, 6 aa, synthetic construct
PWEMFE

SEQ ID NO: 36107 - protein, 6 aa, synthetic construct
PWEMFF

SEQ ID NO: 36108 - protein, 6 aa, synthetic construct
PWEMFW

SEQ ID NO: 36109 - protein, 6 aa, synthetic construct
PWEMFY

SEQ ID NO: 36110 - protein, 6 aa, synthetic construct
PWEMPD

SEQ ID NO: 36111 - protein, 6 aa, synthetic construct
PWEMPE

SEQ ID NO: 36112 - protein, 6 aa, synthetic construct
PWEMPF

SEQ ID NO: 36113 - protein, 6 aa, synthetic construct
PWEMPW

SEQ ID NO: 36114 - protein, 6 aa, synthetic construct
PWEMPY

SEQ ID NO: 36115 - protein, 6 aa, synthetic construct
PWEMSD

SEQ ID NO: 36116 - protein, 6 aa, synthetic construct
PWEMSE

SEQ ID NO: 36117 - protein, 6 aa, synthetic construct
PWEMSF

SEQ ID NO: 36118 - protein, 6 aa, synthetic construct
PWEMSW

SEQ ID NO: 36119 - protein, 6 aa, synthetic construct
PWEMSY

SEQ ID NO: 36120 - protein, 6 aa, synthetic construct
PWEMTD

SEQ ID NO: 36121 - protein, 6 aa, synthetic construct
PWEMTE

SEQ ID NO: 36122 - protein, 6 aa, synthetic construct
PWEMTF

SEQ ID NO: 36123 - protein, 6 aa, synthetic construct
PWEMTW

SEQ ID NO: 36124 - protein, 6 aa, synthetic construct
PWEMTY

SEQ ID NO: 36125 - protein, 6 aa, synthetic construct
PWEMWD

SEQ ID NO: 36126 - protein, 6 aa, synthetic construct
PWEMWE

SEQ ID NO: 36127 - protein, 6 aa, synthetic construct
PWEMWF

SEQ ID NO: 36128 - protein, 6 aa, synthetic construct
PWEMWW

SEQ ID NO: 36129 - protein, 6 aa, synthetic construct
PWEMWY

SEQ ID NO: 36130 - protein, 6 aa, synthetic construct
PWEMYD

SEQ ID NO: 36131 - protein, 6 aa, synthetic construct
PWEMYE

SEQ ID NO: 36132 - protein, 6 aa, synthetic construct
PWEMYF

SEQ ID NO: 36133 - protein, 6 aa, synthetic construct
PWEMYW

SEQ ID NO: 36134 - protein, 6 aa, synthetic construct
PWEMYY

SEQ ID NO: 36135 - protein, 6 aa, synthetic construct
PWEMVD

SEQ ID NO: 36136 - protein, 6 aa, synthetic construct
PWEMVE

SEQ ID NO: 36137 - protein, 6 aa, synthetic construct
PWEMVF

SEQ ID NO: 36138 - protein, 6 aa, synthetic construct
PWEMVW

SEQ ID NO: 36139 - protein, 6 aa, synthetic construct
PWEMVY

SEQ ID NO: 36140 - protein, 6 aa, synthetic construct
PWEFAD

SEQ ID NO: 36141 - protein, 6 aa, synthetic construct
PWEFAE

SEQ ID NO: 36142 - protein, 6 aa, synthetic construct
PWEFAF

SEQ ID NO: 36143 - protein, 6 aa, synthetic construct
PWEFAW

SEQ ID NO: 36144 - protein, 6 aa, synthetic construct
PWEFAY

SEQ ID NO: 36145 - protein, 6 aa, synthetic construct
PWEFRD

SEQ ID NO: 36146 - protein, 6 aa, synthetic construct
PWEFRE

SEQ ID NO: 36147 - protein, 6 aa, synthetic construct
PWEFRF

SEQ ID NO: 36148 - protein, 6 aa, synthetic construct
PWEFRW

SEQ ID NO: 36149 - protein, 6 aa, synthetic construct
PWEFRY

SEQ ID NO: 36150 - protein, 6 aa, synthetic construct
PWEFND

SEQ ID NO: 36151 - protein, 6 aa, synthetic construct
PWEFNE

SEQ ID NO: 36152 - protein, 6 aa, synthetic construct
PWEFNF

SEQ ID NO: 36153 - protein, 6 aa, synthetic construct
PWEFNW

SEQ ID NO: 36154 - protein, 6 aa, synthetic construct
PWEFNY

SEQ ID NO: 36155 - protein, 6 aa, synthetic construct
PWEFDD

SEQ ID NO: 36156 - protein, 6 aa, synthetic construct
PWEFDE

SEQ ID NO: 36157 - protein, 6 aa, synthetic construct
PWEFDF

SEQ ID NO: 36158 - protein, 6 aa, synthetic construct
PWEFDW

SEQ ID NO: 36159 - protein, 6 aa, synthetic construct
PWEFDY

SEQ ID NO: 36160 - protein, 6 aa, synthetic construct
PWEFCD

SEQ ID NO: 36161 - protein, 6 aa, synthetic construct
PWEFCE

SEQ ID NO: 36162 - protein, 6 aa, synthetic construct
PWEFCF

SEQ ID NO: 36163 - protein, 6 aa, synthetic construct
PWEFCW

SEQ ID NO: 36164 - protein, 6 aa, synthetic construct
PWEFCY

SEQ ID NO: 36165 - protein, 6 aa, synthetic construct
PWEFQD

SEQ ID NO: 36166 - protein, 6 aa, synthetic construct
PWEFQE

SEQ ID NO: 36167 - protein, 6 aa, synthetic construct
PWEFQF

SEQ ID NO: 36168 - protein, 6 aa, synthetic construct
PWEFQW

SEQ ID NO: 36169 - protein, 6 aa, synthetic construct
PWEFQY

SEQ ID NO: 36170 - protein, 6 aa, synthetic construct
PWEFED

SEQ ID NO: 36171 - protein, 6 aa, synthetic construct
PWEFEE

SEQ ID NO: 36172 - protein, 6 aa, synthetic construct
PWEFEF

SEQ ID NO: 36173 - protein, 6 aa, synthetic construct
PWEFEW

SEQ ID NO: 36174 - protein, 6 aa, synthetic construct
PWEFEY

SEQ ID NO: 36175 - protein, 6 aa, synthetic construct
PWEFGD

SEQ ID NO: 36176 - protein, 6 aa, synthetic construct
PWEFGE

SEQ ID NO: 36177 - protein, 6 aa, synthetic construct
PWEFGF

SEQ ID NO: 36178 - protein, 6 aa, synthetic construct
PWEFGW

SEQ ID NO: 36179 - protein, 6 aa, synthetic construct
PWEFGY

SEQ ID NO: 36180 - protein, 6 aa, synthetic construct
PWEFHD

SEQ ID NO: 36181 - protein, 6 aa, synthetic construct
PWEFHE

SEQ ID NO: 36182 - protein, 6 aa, synthetic construct
PWEFHF

SEQ ID NO: 36183 - protein, 6 aa, synthetic construct
PWEFHW

SEQ ID NO: 36184 - protein, 6 aa, synthetic construct
PWEFHY

SEQ ID NO: 36185 - protein, 6 aa, synthetic construct
PWEFID

SEQ ID NO: 36186 - protein, 6 aa, synthetic construct
PWEFIE

SEQ ID NO: 36187 - protein, 6 aa, synthetic construct
PWEFIF

SEQ ID NO: 36188 - protein, 6 aa, synthetic construct
PWEFIW

SEQ ID NO: 36189 - protein, 6 aa, synthetic construct
PWEFIY

SEQ ID NO: 36190 - protein, 6 aa, synthetic construct
PWEFLD

SEQ ID NO: 36191 - protein, 6 aa, synthetic construct
PWEFLE

SEQ ID NO: 36192 - protein, 6 aa, synthetic construct
PWEFLF

SEQ ID NO: 36193 - protein, 6 aa, synthetic construct
PWEFLW

SEQ ID NO: 36194 - protein, 6 aa, synthetic construct
PWEFLY

SEQ ID NO: 36195 - protein, 6 aa, synthetic construct
PWEFKD

SEQ ID NO: 36196 - protein, 6 aa, synthetic construct
PWEFKE

SEQ ID NO: 36197 - protein, 6 aa, synthetic construct
PWEFKF

SEQ ID NO: 36198 - protein, 6 aa, synthetic construct
PWEFKW

SEQ ID NO: 36199 - protein, 6 aa, synthetic construct
PWEFKY

SEQ ID NO: 36200 - protein, 6 aa, synthetic construct
PWEFMD

SEQ ID NO: 36201 - protein, 6 aa, synthetic construct
PWEFME

SEQ ID NO: 36202 - protein, 6 aa, synthetic construct
PWEFMF

SEQ ID NO: 36203 - protein, 6 aa, synthetic construct
PWEFMW

SEQ ID NO: 36204 - protein, 6 aa, synthetic construct
PWEFMY

SEQ ID NO: 36205 - protein, 6 aa, synthetic construct
PWEFFD

SEQ ID NO: 36206 - protein, 6 aa, synthetic construct
PWEFFE

SEQ ID NO: 36207 - protein, 6 aa, synthetic construct
PWEFFF

SEQ ID NO: 36208 - protein, 6 aa, synthetic construct
PWEFFW

SEQ ID NO: 36209 - protein, 6 aa, synthetic construct
PWEFFY

SEQ ID NO: 36210 - protein, 6 aa, synthetic construct
PWEFPD

SEQ ID NO: 36211 - protein, 6 aa, synthetic construct
PWEFPE

SEQ ID NO: 36212 - protein, 6 aa, synthetic construct
PWEFPF

SEQ ID NO: 36213 - protein, 6 aa, synthetic construct
PWEFPW

SEQ ID NO: 36214 - protein, 6 aa, synthetic construct
PWEFPY

SEQ ID NO: 36215 - protein, 6 aa, synthetic construct
PWEFSD

SEQ ID NO: 36216 - protein, 6 aa, synthetic construct
PWEFSE

SEQ ID NO: 36217 - protein, 6 aa, synthetic construct
PWEFSF

SEQ ID NO: 36218 - protein, 6 aa, synthetic construct
PWEFSW

SEQ ID NO: 36219 - protein, 6 aa, synthetic construct
PWEFSY

SEQ ID NO: 36220 - protein, 6 aa, synthetic construct
PWEFTD

SEQ ID NO: 36221 - protein, 6 aa, synthetic construct
PWEFTE

SEQ ID NO: 36222 - protein, 6 aa, synthetic construct
PWEFTF

SEQ ID NO: 36223 - protein, 6 aa, synthetic construct
PWEFTW

SEQ ID NO: 36224 - protein, 6 aa, synthetic construct
PWEFTY

SEQ ID NO: 36225 - protein, 6 aa, synthetic construct
PWEFWD

SEQ ID NO: 36226 - protein, 6 aa, synthetic construct
PWEFWE

SEQ ID NO: 36227 - protein, 6 aa, synthetic construct
PWEFWF

SEQ ID NO: 36228 - protein, 6 aa, synthetic construct
PWEFWW

SEQ ID NO: 36229 - protein, 6 aa, synthetic construct
PWEFWY

SEQ ID NO: 36230 - protein, 6 aa, synthetic construct
PWEFYD

SEQ ID NO: 36231 - protein, 6 aa, synthetic construct
PWEFYE

SEQ ID NO: 36232 - protein, 6 aa, synthetic construct
PWEFYF

SEQ ID NO: 36233 - protein, 6 aa, synthetic construct
PWEFYW

SEQ ID NO: 36234 - protein, 6 aa, synthetic construct
PWEFYY

SEQ ID NO: 36235 - protein, 6 aa, synthetic construct
PWEFVD

SEQ ID NO: 36236 - protein, 6 aa, synthetic construct
PWEFVE

SEQ ID NO: 36237 - protein, 6 aa, synthetic construct
PWEFVF

SEQ ID NO: 36238 - protein, 6 aa, synthetic construct
PWEFVW

SEQ ID NO: 36239 - protein, 6 aa, synthetic construct
PWEFVY

SEQ ID NO: 36240 - protein, 6 aa, synthetic construct
PWEPAD

SEQ ID NO: 36241 - protein, 6 aa, synthetic construct
PWEPAE

SEQ ID NO: 36242 - protein, 6 aa, synthetic construct
PWEPAF

SEQ ID NO: 36243 - protein, 6 aa, synthetic construct
PWEPAW

SEQ ID NO: 36244 - protein, 6 aa, synthetic construct
PWEPAY

SEQ ID NO: 36245 - protein, 6 aa, synthetic construct
PWEPRD

SEQ ID NO: 36246 - protein, 6 aa, synthetic construct
PWEPRE

SEQ ID NO: 36247 - protein, 6 aa, synthetic construct
PWEPRF

SEQ ID NO: 36248 - protein, 6 aa, synthetic construct
PWEPRW

SEQ ID NO: 36249 - protein, 6 aa, synthetic construct
PWEPRY

SEQ ID NO: 36250 - protein, 6 aa, synthetic construct
PWEPND

SEQ ID NO: 36251 - protein, 6 aa, synthetic construct
PWEPNE

SEQ ID NO: 36252 - protein, 6 aa, synthetic construct
PWEPNF

SEQ ID NO: 36253 - protein, 6 aa, synthetic construct
PWEPNW

SEQ ID NO: 36254 - protein, 6 aa, synthetic construct
PWEPNY

SEQ ID NO: 36255 - protein, 6 aa, synthetic construct
PWEPDD

SEQ ID NO: 36256 - protein, 6 aa, synthetic construct
PWEPDE

SEQ ID NO: 36257 - protein, 6 aa, synthetic construct
PWEPDF

SEQ ID NO: 36258 - protein, 6 aa, synthetic construct
PWEPDW

SEQ ID NO: 36259 - protein, 6 aa, synthetic construct
PWEPDY

SEQ ID NO: 36260 - protein, 6 aa, synthetic construct
PWEPCD

SEQ ID NO: 36261 - protein, 6 aa, synthetic construct
PWEPCE

SEQ ID NO: 36262 - protein, 6 aa, synthetic construct
PWEPCF

SEQ ID NO: 36263 - protein, 6 aa, synthetic construct
PWEPCW

SEQ ID NO: 36264 - protein, 6 aa, synthetic construct
PWEPCY

SEQ ID NO: 36265 - protein, 6 aa, synthetic construct
PWEPQD

SEQ ID NO: 36266 - protein, 6 aa, synthetic construct
PWEPQE

SEQ ID NO: 36267 - protein, 6 aa, synthetic construct
PWEPQF

SEQ ID NO: 36268 - protein, 6 aa, synthetic construct
PWEPQW

SEQ ID NO: 36269 - protein, 6 aa, synthetic construct
PWEPQY

SEQ ID NO: 36270 - protein, 6 aa, synthetic construct
PWEPED

SEQ ID NO: 36271 - protein, 6 aa, synthetic construct
PWEPEE

SEQ ID NO: 36272 - protein, 6 aa, synthetic construct
PWEPEF

SEQ ID NO: 36273 - protein, 6 aa, synthetic construct
PWEPEW

SEQ ID NO: 36274 - protein, 6 aa, synthetic construct
PWEPEY

SEQ ID NO: 36275 - protein, 6 aa, synthetic construct
PWEPGD

SEQ ID NO: 36276 - protein, 6 aa, synthetic construct
PWEPGE

SEQ ID NO: 36277 - protein, 6 aa, synthetic construct
PWEPGF

SEQ ID NO: 36278 - protein, 6 aa, synthetic construct
PWEPGW

SEQ ID NO: 36279 - protein, 6 aa, synthetic construct
PWEPGY

SEQ ID NO: 36280 - protein, 6 aa, synthetic construct
PWEPHD

SEQ ID NO: 36281 - protein, 6 aa, synthetic construct
PWEPHE

SEQ ID NO: 36282 - protein, 6 aa, synthetic construct
PWEPHF

SEQ ID NO: 36283 - protein, 6 aa, synthetic construct
PWEPHW

SEQ ID NO: 36284 - protein, 6 aa, synthetic construct
PWEPHY

SEQ ID NO: 36285 - protein, 6 aa, synthetic construct
PWEPID

SEQ ID NO: 36286 - protein, 6 aa, synthetic construct
PWEPIE

SEQ ID NO: 36287 - protein, 6 aa, synthetic construct
PWEPIF

SEQ ID NO: 36288 - protein, 6 aa, synthetic construct
PWEPIW

SEQ ID NO: 36289 - protein, 6 aa, synthetic construct
PWEPIY

SEQ ID NO: 36290 - protein, 6 aa, synthetic construct
PWEPLD

SEQ ID NO: 36291 - protein, 6 aa, synthetic construct
PWEPLE

SEQ ID NO: 36292 - protein, 6 aa, synthetic construct
PWEPLF

SEQ ID NO: 36293 - protein, 6 aa, synthetic construct
PWEPLW

SEQ ID NO: 36294 - protein, 6 aa, synthetic construct
PWEPLY

SEQ ID NO: 36295 - protein, 6 aa, synthetic construct
PWEPKD

SEQ ID NO: 36296 - protein, 6 aa, synthetic construct
PWEPKE

SEQ ID NO: 36297 - protein, 6 aa, synthetic construct
PWEPKF

SEQ ID NO: 36298 - protein, 6 aa, synthetic construct
PWEPKW

SEQ ID NO: 36299 - protein, 6 aa, synthetic construct
PWEPKY

SEQ ID NO: 36300 - protein, 6 aa, synthetic construct
PWEPMD

SEQ ID NO: 36301 - protein, 6 aa, synthetic construct
PWEPME

SEQ ID NO: 36302 - protein, 6 aa, synthetic construct
PWEPMF

SEQ ID NO: 36303 - protein, 6 aa, synthetic construct
PWEPMW

SEQ ID NO: 36304 - protein, 6 aa, synthetic construct
PWEPMY

SEQ ID NO: 36305 - protein, 6 aa, synthetic construct
PWEPFD

SEQ ID NO: 36306 - protein, 6 aa, synthetic construct
PWEPFE

SEQ ID NO: 36307 - protein, 6 aa, synthetic construct
PWEPFF

SEQ ID NO: 36308 - protein, 6 aa, synthetic construct
PWEPFW

SEQ ID NO: 36309 - protein, 6 aa, synthetic construct
PWEPFY

SEQ ID NO: 36310 - protein, 6 aa, synthetic construct
PWEPPD

SEQ ID NO: 36311 - protein, 6 aa, synthetic construct
PWEPPE

SEQ ID NO: 36312 - protein, 6 aa, synthetic construct
PWEPPF

SEQ ID NO: 36313 - protein, 6 aa, synthetic construct
PWEPPW

SEQ ID NO: 36314 - protein, 6 aa, synthetic construct
PWEPPY

SEQ ID NO: 36315 - protein, 6 aa, synthetic construct
PWEPSD

SEQ ID NO: 36316 - protein, 6 aa, synthetic construct
PWEPSE

SEQ ID NO: 36317 - protein, 6 aa, synthetic construct
PWEPSF

SEQ ID NO: 36318 - protein, 6 aa, synthetic construct
PWEPSW

SEQ ID NO: 36319 - protein, 6 aa, synthetic construct
PWEPSY

SEQ ID NO: 36320 - protein, 6 aa, synthetic construct
PWEPTD

SEQ ID NO: 36321 - protein, 6 aa, synthetic construct
PWEPTE

SEQ ID NO: 36322 - protein, 6 aa, synthetic construct
PWEPTF

SEQ ID NO: 36323 - protein, 6 aa, synthetic construct
PWEPTW

SEQ ID NO: 36324 - protein, 6 aa, synthetic construct
PWEPTY

SEQ ID NO: 36325 - protein, 6 aa, synthetic construct
PWEPWD

SEQ ID NO: 36326 - protein, 6 aa, synthetic construct
PWEPWE

SEQ ID NO: 36327 - protein, 6 aa, synthetic construct
PWEPWF

SEQ ID NO: 36328 - protein, 6 aa, synthetic construct
PWEPWW

SEQ ID NO: 36329 - protein, 6 aa, synthetic construct
PWEPWY

SEQ ID NO: 36330 - protein, 6 aa, synthetic construct
PWEPYD

SEQ ID NO: 36331 - protein, 6 aa, synthetic construct
PWEPYE

SEQ ID NO: 36332 - protein, 6 aa, synthetic construct
PWEPYF

SEQ ID NO: 36333 - protein, 6 aa, synthetic construct
PWEPYW

SEQ ID NO: 36334 - protein, 6 aa, synthetic construct
PWEPYY

SEQ ID NO: 36335 - protein, 6 aa, synthetic construct
PWEPVD

SEQ ID NO: 36336 - protein, 6 aa, synthetic construct
PWEPVE

SEQ ID NO: 36337 - protein, 6 aa, synthetic construct
PWEPVF

SEQ ID NO: 36338 - protein, 6 aa, synthetic construct
PWEPVW

SEQ ID NO: 36339 - protein, 6 aa, synthetic construct
PWEPVY

SEQ ID NO: 36340 - protein, 6 aa, synthetic construct
PWESAD

SEQ ID NO: 36341 - protein, 6 aa, synthetic construct
PWESAE

SEQ ID NO: 36342 - protein, 6 aa, synthetic construct
PWESAF

SEQ ID NO: 36343 - protein, 6 aa, synthetic construct
PWESAW

SEQ ID NO: 36344 - protein, 6 aa, synthetic construct
PWESAY

SEQ ID NO: 36345 - protein, 6 aa, synthetic construct
PWESRD

SEQ ID NO: 36346 - protein, 6 aa, synthetic construct
PWESRE

SEQ ID NO: 36347 - protein, 6 aa, synthetic construct
PWESRF

SEQ ID NO: 36348 - protein, 6 aa, synthetic construct
PWESRW

SEQ ID NO: 36349 - protein, 6 aa, synthetic construct
PWESRY

SEQ ID NO: 36350 - protein, 6 aa, synthetic construct
PWESND

SEQ ID NO: 36351 - protein, 6 aa, synthetic construct
PWESNE

SEQ ID NO: 36352 - protein, 6 aa, synthetic construct
PWESNF

SEQ ID NO: 36353 - protein, 6 aa, synthetic construct
PWESNW

SEQ ID NO: 36354 - protein, 6 aa, synthetic construct
PWESNY

SEQ ID NO: 36355 - protein, 6 aa, synthetic construct
PWESDD

SEQ ID NO: 36356 - protein, 6 aa, synthetic construct
PWESDE

SEQ ID NO: 36357 - protein, 6 aa, synthetic construct
PWESDF

SEQ ID NO: 36358 - protein, 6 aa, synthetic construct
PWESDW

SEQ ID NO: 36359 - protein, 6 aa, synthetic construct
PWESDY

SEQ ID NO: 36360 - protein, 6 aa, synthetic construct
PWESCD

SEQ ID NO: 36361 - protein, 6 aa, synthetic construct
PWESCE

SEQ ID NO: 36362 - protein, 6 aa, synthetic construct
PWESCF

SEQ ID NO: 36363 - protein, 6 aa, synthetic construct
PWESCW

SEQ ID NO: 36364 - protein, 6 aa, synthetic construct
PWESCY

SEQ ID NO: 36365 - protein, 6 aa, synthetic construct
PWESQD

SEQ ID NO: 36366 - protein, 6 aa, synthetic construct
PWESQE

SEQ ID NO: 36367 - protein, 6 aa, synthetic construct
PWESQF

SEQ ID NO: 36368 - protein, 6 aa, synthetic construct
PWESQW

SEQ ID NO: 36369 - protein, 6 aa, synthetic construct
PWESQY

SEQ ID NO: 36370 - protein, 6 aa, synthetic construct
PWESED

SEQ ID NO: 36371 - protein, 6 aa, synthetic construct
PWESEE

SEQ ID NO: 36372 - protein, 6 aa, synthetic construct
PWESEF

SEQ ID NO: 36373 - protein, 6 aa, synthetic construct
PWESEW

SEQ ID NO: 36374 - protein, 6 aa, synthetic construct
PWESEY

SEQ ID NO: 36375 - protein, 6 aa, synthetic construct
PWESGD

SEQ ID NO: 36376 - protein, 6 aa, synthetic construct
PWESGE

SEQ ID NO: 36377 - protein, 6 aa, synthetic construct
PWESGF

SEQ ID NO: 36378 - protein, 6 aa, synthetic construct
PWESGW

SEQ ID NO: 36379 - protein, 6 aa, synthetic construct
PWESGY

SEQ ID NO: 36380 - protein, 6 aa, synthetic construct
PWESHD

SEQ ID NO: 36381 - protein, 6 aa, synthetic construct
PWESHE

SEQ ID NO: 36382 - protein, 6 aa, synthetic construct
PWESHF

SEQ ID NO: 36383 - protein, 6 aa, synthetic construct
PWESHW

SEQ ID NO: 36384 - protein, 6 aa, synthetic construct
PWESHY

SEQ ID NO: 36385 - protein, 6 aa, synthetic construct
PWESID

SEQ ID NO: 36386 - protein, 6 aa, synthetic construct
PWESIE

SEQ ID NO: 36387 - protein, 6 aa, synthetic construct
PWESIF

SEQ ID NO: 36388 - protein, 6 aa, synthetic construct
PWESIW

SEQ ID NO: 36389 - protein, 6 aa, synthetic construct
PWESIY

SEQ ID NO: 36390 - protein, 6 aa, synthetic construct
PWESLD

SEQ ID NO: 36391 - protein, 6 aa, synthetic construct
PWESLE

SEQ ID NO: 36392 - protein, 6 aa, synthetic construct
PWESLF

SEQ ID NO: 36393 - protein, 6 aa, synthetic construct
PWESLW

SEQ ID NO: 36394 - protein, 6 aa, synthetic construct
PWESLY

SEQ ID NO: 36395 - protein, 6 aa, synthetic construct
PWESKD

SEQ ID NO: 36396 - protein, 6 aa, synthetic construct
PWESKE

SEQ ID NO: 36397 - protein, 6 aa, synthetic construct
PWESKF

SEQ ID NO: 36398 - protein, 6 aa, synthetic construct
PWESKW

SEQ ID NO: 36399 - protein, 6 aa, synthetic construct
PWESKY

SEQ ID NO: 36400 - protein, 6 aa, synthetic construct
PWESMD

SEQ ID NO: 36401 - protein, 6 aa, synthetic construct
PWESME

SEQ ID NO: 36402 - protein, 6 aa, synthetic construct
PWESMF

SEQ ID NO: 36403 - protein, 6 aa, synthetic construct
PWESMW

SEQ ID NO: 36404 - protein, 6 aa, synthetic construct
PWESMY

SEQ ID NO: 36405 - protein, 6 aa, synthetic construct
PWESFD

SEQ ID NO: 36406 - protein, 6 aa, synthetic construct
PWESFE

SEQ ID NO: 36407 - protein, 6 aa, synthetic construct
PWESFF

SEQ ID NO: 36408 - protein, 6 aa, synthetic construct
PWESFW

SEQ ID NO: 36409 - protein, 6 aa, synthetic construct
PWESFY

SEQ ID NO: 36410 - protein, 6 aa, synthetic construct
PWESPD

SEQ ID NO: 36411 - protein, 6 aa, synthetic construct
PWESPE

SEQ ID NO: 36412 - protein, 6 aa, synthetic construct
PWESPF

SEQ ID NO: 36413 - protein, 6 aa, synthetic construct
PWESPW

SEQ ID NO: 36414 - protein, 6 aa, synthetic construct
PWESPY

SEQ ID NO: 36415 - protein, 6 aa, synthetic construct
PWESSD

SEQ ID NO: 36416 - protein, 6 aa, synthetic construct
PWESSE

SEQ ID NO: 36417 - protein, 6 aa, synthetic construct
PWESSF

SEQ ID NO: 36418 - protein, 6 aa, synthetic construct
PWESSW

SEQ ID NO: 36419 - protein, 6 aa, synthetic construct
PWESSY

SEQ ID NO: 36420 - protein, 6 aa, synthetic construct
PWESTD

SEQ ID NO: 36421 - protein, 6 aa, synthetic construct
PWESTE

SEQ ID NO: 36422 - protein, 6 aa, synthetic construct
PWESTF

SEQ ID NO: 36423 - protein, 6 aa, synthetic construct
PWESTW

SEQ ID NO: 36424 - protein, 6 aa, synthetic construct
PWESTY

SEQ ID NO: 36425 - protein, 6 aa, synthetic construct
PWESWD

SEQ ID NO: 36426 - protein, 6 aa, synthetic construct
PWESWE

SEQ ID NO: 36427 - protein, 6 aa, synthetic construct
PWESWF

SEQ ID NO: 36428 - protein, 6 aa, synthetic construct
PWESWW

SEQ ID NO: 36429 - protein, 6 aa, synthetic construct
PWESWY

SEQ ID NO: 36430 - protein, 6 aa, synthetic construct
PWESYD

SEQ ID NO: 36431 - protein, 6 aa, synthetic construct
PWESYE

SEQ ID NO: 36432 - protein, 6 aa, synthetic construct
PWESYF

SEQ ID NO: 36433 - protein, 6 aa, synthetic construct
PWESYW

SEQ ID NO: 36434 - protein, 6 aa, synthetic construct
PWESYY

SEQ ID NO: 36435 - protein, 6 aa, synthetic construct
PWESVD

SEQ ID NO: 36436 - protein, 6 aa, synthetic construct
PWESVE

SEQ ID NO: 36437 - protein, 6 aa, synthetic construct
PWESVF

SEQ ID NO: 36438 - protein, 6 aa, synthetic construct
PWESVW

SEQ ID NO: 36439 - protein, 6 aa, synthetic construct
PWESVY

SEQ ID NO: 36440 - protein, 6 aa, synthetic construct
PWETAD

SEQ ID NO: 36441 - protein, 6 aa, synthetic construct
PWETAE

SEQ ID NO: 36442 - protein, 6 aa, synthetic construct
PWETAF

SEQ ID NO: 36443 - protein, 6 aa, synthetic construct
PWETAW

SEQ ID NO: 36444 - protein, 6 aa, synthetic construct
PWETAY

SEQ ID NO: 36445 - protein, 6 aa, synthetic construct
PWETRD

SEQ ID NO: 36446 - protein, 6 aa, synthetic construct
PWETRE

SEQ ID NO: 36447 - protein, 6 aa, synthetic construct
PWETRF

SEQ ID NO: 36448 - protein, 6 aa, synthetic construct
PWETRW

SEQ ID NO: 36449 - protein, 6 aa, synthetic construct
PWETRY

SEQ ID NO: 36450 - protein, 6 aa, synthetic construct
PWETND

SEQ ID NO: 36451 - protein, 6 aa, synthetic construct
PWETNE

SEQ ID NO: 36452 - protein, 6 aa, synthetic construct
PWETNF

SEQ ID NO: 36453 - protein, 6 aa, synthetic construct
PWETNW

SEQ ID NO: 36454 - protein, 6 aa, synthetic construct
PWETNY

SEQ ID NO: 36455 - protein, 6 aa, synthetic construct
PWETDD

SEQ ID NO: 36456 - protein, 6 aa, synthetic construct
PWETDE

SEQ ID NO: 36457 - protein, 6 aa, synthetic construct
PWETDF

SEQ ID NO: 36458 - protein, 6 aa, synthetic construct
PWETDW

SEQ ID NO: 36459 - protein, 6 aa, synthetic construct
PWETDY

SEQ ID NO: 36460 - protein, 6 aa, synthetic construct
PWETCD

SEQ ID NO: 36461 - protein, 6 aa, synthetic construct
PWETCE

SEQ ID NO: 36462 - protein, 6 aa, synthetic construct
PWETCF

SEQ ID NO: 36463 - protein, 6 aa, synthetic construct
PWETCW

SEQ ID NO: 36464 - protein, 6 aa, synthetic construct
PWETCY

SEQ ID NO: 36465 - protein, 6 aa, synthetic construct
PWETQD

SEQ ID NO: 36466 - protein, 6 aa, synthetic construct
PWETQE

SEQ ID NO: 36467 - protein, 6 aa, synthetic construct
PWETQF

SEQ ID NO: 36468 - protein, 6 aa, synthetic construct
PWETQW

SEQ ID NO: 36469 - protein, 6 aa, synthetic construct
PWETQY

SEQ ID NO: 36470 - protein, 6 aa, synthetic construct
PWETED

SEQ ID NO: 36471 - protein, 6 aa, synthetic construct
PWETEE

SEQ ID NO: 36472 - protein, 6 aa, synthetic construct
PWETEF

SEQ ID NO: 36473 - protein, 6 aa, synthetic construct
PWETEW

SEQ ID NO: 36474 - protein, 6 aa, synthetic construct
PWETEY

SEQ ID NO: 36475 - protein, 6 aa, synthetic construct
PWETGD

SEQ ID NO: 36476 - protein, 6 aa, synthetic construct
PWETGE

SEQ ID NO: 36477 - protein, 6 aa, synthetic construct
PWETGF

SEQ ID NO: 36478 - protein, 6 aa, synthetic construct
PWETGW

SEQ ID NO: 36479 - protein, 6 aa, synthetic construct
PWETGY

SEQ ID NO: 36480 - protein, 6 aa, synthetic construct
PWETHD

SEQ ID NO: 36481 - protein, 6 aa, synthetic construct
PWETHE

SEQ ID NO: 36482 - protein, 6 aa, synthetic construct
PWETHF

SEQ ID NO: 36483 - protein, 6 aa, synthetic construct
PWETHW

SEQ ID NO: 36484 - protein, 6 aa, synthetic construct
PWETHY

SEQ ID NO: 36485 - protein, 6 aa, synthetic construct
PWETID

SEQ ID NO: 36486 - protein, 6 aa, synthetic construct
PWETIE

SEQ ID NO: 36487 - protein, 6 aa, synthetic construct
PWETIF

SEQ ID NO: 36488 - protein, 6 aa, synthetic construct
PWETIW

SEQ ID NO: 36489 - protein, 6 aa, synthetic construct
PWETIY

SEQ ID NO: 36490 - protein, 6 aa, synthetic construct
PWETLD

SEQ ID NO: 36491 - protein, 6 aa, synthetic construct
PWETLE

SEQ ID NO: 36492 - protein, 6 aa, synthetic construct
PWETLF

SEQ ID NO: 36493 - protein, 6 aa, synthetic construct
PWETLW

SEQ ID NO: 36494 - protein, 6 aa, synthetic construct
PWETLY

SEQ ID NO: 36495 - protein, 6 aa, synthetic construct
PWETKD

SEQ ID NO: 36496 - protein, 6 aa, synthetic construct
PWETKE

SEQ ID NO: 36497 - protein, 6 aa, synthetic construct
PWETKF

SEQ ID NO: 36498 - protein, 6 aa, synthetic construct
PWETKW

SEQ ID NO: 36499 - protein, 6 aa, synthetic construct
PWETKY

SEQ ID NO: 36500 - protein, 6 aa, synthetic construct
PWETMD

SEQ ID NO: 36501 - protein, 6 aa, synthetic construct
PWETME

SEQ ID NO: 36502 - protein, 6 aa, synthetic construct
PWETMF

SEQ ID NO: 36503 - protein, 6 aa, synthetic construct
PWETMW

SEQ ID NO: 36504 - protein, 6 aa, synthetic construct
PWETMY

SEQ ID NO: 36505 - protein, 6 aa, synthetic construct
PWETFD

SEQ ID NO: 36506 - protein, 6 aa, synthetic construct
PWETFE

SEQ ID NO: 36507 - protein, 6 aa, synthetic construct
PWETFF

SEQ ID NO: 36508 - protein, 6 aa, synthetic construct
PWETFW

SEQ ID NO: 36509 - protein, 6 aa, synthetic construct
PWETFY

SEQ ID NO: 36510 - protein, 6 aa, synthetic construct
PWETPD

SEQ ID NO: 36511 - protein, 6 aa, synthetic construct
PWETPE

SEQ ID NO: 36512 - protein, 6 aa, synthetic construct
PWETPF

SEQ ID NO: 36513 - protein, 6 aa, synthetic construct
PWETPW

SEQ ID NO: 36514 - protein, 6 aa, synthetic construct
PWETPY

SEQ ID NO: 36515 - protein, 6 aa, synthetic construct
PWETSD

SEQ ID NO: 36516 - protein, 6 aa, synthetic construct
PWETSE

SEQ ID NO: 36517 - protein, 6 aa, synthetic construct
PWETSF

SEQ ID NO: 36518 - protein, 6 aa, synthetic construct
PWETSW

SEQ ID NO: 36519 - protein, 6 aa, synthetic construct
PWETSY

SEQ ID NO: 36520 - protein, 6 aa, synthetic construct
PWETTD

SEQ ID NO: 36521 - protein, 6 aa, synthetic construct
PWETTE

SEQ ID NO: 36522 - protein, 6 aa, synthetic construct
PWETTF

SEQ ID NO: 36523 - protein, 6 aa, synthetic construct
PWETTW

SEQ ID NO: 36524 - protein, 6 aa, synthetic construct
PWETTY

SEQ ID NO: 36525 - protein, 6 aa, synthetic construct
PWETWD

SEQ ID NO: 36526 - protein, 6 aa, synthetic construct
PWETWE

SEQ ID NO: 36527 - protein, 6 aa, synthetic construct
PWETWF

SEQ ID NO: 36528 - protein, 6 aa, synthetic construct
PWETWW

SEQ ID NO: 36529 - protein, 6 aa, synthetic construct
PWETWY

SEQ ID NO: 36530 - protein, 6 aa, synthetic construct
PWETYD

SEQ ID NO: 36531 - protein, 6 aa, synthetic construct
PWETYE

SEQ ID NO: 36532 - protein, 6 aa, synthetic construct
PWETYF

SEQ ID NO: 36533 - protein, 6 aa, synthetic construct
PWETYW

SEQ ID NO: 36534 - protein, 6 aa, synthetic construct
PWETYY

SEQ ID NO: 36535 - protein, 6 aa, synthetic construct
PWETVD

SEQ ID NO: 36536 - protein, 6 aa, synthetic construct
PWETVE

SEQ ID NO: 36537 - protein, 6 aa, synthetic construct
PWETVF

SEQ ID NO: 36538 - protein, 6 aa, synthetic construct
PWETVW

SEQ ID NO: 36539 - protein, 6 aa, synthetic construct
PWETVY

SEQ ID NO: 36540 - protein, 6 aa, synthetic construct
PWEWAD

SEQ ID NO: 36541 - protein, 6 aa, synthetic construct
PWEWAE

SEQ ID NO: 36542 - protein, 6 aa, synthetic construct
PWEWAF

SEQ ID NO: 36543 - protein, 6 aa, synthetic construct
PWEWAW

SEQ ID NO: 36544 - protein, 6 aa, synthetic construct
PWEWAY

SEQ ID NO: 36545 - protein, 6 aa, synthetic construct
PWEWRD

SEQ ID NO: 36546 - protein, 6 aa, synthetic construct
PWEWRE

SEQ ID NO: 36547 - protein, 6 aa, synthetic construct
PWEWRF

SEQ ID NO: 36548 - protein, 6 aa, synthetic construct
PWEWRW

SEQ ID NO: 36549 - protein, 6 aa, synthetic construct
PWEWRY

SEQ ID NO: 36550 - protein, 6 aa, synthetic construct
PWEWND

SEQ ID NO: 36551 - protein, 6 aa, synthetic construct
PWEWNE

SEQ ID NO: 36552 - protein, 6 aa, synthetic construct
PWEWNF

SEQ ID NO: 36553 - protein, 6 aa, synthetic construct
PWEWNW

SEQ ID NO: 36554 - protein, 6 aa, synthetic construct
PWEWNY

SEQ ID NO: 36555 - protein, 6 aa, synthetic construct
PWEWDD

SEQ ID NO: 36556 - protein, 6 aa, synthetic construct
PWEWDE

SEQ ID NO: 36557 - protein, 6 aa, synthetic construct
PWEWDF

SEQ ID NO: 36558 - protein, 6 aa, synthetic construct
PWEWDW

SEQ ID NO: 36559 - protein, 6 aa, synthetic construct
PWEWDY

SEQ ID NO: 36560 - protein, 6 aa, synthetic construct
PWEWCD

SEQ ID NO: 36561 - protein, 6 aa, synthetic construct
PWEWCE

SEQ ID NO: 36562 - protein, 6 aa, synthetic construct
PWEWCF

SEQ ID NO: 36563 - protein, 6 aa, synthetic construct
PWEWCW

SEQ ID NO: 36564 - protein, 6 aa, synthetic construct
PWEWCY

SEQ ID NO: 36565 - protein, 6 aa, synthetic construct
PWEWQD

SEQ ID NO: 36566 - protein, 6 aa, synthetic construct
PWEWQE

SEQ ID NO: 36567 - protein, 6 aa, synthetic construct
PWEWQF

SEQ ID NO: 36568 - protein, 6 aa, synthetic construct
PWEWQW

SEQ ID NO: 36569 - protein, 6 aa, synthetic construct
PWEWQY

SEQ ID NO: 36570 - protein, 6 aa, synthetic construct
PWEWED

SEQ ID NO: 36571 - protein, 6 aa, synthetic construct
PWEWEE

SEQ ID NO: 36572 - protein, 6 aa, synthetic construct
PWEWEF

SEQ ID NO: 36573 - protein, 6 aa, synthetic construct
PWEWEW

SEQ ID NO: 36574 - protein, 6 aa, synthetic construct
PWEWEY

SEQ ID NO: 36575 - protein, 6 aa, synthetic construct
PWEWGD

SEQ ID NO: 36576 - protein, 6 aa, synthetic construct
PWEWGE

SEQ ID NO: 36577 - protein, 6 aa, synthetic construct
PWEWGF

SEQ ID NO: 36578 - protein, 6 aa, synthetic construct
PWEWGW

SEQ ID NO: 36579 - protein, 6 aa, synthetic construct
PWEWGY

SEQ ID NO: 36580 - protein, 6 aa, synthetic construct
PWEWHD

SEQ ID NO: 36581 - protein, 6 aa, synthetic construct
PWEWHE

SEQ ID NO: 36582 - protein, 6 aa, synthetic construct
PWEWHF

SEQ ID NO: 36583 - protein, 6 aa, synthetic construct
PWEWHW

SEQ ID NO: 36584 - protein, 6 aa, synthetic construct
PWEWHY

SEQ ID NO: 36585 - protein, 6 aa, synthetic construct
PWEWID

SEQ ID NO: 36586 - protein, 6 aa, synthetic construct
PWEWIE

SEQ ID NO: 36587 - protein, 6 aa, synthetic construct
PWEWIF

SEQ ID NO: 36588 - protein, 6 aa, synthetic construct
PWEWIW

SEQ ID NO: 36589 - protein, 6 aa, synthetic construct
PWEWIY

SEQ ID NO: 36590 - protein, 6 aa, synthetic construct
PWEWLD

SEQ ID NO: 36591 - protein, 6 aa, synthetic construct
PWEWLE

SEQ ID NO: 36592 - protein, 6 aa, synthetic construct
PWEWLF

SEQ ID NO: 36593 - protein, 6 aa, synthetic construct
PWEWLW

SEQ ID NO: 36594 - protein, 6 aa, synthetic construct
PWEWLY

SEQ ID NO: 36595 - protein, 6 aa, synthetic construct
PWEWKD

SEQ ID NO: 36596 - protein, 6 aa, synthetic construct
PWEWKE

SEQ ID NO: 36597 - protein, 6 aa, synthetic construct
PWEWKF

SEQ ID NO: 36598 - protein, 6 aa, synthetic construct
PWEWKW

SEQ ID NO: 36599 - protein, 6 aa, synthetic construct
PWEWKY

SEQ ID NO: 36600 - protein, 6 aa, synthetic construct
PWEWMD

SEQ ID NO: 36601 - protein, 6 aa, synthetic construct
PWEWME

SEQ ID NO: 36602 - protein, 6 aa, synthetic construct
PWEWMF

SEQ ID NO: 36603 - protein, 6 aa, synthetic construct
PWEWMW

SEQ ID NO: 36604 - protein, 6 aa, synthetic construct
PWEWMY

SEQ ID NO: 36605 - protein, 6 aa, synthetic construct
PWEWFD

SEQ ID NO: 36606 - protein, 6 aa, synthetic construct
PWEWFE

SEQ ID NO: 36607 - protein, 6 aa, synthetic construct
PWEWFF

SEQ ID NO: 36608 - protein, 6 aa, synthetic construct
PWEWFW

SEQ ID NO: 36609 - protein, 6 aa, synthetic construct
PWEWFY

SEQ ID NO: 36610 - protein, 6 aa, synthetic construct
PWEWPD

SEQ ID NO: 36611 - protein, 6 aa, synthetic construct
PWEWPE

SEQ ID NO: 36612 - protein, 6 aa, synthetic construct
PWEWPF

SEQ ID NO: 36613 - protein, 6 aa, synthetic construct
PWEWPW

SEQ ID NO: 36614 - protein, 6 aa, synthetic construct
PWEWPY

SEQ ID NO: 36615 - protein, 6 aa, synthetic construct
PWEWSD

SEQ ID NO: 36616 - protein, 6 aa, synthetic construct
PWEWSE

SEQ ID NO: 36617 - protein, 6 aa, synthetic construct
PWEWSF

SEQ ID NO: 36618 - protein, 6 aa, synthetic construct
PWEWSW

SEQ ID NO: 36619 - protein, 6 aa, synthetic construct
PWEWSY

SEQ ID NO: 36620 - protein, 6 aa, synthetic construct
PWEWTD

SEQ ID NO: 36621 - protein, 6 aa, synthetic construct
PWEWTE

SEQ ID NO: 36622 - protein, 6 aa, synthetic construct
PWEWTF

SEQ ID NO: 36623 - protein, 6 aa, synthetic construct
PWEWTW

SEQ ID NO: 36624 - protein, 6 aa, synthetic construct
PWEWTY

SEQ ID NO: 36625 - protein, 6 aa, synthetic construct
PWEWWD

SEQ ID NO: 36626 - protein, 6 aa, synthetic construct
PWEWWE

SEQ ID NO: 36627 - protein, 6 aa, synthetic construct
PWEWWF

SEQ ID NO: 36628 - protein, 6 aa, synthetic construct
PWEWWW

SEQ ID NO: 36629 - protein, 6 aa, synthetic construct
PWEWWY

SEQ ID NO: 36630 - protein, 6 aa, synthetic construct
PWEWYD

SEQ ID NO: 36631 - protein, 6 aa, synthetic construct
PWEWYE

SEQ ID NO: 36632 - protein, 6 aa, synthetic construct
PWEWYF

SEQ ID NO: 36633 - protein, 6 aa, synthetic construct
PWEWYW

SEQ ID NO: 36634 - protein, 6 aa, synthetic construct
PWEWYY

SEQ ID NO: 36635 - protein, 6 aa, synthetic construct
PWEWVD

SEQ ID NO: 36636 - protein, 6 aa, synthetic construct
PWEWVE

SEQ ID NO: 36637 - protein, 6 aa, synthetic construct
PWEWVF

SEQ ID NO: 36638 - protein, 6 aa, synthetic construct
PWEWVW

SEQ ID NO: 36639 - protein, 6 aa, synthetic construct
PWEWVY

SEQ ID NO: 36640 - protein, 6 aa, synthetic construct
PWEYAD

SEQ ID NO: 36641 - protein, 6 aa, synthetic construct
PWEYAE

SEQ ID NO: 36642 - protein, 6 aa, synthetic construct
PWEYAF

SEQ ID NO: 36643 - protein, 6 aa, synthetic construct
PWEYAW

SEQ ID NO: 36644 - protein, 6 aa, synthetic construct
PWEYAY

SEQ ID NO: 36645 - protein, 6 aa, synthetic construct
PWEYRD

SEQ ID NO: 36646 - protein, 6 aa, synthetic construct
PWEYRE

SEQ ID NO: 36647 - protein, 6 aa, synthetic construct
PWEYRF

SEQ ID NO: 36648 - protein, 6 aa, synthetic construct
PWEYRW

SEQ ID NO: 36649 - protein, 6 aa, synthetic construct
PWEYRY

SEQ ID NO: 36650 - protein, 6 aa, synthetic construct
PWEYND

SEQ ID NO: 36651 - protein, 6 aa, synthetic construct
PWEYNE

SEQ ID NO: 36652 - protein, 6 aa, synthetic construct
PWEYNF

SEQ ID NO: 36653 - protein, 6 aa, synthetic construct
PWEYNW

SEQ ID NO: 36654 - protein, 6 aa, synthetic construct
PWEYNY

SEQ ID NO: 36655 - protein, 6 aa, synthetic construct
PWEYDD

SEQ ID NO: 36656 - protein, 6 aa, synthetic construct
PWEYDE

SEQ ID NO: 36657 - protein, 6 aa, synthetic construct
PWEYDF

SEQ ID NO: 36658 - protein, 6 aa, synthetic construct
PWEYDW

SEQ ID NO: 36659 - protein, 6 aa, synthetic construct
PWEYDY

SEQ ID NO: 36660 - protein, 6 aa, synthetic construct
PWEYCD

SEQ ID NO: 36661 - protein, 6 aa, synthetic construct
PWEYCE

SEQ ID NO: 36662 - protein, 6 aa, synthetic construct
PWEYCF

SEQ ID NO: 36663 - protein, 6 aa, synthetic construct
PWEYCW

SEQ ID NO: 36664 - protein, 6 aa, synthetic construct
PWEYCY

SEQ ID NO: 36665 - protein, 6 aa, synthetic construct
PWEYQD

SEQ ID NO: 36666 - protein, 6 aa, synthetic construct
PWEYQE

SEQ ID NO: 36667 - protein, 6 aa, synthetic construct
PWEYQF

SEQ ID NO: 36668 - protein, 6 aa, synthetic construct
PWEYQW

SEQ ID NO: 36669 - protein, 6 aa, synthetic construct
PWEYQY

SEQ ID NO: 36670 - protein, 6 aa, synthetic construct
PWEYED

SEQ ID NO: 36671 - protein, 6 aa, synthetic construct
PWEYEE

SEQ ID NO: 36672 - protein, 6 aa, synthetic construct
PWEYEF

SEQ ID NO: 36673 - protein, 6 aa, synthetic construct
PWEYEW

SEQ ID NO: 36674 - protein, 6 aa, synthetic construct
PWEYEY

SEQ ID NO: 36675 - protein, 6 aa, synthetic construct
PWEYGD

SEQ ID NO: 36676 - protein, 6 aa, synthetic construct
PWEYGE

SEQ ID NO: 36677 - protein, 6 aa, synthetic construct
PWEYGF

SEQ ID NO: 36678 - protein, 6 aa, synthetic construct
PWEYGW

SEQ ID NO: 36679 - protein, 6 aa, synthetic construct
PWEYGY

SEQ ID NO: 36680 - protein, 6 aa, synthetic construct
PWEYHD

SEQ ID NO: 36681 - protein, 6 aa, synthetic construct
PWEYHE

SEQ ID NO: 36682 - protein, 6 aa, synthetic construct
PWEYHF

SEQ ID NO: 36683 - protein, 6 aa, synthetic construct
PWEYHW

SEQ ID NO: 36684 - protein, 6 aa, synthetic construct
PWEYHY

SEQ ID NO: 36685 - protein, 6 aa, synthetic construct
PWEYID

SEQ ID NO: 36686 - protein, 6 aa, synthetic construct
PWEYIE

SEQ ID NO: 36687 - protein, 6 aa, synthetic construct
PWEYIF

SEQ ID NO: 36688 - protein, 6 aa, synthetic construct
PWEYIW

SEQ ID NO: 36689 - protein, 6 aa, synthetic construct
PWEYIY

SEQ ID NO: 36690 - protein, 6 aa, synthetic construct
PWEYLD

SEQ ID NO: 36691 - protein, 6 aa, synthetic construct
PWEYLE

SEQ ID NO: 36692 - protein, 6 aa, synthetic construct
PWEYLF

SEQ ID NO: 36693 - protein, 6 aa, synthetic construct
PWEYLW

SEQ ID NO: 36694 - protein, 6 aa, synthetic construct
PWEYLY

SEQ ID NO: 36695 - protein, 6 aa, synthetic construct
PWEYKD

SEQ ID NO: 36696 - protein, 6 aa, synthetic construct
PWEYKE

SEQ ID NO: 36697 - protein, 6 aa, synthetic construct
PWEYKF

SEQ ID NO: 36698 - protein, 6 aa, synthetic construct
PWEYKW

SEQ ID NO: 36699 - protein, 6 aa, synthetic construct
PWEYKY

SEQ ID NO: 36700 - protein, 6 aa, synthetic construct
PWEYMD

SEQ ID NO: 36701 - protein, 6 aa, synthetic construct
PWEYME

SEQ ID NO: 36702 - protein, 6 aa, synthetic construct
PWEYMF

SEQ ID NO: 36703 - protein, 6 aa, synthetic construct
PWEYMW

SEQ ID NO: 36704 - protein, 6 aa, synthetic construct
PWEYMY

SEQ ID NO: 36705 - protein, 6 aa, synthetic construct
PWEYFD

SEQ ID NO: 36706 - protein, 6 aa, synthetic construct
PWEYFE

SEQ ID NO: 36707 - protein, 6 aa, synthetic construct
PWEYFF

SEQ ID NO: 36708 - protein, 6 aa, synthetic construct
PWEYFW

SEQ ID NO: 36709 - protein, 6 aa, synthetic construct
PWEYFY

SEQ ID NO: 36710 - protein, 6 aa, synthetic construct
PWEYPD

SEQ ID NO: 36711 - protein, 6 aa, synthetic construct
PWEYPE

SEQ ID NO: 36712 - protein, 6 aa, synthetic construct
PWEYPF

SEQ ID NO: 36713 - protein, 6 aa, synthetic construct
PWEYPW

SEQ ID NO: 36714 - protein, 6 aa, synthetic construct
PWEYPY

SEQ ID NO: 36715 - protein, 6 aa, synthetic construct
PWEYSD

SEQ ID NO: 36716 - protein, 6 aa, synthetic construct
PWEYSE

SEQ ID NO: 36717 - protein, 6 aa, synthetic construct
PWEYSF

SEQ ID NO: 36718 - protein, 6 aa, synthetic construct
PWEYSW

SEQ ID NO: 36719 - protein, 6 aa, synthetic construct
PWEYSY

SEQ ID NO: 36720 - protein, 6 aa, synthetic construct
PWEYTD

SEQ ID NO: 36721 - protein, 6 aa, synthetic construct
PWEYTE

SEQ ID NO: 36722 - protein, 6 aa, synthetic construct
PWEYTF

SEQ ID NO: 36723 - protein, 6 aa, synthetic construct
PWEYTW

SEQ ID NO: 36724 - protein, 6 aa, synthetic construct
PWEYTY

SEQ ID NO: 36725 - protein, 6 aa, synthetic construct
PWEYWD

SEQ ID NO: 36726 - protein, 6 aa, synthetic construct
PWEYWE

SEQ ID NO: 36727 - protein, 6 aa, synthetic construct
PWEYWF

SEQ ID NO: 36728 - protein, 6 aa, synthetic construct
PWEYWW

SEQ ID NO: 36729 - protein, 6 aa, synthetic construct
PWEYWY

SEQ ID NO: 36730 - protein, 6 aa, synthetic construct
PWEYYD

SEQ ID NO: 36731 - protein, 6 aa, synthetic construct
PWEYYE

SEQ ID NO: 36732 - protein, 6 aa, synthetic construct
PWEYYF

SEQ ID NO: 36733 - protein, 6 aa, synthetic construct
PWEYYW

SEQ ID NO: 36734 - protein, 6 aa, synthetic construct
PWEYYY

SEQ ID NO: 36735 - protein, 6 aa, synthetic construct
PWEYVD

SEQ ID NO: 36736 - protein, 6 aa, synthetic construct
PWEYVE

SEQ ID NO: 36737 - protein, 6 aa, synthetic construct
PWEYVF

SEQ ID NO: 36738 - protein, 6 aa, synthetic construct
PWEYVW

SEQ ID NO: 36739 - protein, 6 aa, synthetic construct
PWEYVY

SEQ ID NO: 36740 - protein, 6 aa, synthetic construct
PWEVAD

SEQ ID NO: 36741 - protein, 6 aa, synthetic construct
PWEVAE

SEQ ID NO: 36742 - protein, 6 aa, synthetic construct
PWEVAF

SEQ ID NO: 36743 - protein, 6 aa, synthetic construct
PWEVAW

SEQ ID NO: 36744 - protein, 6 aa, synthetic construct
PWEVAY

SEQ ID NO: 36745 - protein, 6 aa, synthetic construct
PWEVRD

SEQ ID NO: 36746 - protein, 6 aa, synthetic construct
PWEVRE

SEQ ID NO: 36747 - protein, 6 aa, synthetic construct
PWEVRF

SEQ ID NO: 36748 - protein, 6 aa, synthetic construct
PWEVRW

SEQ ID NO: 36749 - protein, 6 aa, synthetic construct
PWEVRY

SEQ ID NO: 36750 - protein, 6 aa, synthetic construct
PWEVND

SEQ ID NO: 36751 - protein, 6 aa, synthetic construct
PWEVNE

SEQ ID NO: 36752 - protein, 6 aa, synthetic construct
PWEVNF

SEQ ID NO: 36753 - protein, 6 aa, synthetic construct
PWEVNW

SEQ ID NO: 36754 - protein, 6 aa, synthetic construct
PWEVNY

SEQ ID NO: 36755 - protein, 6 aa, synthetic construct
PWEVDD

SEQ ID NO: 36756 - protein, 6 aa, synthetic construct
PWEVDE

SEQ ID NO: 36757 - protein, 6 aa, synthetic construct
PWEVDF

SEQ ID NO: 36758 - protein, 6 aa, synthetic construct
PWEVDW

SEQ ID NO: 36759 - protein, 6 aa, synthetic construct
PWEVDY

SEQ ID NO: 36760 - protein, 6 aa, synthetic construct
PWEVCD

SEQ ID NO: 36761 - protein, 6 aa, synthetic construct
PWEVCE

SEQ ID NO: 36762 - protein, 6 aa, synthetic construct
PWEVCF

SEQ ID NO: 36763 - protein, 6 aa, synthetic construct
PWEVCW

SEQ ID NO: 36764 - protein, 6 aa, synthetic construct
PWEVCY

SEQ ID NO: 36765 - protein, 6 aa, synthetic construct
PWEVQD

SEQ ID NO: 36766 - protein, 6 aa, synthetic construct
PWEVQE

SEQ ID NO: 36767 - protein, 6 aa, synthetic construct
PWEVQF

SEQ ID NO: 36768 - protein, 6 aa, synthetic construct
PWEVQW

SEQ ID NO: 36769 - protein, 6 aa, synthetic construct
PWEVQY

SEQ ID NO: 36770 - protein, 6 aa, synthetic construct
PWEVED

SEQ ID NO: 36771 - protein, 6 aa, synthetic construct
PWEVEE

SEQ ID NO: 36772 - protein, 6 aa, synthetic construct
PWEVEF

SEQ ID NO: 36773 - protein, 6 aa, synthetic construct
PWEVEW

SEQ ID NO: 36774 - protein, 6 aa, synthetic construct
PWEVEY

SEQ ID NO: 36775 - protein, 6 aa, synthetic construct
PWEVGD

SEQ ID NO: 36776 - protein, 6 aa, synthetic construct
PWEVGE

SEQ ID NO: 36777 - protein, 6 aa, synthetic construct
PWEVGF

SEQ ID NO: 36778 - protein, 6 aa, synthetic construct
PWEVGW

SEQ ID NO: 36779 - protein, 6 aa, synthetic construct
PWEVGY

SEQ ID NO: 36780 - protein, 6 aa, synthetic construct
PWEVHD

SEQ ID NO: 36781 - protein, 6 aa, synthetic construct
PWEVHE

SEQ ID NO: 36782 - protein, 6 aa, synthetic construct
PWEVHF

SEQ ID NO: 36783 - protein, 6 aa, synthetic construct
PWEVHW

SEQ ID NO: 36784 - protein, 6 aa, synthetic construct
PWEVHY

SEQ ID NO: 36785 - protein, 6 aa, synthetic construct
PWEVID

SEQ ID NO: 36786 - protein, 6 aa, synthetic construct
PWEVIE

SEQ ID NO: 36787 - protein, 6 aa, synthetic construct
PWEVIF

SEQ ID NO: 36788 - protein, 6 aa, synthetic construct
PWEVIW

SEQ ID NO: 36789 - protein, 6 aa, synthetic construct
PWEVIY

SEQ ID NO: 36790 - protein, 6 aa, synthetic construct
PWEVLD

SEQ ID NO: 36791 - protein, 6 aa, synthetic construct
PWEVLE

SEQ ID NO: 36792 - protein, 6 aa, synthetic construct
PWEVLF

SEQ ID NO: 36793 - protein, 6 aa, synthetic construct
PWEVLW

SEQ ID NO: 36794 - protein, 6 aa, synthetic construct
PWEVLY

SEQ ID NO: 36795 - protein, 6 aa, synthetic construct
PWEVKD

SEQ ID NO: 36796 - protein, 6 aa, synthetic construct
PWEVKE

SEQ ID NO: 36797 - protein, 6 aa, synthetic construct
PWEVKF

SEQ ID NO: 36798 - protein, 6 aa, synthetic construct
PWEVKW

SEQ ID NO: 36799 - protein, 6 aa, synthetic construct
PWEVKY

SEQ ID NO: 36800 - protein, 6 aa, synthetic construct
PWEVMD

SEQ ID NO: 36801 - protein, 6 aa, synthetic construct
PWEVME

SEQ ID NO: 36802 - protein, 6 aa, synthetic construct
PWEVMF

SEQ ID NO: 36803 - protein, 6 aa, synthetic construct
PWEVMW

SEQ ID NO: 36804 - protein, 6 aa, synthetic construct
PWEVMY

SEQ ID NO: 36805 - protein, 6 aa, synthetic construct
PWEVFD

SEQ ID NO: 36806 - protein, 6 aa, synthetic construct
PWEVFE

SEQ ID NO: 36807 - protein, 6 aa, synthetic construct
PWEVFF

SEQ ID NO: 36808 - protein, 6 aa, synthetic construct
PWEVFW

SEQ ID NO: 36809 - protein, 6 aa, synthetic construct
PWEVFY

SEQ ID NO: 36810 - protein, 6 aa, synthetic construct
PWEVPD

SEQ ID NO: 36811 - protein, 6 aa, synthetic construct
PWEVPE

SEQ ID NO: 36812 - protein, 6 aa, synthetic construct
PWEVPF

SEQ ID NO: 36813 - protein, 6 aa, synthetic construct
PWEVPW

SEQ ID NO: 36814 - protein, 6 aa, synthetic construct
PWEVPY

SEQ ID NO: 36815 - protein, 6 aa, synthetic construct
PWEVSD

SEQ ID NO: 36816 - protein, 6 aa, synthetic construct
PWEVSE

SEQ ID NO: 36817 - protein, 6 aa, synthetic construct
PWEVSF

SEQ ID NO: 36818 - protein, 6 aa, synthetic construct
PWEVSW

SEQ ID NO: 36819 - protein, 6 aa, synthetic construct
PWEVSY

SEQ ID NO: 36820 - protein, 6 aa, synthetic construct
PWEVTD

SEQ ID NO: 36821 - protein, 6 aa, synthetic construct
PWEVTE

SEQ ID NO: 36822 - protein, 6 aa, synthetic construct
PWEVTF

SEQ ID NO: 36823 - protein, 6 aa, synthetic construct
PWEVTW

SEQ ID NO: 36824 - protein, 6 aa, synthetic construct
PWEVTY

SEQ ID NO: 36825 - protein, 6 aa, synthetic construct
PWEVWD

SEQ ID NO: 36826 - protein, 6 aa, synthetic construct
PWEVWE

SEQ ID NO: 36827 - protein, 6 aa, synthetic construct
PWEVWF

SEQ ID NO: 36828 - protein, 6 aa, synthetic construct
PWEVWW

SEQ ID NO: 36829 - protein, 6 aa, synthetic construct
PWEVWY

SEQ ID NO: 36830 - protein, 6 aa, synthetic construct
PWEVYD

SEQ ID NO: 36831 - protein, 6 aa, synthetic construct
PWEVYE

SEQ ID NO: 36832 - protein, 6 aa, synthetic construct
PWEVYF

SEQ ID NO: 36833 - protein, 6 aa, synthetic construct
PWEVYW

SEQ ID NO: 36834 - protein, 6 aa, synthetic construct
PWEVYY

SEQ ID NO: 36835 - protein, 6 aa, synthetic construct
PWEVVD

SEQ ID NO: 36836 - protein, 6 aa, synthetic construct
PWEVVE

SEQ ID NO: 36837 - protein, 6 aa, synthetic construct
PWEVVF

SEQ ID NO: 36838 - protein, 6 aa, synthetic construct
PWEVVW

SEQ ID NO: 36839 - protein, 6 aa, synthetic construct
PWEVVY

SEQ ID NO: 36840 - protein, 6 aa, synthetic construct
PYEAAD

SEQ ID NO: 36841 - protein, 6 aa, synthetic construct
PYEAAE

SEQ ID NO: 36842 - protein, 6 aa, synthetic construct
PYEAAF

SEQ ID NO: 36843 - protein, 6 aa, synthetic construct
PYEAAW

SEQ ID NO: 36844 - protein, 6 aa, synthetic construct
PYEAAY

SEQ ID NO: 36845 - protein, 6 aa, synthetic construct
PYEARD

SEQ ID NO: 36846 - protein, 6 aa, synthetic construct
PYEARE

SEQ ID NO: 36847 - protein, 6 aa, synthetic construct
PYEARF

SEQ ID NO: 36848 - protein, 6 aa, synthetic construct
PYEARW

SEQ ID NO: 36849 - protein, 6 aa, synthetic construct
PYEARY

SEQ ID NO: 36850 - protein, 6 aa, synthetic construct
PYEAND

SEQ ID NO: 36851 - protein, 6 aa, synthetic construct
PYEANE

SEQ ID NO: 36852 - protein, 6 aa, synthetic construct
PYEANF

SEQ ID NO: 36853 - protein, 6 aa, synthetic construct
PYEANW

SEQ ID NO: 36854 - protein, 6 aa, synthetic construct
PYEANY

SEQ ID NO: 36855 - protein, 6 aa, synthetic construct
PYEADD

SEQ ID NO: 36856 - protein, 6 aa, synthetic construct
PYEADE

SEQ ID NO: 36857 - protein, 6 aa, synthetic construct
PYEADF

SEQ ID NO: 36858 - protein, 6 aa, synthetic construct
PYEADW

SEQ ID NO: 36859 - protein, 6 aa, synthetic construct
PYEADY

SEQ ID NO: 36860 - protein, 6 aa, synthetic construct
PYEACD

SEQ ID NO: 36861 - protein, 6 aa, synthetic construct
PYEACE

SEQ ID NO: 36862 - protein, 6 aa, synthetic construct
PYEACF

SEQ ID NO: 36863 - protein, 6 aa, synthetic construct
PYEACW

SEQ ID NO: 36864 - protein, 6 aa, synthetic construct
PYEACY

SEQ ID NO: 36865 - protein, 6 aa, synthetic construct
PYEAQD

SEQ ID NO: 36866 - protein, 6 aa, synthetic construct
PYEAQE

SEQ ID NO: 36867 - protein, 6 aa, synthetic construct
PYEAQF

SEQ ID NO: 36868 - protein, 6 aa, synthetic construct
PYEAQW

SEQ ID NO: 36869 - protein, 6 aa, synthetic construct
PYEAQY

SEQ ID NO: 36870 - protein, 6 aa, synthetic construct
PYEAED

SEQ ID NO: 36871 - protein, 6 aa, synthetic construct
PYEAEE

SEQ ID NO: 36872 - protein, 6 aa, synthetic construct
PYEAEF

SEQ ID NO: 36873 - protein, 6 aa, synthetic construct
PYEAEW

SEQ ID NO: 36874 - protein, 6 aa, synthetic construct
PYEAEY

SEQ ID NO: 36875 - protein, 6 aa, synthetic construct
PYEAGD

SEQ ID NO: 36876 - protein, 6 aa, synthetic construct
PYEAGE

SEQ ID NO: 36877 - protein, 6 aa, synthetic construct
PYEAGF

SEQ ID NO: 36878 - protein, 6 aa, synthetic construct
PYEAGW

SEQ ID NO: 36879 - protein, 6 aa, synthetic construct
PYEAGY

SEQ ID NO: 36880 - protein, 6 aa, synthetic construct
PYEAHD

SEQ ID NO: 36881 - protein, 6 aa, synthetic construct
PYEAHE

SEQ ID NO: 36882 - protein, 6 aa, synthetic construct
PYEAHF

SEQ ID NO: 36883 - protein, 6 aa, synthetic construct
PYEAHW

SEQ ID NO: 36884 - protein, 6 aa, synthetic construct
PYEAHY

SEQ ID NO: 36885 - protein, 6 aa, synthetic construct
PYEAID

SEQ ID NO: 36886 - protein, 6 aa, synthetic construct
PYEAIE

SEQ ID NO: 36887 - protein, 6 aa, synthetic construct
PYEAIF

SEQ ID NO: 36888 - protein, 6 aa, synthetic construct
PYEAIW

SEQ ID NO: 36889 - protein, 6 aa, synthetic construct
PYEAIY

SEQ ID NO: 36890 - protein, 6 aa, synthetic construct
PYEALD

SEQ ID NO: 36891 - protein, 6 aa, synthetic construct
PYEALE

SEQ ID NO: 36892 - protein, 6 aa, synthetic construct
PYEALF

SEQ ID NO: 36893 - protein, 6 aa, synthetic construct
PYEALW

SEQ ID NO: 36894 - protein, 6 aa, synthetic construct
PYEALY

SEQ ID NO: 36895 - protein, 6 aa, synthetic construct
PYEAKD

SEQ ID NO: 36896 - protein, 6 aa, synthetic construct
PYEAKE

SEQ ID NO: 36897 - protein, 6 aa, synthetic construct
PYEAKF

SEQ ID NO: 36898 - protein, 6 aa, synthetic construct
PYEAKW

SEQ ID NO: 36899 - protein, 6 aa, synthetic construct
PYEAKY

SEQ ID NO: 36900 - protein, 6 aa, synthetic construct
PYEAMD

SEQ ID NO: 36901 - protein, 6 aa, synthetic construct
PYEAME

SEQ ID NO: 36902 - protein, 6 aa, synthetic construct
PYEAMF

SEQ ID NO: 36903 - protein, 6 aa, synthetic construct
PYEAMW

SEQ ID NO: 36904 - protein, 6 aa, synthetic construct
PYEAMY

SEQ ID NO: 36905 - protein, 6 aa, synthetic construct
PYEAFD

SEQ ID NO: 36906 - protein, 6 aa, synthetic construct
PYEAFE

SEQ ID NO: 36907 - protein, 6 aa, synthetic construct
PYEAFF

SEQ ID NO: 36908 - protein, 6 aa, synthetic construct
PYEAFW

SEQ ID NO: 36909 - protein, 6 aa, synthetic construct
PYEAFY

SEQ ID NO: 36910 - protein, 6 aa, synthetic construct
PYEAPD

SEQ ID NO: 36911 - protein, 6 aa, synthetic construct
PYEAPE

SEQ ID NO: 36912 - protein, 6 aa, synthetic construct
PYEAPF

SEQ ID NO: 36913 - protein, 6 aa, synthetic construct
PYEAPW

SEQ ID NO: 36914 - protein, 6 aa, synthetic construct
PYEAPY

SEQ ID NO: 36915 - protein, 6 aa, synthetic construct
PYEASD

SEQ ID NO: 36916 - protein, 6 aa, synthetic construct
PYEASE

SEQ ID NO: 36917 - protein, 6 aa, synthetic construct
PYEASF

SEQ ID NO: 36918 - protein, 6 aa, synthetic construct
PYEASW

SEQ ID NO: 36919 - protein, 6 aa, synthetic construct
PYEASY

SEQ ID NO: 36920 - protein, 6 aa, synthetic construct
PYEATD

SEQ ID NO: 36921 - protein, 6 aa, synthetic construct
PYEATE

SEQ ID NO: 36922 - protein, 6 aa, synthetic construct
PYEATF

SEQ ID NO: 36923 - protein, 6 aa, synthetic construct
PYEATW

SEQ ID NO: 36924 - protein, 6 aa, synthetic construct
PYEATY

SEQ ID NO: 36925 - protein, 6 aa, synthetic construct
PYEAWD

SEQ ID NO: 36926 - protein, 6 aa, synthetic construct
PYEAWE

SEQ ID NO: 36927 - protein, 6 aa, synthetic construct
PYEAWF

SEQ ID NO: 36928 - protein, 6 aa, synthetic construct
PYEAWW

SEQ ID NO: 36929 - protein, 6 aa, synthetic construct
PYEAWY

SEQ ID NO: 36930 - protein, 6 aa, synthetic construct
PYEAYD

SEQ ID NO: 36931 - protein, 6 aa, synthetic construct
PYEAYE

SEQ ID NO: 36932 - protein, 6 aa, synthetic construct
PYEAYF

SEQ ID NO: 36933 - protein, 6 aa, synthetic construct
PYEAYW

SEQ ID NO: 36934 - protein, 6 aa, synthetic construct
PYEAYY

SEQ ID NO: 36935 - protein, 6 aa, synthetic construct
PYEAVD

SEQ ID NO: 36936 - protein, 6 aa, synthetic construct
PYEAVE

SEQ ID NO: 36937 - protein, 6 aa, synthetic construct
PYEAVF

SEQ ID NO: 36938 - protein, 6 aa, synthetic construct
PYEAVW

SEQ ID NO: 36939 - protein, 6 aa, synthetic construct
PYEAVY

SEQ ID NO: 36940 - protein, 6 aa, synthetic construct
PYERAD

SEQ ID NO: 36941 - protein, 6 aa, synthetic construct
PYERAE

SEQ ID NO: 36942 - protein, 6 aa, synthetic construct
PYERAF

SEQ ID NO: 36943 - protein, 6 aa, synthetic construct
PYERAW

SEQ ID NO: 36944 - protein, 6 aa, synthetic construct
PYERAY

SEQ ID NO: 36945 - protein, 6 aa, synthetic construct
PYERRD

SEQ ID NO: 36946 - protein, 6 aa, synthetic construct
PYERRE

SEQ ID NO: 36947 - protein, 6 aa, synthetic construct
PYERRF

SEQ ID NO: 36948 - protein, 6 aa, synthetic construct
PYERRW

SEQ ID NO: 36949 - protein, 6 aa, synthetic construct
PYERRY

SEQ ID NO: 36950 - protein, 6 aa, synthetic construct
PYERND

SEQ ID NO: 36951 - protein, 6 aa, synthetic construct
PYERNE

SEQ ID NO: 36952 - protein, 6 aa, synthetic construct
PYERNF

SEQ ID NO: 36953 - protein, 6 aa, synthetic construct
PYERNW

SEQ ID NO: 36954 - protein, 6 aa, synthetic construct
PYERNY

SEQ ID NO: 36955 - protein, 6 aa, synthetic construct
PYERDD

SEQ ID NO: 36956 - protein, 6 aa, synthetic construct
PYERDE

SEQ ID NO: 36957 - protein, 6 aa, synthetic construct
PYERDF

SEQ ID NO: 36958 - protein, 6 aa, synthetic construct
PYERDW

SEQ ID NO: 36959 - protein, 6 aa, synthetic construct
PYERDY

SEQ ID NO: 36960 - protein, 6 aa, synthetic construct
PYERCD

SEQ ID NO: 36961 - protein, 6 aa, synthetic construct
PYERCE

SEQ ID NO: 36962 - protein, 6 aa, synthetic construct
PYERCF

SEQ ID NO: 36963 - protein, 6 aa, synthetic construct
PYERCW

SEQ ID NO: 36964 - protein, 6 aa, synthetic construct
PYERCY

SEQ ID NO: 36965 - protein, 6 aa, synthetic construct
PYERQD

SEQ ID NO: 36966 - protein, 6 aa, synthetic construct
PYERQE

SEQ ID NO: 36967 - protein, 6 aa, synthetic construct
PYERQF

SEQ ID NO: 36968 - protein, 6 aa, synthetic construct
PYERQW

SEQ ID NO: 36969 - protein, 6 aa, synthetic construct
PYERQY

SEQ ID NO: 36970 - protein, 6 aa, synthetic construct
PYERED

SEQ ID NO: 36971 - protein, 6 aa, synthetic construct
PYEREE

SEQ ID NO: 36972 - protein, 6 aa, synthetic construct
PYEREF

SEQ ID NO: 36973 - protein, 6 aa, synthetic construct
PYEREW

SEQ ID NO: 36974 - protein, 6 aa, synthetic construct
PYEREY

SEQ ID NO: 36975 - protein, 6 aa, synthetic construct
PYERGD

SEQ ID NO: 36976 - protein, 6 aa, synthetic construct
PYERGE

SEQ ID NO: 36977 - protein, 6 aa, synthetic construct
PYERGF

SEQ ID NO: 36978 - protein, 6 aa, synthetic construct
PYERGW

SEQ ID NO: 36979 - protein, 6 aa, synthetic construct
PYERGY

SEQ ID NO: 36980 - protein, 6 aa, synthetic construct
PYERHD

SEQ ID NO: 36981 - protein, 6 aa, synthetic construct
PYERHE

SEQ ID NO: 36982 - protein, 6 aa, synthetic construct
PYERHF

SEQ ID NO: 36983 - protein, 6 aa, synthetic construct
PYERHW

SEQ ID NO: 36984 - protein, 6 aa, synthetic construct
PYERHY

SEQ ID NO: 36985 - protein, 6 aa, synthetic construct
PYERID

SEQ ID NO: 36986 - protein, 6 aa, synthetic construct
PYERIE

SEQ ID NO: 36987 - protein, 6 aa, synthetic construct
PYERIF

SEQ ID NO: 36988 - protein, 6 aa, synthetic construct
PYERIW

SEQ ID NO: 36989 - protein, 6 aa, synthetic construct
PYERIY

SEQ ID NO: 36990 - protein, 6 aa, synthetic construct
PYERLD

SEQ ID NO: 36991 - protein, 6 aa, synthetic construct
PYERLE

SEQ ID NO: 36992 - protein, 6 aa, synthetic construct
PYERLF

SEQ ID NO: 36993 - protein, 6 aa, synthetic construct
PYERLW

SEQ ID NO: 36994 - protein, 6 aa, synthetic construct
PYERLY

SEQ ID NO: 36995 - protein, 6 aa, synthetic construct
PYERKD

SEQ ID NO: 36996 - protein, 6 aa, synthetic construct
PYERKE

SEQ ID NO: 36997 - protein, 6 aa, synthetic construct
PYERKF

SEQ ID NO: 36998 - protein, 6 aa, synthetic construct
PYERKW

SEQ ID NO: 36999 - protein, 6 aa, synthetic construct
PYERKY

SEQ ID NO: 37000 - protein, 6 aa, synthetic construct
PYERMD

SEQ ID NO: 37001 - protein, 6 aa, synthetic construct
PYERME

SEQ ID NO: 37002 - protein, 6 aa, synthetic construct
PYERMF

SEQ ID NO: 37003 - protein, 6 aa, synthetic construct
PYERMW

SEQ ID NO: 37004 - protein, 6 aa, synthetic construct
PYERMY

SEQ ID NO: 37005 - protein, 6 aa, synthetic construct
PYERFD

SEQ ID NO: 37006 - protein, 6 aa, synthetic construct
PYERFE

SEQ ID NO: 37007 - protein, 6 aa, synthetic construct
PYERFF

SEQ ID NO: 37008 - protein, 6 aa, synthetic construct
PYERFW

SEQ ID NO: 37009 - protein, 6 aa, synthetic construct
PYERFY

SEQ ID NO: 37010 - protein, 6 aa, synthetic construct
PYERPD

(The sequence listing continues in the following parts.)

1-24. (canceled)

25. A CD40 domain that comprises an amino acid sequence of one or more of the following:
a. A TRAF2/TRAF3 domain that comprises an amino acid sequence of Consensus A, or X₁X₂X₃X₄X₅X₆X₇X₈X₉X₁₀X₁₁, wherein:
i. X₁ is any amino acid,
ii. X₂ is any amino acid,
iii. X₃ is P, X₄ is any amino acid,
iv. X₅ is Q,
v. X₆ is C or A,
vi. X₇ is any amino acid,
vii. X₈ is any amino acid,
viii. X₉ is any amino acid,
ix. X₁₀ is any amino acid, and
x. X₁₁ is any amino acid.
b. A TRAF2/TRAF3 domain that comprises an amino acid sequence of Consensus B, or X₁X₂X₃X₄X₅X₆X₇X₈X₉X₁₀X₁₁, wherein:
i. X₁ is any amino acid,
ii. X₂ is any amino acid,
iii. X₃ is P, S, A, or T,
iv. X₄ is any amino acid,
v. X₅ is Q or E,
vi. X₆ is E,
vii. X₇ is any amino acid,
viii. X₈ is any amino acid,
ix. X₉ is any amino acid,
x. X₁₀ is any amino acid, and
xi. X₁₁ is any amino acid.
c. A TRAF 6 domain that comprises an amino acid sequence of Consensus C, or X₁X₂X₃X₄X₅X₆, wherein:
i. X₁ is P,
ii. X₂ is any amino acid,
iii. X₃ is E,
iv. X₄ is any amino acid,
v. X₅ is any amino acid, and
vi. X₆ is Ac/Ar.

26. An chimeric costimulatory antigen receptor (CoStAR) which comprises:
an extracellular binding domain that binds to carcinoembryonic antigen (CEA), or an extracellular binding domain that binds to mesothelin (MSLN);
a transmembrane domain that is linked to the extracellular binding domain, a first signaling domain; and
a second signaling domain, wherein the second signaling domain comprises a variant CD40 signaling domain or a signaling fragment thereof, wherein the variant CD40 comprises a sequence of a variant TRAF2/TRAF3 sequence, or a variant TRAF6 sequence, or a variant TRAF2 sequence, wherein the variant CD40 does not comprise SEQ ID NO: 42.

27. The CoStAR of claim 26, wherein the first signalling domain comprises a signalling domain or signaling fragment of CD28 or CD278 (ICOS).

28. The CoStAR of claim 26, wherein the first signalling domain comprises a full-length costimulatory domain.

29. The CoStAR of claim 26, wherein the extracellular binding domain is operatively linked to the transmembrane domain by a linker and/or a spacer.

30. The CoStAR of claim 29, wherein the linker comprises from about 5 to about 20 amino acids.

31. The CoStAR of claim 29, wherein the linker comprises from about 10 to about 250 amino acids.

32. The CoStAR of claim 29, wherein the transmembrane domain comprises a transmembrane domain from CD28, CD8, ICOS, DAP10, or NTRK.

33. The CoStAR of claim 29, wherein the transmembrane domain comprises the transmembrane domain sequence of SEQ ID NO:20, SEQ ID NO:21, or SEQ ID NO:22.

34. The CoStAR of claim 29, wherein the extracellular binding domain comprises an scFv, a peptide, an antibody heavy-chain variable domain, an antibody light-chain variable domain, or a CEA ligand.

35-36. (canceled)

37. A cell which expresses a CoStAR comprising:
(i) an extracellular binding domain that binds to carcinoembryonic antigen (CEA), or an extracellular binding domain that binds to mesothelin (MSLN);
a transmembrane domain that is linked to the extracellular binding domain, a first signaling domain; and
a second signaling domain, wherein the second signaling domain comprises a variant CD40 signaling domain or a signaling fragment thereof, wherein the variant CD40 comprises a sequence of a variant TRAF2/TRAF3 sequence, or a variant TRAF6 sequence, or a variant TRAF2 sequence, wherein the variant CD40 does not comprise SEQ ID NO: 42; or
(ii) a CD40 domain that comprises an amino acid sequence of one or more of the following:
a. A TRAF2/TRAF3 domain that comprises an amino acid sequence of Consensus A, or X₁X₂X₃X₄X₅X₆X₇X₈X₉X₁₀X₁₁, wherein:
i. X₁ is any amino acid,
ii. X₂ is any amino acid,
iii. X₃ is P, X₄ is any amino acid,
iv. X₅ is Q,
v. X₆ is C or A,
vi. X₇ is any amino acid,
vii. X₈ is any amino acid,
viii. X₉ is any amino acid,
ix. X₁₀ is any amino acid, and
x. X₁₁ is any amino acid.
b. A TRAF2/TRAF3 domain that comprises an amino acid sequence of Consensus B, or X₁X₂X₃X₄X₅X₆X₇X₈X₉X₁₀X₁₁, wherein:
i. X₁ is any amino acid,
ii. X₂ is any amino acid,
iii. X₃ is P, S, A, or T,
iv. X₄ is any amino acid,
v. X₅ is Q or E,
vi. X₆ is E,
vii. X₇ is any amino acid,
viii. X₈ is any amino acid,
ix. X₉ is any amino acid,
x. X₁₀ is any amino acid, and
xi. X₁₁ is any amino acid.
c. A TRAF 6 domain that comprises an amino acid sequence of Consensus C, or X₁X₂X₃X₄X₅X₆, wherein:
i. X₁ is P,
ii. X₂ is any amino acid,
iii. X₃ is E,
iv. X₄ is any amino acid,
v. X₅ is any amino acid, and
vi. X₆ is Ac/Ar.

38. The cell of claim 37, wherein the cell comprises an alpha-beta T cell, gamma-delta T cell, T regulatory cell, TIL, NKT cell or NK cell.

39. The cell of claim 37, wherein the cell coexpresses a CAR or a TCR.

40-54. (canceled)

55. The CD40 domain of claim 25, further comprising:
a. one or more of SEQ ID NOs: 475, 476, 477, 478, 479, 494, 495, 496, 498, 505, 510, 511, 512, 513, 514, 515, 516, 517, 518, or 519;
b. a sequence that is at least 70% identical to a sequence in a); or
c. a sequence that is at least 80% similar to a).

54. The CD40 domain of claim 25, wherein the TRAF6 domain sequence comprises PQEINF, PEEMSW, PPENYE, or PQENSY.

55. The CD40 domain of claim 25, wherein the TRAF2/3 domain sequence comprises PVQET, TQEET, SKEET, AVEET, or PVQET.

56. The CD40 domain of claim 25, wherein the TRAF2 domain sequence comprises SVQE, AVEE or PEEE.
